United States Patent Application Publication US 2015/0232836 A1 - sequence listing, part 12

SEQ ID NO: 356942 - DNA, 15 bp, Homo sapiens
gcagactggggcttc

SEQ ID NO: 356943 - DNA, 15 bp, Homo sapiens
ggcagactggggctt

SEQ ID NO: 356944 - DNA, 15 bp, Homo sapiens
gggcagactggggct

SEQ ID NO: 356945 - DNA, 15 bp, Homo sapiens
ggggcagactggggc

SEQ ID NO: 356946 - DNA, 15 bp, Homo sapiens
cggggcagactgggg

SEQ ID NO: 356947 - DNA, 15 bp, Homo sapiens
ccggggcagactggg

SEQ ID NO: 356948 - DNA, 15 bp, Homo sapiens
cccggggcagactgg

SEQ ID NO: 356949 - DNA, 15 bp, Homo sapiens
ccccggggcagactg

SEQ ID NO: 356950 - DNA, 15 bp, Homo sapiens
gccccggggcagact

SEQ ID NO: 356951 - DNA, 15 bp, Homo sapiens
agccccggggcagac

SEQ ID NO: 356952 - DNA, 15 bp, Homo sapiens
aagccccggggcaga

SEQ ID NO: 356953 - DNA, 15 bp, Homo sapiens
gaagccccggggcag

SEQ ID NO: 356954 - DNA, 15 bp, Homo sapiens
ggaagccccggggca

SEQ ID NO: 356955 - DNA, 15 bp, Homo sapiens
aggaagccccggggc

SEQ ID NO: 356956 - DNA, 15 bp, Homo sapiens
caggaagccccgggg

SEQ ID NO: 356957 - DNA, 15 bp, Homo sapiens
ccaggaagccccggg

SEQ ID NO: 356958 - DNA, 15 bp, Homo sapiens
tccaggaagccccgg

SEQ ID NO: 356959 - DNA, 15 bp, Homo sapiens
ctccaggaagccccg

SEQ ID NO: 356960 - DNA, 15 bp, Homo sapiens
tctccaggaagcccc

SEQ ID NO: 356961 - DNA, 15 bp, Homo sapiens
gtctccaggaagccc

SEQ ID NO: 356962 - DNA, 15 bp, Homo sapiens
agtctccaggaagcc

SEQ ID NO: 356963 - DNA, 15 bp, Homo sapiens
gagtctccaggaagc

SEQ ID NO: 356964 - DNA, 15 bp, Homo sapiens
agagtctccaggaag

SEQ ID NO: 356965 - DNA, 15 bp, Homo sapiens
aagagtctccaggaa

SEQ ID NO: 356966 - DNA, 15 bp, Homo sapiens
gaagagtctccagga

SEQ ID NO: 356967 - DNA, 15 bp, Homo sapiens
agaagagtctccagg

SEQ ID NO: 356968 - DNA, 15 bp, Homo sapiens
gagaagagtctccag

SEQ ID NO: 356969 - DNA, 15 bp, Homo sapiens
cgagaagagtctcca

SEQ ID NO: 356970 - DNA, 15 bp, Homo sapiens
ccgagaagagtctcc

SEQ ID NO: 356971 - DNA, 15 bp, Homo sapiens
cccgagaagagtctc

SEQ ID NO: 356972 - DNA, 15 bp, Homo sapiens
acccgagaagagtct

SEQ ID NO: 356973 - DNA, 15 bp, Homo sapiens
aacccgagaagagtc

SEQ ID NO: 356974 - DNA, 15 bp, Homo sapiens
caacccgagaagagt

SEQ ID NO: 356975 - DNA, 15 bp, Homo sapiens
acaacccgagaagag

SEQ ID NO: 356976 - DNA, 15 bp, Homo sapiens
cacaacccgagaaga

SEQ ID NO: 356977 - DNA, 15 bp, Homo sapiens
acacaacccgagaag

SEQ ID NO: 356978 - DNA, 15 bp, Homo sapiens
gacacaacccgagaa

SEQ ID NO: 356979 - DNA, 15 bp, Homo sapiens
tgacacaacccgaga

SEQ ID NO: 356980 - DNA, 15 bp, Homo sapiens
ctgacacaacccgag

SEQ ID NO: 356981 - DNA, 15 bp, Homo sapiens
gctgacacaacccga

SEQ ID NO: 356982 - DNA, 15 bp, Homo sapiens
ggctgacacaacccg

SEQ ID NO: 356983 - DNA, 15 bp, Homo sapiens
aggctgacacaaccc

SEQ ID NO: 356984 - DNA, 15 bp, Homo sapiens
gaggctgacacaacc

SEQ ID NO: 356985 - DNA, 15 bp, Homo sapiens
cgaggctgacacaac

SEQ ID NO: 356986 - DNA, 15 bp, Homo sapiens
ccgaggctgacacaa

SEQ ID NO: 356987 - DNA, 15 bp, Homo sapiens
cccgaggctgacaca

SEQ ID NO: 356988 - DNA, 15 bp, Homo sapiens
acccgaggctgacac

SEQ ID NO: 356989 - DNA, 15 bp, Homo sapiens
gacccgaggctgaca

SEQ ID NO: 356990 - DNA, 15 bp, Homo sapiens
cgacccgaggctgac

SEQ ID NO: 356991 - DNA, 15 bp, Homo sapiens
ccgacccgaggctga

SEQ ID NO: 356992 - DNA, 15 bp, Homo sapiens
cccgacccgaggctg

SEQ ID NO: 356993 - DNA, 15 bp, Homo sapiens
ccccgacccgaggct

SEQ ID NO: 356994 - DNA, 15 bp, Homo sapiens
accccgacccgaggc

SEQ ID NO: 356995 - DNA, 15 bp, Homo sapiens
gaccccgacccgagg

SEQ ID NO: 356996 - DNA, 15 bp, Homo sapiens
ggaccccgacccgag

SEQ ID NO: 356997 - DNA, 15 bp, Homo sapiens
aggaccccgacccga

SEQ ID NO: 356998 - DNA, 15 bp, Homo sapiens
caggaccccgacccg

SEQ ID NO: 356999 - DNA, 15 bp, Homo sapiens
ccaggaccccgaccc

SEQ ID NO: 357000 - DNA, 15 bp, Homo sapiens
cccaggaccccgacc

SEQ ID NO: 357001 - DNA, 15 bp, Homo sapiens
ccccaggaccccgac

SEQ ID NO: 357002 - DNA, 15 bp, Homo sapiens
gccccaggaccccga

SEQ ID NO: 357003 - DNA, 15 bp, Homo sapiens
ggccccaggaccccg

SEQ ID NO: 357004 - DNA, 15 bp, Homo sapiens
aggccccaggacccc

SEQ ID NO: 357005 - DNA, 15 bp, Homo sapiens
gaggccccaggaccc

SEQ ID NO: 357006 - DNA, 15 bp, Homo sapiens
cgaggccccaggacc

SEQ ID NO: 357007 - DNA, 15 bp, Homo sapiens
ccgaggccccaggac

SEQ ID NO: 357008 - DNA, 15 bp, Homo sapiens
tccgaggccccagga

SEQ ID NO: 357009 - DNA, 15 bp, Homo sapiens
ctccgaggccccagg

SEQ ID NO: 357010 - DNA, 15 bp, Homo sapiens
gctccgaggccccag

SEQ ID NO: 357011 - DNA, 15 bp, Homo sapiens
ggctccgaggcccca

SEQ ID NO: 357012 - DNA, 15 bp, Homo sapiens
aggctccgaggcccc

SEQ ID NO: 357013 - DNA, 15 bp, Homo sapiens
caggctccgaggccc

SEQ ID NO: 357014 - DNA, 15 bp, Homo sapiens
ccaggctccgaggcc

SEQ ID NO: 357015 - DNA, 15 bp, Homo sapiens
gccaggctccgaggc

SEQ ID NO: 357016 - DNA, 15 bp, Homo sapiens
tgccaggctccgagg

SEQ ID NO: 357017 - DNA, 15 bp, Homo sapiens
gtgccaggctccgag

SEQ ID NO: 357018 - DNA, 15 bp, Homo sapiens
tgtgccaggctccga

SEQ ID NO: 357019 - DNA, 15 bp, Homo sapiens
ctgtgccaggctccg

SEQ ID NO: 357020 - DNA, 15 bp, Homo sapiens
gctgtgccaggctcc

SEQ ID NO: 357021 - DNA, 15 bp, Homo sapiens
tgctgtgccaggctc

SEQ ID NO: 357022 - DNA, 15 bp, Homo sapiens
atgctgtgccaggct

SEQ ID NO: 357023 - DNA, 15 bp, Homo sapiens
gatgctgtgccaggc

SEQ ID NO: 357024 - DNA, 15 bp, Homo sapiens
tgatgctgtgccagg

SEQ ID NO: 357025 - DNA, 15 bp, Homo sapiens
ctgatgctgtgccag

SEQ ID NO: 357026 - DNA, 15 bp, Homo sapiens
gctgatgctgtgcca

SEQ ID NO: 357027 - DNA, 15 bp, Homo sapiens
tgctgatgctgtgcc

SEQ ID NO: 357028 - DNA, 15 bp, Homo sapiens
ctgctgatgctgtgc

SEQ ID NO: 357029 - DNA, 15 bp, Homo sapiens
gctgctgatgctgtg

SEQ ID NO: 357030 - DNA, 15 bp, Homo sapiens
ggctgctgatgctgt

SEQ ID NO: 357031 - DNA, 15 bp, Homo sapiens
tggctgctgatgctg

SEQ ID NO: 357032 - DNA, 15 bp, Homo sapiens
gtggctgctgatgct

SEQ ID NO: 357033 - DNA, 15 bp, Homo sapiens
cgtggctgctgatgc

SEQ ID NO: 357034 - DNA, 15 bp, Homo sapiens
gcgtggctgctgatg

SEQ ID NO: 357035 - DNA, 15 bp, Homo sapiens
cgcgtggctgctgat

SEQ ID NO: 357036 - DNA, 15 bp, Homo sapiens
ccgcgtggctgctga

SEQ ID NO: 357037 - DNA, 15 bp, Homo sapiens
cccgcgtggctgctg

SEQ ID NO: 357038 - DNA, 15 bp, Homo sapiens
tcccgcgtggctgct

SEQ ID NO: 357039 - DNA, 15 bp, Homo sapiens
ctcccgcgtggctgc

SEQ ID NO: 357040 - DNA, 15 bp, Homo sapiens
cctcccgcgtggctg

SEQ ID NO: 357041 - DNA, 15 bp, Homo sapiens
gcctcccgcgtggct

SEQ ID NO: 357042 - DNA, 15 bp, Homo sapiens
tgcctcccgcgtggc

SEQ ID NO: 357043 - DNA, 15 bp, Homo sapiens
ctgcctcccgcgtgg

SEQ ID NO: 357044 - DNA, 15 bp, Homo sapiens
gctgcctcccgcgtg

SEQ ID NO: 357045 - DNA, 15 bp, Homo sapiens
tgctgcctcccgcgt

SEQ ID NO: 357046 - DNA, 15 bp, Homo sapiens
atgctgcctcccgcg

SEQ ID NO: 357047 - DNA, 15 bp, Homo sapiens
gatgctgcctcccgc

SEQ ID NO: 357048 - DNA, 15 bp, Homo sapiens
cgatgctgcctcccg

SEQ ID NO: 357049 - DNA, 15 bp, Homo sapiens
acgatgctgcctccc

SEQ ID NO: 357050 - DNA, 15 bp, Homo sapiens
aacgatgctgcctcc

SEQ ID NO: 357051 - DNA, 15 bp, Homo sapiens
caacgatgctgcctc

SEQ ID NO: 357052 - DNA, 15 bp, Homo sapiens
acaacgatgctgcct

SEQ ID NO: 357053 - DNA, 15 bp, Homo sapiens
cacaacgatgctgcc

SEQ ID NO: 357054 - DNA, 15 bp, Homo sapiens
gcacaacgatgctgc

SEQ ID NO: 357055 - DNA, 15 bp, Homo sapiens
tgcacaacgatgctg

SEQ ID NO: 357056 - DNA, 15 bp, Homo sapiens
ttgcacaacgatgct

SEQ ID NO: 357057 - DNA, 15 bp, Homo sapiens
tttgcacaacgatgc

SEQ ID NO: 357058 - DNA, 15 bp, Homo sapiens
ctttgcacaacgatg

SEQ ID NO: 357059 - DNA, 15 bp, Homo sapiens
actttgcacaacgat

SEQ ID NO: 357060 - DNA, 15 bp, Homo sapiens
aactttgcacaacga

SEQ ID NO: 357061 - DNA, 15 bp, Homo sapiens
gaactttgcacaacg

SEQ ID NO: 357062 - DNA, 15 bp, Homo sapiens
agaactttgcacaac

SEQ ID NO: 357063 - DNA, 15 bp, Homo sapiens
cagaactttgcacaa

SEQ ID NO: 357064 - DNA, 15 bp, Homo sapiens
ccagaactttgcaca

SEQ ID NO: 357065 - DNA, 15 bp, Homo sapiens
tccagaactttgcac

SEQ ID NO: 357066 - DNA, 15 bp, Homo sapiens
ctccagaactttgca

SEQ ID NO: 357067 - DNA, 15 bp, Homo sapiens
tctccagaactttgc

SEQ ID NO: 357068 - DNA, 15 bp, Homo sapiens
ttctccagaactttg

SEQ ID NO: 357069 - DNA, 15 bp, Homo sapiens
gttctccagaacttt

SEQ ID NO: 357070 - DNA, 15 bp, Homo sapiens
tgttctccagaactt

SEQ ID NO: 357071 - DNA, 15 bp, Homo sapiens
gtgttctccagaact

SEQ ID NO: 357072 - DNA, 15 bp, Homo sapiens
agtgttctccagaac

SEQ ID NO: 357073 - DNA, 15 bp, Homo sapiens
cagtgttctccagaa

SEQ ID NO: 357074 - DNA, 15 bp, Homo sapiens
tcagtgttctccaga

SEQ ID NO: 357075 - DNA, 15 bp, Homo sapiens
atcagtgttctccag

SEQ ID NO: 357076 - DNA, 15 bp, Homo sapiens
aatcagtgttctcca

SEQ ID NO: 357077 - DNA, 15 bp, Homo sapiens
caatcagtgttctcc

SEQ ID NO: 357078 - DNA, 15 bp, Homo sapiens
ccaatcagtgttctc

SEQ ID NO: 357079 - DNA, 15 bp, Homo sapiens
cccaatcagtgttct

SEQ ID NO: 357080 - DNA, 15 bp, Homo sapiens
ccccaatcagtgttc

SEQ ID NO: 357081 - DNA, 15 bp, Homo sapiens
tccccaatcagtgtt

SEQ ID NO: 357082 - DNA, 15 bp, Homo sapiens
ttccccaatcagtgt

SEQ ID NO: 357083 - DNA, 15 bp, Homo sapiens
cttccccaatcagtg

SEQ ID NO: 357084 - DNA, 15 bp, Homo sapiens
ccttccccaatcagt

SEQ ID NO: 357085 - DNA, 15 bp, Homo sapiens
cccttccccaatcag

SEQ ID NO: 357086 - DNA, 15 bp, Homo sapiens
ccccttccccaatca

SEQ ID NO: 357087 - DNA, 15 bp, Homo sapiens
cccccttccccaatc

SEQ ID NO: 357088 - DNA, 15 bp, Homo sapiens
ccccccttccccaat

SEQ ID NO: 357089 - DNA, 15 bp, Homo sapiens
gccccccttccccaa

SEQ ID NO: 357090 - DNA, 15 bp, Homo sapiens
tgccccccttcccca

SEQ ID NO: 357091 - DNA, 15 bp, Homo sapiens
atgccccccttcccc

SEQ ID NO: 357092 - DNA, 15 bp, Homo sapiens
gatgccccccttccc

SEQ ID NO: 357093 - DNA, 15 bp, Homo sapiens
tgatgccccccttcc

SEQ ID NO: 357094 - DNA, 15 bp, Homo sapiens
gtgatgccccccttc

SEQ ID NO: 357095 - DNA, 15 bp, Homo sapiens
tgtgatgcccccctt

SEQ ID NO: 357096 - DNA, 15 bp, Homo sapiens
ctgtgatgcccccct

SEQ ID NO: 357097 - DNA, 15 bp, Homo sapiens
cctgtgatgcccccc

SEQ ID NO: 357098 - DNA, 15 bp, Homo sapiens
ccctgtgatgccccc

SEQ ID NO: 357099 - DNA, 15 bp, Homo sapiens
cccctgtgatgcccc

SEQ ID NO: 357100 - DNA, 15 bp, Homo sapiens
tcccctgtgatgccc

SEQ ID NO: 357101 - DNA, 15 bp, Homo sapiens
gtcccctgtgatgcc

SEQ ID NO: 357102 - DNA, 15 bp, Homo sapiens
tgtcccctgtgatgc

SEQ ID NO: 357103 - DNA, 15 bp, Homo sapiens
ttgtcccctgtgatg

SEQ ID NO: 357104 - DNA, 15 bp, Homo sapiens
cttgtcccctgtgat

SEQ ID NO: 357105 - DNA, 15 bp, Homo sapiens
ccttgtcccctgtga

SEQ ID NO: 357106 - DNA, 15 bp, Homo sapiens
accttgtcccctgtg

SEQ ID NO: 357107 - DNA, 15 bp, Homo sapiens
caccttgtcccctgt

SEQ ID NO: 357108 - DNA, 15 bp, Homo sapiens
ccaccttgtcccctg

SEQ ID NO: 357109 - DNA, 15 bp, Homo sapiens
tccaccttgtcccct

SEQ ID NO: 357110 - DNA, 15 bp, Homo sapiens
ctccaccttgtcccc

SEQ ID NO: 357111 - DNA, 15 bp, Homo sapiens
cctccaccttgtccc

SEQ ID NO: 357112 - DNA, 15 bp, Homo sapiens
acctccaccttgtcc

SEQ ID NO: 357113 - DNA, 15 bp, Homo sapiens
cacctccaccttgtc

SEQ ID NO: 357114 - DNA, 15 bp, Homo sapiens
ccacctccaccttgt

SEQ ID NO: 357115 - DNA, 15 bp, Homo sapiens
cccacctccaccttg

SEQ ID NO: 357116 - DNA, 15 bp, Homo sapiens
ccccacctccacctt

SEQ ID NO: 357117 - DNA, 15 bp, Homo sapiens
accccacctccacct

SEQ ID NO: 357118 - DNA, 15 bp, Homo sapiens
gaccccacctccacc

SEQ ID NO: 357119 - DNA, 15 bp, Homo sapiens
ggaccccacctccac

SEQ ID NO: 357120 - DNA, 15 bp, Homo sapiens
aggaccccacctcca

SEQ ID NO: 357121 - DNA, 15 bp, Homo sapiens
taggaccccacctcc

SEQ ID NO: 357122 - DNA, 15 bp, Homo sapiens
ataggaccccacctc

SEQ ID NO: 357123 - DNA, 15 bp, Homo sapiens
cataggaccccacct

SEQ ID NO: 357124 - DNA, 15 bp, Homo sapiens
gcataggaccccacc

SEQ ID NO: 357125 - DNA, 15 bp, Homo sapiens
agcataggaccccac

SEQ ID NO: 357126 - DNA, 15 bp, Homo sapiens
gagcataggacccca

SEQ ID NO: 357127 - DNA, 15 bp, Homo sapiens
ggagcataggacccc

SEQ ID NO: 357128 - DNA, 15 bp, Homo sapiens
gggagcataggaccc

SEQ ID NO: 357129 - DNA, 15 bp, Homo sapiens
agggagcataggacc

SEQ ID NO: 357130 - DNA, 15 bp, Homo sapiens
aagggagcataggac

SEQ ID NO: 357131 - DNA, 15 bp, Homo sapiens
gaagggagcatagga

SEQ ID NO: 357132 - DNA, 15 bp, Homo sapiens
ggaagggagcatagg

SEQ ID NO: 357133 - DNA, 15 bp, Homo sapiens
gggaagggagcatag

SEQ ID NO: 357134 - DNA, 15 bp, Homo sapiens
agggaagggagcata

SEQ ID NO: 357135 - DNA, 15 bp, Homo sapiens
cagggaagggagcat

SEQ ID NO: 357136 - DNA, 15 bp, Homo sapiens
ccagggaagggagca

SEQ ID NO: 357137 - DNA, 15 bp, Homo sapiens
gccagggaagggagc

SEQ ID NO: 357138 - DNA, 15 bp, Homo sapiens
ggccagggaagggag

SEQ ID NO: 357139 - DNA, 15 bp, Homo sapiens
gggccagggaaggga

SEQ ID NO: 357140 - DNA, 15 bp, Homo sapiens
ggggccagggaaggg

SEQ ID NO: 357141 - DNA, 15 bp, Homo sapiens
gggggccagggaagg

SEQ ID NO: 357142 - DNA, 15 bp, Homo sapiens
tgggggccagggaag

SEQ ID NO: 357143 - DNA, 15 bp, Homo sapiens
ctgggggccagggaa

SEQ ID NO: 357144 - DNA, 15 bp, Homo sapiens
gctgggggccaggga

SEQ ID NO: 357145 - DNA, 15 bp, Homo sapiens
ggctgggggccaggg

SEQ ID NO: 357146 - DNA, 15 bp, Homo sapiens
aggctgggggccagg

SEQ ID NO: 357147 - DNA, 15 bp, Homo sapiens
gaggctgggggccag

SEQ ID NO: 357148 - DNA, 15 bp, Homo sapiens
tgaggctgggggcca

SEQ ID NO: 357149 - DNA, 15 bp, Homo sapiens
ctgaggctgggggcc

SEQ ID NO: 357150 - DNA, 15 bp, Homo sapiens
cctgaggctgggggc

SEQ ID NO: 357151 - DNA, 15 bp, Homo sapiens
ccctgaggctggggg

SEQ ID NO: 357152 - DNA, 15 bp, Homo sapiens
tccctgaggctgggg

SEQ ID NO: 357153 - DNA, 15 bp, Homo sapiens
ttccctgaggctggg

SEQ ID NO: 357154 - DNA, 15 bp, Homo sapiens
gttccctgaggctgg

SEQ ID NO: 357155 - DNA, 15 bp, Homo sapiens
tgttccctgaggctg

SEQ ID NO: 357156 - DNA, 15 bp, Homo sapiens
ttgttccctgaggct

SEQ ID NO: 357157 - DNA, 15 bp, Homo sapiens
cttgttccctgaggc

SEQ ID NO: 357158 - DNA, 15 bp, Homo sapiens
ccttgttccctgagg

SEQ ID NO: 357159 - DNA, 15 bp, Homo sapiens
cccttgttccctgag

SEQ ID NO: 357160 - DNA, 15 bp, Homo sapiens
gcccttgttccctga

SEQ ID NO: 357161 - DNA, 15 bp, Homo sapiens
tgcccttgttccctg

SEQ ID NO: 357162 - DNA, 15 bp, Homo sapiens
gtgcccttgttccct

SEQ ID NO: 357163 - DNA, 15 bp, Homo sapiens
tgtgcccttgttccc

SEQ ID NO: 357164 - DNA, 15 bp, Homo sapiens
ctgtgcccttgttcc

SEQ ID NO: 357165 - DNA, 15 bp, Homo sapiens
cctgtgcccttgttc

SEQ ID NO: 357166 - DNA, 15 bp, Homo sapiens
ccctgtgcccttgtt

SEQ ID NO: 357167 - DNA, 15 bp, Homo sapiens
cccctgtgcccttgt

SEQ ID NO: 357168 - DNA, 15 bp, Homo sapiens
acccctgtgcccttg

SEQ ID NO: 357169 - DNA, 15 bp, Homo sapiens
gacccctgtgccctt

SEQ ID NO: 357170 - DNA, 15 bp, Homo sapiens
agacccctgtgccct

SEQ ID NO: 357171 - DNA, 15 bp, Homo sapiens
aagacccctgtgccc

SEQ ID NO: 357172 - DNA, 15 bp, Homo sapiens
gaagacccctgtgcc

SEQ ID NO: 357173 - DNA, 15 bp, Homo sapiens
agaagacccctgtgc

SEQ ID NO: 357174 - DNA, 15 bp, Homo sapiens
gagaagacccctgtg

SEQ ID NO: 357175 - DNA, 15 bp, Homo sapiens
ggagaagacccctgt

SEQ ID NO: 357176 - DNA, 15 bp, Homo sapiens
gggagaagacccctg

SEQ ID NO: 357177 - DNA, 15 bp, Homo sapiens
ggggagaagacccct

SEQ ID NO: 357178 - DNA, 15 bp, Homo sapiens
gggggagaagacccc

SEQ ID NO: 357179 - DNA, 15 bp, Homo sapiens
agggggagaagaccc

SEQ ID NO: 357180 - DNA, 15 bp, Homo sapiens
gagggggagaagacc

SEQ ID NO: 357181 - DNA, 15 bp, Homo sapiens
ggagggggagaagac

SEQ ID NO: 357182 - DNA, 15 bp, Homo sapiens
gggagggggagaaga

SEQ ID NO: 357183 - DNA, 15 bp, Homo sapiens
ggggagggggagaag

SEQ ID NO: 357184 - DNA, 15 bp, Homo sapiens
gggggagggggagaa

SEQ ID NO: 357185 - DNA, 15 bp, Homo sapiens
tgggggagggggaga

SEQ ID NO: 357186 - DNA, 15 bp, Homo sapiens
ctgggggagggggag

SEQ ID NO: 357187 - DNA, 15 bp, Homo sapiens
tctgggggaggggga

SEQ ID NO: 357188 - DNA, 15 bp, Homo sapiens
ctctgggggaggggg

SEQ ID NO: 357189 - DNA, 15 bp, Homo sapiens
cctctgggggagggg

SEQ ID NO: 357190 - DNA, 15 bp, Homo sapiens
gcctctgggggaggg

SEQ ID NO: 357191 - DNA, 15 bp, Homo sapiens
ggcctctgggggagg

SEQ ID NO: 357192 - DNA, 15 bp, Homo sapiens
gggcctctgggggag

SEQ ID NO: 357193 - DNA, 15 bp, Homo sapiens
tgggcctctggggga

SEQ ID NO: 357194 - DNA, 15 bp, Homo sapiens
ctgggcctctggggg

SEQ ID NO: 357195 - DNA, 15 bp, Homo sapiens
cctgggcctctgggg

SEQ ID NO: 357196 - DNA, 15 bp, Homo sapiens
tcctgggcctctggg

SEQ ID NO: 357197 - DNA, 15 bp, Homo sapiens
gtcctgggcctctgg

SEQ ID NO: 357198 - DNA, 15 bp, Homo sapiens
cgtcctgggcctctg

SEQ ID NO: 357199 - DNA, 15 bp, Homo sapiens
ccgtcctgggcctct

SEQ ID NO: 357200 - DNA, 15 bp, Homo sapiens
cccgtcctgggcctc

SEQ ID NO: 357201 - DNA, 15 bp, Homo sapiens
ccccgtcctgggcct

SEQ ID NO: 357202 - DNA, 15 bp, Homo sapiens
tccccgtcctgggcc

SEQ ID NO: 357203 - DNA, 15 bp, Homo sapiens
gtccccgtcctgggc

SEQ ID NO: 357204 - DNA, 15 bp, Homo sapiens
agtccccgtcctggg

SEQ ID NO: 357205 - DNA, 15 bp, Homo sapiens
aagtccccgtcctgg

SEQ ID NO: 357206 - DNA, 15 bp, Homo sapiens
caagtccccgtcctg

SEQ ID NO: 357207 - DNA, 15 bp, Homo sapiens
ccaagtccccgtcct

SEQ ID NO: 357208 - DNA, 15 bp, Homo sapiens
cccaagtccccgtcc

SEQ ID NO: 357209 - DNA, 15 bp, Homo sapiens
ccccaagtccccgtc

SEQ ID NO: 357210 - DNA, 15 bp, Homo sapiens
tccccaagtccccgt

SEQ ID NO: 357211 - DNA, 15 bp, Homo sapiens
ctccccaagtccccg

SEQ ID NO: 357212 - DNA, 15 bp, Homo sapiens
tctccccaagtcccc

SEQ ID NO: 357213 - DNA, 15 bp, Homo sapiens
gtctccccaagtccc

SEQ ID NO: 357214 - DNA, 15 bp, Homo sapiens
ggtctccccaagtcc

SEQ ID NO: 357215 - DNA, 15 bp, Homo sapiens
tggtctccccaagtc

SEQ ID NO: 357216 - DNA, 15 bp, Homo sapiens
ctggtctccccaagt

SEQ ID NO: 357217 - DNA, 15 bp, Homo sapiens
tctggtctccccaag

SEQ ID NO: 357218 - DNA, 15 bp, Homo sapiens
gtctggtctccccaa

SEQ ID NO: 357219 - DNA, 15 bp, Homo sapiens
tgtctggtctcccca

SEQ ID NO: 357220 - DNA, 15 bp, Homo sapiens
ttgtctggtctcccc

SEQ ID NO: 357221 - DNA, 15 bp, Homo sapiens
cttgtctggtctccc

SEQ ID NO: 357222 - DNA, 15 bp, Homo sapiens
ccttgtctggtctcc

SEQ ID NO: 357223 - DNA, 15 bp, Homo sapiens
cccttgtctggtctc

SEQ ID NO: 357224 - DNA, 15 bp, Homo sapiens
acccttgtctggtct

SEQ ID NO: 357225 - DNA, 15 bp, Homo sapiens
aacccttgtctggtc

SEQ ID NO: 357226 - DNA, 15 bp, Homo sapiens
aaacccttgtctggt

SEQ ID NO: 357227 - DNA, 15 bp, Homo sapiens
gaaacccttgtctgg

SEQ ID NO: 357228 - DNA, 15 bp, Homo sapiens
tgaaacccttgtctg

SEQ ID NO: 357229 - DNA, 15 bp, Homo sapiens
ttgaaacccttgtct

SEQ ID NO: 357230 - DNA, 15 bp, Homo sapiens
tttgaaacccttgtc

SEQ ID NO: 357231 - DNA, 15 bp, Homo sapiens
ctttgaaacccttgt

SEQ ID NO: 357232 - DNA, 15 bp, Homo sapiens
cctttgaaacccttg

SEQ ID NO: 357233 - DNA, 15 bp, Homo sapiens
acctttgaaaccctt

SEQ ID NO: 357234 - DNA, 15 bp, Homo sapiens
cacctttgaaaccct

SEQ ID NO: 357235 - DNA, 15 bp, Homo sapiens
ccacctttgaaaccc

SEQ ID NO: 357236 - DNA, 15 bp, Homo sapiens
cccacctttgaaacc

SEQ ID NO: 357237 - DNA, 15 bp, Homo sapiens
ccccacctttgaaac

SEQ ID NO: 357238 - DNA, 15 bp, Homo sapiens
tccccacctttgaaa

SEQ ID NO: 357239 - DNA, 15 bp, Homo sapiens
atccccacctttgaa

SEQ ID NO: 357240 - DNA, 15 bp, Homo sapiens
gatccccacctttga

SEQ ID NO: 357241 - DNA, 15 bp, Homo sapiens
ggatccccacctttg

SEQ ID NO: 357242 - DNA, 15 bp, Homo sapiens
gggatccccaccttt

SEQ ID NO: 357243 - DNA, 15 bp, Homo sapiens
ggggatccccacctt

SEQ ID NO: 357244 - DNA, 15 bp, Homo sapiens
aggggatccccacct

SEQ ID NO: 357245 - DNA, 15 bp, Homo sapiens
taggggatccccacc

SEQ ID NO: 357246 - DNA, 15 bp, Homo sapiens
gtaggggatccccac

SEQ ID NO: 357247 - DNA, 15 bp, Homo sapiens
ggtaggggatcccca

SEQ ID NO: 357248 - DNA, 15 bp, Homo sapiens
aggtaggggatcccc

SEQ ID NO: 357249 - DNA, 15 bp, Homo sapiens
gaggtaggggatccc

SEQ ID NO: 357250 - DNA, 15 bp, Homo sapiens
cgaggtaggggatcc

SEQ ID NO: 357251 - DNA, 15 bp, Homo sapiens
acgaggtaggggatc

SEQ ID NO: 357252 - DNA, 15 bp, Homo sapiens
tacgaggtaggggat

SEQ ID NO: 357253 - DNA, 15 bp, Homo sapiens
gtacgaggtagggga

SEQ ID NO: 357254 - DNA, 15 bp, Homo sapiens
tgtacgaggtagggg

SEQ ID NO: 357255 - DNA, 15 bp, Homo sapiens
ctgtacgaggtaggg

SEQ ID NO: 357256 - DNA, 15 bp, Homo sapiens
cctgtacgaggtagg

SEQ ID NO: 357257 - DNA, 15 bp, Homo sapiens
gcctgtacgaggtag

SEQ ID NO: 357258 - DNA, 15 bp, Homo sapiens
cgcctgtacgaggta

SEQ ID NO: 357259 - DNA, 15 bp, Homo sapiens
gcgcctgtacgaggt

SEQ ID NO: 357260 - DNA, 15 bp, Homo sapiens
tgcgcctgtacgagg

SEQ ID NO: 357261 - DNA, 15 bp, Homo sapiens
ttgcgcctgtacgag

SEQ ID NO: 357262 - DNA, 15 bp, Homo sapiens
tttgcgcctgtacga

SEQ ID NO: 357263 - DNA, 15 bp, Homo sapiens
ctttgcgcctgtacg

SEQ ID NO: 357264 - DNA, 15 bp, Homo sapiens
actttgcgcctgtac

SEQ ID NO: 357265 - DNA, 15 bp, Homo sapiens
gactttgcgcctgta

SEQ ID NO: 357266 - DNA, 15 bp, Homo sapiens
ggactttgcgcctgt

SEQ ID NO: 357267 - DNA, 15 bp, Homo sapiens
gggactttgcgcctg

SEQ ID NO: 357268 - DNA, 15 bp, Homo sapiens
ggggactttgcgcct

SEQ ID NO: 357269 - DNA, 15 bp, Homo sapiens
tggggactttgcgcc

SEQ ID NO: 357270 - DNA, 15 bp, Homo sapiens
ctggggactttgcgc

SEQ ID NO: 357271 - DNA, 15 bp, Homo sapiens
cctggggactttgcg

SEQ ID NO: 357272 - DNA, 15 bp, Homo sapiens
ccctggggactttgc

SEQ ID NO: 357273 - DNA, 15 bp, Homo sapiens
gccctggggactttg

SEQ ID NO: 357274 - DNA, 15 bp, Homo sapiens
agccctggggacttt

SEQ ID NO: 357275 - DNA, 15 bp, Homo sapiens
gagccctggggactt

SEQ ID NO: 357276 - DNA, 15 bp, Homo sapiens
agagccctggggact

SEQ ID NO: 357277 - DNA, 15 bp, Homo sapiens
gagagccctggggac

SEQ ID NO: 357278 - DNA, 15 bp, Homo sapiens
cgagagccctgggga

SEQ ID NO: 357279 - DNA, 15 bp, Homo sapiens
ccgagagccctgggg

SEQ ID NO: 357280 - DNA, 15 bp, Homo sapiens
accgagagccctggg

SEQ ID NO: 357281 - DNA, 15 bp, Homo sapiens
aaccgagagccctgg

SEQ ID NO: 357282 - DNA, 15 bp, Homo sapiens
aaaccgagagccctg

SEQ ID NO: 357283 - DNA, 15 bp, Homo sapiens
aaaaccgagagccct

SEQ ID NO: 357284 - DNA, 15 bp, Homo sapiens
caaaaccgagagccc

SEQ ID NO: 357285 - DNA, 15 bp, Homo sapiens
acaaaaccgagagcc

SEQ ID NO: 357286 - DNA, 15 bp, Homo sapiens
aacaaaaccgagagc

SEQ ID NO: 357287 - DNA, 15 bp, Homo sapiens
caacaaaaccgagag

SEQ ID NO: 357288 - DNA, 15 bp, Homo sapiens
ccaacaaaaccgaga

SEQ ID NO: 357289 - DNA, 15 bp, Homo sapiens
cccaacaaaaccgag

SEQ ID NO: 357290 - DNA, 15 bp, Homo sapiens
ccccaacaaaaccga

SEQ ID NO: 357291 - DNA, 15 bp, Homo sapiens
gccccaacaaaaccg

SEQ ID NO: 357292 - DNA, 15 bp, Homo sapiens
ggccccaacaaaacc

SEQ ID NO: 357293 - DNA, 15 bp, Homo sapiens
tggccccaacaaaac

SEQ ID NO: 357294 - DNA, 15 bp, Homo sapiens
ttggccccaacaaaa

SEQ ID NO: 357295 - DNA, 15 bp, Homo sapiens
tttggccccaacaaa

SEQ ID NO: 357296 - DNA, 15 bp, Homo sapiens
ttttggccccaacaa

SEQ ID NO: 357297 - DNA, 15 bp, Homo sapiens
cttttggccccaaca

SEQ ID NO: 357298 - DNA, 15 bp, Homo sapiens
ccttttggccccaac

SEQ ID NO: 357299 - DNA, 15 bp, Homo sapiens
cccttttggccccaa

SEQ ID NO: 357300 - DNA, 15 bp, Homo sapiens
gcccttttggcccca

SEQ ID NO: 357301 - DNA, 15 bp, Homo sapiens
agcccttttggcccc

SEQ ID NO: 357302 - DNA, 15 bp, Homo sapiens
cagcccttttggccc

SEQ ID NO: 357303 - DNA, 15 bp, Homo sapiens
tcagcccttttggcc

SEQ ID NO: 357304 - DNA, 15 bp, Homo sapiens
atcagcccttttggc

SEQ ID NO: 357305 - DNA, 15 bp, Homo sapiens
catcagcccttttgg

SEQ ID NO: 357306 - DNA, 15 bp, Homo sapiens
ccatcagcccttttg

SEQ ID NO: 357307 - DNA, 15 bp, Homo sapiens
tccatcagccctttt

SEQ ID NO: 357308 - DNA, 15 bp, Homo sapiens
ctccatcagcccttt

SEQ ID NO: 357309 - DNA, 15 bp, Homo sapiens
cctccatcagccctt

SEQ ID NO: 357310 - DNA, 15 bp, Homo sapiens
ccctccatcagccct

SEQ ID NO: 357311 - DNA, 15 bp, Homo sapiens
cccctccatcagccc

SEQ ID NO: 357312 - DNA, 15 bp, Homo sapiens
tcccctccatcagcc

SEQ ID NO: 357313 - DNA, 15 bp, Homo sapiens
ctcccctccatcagc

SEQ ID NO: 357314 - DNA, 15 bp, Homo sapiens
cctcccctccatcag

SEQ ID NO: 357315 - DNA, 15 bp, Homo sapiens
tcctcccctccatca

SEQ ID NO: 357316 - DNA, 15 bp, Homo sapiens
atcctcccctccatc

SEQ ID NO: 357317 - DNA, 15 bp, Homo sapiens
catcctcccctccat

SEQ ID NO: 357318 - DNA, 15 bp, Homo sapiens
tcatcctcccctcca

SEQ ID NO: 357319 - DNA, 15 bp, Homo sapiens
atcatcctcccctcc

SEQ ID NO: 357320 - DNA, 15 bp, Homo sapiens
catcatcctcccctc

SEQ ID NO: 357321 - DNA, 15 bp, Homo sapiens
tcatcatcctcccct

SEQ ID NO: 357322 - DNA, 15 bp, Homo sapiens
ctcatcatcctcccc

SEQ ID NO: 357323 - DNA, 15 bp, Homo sapiens
cctcatcatcctccc

SEQ ID NO: 357324 - DNA, 15 bp, Homo sapiens
ccctcatcatcctcc

SEQ ID NO: 357325 - DNA, 15 bp, Homo sapiens
gccctcatcatcctc

SEQ ID NO: 357326 - DNA, 15 bp, Homo sapiens
tgccctcatcatcct

SEQ ID NO: 357327 - DNA, 15 bp, Homo sapiens
ttgccctcatcatcc

SEQ ID NO: 357328 - DNA, 15 bp, Homo sapiens
tttgccctcatcatc

SEQ ID NO: 357329 - DNA, 15 bp, Homo sapiens
ctttgccctcatcat

SEQ ID NO: 357330 - DNA, 15 bp, Homo sapiens
cctttgccctcatca

SEQ ID NO: 357331 - DNA, 15 bp, Homo sapiens
tcctttgccctcatc

SEQ ID NO: 357332 - DNA, 15 bp, Homo sapiens
gtcctttgccctcat

SEQ ID NO: 357333 - DNA, 15 bp, Homo sapiens
tgtcctttgccctca

SEQ ID NO: 357334 - DNA, 15 bp, Homo sapiens
ctgtcctttgccctc

SEQ ID NO: 357335 - DNA, 15 bp, Homo sapiens
gctgtcctttgccct

SEQ ID NO: 357336 - DNA, 15 bp, Homo sapiens
tgctgtcctttgccc

SEQ ID NO: 357337 - DNA, 15 bp, Homo sapiens
ttgctgtcctttgcc

SEQ ID NO: 357338 - DNA, 15 bp, Homo sapiens
gttgctgtcctttgc

SEQ ID NO: 357339 - DNA, 15 bp, Homo sapiens
tgttgctgtcctttg

SEQ ID NO: 357340 - DNA, 15 bp, Homo sapiens
ctgttgctgtccttt

SEQ ID NO: 357341 - DNA, 15 bp, Homo sapiens
cctgttgctgtcctt

SEQ ID NO: 357342 - DNA, 15 bp, Homo sapiens
tcctgttgctgtcct

SEQ ID NO: 357343 - DNA, 15 bp, Homo sapiens
gtcctgttgctgtcc

SEQ ID NO: 357344 - DNA, 15 bp, Homo sapiens
ggtcctgttgctgtc

SEQ ID NO: 357345 - DNA, 15 bp, Homo sapiens
aggtcctgttgctgt

SEQ ID NO: 357346 - DNA, 15 bp, Homo sapiens
caggtcctgttgctg

SEQ ID NO: 357347 - DNA, 15 bp, Homo sapiens
ccaggtcctgttgct

SEQ ID NO: 357348 - DNA, 15 bp, Homo sapiens
accaggtcctgttgc

SEQ ID NO: 357349 - DNA, 15 bp, Homo sapiens
caccaggtcctgttg

SEQ ID NO: 357350 - DNA, 15 bp, Homo sapiens
ccaccaggtcctgtt

SEQ ID NO: 357351 - DNA, 15 bp, Homo sapiens
tccaccaggtcctgt

SEQ ID NO: 357352 - DNA, 15 bp, Homo sapiens
ctccaccaggtcctg

SEQ ID NO: 357353 - DNA, 15 bp, Homo sapiens
tctccaccaggtcct

SEQ ID NO: 357354 - DNA, 15 bp, Homo sapiens
gtctccaccaggtcc

SEQ ID NO: 357355 - DNA, 15 bp, Homo sapiens
tgtctccaccaggtc

SEQ ID NO: 357356 - DNA, 15 bp, Homo sapiens
ctgtctccaccaggt

SEQ ID NO: 357357 - DNA, 15 bp, Homo sapiens
gctgtctccaccagg

SEQ ID NO: 357358 - DNA, 15 bp, Homo sapiens
cgctgtctccaccag

SEQ ID NO: 357359 - DNA, 15 bp, Homo sapiens
ccgctgtctccacca

SEQ ID NO: 357360 - DNA, 15 bp, Homo sapiens
gccgctgtctccacc

SEQ ID NO: 357361 - DNA, 15 bp, Homo sapiens
tgccgctgtctccac

SEQ ID NO: 357362 - DNA, 15 bp, Homo sapiens
ctgccgctgtctcca

SEQ ID NO: 357363 - DNA, 15 bp, Homo sapiens
tctgccgctgtctcc

SEQ ID NO: 357364 - DNA, 15 bp, Homo sapiens
ctctgccgctgtctc

SEQ ID NO: 357365 - DNA, 15 bp, Homo sapiens
actctgccgctgtct

SEQ ID NO: 357366 - DNA, 15 bp, Homo sapiens
gactctgccgctgtc

SEQ ID NO: 357367 - DNA, 15 bp, Homo sapiens
tgactctgccgctgt

SEQ ID NO: 357368 - DNA, 15 bp, Homo sapiens
gtgactctgccgctg

SEQ ID NO: 357369 - DNA, 15 bp, Homo sapiens
ggtgactctgccgct

SEQ ID NO: 357370 - DNA, 15 bp, Homo sapiens
gggtgactctgccgc

SEQ ID NO: 357371 - DNA, 15 bp, Homo sapiens
ggggtgactctgccg

SEQ ID NO: 357372 - DNA, 15 bp, Homo sapiens
gggggtgactctgcc

SEQ ID NO: 357373 - DNA, 15 bp, Homo sapiens
agggggtgactctgc

SEQ ID NO: 357374 - DNA, 15 bp, Homo sapiens
gagggggtgactctg

SEQ ID NO: 357375 - DNA, 15 bp, Homo sapiens
ggagggggtgactct

SEQ ID NO: 357376 - DNA, 15 bp, Homo sapiens
gggagggggtgactc

SEQ ID NO: 357377 - DNA, 15 bp, Homo sapiens
agggagggggtgact

SEQ ID NO: 357378 - DNA, 15 bp, Homo sapiens
gagggagggggtgac

SEQ ID NO: 357379 - DNA, 15 bp, Homo sapiens
ggagggagggggtga

SEQ ID NO: 357380 - DNA, 15 bp, Homo sapiens
gggagggagggggtg

SEQ ID NO: 357381 - DNA, 15 bp, Homo sapiens
ggggagggagggggt

SEQ ID NO: 357382 - DNA, 15 bp, Homo sapiens
aggggagggaggggg

SEQ ID NO: 357383 - DNA, 15 bp, Homo sapiens
gaggggagggagggg

SEQ ID NO: 357384 - DNA, 15 bp, Homo sapiens
ggaggggagggaggg

SEQ ID NO: 357385 - DNA, 15 bp, Homo sapiens
gggaggggagggagg

SEQ ID NO: 357386 - DNA, 15 bp, Homo sapiens
ggggaggggagggag

SEQ ID NO: 357387 - DNA, 15 bp, Homo sapiens
aggggaggggaggga

SEQ ID NO: 357388 - DNA, 15 bp, Homo sapiens
caggggaggggaggg

SEQ ID NO: 357389 - DNA, 15 bp, Homo sapiens
gcaggggaggggagg

SEQ ID NO: 357390 - DNA, 15 bp, Homo sapiens
tgcaggggaggggag

SEQ ID NO: 357391 - DNA, 15 bp, Homo sapiens
ttgcaggggagggga

SEQ ID NO: 357392 - DNA, 15 bp, Homo sapiens
cttgcaggggagggg

SEQ ID NO: 357393 - DNA, 15 bp, Homo sapiens
gcttgcaggggaggg

SEQ ID NO: 357394 - DNA, 15 bp, Homo sapiens
tgcttgcaggggagg

SEQ ID NO: 357395 - DNA, 15 bp, Homo sapiens
atgcttgcaggggag

SEQ ID NO: 357396 - DNA, 15 bp, Homo sapiens
gatgcttgcagggga

SEQ ID NO: 357397 - DNA, 15 bp, Homo sapiens
agatgcttgcagggg

SEQ ID NO: 357398 - DNA, 15 bp, Homo sapiens
gagatgcttgcaggg

SEQ ID NO: 357399 - DNA, 15 bp, Homo sapiens
ggagatgcttgcagg

SEQ ID NO: 357400 - DNA, 15 bp, Homo sapiens
tggagatgcttgcag

SEQ ID NO: 357401 - DNA, 15 bp, Homo sapiens
atggagatgcttgca

SEQ ID NO: 357402 - DNA, 15 bp, Homo sapiens
gatggagatgcttgc

SEQ ID NO: 357403 - DNA, 15 bp, Homo sapiens
ggatggagatgcttg

SEQ ID NO: 357404 - DNA, 15 bp, Homo sapiens
gggatggagatgctt

SEQ ID NO: 357405 - DNA, 15 bp, Homo sapiens
tgggatggagatgct

SEQ ID NO: 357406 - DNA, 15 bp, Homo sapiens
gtgggatggagatgc

SEQ ID NO: 357407 - DNA, 15 bp, Homo sapiens
tgtgggatggagatg

SEQ ID NO: 357408 - DNA, 15 bp, Homo sapiens
ctgtgggatggagat

SEQ ID NO: 357409 - DNA, 15 bp, Homo sapiens
cctgtgggatggaga

SEQ ID NO: 357410 - DNA, 15 bp, Homo sapiens
gcctgtgggatggag

SEQ ID NO: 357411 - DNA, 15 bp, Homo sapiens
tgcctgtgggatgga

SEQ ID NO: 357412 - DNA, 15 bp, Homo sapiens
ctgcctgtgggatgg

SEQ ID NO: 357413 - DNA, 15 bp, Homo sapiens
cctgcctgtgggatg

SEQ ID NO: 357414 - DNA, 15 bp, Homo sapiens
ccctgcctgtgggat

SEQ ID NO: 357415 - DNA, 15 bp, Homo sapiens
tccctgcctgtggga

SEQ ID NO: 357416 - DNA, 15 bp, Homo sapiens
ttccctgcctgtggg

SEQ ID NO: 357417 - DNA, 15 bp, Homo sapiens
tttccctgcctgtgg

SEQ ID NO: 357418 - DNA, 15 bp, Homo sapiens
gtttccctgcctgtg

SEQ ID NO: 357419 - DNA, 15 bp, Homo sapiens
agtttccctgcctgt

SEQ ID NO: 357420 - DNA, 15 bp, Homo sapiens
cagtttccctgcctg

SEQ ID NO: 357421 - DNA, 15 bp, Homo sapiens
tcagtttccctgcct

SEQ ID NO: 357422 - DNA, 15 bp, Homo sapiens
ctcagtttccctgcc

SEQ ID NO: 357423 - DNA, 15 bp, Homo sapiens
cctcagtttccctgc

SEQ ID NO: 357424 - DNA, 15 bp, Homo sapiens
gcctcagtttccctg

SEQ ID NO: 357425 - DNA, 15 bp, Homo sapiens
ggcctcagtttccct

SEQ ID NO: 357426 - DNA, 15 bp, Homo sapiens
gggcctcagtttccc

SEQ ID NO: 357427 - DNA, 15 bp, Homo sapiens
ggggcctcagtttcc

SEQ ID NO: 357428 - DNA, 15 bp, Homo sapiens
tggggcctcagtttc

SEQ ID NO: 357429 - DNA, 15 bp, Homo sapiens
ttggggcctcagttt

SEQ ID NO: 357430 - DNA, 15 bp, Homo sapiens
tttggggcctcagtt

SEQ ID NO: 357431 - DNA, 15 bp, Homo sapiens
ctttggggcctcagt

SEQ ID NO: 357432 - DNA, 15 bp, Homo sapiens
tctttggggcctcag

SEQ ID NO: 357433 - DNA, 15 bp, Homo sapiens
gtctttggggcctca

SEQ ID NO: 357434 - DNA, 15 bp, Homo sapiens
ggtctttggggcctc

SEQ ID NO: 357435 - DNA, 15 bp, Homo sapiens
tggtctttggggcct

SEQ ID NO: 357436 - DNA, 15 bp, Homo sapiens
ctggtctttggggcc

SEQ ID NO: 357437 - DNA, 15 bp, Homo sapiens
tctggtctttggggc

SEQ ID NO: 357438 - DNA, 15 bp, Homo sapiens
gtctggtctttgggg

SEQ ID NO: 357439 - DNA, 15 bp, Homo sapiens
agtctggtctttggg

SEQ ID NO: 357440 - DNA, 15 bp, Homo sapiens
cagtctggtctttgg

SEQ ID NO: 357441 - DNA, 15 bp, Homo sapiens
ccagtctggtctttg

SEQ ID NO: 357442 - DNA, 15 bp, Homo sapiens
tccagtctggtcttt

SEQ ID NO: 357443 - DNA, 15 bp, Homo sapiens
atccagtctggtctt

SEQ ID NO: 357444 - DNA, 15 bp, Homo sapiens
gatccagtctggtct

SEQ ID NO: 357445 - DNA, 15 bp, Homo sapiens
tgatccagtctggtc

SEQ ID NO: 357446 - DNA, 15 bp, Homo sapiens
atgatccagtctggt

SEQ ID NO: 357447 - DNA, 15 bp, Homo sapiens
tatgatccagtctgg

SEQ ID NO: 357448 - DNA, 15 bp, Homo sapiens
gtatgatccagtctg

SEQ ID NO: 357449 - DNA, 15 bp, Homo sapiens
agtatgatccagtct

SEQ ID NO: 357450 - DNA, 15 bp, Homo sapiens
aagtatgatccagtc

SEQ ID NO: 357451 - DNA, 15 bp, Homo sapiens
caagtatgatccagt

SEQ ID NO: 357452 - DNA, 15 bp, Homo sapiens
tcaagtatgatccag

SEQ ID NO: 357453 - DNA, 15 bp, Homo sapiens
ctcaagtatgatcca

SEQ ID NO: 357454 - DNA, 15 bp, Homo sapiens
gctcaagtatgatcc

SEQ ID NO: 357455 - DNA, 15 bp, Homo sapiens
agctcaagtatgatc

SEQ ID NO: 357456 - DNA, 15 bp, Homo sapiens
cagctcaagtatgat

SEQ ID NO: 357457 - DNA, 15 bp, Homo sapiens
ccagctcaagtatga

SEQ ID NO: 357458 - DNA, 15 bp, Homo sapiens
cccagctcaagtatg

SEQ ID NO: 357459 - DNA, 15 bp, Homo sapiens
ccccagctcaagtat

SEQ ID NO: 357460 - DNA, 15 bp, Homo sapiens
gccccagctcaagta

SEQ ID NO: 357461 - DNA, 15 bp, Homo sapiens
tgccccagctcaagt

SEQ ID NO: 357462 - DNA, 15 bp, Homo sapiens
gtgccccagctcaag

SEQ ID NO: 357463 - DNA, 15 bp, Homo sapiens
tgtgccccagctcaa

SEQ ID NO: 357464 - DNA, 15 bp, Homo sapiens
ttgtgccccagctca

SEQ ID NO: 357465 - DNA, 15 bp, Homo sapiens
cttgtgccccagctc

SEQ ID NO: 357466 - DNA, 15 bp, Homo sapiens
ccttgtgccccagct

SEQ ID NO: 357467 - DNA, 15 bp, Homo sapiens
tccttgtgccccagc

SEQ ID NO: 357468 - DNA, 15 bp, Homo sapiens
ctccttgtgccccag

SEQ ID NO: 357469 - DNA, 15 bp, Homo sapiens
tctccttgtgcccca

SEQ ID NO: 357470 - DNA, 15 bp, Homo sapiens
ctctccttgtgcccc

SEQ ID NO: 357471 - DNA, 15 bp, Homo sapiens
gctctccttgtgccc

SEQ ID NO: 357472 - DNA, 15 bp, Homo sapiens
agctctccttgtgcc

SEQ ID NO: 357473 - DNA, 15 bp, Homo sapiens
aagctctccttgtgc

SEQ ID NO: 357474 - DNA, 15 bp, Homo sapiens
caagctctccttgtg

SEQ ID NO: 357475 - DNA, 15 bp, Homo sapiens
ccaagctctccttgt

SEQ ID NO: 357476 - DNA, 15 bp, Homo sapiens
tccaagctctccttg

SEQ ID NO: 357477 - DNA, 15 bp, Homo sapiens
gtccaagctctcctt

SEQ ID NO: 357478 - DNA, 15 bp, Homo sapiens
agtccaagctctcct

SEQ ID NO: 357479 - DNA, 15 bp, Homo sapiens
gagtccaagctctcc

SEQ ID NO: 357480 - DNA, 15 bp, Homo sapiens
tgagtccaagctctc

SEQ ID NO: 357481 - DNA, 15 bp, Homo sapiens
atgagtccaagctct

SEQ ID NO: 357482 - DNA, 15 bp, Homo sapiens
aatgagtccaagctc

SEQ ID NO: 357483 - DNA, 15 bp, Homo sapiens
caatgagtccaagct

SEQ ID NO: 357484 - DNA, 15 bp, Homo sapiens
acaatgagtccaagc

SEQ ID NO: 357485 - DNA, 15 bp, Homo sapiens
gacaatgagtccaag

SEQ ID NO: 357486 - DNA, 15 bp, Homo sapiens
tgacaatgagtccaa

SEQ ID NO: 357487 - DNA, 15 bp, Homo sapiens
gtgacaatgagtcca

SEQ ID NO: 357488 - DNA, 15 bp, Homo sapiens
ggtgacaatgagtcc

SEQ ID NO: 357489 - DNA, 15 bp, Homo sapiens
aggtgacaatgagtc

SEQ ID NO: 357490 - DNA, 15 bp, Homo sapiens
gaggtgacaatgagt

SEQ ID NO: 357491 - DNA, 15 bp, Homo sapiens
ggaggtgacaatgag

SEQ ID NO: 357492 - DNA, 15 bp, Homo sapiens
gggaggtgacaatga

SEQ ID NO: 357493 - DNA, 15 bp, Homo sapiens
agggaggtgacaatg

SEQ ID NO: 357494 - DNA, 15 bp, Homo sapiens
tagggaggtgacaat

SEQ ID NO: 357495 - DNA, 15 bp, Homo sapiens
atagggaggtgacaa

SEQ ID NO: 357496 - DNA, 15 bp, Homo sapiens
catagggaggtgaca

SEQ ID NO: 357497 - DNA, 15 bp, Homo sapiens
ccatagggaggtgac

SEQ ID NO: 357498 - DNA, 15 bp, Homo sapiens
cccatagggaggtga

SEQ ID NO: 357499 - DNA, 15 bp, Homo sapiens
gcccatagggaggtg

SEQ ID NO: 357500 - DNA, 15 bp, Homo sapiens
ggcccatagggaggt

SEQ ID NO: 357501 - DNA, 15 bp, Homo sapiens
gggcccatagggagg

SEQ ID NO: 357502 - DNA, 15 bp, Homo sapiens
ggggcccatagggag

SEQ ID NO: 357503 - DNA, 15 bp, Homo sapiens
aggggcccataggga

SEQ ID NO: 357504 - DNA, 15 bp, Homo sapiens
gaggggcccataggg

SEQ ID NO: 357505 - DNA, 15 bp, Homo sapiens
agaggggcccatagg

SEQ ID NO: 357506 - DNA, 15 bp, Homo sapiens
tagaggggcccatag

SEQ ID NO: 357507 - DNA, 15 bp, Homo sapiens
gtagaggggcccata

SEQ ID NO: 357508 - DNA, 15 bp, Homo sapiens
tgtagaggggcccat

SEQ ID NO: 357509 - DNA, 15 bp, Homo sapiens
ctgtagaggggccca

SEQ ID NO: 357510 - DNA, 15 bp, Homo sapiens
tctgtagaggggccc

SEQ ID NO: 357511 - DNA, 15 bp, Homo sapiens
ttctgtagaggggcc

SEQ ID NO: 357512 - DNA, 15 bp, Homo sapiens
cttctgtagaggggc

SEQ ID NO: 357513 - DNA, 15 bp, Homo sapiens
gcttctgtagagggg

SEQ ID NO: 357514 - DNA, 15 bp, Homo sapiens
ggcttctgtagaggg

SEQ ID NO: 357515 - DNA, 15 bp, Homo sapiens
aggcttctgtagagg

SEQ ID NO: 357516 - DNA, 15 bp, Homo sapiens
taggcttctgtagag

SEQ ID NO: 357517 - DNA, 15 bp, Homo sapiens
ctaggcttctgtaga

SEQ ID NO: 357518 - DNA, 15 bp, Homo sapiens
cctaggcttctgtag

SEQ ID NO: 357519 - DNA, 15 bp, Homo sapiens
acctaggcttctgta

SEQ ID NO: 357520 - DNA, 15 bp, Homo sapiens
gacctaggcttctgt

SEQ ID NO: 357521 - DNA, 15 bp, Homo sapiens
ggacctaggcttctg

SEQ ID NO: 357522 - DNA, 15 bp, Homo sapiens
gggacctaggcttct

SEQ ID NO: 357523 - DNA, 15 bp, Homo sapiens
ggggacctaggcttc

SEQ ID NO: 357524 - DNA, 15 bp, Homo sapiens
cggggacctaggctt

SEQ ID NO: 357525 - DNA, 15 bp, Homo sapiens
ccggggacctaggct

SEQ ID NO: 357526 - DNA, 15 bp, Homo sapiens
gccggggacctaggc

SEQ ID NO: 357527 - DNA, 15 bp, Homo sapiens
agccggggacctagg

SEQ ID NO: 357528 - DNA, 15 bp, Homo sapiens
aagccggggacctag

SEQ ID NO: 357529 - DNA, 15 bp, Homo sapiens
caagccggggaccta

SEQ ID NO: 357530 - DNA, 15 bp, Homo sapiens
gcaagccggggacct

SEQ ID NO: 357531 - DNA, 15 bp, Homo sapiens
ggcaagccggggacc

SEQ ID NO: 357532 - DNA, 15 bp, Homo sapiens
aggcaagccggggac

SEQ ID NO: 357533 - DNA, 15 bp, Homo sapiens
caggcaagccgggga

SEQ ID NO: 357534 - DNA, 15 bp, Homo sapiens
ccaggcaagccgggg

SEQ ID NO: 357535 - DNA, 15 bp, Homo sapiens
cccaggcaagccggg

SEQ ID NO: 357536 - DNA, 15 bp, Homo sapiens
ccccaggcaagccgg

SEQ ID NO: 357537 - DNA, 15 bp, Homo sapiens
cccccaggcaagccg

SEQ ID NO: 357538 - DNA, 15 bp, Homo sapiens
gcccccaggcaagcc

SEQ ID NO: 357539 - DNA, 15 bp, Homo sapiens
tgcccccaggcaagc

SEQ ID NO: 357540 - DNA, 15 bp, Homo sapiens
gtgcccccaggcaag

SEQ ID NO: 357541 - DNA, 15 bp, Homo sapiens
ggtgcccccaggcaa

SEQ ID NO: 357542 - DNA, 15 bp, Homo sapiens
tggtgcccccaggca

SEQ ID NO: 357543 - DNA, 15 bp, Homo sapiens
ctggtgcccccaggc

SEQ ID NO: 357544 - DNA, 15 bp, Homo sapiens
cctggtgcccccagg

SEQ ID NO: 357545 - DNA, 15 bp, Homo sapiens
tcctggtgcccccag

SEQ ID NO: 357546 - DNA, 15 bp, Homo sapiens
gtcctggtgccccca

SEQ ID NO: 357547 - DNA, 15 bp, Homo sapiens
agtcctggtgccccc

SEQ ID NO: 357548 - DNA, 15 bp, Homo sapiens
gagtcctggtgcccc

SEQ ID NO: 357549 - DNA, 15 bp, Homo sapiens
tgagtcctggtgccc

SEQ ID NO: 357550 - DNA, 15 bp, Homo sapiens
gtgagtcctggtgcc

SEQ ID NO: 357551 - DNA, 15 bp, Homo sapiens
agtgagtcctggtgc

SEQ ID NO: 357552 - DNA, 15 bp, Homo sapiens
cagtgagtcctggtg

SEQ ID NO: 357553 - DNA, 15 bp, Homo sapiens
gcagtgagtcctggt

SEQ ID NO: 357554 - DNA, 15 bp, Homo sapiens
cgcagtgagtcctgg

SEQ ID NO: 357555 - DNA, 15 bp, Homo sapiens
tcgcagtgagtcctg

SEQ ID NO: 357556 - DNA, 15 bp, Homo sapiens
gtcgcagtgagtcct

SEQ ID NO: 357557 - DNA, 15 bp, Homo sapiens
tgtcgcagtgagtcc

SEQ ID NO: 357558 - DNA, 15 bp, Homo sapiens
gtgtcgcagtgagtc

SEQ ID NO: 357559 - DNA, 15 bp, Homo sapiens
tgtgtcgcagtgagt

SEQ ID NO: 357560 - DNA, 15 bp, Homo sapiens
ctgtgtcgcagtgag

SEQ ID NO: 357561 - DNA, 15 bp, Homo sapiens
cctgtgtcgcagtga

SEQ ID NO: 357562 - DNA, 15 bp, Homo sapiens
acctgtgtcgcagtg

SEQ ID NO: 357563 - DNA, 15 bp, Homo sapiens
cacctgtgtcgcagt

SEQ ID NO: 357564 - DNA, 15 bp, Homo sapiens
gcacctgtgtcgcag

SEQ ID NO: 357565 - DNA, 15 bp, Homo sapiens
ggcacctgtgtcgca

SEQ ID NO: 357566 - DNA, 15 bp, Homo sapiens
aggcacctgtgtcgc

SEQ ID NO: 357567 - DNA, 15 bp, Homo sapiens
caggcacctgtgtcg

SEQ ID NO: 357568 - DNA, 15 bp, Homo sapiens
acaggcacctgtgtc

SEQ ID NO: 357569 - DNA, 15 bp, Homo sapiens
gacaggcacctgtgt

SEQ ID NO: 357570 - DNA, 15 bp, Homo sapiens
agacaggcacctgtg

SEQ ID NO: 357571 - DNA, 15 bp, Homo sapiens
cagacaggcacctgt

SEQ ID NO: 357572 - DNA, 15 bp, Homo sapiens
ccagacaggcacctg

SEQ ID NO: 357573 - DNA, 15 bp, Homo sapiens
cccagacaggcacct

SEQ ID NO: 357574 - DNA, 15 bp, Homo sapiens
gcccagacaggcacc

SEQ ID NO: 357575 - DNA, 15 bp, Homo sapiens
agcccagacaggcac

SEQ ID NO: 357576 - DNA, 15 bp, Homo sapiens
cagcccagacaggca

SEQ ID NO: 357577 - DNA, 15 bp, Homo sapiens
tcagcccagacaggc

SEQ ID NO: 357578 - DNA, 15 bp, Homo sapiens
gtcagcccagacagg

SEQ ID NO: 357579 - DNA, 15 bp, Homo sapiens
agtcagcccagacag

SEQ ID NO: 357580 - DNA, 15 bp, Homo sapiens
aagtcagcccagaca

SEQ ID NO: 357581 - DNA, 15 bp, Homo sapiens
caagtcagcccagac

SEQ ID NO: 357582 - DNA, 15 bp, Homo sapiens
gcaagtcagcccaga

SEQ ID NO: 357583 - DNA, 15 bp, Homo sapiens
agcaagtcagcccag

SEQ ID NO: 357584 - DNA, 15 bp, Homo sapiens
cagcaagtcagccca

SEQ ID NO: 357585 - DNA, 15 bp, Homo sapiens
ccagcaagtcagccc

SEQ ID NO: 357586 - DNA, 15 bp, Homo sapiens
accagcaagtcagcc

SEQ ID NO: 357587 - DNA, 15 bp, Homo sapiens
caccagcaagtcagc

SEQ ID NO: 357588 - DNA, 15 bp, Homo sapiens
ccaccagcaagtcag

SEQ ID NO: 357589 - DNA, 15 bp, Homo sapiens
tccaccagcaagtca

SEQ ID NO: 357590 - DNA, 15 bp, Homo sapiens
gtccaccagcaagtc

SEQ ID NO: 357591 - DNA, 15 bp, Homo sapiens
agtccaccagcaagt

SEQ ID NO: 357592 - DNA, 15 bp, Homo sapiens
cagtccaccagcaag

SEQ ID NO: 357593 - DNA, 15 bp, Homo sapiens
gcagtccaccagcaa

SEQ ID NO: 357594 - DNA, 15 bp, Homo sapiens
tgcagtccaccagca

SEQ ID NO: 357595 - DNA, 15 bp, Homo sapiens
gtgcagtccaccagc

SEQ ID NO: 357596 - DNA, 15 bp, Homo sapiens
ggtgcagtccaccag

SEQ ID NO: 357597 - DNA, 15 bp, Homo sapiens
tggtgcagtccacca

SEQ ID NO: 357598 - DNA, 15 bp, Homo sapiens
gtggtgcagtccacc

SEQ ID NO: 357599 - DNA, 15 bp, Homo sapiens
tgtggtgcagtccac

SEQ ID NO: 357600 - DNA, 15 bp, Homo sapiens
ttgtggtgcagtcca

SEQ ID NO: 357601 - DNA, 15 bp, Homo sapiens
attgtggtgcagtcc

SEQ ID NO: 357602 - DNA, 15 bp, Homo sapiens
cattgtggtgcagtc

SEQ ID NO: 357603 - DNA, 15 bp, Homo sapiens
ccattgtggtgcagt

SEQ ID NO: 357604 - DNA, 15 bp, Homo sapiens
gccattgtggtgcag

SEQ ID NO: 357605 - DNA, 15 bp, Homo sapiens
ggccattgtggtgca

SEQ ID NO: 357606 - DNA, 15 bp, Homo sapiens
aggccattgtggtgc

SEQ ID NO: 357607 - DNA, 15 bp, Homo sapiens
caggccattgtggtg

SEQ ID NO: 357608 - DNA, 15 bp, Homo sapiens
ccaggccattgtggt

SEQ ID NO: 357609 - DNA, 15 bp, Homo sapiens
tccaggccattgtgg

SEQ ID NO: 357610 - DNA, 15 bp, Homo sapiens
ctccaggccattgtg

SEQ ID NO: 357611 - DNA, 15 bp, Homo sapiens
actccaggccattgt

SEQ ID NO: 357612 - DNA, 15 bp, Homo sapiens
aactccaggccattg

SEQ ID NO: 357613 - DNA, 15 bp, Homo sapiens
aaactccaggccatt

SEQ ID NO: 357614 - DNA, 15 bp, Homo sapiens
gaaactccaggccat

SEQ ID NO: 357615 - DNA, 15 bp, Homo sapiens
agaaactccaggcca

SEQ ID NO: 357616 - DNA, 15 bp, Homo sapiens
aagaaactccaggcc

SEQ ID NO: 357617 - DNA, 15 bp, Homo sapiens
gaagaaactccaggc

SEQ ID NO: 357618 - DNA, 15 bp, Homo sapiens
tgaagaaactccagg

SEQ ID NO: 357619 - DNA, 15 bp, Homo sapiens
ctgaagaaactccag

SEQ ID NO: 357620 - DNA, 15 bp, Homo sapiens
actgaagaaactcca

SEQ ID NO: 357621 - DNA, 15 bp, Homo sapiens
aactgaagaaactcc

SEQ ID NO: 357622 - DNA, 15 bp, Homo sapiens
caactgaagaaactc

SEQ ID NO: 357623 - DNA, 15 bp, Homo sapiens
gcaactgaagaaact

SEQ ID NO: 357624 - DNA, 15 bp, Homo sapiens
agcaactgaagaaac

SEQ ID NO: 357625 - DNA, 15 bp, Homo sapiens
gagcaactgaagaaa

SEQ ID NO: 357626 - DNA, 15 bp, Homo sapiens
ggagcaactgaagaa

SEQ ID NO: 357627 - DNA, 15 bp, Homo sapiens
tggagcaactgaaga

SEQ ID NO: 357628 - DNA, 15 bp, Homo sapiens
ttggagcaactgaag

SEQ ID NO: 357629 - DNA, 15 bp, Homo sapiens
cttggagcaactgaa

SEQ ID NO: 357630 - DNA, 15 bp, Homo sapiens
tcttggagcaactga

SEQ ID NO: 357631 - DNA, 15 bp, Homo sapiens
ctcttggagcaactg

SEQ ID NO: 357632 - DNA, 15 bp, Homo sapiens
cctcttggagcaact

SEQ ID NO: 357633 - DNA, 15 bp, Homo sapiens
ccctcttggagcaac

SEQ ID NO: 357634 - DNA, 15 bp, Homo sapiens
tccctcttggagcaa

SEQ ID NO: 357635 - DNA, 15 bp, Homo sapiens
gtccctcttggagca

SEQ ID NO: 357636 - DNA, 15 bp, Homo sapiens
ggtccctcttggagc

SEQ ID NO: 357637 - DNA, 15 bp, Homo sapiens
aggtccctcttggag

SEQ ID NO: 357638 - DNA, 15 bp, Homo sapiens
aaggtccctcttgga

SEQ ID NO: 357639 - DNA, 15 bp, Homo sapiens
taaggtccctcttgg

SEQ ID NO: 357640 - DNA, 15 bp, Homo sapiens
ctaaggtccctcttg

SEQ ID NO: 357641 - DNA, 15 bp, Homo sapiens
tctaaggtccctctt

SEQ ID NO: 357642 - DNA, 15 bp, Homo sapiens
ctctaaggtccctct

SEQ ID NO: 357643 - DNA, 15 bp, Homo sapiens
tctctaaggtccctc

SEQ ID NO: 357644 - DNA, 15 bp, Homo sapiens
ctctctaaggtccct

SEQ ID NO: 357645 - DNA, 15 bp, Homo sapiens
tctctctaaggtccc

SEQ ID NO: 357646 - DNA, 15 bp, Homo sapiens
gtctctctaaggtcc

SEQ ID NO: 357647 - DNA, 15 bp, Homo sapiens
tgtctctctaaggtc

SEQ ID NO: 357648 - DNA, 15 bp, Homo sapiens
ctgtctctctaaggt

SEQ ID NO: 357649 - DNA, 15 bp, Homo sapiens
cctgtctctctaagg

SEQ ID NO: 357650 - DNA, 15 bp, Homo sapiens
gcctgtctctctaag

SEQ ID NO: 357651 - DNA, 15 bp, Homo sapiens
tgcctgtctctctaa

SEQ ID NO: 357652 - DNA, 15 bp, Homo sapiens
ctgcctgtctctcta

SEQ ID NO: 357653 - DNA, 15 bp, Homo sapiens
cctgcctgtctctct

SEQ ID NO: 357654 - DNA, 15 bp, Homo sapiens
gcctgcctgtctctc

SEQ ID NO: 357655 - DNA, 15 bp, Homo sapiens
ggcctgcctgtctct

SEQ ID NO: 357656 - DNA, 15 bp, Homo sapiens
aggcctgcctgtctc

SEQ ID NO: 357657 - DNA, 15 bp, Homo sapiens
gaggcctgcctgtct

SEQ ID NO: 357658 - DNA, 15 bp, Homo sapiens
ggaggcctgcctgtc

SEQ ID NO: 357659 - DNA, 15 bp, Homo sapiens
cggaggcctgcctgt

SEQ ID NO: 357660 - DNA, 15 bp, Homo sapiens
gcggaggcctgcctg

SEQ ID NO: 357661 - DNA, 15 bp, Homo sapiens
agcggaggcctgcct

SEQ ID NO: 357662 - DNA, 15 bp, Homo sapiens
cagcggaggcctgcc

SEQ ID NO: 357663 - DNA, 15 bp, Homo sapiens
tcagcggaggcctgc

SEQ ID NO: 357664 - DNA, 15 bp, Homo sapiens
ctcagcggaggcctg

SEQ ID NO: 357665 - DNA, 15 bp, Homo sapiens
gctcagcggaggcct

SEQ ID NO: 357666 - DNA, 15 bp, Homo sapiens
ggctcagcggaggcc

SEQ ID NO: 357667 - DNA, 15 bp, Homo sapiens
gggctcagcggaggc

SEQ ID NO: 357668 - DNA, 15 bp, Homo sapiens
agggctcagcggagg

SEQ ID NO: 357669 - DNA, 15 bp, Homo sapiens
tagggctcagcggag

SEQ ID NO: 357670 - DNA, 15 bp, Homo sapiens
ttagggctcagcgga

SEQ ID NO: 357671 - DNA, 15 bp, Homo sapiens
tttagggctcagcgg

SEQ ID NO: 357672 - DNA, 15 bp, Homo sapiens
ctttagggctcagcg

SEQ ID NO: 357673 - DNA, 15 bp, Homo sapiens
cctttagggctcagc

SEQ ID NO: 357674 - DNA, 15 bp, Homo sapiens
ccctttagggctcag

SEQ ID NO: 357675 - DNA, 15 bp, Homo sapiens
gccctttagggctca

SEQ ID NO: 357676 - DNA, 15 bp, Homo sapiens
ggccctttagggctc

SEQ ID NO: 357677 - DNA, 15 bp, Homo sapiens
aggccctttagggct

SEQ ID NO: 357678 - DNA, 15 bp, Homo sapiens
gaggccctttagggc

SEQ ID NO: 357679 - DNA, 15 bp, Homo sapiens
cgaggccctttaggg

SEQ ID NO: 357680 - DNA, 15 bp, Homo sapiens
ccgaggccctttagg

SEQ ID NO: 357681 - DNA, 15 bp, Homo sapiens
accgaggccctttag

SEQ ID NO: 357682 - DNA, 15 bp, Homo sapiens
aaccgaggcccttta

SEQ ID NO: 357683 - DNA, 15 bp, Homo sapiens
gaaccgaggcccttt

SEQ ID NO: 357684 - DNA, 15 bp, Homo sapiens
agaaccgaggccctt

SEQ ID NO: 357685 - DNA, 15 bp, Homo sapiens
cagaaccgaggccct

SEQ ID NO: 357686 - DNA, 15 bp, Homo sapiens
gcagaaccgaggccc

SEQ ID NO: 357687 - DNA, 15 bp, Homo sapiens
agcagaaccgaggcc

SEQ ID NO: 357688 - DNA, 15 bp, Homo sapiens
aagcagaaccgaggc

SEQ ID NO: 357689 - DNA, 15 bp, Homo sapiens
gaagcagaaccgagg

SEQ ID NO: 357690 - DNA, 15 bp, Homo sapiens
agaagcagaaccgag

SEQ ID NO: 357691 - DNA, 15 bp, Homo sapiens
gagaagcagaaccga

SEQ ID NO: 357692 - DNA, 15 bp, Homo sapiens
cgagaagcagaaccg

SEQ ID NO: 357693 - DNA, 15 bp, Homo sapiens
acgagaagcagaacc

SEQ ID NO: 357694 - DNA, 15 bp, Homo sapiens
gacgagaagcagaac

SEQ ID NO: 357695 - DNA, 15 bp, Homo sapiens
ggacgagaagcagaa

SEQ ID NO: 357696 - DNA, 15 bp, Homo sapiens
tggacgagaagcaga

SEQ ID NO: 357697 - DNA, 15 bp, Homo sapiens
atggacgagaagcag

SEQ ID NO: 357698 - DNA, 15 bp, Homo sapiens
aatggacgagaagca

SEQ ID NO: 357699 - DNA, 15 bp, Homo sapiens
aaatggacgagaagc

SEQ ID NO: 357700 - DNA, 15 bp, Homo sapiens
gaaatggacgagaag

SEQ ID NO: 357701 - DNA, 15 bp, Homo sapiens
ggaaatggacgagaa

SEQ ID NO: 357702 - DNA, 15 bp, Homo sapiens
cggaaatggacgaga

SEQ ID NO: 357703 - DNA, 15 bp, Homo sapiens
ccggaaatggacgag

SEQ ID NO: 357704 - DNA, 15 bp, Homo sapiens
cccggaaatggacga

SEQ ID NO: 357705 - DNA, 15 bp, Homo sapiens
ccccggaaatggacg

SEQ ID NO: 357706 - DNA, 15 bp, Homo sapiens
accccggaaatggac

SEQ ID NO: 357707 - DNA, 15 bp, Homo sapiens
gaccccggaaatgga

SEQ ID NO: 357708 - DNA, 15 bp, Homo sapiens
ggaccccggaaatgg

SEQ ID NO: 357709 - DNA, 15 bp, Homo sapiens
gggaccccggaaatg

SEQ ID NO: 357710 - DNA, 15 bp, Homo sapiens
ggggaccccggaaat

SEQ ID NO: 357711 - DNA, 15 bp, Homo sapiens
gggggaccccggaaa

SEQ ID NO: 357712 - DNA, 15 bp, Homo sapiens
tgggggaccccggaa

SEQ ID NO: 357713 - DNA, 15 bp, Homo sapiens
ctgggggaccccgga

SEQ ID NO: 357714 - DNA, 15 bp, Homo sapiens
gctgggggaccccgg

SEQ ID NO: 357715 - DNA, 15 bp, Homo sapiens
ggctgggggaccccg

SEQ ID NO: 357716 - DNA, 15 bp, Homo sapiens
gggctgggggacccc

SEQ ID NO: 357717 - DNA, 15 bp, Homo sapiens
ggggctgggggaccc

SEQ ID NO: 357718 - DNA, 15 bp, Homo sapiens
cggggctgggggacc

SEQ ID NO: 357719 - DNA, 15 bp, Homo sapiens
gcggggctgggggac

SEQ ID NO: 357720 - DNA, 15 bp, Homo sapiens
agcggggctggggga

SEQ ID NO: 357721 - DNA, 15 bp, Homo sapiens
tagcggggctggggg

SEQ ID NO: 357722 - DNA, 15 bp, Homo sapiens
ttagcggggctgggg

SEQ ID NO: 357723 - DNA, 15 bp, Homo sapiens
tttagcggggctggg

SEQ ID NO: 357724 - DNA, 15 bp, Homo sapiens
ctttagcggggctgg

SEQ ID NO: 357725 - DNA, 15 bp, Homo sapiens
actttagcggggctg

SEQ ID NO: 357726 - DNA, 15 bp, Homo sapiens
gactttagcggggct

SEQ ID NO: 357727 - DNA, 15 bp, Homo sapiens
ggactttagcggggc

SEQ ID NO: 357728 - DNA, 15 bp, Homo sapiens
tggactttagcgggg

SEQ ID NO: 357729 - DNA, 15 bp, Homo sapiens
ttggactttagcggg

SEQ ID NO: 357730 - DNA, 15 bp, Homo sapiens
tttggactttagcgg

SEQ ID NO: 357731 - DNA, 15 bp, Homo sapiens
atttggactttagcg

SEQ ID NO: 357732 - DNA, 15 bp, Homo sapiens
aatttggactttagc

SEQ ID NO: 357733 - DNA, 15 bp, Homo sapiens
gaatttggactttag

SEQ ID NO: 357734 - DNA, 15 bp, Homo sapiens
ggaatttggacttta

SEQ ID NO: 357735 - DNA, 15 bp, Homo sapiens
tggaatttggacttt

SEQ ID NO: 357736 - DNA, 15 bp, Homo sapiens
atggaatttggactt

SEQ ID NO: 357737 - DNA, 15 bp, Homo sapiens
gatggaatttggact

SEQ ID NO: 357738 - DNA, 15 bp, Homo sapiens
ggatggaatttggac

SEQ ID NO: 357739 - DNA, 15 bp, Homo sapiens
tggatggaatttgga

SEQ ID NO: 357740 - DNA, 15 bp, Homo sapiens
atggatggaatttgg

SEQ ID NO: 357741 - DNA, 15 bp, Homo sapiens
aatggatggaatttg

SEQ ID NO: 357742 - DNA, 15 bp, Homo sapiens
gaatggatggaattt

SEQ ID NO: 357743 - DNA, 15 bp, Homo sapiens
agaatggatggaatt

SEQ ID NO: 357744 - DNA, 15 bp, Homo sapiens
aagaatggatggaat

SEQ ID NO: 357745 - DNA, 15 bp, Homo sapiens
gaagaatggatggaa

SEQ ID NO: 357746 - DNA, 15 bp, Homo sapiens
tgaagaatggatgga

SEQ ID NO: 357747 - DNA, 15 bp, Homo sapiens
ttgaagaatggatgg

SEQ ID NO: 357748 - DNA, 15 bp, Homo sapiens
cttgaagaatggatg

SEQ ID NO: 357749 - DNA, 15 bp, Homo sapiens
ccttgaagaatggat

SEQ ID NO: 357750 - DNA, 15 bp, Homo sapiens
cccttgaagaatgga

SEQ ID NO: 357751 - DNA, 15 bp, Homo sapiens
gcccttgaagaatgg

SEQ ID NO: 357752 - DNA, 15 bp, Homo sapiens
ggcccttgaagaatg

SEQ ID NO: 357753 - DNA, 15 bp, Homo sapiens
aggcccttgaagaat

SEQ ID NO: 357754 - DNA, 15 bp, Homo sapiens
gaggcccttgaagaa

SEQ ID NO: 357755 - DNA, 15 bp, Homo sapiens
agaggcccttgaaga

SEQ ID NO: 357756 - DNA, 15 bp, Homo sapiens
cagaggcccttgaag

SEQ ID NO: 357757 - DNA, 15 bp, Homo sapiens
ccagaggcccttgaa

SEQ ID NO: 357758 - DNA, 15 bp, Homo sapiens
gccagaggcccttga

SEQ ID NO: 357759 - DNA, 15 bp, Homo sapiens
agccagaggcccttg

SEQ ID NO: 357760 - DNA, 15 bp, Homo sapiens
gagccagaggccctt

SEQ ID NO: 357761 - DNA, 15 bp, Homo sapiens
agagccagaggccct

SEQ ID NO: 357762 - DNA, 15 bp, Homo sapiens
aagagccagaggccc

SEQ ID NO: 357763 - DNA, 15 bp, Homo sapiens
aaagagccagaggcc

SEQ ID NO: 357764 - DNA, 15 bp, Homo sapiens
taaagagccagaggc

SEQ ID NO: 357765 - DNA, 15 bp, Homo sapiens
ataaagagccagagg

SEQ ID NO: 357766 - DNA, 15 bp, Homo sapiens
aataaagagccagag

SEQ ID NO: 357767 - DNA, 15 bp, Homo sapiens
taataaagagccaga

SEQ ID NO: 357768 - DNA, 15 bp, Homo sapiens
ataataaagagccag

SEQ ID NO: 357769 - DNA, 15 bp, Homo sapiens
aataataaagagcca

SEQ ID NO: 357770 - DNA, 15 bp, Homo sapiens
aaataataaagagcc

SEQ ID NO: 357771 - DNA, 15 bp, Homo sapiens
taaataataaagagc

SEQ ID NO: 357772 - DNA, 15 bp, Homo sapiens
ataaataataaagag

SEQ ID NO: 357773 - DNA, 15 bp, Homo sapiens
aataaataataaaga

SEQ ID NO: 357774 - DNA, 15 bp, Homo sapiens
aaataaataataaag

SEQ ID NO: 357775 - DNA, 15 bp, Homo sapiens
aaaataaataataaa

SEQ ID NO: 357776 - DNA, 15 bp, Homo sapiens
taaaataaataataa

SEQ ID NO: 357777 - DNA, 15 bp, Homo sapiens
ataaaataaataata

SEQ ID NO: 357778 - DNA, 15 bp, Homo sapiens
aataaaataaataat

SEQ ID NO: 357779 - DNA, 15 bp, Homo sapiens
aaataaaataaataa

SEQ ID NO: 357780 - DNA, 15 bp, Homo sapiens
taaataaaataaata

SEQ ID NO: 357781 - DNA, 15 bp, Homo sapiens
ataaataaaataaat

SEQ ID NO: 357782 - DNA, 15 bp, Homo sapiens
aataaataaaataaa

SEQ ID NO: 357783 - DNA, 15 bp, Homo sapiens
aaataaataaaataa

SEQ ID NO: 357784 - DNA, 15 bp, Homo sapiens
taaataaataaaata

SEQ ID NO: 357785 - DNA, 15 bp, Homo sapiens
ataaataaataaaat

SEQ ID NO: 357786 - DNA, 15 bp, Homo sapiens
caaataaataaataa

SEQ ID NO: 357787 - DNA, 15 bp, Homo sapiens
acaaataaataaata

SEQ ID NO: 357788 - DNA, 15 bp, Homo sapiens
aacaaataaataaat

SEQ ID NO: 357789 - DNA, 15 bp, Homo sapiens
aaacaaataaataaa

SEQ ID NO: 357790 - DNA, 15 bp, Homo sapiens
taaacaaataaataa

SEQ ID NO: 357791 - DNA, 15 bp, Homo sapiens
ataaacaaataaata

SEQ ID NO: 357792 - DNA, 15 bp, Homo sapiens
aataaacaaataaat

SEQ ID NO: 357793 - DNA, 15 bp, Homo sapiens
aaataaacaaataaa

SEQ ID NO: 357794 - DNA, 15 bp, Homo sapiens
taaataaacaaataa

SEQ ID NO: 357795 - DNA, 15 bp, Homo sapiens
ataaataaacaaata

SEQ ID NO: 357796 - DNA, 15 bp, Homo sapiens
aataaataaacaaat

SEQ ID NO: 357797 - DNA, 15 bp, Homo sapiens
aaataaataaacaaa

SEQ ID NO: 357798 - DNA, 15 bp, Homo sapiens
taaataaataaacaa

SEQ ID NO: 357799 - DNA, 15 bp, Homo sapiens
ataaataaataaaca

SEQ ID NO: 357800 - DNA, 15 bp, Homo sapiens
aataaataaataaac

SEQ ID NO: 357801 - DNA, 15 bp, Homo sapiens
tcaaaataaataaat

SEQ ID NO: 357802 - DNA, 15 bp, Homo sapiens
ctcaaaataaataaa

SEQ ID NO: 357803 - DNA, 15 bp, Homo sapiens
tctcaaaataaataa

SEQ ID NO: 357804 - DNA, 15 bp, Homo sapiens
gtctcaaaataaata

SEQ ID NO: 357805 - DNA, 15 bp, Homo sapiens
tgtctcaaaataaat

SEQ ID NO: 357806 - DNA, 15 bp, Homo sapiens
ctgtctcaaaataaa

SEQ ID NO: 357807 - DNA, 15 bp, Homo sapiens
tctgtctcaaaataa

SEQ ID NO: 357808 - DNA, 15 bp, Homo sapiens
ctctgtctcaaaata

SEQ ID NO: 357809 - DNA, 15 bp, Homo sapiens
actctgtctcaaaat

SEQ ID NO: 357810 - DNA, 15 bp, Homo sapiens
gactctgtctcaaaa

SEQ ID NO: 357811 - DNA, 15 bp, Homo sapiens
agactctgtctcaaa

SEQ ID NO: 357812 - DNA, 15 bp, Homo sapiens
aagactctgtctcaa

SEQ ID NO: 357813 - DNA, 15 bp, Homo sapiens
caagactctgtctca

SEQ ID NO: 357814 - DNA, 15 bp, Homo sapiens
gcaagactctgtctc

SEQ ID NO: 357815 - DNA, 15 bp, Homo sapiens
agcaagactctgtct

SEQ ID NO: 357816 - DNA, 15 bp, Homo sapiens
gagcaagactctgtc

SEQ ID NO: 357817 - DNA, 15 bp, Homo sapiens
ggagcaagactctgt

SEQ ID NO: 357818 - DNA, 15 bp, Homo sapiens
tggagcaagactctg

SEQ ID NO: 357819 - DNA, 15 bp, Homo sapiens
atggagcaagactct

SEQ ID NO: 357820 - DNA, 15 bp, Homo sapiens
gatggagcaagactc

SEQ ID NO: 357821 - DNA, 15 bp, Homo sapiens
cgatggagcaagact

SEQ ID NO: 357822 - DNA, 15 bp, Homo sapiens
gcgatggagcaagac

SEQ ID NO: 357823 - DNA, 15 bp, Homo sapiens
ggcgatggagcaaga

SEQ ID NO: 357824 - DNA, 15 bp, Homo sapiens
gggcgatggagcaag

SEQ ID NO: 357825 - DNA, 15 bp, Homo sapiens
tgggcgatggagcaa

SEQ ID NO: 357826 - DNA, 15 bp, Homo sapiens
ctgggcgatggagca

SEQ ID NO: 357827 - DNA, 15 bp, Homo sapiens
cctgggcgatggagc

SEQ ID NO: 357828 - DNA, 15 bp, Homo sapiens
gcctgggcgatggag

SEQ ID NO: 357829 - DNA, 15 bp, Homo sapiens
agcctgggcgatgga

SEQ ID NO: 357830 - DNA, 15 bp, Homo sapiens
cagcctgggcgatgg

SEQ ID NO: 357831 - DNA, 15 bp, Homo sapiens
ccagcctgggcgatg

SEQ ID NO: 357832 - DNA, 15 bp, Homo sapiens
tccagcctgggcgat

SEQ ID NO: 357833 - DNA, 15 bp, Homo sapiens
tcactccagcctggg

SEQ ID NO: 357834 - DNA, 15 bp, Homo sapiens
ctcactccagcctgg

SEQ ID NO: 357835 - DNA, 15 bp, Homo sapiens
actcactccagcctg

SEQ ID NO: 357836 - DNA, 15 bp, Homo sapiens
cactcactccagcct

SEQ ID NO: 357837 - DNA, 15 bp, Homo sapiens
ccactcactccagcc

SEQ ID NO: 357838 - DNA, 15 bp, Homo sapiens
accactcactccagc

SEQ ID NO: 357839 - DNA, 15 bp, Homo sapiens
caccactcactccag

SEQ ID NO: 357840 - DNA, 15 bp, Homo sapiens
ccaccactcactcca

SEQ ID NO: 357841 - DNA, 15 bp, Homo sapiens
cccaccactcactcc

SEQ ID NO: 357842 - DNA, 15 bp, Homo sapiens
tcccaccactcactc

SEQ ID NO: 357843 - DNA, 15 bp, Homo sapiens
atcccaccactcact

SEQ ID NO: 357844 - DNA, 15 bp, Homo sapiens
catcccaccactcac

SEQ ID NO: 357845 - DNA, 15 bp, Homo sapiens
ccatcccaccactca

SEQ ID NO: 357846 - DNA, 15 bp, Homo sapiens
gccatcccaccactc

SEQ ID NO: 357847 - DNA, 15 bp, Homo sapiens
tgccatcccaccact

SEQ ID NO: 357848 - DNA, 15 bp, Homo sapiens
ctgccatcccaccac

SEQ ID NO: 357849 - DNA, 15 bp, Homo sapiens
gctgccatcccacca

SEQ ID NO: 357850 - DNA, 15 bp, Homo sapiens
agctgccatcccacc

SEQ ID NO: 357851 - DNA, 15 bp, Homo sapiens
gagctgccatcccac

SEQ ID NO: 357852 - DNA, 15 bp, Homo sapiens
tgagctgccatccca

SEQ ID NO: 357853 - DNA, 15 bp, Homo sapiens
gtgagctgccatccc

SEQ ID NO: 357854 - DNA, 15 bp, Homo sapiens
agtgagctgccatcc

SEQ ID NO: 357855 - DNA, 15 bp, Homo sapiens
cagtgagctgccatc

SEQ ID NO: 357856 - DNA, 15 bp, Homo sapiens
gcagtgagctgccat

SEQ ID NO: 357857 - DNA, 15 bp, Homo sapiens
tgcagtgagctgcca

SEQ ID NO: 357858 - DNA, 15 bp, Homo sapiens
ttgcagtgagctgcc

SEQ ID NO: 357859 - DNA, 15 bp, Homo sapiens
cttgcagtgagctgc

SEQ ID NO: 357860 - DNA, 15 bp, Homo sapiens
gcttgcagtgagctg

SEQ ID NO: 357861 - DNA, 15 bp, Homo sapiens
agcttgcagtgagct

SEQ ID NO: 357862 - DNA, 15 bp, Homo sapiens
cggagcttgcagtga

SEQ ID NO: 357863 - DNA, 15 bp, Homo sapiens
gcggagcttgcagtg

SEQ ID NO: 357864 - DNA, 15 bp, Homo sapiens
ggcggagcttgcagt

SEQ ID NO: 357865 - DNA, 15 bp, Homo sapiens
aggcggagcttgcag

SEQ ID NO: 357866 - DNA, 15 bp, Homo sapiens
gaggcggagcttgca

SEQ ID NO: 357867 - DNA, 15 bp, Homo sapiens
ggaggcggagcttgc

SEQ ID NO: 357868 - DNA, 15 bp, Homo sapiens
gggaggcggagcttg

SEQ ID NO: 357869 - DNA, 15 bp, Homo sapiens
tgggaggcggagctt

SEQ ID NO: 357870 - DNA, 15 bp, Homo sapiens
ctgggaggcggagct

SEQ ID NO: 357871 - DNA, 15 bp, Homo sapiens
cctgggaggcggagc

SEQ ID NO: 357872 - DNA, 15 bp, Homo sapiens
acctgggaggcggag

SEQ ID NO: 357873 - DNA, 15 bp, Homo sapiens
aacctgggaggcgga

SEQ ID NO: 357874 - DNA, 15 bp, Homo sapiens
gaacctgggaggcgg

SEQ ID NO: 357875 - DNA, 15 bp, Homo sapiens
tgaacctgggaggcg

SEQ ID NO: 357876 - DNA, 15 bp, Homo sapiens
gtgaacctgggaggc

SEQ ID NO: 357877 - DNA, 15 bp, Homo sapiens
tgtgaacctgggagg

SEQ ID NO: 357878 - DNA, 15 bp, Homo sapiens
gtgtgaacctgggag

SEQ ID NO: 357879 - DNA, 15 bp, Homo sapiens
ggtgtgaacctggga

SEQ ID NO: 357880 - DNA, 15 bp, Homo sapiens
tggtgtgaacctggg

SEQ ID NO: 357881 - DNA, 15 bp, Homo sapiens
atggtgtgaacctgg

SEQ ID NO: 357882 - DNA, 15 bp, Homo sapiens
aatggtgtgaacctg

SEQ ID NO: 357883 - DNA, 15 bp, Homo sapiens
gaatggtgtgaacct

SEQ ID NO: 357884 - DNA, 15 bp, Homo sapiens
agaatggtgtgaacc

SEQ ID NO: 357885 - DNA, 15 bp, Homo sapiens
gagaatggtgtgaac

SEQ ID NO: 357886 - DNA, 15 bp, Homo sapiens
ggagaatggtgtgaa

SEQ ID NO: 357887 - DNA, 15 bp, Homo sapiens
aggagaatggtgtga

SEQ ID NO: 357888 - DNA, 15 bp, Homo sapiens
caggagaatggtgtg

SEQ ID NO: 357889 - DNA, 15 bp, Homo sapiens
gcaggagaatggtgt

SEQ ID NO: 357890 - DNA, 15 bp, Homo sapiens
ggcaggagaatggtg

SEQ ID NO: 357891 - DNA, 15 bp, Homo sapiens
aggcaggagaatggt

SEQ ID NO: 357892 - DNA, 15 bp, Homo sapiens
gaggcaggagaatgg

SEQ ID NO: 357893 - DNA, 15 bp, Homo sapiens
tgaggcaggagaatg

SEQ ID NO: 357894 - DNA, 15 bp, Homo sapiens
tgggcgcctgtagtc

SEQ ID NO: 357895 - DNA, 15 bp, Homo sapiens
gtgggcgcctgtagt

SEQ ID NO: 357896 - DNA, 15 bp, Homo sapiens
ggtgggcgcctgtag

SEQ ID NO: 357897 - DNA, 15 bp, Homo sapiens
tggtgggcgcctgta

SEQ ID NO: 357898 - DNA, 15 bp, Homo sapiens
gtggtgggcgcctgt

SEQ ID NO: 357899 - DNA, 15 bp, Homo sapiens
ggtggtgggcgcctg

SEQ ID NO: 357900 - DNA, 15 bp, Homo sapiens
tggtggtgggcgcct

SEQ ID NO: 357901 - DNA, 15 bp, Homo sapiens
gtggtggtgggcgcc

SEQ ID NO: 357902 - DNA, 15 bp, Homo sapiens
tgtggtggtgggcgc

SEQ ID NO: 357903 - DNA, 15 bp, Homo sapiens
gtgtggtggtgggcg

SEQ ID NO: 357904 - DNA, 15 bp, Homo sapiens
ggtgtggtggtgggc

SEQ ID NO: 357905 - DNA, 15 bp, Homo sapiens
gggtgtggtggtggg

SEQ ID NO: 357906 - DNA, 15 bp, Homo sapiens
tgggtgtggtggtgg

SEQ ID NO: 357907 - DNA, 15 bp, Homo sapiens
ctgggtgtggtggtg

SEQ ID NO: 357908 - DNA, 15 bp, Homo sapiens
gctgggtgtggtggt

SEQ ID NO: 357909 - DNA, 15 bp, Homo sapiens
aaaaattagctgggt

SEQ ID NO: 357910 - DNA, 15 bp, Homo sapiens
aaaaaattagctggg

SEQ ID NO: 357911 - DNA, 15 bp, Homo sapiens
aaaaaaattagctgg

SEQ ID NO: 357912 - DNA, 15 bp, Homo sapiens
aaaaaaaattagctg

SEQ ID NO: 357913 - DNA, 15 bp, Homo sapiens
caaaaaaaattagct

SEQ ID NO: 357914 - DNA, 15 bp, Homo sapiens
acaaaaaaaattagc

SEQ ID NO: 357915 - DNA, 15 bp, Homo sapiens
tacaaaaaaaattag

SEQ ID NO: 357916 - DNA, 15 bp, Homo sapiens
atacaaaaaaaatta

SEQ ID NO: 357917 - DNA, 15 bp, Homo sapiens
aatacaaaaaaaatt

SEQ ID NO: 357918 - DNA, 15 bp, Homo sapiens
aaatacaaaaaaaat

SEQ ID NO: 357919 - DNA, 15 bp, Homo sapiens
aaaatacaaaaaaaa

SEQ ID NO: 357920 - DNA, 15 bp, Homo sapiens
aaaaatacaaaaaaa

SEQ ID NO: 357921 - DNA, 15 bp, Homo sapiens
ctaacacggtgaaac

SEQ ID NO: 357922 - DNA, 15 bp, Homo sapiens
gctaacacggtgaaa

SEQ ID NO: 357923 - DNA, 15 bp, Homo sapiens
ggctaacacggtgaa

SEQ ID NO: 357924 - DNA, 15 bp, Homo sapiens
tggctaacacggtga

SEQ ID NO: 357925 - DNA, 15 bp, Homo sapiens
ctggctaacacggtg

SEQ ID NO: 357926 - DNA, 15 bp, Homo sapiens
cctggctaacacggt

SEQ ID NO: 357927 - DNA, 15 bp, Homo sapiens
tcctggctaacacgg

SEQ ID NO: 357928 - DNA, 15 bp, Homo sapiens
atcctggctaacacg

SEQ ID NO: 357929 - DNA, 15 bp, Homo sapiens
catcctggctaacac

SEQ ID NO: 357930 - DNA, 15 bp, Homo sapiens
ccatcctggctaaca

SEQ ID NO: 357931 - DNA, 15 bp, Homo sapiens
accatcctggctaac

SEQ ID NO: 357932 - DNA, 15 bp, Homo sapiens
gaccatcctggctaa

SEQ ID NO: 357933 - DNA, 15 bp, Homo sapiens
agaccatcctggcta

SEQ ID NO: 357934 - DNA, 15 bp, Homo sapiens
aagaccatcctggct

SEQ ID NO: 357935 - DNA, 15 bp, Homo sapiens
caagaccatcctggc

SEQ ID NO: 357936 - DNA, 15 bp, Homo sapiens
tcaagaccatcctgg

SEQ ID NO: 357937 - DNA, 15 bp, Homo sapiens
atcaagaccatcctg

SEQ ID NO: 357938 - DNA, 15 bp, Homo sapiens
gatcaagaccatcct

SEQ ID NO: 357939 - DNA, 15 bp, Homo sapiens
agatcaagaccatcc

SEQ ID NO: 357940 - DNA, 15 bp, Homo sapiens
gagatcaagaccatc

SEQ ID NO: 357941 - DNA, 15 bp, Homo sapiens
ggagatcaagaccat

SEQ ID NO: 357942 - DNA, 15 bp, Homo sapiens
gggagatcaagacca

SEQ ID NO: 357943 - DNA, 15 bp, Homo sapiens
cgggagatcaagacc

SEQ ID NO: 357944 - DNA, 15 bp, Homo sapiens
tcgggagatcaagac

SEQ ID NO: 357945 - DNA, 15 bp, Homo sapiens
gtcgggagatcaaga

SEQ ID NO: 357946 - DNA, 15 bp, Homo sapiens
ggtcgggagatcaag

SEQ ID NO: 357947 - DNA, 15 bp, Homo sapiens
aggtcgggagatcaa

SEQ ID NO: 357948 - DNA, 15 bp, Homo sapiens
aaggtcgggagatca

SEQ ID NO: 357949 - DNA, 15 bp, Homo sapiens
caaggtcgggagatc

SEQ ID NO: 357950 - DNA, 15 bp, Homo sapiens
acaaggtcgggagat

SEQ ID NO: 357951 - DNA, 15 bp, Homo sapiens
cacaaggtcgggaga

SEQ ID NO: 357952 - DNA, 15 bp, Homo sapiens
tcacaaggtcgggag

SEQ ID NO: 357953 - DNA, 15 bp, Homo sapiens
atcacaaggtcggga

SEQ ID NO: 357954 - DNA, 15 bp, Homo sapiens
gatcacaaggtcggg

SEQ ID NO: 357955 - DNA, 15 bp, Homo sapiens
ggatcacaaggtcgg

SEQ ID NO: 357956 - DNA, 15 bp, Homo sapiens
cggatcacaaggtcg

SEQ ID NO: 357957 - DNA, 15 bp, Homo sapiens
gcggatcacaaggtc

SEQ ID NO: 357958 - DNA, 15 bp, Homo sapiens
ggcggatcacaaggt

SEQ ID NO: 357959 - DNA, 15 bp, Homo sapiens
gggcggatcacaagg

SEQ ID NO: 357960 - DNA, 15 bp, Homo sapiens
tgggcggatcacaag

SEQ ID NO: 357961 - DNA, 15 bp, Homo sapiens
gtgggcggatcacaa

SEQ ID NO: 357962 - DNA, 15 bp, Homo sapiens
ggtgggcggatcaca

SEQ ID NO: 357963 - DNA, 15 bp, Homo sapiens
aggtgggcggatcac

SEQ ID NO: 357964 - DNA, 15 bp, Homo sapiens
gaggtgggcggatca

SEQ ID NO: 357965 - DNA, 15 bp, Homo sapiens
tgaggtgggcggatc

SEQ ID NO: 357966 - DNA, 15 bp, Homo sapiens
ctgaggtgggcggat

SEQ ID NO: 357967 - DNA, 15 bp, Homo sapiens
gctgaggtgggcgga

SEQ ID NO: 357968 - DNA, 15 bp, Homo sapiens
ggctgaggtgggcgg

SEQ ID NO: 357969 - DNA, 15 bp, Homo sapiens
aggctgaggtgggcg

SEQ ID NO: 357970 - DNA, 15 bp, Homo sapiens
gaggctgaggtgggc

SEQ ID NO: 357971 - DNA, 15 bp, Homo sapiens
ggaggctgaggtggg

SEQ ID NO: 357972 - DNA, 15 bp, Homo sapiens
gggaggctgaggtgg

SEQ ID NO: 357973 - DNA, 15 bp, Homo sapiens
tgggaggctgaggtg

SEQ ID NO: 357974 - DNA, 15 bp, Homo sapiens
ttgggaggctgaggt

SEQ ID NO: 357975 - DNA, 15 bp, Homo sapiens
tgtggtggctcacgc

SEQ ID NO: 357976 - DNA, 15 bp, Homo sapiens
gtgtggtggctcacg

SEQ ID NO: 357977 - DNA, 15 bp, Homo sapiens
ggtgtggtggctcac

SEQ ID NO: 357978 - DNA, 15 bp, Homo sapiens
tggtgtggtggctca

SEQ ID NO: 357979 - DNA, 15 bp, Homo sapiens
ctggtgtggtggctc

SEQ ID NO: 357980 - DNA, 15 bp, Homo sapiens
cctggtgtggtggct

SEQ ID NO: 357981 - DNA, 15 bp, Homo sapiens
gcctggtgtggtggc

SEQ ID NO: 357982 - DNA, 15 bp, Homo sapiens
ggcctggtgtggtgg

SEQ ID NO: 357983 - DNA, 15 bp, Homo sapiens
aggcctggtgtggtg

SEQ ID NO: 357984 - DNA, 15 bp, Homo sapiens
aaggcctggtgtggt

SEQ ID NO: 357985 - DNA, 15 bp, Homo sapiens
taaggcctggtgtgg

SEQ ID NO: 357986 - DNA, 15 bp, Homo sapiens
ataaggcctggtgtg

SEQ ID NO: 357987 - DNA, 15 bp, Homo sapiens
aataaggcctggtgt

SEQ ID NO: 357988 - DNA, 15 bp, Homo sapiens
aaataaggcctggtg

SEQ ID NO: 357989 - DNA, 15 bp, Homo sapiens
taaataaggcctggt

SEQ ID NO: 357990 - DNA, 15 bp, Homo sapiens
ataaataaggcctgg

SEQ ID NO: 357991 - DNA, 15 bp, Homo sapiens
aataaataaggcctg

SEQ ID NO: 357992 - DNA, 15 bp, Homo sapiens
aaataaataaggcct

SEQ ID NO: 357993 - DNA, 15 bp, Homo sapiens
taaataaataaggcc

SEQ ID NO: 357994 - DNA, 15 bp, Homo sapiens
ataaataaataaggc

SEQ ID NO: 357995 - DNA, 15 bp, Homo sapiens
aataaataaataagg

SEQ ID NO: 357996 - DNA, 15 bp, Homo sapiens
aaataaataaataag

SEQ ID NO: 357997 - DNA, 15 bp, Homo sapiens
tgtctcaaaaataaa

SEQ ID NO: 357998 - DNA, 15 bp, Homo sapiens
ctgtctcaaaaataa

SEQ ID NO: 357999 - DNA, 15 bp, Homo sapiens
tctgtctcaaaaata

SEQ ID NO: 358000 - DNA, 15 bp, Homo sapiens
ctctgtctcaaaaat

SEQ ID NO: 358001 - DNA, 15 bp, Homo sapiens
gctctgtctcaaaaa

SEQ ID NO: 358002 - DNA, 15 bp, Homo sapiens
ggctctgtctcaaaa

SEQ ID NO: 358003 - DNA, 15 bp, Homo sapiens
aggctctgtctcaaa

SEQ ID NO: 358004 - DNA, 15 bp, Homo sapiens
aaggctctgtctcaa

SEQ ID NO: 358005 - DNA, 15 bp, Homo sapiens
caaggctctgtctca

SEQ ID NO: 358006 - DNA, 15 bp, Homo sapiens
gcaaggctctgtctc

SEQ ID NO: 358007 - DNA, 15 bp, Homo sapiens
agcaaggctctgtct

SEQ ID NO: 358008 - DNA, 15 bp, Homo sapiens
gagcaaggctctgtc

SEQ ID NO: 358009 - DNA, 15 bp, Homo sapiens
agagcaaggctctgt

SEQ ID NO: 358010 - DNA, 15 bp, Homo sapiens
cagagcaaggctctg

SEQ ID NO: 358011 - DNA, 15 bp, Homo sapiens
acagagcaaggctct

SEQ ID NO: 358012 - DNA, 15 bp, Homo sapiens
gacagagcaaggctc

SEQ ID NO: 358013 - DNA, 15 bp, Homo sapiens
tgacagagcaaggct

SEQ ID NO: 358014 - DNA, 15 bp, Homo sapiens
gtgacagagcaaggc

SEQ ID NO: 358015 - DNA, 15 bp, Homo sapiens
ggtgacagagcaagg

SEQ ID NO: 358016 - DNA, 15 bp, Homo sapiens
caccactgcactcca

SEQ ID NO: 358017 - DNA, 15 bp, Homo sapiens
gcaccactgcactcc

SEQ ID NO: 358018 - DNA, 15 bp, Homo sapiens
cgcaccactgcactc

SEQ ID NO: 358019 - DNA, 15 bp, Homo sapiens
tcgcaccactgcact

SEQ ID NO: 358020 - DNA, 15 bp, Homo sapiens
atcgcaccactgcac

SEQ ID NO: 358021 - DNA, 15 bp, Homo sapiens
gatcgcaccactgca

SEQ ID NO: 358022 - DNA, 15 bp, Homo sapiens
agatcgcaccactgc

SEQ ID NO: 358023 - DNA, 15 bp, Homo sapiens
gagatcgcaccactg

SEQ ID NO: 358024 - DNA, 15 bp, Homo sapiens
cgagatcgcaccact

SEQ ID NO: 358025 - DNA, 15 bp, Homo sapiens
ccgagatcgcaccac

SEQ ID NO: 358026 - DNA, 15 bp, Homo sapiens
gccgagatcgcacca

SEQ ID NO: 358027 - DNA, 15 bp, Homo sapiens
agccgagatcgcacc

SEQ ID NO: 358028 - DNA, 15 bp, Homo sapiens
gagccgagatcgcac

SEQ ID NO: 358029 - DNA, 15 bp, Homo sapiens
tgagccgagatcgca

SEQ ID NO: 358030 - DNA, 15 bp, Homo sapiens
cgtgagccgagatcg

SEQ ID NO: 358031 - DNA, 15 bp, Homo sapiens
ccgtgagccgagatc

SEQ ID NO: 358032 - DNA, 15 bp, Homo sapiens
gccgtgagccgagat

SEQ ID NO: 358033 - DNA, 15 bp, Homo sapiens
tgccgtgagccgaga

SEQ ID NO: 358034 - DNA, 15 bp, Homo sapiens
ttgccgtgagccgag

SEQ ID NO: 358035 - DNA, 15 bp, Homo sapiens
gttgccgtgagccga

SEQ ID NO: 358036 - DNA, 15 bp, Homo sapiens
ggttgccgtgagccg

SEQ ID NO: 358037 - DNA, 15 bp, Homo sapiens
aggttgccgtgagcc

SEQ ID NO: 358038 - DNA, 15 bp, Homo sapiens
gaggttgccgtgagc

SEQ ID NO: 358039 - DNA, 15 bp, Homo sapiens
ggaggttgccgtgag

SEQ ID NO: 358040 - DNA, 15 bp, Homo sapiens
cggaggttgccgtga

SEQ ID NO: 358041 - DNA, 15 bp, Homo sapiens
gcggaggttgccgtg

SEQ ID NO: 358042 - DNA, 15 bp, Homo sapiens
ggcggaggttgccgt

SEQ ID NO: 358043 - DNA, 15 bp, Homo sapiens
aggcggaggttgccg

SEQ ID NO: 358044 - DNA, 15 bp, Homo sapiens
gaggcggaggttgcc

SEQ ID NO: 358045 - DNA, 15 bp, Homo sapiens
tcgggaggcggaggt

SEQ ID NO: 358046 - DNA, 15 bp, Homo sapiens
ctcgggaggcggagg

SEQ ID NO: 358047 - DNA, 15 bp, Homo sapiens
actcgggaggcggag

SEQ ID NO: 358048 - DNA, 15 bp, Homo sapiens
aactcgggaggcgga

SEQ ID NO: 358049 - DNA, 15 bp, Homo sapiens
gaactcgggaggcgg

SEQ ID NO: 358050 - DNA, 15 bp, Homo sapiens
tgaactcgggaggcg

SEQ ID NO: 358051 - DNA, 15 bp, Homo sapiens
ttgaactcgggaggc

SEQ ID NO: 358052 - DNA, 15 bp, Homo sapiens
cttgaactcgggagg

SEQ ID NO: 358053 - DNA, 15 bp, Homo sapiens
gcttgaactcgggag

SEQ ID NO: 358054 - DNA, 15 bp, Homo sapiens
tgcttgaactcggga

SEQ ID NO: 358055 - DNA, 15 bp, Homo sapiens
ttgcttgaactcggg

SEQ ID NO: 358056 - DNA, 15 bp, Homo sapiens
attgcttgaactcgg

SEQ ID NO: 358057 - DNA, 15 bp, Homo sapiens
aattgcttgaactcg

SEQ ID NO: 358058 - DNA, 15 bp, Homo sapiens
gaattgcttgaactc

SEQ ID NO: 358059 - DNA, 15 bp, Homo sapiens
agaattgcttgaact

SEQ ID NO: 358060 - DNA, 15 bp, Homo sapiens
agaggctgaggcagg

SEQ ID NO: 358061 - DNA, 15 bp, Homo sapiens
gagaggctgaggcag

SEQ ID NO: 358062 - DNA, 15 bp, Homo sapiens
cgagaggctgaggca

SEQ ID NO: 358063 - DNA, 15 bp, Homo sapiens
tcgagaggctgaggc

SEQ ID NO: 358064 - DNA, 15 bp, Homo sapiens
ctcgagaggctgagg

SEQ ID NO: 358065 - DNA, 15 bp, Homo sapiens
actcgagaggctgag

SEQ ID NO: 358066 - DNA, 15 bp, Homo sapiens
tactcgagaggctga

SEQ ID NO: 358067 - DNA, 15 bp, Homo sapiens
ctactcgagaggctg

SEQ ID NO: 358068 - DNA, 15 bp, Homo sapiens
gctactcgagaggct

SEQ ID NO: 358069 - DNA, 15 bp, Homo sapiens
agctactcgagaggc

SEQ ID NO: 358070 - DNA, 15 bp, Homo sapiens
cagctactcgagagg

SEQ ID NO: 358071 - DNA, 15 bp, Homo sapiens
ccagctactcgagag

SEQ ID NO: 358072 - DNA, 15 bp, Homo sapiens
cccagctactcgaga

SEQ ID NO: 358073 - DNA, 15 bp, Homo sapiens
tcccagctactcgag

SEQ ID NO: 358074 - DNA, 15 bp, Homo sapiens
gtcccagctactcga

SEQ ID NO: 358075 - DNA, 15 bp, Homo sapiens
cagtcccagctactc

SEQ ID NO: 358076 - DNA, 15 bp, Homo sapiens
gcagtcccagctact

SEQ ID NO: 358077 - DNA, 15 bp, Homo sapiens
tgcagtcccagctac

SEQ ID NO: 358078 - DNA, 15 bp, Homo sapiens
ctgcagtcccagcta

SEQ ID NO: 358079 - DNA, 15 bp, Homo sapiens
cctgcagtcccagct

SEQ ID NO: 358080 - DNA, 15 bp, Homo sapiens
acctgcagtcccagc

SEQ ID NO: 358081 - DNA, 15 bp, Homo sapiens
cacctgcagtcccag

SEQ ID NO: 358082 - DNA, 15 bp, Homo sapiens
gcacctgcagtccca

SEQ ID NO: 358083 - DNA, 15 bp, Homo sapiens
ggcacctgcagtccc

SEQ ID NO: 358084 - DNA, 15 bp, Homo sapiens
gggcacctgcagtcc

SEQ ID NO: 358085 - DNA, 15 bp, Homo sapiens
cgggcacctgcagtc

SEQ ID NO: 358086 - DNA, 15 bp, Homo sapiens
gcgggcacctgcagt

SEQ ID NO: 358087 - DNA, 15 bp, Homo sapiens
ggcgggcacctgcag

SEQ ID NO: 358088 - DNA, 15 bp, Homo sapiens
tggcgggcacctgca

SEQ ID NO: 358089 - DNA, 15 bp, Homo sapiens
gtggcgggcacctgc

SEQ ID NO: 358090 - DNA, 15 bp, Homo sapiens
tggtggcgggcacct

SEQ ID NO: 358091 - DNA, 15 bp, Homo sapiens
gtggtggcgggcacc

SEQ ID NO: 358092 - DNA, 15 bp, Homo sapiens
cgtggtggcgggcac

SEQ ID NO: 358093 - DNA, 15 bp, Homo sapiens
gcgtggtggcgggca

SEQ ID NO: 358094 - DNA, 15 bp, Homo sapiens
aggcgtggtggcggg

SEQ ID NO: 358095 - DNA, 15 bp, Homo sapiens
caggcgtggtggcgg

SEQ ID NO: 358096 - DNA, 15 bp, Homo sapiens
ccaggcgtggtggcg

SEQ ID NO: 358097 - DNA, 15 bp, Homo sapiens
aaaaaattagccagg

SEQ ID NO: 358098 - DNA, 15 bp, Homo sapiens
aaaaaaattagccag

SEQ ID NO: 358099 - DNA, 15 bp, Homo sapiens
caaaaaaattagcca

SEQ ID NO: 358100 - DNA, 15 bp, Homo sapiens
acaaaaaaattagcc

SEQ ID NO: 358101 - DNA, 15 bp, Homo sapiens
tacaaaaaaattagc

SEQ ID NO: 358102 - DNA, 15 bp, Homo sapiens
atacaaaaaaattag

SEQ ID NO: 358103 - DNA, 15 bp, Homo sapiens
aatacaaaaaaatta

SEQ ID NO: 358104 - DNA, 15 bp, Homo sapiens
aaatacaaaaaaatt

SEQ ID NO: 358105 - DNA, 15 bp, Homo sapiens
aaaatacaaaaaaat

SEQ ID NO: 358106 - DNA, 15 bp, Homo sapiens
aaccagcctggccaa

SEQ ID NO: 358107 - DNA, 15 bp, Homo sapiens
aaaccagcctggcca

SEQ ID NO: 358108 - DNA, 15 bp, Homo sapiens
aaaaccagcctggcc

SEQ ID NO: 358109 - DNA, 15 bp, Homo sapiens
caaaaccagcctggc

SEQ ID NO: 358110 - DNA, 15 bp, Homo sapiens
tcaaaaccagcctgg

SEQ ID NO: 358111 - DNA, 15 bp, Homo sapiens
ttcaaaaccagcctg

SEQ ID NO: 358112 - DNA, 15 bp, Homo sapiens
gttcaaaaccagcct

SEQ ID NO: 358113 - DNA, 15 bp, Homo sapiens
agttcaaaaccagcc

SEQ ID NO: 358114 - DNA, 15 bp, Homo sapiens
gagttcaaaaccagc

SEQ ID NO: 358115 - DNA, 15 bp, Homo sapiens
ggagttcaaaaccag

SEQ ID NO: 358116 - DNA, 15 bp, Homo sapiens
aggagttcaaaacca

SEQ ID NO: 358117 - DNA, 15 bp, Homo sapiens
caggagttcaaaacc

SEQ ID NO: 358118 - DNA, 15 bp, Homo sapiens
tcaggagttcaaaac

SEQ ID NO: 358119 - DNA, 15 bp, Homo sapiens
gtcaggagttcaaaa

SEQ ID NO: 358120 - DNA, 15 bp, Homo sapiens
ggtcaggagttcaaa

SEQ ID NO: 358121 - DNA, 15 bp, Homo sapiens
ggatcacctgaggtc

SEQ ID NO: 358122 - DNA, 15 bp, Homo sapiens
tggatcacctgaggt

SEQ ID NO: 358123 - DNA, 15 bp, Homo sapiens
gtggatcacctgagg

SEQ ID NO: 358124 - DNA, 15 bp, Homo sapiens
gggtggatcacctga

SEQ ID NO: 358125 - DNA, 15 bp, Homo sapiens
cgggtggatcacctg

SEQ ID NO: 358126 - DNA, 15 bp, Homo sapiens
gcgggtggatcacct

SEQ ID NO: 358127 - DNA, 15 bp, Homo sapiens
ggcgggtggatcacc

SEQ ID NO: 358128 - DNA, 15 bp, Homo sapiens
aggcgggtggatcac

SEQ ID NO: 358129 - DNA, 15 bp, Homo sapiens
gaggcgggtggatca

SEQ ID NO: 358130 - DNA, 15 bp, Homo sapiens
cgaggcgggtggatc

SEQ ID NO: 358131 - DNA, 15 bp, Homo sapiens
ccgaggcgggtggat

SEQ ID NO: 358132 - DNA, 15 bp, Homo sapiens
gccgaggcgggtgga

SEQ ID NO: 358133 - DNA, 15 bp, Homo sapiens
ggccgaggcgggtgg

SEQ ID NO: 358134 - DNA, 15 bp, Homo sapiens
aggccgaggcgggtg

SEQ ID NO: 358135 - DNA, 15 bp, Homo sapiens
gaggccgaggcgggt

SEQ ID NO: 358136 - DNA, 15 bp, Homo sapiens
ggaggccgaggcggg

SEQ ID NO: 358137 - DNA, 15 bp, Homo sapiens
gggaggccgaggcgg

SEQ ID NO: 358138 - DNA, 15 bp, Homo sapiens
tgggaggccgaggcg

SEQ ID NO: 358139 - DNA, 15 bp, Homo sapiens
ttgggaggccgaggc

SEQ ID NO: 358140 - DNA, 15 bp, Homo sapiens
tcagcactttgggag

SEQ ID NO: 358141 - DNA, 15 bp, Homo sapiens
ctcagcactttggga

SEQ ID NO: 358142 - DNA, 15 bp, Homo sapiens
tctcagcactttggg

SEQ ID NO: 358143 - DNA, 15 bp, Homo sapiens
atctcagcactttgg

SEQ ID NO: 358144 - DNA, 15 bp, Homo sapiens
aatctcagcactttg

SEQ ID NO: 358145 - DNA, 15 bp, Homo sapiens
taatctcagcacttt

SEQ ID NO: 358146 - DNA, 15 bp, Homo sapiens
gtaatctcagcactt

SEQ ID NO: 358147 - DNA, 15 bp, Homo sapiens
tgtaatctcagcact

SEQ ID NO: 358148 - DNA, 15 bp, Homo sapiens
ctgtaatctcagcac

SEQ ID NO: 358149 - DNA, 15 bp, Homo sapiens
cctgtaatctcagca

SEQ ID NO: 358150 - DNA, 15 bp, Homo sapiens
gcctgtaatctcagc

SEQ ID NO: 358151 - DNA, 15 bp, Homo sapiens
cgcctgtaatctcag

SEQ ID NO: 358152 - DNA, 15 bp, Homo sapiens
acgcctgtaatctca

SEQ ID NO: 358153 - DNA, 15 bp, Homo sapiens
cacgcctgtaatctc

SEQ ID NO: 358154 - DNA, 15 bp, Homo sapiens
tcacgcctgtaatct

SEQ ID NO: 358155 - DNA, 15 bp, Homo sapiens
tgcagtggctcacgc

SEQ ID NO: 358156 - DNA, 15 bp, Homo sapiens
gtgcagtggctcacg

SEQ ID NO: 358157 - DNA, 15 bp, Homo sapiens
cgtgcagtggctcac

SEQ ID NO: 358158 - DNA, 15 bp, Homo sapiens
gcgtgcagtggctca

SEQ ID NO: 358159 - DNA, 15 bp, Homo sapiens
cgcgtgcagtggctc

SEQ ID NO: 358160 - DNA, 15 bp, Homo sapiens
ccgcgtgcagtggct

SEQ ID NO: 358161 - DNA, 15 bp, Homo sapiens
gccgcgtgcagtggc

SEQ ID NO: 358162 - DNA, 15 bp, Homo sapiens
ggccgcgtgcagtgg

SEQ ID NO: 358163 - DNA, 15 bp, Homo sapiens
gggccgcgtgcagtg

SEQ ID NO: 358164 - DNA, 15 bp, Homo sapiens
tgggccgcgtgcagt

SEQ ID NO: 358165 - DNA, 15 bp, Homo sapiens
atgggccgcgtgcag

SEQ ID NO: 358166 - DNA, 15 bp, Homo sapiens
tatgggccgcgtgca

SEQ ID NO: 358167 - DNA, 15 bp, Homo sapiens
ctatgggccgcgtgc

SEQ ID NO: 358168 - DNA, 15 bp, Homo sapiens
cctatgggccgcgtg

SEQ ID NO: 358169 - DNA, 15 bp, Homo sapiens
acctatgggccgcgt

SEQ ID NO: 358170 - DNA, 15 bp, Homo sapiens
tacctatgggccgcg

SEQ ID NO: 358171 - DNA, 15 bp, Homo sapiens
ttacctatgggccgc

SEQ ID NO: 358172 - DNA, 15 bp, Homo sapiens
tttacctatgggccg

SEQ ID NO: 358173 - DNA, 15 bp, Homo sapiens
ttttacctatgggcc

SEQ ID NO: 358174 - DNA, 15 bp, Homo sapiens
gttttacctatgggc

SEQ ID NO: 358175 - DNA, 15 bp, Homo sapiens
agttttacctatggg

SEQ ID NO: 358176 - DNA, 15 bp, Homo sapiens
gagttttacctatgg

SEQ ID NO: 358177 - DNA, 15 bp, Homo sapiens
agagttttacctatg

SEQ ID NO: 358178 - DNA, 15 bp, Homo sapiens
aagagttttacctat

SEQ ID NO: 358179 - DNA, 15 bp, Homo sapiens
taagagttttaccta

SEQ ID NO: 358180 - DNA, 15 bp, Homo sapiens
ataagagttttacct

SEQ ID NO: 358181 - DNA, 15 bp, Homo sapiens
aataagagttttacc

SEQ ID NO: 358182 - DNA, 15 bp, Homo sapiens
gaataagagttttac

SEQ ID NO: 358183 - DNA, 15 bp, Homo sapiens
ggaataagagtttta

SEQ ID NO: 358184 - DNA, 15 bp, Homo sapiens
gggaataagagtttt

SEQ ID NO: 358185 - DNA, 15 bp, Homo sapiens
agggaataagagttt

SEQ ID NO: 358186 - DNA, 15 bp, Homo sapiens
tagggaataagagtt

SEQ ID NO: 358187 - DNA, 15 bp, Homo sapiens
atagggaataagagt

SEQ ID NO: 358188 - DNA, 15 bp, Homo sapiens
catagggaataagag

SEQ ID NO: 358189 - DNA, 15 bp, Homo sapiens
acatagggaataaga

SEQ ID NO: 358190 - DNA, 15 bp, Homo sapiens
gacatagggaataag

SEQ ID NO: 358191 - DNA, 15 bp, Homo sapiens
tgacatagggaataa

SEQ ID NO: 358192 - DNA, 15 bp, Homo sapiens
atgacatagggaata

SEQ ID NO: 358193 - DNA, 15 bp, Homo sapiens
aatgacatagggaat

SEQ ID NO: 358194 - DNA, 15 bp, Homo sapiens
gaatgacatagggaa

SEQ ID NO: 358195 - DNA, 15 bp, Homo sapiens
agaatgacataggga

SEQ ID NO: 358196 - DNA, 15 bp, Homo sapiens
cagaatgacataggg

SEQ ID NO: 358197 - DNA, 15 bp, Homo sapiens
gcagaatgacatagg

SEQ ID NO: 358198 - DNA, 15 bp, Homo sapiens
ggcagaatgacatag

SEQ ID NO: 358199 - DNA, 15 bp, Homo sapiens
tggcagaatgacata

SEQ ID NO: 358200 - DNA, 15 bp, Homo sapiens
atggcagaatgacat

SEQ ID NO: 358201 - DNA, 15 bp, Homo sapiens
gatggcagaatgaca

SEQ ID NO: 358202 - DNA, 15 bp, Homo sapiens
tgatggcagaatgac

SEQ ID NO: 358203 - DNA, 15 bp, Homo sapiens
gtgatggcagaatga

SEQ ID NO: 358204 - DNA, 15 bp, Homo sapiens
tgtgatggcagaatg

SEQ ID NO: 358205 - DNA, 15 bp, Homo sapiens
atgtgatggcagaat

SEQ ID NO: 358206 - DNA, 15 bp, Homo sapiens
catgtgatggcagaa

SEQ ID NO: 358207 - DNA, 15 bp, Homo sapiens
ccatgtgatggcaga

SEQ ID NO: 358208 - DNA, 15 bp, Homo sapiens
cccatgtgatggcag

SEQ ID NO: 358209 - DNA, 15 bp, Homo sapiens
gcccatgtgatggca

SEQ ID NO: 358210 - DNA, 15 bp, Homo sapiens
agcccatgtgatggc

SEQ ID NO: 358211 - DNA, 15 bp, Homo sapiens
gagcccatgtgatgg

SEQ ID NO: 358212 - DNA, 15 bp, Homo sapiens
agagcccatgtgatg

SEQ ID NO: 358213 - DNA, 15 bp, Homo sapiens
gagagcccatgtgat

SEQ ID NO: 358214 - DNA, 15 bp, Homo sapiens
agagagcccatgtga

SEQ ID NO: 358215 - DNA, 15 bp, Homo sapiens
cagagagcccatgtg

SEQ ID NO: 358216 - DNA, 15 bp, Homo sapiens
gcagagagcccatgt

SEQ ID NO: 358217 - DNA, 15 bp, Homo sapiens
agcagagagcccatg

SEQ ID NO: 358218 - DNA, 15 bp, Homo sapiens
gagcagagagcccat

SEQ ID NO: 358219 - DNA, 15 bp, Homo sapiens
agagcagagagccca

SEQ ID NO: 358220 - DNA, 15 bp, Homo sapiens
aagagcagagagccc

SEQ ID NO: 358221 - DNA, 15 bp, Homo sapiens
gaagagcagagagcc

SEQ ID NO: 358222 - DNA, 15 bp, Homo sapiens
ggaagagcagagagc

SEQ ID NO: 358223 - DNA, 15 bp, Homo sapiens
aggaagagcagagag

SEQ ID NO: 358224 - DNA, 15 bp, Homo sapiens
caggaagagcagaga

SEQ ID NO: 358225 - DNA, 15 bp, Homo sapiens
gcaggaagagcagag

SEQ ID NO: 358226 - DNA, 15 bp, Homo sapiens
tgcaggaagagcaga

SEQ ID NO: 358227 - DNA, 15 bp, Homo sapiens
ttgcaggaagagcag

SEQ ID NO: 358228 - DNA, 15 bp, Homo sapiens
tttgcaggaagagca

SEQ ID NO: 358229 - DNA, 15 bp, Homo sapiens
ctttgcaggaagagc

SEQ ID NO: 358230 - DNA, 15 bp, Homo sapiens
cctttgcaggaagag

SEQ ID NO: 358231 - DNA, 15 bp, Homo sapiens
ccctttgcaggaaga

SEQ ID NO: 358232 - DNA, 15 bp, Homo sapiens
tccctttgcaggaag

SEQ ID NO: 358233 - DNA, 15 bp, Homo sapiens
gtccctttgcaggaa

SEQ ID NO: 358234 - DNA, 15 bp, Homo sapiens
agtccctttgcagga

SEQ ID NO: 358235 - DNA, 15 bp, Homo sapiens
gagtccctttgcagg

SEQ ID NO: 358236 - DNA, 15 bp, Homo sapiens
agagtccctttgcag

SEQ ID NO: 358237 - DNA, 15 bp, Homo sapiens
cagagtccctttgca

SEQ ID NO: 358238 - DNA, 15 bp, Homo sapiens
ccagagtccctttgc

SEQ ID NO: 358239 - DNA, 15 bp, Homo sapiens
cccagagtccctttg

SEQ ID NO: 358240 - DNA, 15 bp, Homo sapiens
ccccagagtcccttt

SEQ ID NO: 358241 - DNA, 15 bp, Homo sapiens
gccccagagtccctt

SEQ ID NO: 358242 - DNA, 15 bp, Homo sapiens
agccccagagtccct

SEQ ID NO: 358243 - DNA, 15 bp, Homo sapiens
cagccccagagtccc

SEQ ID NO: 358244 - DNA, 15 bp, Homo sapiens
gcagccccagagtcc

SEQ ID NO: 358245 - DNA, 15 bp, Homo sapiens
agcagccccagagtc

SEQ ID NO: 358246 - DNA, 15 bp, Homo sapiens
aagcagccccagagt

SEQ ID NO: 358247 - DNA, 15 bp, Homo sapiens
gaagcagccccagag

SEQ ID NO: 358248 - DNA, 15 bp, Homo sapiens
ggaagcagccccaga

SEQ ID NO: 358249 - DNA, 15 bp, Homo sapiens
gggaagcagccccag

SEQ ID NO: 358250 - DNA, 15 bp, Homo sapiens
ggggaagcagcccca

SEQ ID NO: 358251 - DNA, 15 bp, Homo sapiens
aggggaagcagcccc

SEQ ID NO: 358252 - DNA, 15 bp, Homo sapiens
caggggaagcagccc

SEQ ID NO: 358253 - DNA, 15 bp, Homo sapiens
acaggggaagcagcc

SEQ ID NO: 358254 - DNA, 15 bp, Homo sapiens
gacaggggaagcagc

SEQ ID NO: 358255 - DNA, 15 bp, Homo sapiens
ggacaggggaagcag

SEQ ID NO: 358256 - DNA, 15 bp, Homo sapiens
aggacaggggaagca

SEQ ID NO: 358257 - DNA, 15 bp, Homo sapiens
gaggacaggggaagc

SEQ ID NO: 358258 - DNA, 15 bp, Homo sapiens
agaggacaggggaag

SEQ ID NO: 358259 - DNA, 15 bp, Homo sapiens
cagaggacaggggaa

SEQ ID NO: 358260 - DNA, 15 bp, Homo sapiens
gcagaggacagggga

SEQ ID NO: 358261 - DNA, 15 bp, Homo sapiens
ggcagaggacagggg

SEQ ID NO: 358262 - DNA, 15 bp, Homo sapiens
gggcagaggacaggg

SEQ ID NO: 358263 - DNA, 15 bp, Homo sapiens
ggggcagaggacagg

SEQ ID NO: 358264 - DNA, 15 bp, Homo sapiens
tggggcagaggacag

SEQ ID NO: 358265 - DNA, 15 bp, Homo sapiens
ctggggcagaggaca

SEQ ID NO: 358266 - DNA, 15 bp, Homo sapiens
gctggggcagaggac

SEQ ID NO: 358267 - DNA, 15 bp, Homo sapiens
agctggggcagagga

SEQ ID NO: 358268 - DNA, 15 bp, Homo sapiens
cagctggggcagagg

SEQ ID NO: 358269 - DNA, 15 bp, Homo sapiens
ccagctggggcagag

SEQ ID NO: 358270 - DNA, 15 bp, Homo sapiens
tccagctggggcaga

SEQ ID NO: 358271 - DNA, 15 bp, Homo sapiens
gtccagctggggcag

SEQ ID NO: 358272 - DNA, 15 bp, Homo sapiens
ggtccagctggggca

SEQ ID NO: 358273 - DNA, 15 bp, Homo sapiens
gggtccagctggggc

SEQ ID NO: 358274 - DNA, 15 bp, Homo sapiens
tgggtccagctgggg

SEQ ID NO: 358275 - DNA, 15 bp, Homo sapiens
ctgggtccagctggg

SEQ ID NO: 358276 - DNA, 15 bp, Homo sapiens
tctgggtccagctgg

SEQ ID NO: 358277 - DNA, 15 bp, Homo sapiens
gtctgggtccagctg

SEQ ID NO: 358278 - DNA, 15 bp, Homo sapiens
agtctgggtccagct

SEQ ID NO: 358279 - DNA, 15 bp, Homo sapiens
gagtctgggtccagc

SEQ ID NO: 358280 - DNA, 15 bp, Homo sapiens
tgagtctgggtccag

SEQ ID NO: 358281 - DNA, 15 bp, Homo sapiens
gtgagtctgggtcca

SEQ ID NO: 358282 - DNA, 15 bp, Homo sapiens
tgtgagtctgggtcc

SEQ ID NO: 358283 - DNA, 15 bp, Homo sapiens
ctgtgagtctgggtc

SEQ ID NO: 358284 - DNA, 15 bp, Homo sapiens
cctgtgagtctgggt

SEQ ID NO: 358285 - DNA, 15 bp, Homo sapiens
acctgtgagtctggg

SEQ ID NO: 358286 - DNA, 15 bp, Homo sapiens
aacctgtgagtctgg

SEQ ID NO: 358287 - DNA, 15 bp, Homo sapiens
aaacctgtgagtctg

SEQ ID NO: 358288 - DNA, 15 bp, Homo sapiens
aaaacctgtgagtct

SEQ ID NO: 358289 - DNA, 15 bp, Homo sapiens
caaaacctgtgagtc

SEQ ID NO: 358290 - DNA, 15 bp, Homo sapiens
gcaaaacctgtgagt

SEQ ID NO: 358291 - DNA, 15 bp, Homo sapiens
agcaaaacctgtgag

SEQ ID NO: 358292 - DNA, 15 bp, Homo sapiens
aagcaaaacctgtga

SEQ ID NO: 358293 - DNA, 15 bp, Homo sapiens
gaagcaaaacctgtg

SEQ ID NO: 358294 - DNA, 15 bp, Homo sapiens
agaagcaaaacctgt

SEQ ID NO: 358295 - DNA, 15 bp, Homo sapiens
gagaagcaaaacctg

SEQ ID NO: 358296 - DNA, 15 bp, Homo sapiens
cgagaagcaaaacct

SEQ ID NO: 358297 - DNA, 15 bp, Homo sapiens
tcgagaagcaaaacc

SEQ ID NO: 358298 - DNA, 15 bp, Homo sapiens
ctcgagaagcaaaac

SEQ ID NO: 358299 - DNA, 15 bp, Homo sapiens
tctcgagaagcaaaa

SEQ ID NO: 358300 - DNA, 15 bp, Homo sapiens
atctcgagaagcaaa

SEQ ID NO: 358301 - DNA, 15 bp, Homo sapiens
catctcgagaagcaa

SEQ ID NO: 358302 - DNA, 15 bp, Homo sapiens
gcatctcgagaagca

SEQ ID NO: 358303 - DNA, 15 bp, Homo sapiens
tgcatctcgagaagc

SEQ ID NO: 358304 - DNA, 15 bp, Homo sapiens
agagtctcactcttc

SEQ ID NO: 358305 - DNA, 15 bp, Homo sapiens
tagagtctcactctt

SEQ ID NO: 358306 - DNA, 15 bp, Homo sapiens
ttagagtctcactct

SEQ ID NO: 358307 - DNA, 15 bp, Homo sapiens
tttagagtctcactc

SEQ ID NO: 358308 - DNA, 15 bp, Homo sapiens
ttttagagtctcact

SEQ ID NO: 358309 - DNA, 15 bp, Homo sapiens
tttttagagtctcac

SEQ ID NO: 358310 - DNA, 15 bp, Homo sapiens
ttttttagagtctca

SEQ ID NO: 358311 - DNA, 15 bp, Homo sapiens
tttttttagagtctc

SEQ ID NO: 358312 - DNA, 15 bp, Homo sapiens
ttttttttagagtct

SEQ ID NO: 358313 - DNA, 15 bp, Homo sapiens
tttttttttagagtc

SEQ ID NO: 358314 - DNA, 15 bp, Homo sapiens
ttttttttttagagt

SEQ ID NO: 358315 - DNA, 15 bp, Homo sapiens
tttttttttttagag

SEQ ID NO: 358316 - DNA, 15 bp, Homo sapiens
ttttttttttttaga

SEQ ID NO: 358317 - DNA, 15 bp, Homo sapiens
tttttttttttttag

SEQ ID NO: 358318 - DNA, 15 bp, Homo sapiens
tttttttttttttta

SEQ ID NO: 358319 - DNA, 15 bp, Homo sapiens
ctttttttttttttt

SEQ ID NO: 358320 - DNA, 15 bp, Homo sapiens
tcttttttttttttt

SEQ ID NO: 358321 - DNA, 15 bp, Homo sapiens
ttctttttttttttt

SEQ ID NO: 358322 - DNA, 15 bp, Homo sapiens
tttcttttttttttt

SEQ ID NO: 358323 - DNA, 15 bp, Homo sapiens
ctttctttttttttt

SEQ ID NO: 358324 - DNA, 15 bp, Homo sapiens
tctttcttttttttt

SEQ ID NO: 358325 - DNA, 15 bp, Homo sapiens
ttctttctttttttt

SEQ ID NO: 358326 - DNA, 15 bp, Homo sapiens
tttctttcttttttt

SEQ ID NO: 358327 - DNA, 15 bp, Homo sapiens
ctttctttctttttt

SEQ ID NO: 358328 - DNA, 15 bp, Homo sapiens
tctttctttcttttt

SEQ ID NO: 358329 - DNA, 15 bp, Homo sapiens
ttctttctttctttt

SEQ ID NO: 358330 - DNA, 15 bp, Homo sapiens
tttctttctttcttt

SEQ ID NO: 358331 - DNA, 15 bp, Homo sapiens
ctttctttctttctt

SEQ ID NO: 358332 - DNA, 15 bp, Homo sapiens
tctttctttctttct

SEQ ID NO: 358333 - DNA, 15 bp, Homo sapiens
ttctttctttctttc

SEQ ID NO: 358334 - DNA, 15 bp, Homo sapiens
ttttctttctttctt

SEQ ID NO: 358335 - DNA, 15 bp, Homo sapiens
tttttctttctttct

SEQ ID NO: 358336 - DNA, 15 bp, Homo sapiens
ttttttctttctttc

SEQ ID NO: 358337 - DNA, 15 bp, Homo sapiens
tttttttctttcttt

SEQ ID NO: 358338 - DNA, 15 bp, Homo sapiens
ctttttttctttctt

SEQ ID NO: 358339 - DNA, 15 bp, Homo sapiens
tctttttttctttct

SEQ ID NO: 358340 - DNA, 15 bp, Homo sapiens
atctttttttctttc

SEQ ID NO: 358341 - DNA, 15 bp, Homo sapiens
aatctttttttcttt

SEQ ID NO: 358342 - DNA, 15 bp, Homo sapiens
gaatctttttttctt

SEQ ID NO: 358343 - DNA, 15 bp, Homo sapiens
agaatctttttttct

SEQ ID NO: 358344 - DNA, 15 bp, Homo sapiens
aagaatctttttttc

SEQ ID NO: 358345 - DNA, 15 bp, Homo sapiens
aaagaatcttttttt

SEQ ID NO: 358346 - DNA, 15 bp, Homo sapiens
taaagaatctttttt

SEQ ID NO: 358347 - DNA, 15 bp, Homo sapiens
ttaaagaatcttttt

SEQ ID NO: 358348 - DNA, 15 bp, Homo sapiens
tttaaagaatctttt

SEQ ID NO: 358349 - DNA, 15 bp, Homo sapiens
ctttaaagaatcttt

SEQ ID NO: 358350 - DNA, 15 bp, Homo sapiens
gctttaaagaatctt

SEQ ID NO: 358351 - DNA, 15 bp, Homo sapiens
ggctttaaagaatct

SEQ ID NO: 358352 - DNA, 15 bp, Homo sapiens
gggctttaaagaatc

SEQ ID NO: 358353 - DNA, 15 bp, Homo sapiens
ggggctttaaagaat

SEQ ID NO: 358354 - DNA, 15 bp, Homo sapiens
gggggctttaaagaa

SEQ ID NO: 358355 - DNA, 15 bp, Homo sapiens
tgggggctttaaaga

SEQ ID NO: 358356 - DNA, 15 bp, Homo sapiens
ttgggggctttaaag

SEQ ID NO: 358357 - DNA, 15 bp, Homo sapiens
gttgggggctttaaa

SEQ ID NO: 358358 - DNA, 15 bp, Homo sapiens
cgttgggggctttaa

SEQ ID NO: 358359 - DNA, 15 bp, Homo sapiens
tcgttgggggcttta

SEQ ID NO: 358360 - DNA, 15 bp, Homo sapiens
ctcgttgggggcttt

SEQ ID NO: 358361 - DNA, 15 bp, Homo sapiens
actcgttgggggctt

SEQ ID NO: 358362 - DNA, 15 bp, Homo sapiens
aactcgttgggggct

SEQ ID NO: 358363 - DNA, 15 bp, Homo sapiens
aaactcgttgggggc

SEQ ID NO: 358364 - DNA, 15 bp, Homo sapiens
gaaactcgttggggg

SEQ ID NO: 358365 - DNA, 15 bp, Homo sapiens
tgaaactcgttgggg

SEQ ID NO: 358366 - DNA, 15 bp, Homo sapiens
gtgaaactcgttggg

SEQ ID NO: 358367 - DNA, 15 bp, Homo sapiens
agtgaaactcgttgg

SEQ ID NO: 358368 - DNA, 15 bp, Homo sapiens
cagtgaaactcgttg

SEQ ID NO: 358369 - DNA, 15 bp, Homo sapiens
gcagtgaaactcgtt

SEQ ID NO: 358370 - DNA, 15 bp, Homo sapiens
agcagtgaaactcgt

SEQ ID NO: 358371 - DNA, 15 bp, Homo sapiens
cagcagtgaaactcg

SEQ ID NO: 358372 - DNA, 15 bp, Homo sapiens
ccagcagtgaaactc

SEQ ID NO: 358373 - DNA, 15 bp, Homo sapiens
gccagcagtgaaact

SEQ ID NO: 358374 - DNA, 15 bp, Homo sapiens
ggccagcagtgaaac

SEQ ID NO: 358375 - DNA, 15 bp, Homo sapiens
aggccagcagtgaaa

SEQ ID NO: 358376 - DNA, 15 bp, Homo sapiens
caggccagcagtgaa

SEQ ID NO: 358377 - DNA, 15 bp, Homo sapiens
tcaggccagcagtga

SEQ ID NO: 358378 - DNA, 15 bp, Homo sapiens
atcaggccagcagtg

SEQ ID NO: 358379 - DNA, 15 bp, Homo sapiens
gatcaggccagcagt

SEQ ID NO: 358380 - DNA, 15 bp, Homo sapiens
agatcaggccagcag

SEQ ID NO: 358381 - DNA, 15 bp, Homo sapiens
gagatcaggccagca

SEQ ID NO: 358382 - DNA, 15 bp, Homo sapiens
tgagatcaggccagc

SEQ ID NO: 358383 - DNA, 15 bp, Homo sapiens
gtgagatcaggccag

SEQ ID NO: 358384 - DNA, 15 bp, Homo sapiens
tgtgagatcaggcca

SEQ ID NO: 358385 - DNA, 15 bp, Homo sapiens
ttgtgagatcaggcc

SEQ ID NO: 358386 - DNA, 15 bp, Homo sapiens
attgtgagatcaggc

SEQ ID NO: 358387 - DNA, 15 bp, Homo sapiens
aattgtgagatcagg

SEQ ID NO: 358388 - DNA, 15 bp, Homo sapiens
gaattgtgagatcag

SEQ ID NO: 358389 - DNA, 15 bp, Homo sapiens
agaattgtgagatca

SEQ ID NO: 358390 - DNA, 15 bp, Homo sapiens
gagaattgtgagatc

SEQ ID NO: 358391 - DNA, 15 bp, Homo sapiens
tgagaattgtgagat

SEQ ID NO: 358392 - DNA, 15 bp, Homo sapiens
ttgagaattgtgaga

SEQ ID NO: 358393 - DNA, 15 bp, Homo sapiens
attgagaattgtgag

SEQ ID NO: 358394 - DNA, 15 bp, Homo sapiens
cattgagaattgtga

SEQ ID NO: 358395 - DNA, 15 bp, Homo sapiens
ccattgagaattgtg

SEQ ID NO: 358396 - DNA, 15 bp, Homo sapiens
gccattgagaattgt

SEQ ID NO: 358397 - DNA, 15 bp, Homo sapiens
agccattgagaattg

SEQ ID NO: 358398 - DNA, 15 bp, Homo sapiens
aagccattgagaatt

SEQ ID NO: 358399 - DNA, 15 bp, Homo sapiens
aaagccattgagaat

SEQ ID NO: 358400 - DNA, 15 bp, Homo sapiens
aaaagccattgagaa

SEQ ID NO: 358401 - DNA, 15 bp, Homo sapiens
aaaaagccattgaga

SEQ ID NO: 358402 - DNA, 15 bp, Homo sapiens
taaaaagccattgag

SEQ ID NO: 358403 - DNA, 15 bp, Homo sapiens
ttaaaaagccattga

SEQ ID NO: 358404 - DNA, 15 bp, Homo sapiens
tttaaaaagccattg

SEQ ID NO: 358405 - DNA, 15 bp, Homo sapiens
ttttaaaaagccatt

SEQ ID NO: 358406 - DNA, 15 bp, Homo sapiens
tttttaaaaagccat

SEQ ID NO: 358407 - DNA, 15 bp, Homo sapiens
ttttttaaaaagcca

SEQ ID NO: 358408 - DNA, 15 bp, Homo sapiens
tttttttaaaaagcc

SEQ ID NO: 358409 - DNA, 15 bp, Homo sapiens
atttttttaaaaagc

SEQ ID NO: 358410 - DNA, 15 bp, Homo sapiens
gatttttttaaaaag

SEQ ID NO: 358411 - DNA, 15 bp, Homo sapiens
cgatttttttaaaaa

SEQ ID NO: 358412 - DNA, 15 bp, Homo sapiens
acgatttttttaaaa

SEQ ID NO: 358413 - DNA, 15 bp, Homo sapiens
tacgatttttttaaa

SEQ ID NO: 358414 - DNA, 15 bp, Homo sapiens
atacgatttttttaa

SEQ ID NO: 358415 - DNA, 15 bp, Homo sapiens
aatacgattttttta

SEQ ID NO: 358416 - DNA, 15 bp, Homo sapiens
aaatacgattttttt

SEQ ID NO: 358417 - DNA, 15 bp, Homo sapiens
gaaatacgatttttt

SEQ ID NO: 358418 - DNA, 15 bp, Homo sapiens
tgaaatacgattttt

SEQ ID NO: 358419 - DNA, 15 bp, Homo sapiens
gtgaaatacgatttt

SEQ ID NO: 358420 - DNA, 15 bp, Homo sapiens
agtgaaatacgattt

SEQ ID NO: 358421 - DNA, 15 bp, Homo sapiens
cagtgaaatacgatt

SEQ ID NO: 358422 - DNA, 15 bp, Homo sapiens
tcagtgaaatacgat

SEQ ID NO: 358423 - DNA, 15 bp, Homo sapiens
ttcagtgaaatacga

SEQ ID NO: 358424 - DNA, 15 bp, Homo sapiens
attcagtgaaatacg

SEQ ID NO: 358425 - DNA, 15 bp, Homo sapiens
tattcagtgaaatac

SEQ ID NO: 358426 - DNA, 15 bp, Homo sapiens
atattcagtgaaata

SEQ ID NO: 358427 - DNA, 15 bp, Homo sapiens
catattcagtgaaat

SEQ ID NO: 358428 - DNA, 15 bp, Homo sapiens
tcatattcagtgaaa

SEQ ID NO: 358429 - DNA, 15 bp, Homo sapiens
ttcatattcagtgaa

SEQ ID NO: 358430 - DNA, 15 bp, Homo sapiens
cttcatattcagtga

SEQ ID NO: 358431 - DNA, 15 bp, Homo sapiens
acttcatattcagtg

SEQ ID NO: 358432 - DNA, 15 bp, Homo sapiens
cacttcatattcagt

SEQ ID NO: 358433 - DNA, 15 bp, Homo sapiens
tcacttcatattcag

SEQ ID NO: 358434 - DNA, 15 bp, Homo sapiens
ctcacttcatattca

SEQ ID NO: 358435 - DNA, 15 bp, Homo sapiens
cctcacttcatattc

SEQ ID NO: 358436 - DNA, 15 bp, Homo sapiens
acctcacttcatatt

SEQ ID NO: 358437 - DNA, 15 bp, Homo sapiens
aacctcacttcatat

SEQ ID NO: 358438 - DNA, 15 bp, Homo sapiens
taacctcacttcata

SEQ ID NO: 358439 - DNA, 15 bp, Homo sapiens
ctaacctcacttcat

SEQ ID NO: 358440 - DNA, 15 bp, Homo sapiens
tctaacctcacttca

SEQ ID NO: 358441 - DNA, 15 bp, Homo sapiens
atctaacctcacttc

SEQ ID NO: 358442 - DNA, 15 bp, Homo sapiens
gatctaacctcactt

SEQ ID NO: 358443 - DNA, 15 bp, Homo sapiens
tgatctaacctcact

SEQ ID NO: 358444 - DNA, 15 bp, Homo sapiens
gtgatctaacctcac

SEQ ID NO: 358445 - DNA, 15 bp, Homo sapiens
ggtgatctaacctca

SEQ ID NO: 358446 - DNA, 15 bp, Homo sapiens
tggtgatctaacctc

SEQ ID NO: 358447 - DNA, 15 bp, Homo sapiens
atggtgatctaacct

SEQ ID NO: 358448 - DNA, 15 bp, Homo sapiens
catggtgatctaacc

SEQ ID NO: 358449 - DNA, 15 bp, Homo sapiens
gcatggtgatctaac

SEQ ID NO: 358450 - DNA, 15 bp, Homo sapiens
ggcatggtgatctaa

SEQ ID NO: 358451 - DNA, 15 bp, Homo sapiens
tggcatggtgatcta

SEQ ID NO: 358452 - DNA, 15 bp, Homo sapiens
ttggcatggtgatct

SEQ ID NO: 358453 - DNA, 15 bp, Homo sapiens
gttggcatggtgatc

SEQ ID NO: 358454 - DNA, 15 bp, Homo sapiens
agttggcatggtgat

SEQ ID NO: 358455 - DNA, 15 bp, Homo sapiens
tagttggcatggtga

SEQ ID NO: 358456 - DNA, 15 bp, Homo sapiens
ctagttggcatggtg

SEQ ID NO: 358457 - DNA, 15 bp, Homo sapiens
actagttggcatggt

SEQ ID NO: 358458 - DNA, 15 bp, Homo sapiens
cactagttggcatgg

SEQ ID NO: 358459 - DNA, 15 bp, Homo sapiens
ccactagttggcatg

SEQ ID NO: 358460 - DNA, 15 bp, Homo sapiens
gccactagttggcat

SEQ ID NO: 358461 - DNA, 15 bp, Homo sapiens
ggccactagttggca

SEQ ID NO: 358462 - DNA, 15 bp, Homo sapiens
aggccactagttggc

SEQ ID NO: 358463 - DNA, 15 bp, Homo sapiens
gaggccactagttgg

SEQ ID NO: 358464 - DNA, 15 bp, Homo sapiens
tgaggccactagttg

SEQ ID NO: 358465 - DNA, 15 bp, Homo sapiens
atgaggccactagtt

SEQ ID NO: 358466 - DNA, 15 bp, Homo sapiens
gatgaggccactagt

SEQ ID NO: 358467 - DNA, 15 bp, Homo sapiens
tgatgaggccactag

SEQ ID NO: 358468 - DNA, 15 bp, Homo sapiens
ttgatgaggccacta

SEQ ID NO: 358469 - DNA, 15 bp, Homo sapiens
attgatgaggccact

SEQ ID NO: 358470 - DNA, 15 bp, Homo sapiens
tattgatgaggccac

SEQ ID NO: 358471 - DNA, 15 bp, Homo sapiens
gtattgatgaggcca

SEQ ID NO: 358472 - DNA, 15 bp, Homo sapiens
agtattgatgaggcc

SEQ ID NO: 358473 - DNA, 15 bp, Homo sapiens
cagtattgatgaggc

SEQ ID NO: 358474 - DNA, 15 bp, Homo sapiens
tcagtattgatgagg

SEQ ID NO: 358475 - DNA, 15 bp, Homo sapiens
atcagtattgatgag

SEQ ID NO: 358476 - DNA, 15 bp, Homo sapiens
catcagtattgatga

SEQ ID NO: 358477 - DNA, 15 bp, Homo sapiens
acatcagtattgatg

SEQ ID NO: 358478 - DNA, 15 bp, Homo sapiens
cacatcagtattgat

SEQ ID NO: 358479 - DNA, 15 bp, Homo sapiens
acacatcagtattga

SEQ ID NO: 358480 - DNA, 15 bp, Homo sapiens
cacacatcagtattg

SEQ ID NO: 358481 - DNA, 15 bp, Homo sapiens
acacacatcagtatt

SEQ ID NO: 358482 - DNA, 15 bp, Homo sapiens
cacacacatcagtat

SEQ ID NO: 358483 - DNA, 15 bp, Homo sapiens
acacacacatcagta

SEQ ID NO: 358484 - DNA, 15 bp, Homo sapiens
tacacacacatcagt

SEQ ID NO: 358485 - DNA, 15 bp, Homo sapiens
atacacacacatcag

SEQ ID NO: 358486 - DNA, 15 bp, Homo sapiens
aatacacacacatca

SEQ ID NO: 358487 - DNA, 15 bp, Homo sapiens
aaatacacacacatc

SEQ ID NO: 358488 - DNA, 15 bp, Homo sapiens
taaatacacacacat

SEQ ID NO: 358489 - DNA, 15 bp, Homo sapiens
ttaaatacacacaca

SEQ ID NO: 358490 - DNA, 15 bp, Homo sapiens
tttaaatacacacac

SEQ ID NO: 358491 - DNA, 15 bp, Homo sapiens
atttaaatacacaca

SEQ ID NO: 358492 - DNA, 15 bp, Homo sapiens
gatttaaatacacac

SEQ ID NO: 358493 - DNA, 15 bp, Homo sapiens
tgatttaaatacaca

SEQ ID NO: 358494 - DNA, 15 bp, Homo sapiens
atgatttaaatacac

SEQ ID NO: 358495 - DNA, 15 bp, Homo sapiens
aatgatttaaataca

SEQ ID NO: 358496 - DNA, 15 bp, Homo sapiens
taatgatttaaatac

SEQ ID NO: 358497 - DNA, 15 bp, Homo sapiens
gtaatgatttaaata

SEQ ID NO: 358498 - DNA, 15 bp, Homo sapiens
cgtaatgatttaaat

SEQ ID NO: 358499 - DNA, 15 bp, Homo sapiens
acgtaatgatttaaa

SEQ ID NO: 358500 - DNA, 15 bp, Homo sapiens
aacgtaatgatttaa

SEQ ID NO: 358501 - DNA, 15 bp, Homo sapiens
aaacgtaatgattta

SEQ ID NO: 358502 - DNA, 15 bp, Homo sapiens
gaaacgtaatgattt

SEQ ID NO: 358503 - DNA, 15 bp, Homo sapiens
agaaacgtaatgatt

SEQ ID NO: 358504 - DNA, 15 bp, Homo sapiens
gagaaacgtaatgat

SEQ ID NO: 358505 - DNA, 15 bp, Homo sapiens
cgagaaacgtaatga

SEQ ID NO: 358506 - DNA, 15 bp, Homo sapiens
ccgagaaacgtaatg

SEQ ID NO: 358507 - DNA, 15 bp, Homo sapiens
tccgagaaacgtaat

SEQ ID NO: 358508 - DNA, 15 bp, Homo sapiens
ctccgagaaacgtaa

SEQ ID NO: 358509 - DNA, 15 bp, Homo sapiens
gctccgagaaacgta

SEQ ID NO: 358510 - DNA, 15 bp, Homo sapiens
ggctccgagaaacgt

SEQ ID NO: 358511 - DNA, 15 bp, Homo sapiens
tggctccgagaaacg

SEQ ID NO: 358512 - DNA, 15 bp, Homo sapiens
atggctccgagaaac

SEQ ID NO: 358513 - DNA, 15 bp, Homo sapiens
gatggctccgagaaa

SEQ ID NO: 358514 - DNA, 15 bp, Homo sapiens
tgatggctccgagaa

SEQ ID NO: 358515 - DNA, 15 bp, Homo sapiens
ctgatggctccgaga

SEQ ID NO: 358516 - DNA, 15 bp, Homo sapiens
gctgatggctccgag

SEQ ID NO: 358517 - DNA, 15 bp, Homo sapiens
agctgatggctccga

SEQ ID NO: 358518 - DNA, 15 bp, Homo sapiens
aagctgatggctccg

SEQ ID NO: 358519 - DNA, 15 bp, Homo sapiens
aaagctgatggctcc

SEQ ID NO: 358520 - DNA, 15 bp, Homo sapiens
gaaagctgatggctc

SEQ ID NO: 358521 - DNA, 15 bp, Homo sapiens
tgaaagctgatggct

SEQ ID NO: 358522 - DNA, 15 bp, Homo sapiens
gtgaaagctgatggc

SEQ ID NO: 358523 - DNA, 15 bp, Homo sapiens
cgtgaaagctgatgg

SEQ ID NO: 358524 - DNA, 15 bp, Homo sapiens
gcgtgaaagctgatg

SEQ ID NO: 358525 - DNA, 15 bp, Homo sapiens
agcgtgaaagctgat

SEQ ID NO: 358526 - DNA, 15 bp, Homo sapiens
cagcgtgaaagctga

SEQ ID NO: 358527 - DNA, 15 bp, Homo sapiens
acagcgtgaaagctg

SEQ ID NO: 358528 - DNA, 15 bp, Homo sapiens
tacagcgtgaaagct

SEQ ID NO: 358529 - DNA, 15 bp, Homo sapiens
ttacagcgtgaaagc

SEQ ID NO: 358530 - DNA, 15 bp, Homo sapiens
tttacagcgtgaaag

SEQ ID NO: 358531 - DNA, 15 bp, Homo sapiens
atttacagcgtgaaa

SEQ ID NO: 358532 - DNA, 15 bp, Homo sapiens
catttacagcgtgaa

SEQ ID NO: 358533 - DNA, 15 bp, Homo sapiens
gcatttacagcgtga

SEQ ID NO: 358534 - DNA, 15 bp, Homo sapiens
cgcatttacagcgtg

SEQ ID NO: 358535 - DNA, 15 bp, Homo sapiens
acgcatttacagcgt

SEQ ID NO: 358536 - DNA, 15 bp, Homo sapiens
aacgcatttacagcg

SEQ ID NO: 358537 - DNA, 15 bp, Homo sapiens
aaacgcatttacagc

SEQ ID NO: 358538 - DNA, 15 bp, Homo sapiens
taaacgcatttacag

SEQ ID NO: 358539 - DNA, 15 bp, Homo sapiens
ataaacgcatttaca

SEQ ID NO: 358540 - DNA, 15 bp, Homo sapiens
cataaacgcatttac

SEQ ID NO: 358541 - DNA, 15 bp, Homo sapiens
gcataaacgcattta

SEQ ID NO: 358542 - DNA, 15 bp, Homo sapiens
ggcataaacgcattt

SEQ ID NO: 358543 - DNA, 15 bp, Homo sapiens
gggcataaacgcatt

SEQ ID NO: 358544 - DNA, 15 bp, Homo sapiens
agggcataaacgcat

SEQ ID NO: 358545 - DNA, 15 bp, Homo sapiens
tagggcataaacgca

SEQ ID NO: 358546 - DNA, 15 bp, Homo sapiens
ctagggcataaacgc

SEQ ID NO: 358547 - DNA, 15 bp, Homo sapiens
gctagggcataaacg

SEQ ID NO: 358548 - DNA, 15 bp, Homo sapiens
tgctagggcataaac

SEQ ID NO: 358549 - DNA, 15 bp, Homo sapiens
ttgctagggcataaa

SEQ ID NO: 358550 - DNA, 15 bp, Homo sapiens
attgctagggcataa

SEQ ID NO: 358551 - DNA, 15 bp, Homo sapiens
cattgctagggcata

SEQ ID NO: 358552 - DNA, 15 bp, Homo sapiens
gcattgctagggcat

SEQ ID NO: 358553 - DNA, 15 bp, Homo sapiens
ggcattgctagggca

SEQ ID NO: 358554 - DNA, 15 bp, Homo sapiens
tggcattgctagggc

SEQ ID NO: 358555 - DNA, 15 bp, Homo sapiens
atggcattgctaggg

SEQ ID NO: 358556 - DNA, 15 bp, Homo sapiens
catggcattgctagg

SEQ ID NO: 358557 - DNA, 15 bp, Homo sapiens
gcatggcattgctag

SEQ ID NO: 358558 - DNA, 15 bp, Homo sapiens
ggcatggcattgcta

SEQ ID NO: 358559 - DNA, 15 bp, Homo sapiens
gggcatggcattgct

SEQ ID NO: 358560 - DNA, 15 bp, Homo sapiens
cgggcatggcattgc

SEQ ID NO: 358561 - DNA, 15 bp, Homo sapiens
acgggcatggcattg

SEQ ID NO: 358562 - DNA, 15 bp, Homo sapiens
aacgggcatggcatt

SEQ ID NO: 358563 - DNA, 15 bp, Homo sapiens
aaacgggcatggcat

SEQ ID NO: 358564 - DNA, 15 bp, Homo sapiens
gaaacgggcatggca

SEQ ID NO: 358565 - DNA, 15 bp, Homo sapiens
agaaacgggcatggc

SEQ ID NO: 358566 - DNA, 15 bp, Homo sapiens
tagaaacgggcatgg

SEQ ID NO: 358567 - DNA, 15 bp, Homo sapiens
atagaaacgggcatg

SEQ ID NO: 358568 - DNA, 15 bp, Homo sapiens
catagaaacgggcat

SEQ ID NO: 358569 - DNA, 15 bp, Homo sapiens
gcatagaaacgggca

SEQ ID NO: 358570 - DNA, 15 bp, Homo sapiens
tgcatagaaacgggc

SEQ ID NO: 358571 - DNA, 15 bp, Homo sapiens
ctgcatagaaacggg

SEQ ID NO: 358572 - DNA, 15 bp, Homo sapiens
actgcatagaaacgg

SEQ ID NO: 358573 - DNA, 15 bp, Homo sapiens
tactgcatagaaacg

SEQ ID NO: 358574 - DNA, 15 bp, Homo sapiens
ttactgcatagaaac

SEQ ID NO: 358575 - DNA, 15 bp, Homo sapiens
gttactgcatagaaa

SEQ ID NO: 358576 - DNA, 15 bp, Homo sapiens
ggttactgcatagaa

SEQ ID NO: 358577 - DNA, 15 bp, Homo sapiens
gggttactgcataga

SEQ ID NO: 358578 - DNA, 15 bp, Homo sapiens
cgggttactgcatag

SEQ ID NO: 358579 - DNA, 15 bp, Homo sapiens
gcgggttactgcata

SEQ ID NO: 358580 - DNA, 15 bp, Homo sapiens
ggcgggttactgcat

SEQ ID NO: 358581 - DNA, 15 bp, Homo sapiens
tggcgggttactgca

SEQ ID NO: 358582 - DNA, 15 bp, Homo sapiens
ctggcgggttactgc

SEQ ID NO: 358583 - DNA, 15 bp, Homo sapiens
gctggcgggttactg

SEQ ID NO: 358584 - DNA, 15 bp, Homo sapiens
agctggcgggttact

SEQ ID NO: 358585 - DNA, 15 bp, Homo sapiens
aagctggcgggttac

SEQ ID NO: 358586 - DNA, 15 bp, Homo sapiens
caagctggcgggtta

SEQ ID NO: 358587 - DNA, 15 bp, Homo sapiens
ccaagctggcgggtt

SEQ ID NO: 358588 - DNA, 15 bp, Homo sapiens
cccaagctggcgggt

SEQ ID NO: 358589 - DNA, 15 bp, Homo sapiens
acccaagctggcggg

SEQ ID NO: 358590 - DNA, 15 bp, Homo sapiens
tacccaagctggcgg

SEQ ID NO: 358591 - DNA, 15 bp, Homo sapiens
atacccaagctggcg

SEQ ID NO: 358592 - DNA, 15 bp, Homo sapiens
tatacccaagctggc

SEQ ID NO: 358593 - DNA, 15 bp, Homo sapiens
atatacccaagctgg

SEQ ID NO: 358594 - DNA, 15 bp, Homo sapiens
catatacccaagctg

SEQ ID NO: 358595 - DNA, 15 bp, Homo sapiens
acatatacccaagct

SEQ ID NO: 358596 - DNA, 15 bp, Homo sapiens
aacatatacccaagc

SEQ ID NO: 358597 - DNA, 15 bp, Homo sapiens
aaacatatacccaag

SEQ ID NO: 358598 - DNA, 15 bp, Homo sapiens
gaaacatatacccaa

SEQ ID NO: 358599 - DNA, 15 bp, Homo sapiens
agaaacatataccca

SEQ ID NO: 358600 - DNA, 15 bp, Homo sapiens
aagaaacatataccc

SEQ ID NO: 358601 - DNA, 15 bp, Homo sapiens
gaagaaacatatacc

SEQ ID NO: 358602 - DNA, 15 bp, Homo sapiens
cgaagaaacatatac

SEQ ID NO: 358603 - DNA, 15 bp, Homo sapiens
ccgaagaaacatata

SEQ ID NO: 358604 - DNA, 15 bp, Homo sapiens
cccgaagaaacatat

SEQ ID NO: 358605 - DNA, 15 bp, Homo sapiens
tcccgaagaaacata

SEQ ID NO: 358606 - DNA, 15 bp, Homo sapiens
gtcccgaagaaacat

SEQ ID NO: 358607 - DNA, 15 bp, Homo sapiens
ggtcccgaagaaaca

SEQ ID NO: 358608 - DNA, 15 bp, Homo sapiens
aggtcccgaagaaac

SEQ ID NO: 358609 - DNA, 15 bp, Homo sapiens
caggtcccgaagaaa

SEQ ID NO: 358610 - DNA, 15 bp, Homo sapiens
ccaggtcccgaagaa

SEQ ID NO: 358611 - DNA, 15 bp, Homo sapiens
cccaggtcccgaaga

SEQ ID NO: 358612 - DNA, 15 bp, Homo sapiens
ccccaggtcccgaag

SEQ ID NO: 358613 - DNA, 15 bp, Homo sapiens
accccaggtcccgaa

SEQ ID NO: 358614 - DNA, 15 bp, Homo sapiens
gaccccaggtcccga

SEQ ID NO: 358615 - DNA, 15 bp, Homo sapiens
tgaccccaggtcccg

SEQ ID NO: 358616 - DNA, 15 bp, Homo sapiens
ttgaccccaggtccc

SEQ ID NO: 358617 - DNA, 15 bp, Homo sapiens
cttgaccccaggtcc

SEQ ID NO: 358618 - DNA, 15 bp, Homo sapiens
ccttgaccccaggtc

SEQ ID NO: 358619 - DNA, 15 bp, Homo sapiens
tccttgaccccaggt

SEQ ID NO: 358620 - DNA, 15 bp, Homo sapiens
ttccttgaccccagg

SEQ ID NO: 358621 - DNA, 15 bp, Homo sapiens
attccttgaccccag

SEQ ID NO: 358622 - DNA, 15 bp, Homo sapiens
tattccttgacccca

SEQ ID NO: 358623 - DNA, 15 bp, Homo sapiens
ttattccttgacccc

SEQ ID NO: 358624 - DNA, 15 bp, Homo sapiens
tttattccttgaccc

SEQ ID NO: 358625 - DNA, 15 bp, Homo sapiens
gtttattccttgacc

SEQ ID NO: 358626 - DNA, 15 bp, Homo sapiens
agtttattccttgac

SEQ ID NO: 358627 - DNA, 15 bp, Homo sapiens
gagtttattccttga

SEQ ID NO: 358628 - DNA, 15 bp, Homo sapiens
agagtttattccttg

SEQ ID NO: 358629 - DNA, 15 bp, Homo sapiens
gagagtttattcctt

SEQ ID NO: 358630 - DNA, 15 bp, Homo sapiens
agagagtttattcct

SEQ ID NO: 358631 - DNA, 15 bp, Homo sapiens
cagagagtttattcc

SEQ ID NO: 358632 - DNA, 15 bp, Homo sapiens
tcagagagtttattc

SEQ ID NO: 358633 - DNA, 15 bp, Homo sapiens
gtcagagagtttatt

SEQ ID NO: 358634 - DNA, 15 bp, Homo sapiens
agtcagagagtttat

SEQ ID NO: 358635 - DNA, 15 bp, Homo sapiens
gagtcagagagttta

SEQ ID NO: 358636 - DNA, 15 bp, Homo sapiens
agagtcagagagttt

SEQ ID NO: 358637 - DNA, 15 bp, Homo sapiens
tagagtcagagagtt

SEQ ID NO: 358638 - DNA, 15 bp, Homo sapiens
ttagagtcagagagt

SEQ ID NO: 358639 - DNA, 15 bp, Homo sapiens
cttagagtcagagag

SEQ ID NO: 358640 - DNA, 15 bp, Homo sapiens
gcttagagtcagaga

SEQ ID NO: 358641 - DNA, 15 bp, Homo sapiens
tgcttagagtcagag

SEQ ID NO: 358642 - DNA, 15 bp, Homo sapiens
gtgcttagagtcaga

SEQ ID NO: 358643 - DNA, 15 bp, Homo sapiens
ggtgcttagagtcag

SEQ ID NO: 358644 - DNA, 15 bp, Homo sapiens
aggtgcttagagtca

SEQ ID NO: 358645 - DNA, 15 bp, Homo sapiens
aaggtgcttagagtc

SEQ ID NO: 358646 - DNA, 15 bp, Homo sapiens
caaggtgcttagagt

SEQ ID NO: 358647 - DNA, 15 bp, Homo sapiens
tcaaggtgcttagag

SEQ ID NO: 358648 - DNA, 15 bp, Homo sapiens
ttcaaggtgcttaga

SEQ ID NO: 358649 - DNA, 15 bp, Homo sapiens
tttcaaggtgcttag

SEQ ID NO: 358650 - DNA, 15 bp, Homo sapiens
ctttcaaggtgctta

SEQ ID NO: 358651 - DNA, 15 bp, Homo sapiens
gctttcaaggtgctt

SEQ ID NO: 358652 - DNA, 15 bp, Homo sapiens
agctttcaaggtgct

SEQ ID NO: 358653 - DNA, 15 bp, Homo sapiens
tagctttcaaggtgc

SEQ ID NO: 358654 - DNA, 15 bp, Homo sapiens
gtagctttcaaggtg

SEQ ID NO: 358655 - DNA, 15 bp, Homo sapiens
cgtagctttcaaggt

SEQ ID NO: 358656 - DNA, 15 bp, Homo sapiens
tcgtagctttcaagg

SEQ ID NO: 358657 - DNA, 15 bp, Homo sapiens
ctcgtagctttcaag

SEQ ID NO: 358658 - DNA, 15 bp, Homo sapiens
cctcgtagctttcaa

SEQ ID NO: 358659 - DNA, 15 bp, Homo sapiens
gcctcgtagctttca

SEQ ID NO: 358660 - DNA, 15 bp, Homo sapiens
ggcctcgtagctttc

SEQ ID NO: 358661 - DNA, 15 bp, Homo sapiens
gggcctcgtagcttt

SEQ ID NO: 358662 - DNA, 15 bp, Homo sapiens
tgggcctcgtagctt

SEQ ID NO: 358663 - DNA, 15 bp, Homo sapiens
ctgggcctcgtagct

SEQ ID NO: 358664 - DNA, 15 bp, Homo sapiens
tctgggcctcgtagc

SEQ ID NO: 358665 - DNA, 15 bp, Homo sapiens
ttctgggcctcgtag

SEQ ID NO: 358666 - DNA, 15 bp, Homo sapiens
tttctgggcctcgta

SEQ ID NO: 358667 - DNA, 15 bp, Homo sapiens
gtttctgggcctcgt

SEQ ID NO: 358668 - DNA, 15 bp, Homo sapiens
tgtttctgggcctcg

SEQ ID NO: 358669 - DNA, 15 bp, Homo sapiens
ctgtttctgggcctc

SEQ ID NO: 358670 - DNA, 15 bp, Homo sapiens
cctgtttctgggcct

SEQ ID NO: 358671 - DNA, 15 bp, Homo sapiens
ccctgtttctgggcc

SEQ ID NO: 358672 - DNA, 15 bp, Homo sapiens
gccctgtttctgggc

SEQ ID NO: 358673 - DNA, 15 bp, Homo sapiens
ggccctgtttctggg

SEQ ID NO: 358674 - DNA, 15 bp, Homo sapiens
aggccctgtttctgg

SEQ ID NO: 358675 - DNA, 15 bp, Homo sapiens
caggccctgtttctg

SEQ ID NO: 358676 - DNA, 15 bp, Homo sapiens
gcaggccctgtttct

SEQ ID NO: 358677 - DNA, 15 bp, Homo sapiens
tgcaggccctgtttc

SEQ ID NO: 358678 - DNA, 15 bp, Homo sapiens
atgcaggccctgttt

SEQ ID NO: 358679 - DNA, 15 bp, Homo sapiens
catgcaggccctgtt

SEQ ID NO: 358680 - DNA, 15 bp, Homo sapiens
gcatgcaggccctgt

SEQ ID NO: 358681 - DNA, 15 bp, Homo sapiens
tgcatgcaggccctg

SEQ ID NO: 358682 - DNA, 15 bp, Homo sapiens
ttgcatgcaggccct

SEQ ID NO: 358683 - DNA, 15 bp, Homo sapiens
tttgcatgcaggccc

SEQ ID NO: 358684 - DNA, 15 bp, Homo sapiens
atttgcatgcaggcc

SEQ ID NO: 358685 - DNA, 15 bp, Homo sapiens
catttgcatgcaggc

SEQ ID NO: 358686 - DNA, 15 bp, Homo sapiens
tcatttgcatgcagg

SEQ ID NO: 358687 - DNA, 15 bp, Homo sapiens
ttcatttgcatgcag

SEQ ID NO: 358688 - DNA, 15 bp, Homo sapiens
attcatttgcatgca

SEQ ID NO: 358689 - DNA, 15 bp, Homo sapiens
cattcatttgcatgc

SEQ ID NO: 358690 - DNA, 15 bp, Homo sapiens
gcattcatttgcatg

SEQ ID NO: 358691 - DNA, 15 bp, Homo sapiens
ggcattcatttgcat

SEQ ID NO: 358692 - DNA, 15 bp, Homo sapiens
gggcattcatttgca

SEQ ID NO: 358693 - DNA, 15 bp, Homo sapiens
agggcattcatttgc

SEQ ID NO: 358694 - DNA, 15 bp, Homo sapiens
tagggcattcatttg

SEQ ID NO: 358695 - DNA, 15 bp, Homo sapiens
ctagggcattcattt

SEQ ID NO: 358696 - DNA, 15 bp, Homo sapiens
cctagggcattcatt

SEQ ID NO: 358697 - DNA, 15 bp, Homo sapiens
gcctagggcattcat

SEQ ID NO: 358698 - DNA, 15 bp, Homo sapiens
tgcctagggcattca

SEQ ID NO: 358699 - DNA, 15 bp, Homo sapiens
ctgcctagggcattc

SEQ ID NO: 358700 - DNA, 15 bp, Homo sapiens
cctgcctagggcatt

SEQ ID NO: 358701 - DNA, 15 bp, Homo sapiens
acctgcctagggcat

SEQ ID NO: 358702 - DNA, 15 bp, Homo sapiens
gacctgcctagggca

SEQ ID NO: 358703 - DNA, 15 bp, Homo sapiens
agacctgcctagggc

SEQ ID NO: 358704 - DNA, 15 bp, Homo sapiens
cagacctgcctaggg

SEQ ID NO: 358705 - DNA, 15 bp, Homo sapiens
gcagacctgcctagg

SEQ ID NO: 358706 - DNA, 15 bp, Homo sapiens
agcagacctgcctag

SEQ ID NO: 358707 - DNA, 15 bp, Homo sapiens
gagcagacctgccta

SEQ ID NO: 358708 - DNA, 15 bp, Homo sapiens
cgagcagacctgcct

SEQ ID NO: 358709 - DNA, 15 bp, Homo sapiens
gcgagcagacctgcc

SEQ ID NO: 358710 - DNA, 15 bp, Homo sapiens
agcgagcagacctgc

SEQ ID NO: 358711 - DNA, 15 bp, Homo sapiens
cagcgagcagacctg

SEQ ID NO: 358712 - DNA, 15 bp, Homo sapiens
ccagcgagcagacct

SEQ ID NO: 358713 - DNA, 15 bp, Homo sapiens
cccagcgagcagacc

SEQ ID NO: 358714 - DNA, 15 bp, Homo sapiens
acccagcgagcagac

SEQ ID NO: 358715 - DNA, 15 bp, Homo sapiens
tacccagcgagcaga

SEQ ID NO: 358716 - DNA, 15 bp, Homo sapiens
ttacccagcgagcag

SEQ ID NO: 358717 - DNA, 15 bp, Homo sapiens
gttacccagcgagca

SEQ ID NO: 358718 - DNA, 15 bp, Homo sapiens
ggttacccagcgagc

SEQ ID NO: 358719 - DNA, 15 bp, Homo sapiens
aggttacccagcgag

SEQ ID NO: 358720 - DNA, 15 bp, Homo sapiens
aaggttacccagcga

SEQ ID NO: 358721 - DNA, 15 bp, Homo sapiens
gaaggttacccagcg

SEQ ID NO: 358722 - DNA, 15 bp, Homo sapiens
ggaaggttacccagc

SEQ ID NO: 358723 - DNA, 15 bp, Homo sapiens
gggaaggttacccag

SEQ ID NO: 358724 - DNA, 15 bp, Homo sapiens
cgggaaggttaccca

SEQ ID NO: 358725 - DNA, 15 bp, Homo sapiens
gcgggaaggttaccc

SEQ ID NO: 358726 - DNA, 15 bp, Homo sapiens
cgcgggaaggttacc

SEQ ID NO: 358727 - DNA, 15 bp, Homo sapiens
gcgcgggaaggttac

SEQ ID NO: 358728 - DNA, 15 bp, Homo sapiens
ggcgcgggaaggtta

SEQ ID NO: 358729 - DNA, 15 bp, Homo sapiens
cggcgcgggaaggtt

SEQ ID NO: 358730 - DNA, 15 bp, Homo sapiens
ccggcgcgggaaggt

SEQ ID NO: 358731 - DNA, 15 bp, Homo sapiens
cccggcgcgggaagg

SEQ ID NO: 358732 - DNA, 15 bp, Homo sapiens
tcccggcgcgggaag

SEQ ID NO: 358733 - DNA, 15 bp, Homo sapiens
ctcccggcgcgggaa

SEQ ID NO: 358734 - DNA, 15 bp, Homo sapiens
cctcccggcgcggga

SEQ ID NO: 358735 - DNA, 15 bp, Homo sapiens
gcctcccggcgcggg

SEQ ID NO: 358736 - DNA, 15 bp, Homo sapiens
tgcctcccggcgcgg

SEQ ID NO: 358737 - DNA, 15 bp, Homo sapiens
ctgcctcccggcgcg

SEQ ID NO: 358738 - DNA, 15 bp, Homo sapiens
cctgcctcccggcgc

SEQ ID NO: 358739 - DNA, 15 bp, Homo sapiens
ccctgcctcccggcg

SEQ ID NO: 358740 - DNA, 15 bp, Homo sapiens
accctgcctcccggc

SEQ ID NO: 358741 - DNA, 15 bp, Homo sapiens
caccctgcctcccgg

SEQ ID NO: 358742 - DNA, 15 bp, Homo sapiens
ccaccctgcctcccg

SEQ ID NO: 358743 - DNA, 15 bp, Homo sapiens
gccaccctgcctccc

SEQ ID NO: 358744 - DNA, 15 bp, Homo sapiens
cgccaccctgcctcc

SEQ ID NO: 358745 - DNA, 15 bp, Homo sapiens
ccgccaccctgcctc

SEQ ID NO: 358746 - DNA, 15 bp, Homo sapiens
cccgccaccctgcct

SEQ ID NO: 358747 - DNA, 15 bp, Homo sapiens
acccgccaccctgcc

SEQ ID NO: 358748 - DNA, 15 bp, Homo sapiens
cacccgccaccctgc

SEQ ID NO: 358749 - DNA, 15 bp, Homo sapiens
ccacccgccaccctg

SEQ ID NO: 358750 - DNA, 15 bp, Homo sapiens
gccacccgccaccct

SEQ ID NO: 358751 - DNA, 15 bp, Homo sapiens
cgccacccgccaccc

SEQ ID NO: 358752 - DNA, 15 bp, Homo sapiens
ccgccacccgccacc

SEQ ID NO: 358753 - DNA, 15 bp, Homo sapiens
tccgccacccgccac

SEQ ID NO: 358754 - DNA, 15 bp, Homo sapiens
ctccgccacccgcca

SEQ ID NO: 358755 - DNA, 15 bp, Homo sapiens
cctccgccacccgcc

SEQ ID NO: 358756 - DNA, 15 bp, Homo sapiens
acctccgccacccgc

SEQ ID NO: 358757 - DNA, 15 bp, Homo sapiens
gacctccgccacccg

SEQ ID NO: 358758 - DNA, 15 bp, Homo sapiens
agacctccgccaccc

SEQ ID NO: 358759 - DNA, 15 bp, Homo sapiens
aagacctccgccacc

SEQ ID NO: 358760 - DNA, 15 bp, Homo sapiens
gaagacctccgccac

SEQ ID NO: 358761 - DNA, 15 bp, Homo sapiens
ggaagacctccgcca

SEQ ID NO: 358762 - DNA, 15 bp, Homo sapiens
cggaagacctccgcc

SEQ ID NO: 358763 - DNA, 15 bp, Homo sapiens
ccggaagacctccgc

SEQ ID NO: 358764 - DNA, 15 bp, Homo sapiens
cccggaagacctccg

SEQ ID NO: 358765 - DNA, 15 bp, Homo sapiens
gcccggaagacctcc

SEQ ID NO: 358766 - DNA, 15 bp, Homo sapiens
ggcccggaagacctc

SEQ ID NO: 358767 - DNA, 15 bp, Homo sapiens
gggcccggaagacct

SEQ ID NO: 358768 - DNA, 15 bp, Homo sapiens
cgggcccggaagacc

SEQ ID NO: 358769 - DNA, 15 bp, Homo sapiens
ccgggcccggaagac

SEQ ID NO: 358770 - DNA, 15 bp, Homo sapiens
cccgggcccggaaga

SEQ ID NO: 358771 - DNA, 15 bp, Homo sapiens
tcccgggcccggaag

SEQ ID NO: 358772 - DNA, 15 bp, Homo sapiens
ctcccgggcccggaa

SEQ ID NO: 358773 - DNA, 15 bp, Homo sapiens
cctcccgggcccgga

SEQ ID NO: 358774 - DNA, 15 bp, Homo sapiens
tcctcccgggcccgg

SEQ ID NO: 358775 - DNA, 15 bp, Homo sapiens
ttcctcccgggcccg

SEQ ID NO: 358776 - DNA, 15 bp, Homo sapiens
tttcctcccgggccc

SEQ ID NO: 358777 - DNA, 15 bp, Homo sapiens
gtttcctcccgggcc

SEQ ID NO: 358778 - DNA, 15 bp, Homo sapiens
ggtttcctcccgggc

SEQ ID NO: 358779 - DNA, 15 bp, Homo sapiens
aggtttcctcccggg

SEQ ID NO: 358780 - DNA, 15 bp, Homo sapiens
caggtttcctcccgg

SEQ ID NO: 358781 - DNA, 15 bp, Homo sapiens
gcaggtttcctcccg

SEQ ID NO: 358782 - DNA, 15 bp, Homo sapiens
ggcaggtttcctccc

SEQ ID NO: 358783 - DNA, 15 bp, Homo sapiens
gggcaggtttcctcc

SEQ ID NO: 358784 - DNA, 15 bp, Homo sapiens
cgggcaggtttcctc

SEQ ID NO: 358785 - DNA, 15 bp, Homo sapiens
gcgggcaggtttcct

SEQ ID NO: 358786 - DNA, 15 bp, Homo sapiens
cgcgggcaggtttcc

SEQ ID NO: 358787 - DNA, 15 bp, Homo sapiens
ccgcgggcaggtttc

SEQ ID NO: 358788 - DNA, 15 bp, Homo sapiens
gccgcgggcaggttt

SEQ ID NO: 358789 - DNA, 15 bp, Homo sapiens
cgccgcgggcaggtt

SEQ ID NO: 358790 - DNA, 15 bp, Homo sapiens
gcgccgcgggcaggt

SEQ ID NO: 358791 - DNA, 15 bp, Homo sapiens
cgcgccgcgggcagg

SEQ ID NO: 358792 - DNA, 15 bp, Homo sapiens
gcgcgccgcgggcag

SEQ ID NO: 358793 - DNA, 15 bp, Homo sapiens
tgcgcgccgcgggca

SEQ ID NO: 358794 - DNA, 15 bp, Homo sapiens
ctgcgcgccgcgggc

SEQ ID NO: 358795 - DNA, 15 bp, Homo sapiens
cctgcgcgccgcggg

SEQ ID NO: 358796 - DNA, 15 bp, Homo sapiens
gcctgcgcgccgcgg

SEQ ID NO: 358797 - DNA, 15 bp, Homo sapiens
cgcctgcgcgccgcg

SEQ ID NO: 358798 - DNA, 15 bp, Homo sapiens
tcgcctgcgcgccgc

SEQ ID NO: 358799 - DNA, 15 bp, Homo sapiens
ctcgcctgcgcgccg

SEQ ID NO: 358800 - DNA, 15 bp, Homo sapiens
gctcgcctgcgcgcc

SEQ ID NO: 358801 - DNA, 15 bp, Homo sapiens
ggctcgcctgcgcgc

SEQ ID NO: 358802 - DNA, 15 bp, Homo sapiens
gggctcgcctgcgcg

SEQ ID NO: 358803 - DNA, 15 bp, Homo sapiens
ggggctcgcctgcgc

SEQ ID NO: 358804 - DNA, 15 bp, Homo sapiens
gggggctcgcctgcg

SEQ ID NO: 358805 - DNA, 15 bp, Homo sapiens
tgggggctcgcctgc

SEQ ID NO: 358806 - DNA, 15 bp, Homo sapiens
gtgggggctcgcctg

SEQ ID NO: 358807 - DNA, 15 bp, Homo sapiens
ggtgggggctcgcct

SEQ ID NO: 358808 - DNA, 15 bp, Homo sapiens
gggtgggggctcgcc

SEQ ID NO: 358809 - DNA, 15 bp, Homo sapiens
ggggtgggggctcgc

SEQ ID NO: 358810 - DNA, 15 bp, Homo sapiens
gggggtgggggctcg

SEQ ID NO: 358811 - DNA, 15 bp, Homo sapiens
cgggggtgggggctc

SEQ ID NO: 358812 - DNA, 15 bp, Homo sapiens
gcgggggtgggggct

SEQ ID NO: 358813 - DNA, 15 bp, Homo sapiens
agcgggggtgggggc

SEQ ID NO: 358814 - DNA, 15 bp, Homo sapiens
gagcgggggtggggg

SEQ ID NO: 358815 - DNA, 15 bp, Homo sapiens
ggagcgggggtgggg

SEQ ID NO: 358816 - DNA, 15 bp, Homo sapiens
gggagcgggggtggg

SEQ ID NO: 358817 - DNA, 15 bp, Homo sapiens
ggggagcgggggtgg

SEQ ID NO: 358818 - DNA, 15 bp, Homo sapiens
aggggagcgggggtg

SEQ ID NO: 358819 - DNA, 15 bp, Homo sapiens
aaggggagcgggggt

SEQ ID NO: 358820 - DNA, 15 bp, Homo sapiens
gaaggggagcggggg

SEQ ID NO: 358821 - DNA, 15 bp, Homo sapiens
agaaggggagcgggg

SEQ ID NO: 358822 - DNA, 15 bp, Homo sapiens
gagaaggggagcggg

SEQ ID NO: 358823 - DNA, 15 bp, Homo sapiens
ggagaaggggagcgg

SEQ ID NO: 358824 - DNA, 15 bp, Homo sapiens
gggagaaggggagcg

SEQ ID NO: 358825 - DNA, 15 bp, Homo sapiens
cgggagaaggggagc

SEQ ID NO: 358826 - DNA, 15 bp, Homo sapiens
gcgggagaaggggag

SEQ ID NO: 358827 - DNA, 15 bp, Homo sapiens
ggcgggagaagggga

SEQ ID NO: 358828 - DNA, 15 bp, Homo sapiens
cggcgggagaagggg

SEQ ID NO: 358829 - DNA, 15 bp, Homo sapiens
ccggcgggagaaggg

SEQ ID NO: 358830 - DNA, 15 bp, Homo sapiens
cccggcgggagaagg

SEQ ID NO: 358831 - DNA, 15 bp, Homo sapiens
tcccggcgggagaag

SEQ ID NO: 358832 - DNA, 15 bp, Homo sapiens
atcccggcgggagaa

SEQ ID NO: 358833 - DNA, 15 bp, Homo sapiens
catcccggcgggaga

SEQ ID NO: 358834 - DNA, 15 bp, Homo sapiens
gcatcccggcgggag

SEQ ID NO: 358835 - DNA, 15 bp, Homo sapiens
agcatcccggcggga

SEQ ID NO: 358836 - DNA, 15 bp, Homo sapiens
cagcatcccggcggg

SEQ ID NO: 358837 - DNA, 15 bp, Homo sapiens
gcagcatcccggcgg

SEQ ID NO: 358838 - DNA, 15 bp, Homo sapiens
ggcagcatcccggcg

SEQ ID NO: 358839 - DNA, 15 bp, Homo sapiens
gggcagcatcccggc

SEQ ID NO: 358840 - DNA, 15 bp, Homo sapiens
ggggcagcatcccgg

SEQ ID NO: 358841 - DNA, 15 bp, Homo sapiens
aggggcagcatcccg

SEQ ID NO: 358842 - DNA, 15 bp, Homo sapiens
gaggggcagcatccc

SEQ ID NO: 358843 - DNA, 15 bp, Homo sapiens
tgaggggcagcatcc

SEQ ID NO: 358844 - DNA, 15 bp, Homo sapiens
gtgaggggcagcatc

SEQ ID NO: 358845 - DNA, 15 bp, Homo sapiens
tgtgaggggcagcat

SEQ ID NO: 358846 - DNA, 15 bp, Homo sapiens
ctgtgaggggcagca

SEQ ID NO: 358847 - DNA, 15 bp, Homo sapiens
gctgtgaggggcagc

SEQ ID NO: 358848 - DNA, 15 bp, Homo sapiens
agctgtgaggggcag

SEQ ID NO: 358849 - DNA, 15 bp, Homo sapiens
gagctgtgaggggca

SEQ ID NO: 358850 - DNA, 15 bp, Homo sapiens
cgagctgtgaggggc

SEQ ID NO: 358851 - DNA, 15 bp, Homo sapiens
acgagctgtgagggg

SEQ ID NO: 358852 - DNA, 15 bp, Homo sapiens
gacgagctgtgaggg

SEQ ID NO: 358853 - DNA, 15 bp, Homo sapiens
tgacgagctgtgagg

SEQ ID NO: 358854 - DNA, 15 bp, Homo sapiens
ctgacgagctgtgag

SEQ ID NO: 358855 - DNA, 15 bp, Homo sapiens
gctgacgagctgtga

SEQ ID NO: 358856 - DNA, 15 bp, Homo sapiens
ggctgacgagctgtg

SEQ ID NO: 358857 - DNA, 15 bp, Homo sapiens
cggctgacgagctgt

SEQ ID NO: 358858 - DNA, 15 bp, Homo sapiens
ccggctgacgagctg

SEQ ID NO: 358859 - DNA, 15 bp, Homo sapiens
gccggctgacgagct

SEQ ID NO: 358860 - DNA, 15 bp, Homo sapiens
ggccggctgacgagc

SEQ ID NO: 358861 - DNA, 15 bp, Homo sapiens
tggccggctgacgag

SEQ ID NO: 358862 - DNA, 15 bp, Homo sapiens
ttggccggctgacga

SEQ ID NO: 358863 - DNA, 15 bp, Homo sapiens
tttggccggctgacg

SEQ ID NO: 358864 - DNA, 15 bp, Homo sapiens
atttggccggctgac

SEQ ID NO: 358865 - DNA, 15 bp, Homo sapiens
catttggccggctga

SEQ ID NO: 358866 - DNA, 15 bp, Homo sapiens
gcatttggccggctg

SEQ ID NO: 358867 - DNA, 15 bp, Homo sapiens
tgcatttggccggct

SEQ ID NO: 358868 - DNA, 15 bp, Homo sapiens
atgcatttggccggc

SEQ ID NO: 358869 - DNA, 15 bp, Homo sapiens
aatgcatttggccgg

SEQ ID NO: 358870 - DNA, 15 bp, Homo sapiens
gaatgcatttggccg

SEQ ID NO: 358871 - DNA, 15 bp, Homo sapiens
ggaatgcatttggcc

SEQ ID NO: 358872 - DNA, 15 bp, Homo sapiens
tggaatgcatttggc

SEQ ID NO: 358873 - DNA, 15 bp, Homo sapiens
ctggaatgcatttgg

SEQ ID NO: 358874 - DNA, 15 bp, Homo sapiens
tctggaatgcatttg

SEQ ID NO: 358875 - DNA, 15 bp, Homo sapiens
ctctggaatgcattt

SEQ ID NO: 358876 - DNA, 15 bp, Homo sapiens
gctctggaatgcatt

SEQ ID NO: 358877 - DNA, 15 bp, Homo sapiens
agctctggaatgcat

SEQ ID NO: 358878 - DNA, 15 bp, Homo sapiens
cagctctggaatgca

SEQ ID NO: 358879 - DNA, 15 bp, Homo sapiens
acagctctggaatgc

SEQ ID NO: 358880 - DNA, 15 bp, Homo sapiens
cacagctctggaatg

SEQ ID NO: 358881 - DNA, 15 bp, Homo sapiens
gcacagctctggaat

SEQ ID NO: 358882 - DNA, 15 bp, Homo sapiens
tgcacagctctggaa

SEQ ID NO: 358883 - DNA, 15 bp, Homo sapiens
gtgcacagctctgga

SEQ ID NO: 358884 - DNA, 15 bp, Homo sapiens
tgtgcacagctctgg

SEQ ID NO: 358885 - DNA, 15 bp, Homo sapiens
ttgtgcacagctctg

SEQ ID NO: 358886 - DNA, 15 bp, Homo sapiens
cttgtgcacagctct

SEQ ID NO: 358887 - DNA, 15 bp, Homo sapiens
tcttgtgcacagctc

SEQ ID NO: 358888 - DNA, 15 bp, Homo sapiens
gtcttgtgcacagct

SEQ ID NO: 358889 - DNA, 15 bp, Homo sapiens
tgtcttgtgcacagc

SEQ ID NO: 358890 - DNA, 15 bp, Homo sapiens
gtgtcttgtgcacag

SEQ ID NO: 358891 - DNA, 15 bp, Homo sapiens
tgtgtcttgtgcaca

SEQ ID NO: 358892 - DNA, 15 bp, Homo sapiens
gtgtgtcttgtgcac

SEQ ID NO: 358893 - DNA, 15 bp, Homo sapiens
agtgtgtcttgtgca

SEQ ID NO: 358894 - DNA, 15 bp, Homo sapiens
aagtgtgtcttgtgc

SEQ ID NO: 358895 - DNA, 15 bp, Homo sapiens
gaagtgtgtcttgtg

SEQ ID NO: 358896 - DNA, 15 bp, Homo sapiens
agaagtgtgtcttgt

SEQ ID NO: 358897 - DNA, 15 bp, Homo sapiens
gagaagtgtgtcttg

SEQ ID NO: 358898 - DNA, 15 bp, Homo sapiens
ggagaagtgtgtctt

SEQ ID NO: 358899 - DNA, 15 bp, Homo sapiens
tggagaagtgtgtct

SEQ ID NO: 358900 - DNA, 15 bp, Homo sapiens
ctggagaagtgtgtc

SEQ ID NO: 358901 - DNA, 15 bp, Homo sapiens
cctggagaagtgtgt

SEQ ID NO: 358902 - DNA, 15 bp, Homo sapiens
gcctggagaagtgtg

SEQ ID NO: 358903 - DNA, 15 bp, Homo sapiens
tgcctggagaagtgt

SEQ ID NO: 358904 - DNA, 15 bp, Homo sapiens
ctgcctggagaagtg

SEQ ID NO: 358905 - DNA, 15 bp, Homo sapiens
actgcctggagaagt

SEQ ID NO: 358906 - DNA, 15 bp, Homo sapiens
gactgcctggagaag

SEQ ID NO: 358907 - DNA, 15 bp, Homo sapiens
ggactgcctggagaa

SEQ ID NO: 358908 - DNA, 15 bp, Homo sapiens
aggactgcctggaga

SEQ ID NO: 358909 - DNA, 15 bp, Homo sapiens
taggactgcctggag

SEQ ID NO: 358910 - DNA, 15 bp, Homo sapiens
ctaggactgcctgga

SEQ ID NO: 358911 - DNA, 15 bp, Homo sapiens
tctaggactgcctgg

SEQ ID NO: 358912 - DNA, 15 bp, Homo sapiens
ttctaggactgcctg

SEQ ID NO: 358913 - DNA, 15 bp, Homo sapiens
tttctaggactgcct

SEQ ID NO: 358914 - DNA, 15 bp, Homo sapiens
gtttctaggactgcc

SEQ ID NO: 358915 - DNA, 15 bp, Homo sapiens
ggtttctaggactgc

SEQ ID NO: 358916 - DNA, 15 bp, Homo sapiens
cggtttctaggactg

SEQ ID NO: 358917 - DNA, 15 bp, Homo sapiens
ccggtttctaggact

SEQ ID NO: 358918 - DNA, 15 bp, Homo sapiens
tccggtttctaggac

SEQ ID NO: 358919 - DNA, 15 bp, Homo sapiens
ctccggtttctagga

SEQ ID NO: 358920 - DNA, 15 bp, Homo sapiens
gctccggtttctagg

SEQ ID NO: 358921 - DNA, 15 bp, Homo sapiens
ggctccggtttctag

SEQ ID NO: 358922 - DNA, 15 bp, Homo sapiens
gggctccggtttcta

SEQ ID NO: 358923 - DNA, 15 bp, Homo sapiens
cgggctccggtttct

SEQ ID NO: 358924 - DNA, 15 bp, Homo sapiens
ccgggctccggtttc

SEQ ID NO: 358925 - DNA, 15 bp, Homo sapiens
tccgggctccggttt

SEQ ID NO: 358926 - DNA, 15 bp, Homo sapiens
ctccgggctccggtt

SEQ ID NO: 358927 - DNA, 15 bp, Homo sapiens
gctccgggctccggt

SEQ ID NO: 358928 - DNA, 15 bp, Homo sapiens
agctccgggctccgg

SEQ ID NO: 358929 - DNA, 15 bp, Homo sapiens
cagctccgggctccg

SEQ ID NO: 358930 - DNA, 15 bp, Homo sapiens
tcagctccgggctcc

SEQ ID NO: 358931 - DNA, 15 bp, Homo sapiens
ctcagctccgggctc

SEQ ID NO: 358932 - DNA, 15 bp, Homo sapiens
tctcagctccgggct

SEQ ID NO: 358933 - DNA, 15 bp, Homo sapiens
ctctcagctccgggc

SEQ ID NO: 358934 - DNA, 15 bp, Homo sapiens
cctctcagctccggg

SEQ ID NO: 358935 - DNA, 15 bp, Homo sapiens
ccctctcagctccgg

SEQ ID NO: 358936 - DNA, 15 bp, Homo sapiens
gccctctcagctccg

SEQ ID NO: 358937 - DNA, 15 bp, Homo sapiens
cgccctctcagctcc

SEQ ID NO: 358938 - DNA, 15 bp, Homo sapiens
ccgccctctcagctc

SEQ ID NO: 358939 - DNA, 15 bp, Homo sapiens
cccgccctctcagct

SEQ ID NO: 358940 - DNA, 15 bp, Homo sapiens
tcccgccctctcagc

SEQ ID NO: 358941 - DNA, 15 bp, Homo sapiens
ctcccgccctctcag

SEQ ID NO: 358942 - DNA, 15 bp, Homo sapiens
cctcccgccctctca

SEQ ID NO: 358943 - DNA, 15 bp, Homo sapiens
ccctcccgccctctc

SEQ ID NO: 358944 - DNA, 15 bp, Homo sapiens
tccctcccgccctct

SEQ ID NO: 358945 - DNA, 15 bp, Homo sapiens
ctccctcccgccctc

SEQ ID NO: 358946 - DNA, 15 bp, Homo sapiens
gctccctcccgccct

SEQ ID NO: 358947 - DNA, 15 bp, Homo sapiens
cgctccctcccgccc

SEQ ID NO: 358948 - DNA, 15 bp, Homo sapiens
gcgctccctcccgcc

SEQ ID NO: 358949 - DNA, 15 bp, Homo sapiens
cgcgctccctcccgc

SEQ ID NO: 358950 - DNA, 15 bp, Homo sapiens
gcgcgctccctcccg

SEQ ID NO: 358951 - DNA, 15 bp, Homo sapiens
cgcgcgctccctccc

SEQ ID NO: 358952 - DNA, 15 bp, Homo sapiens
ccgcgcgctccctcc

SEQ ID NO: 358953 - DNA, 15 bp, Homo sapiens
gccgcgcgctccctc

SEQ ID NO: 358954 - DNA, 15 bp, Homo sapiens
ggccgcgcgctccct

SEQ ID NO: 358955 - DNA, 15 bp, Homo sapiens
cggccgcgcgctccc

SEQ ID NO: 358956 - DNA, 15 bp, Homo sapiens
gcggccgcgcgctcc

SEQ ID NO: 358957 - DNA, 15 bp, Homo sapiens
ggcggccgcgcgctc

SEQ ID NO: 358958 - DNA, 15 bp, Homo sapiens
cggcggccgcgcgct

SEQ ID NO: 358959 - DNA, 15 bp, Homo sapiens
gcggcggccgcgcgc

SEQ ID NO: 358960 - DNA, 15 bp, Homo sapiens
agcggcggccgcgcg

SEQ ID NO: 358961 - DNA, 15 bp, Homo sapiens
cagcggcggccgcgc

SEQ ID NO: 358962 - DNA, 15 bp, Homo sapiens
tcagcggcggccgcg

SEQ ID NO: 358963 - DNA, 15 bp, Homo sapiens
ctcagcggcggccgc

SEQ ID NO: 358964 - DNA, 15 bp, Homo sapiens
cctcagcggcggccg

SEQ ID NO: 358965 - DNA, 15 bp, Homo sapiens
acctcagcggcggcc

SEQ ID NO: 358966 - DNA, 15 bp, Homo sapiens
gacctcagcggcggc

SEQ ID NO: 358967 - DNA, 15 bp, Homo sapiens
tgacctcagcggcgg

SEQ ID NO: 358968 - DNA, 15 bp, Homo sapiens
atgacctcagcggcg

SEQ ID NO: 358969 - DNA, 15 bp, Homo sapiens
tatgacctcagcggc

SEQ ID NO: 358970 - DNA, 15 bp, Homo sapiens
atatgacctcagcgg

SEQ ID NO: 358971 - DNA, 15 bp, Homo sapiens
aatatgacctcagcg

SEQ ID NO: 358972 - DNA, 15 bp, Homo sapiens
gaatatgacctcagc

SEQ ID NO: 358973 - DNA, 15 bp, Homo sapiens
tgaatatgacctcag

SEQ ID NO: 358974 - DNA, 15 bp, Homo sapiens
gtgaatatgacctca

SEQ ID NO: 358975 - DNA, 15 bp, Homo sapiens
cgtgaatatgacctc

SEQ ID NO: 358976 - DNA, 15 bp, Homo sapiens
gcgtgaatatgacct

SEQ ID NO: 358977 - DNA, 15 bp, Homo sapiens
ggcgtgaatatgacc

SEQ ID NO: 358978 - DNA, 15 bp, Homo sapiens
cggcgtgaatatgac

SEQ ID NO: 358979 - DNA, 15 bp, Homo sapiens
gcggcgtgaatatga

SEQ ID NO: 358980 - DNA, 15 bp, Homo sapiens
ggcggcgtgaatatg

SEQ ID NO: 358981 - DNA, 15 bp, Homo sapiens
aggcggcgtgaatat

SEQ ID NO: 358982 - DNA, 15 bp, Homo sapiens
gaggcggcgtgaata

SEQ ID NO: 358983 - DNA, 15 bp, Homo sapiens
ggaggcggcgtgaat

SEQ ID NO: 358984 - DNA, 15 bp, Homo sapiens
gggaggcggcgtgaa

SEQ ID NO: 358985 - DNA, 15 bp, Homo sapiens
ggggaggcggcgtga

SEQ ID NO: 358986 - DNA, 15 bp, Homo sapiens
cggggaggcggcgtg

SEQ ID NO: 358987 - DNA, 15 bp, Homo sapiens
gcggggaggcggcgt

SEQ ID NO: 358988 - DNA, 15 bp, Homo sapiens
ggcggggaggcggcg

SEQ ID NO: 358989 - DNA, 15 bp, Homo sapiens
gggcggggaggcggc

SEQ ID NO: 358990 - DNA, 15 bp, Homo sapiens
agggcggggaggcgg

SEQ ID NO: 358991 - DNA, 15 bp, Homo sapiens
gagggcggggaggcg

SEQ ID NO: 358992 - DNA, 15 bp, Homo sapiens
cgagggcggggaggc

SEQ ID NO: 358993 - DNA, 15 bp, Homo sapiens
ccgagggcggggagg

SEQ ID NO: 358994 - DNA, 15 bp, Homo sapiens
gccgagggcggggag

SEQ ID NO: 358995 - DNA, 15 bp, Homo sapiens
cgccgagggcgggga

SEQ ID NO: 358996 - DNA, 15 bp, Homo sapiens
ccgccgagggcgggg

SEQ ID NO: 358997 - DNA, 15 bp, Homo sapiens
gccgccgagggcggg

SEQ ID NO: 358998 - DNA, 15 bp, Homo sapiens
agccgccgagggcgg

SEQ ID NO: 358999 - DNA, 15 bp, Homo sapiens
cagccgccgagggcg

SEQ ID NO: 359000 - DNA, 15 bp, Homo sapiens
acagccgccgagggc

SEQ ID NO: 359001 - DNA, 15 bp, Homo sapiens
aacagccgccgaggg

SEQ ID NO: 359002 - DNA, 15 bp, Homo sapiens
gaacagccgccgagg

SEQ ID NO: 359003 - DNA, 15 bp, Homo sapiens
ggaacagccgccgag

SEQ ID NO: 359004 - DNA, 15 bp, Homo sapiens
gggaacagccgccga

SEQ ID NO: 359005 - DNA, 15 bp, Homo sapiens
ggggaacagccgccg

SEQ ID NO: 359006 - DNA, 15 bp, Homo sapiens
aggggaacagccgcc

SEQ ID NO: 359007 - DNA, 15 bp, Homo sapiens
gaggggaacagccgc

SEQ ID NO: 359008 - DNA, 15 bp, Homo sapiens
tgaggggaacagccg

SEQ ID NO: 359009 - DNA, 15 bp, Homo sapiens
ctgaggggaacagcc

SEQ ID NO: 359010 - DNA, 15 bp, Homo sapiens
gctgaggggaacagc

SEQ ID NO: 359011 - DNA, 15 bp, Homo sapiens
cgctgaggggaacag

SEQ ID NO: 359012 - DNA, 15 bp, Homo sapiens
gcgctgaggggaaca

SEQ ID NO: 359013 - DNA, 15 bp, Homo sapiens
tgcgctgaggggaac

SEQ ID NO: 359014 - DNA, 15 bp, Homo sapiens
gtgcgctgaggggaa

SEQ ID NO: 359015 - DNA, 15 bp, Homo sapiens
tgtgcgctgagggga

SEQ ID NO: 359016 - DNA, 15 bp, Homo sapiens
gtgtgcgctgagggg

SEQ ID NO: 359017 - DNA, 15 bp, Homo sapiens
agtgtgcgctgaggg

SEQ ID NO: 359018 - DNA, 15 bp, Homo sapiens
aagtgtgcgctgagg

SEQ ID NO: 359019 - DNA, 15 bp, Homo sapiens
gaagtgtgcgctgag

SEQ ID NO: 359020 - DNA, 15 bp, Homo sapiens
ggaagtgtgcgctga

SEQ ID NO: 359021 - DNA, 15 bp, Homo sapiens
gggaagtgtgcgctg

SEQ ID NO: 359022 - DNA, 15 bp, Homo sapiens
tgggaagtgtgcgct

SEQ ID NO: 359023 - DNA, 15 bp, Homo sapiens
ctgggaagtgtgcgc

SEQ ID NO: 359024 - DNA, 15 bp, Homo sapiens
cctgggaagtgtgcg

SEQ ID NO: 359025 - DNA, 15 bp, Homo sapiens
ccctgggaagtgtgc

SEQ ID NO: 359026 - DNA, 15 bp, Homo sapiens
gccctgggaagtgtg

SEQ ID NO: 359027 - DNA, 15 bp, Homo sapiens
ggccctgggaagtgt

SEQ ID NO: 359028 - DNA, 15 bp, Homo sapiens
aggccctgggaagtg

SEQ ID NO: 359029 - DNA, 15 bp, Homo sapiens
gaggccctgggaagt

SEQ ID NO: 359030 - DNA, 15 bp, Homo sapiens
cgaggccctgggaag

SEQ ID NO: 359031 - DNA, 15 bp, Homo sapiens
ccgaggccctgggaa

SEQ ID NO: 359032 - DNA, 15 bp, Homo sapiens
accgaggccctggga

SEQ ID NO: 359033 - DNA, 15 bp, Homo sapiens
gaccgaggccctggg

SEQ ID NO: 359034 - DNA, 15 bp, Homo sapiens
ggaccgaggccctgg

SEQ ID NO: 359035 - DNA, 15 bp, Homo sapiens
tggaccgaggccctg

SEQ ID NO: 359036 - DNA, 15 bp, Homo sapiens
ctggaccgaggccct

SEQ ID NO: 359037 - DNA, 15 bp, Homo sapiens
actggaccgaggccc

SEQ ID NO: 359038 - DNA, 15 bp, Homo sapiens
gactggaccgaggcc

SEQ ID NO: 359039 - DNA, 15 bp, Homo sapiens
ggactggaccgaggc

SEQ ID NO: 359040 - DNA, 15 bp, Homo sapiens
cggactggaccgagg

SEQ ID NO: 359041 - DNA, 15 bp, Homo sapiens
ccggactggaccgag

SEQ ID NO: 359042 - DNA, 15 bp, Homo sapiens
accggactggaccga

SEQ ID NO: 359043 - DNA, 15 bp, Homo sapiens
taccggactggaccg

SEQ ID NO: 359044 - DNA, 15 bp, Homo sapiens
ataccggactggacc

SEQ ID NO: 359045 - DNA, 15 bp, Homo sapiens
tataccggactggac

SEQ ID NO: 359046 - DNA, 15 bp, Homo sapiens
ttataccggactgga

SEQ ID NO: 359047 - DNA, 15 bp, Homo sapiens
tttataccggactgg

SEQ ID NO: 359048 - DNA, 15 bp, Homo sapiens
atttataccggactg

SEQ ID NO: 359049 - DNA, 15 bp, Homo sapiens
catttataccggact

SEQ ID NO: 359050 - DNA, 15 bp, Homo sapiens
acatttataccggac

SEQ ID NO: 359051 - DNA, 15 bp, Homo sapiens
gacatttataccgga

SEQ ID NO: 359052 - DNA, 15 bp, Homo sapiens
agacatttataccgg

SEQ ID NO: 359053 - DNA, 15 bp, Homo sapiens
aagacatttataccg

SEQ ID NO: 359054 - DNA, 15 bp, Homo sapiens
aaagacatttatacc

SEQ ID NO: 359055 - DNA, 15 bp, Homo sapiens
aaaagacatttatac

SEQ ID NO: 359056 - DNA, 15 bp, Homo sapiens
taaaagacatttata

SEQ ID NO: 359057 - DNA, 15 bp, Homo sapiens
ttaaaagacatttat

SEQ ID NO: 359058 - DNA, 15 bp, Homo sapiens
tttaaaagacattta

SEQ ID NO: 359059 - DNA, 15 bp, Homo sapiens
gtttaaaagacattt

SEQ ID NO: 359060 - DNA, 15 bp, Homo sapiens
ggtttaaaagacatt

SEQ ID NO: 359061 - DNA, 15 bp, Homo sapiens
cggtttaaaagacat

SEQ ID NO: 359062 - DNA, 15 bp, Homo sapiens
tcggtttaaaagaca

SEQ ID NO: 359063 - DNA, 15 bp, Homo sapiens
ctcggtttaaaagac

SEQ ID NO: 359064 - DNA, 15 bp, Homo sapiens
tctcggtttaaaaga

SEQ ID NO: 359065 - DNA, 15 bp, Homo sapiens
gtctcggtttaaaag

SEQ ID NO: 359066 - DNA, 15 bp, Homo sapiens
tgtctcggtttaaaa

SEQ ID NO: 359067 - DNA, 15 bp, Homo sapiens
ctgtctcggtttaaa

SEQ ID NO: 359068 - DNA, 15 bp, Homo sapiens
gctgtctcggtttaa

SEQ ID NO: 359069 - DNA, 15 bp, Homo sapiens
cgctgtctcggttta

SEQ ID NO: 359070 - DNA, 15 bp, Homo sapiens
gcgctgtctcggttt

SEQ ID NO: 359071 - DNA, 15 bp, Homo sapiens
agcgctgtctcggtt

SEQ ID NO: 359072 - DNA, 15 bp, Homo sapiens
gagcgctgtctcggt

SEQ ID NO: 359073 - DNA, 15 bp, Homo sapiens
agagcgctgtctcgg

SEQ ID NO: 359074 - DNA, 15 bp, Homo sapiens
gagagcgctgtctcg

SEQ ID NO: 359075 - DNA, 15 bp, Homo sapiens
ggagagcgctgtctc

SEQ ID NO: 359076 - DNA, 15 bp, Homo sapiens
aggagagcgctgtct

SEQ ID NO: 359077 - DNA, 15 bp, Homo sapiens
gaggagagcgctgtc

SEQ ID NO: 359078 - DNA, 15 bp, Homo sapiens
ggaggagagcgctgt

SEQ ID NO: 359079 - DNA, 15 bp, Homo sapiens
gggaggagagcgctg

SEQ ID NO: 359080 - DNA, 15 bp, Homo sapiens
ggggaggagagcgct

SEQ ID NO: 359081 - DNA, 15 bp, Homo sapiens
aggggaggagagcgc

SEQ ID NO: 359082 - DNA, 15 bp, Homo sapiens
aaggggaggagagcg

SEQ ID NO: 359083 - DNA, 15 bp, Homo sapiens
caaggggaggagagc

SEQ ID NO: 359084 - DNA, 15 bp, Homo sapiens
gcaaggggaggagag

SEQ ID NO: 359085 - DNA, 15 bp, Homo sapiens
ggcaaggggaggaga

SEQ ID NO: 359086 - DNA, 15 bp, Homo sapiens
gggcaaggggaggag

SEQ ID NO: 359087 - DNA, 15 bp, Homo sapiens
agggcaaggggagga

SEQ ID NO: 359088 - DNA, 15 bp, Homo sapiens
gagggcaaggggagg

SEQ ID NO: 359089 - DNA, 15 bp, Homo sapiens
cgagggcaaggggag

SEQ ID NO: 359090 - DNA, 15 bp, Homo sapiens
ccgagggcaagggga

SEQ ID NO: 359091 - DNA, 15 bp, Homo sapiens
cccgagggcaagggg

SEQ ID NO: 359092 - DNA, 15 bp, Homo sapiens
gcccgagggcaaggg

SEQ ID NO: 359093 - DNA, 15 bp, Homo sapiens
cgcccgagggcaagg

SEQ ID NO: 359094 - DNA, 15 bp, Homo sapiens
gcgcccgagggcaag

SEQ ID NO: 359095 - DNA, 15 bp, Homo sapiens
cgcgcccgagggcaa

SEQ ID NO: 359096 - DNA, 15 bp, Homo sapiens
ccgcgcccgagggca

SEQ ID NO: 359097 - DNA, 15 bp, Homo sapiens
gccgcgcccgagggc

SEQ ID NO: 359098 - DNA, 15 bp, Homo sapiens
ggccgcgcccgaggg

SEQ ID NO: 359099 - DNA, 15 bp, Homo sapiens
tggccgcgcccgagg

SEQ ID NO: 359100 - DNA, 15 bp, Homo sapiens
ttggccgcgcccgag

SEQ ID NO: 359101 - DNA, 15 bp, Homo sapiens
cttggccgcgcccga

SEQ ID NO: 359102 - DNA, 15 bp, Homo sapiens
ccttggccgcgcccg

SEQ ID NO: 359103 - DNA, 15 bp, Homo sapiens
cccttggccgcgccc

SEQ ID NO: 359104 - DNA, 15 bp, Homo sapiens
tcccttggccgcgcc

SEQ ID NO: 359105 - DNA, 15 bp, Homo sapiens
atcccttggccgcgc

SEQ ID NO: 359106 - DNA, 15 bp, Homo sapiens
gatcccttggccgcg

SEQ ID NO: 359107 - DNA, 15 bp, Homo sapiens
ggatcccttggccgc

SEQ ID NO: 359108 - DNA, 15 bp, Homo sapiens
tggatcccttggccg

SEQ ID NO: 359109 - DNA, 15 bp, Homo sapiens
gtggatcccttggcc

SEQ ID NO: 359110 - DNA, 15 bp, Homo sapiens
ggtggatcccttggc

SEQ ID NO: 359111 - DNA, 15 bp, Homo sapiens
cggtggatcccttgg

SEQ ID NO: 359112 - DNA, 15 bp, Homo sapiens
gcggtggatcccttg

SEQ ID NO: 359113 - DNA, 15 bp, Homo sapiens
ggcggtggatccctt

SEQ ID NO: 359114 - DNA, 15 bp, Homo sapiens
tggcggtggatccct

SEQ ID NO: 359115 - DNA, 15 bp, Homo sapiens
ctggcggtggatccc

SEQ ID NO: 359116 - DNA, 15 bp, Homo sapiens
cctggcggtggatcc

SEQ ID NO: 359117 - DNA, 15 bp, Homo sapiens
ccctggcggtggatc

SEQ ID NO: 359118 - DNA, 15 bp, Homo sapiens
gccctggcggtggat

SEQ ID NO: 359119 - DNA, 15 bp, Homo sapiens
ggccctggcggtgga

SEQ ID NO: 359120 - DNA, 15 bp, Homo sapiens
aggccctggcggtgg

SEQ ID NO: 359121 - DNA, 15 bp, Homo sapiens
aaggccctggcggtg

SEQ ID NO: 359122 - DNA, 15 bp, Homo sapiens
aaaggccctggcggt

SEQ ID NO: 359123 - DNA, 15 bp, Homo sapiens
taaaggccctggcgg

SEQ ID NO: 359124 - DNA, 15 bp, Homo sapiens
ttaaaggccctggcg

SEQ ID NO: 359125 - DNA, 15 bp, Homo sapiens
tttaaaggccctggc

SEQ ID NO: 359126 - DNA, 15 bp, Homo sapiens
ttttaaaggccctgg

SEQ ID NO: 359127 - DNA, 15 bp, Homo sapiens
gttttaaaggccctg

SEQ ID NO: 359128 - DNA, 15 bp, Homo sapiens
tgttttaaaggccct

SEQ ID NO: 359129 - DNA, 15 bp, Homo sapiens
ttgttttaaaggccc

SEQ ID NO: 359130 - DNA, 15 bp, Homo sapiens
tttgttttaaaggcc

SEQ ID NO: 359131 - DNA, 15 bp, Homo sapiens
ttttgttttaaaggc

SEQ ID NO: 359132 - DNA, 15 bp, Homo sapiens
gttttgttttaaagg

SEQ ID NO: 359133 - DNA, 15 bp, Homo sapiens
ggttttgttttaaag

SEQ ID NO: 359134 - DNA, 15 bp, Homo sapiens
tggttttgttttaaa

SEQ ID NO: 359135 - DNA, 15 bp, Homo sapiens
ttggttttgttttaa

SEQ ID NO: 359136 - DNA, 15 bp, Homo sapiens
attggttttgtttta

SEQ ID NO: 359137 - DNA, 15 bp, Homo sapiens
cattggttttgtttt

SEQ ID NO: 359138 - DNA, 15 bp, Homo sapiens
tcattggttttgttt

SEQ ID NO: 359139 - DNA, 15 bp, Homo sapiens
ttcattggttttgtt

SEQ ID NO: 359140 - DNA, 15 bp, Homo sapiens
attcattggttttgt

SEQ ID NO: 359141 - DNA, 15 bp, Homo sapiens
cattcattggttttg

SEQ ID NO: 359142 - DNA, 15 bp, Homo sapiens
tcattcattggtttt

SEQ ID NO: 359143 - DNA, 15 bp, Homo sapiens
ttcattcattggttt

SEQ ID NO: 359144 - DNA, 15 bp, Homo sapiens
cttcattcattggtt

SEQ ID NO: 359145 - DNA, 15 bp, Homo sapiens
gcttcattcattggt

SEQ ID NO: 359146 - DNA, 15 bp, Homo sapiens
cgcttcattcattgg

SEQ ID NO: 359147 - DNA, 15 bp, Homo sapiens
gcgcttcattcattg

SEQ ID NO: 359148 - DNA, 15 bp, Homo sapiens
agcgcttcattcatt

SEQ ID NO: 359149 - DNA, 15 bp, Homo sapiens
tagcgcttcattcat

SEQ ID NO: 359150 - DNA, 15 bp, Homo sapiens
ctagcgcttcattca

SEQ ID NO: 359151 - DNA, 15 bp, Homo sapiens
cctagcgcttcattc

SEQ ID NO: 359152 - DNA, 15 bp, Homo sapiens
ccctagcgcttcatt

SEQ ID NO: 359153 - DNA, 15 bp, Homo sapiens
gccctagcgcttcat

SEQ ID NO: 359154 - DNA, 15 bp, Homo sapiens
cgccctagcgcttca

SEQ ID NO: 359155 - DNA, 15 bp, Homo sapiens
tcgccctagcgcttc

SEQ ID NO: 359156 - DNA, 15 bp, Homo sapiens
ctcgccctagcgctt

SEQ ID NO: 359157 - DNA, 15 bp, Homo sapiens
gctcgccctagcgct

SEQ ID NO: 359158 - DNA, 15 bp, Homo sapiens
cgctcgccctagcgc

SEQ ID NO: 359159 - DNA, 15 bp, Homo sapiens
gcgctcgccctagcg

SEQ ID NO: 359160 - DNA, 15 bp, Homo sapiens
cgcgctcgccctagc

SEQ ID NO: 359161 - DNA, 15 bp, Homo sapiens
gcgcgctcgccctag

SEQ ID NO: 359162 - DNA, 15 bp, Homo sapiens
cgcgcgctcgcccta

SEQ ID NO: 359163 - DNA, 15 bp, Homo sapiens
gcgcgcgctcgccct

SEQ ID NO: 359164 - DNA, 15 bp, Homo sapiens
cgcgcgcgctcgccc

SEQ ID NO: 359165 - DNA, 15 bp, Homo sapiens
tcgcgcgcgctcgcc

SEQ ID NO: 359166 - DNA, 15 bp, Homo sapiens
ctcgcgcgcgctcgc

SEQ ID NO: 359167 - DNA, 15 bp, Homo sapiens
tctcgcgcgcgctcg

SEQ ID NO: 359168 - DNA, 15 bp, Homo sapiens
atctcgcgcgcgctc

SEQ ID NO: 359169 - DNA, 15 bp, Homo sapiens
catctcgcgcgcgct

SEQ ID NO: 359170 - DNA, 15 bp, Homo sapiens
ccatctcgcgcgcgc

SEQ ID NO: 359171 - DNA, 15 bp, Homo sapiens
gccatctcgcgcgcg

SEQ ID NO: 359172 - DNA, 15 bp, Homo sapiens
ggccatctcgcgcgc

SEQ ID NO: 359173 - DNA, 15 bp, Homo sapiens
tggccatctcgcgcg

SEQ ID NO: 359174 - DNA, 15 bp, Homo sapiens
gtggccatctcgcgc

SEQ ID NO: 359175 - DNA, 15 bp, Homo sapiens
ggtggccatctcgcg

SEQ ID NO: 359176 - DNA, 15 bp, Homo sapiens
cggtggccatctcgc

SEQ ID NO: 359177 - DNA, 15 bp, Homo sapiens
gcggtggccatctcg

SEQ ID NO: 359178 - DNA, 15 bp, Homo sapiens
cgcggtggccatctc

SEQ ID NO: 359179 - DNA, 15 bp, Homo sapiens
tcgcggtggccatct

SEQ ID NO: 359180 - DNA, 15 bp, Homo sapiens
ttcgcggtggccatc

SEQ ID NO: 359181 - DNA, 15 bp, Homo sapiens
tttcgcggtggccat

SEQ ID NO: 359182 - DNA, 15 bp, Homo sapiens
gtttcgcggtggcca

SEQ ID NO: 359183 - DNA, 15 bp, Homo sapiens
ggtttcgcggtggcc

SEQ ID NO: 359184 - DNA, 15 bp, Homo sapiens
gggtttcgcggtggc

SEQ ID NO: 359185 - DNA, 15 bp, Homo sapiens
tgggtttcgcggtgg

SEQ ID NO: 359186 - DNA, 15 bp, Homo sapiens
ctgggtttcgcggtg

SEQ ID NO: 359187 - DNA, 15 bp, Homo sapiens
gctgggtttcgcggt

SEQ ID NO: 359188 - DNA, 15 bp, Homo sapiens
ggctgggtttcgcgg

SEQ ID NO: 359189 - DNA, 15 bp, Homo sapiens
cggctgggtttcgcg

SEQ ID NO: 359190 - DNA, 15 bp, Homo sapiens
ccggctgggtttcgc

SEQ ID NO: 359191 - DNA, 15 bp, Homo sapiens
cccggctgggtttcg

SEQ ID NO: 359192 - DNA, 15 bp, Homo sapiens
acccggctgggtttc

SEQ ID NO: 359193 - DNA, 15 bp, Homo sapiens
gacccggctgggttt

SEQ ID NO: 359194 - DNA, 15 bp, Homo sapiens
cgacccggctgggtt

SEQ ID NO: 359195 - DNA, 15 bp, Homo sapiens
tcgacccggctgggt

SEQ ID NO: 359196 - DNA, 15 bp, Homo sapiens
ttcgacccggctggg

SEQ ID NO: 359197 - DNA, 15 bp, Homo sapiens
tttcgacccggctgg

SEQ ID NO: 359198 - DNA, 15 bp, Homo sapiens
atttcgacccggctg

SEQ ID NO: 359199 - DNA, 15 bp, Homo sapiens
gatttcgacccggct

SEQ ID NO: 359200 - DNA, 15 bp, Homo sapiens
cgatttcgacccggc

SEQ ID NO: 359201 - DNA, 15 bp, Homo sapiens
ccgatttcgacccgg

SEQ ID NO: 359202 - DNA, 15 bp, Homo sapiens
cccgatttcgacccg

SEQ ID NO: 359203 - DNA, 15 bp, Homo sapiens
gcccgatttcgaccc

SEQ ID NO: 359204 - DNA, 15 bp, Homo sapiens
ggcccgatttcgacc

SEQ ID NO: 359205 - DNA, 15 bp, Homo sapiens
tggcccgatttcgac

SEQ ID NO: 359206 - DNA, 15 bp, Homo sapiens
gtggcccgatttcga

SEQ ID NO: 359207 - DNA, 15 bp, Homo sapiens
ggtggcccgatttcg

SEQ ID NO: 359208 - DNA, 15 bp, Homo sapiens
cggtggcccgatttc

SEQ ID NO: 359209 - DNA, 15 bp, Homo sapiens
tcggtggcccgattt

SEQ ID NO: 359210 - DNA, 15 bp, Homo sapiens
gtcggtggcccgatt

SEQ ID NO: 359211 - DNA, 15 bp, Homo sapiens
ggtcggtggcccgat

SEQ ID NO: 359212 - DNA, 15 bp, Homo sapiens
gggtcggtggcccga

SEQ ID NO: 359213 - DNA, 15 bp, Homo sapiens
cgggtcggtggcccg

SEQ ID NO: 359214 - DNA, 15 bp, Homo sapiens
gcgggtcggtggccc

SEQ ID NO: 359215 - DNA, 15 bp, Homo sapiens
agcgggtcggtggcc

SEQ ID NO: 359216 - DNA, 15 bp, Homo sapiens
gagcgggtcggtggc

SEQ ID NO: 359217 - DNA, 15 bp, Homo sapiens
cgagcgggtcggtgg

SEQ ID NO: 359218 - DNA, 15 bp, Homo sapiens
gcgagcgggtcggtg

SEQ ID NO: 359219 - DNA, 15 bp, Homo sapiens
agcgagcgggtcggt

SEQ ID NO: 359220 - DNA, 15 bp, Homo sapiens
gagcgagcgggtcgg

SEQ ID NO: 359221 - DNA, 15 bp, Homo sapiens
tgagcgagcgggtcg

SEQ ID NO: 359222 - DNA, 15 bp, Homo sapiens
ctgagcgagcgggtc

SEQ ID NO: 359223 - DNA, 15 bp, Homo sapiens
gctgagcgagcgggt

SEQ ID NO: 359224 - DNA, 15 bp, Homo sapiens
agctgagcgagcggg

SEQ ID NO: 359225 - DNA, 15 bp, Homo sapiens
gagctgagcgagcgg

SEQ ID NO: 359226 - DNA, 15 bp, Homo sapiens
ggagctgagcgagcg

SEQ ID NO: 359227 - DNA, 15 bp, Homo sapiens
tggagctgagcgagc

SEQ ID NO: 359228 - DNA, 15 bp, Homo sapiens
ttggagctgagcgag

SEQ ID NO: 359229 - DNA, 15 bp, Homo sapiens
tttggagctgagcga

SEQ ID NO: 359230 - DNA, 15 bp, Homo sapiens
ttttggagctgagcg

SEQ ID NO: 359231 - DNA, 15 bp, Homo sapiens
gttttggagctgagc

SEQ ID NO: 359232 - DNA, 15 bp, Homo sapiens
agttttggagctgag

SEQ ID NO: 359233 - DNA, 15 bp, Homo sapiens
gagttttggagctga

SEQ ID NO: 359234 - DNA, 15 bp, Homo sapiens
cgagttttggagctg

SEQ ID NO: 359235 - DNA, 15 bp, Homo sapiens
gcgagttttggagct

SEQ ID NO: 359236 - DNA, 15 bp, Homo sapiens
cgcgagttttggagc

SEQ ID NO: 359237 - DNA, 15 bp, Homo sapiens
ccgcgagttttggag

SEQ ID NO: 359238 - DNA, 15 bp, Homo sapiens
gccgcgagttttgga

SEQ ID NO: 359239 - DNA, 15 bp, Homo sapiens
cgccgcgagttttgg

SEQ ID NO: 359240 - DNA, 15 bp, Homo sapiens
tcgccgcgagttttg

SEQ ID NO: 359241 - DNA, 15 bp, Homo sapiens
ttcgccgcgagtttt

SEQ ID NO: 359242 - DNA, 15 bp, Homo sapiens
cttcgccgcgagttt

SEQ ID NO: 359243 - DNA, 15 bp, Homo sapiens
gcttcgccgcgagtt

SEQ ID NO: 359244 - DNA, 15 bp, Homo sapiens
ggcttcgccgcgagt

SEQ ID NO: 359245 - DNA, 15 bp, Homo sapiens
gggcttcgccgcgag

SEQ ID NO: 359246 - DNA, 15 bp, Homo sapiens
cgggcttcgccgcga

SEQ ID NO: 359247 - DNA, 15 bp, Homo sapiens
gcgggcttcgccgcg

SEQ ID NO: 359248 - DNA, 15 bp, Homo sapiens
agcgggcttcgccgc

SEQ ID NO: 359249 - DNA, 15 bp, Homo sapiens
gagcgggcttcgccg

SEQ ID NO: 359250 - DNA, 15 bp, Homo sapiens
cgagcgggcttcgcc

SEQ ID NO: 359251 - DNA, 15 bp, Homo sapiens
ccgagcgggcttcgc

SEQ ID NO: 359252 - DNA, 15 bp, Homo sapiens
accgagcgggcttcg

SEQ ID NO: 359253 - DNA, 15 bp, Homo sapiens
caccgagcgggcttc

SEQ ID NO: 359254 - DNA, 15 bp, Homo sapiens
gcaccgagcgggctt

SEQ ID NO: 359255 - DNA, 15 bp, Homo sapiens
agcaccgagcgggct

SEQ ID NO: 359256 - DNA, 15 bp, Homo sapiens
gagcaccgagcgggc

SEQ ID NO: 359257 - DNA, 15 bp, Homo sapiens
ggagcaccgagcggg

SEQ ID NO: 359258 - DNA, 15 bp, Homo sapiens
gggagcaccgagcgg

SEQ ID NO: 359259 - DNA, 15 bp, Homo sapiens
agggagcaccgagcg

SEQ ID NO: 359260 - DNA, 15 bp, Homo sapiens
cagggagcaccgagc

SEQ ID NO: 359261 - DNA, 15 bp, Homo sapiens
gcagggagcaccgag

SEQ ID NO: 359262 - DNA, 15 bp, Homo sapiens
agcagggagcaccga

SEQ ID NO: 359263 - DNA, 15 bp, Homo sapiens
aagcagggagcaccg

SEQ ID NO: 359264 - DNA, 15 bp, Homo sapiens
aaagcagggagcacc

SEQ ID NO: 359265 - DNA, 15 bp, Homo sapiens
aaaagcagggagcac

SEQ ID NO: 359266 - DNA, 15 bp, Homo sapiens
gaaaagcagggagca

SEQ ID NO: 359267 - DNA, 15 bp, Homo sapiens
ggaaaagcagggagc

SEQ ID NO: 359268 - DNA, 15 bp, Homo sapiens
tggaaaagcagggag

SEQ ID NO: 359269 - DNA, 15 bp, Homo sapiens
ttggaaaagcaggga

SEQ ID NO: 359270 - DNA, 15 bp, Homo sapiens
attggaaaagcaggg

SEQ ID NO: 359271 - DNA, 15 bp, Homo sapiens
aattggaaaagcagg

SEQ ID NO: 359272 - DNA, 15 bp, Homo sapiens
aaattggaaaagcag

SEQ ID NO: 359273 - DNA, 15 bp, Homo sapiens
gaaattggaaaagca

SEQ ID NO: 359274 - DNA, 15 bp, Homo sapiens
agaaattggaaaagc

SEQ ID NO: 359275 - DNA, 15 bp, Homo sapiens
gagaaattggaaaag

SEQ ID NO: 359276 - DNA, 15 bp, Homo sapiens
ggagaaattggaaaa

SEQ ID NO: 359277 - DNA, 15 bp, Homo sapiens
tggagaaattggaaa

SEQ ID NO: 359278 - DNA, 15 bp, Homo sapiens
atggagaaattggaa

SEQ ID NO: 359279 - DNA, 15 bp, Homo sapiens
catggagaaattgga

SEQ ID NO: 359280 - DNA, 15 bp, Homo sapiens
ccatggagaaattgg

SEQ ID NO: 359281 - DNA, 15 bp, Homo sapiens
gccatggagaaattg

SEQ ID NO: 359282 - DNA, 15 bp, Homo sapiens
agccatggagaaatt

SEQ ID NO: 359283 - DNA, 15 bp, Homo sapiens
gagccatggagaaat

SEQ ID NO: 359284 - DNA, 15 bp, Homo sapiens
ggagccatggagaaa

SEQ ID NO: 359285 - DNA, 15 bp, Homo sapiens
cggagccatggagaa

SEQ ID NO: 359286 - DNA, 15 bp, Homo sapiens
ccggagccatggaga

SEQ ID NO: 359287 - DNA, 15 bp, Homo sapiens
gccggagccatggag

SEQ ID NO: 359288 - DNA, 15 bp, Homo sapiens
ggccggagccatgga

SEQ ID NO: 359289 - DNA, 15 bp, Homo sapiens
cggccggagccatgg

SEQ ID NO: 359290 - DNA, 15 bp, Homo sapiens
ccggccggagccatg

SEQ ID NO: 359291 - DNA, 15 bp, Homo sapiens
cccggccggagccat

SEQ ID NO: 359292 - DNA, 15 bp, Homo sapiens
ccccggccggagcca

SEQ ID NO: 359293 - DNA, 15 bp, Homo sapiens
gccccggccggagcc

SEQ ID NO: 359294 - DNA, 15 bp, Homo sapiens
agccccggccggagc

SEQ ID NO: 359295 - DNA, 15 bp, Homo sapiens
gagccccggccggag

SEQ ID NO: 359296 - DNA, 15 bp, Homo sapiens
tgagccccggccgga

SEQ ID NO: 359297 - DNA, 15 bp, Homo sapiens
ttgagccccggccgg

SEQ ID NO: 359298 - DNA, 15 bp, Homo sapiens
attgagccccggccg

SEQ ID NO: 359299 - DNA, 15 bp, Homo sapiens
gattgagccccggcc

SEQ ID NO: 359300 - DNA, 15 bp, Homo sapiens
ggattgagccccggc

SEQ ID NO: 359301 - DNA, 15 bp, Homo sapiens
tggattgagccccgg

SEQ ID NO: 359302 - DNA, 15 bp, Homo sapiens
atggattgagccccg

SEQ ID NO: 359303 - DNA, 15 bp, Homo sapiens
aatggattgagcccc

SEQ ID NO: 359304 - DNA, 15 bp, Homo sapiens
gaatggattgagccc

SEQ ID NO: 359305 - DNA, 15 bp, Homo sapiens
agaatggattgagcc

SEQ ID NO: 359306 - DNA, 15 bp, Homo sapiens
cagaatggattgagc

SEQ ID NO: 359307 - DNA, 15 bp, Homo sapiens
ccagaatggattgag

SEQ ID NO: 359308 - DNA, 15 bp, Homo sapiens
cccagaatggattga

SEQ ID NO: 359309 - DNA, 15 bp, Homo sapiens
tcccagaatggattg

SEQ ID NO: 359310 - DNA, 15 bp, Homo sapiens
ctcccagaatggatt

SEQ ID NO: 359311 - DNA, 15 bp, Homo sapiens
gctcccagaatggat

SEQ ID NO: 359312 - DNA, 15 bp, Homo sapiens
agctcccagaatgga

SEQ ID NO: 359313 - DNA, 15 bp, Homo sapiens
aagctcccagaatgg

SEQ ID NO: 359314 - DNA, 15 bp, Homo sapiens
gaagctcccagaatg

SEQ ID NO: 359315 - DNA, 15 bp, Homo sapiens
agaagctcccagaat

SEQ ID NO: 359316 - DNA, 15 bp, Homo sapiens
gagaagctcccagaa

SEQ ID NO: 359317 - DNA, 15 bp, Homo sapiens
agagaagctcccaga

SEQ ID NO: 359318 - DNA, 15 bp, Homo sapiens
cagagaagctcccag

SEQ ID NO: 359319 - DNA, 15 bp, Homo sapiens
gcagagaagctccca

SEQ ID NO: 359320 - DNA, 15 bp, Homo sapiens
ggcagagaagctccc

SEQ ID NO: 359321 - DNA, 15 bp, Homo sapiens
gggcagagaagctcc

SEQ ID NO: 359322 - DNA, 15 bp, Homo sapiens
ggggcagagaagctc

SEQ ID NO: 359323 - DNA, 15 bp, Homo sapiens
gggggcagagaagct

SEQ ID NO: 359324 - DNA, 15 bp, Homo sapiens
ggggggcagagaagc

SEQ ID NO: 359325 - DNA, 15 bp, Homo sapiens
tggggggcagagaag

SEQ ID NO: 359326 - DNA, 15 bp, Homo sapiens
gtggggggcagagaa

SEQ ID NO: 359327 - DNA, 15 bp, Homo sapiens
ggtggggggcagaga

SEQ ID NO: 359328 - DNA, 15 bp, Homo sapiens
aggtggggggcagag

SEQ ID NO: 359329 - DNA, 15 bp, Homo sapiens
taggtggggggcaga

SEQ ID NO: 359330 - DNA, 15 bp, Homo sapiens
ataggtggggggcag

SEQ ID NO: 359331 - DNA, 15 bp, Homo sapiens
gataggtggggggca

SEQ ID NO: 359332 - DNA, 15 bp, Homo sapiens
agataggtggggggc

SEQ ID NO: 359333 - DNA, 15 bp, Homo sapiens
gagataggtgggggg

SEQ ID NO: 359334 - DNA, 15 bp, Homo sapiens
agagataggtggggg

SEQ ID NO: 359335 - DNA, 15 bp, Homo sapiens
gagagataggtgggg

SEQ ID NO: 359336 - DNA, 15 bp, Homo sapiens
agagagataggtggg

SEQ ID NO: 359337 - DNA, 15 bp, Homo sapiens
gagagagataggtgg

SEQ ID NO: 359338 - DNA, 15 bp, Homo sapiens
ggagagagataggtg

SEQ ID NO: 359339 - DNA, 15 bp, Homo sapiens
gggagagagataggt

SEQ ID NO: 359340 - DNA, 15 bp, Homo sapiens
ggggagagagatagg

SEQ ID NO: 359341 - DNA, 15 bp, Homo sapiens
aggggagagagatag

SEQ ID NO: 359342 - DNA, 15 bp, Homo sapiens
gaggggagagagata

SEQ ID NO: 359343 - DNA, 15 bp, Homo sapiens
ggaggggagagagat

SEQ ID NO: 359344 - DNA, 15 bp, Homo sapiens
tggaggggagagaga

SEQ ID NO: 359345 - DNA, 15 bp, Homo sapiens
atggaggggagagag

SEQ ID NO: 359346 - DNA, 15 bp, Homo sapiens
gatggaggggagaga

SEQ ID NO: 359347 - DNA, 15 bp, Homo sapiens
cgatggaggggagag

SEQ ID NO: 359348 - DNA, 15 bp, Homo sapiens
ccgatggaggggaga

SEQ ID NO: 359349 - DNA, 15 bp, Homo sapiens
accgatggaggggag

SEQ ID NO: 359350 - DNA, 15 bp, Homo sapiens
taccgatggagggga

SEQ ID NO: 359351 - DNA, 15 bp, Homo sapiens
gtaccgatggagggg

SEQ ID NO: 359352 - DNA, 15 bp, Homo sapiens
ggtaccgatggaggg

SEQ ID NO: 359353 - DNA, 15 bp, Homo sapiens
gggtaccgatggagg

SEQ ID NO: 359354 - DNA, 15 bp, Homo sapiens
ggggtaccgatggag

SEQ ID NO: 359355 - DNA, 15 bp, Homo sapiens
gggggtaccgatgga

SEQ ID NO: 359356 - DNA, 15 bp, Homo sapiens
agggggtaccgatgg

SEQ ID NO: 359357 - DNA, 15 bp, Homo sapiens
gagggggtaccgatg

SEQ ID NO: 359358 - DNA, 15 bp, Homo sapiens
agagggggtaccgat

SEQ ID NO: 359359 - DNA, 15 bp, Homo sapiens
tagagggggtaccga

SEQ ID NO: 359360 - DNA, 15 bp, Homo sapiens
gtagagggggtaccg

SEQ ID NO: 359361 - DNA, 15 bp, Homo sapiens
tgtagagggggtacc

SEQ ID NO: 359362 - DNA, 15 bp, Homo sapiens
ctgtagagggggtac

SEQ ID NO: 359363 - DNA, 15 bp, Homo sapiens
tctgtagagggggta

SEQ ID NO: 359364 - DNA, 15 bp, Homo sapiens
gtctgtagagggggt

SEQ ID NO: 359365 - DNA, 15 bp, Homo sapiens
ggtctgtagaggggg

SEQ ID NO: 359366 - DNA, 15 bp, Homo sapiens
gggtctgtagagggg

SEQ ID NO: 359367 - DNA, 15 bp, Homo sapiens
cgggtctgtagaggg

SEQ ID NO: 359368 - DNA, 15 bp, Homo sapiens
ccgggtctgtagagg

SEQ ID NO: 359369 - DNA, 15 bp, Homo sapiens
cccgggtctgtagag

SEQ ID NO: 359370 - DNA, 15 bp, Homo sapiens
tcccgggtctgtaga

SEQ ID NO: 359371 - DNA, 15 bp, Homo sapiens
ctcccgggtctgtag

SEQ ID NO: 359372 - DNA, 15 bp, Homo sapiens
cctcccgggtctgta

SEQ ID NO: 359373 - DNA, 15 bp, Homo sapiens
ccctcccgggtctgt

SEQ ID NO: 359374 - DNA, 15 bp, Homo sapiens
cccctcccgggtctg

SEQ ID NO: 359375 - DNA, 15 bp, Homo sapiens
ccccctcccgggtct

SEQ ID NO: 359376 - DNA, 15 bp, Homo sapiens
accccctcccgggtc

SEQ ID NO: 359377 - DNA, 15 bp, Homo sapiens
caccccctcccgggt

SEQ ID NO: 359378 - DNA, 15 bp, Homo sapiens
ccaccccctcccggg

SEQ ID NO: 359379 - DNA, 15 bp, Homo sapiens
gccaccccctcccgg

SEQ ID NO: 359380 - DNA, 15 bp, Homo sapiens
cgccaccccctcccg

SEQ ID NO: 359381 - DNA, 15 bp, Homo sapiens
ccgccaccccctccc

SEQ ID NO: 359382 - DNA, 15 bp, Homo sapiens
accgccaccccctcc

SEQ ID NO: 359383 - DNA, 15 bp, Homo sapiens
caccgccaccccctc

SEQ ID NO: 359384 - DNA, 15 bp, Homo sapiens
ccaccgccaccccct

SEQ ID NO: 359385 - DNA, 15 bp, Homo sapiens
gccaccgccaccccc

SEQ ID NO: 359386 - DNA, 15 bp, Homo sapiens
cgccaccgccacccc

SEQ ID NO: 359387 - DNA, 15 bp, Homo sapiens
ccgccaccgccaccc

SEQ ID NO: 359388 - DNA, 15 bp, Homo sapiens
cccgccaccgccacc

SEQ ID NO: 359389 - DNA, 15 bp, Homo sapiens
ccccgccaccgccac

SEQ ID NO: 359390 - DNA, 15 bp, Homo sapiens
cccccgccaccgcca

SEQ ID NO: 359391 - DNA, 15 bp, Homo sapiens
ccccccgccaccgcc

SEQ ID NO: 359392 - DNA, 15 bp, Homo sapiens
accccccgccaccgc

SEQ ID NO: 359393 - DNA, 15 bp, Homo sapiens
aaccccccgccaccg

SEQ ID NO: 359394 - DNA, 15 bp, Homo sapiens
caaccccccgccacc

SEQ ID NO: 359395 - DNA, 15 bp, Homo sapiens
ccaaccccccgccac

SEQ ID NO: 359396 - DNA, 15 bp, Homo sapiens
cccaaccccccgcca

SEQ ID NO: 359397 - DNA, 15 bp, Homo sapiens
ccccaaccccccgcc

SEQ ID NO: 359398 - DNA, 15 bp, Homo sapiens
cccccaaccccccgc

SEQ ID NO: 359399 - DNA, 15 bp, Homo sapiens
ccccccaaccccccg

SEQ ID NO: 359400 - DNA, 15 bp, Homo sapiens
tccccccaacccccc

SEQ ID NO: 359401 - DNA, 15 bp, Homo sapiens
ctccccccaaccccc

SEQ ID NO: 359402 - DNA, 15 bp, Homo sapiens
tctccccccaacccc

SEQ ID NO: 359403 - DNA, 15 bp, Homo sapiens
ttctccccccaaccc

SEQ ID NO: 359404 - DNA, 15 bp, Homo sapiens
tttctccccccaacc

SEQ ID NO: 359405 - DNA, 15 bp, Homo sapiens
atttctccccccaac

SEQ ID NO: 359406 - DNA, 15 bp, Homo sapiens
tatttctccccccaa

SEQ ID NO: 359407 - DNA, 15 bp, Homo sapiens
ctatttctcccccca

SEQ ID NO: 359408 - DNA, 15 bp, Homo sapiens
gctatttctcccccc

SEQ ID NO: 359409 - DNA, 15 bp, Homo sapiens
agctatttctccccc

SEQ ID NO: 359410 - DNA, 15 bp, Homo sapiens
aagctatttctcccc

SEQ ID NO: 359411 - DNA, 15 bp, Homo sapiens
aaagctatttctccc

SEQ ID NO: 359412 - DNA, 15 bp, Homo sapiens
aaaagctatttctcc

SEQ ID NO: 359413 - DNA, 15 bp, Homo sapiens
taaaagctatttctc

SEQ ID NO: 359414 - DNA, 15 bp, Homo sapiens
ctaaaagctatttct

SEQ ID NO: 359415 - DNA, 15 bp, Homo sapiens
tctaaaagctatttc

SEQ ID NO: 359416 - DNA, 15 bp, Homo sapiens
ttctaaaagctattt

SEQ ID NO: 359417 - DNA, 15 bp, Homo sapiens
tttctaaaagctatt

SEQ ID NO: 359418 - DNA, 15 bp, Homo sapiens
gtttctaaaagctat

SEQ ID NO: 359419 - DNA, 15 bp, Homo sapiens
ggtttctaaaagcta

SEQ ID NO: 359420 - DNA, 15 bp, Homo sapiens
gggtttctaaaagct

SEQ ID NO: 359421 - DNA, 15 bp, Homo sapiens
cgggtttctaaaagc

SEQ ID NO: 359422 - DNA, 15 bp, Homo sapiens
tcgggtttctaaaag

SEQ ID NO: 359423 - DNA, 15 bp, Homo sapiens
atcgggtttctaaaa

SEQ ID NO: 359424 - DNA, 15 bp, Homo sapiens
gatcgggtttctaaa

SEQ ID NO: 359425 - DNA, 15 bp, Homo sapiens
agatcgggtttctaa

SEQ ID NO: 359426 - DNA, 15 bp, Homo sapiens
cagatcgggtttcta

SEQ ID NO: 359427 - DNA, 15 bp, Homo sapiens
acagatcgggtttct

SEQ ID NO: 359428 - DNA, 15 bp, Homo sapiens
aacagatcgggtttc

SEQ ID NO: 359429 - DNA, 15 bp, Homo sapiens
caacagatcgggttt

SEQ ID NO: 359430 - DNA, 15 bp, Homo sapiens
acaacagatcgggtt

SEQ ID NO: 359431 - DNA, 15 bp, Homo sapiens
aacaacagatcgggt

SEQ ID NO: 359432 - DNA, 15 bp, Homo sapiens
aaacaacagatcggg

SEQ ID NO: 359433 - DNA, 15 bp, Homo sapiens
caaacaacagatcgg

SEQ ID NO: 359434 - DNA, 15 bp, Homo sapiens
gcaaacaacagatcg

SEQ ID NO: 359435 - DNA, 15 bp, Homo sapiens
cgcaaacaacagatc

SEQ ID NO: 359436 - DNA, 15 bp, Homo sapiens
tcgcaaacaacagat

SEQ ID NO: 359437 - DNA, 15 bp, Homo sapiens
ttcgcaaacaacaga

SEQ ID NO: 359438 - DNA, 15 bp, Homo sapiens
tttcgcaaacaacag

SEQ ID NO: 359439 - DNA, 15 bp, Homo sapiens
gtttcgcaaacaaca

SEQ ID NO: 359440 - DNA, 15 bp, Homo sapiens
tgtttcgcaaacaac

SEQ ID NO: 359441 - DNA, 15 bp, Homo sapiens
gtgtttcgcaaacaa

SEQ ID NO: 359442 - DNA, 15 bp, Homo sapiens
tgtgtttcgcaaaca

SEQ ID NO: 359443 - DNA, 15 bp, Homo sapiens
ttgtgtttcgcaaac

SEQ ID NO: 359444 - DNA, 15 bp, Homo sapiens
attgtgtttcgcaaa

SEQ ID NO: 359445 - DNA, 15 bp, Homo sapiens
gattgtgtttcgcaa

SEQ ID NO: 359446 - DNA, 15 bp, Homo sapiens
cgattgtgtttcgca

SEQ ID NO: 359447 - DNA, 15 bp, Homo sapiens
gcgattgtgtttcgc

SEQ ID NO: 359448 - DNA, 15 bp, Homo sapiens
agcgattgtgtttcg

SEQ ID NO: 359449 - DNA, 15 bp, Homo sapiens
aagcgattgtgtttc

SEQ ID NO: 359450 - DNA, 15 bp, Homo sapiens
aaagcgattgtgttt

SEQ ID NO: 359451 - DNA, 15 bp, Homo sapiens
aaaagcgattgtgtt

SEQ ID NO: 359452 - DNA, 15 bp, Homo sapiens
aaaaagcgattgtgt

SEQ ID NO: 359453 - DNA, 15 bp, Homo sapiens
aaaaaagcgattgtg

SEQ ID NO: 359454 - DNA, 15 bp, Homo sapiens
aaaaaaagcgattgt

SEQ ID NO: 359455 - DNA, 15 bp, Homo sapiens
aaaaaaaagcgattg

SEQ ID NO: 359456 - DNA, 15 bp, Homo sapiens
aaaaaaaaagcgatt

SEQ ID NO: 359457 - DNA, 15 bp, Homo sapiens
aaaaaaaaaagcgat

SEQ ID NO: 359458 - DNA, 15 bp, Homo sapiens
aaaaaaaaaaagcga

SEQ ID NO: 359459 - DNA, 15 bp, Homo sapiens
aaaaaaaaaaaagcg

SEQ ID NO: 359460 - DNA, 15 bp, Homo sapiens
aaaaaaaaaaaaagc

SEQ ID NO: 359461 - DNA, 15 bp, Homo sapiens
taaaaaaaaaaaaaa

SEQ ID NO: 359462 - DNA, 15 bp, Homo sapiens
ttaaaaaaaaaaaaa

SEQ ID NO: 359463 - DNA, 15 bp, Homo sapiens
tttaaaaaaaaaaaa

SEQ ID NO: 359464 - DNA, 15 bp, Homo sapiens
ctttaaaaaaaaaaa

SEQ ID NO: 359465 - DNA, 15 bp, Homo sapiens
gctttaaaaaaaaaa

SEQ ID NO: 359466 - DNA, 15 bp, Homo sapiens
cgctttaaaaaaaaa

SEQ ID NO: 359467 - DNA, 15 bp, Homo sapiens
tcgctttaaaaaaaa

SEQ ID NO: 359468 - DNA, 15 bp, Homo sapiens
gtcgctttaaaaaaa

SEQ ID NO: 359469 - DNA, 15 bp, Homo sapiens
tgtcgctttaaaaaa

SEQ ID NO: 359470 - DNA, 15 bp, Homo sapiens
ctgtcgctttaaaaa

SEQ ID NO: 359471 - DNA, 15 bp, Homo sapiens
cctgtcgctttaaaa

SEQ ID NO: 359472 - DNA, 15 bp, Homo sapiens
ccctgtcgctttaaa

SEQ ID NO: 359473 - DNA, 15 bp, Homo sapiens
accctgtcgctttaa

SEQ ID NO: 359474 - DNA, 15 bp, Homo sapiens
caccctgtcgcttta

SEQ ID NO: 359475 - DNA, 15 bp, Homo sapiens
acaccctgtcgcttt

SEQ ID NO: 359476 - DNA, 15 bp, Homo sapiens
gacaccctgtcgctt

SEQ ID NO: 359477 - DNA, 15 bp, Homo sapiens
agacaccctgtcgct

SEQ ID NO: 359478 - DNA, 15 bp, Homo sapiens
tagacaccctgtcgc

SEQ ID NO: 359479 - DNA, 15 bp, Homo sapiens
ctagacaccctgtcg

SEQ ID NO: 359480 - DNA, 15 bp, Homo sapiens
tctagacaccctgtc

SEQ ID NO: 359481 - DNA, 15 bp, Homo sapiens
gtctagacaccctgt

SEQ ID NO: 359482 - DNA, 15 bp, Homo sapiens
cgtctagacaccctg

SEQ ID NO: 359483 - DNA, 15 bp, Homo sapiens
ccgtctagacaccct

SEQ ID NO: 359484 - DNA, 15 bp, Homo sapiens
gccgtctagacaccc

SEQ ID NO: 359485 - DNA, 15 bp, Homo sapiens
ggccgtctagacacc

SEQ ID NO: 359486 - DNA, 15 bp, Homo sapiens
tggccgtctagacac

SEQ ID NO: 359487 - DNA, 15 bp, Homo sapiens
gtggccgtctagaca

SEQ ID NO: 359488 - DNA, 15 bp, Homo sapiens
cgtggccgtctagac

SEQ ID NO: 359489 - DNA, 15 bp, Homo sapiens
acgtggccgtctaga

SEQ ID NO: 359490 - DNA, 15 bp, Homo sapiens
cacgtggccgtctag

SEQ ID NO: 359491 - DNA, 15 bp, Homo sapiens
tcacgtggccgtcta

SEQ ID NO: 359492 - DNA, 15 bp, Homo sapiens
gtcacgtggccgtct

SEQ ID NO: 359493 - DNA, 15 bp, Homo sapiens
cgtcacgtggccgtc

SEQ ID NO: 359494 - DNA, 15 bp, Homo sapiens
tcgtcacgtggccgt

SEQ ID NO: 359495 - DNA, 15 bp, Homo sapiens
ctcgtcacgtggccg

SEQ ID NO: 359496 - DNA, 15 bp, Homo sapiens
cctcgtcacgtggcc

SEQ ID NO: 359497 - DNA, 15 bp, Homo sapiens
gcctcgtcacgtggc

SEQ ID NO: 359498 - DNA, 15 bp, Homo sapiens
ggcctcgtcacgtgg

SEQ ID NO: 359499 - DNA, 15 bp, Homo sapiens
cggcctcgtcacgtg

SEQ ID NO: 359500 - DNA, 15 bp, Homo sapiens
ccggcctcgtcacgt

SEQ ID NO: 359501 - DNA, 15 bp, Homo sapiens
tccggcctcgtcacg

SEQ ID NO: 359502 - DNA, 15 bp, Homo sapiens
ctccggcctcgtcac

SEQ ID NO: 359503 - DNA, 15 bp, Homo sapiens
gctccggcctcgtca

SEQ ID NO: 359504 - DNA, 15 bp, Homo sapiens
ggctccggcctcgtc

SEQ ID NO: 359505 - DNA, 15 bp, Homo sapiens
cggctccggcctcgt

SEQ ID NO: 359506 - DNA, 15 bp, Homo sapiens
ccggctccggcctcg

SEQ ID NO: 359507 - DNA, 15 bp, Homo sapiens
cccggctccggcctc

SEQ ID NO: 359508 - DNA, 15 bp, Homo sapiens
gcccggctccggcct

SEQ ID NO: 359509 - DNA, 15 bp, Homo sapiens
cgcccggctccggcc

SEQ ID NO: 359510 - DNA, 15 bp, Homo sapiens
gcgcccggctccggc

SEQ ID NO: 359511 - DNA, 15 bp, Homo sapiens
cgcgcccggctccgg

SEQ ID NO: 359512 - DNA, 15 bp, Homo sapiens
gcgcgcccggctccg

SEQ ID NO: 359513 - DNA, 15 bp, Homo sapiens
ggcgcgcccggctcc

SEQ ID NO: 359514 - DNA, 15 bp, Homo sapiens
tggcgcgcccggctc

SEQ ID NO: 359515 - DNA, 15 bp, Homo sapiens
gtggcgcgcccggct

SEQ ID NO: 359516 - DNA, 15 bp, Homo sapiens
agtggcgcgcccggc

SEQ ID NO: 359517 - DNA, 15 bp, Homo sapiens
cagtggcgcgcccgg

SEQ ID NO: 359518 - DNA, 15 bp, Homo sapiens
gcagtggcgcgcccg

SEQ ID NO: 359519 - DNA, 15 bp, Homo sapiens
cgcagtggcgcgccc

SEQ ID NO: 359520 - DNA, 15 bp, Homo sapiens
gcgcagtggcgcgcc

SEQ ID NO: 359521 - DNA, 15 bp, Homo sapiens
tgcgcagtggcgcgc

SEQ ID NO: 359522 - DNA, 15 bp, Homo sapiens
ctgcgcagtggcgcg

SEQ ID NO: 359523 - DNA, 15 bp, Homo sapiens
actgcgcagtggcgc

SEQ ID NO: 359524 - DNA, 15 bp, Homo sapiens
cactgcgcagtggcg

SEQ ID NO: 359525 - DNA, 15 bp, Homo sapiens
ccactgcgcagtggc

SEQ ID NO: 359526 - DNA, 15 bp, Homo sapiens
tccactgcgcagtgg

SEQ ID NO: 359527 - DNA, 15 bp, Homo sapiens
ttccactgcgcagtg

SEQ ID NO: 359528 - DNA, 15 bp, Homo sapiens
gttccactgcgcagt

SEQ ID NO: 359529 - DNA, 15 bp, Homo sapiens
ggttccactgcgcag

SEQ ID NO: 359530 - DNA, 15 bp, Homo sapiens
tggttccactgcgca

SEQ ID NO: 359531 - DNA, 15 bp, Homo sapiens
ctggttccactgcgc

SEQ ID NO: 359532 - DNA, 15 bp, Homo sapiens
gctggttccactgcg

SEQ ID NO: 359533 - DNA, 15 bp, Homo sapiens
ggctggttccactgc

SEQ ID NO: 359534 - DNA, 15 bp, Homo sapiens
cggctggttccactg

SEQ ID NO: 359535 - DNA, 15 bp, Homo sapiens
tcggctggttccact

SEQ ID NO: 359536 - DNA, 15 bp, Homo sapiens
ctcggctggttccac

SEQ ID NO: 359537 - DNA, 15 bp, Homo sapiens
gctcggctggttcca

SEQ ID NO: 359538 - DNA, 15 bp, Homo sapiens
tgctcggctggttcc

SEQ ID NO: 359539 - DNA, 15 bp, Homo sapiens
ctgctcggctggttc

SEQ ID NO: 359540 - DNA, 15 bp, Homo sapiens
tctgctcggctggtt

SEQ ID NO: 359541 - DNA, 15 bp, Homo sapiens
ctctgctcggctggt

SEQ ID NO: 359542 - DNA, 15 bp, Homo sapiens
cctctgctcggctgg

SEQ ID NO: 359543 - DNA, 15 bp, Homo sapiens
ccctctgctcggctg

SEQ ID NO: 359544 - DNA, 15 bp, Homo sapiens
gccctctgctcggct

SEQ ID NO: 359545 - DNA, 15 bp, Homo sapiens
ggccctctgctcggc

SEQ ID NO: 359546 - DNA, 15 bp, Homo sapiens
cggccctctgctcgg

SEQ ID NO: 359547 - DNA, 15 bp, Homo sapiens
ccggccctctgctcg

SEQ ID NO: 359548 - DNA, 15 bp, Homo sapiens
tccggccctctgctc

SEQ ID NO: 359549 - DNA, 15 bp, Homo sapiens
ctccggccctctgct

SEQ ID NO: 359550 - DNA, 15 bp, Homo sapiens
cctccggccctctgc

SEQ ID NO: 359551 - DNA, 15 bp, Homo sapiens
ccctccggccctctg

SEQ ID NO: 359552 - DNA, 15 bp, Homo sapiens
cccctccggccctct

SEQ ID NO: 359553 - DNA, 15 bp, Homo sapiens
ccccctccggccctc

SEQ ID NO: 359554 - DNA, 15 bp, Homo sapiens
cccccctccggccct

SEQ ID NO: 359555 - DNA, 15 bp, Homo sapiens
ccccccctccggccc

SEQ ID NO: 359556 - DNA, 15 bp, Homo sapiens
accccccctccggcc

SEQ ID NO: 359557 - DNA, 15 bp, Homo sapiens
caccccccctccggc

SEQ ID NO: 359558 - DNA, 15 bp, Homo sapiens
gcaccccccctccgg

SEQ ID NO: 359559 - DNA, 15 bp, Homo sapiens
cgcaccccccctccg

SEQ ID NO: 359560 - DNA, 15 bp, Homo sapiens
ccgcaccccccctcc

SEQ ID NO: 359561 - DNA, 15 bp, Homo sapiens
cccgcaccccccctc

SEQ ID NO: 359562 - DNA, 15 bp, Homo sapiens
ccccgcaccccccct

SEQ ID NO: 359563 - DNA, 15 bp, Homo sapiens
cccccgcaccccccc

SEQ ID NO: 359564 - DNA, 15 bp, Homo sapiens
ccccccgcacccccc

SEQ ID NO: 359565 - DNA, 15 bp, Homo sapiens
cccccccgcaccccc

SEQ ID NO: 359566 - DNA, 15 bp, Homo sapiens
gcccccccgcacccc

SEQ ID NO: 359567 - DNA, 15 bp, Homo sapiens
cgcccccccgcaccc

SEQ ID NO: 359568 - DNA, 15 bp, Homo sapiens
ccgcccccccgcacc

SEQ ID NO: 359569 - DNA, 15 bp, Homo sapiens
cccgcccccccgcac

SEQ ID NO: 359570 - DNA, 15 bp, Homo sapiens
ccccgcccccccgca

SEQ ID NO: 359571 - DNA, 15 bp, Homo sapiens
tccccgcccccccgc

SEQ ID NO: 359572 - DNA, 15 bp, Homo sapiens
ctccccgcccccccg

SEQ ID NO: 359573 - DNA, 15 bp, Homo sapiens
cctccccgccccccc

SEQ ID NO: 359574 - DNA, 15 bp, Homo sapiens
tcctccccgcccccc

SEQ ID NO: 359575 - DNA, 15 bp, Homo sapiens
ctcctccccgccccc

SEQ ID NO: 359576 - DNA, 15 bp, Homo sapiens
cctcctccccgcccc

SEQ ID NO: 359577 - DNA, 15 bp, Homo sapiens
gcctcctccccgccc

SEQ ID NO: 359578 - DNA, 15 bp, Homo sapiens
cgcctcctccccgcc

SEQ ID NO: 359579 - DNA, 15 bp, Homo sapiens
ccgcctcctccccgc

SEQ ID NO: 359580 - DNA, 15 bp, Homo sapiens
gccgcctcctccccg

SEQ ID NO: 359581 - DNA, 15 bp, Homo sapiens
cgccgcctcctcccc

SEQ ID NO: 359582 - DNA, 15 bp, Homo sapiens
gcgccgcctcctccc

SEQ ID NO: 359583 - DNA, 15 bp, Homo sapiens
cgcgccgcctcctcc

SEQ ID NO: 359584 - DNA, 15 bp, Homo sapiens
ccgcgccgcctcctc

SEQ ID NO: 359585 - DNA, 15 bp, Homo sapiens
gccgcgccgcctcct

SEQ ID NO: 359586 - DNA, 15 bp, Homo sapiens
agccgcgccgcctcc

SEQ ID NO: 359587 - DNA, 15 bp, Homo sapiens
cagccgcgccgcctc

SEQ ID NO: 359588 - DNA, 15 bp, Homo sapiens
gcagccgcgccgcct

SEQ ID NO: 359589 - DNA, 15 bp, Homo sapiens
cgcagccgcgccgcc

SEQ ID NO: 359590 - DNA, 15 bp, Homo sapiens
ccgcagccgcgccgc

SEQ ID NO: 359591 - DNA, 15 bp, Homo sapiens
gccgcagccgcgccg

SEQ ID NO: 359592 - DNA, 15 bp, Homo sapiens
cgccgcagccgcgcc

SEQ ID NO: 359593 - DNA, 15 bp, Homo sapiens
ccgccgcagccgcgc

SEQ ID NO: 359594 - DNA, 15 bp, Homo sapiens
gccgccgcagccgcg

SEQ ID NO: 359595 - DNA, 15 bp, Homo sapiens
agccgccgcagccgc

SEQ ID NO: 359596 - DNA, 15 bp, Homo sapiens
cagccgccgcagccg

SEQ ID NO: 359597 - DNA, 15 bp, Homo sapiens
ccagccgccgcagcc

SEQ ID NO: 359598 - DNA, 15 bp, Homo sapiens
cccagccgccgcagc

SEQ ID NO: 359599 - DNA, 15 bp, Homo sapiens
ccccagccgccgcag

SEQ ID NO: 359600 - DNA, 15 bp, Homo sapiens
cccccagccgccgca

SEQ ID NO: 359601 - DNA, 15 bp, Homo sapiens
gcccccagccgccgc

SEQ ID NO: 359602 - DNA, 15 bp, Homo sapiens
cgcccccagccgccg

SEQ ID NO: 359603 - DNA, 15 bp, Homo sapiens
ccgcccccagccgcc

SEQ ID NO: 359604 - DNA, 15 bp, Homo sapiens
cccgcccccagccgc

SEQ ID NO: 359605 - DNA, 15 bp, Homo sapiens
ccccgcccccagccg

SEQ ID NO: 359606 - DNA, 15 bp, Homo sapiens
cccccgcccccagcc

SEQ ID NO: 359607 - DNA, 15 bp, Homo sapiens
tcccccgcccccagc

SEQ ID NO: 359608 - DNA, 15 bp, Homo sapiens
ctcccccgcccccag

SEQ ID NO: 359609 - DNA, 15 bp, Homo sapiens
cctcccccgccccca

SEQ ID NO: 359610 - DNA, 15 bp, Homo sapiens
ccctcccccgccccc

SEQ ID NO: 359611 - DNA, 15 bp, Homo sapiens
tccctcccccgcccc

SEQ ID NO: 359612 - DNA, 15 bp, Homo sapiens
ttccctcccccgccc

SEQ ID NO: 359613 - DNA, 15 bp, Homo sapiens
cttccctcccccgcc

SEQ ID NO: 359614 - DNA, 15 bp, Homo sapiens
ccttccctcccccgc

SEQ ID NO: 359615 - DNA, 15 bp, Homo sapiens
cccttccctcccccg

SEQ ID NO: 359616 - DNA, 15 bp, Homo sapiens
ccccttccctccccc

SEQ ID NO: 359617 - DNA, 15 bp, Homo sapiens
cccccttccctcccc

SEQ ID NO: 359618 - DNA, 15 bp, Homo sapiens
tcccccttccctccc

SEQ ID NO: 359619 - DNA, 15 bp, Homo sapiens
ctcccccttccctcc

SEQ ID NO: 359620 - DNA, 15 bp, Homo sapiens
cctcccccttccctc

SEQ ID NO: 359621 - DNA, 15 bp, Homo sapiens
tcctcccccttccct

SEQ ID NO: 359622 - DNA, 15 bp, Homo sapiens
ttcctcccccttccc

SEQ ID NO: 359623 - DNA, 15 bp, Homo sapiens
cttcctcccccttcc

SEQ ID NO: 359624 - DNA, 15 bp, Homo sapiens
ccttcctcccccttc

SEQ ID NO: 359625 - DNA, 15 bp, Homo sapiens
cccttcctccccctt

SEQ ID NO: 359626 - DNA, 15 bp, Homo sapiens
ccccttcctccccct

SEQ ID NO: 359627 - DNA, 15 bp, Homo sapiens
cccccttcctccccc

SEQ ID NO: 359628 - DNA, 15 bp, Homo sapiens
tcccccttcctcccc

SEQ ID NO: 359629 - DNA, 15 bp, Homo sapiens
ctcccccttcctccc

SEQ ID NO: 359630 - DNA, 15 bp, Homo sapiens
cctcccccttcctcc

SEQ ID NO: 359631 - DNA, 15 bp, Homo sapiens
ccctcccccttcctc

SEQ ID NO: 359632 - DNA, 15 bp, Homo sapiens
tccctcccccttcct

SEQ ID NO: 359633 - DNA, 15 bp, Homo sapiens
ttccctcccccttcc

SEQ ID NO: 359634 - DNA, 15 bp, Homo sapiens
cttccctcccccttc

SEQ ID NO: 359635 - DNA, 15 bp, Homo sapiens
ccttccctccccctt

SEQ ID NO: 359636 - DNA, 15 bp, Homo sapiens
cccttccctccccct

SEQ ID NO: 359637 - DNA, 15 bp, Homo sapiens
gcccccttccctccc

SEQ ID NO: 359638 - DNA, 15 bp, Homo sapiens
cgcccccttccctcc

SEQ ID NO: 359639 - DNA, 15 bp, Homo sapiens
ccgcccccttccctc

SEQ ID NO: 359640 - DNA, 15 bp, Homo sapiens
cccgcccccttccct

SEQ ID NO: 359641 - DNA, 15 bp, Homo sapiens
ccccgcccccttccc

SEQ ID NO: 359642 - DNA, 15 bp, Homo sapiens
cccccgcccccttcc

SEQ ID NO: 359643 - DNA, 15 bp, Homo sapiens
gcccccgcccccttc

SEQ ID NO: 359644 - DNA, 15 bp, Homo sapiens
cgcccccgccccctt

SEQ ID NO: 359645 - DNA, 15 bp, Homo sapiens
ccgcccccgccccct

SEQ ID NO: 359646 - DNA, 15 bp, Homo sapiens
cccgcccccgccccc

SEQ ID NO: 359647 - DNA, 15 bp, Homo sapiens
tcccgcccccgcccc

SEQ ID NO: 359648 - DNA, 15 bp, Homo sapiens
ctcccgcccccgccc

SEQ ID NO: 359649 - DNA, 15 bp, Homo sapiens
cctcccgcccccgcc

SEQ ID NO: 359650 - DNA, 15 bp, Homo sapiens
gcctcccgcccccgc

SEQ ID NO: 359651 - DNA, 15 bp, Homo sapiens
ggcctcccgcccccg

SEQ ID NO: 359652 - DNA, 15 bp, Homo sapiens
aggcctcccgccccc

SEQ ID NO: 359653 - DNA, 15 bp, Homo sapiens
aaggcctcccgcccc

SEQ ID NO: 359654 - DNA, 15 bp, Homo sapiens
caaggcctcccgccc

SEQ ID NO: 359655 - DNA, 15 bp, Homo sapiens
gcaaggcctcccgcc

SEQ ID NO: 359656 - DNA, 15 bp, Homo sapiens
cgcaaggcctcccgc

SEQ ID NO: 359657 - DNA, 15 bp, Homo sapiens
ccgcaaggcctcccg

SEQ ID NO: 359658 - DNA, 15 bp, Homo sapiens
cccgcaaggcctccc

SEQ ID NO: 359659 - DNA, 15 bp, Homo sapiens
tcccgcaaggcctcc

SEQ ID NO: 359660 - DNA, 15 bp, Homo sapiens
ctcccgcaaggcctc

SEQ ID NO: 359661 - DNA, 15 bp, Homo sapiens
cctcccgcaaggcct

SEQ ID NO: 359662 - DNA, 15 bp, Homo sapiens
gcctcccgcaaggcc

SEQ ID NO: 359663 - DNA, 15 bp, Homo sapiens
cgcctcccgcaaggc

SEQ ID NO: 359664 - DNA, 15 bp, Homo sapiens
ccgcctcccgcaagg

SEQ ID NO: 359665 - DNA, 15 bp, Homo sapiens
accgcctcccgcaag

SEQ ID NO: 359666 - DNA, 15 bp, Homo sapiens
caccgcctcccgcaa

SEQ ID NO: 359667 - DNA, 15 bp, Homo sapiens
tcaccgcctcccgca

SEQ ID NO: 359668 - DNA, 15 bp, Homo sapiens
ctcaccgcctcccgc

SEQ ID NO: 359669 - DNA, 15 bp, Homo sapiens
gctcaccgcctcccg

SEQ ID NO: 359670 - DNA, 15 bp, Homo sapiens
ggctcaccgcctccc

SEQ ID NO: 359671 - DNA, 15 bp, Homo sapiens
gggctcaccgcctcc

SEQ ID NO: 359672 - DNA, 15 bp, Homo sapiens
ggggctcaccgcctc

SEQ ID NO: 359673 - DNA, 15 bp, Homo sapiens
cggggctcaccgcct

SEQ ID NO: 359674 - DNA, 15 bp, Homo sapiens
ccggggctcaccgcc

SEQ ID NO: 359675 - DNA, 15 bp, Homo sapiens
cccggggctcaccgc

SEQ ID NO: 359676 - DNA, 15 bp, Homo sapiens
gcccggggctcaccg

SEQ ID NO: 359677 - DNA, 15 bp, Homo sapiens
tgcccggggctcacc

SEQ ID NO: 359678 - DNA, 15 bp, Homo sapiens
gtgcccggggctcac

SEQ ID NO: 359679 - DNA, 15 bp, Homo sapiens
tgtgcccggggctca

SEQ ID NO: 359680 - DNA, 15 bp, Homo sapiens
gtgtgcccggggctc

SEQ ID NO: 359681 - DNA, 15 bp, Homo sapiens
agtgtgcccggggct

SEQ ID NO: 359682 - DNA, 15 bp, Homo sapiens
gagtgtgcccggggc

SEQ ID NO: 359683 - DNA, 15 bp, Homo sapiens
cgagtgtgcccgggg

SEQ ID NO: 359684 - DNA, 15 bp, Homo sapiens
gcgagtgtgcccggg

SEQ ID NO: 359685 - DNA, 15 bp, Homo sapiens
agcgagtgtgcccgg

SEQ ID NO: 359686 - DNA, 15 bp, Homo sapiens
aagcgagtgtgcccg

SEQ ID NO: 359687 - DNA, 15 bp, Homo sapiens
caagcgagtgtgccc

SEQ ID NO: 359688 - DNA, 15 bp, Homo sapiens
gcaagcgagtgtgcc

SEQ ID NO: 359689 - DNA, 15 bp, Homo sapiens
agcaagcgagtgtgc

SEQ ID NO: 359690 - DNA, 15 bp, Homo sapiens
cagcaagcgagtgtg

SEQ ID NO: 359691 - DNA, 15 bp, Homo sapiens
gcagcaagcgagtgt

SEQ ID NO: 359692 - DNA, 15 bp, Homo sapiens
agcagcaagcgagtg

SEQ ID NO: 359693 - DNA, 15 bp, Homo sapiens
gagcagcaagcgagt

SEQ ID NO: 359694 - DNA, 15 bp, Homo sapiens
cgagcagcaagcgag

SEQ ID NO: 359695 - DNA, 15 bp, Homo sapiens
ccgagcagcaagcga

SEQ ID NO: 359696 - DNA, 15 bp, Homo sapiens
gccgagcagcaagcg

SEQ ID NO: 359697 - DNA, 15 bp, Homo sapiens
cgccgagcagcaagc

SEQ ID NO: 359698 - DNA, 15 bp, Homo sapiens
gcgccgagcagcaag

SEQ ID NO: 359699 - DNA, 15 bp, Homo sapiens
tgcgccgagcagcaa

SEQ ID NO: 359700 - DNA, 15 bp, Homo sapiens
gtgcgccgagcagca

SEQ ID NO: 359701 - DNA, 15 bp, Homo sapiens
cgtgcgccgagcagc

SEQ ID NO: 359702 - DNA, 15 bp, Homo sapiens
ctggtctttccccct

SEQ ID NO: 359703 - DNA, 15 bp, Homo sapiens
tctggtctttccccc

SEQ ID NO: 359704 - DNA, 15 bp, Homo sapiens
ctctggtctttcccc

SEQ ID NO: 359705 - DNA, 15 bp, Homo sapiens
tctctggtctttccc

SEQ ID NO: 359706 - DNA, 15 bp, Homo sapiens
gtctctggtctttcc

SEQ ID NO: 359707 - DNA, 15 bp, Homo sapiens
agtctctggtctttc

SEQ ID NO: 359708 - DNA, 15 bp, Homo sapiens
gagtctctggtcttt

SEQ ID NO: 359709 - DNA, 15 bp, Homo sapiens
ggagtctctggtctt

SEQ ID NO: 359710 - DNA, 15 bp, Homo sapiens
gggagtctctggtct

SEQ ID NO: 359711 - DNA, 15 bp, Homo sapiens
ggggagtctctggtc

SEQ ID NO: 359712 - DNA, 15 bp, Homo sapiens
aggggagtctctggt

SEQ ID NO: 359713 - DNA, 15 bp, Homo sapiens
taggggagtctctgg

SEQ ID NO: 359714 - DNA, 15 bp, Homo sapiens
ttaggggagtctctg

SEQ ID NO: 359715 - DNA, 15 bp, Homo sapiens
tttaggggagtctct

SEQ ID NO: 359716 - DNA, 15 bp, Homo sapiens
gtttaggggagtctc

SEQ ID NO: 359717 - DNA, 15 bp, Homo sapiens
ggtttaggggagtct

SEQ ID NO: 359718 - DNA, 15 bp, Homo sapiens
tggtttaggggagtc

SEQ ID NO: 359719 - DNA, 15 bp, Homo sapiens
gtggtttaggggagt

SEQ ID NO: 359720 - DNA, 15 bp, Homo sapiens
ggtggtttaggggag

SEQ ID NO: 359721 - DNA, 15 bp, Homo sapiens
gggtggtttagggga

SEQ ID NO: 359722 - DNA, 15 bp, Homo sapiens
tgggtggtttagggg

SEQ ID NO: 359723 - DNA, 15 bp, Homo sapiens
ctgggtggtttaggg

SEQ ID NO: 359724 - DNA, 15 bp, Homo sapiens
tctgggtggtttagg

SEQ ID NO: 359725 - DNA, 15 bp, Homo sapiens
atctgggtggtttag

SEQ ID NO: 359726 - DNA, 15 bp, Homo sapiens
catctgggtggttta

SEQ ID NO: 359727 - DNA, 15 bp, Homo sapiens
gcatctgggtggttt

SEQ ID NO: 359728 - DNA, 15 bp, Homo sapiens
cgcatctgggtggtt

SEQ ID NO: 359729 - DNA, 15 bp, Homo sapiens
gcgcatctgggtggt

SEQ ID NO: 359730 - DNA, 15 bp, Homo sapiens
tgcgcatctgggtgg

SEQ ID NO: 359731 - DNA, 15 bp, Homo sapiens
ctgcgcatctgggtg

SEQ ID NO: 359732 - DNA, 15 bp, Homo sapiens
cctgcgcatctgggt

SEQ ID NO: 359733 - DNA, 15 bp, Homo sapiens
tcctgcgcatctggg

SEQ ID NO: 359734 - DNA, 15 bp, Homo sapiens
atcctgcgcatctgg

SEQ ID NO: 359735 - DNA, 15 bp, Homo sapiens
aatcctgcgcatctg

SEQ ID NO: 359736 - DNA, 15 bp, Homo sapiens
caatcctgcgcatct

SEQ ID NO: 359737 - DNA, 15 bp, Homo sapiens
tcaatcctgcgcatc

SEQ ID NO: 359738 - DNA, 15 bp, Homo sapiens
ttcaatcctgcgcat

SEQ ID NO: 359739 - DNA, 15 bp, Homo sapiens
cttcaatcctgcgca

SEQ ID NO: 359740 - DNA, 15 bp, Homo sapiens
gcttcaatcctgcgc

SEQ ID NO: 359741 - DNA, 15 bp, Homo sapiens
cgcttcaatcctgcg

SEQ ID NO: 359742 - DNA, 15 bp, Homo sapiens
ccgcttcaatcctgc

SEQ ID NO: 359743 - DNA, 15 bp, Homo sapiens
accgcttcaatcctg

SEQ ID NO: 359744 - DNA, 15 bp, Homo sapiens
gaccgcttcaatcct

SEQ ID NO: 359745 - DNA, 15 bp, Homo sapiens
agaccgcttcaatcc

SEQ ID NO: 359746 - DNA, 15 bp, Homo sapiens
tagaccgcttcaatc

SEQ ID NO: 359747 - DNA, 15 bp, Homo sapiens
ctagaccgcttcaat

SEQ ID NO: 359748 - DNA, 15 bp, Homo sapiens
gctagaccgcttcaa

SEQ ID NO: 359749 - DNA, 15 bp, Homo sapiens
ggctagaccgcttca

SEQ ID NO: 359750 - DNA, 15 bp, Homo sapiens
tggctagaccgcttc

SEQ ID NO: 359751 - DNA, 15 bp, Homo sapiens
ttggctagaccgctt

SEQ ID NO: 359752 - DNA, 15 bp, Homo sapiens
tttggctagaccgct

SEQ ID NO: 359753 - DNA, 15 bp, Homo sapiens
ctttggctagaccgc

SEQ ID NO: 359754 - DNA, 15 bp, Homo sapiens
gctttggctagaccg

SEQ ID NO: 359755 - DNA, 15 bp, Homo sapiens
agctttggctagacc

SEQ ID NO: 359756 - DNA, 15 bp, Homo sapiens
aagctttggctagac

SEQ ID NO: 359757 - DNA, 15 bp, Homo sapiens
aaagctttggctaga

SEQ ID NO: 359758 - DNA, 15 bp, Homo sapiens
gaaagctttggctag

SEQ ID NO: 359759 - DNA, 15 bp, Homo sapiens
agaaagctttggcta

SEQ ID NO: 359760 - DNA, 15 bp, Homo sapiens
cagaaagctttggct

SEQ ID NO: 359761 - DNA, 15 bp, Homo sapiens
acagaaagctttggc

SEQ ID NO: 359762 - DNA, 15 bp, Homo sapiens
cacagaaagctttgg

SEQ ID NO: 359763 - DNA, 15 bp, Homo sapiens
ccacagaaagctttg

SEQ ID NO: 359764 - DNA, 15 bp, Homo sapiens
tccacagaaagcttt

SEQ ID NO: 359765 - DNA, 15 bp, Homo sapiens
atccacagaaagctt

SEQ ID NO: 359766 - DNA, 15 bp, Homo sapiens
aatccacagaaagct

SEQ ID NO: 359767 - DNA, 15 bp, Homo sapiens
taatccacagaaagc

SEQ ID NO: 359768 - DNA, 15 bp, Homo sapiens
ttaatccacagaaag

SEQ ID NO: 359769 - DNA, 15 bp, Homo sapiens
tttaatccacagaaa

SEQ ID NO: 359770 - DNA, 15 bp, Homo sapiens
ttttaatccacagaa

SEQ ID NO: 359771 - DNA, 15 bp, Homo sapiens
tttttaatccacaga

SEQ ID NO: 359772 - DNA, 15 bp, Homo sapiens
ttttttaatccacag

SEQ ID NO: 359773 - DNA, 15 bp, Homo sapiens
tttttttaatccaca

SEQ ID NO: 359774 - DNA, 15 bp, Homo sapiens
atttttttaatccac

SEQ ID NO: 359775 - DNA, 15 bp, Homo sapiens
tatttttttaatcca

SEQ ID NO: 359776 - DNA, 15 bp, Homo sapiens
gtatttttttaatcc

SEQ ID NO: 359777 - DNA, 15 bp, Homo sapiens
tgtatttttttaatc

SEQ ID NO: 359778 - DNA, 15 bp, Homo sapiens
gtgtatttttttaat

SEQ ID NO: 359779 - DNA, 15 bp, Homo sapiens
cgtgtatttttttaa

SEQ ID NO: 359780 - DNA, 15 bp, Homo sapiens
tcgtgtattttttta

SEQ ID NO: 359781 - DNA, 15 bp, Homo sapiens
atcgtgtattttttt

SEQ ID NO: 359782 - DNA, 15 bp, Homo sapiens
aatcgtgtatttttt

SEQ ID NO: 359783 - DNA, 15 bp, Homo sapiens
aaatcgtgtattttt

SEQ ID NO: 359784 - DNA, 15 bp, Homo sapiens
aaaatcgtgtatttt

SEQ ID NO: 359785 - DNA, 15 bp, Homo sapiens
aaaaatcgtgtattt

SEQ ID NO: 359786 - DNA, 15 bp, Homo sapiens
aaaaaatcgtgtatt

SEQ ID NO: 359787 - DNA, 15 bp, Homo sapiens
aaaaaaatcgtgtat

SEQ ID NO: 359788 - DNA, 15 bp, Homo sapiens
aaaaaaaatcgtgta

SEQ ID NO: 359789 - DNA, 15 bp, Homo sapiens
aaaaaaaaatcgtgt

SEQ ID NO: 359790 - DNA, 15 bp, Homo sapiens
aaaaaaaaaatcgtg

SEQ ID NO: 359791 - DNA, 15 bp, Homo sapiens
aaaaaaaaaaatcgt

SEQ ID NO: 359792 - DNA, 15 bp, Homo sapiens
aaaaaaaaaaaatcg

SEQ ID NO: 359793 - DNA, 15 bp, Homo sapiens
aaaaaaaaaaaaatc

SEQ ID NO: 359794 - DNA, 15 bp, Homo sapiens
ccaaaaaaaaaaaaa

SEQ ID NO: 359795 - DNA, 15 bp, Homo sapiens
gccaaaaaaaaaaaa

SEQ ID NO: 359796 - DNA, 15 bp, Homo sapiens
tgccaaaaaaaaaaa

SEQ ID NO: 359797 - DNA, 15 bp, Homo sapiens
ctgccaaaaaaaaaa

SEQ ID NO: 359798 - DNA, 15 bp, Homo sapiens
tctgccaaaaaaaaa

SEQ ID NO: 359799 - DNA, 15 bp, Homo sapiens
ttctgccaaaaaaaa

SEQ ID NO: 359800 - DNA, 15 bp, Homo sapiens
cttctgccaaaaaaa

SEQ ID NO: 359801 - DNA, 15 bp, Homo sapiens
tcttctgccaaaaaa

SEQ ID NO: 359802 - DNA, 15 bp, Homo sapiens
ttcttctgccaaaaa

SEQ ID NO: 359803 - DNA, 15 bp, Homo sapiens
tttcttctgccaaaa

SEQ ID NO: 359804 - DNA, 15 bp, Homo sapiens
ttttcttctgccaaa

SEQ ID NO: 359805 - DNA, 15 bp, Homo sapiens
cttttcttctgccaa

SEQ ID NO: 359806 - DNA, 15 bp, Homo sapiens
ccttttcttctgcca

SEQ ID NO: 359807 - DNA, 15 bp, Homo sapiens
tccttttcttctgcc

SEQ ID NO: 359808 - DNA, 15 bp, Homo sapiens
ctccttttcttctgc

SEQ ID NO: 359809 - DNA, 15 bp, Homo sapiens
tctccttttcttctg

SEQ ID NO: 359810 - DNA, 15 bp, Homo sapiens
ctctccttttcttct

SEQ ID NO: 359811 - DNA, 15 bp, Homo sapiens
cctctccttttcttc

SEQ ID NO: 359812 - DNA, 15 bp, Homo sapiens
tcctctccttttctt

SEQ ID NO: 359813 - DNA, 15 bp, Homo sapiens
ttcctctccttttct

SEQ ID NO: 359814 - DNA, 15 bp, Homo sapiens
cttcctctccttttc

SEQ ID NO: 359815 - DNA, 15 bp, Homo sapiens
tcttcctctcctttt

SEQ ID NO: 359816 - DNA, 15 bp, Homo sapiens
gtcttcctctccttt

SEQ ID NO: 359817 - DNA, 15 bp, Homo sapiens
ggtcttcctctcctt

SEQ ID NO: 359818 - DNA, 15 bp, Homo sapiens
tggtcttcctctcct

SEQ ID NO: 359819 - DNA, 15 bp, Homo sapiens
ctggtcttcctctcc

SEQ ID NO: 359820 - DNA, 15 bp, Homo sapiens
gctggtcttcctctc

SEQ ID NO: 359821 - DNA, 15 bp, Homo sapiens
cgctggtcttcctct

SEQ ID NO: 359822 - DNA, 15 bp, Homo sapiens
ccgctggtcttcctc

SEQ ID NO: 359823 - DNA, 15 bp, Homo sapiens
cccgctggtcttcct

SEQ ID NO: 359824 - DNA, 15 bp, Homo sapiens
ccccgctggtcttcc

SEQ ID NO: 359825 - DNA, 15 bp, Homo sapiens
gccccgctggtcttc

SEQ ID NO: 359826 - DNA, 15 bp, Homo sapiens
agccccgctggtctt

SEQ ID NO: 359827 - DNA, 15 bp, Homo sapiens
aagccccgctggtct

SEQ ID NO: 359828 - DNA, 15 bp, Homo sapiens
aaagccccgctggtc

SEQ ID NO: 359829 - DNA, 15 bp, Homo sapiens
caaagccccgctggt

SEQ ID NO: 359830 - DNA, 15 bp, Homo sapiens
gcaaagccccgctgg

SEQ ID NO: 359831 - DNA, 15 bp, Homo sapiens
tgcaaagccccgctg

SEQ ID NO: 359832 - DNA, 15 bp, Homo sapiens
ttgcaaagccccgct

SEQ ID NO: 359833 - DNA, 15 bp, Homo sapiens
cttgcaaagccccgc

SEQ ID NO: 359834 - DNA, 15 bp, Homo sapiens
ccttgcaaagccccg

SEQ ID NO: 359835 - DNA, 15 bp, Homo sapiens
tccttgcaaagcccc

SEQ ID NO: 359836 - DNA, 15 bp, Homo sapiens
ttccttgcaaagccc

SEQ ID NO: 359837 - DNA, 15 bp, Homo sapiens
tttccttgcaaagcc

SEQ ID NO: 359838 - DNA, 15 bp, Homo sapiens
gtttccttgcaaagc

SEQ ID NO: 359839 - DNA, 15 bp, Homo sapiens
cgtttccttgcaaag

SEQ ID NO: 359840 - DNA, 15 bp, Homo sapiens
ccgtttccttgcaaa

SEQ ID NO: 359841 - DNA, 15 bp, Homo sapiens
cccgtttccttgcaa

SEQ ID NO: 359842 - DNA, 15 bp, Homo sapiens
ccccgtttccttgca

SEQ ID NO: 359843 - DNA, 15 bp, Homo sapiens
cccccgtttccttgc

SEQ ID NO: 359844 - DNA, 15 bp, Homo sapiens
ccccccgtttccttg

SEQ ID NO: 359845 - DNA, 15 bp, Homo sapiens
tccccccgtttcctt

SEQ ID NO: 359846 - DNA, 15 bp, Homo sapiens
atccccccgtttcct

SEQ ID NO: 359847 - DNA, 15 bp, Homo sapiens
catccccccgtttcc

SEQ ID NO: 359848 - DNA, 15 bp, Homo sapiens
acatccccccgtttc

SEQ ID NO: 359849 - DNA, 15 bp, Homo sapiens
tacatccccccgttt

SEQ ID NO: 359850 - DNA, 15 bp, Homo sapiens
ttacatccccccgtt

SEQ ID NO: 359851 - DNA, 15 bp, Homo sapiens
gttacatccccccgt

SEQ ID NO: 359852 - DNA, 15 bp, Homo sapiens
agttacatccccccg

SEQ ID NO: 359853 - DNA, 15 bp, Homo sapiens
gagttacatcccccc

SEQ ID NO: 359854 - DNA, 15 bp, Homo sapiens
cgagttacatccccc

SEQ ID NO: 359855 - DNA, 15 bp, Homo sapiens
acgagttacatcccc

SEQ ID NO: 359856 - DNA, 15 bp, Homo sapiens
cacgagttacatccc

SEQ ID NO: 359857 - DNA, 15 bp, Homo sapiens
ccacgagttacatcc

SEQ ID NO: 359858 - DNA, 15 bp, Homo sapiens
tccacgagttacatc

SEQ ID NO: 359859 - DNA, 15 bp, Homo sapiens
atccacgagttacat

SEQ ID NO: 359860 - DNA, 15 bp, Homo sapiens
tatccacgagttaca

SEQ ID NO: 359861 - DNA, 15 bp, Homo sapiens
gtatccacgagttac

SEQ ID NO: 359862 - DNA, 15 bp, Homo sapiens
tgtatccacgagtta

SEQ ID NO: 359863 - DNA, 15 bp, Homo sapiens
atgtatccacgagtt

SEQ ID NO: 359864 - DNA, 15 bp, Homo sapiens
aatgtatccacgagt

SEQ ID NO: 359865 - DNA, 15 bp, Homo sapiens
aaatgtatccacgag

SEQ ID NO: 359866 - DNA, 15 bp, Homo sapiens
aaaatgtatccacga

SEQ ID NO: 359867 - DNA, 15 bp, Homo sapiens
aaaaatgtatccacg

SEQ ID NO: 359868 - DNA, 15 bp, Homo sapiens
gaaaaatgtatccac

SEQ ID NO: 359869 - DNA, 15 bp, Homo sapiens
ggaaaaatgtatcca

SEQ ID NO: 359870 - DNA, 15 bp, Homo sapiens
tggaaaaatgtatcc

SEQ ID NO: 359871 - DNA, 15 bp, Homo sapiens
gtggaaaaatgtatc

SEQ ID NO: 359872 - DNA, 15 bp, Homo sapiens
ggtggaaaaatgtat

SEQ ID NO: 359873 - DNA, 15 bp, Homo sapiens
gggtggaaaaatgta

SEQ ID NO: 359874 - DNA, 15 bp, Homo sapiens
tgggtggaaaaatgt

SEQ ID NO: 359875 - DNA, 15 bp, Homo sapiens
atgggtggaaaaatg

SEQ ID NO: 359876 - DNA, 15 bp, Homo sapiens
gatgggtggaaaaat

SEQ ID NO: 359877 - DNA, 15 bp, Homo sapiens
tgatgggtggaaaaa

SEQ ID NO: 359878 - DNA, 15 bp, Homo sapiens
ttgatgggtggaaaa

SEQ ID NO: 359879 - DNA, 15 bp, Homo sapiens
tttgatgggtggaaa

SEQ ID NO: 359880 - DNA, 15 bp, Homo sapiens
gtttgatgggtggaa

SEQ ID NO: 359881 - DNA, 15 bp, Homo sapiens
tgtttgatgggtgga

SEQ ID NO: 359882 - DNA, 15 bp, Homo sapiens
atgtttgatgggtgg

SEQ ID NO: 359883 - DNA, 15 bp, Homo sapiens
gatgtttgatgggtg

SEQ ID NO: 359884 - DNA, 15 bp, Homo sapiens
agatgtttgatgggt

SEQ ID NO: 359885 - DNA, 15 bp, Homo sapiens
aagatgtttgatggg

SEQ ID NO: 359886 - DNA, 15 bp, Homo sapiens
caagatgtttgatgg

SEQ ID NO: 359887 - DNA, 15 bp, Homo sapiens
acaagatgtttgatg

SEQ ID NO: 359888 - DNA, 15 bp, Homo sapiens
aacaagatgtttgat

SEQ ID NO: 359889 - DNA, 15 bp, Homo sapiens
taacaagatgtttga

SEQ ID NO: 359890 - DNA, 15 bp, Homo sapiens
ataacaagatgtttg

SEQ ID NO: 359891 - DNA, 15 bp, Homo sapiens
tataacaagatgttt

SEQ ID NO: 359892 - DNA, 15 bp, Homo sapiens
gtataacaagatgtt

SEQ ID NO: 359893 - DNA, 15 bp, Homo sapiens
agtataacaagatgt

SEQ ID NO: 359894 - DNA, 15 bp, Homo sapiens
aagtataacaagatg

SEQ ID NO: 359895 - DNA, 15 bp, Homo sapiens
aaagtataacaagat

SEQ ID NO: 359896 - DNA, 15 bp, Homo sapiens
caaagtataacaaga

SEQ ID NO: 359897 - DNA, 15 bp, Homo sapiens
acaaagtataacaag

SEQ ID NO: 359898 - DNA, 15 bp, Homo sapiens
tacaaagtataacaa

SEQ ID NO: 359899 - DNA, 15 bp, Homo sapiens
ttacaaagtataaca

SEQ ID NO: 359900 - DNA, 15 bp, Homo sapiens
tttacaaagtataac

SEQ ID NO: 359901 - DNA, 15 bp, Homo sapiens
gtttacaaagtataa

SEQ ID NO: 359902 - DNA, 15 bp, Homo sapiens
tgtttacaaagtata

SEQ ID NO: 359903 - DNA, 15 bp, Homo sapiens
atgtttacaaagtat

SEQ ID NO: 359904 - DNA, 15 bp, Homo sapiens
aatgtttacaaagta

SEQ ID NO: 359905 - DNA, 15 bp, Homo sapiens
aaatgtttacaaagt

SEQ ID NO: 359906 - DNA, 15 bp, Homo sapiens
aaaatgtttacaaag

SEQ ID NO: 359907 - DNA, 15 bp, Homo sapiens
gaaaatgtttacaaa

SEQ ID NO: 359908 - DNA, 15 bp, Homo sapiens
agaaaatgtttacaa

SEQ ID NO: 359909 - DNA, 15 bp, Homo sapiens
aagaaaatgtttaca

SEQ ID NO: 359910 - DNA, 15 bp, Homo sapiens
aaagaaaatgtttac

SEQ ID NO: 359911 - DNA, 15 bp, Homo sapiens
aaaagaaaatgttta

SEQ ID NO: 359912 - DNA, 15 bp, Homo sapiens
aaaaagaaaatgttt

SEQ ID NO: 359913 - DNA, 15 bp, Homo sapiens
aaaaaagaaaatgtt

SEQ ID NO: 359914 - DNA, 15 bp, Homo sapiens
aaaaaaagaaaatgt

SEQ ID NO: 359915 - DNA, 15 bp, Homo sapiens
taaaaaaagaaaatg

SEQ ID NO: 359916 - DNA, 15 bp, Homo sapiens
ttaaaaaaagaaaat

SEQ ID NO: 359917 - DNA, 15 bp, Homo sapiens
tttaaaaaaagaaaa

SEQ ID NO: 359918 - DNA, 15 bp, Homo sapiens
gtttaaaaaaagaaa

SEQ ID NO: 359919 - DNA, 15 bp, Homo sapiens
ggtttaaaaaaagaa

SEQ ID NO: 359920 - DNA, 15 bp, Homo sapiens
gggtttaaaaaaaga

SEQ ID NO: 359921 - DNA, 15 bp, Homo sapiens
ggggtttaaaaaaag

SEQ ID NO: 359922 - DNA, 15 bp, Homo sapiens
tggggtttaaaaaaa

SEQ ID NO: 359923 - DNA, 15 bp, Homo sapiens
ctggggtttaaaaaa

SEQ ID NO: 359924 - DNA, 15 bp, Homo sapiens
actggggtttaaaaa

SEQ ID NO: 359925 - DNA, 15 bp, Homo sapiens
aactggggtttaaaa

SEQ ID NO: 359926 - DNA, 15 bp, Homo sapiens
gaactggggtttaaa

SEQ ID NO: 359927 - DNA, 15 bp, Homo sapiens
ggaactggggtttaa

SEQ ID NO: 359928 - DNA, 15 bp, Homo sapiens
tggaactggggttta

SEQ ID NO: 359929 - DNA, 15 bp, Homo sapiens
ctggaactggggttt

SEQ ID NO: 359930 - DNA, 15 bp, Homo sapiens
gctggaactggggtt

SEQ ID NO: 359931 - DNA, 15 bp, Homo sapiens
ggctggaactggggt

SEQ ID NO: 359932 - DNA, 15 bp, Homo sapiens
cggctggaactgggg

SEQ ID NO: 359933 - DNA, 15 bp, Homo sapiens
ccggctggaactggg

SEQ ID NO: 359934 - DNA, 15 bp, Homo sapiens
tccggctggaactgg

SEQ ID NO: 359935 - DNA, 15 bp, Homo sapiens
gtccggctggaactg

SEQ ID NO: 359936 - DNA, 15 bp, Homo sapiens
cgtccggctggaact

SEQ ID NO: 359937 - DNA, 15 bp, Homo sapiens
gcgtccggctggaac

SEQ ID NO: 359938 - DNA, 15 bp, Homo sapiens
ggcgtccggctggaa

SEQ ID NO: 359939 - DNA, 15 bp, Homo sapiens
aaggctctcgcaaaa

SEQ ID NO: 359940 - DNA, 15 bp, Homo sapiens
gaaggctctcgcaaa

SEQ ID NO: 359941 - DNA, 15 bp, Homo sapiens
agaaggctctcgcaa

SEQ ID NO: 359942 - DNA, 15 bp, Homo sapiens
aagaaggctctcgca

SEQ ID NO: 359943 - DNA, 15 bp, Homo sapiens
taagaaggctctcgc

SEQ ID NO: 359944 - DNA, 15 bp, Homo sapiens
ataagaaggctctcg

SEQ ID NO: 359945 - DNA, 15 bp, Homo sapiens
aataagaaggctctc

SEQ ID NO: 359946 - DNA, 15 bp, Homo sapiens
aaataagaaggctct

SEQ ID NO: 359947 - DNA, 15 bp, Homo sapiens
aaaataagaaggctc

SEQ ID NO: 359948 - DNA, 15 bp, Homo sapiens
caaaataagaaggct

SEQ ID NO: 359949 - DNA, 15 bp, Homo sapiens
gcaaaataagaaggc

SEQ ID NO: 359950 - DNA, 15 bp, Homo sapiens
ggcaaaataagaagg

SEQ ID NO: 359951 - DNA, 15 bp, Homo sapiens
tggcaaaataagaag

SEQ ID NO: 359952 - DNA, 15 bp, Homo sapiens
ctggcaaaataagaa

SEQ ID NO: 359953 - DNA, 15 bp, Homo sapiens
tctggcaaaataaga

SEQ ID NO: 359954 - DNA, 15 bp, Homo sapiens
gtctggcaaaataag

SEQ ID NO: 359955 - DNA, 15 bp, Homo sapiens
cgtctggcaaaataa

SEQ ID NO: 359956 - DNA, 15 bp, Homo sapiens
acgtctggcaaaata

SEQ ID NO: 359957 - DNA, 15 bp, Homo sapiens
gacgtctggcaaaat

SEQ ID NO: 359958 - DNA, 15 bp, Homo sapiens
agacgtctggcaaaa

SEQ ID NO: 359959 - DNA, 15 bp, Homo sapiens
gagacgtctggcaaa

SEQ ID NO: 359960 - DNA, 15 bp, Homo sapiens
tgagacgtctggcaa

SEQ ID NO: 359961 - DNA, 15 bp, Homo sapiens
atgagacgtctggca

SEQ ID NO: 359962 - DNA, 15 bp, Homo sapiens
catgagacgtctggc

SEQ ID NO: 359963 - DNA, 15 bp, Homo sapiens
gcatgagacgtctgg

SEQ ID NO: 359964 - DNA, 15 bp, Homo sapiens
cgcatgagacgtctg

SEQ ID NO: 359965 - DNA, 15 bp, Homo sapiens
ccgcatgagacgtct

SEQ ID NO: 359966 - DNA, 15 bp, Homo sapiens
cccgcatgagacgtc

SEQ ID NO: 359967 - DNA, 15 bp, Homo sapiens
ccccgcatgagacgt

SEQ ID NO: 359968 - DNA, 15 bp, Homo sapiens
accccgcatgagacg

SEQ ID NO: 359969 - DNA, 15 bp, Homo sapiens
caccccgcatgagac

SEQ ID NO: 359970 - DNA, 15 bp, Homo sapiens
tcaccccgcatgaga

SEQ ID NO: 359971 - DNA, 15 bp, Homo sapiens
ttcaccccgcatgag

SEQ ID NO: 359972 - DNA, 15 bp, Homo sapiens
cttcaccccgcatga

SEQ ID NO: 359973 - DNA, 15 bp, Homo sapiens
acttcaccccgcatg

SEQ ID NO: 359974 - DNA, 15 bp, Homo sapiens
gacttcaccccgcat

SEQ ID NO: 359975 - DNA, 15 bp, Homo sapiens
ggacttcaccccgca

SEQ ID NO: 359976 - DNA, 15 bp, Homo sapiens
tggacttcaccccgc

SEQ ID NO: 359977 - DNA, 15 bp, Homo sapiens
gtggacttcaccccg

SEQ ID NO: 359978 - DNA, 15 bp, Homo sapiens
agtggacttcacccc

SEQ ID NO: 359979 - DNA, 15 bp, Homo sapiens
gagtggacttcaccc

SEQ ID NO: 359980 - DNA, 15 bp, Homo sapiens
cgagtggacttcacc

SEQ ID NO: 359981 - DNA, 15 bp, Homo sapiens
ccgagtggacttcac

SEQ ID NO: 359982 - DNA, 15 bp, Homo sapiens
gccgagtggacttca

SEQ ID NO: 359983 - DNA, 15 bp, Homo sapiens
ggccgagtggacttc

SEQ ID NO: 359984 - DNA, 15 bp, Homo sapiens
gggccgagtggactt

SEQ ID NO: 359985 - DNA, 15 bp, Homo sapiens
ggggccgagtggact

SEQ ID NO: 359986 - DNA, 15 bp, Homo sapiens
gggggccgagtggac

SEQ ID NO: 359987 - DNA, 15 bp, Homo sapiens
agggggccgagtgga

SEQ ID NO: 359988 - DNA, 15 bp, Homo sapiens
gagggggccgagtgg

SEQ ID NO: 359989 - DNA, 15 bp, Homo sapiens
ggagggggccgagtg

SEQ ID NO: 359990 - DNA, 15 bp, Homo sapiens
gggagggggccgagt

SEQ ID NO: 359991 - DNA, 15 bp, Homo sapiens
ggggagggggccgag

SEQ ID NO: 359992 - DNA, 15 bp, Homo sapiens
aggggagggggccga

SEQ ID NO: 359993 - DNA, 15 bp, Homo sapiens
caggggagggggccg

SEQ ID NO: 359994 - DNA, 15 bp, Homo sapiens
tcaggggagggggcc

SEQ ID NO: 359995 - DNA, 15 bp, Homo sapiens
ctcaggggagggggc

SEQ ID NO: 359996 - DNA, 15 bp, Homo sapiens
actcaggggaggggg

SEQ ID NO: 359997 - DNA, 15 bp, Homo sapiens
gactcaggggagggg

SEQ ID NO: 359998 - DNA, 15 bp, Homo sapiens
agactcaggggaggg

SEQ ID NO: 359999 - DNA, 15 bp, Homo sapiens
aagactcaggggagg

SEQ ID NO: 360000 - DNA, 15 bp, Homo sapiens
gaagactcaggggag

SEQ ID NO: 360001 - DNA, 15 bp, Homo sapiens
cgaagactcagggga

SEQ ID NO: 360002 - DNA, 15 bp, Homo sapiens
acgaagactcagggg

SEQ ID NO: 360003 - DNA, 15 bp, Homo sapiens
cacgaagactcaggg

SEQ ID NO: 360004 - DNA, 15 bp, Homo sapiens
acacgaagactcagg

SEQ ID NO: 360005 - DNA, 15 bp, Homo sapiens
cacacgaagactcag

SEQ ID NO: 360006 - DNA, 15 bp, Homo sapiens
gcacacgaagactca

SEQ ID NO: 360007 - DNA, 15 bp, Homo sapiens
cgcacacgaagactc

SEQ ID NO: 360008 - DNA, 15 bp, Homo sapiens
gcgcacacgaagact

SEQ ID NO: 360009 - DNA, 15 bp, Homo sapiens
cgcgcacacgaagac

SEQ ID NO: 360010 - DNA, 15 bp, Homo sapiens
ccgcgcacacgaaga

SEQ ID NO: 360011 - DNA, 15 bp, Homo sapiens
tccgcgcacacgaag

SEQ ID NO: 360012 - DNA, 15 bp, Homo sapiens
ttccgcgcacacgaa

SEQ ID NO: 360013 - DNA, 15 bp, Homo sapiens
attccgcgcacacga

SEQ ID NO: 360014 - DNA, 15 bp, Homo sapiens
aattccgcgcacacg

SEQ ID NO: 360015 - DNA, 15 bp, Homo sapiens
gaattccgcgcacac

SEQ ID NO: 360016 - DNA, 15 bp, Homo sapiens
cgaattccgcgcaca

SEQ ID NO: 360017 - DNA, 15 bp, Homo sapiens
tcgaattccgcgcac

SEQ ID NO: 360018 - DNA, 15 bp, Homo sapiens
ctcgaattccgcgca

SEQ ID NO: 360019 - DNA, 15 bp, Homo sapiens
cctcgaattccgcgc

SEQ ID NO: 360020 - DNA, 15 bp, Homo sapiens
tcctcgaattccgcg

SEQ ID NO: 360021 - DNA, 15 bp, Homo sapiens
ctcctcgaattccgc

SEQ ID NO: 360022 - DNA, 15 bp, Homo sapiens
tctcctcgaattccg

SEQ ID NO: 360023 - DNA, 15 bp, Homo sapiens
atctcctcgaattcc

SEQ ID NO: 360024 - DNA, 15 bp, Homo sapiens
gatctcctcgaattc

SEQ ID NO: 360025 - DNA, 15 bp, Homo sapiens
ggatctcctcgaatt

SEQ ID NO: 360026 - DNA, 15 bp, Homo sapiens
cggatctcctcgaat

SEQ ID NO: 360027 - DNA, 15 bp, Homo sapiens
ccggatctcctcgaa

SEQ ID NO: 360028 - DNA, 15 bp, Homo sapiens
accggatctcctcga

SEQ ID NO: 360029 - DNA, 15 bp, Homo sapiens
aaccggatctcctcg

SEQ ID NO: 360030 - DNA, 15 bp, Homo sapiens
taaccggatctcctc

SEQ ID NO: 360031 - DNA, 15 bp, Homo sapiens
gtaaccggatctcct

SEQ ID NO: 360032 - DNA, 15 bp, Homo sapiens
agtaaccggatctcc

SEQ ID NO: 360033 - DNA, 15 bp, Homo sapiens
tagtaaccggatctc

SEQ ID NO: 360034 - DNA, 15 bp, Homo sapiens
ttagtaaccggatct

SEQ ID NO: 360035 - DNA, 15 bp, Homo sapiens
cttagtaaccggatc

SEQ ID NO: 360036 - DNA, 15 bp, Homo sapiens
ccttagtaaccggat

SEQ ID NO: 360037 - DNA, 15 bp, Homo sapiens
tccttagtaaccgga

SEQ ID NO: 360038 - DNA, 15 bp, Homo sapiens
atccttagtaaccgg

SEQ ID NO: 360039 - DNA, 15 bp, Homo sapiens
tatccttagtaaccg

SEQ ID NO: 360040 - DNA, 15 bp, Homo sapiens
atatccttagtaacc

SEQ ID NO: 360041 - DNA, 15 bp, Homo sapiens
tatatccttagtaac

SEQ ID NO: 360042 - DNA, 15 bp, Homo sapiens
ctatatccttagtaa

SEQ ID NO: 360043 - DNA, 15 bp, Homo sapiens
tctatatccttagta

SEQ ID NO: 360044 - DNA, 15 bp, Homo sapiens
ctctatatccttagt

SEQ ID NO: 360045 - DNA, 15 bp, Homo sapiens
cctctatatccttag

SEQ ID NO: 360046 - DNA, 15 bp, Homo sapiens
tcctctatatcctta

SEQ ID NO: 360047 - DNA, 15 bp, Homo sapiens
ttcctctatatcctt

SEQ ID NO: 360048 - DNA, 15 bp, Homo sapiens
tttcctctatatcct

SEQ ID NO: 360049 - DNA, 15 bp, Homo sapiens
ttttcctctatatcc

SEQ ID NO: 360050 - DNA, 15 bp, Homo sapiens
tttttcctctatatc

SEQ ID NO: 360051 - DNA, 15 bp, Homo sapiens
ttttttcctctatat

SEQ ID NO: 360052 - DNA, 15 bp, Homo sapiens
tttttttcctctata

SEQ ID NO: 360053 - DNA, 15 bp, Homo sapiens
atttttttcctctat

SEQ ID NO: 360054 - DNA, 15 bp, Homo sapiens
tatttttttcctcta

SEQ ID NO: 360055 - DNA, 15 bp, Homo sapiens
ttatttttttcctct

SEQ ID NO: 360056 - DNA, 15 bp, Homo sapiens
tttatttttttcctc

SEQ ID NO: 360057 - DNA, 15 bp, Homo sapiens
atttatttttttcct

SEQ ID NO: 360058 - DNA, 15 bp, Homo sapiens
gatttatttttttcc

SEQ ID NO: 360059 - DNA, 15 bp, Homo sapiens
cgatttatttttttc

SEQ ID NO: 360060 - DNA, 15 bp, Homo sapiens
gcgatttattttttt

SEQ ID NO: 360061 - DNA, 15 bp, Homo sapiens
agcgatttatttttt

SEQ ID NO: 360062 - DNA, 15 bp, Homo sapiens
aagcgatttattttt

SEQ ID NO: 360063 - DNA, 15 bp, Homo sapiens
caagcgatttatttt

SEQ ID NO: 360064 - DNA, 15 bp, Homo sapiens
gcaagcgatttattt

SEQ ID NO: 360065 - DNA, 15 bp, Homo sapiens
agcaagcgatttatt

SEQ ID NO: 360066 - DNA, 15 bp, Homo sapiens
aagcaagcgatttat

SEQ ID NO: 360067 - DNA, 15 bp, Homo sapiens
aaagcaagcgattta

SEQ ID NO: 360068 - DNA, 15 bp, Homo sapiens
aaaagcaagcgattt

SEQ ID NO: 360069 - DNA, 15 bp, Homo sapiens
aaaaagcaagcgatt

SEQ ID NO: 360070 - DNA, 15 bp, Homo sapiens
aaaaaagcaagcgat

SEQ ID NO: 360071 - DNA, 15 bp, Homo sapiens
aaaaaaagcaagcga

SEQ ID NO: 360072 - DNA, 15 bp, Homo sapiens
aaaaaaaagcaagcg

SEQ ID NO: 360073 - DNA, 15 bp, Homo sapiens
aaaaaaaaagcaagc

SEQ ID NO: 360074 - DNA, 15 bp, Homo sapiens
aaaaaaaaaagcaag

SEQ ID NO: 360075 - DNA, 15 bp, Homo sapiens
aaaaaaaaaaagcaa

SEQ ID NO: 360076 - DNA, 15 bp, Homo sapiens
aaaaaaaaaaaagca

SEQ ID NO: 360077 - DNA, 15 bp, Homo sapiens
taaaaaaaaaaaagc

SEQ ID NO: 360078 - DNA, 15 bp, Homo sapiens
ttaaaaaaaaaaaag

SEQ ID NO: 360079 - DNA, 15 bp, Homo sapiens
attaaaaaaaaaaaa

SEQ ID NO: 360080 - DNA, 15 bp, Homo sapiens
aattaaaaaaaaaaa

SEQ ID NO: 360081 - DNA, 15 bp, Homo sapiens
caattaaaaaaaaaa

SEQ ID NO: 360082 - DNA, 15 bp, Homo sapiens
gcaattaaaaaaaaa

SEQ ID NO: 360083 - DNA, 15 bp, Homo sapiens
ggcaattaaaaaaaa

SEQ ID NO: 360084 - DNA, 15 bp, Homo sapiens
aggcaattaaaaaaa

SEQ ID NO: 360085 - DNA, 15 bp, Homo sapiens
caggcaattaaaaaa

SEQ ID NO: 360086 - DNA, 15 bp, Homo sapiens
gcaggcaattaaaaa

SEQ ID NO: 360087 - DNA, 15 bp, Homo sapiens
agcaggcaattaaaa

SEQ ID NO: 360088 - DNA, 15 bp, Homo sapiens
aagcaggcaattaaa

SEQ ID NO: 360089 - DNA, 15 bp, Homo sapiens
gaagcaggcaattaa

SEQ ID NO: 360090 - DNA, 15 bp, Homo sapiens
agaagcaggcaatta

SEQ ID NO: 360091 - DNA, 15 bp, Homo sapiens
gagaagcaggcaatt

SEQ ID NO: 360092 - DNA, 15 bp, Homo sapiens
ggagaagcaggcaat

SEQ ID NO: 360093 - DNA, 15 bp, Homo sapiens
gggagaagcaggcaa

SEQ ID NO: 360094 - DNA, 15 bp, Homo sapiens
ggggagaagcaggca

SEQ ID NO: 360095 - DNA, 15 bp, Homo sapiens
tggggagaagcaggc

SEQ ID NO: 360096 - DNA, 15 bp, Homo sapiens
gtggggagaagcagg

SEQ ID NO: 360097 - DNA, 15 bp, Homo sapiens
ggtggggagaagcag

SEQ ID NO: 360098 - DNA, 15 bp, Homo sapiens
gggtggggagaagca

SEQ ID NO: 360099 - DNA, 15 bp, Homo sapiens
ggggtggggagaagc

SEQ ID NO: 360100 - DNA, 15 bp, Homo sapiens
gggggtggggagaag

SEQ ID NO: 360101 - DNA, 15 bp, Homo sapiens
tgggggtggggagaa

SEQ ID NO: 360102 - DNA, 15 bp, Homo sapiens
ttgggggtggggaga

SEQ ID NO: 360103 - DNA, 15 bp, Homo sapiens
tttgggggtggggag

SEQ ID NO: 360104 - DNA, 15 bp, Homo sapiens
atttgggggtgggga

SEQ ID NO: 360105 - DNA, 15 bp, Homo sapiens
aatttgggggtgggg

SEQ ID NO: 360106 - DNA, 15 bp, Homo sapiens
taatttgggggtggg

SEQ ID NO: 360107 - DNA, 15 bp, Homo sapiens
ttaatttgggggtgg

SEQ ID NO: 360108 - DNA, 15 bp, Homo sapiens
cttaatttgggggtg

SEQ ID NO: 360109 - DNA, 15 bp, Homo sapiens
acttaatttgggggt

SEQ ID NO: 360110 - DNA, 15 bp, Homo sapiens
aacttaatttggggg

SEQ ID NO: 360111 - DNA, 15 bp, Homo sapiens
caacttaatttgggg

SEQ ID NO: 360112 - DNA, 15 bp, Homo sapiens
gcaacttaatttggg

SEQ ID NO: 360113 - DNA, 15 bp, Homo sapiens
agcaacttaatttgg

SEQ ID NO: 360114 - DNA, 15 bp, Homo sapiens
aagcaacttaatttg

SEQ ID NO: 360115 - DNA, 15 bp, Homo sapiens
taagcaacttaattt

SEQ ID NO: 360116 - DNA, 15 bp, Homo sapiens
ctaagcaacttaatt

SEQ ID NO: 360117 - DNA, 15 bp, Homo sapiens
gctaagcaacttaat

SEQ ID NO: 360118 - DNA, 15 bp, Homo sapiens
tgctaagcaacttaa

SEQ ID NO: 360119 - DNA, 15 bp, Homo sapiens
ttgctaagcaactta

SEQ ID NO: 360120 - DNA, 15 bp, Homo sapiens
cttgctaagcaactt

SEQ ID NO: 360121 - DNA, 15 bp, Homo sapiens
ccttgctaagcaact

SEQ ID NO: 360122 - DNA, 15 bp, Homo sapiens
cccttgctaagcaac

SEQ ID NO: 360123 - DNA, 15 bp, Homo sapiens
ccccttgctaagcaa

SEQ ID NO: 360124 - DNA, 15 bp, Homo sapiens
cccccttgctaagca

SEQ ID NO: 360125 - DNA, 15 bp, Homo sapiens
tcccccttgctaagc

SEQ ID NO: 360126 - DNA, 15 bp, Homo sapiens
ttcccccttgctaag

SEQ ID NO: 360127 - DNA, 15 bp, Homo sapiens
tttcccccttgctaa

SEQ ID NO: 360128 - DNA, 15 bp, Homo sapiens
ctttcccccttgcta

SEQ ID NO: 360129 - DNA, 15 bp, Homo sapiens
tctttcccccttgct

SEQ ID NO: 360130 - DNA, 15 bp, Homo sapiens
ctctttcccccttgc

SEQ ID NO: 360131 - DNA, 15 bp, Homo sapiens
cctctttcccccttg

SEQ ID NO: 360132 - DNA, 15 bp, Homo sapiens
gcctctttccccctt

SEQ ID NO: 360133 - DNA, 15 bp, Homo sapiens
agcctctttccccct

SEQ ID NO: 360134 - DNA, 15 bp, Homo sapiens
aagcctctttccccc

SEQ ID NO: 360135 - DNA, 15 bp, Homo sapiens
aaagcctctttcccc

SEQ ID NO: 360136 - DNA, 15 bp, Homo sapiens
aaaagcctctttccc

SEQ ID NO: 360137 - DNA, 15 bp, Homo sapiens
aaaaagcctctttcc

SEQ ID NO: 360138 - DNA, 15 bp, Homo sapiens
gaaaaagcctctttc

SEQ ID NO: 360139 - DNA, 15 bp, Homo sapiens
ggaaaaagcctcttt

SEQ ID NO: 360140 - DNA, 15 bp, Homo sapiens
aggaaaaagcctctt

SEQ ID NO: 360141 - DNA, 15 bp, Homo sapiens
aaggaaaaagcctct

SEQ ID NO: 360142 - DNA, 15 bp, Homo sapiens
gaaggaaaaagcctc

SEQ ID NO: 360143 - DNA, 15 bp, Homo sapiens
agaaggaaaaagcct

SEQ ID NO: 360144 - DNA, 15 bp, Homo sapiens
aagaaggaaaaagcc

SEQ ID NO: 360145 - DNA, 15 bp, Homo sapiens
gaagaaggaaaaagc

SEQ ID NO: 360146 - DNA, 15 bp, Homo sapiens
ggaagaaggaaaaag

SEQ ID NO: 360147 - DNA, 15 bp, Homo sapiens
tggaagaaggaaaaa

SEQ ID NO: 360148 - DNA, 15 bp, Homo sapiens
ttggaagaaggaaaa

SEQ ID NO: 360149 - DNA, 15 bp, Homo sapiens
gttggaagaaggaaa

SEQ ID NO: 360150 - DNA, 15 bp, Homo sapiens
tgttggaagaaggaa

SEQ ID NO: 360151 - DNA, 15 bp, Homo sapiens
ctgttggaagaagga

SEQ ID NO: 360152 - DNA, 15 bp, Homo sapiens
gctgttggaagaagg

SEQ ID NO: 360153 - DNA, 15 bp, Homo sapiens
ggctgttggaagaag

SEQ ID NO: 360154 - DNA, 15 bp, Homo sapiens
gggctgttggaagaa

SEQ ID NO: 360155 - DNA, 15 bp, Homo sapiens
tgggctgttggaaga

SEQ ID NO: 360156 - DNA, 15 bp, Homo sapiens
ctgggctgttggaag

SEQ ID NO: 360157 - DNA, 15 bp, Homo sapiens
gctgggctgttggaa

SEQ ID NO: 360158 - DNA, 15 bp, Homo sapiens
ggctgggctgttgga

SEQ ID NO: 360159 - DNA, 15 bp, Homo sapiens
cggctgggctgttgg

SEQ ID NO: 360160 - DNA, 15 bp, Homo sapiens
tcggctgggctgttg

SEQ ID NO: 360161 - DNA, 15 bp, Homo sapiens
ttcggctgggctgtt

SEQ ID NO: 360162 - DNA, 15 bp, Homo sapiens
gttcggctgggctgt

SEQ ID NO: 360163 - DNA, 15 bp, Homo sapiens
cgttcggctgggctg

SEQ ID NO: 360164 - DNA, 15 bp, Homo sapiens
gcgttcggctgggct

SEQ ID NO: 360165 - DNA, 15 bp, Homo sapiens
ggcgttcggctgggc

SEQ ID NO: 360166 - DNA, 15 bp, Homo sapiens
aggcgttcggctggg

SEQ ID NO: 360167 - DNA, 15 bp, Homo sapiens
aaggcgttcggctgg

SEQ ID NO: 360168 - DNA, 15 bp, Homo sapiens
aaaggcgttcggctg

SEQ ID NO: 360169 - DNA, 15 bp, Homo sapiens
gaaaggcgttcggct

SEQ ID NO: 360170 - DNA, 15 bp, Homo sapiens
cgaaaggcgttcggc

SEQ ID NO: 360171 - DNA, 15 bp, Homo sapiens
acgaaaggcgttcgg

SEQ ID NO: 360172 - DNA, 15 bp, Homo sapiens
aacgaaaggcgttcg

SEQ ID NO: 360173 - DNA, 15 bp, Homo sapiens
aaacgaaaggcgttc

SEQ ID NO: 360174 - DNA, 15 bp, Homo sapiens
aaaacgaaaggcgtt

SEQ ID NO: 360175 - DNA, 15 bp, Homo sapiens
aaaaacgaaaggcgt

SEQ ID NO: 360176 - DNA, 15 bp, Homo sapiens
aaaaaacgaaaggcg

SEQ ID NO: 360177 - DNA, 15 bp, Homo sapiens
caaaaaacgaaaggc

SEQ ID NO: 360178 - DNA, 15 bp, Homo sapiens
gcaaaaaacgaaagg

SEQ ID NO: 360179 - DNA, 15 bp, Homo sapiens
ggcaaaaaacgaaag

SEQ ID NO: 360180 - DNA, 15 bp, Homo sapiens
gggcaaaaaacgaaa

SEQ ID NO: 360181 - DNA, 15 bp, Homo sapiens
ggggcaaaaaacgaa

SEQ ID NO: 360182 - DNA, 15 bp, Homo sapiens
gggggcaaaaaacga

SEQ ID NO: 360183 - DNA, 15 bp, Homo sapiens
cgggggcaaaaaacg

SEQ ID NO: 360184 - DNA, 15 bp, Homo sapiens
gcgggggcaaaaaac

SEQ ID NO: 360185 - DNA, 15 bp, Homo sapiens
cgcgggggcaaaaaa

SEQ ID NO: 360186 - DNA, 15 bp, Homo sapiens
ccgcgggggcaaaaa

SEQ ID NO: 360187 - DNA, 15 bp, Homo sapiens
tccgcgggggcaaaa

SEQ ID NO: 360188 - DNA, 15 bp, Homo sapiens
gtccgcgggggcaaa

SEQ ID NO: 360189 - DNA, 15 bp, Homo sapiens
ggtccgcgggggcaa

SEQ ID NO: 360190 - DNA, 15 bp, Homo sapiens
aggtccgcgggggca

SEQ ID NO: 360191 - DNA, 15 bp, Homo sapiens
aaggtccgcgggggc

SEQ ID NO: 360192 - DNA, 15 bp, Homo sapiens
gaaggtccgcggggg

SEQ ID NO: 360193 - DNA, 15 bp, Homo sapiens
ggaaggtccgcgggg

SEQ ID NO: 360194 - DNA, 15 bp, Homo sapiens
tggaaggtccgcggg

SEQ ID NO: 360195 - DNA, 15 bp, Homo sapiens
atggaaggtccgcgg

SEQ ID NO: 360196 - DNA, 15 bp, Homo sapiens
catggaaggtccgcg

SEQ ID NO: 360197 - DNA, 15 bp, Homo sapiens
acatggaaggtccgc

SEQ ID NO: 360198 - DNA, 15 bp, Homo sapiens
tacatggaaggtccg

SEQ ID NO: 360199 - DNA, 15 bp, Homo sapiens
ctacatggaaggtcc

SEQ ID NO: 360200 - DNA, 15 bp, Homo sapiens
cctacatggaaggtc

SEQ ID NO: 360201 - DNA, 15 bp, Homo sapiens
tcctacatggaaggt

SEQ ID NO: 360202 - DNA, 15 bp, Homo sapiens
ttcctacatggaagg

SEQ ID NO: 360203 - DNA, 15 bp, Homo sapiens
cttcctacatggaag

SEQ ID NO: 360204 - DNA, 15 bp, Homo sapiens
gcttcctacatggaa

SEQ ID NO: 360205 - DNA, 15 bp, Homo sapiens
ggcttcctacatgga

SEQ ID NO: 360206 - DNA, 15 bp, Homo sapiens
cggcttcctacatgg

SEQ ID NO: 360207 - DNA, 15 bp, Homo sapiens
tcggcttcctacatg

SEQ ID NO: 360208 - DNA, 15 bp, Homo sapiens
ctcggcttcctacat

SEQ ID NO: 360209 - DNA, 15 bp, Homo sapiens
cctcggcttcctaca

SEQ ID NO: 360210 - DNA, 15 bp, Homo sapiens
gcctcggcttcctac

SEQ ID NO: 360211 - DNA, 15 bp, Homo sapiens
agcctcggcttccta

SEQ ID NO: 360212 - DNA, 15 bp, Homo sapiens
cagcctcggcttcct

SEQ ID NO: 360213 - DNA, 15 bp, Homo sapiens
ccagcctcggcttcc

SEQ ID NO: 360214 - DNA, 15 bp, Homo sapiens
gccagcctcggcttc

SEQ ID NO: 360215 - DNA, 15 bp, Homo sapiens
cgccagcctcggctt

SEQ ID NO: 360216 - DNA, 15 bp, Homo sapiens
tcgccagcctcggct

SEQ ID NO: 360217 - DNA, 15 bp, Homo sapiens
ctcgccagcctcggc

SEQ ID NO: 360218 - DNA, 15 bp, Homo sapiens
gctcgccagcctcgg

SEQ ID NO: 360219 - DNA, 15 bp, Homo sapiens
ggctcgccagcctcg

SEQ ID NO: 360220 - DNA, 15 bp, Homo sapiens
gggctcgccagcctc

SEQ ID NO: 360221 - DNA, 15 bp, Homo sapiens
cgggctcgccagcct

SEQ ID NO: 360222 - DNA, 15 bp, Homo sapiens
tcgggctcgccagcc

SEQ ID NO: 360223 - DNA, 15 bp, Homo sapiens
gtcgggctcgccagc

SEQ ID NO: 360224 - DNA, 15 bp, Homo sapiens
tgtcgggctcgccag

SEQ ID NO: 360225 - DNA, 15 bp, Homo sapiens
atgtcgggctcgcca

SEQ ID NO: 360226 - DNA, 15 bp, Homo sapiens
aatgtcgggctcgcc

SEQ ID NO: 360227 - DNA, 15 bp, Homo sapiens
gaatgtcgggctcgc

SEQ ID NO: 360228 - DNA, 15 bp, Homo sapiens
cgaatgtcgggctcg

SEQ ID NO: 360229 - DNA, 15 bp, Homo sapiens
ccgaatgtcgggctc

SEQ ID NO: 360230 - DNA, 15 bp, Homo sapiens
cccgaatgtcgggct

SEQ ID NO: 360231 - DNA, 15 bp, Homo sapiens
tcccgaatgtcgggc

SEQ ID NO: 360232 - DNA, 15 bp, Homo sapiens
ctcccgaatgtcggg

SEQ ID NO: 360233 - DNA, 15 bp, Homo sapiens
gctcccgaatgtcgg

SEQ ID NO: 360234 - DNA, 15 bp, Homo sapiens
ggctcccgaatgtcg

SEQ ID NO: 360235 - DNA, 15 bp, Homo sapiens
tggctcccgaatgtc

SEQ ID NO: 360236 - DNA, 15 bp, Homo sapiens
gtggctcccgaatgt

SEQ ID NO: 360237 - DNA, 15 bp, Homo sapiens
agtggctcccgaatg

SEQ ID NO: 360238 - DNA, 15 bp, Homo sapiens
cagtggctcccgaat

SEQ ID NO: 360239 - DNA, 15 bp, Homo sapiens
gcagtggctcccgaa

SEQ ID NO: 360240 - DNA, 15 bp, Homo sapiens
cgcagtggctcccga

SEQ ID NO: 360241 - DNA, 15 bp, Homo sapiens
ccgcagtggctcccg

SEQ ID NO: 360242 - DNA, 15 bp, Homo sapiens
cccgcagtggctccc

SEQ ID NO: 360243 - DNA, 15 bp, Homo sapiens
ccccgcagtggctcc

SEQ ID NO: 360244 - DNA, 15 bp, Homo sapiens
cccccgcagtggctc

SEQ ID NO: 360245 - DNA, 15 bp, Homo sapiens
ccccccgcagtggct

SEQ ID NO: 360246 - DNA, 15 bp, Homo sapiens
cccccccgcagtggc

SEQ ID NO: 360247 - DNA, 15 bp, Homo sapiens
gcccccccgcagtgg

SEQ ID NO: 360248 - DNA, 15 bp, Homo sapiens
ggcccccccgcagtg

SEQ ID NO: 360249 - DNA, 15 bp, Homo sapiens
aggcccccccgcagt

SEQ ID NO: 360250 - DNA, 15 bp, Homo sapiens
gaggcccccccgcag

SEQ ID NO: 360251 - DNA, 15 bp, Homo sapiens
agaggcccccccgca

SEQ ID NO: 360252 - DNA, 15 bp, Homo sapiens
aagaggcccccccgc

SEQ ID NO: 360253 - DNA, 15 bp, Homo sapiens
aaagaggcccccccg

SEQ ID NO: 360254 - DNA, 15 bp, Homo sapiens
aaaagaggccccccc

SEQ ID NO: 360255 - DNA, 15 bp, Homo sapiens
aaaaagaggcccccc

SEQ ID NO: 360256 - DNA, 15 bp, Homo sapiens
caaaaagaggccccc

SEQ ID NO: 360257 - DNA, 15 bp, Homo sapiens
ccaaaaagaggcccc

SEQ ID NO: 360258 - DNA, 15 bp, Homo sapiens
cccaaaaagaggccc

SEQ ID NO: 360259 - DNA, 15 bp, Homo sapiens
ccccaaaaagaggcc

SEQ ID NO: 360260 - DNA, 15 bp, Homo sapiens
tccccaaaaagaggc

SEQ ID NO: 360261 - DNA, 15 bp, Homo sapiens
ctccccaaaaagagg

SEQ ID NO: 360262 - DNA, 15 bp, Homo sapiens
cctccccaaaaagag

SEQ ID NO: 360263 - DNA, 15 bp, Homo sapiens
gcctccccaaaaaga

SEQ ID NO: 360264 - DNA, 15 bp, Homo sapiens
cgcctccccaaaaag

SEQ ID NO: 360265 - DNA, 15 bp, Homo sapiens
gcgcctccccaaaaa

SEQ ID NO: 360266 - DNA, 15 bp, Homo sapiens
ggcgcctccccaaaa

SEQ ID NO: 360267 - DNA, 15 bp, Homo sapiens
cggcgcctccccaaa

SEQ ID NO: 360268 - DNA, 15 bp, Homo sapiens
tcggcgcctccccaa

SEQ ID NO: 360269 - DNA, 15 bp, Homo sapiens
gtcggcgcctcccca

SEQ ID NO: 360270 - DNA, 15 bp, Homo sapiens
cgtcggcgcctcccc

SEQ ID NO: 360271 - DNA, 15 bp, Homo sapiens
ccgtcggcgcctccc

SEQ ID NO: 360272 - DNA, 15 bp, Homo sapiens
cccgtcggcgcctcc

SEQ ID NO: 360273 - DNA, 15 bp, Homo sapiens
ccccgtcggcgcctc

SEQ ID NO: 360274 - DNA, 15 bp, Homo sapiens
cccccgtcggcgcct

SEQ ID NO: 360275 - DNA, 15 bp, Homo sapiens
gcccccgtcggcgcc

SEQ ID NO: 360276 - DNA, 15 bp, Homo sapiens
tgcccccgtcggcgc

SEQ ID NO: 360277 - DNA, 15 bp, Homo sapiens
ctgcccccgtcggcg

SEQ ID NO: 360278 - DNA, 15 bp, Homo sapiens
cctgcccccgtcggc

SEQ ID NO: 360279 - DNA, 15 bp, Homo sapiens
gcctgcccccgtcgg

SEQ ID NO: 360280 - DNA, 15 bp, Homo sapiens
agcctgcccccgtcg

SEQ ID NO: 360281 - DNA, 15 bp, Homo sapiens
gagcctgcccccgtc

SEQ ID NO: 360282 - DNA, 15 bp, Homo sapiens
cgagcctgcccccgt

SEQ ID NO: 360283 - DNA, 15 bp, Homo sapiens
ccgagcctgcccccg

SEQ ID NO: 360284 - DNA, 15 bp, Homo sapiens
gccgagcctgccccc

SEQ ID NO: 360285 - DNA, 15 bp, Homo sapiens
ggccgagcctgcccc

SEQ ID NO: 360286 - DNA, 15 bp, Homo sapiens
cggccgagcctgccc

SEQ ID NO: 360287 - DNA, 15 bp, Homo sapiens
acggccgagcctgcc

SEQ ID NO: 360288 - DNA, 15 bp, Homo sapiens
gacggccgagcctgc

SEQ ID NO: 360289 - DNA, 15 bp, Homo sapiens
ggacggccgagcctg

SEQ ID NO: 360290 - DNA, 15 bp, Homo sapiens
gggacggccgagcct

SEQ ID NO: 360291 - DNA, 15 bp, Homo sapiens
ggggacggccgagcc

SEQ ID NO: 360292 - DNA, 15 bp, Homo sapiens
tggggacggccgagc

SEQ ID NO: 360293 - DNA, 15 bp, Homo sapiens
ctggggacggccgag

SEQ ID NO: 360294 - DNA, 15 bp, Homo sapiens
cctggggacggccga

SEQ ID NO: 360295 - DNA, 15 bp, Homo sapiens
ccctggggacggccg

SEQ ID NO: 360296 - DNA, 15 bp, Homo sapiens
tccctggggacggcc

SEQ ID NO: 360297 - DNA, 15 bp, Homo sapiens
ttccctggggacggc

SEQ ID NO: 360298 - DNA, 15 bp, Homo sapiens
cttccctggggacgg

SEQ ID NO: 360299 - DNA, 15 bp, Homo sapiens
gcttccctggggacg

SEQ ID NO: 360300 - DNA, 15 bp, Homo sapiens
cgcttccctggggac

SEQ ID NO: 360301 - DNA, 15 bp, Homo sapiens
ccgcttccctgggga

SEQ ID NO: 360302 - DNA, 15 bp, Homo sapiens
gccgcttccctgggg

SEQ ID NO: 360303 - DNA, 15 bp, Homo sapiens
cgccgcttccctggg

SEQ ID NO: 360304 - DNA, 15 bp, Homo sapiens
ccgccgcttccctgg

SEQ ID NO: 360305 - DNA, 15 bp, Homo sapiens
gccgccgcttccctg

SEQ ID NO: 360306 - DNA, 15 bp, Homo sapiens
ggccgccgcttccct

SEQ ID NO: 360307 - DNA, 15 bp, Homo sapiens
cggccgccgcttccc

SEQ ID NO: 360308 - DNA, 15 bp, Homo sapiens
ccggccgccgcttcc

SEQ ID NO: 360309 - DNA, 15 bp, Homo sapiens
cccggccgccgcttc

SEQ ID NO: 360310 - DNA, 15 bp, Homo sapiens
acccggccgccgctt

SEQ ID NO: 360311 - DNA, 15 bp, Homo sapiens
aacccggccgccgct

SEQ ID NO: 360312 - DNA, 15 bp, Homo sapiens
gaacccggccgccgc

SEQ ID NO: 360313 - DNA, 15 bp, Homo sapiens
ggaacccggccgccg

SEQ ID NO: 360314 - DNA, 15 bp, Homo sapiens
aggaacccggccgcc

SEQ ID NO: 360315 - DNA, 15 bp, Homo sapiens
gaggaacccggccgc

SEQ ID NO: 360316 - DNA, 15 bp, Homo sapiens
ggaggaacccggccg

SEQ ID NO: 360317 - DNA, 15 bp, Homo sapiens
cggaggaacccggcc

SEQ ID NO: 360318 - DNA, 15 bp, Homo sapiens
ccggaggaacccggc

SEQ ID NO: 360319 - DNA, 15 bp, Homo sapiens
cccggaggaacccgg

SEQ ID NO: 360320 - DNA, 15 bp, Homo sapiens
ccccggaggaacccg

SEQ ID NO: 360321 - DNA, 15 bp, Homo sapiens
gccccggaggaaccc

SEQ ID NO: 360322 - DNA, 15 bp, Homo sapiens
cgccccggaggaacc

SEQ ID NO: 360323 - DNA, 15 bp, Homo sapiens
gcgccccggaggaac

SEQ ID NO: 360324 - DNA, 15 bp, Homo sapiens
cgcgccccggaggaa

SEQ ID NO: 360325 - DNA, 15 bp, Homo sapiens
gcgcgccccggagga

SEQ ID NO: 360326 - DNA, 15 bp, Homo sapiens
ggcgcgccccggagg

SEQ ID NO: 360327 - DNA, 15 bp, Homo sapiens
cggcgcgccccggag

SEQ ID NO: 360328 - DNA, 15 bp, Homo sapiens
ccggcgcgccccgga

SEQ ID NO: 360329 - DNA, 15 bp, Homo sapiens
cccggcgcgccccgg

SEQ ID NO: 360330 - DNA, 15 bp, Homo sapiens
ccccggcgcgccccg

SEQ ID NO: 360331 - DNA, 15 bp, Homo sapiens
gccccggcgcgcccc

SEQ ID NO: 360332 - DNA, 15 bp, Homo sapiens
ggccccggcgcgccc

SEQ ID NO: 360333 - DNA, 15 bp, Homo sapiens
cggccccggcgcgcc

SEQ ID NO: 360334 - DNA, 15 bp, Homo sapiens
ccggccccggcgcgc

SEQ ID NO: 360335 - DNA, 15 bp, Homo sapiens
tccggccccggcgcg

SEQ ID NO: 360336 - DNA, 15 bp, Homo sapiens
ctccggccccggcgc

SEQ ID NO: 360337 - DNA, 15 bp, Homo sapiens
tctccggccccggcg

SEQ ID NO: 360338 - DNA, 15 bp, Homo sapiens
ctctccggccccggc

SEQ ID NO: 360339 - DNA, 15 bp, Homo sapiens
gctctccggccccgg

SEQ ID NO: 360340 - DNA, 15 bp, Homo sapiens
ggctctccggccccg

SEQ ID NO: 360341 - DNA, 15 bp, Homo sapiens
cggctctccggcccc

SEQ ID NO: 360342 - DNA, 15 bp, Homo sapiens
gcggctctccggccc

SEQ ID NO: 360343 - DNA, 15 bp, Homo sapiens
cgcggctctccggcc

SEQ ID NO: 360344 - DNA, 15 bp, Homo sapiens
gcgcggctctccggc

SEQ ID NO: 360345 - DNA, 15 bp, Homo sapiens
tgcgcggctctccgg

SEQ ID NO: 360346 - DNA, 15 bp, Homo sapiens
ctgcgcggctctccg

SEQ ID NO: 360347 - DNA, 15 bp, Homo sapiens
cctgcgcggctctcc

SEQ ID NO: 360348 - DNA, 15 bp, Homo sapiens
ccctgcgcggctctc

SEQ ID NO: 360349 - DNA, 15 bp, Homo sapiens
gccctgcgcggctct

SEQ ID NO: 360350 - DNA, 15 bp, Homo sapiens
cgccctgcgcggctc

SEQ ID NO: 360351 - DNA, 15 bp, Homo sapiens
gcgccctgcgcggct

SEQ ID NO: 360352 - DNA, 15 bp, Homo sapiens
cgcgccctgcgcggc

SEQ ID NO: 360353 - DNA, 15 bp, Homo sapiens
ccgcgccctgcgcgg

SEQ ID NO: 360354 - DNA, 15 bp, Homo sapiens
cccgcgccctgcgcg

SEQ ID NO: 360355 - DNA, 15 bp, Homo sapiens
gcccgcgccctgcgc

SEQ ID NO: 360356 - DNA, 15 bp, Homo sapiens
ggcccgcgccctgcg

SEQ ID NO: 360357 - DNA, 15 bp, Homo sapiens
cggcccgcgccctgc

SEQ ID NO: 360358 - DNA, 15 bp, Homo sapiens
gcggcccgcgccctg

SEQ ID NO: 360359 - DNA, 15 bp, Homo sapiens
cgcggcccgcgccct

SEQ ID NO: 360360 - DNA, 15 bp, Homo sapiens
gcgcggcccgcgccc

SEQ ID NO: 360361 - DNA, 15 bp, Homo sapiens
cgcgcggcccgcgcc

SEQ ID NO: 360362 - DNA, 15 bp, Homo sapiens
ccgcgcggcccgcgc

SEQ ID NO: 360363 - DNA, 15 bp, Homo sapiens
cccgcgcggcccgcg

SEQ ID NO: 360364 - DNA, 15 bp, Homo sapiens
ccccgcgcggcccgc

SEQ ID NO: 360365 - DNA, 15 bp, Homo sapiens
accccgcgcggcccg

SEQ ID NO: 360366 - DNA, 15 bp, Homo sapiens
caccccgcgcggccc

SEQ ID NO: 360367 - DNA, 15 bp, Homo sapiens
ccaccccgcgcggcc

SEQ ID NO: 360368 - DNA, 15 bp, Homo sapiens
cccaccccgcgcggc

SEQ ID NO: 360369 - DNA, 15 bp, Homo sapiens
ccccaccccgcgcgg

SEQ ID NO: 360370 - DNA, 15 bp, Homo sapiens
gccccaccccgcgcg

SEQ ID NO: 360371 - DNA, 15 bp, Homo sapiens
tgccccaccccgcgc

SEQ ID NO: 360372 - DNA, 15 bp, Homo sapiens
ctgccccaccccgcg

SEQ ID NO: 360373 - DNA, 15 bp, Homo sapiens
gctgccccaccccgc

SEQ ID NO: 360374 - DNA, 15 bp, Homo sapiens
ggctgccccaccccg

SEQ ID NO: 360375 - DNA, 15 bp, Homo sapiens
cggctgccccacccc

SEQ ID NO: 360376 - DNA, 15 bp, Homo sapiens
ccggctgccccaccc

SEQ ID NO: 360377 - DNA, 15 bp, Homo sapiens
tccggctgccccacc

SEQ ID NO: 360378 - DNA, 15 bp, Homo sapiens
ctccggctgccccac

SEQ ID NO: 360379 - DNA, 15 bp, Homo sapiens
gctccggctgcccca

SEQ ID NO: 360380 - DNA, 15 bp, Homo sapiens
cgctccggctgcccc

SEQ ID NO: 360381 - DNA, 15 bp, Homo sapiens
gcgctccggctgccc

SEQ ID NO: 360382 - DNA, 15 bp, Homo sapiens
tgcgctccggctgcc

SEQ ID NO: 360383 - DNA, 15 bp, Homo sapiens
ctgcgctccggctgc

SEQ ID NO: 360384 - DNA, 15 bp, Homo sapiens
cctgcgctccggctg

SEQ ID NO: 360385 - DNA, 15 bp, Homo sapiens
gcctgcgctccggct

SEQ ID NO: 360386 - DNA, 15 bp, Homo sapiens
ggcctgcgctccggc

SEQ ID NO: 360387 - DNA, 15 bp, Homo sapiens
gggcctgcgctccgg

SEQ ID NO: 360388 - DNA, 15 bp, Homo sapiens
ggggcctgcgctccg

SEQ ID NO: 360389 - DNA, 15 bp, Homo sapiens
gggggcctgcgctcc

SEQ ID NO: 360390 - DNA, 15 bp, Homo sapiens
cgggggcctgcgctc

SEQ ID NO: 360391 - DNA, 15 bp, Homo sapiens
tcgggggcctgcgct

SEQ ID NO: 360392 - DNA, 15 bp, Homo sapiens
atcgggggcctgcgc

SEQ ID NO: 360393 - DNA, 15 bp, Homo sapiens
gatcgggggcctgcg

SEQ ID NO: 360394 - DNA, 15 bp, Homo sapiens
ggatcgggggcctgc

SEQ ID NO: 360395 - DNA, 15 bp, Homo sapiens
gggatcgggggcctg

SEQ ID NO: 360396 - DNA, 15 bp, Homo sapiens
ggggatcgggggcct

SEQ ID NO: 360397 - DNA, 15 bp, Homo sapiens
cggggatcgggggcc

SEQ ID NO: 360398 - DNA, 15 bp, Homo sapiens
ccggggatcgggggc

SEQ ID NO: 360399 - DNA, 15 bp, Homo sapiens
gccggggatcggggg

SEQ ID NO: 360400 - DNA, 15 bp, Homo sapiens
cgccggggatcgggg

SEQ ID NO: 360401 - DNA, 15 bp, Homo sapiens
ccgccggggatcggg

SEQ ID NO: 360402 - DNA, 15 bp, Homo sapiens
cccgccggggatcgg

SEQ ID NO: 360403 - DNA, 15 bp, Homo sapiens
gcccgccggggatcg

SEQ ID NO: 360404 - DNA, 15 bp, Homo sapiens
cgcccgccggggatc

SEQ ID NO: 360405 - DNA, 15 bp, Homo sapiens
gcgcccgccggggat

SEQ ID NO: 360406 - DNA, 15 bp, Homo sapiens
ggcgcccgccgggga

SEQ ID NO: 360407 - DNA, 15 bp, Homo sapiens
gggcgcccgccgggg

SEQ ID NO: 360408 - DNA, 15 bp, Homo sapiens
ggggcgcccgccggg

SEQ ID NO: 360409 - DNA, 15 bp, Homo sapiens
gggggcgcccgccgg

SEQ ID NO: 360410 - DNA, 15 bp, Homo sapiens
cgggggcgcccgccg

SEQ ID NO: 360411 - DNA, 15 bp, Homo sapiens
ccgggggcgcccgcc

SEQ ID NO: 360412 - DNA, 15 bp, Homo sapiens
cccgggggcgcccgc

SEQ ID NO: 360413 - DNA, 15 bp, Homo sapiens
gcccgggggcgcccg

SEQ ID NO: 360414 - DNA, 15 bp, Homo sapiens
ggcccgggggcgccc

SEQ ID NO: 360415 - DNA, 15 bp, Homo sapiens
gggcccgggggcgcc

SEQ ID NO: 360416 - DNA, 15 bp, Homo sapiens
ggggcccgggggcgc

SEQ ID NO: 360417 - DNA, 15 bp, Homo sapiens
gggggcccgggggcg

SEQ ID NO: 360418 - DNA, 15 bp, Homo sapiens
cgggggcccgggggc

SEQ ID NO: 360419 - DNA, 15 bp, Homo sapiens
gcgggggcccggggg

SEQ ID NO: 360420 - DNA, 15 bp, Homo sapiens
cgcgggggcccgggg

SEQ ID NO: 360421 - DNA, 15 bp, Homo sapiens
gcgcgggggcccggg

SEQ ID NO: 360422 - DNA, 15 bp, Homo sapiens
cgcgcgggggcccgg

SEQ ID NO: 360423 - DNA, 15 bp, Homo sapiens
gcgcgcgggggcccg

SEQ ID NO: 360424 - DNA, 15 bp, Homo sapiens
cgcgcgcgggggccc

SEQ ID NO: 360425 - DNA, 15 bp, Homo sapiens
gcgcgcgcgggggcc

SEQ ID NO: 360426 - DNA, 15 bp, Homo sapiens
ggcgcgcgcgggggc

SEQ ID NO: 360427 - DNA, 15 bp, Homo sapiens
gggcgcgcgcggggg

SEQ ID NO: 360428 - DNA, 15 bp, Homo sapiens
ggggcgcgcgcgggg

SEQ ID NO: 360429 - DNA, 15 bp, Homo sapiens
cggggcgcgcgcggg

SEQ ID NO: 360430 - DNA, 15 bp, Homo sapiens
ccggggcgcgcgcgg

SEQ ID NO: 360431 - DNA, 15 bp, Homo sapiens
gccggggcgcgcgcg

SEQ ID NO: 360432 - DNA, 15 bp, Homo sapiens
ggccggggcgcgcgc

SEQ ID NO: 360433 - DNA, 15 bp, Homo sapiens
aggccggggcgcgcg

SEQ ID NO: 360434 - DNA, 15 bp, Homo sapiens
gaggccggggcgcgc

SEQ ID NO: 360435 - DNA, 15 bp, Homo sapiens
ggaggccggggcgcg

SEQ ID NO: 360436 - DNA, 15 bp, Homo sapiens
cggaggccggggcgc

SEQ ID NO: 360437 - DNA, 15 bp, Homo sapiens
ccggaggccggggcg

SEQ ID NO: 360438 - DNA, 15 bp, Homo sapiens
cccggaggccggggc

SEQ ID NO: 360439 - DNA, 15 bp, Homo sapiens
tcccggaggccgggg

SEQ ID NO: 360440 - DNA, 15 bp, Homo sapiens
ctcccggaggccggg

SEQ ID NO: 360441 - DNA, 15 bp, Homo sapiens
tctcccggaggccgg

SEQ ID NO: 360442 - DNA, 15 bp, Homo sapiens
gtctcccggaggccg

SEQ ID NO: 360443 - DNA, 15 bp, Homo sapiens
agtctcccggaggcc

SEQ ID NO: 360444 - DNA, 15 bp, Homo sapiens
cagtctcccggaggc

SEQ ID NO: 360445 - DNA, 15 bp, Homo sapiens
ccagtctcccggagg

SEQ ID NO: 360446 - DNA, 15 bp, Homo sapiens
gccagtctcccggag

SEQ ID NO: 360447 - DNA, 15 bp, Homo sapiens
cgccagtctcccgga

SEQ ID NO: 360448 - DNA, 15 bp, Homo sapiens
gcgccagtctcccgg

SEQ ID NO: 360449 - DNA, 15 bp, Homo sapiens
tgcgccagtctcccg

SEQ ID NO: 360450 - DNA, 15 bp, Homo sapiens
atgcgccagtctccc

SEQ ID NO: 360451 - DNA, 15 bp, Homo sapiens
catgcgccagtctcc

SEQ ID NO: 360452 - DNA, 15 bp, Homo sapiens
gcatgcgccagtctc

SEQ ID NO: 360453 - DNA, 15 bp, Homo sapiens
ggcatgcgccagtct

SEQ ID NO: 360454 - DNA, 15 bp, Homo sapiens
tggcatgcgccagtc

SEQ ID NO: 360455 - DNA, 15 bp, Homo sapiens
gtggcatgcgccagt

SEQ ID NO: 360456 - DNA, 15 bp, Homo sapiens
cgtggcatgcgccag

SEQ ID NO: 360457 - DNA, 15 bp, Homo sapiens
ccgtggcatgcgcca

SEQ ID NO: 360458 - DNA, 15 bp, Homo sapiens
tccgtggcatgcgcc

SEQ ID NO: 360459 - DNA, 15 bp, Homo sapiens
ctccgtggcatgcgc

SEQ ID NO: 360460 - DNA, 15 bp, Homo sapiens
gctccgtggcatgcg

SEQ ID NO: 360461 - DNA, 15 bp, Homo sapiens
cgctccgtggcatgc

SEQ ID NO: 360462 - DNA, 15 bp, Homo sapiens
gcgctccgtggcatg

SEQ ID NO: 360463 - DNA, 15 bp, Homo sapiens
ggcgctccgtggcat

SEQ ID NO: 360464 - DNA, 15 bp, Homo sapiens
gggcgctccgtggca

SEQ ID NO: 360465 - DNA, 15 bp, Homo sapiens
ggggcgctccgtggc

SEQ ID NO: 360466 - DNA, 15 bp, Homo sapiens
aggggcgctccgtgg

SEQ ID NO: 360467 - DNA, 15 bp, Homo sapiens
gaggggcgctccgtg

SEQ ID NO: 360468 - DNA, 15 bp, Homo sapiens
cgaggggcgctccgt

SEQ ID NO: 360469 - DNA, 15 bp, Homo sapiens
ccgaggggcgctccg

SEQ ID NO: 360470 - DNA, 15 bp, Homo sapiens
cccgaggggcgctcc

SEQ ID NO: 360471 - DNA, 15 bp, Homo sapiens
gcccgaggggcgctc

SEQ ID NO: 360472 - DNA, 15 bp, Homo sapiens
ggcccgaggggcgct

SEQ ID NO: 360473 - DNA, 15 bp, Homo sapiens
cggcccgaggggcgc

SEQ ID NO: 360474 - DNA, 15 bp, Homo sapiens
gcggcccgaggggcg

SEQ ID NO: 360475 - DNA, 15 bp, Homo sapiens
ggcggcccgaggggc

SEQ ID NO: 360476 - DNA, 15 bp, Homo sapiens
cggcggcccgagggg

SEQ ID NO: 360477 - DNA, 15 bp, Homo sapiens
gcggcggcccgaggg

SEQ ID NO: 360478 - DNA, 15 bp, Homo sapiens
ggcggcggcccgagg

SEQ ID NO: 360479 - DNA, 15 bp, Homo sapiens
cggcggcggcccgag

SEQ ID NO: 360480 - DNA, 15 bp, Homo sapiens
gcggcggcggcccga

SEQ ID NO: 360481 - DNA, 15 bp, Homo sapiens
agcggcggcggcccg

SEQ ID NO: 360482 - DNA, 15 bp, Homo sapiens
gagcggcggcggccc

SEQ ID NO: 360483 - DNA, 15 bp, Homo sapiens
ggagcggcggcggcc

SEQ ID NO: 360484 - DNA, 15 bp, Homo sapiens
aggagcggcggcggc

SEQ ID NO: 360485 - DNA, 15 bp, Homo sapiens
caggagcggcggcgg

SEQ ID NO: 360486 - DNA, 15 bp, Homo sapiens
gcaggagcggcggcg

SEQ ID NO: 360487 - DNA, 15 bp, Homo sapiens
ggcaggagcggcggc

SEQ ID NO: 360488 - DNA, 15 bp, Homo sapiens
gggcaggagcggcgg

SEQ ID NO: 360489 - DNA, 15 bp, Homo sapiens
cgggcaggagcggcg

SEQ ID NO: 360490 - DNA, 15 bp, Homo sapiens
ccgggcaggagcggc

SEQ ID NO: 360491 - DNA, 15 bp, Homo sapiens
cccgggcaggagcgg

SEQ ID NO: 360492 - DNA, 15 bp, Homo sapiens
gcccgggcaggagcg

SEQ ID NO: 360493 - DNA, 15 bp, Homo sapiens
ggcccgggcaggagc

SEQ ID NO: 360494 - DNA, 15 bp, Homo sapiens
gggcccgggcaggag

SEQ ID NO: 360495 - DNA, 15 bp, Homo sapiens
ggggcccgggcagga

SEQ ID NO: 360496 - DNA, 15 bp, Homo sapiens
aggggcccgggcagg

SEQ ID NO: 360497 - DNA, 15 bp, Homo sapiens
caggggcccgggcag

SEQ ID NO: 360498 - DNA, 15 bp, Homo sapiens
gcaggggcccgggca

SEQ ID NO: 360499 - DNA, 15 bp, Homo sapiens
agcaggggcccgggc

SEQ ID NO: 360500 - DNA, 15 bp, Homo sapiens
cagcaggggcccggg

SEQ ID NO: 360501 - DNA, 15 bp, Homo sapiens
gcagcaggggcccgg

SEQ ID NO: 360502 - DNA, 15 bp, Homo sapiens
agcagcaggggcccg

SEQ ID NO: 360503 - DNA, 15 bp, Homo sapiens
cagcagcaggggccc

SEQ ID NO: 360504 - DNA, 15 bp, Homo sapiens
gcagcagcaggggcc

SEQ ID NO: 360505 - DNA, 15 bp, Homo sapiens
agcagcagcaggggc

SEQ ID NO: 360506 - DNA, 15 bp, Homo sapiens
cagcagcagcagggg

SEQ ID NO: 360507 - DNA, 15 bp, Homo sapiens
gcagcagcagcaggg

SEQ ID NO: 360508 - DNA, 15 bp, Homo sapiens
agcagcagcagcagg

SEQ ID NO: 360509 - DNA, 15 bp, Homo sapiens
cagcagcagcagcag

SEQ ID NO: 360510 - DNA, 15 bp, Homo sapiens
acagcagcagcagca

SEQ ID NO: 360511 - DNA, 15 bp, Homo sapiens
gacagcagcagcagc

SEQ ID NO: 360512 - DNA, 15 bp, Homo sapiens
cgacagcagcagcag

SEQ ID NO: 360513 - DNA, 15 bp, Homo sapiens
gcgacagcagcagca

SEQ ID NO: 360514 - DNA, 15 bp, Homo sapiens
ggcgacagcagcagc

SEQ ID NO: 360515 - DNA, 15 bp, Homo sapiens
aggcgacagcagcag

SEQ ID NO: 360516 - DNA, 15 bp, Homo sapiens
caggcgacagcagca

SEQ ID NO: 360517 - DNA, 15 bp, Homo sapiens
gcaggcgacagcagc

SEQ ID NO: 360518 - DNA, 15 bp, Homo sapiens
cgcaggcgacagcag

SEQ ID NO: 360519 - DNA, 15 bp, Homo sapiens
gcgcaggcgacagca

SEQ ID NO: 360520 - DNA, 15 bp, Homo sapiens
ggcgcaggcgacagc

SEQ ID NO: 360521 - DNA, 15 bp, Homo sapiens
aggcgcaggcgacag

SEQ ID NO: 360522 - DNA, 15 bp, Homo sapiens
caggcgcaggcgaca

SEQ ID NO: 360523 - DNA, 15 bp, Homo sapiens
gcaggcgcaggcgac

SEQ ID NO: 360524 - DNA, 15 bp, Homo sapiens
agcaggcgcaggcga

SEQ ID NO: 360525 - DNA, 15 bp, Homo sapiens
cagcaggcgcaggcg

SEQ ID NO: 360526 - DNA, 15 bp, Homo sapiens
gcagcaggcgcaggc

SEQ ID NO: 360527 - DNA, 15 bp, Homo sapiens
ggcagcaggcgcagg

SEQ ID NO: 360528 - DNA, 15 bp, Homo sapiens
gggcagcaggcgcag

SEQ ID NO: 360529 - DNA, 15 bp, Homo sapiens
ggggcagcaggcgca

SEQ ID NO: 360530 - DNA, 15 bp, Homo sapiens
tggggcagcaggcgc

SEQ ID NO: 360531 - DNA, 15 bp, Homo sapiens
ttggggcagcaggcg

SEQ ID NO: 360532 - DNA, 15 bp, Homo sapiens
gttggggcagcaggc

SEQ ID NO: 360533 - DNA, 15 bp, Homo sapiens
agttggggcagcagg

SEQ ID NO: 360534 - DNA, 15 bp, Homo sapiens
gagttggggcagcag

SEQ ID NO: 360535 - DNA, 15 bp, Homo sapiens
cgagttggggcagca

SEQ ID NO: 360536 - DNA, 15 bp, Homo sapiens
ccgagttggggcagc

SEQ ID NO: 360537 - DNA, 15 bp, Homo sapiens
gccgagttggggcag

SEQ ID NO: 360538 - DNA, 15 bp, Homo sapiens
cgccgagttggggca

SEQ ID NO: 360539 - DNA, 15 bp, Homo sapiens
gcgccgagttggggc

SEQ ID NO: 360540 - DNA, 15 bp, Homo sapiens
ggcgccgagttgggg

SEQ ID NO: 360541 - DNA, 15 bp, Homo sapiens
gggcgccgagttggg

SEQ ID NO: 360542 - DNA, 15 bp, Homo sapiens
cgggcgccgagttgg

SEQ ID NO: 360543 - DNA, 15 bp, Homo sapiens
tcgggcgccgagttg

SEQ ID NO: 360544 - DNA, 15 bp, Homo sapiens
gtcgggcgccgagtt

SEQ ID NO: 360545 - DNA, 15 bp, Homo sapiens
agtcgggcgccgagt

SEQ ID NO: 360546 - DNA, 15 bp, Homo sapiens
aagtcgggcgccgag

SEQ ID NO: 360547 - DNA, 15 bp, Homo sapiens
gaagtcgggcgccga

SEQ ID NO: 360548 - DNA, 15 bp, Homo sapiens
agaagtcgggcgccg

SEQ ID NO: 360549 - DNA, 15 bp, Homo sapiens
aagaagtcgggcgcc

SEQ ID NO: 360550 - DNA, 15 bp, Homo sapiens
gaagaagtcgggcgc

SEQ ID NO: 360551 - DNA, 15 bp, Homo sapiens
tgaagaagtcgggcg

SEQ ID NO: 360552 - DNA, 15 bp, Homo sapiens
atgaagaagtcgggc

SEQ ID NO: 360553 - DNA, 15 bp, Homo sapiens
catgaagaagtcggg

SEQ ID NO: 360554 - DNA, 15 bp, Homo sapiens
ccatgaagaagtcgg

SEQ ID NO: 360555 - DNA, 15 bp, Homo sapiens
accatgaagaagtcg

SEQ ID NO: 360556 - DNA, 15 bp, Homo sapiens
caccatgaagaagtc

SEQ ID NO: 360557 - DNA, 15 bp, Homo sapiens
acaccatgaagaagt

SEQ ID NO: 360558 - DNA, 15 bp, Homo sapiens
cacaccatgaagaag

SEQ ID NO: 360559 - DNA, 15 bp, Homo sapiens
gcacaccatgaagaa

SEQ ID NO: 360560 - DNA, 15 bp, Homo sapiens
cgcacaccatgaaga

SEQ ID NO: 360561 - DNA, 15 bp, Homo sapiens
ccgcacaccatgaag

SEQ ID NO: 360562 - DNA, 15 bp, Homo sapiens
tccgcacaccatgaa

SEQ ID NO: 360563 - DNA, 15 bp, Homo sapiens
ctccgcacaccatga

SEQ ID NO: 360564 - DNA, 15 bp, Homo sapiens
cctccgcacaccatg

SEQ ID NO: 360565 - DNA, 15 bp, Homo sapiens
acctccgcacaccat

SEQ ID NO: 360566 - DNA, 15 bp, Homo sapiens
gacctccgcacacca

SEQ ID NO: 360567 - DNA, 15 bp, Homo sapiens
tgacctccgcacacc

SEQ ID NO: 360568 - DNA, 15 bp, Homo sapiens
atgacctccgcacac

SEQ ID NO: 360569 - DNA, 15 bp, Homo sapiens
catgacctccgcaca

SEQ ID NO: 360570 - DNA, 15 bp, Homo sapiens
acatgacctccgcac

SEQ ID NO: 360571 - DNA, 15 bp, Homo sapiens
aacatgacctccgca

SEQ ID NO: 360572 - DNA, 15 bp, Homo sapiens
gaacatgacctccgc

SEQ ID NO: 360573 - DNA, 15 bp, Homo sapiens
cgaacatgacctccg

SEQ ID NO: 360574 - DNA, 15 bp, Homo sapiens
gcgaacatgacctcc

SEQ ID NO: 360575 - DNA, 15 bp, Homo sapiens
agcgaacatgacctc

SEQ ID NO: 360576 - DNA, 15 bp, Homo sapiens
gagcgaacatgacct

SEQ ID NO: 360577 - DNA, 15 bp, Homo sapiens
ggagcgaacatgacc

SEQ ID NO: 360578 - DNA, 15 bp, Homo sapiens
aggagcgaacatgac

SEQ ID NO: 360579 - DNA, 15 bp, Homo sapiens
aaggagcgaacatga

SEQ ID NO: 360580 - DNA, 15 bp, Homo sapiens
taaggagcgaacatg

SEQ ID NO: 360581 - DNA, 15 bp, Homo sapiens
ctaaggagcgaacat

SEQ ID NO: 360582 - DNA, 15 bp, Homo sapiens
gctaaggagcgaaca

SEQ ID NO: 360583 - DNA, 15 bp, Homo sapiens
tgctaaggagcgaac

SEQ ID NO: 360584 - DNA, 15 bp, Homo sapiens
ctgctaaggagcgaa

SEQ ID NO: 360585 - DNA, 15 bp, Homo sapiens
cctgctaaggagcga

SEQ ID NO: 360586 - DNA, 15 bp, Homo sapiens
gcctgctaaggagcg

SEQ ID NO: 360587 - DNA, 15 bp, Homo sapiens
tgcctgctaaggagc

SEQ ID NO: 360588 - DNA, 15 bp, Homo sapiens
ttgcctgctaaggag

SEQ ID NO: 360589 - DNA, 15 bp, Homo sapiens
tttgcctgctaagga

SEQ ID NO: 360590 - DNA, 15 bp, Homo sapiens
gtttgcctgctaagg

SEQ ID NO: 360591 - DNA, 15 bp, Homo sapiens
cgtttgcctgctaag

SEQ ID NO: 360592 - DNA, 15 bp, Homo sapiens
tcgtttgcctgctaa

SEQ ID NO: 360593 - DNA, 15 bp, Homo sapiens
gtcgtttgcctgcta

SEQ ID NO: 360594 - DNA, 15 bp, Homo sapiens
agtcgtttgcctgct

SEQ ID NO: 360595 - DNA, 15 bp, Homo sapiens
aagtcgtttgcctgc

SEQ ID NO: 360596 - DNA, 15 bp, Homo sapiens
aaagtcgtttgcctg

SEQ ID NO: 360597 - DNA, 15 bp, Homo sapiens
aaaagtcgtttgcct

SEQ ID NO: 360598 - DNA, 15 bp, Homo sapiens
gaaaagtcgtttgcc

SEQ ID NO: 360599 - DNA, 15 bp, Homo sapiens
agaaaagtcgtttgc

SEQ ID NO: 360600 - DNA, 15 bp, Homo sapiens
gagaaaagtcgtttg

SEQ ID NO: 360601 - DNA, 15 bp, Homo sapiens
ggagaaaagtcgttt

SEQ ID NO: 360602 - DNA, 15 bp, Homo sapiens
aggagaaaagtcgtt

SEQ ID NO: 360603 - DNA, 15 bp, Homo sapiens
gaggagaaaagtcgt

SEQ ID NO: 360604 - DNA, 15 bp, Homo sapiens
cgaggagaaaagtcg

SEQ ID NO: 360605 - DNA, 15 bp, Homo sapiens
gcgaggagaaaagtc

SEQ ID NO: 360606 - DNA, 15 bp, Homo sapiens
ggcgaggagaaaagt

SEQ ID NO: 360607 - DNA, 15 bp, Homo sapiens
aggcgaggagaaaag

SEQ ID NO: 360608 - DNA, 15 bp, Homo sapiens
gaggcgaggagaaaa

SEQ ID NO: 360609 - DNA, 15 bp, Homo sapiens
ggaggcgaggagaaa

SEQ ID NO: 360610 - DNA, 15 bp, Homo sapiens
aggaggcgaggagaa

SEQ ID NO: 360611 - DNA, 15 bp, Homo sapiens
gaggaggcgaggaga

SEQ ID NO: 360612 - DNA, 15 bp, Homo sapiens
cgaggaggcgaggag

SEQ ID NO: 360613 - DNA, 15 bp, Homo sapiens
gcgaggaggcgagga

SEQ ID NO: 360614 - DNA, 15 bp, Homo sapiens
ggcgaggaggcgagg

SEQ ID NO: 360615 - DNA, 15 bp, Homo sapiens
gggcgaggaggcgag

SEQ ID NO: 360616 - DNA, 15 bp, Homo sapiens
ggggcgaggaggcga

SEQ ID NO: 360617 - DNA, 15 bp, Homo sapiens
cggggcgaggaggcg

SEQ ID NO: 360618 - DNA, 15 bp, Homo sapiens
gcggggcgaggaggc

SEQ ID NO: 360619 - DNA, 15 bp, Homo sapiens
tgcggggcgaggagg

SEQ ID NO: 360620 - DNA, 15 bp, Homo sapiens
atgcggggcgaggag

SEQ ID NO: 360621 - DNA, 15 bp, Homo sapiens
catgcggggcgagga

SEQ ID NO: 360622 - DNA, 15 bp, Homo sapiens
acatgcggggcgagg

SEQ ID NO: 360623 - DNA, 15 bp, Homo sapiens
aacatgcggggcgag

SEQ ID NO: 360624 - DNA, 15 bp, Homo sapiens
gaacatgcggggcga

SEQ ID NO: 360625 - DNA, 15 bp, Homo sapiens
tgaacatgcggggcg

SEQ ID NO: 360626 - DNA, 15 bp, Homo sapiens
ctgaacatgcggggc

SEQ ID NO: 360627 - DNA, 15 bp, Homo sapiens
cctgaacatgcgggg

SEQ ID NO: 360628 - DNA, 15 bp, Homo sapiens
tcctgaacatgcggg

SEQ ID NO: 360629 - DNA, 15 bp, Homo sapiens
gtcctgaacatgcgg

SEQ ID NO: 360630 - DNA, 15 bp, Homo sapiens
ggtcctgaacatgcg

SEQ ID NO: 360631 - DNA, 15 bp, Homo sapiens
tggtcctgaacatgc

SEQ ID NO: 360632 - DNA, 15 bp, Homo sapiens
ttggtcctgaacatg

SEQ ID NO: 360633 - DNA, 15 bp, Homo sapiens
tttggtcctgaacat

SEQ ID NO: 360634 - DNA, 15 bp, Homo sapiens
gtttggtcctgaaca

SEQ ID NO: 360635 - DNA, 15 bp, Homo sapiens
cgtttggtcctgaac

SEQ ID NO: 360636 - DNA, 15 bp, Homo sapiens
tcgtttggtcctgaa

SEQ ID NO: 360637 - DNA, 15 bp, Homo sapiens
atcgtttggtcctga

SEQ ID NO: 360638 - DNA, 15 bp, Homo sapiens
gatcgtttggtcctg

SEQ ID NO: 360639 - DNA, 15 bp, Homo sapiens
agatcgtttggtcct

SEQ ID NO: 360640 - DNA, 15 bp, Homo sapiens
cagatcgtttggtcc

SEQ ID NO: 360641 - DNA, 15 bp, Homo sapiens
gcagatcgtttggtc

SEQ ID NO: 360642 - DNA, 15 bp, Homo sapiens
cgcagatcgtttggt

SEQ ID NO: 360643 - DNA, 15 bp, Homo sapiens
gcgcagatcgtttgg

SEQ ID NO: 360644 - DNA, 15 bp, Homo sapiens
agcgcagatcgtttg

SEQ ID NO: 360645 - DNA, 15 bp, Homo sapiens
gagcgcagatcgttt

SEQ ID NO: 360646 - DNA, 15 bp, Homo sapiens
cgagcgcagatcgtt

SEQ ID NO: 360647 - DNA, 15 bp, Homo sapiens
acgagcgcagatcgt

SEQ ID NO: 360648 - DNA, 15 bp, Homo sapiens
gacgagcgcagatcg

SEQ ID NO: 360649 - DNA, 15 bp, Homo sapiens
ggacgagcgcagatc

SEQ ID NO: 360650 - DNA, 15 bp, Homo sapiens
cggacgagcgcagat

SEQ ID NO: 360651 - DNA, 15 bp, Homo sapiens
ccggacgagcgcaga

SEQ ID NO: 360652 - DNA, 15 bp, Homo sapiens
gccggacgagcgcag

SEQ ID NO: 360653 - DNA, 15 bp, Homo sapiens
cgccggacgagcgca

SEQ ID NO: 360654 - DNA, 15 bp, Homo sapiens
acgccggacgagcgc

SEQ ID NO: 360655 - DNA, 15 bp, Homo sapiens
gacgccggacgagcg

SEQ ID NO: 360656 - DNA, 15 bp, Homo sapiens
agacgccggacgagc

SEQ ID NO: 360657 - DNA, 15 bp, Homo sapiens
gagacgccggacgag

SEQ ID NO: 360658 - DNA, 15 bp, Homo sapiens
agagacgccggacga

SEQ ID NO: 360659 - DNA, 15 bp, Homo sapiens
cagagacgccggacg

SEQ ID NO: 360660 - DNA, 15 bp, Homo sapiens
ccagagacgccggac

SEQ ID NO: 360661 - DNA, 15 bp, Homo sapiens
tccagagacgccgga

SEQ ID NO: 360662 - DNA, 15 bp, Homo sapiens
ctccagagacgccgg

SEQ ID NO: 360663 - DNA, 15 bp, Homo sapiens
cctccagagacgccg

SEQ ID NO: 360664 - DNA, 15 bp, Homo sapiens
tcctccagagacgcc

SEQ ID NO: 360665 - DNA, 15 bp, Homo sapiens
ctcctccagagacgc

SEQ ID NO: 360666 - DNA, 15 bp, Homo sapiens
gctcctccagagacg

SEQ ID NO: 360667 - DNA, 15 bp, Homo sapiens
ggctcctccagagac

SEQ ID NO: 360668 - DNA, 15 bp, Homo sapiens
cggctcctccagaga

SEQ ID NO: 360669 - DNA, 15 bp, Homo sapiens
acggctcctccagag

SEQ ID NO: 360670 - DNA, 15 bp, Homo sapiens
cacggctcctccaga

SEQ ID NO: 360671 - DNA, 15 bp, Homo sapiens
gcacggctcctccag

SEQ ID NO: 360672 - DNA, 15 bp, Homo sapiens
cgcacggctcctcca

SEQ ID NO: 360673 - DNA, 15 bp, Homo sapiens
gcgcacggctcctcc

SEQ ID NO: 360674 - DNA, 15 bp, Homo sapiens
ggcgcacggctcctc

SEQ ID NO: 360675 - DNA, 15 bp, Homo sapiens
gggcgcacggctcct

SEQ ID NO: 360676 - DNA, 15 bp, Homo sapiens
cgggcgcacggctcc

SEQ ID NO: 360677 - DNA, 15 bp, Homo sapiens
ccgggcgcacggctc

SEQ ID NO: 360678 - DNA, 15 bp, Homo sapiens
gccgggcgcacggct

SEQ ID NO: 360679 - DNA, 15 bp, Homo sapiens
cgccgggcgcacggc

SEQ ID NO: 360680 - DNA, 15 bp, Homo sapiens
ccgccgggcgcacgg

SEQ ID NO: 360681 - DNA, 15 bp, Homo sapiens
gccgccgggcgcacg

SEQ ID NO: 360682 - DNA, 15 bp, Homo sapiens
cgccgccgggcgcac

SEQ ID NO: 360683 - DNA, 15 bp, Homo sapiens
tcgccgccgggcgca

SEQ ID NO: 360684 - DNA, 15 bp, Homo sapiens
ctcgccgccgggcgc

SEQ ID NO: 360685 - DNA, 15 bp, Homo sapiens
cctcgccgccgggcg

SEQ ID NO: 360686 - DNA, 15 bp, Homo sapiens
tcctcgccgccgggc

SEQ ID NO: 360687 - DNA, 15 bp, Homo sapiens
gtcctcgccgccggg

SEQ ID NO: 360688 - DNA, 15 bp, Homo sapiens
cgtcctcgccgccgg

SEQ ID NO: 360689 - DNA, 15 bp, Homo sapiens
tcgtcctcgccgccg

SEQ ID NO: 360690 - DNA, 15 bp, Homo sapiens
ctcgtcctcgccgcc

SEQ ID NO: 360691 - DNA, 15 bp, Homo sapiens
cctcgtcctcgccgc

SEQ ID NO: 360692 - DNA, 15 bp, Homo sapiens
tcctcgtcctcgccg

SEQ ID NO: 360693 - DNA, 15 bp, Homo sapiens
ctcctcgtcctcgcc

SEQ ID NO: 360694 - DNA, 15 bp, Homo sapiens
cctcctcgtcctcgc

SEQ ID NO: 360695 - DNA, 15 bp, Homo sapiens
tcctcctcgtcctcg

SEQ ID NO: 360696 - DNA, 15 bp, Homo sapiens
ctcctcctcgtcctc

SEQ ID NO: 360697 - DNA, 15 bp, Homo sapiens
cctcctcctcgtcct

SEQ ID NO: 360698 - DNA, 15 bp, Homo sapiens
ccctcctcctcgtcc

SEQ ID NO: 360699 - DNA, 15 bp, Homo sapiens
gccctcctcctcgtc

SEQ ID NO: 360700 - DNA, 15 bp, Homo sapiens
cgccctcctcctcgt

SEQ ID NO: 360701 - DNA, 15 bp, Homo sapiens
gcgccctcctcctcg

SEQ ID NO: 360702 - DNA, 15 bp, Homo sapiens
tgcgccctcctcctc

SEQ ID NO: 360703 - DNA, 15 bp, Homo sapiens
ctgcgccctcctcct

SEQ ID NO: 360704 - DNA, 15 bp, Homo sapiens
cctgcgccctcctcc

SEQ ID NO: 360705 - DNA, 15 bp, Homo sapiens
ccctgcgccctcctc

SEQ ID NO: 360706 - DNA, 15 bp, Homo sapiens
cccctgcgccctcct

SEQ ID NO: 360707 - DNA, 15 bp, Homo sapiens
ccccctgcgccctcc

SEQ ID NO: 360708 - DNA, 15 bp, Homo sapiens
tccccctgcgccctc

SEQ ID NO: 360709 - DNA, 15 bp, Homo sapiens
ctccccctgcgccct

SEQ ID NO: 360710 - DNA, 15 bp, Homo sapiens
cctccccctgcgccc

SEQ ID NO: 360711 - DNA, 15 bp, Homo sapiens
acctccccctgcgcc

SEQ ID NO: 360712 - DNA, 15 bp, Homo sapiens
cacctccccctgcgc

SEQ ID NO: 360713 - DNA, 15 bp, Homo sapiens
ccacctccccctgcg

SEQ ID NO: 360714 - DNA, 15 bp, Homo sapiens
tccacctccccctgc

SEQ ID NO: 360715 - DNA, 15 bp, Homo sapiens
ctccacctccccctg

SEQ ID NO: 360716 - DNA, 15 bp, Homo sapiens
cctccacctccccct

SEQ ID NO: 360717 - DNA, 15 bp, Homo sapiens
tcctccacctccccc

SEQ ID NO: 360718 - DNA, 15 bp, Homo sapiens
ctcctccacctcccc

SEQ ID NO: 360719 - DNA, 15 bp, Homo sapiens
cctcctccacctccc

SEQ ID NO: 360720 - DNA, 15 bp, Homo sapiens
tcctcctccacctcc

SEQ ID NO: 360721 - DNA, 15 bp, Homo sapiens
ctcctcctccacctc

SEQ ID NO: 360722 - DNA, 15 bp, Homo sapiens
cctcctcctccacct

SEQ ID NO: 360723 - DNA, 15 bp, Homo sapiens
gcctcctcctccacc

SEQ ID NO: 360724 - DNA, 15 bp, Homo sapiens
cgcctcctcctccac

SEQ ID NO: 360725 - DNA, 15 bp, Homo sapiens
tcgcctcctcctcca

SEQ ID NO: 360726 - DNA, 15 bp, Homo sapiens
ctcgcctcctcctcc

SEQ ID NO: 360727 - DNA, 15 bp, Homo sapiens
gctcgcctcctcctc

SEQ ID NO: 360728 - DNA, 15 bp, Homo sapiens
agctcgcctcctcct

SEQ ID NO: 360729 - DNA, 15 bp, Homo sapiens
cagctcgcctcctcc

SEQ ID NO: 360730 - DNA, 15 bp, Homo sapiens
gcagctcgcctcctc

SEQ ID NO: 360731 - DNA, 15 bp, Homo sapiens
cgcagctcgcctcct

SEQ ID NO: 360732 - DNA, 15 bp, Homo sapiens
ccgcagctcgcctcc

SEQ ID NO: 360733 - DNA, 15 bp, Homo sapiens
cccgcagctcgcctc

SEQ ID NO: 360734 - DNA, 15 bp, Homo sapiens
ccccgcagctcgcct

SEQ ID NO: 360735 - DNA, 15 bp, Homo sapiens
tccccgcagctcgcc

SEQ ID NO: 360736 - DNA, 15 bp, Homo sapiens
ctccccgcagctcgc

SEQ ID NO: 360737 - DNA, 15 bp, Homo sapiens
tctccccgcagctcg

SEQ ID NO: 360738 - DNA, 15 bp, Homo sapiens
ttctccccgcagctc

SEQ ID NO: 360739 - DNA, 15 bp, Homo sapiens
cttctccccgcagct

SEQ ID NO: 360740 - DNA, 15 bp, Homo sapiens
ccttctccccgcagc

SEQ ID NO: 360741 - DNA, 15 bp, Homo sapiens
cccttctccccgcag

SEQ ID NO: 360742 - DNA, 15 bp, Homo sapiens
ccccttctccccgca

SEQ ID NO: 360743 - DNA, 15 bp, Homo sapiens
gccccttctccccgc

SEQ ID NO: 360744 - DNA, 15 bp, Homo sapiens
cgccccttctccccg

SEQ ID NO: 360745 - DNA, 15 bp, Homo sapiens
tcgccccttctcccc

SEQ ID NO: 360746 - DNA, 15 bp, Homo sapiens
gtcgccccttctccc

SEQ ID NO: 360747 - DNA, 15 bp, Homo sapiens
cgtcgccccttctcc

SEQ ID NO: 360748 - DNA, 15 bp, Homo sapiens
ccgtcgccccttctc

SEQ ID NO: 360749 - DNA, 15 bp, Homo sapiens
tccgtcgccccttct

SEQ ID NO: 360750 - DNA, 15 bp, Homo sapiens
gtccgtcgccccttc

SEQ ID NO: 360751 - DNA, 15 bp, Homo sapiens
tgtccgtcgcccctt

SEQ ID NO: 360752 - DNA, 15 bp, Homo sapiens
ctgtccgtcgcccct

SEQ ID NO: 360753 - DNA, 15 bp, Homo sapiens
gctgtccgtcgcccc

SEQ ID NO: 360754 - DNA, 15 bp, Homo sapiens
ggctgtccgtcgccc

SEQ ID NO: 360755 - DNA, 15 bp, Homo sapiens
cggctgtccgtcgcc

SEQ ID NO: 360756 - DNA, 15 bp, Homo sapiens
tcggctgtccgtcgc

SEQ ID NO: 360757 - DNA, 15 bp, Homo sapiens
ctcggctgtccgtcg

SEQ ID NO: 360758 - DNA, 15 bp, Homo sapiens
gctcggctgtccgtc

SEQ ID NO: 360759 - DNA, 15 bp, Homo sapiens
cgctcggctgtccgt

SEQ ID NO: 360760 - DNA, 15 bp, Homo sapiens
gcgctcggctgtccg

SEQ ID NO: 360761 - DNA, 15 bp, Homo sapiens
tgcgctcggctgtcc

SEQ ID NO: 360762 - DNA, 15 bp, Homo sapiens
atgcgctcggctgtc

SEQ ID NO: 360763 - DNA, 15 bp, Homo sapiens
catgcgctcggctgt

SEQ ID NO: 360764 - DNA, 15 bp, Homo sapiens
ccatgcgctcggctg

SEQ ID NO: 360765 - DNA, 15 bp, Homo sapiens
cccatgcgctcggct

SEQ ID NO: 360766 - DNA, 15 bp, Homo sapiens
ccccatgcgctcggc

SEQ ID NO: 360767 - DNA, 15 bp, Homo sapiens
gccccatgcgctcgg

SEQ ID NO: 360768 - DNA, 15 bp, Homo sapiens
ggccccatgcgctcg

SEQ ID NO: 360769 - DNA, 15 bp, Homo sapiens
cggccccatgcgctc

SEQ ID NO: 360770 - DNA, 15 bp, Homo sapiens
ccggccccatgcgct

SEQ ID NO: 360771 - DNA, 15 bp, Homo sapiens
accggccccatgcgc

SEQ ID NO: 360772 - DNA, 15 bp, Homo sapiens
caccggccccatgcg

SEQ ID NO: 360773 - DNA, 15 bp, Homo sapiens
ccaccggccccatgc

SEQ ID NO: 360774 - DNA, 15 bp, Homo sapiens
gccaccggccccatg

SEQ ID NO: 360775 - DNA, 15 bp, Homo sapiens
cgccaccggccccat

SEQ ID NO: 360776 - DNA, 15 bp, Homo sapiens
ccgccaccggcccca

SEQ ID NO: 360777 - DNA, 15 bp, Homo sapiens
gccgccaccggcccc

SEQ ID NO: 360778 - DNA, 15 bp, Homo sapiens
cgccgccaccggccc

SEQ ID NO: 360779 - DNA, 15 bp, Homo sapiens
ccgccgccaccggcc

SEQ ID NO: 360780 - DNA, 15 bp, Homo sapiens
gccgccgccaccggc

SEQ ID NO: 360781 - DNA, 15 bp, Homo sapiens
ggccgccgccaccgg

SEQ ID NO: 360782 - DNA, 15 bp, Homo sapiens
gggccgccgccaccg

SEQ ID NO: 360783 - DNA, 15 bp, Homo sapiens
cgggccgccgccacc

SEQ ID NO: 360784 - DNA, 15 bp, Homo sapiens
ccgggccgccgccac

SEQ ID NO: 360785 - DNA, 15 bp, Homo sapiens
cccgggccgccgcca

SEQ ID NO: 360786 - DNA, 15 bp, Homo sapiens
gcccgggccgccgcc

SEQ ID NO: 360787 - DNA, 15 bp, Homo sapiens
tgcccgggccgccgc

SEQ ID NO: 360788 - DNA, 15 bp, Homo sapiens
ctgcccgggccgccg

SEQ ID NO: 360789 - DNA, 15 bp, Homo sapiens
cctgcccgggccgcc

SEQ ID NO: 360790 - DNA, 15 bp, Homo sapiens
ccctgcccgggccgc

SEQ ID NO: 360791 - DNA, 15 bp, Homo sapiens
gccctgcccgggccg

SEQ ID NO: 360792 - DNA, 15 bp, Homo sapiens
agccctgcccgggcc

SEQ ID NO: 360793 - DNA, 15 bp, Homo sapiens
cagccctgcccgggc

SEQ ID NO: 360794 - DNA, 15 bp, Homo sapiens
ccagccctgcccggg

SEQ ID NO: 360795 - DNA, 15 bp, Homo sapiens
tccagccctgcccgg

SEQ ID NO: 360796 - DNA, 15 bp, Homo sapiens
atccagccctgcccg

SEQ ID NO: 360797 - DNA, 15 bp, Homo sapiens
catccagccctgccc

SEQ ID NO: 360798 - DNA, 15 bp, Homo sapiens
gcatccagccctgcc

SEQ ID NO: 360799 - DNA, 15 bp, Homo sapiens
agcatccagccctgc

SEQ ID NO: 360800 - DNA, 15 bp, Homo sapiens
cagcatccagccctg

SEQ ID NO: 360801 - DNA, 15 bp, Homo sapiens
gcagcatccagccct

SEQ ID NO: 360802 - DNA, 15 bp, Homo sapiens
ggcagcatccagccc

SEQ ID NO: 360803 - DNA, 15 bp, Homo sapiens
aggcagcatccagcc

SEQ ID NO: 360804 - DNA, 15 bp, Homo sapiens
caggcagcatccagc

SEQ ID NO: 360805 - DNA, 15 bp, Homo sapiens
ccaggcagcatccag

SEQ ID NO: 360806 - DNA, 15 bp, Homo sapiens
cccaggcagcatcca

SEQ ID NO: 360807 - DNA, 15 bp, Homo sapiens
gcccaggcagcatcc

SEQ ID NO: 360808 - DNA, 15 bp, Homo sapiens
tgcccaggcagcatc

SEQ ID NO: 360809 - DNA, 15 bp, Homo sapiens
ttgcccaggcagcat

SEQ ID NO: 360810 - DNA, 15 bp, Homo sapiens
cttgcccaggcagca

SEQ ID NO: 360811 - DNA, 15 bp, Homo sapiens
ccttgcccaggcagc

SEQ ID NO: 360812 - DNA, 15 bp, Homo sapiens
gccttgcccaggcag

SEQ ID NO: 360813 - DNA, 15 bp, Homo sapiens
cgccttgcccaggca

SEQ ID NO: 360814 - DNA, 15 bp, Homo sapiens
ccgccttgcccaggc

SEQ ID NO: 360815 - DNA, 15 bp, Homo sapiens
accgccttgcccagg

SEQ ID NO: 360816 - DNA, 15 bp, Homo sapiens
caccgccttgcccag

SEQ ID NO: 360817 - DNA, 15 bp, Homo sapiens
gcaccgccttgccca

SEQ ID NO: 360818 - DNA, 15 bp, Homo sapiens
cgcaccgccttgccc

SEQ ID NO: 360819 - DNA, 15 bp, Homo sapiens
tcgcaccgccttgcc

SEQ ID NO: 360820 - DNA, 15 bp, Homo sapiens
ctcgcaccgccttgc

SEQ ID NO: 360821 - DNA, 15 bp, Homo sapiens
cctcgcaccgccttg

SEQ ID NO: 360822 - DNA, 15 bp, Homo sapiens
acctcgcaccgcctt

SEQ ID NO: 360823 - DNA, 15 bp, Homo sapiens
cacctcgcaccgcct

SEQ ID NO: 360824 - DNA, 15 bp, Homo sapiens
gcacctcgcaccgcc

SEQ ID NO: 360825 - DNA, 15 bp, Homo sapiens
ggcacctcgcaccgc

SEQ ID NO: 360826 - DNA, 15 bp, Homo sapiens
tggcacctcgcaccg

SEQ ID NO: 360827 - DNA, 15 bp, Homo sapiens
ttggcacctcgcacc

SEQ ID NO: 360828 - DNA, 15 bp, Homo sapiens
tttggcacctcgcac

SEQ ID NO: 360829 - DNA, 15 bp, Homo sapiens
ctttggcacctcgca

SEQ ID NO: 360830 - DNA, 15 bp, Homo sapiens
cctttggcacctcgc

SEQ ID NO: 360831 - DNA, 15 bp, Homo sapiens
acctttggcacctcg

SEQ ID NO: 360832 - DNA, 15 bp, Homo sapiens
gacctttggcacctc

SEQ ID NO: 360833 - DNA, 15 bp, Homo sapiens
tgacctttggcacct

SEQ ID NO: 360834 - DNA, 15 bp, Homo sapiens
gtgacctttggcacc

SEQ ID NO: 360835 - DNA, 15 bp, Homo sapiens
ggtgacctttggcac

SEQ ID NO: 360836 - DNA, 15 bp, Homo sapiens
tggtgacctttggca

SEQ ID NO: 360837 - DNA, 15 bp, Homo sapiens
gtggtgacctttggc

SEQ ID NO: 360838 - DNA, 15 bp, Homo sapiens
ggtggtgacctttgg

SEQ ID NO: 360839 - DNA, 15 bp, Homo sapiens
tggtggtgacctttg

SEQ ID NO: 360840 - DNA, 15 bp, Homo sapiens
atggtggtgaccttt

SEQ ID NO: 360841 - DNA, 15 bp, Homo sapiens
gatggtggtgacctt

SEQ ID NO: 360842 - DNA, 15 bp, Homo sapiens
ggatggtggtgacct

SEQ ID NO: 360843 - DNA, 15 bp, Homo sapiens
gggatggtggtgacc

SEQ ID NO: 360844 - DNA, 15 bp, Homo sapiens
ggggatggtggtgac

SEQ ID NO: 360845 - DNA, 15 bp, Homo sapiens
tggggatggtggtga

SEQ ID NO: 360846 - DNA, 15 bp, Homo sapiens
acccagccacaacag

SEQ ID NO: 360847 - DNA, 15 bp, Homo sapiens
aacccagccacaaca

SEQ ID NO: 360848 - DNA, 15 bp, Homo sapiens
aaacccagccacaac

SEQ ID NO: 360849 - DNA, 15 bp, Homo sapiens
aaaacccagccacaa

SEQ ID NO: 360850 - DNA, 15 bp, Homo sapiens
aaaaacccagccaca

SEQ ID NO: 360851 - DNA, 15 bp, Homo sapiens
aaaaaacccagccac

SEQ ID NO: 360852 - DNA, 15 bp, Homo sapiens
caaaaaacccagcca

SEQ ID NO: 360853 - DNA, 15 bp, Homo sapiens
gcaaaaaacccagcc

SEQ ID NO: 360854 - DNA, 15 bp, Homo sapiens
agcaaaaaacccagc

SEQ ID NO: 360855 - DNA, 15 bp, Homo sapiens
cagcaaaaaacccag

SEQ ID NO: 360856 - DNA, 15 bp, Homo sapiens
acagcaaaaaaccca

SEQ ID NO: 360857 - DNA, 15 bp, Homo sapiens
aacagcaaaaaaccc

SEQ ID NO: 360858 - DNA, 15 bp, Homo sapiens
aaacagcaaaaaacc

SEQ ID NO: 360859 - DNA, 15 bp, Homo sapiens
aaaacagcaaaaaac

SEQ ID NO: 360860 - DNA, 15 bp, Homo sapiens
aaaaacagcaaaaaa

SEQ ID NO: 360861 - DNA, 15 bp, Homo sapiens
caaaaacagcaaaaa

SEQ ID NO: 360862 - DNA, 15 bp, Homo sapiens
gcaaaaacagcaaaa

SEQ ID NO: 360863 - DNA, 15 bp, Homo sapiens
tgcaaaaacagcaaa

SEQ ID NO: 360864 - DNA, 15 bp, Homo sapiens
ttgcaaaaacagcaa

SEQ ID NO: 360865 - DNA, 15 bp, Homo sapiens
tttgcaaaaacagca

SEQ ID NO: 360866 - DNA, 15 bp, Homo sapiens
ctttgcaaaaacagc

SEQ ID NO: 360867 - DNA, 15 bp, Homo sapiens
tctttgcaaaaacag

SEQ ID NO: 360868 - DNA, 15 bp, Homo sapiens
gtctttgcaaaaaca

SEQ ID NO: 360869 - DNA, 15 bp, Homo sapiens
cgtctttgcaaaaac

SEQ ID NO: 360870 - DNA, 15 bp, Homo sapiens
acgtctttgcaaaaa

SEQ ID NO: 360871 - DNA, 15 bp, Homo sapiens
aacgtctttgcaaaa

SEQ ID NO: 360872 - DNA, 15 bp, Homo sapiens
gaacgtctttgcaaa

SEQ ID NO: 360873 - DNA, 15 bp, Homo sapiens
ggaacgtctttgcaa

SEQ ID NO: 360874 - DNA, 15 bp, Homo sapiens
gggaacgtctttgca

SEQ ID NO: 360875 - DNA, 15 bp, Homo sapiens
agggaacgtctttgc

SEQ ID NO: 360876 - DNA, 15 bp, Homo sapiens
aagggaacgtctttg

SEQ ID NO: 360877 - DNA, 15 bp, Homo sapiens
caagggaacgtcttt

SEQ ID NO: 360878 - DNA, 15 bp, Homo sapiens
tcaagggaacgtctt

SEQ ID NO: 360879 - DNA, 15 bp, Homo sapiens
atcaagggaacgtct

SEQ ID NO: 360880 - DNA, 15 bp, Homo sapiens
tatcaagggaacgtc

SEQ ID NO: 360881 - DNA, 15 bp, Homo sapiens
atatcaagggaacgt

SEQ ID NO: 360882 - DNA, 15 bp, Homo sapiens
catatcaagggaacg

SEQ ID NO: 360883 - DNA, 15 bp, Homo sapiens
gcatatcaagggaac

SEQ ID NO: 360884 - DNA, 15 bp, Homo sapiens
agcatatcaagggaa

SEQ ID NO: 360885 - DNA, 15 bp, Homo sapiens
aagcatatcaaggga

SEQ ID NO: 360886 - DNA, 15 bp, Homo sapiens
aaagcatatcaaggg

SEQ ID NO: 360887 - DNA, 15 bp, Homo sapiens
taaagcatatcaagg

SEQ ID NO: 360888 - DNA, 15 bp, Homo sapiens
gtaaagcatatcaag

SEQ ID NO: 360889 - DNA, 15 bp, Homo sapiens
tgtaaagcatatcaa

SEQ ID NO: 360890 - DNA, 15 bp, Homo sapiens
atgtaaagcatatca

SEQ ID NO: 360891 - DNA, 15 bp, Homo sapiens
aatgtaaagcatatc

SEQ ID NO: 360892 - DNA, 15 bp, Homo sapiens
aaatgtaaagcatat

SEQ ID NO: 360893 - DNA, 15 bp, Homo sapiens
aaaatgtaaagcata

SEQ ID NO: 360894 - DNA, 15 bp, Homo sapiens
caaaatgtaaagcat

SEQ ID NO: 360895 - DNA, 15 bp, Homo sapiens
acaaaatgtaaagca

SEQ ID NO: 360896 - DNA, 15 bp, Homo sapiens
aacaaaatgtaaagc

SEQ ID NO: 360897 - DNA, 15 bp, Homo sapiens
gaacaaaatgtaaag

SEQ ID NO: 360898 - DNA, 15 bp, Homo sapiens
ggaacaaaatgtaaa

SEQ ID NO: 360899 - DNA, 15 bp, Homo sapiens
aggaacaaaatgtaa

SEQ ID NO: 360900 - DNA, 15 bp, Homo sapiens
aaggaacaaaatgta

SEQ ID NO: 360901 - DNA, 15 bp, Homo sapiens
aaaggaacaaaatgt

SEQ ID NO: 360902 - DNA, 15 bp, Homo sapiens
aaaaggaacaaaatg

SEQ ID NO: 360903 - DNA, 15 bp, Homo sapiens
aaaaaggaacaaaat

SEQ ID NO: 360904 - DNA, 15 bp, Homo sapiens
gaaaaaggaacaaaa

SEQ ID NO: 360905 - DNA, 15 bp, Homo sapiens
tgaaaaaggaacaaa

SEQ ID NO: 360906 - DNA, 15 bp, Homo sapiens
atgaaaaaggaacaa

SEQ ID NO: 360907 - DNA, 15 bp, Homo sapiens
catgaaaaaggaaca

SEQ ID NO: 360908 - DNA, 15 bp, Homo sapiens
acatgaaaaaggaac

SEQ ID NO: 360909 - DNA, 15 bp, Homo sapiens
tacatgaaaaaggaa

SEQ ID NO: 360910 - DNA, 15 bp, Homo sapiens
atacatgaaaaagga

SEQ ID NO: 360911 - DNA, 15 bp, Homo sapiens
aatacatgaaaaagg

SEQ ID NO: 360912 - DNA, 15 bp, Homo sapiens
aaatacatgaaaaag

SEQ ID NO: 360913 - DNA, 15 bp, Homo sapiens
caaatacatgaaaaa

SEQ ID NO: 360914 - DNA, 15 bp, Homo sapiens
acaaatacatgaaaa

SEQ ID NO: 360915 - DNA, 15 bp, Homo sapiens
cacaaatacatgaaa

SEQ ID NO: 360916 - DNA, 15 bp, Homo sapiens
gcacaaatacatgaa

SEQ ID NO: 360917 - DNA, 15 bp, Homo sapiens
agcacaaatacatga

SEQ ID NO: 360918 - DNA, 15 bp, Homo sapiens
cagcacaaatacatg

SEQ ID NO: 360919 - DNA, 15 bp, Homo sapiens
acagcacaaatacat

SEQ ID NO: 360920 - DNA, 15 bp, Homo sapiens
cacagcacaaataca

SEQ ID NO: 360921 - DNA, 15 bp, Homo sapiens
acacagcacaaatac

SEQ ID NO: 360922 - DNA, 15 bp, Homo sapiens
tacacagcacaaata

SEQ ID NO: 360923 - DNA, 15 bp, Homo sapiens
ctacacagcacaaat

SEQ ID NO: 360924 - DNA, 15 bp, Homo sapiens
gctacacagcacaaa

SEQ ID NO: 360925 - DNA, 15 bp, Homo sapiens
ggctacacagcacaa

SEQ ID NO: 360926 - DNA, 15 bp, Homo sapiens
cggctacacagcaca

SEQ ID NO: 360927 - DNA, 15 bp, Homo sapiens
ccggctacacagcac

SEQ ID NO: 360928 - DNA, 15 bp, Homo sapiens
accggctacacagca

SEQ ID NO: 360929 - DNA, 15 bp, Homo sapiens
caccggctacacagc

SEQ ID NO: 360930 - DNA, 15 bp, Homo sapiens
ccaccggctacacag

SEQ ID NO: 360931 - DNA, 15 bp, Homo sapiens
cccaccggctacaca

SEQ ID NO: 360932 - DNA, 15 bp, Homo sapiens
gcccaccggctacac

SEQ ID NO: 360933 - DNA, 15 bp, Homo sapiens
agcccaccggctaca

SEQ ID NO: 360934 - DNA, 15 bp, Homo sapiens
gagcccaccggctac

SEQ ID NO: 360935 - DNA, 15 bp, Homo sapiens
tgagcccaccggcta

SEQ ID NO: 360936 - DNA, 15 bp, Homo sapiens
ctgagcccaccggct

SEQ ID NO: 360937 - DNA, 15 bp, Homo sapiens
gctgagcccaccggc

SEQ ID NO: 360938 - DNA, 15 bp, Homo sapiens
agctgagcccaccgg

SEQ ID NO: 360939 - DNA, 15 bp, Homo sapiens
aagctgagcccaccg

SEQ ID NO: 360940 - DNA, 15 bp, Homo sapiens
aaagctgagcccacc

SEQ ID NO: 360941 - DNA, 15 bp, Homo sapiens
taaagctgagcccac

SEQ ID NO: 360942 - DNA, 15 bp, Homo sapiens
ttaaagctgagccca

SEQ ID NO: 360943 - DNA, 15 bp, Homo sapiens
gttaaagctgagccc

SEQ ID NO: 360944 - DNA, 15 bp, Homo sapiens
tgttaaagctgagcc

SEQ ID NO: 360945 - DNA, 15 bp, Homo sapiens
gtgttaaagctgagc

SEQ ID NO: 360946 - DNA, 15 bp, Homo sapiens
cgtgttaaagctgag

SEQ ID NO: 360947 - DNA, 15 bp, Homo sapiens
acgtgttaaagctga

SEQ ID NO: 360948 - DNA, 15 bp, Homo sapiens
cacgtgttaaagctg

SEQ ID NO: 360949 - DNA, 15 bp, Homo sapiens
ccacgtgttaaagct

SEQ ID NO: 360950 - DNA, 15 bp, Homo sapiens
tccacgtgttaaagc

SEQ ID NO: 360951 - DNA, 15 bp, Homo sapiens
ttccacgtgttaaag

SEQ ID NO: 360952 - DNA, 15 bp, Homo sapiens
cttccacgtgttaaa

SEQ ID NO: 360953 - DNA, 15 bp, Homo sapiens
gcttccacgtgttaa

SEQ ID NO: 360954 - DNA, 15 bp, Homo sapiens
agcttccacgtgtta

SEQ ID NO: 360955 - DNA, 15 bp, Homo sapiens
aagcttccacgtgtt

SEQ ID NO: 360956 - DNA, 15 bp, Homo sapiens
aaagcttccacgtgt

SEQ ID NO: 360957 - DNA, 15 bp, Homo sapiens
taaagcttccacgtg

SEQ ID NO: 360958 - DNA, 15 bp, Homo sapiens
ctaaagcttccacgt

SEQ ID NO: 360959 - DNA, 15 bp, Homo sapiens
actaaagcttccacg

SEQ ID NO: 360960 - DNA, 15 bp, Homo sapiens
gactaaagcttccac

SEQ ID NO: 360961 - DNA, 15 bp, Homo sapiens
ggactaaagcttcca

SEQ ID NO: 360962 - DNA, 15 bp, Homo sapiens
tggactaaagcttcc

SEQ ID NO: 360963 - DNA, 15 bp, Homo sapiens
ctggactaaagcttc

SEQ ID NO: 360964 - DNA, 15 bp, Homo sapiens
tctggactaaagctt

SEQ ID NO: 360965 - DNA, 15 bp, Homo sapiens
ctctggactaaagct

SEQ ID NO: 360966 - DNA, 15 bp, Homo sapiens
tctctggactaaagc

SEQ ID NO: 360967 - DNA, 15 bp, Homo sapiens
ctctctggactaaag

SEQ ID NO: 360968 - DNA, 15 bp, Homo sapiens
tctctctggactaaa

SEQ ID NO: 360969 - DNA, 15 bp, Homo sapiens
ttctctctggactaa

SEQ ID NO: 360970 - DNA, 15 bp, Homo sapiens
cttctctctggacta

SEQ ID NO: 360971 - DNA, 15 bp, Homo sapiens
acttctctctggact

SEQ ID NO: 360972 - DNA, 15 bp, Homo sapiens
cacttctctctggac

SEQ ID NO: 360973 - DNA, 15 bp, Homo sapiens
acacttctctctgga

SEQ ID NO: 360974 - DNA, 15 bp, Homo sapiens
gacacttctctctgg

SEQ ID NO: 360975 - DNA, 15 bp, Homo sapiens
agacacttctctctg

SEQ ID NO: 360976 - DNA, 15 bp, Homo sapiens
aagacacttctctct

SEQ ID NO: 360977 - DNA, 15 bp, Homo sapiens
caagacacttctctc

SEQ ID NO: 360978 - DNA, 15 bp, Homo sapiens
ccaagacacttctct

SEQ ID NO: 360979 - DNA, 15 bp, Homo sapiens
cccaagacacttctc

SEQ ID NO: 360980 - DNA, 15 bp, Homo sapiens
tcccaagacacttct

SEQ ID NO: 360981 - DNA, 15 bp, Homo sapiens
ttcccaagacacttc

SEQ ID NO: 360982 - DNA, 15 bp, Homo sapiens
gttcccaagacactt

SEQ ID NO: 360983 - DNA, 15 bp, Homo sapiens
ggttcccaagacact

SEQ ID NO: 360984 - DNA, 15 bp, Homo sapiens
tggttcccaagacac

SEQ ID NO: 360985 - DNA, 15 bp, Homo sapiens
ttggttcccaagaca

SEQ ID NO: 360986 - DNA, 15 bp, Homo sapiens
tttggttcccaagac

SEQ ID NO: 360987 - DNA, 15 bp, Homo sapiens
atttggttcccaaga

SEQ ID NO: 360988 - DNA, 15 bp, Homo sapiens
tatttggttcccaag

SEQ ID NO: 360989 - DNA, 15 bp, Homo sapiens
ctatttggttcccaa

SEQ ID NO: 360990 - DNA, 15 bp, Homo sapiens
cctatttggttccca

SEQ ID NO: 360991 - DNA, 15 bp, Homo sapiens
tcctatttggttccc

SEQ ID NO: 360992 - DNA, 15 bp, Homo sapiens
gtcctatttggttcc

SEQ ID NO: 360993 - DNA, 15 bp, Homo sapiens
agtcctatttggttc

SEQ ID NO: 360994 - DNA, 15 bp, Homo sapiens
cagtcctatttggtt

SEQ ID NO: 360995 - DNA, 15 bp, Homo sapiens
ccagtcctatttggt

SEQ ID NO: 360996 - DNA, 15 bp, Homo sapiens
accagtcctatttgg

SEQ ID NO: 360997 - DNA, 15 bp, Homo sapiens
aaccagtcctatttg

SEQ ID NO: 360998 - DNA, 15 bp, Homo sapiens
caaccagtcctattt

SEQ ID NO: 360999 - DNA, 15 bp, Homo sapiens
tcaaccagtcctatt

SEQ ID NO: 361000 - DNA, 15 bp, Homo sapiens
atcaaccagtcctat

SEQ ID NO: 361001 - DNA, 15 bp, Homo sapiens
catcaaccagtccta

SEQ ID NO: 361002 - DNA, 15 bp, Homo sapiens
ccatcaaccagtcct

SEQ ID NO: 361003 - DNA, 15 bp, Homo sapiens
cccatcaaccagtcc

SEQ ID NO: 361004 - DNA, 15 bp, Homo sapiens
ccccatcaaccagtc

SEQ ID NO: 361005 - DNA, 15 bp, Homo sapiens
tccccatcaaccagt

SEQ ID NO: 361006 - DNA, 15 bp, Homo sapiens
atccccatcaaccag

SEQ ID NO: 361007 - DNA, 15 bp, Homo sapiens
tatccccatcaacca

SEQ ID NO: 361008 - DNA, 15 bp, Homo sapiens
ttatccccatcaacc

SEQ ID NO: 361009 - DNA, 15 bp, Homo sapiens
gttatccccatcaac

SEQ ID NO: 361010 - DNA, 15 bp, Homo sapiens
agttatccccatcaa

SEQ ID NO: 361011 - DNA, 15 bp, Homo sapiens
gagttatccccatca

SEQ ID NO: 361012 - DNA, 15 bp, Homo sapiens
cgagttatccccatc

SEQ ID NO: 361013 - DNA, 15 bp, Homo sapiens
ccgagttatccccat

SEQ ID NO: 361014 - DNA, 15 bp, Homo sapiens
tccgagttatcccca

SEQ ID NO: 361015 - DNA, 15 bp, Homo sapiens
ctccgagttatcccc

SEQ ID NO: 361016 - DNA, 15 bp, Homo sapiens
tctccgagttatccc

SEQ ID NO: 361017 - DNA, 15 bp, Homo sapiens
gtctccgagttatcc

SEQ ID NO: 361018 - DNA, 15 bp, Homo sapiens
agtctccgagttatc

SEQ ID NO: 361019 - DNA, 15 bp, Homo sapiens
aagtctccgagttat

SEQ ID NO: 361020 - DNA, 15 bp, Homo sapiens
taagtctccgagtta

SEQ ID NO: 361021 - DNA, 15 bp, Homo sapiens
ctaagtctccgagtt

SEQ ID NO: 361022 - DNA, 15 bp, Homo sapiens
actaagtctccgagt

SEQ ID NO: 361023 - DNA, 15 bp, Homo sapiens
cactaagtctccgag

SEQ ID NO: 361024 - DNA, 15 bp, Homo sapiens
tcactaagtctccga

SEQ ID NO: 361025 - DNA, 15 bp, Homo sapiens
ctcactaagtctccg

SEQ ID NO: 361026 - DNA, 15 bp, Homo sapiens
actcactaagtctcc

SEQ ID NO: 361027 - DNA, 15 bp, Homo sapiens
cactcactaagtctc

SEQ ID NO: 361028 - DNA, 15 bp, Homo sapiens
gcactcactaagtct

SEQ ID NO: 361029 - DNA, 15 bp, Homo sapiens
ggcactcactaagtc

SEQ ID NO: 361030 - DNA, 15 bp, Homo sapiens
tggcactcactaagt

SEQ ID NO: 361031 - DNA, 15 bp, Homo sapiens
ctggcactcactaag

SEQ ID NO: 361032 - DNA, 15 bp, Homo sapiens
cctggcactcactaa

SEQ ID NO: 361033 - DNA, 15 bp, Homo sapiens
tcctggcactcacta

SEQ ID NO: 361034 - DNA, 15 bp, Homo sapiens
ctcctggcactcact

SEQ ID NO: 361035 - DNA, 15 bp, Homo sapiens
gctcctggcactcac

SEQ ID NO: 361036 - DNA, 15 bp, Homo sapiens
tgctcctggcactca

SEQ ID NO: 361037 - DNA, 15 bp, Homo sapiens
atgctcctggcactc

SEQ ID NO: 361038 - DNA, 15 bp, Homo sapiens
gatgctcctggcact

SEQ ID NO: 361039 - DNA, 15 bp, Homo sapiens
tgatgctcctggcac

SEQ ID NO: 361040 - DNA, 15 bp, Homo sapiens
ctgatgctcctggca

SEQ ID NO: 361041 - DNA, 15 bp, Homo sapiens
actgatgctcctggc

SEQ ID NO: 361042 - DNA, 15 bp, Homo sapiens
cactgatgctcctgg

SEQ ID NO: 361043 - DNA, 15 bp, Homo sapiens
ccactgatgctcctg

SEQ ID NO: 361044 - DNA, 15 bp, Homo sapiens
cccactgatgctcct

SEQ ID NO: 361045 - DNA, 15 bp, Homo sapiens
tcccactgatgctcc

SEQ ID NO: 361046 - DNA, 15 bp, Homo sapiens
ttcccactgatgctc

SEQ ID NO: 361047 - DNA, 15 bp, Homo sapiens
attcccactgatgct

SEQ ID NO: 361048 - DNA, 15 bp, Homo sapiens
tattcccactgatgc

SEQ ID NO: 361049 - DNA, 15 bp, Homo sapiens
ttattcccactgatg

SEQ ID NO: 361050 - DNA, 15 bp, Homo sapiens
attattcccactgat

SEQ ID NO: 361051 - DNA, 15 bp, Homo sapiens
cattattcccactga

SEQ ID NO: 361052 - DNA, 15 bp, Homo sapiens
ccattattcccactg

SEQ ID NO: 361053 - DNA, 15 bp, Homo sapiens
tccattattcccact

SEQ ID NO: 361054 - DNA, 15 bp, Homo sapiens
ttccattattcccac

SEQ ID NO: 361055 - DNA, 15 bp, Homo sapiens
tttccattattccca

SEQ ID NO: 361056 - DNA, 15 bp, Homo sapiens
ctttccattattccc

SEQ ID NO: 361057 - DNA, 15 bp, Homo sapiens
cctttccattattcc

SEQ ID NO: 361058 - DNA, 15 bp, Homo sapiens
ccctttccattattc

SEQ ID NO: 361059 - DNA, 15 bp, Homo sapiens
accctttccattatt

SEQ ID NO: 361060 - DNA, 15 bp, Homo sapiens
caccctttccattat

SEQ ID NO: 361061 - DNA, 15 bp, Homo sapiens
tcaccctttccatta

SEQ ID NO: 361062 - DNA, 15 bp, Homo sapiens
atcaccctttccatt

SEQ ID NO: 361063 - DNA, 15 bp, Homo sapiens
aatcaccctttccat

SEQ ID NO: 361064 - DNA, 15 bp, Homo sapiens
gaatcaccctttcca

SEQ ID NO: 361065 - DNA, 15 bp, Homo sapiens
cgaatcaccctttcc

SEQ ID NO: 361066 - DNA, 15 bp, Homo sapiens
tcgaatcaccctttc

SEQ ID NO: 361067 - DNA, 15 bp, Homo sapiens
atcgaatcacccttt

SEQ ID NO: 361068 - DNA, 15 bp, Homo sapiens
tatcgaatcaccctt

SEQ ID NO: 361069 - DNA, 15 bp, Homo sapiens
ctatcgaatcaccct

SEQ ID NO: 361070 - DNA, 15 bp, Homo sapiens
tctatcgaatcaccc

SEQ ID NO: 361071 - DNA, 15 bp, Homo sapiens
atctatcgaatcacc

SEQ ID NO: 361072 - DNA, 15 bp, Homo sapiens
catctatcgaatcac

SEQ ID NO: 361073 - DNA, 15 bp, Homo sapiens
ccatctatcgaatca

SEQ ID NO: 361074 - DNA, 15 bp, Homo sapiens
cccatctatcgaatc

SEQ ID NO: 361075 - DNA, 15 bp, Homo sapiens
tcccatctatcgaat

SEQ ID NO: 361076 - DNA, 15 bp, Homo sapiens
ttcccatctatcgaa

SEQ ID NO: 361077 - DNA, 15 bp, Homo sapiens
cttcccatctatcga

SEQ ID NO: 361078 - DNA, 15 bp, Homo sapiens
tcttcccatctatcg

SEQ ID NO: 361079 - DNA, 15 bp, Homo sapiens
gtcttcccatctatc

SEQ ID NO: 361080 - DNA, 15 bp, Homo sapiens
cgtcttcccatctat

SEQ ID NO: 361081 - DNA, 15 bp, Homo sapiens
ccgtcttcccatcta

SEQ ID NO: 361082 - DNA, 15 bp, Homo sapiens
accgtcttcccatct

SEQ ID NO: 361083 - DNA, 15 bp, Homo sapiens
aaccgtcttcccatc

SEQ ID NO: 361084 - DNA, 15 bp, Homo sapiens
aaaccgtcttcccat

SEQ ID NO: 361085 - DNA, 15 bp, Homo sapiens
taaaccgtcttccca

SEQ ID NO: 361086 - DNA, 15 bp, Homo sapiens
ttaaaccgtcttccc

SEQ ID NO: 361087 - DNA, 15 bp, Homo sapiens
tttaaaccgtcttcc

SEQ ID NO: 361088 - DNA, 15 bp, Homo sapiens
ttttaaaccgtcttc

SEQ ID NO: 361089 - DNA, 15 bp, Homo sapiens
tttttaaaccgtctt

SEQ ID NO: 361090 - DNA, 15 bp, Homo sapiens
ctttttaaaccgtct

SEQ ID NO: 361091 - DNA, 15 bp, Homo sapiens
cctttttaaaccgtc

SEQ ID NO: 361092 - DNA, 15 bp, Homo sapiens
acctttttaaaccgt

SEQ ID NO: 361093 - DNA, 15 bp, Homo sapiens
cacctttttaaaccg

SEQ ID NO: 361094 - DNA, 15 bp, Homo sapiens
gcacctttttaaacc

SEQ ID NO: 361095 - DNA, 15 bp, Homo sapiens
tgcacctttttaaac

SEQ ID NO: 361096 - DNA, 15 bp, Homo sapiens
ttgcacctttttaaa

SEQ ID NO: 361097 - DNA, 15 bp, Homo sapiens
tttgcacctttttaa

SEQ ID NO: 361098 - DNA, 15 bp, Homo sapiens
ctttgcaccttttta

SEQ ID NO: 361099 - DNA, 15 bp, Homo sapiens
tctttgcaccttttt

SEQ ID NO: 361100 - DNA, 15 bp, Homo sapiens
ttctttgcacctttt

SEQ ID NO: 361101 - DNA, 15 bp, Homo sapiens
cttctttgcaccttt

SEQ ID NO: 361102 - DNA, 15 bp, Homo sapiens
tcttctttgcacctt

SEQ ID NO: 361103 - DNA, 15 bp, Homo sapiens
gtcttctttgcacct

SEQ ID NO: 361104 - DNA, 15 bp, Homo sapiens
agtcttctttgcacc

SEQ ID NO: 361105 - DNA, 15 bp, Homo sapiens
aagtcttctttgcac

SEQ ID NO: 361106 - DNA, 15 bp, Homo sapiens
aaagtcttctttgca

SEQ ID NO: 361107 - DNA, 15 bp, Homo sapiens
caaagtcttctttgc

SEQ ID NO: 361108 - DNA, 15 bp, Homo sapiens
ccaaagtcttctttg

SEQ ID NO: 361109 - DNA, 15 bp, Homo sapiens
accaaagtcttcttt

SEQ ID NO: 361110 - DNA, 15 bp, Homo sapiens
gaccaaagtcttctt

SEQ ID NO: 361111 - DNA, 15 bp, Homo sapiens
agaccaaagtcttct

SEQ ID NO: 361112 - DNA, 15 bp, Homo sapiens
cagaccaaagtcttc

SEQ ID NO: 361113 - DNA, 15 bp, Homo sapiens
ccagaccaaagtctt

SEQ ID NO: 361114 - DNA, 15 bp, Homo sapiens
tccagaccaaagtct

SEQ ID NO: 361115 - DNA, 15 bp, Homo sapiens
ctccagaccaaagtc

SEQ ID NO: 361116 - DNA, 15 bp, Homo sapiens
actccagaccaaagt

SEQ ID NO: 361117 - DNA, 15 bp, Homo sapiens
tactccagaccaaag

SEQ ID NO: 361118 - DNA, 15 bp, Homo sapiens
ctactccagaccaaa

SEQ ID NO: 361119 - DNA, 15 bp, Homo sapiens
tctactccagaccaa

SEQ ID NO: 361120 - DNA, 15 bp, Homo sapiens
gtctactccagacca

SEQ ID NO: 361121 - DNA, 15 bp, Homo sapiens
tgtctactccagacc

SEQ ID NO: 361122 - DNA, 15 bp, Homo sapiens
gtgtctactccagac

SEQ ID NO: 361123 - DNA, 15 bp, Homo sapiens
agtgtctactccaga

SEQ ID NO: 361124 - DNA, 15 bp, Homo sapiens
tagtgtctactccag

SEQ ID NO: 361125 - DNA, 15 bp, Homo sapiens
ctagtgtctactcca

SEQ ID NO: 361126 - DNA, 15 bp, Homo sapiens
tctagtgtctactcc

SEQ ID NO: 361127 - DNA, 15 bp, Homo sapiens
ttctagtgtctactc

SEQ ID NO: 361128 - DNA, 15 bp, Homo sapiens
gttctagtgtctact

SEQ ID NO: 361129 - DNA, 15 bp, Homo sapiens
agttctagtgtctac

SEQ ID NO: 361130 - DNA, 15 bp, Homo sapiens
aagttctagtgtcta

SEQ ID NO: 361131 - DNA, 15 bp, Homo sapiens
aaagttctagtgtct

SEQ ID NO: 361132 - DNA, 15 bp, Homo sapiens
aaaagttctagtgtc

SEQ ID NO: 361133 - DNA, 15 bp, Homo sapiens
gaaaagttctagtgt

SEQ ID NO: 361134 - DNA, 15 bp, Homo sapiens
tgaaaagttctagtg

SEQ ID NO: 361135 - DNA, 15 bp, Homo sapiens
ctgaaaagttctagt

SEQ ID NO: 361136 - DNA, 15 bp, Homo sapiens
tctgaaaagttctag

SEQ ID NO: 361137 - DNA, 15 bp, Homo sapiens
ttctgaaaagttcta

SEQ ID NO: 361138 - DNA, 15 bp, Homo sapiens
cttctgaaaagttct

SEQ ID NO: 361139 - DNA, 15 bp, Homo sapiens
acttctgaaaagttc

SEQ ID NO: 361140 - DNA, 15 bp, Homo sapiens
tacttctgaaaagtt

SEQ ID NO: 361141 - DNA, 15 bp, Homo sapiens
atacttctgaaaagt

SEQ ID NO: 361142 - DNA, 15 bp, Homo sapiens
tatacttctgaaaag

SEQ ID NO: 361143 - DNA, 15 bp, Homo sapiens
ctatacttctgaaaa

SEQ ID NO: 361144 - DNA, 15 bp, Homo sapiens
cctatacttctgaaa

SEQ ID NO: 361145 - DNA, 15 bp, Homo sapiens
gcctatacttctgaa

SEQ ID NO: 361146 - DNA, 15 bp, Homo sapiens
tgcctatacttctga

SEQ ID NO: 361147 - DNA, 15 bp, Homo sapiens
ttgcctatacttctg

SEQ ID NO: 361148 - DNA, 15 bp, Homo sapiens
gttgcctatacttct

SEQ ID NO: 361149 - DNA, 15 bp, Homo sapiens
tgttgcctatacttc

SEQ ID NO: 361150 - DNA, 15 bp, Homo sapiens
ctgttgcctatactt

SEQ ID NO: 361151 - DNA, 15 bp, Homo sapiens
gctgttgcctatact

SEQ ID NO: 361152 - DNA, 15 bp, Homo sapiens
ggctgttgcctatac

SEQ ID NO: 361153 - DNA, 15 bp, Homo sapiens
tggctgttgcctata

SEQ ID NO: 361154 - DNA, 15 bp, Homo sapiens
ctggctgttgcctat

SEQ ID NO: 361155 - DNA, 15 bp, Homo sapiens
actggctgttgccta

SEQ ID NO: 361156 - DNA, 15 bp, Homo sapiens
tactggctgttgcct

SEQ ID NO: 361157 - DNA, 15 bp, Homo sapiens
ttactggctgttgcc

SEQ ID NO: 361158 - DNA, 15 bp, Homo sapiens
tttactggctgttgc

SEQ ID NO: 361159 - DNA, 15 bp, Homo sapiens
ttttactggctgttg

SEQ ID NO: 361160 - DNA, 15 bp, Homo sapiens
cttttactggctgtt

SEQ ID NO: 361161 - DNA, 15 bp, Homo sapiens
ccttttactggctgt

SEQ ID NO: 361162 - DNA, 15 bp, Homo sapiens
cccttttactggctg

SEQ ID NO: 361163 - DNA, 15 bp, Homo sapiens
ccccttttactggct

SEQ ID NO: 361164 - DNA, 15 bp, Homo sapiens
cccccttttactggc

SEQ ID NO: 361165 - DNA, 15 bp, Homo sapiens
ccccccttttactgg

SEQ ID NO: 361166 - DNA, 15 bp, Homo sapiens
cccccccttttactg

SEQ ID NO: 361167 - DNA, 15 bp, Homo sapiens
ccccccccttttact

SEQ ID NO: 361168 - DNA, 15 bp, Homo sapiens
cccccccccttttac

SEQ ID NO: 361169 - DNA, 15 bp, Homo sapiens
cccccccccctttta

SEQ ID NO: 361170 - DNA, 15 bp, Homo sapiens
ccccccccccctttt

SEQ ID NO: 361171 - DNA, 15 bp, Homo sapiens
ccccccccccccttt

SEQ ID NO: 361172 - DNA, 15 bp, Homo sapiens
acccccccccccctt

SEQ ID NO: 361173 - DNA, 15 bp, Homo sapiens
tacccccccccccct

SEQ ID NO: 361174 - DNA, 15 bp, Homo sapiens
ctacccccccccccc

SEQ ID NO: 361175 - DNA, 15 bp, Homo sapiens
cctaccccccccccc

SEQ ID NO: 361176 - DNA, 15 bp, Homo sapiens
acctacccccccccc

SEQ ID NO: 361177 - DNA, 15 bp, Homo sapiens
aacctaccccccccc

SEQ ID NO: 361178 - DNA, 15 bp, Homo sapiens
gaacctacccccccc

SEQ ID NO: 361179 - DNA, 15 bp, Homo sapiens
ggaacctaccccccc

SEQ ID NO: 361180 - DNA, 15 bp, Homo sapiens
aggaacctacccccc

SEQ ID NO: 361181 - DNA, 15 bp, Homo sapiens
gaggaacctaccccc

SEQ ID NO: 361182 - DNA, 15 bp, Homo sapiens
ggaggaacctacccc

SEQ ID NO: 361183 - DNA, 15 bp, Homo sapiens
aggaggaacctaccc

SEQ ID NO: 361184 - DNA, 15 bp, Homo sapiens
caggaggaacctacc

SEQ ID NO: 361185 - DNA, 15 bp, Homo sapiens
gcaggaggaacctac

SEQ ID NO: 361186 - DNA, 15 bp, Homo sapiens
agcaggaggaaccta

SEQ ID NO: 361187 - DNA, 15 bp, Homo sapiens
gagcaggaggaacct

SEQ ID NO: 361188 - DNA, 15 bp, Homo sapiens
ggagcaggaggaacc

SEQ ID NO: 361189 - DNA, 15 bp, Homo sapiens
tggagcaggaggaac

SEQ ID NO: 361190 - DNA, 15 bp, Homo sapiens
ctggagcaggaggaa

SEQ ID NO: 361191 - DNA, 15 bp, Homo sapiens
actggagcaggagga

SEQ ID NO: 361192 - DNA, 15 bp, Homo sapiens
gactggagcaggagg

SEQ ID NO: 361193 - DNA, 15 bp, Homo sapiens
tgactggagcaggag

SEQ ID NO: 361194 - DNA, 15 bp, Homo sapiens
gtgactggagcagga

SEQ ID NO: 361195 - DNA, 15 bp, Homo sapiens
ggtgactggagcagg

SEQ ID NO: 361196 - DNA, 15 bp, Homo sapiens
aggtgactggagcag

SEQ ID NO: 361197 - DNA, 15 bp, Homo sapiens
caggtgactggagca

SEQ ID NO: 361198 - DNA, 15 bp, Homo sapiens
gcaggtgactggagc

SEQ ID NO: 361199 - DNA, 15 bp, Homo sapiens
tgcaggtgactggag

SEQ ID NO: 361200 - DNA, 15 bp, Homo sapiens
ttgcaggtgactgga

SEQ ID NO: 361201 - DNA, 15 bp, Homo sapiens
cttgcaggtgactgg

SEQ ID NO: 361202 - DNA, 15 bp, Homo sapiens
acttgcaggtgactg

SEQ ID NO: 361203 - DNA, 15 bp, Homo sapiens
gacttgcaggtgact

SEQ ID NO: 361204 - DNA, 15 bp, Homo sapiens
tgacttgcaggtgac

SEQ ID NO: 361205 - DNA, 15 bp, Homo sapiens
ctgacttgcaggtga

SEQ ID NO: 361206 - DNA, 15 bp, Homo sapiens
actgacttgcaggtg

SEQ ID NO: 361207 - DNA, 15 bp, Homo sapiens
gactgacttgcaggt

SEQ ID NO: 361208 - DNA, 15 bp, Homo sapiens
ggactgacttgcagg

SEQ ID NO: 361209 - DNA, 15 bp, Homo sapiens
aggactgacttgcag

SEQ ID NO: 361210 - DNA, 15 bp, Homo sapiens
gaggactgacttgca

SEQ ID NO: 361211 - DNA, 15 bp, Homo sapiens
agaggactgacttgc

SEQ ID NO: 361212 - DNA, 15 bp, Homo sapiens
gagaggactgacttg

SEQ ID NO: 361213 - DNA, 15 bp, Homo sapiens
ggagaggactgactt

SEQ ID NO: 361214 - DNA, 15 bp, Homo sapiens
gggagaggactgact

SEQ ID NO: 361215 - DNA, 15 bp, Homo sapiens
cgggagaggactgac

SEQ ID NO: 361216 - DNA, 15 bp, Homo sapiens
ccgggagaggactga

SEQ ID NO: 361217 - DNA, 15 bp, Homo sapiens
cccgggagaggactg

SEQ ID NO: 361218 - DNA, 15 bp, Homo sapiens
ccccgggagaggact

SEQ ID NO: 361219 - DNA, 15 bp, Homo sapiens
accccgggagaggac

SEQ ID NO: 361220 - DNA, 15 bp, Homo sapiens
aaccccgggagagga

SEQ ID NO: 361221 - DNA, 15 bp, Homo sapiens
aaaccccgggagagg

SEQ ID NO: 361222 - DNA, 15 bp, Homo sapiens
aaaaccccgggagag

SEQ ID NO: 361223 - DNA, 15 bp, Homo sapiens
gaaaaccccgggaga

SEQ ID NO: 361224 - DNA, 15 bp, Homo sapiens
agaaaaccccgggag

SEQ ID NO: 361225 - DNA, 15 bp, Homo sapiens
gagaaaaccccggga

SEQ ID NO: 361226 - DNA, 15 bp, Homo sapiens
tgagaaaaccccggg

SEQ ID NO: 361227 - DNA, 15 bp, Homo sapiens
ctgagaaaaccccgg

SEQ ID NO: 361228 - DNA, 15 bp, Homo sapiens
actgagaaaaccccg

SEQ ID NO: 361229 - DNA, 15 bp, Homo sapiens
tactgagaaaacccc

SEQ ID NO: 361230 - DNA, 15 bp, Homo sapiens
atactgagaaaaccc

SEQ ID NO: 361231 - DNA, 15 bp, Homo sapiens
aatactgagaaaacc

SEQ ID NO: 361232 - DNA, 15 bp, Homo sapiens
gaatactgagaaaac

SEQ ID NO: 361233 - DNA, 15 bp, Homo sapiens
cgaatactgagaaaa

SEQ ID NO: 361234 - DNA, 15 bp, Homo sapiens
gcgaatactgagaaa

SEQ ID NO: 361235 - DNA, 15 bp, Homo sapiens
ggcgaatactgagaa

SEQ ID NO: 361236 - DNA, 15 bp, Homo sapiens
tggcgaatactgaga

SEQ ID NO: 361237 - DNA, 15 bp, Homo sapiens
atggcgaatactgag

SEQ ID NO: 361238 - DNA, 15 bp, Homo sapiens
tatggcgaatactga

SEQ ID NO: 361239 - DNA, 15 bp, Homo sapiens
ctatggcgaatactg

SEQ ID NO: 361240 - DNA, 15 bp, Homo sapiens
cctatggcgaatact

SEQ ID NO: 361241 - DNA, 15 bp, Homo sapiens
ccctatggcgaatac

SEQ ID NO: 361242 - DNA, 15 bp, Homo sapiens
tccctatggcgaata

SEQ ID NO: 361243 - DNA, 15 bp, Homo sapiens
gtccctatggcgaat

SEQ ID NO: 361244 - DNA, 15 bp, Homo sapiens
agtccctatggcgaa

SEQ ID NO: 361245 - DNA, 15 bp, Homo sapiens
tagtccctatggcga

SEQ ID NO: 361246 - DNA, 15 bp, Homo sapiens
atagtccctatggcg

SEQ ID NO: 361247 - DNA, 15 bp, Homo sapiens
gatagtccctatggc

SEQ ID NO: 361248 - DNA, 15 bp, Homo sapiens
tgatagtccctatgg

SEQ ID NO: 361249 - DNA, 15 bp, Homo sapiens
ttgatagtccctatg

SEQ ID NO: 361250 - DNA, 15 bp, Homo sapiens
tttgatagtccctat

SEQ ID NO: 361251 - DNA, 15 bp, Homo sapiens
ctttgatagtcccta

SEQ ID NO: 361252 - DNA, 15 bp, Homo sapiens
actttgatagtccct

SEQ ID NO: 361253 - DNA, 15 bp, Homo sapiens
aactttgatagtccc

SEQ ID NO: 361254 - DNA, 15 bp, Homo sapiens
aaactttgatagtcc

SEQ ID NO: 361255 - DNA, 15 bp, Homo sapiens
caaactttgatagtc

SEQ ID NO: 361256 - DNA, 15 bp, Homo sapiens
tcaaactttgatagt

SEQ ID NO: 361257 - DNA, 15 bp, Homo sapiens
ttcaaactttgatag

SEQ ID NO: 361258 - DNA, 15 bp, Homo sapiens
cttcaaactttgata

SEQ ID NO: 361259 - DNA, 15 bp, Homo sapiens
gcttcaaactttgat

SEQ ID NO: 361260 - DNA, 15 bp, Homo sapiens
tgcttcaaactttga

SEQ ID NO: 361261 - DNA, 15 bp, Homo sapiens
atgcttcaaactttg

SEQ ID NO: 361262 - DNA, 15 bp, Homo sapiens
tatgcttcaaacttt

SEQ ID NO: 361263 - DNA, 15 bp, Homo sapiens
ctatgcttcaaactt

SEQ ID NO: 361264 - DNA, 15 bp, Homo sapiens
gctatgcttcaaact

SEQ ID NO: 361265 - DNA, 15 bp, Homo sapiens
agctatgcttcaaac

SEQ ID NO: 361266 - DNA, 15 bp, Homo sapiens
gagctatgcttcaaa

SEQ ID NO: 361267 - DNA, 15 bp, Homo sapiens
agagctatgcttcaa

SEQ ID NO: 361268 - DNA, 15 bp, Homo sapiens
cagagctatgcttca

SEQ ID NO: 361269 - DNA, 15 bp, Homo sapiens
gcagagctatgcttc

SEQ ID NO: 361270 - DNA, 15 bp, Homo sapiens
ggcagagctatgctt

SEQ ID NO: 361271 - DNA, 15 bp, Homo sapiens
aggcagagctatgct

SEQ ID NO: 361272 - DNA, 15 bp, Homo sapiens
caggcagagctatgc

SEQ ID NO: 361273 - DNA, 15 bp, Homo sapiens
acaggcagagctatg

SEQ ID NO: 361274 - DNA, 15 bp, Homo sapiens
gacaggcagagctat

SEQ ID NO: 361275 - DNA, 15 bp, Homo sapiens
agacaggcagagcta

SEQ ID NO: 361276 - DNA, 15 bp, Homo sapiens
cagacaggcagagct

SEQ ID NO: 361277 - DNA, 15 bp, Homo sapiens
gcagacaggcagagc

SEQ ID NO: 361278 - DNA, 15 bp, Homo sapiens
agcagacaggcagag

SEQ ID NO: 361279 - DNA, 15 bp, Homo sapiens
cagcagacaggcaga

SEQ ID NO: 361280 - DNA, 15 bp, Homo sapiens
gcagcagacaggcag

SEQ ID NO: 361281 - DNA, 15 bp, Homo sapiens
agcagcagacaggca

SEQ ID NO: 361282 - DNA, 15 bp, Homo sapiens
aagcagcagacaggc

SEQ ID NO: 361283 - DNA, 15 bp, Homo sapiens
aaagcagcagacagg

SEQ ID NO: 361284 - DNA, 15 bp, Homo sapiens
caaagcagcagacag

SEQ ID NO: 361285 - DNA, 15 bp, Homo sapiens
acaaagcagcagaca

SEQ ID NO: 361286 - DNA, 15 bp, Homo sapiens
gacaaagcagcagac

SEQ ID NO: 361287 - DNA, 15 bp, Homo sapiens
tgacaaagcagcaga

SEQ ID NO: 361288 - DNA, 15 bp, Homo sapiens
gtgacaaagcagcag

SEQ ID NO: 361289 - DNA, 15 bp, Homo sapiens
agtgacaaagcagca

SEQ ID NO: 361290 - DNA, 15 bp, Homo sapiens
cagtgacaaagcagc

SEQ ID NO: 361291 - DNA, 15 bp, Homo sapiens
ccagtgacaaagcag

SEQ ID NO: 361292 - DNA, 15 bp, Homo sapiens
gccagtgacaaagca

SEQ ID NO: 361293 - DNA, 15 bp, Homo sapiens
agccagtgacaaagc

SEQ ID NO: 361294 - DNA, 15 bp, Homo sapiens
cagccagtgacaaag

SEQ ID NO: 361295 - DNA, 15 bp, Homo sapiens
ccagccagtgacaaa

SEQ ID NO: 361296 - DNA, 15 bp, Homo sapiens
gccagccagtgacaa

SEQ ID NO: 361297 - DNA, 15 bp, Homo sapiens
tgccagccagtgaca

SEQ ID NO: 361298 - DNA, 15 bp, Homo sapiens
atgccagccagtgac

SEQ ID NO: 361299 - DNA, 15 bp, Homo sapiens
catgccagccagtga

SEQ ID NO: 361300 - DNA, 15 bp, Homo sapiens
tcatgccagccagtg

SEQ ID NO: 361301 - DNA, 15 bp, Homo sapiens
ttcatgccagccagt

SEQ ID NO: 361302 - DNA, 15 bp, Homo sapiens
cttcatgccagccag

SEQ ID NO: 361303 - DNA, 15 bp, Homo sapiens
gcttcatgccagcca

SEQ ID NO: 361304 - DNA, 15 bp, Homo sapiens
ggcttcatgccagcc

SEQ ID NO: 361305 - DNA, 15 bp, Homo sapiens
tggcttcatgccagc

SEQ ID NO: 361306 - DNA, 15 bp, Homo sapiens
atggcttcatgccag

SEQ ID NO: 361307 - DNA, 15 bp, Homo sapiens
catggcttcatgcca

SEQ ID NO: 361308 - DNA, 15 bp, Homo sapiens
ccatggcttcatgcc

SEQ ID NO: 361309 - DNA, 15 bp, Homo sapiens
gccatggcttcatgc

SEQ ID NO: 361310 - DNA, 15 bp, Homo sapiens
tgccatggcttcatg

SEQ ID NO: 361311 - DNA, 15 bp, Homo sapiens
ctgccatggcttcat

SEQ ID NO: 361312 - DNA, 15 bp, Homo sapiens
tctgccatggcttca

SEQ ID NO: 361313 - DNA, 15 bp, Homo sapiens
ttctgccatggcttc

SEQ ID NO: 361314 - DNA, 15 bp, Homo sapiens
cttctgccatggctt

SEQ ID NO: 361315 - DNA, 15 bp, Homo sapiens
gcttctgccatggct

SEQ ID NO: 361316 - DNA, 15 bp, Homo sapiens
ggcttctgccatggc

SEQ ID NO: 361317 - DNA, 15 bp, Homo sapiens
gggcttctgccatgg

SEQ ID NO: 361318 - DNA, 15 bp, Homo sapiens
tgggcttctgccatg

SEQ ID NO: 361319 - DNA, 15 bp, Homo sapiens
atgggcttctgccat

SEQ ID NO: 361320 - DNA, 15 bp, Homo sapiens
aatgggcttctgcca

SEQ ID NO: 361321 - DNA, 15 bp, Homo sapiens
aaatgggcttctgcc

SEQ ID NO: 361322 - DNA, 15 bp, Homo sapiens
caaatgggcttctgc

SEQ ID NO: 361323 - DNA, 15 bp, Homo sapiens
tcaaatgggcttctg

SEQ ID NO: 361324 - DNA, 15 bp, Homo sapiens
ctcaaatgggcttct

SEQ ID NO: 361325 - DNA, 15 bp, Homo sapiens
tctcaaatgggcttc

SEQ ID NO: 361326 - DNA, 15 bp, Homo sapiens
gtctcaaatgggctt

SEQ ID NO: 361327 - DNA, 15 bp, Homo sapiens
agtctcaaatgggct

SEQ ID NO: 361328 - DNA, 15 bp, Homo sapiens
cagtctcaaatgggc

SEQ ID NO: 361329 - DNA, 15 bp, Homo sapiens
ccagtctcaaatggg

SEQ ID NO: 361330 - DNA, 15 bp, Homo sapiens
gccagtctcaaatgg

SEQ ID NO: 361331 - DNA, 15 bp, Homo sapiens
tgccagtctcaaatg

SEQ ID NO: 361332 - DNA, 15 bp, Homo sapiens
gtgccagtctcaaat

SEQ ID NO: 361333 - DNA, 15 bp, Homo sapiens
ggtgccagtctcaaa

SEQ ID NO: 361334 - DNA, 15 bp, Homo sapiens
tggtgccagtctcaa

SEQ ID NO: 361335 - DNA, 15 bp, Homo sapiens
ctggtgccagtctca

SEQ ID NO: 361336 - DNA, 15 bp, Homo sapiens
gctggtgccagtctc

SEQ ID NO: 361337 - DNA, 15 bp, Homo sapiens
ggctggtgccagtct

SEQ ID NO: 361338 - DNA, 15 bp, Homo sapiens
gggctggtgccagtc

SEQ ID NO: 361339 - DNA, 15 bp, Homo sapiens
agggctggtgccagt

SEQ ID NO: 361340 - DNA, 15 bp, Homo sapiens
cagggctggtgccag

SEQ ID NO: 361341 - DNA, 15 bp, Homo sapiens
acagggctggtgcca

SEQ ID NO: 361342 - DNA, 15 bp, Homo sapiens
aacagggctggtgcc

SEQ ID NO: 361343 - DNA, 15 bp, Homo sapiens
caacagggctggtgc

SEQ ID NO: 361344 - DNA, 15 bp, Homo sapiens
acaacagggctggtg

SEQ ID NO: 361345 - DNA, 15 bp, Homo sapiens
cacaacagggctggt

SEQ ID NO: 361346 - DNA, 15 bp, Homo sapiens
ccacaacagggctgg

SEQ ID NO: 361347 - DNA, 15 bp, Homo sapiens
accacaacagggctg

SEQ ID NO: 361348 - DNA, 15 bp, Homo sapiens
aaccacaacagggct

SEQ ID NO: 361349 - DNA, 15 bp, Homo sapiens
caaccacaacagggc

SEQ ID NO: 361350 - DNA, 15 bp, Homo sapiens
acaaccacaacaggg

SEQ ID NO: 361351 - DNA, 15 bp, Homo sapiens
gacaaccacaacagg

SEQ ID NO: 361352 - DNA, 15 bp, Homo sapiens
agacaaccacaacag

SEQ ID NO: 361353 - DNA, 15 bp, Homo sapiens
cagacaaccacaaca

SEQ ID NO: 361354 - DNA, 15 bp, Homo sapiens
gcagacaaccacaac

SEQ ID NO: 361355 - DNA, 15 bp, Homo sapiens
tgcagacaaccacaa

SEQ ID NO: 361356 - DNA, 15 bp, Homo sapiens
atgcagacaaccaca

SEQ ID NO: 361357 - DNA, 15 bp, Homo sapiens
aatgcagacaaccac

SEQ ID NO: 361358 - DNA, 15 bp, Homo sapiens
gaatgcagacaacca

SEQ ID NO: 361359 - DNA, 15 bp, Homo sapiens
tgaatgcagacaacc

SEQ ID NO: 361360 - DNA, 15 bp, Homo sapiens
ttgaatgcagacaac

SEQ ID NO: 361361 - DNA, 15 bp, Homo sapiens
gttgaatgcagacaa

SEQ ID NO: 361362 - DNA, 15 bp, Homo sapiens
agttgaatgcagaca

SEQ ID NO: 361363 - DNA, 15 bp, Homo sapiens
aagttgaatgcagac

SEQ ID NO: 361364 - DNA, 15 bp, Homo sapiens
gaagttgaatgcaga

SEQ ID NO: 361365 - DNA, 15 bp, Homo sapiens
agaagttgaatgcag

SEQ ID NO: 361366 - DNA, 15 bp, Homo sapiens
cagaagttgaatgca

SEQ ID NO: 361367 - DNA, 15 bp, Homo sapiens
ccagaagttgaatgc

SEQ ID NO: 361368 - DNA, 15 bp, Homo sapiens
gccagaagttgaatg

SEQ ID NO: 361369 - DNA, 15 bp, Homo sapiens
ggccagaagttgaat

SEQ ID NO: 361370 - DNA, 15 bp, Homo sapiens
cggccagaagttgaa

SEQ ID NO: 361371 - DNA, 15 bp, Homo sapiens
ccggccagaagttga

SEQ ID NO: 361372 - DNA, 15 bp, Homo sapiens
gccggccagaagttg

SEQ ID NO: 361373 - DNA, 15 bp, Homo sapiens
tgccggccagaagtt

SEQ ID NO: 361374 - DNA, 15 bp, Homo sapiens
ctgccggccagaagt

SEQ ID NO: 361375 - DNA, 15 bp, Homo sapiens
gctgccggccagaag

SEQ ID NO: 361376 - DNA, 15 bp, Homo sapiens
tgctgccggccagaa

SEQ ID NO: 361377 - DNA, 15 bp, Homo sapiens
ctgctgccggccaga

SEQ ID NO: 361378 - DNA, 15 bp, Homo sapiens
gctgctgccggccag

SEQ ID NO: 361379 - DNA, 15 bp, Homo sapiens
tgctgctgccggcca

SEQ ID NO: 361380 - DNA, 15 bp, Homo sapiens
gtgctgctgccggcc

SEQ ID NO: 361381 - DNA, 15 bp, Homo sapiens
tgtgctgctgccggc

SEQ ID NO: 361382 - DNA, 15 bp, Homo sapiens
ctgtgctgctgccgg

SEQ ID NO: 361383 - DNA, 15 bp, Homo sapiens
cctgtgctgctgccg

SEQ ID NO: 361384 - DNA, 15 bp, Homo sapiens
ccctgtgctgctgcc

SEQ ID NO: 361385 - DNA, 15 bp, Homo sapiens
cccctgtgctgctgc

SEQ ID NO: 361386 - DNA, 15 bp, Homo sapiens
acccctgtgctgctg

SEQ ID NO: 361387 - DNA, 15 bp, Homo sapiens
gacccctgtgctgct

SEQ ID NO: 361388 - DNA, 15 bp, Homo sapiens
ggacccctgtgctgc

SEQ ID NO: 361389 - DNA, 15 bp, Homo sapiens
tggacccctgtgctg

SEQ ID NO: 361390 - DNA, 15 bp, Homo sapiens
atggacccctgtgct

SEQ ID NO: 361391 - DNA, 15 bp, Homo sapiens
gatggacccctgtgc

SEQ ID NO: 361392 - DNA, 15 bp, Homo sapiens
ggatggacccctgtg

SEQ ID NO: 361393 - DNA, 15 bp, Homo sapiens
aggatggacccctgt

SEQ ID NO: 361394 - DNA, 15 bp, Homo sapiens
gaggatggacccctg

SEQ ID NO: 361395 - DNA, 15 bp, Homo sapiens
agaggatggacccct

SEQ ID NO: 361396 - DNA, 15 bp, Homo sapiens
cagaggatggacccc

SEQ ID NO: 361397 - DNA, 15 bp, Homo sapiens
ccagaggatggaccc

SEQ ID NO: 361398 - DNA, 15 bp, Homo sapiens
tccagaggatggacc

SEQ ID NO: 361399 - DNA, 15 bp, Homo sapiens
gtccagaggatggac

SEQ ID NO: 361400 - DNA, 15 bp, Homo sapiens
tgtccagaggatgga

SEQ ID NO: 361401 - DNA, 15 bp, Homo sapiens
atgtccagaggatgg

SEQ ID NO: 361402 - DNA, 15 bp, Homo sapiens
gatgtccagaggatg

SEQ ID NO: 361403 - DNA, 15 bp, Homo sapiens
tgatgtccagaggat

SEQ ID NO: 361404 - DNA, 15 bp, Homo sapiens
gtgatgtccagagga

SEQ ID NO: 361405 - DNA, 15 bp, Homo sapiens
tgtgatgtccagagg

SEQ ID NO: 361406 - DNA, 15 bp, Homo sapiens
ctgtgatgtccagag

SEQ ID NO: 361407 - DNA, 15 bp, Homo sapiens
actgtgatgtccaga

SEQ ID NO: 361408 - DNA, 15 bp, Homo sapiens
cactgtgatgtccag

SEQ ID NO: 361409 - DNA, 15 bp, Homo sapiens
gcactgtgatgtcca

SEQ ID NO: 361410 - DNA, 15 bp, Homo sapiens
agcactgtgatgtcc

SEQ ID NO: 361411 - DNA, 15 bp, Homo sapiens
cagcactgtgatgtc

SEQ ID NO: 361412 - DNA, 15 bp, Homo sapiens
ccagcactgtgatgt

SEQ ID NO: 361413 - DNA, 15 bp, Homo sapiens
cccagcactgtgatg

SEQ ID NO: 361414 - DNA, 15 bp, Homo sapiens
ccccagcactgtgat

SEQ ID NO: 361415 - DNA, 15 bp, Homo sapiens
tccccagcactgtga

SEQ ID NO: 361416 - DNA, 15 bp, Homo sapiens
gtccccagcactgtg

SEQ ID NO: 361417 - DNA, 15 bp, Homo sapiens
tgtccccagcactgt

SEQ ID NO: 361418 - DNA, 15 bp, Homo sapiens
ctgtccccagcactg

SEQ ID NO: 361419 - DNA, 15 bp, Homo sapiens
cctgtccccagcact

SEQ ID NO: 361420 - DNA, 15 bp, Homo sapiens
ccctgtccccagcac

SEQ ID NO: 361421 - DNA, 15 bp, Homo sapiens
accctgtccccagca

SEQ ID NO: 361422 - DNA, 15 bp, Homo sapiens
gaccctgtccccagc

SEQ ID NO: 361423 - DNA, 15 bp, Homo sapiens
tgaccctgtccccag

SEQ ID NO: 361424 - DNA, 15 bp, Homo sapiens
ctgaccctgtcccca

SEQ ID NO: 361425 - DNA, 15 bp, Homo sapiens
gctgaccctgtcccc

SEQ ID NO: 361426 - DNA, 15 bp, Homo sapiens
tgctgaccctgtccc

SEQ ID NO: 361427 - DNA, 15 bp, Homo sapiens
ttgctgaccctgtcc

SEQ ID NO: 361428 - DNA, 15 bp, Homo sapiens
tttgctgaccctgtc

SEQ ID NO: 361429 - DNA, 15 bp, Homo sapiens
ttttgctgaccctgt

SEQ ID NO: 361430 - DNA, 15 bp, Homo sapiens
attttgctgaccctg

SEQ ID NO: 361431 - DNA, 15 bp, Homo sapiens
cattttgctgaccct

SEQ ID NO: 361432 - DNA, 15 bp, Homo sapiens
tcattttgctgaccc

SEQ ID NO: 361433 - DNA, 15 bp, Homo sapiens
ttcattttgctgacc

SEQ ID NO: 361434 - DNA, 15 bp, Homo sapiens
gttcattttgctgac

SEQ ID NO: 361435 - DNA, 15 bp, Homo sapiens
agttcattttgctga

SEQ ID NO: 361436 - DNA, 15 bp, Homo sapiens
aagttcattttgctg

SEQ ID NO: 361437 - DNA, 15 bp, Homo sapiens
caagttcattttgct

SEQ ID NO: 361438 - DNA, 15 bp, Homo sapiens
ccaagttcattttgc

SEQ ID NO: 361439 - DNA, 15 bp, Homo sapiens
cccaagttcattttg

SEQ ID NO: 361440 - DNA, 15 bp, Homo sapiens
ccccaagttcatttt

SEQ ID NO: 361441 - DNA, 15 bp, Homo sapiens
cccccaagttcattt

SEQ ID NO: 361442 - DNA, 15 bp, Homo sapiens
acccccaagttcatt

SEQ ID NO: 361443 - DNA, 15 bp, Homo sapiens
cacccccaagttcat

SEQ ID NO: 361444 - DNA, 15 bp, Homo sapiens
tcacccccaagttca

SEQ ID NO: 361445 - DNA, 15 bp, Homo sapiens
gtcacccccaagttc

SEQ ID NO: 361446 - DNA, 15 bp, Homo sapiens
tgtcacccccaagtt

SEQ ID NO: 361447 - DNA, 15 bp, Homo sapiens
ttgtcacccccaagt

SEQ ID NO: 361448 - DNA, 15 bp, Homo sapiens
gttgtcacccccaag

SEQ ID NO: 361449 - DNA, 15 bp, Homo sapiens
tgttgtcacccccaa

SEQ ID NO: 361450 - DNA, 15 bp, Homo sapiens
ttgttgtcaccccca

SEQ ID NO: 361451 - DNA, 15 bp, Homo sapiens
cttgttgtcaccccc

SEQ ID NO: 361452 - DNA, 15 bp, Homo sapiens
ccttgttgtcacccc

SEQ ID NO: 361453 - DNA, 15 bp, Homo sapiens
tccttgttgtcaccc

SEQ ID NO: 361454 - DNA, 15 bp, Homo sapiens
gtccttgttgtcacc

SEQ ID NO: 361455 - DNA, 15 bp, Homo sapiens
tgtccttgttgtcac

SEQ ID NO: 361456 - DNA, 15 bp, Homo sapiens
ttgtccttgttgtca

SEQ ID NO: 361457 - DNA, 15 bp, Homo sapiens
tttgtccttgttgtc

SEQ ID NO: 361458 - DNA, 15 bp, Homo sapiens
gtttgtccttgttgt

SEQ ID NO: 361459 - DNA, 15 bp, Homo sapiens
ggtttgtccttgttg

SEQ ID NO: 361460 - DNA, 15 bp, Homo sapiens
gggtttgtccttgtt

SEQ ID NO: 361461 - DNA, 15 bp, Homo sapiens
tgggtttgtccttgt

SEQ ID NO: 361462 - DNA, 15 bp, Homo sapiens
ttgggtttgtccttg

SEQ ID NO: 361463 - DNA, 15 bp, Homo sapiens
tttgggtttgtcctt

SEQ ID NO: 361464 - DNA, 15 bp, Homo sapiens
atttgggtttgtcct

SEQ ID NO: 361465 - DNA, 15 bp, Homo sapiens
aatttgggtttgtcc

SEQ ID NO: 361466 - DNA, 15 bp, Homo sapiens
gaatttgggtttgtc

SEQ ID NO: 361467 - DNA, 15 bp, Homo sapiens
ggaatttgggtttgt

SEQ ID NO: 361468 - DNA, 15 bp, Homo sapiens
aggaatttgggtttg

SEQ ID NO: 361469 - DNA, 15 bp, Homo sapiens
caggaatttgggttt

SEQ ID NO: 361470 - DNA, 15 bp, Homo sapiens
ccaggaatttgggtt

SEQ ID NO: 361471 - DNA, 15 bp, Homo sapiens
tccaggaatttgggt

SEQ ID NO: 361472 - DNA, 15 bp, Homo sapiens
ctccaggaatttggg

SEQ ID NO: 361473 - DNA, 15 bp, Homo sapiens
gctccaggaatttgg

SEQ ID NO: 361474 - DNA, 15 bp, Homo sapiens
agctccaggaatttg

SEQ ID NO: 361475 - DNA, 15 bp, Homo sapiens
gagctccaggaattt

SEQ ID NO: 361476 - DNA, 15 bp, Homo sapiens
ggagctccaggaatt

SEQ ID NO: 361477 - DNA, 15 bp, Homo sapiens
gggagctccaggaat

SEQ ID NO: 361478 - DNA, 15 bp, Homo sapiens
agggagctccaggaa

SEQ ID NO: 361479 - DNA, 15 bp, Homo sapiens
gagggagctccagga

SEQ ID NO: 361480 - DNA, 15 bp, Homo sapiens
agagggagctccagg

SEQ ID NO: 361481 - DNA, 15 bp, Homo sapiens
aagagggagctccag

SEQ ID NO: 361482 - DNA, 15 bp, Homo sapiens
taagagggagctcca

SEQ ID NO: 361483 - DNA, 15 bp, Homo sapiens
gtaagagggagctcc

SEQ ID NO: 361484 - DNA, 15 bp, Homo sapiens
tgtaagagggagctc

SEQ ID NO: 361485 - DNA, 15 bp, Homo sapiens
ctgtaagagggagct

SEQ ID NO: 361486 - DNA, 15 bp, Homo sapiens
actgtaagagggagc

SEQ ID NO: 361487 - DNA, 15 bp, Homo sapiens
tactgtaagagggag

SEQ ID NO: 361488 - DNA, 15 bp, Homo sapiens
ctactgtaagaggga

SEQ ID NO: 361489 - DNA, 15 bp, Homo sapiens
cctactgtaagaggg

SEQ ID NO: 361490 - DNA, 15 bp, Homo sapiens
tcctactgtaagagg

SEQ ID NO: 361491 - DNA, 15 bp, Homo sapiens
ctcctactgtaagag

SEQ ID NO: 361492 - DNA, 15 bp, Homo sapiens
tctcctactgtaaga

SEQ ID NO: 361493 - DNA, 15 bp, Homo sapiens
atctcctactgtaag

SEQ ID NO: 361494 - DNA, 15 bp, Homo sapiens
tatctcctactgtaa

SEQ ID NO: 361495 - DNA, 15 bp, Homo sapiens
ctatctcctactgta

SEQ ID NO: 361496 - DNA, 15 bp, Homo sapiens
tctatctcctactgt

SEQ ID NO: 361497 - DNA, 15 bp, Homo sapiens
atctatctcctactg

SEQ ID NO: 361498 - DNA, 15 bp, Homo sapiens
gatctatctcctact

SEQ ID NO: 361499 - DNA, 15 bp, Homo sapiens
agatctatctcctac

SEQ ID NO: 361500 - DNA, 15 bp, Homo sapiens
cagatctatctccta

SEQ ID NO: 361501 - DNA, 15 bp, Homo sapiens
acagatctatctcct

SEQ ID NO: 361502 - DNA, 15 bp, Homo sapiens
aacagatctatctcc

SEQ ID NO: 361503 - DNA, 15 bp, Homo sapiens
aaacagatctatctc

SEQ ID NO: 361504 - DNA, 15 bp, Homo sapiens
caaacagatctatct

SEQ ID NO: 361505 - DNA, 15 bp, Homo sapiens
gcaaacagatctatc

SEQ ID NO: 361506 - DNA, 15 bp, Homo sapiens
agcaaacagatctat

SEQ ID NO: 361507 - DNA, 15 bp, Homo sapiens
tagcaaacagatcta

SEQ ID NO: 361508 - DNA, 15 bp, Homo sapiens
ttagcaaacagatct

SEQ ID NO: 361509 - DNA, 15 bp, Homo sapiens
tttagcaaacagatc

SEQ ID NO: 361510 - DNA, 15 bp, Homo sapiens
ttttagcaaacagat

SEQ ID NO: 361511 - DNA, 15 bp, Homo sapiens
cttttagcaaacaga

SEQ ID NO: 361512 - DNA, 15 bp, Homo sapiens
acttttagcaaacag

SEQ ID NO: 361513 - DNA, 15 bp, Homo sapiens
tacttttagcaaaca

SEQ ID NO: 361514 - DNA, 15 bp, Homo sapiens
gtacttttagcaaac

SEQ ID NO: 361515 - DNA, 15 bp, Homo sapiens
tgtacttttagcaaa

SEQ ID NO: 361516 - DNA, 15 bp, Homo sapiens
ctgtacttttagcaa

SEQ ID NO: 361517 - DNA, 15 bp, Homo sapiens
cctgtacttttagca

SEQ ID NO: 361518 - DNA, 15 bp, Homo sapiens
acctgtacttttagc

SEQ ID NO: 361519 - DNA, 15 bp, Homo sapiens
aacctgtacttttag

SEQ ID NO: 361520 - DNA, 15 bp, Homo sapiens
caacctgtactttta

SEQ ID NO: 361521 - DNA, 15 bp, Homo sapiens
acaacctgtactttt

SEQ ID NO: 361522 - DNA, 15 bp, Homo sapiens
tacaacctgtacttt

SEQ ID NO: 361523 - DNA, 15 bp, Homo sapiens
atacaacctgtactt

SEQ ID NO: 361524 - DNA, 15 bp, Homo sapiens
catacaacctgtact

SEQ ID NO: 361525 - DNA, 15 bp, Homo sapiens
acatacaacctgtac

SEQ ID NO: 361526 - DNA, 15 bp, Homo sapiens
tacatacaacctgta

SEQ ID NO: 361527 - DNA, 15 bp, Homo sapiens
ttacatacaacctgt

SEQ ID NO: 361528 - DNA, 15 bp, Homo sapiens
gttacatacaacctg

SEQ ID NO: 361529 - DNA, 15 bp, Homo sapiens
ggttacatacaacct

SEQ ID NO: 361530 - DNA, 15 bp, Homo sapiens
aggttacatacaacc

SEQ ID NO: 361531 - DNA, 15 bp, Homo sapiens
aaggttacatacaac

SEQ ID NO: 361532 - DNA, 15 bp, Homo sapiens
caaggttacatacaa

SEQ ID NO: 361533 - DNA, 15 bp, Homo sapiens
ccaaggttacataca

SEQ ID NO: 361534 - DNA, 15 bp, Homo sapiens
accaaggttacatac

SEQ ID NO: 361535 - DNA, 15 bp, Homo sapiens
aaccaaggttacata

SEQ ID NO: 361536 - DNA, 15 bp, Homo sapiens
aaaccaaggttacat

SEQ ID NO: 361537 - DNA, 15 bp, Homo sapiens
aaaaccaaggttaca

SEQ ID NO: 361538 - DNA, 15 bp, Homo sapiens
aaaaaccaaggttac

SEQ ID NO: 361539 - DNA, 15 bp, Homo sapiens
caaaaaccaaggtta

SEQ ID NO: 361540 - DNA, 15 bp, Homo sapiens
acaaaaaccaaggtt

SEQ ID NO: 361541 - DNA, 15 bp, Homo sapiens
cacaaaaaccaaggt

SEQ ID NO: 361542 - DNA, 15 bp, Homo sapiens
gcacaaaaaccaagg

SEQ ID NO: 361543 - DNA, 15 bp, Homo sapiens
ggcacaaaaaccaag

SEQ ID NO: 361544 - DNA, 15 bp, Homo sapiens
aggcacaaaaaccaa

SEQ ID NO: 361545 - DNA, 15 bp, Homo sapiens
caggcacaaaaacca

SEQ ID NO: 361546 - DNA, 15 bp, Homo sapiens
acaggcacaaaaacc

SEQ ID NO: 361547 - DNA, 15 bp, Homo sapiens
tacaggcacaaaaac

SEQ ID NO: 361548 - DNA, 15 bp, Homo sapiens
atacaggcacaaaaa

SEQ ID NO: 361549 - DNA, 15 bp, Homo sapiens
tatacaggcacaaaa

SEQ ID NO: 361550 - DNA, 15 bp, Homo sapiens
gtatacaggcacaaa

SEQ ID NO: 361551 - DNA, 15 bp, Homo sapiens
agtatacaggcacaa

SEQ ID NO: 361552 - DNA, 15 bp, Homo sapiens
cagtatacaggcaca

SEQ ID NO: 361553 - DNA, 15 bp, Homo sapiens
ccagtatacaggcac

SEQ ID NO: 361554 - DNA, 15 bp, Homo sapiens
accagtatacaggca

SEQ ID NO: 361555 - DNA, 15 bp, Homo sapiens
caccagtatacaggc

SEQ ID NO: 361556 - DNA, 15 bp, Homo sapiens
gcaccagtatacagg

SEQ ID NO: 361557 - DNA, 15 bp, Homo sapiens
ggcaccagtatacag

SEQ ID NO: 361558 - DNA, 15 bp, Homo sapiens
aggcaccagtataca

SEQ ID NO: 361559 - DNA, 15 bp, Homo sapiens
caggcaccagtatac

SEQ ID NO: 361560 - DNA, 15 bp, Homo sapiens
tcaggcaccagtata

SEQ ID NO: 361561 - DNA, 15 bp, Homo sapiens
ttcaggcaccagtat

SEQ ID NO: 361562 - DNA, 15 bp, Homo sapiens
tttcaggcaccagta

SEQ ID NO: 361563 - DNA, 15 bp, Homo sapiens
ttttcaggcaccagt

SEQ ID NO: 361564 - DNA, 15 bp, Homo sapiens
tttttcaggcaccag

SEQ ID NO: 361565 - DNA, 15 bp, Homo sapiens
ttttttcaggcacca

SEQ ID NO: 361566 - DNA, 15 bp, Homo sapiens
tttttttcaggcacc

SEQ ID NO: 361567 - DNA, 15 bp, Homo sapiens
gtttttttcaggcac

SEQ ID NO: 361568 - DNA, 15 bp, Homo sapiens
tgtttttttcaggca

SEQ ID NO: 361569 - DNA, 15 bp, Homo sapiens
atgtttttttcaggc

SEQ ID NO: 361570 - DNA, 15 bp, Homo sapiens
aatgtttttttcagg

SEQ ID NO: 361571 - DNA, 15 bp, Homo sapiens
taatgtttttttcag

SEQ ID NO: 361572 - DNA, 15 bp, Homo sapiens
ttaatgtttttttca

SEQ ID NO: 361573 - DNA, 15 bp, Homo sapiens
attaatgtttttttc

SEQ ID NO: 361574 - DNA, 15 bp, Homo sapiens
tattaatgttttttt

SEQ ID NO: 361575 - DNA, 15 bp, Homo sapiens
gtattaatgtttttt

SEQ ID NO: 361576 - DNA, 15 bp, Homo sapiens
agtattaatgttttt

SEQ ID NO: 361577 - DNA, 15 bp, Homo sapiens
aagtattaatgtttt

SEQ ID NO: 361578 - DNA, 15 bp, Homo sapiens
caagtattaatgttt

SEQ ID NO: 361579 - DNA, 15 bp, Homo sapiens
ccaagtattaatgtt

SEQ ID NO: 361580 - DNA, 15 bp, Homo sapiens
cccaagtattaatgt

SEQ ID NO: 361581 - DNA, 15 bp, Homo sapiens
tcccaagtattaatg

SEQ ID NO: 361582 - DNA, 15 bp, Homo sapiens
gtcccaagtattaat

SEQ ID NO: 361583 - DNA, 15 bp, Homo sapiens
tgtcccaagtattaa

SEQ ID NO: 361584 - DNA, 15 bp, Homo sapiens
atgtcccaagtatta

SEQ ID NO: 361585 - DNA, 15 bp, Homo sapiens
aatgtcccaagtatt

SEQ ID NO: 361586 - DNA, 15 bp, Homo sapiens
aaatgtcccaagtat

SEQ ID NO: 361587 - DNA, 15 bp, Homo sapiens
aaaatgtcccaagta

SEQ ID NO: 361588 - DNA, 15 bp, Homo sapiens
aaaaatgtcccaagt

SEQ ID NO: 361589 - DNA, 15 bp, Homo sapiens
taaaaatgtcccaag

SEQ ID NO: 361590 - DNA, 15 bp, Homo sapiens
ataaaaatgtcccaa

SEQ ID NO: 361591 - DNA, 15 bp, Homo sapiens
aataaaaatgtccca

SEQ ID NO: 361592 - DNA, 15 bp, Homo sapiens
aaataaaaatgtccc

SEQ ID NO: 361593 - DNA, 15 bp, Homo sapiens
aaaataaaaatgtcc

SEQ ID NO: 361594 - DNA, 15 bp, Homo sapiens
caaaataaaaatgtc

SEQ ID NO: 361595 - DNA, 15 bp, Homo sapiens
gcaaaataaaaatgt

SEQ ID NO: 361596 - DNA, 15 bp, Homo sapiens
ggcaaaataaaaatg

SEQ ID NO: 361597 - DNA, 15 bp, Homo sapiens
tggcaaaataaaaat

SEQ ID NO: 361598 - DNA, 15 bp, Homo sapiens
ttggcaaaataaaaa

SEQ ID NO: 361599 - DNA, 15 bp, Homo sapiens
cttggcaaaataaaa

SEQ ID NO: 361600 - DNA, 15 bp, Homo sapiens
ccttggcaaaataaa

SEQ ID NO: 361601 - DNA, 15 bp, Homo sapiens
accttggcaaaataa

SEQ ID NO: 361602 - DNA, 15 bp, Homo sapiens
aaccttggcaaaata

SEQ ID NO: 361603 - DNA, 15 bp, Homo sapiens
gaaccttggcaaaat

SEQ ID NO: 361604 - DNA, 15 bp, Homo sapiens
agaaccttggcaaaa

SEQ ID NO: 361605 - DNA, 15 bp, Homo sapiens
cagaaccttggcaaa

SEQ ID NO: 361606 - DNA, 15 bp, Homo sapiens
ccagaaccttggcaa

SEQ ID NO: 361607 - DNA, 15 bp, Homo sapiens
cccagaaccttggca

SEQ ID NO: 361608 - DNA, 15 bp, Homo sapiens
tcccagaaccttggc

SEQ ID NO: 361609 - DNA, 15 bp, Homo sapiens
ctcccagaaccttgg

SEQ ID NO: 361610 - DNA, 15 bp, Homo sapiens
tctcccagaaccttg

SEQ ID NO: 361611 - DNA, 15 bp, Homo sapiens
ttctcccagaacctt

SEQ ID NO: 361612 - DNA, 15 bp, Homo sapiens
cttctcccagaacct

SEQ ID NO: 361613 - DNA, 15 bp, Homo sapiens
ccttctcccagaacc

SEQ ID NO: 361614 - DNA, 15 bp, Homo sapiens
tccttctcccagaac

SEQ ID NO: 361615 - DNA, 15 bp, Homo sapiens
ttccttctcccagaa

SEQ ID NO: 361616 - DNA, 15 bp, Homo sapiens
tttccttctcccaga

SEQ ID NO: 361617 - DNA, 15 bp, Homo sapiens
ttttccttctcccag

SEQ ID NO: 361618 - DNA, 15 bp, Homo sapiens
cttttccttctccca

SEQ ID NO: 361619 - DNA, 15 bp, Homo sapiens
acttttccttctccc

SEQ ID NO: 361620 - DNA, 15 bp, Homo sapiens
cacttttccttctcc

SEQ ID NO: 361621 - DNA, 15 bp, Homo sapiens
tcacttttccttctc

SEQ ID NO: 361622 - DNA, 15 bp, Homo sapiens
ttcacttttccttct

SEQ ID NO: 361623 - DNA, 15 bp, Homo sapiens
cttcacttttccttc

SEQ ID NO: 361624 - DNA, 15 bp, Homo sapiens
ccttcacttttcctt

SEQ ID NO: 361625 - DNA, 15 bp, Homo sapiens
cccttcacttttcct

SEQ ID NO: 361626 - DNA, 15 bp, Homo sapiens
acccttcacttttcc

SEQ ID NO: 361627 - DNA, 15 bp, Homo sapiens
aacccttcacttttc

SEQ ID NO: 361628 - DNA, 15 bp, Homo sapiens
caacccttcactttt

SEQ ID NO: 361629 - DNA, 15 bp, Homo sapiens
ccaacccttcacttt

SEQ ID NO: 361630 - DNA, 15 bp, Homo sapiens
cccaacccttcactt

SEQ ID NO: 361631 - DNA, 15 bp, Homo sapiens
gcccaacccttcact

SEQ ID NO: 361632 - DNA, 15 bp, Homo sapiens
tgcccaacccttcac

SEQ ID NO: 361633 - DNA, 15 bp, Homo sapiens
gtgcccaacccttca

SEQ ID NO: 361634 - DNA, 15 bp, Homo sapiens
ggtgcccaacccttc

SEQ ID NO: 361635 - DNA, 15 bp, Homo sapiens
tggtgcccaaccctt

SEQ ID NO: 361636 - DNA, 15 bp, Homo sapiens
atggtgcccaaccct

SEQ ID NO: 361637 - DNA, 15 bp, Homo sapiens
aatggtgcccaaccc

SEQ ID NO: 361638 - DNA, 15 bp, Homo sapiens
aaatggtgcccaacc

SEQ ID NO: 361639 - DNA, 15 bp, Homo sapiens
taaatggtgcccaac

SEQ ID NO: 361640 - DNA, 15 bp, Homo sapiens
ctaaatggtgcccaa

SEQ ID NO: 361641 - DNA, 15 bp, Homo sapiens
gctaaatggtgccca

SEQ ID NO: 361642 - DNA, 15 bp, Homo sapiens
agctaaatggtgccc

SEQ ID NO: 361643 - DNA, 15 bp, Homo sapiens
gagctaaatggtgcc

SEQ ID NO: 361644 - DNA, 15 bp, Homo sapiens
ggagctaaatggtgc

SEQ ID NO: 361645 - DNA, 15 bp, Homo sapiens
aggagctaaatggtg

SEQ ID NO: 361646 - DNA, 15 bp, Homo sapiens
caggagctaaatggt

SEQ ID NO: 361647 - DNA, 15 bp, Homo sapiens
ccaggagctaaatgg

SEQ ID NO: 361648 - DNA, 15 bp, Homo sapiens
tccaggagctaaatg

SEQ ID NO: 361649 - DNA, 15 bp, Homo sapiens
ttccaggagctaaat

SEQ ID NO: 361650 - DNA, 15 bp, Homo sapiens
attccaggagctaaa

SEQ ID NO: 361651 - DNA, 15 bp, Homo sapiens
aattccaggagctaa

SEQ ID NO: 361652 - DNA, 15 bp, Homo sapiens
gaattccaggagcta

SEQ ID NO: 361653 - DNA, 15 bp, Homo sapiens
agaattccaggagct

SEQ ID NO: 361654 - DNA, 15 bp, Homo sapiens
cagaattccaggagc

SEQ ID NO: 361655 - DNA, 15 bp, Homo sapiens
gcagaattccaggag

SEQ ID NO: 361656 - DNA, 15 bp, Homo sapiens
tgcagaattccagga

SEQ ID NO: 361657 - DNA, 15 bp, Homo sapiens
ttgcagaattccagg

SEQ ID NO: 361658 - DNA, 15 bp, Homo sapiens
cttgcagaattccag

SEQ ID NO: 361659 - DNA, 15 bp, Homo sapiens
acttgcagaattcca

SEQ ID NO: 361660 - DNA, 15 bp, Homo sapiens
gacttgcagaattcc

SEQ ID NO: 361661 - DNA, 15 bp, Homo sapiens
ggacttgcagaattc

SEQ ID NO: 361662 - DNA, 15 bp, Homo sapiens
aggacttgcagaatt

SEQ ID NO: 361663 - DNA, 15 bp, Homo sapiens
aaggacttgcagaat

SEQ ID NO: 361664 - DNA, 15 bp, Homo sapiens
gaaggacttgcagaa

SEQ ID NO: 361665 - DNA, 15 bp, Homo sapiens
ggaaggacttgcaga

SEQ ID NO: 361666 - DNA, 15 bp, Homo sapiens
cggaaggacttgcag

SEQ ID NO: 361667 - DNA, 15 bp, Homo sapiens
gcggaaggacttgca

SEQ ID NO: 361668 - DNA, 15 bp, Homo sapiens
ggcggaaggacttgc

SEQ ID NO: 361669 - DNA, 15 bp, Homo sapiens
aggcggaaggacttg

SEQ ID NO: 361670 - DNA, 15 bp, Homo sapiens
gaggcggaaggactt

SEQ ID NO: 361671 - DNA, 15 bp, Homo sapiens
ggaggcggaaggact

SEQ ID NO: 361672 - DNA, 15 bp, Homo sapiens
aggaggcggaaggac

SEQ ID NO: 361673 - DNA, 15 bp, Homo sapiens
caggaggcggaagga

SEQ ID NO: 361674 - DNA, 15 bp, Homo sapiens
gcaggaggcggaagg

SEQ ID NO: 361675 - DNA, 15 bp, Homo sapiens
cgcaggaggcggaag

SEQ ID NO: 361676 - DNA, 15 bp, Homo sapiens
acgcaggaggcggaa

SEQ ID NO: 361677 - DNA, 15 bp, Homo sapiens
aacgcaggaggcgga

SEQ ID NO: 361678 - DNA, 15 bp, Homo sapiens
aaacgcaggaggcgg

SEQ ID NO: 361679 - DNA, 15 bp, Homo sapiens
aaaacgcaggaggcg

SEQ ID NO: 361680 - DNA, 15 bp, Homo sapiens
caaaacgcaggaggc

SEQ ID NO: 361681 - DNA, 15 bp, Homo sapiens
ccaaaacgcaggagg

SEQ ID NO: 361682 - DNA, 15 bp, Homo sapiens
gccaaaacgcaggag

SEQ ID NO: 361683 - DNA, 15 bp, Homo sapiens
agccaaaacgcagga

SEQ ID NO: 361684 - DNA, 15 bp, Homo sapiens
cagccaaaacgcagg

SEQ ID NO: 361685 - DNA, 15 bp, Homo sapiens
acagccaaaacgcag

SEQ ID NO: 361686 - DNA, 15 bp, Homo sapiens
aacagccaaaacgca

SEQ ID NO: 361687 - DNA, 15 bp, Homo sapiens
caacagccaaaacgc

SEQ ID NO: 361688 - DNA, 15 bp, Homo sapiens
ccaacagccaaaacg

SEQ ID NO: 361689 - DNA, 15 bp, Homo sapiens
cccaacagccaaaac

SEQ ID NO: 361690 - DNA, 15 bp, Homo sapiens
gcccaacagccaaaa

SEQ ID NO: 361691 - DNA, 15 bp, Homo sapiens
ggcccaacagccaaa

SEQ ID NO: 361692 - DNA, 15 bp, Homo sapiens
aggcccaacagccaa

SEQ ID NO: 361693 - DNA, 15 bp, Homo sapiens
aaggcccaacagcca

SEQ ID NO: 361694 - DNA, 15 bp, Homo sapiens
aaaggcccaacagcc

SEQ ID NO: 361695 - DNA, 15 bp, Homo sapiens
gaaaggcccaacagc

SEQ ID NO: 361696 - DNA, 15 bp, Homo sapiens
ggaaaggcccaacag

SEQ ID NO: 361697 - DNA, 15 bp, Homo sapiens
gggaaaggcccaaca

SEQ ID NO: 361698 - DNA, 15 bp, Homo sapiens
ggggaaaggcccaac

SEQ ID NO: 361699 - DNA, 15 bp, Homo sapiens
gggggaaaggcccaa

SEQ ID NO: 361700 - DNA, 15 bp, Homo sapiens
ggggggaaaggccca

SEQ ID NO: 361701 - DNA, 15 bp, Homo sapiens
tggggggaaaggccc

SEQ ID NO: 361702 - DNA, 15 bp, Homo sapiens
gtggggggaaaggcc

SEQ ID NO: 361703 - DNA, 15 bp, Homo sapiens
agtggggggaaaggc

SEQ ID NO: 361704 - DNA, 15 bp, Homo sapiens
tagtggggggaaagg

SEQ ID NO: 361705 - DNA, 15 bp, Homo sapiens
ttagtggggggaaag

SEQ ID NO: 361706 - DNA, 15 bp, Homo sapiens
attagtggggggaaa

SEQ ID NO: 361707 - DNA, 15 bp, Homo sapiens
aattagtggggggaa

SEQ ID NO: 361708 - DNA, 15 bp, Homo sapiens
taattagtgggggga

SEQ ID NO: 361709 - DNA, 15 bp, Homo sapiens
ttaattagtgggggg

SEQ ID NO: 361710 - DNA, 15 bp, Homo sapiens
tttaattagtggggg

SEQ ID NO: 361711 - DNA, 15 bp, Homo sapiens
ttttaattagtgggg

SEQ ID NO: 361712 - DNA, 15 bp, Homo sapiens
cttttaattagtggg

SEQ ID NO: 361713 - DNA, 15 bp, Homo sapiens
acttttaattagtgg

SEQ ID NO: 361714 - DNA, 15 bp, Homo sapiens
aacttttaattagtg

SEQ ID NO: 361715 - DNA, 15 bp, Homo sapiens
aaacttttaattagt

SEQ ID NO: 361716 - DNA, 15 bp, Homo sapiens
aaaacttttaattag

SEQ ID NO: 361717 - DNA, 15 bp, Homo sapiens
caaaacttttaatta

SEQ ID NO: 361718 - DNA, 15 bp, Homo sapiens
gcaaaacttttaatt

SEQ ID NO: 361719 - DNA, 15 bp, Homo sapiens
agcaaaacttttaat

SEQ ID NO: 361720 - DNA, 15 bp, Homo sapiens
cagcaaaacttttaa

SEQ ID NO: 361721 - DNA, 15 bp, Homo sapiens
ccagcaaaactttta

SEQ ID NO: 361722 - DNA, 15 bp, Homo sapiens
cccagcaaaactttt

SEQ ID NO: 361723 - DNA, 15 bp, Homo sapiens
ccccagcaaaacttt

SEQ ID NO: 361724 - DNA, 15 bp, Homo sapiens
gccccagcaaaactt

SEQ ID NO: 361725 - DNA, 15 bp, Homo sapiens
cgccccagcaaaact

SEQ ID NO: 361726 - DNA, 15 bp, Homo sapiens
acgccccagcaaaac

SEQ ID NO: 361727 - DNA, 15 bp, Homo sapiens
aacgccccagcaaaa

SEQ ID NO: 361728 - DNA, 15 bp, Homo sapiens
caacgccccagcaaa

SEQ ID NO: 361729 - DNA, 15 bp, Homo sapiens
acaacgccccagcaa

SEQ ID NO: 361730 - DNA, 15 bp, Homo sapiens
gacaacgccccagca

SEQ ID NO: 361731 - DNA, 15 bp, Homo sapiens
tgacaacgccccagc

SEQ ID NO: 361732 - DNA, 15 bp, Homo sapiens
atgacaacgccccag

SEQ ID NO: 361733 - DNA, 15 bp, Homo sapiens
tatgacaacgcccca

SEQ ID NO: 361734 - DNA, 15 bp, Homo sapiens
ttatgacaacgcccc

SEQ ID NO: 361735 - DNA, 15 bp, Homo sapiens
tttatgacaacgccc

SEQ ID NO: 361736 - DNA, 15 bp, Homo sapiens
atttatgacaacgcc

SEQ ID NO: 361737 - DNA, 15 bp, Homo sapiens
aatttatgacaacgc

SEQ ID NO: 361738 - DNA, 15 bp, Homo sapiens
taatttatgacaacg

SEQ ID NO: 361739 - DNA, 15 bp, Homo sapiens
ttaatttatgacaac

SEQ ID NO: 361740 - DNA, 15 bp, Homo sapiens
tttaatttatgacaa

SEQ ID NO: 361741 - DNA, 15 bp, Homo sapiens
atttaatttatgaca

SEQ ID NO: 361742 - DNA, 15 bp, Homo sapiens
tatttaatttatgac

SEQ ID NO: 361743 - DNA, 15 bp, Homo sapiens
gtatttaatttatga

SEQ ID NO: 361744 - DNA, 15 bp, Homo sapiens
agtatttaatttatg

SEQ ID NO: 361745 - DNA, 15 bp, Homo sapiens
aagtatttaatttat

SEQ ID NO: 361746 - DNA, 15 bp, Homo sapiens
aaagtatttaattta

SEQ ID NO: 361747 - DNA, 15 bp, Homo sapiens
taaagtatttaattt

SEQ ID NO: 361748 - DNA, 15 bp, Homo sapiens
ttaaagtatttaatt

SEQ ID NO: 361749 - DNA, 15 bp, Homo sapiens
attaaagtatttaat

SEQ ID NO: 361750 - DNA, 15 bp, Homo sapiens
cattaaagtatttaa

SEQ ID NO: 361751 - DNA, 15 bp, Homo sapiens
tcattaaagtattta

SEQ ID NO: 361752 - DNA, 15 bp, Homo sapiens
ttcattaaagtattt

SEQ ID NO: 361753 - DNA, 15 bp, Homo sapiens
gttcattaaagtatt

SEQ ID NO: 361754 - DNA, 15 bp, Homo sapiens
cgttcattaaagtat

SEQ ID NO: 361755 - DNA, 15 bp, Homo sapiens
acgttcattaaagta

SEQ ID NO: 361756 - DNA, 15 bp, Homo sapiens
cacgttcattaaagt

SEQ ID NO: 361757 - DNA, 15 bp, Homo sapiens
acacgttcattaaag

SEQ ID NO: 361758 - DNA, 15 bp, Homo sapiens
tacacgttcattaaa

SEQ ID NO: 361759 - DNA, 15 bp, Homo sapiens
ttacacgttcattaa

SEQ ID NO: 361760 - DNA, 15 bp, Homo sapiens
gttacacgttcatta

SEQ ID NO: 361761 - DNA, 15 bp, Homo sapiens
ggttacacgttcatt

SEQ ID NO: 361762 - DNA, 15 bp, Homo sapiens
cggttacacgttcat

SEQ ID NO: 361763 - DNA, 15 bp, Homo sapiens
tcggttacacgttca

SEQ ID NO: 361764 - DNA, 15 bp, Homo sapiens
ttcggttacacgttc

SEQ ID NO: 361765 - DNA, 15 bp, Homo sapiens
cttcggttacacgtt

SEQ ID NO: 361766 - DNA, 15 bp, Homo sapiens
gcttcggttacacgt

SEQ ID NO: 361767 - DNA, 15 bp, Homo sapiens
ggcttcggttacacg

SEQ ID NO: 361768 - DNA, 15 bp, Homo sapiens
gggcttcggttacac

SEQ ID NO: 361769 - DNA, 15 bp, Homo sapiens
tgggcttcggttaca

SEQ ID NO: 361770 - DNA, 15 bp, Homo sapiens
atgggcttcggttac

SEQ ID NO: 361771 - DNA, 15 bp, Homo sapiens
tatgggcttcggtta

SEQ ID NO: 361772 - DNA, 15 bp, Homo sapiens
gtatgggcttcggtt

SEQ ID NO: 361773 - DNA, 15 bp, Homo sapiens
agtatgggcttcggt

SEQ ID NO: 361774 - DNA, 15 bp, Homo sapiens
gagtatgggcttcgg

SEQ ID NO: 361775 - DNA, 15 bp, Homo sapiens
agagtatgggcttcg

SEQ ID NO: 361776 - DNA, 15 bp, Homo sapiens
cagagtatgggcttc

SEQ ID NO: 361777 - DNA, 15 bp, Homo sapiens
gcagagtatgggctt

SEQ ID NO: 361778 - DNA, 15 bp, Homo sapiens
tgcagagtatgggct

SEQ ID NO: 361779 - DNA, 15 bp, Homo sapiens
ctgcagagtatgggc

SEQ ID NO: 361780 - DNA, 15 bp, Homo sapiens
gctgcagagtatggg

SEQ ID NO: 361781 - DNA, 15 bp, Homo sapiens
ggctgcagagtatgg

SEQ ID NO: 361782 - DNA, 15 bp, Homo sapiens
tggctgcagagtatg

SEQ ID NO: 361783 - DNA, 15 bp, Homo sapiens
ctggctgcagagtat

SEQ ID NO: 361784 - DNA, 15 bp, Homo sapiens
actggctgcagagta

SEQ ID NO: 361785 - DNA, 15 bp, Homo sapiens
gactggctgcagagt

SEQ ID NO: 361786 - DNA, 15 bp, Homo sapiens
ggactggctgcagag

SEQ ID NO: 361787 - DNA, 15 bp, Homo sapiens
aggactggctgcaga

SEQ ID NO: 361788 - DNA, 15 bp, Homo sapiens
gaggactggctgcag

SEQ ID NO: 361789 - DNA, 15 bp, Homo sapiens
ggaggactggctgca

SEQ ID NO: 361790 - DNA, 15 bp, Homo sapiens
aggaggactggctgc

SEQ ID NO: 361791 - DNA, 15 bp, Homo sapiens
caggaggactggctg

SEQ ID NO: 361792 - DNA, 15 bp, Homo sapiens
ccaggaggactggct

SEQ ID NO: 361793 - DNA, 15 bp, Homo sapiens
cccaggaggactggc

SEQ ID NO: 361794 - DNA, 15 bp, Homo sapiens
tcccaggaggactgg

SEQ ID NO: 361795 - DNA, 15 bp, Homo sapiens
gtcccaggaggactg

SEQ ID NO: 361796 - DNA, 15 bp, Homo sapiens
agtcccaggaggact

SEQ ID NO: 361797 - DNA, 15 bp, Homo sapiens
gagtcccaggaggac

SEQ ID NO: 361798 - DNA, 15 bp, Homo sapiens
agagtcccaggagga

SEQ ID NO: 361799 - DNA, 15 bp, Homo sapiens
tagagtcccaggagg

SEQ ID NO: 361800 - DNA, 15 bp, Homo sapiens
gtagagtcccaggag

SEQ ID NO: 361801 - DNA, 15 bp, Homo sapiens
ggtagagtcccagga

SEQ ID NO: 361802 - DNA, 15 bp, Homo sapiens
tggtagagtcccagg

SEQ ID NO: 361803 - DNA, 15 bp, Homo sapiens
ctggtagagtcccag

SEQ ID NO: 361804 - DNA, 15 bp, Homo sapiens
gctggtagagtccca

SEQ ID NO: 361805 - DNA, 15 bp, Homo sapiens
agctggtagagtccc

SEQ ID NO: 361806 - DNA, 15 bp, Homo sapiens
gagctggtagagtcc

SEQ ID NO: 361807 - DNA, 15 bp, Homo sapiens
ggagctggtagagtc

SEQ ID NO: 361808 - DNA, 15 bp, Homo sapiens
gggagctggtagagt

SEQ ID NO: 361809 - DNA, 15 bp, Homo sapiens
agggagctggtagag

SEQ ID NO: 361810 - DNA, 15 bp, Homo sapiens
gagggagctggtaga

SEQ ID NO: 361811 - DNA, 15 bp, Homo sapiens
tgagggagctggtag

SEQ ID NO: 361812 - DNA, 15 bp, Homo sapiens
ttgagggagctggta

SEQ ID NO: 361813 - DNA, 15 bp, Homo sapiens
cttgagggagctggt

SEQ ID NO: 361814 - DNA, 15 bp, Homo sapiens
acttgagggagctgg

SEQ ID NO: 361815 - DNA, 15 bp, Homo sapiens
aacttgagggagctg

SEQ ID NO: 361816 - DNA, 15 bp, Homo sapiens
caacttgagggagct

SEQ ID NO: 361817 - DNA, 15 bp, Homo sapiens
ccaacttgagggagc

SEQ ID NO: 361818 - DNA, 15 bp, Homo sapiens
cccaacttgagggag

SEQ ID NO: 361819 - DNA, 15 bp, Homo sapiens
tcccaacttgaggga

SEQ ID NO: 361820 - DNA, 15 bp, Homo sapiens
ttcccaacttgaggg

SEQ ID NO: 361821 - DNA, 15 bp, Homo sapiens
cttcccaacttgagg

SEQ ID NO: 361822 - DNA, 15 bp, Homo sapiens
ccttcccaacttgag

SEQ ID NO: 361823 - DNA, 15 bp, Homo sapiens
gccttcccaacttga

SEQ ID NO: 361824 - DNA, 15 bp, Homo sapiens
cgccttcccaacttg

SEQ ID NO: 361825 - DNA, 15 bp, Homo sapiens
acgccttcccaactt

SEQ ID NO: 361826 - DNA, 15 bp, Homo sapiens
aacgccttcccaact

SEQ ID NO: 361827 - DNA, 15 bp, Homo sapiens
gaacgccttcccaac

SEQ ID NO: 361828 - DNA, 15 bp, Homo sapiens
ggaacgccttcccaa

SEQ ID NO: 361829 - DNA, 15 bp, Homo sapiens
aggaacgccttccca

SEQ ID NO: 361830 - DNA, 15 bp, Homo sapiens
caggaacgccttccc

SEQ ID NO: 361831 - DNA, 15 bp, Homo sapiens
gcaggaacgccttcc

SEQ ID NO: 361832 - DNA, 15 bp, Homo sapiens
agcaggaacgccttc

SEQ ID NO: 361833 - DNA, 15 bp, Homo sapiens
aagcaggaacgcctt

SEQ ID NO: 361834 - DNA, 15 bp, Homo sapiens
caagcaggaacgcct

SEQ ID NO: 361835 - DNA, 15 bp, Homo sapiens
gcaagcaggaacgcc

SEQ ID NO: 361836 - DNA, 15 bp, Homo sapiens
ggcaagcaggaacgc

SEQ ID NO: 361837 - DNA, 15 bp, Homo sapiens
aggcaagcaggaacg

SEQ ID NO: 361838 - DNA, 15 bp, Homo sapiens
caggcaagcaggaac

SEQ ID NO: 361839 - DNA, 15 bp, Homo sapiens
ccaggcaagcaggaa

SEQ ID NO: 361840 - DNA, 15 bp, Homo sapiens
accaggcaagcagga

SEQ ID NO: 361841 - DNA, 15 bp, Homo sapiens
caccaggcaagcagg

SEQ ID NO: 361842 - DNA, 15 bp, Homo sapiens
gcaccaggcaagcag

SEQ ID NO: 361843 - DNA, 15 bp, Homo sapiens
ggcaccaggcaagca

SEQ ID NO: 361844 - DNA, 15 bp, Homo sapiens
cggcaccaggcaagc

SEQ ID NO: 361845 - DNA, 15 bp, Homo sapiens
ccggcaccaggcaag

SEQ ID NO: 361846 - DNA, 15 bp, Homo sapiens
accggcaccaggcaa

SEQ ID NO: 361847 - DNA, 15 bp, Homo sapiens
gaccggcaccaggca

SEQ ID NO: 361848 - DNA, 15 bp, Homo sapiens
agaccggcaccaggc

SEQ ID NO: 361849 - DNA, 15 bp, Homo sapiens
tagaccggcaccagg

SEQ ID NO: 361850 - DNA, 15 bp, Homo sapiens
ttagaccggcaccag

SEQ ID NO: 361851 - DNA, 15 bp, Homo sapiens
attagaccggcacca

SEQ ID NO: 361852 - DNA, 15 bp, Homo sapiens
tattagaccggcacc

SEQ ID NO: 361853 - DNA, 15 bp, Homo sapiens
ttattagaccggcac

SEQ ID NO: 361854 - DNA, 15 bp, Homo sapiens
cttattagaccggca

SEQ ID NO: 361855 - DNA, 15 bp, Homo sapiens
acttattagaccggc

SEQ ID NO: 361856 - DNA, 15 bp, Homo sapiens
cacttattagaccgg

SEQ ID NO: 361857 - DNA, 15 bp, Homo sapiens
ccacttattagaccg

SEQ ID NO: 361858 - DNA, 15 bp, Homo sapiens
gccacttattagacc

SEQ ID NO: 361859 - DNA, 15 bp, Homo sapiens
ggccacttattagac

SEQ ID NO: 361860 - DNA, 15 bp, Homo sapiens
gggccacttattaga

SEQ ID NO: 361861 - DNA, 15 bp, Homo sapiens
cgggccacttattag

SEQ ID NO: 361862 - DNA, 15 bp, Homo sapiens
gcgggccacttatta

SEQ ID NO: 361863 - DNA, 15 bp, Homo sapiens
tgcgggccacttatt

SEQ ID NO: 361864 - DNA, 15 bp, Homo sapiens
ttgcgggccacttat

SEQ ID NO: 361865 - DNA, 15 bp, Homo sapiens
tttgcgggccactta

SEQ ID NO: 361866 - DNA, 15 bp, Homo sapiens
ctttgcgggccactt

SEQ ID NO: 361867 - DNA, 15 bp, Homo sapiens
gctttgcgggccact

SEQ ID NO: 361868 - DNA, 15 bp, Homo sapiens
tgctttgcgggccac

SEQ ID NO: 361869 - DNA, 15 bp, Homo sapiens
atgctttgcgggcca

SEQ ID NO: 361870 - DNA, 15 bp, Homo sapiens
catgctttgcgggcc

SEQ ID NO: 361871 - DNA, 15 bp, Homo sapiens
acatgctttgcgggc

SEQ ID NO: 361872 - DNA, 15 bp, Homo sapiens
cacatgctttgcggg

SEQ ID NO: 361873 - DNA, 15 bp, Homo sapiens
tcacatgctttgcgg

SEQ ID NO: 361874 - DNA, 15 bp, Homo sapiens
atcacatgctttgcg

SEQ ID NO: 361875 - DNA, 15 bp, Homo sapiens
tatcacatgctttgc

SEQ ID NO: 361876 - DNA, 15 bp, Homo sapiens
atatcacatgctttg

SEQ ID NO: 361877 - DNA, 15 bp, Homo sapiens
aatatcacatgcttt

SEQ ID NO: 361878 - DNA, 15 bp, Homo sapiens
aaatatcacatgctt

SEQ ID NO: 361879 - DNA, 15 bp, Homo sapiens
aaaatatcacatgct

SEQ ID NO: 361880 - DNA, 15 bp, Homo sapiens
caaaatatcacatgc

SEQ ID NO: 361881 - DNA, 15 bp, Homo sapiens
gcaaaatatcacatg

SEQ ID NO: 361882 - DNA, 15 bp, Homo sapiens
agcaaaatatcacat

SEQ ID NO: 361883 - DNA, 15 bp, Homo sapiens
aagcaaaatatcaca

SEQ ID NO: 361884 - DNA, 15 bp, Homo sapiens
aaagcaaaatatcac

SEQ ID NO: 361885 - DNA, 15 bp, Homo sapiens
gaaagcaaaatatca

SEQ ID NO: 361886 - DNA, 15 bp, Homo sapiens
cgaaagcaaaatatc

SEQ ID NO: 361887 - DNA, 15 bp, Homo sapiens
tcgaaagcaaaatat

SEQ ID NO: 361888 - DNA, 15 bp, Homo sapiens
atcgaaagcaaaata

SEQ ID NO: 361889 - DNA, 15 bp, Homo sapiens
aatcgaaagcaaaat

SEQ ID NO: 361890 - DNA, 15 bp, Homo sapiens
aaatcgaaagcaaaa

SEQ ID NO: 361891 - DNA, 15 bp, Homo sapiens
taaatcgaaagcaaa

SEQ ID NO: 361892 - DNA, 15 bp, Homo sapiens
gtaaatcgaaagcaa

SEQ ID NO: 361893 - DNA, 15 bp, Homo sapiens
tgtaaatcgaaagca

SEQ ID NO: 361894 - DNA, 15 bp, Homo sapiens
ttgtaaatcgaaagc

SEQ ID NO: 361895 - DNA, 15 bp, Homo sapiens
tttgtaaatcgaaag

SEQ ID NO: 361896 - DNA, 15 bp, Homo sapiens
ttttgtaaatcgaaa

SEQ ID NO: 361897 - DNA, 15 bp, Homo sapiens
gttttgtaaatcgaa

SEQ ID NO: 361898 - DNA, 15 bp, Homo sapiens
tgttttgtaaatcga

SEQ ID NO: 361899 - DNA, 15 bp, Homo sapiens
gtgttttgtaaatcg

SEQ ID NO: 361900 - DNA, 15 bp, Homo sapiens
ggtgttttgtaaatc

SEQ ID NO: 361901 - DNA, 15 bp, Homo sapiens
tggtgttttgtaaat

SEQ ID NO: 361902 - DNA, 15 bp, Homo sapiens
ctggtgttttgtaaa

SEQ ID NO: 361903 - DNA, 15 bp, Homo sapiens
tctggtgttttgtaa

SEQ ID NO: 361904 - DNA, 15 bp, Homo sapiens
atctggtgttttgta

SEQ ID NO: 361905 - DNA, 15 bp, Homo sapiens
tatctggtgttttgt

SEQ ID NO: 361906 - DNA, 15 bp, Homo sapiens
ttatctggtgttttg

SEQ ID NO: 361907 - DNA, 15 bp, Homo sapiens
tttatctggtgtttt

SEQ ID NO: 361908 - DNA, 15 bp, Homo sapiens
atttatctggtgttt

SEQ ID NO: 361909 - DNA, 15 bp, Homo sapiens
catttatctggtgtt

SEQ ID NO: 361910 - DNA, 15 bp, Homo sapiens
ccatttatctggtgt

SEQ ID NO: 361911 - DNA, 15 bp, Homo sapiens
accatttatctggtg

SEQ ID NO: 361912 - DNA, 15 bp, Homo sapiens
aaccatttatctggt

SEQ ID NO: 361913 - DNA, 15 bp, Homo sapiens
taaccatttatctgg

SEQ ID NO: 361914 - DNA, 15 bp, Homo sapiens
ataaccatttatctg

SEQ ID NO: 361915 - DNA, 15 bp, Homo sapiens
aataaccatttatct

SEQ ID NO: 361916 - DNA, 15 bp, Homo sapiens
taataaccatttatc

SEQ ID NO: 361917 - DNA, 15 bp, Homo sapiens
ttaataaccatttat

SEQ ID NO: 361918 - DNA, 15 bp, Homo sapiens
attaataaccattta

SEQ ID NO: 361919 - DNA, 15 bp, Homo sapiens
tattaataaccattt

SEQ ID NO: 361920 - DNA, 15 bp, Homo sapiens
ttattaataaccatt

SEQ ID NO: 361921 - DNA, 15 bp, Homo sapiens
cttattaataaccat

SEQ ID NO: 361922 - DNA, 15 bp, Homo sapiens
ccttattaataacca

SEQ ID NO: 361923 - DNA, 15 bp, Homo sapiens
tccttattaataacc

SEQ ID NO: 361924 - DNA, 15 bp, Homo sapiens
ctccttattaataac

SEQ ID NO: 361925 - DNA, 15 bp, Homo sapiens
tctccttattaataa

SEQ ID NO: 361926 - DNA, 15 bp, Homo sapiens
atctccttattaata

SEQ ID NO: 361927 - DNA, 15 bp, Homo sapiens
tatctccttattaat

SEQ ID NO: 361928 - DNA, 15 bp, Homo sapiens
gtatctccttattaa

SEQ ID NO: 361929 - DNA, 15 bp, Homo sapiens
ggtatctccttatta

SEQ ID NO: 361930 - DNA, 15 bp, Homo sapiens
gggtatctccttatt

SEQ ID NO: 361931 - DNA, 15 bp, Homo sapiens
tgggtatctccttat

SEQ ID NO: 361932 - DNA, 15 bp, Homo sapiens
ctgggtatctcctta

SEQ ID NO: 361933 - DNA, 15 bp, Homo sapiens
gctgggtatctcctt

SEQ ID NO: 361934 - DNA, 15 bp, Homo sapiens
agctgggtatctcct

SEQ ID NO: 361935 - DNA, 15 bp, Homo sapiens
gagctgggtatctcc

SEQ ID NO: 361936 - DNA, 15 bp, Homo sapiens
agagctgggtatctc

SEQ ID NO: 361937 - DNA, 15 bp, Homo sapiens
gagagctgggtatct

SEQ ID NO: 361938 - DNA, 15 bp, Homo sapiens
agagagctgggtatc

SEQ ID NO: 361939 - DNA, 15 bp, Homo sapiens
cagagagctgggtat

SEQ ID NO: 361940 - DNA, 15 bp, Homo sapiens
acagagagctgggta

SEQ ID NO: 361941 - DNA, 15 bp, Homo sapiens
tacagagagctgggt

SEQ ID NO: 361942 - DNA, 15 bp, Homo sapiens
atacagagagctggg

SEQ ID NO: 361943 - DNA, 15 bp, Homo sapiens
aatacagagagctgg

SEQ ID NO: 361944 - DNA, 15 bp, Homo sapiens
aaatacagagagctg

SEQ ID NO: 361945 - DNA, 15 bp, Homo sapiens
caaatacagagagct

SEQ ID NO: 361946 - DNA, 15 bp, Homo sapiens
acaaatacagagagc

SEQ ID NO: 361947 - DNA, 15 bp, Homo sapiens
tacaaatacagagag

SEQ ID NO: 361948 - DNA, 15 bp, Homo sapiens
ttacaaatacagaga

SEQ ID NO: 361949 - DNA, 15 bp, Homo sapiens
gttacaaatacagag

SEQ ID NO: 361950 - DNA, 15 bp, Homo sapiens
tgttacaaatacaga

SEQ ID NO: 361951 - DNA, 15 bp, Homo sapiens
ttgttacaaatacag

SEQ ID NO: 361952 - DNA, 15 bp, Homo sapiens
tttgttacaaataca

SEQ ID NO: 361953 - DNA, 15 bp, Homo sapiens
gtttgttacaaatac

SEQ ID NO: 361954 - DNA, 15 bp, Homo sapiens
cgtttgttacaaata

SEQ ID NO: 361955 - DNA, 15 bp, Homo sapiens
acgtttgttacaaat

SEQ ID NO: 361956 - DNA, 15 bp, Homo sapiens
aacgtttgttacaaa

SEQ ID NO: 361957 - DNA, 15 bp, Homo sapiens
taacgtttgttacaa

SEQ ID NO: 361958 - DNA, 15 bp, Homo sapiens
ttaacgtttgttaca

SEQ ID NO: 361959 - DNA, 15 bp, Homo sapiens
gttaacgtttgttac

SEQ ID NO: 361960 - DNA, 15 bp, Homo sapiens
agttaacgtttgtta

SEQ ID NO: 361961 - DNA, 15 bp, Homo sapiens
cagttaacgtttgtt

SEQ ID NO: 361962 - DNA, 15 bp, Homo sapiens
ccagttaacgtttgt

SEQ ID NO: 361963 - DNA, 15 bp, Homo sapiens
tccagttaacgtttg

SEQ ID NO: 361964 - DNA, 15 bp, Homo sapiens
ttccagttaacgttt

SEQ ID NO: 361965 - DNA, 15 bp, Homo sapiens
attccagttaacgtt

SEQ ID NO: 361966 - DNA, 15 bp, Homo sapiens
aattccagttaacgt

SEQ ID NO: 361967 - DNA, 15 bp, Homo sapiens
taattccagttaacg

SEQ ID NO: 361968 - DNA, 15 bp, Homo sapiens
gtaattccagttaac

SEQ ID NO: 361969 - DNA, 15 bp, Homo sapiens
ggtaattccagttaa

SEQ ID NO: 361970 - DNA, 15 bp, Homo sapiens
tggtaattccagtta

SEQ ID NO: 361971 - DNA, 15 bp, Homo sapiens
ttggtaattccagtt

SEQ ID NO: 361972 - DNA, 15 bp, Homo sapiens
cttggtaattccagt

SEQ ID NO: 361973 - DNA, 15 bp, Homo sapiens
gcttggtaattccag

SEQ ID NO: 361974 - DNA, 15 bp, Homo sapiens
agcttggtaattcca

SEQ ID NO: 361975 - DNA, 15 bp, Homo sapiens
gagcttggtaattcc

SEQ ID NO: 361976 - DNA, 15 bp, Homo sapiens
agagcttggtaattc

SEQ ID NO: 361977 - DNA, 15 bp, Homo sapiens
cagagcttggtaatt

SEQ ID NO: 361978 - DNA, 15 bp, Homo sapiens
acagagcttggtaat

SEQ ID NO: 361979 - DNA, 15 bp, Homo sapiens
aacagagcttggtaa

SEQ ID NO: 361980 - DNA, 15 bp, Homo sapiens
aaacagagcttggta

SEQ ID NO: 361981 - DNA, 15 bp, Homo sapiens
aaaacagagcttggt

SEQ ID NO: 361982 - DNA, 15 bp, Homo sapiens
gaaaacagagcttgg

SEQ ID NO: 361983 - DNA, 15 bp, Homo sapiens
ggaaaacagagcttg

SEQ ID NO: 361984 - DNA, 15 bp, Homo sapiens
aggaaaacagagctt

SEQ ID NO: 361985 - DNA, 15 bp, Homo sapiens
taggaaaacagagct

SEQ ID NO: 361986 - DNA, 15 bp, Homo sapiens
ttaggaaaacagagc

SEQ ID NO: 361987 - DNA, 15 bp, Homo sapiens
tttaggaaaacagag

SEQ ID NO: 361988 - DNA, 15 bp, Homo sapiens
ctttaggaaaacaga

SEQ ID NO: 361989 - DNA, 15 bp, Homo sapiens
tctttaggaaaacag

SEQ ID NO: 361990 - DNA, 15 bp, Homo sapiens
gtctttaggaaaaca

SEQ ID NO: 361991 - DNA, 15 bp, Homo sapiens
agtctttaggaaaac

SEQ ID NO: 361992 - DNA, 15 bp, Homo sapiens
cagtctttaggaaaa

SEQ ID NO: 361993 - DNA, 15 bp, Homo sapiens
acagtctttaggaaa

SEQ ID NO: 361994 - DNA, 15 bp, Homo sapiens
tacagtctttaggaa

SEQ ID NO: 361995 - DNA, 15 bp, Homo sapiens
ttacagtctttagga

SEQ ID NO: 361996 - DNA, 15 bp, Homo sapiens
gttacagtctttagg

SEQ ID NO: 361997 - DNA, 15 bp, Homo sapiens
agttacagtctttag

SEQ ID NO: 361998 - DNA, 15 bp, Homo sapiens
aagttacagtcttta

SEQ ID NO: 361999 - DNA, 15 bp, Homo sapiens
caagttacagtcttt

SEQ ID NO: 362000 - DNA, 15 bp, Homo sapiens
tcaagttacagtctt

SEQ ID NO: 362001 - DNA, 15 bp, Homo sapiens
gtcaagttacagtct

SEQ ID NO: 362002 - DNA, 15 bp, Homo sapiens
agtcaagttacagtc

SEQ ID NO: 362003 - DNA, 15 bp, Homo sapiens
cagtcaagttacagt

SEQ ID NO: 362004 - DNA, 15 bp, Homo sapiens
ccagtcaagttacag

SEQ ID NO: 362005 - DNA, 15 bp, Homo sapiens
cccagtcaagttaca

SEQ ID NO: 362006 - DNA, 15 bp, Homo sapiens
acccagtcaagttac

SEQ ID NO: 362007 - DNA, 15 bp, Homo sapiens
aacccagtcaagtta

SEQ ID NO: 362008 - DNA, 15 bp, Homo sapiens
aaacccagtcaagtt

SEQ ID NO: 362009 - DNA, 15 bp, Homo sapiens
aaaacccagtcaagt

SEQ ID NO: 362010 - DNA, 15 bp, Homo sapiens
caaaacccagtcaag

SEQ ID NO: 362011 - DNA, 15 bp, Homo sapiens
ccaaaacccagtcaa

SEQ ID NO: 362012 - DNA, 15 bp, Homo sapiens
gccaaaacccagtca

SEQ ID NO: 362013 - DNA, 15 bp, Homo sapiens
agccaaaacccagtc

SEQ ID NO: 362014 - DNA, 15 bp, Homo sapiens
aagccaaaacccagt

SEQ ID NO: 362015 - DNA, 15 bp, Homo sapiens
taagccaaaacccag

SEQ ID NO: 362016 - DNA, 15 bp, Homo sapiens
ttaagccaaaaccca

SEQ ID NO: 362017 - DNA, 15 bp, Homo sapiens
tttaagccaaaaccc

SEQ ID NO: 362018 - DNA, 15 bp, Homo sapiens
ctttaagccaaaacc

SEQ ID NO: 362019 - DNA, 15 bp, Homo sapiens
tctttaagccaaaac

SEQ ID NO: 362020 - DNA, 15 bp, Homo sapiens
ttctttaagccaaaa

SEQ ID NO: 362021 - DNA, 15 bp, Homo sapiens
attctttaagccaaa

SEQ ID NO: 362022 - DNA, 15 bp, Homo sapiens
gattctttaagccaa

SEQ ID NO: 362023 - DNA, 15 bp, Homo sapiens
tgattctttaagcca

SEQ ID NO: 362024 - DNA, 15 bp, Homo sapiens
ttgattctttaagcc

SEQ ID NO: 362025 - DNA, 15 bp, Homo sapiens
cttgattctttaagc

SEQ ID NO: 362026 - DNA, 15 bp, Homo sapiens
tcttgattctttaag

SEQ ID NO: 362027 - DNA, 15 bp, Homo sapiens
ttcttgattctttaa

SEQ ID NO: 362028 - DNA, 15 bp, Homo sapiens
attcttgattcttta

SEQ ID NO: 362029 - DNA, 15 bp, Homo sapiens
aattcttgattcttt

SEQ ID NO: 362030 - DNA, 15 bp, Homo sapiens
gaattcttgattctt

SEQ ID NO: 362031 - DNA, 15 bp, Homo sapiens
agaattcttgattct

SEQ ID NO: 362032 - DNA, 15 bp, Homo sapiens
aagaattcttgattc

SEQ ID NO: 362033 - DNA, 15 bp, Homo sapiens
aaagaattcttgatt

SEQ ID NO: 362034 - DNA, 15 bp, Homo sapiens
aaaagaattcttgat

SEQ ID NO: 362035 - DNA, 15 bp, Homo sapiens
taaaagaattcttga

SEQ ID NO: 362036 - DNA, 15 bp, Homo sapiens
ataaaagaattcttg

SEQ ID NO: 362037 - DNA, 15 bp, Homo sapiens
cataaaagaattctt

SEQ ID NO: 362038 - DNA, 15 bp, Homo sapiens
tcataaaagaattct

SEQ ID NO: 362039 - DNA, 15 bp, Homo sapiens
ttcataaaagaattc

SEQ ID NO: 362040 - DNA, 15 bp, Homo sapiens
cttcataaaagaatt

SEQ ID NO: 362041 - DNA, 15 bp, Homo sapiens
acttcataaaagaat

SEQ ID NO: 362042 - DNA, 15 bp, Homo sapiens
aacttcataaaagaa

SEQ ID NO: 362043 - DNA, 15 bp, Homo sapiens
gaacttcataaaaga

SEQ ID NO: 362044 - DNA, 15 bp, Homo sapiens
tgaacttcataaaag

SEQ ID NO: 362045 - DNA, 15 bp, Homo sapiens
atgaacttcataaaa

SEQ ID NO: 362046 - DNA, 15 bp, Homo sapiens
aatgaacttcataaa

SEQ ID NO: 362047 - DNA, 15 bp, Homo sapiens
aaatgaacttcataa

SEQ ID NO: 362048 - DNA, 15 bp, Homo sapiens
aaaatgaacttcata

SEQ ID NO: 362049 - DNA, 15 bp, Homo sapiens
gaaaatgaacttcat

SEQ ID NO: 362050 - DNA, 15 bp, Homo sapiens
ggaaaatgaacttca

SEQ ID NO: 362051 - DNA, 15 bp, Homo sapiens
tggaaaatgaacttc

SEQ ID NO: 362052 - DNA, 15 bp, Homo sapiens
ttggaaaatgaactt

SEQ ID NO: 362053 - DNA, 15 bp, Homo sapiens
cttggaaaatgaact

SEQ ID NO: 362054 - DNA, 15 bp, Homo sapiens
ccttggaaaatgaac

SEQ ID NO: 362055 - DNA, 15 bp, Homo sapiens
cccttggaaaatgaa

SEQ ID NO: 362056 - DNA, 15 bp, Homo sapiens
ccccttggaaaatga

SEQ ID NO: 362057 - DNA, 15 bp, Homo sapiens
gccccttggaaaatg

SEQ ID NO: 362058 - DNA, 15 bp, Homo sapiens
ggccccttggaaaat

SEQ ID NO: 362059 - DNA, 15 bp, Homo sapiens
tggccccttggaaaa

SEQ ID NO: 362060 - DNA, 15 bp, Homo sapiens
gtggccccttggaaa

SEQ ID NO: 362061 - DNA, 15 bp, Homo sapiens
ggtggccccttggaa

SEQ ID NO: 362062 - DNA, 15 bp, Homo sapiens
aggtggccccttgga

SEQ ID NO: 362063 - DNA, 15 bp, Homo sapiens
gaggtggccccttgg

SEQ ID NO: 362064 - DNA, 15 bp, Homo sapiens
agaggtggccccttg

SEQ ID NO: 362065 - DNA, 15 bp, Homo sapiens
cagaggtggcccctt

SEQ ID NO: 362066 - DNA, 15 bp, Homo sapiens
tcagaggtggcccct

SEQ ID NO: 362067 - DNA, 15 bp, Homo sapiens
gtcagaggtggcccc

SEQ ID NO: 362068 - DNA, 15 bp, Homo sapiens
ggtcagaggtggccc

SEQ ID NO: 362069 - DNA, 15 bp, Homo sapiens
aggtcagaggtggcc

SEQ ID NO: 362070 - DNA, 15 bp, Homo sapiens
caggtcagaggtggc

SEQ ID NO: 362071 - DNA, 15 bp, Homo sapiens
acaggtcagaggtgg

SEQ ID NO: 362072 - DNA, 15 bp, Homo sapiens
aacaggtcagaggtg

SEQ ID NO: 362073 - DNA, 15 bp, Homo sapiens
aaacaggtcagaggt

SEQ ID NO: 362074 - DNA, 15 bp, Homo sapiens
aaaacaggtcagagg

SEQ ID NO: 362075 - DNA, 15 bp, Homo sapiens
aaaaacaggtcagag

SEQ ID NO: 362076 - DNA, 15 bp, Homo sapiens
aaaaaacaggtcaga

SEQ ID NO: 362077 - DNA, 15 bp, Homo sapiens
aaaaaaacaggtcag

SEQ ID NO: 362078 - DNA, 15 bp, Homo sapiens
aaaaaaaacaggtca

SEQ ID NO: 362079 - DNA, 15 bp, Homo sapiens
caaaaaaaacaggtc

SEQ ID NO: 362080 - DNA, 15 bp, Homo sapiens
acaaaaaaaacaggt

SEQ ID NO: 362081 - DNA, 15 bp, Homo sapiens
gacaaaaaaaacagg

SEQ ID NO: 362082 - DNA, 15 bp, Homo sapiens
ggacaaaaaaaacag

SEQ ID NO: 362083 - DNA, 15 bp, Homo sapiens
aggacaaaaaaaaca

SEQ ID NO: 362084 - DNA, 15 bp, Homo sapiens
aaggacaaaaaaaac

SEQ ID NO: 362085 - DNA, 15 bp, Homo sapiens
gaaggacaaaaaaaa

SEQ ID NO: 362086 - DNA, 15 bp, Homo sapiens
ggaaggacaaaaaaa

SEQ ID NO: 362087 - DNA, 15 bp, Homo sapiens
tggaaggacaaaaaa

SEQ ID NO: 362088 - DNA, 15 bp, Homo sapiens
atggaaggacaaaaa

SEQ ID NO: 362089 - DNA, 15 bp, Homo sapiens
tatggaaggacaaaa

SEQ ID NO: 362090 - DNA, 15 bp, Homo sapiens
atatggaaggacaaa

SEQ ID NO: 362091 - DNA, 15 bp, Homo sapiens
aatatggaaggacaa

SEQ ID NO: 362092 - DNA, 15 bp, Homo sapiens
gaatatggaaggaca

SEQ ID NO: 362093 - DNA, 15 bp, Homo sapiens
agaatatggaaggac

SEQ ID NO: 362094 - DNA, 15 bp, Homo sapiens
aagaatatggaagga

SEQ ID NO: 362095 - DNA, 15 bp, Homo sapiens
gaagaatatggaagg

SEQ ID NO: 362096 - DNA, 15 bp, Homo sapiens
tgaagaatatggaag

SEQ ID NO: 362097 - DNA, 15 bp, Homo sapiens
ttgaagaatatggaa

SEQ ID NO: 362098 - DNA, 15 bp, Homo sapiens
tttgaagaatatgga

SEQ ID NO: 362099 - DNA, 15 bp, Homo sapiens
atttgaagaatatgg

SEQ ID NO: 362100 - DNA, 15 bp, Homo sapiens
aatttgaagaatatg

SEQ ID NO: 362101 - DNA, 15 bp, Homo sapiens
aaatttgaagaatat

SEQ ID NO: 362102 - DNA, 15 bp, Homo sapiens
caaatttgaagaata

SEQ ID NO: 362103 - DNA, 15 bp, Homo sapiens
ccaaatttgaagaat

SEQ ID NO: 362104 - DNA, 15 bp, Homo sapiens
tccaaatttgaagaa

SEQ ID NO: 362105 - DNA, 15 bp, Homo sapiens
ctccaaatttgaaga

SEQ ID NO: 362106 - DNA, 15 bp, Homo sapiens
cctccaaatttgaag

SEQ ID NO: 362107 - DNA, 15 bp, Homo sapiens
acctccaaatttgaa

SEQ ID NO: 362108 - DNA, 15 bp, Homo sapiens
aacctccaaatttga

SEQ ID NO: 362109 - DNA, 15 bp, Homo sapiens
aaacctccaaatttg

SEQ ID NO: 362110 - DNA, 15 bp, Homo sapiens
aaaacctccaaattt

SEQ ID NO: 362111 - DNA, 15 bp, Homo sapiens
gaaaacctccaaatt

SEQ ID NO: 362112 - DNA, 15 bp, Homo sapiens
ggaaaacctccaaat

SEQ ID NO: 362113 - DNA, 15 bp, Homo sapiens
aggaaaacctccaaa

SEQ ID NO: 362114 - DNA, 15 bp, Homo sapiens
aaggaaaacctccaa

SEQ ID NO: 362115 - DNA, 15 bp, Homo sapiens
taaggaaaacctcca

SEQ ID NO: 362116 - DNA, 15 bp, Homo sapiens
ttaaggaaaacctcc

SEQ ID NO: 362117 - DNA, 15 bp, Homo sapiens
tttaaggaaaacctc

SEQ ID NO: 362118 - DNA, 15 bp, Homo sapiens
ttttaaggaaaacct

SEQ ID NO: 362119 - DNA, 15 bp, Homo sapiens
cttttaaggaaaacc

SEQ ID NO: 362120 - DNA, 15 bp, Homo sapiens
tcttttaaggaaaac

SEQ ID NO: 362121 - DNA, 15 bp, Homo sapiens
ctcttttaaggaaaa

SEQ ID NO: 362122 - DNA, 15 bp, Homo sapiens
tctcttttaaggaaa

SEQ ID NO: 362123 - DNA, 15 bp, Homo sapiens
ctctcttttaaggaa

SEQ ID NO: 362124 - DNA, 15 bp, Homo sapiens
tctctcttttaagga

SEQ ID NO: 362125 - DNA, 15 bp, Homo sapiens
ctctctcttttaagg

SEQ ID NO: 362126 - DNA, 15 bp, Homo sapiens
tctctctcttttaag

SEQ ID NO: 362127 - DNA, 15 bp, Homo sapiens
ttctctctcttttaa

SEQ ID NO: 362128 - DNA, 15 bp, Homo sapiens
gttctctctctttta

SEQ ID NO: 362129 - DNA, 15 bp, Homo sapiens
tgttctctctctttt

SEQ ID NO: 362130 - DNA, 15 bp, Homo sapiens
ctgttctctctcttt

SEQ ID NO: 362131 - DNA, 15 bp, Homo sapiens
actgttctctctctt

SEQ ID NO: 362132 - DNA, 15 bp, Homo sapiens
cactgttctctctct

SEQ ID NO: 362133 - DNA, 15 bp, Homo sapiens
tcactgttctctctc

SEQ ID NO: 362134 - DNA, 15 bp, Homo sapiens
gtcactgttctctct

SEQ ID NO: 362135 - DNA, 15 bp, Homo sapiens
ggtcactgttctctc

SEQ ID NO: 362136 - DNA, 15 bp, Homo sapiens
aggtcactgttctct

SEQ ID NO: 362137 - DNA, 15 bp, Homo sapiens
aaggtcactgttctc

SEQ ID NO: 362138 - DNA, 15 bp, Homo sapiens
taaggtcactgttct

SEQ ID NO: 362139 - DNA, 15 bp, Homo sapiens
ctaaggtcactgttc

SEQ ID NO: 362140 - DNA, 15 bp, Homo sapiens
gctaaggtcactgtt

SEQ ID NO: 362141 - DNA, 15 bp, Homo sapiens
ggctaaggtcactgt

SEQ ID NO: 362142 - DNA, 15 bp, Homo sapiens
gggctaaggtcactg

SEQ ID NO: 362143 - DNA, 15 bp, Homo sapiens
ggggctaaggtcact

SEQ ID NO: 362144 - DNA, 15 bp, Homo sapiens
tggggctaaggtcac

SEQ ID NO: 362145 - DNA, 15 bp, Homo sapiens
ctggggctaaggtca

SEQ ID NO: 362146 - DNA, 15 bp, Homo sapiens
cctggggctaaggtc

SEQ ID NO: 362147 - DNA, 15 bp, Homo sapiens
ccctggggctaaggt

SEQ ID NO: 362148 - DNA, 15 bp, Homo sapiens
tccctggggctaagg

SEQ ID NO: 362149 - DNA, 15 bp, Homo sapiens
atccctggggctaag

SEQ ID NO: 362150 - DNA, 15 bp, Homo sapiens
tatccctggggctaa

SEQ ID NO: 362151 - DNA, 15 bp, Homo sapiens
ttatccctggggcta

SEQ ID NO: 362152 - DNA, 15 bp, Homo sapiens
tttatccctggggct

SEQ ID NO: 362153 - DNA, 15 bp, Homo sapiens
ctttatccctggggc

SEQ ID NO: 362154 - DNA, 15 bp, Homo sapiens
tctttatccctgggg

SEQ ID NO: 362155 - DNA, 15 bp, Homo sapiens
gtctttatccctggg

SEQ ID NO: 362156 - DNA, 15 bp, Homo sapiens
ggtctttatccctgg

SEQ ID NO: 362157 - DNA, 15 bp, Homo sapiens
tggtctttatccctg

SEQ ID NO: 362158 - DNA, 15 bp, Homo sapiens
ctggtctttatccct

SEQ ID NO: 362159 - DNA, 15 bp, Homo sapiens
gctggtctttatccc

SEQ ID NO: 362160 - DNA, 15 bp, Homo sapiens
tgctggtctttatcc

SEQ ID NO: 362161 - DNA, 15 bp, Homo sapiens
ctgctggtctttatc

SEQ ID NO: 362162 - DNA, 15 bp, Homo sapiens
cctgctggtctttat

SEQ ID NO: 362163 - DNA, 15 bp, Homo sapiens
ccctgctggtcttta

SEQ ID NO: 362164 - DNA, 15 bp, Homo sapiens
cccctgctggtcttt

SEQ ID NO: 362165 - DNA, 15 bp, Homo sapiens
acccctgctggtctt

SEQ ID NO: 362166 - DNA, 15 bp, Homo sapiens
tacccctgctggtct

SEQ ID NO: 362167 - DNA, 15 bp, Homo sapiens
ttacccctgctggtc

SEQ ID NO: 362168 - DNA, 15 bp, Homo sapiens
tttacccctgctggt

SEQ ID NO: 362169 - DNA, 15 bp, Homo sapiens
atttacccctgctgg

SEQ ID NO: 362170 - DNA, 15 bp, Homo sapiens
catttacccctgctg

SEQ ID NO: 362171 - DNA, 15 bp, Homo sapiens
acatttacccctgct

SEQ ID NO: 362172 - DNA, 15 bp, Homo sapiens
aacatttacccctgc

SEQ ID NO: 362173 - DNA, 15 bp, Homo sapiens
gaacatttacccctg

SEQ ID NO: 362174 - DNA, 15 bp, Homo sapiens
ggaacatttacccct

SEQ ID NO: 362175 - DNA, 15 bp, Homo sapiens
gggaacatttacccc

SEQ ID NO: 362176 - DNA, 15 bp, Homo sapiens
tgggaacatttaccc

SEQ ID NO: 362177 - DNA, 15 bp, Homo sapiens
ctgggaacatttacc

SEQ ID NO: 362178 - DNA, 15 bp, Homo sapiens
tctgggaacatttac

SEQ ID NO: 362179 - DNA, 15 bp, Homo sapiens
ttctgggaacattta

SEQ ID NO: 362180 - DNA, 15 bp, Homo sapiens
tttctgggaacattt

SEQ ID NO: 362181 - DNA, 15 bp, Homo sapiens
gtttctgggaacatt

SEQ ID NO: 362182 - DNA, 15 bp, Homo sapiens
ggtttctgggaacat

SEQ ID NO: 362183 - DNA, 15 bp, Homo sapiens
aggtttctgggaaca

SEQ ID NO: 362184 - DNA, 15 bp, Homo sapiens
gaggtttctgggaac

SEQ ID NO: 362185 - DNA, 15 bp, Homo sapiens
ggaggtttctgggaa

SEQ ID NO: 362186 - DNA, 15 bp, Homo sapiens
tggaggtttctggga

SEQ ID NO: 362187 - DNA, 15 bp, Homo sapiens
ttggaggtttctggg

SEQ ID NO: 362188 - DNA, 15 bp, Homo sapiens
tttggaggtttctgg

SEQ ID NO: 362189 - DNA, 15 bp, Homo sapiens
ttttggaggtttctg

SEQ ID NO: 362190 - DNA, 15 bp, Homo sapiens
tttttggaggtttct

SEQ ID NO: 362191 - DNA, 15 bp, Homo sapiens
gtttttggaggtttc

SEQ ID NO: 362192 - DNA, 15 bp, Homo sapiens
ggtttttggaggttt

SEQ ID NO: 362193 - DNA, 15 bp, Homo sapiens
tggtttttggaggtt

SEQ ID NO: 362194 - DNA, 15 bp, Homo sapiens
atggtttttggaggt

SEQ ID NO: 362195 - DNA, 15 bp, Homo sapiens
tatggtttttggagg

SEQ ID NO: 362196 - DNA, 15 bp, Homo sapiens
ctatggtttttggag

SEQ ID NO: 362197 - DNA, 15 bp, Homo sapiens
tctatggtttttgga

SEQ ID NO: 362198 - DNA, 15 bp, Homo sapiens
ttctatggtttttgg

SEQ ID NO: 362199 - DNA, 15 bp, Homo sapiens
tttctatggtttttg

SEQ ID NO: 362200 - DNA, 15 bp, Homo sapiens
ttttctatggttttt

SEQ ID NO: 362201 - DNA, 15 bp, Homo sapiens
cttttctatggtttt

SEQ ID NO: 362202 - DNA, 15 bp, Homo sapiens
tcttttctatggttt

SEQ ID NO: 362203 - DNA, 15 bp, Homo sapiens
ttcttttctatggtt

SEQ ID NO: 362204 - DNA, 15 bp, Homo sapiens
tttcttttctatggt

SEQ ID NO: 362205 - DNA, 15 bp, Homo sapiens
ctttcttttctatgg

SEQ ID NO: 362206 - DNA, 15 bp, Homo sapiens
cctttcttttctatg

SEQ ID NO: 362207 - DNA, 15 bp, Homo sapiens
gcctttcttttctat

SEQ ID NO: 362208 - DNA, 15 bp, Homo sapiens
ggcctttcttttcta

SEQ ID NO: 362209 - DNA, 15 bp, Homo sapiens
tggcctttcttttct

SEQ ID NO: 362210 - DNA, 15 bp, Homo sapiens
atggcctttcttttc

SEQ ID NO: 362211 - DNA, 15 bp, Homo sapiens
catggcctttctttt

SEQ ID NO: 362212 - DNA, 15 bp, Homo sapiens
acatggcctttcttt

SEQ ID NO: 362213 - DNA, 15 bp, Homo sapiens
aacatggcctttctt

SEQ ID NO: 362214 - DNA, 15 bp, Homo sapiens
gaacatggcctttct

SEQ ID NO: 362215 - DNA, 15 bp, Homo sapiens
ggaacatggcctttc

SEQ ID NO: 362216 - DNA, 15 bp, Homo sapiens
gggaacatggccttt

SEQ ID NO: 362217 - DNA, 15 bp, Homo sapiens
agggaacatggcctt

SEQ ID NO: 362218 - DNA, 15 bp, Homo sapiens
aagggaacatggcct

SEQ ID NO: 362219 - DNA, 15 bp, Homo sapiens
caagggaacatggcc

SEQ ID NO: 362220 - DNA, 15 bp, Homo sapiens
ccaagggaacatggc

SEQ ID NO: 362221 - DNA, 15 bp, Homo sapiens
cccaagggaacatgg

SEQ ID NO: 362222 - DNA, 15 bp, Homo sapiens
acccaagggaacatg

SEQ ID NO: 362223 - DNA, 15 bp, Homo sapiens
aacccaagggaacat

SEQ ID NO: 362224 - DNA, 15 bp, Homo sapiens
aaacccaagggaaca

SEQ ID NO: 362225 - DNA, 15 bp, Homo sapiens
gaaacccaagggaac

SEQ ID NO: 362226 - DNA, 15 bp, Homo sapiens
ggaaacccaagggaa

SEQ ID NO: 362227 - DNA, 15 bp, Homo sapiens
aggaaacccaaggga

SEQ ID NO: 362228 - DNA, 15 bp, Homo sapiens
caggaaacccaaggg

SEQ ID NO: 362229 - DNA, 15 bp, Homo sapiens
gcaggaaacccaagg

SEQ ID NO: 362230 - DNA, 15 bp, Homo sapiens
tgcaggaaacccaag

SEQ ID NO: 362231 - DNA, 15 bp, Homo sapiens
ctgcaggaaacccaa

SEQ ID NO: 362232 - DNA, 15 bp, Homo sapiens
tctgcaggaaaccca

SEQ ID NO: 362233 - DNA, 15 bp, Homo sapiens
ctctgcaggaaaccc

SEQ ID NO: 362234 - DNA, 15 bp, Homo sapiens
tctctgcaggaaacc

SEQ ID NO: 362235 - DNA, 15 bp, Homo sapiens
gtctctgcaggaaac

SEQ ID NO: 362236 - DNA, 15 bp, Homo sapiens
tgtctctgcaggaaa

SEQ ID NO: 362237 - DNA, 15 bp, Homo sapiens
gtgtctctgcaggaa

SEQ ID NO: 362238 - DNA, 15 bp, Homo sapiens
agtgtctctgcagga

SEQ ID NO: 362239 - DNA, 15 bp, Homo sapiens
cagtgtctctgcagg

SEQ ID NO: 362240 - DNA, 15 bp, Homo sapiens
ccagtgtctctgcag

SEQ ID NO: 362241 - DNA, 15 bp, Homo sapiens
cccagtgtctctgca

SEQ ID NO: 362242 - DNA, 15 bp, Homo sapiens
tcccagtgtctctgc

SEQ ID NO: 362243 - DNA, 15 bp, Homo sapiens
atcccagtgtctctg

SEQ ID NO: 362244 - DNA, 15 bp, Homo sapiens
tatcccagtgtctct

SEQ ID NO: 362245 - DNA, 15 bp, Homo sapiens
ttatcccagtgtctc

SEQ ID NO: 362246 - DNA, 15 bp, Homo sapiens
tttatcccagtgtct

SEQ ID NO: 362247 - DNA, 15 bp, Homo sapiens
atttatcccagtgtc

SEQ ID NO: 362248 - DNA, 15 bp, Homo sapiens
gatttatcccagtgt

SEQ ID NO: 362249 - DNA, 15 bp, Homo sapiens
agatttatcccagtg

SEQ ID NO: 362250 - DNA, 15 bp, Homo sapiens
cagatttatcccagt

SEQ ID NO: 362251 - DNA, 15 bp, Homo sapiens
acagatttatcccag

SEQ ID NO: 362252 - DNA, 15 bp, Homo sapiens
aacagatttatccca

SEQ ID NO: 362253 - DNA, 15 bp, Homo sapiens
gaacagatttatccc

SEQ ID NO: 362254 - DNA, 15 bp, Homo sapiens
agaacagatttatcc

SEQ ID NO: 362255 - DNA, 15 bp, Homo sapiens
gagaacagatttatc

SEQ ID NO: 362256 - DNA, 15 bp, Homo sapiens
tgagaacagatttat

SEQ ID NO: 362257 - DNA, 15 bp, Homo sapiens
ctgagaacagattta

SEQ ID NO: 362258 - DNA, 15 bp, Homo sapiens
cctgagaacagattt

SEQ ID NO: 362259 - DNA, 15 bp, Homo sapiens
tcctgagaacagatt

SEQ ID NO: 362260 - DNA, 15 bp, Homo sapiens
atcctgagaacagat

SEQ ID NO: 362261 - DNA, 15 bp, Homo sapiens
aatcctgagaacaga

SEQ ID NO: 362262 - DNA, 15 bp, Homo sapiens
aaatcctgagaacag

SEQ ID NO: 362263 - DNA, 15 bp, Homo sapiens
taaatcctgagaaca

SEQ ID NO: 362264 - DNA, 15 bp, Homo sapiens
ttaaatcctgagaac

SEQ ID NO: 362265 - DNA, 15 bp, Homo sapiens
cttaaatcctgagaa

SEQ ID NO: 362266 - DNA, 15 bp, Homo sapiens
gcttaaatcctgaga

SEQ ID NO: 362267 - DNA, 15 bp, Homo sapiens
tgcttaaatcctgag

SEQ ID NO: 362268 - DNA, 15 bp, Homo sapiens
ctgcttaaatcctga

SEQ ID NO: 362269 - DNA, 15 bp, Homo sapiens
actgcttaaatcctg

SEQ ID NO: 362270 - DNA, 15 bp, Homo sapiens
gactgcttaaatcct

SEQ ID NO: 362271 - DNA, 15 bp, Homo sapiens
tgactgcttaaatcc

SEQ ID NO: 362272 - DNA, 15 bp, Homo sapiens
atgactgcttaaatc

SEQ ID NO: 362273 - DNA, 15 bp, Homo sapiens
aatgactgcttaaat

SEQ ID NO: 362274 - DNA, 15 bp, Homo sapiens
gaatgactgcttaaa

SEQ ID NO: 362275 - DNA, 15 bp, Homo sapiens
agaatgactgcttaa

SEQ ID NO: 362276 - DNA, 15 bp, Homo sapiens
cagaatgactgctta

SEQ ID NO: 362277 - DNA, 15 bp, Homo sapiens
gcagaatgactgctt

SEQ ID NO: 362278 - DNA, 15 bp, Homo sapiens
ggcagaatgactgct

SEQ ID NO: 362279 - DNA, 15 bp, Homo sapiens
tggcagaatgactgc

SEQ ID NO: 362280 - DNA, 15 bp, Homo sapiens
ctggcagaatgactg

SEQ ID NO: 362281 - DNA, 15 bp, Homo sapiens
cctggcagaatgact

SEQ ID NO: 362282 - DNA, 15 bp, Homo sapiens
gcctggcagaatgac

SEQ ID NO: 362283 - DNA, 15 bp, Homo sapiens
ggcctggcagaatga

SEQ ID NO: 362284 - DNA, 15 bp, Homo sapiens
tggcctggcagaatg

SEQ ID NO: 362285 - DNA, 15 bp, Homo sapiens
ctggcctggcagaat

SEQ ID NO: 362286 - DNA, 15 bp, Homo sapiens
cctggcctggcagaa

SEQ ID NO: 362287 - DNA, 15 bp, Homo sapiens
ccctggcctggcaga

SEQ ID NO: 362288 - DNA, 15 bp, Homo sapiens
gccctggcctggcag

SEQ ID NO: 362289 - DNA, 15 bp, Homo sapiens
ggccctggcctggca

SEQ ID NO: 362290 - DNA, 15 bp, Homo sapiens
aggccctggcctggc

SEQ ID NO: 362291 - DNA, 15 bp, Homo sapiens
gaggccctggcctgg

SEQ ID NO: 362292 - DNA, 15 bp, Homo sapiens
tgaggccctggcctg

SEQ ID NO: 362293 - DNA, 15 bp, Homo sapiens
atgaggccctggcct

SEQ ID NO: 362294 - DNA, 15 bp, Homo sapiens
aatgaggccctggcc

SEQ ID NO: 362295 - DNA, 15 bp, Homo sapiens
aaatgaggccctggc

SEQ ID NO: 362296 - DNA, 15 bp, Homo sapiens
aaaatgaggccctgg

SEQ ID NO: 362297 - DNA, 15 bp, Homo sapiens
gaaaatgaggccctg

SEQ ID NO: 362298 - DNA, 15 bp, Homo sapiens
cgaaaatgaggccct

SEQ ID NO: 362299 - DNA, 15 bp, Homo sapiens
ccgaaaatgaggccc

SEQ ID NO: 362300 - DNA, 15 bp, Homo sapiens
accgaaaatgaggcc

SEQ ID NO: 362301 - DNA, 15 bp, Homo sapiens
caccgaaaatgaggc

SEQ ID NO: 362302 - DNA, 15 bp, Homo sapiens
tcaccgaaaatgagg

SEQ ID NO: 362303 - DNA, 15 bp, Homo sapiens
ctcaccgaaaatgag

SEQ ID NO: 362304 - DNA, 15 bp, Homo sapiens
actcaccgaaaatga

SEQ ID NO: 362305 - DNA, 15 bp, Homo sapiens
cactcaccgaaaatg

SEQ ID NO: 362306 - DNA, 15 bp, Homo sapiens
ccactcaccgaaaat

SEQ ID NO: 362307 - DNA, 15 bp, Homo sapiens
tccactcaccgaaaa

SEQ ID NO: 362308 - DNA, 15 bp, Homo sapiens
ctccactcaccgaaa

SEQ ID NO: 362309 - DNA, 15 bp, Homo sapiens
actccactcaccgaa

SEQ ID NO: 362310 - DNA, 15 bp, Homo sapiens
cactccactcaccga

SEQ ID NO: 362311 - DNA, 15 bp, Homo sapiens
tcactccactcaccg

SEQ ID NO: 362312 - DNA, 15 bp, Homo sapiens
atcactccactcacc

SEQ ID NO: 362313 - DNA, 15 bp, Homo sapiens
tatcactccactcac

SEQ ID NO: 362314 - DNA, 15 bp, Homo sapiens
atatcactccactca

SEQ ID NO: 362315 - DNA, 15 bp, Homo sapiens
tatatcactccactc

SEQ ID NO: 362316 - DNA, 15 bp, Homo sapiens
atatatcactccact

SEQ ID NO: 362317 - DNA, 15 bp, Homo sapiens
aatatatcactccac

SEQ ID NO: 362318 - DNA, 15 bp, Homo sapiens
aaatatatcactcca

SEQ ID NO: 362319 - DNA, 15 bp, Homo sapiens
taaatatatcactcc

SEQ ID NO: 362320 - DNA, 15 bp, Homo sapiens
ataaatatatcactc

SEQ ID NO: 362321 - DNA, 15 bp, Homo sapiens
aataaatatatcact

SEQ ID NO: 362322 - DNA, 15 bp, Homo sapiens
gaataaatatatcac

SEQ ID NO: 362323 - DNA, 15 bp, Homo sapiens
tgaataaatatatca

SEQ ID NO: 362324 - DNA, 15 bp, Homo sapiens
atgaataaatatatc

SEQ ID NO: 362325 - DNA, 15 bp, Homo sapiens
aatgaataaatatat

SEQ ID NO: 362326 - DNA, 15 bp, Homo sapiens
taatgaataaatata

SEQ ID NO: 362327 - DNA, 15 bp, Homo sapiens
ctaatgaataaatat

SEQ ID NO: 362328 - DNA, 15 bp, Homo sapiens
gctaatgaataaata

SEQ ID NO: 362329 - DNA, 15 bp, Homo sapiens
tgctaatgaataaat

SEQ ID NO: 362330 - DNA, 15 bp, Homo sapiens
ttgctaatgaataaa

SEQ ID NO: 362331 - DNA, 15 bp, Homo sapiens
cttgctaatgaataa

SEQ ID NO: 362332 - DNA, 15 bp, Homo sapiens
acttgctaatgaata

SEQ ID NO: 362333 - DNA, 15 bp, Homo sapiens
cacttgctaatgaat

SEQ ID NO: 362334 - DNA, 15 bp, Homo sapiens
acacttgctaatgaa

SEQ ID NO: 362335 - DNA, 15 bp, Homo sapiens
aacacttgctaatga

SEQ ID NO: 362336 - DNA, 15 bp, Homo sapiens
caacacttgctaatg

SEQ ID NO: 362337 - DNA, 15 bp, Homo sapiens
tcaacacttgctaat

SEQ ID NO: 362338 - DNA, 15 bp, Homo sapiens
gtcaacacttgctaa

SEQ ID NO: 362339 - DNA, 15 bp, Homo sapiens
tgtcaacacttgcta

SEQ ID NO: 362340 - DNA, 15 bp, Homo sapiens
atgtcaacacttgct

SEQ ID NO: 362341 - DNA, 15 bp, Homo sapiens
aatgtcaacacttgc

SEQ ID NO: 362342 - DNA, 15 bp, Homo sapiens
taatgtcaacacttg

SEQ ID NO: 362343 - DNA, 15 bp, Homo sapiens
ctaatgtcaacactt

SEQ ID NO: 362344 - DNA, 15 bp, Homo sapiens
cctaatgtcaacact

SEQ ID NO: 362345 - DNA, 15 bp, Homo sapiens
acctaatgtcaacac

SEQ ID NO: 362346 - DNA, 15 bp, Homo sapiens
tacctaatgtcaaca

SEQ ID NO: 362347 - DNA, 15 bp, Homo sapiens
ctacctaatgtcaac

SEQ ID NO: 362348 - DNA, 15 bp, Homo sapiens
gctacctaatgtcaa

SEQ ID NO: 362349 - DNA, 15 bp, Homo sapiens
tgctacctaatgtca

SEQ ID NO: 362350 - DNA, 15 bp, Homo sapiens
ttgctacctaatgtc

SEQ ID NO: 362351 - DNA, 15 bp, Homo sapiens
tttgctacctaatgt

SEQ ID NO: 362352 - DNA, 15 bp, Homo sapiens
ttttgctacctaatg

SEQ ID NO: 362353 - DNA, 15 bp, Homo sapiens
attttgctacctaat

SEQ ID NO: 362354 - DNA, 15 bp, Homo sapiens
cattttgctacctaa

SEQ ID NO: 362355 - DNA, 15 bp, Homo sapiens
acattttgctaccta

SEQ ID NO: 362356 - DNA, 15 bp, Homo sapiens
cacattttgctacct

SEQ ID NO: 362357 - DNA, 15 bp, Homo sapiens
acacattttgctacc

SEQ ID NO: 362358 - DNA, 15 bp, Homo sapiens
cacacattttgctac

SEQ ID NO: 362359 - DNA, 15 bp, Homo sapiens
acacacattttgcta

SEQ ID NO: 362360 - DNA, 15 bp, Homo sapiens
tacacacattttgct

SEQ ID NO: 362361 - DNA, 15 bp, Homo sapiens
ttacacacattttgc

SEQ ID NO: 362362 - DNA, 15 bp, Homo sapiens
tttacacacattttg

SEQ ID NO: 362363 - DNA, 15 bp, Homo sapiens
gtttacacacatttt

SEQ ID NO: 362364 - DNA, 15 bp, Homo sapiens
tgtttacacacattt

SEQ ID NO: 362365 - DNA, 15 bp, Homo sapiens
ctgtttacacacatt

SEQ ID NO: 362366 - DNA, 15 bp, Homo sapiens
tctgtttacacacat

SEQ ID NO: 362367 - DNA, 15 bp, Homo sapiens
ctctgtttacacaca

SEQ ID NO: 362368 - DNA, 15 bp, Homo sapiens
tctctgtttacacac

SEQ ID NO: 362369 - DNA, 15 bp, Homo sapiens
ttctctgtttacaca

SEQ ID NO: 362370 - DNA, 15 bp, Homo sapiens
cttctctgtttacac

SEQ ID NO: 362371 - DNA, 15 bp, Homo sapiens
gcttctctgtttaca

SEQ ID NO: 362372 - DNA, 15 bp, Homo sapiens
ggcttctctgtttac

SEQ ID NO: 362373 - DNA, 15 bp, Homo sapiens
tggcttctctgttta

SEQ ID NO: 362374 - DNA, 15 bp, Homo sapiens
gtggcttctctgttt

SEQ ID NO: 362375 - DNA, 15 bp, Homo sapiens
tgtggcttctctgtt

SEQ ID NO: 362376 - DNA, 15 bp, Homo sapiens
ttgtggcttctctgt

SEQ ID NO: 362377 - DNA, 15 bp, Homo sapiens
tttgtggcttctctg

SEQ ID NO: 362378 - DNA, 15 bp, Homo sapiens
ctttgtggcttctct

SEQ ID NO: 362379 - DNA, 15 bp, Homo sapiens
tctttgtggcttctc

SEQ ID NO: 362380 - DNA, 15 bp, Homo sapiens
gtctttgtggcttct

SEQ ID NO: 362381 - DNA, 15 bp, Homo sapiens
tgtctttgtggcttc

SEQ ID NO: 362382 - DNA, 15 bp, Homo sapiens
ctgtctttgtggctt

SEQ ID NO: 362383 - DNA, 15 bp, Homo sapiens
cctgtctttgtggct

SEQ ID NO: 362384 - DNA, 15 bp, Homo sapiens
tcctgtctttgtggc

SEQ ID NO: 362385 - DNA, 15 bp, Homo sapiens
ttcctgtctttgtgg

SEQ ID NO: 362386 - DNA, 15 bp, Homo sapiens
attcctgtctttgtg

SEQ ID NO: 362387 - DNA, 15 bp, Homo sapiens
cattcctgtctttgt

SEQ ID NO: 362388 - DNA, 15 bp, Homo sapiens
acattcctgtctttg

SEQ ID NO: 362389 - DNA, 15 bp, Homo sapiens
cacattcctgtcttt

SEQ ID NO: 362390 - DNA, 15 bp, Homo sapiens
gcacattcctgtctt

SEQ ID NO: 362391 - DNA, 15 bp, Homo sapiens
ggcacattcctgtct

SEQ ID NO: 362392 - DNA, 15 bp, Homo sapiens
tggcacattcctgtc

SEQ ID NO: 362393 - DNA, 15 bp, Homo sapiens
atggcacattcctgt

SEQ ID NO: 362394 - DNA, 15 bp, Homo sapiens
aatggcacattcctg

SEQ ID NO: 362395 - DNA, 15 bp, Homo sapiens
aaatggcacattcct

SEQ ID NO: 362396 - DNA, 15 bp, Homo sapiens
gaaatggcacattcc

SEQ ID NO: 362397 - DNA, 15 bp, Homo sapiens
ggaaatggcacattc

SEQ ID NO: 362398 - DNA, 15 bp, Homo sapiens
tggaaatggcacatt

SEQ ID NO: 362399 - DNA, 15 bp, Homo sapiens
ttggaaatggcacat

SEQ ID NO: 362400 - DNA, 15 bp, Homo sapiens
cttggaaatggcaca

SEQ ID NO: 362401 - DNA, 15 bp, Homo sapiens
ccttggaaatggcac

SEQ ID NO: 362402 - DNA, 15 bp, Homo sapiens
cccttggaaatggca

SEQ ID NO: 362403 - DNA, 15 bp, Homo sapiens
ccccttggaaatggc

SEQ ID NO: 362404 - DNA, 15 bp, Homo sapiens
cccccttggaaatgg

SEQ ID NO: 362405 - DNA, 15 bp, Homo sapiens
tcccccttggaaatg

SEQ ID NO: 362406 - DNA, 15 bp, Homo sapiens
ctcccccttggaaat

SEQ ID NO: 362407 - DNA, 15 bp, Homo sapiens
tctcccccttggaaa

SEQ ID NO: 362408 - DNA, 15 bp, Homo sapiens
ttctcccccttggaa

SEQ ID NO: 362409 - DNA, 15 bp, Homo sapiens
tttctcccccttgga

SEQ ID NO: 362410 - DNA, 15 bp, Homo sapiens
ttttctcccccttgg

SEQ ID NO: 362411 - DNA, 15 bp, Homo sapiens
cttttctcccccttg

SEQ ID NO: 362412 - DNA, 15 bp, Homo sapiens
acttttctccccctt

SEQ ID NO: 362413 - DNA, 15 bp, Homo sapiens
aacttttctccccct

SEQ ID NO: 362414 - DNA, 15 bp, Homo sapiens
gaacttttctccccc

SEQ ID NO: 362415 - DNA, 15 bp, Homo sapiens
agaacttttctcccc

SEQ ID NO: 362416 - DNA, 15 bp, Homo sapiens
gagaacttttctccc

SEQ ID NO: 362417 - DNA, 15 bp, Homo sapiens
ggagaacttttctcc

SEQ ID NO: 362418 - DNA, 15 bp, Homo sapiens
tggagaacttttctc

SEQ ID NO: 362419 - DNA, 15 bp, Homo sapiens
ctggagaacttttct

SEQ ID NO: 362420 - DNA, 15 bp, Homo sapiens
tctggagaacttttc

SEQ ID NO: 362421 - DNA, 15 bp, Homo sapiens
atctggagaactttt

SEQ ID NO: 362422 - DNA, 15 bp, Homo sapiens
gatctggagaacttt

SEQ ID NO: 362423 - DNA, 15 bp, Homo sapiens
tgatctggagaactt

SEQ ID NO: 362424 - DNA, 15 bp, Homo sapiens
ctgatctggagaact

SEQ ID NO: 362425 - DNA, 15 bp, Homo sapiens
gctgatctggagaac

SEQ ID NO: 362426 - DNA, 15 bp, Homo sapiens
ggctgatctggagaa

SEQ ID NO: 362427 - DNA, 15 bp, Homo sapiens
tggctgatctggaga

SEQ ID NO: 362428 - DNA, 15 bp, Homo sapiens
ttggctgatctggag

SEQ ID NO: 362429 - DNA, 15 bp, Homo sapiens
attggctgatctgga

SEQ ID NO: 362430 - DNA, 15 bp, Homo sapiens
tattggctgatctgg

SEQ ID NO: 362431 - DNA, 15 bp, Homo sapiens
ctattggctgatctg

SEQ ID NO: 362432 - DNA, 15 bp, Homo sapiens
cctattggctgatct

SEQ ID NO: 362433 - DNA, 15 bp, Homo sapiens
tcctattggctgatc

SEQ ID NO: 362434 - DNA, 15 bp, Homo sapiens
ttcctattggctgat

SEQ ID NO: 362435 - DNA, 15 bp, Homo sapiens
cttcctattggctga

SEQ ID NO: 362436 - DNA, 15 bp, Homo sapiens
acttcctattggctg

SEQ ID NO: 362437 - DNA, 15 bp, Homo sapiens
cacttcctattggct

SEQ ID NO: 362438 - DNA, 15 bp, Homo sapiens
tcacttcctattggc

SEQ ID NO: 362439 - DNA, 15 bp, Homo sapiens
atcacttcctattgg

SEQ ID NO: 362440 - DNA, 15 bp, Homo sapiens
aatcacttcctattg

SEQ ID NO: 362441 - DNA, 15 bp, Homo sapiens
taatcacttcctatt

SEQ ID NO: 362442 - DNA, 15 bp, Homo sapiens
ttaatcacttcctat

SEQ ID NO: 362443 - DNA, 15 bp, Homo sapiens
gttaatcacttccta

SEQ ID NO: 362444 - DNA, 15 bp, Homo sapiens
ggttaatcacttcct

SEQ ID NO: 362445 - DNA, 15 bp, Homo sapiens
aggttaatcacttcc

SEQ ID NO: 362446 - DNA, 15 bp, Homo sapiens
caggttaatcacttc

SEQ ID NO: 362447 - DNA, 15 bp, Homo sapiens
gcaggttaatcactt

SEQ ID NO: 362448 - DNA, 15 bp, Homo sapiens
ggcaggttaatcact

SEQ ID NO: 362449 - DNA, 15 bp, Homo sapiens
tggcaggttaatcac

SEQ ID NO: 362450 - DNA, 15 bp, Homo sapiens
ttggcaggttaatca

SEQ ID NO: 362451 - DNA, 15 bp, Homo sapiens
attggcaggttaatc

SEQ ID NO: 362452 - DNA, 15 bp, Homo sapiens
gattggcaggttaat

SEQ ID NO: 362453 - DNA, 15 bp, Homo sapiens
cgattggcaggttaa

SEQ ID NO: 362454 - DNA, 15 bp, Homo sapiens
ccgattggcaggtta

SEQ ID NO: 362455 - DNA, 15 bp, Homo sapiens
tccgattggcaggtt

SEQ ID NO: 362456 - DNA, 15 bp, Homo sapiens
ttccgattggcaggt

SEQ ID NO: 362457 - DNA, 15 bp, Homo sapiens
tttccgattggcagg

SEQ ID NO: 362458 - DNA, 15 bp, Homo sapiens
gtttccgattggcag

SEQ ID NO: 362459 - DNA, 15 bp, Homo sapiens
agtttccgattggca

SEQ ID NO: 362460 - DNA, 15 bp, Homo sapiens
tagtttccgattggc

SEQ ID NO: 362461 - DNA, 15 bp, Homo sapiens
ttagtttccgattgg

SEQ ID NO: 362462 - DNA, 15 bp, Homo sapiens
cttagtttccgattg

SEQ ID NO: 362463 - DNA, 15 bp, Homo sapiens
tcttagtttccgatt

SEQ ID NO: 362464 - DNA, 15 bp, Homo sapiens
gtcttagtttccgat

SEQ ID NO: 362465 - DNA, 15 bp, Homo sapiens
tgtcttagtttccga

SEQ ID NO: 362466 - DNA, 15 bp, Homo sapiens
ctgtcttagtttccg

SEQ ID NO: 362467 - DNA, 15 bp, Homo sapiens
gctgtcttagtttcc

SEQ ID NO: 362468 - DNA, 15 bp, Homo sapiens
agctgtcttagtttc

SEQ ID NO: 362469 - DNA, 15 bp, Homo sapiens
cagctgtcttagttt

SEQ ID NO: 362470 - DNA, 15 bp, Homo sapiens
ccagctgtcttagtt

SEQ ID NO: 362471 - DNA, 15 bp, Homo sapiens
accagctgtcttagt

SEQ ID NO: 362472 - DNA, 15 bp, Homo sapiens
aaccagctgtcttag

SEQ ID NO: 362473 - DNA, 15 bp, Homo sapiens
taaccagctgtctta

SEQ ID NO: 362474 - DNA, 15 bp, Homo sapiens
gtaaccagctgtctt

SEQ ID NO: 362475 - DNA, 15 bp, Homo sapiens
agtaaccagctgtct

SEQ ID NO: 362476 - DNA, 15 bp, Homo sapiens
gagtaaccagctgtc

SEQ ID NO: 362477 - DNA, 15 bp, Homo sapiens
tgagtaaccagctgt

SEQ ID NO: 362478 - DNA, 15 bp, Homo sapiens
gtgagtaaccagctg

SEQ ID NO: 362479 - DNA, 15 bp, Homo sapiens
ggtgagtaaccagct

SEQ ID NO: 362480 - DNA, 15 bp, Homo sapiens
gggtgagtaaccagc

SEQ ID NO: 362481 - DNA, 15 bp, Homo sapiens
tgggtgagtaaccag

SEQ ID NO: 362482 - DNA, 15 bp, Homo sapiens
ttgggtgagtaacca

SEQ ID NO: 362483 - DNA, 15 bp, Homo sapiens
ttttaacagttgtcc

SEQ ID NO: 362484 - DNA, 15 bp, Homo sapiens
attttaacagttgtc

SEQ ID NO: 362485 - DNA, 15 bp, Homo sapiens
gattttaacagttgt

SEQ ID NO: 362486 - DNA, 15 bp, Homo sapiens
agattttaacagttg

SEQ ID NO: 362487 - DNA, 15 bp, Homo sapiens
aagattttaacagtt

SEQ ID NO: 362488 - DNA, 15 bp, Homo sapiens
taagattttaacagt

SEQ ID NO: 362489 - DNA, 15 bp, Homo sapiens
ttaagattttaacag

SEQ ID NO: 362490 - DNA, 15 bp, Homo sapiens
gttaagattttaaca

SEQ ID NO: 362491 - DNA, 15 bp, Homo sapiens
ggttaagattttaac

SEQ ID NO: 362492 - DNA, 15 bp, Homo sapiens
tggttaagattttaa

SEQ ID NO: 362493 - DNA, 15 bp, Homo sapiens
ctggttaagatttta

SEQ ID NO: 362494 - DNA, 15 bp, Homo sapiens
actggttaagatttt

SEQ ID NO: 362495 - DNA, 15 bp, Homo sapiens
aactggttaagattt

SEQ ID NO: 362496 - DNA, 15 bp, Homo sapiens
caactggttaagatt

SEQ ID NO: 362497 - DNA, 15 bp, Homo sapiens
gcaactggttaagat

SEQ ID NO: 362498 - DNA, 15 bp, Homo sapiens
tgcaactggttaaga

SEQ ID NO: 362499 - DNA, 15 bp, Homo sapiens
gtgcaactggttaag

SEQ ID NO: 362500 - DNA, 15 bp, Homo sapiens
tgtgcaactggttaa

SEQ ID NO: 362501 - DNA, 15 bp, Homo sapiens
ttgtgcaactggtta

SEQ ID NO: 362502 - DNA, 15 bp, Homo sapiens
gttgtgcaactggtt

SEQ ID NO: 362503 - DNA, 15 bp, Homo sapiens
agttgtgcaactggt

SEQ ID NO: 362504 - DNA, 15 bp, Homo sapiens
tagttgtgcaactgg

SEQ ID NO: 362505 - DNA, 15 bp, Homo sapiens
ttagttgtgcaactg

SEQ ID NO: 362506 - DNA, 15 bp, Homo sapiens
tttagttgtgcaact

SEQ ID NO: 362507 - DNA, 15 bp, Homo sapiens
ctttagttgtgcaac

SEQ ID NO: 362508 - DNA, 15 bp, Homo sapiens
cctttagttgtgcaa

SEQ ID NO: 362509 - DNA, 15 bp, Homo sapiens
tcctttagttgtgca

SEQ ID NO: 362510 - DNA, 15 bp, Homo sapiens
ttcctttagttgtgc

SEQ ID NO: 362511 - DNA, 15 bp, Homo sapiens
attcctttagttgtg

SEQ ID NO: 362512 - DNA, 15 bp, Homo sapiens
tattcctttagttgt

SEQ ID NO: 362513 - DNA, 15 bp, Homo sapiens
gtattcctttagttg

SEQ ID NO: 362514 - DNA, 15 bp, Homo sapiens
tgtattcctttagtt

SEQ ID NO: 362515 - DNA, 15 bp, Homo sapiens
atgtattcctttagt

SEQ ID NO: 362516 - DNA, 15 bp, Homo sapiens
gatgtattcctttag

SEQ ID NO: 362517 - DNA, 15 bp, Homo sapiens
ggatgtattccttta

SEQ ID NO: 362518 - DNA, 15 bp, Homo sapiens
aggatgtattccttt

SEQ ID NO: 362519 - DNA, 15 bp, Homo sapiens
caggatgtattcctt

SEQ ID NO: 362520 - DNA, 15 bp, Homo sapiens
acaggatgtattcct

SEQ ID NO: 362521 - DNA, 15 bp, Homo sapiens
cacaggatgtattcc

SEQ ID NO: 362522 - DNA, 15 bp, Homo sapiens
tcacaggatgtattc

SEQ ID NO: 362523 - DNA, 15 bp, Homo sapiens
ttcacaggatgtatt

SEQ ID NO: 362524 - DNA, 15 bp, Homo sapiens
cttcacaggatgtat

SEQ ID NO: 362525 - DNA, 15 bp, Homo sapiens
acttcacaggatgta

SEQ ID NO: 362526 - DNA, 15 bp, Homo sapiens
gacttcacaggatgt

SEQ ID NO: 362527 - DNA, 15 bp, Homo sapiens
agacttcacaggatg

SEQ ID NO: 362528 - DNA, 15 bp, Homo sapiens
gagacttcacaggat

SEQ ID NO: 362529 - DNA, 15 bp, Homo sapiens
ggagacttcacagga

SEQ ID NO: 362530 - DNA, 15 bp, Homo sapiens
tggagacttcacagg

SEQ ID NO: 362531 - DNA, 15 bp, Homo sapiens
atggagacttcacag

SEQ ID NO: 362532 - DNA, 15 bp, Homo sapiens
gatggagacttcaca

SEQ ID NO: 362533 - DNA, 15 bp, Homo sapiens
agatggagacttcac

SEQ ID NO: 362534 - DNA, 15 bp, Homo sapiens
aagatggagacttca

SEQ ID NO: 362535 - DNA, 15 bp, Homo sapiens
taagatggagacttc

SEQ ID NO: 362536 - DNA, 15 bp, Homo sapiens
ctaagatggagactt

SEQ ID NO: 362537 - DNA, 15 bp, Homo sapiens
cctaagatggagact

SEQ ID NO: 362538 - DNA, 15 bp, Homo sapiens
tcctaagatggagac

SEQ ID NO: 362539 - DNA, 15 bp, Homo sapiens
ttcctaagatggaga

SEQ ID NO: 362540 - DNA, 15 bp, Homo sapiens
tttcctaagatggag

SEQ ID NO: 362541 - DNA, 15 bp, Homo sapiens
ttttcctaagatgga

SEQ ID NO: 362542 - DNA, 15 bp, Homo sapiens
cttttcctaagatgg

SEQ ID NO: 362543 - DNA, 15 bp, Homo sapiens
ccttttcctaagatg

SEQ ID NO: 362544 - DNA, 15 bp, Homo sapiens
accttttcctaagat

SEQ ID NO: 362545 - DNA, 15 bp, Homo sapiens
caccttttcctaaga

SEQ ID NO: 362546 - DNA, 15 bp, Homo sapiens
ccaccttttcctaag

SEQ ID NO: 362547 - DNA, 15 bp, Homo sapiens
accaccttttcctaa

SEQ ID NO: 362548 - DNA, 15 bp, Homo sapiens
caccaccttttccta

SEQ ID NO: 362549 - DNA, 15 bp, Homo sapiens
ccaccaccttttcct

SEQ ID NO: 362550 - DNA, 15 bp, Homo sapiens
cccaccaccttttcc

SEQ ID NO: 362551 - DNA, 15 bp, Homo sapiens
tcccaccaccttttc

SEQ ID NO: 362552 - DNA, 15 bp, Homo sapiens
ttcccaccacctttt

SEQ ID NO: 362553 - DNA, 15 bp, Homo sapiens
attcccaccaccttt

SEQ ID NO: 362554 - DNA, 15 bp, Homo sapiens
cattcccaccacctt

SEQ ID NO: 362555 - DNA, 15 bp, Homo sapiens
ccattcccaccacct

SEQ ID NO: 362556 - DNA, 15 bp, Homo sapiens
cccattcccaccacc

SEQ ID NO: 362557 - DNA, 15 bp, Homo sapiens
ccccattcccaccac

SEQ ID NO: 362558 - DNA, 15 bp, Homo sapiens
gccccattcccacca

SEQ ID NO: 362559 - DNA, 15 bp, Homo sapiens
agccccattcccacc

SEQ ID NO: 362560 - DNA, 15 bp, Homo sapiens
cagccccattcccac

SEQ ID NO: 362561 - DNA, 15 bp, Homo sapiens
ccagccccattccca

SEQ ID NO: 362562 - DNA, 15 bp, Homo sapiens
cccagccccattccc

SEQ ID NO: 362563 - DNA, 15 bp, Homo sapiens
ccccagccccattcc

SEQ ID NO: 362564 - DNA, 15 bp, Homo sapiens
gccccagccccattc

SEQ ID NO: 362565 - DNA, 15 bp, Homo sapiens
ggccccagccccatt

SEQ ID NO: 362566 - DNA, 15 bp, Homo sapiens
aggccccagccccat

SEQ ID NO: 362567 - DNA, 15 bp, Homo sapiens
caggccccagcccca

SEQ ID NO: 362568 - DNA, 15 bp, Homo sapiens
ccaggccccagcccc

SEQ ID NO: 362569 - DNA, 15 bp, Homo sapiens
accaggccccagccc

SEQ ID NO: 362570 - DNA, 15 bp, Homo sapiens
taccaggccccagcc

SEQ ID NO: 362571 - DNA, 15 bp, Homo sapiens
gtaccaggccccagc

SEQ ID NO: 362572 - DNA, 15 bp, Homo sapiens
ggtaccaggccccag

SEQ ID NO: 362573 - DNA, 15 bp, Homo sapiens
gggtaccaggcccca

SEQ ID NO: 362574 - DNA, 15 bp, Homo sapiens
agggtaccaggcccc

SEQ ID NO: 362575 - DNA, 15 bp, Homo sapiens
cagggtaccaggccc

SEQ ID NO: 362576 - DNA, 15 bp, Homo sapiens
gcagggtaccaggcc

SEQ ID NO: 362577 - DNA, 15 bp, Homo sapiens
tgcagggtaccaggc

SEQ ID NO: 362578 - DNA, 15 bp, Homo sapiens
ctgcagggtaccagg

SEQ ID NO: 362579 - DNA, 15 bp, Homo sapiens
gctgcagggtaccag

SEQ ID NO: 362580 - DNA, 15 bp, Homo sapiens
ggctgcagggtacca

SEQ ID NO: 362581 - DNA, 15 bp, Homo sapiens
aggctgcagggtacc

SEQ ID NO: 362582 - DNA, 15 bp, Homo sapiens
aaggctgcagggtac

SEQ ID NO: 362583 - DNA, 15 bp, Homo sapiens
aaaggctgcagggta

SEQ ID NO: 362584 - DNA, 15 bp, Homo sapiens
caaaggctgcagggt

SEQ ID NO: 362585 - DNA, 15 bp, Homo sapiens
ccaaaggctgcaggg

SEQ ID NO: 362586 - DNA, 15 bp, Homo sapiens
tccaaaggctgcagg

SEQ ID NO: 362587 - DNA, 15 bp, Homo sapiens
ctccaaaggctgcag

SEQ ID NO: 362588 - DNA, 15 bp, Homo sapiens
tctccaaaggctgca

SEQ ID NO: 362589 - DNA, 15 bp, Homo sapiens
gtctccaaaggctgc

SEQ ID NO: 362590 - DNA, 15 bp, Homo sapiens
tgtctccaaaggctg

SEQ ID NO: 362591 - DNA, 15 bp, Homo sapiens
gtgtctccaaaggct

SEQ ID NO: 362592 - DNA, 15 bp, Homo sapiens
tgtgtctccaaaggc

SEQ ID NO: 362593 - DNA, 15 bp, Homo sapiens
ctgtgtctccaaagg

SEQ ID NO: 362594 - DNA, 15 bp, Homo sapiens
tctgtgtctccaaag

SEQ ID NO: 362595 - DNA, 15 bp, Homo sapiens
ctctgtgtctccaaa

SEQ ID NO: 362596 - DNA, 15 bp, Homo sapiens
cctctgtgtctccaa

SEQ ID NO: 362597 - DNA, 15 bp, Homo sapiens
ccctctgtgtctcca

SEQ ID NO: 362598 - DNA, 15 bp, Homo sapiens
gccctctgtgtctcc

SEQ ID NO: 362599 - DNA, 15 bp, Homo sapiens
agccctctgtgtctc

SEQ ID NO: 362600 - DNA, 15 bp, Homo sapiens
gagccctctgtgtct

SEQ ID NO: 362601 - DNA, 15 bp, Homo sapiens
tgagccctctgtgtc

SEQ ID NO: 362602 - DNA, 15 bp, Homo sapiens
ttgagccctctgtgt

SEQ ID NO: 362603 - DNA, 15 bp, Homo sapiens
tttgagccctctgtg

SEQ ID NO: 362604 - DNA, 15 bp, Homo sapiens
ctttgagccctctgt

SEQ ID NO: 362605 - DNA, 15 bp, Homo sapiens
gctttgagccctctg

SEQ ID NO: 362606 - DNA, 15 bp, Homo sapiens
agctttgagccctct

SEQ ID NO: 362607 - DNA, 15 bp, Homo sapiens
tagctttgagccctc

SEQ ID NO: 362608 - DNA, 15 bp, Homo sapiens
ctagctttgagccct

SEQ ID NO: 362609 - DNA, 15 bp, Homo sapiens
cctagctttgagccc

SEQ ID NO: 362610 - DNA, 15 bp, Homo sapiens
tcctagctttgagcc

SEQ ID NO: 362611 - DNA, 15 bp, Homo sapiens
ttcctagctttgagc

SEQ ID NO: 362612 - DNA, 15 bp, Homo sapiens
gttcctagctttgag

SEQ ID NO: 362613 - DNA, 15 bp, Homo sapiens
agttcctagctttga

SEQ ID NO: 362614 - DNA, 15 bp, Homo sapiens
gagttcctagctttg

SEQ ID NO: 362615 - DNA, 15 bp, Homo sapiens
ggagttcctagcttt

SEQ ID NO: 362616 - DNA, 15 bp, Homo sapiens
tggagttcctagctt

SEQ ID NO: 362617 - DNA, 15 bp, Homo sapiens
atggagttcctagct

SEQ ID NO: 362618 - DNA, 15 bp, Homo sapiens
aatggagttcctagc

SEQ ID NO: 362619 - DNA, 15 bp, Homo sapiens
aaatggagttcctag

SEQ ID NO: 362620 - DNA, 15 bp, Homo sapiens
aaaatggagttccta

SEQ ID NO: 362621 - DNA, 15 bp, Homo sapiens
caaaatggagttcct

SEQ ID NO: 362622 - DNA, 15 bp, Homo sapiens
gcaaaatggagttcc

SEQ ID NO: 362623 - DNA, 15 bp, Homo sapiens
agcaaaatggagttc

SEQ ID NO: 362624 - DNA, 15 bp, Homo sapiens
tagcaaaatggagtt

SEQ ID NO: 362625 - DNA, 15 bp, Homo sapiens
atagcaaaatggagt

SEQ ID NO: 362626 - DNA, 15 bp, Homo sapiens
tatagcaaaatggag

SEQ ID NO: 362627 - DNA, 15 bp, Homo sapiens
ttatagcaaaatgga

SEQ ID NO: 362628 - DNA, 15 bp, Homo sapiens
attatagcaaaatgg

SEQ ID NO: 362629 - DNA, 15 bp, Homo sapiens
aattatagcaaaatg

SEQ ID NO: 362630 - DNA, 15 bp, Homo sapiens
aaattatagcaaaat

SEQ ID NO: 362631 - DNA, 15 bp, Homo sapiens
taaattatagcaaaa

SEQ ID NO: 362632 - DNA, 15 bp, Homo sapiens
ttaaattatagcaaa

SEQ ID NO: 362633 - DNA, 15 bp, Homo sapiens
cttaaattatagcaa

SEQ ID NO: 362634 - DNA, 15 bp, Homo sapiens
gcttaaattatagca

SEQ ID NO: 362635 - DNA, 15 bp, Homo sapiens
ggcttaaattatagc

SEQ ID NO: 362636 - DNA, 15 bp, Homo sapiens
tggcttaaattatag

SEQ ID NO: 362637 - DNA, 15 bp, Homo sapiens
gtggcttaaattata

SEQ ID NO: 362638 - DNA, 15 bp, Homo sapiens
agtggcttaaattat

SEQ ID NO: 362639 - DNA, 15 bp, Homo sapiens
gagtggcttaaatta

SEQ ID NO: 362640 - DNA, 15 bp, Homo sapiens
ggagtggcttaaatt

SEQ ID NO: 362641 - DNA, 15 bp, Homo sapiens
tggagtggcttaaat

SEQ ID NO: 362642 - DNA, 15 bp, Homo sapiens
gtggagtggcttaaa

SEQ ID NO: 362643 - DNA, 15 bp, Homo sapiens
agtggagtggcttaa

SEQ ID NO: 362644 - DNA, 15 bp, Homo sapiens
gagtggagtggctta

SEQ ID NO: 362645 - DNA, 15 bp, Homo sapiens
tgagtggagtggctt

SEQ ID NO: 362646 - DNA, 15 bp, Homo sapiens
ctgagtggagtggct

SEQ ID NO: 362647 - DNA, 15 bp, Homo sapiens
gctgagtggagtggc

SEQ ID NO: 362648 - DNA, 15 bp, Homo sapiens
tgctgagtggagtgg

SEQ ID NO: 362649 - DNA, 15 bp, Homo sapiens
atgctgagtggagtg

SEQ ID NO: 362650 - DNA, 15 bp, Homo sapiens
gatgctgagtggagt

SEQ ID NO: 362651 - DNA, 15 bp, Homo sapiens
agatgctgagtggag

SEQ ID NO: 362652 - DNA, 15 bp, Homo sapiens
cagatgctgagtgga

SEQ ID NO: 362653 - DNA, 15 bp, Homo sapiens
ccagatgctgagtgg

SEQ ID NO: 362654 - DNA, 15 bp, Homo sapiens
cccagatgctgagtg

SEQ ID NO: 362655 - DNA, 15 bp, Homo sapiens
tcccagatgctgagt

SEQ ID NO: 362656 - DNA, 15 bp, Homo sapiens
ctcccagatgctgag

SEQ ID NO: 362657 - DNA, 15 bp, Homo sapiens
cctcccagatgctga

SEQ ID NO: 362658 - DNA, 15 bp, Homo sapiens
gcctcccagatgctg

SEQ ID NO: 362659 - DNA, 15 bp, Homo sapiens
ggcctcccagatgct

SEQ ID NO: 362660 - DNA, 15 bp, Homo sapiens
aggcctcccagatgc

SEQ ID NO: 362661 - DNA, 15 bp, Homo sapiens
caggcctcccagatg

SEQ ID NO: 362662 - DNA, 15 bp, Homo sapiens
ccaggcctcccagat

SEQ ID NO: 362663 - DNA, 15 bp, Homo sapiens
tccaggcctcccaga

SEQ ID NO: 362664 - DNA, 15 bp, Homo sapiens
gtccaggcctcccag

SEQ ID NO: 362665 - DNA, 15 bp, Homo sapiens
agtccaggcctccca

SEQ ID NO: 362666 - DNA, 15 bp, Homo sapiens
aagtccaggcctccc

SEQ ID NO: 362667 - DNA, 15 bp, Homo sapiens
aaagtccaggcctcc

SEQ ID NO: 362668 - DNA, 15 bp, Homo sapiens
taaagtccaggcctc

SEQ ID NO: 362669 - DNA, 15 bp, Homo sapiens
ctaaagtccaggcct

SEQ ID NO: 362670 - DNA, 15 bp, Homo sapiens
tctaaagtccaggcc

SEQ ID NO: 362671 - DNA, 15 bp, Homo sapiens
gtctaaagtccaggc

SEQ ID NO: 362672 - DNA, 15 bp, Homo sapiens
tgtctaaagtccagg

SEQ ID NO: 362673 - DNA, 15 bp, Homo sapiens
gtgtctaaagtccag

SEQ ID NO: 362674 - DNA, 15 bp, Homo sapiens
ggtgtctaaagtcca

SEQ ID NO: 362675 - DNA, 15 bp, Homo sapiens
aggtgtctaaagtcc

SEQ ID NO: 362676 - DNA, 15 bp, Homo sapiens
taggtgtctaaagtc

SEQ ID NO: 362677 - DNA, 15 bp, Homo sapiens
ctaggtgtctaaagt

SEQ ID NO: 362678 - DNA, 15 bp, Homo sapiens
cctaggtgtctaaag

SEQ ID NO: 362679 - DNA, 15 bp, Homo sapiens
acctaggtgtctaaa

SEQ ID NO: 362680 - DNA, 15 bp, Homo sapiens
tacctaggtgtctaa

SEQ ID NO: 362681 - DNA, 15 bp, Homo sapiens
gtacctaggtgtcta

SEQ ID NO: 362682 - DNA, 15 bp, Homo sapiens
agtacctaggtgtct

SEQ ID NO: 362683 - DNA, 15 bp, Homo sapiens
cagtacctaggtgtc

SEQ ID NO: 362684 - DNA, 15 bp, Homo sapiens
acagtacctaggtgt

SEQ ID NO: 362685 - DNA, 15 bp, Homo sapiens
cacagtacctaggtg

SEQ ID NO: 362686 - DNA, 15 bp, Homo sapiens
acacagtacctaggt

SEQ ID NO: 362687 - DNA, 15 bp, Homo sapiens
cacacagtacctagg

SEQ ID NO: 362688 - DNA, 15 bp, Homo sapiens
ccacacagtacctag

SEQ ID NO: 362689 - DNA, 15 bp, Homo sapiens
accacacagtaccta

SEQ ID NO: 362690 - DNA, 15 bp, Homo sapiens
gaccacacagtacct

SEQ ID NO: 362691 - DNA, 15 bp, Homo sapiens
ggaccacacagtacc

SEQ ID NO: 362692 - DNA, 15 bp, Homo sapiens
tggaccacacagtac

SEQ ID NO: 362693 - DNA, 15 bp, Homo sapiens
ttggaccacacagta

SEQ ID NO: 362694 - DNA, 15 bp, Homo sapiens
gttggaccacacagt

SEQ ID NO: 362695 - DNA, 15 bp, Homo sapiens
ggttggaccacacag

SEQ ID NO: 362696 - DNA, 15 bp, Homo sapiens
tggttggaccacaca

SEQ ID NO: 362697 - DNA, 15 bp, Homo sapiens
ctggttggaccacac

SEQ ID NO: 362698 - DNA, 15 bp, Homo sapiens
cctggttggaccaca

SEQ ID NO: 362699 - DNA, 15 bp, Homo sapiens
tcctggttggaccac

SEQ ID NO: 362700 - DNA, 15 bp, Homo sapiens
ctcctggttggacca

SEQ ID NO: 362701 - DNA, 15 bp, Homo sapiens
tctcctggttggacc

SEQ ID NO: 362702 - DNA, 15 bp, Homo sapiens
ctctcctggttggac

SEQ ID NO: 362703 - DNA, 15 bp, Homo sapiens
gctctcctggttgga

SEQ ID NO: 362704 - DNA, 15 bp, Homo sapiens
ggctctcctggttgg

SEQ ID NO: 362705 - DNA, 15 bp, Homo sapiens
aggctctcctggttg

SEQ ID NO: 362706 - DNA, 15 bp, Homo sapiens
aaggctctcctggtt

SEQ ID NO: 362707 - DNA, 15 bp, Homo sapiens
gaaggctctcctggt

SEQ ID NO: 362708 - DNA, 15 bp, Homo sapiens
agaaggctctcctgg

SEQ ID NO: 362709 - DNA, 15 bp, Homo sapiens
aagaaggctctcctg

SEQ ID NO: 362710 - DNA, 15 bp, Homo sapiens
aaagaaggctctcct

SEQ ID NO: 362711 - DNA, 15 bp, Homo sapiens
caaagaaggctctcc

SEQ ID NO: 362712 - DNA, 15 bp, Homo sapiens
tcaaagaaggctctc

SEQ ID NO: 362713 - DNA, 15 bp, Homo sapiens
ttcaaagaaggctct

SEQ ID NO: 362714 - DNA, 15 bp, Homo sapiens
tttcaaagaaggctc

SEQ ID NO: 362715 - DNA, 15 bp, Homo sapiens
ctttcaaagaaggct

SEQ ID NO: 362716 - DNA, 15 bp, Homo sapiens
tctttcaaagaaggc

SEQ ID NO: 362717 - DNA, 15 bp, Homo sapiens
ctctttcaaagaagg

SEQ ID NO: 362718 - DNA, 15 bp, Homo sapiens
actctttcaaagaag

SEQ ID NO: 362719 - DNA, 15 bp, Homo sapiens
cactctttcaaagaa

SEQ ID NO: 362720 - DNA, 15 bp, Homo sapiens
acactctttcaaaga

SEQ ID NO: 362721 - DNA, 15 bp, Homo sapiens
aacactctttcaaag

SEQ ID NO: 362722 - DNA, 15 bp, Homo sapiens
gaacactctttcaaa

SEQ ID NO: 362723 - DNA, 15 bp, Homo sapiens
tgaacactctttcaa

SEQ ID NO: 362724 - DNA, 15 bp, Homo sapiens
gtgaacactctttca

SEQ ID NO: 362725 - DNA, 15 bp, Homo sapiens
tgtgaacactctttc

SEQ ID NO: 362726 - DNA, 15 bp, Homo sapiens
atgtgaacactcttt

SEQ ID NO: 362727 - DNA, 15 bp, Homo sapiens
catgtgaacactctt

SEQ ID NO: 362728 - DNA, 15 bp, Homo sapiens
tcatgtgaacactct

SEQ ID NO: 362729 - DNA, 15 bp, Homo sapiens
gtcatgtgaacactc

SEQ ID NO: 362730 - DNA, 15 bp, Homo sapiens
agtcatgtgaacact

SEQ ID NO: 362731 - DNA, 15 bp, Homo sapiens
cagtcatgtgaacac

SEQ ID NO: 362732 - DNA, 15 bp, Homo sapiens
tcagtcatgtgaaca

SEQ ID NO: 362733 - DNA, 15 bp, Homo sapiens
ttcagtcatgtgaac

SEQ ID NO: 362734 - DNA, 15 bp, Homo sapiens
gttcagtcatgtgaa

SEQ ID NO: 362735 - DNA, 15 bp, Homo sapiens
ggttcagtcatgtga

SEQ ID NO: 362736 - DNA, 15 bp, Homo sapiens
aggttcagtcatgtg

SEQ ID NO: 362737 - DNA, 15 bp, Homo sapiens
taggttcagtcatgt

SEQ ID NO: 362738 - DNA, 15 bp, Homo sapiens
ctaggttcagtcatg

SEQ ID NO: 362739 - DNA, 15 bp, Homo sapiens
cctaggttcagtcat

SEQ ID NO: 362740 - DNA, 15 bp, Homo sapiens
ccctaggttcagtca

SEQ ID NO: 362741 - DNA, 15 bp, Homo sapiens
cccctaggttcagtc

SEQ ID NO: 362742 - DNA, 15 bp, Homo sapiens
tcccctaggttcagt

SEQ ID NO: 362743 - DNA, 15 bp, Homo sapiens
ctcccctaggttcag

SEQ ID NO: 362744 - DNA, 15 bp, Homo sapiens
cctcccctaggttca

SEQ ID NO: 362745 - DNA, 15 bp, Homo sapiens
gcctcccctaggttc

SEQ ID NO: 362746 - DNA, 15 bp, Homo sapiens
ggcctcccctaggtt

SEQ ID NO: 362747 - DNA, 15 bp, Homo sapiens
tggcctcccctaggt

SEQ ID NO: 362748 - DNA, 15 bp, Homo sapiens
ctggcctcccctagg

SEQ ID NO: 362749 - DNA, 15 bp, Homo sapiens
actggcctcccctag

SEQ ID NO: 362750 - DNA, 15 bp, Homo sapiens
aactggcctccccta

SEQ ID NO: 362751 - DNA, 15 bp, Homo sapiens
caactggcctcccct

SEQ ID NO: 362752 - DNA, 15 bp, Homo sapiens
acaactggcctcccc

SEQ ID NO: 362753 - DNA, 15 bp, Homo sapiens
cacaactggcctccc

SEQ ID NO: 362754 - DNA, 15 bp, Homo sapiens
tcacaactggcctcc

SEQ ID NO: 362755 - DNA, 15 bp, Homo sapiens
gtcacaactggcctc

SEQ ID NO: 362756 - DNA, 15 bp, Homo sapiens
agtcacaactggcct

SEQ ID NO: 362757 - DNA, 15 bp, Homo sapiens
aagtcacaactggcc

SEQ ID NO: 362758 - DNA, 15 bp, Homo sapiens
caagtcacaactggc

SEQ ID NO: 362759 - DNA, 15 bp, Homo sapiens
acaagtcacaactgg

SEQ ID NO: 362760 - DNA, 15 bp, Homo sapiens
cacaagtcacaactg

SEQ ID NO: 362761 - DNA, 15 bp, Homo sapiens
ccacaagtcacaact

SEQ ID NO: 362762 - DNA, 15 bp, Homo sapiens
gccacaagtcacaac

SEQ ID NO: 362763 - DNA, 15 bp, Homo sapiens
agccacaagtcacaa

SEQ ID NO: 362764 - DNA, 15 bp, Homo sapiens
cagccacaagtcaca

SEQ ID NO: 362765 - DNA, 15 bp, Homo sapiens
acagccacaagtcac

SEQ ID NO: 362766 - DNA, 15 bp, Homo sapiens
gacagccacaagtca

SEQ ID NO: 362767 - DNA, 15 bp, Homo sapiens
tgacagccacaagtc

SEQ ID NO: 362768 - DNA, 15 bp, Homo sapiens
ctgacagccacaagt

SEQ ID NO: 362769 - DNA, 15 bp, Homo sapiens
tctgacagccacaag

SEQ ID NO: 362770 - DNA, 15 bp, Homo sapiens
ttctgacagccacaa

SEQ ID NO: 362771 - DNA, 15 bp, Homo sapiens
cttctgacagccaca

SEQ ID NO: 362772 - DNA, 15 bp, Homo sapiens
acttctgacagccac

SEQ ID NO: 362773 - DNA, 15 bp, Homo sapiens
gacttctgacagcca

SEQ ID NO: 362774 - DNA, 15 bp, Homo sapiens
tgacttctgacagcc

SEQ ID NO: 362775 - DNA, 15 bp, Homo sapiens
ctgacttctgacagc

SEQ ID NO: 362776 - DNA, 15 bp, Homo sapiens
tctgacttctgacag

SEQ ID NO: 362777 - DNA, 15 bp, Homo sapiens
ttctgacttctgaca

SEQ ID NO: 362778 - DNA, 15 bp, Homo sapiens
tttctgacttctgac

SEQ ID NO: 362779 - DNA, 15 bp, Homo sapiens
ctttctgacttctga

SEQ ID NO: 362780 - DNA, 15 bp, Homo sapiens
tctttctgacttctg

SEQ ID NO: 362781 - DNA, 15 bp, Homo sapiens
gtctttctgacttct

SEQ ID NO: 362782 - DNA, 15 bp, Homo sapiens
tgtctttctgacttc

SEQ ID NO: 362783 - DNA, 15 bp, Homo sapiens
gtgtctttctgactt

SEQ ID NO: 362784 - DNA, 15 bp, Homo sapiens
ggtgtctttctgact

SEQ ID NO: 362785 - DNA, 15 bp, Homo sapiens
gggtgtctttctgac

SEQ ID NO: 362786 - DNA, 15 bp, Homo sapiens
ggggtgtctttctga

SEQ ID NO: 362787 - DNA, 15 bp, Homo sapiens
gggggtgtctttctg

SEQ ID NO: 362788 - DNA, 15 bp, Homo sapiens
tgggggtgtctttct

SEQ ID NO: 362789 - DNA, 15 bp, Homo sapiens
gtgggggtgtctttc

SEQ ID NO: 362790 - DNA, 15 bp, Homo sapiens
ggtgggggtgtcttt

SEQ ID NO: 362791 - DNA, 15 bp, Homo sapiens
aggtgggggtgtctt

SEQ ID NO: 362792 - DNA, 15 bp, Homo sapiens
gaggtgggggtgtct

SEQ ID NO: 362793 - DNA, 15 bp, Homo sapiens
ggaggtgggggtgtc

SEQ ID NO: 362794 - DNA, 15 bp, Homo sapiens
tggaggtgggggtgt

SEQ ID NO: 362795 - DNA, 15 bp, Homo sapiens
gtggaggtgggggtg

SEQ ID NO: 362796 - DNA, 15 bp, Homo sapiens
tgtggaggtgggggt

SEQ ID NO: 362797 - DNA, 15 bp, Homo sapiens
atgtggaggtggggg

SEQ ID NO: 362798 - DNA, 15 bp, Homo sapiens
gatgtggaggtgggg

SEQ ID NO: 362799 - DNA, 15 bp, Homo sapiens
ggatgtggaggtggg

SEQ ID NO: 362800 - DNA, 15 bp, Homo sapiens
gggatgtggaggtgg

SEQ ID NO: 362801 - DNA, 15 bp, Homo sapiens
tgggatgtggaggtg

SEQ ID NO: 362802 - DNA, 15 bp, Homo sapiens
gtgggatgtggaggt

SEQ ID NO: 362803 - DNA, 15 bp, Homo sapiens
tgtgggatgtggagg

SEQ ID NO: 362804 - DNA, 15 bp, Homo sapiens
ttgtgggatgtggag

SEQ ID NO: 362805 - DNA, 15 bp, Homo sapiens
cttgtgggatgtgga

SEQ ID NO: 362806 - DNA, 15 bp, Homo sapiens
tcttgtgggatgtgg

SEQ ID NO: 362807 - DNA, 15 bp, Homo sapiens
ttcttgtgggatgtg

SEQ ID NO: 362808 - DNA, 15 bp, Homo sapiens
cttcttgtgggatgt

SEQ ID NO: 362809 - DNA, 15 bp, Homo sapiens
acttcttgtgggatg

SEQ ID NO: 362810 - DNA, 15 bp, Homo sapiens
gacttcttgtgggat

SEQ ID NO: 362811 - DNA, 15 bp, Homo sapiens
tgacttcttgtggga

SEQ ID NO: 362812 - DNA, 15 bp, Homo sapiens
ctgacttcttgtggg

SEQ ID NO: 362813 - DNA, 15 bp, Homo sapiens
tctgacttcttgtgg

SEQ ID NO: 362814 - DNA, 15 bp, Homo sapiens
ttctgacttcttgtg

SEQ ID NO: 362815 - DNA, 15 bp, Homo sapiens
attctgacttcttgt

SEQ ID NO: 362816 - DNA, 15 bp, Homo sapiens
aattctgacttcttg

SEQ ID NO: 362817 - DNA, 15 bp, Homo sapiens
aaattctgacttctt

SEQ ID NO: 362818 - DNA, 15 bp, Homo sapiens
caaattctgacttct

SEQ ID NO: 362819 - DNA, 15 bp, Homo sapiens
gcaaattctgacttc

SEQ ID NO: 362820 - DNA, 15 bp, Homo sapiens
agcaaattctgactt

SEQ ID NO: 362821 - DNA, 15 bp, Homo sapiens
cagcaaattctgact

SEQ ID NO: 362822 - DNA, 15 bp, Homo sapiens
acagcaaattctgac

SEQ ID NO: 362823 - DNA, 15 bp, Homo sapiens
aacagcaaattctga

SEQ ID NO: 362824 - DNA, 15 bp, Homo sapiens
aaacagcaaattctg

SEQ ID NO: 362825 - DNA, 15 bp, Homo sapiens
taaacagcaaattct

SEQ ID NO: 362826 - DNA, 15 bp, Homo sapiens
ttaaacagcaaattc

SEQ ID NO: 362827 - DNA, 15 bp, Homo sapiens
tttaaacagcaaatt

SEQ ID NO: 362828 - DNA, 15 bp, Homo sapiens
ctttaaacagcaaat

SEQ ID NO: 362829 - DNA, 15 bp, Homo sapiens
gctttaaacagcaaa

SEQ ID NO: 362830 - DNA, 15 bp, Homo sapiens
agctttaaacagcaa

SEQ ID NO: 362831 - DNA, 15 bp, Homo sapiens
cagctttaaacagca

SEQ ID NO: 362832 - DNA, 15 bp, Homo sapiens
ccagctttaaacagc

SEQ ID NO: 362833 - DNA, 15 bp, Homo sapiens
tccagctttaaacag

SEQ ID NO: 362834 - DNA, 15 bp, Homo sapiens
atccagctttaaaca

SEQ ID NO: 362835 - DNA, 15 bp, Homo sapiens
gatccagctttaaac

SEQ ID NO: 362836 - DNA, 15 bp, Homo sapiens
agatccagctttaaa

SEQ ID NO: 362837 - DNA, 15 bp, Homo sapiens
gagatccagctttaa

SEQ ID NO: 362838 - DNA, 15 bp, Homo sapiens
cgagatccagcttta

SEQ ID NO: 362839 - DNA, 15 bp, Homo sapiens
ccgagatccagcttt

SEQ ID NO: 362840 - DNA, 15 bp, Homo sapiens
cccgagatccagctt

SEQ ID NO: 362841 - DNA, 15 bp, Homo sapiens
ccccgagatccagct

SEQ ID NO: 362842 - DNA, 15 bp, Homo sapiens
tccccgagatccagc

SEQ ID NO: 362843 - DNA, 15 bp, Homo sapiens
atccccgagatccag

SEQ ID NO: 362844 - DNA, 15 bp, Homo sapiens
tatccccgagatcca

SEQ ID NO: 362845 - DNA, 15 bp, Homo sapiens
ctatccccgagatcc

SEQ ID NO: 362846 - DNA, 15 bp, Homo sapiens
gctatccccgagatc

SEQ ID NO: 362847 - DNA, 15 bp, Homo sapiens
agctatccccgagat

SEQ ID NO: 362848 - DNA, 15 bp, Homo sapiens
cagctatccccgaga

SEQ ID NO: 362849 - DNA, 15 bp, Homo sapiens
acagctatccccgag

SEQ ID NO: 362850 - DNA, 15 bp, Homo sapiens
cacagctatccccga

SEQ ID NO: 362851 - DNA, 15 bp, Homo sapiens
acacagctatccccg

SEQ ID NO: 362852 - DNA, 15 bp, Homo sapiens
cacacagctatcccc

SEQ ID NO: 362853 - DNA, 15 bp, Homo sapiens
ccacacagctatccc

SEQ ID NO: 362854 - DNA, 15 bp, Homo sapiens
cccacacagctatcc

SEQ ID NO: 362855 - DNA, 15 bp, Homo sapiens
gcccacacagctatc

SEQ ID NO: 362856 - DNA, 15 bp, Homo sapiens
agcccacacagctat

SEQ ID NO: 362857 - DNA, 15 bp, Homo sapiens
gagcccacacagcta

SEQ ID NO: 362858 - DNA, 15 bp, Homo sapiens
agagcccacacagct

SEQ ID NO: 362859 - DNA, 15 bp, Homo sapiens
cagagcccacacagc

SEQ ID NO: 362860 - DNA, 15 bp, Homo sapiens
gcagagcccacacag

SEQ ID NO: 362861 - DNA, 15 bp, Homo sapiens
agcagagcccacaca

SEQ ID NO: 362862 - DNA, 15 bp, Homo sapiens
aagcagagcccacac

SEQ ID NO: 362863 - DNA, 15 bp, Homo sapiens
gaagcagagcccaca

SEQ ID NO: 362864 - DNA, 15 bp, Homo sapiens
ggaagcagagcccac

SEQ ID NO: 362865 - DNA, 15 bp, Homo sapiens
gggaagcagagccca

SEQ ID NO: 362866 - DNA, 15 bp, Homo sapiens
cgggaagcagagccc

SEQ ID NO: 362867 - DNA, 15 bp, Homo sapiens
acgggaagcagagcc

SEQ ID NO: 362868 - DNA, 15 bp, Homo sapiens
cacgggaagcagagc

SEQ ID NO: 362869 - DNA, 15 bp, Homo sapiens
acacgggaagcagag

SEQ ID NO: 362870 - DNA, 15 bp, Homo sapiens
aacacgggaagcaga

SEQ ID NO: 362871 - DNA, 15 bp, Homo sapiens
aaacacgggaagcag

SEQ ID NO: 362872 - DNA, 15 bp, Homo sapiens
gaaacacgggaagca

SEQ ID NO: 362873 - DNA, 15 bp, Homo sapiens
tgaaacacgggaagc

SEQ ID NO: 362874 - DNA, 15 bp, Homo sapiens
atgaaacacgggaag

SEQ ID NO: 362875 - DNA, 15 bp, Homo sapiens
aatgaaacacgggaa

SEQ ID NO: 362876 - DNA, 15 bp, Homo sapiens
caatgaaacacggga

SEQ ID NO: 362877 - DNA, 15 bp, Homo sapiens
acaatgaaacacggg

SEQ ID NO: 362878 - DNA, 15 bp, Homo sapiens
tacaatgaaacacgg

SEQ ID NO: 362879 - DNA, 15 bp, Homo sapiens
atacaatgaaacacg

SEQ ID NO: 362880 - DNA, 15 bp, Homo sapiens
gatacaatgaaacac

SEQ ID NO: 362881 - DNA, 15 bp, Homo sapiens
agatacaatgaaaca

SEQ ID NO: 362882 - DNA, 15 bp, Homo sapiens
cagatacaatgaaac

SEQ ID NO: 362883 - DNA, 15 bp, Homo sapiens
tcagatacaatgaaa

SEQ ID NO: 362884 - DNA, 15 bp, Homo sapiens
atcagatacaatgaa

SEQ ID NO: 362885 - DNA, 15 bp, Homo sapiens
catcagatacaatga

SEQ ID NO: 362886 - DNA, 15 bp, Homo sapiens
ccatcagatacaatg

SEQ ID NO: 362887 - DNA, 15 bp, Homo sapiens
accatcagatacaat

SEQ ID NO: 362888 - DNA, 15 bp, Homo sapiens
gaccatcagatacaa

SEQ ID NO: 362889 - DNA, 15 bp, Homo sapiens
agaccatcagataca

SEQ ID NO: 362890 - DNA, 15 bp, Homo sapiens
cagaccatcagatac

SEQ ID NO: 362891 - DNA, 15 bp, Homo sapiens
tcagaccatcagata

SEQ ID NO: 362892 - DNA, 15 bp, Homo sapiens
ttcagaccatcagat

SEQ ID NO: 362893 - DNA, 15 bp, Homo sapiens
tttcagaccatcaga

SEQ ID NO: 362894 - DNA, 15 bp, Homo sapiens
ctttcagaccatcag

SEQ ID NO: 362895 - DNA, 15 bp, Homo sapiens
cctttcagaccatca

SEQ ID NO: 362896 - DNA, 15 bp, Homo sapiens
acctttcagaccatc

SEQ ID NO: 362897 - DNA, 15 bp, Homo sapiens
aacctttcagaccat

SEQ ID NO: 362898 - DNA, 15 bp, Homo sapiens
aaacctttcagacca

SEQ ID NO: 362899 - DNA, 15 bp, Homo sapiens
caaacctttcagacc

SEQ ID NO: 362900 - DNA, 15 bp, Homo sapiens
tcaaacctttcagac

SEQ ID NO: 362901 - DNA, 15 bp, Homo sapiens
ctcaaacctttcaga

SEQ ID NO: 362902 - DNA, 15 bp, Homo sapiens
cctcaaacctttcag

SEQ ID NO: 362903 - DNA, 15 bp, Homo sapiens
tcctcaaacctttca

SEQ ID NO: 362904 - DNA, 15 bp, Homo sapiens
ttcctcaaacctttc

SEQ ID NO: 362905 - DNA, 15 bp, Homo sapiens
attcctcaaaccttt

SEQ ID NO: 362906 - DNA, 15 bp, Homo sapiens
cattcctcaaacctt

SEQ ID NO: 362907 - DNA, 15 bp, Homo sapiens
ccattcctcaaacct

SEQ ID NO: 362908 - DNA, 15 bp, Homo sapiens
gccattcctcaaacc

SEQ ID NO: 362909 - DNA, 15 bp, Homo sapiens
agccattcctcaaac

SEQ ID NO: 362910 - DNA, 15 bp, Homo sapiens
cagccattcctcaaa

SEQ ID NO: 362911 - DNA, 15 bp, Homo sapiens
ccagccattcctcaa

SEQ ID NO: 362912 - DNA, 15 bp, Homo sapiens
gccagccattcctca

SEQ ID NO: 362913 - DNA, 15 bp, Homo sapiens
ggccagccattcctc

SEQ ID NO: 362914 - DNA, 15 bp, Homo sapiens
aggccagccattcct

SEQ ID NO: 362915 - DNA, 15 bp, Homo sapiens
aaggccagccattcc

SEQ ID NO: 362916 - DNA, 15 bp, Homo sapiens
caaggccagccattc

SEQ ID NO: 362917 - DNA, 15 bp, Homo sapiens
ccaaggccagccatt

SEQ ID NO: 362918 - DNA, 15 bp, Homo sapiens
cccaaggccagccat

SEQ ID NO: 362919 - DNA, 15 bp, Homo sapiens
ccccaaggccagcca

SEQ ID NO: 362920 - DNA, 15 bp, Homo sapiens
cccccaaggccagcc

SEQ ID NO: 362921 - DNA, 15 bp, Homo sapiens
ccccccaaggccagc

SEQ ID NO: 362922 - DNA, 15 bp, Homo sapiens
accccccaaggccag

SEQ ID NO: 362923 - DNA, 15 bp, Homo sapiens
aaccccccaaggcca

SEQ ID NO: 362924 - DNA, 15 bp, Homo sapiens
caaccccccaaggcc

SEQ ID NO: 362925 - DNA, 15 bp, Homo sapiens
gcaaccccccaaggc

SEQ ID NO: 362926 - DNA, 15 bp, Homo sapiens
agcaaccccccaagg

SEQ ID NO: 362927 - DNA, 15 bp, Homo sapiens
cagcaaccccccaag

SEQ ID NO: 362928 - DNA, 15 bp, Homo sapiens
ccagcaaccccccaa

SEQ ID NO: 362929 - DNA, 15 bp, Homo sapiens
cccagcaacccccca

SEQ ID NO: 362930 - DNA, 15 bp, Homo sapiens
acccagcaacccccc

SEQ ID NO: 362931 - DNA, 15 bp, Homo sapiens
cacccagcaaccccc

SEQ ID NO: 362932 - DNA, 15 bp, Homo sapiens
tcacccagcaacccc

SEQ ID NO: 362933 - DNA, 15 bp, Homo sapiens
ctcacccagcaaccc

SEQ ID NO: 362934 - DNA, 15 bp, Homo sapiens
gctcacccagcaacc

SEQ ID NO: 362935 - DNA, 15 bp, Homo sapiens
agctcacccagcaac

SEQ ID NO: 362936 - DNA, 15 bp, Homo sapiens
gagctcacccagcaa

SEQ ID NO: 362937 - DNA, 15 bp, Homo sapiens
agagctcacccagca

SEQ ID NO: 362938 - DNA, 15 bp, Homo sapiens
aagagctcacccagc

SEQ ID NO: 362939 - DNA, 15 bp, Homo sapiens
caagagctcacccag

SEQ ID NO: 362940 - DNA, 15 bp, Homo sapiens
tcaagagctcaccca

SEQ ID NO: 362941 - DNA, 15 bp, Homo sapiens
ctcaagagctcaccc

SEQ ID NO: 362942 - DNA, 15 bp, Homo sapiens
cctcaagagctcacc

SEQ ID NO: 362943 - DNA, 15 bp, Homo sapiens
ccctcaagagctcac

SEQ ID NO: 362944 - DNA, 15 bp, Homo sapiens
tccctcaagagctca

SEQ ID NO: 362945 - DNA, 15 bp, Homo sapiens
gtccctcaagagctc

SEQ ID NO: 362946 - DNA, 15 bp, Homo sapiens
ggtccctcaagagct

SEQ ID NO: 362947 - DNA, 15 bp, Homo sapiens
gggtccctcaagagc

SEQ ID NO: 362948 - DNA, 15 bp, Homo sapiens
tgggtccctcaagag

SEQ ID NO: 362949 - DNA, 15 bp, Homo sapiens
ctgggtccctcaaga

SEQ ID NO: 362950 - DNA, 15 bp, Homo sapiens
cctgggtccctcaag

SEQ ID NO: 362951 - DNA, 15 bp, Homo sapiens
acctgggtccctcaa

SEQ ID NO: 362952 - DNA, 15 bp, Homo sapiens
cacctgggtccctca

SEQ ID NO: 362953 - DNA, 15 bp, Homo sapiens
ccacctgggtccctc

SEQ ID NO: 362954 - DNA, 15 bp, Homo sapiens
gccacctgggtccct

SEQ ID NO: 362955 - DNA, 15 bp, Homo sapiens
ggccacctgggtccc

SEQ ID NO: 362956 - DNA, 15 bp, Homo sapiens
tggccacctgggtcc

SEQ ID NO: 362957 - DNA, 15 bp, Homo sapiens
ctggccacctgggtc

SEQ ID NO: 362958 - DNA, 15 bp, Homo sapiens
actggccacctgggt

SEQ ID NO: 362959 - DNA, 15 bp, Homo sapiens
tactggccacctggg

SEQ ID NO: 362960 - DNA, 15 bp, Homo sapiens
atactggccacctgg

SEQ ID NO: 362961 - DNA, 15 bp, Homo sapiens
gatactggccacctg

SEQ ID NO: 362962 - DNA, 15 bp, Homo sapiens
ggatactggccacct

SEQ ID NO: 362963 - DNA, 15 bp, Homo sapiens
tggatactggccacc

SEQ ID NO: 362964 - DNA, 15 bp, Homo sapiens
atggatactggccac

SEQ ID NO: 362965 - DNA, 15 bp, Homo sapiens
catggatactggcca

SEQ ID NO: 362966 - DNA, 15 bp, Homo sapiens
ccatggatactggcc

SEQ ID NO: 362967 - DNA, 15 bp, Homo sapiens
cccatggatactggc

SEQ ID NO: 362968 - DNA, 15 bp, Homo sapiens
gcccatggatactgg

SEQ ID NO: 362969 - DNA, 15 bp, Homo sapiens
tgcccatggatactg

SEQ ID NO: 362970 - DNA, 15 bp, Homo sapiens
ctgcccatggatact

SEQ ID NO: 362971 - DNA, 15 bp, Homo sapiens
tctgcccatggatac

SEQ ID NO: 362972 - DNA, 15 bp, Homo sapiens
atctgcccatggata

SEQ ID NO: 362973 - DNA, 15 bp, Homo sapiens
gatctgcccatggat

SEQ ID NO: 362974 - DNA, 15 bp, Homo sapiens
ggatctgcccatgga

SEQ ID NO: 362975 - DNA, 15 bp, Homo sapiens
tggatctgcccatgg

SEQ ID NO: 362976 - DNA, 15 bp, Homo sapiens
ctggatctgcccatg

SEQ ID NO: 362977 - DNA, 15 bp, Homo sapiens
gctggatctgcccat

SEQ ID NO: 362978 - DNA, 15 bp, Homo sapiens
ggctggatctgccca

SEQ ID NO: 362979 - DNA, 15 bp, Homo sapiens
aggctggatctgccc

SEQ ID NO: 362980 - DNA, 15 bp, Homo sapiens
caggctggatctgcc

SEQ ID NO: 362981 - DNA, 15 bp, Homo sapiens
gcaggctggatctgc

SEQ ID NO: 362982 - DNA, 15 bp, Homo sapiens
tgcaggctggatctg

SEQ ID NO: 362983 - DNA, 15 bp, Homo sapiens
ttgcaggctggatct

SEQ ID NO: 362984 - DNA, 15 bp, Homo sapiens
tttgcaggctggatc

SEQ ID NO: 362985 - DNA, 15 bp, Homo sapiens
atttgcaggctggat

SEQ ID NO: 362986 - DNA, 15 bp, Homo sapiens
gatttgcaggctgga

SEQ ID NO: 362987 - DNA, 15 bp, Homo sapiens
ggatttgcaggctgg

SEQ ID NO: 362988 - DNA, 15 bp, Homo sapiens
tggatttgcaggctg

SEQ ID NO: 362989 - DNA, 15 bp, Homo sapiens
ctggatttgcaggct

SEQ ID NO: 362990 - DNA, 15 bp, Homo sapiens
tctggatttgcaggc

SEQ ID NO: 362991 - DNA, 15 bp, Homo sapiens
atctggatttgcagg

SEQ ID NO: 362992 - DNA, 15 bp, Homo sapiens
gatctggatttgcag

SEQ ID NO: 362993 - DNA, 15 bp, Homo sapiens
cgatctggatttgca

SEQ ID NO: 362994 - DNA, 15 bp, Homo sapiens
ccgatctggatttgc

SEQ ID NO: 362995 - DNA, 15 bp, Homo sapiens
tccgatctggatttg

SEQ ID NO: 362996 - DNA, 15 bp, Homo sapiens
ttccgatctggattt

SEQ ID NO: 362997 - DNA, 15 bp, Homo sapiens
cttccgatctggatt

SEQ ID NO: 362998 - DNA, 15 bp, Homo sapiens
acttccgatctggat

SEQ ID NO: 362999 - DNA, 15 bp, Homo sapiens
gacttccgatctgga

SEQ ID NO: 363000 - DNA, 15 bp, Homo sapiens
agacttccgatctgg

SEQ ID NO: 363001 - DNA, 15 bp, Homo sapiens
cagacttccgatctg

SEQ ID NO: 363002 - DNA, 15 bp, Homo sapiens
ccagacttccgatct

SEQ ID NO: 363003 - DNA, 15 bp, Homo sapiens
accagacttccgatc

SEQ ID NO: 363004 - DNA, 15 bp, Homo sapiens
caccagacttccgat

SEQ ID NO: 363005 - DNA, 15 bp, Homo sapiens
acaccagacttccga

SEQ ID NO: 363006 - DNA, 15 bp, Homo sapiens
gacaccagacttccg

SEQ ID NO: 363007 - DNA, 15 bp, Homo sapiens
agacaccagacttcc

SEQ ID NO: 363008 - DNA, 15 bp, Homo sapiens
aagacaccagacttc

SEQ ID NO: 363009 - DNA, 15 bp, Homo sapiens
caagacaccagactt

SEQ ID NO: 363010 - DNA, 15 bp, Homo sapiens
tcaagacaccagact

SEQ ID NO: 363011 - DNA, 15 bp, Homo sapiens
gtcaagacaccagac

SEQ ID NO: 363012 - DNA, 15 bp, Homo sapiens
ggtcaagacaccaga

SEQ ID NO: 363013 - DNA, 15 bp, Homo sapiens
aggtcaagacaccag

SEQ ID NO: 363014 - DNA, 15 bp, Homo sapiens
caggtcaagacacca

SEQ ID NO: 363015 - DNA, 15 bp, Homo sapiens
tcaggtcaagacacc

SEQ ID NO: 363016 - DNA, 15 bp, Homo sapiens
ctcaggtcaagacac

SEQ ID NO: 363017 - DNA, 15 bp, Homo sapiens
tctcaggtcaagaca

SEQ ID NO: 363018 - DNA, 15 bp, Homo sapiens
atctcaggtcaagac

SEQ ID NO: 363019 - DNA, 15 bp, Homo sapiens
gatctcaggtcaaga

SEQ ID NO: 363020 - DNA, 15 bp, Homo sapiens
agatctcaggtcaag

SEQ ID NO: 363021 - DNA, 15 bp, Homo sapiens
cagatctcaggtcaa

SEQ ID NO: 363022 - DNA, 15 bp, Homo sapiens
ccagatctcaggtca

SEQ ID NO: 363023 - DNA, 15 bp, Homo sapiens
gccagatctcaggtc

SEQ ID NO: 363024 - DNA, 15 bp, Homo sapiens
tgccagatctcaggt

SEQ ID NO: 363025 - DNA, 15 bp, Homo sapiens
gtgccagatctcagg

SEQ ID NO: 363026 - DNA, 15 bp, Homo sapiens
agtgccagatctcag

SEQ ID NO: 363027 - DNA, 15 bp, Homo sapiens
cagtgccagatctca

SEQ ID NO: 363028 - DNA, 15 bp, Homo sapiens
gcagtgccagatctc

SEQ ID NO: 363029 - DNA, 15 bp, Homo sapiens
cgcagtgccagatct

SEQ ID NO: 363030 - DNA, 15 bp, Homo sapiens
acgcagtgccagatc

SEQ ID NO: 363031 - DNA, 15 bp, Homo sapiens
aacgcagtgccagat

SEQ ID NO: 363032 - DNA, 15 bp, Homo sapiens
aaacgcagtgccaga

SEQ ID NO: 363033 - DNA, 15 bp, Homo sapiens
gaaacgcagtgccag

SEQ ID NO: 363034 - DNA, 15 bp, Homo sapiens
agaaacgcagtgcca

SEQ ID NO: 363035 - DNA, 15 bp, Homo sapiens
gagaaacgcagtgcc

SEQ ID NO: 363036 - DNA, 15 bp, Homo sapiens
agagaaacgcagtgc

SEQ ID NO: 363037 - DNA, 15 bp, Homo sapiens
gagagaaacgcagtg

SEQ ID NO: 363038 - DNA, 15 bp, Homo sapiens
agagagaaacgcagt

SEQ ID NO: 363039 - DNA, 15 bp, Homo sapiens
aagagagaaacgcag

SEQ ID NO: 363040 - DNA, 15 bp, Homo sapiens
taagagagaaacgca

SEQ ID NO: 363041 - DNA, 15 bp, Homo sapiens
ttaagagagaaacgc

SEQ ID NO: 363042 - DNA, 15 bp, Homo sapiens
gttaagagagaaacg

SEQ ID NO: 363043 - DNA, 15 bp, Homo sapiens
ggttaagagagaaac

SEQ ID NO: 363044 - DNA, 15 bp, Homo sapiens
cggttaagagagaaa

SEQ ID NO: 363045 - DNA, 15 bp, Homo sapiens
tcggttaagagagaa

SEQ ID NO: 363046 - DNA, 15 bp, Homo sapiens
ctcggttaagagaga

SEQ ID NO: 363047 - DNA, 15 bp, Homo sapiens
cctcggttaagagag

SEQ ID NO: 363048 - DNA, 15 bp, Homo sapiens
acctcggttaagaga

SEQ ID NO: 363049 - DNA, 15 bp, Homo sapiens
gacctcggttaagag

SEQ ID NO: 363050 - DNA, 15 bp, Homo sapiens
ggacctcggttaaga

SEQ ID NO: 363051 - DNA, 15 bp, Homo sapiens
gggacctcggttaag

SEQ ID NO: 363052 - DNA, 15 bp, Homo sapiens
agggacctcggttaa

SEQ ID NO: 363053 - DNA, 15 bp, Homo sapiens
gagggacctcggtta

SEQ ID NO: 363054 - DNA, 15 bp, Homo sapiens
agagggacctcggtt

SEQ ID NO: 363055 - DNA, 15 bp, Homo sapiens
aagagggacctcggt

SEQ ID NO: 363056 - DNA, 15 bp, Homo sapiens
taagagggacctcgg

SEQ ID NO: 363057 - DNA, 15 bp, Homo sapiens
ttaagagggacctcg

SEQ ID NO: 363058 - DNA, 15 bp, Homo sapiens
gttaagagggacctc

SEQ ID NO: 363059 - DNA, 15 bp, Homo sapiens
agttaagagggacct

SEQ ID NO: 363060 - DNA, 15 bp, Homo sapiens
aagttaagagggacc

SEQ ID NO: 363061 - DNA, 15 bp, Homo sapiens
aaagttaagagggac

SEQ ID NO: 363062 - DNA, 15 bp, Homo sapiens
aaaagttaagaggga

SEQ ID NO: 363063 - DNA, 15 bp, Homo sapiens
gaaaagttaagaggg

SEQ ID NO: 363064 - DNA, 15 bp, Homo sapiens
agaaaagttaagagg

SEQ ID NO: 363065 - DNA, 15 bp, Homo sapiens
tagaaaagttaagag

SEQ ID NO: 363066 - DNA, 15 bp, Homo sapiens
ctagaaaagttaaga

SEQ ID NO: 363067 - DNA, 15 bp, Homo sapiens
cctagaaaagttaag

SEQ ID NO: 363068 - DNA, 15 bp, Homo sapiens
gcctagaaaagttaa

SEQ ID NO: 363069 - DNA, 15 bp, Homo sapiens
ggcctagaaaagtta

SEQ ID NO: 363070 - DNA, 15 bp, Homo sapiens
aggcctagaaaagtt

SEQ ID NO: 363071 - DNA, 15 bp, Homo sapiens
gaggcctagaaaagt

SEQ ID NO: 363072 - DNA, 15 bp, Homo sapiens
agaggcctagaaaag

SEQ ID NO: 363073 - DNA, 15 bp, Homo sapiens
aagaggcctagaaaa

SEQ ID NO: 363074 - DNA, 15 bp, Homo sapiens
aaagaggcctagaaa

SEQ ID NO: 363075 - DNA, 15 bp, Homo sapiens
aaaagaggcctagaa

SEQ ID NO: 363076 - DNA, 15 bp, Homo sapiens
taaaagaggcctaga

SEQ ID NO: 363077 - DNA, 15 bp, Homo sapiens
ttaaaagaggcctag

SEQ ID NO: 363078 - DNA, 15 bp, Homo sapiens
tttaaaagaggccta

SEQ ID NO: 363079 - DNA, 15 bp, Homo sapiens
ttttaaaagaggcct

SEQ ID NO: 363080 - DNA, 15 bp, Homo sapiens
attttaaaagaggcc

SEQ ID NO: 363081 - DNA, 15 bp, Homo sapiens
gattttaaaagaggc

SEQ ID NO: 363082 - DNA, 15 bp, Homo sapiens
tgattttaaaagagg

SEQ ID NO: 363083 - DNA, 15 bp, Homo sapiens
ctgattttaaaagag

SEQ ID NO: 363084 - DNA, 15 bp, Homo sapiens
gctgattttaaaaga

SEQ ID NO: 363085 - DNA, 15 bp, Homo sapiens
tgctgattttaaaag

SEQ ID NO: 363086 - DNA, 15 bp, Homo sapiens
atgctgattttaaaa

SEQ ID NO: 363087 - DNA, 15 bp, Homo sapiens
catgctgattttaaa

SEQ ID NO: 363088 - DNA, 15 bp, Homo sapiens
tcatgctgattttaa

SEQ ID NO: 363089 - DNA, 15 bp, Homo sapiens
atcatgctgatttta

SEQ ID NO: 363090 - DNA, 15 bp, Homo sapiens
catcatgctgatttt

SEQ ID NO: 363091 - DNA, 15 bp, Homo sapiens
tcatcatgctgattt

SEQ ID NO: 363092 - DNA, 15 bp, Homo sapiens
ttcatcatgctgatt

SEQ ID NO: 363093 - DNA, 15 bp, Homo sapiens
tttcatcatgctgat

SEQ ID NO: 363094 - DNA, 15 bp, Homo sapiens
ctttcatcatgctga

SEQ ID NO: 363095 - DNA, 15 bp, Homo sapiens
tctttcatcatgctg

SEQ ID NO: 363096 - DNA, 15 bp, Homo sapiens
ctctttcatcatgct

SEQ ID NO: 363097 - DNA, 15 bp, Homo sapiens
tctctttcatcatgc

SEQ ID NO: 363098 - DNA, 15 bp, Homo sapiens
atctctttcatcatg

SEQ ID NO: 363099 - DNA, 15 bp, Homo sapiens
aatctctttcatcat

SEQ ID NO: 363100 - DNA, 15 bp, Homo sapiens
taatctctttcatca

SEQ ID NO: 363101 - DNA, 15 bp, Homo sapiens
ctaatctctttcatc

SEQ ID NO: 363102 - DNA, 15 bp, Homo sapiens
cctaatctctttcat

SEQ ID NO: 363103 - DNA, 15 bp, Homo sapiens
acctaatctctttca

SEQ ID NO: 363104 - DNA, 15 bp, Homo sapiens
gacctaatctctttc

SEQ ID NO: 363105 - DNA, 15 bp, Homo sapiens
tgacctaatctcttt

SEQ ID NO: 363106 - DNA, 15 bp, Homo sapiens
atgacctaatctctt

SEQ ID NO: 363107 - DNA, 15 bp, Homo sapiens
aatgacctaatctct

SEQ ID NO: 363108 - DNA, 15 bp, Homo sapiens
gaatgacctaatctc

SEQ ID NO: 363109 - DNA, 15 bp, Homo sapiens
tgaatgacctaatct

SEQ ID NO: 363110 - DNA, 15 bp, Homo sapiens
atgaatgacctaatc

SEQ ID NO: 363111 - DNA, 15 bp, Homo sapiens
aatgaatgacctaat

SEQ ID NO: 363112 - DNA, 15 bp, Homo sapiens
gaatgaatgacctaa

SEQ ID NO: 363113 - DNA, 15 bp, Homo sapiens
tgaatgaatgaccta

SEQ ID NO: 363114 - DNA, 15 bp, Homo sapiens
atgaatgaatgacct

SEQ ID NO: 363115 - DNA, 15 bp, Homo sapiens
aatgaatgaatgacc

SEQ ID NO: 363116 - DNA, 15 bp, Homo sapiens
aaatgaatgaatgac

SEQ ID NO: 363117 - DNA, 15 bp, Homo sapiens
taaatgaatgaatga

SEQ ID NO: 363118 - DNA, 15 bp, Homo sapiens
ataaatgaatgaatg

SEQ ID NO: 363119 - DNA, 15 bp, Homo sapiens
aataaatgaatgaat

SEQ ID NO: 363120 - DNA, 15 bp, Homo sapiens
gaataaatgaatgaa

SEQ ID NO: 363121 - DNA, 15 bp, Homo sapiens
tgaataaatgaatga

SEQ ID NO: 363122 - DNA, 15 bp, Homo sapiens
atgaataaatgaatg

SEQ ID NO: 363123 - DNA, 15 bp, Homo sapiens
aatgaataaatgaat

SEQ ID NO: 363124 - DNA, 15 bp, Homo sapiens
gaatgaataaatgaa

SEQ ID NO: 363125 - DNA, 15 bp, Homo sapiens
tgaatgaataaatga

SEQ ID NO: 363126 - DNA, 15 bp, Homo sapiens
atgaatgaataaatg

SEQ ID NO: 363127 - DNA, 15 bp, Homo sapiens
aatgaatgaataaat

SEQ ID NO: 363128 - DNA, 15 bp, Homo sapiens
caatgaatgaataaa

SEQ ID NO: 363129 - DNA, 15 bp, Homo sapiens
ccaatgaatgaataa

SEQ ID NO: 363130 - DNA, 15 bp, Homo sapiens
accaatgaatgaata

SEQ ID NO: 363131 - DNA, 15 bp, Homo sapiens
aaccaatgaatgaat

SEQ ID NO: 363132 - DNA, 15 bp, Homo sapiens
gaaccaatgaatgaa

SEQ ID NO: 363133 - DNA, 15 bp, Homo sapiens
tgaaccaatgaatga

SEQ ID NO: 363134 - DNA, 15 bp, Homo sapiens
ctgaaccaatgaatg

SEQ ID NO: 363135 - DNA, 15 bp, Homo sapiens
actgaaccaatgaat

SEQ ID NO: 363136 - DNA, 15 bp, Homo sapiens
gactgaaccaatgaa

SEQ ID NO: 363137 - DNA, 15 bp, Homo sapiens
tgactgaaccaatga

SEQ ID NO: 363138 - DNA, 15 bp, Homo sapiens
atgactgaaccaatg

SEQ ID NO: 363139 - DNA, 15 bp, Homo sapiens
aatgactgaaccaat

SEQ ID NO: 363140 - DNA, 15 bp, Homo sapiens
gaatgactgaaccaa

SEQ ID NO: 363141 - DNA, 15 bp, Homo sapiens
tgaatgactgaacca

SEQ ID NO: 363142 - DNA, 15 bp, Homo sapiens
atgaatgactgaacc

SEQ ID NO: 363143 - DNA, 15 bp, Homo sapiens
aatgaatgactgaac

SEQ ID NO: 363144 - DNA, 15 bp, Homo sapiens
aaatgaatgactgaa

SEQ ID NO: 363145 - DNA, 15 bp, Homo sapiens
aaaatgaatgactga

SEQ ID NO: 363146 - DNA, 15 bp, Homo sapiens
taaaatgaatgactg

SEQ ID NO: 363147 - DNA, 15 bp, Homo sapiens
gtaaaatgaatgact

SEQ ID NO: 363148 - DNA, 15 bp, Homo sapiens
tgtaaaatgaatgac

SEQ ID NO: 363149 - DNA, 15 bp, Homo sapiens
ctgtaaaatgaatga

SEQ ID NO: 363150 - DNA, 15 bp, Homo sapiens
cctgtaaaatgaatg

SEQ ID NO: 363151 - DNA, 15 bp, Homo sapiens
gcctgtaaaatgaat

SEQ ID NO: 363152 - DNA, 15 bp, Homo sapiens
tgcctgtaaaatgaa

SEQ ID NO: 363153 - DNA, 15 bp, Homo sapiens
atgcctgtaaaatga

SEQ ID NO: 363154 - DNA, 15 bp, Homo sapiens
catgcctgtaaaatg

SEQ ID NO: 363155 - DNA, 15 bp, Homo sapiens
tcatgcctgtaaaat

SEQ ID NO: 363156 - DNA, 15 bp, Homo sapiens
atcatgcctgtaaaa

SEQ ID NO: 363157 - DNA, 15 bp, Homo sapiens
catcatgcctgtaaa

SEQ ID NO: 363158 - DNA, 15 bp, Homo sapiens
tcatcatgcctgtaa

SEQ ID NO: 363159 - DNA, 15 bp, Homo sapiens
atcatcatgcctgta

SEQ ID NO: 363160 - DNA, 15 bp, Homo sapiens
catcatcatgcctgt

SEQ ID NO: 363161 - DNA, 15 bp, Homo sapiens
acatcatcatgcctg

SEQ ID NO: 363162 - DNA, 15 bp, Homo sapiens
cacatcatcatgcct

SEQ ID NO: 363163 - DNA, 15 bp, Homo sapiens
gcacatcatcatgcc

SEQ ID NO: 363164 - DNA, 15 bp, Homo sapiens
ggcacatcatcatgc

SEQ ID NO: 363165 - DNA, 15 bp, Homo sapiens
aggcacatcatcatg

SEQ ID NO: 363166 - DNA, 15 bp, Homo sapiens
taggcacatcatcat

SEQ ID NO: 363167 - DNA, 15 bp, Homo sapiens
gtaggcacatcatca

SEQ ID NO: 363168 - DNA, 15 bp, Homo sapiens
ggtaggcacatcatc

SEQ ID NO: 363169 - DNA, 15 bp, Homo sapiens
aggtaggcacatcat

SEQ ID NO: 363170 - DNA, 15 bp, Homo sapiens
taggtaggcacatca

SEQ ID NO: 363171 - DNA, 15 bp, Homo sapiens
ctaggtaggcacatc

SEQ ID NO: 363172 - DNA, 15 bp, Homo sapiens
tctaggtaggcacat

SEQ ID NO: 363173 - DNA, 15 bp, Homo sapiens
ttctaggtaggcaca

SEQ ID NO: 363174 - DNA, 15 bp, Homo sapiens
tttctaggtaggcac

SEQ ID NO: 363175 - DNA, 15 bp, Homo sapiens
atttctaggtaggca

SEQ ID NO: 363176 - DNA, 15 bp, Homo sapiens
aatttctaggtaggc

SEQ ID NO: 363177 - DNA, 15 bp, Homo sapiens
aaatttctaggtagg

SEQ ID NO: 363178 - DNA, 15 bp, Homo sapiens
caaatttctaggtag

SEQ ID NO: 363179 - DNA, 15 bp, Homo sapiens
tcaaatttctaggta

SEQ ID NO: 363180 - DNA, 15 bp, Homo sapiens
ctcaaatttctaggt

SEQ ID NO: 363181 - DNA, 15 bp, Homo sapiens
cctcaaatttctagg

SEQ ID NO: 363182 - DNA, 15 bp, Homo sapiens
tcctcaaatttctag

SEQ ID NO: 363183 - DNA, 15 bp, Homo sapiens
atcctcaaatttcta

SEQ ID NO: 363184 - DNA, 15 bp, Homo sapiens
aatcctcaaatttct

SEQ ID NO: 363185 - DNA, 15 bp, Homo sapiens
gaatcctcaaatttc

SEQ ID NO: 363186 - DNA, 15 bp, Homo sapiens
ggaatcctcaaattt

SEQ ID NO: 363187 - DNA, 15 bp, Homo sapiens
cggaatcctcaaatt

SEQ ID NO: 363188 - DNA, 15 bp, Homo sapiens
tcggaatcctcaaat

SEQ ID NO: 363189 - DNA, 15 bp, Homo sapiens
atcggaatcctcaaa

SEQ ID NO: 363190 - DNA, 15 bp, Homo sapiens
catcggaatcctcaa

SEQ ID NO: 363191 - DNA, 15 bp, Homo sapiens
gcatcggaatcctca

SEQ ID NO: 363192 - DNA, 15 bp, Homo sapiens
tgcatcggaatcctc

SEQ ID NO: 363193 - DNA, 15 bp, Homo sapiens
ctgcatcggaatcct

SEQ ID NO: 363194 - DNA, 15 bp, Homo sapiens
actgcatcggaatcc

SEQ ID NO: 363195 - DNA, 15 bp, Homo sapiens
cactgcatcggaatc

SEQ ID NO: 363196 - DNA, 15 bp, Homo sapiens
gcactgcatcggaat

SEQ ID NO: 363197 - DNA, 15 bp, Homo sapiens
agcactgcatcggaa

SEQ ID NO: 363198 - DNA, 15 bp, Homo sapiens
cagcactgcatcgga

SEQ ID NO: 363199 - DNA, 15 bp, Homo sapiens
acagcactgcatcgg

SEQ ID NO: 363200 - DNA, 15 bp, Homo sapiens
cacagcactgcatcg

SEQ ID NO: 363201 - DNA, 15 bp, Homo sapiens
acacagcactgcatc

SEQ ID NO: 363202 - DNA, 15 bp, Homo sapiens
aacacagcactgcat

SEQ ID NO: 363203 - DNA, 15 bp, Homo sapiens
gaacacagcactgca

SEQ ID NO: 363204 - DNA, 15 bp, Homo sapiens
agaacacagcactgc

SEQ ID NO: 363205 - DNA, 15 bp, Homo sapiens
aagaacacagcactg

SEQ ID NO: 363206 - DNA, 15 bp, Homo sapiens
aaagaacacagcact

SEQ ID NO: 363207 - DNA, 15 bp, Homo sapiens
aaaagaacacagcac

SEQ ID NO: 363208 - DNA, 15 bp, Homo sapiens
aaaaagaacacagca

SEQ ID NO: 363209 - DNA, 15 bp, Homo sapiens
aaaaaagaacacagc

SEQ ID NO: 363210 - DNA, 15 bp, Homo sapiens
aaaaaaagaacacag

SEQ ID NO: 363211 - DNA, 15 bp, Homo sapiens
aaaaaaaagaacaca

SEQ ID NO: 363212 - DNA, 15 bp, Homo sapiens
aaaaaaaaagaacac

SEQ ID NO: 363213 - DNA, 15 bp, Homo sapiens
gaaaaaaaaagaaca

SEQ ID NO: 363214 - DNA, 15 bp, Homo sapiens
ggaaaaaaaaagaac

SEQ ID NO: 363215 - DNA, 15 bp, Homo sapiens
cggaaaaaaaaagaa

SEQ ID NO: 363216 - DNA, 15 bp, Homo sapiens
tcggaaaaaaaaaga

SEQ ID NO: 363217 - DNA, 15 bp, Homo sapiens
ctcggaaaaaaaaag

SEQ ID NO: 363218 - DNA, 15 bp, Homo sapiens
tctcggaaaaaaaaa

SEQ ID NO: 363219 - DNA, 15 bp, Homo sapiens
gtctcggaaaaaaaa

SEQ ID NO: 363220 - DNA, 15 bp, Homo sapiens
tgtctcggaaaaaaa

SEQ ID NO: 363221 - DNA, 15 bp, Homo sapiens
ctgtctcggaaaaaa

SEQ ID NO: 363222 - DNA, 15 bp, Homo sapiens
actgtctcggaaaaa

SEQ ID NO: 363223 - DNA, 15 bp, Homo sapiens
gactgtctcggaaaa

SEQ ID NO: 363224 - DNA, 15 bp, Homo sapiens
agactgtctcggaaa

SEQ ID NO: 363225 - DNA, 15 bp, Homo sapiens
gagactgtctcggaa

SEQ ID NO: 363226 - DNA, 15 bp, Homo sapiens
tgagactgtctcgga

SEQ ID NO: 363227 - DNA, 15 bp, Homo sapiens
atgagactgtctcgg

SEQ ID NO: 363228 - DNA, 15 bp, Homo sapiens
aatgagactgtctcg

SEQ ID NO: 363229 - DNA, 15 bp, Homo sapiens
gaatgagactgtctc

SEQ ID NO: 363230 - DNA, 15 bp, Homo sapiens
agaatgagactgtct

SEQ ID NO: 363231 - DNA, 15 bp, Homo sapiens
cagaatgagactgtc

SEQ ID NO: 363232 - DNA, 15 bp, Homo sapiens
acagaatgagactgt

SEQ ID NO: 363233 - DNA, 15 bp, Homo sapiens
cacagaatgagactg

SEQ ID NO: 363234 - DNA, 15 bp, Homo sapiens
gcacagaatgagact

SEQ ID NO: 363235 - DNA, 15 bp, Homo sapiens
ggcacagaatgagac

SEQ ID NO: 363236 - DNA, 15 bp, Homo sapiens
gggcacagaatgaga

SEQ ID NO: 363237 - DNA, 15 bp, Homo sapiens
tgggcacagaatgag

SEQ ID NO: 363238 - DNA, 15 bp, Homo sapiens
ctgggcacagaatga

SEQ ID NO: 363239 - DNA, 15 bp, Homo sapiens
cctgggcacagaatg

SEQ ID NO: 363240 - DNA, 15 bp, Homo sapiens
gcctgggcacagaat

SEQ ID NO: 363241 - DNA, 15 bp, Homo sapiens
agcctgggcacagaa

SEQ ID NO: 363242 - DNA, 15 bp, Homo sapiens
cagcctgggcacaga

SEQ ID NO: 363243 - DNA, 15 bp, Homo sapiens
ccagcctgggcacag

SEQ ID NO: 363244 - DNA, 15 bp, Homo sapiens
tccagcctgggcaca

SEQ ID NO: 363245 - DNA, 15 bp, Homo sapiens
ctccagcctgggcac

SEQ ID NO: 363246 - DNA, 15 bp, Homo sapiens
actccagcctgggca

SEQ ID NO: 363247 - DNA, 15 bp, Homo sapiens
cactccagcctgggc

SEQ ID NO: 363248 - DNA, 15 bp, Homo sapiens
ggccactgcactcca

SEQ ID NO: 363249 - DNA, 15 bp, Homo sapiens
gggccactgcactcc

SEQ ID NO: 363250 - DNA, 15 bp, Homo sapiens
cgggccactgcactc

SEQ ID NO: 363251 - DNA, 15 bp, Homo sapiens
tcgggccactgcact

SEQ ID NO: 363252 - DNA, 15 bp, Homo sapiens
atcgggccactgcac

SEQ ID NO: 363253 - DNA, 15 bp, Homo sapiens
gatcgggccactgca

SEQ ID NO: 363254 - DNA, 15 bp, Homo sapiens
agatcgggccactgc

SEQ ID NO: 363255 - DNA, 15 bp, Homo sapiens
gagatcgggccactg

SEQ ID NO: 363256 - DNA, 15 bp, Homo sapiens
cgagatcgggccact

SEQ ID NO: 363257 - DNA, 15 bp, Homo sapiens
ccgagatcgggccac

SEQ ID NO: 363258 - DNA, 15 bp, Homo sapiens
gccgagatcgggcca

SEQ ID NO: 363259 - DNA, 15 bp, Homo sapiens
agccgagatcgggcc

SEQ ID NO: 363260 - DNA, 15 bp, Homo sapiens
gagccgagatcgggc

SEQ ID NO: 363261 - DNA, 15 bp, Homo sapiens
tgagccgagatcggg

SEQ ID NO: 363262 - DNA, 15 bp, Homo sapiens
gtgagccgagatcgg

SEQ ID NO: 363263 - DNA, 15 bp, Homo sapiens
cttgcagtgagccga

SEQ ID NO: 363264 - DNA, 15 bp, Homo sapiens
gcttgcagtgagccg

SEQ ID NO: 363265 - DNA, 15 bp, Homo sapiens
agcttgcagtgagcc

SEQ ID NO: 363266 - DNA, 15 bp, Homo sapiens
gagcttgcagtgagc

SEQ ID NO: 363267 - DNA, 15 bp, Homo sapiens
ggagcttgcagtgag

SEQ ID NO: 363268 - DNA, 15 bp, Homo sapiens
tggagcttgcagtga

SEQ ID NO: 363269 - DNA, 15 bp, Homo sapiens
gtggagcttgcagtg

SEQ ID NO: 363270 - DNA, 15 bp, Homo sapiens
ggtggagcttgcagt

SEQ ID NO: 363271 - DNA, 15 bp, Homo sapiens
aggtggagcttgcag

SEQ ID NO: 363272 - DNA, 15 bp, Homo sapiens
gaggtggagcttgca

SEQ ID NO: 363273 - DNA, 15 bp, Homo sapiens
ggaggtggagcttgc

SEQ ID NO: 363274 - DNA, 15 bp, Homo sapiens
aggaggtggagcttg

SEQ ID NO: 363275 - DNA, 15 bp, Homo sapiens
caggaggtggagctt

SEQ ID NO: 363276 - DNA, 15 bp, Homo sapiens
ccaggaggtggagct

SEQ ID NO: 363277 - DNA, 15 bp, Homo sapiens
cccaggaggtggagc

SEQ ID NO: 363278 - DNA, 15 bp, Homo sapiens
acccaggaggtggag

SEQ ID NO: 363279 - DNA, 15 bp, Homo sapiens
aacccaggaggtgga

SEQ ID NO: 363280 - DNA, 15 bp, Homo sapiens
gaacccaggaggtgg

SEQ ID NO: 363281 - DNA, 15 bp, Homo sapiens
tgaacccaggaggtg

SEQ ID NO: 363282 - DNA, 15 bp, Homo sapiens
gtgaacccaggaggt

SEQ ID NO: 363283 - DNA, 15 bp, Homo sapiens
tgtgaacccaggagg

SEQ ID NO: 363284 - DNA, 15 bp, Homo sapiens
gtgtgaacccaggag

SEQ ID NO: 363285 - DNA, 15 bp, Homo sapiens
ggtgtgaacccagga

SEQ ID NO: 363286 - DNA, 15 bp, Homo sapiens
tggtgtgaacccagg

SEQ ID NO: 363287 - DNA, 15 bp, Homo sapiens
atggtgtgaacccag

SEQ ID NO: 363288 - DNA, 15 bp, Homo sapiens
aatggtgtgaaccca

SEQ ID NO: 363289 - DNA, 15 bp, Homo sapiens
caatggtgtgaaccc

SEQ ID NO: 363290 - DNA, 15 bp, Homo sapiens
acaatggtgtgaacc

SEQ ID NO: 363291 - DNA, 15 bp, Homo sapiens
gacaatggtgtgaac

SEQ ID NO: 363292 - DNA, 15 bp, Homo sapiens
ggacaatggtgtgaa

SEQ ID NO: 363293 - DNA, 15 bp, Homo sapiens
aggacaatggtgtga

SEQ ID NO: 363294 - DNA, 15 bp, Homo sapiens
caggacaatggtgtg

SEQ ID NO: 363295 - DNA, 15 bp, Homo sapiens
gcaggacaatggtgt

SEQ ID NO: 363296 - DNA, 15 bp, Homo sapiens
ggcaggacaatggtg

SEQ ID NO: 363297 - DNA, 15 bp, Homo sapiens
aggcaggacaatggt

SEQ ID NO: 363298 - DNA, 15 bp, Homo sapiens
gaggcaggacaatgg

SEQ ID NO: 363299 - DNA, 15 bp, Homo sapiens
tgaggcaggacaatg

SEQ ID NO: 363300 - DNA, 15 bp, Homo sapiens
ctgaggcaggacaat

SEQ ID NO: 363301 - DNA, 15 bp, Homo sapiens
gctgaggcaggacaa

SEQ ID NO: 363302 - DNA, 15 bp, Homo sapiens
ggctgaggcaggaca

SEQ ID NO: 363303 - DNA, 15 bp, Homo sapiens
aggctgaggcaggac

SEQ ID NO: 363304 - DNA, 15 bp, Homo sapiens
gctcgggaggctgag

SEQ ID NO: 363305 - DNA, 15 bp, Homo sapiens
tgctcgggaggctga

SEQ ID NO: 363306 - DNA, 15 bp, Homo sapiens
ctgctcgggaggctg

SEQ ID NO: 363307 - DNA, 15 bp, Homo sapiens
gctgctcgggaggct

SEQ ID NO: 363308 - DNA, 15 bp, Homo sapiens
agctgctcgggaggc

SEQ ID NO: 363309 - DNA, 15 bp, Homo sapiens
cagctgctcgggagg

SEQ ID NO: 363310 - DNA, 15 bp, Homo sapiens
ccagctgctcgggag

SEQ ID NO: 363311 - DNA, 15 bp, Homo sapiens
cccagctgctcggga

SEQ ID NO: 363312 - DNA, 15 bp, Homo sapiens
tcccagctgctcggg

SEQ ID NO: 363313 - DNA, 15 bp, Homo sapiens
gtcccagctgctcgg

SEQ ID NO: 363314 - DNA, 15 bp, Homo sapiens
agtcccagctgctcg

SEQ ID NO: 363315 - DNA, 15 bp, Homo sapiens
tagtcccagctgctc

SEQ ID NO: 363316 - DNA, 15 bp, Homo sapiens
gtagtcccagctgct

SEQ ID NO: 363317 - DNA, 15 bp, Homo sapiens
tgtagtcccagctgc

SEQ ID NO: 363318 - DNA, 15 bp, Homo sapiens
ctgtagtcccagctg

SEQ ID NO: 363319 - DNA, 15 bp, Homo sapiens
acctgtagtcccagc

SEQ ID NO: 363320 - DNA, 15 bp, Homo sapiens
cacctgtagtcccag

SEQ ID NO: 363321 - DNA, 15 bp, Homo sapiens
gcacctgtagtccca

SEQ ID NO: 363322 - DNA, 15 bp, Homo sapiens
ggcacctgtagtccc

SEQ ID NO: 363323 - DNA, 15 bp, Homo sapiens
gggcacctgtagtcc

SEQ ID NO: 363324 - DNA, 15 bp, Homo sapiens
cgggcacctgtagtc

SEQ ID NO: 363325 - DNA, 15 bp, Homo sapiens
acgggcacctgtagt

SEQ ID NO: 363326 - DNA, 15 bp, Homo sapiens
gacgggcacctgtag

SEQ ID NO: 363327 - DNA, 15 bp, Homo sapiens
tgacgggcacctgta

SEQ ID NO: 363328 - DNA, 15 bp, Homo sapiens
gtgacgggcacctgt

SEQ ID NO: 363329 - DNA, 15 bp, Homo sapiens
ggtgacgggcacctg

SEQ ID NO: 363330 - DNA, 15 bp, Homo sapiens
tggtgacgggcacct

SEQ ID NO: 363331 - DNA, 15 bp, Homo sapiens
atggtgacgggcacc

SEQ ID NO: 363332 - DNA, 15 bp, Homo sapiens
catggtgacgggcac

SEQ ID NO: 363333 - DNA, 15 bp, Homo sapiens
gcatggtgacgggca

SEQ ID NO: 363334 - DNA, 15 bp, Homo sapiens
ggcatggtgacgggc

SEQ ID NO: 363335 - DNA, 15 bp, Homo sapiens
gggcatggtgacggg

SEQ ID NO: 363336 - DNA, 15 bp, Homo sapiens
tgggcatggtgacgg

SEQ ID NO: 363337 - DNA, 15 bp, Homo sapiens
ctgggcatggtgacg

SEQ ID NO: 363338 - DNA, 15 bp, Homo sapiens
gctgggcatggtgac

SEQ ID NO: 363339 - DNA, 15 bp, Homo sapiens
agctgggcatggtga

SEQ ID NO: 363340 - DNA, 15 bp, Homo sapiens
tagctgggcatggtg

SEQ ID NO: 363341 - DNA, 15 bp, Homo sapiens
ttagctgggcatggt

SEQ ID NO: 363342 - DNA, 15 bp, Homo sapiens
attagctgggcatgg

SEQ ID NO: 363343 - DNA, 15 bp, Homo sapiens
aattagctgggcatg

SEQ ID NO: 363344 - DNA, 15 bp, Homo sapiens
aaattagctgggcat

SEQ ID NO: 363345 - DNA, 15 bp, Homo sapiens
aaaattagctgggca

SEQ ID NO: 363346 - DNA, 15 bp, Homo sapiens
aaaaaattagctggg

SEQ ID NO: 363347 - DNA, 15 bp, Homo sapiens
caaaaaattagctgg

SEQ ID NO: 363348 - DNA, 15 bp, Homo sapiens
acaaaaaattagctg

SEQ ID NO: 363349 - DNA, 15 bp, Homo sapiens
tacaaaaaattagct

SEQ ID NO: 363350 - DNA, 15 bp, Homo sapiens
atacaaaaaattagc

SEQ ID NO: 363351 - DNA, 15 bp, Homo sapiens
aatacaaaaaattag

SEQ ID NO: 363352 - DNA, 15 bp, Homo sapiens
aaatacaaaaaatta

SEQ ID NO: 363353 - DNA, 15 bp, Homo sapiens
aaaatacaaaaaatt

SEQ ID NO: 363354 - DNA, 15 bp, Homo sapiens
aaaaatacaaaaaat

SEQ ID NO: 363355 - DNA, 15 bp, Homo sapiens
ccccgtctctactaa

SEQ ID NO: 363356 - DNA, 15 bp, Homo sapiens
accccgtctctacta

SEQ ID NO: 363357 - DNA, 15 bp, Homo sapiens
aaccccgtctctact

SEQ ID NO: 363358 - DNA, 15 bp, Homo sapiens
aaaccccgtctctac

SEQ ID NO: 363359 - DNA, 15 bp, Homo sapiens
gaaaccccgtctcta

SEQ ID NO: 363360 - DNA, 15 bp, Homo sapiens
tgaaaccccgtctct

SEQ ID NO: 363361 - DNA, 15 bp, Homo sapiens
gtgaaaccccgtctc

SEQ ID NO: 363362 - DNA, 15 bp, Homo sapiens
ggtgaaaccccgtct

SEQ ID NO: 363363 - DNA, 15 bp, Homo sapiens
cggtgaaaccccgtc

SEQ ID NO: 363364 - DNA, 15 bp, Homo sapiens
tcggtgaaaccccgt

SEQ ID NO: 363365 - DNA, 15 bp, Homo sapiens
ctcggtgaaaccccg

SEQ ID NO: 363366 - DNA, 15 bp, Homo sapiens
actcggtgaaacccc

SEQ ID NO: 363367 - DNA, 15 bp, Homo sapiens
aactcggtgaaaccc

SEQ ID NO: 363368 - DNA, 15 bp, Homo sapiens
taactcggtgaaacc

SEQ ID NO: 363369 - DNA, 15 bp, Homo sapiens
ctaactcggtgaaac

SEQ ID NO: 363370 - DNA, 15 bp, Homo sapiens
gctaactcggtgaaa

SEQ ID NO: 363371 - DNA, 15 bp, Homo sapiens
ggctaactcggtgaa

SEQ ID NO: 363372 - DNA, 15 bp, Homo sapiens
tggctaactcggtga

SEQ ID NO: 363373 - DNA, 15 bp, Homo sapiens
ctggctaactcggtg

SEQ ID NO: 363374 - DNA, 15 bp, Homo sapiens
cctggctaactcggt

SEQ ID NO: 363375 - DNA, 15 bp, Homo sapiens
tcctggctaactcgg

SEQ ID NO: 363376 - DNA, 15 bp, Homo sapiens
atcctggctaactcg

SEQ ID NO: 363377 - DNA, 15 bp, Homo sapiens
catcctggctaactc

SEQ ID NO: 363378 - DNA, 15 bp, Homo sapiens
ccatcctggctaact

SEQ ID NO: 363379 - DNA, 15 bp, Homo sapiens
accatcctggctaac

SEQ ID NO: 363380 - DNA, 15 bp, Homo sapiens
gaccatcctggctaa

SEQ ID NO: 363381 - DNA, 15 bp, Homo sapiens
agaccatcctggcta

SEQ ID NO: 363382 - DNA, 15 bp, Homo sapiens
gagaccatcctggct

SEQ ID NO: 363383 - DNA, 15 bp, Homo sapiens
aggtcaggagatcga

SEQ ID NO: 363384 - DNA, 15 bp, Homo sapiens
gaggtcaggagatcg

SEQ ID NO: 363385 - DNA, 15 bp, Homo sapiens
cgaggtcaggagatc

SEQ ID NO: 363386 - DNA, 15 bp, Homo sapiens
acgaggtcaggagat

SEQ ID NO: 363387 - DNA, 15 bp, Homo sapiens
cacgaggtcaggaga

SEQ ID NO: 363388 - DNA, 15 bp, Homo sapiens
acacgaggtcaggag

SEQ ID NO: 363389 - DNA, 15 bp, Homo sapiens
cacacgaggtcagga

SEQ ID NO: 363390 - DNA, 15 bp, Homo sapiens
tcacacgaggtcagg

SEQ ID NO: 363391 - DNA, 15 bp, Homo sapiens
atcacacgaggtcag

SEQ ID NO: 363392 - DNA, 15 bp, Homo sapiens
gatcacacgaggtca

SEQ ID NO: 363393 - DNA, 15 bp, Homo sapiens
agatcacacgaggtc

SEQ ID NO: 363394 - DNA, 15 bp, Homo sapiens
cagatcacacgaggt

SEQ ID NO: 363395 - DNA, 15 bp, Homo sapiens
gcagatcacacgagg

SEQ ID NO: 363396 - DNA, 15 bp, Homo sapiens
ggcagatcacacgag

SEQ ID NO: 363397 - DNA, 15 bp, Homo sapiens
gggcagatcacacga

SEQ ID NO: 363398 - DNA, 15 bp, Homo sapiens
tgggcagatcacacg

SEQ ID NO: 363399 - DNA, 15 bp, Homo sapiens
gtgggcagatcacac

SEQ ID NO: 363400 - DNA, 15 bp, Homo sapiens
ggtgggcagatcaca

SEQ ID NO: 363401 - DNA, 15 bp, Homo sapiens
aggtgggcagatcac

SEQ ID NO: 363402 - DNA, 15 bp, Homo sapiens
gaggtgggcagatca

SEQ ID NO: 363403 - DNA, 15 bp, Homo sapiens
agaggtgggcagatc

SEQ ID NO: 363404 - DNA, 15 bp, Homo sapiens
cagaggtgggcagat

SEQ ID NO: 363405 - DNA, 15 bp, Homo sapiens
gcagaggtgggcaga

SEQ ID NO: 363406 - DNA, 15 bp, Homo sapiens
agcagaggtgggcag

SEQ ID NO: 363407 - DNA, 15 bp, Homo sapiens
aagcagaggtgggca

SEQ ID NO: 363408 - DNA, 15 bp, Homo sapiens
gaagcagaggtgggc

SEQ ID NO: 363409 - DNA, 15 bp, Homo sapiens
ggaagcagaggtggg

SEQ ID NO: 363410 - DNA, 15 bp, Homo sapiens
gggaagcagaggtgg

SEQ ID NO: 363411 - DNA, 15 bp, Homo sapiens
tgggaagcagaggtg

SEQ ID NO: 363412 - DNA, 15 bp, Homo sapiens
ttgggaagcagaggt

SEQ ID NO: 363413 - DNA, 15 bp, Homo sapiens
tttgggaagcagagg

SEQ ID NO: 363414 - DNA, 15 bp, Homo sapiens
ctttgggaagcagag

SEQ ID NO: 363415 - DNA, 15 bp, Homo sapiens
actttgggaagcaga

SEQ ID NO: 363416 - DNA, 15 bp, Homo sapiens
cactttgggaagcag

SEQ ID NO: 363417 - DNA, 15 bp, Homo sapiens
gcactttgggaagca

SEQ ID NO: 363418 - DNA, 15 bp, Homo sapiens
agcactttgggaagc

SEQ ID NO: 363419 - DNA, 15 bp, Homo sapiens
cagcactttgggaag

SEQ ID NO: 363420 - DNA, 15 bp, Homo sapiens
ccagcactttgggaa

SEQ ID NO: 363421 - DNA, 15 bp, Homo sapiens
tgcagtggctcacgc

SEQ ID NO: 363422 - DNA, 15 bp, Homo sapiens
gtgcagtggctcacg

SEQ ID NO: 363423 - DNA, 15 bp, Homo sapiens
ggtgcagtggctcac

SEQ ID NO: 363424 - DNA, 15 bp, Homo sapiens
aggtgcagtggctca

SEQ ID NO: 363425 - DNA, 15 bp, Homo sapiens
caggtgcagtggctc

SEQ ID NO: 363426 - DNA, 15 bp, Homo sapiens
ccaggtgcagtggct

SEQ ID NO: 363427 - DNA, 15 bp, Homo sapiens
gccaggtgcagtggc

SEQ ID NO: 363428 - DNA, 15 bp, Homo sapiens
tgccaggtgcagtgg

SEQ ID NO: 363429 - DNA, 15 bp, Homo sapiens
ctgccaggtgcagtg

SEQ ID NO: 363430 - DNA, 15 bp, Homo sapiens
actgccaggtgcagt

SEQ ID NO: 363431 - DNA, 15 bp, Homo sapiens
cactgccaggtgcag

SEQ ID NO: 363432 - DNA, 15 bp, Homo sapiens
gcactgccaggtgca

SEQ ID NO: 363433 - DNA, 15 bp, Homo sapiens
agcactgccaggtgc

SEQ ID NO: 363434 - DNA, 15 bp, Homo sapiens
cagcactgccaggtg

SEQ ID NO: 363435 - DNA, 15 bp, Homo sapiens
acagcactgccaggt

SEQ ID NO: 363436 - DNA, 15 bp, Homo sapiens
cacagcactgccagg

SEQ ID NO: 363437 - DNA, 15 bp, Homo sapiens
acacagcactgccag

SEQ ID NO: 363438 - DNA, 15 bp, Homo sapiens
aacacagcactgcca

SEQ ID NO: 363439 - DNA, 15 bp, Homo sapiens
gaacacagcactgcc

SEQ ID NO: 363440 - DNA, 15 bp, Homo sapiens
taaaagaacacagca

SEQ ID NO: 363441 - DNA, 15 bp, Homo sapiens
ataaaagaacacagc

SEQ ID NO: 363442 - DNA, 15 bp, Homo sapiens
tataaaagaacacag

SEQ ID NO: 363443 - DNA, 15 bp, Homo sapiens
ttataaaagaacaca

SEQ ID NO: 363444 - DNA, 15 bp, Homo sapiens
gttataaaagaacac

SEQ ID NO: 363445 - DNA, 15 bp, Homo sapiens
ggttataaaagaaca

SEQ ID NO: 363446 - DNA, 15 bp, Homo sapiens
tggttataaaagaac

SEQ ID NO: 363447 - DNA, 15 bp, Homo sapiens
ctggttataaaagaa

SEQ ID NO: 363448 - DNA, 15 bp, Homo sapiens
cctggttataaaaga

SEQ ID NO: 363449 - DNA, 15 bp, Homo sapiens
ccctggttataaaag

SEQ ID NO: 363450 - DNA, 15 bp, Homo sapiens
accctggttataaaa

SEQ ID NO: 363451 - DNA, 15 bp, Homo sapiens
aaccctggttataaa

SEQ ID NO: 363452 - DNA, 15 bp, Homo sapiens
gaaccctggttataa

SEQ ID NO: 363453 - DNA, 15 bp, Homo sapiens
tgaaccctggttata

SEQ ID NO: 363454 - DNA, 15 bp, Homo sapiens
atgaaccctggttat

SEQ ID NO: 363455 - DNA, 15 bp, Homo sapiens
aatgaaccctggtta

SEQ ID NO: 363456 - DNA, 15 bp, Homo sapiens
aaatgaaccctggtt

SEQ ID NO: 363457 - DNA, 15 bp, Homo sapiens
caaatgaaccctggt

SEQ ID NO: 363458 - DNA, 15 bp, Homo sapiens
tcaaatgaaccctgg

SEQ ID NO: 363459 - DNA, 15 bp, Homo sapiens
ctcaaatgaaccctg

SEQ ID NO: 363460 - DNA, 15 bp, Homo sapiens
actcaaatgaaccct

SEQ ID NO: 363461 - DNA, 15 bp, Homo sapiens
aactcaaatgaaccc

SEQ ID NO: 363462 - DNA, 15 bp, Homo sapiens
gaactcaaatgaacc

SEQ ID NO: 363463 - DNA, 15 bp, Homo sapiens
agaactcaaatgaac

SEQ ID NO: 363464 - DNA, 15 bp, Homo sapiens
cagaactcaaatgaa

SEQ ID NO: 363465 - DNA, 15 bp, Homo sapiens
ccagaactcaaatga

SEQ ID NO: 363466 - DNA, 15 bp, Homo sapiens
cccagaactcaaatg

SEQ ID NO: 363467 - DNA, 15 bp, Homo sapiens
acccagaactcaaat

SEQ ID NO: 363468 - DNA, 15 bp, Homo sapiens
aacccagaactcaaa

SEQ ID NO: 363469 - DNA, 15 bp, Homo sapiens
caacccagaactcaa

SEQ ID NO: 363470 - DNA, 15 bp, Homo sapiens
ccaacccagaactca

SEQ ID NO: 363471 - DNA, 15 bp, Homo sapiens
accaacccagaactc

SEQ ID NO: 363472 - DNA, 15 bp, Homo sapiens
aaccaacccagaact

SEQ ID NO: 363473 - DNA, 15 bp, Homo sapiens
caaccaacccagaac

SEQ ID NO: 363474 - DNA, 15 bp, Homo sapiens
tcaaccaacccagaa

SEQ ID NO: 363475 - DNA, 15 bp, Homo sapiens
ttcaaccaacccaga

SEQ ID NO: 363476 - DNA, 15 bp, Homo sapiens
gttcaaccaacccag

SEQ ID NO: 363477 - DNA, 15 bp, Homo sapiens
agttcaaccaaccca

SEQ ID NO: 363478 - DNA, 15 bp, Homo sapiens
tagttcaaccaaccc

SEQ ID NO: 363479 - DNA, 15 bp, Homo sapiens
gtagttcaaccaacc

SEQ ID NO: 363480 - DNA, 15 bp, Homo sapiens
ggtagttcaaccaac

SEQ ID NO: 363481 - DNA, 15 bp, Homo sapiens
aggtagttcaaccaa

SEQ ID NO: 363482 - DNA, 15 bp, Homo sapiens
caggtagttcaacca

SEQ ID NO: 363483 - DNA, 15 bp, Homo sapiens
ccaggtagttcaacc

SEQ ID NO: 363484 - DNA, 15 bp, Homo sapiens
cccaggtagttcaac

SEQ ID NO: 363485 - DNA, 15 bp, Homo sapiens
ccccaggtagttcaa

SEQ ID NO: 363486 - DNA, 15 bp, Homo sapiens
gccccaggtagttca

SEQ ID NO: 363487 - DNA, 15 bp, Homo sapiens
tgccccaggtagttc

SEQ ID NO: 363488 - DNA, 15 bp, Homo sapiens
ctgccccaggtagtt

SEQ ID NO: 363489 - DNA, 15 bp, Homo sapiens
tctgccccaggtagt

SEQ ID NO: 363490 - DNA, 15 bp, Homo sapiens
ctctgccccaggtag

SEQ ID NO: 363491 - DNA, 15 bp, Homo sapiens
gctctgccccaggta

SEQ ID NO: 363492 - DNA, 15 bp, Homo sapiens
agctctgccccaggt

SEQ ID NO: 363493 - DNA, 15 bp, Homo sapiens
cagctctgccccagg

SEQ ID NO: 363494 - DNA, 15 bp, Homo sapiens
ccagctctgccccag

SEQ ID NO: 363495 - DNA, 15 bp, Homo sapiens
cccagctctgcccca

SEQ ID NO: 363496 - DNA, 15 bp, Homo sapiens
tcccagctctgcccc

SEQ ID NO: 363497 - DNA, 15 bp, Homo sapiens
gtcccagctctgccc

SEQ ID NO: 363498 - DNA, 15 bp, Homo sapiens
ggtcccagctctgcc

SEQ ID NO: 363499 - DNA, 15 bp, Homo sapiens
gggtcccagctctgc

SEQ ID NO: 363500 - DNA, 15 bp, Homo sapiens
agggtcccagctctg

SEQ ID NO: 363501 - DNA, 15 bp, Homo sapiens
aagggtcccagctct

SEQ ID NO: 363502 - DNA, 15 bp, Homo sapiens
caagggtcccagctc

SEQ ID NO: 363503 - DNA, 15 bp, Homo sapiens
ccaagggtcccagct

SEQ ID NO: 363504 - DNA, 15 bp, Homo sapiens
cccaagggtcccagc

SEQ ID NO: 363505 - DNA, 15 bp, Homo sapiens
ccccaagggtcccag

SEQ ID NO: 363506 - DNA, 15 bp, Homo sapiens
accccaagggtccca

SEQ ID NO: 363507 - DNA, 15 bp, Homo sapiens
taccccaagggtccc

SEQ ID NO: 363508 - DNA, 15 bp, Homo sapiens
gtaccccaagggtcc

SEQ ID NO: 363509 - DNA, 15 bp, Homo sapiens
tgtaccccaagggtc

SEQ ID NO: 363510 - DNA, 15 bp, Homo sapiens
ctgtaccccaagggt

SEQ ID NO: 363511 - DNA, 15 bp, Homo sapiens
actgtaccccaaggg

SEQ ID NO: 363512 - DNA, 15 bp, Homo sapiens
cactgtaccccaagg

SEQ ID NO: 363513 - DNA, 15 bp, Homo sapiens
ccactgtaccccaag

SEQ ID NO: 363514 - DNA, 15 bp, Homo sapiens
accactgtaccccaa

SEQ ID NO: 363515 - DNA, 15 bp, Homo sapiens
caccactgtacccca

SEQ ID NO: 363516 - DNA, 15 bp, Homo sapiens
tcaccactgtacccc

SEQ ID NO: 363517 - DNA, 15 bp, Homo sapiens
ctcaccactgtaccc

SEQ ID NO: 363518 - DNA, 15 bp, Homo sapiens
actcaccactgtacc

SEQ ID NO: 363519 - DNA, 15 bp, Homo sapiens
tactcaccactgtac

SEQ ID NO: 363520 - DNA, 15 bp, Homo sapiens
ctactcaccactgta

SEQ ID NO: 363521 - DNA, 15 bp, Homo sapiens
cctactcaccactgt

SEQ ID NO: 363522 - DNA, 15 bp, Homo sapiens
ccctactcaccactg

SEQ ID NO: 363523 - DNA, 15 bp, Homo sapiens
cccctactcaccact

SEQ ID NO: 363524 - DNA, 15 bp, Homo sapiens
gcccctactcaccac

SEQ ID NO: 363525 - DNA, 15 bp, Homo sapiens
agcccctactcacca

SEQ ID NO: 363526 - DNA, 15 bp, Homo sapiens
gagcccctactcacc

SEQ ID NO: 363527 - DNA, 15 bp, Homo sapiens
ggagcccctactcac

SEQ ID NO: 363528 - DNA, 15 bp, Homo sapiens
aggagcccctactca

SEQ ID NO: 363529 - DNA, 15 bp, Homo sapiens
gaggagcccctactc

SEQ ID NO: 363530 - DNA, 15 bp, Homo sapiens
agaggagcccctact

SEQ ID NO: 363531 - DNA, 15 bp, Homo sapiens
cagaggagcccctac

SEQ ID NO: 363532 - DNA, 15 bp, Homo sapiens
acagaggagccccta

SEQ ID NO: 363533 - DNA, 15 bp, Homo sapiens
gacagaggagcccct

SEQ ID NO: 363534 - DNA, 15 bp, Homo sapiens
agacagaggagcccc

SEQ ID NO: 363535 - DNA, 15 bp, Homo sapiens
aagacagaggagccc

SEQ ID NO: 363536 - DNA, 15 bp, Homo sapiens
aaagacagaggagcc

SEQ ID NO: 363537 - DNA, 15 bp, Homo sapiens
taaagacagaggagc

SEQ ID NO: 363538 - DNA, 15 bp, Homo sapiens
ttaaagacagaggag

SEQ ID NO: 363539 - DNA, 15 bp, Homo sapiens
gttaaagacagagga

SEQ ID NO: 363540 - DNA, 15 bp, Homo sapiens
tgttaaagacagagg

SEQ ID NO: 363541 - DNA, 15 bp, Homo sapiens
ctgttaaagacagag

SEQ ID NO: 363542 - DNA, 15 bp, Homo sapiens
actgttaaagacaga

SEQ ID NO: 363543 - DNA, 15 bp, Homo sapiens
tactgttaaagacag

SEQ ID NO: 363544 - DNA, 15 bp, Homo sapiens
gtactgttaaagaca

SEQ ID NO: 363545 - DNA, 15 bp, Homo sapiens
agtactgttaaagac

SEQ ID NO: 363546 - DNA, 15 bp, Homo sapiens
aagtactgttaaaga

SEQ ID NO: 363547 - DNA, 15 bp, Homo sapiens
taagtactgttaaag

SEQ ID NO: 363548 - DNA, 15 bp, Homo sapiens
ctaagtactgttaaa

SEQ ID NO: 363549 - DNA, 15 bp, Homo sapiens
cctaagtactgttaa

SEQ ID NO: 363550 - DNA, 15 bp, Homo sapiens
tcctaagtactgtta

SEQ ID NO: 363551 - DNA, 15 bp, Homo sapiens
ttcctaagtactgtt

SEQ ID NO: 363552 - DNA, 15 bp, Homo sapiens
cttcctaagtactgt

SEQ ID NO: 363553 - DNA, 15 bp, Homo sapiens
gcttcctaagtactg

SEQ ID NO: 363554 - DNA, 15 bp, Homo sapiens
agcttcctaagtact

SEQ ID NO: 363555 - DNA, 15 bp, Homo sapiens
gagcttcctaagtac

SEQ ID NO: 363556 - DNA, 15 bp, Homo sapiens
tgagcttcctaagta

SEQ ID NO: 363557 - DNA, 15 bp, Homo sapiens
ctgagcttcctaagt

SEQ ID NO: 363558 - DNA, 15 bp, Homo sapiens
tctgagcttcctaag

SEQ ID NO: 363559 - DNA, 15 bp, Homo sapiens
ttctgagcttcctaa

SEQ ID NO: 363560 - DNA, 15 bp, Homo sapiens
gttctgagcttccta

SEQ ID NO: 363561 - DNA, 15 bp, Homo sapiens
cgttctgagcttcct

SEQ ID NO: 363562 - DNA, 15 bp, Homo sapiens
gcgttctgagcttcc

SEQ ID NO: 363563 - DNA, 15 bp, Homo sapiens
tgcgttctgagcttc

SEQ ID NO: 363564 - DNA, 15 bp, Homo sapiens
ctgcgttctgagctt

SEQ ID NO: 363565 - DNA, 15 bp, Homo sapiens
actgcgttctgagct

SEQ ID NO: 363566 - DNA, 15 bp, Homo sapiens
aactgcgttctgagc

SEQ ID NO: 363567 - DNA, 15 bp, Homo sapiens
caactgcgttctgag

SEQ ID NO: 363568 - DNA, 15 bp, Homo sapiens
gcaactgcgttctga

SEQ ID NO: 363569 - DNA, 15 bp, Homo sapiens
agcaactgcgttctg

SEQ ID NO: 363570 - DNA, 15 bp, Homo sapiens
cagcaactgcgttct

SEQ ID NO: 363571 - DNA, 15 bp, Homo sapiens
tcagcaactgcgttc

SEQ ID NO: 363572 - DNA, 15 bp, Homo sapiens
ctcagcaactgcgtt

SEQ ID NO: 363573 - DNA, 15 bp, Homo sapiens
tctcagcaactgcgt

SEQ ID NO: 363574 - DNA, 15 bp, Homo sapiens
gtctcagcaactgcg

SEQ ID NO: 363575 - DNA, 15 bp, Homo sapiens
agtctcagcaactgc

SEQ ID NO: 363576 - DNA, 15 bp, Homo sapiens
tagtctcagcaactg

SEQ ID NO: 363577 - DNA, 15 bp, Homo sapiens
atagtctcagcaact

SEQ ID NO: 363578 - DNA, 15 bp, Homo sapiens
gatagtctcagcaac

SEQ ID NO: 363579 - DNA, 15 bp, Homo sapiens
cgatagtctcagcaa

SEQ ID NO: 363580 - DNA, 15 bp, Homo sapiens
acgatagtctcagca

SEQ ID NO: 363581 - DNA, 15 bp, Homo sapiens
cacgatagtctcagc

SEQ ID NO: 363582 - DNA, 15 bp, Homo sapiens
ccacgatagtctcag

SEQ ID NO: 363583 - DNA, 15 bp, Homo sapiens
cccacgatagtctca

SEQ ID NO: 363584 - DNA, 15 bp, Homo sapiens
tcccacgatagtctc

SEQ ID NO: 363585 - DNA, 15 bp, Homo sapiens
gtcccacgatagtct

SEQ ID NO: 363586 - DNA, 15 bp, Homo sapiens
agtcccacgatagtc

SEQ ID NO: 363587 - DNA, 15 bp, Homo sapiens
gagtcccacgatagt

SEQ ID NO: 363588 - DNA, 15 bp, Homo sapiens
ggagtcccacgatag

SEQ ID NO: 363589 - DNA, 15 bp, Homo sapiens
gggagtcccacgata

SEQ ID NO: 363590 - DNA, 15 bp, Homo sapiens
tgggagtcccacgat

SEQ ID NO: 363591 - DNA, 15 bp, Homo sapiens
ctgggagtcccacga

SEQ ID NO: 363592 - DNA, 15 bp, Homo sapiens
gctgggagtcccacg

SEQ ID NO: 363593 - DNA, 15 bp, Homo sapiens
agctgggagtcccac

SEQ ID NO: 363594 - DNA, 15 bp, Homo sapiens
gagctgggagtccca

SEQ ID NO: 363595 - DNA, 15 bp, Homo sapiens
ggagctgggagtccc

SEQ ID NO: 363596 - DNA, 15 bp, Homo sapiens
aggagctgggagtcc

SEQ ID NO: 363597 - DNA, 15 bp, Homo sapiens
aaggagctgggagtc

SEQ ID NO: 363598 - DNA, 15 bp, Homo sapiens
aaaggagctgggagt

SEQ ID NO: 363599 - DNA, 15 bp, Homo sapiens
taaaggagctgggag

SEQ ID NO: 363600 - DNA, 15 bp, Homo sapiens
gtaaaggagctggga

SEQ ID NO: 363601 - DNA, 15 bp, Homo sapiens
ggtaaaggagctggg

SEQ ID NO: 363602 - DNA, 15 bp, Homo sapiens
aggtaaaggagctgg

SEQ ID NO: 363603 - DNA, 15 bp, Homo sapiens
aaggtaaaggagctg

SEQ ID NO: 363604 - DNA, 15 bp, Homo sapiens
caaggtaaaggagct

SEQ ID NO: 363605 - DNA, 15 bp, Homo sapiens
acaaggtaaaggagc

SEQ ID NO: 363606 - DNA, 15 bp, Homo sapiens
tacaaggtaaaggag

SEQ ID NO: 363607 - DNA, 15 bp, Homo sapiens
gtacaaggtaaagga

SEQ ID NO: 363608 - DNA, 15 bp, Homo sapiens
agtacaaggtaaagg

SEQ ID NO: 363609 - DNA, 15 bp, Homo sapiens
gagtacaaggtaaag

SEQ ID NO: 363610 - DNA, 15 bp, Homo sapiens
tgagtacaaggtaaa

SEQ ID NO: 363611 - DNA, 15 bp, Homo sapiens
atgagtacaaggtaa

SEQ ID NO: 363612 - DNA, 15 bp, Homo sapiens
aatgagtacaaggta

SEQ ID NO: 363613 - DNA, 15 bp, Homo sapiens
gaatgagtacaaggt

SEQ ID NO: 363614 - DNA, 15 bp, Homo sapiens
agaatgagtacaagg

SEQ ID NO: 363615 - DNA, 15 bp, Homo sapiens
gagaatgagtacaag

SEQ ID NO: 363616 - DNA, 15 bp, Homo sapiens
tgagaatgagtacaa

SEQ ID NO: 363617 - DNA, 15 bp, Homo sapiens
ttgagaatgagtaca

SEQ ID NO: 363618 - DNA, 15 bp, Homo sapiens
attgagaatgagtac

SEQ ID NO: 363619 - DNA, 15 bp, Homo sapiens
tattgagaatgagta

SEQ ID NO: 363620 - DNA, 15 bp, Homo sapiens
ctattgagaatgagt

SEQ ID NO: 363621 - DNA, 15 bp, Homo sapiens
actattgagaatgag

SEQ ID NO: 363622 - DNA, 15 bp, Homo sapiens
aactattgagaatga

SEQ ID NO: 363623 - DNA, 15 bp, Homo sapiens
gaactattgagaatg

SEQ ID NO: 363624 - DNA, 15 bp, Homo sapiens
cgaactattgagaat

SEQ ID NO: 363625 - DNA, 15 bp, Homo sapiens
gcgaactattgagaa

SEQ ID NO: 363626 - DNA, 15 bp, Homo sapiens
agcgaactattgaga

SEQ ID NO: 363627 - DNA, 15 bp, Homo sapiens
gagcgaactattgag

SEQ ID NO: 363628 - DNA, 15 bp, Homo sapiens
ggagcgaactattga

SEQ ID NO: 363629 - DNA, 15 bp, Homo sapiens
aggagcgaactattg

SEQ ID NO: 363630 - DNA, 15 bp, Homo sapiens
aaggagcgaactatt

SEQ ID NO: 363631 - DNA, 15 bp, Homo sapiens
caaggagcgaactat

SEQ ID NO: 363632 - DNA, 15 bp, Homo sapiens
ccaaggagcgaacta

SEQ ID NO: 363633 - DNA, 15 bp, Homo sapiens
gccaaggagcgaact

SEQ ID NO: 363634 - DNA, 15 bp, Homo sapiens
agccaaggagcgaac

SEQ ID NO: 363635 - DNA, 15 bp, Homo sapiens
cagccaaggagcgaa

SEQ ID NO: 363636 - DNA, 15 bp, Homo sapiens
gcagccaaggagcga

SEQ ID NO: 363637 - DNA, 15 bp, Homo sapiens
agcagccaaggagcg

SEQ ID NO: 363638 - DNA, 15 bp, Homo sapiens
gagcagccaaggagc

SEQ ID NO: 363639 - DNA, 15 bp, Homo sapiens
ggagcagccaaggag

SEQ ID NO: 363640 - DNA, 15 bp, Homo sapiens
gggagcagccaagga

SEQ ID NO: 363641 - DNA, 15 bp, Homo sapiens
ggggagcagccaagg

SEQ ID NO: 363642 - DNA, 15 bp, Homo sapiens
tggggagcagccaag

SEQ ID NO: 363643 - DNA, 15 bp, Homo sapiens
ctggggagcagccaa

SEQ ID NO: 363644 - DNA, 15 bp, Homo sapiens
cctggggagcagcca

SEQ ID NO: 363645 - DNA, 15 bp, Homo sapiens
ccctggggagcagcc

SEQ ID NO: 363646 - DNA, 15 bp, Homo sapiens
accctggggagcagc

SEQ ID NO: 363647 - DNA, 15 bp, Homo sapiens
aaccctggggagcag

SEQ ID NO: 363648 - DNA, 15 bp, Homo sapiens
caaccctggggagca

SEQ ID NO: 363649 - DNA, 15 bp, Homo sapiens
ccaaccctggggagc

SEQ ID NO: 363650 - DNA, 15 bp, Homo sapiens
cccaaccctggggag

SEQ ID NO: 363651 - DNA, 15 bp, Homo sapiens
acccaaccctgggga

SEQ ID NO: 363652 - DNA, 15 bp, Homo sapiens
aacccaaccctgggg

SEQ ID NO: 363653 - DNA, 15 bp, Homo sapiens
aaacccaaccctggg

SEQ ID NO: 363654 - DNA, 15 bp, Homo sapiens
aaaacccaaccctgg

SEQ ID NO: 363655 - DNA, 15 bp, Homo sapiens
gaaaacccaaccctg

SEQ ID NO: 363656 - DNA, 15 bp, Homo sapiens
tgaaaacccaaccct

SEQ ID NO: 363657 - DNA, 15 bp, Homo sapiens
ttgaaaacccaaccc

SEQ ID NO: 363658 - DNA, 15 bp, Homo sapiens
tttgaaaacccaacc

SEQ ID NO: 363659 - DNA, 15 bp, Homo sapiens
ctttgaaaacccaac

SEQ ID NO: 363660 - DNA, 15 bp, Homo sapiens
tctttgaaaacccaa

SEQ ID NO: 363661 - DNA, 15 bp, Homo sapiens
gtctttgaaaaccca

SEQ ID NO: 363662 - DNA, 15 bp, Homo sapiens
agtctttgaaaaccc

SEQ ID NO: 363663 - DNA, 15 bp, Homo sapiens
gagtctttgaaaacc

SEQ ID NO: 363664 - DNA, 15 bp, Homo sapiens
agagtctttgaaaac

SEQ ID NO: 363665 - DNA, 15 bp, Homo sapiens
cagagtctttgaaaa

SEQ ID NO: 363666 - DNA, 15 bp, Homo sapiens
acagagtctttgaaa

SEQ ID NO: 363667 - DNA, 15 bp, Homo sapiens
aacagagtctttgaa

SEQ ID NO: 363668 - DNA, 15 bp, Homo sapiens
caacagagtctttga

SEQ ID NO: 363669 - DNA, 15 bp, Homo sapiens
ccaacagagtctttg

SEQ ID NO: 363670 - DNA, 15 bp, Homo sapiens
tccaacagagtcttt

SEQ ID NO: 363671 - DNA, 15 bp, Homo sapiens
ctccaacagagtctt

SEQ ID NO: 363672 - DNA, 15 bp, Homo sapiens
gctccaacagagtct

SEQ ID NO: 363673 - DNA, 15 bp, Homo sapiens
agctccaacagagtc

SEQ ID NO: 363674 - DNA, 15 bp, Homo sapiens
cagctccaacagagt

SEQ ID NO: 363675 - DNA, 15 bp, Homo sapiens
gcagctccaacagag

SEQ ID NO: 363676 - DNA, 15 bp, Homo sapiens
agcagctccaacaga

SEQ ID NO: 363677 - DNA, 15 bp, Homo sapiens
gagcagctccaacag

SEQ ID NO: 363678 - DNA, 15 bp, Homo sapiens
cgagcagctccaaca

SEQ ID NO: 363679 - DNA, 15 bp, Homo sapiens
ccgagcagctccaac

SEQ ID NO: 363680 - DNA, 15 bp, Homo sapiens
tccgagcagctccaa

SEQ ID NO: 363681 - DNA, 15 bp, Homo sapiens
ctccgagcagctcca

SEQ ID NO: 363682 - DNA, 15 bp, Homo sapiens
tctccgagcagctcc

SEQ ID NO: 363683 - DNA, 15 bp, Homo sapiens
ttctccgagcagctc

SEQ ID NO: 363684 - DNA, 15 bp, Homo sapiens
tttctccgagcagct

SEQ ID NO: 363685 - DNA, 15 bp, Homo sapiens
ctttctccgagcagc

SEQ ID NO: 363686 - DNA, 15 bp, Homo sapiens
cctttctccgagcag

SEQ ID NO: 363687 - DNA, 15 bp, Homo sapiens
tcctttctccgagca

SEQ ID NO: 363688 - DNA, 15 bp, Homo sapiens
ttcctttctccgagc

SEQ ID NO: 363689 - DNA, 15 bp, Homo sapiens
attcctttctccgag

SEQ ID NO: 363690 - DNA, 15 bp, Homo sapiens
cattcctttctccga

SEQ ID NO: 363691 - DNA, 15 bp, Homo sapiens
tcattcctttctccg

SEQ ID NO: 363692 - DNA, 15 bp, Homo sapiens
ctcattcctttctcc

SEQ ID NO: 363693 - DNA, 15 bp, Homo sapiens
actcattcctttctc

SEQ ID NO: 363694 - DNA, 15 bp, Homo sapiens
gactcattcctttct

SEQ ID NO: 363695 - DNA, 15 bp, Homo sapiens
agactcattcctttc

SEQ ID NO: 363696 - DNA, 15 bp, Homo sapiens
aagactcattccttt

SEQ ID NO: 363697 - DNA, 15 bp, Homo sapiens
aaagactcattcctt

SEQ ID NO: 363698 - DNA, 15 bp, Homo sapiens
aaaagactcattcct

SEQ ID NO: 363699 - DNA, 15 bp, Homo sapiens
aaaaagactcattcc

SEQ ID NO: 363700 - DNA, 15 bp, Homo sapiens
gaaaaagactcattc

SEQ ID NO: 363701 - DNA, 15 bp, Homo sapiens
agaaaaagactcatt

SEQ ID NO: 363702 - DNA, 15 bp, Homo sapiens
gagaaaaagactcat

SEQ ID NO: 363703 - DNA, 15 bp, Homo sapiens
agagaaaaagactca

SEQ ID NO: 363704 - DNA, 15 bp, Homo sapiens
gagagaaaaagactc

SEQ ID NO: 363705 - DNA, 15 bp, Homo sapiens
cgagagaaaaagact

SEQ ID NO: 363706 - DNA, 15 bp, Homo sapiens
gcgagagaaaaagac

SEQ ID NO: 363707 - DNA, 15 bp, Homo sapiens
tgcgagagaaaaaga

SEQ ID NO: 363708 - DNA, 15 bp, Homo sapiens
ctgcgagagaaaaag

SEQ ID NO: 363709 - DNA, 15 bp, Homo sapiens
tctgcgagagaaaaa

SEQ ID NO: 363710 - DNA, 15 bp, Homo sapiens
ttctgcgagagaaaa

SEQ ID NO: 363711 - DNA, 15 bp, Homo sapiens
gttctgcgagagaaa

SEQ ID NO: 363712 - DNA, 15 bp, Homo sapiens
ggttctgcgagagaa

SEQ ID NO: 363713 - DNA, 15 bp, Homo sapiens
aggttctgcgagaga

SEQ ID NO: 363714 - DNA, 15 bp, Homo sapiens
taggttctgcgagag

SEQ ID NO: 363715 - DNA, 15 bp, Homo sapiens
ctaggttctgcgaga

SEQ ID NO: 363716 - DNA, 15 bp, Homo sapiens
actaggttctgcgag

SEQ ID NO: 363717 - DNA, 15 bp, Homo sapiens
cactaggttctgcga

SEQ ID NO: 363718 - DNA, 15 bp, Homo sapiens
gcactaggttctgcg

SEQ ID NO: 363719 - DNA, 15 bp, Homo sapiens
agcactaggttctgc

SEQ ID NO: 363720 - DNA, 15 bp, Homo sapiens
aagcactaggttctg

SEQ ID NO: 363721 - DNA, 15 bp, Homo sapiens
taagcactaggttct

SEQ ID NO: 363722 - DNA, 15 bp, Homo sapiens
gtaagcactaggttc

SEQ ID NO: 363723 - DNA, 15 bp, Homo sapiens
ggtaagcactaggtt

SEQ ID NO: 363724 - DNA, 15 bp, Homo sapiens
tggtaagcactaggt

SEQ ID NO: 363725 - DNA, 15 bp, Homo sapiens
ttggtaagcactagg

SEQ ID NO: 363726 - DNA, 15 bp, Homo sapiens
cttggtaagcactag

SEQ ID NO: 363727 - DNA, 15 bp, Homo sapiens
acttggtaagcacta

SEQ ID NO: 363728 - DNA, 15 bp, Homo sapiens
cacttggtaagcact

SEQ ID NO: 363729 - DNA, 15 bp, Homo sapiens
gcacttggtaagcac

SEQ ID NO: 363730 - DNA, 15 bp, Homo sapiens
agcacttggtaagca

SEQ ID NO: 363731 - DNA, 15 bp, Homo sapiens
aagcacttggtaagc

SEQ ID NO: 363732 - DNA, 15 bp, Homo sapiens
caagcacttggtaag

SEQ ID NO: 363733 - DNA, 15 bp, Homo sapiens
tcaagcacttggtaa

SEQ ID NO: 363734 - DNA, 15 bp, Homo sapiens
atcaagcacttggta

SEQ ID NO: 363735 - DNA, 15 bp, Homo sapiens
tatcaagcacttggt

SEQ ID NO: 363736 - DNA, 15 bp, Homo sapiens
ttatcaagcacttgg

SEQ ID NO: 363737 - DNA, 15 bp, Homo sapiens
gttatcaagcacttg

SEQ ID NO: 363738 - DNA, 15 bp, Homo sapiens
tgttatcaagcactt

SEQ ID NO: 363739 - DNA, 15 bp, Homo sapiens
gtgttatcaagcact

SEQ ID NO: 363740 - DNA, 15 bp, Homo sapiens
agtgttatcaagcac

SEQ ID NO: 363741 - DNA, 15 bp, Homo sapiens
aagtgttatcaagca

SEQ ID NO: 363742 - DNA, 15 bp, Homo sapiens
taagtgttatcaagc

SEQ ID NO: 363743 - DNA, 15 bp, Homo sapiens
ctaagtgttatcaag

SEQ ID NO: 363744 - DNA, 15 bp, Homo sapiens
actaagtgttatcaa

SEQ ID NO: 363745 - DNA, 15 bp, Homo sapiens
cactaagtgttatca

SEQ ID NO: 363746 - DNA, 15 bp, Homo sapiens
acactaagtgttatc

SEQ ID NO: 363747 - DNA, 15 bp, Homo sapiens
aacactaagtgttat

SEQ ID NO: 363748 - DNA, 15 bp, Homo sapiens
caacactaagtgtta

SEQ ID NO: 363749 - DNA, 15 bp, Homo sapiens
gcaacactaagtgtt

SEQ ID NO: 363750 - DNA, 15 bp, Homo sapiens
cgcaacactaagtgt

SEQ ID NO: 363751 - DNA, 15 bp, Homo sapiens
acgcaacactaagtg

SEQ ID NO: 363752 - DNA, 15 bp, Homo sapiens
cacgcaacactaagt

SEQ ID NO: 363753 - DNA, 15 bp, Homo sapiens
tcacgcaacactaag

SEQ ID NO: 363754 - DNA, 15 bp, Homo sapiens
ctcacgcaacactaa

SEQ ID NO: 363755 - DNA, 15 bp, Homo sapiens
actcacgcaacacta

SEQ ID NO: 363756 - DNA, 15 bp, Homo sapiens
gactcacgcaacact

SEQ ID NO: 363757 - DNA, 15 bp, Homo sapiens
tgactcacgcaacac

SEQ ID NO: 363758 - DNA, 15 bp, Homo sapiens
ctgactcacgcaaca

SEQ ID NO: 363759 - DNA, 15 bp, Homo sapiens
cctgactcacgcaac

SEQ ID NO: 363760 - DNA, 15 bp, Homo sapiens
tcctgactcacgcaa

SEQ ID NO: 363761 - DNA, 15 bp, Homo sapiens
ctcctgactcacgca

SEQ ID NO: 363762 - DNA, 15 bp, Homo sapiens
actcctgactcacgc

SEQ ID NO: 363763 - DNA, 15 bp, Homo sapiens
cactcctgactcacg

SEQ ID NO: 363764 - DNA, 15 bp, Homo sapiens
ccactcctgactcac

SEQ ID NO: 363765 - DNA, 15 bp, Homo sapiens
gccactcctgactca

SEQ ID NO: 363766 - DNA, 15 bp, Homo sapiens
ggccactcctgactc

SEQ ID NO: 363767 - DNA, 15 bp, Homo sapiens
aggccactcctgact

SEQ ID NO: 363768 - DNA, 15 bp, Homo sapiens
taggccactcctgac

SEQ ID NO: 363769 - DNA, 15 bp, Homo sapiens
ctaggccactcctga

SEQ ID NO: 363770 - DNA, 15 bp, Homo sapiens
tctaggccactcctg

SEQ ID NO: 363771 - DNA, 15 bp, Homo sapiens
ctctaggccactcct

SEQ ID NO: 363772 - DNA, 15 bp, Homo sapiens
gctctaggccactcc

SEQ ID NO: 363773 - DNA, 15 bp, Homo sapiens
agctctaggccactc

SEQ ID NO: 363774 - DNA, 15 bp, Homo sapiens
aagctctaggccact

SEQ ID NO: 363775 - DNA, 15 bp, Homo sapiens
gaagctctaggccac

SEQ ID NO: 363776 - DNA, 15 bp, Homo sapiens
agaagctctaggcca

SEQ ID NO: 363777 - DNA, 15 bp, Homo sapiens
cagaagctctaggcc

SEQ ID NO: 363778 - DNA, 15 bp, Homo sapiens
acagaagctctaggc

SEQ ID NO: 363779 - DNA, 15 bp, Homo sapiens
gacagaagctctagg

SEQ ID NO: 363780 - DNA, 15 bp, Homo sapiens
agacagaagctctag

SEQ ID NO: 363781 - DNA, 15 bp, Homo sapiens
cagacagaagctcta

SEQ ID NO: 363782 - DNA, 15 bp, Homo sapiens
gcagacagaagctct

SEQ ID NO: 363783 - DNA, 15 bp, Homo sapiens
ggcagacagaagctc

SEQ ID NO: 363784 - DNA, 15 bp, Homo sapiens
tggcagacagaagct

SEQ ID NO: 363785 - DNA, 15 bp, Homo sapiens
ctggcagacagaagc

SEQ ID NO: 363786 - DNA, 15 bp, Homo sapiens
gctggcagacagaag

SEQ ID NO: 363787 - DNA, 15 bp, Homo sapiens
ggctggcagacagaa

SEQ ID NO: 363788 - DNA, 15 bp, Homo sapiens
tggctggcagacaga

SEQ ID NO: 363789 - DNA, 15 bp, Homo sapiens
ctggctggcagacag

SEQ ID NO: 363790 - DNA, 15 bp, Homo sapiens
gctggctggcagaca

SEQ ID NO: 363791 - DNA, 15 bp, Homo sapiens
ggctggctggcagac

SEQ ID NO: 363792 - DNA, 15 bp, Homo sapiens
aggctggctggcaga

SEQ ID NO: 363793 - DNA, 15 bp, Homo sapiens
caggctggctggcag

SEQ ID NO: 363794 - DNA, 15 bp, Homo sapiens
ccaggctggctggca

SEQ ID NO: 363795 - DNA, 15 bp, Homo sapiens
cccaggctggctggc

SEQ ID NO: 363796 - DNA, 15 bp, Homo sapiens
gcccaggctggctgg

SEQ ID NO: 363797 - DNA, 15 bp, Homo sapiens
agcccaggctggctg

SEQ ID NO: 363798 - DNA, 15 bp, Homo sapiens
gagcccaggctggct

SEQ ID NO: 363799 - DNA, 15 bp, Homo sapiens
agagcccaggctggc

SEQ ID NO: 363800 - DNA, 15 bp, Homo sapiens
cagagcccaggctgg

SEQ ID NO: 363801 - DNA, 15 bp, Homo sapiens
ccagagcccaggctg

SEQ ID NO: 363802 - DNA, 15 bp, Homo sapiens
cccagagcccaggct

SEQ ID NO: 363803 - DNA, 15 bp, Homo sapiens
ccccagagcccaggc

SEQ ID NO: 363804 - DNA, 15 bp, Homo sapiens
tccccagagcccagg

SEQ ID NO: 363805 - DNA, 15 bp, Homo sapiens
ttccccagagcccag

SEQ ID NO: 363806 - DNA, 15 bp, Homo sapiens
gttccccagagccca

SEQ ID NO: 363807 - DNA, 15 bp, Homo sapiens
tgttccccagagccc

SEQ ID NO: 363808 - DNA, 15 bp, Homo sapiens
ctgttccccagagcc

SEQ ID NO: 363809 - DNA, 15 bp, Homo sapiens
cctgttccccagagc

SEQ ID NO: 363810 - DNA, 15 bp, Homo sapiens
gcctgttccccagag

SEQ ID NO: 363811 - DNA, 15 bp, Homo sapiens
cgcctgttccccaga

SEQ ID NO: 363812 - DNA, 15 bp, Homo sapiens
tcgcctgttccccag

SEQ ID NO: 363813 - DNA, 15 bp, Homo sapiens
gtcgcctgttcccca

SEQ ID NO: 363814 - DNA, 15 bp, Homo sapiens
tgtcgcctgttcccc

SEQ ID NO: 363815 - DNA, 15 bp, Homo sapiens
gtgtcgcctgttccc

SEQ ID NO: 363816 - DNA, 15 bp, Homo sapiens
tgtgtcgcctgttcc

SEQ ID NO: 363817 - DNA, 15 bp, Homo sapiens
ctgtgtcgcctgttc

SEQ ID NO: 363818 - DNA, 15 bp, Homo sapiens
cctgtgtcgcctgtt

SEQ ID NO: 363819 - DNA, 15 bp, Homo sapiens
gcctgtgtcgcctgt

SEQ ID NO: 363820 - DNA, 15 bp, Homo sapiens
ggcctgtgtcgcctg

SEQ ID NO: 363821 - DNA, 15 bp, Homo sapiens
aggcctgtgtcgcct

SEQ ID NO: 363822 - DNA, 15 bp, Homo sapiens
taggcctgtgtcgcc

SEQ ID NO: 363823 - DNA, 15 bp, Homo sapiens
ttaggcctgtgtcgc

SEQ ID NO: 363824 - DNA, 15 bp, Homo sapiens
cttaggcctgtgtcg

SEQ ID NO: 363825 - DNA, 15 bp, Homo sapiens
ccttaggcctgtgtc

SEQ ID NO: 363826 - DNA, 15 bp, Homo sapiens
accttaggcctgtgt

SEQ ID NO: 363827 - DNA, 15 bp, Homo sapiens
caccttaggcctgtg

SEQ ID NO: 363828 - DNA, 15 bp, Homo sapiens
tcaccttaggcctgt

SEQ ID NO: 363829 - DNA, 15 bp, Homo sapiens
ctcaccttaggcctg

SEQ ID NO: 363830 - DNA, 15 bp, Homo sapiens
tctcaccttaggcct

SEQ ID NO: 363831 - DNA, 15 bp, Homo sapiens
gtctcaccttaggcc

SEQ ID NO: 363832 - DNA, 15 bp, Homo sapiens
ggtctcaccttaggc

SEQ ID NO: 363833 - DNA, 15 bp, Homo sapiens
gggtctcaccttagg

SEQ ID NO: 363834 - DNA, 15 bp, Homo sapiens
agggtctcaccttag

SEQ ID NO: 363835 - DNA, 15 bp, Homo sapiens
cagggtctcacctta

SEQ ID NO: 363836 - DNA, 15 bp, Homo sapiens
tcagggtctcacctt

SEQ ID NO: 363837 - DNA, 15 bp, Homo sapiens
gtcagggtctcacct

SEQ ID NO: 363838 - DNA, 15 bp, Homo sapiens
agtcagggtctcacc

SEQ ID NO: 363839 - DNA, 15 bp, Homo sapiens
aagtcagggtctcac

SEQ ID NO: 363840 - DNA, 15 bp, Homo sapiens
gaagtcagggtctca

SEQ ID NO: 363841 - DNA, 15 bp, Homo sapiens
tgaagtcagggtctc

SEQ ID NO: 363842 - DNA, 15 bp, Homo sapiens
ctgaagtcagggtct

SEQ ID NO: 363843 - DNA, 15 bp, Homo sapiens
tctgaagtcagggtc

SEQ ID NO: 363844 - DNA, 15 bp, Homo sapiens
ctctgaagtcagggt

SEQ ID NO: 363845 - DNA, 15 bp, Homo sapiens
tctctgaagtcaggg

SEQ ID NO: 363846 - DNA, 15 bp, Homo sapiens
atctctgaagtcagg

SEQ ID NO: 363847 - DNA, 15 bp, Homo sapiens
gatctctgaagtcag

SEQ ID NO: 363848 - DNA, 15 bp, Homo sapiens
agatctctgaagtca

SEQ ID NO: 363849 - DNA, 15 bp, Homo sapiens
cagatctctgaagtc

SEQ ID NO: 363850 - DNA, 15 bp, Homo sapiens
acagatctctgaagt

SEQ ID NO: 363851 - DNA, 15 bp, Homo sapiens
gacagatctctgaag

SEQ ID NO: 363852 - DNA, 15 bp, Homo sapiens
agacagatctctgaa

SEQ ID NO: 363853 - DNA, 15 bp, Homo sapiens
tagacagatctctga

SEQ ID NO: 363854 - DNA, 15 bp, Homo sapiens
atagacagatctctg

SEQ ID NO: 363855 - DNA, 15 bp, Homo sapiens
catagacagatctct

SEQ ID NO: 363856 - DNA, 15 bp, Homo sapiens
gcatagacagatctc

SEQ ID NO: 363857 - DNA, 15 bp, Homo sapiens
cgcatagacagatct

SEQ ID NO: 363858 - DNA, 15 bp, Homo sapiens
ccgcatagacagatc

SEQ ID NO: 363859 - DNA, 15 bp, Homo sapiens
tccgcatagacagat

SEQ ID NO: 363860 - DNA, 15 bp, Homo sapiens
ctccgcatagacaga

SEQ ID NO: 363861 - DNA, 15 bp, Homo sapiens
gctccgcatagacag

SEQ ID NO: 363862 - DNA, 15 bp, Homo sapiens
agctccgcatagaca

SEQ ID NO: 363863 - DNA, 15 bp, Homo sapiens
aagctccgcatagac

SEQ ID NO: 363864 - DNA, 15 bp, Homo sapiens
aaagctccgcataga

SEQ ID NO: 363865 - DNA, 15 bp, Homo sapiens
aaaagctccgcatag

SEQ ID NO: 363866 - DNA, 15 bp, Homo sapiens
gaaaagctccgcata

SEQ ID NO: 363867 - DNA, 15 bp, Homo sapiens
agaaaagctccgcat

SEQ ID NO: 363868 - DNA, 15 bp, Homo sapiens
cagaaaagctccgca

SEQ ID NO: 363869 - DNA, 15 bp, Homo sapiens
acagaaaagctccgc

SEQ ID NO: 363870 - DNA, 15 bp, Homo sapiens
cacagaaaagctccg

SEQ ID NO: 363871 - DNA, 15 bp, Homo sapiens
ccacagaaaagctcc

SEQ ID NO: 363872 - DNA, 15 bp, Homo sapiens
cccacagaaaagctc

SEQ ID NO: 363873 - DNA, 15 bp, Homo sapiens
acccacagaaaagct

SEQ ID NO: 363874 - DNA, 15 bp, Homo sapiens
cacccacagaaaagc

SEQ ID NO: 363875 - DNA, 15 bp, Homo sapiens
tcacccacagaaaag

SEQ ID NO: 363876 - DNA, 15 bp, Homo sapiens
ctcacccacagaaaa

SEQ ID NO: 363877 - DNA, 15 bp, Homo sapiens
tctcacccacagaaa

SEQ ID NO: 363878 - DNA, 15 bp, Homo sapiens
ctctcacccacagaa

SEQ ID NO: 363879 - DNA, 15 bp, Homo sapiens
tctctcacccacaga

SEQ ID NO: 363880 - DNA, 15 bp, Homo sapiens
atctctcacccacag

SEQ ID NO: 363881 - DNA, 15 bp, Homo sapiens
catctctcacccaca

SEQ ID NO: 363882 - DNA, 15 bp, Homo sapiens
ccatctctcacccac

SEQ ID NO: 363883 - DNA, 15 bp, Homo sapiens
tccatctctcaccca

SEQ ID NO: 363884 - DNA, 15 bp, Homo sapiens
ctccatctctcaccc

SEQ ID NO: 363885 - DNA, 15 bp, Homo sapiens
cctccatctctcacc

SEQ ID NO: 363886 - DNA, 15 bp, Homo sapiens
acctccatctctcac

SEQ ID NO: 363887 - DNA, 15 bp, Homo sapiens
tacctccatctctca

SEQ ID NO: 363888 - DNA, 15 bp, Homo sapiens
atacctccatctctc

SEQ ID NO: 363889 - DNA, 15 bp, Homo sapiens
catacctccatctct

SEQ ID NO: 363890 - DNA, 15 bp, Homo sapiens
ccatacctccatctc

SEQ ID NO: 363891 - DNA, 15 bp, Homo sapiens
gccatacctccatct

SEQ ID NO: 363892 - DNA, 15 bp, Homo sapiens
agccatacctccatc

SEQ ID NO: 363893 - DNA, 15 bp, Homo sapiens
gagccatacctccat

SEQ ID NO: 363894 - DNA, 15 bp, Homo sapiens
ggagccatacctcca

SEQ ID NO: 363895 - DNA, 15 bp, Homo sapiens
aggagccatacctcc

SEQ ID NO: 363896 - DNA, 15 bp, Homo sapiens
aaggagccatacctc

SEQ ID NO: 363897 - DNA, 15 bp, Homo sapiens
aaaggagccatacct

SEQ ID NO: 363898 - DNA, 15 bp, Homo sapiens
taaaggagccatacc

SEQ ID NO: 363899 - DNA, 15 bp, Homo sapiens
ttaaaggagccatac

SEQ ID NO: 363900 - DNA, 15 bp, Homo sapiens
gttaaaggagccata

SEQ ID NO: 363901 - DNA, 15 bp, Homo sapiens
ggttaaaggagccat

SEQ ID NO: 363902 - DNA, 15 bp, Homo sapiens
aggttaaaggagcca

SEQ ID NO: 363903 - DNA, 15 bp, Homo sapiens
aaggttaaaggagcc

SEQ ID NO: 363904 - DNA, 15 bp, Homo sapiens
caaggttaaaggagc

SEQ ID NO: 363905 - DNA, 15 bp, Homo sapiens
tcaaggttaaaggag

SEQ ID NO: 363906 - DNA, 15 bp, Homo sapiens
ctcaaggttaaagga

SEQ ID NO: 363907 - DNA, 15 bp, Homo sapiens
cctcaaggttaaagg

SEQ ID NO: 363908 - DNA, 15 bp, Homo sapiens
gcctcaaggttaaag

SEQ ID NO: 363909 - DNA, 15 bp, Homo sapiens
ggcctcaaggttaaa

SEQ ID NO: 363910 - DNA, 15 bp, Homo sapiens
tggcctcaaggttaa

SEQ ID NO: 363911 - DNA, 15 bp, Homo sapiens
ctggcctcaaggtta

SEQ ID NO: 363912 - DNA, 15 bp, Homo sapiens
actggcctcaaggtt

SEQ ID NO: 363913 - DNA, 15 bp, Homo sapiens
gactggcctcaaggt

SEQ ID NO: 363914 - DNA, 15 bp, Homo sapiens
agactggcctcaagg

SEQ ID NO: 363915 - DNA, 15 bp, Homo sapiens
cagactggcctcaag

SEQ ID NO: 363916 - DNA, 15 bp, Homo sapiens
ccagactggcctcaa

SEQ ID NO: 363917 - DNA, 15 bp, Homo sapiens
tccagactggcctca

SEQ ID NO: 363918 - DNA, 15 bp, Homo sapiens
atccagactggcctc

SEQ ID NO: 363919 - DNA, 15 bp, Homo sapiens
catccagactggcct

SEQ ID NO: 363920 - DNA, 15 bp, Homo sapiens
ccatccagactggcc

SEQ ID NO: 363921 - DNA, 15 bp, Homo sapiens
gccatccagactggc

SEQ ID NO: 363922 - DNA, 15 bp, Homo sapiens
ggccatccagactgg

SEQ ID NO: 363923 - DNA, 15 bp, Homo sapiens
aggccatccagactg

SEQ ID NO: 363924 - DNA, 15 bp, Homo sapiens
caggccatccagact

SEQ ID NO: 363925 - DNA, 15 bp, Homo sapiens
ccaggccatccagac

SEQ ID NO: 363926 - DNA, 15 bp, Homo sapiens
gccaggccatccaga

SEQ ID NO: 363927 - DNA, 15 bp, Homo sapiens
ggccaggccatccag

SEQ ID NO: 363928 - DNA, 15 bp, Homo sapiens
tggccaggccatcca

SEQ ID NO: 363929 - DNA, 15 bp, Homo sapiens
gtggccaggccatcc

SEQ ID NO: 363930 - DNA, 15 bp, Homo sapiens
ggtggccaggccatc

SEQ ID NO: 363931 - DNA, 15 bp, Homo sapiens
aggtggccaggccat

SEQ ID NO: 363932 - DNA, 15 bp, Homo sapiens
gaggtggccaggcca

SEQ ID NO: 363933 - DNA, 15 bp, Homo sapiens
ggaggtggccaggcc

SEQ ID NO: 363934 - DNA, 15 bp, Homo sapiens
tggaggtggccaggc

SEQ ID NO: 363935 - DNA, 15 bp, Homo sapiens
ctggaggtggccagg

SEQ ID NO: 363936 - DNA, 15 bp, Homo sapiens
cctggaggtggccag

SEQ ID NO: 363937 - DNA, 15 bp, Homo sapiens
tcctggaggtggcca

SEQ ID NO: 363938 - DNA, 15 bp, Homo sapiens
ttcctggaggtggcc

SEQ ID NO: 363939 - DNA, 15 bp, Homo sapiens
tttcctggaggtggc

SEQ ID NO: 363940 - DNA, 15 bp, Homo sapiens
ctttcctggaggtgg

SEQ ID NO: 363941 - DNA, 15 bp, Homo sapiens
tctttcctggaggtg

SEQ ID NO: 363942 - DNA, 15 bp, Homo sapiens
ctctttcctggaggt

SEQ ID NO: 363943 - DNA, 15 bp, Homo sapiens
cctctttcctggagg

SEQ ID NO: 363944 - DNA, 15 bp, Homo sapiens
ccctctttcctggag

SEQ ID NO: 363945 - DNA, 15 bp, Homo sapiens
accctctttcctgga

SEQ ID NO: 363946 - DNA, 15 bp, Homo sapiens
taccctctttcctgg

SEQ ID NO: 363947 - DNA, 15 bp, Homo sapiens
ctaccctctttcctg

SEQ ID NO: 363948 - DNA, 15 bp, Homo sapiens
cctaccctctttcct

SEQ ID NO: 363949 - DNA, 15 bp, Homo sapiens
ccctaccctctttcc

SEQ ID NO: 363950 - DNA, 15 bp, Homo sapiens
tccctaccctctttc

SEQ ID NO: 363951 - DNA, 15 bp, Homo sapiens
gtccctaccctcttt

SEQ ID NO: 363952 - DNA, 15 bp, Homo sapiens
agtccctaccctctt

SEQ ID NO: 363953 - DNA, 15 bp, Homo sapiens
gagtccctaccctct

SEQ ID NO: 363954 - DNA, 15 bp, Homo sapiens
ggagtccctaccctc

SEQ ID NO: 363955 - DNA, 15 bp, Homo sapiens
tggagtccctaccct

SEQ ID NO: 363956 - DNA, 15 bp, Homo sapiens
atggagtccctaccc

SEQ ID NO: 363957 - DNA, 15 bp, Homo sapiens
tatggagtccctacc

SEQ ID NO: 363958 - DNA, 15 bp, Homo sapiens
ctatggagtccctac

SEQ ID NO: 363959 - DNA, 15 bp, Homo sapiens
gctatggagtcccta

SEQ ID NO: 363960 - DNA, 15 bp, Homo sapiens
ggctatggagtccct

SEQ ID NO: 363961 - DNA, 15 bp, Homo sapiens
aggctatggagtccc

SEQ ID NO: 363962 - DNA, 15 bp, Homo sapiens
caggctatggagtcc

SEQ ID NO: 363963 - DNA, 15 bp, Homo sapiens
gcaggctatggagtc

SEQ ID NO: 363964 - DNA, 15 bp, Homo sapiens
ggcaggctatggagt

SEQ ID NO: 363965 - DNA, 15 bp, Homo sapiens
aggcaggctatggag

SEQ ID NO: 363966 - DNA, 15 bp, Homo sapiens
caggcaggctatgga

SEQ ID NO: 363967 - DNA, 15 bp, Homo sapiens
ccaggcaggctatgg

SEQ ID NO: 363968 - DNA, 15 bp, Homo sapiens
cccaggcaggctatg

SEQ ID NO: 363969 - DNA, 15 bp, Homo sapiens
ccccaggcaggctat

SEQ ID NO: 363970 - DNA, 15 bp, Homo sapiens
tccccaggcaggcta

SEQ ID NO: 363971 - DNA, 15 bp, Homo sapiens
ctccccaggcaggct

SEQ ID NO: 363972 - DNA, 15 bp, Homo sapiens
actccccaggcaggc

SEQ ID NO: 363973 - DNA, 15 bp, Homo sapiens
cactccccaggcagg

SEQ ID NO: 363974 - DNA, 15 bp, Homo sapiens
tcactccccaggcag

SEQ ID NO: 363975 - DNA, 15 bp, Homo sapiens
ctcactccccaggca

SEQ ID NO: 363976 - DNA, 15 bp, Homo sapiens
tctcactccccaggc

SEQ ID NO: 363977 - DNA, 15 bp, Homo sapiens
ctctcactccccagg

SEQ ID NO: 363978 - DNA, 15 bp, Homo sapiens
gctctcactccccag

SEQ ID NO: 363979 - DNA, 15 bp, Homo sapiens
ggctctcactcccca

SEQ ID NO: 363980 - DNA, 15 bp, Homo sapiens
tggctctcactcccc

SEQ ID NO: 363981 - DNA, 15 bp, Homo sapiens
atggctctcactccc

SEQ ID NO: 363982 - DNA, 15 bp, Homo sapiens
catggctctcactcc

SEQ ID NO: 363983 - DNA, 15 bp, Homo sapiens
ccatggctctcactc

SEQ ID NO: 363984 - DNA, 15 bp, Homo sapiens
cccatggctctcact

SEQ ID NO: 363985 - DNA, 15 bp, Homo sapiens
tcccatggctctcac

SEQ ID NO: 363986 - DNA, 15 bp, Homo sapiens
atcccatggctctca

SEQ ID NO: 363987 - DNA, 15 bp, Homo sapiens
tatcccatggctctc

SEQ ID NO: 363988 - DNA, 15 bp, Homo sapiens
ctatcccatggctct

SEQ ID NO: 363989 - DNA, 15 bp, Homo sapiens
cctatcccatggctc

SEQ ID NO: 363990 - DNA, 15 bp, Homo sapiens
ccctatcccatggct

SEQ ID NO: 363991 - DNA, 15 bp, Homo sapiens
gccctatcccatggc

SEQ ID NO: 363992 - DNA, 15 bp, Homo sapiens
agccctatcccatgg

SEQ ID NO: 363993 - DNA, 15 bp, Homo sapiens
cagccctatcccatg

SEQ ID NO: 363994 - DNA, 15 bp, Homo sapiens
ccagccctatcccat

SEQ ID NO: 363995 - DNA, 15 bp, Homo sapiens
tccagccctatccca

SEQ ID NO: 363996 - DNA, 15 bp, Homo sapiens
gtccagccctatccc

SEQ ID NO: 363997 - DNA, 15 bp, Homo sapiens
agtccagccctatcc

SEQ ID NO: 363998 - DNA, 15 bp, Homo sapiens
gagtccagccctatc

SEQ ID NO: 363999 - DNA, 15 bp, Homo sapiens
agagtccagccctat

SEQ ID NO: 364000 - DNA, 15 bp, Homo sapiens
aagagtccagcccta

SEQ ID NO: 364001 - DNA, 15 bp, Homo sapiens
caagagtccagccct

SEQ ID NO: 364002 - DNA, 15 bp, Homo sapiens
ccaagagtccagccc

SEQ ID NO: 364003 - DNA, 15 bp, Homo sapiens
cccaagagtccagcc

SEQ ID NO: 364004 - DNA, 15 bp, Homo sapiens
tcccaagagtccagc

SEQ ID NO: 364005 - DNA, 15 bp, Homo sapiens
ttcccaagagtccag

SEQ ID NO: 364006 - DNA, 15 bp, Homo sapiens
attcccaagagtcca

SEQ ID NO: 364007 - DNA, 15 bp, Homo sapiens
tattcccaagagtcc

SEQ ID NO: 364008 - DNA, 15 bp, Homo sapiens
ctattcccaagagtc

SEQ ID NO: 364009 - DNA, 15 bp, Homo sapiens
gctattcccaagagt

SEQ ID NO: 364010 - DNA, 15 bp, Homo sapiens
ggctattcccaagag

SEQ ID NO: 364011 - DNA, 15 bp, Homo sapiens
gggctattcccaaga

SEQ ID NO: 364012 - DNA, 15 bp, Homo sapiens
tgggctattcccaag

SEQ ID NO: 364013 - DNA, 15 bp, Homo sapiens
ctgggctattcccaa

SEQ ID NO: 364014 - DNA, 15 bp, Homo sapiens
gctgggctattccca

SEQ ID NO: 364015 - DNA, 15 bp, Homo sapiens
agctgggctattccc

SEQ ID NO: 364016 - DNA, 15 bp, Homo sapiens
gagctgggctattcc

SEQ ID NO: 364017 - DNA, 15 bp, Homo sapiens
tgagctgggctattc

SEQ ID NO: 364018 - DNA, 15 bp, Homo sapiens
gtgagctgggctatt

SEQ ID NO: 364019 - DNA, 15 bp, Homo sapiens
agtgagctgggctat

SEQ ID NO: 364020 - DNA, 15 bp, Homo sapiens
cagtgagctgggcta

SEQ ID NO: 364021 - DNA, 15 bp, Homo sapiens
ccagtgagctgggct

SEQ ID NO: 364022 - DNA, 15 bp, Homo sapiens
cccagtgagctgggc

SEQ ID NO: 364023 - DNA, 15 bp, Homo sapiens
acccagtgagctggg

SEQ ID NO: 364024 - DNA, 15 bp, Homo sapiens
cacccagtgagctgg

SEQ ID NO: 364025 - DNA, 15 bp, Homo sapiens
ccacccagtgagctg

SEQ ID NO: 364026 - DNA, 15 bp, Homo sapiens
gccacccagtgagct

SEQ ID NO: 364027 - DNA, 15 bp, Homo sapiens
ggccacccagtgagc

SEQ ID NO: 364028 - DNA, 15 bp, Homo sapiens
gggccacccagtgag

SEQ ID NO: 364029 - DNA, 15 bp, Homo sapiens
agggccacccagtga

SEQ ID NO: 364030 - DNA, 15 bp, Homo sapiens
aagggccacccagtg

SEQ ID NO: 364031 - DNA, 15 bp, Homo sapiens
aaagggccacccagt

SEQ ID NO: 364032 - DNA, 15 bp, Homo sapiens
caaagggccacccag

SEQ ID NO: 364033 - DNA, 15 bp, Homo sapiens
tcaaagggccaccca

SEQ ID NO: 364034 - DNA, 15 bp, Homo sapiens
ctcaaagggccaccc

SEQ ID NO: 364035 - DNA, 15 bp, Homo sapiens
gctcaaagggccacc

SEQ ID NO: 364036 - DNA, 15 bp, Homo sapiens
agctcaaagggccac

SEQ ID NO: 364037 - DNA, 15 bp, Homo sapiens
tagctcaaagggcca

SEQ ID NO: 364038 - DNA, 15 bp, Homo sapiens
ctagctcaaagggcc

SEQ ID NO: 364039 - DNA, 15 bp, Homo sapiens
actagctcaaagggc

SEQ ID NO: 364040 - DNA, 15 bp, Homo sapiens
gactagctcaaaggg

SEQ ID NO: 364041 - DNA, 15 bp, Homo sapiens
tgactagctcaaagg

SEQ ID NO: 364042 - DNA, 15 bp, Homo sapiens
ctgactagctcaaag

SEQ ID NO: 364043 - DNA, 15 bp, Homo sapiens
actgactagctcaaa

SEQ ID NO: 364044 - DNA, 15 bp, Homo sapiens
cactgactagctcaa

SEQ ID NO: 364045 - DNA, 15 bp, Homo sapiens
tcactgactagctca

SEQ ID NO: 364046 - DNA, 15 bp, Homo sapiens
gtcactgactagctc

SEQ ID NO: 364047 - DNA, 15 bp, Homo sapiens
cgtcactgactagct

SEQ ID NO: 364048 - DNA, 15 bp, Homo sapiens
gcgtcactgactagc

SEQ ID NO: 364049 - DNA, 15 bp, Homo sapiens
ggcgtcactgactag

SEQ ID NO: 364050 - DNA, 15 bp, Homo sapiens
aggcgtcactgacta

SEQ ID NO: 364051 - DNA, 15 bp, Homo sapiens
gaggcgtcactgact

SEQ ID NO: 364052 - DNA, 15 bp, Homo sapiens
tgaggcgtcactgac

SEQ ID NO: 364053 - DNA, 15 bp, Homo sapiens
ctgaggcgtcactga

SEQ ID NO: 364054 - DNA, 15 bp, Homo sapiens
actgaggcgtcactg

SEQ ID NO: 364055 - DNA, 15 bp, Homo sapiens
aactgaggcgtcact

SEQ ID NO: 364056 - DNA, 15 bp, Homo sapiens
aaactgaggcgtcac

SEQ ID NO: 364057 - DNA, 15 bp, Homo sapiens
taaactgaggcgtca

SEQ ID NO: 364058 - DNA, 15 bp, Homo sapiens
gtaaactgaggcgtc

SEQ ID NO: 364059 - DNA, 15 bp, Homo sapiens
ggtaaactgaggcgt

SEQ ID NO: 364060 - DNA, 15 bp, Homo sapiens
aggtaaactgaggcg

SEQ ID NO: 364061 - DNA, 15 bp, Homo sapiens
caggtaaactgaggc

SEQ ID NO: 364062 - DNA, 15 bp, Homo sapiens
ccaggtaaactgagg

SEQ ID NO: 364063 - DNA, 15 bp, Homo sapiens
gccaggtaaactgag

SEQ ID NO: 364064 - DNA, 15 bp, Homo sapiens
agccaggtaaactga

SEQ ID NO: 364065 - DNA, 15 bp, Homo sapiens
cagccaggtaaactg

SEQ ID NO: 364066 - DNA, 15 bp, Homo sapiens
gcagccaggtaaact

SEQ ID NO: 364067 - DNA, 15 bp, Homo sapiens
ggcagccaggtaaac

SEQ ID NO: 364068 - DNA, 15 bp, Homo sapiens
aggcagccaggtaaa

SEQ ID NO: 364069 - DNA, 15 bp, Homo sapiens
taggcagccaggtaa

SEQ ID NO: 364070 - DNA, 15 bp, Homo sapiens
ataggcagccaggta

SEQ ID NO: 364071 - DNA, 15 bp, Homo sapiens
cataggcagccaggt

SEQ ID NO: 364072 - DNA, 15 bp, Homo sapiens
ccataggcagccagg

SEQ ID NO: 364073 - DNA, 15 bp, Homo sapiens
tccataggcagccag

SEQ ID NO: 364074 - DNA, 15 bp, Homo sapiens
ttccataggcagcca

SEQ ID NO: 364075 - DNA, 15 bp, Homo sapiens
gttccataggcagcc

SEQ ID NO: 364076 - DNA, 15 bp, Homo sapiens
tgttccataggcagc

SEQ ID NO: 364077 - DNA, 15 bp, Homo sapiens
ctgttccataggcag

SEQ ID NO: 364078 - DNA, 15 bp, Homo sapiens
cctgttccataggca

SEQ ID NO: 364079 - DNA, 15 bp, Homo sapiens
acctgttccataggc

SEQ ID NO: 364080 - DNA, 15 bp, Homo sapiens
tacctgttccatagg

SEQ ID NO: 364081 - DNA, 15 bp, Homo sapiens
atacctgttccatag

SEQ ID NO: 364082 - DNA, 15 bp, Homo sapiens
tatacctgttccata

SEQ ID NO: 364083 - DNA, 15 bp, Homo sapiens
gtatacctgttccat

SEQ ID NO: 364084 - DNA, 15 bp, Homo sapiens
agtatacctgttcca

SEQ ID NO: 364085 - DNA, 15 bp, Homo sapiens
aagtatacctgttcc

SEQ ID NO: 364086 - DNA, 15 bp, Homo sapiens
aaagtatacctgttc

SEQ ID NO: 364087 - DNA, 15 bp, Homo sapiens
caaagtatacctgtt

SEQ ID NO: 364088 - DNA, 15 bp, Homo sapiens
gcaaagtatacctgt

SEQ ID NO: 364089 - DNA, 15 bp, Homo sapiens
agcaaagtatacctg

SEQ ID NO: 364090 - DNA, 15 bp, Homo sapiens
aagcaaagtatacct

SEQ ID NO: 364091 - DNA, 15 bp, Homo sapiens
gaagcaaagtatacc

SEQ ID NO: 364092 - DNA, 15 bp, Homo sapiens
agaagcaaagtatac

SEQ ID NO: 364093 - DNA, 15 bp, Homo sapiens
aagaagcaaagtata

SEQ ID NO: 364094 - DNA, 15 bp, Homo sapiens
gaagaagcaaagtat

SEQ ID NO: 364095 - DNA, 15 bp, Homo sapiens
tgaagaagcaaagta

SEQ ID NO: 364096 - DNA, 15 bp, Homo sapiens
gtgaagaagcaaagt

SEQ ID NO: 364097 - DNA, 15 bp, Homo sapiens
tgtgaagaagcaaag

SEQ ID NO: 364098 - DNA, 15 bp, Homo sapiens
ctgtgaagaagcaaa

SEQ ID NO: 364099 - DNA, 15 bp, Homo sapiens
cctgtgaagaagcaa

SEQ ID NO: 364100 - DNA, 15 bp, Homo sapiens
ccctgtgaagaagca

SEQ ID NO: 364101 - DNA, 15 bp, Homo sapiens
cccctgtgaagaagc

SEQ ID NO: 364102 - DNA, 15 bp, Homo sapiens
acccctgtgaagaag

SEQ ID NO: 364103 - DNA, 15 bp, Homo sapiens
cacccctgtgaagaa

SEQ ID NO: 364104 - DNA, 15 bp, Homo sapiens
ccacccctgtgaaga

SEQ ID NO: 364105 - DNA, 15 bp, Homo sapiens
accacccctgtgaag

SEQ ID NO: 364106 - DNA, 15 bp, Homo sapiens
taccacccctgtgaa

SEQ ID NO: 364107 - DNA, 15 bp, Homo sapiens
ctaccacccctgtga

SEQ ID NO: 364108 - DNA, 15 bp, Homo sapiens
cctaccacccctgtg

SEQ ID NO: 364109 - DNA, 15 bp, Homo sapiens
ccctaccacccctgt

SEQ ID NO: 364110 - DNA, 15 bp, Homo sapiens
tccctaccacccctg

SEQ ID NO: 364111 - DNA, 15 bp, Homo sapiens
ctccctaccacccct

SEQ ID NO: 364112 - DNA, 15 bp, Homo sapiens
cctccctaccacccc

SEQ ID NO: 364113 - DNA, 15 bp, Homo sapiens
gcctccctaccaccc

SEQ ID NO: 364114 - DNA, 15 bp, Homo sapiens
agcctccctaccacc

SEQ ID NO: 364115 - DNA, 15 bp, Homo sapiens
aagcctccctaccac

SEQ ID NO: 364116 - DNA, 15 bp, Homo sapiens
taagcctccctacca

SEQ ID NO: 364117 - DNA, 15 bp, Homo sapiens
ttaagcctccctacc

SEQ ID NO: 364118 - DNA, 15 bp, Homo sapiens
attaagcctccctac

SEQ ID NO: 364119 - DNA, 15 bp, Homo sapiens
aattaagcctcccta

SEQ ID NO: 364120 - DNA, 15 bp, Homo sapiens
taattaagcctccct

SEQ ID NO: 364121 - DNA, 15 bp, Homo sapiens
ttaattaagcctccc

SEQ ID NO: 364122 - DNA, 15 bp, Homo sapiens
gttaattaagcctcc

SEQ ID NO: 364123 - DNA, 15 bp, Homo sapiens
cgttaattaagcctc

SEQ ID NO: 364124 - DNA, 15 bp, Homo sapiens
acgttaattaagcct

SEQ ID NO: 364125 - DNA, 15 bp, Homo sapiens
aacgttaattaagcc

SEQ ID NO: 364126 - DNA, 15 bp, Homo sapiens
aaacgttaattaagc

SEQ ID NO: 364127 - DNA, 15 bp, Homo sapiens
caaacgttaattaag

SEQ ID NO: 364128 - DNA, 15 bp, Homo sapiens
acaaacgttaattaa

SEQ ID NO: 364129 - DNA, 15 bp, Homo sapiens
tacaaacgttaatta

SEQ ID NO: 364130 - DNA, 15 bp, Homo sapiens
ttacaaacgttaatt

SEQ ID NO: 364131 - DNA, 15 bp, Homo sapiens
tttacaaacgttaat

SEQ ID NO: 364132 - DNA, 15 bp, Homo sapiens
atttacaaacgttaa

SEQ ID NO: 364133 - DNA, 15 bp, Homo sapiens
gatttacaaacgtta

SEQ ID NO: 364134 - DNA, 15 bp, Homo sapiens
ggatttacaaacgtt

SEQ ID NO: 364135 - DNA, 15 bp, Homo sapiens
gggatttacaaacgt

SEQ ID NO: 364136 - DNA, 15 bp, Homo sapiens
agggatttacaaacg

SEQ ID NO: 364137 - DNA, 15 bp, Homo sapiens
gagggatttacaaac

SEQ ID NO: 364138 - DNA, 15 bp, Homo sapiens
agagggatttacaaa

SEQ ID NO: 364139 - DNA, 15 bp, Homo sapiens
aagagggatttacaa

SEQ ID NO: 364140 - DNA, 15 bp, Homo sapiens
caagagggatttaca

SEQ ID NO: 364141 - DNA, 15 bp, Homo sapiens
tcaagagggatttac

SEQ ID NO: 364142 - DNA, 15 bp, Homo sapiens
ctcaagagggattta

SEQ ID NO: 364143 - DNA, 15 bp, Homo sapiens
tctcaagagggattt

SEQ ID NO: 364144 - DNA, 15 bp, Homo sapiens
atctcaagagggatt

SEQ ID NO: 364145 - DNA, 15 bp, Homo sapiens
gatctcaagagggat

SEQ ID NO: 364146 - DNA, 15 bp, Homo sapiens
tgatctcaagaggga

SEQ ID NO: 364147 - DNA, 15 bp, Homo sapiens
ttgatctcaagaggg

SEQ ID NO: 364148 - DNA, 15 bp, Homo sapiens
tttgatctcaagagg

SEQ ID NO: 364149 - DNA, 15 bp, Homo sapiens
ctttgatctcaagag

SEQ ID NO: 364150 - DNA, 15 bp, Homo sapiens
gctttgatctcaaga

SEQ ID NO: 364151 - DNA, 15 bp, Homo sapiens
ggctttgatctcaag

SEQ ID NO: 364152 - DNA, 15 bp, Homo sapiens
tggctttgatctcaa

SEQ ID NO: 364153 - DNA, 15 bp, Homo sapiens
gtggctttgatctca

SEQ ID NO: 364154 - DNA, 15 bp, Homo sapiens
agtggctttgatctc

SEQ ID NO: 364155 - DNA, 15 bp, Homo sapiens
cagtggctttgatct

SEQ ID NO: 364156 - DNA, 15 bp, Homo sapiens
gcagtggctttgatc

SEQ ID NO: 364157 - DNA, 15 bp, Homo sapiens
tgcagtggctttgat

SEQ ID NO: 364158 - DNA, 15 bp, Homo sapiens
ctgcagtggctttga

SEQ ID NO: 364159 - DNA, 15 bp, Homo sapiens
tctgcagtggctttg

SEQ ID NO: 364160 - DNA, 15 bp, Homo sapiens
ttctgcagtggcttt

SEQ ID NO: 364161 - DNA, 15 bp, Homo sapiens
cttctgcagtggctt

SEQ ID NO: 364162 - DNA, 15 bp, Homo sapiens
ccttctgcagtggct

SEQ ID NO: 364163 - DNA, 15 bp, Homo sapiens
cccttctgcagtggc

SEQ ID NO: 364164 - DNA, 15 bp, Homo sapiens
gcccttctgcagtgg

SEQ ID NO: 364165 - DNA, 15 bp, Homo sapiens
tgcccttctgcagtg

SEQ ID NO: 364166 - DNA, 15 bp, Homo sapiens
ctgcccttctgcagt

SEQ ID NO: 364167 - DNA, 15 bp, Homo sapiens
tctgcccttctgcag

SEQ ID NO: 364168 - DNA, 15 bp, Homo sapiens
ctctgcccttctgca

SEQ ID NO: 364169 - DNA, 15 bp, Homo sapiens
gctctgcccttctgc

SEQ ID NO: 364170 - DNA, 15 bp, Homo sapiens
tgctctgcccttctg

SEQ ID NO: 364171 - DNA, 15 bp, Homo sapiens
gtgctctgcccttct

SEQ ID NO: 364172 - DNA, 15 bp, Homo sapiens
ggtgctctgcccttc

SEQ ID NO: 364173 - DNA, 15 bp, Homo sapiens
tggtgctctgccctt

SEQ ID NO: 364174 - DNA, 15 bp, Homo sapiens
atggtgctctgccct

SEQ ID NO: 364175 - DNA, 15 bp, Homo sapiens
aatggtgctctgccc

SEQ ID NO: 364176 - DNA, 15 bp, Homo sapiens
aaatggtgctctgcc

SEQ ID NO: 364177 - DNA, 15 bp, Homo sapiens
gaaatggtgctctgc

SEQ ID NO: 364178 - DNA, 15 bp, Homo sapiens
tgaaatggtgctctg

SEQ ID NO: 364179 - DNA, 15 bp, Homo sapiens
gtgaaatggtgctct

SEQ ID NO: 364180 - DNA, 15 bp, Homo sapiens
tgtgaaatggtgctc

SEQ ID NO: 364181 - DNA, 15 bp, Homo sapiens
ttgtgaaatggtgct

SEQ ID NO: 364182 - DNA, 15 bp, Homo sapiens
tttgtgaaatggtgc

SEQ ID NO: 364183 - DNA, 15 bp, Homo sapiens
ttttgtgaaatggtg

SEQ ID NO: 364184 - DNA, 15 bp, Homo sapiens
tttttgtgaaatggt

SEQ ID NO: 364185 - DNA, 15 bp, Homo sapiens
atttttgtgaaatgg

SEQ ID NO: 364186 - DNA, 15 bp, Homo sapiens
catttttgtgaaatg

SEQ ID NO: 364187 - DNA, 15 bp, Homo sapiens
gcatttttgtgaaat

SEQ ID NO: 364188 - DNA, 15 bp, Homo sapiens
agcatttttgtgaaa

SEQ ID NO: 364189 - DNA, 15 bp, Homo sapiens
aagcatttttgtgaa

SEQ ID NO: 364190 - DNA, 15 bp, Homo sapiens
caagcatttttgtga

SEQ ID NO: 364191 - DNA, 15 bp, Homo sapiens
acaagcatttttgtg

SEQ ID NO: 364192 - DNA, 15 bp, Homo sapiens
cacaagcatttttgt

SEQ ID NO: 364193 - DNA, 15 bp, Homo sapiens
ccacaagcatttttg

SEQ ID NO: 364194 - DNA, 15 bp, Homo sapiens
accacaagcattttt

SEQ ID NO: 364195 - DNA, 15 bp, Homo sapiens
aaccacaagcatttt

SEQ ID NO: 364196 - DNA, 15 bp, Homo sapiens
caaccacaagcattt

SEQ ID NO: 364197 - DNA, 15 bp, Homo sapiens
gcaaccacaagcatt

SEQ ID NO: 364198 - DNA, 15 bp, Homo sapiens
ggcaaccacaagcat

SEQ ID NO: 364199 - DNA, 15 bp, Homo sapiens
aggcaaccacaagca

SEQ ID NO: 364200 - DNA, 15 bp, Homo sapiens
caggcaaccacaagc

SEQ ID NO: 364201 - DNA, 15 bp, Homo sapiens
acaggcaaccacaag

SEQ ID NO: 364202 - DNA, 15 bp, Homo sapiens
cacaggcaaccacaa

SEQ ID NO: 364203 - DNA, 15 bp, Homo sapiens
acacaggcaaccaca

SEQ ID NO: 364204 - DNA, 15 bp, Homo sapiens
cacacaggcaaccac

SEQ ID NO: 364205 - DNA, 15 bp, Homo sapiens
ccacacaggcaacca

SEQ ID NO: 364206 - DNA, 15 bp, Homo sapiens
tccacacaggcaacc

SEQ ID NO: 364207 - DNA, 15 bp, Homo sapiens
ctccacacaggcaac

SEQ ID NO: 364208 - DNA, 15 bp, Homo sapiens
gctccacacaggcaa

SEQ ID NO: 364209 - DNA, 15 bp, Homo sapiens
agctccacacaggca

SEQ ID NO: 364210 - DNA, 15 bp, Homo sapiens
cagctccacacaggc

SEQ ID NO: 364211 - DNA, 15 bp, Homo sapiens
ccagctccacacagg

SEQ ID NO: 364212 - DNA, 15 bp, Homo sapiens
gccagctccacacag

SEQ ID NO: 364213 - DNA, 15 bp, Homo sapiens
agccagctccacaca

SEQ ID NO: 364214 - DNA, 15 bp, Homo sapiens
aagccagctccacac

SEQ ID NO: 364215 - DNA, 15 bp, Homo sapiens
taagccagctccaca

SEQ ID NO: 364216 - DNA, 15 bp, Homo sapiens
gtaagccagctccac

SEQ ID NO: 364217 - DNA, 15 bp, Homo sapiens
ggtaagccagctcca

SEQ ID NO: 364218 - DNA, 15 bp, Homo sapiens
aggtaagccagctcc

SEQ ID NO: 364219 - DNA, 15 bp, Homo sapiens
aaggtaagccagctc

SEQ ID NO: 364220 - DNA, 15 bp, Homo sapiens
aaaggtaagccagct

SEQ ID NO: 364221 - DNA, 15 bp, Homo sapiens
caaaggtaagccagc

SEQ ID NO: 364222 - DNA, 15 bp, Homo sapiens
tcaaaggtaagccag

SEQ ID NO: 364223 - DNA, 15 bp, Homo sapiens
atcaaaggtaagcca

SEQ ID NO: 364224 - DNA, 15 bp, Homo sapiens
gatcaaaggtaagcc

SEQ ID NO: 364225 - DNA, 15 bp, Homo sapiens
agatcaaaggtaagc

SEQ ID NO: 364226 - DNA, 15 bp, Homo sapiens
cagatcaaaggtaag

SEQ ID NO: 364227 - DNA, 15 bp, Homo sapiens
tcagatcaaaggtaa

SEQ ID NO: 364228 - DNA, 15 bp, Homo sapiens
ctcagatcaaaggta

SEQ ID NO: 364229 - DNA, 15 bp, Homo sapiens
tctcagatcaaaggt

SEQ ID NO: 364230 - DNA, 15 bp, Homo sapiens
atctcagatcaaagg

SEQ ID NO: 364231 - DNA, 15 bp, Homo sapiens
catctcagatcaaag

SEQ ID NO: 364232 - DNA, 15 bp, Homo sapiens
ccatctcagatcaaa

SEQ ID NO: 364233 - DNA, 15 bp, Homo sapiens
cccatctcagatcaa

SEQ ID NO: 364234 - DNA, 15 bp, Homo sapiens
gcccatctcagatca

SEQ ID NO: 364235 - DNA, 15 bp, Homo sapiens
agcccatctcagatc

SEQ ID NO: 364236 - DNA, 15 bp, Homo sapiens
cagcccatctcagat

SEQ ID NO: 364237 - DNA, 15 bp, Homo sapiens
tcagcccatctcaga

SEQ ID NO: 364238 - DNA, 15 bp, Homo sapiens
gtcagcccatctcag

SEQ ID NO: 364239 - DNA, 15 bp, Homo sapiens
tgtcagcccatctca

SEQ ID NO: 364240 - DNA, 15 bp, Homo sapiens
gtgtcagcccatctc

SEQ ID NO: 364241 - DNA, 15 bp, Homo sapiens
ggtgtcagcccatct

SEQ ID NO: 364242 - DNA, 15 bp, Homo sapiens
gggtgtcagcccatc

SEQ ID NO: 364243 - DNA, 15 bp, Homo sapiens
agggtgtcagcccat

SEQ ID NO: 364244 - DNA, 15 bp, Homo sapiens
cagggtgtcagccca

SEQ ID NO: 364245 - DNA, 15 bp, Homo sapiens
tcagggtgtcagccc

SEQ ID NO: 364246 - DNA, 15 bp, Homo sapiens
ttcagggtgtcagcc

SEQ ID NO: 364247 - DNA, 15 bp, Homo sapiens
attcagggtgtcagc

SEQ ID NO: 364248 - DNA, 15 bp, Homo sapiens
cattcagggtgtcag

SEQ ID NO: 364249 - DNA, 15 bp, Homo sapiens
acattcagggtgtca

SEQ ID NO: 364250 - DNA, 15 bp, Homo sapiens
cacattcagggtgtc

SEQ ID NO: 364251 - DNA, 15 bp, Homo sapiens
ccacattcagggtgt

SEQ ID NO: 364252 - DNA, 15 bp, Homo sapiens
accacattcagggtg

SEQ ID NO: 364253 - DNA, 15 bp, Homo sapiens
gaccacattcagggt

SEQ ID NO: 364254 - DNA, 15 bp, Homo sapiens
agaccacattcaggg

SEQ ID NO: 364255 - DNA, 15 bp, Homo sapiens
gagaccacattcagg

SEQ ID NO: 364256 - DNA, 15 bp, Homo sapiens
tgagaccacattcag

SEQ ID NO: 364257 - DNA, 15 bp, Homo sapiens
ctgagaccacattca

SEQ ID NO: 364258 - DNA, 15 bp, Homo sapiens
gctgagaccacattc

SEQ ID NO: 364259 - DNA, 15 bp, Homo sapiens
agctgagaccacatt

SEQ ID NO: 364260 - DNA, 15 bp, Homo sapiens
gagctgagaccacat

SEQ ID NO: 364261 - DNA, 15 bp, Homo sapiens
agagctgagaccaca

SEQ ID NO: 364262 - DNA, 15 bp, Homo sapiens
cagagctgagaccac

SEQ ID NO: 364263 - DNA, 15 bp, Homo sapiens
gcagagctgagacca

SEQ ID NO: 364264 - DNA, 15 bp, Homo sapiens
agcagagctgagacc

SEQ ID NO: 364265 - DNA, 15 bp, Homo sapiens
gagcagagctgagac

SEQ ID NO: 364266 - DNA, 15 bp, Homo sapiens
agagcagagctgaga

SEQ ID NO: 364267 - DNA, 15 bp, Homo sapiens
cagagcagagctgag

SEQ ID NO: 364268 - DNA, 15 bp, Homo sapiens
tcagagcagagctga

SEQ ID NO: 364269 - DNA, 15 bp, Homo sapiens
ctcagagcagagctg

SEQ ID NO: 364270 - DNA, 15 bp, Homo sapiens
tctcagagcagagct

SEQ ID NO: 364271 - DNA, 15 bp, Homo sapiens
atctcagagcagagc

SEQ ID NO: 364272 - DNA, 15 bp, Homo sapiens
catctcagagcagag

SEQ ID NO: 364273 - DNA, 15 bp, Homo sapiens
gcatctcagagcaga

SEQ ID NO: 364274 - DNA, 15 bp, Homo sapiens
ggcatctcagagcag

SEQ ID NO: 364275 - DNA, 15 bp, Homo sapiens
gggcatctcagagca

SEQ ID NO: 364276 - DNA, 15 bp, Homo sapiens
cgggcatctcagagc

SEQ ID NO: 364277 - DNA, 15 bp, Homo sapiens
ccgggcatctcagag

SEQ ID NO: 364278 - DNA, 15 bp, Homo sapiens
gccgggcatctcaga

SEQ ID NO: 364279 - DNA, 15 bp, Homo sapiens
agccgggcatctcag

SEQ ID NO: 364280 - DNA, 15 bp, Homo sapiens
aagccgggcatctca

SEQ ID NO: 364281 - DNA, 15 bp, Homo sapiens
aaagccgggcatctc

SEQ ID NO: 364282 - DNA, 15 bp, Homo sapiens
aaaagccgggcatct

SEQ ID NO: 364283 - DNA, 15 bp, Homo sapiens
gaaaagccgggcatc

SEQ ID NO: 364284 - DNA, 15 bp, Homo sapiens
ggaaaagccgggcat

SEQ ID NO: 364285 - DNA, 15 bp, Homo sapiens
aggaaaagccgggca

SEQ ID NO: 364286 - DNA, 15 bp, Homo sapiens
aaggaaaagccgggc

SEQ ID NO: 364287 - DNA, 15 bp, Homo sapiens
aaaggaaaagccggg

SEQ ID NO: 364288 - DNA, 15 bp, Homo sapiens
caaaggaaaagccgg

SEQ ID NO: 364289 - DNA, 15 bp, Homo sapiens
tcaaaggaaaagccg

SEQ ID NO: 364290 - DNA, 15 bp, Homo sapiens
ttcaaaggaaaagcc

SEQ ID NO: 364291 - DNA, 15 bp, Homo sapiens
tttcaaaggaaaagc

SEQ ID NO: 364292 - DNA, 15 bp, Homo sapiens
gtttcaaaggaaaag

SEQ ID NO: 364293 - DNA, 15 bp, Homo sapiens
tgtttcaaaggaaaa

SEQ ID NO: 364294 - DNA, 15 bp, Homo sapiens
gtgtttcaaaggaaa

SEQ ID NO: 364295 - DNA, 15 bp, Homo sapiens
tgtgtttcaaaggaa

SEQ ID NO: 364296 - DNA, 15 bp, Homo sapiens
gtgtgtttcaaagga

SEQ ID NO: 364297 - DNA, 15 bp, Homo sapiens
ggtgtgtttcaaagg

SEQ ID NO: 364298 - DNA, 15 bp, Homo sapiens
aggtgtgtttcaaag

SEQ ID NO: 364299 - DNA, 15 bp, Homo sapiens
aaggtgtgtttcaaa

SEQ ID NO: 364300 - DNA, 15 bp, Homo sapiens
caaggtgtgtttcaa

SEQ ID NO: 364301 - DNA, 15 bp, Homo sapiens
gcaaggtgtgtttca

SEQ ID NO: 364302 - DNA, 15 bp, Homo sapiens
ggcaaggtgtgtttc

SEQ ID NO: 364303 - DNA, 15 bp, Homo sapiens
gggcaaggtgtgttt

SEQ ID NO: 364304 - DNA, 15 bp, Homo sapiens
ggggcaaggtgtgtt

SEQ ID NO: 364305 - DNA, 15 bp, Homo sapiens
aggggcaaggtgtgt

SEQ ID NO: 364306 - DNA, 15 bp, Homo sapiens
caggggcaaggtgtg

SEQ ID NO: 364307 - DNA, 15 bp, Homo sapiens
ccaggggcaaggtgt

SEQ ID NO: 364308 - DNA, 15 bp, Homo sapiens
cccaggggcaaggtg

SEQ ID NO: 364309 - DNA, 15 bp, Homo sapiens
tcccaggggcaaggt

SEQ ID NO: 364310 - DNA, 15 bp, Homo sapiens
atcccaggggcaagg

SEQ ID NO: 364311 - DNA, 15 bp, Homo sapiens
aatcccaggggcaag

SEQ ID NO: 364312 - DNA, 15 bp, Homo sapiens
gaatcccaggggcaa

SEQ ID NO: 364313 - DNA, 15 bp, Homo sapiens
agaatcccaggggca

SEQ ID NO: 364314 - DNA, 15 bp, Homo sapiens
cagaatcccaggggc

SEQ ID NO: 364315 - DNA, 15 bp, Homo sapiens
gcagaatcccagggg

SEQ ID NO: 364316 - DNA, 15 bp, Homo sapiens
ggcagaatcccaggg

SEQ ID NO: 364317 - DNA, 15 bp, Homo sapiens
tggcagaatcccagg

SEQ ID NO: 364318 - DNA, 15 bp, Homo sapiens
ctggcagaatcccag

SEQ ID NO: 364319 - DNA, 15 bp, Homo sapiens
gctggcagaatccca

SEQ ID NO: 364320 - DNA, 15 bp, Homo sapiens
ggctggcagaatccc

SEQ ID NO: 364321 - DNA, 15 bp, Homo sapiens
tggctggcagaatcc

SEQ ID NO: 364322 - DNA, 15 bp, Homo sapiens
ttggctggcagaatc

SEQ ID NO: 364323 - DNA, 15 bp, Homo sapiens
tttggctggcagaat

SEQ ID NO: 364324 - DNA, 15 bp, Homo sapiens
ctttggctggcagaa

SEQ ID NO: 364325 - DNA, 15 bp, Homo sapiens
cctttggctggcaga

SEQ ID NO: 364326 - DNA, 15 bp, Homo sapiens
acctttggctggcag

SEQ ID NO: 364327 - DNA, 15 bp, Homo sapiens
cacctttggctggca

SEQ ID NO: 364328 - DNA, 15 bp, Homo sapiens
ccacctttggctggc

SEQ ID NO: 364329 - DNA, 15 bp, Homo sapiens
gccacctttggctgg

SEQ ID NO: 364330 - DNA, 15 bp, Homo sapiens
cgccacctttggctg

SEQ ID NO: 364331 - DNA, 15 bp, Homo sapiens
ccgccacctttggct

SEQ ID NO: 364332 - DNA, 15 bp, Homo sapiens
cccgccacctttggc

SEQ ID NO: 364333 - DNA, 15 bp, Homo sapiens
ccccgccacctttgg

SEQ ID NO: 364334 - DNA, 15 bp, Homo sapiens
tccccgccacctttg

SEQ ID NO: 364335 - DNA, 15 bp, Homo sapiens
ctccccgccaccttt

SEQ ID NO: 364336 - DNA, 15 bp, Homo sapiens
actccccgccacctt

SEQ ID NO: 364337 - DNA, 15 bp, Homo sapiens
cactccccgccacct

SEQ ID NO: 364338 - DNA, 15 bp, Homo sapiens
ccactccccgccacc

SEQ ID NO: 364339 - DNA, 15 bp, Homo sapiens
gccactccccgccac

SEQ ID NO: 364340 - DNA, 15 bp, Homo sapiens
agccactccccgcca

SEQ ID NO: 364341 - DNA, 15 bp, Homo sapiens
cagccactccccgcc

SEQ ID NO: 364342 - DNA, 15 bp, Homo sapiens
acagccactccccgc

SEQ ID NO: 364343 - DNA, 15 bp, Homo sapiens
cacagccactccccg

SEQ ID NO: 364344 - DNA, 15 bp, Homo sapiens
ccacagccactcccc

SEQ ID NO: 364345 - DNA, 15 bp, Homo sapiens
tccacagccactccc

SEQ ID NO: 364346 - DNA, 15 bp, Homo sapiens
atccacagccactcc

SEQ ID NO: 364347 - DNA, 15 bp, Homo sapiens
tatccacagccactc

SEQ ID NO: 364348 - DNA, 15 bp, Homo sapiens
ttatccacagccact

SEQ ID NO: 364349 - DNA, 15 bp, Homo sapiens
cttatccacagccac

SEQ ID NO: 364350 - DNA, 15 bp, Homo sapiens
acttatccacagcca

SEQ ID NO: 364351 - DNA, 15 bp, Homo sapiens
gacttatccacagcc

SEQ ID NO: 364352 - DNA, 15 bp, Homo sapiens
tgacttatccacagc

SEQ ID NO: 364353 - DNA, 15 bp, Homo sapiens
atgacttatccacag

SEQ ID NO: 364354 - DNA, 15 bp, Homo sapiens
aatgacttatccaca

SEQ ID NO: 364355 - DNA, 15 bp, Homo sapiens
taatgacttatccac

SEQ ID NO: 364356 - DNA, 15 bp, Homo sapiens
ataatgacttatcca

SEQ ID NO: 364357 - DNA, 15 bp, Homo sapiens
cataatgacttatcc

SEQ ID NO: 364358 - DNA, 15 bp, Homo sapiens
acataatgacttatc

SEQ ID NO: 364359 - DNA, 15 bp, Homo sapiens
aacataatgacttat

SEQ ID NO: 364360 - DNA, 15 bp, Homo sapiens
aaacataatgactta

SEQ ID NO: 364361 - DNA, 15 bp, Homo sapiens
taaacataatgactt

SEQ ID NO: 364362 - DNA, 15 bp, Homo sapiens
ttaaacataatgact

SEQ ID NO: 364363 - DNA, 15 bp, Homo sapiens
attaaacataatgac

SEQ ID NO: 364364 - DNA, 15 bp, Homo sapiens
cattaaacataatga

SEQ ID NO: 364365 - DNA, 15 bp, Homo sapiens
acattaaacataatg

SEQ ID NO: 364366 - DNA, 15 bp, Homo sapiens
cacattaaacataat

SEQ ID NO: 364367 - DNA, 15 bp, Homo sapiens
ccacattaaacataa

SEQ ID NO: 364368 - DNA, 15 bp, Homo sapiens
cccacattaaacata

SEQ ID NO: 364369 - DNA, 15 bp, Homo sapiens
ccccacattaaacat

SEQ ID NO: 364370 - DNA, 15 bp, Homo sapiens
cccccacattaaaca

SEQ ID NO: 364371 - DNA, 15 bp, Homo sapiens
acccccacattaaac

SEQ ID NO: 364372 - DNA, 15 bp, Homo sapiens
cacccccacattaaa

SEQ ID NO: 364373 - DNA, 15 bp, Homo sapiens
acacccccacattaa

SEQ ID NO: 364374 - DNA, 15 bp, Homo sapiens
gacacccccacatta

SEQ ID NO: 364375 - DNA, 15 bp, Homo sapiens
agacacccccacatt

SEQ ID NO: 364376 - DNA, 15 bp, Homo sapiens
aagacacccccacat

SEQ ID NO: 364377 - DNA, 15 bp, Homo sapiens
gaagacacccccaca

SEQ ID NO: 364378 - DNA, 15 bp, Homo sapiens
ggaagacacccccac

SEQ ID NO: 364379 - DNA, 15 bp, Homo sapiens
tggaagacaccccca

SEQ ID NO: 364380 - DNA, 15 bp, Homo sapiens
atggaagacaccccc

SEQ ID NO: 364381 - DNA, 15 bp, Homo sapiens
gatggaagacacccc

SEQ ID NO: 364382 - DNA, 15 bp, Homo sapiens
agatggaagacaccc

SEQ ID NO: 364383 - DNA, 15 bp, Homo sapiens
cagatggaagacacc

SEQ ID NO: 364384 - DNA, 15 bp, Homo sapiens
ccagatggaagacac

SEQ ID NO: 364385 - DNA, 15 bp, Homo sapiens
cccagatggaagaca

SEQ ID NO: 364386 - DNA, 15 bp, Homo sapiens
tcccagatggaagac

SEQ ID NO: 364387 - DNA, 15 bp, Homo sapiens
ctcccagatggaaga

SEQ ID NO: 364388 - DNA, 15 bp, Homo sapiens
cctcccagatggaag

SEQ ID NO: 364389 - DNA, 15 bp, Homo sapiens
tcctcccagatggaa

SEQ ID NO: 364390 - DNA, 15 bp, Homo sapiens
ctcctcccagatgga

SEQ ID NO: 364391 - DNA, 15 bp, Homo sapiens
actcctcccagatgg

SEQ ID NO: 364392 - DNA, 15 bp, Homo sapiens
cactcctcccagatg

SEQ ID NO: 364393 - DNA, 15 bp, Homo sapiens
ccactcctcccagat

SEQ ID NO: 364394 - DNA, 15 bp, Homo sapiens
cccactcctcccaga

SEQ ID NO: 364395 - DNA, 15 bp, Homo sapiens
acccactcctcccag

SEQ ID NO: 364396 - DNA, 15 bp, Homo sapiens
cacccactcctccca

SEQ ID NO: 364397 - DNA, 15 bp, Homo sapiens
ccacccactcctccc

SEQ ID NO: 364398 - DNA, 15 bp, Homo sapiens
tccacccactcctcc

SEQ ID NO: 364399 - DNA, 15 bp, Homo sapiens
ctccacccactcctc

SEQ ID NO: 364400 - DNA, 15 bp, Homo sapiens
cctccacccactcct

SEQ ID NO: 364401 - DNA, 15 bp, Homo sapiens
tcctccacccactcc

SEQ ID NO: 364402 - DNA, 15 bp, Homo sapiens
ctcctccacccactc

SEQ ID NO: 364403 - DNA, 15 bp, Homo sapiens
tctcctccacccact

SEQ ID NO: 364404 - DNA, 15 bp, Homo sapiens
ctctcctccacccac

SEQ ID NO: 364405 - DNA, 15 bp, Homo sapiens
cctctcctccaccca

SEQ ID NO: 364406 - DNA, 15 bp, Homo sapiens
ccctctcctccaccc

SEQ ID NO: 364407 - DNA, 15 bp, Homo sapiens
accctctcctccacc

SEQ ID NO: 364408 - DNA, 15 bp, Homo sapiens
aaccctctcctccac

SEQ ID NO: 364409 - DNA, 15 bp, Homo sapiens
caaccctctcctcca

SEQ ID NO: 364410 - DNA, 15 bp, Homo sapiens
tcaaccctctcctcc

SEQ ID NO: 364411 - DNA, 15 bp, Homo sapiens
ctcaaccctctcctc

SEQ ID NO: 364412 - DNA, 15 bp, Homo sapiens
tctcaaccctctcct

SEQ ID NO: 364413 - DNA, 15 bp, Homo sapiens
ttctcaaccctctcc

SEQ ID NO: 364414 - DNA, 15 bp, Homo sapiens
cttctcaaccctctc

SEQ ID NO: 364415 - DNA, 15 bp, Homo sapiens
gcttctcaaccctct

SEQ ID NO: 364416 - DNA, 15 bp, Homo sapiens
ggcttctcaaccctc

SEQ ID NO: 364417 - DNA, 15 bp, Homo sapiens
aggcttctcaaccct

SEQ ID NO: 364418 - DNA, 15 bp, Homo sapiens
taggcttctcaaccc

SEQ ID NO: 364419 - DNA, 15 bp, Homo sapiens
ataggcttctcaacc

SEQ ID NO: 364420 - DNA, 15 bp, Homo sapiens
gataggcttctcaac

SEQ ID NO: 364421 - DNA, 15 bp, Homo sapiens
agataggcttctcaa

SEQ ID NO: 364422 - DNA, 15 bp, Homo sapiens
gagataggcttctca

SEQ ID NO: 364423 - DNA, 15 bp, Homo sapiens
agagataggcttctc

SEQ ID NO: 364424 - DNA, 15 bp, Homo sapiens
tagagataggcttct

SEQ ID NO: 364425 - DNA, 15 bp, Homo sapiens
ctagagataggcttc

SEQ ID NO: 364426 - DNA, 15 bp, Homo sapiens
tctagagataggctt

SEQ ID NO: 364427 - DNA, 15 bp, Homo sapiens
ttctagagataggct

SEQ ID NO: 364428 - DNA, 15 bp, Homo sapiens
tttctagagataggc

SEQ ID NO: 364429 - DNA, 15 bp, Homo sapiens
ttttctagagatagg

SEQ ID NO: 364430 - DNA, 15 bp, Homo sapiens
attttctagagatag

SEQ ID NO: 364431 - DNA, 15 bp, Homo sapiens
cattttctagagata

SEQ ID NO: 364432 - DNA, 15 bp, Homo sapiens
tcattttctagagat

SEQ ID NO: 364433 - DNA, 15 bp, Homo sapiens
atcattttctagaga

SEQ ID NO: 364434 - DNA, 15 bp, Homo sapiens
catcattttctagag

SEQ ID NO: 364435 - DNA, 15 bp, Homo sapiens
tcatcattttctaga

SEQ ID NO: 364436 - DNA, 15 bp, Homo sapiens
ttcatcattttctag

SEQ ID NO: 364437 - DNA, 15 bp, Homo sapiens
cttcatcattttcta

SEQ ID NO: 364438 - DNA, 15 bp, Homo sapiens
ccttcatcattttct

SEQ ID NO: 364439 - DNA, 15 bp, Homo sapiens
gccttcatcattttc

SEQ ID NO: 364440 - DNA, 15 bp, Homo sapiens
ggccttcatcatttt

SEQ ID NO: 364441 - DNA, 15 bp, Homo sapiens
tggccttcatcattt

SEQ ID NO: 364442 - DNA, 15 bp, Homo sapiens
atggccttcatcatt

SEQ ID NO: 364443 - DNA, 15 bp, Homo sapiens
gatggccttcatcat

SEQ ID NO: 364444 - DNA, 15 bp, Homo sapiens
tgatggccttcatca

SEQ ID NO: 364445 - DNA, 15 bp, Homo sapiens
ttgatggccttcatc

SEQ ID NO: 364446 - DNA, 15 bp, Homo sapiens
tttgatggccttcat

SEQ ID NO: 364447 - DNA, 15 bp, Homo sapiens
ttttgatggccttca

SEQ ID NO: 364448 - DNA, 15 bp, Homo sapiens
attttgatggccttc

SEQ ID NO: 364449 - DNA, 15 bp, Homo sapiens
cattttgatggcctt

SEQ ID NO: 364450 - DNA, 15 bp, Homo sapiens
ccattttgatggcct

SEQ ID NO: 364451 - DNA, 15 bp, Homo sapiens
accattttgatggcc

SEQ ID NO: 364452 - DNA, 15 bp, Homo sapiens
aaccattttgatggc

SEQ ID NO: 364453 - DNA, 15 bp, Homo sapiens
aaaccattttgatgg

SEQ ID NO: 364454 - DNA, 15 bp, Homo sapiens
taaaccattttgatg

SEQ ID NO: 364455 - DNA, 15 bp, Homo sapiens
ctaaaccattttgat

SEQ ID NO: 364456 - DNA, 15 bp, Homo sapiens
tctaaaccattttga

SEQ ID NO: 364457 - DNA, 15 bp, Homo sapiens
ttctaaaccattttg

SEQ ID NO: 364458 - DNA, 15 bp, Homo sapiens
tttctaaaccatttt

SEQ ID NO: 364459 - DNA, 15 bp, Homo sapiens
ctttctaaaccattt

SEQ ID NO: 364460 - DNA, 15 bp, Homo sapiens
actttctaaaccatt

SEQ ID NO: 364461 - DNA, 15 bp, Homo sapiens
cactttctaaaccat

SEQ ID NO: 364462 - DNA, 15 bp, Homo sapiens
gcactttctaaacca

SEQ ID NO: 364463 - DNA, 15 bp, Homo sapiens
tgcactttctaaacc

SEQ ID NO: 364464 - DNA, 15 bp, Homo sapiens
ctgcactttctaaac

SEQ ID NO: 364465 - DNA, 15 bp, Homo sapiens
cctgcactttctaaa

SEQ ID NO: 364466 - DNA, 15 bp, Homo sapiens
ccctgcactttctaa

SEQ ID NO: 364467 - DNA, 15 bp, Homo sapiens
accctgcactttcta

SEQ ID NO: 364468 - DNA, 15 bp, Homo sapiens
taccctgcactttct

SEQ ID NO: 364469 - DNA, 15 bp, Homo sapiens
ataccctgcactttc

SEQ ID NO: 364470 - DNA, 15 bp, Homo sapiens
tataccctgcacttt

SEQ ID NO: 364471 - DNA, 15 bp, Homo sapiens
gtataccctgcactt

SEQ ID NO: 364472 - DNA, 15 bp, Homo sapiens
tgtataccctgcact

SEQ ID NO: 364473 - DNA, 15 bp, Homo sapiens
gtgtataccctgcac

SEQ ID NO: 364474 - DNA, 15 bp, Homo sapiens
ggtgtataccctgca

SEQ ID NO: 364475 - DNA, 15 bp, Homo sapiens
tggtgtataccctgc

SEQ ID NO: 364476 - DNA, 15 bp, Homo sapiens
atggtgtataccctg

SEQ ID NO: 364477 - DNA, 15 bp, Homo sapiens
aatggtgtataccct

SEQ ID NO: 364478 - DNA, 15 bp, Homo sapiens
aaatggtgtataccc

SEQ ID NO: 364479 - DNA, 15 bp, Homo sapiens
taaatggtgtatacc

SEQ ID NO: 364480 - DNA, 15 bp, Homo sapiens
ttaaatggtgtatac

SEQ ID NO: 364481 - DNA, 15 bp, Homo sapiens
gttaaatggtgtata

SEQ ID NO: 364482 - DNA, 15 bp, Homo sapiens
tgttaaatggtgtat

SEQ ID NO: 364483 - DNA, 15 bp, Homo sapiens
ttgttaaatggtgta

SEQ ID NO: 364484 - DNA, 15 bp, Homo sapiens
cttgttaaatggtgt

SEQ ID NO: 364485 - DNA, 15 bp, Homo sapiens
acttgttaaatggtg

SEQ ID NO: 364486 - DNA, 15 bp, Homo sapiens
tacttgttaaatggt

SEQ ID NO: 364487 - DNA, 15 bp, Homo sapiens
ttacttgttaaatgg

SEQ ID NO: 364488 - DNA, 15 bp, Homo sapiens
gttacttgttaaatg

SEQ ID NO: 364489 - DNA, 15 bp, Homo sapiens
agttacttgttaaat

SEQ ID NO: 364490 - DNA, 15 bp, Homo sapiens
gagttacttgttaaa

SEQ ID NO: 364491 - DNA, 15 bp, Homo sapiens
ggagttacttgttaa

SEQ ID NO: 364492 - DNA, 15 bp, Homo sapiens
tggagttacttgtta

SEQ ID NO: 364493 - DNA, 15 bp, Homo sapiens
atggagttacttgtt

SEQ ID NO: 364494 - DNA, 15 bp, Homo sapiens
aatggagttacttgt

SEQ ID NO: 364495 - DNA, 15 bp, Homo sapiens
aaatggagttacttg

SEQ ID NO: 364496 - DNA, 15 bp, Homo sapiens
gaaatggagttactt

SEQ ID NO: 364497 - DNA, 15 bp, Homo sapiens
ggaaatggagttact

SEQ ID NO: 364498 - DNA, 15 bp, Homo sapiens
aggaaatggagttac

SEQ ID NO: 364499 - DNA, 15 bp, Homo sapiens
caggaaatggagtta

SEQ ID NO: 364500 - DNA, 15 bp, Homo sapiens
gcaggaaatggagtt

SEQ ID NO: 364501 - DNA, 15 bp, Homo sapiens
ggcaggaaatggagt

SEQ ID NO: 364502 - DNA, 15 bp, Homo sapiens
aggcaggaaatggag

SEQ ID NO: 364503 - DNA, 15 bp, Homo sapiens
caggcaggaaatgga

SEQ ID NO: 364504 - DNA, 15 bp, Homo sapiens
gcaggcaggaaatgg

SEQ ID NO: 364505 - DNA, 15 bp, Homo sapiens
ggcaggcaggaaatg

SEQ ID NO: 364506 - DNA, 15 bp, Homo sapiens
aggcaggcaggaaat

SEQ ID NO: 364507 - DNA, 15 bp, Homo sapiens
gaggcaggcaggaaa

SEQ ID NO: 364508 - DNA, 15 bp, Homo sapiens
agaggcaggcaggaa

SEQ ID NO: 364509 - DNA, 15 bp, Homo sapiens
tagaggcaggcagga

SEQ ID NO: 364510 - DNA, 15 bp, Homo sapiens
atagaggcaggcagg

SEQ ID NO: 364511 - DNA, 15 bp, Homo sapiens
aatagaggcaggcag

SEQ ID NO: 364512 - DNA, 15 bp, Homo sapiens
caatagaggcaggca

SEQ ID NO: 364513 - DNA, 15 bp, Homo sapiens
acaatagaggcaggc

SEQ ID NO: 364514 - DNA, 15 bp, Homo sapiens
aacaatagaggcagg

SEQ ID NO: 364515 - DNA, 15 bp, Homo sapiens
aaacaatagaggcag

SEQ ID NO: 364516 - DNA, 15 bp, Homo sapiens
aaaacaatagaggca

SEQ ID NO: 364517 - DNA, 15 bp, Homo sapiens
gaaaacaatagaggc

SEQ ID NO: 364518 - DNA, 15 bp, Homo sapiens
agaaaacaatagagg

SEQ ID NO: 364519 - DNA, 15 bp, Homo sapiens
cagaaaacaatagag

SEQ ID NO: 364520 - DNA, 15 bp, Homo sapiens
acagaaaacaataga

SEQ ID NO: 364521 - DNA, 15 bp, Homo sapiens
aacagaaaacaatag

SEQ ID NO: 364522 - DNA, 15 bp, Homo sapiens
aaacagaaaacaata

SEQ ID NO: 364523 - DNA, 15 bp, Homo sapiens
caaacagaaaacaat

SEQ ID NO: 364524 - DNA, 15 bp, Homo sapiens
tcaaacagaaaacaa

SEQ ID NO: 364525 - DNA, 15 bp, Homo sapiens
atcaaacagaaaaca

SEQ ID NO: 364526 - DNA, 15 bp, Homo sapiens
aatcaaacagaaaac

SEQ ID NO: 364527 - DNA, 15 bp, Homo sapiens
taatcaaacagaaaa

SEQ ID NO: 364528 - DNA, 15 bp, Homo sapiens
ttaatcaaacagaaa

SEQ ID NO: 364529 - DNA, 15 bp, Homo sapiens
cttaatcaaacagaa

SEQ ID NO: 364530 - DNA, 15 bp, Homo sapiens
acttaatcaaacaga

SEQ ID NO: 364531 - DNA, 15 bp, Homo sapiens
cacttaatcaaacag

SEQ ID NO: 364532 - DNA, 15 bp, Homo sapiens
acacttaatcaaaca

SEQ ID NO: 364533 - DNA, 15 bp, Homo sapiens
tacacttaatcaaac

SEQ ID NO: 364534 - DNA, 15 bp, Homo sapiens
atacacttaatcaaa

SEQ ID NO: 364535 - DNA, 15 bp, Homo sapiens
gatacacttaatcaa

SEQ ID NO: 364536 - DNA, 15 bp, Homo sapiens
ggatacacttaatca

SEQ ID NO: 364537 - DNA, 15 bp, Homo sapiens
aggatacacttaatc

SEQ ID NO: 364538 - DNA, 15 bp, Homo sapiens
caggatacacttaat

SEQ ID NO: 364539 - DNA, 15 bp, Homo sapiens
acaggatacacttaa

SEQ ID NO: 364540 - DNA, 15 bp, Homo sapiens
tacaggatacactta

SEQ ID NO: 364541 - DNA, 15 bp, Homo sapiens
ttacaggatacactt

SEQ ID NO: 364542 - DNA, 15 bp, Homo sapiens
tttacaggatacact

SEQ ID NO: 364543 - DNA, 15 bp, Homo sapiens
ttttacaggatacac

SEQ ID NO: 364544 - DNA, 15 bp, Homo sapiens
gttttacaggataca

SEQ ID NO: 364545 - DNA, 15 bp, Homo sapiens
agttttacaggatac

SEQ ID NO: 364546 - DNA, 15 bp, Homo sapiens
cagttttacaggata

SEQ ID NO: 364547 - DNA, 15 bp, Homo sapiens
acagttttacaggat

SEQ ID NO: 364548 - DNA, 15 bp, Homo sapiens
tacagttttacagga

SEQ ID NO: 364549 - DNA, 15 bp, Homo sapiens
atacagttttacagg

SEQ ID NO: 364550 - DNA, 15 bp, Homo sapiens
tatacagttttacag

SEQ ID NO: 364551 - DNA, 15 bp, Homo sapiens
atatacagttttaca

SEQ ID NO: 364552 - DNA, 15 bp, Homo sapiens
aatatacagttttac

SEQ ID NO: 364553 - DNA, 15 bp, Homo sapiens
gaatatacagtttta

SEQ ID NO: 364554 - DNA, 15 bp, Homo sapiens
ggaatatacagtttt

SEQ ID NO: 364555 - DNA, 15 bp, Homo sapiens
aggaatatacagttt

SEQ ID NO: 364556 - DNA, 15 bp, Homo sapiens
caggaatatacagtt

SEQ ID NO: 364557 - DNA, 15 bp, Homo sapiens
acaggaatatacagt

SEQ ID NO: 364558 - DNA, 15 bp, Homo sapiens
aacaggaatatacag

SEQ ID NO: 364559 - DNA, 15 bp, Homo sapiens
taacaggaatataca

SEQ ID NO: 364560 - DNA, 15 bp, Homo sapiens
ctaacaggaatatac

SEQ ID NO: 364561 - DNA, 15 bp, Homo sapiens
cctaacaggaatata

SEQ ID NO: 364562 - DNA, 15 bp, Homo sapiens
tcctaacaggaatat

SEQ ID NO: 364563 - DNA, 15 bp, Homo sapiens
ttcctaacaggaata

SEQ ID NO: 364564 - DNA, 15 bp, Homo sapiens
attcctaacaggaat

SEQ ID NO: 364565 - DNA, 15 bp, Homo sapiens
aattcctaacaggaa

SEQ ID NO: 364566 - DNA, 15 bp, Homo sapiens
taattcctaacagga

SEQ ID NO: 364567 - DNA, 15 bp, Homo sapiens
ctaattcctaacagg

SEQ ID NO: 364568 - DNA, 15 bp, Homo sapiens
tctaattcctaacag

SEQ ID NO: 364569 - DNA, 15 bp, Homo sapiens
gtctaattcctaaca

SEQ ID NO: 364570 - DNA, 15 bp, Homo sapiens
agtctaattcctaac

SEQ ID NO: 364571 - DNA, 15 bp, Homo sapiens
aagtctaattcctaa

SEQ ID NO: 364572 - DNA, 15 bp, Homo sapiens
aaagtctaattccta

SEQ ID NO: 364573 - DNA, 15 bp, Homo sapiens
taaagtctaattcct

SEQ ID NO: 364574 - DNA, 15 bp, Homo sapiens
gtaaagtctaattcc

SEQ ID NO: 364575 - DNA, 15 bp, Homo sapiens
ggtaaagtctaattc

SEQ ID NO: 364576 - DNA, 15 bp, Homo sapiens
gggtaaagtctaatt

SEQ ID NO: 364577 - DNA, 15 bp, Homo sapiens
agggtaaagtctaat

SEQ ID NO: 364578 - DNA, 15 bp, Homo sapiens
cagggtaaagtctaa

SEQ ID NO: 364579 - DNA, 15 bp, Homo sapiens
tcagggtaaagtcta

SEQ ID NO: 364580 - DNA, 15 bp, Homo sapiens
atcagggtaaagtct

SEQ ID NO: 364581 - DNA, 15 bp, Homo sapiens
tatcagggtaaagtc

SEQ ID NO: 364582 - DNA, 15 bp, Homo sapiens
ttatcagggtaaagt

SEQ ID NO: 364583 - DNA, 15 bp, Homo sapiens
tttatcagggtaaag

SEQ ID NO: 364584 - DNA, 15 bp, Homo sapiens
ttttatcagggtaaa

SEQ ID NO: 364585 - DNA, 15 bp, Homo sapiens
attttatcagggtaa

SEQ ID NO: 364586 - DNA, 15 bp, Homo sapiens
cattttatcagggta

SEQ ID NO: 364587 - DNA, 15 bp, Homo sapiens
tcattttatcagggt

SEQ ID NO: 364588 - DNA, 15 bp, Homo sapiens
ctcattttatcaggg

SEQ ID NO: 364589 - DNA, 15 bp, Homo sapiens
tctcattttatcagg

SEQ ID NO: 364590 - DNA, 15 bp, Homo sapiens
atctcattttatcag

SEQ ID NO: 364591 - DNA, 15 bp, Homo sapiens
aatctcattttatca

SEQ ID NO: 364592 - DNA, 15 bp, Homo sapiens
taatctcattttatc

SEQ ID NO: 364593 - DNA, 15 bp, Homo sapiens
gtaatctcattttat

SEQ ID NO: 364594 - DNA, 15 bp, Homo sapiens
tgtaatctcatttta

SEQ ID NO: 364595 - DNA, 15 bp, Homo sapiens
gtgtaatctcatttt

SEQ ID NO: 364596 - DNA, 15 bp, Homo sapiens
tgtgtaatctcattt

SEQ ID NO: 364597 - DNA, 15 bp, Homo sapiens
gtgtgtaatctcatt

SEQ ID NO: 364598 - DNA, 15 bp, Homo sapiens
tgtgtgtaatctcat

SEQ ID NO: 364599 - DNA, 15 bp, Homo sapiens
gtgtgtgtaatctca

SEQ ID NO: 364600 - DNA, 15 bp, Homo sapiens
tgtgtgtgtaatctc

SEQ ID NO: 364601 - DNA, 15 bp, Homo sapiens
ctgtgtgtgtaatct

SEQ ID NO: 364602 - DNA, 15 bp, Homo sapiens
actgtgtgtgtaatc

SEQ ID NO: 364603 - DNA, 15 bp, Homo sapiens
gactgtgtgtgtaat

SEQ ID NO: 364604 - DNA, 15 bp, Homo sapiens
agactgtgtgtgtaa

SEQ ID NO: 364605 - DNA, 15 bp, Homo sapiens
aagactgtgtgtgta

SEQ ID NO: 364606 - DNA, 15 bp, Homo sapiens
gaagactgtgtgtgt

SEQ ID NO: 364607 - DNA, 15 bp, Homo sapiens
agaagactgtgtgtg

SEQ ID NO: 364608 - DNA, 15 bp, Homo sapiens
aagaagactgtgtgt

SEQ ID NO: 364609 - DNA, 15 bp, Homo sapiens
aaagaagactgtgtg

SEQ ID NO: 364610 - DNA, 15 bp, Homo sapiens
gaaagaagactgtgt

SEQ ID NO: 364611 - DNA, 15 bp, Homo sapiens
ggaaagaagactgtg

SEQ ID NO: 364612 - DNA, 15 bp, Homo sapiens
gggaaagaagactgt

SEQ ID NO: 364613 - DNA, 15 bp, Homo sapiens
ggggaaagaagactg

SEQ ID NO: 364614 - DNA, 15 bp, Homo sapiens
gggggaaagaagact

SEQ ID NO: 364615 - DNA, 15 bp, Homo sapiens
agggggaaagaagac

SEQ ID NO: 364616 - DNA, 15 bp, Homo sapiens
tagggggaaagaaga

SEQ ID NO: 364617 - DNA, 15 bp, Homo sapiens
gtagggggaaagaag

SEQ ID NO: 364618 - DNA, 15 bp, Homo sapiens
ggtagggggaaagaa

SEQ ID NO: 364619 - DNA, 15 bp, Homo sapiens
gggtagggggaaaga

SEQ ID NO: 364620 - DNA, 15 bp, Homo sapiens
tgggtagggggaaag

SEQ ID NO: 364621 - DNA, 15 bp, Homo sapiens
gtgggtagggggaaa

SEQ ID NO: 364622 - DNA, 15 bp, Homo sapiens
ggtgggtagggggaa

SEQ ID NO: 364623 - DNA, 15 bp, Homo sapiens
cggtgggtaggggga

SEQ ID NO: 364624 - DNA, 15 bp, Homo sapiens
gcggtgggtaggggg

SEQ ID NO: 364625 - DNA, 15 bp, Homo sapiens
tgcggtgggtagggg

SEQ ID NO: 364626 - DNA, 15 bp, Homo sapiens
ctgcggtgggtaggg

SEQ ID NO: 364627 - DNA, 15 bp, Homo sapiens
gctgcggtgggtagg

SEQ ID NO: 364628 - DNA, 15 bp, Homo sapiens
ggctgcggtgggtag

SEQ ID NO: 364629 - DNA, 15 bp, Homo sapiens
tggctgcggtgggta

SEQ ID NO: 364630 - DNA, 15 bp, Homo sapiens
gtggctgcggtgggt

SEQ ID NO: 364631 - DNA, 15 bp, Homo sapiens
ggtggctgcggtggg

SEQ ID NO: 364632 - DNA, 15 bp, Homo sapiens
aggtggctgcggtgg

SEQ ID NO: 364633 - DNA, 15 bp, Homo sapiens
gaggtggctgcggtg

SEQ ID NO: 364634 - DNA, 15 bp, Homo sapiens
tgaggtggctgcggt

SEQ ID NO: 364635 - DNA, 15 bp, Homo sapiens
gtgaggtggctgcgg

SEQ ID NO: 364636 - DNA, 15 bp, Homo sapiens
ggtgaggtggctgcg

SEQ ID NO: 364637 - DNA, 15 bp, Homo sapiens
gggtgaggtggctgc

SEQ ID NO: 364638 - DNA, 15 bp, Homo sapiens
ggggtgaggtggctg

SEQ ID NO: 364639 - DNA, 15 bp, Homo sapiens
gggggtgaggtggct

SEQ ID NO: 364640 - DNA, 15 bp, Homo sapiens
tgggggtgaggtggc

SEQ ID NO: 364641 - DNA, 15 bp, Homo sapiens
gtgggggtgaggtgg

SEQ ID NO: 364642 - DNA, 15 bp, Homo sapiens
cgtgggggtgaggtg

SEQ ID NO: 364643 - DNA, 15 bp, Homo sapiens
gcgtgggggtgaggt

SEQ ID NO: 364644 - DNA, 15 bp, Homo sapiens
ggcgtgggggtgagg

SEQ ID NO: 364645 - DNA, 15 bp, Homo sapiens
aggcgtgggggtgag

SEQ ID NO: 364646 - DNA, 15 bp, Homo sapiens
caggcgtgggggtga

SEQ ID NO: 364647 - DNA, 15 bp, Homo sapiens
gcaggcgtgggggtg

SEQ ID NO: 364648 - DNA, 15 bp, Homo sapiens
ggcaggcgtgggggt

SEQ ID NO: 364649 - DNA, 15 bp, Homo sapiens
aggcaggcgtggggg

SEQ ID NO: 364650 - DNA, 15 bp, Homo sapiens
gaggcaggcgtgggg

SEQ ID NO: 364651 - DNA, 15 bp, Homo sapiens
ggaggcaggcgtggg

SEQ ID NO: 364652 - DNA, 15 bp, Homo sapiens
tggaggcaggcgtgg

SEQ ID NO: 364653 - DNA, 15 bp, Homo sapiens
gtggaggcaggcgtg

SEQ ID NO: 364654 - DNA, 15 bp, Homo sapiens
agtggaggcaggcgt

SEQ ID NO: 364655 - DNA, 15 bp, Homo sapiens
aagtggaggcaggcg

SEQ ID NO: 364656 - DNA, 15 bp, Homo sapiens
gaagtggaggcaggc

SEQ ID NO: 364657 - DNA, 15 bp, Homo sapiens
agaagtggaggcagg

SEQ ID NO: 364658 - DNA, 15 bp, Homo sapiens
cagaagtggaggcag

SEQ ID NO: 364659 - DNA, 15 bp, Homo sapiens
gcagaagtggaggca

SEQ ID NO: 364660 - DNA, 15 bp, Homo sapiens
ggcagaagtggaggc

SEQ ID NO: 364661 - DNA, 15 bp, Homo sapiens
gggcagaagtggagg

SEQ ID NO: 364662 - DNA, 15 bp, Homo sapiens
ggggcagaagtggag

SEQ ID NO: 364663 - DNA, 15 bp, Homo sapiens
aggggcagaagtgga

SEQ ID NO: 364664 - DNA, 15 bp, Homo sapiens
gaggggcagaagtgg

SEQ ID NO: 364665 - DNA, 15 bp, Homo sapiens
cgaggggcagaagtg

SEQ ID NO: 364666 - DNA, 15 bp, Homo sapiens
gcgaggggcagaagt

SEQ ID NO: 364667 - DNA, 15 bp, Homo sapiens
ggcgaggggcagaag

SEQ ID NO: 364668 - DNA, 15 bp, Homo sapiens
gggcgaggggcagaa

SEQ ID NO: 364669 - DNA, 15 bp, Homo sapiens
cgggcgaggggcaga

SEQ ID NO: 364670 - DNA, 15 bp, Homo sapiens
gcgggcgaggggcag

SEQ ID NO: 364671 - DNA, 15 bp, Homo sapiens
agcgggcgaggggca

SEQ ID NO: 364672 - DNA, 15 bp, Homo sapiens
aagcgggcgaggggc

SEQ ID NO: 364673 - DNA, 15 bp, Homo sapiens
taagcgggcgagggg

SEQ ID NO: 364674 - DNA, 15 bp, Homo sapiens
ctaagcgggcgaggg

SEQ ID NO: 364675 - DNA, 15 bp, Homo sapiens
cctaagcgggcgagg

SEQ ID NO: 364676 - DNA, 15 bp, Homo sapiens
tcctaagcgggcgag

SEQ ID NO: 364677 - DNA, 15 bp, Homo sapiens
ctcctaagcgggcga

SEQ ID NO: 364678 - DNA, 15 bp, Homo sapiens
tctcctaagcgggcg

SEQ ID NO: 364679 - DNA, 15 bp, Homo sapiens
ctctcctaagcgggc

SEQ ID NO: 364680 - DNA, 15 bp, Homo sapiens
actctcctaagcggg

SEQ ID NO: 364681 - DNA, 15 bp, Homo sapiens
aactctcctaagcgg

SEQ ID NO: 364682 - DNA, 15 bp, Homo sapiens
gaactctcctaagcg

SEQ ID NO: 364683 - DNA, 15 bp, Homo sapiens
agaactctcctaagc

SEQ ID NO: 364684 - DNA, 15 bp, Homo sapiens
aagaactctcctaag

SEQ ID NO: 364685 - DNA, 15 bp, Homo sapiens
caagaactctcctaa

SEQ ID NO: 364686 - DNA, 15 bp, Homo sapiens
tcaagaactctccta

SEQ ID NO: 364687 - DNA, 15 bp, Homo sapiens
ttcaagaactctcct

SEQ ID NO: 364688 - DNA, 15 bp, Homo sapiens
tttcaagaactctcc

SEQ ID NO: 364689 - DNA, 15 bp, Homo sapiens
ttttcaagaactctc

SEQ ID NO: 364690 - DNA, 15 bp, Homo sapiens
cttttcaagaactct

SEQ ID NO: 364691 - DNA, 15 bp, Homo sapiens
acttttcaagaactc

SEQ ID NO: 364692 - DNA, 15 bp, Homo sapiens
aacttttcaagaact

SEQ ID NO: 364693 - DNA, 15 bp, Homo sapiens
caacttttcaagaac

SEQ ID NO: 364694 - DNA, 15 bp, Homo sapiens
acaacttttcaagaa

SEQ ID NO: 364695 - DNA, 15 bp, Homo sapiens
gacaacttttcaaga

SEQ ID NO: 364696 - DNA, 15 bp, Homo sapiens
ggacaacttttcaag

SEQ ID NO: 364697 - DNA, 15 bp, Homo sapiens
aggacaacttttcaa

SEQ ID NO: 364698 - DNA, 15 bp, Homo sapiens
aaggacaacttttca

SEQ ID NO: 364699 - DNA, 15 bp, Homo sapiens
gaaggacaacttttc

SEQ ID NO: 364700 - DNA, 15 bp, Homo sapiens
ggaaggacaactttt

SEQ ID NO: 364701 - DNA, 15 bp, Homo sapiens
tggaaggacaacttt

SEQ ID NO: 364702 - DNA, 15 bp, Homo sapiens
ctggaaggacaactt

SEQ ID NO: 364703 - DNA, 15 bp, Homo sapiens
gctggaaggacaact

SEQ ID NO: 364704 - DNA, 15 bp, Homo sapiens
ggctggaaggacaac

SEQ ID NO: 364705 - DNA, 15 bp, Homo sapiens
aggctggaaggacaa

SEQ ID NO: 364706 - DNA, 15 bp, Homo sapiens
aaggctggaaggaca

SEQ ID NO: 364707 - DNA, 15 bp, Homo sapiens
caaggctggaaggac

SEQ ID NO: 364708 - DNA, 15 bp, Homo sapiens
tcaaggctggaagga

SEQ ID NO: 364709 - DNA, 15 bp, Homo sapiens
ctcaaggctggaagg

SEQ ID NO: 364710 - DNA, 15 bp, Homo sapiens
tctcaaggctggaag

SEQ ID NO: 364711 - DNA, 15 bp, Homo sapiens
ttctcaaggctggaa

SEQ ID NO: 364712 - DNA, 15 bp, Homo sapiens
attctcaaggctgga

SEQ ID NO: 364713 - DNA, 15 bp, Homo sapiens
cattctcaaggctgg

SEQ ID NO: 364714 - DNA, 15 bp, Homo sapiens
acattctcaaggctg

SEQ ID NO: 364715 - DNA, 15 bp, Homo sapiens
cacattctcaaggct

SEQ ID NO: 364716 - DNA, 15 bp, Homo sapiens
ccacattctcaaggc

SEQ ID NO: 364717 - DNA, 15 bp, Homo sapiens
cccacattctcaagg

SEQ ID NO: 364718 - DNA, 15 bp, Homo sapiens
tcccacattctcaag

SEQ ID NO: 364719 - DNA, 15 bp, Homo sapiens
ctcccacattctcaa

SEQ ID NO: 364720 - DNA, 15 bp, Homo sapiens
tctcccacattctca

SEQ ID NO: 364721 - DNA, 15 bp, Homo sapiens
ctctcccacattctc

SEQ ID NO: 364722 - DNA, 15 bp, Homo sapiens
cctctcccacattct

SEQ ID NO: 364723 - DNA, 15 bp, Homo sapiens
ccctctcccacattc

SEQ ID NO: 364724 - DNA, 15 bp, Homo sapiens
tccctctcccacatt

SEQ ID NO: 364725 - DNA, 15 bp, Homo sapiens
ctccctctcccacat

SEQ ID NO: 364726 - DNA, 15 bp, Homo sapiens
actccctctcccaca

SEQ ID NO: 364727 - DNA, 15 bp, Homo sapiens
cactccctctcccac

SEQ ID NO: 364728 - DNA, 15 bp, Homo sapiens
tcactccctctccca

SEQ ID NO: 364729 - DNA, 15 bp, Homo sapiens
gtcactccctctccc

SEQ ID NO: 364730 - DNA, 15 bp, Homo sapiens
ggtcactccctctcc

SEQ ID NO: 364731 - DNA, 15 bp, Homo sapiens
gggtcactccctctc

SEQ ID NO: 364732 - DNA, 15 bp, Homo sapiens
agggtcactccctct

SEQ ID NO: 364733 - DNA, 15 bp, Homo sapiens
cagggtcactccctc

SEQ ID NO: 364734 - DNA, 15 bp, Homo sapiens
tcagggtcactccct

SEQ ID NO: 364735 - DNA, 15 bp, Homo sapiens
ctcagggtcactccc

SEQ ID NO: 364736 - DNA, 15 bp, Homo sapiens
actcagggtcactcc

SEQ ID NO: 364737 - DNA, 15 bp, Homo sapiens
aactcagggtcactc

SEQ ID NO: 364738 - DNA, 15 bp, Homo sapiens
taactcagggtcact

SEQ ID NO: 364739 - DNA, 15 bp, Homo sapiens
ctaactcagggtcac

SEQ ID NO: 364740 - DNA, 15 bp, Homo sapiens
tctaactcagggtca

SEQ ID NO: 364741 - DNA, 15 bp, Homo sapiens
ctctaactcagggtc

SEQ ID NO: 364742 - DNA, 15 bp, Homo sapiens
tctctaactcagggt

SEQ ID NO: 364743 - DNA, 15 bp, Homo sapiens
ctctctaactcaggg

SEQ ID NO: 364744 - DNA, 15 bp, Homo sapiens
tctctctaactcagg

SEQ ID NO: 364745 - DNA, 15 bp, Homo sapiens
ctctctctaactcag

SEQ ID NO: 364746 - DNA, 15 bp, Homo sapiens
tctctctctaactca

SEQ ID NO: 364747 - DNA, 15 bp, Homo sapiens
ttctctctctaactc

SEQ ID NO: 364748 - DNA, 15 bp, Homo sapiens
tttctctctctaact

SEQ ID NO: 364749 - DNA, 15 bp, Homo sapiens
gtttctctctctaac

SEQ ID NO: 364750 - DNA, 15 bp, Homo sapiens
agtttctctctctaa

SEQ ID NO: 364751 - DNA, 15 bp, Homo sapiens
aagtttctctctcta

SEQ ID NO: 364752 - DNA, 15 bp, Homo sapiens
taagtttctctctct

SEQ ID NO: 364753 - DNA, 15 bp, Homo sapiens
ctaagtttctctctc

SEQ ID NO: 364754 - DNA, 15 bp, Homo sapiens
gctaagtttctctct

SEQ ID NO: 364755 - DNA, 15 bp, Homo sapiens
tgctaagtttctctc

SEQ ID NO: 364756 - DNA, 15 bp, Homo sapiens
atgctaagtttctct

SEQ ID NO: 364757 - DNA, 15 bp, Homo sapiens
aatgctaagtttctc

SEQ ID NO: 364758 - DNA, 15 bp, Homo sapiens
taatgctaagtttct

SEQ ID NO: 364759 - DNA, 15 bp, Homo sapiens
ttaatgctaagtttc

SEQ ID NO: 364760 - DNA, 15 bp, Homo sapiens
cttaatgctaagttt

SEQ ID NO: 364761 - DNA, 15 bp, Homo sapiens
tcttaatgctaagtt

SEQ ID NO: 364762 - DNA, 15 bp, Homo sapiens
ctcttaatgctaagt

SEQ ID NO: 364763 - DNA, 15 bp, Homo sapiens
cctcttaatgctaag

SEQ ID NO: 364764 - DNA, 15 bp, Homo sapiens
ccctcttaatgctaa

SEQ ID NO: 364765 - DNA, 15 bp, Homo sapiens
gccctcttaatgcta

SEQ ID NO: 364766 - DNA, 15 bp, Homo sapiens
tgccctcttaatgct

SEQ ID NO: 364767 - DNA, 15 bp, Homo sapiens
ctgccctcttaatgc

SEQ ID NO: 364768 - DNA, 15 bp, Homo sapiens
tctgccctcttaatg

SEQ ID NO: 364769 - DNA, 15 bp, Homo sapiens
gtctgccctcttaat

SEQ ID NO: 364770 - DNA, 15 bp, Homo sapiens
tgtctgccctcttaa

SEQ ID NO: 364771 - DNA, 15 bp, Homo sapiens
ctgtctgccctctta

SEQ ID NO: 364772 - DNA, 15 bp, Homo sapiens
gctgtctgccctctt

SEQ ID NO: 364773 - DNA, 15 bp, Homo sapiens
tgctgtctgccctct

SEQ ID NO: 364774 - DNA, 15 bp, Homo sapiens
ctgctgtctgccctc

SEQ ID NO: 364775 - DNA, 15 bp, Homo sapiens
tctgctgtctgccct

SEQ ID NO: 364776 - DNA, 15 bp, Homo sapiens
ttctgctgtctgccc

SEQ ID NO: 364777 - DNA, 15 bp, Homo sapiens
tttctgctgtctgcc

SEQ ID NO: 364778 - DNA, 15 bp, Homo sapiens
gtttctgctgtctgc

SEQ ID NO: 364779 - DNA, 15 bp, Homo sapiens
ggtttctgctgtctg

SEQ ID NO: 364780 - DNA, 15 bp, Homo sapiens
gggtttctgctgtct

SEQ ID NO: 364781 - DNA, 15 bp, Homo sapiens
tgggtttctgctgtc

SEQ ID NO: 364782 - DNA, 15 bp, Homo sapiens
ctgggtttctgctgt

SEQ ID NO: 364783 - DNA, 15 bp, Homo sapiens
tctgggtttctgctg

SEQ ID NO: 364784 - DNA, 15 bp, Homo sapiens
ctctgggtttctgct

SEQ ID NO: 364785 - DNA, 15 bp, Homo sapiens
tctctgggtttctgc

SEQ ID NO: 364786 - DNA, 15 bp, Homo sapiens
atctctgggtttctg

SEQ ID NO: 364787 - DNA, 15 bp, Homo sapiens
catctctgggtttct

SEQ ID NO: 364788 - DNA, 15 bp, Homo sapiens
ccatctctgggtttc

SEQ ID NO: 364789 - DNA, 15 bp, Homo sapiens
accatctctgggttt

SEQ ID NO: 364790 - DNA, 15 bp, Homo sapiens
aaccatctctgggtt

SEQ ID NO: 364791 - DNA, 15 bp, Homo sapiens
aaaccatctctgggt

SEQ ID NO: 364792 - DNA, 15 bp, Homo sapiens
caaaccatctctggg

SEQ ID NO: 364793 - DNA, 15 bp, Homo sapiens
ccaaaccatctctgg

SEQ ID NO: 364794 - DNA, 15 bp, Homo sapiens
cccaaaccatctctg

SEQ ID NO: 364795 - DNA, 15 bp, Homo sapiens
ccccaaaccatctct

SEQ ID NO: 364796 - DNA, 15 bp, Homo sapiens
gccccaaaccatctc

SEQ ID NO: 364797 - DNA, 15 bp, Homo sapiens
agccccaaaccatct

SEQ ID NO: 364798 - DNA, 15 bp, Homo sapiens
tagccccaaaccatc

SEQ ID NO: 364799 - DNA, 15 bp, Homo sapiens
atagccccaaaccat

SEQ ID NO: 364800 - DNA, 15 bp, Homo sapiens
catagccccaaacca

SEQ ID NO: 364801 - DNA, 15 bp, Homo sapiens
acatagccccaaacc

SEQ ID NO: 364802 - DNA, 15 bp, Homo sapiens
cacatagccccaaac

SEQ ID NO: 364803 - DNA, 15 bp, Homo sapiens
acacatagccccaaa

SEQ ID NO: 364804 - DNA, 15 bp, Homo sapiens
tacacatagccccaa

SEQ ID NO: 364805 - DNA, 15 bp, Homo sapiens
ctacacatagcccca

SEQ ID NO: 364806 - DNA, 15 bp, Homo sapiens
cctacacatagcccc

SEQ ID NO: 364807 - DNA, 15 bp, Homo sapiens
gcctacacatagccc

SEQ ID NO: 364808 - DNA, 15 bp, Homo sapiens
ggcctacacatagcc

SEQ ID NO: 364809 - DNA, 15 bp, Homo sapiens
tggcctacacatagc

SEQ ID NO: 364810 - DNA, 15 bp, Homo sapiens
gtggcctacacatag

SEQ ID NO: 364811 - DNA, 15 bp, Homo sapiens
agtggcctacacata

SEQ ID NO: 364812 - DNA, 15 bp, Homo sapiens
tagtggcctacacat

SEQ ID NO: 364813 - DNA, 15 bp, Homo sapiens
ttagtggcctacaca

SEQ ID NO: 364814 - DNA, 15 bp, Homo sapiens
tttagtggcctacac

SEQ ID NO: 364815 - DNA, 15 bp, Homo sapiens
ctttagtggcctaca

SEQ ID NO: 364816 - DNA, 15 bp, Homo sapiens
cctttagtggcctac

SEQ ID NO: 364817 - DNA, 15 bp, Homo sapiens
tcctttagtggccta

SEQ ID NO: 364818 - DNA, 15 bp, Homo sapiens
atcctttagtggcct

SEQ ID NO: 364819 - DNA, 15 bp, Homo sapiens
aatcctttagtggcc

SEQ ID NO: 364820 - DNA, 15 bp, Homo sapiens
gaatcctttagtggc

SEQ ID NO: 364821 - DNA, 15 bp, Homo sapiens
ggaatcctttagtgg

SEQ ID NO: 364822 - DNA, 15 bp, Homo sapiens
gggaatcctttagtg

SEQ ID NO: 364823 - DNA, 15 bp, Homo sapiens
tgggaatcctttagt

SEQ ID NO: 364824 - DNA, 15 bp, Homo sapiens
atgggaatcctttag

SEQ ID NO: 364825 - DNA, 15 bp, Homo sapiens
catgggaatccttta

SEQ ID NO: 364826 - DNA, 15 bp, Homo sapiens
ccatgggaatccttt

SEQ ID NO: 364827 - DNA, 15 bp, Homo sapiens
cccatgggaatcctt

SEQ ID NO: 364828 - DNA, 15 bp, Homo sapiens
gcccatgggaatcct

SEQ ID NO: 364829 - DNA, 15 bp, Homo sapiens
agcccatgggaatcc

SEQ ID NO: 364830 - DNA, 15 bp, Homo sapiens
tagcccatgggaatc

SEQ ID NO: 364831 - DNA, 15 bp, Homo sapiens
gtagcccatgggaat

SEQ ID NO: 364832 - DNA, 15 bp, Homo sapiens
agtagcccatgggaa

SEQ ID NO: 364833 - DNA, 15 bp, Homo sapiens
aagtagcccatggga

SEQ ID NO: 364834 - DNA, 15 bp, Homo sapiens
caagtagcccatggg

SEQ ID NO: 364835 - DNA, 15 bp, Homo sapiens
gcaagtagcccatgg

SEQ ID NO: 364836 - DNA, 15 bp, Homo sapiens
ggcaagtagcccatg

SEQ ID NO: 364837 - DNA, 15 bp, Homo sapiens
gggcaagtagcccat

SEQ ID NO: 364838 - DNA, 15 bp, Homo sapiens
cgggcaagtagccca

SEQ ID NO: 364839 - DNA, 15 bp, Homo sapiens
acgggcaagtagccc

SEQ ID NO: 364840 - DNA, 15 bp, Homo sapiens
gacgggcaagtagcc

SEQ ID NO: 364841 - DNA, 15 bp, Homo sapiens
agacgggcaagtagc

SEQ ID NO: 364842 - DNA, 15 bp, Homo sapiens
cagacgggcaagtag

SEQ ID NO: 364843 - DNA, 15 bp, Homo sapiens
gcagacgggcaagta

SEQ ID NO: 364844 - DNA, 15 bp, Homo sapiens
agcagacgggcaagt

SEQ ID NO: 364845 - DNA, 15 bp, Homo sapiens
gagcagacgggcaag

SEQ ID NO: 364846 - DNA, 15 bp, Homo sapiens
agagcagacgggcaa

SEQ ID NO: 364847 - DNA, 15 bp, Homo sapiens
aagagcagacgggca

SEQ ID NO: 364848 - DNA, 15 bp, Homo sapiens
aaagagcagacgggc

SEQ ID NO: 364849 - DNA, 15 bp, Homo sapiens
aaaagagcagacggg

SEQ ID NO: 364850 - DNA, 15 bp, Homo sapiens
aaaaagagcagacgg

SEQ ID NO: 364851 - DNA, 15 bp, Homo sapiens
aaaaaagagcagacg

SEQ ID NO: 364852 - DNA, 15 bp, Homo sapiens
aaaaaaagagcagac

SEQ ID NO: 364853 - DNA, 15 bp, Homo sapiens
aaaaaaaagagcaga

SEQ ID NO: 364854 - DNA, 15 bp, Homo sapiens
aaaaaaaaagagcag

SEQ ID NO: 364855 - DNA, 15 bp, Homo sapiens
caaaaaaaaagagca

SEQ ID NO: 364856 - DNA, 15 bp, Homo sapiens
ccaaaaaaaaagagc

SEQ ID NO: 364857 - DNA, 15 bp, Homo sapiens
gccaaaaaaaaagag

SEQ ID NO: 364858 - DNA, 15 bp, Homo sapiens
agccaaaaaaaaaga

SEQ ID NO: 364859 - DNA, 15 bp, Homo sapiens
aagccaaaaaaaaag

SEQ ID NO: 364860 - DNA, 15 bp, Homo sapiens
aaagccaaaaaaaaa

SEQ ID NO: 364861 - DNA, 15 bp, Homo sapiens
gaaagccaaaaaaaa

SEQ ID NO: 364862 - DNA, 15 bp, Homo sapiens
ggaaagccaaaaaaa

SEQ ID NO: 364863 - DNA, 15 bp, Homo sapiens
aggaaagccaaaaaa

SEQ ID NO: 364864 - DNA, 15 bp, Homo sapiens
taggaaagccaaaaa

SEQ ID NO: 364865 - DNA, 15 bp, Homo sapiens
ataggaaagccaaaa

SEQ ID NO: 364866 - DNA, 15 bp, Homo sapiens
aataggaaagccaaa

SEQ ID NO: 364867 - DNA, 15 bp, Homo sapiens
aaataggaaagccaa

SEQ ID NO: 364868 - DNA, 15 bp, Homo sapiens
caaataggaaagcca

SEQ ID NO: 364869 - DNA, 15 bp, Homo sapiens
gcaaataggaaagcc

SEQ ID NO: 364870 - DNA, 15 bp, Homo sapiens
ggcaaataggaaagc

SEQ ID NO: 364871 - DNA, 15 bp, Homo sapiens
tggcaaataggaaag

SEQ ID NO: 364872 - DNA, 15 bp, Homo sapiens
ctggcaaataggaaa

SEQ ID NO: 364873 - DNA, 15 bp, Homo sapiens
gctggcaaataggaa

SEQ ID NO: 364874 - DNA, 15 bp, Homo sapiens
tgctggcaaatagga

SEQ ID NO: 364875 - DNA, 15 bp, Homo sapiens
atgctggcaaatagg

SEQ ID NO: 364876 - DNA, 15 bp, Homo sapiens
catgctggcaaatag

SEQ ID NO: 364877 - DNA, 15 bp, Homo sapiens
ccatgctggcaaata

SEQ ID NO: 364878 - DNA, 15 bp, Homo sapiens
gccatgctggcaaat

SEQ ID NO: 364879 - DNA, 15 bp, Homo sapiens
ggccatgctggcaaa

SEQ ID NO: 364880 - DNA, 15 bp, Homo sapiens
tggccatgctggcaa

SEQ ID NO: 364881 - DNA, 15 bp, Homo sapiens
ttggccatgctggca

SEQ ID NO: 364882 - DNA, 15 bp, Homo sapiens
cttggccatgctggc

SEQ ID NO: 364883 - DNA, 15 bp, Homo sapiens
acttggccatgctgg

SEQ ID NO: 364884 - DNA, 15 bp, Homo sapiens
cacttggccatgctg

SEQ ID NO: 364885 - DNA, 15 bp, Homo sapiens
ccacttggccatgct

SEQ ID NO: 364886 - DNA, 15 bp, Homo sapiens
accacttggccatgc

SEQ ID NO: 364887 - DNA, 15 bp, Homo sapiens
aaccacttggccatg

SEQ ID NO: 364888 - DNA, 15 bp, Homo sapiens
gaaccacttggccat

SEQ ID NO: 364889 - DNA, 15 bp, Homo sapiens
ggaaccacttggcca

SEQ ID NO: 364890 - DNA, 15 bp, Homo sapiens
tggaaccacttggcc

SEQ ID NO: 364891 - DNA, 15 bp, Homo sapiens
ttggaaccacttggc

SEQ ID NO: 364892 - DNA, 15 bp, Homo sapiens
gttggaaccacttgg

SEQ ID NO: 364893 - DNA, 15 bp, Homo sapiens
agttggaaccacttg

SEQ ID NO: 364894 - DNA, 15 bp, Homo sapiens
cagttggaaccactt

SEQ ID NO: 364895 - DNA, 15 bp, Homo sapiens
ccagttggaaccact

SEQ ID NO: 364896 - DNA, 15 bp, Homo sapiens
tccagttggaaccac

SEQ ID NO: 364897 - DNA, 15 bp, Homo sapiens
ttccagttggaacca

SEQ ID NO: 364898 - DNA, 15 bp, Homo sapiens
tttccagttggaacc

SEQ ID NO: 364899 - DNA, 15 bp, Homo sapiens
gtttccagttggaac

SEQ ID NO: 364900 - DNA, 15 bp, Homo sapiens
ggtttccagttggaa

SEQ ID NO: 364901 - DNA, 15 bp, Homo sapiens
gggtttccagttgga

SEQ ID NO: 364902 - DNA, 15 bp, Homo sapiens
tgggtttccagttgg

SEQ ID NO: 364903 - DNA, 15 bp, Homo sapiens
gtgggtttccagttg

SEQ ID NO: 364904 - DNA, 15 bp, Homo sapiens
tgtgggtttccagtt

SEQ ID NO: 364905 - DNA, 15 bp, Homo sapiens
ctgtgggtttccagt

SEQ ID NO: 364906 - DNA, 15 bp, Homo sapiens
cctgtgggtttccag

SEQ ID NO: 364907 - DNA, 15 bp, Homo sapiens
ccctgtgggtttcca

SEQ ID NO: 364908 - DNA, 15 bp, Homo sapiens
tccctgtgggtttcc

SEQ ID NO: 364909 - DNA, 15 bp, Homo sapiens
gtccctgtgggtttc

SEQ ID NO: 364910 - DNA, 15 bp, Homo sapiens
tgtccctgtgggttt

SEQ ID NO: 364911 - DNA, 15 bp, Homo sapiens
atgtccctgtgggtt

SEQ ID NO: 364912 - DNA, 15 bp, Homo sapiens
aatgtccctgtgggt

SEQ ID NO: 364913 - DNA, 15 bp, Homo sapiens
caatgtccctgtggg

SEQ ID NO: 364914 - DNA, 15 bp, Homo sapiens
acaatgtccctgtgg

SEQ ID NO: 364915 - DNA, 15 bp, Homo sapiens
gacaatgtccctgtg

SEQ ID NO: 364916 - DNA, 15 bp, Homo sapiens
ggacaatgtccctgt

SEQ ID NO: 364917 - DNA, 15 bp, Homo sapiens
aggacaatgtccctg

SEQ ID NO: 364918 - DNA, 15 bp, Homo sapiens
caggacaatgtccct

SEQ ID NO: 364919 - DNA, 15 bp, Homo sapiens
ccaggacaatgtccc

SEQ ID NO: 364920 - DNA, 15 bp, Homo sapiens
accaggacaatgtcc

SEQ ID NO: 364921 - DNA, 15 bp, Homo sapiens
caccaggacaatgtc

SEQ ID NO: 364922 - DNA, 15 bp, Homo sapiens
ccaccaggacaatgt

SEQ ID NO: 364923 - DNA, 15 bp, Homo sapiens
gccaccaggacaatg

SEQ ID NO: 364924 - DNA, 15 bp, Homo sapiens
ggccaccaggacaat

SEQ ID NO: 364925 - DNA, 15 bp, Homo sapiens
aggccaccaggacaa

SEQ ID NO: 364926 - DNA, 15 bp, Homo sapiens
caggccaccaggaca

SEQ ID NO: 364927 - DNA, 15 bp, Homo sapiens
ccaggccaccaggac

SEQ ID NO: 364928 - DNA, 15 bp, Homo sapiens
cccaggccaccagga

SEQ ID NO: 364929 - DNA, 15 bp, Homo sapiens
ccccaggccaccagg

SEQ ID NO: 364930 - DNA, 15 bp, Homo sapiens
accccaggccaccag

SEQ ID NO: 364931 - DNA, 15 bp, Homo sapiens
taccccaggccacca

SEQ ID NO: 364932 - DNA, 15 bp, Homo sapiens
ctaccccaggccacc

SEQ ID NO: 364933 - DNA, 15 bp, Homo sapiens
cctaccccaggccac

SEQ ID NO: 364934 - DNA, 15 bp, Homo sapiens
tcctaccccaggcca

SEQ ID NO: 364935 - DNA, 15 bp, Homo sapiens
ctcctaccccaggcc

SEQ ID NO: 364936 - DNA, 15 bp, Homo sapiens
cctcctaccccaggc

SEQ ID NO: 364937 - DNA, 15 bp, Homo sapiens
gcctcctaccccagg

SEQ ID NO: 364938 - DNA, 15 bp, Homo sapiens
ggcctcctaccccag

SEQ ID NO: 364939 - DNA, 15 bp, Homo sapiens
aggcctcctacccca

SEQ ID NO: 364940 - DNA, 15 bp, Homo sapiens
caggcctcctacccc

SEQ ID NO: 364941 - DNA, 15 bp, Homo sapiens
ccaggcctcctaccc

SEQ ID NO: 364942 - DNA, 15 bp, Homo sapiens
accaggcctcctacc

SEQ ID NO: 364943 - DNA, 15 bp, Homo sapiens
caccaggcctcctac

SEQ ID NO: 364944 - DNA, 15 bp, Homo sapiens
acaccaggcctccta

SEQ ID NO: 364945 - DNA, 15 bp, Homo sapiens
gacaccaggcctcct

SEQ ID NO: 364946 - DNA, 15 bp, Homo sapiens
agacaccaggcctcc

SEQ ID NO: 364947 - DNA, 15 bp, Homo sapiens
cagacaccaggcctc

SEQ ID NO: 364948 - DNA, 15 bp, Homo sapiens
gcagacaccaggcct

SEQ ID NO: 364949 - DNA, 15 bp, Homo sapiens
tgcagacaccaggcc

SEQ ID NO: 364950 - DNA, 15 bp, Homo sapiens
gtgcagacaccaggc

SEQ ID NO: 364951 - DNA, 15 bp, Homo sapiens
cgtgcagacaccagg

SEQ ID NO: 364952 - DNA, 15 bp, Homo sapiens
tcgtgcagacaccag

SEQ ID NO: 364953 - DNA, 15 bp, Homo sapiens
atcgtgcagacacca

SEQ ID NO: 364954 - DNA, 15 bp, Homo sapiens
gatcgtgcagacacc

SEQ ID NO: 364955 - DNA, 15 bp, Homo sapiens
ggatcgtgcagacac

SEQ ID NO: 364956 - DNA, 15 bp, Homo sapiens
tggatcgtgcagaca

SEQ ID NO: 364957 - DNA, 15 bp, Homo sapiens
ttggatcgtgcagac

SEQ ID NO: 364958 - DNA, 15 bp, Homo sapiens
gttggatcgtgcaga

SEQ ID NO: 364959 - DNA, 15 bp, Homo sapiens
ggttggatcgtgcag

SEQ ID NO: 364960 - DNA, 15 bp, Homo sapiens
aggttggatcgtgca

SEQ ID NO: 364961 - DNA, 15 bp, Homo sapiens
caggttggatcgtgc

SEQ ID NO: 364962 - DNA, 15 bp, Homo sapiens
acaggttggatcgtg

SEQ ID NO: 364963 - DNA, 15 bp, Homo sapiens
aacaggttggatcgt

SEQ ID NO: 364964 - DNA, 15 bp, Homo sapiens
caacaggttggatcg

SEQ ID NO: 364965 - DNA, 15 bp, Homo sapiens
acaacaggttggatc

SEQ ID NO: 364966 - DNA, 15 bp, Homo sapiens
cacaacaggttggat

SEQ ID NO: 364967 - DNA, 15 bp, Homo sapiens
acacaacaggttgga

SEQ ID NO: 364968 - DNA, 15 bp, Homo sapiens
aacacaacaggttgg

SEQ ID NO: 364969 - DNA, 15 bp, Homo sapiens
aaacacaacaggttg

SEQ ID NO: 364970 - DNA, 15 bp, Homo sapiens
caaacacaacaggtt

SEQ ID NO: 364971 - DNA, 15 bp, Homo sapiens
gcaaacacaacaggt

SEQ ID NO: 364972 - DNA, 15 bp, Homo sapiens
agcaaacacaacagg

SEQ ID NO: 364973 - DNA, 15 bp, Homo sapiens
cagcaaacacaacag

SEQ ID NO: 364974 - DNA, 15 bp, Homo sapiens
gcagcaaacacaaca

SEQ ID NO: 364975 - DNA, 15 bp, Homo sapiens
cgcagcaaacacaac

SEQ ID NO: 364976 - DNA, 15 bp, Homo sapiens
ccgcagcaaacacaa

SEQ ID NO: 364977 - DNA, 15 bp, Homo sapiens
tccgcagcaaacaca

SEQ ID NO: 364978 - DNA, 15 bp, Homo sapiens
gtccgcagcaaacac

SEQ ID NO: 364979 - DNA, 15 bp, Homo sapiens
ggtccgcagcaaaca

SEQ ID NO: 364980 - DNA, 15 bp, Homo sapiens
aggtccgcagcaaac

SEQ ID NO: 364981 - DNA, 15 bp, Homo sapiens
caggtccgcagcaaa

SEQ ID NO: 364982 - DNA, 15 bp, Homo sapiens
ccaggtccgcagcaa

SEQ ID NO: 364983 - DNA, 15 bp, Homo sapiens
cccaggtccgcagca

SEQ ID NO: 364984 - DNA, 15 bp, Homo sapiens
gcccaggtccgcagc

SEQ ID NO: 364985 - DNA, 15 bp, Homo sapiens
tgcccaggtccgcag

SEQ ID NO: 364986 - DNA, 15 bp, Homo sapiens
ctgcccaggtccgca

SEQ ID NO: 364987 - DNA, 15 bp, Homo sapiens
gctgcccaggtccgc

SEQ ID NO: 364988 - DNA, 15 bp, Homo sapiens
tgctgcccaggtccg

SEQ ID NO: 364989 - DNA, 15 bp, Homo sapiens
gtgctgcccaggtcc

SEQ ID NO: 364990 - DNA, 15 bp, Homo sapiens
ggtgctgcccaggtc

SEQ ID NO: 364991 - DNA, 15 bp, Homo sapiens
aggtgctgcccaggt

SEQ ID NO: 364992 - DNA, 15 bp, Homo sapiens
aaggtgctgcccagg

SEQ ID NO: 364993 - DNA, 15 bp, Homo sapiens
aaaggtgctgcccag

SEQ ID NO: 364994 - DNA, 15 bp, Homo sapiens
gaaaggtgctgccca

SEQ ID NO: 364995 - DNA, 15 bp, Homo sapiens
ggaaaggtgctgccc

SEQ ID NO: 364996 - DNA, 15 bp, Homo sapiens
aggaaaggtgctgcc

SEQ ID NO: 364997 - DNA, 15 bp, Homo sapiens
aaggaaaggtgctgc

SEQ ID NO: 364998 - DNA, 15 bp, Homo sapiens
taaggaaaggtgctg

SEQ ID NO: 364999 - DNA, 15 bp, Homo sapiens
ctaaggaaaggtgct

SEQ ID NO: 365000 - DNA, 15 bp, Homo sapiens
gctaaggaaaggtgc

SEQ ID NO: 365001 - DNA, 15 bp, Homo sapiens
ggctaaggaaaggtg

SEQ ID NO: 365002 - DNA, 15 bp, Homo sapiens
cggctaaggaaaggt

SEQ ID NO: 365003 - DNA, 15 bp, Homo sapiens
ccggctaaggaaagg

SEQ ID NO: 365004 - DNA, 15 bp, Homo sapiens
cccggctaaggaaag

SEQ ID NO: 365005 - DNA, 15 bp, Homo sapiens
gcccggctaaggaaa

SEQ ID NO: 365006 - DNA, 15 bp, Homo sapiens
agcccggctaaggaa

SEQ ID NO: 365007 - DNA, 15 bp, Homo sapiens
gagcccggctaagga

SEQ ID NO: 365008 - DNA, 15 bp, Homo sapiens
agagcccggctaagg

SEQ ID NO: 365009 - DNA, 15 bp, Homo sapiens
gagagcccggctaag

SEQ ID NO: 365010 - DNA, 15 bp, Homo sapiens
ggagagcccggctaa

SEQ ID NO: 365011 - DNA, 15 bp, Homo sapiens
cggagagcccggcta

SEQ ID NO: 365012 - DNA, 15 bp, Homo sapiens
gcggagagcccggct

SEQ ID NO: 365013 - DNA, 15 bp, Homo sapiens
agcggagagcccggc

SEQ ID NO: 365014 - DNA, 15 bp, Homo sapiens
tagcggagagcccgg

SEQ ID NO: 365015 - DNA, 15 bp, Homo sapiens
ctagcggagagcccg

SEQ ID NO: 365016 - DNA, 15 bp, Homo sapiens
cctagcggagagccc

SEQ ID NO: 365017 - DNA, 15 bp, Homo sapiens
tcctagcggagagcc

SEQ ID NO: 365018 - DNA, 15 bp, Homo sapiens
gtcctagcggagagc

SEQ ID NO: 365019 - DNA, 15 bp, Homo sapiens
agtcctagcggagag

SEQ ID NO: 365020 - DNA, 15 bp, Homo sapiens
aagtcctagcggaga

SEQ ID NO: 365021 - DNA, 15 bp, Homo sapiens
gaagtcctagcggag

SEQ ID NO: 365022 - DNA, 15 bp, Homo sapiens
tgaagtcctagcgga

SEQ ID NO: 365023 - DNA, 15 bp, Homo sapiens
ctgaagtcctagcgg

SEQ ID NO: 365024 - DNA, 15 bp, Homo sapiens
cctgaagtcctagcg

SEQ ID NO: 365025 - DNA, 15 bp, Homo sapiens
ccctgaagtcctagc

SEQ ID NO: 365026 - DNA, 15 bp, Homo sapiens
tccctgaagtcctag

SEQ ID NO: 365027 - DNA, 15 bp, Homo sapiens
ctccctgaagtccta

SEQ ID NO: 365028 - DNA, 15 bp, Homo sapiens
actccctgaagtcct

SEQ ID NO: 365029 - DNA, 15 bp, Homo sapiens
aactccctgaagtcc

SEQ ID NO: 365030 - DNA, 15 bp, Homo sapiens
aaactccctgaagtc

SEQ ID NO: 365031 - DNA, 15 bp, Homo sapiens
caaactccctgaagt

SEQ ID NO: 365032 - DNA, 15 bp, Homo sapiens
ccaaactccctgaag

SEQ ID NO: 365033 - DNA, 15 bp, Homo sapiens
gccaaactccctgaa

SEQ ID NO: 365034 - DNA, 15 bp, Homo sapiens
cgccaaactccctga

SEQ ID NO: 365035 - DNA, 15 bp, Homo sapiens
gcgccaaactccctg

SEQ ID NO: 365036 - DNA, 15 bp, Homo sapiens
agcgccaaactccct

SEQ ID NO: 365037 - DNA, 15 bp, Homo sapiens
cagcgccaaactccc

SEQ ID NO: 365038 - DNA, 15 bp, Homo sapiens
gcagcgccaaactcc

SEQ ID NO: 365039 - DNA, 15 bp, Homo sapiens
ggcagcgccaaactc

SEQ ID NO: 365040 - DNA, 15 bp, Homo sapiens
tggcagcgccaaact

SEQ ID NO: 365041 - DNA, 15 bp, Homo sapiens
ctggcagcgccaaac

SEQ ID NO: 365042 - DNA, 15 bp, Homo sapiens
actggcagcgccaaa

SEQ ID NO: 365043 - DNA, 15 bp, Homo sapiens
cactggcagcgccaa

SEQ ID NO: 365044 - DNA, 15 bp, Homo sapiens
ccactggcagcgcca

SEQ ID NO: 365045 - DNA, 15 bp, Homo sapiens
accactggcagcgcc

SEQ ID NO: 365046 - DNA, 15 bp, Homo sapiens
caccactggcagcgc

SEQ ID NO: 365047 - DNA, 15 bp, Homo sapiens
gcaccactggcagcg

SEQ ID NO: 365048 - DNA, 15 bp, Homo sapiens
tgcaccactggcagc

SEQ ID NO: 365049 - DNA, 15 bp, Homo sapiens
atgcaccactggcag

SEQ ID NO: 365050 - DNA, 15 bp, Homo sapiens
catgcaccactggca

SEQ ID NO: 365051 - DNA, 15 bp, Homo sapiens
tcatgcaccactggc

SEQ ID NO: 365052 - DNA, 15 bp, Homo sapiens
gtcatgcaccactgg

SEQ ID NO: 365053 - DNA, 15 bp, Homo sapiens
tgtcatgcaccactg

SEQ ID NO: 365054 - DNA, 15 bp, Homo sapiens
ttgtcatgcaccact

SEQ ID NO: 365055 - DNA, 15 bp, Homo sapiens
cttgtcatgcaccac

SEQ ID NO: 365056 - DNA, 15 bp, Homo sapiens
gcttgtcatgcacca

SEQ ID NO: 365057 - DNA, 15 bp, Homo sapiens
agcttgtcatgcacc

SEQ ID NO: 365058 - DNA, 15 bp, Homo sapiens
aagcttgtcatgcac

SEQ ID NO: 365059 - DNA, 15 bp, Homo sapiens
taagcttgtcatgca

SEQ ID NO: 365060 - DNA, 15 bp, Homo sapiens
gtaagcttgtcatgc

SEQ ID NO: 365061 - DNA, 15 bp, Homo sapiens
tgtaagcttgtcatg

SEQ ID NO: 365062 - DNA, 15 bp, Homo sapiens
ctgtaagcttgtcat

SEQ ID NO: 365063 - DNA, 15 bp, Homo sapiens
cctgtaagcttgtca

SEQ ID NO: 365064 - DNA, 15 bp, Homo sapiens
ccctgtaagcttgtc

SEQ ID NO: 365065 - DNA, 15 bp, Homo sapiens
accctgtaagcttgt

SEQ ID NO: 365066 - DNA, 15 bp, Homo sapiens
gaccctgtaagcttg

SEQ ID NO: 365067 - DNA, 15 bp, Homo sapiens
agaccctgtaagctt

SEQ ID NO: 365068 - DNA, 15 bp, Homo sapiens
aagaccctgtaagct

SEQ ID NO: 365069 - DNA, 15 bp, Homo sapiens
caagaccctgtaagc

SEQ ID NO: 365070 - DNA, 15 bp, Homo sapiens
acaagaccctgtaag

SEQ ID NO: 365071 - DNA, 15 bp, Homo sapiens
cacaagaccctgtaa

SEQ ID NO: 365072 - DNA, 15 bp, Homo sapiens
acacaagaccctgta

SEQ ID NO: 365073 - DNA, 15 bp, Homo sapiens
tacacaagaccctgt

SEQ ID NO: 365074 - DNA, 15 bp, Homo sapiens
atacacaagaccctg

SEQ ID NO: 365075 - DNA, 15 bp, Homo sapiens
aatacacaagaccct

SEQ ID NO: 365076 - DNA, 15 bp, Homo sapiens
aaatacacaagaccc

SEQ ID NO: 365077 - DNA, 15 bp, Homo sapiens
caaatacacaagacc

SEQ ID NO: 365078 - DNA, 15 bp, Homo sapiens
acaaatacacaagac

SEQ ID NO: 365079 - DNA, 15 bp, Homo sapiens
cacaaatacacaaga

SEQ ID NO: 365080 - DNA, 15 bp, Homo sapiens
acacaaatacacaag

SEQ ID NO: 365081 - DNA, 15 bp, Homo sapiens
aacacaaatacacaa

SEQ ID NO: 365082 - DNA, 15 bp, Homo sapiens
aaacacaaatacaca

SEQ ID NO: 365083 - DNA, 15 bp, Homo sapiens
gaaacacaaatacac

SEQ ID NO: 365084 - DNA, 15 bp, Homo sapiens
tgaaacacaaataca

SEQ ID NO: 365085 - DNA, 15 bp, Homo sapiens
atgaaacacaaatac

SEQ ID NO: 365086 - DNA, 15 bp, Homo sapiens
catgaaacacaaata

SEQ ID NO: 365087 - DNA, 15 bp, Homo sapiens
ccatgaaacacaaat

SEQ ID NO: 365088 - DNA, 15 bp, Homo sapiens
cccatgaaacacaaa

SEQ ID NO: 365089 - DNA, 15 bp, Homo sapiens
tcccatgaaacacaa

SEQ ID NO: 365090 - DNA, 15 bp, Homo sapiens
gtcccatgaaacaca

SEQ ID NO: 365091 - DNA, 15 bp, Homo sapiens
agtcccatgaaacac

SEQ ID NO: 365092 - DNA, 15 bp, Homo sapiens
tagtcccatgaaaca

SEQ ID NO: 365093 - DNA, 15 bp, Homo sapiens
ttagtcccatgaaac

SEQ ID NO: 365094 - DNA, 15 bp, Homo sapiens
attagtcccatgaaa

SEQ ID NO: 365095 - DNA, 15 bp, Homo sapiens
cattagtcccatgaa

SEQ ID NO: 365096 - DNA, 15 bp, Homo sapiens
tcattagtcccatga

SEQ ID NO: 365097 - DNA, 15 bp, Homo sapiens
ctcattagtcccatg

SEQ ID NO: 365098 - DNA, 15 bp, Homo sapiens
actcattagtcccat

SEQ ID NO: 365099 - DNA, 15 bp, Homo sapiens
aactcattagtccca

SEQ ID NO: 365100 - DNA, 15 bp, Homo sapiens
caactcattagtccc

SEQ ID NO: 365101 - DNA, 15 bp, Homo sapiens
acaactcattagtcc

SEQ ID NO: 365102 - DNA, 15 bp, Homo sapiens
cacaactcattagtc

SEQ ID NO: 365103 - DNA, 15 bp, Homo sapiens
ccacaactcattagt

SEQ ID NO: 365104 - DNA, 15 bp, Homo sapiens
accacaactcattag

SEQ ID NO: 365105 - DNA, 15 bp, Homo sapiens
aaccacaactcatta

SEQ ID NO: 365106 - DNA, 15 bp, Homo sapiens
gaaccacaactcatt

SEQ ID NO: 365107 - DNA, 15 bp, Homo sapiens
tgaaccacaactcat

SEQ ID NO: 365108 - DNA, 15 bp, Homo sapiens
atgaaccacaactca

SEQ ID NO: 365109 - DNA, 15 bp, Homo sapiens
catgaaccacaactc

SEQ ID NO: 365110 - DNA, 15 bp, Homo sapiens
ccatgaaccacaact

SEQ ID NO: 365111 - DNA, 15 bp, Homo sapiens
tccatgaaccacaac

SEQ ID NO: 365112 - DNA, 15 bp, Homo sapiens
gtccatgaaccacaa

SEQ ID NO: 365113 - DNA, 15 bp, Homo sapiens
tgtccatgaaccaca

SEQ ID NO: 365114 - DNA, 15 bp, Homo sapiens
atgtccatgaaccac

SEQ ID NO: 365115 - DNA, 15 bp, Homo sapiens
aatgtccatgaacca

SEQ ID NO: 365116 - DNA, 15 bp, Homo sapiens
taatgtccatgaacc

SEQ ID NO: 365117 - DNA, 15 bp, Homo sapiens
ctaatgtccatgaac

SEQ ID NO: 365118 - DNA, 15 bp, Homo sapiens
cctaatgtccatgaa

SEQ ID NO: 365119 - DNA, 15 bp, Homo sapiens
acctaatgtccatga

SEQ ID NO: 365120 - DNA, 15 bp, Homo sapiens
aacctaatgtccatg

SEQ ID NO: 365121 - DNA, 15 bp, Homo sapiens
aaacctaatgtccat

SEQ ID NO: 365122 - DNA, 15 bp, Homo sapiens
aaaacctaatgtcca

SEQ ID NO: 365123 - DNA, 15 bp, Homo sapiens
caaaacctaatgtcc

SEQ ID NO: 365124 - DNA, 15 bp, Homo sapiens
gcaaaacctaatgtc

SEQ ID NO: 365125 - DNA, 15 bp, Homo sapiens
agcaaaacctaatgt

SEQ ID NO: 365126 - DNA, 15 bp, Homo sapiens
aagcaaaacctaatg

SEQ ID NO: 365127 - DNA, 15 bp, Homo sapiens
aaagcaaaacctaat

SEQ ID NO: 365128 - DNA, 15 bp, Homo sapiens
taaagcaaaacctaa

SEQ ID NO: 365129 - DNA, 15 bp, Homo sapiens
ttaaagcaaaaccta

SEQ ID NO: 365130 - DNA, 15 bp, Homo sapiens
attaaagcaaaacct

SEQ ID NO: 365131 - DNA, 15 bp, Homo sapiens
aattaaagcaaaacc

SEQ ID NO: 365132 - DNA, 15 bp, Homo sapiens
caattaaagcaaaac

SEQ ID NO: 365133 - DNA, 15 bp, Homo sapiens
gcaattaaagcaaaa

SEQ ID NO: 365134 - DNA, 15 bp, Homo sapiens
agcaattaaagcaaa

SEQ ID NO: 365135 - DNA, 15 bp, Homo sapiens
aagcaattaaagcaa

SEQ ID NO: 365136 - DNA, 15 bp, Homo sapiens
caagcaattaaagca

SEQ ID NO: 365137 - DNA, 15 bp, Homo sapiens
ccaagcaattaaagc

SEQ ID NO: 365138 - DNA, 15 bp, Homo sapiens
tccaagcaattaaag

SEQ ID NO: 365139 - DNA, 15 bp, Homo sapiens
ctccaagcaattaaa

SEQ ID NO: 365140 - DNA, 15 bp, Homo sapiens
cctccaagcaattaa

SEQ ID NO: 365141 - DNA, 15 bp, Homo sapiens
ccctccaagcaatta

SEQ ID NO: 365142 - DNA, 15 bp, Homo sapiens
gccctccaagcaatt

SEQ ID NO: 365143 - DNA, 15 bp, Homo sapiens
cgccctccaagcaat

SEQ ID NO: 365144 - DNA, 15 bp, Homo sapiens
ccgccctccaagcaa

SEQ ID NO: 365145 - DNA, 15 bp, Homo sapiens
accgccctccaagca

SEQ ID NO: 365146 - DNA, 15 bp, Homo sapiens
aaccgccctccaagc

SEQ ID NO: 365147 - DNA, 15 bp, Homo sapiens
caaccgccctccaag

SEQ ID NO: 365148 - DNA, 15 bp, Homo sapiens
acaaccgccctccaa

SEQ ID NO: 365149 - DNA, 15 bp, Homo sapiens
cacaaccgccctcca

SEQ ID NO: 365150 - DNA, 15 bp, Homo sapiens
ccacaaccgccctcc

SEQ ID NO: 365151 - DNA, 15 bp, Homo sapiens
tccacaaccgccctc

SEQ ID NO: 365152 - DNA, 15 bp, Homo sapiens
ctccacaaccgccct

SEQ ID NO: 365153 - DNA, 15 bp, Homo sapiens
tctccacaaccgccc

SEQ ID NO: 365154 - DNA, 15 bp, Homo sapiens
gtctccacaaccgcc

SEQ ID NO: 365155 - DNA, 15 bp, Homo sapiens
agtctccacaaccgc

SEQ ID NO: 365156 - DNA, 15 bp, Homo sapiens
cagtctccacaaccg

SEQ ID NO: 365157 - DNA, 15 bp, Homo sapiens
acagtctccacaacc

SEQ ID NO: 365158 - DNA, 15 bp, Homo sapiens
aacagtctccacaac

SEQ ID NO: 365159 - DNA, 15 bp, Homo sapiens
aaacagtctccacaa

SEQ ID NO: 365160 - DNA, 15 bp, Homo sapiens
gaaacagtctccaca

SEQ ID NO: 365161 - DNA, 15 bp, Homo sapiens
agaaacagtctccac

SEQ ID NO: 365162 - DNA, 15 bp, Homo sapiens
gagaaacagtctcca

SEQ ID NO: 365163 - DNA, 15 bp, Homo sapiens
tgagaaacagtctcc

SEQ ID NO: 365164 - DNA, 15 bp, Homo sapiens
ctgagaaacagtctc

SEQ ID NO: 365165 - DNA, 15 bp, Homo sapiens
gctgagaaacagtct

SEQ ID NO: 365166 - DNA, 15 bp, Homo sapiens
agctgagaaacagtc

SEQ ID NO: 365167 - DNA, 15 bp, Homo sapiens
cagctgagaaacagt

SEQ ID NO: 365168 - DNA, 15 bp, Homo sapiens
ccagctgagaaacag

SEQ ID NO: 365169 - DNA, 15 bp, Homo sapiens
tccagctgagaaaca

SEQ ID NO: 365170 - DNA, 15 bp, Homo sapiens
ttccagctgagaaac

SEQ ID NO: 365171 - DNA, 15 bp, Homo sapiens
attccagctgagaaa

SEQ ID NO: 365172 - DNA, 15 bp, Homo sapiens
aattccagctgagaa

SEQ ID NO: 365173 - DNA, 15 bp, Homo sapiens
caattccagctgaga

SEQ ID NO: 365174 - DNA, 15 bp, Homo sapiens
acaattccagctgag

SEQ ID NO: 365175 - DNA, 15 bp, Homo sapiens
gacaattccagctga

SEQ ID NO: 365176 - DNA, 15 bp, Homo sapiens
tgacaattccagctg

SEQ ID NO: 365177 - DNA, 15 bp, Homo sapiens
atgacaattccagct

SEQ ID NO: 365178 - DNA, 15 bp, Homo sapiens
aatgacaattccagc

SEQ ID NO: 365179 - DNA, 15 bp, Homo sapiens
taatgacaattccag

SEQ ID NO: 365180 - DNA, 15 bp, Homo sapiens
ataatgacaattcca

SEQ ID NO: 365181 - DNA, 15 bp, Homo sapiens
gataatgacaattcc

SEQ ID NO: 365182 - DNA, 15 bp, Homo sapiens
ggataatgacaattc

SEQ ID NO: 365183 - DNA, 15 bp, Homo sapiens
aggataatgacaatt

SEQ ID NO: 365184 - DNA, 15 bp, Homo sapiens
gaggataatgacaat

SEQ ID NO: 365185 - DNA, 15 bp, Homo sapiens
tgaggataatgacaa

SEQ ID NO: 365186 - DNA, 15 bp, Homo sapiens
atgaggataatgaca

SEQ ID NO: 365187 - DNA, 15 bp, Homo sapiens
aatgaggataatgac

SEQ ID NO: 365188 - DNA, 15 bp, Homo sapiens
taatgaggataatga

SEQ ID NO: 365189 - DNA, 15 bp, Homo sapiens
ttaatgaggataatg

SEQ ID NO: 365190 - DNA, 15 bp, Homo sapiens
gttaatgaggataat

SEQ ID NO: 365191 - DNA, 15 bp, Homo sapiens
cgttaatgaggataa

SEQ ID NO: 365192 - DNA, 15 bp, Homo sapiens
ccgttaatgaggata

SEQ ID NO: 365193 - DNA, 15 bp, Homo sapiens
accgttaatgaggat

SEQ ID NO: 365194 - DNA, 15 bp, Homo sapiens
caccgttaatgagga

SEQ ID NO: 365195 - DNA, 15 bp, Homo sapiens
tcaccgttaatgagg

SEQ ID NO: 365196 - DNA, 15 bp, Homo sapiens
ctcaccgttaatgag

SEQ ID NO: 365197 - DNA, 15 bp, Homo sapiens
cctcaccgttaatga

SEQ ID NO: 365198 - DNA, 15 bp, Homo sapiens
acctcaccgttaatg

SEQ ID NO: 365199 - DNA, 15 bp, Homo sapiens
gacctcaccgttaat

SEQ ID NO: 365200 - DNA, 15 bp, Homo sapiens
tgacctcaccgttaa

SEQ ID NO: 365201 - DNA, 15 bp, Homo sapiens
gtgacctcaccgtta

SEQ ID NO: 365202 - DNA, 15 bp, Homo sapiens
agtgacctcaccgtt

SEQ ID NO: 365203 - DNA, 15 bp, Homo sapiens
cagtgacctcaccgt

SEQ ID NO: 365204 - DNA, 15 bp, Homo sapiens
acagtgacctcaccg

SEQ ID NO: 365205 - DNA, 15 bp, Homo sapiens
cacagtgacctcacc

SEQ ID NO: 365206 - DNA, 15 bp, Homo sapiens
gcacagtgacctcac

SEQ ID NO: 365207 - DNA, 15 bp, Homo sapiens
tgcacagtgacctca

SEQ ID NO: 365208 - DNA, 15 bp, Homo sapiens
ctgcacagtgacctc

SEQ ID NO: 365209 - DNA, 15 bp, Homo sapiens
tctgcacagtgacct

SEQ ID NO: 365210 - DNA, 15 bp, Homo sapiens
ctctgcacagtgacc

SEQ ID NO: 365211 - DNA, 15 bp, Homo sapiens
actctgcacagtgac

SEQ ID NO: 365212 - DNA, 15 bp, Homo sapiens
tactctgcacagtga

SEQ ID NO: 365213 - DNA, 15 bp, Homo sapiens
gtactctgcacagtg

SEQ ID NO: 365214 - DNA, 15 bp, Homo sapiens
ggtactctgcacagt

SEQ ID NO: 365215 - DNA, 15 bp, Homo sapiens
aggtactctgcacag

SEQ ID NO: 365216 - DNA, 15 bp, Homo sapiens
caggtactctgcaca

SEQ ID NO: 365217 - DNA, 15 bp, Homo sapiens
tcaggtactctgcac

SEQ ID NO: 365218 - DNA, 15 bp, Homo sapiens
ctcaggtactctgca

SEQ ID NO: 365219 - DNA, 15 bp, Homo sapiens
cctcaggtactctgc

SEQ ID NO: 365220 - DNA, 15 bp, Homo sapiens
ccctcaggtactctg

SEQ ID NO: 365221 - DNA, 15 bp, Homo sapiens
accctcaggtactct

SEQ ID NO: 365222 - DNA, 15 bp, Homo sapiens
caccctcaggtactc

SEQ ID NO: 365223 - DNA, 15 bp, Homo sapiens
tcaccctcaggtact

SEQ ID NO: 365224 - DNA, 15 bp, Homo sapiens
gtcaccctcaggtac

SEQ ID NO: 365225 - DNA, 15 bp, Homo sapiens
tgtcaccctcaggta

SEQ ID NO: 365226 - DNA, 15 bp, Homo sapiens
ctgtcaccctcaggt

SEQ ID NO: 365227 - DNA, 15 bp, Homo sapiens
tctgtcaccctcagg

SEQ ID NO: 365228 - DNA, 15 bp, Homo sapiens
ttctgtcaccctcag

SEQ ID NO: 365229 - DNA, 15 bp, Homo sapiens
cttctgtcaccctca

SEQ ID NO: 365230 - DNA, 15 bp, Homo sapiens
acttctgtcaccctc

SEQ ID NO: 365231 - DNA, 15 bp, Homo sapiens
aacttctgtcaccct

SEQ ID NO: 365232 - DNA, 15 bp, Homo sapiens
caacttctgtcaccc

SEQ ID NO: 365233 - DNA, 15 bp, Homo sapiens
tcaacttctgtcacc

SEQ ID NO: 365234 - DNA, 15 bp, Homo sapiens
ttcaacttctgtcac

SEQ ID NO: 365235 - DNA, 15 bp, Homo sapiens
cttcaacttctgtca

SEQ ID NO: 365236 - DNA, 15 bp, Homo sapiens
tcttcaacttctgtc

SEQ ID NO: 365237 - DNA, 15 bp, Homo sapiens
ctcttcaacttctgt

SEQ ID NO: 365238 - DNA, 15 bp, Homo sapiens
tctcttcaacttctg

SEQ ID NO: 365239 - DNA, 15 bp, Homo sapiens
ttctcttcaacttct

SEQ ID NO: 365240 - DNA, 15 bp, Homo sapiens
cttctcttcaacttc

SEQ ID NO: 365241 - DNA, 15 bp, Homo sapiens
acttctcttcaactt

SEQ ID NO: 365242 - DNA, 15 bp, Homo sapiens
gacttctcttcaact

SEQ ID NO: 365243 - DNA, 15 bp, Homo sapiens
agacttctcttcaac

SEQ ID NO: 365244 - DNA, 15 bp, Homo sapiens
tagacttctcttcaa

SEQ ID NO: 365245 - DNA, 15 bp, Homo sapiens
ctagacttctcttca

SEQ ID NO: 365246 - DNA, 15 bp, Homo sapiens
actagacttctcttc

SEQ ID NO: 365247 - DNA, 15 bp, Homo sapiens
aactagacttctctt

SEQ ID NO: 365248 - DNA, 15 bp, Homo sapiens
taactagacttctct

SEQ ID NO: 365249 - DNA, 15 bp, Homo sapiens
ttaactagacttctc

SEQ ID NO: 365250 - DNA, 15 bp, Homo sapiens
cttaactagacttct

SEQ ID NO: 365251 - DNA, 15 bp, Homo sapiens
ccttaactagacttc

SEQ ID NO: 365252 - DNA, 15 bp, Homo sapiens
cccttaactagactt

SEQ ID NO: 365253 - DNA, 15 bp, Homo sapiens
gcccttaactagact

SEQ ID NO: 365254 - DNA, 15 bp, Homo sapiens
tgcccttaactagac

SEQ ID NO: 365255 - DNA, 15 bp, Homo sapiens
ctgcccttaactaga

SEQ ID NO: 365256 - DNA, 15 bp, Homo sapiens
tctgcccttaactag

SEQ ID NO: 365257 - DNA, 15 bp, Homo sapiens
atctgcccttaacta

SEQ ID NO: 365258 - DNA, 15 bp, Homo sapiens
catctgcccttaact

SEQ ID NO: 365259 - DNA, 15 bp, Homo sapiens
gcatctgcccttaac

SEQ ID NO: 365260 - DNA, 15 bp, Homo sapiens
tgcatctgcccttaa

SEQ ID NO: 365261 - DNA, 15 bp, Homo sapiens
ttgcatctgccctta

SEQ ID NO: 365262 - DNA, 15 bp, Homo sapiens
attgcatctgccctt

SEQ ID NO: 365263 - DNA, 15 bp, Homo sapiens
gattgcatctgccct

SEQ ID NO: 365264 - DNA, 15 bp, Homo sapiens
agattgcatctgccc

SEQ ID NO: 365265 - DNA, 15 bp, Homo sapiens
tagattgcatctgcc

SEQ ID NO: 365266 - DNA, 15 bp, Homo sapiens
ttagattgcatctgc

SEQ ID NO: 365267 - DNA, 15 bp, Homo sapiens
tttagattgcatctg

SEQ ID NO: 365268 - DNA, 15 bp, Homo sapiens
ctttagattgcatct

SEQ ID NO: 365269 - DNA, 15 bp, Homo sapiens
cctttagattgcatc

SEQ ID NO: 365270 - DNA, 15 bp, Homo sapiens
acctttagattgcat

SEQ ID NO: 365271 - DNA, 15 bp, Homo sapiens
tacctttagattgca

SEQ ID NO: 365272 - DNA, 15 bp, Homo sapiens
ttacctttagattgc

SEQ ID NO: 365273 - DNA, 15 bp, Homo sapiens
tttacctttagattg

SEQ ID NO: 365274 - DNA, 15 bp, Homo sapiens
ttttacctttagatt

SEQ ID NO: 365275 - DNA, 15 bp, Homo sapiens
tttttacctttagat

SEQ ID NO: 365276 - DNA, 15 bp, Homo sapiens
atttttacctttaga

SEQ ID NO: 365277 - DNA, 15 bp, Homo sapiens
gatttttacctttag

SEQ ID NO: 365278 - DNA, 15 bp, Homo sapiens
tgatttttaccttta

SEQ ID NO: 365279 - DNA, 15 bp, Homo sapiens
ctgatttttaccttt

SEQ ID NO: 365280 - DNA, 15 bp, Homo sapiens
actgatttttacctt

SEQ ID NO: 365281 - DNA, 15 bp, Homo sapiens
cactgatttttacct

SEQ ID NO: 365282 - DNA, 15 bp, Homo sapiens
tcactgatttttacc

SEQ ID NO: 365283 - DNA, 15 bp, Homo sapiens
ctcactgatttttac

SEQ ID NO: 365284 - DNA, 15 bp, Homo sapiens
cctcactgattttta

SEQ ID NO: 365285 - DNA, 15 bp, Homo sapiens
tcctcactgattttt

SEQ ID NO: 365286 - DNA, 15 bp, Homo sapiens
ttcctcactgatttt

SEQ ID NO: 365287 - DNA, 15 bp, Homo sapiens
tttcctcactgattt

SEQ ID NO: 365288 - DNA, 15 bp, Homo sapiens
gtttcctcactgatt

SEQ ID NO: 365289 - DNA, 15 bp, Homo sapiens
agtttcctcactgat

SEQ ID NO: 365290 - DNA, 15 bp, Homo sapiens
gagtttcctcactga

SEQ ID NO: 365291 - DNA, 15 bp, Homo sapiens
ggagtttcctcactg

SEQ ID NO: 365292 - DNA, 15 bp, Homo sapiens
cggagtttcctcact

SEQ ID NO: 365293 - DNA, 15 bp, Homo sapiens
tcggagtttcctcac

SEQ ID NO: 365294 - DNA, 15 bp, Homo sapiens
ctcggagtttcctca

SEQ ID NO: 365295 - DNA, 15 bp, Homo sapiens
actcggagtttcctc

SEQ ID NO: 365296 - DNA, 15 bp, Homo sapiens
cactcggagtttcct

SEQ ID NO: 365297 - DNA, 15 bp, Homo sapiens
acactcggagtttcc

SEQ ID NO: 365298 - DNA, 15 bp, Homo sapiens
aacactcggagtttc

SEQ ID NO: 365299 - DNA, 15 bp, Homo sapiens
caacactcggagttt

SEQ ID NO: 365300 - DNA, 15 bp, Homo sapiens
ccaacactcggagtt

SEQ ID NO: 365301 - DNA, 15 bp, Homo sapiens
cccaacactcggagt

SEQ ID NO: 365302 - DNA, 15 bp, Homo sapiens
acccaacactcggag

SEQ ID NO: 365303 - DNA, 15 bp, Homo sapiens
cacccaacactcgga

SEQ ID NO: 365304 - DNA, 15 bp, Homo sapiens
gcacccaacactcgg

SEQ ID NO: 365305 - DNA, 15 bp, Homo sapiens
ggcacccaacactcg

SEQ ID NO: 365306 - DNA, 15 bp, Homo sapiens
tggcacccaacactc

SEQ ID NO: 365307 - DNA, 15 bp, Homo sapiens
ttggcacccaacact

SEQ ID NO: 365308 - DNA, 15 bp, Homo sapiens
tttggcacccaacac

SEQ ID NO: 365309 - DNA, 15 bp, Homo sapiens
atttggcacccaaca

SEQ ID NO: 365310 - DNA, 15 bp, Homo sapiens
catttggcacccaac

SEQ ID NO: 365311 - DNA, 15 bp, Homo sapiens
acatttggcacccaa

SEQ ID NO: 365312 - DNA, 15 bp, Homo sapiens
aacatttggcaccca

SEQ ID NO: 365313 - DNA, 15 bp, Homo sapiens
aaacatttggcaccc

SEQ ID NO: 365314 - DNA, 15 bp, Homo sapiens
aaaacatttggcacc

SEQ ID NO: 365315 - DNA, 15 bp, Homo sapiens
taaaacatttggcac

SEQ ID NO: 365316 - DNA, 15 bp, Homo sapiens
ataaaacatttggca

SEQ ID NO: 365317 - DNA, 15 bp, Homo sapiens
tataaaacatttggc

SEQ ID NO: 365318 - DNA, 15 bp, Homo sapiens
ctataaaacatttgg

SEQ ID NO: 365319 - DNA, 15 bp, Homo sapiens
cctataaaacatttg

SEQ ID NO: 365320 - DNA, 15 bp, Homo sapiens
tcctataaaacattt

SEQ ID NO: 365321 - DNA, 15 bp, Homo sapiens
ttcctataaaacatt

SEQ ID NO: 365322 - DNA, 15 bp, Homo sapiens
gttcctataaaacat

SEQ ID NO: 365323 - DNA, 15 bp, Homo sapiens
agttcctataaaaca

SEQ ID NO: 365324 - DNA, 15 bp, Homo sapiens
cagttcctataaaac

SEQ ID NO: 365325 - DNA, 15 bp, Homo sapiens
tcagttcctataaaa

SEQ ID NO: 365326 - DNA, 15 bp, Homo sapiens
ctcagttcctataaa

SEQ ID NO: 365327 - DNA, 15 bp, Homo sapiens
cctcagttcctataa

SEQ ID NO: 365328 - DNA, 15 bp, Homo sapiens
ccctcagttcctata

SEQ ID NO: 365329 - DNA, 15 bp, Homo sapiens
gccctcagttcctat

SEQ ID NO: 365330 - DNA, 15 bp, Homo sapiens
tgccctcagttccta

SEQ ID NO: 365331 - DNA, 15 bp, Homo sapiens
ctgccctcagttcct

SEQ ID NO: 365332 - DNA, 15 bp, Homo sapiens
tctgccctcagttcc

SEQ ID NO: 365333 - DNA, 15 bp, Homo sapiens
ctctgccctcagttc

SEQ ID NO: 365334 - DNA, 15 bp, Homo sapiens
tctctgccctcagtt

SEQ ID NO: 365335 - DNA, 15 bp, Homo sapiens
ctctctgccctcagt

SEQ ID NO: 365336 - DNA, 15 bp, Homo sapiens
gctctctgccctcag

SEQ ID NO: 365337 - DNA, 15 bp, Homo sapiens
ggctctctgccctca

SEQ ID NO: 365338 - DNA, 15 bp, Homo sapiens
aggctctctgccctc

SEQ ID NO: 365339 - DNA, 15 bp, Homo sapiens
aaggctctctgccct

SEQ ID NO: 365340 - DNA, 15 bp, Homo sapiens
taaggctctctgccc

SEQ ID NO: 365341 - DNA, 15 bp, Homo sapiens
ctaaggctctctgcc

SEQ ID NO: 365342 - DNA, 15 bp, Homo sapiens
gctaaggctctctgc

SEQ ID NO: 365343 - DNA, 15 bp, Homo sapiens
tgctaaggctctctg

SEQ ID NO: 365344 - DNA, 15 bp, Homo sapiens
ctgctaaggctctct

SEQ ID NO: 365345 - DNA, 15 bp, Homo sapiens
cctgctaaggctctc

SEQ ID NO: 365346 - DNA, 15 bp, Homo sapiens
acctgctaaggctct

SEQ ID NO: 365347 - DNA, 15 bp, Homo sapiens
gacctgctaaggctc

SEQ ID NO: 365348 - DNA, 15 bp, Homo sapiens
agacctgctaaggct

SEQ ID NO: 365349 - DNA, 15 bp, Homo sapiens
cagacctgctaaggc

SEQ ID NO: 365350 - DNA, 15 bp, Homo sapiens
ccagacctgctaagg

SEQ ID NO: 365351 - DNA, 15 bp, Homo sapiens
cccagacctgctaag

SEQ ID NO: 365352 - DNA, 15 bp, Homo sapiens
ccccagacctgctaa

SEQ ID NO: 365353 - DNA, 15 bp, Homo sapiens
accccagacctgcta

SEQ ID NO: 365354 - DNA, 15 bp, Homo sapiens
aaccccagacctgct

SEQ ID NO: 365355 - DNA, 15 bp, Homo sapiens
caaccccagacctgc

SEQ ID NO: 365356 - DNA, 15 bp, Homo sapiens
gcaaccccagacctg

SEQ ID NO: 365357 - DNA, 15 bp, Homo sapiens
ggcaaccccagacct

SEQ ID NO: 365358 - DNA, 15 bp, Homo sapiens
aggcaaccccagacc

SEQ ID NO: 365359 - DNA, 15 bp, Homo sapiens
caggcaaccccagac

SEQ ID NO: 365360 - DNA, 15 bp, Homo sapiens
ccaggcaaccccaga

SEQ ID NO: 365361 - DNA, 15 bp, Homo sapiens
cccaggcaaccccag

SEQ ID NO: 365362 - DNA, 15 bp, Homo sapiens
tcccaggcaacccca

SEQ ID NO: 365363 - DNA, 15 bp, Homo sapiens
ttcccaggcaacccc

SEQ ID NO: 365364 - DNA, 15 bp, Homo sapiens
cttcccaggcaaccc

SEQ ID NO: 365365 - DNA, 15 bp, Homo sapiens
ccttcccaggcaacc

SEQ ID NO: 365366 - DNA, 15 bp, Homo sapiens
accttcccaggcaac

SEQ ID NO: 365367 - DNA, 15 bp, Homo sapiens
aaccttcccaggcaa

SEQ ID NO: 365368 - DNA, 15 bp, Homo sapiens
aaaccttcccaggca

SEQ ID NO: 365369 - DNA, 15 bp, Homo sapiens
gaaaccttcccaggc

SEQ ID NO: 365370 - DNA, 15 bp, Homo sapiens
ggaaaccttcccagg

SEQ ID NO: 365371 - DNA, 15 bp, Homo sapiens
tggaaaccttcccag

SEQ ID NO: 365372 - DNA, 15 bp, Homo sapiens
ctggaaaccttccca

SEQ ID NO: 365373 - DNA, 15 bp, Homo sapiens
tctggaaaccttccc

SEQ ID NO: 365374 - DNA, 15 bp, Homo sapiens
ctctggaaaccttcc

SEQ ID NO: 365375 - DNA, 15 bp, Homo sapiens
tctctggaaaccttc

SEQ ID NO: 365376 - DNA, 15 bp, Homo sapiens
atctctggaaacctt

SEQ ID NO: 365377 - DNA, 15 bp, Homo sapiens
catctctggaaacct

SEQ ID NO: 365378 - DNA, 15 bp, Homo sapiens
tcatctctggaaacc

SEQ ID NO: 365379 - DNA, 15 bp, Homo sapiens
ctcatctctggaaac

SEQ ID NO: 365380 - DNA, 15 bp, Homo sapiens
cctcatctctggaaa

SEQ ID NO: 365381 - DNA, 15 bp, Homo sapiens
ccctcatctctggaa

SEQ ID NO: 365382 - DNA, 15 bp, Homo sapiens
cccctcatctctgga

SEQ ID NO: 365383 - DNA, 15 bp, Homo sapiens
acccctcatctctgg

SEQ ID NO: 365384 - DNA, 15 bp, Homo sapiens
aacccctcatctctg

SEQ ID NO: 365385 - DNA, 15 bp, Homo sapiens
aaacccctcatctct

SEQ ID NO: 365386 - DNA, 15 bp, Homo sapiens
caaacccctcatctc

SEQ ID NO: 365387 - DNA, 15 bp, Homo sapiens
ccaaacccctcatct

SEQ ID NO: 365388 - DNA, 15 bp, Homo sapiens
tccaaacccctcatc

SEQ ID NO: 365389 - DNA, 15 bp, Homo sapiens
gtccaaacccctcat

SEQ ID NO: 365390 - DNA, 15 bp, Homo sapiens
agtccaaacccctca

SEQ ID NO: 365391 - DNA, 15 bp, Homo sapiens
tagtccaaacccctc

SEQ ID NO: 365392 - DNA, 15 bp, Homo sapiens
ctagtccaaacccct

SEQ ID NO: 365393 - DNA, 15 bp, Homo sapiens
gctagtccaaacccc

SEQ ID NO: 365394 - DNA, 15 bp, Homo sapiens
ggctagtccaaaccc

SEQ ID NO: 365395 - DNA, 15 bp, Homo sapiens
aggctagtccaaacc

SEQ ID NO: 365396 - DNA, 15 bp, Homo sapiens
caggctagtccaaac

SEQ ID NO: 365397 - DNA, 15 bp, Homo sapiens
ccaggctagtccaaa

SEQ ID NO: 365398 - DNA, 15 bp, Homo sapiens
cccaggctagtccaa

SEQ ID NO: 365399 - DNA, 15 bp, Homo sapiens
tcccaggctagtcca

SEQ ID NO: 365400 - DNA, 15 bp, Homo sapiens
ctcccaggctagtcc

SEQ ID NO: 365401 - DNA, 15 bp, Homo sapiens
tctcccaggctagtc

SEQ ID NO: 365402 - DNA, 15 bp, Homo sapiens
ctctcccaggctagt

SEQ ID NO: 365403 - DNA, 15 bp, Homo sapiens
cctctcccaggctag

SEQ ID NO: 365404 - DNA, 15 bp, Homo sapiens
acctctcccaggcta

SEQ ID NO: 365405 - DNA, 15 bp, Homo sapiens
tacctctcccaggct

SEQ ID NO: 365406 - DNA, 15 bp, Homo sapiens
ctacctctcccaggc

SEQ ID NO: 365407 - DNA, 15 bp, Homo sapiens
tctacctctcccagg

SEQ ID NO: 365408 - DNA, 15 bp, Homo sapiens
ttctacctctcccag

SEQ ID NO: 365409 - DNA, 15 bp, Homo sapiens
gttctacctctccca

SEQ ID NO: 365410 - DNA, 15 bp, Homo sapiens
tgttctacctctccc

SEQ ID NO: 365411 - DNA, 15 bp, Homo sapiens
atgttctacctctcc

SEQ ID NO: 365412 - DNA, 15 bp, Homo sapiens
aatgttctacctctc

SEQ ID NO: 365413 - DNA, 15 bp, Homo sapiens
aaatgttctacctct

SEQ ID NO: 365414 - DNA, 15 bp, Homo sapiens
gaaatgttctacctc

SEQ ID NO: 365415 - DNA, 15 bp, Homo sapiens
ggaaatgttctacct

SEQ ID NO: 365416 - DNA, 15 bp, Homo sapiens
gggaaatgttctacc

SEQ ID NO: 365417 - DNA, 15 bp, Homo sapiens
ggggaaatgttctac

SEQ ID NO: 365418 - DNA, 15 bp, Homo sapiens
aggggaaatgttcta

SEQ ID NO: 365419 - DNA, 15 bp, Homo sapiens
gaggggaaatgttct

SEQ ID NO: 365420 - DNA, 15 bp, Homo sapiens
ggaggggaaatgttc

SEQ ID NO: 365421 - DNA, 15 bp, Homo sapiens
cggaggggaaatgtt

SEQ ID NO: 365422 - DNA, 15 bp, Homo sapiens
ccggaggggaaatgt

SEQ ID NO: 365423 - DNA, 15 bp, Homo sapiens
gccggaggggaaatg

SEQ ID NO: 365424 - DNA, 15 bp, Homo sapiens
agccggaggggaaat

SEQ ID NO: 365425 - DNA, 15 bp, Homo sapiens
gagccggaggggaaa

SEQ ID NO: 365426 - DNA, 15 bp, Homo sapiens
cgagccggaggggaa

SEQ ID NO: 365427 - DNA, 15 bp, Homo sapiens
ccgagccggagggga

SEQ ID NO: 365428 - DNA, 15 bp, Homo sapiens
tccgagccggagggg

SEQ ID NO: 365429 - DNA, 15 bp, Homo sapiens
ctccgagccggaggg

SEQ ID NO: 365430 - DNA, 15 bp, Homo sapiens
gctccgagccggagg

SEQ ID NO: 365431 - DNA, 15 bp, Homo sapiens
ggctccgagccggag

SEQ ID NO: 365432 - DNA, 15 bp, Homo sapiens
aggctccgagccgga

SEQ ID NO: 365433 - DNA, 15 bp, Homo sapiens
aaggctccgagccgg

SEQ ID NO: 365434 - DNA, 15 bp, Homo sapiens
caaggctccgagccg

SEQ ID NO: 365435 - DNA, 15 bp, Homo sapiens
gcaaggctccgagcc

SEQ ID NO: 365436 - DNA, 15 bp, Homo sapiens
agcaaggctccgagc

SEQ ID NO: 365437 - DNA, 15 bp, Homo sapiens
cagcaaggctccgag

SEQ ID NO: 365438 - DNA, 15 bp, Homo sapiens
tcagcaaggctccga

SEQ ID NO: 365439 - DNA, 15 bp, Homo sapiens
ctcagcaaggctccg

SEQ ID NO: 365440 - DNA, 15 bp, Homo sapiens
tctcagcaaggctcc

SEQ ID NO: 365441 - DNA, 15 bp, Homo sapiens
ttctcagcaaggctc

SEQ ID NO: 365442 - DNA, 15 bp, Homo sapiens
attctcagcaaggct

SEQ ID NO: 365443 - DNA, 15 bp, Homo sapiens
cattctcagcaaggc

SEQ ID NO: 365444 - DNA, 15 bp, Homo sapiens
acattctcagcaagg

SEQ ID NO: 365445 - DNA, 15 bp, Homo sapiens
aacattctcagcaag

SEQ ID NO: 365446 - DNA, 15 bp, Homo sapiens
gaacattctcagcaa

SEQ ID NO: 365447 - DNA, 15 bp, Homo sapiens
agaacattctcagca

SEQ ID NO: 365448 - DNA, 15 bp, Homo sapiens
gagaacattctcagc

SEQ ID NO: 365449 - DNA, 15 bp, Homo sapiens
agagaacattctcag

SEQ ID NO: 365450 - DNA, 15 bp, Homo sapiens
cagagaacattctca

SEQ ID NO: 365451 - DNA, 15 bp, Homo sapiens
acagagaacattctc

SEQ ID NO: 365452 - DNA, 15 bp, Homo sapiens
gacagagaacattct

SEQ ID NO: 365453 - DNA, 15 bp, Homo sapiens
agacagagaacattc

SEQ ID NO: 365454 - DNA, 15 bp, Homo sapiens
aagacagagaacatt

SEQ ID NO: 365455 - DNA, 15 bp, Homo sapiens
caagacagagaacat

SEQ ID NO: 365456 - DNA, 15 bp, Homo sapiens
tcaagacagagaaca

SEQ ID NO: 365457 - DNA, 15 bp, Homo sapiens
atcaagacagagaac

SEQ ID NO: 365458 - DNA, 15 bp, Homo sapiens
gatcaagacagagaa

SEQ ID NO: 365459 - DNA, 15 bp, Homo sapiens
agatcaagacagaga

SEQ ID NO: 365460 - DNA, 15 bp, Homo sapiens
cagatcaagacagag

SEQ ID NO: 365461 - DNA, 15 bp, Homo sapiens
ccagatcaagacaga

SEQ ID NO: 365462 - DNA, 15 bp, Homo sapiens
accagatcaagacag

SEQ ID NO: 365463 - DNA, 15 bp, Homo sapiens
caccagatcaagaca

SEQ ID NO: 365464 - DNA, 15 bp, Homo sapiens
ccaccagatcaagac

SEQ ID NO: 365465 - DNA, 15 bp, Homo sapiens
accaccagatcaaga

SEQ ID NO: 365466 - DNA, 15 bp, Homo sapiens
caccaccagatcaag

SEQ ID NO: 365467 - DNA, 15 bp, Homo sapiens
ccaccaccagatcaa

SEQ ID NO: 365468 - DNA, 15 bp, Homo sapiens
accaccaccagatca

SEQ ID NO: 365469 - DNA, 15 bp, Homo sapiens
aaccaccaccagatc

SEQ ID NO: 365470 - DNA, 15 bp, Homo sapiens
taaccaccaccagat

SEQ ID NO: 365471 - DNA, 15 bp, Homo sapiens
gtaaccaccaccaga

SEQ ID NO: 365472 - DNA, 15 bp, Homo sapiens
tgtaaccaccaccag

SEQ ID NO: 365473 - DNA, 15 bp, Homo sapiens
gtgtaaccaccacca

SEQ ID NO: 365474 - DNA, 15 bp, Homo sapiens
tgtgtaaccaccacc

SEQ ID NO: 365475 - DNA, 15 bp, Homo sapiens
ctgtgtaaccaccac

SEQ ID NO: 365476 - DNA, 15 bp, Homo sapiens
tctgtgtaaccacca

SEQ ID NO: 365477 - DNA, 15 bp, Homo sapiens
atctgtgtaaccacc

SEQ ID NO: 365478 - DNA, 15 bp, Homo sapiens
catctgtgtaaccac

SEQ ID NO: 365479 - DNA, 15 bp, Homo sapiens
acatctgtgtaacca

SEQ ID NO: 365480 - DNA, 15 bp, Homo sapiens
tacatctgtgtaacc

SEQ ID NO: 365481 - DNA, 15 bp, Homo sapiens
atacatctgtgtaac

SEQ ID NO: 365482 - DNA, 15 bp, Homo sapiens
tatacatctgtgtaa

SEQ ID NO: 365483 - DNA, 15 bp, Homo sapiens
gtatacatctgtgta

SEQ ID NO: 365484 - DNA, 15 bp, Homo sapiens
tgtatacatctgtgt

SEQ ID NO: 365485 - DNA, 15 bp, Homo sapiens
atgtatacatctgtg

SEQ ID NO: 365486 - DNA, 15 bp, Homo sapiens
catgtatacatctgt

SEQ ID NO: 365487 - DNA, 15 bp, Homo sapiens
tcatgtatacatctg

SEQ ID NO: 365488 - DNA, 15 bp, Homo sapiens
ctcatgtatacatct

SEQ ID NO: 365489 - DNA, 15 bp, Homo sapiens
actcatgtatacatc

SEQ ID NO: 365490 - DNA, 15 bp, Homo sapiens
tactcatgtatacat

SEQ ID NO: 365491 - DNA, 15 bp, Homo sapiens
ttactcatgtataca

SEQ ID NO: 365492 - DNA, 15 bp, Homo sapiens
gttactcatgtatac

SEQ ID NO: 365493 - DNA, 15 bp, Homo sapiens
tgttactcatgtata

SEQ ID NO: 365494 - DNA, 15 bp, Homo sapiens
atgttactcatgtat

SEQ ID NO: 365495 - DNA, 15 bp, Homo sapiens
aatgttactcatgta

SEQ ID NO: 365496 - DNA, 15 bp, Homo sapiens
gaatgttactcatgt

SEQ ID NO: 365497 - DNA, 15 bp, Homo sapiens
tgaatgttactcatg

SEQ ID NO: 365498 - DNA, 15 bp, Homo sapiens
atgaatgttactcat

SEQ ID NO: 365499 - DNA, 15 bp, Homo sapiens
aatgaatgttactca

SEQ ID NO: 365500 - DNA, 15 bp, Homo sapiens
caatgaatgttactc

SEQ ID NO: 365501 - DNA, 15 bp, Homo sapiens
gcaatgaatgttact

SEQ ID NO: 365502 - DNA, 15 bp, Homo sapiens
cgcaatgaatgttac

SEQ ID NO: 365503 - DNA, 15 bp, Homo sapiens
acgcaatgaatgtta

SEQ ID NO: 365504 - DNA, 15 bp, Homo sapiens
gacgcaatgaatgtt

SEQ ID NO: 365505 - DNA, 15 bp, Homo sapiens
agacgcaatgaatgt

SEQ ID NO: 365506 - DNA, 15 bp, Homo sapiens
tagacgcaatgaatg

SEQ ID NO: 365507 - DNA, 15 bp, Homo sapiens
gtagacgcaatgaat

SEQ ID NO: 365508 - DNA, 15 bp, Homo sapiens
agtagacgcaatgaa

SEQ ID NO: 365509 - DNA, 15 bp, Homo sapiens
aagtagacgcaatga

SEQ ID NO: 365510 - DNA, 15 bp, Homo sapiens
caagtagacgcaatg

SEQ ID NO: 365511 - DNA, 15 bp, Homo sapiens
ccaagtagacgcaat

SEQ ID NO: 365512 - DNA, 15 bp, Homo sapiens
cccaagtagacgcaa

SEQ ID NO: 365513 - DNA, 15 bp, Homo sapiens
tcccaagtagacgca

SEQ ID NO: 365514 - DNA, 15 bp, Homo sapiens
atcccaagtagacgc

SEQ ID NO: 365515 - DNA, 15 bp, Homo sapiens
aatcccaagtagacg

SEQ ID NO: 365516 - DNA, 15 bp, Homo sapiens
aaatcccaagtagac

SEQ ID NO: 365517 - DNA, 15 bp, Homo sapiens
aaaatcccaagtaga

SEQ ID NO: 365518 - DNA, 15 bp, Homo sapiens
caaaatcccaagtag

SEQ ID NO: 365519 - DNA, 15 bp, Homo sapiens
acaaaatcccaagta

SEQ ID NO: 365520 - DNA, 15 bp, Homo sapiens
tacaaaatcccaagt

SEQ ID NO: 365521 - DNA, 15 bp, Homo sapiens
atacaaaatcccaag

SEQ ID NO: 365522 - DNA, 15 bp, Homo sapiens
tatacaaaatcccaa

SEQ ID NO: 365523 - DNA, 15 bp, Homo sapiens
gtatacaaaatccca

SEQ ID NO: 365524 - DNA, 15 bp, Homo sapiens
agtatacaaaatccc

SEQ ID NO: 365525 - DNA, 15 bp, Homo sapiens
aagtatacaaaatcc

SEQ ID NO: 365526 - DNA, 15 bp, Homo sapiens
aaagtatacaaaatc

SEQ ID NO: 365527 - DNA, 15 bp, Homo sapiens
caaagtatacaaaat

SEQ ID NO: 365528 - DNA, 15 bp, Homo sapiens
gcaaagtatacaaaa

SEQ ID NO: 365529 - DNA, 15 bp, Homo sapiens
agcaaagtatacaaa

SEQ ID NO: 365530 - DNA, 15 bp, Homo sapiens
gagcaaagtatacaa

SEQ ID NO: 365531 - DNA, 15 bp, Homo sapiens
agagcaaagtataca

SEQ ID NO: 365532 - DNA, 15 bp, Homo sapiens
tagagcaaagtatac

SEQ ID NO: 365533 - DNA, 15 bp, Homo sapiens
gtagagcaaagtata

SEQ ID NO: 365534 - DNA, 15 bp, Homo sapiens
agtagagcaaagtat

SEQ ID NO: 365535 - DNA, 15 bp, Homo sapiens
aagtagagcaaagta

SEQ ID NO: 365536 - DNA, 15 bp, Homo sapiens
taagtagagcaaagt

SEQ ID NO: 365537 - DNA, 15 bp, Homo sapiens
ttaagtagagcaaag

SEQ ID NO: 365538 - DNA, 15 bp, Homo sapiens
cttaagtagagcaaa

SEQ ID NO: 365539 - DNA, 15 bp, Homo sapiens
acttaagtagagcaa

SEQ ID NO: 365540 - DNA, 15 bp, Homo sapiens
aacttaagtagagca

SEQ ID NO: 365541 - DNA, 15 bp, Homo sapiens
taacttaagtagagc

SEQ ID NO: 365542 - DNA, 15 bp, Homo sapiens
ctaacttaagtagag

SEQ ID NO: 365543 - DNA, 15 bp, Homo sapiens
actaacttaagtaga

SEQ ID NO: 365544 - DNA, 15 bp, Homo sapiens
gactaacttaagtag

SEQ ID NO: 365545 - DNA, 15 bp, Homo sapiens
ggactaacttaagta

SEQ ID NO: 365546 - DNA, 15 bp, Homo sapiens
aggactaacttaagt

SEQ ID NO: 365547 - DNA, 15 bp, Homo sapiens
gaggactaacttaag

SEQ ID NO: 365548 - DNA, 15 bp, Homo sapiens
tgaggactaacttaa

SEQ ID NO: 365549 - DNA, 15 bp, Homo sapiens
ttgaggactaactta

SEQ ID NO: 365550 - DNA, 15 bp, Homo sapiens
attgaggactaactt

SEQ ID NO: 365551 - DNA, 15 bp, Homo sapiens
aattgaggactaact

SEQ ID NO: 365552 - DNA, 15 bp, Homo sapiens
taattgaggactaac

SEQ ID NO: 365553 - DNA, 15 bp, Homo sapiens
ttaattgaggactaa

SEQ ID NO: 365554 - DNA, 15 bp, Homo sapiens
tttaattgaggacta

SEQ ID NO: 365555 - DNA, 15 bp, Homo sapiens
ttttaattgaggact

SEQ ID NO: 365556 - DNA, 15 bp, Homo sapiens
tttttaattgaggac

SEQ ID NO: 365557 - DNA, 15 bp, Homo sapiens
ttttttaattgagga

SEQ ID NO: 365558 - DNA, 15 bp, Homo sapiens
cttttttaattgagg

SEQ ID NO: 365559 - DNA, 15 bp, Homo sapiens
ccttttttaattgag

SEQ ID NO: 365560 - DNA, 15 bp, Homo sapiens
cccttttttaattga

SEQ ID NO: 365561 - DNA, 15 bp, Homo sapiens
ccccttttttaattg

SEQ ID NO: 365562 - DNA, 15 bp, Homo sapiens
tccccttttttaatt

SEQ ID NO: 365563 - DNA, 15 bp, Homo sapiens
ttccccttttttaat

SEQ ID NO: 365564 - DNA, 15 bp, Homo sapiens
tttccccttttttaa

SEQ ID NO: 365565 - DNA, 15 bp, Homo sapiens
ctttcccctttttta

SEQ ID NO: 365566 - DNA, 15 bp, Homo sapiens
tctttcccctttttt

SEQ ID NO: 365567 - DNA, 15 bp, Homo sapiens
ttctttccccttttt

SEQ ID NO: 365568 - DNA, 15 bp, Homo sapiens
cttctttcccctttt

SEQ ID NO: 365569 - DNA, 15 bp, Homo sapiens
acttctttccccttt

SEQ ID NO: 365570 - DNA, 15 bp, Homo sapiens
gacttctttcccctt

SEQ ID NO: 365571 - DNA, 15 bp, Homo sapiens
ggacttctttcccct

SEQ ID NO: 365572 - DNA, 15 bp, Homo sapiens
gggacttctttcccc

SEQ ID NO: 365573 - DNA, 15 bp, Homo sapiens
cgggacttctttccc

SEQ ID NO: 365574 - DNA, 15 bp, Homo sapiens
ccgggacttctttcc

SEQ ID NO: 365575 - DNA, 15 bp, Homo sapiens
gccgggacttctttc

SEQ ID NO: 365576 - DNA, 15 bp, Homo sapiens
tgccgggacttcttt

SEQ ID NO: 365577 - DNA, 15 bp, Homo sapiens
ctgccgggacttctt

SEQ ID NO: 365578 - DNA, 15 bp, Homo sapiens
gctgccgggacttct

SEQ ID NO: 365579 - DNA, 15 bp, Homo sapiens
ggctgccgggacttc

SEQ ID NO: 365580 - DNA, 15 bp, Homo sapiens
gggctgccgggactt

SEQ ID NO: 365581 - DNA, 15 bp, Homo sapiens
tgggctgccgggact

SEQ ID NO: 365582 - DNA, 15 bp, Homo sapiens
ttgggctgccgggac

SEQ ID NO: 365583 - DNA, 15 bp, Homo sapiens
gttgggctgccggga

SEQ ID NO: 365584 - DNA, 15 bp, Homo sapiens
tgttgggctgccggg

SEQ ID NO: 365585 - DNA, 15 bp, Homo sapiens
atgttgggctgccgg

SEQ ID NO: 365586 - DNA, 15 bp, Homo sapiens
gatgttgggctgccg

SEQ ID NO: 365587 - DNA, 15 bp, Homo sapiens
tgatgttgggctgcc

SEQ ID NO: 365588 - DNA, 15 bp, Homo sapiens
ttgatgttgggctgc

SEQ ID NO: 365589 - DNA, 15 bp, Homo sapiens
attgatgttgggctg

SEQ ID NO: 365590 - DNA, 15 bp, Homo sapiens
gattgatgttgggct

SEQ ID NO: 365591 - DNA, 15 bp, Homo sapiens
agattgatgttgggc

SEQ ID NO: 365592 - DNA, 15 bp, Homo sapiens
aagattgatgttggg

SEQ ID NO: 365593 - DNA, 15 bp, Homo sapiens
caagattgatgttgg

SEQ ID NO: 365594 - DNA, 15 bp, Homo sapiens
tcaagattgatgttg

SEQ ID NO: 365595 - DNA, 15 bp, Homo sapiens
ctcaagattgatgtt

SEQ ID NO: 365596 - DNA, 15 bp, Homo sapiens
tctcaagattgatgt

SEQ ID NO: 365597 - DNA, 15 bp, Homo sapiens
ttctcaagattgatg

SEQ ID NO: 365598 - DNA, 15 bp, Homo sapiens
attctcaagattgat

SEQ ID NO: 365599 - DNA, 15 bp, Homo sapiens
cattctcaagattga

SEQ ID NO: 365600 - DNA, 15 bp, Homo sapiens
acattctcaagattg

SEQ ID NO: 365601 - DNA, 15 bp, Homo sapiens
aacattctcaagatt

SEQ ID NO: 365602 - DNA, 15 bp, Homo sapiens
aaacattctcaagat

SEQ ID NO: 365603 - DNA, 15 bp, Homo sapiens
aaaacattctcaaga

SEQ ID NO: 365604 - DNA, 15 bp, Homo sapiens
gaaaacattctcaag

SEQ ID NO: 365605 - DNA, 15 bp, Homo sapiens
tgaaaacattctcaa

SEQ ID NO: 365606 - DNA, 15 bp, Homo sapiens
ttgaaaacattctca

SEQ ID NO: 365607 - DNA, 15 bp, Homo sapiens
cttgaaaacattctc

SEQ ID NO: 365608 - DNA, 15 bp, Homo sapiens
tcttgaaaacattct

SEQ ID NO: 365609 - DNA, 15 bp, Homo sapiens
ttcttgaaaacattc

SEQ ID NO: 365610 - DNA, 15 bp, Homo sapiens
gttcttgaaaacatt

SEQ ID NO: 365611 - DNA, 15 bp, Homo sapiens
agttcttgaaaacat

SEQ ID NO: 365612 - DNA, 15 bp, Homo sapiens
cagttcttgaaaaca

SEQ ID NO: 365613 - DNA, 15 bp, Homo sapiens
ccagttcttgaaaac

SEQ ID NO: 365614 - DNA, 15 bp, Homo sapiens
cccagttcttgaaaa

SEQ ID NO: 365615 - DNA, 15 bp, Homo sapiens
tcccagttcttgaaa

SEQ ID NO: 365616 - DNA, 15 bp, Homo sapiens
ttcccagttcttgaa

SEQ ID NO: 365617 - DNA, 15 bp, Homo sapiens
tttcccagttcttga

SEQ ID NO: 365618 - DNA, 15 bp, Homo sapiens
gtttcccagttcttg

SEQ ID NO: 365619 - DNA, 15 bp, Homo sapiens
ggtttcccagttctt

SEQ ID NO: 365620 - DNA, 15 bp, Homo sapiens
aggtttcccagttct

SEQ ID NO: 365621 - DNA, 15 bp, Homo sapiens
caggtttcccagttc

SEQ ID NO: 365622 - DNA, 15 bp, Homo sapiens
acaggtttcccagtt

SEQ ID NO: 365623 - DNA, 15 bp, Homo sapiens
gacaggtttcccagt

SEQ ID NO: 365624 - DNA, 15 bp, Homo sapiens
agacaggtttcccag

SEQ ID NO: 365625 - DNA, 15 bp, Homo sapiens
aagacaggtttccca

SEQ ID NO: 365626 - DNA, 15 bp, Homo sapiens
aaagacaggtttccc

SEQ ID NO: 365627 - DNA, 15 bp, Homo sapiens
taaagacaggtttcc

SEQ ID NO: 365628 - DNA, 15 bp, Homo sapiens
ttaaagacaggtttc

SEQ ID NO: 365629 - DNA, 15 bp, Homo sapiens
tttaaagacaggttt

SEQ ID NO: 365630 - DNA, 15 bp, Homo sapiens
ttttaaagacaggtt

SEQ ID NO: 365631 - DNA, 15 bp, Homo sapiens
cttttaaagacaggt

SEQ ID NO: 365632 - DNA, 15 bp, Homo sapiens
ccttttaaagacagg

SEQ ID NO: 365633 - DNA, 15 bp, Homo sapiens
tccttttaaagacag

SEQ ID NO: 365634 - DNA, 15 bp, Homo sapiens
atccttttaaagaca

SEQ ID NO: 365635 - DNA, 15 bp, Homo sapiens
catccttttaaagac

SEQ ID NO: 365636 - DNA, 15 bp, Homo sapiens
tcatccttttaaaga

SEQ ID NO: 365637 - DNA, 15 bp, Homo sapiens
ttcatccttttaaag

SEQ ID NO: 365638 - DNA, 15 bp, Homo sapiens
cttcatccttttaaa

SEQ ID NO: 365639 - DNA, 15 bp, Homo sapiens
ccttcatccttttaa

SEQ ID NO: 365640 - DNA, 15 bp, Homo sapiens
gccttcatcctttta

SEQ ID NO: 365641 - DNA, 15 bp, Homo sapiens
tgccttcatcctttt

SEQ ID NO: 365642 - DNA, 15 bp, Homo sapiens
ctgccttcatccttt

SEQ ID NO: 365643 - DNA, 15 bp, Homo sapiens
tctgccttcatcctt

SEQ ID NO: 365644 - DNA, 15 bp, Homo sapiens
ctctgccttcatcct

SEQ ID NO: 365645 - DNA, 15 bp, Homo sapiens
tctctgccttcatcc

SEQ ID NO: 365646 - DNA, 15 bp, Homo sapiens
ctctctgccttcatc

SEQ ID NO: 365647 - DNA, 15 bp, Homo sapiens
cctctctgccttcat

SEQ ID NO: 365648 - DNA, 15 bp, Homo sapiens
tcctctctgccttca

SEQ ID NO: 365649 - DNA, 15 bp, Homo sapiens
gtcctctctgccttc

SEQ ID NO: 365650 - DNA, 15 bp, Homo sapiens
tgtcctctctgcctt

SEQ ID NO: 365651 - DNA, 15 bp, Homo sapiens
atgtcctctctgcct

SEQ ID NO: 365652 - DNA, 15 bp, Homo sapiens
catgtcctctctgcc

SEQ ID NO: 365653 - DNA, 15 bp, Homo sapiens
ccatgtcctctctgc

SEQ ID NO: 365654 - DNA, 15 bp, Homo sapiens
cccatgtcctctctg

SEQ ID NO: 365655 - DNA, 15 bp, Homo sapiens
gcccatgtcctctct

SEQ ID NO: 365656 - DNA, 15 bp, Homo sapiens
agcccatgtcctctc

SEQ ID NO: 365657 - DNA, 15 bp, Homo sapiens
gagcccatgtcctct

SEQ ID NO: 365658 - DNA, 15 bp, Homo sapiens
ggagcccatgtcctc

SEQ ID NO: 365659 - DNA, 15 bp, Homo sapiens
tggagcccatgtcct

SEQ ID NO: 365660 - DNA, 15 bp, Homo sapiens
ttggagcccatgtcc

SEQ ID NO: 365661 - DNA, 15 bp, Homo sapiens
cttggagcccatgtc

SEQ ID NO: 365662 - DNA, 15 bp, Homo sapiens
ccttggagcccatgt

SEQ ID NO: 365663 - DNA, 15 bp, Homo sapiens
tccttggagcccatg

SEQ ID NO: 365664 - DNA, 15 bp, Homo sapiens
ctccttggagcccat

SEQ ID NO: 365665 - DNA, 15 bp, Homo sapiens
tctccttggagccca

SEQ ID NO: 365666 - DNA, 15 bp, Homo sapiens
ctctccttggagccc

SEQ ID NO: 365667 - DNA, 15 bp, Homo sapiens
tctctccttggagcc

SEQ ID NO: 365668 - DNA, 15 bp, Homo sapiens
ctctctccttggagc

SEQ ID NO: 365669 - DNA, 15 bp, Homo sapiens
gctctctccttggag

SEQ ID NO: 365670 - DNA, 15 bp, Homo sapiens
ggctctctccttgga

SEQ ID NO: 365671 - DNA, 15 bp, Homo sapiens
aggctctctccttgg

SEQ ID NO: 365672 - DNA, 15 bp, Homo sapiens
aaggctctctccttg

SEQ ID NO: 365673 - DNA, 15 bp, Homo sapiens
gaaggctctctcctt

SEQ ID NO: 365674 - DNA, 15 bp, Homo sapiens
agaaggctctctcct

SEQ ID NO: 365675 - DNA, 15 bp, Homo sapiens
cagaaggctctctcc

SEQ ID NO: 365676 - DNA, 15 bp, Homo sapiens
gcagaaggctctctc

SEQ ID NO: 365677 - DNA, 15 bp, Homo sapiens
ggcagaaggctctct

SEQ ID NO: 365678 - DNA, 15 bp, Homo sapiens
gggcagaaggctctc

SEQ ID NO: 365679 - DNA, 15 bp, Homo sapiens
agggcagaaggctct

SEQ ID NO: 365680 - DNA, 15 bp, Homo sapiens
aagggcagaaggctc

SEQ ID NO: 365681 - DNA, 15 bp, Homo sapiens
caagggcagaaggct

SEQ ID NO: 365682 - DNA, 15 bp, Homo sapiens
tcaagggcagaaggc

SEQ ID NO: 365683 - DNA, 15 bp, Homo sapiens
atcaagggcagaagg

SEQ ID NO: 365684 - DNA, 15 bp, Homo sapiens
catcaagggcagaag

SEQ ID NO: 365685 - DNA, 15 bp, Homo sapiens
tcatcaagggcagaa

SEQ ID NO: 365686 - DNA, 15 bp, Homo sapiens
ctcatcaagggcaga

SEQ ID NO: 365687 - DNA, 15 bp, Homo sapiens
cctcatcaagggcag

SEQ ID NO: 365688 - DNA, 15 bp, Homo sapiens
ccctcatcaagggca

SEQ ID NO: 365689 - DNA, 15 bp, Homo sapiens
tccctcatcaagggc

SEQ ID NO: 365690 - DNA, 15 bp, Homo sapiens
atccctcatcaaggg

SEQ ID NO: 365691 - DNA, 15 bp, Homo sapiens
catccctcatcaagg

SEQ ID NO: 365692 - DNA, 15 bp, Homo sapiens
tcatccctcatcaag

SEQ ID NO: 365693 - DNA, 15 bp, Homo sapiens
gtcatccctcatcaa

SEQ ID NO: 365694 - DNA, 15 bp, Homo sapiens
tgtcatccctcatca

SEQ ID NO: 365695 - DNA, 15 bp, Homo sapiens
ctgtcatccctcatc

SEQ ID NO: 365696 - DNA, 15 bp, Homo sapiens
tctgtcatccctcat

SEQ ID NO: 365697 - DNA, 15 bp, Homo sapiens
ctctgtcatccctca

SEQ ID NO: 365698 - DNA, 15 bp, Homo sapiens
gctctgtcatccctc

SEQ ID NO: 365699 - DNA, 15 bp, Homo sapiens
tgctctgtcatccct

SEQ ID NO: 365700 - DNA, 15 bp, Homo sapiens
ttgctctgtcatccc

SEQ ID NO: 365701 - DNA, 15 bp, Homo sapiens
gttgctctgtcatcc

SEQ ID NO: 365702 - DNA, 15 bp, Homo sapiens
ggttgctctgtcatc

SEQ ID NO: 365703 - DNA, 15 bp, Homo sapiens
tggttgctctgtcat

SEQ ID NO: 365704 - DNA, 15 bp, Homo sapiens
ctggttgctctgtca

SEQ ID NO: 365705 - DNA, 15 bp, Homo sapiens
cctggttgctctgtc

SEQ ID NO: 365706 - DNA, 15 bp, Homo sapiens
ccctggttgctctgt

SEQ ID NO: 365707 - DNA, 15 bp, Homo sapiens
accctggttgctctg

SEQ ID NO: 365708 - DNA, 15 bp, Homo sapiens
aaccctggttgctct

SEQ ID NO: 365709 - DNA, 15 bp, Homo sapiens
caaccctggttgctc

SEQ ID NO: 365710 - DNA, 15 bp, Homo sapiens
tcaaccctggttgct

SEQ ID NO: 365711 - DNA, 15 bp, Homo sapiens
ctcaaccctggttgc

SEQ ID NO: 365712 - DNA, 15 bp, Homo sapiens
tctcaaccctggttg

SEQ ID NO: 365713 - DNA, 15 bp, Homo sapiens
ttctcaaccctggtt

SEQ ID NO: 365714 - DNA, 15 bp, Homo sapiens
tttctcaaccctggt

SEQ ID NO: 365715 - DNA, 15 bp, Homo sapiens
ctttctcaaccctgg

SEQ ID NO: 365716 - DNA, 15 bp, Homo sapiens
actttctcaaccctg

SEQ ID NO: 365717 - DNA, 15 bp, Homo sapiens
gactttctcaaccct

SEQ ID NO: 365718 - DNA, 15 bp, Homo sapiens
ggactttctcaaccc

SEQ ID NO: 365719 - DNA, 15 bp, Homo sapiens
tggactttctcaacc

SEQ ID NO: 365720 - DNA, 15 bp, Homo sapiens
ttggactttctcaac

SEQ ID NO: 365721 - DNA, 15 bp, Homo sapiens
gttggactttctcaa

SEQ ID NO: 365722 - DNA, 15 bp, Homo sapiens
ggttggactttctca

SEQ ID NO: 365723 - DNA, 15 bp, Homo sapiens
gggttggactttctc

SEQ ID NO: 365724 - DNA, 15 bp, Homo sapiens
tgggttggactttct

SEQ ID NO: 365725 - DNA, 15 bp, Homo sapiens
ttgggttggactttc

SEQ ID NO: 365726 - DNA, 15 bp, Homo sapiens
tttgggttggacttt

SEQ ID NO: 365727 - DNA, 15 bp, Homo sapiens
gtttgggttggactt

SEQ ID NO: 365728 - DNA, 15 bp, Homo sapiens
ggtttgggttggact

SEQ ID NO: 365729 - DNA, 15 bp, Homo sapiens
aggtttgggttggac

SEQ ID NO: 365730 - DNA, 15 bp, Homo sapiens
gaggtttgggttgga

SEQ ID NO: 365731 - DNA, 15 bp, Homo sapiens
ggaggtttgggttgg

SEQ ID NO: 365732 - DNA, 15 bp, Homo sapiens
aggaggtttgggttg

SEQ ID NO: 365733 - DNA, 15 bp, Homo sapiens
aaggaggtttgggtt

SEQ ID NO: 365734 - DNA, 15 bp, Homo sapiens
aaaggaggtttgggt

SEQ ID NO: 365735 - DNA, 15 bp, Homo sapiens
caaaggaggtttggg

SEQ ID NO: 365736 - DNA, 15 bp, Homo sapiens
tcaaaggaggtttgg

SEQ ID NO: 365737 - DNA, 15 bp, Homo sapiens
gtcaaaggaggtttg

SEQ ID NO: 365738 - DNA, 15 bp, Homo sapiens
ggtcaaaggaggttt

SEQ ID NO: 365739 - DNA, 15 bp, Homo sapiens
aggtcaaaggaggtt

SEQ ID NO: 365740 - DNA, 15 bp, Homo sapiens
aaggtcaaaggaggt

SEQ ID NO: 365741 - DNA, 15 bp, Homo sapiens
caaggtcaaaggagg

SEQ ID NO: 365742 - DNA, 15 bp, Homo sapiens
ccaaggtcaaaggag

SEQ ID NO: 365743 - DNA, 15 bp, Homo sapiens
cccaaggtcaaagga

SEQ ID NO: 365744 - DNA, 15 bp, Homo sapiens
tcccaaggtcaaagg

SEQ ID NO: 365745 - DNA, 15 bp, Homo sapiens
ttcccaaggtcaaag

SEQ ID NO: 365746 - DNA, 15 bp, Homo sapiens
gttcccaaggtcaaa

SEQ ID NO: 365747 - DNA, 15 bp, Homo sapiens
ggttcccaaggtcaa

SEQ ID NO: 365748 - DNA, 15 bp, Homo sapiens
tggttcccaaggtca

SEQ ID NO: 365749 - DNA, 15 bp, Homo sapiens
gtggttcccaaggtc

SEQ ID NO: 365750 - DNA, 15 bp, Homo sapiens
ggtggttcccaaggt

SEQ ID NO: 365751 - DNA, 15 bp, Homo sapiens
aggtggttcccaagg

SEQ ID NO: 365752 - DNA, 15 bp, Homo sapiens
caggtggttcccaag

SEQ ID NO: 365753 - DNA, 15 bp, Homo sapiens
ccaggtggttcccaa

SEQ ID NO: 365754 - DNA, 15 bp, Homo sapiens
accaggtggttccca

SEQ ID NO: 365755 - DNA, 15 bp, Homo sapiens
taccaggtggttccc

SEQ ID NO: 365756 - DNA, 15 bp, Homo sapiens
ataccaggtggttcc

SEQ ID NO: 365757 - DNA, 15 bp, Homo sapiens
gataccaggtggttc

SEQ ID NO: 365758 - DNA, 15 bp, Homo sapiens
ggataccaggtggtt

SEQ ID NO: 365759 - DNA, 15 bp, Homo sapiens
cggataccaggtggt

SEQ ID NO: 365760 - DNA, 15 bp, Homo sapiens
acggataccaggtgg

SEQ ID NO: 365761 - DNA, 15 bp, Homo sapiens
tacggataccaggtg

SEQ ID NO: 365762 - DNA, 15 bp, Homo sapiens
ttacggataccaggt

SEQ ID NO: 365763 - DNA, 15 bp, Homo sapiens
attacggataccagg

SEQ ID NO: 365764 - DNA, 15 bp, Homo sapiens
cattacggataccag

SEQ ID NO: 365765 - DNA, 15 bp, Homo sapiens
ccattacggatacca

SEQ ID NO: 365766 - DNA, 15 bp, Homo sapiens
cccattacggatacc

SEQ ID NO: 365767 - DNA, 15 bp, Homo sapiens
ccccattacggatac

SEQ ID NO: 365768 - DNA, 15 bp, Homo sapiens
cccccattacggata

SEQ ID NO: 365769 - DNA, 15 bp, Homo sapiens
tcccccattacggat

SEQ ID NO: 365770 - DNA, 15 bp, Homo sapiens
gtcccccattacgga

SEQ ID NO: 365771 - DNA, 15 bp, Homo sapiens
agtcccccattacgg

SEQ ID NO: 365772 - DNA, 15 bp, Homo sapiens
cagtcccccattacg

SEQ ID NO: 365773 - DNA, 15 bp, Homo sapiens
ccagtcccccattac

SEQ ID NO: 365774 - DNA, 15 bp, Homo sapiens
accagtcccccatta

SEQ ID NO: 365775 - DNA, 15 bp, Homo sapiens
taccagtcccccatt

SEQ ID NO: 365776 - DNA, 15 bp, Homo sapiens
ttaccagtcccccat

SEQ ID NO: 365777 - DNA, 15 bp, Homo sapiens
attaccagtccccca

SEQ ID NO: 365778 - DNA, 15 bp, Homo sapiens
cattaccagtccccc

SEQ ID NO: 365779 - DNA, 15 bp, Homo sapiens
gcattaccagtcccc

SEQ ID NO: 365780 - DNA, 15 bp, Homo sapiens
tgcattaccagtccc

SEQ ID NO: 365781 - DNA, 15 bp, Homo sapiens
ttgcattaccagtcc

SEQ ID NO: 365782 - DNA, 15 bp, Homo sapiens
cttgcattaccagtc

SEQ ID NO: 365783 - DNA, 15 bp, Homo sapiens
tcttgcattaccagt

SEQ ID NO: 365784 - DNA, 15 bp, Homo sapiens
ctcttgcattaccag

SEQ ID NO: 365785 - DNA, 15 bp, Homo sapiens
tctcttgcattacca

SEQ ID NO: 365786 - DNA, 15 bp, Homo sapiens
ttctcttgcattacc

SEQ ID NO: 365787 - DNA, 15 bp, Homo sapiens
tttctcttgcattac

SEQ ID NO: 365788 - DNA, 15 bp, Homo sapiens
atttctcttgcatta

SEQ ID NO: 365789 - DNA, 15 bp, Homo sapiens
aatttctcttgcatt

SEQ ID NO: 365790 - DNA, 15 bp, Homo sapiens
gaatttctcttgcat

SEQ ID NO: 365791 - DNA, 15 bp, Homo sapiens
ggaatttctcttgca

SEQ ID NO: 365792 - DNA, 15 bp, Homo sapiens
tggaatttctcttgc

SEQ ID NO: 365793 - DNA, 15 bp, Homo sapiens
ctggaatttctcttg

SEQ ID NO: 365794 - DNA, 15 bp, Homo sapiens
gctggaatttctctt

SEQ ID NO: 365795 - DNA, 15 bp, Homo sapiens
ggctggaatttctct

SEQ ID NO: 365796 - DNA, 15 bp, Homo sapiens
tggctggaatttctc

SEQ ID NO: 365797 - DNA, 15 bp, Homo sapiens
ctggctggaatttct

SEQ ID NO: 365798 - DNA, 15 bp, Homo sapiens
actggctggaatttc

SEQ ID NO: 365799 - DNA, 15 bp, Homo sapiens
gactggctggaattt

SEQ ID NO: 365800 - DNA, 15 bp, Homo sapiens
agactggctggaatt

SEQ ID NO: 365801 - DNA, 15 bp, Homo sapiens
gagactggctggaat

SEQ ID NO: 365802 - DNA, 15 bp, Homo sapiens
tgagactggctggaa

SEQ ID NO: 365803 - DNA, 15 bp, Homo sapiens
atgagactggctgga

SEQ ID NO: 365804 - DNA, 15 bp, Homo sapiens
aatgagactggctgg

SEQ ID NO: 365805 - DNA, 15 bp, Homo sapiens
caatgagactggctg

SEQ ID NO: 365806 - DNA, 15 bp, Homo sapiens
tcaatgagactggct

SEQ ID NO: 365807 - DNA, 15 bp, Homo sapiens
ctcaatgagactggc

SEQ ID NO: 365808 - DNA, 15 bp, Homo sapiens
gctcaatgagactgg

SEQ ID NO: 365809 - DNA, 15 bp, Homo sapiens
ggctcaatgagactg

SEQ ID NO: 365810 - DNA, 15 bp, Homo sapiens
aggctcaatgagact

SEQ ID NO: 365811 - DNA, 15 bp, Homo sapiens
caggctcaatgagac

SEQ ID NO: 365812 - DNA, 15 bp, Homo sapiens
tcaggctcaatgaga

SEQ ID NO: 365813 - DNA, 15 bp, Homo sapiens
gtcaggctcaatgag

SEQ ID NO: 365814 - DNA, 15 bp, Homo sapiens
agtcaggctcaatga

SEQ ID NO: 365815 - DNA, 15 bp, Homo sapiens
gagtcaggctcaatg

SEQ ID NO: 365816 - DNA, 15 bp, Homo sapiens
cgagtcaggctcaat

SEQ ID NO: 365817 - DNA, 15 bp, Homo sapiens
tcgagtcaggctcaa

SEQ ID NO: 365818 - DNA, 15 bp, Homo sapiens
ctcgagtcaggctca

SEQ ID NO: 365819 - DNA, 15 bp, Homo sapiens
actcgagtcaggctc

SEQ ID NO: 365820 - DNA, 15 bp, Homo sapiens
tactcgagtcaggct

SEQ ID NO: 365821 - DNA, 15 bp, Homo sapiens
ttactcgagtcaggc

SEQ ID NO: 365822 - DNA, 15 bp, Homo sapiens
attactcgagtcagg

SEQ ID NO: 365823 - DNA, 15 bp, Homo sapiens
cattactcgagtcag

SEQ ID NO: 365824 - DNA, 15 bp, Homo sapiens
tcattactcgagtca

SEQ ID NO: 365825 - DNA, 15 bp, Homo sapiens
atcattactcgagtc

SEQ ID NO: 365826 - DNA, 15 bp, Homo sapiens
aatcattactcgagt

SEQ ID NO: 365827 - DNA, 15 bp, Homo sapiens
taatcattactcgag

SEQ ID NO: 365828 - DNA, 15 bp, Homo sapiens
ttaatcattactcga

SEQ ID NO: 365829 - DNA, 15 bp, Homo sapiens
gttaatcattactcg

SEQ ID NO: 365830 - DNA, 15 bp, Homo sapiens
agttaatcattactc

SEQ ID NO: 365831 - DNA, 15 bp, Homo sapiens
cagttaatcattact

SEQ ID NO: 365832 - DNA, 15 bp, Homo sapiens
ccagttaatcattac

SEQ ID NO: 365833 - DNA, 15 bp, Homo sapiens
gccagttaatcatta

SEQ ID NO: 365834 - DNA, 15 bp, Homo sapiens
agccagttaatcatt

SEQ ID NO: 365835 - DNA, 15 bp, Homo sapiens
cagccagttaatcat

SEQ ID NO: 365836 - DNA, 15 bp, Homo sapiens
gcagccagttaatca

SEQ ID NO: 365837 - DNA, 15 bp, Homo sapiens
ggcagccagttaatc

SEQ ID NO: 365838 - DNA, 15 bp, Homo sapiens
gggcagccagttaat

SEQ ID NO: 365839 - DNA, 15 bp, Homo sapiens
cgggcagccagttaa

SEQ ID NO: 365840 - DNA, 15 bp, Homo sapiens
ccgggcagccagtta

SEQ ID NO: 365841 - DNA, 15 bp, Homo sapiens
tccgggcagccagtt

SEQ ID NO: 365842 - DNA, 15 bp, Homo sapiens
tctgtcttcaacaag

SEQ ID NO: 365843 - DNA, 15 bp, Homo sapiens
atctgtcttcaacaa

SEQ ID NO: 365844 - DNA, 15 bp, Homo sapiens
gatctgtcttcaaca

SEQ ID NO: 365845 - DNA, 15 bp, Homo sapiens
ggatctgtcttcaac

SEQ ID NO: 365846 - DNA, 15 bp, Homo sapiens
gggatctgtcttcaa

SEQ ID NO: 365847 - DNA, 15 bp, Homo sapiens
tgggatctgtcttca

SEQ ID NO: 365848 - DNA, 15 bp, Homo sapiens
ttgggatctgtcttc

SEQ ID NO: 365849 - DNA, 15 bp, Homo sapiens
cttgggatctgtctt

SEQ ID NO: 365850 - DNA, 15 bp, Homo sapiens
gcttgggatctgtct

SEQ ID NO: 365851 - DNA, 15 bp, Homo sapiens
tgcttgggatctgtc

SEQ ID NO: 365852 - DNA, 15 bp, Homo sapiens
atgcttgggatctgt

SEQ ID NO: 365853 - DNA, 15 bp, Homo sapiens
tatgcttgggatctg

SEQ ID NO: 365854 - DNA, 15 bp, Homo sapiens
gtatgcttgggatct

SEQ ID NO: 365855 - DNA, 15 bp, Homo sapiens
cgtatgcttgggatc

SEQ ID NO: 365856 - DNA, 15 bp, Homo sapiens
tcgtatgcttgggat

SEQ ID NO: 365857 - DNA, 15 bp, Homo sapiens
atcgtatgcttggga

SEQ ID NO: 365858 - DNA, 15 bp, Homo sapiens
catcgtatgcttggg

SEQ ID NO: 365859 - DNA, 15 bp, Homo sapiens
ccatcgtatgcttgg

SEQ ID NO: 365860 - DNA, 15 bp, Homo sapiens
cccatcgtatgcttg

SEQ ID NO: 365861 - DNA, 15 bp, Homo sapiens
tcccatcgtatgctt

SEQ ID NO: 365862 - DNA, 15 bp, Homo sapiens
atcccatcgtatgct

SEQ ID NO: 365863 - DNA, 15 bp, Homo sapiens
aatcccatcgtatgc

SEQ ID NO: 365864 - DNA, 15 bp, Homo sapiens
aaatcccatcgtatg

SEQ ID NO: 365865 - DNA, 15 bp, Homo sapiens
gaaatcccatcgtat

SEQ ID NO: 365866 - DNA, 15 bp, Homo sapiens
tgaaatcccatcgta

SEQ ID NO: 365867 - DNA, 15 bp, Homo sapiens
ctgaaatcccatcgt

SEQ ID NO: 365868 - DNA, 15 bp, Homo sapiens
tctgaaatcccatcg

SEQ ID NO: 365869 - DNA, 15 bp, Homo sapiens
ctctgaaatcccatc

SEQ ID NO: 365870 - DNA, 15 bp, Homo sapiens
actctgaaatcccat

SEQ ID NO: 365871 - DNA, 15 bp, Homo sapiens
tactctgaaatccca

SEQ ID NO: 365872 - DNA, 15 bp, Homo sapiens
ctactctgaaatccc

SEQ ID NO: 365873 - DNA, 15 bp, Homo sapiens
tctactctgaaatcc

SEQ ID NO: 365874 - DNA, 15 bp, Homo sapiens
atctactctgaaatc

SEQ ID NO: 365875 - DNA, 15 bp, Homo sapiens
gatctactctgaaat

SEQ ID NO: 365876 - DNA, 15 bp, Homo sapiens
agatctactctgaaa

SEQ ID NO: 365877 - DNA, 15 bp, Homo sapiens
cagatctactctgaa

SEQ ID NO: 365878 - DNA, 15 bp, Homo sapiens
tcagatctactctga

SEQ ID NO: 365879 - DNA, 15 bp, Homo sapiens
ctcagatctactctg

SEQ ID NO: 365880 - DNA, 15 bp, Homo sapiens
cctcagatctactct

SEQ ID NO: 365881 - DNA, 15 bp, Homo sapiens
gcctcagatctactc

SEQ ID NO: 365882 - DNA, 15 bp, Homo sapiens
agcctcagatctact

SEQ ID NO: 365883 - DNA, 15 bp, Homo sapiens
aagcctcagatctac

SEQ ID NO: 365884 - DNA, 15 bp, Homo sapiens
gaagcctcagatcta

SEQ ID NO: 365885 - DNA, 15 bp, Homo sapiens
ggaagcctcagatct

SEQ ID NO: 365886 - DNA, 15 bp, Homo sapiens
gggaagcctcagatc

SEQ ID NO: 365887 - DNA, 15 bp, Homo sapiens
agggaagcctcagat

SEQ ID NO: 365888 - DNA, 15 bp, Homo sapiens
gagggaagcctcaga

SEQ ID NO: 365889 - DNA, 15 bp, Homo sapiens
ggagggaagcctcag

SEQ ID NO: 365890 - DNA, 15 bp, Homo sapiens
gggagggaagcctca

SEQ ID NO: 365891 - DNA, 15 bp, Homo sapiens
tgggagggaagcctc

SEQ ID NO: 365892 - DNA, 15 bp, Homo sapiens
ttgggagggaagcct

SEQ ID NO: 365893 - DNA, 15 bp, Homo sapiens
cttgggagggaagcc

SEQ ID NO: 365894 - DNA, 15 bp, Homo sapiens
acttgggagggaagc

SEQ ID NO: 365895 - DNA, 15 bp, Homo sapiens
aacttgggagggaag

SEQ ID NO: 365896 - DNA, 15 bp, Homo sapiens
gaacttgggagggaa

SEQ ID NO: 365897 - DNA, 15 bp, Homo sapiens
agaacttgggaggga

SEQ ID NO: 365898 - DNA, 15 bp, Homo sapiens
cagaacttgggaggg

SEQ ID NO: 365899 - DNA, 15 bp, Homo sapiens
tcagaacttgggagg

SEQ ID NO: 365900 - DNA, 15 bp, Homo sapiens
atcagaacttgggag

SEQ ID NO: 365901 - DNA, 15 bp, Homo sapiens
aatcagaacttggga

SEQ ID NO: 365902 - DNA, 15 bp, Homo sapiens
gaatcagaacttggg

SEQ ID NO: 365903 - DNA, 15 bp, Homo sapiens
ggaatcagaacttgg

SEQ ID NO: 365904 - DNA, 15 bp, Homo sapiens
gggaatcagaacttg

SEQ ID NO: 365905 - DNA, 15 bp, Homo sapiens
tgggaatcagaactt

SEQ ID NO: 365906 - DNA, 15 bp, Homo sapiens
ctgggaatcagaact

SEQ ID NO: 365907 - DNA, 15 bp, Homo sapiens
gctgggaatcagaac

SEQ ID NO: 365908 - DNA, 15 bp, Homo sapiens
ggctgggaatcagaa

SEQ ID NO: 365909 - DNA, 15 bp, Homo sapiens
gggctgggaatcaga

SEQ ID NO: 365910 - DNA, 15 bp, Homo sapiens
tgggctgggaatcag

SEQ ID NO: 365911 - DNA, 15 bp, Homo sapiens
ctgggctgggaatca

SEQ ID NO: 365912 - DNA, 15 bp, Homo sapiens
gctgggctgggaatc

SEQ ID NO: 365913 - DNA, 15 bp, Homo sapiens
ggctgggctgggaat

SEQ ID NO: 365914 - DNA, 15 bp, Homo sapiens
aggctgggctgggaa

SEQ ID NO: 365915 - DNA, 15 bp, Homo sapiens
caggctgggctggga

SEQ ID NO: 365916 - DNA, 15 bp, Homo sapiens
gcaggctgggctggg

SEQ ID NO: 365917 - DNA, 15 bp, Homo sapiens
agcaggctgggctgg

SEQ ID NO: 365918 - DNA, 15 bp, Homo sapiens
cagcaggctgggctg

SEQ ID NO: 365919 - DNA, 15 bp, Homo sapiens
gcagcaggctgggct

SEQ ID NO: 365920 - DNA, 15 bp, Homo sapiens
tgcagcaggctgggc

SEQ ID NO: 365921 - DNA, 15 bp, Homo sapiens
ctgcagcaggctggg

SEQ ID NO: 365922 - DNA, 15 bp, Homo sapiens
cctgcagcaggctgg

SEQ ID NO: 365923 - DNA, 15 bp, Homo sapiens
tcctgcagcaggctg

SEQ ID NO: 365924 - DNA, 15 bp, Homo sapiens
atcctgcagcaggct

SEQ ID NO: 365925 - DNA, 15 bp, Homo sapiens
aatcctgcagcaggc

SEQ ID NO: 365926 - DNA, 15 bp, Homo sapiens
aaatcctgcagcagg

SEQ ID NO: 365927 - DNA, 15 bp, Homo sapiens
aaaatcctgcagcag

SEQ ID NO: 365928 - DNA, 15 bp, Homo sapiens
caaaatcctgcagca

SEQ ID NO: 365929 - DNA, 15 bp, Homo sapiens
gcaaaatcctgcagc

SEQ ID NO: 365930 - DNA, 15 bp, Homo sapiens
tgcaaaatcctgcag

SEQ ID NO: 365931 - DNA, 15 bp, Homo sapiens
ctgcaaaatcctgca

SEQ ID NO: 365932 - DNA, 15 bp, Homo sapiens
gctgcaaaatcctgc

SEQ ID NO: 365933 - DNA, 15 bp, Homo sapiens
tgctgcaaaatcctg

SEQ ID NO: 365934 - DNA, 15 bp, Homo sapiens
gtgctgcaaaatcct

SEQ ID NO: 365935 - DNA, 15 bp, Homo sapiens
tgtgctgcaaaatcc

SEQ ID NO: 365936 - DNA, 15 bp, Homo sapiens
atgtgctgcaaaatc

SEQ ID NO: 365937 - DNA, 15 bp, Homo sapiens
catgtgctgcaaaat

SEQ ID NO: 365938 - DNA, 15 bp, Homo sapiens
acatgtgctgcaaaa

SEQ ID NO: 365939 - DNA, 15 bp, Homo sapiens
gacatgtgctgcaaa

SEQ ID NO: 365940 - DNA, 15 bp, Homo sapiens
agacatgtgctgcaa

SEQ ID NO: 365941 - DNA, 15 bp, Homo sapiens
cagacatgtgctgca

SEQ ID NO: 365942 - DNA, 15 bp, Homo sapiens
ccagacatgtgctgc

SEQ ID NO: 365943 - DNA, 15 bp, Homo sapiens
cccagacatgtgctg

SEQ ID NO: 365944 - DNA, 15 bp, Homo sapiens
ccccagacatgtgct

SEQ ID NO: 365945 - DNA, 15 bp, Homo sapiens
gccccagacatgtgc

SEQ ID NO: 365946 - DNA, 15 bp, Homo sapiens
agccccagacatgtg

SEQ ID NO: 365947 - DNA, 15 bp, Homo sapiens
cagccccagacatgt

SEQ ID NO: 365948 - DNA, 15 bp, Homo sapiens
ccagccccagacatg

SEQ ID NO: 365949 - DNA, 15 bp, Homo sapiens
cccagccccagacat

SEQ ID NO: 365950 - DNA, 15 bp, Homo sapiens
tcccagccccagaca

SEQ ID NO: 365951 - DNA, 15 bp, Homo sapiens
ctcccagccccagac

SEQ ID NO: 365952 - DNA, 15 bp, Homo sapiens
gctcccagccccaga

SEQ ID NO: 365953 - DNA, 15 bp, Homo sapiens
tgctcccagccccag

SEQ ID NO: 365954 - DNA, 15 bp, Homo sapiens
gtgctcccagcccca

SEQ ID NO: 365955 - DNA, 15 bp, Homo sapiens
ggtgctcccagcccc

SEQ ID NO: 365956 - DNA, 15 bp, Homo sapiens
tggtgctcccagccc

SEQ ID NO: 365957 - DNA, 15 bp, Homo sapiens
ctggtgctcccagcc

SEQ ID NO: 365958 - DNA, 15 bp, Homo sapiens
cctggtgctcccagc

SEQ ID NO: 365959 - DNA, 15 bp, Homo sapiens
ccctggtgctcccag

SEQ ID NO: 365960 - DNA, 15 bp, Homo sapiens
accctggtgctccca

SEQ ID NO: 365961 - DNA, 15 bp, Homo sapiens
caccctggtgctccc

SEQ ID NO: 365962 - DNA, 15 bp, Homo sapiens
ccaccctggtgctcc

SEQ ID NO: 365963 - DNA, 15 bp, Homo sapiens
cccaccctggtgctc

SEQ ID NO: 365964 - DNA, 15 bp, Homo sapiens
tcccaccctggtgct

SEQ ID NO: 365965 - DNA, 15 bp, Homo sapiens
ctcccaccctggtgc

SEQ ID NO: 365966 - DNA, 15 bp, Homo sapiens
gctcccaccctggtg

SEQ ID NO: 365967 - DNA, 15 bp, Homo sapiens
tgctcccaccctggt

SEQ ID NO: 365968 - DNA, 15 bp, Homo sapiens
gtgctcccaccctgg

SEQ ID NO: 365969 - DNA, 15 bp, Homo sapiens
agtgctcccaccctg

SEQ ID NO: 365970 - DNA, 15 bp, Homo sapiens
cagtgctcccaccct

SEQ ID NO: 365971 - DNA, 15 bp, Homo sapiens
gcagtgctcccaccc

SEQ ID NO: 365972 - DNA, 15 bp, Homo sapiens
ggcagtgctcccacc

SEQ ID NO: 365973 - DNA, 15 bp, Homo sapiens
tggcagtgctcccac

SEQ ID NO: 365974 - DNA, 15 bp, Homo sapiens
ttggcagtgctccca

SEQ ID NO: 365975 - DNA, 15 bp, Homo sapiens
gttggcagtgctccc

SEQ ID NO: 365976 - DNA, 15 bp, Homo sapiens
tgttggcagtgctcc

SEQ ID NO: 365977 - DNA, 15 bp, Homo sapiens
ctgttggcagtgctc

SEQ ID NO: 365978 - DNA, 15 bp, Homo sapiens
actgttggcagtgct

SEQ ID NO: 365979 - DNA, 15 bp, Homo sapiens
tactgttggcagtgc

SEQ ID NO: 365980 - DNA, 15 bp, Homo sapiens
ctactgttggcagtg

SEQ ID NO: 365981 - DNA, 15 bp, Homo sapiens
cctactgttggcagt

SEQ ID NO: 365982 - DNA, 15 bp, Homo sapiens
tcctactgttggcag

SEQ ID NO: 365983 - DNA, 15 bp, Homo sapiens
ctcctactgttggca

SEQ ID NO: 365984 - DNA, 15 bp, Homo sapiens
gctcctactgttggc

SEQ ID NO: 365985 - DNA, 15 bp, Homo sapiens
agctcctactgttgg

SEQ ID NO: 365986 - DNA, 15 bp, Homo sapiens
cagctcctactgttg

SEQ ID NO: 365987 - DNA, 15 bp, Homo sapiens
acagctcctactgtt

SEQ ID NO: 365988 - DNA, 15 bp, Homo sapiens
tacagctcctactgt

SEQ ID NO: 365989 - DNA, 15 bp, Homo sapiens
ttacagctcctactg

SEQ ID NO: 365990 - DNA, 15 bp, Homo sapiens
attacagctcctact

SEQ ID NO: 365991 - DNA, 15 bp, Homo sapiens
aattacagctcctac

SEQ ID NO: 365992 - DNA, 15 bp, Homo sapiens
caattacagctccta

SEQ ID NO: 365993 - DNA, 15 bp, Homo sapiens
acaattacagctcct

SEQ ID NO: 365994 - DNA, 15 bp, Homo sapiens
aacaattacagctcc

SEQ ID NO: 365995 - DNA, 15 bp, Homo sapiens
gaacaattacagctc

SEQ ID NO: 365996 - DNA, 15 bp, Homo sapiens
ggaacaattacagct

SEQ ID NO: 365997 - DNA, 15 bp, Homo sapiens
gggaacaattacagc

SEQ ID NO: 365998 - DNA, 15 bp, Homo sapiens
agggaacaattacag

SEQ ID NO: 365999 - DNA, 15 bp, Homo sapiens
tagggaacaattaca

SEQ ID NO: 366000 - DNA, 15 bp, Homo sapiens
ctagggaacaattac

SEQ ID NO: 366001 - DNA, 15 bp, Homo sapiens
gctagggaacaatta

SEQ ID NO: 366002 - DNA, 15 bp, Homo sapiens
cgctagggaacaatt

SEQ ID NO: 366003 - DNA, 15 bp, Homo sapiens
ccgctagggaacaat

SEQ ID NO: 366004 - DNA, 15 bp, Homo sapiens
cccgctagggaacaa

SEQ ID NO: 366005 - DNA, 15 bp, Homo sapiens
ccccgctagggaaca

SEQ ID NO: 366006 - DNA, 15 bp, Homo sapiens
gccccgctagggaac

SEQ ID NO: 366007 - DNA, 15 bp, Homo sapiens
tgccccgctagggaa

SEQ ID NO: 366008 - DNA, 15 bp, Homo sapiens
ctgccccgctaggga

SEQ ID NO: 366009 - DNA, 15 bp, Homo sapiens
cctgccccgctaggg

SEQ ID NO: 366010 - DNA, 15 bp, Homo sapiens
acctgccccgctagg

SEQ ID NO: 366011 - DNA, 15 bp, Homo sapiens
aacctgccccgctag

SEQ ID NO: 366012 - DNA, 15 bp, Homo sapiens
aaacctgccccgcta

SEQ ID NO: 366013 - DNA, 15 bp, Homo sapiens
aaaacctgccccgct

SEQ ID NO: 366014 - DNA, 15 bp, Homo sapiens
gaaaacctgccccgc

SEQ ID NO: 366015 - DNA, 15 bp, Homo sapiens
ggaaaacctgccccg

SEQ ID NO: 366016 - DNA, 15 bp, Homo sapiens
aggaaaacctgcccc

SEQ ID NO: 366017 - DNA, 15 bp, Homo sapiens
gaggaaaacctgccc

SEQ ID NO: 366018 - DNA, 15 bp, Homo sapiens
tgaggaaaacctgcc

SEQ ID NO: 366019 - DNA, 15 bp, Homo sapiens
ctgaggaaaacctgc

SEQ ID NO: 366020 - DNA, 15 bp, Homo sapiens
cctgaggaaaacctg

SEQ ID NO: 366021 - DNA, 15 bp, Homo sapiens
ccctgaggaaaacct

SEQ ID NO: 366022 - DNA, 15 bp, Homo sapiens
gccctgaggaaaacc

SEQ ID NO: 366023 - DNA, 15 bp, Homo sapiens
agccctgaggaaaac

SEQ ID NO: 366024 - DNA, 15 bp, Homo sapiens
gagccctgaggaaaa

SEQ ID NO: 366025 - DNA, 15 bp, Homo sapiens
tgagccctgaggaaa

SEQ ID NO: 366026 - DNA, 15 bp, Homo sapiens
gtgagccctgaggaa

SEQ ID NO: 366027 - DNA, 15 bp, Homo sapiens
tgtgagccctgagga

SEQ ID NO: 366028 - DNA, 15 bp, Homo sapiens
ctgtgagccctgagg

SEQ ID NO: 366029 - DNA, 15 bp, Homo sapiens
cctgtgagccctgag

SEQ ID NO: 366030 - DNA, 15 bp, Homo sapiens
acctgtgagccctga

SEQ ID NO: 366031 - DNA, 15 bp, Homo sapiens
tacctgtgagccctg

SEQ ID NO: 366032 - DNA, 15 bp, Homo sapiens
atacctgtgagccct

SEQ ID NO: 366033 - DNA, 15 bp, Homo sapiens
catacctgtgagccc

SEQ ID NO: 366034 - DNA, 15 bp, Homo sapiens
gcatacctgtgagcc

SEQ ID NO: 366035 - DNA, 15 bp, Homo sapiens
cgcatacctgtgagc

SEQ ID NO: 366036 - DNA, 15 bp, Homo sapiens
acgcatacctgtgag

SEQ ID NO: 366037 - DNA, 15 bp, Homo sapiens
cacgcatacctgtga

SEQ ID NO: 366038 - DNA, 15 bp, Homo sapiens
tcacgcatacctgtg

SEQ ID NO: 366039 - DNA, 15 bp, Homo sapiens
ttcacgcatacctgt

SEQ ID NO: 366040 - DNA, 15 bp, Homo sapiens
cttcacgcatacctg

SEQ ID NO: 366041 - DNA, 15 bp, Homo sapiens
ccttcacgcatacct

SEQ ID NO: 366042 - DNA, 15 bp, Homo sapiens
gccttcacgcatacc

SEQ ID NO: 366043 - DNA, 15 bp, Homo sapiens
ggccttcacgcatac

SEQ ID NO: 366044 - DNA, 15 bp, Homo sapiens
aggccttcacgcata

SEQ ID NO: 366045 - DNA, 15 bp, Homo sapiens
caggccttcacgcat

SEQ ID NO: 366046 - DNA, 15 bp, Homo sapiens
ccaggccttcacgca

SEQ ID NO: 366047 - DNA, 15 bp, Homo sapiens
tccaggccttcacgc

SEQ ID NO: 366048 - DNA, 15 bp, Homo sapiens
ttccaggccttcacg

SEQ ID NO: 366049 - DNA, 15 bp, Homo sapiens
attccaggccttcac

SEQ ID NO: 366050 - DNA, 15 bp, Homo sapiens
cattccaggccttca

SEQ ID NO: 366051 - DNA, 15 bp, Homo sapiens
gcattccaggccttc

SEQ ID NO: 366052 - DNA, 15 bp, Homo sapiens
ggcattccaggcctt

SEQ ID NO: 366053 - DNA, 15 bp, Homo sapiens
tggcattccaggcct

SEQ ID NO: 366054 - DNA, 15 bp, Homo sapiens
ctggcattccaggcc

SEQ ID NO: 366055 - DNA, 15 bp, Homo sapiens
actggcattccaggc

SEQ ID NO: 366056 - DNA, 15 bp, Homo sapiens
cactggcattccagg

SEQ ID NO: 366057 - DNA, 15 bp, Homo sapiens
gcactggcattccag

SEQ ID NO: 366058 - DNA, 15 bp, Homo sapiens
agcactggcattcca

SEQ ID NO: 366059 - DNA, 15 bp, Homo sapiens
cagcactggcattcc

SEQ ID NO: 366060 - DNA, 15 bp, Homo sapiens
ccagcactggcattc

SEQ ID NO: 366061 - DNA, 15 bp, Homo sapiens
cccagcactggcatt

SEQ ID NO: 366062 - DNA, 15 bp, Homo sapiens
ccccagcactggcat

SEQ ID NO: 366063 - DNA, 15 bp, Homo sapiens
cccccagcactggca

SEQ ID NO: 366064 - DNA, 15 bp, Homo sapiens
ccccccagcactggc

SEQ ID NO: 366065 - DNA, 15 bp, Homo sapiens
accccccagcactgg

SEQ ID NO: 366066 - DNA, 15 bp, Homo sapiens
gaccccccagcactg

SEQ ID NO: 366067 - DNA, 15 bp, Homo sapiens
tgaccccccagcact

SEQ ID NO: 366068 - DNA, 15 bp, Homo sapiens
gtgaccccccagcac

SEQ ID NO: 366069 - DNA, 15 bp, Homo sapiens
cgtgaccccccagca

SEQ ID NO: 366070 - DNA, 15 bp, Homo sapiens
ccgtgaccccccagc

SEQ ID NO: 366071 - DNA, 15 bp, Homo sapiens
cccgtgaccccccag

SEQ ID NO: 366072 - DNA, 15 bp, Homo sapiens
ccccgtgacccccca

SEQ ID NO: 366073 - DNA, 15 bp, Homo sapiens
gccccgtgacccccc

SEQ ID NO: 366074 - DNA, 15 bp, Homo sapiens
agccccgtgaccccc

SEQ ID NO: 366075 - DNA, 15 bp, Homo sapiens
cagccccgtgacccc

SEQ ID NO: 366076 - DNA, 15 bp, Homo sapiens
ccagccccgtgaccc

SEQ ID NO: 366077 - DNA, 15 bp, Homo sapiens
gccagccccgtgacc

SEQ ID NO: 366078 - DNA, 15 bp, Homo sapiens
agccagccccgtgac

SEQ ID NO: 366079 - DNA, 15 bp, Homo sapiens
cagccagccccgtga

SEQ ID NO: 366080 - DNA, 15 bp, Homo sapiens
tcagccagccccgtg

SEQ ID NO: 366081 - DNA, 15 bp, Homo sapiens
gtcagccagccccgt

SEQ ID NO: 366082 - DNA, 15 bp, Homo sapiens
tgtcagccagccccg

SEQ ID NO: 366083 - DNA, 15 bp, Homo sapiens
ctgtcagccagcccc

SEQ ID NO: 366084 - DNA, 15 bp, Homo sapiens
cctgtcagccagccc

SEQ ID NO: 366085 - DNA, 15 bp, Homo sapiens
gcctgtcagccagcc

SEQ ID NO: 366086 - DNA, 15 bp, Homo sapiens
tgcctgtcagccagc

SEQ ID NO: 366087 - DNA, 15 bp, Homo sapiens
gtgcctgtcagccag

SEQ ID NO: 366088 - DNA, 15 bp, Homo sapiens
cgtgcctgtcagcca

SEQ ID NO: 366089 - DNA, 15 bp, Homo sapiens
ccgtgcctgtcagcc

SEQ ID NO: 366090 - DNA, 15 bp, Homo sapiens
cccgtgcctgtcagc

SEQ ID NO: 366091 - DNA, 15 bp, Homo sapiens
ccccgtgcctgtcag

SEQ ID NO: 366092 - DNA, 15 bp, Homo sapiens
accccgtgcctgtca

SEQ ID NO: 366093 - DNA, 15 bp, Homo sapiens
taccccgtgcctgtc

SEQ ID NO: 366094 - DNA, 15 bp, Homo sapiens
ctaccccgtgcctgt

SEQ ID NO: 366095 - DNA, 15 bp, Homo sapiens
gctaccccgtgcctg

SEQ ID NO: 366096 - DNA, 15 bp, Homo sapiens
ggctaccccgtgcct

SEQ ID NO: 366097 - DNA, 15 bp, Homo sapiens
tggctaccccgtgcc

SEQ ID NO: 366098 - DNA, 15 bp, Homo sapiens
ctggctaccccgtgc

SEQ ID NO: 366099 - DNA, 15 bp, Homo sapiens
tctggctaccccgtg

SEQ ID NO: 366100 - DNA, 15 bp, Homo sapiens
ctctggctaccccgt

SEQ ID NO: 366101 - DNA, 15 bp, Homo sapiens
gctctggctaccccg

SEQ ID NO: 366102 - DNA, 15 bp, Homo sapiens
tgctctggctacccc

SEQ ID NO: 366103 - DNA, 15 bp, Homo sapiens
atgctctggctaccc

SEQ ID NO: 366104 - DNA, 15 bp, Homo sapiens
aatgctctggctacc

SEQ ID NO: 366105 - DNA, 15 bp, Homo sapiens
caatgctctggctac

SEQ ID NO: 366106 - DNA, 15 bp, Homo sapiens
acaatgctctggcta

SEQ ID NO: 366107 - DNA, 15 bp, Homo sapiens
aacaatgctctggct

SEQ ID NO: 366108 - DNA, 15 bp, Homo sapiens
caacaatgctctggc

SEQ ID NO: 366109 - DNA, 15 bp, Homo sapiens
acaacaatgctctgg

SEQ ID NO: 366110 - DNA, 15 bp, Homo sapiens
aacaacaatgctctg

SEQ ID NO: 366111 - DNA, 15 bp, Homo sapiens
gaacaacaatgctct

SEQ ID NO: 366112 - DNA, 15 bp, Homo sapiens
ggaacaacaatgctc

SEQ ID NO: 366113 - DNA, 15 bp, Homo sapiens
aggaacaacaatgct

SEQ ID NO: 366114 - DNA, 15 bp, Homo sapiens
caggaacaacaatgc

SEQ ID NO: 366115 - DNA, 15 bp, Homo sapiens
tcaggaacaacaatg

SEQ ID NO: 366116 - DNA, 15 bp, Homo sapiens
ctcaggaacaacaat

SEQ ID NO: 366117 - DNA, 15 bp, Homo sapiens
cctcaggaacaacaa

SEQ ID NO: 366118 - DNA, 15 bp, Homo sapiens
tcctcaggaacaaca

SEQ ID NO: 366119 - DNA, 15 bp, Homo sapiens
atcctcaggaacaac

SEQ ID NO: 366120 - DNA, 15 bp, Homo sapiens
catcctcaggaacaa

SEQ ID NO: 366121 - DNA, 15 bp, Homo sapiens
gcatcctcaggaaca

SEQ ID NO: 366122 - DNA, 15 bp, Homo sapiens
cgcatcctcaggaac

SEQ ID NO: 366123 - DNA, 15 bp, Homo sapiens
tcgcatcctcaggaa

SEQ ID NO: 366124 - DNA, 15 bp, Homo sapiens
ttcgcatcctcagga

SEQ ID NO: 366125 - DNA, 15 bp, Homo sapiens
tttcgcatcctcagg

SEQ ID NO: 366126 - DNA, 15 bp, Homo sapiens
ttttcgcatcctcag

SEQ ID NO: 366127 - DNA, 15 bp, Homo sapiens
cttttcgcatcctca

SEQ ID NO: 366128 - DNA, 15 bp, Homo sapiens
tcttttcgcatcctc

SEQ ID NO: 366129 - DNA, 15 bp, Homo sapiens
ctcttttcgcatcct

SEQ ID NO: 366130 - DNA, 15 bp, Homo sapiens
cctcttttcgcatcc

SEQ ID NO: 366131 - DNA, 15 bp, Homo sapiens
ccctcttttcgcatc

SEQ ID NO: 366132 - DNA, 15 bp, Homo sapiens
gccctcttttcgcat

SEQ ID NO: 366133 - DNA, 15 bp, Homo sapiens
tgccctcttttcgca

SEQ ID NO: 366134 - DNA, 15 bp, Homo sapiens
ctgccctcttttcgc

SEQ ID NO: 366135 - DNA, 15 bp, Homo sapiens
actgccctcttttcg

SEQ ID NO: 366136 - DNA, 15 bp, Homo sapiens
tactgccctcttttc

SEQ ID NO: 366137 - DNA, 15 bp, Homo sapiens
gtactgccctctttt

SEQ ID NO: 366138 - DNA, 15 bp, Homo sapiens
agtactgccctcttt

SEQ ID NO: 366139 - DNA, 15 bp, Homo sapiens
aagtactgccctctt

SEQ ID NO: 366140 - DNA, 15 bp, Homo sapiens
taagtactgccctct

SEQ ID NO: 366141 - DNA, 15 bp, Homo sapiens
ctaagtactgccctc

SEQ ID NO: 366142 - DNA, 15 bp, Homo sapiens
tctaagtactgccct

SEQ ID NO: 366143 - DNA, 15 bp, Homo sapiens
ctctaagtactgccc

SEQ ID NO: 366144 - DNA, 15 bp, Homo sapiens
tctctaagtactgcc

SEQ ID NO: 366145 - DNA, 15 bp, Homo sapiens
ttctctaagtactgc

SEQ ID NO: 366146 - DNA, 15 bp, Homo sapiens
tttctctaagtactg

SEQ ID NO: 366147 - DNA, 15 bp, Homo sapiens
gtttctctaagtact

SEQ ID NO: 366148 - DNA, 15 bp, Homo sapiens
agtttctctaagtac

SEQ ID NO: 366149 - DNA, 15 bp, Homo sapiens
gagtttctctaagta

SEQ ID NO: 366150 - DNA, 15 bp, Homo sapiens
tgagtttctctaagt

SEQ ID NO: 366151 - DNA, 15 bp, Homo sapiens
gtgagtttctctaag

SEQ ID NO: 366152 - DNA, 15 bp, Homo sapiens
agtgagtttctctaa

SEQ ID NO: 366153 - DNA, 15 bp, Homo sapiens
cagtgagtttctcta

SEQ ID NO: 366154 - DNA, 15 bp, Homo sapiens
ccagtgagtttctct

SEQ ID NO: 366155 - DNA, 15 bp, Homo sapiens
accagtgagtttctc

SEQ ID NO: 366156 - DNA, 15 bp, Homo sapiens
aaccagtgagtttct

SEQ ID NO: 366157 - DNA, 15 bp, Homo sapiens
taaccagtgagtttc

SEQ ID NO: 366158 - DNA, 15 bp, Homo sapiens
ataaccagtgagttt

SEQ ID NO: 366159 - DNA, 15 bp, Homo sapiens
cataaccagtgagtt

SEQ ID NO: 366160 - DNA, 15 bp, Homo sapiens
acataaccagtgagt

SEQ ID NO: 366161 - DNA, 15 bp, Homo sapiens
tacataaccagtgag

SEQ ID NO: 366162 - DNA, 15 bp, Homo sapiens
gtacataaccagtga

SEQ ID NO: 366163 - DNA, 15 bp, Homo sapiens
tgtacataaccagtg

SEQ ID NO: 366164 - DNA, 15 bp, Homo sapiens
atgtacataaccagt

SEQ ID NO: 366165 - DNA, 15 bp, Homo sapiens
catgtacataaccag

SEQ ID NO: 366166 - DNA, 15 bp, Homo sapiens
ccatgtacataacca

SEQ ID NO: 366167 - DNA, 15 bp, Homo sapiens
cccatgtacataacc

SEQ ID NO: 366168 - DNA, 15 bp, Homo sapiens
tcccatgtacataac

SEQ ID NO: 366169 - DNA, 15 bp, Homo sapiens
gtcccatgtacataa

SEQ ID NO: 366170 - DNA, 15 bp, Homo sapiens
cgtcccatgtacata

SEQ ID NO: 366171 - DNA, 15 bp, Homo sapiens
gcgtcccatgtacat

SEQ ID NO: 366172 - DNA, 15 bp, Homo sapiens
tgcgtcccatgtaca

SEQ ID NO: 366173 - DNA, 15 bp, Homo sapiens
atgcgtcccatgtac

SEQ ID NO: 366174 - DNA, 15 bp, Homo sapiens
aatgcgtcccatgta

SEQ ID NO: 366175 - DNA, 15 bp, Homo sapiens
aaatgcgtcccatgt

SEQ ID NO: 366176 - DNA, 15 bp, Homo sapiens
gaaatgcgtcccatg

SEQ ID NO: 366177 - DNA, 15 bp, Homo sapiens
tgaaatgcgtcccat

SEQ ID NO: 366178 - DNA, 15 bp, Homo sapiens
atgaaatgcgtccca

SEQ ID NO: 366179 - DNA, 15 bp, Homo sapiens
catgaaatgcgtccc

SEQ ID NO: 366180 - DNA, 15 bp, Homo sapiens
acatgaaatgcgtcc

SEQ ID NO: 366181 - DNA, 15 bp, Homo sapiens
aacatgaaatgcgtc

SEQ ID NO: 366182 - DNA, 15 bp, Homo sapiens
caacatgaaatgcgt

SEQ ID NO: 366183 - DNA, 15 bp, Homo sapiens
acaacatgaaatgcg

SEQ ID NO: 366184 - DNA, 15 bp, Homo sapiens
aacaacatgaaatgc

SEQ ID NO: 366185 - DNA, 15 bp, Homo sapiens
gaacaacatgaaatg

SEQ ID NO: 366186 - DNA, 15 bp, Homo sapiens
agaacaacatgaaat

SEQ ID NO: 366187 - DNA, 15 bp, Homo sapiens
cagaacaacatgaaa

SEQ ID NO: 366188 - DNA, 15 bp, Homo sapiens
tcagaacaacatgaa

SEQ ID NO: 366189 - DNA, 15 bp, Homo sapiens
ttcagaacaacatga

SEQ ID NO: 366190 - DNA, 15 bp, Homo sapiens
cttcagaacaacatg

SEQ ID NO: 366191 - DNA, 15 bp, Homo sapiens
tcttcagaacaacat

SEQ ID NO: 366192 - DNA, 15 bp, Homo sapiens
ttcttcagaacaaca

SEQ ID NO: 366193 - DNA, 15 bp, Homo sapiens
tttcttcagaacaac

SEQ ID NO: 366194 - DNA, 15 bp, Homo sapiens
atttcttcagaacaa

SEQ ID NO: 366195 - DNA, 15 bp, Homo sapiens
gatttcttcagaaca

SEQ ID NO: 366196 - DNA, 15 bp, Homo sapiens
ggatttcttcagaac

SEQ ID NO: 366197 - DNA, 15 bp, Homo sapiens
aggatttcttcagaa

SEQ ID NO: 366198 - DNA, 15 bp, Homo sapiens
taggatttcttcaga

SEQ ID NO: 366199 - DNA, 15 bp, Homo sapiens
ataggatttcttcag

SEQ ID NO: 366200 - DNA, 15 bp, Homo sapiens
aataggatttcttca

SEQ ID NO: 366201 - DNA, 15 bp, Homo sapiens
aaataggatttcttc

SEQ ID NO: 366202 - DNA, 15 bp, Homo sapiens
gaaataggatttctt

SEQ ID NO: 366203 - DNA, 15 bp, Homo sapiens
agaaataggatttct

SEQ ID NO: 366204 - DNA, 15 bp, Homo sapiens
tagaaataggatttc

SEQ ID NO: 366205 - DNA, 15 bp, Homo sapiens
gtagaaataggattt

SEQ ID NO: 366206 - DNA, 15 bp, Homo sapiens
ggtagaaataggatt

SEQ ID NO: 366207 - DNA, 15 bp, Homo sapiens
aggtagaaataggat

SEQ ID NO: 366208 - DNA, 15 bp, Homo sapiens
caggtagaaatagga

SEQ ID NO: 366209 - DNA, 15 bp, Homo sapiens
acaggtagaaatagg

SEQ ID NO: 366210 - DNA, 15 bp, Homo sapiens
aacaggtagaaatag

SEQ ID NO: 366211 - DNA, 15 bp, Homo sapiens
aaacaggtagaaata

SEQ ID NO: 366212 - DNA, 15 bp, Homo sapiens
aaaacaggtagaaat

SEQ ID NO: 366213 - DNA, 15 bp, Homo sapiens
aaaaacaggtagaaa

SEQ ID NO: 366214 - DNA, 15 bp, Homo sapiens
gaaaaacaggtagaa

SEQ ID NO: 366215 - DNA, 15 bp, Homo sapiens
ggaaaaacaggtaga

SEQ ID NO: 366216 - DNA, 15 bp, Homo sapiens
tggaaaaacaggtag

SEQ ID NO: 366217 - DNA, 15 bp, Homo sapiens
atggaaaaacaggta

SEQ ID NO: 366218 - DNA, 15 bp, Homo sapiens
gatggaaaaacaggt

SEQ ID NO: 366219 - DNA, 15 bp, Homo sapiens
ggatggaaaaacagg

SEQ ID NO: 366220 - DNA, 15 bp, Homo sapiens
gggatggaaaaacag

SEQ ID NO: 366221 - DNA, 15 bp, Homo sapiens
ggggatggaaaaaca

SEQ ID NO: 366222 - DNA, 15 bp, Homo sapiens
tggggatggaaaaac

SEQ ID NO: 366223 - DNA, 15 bp, Homo sapiens
gtggggatggaaaaa

SEQ ID NO: 366224 - DNA, 15 bp, Homo sapiens
ggtggggatggaaaa

SEQ ID NO: 366225 - DNA, 15 bp, Homo sapiens
tggtggggatggaaa

SEQ ID NO: 366226 - DNA, 15 bp, Homo sapiens
atggtggggatggaa

SEQ ID NO: 366227 - DNA, 15 bp, Homo sapiens
catggtggggatgga

SEQ ID NO: 366228 - DNA, 15 bp, Homo sapiens
acatggtggggatgg

SEQ ID NO: 366229 - DNA, 15 bp, Homo sapiens
gacatggtggggatg

SEQ ID NO: 366230 - DNA, 15 bp, Homo sapiens
tgacatggtggggat

SEQ ID NO: 366231 - DNA, 15 bp, Homo sapiens
atgacatggtgggga

SEQ ID NO: 366232 - DNA, 15 bp, Homo sapiens
gatgacatggtgggg

SEQ ID NO: 366233 - DNA, 15 bp, Homo sapiens
tgatgacatggtggg

SEQ ID NO: 366234 - DNA, 15 bp, Homo sapiens
gtgatgacatggtgg

SEQ ID NO: 366235 - DNA, 15 bp, Homo sapiens
agtgatgacatggtg

SEQ ID NO: 366236 - DNA, 15 bp, Homo sapiens
tagtgatgacatggt

SEQ ID NO: 366237 - DNA, 15 bp, Homo sapiens
ctagtgatgacatgg

SEQ ID NO: 366238 - DNA, 15 bp, Homo sapiens
tctagtgatgacatg

SEQ ID NO: 366239 - DNA, 15 bp, Homo sapiens
atctagtgatgacat

SEQ ID NO: 366240 - DNA, 15 bp, Homo sapiens
aatctagtgatgaca

SEQ ID NO: 366241 - DNA, 15 bp, Homo sapiens
aaatctagtgatgac

SEQ ID NO: 366242 - DNA, 15 bp, Homo sapiens
aaaatctagtgatga

SEQ ID NO: 366243 - DNA, 15 bp, Homo sapiens
gaaaatctagtgatg

SEQ ID NO: 366244 - DNA, 15 bp, Homo sapiens
agaaaatctagtgat

SEQ ID NO: 366245 - DNA, 15 bp, Homo sapiens
tagaaaatctagtga

SEQ ID NO: 366246 - DNA, 15 bp, Homo sapiens
ttagaaaatctagtg

SEQ ID NO: 366247 - DNA, 15 bp, Homo sapiens
cttagaaaatctagt

SEQ ID NO: 366248 - DNA, 15 bp, Homo sapiens
tcttagaaaatctag

SEQ ID NO: 366249 - DNA, 15 bp, Homo sapiens
ttcttagaaaatcta

SEQ ID NO: 366250 - DNA, 15 bp, Homo sapiens
gttcttagaaaatct

SEQ ID NO: 366251 - DNA, 15 bp, Homo sapiens
agttcttagaaaatc

SEQ ID NO: 366252 - DNA, 15 bp, Homo sapiens
cagttcttagaaaat

SEQ ID NO: 366253 - DNA, 15 bp, Homo sapiens
ccagttcttagaaaa

SEQ ID NO: 366254 - DNA, 15 bp, Homo sapiens
gccagttcttagaaa

SEQ ID NO: 366255 - DNA, 15 bp, Homo sapiens
agccagttcttagaa

SEQ ID NO: 366256 - DNA, 15 bp, Homo sapiens
cagccagttcttaga

SEQ ID NO: 366257 - DNA, 15 bp, Homo sapiens
tcagccagttcttag

SEQ ID NO: 366258 - DNA, 15 bp, Homo sapiens
ttcagccagttctta

SEQ ID NO: 366259 - DNA, 15 bp, Homo sapiens
cttcagccagttctt

SEQ ID NO: 366260 - DNA, 15 bp, Homo sapiens
gcttcagccagttct

SEQ ID NO: 366261 - DNA, 15 bp, Homo sapiens
tgcttcagccagttc

SEQ ID NO: 366262 - DNA, 15 bp, Homo sapiens
ttgcttcagccagtt

SEQ ID NO: 366263 - DNA, 15 bp, Homo sapiens
cttgcttcagccagt

SEQ ID NO: 366264 - DNA, 15 bp, Homo sapiens
tcttgcttcagccag

SEQ ID NO: 366265 - DNA, 15 bp, Homo sapiens
ctcttgcttcagcca

SEQ ID NO: 366266 - DNA, 15 bp, Homo sapiens
cctcttgcttcagcc

SEQ ID NO: 366267 - DNA, 15 bp, Homo sapiens
ccctcttgcttcagc

SEQ ID NO: 366268 - DNA, 15 bp, Homo sapiens
tccctcttgcttcag

SEQ ID NO: 366269 - DNA, 15 bp, Homo sapiens
ttccctcttgcttca

SEQ ID NO: 366270 - DNA, 15 bp, Homo sapiens
tttccctcttgcttc

SEQ ID NO: 366271 - DNA, 15 bp, Homo sapiens
ttttccctcttgctt

SEQ ID NO: 366272 - DNA, 15 bp, Homo sapiens
gttttccctcttgct

SEQ ID NO: 366273 - DNA, 15 bp, Homo sapiens
cgttttccctcttgc

SEQ ID NO: 366274 - DNA, 15 bp, Homo sapiens
tcgttttccctcttg

SEQ ID NO: 366275 - DNA, 15 bp, Homo sapiens
gtcgttttccctctt

SEQ ID NO: 366276 - DNA, 15 bp, Homo sapiens
ggtcgttttccctct

SEQ ID NO: 366277 - DNA, 15 bp, Homo sapiens
aggtcgttttccctc

SEQ ID NO: 366278 - DNA, 15 bp, Homo sapiens
aaggtcgttttccct

SEQ ID NO: 366279 - DNA, 15 bp, Homo sapiens
taaggtcgttttccc

SEQ ID NO: 366280 - DNA, 15 bp, Homo sapiens
ttaaggtcgttttcc

SEQ ID NO: 366281 - DNA, 15 bp, Homo sapiens
tttaaggtcgttttc

SEQ ID NO: 366282 - DNA, 15 bp, Homo sapiens
ttttaaggtcgtttt

SEQ ID NO: 366283 - DNA, 15 bp, Homo sapiens
tttttaaggtcgttt

SEQ ID NO: 366284 - DNA, 15 bp, Homo sapiens
gtttttaaggtcgtt

SEQ ID NO: 366285 - DNA, 15 bp, Homo sapiens
tgtttttaaggtcgt

SEQ ID NO: 366286 - DNA, 15 bp, Homo sapiens
ctgtttttaaggtcg

SEQ ID NO: 366287 - DNA, 15 bp, Homo sapiens
tctgtttttaaggtc

SEQ ID NO: 366288 - DNA, 15 bp, Homo sapiens
ttctgtttttaaggt

SEQ ID NO: 366289 - DNA, 15 bp, Homo sapiens
tttctgtttttaagg

SEQ ID NO: 366290 - DNA, 15 bp, Homo sapiens
atttctgtttttaag

SEQ ID NO: 366291 - DNA, 15 bp, Homo sapiens
aatttctgtttttaa

SEQ ID NO: 366292 - DNA, 15 bp, Homo sapiens
gaatttctgttttta

SEQ ID NO: 366293 - DNA, 15 bp, Homo sapiens
ggaatttctgttttt

SEQ ID NO: 366294 - DNA, 15 bp, Homo sapiens
tggaatttctgtttt

SEQ ID NO: 366295 - DNA, 15 bp, Homo sapiens
ctggaatttctgttt

SEQ ID NO: 366296 - DNA, 15 bp, Homo sapiens
gctggaatttctgtt

SEQ ID NO: 366297 - DNA, 15 bp, Homo sapiens
tgctggaatttctgt

SEQ ID NO: 366298 - DNA, 15 bp, Homo sapiens
ctgctggaatttctg

SEQ ID NO: 366299 - DNA, 15 bp, Homo sapiens
tctgctggaatttct

SEQ ID NO: 366300 - DNA, 15 bp, Homo sapiens
ctctgctggaatttc

SEQ ID NO: 366301 - DNA, 15 bp, Homo sapiens
actctgctggaattt

SEQ ID NO: 366302 - DNA, 15 bp, Homo sapiens
aactctgctggaatt

SEQ ID NO: 366303 - DNA, 15 bp, Homo sapiens
aaactctgctggaat

SEQ ID NO: 366304 - DNA, 15 bp, Homo sapiens
aaaactctgctggaa

SEQ ID NO: 366305 - DNA, 15 bp, Homo sapiens
caaaactctgctgga

SEQ ID NO: 366306 - DNA, 15 bp, Homo sapiens
ccaaaactctgctgg

SEQ ID NO: 366307 - DNA, 15 bp, Homo sapiens
cccaaaactctgctg

SEQ ID NO: 366308 - DNA, 15 bp, Homo sapiens
gcccaaaactctgct

SEQ ID NO: 366309 - DNA, 15 bp, Homo sapiens
tgcccaaaactctgc

SEQ ID NO: 366310 - DNA, 15 bp, Homo sapiens
atgcccaaaactctg

SEQ ID NO: 366311 - DNA, 15 bp, Homo sapiens
aatgcccaaaactct

SEQ ID NO: 366312 - DNA, 15 bp, Homo sapiens
aaatgcccaaaactc

SEQ ID NO: 366313 - DNA, 15 bp, Homo sapiens
caaatgcccaaaact

SEQ ID NO: 366314 - DNA, 15 bp, Homo sapiens
ccaaatgcccaaaac

SEQ ID NO: 366315 - DNA, 15 bp, Homo sapiens
gccaaatgcccaaaa

SEQ ID NO: 366316 - DNA, 15 bp, Homo sapiens
tgccaaatgcccaaa

SEQ ID NO: 366317 - DNA, 15 bp, Homo sapiens
atgccaaatgcccaa

SEQ ID NO: 366318 - DNA, 15 bp, Homo sapiens
aatgccaaatgccca

SEQ ID NO: 366319 - DNA, 15 bp, Homo sapiens
aaatgccaaatgccc

SEQ ID NO: 366320 - DNA, 15 bp, Homo sapiens
gaaatgccaaatgcc

SEQ ID NO: 366321 - DNA, 15 bp, Homo sapiens
ggaaatgccaaatgc

SEQ ID NO: 366322 - DNA, 15 bp, Homo sapiens
aggaaatgccaaatg

SEQ ID NO: 366323 - DNA, 15 bp, Homo sapiens
aaggaaatgccaaat

SEQ ID NO: 366324 - DNA, 15 bp, Homo sapiens
caaggaaatgccaaa

SEQ ID NO: 366325 - DNA, 15 bp, Homo sapiens
gcaaggaaatgccaa

SEQ ID NO: 366326 - DNA, 15 bp, Homo sapiens
ggcaaggaaatgcca

SEQ ID NO: 366327 - DNA, 15 bp, Homo sapiens
aggcaaggaaatgcc

SEQ ID NO: 366328 - DNA, 15 bp, Homo sapiens
caggcaaggaaatgc

SEQ ID NO: 366329 - DNA, 15 bp, Homo sapiens
acaggcaaggaaatg

SEQ ID NO: 366330 - DNA, 15 bp, Homo sapiens
tacaggcaaggaaat

SEQ ID NO: 366331 - DNA, 15 bp, Homo sapiens
ctacaggcaaggaaa

SEQ ID NO: 366332 - DNA, 15 bp, Homo sapiens
ctcaactcctctgtc

SEQ ID NO: 366333 - DNA, 15 bp, Homo sapiens
cctcaactcctctgt

SEQ ID NO: 366334 - DNA, 15 bp, Homo sapiens
tcctcaactcctctg

SEQ ID NO: 366335 - DNA, 15 bp, Homo sapiens
ctcctcaactcctct

SEQ ID NO: 366336 - DNA, 15 bp, Homo sapiens
cctcctcaactcctc

SEQ ID NO: 366337 - DNA, 15 bp, Homo sapiens
ccctcctcaactcct

SEQ ID NO: 366338 - DNA, 15 bp, Homo sapiens
tccctcctcaactcc

SEQ ID NO: 366339 - DNA, 15 bp, Homo sapiens
ctccctcctcaactc

SEQ ID NO: 366340 - DNA, 15 bp, Homo sapiens
tctccctcctcaact

SEQ ID NO: 366341 - DNA, 15 bp, Homo sapiens
ttctccctcctcaac

SEQ ID NO: 366342 - DNA, 15 bp, Homo sapiens
tttctccctcctcaa

SEQ ID NO: 366343 - DNA, 15 bp, Homo sapiens
ttttctccctcctca

SEQ ID NO: 366344 - DNA, 15 bp, Homo sapiens
cttttctccctcctc

SEQ ID NO: 366345 - DNA, 15 bp, Homo sapiens
ccttttctccctcct

SEQ ID NO: 366346 - DNA, 15 bp, Homo sapiens
gccttttctccctcc

SEQ ID NO: 366347 - DNA, 15 bp, Homo sapiens
tgccttttctccctc

SEQ ID NO: 366348 - DNA, 15 bp, Homo sapiens
ctgccttttctccct

SEQ ID NO: 366349 - DNA, 15 bp, Homo sapiens
gctgccttttctccc

SEQ ID NO: 366350 - DNA, 15 bp, Homo sapiens
tgctgccttttctcc

SEQ ID NO: 366351 - DNA, 15 bp, Homo sapiens
ctgctgccttttctc

SEQ ID NO: 366352 - DNA, 15 bp, Homo sapiens
actgctgccttttct

SEQ ID NO: 366353 - DNA, 15 bp, Homo sapiens
cactgctgccttttc

SEQ ID NO: 366354 - DNA, 15 bp, Homo sapiens
acactgctgcctttt

SEQ ID NO: 366355 - DNA, 15 bp, Homo sapiens
cacactgctgccttt

SEQ ID NO: 366356 - DNA, 15 bp, Homo sapiens
acacactgctgcctt

SEQ ID NO: 366357 - DNA, 15 bp, Homo sapiens
cacacactgctgcct

SEQ ID NO: 366358 - DNA, 15 bp, Homo sapiens
tcacacactgctgcc

SEQ ID NO: 366359 - DNA, 15 bp, Homo sapiens
ttcacacactgctgc

SEQ ID NO: 366360 - DNA, 15 bp, Homo sapiens
gttcacacactgctg

SEQ ID NO: 366361 - DNA, 15 bp, Homo sapiens
agttcacacactgct

SEQ ID NO: 366362 - DNA, 15 bp, Homo sapiens
cagttcacacactgc

SEQ ID NO: 366363 - DNA, 15 bp, Homo sapiens
gcagttcacacactg

SEQ ID NO: 366364 - DNA, 15 bp, Homo sapiens
tgcagttcacacact

SEQ ID NO: 366365 - DNA, 15 bp, Homo sapiens
atgcagttcacacac

SEQ ID NO: 366366 - DNA, 15 bp, Homo sapiens
gatgcagttcacaca

SEQ ID NO: 366367 - DNA, 15 bp, Homo sapiens
agatgcagttcacac

SEQ ID NO: 366368 - DNA, 15 bp, Homo sapiens
aagatgcagttcaca

SEQ ID NO: 366369 - DNA, 15 bp, Homo sapiens
aaagatgcagttcac

SEQ ID NO: 366370 - DNA, 15 bp, Homo sapiens
aaaagatgcagttca

SEQ ID NO: 366371 - DNA, 15 bp, Homo sapiens
gaaaagatgcagttc

SEQ ID NO: 366372 - DNA, 15 bp, Homo sapiens
agaaaagatgcagtt

SEQ ID NO: 366373 - DNA, 15 bp, Homo sapiens
cagaaaagatgcagt

SEQ ID NO: 366374 - DNA, 15 bp, Homo sapiens
gcagaaaagatgcag

SEQ ID NO: 366375 - DNA, 15 bp, Homo sapiens
agcagaaaagatgca

SEQ ID NO: 366376 - DNA, 15 bp, Homo sapiens
aagcagaaaagatgc

SEQ ID NO: 366377 - DNA, 15 bp, Homo sapiens
aaagcagaaaagatg

SEQ ID NO: 366378 - DNA, 15 bp, Homo sapiens
gaaagcagaaaagat

SEQ ID NO: 366379 - DNA, 15 bp, Homo sapiens
agaaagcagaaaaga

SEQ ID NO: 366380 - DNA, 15 bp, Homo sapiens
tagaaagcagaaaag

SEQ ID NO: 366381 - DNA, 15 bp, Homo sapiens
ttagaaagcagaaaa

SEQ ID NO: 366382 - DNA, 15 bp, Homo sapiens
cttagaaagcagaaa

SEQ ID NO: 366383 - DNA, 15 bp, Homo sapiens
ccttagaaagcagaa

SEQ ID NO: 366384 - DNA, 15 bp, Homo sapiens
gccttagaaagcaga

SEQ ID NO: 366385 - DNA, 15 bp, Homo sapiens
agccttagaaagcag

SEQ ID NO: 366386 - DNA, 15 bp, Homo sapiens
cagccttagaaagca

SEQ ID NO: 366387 - DNA, 15 bp, Homo sapiens
tcagccttagaaagc

SEQ ID NO: 366388 - DNA, 15 bp, Homo sapiens
ctcagccttagaaag

SEQ ID NO: 366389 - DNA, 15 bp, Homo sapiens
tctcagccttagaaa

SEQ ID NO: 366390 - DNA, 15 bp, Homo sapiens
ctctcagccttagaa

SEQ ID NO: 366391 - DNA, 15 bp, Homo sapiens
tctctcagccttaga

SEQ ID NO: 366392 - DNA, 15 bp, Homo sapiens
ctctctcagccttag

SEQ ID NO: 366393 - DNA, 15 bp, Homo sapiens
actctctcagcctta

SEQ ID NO: 366394 - DNA, 15 bp, Homo sapiens
aactctctcagcctt

SEQ ID NO: 366395 - DNA, 15 bp, Homo sapiens
gaactctctcagcct

SEQ ID NO: 366396 - DNA, 15 bp, Homo sapiens
agaactctctcagcc

SEQ ID NO: 366397 - DNA, 15 bp, Homo sapiens
aagaactctctcagc

SEQ ID NO: 366398 - DNA, 15 bp, Homo sapiens
caagaactctctcag

SEQ ID NO: 366399 - DNA, 15 bp, Homo sapiens
tcaagaactctctca

SEQ ID NO: 366400 - DNA, 15 bp, Homo sapiens
ttcaagaactctctc

SEQ ID NO: 366401 - DNA, 15 bp, Homo sapiens
tttcaagaactctct

SEQ ID NO: 366402 - DNA, 15 bp, Homo sapiens
ctttcaagaactctc

SEQ ID NO: 366403 - DNA, 15 bp, Homo sapiens
tctttcaagaactct

SEQ ID NO: 366404 - DNA, 15 bp, Homo sapiens
ttctttcaagaactc

SEQ ID NO: 366405 - DNA, 15 bp, Homo sapiens
tttctttcaagaact

SEQ ID NO: 366406 - DNA, 15 bp, Homo sapiens
ctttctttcaagaac

SEQ ID NO: 366407 - DNA, 15 bp, Homo sapiens
tctttctttcaagaa

SEQ ID NO: 366408 - DNA, 15 bp, Homo sapiens
ttctttctttcaaga

SEQ ID NO: 366409 - DNA, 15 bp, Homo sapiens
cttctttctttcaag

SEQ ID NO: 366410 - DNA, 15 bp, Homo sapiens
ccttctttctttcaa

SEQ ID NO: 366411 - DNA, 15 bp, Homo sapiens
gccttctttctttca

SEQ ID NO: 366412 - DNA, 15 bp, Homo sapiens
ggccttctttctttc

SEQ ID NO: 366413 - DNA, 15 bp, Homo sapiens
tggccttctttcttt

SEQ ID NO: 366414 - DNA, 15 bp, Homo sapiens
ttggccttctttctt

SEQ ID NO: 366415 - DNA, 15 bp, Homo sapiens
attggccttctttct

SEQ ID NO: 366416 - DNA, 15 bp, Homo sapiens
cattggccttctttc

SEQ ID NO: 366417 - DNA, 15 bp, Homo sapiens
tcattggccttcttt

SEQ ID NO: 366418 - DNA, 15 bp, Homo sapiens
ctcattggccttctt

SEQ ID NO: 366419 - DNA, 15 bp, Homo sapiens
tctcattggccttct

SEQ ID NO: 366420 - DNA, 15 bp, Homo sapiens
ctctcattggccttc

SEQ ID NO: 366421 - DNA, 15 bp, Homo sapiens
cctctcattggcctt

SEQ ID NO: 366422 - DNA, 15 bp, Homo sapiens
tcctctcattggcct

SEQ ID NO: 366423 - DNA, 15 bp, Homo sapiens
ttcctctcattggcc

SEQ ID NO: 366424 - DNA, 15 bp, Homo sapiens
tttcctctcattggc

SEQ ID NO: 366425 - DNA, 15 bp, Homo sapiens
ctttcctctcattgg

SEQ ID NO: 366426 - DNA, 15 bp, Homo sapiens
cctttcctctcattg

SEQ ID NO: 366427 - DNA, 15 bp, Homo sapiens
ccctttcctctcatt

SEQ ID NO: 366428 - DNA, 15 bp, Homo sapiens
accctttcctctcat

SEQ ID NO: 366429 - DNA, 15 bp, Homo sapiens
gaccctttcctctca

SEQ ID NO: 366430 - DNA, 15 bp, Homo sapiens
agaccctttcctctc

SEQ ID NO: 366431 - DNA, 15 bp, Homo sapiens
gagaccctttcctct

SEQ ID NO: 366432 - DNA, 15 bp, Homo sapiens
tgagaccctttcctc

SEQ ID NO: 366433 - DNA, 15 bp, Homo sapiens
ctgagaccctttcct

SEQ ID NO: 366434 - DNA, 15 bp, Homo sapiens
gctgagaccctttcc

SEQ ID NO: 366435 - DNA, 15 bp, Homo sapiens
tgctgagaccctttc

SEQ ID NO: 366436 - DNA, 15 bp, Homo sapiens
ctgctgagacccttt

SEQ ID NO: 366437 - DNA, 15 bp, Homo sapiens
tctgctgagaccctt

SEQ ID NO: 366438 - DNA, 15 bp, Homo sapiens
ttctgctgagaccct

SEQ ID NO: 366439 - DNA, 15 bp, Homo sapiens
attctgctgagaccc

SEQ ID NO: 366440 - DNA, 15 bp, Homo sapiens
tattctgctgagacc

SEQ ID NO: 366441 - DNA, 15 bp, Homo sapiens
ttattctgctgagac

SEQ ID NO: 366442 - DNA, 15 bp, Homo sapiens
gttattctgctgaga

SEQ ID NO: 366443 - DNA, 15 bp, Homo sapiens
tgttattctgctgag

SEQ ID NO: 366444 - DNA, 15 bp, Homo sapiens
gtgttattctgctga

SEQ ID NO: 366445 - DNA, 15 bp, Homo sapiens
cgtgttattctgctg

SEQ ID NO: 366446 - DNA, 15 bp, Homo sapiens
gcgtgttattctgct

SEQ ID NO: 366447 - DNA, 15 bp, Homo sapiens
agcgtgttattctgc

SEQ ID NO: 366448 - DNA, 15 bp, Homo sapiens
gagcgtgttattctg

SEQ ID NO: 366449 - DNA, 15 bp, Homo sapiens
tgagcgtgttattct

SEQ ID NO: 366450 - DNA, 15 bp, Homo sapiens
ctgagcgtgttattc

SEQ ID NO: 366451 - DNA, 15 bp, Homo sapiens
cctgagcgtgttatt

SEQ ID NO: 366452 - DNA, 15 bp, Homo sapiens
tcctgagcgtgttat

SEQ ID NO: 366453 - DNA, 15 bp, Homo sapiens
atcctgagcgtgtta

SEQ ID NO: 366454 - DNA, 15 bp, Homo sapiens
catcctgagcgtgtt

SEQ ID NO: 366455 - DNA, 15 bp, Homo sapiens
acatcctgagcgtgt

SEQ ID NO: 366456 - DNA, 15 bp, Homo sapiens
aacatcctgagcgtg

SEQ ID NO: 366457 - DNA, 15 bp, Homo sapiens
caacatcctgagcgt

SEQ ID NO: 366458 - DNA, 15 bp, Homo sapiens
acaacatcctgagcg

SEQ ID NO: 366459 - DNA, 15 bp, Homo sapiens
aacaacatcctgagc

SEQ ID NO: 366460 - DNA, 15 bp, Homo sapiens
taacaacatcctgag

SEQ ID NO: 366461 - DNA, 15 bp, Homo sapiens
ctaacaacatcctga

SEQ ID NO: 366462 - DNA, 15 bp, Homo sapiens
tctaacaacatcctg

SEQ ID NO: 366463 - DNA, 15 bp, Homo sapiens
atctaacaacatcct

SEQ ID NO: 366464 - DNA, 15 bp, Homo sapiens
catctaacaacatcc

SEQ ID NO: 366465 - DNA, 15 bp, Homo sapiens
ccatctaacaacatc

SEQ ID NO: 366466 - DNA, 15 bp, Homo sapiens
accatctaacaacat

SEQ ID NO: 366467 - DNA, 15 bp, Homo sapiens
aaccatctaacaaca

SEQ ID NO: 366468 - DNA, 15 bp, Homo sapiens
aaaccatctaacaac

SEQ ID NO: 366469 - DNA, 15 bp, Homo sapiens
aaaaccatctaacaa

SEQ ID NO: 366470 - DNA, 15 bp, Homo sapiens
taaaaccatctaaca

SEQ ID NO: 366471 - DNA, 15 bp, Homo sapiens
ataaaaccatctaac

SEQ ID NO: 366472 - DNA, 15 bp, Homo sapiens
aataaaaccatctaa

SEQ ID NO: 366473 - DNA, 15 bp, Homo sapiens
aaataaaaccatcta

SEQ ID NO: 366474 - DNA, 15 bp, Homo sapiens
aaaataaaaccatct

SEQ ID NO: 366475 - DNA, 15 bp, Homo sapiens
aaaaataaaaccatc

SEQ ID NO: 366476 - DNA, 15 bp, Homo sapiens
aaaaaataaaaccat

SEQ ID NO: 366477 - DNA, 15 bp, Homo sapiens
taaaaaataaaacca

SEQ ID NO: 366478 - DNA, 15 bp, Homo sapiens
ttaaaaaataaaacc

SEQ ID NO: 366479 - DNA, 15 bp, Homo sapiens
tttaaaaaataaaac

SEQ ID NO: 366480 - DNA, 15 bp, Homo sapiens
gtttaaaaaataaaa

SEQ ID NO: 366481 - DNA, 15 bp, Homo sapiens
ggtttaaaaaataaa

SEQ ID NO: 366482 - DNA, 15 bp, Homo sapiens
gggtttaaaaaataa

SEQ ID NO: 366483 - DNA, 15 bp, Homo sapiens
agggtttaaaaaata

SEQ ID NO: 366484 - DNA, 15 bp, Homo sapiens
cagggtttaaaaaat

SEQ ID NO: 366485 - DNA, 15 bp, Homo sapiens
tcagggtttaaaaaa

SEQ ID NO: 366486 - DNA, 15 bp, Homo sapiens
ttcagggtttaaaaa

SEQ ID NO: 366487 - DNA, 15 bp, Homo sapiens
attcagggtttaaaa

SEQ ID NO: 366488 - DNA, 15 bp, Homo sapiens
cattcagggtttaaa

SEQ ID NO: 366489 - DNA, 15 bp, Homo sapiens
acattcagggtttaa

SEQ ID NO: 366490 - DNA, 15 bp, Homo sapiens
cacattcagggttta

SEQ ID NO: 366491 - DNA, 15 bp, Homo sapiens
gcacattcagggttt

SEQ ID NO: 366492 - DNA, 15 bp, Homo sapiens
tgcacattcagggtt

SEQ ID NO: 366493 - DNA, 15 bp, Homo sapiens
ctgcacattcagggt

SEQ ID NO: 366494 - DNA, 15 bp, Homo sapiens
cctgcacattcaggg

SEQ ID NO: 366495 - DNA, 15 bp, Homo sapiens
ccctgcacattcagg

SEQ ID NO: 366496 - DNA, 15 bp, Homo sapiens
tccctgcacattcag

SEQ ID NO: 366497 - DNA, 15 bp, Homo sapiens
ctccctgcacattca

SEQ ID NO: 366498 - DNA, 15 bp, Homo sapiens
cctccctgcacattc

SEQ ID NO: 366499 - DNA, 15 bp, Homo sapiens
tcctccctgcacatt

SEQ ID NO: 366500 - DNA, 15 bp, Homo sapiens
ctcctccctgcacat

SEQ ID NO: 366501 - DNA, 15 bp, Homo sapiens
gctcctccctgcaca

SEQ ID NO: 366502 - DNA, 15 bp, Homo sapiens
ggctcctccctgcac

SEQ ID NO: 366503 - DNA, 15 bp, Homo sapiens
gggctcctccctgca

SEQ ID NO: 366504 - DNA, 15 bp, Homo sapiens
ggggctcctccctgc

SEQ ID NO: 366505 - DNA, 15 bp, Homo sapiens
cggggctcctccctg

SEQ ID NO: 366506 - DNA, 15 bp, Homo sapiens
ccggggctcctccct

SEQ ID NO: 366507 - DNA, 15 bp, Homo sapiens
gccggggctcctccc

SEQ ID NO: 366508 - DNA, 15 bp, Homo sapiens
ggccggggctcctcc

SEQ ID NO: 366509 - DNA, 15 bp, Homo sapiens
gggccggggctcctc

SEQ ID NO: 366510 - DNA, 15 bp, Homo sapiens
ggggccggggctcct

SEQ ID NO: 366511 - DNA, 15 bp, Homo sapiens
aggggccggggctcc

SEQ ID NO: 366512 - DNA, 15 bp, Homo sapiens
gaggggccggggctc

SEQ ID NO: 366513 - DNA, 15 bp, Homo sapiens
ggaggggccggggct

SEQ ID NO: 366514 - DNA, 15 bp, Homo sapiens
tggaggggccggggc

SEQ ID NO: 366515 - DNA, 15 bp, Homo sapiens
ttggaggggccgggg

SEQ ID NO: 366516 - DNA, 15 bp, Homo sapiens
tttggaggggccggg

SEQ ID NO: 366517 - DNA, 15 bp, Homo sapiens
gtttggaggggccgg

SEQ ID NO: 366518 - DNA, 15 bp, Homo sapiens
ggtttggaggggccg

SEQ ID NO: 366519 - DNA, 15 bp, Homo sapiens
tggtttggaggggcc

SEQ ID NO: 366520 - DNA, 15 bp, Homo sapiens
gtggtttggaggggc

SEQ ID NO: 366521 - DNA, 15 bp, Homo sapiens
tgtggtttggagggg

SEQ ID NO: 366522 - DNA, 15 bp, Homo sapiens
atgtggtttggaggg

SEQ ID NO: 366523 - DNA, 15 bp, Homo sapiens
catgtggtttggagg

SEQ ID NO: 366524 - DNA, 15 bp, Homo sapiens
tcatgtggtttggag

SEQ ID NO: 366525 - DNA, 15 bp, Homo sapiens
ttcatgtggtttgga

SEQ ID NO: 366526 - DNA, 15 bp, Homo sapiens
tttcatgtggtttgg

SEQ ID NO: 366527 - DNA, 15 bp, Homo sapiens
atttcatgtggtttg

SEQ ID NO: 366528 - DNA, 15 bp, Homo sapiens
tatttcatgtggttt

SEQ ID NO: 366529 - DNA, 15 bp, Homo sapiens
ttatttcatgtggtt

SEQ ID NO: 366530 - DNA, 15 bp, Homo sapiens
cttatttcatgtggt

SEQ ID NO: 366531 - DNA, 15 bp, Homo sapiens
gcttatttcatgtgg

SEQ ID NO: 366532 - DNA, 15 bp, Homo sapiens
tgcttatttcatgtg

SEQ ID NO: 366533 - DNA, 15 bp, Homo sapiens
ttgcttatttcatgt

SEQ ID NO: 366534 - DNA, 15 bp, Homo sapiens
cttgcttatttcatg

SEQ ID NO: 366535 - DNA, 15 bp, Homo sapiens
ccttgcttatttcat

SEQ ID NO: 366536 - DNA, 15 bp, Homo sapiens
cccttgcttatttca

SEQ ID NO: 366537 - DNA, 15 bp, Homo sapiens
tcccttgcttatttc

SEQ ID NO: 366538 - DNA, 15 bp, Homo sapiens
ttcccttgcttattt

SEQ ID NO: 366539 - DNA, 15 bp, Homo sapiens
cttcccttgcttatt

SEQ ID NO: 366540 - DNA, 15 bp, Homo sapiens
acttcccttgcttat

SEQ ID NO: 366541 - DNA, 15 bp, Homo sapiens
cacttcccttgctta

SEQ ID NO: 366542 - DNA, 15 bp, Homo sapiens
ccacttcccttgctt

SEQ ID NO: 366543 - DNA, 15 bp, Homo sapiens
gccacttcccttgct

SEQ ID NO: 366544 - DNA, 15 bp, Homo sapiens
tgccacttcccttgc

SEQ ID NO: 366545 - DNA, 15 bp, Homo sapiens
ctgccacttcccttg

SEQ ID NO: 366546 - DNA, 15 bp, Homo sapiens
gctgccacttccctt

SEQ ID NO: 366547 - DNA, 15 bp, Homo sapiens
agctgccacttccct

SEQ ID NO: 366548 - DNA, 15 bp, Homo sapiens
aagctgccacttccc

SEQ ID NO: 366549 - DNA, 15 bp, Homo sapiens
aaagctgccacttcc

SEQ ID NO: 366550 - DNA, 15 bp, Homo sapiens
aaaagctgccacttc

SEQ ID NO: 366551 - DNA, 15 bp, Homo sapiens
caaaagctgccactt

SEQ ID NO: 366552 - DNA, 15 bp, Homo sapiens
tcaaaagctgccact

SEQ ID NO: 366553 - DNA, 15 bp, Homo sapiens
ttcaaaagctgccac

SEQ ID NO: 366554 - DNA, 15 bp, Homo sapiens
tttcaaaagctgcca

SEQ ID NO: 366555 - DNA, 15 bp, Homo sapiens
ctttcaaaagctgcc

SEQ ID NO: 366556 - DNA, 15 bp, Homo sapiens
cctttcaaaagctgc

SEQ ID NO: 366557 - DNA, 15 bp, Homo sapiens
ccctttcaaaagctg

SEQ ID NO: 366558 - DNA, 15 bp, Homo sapiens
accctttcaaaagct

SEQ ID NO: 366559 - DNA, 15 bp, Homo sapiens
gaccctttcaaaagc

SEQ ID NO: 366560 - DNA, 15 bp, Homo sapiens
ggaccctttcaaaag

SEQ ID NO: 366561 - DNA, 15 bp, Homo sapiens
aggaccctttcaaaa

SEQ ID NO: 366562 - DNA, 15 bp, Homo sapiens
aaggaccctttcaaa

SEQ ID NO: 366563 - DNA, 15 bp, Homo sapiens
aaaggaccctttcaa

SEQ ID NO: 366564 - DNA, 15 bp, Homo sapiens
gaaaggaccctttca

SEQ ID NO: 366565 - DNA, 15 bp, Homo sapiens
cgaaaggaccctttc

SEQ ID NO: 366566 - DNA, 15 bp, Homo sapiens
ccgaaaggacccttt

SEQ ID NO: 366567 - DNA, 15 bp, Homo sapiens
tccgaaaggaccctt

SEQ ID NO: 366568 - DNA, 15 bp, Homo sapiens
ttccgaaaggaccct

SEQ ID NO: 366569 - DNA, 15 bp, Homo sapiens
cttccgaaaggaccc

SEQ ID NO: 366570 - DNA, 15 bp, Homo sapiens
ccttccgaaaggacc

SEQ ID NO: 366571 - DNA, 15 bp, Homo sapiens
accttccgaaaggac

SEQ ID NO: 366572 - DNA, 15 bp, Homo sapiens
aaccttccgaaagga

SEQ ID NO: 366573 - DNA, 15 bp, Homo sapiens
aaaccttccgaaagg

SEQ ID NO: 366574 - DNA, 15 bp, Homo sapiens
caaaccttccgaaag

SEQ ID NO: 366575 - DNA, 15 bp, Homo sapiens
acaaaccttccgaaa

SEQ ID NO: 366576 - DNA, 15 bp, Homo sapiens
gacaaaccttccgaa

SEQ ID NO: 366577 - DNA, 15 bp, Homo sapiens
agacaaaccttccga

SEQ ID NO: 366578 - DNA, 15 bp, Homo sapiens
aagacaaaccttccg

SEQ ID NO: 366579 - DNA, 15 bp, Homo sapiens
gaagacaaaccttcc

SEQ ID NO: 366580 - DNA, 15 bp, Homo sapiens
agaagacaaaccttc

SEQ ID NO: 366581 - DNA, 15 bp, Homo sapiens
aagaagacaaacctt

SEQ ID NO: 366582 - DNA, 15 bp, Homo sapiens
caagaagacaaacct

SEQ ID NO: 366583 - DNA, 15 bp, Homo sapiens
tcaagaagacaaacc

SEQ ID NO: 366584 - DNA, 15 bp, Homo sapiens
atcaagaagacaaac

SEQ ID NO: 366585 - DNA, 15 bp, Homo sapiens
tatcaagaagacaaa

SEQ ID NO: 366586 - DNA, 15 bp, Homo sapiens
ttatcaagaagacaa

SEQ ID NO: 366587 - DNA, 15 bp, Homo sapiens
gttatcaagaagaca

SEQ ID NO: 366588 - DNA, 15 bp, Homo sapiens
tgttatcaagaagac

SEQ ID NO: 366589 - DNA, 15 bp, Homo sapiens
atgttatcaagaaga

SEQ ID NO: 366590 - DNA, 15 bp, Homo sapiens
gatgttatcaagaag

SEQ ID NO: 366591 - DNA, 15 bp, Homo sapiens
agatgttatcaagaa

SEQ ID NO: 366592 - DNA, 15 bp, Homo sapiens
aagatgttatcaaga

SEQ ID NO: 366593 - DNA, 15 bp, Homo sapiens
caagatgttatcaag

SEQ ID NO: 366594 - DNA, 15 bp, Homo sapiens
acaagatgttatcaa

SEQ ID NO: 366595 - DNA, 15 bp, Homo sapiens
gacaagatgttatca

SEQ ID NO: 366596 - DNA, 15 bp, Homo sapiens
agacaagatgttatc

SEQ ID NO: 366597 - DNA, 15 bp, Homo sapiens
cagacaagatgttat

SEQ ID NO: 366598 - DNA, 15 bp, Homo sapiens
acagacaagatgtta

SEQ ID NO: 366599 - DNA, 15 bp, Homo sapiens
gacagacaagatgtt

SEQ ID NO: 366600 - DNA, 15 bp, Homo sapiens
agacagacaagatgt

SEQ ID NO: 366601 - DNA, 15 bp, Homo sapiens
gagacagacaagatg

SEQ ID NO: 366602 - DNA, 15 bp, Homo sapiens
ggagacagacaagat

SEQ ID NO: 366603 - DNA, 15 bp, Homo sapiens
gggagacagacaaga

SEQ ID NO: 366604 - DNA, 15 bp, Homo sapiens
ggggagacagacaag

SEQ ID NO: 366605 - DNA, 15 bp, Homo sapiens
aggggagacagacaa

SEQ ID NO: 366606 - DNA, 15 bp, Homo sapiens
caggggagacagaca

SEQ ID NO: 366607 - DNA, 15 bp, Homo sapiens
gcaggggagacagac

SEQ ID NO: 366608 - DNA, 15 bp, Homo sapiens
ggcaggggagacaga

SEQ ID NO: 366609 - DNA, 15 bp, Homo sapiens
cggcaggggagacag

SEQ ID NO: 366610 - DNA, 15 bp, Homo sapiens
ccggcaggggagaca

SEQ ID NO: 366611 - DNA, 15 bp, Homo sapiens
tccggcaggggagac

SEQ ID NO: 366612 - DNA, 15 bp, Homo sapiens
ctccggcaggggaga

SEQ ID NO: 366613 - DNA, 15 bp, Homo sapiens
cctccggcaggggag

SEQ ID NO: 366614 - DNA, 15 bp, Homo sapiens
tcctccggcagggga

SEQ ID NO: 366615 - DNA, 15 bp, Homo sapiens
ttcctccggcagggg

SEQ ID NO: 366616 - DNA, 15 bp, Homo sapiens
tttcctccggcaggg

SEQ ID NO: 366617 - DNA, 15 bp, Homo sapiens
atttcctccggcagg

SEQ ID NO: 366618 - DNA, 15 bp, Homo sapiens
catttcctccggcag

SEQ ID NO: 366619 - DNA, 15 bp, Homo sapiens
tcatttcctccggca

SEQ ID NO: 366620 - DNA, 15 bp, Homo sapiens
gtcatttcctccggc

SEQ ID NO: 366621 - DNA, 15 bp, Homo sapiens
cgtcatttcctccgg

SEQ ID NO: 366622 - DNA, 15 bp, Homo sapiens
tcgtcatttcctccg

SEQ ID NO: 366623 - DNA, 15 bp, Homo sapiens
gtcgtcatttcctcc

SEQ ID NO: 366624 - DNA, 15 bp, Homo sapiens
tgtcgtcatttcctc

SEQ ID NO: 366625 - DNA, 15 bp, Homo sapiens
gtgtcgtcatttcct

SEQ ID NO: 366626 - DNA, 15 bp, Homo sapiens
ggtgtcgtcatttcc

SEQ ID NO: 366627 - DNA, 15 bp, Homo sapiens
tggtgtcgtcatttc

SEQ ID NO: 366628 - DNA, 15 bp, Homo sapiens
ctggtgtcgtcattt

SEQ ID NO: 366629 - DNA, 15 bp, Homo sapiens
cctggtgtcgtcatt

SEQ ID NO: 366630 - DNA, 15 bp, Homo sapiens
gcctggtgtcgtcat

SEQ ID NO: 366631 - DNA, 15 bp, Homo sapiens
agcctggtgtcgtca

SEQ ID NO: 366632 - DNA, 15 bp, Homo sapiens
cagcctggtgtcgtc

SEQ ID NO: 366633 - DNA, 15 bp, Homo sapiens
tcagcctggtgtcgt

SEQ ID NO: 366634 - DNA, 15 bp, Homo sapiens
ctcagcctggtgtcg

SEQ ID NO: 366635 - DNA, 15 bp, Homo sapiens
tctcagcctggtgtc

SEQ ID NO: 366636 - DNA, 15 bp, Homo sapiens
atctcagcctggtgt

SEQ ID NO: 366637 - DNA, 15 bp, Homo sapiens
tatctcagcctggtg

SEQ ID NO: 366638 - DNA, 15 bp, Homo sapiens
gtatctcagcctggt

SEQ ID NO: 366639 - DNA, 15 bp, Homo sapiens
ggtatctcagcctgg

SEQ ID NO: 366640 - DNA, 15 bp, Homo sapiens
tggtatctcagcctg

SEQ ID NO: 366641 - DNA, 15 bp, Homo sapiens
ctggtatctcagcct

SEQ ID NO: 366642 - DNA, 15 bp, Homo sapiens
gctggtatctcagcc

SEQ ID NO: 366643 - DNA, 15 bp, Homo sapiens
ggctggtatctcagc

SEQ ID NO: 366644 - DNA, 15 bp, Homo sapiens
aggctggtatctcag

SEQ ID NO: 366645 - DNA, 15 bp, Homo sapiens
caggctggtatctca

SEQ ID NO: 366646 - DNA, 15 bp, Homo sapiens
tcaggctggtatctc

SEQ ID NO: 366647 - DNA, 15 bp, Homo sapiens
ctcaggctggtatct

SEQ ID NO: 366648 - DNA, 15 bp, Homo sapiens
actcaggctggtatc

SEQ ID NO: 366649 - DNA, 15 bp, Homo sapiens
cactcaggctggtat

SEQ ID NO: 366650 - DNA, 15 bp, Homo sapiens
gcactcaggctggta

SEQ ID NO: 366651 - DNA, 15 bp, Homo sapiens
ggcactcaggctggt

SEQ ID NO: 366652 - DNA, 15 bp, Homo sapiens
aggcactcaggctgg

SEQ ID NO: 366653 - DNA, 15 bp, Homo sapiens
gaggcactcaggctg

SEQ ID NO: 366654 - DNA, 15 bp, Homo sapiens
ggaggcactcaggct

SEQ ID NO: 366655 - DNA, 15 bp, Homo sapiens
aggaggcactcaggc

SEQ ID NO: 366656 - DNA, 15 bp, Homo sapiens
gaggaggcactcagg

SEQ ID NO: 366657 - DNA, 15 bp, Homo sapiens
tgaggaggcactcag

SEQ ID NO: 366658 - DNA, 15 bp, Homo sapiens
gtgaggaggcactca

SEQ ID NO: 366659 - DNA, 15 bp, Homo sapiens
ggtgaggaggcactc

SEQ ID NO: 366660 - DNA, 15 bp, Homo sapiens
gggtgaggaggcact

SEQ ID NO: 366661 - DNA, 15 bp, Homo sapiens
cgggtgaggaggcac

SEQ ID NO: 366662 - DNA, 15 bp, Homo sapiens
gcgggtgaggaggca

SEQ ID NO: 366663 - DNA, 15 bp, Homo sapiens
ggcgggtgaggaggc

SEQ ID NO: 366664 - DNA, 15 bp, Homo sapiens
gggcgggtgaggagg

SEQ ID NO: 366665 - DNA, 15 bp, Homo sapiens
cgggcgggtgaggag

SEQ ID NO: 366666 - DNA, 15 bp, Homo sapiens
acgggcgggtgagga

SEQ ID NO: 366667 - DNA, 15 bp, Homo sapiens
cacgggcgggtgagg

SEQ ID NO: 366668 - DNA, 15 bp, Homo sapiens
gcacgggcgggtgag

SEQ ID NO: 366669 - DNA, 15 bp, Homo sapiens
ggcacgggcgggtga

SEQ ID NO: 366670 - DNA, 15 bp, Homo sapiens
tggcacgggcgggtg

SEQ ID NO: 366671 - DNA, 15 bp, Homo sapiens
atggcacgggcgggt

SEQ ID NO: 366672 - DNA, 15 bp, Homo sapiens
catggcacgggcggg

SEQ ID NO: 366673 - DNA, 15 bp, Homo sapiens
acatggcacgggcgg

SEQ ID NO: 366674 - DNA, 15 bp, Homo sapiens
cacatggcacgggcg

SEQ ID NO: 366675 - DNA, 15 bp, Homo sapiens
tcacatggcacgggc

SEQ ID NO: 366676 - DNA, 15 bp, Homo sapiens
gtcacatggcacggg

SEQ ID NO: 366677 - DNA, 15 bp, Homo sapiens
ggtcacatggcacgg

SEQ ID NO: 366678 - DNA, 15 bp, Homo sapiens
aggtcacatggcacg

SEQ ID NO: 366679 - DNA, 15 bp, Homo sapiens
caggtcacatggcac

SEQ ID NO: 366680 - DNA, 15 bp, Homo sapiens
acaggtcacatggca

SEQ ID NO: 366681 - DNA, 15 bp, Homo sapiens
cacaggtcacatggc

SEQ ID NO: 366682 - DNA, 15 bp, Homo sapiens
tcacaggtcacatgg

SEQ ID NO: 366683 - DNA, 15 bp, Homo sapiens
ttcacaggtcacatg

SEQ ID NO: 366684 - DNA, 15 bp, Homo sapiens
cttcacaggtcacat

SEQ ID NO: 366685 - DNA, 15 bp, Homo sapiens
gcttcacaggtcaca

SEQ ID NO: 366686 - DNA, 15 bp, Homo sapiens
ggcttcacaggtcac

SEQ ID NO: 366687 - DNA, 15 bp, Homo sapiens
gggcttcacaggtca

SEQ ID NO: 366688 - DNA, 15 bp, Homo sapiens
agggcttcacaggtc

SEQ ID NO: 366689 - DNA, 15 bp, Homo sapiens
gagggcttcacaggt

SEQ ID NO: 366690 - DNA, 15 bp, Homo sapiens
tgagggcttcacagg

SEQ ID NO: 366691 - DNA, 15 bp, Homo sapiens
ctgagggcttcacag

SEQ ID NO: 366692 - DNA, 15 bp, Homo sapiens
cctgagggcttcaca

SEQ ID NO: 366693 - DNA, 15 bp, Homo sapiens
tcctgagggcttcac

SEQ ID NO: 366694 - DNA, 15 bp, Homo sapiens
ctcctgagggcttca

SEQ ID NO: 366695 - DNA, 15 bp, Homo sapiens
tctcctgagggcttc

SEQ ID NO: 366696 - DNA, 15 bp, Homo sapiens
atctcctgagggctt

SEQ ID NO: 366697 - DNA, 15 bp, Homo sapiens
catctcctgagggct

SEQ ID NO: 366698 - DNA, 15 bp, Homo sapiens
ccatctcctgagggc

SEQ ID NO: 366699 - DNA, 15 bp, Homo sapiens
cccatctcctgaggg

SEQ ID NO: 366700 - DNA, 15 bp, Homo sapiens
acccatctcctgagg

SEQ ID NO: 366701 - DNA, 15 bp, Homo sapiens
cacccatctcctgag

SEQ ID NO: 366702 - DNA, 15 bp, Homo sapiens
ccacccatctcctga

SEQ ID NO: 366703 - DNA, 15 bp, Homo sapiens
cccacccatctcctg

SEQ ID NO: 366704 - DNA, 15 bp, Homo sapiens
gcccacccatctcct

SEQ ID NO: 366705 - DNA, 15 bp, Homo sapiens
agcccacccatctcc

SEQ ID NO: 366706 - DNA, 15 bp, Homo sapiens
aagcccacccatctc

SEQ ID NO: 366707 - DNA, 15 bp, Homo sapiens
aaagcccacccatct

SEQ ID NO: 366708 - DNA, 15 bp, Homo sapiens
aaaagcccacccatc

SEQ ID NO: 366709 - DNA, 15 bp, Homo sapiens
aaaaagcccacccat

SEQ ID NO: 366710 - DNA, 15 bp, Homo sapiens
aaaaaagcccaccca

SEQ ID NO: 366711 - DNA, 15 bp, Homo sapiens
aaaaaaagcccaccc

SEQ ID NO: 366712 - DNA, 15 bp, Homo sapiens
aaaaaaaagcccacc

SEQ ID NO: 366713 - DNA, 15 bp, Homo sapiens
aaaaaaaaagcccac

SEQ ID NO: 366714 - DNA, 15 bp, Homo sapiens
aaaaaaaaaagccca

SEQ ID NO: 366715 - DNA, 15 bp, Homo sapiens
aaaaaaaaaaagccc

SEQ ID NO: 366716 - DNA, 15 bp, Homo sapiens
aaaaaaaaaaaagcc

SEQ ID NO: 366717 - DNA, 15 bp, Homo sapiens
gaaaaaaaaaaaaaa

SEQ ID NO: 366718 - DNA, 15 bp, Homo sapiens
agaaaaaaaaaaaaa

SEQ ID NO: 366719 - DNA, 15 bp, Homo sapiens
aaaaaagaaaaaaaa

SEQ ID NO: 366720 - DNA, 15 bp, Homo sapiens
caaaaaagaaaaaaa

SEQ ID NO: 366721 - DNA, 15 bp, Homo sapiens
tcaaaaaagaaaaaa

SEQ ID NO: 366722 - DNA, 15 bp, Homo sapiens
gtcaaaaaagaaaaa

SEQ ID NO: 366723 - DNA, 15 bp, Homo sapiens
tgtcaaaaaagaaaa

SEQ ID NO: 366724 - DNA, 15 bp, Homo sapiens
ttgtcaaaaaagaaa

SEQ ID NO: 366725 - DNA, 15 bp, Homo sapiens
tttgtcaaaaaagaa

SEQ ID NO: 366726 - DNA, 15 bp, Homo sapiens
ctttgtcaaaaaaga

SEQ ID NO: 366727 - DNA, 15 bp, Homo sapiens
actttgtcaaaaaag

SEQ ID NO: 366728 - DNA, 15 bp, Homo sapiens
gactttgtcaaaaaa

SEQ ID NO: 366729 - DNA, 15 bp, Homo sapiens
agactttgtcaaaaa

SEQ ID NO: 366730 - DNA, 15 bp, Homo sapiens
gagactttgtcaaaa

SEQ ID NO: 366731 - DNA, 15 bp, Homo sapiens
cgagactttgtcaaa

SEQ ID NO: 366732 - DNA, 15 bp, Homo sapiens
gcgagactttgtcaa

SEQ ID NO: 366733 - DNA, 15 bp, Homo sapiens
agcgagactttgtca

SEQ ID NO: 366734 - DNA, 15 bp, Homo sapiens
gagcgagactttgtc

SEQ ID NO: 366735 - DNA, 15 bp, Homo sapiens
agagcgagactttgt

SEQ ID NO: 366736 - DNA, 15 bp, Homo sapiens
cagagcgagactttg

SEQ ID NO: 366737 - DNA, 15 bp, Homo sapiens
acagagcgagacttt

SEQ ID NO: 366738 - DNA, 15 bp, Homo sapiens
gacagagcgagactt

SEQ ID NO: 366739 - DNA, 15 bp, Homo sapiens
cgacagagcgagact

SEQ ID NO: 366740 - DNA, 15 bp, Homo sapiens
gcgacagagcgagac

SEQ ID NO: 366741 - DNA, 15 bp, Homo sapiens
ggcgacagagcgaga

SEQ ID NO: 366742 - DNA, 15 bp, Homo sapiens
gggcgacagagcgag

SEQ ID NO: 366743 - DNA, 15 bp, Homo sapiens
tgggcgacagagcga

SEQ ID NO: 366744 - DNA, 15 bp, Homo sapiens
ctgggcgacagagcg

SEQ ID NO: 366745 - DNA, 15 bp, Homo sapiens
cctgggcgacagagc

SEQ ID NO: 366746 - DNA, 15 bp, Homo sapiens
cagcctgggcgacag

SEQ ID NO: 366747 - DNA, 15 bp, Homo sapiens
ccagcctgggcgaca

SEQ ID NO: 366748 - DNA, 15 bp, Homo sapiens
tccagcctgggcgac

SEQ ID NO: 366749 - DNA, 15 bp, Homo sapiens
ctccagcctgggcga

SEQ ID NO: 366750 - DNA, 15 bp, Homo sapiens
actccagcctgggcg

SEQ ID NO: 366751 - DNA, 15 bp, Homo sapiens
aatcgcgccactgca

SEQ ID NO: 366752 - DNA, 15 bp, Homo sapiens
aaatcgcgccactgc

SEQ ID NO: 366753 - DNA, 15 bp, Homo sapiens
gaaatcgcgccactg

SEQ ID NO: 366754 - DNA, 15 bp, Homo sapiens
cgaaatcgcgccact

SEQ ID NO: 366755 - DNA, 15 bp, Homo sapiens
ccgaaatcgcgccac

SEQ ID NO: 366756 - DNA, 15 bp, Homo sapiens
gccgaaatcgcgcca

SEQ ID NO: 366757 - DNA, 15 bp, Homo sapiens
agccgaaatcgcgcc

SEQ ID NO: 366758 - DNA, 15 bp, Homo sapiens
gagccgaaatcgcgc

SEQ ID NO: 366759 - DNA, 15 bp, Homo sapiens
tgagccgaaatcgcg

SEQ ID NO: 366760 - DNA, 15 bp, Homo sapiens
gtgagccgaaatcgc

SEQ ID NO: 366761 - DNA, 15 bp, Homo sapiens
tgtgagccgaaatcg

SEQ ID NO: 366762 - DNA, 15 bp, Homo sapiens
gtgtgagccgaaatc

SEQ ID NO: 366763 - DNA, 15 bp, Homo sapiens
tgtgtgagccgaaat

SEQ ID NO: 366764 - DNA, 15 bp, Homo sapiens
ctgtgtgagccgaaa

SEQ ID NO: 366765 - DNA, 15 bp, Homo sapiens
tctgtgtgagccgaa

SEQ ID NO: 366766 - DNA, 15 bp, Homo sapiens
gtctgtgtgagccga

SEQ ID NO: 366767 - DNA, 15 bp, Homo sapiens
cgtctgtgtgagccg

SEQ ID NO: 366768 - DNA, 15 bp, Homo sapiens
ccgtctgtgtgagcc

SEQ ID NO: 366769 - DNA, 15 bp, Homo sapiens
tccgtctgtgtgagc

SEQ ID NO: 366770 - DNA, 15 bp, Homo sapiens
ctccgtctgtgtgag

SEQ ID NO: 366771 - DNA, 15 bp, Homo sapiens
actccgtctgtgtga

SEQ ID NO: 366772 - DNA, 15 bp, Homo sapiens
gactccgtctgtgtg

SEQ ID NO: 366773 - DNA, 15 bp, Homo sapiens
agactccgtctgtgt

SEQ ID NO: 366774 - DNA, 15 bp, Homo sapiens
gagactccgtctgtg

SEQ ID NO: 366775 - DNA, 15 bp, Homo sapiens
cgagactccgtctgt

SEQ ID NO: 366776 - DNA, 15 bp, Homo sapiens
gcgagactccgtctg

SEQ ID NO: 366777 - DNA, 15 bp, Homo sapiens
agcgagactccgtct

SEQ ID NO: 366778 - DNA, 15 bp, Homo sapiens
gagcgagactccgtc

SEQ ID NO: 366779 - DNA, 15 bp, Homo sapiens
agagcgagactccgt

SEQ ID NO: 366780 - DNA, 15 bp, Homo sapiens
cagagcgagactccg

SEQ ID NO: 366781 - DNA, 15 bp, Homo sapiens
acagagcgagactcc

SEQ ID NO: 366782 - DNA, 15 bp, Homo sapiens
gacagagcgagactc

SEQ ID NO: 366783 - DNA, 15 bp, Homo sapiens
tgacagagcgagact

SEQ ID NO: 366784 - DNA, 15 bp, Homo sapiens
gtgacagagcgagac

SEQ ID NO: 366785 - DNA, 15 bp, Homo sapiens
ggtgacagagcgaga

SEQ ID NO: 366786 - DNA, 15 bp, Homo sapiens
tggtgacagagcgag

SEQ ID NO: 366787 - DNA, 15 bp, Homo sapiens
ctggtgacagagcga

SEQ ID NO: 366788 - DNA, 15 bp, Homo sapiens
cctggtgacagagcg

SEQ ID NO: 366789 - DNA, 15 bp, Homo sapiens
gcctggtgacagagc

SEQ ID NO: 366790 - DNA, 15 bp, Homo sapiens
agcctggtgacagag

SEQ ID NO: 366791 - DNA, 15 bp, Homo sapiens
cagcctggtgacaga

SEQ ID NO: 366792 - DNA, 15 bp, Homo sapiens
ccagcctggtgacag

SEQ ID NO: 366793 - DNA, 15 bp, Homo sapiens
tccagcctggtgaca

SEQ ID NO: 366794 - DNA, 15 bp, Homo sapiens
ctccagcctggtgac

SEQ ID NO: 366795 - DNA, 15 bp, Homo sapiens
actccagcctggtga

SEQ ID NO: 366796 - DNA, 15 bp, Homo sapiens
cactccagcctggtg

SEQ ID NO: 366797 - DNA, 15 bp, Homo sapiens
gcactccagcctggt

SEQ ID NO: 366798 - DNA, 15 bp, Homo sapiens
aatcgggccactgca

SEQ ID NO: 366799 - DNA, 15 bp, Homo sapiens
aaatcgggccactgc

SEQ ID NO: 366800 - DNA, 15 bp, Homo sapiens
gaaatcgggccactg

SEQ ID NO: 366801 - DNA, 15 bp, Homo sapiens
cgaaatcgggccact

SEQ ID NO: 366802 - DNA, 15 bp, Homo sapiens
ccgaaatcgggccac

SEQ ID NO: 366803 - DNA, 15 bp, Homo sapiens
gccgaaatcgggcca

SEQ ID NO: 366804 - DNA, 15 bp, Homo sapiens
agccgaaatcgggcc

SEQ ID NO: 366805 - DNA, 15 bp, Homo sapiens
gagccgaaatcgggc

SEQ ID NO: 366806 - DNA, 15 bp, Homo sapiens
tgagccgaaatcggg

SEQ ID NO: 366807 - DNA, 15 bp, Homo sapiens
gtgagccgaaatcgg

SEQ ID NO: 366808 - DNA, 15 bp, Homo sapiens
agtgagccgaaatcg

SEQ ID NO: 366809 - DNA, 15 bp, Homo sapiens
cagtgagccgaaatc

SEQ ID NO: 366810 - DNA, 15 bp, Homo sapiens
gcagtgagccgaaat

SEQ ID NO: 366811 - DNA, 15 bp, Homo sapiens
tgcagtgagccgaaa

SEQ ID NO: 366812 - DNA, 15 bp, Homo sapiens
ttgcagtgagccgaa

SEQ ID NO: 366813 - DNA, 15 bp, Homo sapiens
tggaggttgcagtga

SEQ ID NO: 366814 - DNA, 15 bp, Homo sapiens
gtggaggttgcagtg

SEQ ID NO: 366815 - DNA, 15 bp, Homo sapiens
ggtggaggttgcagt

SEQ ID NO: 366816 - DNA, 15 bp, Homo sapiens
aggtggaggttgcag

SEQ ID NO: 366817 - DNA, 15 bp, Homo sapiens
gaggtggaggttgca

SEQ ID NO: 366818 - DNA, 15 bp, Homo sapiens
ggaggtggaggttgc

SEQ ID NO: 366819 - DNA, 15 bp, Homo sapiens
gggaggtggaggttg

SEQ ID NO: 366820 - DNA, 15 bp, Homo sapiens
tgggaggtggaggtt

SEQ ID NO: 366821 - DNA, 15 bp, Homo sapiens
ctgggaggtggaggt

SEQ ID NO: 366822 - DNA, 15 bp, Homo sapiens
cctgggaggtggagg

SEQ ID NO: 366823 - DNA, 15 bp, Homo sapiens
acctgggaggtggag

SEQ ID NO: 366824 - DNA, 15 bp, Homo sapiens
aacctgggaggtgga

SEQ ID NO: 366825 - DNA, 15 bp, Homo sapiens
gaacctgggaggtgg

SEQ ID NO: 366826 - DNA, 15 bp, Homo sapiens
tgaacctgggaggtg

SEQ ID NO: 366827 - DNA, 15 bp, Homo sapiens
ttgaacctgggaggt

SEQ ID NO: 366828 - DNA, 15 bp, Homo sapiens
tgcttgaacctggga

SEQ ID NO: 366829 - DNA, 15 bp, Homo sapiens
ttgcttgaacctggg

SEQ ID NO: 366830 - DNA, 15 bp, Homo sapiens
attgcttgaacctgg

SEQ ID NO: 366831 - DNA, 15 bp, Homo sapiens
aattgcttgaacctg

SEQ ID NO: 366832 - DNA, 15 bp, Homo sapiens
gaattgcttgaacct

SEQ ID NO: 366833 - DNA, 15 bp, Homo sapiens
gcaggagaattgctt

SEQ ID NO: 366834 - DNA, 15 bp, Homo sapiens
ggcaggagaattgct

SEQ ID NO: 366835 - DNA, 15 bp, Homo sapiens
aggcaggagaattgc

SEQ ID NO: 366836 - DNA, 15 bp, Homo sapiens
gaggcaggagaattg

SEQ ID NO: 366837 - DNA, 15 bp, Homo sapiens
tgaggcaggagaatt

SEQ ID NO: 366838 - DNA, 15 bp, Homo sapiens
tgcctgtaatcccag

SEQ ID NO: 366839 - DNA, 15 bp, Homo sapiens
atgcctgtaatccca

SEQ ID NO: 366840 - DNA, 15 bp, Homo sapiens
gatgcctgtaatccc

SEQ ID NO: 366841 - DNA, 15 bp, Homo sapiens
ggatgcctgtaatcc

SEQ ID NO: 366842 - DNA, 15 bp, Homo sapiens
tggatgcctgtaatc

SEQ ID NO: 366843 - DNA, 15 bp, Homo sapiens
gtggatgcctgtaat

SEQ ID NO: 366844 - DNA, 15 bp, Homo sapiens
ggtggatgcctgtaa

SEQ ID NO: 366845 - DNA, 15 bp, Homo sapiens
tggtggatgcctgta

SEQ ID NO: 366846 - DNA, 15 bp, Homo sapiens
gtggtggatgcctgt

SEQ ID NO: 366847 - DNA, 15 bp, Homo sapiens
agtggtggatgcctg

SEQ ID NO: 366848 - DNA, 15 bp, Homo sapiens
cagtggtggatgcct

SEQ ID NO: 366849 - DNA, 15 bp, Homo sapiens
acagtggtggatgcc

SEQ ID NO: 366850 - DNA, 15 bp, Homo sapiens
cacagtggtggatgc

SEQ ID NO: 366851 - DNA, 15 bp, Homo sapiens
gcacagtggtggatg

SEQ ID NO: 366852 - DNA, 15 bp, Homo sapiens
ggcacagtggtggat

SEQ ID NO: 366853 - DNA, 15 bp, Homo sapiens
gggcacagtggtgga

SEQ ID NO: 366854 - DNA, 15 bp, Homo sapiens
tgggcacagtggtgg

SEQ ID NO: 366855 - DNA, 15 bp, Homo sapiens
ctgggcacagtggtg

SEQ ID NO: 366856 - DNA, 15 bp, Homo sapiens
gctgggcacagtggt

SEQ ID NO: 366857 - DNA, 15 bp, Homo sapiens
agctgggcacagtgg

SEQ ID NO: 366858 - DNA, 15 bp, Homo sapiens
tagctgggcacagtg

SEQ ID NO: 366859 - DNA, 15 bp, Homo sapiens
ttagctgggcacagt

SEQ ID NO: 366860 - DNA, 15 bp, Homo sapiens
attagctgggcacag

SEQ ID NO: 366861 - DNA, 15 bp, Homo sapiens
aattagctgggcaca

SEQ ID NO: 366862 - DNA, 15 bp, Homo sapiens
aaattagctgggcac

SEQ ID NO: 366863 - DNA, 15 bp, Homo sapiens
cccatctctactaaa

SEQ ID NO: 366864 - DNA, 15 bp, Homo sapiens
ccccatctctactaa

SEQ ID NO: 366865 - DNA, 15 bp, Homo sapiens
accccatctctacta

SEQ ID NO: 366866 - DNA, 15 bp, Homo sapiens
aaccccatctctact

SEQ ID NO: 366867 - DNA, 15 bp, Homo sapiens
aaaccccatctctac

SEQ ID NO: 366868 - DNA, 15 bp, Homo sapiens
gaaaccccatctcta

SEQ ID NO: 366869 - DNA, 15 bp, Homo sapiens
cgaaaccccatctct

SEQ ID NO: 366870 - DNA, 15 bp, Homo sapiens
gcgaaaccccatctc

SEQ ID NO: 366871 - DNA, 15 bp, Homo sapiens
ggcgaaaccccatct

SEQ ID NO: 366872 - DNA, 15 bp, Homo sapiens
tggcgaaaccccatc

SEQ ID NO: 366873 - DNA, 15 bp, Homo sapiens
atggcgaaaccccat

SEQ ID NO: 366874 - DNA, 15 bp, Homo sapiens
catggcgaaacccca

SEQ ID NO: 366875 - DNA, 15 bp, Homo sapiens
acatggcgaaacccc

SEQ ID NO: 366876 - DNA, 15 bp, Homo sapiens
aacatggcgaaaccc

SEQ ID NO: 366877 - DNA, 15 bp, Homo sapiens
caacatggcgaaacc

SEQ ID NO: 366878 - DNA, 15 bp, Homo sapiens
ccaacatggcgaaac

SEQ ID NO: 366879 - DNA, 15 bp, Homo sapiens
gccaacatggcgaaa

SEQ ID NO: 366880 - DNA, 15 bp, Homo sapiens
ggccaacatggcgaa

SEQ ID NO: 366881 - DNA, 15 bp, Homo sapiens
tggccaacatggcga

SEQ ID NO: 366882 - DNA, 15 bp, Homo sapiens
ctggccaacatggcg

SEQ ID NO: 366883 - DNA, 15 bp, Homo sapiens
cctggccaacatggc

SEQ ID NO: 366884 - DNA, 15 bp, Homo sapiens
aagaccagcctggcc

SEQ ID NO: 366885 - DNA, 15 bp, Homo sapiens
caagaccagcctggc

SEQ ID NO: 366886 - DNA, 15 bp, Homo sapiens
tcaagaccagcctgg

SEQ ID NO: 366887 - DNA, 15 bp, Homo sapiens
ttcaagaccagcctg

SEQ ID NO: 366888 - DNA, 15 bp, Homo sapiens
gttcaagaccagcct

SEQ ID NO: 366889 - DNA, 15 bp, Homo sapiens
agttcaagaccagcc

SEQ ID NO: 366890 - DNA, 15 bp, Homo sapiens
gagttcaagaccagc

SEQ ID NO: 366891 - DNA, 15 bp, Homo sapiens
ggagttcaagaccag

SEQ ID NO: 366892 - DNA, 15 bp, Homo sapiens
aggagttcaagacca

SEQ ID NO: 366893 - DNA, 15 bp, Homo sapiens
caggagttcaagacc

SEQ ID NO: 366894 - DNA, 15 bp, Homo sapiens
tcaggagttcaagac

SEQ ID NO: 366895 - DNA, 15 bp, Homo sapiens
gtcaggagttcaaga

SEQ ID NO: 366896 - DNA, 15 bp, Homo sapiens
ggtcaggagttcaag

SEQ ID NO: 366897 - DNA, 15 bp, Homo sapiens
aggtcaggagttcaa

SEQ ID NO: 366898 - DNA, 15 bp, Homo sapiens
gaggtcaggagttca

SEQ ID NO: 366899 - DNA, 15 bp, Homo sapiens
cgaggtcaggagttc

SEQ ID NO: 366900 - DNA, 15 bp, Homo sapiens
ccgaggtcaggagtt

SEQ ID NO: 366901 - DNA, 15 bp, Homo sapiens
tccgaggtcaggagt

SEQ ID NO: 366902 - DNA, 15 bp, Homo sapiens
atccgaggtcaggag

SEQ ID NO: 366903 - DNA, 15 bp, Homo sapiens
catccgaggtcagga

SEQ ID NO: 366904 - DNA, 15 bp, Homo sapiens
tcatccgaggtcagg

SEQ ID NO: 366905 - DNA, 15 bp, Homo sapiens
atcatccgaggtcag

SEQ ID NO: 366906 - DNA, 15 bp, Homo sapiens
gatcatccgaggtca

SEQ ID NO: 366907 - DNA, 15 bp, Homo sapiens
ggatcatccgaggtc

SEQ ID NO: 366908 - DNA, 15 bp, Homo sapiens
tggatcatccgaggt

SEQ ID NO: 366909 - DNA, 15 bp, Homo sapiens
gtggatcatccgagg

SEQ ID NO: 366910 - DNA, 15 bp, Homo sapiens
ggtggatcatccgag

SEQ ID NO: 366911 - DNA, 15 bp, Homo sapiens
gggtggatcatccga

SEQ ID NO: 366912 - DNA, 15 bp, Homo sapiens
tgggtggatcatccg

SEQ ID NO: 366913 - DNA, 15 bp, Homo sapiens
gtgggtggatcatcc

SEQ ID NO: 366914 - DNA, 15 bp, Homo sapiens
ggtgggtggatcatc

SEQ ID NO: 366915 - DNA, 15 bp, Homo sapiens
gggtgggtggatcat

SEQ ID NO: 366916 - DNA, 15 bp, Homo sapiens
agggtgggtggatca

SEQ ID NO: 366917 - DNA, 15 bp, Homo sapiens
aagggtgggtggatc

SEQ ID NO: 366918 - DNA, 15 bp, Homo sapiens
aaagggtgggtggat

SEQ ID NO: 366919 - DNA, 15 bp, Homo sapiens
gaaagggtgggtgga

SEQ ID NO: 366920 - DNA, 15 bp, Homo sapiens
ggaaagggtgggtgg

SEQ ID NO: 366921 - DNA, 15 bp, Homo sapiens
aggaaagggtgggtg

SEQ ID NO: 366922 - DNA, 15 bp, Homo sapiens
gaggaaagggtgggt

SEQ ID NO: 366923 - DNA, 15 bp, Homo sapiens
ggaggaaagggtggg

SEQ ID NO: 366924 - DNA, 15 bp, Homo sapiens
gggaggaaagggtgg

SEQ ID NO: 366925 - DNA, 15 bp, Homo sapiens
ggggaggaaagggtg

SEQ ID NO: 366926 - DNA, 15 bp, Homo sapiens
tggggaggaaagggt

SEQ ID NO: 366927 - DNA, 15 bp, Homo sapiens
ttggggaggaaaggg

SEQ ID NO: 366928 - DNA, 15 bp, Homo sapiens
cttggggaggaaagg

SEQ ID NO: 366929 - DNA, 15 bp, Homo sapiens
acttggggaggaaag

SEQ ID NO: 366930 - DNA, 15 bp, Homo sapiens
cacttggggaggaaa

SEQ ID NO: 366931 - DNA, 15 bp, Homo sapiens
gcacttggggaggaa

SEQ ID NO: 366932 - DNA, 15 bp, Homo sapiens
agcacttggggagga

SEQ ID NO: 366933 - DNA, 15 bp, Homo sapiens
cagcacttggggagg

SEQ ID NO: 366934 - DNA, 15 bp, Homo sapiens
tcagcacttggggag

SEQ ID NO: 366935 - DNA, 15 bp, Homo sapiens
ctcagcacttgggga

SEQ ID NO: 366936 - DNA, 15 bp, Homo sapiens
tctcagcacttgggg

SEQ ID NO: 366937 - DNA, 15 bp, Homo sapiens
atctcagcacttggg

SEQ ID NO: 366938 - DNA, 15 bp, Homo sapiens
aatctcagcacttgg

SEQ ID NO: 366939 - DNA, 15 bp, Homo sapiens
taatctcagcacttg

SEQ ID NO: 366940 - DNA, 15 bp, Homo sapiens
gtaatctcagcactt

SEQ ID NO: 366941 - DNA, 15 bp, Homo sapiens
tgtaatctcagcact

SEQ ID NO: 366942 - DNA, 15 bp, Homo sapiens
ctgtaatctcagcac

SEQ ID NO: 366943 - DNA, 15 bp, Homo sapiens
cctgtaatctcagca

SEQ ID NO: 366944 - DNA, 15 bp, Homo sapiens
acctgtaatctcagc

SEQ ID NO: 366945 - DNA, 15 bp, Homo sapiens
cacctgtaatctcag

SEQ ID NO: 366946 - DNA, 15 bp, Homo sapiens
acacctgtaatctca

SEQ ID NO: 366947 - DNA, 15 bp, Homo sapiens
cacacctgtaatctc

SEQ ID NO: 366948 - DNA, 15 bp, Homo sapiens
tcacacctgtaatct

SEQ ID NO: 366949 - DNA, 15 bp, Homo sapiens
ctcacacctgtaatc

SEQ ID NO: 366950 - DNA, 15 bp, Homo sapiens
gctcacacctgtaat

SEQ ID NO: 366951 - DNA, 15 bp, Homo sapiens
ggctcacacctgtaa

SEQ ID NO: 366952 - DNA, 15 bp, Homo sapiens
tggctcacacctgta

SEQ ID NO: 366953 - DNA, 15 bp, Homo sapiens
gtggctcacacctgt

SEQ ID NO: 366954 - DNA, 15 bp, Homo sapiens
agtggctcacacctg

SEQ ID NO: 366955 - DNA, 15 bp, Homo sapiens
cagtggctcacacct

SEQ ID NO: 366956 - DNA, 15 bp, Homo sapiens
gcagtggctcacacc

SEQ ID NO: 366957 - DNA, 15 bp, Homo sapiens
cgcagtggctcacac

SEQ ID NO: 366958 - DNA, 15 bp, Homo sapiens
gcgcagtggctcaca

SEQ ID NO: 366959 - DNA, 15 bp, Homo sapiens
aggcgcagtggctca

SEQ ID NO: 366960 - DNA, 15 bp, Homo sapiens
caggcgcagtggctc

SEQ ID NO: 366961 - DNA, 15 bp, Homo sapiens
ccaggcgcagtggct

SEQ ID NO: 366962 - DNA, 15 bp, Homo sapiens
gccaggcgcagtggc

SEQ ID NO: 366963 - DNA, 15 bp, Homo sapiens
ggccaggcgcagtgg

SEQ ID NO: 366964 - DNA, 15 bp, Homo sapiens
cggccaggcgcagtg

SEQ ID NO: 366965 - DNA, 15 bp, Homo sapiens
tcggccaggcgcagt

SEQ ID NO: 366966 - DNA, 15 bp, Homo sapiens
atcggccaggcgcag

SEQ ID NO: 366967 - DNA, 15 bp, Homo sapiens
catcggccaggcgca

SEQ ID NO: 366968 - DNA, 15 bp, Homo sapiens
ccatcggccaggcgc

SEQ ID NO: 366969 - DNA, 15 bp, Homo sapiens
cccatcggccaggcg

SEQ ID NO: 366970 - DNA, 15 bp, Homo sapiens
acccatcggccaggc

SEQ ID NO: 366971 - DNA, 15 bp, Homo sapiens
cacccatcggccagg

SEQ ID NO: 366972 - DNA, 15 bp, Homo sapiens
ccacccatcggccag

SEQ ID NO: 366973 - DNA, 15 bp, Homo sapiens
cccacccatcggcca

SEQ ID NO: 366974 - DNA, 15 bp, Homo sapiens
gcccacccatcggcc

SEQ ID NO: 366975 - DNA, 15 bp, Homo sapiens
agcccacccatcggc

SEQ ID NO: 366976 - DNA, 15 bp, Homo sapiens
aagcccacccatcgg

SEQ ID NO: 366977 - DNA, 15 bp, Homo sapiens
aaagcccacccatcg

SEQ ID NO: 366978 - DNA, 15 bp, Homo sapiens
gaaaaaaagcccacc

SEQ ID NO: 366979 - DNA, 15 bp, Homo sapiens
ggaaaaaaagcccac

SEQ ID NO: 366980 - DNA, 15 bp, Homo sapiens
gggaaaaaaagccca

SEQ ID NO: 366981 - DNA, 15 bp, Homo sapiens
ggggaaaaaaagccc

SEQ ID NO: 366982 - DNA, 15 bp, Homo sapiens
tggggaaaaaaagcc

SEQ ID NO: 366983 - DNA, 15 bp, Homo sapiens
ttggggaaaaaaagc

SEQ ID NO: 366984 - DNA, 15 bp, Homo sapiens
tttggggaaaaaaag

SEQ ID NO: 366985 - DNA, 15 bp, Homo sapiens
ctttggggaaaaaaa

SEQ ID NO: 366986 - DNA, 15 bp, Homo sapiens
gctttggggaaaaaa

SEQ ID NO: 366987 - DNA, 15 bp, Homo sapiens
agctttggggaaaaa

SEQ ID NO: 366988 - DNA, 15 bp, Homo sapiens
gagctttggggaaaa

SEQ ID NO: 366989 - DNA, 15 bp, Homo sapiens
agagctttggggaaa

SEQ ID NO: 366990 - DNA, 15 bp, Homo sapiens
aagagctttggggaa

SEQ ID NO: 366991 - DNA, 15 bp, Homo sapiens
gaagagctttgggga

SEQ ID NO: 366992 - DNA, 15 bp, Homo sapiens
ggaagagctttgggg

SEQ ID NO: 366993 - DNA, 15 bp, Homo sapiens
tggaagagctttggg

SEQ ID NO: 366994 - DNA, 15 bp, Homo sapiens
ctggaagagctttgg

SEQ ID NO: 366995 - DNA, 15 bp, Homo sapiens
actggaagagctttg

SEQ ID NO: 366996 - DNA, 15 bp, Homo sapiens
gactggaagagcttt

SEQ ID NO: 366997 - DNA, 15 bp, Homo sapiens
ggactggaagagctt

SEQ ID NO: 366998 - DNA, 15 bp, Homo sapiens
aggactggaagagct

SEQ ID NO: 366999 - DNA, 15 bp, Homo sapiens
taggactggaagagc

SEQ ID NO: 367000 - DNA, 15 bp, Homo sapiens
ctaggactggaagag

SEQ ID NO: 367001 - DNA, 15 bp, Homo sapiens
tctaggactggaaga

SEQ ID NO: 367002 - DNA, 15 bp, Homo sapiens
ttctaggactggaag

SEQ ID NO: 367003 - DNA, 15 bp, Homo sapiens
tttctaggactggaa

SEQ ID NO: 367004 - DNA, 15 bp, Homo sapiens
ctttctaggactgga

SEQ ID NO: 367005 - DNA, 15 bp, Homo sapiens
tctttctaggactgg

SEQ ID NO: 367006 - DNA, 15 bp, Homo sapiens
ttctttctaggactg

SEQ ID NO: 367007 - DNA, 15 bp, Homo sapiens
tttctttctaggact

SEQ ID NO: 367008 - DNA, 15 bp, Homo sapiens
gtttctttctaggac

SEQ ID NO: 367009 - DNA, 15 bp, Homo sapiens
agtttctttctagga

SEQ ID NO: 367010 - DNA, 15 bp, Homo sapiens
cagtttctttctagg

SEQ ID NO: 367011 - DNA, 15 bp, Homo sapiens
ccagtttctttctag

SEQ ID NO: 367012 - DNA, 15 bp, Homo sapiens
cccagtttctttcta

SEQ ID NO: 367013 - DNA, 15 bp, Homo sapiens
ccccagtttctttct

SEQ ID NO: 367014 - DNA, 15 bp, Homo sapiens
cccccagtttctttc

SEQ ID NO: 367015 - DNA, 15 bp, Homo sapiens
acccccagtttcttt

SEQ ID NO: 367016 - DNA, 15 bp, Homo sapiens
tacccccagtttctt

SEQ ID NO: 367017 - DNA, 15 bp, Homo sapiens
ttacccccagtttct

SEQ ID NO: 367018 - DNA, 15 bp, Homo sapiens
tttacccccagtttc

SEQ ID NO: 367019 - DNA, 15 bp, Homo sapiens
ttttacccccagttt

SEQ ID NO: 367020 - DNA, 15 bp, Homo sapiens
gttttacccccagtt

SEQ ID NO: 367021 - DNA, 15 bp, Homo sapiens
tgttttacccccagt

SEQ ID NO: 367022 - DNA, 15 bp, Homo sapiens
ttgttttacccccag

SEQ ID NO: 367023 - DNA, 15 bp, Homo sapiens
attgttttaccccca

SEQ ID NO: 367024 - DNA, 15 bp, Homo sapiens
gattgttttaccccc

SEQ ID NO: 367025 - DNA, 15 bp, Homo sapiens
tgattgttttacccc

SEQ ID NO: 367026 - DNA, 15 bp, Homo sapiens
atgattgttttaccc

SEQ ID NO: 367027 - DNA, 15 bp, Homo sapiens
aatgattgttttacc

SEQ ID NO: 367028 - DNA, 15 bp, Homo sapiens
taatgattgttttac

SEQ ID NO: 367029 - DNA, 15 bp, Homo sapiens
ttaatgattgtttta

SEQ ID NO: 367030 - DNA, 15 bp, Homo sapiens
gttaatgattgtttt

SEQ ID NO: 367031 - DNA, 15 bp, Homo sapiens
agttaatgattgttt

SEQ ID NO: 367032 - DNA, 15 bp, Homo sapiens
gagttaatgattgtt

SEQ ID NO: 367033 - DNA, 15 bp, Homo sapiens
ggagttaatgattgt

SEQ ID NO: 367034 - DNA, 15 bp, Homo sapiens
aggagttaatgattg

SEQ ID NO: 367035 - DNA, 15 bp, Homo sapiens
aaggagttaatgatt

SEQ ID NO: 367036 - DNA, 15 bp, Homo sapiens
gaaggagttaatgat

SEQ ID NO: 367037 - DNA, 15 bp, Homo sapiens
ggaaggagttaatga

SEQ ID NO: 367038 - DNA, 15 bp, Homo sapiens
gggaaggagttaatg

SEQ ID NO: 367039 - DNA, 15 bp, Homo sapiens
ggggaaggagttaat

SEQ ID NO: 367040 - DNA, 15 bp, Homo sapiens
aggggaaggagttaa

SEQ ID NO: 367041 - DNA, 15 bp, Homo sapiens
gaggggaaggagtta

SEQ ID NO: 367042 - DNA, 15 bp, Homo sapiens
tgaggggaaggagtt

SEQ ID NO: 367043 - DNA, 15 bp, Homo sapiens
gtgaggggaaggagt

SEQ ID NO: 367044 - DNA, 15 bp, Homo sapiens
ggtgaggggaaggag

SEQ ID NO: 367045 - DNA, 15 bp, Homo sapiens
gggtgaggggaagga

SEQ ID NO: 367046 - DNA, 15 bp, Homo sapiens
ggggtgaggggaagg

SEQ ID NO: 367047 - DNA, 15 bp, Homo sapiens
aggggtgaggggaag

SEQ ID NO: 367048 - DNA, 15 bp, Homo sapiens
gaggggtgaggggaa

SEQ ID NO: 367049 - DNA, 15 bp, Homo sapiens
ggaggggtgagggga

SEQ ID NO: 367050 - DNA, 15 bp, Homo sapiens
tggaggggtgagggg

SEQ ID NO: 367051 - DNA, 15 bp, Homo sapiens
ctggaggggtgaggg

SEQ ID NO: 367052 - DNA, 15 bp, Homo sapiens
cctggaggggtgagg

SEQ ID NO: 367053 - DNA, 15 bp, Homo sapiens
acctggaggggtgag

SEQ ID NO: 367054 - DNA, 15 bp, Homo sapiens
tacctggaggggtga

SEQ ID NO: 367055 - DNA, 15 bp, Homo sapiens
ttacctggaggggtg

SEQ ID NO: 367056 - DNA, 15 bp, Homo sapiens
attacctggaggggt

SEQ ID NO: 367057 - DNA, 15 bp, Homo sapiens
aattacctggagggg

SEQ ID NO: 367058 - DNA, 15 bp, Homo sapiens
caattacctggaggg

SEQ ID NO: 367059 - DNA, 15 bp, Homo sapiens
acaattacctggagg

SEQ ID NO: 367060 - DNA, 15 bp, Homo sapiens
tacaattacctggag

SEQ ID NO: 367061 - DNA, 15 bp, Homo sapiens
ctacaattacctgga

SEQ ID NO: 367062 - DNA, 15 bp, Homo sapiens
tctacaattacctgg

SEQ ID NO: 367063 - DNA, 15 bp, Homo sapiens
gtctacaattacctg

SEQ ID NO: 367064 - DNA, 15 bp, Homo sapiens
tgtctacaattacct

SEQ ID NO: 367065 - DNA, 15 bp, Homo sapiens
gtgtctacaattacc

SEQ ID NO: 367066 - DNA, 15 bp, Homo sapiens
tgtgtctacaattac

SEQ ID NO: 367067 - DNA, 15 bp, Homo sapiens
ctgtgtctacaatta

SEQ ID NO: 367068 - DNA, 15 bp, Homo sapiens
tctgtgtctacaatt

SEQ ID NO: 367069 - DNA, 15 bp, Homo sapiens
atctgtgtctacaat

SEQ ID NO: 367070 - DNA, 15 bp, Homo sapiens
tatctgtgtctacaa

SEQ ID NO: 367071 - DNA, 15 bp, Homo sapiens
atatctgtgtctaca

SEQ ID NO: 367072 - DNA, 15 bp, Homo sapiens
aatatctgtgtctac

SEQ ID NO: 367073 - DNA, 15 bp, Homo sapiens
taatatctgtgtcta

SEQ ID NO: 367074 - DNA, 15 bp, Homo sapiens
ttaatatctgtgtct

SEQ ID NO: 367075 - DNA, 15 bp, Homo sapiens
attaatatctgtgtc

SEQ ID NO: 367076 - DNA, 15 bp, Homo sapiens
tattaatatctgtgt

SEQ ID NO: 367077 - DNA, 15 bp, Homo sapiens
ttattaatatctgtg

SEQ ID NO: 367078 - DNA, 15 bp, Homo sapiens
cttattaatatctgt

SEQ ID NO: 367079 - DNA, 15 bp, Homo sapiens
ccttattaatatctg

SEQ ID NO: 367080 - DNA, 15 bp, Homo sapiens
tccttattaatatct

SEQ ID NO: 367081 - DNA, 15 bp, Homo sapiens
ctccttattaatatc

SEQ ID NO: 367082 - DNA, 15 bp, Homo sapiens
gctccttattaatat

SEQ ID NO: 367083 - DNA, 15 bp, Homo sapiens
agctccttattaata

SEQ ID NO: 367084 - DNA, 15 bp, Homo sapiens
cagctccttattaat

SEQ ID NO: 367085 - DNA, 15 bp, Homo sapiens
gcagctccttattaa

SEQ ID NO: 367086 - DNA, 15 bp, Homo sapiens
ggcagctccttatta

SEQ ID NO: 367087 - DNA, 15 bp, Homo sapiens
tggcagctccttatt

SEQ ID NO: 367088 - DNA, 15 bp, Homo sapiens
ctggcagctccttat

SEQ ID NO: 367089 - DNA, 15 bp, Homo sapiens
cctggcagctcctta

SEQ ID NO: 367090 - DNA, 15 bp, Homo sapiens
tcctggcagctcctt

SEQ ID NO: 367091 - DNA, 15 bp, Homo sapiens
ttcctggcagctcct

SEQ ID NO: 367092 - DNA, 15 bp, Homo sapiens
cttcctggcagctcc

SEQ ID NO: 367093 - DNA, 15 bp, Homo sapiens
tcttcctggcagctc

SEQ ID NO: 367094 - DNA, 15 bp, Homo sapiens
ttcttcctggcagct

SEQ ID NO: 367095 - DNA, 15 bp, Homo sapiens
cttcttcctggcagc

SEQ ID NO: 367096 - DNA, 15 bp, Homo sapiens
gcttcttcctggcag

SEQ ID NO: 367097 - DNA, 15 bp, Homo sapiens
tgcttcttcctggca

SEQ ID NO: 367098 - DNA, 15 bp, Homo sapiens
ctgcttcttcctggc

SEQ ID NO: 367099 - DNA, 15 bp, Homo sapiens
actgcttcttcctgg

SEQ ID NO: 367100 - DNA, 15 bp, Homo sapiens
cactgcttcttcctg

SEQ ID NO: 367101 - DNA, 15 bp, Homo sapiens
tcactgcttcttcct

SEQ ID NO: 367102 - DNA, 15 bp, Homo sapiens
gtcactgcttcttcc

SEQ ID NO: 367103 - DNA, 15 bp, Homo sapiens
agtcactgcttcttc

SEQ ID NO: 367104 - DNA, 15 bp, Homo sapiens
gagtcactgcttctt

SEQ ID NO: 367105 - DNA, 15 bp, Homo sapiens
agagtcactgcttct

SEQ ID NO: 367106 - DNA, 15 bp, Homo sapiens
gagagtcactgcttc

SEQ ID NO: 367107 - DNA, 15 bp, Homo sapiens
agagagtcactgctt

SEQ ID NO: 367108 - DNA, 15 bp, Homo sapiens
cagagagtcactgct

SEQ ID NO: 367109 - DNA, 15 bp, Homo sapiens
tcagagagtcactgc

SEQ ID NO: 367110 - DNA, 15 bp, Homo sapiens
ttcagagagtcactg

SEQ ID NO: 367111 - DNA, 15 bp, Homo sapiens
cttcagagagtcact

SEQ ID NO: 367112 - DNA, 15 bp, Homo sapiens
ccttcagagagtcac

SEQ ID NO: 367113 - DNA, 15 bp, Homo sapiens
cccttcagagagtca

SEQ ID NO: 367114 - DNA, 15 bp, Homo sapiens
gcccttcagagagtc

SEQ ID NO: 367115 - DNA, 15 bp, Homo sapiens
tgcccttcagagagt

SEQ ID NO: 367116 - DNA, 15 bp, Homo sapiens
ctgcccttcagagag

SEQ ID NO: 367117 - DNA, 15 bp, Homo sapiens
actgcccttcagaga

SEQ ID NO: 367118 - DNA, 15 bp, Homo sapiens
cactgcccttcagag

SEQ ID NO: 367119 - DNA, 15 bp, Homo sapiens
acactgcccttcaga

SEQ ID NO: 367120 - DNA, 15 bp, Homo sapiens
cacactgcccttcag

SEQ ID NO: 367121 - DNA, 15 bp, Homo sapiens
ccacactgcccttca

SEQ ID NO: 367122 - DNA, 15 bp, Homo sapiens
gccacactgcccttc

SEQ ID NO: 367123 - DNA, 15 bp, Homo sapiens
agccacactgccctt

SEQ ID NO: 367124 - DNA, 15 bp, Homo sapiens
aagccacactgccct

SEQ ID NO: 367125 - DNA, 15 bp, Homo sapiens
gaagccacactgccc

SEQ ID NO: 367126 - DNA, 15 bp, Homo sapiens
tgaagccacactgcc

SEQ ID NO: 367127 - DNA, 15 bp, Homo sapiens
ctgaagccacactgc

SEQ ID NO: 367128 - DNA, 15 bp, Homo sapiens
tctgaagccacactg

SEQ ID NO: 367129 - DNA, 15 bp, Homo sapiens
ttctgaagccacact

SEQ ID NO: 367130 - DNA, 15 bp, Homo sapiens
cttctgaagccacac

SEQ ID NO: 367131 - DNA, 15 bp, Homo sapiens
tcttctgaagccaca

SEQ ID NO: 367132 - DNA, 15 bp, Homo sapiens
gtcttctgaagccac

SEQ ID NO: 367133 - DNA, 15 bp, Homo sapiens
agtcttctgaagcca

SEQ ID NO: 367134 - DNA, 15 bp, Homo sapiens
cagtcttctgaagcc

SEQ ID NO: 367135 - DNA, 15 bp, Homo sapiens
gcagtcttctgaagc

SEQ ID NO: 367136 - DNA, 15 bp, Homo sapiens
tgcagtcttctgaag

SEQ ID NO: 367137 - DNA, 15 bp, Homo sapiens
ctgcagtcttctgaa

SEQ ID NO: 367138 - DNA, 15 bp, Homo sapiens
tctgcagtcttctga

SEQ ID NO: 367139 - DNA, 15 bp, Homo sapiens
ctctgcagtcttctg

SEQ ID NO: 367140 - DNA, 15 bp, Homo sapiens
tctctgcagtcttct

SEQ ID NO: 367141 - DNA, 15 bp, Homo sapiens
ctctctgcagtcttc

SEQ ID NO: 367142 - DNA, 15 bp, Homo sapiens
tctctctgcagtctt

SEQ ID NO: 367143 - DNA, 15 bp, Homo sapiens
ttctctctgcagtct

SEQ ID NO: 367144 - DNA, 15 bp, Homo sapiens
cttctctctgcagtc

SEQ ID NO: 367145 - DNA, 15 bp, Homo sapiens
tcttctctctgcagt

SEQ ID NO: 367146 - DNA, 15 bp, Homo sapiens
ctcttctctctgcag

SEQ ID NO: 367147 - DNA, 15 bp, Homo sapiens
cctcttctctctgca

SEQ ID NO: 367148 - DNA, 15 bp, Homo sapiens
ccctcttctctctgc

SEQ ID NO: 367149 - DNA, 15 bp, Homo sapiens
cccctcttctctctg

SEQ ID NO: 367150 - DNA, 15 bp, Homo sapiens
ccccctcttctctct

SEQ ID NO: 367151 - DNA, 15 bp, Homo sapiens
gccccctcttctctc

SEQ ID NO: 367152 - DNA, 15 bp, Homo sapiens
ggccccctcttctct

SEQ ID NO: 367153 - DNA, 15 bp, Homo sapiens
aggccccctcttctc

SEQ ID NO: 367154 - DNA, 15 bp, Homo sapiens
aaggccccctcttct

SEQ ID NO: 367155 - DNA, 15 bp, Homo sapiens
gaaggccccctcttc

SEQ ID NO: 367156 - DNA, 15 bp, Homo sapiens
ggaaggccccctctt

SEQ ID NO: 367157 - DNA, 15 bp, Homo sapiens
tggaaggccccctct

SEQ ID NO: 367158 - DNA, 15 bp, Homo sapiens
gtggaaggccccctc

SEQ ID NO: 367159 - DNA, 15 bp, Homo sapiens
tgtggaaggccccct

SEQ ID NO: 367160 - DNA, 15 bp, Homo sapiens
atgtggaaggccccc

SEQ ID NO: 367161 - DNA, 15 bp, Homo sapiens
catgtggaaggcccc

SEQ ID NO: 367162 - DNA, 15 bp, Homo sapiens
ccatgtggaaggccc

SEQ ID NO: 367163 - DNA, 15 bp, Homo sapiens
gccatgtggaaggcc

SEQ ID NO: 367164 - DNA, 15 bp, Homo sapiens
tgccatgtggaaggc

SEQ ID NO: 367165 - DNA, 15 bp, Homo sapiens
ttgccatgtggaagg

SEQ ID NO: 367166 - DNA, 15 bp, Homo sapiens
cttgccatgtggaag

SEQ ID NO: 367167 - DNA, 15 bp, Homo sapiens
tcttgccatgtggaa

SEQ ID NO: 367168 - DNA, 15 bp, Homo sapiens
ctcttgccatgtgga

SEQ ID NO: 367169 - DNA, 15 bp, Homo sapiens
gctcttgccatgtgg

SEQ ID NO: 367170 - DNA, 15 bp, Homo sapiens
tgctcttgccatgtg

SEQ ID NO: 367171 - DNA, 15 bp, Homo sapiens
atgctcttgccatgt

SEQ ID NO: 367172 - DNA, 15 bp, Homo sapiens
aatgctcttgccatg

SEQ ID NO: 367173 - DNA, 15 bp, Homo sapiens
aaatgctcttgccat

SEQ ID NO: 367174 - DNA, 15 bp, Homo sapiens
caaatgctcttgcca

SEQ ID NO: 367175 - DNA, 15 bp, Homo sapiens
acaaatgctcttgcc

SEQ ID NO: 367176 - DNA, 15 bp, Homo sapiens
aacaaatgctcttgc

SEQ ID NO: 367177 - DNA, 15 bp, Homo sapiens
aaacaaatgctcttg

SEQ ID NO: 367178 - DNA, 15 bp, Homo sapiens
aaaacaaatgctctt

SEQ ID NO: 367179 - DNA, 15 bp, Homo sapiens
caaaacaaatgctct

SEQ ID NO: 367180 - DNA, 15 bp, Homo sapiens
tcaaaacaaatgctc

SEQ ID NO: 367181 - DNA, 15 bp, Homo sapiens
ttcaaaacaaatgct

SEQ ID NO: 367182 - DNA, 15 bp, Homo sapiens
attcaaaacaaatgc

SEQ ID NO: 367183 - DNA, 15 bp, Homo sapiens
aattcaaaacaaatg

SEQ ID NO: 367184 - DNA, 15 bp, Homo sapiens
aaattcaaaacaaat

SEQ ID NO: 367185 - DNA, 15 bp, Homo sapiens
gaaattcaaaacaaa

SEQ ID NO: 367186 - DNA, 15 bp, Homo sapiens
tgaaattcaaaacaa

SEQ ID NO: 367187 - DNA, 15 bp, Homo sapiens
ctgaaattcaaaaca

SEQ ID NO: 367188 - DNA, 15 bp, Homo sapiens
gctgaaattcaaaac

SEQ ID NO: 367189 - DNA, 15 bp, Homo sapiens
agctgaaattcaaaa

SEQ ID NO: 367190 - DNA, 15 bp, Homo sapiens
gagctgaaattcaaa

SEQ ID NO: 367191 - DNA, 15 bp, Homo sapiens
agagctgaaattcaa

SEQ ID NO: 367192 - DNA, 15 bp, Homo sapiens
aagagctgaaattca

SEQ ID NO: 367193 - DNA, 15 bp, Homo sapiens
caagagctgaaattc

SEQ ID NO: 367194 - DNA, 15 bp, Homo sapiens
tcaagagctgaaatt

SEQ ID NO: 367195 - DNA, 15 bp, Homo sapiens
atcaagagctgaaat

SEQ ID NO: 367196 - DNA, 15 bp, Homo sapiens
aatcaagagctgaaa

SEQ ID NO: 367197 - DNA, 15 bp, Homo sapiens
aaatcaagagctgaa

SEQ ID NO: 367198 - DNA, 15 bp, Homo sapiens
taaatcaagagctga

SEQ ID NO: 367199 - DNA, 15 bp, Homo sapiens
gtaaatcaagagctg

SEQ ID NO: 367200 - DNA, 15 bp, Homo sapiens
agtaaatcaagagct

SEQ ID NO: 367201 - DNA, 15 bp, Homo sapiens
tagtaaatcaagagc

SEQ ID NO: 367202 - DNA, 15 bp, Homo sapiens
ttagtaaatcaagag

SEQ ID NO: 367203 - DNA, 15 bp, Homo sapiens
attagtaaatcaaga

SEQ ID NO: 367204 - DNA, 15 bp, Homo sapiens
aattagtaaatcaag

SEQ ID NO: 367205 - DNA, 15 bp, Homo sapiens
gaattagtaaatcaa

SEQ ID NO: 367206 - DNA, 15 bp, Homo sapiens
ggaattagtaaatca

SEQ ID NO: 367207 - DNA, 15 bp, Homo sapiens
tggaattagtaaatc

SEQ ID NO: 367208 - DNA, 15 bp, Homo sapiens
ttggaattagtaaat

SEQ ID NO: 367209 - DNA, 15 bp, Homo sapiens
tttggaattagtaaa

SEQ ID NO: 367210 - DNA, 15 bp, Homo sapiens
ctttggaattagtaa

SEQ ID NO: 367211 - DNA, 15 bp, Homo sapiens
cctttggaattagta

SEQ ID NO: 367212 - DNA, 15 bp, Homo sapiens
gcctttggaattagt

SEQ ID NO: 367213 - DNA, 15 bp, Homo sapiens
agcctttggaattag

SEQ ID NO: 367214 - DNA, 15 bp, Homo sapiens
aagcctttggaatta

SEQ ID NO: 367215 - DNA, 15 bp, Homo sapiens
gaagcctttggaatt

SEQ ID NO: 367216 - DNA, 15 bp, Homo sapiens
tgaagcctttggaat

SEQ ID NO: 367217 - DNA, 15 bp, Homo sapiens
ttgaagcctttggaa

SEQ ID NO: 367218 - DNA, 15 bp, Homo sapiens
tttgaagcctttgga

SEQ ID NO: 367219 - DNA, 15 bp, Homo sapiens
ctttgaagcctttgg

SEQ ID NO: 367220 - DNA, 15 bp, Homo sapiens
actttgaagcctttg

SEQ ID NO: 367221 - DNA, 15 bp, Homo sapiens
aactttgaagccttt

SEQ ID NO: 367222 - DNA, 15 bp, Homo sapiens
aaactttgaagcctt

SEQ ID NO: 367223 - DNA, 15 bp, Homo sapiens
caaactttgaagcct

SEQ ID NO: 367224 - DNA, 15 bp, Homo sapiens
tcaaactttgaagcc

SEQ ID NO: 367225 - DNA, 15 bp, Homo sapiens
ctcaaactttgaagc

SEQ ID NO: 367226 - DNA, 15 bp, Homo sapiens
gctcaaactttgaag

SEQ ID NO: 367227 - DNA, 15 bp, Homo sapiens
agctcaaactttgaa

SEQ ID NO: 367228 - DNA, 15 bp, Homo sapiens
gagctcaaactttga

SEQ ID NO: 367229 - DNA, 15 bp, Homo sapiens
ggagctcaaactttg

SEQ ID NO: 367230 - DNA, 15 bp, Homo sapiens
aggagctcaaacttt

SEQ ID NO: 367231 - DNA, 15 bp, Homo sapiens
aaggagctcaaactt

SEQ ID NO: 367232 - DNA, 15 bp, Homo sapiens
gaaggagctcaaact

SEQ ID NO: 367233 - DNA, 15 bp, Homo sapiens
agaaggagctcaaac

SEQ ID NO: 367234 - DNA, 15 bp, Homo sapiens
aagaaggagctcaaa

SEQ ID NO: 367235 - DNA, 15 bp, Homo sapiens
gaagaaggagctcaa

SEQ ID NO: 367236 - DNA, 15 bp, Homo sapiens
agaagaaggagctca

SEQ ID NO: 367237 - DNA, 15 bp, Homo sapiens
aagaagaaggagctc

SEQ ID NO: 367238 - DNA, 15 bp, Homo sapiens
aaagaagaaggagct

SEQ ID NO: 367239 - DNA, 15 bp, Homo sapiens
gaaagaagaaggagc

SEQ ID NO: 367240 - DNA, 15 bp, Homo sapiens
ggaaagaagaaggag

SEQ ID NO: 367241 - DNA, 15 bp, Homo sapiens
cggaaagaagaagga

SEQ ID NO: 367242 - DNA, 15 bp, Homo sapiens
acggaaagaagaagg

SEQ ID NO: 367243 - DNA, 15 bp, Homo sapiens
aacggaaagaagaag

SEQ ID NO: 367244 - DNA, 15 bp, Homo sapiens
gaacggaaagaagaa

SEQ ID NO: 367245 - DNA, 15 bp, Homo sapiens
tgaacggaaagaaga

SEQ ID NO: 367246 - DNA, 15 bp, Homo sapiens
ctgaacggaaagaag

SEQ ID NO: 367247 - DNA, 15 bp, Homo sapiens
tctgaacggaaagaa

SEQ ID NO: 367248 - DNA, 15 bp, Homo sapiens
ctctgaacggaaaga

SEQ ID NO: 367249 - DNA, 15 bp, Homo sapiens
actctgaacggaaag

SEQ ID NO: 367250 - DNA, 15 bp, Homo sapiens
aactctgaacggaaa

SEQ ID NO: 367251 - DNA, 15 bp, Homo sapiens
caactctgaacggaa

SEQ ID NO: 367252 - DNA, 15 bp, Homo sapiens
ccaactctgaacgga

SEQ ID NO: 367253 - DNA, 15 bp, Homo sapiens
accaactctgaacgg

SEQ ID NO: 367254 - DNA, 15 bp, Homo sapiens
caccaactctgaacg

SEQ ID NO: 367255 - DNA, 15 bp, Homo sapiens
gcaccaactctgaac

SEQ ID NO: 367256 - DNA, 15 bp, Homo sapiens
tgcaccaactctgaa

SEQ ID NO: 367257 - DNA, 15 bp, Homo sapiens
ctgcaccaactctga

SEQ ID NO: 367258 - DNA, 15 bp, Homo sapiens
actgcaccaactctg

SEQ ID NO: 367259 - DNA, 15 bp, Homo sapiens
cactgcaccaactct

SEQ ID NO: 367260 - DNA, 15 bp, Homo sapiens
acactgcaccaactc

SEQ ID NO: 367261 - DNA, 15 bp, Homo sapiens
tacactgcaccaact

SEQ ID NO: 367262 - DNA, 15 bp, Homo sapiens
atacactgcaccaac

SEQ ID NO: 367263 - DNA, 15 bp, Homo sapiens
aatacactgcaccaa

SEQ ID NO: 367264 - DNA, 15 bp, Homo sapiens
gaatacactgcacca

SEQ ID NO: 367265 - DNA, 15 bp, Homo sapiens
tgaatacactgcacc

SEQ ID NO: 367266 - DNA, 15 bp, Homo sapiens
atgaatacactgcac

SEQ ID NO: 367267 - DNA, 15 bp, Homo sapiens
tatgaatacactgca

SEQ ID NO: 367268 - DNA, 15 bp, Homo sapiens
ttatgaatacactgc

SEQ ID NO: 367269 - DNA, 15 bp, Homo sapiens
attatgaatacactg

SEQ ID NO: 367270 - DNA, 15 bp, Homo sapiens
cattatgaatacact

SEQ ID NO: 367271 - DNA, 15 bp, Homo sapiens
ccattatgaatacac

SEQ ID NO: 367272 - DNA, 15 bp, Homo sapiens
cccattatgaataca

SEQ ID NO: 367273 - DNA, 15 bp, Homo sapiens
gcccattatgaatac

SEQ ID NO: 367274 - DNA, 15 bp, Homo sapiens
ggcccattatgaata

SEQ ID NO: 367275 - DNA, 15 bp, Homo sapiens
tggcccattatgaat

SEQ ID NO: 367276 - DNA, 15 bp, Homo sapiens
atggcccattatgaa

SEQ ID NO: 367277 - DNA, 15 bp, Homo sapiens
catggcccattatga

SEQ ID NO: 367278 - DNA, 15 bp, Homo sapiens
ccatggcccattatg

SEQ ID NO: 367279 - DNA, 15 bp, Homo sapiens
accatggcccattat

SEQ ID NO: 367280 - DNA, 15 bp, Homo sapiens
caccatggcccatta

SEQ ID NO: 367281 - DNA, 15 bp, Homo sapiens
ccaccatggcccatt

SEQ ID NO: 367282 - DNA, 15 bp, Homo sapiens
cccaccatggcccat

SEQ ID NO: 367283 - DNA, 15 bp, Homo sapiens
ccccaccatggccca

SEQ ID NO: 367284 - DNA, 15 bp, Homo sapiens
tccccaccatggccc

SEQ ID NO: 367285 - DNA, 15 bp, Homo sapiens
ctccccaccatggcc

SEQ ID NO: 367286 - DNA, 15 bp, Homo sapiens
cctccccaccatggc

SEQ ID NO: 367287 - DNA, 15 bp, Homo sapiens
ccctccccaccatgg

SEQ ID NO: 367288 - DNA, 15 bp, Homo sapiens
accctccccaccatg

SEQ ID NO: 367289 - DNA, 15 bp, Homo sapiens
taccctccccaccat

SEQ ID NO: 367290 - DNA, 15 bp, Homo sapiens
gtaccctccccacca

SEQ ID NO: 367291 - DNA, 15 bp, Homo sapiens
tgtaccctccccacc

SEQ ID NO: 367292 - DNA, 15 bp, Homo sapiens
gtgtaccctccccac

SEQ ID NO: 367293 - DNA, 15 bp, Homo sapiens
agtgtaccctcccca

SEQ ID NO: 367294 - DNA, 15 bp, Homo sapiens
cagtgtaccctcccc

SEQ ID NO: 367295 - DNA, 15 bp, Homo sapiens
acagtgtaccctccc

SEQ ID NO: 367296 - DNA, 15 bp, Homo sapiens
aacagtgtaccctcc

SEQ ID NO: 367297 - DNA, 15 bp, Homo sapiens
aaacagtgtaccctc

SEQ ID NO: 367298 - DNA, 15 bp, Homo sapiens
aaaacagtgtaccct

SEQ ID NO: 367299 - DNA, 15 bp, Homo sapiens
caaaacagtgtaccc

SEQ ID NO: 367300 - DNA, 15 bp, Homo sapiens
ccaaaacagtgtacc

SEQ ID NO: 367301 - DNA, 15 bp, Homo sapiens
cccaaaacagtgtac

SEQ ID NO: 367302 - DNA, 15 bp, Homo sapiens
ccccaaaacagtgta

SEQ ID NO: 367303 - DNA, 15 bp, Homo sapiens
cccccaaaacagtgt

SEQ ID NO: 367304 - DNA, 15 bp, Homo sapiens
acccccaaaacagtg

SEQ ID NO: 367305 - DNA, 15 bp, Homo sapiens
aacccccaaaacagt

SEQ ID NO: 367306 - DNA, 15 bp, Homo sapiens
caacccccaaaacag

SEQ ID NO: 367307 - DNA, 15 bp, Homo sapiens
tcaacccccaaaaca

SEQ ID NO: 367308 - DNA, 15 bp, Homo sapiens
atcaacccccaaaac

SEQ ID NO: 367309 - DNA, 15 bp, Homo sapiens
catcaacccccaaaa

SEQ ID NO: 367310 - DNA, 15 bp, Homo sapiens
acatcaacccccaaa

SEQ ID NO: 367311 - DNA, 15 bp, Homo sapiens
gacatcaacccccaa

SEQ ID NO: 367312 - DNA, 15 bp, Homo sapiens
tgacatcaaccccca

SEQ ID NO: 367313 - DNA, 15 bp, Homo sapiens
gtgacatcaaccccc

SEQ ID NO: 367314 - DNA, 15 bp, Homo sapiens
ggtgacatcaacccc

SEQ ID NO: 367315 - DNA, 15 bp, Homo sapiens
cggtgacatcaaccc

SEQ ID NO: 367316 - DNA, 15 bp, Homo sapiens
ccggtgacatcaacc

SEQ ID NO: 367317 - DNA, 15 bp, Homo sapiens
gccggtgacatcaac

SEQ ID NO: 367318 - DNA, 15 bp, Homo sapiens
agccggtgacatcaa

SEQ ID NO: 367319 - DNA, 15 bp, Homo sapiens
aagccggtgacatca

SEQ ID NO: 367320 - DNA, 15 bp, Homo sapiens
caagccggtgacatc

SEQ ID NO: 367321 - DNA, 15 bp, Homo sapiens
ccaagccggtgacat

SEQ ID NO: 367322 - DNA, 15 bp, Homo sapiens
cccaagccggtgaca

SEQ ID NO: 367323 - DNA, 15 bp, Homo sapiens
ccccaagccggtgac

SEQ ID NO: 367324 - DNA, 15 bp, Homo sapiens
cccccaagccggtga

SEQ ID NO: 367325 - DNA, 15 bp, Homo sapiens
gcccccaagccggtg

SEQ ID NO: 367326 - DNA, 15 bp, Homo sapiens
cgcccccaagccggt

SEQ ID NO: 367327 - DNA, 15 bp, Homo sapiens
acgcccccaagccgg

SEQ ID NO: 367328 - DNA, 15 bp, Homo sapiens
gacgcccccaagccg

SEQ ID NO: 367329 - DNA, 15 bp, Homo sapiens
agacgcccccaagcc

SEQ ID NO: 367330 - DNA, 15 bp, Homo sapiens
cagacgcccccaagc

SEQ ID NO: 367331 - DNA, 15 bp, Homo sapiens
ccagacgcccccaag

SEQ ID NO: 367332 - DNA, 15 bp, Homo sapiens
tccagacgcccccaa

SEQ ID NO: 367333 - DNA, 15 bp, Homo sapiens
ctccagacgccccca

SEQ ID NO: 367334 - DNA, 15 bp, Homo sapiens
cctccagacgccccc

SEQ ID NO: 367335 - DNA, 15 bp, Homo sapiens
ccctccagacgcccc

SEQ ID NO: 367336 - DNA, 15 bp, Homo sapiens
cccctccagacgccc

SEQ ID NO: 367337 - DNA, 15 bp, Homo sapiens
tcccctccagacgcc

SEQ ID NO: 367338 - DNA, 15 bp, Homo sapiens
ctcccctccagacgc

SEQ ID NO: 367339 - DNA, 15 bp, Homo sapiens
cctcccctccagacg

SEQ ID NO: 367340 - DNA, 15 bp, Homo sapiens
acctcccctccagac

SEQ ID NO: 367341 - DNA, 15 bp, Homo sapiens
cacctcccctccaga

SEQ ID NO: 367342 - DNA, 15 bp, Homo sapiens
tcacctcccctccag

SEQ ID NO: 367343 - DNA, 15 bp, Homo sapiens
atcacctcccctcca

SEQ ID NO: 367344 - DNA, 15 bp, Homo sapiens
catcacctcccctcc

SEQ ID NO: 367345 - DNA, 15 bp, Homo sapiens
ccatcacctcccctc

SEQ ID NO: 367346 - DNA, 15 bp, Homo sapiens
cccatcacctcccct

SEQ ID NO: 367347 - DNA, 15 bp, Homo sapiens
gcccatcacctcccc

SEQ ID NO: 367348 - DNA, 15 bp, Homo sapiens
tgcccatcacctccc

SEQ ID NO: 367349 - DNA, 15 bp, Homo sapiens
gtgcccatcacctcc

SEQ ID NO: 367350 - DNA, 15 bp, Homo sapiens
cgtgcccatcacctc

SEQ ID NO: 367351 - DNA, 15 bp, Homo sapiens
ccgtgcccatcacct

SEQ ID NO: 367352 - DNA, 15 bp, Homo sapiens
tccgtgcccatcacc

SEQ ID NO: 367353 - DNA, 15 bp, Homo sapiens
ctccgtgcccatcac

SEQ ID NO: 367354 - DNA, 15 bp, Homo sapiens
tctccgtgcccatca

SEQ ID NO: 367355 - DNA, 15 bp, Homo sapiens
ttctccgtgcccatc

SEQ ID NO: 367356 - DNA, 15 bp, Homo sapiens
tttctccgtgcccat

SEQ ID NO: 367357 - DNA, 15 bp, Homo sapiens
ttttctccgtgccca

SEQ ID NO: 367358 - DNA, 15 bp, Homo sapiens
gttttctccgtgccc

SEQ ID NO: 367359 - DNA, 15 bp, Homo sapiens
ggttttctccgtgcc

SEQ ID NO: 367360 - DNA, 15 bp, Homo sapiens
aggttttctccgtgc

SEQ ID NO: 367361 - DNA, 15 bp, Homo sapiens
taggttttctccgtg

SEQ ID NO: 367362 - DNA, 15 bp, Homo sapiens
ctaggttttctccgt

SEQ ID NO: 367363 - DNA, 15 bp, Homo sapiens
cctaggttttctccg

SEQ ID NO: 367364 - DNA, 15 bp, Homo sapiens
ccctaggttttctcc

SEQ ID NO: 367365 - DNA, 15 bp, Homo sapiens
gccctaggttttctc

SEQ ID NO: 367366 - DNA, 15 bp, Homo sapiens
agccctaggttttct

SEQ ID NO: 367367 - DNA, 15 bp, Homo sapiens
cagccctaggttttc

SEQ ID NO: 367368 - DNA, 15 bp, Homo sapiens
acagccctaggtttt

SEQ ID NO: 367369 - DNA, 15 bp, Homo sapiens
gacagccctaggttt

SEQ ID NO: 367370 - DNA, 15 bp, Homo sapiens
ggacagccctaggtt

SEQ ID NO: 367371 - DNA, 15 bp, Homo sapiens
aggacagccctaggt

SEQ ID NO: 367372 - DNA, 15 bp, Homo sapiens
gaggacagccctagg

SEQ ID NO: 367373 - DNA, 15 bp, Homo sapiens
agaggacagccctag

SEQ ID NO: 367374 - DNA, 15 bp, Homo sapiens
aagaggacagcccta

SEQ ID NO: 367375 - DNA, 15 bp, Homo sapiens
aaagaggacagccct

SEQ ID NO: 367376 - DNA, 15 bp, Homo sapiens
caaagaggacagccc

SEQ ID NO: 367377 - DNA, 15 bp, Homo sapiens
acaaagaggacagcc

SEQ ID NO: 367378 - DNA, 15 bp, Homo sapiens
tacaaagaggacagc

SEQ ID NO: 367379 - DNA, 15 bp, Homo sapiens
ctacaaagaggacag

SEQ ID NO: 367380 - DNA, 15 bp, Homo sapiens
gctacaaagaggaca

SEQ ID NO: 367381 - DNA, 15 bp, Homo sapiens
cgctacaaagaggac

SEQ ID NO: 367382 - DNA, 15 bp, Homo sapiens
tcgctacaaagagga

SEQ ID NO: 367383 - DNA, 15 bp, Homo sapiens
ctcgctacaaagagg

SEQ ID NO: 367384 - DNA, 15 bp, Homo sapiens
tctcgctacaaagag

SEQ ID NO: 367385 - DNA, 15 bp, Homo sapiens
ttctcgctacaaaga

SEQ ID NO: 367386 - DNA, 15 bp, Homo sapiens
attctcgctacaaag

SEQ ID NO: 367387 - DNA, 15 bp, Homo sapiens
cattctcgctacaaa

SEQ ID NO: 367388 - DNA, 15 bp, Homo sapiens
gcattctcgctacaa

SEQ ID NO: 367389 - DNA, 15 bp, Homo sapiens
ggcattctcgctaca

SEQ ID NO: 367390 - DNA, 15 bp, Homo sapiens
aggcattctcgctac

SEQ ID NO: 367391 - DNA, 15 bp, Homo sapiens
aaggcattctcgcta

SEQ ID NO: 367392 - DNA, 15 bp, Homo sapiens
gaaggcattctcgct

SEQ ID NO: 367393 - DNA, 15 bp, Homo sapiens
ggaaggcattctcgc

SEQ ID NO: 367394 - DNA, 15 bp, Homo sapiens
tggaaggcattctcg

SEQ ID NO: 367395 - DNA, 15 bp, Homo sapiens
ttggaaggcattctc

SEQ ID NO: 367396 - DNA, 15 bp, Homo sapiens
tttggaaggcattct

SEQ ID NO: 367397 - DNA, 15 bp, Homo sapiens
ttttggaaggcattc

SEQ ID NO: 367398 - DNA, 15 bp, Homo sapiens
cttttggaaggcatt

SEQ ID NO: 367399 - DNA, 15 bp, Homo sapiens
ccttttggaaggcat

SEQ ID NO: 367400 - DNA, 15 bp, Homo sapiens
cccttttggaaggca

SEQ ID NO: 367401 - DNA, 15 bp, Homo sapiens
tcccttttggaaggc

SEQ ID NO: 367402 - DNA, 15 bp, Homo sapiens
ttcccttttggaagg

SEQ ID NO: 367403 - DNA, 15 bp, Homo sapiens
gttcccttttggaag

SEQ ID NO: 367404 - DNA, 15 bp, Homo sapiens
agttcccttttggaa

SEQ ID NO: 367405 - DNA, 15 bp, Homo sapiens
aagttcccttttgga

SEQ ID NO: 367406 - DNA, 15 bp, Homo sapiens
aaagttcccttttgg

SEQ ID NO: 367407 - DNA, 15 bp, Homo sapiens
taaagttcccttttg

SEQ ID NO: 367408 - DNA, 15 bp, Homo sapiens
ataaagttccctttt

SEQ ID NO: 367409 - DNA, 15 bp, Homo sapiens
aataaagttcccttt

SEQ ID NO: 367410 - DNA, 15 bp, Homo sapiens
caataaagttccctt

SEQ ID NO: 367411 - DNA, 15 bp, Homo sapiens
ccaataaagttccct

SEQ ID NO: 367412 - DNA, 15 bp, Homo sapiens
gccaataaagttccc

SEQ ID NO: 367413 - DNA, 15 bp, Homo sapiens
ggccaataaagttcc

SEQ ID NO: 367414 - DNA, 15 bp, Homo sapiens
gggccaataaagttc

SEQ ID NO: 367415 - DNA, 15 bp, Homo sapiens
ggggccaataaagtt

SEQ ID NO: 367416 - DNA, 15 bp, Homo sapiens
aggggccaataaagt

SEQ ID NO: 367417 - DNA, 15 bp, Homo sapiens
caggggccaataaag

SEQ ID NO: 367418 - DNA, 15 bp, Homo sapiens
acaggggccaataaa

SEQ ID NO: 367419 - DNA, 15 bp, Homo sapiens
gacaggggccaataa

SEQ ID NO: 367420 - DNA, 15 bp, Homo sapiens
ggacaggggccaata

SEQ ID NO: 367421 - DNA, 15 bp, Homo sapiens
tggacaggggccaat

SEQ ID NO: 367422 - DNA, 15 bp, Homo sapiens
ctggacaggggccaa

SEQ ID NO: 367423 - DNA, 15 bp, Homo sapiens
cctggacaggggcca

SEQ ID NO: 367424 - DNA, 15 bp, Homo sapiens
ccctggacaggggcc

SEQ ID NO: 367425 - DNA, 15 bp, Homo sapiens
gccctggacaggggc

SEQ ID NO: 367426 - DNA, 15 bp, Homo sapiens
tgccctggacagggg

SEQ ID NO: 367427 - DNA, 15 bp, Homo sapiens
ctgccctggacaggg

SEQ ID NO: 367428 - DNA, 15 bp, Homo sapiens
tctgccctggacagg

SEQ ID NO: 367429 - DNA, 15 bp, Homo sapiens
ctctgccctggacag

SEQ ID NO: 367430 - DNA, 15 bp, Homo sapiens
tctctgccctggaca

SEQ ID NO: 367431 - DNA, 15 bp, Homo sapiens
ctctctgccctggac

SEQ ID NO: 367432 - DNA, 15 bp, Homo sapiens
actctctgccctgga

SEQ ID NO: 367433 - DNA, 15 bp, Homo sapiens
aactctctgccctgg

SEQ ID NO: 367434 - DNA, 15 bp, Homo sapiens
aaactctctgccctg

SEQ ID NO: 367435 - DNA, 15 bp, Homo sapiens
aaaactctctgccct

SEQ ID NO: 367436 - DNA, 15 bp, Homo sapiens
caaaactctctgccc

SEQ ID NO: 367437 - DNA, 15 bp, Homo sapiens
acaaaactctctgcc

SEQ ID NO: 367438 - DNA, 15 bp, Homo sapiens
tacaaaactctctgc

SEQ ID NO: 367439 - DNA, 15 bp, Homo sapiens
ttacaaaactctctg

SEQ ID NO: 367440 - DNA, 15 bp, Homo sapiens
tttacaaaactctct

SEQ ID NO: 367441 - DNA, 15 bp, Homo sapiens
atttacaaaactctc

SEQ ID NO: 367442 - DNA, 15 bp, Homo sapiens
catttacaaaactct

SEQ ID NO: 367443 - DNA, 15 bp, Homo sapiens
ccatttacaaaactc

SEQ ID NO: 367444 - DNA, 15 bp, Homo sapiens
tccatttacaaaact

SEQ ID NO: 367445 - DNA, 15 bp, Homo sapiens
ctccatttacaaaac

SEQ ID NO: 367446 - DNA, 15 bp, Homo sapiens
tctccatttacaaaa

SEQ ID NO: 367447 - DNA, 15 bp, Homo sapiens
ttctccatttacaaa

SEQ ID NO: 367448 - DNA, 15 bp, Homo sapiens
tttctccatttacaa

SEQ ID NO: 367449 - DNA, 15 bp, Homo sapiens
ctttctccatttaca

SEQ ID NO: 367450 - DNA, 15 bp, Homo sapiens
gctttctccatttac

SEQ ID NO: 367451 - DNA, 15 bp, Homo sapiens
ggctttctccattta

SEQ ID NO: 367452 - DNA, 15 bp, Homo sapiens
gggctttctccattt

SEQ ID NO: 367453 - DNA, 15 bp, Homo sapiens
tgggctttctccatt

SEQ ID NO: 367454 - DNA, 15 bp, Homo sapiens
ttgggctttctccat

SEQ ID NO: 367455 - DNA, 15 bp, Homo sapiens
tttgggctttctcca

SEQ ID NO: 367456 - DNA, 15 bp, Homo sapiens
gtttgggctttctcc

SEQ ID NO: 367457 - DNA, 15 bp, Homo sapiens
ggtttgggctttctc

SEQ ID NO: 367458 - DNA, 15 bp, Homo sapiens
aggtttgggctttct

SEQ ID NO: 367459 - DNA, 15 bp, Homo sapiens
gaggtttgggctttc

SEQ ID NO: 367460 - DNA, 15 bp, Homo sapiens
ggaggtttgggcttt

SEQ ID NO: 367461 - DNA, 15 bp, Homo sapiens
aggaggtttgggctt

SEQ ID NO: 367462 - DNA, 15 bp, Homo sapiens
gaggaggtttgggct

SEQ ID NO: 367463 - DNA, 15 bp, Homo sapiens
ggaggaggtttgggc

SEQ ID NO: 367464 - DNA, 15 bp, Homo sapiens
aggaggaggtttggg

SEQ ID NO: 367465 - DNA, 15 bp, Homo sapiens
aaggaggaggtttgg

SEQ ID NO: 367466 - DNA, 15 bp, Homo sapiens
aaaggaggaggtttg

SEQ ID NO: 367467 - DNA, 15 bp, Homo sapiens
aaaaggaggaggttt

SEQ ID NO: 367468 - DNA, 15 bp, Homo sapiens
gaaaaggaggaggtt

SEQ ID NO: 367469 - DNA, 15 bp, Homo sapiens
tgaaaaggaggaggt

SEQ ID NO: 367470 - DNA, 15 bp, Homo sapiens
ttgaaaaggaggagg

SEQ ID NO: 367471 - DNA, 15 bp, Homo sapiens
cttgaaaaggaggag

SEQ ID NO: 367472 - DNA, 15 bp, Homo sapiens
tcttgaaaaggagga

SEQ ID NO: 367473 - DNA, 15 bp, Homo sapiens
ttcttgaaaaggagg

SEQ ID NO: 367474 - DNA, 15 bp, Homo sapiens
cttcttgaaaaggag

SEQ ID NO: 367475 - DNA, 15 bp, Homo sapiens
acttcttgaaaagga

SEQ ID NO: 367476 - DNA, 15 bp, Homo sapiens
aacttcttgaaaagg

SEQ ID NO: 367477 - DNA, 15 bp, Homo sapiens
caacttcttgaaaag

SEQ ID NO: 367478 - DNA, 15 bp, Homo sapiens
tcaacttcttgaaaa

SEQ ID NO: 367479 - DNA, 15 bp, Homo sapiens
atcaacttcttgaaa

SEQ ID NO: 367480 - DNA, 15 bp, Homo sapiens
gatcaacttcttgaa

SEQ ID NO: 367481 - DNA, 15 bp, Homo sapiens
cgatcaacttcttga

SEQ ID NO: 367482 - DNA, 15 bp, Homo sapiens
acgatcaacttcttg

SEQ ID NO: 367483 - DNA, 15 bp, Homo sapiens
aacgatcaacttctt

SEQ ID NO: 367484 - DNA, 15 bp, Homo sapiens
gaacgatcaacttct

SEQ ID NO: 367485 - DNA, 15 bp, Homo sapiens
ggaacgatcaacttc

SEQ ID NO: 367486 - DNA, 15 bp, Homo sapiens
tggaacgatcaactt

SEQ ID NO: 367487 - DNA, 15 bp, Homo sapiens
atggaacgatcaact

SEQ ID NO: 367488 - DNA, 15 bp, Homo sapiens
catggaacgatcaac

SEQ ID NO: 367489 - DNA, 15 bp, Homo sapiens
ccatggaacgatcaa

SEQ ID NO: 367490 - DNA, 15 bp, Homo sapiens
cccatggaacgatca

SEQ ID NO: 367491 - DNA, 15 bp, Homo sapiens
ccccatggaacgatc

SEQ ID NO: 367492 - DNA, 15 bp, Homo sapiens
cccccatggaacgat

SEQ ID NO: 367493 - DNA, 15 bp, Homo sapiens
ccccccatggaacga

SEQ ID NO: 367494 - DNA, 15 bp, Homo sapiens
accccccatggaacg

SEQ ID NO: 367495 - DNA, 15 bp, Homo sapiens
caccccccatggaac

SEQ ID NO: 367496 - DNA, 15 bp, Homo sapiens
ccaccccccatggaa

SEQ ID NO: 367497 - DNA, 15 bp, Homo sapiens
gccaccccccatgga

SEQ ID NO: 367498 - DNA, 15 bp, Homo sapiens
ggccaccccccatgg

SEQ ID NO: 367499 - DNA, 15 bp, Homo sapiens
aggccaccccccatg

SEQ ID NO: 367500 - DNA, 15 bp, Homo sapiens
caggccaccccccat

SEQ ID NO: 367501 - DNA, 15 bp, Homo sapiens
ccaggccacccccca

SEQ ID NO: 367502 - DNA, 15 bp, Homo sapiens
cccaggccacccccc

SEQ ID NO: 367503 - DNA, 15 bp, Homo sapiens
acccaggccaccccc

SEQ ID NO: 367504 - DNA, 15 bp, Homo sapiens
cacccaggccacccc

SEQ ID NO: 367505 - DNA, 15 bp, Homo sapiens
acacccaggccaccc

SEQ ID NO: 367506 - DNA, 15 bp, Homo sapiens
cacacccaggccacc

SEQ ID NO: 367507 - DNA, 15 bp, Homo sapiens
acacacccaggccac

SEQ ID NO: 367508 - DNA, 15 bp, Homo sapiens
gacacacccaggcca

SEQ ID NO: 367509 - DNA, 15 bp, Homo sapiens
agacacacccaggcc

SEQ ID NO: 367510 - DNA, 15 bp, Homo sapiens
cagacacacccaggc

SEQ ID NO: 367511 - DNA, 15 bp, Homo sapiens
gcagacacacccagg

SEQ ID NO: 367512 - DNA, 15 bp, Homo sapiens
ggcagacacacccag

SEQ ID NO: 367513 - DNA, 15 bp, Homo sapiens
aggcagacacaccca

SEQ ID NO: 367514 - DNA, 15 bp, Homo sapiens
aaggcagacacaccc

SEQ ID NO: 367515 - DNA, 15 bp, Homo sapiens
caaggcagacacacc

SEQ ID NO: 367516 - DNA, 15 bp, Homo sapiens
gcaaggcagacacac

SEQ ID NO: 367517 - DNA, 15 bp, Homo sapiens
agcaaggcagacaca

SEQ ID NO: 367518 - DNA, 15 bp, Homo sapiens
cagcaaggcagacac

SEQ ID NO: 367519 - DNA, 15 bp, Homo sapiens
acagcaaggcagaca

SEQ ID NO: 367520 - DNA, 15 bp, Homo sapiens
cacagcaaggcagac

SEQ ID NO: 367521 - DNA, 15 bp, Homo sapiens
ccacagcaaggcaga

SEQ ID NO: 367522 - DNA, 15 bp, Homo sapiens
tccacagcaaggcag

SEQ ID NO: 367523 - DNA, 15 bp, Homo sapiens
atccacagcaaggca

SEQ ID NO: 367524 - DNA, 15 bp, Homo sapiens
catccacagcaaggc

SEQ ID NO: 367525 - DNA, 15 bp, Homo sapiens
tcatccacagcaagg

SEQ ID NO: 367526 - DNA, 15 bp, Homo sapiens
ctcatccacagcaag

SEQ ID NO: 367527 - DNA, 15 bp, Homo sapiens
cctcatccacagcaa

SEQ ID NO: 367528 - DNA, 15 bp, Homo sapiens
gcctcatccacagca

SEQ ID NO: 367529 - DNA, 15 bp, Homo sapiens
ggcctcatccacagc

SEQ ID NO: 367530 - DNA, 15 bp, Homo sapiens
tggcctcatccacag

SEQ ID NO: 367531 - DNA, 15 bp, Homo sapiens
ctggcctcatccaca

SEQ ID NO: 367532 - DNA, 15 bp, Homo sapiens
actggcctcatccac

SEQ ID NO: 367533 - DNA, 15 bp, Homo sapiens
cactggcctcatcca

SEQ ID NO: 367534 - DNA, 15 bp, Homo sapiens
tcactggcctcatcc

SEQ ID NO: 367535 - DNA, 15 bp, Homo sapiens
gtcactggcctcatc

SEQ ID NO: 367536 - DNA, 15 bp, Homo sapiens
agtcactggcctcat

SEQ ID NO: 367537 - DNA, 15 bp, Homo sapiens
cagtcactggcctca

SEQ ID NO: 367538 - DNA, 15 bp, Homo sapiens
ccagtcactggcctc

SEQ ID NO: 367539 - DNA, 15 bp, Homo sapiens
tccagtcactggcct

SEQ ID NO: 367540 - DNA, 15 bp, Homo sapiens
atccagtcactggcc

SEQ ID NO: 367541 - DNA, 15 bp, Homo sapiens
catccagtcactggc

SEQ ID NO: 367542 - DNA, 15 bp, Homo sapiens
acatccagtcactgg

SEQ ID NO: 367543 - DNA, 15 bp, Homo sapiens
cacatccagtcactg

SEQ ID NO: 367544 - DNA, 15 bp, Homo sapiens
ccacatccagtcact

SEQ ID NO: 367545 - DNA, 15 bp, Homo sapiens
gccacatccagtcac

SEQ ID NO: 367546 - DNA, 15 bp, Homo sapiens
tgccacatccagtca

SEQ ID NO: 367547 - DNA, 15 bp, Homo sapiens
ctgccacatccagtc

SEQ ID NO: 367548 - DNA, 15 bp, Homo sapiens
cctgccacatccagt

SEQ ID NO: 367549 - DNA, 15 bp, Homo sapiens
ccctgccacatccag

SEQ ID NO: 367550 - DNA, 15 bp, Homo sapiens
gccctgccacatcca

SEQ ID NO: 367551 - DNA, 15 bp, Homo sapiens
agccctgccacatcc

SEQ ID NO: 367552 - DNA, 15 bp, Homo sapiens
cagccctgccacatc

SEQ ID NO: 367553 - DNA, 15 bp, Homo sapiens
ccagccctgccacat

SEQ ID NO: 367554 - DNA, 15 bp, Homo sapiens
tccagccctgccaca

SEQ ID NO: 367555 - DNA, 15 bp, Homo sapiens
atccagccctgccac

SEQ ID NO: 367556 - DNA, 15 bp, Homo sapiens
catccagccctgcca

SEQ ID NO: 367557 - DNA, 15 bp, Homo sapiens
ccatccagccctgcc

SEQ ID NO: 367558 - DNA, 15 bp, Homo sapiens
cccatccagccctgc

SEQ ID NO: 367559 - DNA, 15 bp, Homo sapiens
ccccatccagccctg

SEQ ID NO: 367560 - DNA, 15 bp, Homo sapiens
cccccatccagccct

SEQ ID NO: 367561 - DNA, 15 bp, Homo sapiens
tcccccatccagccc

SEQ ID NO: 367562 - DNA, 15 bp, Homo sapiens
ttcccccatccagcc

SEQ ID NO: 367563 - DNA, 15 bp, Homo sapiens
cttcccccatccagc

SEQ ID NO: 367564 - DNA, 15 bp, Homo sapiens
ccttcccccatccag

SEQ ID NO: 367565 - DNA, 15 bp, Homo sapiens
cccttcccccatcca

SEQ ID NO: 367566 - DNA, 15 bp, Homo sapiens
ccccttcccccatcc

SEQ ID NO: 367567 - DNA, 15 bp, Homo sapiens
gccccttcccccatc

SEQ ID NO: 367568 - DNA, 15 bp, Homo sapiens
tgccccttcccccat

SEQ ID NO: 367569 - DNA, 15 bp, Homo sapiens
atgccccttccccca

SEQ ID NO: 367570 - DNA, 15 bp, Homo sapiens
tatgccccttccccc

SEQ ID NO: 367571 - DNA, 15 bp, Homo sapiens
ctatgccccttcccc

SEQ ID NO: 367572 - DNA, 15 bp, Homo sapiens
gctatgccccttccc

SEQ ID NO: 367573 - DNA, 15 bp, Homo sapiens
tgctatgccccttcc

SEQ ID NO: 367574 - DNA, 15 bp, Homo sapiens
ctgctatgccccttc

SEQ ID NO: 367575 - DNA, 15 bp, Homo sapiens
tctgctatgcccctt

SEQ ID NO: 367576 - DNA, 15 bp, Homo sapiens
gtctgctatgcccct

SEQ ID NO: 367577 - DNA, 15 bp, Homo sapiens
tgtctgctatgcccc

SEQ ID NO: 367578 - DNA, 15 bp, Homo sapiens
gtgtctgctatgccc

SEQ ID NO: 367579 - DNA, 15 bp, Homo sapiens
agtgtctgctatgcc

SEQ ID NO: 367580 - DNA, 15 bp, Homo sapiens
cagtgtctgctatgc

SEQ ID NO: 367581 - DNA, 15 bp, Homo sapiens
tcagtgtctgctatg

SEQ ID NO: 367582 - DNA, 15 bp, Homo sapiens
ctcagtgtctgctat

SEQ ID NO: 367583 - DNA, 15 bp, Homo sapiens
cctcagtgtctgcta

SEQ ID NO: 367584 - DNA, 15 bp, Homo sapiens
acctcagtgtctgct

SEQ ID NO: 367585 - DNA, 15 bp, Homo sapiens
aacctcagtgtctgc

SEQ ID NO: 367586 - DNA, 15 bp, Homo sapiens
caacctcagtgtctg

SEQ ID NO: 367587 - DNA, 15 bp, Homo sapiens
ccaacctcagtgtct

SEQ ID NO: 367588 - DNA, 15 bp, Homo sapiens
cccaacctcagtgtc

SEQ ID NO: 367589 - DNA, 15 bp, Homo sapiens
ccccaacctcagtgt

SEQ ID NO: 367590 - DNA, 15 bp, Homo sapiens
cccccaacctcagtg

SEQ ID NO: 367591 - DNA, 15 bp, Homo sapiens
ccccccaacctcagt

SEQ ID NO: 367592 - DNA, 15 bp, Homo sapiens
accccccaacctcag

SEQ ID NO: 367593 - DNA, 15 bp, Homo sapiens
caccccccaacctca

SEQ ID NO: 367594 - DNA, 15 bp, Homo sapiens
ccaccccccaacctc

SEQ ID NO: 367595 - DNA, 15 bp, Homo sapiens
cccaccccccaacct

SEQ ID NO: 367596 - DNA, 15 bp, Homo sapiens
tcccaccccccaacc

SEQ ID NO: 367597 - DNA, 15 bp, Homo sapiens
ctcccaccccccaac

SEQ ID NO: 367598 - DNA, 15 bp, Homo sapiens
gctcccaccccccaa

SEQ ID NO: 367599 - DNA, 15 bp, Homo sapiens
ggctcccacccccca

SEQ ID NO: 367600 - DNA, 15 bp, Homo sapiens
aggctcccacccccc

SEQ ID NO: 367601 - DNA, 15 bp, Homo sapiens
caggctcccaccccc

SEQ ID NO: 367602 - DNA, 15 bp, Homo sapiens
ccaggctcccacccc

SEQ ID NO: 367603 - DNA, 15 bp, Homo sapiens
gccaggctcccaccc

SEQ ID NO: 367604 - DNA, 15 bp, Homo sapiens
tgccaggctcccacc

SEQ ID NO: 367605 - DNA, 15 bp, Homo sapiens
ctgccaggctcccac

SEQ ID NO: 367606 - DNA, 15 bp, Homo sapiens
gctgccaggctccca

SEQ ID NO: 367607 - DNA, 15 bp, Homo sapiens
tgctgccaggctccc

SEQ ID NO: 367608 - DNA, 15 bp, Homo sapiens
ttgctgccaggctcc

SEQ ID NO: 367609 - DNA, 15 bp, Homo sapiens
cttgctgccaggctc

SEQ ID NO: 367610 - DNA, 15 bp, Homo sapiens
ccttgctgccaggct

SEQ ID NO: 367611 - DNA, 15 bp, Homo sapiens
accttgctgccaggc

SEQ ID NO: 367612 - DNA, 15 bp, Homo sapiens
caccttgctgccagg

SEQ ID NO: 367613 - DNA, 15 bp, Homo sapiens
ccaccttgctgccag

SEQ ID NO: 367614 - DNA, 15 bp, Homo sapiens
cccaccttgctgcca

SEQ ID NO: 367615 - DNA, 15 bp, Homo sapiens
ccccaccttgctgcc

SEQ ID NO: 367616 - DNA, 15 bp, Homo sapiens
tccccaccttgctgc

SEQ ID NO: 367617 - DNA, 15 bp, Homo sapiens
ctccccaccttgctg

SEQ ID NO: 367618 - DNA, 15 bp, Homo sapiens
gctccccaccttgct

SEQ ID NO: 367619 - DNA, 15 bp, Homo sapiens
tgctccccaccttgc

SEQ ID NO: 367620 - DNA, 15 bp, Homo sapiens
ctgctccccaccttg

SEQ ID NO: 367621 - DNA, 15 bp, Homo sapiens
actgctccccacctt

SEQ ID NO: 367622 - DNA, 15 bp, Homo sapiens
cactgctccccacct

SEQ ID NO: 367623 - DNA, 15 bp, Homo sapiens
tcactgctccccacc

SEQ ID NO: 367624 - DNA, 15 bp, Homo sapiens
ttcactgctccccac

SEQ ID NO: 367625 - DNA, 15 bp, Homo sapiens
tttcactgctcccca

SEQ ID NO: 367626 - DNA, 15 bp, Homo sapiens
ttttcactgctcccc

SEQ ID NO: 367627 - DNA, 15 bp, Homo sapiens
gttttcactgctccc

SEQ ID NO: 367628 - DNA, 15 bp, Homo sapiens
agttttcactgctcc

SEQ ID NO: 367629 - DNA, 15 bp, Homo sapiens
cagttttcactgctc

SEQ ID NO: 367630 - DNA, 15 bp, Homo sapiens
tcagttttcactgct

SEQ ID NO: 367631 - DNA, 15 bp, Homo sapiens
ctcagttttcactgc

SEQ ID NO: 367632 - DNA, 15 bp, Homo sapiens
cctcagttttcactg

SEQ ID NO: 367633 - DNA, 15 bp, Homo sapiens
tcctcagttttcact

SEQ ID NO: 367634 - DNA, 15 bp, Homo sapiens
ctcctcagttttcac

SEQ ID NO: 367635 - DNA, 15 bp, Homo sapiens
actcctcagttttca

SEQ ID NO: 367636 - DNA, 15 bp, Homo sapiens
aactcctcagttttc

SEQ ID NO: 367637 - DNA, 15 bp, Homo sapiens
aaactcctcagtttt

SEQ ID NO: 367638 - DNA, 15 bp, Homo sapiens
gaaactcctcagttt

SEQ ID NO: 367639 - DNA, 15 bp, Homo sapiens
agaaactcctcagtt

SEQ ID NO: 367640 - DNA, 15 bp, Homo sapiens
gagaaactcctcagt

SEQ ID NO: 367641 - DNA, 15 bp, Homo sapiens
ggagaaactcctcag

SEQ ID NO: 367642 - DNA, 15 bp, Homo sapiens
gggagaaactcctca

SEQ ID NO: 367643 - DNA, 15 bp, Homo sapiens
agggagaaactcctc

SEQ ID NO: 367644 - DNA, 15 bp, Homo sapiens
gagggagaaactcct

SEQ ID NO: 367645 - DNA, 15 bp, Homo sapiens
ggagggagaaactcc

SEQ ID NO: 367646 - DNA, 15 bp, Homo sapiens
aggagggagaaactc

SEQ ID NO: 367647 - DNA, 15 bp, Homo sapiens
gaggagggagaaact

SEQ ID NO: 367648 - DNA, 15 bp, Homo sapiens
ggaggagggagaaac

SEQ ID NO: 367649 - DNA, 15 bp, Homo sapiens
aggaggagggagaaa

SEQ ID NO: 367650 - DNA, 15 bp, Homo sapiens
gaggaggagggagaa

SEQ ID NO: 367651 - DNA, 15 bp, Homo sapiens
ggaggaggagggaga

SEQ ID NO: 367652 - DNA, 15 bp, Homo sapiens
aggaggaggagggag

SEQ ID NO: 367653 - DNA, 15 bp, Homo sapiens
aaggaggaggaggga

SEQ ID NO: 367654 - DNA, 15 bp, Homo sapiens
caaggaggaggaggg

SEQ ID NO: 367655 - DNA, 15 bp, Homo sapiens
tcaaggaggaggagg

SEQ ID NO: 367656 - DNA, 15 bp, Homo sapiens
ttcaaggaggaggag

SEQ ID NO: 367657 - DNA, 15 bp, Homo sapiens
tttcaaggaggagga

SEQ ID NO: 367658 - DNA, 15 bp, Homo sapiens
atttcaaggaggagg

SEQ ID NO: 367659 - DNA, 15 bp, Homo sapiens
tatttcaaggaggag

SEQ ID NO: 367660 - DNA, 15 bp, Homo sapiens
ttatttcaaggagga

SEQ ID NO: 367661 - DNA, 15 bp, Homo sapiens
gttatttcaaggagg

SEQ ID NO: 367662 - DNA, 15 bp, Homo sapiens
ggttatttcaaggag

SEQ ID NO: 367663 - DNA, 15 bp, Homo sapiens
aggttatttcaagga

SEQ ID NO: 367664 - DNA, 15 bp, Homo sapiens
gaggttatttcaagg

SEQ ID NO: 367665 - DNA, 15 bp, Homo sapiens
agaggttatttcaag

SEQ ID NO: 367666 - DNA, 15 bp, Homo sapiens
gagaggttatttcaa

SEQ ID NO: 367667 - DNA, 15 bp, Homo sapiens
agagaggttatttca

SEQ ID NO: 367668 - DNA, 15 bp, Homo sapiens
cagagaggttatttc

SEQ ID NO: 367669 - DNA, 15 bp, Homo sapiens
tcagagaggttattt

SEQ ID NO: 367670 - DNA, 15 bp, Homo sapiens
ctcagagaggttatt

SEQ ID NO: 367671 - DNA, 15 bp, Homo sapiens
gctcagagaggttat

SEQ ID NO: 367672 - DNA, 15 bp, Homo sapiens
ggctcagagaggtta

SEQ ID NO: 367673 - DNA, 15 bp, Homo sapiens
aggctcagagaggtt

SEQ ID NO: 367674 - DNA, 15 bp, Homo sapiens
gaggctcagagaggt

SEQ ID NO: 367675 - DNA, 15 bp, Homo sapiens
agaggctcagagagg

SEQ ID NO: 367676 - DNA, 15 bp, Homo sapiens
aagaggctcagagag

SEQ ID NO: 367677 - DNA, 15 bp, Homo sapiens
aaagaggctcagaga

SEQ ID NO: 367678 - DNA, 15 bp, Homo sapiens
gaaagaggctcagag

SEQ ID NO: 367679 - DNA, 15 bp, Homo sapiens
tgaaagaggctcaga

SEQ ID NO: 367680 - DNA, 15 bp, Homo sapiens
gtgaaagaggctcag

SEQ ID NO: 367681 - DNA, 15 bp, Homo sapiens
tgtgaaagaggctca

SEQ ID NO: 367682 - DNA, 15 bp, Homo sapiens
ctgtgaaagaggctc

SEQ ID NO: 367683 - DNA, 15 bp, Homo sapiens
cctgtgaaagaggct

SEQ ID NO: 367684 - DNA, 15 bp, Homo sapiens
gcctgtgaaagaggc

SEQ ID NO: 367685 - DNA, 15 bp, Homo sapiens
ggcctgtgaaagagg

SEQ ID NO: 367686 - DNA, 15 bp, Homo sapiens
gggcctgtgaaagag

SEQ ID NO: 367687 - DNA, 15 bp, Homo sapiens
agggcctgtgaaaga

SEQ ID NO: 367688 - DNA, 15 bp, Homo sapiens
cagggcctgtgaaag

SEQ ID NO: 367689 - DNA, 15 bp, Homo sapiens
acagggcctgtgaaa

SEQ ID NO: 367690 - DNA, 15 bp, Homo sapiens
cacagggcctgtgaa

SEQ ID NO: 367691 - DNA, 15 bp, Homo sapiens
acacagggcctgtga

SEQ ID NO: 367692 - DNA, 15 bp, Homo sapiens
cacacagggcctgtg

SEQ ID NO: 367693 - DNA, 15 bp, Homo sapiens
gcacacagggcctgt

SEQ ID NO: 367694 - DNA, 15 bp, Homo sapiens
agcacacagggcctg

SEQ ID NO: 367695 - DNA, 15 bp, Homo sapiens
cagcacacagggcct

SEQ ID NO: 367696 - DNA, 15 bp, Homo sapiens
acagcacacagggcc

SEQ ID NO: 367697 - DNA, 15 bp, Homo sapiens
aacagcacacagggc

SEQ ID NO: 367698 - DNA, 15 bp, Homo sapiens
aaacagcacacaggg

SEQ ID NO: 367699 - DNA, 15 bp, Homo sapiens
aaaacagcacacagg

SEQ ID NO: 367700 - DNA, 15 bp, Homo sapiens
gaaaacagcacacag

SEQ ID NO: 367701 - DNA, 15 bp, Homo sapiens
ggaaaacagcacaca

SEQ ID NO: 367702 - DNA, 15 bp, Homo sapiens
aggaaaacagcacac

SEQ ID NO: 367703 - DNA, 15 bp, Homo sapiens
aaggaaaacagcaca

SEQ ID NO: 367704 - DNA, 15 bp, Homo sapiens
gaaggaaaacagcac

SEQ ID NO: 367705 - DNA, 15 bp, Homo sapiens
ggaaggaaaacagca

SEQ ID NO: 367706 - DNA, 15 bp, Homo sapiens
aggaaggaaaacagc

SEQ ID NO: 367707 - DNA, 15 bp, Homo sapiens
caggaaggaaaacag

SEQ ID NO: 367708 - DNA, 15 bp, Homo sapiens
acaggaaggaaaaca

SEQ ID NO: 367709 - DNA, 15 bp, Homo sapiens
gacaggaaggaaaac

SEQ ID NO: 367710 - DNA, 15 bp, Homo sapiens
ggacaggaaggaaaa

SEQ ID NO: 367711 - DNA, 15 bp, Homo sapiens
aggacaggaaggaaa

SEQ ID NO: 367712 - DNA, 15 bp, Homo sapiens
caggacaggaaggaa

SEQ ID NO: 367713 - DNA, 15 bp, Homo sapiens
gcaggacaggaagga

SEQ ID NO: 367714 - DNA, 15 bp, Homo sapiens
ggcaggacaggaagg

SEQ ID NO: 367715 - DNA, 15 bp, Homo sapiens
gggcaggacaggaag

SEQ ID NO: 367716 - DNA, 15 bp, Homo sapiens
agggcaggacaggaa

SEQ ID NO: 367717 - DNA, 15 bp, Homo sapiens
cagggcaggacagga

SEQ ID NO: 367718 - DNA, 15 bp, Homo sapiens
ccagggcaggacagg

SEQ ID NO: 367719 - DNA, 15 bp, Homo sapiens
gccagggcaggacag

SEQ ID NO: 367720 - DNA, 15 bp, Homo sapiens
agccagggcaggaca

SEQ ID NO: 367721 - DNA, 15 bp, Homo sapiens
cagccagggcaggac

SEQ ID NO: 367722 - DNA, 15 bp, Homo sapiens
tcagccagggcagga

SEQ ID NO: 367723 - DNA, 15 bp, Homo sapiens
ctcagccagggcagg

SEQ ID NO: 367724 - DNA, 15 bp, Homo sapiens
tctcagccagggcag

SEQ ID NO: 367725 - DNA, 15 bp, Homo sapiens
ctctcagccagggca

SEQ ID NO: 367726 - DNA, 15 bp, Homo sapiens
gctctcagccagggc

SEQ ID NO: 367727 - DNA, 15 bp, Homo sapiens
cgctctcagccaggg

SEQ ID NO: 367728 - DNA, 15 bp, Homo sapiens
ccgctctcagccagg

SEQ ID NO: 367729 - DNA, 15 bp, Homo sapiens
cccgctctcagccag

SEQ ID NO: 367730 - DNA, 15 bp, Homo sapiens
gcccgctctcagcca

SEQ ID NO: 367731 - DNA, 15 bp, Homo sapiens
agcccgctctcagcc

SEQ ID NO: 367732 - DNA, 15 bp, Homo sapiens
aagcccgctctcagc

SEQ ID NO: 367733 - DNA, 15 bp, Homo sapiens
taagcccgctctcag

SEQ ID NO: 367734 - DNA, 15 bp, Homo sapiens
ttaagcccgctctca

SEQ ID NO: 367735 - DNA, 15 bp, Homo sapiens
attaagcccgctctc

SEQ ID NO: 367736 - DNA, 15 bp, Homo sapiens
cattaagcccgctct

SEQ ID NO: 367737 - DNA, 15 bp, Homo sapiens
tcattaagcccgctc

SEQ ID NO: 367738 - DNA, 15 bp, Homo sapiens
ttcattaagcccgct

SEQ ID NO: 367739 - DNA, 15 bp, Homo sapiens
attcattaagcccgc

SEQ ID NO: 367740 - DNA, 15 bp, Homo sapiens
cattcattaagcccg

SEQ ID NO: 367741 - DNA, 15 bp, Homo sapiens
ccattcattaagccc

SEQ ID NO: 367742 - DNA, 15 bp, Homo sapiens
cccattcattaagcc

SEQ ID NO: 367743 - DNA, 15 bp, Homo sapiens
ccccattcattaagc

SEQ ID NO: 367744 - DNA, 15 bp, Homo sapiens
gccccattcattaag

SEQ ID NO: 367745 - DNA, 15 bp, Homo sapiens
agccccattcattaa

SEQ ID NO: 367746 - DNA, 15 bp, Homo sapiens
gagccccattcatta

SEQ ID NO: 367747 - DNA, 15 bp, Homo sapiens
tgagccccattcatt

SEQ ID NO: 367748 - DNA, 15 bp, Homo sapiens
ctgagccccattcat

SEQ ID NO: 367749 - DNA, 15 bp, Homo sapiens
actgagccccattca

SEQ ID NO: 367750 - DNA, 15 bp, Homo sapiens
aactgagccccattc

SEQ ID NO: 367751 - DNA, 15 bp, Homo sapiens
aaactgagccccatt

SEQ ID NO: 367752 - DNA, 15 bp, Homo sapiens
taaactgagccccat

SEQ ID NO: 367753 - DNA, 15 bp, Homo sapiens
ctaaactgagcccca

SEQ ID NO: 367754 - DNA, 15 bp, Homo sapiens
cctaaactgagcccc

SEQ ID NO: 367755 - DNA, 15 bp, Homo sapiens
ccctaaactgagccc

SEQ ID NO: 367756 - DNA, 15 bp, Homo sapiens
accctaaactgagcc

SEQ ID NO: 367757 - DNA, 15 bp, Homo sapiens
caccctaaactgagc

SEQ ID NO: 367758 - DNA, 15 bp, Homo sapiens
ccaccctaaactgag

SEQ ID NO: 367759 - DNA, 15 bp, Homo sapiens
cccaccctaaactga

SEQ ID NO: 367760 - DNA, 15 bp, Homo sapiens
tcccaccctaaactg

SEQ ID NO: 367761 - DNA, 15 bp, Homo sapiens
ctcccaccctaaact

SEQ ID NO: 367762 - DNA, 15 bp, Homo sapiens
cctcccaccctaaac

SEQ ID NO: 367763 - DNA, 15 bp, Homo sapiens
tcctcccaccctaaa

SEQ ID NO: 367764 - DNA, 15 bp, Homo sapiens
ttcctcccaccctaa

SEQ ID NO: 367765 - DNA, 15 bp, Homo sapiens
cttcctcccacccta

SEQ ID NO: 367766 - DNA, 15 bp, Homo sapiens
ccttcctcccaccct

SEQ ID NO: 367767 - DNA, 15 bp, Homo sapiens
accttcctcccaccc

SEQ ID NO: 367768 - DNA, 15 bp, Homo sapiens
gaccttcctcccacc

SEQ ID NO: 367769 - DNA, 15 bp, Homo sapiens
cgaccttcctcccac

SEQ ID NO: 367770 - DNA, 15 bp, Homo sapiens
ccgaccttcctccca

SEQ ID NO: 367771 - DNA, 15 bp, Homo sapiens
gccgaccttcctccc

SEQ ID NO: 367772 - DNA, 15 bp, Homo sapiens
tgccgaccttcctcc

SEQ ID NO: 367773 - DNA, 15 bp, Homo sapiens
ctgccgaccttcctc

SEQ ID NO: 367774 - DNA, 15 bp, Homo sapiens
gctgccgaccttcct

SEQ ID NO: 367775 - DNA, 15 bp, Homo sapiens
tgctgccgaccttcc

SEQ ID NO: 367776 - DNA, 15 bp, Homo sapiens
ctgctgccgaccttc

SEQ ID NO: 367777 - DNA, 15 bp, Homo sapiens
cctgctgccgacctt

SEQ ID NO: 367778 - DNA, 15 bp, Homo sapiens
tcctgctgccgacct

SEQ ID NO: 367779 - DNA, 15 bp, Homo sapiens
ctcctgctgccgacc

SEQ ID NO: 367780 - DNA, 15 bp, Homo sapiens
gctcctgctgccgac

SEQ ID NO: 367781 - DNA, 15 bp, Homo sapiens
ggctcctgctgccga

SEQ ID NO: 367782 - DNA, 15 bp, Homo sapiens
tggctcctgctgccg

SEQ ID NO: 367783 - DNA, 15 bp, Homo sapiens
ctggctcctgctgcc

SEQ ID NO: 367784 - DNA, 15 bp, Homo sapiens
cctggctcctgctgc

SEQ ID NO: 367785 - DNA, 15 bp, Homo sapiens
ccctggctcctgctg

SEQ ID NO: 367786 - DNA, 15 bp, Homo sapiens
gccctggctcctgct

SEQ ID NO: 367787 - DNA, 15 bp, Homo sapiens
agccctggctcctgc

SEQ ID NO: 367788 - DNA, 15 bp, Homo sapiens
aagccctggctcctg

SEQ ID NO: 367789 - DNA, 15 bp, Homo sapiens
caagccctggctcct

SEQ ID NO: 367790 - DNA, 15 bp, Homo sapiens
tcaagccctggctcc

SEQ ID NO: 367791 - DNA, 15 bp, Homo sapiens
atcaagccctggctc

SEQ ID NO: 367792 - DNA, 15 bp, Homo sapiens
aatcaagccctggct

SEQ ID NO: 367793 - DNA, 15 bp, Homo sapiens
gaatcaagccctggc

SEQ ID NO: 367794 - DNA, 15 bp, Homo sapiens
agaatcaagccctgg

SEQ ID NO: 367795 - DNA, 15 bp, Homo sapiens
gagaatcaagccctg

SEQ ID NO: 367796 - DNA, 15 bp, Homo sapiens
agagaatcaagccct

SEQ ID NO: 367797 - DNA, 15 bp, Homo sapiens
aagagaatcaagccc

SEQ ID NO: 367798 - DNA, 15 bp, Homo sapiens
caagagaatcaagcc

SEQ ID NO: 367799 - DNA, 15 bp, Homo sapiens
ccaagagaatcaagc

SEQ ID NO: 367800 - DNA, 15 bp, Homo sapiens
gccaagagaatcaag

SEQ ID NO: 367801 - DNA, 15 bp, Homo sapiens
tgccaagagaatcaa

SEQ ID NO: 367802 - DNA, 15 bp, Homo sapiens
ttgccaagagaatca

SEQ ID NO: 367803 - DNA, 15 bp, Homo sapiens
cttgccaagagaatc

SEQ ID NO: 367804 - DNA, 15 bp, Homo sapiens
ccttgccaagagaat

SEQ ID NO: 367805 - DNA, 15 bp, Homo sapiens
cccttgccaagagaa

SEQ ID NO: 367806 - DNA, 15 bp, Homo sapiens
tcccttgccaagaga

SEQ ID NO: 367807 - DNA, 15 bp, Homo sapiens
ttcccttgccaagag

SEQ ID NO: 367808 - DNA, 15 bp, Homo sapiens
cttcccttgccaaga

SEQ ID NO: 367809 - DNA, 15 bp, Homo sapiens
tcttcccttgccaag

SEQ ID NO: 367810 - DNA, 15 bp, Homo sapiens
ttcttcccttgccaa

SEQ ID NO: 367811 - DNA, 15 bp, Homo sapiens
cttcttcccttgcca

SEQ ID NO: 367812 - DNA, 15 bp, Homo sapiens
ccttcttcccttgcc

SEQ ID NO: 367813 - DNA, 15 bp, Homo sapiens
cccttcttcccttgc

SEQ ID NO: 367814 - DNA, 15 bp, Homo sapiens
tcccttcttcccttg

SEQ ID NO: 367815 - DNA, 15 bp, Homo sapiens
ttcccttcttccctt

SEQ ID NO: 367816 - DNA, 15 bp, Homo sapiens
tttcccttcttccct

SEQ ID NO: 367817 - DNA, 15 bp, Homo sapiens
ctttcccttcttccc

SEQ ID NO: 367818 - DNA, 15 bp, Homo sapiens
tctttcccttcttcc

SEQ ID NO: 367819 - DNA, 15 bp, Homo sapiens
ttctttcccttcttc

SEQ ID NO: 367820 - DNA, 15 bp, Homo sapiens
tttctttcccttctt

SEQ ID NO: 367821 - DNA, 15 bp, Homo sapiens
ttttctttcccttct

SEQ ID NO: 367822 - DNA, 15 bp, Homo sapiens
tttttctttcccttc

SEQ ID NO: 367823 - DNA, 15 bp, Homo sapiens
ttttttctttccctt

SEQ ID NO: 367824 - DNA, 15 bp, Homo sapiens
gttttttctttccct

SEQ ID NO: 367825 - DNA, 15 bp, Homo sapiens
tgttttttctttccc

SEQ ID NO: 367826 - DNA, 15 bp, Homo sapiens
ctgttttttctttcc

SEQ ID NO: 367827 - DNA, 15 bp, Homo sapiens
gctgttttttctttc

SEQ ID NO: 367828 - DNA, 15 bp, Homo sapiens
ggctgttttttcttt

SEQ ID NO: 367829 - DNA, 15 bp, Homo sapiens
cggctgttttttctt

SEQ ID NO: 367830 - DNA, 15 bp, Homo sapiens
tcggctgttttttct

SEQ ID NO: 367831 - DNA, 15 bp, Homo sapiens
ttcggctgttttttc

SEQ ID NO: 367832 - DNA, 15 bp, Homo sapiens
attcggctgtttttt

SEQ ID NO: 367833 - DNA, 15 bp, Homo sapiens
cattcggctgttttt

SEQ ID NO: 367834 - DNA, 15 bp, Homo sapiens
acattcggctgtttt

SEQ ID NO: 367835 - DNA, 15 bp, Homo sapiens
cacattcggctgttt

SEQ ID NO: 367836 - DNA, 15 bp, Homo sapiens
tcacattcggctgtt

SEQ ID NO: 367837 - DNA, 15 bp, Homo sapiens
ttcacattcggctgt

SEQ ID NO: 367838 - DNA, 15 bp, Homo sapiens
tttcacattcggctg

SEQ ID NO: 367839 - DNA, 15 bp, Homo sapiens
ttttcacattcggct

SEQ ID NO: 367840 - DNA, 15 bp, Homo sapiens
attttcacattcggc

SEQ ID NO: 367841 - DNA, 15 bp, Homo sapiens
cattttcacattcgg

SEQ ID NO: 367842 - DNA, 15 bp, Homo sapiens
acattttcacattcg

SEQ ID NO: 367843 - DNA, 15 bp, Homo sapiens
cacattttcacattc

SEQ ID NO: 367844 - DNA, 15 bp, Homo sapiens
ccacattttcacatt

SEQ ID NO: 367845 - DNA, 15 bp, Homo sapiens
accacattttcacat

SEQ ID NO: 367846 - DNA, 15 bp, Homo sapiens
caccacattttcaca

SEQ ID NO: 367847 - DNA, 15 bp, Homo sapiens
gcaccacattttcac

SEQ ID NO: 367848 - DNA, 15 bp, Homo sapiens
ggcaccacattttca

SEQ ID NO: 367849 - DNA, 15 bp, Homo sapiens
aggcaccacattttc

SEQ ID NO: 367850 - DNA, 15 bp, Homo sapiens
gaggcaccacatttt

SEQ ID NO: 367851 - DNA, 15 bp, Homo sapiens
cgaggcaccacattt

SEQ ID NO: 367852 - DNA, 15 bp, Homo sapiens
ccgaggcaccacatt

SEQ ID NO: 367853 - DNA, 15 bp, Homo sapiens
tccgaggcaccacat

SEQ ID NO: 367854 - DNA, 15 bp, Homo sapiens
ctccgaggcaccaca

SEQ ID NO: 367855 - DNA, 15 bp, Homo sapiens
cctccgaggcaccac

SEQ ID NO: 367856 - DNA, 15 bp, Homo sapiens
acctccgaggcacca

SEQ ID NO: 367857 - DNA, 15 bp, Homo sapiens
cacctccgaggcacc

SEQ ID NO: 367858 - DNA, 15 bp, Homo sapiens
ccacctccgaggcac

SEQ ID NO: 367859 - DNA, 15 bp, Homo sapiens
cccacctccgaggca

SEQ ID NO: 367860 - DNA, 15 bp, Homo sapiens
ccccacctccgaggc

SEQ ID NO: 367861 - DNA, 15 bp, Homo sapiens
cccccacctccgagg

SEQ ID NO: 367862 - DNA, 15 bp, Homo sapiens
acccccacctccgag

SEQ ID NO: 367863 - DNA, 15 bp, Homo sapiens
cacccccacctccga

SEQ ID NO: 367864 - DNA, 15 bp, Homo sapiens
ccacccccacctccg

SEQ ID NO: 367865 - DNA, 15 bp, Homo sapiens
cccacccccacctcc

SEQ ID NO: 367866 - DNA, 15 bp, Homo sapiens
ccccacccccacctc

SEQ ID NO: 367867 - DNA, 15 bp, Homo sapiens
accccacccccacct

SEQ ID NO: 367868 - DNA, 15 bp, Homo sapiens
caccccacccccacc

SEQ ID NO: 367869 - DNA, 15 bp, Homo sapiens
acaccccacccccac

SEQ ID NO: 367870 - DNA, 15 bp, Homo sapiens
cacaccccaccccca

SEQ ID NO: 367871 - DNA, 15 bp, Homo sapiens
gcacaccccaccccc

SEQ ID NO: 367872 - DNA, 15 bp, Homo sapiens
agcacaccccacccc

SEQ ID NO: 367873 - DNA, 15 bp, Homo sapiens
gagcacaccccaccc

SEQ ID NO: 367874 - DNA, 15 bp, Homo sapiens
tgagcacaccccacc

SEQ ID NO: 367875 - DNA, 15 bp, Homo sapiens
ttgagcacaccccac

SEQ ID NO: 367876 - DNA, 15 bp, Homo sapiens
tttgagcacacccca

SEQ ID NO: 367877 - DNA, 15 bp, Homo sapiens
ctttgagcacacccc

SEQ ID NO: 367878 - DNA, 15 bp, Homo sapiens
cctttgagcacaccc

SEQ ID NO: 367879 - DNA, 15 bp, Homo sapiens
gcctttgagcacacc

SEQ ID NO: 367880 - DNA, 15 bp, Homo sapiens
ggcctttgagcacac

SEQ ID NO: 367881 - DNA, 15 bp, Homo sapiens
cggcctttgagcaca

SEQ ID NO: 367882 - DNA, 15 bp, Homo sapiens
ccggcctttgagcac

SEQ ID NO: 367883 - DNA, 15 bp, Homo sapiens
accggcctttgagca

SEQ ID NO: 367884 - DNA, 15 bp, Homo sapiens
gaccggcctttgagc

SEQ ID NO: 367885 - DNA, 15 bp, Homo sapiens
ggaccggcctttgag

SEQ ID NO: 367886 - DNA, 15 bp, Homo sapiens
aggaccggcctttga

SEQ ID NO: 367887 - DNA, 15 bp, Homo sapiens
gaggaccggcctttg

SEQ ID NO: 367888 - DNA, 15 bp, Homo sapiens
agaggaccggccttt

SEQ ID NO: 367889 - DNA, 15 bp, Homo sapiens
gagaggaccggcctt

SEQ ID NO: 367890 - DNA, 15 bp, Homo sapiens
ggagaggaccggcct

SEQ ID NO: 367891 - DNA, 15 bp, Homo sapiens
aggagaggaccggcc

SEQ ID NO: 367892 - DNA, 15 bp, Homo sapiens
caggagaggaccggc

SEQ ID NO: 367893 - DNA, 15 bp, Homo sapiens
tcaggagaggaccgg

SEQ ID NO: 367894 - DNA, 15 bp, Homo sapiens
ttcaggagaggaccg

SEQ ID NO: 367895 - DNA, 15 bp, Homo sapiens
tttcaggagaggacc

SEQ ID NO: 367896 - DNA, 15 bp, Homo sapiens
atttcaggagaggac

SEQ ID NO: 367897 - DNA, 15 bp, Homo sapiens
catttcaggagagga

SEQ ID NO: 367898 - DNA, 15 bp, Homo sapiens
gcatttcaggagagg

SEQ ID NO: 367899 - DNA, 15 bp, Homo sapiens
tgcatttcaggagag

SEQ ID NO: 367900 - DNA, 15 bp, Homo sapiens
ctgcatttcaggaga

SEQ ID NO: 367901 - DNA, 15 bp, Homo sapiens
cctgcatttcaggag

SEQ ID NO: 367902 - DNA, 15 bp, Homo sapiens
ccctgcatttcagga

SEQ ID NO: 367903 - DNA, 15 bp, Homo sapiens
cccctgcatttcagg

SEQ ID NO: 367904 - DNA, 15 bp, Homo sapiens
acccctgcatttcag

SEQ ID NO: 367905 - DNA, 15 bp, Homo sapiens
cacccctgcatttca

SEQ ID NO: 367906 - DNA, 15 bp, Homo sapiens
tcacccctgcatttc

SEQ ID NO: 367907 - DNA, 15 bp, Homo sapiens
gtcacccctgcattt

SEQ ID NO: 367908 - DNA, 15 bp, Homo sapiens
agtcacccctgcatt

SEQ ID NO: 367909 - DNA, 15 bp, Homo sapiens
gagtcacccctgcat

SEQ ID NO: 367910 - DNA, 15 bp, Homo sapiens
ggagtcacccctgca

SEQ ID NO: 367911 - DNA, 15 bp, Homo sapiens
tggagtcacccctgc

SEQ ID NO: 367912 - DNA, 15 bp, Homo sapiens
ttggagtcacccctg

SEQ ID NO: 367913 - DNA, 15 bp, Homo sapiens
cttggagtcacccct

SEQ ID NO: 367914 - DNA, 15 bp, Homo sapiens
ccttggagtcacccc

SEQ ID NO: 367915 - DNA, 15 bp, Homo sapiens
gccttggagtcaccc

SEQ ID NO: 367916 - DNA, 15 bp, Homo sapiens
agccttggagtcacc

SEQ ID NO: 367917 - DNA, 15 bp, Homo sapiens
cagccttggagtcac

SEQ ID NO: 367918 - DNA, 15 bp, Homo sapiens
ccagccttggagtca

SEQ ID NO: 367919 - DNA, 15 bp, Homo sapiens
gccagccttggagtc

SEQ ID NO: 367920 - DNA, 15 bp, Homo sapiens
ggccagccttggagt

SEQ ID NO: 367921 - DNA, 15 bp, Homo sapiens
gggccagccttggag

SEQ ID NO: 367922 - DNA, 15 bp, Homo sapiens
agggccagccttgga

SEQ ID NO: 367923 - DNA, 15 bp, Homo sapiens
aagggccagccttgg

SEQ ID NO: 367924 - DNA, 15 bp, Homo sapiens
gaagggccagccttg

SEQ ID NO: 367925 - DNA, 15 bp, Homo sapiens
ggaagggccagcctt

SEQ ID NO: 367926 - DNA, 15 bp, Homo sapiens
gggaagggccagcct

SEQ ID NO: 367927 - DNA, 15 bp, Homo sapiens
agggaagggccagcc

SEQ ID NO: 367928 - DNA, 15 bp, Homo sapiens
aagggaagggccagc

SEQ ID NO: 367929 - DNA, 15 bp, Homo sapiens
aaagggaagggccag

SEQ ID NO: 367930 - DNA, 15 bp, Homo sapiens
gaaagggaagggcca

SEQ ID NO: 367931 - DNA, 15 bp, Homo sapiens
ggaaagggaagggcc

SEQ ID NO: 367932 - DNA, 15 bp, Homo sapiens
aggaaagggaagggc

SEQ ID NO: 367933 - DNA, 15 bp, Homo sapiens
caggaaagggaaggg

SEQ ID NO: 367934 - DNA, 15 bp, Homo sapiens
gcaggaaagggaagg

SEQ ID NO: 367935 - DNA, 15 bp, Homo sapiens
cgcaggaaagggaag

SEQ ID NO: 367936 - DNA, 15 bp, Homo sapiens
gcgcaggaaagggaa

SEQ ID NO: 367937 - DNA, 15 bp, Homo sapiens
ggcgcaggaaaggga

SEQ ID NO: 367938 - DNA, 15 bp, Homo sapiens
gggcgcaggaaaggg

SEQ ID NO: 367939 - DNA, 15 bp, Homo sapiens
agggcgcaggaaagg

SEQ ID NO: 367940 - DNA, 15 bp, Homo sapiens
aagggcgcaggaaag

SEQ ID NO: 367941 - DNA, 15 bp, Homo sapiens
caagggcgcaggaaa

SEQ ID NO: 367942 - DNA, 15 bp, Homo sapiens
gcaagggcgcaggaa

SEQ ID NO: 367943 - DNA, 15 bp, Homo sapiens
tgcaagggcgcagga

SEQ ID NO: 367944 - DNA, 15 bp, Homo sapiens
ttgcaagggcgcagg

SEQ ID NO: 367945 - DNA, 15 bp, Homo sapiens
tttgcaagggcgcag

SEQ ID NO: 367946 - DNA, 15 bp, Homo sapiens
gtttgcaagggcgca

SEQ ID NO: 367947 - DNA, 15 bp, Homo sapiens
agtttgcaagggcgc

SEQ ID NO: 367948 - DNA, 15 bp, Homo sapiens
cagtttgcaagggcg

SEQ ID NO: 367949 - DNA, 15 bp, Homo sapiens
gcagtttgcaagggc

SEQ ID NO: 367950 - DNA, 15 bp, Homo sapiens
ggcagtttgcaaggg

SEQ ID NO: 367951 - DNA, 15 bp, Homo sapiens
gggcagtttgcaagg

SEQ ID NO: 367952 - DNA, 15 bp, Homo sapiens
cgggcagtttgcaag

SEQ ID NO: 367953 - DNA, 15 bp, Homo sapiens
ccgggcagtttgcaa

SEQ ID NO: 367954 - DNA, 15 bp, Homo sapiens
cccgggcagtttgca

SEQ ID NO: 367955 - DNA, 15 bp, Homo sapiens
tcccgggcagtttgc

SEQ ID NO: 367956 - DNA, 15 bp, Homo sapiens
ctcccgggcagtttg

SEQ ID NO: 367957 - DNA, 15 bp, Homo sapiens
cctcccgggcagttt

SEQ ID NO: 367958 - DNA, 15 bp, Homo sapiens
tcctcccgggcagtt

SEQ ID NO: 367959 - DNA, 15 bp, Homo sapiens
ttcctcccgggcagt

SEQ ID NO: 367960 - DNA, 15 bp, Homo sapiens
cttcctcccgggcag

SEQ ID NO: 367961 - DNA, 15 bp, Homo sapiens
ccttcctcccgggca

SEQ ID NO: 367962 - DNA, 15 bp, Homo sapiens
cccttcctcccgggc

SEQ ID NO: 367963 - DNA, 15 bp, Homo sapiens
ccccttcctcccggg

SEQ ID NO: 367964 - DNA, 15 bp, Homo sapiens
tccccttcctcccgg

SEQ ID NO: 367965 - DNA, 15 bp, Homo sapiens
ctccccttcctcccg

SEQ ID NO: 367966 - DNA, 15 bp, Homo sapiens
actccccttcctccc

SEQ ID NO: 367967 - DNA, 15 bp, Homo sapiens
cactccccttcctcc

SEQ ID NO: 367968 - DNA, 15 bp, Homo sapiens
ccactccccttcctc

SEQ ID NO: 367969 - DNA, 15 bp, Homo sapiens
cccactccccttcct

SEQ ID NO: 367970 - DNA, 15 bp, Homo sapiens
gcccactccccttcc

SEQ ID NO: 367971 - DNA, 15 bp, Homo sapiens
cgcccactccccttc

SEQ ID NO: 367972 - DNA, 15 bp, Homo sapiens
ccgcccactcccctt

SEQ ID NO: 367973 - DNA, 15 bp, Homo sapiens
cccgcccactcccct

SEQ ID NO: 367974 - DNA, 15 bp, Homo sapiens
acccgcccactcccc

SEQ ID NO: 367975 - DNA, 15 bp, Homo sapiens
tacccgcccactccc

SEQ ID NO: 367976 - DNA, 15 bp, Homo sapiens
ctacccgcccactcc

SEQ ID NO: 367977 - DNA, 15 bp, Homo sapiens
cctacccgcccactc

SEQ ID NO: 367978 - DNA, 15 bp, Homo sapiens
tcctacccgcccact

SEQ ID NO: 367979 - DNA, 15 bp, Homo sapiens
ctcctacccgcccac

SEQ ID NO: 367980 - DNA, 15 bp, Homo sapiens
gctcctacccgccca

SEQ ID NO: 367981 - DNA, 15 bp, Homo sapiens
ggctcctacccgccc

SEQ ID NO: 367982 - DNA, 15 bp, Homo sapiens
gggctcctacccgcc

SEQ ID NO: 367983 - DNA, 15 bp, Homo sapiens
cgggctcctacccgc

SEQ ID NO: 367984 - DNA, 15 bp, Homo sapiens
ccgggctcctacccg

SEQ ID NO: 367985 - DNA, 15 bp, Homo sapiens
cccgggctcctaccc

SEQ ID NO: 367986 - DNA, 15 bp, Homo sapiens
ccccgggctcctacc

SEQ ID NO: 367987 - DNA, 15 bp, Homo sapiens
cccccgggctcctac

SEQ ID NO: 367988 - DNA, 15 bp, Homo sapiens
gcccccgggctccta

SEQ ID NO: 367989 - DNA, 15 bp, Homo sapiens
cgcccccgggctcct

SEQ ID NO: 367990 - DNA, 15 bp, Homo sapiens
ccgcccccgggctcc

SEQ ID NO: 367991 - DNA, 15 bp, Homo sapiens
cccgcccccgggctc

SEQ ID NO: 367992 - DNA, 15 bp, Homo sapiens
ccccgcccccgggct

SEQ ID NO: 367993 - DNA, 15 bp, Homo sapiens
gccccgcccccgggc

SEQ ID NO: 367994 - DNA, 15 bp, Homo sapiens
agccccgcccccggg

SEQ ID NO: 367995 - DNA, 15 bp, Homo sapiens
cagccccgcccccgg

SEQ ID NO: 367996 - DNA, 15 bp, Homo sapiens
gcagccccgcccccg

SEQ ID NO: 367997 - DNA, 15 bp, Homo sapiens
agcagccccgccccc

SEQ ID NO: 367998 - DNA, 15 bp, Homo sapiens
cagcagccccgcccc

SEQ ID NO: 367999 - DNA, 15 bp, Homo sapiens
ccagcagccccgccc

SEQ ID NO: 368000 - DNA, 15 bp, Homo sapiens
gccagcagccccgcc

SEQ ID NO: 368001 - DNA, 15 bp, Homo sapiens
agccagcagccccgc

SEQ ID NO: 368002 - DNA, 15 bp, Homo sapiens
cagccagcagccccg

SEQ ID NO: 368003 - DNA, 15 bp, Homo sapiens
gcagccagcagcccc

SEQ ID NO: 368004 - DNA, 15 bp, Homo sapiens
tgcagccagcagccc

SEQ ID NO: 368005 - DNA, 15 bp, Homo sapiens
ctgcagccagcagcc

SEQ ID NO: 368006 - DNA, 15 bp, Homo sapiens
cctgcagccagcagc

SEQ ID NO: 368007 - DNA, 15 bp, Homo sapiens
acctgcagccagcag

SEQ ID NO: 368008 - DNA, 15 bp, Homo sapiens
aacctgcagccagca

SEQ ID NO: 368009 - DNA, 15 bp, Homo sapiens
caacctgcagccagc

SEQ ID NO: 368010 - DNA, 15 bp, Homo sapiens
ccaacctgcagccag

SEQ ID NO: 368011 - DNA, 15 bp, Homo sapiens
tccaacctgcagcca

SEQ ID NO: 368012 - DNA, 15 bp, Homo sapiens
ttccaacctgcagcc

SEQ ID NO: 368013 - DNA, 15 bp, Homo sapiens
attccaacctgcagc

SEQ ID NO: 368014 - DNA, 15 bp, Homo sapiens
aattccaacctgcag

SEQ ID NO: 368015 - DNA, 15 bp, Homo sapiens
gaattccaacctgca

SEQ ID NO: 368016 - DNA, 15 bp, Homo sapiens
ggaattccaacctgc

SEQ ID NO: 368017 - DNA, 15 bp, Homo sapiens
tggaattccaacctg

SEQ ID NO: 368018 - DNA, 15 bp, Homo sapiens
ctggaattccaacct

SEQ ID NO: 368019 - DNA, 15 bp, Homo sapiens
gctggaattccaacc

SEQ ID NO: 368020 - DNA, 15 bp, Homo sapiens
tgctggaattccaac

SEQ ID NO: 368021 - DNA, 15 bp, Homo sapiens
atgctggaattccaa

SEQ ID NO: 368022 - DNA, 15 bp, Homo sapiens
aatgctggaattcca

SEQ ID NO: 368023 - DNA, 15 bp, Homo sapiens
caatgctggaattcc

SEQ ID NO: 368024 - DNA, 15 bp, Homo sapiens
gcaatgctggaattc

SEQ ID NO: 368025 - DNA, 15 bp, Homo sapiens
tgcaatgctggaatt

SEQ ID NO: 368026 - DNA, 15 bp, Homo sapiens
ctgcaatgctggaat

SEQ ID NO: 368027 - DNA, 15 bp, Homo sapiens
gctgcaatgctggaa

SEQ ID NO: 368028 - DNA, 15 bp, Homo sapiens
agctgcaatgctgga

SEQ ID NO: 368029 - DNA, 15 bp, Homo sapiens
aagctgcaatgctgg

SEQ ID NO: 368030 - DNA, 15 bp, Homo sapiens
aaagctgcaatgctg

SEQ ID NO: 368031 - DNA, 15 bp, Homo sapiens
caaagctgcaatgct

SEQ ID NO: 368032 - DNA, 15 bp, Homo sapiens
acaaagctgcaatgc

SEQ ID NO: 368033 - DNA, 15 bp, Homo sapiens
aacaaagctgcaatg

SEQ ID NO: 368034 - DNA, 15 bp, Homo sapiens
aaacaaagctgcaat

SEQ ID NO: 368035 - DNA, 15 bp, Homo sapiens
aaaacaaagctgcaa

SEQ ID NO: 368036 - DNA, 15 bp, Homo sapiens
caaaacaaagctgca

SEQ ID NO: 368037 - DNA, 15 bp, Homo sapiens
ccaaaacaaagctgc

SEQ ID NO: 368038 - DNA, 15 bp, Homo sapiens
cccaaaacaaagctg

SEQ ID NO: 368039 - DNA, 15 bp, Homo sapiens
ccccaaaacaaagct

SEQ ID NO: 368040 - DNA, 15 bp, Homo sapiens
cccccaaaacaaagc

SEQ ID NO: 368041 - DNA, 15 bp, Homo sapiens
ccccccaaaacaaag

SEQ ID NO: 368042 - DNA, 15 bp, Homo sapiens
cccccccaaaacaaa

SEQ ID NO: 368043 - DNA, 15 bp, Homo sapiens
acccccccaaaacaa

SEQ ID NO: 368044 - DNA, 15 bp, Homo sapiens
cacccccccaaaaca

SEQ ID NO: 368045 - DNA, 15 bp, Homo sapiens
acacccccccaaaac

SEQ ID NO: 368046 - DNA, 15 bp, Homo sapiens
cacacccccccaaaa

SEQ ID NO: 368047 - DNA, 15 bp, Homo sapiens
ccacacccccccaaa

SEQ ID NO: 368048 - DNA, 15 bp, Homo sapiens
cccacacccccccaa

SEQ ID NO: 368049 - DNA, 15 bp, Homo sapiens
ccccacaccccccca

SEQ ID NO: 368050 - DNA, 15 bp, Homo sapiens
cccccacaccccccc

SEQ ID NO: 368051 - DNA, 15 bp, Homo sapiens
ccccccacacccccc

SEQ ID NO: 368052 - DNA, 15 bp, Homo sapiens
cccccccacaccccc

SEQ ID NO: 368053 - DNA, 15 bp, Homo sapiens
acccccccacacccc

SEQ ID NO: 368054 - DNA, 15 bp, Homo sapiens
cacccccccacaccc

SEQ ID NO: 368055 - DNA, 15 bp, Homo sapiens
ccacccccccacacc

SEQ ID NO: 368056 - DNA, 15 bp, Homo sapiens
cccacccccccacac

SEQ ID NO: 368057 - DNA, 15 bp, Homo sapiens
acccacccccccaca

SEQ ID NO: 368058 - DNA, 15 bp, Homo sapiens
tacccacccccccac

SEQ ID NO: 368059 - DNA, 15 bp, Homo sapiens
ctacccaccccccca

SEQ ID NO: 368060 - DNA, 15 bp, Homo sapiens
tctacccaccccccc

SEQ ID NO: 368061 - DNA, 15 bp, Homo sapiens
gtctacccacccccc

SEQ ID NO: 368062 - DNA, 15 bp, Homo sapiens
cgtctacccaccccc

SEQ ID NO: 368063 - DNA, 15 bp, Homo sapiens
tcgtctacccacccc

SEQ ID NO: 368064 - DNA, 15 bp, Homo sapiens
gtcgtctacccaccc

SEQ ID NO: 368065 - DNA, 15 bp, Homo sapiens
tgtcgtctacccacc

SEQ ID NO: 368066 - DNA, 15 bp, Homo sapiens
ctgtcgtctacccac

SEQ ID NO: 368067 - DNA, 15 bp, Homo sapiens
cctgtcgtctaccca

SEQ ID NO: 368068 - DNA, 15 bp, Homo sapiens
gcctgtcgtctaccc

SEQ ID NO: 368069 - DNA, 15 bp, Homo sapiens
ggcctgtcgtctacc

SEQ ID NO: 368070 - DNA, 15 bp, Homo sapiens
aggcctgtcgtctac

SEQ ID NO: 368071 - DNA, 15 bp, Homo sapiens
caggcctgtcgtcta

SEQ ID NO: 368072 - DNA, 15 bp, Homo sapiens
ccaggcctgtcgtct

SEQ ID NO: 368073 - DNA, 15 bp, Homo sapiens
accaggcctgtcgtc

SEQ ID NO: 368074 - DNA, 15 bp, Homo sapiens
gaccaggcctgtcgt

SEQ ID NO: 368075 - DNA, 15 bp, Homo sapiens
cgaccaggcctgtcg

SEQ ID NO: 368076 - DNA, 15 bp, Homo sapiens
acgaccaggcctgtc

SEQ ID NO: 368077 - DNA, 15 bp, Homo sapiens
aacgaccaggcctgt

SEQ ID NO: 368078 - DNA, 15 bp, Homo sapiens
taacgaccaggcctg

SEQ ID NO: 368079 - DNA, 15 bp, Homo sapiens
ctaacgaccaggcct

SEQ ID NO: 368080 - DNA, 15 bp, Homo sapiens
cctaacgaccaggcc

SEQ ID NO: 368081 - DNA, 15 bp, Homo sapiens
ccctaacgaccaggc

SEQ ID NO: 368082 - DNA, 15 bp, Homo sapiens
tccctaacgaccagg

SEQ ID NO: 368083 - DNA, 15 bp, Homo sapiens
gtccctaacgaccag

SEQ ID NO: 368084 - DNA, 15 bp, Homo sapiens
agtccctaacgacca

SEQ ID NO: 368085 - DNA, 15 bp, Homo sapiens
aagtccctaacgacc

SEQ ID NO: 368086 - DNA, 15 bp, Homo sapiens
caagtccctaacgac

SEQ ID NO: 368087 - DNA, 15 bp, Homo sapiens
gcaagtccctaacga

SEQ ID NO: 368088 - DNA, 15 bp, Homo sapiens
tgcaagtccctaacg

SEQ ID NO: 368089 - DNA, 15 bp, Homo sapiens
ctgcaagtccctaac

SEQ ID NO: 368090 - DNA, 15 bp, Homo sapiens
actgcaagtccctaa

SEQ ID NO: 368091 - DNA, 15 bp, Homo sapiens
cactgcaagtcccta

SEQ ID NO: 368092 - DNA, 15 bp, Homo sapiens
tcactgcaagtccct

SEQ ID NO: 368093 - DNA, 15 bp, Homo sapiens
ttcactgcaagtccc

SEQ ID NO: 368094 - DNA, 15 bp, Homo sapiens
tttcactgcaagtcc

SEQ ID NO: 368095 - DNA, 15 bp, Homo sapiens
gtttcactgcaagtc

SEQ ID NO: 368096 - DNA, 15 bp, Homo sapiens
tgtttcactgcaagt

SEQ ID NO: 368097 - DNA, 15 bp, Homo sapiens
gtgtttcactgcaag

SEQ ID NO: 368098 - DNA, 15 bp, Homo sapiens
tgtgtttcactgcaa

SEQ ID NO: 368099 - DNA, 15 bp, Homo sapiens
gtgtgtttcactgca

SEQ ID NO: 368100 - DNA, 15 bp, Homo sapiens
ggtgtgtttcactgc

SEQ ID NO: 368101 - DNA, 15 bp, Homo sapiens
gggtgtgtttcactg

SEQ ID NO: 368102 - DNA, 15 bp, Homo sapiens
ggggtgtgtttcact

SEQ ID NO: 368103 - DNA, 15 bp, Homo sapiens
tggggtgtgtttcac

SEQ ID NO: 368104 - DNA, 15 bp, Homo sapiens
gtggggtgtgtttca

SEQ ID NO: 368105 - DNA, 15 bp, Homo sapiens
ggtggggtgtgtttc

SEQ ID NO: 368106 - DNA, 15 bp, Homo sapiens
gggtggggtgtgttt

SEQ ID NO: 368107 - DNA, 15 bp, Homo sapiens
agggtggggtgtgtt

SEQ ID NO: 368108 - DNA, 15 bp, Homo sapiens
aagggtggggtgtgt

SEQ ID NO: 368109 - DNA, 15 bp, Homo sapiens
caagggtggggtgtg

SEQ ID NO: 368110 - DNA, 15 bp, Homo sapiens
gcaagggtggggtgt

SEQ ID NO: 368111 - DNA, 15 bp, Homo sapiens
tgcaagggtggggtg

SEQ ID NO: 368112 - DNA, 15 bp, Homo sapiens
ttgcaagggtggggt

SEQ ID NO: 368113 - DNA, 15 bp, Homo sapiens
cttgcaagggtgggg

SEQ ID NO: 368114 - DNA, 15 bp, Homo sapiens
acttgcaagggtggg

SEQ ID NO: 368115 - DNA, 15 bp, Homo sapiens
aacttgcaagggtgg

SEQ ID NO: 368116 - DNA, 15 bp, Homo sapiens
aaacttgcaagggtg

SEQ ID NO: 368117 - DNA, 15 bp, Homo sapiens
gaaacttgcaagggt

SEQ ID NO: 368118 - DNA, 15 bp, Homo sapiens
ggaaacttgcaaggg

SEQ ID NO: 368119 - DNA, 15 bp, Homo sapiens
aggaaacttgcaagg

SEQ ID NO: 368120 - DNA, 15 bp, Homo sapiens
gaggaaacttgcaag

SEQ ID NO: 368121 - DNA, 15 bp, Homo sapiens
cgaggaaacttgcaa

SEQ ID NO: 368122 - DNA, 15 bp, Homo sapiens
ccgaggaaacttgca

SEQ ID NO: 368123 - DNA, 15 bp, Homo sapiens
accgaggaaacttgc

SEQ ID NO: 368124 - DNA, 15 bp, Homo sapiens
gaccgaggaaacttg

SEQ ID NO: 368125 - DNA, 15 bp, Homo sapiens
agaccgaggaaactt

SEQ ID NO: 368126 - DNA, 15 bp, Homo sapiens
cagaccgaggaaact

SEQ ID NO: 368127 - DNA, 15 bp, Homo sapiens
ccagaccgaggaaac

SEQ ID NO: 368128 - DNA, 15 bp, Homo sapiens
cccagaccgaggaaa

SEQ ID NO: 368129 - DNA, 15 bp, Homo sapiens
tcccagaccgaggaa

SEQ ID NO: 368130 - DNA, 15 bp, Homo sapiens
ttcccagaccgagga

SEQ ID NO: 368131 - DNA, 15 bp, Homo sapiens
tttcccagaccgagg

SEQ ID NO: 368132 - DNA, 15 bp, Homo sapiens
ttttcccagaccgag

SEQ ID NO: 368133 - DNA, 15 bp, Homo sapiens
attttcccagaccga

SEQ ID NO: 368134 - DNA, 15 bp, Homo sapiens
cattttcccagaccg

SEQ ID NO: 368135 - DNA, 15 bp, Homo sapiens
ccattttcccagacc

SEQ ID NO: 368136 - DNA, 15 bp, Homo sapiens
cccattttcccagac

SEQ ID NO: 368137 - DNA, 15 bp, Homo sapiens
tcccattttcccaga

SEQ ID NO: 368138 - DNA, 15 bp, Homo sapiens
gtcccattttcccag

SEQ ID NO: 368139 - DNA, 15 bp, Homo sapiens
tgtcccattttccca

SEQ ID NO: 368140 - DNA, 15 bp, Homo sapiens
atgtcccattttccc

SEQ ID NO: 368141 - DNA, 15 bp, Homo sapiens
aatgtcccattttcc

SEQ ID NO: 368142 - DNA, 15 bp, Homo sapiens
aaatgtcccattttc

SEQ ID NO: 368143 - DNA, 15 bp, Homo sapiens
aaaatgtcccatttt

SEQ ID NO: 368144 - DNA, 15 bp, Homo sapiens
aaaaatgtcccattt

SEQ ID NO: 368145 - DNA, 15 bp, Homo sapiens
taaaaatgtcccatt

SEQ ID NO: 368146 - DNA, 15 bp, Homo sapiens
ctaaaaatgtcccat

SEQ ID NO: 368147 - DNA, 15 bp, Homo sapiens
tctaaaaatgtccca

SEQ ID NO: 368148 - DNA, 15 bp, Homo sapiens
ttctaaaaatgtccc

SEQ ID NO: 368149 - DNA, 15 bp, Homo sapiens
cttctaaaaatgtcc

SEQ ID NO: 368150 - DNA, 15 bp, Homo sapiens
ccttctaaaaatgtc

SEQ ID NO: 368151 - DNA, 15 bp, Homo sapiens
gccttctaaaaatgt

SEQ ID NO: 368152 - DNA, 15 bp, Homo sapiens
tgccttctaaaaatg

SEQ ID NO: 368153 - DNA, 15 bp, Homo sapiens
ctgccttctaaaaat

SEQ ID NO: 368154 - DNA, 15 bp, Homo sapiens
actgccttctaaaaa

SEQ ID NO: 368155 - DNA, 15 bp, Homo sapiens
cactgccttctaaaa

SEQ ID NO: 368156 - DNA, 15 bp, Homo sapiens
tcactgccttctaaa

SEQ ID NO: 368157 - DNA, 15 bp, Homo sapiens
gtcactgccttctaa

SEQ ID NO: 368158 - DNA, 15 bp, Homo sapiens
agtcactgccttcta

SEQ ID NO: 368159 - DNA, 15 bp, Homo sapiens
aagtcactgccttct

SEQ ID NO: 368160 - DNA, 15 bp, Homo sapiens
caagtcactgccttc

SEQ ID NO: 368161 - DNA, 15 bp, Homo sapiens
gcaagtcactgcctt

SEQ ID NO: 368162 - DNA, 15 bp, Homo sapiens
agcaagtcactgcct

SEQ ID NO: 368163 - DNA, 15 bp, Homo sapiens
aagcaagtcactgcc

SEQ ID NO: 368164 - DNA, 15 bp, Homo sapiens
gaagcaagtcactgc

SEQ ID NO: 368165 - DNA, 15 bp, Homo sapiens
ggaagcaagtcactg

SEQ ID NO: 368166 - DNA, 15 bp, Homo sapiens
tggaagcaagtcact

SEQ ID NO: 368167 - DNA, 15 bp, Homo sapiens
ctggaagcaagtcac

SEQ ID NO: 368168 - DNA, 15 bp, Homo sapiens
cctggaagcaagtca

SEQ ID NO: 368169 - DNA, 15 bp, Homo sapiens
tcctggaagcaagtc

SEQ ID NO: 368170 - DNA, 15 bp, Homo sapiens
ctcctggaagcaagt

SEQ ID NO: 368171 - DNA, 15 bp, Homo sapiens
tctcctggaagcaag

SEQ ID NO: 368172 - DNA, 15 bp, Homo sapiens
atctcctggaagcaa

SEQ ID NO: 368173 - DNA, 15 bp, Homo sapiens
aatctcctggaagca

SEQ ID NO: 368174 - DNA, 15 bp, Homo sapiens
caatctcctggaagc

SEQ ID NO: 368175 - DNA, 15 bp, Homo sapiens
acaatctcctggaag

SEQ ID NO: 368176 - DNA, 15 bp, Homo sapiens
tacaatctcctggaa

SEQ ID NO: 368177 - DNA, 15 bp, Homo sapiens
gtacaatctcctgga

SEQ ID NO: 368178 - DNA, 15 bp, Homo sapiens
agtacaatctcctgg

SEQ ID NO: 368179 - DNA, 15 bp, Homo sapiens
aagtacaatctcctg

SEQ ID NO: 368180 - DNA, 15 bp, Homo sapiens
aaagtacaatctcct

SEQ ID NO: 368181 - DNA, 15 bp, Homo sapiens
gaaagtacaatctcc

SEQ ID NO: 368182 - DNA, 15 bp, Homo sapiens
tgaaagtacaatctc

SEQ ID NO: 368183 - DNA, 15 bp, Homo sapiens
atgaaagtacaatct

SEQ ID NO: 368184 - DNA, 15 bp, Homo sapiens
aatgaaagtacaatc

SEQ ID NO: 368185 - DNA, 15 bp, Homo sapiens
aaatgaaagtacaat

SEQ ID NO: 368186 - DNA, 15 bp, Homo sapiens
aaaatgaaagtacaa

SEQ ID NO: 368187 - DNA, 15 bp, Homo sapiens
aaaaatgaaagtaca

SEQ ID NO: 368188 - DNA, 15 bp, Homo sapiens
caaaaatgaaagtac

SEQ ID NO: 368189 - DNA, 15 bp, Homo sapiens
tcaaaaatgaaagta

SEQ ID NO: 368190 - DNA, 15 bp, Homo sapiens
gtcaaaaatgaaagt

SEQ ID NO: 368191 - DNA, 15 bp, Homo sapiens
tgtcaaaaatgaaag

SEQ ID NO: 368192 - DNA, 15 bp, Homo sapiens
ctgtcaaaaatgaaa

SEQ ID NO: 368193 - DNA, 15 bp, Homo sapiens
gctgtcaaaaatgaa

SEQ ID NO: 368194 - DNA, 15 bp, Homo sapiens
agctgtcaaaaatga

SEQ ID NO: 368195 - DNA, 15 bp, Homo sapiens
cagctgtcaaaaatg

SEQ ID NO: 368196 - DNA, 15 bp, Homo sapiens
ccagctgtcaaaaat

SEQ ID NO: 368197 - DNA, 15 bp, Homo sapiens
gccagctgtcaaaaa

SEQ ID NO: 368198 - DNA, 15 bp, Homo sapiens
agccagctgtcaaaa

SEQ ID NO: 368199 - DNA, 15 bp, Homo sapiens
gagccagctgtcaaa

SEQ ID NO: 368200 - DNA, 15 bp, Homo sapiens
agagccagctgtcaa

SEQ ID NO: 368201 - DNA, 15 bp, Homo sapiens
gagagccagctgtca

SEQ ID NO: 368202 - DNA, 15 bp, Homo sapiens
agagagccagctgtc

SEQ ID NO: 368203 - DNA, 15 bp, Homo sapiens
cagagagccagctgt

SEQ ID NO: 368204 - DNA, 15 bp, Homo sapiens
tcagagagccagctg

SEQ ID NO: 368205 - DNA, 15 bp, Homo sapiens
ctcagagagccagct

SEQ ID NO: 368206 - DNA, 15 bp, Homo sapiens
tctcagagagccagc

SEQ ID NO: 368207 - DNA, 15 bp, Homo sapiens
gtctcagagagccag

SEQ ID NO: 368208 - DNA, 15 bp, Homo sapiens
tgtctcagagagcca

SEQ ID NO: 368209 - DNA, 15 bp, Homo sapiens
ctgtctcagagagcc

SEQ ID NO: 368210 - DNA, 15 bp, Homo sapiens
tctgtctcagagagc

SEQ ID NO: 368211 - DNA, 15 bp, Homo sapiens
atctgtctcagagag

SEQ ID NO: 368212 - DNA, 15 bp, Homo sapiens
catctgtctcagaga

SEQ ID NO: 368213 - DNA, 15 bp, Homo sapiens
ccatctgtctcagag

SEQ ID NO: 368214 - DNA, 15 bp, Homo sapiens
tccatctgtctcaga

SEQ ID NO: 368215 - DNA, 15 bp, Homo sapiens
atccatctgtctcag

SEQ ID NO: 368216 - DNA, 15 bp, Homo sapiens
aatccatctgtctca

SEQ ID NO: 368217 - DNA, 15 bp, Homo sapiens
caatccatctgtctc

SEQ ID NO: 368218 - DNA, 15 bp, Homo sapiens
gcaatccatctgtct

SEQ ID NO: 368219 - DNA, 15 bp, Homo sapiens
agcaatccatctgtc

SEQ ID NO: 368220 - DNA, 15 bp, Homo sapiens
cagcaatccatctgt

SEQ ID NO: 368221 - DNA, 15 bp, Homo sapiens
ccagcaatccatctg

SEQ ID NO: 368222 - DNA, 15 bp, Homo sapiens
cccagcaatccatct

SEQ ID NO: 368223 - DNA, 15 bp, Homo sapiens
acccagcaatccatc

SEQ ID NO: 368224 - DNA, 15 bp, Homo sapiens
cacccagcaatccat

SEQ ID NO: 368225 - DNA, 15 bp, Homo sapiens
gcacccagcaatcca

SEQ ID NO: 368226 - DNA, 15 bp, Homo sapiens
tgcacccagcaatcc

SEQ ID NO: 368227 - DNA, 15 bp, Homo sapiens
ttgcacccagcaatc

SEQ ID NO: 368228 - DNA, 15 bp, Homo sapiens
cttgcacccagcaat

SEQ ID NO: 368229 - DNA, 15 bp, Homo sapiens
gcttgcacccagcaa

SEQ ID NO: 368230 - DNA, 15 bp, Homo sapiens
agcttgcacccagca

SEQ ID NO: 368231 - DNA, 15 bp, Homo sapiens
aagcttgcacccagc

SEQ ID NO: 368232 - DNA, 15 bp, Homo sapiens
caagcttgcacccag

SEQ ID NO: 368233 - DNA, 15 bp, Homo sapiens
acaagcttgcaccca

SEQ ID NO: 368234 - DNA, 15 bp, Homo sapiens
cacaagcttgcaccc

SEQ ID NO: 368235 - DNA, 15 bp, Homo sapiens
acacaagcttgcacc

SEQ ID NO: 368236 - DNA, 15 bp, Homo sapiens
cacacaagcttgcac

SEQ ID NO: 368237 - DNA, 15 bp, Homo sapiens
acacacaagcttgca

SEQ ID NO: 368238 - DNA, 15 bp, Homo sapiens
cacacacaagcttgc

SEQ ID NO: 368239 - DNA, 15 bp, Homo sapiens
acacacacaagcttg

SEQ ID NO: 368240 - DNA, 15 bp, Homo sapiens
tacacacacaagctt

SEQ ID NO: 368241 - DNA, 15 bp, Homo sapiens
atacacacacaagct

SEQ ID NO: 368242 - DNA, 15 bp, Homo sapiens
catacacacacaagc

SEQ ID NO: 368243 - DNA, 15 bp, Homo sapiens
gcatacacacacaag

SEQ ID NO: 368244 - DNA, 15 bp, Homo sapiens
cgcatacacacacaa

SEQ ID NO: 368245 - DNA, 15 bp, Homo sapiens
acgcatacacacaca

SEQ ID NO: 368246 - DNA, 15 bp, Homo sapiens
cacgcatacacacac

SEQ ID NO: 368247 - DNA, 15 bp, Homo sapiens
acacgcatacacaca

SEQ ID NO: 368248 - DNA, 15 bp, Homo sapiens
cacacgcatacacac

SEQ ID NO: 368249 - DNA, 15 bp, Homo sapiens
acacacgcatacaca

SEQ ID NO: 368250 - DNA, 15 bp, Homo sapiens
cacacacgcatacac

SEQ ID NO: 368251 - DNA, 15 bp, Homo sapiens
acacacacgcataca

SEQ ID NO: 368252 - DNA, 15 bp, Homo sapiens
cacacacacgcatac

SEQ ID NO: 368253 - DNA, 15 bp, Homo sapiens
acacacacacgcata

SEQ ID NO: 368254 - DNA, 15 bp, Homo sapiens
cacacacacacgcat

SEQ ID NO: 368255 - DNA, 15 bp, Homo sapiens
acacacacacacgca

SEQ ID NO: 368256 - DNA, 15 bp, Homo sapiens
aacacacacacacgc

SEQ ID NO: 368257 - DNA, 15 bp, Homo sapiens
caacacacacacacg

SEQ ID NO: 368258 - DNA, 15 bp, Homo sapiens
acaacacacacacac

SEQ ID NO: 368259 - DNA, 15 bp, Homo sapiens
cacaacacacacaca

SEQ ID NO: 368260 - DNA, 15 bp, Homo sapiens
ccacaacacacacac

SEQ ID NO: 368261 - DNA, 15 bp, Homo sapiens
cccacaacacacaca

SEQ ID NO: 368262 - DNA, 15 bp, Homo sapiens
ccccacaacacacac

SEQ ID NO: 368263 - DNA, 15 bp, Homo sapiens
cccccacaacacaca

SEQ ID NO: 368264 - DNA, 15 bp, Homo sapiens
acccccacaacacac

SEQ ID NO: 368265 - DNA, 15 bp, Homo sapiens
cacccccacaacaca

SEQ ID NO: 368266 - DNA, 15 bp, Homo sapiens
ccacccccacaacac

SEQ ID NO: 368267 - DNA, 15 bp, Homo sapiens
cccacccccacaaca

SEQ ID NO: 368268 - DNA, 15 bp, Homo sapiens
acccacccccacaac

SEQ ID NO: 368269 - DNA, 15 bp, Homo sapiens
cacccacccccacaa

SEQ ID NO: 368270 - DNA, 15 bp, Homo sapiens
acacccacccccaca

SEQ ID NO: 368271 - DNA, 15 bp, Homo sapiens
cacacccacccccac

SEQ ID NO: 368272 - DNA, 15 bp, Homo sapiens
acacacccaccccca

SEQ ID NO: 368273 - DNA, 15 bp, Homo sapiens
cacacacccaccccc

SEQ ID NO: 368274 - DNA, 15 bp, Homo sapiens
ccacacacccacccc

SEQ ID NO: 368275 - DNA, 15 bp, Homo sapiens
cccacacacccaccc

SEQ ID NO: 368276 - DNA, 15 bp, Homo sapiens
acccacacacccacc

SEQ ID NO: 368277 - DNA, 15 bp, Homo sapiens
cacccacacacccac

SEQ ID NO: 368278 - DNA, 15 bp, Homo sapiens
ccacccacacaccca

SEQ ID NO: 368279 - DNA, 15 bp, Homo sapiens
cccacccacacaccc

SEQ ID NO: 368280 - DNA, 15 bp, Homo sapiens
acccacccacacacc

SEQ ID NO: 368281 - DNA, 15 bp, Homo sapiens
cacccacccacacac

SEQ ID NO: 368282 - DNA, 15 bp, Homo sapiens
ccacccacccacaca

SEQ ID NO: 368283 - DNA, 15 bp, Homo sapiens
cccacccacccacac

SEQ ID NO: 368284 - DNA, 15 bp, Homo sapiens
acccacccacccaca

SEQ ID NO: 368285 - DNA, 15 bp, Homo sapiens
aacccacccacccac

SEQ ID NO: 368286 - DNA, 15 bp, Homo sapiens
aaacccacccaccca

SEQ ID NO: 368287 - DNA, 15 bp, Homo sapiens
aaaacccacccaccc

SEQ ID NO: 368288 - DNA, 15 bp, Homo sapiens
caaaacccacccacc

SEQ ID NO: 368289 - DNA, 15 bp, Homo sapiens
gcaaaacccacccac

SEQ ID NO: 368290 - DNA, 15 bp, Homo sapiens
ggcaaaacccaccca

SEQ ID NO: 368291 - DNA, 15 bp, Homo sapiens
cggcaaaacccaccc

SEQ ID NO: 368292 - DNA, 15 bp, Homo sapiens
gcggcaaaacccacc

SEQ ID NO: 368293 - DNA, 15 bp, Homo sapiens
tgcggcaaaacccac

SEQ ID NO: 368294 - DNA, 15 bp, Homo sapiens
ctgcggcaaaaccca

SEQ ID NO: 368295 - DNA, 15 bp, Homo sapiens
tctgcggcaaaaccc

SEQ ID NO: 368296 - DNA, 15 bp, Homo sapiens
gtctgcggcaaaacc

SEQ ID NO: 368297 - DNA, 15 bp, Homo sapiens
cgtctgcggcaaaac

SEQ ID NO: 368298 - DNA, 15 bp, Homo sapiens
acgtctgcggcaaaa

SEQ ID NO: 368299 - DNA, 15 bp, Homo sapiens
tacgtctgcggcaaa

SEQ ID NO: 368300 - DNA, 15 bp, Homo sapiens
gtacgtctgcggcaa

SEQ ID NO: 368301 - DNA, 15 bp, Homo sapiens
tgtacgtctgcggca

SEQ ID NO: 368302 - DNA, 15 bp, Homo sapiens
ctgtacgtctgcggc

SEQ ID NO: 368303 - DNA, 15 bp, Homo sapiens
tctgtacgtctgcgg

SEQ ID NO: 368304 - DNA, 15 bp, Homo sapiens
atctgtacgtctgcg

SEQ ID NO: 368305 - DNA, 15 bp, Homo sapiens
tatctgtacgtctgc

SEQ ID NO: 368306 - DNA, 15 bp, Homo sapiens
ctatctgtacgtctg

SEQ ID NO: 368307 - DNA, 15 bp, Homo sapiens
tctatctgtacgtct

SEQ ID NO: 368308 - DNA, 15 bp, Homo sapiens
gtctatctgtacgtc

SEQ ID NO: 368309 - DNA, 15 bp, Homo sapiens
tgtctatctgtacgt

SEQ ID NO: 368310 - DNA, 15 bp, Homo sapiens
ttgtctatctgtacg

SEQ ID NO: 368311 - DNA, 15 bp, Homo sapiens
attgtctatctgtac

SEQ ID NO: 368312 - DNA, 15 bp, Homo sapiens
gattgtctatctgta

SEQ ID NO: 368313 - DNA, 15 bp, Homo sapiens
ggattgtctatctgt

SEQ ID NO: 368314 - DNA, 15 bp, Homo sapiens
gggattgtctatctg

SEQ ID NO: 368315 - DNA, 15 bp, Homo sapiens
cgggattgtctatct

SEQ ID NO: 368316 - DNA, 15 bp, Homo sapiens
acgggattgtctatc

SEQ ID NO: 368317 - DNA, 15 bp, Homo sapiens
cacgggattgtctat

SEQ ID NO: 368318 - DNA, 15 bp, Homo sapiens
gcacgggattgtcta

SEQ ID NO: 368319 - DNA, 15 bp, Homo sapiens
cgcacgggattgtct

SEQ ID NO: 368320 - DNA, 15 bp, Homo sapiens
gcgcacgggattgtc

SEQ ID NO: 368321 - DNA, 15 bp, Homo sapiens
tgcgcacgggattgt

SEQ ID NO: 368322 - DNA, 15 bp, Homo sapiens
ttgcgcacgggattg

SEQ ID NO: 368323 - DNA, 15 bp, Homo sapiens
tttgcgcacgggatt

SEQ ID NO: 368324 - DNA, 15 bp, Homo sapiens
gtttgcgcacgggat

SEQ ID NO: 368325 - DNA, 15 bp, Homo sapiens
tgtttgcgcacggga

SEQ ID NO: 368326 - DNA, 15 bp, Homo sapiens
gtgtttgcgcacggg

SEQ ID NO: 368327 - DNA, 15 bp, Homo sapiens
tgtgtttgcgcacgg

SEQ ID NO: 368328 - DNA, 15 bp, Homo sapiens
atgtgtttgcgcacg

SEQ ID NO: 368329 - DNA, 15 bp, Homo sapiens
catgtgtttgcgcac

SEQ ID NO: 368330 - DNA, 15 bp, Homo sapiens
tcatgtgtttgcgca

SEQ ID NO: 368331 - DNA, 15 bp, Homo sapiens
ctcatgtgtttgcgc

SEQ ID NO: 368332 - DNA, 15 bp, Homo sapiens
tctcatgtgtttgcg

SEQ ID NO: 368333 - DNA, 15 bp, Homo sapiens
ctctcatgtgtttgc

SEQ ID NO: 368334 - DNA, 15 bp, Homo sapiens
gctctcatgtgtttg

SEQ ID NO: 368335 - DNA, 15 bp, Homo sapiens
cgctctcatgtgttt

SEQ ID NO: 368336 - DNA, 15 bp, Homo sapiens
acgctctcatgtgtt

SEQ ID NO: 368337 - DNA, 15 bp, Homo sapiens
cacgctctcatgtgt

SEQ ID NO: 368338 - DNA, 15 bp, Homo sapiens
gcacgctctcatgtg

SEQ ID NO: 368339 - DNA, 15 bp, Homo sapiens
cgcacgctctcatgt

SEQ ID NO: 368340 - DNA, 15 bp, Homo sapiens
ccgcacgctctcatg

SEQ ID NO: 368341 - DNA, 15 bp, Homo sapiens
tccgcacgctctcat

SEQ ID NO: 368342 - DNA, 15 bp, Homo sapiens
atccgcacgctctca

SEQ ID NO: 368343 - DNA, 15 bp, Homo sapiens
catccgcacgctctc

SEQ ID NO: 368344 - DNA, 15 bp, Homo sapiens
gcatccgcacgctct

SEQ ID NO: 368345 - DNA, 15 bp, Homo sapiens
ggcatccgcacgctc

SEQ ID NO: 368346 - DNA, 15 bp, Homo sapiens
gggcatccgcacgct

SEQ ID NO: 368347 - DNA, 15 bp, Homo sapiens
tgggcatccgcacgc

SEQ ID NO: 368348 - DNA, 15 bp, Homo sapiens
gtgggcatccgcacg

SEQ ID NO: 368349 - DNA, 15 bp, Homo sapiens
tgtgggcatccgcac

SEQ ID NO: 368350 - DNA, 15 bp, Homo sapiens
ctgtgggcatccgca

SEQ ID NO: 368351 - DNA, 15 bp, Homo sapiens
cctgtgggcatccgc

SEQ ID NO: 368352 - DNA, 15 bp, Homo sapiens
gcctgtgggcatccg

SEQ ID NO: 368353 - DNA, 15 bp, Homo sapiens
tgcctgtgggcatcc

SEQ ID NO: 368354 - DNA, 15 bp, Homo sapiens
ctgcctgtgggcatc

SEQ ID NO: 368355 - DNA, 15 bp, Homo sapiens
cctgcctgtgggcat

SEQ ID NO: 368356 - DNA, 15 bp, Homo sapiens
gcctgcctgtgggca

SEQ ID NO: 368357 - DNA, 15 bp, Homo sapiens
agcctgcctgtgggc

SEQ ID NO: 368358 - DNA, 15 bp, Homo sapiens
gagcctgcctgtggg

SEQ ID NO: 368359 - DNA, 15 bp, Homo sapiens
agagcctgcctgtgg

SEQ ID NO: 368360 - DNA, 15 bp, Homo sapiens
cagagcctgcctgtg

SEQ ID NO: 368361 - DNA, 15 bp, Homo sapiens
ccagagcctgcctgt

SEQ ID NO: 368362 - DNA, 15 bp, Homo sapiens
cccagagcctgcctg

SEQ ID NO: 368363 - DNA, 15 bp, Homo sapiens
tcccagagcctgcct

SEQ ID NO: 368364 - DNA, 15 bp, Homo sapiens
atcccagagcctgcc

SEQ ID NO: 368365 - DNA, 15 bp, Homo sapiens
tatcccagagcctgc

SEQ ID NO: 368366 - DNA, 15 bp, Homo sapiens
ctatcccagagcctg

SEQ ID NO: 368367 - DNA, 15 bp, Homo sapiens
cctatcccagagcct

SEQ ID NO: 368368 - DNA, 15 bp, Homo sapiens
ccctatcccagagcc

SEQ ID NO: 368369 - DNA, 15 bp, Homo sapiens
accctatcccagagc

SEQ ID NO: 368370 - DNA, 15 bp, Homo sapiens
caccctatcccagag

SEQ ID NO: 368371 - DNA, 15 bp, Homo sapiens
ccaccctatcccaga

SEQ ID NO: 368372 - DNA, 15 bp, Homo sapiens
cccaccctatcccag

SEQ ID NO: 368373 - DNA, 15 bp, Homo sapiens
acccaccctatccca

SEQ ID NO: 368374 - DNA, 15 bp, Homo sapiens
gacccaccctatccc

SEQ ID NO: 368375 - DNA, 15 bp, Homo sapiens
ggacccaccctatcc

SEQ ID NO: 368376 - DNA, 15 bp, Homo sapiens
gggacccaccctatc

SEQ ID NO: 368377 - DNA, 15 bp, Homo sapiens
agggacccaccctat

SEQ ID NO: 368378 - DNA, 15 bp, Homo sapiens
cagggacccacccta

SEQ ID NO: 368379 - DNA, 15 bp, Homo sapiens
acagggacccaccct

SEQ ID NO: 368380 - DNA, 15 bp, Homo sapiens
gacagggacccaccc

SEQ ID NO: 368381 - DNA, 15 bp, Homo sapiens
cgacagggacccacc

SEQ ID NO: 368382 - DNA, 15 bp, Homo sapiens
gcgacagggacccac

SEQ ID NO: 368383 - DNA, 15 bp, Homo sapiens
agcgacagggaccca

SEQ ID NO: 368384 - DNA, 15 bp, Homo sapiens
cagcgacagggaccc

SEQ ID NO: 368385 - DNA, 15 bp, Homo sapiens
ccagcgacagggacc

SEQ ID NO: 368386 - DNA, 15 bp, Homo sapiens
cccagcgacagggac

SEQ ID NO: 368387 - DNA, 15 bp, Homo sapiens
ccccagcgacaggga

SEQ ID NO: 368388 - DNA, 15 bp, Homo sapiens
accccagcgacaggg

SEQ ID NO: 368389 - DNA, 15 bp, Homo sapiens
caccccagcgacagg

SEQ ID NO: 368390 - DNA, 15 bp, Homo sapiens
ccaccccagcgacag

SEQ ID NO: 368391 - DNA, 15 bp, Homo sapiens
cccaccccagcgaca

SEQ ID NO: 368392 - DNA, 15 bp, Homo sapiens
acccaccccagcgac

SEQ ID NO: 368393 - DNA, 15 bp, Homo sapiens
aacccaccccagcga

SEQ ID NO: 368394 - DNA, 15 bp, Homo sapiens
caacccaccccagcg

SEQ ID NO: 368395 - DNA, 15 bp, Homo sapiens
tcaacccaccccagc

SEQ ID NO: 368396 - DNA, 15 bp, Homo sapiens
atcaacccaccccag

SEQ ID NO: 368397 - DNA, 15 bp, Homo sapiens
catcaacccacccca

SEQ ID NO: 368398 - DNA, 15 bp, Homo sapiens
acatcaacccacccc

SEQ ID NO: 368399 - DNA, 15 bp, Homo sapiens
gacatcaacccaccc

SEQ ID NO: 368400 - DNA, 15 bp, Homo sapiens
tgacatcaacccacc

SEQ ID NO: 368401 - DNA, 15 bp, Homo sapiens
ctgacatcaacccac

SEQ ID NO: 368402 - DNA, 15 bp, Homo sapiens
cctgacatcaaccca

SEQ ID NO: 368403 - DNA, 15 bp, Homo sapiens
ccctgacatcaaccc

SEQ ID NO: 368404 - DNA, 15 bp, Homo sapiens
gccctgacatcaacc

SEQ ID NO: 368405 - DNA, 15 bp, Homo sapiens
cgccctgacatcaac

SEQ ID NO: 368406 - DNA, 15 bp, Homo sapiens
ccgccctgacatcaa

SEQ ID NO: 368407 - DNA, 15 bp, Homo sapiens
gccgccctgacatca

SEQ ID NO: 368408 - DNA, 15 bp, Homo sapiens
ggccgccctgacatc

SEQ ID NO: 368409 - DNA, 15 bp, Homo sapiens
aggccgccctgacat

SEQ ID NO: 368410 - DNA, 15 bp, Homo sapiens
gaggccgccctgaca

SEQ ID NO: 368411 - DNA, 15 bp, Homo sapiens
agaggccgccctgac

SEQ ID NO: 368412 - DNA, 15 bp, Homo sapiens
gagaggccgccctga

SEQ ID NO: 368413 - DNA, 15 bp, Homo sapiens
ggagaggccgccctg

SEQ ID NO: 368414 - DNA, 15 bp, Homo sapiens
tggagaggccgccct

SEQ ID NO: 368415 - DNA, 15 bp, Homo sapiens
ttggagaggccgccc

SEQ ID NO: 368416 - DNA, 15 bp, Homo sapiens
cttggagaggccgcc

SEQ ID NO: 368417 - DNA, 15 bp, Homo sapiens
tcttggagaggccgc

SEQ ID NO: 368418 - DNA, 15 bp, Homo sapiens
ctcttggagaggccg

SEQ ID NO: 368419 - DNA, 15 bp, Homo sapiens
cctcttggagaggcc

SEQ ID NO: 368420 - DNA, 15 bp, Homo sapiens
acctcttggagaggc

SEQ ID NO: 368421 - DNA, 15 bp, Homo sapiens
aacctcttggagagg

SEQ ID NO: 368422 - DNA, 15 bp, Homo sapiens
caacctcttggagag

SEQ ID NO: 368423 - DNA, 15 bp, Homo sapiens
acaacctcttggaga

SEQ ID NO: 368424 - DNA, 15 bp, Homo sapiens
cacaacctcttggag

SEQ ID NO: 368425 - DNA, 15 bp, Homo sapiens
ccacaacctcttgga

SEQ ID NO: 368426 - DNA, 15 bp, Homo sapiens
tccacaacctcttgg

SEQ ID NO: 368427 - DNA, 15 bp, Homo sapiens
gtccacaacctcttg

SEQ ID NO: 368428 - DNA, 15 bp, Homo sapiens
agtccacaacctctt

SEQ ID NO: 368429 - DNA, 15 bp, Homo sapiens
aagtccacaacctct

SEQ ID NO: 368430 - DNA, 15 bp, Homo sapiens
caagtccacaacctc

SEQ ID NO: 368431 - DNA, 15 bp, Homo sapiens
acaagtccacaacct

SEQ ID NO: 368432 - DNA, 15 bp, Homo sapiens
cacaagtccacaacc

SEQ ID NO: 368433 - DNA, 15 bp, Homo sapiens
ccacaagtccacaac

SEQ ID NO: 368434 - DNA, 15 bp, Homo sapiens
cccacaagtccacaa

SEQ ID NO: 368435 - DNA, 15 bp, Homo sapiens
ccccacaagtccaca

SEQ ID NO: 368436 - DNA, 15 bp, Homo sapiens
accccacaagtccac

SEQ ID NO: 368437 - DNA, 15 bp, Homo sapiens
caccccacaagtcca

SEQ ID NO: 368438 - DNA, 15 bp, Homo sapiens
ccaccccacaagtcc

SEQ ID NO: 368439 - DNA, 15 bp, Homo sapiens
tccaccccacaagtc

SEQ ID NO: 368440 - DNA, 15 bp, Homo sapiens
ctccaccccacaagt

SEQ ID NO: 368441 - DNA, 15 bp, Homo sapiens
actccaccccacaag

SEQ ID NO: 368442 - DNA, 15 bp, Homo sapiens
aactccaccccacaa

SEQ ID NO: 368443 - DNA, 15 bp, Homo sapiens
aaactccaccccaca

SEQ ID NO: 368444 - DNA, 15 bp, Homo sapiens
caaactccaccccac

SEQ ID NO: 368445 - DNA, 15 bp, Homo sapiens
acaaactccacccca

SEQ ID NO: 368446 - DNA, 15 bp, Homo sapiens
cacaaactccacccc

SEQ ID NO: 368447 - DNA, 15 bp, Homo sapiens
ccacaaactccaccc

SEQ ID NO: 368448 - DNA, 15 bp, Homo sapiens
tccacaaactccacc

SEQ ID NO: 368449 - DNA, 15 bp, Homo sapiens
atccacaaactccac

SEQ ID NO: 368450 - DNA, 15 bp, Homo sapiens
aatccacaaactcca

SEQ ID NO: 368451 - DNA, 15 bp, Homo sapiens
caatccacaaactcc

SEQ ID NO: 368452 - DNA, 15 bp, Homo sapiens
tcaatccacaaactc

SEQ ID NO: 368453 - DNA, 15 bp, Homo sapiens
atcaatccacaaact

SEQ ID NO: 368454 - DNA, 15 bp, Homo sapiens
aatcaatccacaaac

SEQ ID NO: 368455 - DNA, 15 bp, Homo sapiens
gaatcaatccacaaa

SEQ ID NO: 368456 - DNA, 15 bp, Homo sapiens
agaatcaatccacaa

SEQ ID NO: 368457 - DNA, 15 bp, Homo sapiens
cagaatcaatccaca

SEQ ID NO: 368458 - DNA, 15 bp, Homo sapiens
gcagaatcaatccac

SEQ ID NO: 368459 - DNA, 15 bp, Homo sapiens
agcagaatcaatcca

SEQ ID NO: 368460 - DNA, 15 bp, Homo sapiens
aagcagaatcaatcc

SEQ ID NO: 368461 - DNA, 15 bp, Homo sapiens
aaagcagaatcaatc

SEQ ID NO: 368462 - DNA, 15 bp, Homo sapiens
caaagcagaatcaat

SEQ ID NO: 368463 - DNA, 15 bp, Homo sapiens
acaaagcagaatcaa

SEQ ID NO: 368464 - DNA, 15 bp, Homo sapiens
cacaaagcagaatca

SEQ ID NO: 368465 - DNA, 15 bp, Homo sapiens
tcacaaagcagaatc

SEQ ID NO: 368466 - DNA, 15 bp, Homo sapiens
atcacaaagcagaat

SEQ ID NO: 368467 - DNA, 15 bp, Homo sapiens
aatcacaaagcagaa

SEQ ID NO: 368468 - DNA, 15 bp, Homo sapiens
aaatcacaaagcaga

SEQ ID NO: 368469 - DNA, 15 bp, Homo sapiens
caaatcacaaagcag

SEQ ID NO: 368470 - DNA, 15 bp, Homo sapiens
ccaaatcacaaagca

SEQ ID NO: 368471 - DNA, 15 bp, Homo sapiens
gccaaatcacaaagc

SEQ ID NO: 368472 - DNA, 15 bp, Homo sapiens
tgccaaatcacaaag

SEQ ID NO: 368473 - DNA, 15 bp, Homo sapiens
ctgccaaatcacaaa

SEQ ID NO: 368474 - DNA, 15 bp, Homo sapiens
actgccaaatcacaa

SEQ ID NO: 368475 - DNA, 15 bp, Homo sapiens
gactgccaaatcaca

SEQ ID NO: 368476 - DNA, 15 bp, Homo sapiens
agactgccaaatcac

SEQ ID NO: 368477 - DNA, 15 bp, Homo sapiens
cagactgccaaatca

SEQ ID NO: 368478 - DNA, 15 bp, Homo sapiens
acagactgccaaatc

SEQ ID NO: 368479 - DNA, 15 bp, Homo sapiens
cacagactgccaaat

SEQ ID NO: 368480 - DNA, 15 bp, Homo sapiens
gcacagactgccaaa

SEQ ID NO: 368481 - DNA, 15 bp, Homo sapiens
ggcacagactgccaa

SEQ ID NO: 368482 - DNA, 15 bp, Homo sapiens
aggcacagactgcca

SEQ ID NO: 368483 - DNA, 15 bp, Homo sapiens
caggcacagactgcc

SEQ ID NO: 368484 - DNA, 15 bp, Homo sapiens
tcaggcacagactgc

SEQ ID NO: 368485 - DNA, 15 bp, Homo sapiens
gtcaggcacagactg

SEQ ID NO: 368486 - DNA, 15 bp, Homo sapiens
agtcaggcacagact

SEQ ID NO: 368487 - DNA, 15 bp, Homo sapiens
gagtcaggcacagac

SEQ ID NO: 368488 - DNA, 15 bp, Homo sapiens
agagtcaggcacaga

SEQ ID NO: 368489 - DNA, 15 bp, Homo sapiens
gagagtcaggcacag

SEQ ID NO: 368490 - DNA, 15 bp, Homo sapiens
agagagtcaggcaca

SEQ ID NO: 368491 - DNA, 15 bp, Homo sapiens
cagagagtcaggcac

SEQ ID NO: 368492 - DNA, 15 bp, Homo sapiens
ccagagagtcaggca

SEQ ID NO: 368493 - DNA, 15 bp, Homo sapiens
cccagagagtcaggc

SEQ ID NO: 368494 - DNA, 15 bp, Homo sapiens
tcccagagagtcagg

SEQ ID NO: 368495 - DNA, 15 bp, Homo sapiens
atcccagagagtcag

SEQ ID NO: 368496 - DNA, 15 bp, Homo sapiens
catcccagagagtca

SEQ ID NO: 368497 - DNA, 15 bp, Homo sapiens
ccatcccagagagtc

SEQ ID NO: 368498 - DNA, 15 bp, Homo sapiens
cccatcccagagagt

SEQ ID NO: 368499 - DNA, 15 bp, Homo sapiens
acccatcccagagag

SEQ ID NO: 368500 - DNA, 15 bp, Homo sapiens
cacccatcccagaga

SEQ ID NO: 368501 - DNA, 15 bp, Homo sapiens
acacccatcccagag

SEQ ID NO: 368502 - DNA, 15 bp, Homo sapiens
gacacccatcccaga

SEQ ID NO: 368503 - DNA, 15 bp, Homo sapiens
agacacccatcccag

SEQ ID NO: 368504 - DNA, 15 bp, Homo sapiens
aagacacccatccca

SEQ ID NO: 368505 - DNA, 15 bp, Homo sapiens
aaagacacccatccc

SEQ ID NO: 368506 - DNA, 15 bp, Homo sapiens
aaaagacacccatcc

SEQ ID NO: 368507 - DNA, 15 bp, Homo sapiens
caaaagacacccatc

SEQ ID NO: 368508 - DNA, 15 bp, Homo sapiens
tcaaaagacacccat

SEQ ID NO: 368509 - DNA, 15 bp, Homo sapiens
ttcaaaagacaccca

SEQ ID NO: 368510 - DNA, 15 bp, Homo sapiens
tttcaaaagacaccc

SEQ ID NO: 368511 - DNA, 15 bp, Homo sapiens
ctttcaaaagacacc

SEQ ID NO: 368512 - DNA, 15 bp, Homo sapiens
cctttcaaaagacac

SEQ ID NO: 368513 - DNA, 15 bp, Homo sapiens
gcctttcaaaagaca

SEQ ID NO: 368514 - DNA, 15 bp, Homo sapiens
tgcctttcaaaagac

SEQ ID NO: 368515 - DNA, 15 bp, Homo sapiens
atgcctttcaaaaga

SEQ ID NO: 368516 - DNA, 15 bp, Homo sapiens
catgcctttcaaaag

SEQ ID NO: 368517 - DNA, 15 bp, Homo sapiens
gcatgcctttcaaaa

SEQ ID NO: 368518 - DNA, 15 bp, Homo sapiens
tgcatgcctttcaaa

SEQ ID NO: 368519 - DNA, 15 bp, Homo sapiens
ttgcatgcctttcaa

SEQ ID NO: 368520 - DNA, 15 bp, Homo sapiens
gttgcatgcctttca

SEQ ID NO: 368521 - DNA, 15 bp, Homo sapiens
agttgcatgcctttc

SEQ ID NO: 368522 - DNA, 15 bp, Homo sapiens
gagttgcatgccttt

SEQ ID NO: 368523 - DNA, 15 bp, Homo sapiens
ggagttgcatgcctt

SEQ ID NO: 368524 - DNA, 15 bp, Homo sapiens
tggagttgcatgcct

SEQ ID NO: 368525 - DNA, 15 bp, Homo sapiens
ctggagttgcatgcc

SEQ ID NO: 368526 - DNA, 15 bp, Homo sapiens
tctggagttgcatgc

SEQ ID NO: 368527 - DNA, 15 bp, Homo sapiens
ttctggagttgcatg

SEQ ID NO: 368528 - DNA, 15 bp, Homo sapiens
gttctggagttgcat

SEQ ID NO: 368529 - DNA, 15 bp, Homo sapiens
tgttctggagttgca

SEQ ID NO: 368530 - DNA, 15 bp, Homo sapiens
ctgttctggagttgc

SEQ ID NO: 368531 - DNA, 15 bp, Homo sapiens
cctgttctggagttg

SEQ ID NO: 368532 - DNA, 15 bp, Homo sapiens
acctgttctggagtt

SEQ ID NO: 368533 - DNA, 15 bp, Homo sapiens
gacctgttctggagt

SEQ ID NO: 368534 - DNA, 15 bp, Homo sapiens
ggacctgttctggag

SEQ ID NO: 368535 - DNA, 15 bp, Homo sapiens
aggacctgttctgga

SEQ ID NO: 368536 - DNA, 15 bp, Homo sapiens
aaggacctgttctgg

SEQ ID NO: 368537 - DNA, 15 bp, Homo sapiens
caaggacctgttctg

SEQ ID NO: 368538 - DNA, 15 bp, Homo sapiens
gcaaggacctgttct

SEQ ID NO: 368539 - DNA, 15 bp, Homo sapiens
agcaaggacctgttc

SEQ ID NO: 368540 - DNA, 15 bp, Homo sapiens
cagcaaggacctgtt

SEQ ID NO: 368541 - DNA, 15 bp, Homo sapiens
gcagcaaggacctgt

SEQ ID NO: 368542 - DNA, 15 bp, Homo sapiens
agcagcaaggacctg

SEQ ID NO: 368543 - DNA, 15 bp, Homo sapiens
cagcagcaaggacct

SEQ ID NO: 368544 - DNA, 15 bp, Homo sapiens
gcagcagcaaggacc

SEQ ID NO: 368545 - DNA, 15 bp, Homo sapiens
agcagcagcaaggac

SEQ ID NO: 368546 - DNA, 15 bp, Homo sapiens
aagcagcagcaagga

SEQ ID NO: 368547 - DNA, 15 bp, Homo sapiens
caagcagcagcaagg

SEQ ID NO: 368548 - DNA, 15 bp, Homo sapiens
ccaagcagcagcaag

SEQ ID NO: 368549 - DNA, 15 bp, Homo sapiens
tccaagcagcagcaa

SEQ ID NO: 368550 - DNA, 15 bp, Homo sapiens
gtccaagcagcagca

SEQ ID NO: 368551 - DNA, 15 bp, Homo sapiens
tgtccaagcagcagc

SEQ ID NO: 368552 - DNA, 15 bp, Homo sapiens
atgtccaagcagcag

SEQ ID NO: 368553 - DNA, 15 bp, Homo sapiens
catgtccaagcagca

SEQ ID NO: 368554 - DNA, 15 bp, Homo sapiens
ccatgtccaagcagc

SEQ ID NO: 368555 - DNA, 15 bp, Homo sapiens
tccatgtccaagcag

SEQ ID NO: 368556 - DNA, 15 bp, Homo sapiens
atccatgtccaagca

SEQ ID NO: 368557 - DNA, 15 bp, Homo sapiens
catccatgtccaagc

SEQ ID NO: 368558 - DNA, 15 bp, Homo sapiens
acatccatgtccaag

SEQ ID NO: 368559 - DNA, 15 bp, Homo sapiens
cacatccatgtccaa

SEQ ID NO: 368560 - DNA, 15 bp, Homo sapiens
acacatccatgtcca

SEQ ID NO: 368561 - DNA, 15 bp, Homo sapiens
gacacatccatgtcc

SEQ ID NO: 368562 - DNA, 15 bp, Homo sapiens
tgacacatccatgtc

SEQ ID NO: 368563 - DNA, 15 bp, Homo sapiens
atgacacatccatgt

SEQ ID NO: 368564 - DNA, 15 bp, Homo sapiens
catgacacatccatg

SEQ ID NO: 368565 - DNA, 15 bp, Homo sapiens
ccatgacacatccat

SEQ ID NO: 368566 - DNA, 15 bp, Homo sapiens
gccatgacacatcca

SEQ ID NO: 368567 - DNA, 15 bp, Homo sapiens
agccatgacacatcc

SEQ ID NO: 368568 - DNA, 15 bp, Homo sapiens
gagccatgacacatc

SEQ ID NO: 368569 - DNA, 15 bp, Homo sapiens
tgagccatgacacat

SEQ ID NO: 368570 - DNA, 15 bp, Homo sapiens
ctgagccatgacaca

SEQ ID NO: 368571 - DNA, 15 bp, Homo sapiens
cctgagccatgacac

SEQ ID NO: 368572 - DNA, 15 bp, Homo sapiens
tcctgagccatgaca

SEQ ID NO: 368573 - DNA, 15 bp, Homo sapiens
ttcctgagccatgac

SEQ ID NO: 368574 - DNA, 15 bp, Homo sapiens
cttcctgagccatga

SEQ ID NO: 368575 - DNA, 15 bp, Homo sapiens
tcttcctgagccatg

SEQ ID NO: 368576 - DNA, 15 bp, Homo sapiens
atcttcctgagccat

SEQ ID NO: 368577 - DNA, 15 bp, Homo sapiens
gatcttcctgagcca

SEQ ID NO: 368578 - DNA, 15 bp, Homo sapiens
tgatcttcctgagcc

SEQ ID NO: 368579 - DNA, 15 bp, Homo sapiens
gtgatcttcctgagc

SEQ ID NO: 368580 - DNA, 15 bp, Homo sapiens
ggtgatcttcctgag

SEQ ID NO: 368581 - DNA, 15 bp, Homo sapiens
aggtgatcttcctga

SEQ ID NO: 368582 - DNA, 15 bp, Homo sapiens
caggtgatcttcctg

SEQ ID NO: 368583 - DNA, 15 bp, Homo sapiens
ccaggtgatcttcct

SEQ ID NO: 368584 - DNA, 15 bp, Homo sapiens
cccaggtgatcttcc

SEQ ID NO: 368585 - DNA, 15 bp, Homo sapiens
tcccaggtgatcttc

SEQ ID NO: 368586 - DNA, 15 bp, Homo sapiens
ctcccaggtgatctt

SEQ ID NO: 368587 - DNA, 15 bp, Homo sapiens
tctcccaggtgatct

SEQ ID NO: 368588 - DNA, 15 bp, Homo sapiens
ctctcccaggtgatc

SEQ ID NO: 368589 - DNA, 15 bp, Homo sapiens
cctctcccaggtgat

SEQ ID NO: 368590 - DNA, 15 bp, Homo sapiens
acctctcccaggtga

SEQ ID NO: 368591 - DNA, 15 bp, Homo sapiens
gacctctcccaggtg

SEQ ID NO: 368592 - DNA, 15 bp, Homo sapiens
agacctctcccaggt

SEQ ID NO: 368593 - DNA, 15 bp, Homo sapiens
cagacctctcccagg

SEQ ID NO: 368594 - DNA, 15 bp, Homo sapiens
tcagacctctcccag

SEQ ID NO: 368595 - DNA, 15 bp, Homo sapiens
atcagacctctccca

SEQ ID NO: 368596 - DNA, 15 bp, Homo sapiens
catcagacctctccc

SEQ ID NO: 368597 - DNA, 15 bp, Homo sapiens
acatcagacctctcc

SEQ ID NO: 368598 - DNA, 15 bp, Homo sapiens
tacatcagacctctc

SEQ ID NO: 368599 - DNA, 15 bp, Homo sapiens
ctacatcagacctct

SEQ ID NO: 368600 - DNA, 15 bp, Homo sapiens
gctacatcagacctc

SEQ ID NO: 368601 - DNA, 15 bp, Homo sapiens
agctacatcagacct

SEQ ID NO: 368602 - DNA, 15 bp, Homo sapiens
cagctacatcagacc

SEQ ID NO: 368603 - DNA, 15 bp, Homo sapiens
ccagctacatcagac

SEQ ID NO: 368604 - DNA, 15 bp, Homo sapiens
cccagctacatcaga

SEQ ID NO: 368605 - DNA, 15 bp, Homo sapiens
tcccagctacatcag

SEQ ID NO: 368606 - DNA, 15 bp, Homo sapiens
ttcccagctacatca

SEQ ID NO: 368607 - DNA, 15 bp, Homo sapiens
cttcccagctacatc

SEQ ID NO: 368608 - DNA, 15 bp, Homo sapiens
gcttcccagctacat

SEQ ID NO: 368609 - DNA, 15 bp, Homo sapiens
ggcttcccagctaca

SEQ ID NO: 368610 - DNA, 15 bp, Homo sapiens
aggcttcccagctac

SEQ ID NO: 368611 - DNA, 15 bp, Homo sapiens
gaggcttcccagcta

SEQ ID NO: 368612 - DNA, 15 bp, Homo sapiens
agaggcttcccagct

SEQ ID NO: 368613 - DNA, 15 bp, Homo sapiens
tagaggcttcccagc

SEQ ID NO: 368614 - DNA, 15 bp, Homo sapiens
ctagaggcttcccag

SEQ ID NO: 368615 - DNA, 15 bp, Homo sapiens
cctagaggcttccca

SEQ ID NO: 368616 - DNA, 15 bp, Homo sapiens
gcctagaggcttccc

SEQ ID NO: 368617 - DNA, 15 bp, Homo sapiens
agcctagaggcttcc

SEQ ID NO: 368618 - DNA, 15 bp, Homo sapiens
gagcctagaggcttc

SEQ ID NO: 368619 - DNA, 15 bp, Homo sapiens
tgagcctagaggctt

SEQ ID NO: 368620 - DNA, 15 bp, Homo sapiens
ctgagcctagaggct

SEQ ID NO: 368621 - DNA, 15 bp, Homo sapiens
gctgagcctagaggc

SEQ ID NO: 368622 - DNA, 15 bp, Homo sapiens
agctgagcctagagg

SEQ ID NO: 368623 - DNA, 15 bp, Homo sapiens
gagctgagcctagag

SEQ ID NO: 368624 - DNA, 15 bp, Homo sapiens
ggagctgagcctaga

SEQ ID NO: 368625 - DNA, 15 bp, Homo sapiens
cggagctgagcctag

SEQ ID NO: 368626 - DNA, 15 bp, Homo sapiens
acggagctgagccta

SEQ ID NO: 368627 - DNA, 15 bp, Homo sapiens
gacggagctgagcct

SEQ ID NO: 368628 - DNA, 15 bp, Homo sapiens
cgacggagctgagcc

SEQ ID NO: 368629 - DNA, 15 bp, Homo sapiens
acgacggagctgagc

SEQ ID NO: 368630 - DNA, 15 bp, Homo sapiens
cacgacggagctgag

SEQ ID NO: 368631 - DNA, 15 bp, Homo sapiens
ccacgacggagctga

SEQ ID NO: 368632 - DNA, 15 bp, Homo sapiens
tccacgacggagctg

SEQ ID NO: 368633 - DNA, 15 bp, Homo sapiens
ctccacgacggagct

SEQ ID NO: 368634 - DNA, 15 bp, Homo sapiens
tctccacgacggagc

SEQ ID NO: 368635 - DNA, 15 bp, Homo sapiens
atctccacgacggag

SEQ ID NO: 368636 - DNA, 15 bp, Homo sapiens
catctccacgacgga

SEQ ID NO: 368637 - DNA, 15 bp, Homo sapiens
ccatctccacgacgg

SEQ ID NO: 368638 - DNA, 15 bp, Homo sapiens
tccatctccacgacg

SEQ ID NO: 368639 - DNA, 15 bp, Homo sapiens
ttccatctccacgac

SEQ ID NO: 368640 - DNA, 15 bp, Homo sapiens
tttccatctccacga

SEQ ID NO: 368641 - DNA, 15 bp, Homo sapiens
ctttccatctccacg

SEQ ID NO: 368642 - DNA, 15 bp, Homo sapiens
cctttccatctccac

SEQ ID NO: 368643 - DNA, 15 bp, Homo sapiens
tcctttccatctcca

SEQ ID NO: 368644 - DNA, 15 bp, Homo sapiens
atcctttccatctcc

SEQ ID NO: 368645 - DNA, 15 bp, Homo sapiens
aatcctttccatctc

SEQ ID NO: 368646 - DNA, 15 bp, Homo sapiens
aaatcctttccatct

SEQ ID NO: 368647 - DNA, 15 bp, Homo sapiens
caaatcctttccatc

SEQ ID NO: 368648 - DNA, 15 bp, Homo sapiens
gcaaatcctttccat

SEQ ID NO: 368649 - DNA, 15 bp, Homo sapiens
agcaaatcctttcca

SEQ ID NO: 368650 - DNA, 15 bp, Homo sapiens
gagcaaatcctttcc

SEQ ID NO: 368651 - DNA, 15 bp, Homo sapiens
ggagcaaatcctttc

SEQ ID NO: 368652 - DNA, 15 bp, Homo sapiens
gggagcaaatccttt

SEQ ID NO: 368653 - DNA, 15 bp, Homo sapiens
tgggagcaaatcctt

SEQ ID NO: 368654 - DNA, 15 bp, Homo sapiens
ctgggagcaaatcct

SEQ ID NO: 368655 - DNA, 15 bp, Homo sapiens
tctgggagcaaatcc

SEQ ID NO: 368656 - DNA, 15 bp, Homo sapiens
ctctgggagcaaatc

SEQ ID NO: 368657 - DNA, 15 bp, Homo sapiens
gctctgggagcaaat

SEQ ID NO: 368658 - DNA, 15 bp, Homo sapiens
agctctgggagcaaa

SEQ ID NO: 368659 - DNA, 15 bp, Homo sapiens
aagctctgggagcaa

SEQ ID NO: 368660 - DNA, 15 bp, Homo sapiens
aaagctctgggagca

SEQ ID NO: 368661 - DNA, 15 bp, Homo sapiens
gaaagctctgggagc

SEQ ID NO: 368662 - DNA, 15 bp, Homo sapiens
ggaaagctctgggag

SEQ ID NO: 368663 - DNA, 15 bp, Homo sapiens
cggaaagctctggga

SEQ ID NO: 368664 - DNA, 15 bp, Homo sapiens
ccggaaagctctggg

SEQ ID NO: 368665 - DNA, 15 bp, Homo sapiens
cccggaaagctctgg

SEQ ID NO: 368666 - DNA, 15 bp, Homo sapiens
ccccggaaagctctg

SEQ ID NO: 368667 - DNA, 15 bp, Homo sapiens
tccccggaaagctct

SEQ ID NO: 368668 - DNA, 15 bp, Homo sapiens
atccccggaaagctc

SEQ ID NO: 368669 - DNA, 15 bp, Homo sapiens
gatccccggaaagct

SEQ ID NO: 368670 - DNA, 15 bp, Homo sapiens
tgatccccggaaagc

SEQ ID NO: 368671 - DNA, 15 bp, Homo sapiens
gtgatccccggaaag

SEQ ID NO: 368672 - DNA, 15 bp, Homo sapiens
agtgatccccggaaa

SEQ ID NO: 368673 - DNA, 15 bp, Homo sapiens
cagtgatccccggaa

SEQ ID NO: 368674 - DNA, 15 bp, Homo sapiens
ccagtgatccccgga

SEQ ID NO: 368675 - DNA, 15 bp, Homo sapiens
cccagtgatccccgg

SEQ ID NO: 368676 - DNA, 15 bp, Homo sapiens
tcccagtgatccccg

SEQ ID NO: 368677 - DNA, 15 bp, Homo sapiens
ttcccagtgatcccc

SEQ ID NO: 368678 - DNA, 15 bp, Homo sapiens
attcccagtgatccc

SEQ ID NO: 368679 - DNA, 15 bp, Homo sapiens
cattcccagtgatcc

SEQ ID NO: 368680 - DNA, 15 bp, Homo sapiens
gcattcccagtgatc

SEQ ID NO: 368681 - DNA, 15 bp, Homo sapiens
tgcattcccagtgat

SEQ ID NO: 368682 - DNA, 15 bp, Homo sapiens
ctgcattcccagtga

SEQ ID NO: 368683 - DNA, 15 bp, Homo sapiens
tctgcattcccagtg

SEQ ID NO: 368684 - DNA, 15 bp, Homo sapiens
ctctgcattcccagt

SEQ ID NO: 368685 - DNA, 15 bp, Homo sapiens
gctctgcattcccag

SEQ ID NO: 368686 - DNA, 15 bp, Homo sapiens
tgctctgcattccca

SEQ ID NO: 368687 - DNA, 15 bp, Homo sapiens
atgctctgcattccc

SEQ ID NO: 368688 - DNA, 15 bp, Homo sapiens
catgctctgcattcc

SEQ ID NO: 368689 - DNA, 15 bp, Homo sapiens
acatgctctgcattc

SEQ ID NO: 368690 - DNA, 15 bp, Homo sapiens
cacatgctctgcatt

SEQ ID NO: 368691 - DNA, 15 bp, Homo sapiens
acacatgctctgcat

SEQ ID NO: 368692 - DNA, 15 bp, Homo sapiens
aacacatgctctgca

SEQ ID NO: 368693 - DNA, 15 bp, Homo sapiens
caacacatgctctgc

SEQ ID NO: 368694 - DNA, 15 bp, Homo sapiens
ccaacacatgctctg

SEQ ID NO: 368695 - DNA, 15 bp, Homo sapiens
tccaacacatgctct

SEQ ID NO: 368696 - DNA, 15 bp, Homo sapiens
ttccaacacatgctc

SEQ ID NO: 368697 - DNA, 15 bp, Homo sapiens
cttccaacacatgct

SEQ ID NO: 368698 - DNA, 15 bp, Homo sapiens
gcttccaacacatgc

SEQ ID NO: 368699 - DNA, 15 bp, Homo sapiens
agcttccaacacatg

SEQ ID NO: 368700 - DNA, 15 bp, Homo sapiens
tagcttccaacacat

SEQ ID NO: 368701 - DNA, 15 bp, Homo sapiens
atagcttccaacaca

SEQ ID NO: 368702 - DNA, 15 bp, Homo sapiens
gatagcttccaacac

SEQ ID NO: 368703 - DNA, 15 bp, Homo sapiens
tgatagcttccaaca

SEQ ID NO: 368704 - DNA, 15 bp, Homo sapiens
atgatagcttccaac

SEQ ID NO: 368705 - DNA, 15 bp, Homo sapiens
gatgatagcttccaa

SEQ ID NO: 368706 - DNA, 15 bp, Homo sapiens
agatgatagcttcca

SEQ ID NO: 368707 - DNA, 15 bp, Homo sapiens
aagatgatagcttcc

SEQ ID NO: 368708 - DNA, 15 bp, Homo sapiens
aaagatgatagcttc

SEQ ID NO: 368709 - DNA, 15 bp, Homo sapiens
caaagatgatagctt

SEQ ID NO: 368710 - DNA, 15 bp, Homo sapiens
gcaaagatgatagct

SEQ ID NO: 368711 - DNA, 15 bp, Homo sapiens
tgcaaagatgatagc

SEQ ID NO: 368712 - DNA, 15 bp, Homo sapiens
ctgcaaagatgatag

SEQ ID NO: 368713 - DNA, 15 bp, Homo sapiens
gctgcaaagatgata

SEQ ID NO: 368714 - DNA, 15 bp, Homo sapiens
ggctgcaaagatgat

SEQ ID NO: 368715 - DNA, 15 bp, Homo sapiens
aggctgcaaagatga

SEQ ID NO: 368716 - DNA, 15 bp, Homo sapiens
gaggctgcaaagatg

SEQ ID NO: 368717 - DNA, 15 bp, Homo sapiens
ggaggctgcaaagat

SEQ ID NO: 368718 - DNA, 15 bp, Homo sapiens
tggaggctgcaaaga

SEQ ID NO: 368719 - DNA, 15 bp, Homo sapiens
atggaggctgcaaag

SEQ ID NO: 368720 - DNA, 15 bp, Homo sapiens
gatggaggctgcaaa

SEQ ID NO: 368721 - DNA, 15 bp, Homo sapiens
agatggaggctgcaa

SEQ ID NO: 368722 - DNA, 15 bp, Homo sapiens
cagatggaggctgca

SEQ ID NO: 368723 - DNA, 15 bp, Homo sapiens
ccagatggaggctgc

SEQ ID NO: 368724 - DNA, 15 bp, Homo sapiens
tccagatggaggctg

SEQ ID NO: 368725 - DNA, 15 bp, Homo sapiens
ctccagatggaggct

SEQ ID NO: 368726 - DNA, 15 bp, Homo sapiens
actccagatggaggc

SEQ ID NO: 368727 - DNA, 15 bp, Homo sapiens
aactccagatggagg

SEQ ID NO: 368728 - DNA, 15 bp, Homo sapiens
aaactccagatggag

SEQ ID NO: 368729 - DNA, 15 bp, Homo sapiens
gaaactccagatgga

SEQ ID NO: 368730 - DNA, 15 bp, Homo sapiens
agaaactccagatgg

SEQ ID NO: 368731 - DNA, 15 bp, Homo sapiens
cagaaactccagatg

SEQ ID NO: 368732 - DNA, 15 bp, Homo sapiens
acagaaactccagat

SEQ ID NO: 368733 - DNA, 15 bp, Homo sapiens
gacagaaactccaga

SEQ ID NO: 368734 - DNA, 15 bp, Homo sapiens
agacagaaactccag

SEQ ID NO: 368735 - DNA, 15 bp, Homo sapiens
cagacagaaactcca

SEQ ID NO: 368736 - DNA, 15 bp, Homo sapiens
ccagacagaaactcc

SEQ ID NO: 368737 - DNA, 15 bp, Homo sapiens
cccagacagaaactc

SEQ ID NO: 368738 - DNA, 15 bp, Homo sapiens
ccccagacagaaact

SEQ ID NO: 368739 - DNA, 15 bp, Homo sapiens
cccccagacagaaac

SEQ ID NO: 368740 - DNA, 15 bp, Homo sapiens
gcccccagacagaaa

SEQ ID NO: 368741 - DNA, 15 bp, Homo sapiens
agcccccagacagaa

SEQ ID NO: 368742 - DNA, 15 bp, Homo sapiens
aagcccccagacaga

SEQ ID NO: 368743 - DNA, 15 bp, Homo sapiens
aaagcccccagacag

SEQ ID NO: 368744 - DNA, 15 bp, Homo sapiens
gaaagcccccagaca

SEQ ID NO: 368745 - DNA, 15 bp, Homo sapiens
tgaaagcccccagac

SEQ ID NO: 368746 - DNA, 15 bp, Homo sapiens
atgaaagcccccaga

SEQ ID NO: 368747 - DNA, 15 bp, Homo sapiens
aatgaaagcccccag

SEQ ID NO: 368748 - DNA, 15 bp, Homo sapiens
aaatgaaagccccca

SEQ ID NO: 368749 - DNA, 15 bp, Homo sapiens
aaaatgaaagccccc

SEQ ID NO: 368750 - DNA, 15 bp, Homo sapiens
caaaatgaaagcccc

SEQ ID NO: 368751 - DNA, 15 bp, Homo sapiens
gcaaaatgaaagccc

SEQ ID NO: 368752 - DNA, 15 bp, Homo sapiens
ggcaaaatgaaagcc

SEQ ID NO: 368753 - DNA, 15 bp, Homo sapiens
aggcaaaatgaaagc

SEQ ID NO: 368754 - DNA, 15 bp, Homo sapiens
caggcaaaatgaaag

SEQ ID NO: 368755 - DNA, 15 bp, Homo sapiens
acaggcaaaatgaaa

SEQ ID NO: 368756 - DNA, 15 bp, Homo sapiens
gacaggcaaaatgaa

SEQ ID NO: 368757 - DNA, 15 bp, Homo sapiens
agacaggcaaaatga

SEQ ID NO: 368758 - DNA, 15 bp, Homo sapiens
cagacaggcaaaatg

SEQ ID NO: 368759 - DNA, 15 bp, Homo sapiens
gcagacaggcaaaat

SEQ ID NO: 368760 - DNA, 15 bp, Homo sapiens
agcagacaggcaaaa

SEQ ID NO: 368761 - DNA, 15 bp, Homo sapiens
cagcagacaggcaaa

SEQ ID NO: 368762 - DNA, 15 bp, Homo sapiens
acagcagacaggcaa

SEQ ID NO: 368763 - DNA, 15 bp, Homo sapiens
gacagcagacaggca

SEQ ID NO: 368764 - DNA, 15 bp, Homo sapiens
ggacagcagacaggc

SEQ ID NO: 368765 - DNA, 15 bp, Homo sapiens
aggacagcagacagg

SEQ ID NO: 368766 - DNA, 15 bp, Homo sapiens
caggacagcagacag

SEQ ID NO: 368767 - DNA, 15 bp, Homo sapiens
ccaggacagcagaca

SEQ ID NO: 368768 - DNA, 15 bp, Homo sapiens
accaggacagcagac

SEQ ID NO: 368769 - DNA, 15 bp, Homo sapiens
aaccaggacagcaga

SEQ ID NO: 368770 - DNA, 15 bp, Homo sapiens
aaaccaggacagcag

SEQ ID NO: 368771 - DNA, 15 bp, Homo sapiens
caaaccaggacagca

SEQ ID NO: 368772 - DNA, 15 bp, Homo sapiens
tcaaaccaggacagc

SEQ ID NO: 368773 - DNA, 15 bp, Homo sapiens
ctcaaaccaggacag

SEQ ID NO: 368774 - DNA, 15 bp, Homo sapiens
actcaaaccaggaca

SEQ ID NO: 368775 - DNA, 15 bp, Homo sapiens
cactcaaaccaggac

SEQ ID NO: 368776 - DNA, 15 bp, Homo sapiens
ccactcaaaccagga

SEQ ID NO: 368777 - DNA, 15 bp, Homo sapiens
cccactcaaaccagg

SEQ ID NO: 368778 - DNA, 15 bp, Homo sapiens
acccactcaaaccag

SEQ ID NO: 368779 - DNA, 15 bp, Homo sapiens
aacccactcaaacca

SEQ ID NO: 368780 - DNA, 15 bp, Homo sapiens
caacccactcaaacc

SEQ ID NO: 368781 - DNA, 15 bp, Homo sapiens
tcaacccactcaaac

SEQ ID NO: 368782 - DNA, 15 bp, Homo sapiens
ctcaacccactcaaa

SEQ ID NO: 368783 - DNA, 15 bp, Homo sapiens
cctcaacccactcaa

SEQ ID NO: 368784 - DNA, 15 bp, Homo sapiens
ccctcaacccactca

SEQ ID NO: 368785 - DNA, 15 bp, Homo sapiens
tccctcaacccactc

SEQ ID NO: 368786 - DNA, 15 bp, Homo sapiens
ctccctcaacccact

SEQ ID NO: 368787 - DNA, 15 bp, Homo sapiens
gctccctcaacccac

SEQ ID NO: 368788 - DNA, 15 bp, Homo sapiens
tgctccctcaaccca

SEQ ID NO: 368789 - DNA, 15 bp, Homo sapiens
ctgctccctcaaccc

SEQ ID NO: 368790 - DNA, 15 bp, Homo sapiens
gctgctccctcaacc

SEQ ID NO: 368791 - DNA, 15 bp, Homo sapiens
tgctgctccctcaac

SEQ ID NO: 368792 - DNA, 15 bp, Homo sapiens
atgctgctccctcaa

SEQ ID NO: 368793 - DNA, 15 bp, Homo sapiens
gatgctgctccctca

SEQ ID NO: 368794 - DNA, 15 bp, Homo sapiens
agatgctgctccctc

SEQ ID NO: 368795 - DNA, 15 bp, Homo sapiens
gagatgctgctccct

SEQ ID NO: 368796 - DNA, 15 bp, Homo sapiens
ggagatgctgctccc

SEQ ID NO: 368797 - DNA, 15 bp, Homo sapiens
gggagatgctgctcc

SEQ ID NO: 368798 - DNA, 15 bp, Homo sapiens
agggagatgctgctc

SEQ ID NO: 368799 - DNA, 15 bp, Homo sapiens
aagggagatgctgct

SEQ ID NO: 368800 - DNA, 15 bp, Homo sapiens
caagggagatgctgc

SEQ ID NO: 368801 - DNA, 15 bp, Homo sapiens
acaagggagatgctg

SEQ ID NO: 368802 - DNA, 15 bp, Homo sapiens
cacaagggagatgct

SEQ ID NO: 368803 - DNA, 15 bp, Homo sapiens
tcacaagggagatgc

SEQ ID NO: 368804 - DNA, 15 bp, Homo sapiens
ctcacaagggagatg

SEQ ID NO: 368805 - DNA, 15 bp, Homo sapiens
actcacaagggagat

SEQ ID NO: 368806 - DNA, 15 bp, Homo sapiens
aactcacaagggaga

SEQ ID NO: 368807 - DNA, 15 bp, Homo sapiens
caactcacaagggag

SEQ ID NO: 368808 - DNA, 15 bp, Homo sapiens
acaactcacaaggga

SEQ ID NO: 368809 - DNA, 15 bp, Homo sapiens
tacaactcacaaggg

SEQ ID NO: 368810 - DNA, 15 bp, Homo sapiens
ctacaactcacaagg

SEQ ID NO: 368811 - DNA, 15 bp, Homo sapiens
cctacaactcacaag

SEQ ID NO: 368812 - DNA, 15 bp, Homo sapiens
acctacaactcacaa

SEQ ID NO: 368813 - DNA, 15 bp, Homo sapiens
aacctacaactcaca

SEQ ID NO: 368814 - DNA, 15 bp, Homo sapiens
taacctacaactcac

SEQ ID NO: 368815 - DNA, 15 bp, Homo sapiens
ataacctacaactca

SEQ ID NO: 368816 - DNA, 15 bp, Homo sapiens
aataacctacaactc

SEQ ID NO: 368817 - DNA, 15 bp, Homo sapiens
gaataacctacaact

SEQ ID NO: 368818 - DNA, 15 bp, Homo sapiens
tgaataacctacaac

SEQ ID NO: 368819 - DNA, 15 bp, Homo sapiens
ctgaataacctacaa

SEQ ID NO: 368820 - DNA, 15 bp, Homo sapiens
gctgaataacctaca

SEQ ID NO: 368821 - DNA, 15 bp, Homo sapiens
agctgaataacctac

SEQ ID NO: 368822 - DNA, 15 bp, Homo sapiens
cagctgaataaccta

SEQ ID NO: 368823 - DNA, 15 bp, Homo sapiens
gcagctgaataacct

SEQ ID NO: 368824 - DNA, 15 bp, Homo sapiens
tgcagctgaataacc

SEQ ID NO: 368825 - DNA, 15 bp, Homo sapiens
ctgcagctgaataac

SEQ ID NO: 368826 - DNA, 15 bp, Homo sapiens
tctgcagctgaataa

SEQ ID NO: 368827 - DNA, 15 bp, Homo sapiens
gtctgcagctgaata

SEQ ID NO: 368828 - DNA, 15 bp, Homo sapiens
agtctgcagctgaat

SEQ ID NO: 368829 - DNA, 15 bp, Homo sapiens
gagtctgcagctgaa

SEQ ID NO: 368830 - DNA, 15 bp, Homo sapiens
tgagtctgcagctga

SEQ ID NO: 368831 - DNA, 15 bp, Homo sapiens
atgagtctgcagctg

SEQ ID NO: 368832 - DNA, 15 bp, Homo sapiens
gatgagtctgcagct

SEQ ID NO: 368833 - DNA, 15 bp, Homo sapiens
agatgagtctgcagc

SEQ ID NO: 368834 - DNA, 15 bp, Homo sapiens
aagatgagtctgcag

SEQ ID NO: 368835 - DNA, 15 bp, Homo sapiens
gaagatgagtctgca

SEQ ID NO: 368836 - DNA, 15 bp, Homo sapiens
agaagatgagtctgc

SEQ ID NO: 368837 - DNA, 15 bp, Homo sapiens
tagaagatgagtctg

SEQ ID NO: 368838 - DNA, 15 bp, Homo sapiens
ctagaagatgagtct

SEQ ID NO: 368839 - DNA, 15 bp, Homo sapiens
gctagaagatgagtc

SEQ ID NO: 368840 - DNA, 15 bp, Homo sapiens
ggctagaagatgagt

SEQ ID NO: 368841 - DNA, 15 bp, Homo sapiens
aggctagaagatgag

SEQ ID NO: 368842 - DNA, 15 bp, Homo sapiens
gaggctagaagatga

SEQ ID NO: 368843 - DNA, 15 bp, Homo sapiens
ggaggctagaagatg

SEQ ID NO: 368844 - DNA, 15 bp, Homo sapiens
aggaggctagaagat

SEQ ID NO: 368845 - DNA, 15 bp, Homo sapiens
gaggaggctagaaga

SEQ ID NO: 368846 - DNA, 15 bp, Homo sapiens
ggaggaggctagaag

SEQ ID NO: 368847 - DNA, 15 bp, Homo sapiens
aggaggaggctagaa

SEQ ID NO: 368848 - DNA, 15 bp, Homo sapiens
aaggaggaggctaga

SEQ ID NO: 368849 - DNA, 15 bp, Homo sapiens
aaaggaggaggctag

SEQ ID NO: 368850 - DNA, 15 bp, Homo sapiens
taaaggaggaggcta

SEQ ID NO: 368851 - DNA, 15 bp, Homo sapiens
ataaaggaggaggct

SEQ ID NO: 368852 - DNA, 15 bp, Homo sapiens
tataaaggaggaggc

SEQ ID NO: 368853 - DNA, 15 bp, Homo sapiens
atataaaggaggagg

SEQ ID NO: 368854 - DNA, 15 bp, Homo sapiens
tatataaaggaggag

SEQ ID NO: 368855 - DNA, 15 bp, Homo sapiens
atatataaaggagga

SEQ ID NO: 368856 - DNA, 15 bp, Homo sapiens
catatataaaggagg

SEQ ID NO: 368857 - DNA, 15 bp, Homo sapiens
tcatatataaaggag

SEQ ID NO: 368858 - DNA, 15 bp, Homo sapiens
ttcatatataaagga

SEQ ID NO: 368859 - DNA, 15 bp, Homo sapiens
attcatatataaagg

SEQ ID NO: 368860 - DNA, 15 bp, Homo sapiens
cattcatatataaag

SEQ ID NO: 368861 - DNA, 15 bp, Homo sapiens
acattcatatataaa

SEQ ID NO: 368862 - DNA, 15 bp, Homo sapiens
gacattcatatataa

SEQ ID NO: 368863 - DNA, 15 bp, Homo sapiens
agacattcatatata

SEQ ID NO: 368864 - DNA, 15 bp, Homo sapiens
cagacattcatatat

SEQ ID NO: 368865 - DNA, 15 bp, Homo sapiens
ccagacattcatata

SEQ ID NO: 368866 - DNA, 15 bp, Homo sapiens
tccagacattcatat

SEQ ID NO: 368867 - DNA, 15 bp, Homo sapiens
ctccagacattcata

SEQ ID NO: 368868 - DNA, 15 bp, Homo sapiens
gctccagacattcat

SEQ ID NO: 368869 - DNA, 15 bp, Homo sapiens
agctccagacattca

SEQ ID NO: 368870 - DNA, 15 bp, Homo sapiens
cagctccagacattc

SEQ ID NO: 368871 - DNA, 15 bp, Homo sapiens
ccagctccagacatt

SEQ ID NO: 368872 - DNA, 15 bp, Homo sapiens
gccagctccagacat

SEQ ID NO: 368873 - DNA, 15 bp, Homo sapiens
agccagctccagaca

SEQ ID NO: 368874 - DNA, 15 bp, Homo sapiens
cagccagctccagac

SEQ ID NO: 368875 - DNA, 15 bp, Homo sapiens
ccagccagctccaga

SEQ ID NO: 368876 - DNA, 15 bp, Homo sapiens
cccagccagctccag

SEQ ID NO: 368877 - DNA, 15 bp, Homo sapiens
gcccagccagctcca

SEQ ID NO: 368878 - DNA, 15 bp, Homo sapiens
ggcccagccagctcc

SEQ ID NO: 368879 - DNA, 15 bp, Homo sapiens
aggcccagccagctc

SEQ ID NO: 368880 - DNA, 15 bp, Homo sapiens
gaggcccagccagct

SEQ ID NO: 368881 - DNA, 15 bp, Homo sapiens
tgaggcccagccagc

SEQ ID NO: 368882 - DNA, 15 bp, Homo sapiens
ctgaggcccagccag

SEQ ID NO: 368883 - DNA, 15 bp, Homo sapiens
gctgaggcccagcca

SEQ ID NO: 368884 - DNA, 15 bp, Homo sapiens
ggctgaggcccagcc

SEQ ID NO: 368885 - DNA, 15 bp, Homo sapiens
tggctgaggcccagc

SEQ ID NO: 368886 - DNA, 15 bp, Homo sapiens
atggctgaggcccag

SEQ ID NO: 368887 - DNA, 15 bp, Homo sapiens
tatggctgaggccca

SEQ ID NO: 368888 - DNA, 15 bp, Homo sapiens
atatggctgaggccc

SEQ ID NO: 368889 - DNA, 15 bp, Homo sapiens
catatggctgaggcc

SEQ ID NO: 368890 - DNA, 15 bp, Homo sapiens
ccatatggctgaggc

SEQ ID NO: 368891 - DNA, 15 bp, Homo sapiens
tccatatggctgagg

SEQ ID NO: 368892 - DNA, 15 bp, Homo sapiens
gtccatatggctgag

SEQ ID NO: 368893 - DNA, 15 bp, Homo sapiens
ggtccatatggctga

SEQ ID NO: 368894 - DNA, 15 bp, Homo sapiens
aggtccatatggctg

SEQ ID NO: 368895 - DNA, 15 bp, Homo sapiens
caggtccatatggct

SEQ ID NO: 368896 - DNA, 15 bp, Homo sapiens
gcaggtccatatggc

SEQ ID NO: 368897 - DNA, 15 bp, Homo sapiens
ggcaggtccatatgg

SEQ ID NO: 368898 - DNA, 15 bp, Homo sapiens
gggcaggtccatatg

SEQ ID NO: 368899 - DNA, 15 bp, Homo sapiens
tgggcaggtccatat

SEQ ID NO: 368900 - DNA, 15 bp, Homo sapiens
ctgggcaggtccata

SEQ ID NO: 368901 - DNA, 15 bp, Homo sapiens
actgggcaggtccat

SEQ ID NO: 368902 - DNA, 15 bp, Homo sapiens
aactgggcaggtcca

SEQ ID NO: 368903 - DNA, 15 bp, Homo sapiens
taactgggcaggtcc

SEQ ID NO: 368904 - DNA, 15 bp, Homo sapiens
ctaactgggcaggtc

SEQ ID NO: 368905 - DNA, 15 bp, Homo sapiens
cctaactgggcaggt

SEQ ID NO: 368906 - DNA, 15 bp, Homo sapiens
ccctaactgggcagg

SEQ ID NO: 368907 - DNA, 15 bp, Homo sapiens
accctaactgggcag

SEQ ID NO: 368908 - DNA, 15 bp, Homo sapiens
taccctaactgggca

SEQ ID NO: 368909 - DNA, 15 bp, Homo sapiens
ctaccctaactgggc

SEQ ID NO: 368910 - DNA, 15 bp, Homo sapiens
cctaccctaactggg

SEQ ID NO: 368911 - DNA, 15 bp, Homo sapiens
ccctaccctaactgg

SEQ ID NO: 368912 - DNA, 15 bp, Homo sapiens
tccctaccctaactg

SEQ ID NO: 368913 - DNA, 15 bp, Homo sapiens
atccctaccctaact

SEQ ID NO: 368914 - DNA, 15 bp, Homo sapiens
aatccctaccctaac

SEQ ID NO: 368915 - DNA, 15 bp, Homo sapiens
caatccctaccctaa

SEQ ID NO: 368916 - DNA, 15 bp, Homo sapiens
ccaatccctacccta

SEQ ID NO: 368917 - DNA, 15 bp, Homo sapiens
tccaatccctaccct

SEQ ID NO: 368918 - DNA, 15 bp, Homo sapiens
ttccaatccctaccc

SEQ ID NO: 368919 - DNA, 15 bp, Homo sapiens
cttccaatccctacc

SEQ ID NO: 368920 - DNA, 15 bp, Homo sapiens
gcttccaatccctac

SEQ ID NO: 368921 - DNA, 15 bp, Homo sapiens
ggcttccaatcccta

SEQ ID NO: 368922 - DNA, 15 bp, Homo sapiens
tggcttccaatccct

SEQ ID NO: 368923 - DNA, 15 bp, Homo sapiens
ctggcttccaatccc

SEQ ID NO: 368924 - DNA, 15 bp, Homo sapiens
gctggcttccaatcc

SEQ ID NO: 368925 - DNA, 15 bp, Homo sapiens
tgctggcttccaatc

SEQ ID NO: 368926 - DNA, 15 bp, Homo sapiens
ttgctggcttccaat

SEQ ID NO: 368927 - DNA, 15 bp, Homo sapiens
gttgctggcttccaa

SEQ ID NO: 368928 - DNA, 15 bp, Homo sapiens
ggttgctggcttcca

SEQ ID NO: 368929 - DNA, 15 bp, Homo sapiens
tggttgctggcttcc

SEQ ID NO: 368930 - DNA, 15 bp, Homo sapiens
gtggttgctggcttc

SEQ ID NO: 368931 - DNA, 15 bp, Homo sapiens
agtggttgctggctt

SEQ ID NO: 368932 - DNA, 15 bp, Homo sapiens
aagtggttgctggct

SEQ ID NO: 368933 - DNA, 15 bp, Homo sapiens
caagtggttgctggc

SEQ ID NO: 368934 - DNA, 15 bp, Homo sapiens
acaagtggttgctgg

SEQ ID NO: 368935 - DNA, 15 bp, Homo sapiens
tacaagtggttgctg

SEQ ID NO: 368936 - DNA, 15 bp, Homo sapiens
ctacaagtggttgct

SEQ ID NO: 368937 - DNA, 15 bp, Homo sapiens
actacaagtggttgc

SEQ ID NO: 368938 - DNA, 15 bp, Homo sapiens
aactacaagtggttg

SEQ ID NO: 368939 - DNA, 15 bp, Homo sapiens
taactacaagtggtt

SEQ ID NO: 368940 - DNA, 15 bp, Homo sapiens
ataactacaagtggt

SEQ ID NO: 368941 - DNA, 15 bp, Homo sapiens
aataactacaagtgg

SEQ ID NO: 368942 - DNA, 15 bp, Homo sapiens
aaataactacaagtg

SEQ ID NO: 368943 - DNA, 15 bp, Homo sapiens
taaataactacaagt

SEQ ID NO: 368944 - DNA, 15 bp, Homo sapiens
ttaaataactacaag

SEQ ID NO: 368945 - DNA, 15 bp, Homo sapiens
tttaaataactacaa

SEQ ID NO: 368946 - DNA, 15 bp, Homo sapiens
gtttaaataactaca

SEQ ID NO: 368947 - DNA, 15 bp, Homo sapiens
agtttaaataactac

SEQ ID NO: 368948 - DNA, 15 bp, Homo sapiens
aagtttaaataacta

SEQ ID NO: 368949 - DNA, 15 bp, Homo sapiens
gaagtttaaataact

SEQ ID NO: 368950 - DNA, 15 bp, Homo sapiens
tgaagtttaaataac

SEQ ID NO: 368951 - DNA, 15 bp, Homo sapiens
ttgaagtttaaataa

SEQ ID NO: 368952 - DNA, 15 bp, Homo sapiens
tttgaagtttaaata

SEQ ID NO: 368953 - DNA, 15 bp, Homo sapiens
ttttgaagtttaaat

SEQ ID NO: 368954 - DNA, 15 bp, Homo sapiens
cttttgaagtttaaa

SEQ ID NO: 368955 - DNA, 15 bp, Homo sapiens
tcttttgaagtttaa

SEQ ID NO: 368956 - DNA, 15 bp, Homo sapiens
ttcttttgaagttta

SEQ ID NO: 368957 - DNA, 15 bp, Homo sapiens
cttcttttgaagttt

SEQ ID NO: 368958 - DNA, 15 bp, Homo sapiens
acttcttttgaagtt

SEQ ID NO: 368959 - DNA, 15 bp, Homo sapiens
cacttcttttgaagt

SEQ ID NO: 368960 - DNA, 15 bp, Homo sapiens
gcacttcttttgaag

SEQ ID NO: 368961 - DNA, 15 bp, Homo sapiens
agcacttcttttgaa

SEQ ID NO: 368962 - DNA, 15 bp, Homo sapiens
gagcacttcttttga

SEQ ID NO: 368963 - DNA, 15 bp, Homo sapiens
ggagcacttcttttg

SEQ ID NO: 368964 - DNA, 15 bp, Homo sapiens
gggagcacttctttt

SEQ ID NO: 368965 - DNA, 15 bp, Homo sapiens
tgggagcacttcttt

SEQ ID NO: 368966 - DNA, 15 bp, Homo sapiens
atgggagcacttctt

SEQ ID NO: 368967 - DNA, 15 bp, Homo sapiens
catgggagcacttct

SEQ ID NO: 368968 - DNA, 15 bp, Homo sapiens
ccatgggagcacttc

SEQ ID NO: 368969 - DNA, 15 bp, Homo sapiens
tccatgggagcactt

SEQ ID NO: 368970 - DNA, 15 bp, Homo sapiens
atccatgggagcact

SEQ ID NO: 368971 - DNA, 15 bp, Homo sapiens
gatccatgggagcac

SEQ ID NO: 368972 - DNA, 15 bp, Homo sapiens
agatccatgggagca

SEQ ID NO: 368973 - DNA, 15 bp, Homo sapiens
gagatccatgggagc

SEQ ID NO: 368974 - DNA, 15 bp, Homo sapiens
tgagatccatgggag

SEQ ID NO: 368975 - DNA, 15 bp, Homo sapiens
ttgagatccatggga

SEQ ID NO: 368976 - DNA, 15 bp, Homo sapiens
cttgagatccatggg

SEQ ID NO: 368977 - DNA, 15 bp, Homo sapiens
ccttgagatccatgg

SEQ ID NO: 368978 - DNA, 15 bp, Homo sapiens
tccttgagatccatg

SEQ ID NO: 368979 - DNA, 15 bp, Homo sapiens
ctccttgagatccat

SEQ ID NO: 368980 - DNA, 15 bp, Homo sapiens
cctccttgagatcca

SEQ ID NO: 368981 - DNA, 15 bp, Homo sapiens
ccctccttgagatcc

SEQ ID NO: 368982 - DNA, 15 bp, Homo sapiens
tccctccttgagatc

SEQ ID NO: 368983 - DNA, 15 bp, Homo sapiens
ctccctccttgagat

SEQ ID NO: 368984 - DNA, 15 bp, Homo sapiens
cctccctccttgaga

SEQ ID NO: 368985 - DNA, 15 bp, Homo sapiens
acctccctccttgag

SEQ ID NO: 368986 - DNA, 15 bp, Homo sapiens
tacctccctccttga

SEQ ID NO: 368987 - DNA, 15 bp, Homo sapiens
ctacctccctccttg

SEQ ID NO: 368988 - DNA, 15 bp, Homo sapiens
cctacctccctcctt

SEQ ID NO: 368989 - DNA, 15 bp, Homo sapiens
tcctacctccctcct

SEQ ID NO: 368990 - DNA, 15 bp, Homo sapiens
ctcctacctccctcc

SEQ ID NO: 368991 - DNA, 15 bp, Homo sapiens
cctcctacctccctc

SEQ ID NO: 368992 - DNA, 15 bp, Homo sapiens
gcctcctacctccct

SEQ ID NO: 368993 - DNA, 15 bp, Homo sapiens
tgcctcctacctccc

SEQ ID NO: 368994 - DNA, 15 bp, Homo sapiens
ctgcctcctacctcc

SEQ ID NO: 368995 - DNA, 15 bp, Homo sapiens
actgcctcctacctc

SEQ ID NO: 368996 - DNA, 15 bp, Homo sapiens
cactgcctcctacct

SEQ ID NO: 368997 - DNA, 15 bp, Homo sapiens
ccactgcctcctacc

SEQ ID NO: 368998 - DNA, 15 bp, Homo sapiens
tccactgcctcctac

SEQ ID NO: 368999 - DNA, 15 bp, Homo sapiens
ctccactgcctccta

SEQ ID NO: 369000 - DNA, 15 bp, Homo sapiens
tctccactgcctcct

SEQ ID NO: 369001 - DNA, 15 bp, Homo sapiens
gtctccactgcctcc

SEQ ID NO: 369002 - DNA, 15 bp, Homo sapiens
tgtctccactgcctc

SEQ ID NO: 369003 - DNA, 15 bp, Homo sapiens
ctgtctccactgcct

SEQ ID NO: 369004 - DNA, 15 bp, Homo sapiens
tctgtctccactgcc

SEQ ID NO: 369005 - DNA, 15 bp, Homo sapiens
ttctgtctccactgc

SEQ ID NO: 369006 - DNA, 15 bp, Homo sapiens
cttctgtctccactg

SEQ ID NO: 369007 - DNA, 15 bp, Homo sapiens
acttctgtctccact

SEQ ID NO: 369008 - DNA, 15 bp, Homo sapiens
cacttctgtctccac

SEQ ID NO: 369009 - DNA, 15 bp, Homo sapiens
gcacttctgtctcca

SEQ ID NO: 369010 - DNA, 15 bp, Homo sapiens
agcacttctgtctcc

SEQ ID NO: 369011 - DNA, 15 bp, Homo sapiens
gagcacttctgtctc

SEQ ID NO: 369012 - DNA, 15 bp, Homo sapiens
tgagcacttctgtct

SEQ ID NO: 369013 - DNA, 15 bp, Homo sapiens
gtgagcacttctgtc

SEQ ID NO: 369014 - DNA, 15 bp, Homo sapiens
cgtgagcacttctgt

SEQ ID NO: 369015 - DNA, 15 bp, Homo sapiens
acgtgagcacttctg

SEQ ID NO: 369016 - DNA, 15 bp, Homo sapiens
cacgtgagcacttct

SEQ ID NO: 369017 - DNA, 15 bp, Homo sapiens
acacgtgagcacttc

SEQ ID NO: 369018 - DNA, 15 bp, Homo sapiens
gacacgtgagcactt

SEQ ID NO: 369019 - DNA, 15 bp, Homo sapiens
ggacacgtgagcact

SEQ ID NO: 369020 - DNA, 15 bp, Homo sapiens
aggacacgtgagcac

SEQ ID NO: 369021 - DNA, 15 bp, Homo sapiens
caggacacgtgagca

SEQ ID NO: 369022 - DNA, 15 bp, Homo sapiens
ccaggacacgtgagc

SEQ ID NO: 369023 - DNA, 15 bp, Homo sapiens
cccaggacacgtgag

SEQ ID NO: 369024 - DNA, 15 bp, Homo sapiens
tcccaggacacgtga

SEQ ID NO: 369025 - DNA, 15 bp, Homo sapiens
ttcccaggacacgtg

SEQ ID NO: 369026 - DNA, 15 bp, Homo sapiens
tttcccaggacacgt

SEQ ID NO: 369027 - DNA, 15 bp, Homo sapiens
gtttcccaggacacg

SEQ ID NO: 369028 - DNA, 15 bp, Homo sapiens
agtttcccaggacac

SEQ ID NO: 369029 - DNA, 15 bp, Homo sapiens
gagtttcccaggaca

SEQ ID NO: 369030 - DNA, 15 bp, Homo sapiens
ggagtttcccaggac

SEQ ID NO: 369031 - DNA, 15 bp, Homo sapiens
tggagtttcccagga

SEQ ID NO: 369032 - DNA, 15 bp, Homo sapiens
atggagtttcccagg

SEQ ID NO: 369033 - DNA, 15 bp, Homo sapiens
gatggagtttcccag

SEQ ID NO: 369034 - DNA, 15 bp, Homo sapiens
agatggagtttccca

SEQ ID NO: 369035 - DNA, 15 bp, Homo sapiens
gagatggagtttccc

SEQ ID NO: 369036 - DNA, 15 bp, Homo sapiens
agagatggagtttcc

SEQ ID NO: 369037 - DNA, 15 bp, Homo sapiens
aagagatggagtttc

SEQ ID NO: 369038 - DNA, 15 bp, Homo sapiens
caagagatggagttt

SEQ ID NO: 369039 - DNA, 15 bp, Homo sapiens
ccaagagatggagtt

SEQ ID NO: 369040 - DNA, 15 bp, Homo sapiens
gccaagagatggagt

SEQ ID NO: 369041 - DNA, 15 bp, Homo sapiens
agccaagagatggag

SEQ ID NO: 369042 - DNA, 15 bp, Homo sapiens
cagccaagagatgga

SEQ ID NO: 369043 - DNA, 15 bp, Homo sapiens
acagccaagagatgg

SEQ ID NO: 369044 - DNA, 15 bp, Homo sapiens
cacagccaagagatg

SEQ ID NO: 369045 - DNA, 15 bp, Homo sapiens
gcacagccaagagat

SEQ ID NO: 369046 - DNA, 15 bp, Homo sapiens
cgcacagccaagaga

SEQ ID NO: 369047 - DNA, 15 bp, Homo sapiens
tcgcacagccaagag

SEQ ID NO: 369048 - DNA, 15 bp, Homo sapiens
ttcgcacagccaaga

SEQ ID NO: 369049 - DNA, 15 bp, Homo sapiens
cttcgcacagccaag

SEQ ID NO: 369050 - DNA, 15 bp, Homo sapiens
acttcgcacagccaa

SEQ ID NO: 369051 - DNA, 15 bp, Homo sapiens
gacttcgcacagcca

SEQ ID NO: 369052 - DNA, 15 bp, Homo sapiens
tgacttcgcacagcc

SEQ ID NO: 369053 - DNA, 15 bp, Homo sapiens
atgacttcgcacagc

SEQ ID NO: 369054 - DNA, 15 bp, Homo sapiens
catgacttcgcacag

SEQ ID NO: 369055 - DNA, 15 bp, Homo sapiens
gcatgacttcgcaca

SEQ ID NO: 369056 - DNA, 15 bp, Homo sapiens
agcatgacttcgcac

SEQ ID NO: 369057 - DNA, 15 bp, Homo sapiens
aagcatgacttcgca

SEQ ID NO: 369058 - DNA, 15 bp, Homo sapiens
caagcatgacttcgc

SEQ ID NO: 369059 - DNA, 15 bp, Homo sapiens
acaagcatgacttcg

SEQ ID NO: 369060 - DNA, 15 bp, Homo sapiens
aacaagcatgacttc

SEQ ID NO: 369061 - DNA, 15 bp, Homo sapiens
caacaagcatgactt

SEQ ID NO: 369062 - DNA, 15 bp, Homo sapiens
ccaacaagcatgact

SEQ ID NO: 369063 - DNA, 15 bp, Homo sapiens
tccaacaagcatgac

SEQ ID NO: 369064 - DNA, 15 bp, Homo sapiens
ctccaacaagcatga

SEQ ID NO: 369065 - DNA, 15 bp, Homo sapiens
tctccaacaagcatg

SEQ ID NO: 369066 - DNA, 15 bp, Homo sapiens
ctctccaacaagcat

SEQ ID NO: 369067 - DNA, 15 bp, Homo sapiens
tctctccaacaagca

SEQ ID NO: 369068 - DNA, 15 bp, Homo sapiens
gtctctccaacaagc

SEQ ID NO: 369069 - DNA, 15 bp, Homo sapiens
ggtctctccaacaag

SEQ ID NO: 369070 - DNA, 15 bp, Homo sapiens
gggtctctccaacaa

SEQ ID NO: 369071 - DNA, 15 bp, Homo sapiens
cgggtctctccaaca

SEQ ID NO: 369072 - DNA, 15 bp, Homo sapiens
ccgggtctctccaac

SEQ ID NO: 369073 - DNA, 15 bp, Homo sapiens
gccgggtctctccaa

SEQ ID NO: 369074 - DNA, 15 bp, Homo sapiens
tgccgggtctctcca

SEQ ID NO: 369075 - DNA, 15 bp, Homo sapiens
gtgccgggtctctcc

SEQ ID NO: 369076 - DNA, 15 bp, Homo sapiens
ggtgccgggtctctc

SEQ ID NO: 369077 - DNA, 15 bp, Homo sapiens
tggtgccgggtctct

SEQ ID NO: 369078 - DNA, 15 bp, Homo sapiens
atggtgccgggtctc

SEQ ID NO: 369079 - DNA, 15 bp, Homo sapiens
aggccgggcgcagtg

SEQ ID NO: 369080 - DNA, 15 bp, Homo sapiens
gaggccgggcgcagt

SEQ ID NO: 369081 - DNA, 15 bp, Homo sapiens
agaggccgggcgcag

SEQ ID NO: 369082 - DNA, 15 bp, Homo sapiens
aagaggccgggcgca

SEQ ID NO: 369083 - DNA, 15 bp, Homo sapiens
aaagaggccgggcgc

SEQ ID NO: 369084 - DNA, 15 bp, Homo sapiens
caaagaggccgggcg

SEQ ID NO: 369085 - DNA, 15 bp, Homo sapiens
gcaaagaggccgggc

SEQ ID NO: 369086 - DNA, 15 bp, Homo sapiens
agcaaagaggccggg

SEQ ID NO: 369087 - DNA, 15 bp, Homo sapiens
gagcaaagaggccgg

SEQ ID NO: 369088 - DNA, 15 bp, Homo sapiens
ggagcaaagaggccg

SEQ ID NO: 369089 - DNA, 15 bp, Homo sapiens
aggagcaaagaggcc

SEQ ID NO: 369090 - DNA, 15 bp, Homo sapiens
aaggagcaaagaggc

SEQ ID NO: 369091 - DNA, 15 bp, Homo sapiens
aaaggagcaaagagg

SEQ ID NO: 369092 - DNA, 15 bp, Homo sapiens
taaaggagcaaagag

SEQ ID NO: 369093 - DNA, 15 bp, Homo sapiens
ataaaggagcaaaga

SEQ ID NO: 369094 - DNA, 15 bp, Homo sapiens
aataaaggagcaaag

SEQ ID NO: 369095 - DNA, 15 bp, Homo sapiens
taataaaggagcaaa

SEQ ID NO: 369096 - DNA, 15 bp, Homo sapiens
ataataaaggagcaa

SEQ ID NO: 369097 - DNA, 15 bp, Homo sapiens
aataataaaggagca

SEQ ID NO: 369098 - DNA, 15 bp, Homo sapiens
caataataaaggagc

SEQ ID NO: 369099 - DNA, 15 bp, Homo sapiens
acaataataaaggag

SEQ ID NO: 369100 - DNA, 15 bp, Homo sapiens
aacaataataaagga

SEQ ID NO: 369101 - DNA, 15 bp, Homo sapiens
caacaataataaagg

SEQ ID NO: 369102 - DNA, 15 bp, Homo sapiens
acaacaataataaag

SEQ ID NO: 369103 - DNA, 15 bp, Homo sapiens
aacaacaataataaa

SEQ ID NO: 369104 - DNA, 15 bp, Homo sapiens
taacaacaataataa

SEQ ID NO: 369105 - DNA, 15 bp, Homo sapiens
gtaacaacaataata

SEQ ID NO: 369106 - DNA, 15 bp, Homo sapiens
agtaacaacaataat

SEQ ID NO: 369107 - DNA, 15 bp, Homo sapiens
cagtaacaacaataa

SEQ ID NO: 369108 - DNA, 15 bp, Homo sapiens
acagtaacaacaata

SEQ ID NO: 369109 - DNA, 15 bp, Homo sapiens
cacagtaacaacaat

SEQ ID NO: 369110 - DNA, 15 bp, Homo sapiens
acacagtaacaacaa

SEQ ID NO: 369111 - DNA, 15 bp, Homo sapiens
gacacagtaacaaca

SEQ ID NO: 369112 - DNA, 15 bp, Homo sapiens
tgacacagtaacaac

SEQ ID NO: 369113 - DNA, 15 bp, Homo sapiens
atgacacagtaacaa

SEQ ID NO: 369114 - DNA, 15 bp, Homo sapiens
tatgacacagtaaca

SEQ ID NO: 369115 - DNA, 15 bp, Homo sapiens
ttatgacacagtaac

SEQ ID NO: 369116 - DNA, 15 bp, Homo sapiens
attatgacacagtaa

SEQ ID NO: 369117 - DNA, 15 bp, Homo sapiens
aattatgacacagta

SEQ ID NO: 369118 - DNA, 15 bp, Homo sapiens
gaattatgacacagt

SEQ ID NO: 369119 - DNA, 15 bp, Homo sapiens
ggaattatgacacag

SEQ ID NO: 369120 - DNA, 15 bp, Homo sapiens
aggaattatgacaca

SEQ ID NO: 369121 - DNA, 15 bp, Homo sapiens
aaggaattatgacac

SEQ ID NO: 369122 - DNA, 15 bp, Homo sapiens
caaggaattatgaca

SEQ ID NO: 369123 - DNA, 15 bp, Homo sapiens
gcaaggaattatgac

SEQ ID NO: 369124 - DNA, 15 bp, Homo sapiens
tgcaaggaattatga

SEQ ID NO: 369125 - DNA, 15 bp, Homo sapiens
ctgcaaggaattatg

SEQ ID NO: 369126 - DNA, 15 bp, Homo sapiens
tctgcaaggaattat

SEQ ID NO: 369127 - DNA, 15 bp, Homo sapiens
ttctgcaaggaatta

SEQ ID NO: 369128 - DNA, 15 bp, Homo sapiens
attctgcaaggaatt

SEQ ID NO: 369129 - DNA, 15 bp, Homo sapiens
aattctgcaaggaat

SEQ ID NO: 369130 - DNA, 15 bp, Homo sapiens
taattctgcaaggaa

SEQ ID NO: 369131 - DNA, 15 bp, Homo sapiens
ataattctgcaagga

SEQ ID NO: 369132 - DNA, 15 bp, Homo sapiens
cataattctgcaagg

SEQ ID NO: 369133 - DNA, 15 bp, Homo sapiens
tcataattctgcaag

SEQ ID NO: 369134 - DNA, 15 bp, Homo sapiens
atcataattctgcaa

SEQ ID NO: 369135 - DNA, 15 bp, Homo sapiens
catcataattctgca

SEQ ID NO: 369136 - DNA, 15 bp, Homo sapiens
ccatcataattctgc

SEQ ID NO: 369137 - DNA, 15 bp, Homo sapiens
gccatcataattctg

SEQ ID NO: 369138 - DNA, 15 bp, Homo sapiens
ggccatcataattct

SEQ ID NO: 369139 - DNA, 15 bp, Homo sapiens
tggccatcataattc

SEQ ID NO: 369140 - DNA, 15 bp, Homo sapiens
ctggccatcataatt

SEQ ID NO: 369141 - DNA, 15 bp, Homo sapiens
cctggccatcataat

SEQ ID NO: 369142 - DNA, 15 bp, Homo sapiens
gcctggccatcataa

SEQ ID NO: 369143 - DNA, 15 bp, Homo sapiens
agcctggccatcata

SEQ ID NO: 369144 - DNA, 15 bp, Homo sapiens
cagcctggccatcat

SEQ ID NO: 369145 - DNA, 15 bp, Homo sapiens
ccagcctggccatca

SEQ ID NO: 369146 - DNA, 15 bp, Homo sapiens
accagcctggccatc

SEQ ID NO: 369147 - DNA, 15 bp, Homo sapiens
gaccagcctggccat

SEQ ID NO: 369148 - DNA, 15 bp, Homo sapiens
aaagaccagcctggc

SEQ ID NO: 369149 - DNA, 15 bp, Homo sapiens
taaagaccagcctgg

SEQ ID NO: 369150 - DNA, 15 bp, Homo sapiens
gtaaagaccagcctg

SEQ ID NO: 369151 - DNA, 15 bp, Homo sapiens
agtaaagaccagcct

SEQ ID NO: 369152 - DNA, 15 bp, Homo sapiens
aagtaaagaccagcc

SEQ ID NO: 369153 - DNA, 15 bp, Homo sapiens
gaagtaaagaccagc

SEQ ID NO: 369154 - DNA, 15 bp, Homo sapiens
ggaagtaaagaccag

SEQ ID NO: 369155 - DNA, 15 bp, Homo sapiens
aggaagtaaagacca

SEQ ID NO: 369156 - DNA, 15 bp, Homo sapiens
aaggaagtaaagacc

SEQ ID NO: 369157 - DNA, 15 bp, Homo sapiens
gaaggaagtaaagac

SEQ ID NO: 369158 - DNA, 15 bp, Homo sapiens
cgaaggaagtaaaga

SEQ ID NO: 369159 - DNA, 15 bp, Homo sapiens
ccgaaggaagtaaag

SEQ ID NO: 369160 - DNA, 15 bp, Homo sapiens
accgaaggaagtaaa

SEQ ID NO: 369161 - DNA, 15 bp, Homo sapiens
gaccgaaggaagtaa

SEQ ID NO: 369162 - DNA, 15 bp, Homo sapiens
ggaccgaaggaagta

SEQ ID NO: 369163 - DNA, 15 bp, Homo sapiens
tggaccgaaggaagt

SEQ ID NO: 369164 - DNA, 15 bp, Homo sapiens
ctggaccgaaggaag

SEQ ID NO: 369165 - DNA, 15 bp, Homo sapiens
cctggaccgaaggaa

SEQ ID NO: 369166 - DNA, 15 bp, Homo sapiens
gcctggaccgaagga

SEQ ID NO: 369167 - DNA, 15 bp, Homo sapiens
ggcctggaccgaagg

SEQ ID NO: 369168 - DNA, 15 bp, Homo sapiens
aggcctggaccgaag

SEQ ID NO: 369169 - DNA, 15 bp, Homo sapiens
aaggcctggaccgaa

SEQ ID NO: 369170 - DNA, 15 bp, Homo sapiens
caaggcctggaccga

SEQ ID NO: 369171 - DNA, 15 bp, Homo sapiens
tcaaggcctggaccg

SEQ ID NO: 369172 - DNA, 15 bp, Homo sapiens
ttcaaggcctggacc

SEQ ID NO: 369173 - DNA, 15 bp, Homo sapiens
gttcaaggcctggac

SEQ ID NO: 369174 - DNA, 15 bp, Homo sapiens
agttcaaggcctgga

SEQ ID NO: 369175 - DNA, 15 bp, Homo sapiens
gagttcaaggcctgg

SEQ ID NO: 369176 - DNA, 15 bp, Homo sapiens
cgagttcaaggcctg

SEQ ID NO: 369177 - DNA, 15 bp, Homo sapiens
ccgagttcaaggcct

SEQ ID NO: 369178 - DNA, 15 bp, Homo sapiens
tccgagttcaaggcc

SEQ ID NO: 369179 - DNA, 15 bp, Homo sapiens
ctccgagttcaaggc

SEQ ID NO: 369180 - DNA, 15 bp, Homo sapiens
gctccgagttcaagg

SEQ ID NO: 369181 - DNA, 15 bp, Homo sapiens
tgctccgagttcaag

SEQ ID NO: 369182 - DNA, 15 bp, Homo sapiens
ctgctccgagttcaa

SEQ ID NO: 369183 - DNA, 15 bp, Homo sapiens
gctgctccgagttca

SEQ ID NO: 369184 - DNA, 15 bp, Homo sapiens
tgctgctccgagttc

SEQ ID NO: 369185 - DNA, 15 bp, Homo sapiens
gtgctgctccgagtt

SEQ ID NO: 369186 - DNA, 15 bp, Homo sapiens
agtgctgctccgagt

SEQ ID NO: 369187 - DNA, 15 bp, Homo sapiens
gagtgctgctccgag

SEQ ID NO: 369188 - DNA, 15 bp, Homo sapiens
agagtgctgctccga

SEQ ID NO: 369189 - DNA, 15 bp, Homo sapiens
gagagtgctgctccg

SEQ ID NO: 369190 - DNA, 15 bp, Homo sapiens
tgagagtgctgctcc

SEQ ID NO: 369191 - DNA, 15 bp, Homo sapiens
ttgagagtgctgctc

SEQ ID NO: 369192 - DNA, 15 bp, Homo sapiens
tttgagagtgctgct

SEQ ID NO: 369193 - DNA, 15 bp, Homo sapiens
ctttgagagtgctgc

SEQ ID NO: 369194 - DNA, 15 bp, Homo sapiens
gctttgagagtgctg

SEQ ID NO: 369195 - DNA, 15 bp, Homo sapiens
tgctttgagagtgct

SEQ ID NO: 369196 - DNA, 15 bp, Homo sapiens
ctgctttgagagtgc

SEQ ID NO: 369197 - DNA, 15 bp, Homo sapiens
actgctttgagagtg

SEQ ID NO: 369198 - DNA, 15 bp, Homo sapiens
aactgctttgagagt

SEQ ID NO: 369199 - DNA, 15 bp, Homo sapiens
caactgctttgagag

SEQ ID NO: 369200 - DNA, 15 bp, Homo sapiens
acaactgctttgaga

SEQ ID NO: 369201 - DNA, 15 bp, Homo sapiens
gacaactgctttgag

SEQ ID NO: 369202 - DNA, 15 bp, Homo sapiens
agacaactgctttga

SEQ ID NO: 369203 - DNA, 15 bp, Homo sapiens
aagacaactgctttg

SEQ ID NO: 369204 - DNA, 15 bp, Homo sapiens
gaagacaactgcttt

SEQ ID NO: 369205 - DNA, 15 bp, Homo sapiens
tgaagacaactgctt

SEQ ID NO: 369206 - DNA, 15 bp, Homo sapiens
gtgaagacaactgct

SEQ ID NO: 369207 - DNA, 15 bp, Homo sapiens
ggtgaagacaactgc

SEQ ID NO: 369208 - DNA, 15 bp, Homo sapiens
aggtgaagacaactg

SEQ ID NO: 369209 - DNA, 15 bp, Homo sapiens
caggtgaagacaact

SEQ ID NO: 369210 - DNA, 15 bp, Homo sapiens
ccaggtgaagacaac

SEQ ID NO: 369211 - DNA, 15 bp, Homo sapiens
gccaggtgaagacaa

SEQ ID NO: 369212 - DNA, 15 bp, Homo sapiens
tgccaggtgaagaca

SEQ ID NO: 369213 - DNA, 15 bp, Homo sapiens
ctgccaggtgaagac

SEQ ID NO: 369214 - DNA, 15 bp, Homo sapiens
tctgccaggtgaaga

SEQ ID NO: 369215 - DNA, 15 bp, Homo sapiens
ttctgccaggtgaag

SEQ ID NO: 369216 - DNA, 15 bp, Homo sapiens
cttctgccaggtgaa

SEQ ID NO: 369217 - DNA, 15 bp, Homo sapiens
tcttctgccaggtga

SEQ ID NO: 369218 - DNA, 15 bp, Homo sapiens
ttcttctgccaggtg

SEQ ID NO: 369219 - DNA, 15 bp, Homo sapiens
tttcttctgccaggt

SEQ ID NO: 369220 - DNA, 15 bp, Homo sapiens
ttttcttctgccagg

SEQ ID NO: 369221 - DNA, 15 bp, Homo sapiens
tttttcttctgccag

SEQ ID NO: 369222 - DNA, 15 bp, Homo sapiens
ttttttcttctgcca

SEQ ID NO: 369223 - DNA, 15 bp, Homo sapiens
tttttttcttctgcc

SEQ ID NO: 369224 - DNA, 15 bp, Homo sapiens
ttttttttcttctgc

SEQ ID NO: 369225 - DNA, 15 bp, Homo sapiens
cttttttttcttctg

SEQ ID NO: 369226 - DNA, 15 bp, Homo sapiens
ccttttttttcttct

SEQ ID NO: 369227 - DNA, 15 bp, Homo sapiens
accttttttttcttc

SEQ ID NO: 369228 - DNA, 15 bp, Homo sapiens
caccttttttttctt

SEQ ID NO: 369229 - DNA, 15 bp, Homo sapiens
acaccttttttttct

SEQ ID NO: 369230 - DNA, 15 bp, Homo sapiens
tacaccttttttttc

SEQ ID NO: 369231 - DNA, 15 bp, Homo sapiens
ttacacctttttttt

SEQ ID NO: 369232 - DNA, 15 bp, Homo sapiens
tttacaccttttttt

SEQ ID NO: 369233 - DNA, 15 bp, Homo sapiens
ctttacacctttttt

SEQ ID NO: 369234 - DNA, 15 bp, Homo sapiens
actttacaccttttt

SEQ ID NO: 369235 - DNA, 15 bp, Homo sapiens
cactttacacctttt

SEQ ID NO: 369236 - DNA, 15 bp, Homo sapiens
gcactttacaccttt

SEQ ID NO: 369237 - DNA, 15 bp, Homo sapiens
agcactttacacctt

SEQ ID NO: 369238 - DNA, 15 bp, Homo sapiens
cagcactttacacct

SEQ ID NO: 369239 - DNA, 15 bp, Homo sapiens
ccagcactttacacc

SEQ ID NO: 369240 - DNA, 15 bp, Homo sapiens
accagcactttacac

SEQ ID NO: 369241 - DNA, 15 bp, Homo sapiens
aaccagcactttaca

SEQ ID NO: 369242 - DNA, 15 bp, Homo sapiens
gaaccagcactttac

SEQ ID NO: 369243 - DNA, 15 bp, Homo sapiens
ggaaccagcacttta

SEQ ID NO: 369244 - DNA, 15 bp, Homo sapiens
aggaaccagcacttt

SEQ ID NO: 369245 - DNA, 15 bp, Homo sapiens
caggaaccagcactt

SEQ ID NO: 369246 - DNA, 15 bp, Homo sapiens
ccaggaaccagcact

SEQ ID NO: 369247 - DNA, 15 bp, Homo sapiens
tccaggaaccagcac

SEQ ID NO: 369248 - DNA, 15 bp, Homo sapiens
gtccaggaaccagca

SEQ ID NO: 369249 - DNA, 15 bp, Homo sapiens
agtccaggaaccagc

SEQ ID NO: 369250 - DNA, 15 bp, Homo sapiens
aagtccaggaaccag

SEQ ID NO: 369251 - DNA, 15 bp, Homo sapiens
caagtccaggaacca

SEQ ID NO: 369252 - DNA, 15 bp, Homo sapiens
gcaagtccaggaacc

SEQ ID NO: 369253 - DNA, 15 bp, Homo sapiens
agcaagtccaggaac

SEQ ID NO: 369254 - DNA, 15 bp, Homo sapiens
gagcaagtccaggaa

SEQ ID NO: 369255 - DNA, 15 bp, Homo sapiens
cgagcaagtccagga

SEQ ID NO: 369256 - DNA, 15 bp, Homo sapiens
gcgagcaagtccagg

SEQ ID NO: 369257 - DNA, 15 bp, Homo sapiens
tgcgagcaagtccag

SEQ ID NO: 369258 - DNA, 15 bp, Homo sapiens
gtgcgagcaagtcca

SEQ ID NO: 369259 - DNA, 15 bp, Homo sapiens
tgtgcgagcaagtcc

SEQ ID NO: 369260 - DNA, 15 bp, Homo sapiens
gtgtgcgagcaagtc

SEQ ID NO: 369261 - DNA, 15 bp, Homo sapiens
agtgtgcgagcaagt

SEQ ID NO: 369262 - DNA, 15 bp, Homo sapiens
tagtgtgcgagcaag

SEQ ID NO: 369263 - DNA, 15 bp, Homo sapiens
ttagtgtgcgagcaa

SEQ ID NO: 369264 - DNA, 15 bp, Homo sapiens
tttagtgtgcgagca

SEQ ID NO: 369265 - DNA, 15 bp, Homo sapiens
ttttagtgtgcgagc

SEQ ID NO: 369266 - DNA, 15 bp, Homo sapiens
attttagtgtgcgag

SEQ ID NO: 369267 - DNA, 15 bp, Homo sapiens
gattttagtgtgcga

SEQ ID NO: 369268 - DNA, 15 bp, Homo sapiens
ggattttagtgtgcg

SEQ ID NO: 369269 - DNA, 15 bp, Homo sapiens
gggattttagtgtgc

SEQ ID NO: 369270 - DNA, 15 bp, Homo sapiens
agggattttagtgtg

SEQ ID NO: 369271 - DNA, 15 bp, Homo sapiens
gagggattttagtgt

SEQ ID NO: 369272 - DNA, 15 bp, Homo sapiens
cgagggattttagtg

SEQ ID NO: 369273 - DNA, 15 bp, Homo sapiens
ccgagggattttagt

SEQ ID NO: 369274 - DNA, 15 bp, Homo sapiens
cccgagggattttag

SEQ ID NO: 369275 - DNA, 15 bp, Homo sapiens
tcccgagggatttta

SEQ ID NO: 369276 - DNA, 15 bp, Homo sapiens
atcccgagggatttt

SEQ ID NO: 369277 - DNA, 15 bp, Homo sapiens
aatcccgagggattt

SEQ ID NO: 369278 - DNA, 15 bp, Homo sapiens
gaatcccgagggatt

SEQ ID NO: 369279 - DNA, 15 bp, Homo sapiens
tgaatcccgagggat

SEQ ID NO: 369280 - DNA, 15 bp, Homo sapiens
ctgaatcccgaggga

SEQ ID NO: 369281 - DNA, 15 bp, Homo sapiens
gctgaatcccgaggg

SEQ ID NO: 369282 - DNA, 15 bp, Homo sapiens
agctgaatcccgagg

SEQ ID NO: 369283 - DNA, 15 bp, Homo sapiens
aagctgaatcccgag

SEQ ID NO: 369284 - DNA, 15 bp, Homo sapiens
gaagctgaatcccga

SEQ ID NO: 369285 - DNA, 15 bp, Homo sapiens
ggaagctgaatcccg

SEQ ID NO: 369286 - DNA, 15 bp, Homo sapiens
gggaagctgaatccc

SEQ ID NO: 369287 - DNA, 15 bp, Homo sapiens
tgggaagctgaatcc

SEQ ID NO: 369288 - DNA, 15 bp, Homo sapiens
ctgggaagctgaatc

SEQ ID NO: 369289 - DNA, 15 bp, Homo sapiens
tctgggaagctgaat

SEQ ID NO: 369290 - DNA, 15 bp, Homo sapiens
atctgggaagctgaa

SEQ ID NO: 369291 - DNA, 15 bp, Homo sapiens
tatctgggaagctga

SEQ ID NO: 369292 - DNA, 15 bp, Homo sapiens
ttatctgggaagctg

SEQ ID NO: 369293 - DNA, 15 bp, Homo sapiens
gttatctgggaagct

SEQ ID NO: 369294 - DNA, 15 bp, Homo sapiens
agttatctgggaagc

SEQ ID NO: 369295 - DNA, 15 bp, Homo sapiens
aagttatctgggaag

SEQ ID NO: 369296 - DNA, 15 bp, Homo sapiens
aaagttatctgggaa

SEQ ID NO: 369297 - DNA, 15 bp, Homo sapiens
gaaagttatctggga

SEQ ID NO: 369298 - DNA, 15 bp, Homo sapiens
agaaagttatctggg

SEQ ID NO: 369299 - DNA, 15 bp, Homo sapiens
aagaaagttatctgg

SEQ ID NO: 369300 - DNA, 15 bp, Homo sapiens
caagaaagttatctg

SEQ ID NO: 369301 - DNA, 15 bp, Homo sapiens
gcaagaaagttatct

SEQ ID NO: 369302 - DNA, 15 bp, Homo sapiens
agcaagaaagttatc

SEQ ID NO: 369303 - DNA, 15 bp, Homo sapiens
aagcaagaaagttat

SEQ ID NO: 369304 - DNA, 15 bp, Homo sapiens
gaagcaagaaagtta

SEQ ID NO: 369305 - DNA, 15 bp, Homo sapiens
agaagcaagaaagtt

SEQ ID NO: 369306 - DNA, 15 bp, Homo sapiens
aagaagcaagaaagt

SEQ ID NO: 369307 - DNA, 15 bp, Homo sapiens
aaagaagcaagaaag

SEQ ID NO: 369308 - DNA, 15 bp, Homo sapiens
caaagaagcaagaaa

SEQ ID NO: 369309 - DNA, 15 bp, Homo sapiens
acaaagaagcaagaa

SEQ ID NO: 369310 - DNA, 15 bp, Homo sapiens
tacaaagaagcaaga

SEQ ID NO: 369311 - DNA, 15 bp, Homo sapiens
ctacaaagaagcaag

SEQ ID NO: 369312 - DNA, 15 bp, Homo sapiens
tctacaaagaagcaa

SEQ ID NO: 369313 - DNA, 15 bp, Homo sapiens
ctctacaaagaagca

SEQ ID NO: 369314 - DNA, 15 bp, Homo sapiens
tctctacaaagaagc

SEQ ID NO: 369315 - DNA, 15 bp, Homo sapiens
gtctctacaaagaag

SEQ ID NO: 369316 - DNA, 15 bp, Homo sapiens
tgtctctacaaagaa

SEQ ID NO: 369317 - DNA, 15 bp, Homo sapiens
atgtctctacaaaga

SEQ ID NO: 369318 - DNA, 15 bp, Homo sapiens
aatgtctctacaaag

SEQ ID NO: 369319 - DNA, 15 bp, Homo sapiens
aaatgtctctacaaa

SEQ ID NO: 369320 - DNA, 15 bp, Homo sapiens
caaatgtctctacaa

SEQ ID NO: 369321 - DNA, 15 bp, Homo sapiens
tcaaatgtctctaca

SEQ ID NO: 369322 - DNA, 15 bp, Homo sapiens
ctcaaatgtctctac

SEQ ID NO: 369323 - DNA, 15 bp, Homo sapiens
tctcaaatgtctcta

SEQ ID NO: 369324 - DNA, 15 bp, Homo sapiens
ctctcaaatgtctct

SEQ ID NO: 369325 - DNA, 15 bp, Homo sapiens
tctctcaaatgtctc

SEQ ID NO: 369326 - DNA, 15 bp, Homo sapiens
ttctctcaaatgtct

SEQ ID NO: 369327 - DNA, 15 bp, Homo sapiens
tttctctcaaatgtc

SEQ ID NO: 369328 - DNA, 15 bp, Homo sapiens
ttttctctcaaatgt

SEQ ID NO: 369329 - DNA, 15 bp, Homo sapiens
gttttctctcaaatg

SEQ ID NO: 369330 - DNA, 15 bp, Homo sapiens
agttttctctcaaat

SEQ ID NO: 369331 - DNA, 15 bp, Homo sapiens
tagttttctctcaaa

SEQ ID NO: 369332 - DNA, 15 bp, Homo sapiens
atagttttctctcaa

SEQ ID NO: 369333 - DNA, 15 bp, Homo sapiens
aatagttttctctca

SEQ ID NO: 369334 - DNA, 15 bp, Homo sapiens
taatagttttctctc

SEQ ID NO: 369335 - DNA, 15 bp, Homo sapiens
ataatagttttctct

SEQ ID NO: 369336 - DNA, 15 bp, Homo sapiens
aataatagttttctc

SEQ ID NO: 369337 - DNA, 15 bp, Homo sapiens
taataatagttttct

SEQ ID NO: 369338 - DNA, 15 bp, Homo sapiens
ttaataatagttttc

SEQ ID NO: 369339 - DNA, 15 bp, Homo sapiens
gttaataatagtttt

SEQ ID NO: 369340 - DNA, 15 bp, Homo sapiens
agttaataatagttt

SEQ ID NO: 369341 - DNA, 15 bp, Homo sapiens
tagttaataatagtt

SEQ ID NO: 369342 - DNA, 15 bp, Homo sapiens
atagttaataatagt

SEQ ID NO: 369343 - DNA, 15 bp, Homo sapiens
tatagttaataatag

SEQ ID NO: 369344 - DNA, 15 bp, Homo sapiens
gtatagttaataata

SEQ ID NO: 369345 - DNA, 15 bp, Homo sapiens
tgtatagttaataat

SEQ ID NO: 369346 - DNA, 15 bp, Homo sapiens
atgtatagttaataa

SEQ ID NO: 369347 - DNA, 15 bp, Homo sapiens
catgtatagttaata

SEQ ID NO: 369348 - DNA, 15 bp, Homo sapiens
ccatgtatagttaat

SEQ ID NO: 369349 - DNA, 15 bp, Homo sapiens
accatgtatagttaa

SEQ ID NO: 369350 - DNA, 15 bp, Homo sapiens
gaccatgtatagtta

SEQ ID NO: 369351 - DNA, 15 bp, Homo sapiens
ggaccatgtatagtt

SEQ ID NO: 369352 - DNA, 15 bp, Homo sapiens
tggaccatgtatagt

SEQ ID NO: 369353 - DNA, 15 bp, Homo sapiens
gtggaccatgtatag

SEQ ID NO: 369354 - DNA, 15 bp, Homo sapiens
agtggaccatgtata

SEQ ID NO: 369355 - DNA, 15 bp, Homo sapiens
cagtggaccatgtat

SEQ ID NO: 369356 - DNA, 15 bp, Homo sapiens
acagtggaccatgta

SEQ ID NO: 369357 - DNA, 15 bp, Homo sapiens
aacagtggaccatgt

SEQ ID NO: 369358 - DNA, 15 bp, Homo sapiens
aaacagtggaccatg

SEQ ID NO: 369359 - DNA, 15 bp, Homo sapiens
aaaacagtggaccat

SEQ ID NO: 369360 - DNA, 15 bp, Homo sapiens
caaaacagtggacca

SEQ ID NO: 369361 - DNA, 15 bp, Homo sapiens
gcaaaacagtggacc

SEQ ID NO: 369362 - DNA, 15 bp, Homo sapiens
agcaaaacagtggac

SEQ ID NO: 369363 - DNA, 15 bp, Homo sapiens
aagcaaaacagtgga

SEQ ID NO: 369364 - DNA, 15 bp, Homo sapiens
aaagcaaaacagtgg

SEQ ID NO: 369365 - DNA, 15 bp, Homo sapiens
caaagcaaaacagtg

SEQ ID NO: 369366 - DNA, 15 bp, Homo sapiens
gcaaagcaaaacagt

SEQ ID NO: 369367 - DNA, 15 bp, Homo sapiens
agcaaagcaaaacag

SEQ ID NO: 369368 - DNA, 15 bp, Homo sapiens
cagcaaagcaaaaca

SEQ ID NO: 369369 - DNA, 15 bp, Homo sapiens
acagcaaagcaaaac

SEQ ID NO: 369370 - DNA, 15 bp, Homo sapiens
gacagcaaagcaaaa

SEQ ID NO: 369371 - DNA, 15 bp, Homo sapiens
tgacagcaaagcaaa

SEQ ID NO: 369372 - DNA, 15 bp, Homo sapiens
atgacagcaaagcaa

SEQ ID NO: 369373 - DNA, 15 bp, Homo sapiens
catgacagcaaagca

SEQ ID NO: 369374 - DNA, 15 bp, Homo sapiens
tcatgacagcaaagc

SEQ ID NO: 369375 - DNA, 15 bp, Homo sapiens
ttcatgacagcaaag

SEQ ID NO: 369376 - DNA, 15 bp, Homo sapiens
attcatgacagcaaa

SEQ ID NO: 369377 - DNA, 15 bp, Homo sapiens
cattcatgacagcaa

SEQ ID NO: 369378 - DNA, 15 bp, Homo sapiens
ccattcatgacagca

SEQ ID NO: 369379 - DNA, 15 bp, Homo sapiens
cccattcatgacagc

SEQ ID NO: 369380 - DNA, 15 bp, Homo sapiens
tcccattcatgacag

SEQ ID NO: 369381 - DNA, 15 bp, Homo sapiens
atcccattcatgaca

SEQ ID NO: 369382 - DNA, 15 bp, Homo sapiens
aatcccattcatgac

SEQ ID NO: 369383 - DNA, 15 bp, Homo sapiens
caatcccattcatga

SEQ ID NO: 369384 - DNA, 15 bp, Homo sapiens
acaatcccattcatg

SEQ ID NO: 369385 - DNA, 15 bp, Homo sapiens
tacaatcccattcat

SEQ ID NO: 369386 - DNA, 15 bp, Homo sapiens
ttacaatcccattca

SEQ ID NO: 369387 - DNA, 15 bp, Homo sapiens
tttacaatcccattc

SEQ ID NO: 369388 - DNA, 15 bp, Homo sapiens
ttttacaatcccatt

SEQ ID NO: 369389 - DNA, 15 bp, Homo sapiens
cttttacaatcccat

SEQ ID NO: 369390 - DNA, 15 bp, Homo sapiens
ccttttacaatccca

SEQ ID NO: 369391 - DNA, 15 bp, Homo sapiens
cccttttacaatccc

SEQ ID NO: 369392 - DNA, 15 bp, Homo sapiens
tcccttttacaatcc

SEQ ID NO: 369393 - DNA, 15 bp, Homo sapiens
gtcccttttacaatc

SEQ ID NO: 369394 - DNA, 15 bp, Homo sapiens
ggtcccttttacaat

SEQ ID NO: 369395 - DNA, 15 bp, Homo sapiens
gggtcccttttacaa

SEQ ID NO: 369396 - DNA, 15 bp, Homo sapiens
tgggtcccttttaca

SEQ ID NO: 369397 - DNA, 15 bp, Homo sapiens
atgggtcccttttac

SEQ ID NO: 369398 - DNA, 15 bp, Homo sapiens
catgggtccctttta

SEQ ID NO: 369399 - DNA, 15 bp, Homo sapiens
ccatgggtccctttt

SEQ ID NO: 369400 - DNA, 15 bp, Homo sapiens
cccatgggtcccttt

SEQ ID NO: 369401 - DNA, 15 bp, Homo sapiens
tcccatgggtccctt

SEQ ID NO: 369402 - DNA, 15 bp, Homo sapiens
gtcccatgggtccct

SEQ ID NO: 369403 - DNA, 15 bp, Homo sapiens
ggtcccatgggtccc

SEQ ID NO: 369404 - DNA, 15 bp, Homo sapiens
cggtcccatgggtcc

SEQ ID NO: 369405 - DNA, 15 bp, Homo sapiens
ccggtcccatgggtc

SEQ ID NO: 369406 - DNA, 15 bp, Homo sapiens
cccggtcccatgggt

SEQ ID NO: 369407 - DNA, 15 bp, Homo sapiens
acccggtcccatggg

SEQ ID NO: 369408 - DNA, 15 bp, Homo sapiens
aacccggtcccatgg

SEQ ID NO: 369409 - DNA, 15 bp, Homo sapiens
aaacccggtcccatg

SEQ ID NO: 369410 - DNA, 15 bp, Homo sapiens
gaaacccggtcccat

SEQ ID NO: 369411 - DNA, 15 bp, Homo sapiens
ggaaacccggtccca

SEQ ID NO: 369412 - DNA, 15 bp, Homo sapiens
aggaaacccggtccc

SEQ ID NO: 369413 - DNA, 15 bp, Homo sapiens
aaggaaacccggtcc

SEQ ID NO: 369414 - DNA, 15 bp, Homo sapiens
aaaggaaacccggtc

SEQ ID NO: 369415 - DNA, 15 bp, Homo sapiens
aaaaggaaacccggt

SEQ ID NO: 369416 - DNA, 15 bp, Homo sapiens
caaaaggaaacccgg

SEQ ID NO: 369417 - DNA, 15 bp, Homo sapiens
ccaaaaggaaacccg

SEQ ID NO: 369418 - DNA, 15 bp, Homo sapiens
cccaaaaggaaaccc

SEQ ID NO: 369419 - DNA, 15 bp, Homo sapiens
tcccaaaaggaaacc

SEQ ID NO: 369420 - DNA, 15 bp, Homo sapiens
gtcccaaaaggaaac

SEQ ID NO: 369421 - DNA, 15 bp, Homo sapiens
cgtcccaaaaggaaa

SEQ ID NO: 369422 - DNA, 15 bp, Homo sapiens
tcgtcccaaaaggaa

SEQ ID NO: 369423 - DNA, 15 bp, Homo sapiens
atcgtcccaaaagga

SEQ ID NO: 369424 - DNA, 15 bp, Homo sapiens
catcgtcccaaaagg

SEQ ID NO: 369425 - DNA, 15 bp, Homo sapiens
tcatcgtcccaaaag

SEQ ID NO: 369426 - DNA, 15 bp, Homo sapiens
ttcatcgtcccaaaa

SEQ ID NO: 369427 - DNA, 15 bp, Homo sapiens
tttcatcgtcccaaa

SEQ ID NO: 369428 - DNA, 15 bp, Homo sapiens
ttttcatcgtcccaa

SEQ ID NO: 369429 - DNA, 15 bp, Homo sapiens
attttcatcgtccca

SEQ ID NO: 369430 - DNA, 15 bp, Homo sapiens
cattttcatcgtccc

SEQ ID NO: 369431 - DNA, 15 bp, Homo sapiens
acattttcatcgtcc

SEQ ID NO: 369432 - DNA, 15 bp, Homo sapiens
aacattttcatcgtc

SEQ ID NO: 369433 - DNA, 15 bp, Homo sapiens
gaacattttcatcgt

SEQ ID NO: 369434 - DNA, 15 bp, Homo sapiens
agaacattttcatcg

SEQ ID NO: 369435 - DNA, 15 bp, Homo sapiens
cagaacattttcatc

SEQ ID NO: 369436 - DNA, 15 bp, Homo sapiens
ccagaacattttcat

SEQ ID NO: 369437 - DNA, 15 bp, Homo sapiens
tccagaacattttca

SEQ ID NO: 369438 - DNA, 15 bp, Homo sapiens
ttccagaacattttc

SEQ ID NO: 369439 - DNA, 15 bp, Homo sapiens
gttccagaacatttt

SEQ ID NO: 369440 - DNA, 15 bp, Homo sapiens
agttccagaacattt

SEQ ID NO: 369441 - DNA, 15 bp, Homo sapiens
cagttccagaacatt

SEQ ID NO: 369442 - DNA, 15 bp, Homo sapiens
acagttccagaacat

SEQ ID NO: 369443 - DNA, 15 bp, Homo sapiens
tacagttccagaaca

SEQ ID NO: 369444 - DNA, 15 bp, Homo sapiens
ctacagttccagaac

SEQ ID NO: 369445 - DNA, 15 bp, Homo sapiens
tctacagttccagaa

SEQ ID NO: 369446 - DNA, 15 bp, Homo sapiens
ctctacagttccaga

SEQ ID NO: 369447 - DNA, 15 bp, Homo sapiens
actctacagttccag

SEQ ID NO: 369448 - DNA, 15 bp, Homo sapiens
cactctacagttcca

SEQ ID NO: 369449 - DNA, 15 bp, Homo sapiens
ccactctacagttcc

SEQ ID NO: 369450 - DNA, 15 bp, Homo sapiens
accactctacagttc

SEQ ID NO: 369451 - DNA, 15 bp, Homo sapiens
caccactctacagtt

SEQ ID NO: 369452 - DNA, 15 bp, Homo sapiens
tcaccactctacagt

SEQ ID NO: 369453 - DNA, 15 bp, Homo sapiens
atcaccactctacag

SEQ ID NO: 369454 - DNA, 15 bp, Homo sapiens
catcaccactctaca

SEQ ID NO: 369455 - DNA, 15 bp, Homo sapiens
ccatcaccactctac

SEQ ID NO: 369456 - DNA, 15 bp, Homo sapiens
accatcaccactcta

SEQ ID NO: 369457 - DNA, 15 bp, Homo sapiens
aaccatcaccactct

SEQ ID NO: 369458 - DNA, 15 bp, Homo sapiens
caaccatcaccactc

SEQ ID NO: 369459 - DNA, 15 bp, Homo sapiens
gcaaccatcaccact

SEQ ID NO: 369460 - DNA, 15 bp, Homo sapiens
tgcaaccatcaccac

SEQ ID NO: 369461 - DNA, 15 bp, Homo sapiens
gtgcaaccatcacca

SEQ ID NO: 369462 - DNA, 15 bp, Homo sapiens
tgtgcaaccatcacc

SEQ ID NO: 369463 - DNA, 15 bp, Homo sapiens
ctgtgcaaccatcac

SEQ ID NO: 369464 - DNA, 15 bp, Homo sapiens
actgtgcaaccatca

SEQ ID NO: 369465 - DNA, 15 bp, Homo sapiens
aactgtgcaaccatc

SEQ ID NO: 369466 - DNA, 15 bp, Homo sapiens
gaactgtgcaaccat

SEQ ID NO: 369467 - DNA, 15 bp, Homo sapiens
tgaactgtgcaacca

SEQ ID NO: 369468 - DNA, 15 bp, Homo sapiens
gtgaactgtgcaacc

SEQ ID NO: 369469 - DNA, 15 bp, Homo sapiens
ggtgaactgtgcaac

SEQ ID NO: 369470 - DNA, 15 bp, Homo sapiens
cggtgaactgtgcaa

SEQ ID NO: 369471 - DNA, 15 bp, Homo sapiens
tcggtgaactgtgca

SEQ ID NO: 369472 - DNA, 15 bp, Homo sapiens
ttcggtgaactgtgc

SEQ ID NO: 369473 - DNA, 15 bp, Homo sapiens
attcggtgaactgtg

SEQ ID NO: 369474 - DNA, 15 bp, Homo sapiens
cattcggtgaactgt

SEQ ID NO: 369475 - DNA, 15 bp, Homo sapiens
acattcggtgaactg

SEQ ID NO: 369476 - DNA, 15 bp, Homo sapiens
tacattcggtgaact

SEQ ID NO: 369477 - DNA, 15 bp, Homo sapiens
atacattcggtgaac

SEQ ID NO: 369478 - DNA, 15 bp, Homo sapiens
aatacattcggtgaa

SEQ ID NO: 369479 - DNA, 15 bp, Homo sapiens
gaatacattcggtga

SEQ ID NO: 369480 - DNA, 15 bp, Homo sapiens
tgaatacattcggtg

SEQ ID NO: 369481 - DNA, 15 bp, Homo sapiens
ttgaatacattcggt

SEQ ID NO: 369482 - DNA, 15 bp, Homo sapiens
attgaatacattcgg

SEQ ID NO: 369483 - DNA, 15 bp, Homo sapiens
cattgaatacattcg

SEQ ID NO: 369484 - DNA, 15 bp, Homo sapiens
gcattgaatacattc

SEQ ID NO: 369485 - DNA, 15 bp, Homo sapiens
ggcattgaatacatt

SEQ ID NO: 369486 - DNA, 15 bp, Homo sapiens
tggcattgaatacat

SEQ ID NO: 369487 - DNA, 15 bp, Homo sapiens
atggcattgaataca

SEQ ID NO: 369488 - DNA, 15 bp, Homo sapiens
aatggcattgaatac

SEQ ID NO: 369489 - DNA, 15 bp, Homo sapiens
caatggcattgaata

SEQ ID NO: 369490 - DNA, 15 bp, Homo sapiens
ccaatggcattgaat

SEQ ID NO: 369491 - DNA, 15 bp, Homo sapiens
accaatggcattgaa

SEQ ID NO: 369492 - DNA, 15 bp, Homo sapiens
caccaatggcattga

SEQ ID NO: 369493 - DNA, 15 bp, Homo sapiens
ccaccaatggcattg

SEQ ID NO: 369494 - DNA, 15 bp, Homo sapiens
gccaccaatggcatt

SEQ ID NO: 369495 - DNA, 15 bp, Homo sapiens
tgccaccaatggcat

SEQ ID NO: 369496 - DNA, 15 bp, Homo sapiens
gtgccaccaatggca

SEQ ID NO: 369497 - DNA, 15 bp, Homo sapiens
tgtgccaccaatggc

SEQ ID NO: 369498 - DNA, 15 bp, Homo sapiens
atgtgccaccaatgg

SEQ ID NO: 369499 - DNA, 15 bp, Homo sapiens
aatgtgccaccaatg

SEQ ID NO: 369500 - DNA, 15 bp, Homo sapiens
aaatgtgccaccaat

SEQ ID NO: 369501 - DNA, 15 bp, Homo sapiens
aaaatgtgccaccaa

SEQ ID NO: 369502 - DNA, 15 bp, Homo sapiens
taaaatgtgccacca

SEQ ID NO: 369503 - DNA, 15 bp, Homo sapiens
ttaaaatgtgccacc

SEQ ID NO: 369504 - DNA, 15 bp, Homo sapiens
cttaaaatgtgccac

SEQ ID NO: 369505 - DNA, 15 bp, Homo sapiens
acttaaaatgtgcca

SEQ ID NO: 369506 - DNA, 15 bp, Homo sapiens
aacttaaaatgtgcc

SEQ ID NO: 369507 - DNA, 15 bp, Homo sapiens
taacttaaaatgtgc

SEQ ID NO: 369508 - DNA, 15 bp, Homo sapiens
ataacttaaaatgtg

SEQ ID NO: 369509 - DNA, 15 bp, Homo sapiens
cataacttaaaatgt

SEQ ID NO: 369510 - DNA, 15 bp, Homo sapiens
acataacttaaaatg

SEQ ID NO: 369511 - DNA, 15 bp, Homo sapiens
cacataacttaaaat

SEQ ID NO: 369512 - DNA, 15 bp, Homo sapiens
acacataacttaaaa

SEQ ID NO: 369513 - DNA, 15 bp, Homo sapiens
tacacataacttaaa

SEQ ID NO: 369514 - DNA, 15 bp, Homo sapiens
atacacataacttaa

SEQ ID NO: 369515 - DNA, 15 bp, Homo sapiens
aatacacataactta

SEQ ID NO: 369516 - DNA, 15 bp, Homo sapiens
aaatacacataactt

SEQ ID NO: 369517 - DNA, 15 bp, Homo sapiens
aaaatacacataact

SEQ ID NO: 369518 - DNA, 15 bp, Homo sapiens
taaaatacacataac

SEQ ID NO: 369519 - DNA, 15 bp, Homo sapiens
gtaaaatacacataa

SEQ ID NO: 369520 - DNA, 15 bp, Homo sapiens
ggtaaaatacacata

SEQ ID NO: 369521 - DNA, 15 bp, Homo sapiens
tggtaaaatacacat

SEQ ID NO: 369522 - DNA, 15 bp, Homo sapiens
gtggtaaaatacaca

SEQ ID NO: 369523 - DNA, 15 bp, Homo sapiens
tgtggtaaaatacac

SEQ ID NO: 369524 - DNA, 15 bp, Homo sapiens
ttgtggtaaaataca

SEQ ID NO: 369525 - DNA, 15 bp, Homo sapiens
cttgtggtaaaatac

SEQ ID NO: 369526 - DNA, 15 bp, Homo sapiens
acttgtggtaaaata

SEQ ID NO: 369527 - DNA, 15 bp, Homo sapiens
aacttgtggtaaaat

SEQ ID NO: 369528 - DNA, 15 bp, Homo sapiens
aaacttgtggtaaaa

SEQ ID NO: 369529 - DNA, 15 bp, Homo sapiens
caaacttgtggtaaa

SEQ ID NO: 369530 - DNA, 15 bp, Homo sapiens
tcaaacttgtggtaa

SEQ ID NO: 369531 - DNA, 15 bp, Homo sapiens
gtcaaacttgtggta

SEQ ID NO: 369532 - DNA, 15 bp, Homo sapiens
ggtcaaacttgtggt

SEQ ID NO: 369533 - DNA, 15 bp, Homo sapiens
tggtcaaacttgtgg

SEQ ID NO: 369534 - DNA, 15 bp, Homo sapiens
ttggtcaaacttgtg

SEQ ID NO: 369535 - DNA, 15 bp, Homo sapiens
tttggtcaaacttgt

SEQ ID NO: 369536 - DNA, 15 bp, Homo sapiens
ttttggtcaaacttg

SEQ ID NO: 369537 - DNA, 15 bp, Homo sapiens
tttttggtcaaactt

SEQ ID NO: 369538 - DNA, 15 bp, Homo sapiens
ttttttggtcaaact

SEQ ID NO: 369539 - DNA, 15 bp, Homo sapiens
attttttggtcaaac

SEQ ID NO: 369540 - DNA, 15 bp, Homo sapiens
cattttttggtcaaa

SEQ ID NO: 369541 - DNA, 15 bp, Homo sapiens
ccattttttggtcaa

SEQ ID NO: 369542 - DNA, 15 bp, Homo sapiens
gccattttttggtca

SEQ ID NO: 369543 - DNA, 15 bp, Homo sapiens
ggccattttttggtc

SEQ ID NO: 369544 - DNA, 15 bp, Homo sapiens
tggccattttttggt

SEQ ID NO: 369545 - DNA, 15 bp, Homo sapiens
ctggccattttttgg

SEQ ID NO: 369546 - DNA, 15 bp, Homo sapiens
gctggccattttttg

SEQ ID NO: 369547 - DNA, 15 bp, Homo sapiens
cgctggccatttttt

SEQ ID NO: 369548 - DNA, 15 bp, Homo sapiens
ccgctggccattttt

SEQ ID NO: 369549 - DNA, 15 bp, Homo sapiens
accgctggccatttt

SEQ ID NO: 369550 - DNA, 15 bp, Homo sapiens
taccgctggccattt

SEQ ID NO: 369551 - DNA, 15 bp, Homo sapiens
ctaccgctggccatt

SEQ ID NO: 369552 - DNA, 15 bp, Homo sapiens
cctaccgctggccat

SEQ ID NO: 369553 - DNA, 15 bp, Homo sapiens
acctaccgctggcca

SEQ ID NO: 369554 - DNA, 15 bp, Homo sapiens
aacctaccgctggcc

SEQ ID NO: 369555 - DNA, 15 bp, Homo sapiens
aaacctaccgctggc

SEQ ID NO: 369556 - DNA, 15 bp, Homo sapiens
aaaacctaccgctgg

SEQ ID NO: 369557 - DNA, 15 bp, Homo sapiens
taaaacctaccgctg

SEQ ID NO: 369558 - DNA, 15 bp, Homo sapiens
ttaaaacctaccgct

SEQ ID NO: 369559 - DNA, 15 bp, Homo sapiens
tttaaaacctaccgc

SEQ ID NO: 369560 - DNA, 15 bp, Homo sapiens
atttaaaacctaccg

SEQ ID NO: 369561 - DNA, 15 bp, Homo sapiens
tatttaaaacctacc

SEQ ID NO: 369562 - DNA, 15 bp, Homo sapiens
gtatttaaaacctac

SEQ ID NO: 369563 - DNA, 15 bp, Homo sapiens
tgtatttaaaaccta

SEQ ID NO: 369564 - DNA, 15 bp, Homo sapiens
atgtatttaaaacct

SEQ ID NO: 369565 - DNA, 15 bp, Homo sapiens
catgtatttaaaacc

SEQ ID NO: 369566 - DNA, 15 bp, Homo sapiens
acatgtatttaaaac

SEQ ID NO: 369567 - DNA, 15 bp, Homo sapiens
tacatgtatttaaaa

SEQ ID NO: 369568 - DNA, 15 bp, Homo sapiens
ctacatgtatttaaa

SEQ ID NO: 369569 - DNA, 15 bp, Homo sapiens
tctacatgtatttaa

SEQ ID NO: 369570 - DNA, 15 bp, Homo sapiens
atctacatgtattta

SEQ ID NO: 369571 - DNA, 15 bp, Homo sapiens
tatctacatgtattt

SEQ ID NO: 369572 - DNA, 15 bp, Homo sapiens
gtatctacatgtatt

SEQ ID NO: 369573 - DNA, 15 bp, Homo sapiens
agtatctacatgtat

SEQ ID NO: 369574 - DNA, 15 bp, Homo sapiens
aagtatctacatgta

SEQ ID NO: 369575 - DNA, 15 bp, Homo sapiens
caagtatctacatgt

SEQ ID NO: 369576 - DNA, 15 bp, Homo sapiens
ccaagtatctacatg

SEQ ID NO: 369577 - DNA, 15 bp, Homo sapiens
tccaagtatctacat

SEQ ID NO: 369578 - DNA, 15 bp, Homo sapiens
atccaagtatctaca

SEQ ID NO: 369579 - DNA, 15 bp, Homo sapiens
tatccaagtatctac

SEQ ID NO: 369580 - DNA, 15 bp, Homo sapiens
ttatccaagtatcta

SEQ ID NO: 369581 - DNA, 15 bp, Homo sapiens
attatccaagtatct

SEQ ID NO: 369582 - DNA, 15 bp, Homo sapiens
gattatccaagtatc

SEQ ID NO: 369583 - DNA, 15 bp, Homo sapiens
agattatccaagtat

SEQ ID NO: 369584 - DNA, 15 bp, Homo sapiens
tagattatccaagta

SEQ ID NO: 369585 - DNA, 15 bp, Homo sapiens
atagattatccaagt

SEQ ID NO: 369586 - DNA, 15 bp, Homo sapiens
tatagattatccaag

SEQ ID NO: 369587 - DNA, 15 bp, Homo sapiens
ttatagattatccaa

SEQ ID NO: 369588 - DNA, 15 bp, Homo sapiens
cttatagattatcca

SEQ ID NO: 369589 - DNA, 15 bp, Homo sapiens
ccttatagattatcc

SEQ ID NO: 369590 - DNA, 15 bp, Homo sapiens
tccttatagattatc

SEQ ID NO: 369591 - DNA, 15 bp, Homo sapiens
ttccttatagattat

SEQ ID NO: 369592 - DNA, 15 bp, Homo sapiens
gttccttatagatta

SEQ ID NO: 369593 - DNA, 15 bp, Homo sapiens
tgttccttatagatt

SEQ ID NO: 369594 - DNA, 15 bp, Homo sapiens
ctgttccttatagat

SEQ ID NO: 369595 - DNA, 15 bp, Homo sapiens
actgttccttataga

SEQ ID NO: 369596 - DNA, 15 bp, Homo sapiens
cactgttccttatag

SEQ ID NO: 369597 - DNA, 15 bp, Homo sapiens
tcactgttccttata

SEQ ID NO: 369598 - DNA, 15 bp, Homo sapiens
atcactgttccttat

SEQ ID NO: 369599 - DNA, 15 bp, Homo sapiens
aatcactgttcctta

SEQ ID NO: 369600 - DNA, 15 bp, Homo sapiens
caatcactgttcctt

SEQ ID NO: 369601 - DNA, 15 bp, Homo sapiens
acaatcactgttcct

SEQ ID NO: 369602 - DNA, 15 bp, Homo sapiens
cacaatcactgttcc

SEQ ID NO: 369603 - DNA, 15 bp, Homo sapiens
ccacaatcactgttc

SEQ ID NO: 369604 - DNA, 15 bp, Homo sapiens
tccacaatcactgtt

SEQ ID NO: 369605 - DNA, 15 bp, Homo sapiens
ctccacaatcactgt

SEQ ID NO: 369606 - DNA, 15 bp, Homo sapiens
tctccacaatcactg

SEQ ID NO: 369607 - DNA, 15 bp, Homo sapiens
ctctccacaatcact

SEQ ID NO: 369608 - DNA, 15 bp, Homo sapiens
actctccacaatcac

SEQ ID NO: 369609 - DNA, 15 bp, Homo sapiens
tactctccacaatca

SEQ ID NO: 369610 - DNA, 15 bp, Homo sapiens
ttactctccacaatc

SEQ ID NO: 369611 - DNA, 15 bp, Homo sapiens
tttactctccacaat

SEQ ID NO: 369612 - DNA, 15 bp, Homo sapiens
ttttactctccacaa

SEQ ID NO: 369613 - DNA, 15 bp, Homo sapiens
attttactctccaca

SEQ ID NO: 369614 - DNA, 15 bp, Homo sapiens
aattttactctccac

SEQ ID NO: 369615 - DNA, 15 bp, Homo sapiens
caattttactctcca

SEQ ID NO: 369616 - DNA, 15 bp, Homo sapiens
ccaattttactctcc

SEQ ID NO: 369617 - DNA, 15 bp, Homo sapiens
tccaattttactctc

SEQ ID NO: 369618 - DNA, 15 bp, Homo sapiens
ctccaattttactct

SEQ ID NO: 369619 - DNA, 15 bp, Homo sapiens
tctccaattttactc

SEQ ID NO: 369620 - DNA, 15 bp, Homo sapiens
ctctccaattttact

SEQ ID NO: 369621 - DNA, 15 bp, Homo sapiens
tctctccaattttac

SEQ ID NO: 369622 - DNA, 15 bp, Homo sapiens
gtctctccaatttta

SEQ ID NO: 369623 - DNA, 15 bp, Homo sapiens
agtctctccaatttt

SEQ ID NO: 369624 - DNA, 15 bp, Homo sapiens
aagtctctccaattt

SEQ ID NO: 369625 - DNA, 15 bp, Homo sapiens
gaagtctctccaatt

SEQ ID NO: 369626 - DNA, 15 bp, Homo sapiens
agaagtctctccaat

SEQ ID NO: 369627 - DNA, 15 bp, Homo sapiens
cagaagtctctccaa

SEQ ID NO: 369628 - DNA, 15 bp, Homo sapiens
acagaagtctctcca

SEQ ID NO: 369629 - DNA, 15 bp, Homo sapiens
aacagaagtctctcc

SEQ ID NO: 369630 - DNA, 15 bp, Homo sapiens
taacagaagtctctc

SEQ ID NO: 369631 - DNA, 15 bp, Homo sapiens
ctaacagaagtctct

SEQ ID NO: 369632 - DNA, 15 bp, Homo sapiens
actaacagaagtctc

SEQ ID NO: 369633 - DNA, 15 bp, Homo sapiens
aactaacagaagtct

SEQ ID NO: 369634 - DNA, 15 bp, Homo sapiens
caactaacagaagtc

SEQ ID NO: 369635 - DNA, 15 bp, Homo sapiens
gcaactaacagaagt

SEQ ID NO: 369636 - DNA, 15 bp, Homo sapiens
ggcaactaacagaag

SEQ ID NO: 369637 - DNA, 15 bp, Homo sapiens
aggcaactaacagaa

SEQ ID NO: 369638 - DNA, 15 bp, Homo sapiens
taggcaactaacaga

SEQ ID NO: 369639 - DNA, 15 bp, Homo sapiens
ctaggcaactaacag

SEQ ID NO: 369640 - DNA, 15 bp, Homo sapiens
cctaggcaactaaca

SEQ ID NO: 369641 - DNA, 15 bp, Homo sapiens
tcctaggcaactaac

SEQ ID NO: 369642 - DNA, 15 bp, Homo sapiens
gtcctaggcaactaa

SEQ ID NO: 369643 - DNA, 15 bp, Homo sapiens
ggtcctaggcaacta

SEQ ID NO: 369644 - DNA, 15 bp, Homo sapiens
aggtcctaggcaact

SEQ ID NO: 369645 - DNA, 15 bp, Homo sapiens
caggtcctaggcaac

SEQ ID NO: 369646 - DNA, 15 bp, Homo sapiens
tcaggtcctaggcaa

SEQ ID NO: 369647 - DNA, 15 bp, Homo sapiens
atcaggtcctaggca

SEQ ID NO: 369648 - DNA, 15 bp, Homo sapiens
catcaggtcctaggc

SEQ ID NO: 369649 - DNA, 15 bp, Homo sapiens
tcatcaggtcctagg

SEQ ID NO: 369650 - DNA, 15 bp, Homo sapiens
atcatcaggtcctag

SEQ ID NO: 369651 - DNA, 15 bp, Homo sapiens
catcatcaggtccta

SEQ ID NO: 369652 - DNA, 15 bp, Homo sapiens
ccatcatcaggtcct

SEQ ID NO: 369653 - DNA, 15 bp, Homo sapiens
accatcatcaggtcc

SEQ ID NO: 369654 - DNA, 15 bp, Homo sapiens
taccatcatcaggtc

SEQ ID NO: 369655 - DNA, 15 bp, Homo sapiens
ctaccatcatcaggt

SEQ ID NO: 369656 - DNA, 15 bp, Homo sapiens
tctaccatcatcagg

SEQ ID NO: 369657 - DNA, 15 bp, Homo sapiens
gtctaccatcatcag

SEQ ID NO: 369658 - DNA, 15 bp, Homo sapiens
tgtctaccatcatca

SEQ ID NO: 369659 - DNA, 15 bp, Homo sapiens
gtgtctaccatcatc

SEQ ID NO: 369660 - DNA, 15 bp, Homo sapiens
agtgtctaccatcat

SEQ ID NO: 369661 - DNA, 15 bp, Homo sapiens
aagtgtctaccatca

SEQ ID NO: 369662 - DNA, 15 bp, Homo sapiens
caagtgtctaccatc

SEQ ID NO: 369663 - DNA, 15 bp, Homo sapiens
acaagtgtctaccat

SEQ ID NO: 369664 - DNA, 15 bp, Homo sapiens
aacaagtgtctacca

SEQ ID NO: 369665 - DNA, 15 bp, Homo sapiens
aaacaagtgtctacc

SEQ ID NO: 369666 - DNA, 15 bp, Homo sapiens
aaaacaagtgtctac

SEQ ID NO: 369667 - DNA, 15 bp, Homo sapiens
caaaacaagtgtcta

SEQ ID NO: 369668 - DNA, 15 bp, Homo sapiens
ccaaaacaagtgtct

SEQ ID NO: 369669 - DNA, 15 bp, Homo sapiens
accaaaacaagtgtc

SEQ ID NO: 369670 - DNA, 15 bp, Homo sapiens
caccaaaacaagtgt

SEQ ID NO: 369671 - DNA, 15 bp, Homo sapiens
ccaccaaaacaagtg

SEQ ID NO: 369672 - DNA, 15 bp, Homo sapiens
gccaccaaaacaagt

SEQ ID NO: 369673 - DNA, 15 bp, Homo sapiens
tgccaccaaaacaag

SEQ ID NO: 369674 - DNA, 15 bp, Homo sapiens
ctgccaccaaaacaa

SEQ ID NO: 369675 - DNA, 15 bp, Homo sapiens
gctgccaccaaaaca

SEQ ID NO: 369676 - DNA, 15 bp, Homo sapiens
ggctgccaccaaaac

SEQ ID NO: 369677 - DNA, 15 bp, Homo sapiens
gggctgccaccaaaa

SEQ ID NO: 369678 - DNA, 15 bp, Homo sapiens
agggctgccaccaaa

SEQ ID NO: 369679 - DNA, 15 bp, Homo sapiens
cagggctgccaccaa

SEQ ID NO: 369680 - DNA, 15 bp, Homo sapiens
tcagggctgccacca

SEQ ID NO: 369681 - DNA, 15 bp, Homo sapiens
ctcagggctgccacc

SEQ ID NO: 369682 - DNA, 15 bp, Homo sapiens
cctcagggctgccac

SEQ ID NO: 369683 - DNA, 15 bp, Homo sapiens
acctcagggctgcca

SEQ ID NO: 369684 - DNA, 15 bp, Homo sapiens
gacctcagggctgcc

SEQ ID NO: 369685 - DNA, 15 bp, Homo sapiens
tgacctcagggctgc

SEQ ID NO: 369686 - DNA, 15 bp, Homo sapiens
gtgacctcagggctg

SEQ ID NO: 369687 - DNA, 15 bp, Homo sapiens
tgtgacctcagggct

SEQ ID NO: 369688 - DNA, 15 bp, Homo sapiens
atgtgacctcagggc

SEQ ID NO: 369689 - DNA, 15 bp, Homo sapiens
catgtgacctcaggg

SEQ ID NO: 369690 - DNA, 15 bp, Homo sapiens
ccatgtgacctcagg

SEQ ID NO: 369691 - DNA, 15 bp, Homo sapiens
cccatgtgacctcag

SEQ ID NO: 369692 - DNA, 15 bp, Homo sapiens
tcccatgtgacctca

SEQ ID NO: 369693 - DNA, 15 bp, Homo sapiens
ttcccatgtgacctc

SEQ ID NO: 369694 - DNA, 15 bp, Homo sapiens
cttcccatgtgacct

SEQ ID NO: 369695 - DNA, 15 bp, Homo sapiens
acttcccatgtgacc

SEQ ID NO: 369696 - DNA, 15 bp, Homo sapiens
tacttcccatgtgac

SEQ ID NO: 369697 - DNA, 15 bp, Homo sapiens
gtacttcccatgtga

SEQ ID NO: 369698 - DNA, 15 bp, Homo sapiens
tgtacttcccatgtg

SEQ ID NO: 369699 - DNA, 15 bp, Homo sapiens
atgtacttcccatgt

SEQ ID NO: 369700 - DNA, 15 bp, Homo sapiens
aatgtacttcccatg

SEQ ID NO: 369701 - DNA, 15 bp, Homo sapiens
caatgtacttcccat

SEQ ID NO: 369702 - DNA, 15 bp, Homo sapiens
tcaatgtacttccca

SEQ ID NO: 369703 - DNA, 15 bp, Homo sapiens
atcaatgtacttccc

SEQ ID NO: 369704 - DNA, 15 bp, Homo sapiens
catcaatgtacttcc

SEQ ID NO: 369705 - DNA, 15 bp, Homo sapiens
ccatcaatgtacttc

SEQ ID NO: 369706 - DNA, 15 bp, Homo sapiens
tccatcaatgtactt

SEQ ID NO: 369707 - DNA, 15 bp, Homo sapiens
gtccatcaatgtact

SEQ ID NO: 369708 - DNA, 15 bp, Homo sapiens
ggtccatcaatgtac

SEQ ID NO: 369709 - DNA, 15 bp, Homo sapiens
tggtccatcaatgta

SEQ ID NO: 369710 - DNA, 15 bp, Homo sapiens
ctggtccatcaatgt

SEQ ID NO: 369711 - DNA, 15 bp, Homo sapiens
cctggtccatcaatg

SEQ ID NO: 369712 - DNA, 15 bp, Homo sapiens
ccctggtccatcaat

SEQ ID NO: 369713 - DNA, 15 bp, Homo sapiens
tccctggtccatcaa

SEQ ID NO: 369714 - DNA, 15 bp, Homo sapiens
ctccctggtccatca

SEQ ID NO: 369715 - DNA, 15 bp, Homo sapiens
gctccctggtccatc

SEQ ID NO: 369716 - DNA, 15 bp, Homo sapiens
tgctccctggtccat

SEQ ID NO: 369717 - DNA, 15 bp, Homo sapiens
ttgctccctggtcca

SEQ ID NO: 369718 - DNA, 15 bp, Homo sapiens
cttgctccctggtcc

SEQ ID NO: 369719 - DNA, 15 bp, Homo sapiens
ccttgctccctggtc

SEQ ID NO: 369720 - DNA, 15 bp, Homo sapiens
gccttgctccctggt

SEQ ID NO: 369721 - DNA, 15 bp, Homo sapiens
agccttgctccctgg

SEQ ID NO: 369722 - DNA, 15 bp, Homo sapiens
cagccttgctccctg

SEQ ID NO: 369723 - DNA, 15 bp, Homo sapiens
ccagccttgctccct

SEQ ID NO: 369724 - DNA, 15 bp, Homo sapiens
accagccttgctccc

SEQ ID NO: 369725 - DNA, 15 bp, Homo sapiens
taccagccttgctcc

SEQ ID NO: 369726 - DNA, 15 bp, Homo sapiens
ctaccagccttgctc

SEQ ID NO: 369727 - DNA, 15 bp, Homo sapiens
gctaccagccttgct

SEQ ID NO: 369728 - DNA, 15 bp, Homo sapiens
ggctaccagccttgc

SEQ ID NO: 369729 - DNA, 15 bp, Homo sapiens
aggctaccagccttg

SEQ ID NO: 369730 - DNA, 15 bp, Homo sapiens
caggctaccagcctt

SEQ ID NO: 369731 - DNA, 15 bp, Homo sapiens
gcaggctaccagcct

SEQ ID NO: 369732 - DNA, 15 bp, Homo sapiens
ggcaggctaccagcc

SEQ ID NO: 369733 - DNA, 15 bp, Homo sapiens
aggcaggctaccagc

SEQ ID NO: 369734 - DNA, 15 bp, Homo sapiens
caggcaggctaccag

SEQ ID NO: 369735 - DNA, 15 bp, Homo sapiens
ccaggcaggctacca

SEQ ID NO: 369736 - DNA, 15 bp, Homo sapiens
cccaggcaggctacc

SEQ ID NO: 369737 - DNA, 15 bp, Homo sapiens
tcccaggcaggctac

SEQ ID NO: 369738 - DNA, 15 bp, Homo sapiens
atcccaggcaggcta

SEQ ID NO: 369739 - DNA, 15 bp, Homo sapiens
gatcccaggcaggct

SEQ ID NO: 369740 - DNA, 15 bp, Homo sapiens
agatcccaggcaggc

SEQ ID NO: 369741 - DNA, 15 bp, Homo sapiens
gagatcccaggcagg

SEQ ID NO: 369742 - DNA, 15 bp, Homo sapiens
cgagatcccaggcag

SEQ ID NO: 369743 - DNA, 15 bp, Homo sapiens
acgagatcccaggca

SEQ ID NO: 369744 - DNA, 15 bp, Homo sapiens
cacgagatcccaggc

SEQ ID NO: 369745 - DNA, 15 bp, Homo sapiens
acacgagatcccagg

SEQ ID NO: 369746 - DNA, 15 bp, Homo sapiens
cacacgagatcccag

SEQ ID NO: 369747 - DNA, 15 bp, Homo sapiens
acacacgagatccca

SEQ ID NO: 369748 - DNA, 15 bp, Homo sapiens
cacacacgagatccc

SEQ ID NO: 369749 - DNA, 15 bp, Homo sapiens
acacacacgagatcc

SEQ ID NO: 369750 - DNA, 15 bp, Homo sapiens
cacacacacgagatc

SEQ ID NO: 369751 - DNA, 15 bp, Homo sapiens
acacacacacgagat

SEQ ID NO: 369752 - DNA, 15 bp, Homo sapiens
cacacacacacgaga

SEQ ID NO: 369753 - DNA, 15 bp, Homo sapiens
acacacacacacgag

SEQ ID NO: 369754 - DNA, 15 bp, Homo sapiens
cacacacacacacga

SEQ ID NO: 369755 - DNA, 15 bp, Homo sapiens
acacacacacacacg

SEQ ID NO: 369756 - DNA, 15 bp, Homo sapiens
cacacacacacacac

SEQ ID NO: 369757 - DNA, 15 bp, Homo sapiens
ccacacacacacaca

SEQ ID NO: 369758 - DNA, 15 bp, Homo sapiens
accacacacacacac

SEQ ID NO: 369759 - DNA, 15 bp, Homo sapiens
caccacacacacaca

SEQ ID NO: 369760 - DNA, 15 bp, Homo sapiens
acaccacacacacac

SEQ ID NO: 369761 - DNA, 15 bp, Homo sapiens
cacaccacacacaca

SEQ ID NO: 369762 - DNA, 15 bp, Homo sapiens
acacaccacacacac

SEQ ID NO: 369763 - DNA, 15 bp, Homo sapiens
cacacaccacacaca

SEQ ID NO: 369764 - DNA, 15 bp, Homo sapiens
acacacaccacacac

SEQ ID NO: 369765 - DNA, 15 bp, Homo sapiens
cacacacaccacaca

SEQ ID NO: 369766 - DNA, 15 bp, Homo sapiens
acacacacaccacac

SEQ ID NO: 369767 - DNA, 15 bp, Homo sapiens
cacacacacaccaca

SEQ ID NO: 369768 - DNA, 15 bp, Homo sapiens
acacacacacaccac

SEQ ID NO: 369769 - DNA, 15 bp, Homo sapiens
cacacacacacacca

SEQ ID NO: 369770 - DNA, 15 bp, Homo sapiens
acacacacacacacc

SEQ ID NO: 369771 - DNA, 15 bp, Homo sapiens
acacacacacacaca

SEQ ID NO: 369772 - DNA, 15 bp, Homo sapiens
aacacacacacacac

SEQ ID NO: 369773 - DNA, 15 bp, Homo sapiens
aaacacacacacaca

SEQ ID NO: 369774 - DNA, 15 bp, Homo sapiens
aaaacacacacacac

SEQ ID NO: 369775 - DNA, 15 bp, Homo sapiens
caaaacacacacaca

SEQ ID NO: 369776 - DNA, 15 bp, Homo sapiens
tcaaaacacacacac

SEQ ID NO: 369777 - DNA, 15 bp, Homo sapiens
ctcaaaacacacaca

SEQ ID NO: 369778 - DNA, 15 bp, Homo sapiens
tctcaaaacacacac

SEQ ID NO: 369779 - DNA, 15 bp, Homo sapiens
atctcaaaacacaca

SEQ ID NO: 369780 - DNA, 15 bp, Homo sapiens
catctcaaaacacac

SEQ ID NO: 369781 - DNA, 15 bp, Homo sapiens
ccatctcaaaacaca

SEQ ID NO: 369782 - DNA, 15 bp, Homo sapiens
tccatctcaaaacac

SEQ ID NO: 369783 - DNA, 15 bp, Homo sapiens
ctccatctcaaaaca

SEQ ID NO: 369784 - DNA, 15 bp, Homo sapiens
actccatctcaaaac

SEQ ID NO: 369785 - DNA, 15 bp, Homo sapiens
agggtgacagagtga

SEQ ID NO: 369786 - DNA, 15 bp, Homo sapiens
cagggtgacagagtg

SEQ ID NO: 369787 - DNA, 15 bp, Homo sapiens
ccagggtgacagagt

SEQ ID NO: 369788 - DNA, 15 bp, Homo sapiens
gccagggtgacagag

SEQ ID NO: 369789 - DNA, 15 bp, Homo sapiens
agccagggtgacaga

SEQ ID NO: 369790 - DNA, 15 bp, Homo sapiens
cagccagggtgacag

SEQ ID NO: 369791 - DNA, 15 bp, Homo sapiens
ccagccagggtgaca

SEQ ID NO: 369792 - DNA, 15 bp, Homo sapiens
tccagccagggtgac

SEQ ID NO: 369793 - DNA, 15 bp, Homo sapiens
ctccagccagggtga

SEQ ID NO: 369794 - DNA, 15 bp, Homo sapiens
cctccagccagggtg

SEQ ID NO: 369795 - DNA, 15 bp, Homo sapiens
ccctccagccagggt

SEQ ID NO: 369796 - DNA, 15 bp, Homo sapiens
gccctccagccaggg

SEQ ID NO: 369797 - DNA, 15 bp, Homo sapiens
tgccctccagccagg

SEQ ID NO: 369798 - DNA, 15 bp, Homo sapiens
ctgccctccagccag

SEQ ID NO: 369799 - DNA, 15 bp, Homo sapiens
actgccctccagcca

SEQ ID NO: 369800 - DNA, 15 bp, Homo sapiens
cactgccctccagcc

SEQ ID NO: 369801 - DNA, 15 bp, Homo sapiens
ccactgccctccagc

SEQ ID NO: 369802 - DNA, 15 bp, Homo sapiens
gccactgccctccag

SEQ ID NO: 369803 - DNA, 15 bp, Homo sapiens
cgccactgccctcca

SEQ ID NO: 369804 - DNA, 15 bp, Homo sapiens
acgccactgccctcc

SEQ ID NO: 369805 - DNA, 15 bp, Homo sapiens
cacgccactgccctc

SEQ ID NO: 369806 - DNA, 15 bp, Homo sapiens
tcacgccactgccct

SEQ ID NO: 369807 - DNA, 15 bp, Homo sapiens
atcacgccactgccc

SEQ ID NO: 369808 - DNA, 15 bp, Homo sapiens
gatcacgccactgcc

SEQ ID NO: 369809 - DNA, 15 bp, Homo sapiens
agatcacgccactgc

SEQ ID NO: 369810 - DNA, 15 bp, Homo sapiens
gagatcacgccactg

SEQ ID NO: 369811 - DNA, 15 bp, Homo sapiens
cgagatcacgccact

SEQ ID NO: 369812 - DNA, 15 bp, Homo sapiens
ccgagatcacgccac

SEQ ID NO: 369813 - DNA, 15 bp, Homo sapiens
gccgagatcacgcca

SEQ ID NO: 369814 - DNA, 15 bp, Homo sapiens
agccgagatcacgcc

SEQ ID NO: 369815 - DNA, 15 bp, Homo sapiens
gagccgagatcacgc

SEQ ID NO: 369816 - DNA, 15 bp, Homo sapiens
tgagccgagatcacg

SEQ ID NO: 369817 - DNA, 15 bp, Homo sapiens
gtgagccgagatcac

SEQ ID NO: 369818 - DNA, 15 bp, Homo sapiens
agtgagccgagatca

SEQ ID NO: 369819 - DNA, 15 bp, Homo sapiens
tagtgagccgagatc

SEQ ID NO: 369820 - DNA, 15 bp, Homo sapiens
gtagtgagccgagat

SEQ ID NO: 369821 - DNA, 15 bp, Homo sapiens
tgtagtgagccgaga

SEQ ID NO: 369822 - DNA, 15 bp, Homo sapiens
ttgtagtgagccgag

SEQ ID NO: 369823 - DNA, 15 bp, Homo sapiens
gttgtagtgagccga

SEQ ID NO: 369824 - DNA, 15 bp, Homo sapiens
ggttgtagtgagccg

SEQ ID NO: 369825 - DNA, 15 bp, Homo sapiens
aggttgtagtgagcc

SEQ ID NO: 369826 - DNA, 15 bp, Homo sapiens
gaggttgtagtgagc

SEQ ID NO: 369827 - DNA, 15 bp, Homo sapiens
ggaggttgtagtgag

SEQ ID NO: 369828 - DNA, 15 bp, Homo sapiens
tggaggttgtagtga

SEQ ID NO: 369829 - DNA, 15 bp, Homo sapiens
gtggaggttgtagtg

SEQ ID NO: 369830 - DNA, 15 bp, Homo sapiens
ggtggaggttgtagt

SEQ ID NO: 369831 - DNA, 15 bp, Homo sapiens
aggtggaggttgtag

SEQ ID NO: 369832 - DNA, 15 bp, Homo sapiens
gaggtggaggttgta

SEQ ID NO: 369833 - DNA, 15 bp, Homo sapiens
ggaggtggaggttgt

SEQ ID NO: 369834 - DNA, 15 bp, Homo sapiens
aggaggtggaggttg

SEQ ID NO: 369835 - DNA, 15 bp, Homo sapiens
caggaggtggaggtt

SEQ ID NO: 369836 - DNA, 15 bp, Homo sapiens
ccaggaggtggaggt

SEQ ID NO: 369837 - DNA, 15 bp, Homo sapiens
cccaggaggtggagg

SEQ ID NO: 369838 - DNA, 15 bp, Homo sapiens
ttgaacccaggaggt

SEQ ID NO: 369839 - DNA, 15 bp, Homo sapiens
gcttgaacccaggag

SEQ ID NO: 369840 - DNA, 15 bp, Homo sapiens
ggcttgaacccagga

SEQ ID NO: 369841 - DNA, 15 bp, Homo sapiens
tggcttgaacccagg

SEQ ID NO: 369842 - DNA, 15 bp, Homo sapiens
atggcttgaacccag

SEQ ID NO: 369843 - DNA, 15 bp, Homo sapiens
aatggcttgaaccca

SEQ ID NO: 369844 - DNA, 15 bp, Homo sapiens
gaatggcttgaaccc

SEQ ID NO: 369845 - DNA, 15 bp, Homo sapiens
agaatggcttgaacc

SEQ ID NO: 369846 - DNA, 15 bp, Homo sapiens
gagaatggcttgaac

SEQ ID NO: 369847 - DNA, 15 bp, Homo sapiens
tgagaatggcttgaa

SEQ ID NO: 369848 - DNA, 15 bp, Homo sapiens
atgagaatggcttga

SEQ ID NO: 369849 - DNA, 15 bp, Homo sapiens
catgagaatggcttg

SEQ ID NO: 369850 - DNA, 15 bp, Homo sapiens
gcatgagaatggctt

SEQ ID NO: 369851 - DNA, 15 bp, Homo sapiens
cgcatgagaatggct

SEQ ID NO: 369852 - DNA, 15 bp, Homo sapiens
acgcatgagaatggc

SEQ ID NO: 369853 - DNA, 15 bp, Homo sapiens
gacgcatgagaatgg

SEQ ID NO: 369854 - DNA, 15 bp, Homo sapiens
tgacgcatgagaatg

SEQ ID NO: 369855 - DNA, 15 bp, Homo sapiens
ctgacgcatgagaat

SEQ ID NO: 369856 - DNA, 15 bp, Homo sapiens
actgacgcatgagaa

SEQ ID NO: 369857 - DNA, 15 bp, Homo sapiens
tactgacgcatgaga

SEQ ID NO: 369858 - DNA, 15 bp, Homo sapiens
atactgacgcatgag

SEQ ID NO: 369859 - DNA, 15 bp, Homo sapiens
gatactgacgcatga

SEQ ID NO: 369860 - DNA, 15 bp, Homo sapiens
ggatactgacgcatg

SEQ ID NO: 369861 - DNA, 15 bp, Homo sapiens
gggatactgacgcat

SEQ ID NO: 369862 - DNA, 15 bp, Homo sapiens
agggatactgacgca

SEQ ID NO: 369863 - DNA, 15 bp, Homo sapiens
tagggatactgacgc

SEQ ID NO: 369864 - DNA, 15 bp, Homo sapiens
ctagggatactgacg

SEQ ID NO: 369865 - DNA, 15 bp, Homo sapiens
gctagggatactgac

SEQ ID NO: 369866 - DNA, 15 bp, Homo sapiens
tgctagggatactga

SEQ ID NO: 369867 - DNA, 15 bp, Homo sapiens
ctgctagggatactg

SEQ ID NO: 369868 - DNA, 15 bp, Homo sapiens
gctgctagggatact

SEQ ID NO: 369869 - DNA, 15 bp, Homo sapiens
agctgctagggatac

SEQ ID NO: 369870 - DNA, 15 bp, Homo sapiens
cagctgctagggata

SEQ ID NO: 369871 - DNA, 15 bp, Homo sapiens
ccagctgctagggat

SEQ ID NO: 369872 - DNA, 15 bp, Homo sapiens
cccagctgctaggga

SEQ ID NO: 369873 - DNA, 15 bp, Homo sapiens
tcccagctgctaggg

SEQ ID NO: 369874 - DNA, 15 bp, Homo sapiens
atcccagctgctagg

SEQ ID NO: 369875 - DNA, 15 bp, Homo sapiens
aatcccagctgctag

SEQ ID NO: 369876 - DNA, 15 bp, Homo sapiens
taatcccagctgcta

SEQ ID NO: 369877 - DNA, 15 bp, Homo sapiens
gtaatcccagctgct

SEQ ID NO: 369878 - DNA, 15 bp, Homo sapiens
tgtaatcccagctgc

SEQ ID NO: 369879 - DNA, 15 bp, Homo sapiens
ctgtaatcccagctg

SEQ ID NO: 369880 - DNA, 15 bp, Homo sapiens
gcacgcctgtaatcc

SEQ ID NO: 369881 - DNA, 15 bp, Homo sapiens
ggcacgcctgtaatc

SEQ ID NO: 369882 - DNA, 15 bp, Homo sapiens
tggcacgcctgtaat

SEQ ID NO: 369883 - DNA, 15 bp, Homo sapiens
gtggcacgcctgtaa

SEQ ID NO: 369884 - DNA, 15 bp, Homo sapiens
tgtggcacgcctgta

SEQ ID NO: 369885 - DNA, 15 bp, Homo sapiens
gtgtggcacgcctgt

SEQ ID NO: 369886 - DNA, 15 bp, Homo sapiens
ggtgtggcacgcctg

SEQ ID NO: 369887 - DNA, 15 bp, Homo sapiens
tggtgtggcacgcct

SEQ ID NO: 369888 - DNA, 15 bp, Homo sapiens
atggtgtggcacgcc

SEQ ID NO: 369889 - DNA, 15 bp, Homo sapiens
catggtgtggcacgc

SEQ ID NO: 369890 - DNA, 15 bp, Homo sapiens
gcatggtgtggcacg

SEQ ID NO: 369891 - DNA, 15 bp, Homo sapiens
ggcatggtgtggcac

SEQ ID NO: 369892 - DNA, 15 bp, Homo sapiens
aggcatggtgtggca

SEQ ID NO: 369893 - DNA, 15 bp, Homo sapiens
caggcatggtgtggc

SEQ ID NO: 369894 - DNA, 15 bp, Homo sapiens
ccaggcatggtgtgg

SEQ ID NO: 369895 - DNA, 15 bp, Homo sapiens
gccaggcatggtgtg

SEQ ID NO: 369896 - DNA, 15 bp, Homo sapiens
agccaggcatggtgt

SEQ ID NO: 369897 - DNA, 15 bp, Homo sapiens
tagccaggcatggtg

SEQ ID NO: 369898 - DNA, 15 bp, Homo sapiens
ttagccaggcatggt

SEQ ID NO: 369899 - DNA, 15 bp, Homo sapiens
attagccaggcatgg

SEQ ID NO: 369900 - DNA, 15 bp, Homo sapiens
aattagccaggcatg

SEQ ID NO: 369901 - DNA, 15 bp, Homo sapiens
aaattagccaggcat

SEQ ID NO: 369902 - DNA, 15 bp, Homo sapiens
aaaattagccaggca

SEQ ID NO: 369903 - DNA, 15 bp, Homo sapiens
gaaaaaaattagcca

SEQ ID NO: 369904 - DNA, 15 bp, Homo sapiens
agaaaaaaattagcc

SEQ ID NO: 369905 - DNA, 15 bp, Homo sapiens
tagaaaaaaattagc

SEQ ID NO: 369906 - DNA, 15 bp, Homo sapiens
ctagaaaaaaattag

SEQ ID NO: 369907 - DNA, 15 bp, Homo sapiens
actagaaaaaaatta

SEQ ID NO: 369908 - DNA, 15 bp, Homo sapiens
tactagaaaaaaatt

SEQ ID NO: 369909 - DNA, 15 bp, Homo sapiens
ctactagaaaaaaat

SEQ ID NO: 369910 - DNA, 15 bp, Homo sapiens
tctactagaaaaaaa

SEQ ID NO: 369911 - DNA, 15 bp, Homo sapiens
ttctactagaaaaaa

SEQ ID NO: 369912 - DNA, 15 bp, Homo sapiens
tttctactagaaaaa

SEQ ID NO: 369913 - DNA, 15 bp, Homo sapiens
ctttctactagaaaa

SEQ ID NO: 369914 - DNA, 15 bp, Homo sapiens
cctttctactagaaa

SEQ ID NO: 369915 - DNA, 15 bp, Homo sapiens
ccctttctactagaa

SEQ ID NO: 369916 - DNA, 15 bp, Homo sapiens
gccctttctactaga

SEQ ID NO: 369917 - DNA, 15 bp, Homo sapiens
cgccctttctactag

SEQ ID NO: 369918 - DNA, 15 bp, Homo sapiens
acgccctttctacta

SEQ ID NO: 369919 - DNA, 15 bp, Homo sapiens
aacgccctttctact

SEQ ID NO: 369920 - DNA, 15 bp, Homo sapiens
aaacgccctttctac

SEQ ID NO: 369921 - DNA, 15 bp, Homo sapiens
gaaacgccctttcta

SEQ ID NO: 369922 - DNA, 15 bp, Homo sapiens
tgaaacgccctttct

SEQ ID NO: 369923 - DNA, 15 bp, Homo sapiens
gtgaaacgccctttc

SEQ ID NO: 369924 - DNA, 15 bp, Homo sapiens
ggtgaaacgcccttt

SEQ ID NO: 369925 - DNA, 15 bp, Homo sapiens
tggtgaaacgccctt

SEQ ID NO: 369926 - DNA, 15 bp, Homo sapiens
atggtgaaacgccct

SEQ ID NO: 369927 - DNA, 15 bp, Homo sapiens
catggtgaaacgccc

SEQ ID NO: 369928 - DNA, 15 bp, Homo sapiens
tctggccaacatggt

SEQ ID NO: 369929 - DNA, 15 bp, Homo sapiens
gtctggccaacatgg

SEQ ID NO: 369930 - DNA, 15 bp, Homo sapiens
agtctggccaacatg

SEQ ID NO: 369931 - DNA, 15 bp, Homo sapiens
cagtctggccaacat

SEQ ID NO: 369932 - DNA, 15 bp, Homo sapiens
ccagtctggccaaca

SEQ ID NO: 369933 - DNA, 15 bp, Homo sapiens
accagtctggccaac

SEQ ID NO: 369934 - DNA, 15 bp, Homo sapiens
gaccagtctggccaa

SEQ ID NO: 369935 - DNA, 15 bp, Homo sapiens
agaccagtctggcca

SEQ ID NO: 369936 - DNA, 15 bp, Homo sapiens
gagaccagtctggcc

SEQ ID NO: 369937 - DNA, 15 bp, Homo sapiens
cgagaccagtctggc

SEQ ID NO: 369938 - DNA, 15 bp, Homo sapiens
tcgagaccagtctgg

SEQ ID NO: 369939 - DNA, 15 bp, Homo sapiens
ttcgagaccagtctg

SEQ ID NO: 369940 - DNA, 15 bp, Homo sapiens
gttcgagaccagtct

SEQ ID NO: 369941 - DNA, 15 bp, Homo sapiens
agttcgagaccagtc

SEQ ID NO: 369942 - DNA, 15 bp, Homo sapiens
gagttcgagaccagt

SEQ ID NO: 369943 - DNA, 15 bp, Homo sapiens
ggagttcgagaccag

SEQ ID NO: 369944 - DNA, 15 bp, Homo sapiens
aggagttcgagacca

SEQ ID NO: 369945 - DNA, 15 bp, Homo sapiens
taggagttcgagacc

SEQ ID NO: 369946 - DNA, 15 bp, Homo sapiens
ttaggagttcgagac

SEQ ID NO: 369947 - DNA, 15 bp, Homo sapiens
gttaggagttcgaga

SEQ ID NO: 369948 - DNA, 15 bp, Homo sapiens
ggttaggagttcgag

SEQ ID NO: 369949 - DNA, 15 bp, Homo sapiens
aggttaggagttcga

SEQ ID NO: 369950 - DNA, 15 bp, Homo sapiens
gaggttaggagttcg

SEQ ID NO: 369951 - DNA, 15 bp, Homo sapiens
tgaggttaggagttc

SEQ ID NO: 369952 - DNA, 15 bp, Homo sapiens
ttgaggttaggagtt

SEQ ID NO: 369953 - DNA, 15 bp, Homo sapiens
cttgaggttaggagt

SEQ ID NO: 369954 - DNA, 15 bp, Homo sapiens
acttgaggttaggag

SEQ ID NO: 369955 - DNA, 15 bp, Homo sapiens
cacttgaggttagga

SEQ ID NO: 369956 - DNA, 15 bp, Homo sapiens
tcacttgaggttagg

SEQ ID NO: 369957 - DNA, 15 bp, Homo sapiens
atcacttgaggttag

SEQ ID NO: 369958 - DNA, 15 bp, Homo sapiens
gatcacttgaggtta

SEQ ID NO: 369959 - DNA, 15 bp, Homo sapiens
ggatcacttgaggtt

SEQ ID NO: 369960 - DNA, 15 bp, Homo sapiens
aggatcacttgaggt

SEQ ID NO: 369961 - DNA, 15 bp, Homo sapiens
gaggatcacttgagg

SEQ ID NO: 369962 - DNA, 15 bp, Homo sapiens
cgggaggatcacttg

SEQ ID NO: 369963 - DNA, 15 bp, Homo sapiens
tcgggaggatcactt

SEQ ID NO: 369964 - DNA, 15 bp, Homo sapiens
gtcgggaggatcact

SEQ ID NO: 369965 - DNA, 15 bp, Homo sapiens
agtcgggaggatcac

SEQ ID NO: 369966 - DNA, 15 bp, Homo sapiens
aagtcgggaggatca

SEQ ID NO: 369967 - DNA, 15 bp, Homo sapiens
taagtcgggaggatc

SEQ ID NO: 369968 - DNA, 15 bp, Homo sapiens
ctaagtcgggaggat

SEQ ID NO: 369969 - DNA, 15 bp, Homo sapiens
gctaagtcgggagga

SEQ ID NO: 369970 - DNA, 15 bp, Homo sapiens
ggctaagtcgggagg

SEQ ID NO: 369971 - DNA, 15 bp, Homo sapiens
aggctaagtcgggag

SEQ ID NO: 369972 - DNA, 15 bp, Homo sapiens
gaggctaagtcggga

SEQ ID NO: 369973 - DNA, 15 bp, Homo sapiens
ggaggctaagtcggg

SEQ ID NO: 369974 - DNA, 15 bp, Homo sapiens
gggaggctaagtcgg

SEQ ID NO: 369975 - DNA, 15 bp, Homo sapiens
tgggaggctaagtcg

SEQ ID NO: 369976 - DNA, 15 bp, Homo sapiens
ttgggaggctaagtc

SEQ ID NO: 369977 - DNA, 15 bp, Homo sapiens
tttgggaggctaagt

SEQ ID NO: 369978 - DNA, 15 bp, Homo sapiens
ctttgggaggctaag

SEQ ID NO: 369979 - DNA, 15 bp, Homo sapiens
actttgggaggctaa

SEQ ID NO: 369980 - DNA, 15 bp, Homo sapiens
cactttgggaggcta

SEQ ID NO: 369981 - DNA, 15 bp, Homo sapiens
ataatcccagcactt

SEQ ID NO: 369982 - DNA, 15 bp, Homo sapiens
tataatcccagcact

SEQ ID NO: 369983 - DNA, 15 bp, Homo sapiens
ctataatcccagcac

SEQ ID NO: 369984 - DNA, 15 bp, Homo sapiens
cctataatcccagca

SEQ ID NO: 369985 - DNA, 15 bp, Homo sapiens
gcctataatcccagc

SEQ ID NO: 369986 - DNA, 15 bp, Homo sapiens
cgcctataatcccag

SEQ ID NO: 369987 - DNA, 15 bp, Homo sapiens
acgcctataatccca

SEQ ID NO: 369988 - DNA, 15 bp, Homo sapiens
cacgcctataatccc

SEQ ID NO: 369989 - DNA, 15 bp, Homo sapiens
acacgcctataatcc

SEQ ID NO: 369990 - DNA, 15 bp, Homo sapiens
tacacgcctataatc

SEQ ID NO: 369991 - DNA, 15 bp, Homo sapiens
gtacacgcctataat

SEQ ID NO: 369992 - DNA, 15 bp, Homo sapiens
ggtacacgcctataa

SEQ ID NO: 369993 - DNA, 15 bp, Homo sapiens
tggtacacgcctata

SEQ ID NO: 369994 - DNA, 15 bp, Homo sapiens
gtggtacacgcctat

SEQ ID NO: 369995 - DNA, 15 bp, Homo sapiens
ggtggtacacgccta

SEQ ID NO: 369996 - DNA, 15 bp, Homo sapiens
tggtggtacacgcct

SEQ ID NO: 369997 - DNA, 15 bp, Homo sapiens
gtggtggtacacgcc

SEQ ID NO: 369998 - DNA, 15 bp, Homo sapiens
cgtggtggtacacgc

SEQ ID NO: 369999 - DNA, 15 bp, Homo sapiens
gcgtggtggtacacg

SEQ ID NO: 370000 - DNA, 15 bp, Homo sapiens
ggcgtggtggtacac

SEQ ID NO: 370001 - DNA, 15 bp, Homo sapiens
aggcgtggtggtaca

SEQ ID NO: 370002 - DNA, 15 bp, Homo sapiens
caggcgtggtggtac

SEQ ID NO: 370003 - DNA, 15 bp, Homo sapiens
ccaggcgtggtggta

SEQ ID NO: 370004 - DNA, 15 bp, Homo sapiens
gccaggcgtggtggt

SEQ ID NO: 370005 - DNA, 15 bp, Homo sapiens
ggccaggcgtggtgg

SEQ ID NO: 370006 - DNA, 15 bp, Homo sapiens
aggccaggcgtggtg

SEQ ID NO: 370007 - DNA, 15 bp, Homo sapiens
aaggccaggcgtggt

SEQ ID NO: 370008 - DNA, 15 bp, Homo sapiens
gaaggccaggcgtgg

SEQ ID NO: 370009 - DNA, 15 bp, Homo sapiens
agaaggccaggcgtg

SEQ ID NO: 370010 - DNA, 15 bp, Homo sapiens
cagaaggccaggcgt

SEQ ID NO: 370011 - DNA, 15 bp, Homo sapiens
gcagaaggccaggcg

SEQ ID NO: 370012 - DNA, 15 bp, Homo sapiens
agcagaaggccaggc

SEQ ID NO: 370013 - DNA, 15 bp, Homo sapiens
cagcagaaggccagg

SEQ ID NO: 370014 - DNA, 15 bp, Homo sapiens
acagcagaaggccag

SEQ ID NO: 370015 - DNA, 15 bp, Homo sapiens
cacagcagaaggcca

SEQ ID NO: 370016 - DNA, 15 bp, Homo sapiens
acacagcagaaggcc

SEQ ID NO: 370017 - DNA, 15 bp, Homo sapiens
cacacagcagaaggc

SEQ ID NO: 370018 - DNA, 15 bp, Homo sapiens
acacacagcagaagg

SEQ ID NO: 370019 - DNA, 15 bp, Homo sapiens
aacacacagcagaag

SEQ ID NO: 370020 - DNA, 15 bp, Homo sapiens
taacacacagcagaa

SEQ ID NO: 370021 - DNA, 15 bp, Homo sapiens
gtaacacacagcaga

SEQ ID NO: 370022 - DNA, 15 bp, Homo sapiens
ggtaacacacagcag

SEQ ID NO: 370023 - DNA, 15 bp, Homo sapiens
aggtaacacacagca

SEQ ID NO: 370024 - DNA, 15 bp, Homo sapiens
caggtaacacacagc

SEQ ID NO: 370025 - DNA, 15 bp, Homo sapiens
tcaggtaacacacag

SEQ ID NO: 370026 - DNA, 15 bp, Homo sapiens
ctcaggtaacacaca

SEQ ID NO: 370027 - DNA, 15 bp, Homo sapiens
gctcaggtaacacac

SEQ ID NO: 370028 - DNA, 15 bp, Homo sapiens
tgctcaggtaacaca

SEQ ID NO: 370029 - DNA, 15 bp, Homo sapiens
ttgctcaggtaacac

SEQ ID NO: 370030 - DNA, 15 bp, Homo sapiens
cttgctcaggtaaca

SEQ ID NO: 370031 - DNA, 15 bp, Homo sapiens
gcttgctcaggtaac

SEQ ID NO: 370032 - DNA, 15 bp, Homo sapiens
tgcttgctcaggtaa

SEQ ID NO: 370033 - DNA, 15 bp, Homo sapiens
ctgcttgctcaggta

SEQ ID NO: 370034 - DNA, 15 bp, Homo sapiens
tctgcttgctcaggt

SEQ ID NO: 370035 - DNA, 15 bp, Homo sapiens
gtctgcttgctcagg

SEQ ID NO: 370036 - DNA, 15 bp, Homo sapiens
tgtctgcttgctcag

SEQ ID NO: 370037 - DNA, 15 bp, Homo sapiens
gtgtctgcttgctca

SEQ ID NO: 370038 - DNA, 15 bp, Homo sapiens
tgtgtctgcttgctc

SEQ ID NO: 370039 - DNA, 15 bp, Homo sapiens
atgtgtctgcttgct

SEQ ID NO: 370040 - DNA, 15 bp, Homo sapiens
gatgtgtctgcttgc

SEQ ID NO: 370041 - DNA, 15 bp, Homo sapiens
agatgtgtctgcttg

SEQ ID NO: 370042 - DNA, 15 bp, Homo sapiens
cagatgtgtctgctt

SEQ ID NO: 370043 - DNA, 15 bp, Homo sapiens
acagatgtgtctgct

SEQ ID NO: 370044 - DNA, 15 bp, Homo sapiens
cacagatgtgtctgc

SEQ ID NO: 370045 - DNA, 15 bp, Homo sapiens
gcacagatgtgtctg

SEQ ID NO: 370046 - DNA, 15 bp, Homo sapiens
agcacagatgtgtct

SEQ ID NO: 370047 - DNA, 15 bp, Homo sapiens
cagcacagatgtgtc

SEQ ID NO: 370048 - DNA, 15 bp, Homo sapiens
tcagcacagatgtgt

SEQ ID NO: 370049 - DNA, 15 bp, Homo sapiens
atcagcacagatgtg

SEQ ID NO: 370050 - DNA, 15 bp, Homo sapiens
gatcagcacagatgt

SEQ ID NO: 370051 - DNA, 15 bp, Homo sapiens
ggatcagcacagatg

SEQ ID NO: 370052 - DNA, 15 bp, Homo sapiens
aggatcagcacagat

SEQ ID NO: 370053 - DNA, 15 bp, Homo sapiens
aaggatcagcacaga

SEQ ID NO: 370054 - DNA, 15 bp, Homo sapiens
gaaggatcagcacag

SEQ ID NO: 370055 - DNA, 15 bp, Homo sapiens
cgaaggatcagcaca

SEQ ID NO: 370056 - DNA, 15 bp, Homo sapiens
tcgaaggatcagcac

SEQ ID NO: 370057 - DNA, 15 bp, Homo sapiens
gtcgaaggatcagca

SEQ ID NO: 370058 - DNA, 15 bp, Homo sapiens
ggtcgaaggatcagc

SEQ ID NO: 370059 - DNA, 15 bp, Homo sapiens
aggtcgaaggatcag

SEQ ID NO: 370060 - DNA, 15 bp, Homo sapiens
aaggtcgaaggatca

SEQ ID NO: 370061 - DNA, 15 bp, Homo sapiens
gaaggtcgaaggatc

SEQ ID NO: 370062 - DNA, 15 bp, Homo sapiens
ggaaggtcgaaggat

SEQ ID NO: 370063 - DNA, 15 bp, Homo sapiens
aggaaggtcgaagga

SEQ ID NO: 370064 - DNA, 15 bp, Homo sapiens
aaggaaggtcgaagg

SEQ ID NO: 370065 - DNA, 15 bp, Homo sapiens
aaaggaaggtcgaag

SEQ ID NO: 370066 - DNA, 15 bp, Homo sapiens
aaaaggaaggtcgaa

SEQ ID NO: 370067 - DNA, 15 bp, Homo sapiens
aaaaaggaaggtcga

SEQ ID NO: 370068 - DNA, 15 bp, Homo sapiens
aaaaaaggaaggtcg

SEQ ID NO: 370069 - DNA, 15 bp, Homo sapiens
gaaaaaaggaaggtc

SEQ ID NO: 370070 - DNA, 15 bp, Homo sapiens
agaaaaaaggaaggt

SEQ ID NO: 370071 - DNA, 15 bp, Homo sapiens
aagaaaaaaggaagg

SEQ ID NO: 370072 - DNA, 15 bp, Homo sapiens
gaagaaaaaaggaag

SEQ ID NO: 370073 - DNA, 15 bp, Homo sapiens
cgaagaaaaaaggaa

SEQ ID NO: 370074 - DNA, 15 bp, Homo sapiens
acgaagaaaaaagga

SEQ ID NO: 370075 - DNA, 15 bp, Homo sapiens
cacgaagaaaaaagg

SEQ ID NO: 370076 - DNA, 15 bp, Homo sapiens
ccacgaagaaaaaag

SEQ ID NO: 370077 - DNA, 15 bp, Homo sapiens
cccacgaagaaaaaa

SEQ ID NO: 370078 - DNA, 15 bp, Homo sapiens
acccacgaagaaaaa

SEQ ID NO: 370079 - DNA, 15 bp, Homo sapiens
aacccacgaagaaaa

SEQ ID NO: 370080 - DNA, 15 bp, Homo sapiens
gaacccacgaagaaa

SEQ ID NO: 370081 - DNA, 15 bp, Homo sapiens
ggaacccacgaagaa

SEQ ID NO: 370082 - DNA, 15 bp, Homo sapiens
tggaacccacgaaga

SEQ ID NO: 370083 - DNA, 15 bp, Homo sapiens
ctggaacccacgaag

SEQ ID NO: 370084 - DNA, 15 bp, Homo sapiens
tctggaacccacgaa

SEQ ID NO: 370085 - DNA, 15 bp, Homo sapiens
ttctggaacccacga

SEQ ID NO: 370086 - DNA, 15 bp, Homo sapiens
tttctggaacccacg

SEQ ID NO: 370087 - DNA, 15 bp, Homo sapiens
atttctggaacccac

SEQ ID NO: 370088 - DNA, 15 bp, Homo sapiens
catttctggaaccca

SEQ ID NO: 370089 - DNA, 15 bp, Homo sapiens
tcatttctggaaccc

SEQ ID NO: 370090 - DNA, 15 bp, Homo sapiens
ctcatttctggaacc

SEQ ID NO: 370091 - DNA, 15 bp, Homo sapiens
tctcatttctggaac

SEQ ID NO: 370092 - DNA, 15 bp, Homo sapiens
ctctcatttctggaa

SEQ ID NO: 370093 - DNA, 15 bp, Homo sapiens
tctctcatttctgga

SEQ ID NO: 370094 - DNA, 15 bp, Homo sapiens
gtctctcatttctgg

SEQ ID NO: 370095 - DNA, 15 bp, Homo sapiens
tgtctctcatttctg

SEQ ID NO: 370096 - DNA, 15 bp, Homo sapiens
ctgtctctcatttct

SEQ ID NO: 370097 - DNA, 15 bp, Homo sapiens
cctgtctctcatttc

SEQ ID NO: 370098 - DNA, 15 bp, Homo sapiens
tcctgtctctcattt

SEQ ID NO: 370099 - DNA, 15 bp, Homo sapiens
ttcctgtctctcatt

SEQ ID NO: 370100 - DNA, 15 bp, Homo sapiens
tttcctgtctctcat

SEQ ID NO: 370101 - DNA, 15 bp, Homo sapiens
ctttcctgtctctca

SEQ ID NO: 370102 - DNA, 15 bp, Homo sapiens
actttcctgtctctc

SEQ ID NO: 370103 - DNA, 15 bp, Homo sapiens
aactttcctgtctct

SEQ ID NO: 370104 - DNA, 15 bp, Homo sapiens
gaactttcctgtctc

SEQ ID NO: 370105 - DNA, 15 bp, Homo sapiens
ggaactttcctgtct

SEQ ID NO: 370106 - DNA, 15 bp, Homo sapiens
gggaactttcctgtc

SEQ ID NO: 370107 - DNA, 15 bp, Homo sapiens
agggaactttcctgt

SEQ ID NO: 370108 - DNA, 15 bp, Homo sapiens
gagggaactttcctg

SEQ ID NO: 370109 - DNA, 15 bp, Homo sapiens
agagggaactttcct

SEQ ID NO: 370110 - DNA, 15 bp, Homo sapiens
cagagggaactttcc

SEQ ID NO: 370111 - DNA, 15 bp, Homo sapiens
ccagagggaactttc

SEQ ID NO: 370112 - DNA, 15 bp, Homo sapiens
accagagggaacttt

SEQ ID NO: 370113 - DNA, 15 bp, Homo sapiens
aaccagagggaactt

SEQ ID NO: 370114 - DNA, 15 bp, Homo sapiens
aaaccagagggaact

SEQ ID NO: 370115 - DNA, 15 bp, Homo sapiens
caaaccagagggaac

SEQ ID NO: 370116 - DNA, 15 bp, Homo sapiens
tcaaaccagagggaa

SEQ ID NO: 370117 - DNA, 15 bp, Homo sapiens
atcaaaccagaggga

SEQ ID NO: 370118 - DNA, 15 bp, Homo sapiens
aatcaaaccagaggg

SEQ ID NO: 370119 - DNA, 15 bp, Homo sapiens
gaatcaaaccagagg

SEQ ID NO: 370120 - DNA, 15 bp, Homo sapiens
ggaatcaaaccagag

SEQ ID NO: 370121 - DNA, 15 bp, Homo sapiens
gggaatcaaaccaga

SEQ ID NO: 370122 - DNA, 15 bp, Homo sapiens
cgggaatcaaaccag

SEQ ID NO: 370123 - DNA, 15 bp, Homo sapiens
ccgggaatcaaacca

SEQ ID NO: 370124 - DNA, 15 bp, Homo sapiens
gccgggaatcaaacc

SEQ ID NO: 370125 - DNA, 15 bp, Homo sapiens
ggccgggaatcaaac

SEQ ID NO: 370126 - DNA, 15 bp, Homo sapiens
aggccgggaatcaaa

SEQ ID NO: 370127 - DNA, 15 bp, Homo sapiens
caggccgggaatcaa

SEQ ID NO: 370128 - DNA, 15 bp, Homo sapiens
tcaggccgggaatca

SEQ ID NO: 370129 - DNA, 15 bp, Homo sapiens
gtcaggccgggaatc

SEQ ID NO: 370130 - DNA, 15 bp, Homo sapiens
agtcaggccgggaat

SEQ ID NO: 370131 - DNA, 15 bp, Homo sapiens
aagtcaggccgggaa

SEQ ID NO: 370132 - DNA, 15 bp, Homo sapiens
aaagtcaggccggga

SEQ ID NO: 370133 - DNA, 15 bp, Homo sapiens
aaaagtcaggccggg

SEQ ID NO: 370134 - DNA, 15 bp, Homo sapiens
gaaaagtcaggccgg

SEQ ID NO: 370135 - DNA, 15 bp, Homo sapiens
agaaaagtcaggccg

SEQ ID NO: 370136 - DNA, 15 bp, Homo sapiens
cagaaaagtcaggcc

SEQ ID NO: 370137 - DNA, 15 bp, Homo sapiens
gcagaaaagtcaggc

SEQ ID NO: 370138 - DNA, 15 bp, Homo sapiens
agcagaaaagtcagg

SEQ ID NO: 370139 - DNA, 15 bp, Homo sapiens
cagcagaaaagtcag

SEQ ID NO: 370140 - DNA, 15 bp, Homo sapiens
ccagcagaaaagtca

SEQ ID NO: 370141 - DNA, 15 bp, Homo sapiens
cccagcagaaaagtc

SEQ ID NO: 370142 - DNA, 15 bp, Homo sapiens
ccccagcagaaaagt

SEQ ID NO: 370143 - DNA, 15 bp, Homo sapiens
cccccagcagaaaag

SEQ ID NO: 370144 - DNA, 15 bp, Homo sapiens
tcccccagcagaaaa

SEQ ID NO: 370145 - DNA, 15 bp, Homo sapiens
ttcccccagcagaaa

SEQ ID NO: 370146 - DNA, 15 bp, Homo sapiens
cttcccccagcagaa

SEQ ID NO: 370147 - DNA, 15 bp, Homo sapiens
acttcccccagcaga

SEQ ID NO: 370148 - DNA, 15 bp, Homo sapiens
cacttcccccagcag

SEQ ID NO: 370149 - DNA, 15 bp, Homo sapiens
tcacttcccccagca

SEQ ID NO: 370150 - DNA, 15 bp, Homo sapiens
ttcacttcccccagc

SEQ ID NO: 370151 - DNA, 15 bp, Homo sapiens
attcacttcccccag

SEQ ID NO: 370152 - DNA, 15 bp, Homo sapiens
tattcacttccccca

SEQ ID NO: 370153 - DNA, 15 bp, Homo sapiens
atattcacttccccc

SEQ ID NO: 370154 - DNA, 15 bp, Homo sapiens
catattcacttcccc

SEQ ID NO: 370155 - DNA, 15 bp, Homo sapiens
gcatattcacttccc

SEQ ID NO: 370156 - DNA, 15 bp, Homo sapiens
agcatattcacttcc

SEQ ID NO: 370157 - DNA, 15 bp, Homo sapiens
aagcatattcacttc

SEQ ID NO: 370158 - DNA, 15 bp, Homo sapiens
caagcatattcactt

SEQ ID NO: 370159 - DNA, 15 bp, Homo sapiens
acaagcatattcact

SEQ ID NO: 370160 - DNA, 15 bp, Homo sapiens
aacaagcatattcac

SEQ ID NO: 370161 - DNA, 15 bp, Homo sapiens
gaacaagcatattca

SEQ ID NO: 370162 - DNA, 15 bp, Homo sapiens
agaacaagcatattc

SEQ ID NO: 370163 - DNA, 15 bp, Homo sapiens
gagaacaagcatatt

SEQ ID NO: 370164 - DNA, 15 bp, Homo sapiens
tgagaacaagcatat

SEQ ID NO: 370165 - DNA, 15 bp, Homo sapiens
gtgagaacaagcata

SEQ ID NO: 370166 - DNA, 15 bp, Homo sapiens
agtgagaacaagcat

SEQ ID NO: 370167 - DNA, 15 bp, Homo sapiens
gagtgagaacaagca

SEQ ID NO: 370168 - DNA, 15 bp, Homo sapiens
agagtgagaacaagc

SEQ ID NO: 370169 - DNA, 15 bp, Homo sapiens
cagagtgagaacaag

SEQ ID NO: 370170 - DNA, 15 bp, Homo sapiens
gcagagtgagaacaa

SEQ ID NO: 370171 - DNA, 15 bp, Homo sapiens
cgcagagtgagaaca

SEQ ID NO: 370172 - DNA, 15 bp, Homo sapiens
ccgcagagtgagaac

SEQ ID NO: 370173 - DNA, 15 bp, Homo sapiens
cccgcagagtgagaa

SEQ ID NO: 370174 - DNA, 15 bp, Homo sapiens
ccccgcagagtgaga

SEQ ID NO: 370175 - DNA, 15 bp, Homo sapiens
accccgcagagtgag

SEQ ID NO: 370176 - DNA, 15 bp, Homo sapiens
gaccccgcagagtga

SEQ ID NO: 370177 - DNA, 15 bp, Homo sapiens
ggaccccgcagagtg

SEQ ID NO: 370178 - DNA, 15 bp, Homo sapiens
gggaccccgcagagt

SEQ ID NO: 370179 - DNA, 15 bp, Homo sapiens
ggggaccccgcagag

SEQ ID NO: 370180 - DNA, 15 bp, Homo sapiens
gggggaccccgcaga

SEQ ID NO: 370181 - DNA, 15 bp, Homo sapiens
agggggaccccgcag

SEQ ID NO: 370182 - DNA, 15 bp, Homo sapiens
cagggggaccccgca

SEQ ID NO: 370183 - DNA, 15 bp, Homo sapiens
ccagggggaccccgc

SEQ ID NO: 370184 - DNA, 15 bp, Homo sapiens
gccagggggaccccg

SEQ ID NO: 370185 - DNA, 15 bp, Homo sapiens
ggccagggggacccc

SEQ ID NO: 370186 - DNA, 15 bp, Homo sapiens
aggccagggggaccc

SEQ ID NO: 370187 - DNA, 15 bp, Homo sapiens
caggccagggggacc

SEQ ID NO: 370188 - DNA, 15 bp, Homo sapiens
gcaggccagggggac

SEQ ID NO: 370189 - DNA, 15 bp, Homo sapiens
ggcaggccaggggga

SEQ ID NO: 370190 - DNA, 15 bp, Homo sapiens
gggcaggccaggggg

SEQ ID NO: 370191 - DNA, 15 bp, Homo sapiens
tgggcaggccagggg

SEQ ID NO: 370192 - DNA, 15 bp, Homo sapiens
atgggcaggccaggg

SEQ ID NO: 370193 - DNA, 15 bp, Homo sapiens
gatgggcaggccagg

SEQ ID NO: 370194 - DNA, 15 bp, Homo sapiens
ggatgggcaggccag

SEQ ID NO: 370195 - DNA, 15 bp, Homo sapiens
gggatgggcaggcca

SEQ ID NO: 370196 - DNA, 15 bp, Homo sapiens
tgggatgggcaggcc

SEQ ID NO: 370197 - DNA, 15 bp, Homo sapiens
ctgggatgggcaggc

SEQ ID NO: 370198 - DNA, 15 bp, Homo sapiens
actgggatgggcagg

SEQ ID NO: 370199 - DNA, 15 bp, Homo sapiens
cactgggatgggcag

SEQ ID NO: 370200 - DNA, 15 bp, Homo sapiens
tcactgggatgggca

SEQ ID NO: 370201 - DNA, 15 bp, Homo sapiens
gtcactgggatgggc

SEQ ID NO: 370202 - DNA, 15 bp, Homo sapiens
agtcactgggatggg

SEQ ID NO: 370203 - DNA, 15 bp, Homo sapiens
cagtcactgggatgg

SEQ ID NO: 370204 - DNA, 15 bp, Homo sapiens
gcagtcactgggatg

SEQ ID NO: 370205 - DNA, 15 bp, Homo sapiens
cgcagtcactgggat

SEQ ID NO: 370206 - DNA, 15 bp, Homo sapiens
tcgcagtcactggga

SEQ ID NO: 370207 - DNA, 15 bp, Homo sapiens
ttcgcagtcactggg

SEQ ID NO: 370208 - DNA, 15 bp, Homo sapiens
gttcgcagtcactgg

SEQ ID NO: 370209 - DNA, 15 bp, Homo sapiens
ggttcgcagtcactg

SEQ ID NO: 370210 - DNA, 15 bp, Homo sapiens
tggttcgcagtcact

SEQ ID NO: 370211 - DNA, 15 bp, Homo sapiens
ctggttcgcagtcac

SEQ ID NO: 370212 - DNA, 15 bp, Homo sapiens
cctggttcgcagtca

SEQ ID NO: 370213 - DNA, 15 bp, Homo sapiens
tcctggttcgcagtc

SEQ ID NO: 370214 - DNA, 15 bp, Homo sapiens
atcctggttcgcagt

SEQ ID NO: 370215 - DNA, 15 bp, Homo sapiens
catcctggttcgcag

SEQ ID NO: 370216 - DNA, 15 bp, Homo sapiens
ccatcctggttcgca

SEQ ID NO: 370217 - DNA, 15 bp, Homo sapiens
accatcctggttcgc

SEQ ID NO: 370218 - DNA, 15 bp, Homo sapiens
caccatcctggttcg

SEQ ID NO: 370219 - DNA, 15 bp, Homo sapiens
gcaccatcctggttc

SEQ ID NO: 370220 - DNA, 15 bp, Homo sapiens
ggcaccatcctggtt

SEQ ID NO: 370221 - DNA, 15 bp, Homo sapiens
tggcaccatcctggt

SEQ ID NO: 370222 - DNA, 15 bp, Homo sapiens
ctggcaccatcctgg

SEQ ID NO: 370223 - DNA, 15 bp, Homo sapiens
cctggcaccatcctg

SEQ ID NO: 370224 - DNA, 15 bp, Homo sapiens
ccctggcaccatcct

SEQ ID NO: 370225 - DNA, 15 bp, Homo sapiens
accctggcaccatcc

SEQ ID NO: 370226 - DNA, 15 bp, Homo sapiens
aaccctggcaccatc

SEQ ID NO: 370227 - DNA, 15 bp, Homo sapiens
caaccctggcaccat

SEQ ID NO: 370228 - DNA, 15 bp, Homo sapiens
ccaaccctggcacca

SEQ ID NO: 370229 - DNA, 15 bp, Homo sapiens
gccaaccctggcacc

SEQ ID NO: 370230 - DNA, 15 bp, Homo sapiens
agccaaccctggcac

SEQ ID NO: 370231 - DNA, 15 bp, Homo sapiens
gagccaaccctggca

SEQ ID NO: 370232 - DNA, 15 bp, Homo sapiens
ggagccaaccctggc

SEQ ID NO: 370233 - DNA, 15 bp, Homo sapiens
tggagccaaccctgg

SEQ ID NO: 370234 - DNA, 15 bp, Homo sapiens
ttggagccaaccctg

SEQ ID NO: 370235 - DNA, 15 bp, Homo sapiens
tttggagccaaccct

SEQ ID NO: 370236 - DNA, 15 bp, Homo sapiens
ttttggagccaaccc

SEQ ID NO: 370237 - DNA, 15 bp, Homo sapiens
cttttggagccaacc

SEQ ID NO: 370238 - DNA, 15 bp, Homo sapiens
gcttttggagccaac

SEQ ID NO: 370239 - DNA, 15 bp, Homo sapiens
agcttttggagccaa

SEQ ID NO: 370240 - DNA, 15 bp, Homo sapiens
cagcttttggagcca

SEQ ID NO: 370241 - DNA, 15 bp, Homo sapiens
ccagcttttggagcc

SEQ ID NO: 370242 - DNA, 15 bp, Homo sapiens
accagcttttggagc

SEQ ID NO: 370243 - DNA, 15 bp, Homo sapiens
caccagcttttggag

SEQ ID NO: 370244 - DNA, 15 bp, Homo sapiens
tcaccagcttttgga

SEQ ID NO: 370245 - DNA, 15 bp, Homo sapiens
atcaccagcttttgg

SEQ ID NO: 370246 - DNA, 15 bp, Homo sapiens
gatcaccagcttttg

SEQ ID NO: 370247 - DNA, 15 bp, Homo sapiens
ggatcaccagctttt

SEQ ID NO: 370248 - DNA, 15 bp, Homo sapiens
tggatcaccagcttt

SEQ ID NO: 370249 - DNA, 15 bp, Homo sapiens
ctggatcaccagctt

SEQ ID NO: 370250 - DNA, 15 bp, Homo sapiens
tctggatcaccagct

SEQ ID NO: 370251 - DNA, 15 bp, Homo sapiens
gtctggatcaccagc

SEQ ID NO: 370252 - DNA, 15 bp, Homo sapiens
ggtctggatcaccag

SEQ ID NO: 370253 - DNA, 15 bp, Homo sapiens
gggtctggatcacca

SEQ ID NO: 370254 - DNA, 15 bp, Homo sapiens
agggtctggatcacc

SEQ ID NO: 370255 - DNA, 15 bp, Homo sapiens
aagggtctggatcac

SEQ ID NO: 370256 - DNA, 15 bp, Homo sapiens
gaagggtctggatca

SEQ ID NO: 370257 - DNA, 15 bp, Homo sapiens
ggaagggtctggatc

SEQ ID NO: 370258 - DNA, 15 bp, Homo sapiens
aggaagggtctggat

SEQ ID NO: 370259 - DNA, 15 bp, Homo sapiens
caggaagggtctgga

SEQ ID NO: 370260 - DNA, 15 bp, Homo sapiens
ccaggaagggtctgg

SEQ ID NO: 370261 - DNA, 15 bp, Homo sapiens
cccaggaagggtctg

SEQ ID NO: 370262 - DNA, 15 bp, Homo sapiens
gcccaggaagggtct

SEQ ID NO: 370263 - DNA, 15 bp, Homo sapiens
ggcccaggaagggtc

SEQ ID NO: 370264 - DNA, 15 bp, Homo sapiens
gggcccaggaagggt

SEQ ID NO: 370265 - DNA, 15 bp, Homo sapiens
ggggcccaggaaggg

SEQ ID NO: 370266 - DNA, 15 bp, Homo sapiens
aggggcccaggaagg

SEQ ID NO: 370267 - DNA, 15 bp, Homo sapiens
caggggcccaggaag

SEQ ID NO: 370268 - DNA, 15 bp, Homo sapiens
ccaggggcccaggaa

SEQ ID NO: 370269 - DNA, 15 bp, Homo sapiens
tccaggggcccagga

SEQ ID NO: 370270 - DNA, 15 bp, Homo sapiens
ctccaggggcccagg

SEQ ID NO: 370271 - DNA, 15 bp, Homo sapiens
tctccaggggcccag

SEQ ID NO: 370272 - DNA, 15 bp, Homo sapiens
gtctccaggggccca

SEQ ID NO: 370273 - DNA, 15 bp, Homo sapiens
ggtctccaggggccc

SEQ ID NO: 370274 - DNA, 15 bp, Homo sapiens
gggtctccaggggcc

SEQ ID NO: 370275 - DNA, 15 bp, Homo sapiens
ggggtctccaggggc

SEQ ID NO: 370276 - DNA, 15 bp, Homo sapiens
tggggtctccagggg

SEQ ID NO: 370277 - DNA, 15 bp, Homo sapiens
ctggggtctccaggg

SEQ ID NO: 370278 - DNA, 15 bp, Homo sapiens
actggggtctccagg

SEQ ID NO: 370279 - DNA, 15 bp, Homo sapiens
gactggggtctccag

SEQ ID NO: 370280 - DNA, 15 bp, Homo sapiens
ggactggggtctcca

SEQ ID NO: 370281 - DNA, 15 bp, Homo sapiens
gggactggggtctcc

SEQ ID NO: 370282 - DNA, 15 bp, Homo sapiens
agggactggggtctc

SEQ ID NO: 370283 - DNA, 15 bp, Homo sapiens
cagggactggggtct

SEQ ID NO: 370284 - DNA, 15 bp, Homo sapiens
acagggactggggtc

SEQ ID NO: 370285 - DNA, 15 bp, Homo sapiens
cacagggactggggt

SEQ ID NO: 370286 - DNA, 15 bp, Homo sapiens
tcacagggactgggg

SEQ ID NO: 370287 - DNA, 15 bp, Homo sapiens
atcacagggactggg

SEQ ID NO: 370288 - DNA, 15 bp, Homo sapiens
catcacagggactgg

SEQ ID NO: 370289 - DNA, 15 bp, Homo sapiens
acatcacagggactg

SEQ ID NO: 370290 - DNA, 15 bp, Homo sapiens
gacatcacagggact

SEQ ID NO: 370291 - DNA, 15 bp, Homo sapiens
ggacatcacagggac

SEQ ID NO: 370292 - DNA, 15 bp, Homo sapiens
aggacatcacaggga

SEQ ID NO: 370293 - DNA, 15 bp, Homo sapiens
aaggacatcacaggg

SEQ ID NO: 370294 - DNA, 15 bp, Homo sapiens
caaggacatcacagg

SEQ ID NO: 370295 - DNA, 15 bp, Homo sapiens
gcaaggacatcacag

SEQ ID NO: 370296 - DNA, 15 bp, Homo sapiens
ggcaaggacatcaca

SEQ ID NO: 370297 - DNA, 15 bp, Homo sapiens
gggcaaggacatcac

SEQ ID NO: 370298 - DNA, 15 bp, Homo sapiens
tgggcaaggacatca

SEQ ID NO: 370299 - DNA, 15 bp, Homo sapiens
ttgggcaaggacatc

SEQ ID NO: 370300 - DNA, 15 bp, Homo sapiens
cttgggcaaggacat

SEQ ID NO: 370301 - DNA, 15 bp, Homo sapiens
acttgggcaaggaca

SEQ ID NO: 370302 - DNA, 15 bp, Homo sapiens
aacttgggcaaggac

SEQ ID NO: 370303 - DNA, 15 bp, Homo sapiens
gaacttgggcaagga

SEQ ID NO: 370304 - DNA, 15 bp, Homo sapiens
agaacttgggcaagg

SEQ ID NO: 370305 - DNA, 15 bp, Homo sapiens
tagaacttgggcaag

SEQ ID NO: 370306 - DNA, 15 bp, Homo sapiens
ctagaacttgggcaa

SEQ ID NO: 370307 - DNA, 15 bp, Homo sapiens
cctagaacttgggca

SEQ ID NO: 370308 - DNA, 15 bp, Homo sapiens
ccctagaacttgggc

SEQ ID NO: 370309 - DNA, 15 bp, Homo sapiens
gccctagaacttggg

SEQ ID NO: 370310 - DNA, 15 bp, Homo sapiens
agccctagaacttgg

SEQ ID NO: 370311 - DNA, 15 bp, Homo sapiens
cagccctagaacttg

SEQ ID NO: 370312 - DNA, 15 bp, Homo sapiens
gcagccctagaactt

SEQ ID NO: 370313 - DNA, 15 bp, Homo sapiens
tgcagccctagaact

SEQ ID NO: 370314 - DNA, 15 bp, Homo sapiens
ctgcagccctagaac

SEQ ID NO: 370315 - DNA, 15 bp, Homo sapiens
actgcagccctagaa

SEQ ID NO: 370316 - DNA, 15 bp, Homo sapiens
cactgcagccctaga

SEQ ID NO: 370317 - DNA, 15 bp, Homo sapiens
ccactgcagccctag

SEQ ID NO: 370318 - DNA, 15 bp, Homo sapiens
gccactgcagcccta

SEQ ID NO: 370319 - DNA, 15 bp, Homo sapiens
ggccactgcagccct

SEQ ID NO: 370320 - DNA, 15 bp, Homo sapiens
cggccactgcagccc

SEQ ID NO: 370321 - DNA, 15 bp, Homo sapiens
acggccactgcagcc

SEQ ID NO: 370322 - DNA, 15 bp, Homo sapiens
tacggccactgcagc

SEQ ID NO: 370323 - DNA, 15 bp, Homo sapiens
ctacggccactgcag

SEQ ID NO: 370324 - DNA, 15 bp, Homo sapiens
cctacggccactgca

SEQ ID NO: 370325 - DNA, 15 bp, Homo sapiens
acctacggccactgc

SEQ ID NO: 370326 - DNA, 15 bp, Homo sapiens
cacctacggccactg

SEQ ID NO: 370327 - DNA, 15 bp, Homo sapiens
tcacctacggccact

SEQ ID NO: 370328 - DNA, 15 bp, Homo sapiens
gtcacctacggccac

SEQ ID NO: 370329 - DNA, 15 bp, Homo sapiens
agtcacctacggcca

SEQ ID NO: 370330 - DNA, 15 bp, Homo sapiens
cagtcacctacggcc

SEQ ID NO: 370331 - DNA, 15 bp, Homo sapiens
ccagtcacctacggc

SEQ ID NO: 370332 - DNA, 15 bp, Homo sapiens
gccagtcacctacgg

SEQ ID NO: 370333 - DNA, 15 bp, Homo sapiens
ggccagtcacctacg

SEQ ID NO: 370334 - DNA, 15 bp, Homo sapiens
gggccagtcacctac

SEQ ID NO: 370335 - DNA, 15 bp, Homo sapiens
cgggccagtcaccta

SEQ ID NO: 370336 - DNA, 15 bp, Homo sapiens
ccgggccagtcacct

SEQ ID NO: 370337 - DNA, 15 bp, Homo sapiens
cccgggccagtcacc

SEQ ID NO: 370338 - DNA, 15 bp, Homo sapiens
gcccgggccagtcac

SEQ ID NO: 370339 - DNA, 15 bp, Homo sapiens
tgcccgggccagtca

SEQ ID NO: 370340 - DNA, 15 bp, Homo sapiens
gtgcccgggccagtc

SEQ ID NO: 370341 - DNA, 15 bp, Homo sapiens
ggtgcccgggccagt

SEQ ID NO: 370342 - DNA, 15 bp, Homo sapiens
gggtgcccgggccag

SEQ ID NO: 370343 - DNA, 15 bp, Homo sapiens
agggtgcccgggcca

SEQ ID NO: 370344 - DNA, 15 bp, Homo sapiens
gagggtgcccgggcc

SEQ ID NO: 370345 - DNA, 15 bp, Homo sapiens
ggagggtgcccgggc

SEQ ID NO: 370346 - DNA, 15 bp, Homo sapiens
gggagggtgcccggg

SEQ ID NO: 370347 - DNA, 15 bp, Homo sapiens
agggagggtgcccgg

SEQ ID NO: 370348 - DNA, 15 bp, Homo sapiens
aagggagggtgcccg

SEQ ID NO: 370349 - DNA, 15 bp, Homo sapiens
aaagggagggtgccc

SEQ ID NO: 370350 - DNA, 15 bp, Homo sapiens
caaagggagggtgcc

SEQ ID NO: 370351 - DNA, 15 bp, Homo sapiens
gcaaagggagggtgc

SEQ ID NO: 370352 - DNA, 15 bp, Homo sapiens
cgcaaagggagggtg

SEQ ID NO: 370353 - DNA, 15 bp, Homo sapiens
ccgcaaagggagggt

SEQ ID NO: 370354 - DNA, 15 bp, Homo sapiens
cccgcaaagggaggg

SEQ ID NO: 370355 - DNA, 15 bp, Homo sapiens
tcccgcaaagggagg

SEQ ID NO: 370356 - DNA, 15 bp, Homo sapiens
ctcccgcaaagggag

SEQ ID NO: 370357 - DNA, 15 bp, Homo sapiens
gctcccgcaaaggga

SEQ ID NO: 370358 - DNA, 15 bp, Homo sapiens
ggctcccgcaaaggg

SEQ ID NO: 370359 - DNA, 15 bp, Homo sapiens
aggctcccgcaaagg

SEQ ID NO: 370360 - DNA, 15 bp, Homo sapiens
gaggctcccgcaaag

SEQ ID NO: 370361 - DNA, 15 bp, Homo sapiens
cgaggctcccgcaaa

SEQ ID NO: 370362 - DNA, 15 bp, Homo sapiens
acgaggctcccgcaa

SEQ ID NO: 370363 - DNA, 15 bp, Homo sapiens
cacgaggctcccgca

SEQ ID NO: 370364 - DNA, 15 bp, Homo sapiens
tcacgaggctcccgc

SEQ ID NO: 370365 - DNA, 15 bp, Homo sapiens
ttcacgaggctcccg

SEQ ID NO: 370366 - DNA, 15 bp, Homo sapiens
tttcacgaggctccc

SEQ ID NO: 370367 - DNA, 15 bp, Homo sapiens
ctttcacgaggctcc

SEQ ID NO: 370368 - DNA, 15 bp, Homo sapiens
cctttcacgaggctc

SEQ ID NO: 370369 - DNA, 15 bp, Homo sapiens
tcctttcacgaggct

SEQ ID NO: 370370 - DNA, 15 bp, Homo sapiens
atcctttcacgaggc

SEQ ID NO: 370371 - DNA, 15 bp, Homo sapiens
tatcctttcacgagg

SEQ ID NO: 370372 - DNA, 15 bp, Homo sapiens
gtatcctttcacgag

SEQ ID NO: 370373 - DNA, 15 bp, Homo sapiens
agtatcctttcacga

SEQ ID NO: 370374 - DNA, 15 bp, Homo sapiens
cagtatcctttcacg

SEQ ID NO: 370375 - DNA, 15 bp, Homo sapiens
acagtatcctttcac

SEQ ID NO: 370376 - DNA, 15 bp, Homo sapiens
tacagtatcctttca

SEQ ID NO: 370377 - DNA, 15 bp, Homo sapiens
ttacagtatcctttc

SEQ ID NO: 370378 - DNA, 15 bp, Homo sapiens
cttacagtatccttt

SEQ ID NO: 370379 - DNA, 15 bp, Homo sapiens
gcttacagtatcctt

SEQ ID NO: 370380 - DNA, 15 bp, Homo sapiens
tgcttacagtatcct

SEQ ID NO: 370381 - DNA, 15 bp, Homo sapiens
gtgcttacagtatcc

SEQ ID NO: 370382 - DNA, 15 bp, Homo sapiens
tgtgcttacagtatc

SEQ ID NO: 370383 - DNA, 15 bp, Homo sapiens
ctgtgcttacagtat

SEQ ID NO: 370384 - DNA, 15 bp, Homo sapiens
gctgtgcttacagta

SEQ ID NO: 370385 - DNA, 15 bp, Homo sapiens
ggctgtgcttacagt

SEQ ID NO: 370386 - DNA, 15 bp, Homo sapiens
tggctgtgcttacag

SEQ ID NO: 370387 - DNA, 15 bp, Homo sapiens
gtggctgtgcttaca

SEQ ID NO: 370388 - DNA, 15 bp, Homo sapiens
tgtggctgtgcttac

SEQ ID NO: 370389 - DNA, 15 bp, Homo sapiens
ctgtggctgtgctta

SEQ ID NO: 370390 - DNA, 15 bp, Homo sapiens
cctgtggctgtgctt

SEQ ID NO: 370391 - DNA, 15 bp, Homo sapiens
ccctgtggctgtgct

SEQ ID NO: 370392 - DNA, 15 bp, Homo sapiens
tccctgtggctgtgc

SEQ ID NO: 370393 - DNA, 15 bp, Homo sapiens
ctccctgtggctgtg

SEQ ID NO: 370394 - DNA, 15 bp, Homo sapiens
cctccctgtggctgt

SEQ ID NO: 370395 - DNA, 15 bp, Homo sapiens
acctccctgtggctg

SEQ ID NO: 370396 - DNA, 15 bp, Homo sapiens
gacctccctgtggct

SEQ ID NO: 370397 - DNA, 15 bp, Homo sapiens
tgacctccctgtggc

SEQ ID NO: 370398 - DNA, 15 bp, Homo sapiens
gtgacctccctgtgg

SEQ ID NO: 370399 - DNA, 15 bp, Homo sapiens
ggtgacctccctgtg

SEQ ID NO: 370400 - DNA, 15 bp, Homo sapiens
tggtgacctccctgt

SEQ ID NO: 370401 - DNA, 15 bp, Homo sapiens
gtggtgacctccctg

SEQ ID NO: 370402 - DNA, 15 bp, Homo sapiens
agtggtgacctccct

SEQ ID NO: 370403 - DNA, 15 bp, Homo sapiens
cagtggtgacctccc

SEQ ID NO: 370404 - DNA, 15 bp, Homo sapiens
ccagtggtgacctcc

SEQ ID NO: 370405 - DNA, 15 bp, Homo sapiens
gccagtggtgacctc

SEQ ID NO: 370406 - DNA, 15 bp, Homo sapiens
ggccagtggtgacct

SEQ ID NO: 370407 - DNA, 15 bp, Homo sapiens
gggccagtggtgacc

SEQ ID NO: 370408 - DNA, 15 bp, Homo sapiens
agggccagtggtgac

SEQ ID NO: 370409 - DNA, 15 bp, Homo sapiens
tagggccagtggtga

SEQ ID NO: 370410 - DNA, 15 bp, Homo sapiens
gtagggccagtggtg

SEQ ID NO: 370411 - DNA, 15 bp, Homo sapiens
ggtagggccagtggt

SEQ ID NO: 370412 - DNA, 15 bp, Homo sapiens
tggtagggccagtgg

SEQ ID NO: 370413 - DNA, 15 bp, Homo sapiens
gtggtagggccagtg

SEQ ID NO: 370414 - DNA, 15 bp, Homo sapiens
ggtggtagggccagt

SEQ ID NO: 370415 - DNA, 15 bp, Homo sapiens
aggtggtagggccag

SEQ ID NO: 370416 - DNA, 15 bp, Homo sapiens
gaggtggtagggcca

SEQ ID NO: 370417 - DNA, 15 bp, Homo sapiens
agaggtggtagggcc

SEQ ID NO: 370418 - DNA, 15 bp, Homo sapiens
gagaggtggtagggc

SEQ ID NO: 370419 - DNA, 15 bp, Homo sapiens
cgagaggtggtaggg

SEQ ID NO: 370420 - DNA, 15 bp, Homo sapiens
gcgagaggtggtagg

SEQ ID NO: 370421 - DNA, 15 bp, Homo sapiens
agcgagaggtggtag

SEQ ID NO: 370422 - DNA, 15 bp, Homo sapiens
gagcgagaggtggta

SEQ ID NO: 370423 - DNA, 15 bp, Homo sapiens
cgagcgagaggtggt

SEQ ID NO: 370424 - DNA, 15 bp, Homo sapiens
ccgagcgagaggtgg

SEQ ID NO: 370425 - DNA, 15 bp, Homo sapiens
accgagcgagaggtg

SEQ ID NO: 370426 - DNA, 15 bp, Homo sapiens
taccgagcgagaggt

SEQ ID NO: 370427 - DNA, 15 bp, Homo sapiens
ataccgagcgagagg

SEQ ID NO: 370428 - DNA, 15 bp, Homo sapiens
aataccgagcgagag

SEQ ID NO: 370429 - DNA, 15 bp, Homo sapiens
caataccgagcgaga

SEQ ID NO: 370430 - DNA, 15 bp, Homo sapiens
tcaataccgagcgag

SEQ ID NO: 370431 - DNA, 15 bp, Homo sapiens
ttcaataccgagcga

SEQ ID NO: 370432 - DNA, 15 bp, Homo sapiens
attcaataccgagcg

SEQ ID NO: 370433 - DNA, 15 bp, Homo sapiens
cattcaataccgagc

SEQ ID NO: 370434 - DNA, 15 bp, Homo sapiens
ccattcaataccgag

SEQ ID NO: 370435 - DNA, 15 bp, Homo sapiens
gccattcaataccga

SEQ ID NO: 370436 - DNA, 15 bp, Homo sapiens
agccattcaataccg

SEQ ID NO: 370437 - DNA, 15 bp, Homo sapiens
tagccattcaatacc

SEQ ID NO: 370438 - DNA, 15 bp, Homo sapiens
ctagccattcaatac

SEQ ID NO: 370439 - DNA, 15 bp, Homo sapiens
gctagccattcaata

SEQ ID NO: 370440 - DNA, 15 bp, Homo sapiens
ggctagccattcaat

SEQ ID NO: 370441 - DNA, 15 bp, Homo sapiens
gggctagccattcaa

SEQ ID NO: 370442 - DNA, 15 bp, Homo sapiens
ggggctagccattca

SEQ ID NO: 370443 - DNA, 15 bp, Homo sapiens
tggggctagccattc

SEQ ID NO: 370444 - DNA, 15 bp, Homo sapiens
ttggggctagccatt

SEQ ID NO: 370445 - DNA, 15 bp, Homo sapiens
cttggggctagccat

SEQ ID NO: 370446 - DNA, 15 bp, Homo sapiens
gcttggggctagcca

SEQ ID NO: 370447 - DNA, 15 bp, Homo sapiens
ggcttggggctagcc

SEQ ID NO: 370448 - DNA, 15 bp, Homo sapiens
aggcttggggctagc

SEQ ID NO: 370449 - DNA, 15 bp, Homo sapiens
caggcttggggctag

SEQ ID NO: 370450 - DNA, 15 bp, Homo sapiens
ccaggcttggggcta

SEQ ID NO: 370451 - DNA, 15 bp, Homo sapiens
gccaggcttggggct

SEQ ID NO: 370452 - DNA, 15 bp, Homo sapiens
agccaggcttggggc

SEQ ID NO: 370453 - DNA, 15 bp, Homo sapiens
cagccaggcttgggg

SEQ ID NO: 370454 - DNA, 15 bp, Homo sapiens
gcagccaggcttggg

SEQ ID NO: 370455 - DNA, 15 bp, Homo sapiens
ggcagccaggcttgg

SEQ ID NO: 370456 - DNA, 15 bp, Homo sapiens
aggcagccaggcttg

SEQ ID NO: 370457 - DNA, 15 bp, Homo sapiens
caggcagccaggctt

SEQ ID NO: 370458 - DNA, 15 bp, Homo sapiens
gcaggcagccaggct

SEQ ID NO: 370459 - DNA, 15 bp, Homo sapiens
ggcaggcagccaggc

SEQ ID NO: 370460 - DNA, 15 bp, Homo sapiens
aggcaggcagccagg

SEQ ID NO: 370461 - DNA, 15 bp, Homo sapiens
taggcaggcagccag

SEQ ID NO: 370462 - DNA, 15 bp, Homo sapiens
gtaggcaggcagcca

SEQ ID NO: 370463 - DNA, 15 bp, Homo sapiens
agtaggcaggcagcc

SEQ ID NO: 370464 - DNA, 15 bp, Homo sapiens
cagtaggcaggcagc

SEQ ID NO: 370465 - DNA, 15 bp, Homo sapiens
acagtaggcaggcag

SEQ ID NO: 370466 - DNA, 15 bp, Homo sapiens
gacagtaggcaggca

SEQ ID NO: 370467 - DNA, 15 bp, Homo sapiens
tgacagtaggcaggc

SEQ ID NO: 370468 - DNA, 15 bp, Homo sapiens
gtgacagtaggcagg

SEQ ID NO: 370469 - DNA, 15 bp, Homo sapiens
tgtgacagtaggcag

SEQ ID NO: 370470 - DNA, 15 bp, Homo sapiens
gtgtgacagtaggca

SEQ ID NO: 370471 - DNA, 15 bp, Homo sapiens
tgtgtgacagtaggc

SEQ ID NO: 370472 - DNA, 15 bp, Homo sapiens
ctgtgtgacagtagg

SEQ ID NO: 370473 - DNA, 15 bp, Homo sapiens
tctgtgtgacagtag

SEQ ID NO: 370474 - DNA, 15 bp, Homo sapiens
ctctgtgtgacagta

SEQ ID NO: 370475 - DNA, 15 bp, Homo sapiens
cctctgtgtgacagt

SEQ ID NO: 370476 - DNA, 15 bp, Homo sapiens
gcctctgtgtgacag

SEQ ID NO: 370477 - DNA, 15 bp, Homo sapiens
agcctctgtgtgaca

SEQ ID NO: 370478 - DNA, 15 bp, Homo sapiens
aagcctctgtgtgac

SEQ ID NO: 370479 - DNA, 15 bp, Homo sapiens
gaagcctctgtgtga

SEQ ID NO: 370480 - DNA, 15 bp, Homo sapiens
ggaagcctctgtgtg

SEQ ID NO: 370481 - DNA, 15 bp, Homo sapiens
aggaagcctctgtgt

SEQ ID NO: 370482 - DNA, 15 bp, Homo sapiens
gaggaagcctctgtg

SEQ ID NO: 370483 - DNA, 15 bp, Homo sapiens
agaggaagcctctgt

SEQ ID NO: 370484 - DNA, 15 bp, Homo sapiens
gagaggaagcctctg

SEQ ID NO: 370485 - DNA, 15 bp, Homo sapiens
ggagaggaagcctct

SEQ ID NO: 370486 - DNA, 15 bp, Homo sapiens
cggagaggaagcctc

SEQ ID NO: 370487 - DNA, 15 bp, Homo sapiens
ccggagaggaagcct

SEQ ID NO: 370488 - DNA, 15 bp, Homo sapiens
cccggagaggaagcc

SEQ ID NO: 370489 - DNA, 15 bp, Homo sapiens
gcccggagaggaagc

SEQ ID NO: 370490 - DNA, 15 bp, Homo sapiens
agcccggagaggaag

SEQ ID NO: 370491 - DNA, 15 bp, Homo sapiens
tagcccggagaggaa

SEQ ID NO: 370492 - DNA, 15 bp, Homo sapiens
atagcccggagagga

SEQ ID NO: 370493 - DNA, 15 bp, Homo sapiens
aatagcccggagagg

SEQ ID NO: 370494 - DNA, 15 bp, Homo sapiens
aaatagcccggagag

SEQ ID NO: 370495 - DNA, 15 bp, Homo sapiens
aaaatagcccggaga

SEQ ID NO: 370496 - DNA, 15 bp, Homo sapiens
gaaaatagcccggag

SEQ ID NO: 370497 - DNA, 15 bp, Homo sapiens
tgaaaatagcccgga

SEQ ID NO: 370498 - DNA, 15 bp, Homo sapiens
ctgaaaatagcccgg

SEQ ID NO: 370499 - DNA, 15 bp, Homo sapiens
gctgaaaatagcccg

SEQ ID NO: 370500 - DNA, 15 bp, Homo sapiens
cgctgaaaatagccc

SEQ ID NO: 370501 - DNA, 15 bp, Homo sapiens
ccgctgaaaatagcc

SEQ ID NO: 370502 - DNA, 15 bp, Homo sapiens
cccgctgaaaatagc

SEQ ID NO: 370503 - DNA, 15 bp, Homo sapiens
tcccgctgaaaatag

SEQ ID NO: 370504 - DNA, 15 bp, Homo sapiens
ttcccgctgaaaata

SEQ ID NO: 370505 - DNA, 15 bp, Homo sapiens
cttcccgctgaaaat

SEQ ID NO: 370506 - DNA, 15 bp, Homo sapiens
tcttcccgctgaaaa

SEQ ID NO: 370507 - DNA, 15 bp, Homo sapiens
atcttcccgctgaaa

SEQ ID NO: 370508 - DNA, 15 bp, Homo sapiens
tatcttcccgctgaa

SEQ ID NO: 370509 - DNA, 15 bp, Homo sapiens
atatcttcccgctga

SEQ ID NO: 370510 - DNA, 15 bp, Homo sapiens
aatatcttcccgctg

SEQ ID NO: 370511 - DNA, 15 bp, Homo sapiens
taatatcttcccgct

SEQ ID NO: 370512 - DNA, 15 bp, Homo sapiens
ataatatcttcccgc

SEQ ID NO: 370513 - DNA, 15 bp, Homo sapiens
aataatatcttcccg

SEQ ID NO: 370514 - DNA, 15 bp, Homo sapiens
taataatatcttccc

SEQ ID NO: 370515 - DNA, 15 bp, Homo sapiens
ttaataatatcttcc

SEQ ID NO: 370516 - DNA, 15 bp, Homo sapiens
gttaataatatcttc

SEQ ID NO: 370517 - DNA, 15 bp, Homo sapiens
agttaataatatctt

SEQ ID NO: 370518 - DNA, 15 bp, Homo sapiens
cagttaataatatct

SEQ ID NO: 370519 - DNA, 15 bp, Homo sapiens
gcagttaataatatc

SEQ ID NO: 370520 - DNA, 15 bp, Homo sapiens
agcagttaataatat

SEQ ID NO: 370521 - DNA, 15 bp, Homo sapiens
cagcagttaataata

SEQ ID NO: 370522 - DNA, 15 bp, Homo sapiens
tcagcagttaataat

SEQ ID NO: 370523 - DNA, 15 bp, Homo sapiens
ctcagcagttaataa

SEQ ID NO: 370524 - DNA, 15 bp, Homo sapiens
cctcagcagttaata

SEQ ID NO: 370525 - DNA, 15 bp, Homo sapiens
gcctcagcagttaat

SEQ ID NO: 370526 - DNA, 15 bp, Homo sapiens
tgcctcagcagttaa

SEQ ID NO: 370527 - DNA, 15 bp, Homo sapiens
gtgcctcagcagtta

SEQ ID NO: 370528 - DNA, 15 bp, Homo sapiens
tgtgcctcagcagtt

SEQ ID NO: 370529 - DNA, 15 bp, Homo sapiens
ctgtgcctcagcagt

SEQ ID NO: 370530 - DNA, 15 bp, Homo sapiens
actgtgcctcagcag

SEQ ID NO: 370531 - DNA, 15 bp, Homo sapiens
aactgtgcctcagca

SEQ ID NO: 370532 - DNA, 15 bp, Homo sapiens
gaactgtgcctcagc

SEQ ID NO: 370533 - DNA, 15 bp, Homo sapiens
agaactgtgcctcag

SEQ ID NO: 370534 - DNA, 15 bp, Homo sapiens
gagaactgtgcctca

SEQ ID NO: 370535 - DNA, 15 bp, Homo sapiens
tgagaactgtgcctc

SEQ ID NO: 370536 - DNA, 15 bp, Homo sapiens
ttgagaactgtgcct

SEQ ID NO: 370537 - DNA, 15 bp, Homo sapiens
attgagaactgtgcc

SEQ ID NO: 370538 - DNA, 15 bp, Homo sapiens
aattgagaactgtgc

SEQ ID NO: 370539 - DNA, 15 bp, Homo sapiens
aaattgagaactgtg

SEQ ID NO: 370540 - DNA, 15 bp, Homo sapiens
taaattgagaactgt

SEQ ID NO: 370541 - DNA, 15 bp, Homo sapiens
ctaaattgagaactg

SEQ ID NO: 370542 - DNA, 15 bp, Homo sapiens
actaaattgagaact

SEQ ID NO: 370543 - DNA, 15 bp, Homo sapiens
cactaaattgagaac

SEQ ID NO: 370544 - DNA, 15 bp, Homo sapiens
ccactaaattgagaa

SEQ ID NO: 370545 - DNA, 15 bp, Homo sapiens
accactaaattgaga

SEQ ID NO: 370546 - DNA, 15 bp, Homo sapiens
aaccactaaattgag

SEQ ID NO: 370547 - DNA, 15 bp, Homo sapiens
taaccactaaattga

SEQ ID NO: 370548 - DNA, 15 bp, Homo sapiens
ttaaccactaaattg

SEQ ID NO: 370549 - DNA, 15 bp, Homo sapiens
gttaaccactaaatt

SEQ ID NO: 370550 - DNA, 15 bp, Homo sapiens
tgttaaccactaaat

SEQ ID NO: 370551 - DNA, 15 bp, Homo sapiens
gtgttaaccactaaa

SEQ ID NO: 370552 - DNA, 15 bp, Homo sapiens
tgtgttaaccactaa

SEQ ID NO: 370553 - DNA, 15 bp, Homo sapiens
gtgtgttaaccacta

SEQ ID NO: 370554 - DNA, 15 bp, Homo sapiens
ggtgtgttaaccact

SEQ ID NO: 370555 - DNA, 15 bp, Homo sapiens
tggtgtgttaaccac

SEQ ID NO: 370556 - DNA, 15 bp, Homo sapiens
ttggtgtgttaacca

SEQ ID NO: 370557 - DNA, 15 bp, Homo sapiens
cttggtgtgttaacc

SEQ ID NO: 370558 - DNA, 15 bp, Homo sapiens
tcttggtgtgttaac

SEQ ID NO: 370559 - DNA, 15 bp, Homo sapiens
ttcttggtgtgttaa

SEQ ID NO: 370560 - DNA, 15 bp, Homo sapiens
tttcttggtgtgtta

SEQ ID NO: 370561 - DNA, 15 bp, Homo sapiens
ctttcttggtgtgtt

SEQ ID NO: 370562 - DNA, 15 bp, Homo sapiens
gctttcttggtgtgt

SEQ ID NO: 370563 - DNA, 15 bp, Homo sapiens
tgctttcttggtgtg

SEQ ID NO: 370564 - DNA, 15 bp, Homo sapiens
ttgctttcttggtgt

SEQ ID NO: 370565 - DNA, 15 bp, Homo sapiens
gttgctttcttggtg

SEQ ID NO: 370566 - DNA, 15 bp, Homo sapiens
tgttgctttcttggt

SEQ ID NO: 370567 - DNA, 15 bp, Homo sapiens
gtgttgctttcttgg

SEQ ID NO: 370568 - DNA, 15 bp, Homo sapiens
agtgttgctttcttg

SEQ ID NO: 370569 - DNA, 15 bp, Homo sapiens
gagtgttgctttctt

SEQ ID NO: 370570 - DNA, 15 bp, Homo sapiens
tgagtgttgctttct

SEQ ID NO: 370571 - DNA, 15 bp, Homo sapiens
gtgagtgttgctttc

SEQ ID NO: 370572 - DNA, 15 bp, Homo sapiens
ggtgagtgttgcttt

SEQ ID NO: 370573 - DNA, 15 bp, Homo sapiens
aggtgagtgttgctt

SEQ ID NO: 370574 - DNA, 15 bp, Homo sapiens
caggtgagtgttgct

SEQ ID NO: 370575 - DNA, 15 bp, Homo sapiens
tcaggtgagtgttgc

SEQ ID NO: 370576 - DNA, 15 bp, Homo sapiens
atcaggtgagtgttg

SEQ ID NO: 370577 - DNA, 15 bp, Homo sapiens
gatcaggtgagtgtt

SEQ ID NO: 370578 - DNA, 15 bp, Homo sapiens
ggatcaggtgagtgt

SEQ ID NO: 370579 - DNA, 15 bp, Homo sapiens
gggatcaggtgagtg

SEQ ID NO: 370580 - DNA, 15 bp, Homo sapiens
cgggatcaggtgagt

SEQ ID NO: 370581 - DNA, 15 bp, Homo sapiens
ccgggatcaggtgag

SEQ ID NO: 370582 - DNA, 15 bp, Homo sapiens
gccgggatcaggtga

SEQ ID NO: 370583 - DNA, 15 bp, Homo sapiens
ggccgggatcaggtg

SEQ ID NO: 370584 - DNA, 15 bp, Homo sapiens
tggccgggatcaggt

SEQ ID NO: 370585 - DNA, 15 bp, Homo sapiens
gtggccgggatcagg

SEQ ID NO: 370586 - DNA, 15 bp, Homo sapiens
agtggccgggatcag

SEQ ID NO: 370587 - DNA, 15 bp, Homo sapiens
gagtggccgggatca

SEQ ID NO: 370588 - DNA, 15 bp, Homo sapiens
agagtggccgggatc

SEQ ID NO: 370589 - DNA, 15 bp, Homo sapiens
tagagtggccgggat

SEQ ID NO: 370590 - DNA, 15 bp, Homo sapiens
gtagagtggccggga

SEQ ID NO: 370591 - DNA, 15 bp, Homo sapiens
ggtagagtggccggg

SEQ ID NO: 370592 - DNA, 15 bp, Homo sapiens
aggtagagtggccgg

SEQ ID NO: 370593 - DNA, 15 bp, Homo sapiens
taggtagagtggccg

SEQ ID NO: 370594 - DNA, 15 bp, Homo sapiens
ttaggtagagtggcc

SEQ ID NO: 370595 - DNA, 15 bp, Homo sapiens
tttaggtagagtggc

SEQ ID NO: 370596 - DNA, 15 bp, Homo sapiens
gtttaggtagagtgg

SEQ ID NO: 370597 - DNA, 15 bp, Homo sapiens
ggtttaggtagagtg

SEQ ID NO: 370598 - DNA, 15 bp, Homo sapiens
aggtttaggtagagt

SEQ ID NO: 370599 - DNA, 15 bp, Homo sapiens
caggtttaggtagag

SEQ ID NO: 370600 - DNA, 15 bp, Homo sapiens
acaggtttaggtaga

SEQ ID NO: 370601 - DNA, 15 bp, Homo sapiens
aacaggtttaggtag

SEQ ID NO: 370602 - DNA, 15 bp, Homo sapiens
caacaggtttaggta

SEQ ID NO: 370603 - DNA, 15 bp, Homo sapiens
ccaacaggtttaggt

SEQ ID NO: 370604 - DNA, 15 bp, Homo sapiens
gccaacaggtttagg

SEQ ID NO: 370605 - DNA, 15 bp, Homo sapiens
agccaacaggtttag

SEQ ID NO: 370606 - DNA, 15 bp, Homo sapiens
gagccaacaggttta

SEQ ID NO: 370607 - DNA, 15 bp, Homo sapiens
tgagccaacaggttt

SEQ ID NO: 370608 - DNA, 15 bp, Homo sapiens
gtgagccaacaggtt

SEQ ID NO: 370609 - DNA, 15 bp, Homo sapiens
agtgagccaacaggt

SEQ ID NO: 370610 - DNA, 15 bp, Homo sapiens
aagtgagccaacagg

SEQ ID NO: 370611 - DNA, 15 bp, Homo sapiens
caagtgagccaacag

SEQ ID NO: 370612 - DNA, 15 bp, Homo sapiens
ccaagtgagccaaca

SEQ ID NO: 370613 - DNA, 15 bp, Homo sapiens
cccaagtgagccaac

SEQ ID NO: 370614 - DNA, 15 bp, Homo sapiens
ccccaagtgagccaa

SEQ ID NO: 370615 - DNA, 15 bp, Homo sapiens
cccccaagtgagcca

SEQ ID NO: 370616 - DNA, 15 bp, Homo sapiens
tcccccaagtgagcc

SEQ ID NO: 370617 - DNA, 15 bp, Homo sapiens
gtcccccaagtgagc

SEQ ID NO: 370618 - DNA, 15 bp, Homo sapiens
agtcccccaagtgag

SEQ ID NO: 370619 - DNA, 15 bp, Homo sapiens
gagtcccccaagtga

SEQ ID NO: 370620 - DNA, 15 bp, Homo sapiens
cgagtcccccaagtg

SEQ ID NO: 370621 - DNA, 15 bp, Homo sapiens
ccgagtcccccaagt

SEQ ID NO: 370622 - DNA, 15 bp, Homo sapiens
gccgagtcccccaag

SEQ ID NO: 370623 - DNA, 15 bp, Homo sapiens
agccgagtcccccaa

SEQ ID NO: 370624 - DNA, 15 bp, Homo sapiens
cagccgagtccccca

SEQ ID NO: 370625 - DNA, 15 bp, Homo sapiens
gcagccgagtccccc

SEQ ID NO: 370626 - DNA, 15 bp, Homo sapiens
ggcagccgagtcccc

SEQ ID NO: 370627 - DNA, 15 bp, Homo sapiens
gggcagccgagtccc

SEQ ID NO: 370628 - DNA, 15 bp, Homo sapiens
ggggcagccgagtcc

SEQ ID NO: 370629 - DNA, 15 bp, Homo sapiens
gggggcagccgagtc

SEQ ID NO: 370630 - DNA, 15 bp, Homo sapiens
ggggggcagccgagt

SEQ ID NO: 370631 - DNA, 15 bp, Homo sapiens
tggggggcagccgag

SEQ ID NO: 370632 - DNA, 15 bp, Homo sapiens
ctggggggcagccga

SEQ ID NO: 370633 - DNA, 15 bp, Homo sapiens
gctggggggcagccg

SEQ ID NO: 370634 - DNA, 15 bp, Homo sapiens
ggctggggggcagcc

SEQ ID NO: 370635 - DNA, 15 bp, Homo sapiens
aggctggggggcagc

SEQ ID NO: 370636 - DNA, 15 bp, Homo sapiens
gaggctggggggcag

SEQ ID NO: 370637 - DNA, 15 bp, Homo sapiens
agaggctggggggca

SEQ ID NO: 370638 - DNA, 15 bp, Homo sapiens
gagaggctggggggc

SEQ ID NO: 370639 - DNA, 15 bp, Homo sapiens
agagaggctgggggg

SEQ ID NO: 370640 - DNA, 15 bp, Homo sapiens
cagagaggctggggg

SEQ ID NO: 370641 - DNA, 15 bp, Homo sapiens
acagagaggctgggg

SEQ ID NO: 370642 - DNA, 15 bp, Homo sapiens
aacagagaggctggg

SEQ ID NO: 370643 - DNA, 15 bp, Homo sapiens
aaacagagaggctgg

SEQ ID NO: 370644 - DNA, 15 bp, Homo sapiens
gaaacagagaggctg

SEQ ID NO: 370645 - DNA, 15 bp, Homo sapiens
agaaacagagaggct

SEQ ID NO: 370646 - DNA, 15 bp, Homo sapiens
gagaaacagagaggc

SEQ ID NO: 370647 - DNA, 15 bp, Homo sapiens
agagaaacagagagg

SEQ ID NO: 370648 - DNA, 15 bp, Homo sapiens
gagagaaacagagag

SEQ ID NO: 370649 - DNA, 15 bp, Homo sapiens
agagagaaacagaga

SEQ ID NO: 370650 - DNA, 15 bp, Homo sapiens
cagagagaaacagag

SEQ ID NO: 370651 - DNA, 15 bp, Homo sapiens
acagagagaaacaga

SEQ ID NO: 370652 - DNA, 15 bp, Homo sapiens
cacagagagaaacag

SEQ ID NO: 370653 - DNA, 15 bp, Homo sapiens
ccacagagagaaaca

SEQ ID NO: 370654 - DNA, 15 bp, Homo sapiens
cccacagagagaaac

SEQ ID NO: 370655 - DNA, 15 bp, Homo sapiens
acccacagagagaaa

SEQ ID NO: 370656 - DNA, 15 bp, Homo sapiens
aacccacagagagaa

SEQ ID NO: 370657 - DNA, 15 bp, Homo sapiens
gaacccacagagaga

SEQ ID NO: 370658 - DNA, 15 bp, Homo sapiens
tgaacccacagagag

SEQ ID NO: 370659 - DNA, 15 bp, Homo sapiens
gtgaacccacagaga

SEQ ID NO: 370660 - DNA, 15 bp, Homo sapiens
ggtgaacccacagag

SEQ ID NO: 370661 - DNA, 15 bp, Homo sapiens
aggtgaacccacaga

SEQ ID NO: 370662 - DNA, 15 bp, Homo sapiens
caggtgaacccacag

SEQ ID NO: 370663 - DNA, 15 bp, Homo sapiens
ccaggtgaacccaca

SEQ ID NO: 370664 - DNA, 15 bp, Homo sapiens
cccaggtgaacccac

SEQ ID NO: 370665 - DNA, 15 bp, Homo sapiens
tcccaggtgaaccca

SEQ ID NO: 370666 - DNA, 15 bp, Homo sapiens
ctcccaggtgaaccc

SEQ ID NO: 370667 - DNA, 15 bp, Homo sapiens
tctcccaggtgaacc

SEQ ID NO: 370668 - DNA, 15 bp, Homo sapiens
atctcccaggtgaac

SEQ ID NO: 370669 - DNA, 15 bp, Homo sapiens
catctcccaggtgaa

SEQ ID NO: 370670 - DNA, 15 bp, Homo sapiens
acatctcccaggtga

SEQ ID NO: 370671 - DNA, 15 bp, Homo sapiens
cacatctcccaggtg

SEQ ID NO: 370672 - DNA, 15 bp, Homo sapiens
ccacatctcccaggt

SEQ ID NO: 370673 - DNA, 15 bp, Homo sapiens
cccacatctcccagg

SEQ ID NO: 370674 - DNA, 15 bp, Homo sapiens
gcccacatctcccag

SEQ ID NO: 370675 - DNA, 15 bp, Homo sapiens
agcccacatctccca

SEQ ID NO: 370676 - DNA, 15 bp, Homo sapiens
aagcccacatctccc

SEQ ID NO: 370677 - DNA, 15 bp, Homo sapiens
gaagcccacatctcc

SEQ ID NO: 370678 - DNA, 15 bp, Homo sapiens
ggaagcccacatctc

SEQ ID NO: 370679 - DNA, 15 bp, Homo sapiens
tggaagcccacatct

SEQ ID NO: 370680 - DNA, 15 bp, Homo sapiens
gtggaagcccacatc

SEQ ID NO: 370681 - DNA, 15 bp, Homo sapiens
agtggaagcccacat

SEQ ID NO: 370682 - DNA, 15 bp, Homo sapiens
gagtggaagcccaca

SEQ ID NO: 370683 - DNA, 15 bp, Homo sapiens
ggagtggaagcccac

SEQ ID NO: 370684 - DNA, 15 bp, Homo sapiens
gggagtggaagccca

SEQ ID NO: 370685 - DNA, 15 bp, Homo sapiens
cgggagtggaagccc

SEQ ID NO: 370686 - DNA, 15 bp, Homo sapiens
acgggagtggaagcc

SEQ ID NO: 370687 - DNA, 15 bp, Homo sapiens
cacgggagtggaagc

SEQ ID NO: 370688 - DNA, 15 bp, Homo sapiens
ccacgggagtggaag

SEQ ID NO: 370689 - DNA, 15 bp, Homo sapiens
tccacgggagtggaa

SEQ ID NO: 370690 - DNA, 15 bp, Homo sapiens
ttccacgggagtgga

SEQ ID NO: 370691 - DNA, 15 bp, Homo sapiens
cttccacgggagtgg

SEQ ID NO: 370692 - DNA, 15 bp, Homo sapiens
ccttccacgggagtg

SEQ ID NO: 370693 - DNA, 15 bp, Homo sapiens
accttccacgggagt

SEQ ID NO: 370694 - DNA, 15 bp, Homo sapiens
caccttccacgggag

SEQ ID NO: 370695 - DNA, 15 bp, Homo sapiens
gcaccttccacggga

SEQ ID NO: 370696 - DNA, 15 bp, Homo sapiens
ggcaccttccacggg

SEQ ID NO: 370697 - DNA, 15 bp, Homo sapiens
gggcaccttccacgg

SEQ ID NO: 370698 - DNA, 15 bp, Homo sapiens
ggggcaccttccacg

SEQ ID NO: 370699 - DNA, 15 bp, Homo sapiens
cggggcaccttccac

SEQ ID NO: 370700 - DNA, 15 bp, Homo sapiens
acggggcaccttcca

SEQ ID NO: 370701 - DNA, 15 bp, Homo sapiens
cacggggcaccttcc

SEQ ID NO: 370702 - DNA, 15 bp, Homo sapiens
ccacggggcaccttc

SEQ ID NO: 370703 - DNA, 15 bp, Homo sapiens
tccacggggcacctt

SEQ ID NO: 370704 - DNA, 15 bp, Homo sapiens
atccacggggcacct

SEQ ID NO: 370705 - DNA, 15 bp, Homo sapiens
aatccacggggcacc

SEQ ID NO: 370706 - DNA, 15 bp, Homo sapiens
gaatccacggggcac

SEQ ID NO: 370707 - DNA, 15 bp, Homo sapiens
tgaatccacggggca

SEQ ID NO: 370708 - DNA, 15 bp, Homo sapiens
ctgaatccacggggc

SEQ ID NO: 370709 - DNA, 15 bp, Homo sapiens
actgaatccacgggg

SEQ ID NO: 370710 - DNA, 15 bp, Homo sapiens
tactgaatccacggg

SEQ ID NO: 370711 - DNA, 15 bp, Homo sapiens
atactgaatccacgg

SEQ ID NO: 370712 - DNA, 15 bp, Homo sapiens
gatactgaatccacg

SEQ ID NO: 370713 - DNA, 15 bp, Homo sapiens
agatactgaatccac

SEQ ID NO: 370714 - DNA, 15 bp, Homo sapiens
cagatactgaatcca

SEQ ID NO: 370715 - DNA, 15 bp, Homo sapiens
gcagatactgaatcc

SEQ ID NO: 370716 - DNA, 15 bp, Homo sapiens
agcagatactgaatc

SEQ ID NO: 370717 - DNA, 15 bp, Homo sapiens
tagcagatactgaat

SEQ ID NO: 370718 - DNA, 15 bp, Homo sapiens
ctagcagatactgaa

SEQ ID NO: 370719 - DNA, 15 bp, Homo sapiens
tctagcagatactga

SEQ ID NO: 370720 - DNA, 15 bp, Homo sapiens
ctctagcagatactg

SEQ ID NO: 370721 - DNA, 15 bp, Homo sapiens
tctctagcagatact

SEQ ID NO: 370722 - DNA, 15 bp, Homo sapiens
ctctctagcagatac

SEQ ID NO: 370723 - DNA, 15 bp, Homo sapiens
tctctctagcagata

SEQ ID NO: 370724 - DNA, 15 bp, Homo sapiens
ctctctctagcagat

SEQ ID NO: 370725 - DNA, 15 bp, Homo sapiens
tctctctctagcaga

SEQ ID NO: 370726 - DNA, 15 bp, Homo sapiens
ttctctctctagcag

SEQ ID NO: 370727 - DNA, 15 bp, Homo sapiens
gttctctctctagca

SEQ ID NO: 370728 - DNA, 15 bp, Homo sapiens
ggttctctctctagc

SEQ ID NO: 370729 - DNA, 15 bp, Homo sapiens
tggttctctctctag

SEQ ID NO: 370730 - DNA, 15 bp, Homo sapiens
ctggttctctctcta

SEQ ID NO: 370731 - DNA, 15 bp, Homo sapiens
cctggttctctctct

SEQ ID NO: 370732 - DNA, 15 bp, Homo sapiens
gcctggttctctctc

SEQ ID NO: 370733 - DNA, 15 bp, Homo sapiens
agcctggttctctct

SEQ ID NO: 370734 - DNA, 15 bp, Homo sapiens
aagcctggttctctc

SEQ ID NO: 370735 - DNA, 15 bp, Homo sapiens
gaagcctggttctct

SEQ ID NO: 370736 - DNA, 15 bp, Homo sapiens
agaagcctggttctc

SEQ ID NO: 370737 - DNA, 15 bp, Homo sapiens
aagaagcctggttct

SEQ ID NO: 370738 - DNA, 15 bp, Homo sapiens
taagaagcctggttc

SEQ ID NO: 370739 - DNA, 15 bp, Homo sapiens
gtaagaagcctggtt

SEQ ID NO: 370740 - DNA, 15 bp, Homo sapiens
cgtaagaagcctggt

SEQ ID NO: 370741 - DNA, 15 bp, Homo sapiens
tcgtaagaagcctgg

SEQ ID NO: 370742 - DNA, 15 bp, Homo sapiens
ttcgtaagaagcctg

SEQ ID NO: 370743 - DNA, 15 bp, Homo sapiens
cttcgtaagaagcct

SEQ ID NO: 370744 - DNA, 15 bp, Homo sapiens
gcttcgtaagaagcc

SEQ ID NO: 370745 - DNA, 15 bp, Homo sapiens
ggcttcgtaagaagc

SEQ ID NO: 370746 - DNA, 15 bp, Homo sapiens
tggcttcgtaagaag

SEQ ID NO: 370747 - DNA, 15 bp, Homo sapiens
ttggcttcgtaagaa

SEQ ID NO: 370748 - DNA, 15 bp, Homo sapiens
gttggcttcgtaaga

SEQ ID NO: 370749 - DNA, 15 bp, Homo sapiens
agttggcttcgtaag

SEQ ID NO: 370750 - DNA, 15 bp, Homo sapiens
gagttggcttcgtaa

SEQ ID NO: 370751 - DNA, 15 bp, Homo sapiens
agagttggcttcgta

SEQ ID NO: 370752 - DNA, 15 bp, Homo sapiens
aagagttggcttcgt

SEQ ID NO: 370753 - DNA, 15 bp, Homo sapiens
taagagttggcttcg

SEQ ID NO: 370754 - DNA, 15 bp, Homo sapiens
ttaagagttggcttc

SEQ ID NO: 370755 - DNA, 15 bp, Homo sapiens
tttaagagttggctt

SEQ ID NO: 370756 - DNA, 15 bp, Homo sapiens
ttttaagagttggct

SEQ ID NO: 370757 - DNA, 15 bp, Homo sapiens
cttttaagagttggc

SEQ ID NO: 370758 - DNA, 15 bp, Homo sapiens
ccttttaagagttgg

SEQ ID NO: 370759 - DNA, 15 bp, Homo sapiens
accttttaagagttg

SEQ ID NO: 370760 - DNA, 15 bp, Homo sapiens
caccttttaagagtt

SEQ ID NO: 370761 - DNA, 15 bp, Homo sapiens
acaccttttaagagt

SEQ ID NO: 370762 - DNA, 15 bp, Homo sapiens
tacaccttttaagag

SEQ ID NO: 370763 - DNA, 15 bp, Homo sapiens
ctacaccttttaaga

SEQ ID NO: 370764 - DNA, 15 bp, Homo sapiens
tctacaccttttaag

SEQ ID NO: 370765 - DNA, 15 bp, Homo sapiens
ttctacaccttttaa

SEQ ID NO: 370766 - DNA, 15 bp, Homo sapiens
tttctacacctttta

SEQ ID NO: 370767 - DNA, 15 bp, Homo sapiens
ttttctacacctttt

SEQ ID NO: 370768 - DNA, 15 bp, Homo sapiens
attttctacaccttt

SEQ ID NO: 370769 - DNA, 15 bp, Homo sapiens
cattttctacacctt

SEQ ID NO: 370770 - DNA, 15 bp, Homo sapiens
tcattttctacacct

SEQ ID NO: 370771 - DNA, 15 bp, Homo sapiens
atcattttctacacc

SEQ ID NO: 370772 - DNA, 15 bp, Homo sapiens
gatcattttctacac

SEQ ID NO: 370773 - DNA, 15 bp, Homo sapiens
cgatcattttctaca

SEQ ID NO: 370774 - DNA, 15 bp, Homo sapiens
acgatcattttctac

SEQ ID NO: 370775 - DNA, 15 bp, Homo sapiens
tacgatcattttcta

SEQ ID NO: 370776 - DNA, 15 bp, Homo sapiens
atacgatcattttct

SEQ ID NO: 370777 - DNA, 15 bp, Homo sapiens
aatacgatcattttc

SEQ ID NO: 370778 - DNA, 15 bp, Homo sapiens
aaatacgatcatttt

SEQ ID NO: 370779 - DNA, 15 bp, Homo sapiens
taaatacgatcattt

SEQ ID NO: 370780 - DNA, 15 bp, Homo sapiens
ataaatacgatcatt

SEQ ID NO: 370781 - DNA, 15 bp, Homo sapiens
tataaatacgatcat

SEQ ID NO: 370782 - DNA, 15 bp, Homo sapiens
gtataaatacgatca

SEQ ID NO: 370783 - DNA, 15 bp, Homo sapiens
agtataaatacgatc

SEQ ID NO: 370784 - DNA, 15 bp, Homo sapiens
gagtataaatacgat

SEQ ID NO: 370785 - DNA, 15 bp, Homo sapiens
agagtataaatacga

SEQ ID NO: 370786 - DNA, 15 bp, Homo sapiens
tagagtataaatacg

SEQ ID NO: 370787 - DNA, 15 bp, Homo sapiens
ttagagtataaatac

SEQ ID NO: 370788 - DNA, 15 bp, Homo sapiens
cttagagtataaata

SEQ ID NO: 370789 - DNA, 15 bp, Homo sapiens
tcttagagtataaat

SEQ ID NO: 370790 - DNA, 15 bp, Homo sapiens
atcttagagtataaa

SEQ ID NO: 370791 - DNA, 15 bp, Homo sapiens
catcttagagtataa

SEQ ID NO: 370792 - DNA, 15 bp, Homo sapiens
ccatcttagagtata

SEQ ID NO: 370793 - DNA, 15 bp, Homo sapiens
cccatcttagagtat

SEQ ID NO: 370794 - DNA, 15 bp, Homo sapiens
ccccatcttagagta

SEQ ID NO: 370795 - DNA, 15 bp, Homo sapiens
tccccatcttagagt

SEQ ID NO: 370796 - DNA, 15 bp, Homo sapiens
gtccccatcttagag

SEQ ID NO: 370797 - DNA, 15 bp, Homo sapiens
tgtccccatcttaga

SEQ ID NO: 370798 - DNA, 15 bp, Homo sapiens
atgtccccatcttag

SEQ ID NO: 370799 - DNA, 15 bp, Homo sapiens
aatgtccccatctta

SEQ ID NO: 370800 - DNA, 15 bp, Homo sapiens
aaatgtccccatctt

SEQ ID NO: 370801 - DNA, 15 bp, Homo sapiens
aaaatgtccccatct

SEQ ID NO: 370802 - DNA, 15 bp, Homo sapiens
aaaaatgtccccatc

SEQ ID NO: 370803 - DNA, 15 bp, Homo sapiens
aaaaaatgtccccat

SEQ ID NO: 370804 - DNA, 15 bp, Homo sapiens
caaaaaatgtcccca

SEQ ID NO: 370805 - DNA, 15 bp, Homo sapiens
tcaaaaaatgtcccc

SEQ ID NO: 370806 - DNA, 15 bp, Homo sapiens
atcaaaaaatgtccc

SEQ ID NO: 370807 - DNA, 15 bp, Homo sapiens
tatcaaaaaatgtcc

SEQ ID NO: 370808 - DNA, 15 bp, Homo sapiens
ctatcaaaaaatgtc

SEQ ID NO: 370809 - DNA, 15 bp, Homo sapiens
cctatcaaaaaatgt

SEQ ID NO: 370810 - DNA, 15 bp, Homo sapiens
ccctatcaaaaaatg

SEQ ID NO: 370811 - DNA, 15 bp, Homo sapiens
cccctatcaaaaaat

SEQ ID NO: 370812 - DNA, 15 bp, Homo sapiens
acccctatcaaaaaa

SEQ ID NO: 370813 - DNA, 15 bp, Homo sapiens
cacccctatcaaaaa

SEQ ID NO: 370814 - DNA, 15 bp, Homo sapiens
ccacccctatcaaaa

SEQ ID NO: 370815 - DNA, 15 bp, Homo sapiens
cccacccctatcaaa

SEQ ID NO: 370816 - DNA, 15 bp, Homo sapiens
gcccacccctatcaa

SEQ ID NO: 370817 - DNA, 15 bp, Homo sapiens
tgcccacccctatca

SEQ ID NO: 370818 - DNA, 15 bp, Homo sapiens
gtgcccacccctatc

SEQ ID NO: 370819 - DNA, 15 bp, Homo sapiens
agtgcccacccctat

SEQ ID NO: 370820 - DNA, 15 bp, Homo sapiens
cagtgcccaccccta

SEQ ID NO: 370821 - DNA, 15 bp, Homo sapiens
ccagtgcccacccct

SEQ ID NO: 370822 - DNA, 15 bp, Homo sapiens
gccagtgcccacccc

SEQ ID NO: 370823 - DNA, 15 bp, Homo sapiens
agccagtgcccaccc

SEQ ID NO: 370824 - DNA, 15 bp, Homo sapiens
cagccagtgcccacc

SEQ ID NO: 370825 - DNA, 15 bp, Homo sapiens
ccagccagtgcccac

SEQ ID NO: 370826 - DNA, 15 bp, Homo sapiens
cccagccagtgccca

SEQ ID NO: 370827 - DNA, 15 bp, Homo sapiens
tcccagccagtgccc

SEQ ID NO: 370828 - DNA, 15 bp, Homo sapiens
ttcccagccagtgcc

SEQ ID NO: 370829 - DNA, 15 bp, Homo sapiens
tttcccagccagtgc

SEQ ID NO: 370830 - DNA, 15 bp, Homo sapiens
ttttcccagccagtg

SEQ ID NO: 370831 - DNA, 15 bp, Homo sapiens
cttttcccagccagt

SEQ ID NO: 370832 - DNA, 15 bp, Homo sapiens
ccttttcccagccag

SEQ ID NO: 370833 - DNA, 15 bp, Homo sapiens
cccttttcccagcca

SEQ ID NO: 370834 - DNA, 15 bp, Homo sapiens
tcccttttcccagcc

SEQ ID NO: 370835 - DNA, 15 bp, Homo sapiens
gtcccttttcccagc

SEQ ID NO: 370836 - DNA, 15 bp, Homo sapiens
agtcccttttcccag

SEQ ID NO: 370837 - DNA, 15 bp, Homo sapiens
aagtcccttttccca

SEQ ID NO: 370838 - DNA, 15 bp, Homo sapiens
aaagtcccttttccc

SEQ ID NO: 370839 - DNA, 15 bp, Homo sapiens
gaaagtcccttttcc

SEQ ID NO: 370840 - DNA, 15 bp, Homo sapiens
tgaaagtcccttttc

SEQ ID NO: 370841 - DNA, 15 bp, Homo sapiens
ctgaaagtccctttt

SEQ ID NO: 370842 - DNA, 15 bp, Homo sapiens
gctgaaagtcccttt

SEQ ID NO: 370843 - DNA, 15 bp, Homo sapiens
cgctgaaagtccctt

SEQ ID NO: 370844 - DNA, 15 bp, Homo sapiens
ccgctgaaagtccct

SEQ ID NO: 370845 - DNA, 15 bp, Homo sapiens
accgctgaaagtccc

SEQ ID NO: 370846 - DNA, 15 bp, Homo sapiens
caccgctgaaagtcc

SEQ ID NO: 370847 - DNA, 15 bp, Homo sapiens
acaccgctgaaagtc

SEQ ID NO: 370848 - DNA, 15 bp, Homo sapiens
aacaccgctgaaagt

SEQ ID NO: 370849 - DNA, 15 bp, Homo sapiens
caacaccgctgaaag

SEQ ID NO: 370850 - DNA, 15 bp, Homo sapiens
tcaacaccgctgaaa

SEQ ID NO: 370851 - DNA, 15 bp, Homo sapiens
ctcaacaccgctgaa

SEQ ID NO: 370852 - DNA, 15 bp, Homo sapiens
cctcaacaccgctga

SEQ ID NO: 370853 - DNA, 15 bp, Homo sapiens
tcctcaacaccgctg

SEQ ID NO: 370854 - DNA, 15 bp, Homo sapiens
gtcctcaacaccgct

SEQ ID NO: 370855 - DNA, 15 bp, Homo sapiens
tgtcctcaacaccgc

SEQ ID NO: 370856 - DNA, 15 bp, Homo sapiens
ctgtcctcaacaccg

SEQ ID NO: 370857 - DNA, 15 bp, Homo sapiens
actgtcctcaacacc

SEQ ID NO: 370858 - DNA, 15 bp, Homo sapiens
aactgtcctcaacac

SEQ ID NO: 370859 - DNA, 15 bp, Homo sapiens
taactgtcctcaaca

SEQ ID NO: 370860 - DNA, 15 bp, Homo sapiens
ataactgtcctcaac

SEQ ID NO: 370861 - DNA, 15 bp, Homo sapiens
aataactgtcctcaa

SEQ ID NO: 370862 - DNA, 15 bp, Homo sapiens
aaataactgtcctca

SEQ ID NO: 370863 - DNA, 15 bp, Homo sapiens
taaataactgtcctc

SEQ ID NO: 370864 - DNA, 15 bp, Homo sapiens
ttaaataactgtcct

SEQ ID NO: 370865 - DNA, 15 bp, Homo sapiens
tttaaataactgtcc

SEQ ID NO: 370866 - DNA, 15 bp, Homo sapiens
ttttaaataactgtc

SEQ ID NO: 370867 - DNA, 15 bp, Homo sapiens
gttttaaataactgt

SEQ ID NO: 370868 - DNA, 15 bp, Homo sapiens
tgttttaaataactg

SEQ ID NO: 370869 - DNA, 15 bp, Homo sapiens
ctgttttaaataact

SEQ ID NO: 370870 - DNA, 15 bp, Homo sapiens
cctgttttaaataac

SEQ ID NO: 370871 - DNA, 15 bp, Homo sapiens
ccctgttttaaataa

SEQ ID NO: 370872 - DNA, 15 bp, Homo sapiens
accctgttttaaata

SEQ ID NO: 370873 - DNA, 15 bp, Homo sapiens
caccctgttttaaat

SEQ ID NO: 370874 - DNA, 15 bp, Homo sapiens
tcaccctgttttaaa

SEQ ID NO: 370875 - DNA, 15 bp, Homo sapiens
atcaccctgttttaa

SEQ ID NO: 370876 - DNA, 15 bp, Homo sapiens
tatcaccctgtttta

SEQ ID NO: 370877 - DNA, 15 bp, Homo sapiens
ttatcaccctgtttt

SEQ ID NO: 370878 - DNA, 15 bp, Homo sapiens
gttatcaccctgttt

SEQ ID NO: 370879 - DNA, 15 bp, Homo sapiens
agttatcaccctgtt

SEQ ID NO: 370880 - DNA, 15 bp, Homo sapiens
aagttatcaccctgt

SEQ ID NO: 370881 - DNA, 15 bp, Homo sapiens
aaagttatcaccctg

SEQ ID NO: 370882 - DNA, 15 bp, Homo sapiens
gaaagttatcaccct

SEQ ID NO: 370883 - DNA, 15 bp, Homo sapiens
tgaaagttatcaccc

SEQ ID NO: 370884 - DNA, 15 bp, Homo sapiens
gtgaaagttatcacc

SEQ ID NO: 370885 - DNA, 15 bp, Homo sapiens
ggtgaaagttatcac

SEQ ID NO: 370886 - DNA, 15 bp, Homo sapiens
aggtgaaagttatca

SEQ ID NO: 370887 - DNA, 15 bp, Homo sapiens
aaggtgaaagttatc

SEQ ID NO: 370888 - DNA, 15 bp, Homo sapiens
caaggtgaaagttat

SEQ ID NO: 370889 - DNA, 15 bp, Homo sapiens
acaaggtgaaagtta

SEQ ID NO: 370890 - DNA, 15 bp, Homo sapiens
tacaaggtgaaagtt

SEQ ID NO: 370891 - DNA, 15 bp, Homo sapiens
ttacaaggtgaaagt

SEQ ID NO: 370892 - DNA, 15 bp, Homo sapiens
cttacaaggtgaaag

SEQ ID NO: 370893 - DNA, 15 bp, Homo sapiens
acttacaaggtgaaa

SEQ ID NO: 370894 - DNA, 15 bp, Homo sapiens
aacttacaaggtgaa

SEQ ID NO: 370895 - DNA, 15 bp, Homo sapiens
taacttacaaggtga

SEQ ID NO: 370896 - DNA, 15 bp, Homo sapiens
ttaacttacaaggtg

SEQ ID NO: 370897 - DNA, 15 bp, Homo sapiens
gttaacttacaaggt

SEQ ID NO: 370898 - DNA, 15 bp, Homo sapiens
tgttaacttacaagg

SEQ ID NO: 370899 - DNA, 15 bp, Homo sapiens
ctgttaacttacaag

SEQ ID NO: 370900 - DNA, 15 bp, Homo sapiens
cctgttaacttacaa

SEQ ID NO: 370901 - DNA, 15 bp, Homo sapiens
tcctgttaacttaca

SEQ ID NO: 370902 - DNA, 15 bp, Homo sapiens
ttcctgttaacttac

SEQ ID NO: 370903 - DNA, 15 bp, Homo sapiens
tttcctgttaactta

SEQ ID NO: 370904 - DNA, 15 bp, Homo sapiens
atttcctgttaactt

SEQ ID NO: 370905 - DNA, 15 bp, Homo sapiens
tatttcctgttaact

SEQ ID NO: 370906 - DNA, 15 bp, Homo sapiens
atatttcctgttaac

SEQ ID NO: 370907 - DNA, 15 bp, Homo sapiens
aatatttcctgttaa

SEQ ID NO: 370908 - DNA, 15 bp, Homo sapiens
caatatttcctgtta

SEQ ID NO: 370909 - DNA, 15 bp, Homo sapiens
ccaatatttcctgtt

SEQ ID NO: 370910 - DNA, 15 bp, Homo sapiens
cccaatatttcctgt

SEQ ID NO: 370911 - DNA, 15 bp, Homo sapiens
tcccaatatttcctg

SEQ ID NO: 370912 - DNA, 15 bp, Homo sapiens
gtcccaatatttcct

SEQ ID NO: 370913 - DNA, 15 bp, Homo sapiens
tgtcccaatatttcc

SEQ ID NO: 370914 - DNA, 15 bp, Homo sapiens
ttgtcccaatatttc

SEQ ID NO: 370915 - DNA, 15 bp, Homo sapiens
cttgtcccaatattt

SEQ ID NO: 370916 - DNA, 15 bp, Homo sapiens
tcttgtcccaatatt

SEQ ID NO: 370917 - DNA, 15 bp, Homo sapiens
gtcttgtcccaatat

SEQ ID NO: 370918 - DNA, 15 bp, Homo sapiens
tgtcttgtcccaata

SEQ ID NO: 370919 - DNA, 15 bp, Homo sapiens
ctgtcttgtcccaat

SEQ ID NO: 370920 - DNA, 15 bp, Homo sapiens
cctgtcttgtcccaa

SEQ ID NO: 370921 - DNA, 15 bp, Homo sapiens
tcctgtcttgtccca

SEQ ID NO: 370922 - DNA, 15 bp, Homo sapiens
ttcctgtcttgtccc

SEQ ID NO: 370923 - DNA, 15 bp, Homo sapiens
tttcctgtcttgtcc

SEQ ID NO: 370924 - DNA, 15 bp, Homo sapiens
atttcctgtcttgtc

SEQ ID NO: 370925 - DNA, 15 bp, Homo sapiens
aatttcctgtcttgt

SEQ ID NO: 370926 - DNA, 15 bp, Homo sapiens
caatttcctgtcttg

SEQ ID NO: 370927 - DNA, 15 bp, Homo sapiens
gcaatttcctgtctt

SEQ ID NO: 370928 - DNA, 15 bp, Homo sapiens
tgcaatttcctgtct

SEQ ID NO: 370929 - DNA, 15 bp, Homo sapiens
atgcaatttcctgtc

SEQ ID NO: 370930 - DNA, 15 bp, Homo sapiens
gatgcaatttcctgt

SEQ ID NO: 370931 - DNA, 15 bp, Homo sapiens
tgatgcaatttcctg

SEQ ID NO: 370932 - DNA, 15 bp, Homo sapiens
atgatgcaatttcct

SEQ ID NO: 370933 - DNA, 15 bp, Homo sapiens
gatgatgcaatttcc

SEQ ID NO: 370934 - DNA, 15 bp, Homo sapiens
agatgatgcaatttc

SEQ ID NO: 370935 - DNA, 15 bp, Homo sapiens
aagatgatgcaattt

SEQ ID NO: 370936 - DNA, 15 bp, Homo sapiens
aaagatgatgcaatt

SEQ ID NO: 370937 - DNA, 15 bp, Homo sapiens
aaaagatgatgcaat

SEQ ID NO: 370938 - DNA, 15 bp, Homo sapiens
aaaaagatgatgcaa

SEQ ID NO: 370939 - DNA, 15 bp, Homo sapiens
aaaaaagatgatgca

SEQ ID NO: 370940 - DNA, 15 bp, Homo sapiens
aaaaaaagatgatgc

SEQ ID NO: 370941 - DNA, 15 bp, Homo sapiens
aaaaaaaagatgatg

SEQ ID NO: 370942 - DNA, 15 bp, Homo sapiens
aaaaaaaaagatgat

SEQ ID NO: 370943 - DNA, 15 bp, Homo sapiens
caaaaaaaaagatga

SEQ ID NO: 370944 - DNA, 15 bp, Homo sapiens
tcaaaaaaaaagatg

SEQ ID NO: 370945 - DNA, 15 bp, Homo sapiens
ctcaaaaaaaaagat

SEQ ID NO: 370946 - DNA, 15 bp, Homo sapiens
tctcaaaaaaaaaga

SEQ ID NO: 370947 - DNA, 15 bp, Homo sapiens
ttctcaaaaaaaaag

SEQ ID NO: 370948 - DNA, 15 bp, Homo sapiens
attctcaaaaaaaaa

SEQ ID NO: 370949 - DNA, 15 bp, Homo sapiens
tattctcaaaaaaaa

SEQ ID NO: 370950 - DNA, 15 bp, Homo sapiens
ttattctcaaaaaaa

SEQ ID NO: 370951 - DNA, 15 bp, Homo sapiens
gttattctcaaaaaa

SEQ ID NO: 370952 - DNA, 15 bp, Homo sapiens
agttattctcaaaaa

SEQ ID NO: 370953 - DNA, 15 bp, Homo sapiens
gagttattctcaaaa

SEQ ID NO: 370954 - DNA, 15 bp, Homo sapiens
ggagttattctcaaa

SEQ ID NO: 370955 - DNA, 15 bp, Homo sapiens
tggagttattctcaa

SEQ ID NO: 370956 - DNA, 15 bp, Homo sapiens
ctggagttattctca

SEQ ID NO: 370957 - DNA, 15 bp, Homo sapiens
tctggagttattctc

SEQ ID NO: 370958 - DNA, 15 bp, Homo sapiens
ctctggagttattct

SEQ ID NO: 370959 - DNA, 15 bp, Homo sapiens
tctctggagttattc

SEQ ID NO: 370960 - DNA, 15 bp, Homo sapiens
ttctctggagttatt

SEQ ID NO: 370961 - DNA, 15 bp, Homo sapiens
tttctctggagttat

SEQ ID NO: 370962 - DNA, 15 bp, Homo sapiens
ttttctctggagtta

SEQ ID NO: 370963 - DNA, 15 bp, Homo sapiens
cttttctctggagtt

SEQ ID NO: 370964 - DNA, 15 bp, Homo sapiens
acttttctctggagt

SEQ ID NO: 370965 - DNA, 15 bp, Homo sapiens
cacttttctctggag

SEQ ID NO: 370966 - DNA, 15 bp, Homo sapiens
ccacttttctctgga

SEQ ID NO: 370967 - DNA, 15 bp, Homo sapiens
accacttttctctgg

SEQ ID NO: 370968 - DNA, 15 bp, Homo sapiens
aaccacttttctctg

SEQ ID NO: 370969 - DNA, 15 bp, Homo sapiens
gaaccacttttctct

SEQ ID NO: 370970 - DNA, 15 bp, Homo sapiens
cgaaccacttttctc

SEQ ID NO: 370971 - DNA, 15 bp, Homo sapiens
acgaaccacttttct

SEQ ID NO: 370972 - DNA, 15 bp, Homo sapiens
cacgaaccacttttc

SEQ ID NO: 370973 - DNA, 15 bp, Homo sapiens
tcacgaaccactttt

SEQ ID NO: 370974 - DNA, 15 bp, Homo sapiens
ttcacgaaccacttt

SEQ ID NO: 370975 - DNA, 15 bp, Homo sapiens
tttcacgaaccactt

SEQ ID NO: 370976 - DNA, 15 bp, Homo sapiens
ctttcacgaaccact

SEQ ID NO: 370977 - DNA, 15 bp, Homo sapiens
cctttcacgaaccac

SEQ ID NO: 370978 - DNA, 15 bp, Homo sapiens
acctttcacgaacca

SEQ ID NO: 370979 - DNA, 15 bp, Homo sapiens
tacctttcacgaacc

SEQ ID NO: 370980 - DNA, 15 bp, Homo sapiens
ctacctttcacgaac

SEQ ID NO: 370981 - DNA, 15 bp, Homo sapiens
actacctttcacgaa

SEQ ID NO: 370982 - DNA, 15 bp, Homo sapiens
cactacctttcacga

SEQ ID NO: 370983 - DNA, 15 bp, Homo sapiens
ccactacctttcacg

SEQ ID NO: 370984 - DNA, 15 bp, Homo sapiens
gccactacctttcac

SEQ ID NO: 370985 - DNA, 15 bp, Homo sapiens
agccactacctttca

SEQ ID NO: 370986 - DNA, 15 bp, Homo sapiens
cagccactacctttc

SEQ ID NO: 370987 - DNA, 15 bp, Homo sapiens
tcagccactaccttt

SEQ ID NO: 370988 - DNA, 15 bp, Homo sapiens
ctcagccactacctt

SEQ ID NO: 370989 - DNA, 15 bp, Homo sapiens
tctcagccactacct

SEQ ID NO: 370990 - DNA, 15 bp, Homo sapiens
ttctcagccactacc

SEQ ID NO: 370991 - DNA, 15 bp, Homo sapiens
tttctcagccactac

SEQ ID NO: 370992 - DNA, 15 bp, Homo sapiens
gtttctcagccacta

SEQ ID NO: 370993 - DNA, 15 bp, Homo sapiens
cgtttctcagccact

SEQ ID NO: 370994 - DNA, 15 bp, Homo sapiens
ccgtttctcagccac

SEQ ID NO: 370995 - DNA, 15 bp, Homo sapiens
gccgtttctcagcca

SEQ ID NO: 370996 - DNA, 15 bp, Homo sapiens
agccgtttctcagcc

SEQ ID NO: 370997 - DNA, 15 bp, Homo sapiens
tagccgtttctcagc

SEQ ID NO: 370998 - DNA, 15 bp, Homo sapiens
ctagccgtttctcag

SEQ ID NO: 370999 - DNA, 15 bp, Homo sapiens
gctagccgtttctca

SEQ ID NO: 371000 - DNA, 15 bp, Homo sapiens
ggctagccgtttctc

SEQ ID NO: 371001 - DNA, 15 bp, Homo sapiens
aggctagccgtttct

SEQ ID NO: 371002 - DNA, 15 bp, Homo sapiens
caggctagccgtttc

SEQ ID NO: 371003 - DNA, 15 bp, Homo sapiens
acaggctagccgttt

SEQ ID NO: 371004 - DNA, 15 bp, Homo sapiens
aacaggctagccgtt

SEQ ID NO: 371005 - DNA, 15 bp, Homo sapiens
aaacaggctagccgt

SEQ ID NO: 371006 - DNA, 15 bp, Homo sapiens
aaaacaggctagccg

SEQ ID NO: 371007 - DNA, 15 bp, Homo sapiens
gaaaacaggctagcc

SEQ ID NO: 371008 - DNA, 15 bp, Homo sapiens
agaaaacaggctagc

SEQ ID NO: 371009 - DNA, 15 bp, Homo sapiens
cagaaaacaggctag

SEQ ID NO: 371010 - DNA, 15 bp, Homo sapiens
acagaaaacaggcta

SEQ ID NO: 371011 - DNA, 15 bp, Homo sapiens
aacagaaaacaggct

SEQ ID NO: 371012 - DNA, 15 bp, Homo sapiens
aaacagaaaacaggc

SEQ ID NO: 371013 - DNA, 15 bp, Homo sapiens
aaaacagaaaacagg

SEQ ID NO: 371014 - DNA, 15 bp, Homo sapiens
caaaacagaaaacag

SEQ ID NO: 371015 - DNA, 15 bp, Homo sapiens
acaaaacagaaaaca

SEQ ID NO: 371016 - DNA, 15 bp, Homo sapiens
cacaaaacagaaaac

SEQ ID NO: 371017 - DNA, 15 bp, Homo sapiens
acacaaaacagaaaa

SEQ ID NO: 371018 - DNA, 15 bp, Homo sapiens
aacacaaaacagaaa

SEQ ID NO: 371019 - DNA, 15 bp, Homo sapiens
aaacacaaaacagaa

SEQ ID NO: 371020 - DNA, 15 bp, Homo sapiens
aaaacacaaaacaga

SEQ ID NO: 371021 - DNA, 15 bp, Homo sapiens
aaaaacacaaaacag

SEQ ID NO: 371022 - DNA, 15 bp, Homo sapiens
aaaaaacacaaaaca

SEQ ID NO: 371023 - DNA, 15 bp, Homo sapiens
aaaaaaacacaaaac

SEQ ID NO: 371024 - DNA, 15 bp, Homo sapiens
aaaaaaaacacaaaa

SEQ ID NO: 371025 - DNA, 15 bp, Homo sapiens
aaaaaaaaacacaaa

SEQ ID NO: 371026 - DNA, 15 bp, Homo sapiens
aaaaaaaaaacacaa

SEQ ID NO: 371027 - DNA, 15 bp, Homo sapiens
gaaaaaaaaaacaca

SEQ ID NO: 371028 - DNA, 15 bp, Homo sapiens
agaaaaaaaaaacac

SEQ ID NO: 371029 - DNA, 15 bp, Homo sapiens
aagaaaaaaaaaaca

SEQ ID NO: 371030 - DNA, 15 bp, Homo sapiens
gaagaaaaaaaaaac

SEQ ID NO: 371031 - DNA, 15 bp, Homo sapiens
ggaagaaaaaaaaaa

SEQ ID NO: 371032 - DNA, 15 bp, Homo sapiens
gggaagaaaaaaaaa

SEQ ID NO: 371033 - DNA, 15 bp, Homo sapiens
agggaagaaaaaaaa

SEQ ID NO: 371034 - DNA, 15 bp, Homo sapiens
aagggaagaaaaaaa

SEQ ID NO: 371035 - DNA, 15 bp, Homo sapiens
gaagggaagaaaaaa

SEQ ID NO: 371036 - DNA, 15 bp, Homo sapiens
ggaagggaagaaaaa

SEQ ID NO: 371037 - DNA, 15 bp, Homo sapiens
tggaagggaagaaaa

SEQ ID NO: 371038 - DNA, 15 bp, Homo sapiens
gtggaagggaagaaa

SEQ ID NO: 371039 - DNA, 15 bp, Homo sapiens
agtggaagggaagaa

SEQ ID NO: 371040 - DNA, 15 bp, Homo sapiens
gagtggaagggaaga

SEQ ID NO: 371041 - DNA, 15 bp, Homo sapiens
ggagtggaagggaag

SEQ ID NO: 371042 - DNA, 15 bp, Homo sapiens
gggagtggaagggaa

SEQ ID NO: 371043 - DNA, 15 bp, Homo sapiens
tgggagtggaaggga

SEQ ID NO: 371044 - DNA, 15 bp, Homo sapiens
gtgggagtggaaggg

SEQ ID NO: 371045 - DNA, 15 bp, Homo sapiens
cgtgggagtggaagg

SEQ ID NO: 371046 - DNA, 15 bp, Homo sapiens
tcgtgggagtggaag

SEQ ID NO: 371047 - DNA, 15 bp, Homo sapiens
ctcgtgggagtggaa

SEQ ID NO: 371048 - DNA, 15 bp, Homo sapiens
tctcgtgggagtgga

SEQ ID NO: 371049 - DNA, 15 bp, Homo sapiens
ttctcgtgggagtgg

SEQ ID NO: 371050 - DNA, 15 bp, Homo sapiens
gttctcgtgggagtg

SEQ ID NO: 371051 - DNA, 15 bp, Homo sapiens
tgttctcgtgggagt

SEQ ID NO: 371052 - DNA, 15 bp, Homo sapiens
atgttctcgtgggag

SEQ ID NO: 371053 - DNA, 15 bp, Homo sapiens
catgttctcgtggga

SEQ ID NO: 371054 - DNA, 15 bp, Homo sapiens
acatgttctcgtggg

SEQ ID NO: 371055 - DNA, 15 bp, Homo sapiens
tacatgttctcgtgg

SEQ ID NO: 371056 - DNA, 15 bp, Homo sapiens
ctacatgttctcgtg

SEQ ID NO: 371057 - DNA, 15 bp, Homo sapiens
cctacatgttctcgt

SEQ ID NO: 371058 - DNA, 15 bp, Homo sapiens
gcctacatgttctcg

SEQ ID NO: 371059 - DNA, 15 bp, Homo sapiens
ggcctacatgttctc

SEQ ID NO: 371060 - DNA, 15 bp, Homo sapiens
tggcctacatgttct

SEQ ID NO: 371061 - DNA, 15 bp, Homo sapiens
atggcctacatgttc

SEQ ID NO: 371062 - DNA, 15 bp, Homo sapiens
aatggcctacatgtt

SEQ ID NO: 371063 - DNA, 15 bp, Homo sapiens
aaatggcctacatgt

SEQ ID NO: 371064 - DNA, 15 bp, Homo sapiens
aaaatggcctacatg

SEQ ID NO: 371065 - DNA, 15 bp, Homo sapiens
gaaaatggcctacat

SEQ ID NO: 371066 - DNA, 15 bp, Homo sapiens
agaaaatggcctaca

SEQ ID NO: 371067 - DNA, 15 bp, Homo sapiens
aagaaaatggcctac

SEQ ID NO: 371068 - DNA, 15 bp, Homo sapiens
aaagaaaatggccta

SEQ ID NO: 371069 - DNA, 15 bp, Homo sapiens
taaagaaaatggcct

SEQ ID NO: 371070 - DNA, 15 bp, Homo sapiens
ttaaagaaaatggcc

SEQ ID NO: 371071 - DNA, 15 bp, Homo sapiens
cttaaagaaaatggc

SEQ ID NO: 371072 - DNA, 15 bp, Homo sapiens
tcttaaagaaaatgg

SEQ ID NO: 371073 - DNA, 15 bp, Homo sapiens
ttcttaaagaaaatg

SEQ ID NO: 371074 - DNA, 15 bp, Homo sapiens
tttcttaaagaaaat

SEQ ID NO: 371075 - DNA, 15 bp, Homo sapiens
ctttcttaaagaaaa

SEQ ID NO: 371076 - DNA, 15 bp, Homo sapiens
tctttcttaaagaaa

SEQ ID NO: 371077 - DNA, 15 bp, Homo sapiens
ctctttcttaaagaa

SEQ ID NO: 371078 - DNA, 15 bp, Homo sapiens
cctctttcttaaaga

SEQ ID NO: 371079 - DNA, 15 bp, Homo sapiens
gcctctttcttaaag

SEQ ID NO: 371080 - DNA, 15 bp, Homo sapiens
agcctctttcttaaa

SEQ ID NO: 371081 - DNA, 15 bp, Homo sapiens
cagcctctttcttaa

SEQ ID NO: 371082 - DNA, 15 bp, Homo sapiens
acagcctctttctta

SEQ ID NO: 371083 - DNA, 15 bp, Homo sapiens
aacagcctctttctt

SEQ ID NO: 371084 - DNA, 15 bp, Homo sapiens
aaacagcctctttct

SEQ ID NO: 371085 - DNA, 15 bp, Homo sapiens
caaacagcctctttc

SEQ ID NO: 371086 - DNA, 15 bp, Homo sapiens
tcaaacagcctcttt

SEQ ID NO: 371087 - DNA, 15 bp, Homo sapiens
ctcaaacagcctctt

SEQ ID NO: 371088 - DNA, 15 bp, Homo sapiens
tctcaaacagcctct

SEQ ID NO: 371089 - DNA, 15 bp, Homo sapiens
ttctcaaacagcctc

SEQ ID NO: 371090 - DNA, 15 bp, Homo sapiens
gttctcaaacagcct

SEQ ID NO: 371091 - DNA, 15 bp, Homo sapiens
agttctcaaacagcc

SEQ ID NO: 371092 - DNA, 15 bp, Homo sapiens
aagttctcaaacagc

SEQ ID NO: 371093 - DNA, 15 bp, Homo sapiens
aaagttctcaaacag

SEQ ID NO: 371094 - DNA, 15 bp, Homo sapiens
taaagttctcaaaca

SEQ ID NO: 371095 - DNA, 15 bp, Homo sapiens
ataaagttctcaaac

SEQ ID NO: 371096 - DNA, 15 bp, Homo sapiens
cataaagttctcaaa

SEQ ID NO: 371097 - DNA, 15 bp, Homo sapiens
acataaagttctcaa

SEQ ID NO: 371098 - DNA, 15 bp, Homo sapiens
aacataaagttctca

SEQ ID NO: 371099 - DNA, 15 bp, Homo sapiens
taacataaagttctc

SEQ ID NO: 371100 - DNA, 15 bp, Homo sapiens
ataacataaagttct

SEQ ID NO: 371101 - DNA, 15 bp, Homo sapiens
aataacataaagttc

SEQ ID NO: 371102 - DNA, 15 bp, Homo sapiens
aaataacataaagtt

SEQ ID NO: 371103 - DNA, 15 bp, Homo sapiens
aaaataacataaagt

SEQ ID NO: 371104 - DNA, 15 bp, Homo sapiens
aaaaataacataaag

SEQ ID NO: 371105 - DNA, 15 bp, Homo sapiens
taaaaataacataaa

SEQ ID NO: 371106 - DNA, 15 bp, Homo sapiens
ataaaaataacataa

SEQ ID NO: 371107 - DNA, 15 bp, Homo sapiens
aataaaaataacata

SEQ ID NO: 371108 - DNA, 15 bp, Homo sapiens
taataaaaataacat

SEQ ID NO: 371109 - DNA, 15 bp, Homo sapiens
ataataaaaataaca

SEQ ID NO: 371110 - DNA, 15 bp, Homo sapiens
aataataaaaataac

SEQ ID NO: 371111 - DNA, 15 bp, Homo sapiens
aaataataaaaataa

SEQ ID NO: 371112 - DNA, 15 bp, Homo sapiens
taaataataaaaata

SEQ ID NO: 371113 - DNA, 15 bp, Homo sapiens
ttaaataataaaaat

SEQ ID NO: 371114 - DNA, 15 bp, Homo sapiens
tttaaataataaaaa

SEQ ID NO: 371115 - DNA, 15 bp, Homo sapiens
ttttaaataataaaa

SEQ ID NO: 371116 - DNA, 15 bp, Homo sapiens
tttttaaataataaa

SEQ ID NO: 371117 - DNA, 15 bp, Homo sapiens
ttttttaaataataa

SEQ ID NO: 371118 - DNA, 15 bp, Homo sapiens
tttttttaaataata

SEQ ID NO: 371119 - DNA, 15 bp, Homo sapiens
atttttttaaataat

SEQ ID NO: 371120 - DNA, 15 bp, Homo sapiens
tatttttttaaataa

SEQ ID NO: 371121 - DNA, 15 bp, Homo sapiens
atatttttttaaata

SEQ ID NO: 371122 - DNA, 15 bp, Homo sapiens
aatatttttttaaat

SEQ ID NO: 371123 - DNA, 15 bp, Homo sapiens
aaatatttttttaaa

SEQ ID NO: 371124 - DNA, 15 bp, Homo sapiens
aaaatatttttttaa

SEQ ID NO: 371125 - DNA, 15 bp, Homo sapiens
taaaatattttttta

SEQ ID NO: 371126 - DNA, 15 bp, Homo sapiens
gtaaaatattttttt

SEQ ID NO: 371127 - DNA, 15 bp, Homo sapiens
ggtaaaatatttttt

SEQ ID NO: 371128 - DNA, 15 bp, Homo sapiens
tggtaaaatattttt

SEQ ID NO: 371129 - DNA, 15 bp, Homo sapiens
ctggtaaaatatttt

SEQ ID NO: 371130 - DNA, 15 bp, Homo sapiens
tctggtaaaatattt

SEQ ID NO: 371131 - DNA, 15 bp, Homo sapiens
ttctggtaaaatatt

SEQ ID NO: 371132 - DNA, 15 bp, Homo sapiens
cttctggtaaaatat

SEQ ID NO: 371133 - DNA, 15 bp, Homo sapiens
ccttctggtaaaata

SEQ ID NO: 371134 - DNA, 15 bp, Homo sapiens
cccttctggtaaaat

SEQ ID NO: 371135 - DNA, 15 bp, Homo sapiens
acccttctggtaaaa

SEQ ID NO: 371136 - DNA, 15 bp, Homo sapiens
gacccttctggtaaa

SEQ ID NO: 371137 - DNA, 15 bp, Homo sapiens
tgacccttctggtaa

SEQ ID NO: 371138 - DNA, 15 bp, Homo sapiens
gtgacccttctggta

SEQ ID NO: 371139 - DNA, 15 bp, Homo sapiens
ggtgacccttctggt

SEQ ID NO: 371140 - DNA, 15 bp, Homo sapiens
aggtgacccttctgg

SEQ ID NO: 371141 - DNA, 15 bp, Homo sapiens
aaggtgacccttctg

SEQ ID NO: 371142 - DNA, 15 bp, Homo sapiens
gaaggtgacccttct

SEQ ID NO: 371143 - DNA, 15 bp, Homo sapiens
tgaaggtgacccttc

SEQ ID NO: 371144 - DNA, 15 bp, Homo sapiens
ctgaaggtgaccctt

SEQ ID NO: 371145 - DNA, 15 bp, Homo sapiens
actgaaggtgaccct

SEQ ID NO: 371146 - DNA, 15 bp, Homo sapiens
aactgaaggtgaccc

SEQ ID NO: 371147 - DNA, 15 bp, Homo sapiens
caactgaaggtgacc

SEQ ID NO: 371148 - DNA, 15 bp, Homo sapiens
tcaactgaaggtgac

SEQ ID NO: 371149 - DNA, 15 bp, Homo sapiens
ttcaactgaaggtga

SEQ ID NO: 371150 - DNA, 15 bp, Homo sapiens
tttcaactgaaggtg

SEQ ID NO: 371151 - DNA, 15 bp, Homo sapiens
atttcaactgaaggt

SEQ ID NO: 371152 - DNA, 15 bp, Homo sapiens
catttcaactgaagg

SEQ ID NO: 371153 - DNA, 15 bp, Homo sapiens
acatttcaactgaag

SEQ ID NO: 371154 - DNA, 15 bp, Homo sapiens
aacatttcaactgaa

SEQ ID NO: 371155 - DNA, 15 bp, Homo sapiens
taacatttcaactga

SEQ ID NO: 371156 - DNA, 15 bp, Homo sapiens
ttaacatttcaactg

SEQ ID NO: 371157 - DNA, 15 bp, Homo sapiens
gttaacatttcaact

SEQ ID NO: 371158 - DNA, 15 bp, Homo sapiens
agttaacatttcaac

SEQ ID NO: 371159 - DNA, 15 bp, Homo sapiens
cagttaacatttcaa

SEQ ID NO: 371160 - DNA, 15 bp, Homo sapiens
gcagttaacatttca

SEQ ID NO: 371161 - DNA, 15 bp, Homo sapiens
ggcagttaacatttc

SEQ ID NO: 371162 - DNA, 15 bp, Homo sapiens
cggcagttaacattt

SEQ ID NO: 371163 - DNA, 15 bp, Homo sapiens
gcggcagttaacatt

SEQ ID NO: 371164 - DNA, 15 bp, Homo sapiens
ggcggcagttaacat

SEQ ID NO: 371165 - DNA, 15 bp, Homo sapiens
aggcggcagttaaca

SEQ ID NO: 371166 - DNA, 15 bp, Homo sapiens
aaggcggcagttaac

SEQ ID NO: 371167 - DNA, 15 bp, Homo sapiens
taaggcggcagttaa

SEQ ID NO: 371168 - DNA, 15 bp, Homo sapiens
ataaggcggcagtta

SEQ ID NO: 371169 - DNA, 15 bp, Homo sapiens
aataaggcggcagtt

SEQ ID NO: 371170 - DNA, 15 bp, Homo sapiens
aaataaggcggcagt

SEQ ID NO: 371171 - DNA, 15 bp, Homo sapiens
gaaataaggcggcag

SEQ ID NO: 371172 - DNA, 15 bp, Homo sapiens
ggaaataaggcggca

SEQ ID NO: 371173 - DNA, 15 bp, Homo sapiens
gggaaataaggcggc

SEQ ID NO: 371174 - DNA, 15 bp, Homo sapiens
tgggaaataaggcgg

SEQ ID NO: 371175 - DNA, 15 bp, Homo sapiens
atgggaaataaggcg

SEQ ID NO: 371176 - DNA, 15 bp, Homo sapiens
aatgggaaataaggc

SEQ ID NO: 371177 - DNA, 15 bp, Homo sapiens
aaatgggaaataagg

SEQ ID NO: 371178 - DNA, 15 bp, Homo sapiens
aaaatgggaaataag

SEQ ID NO: 371179 - DNA, 15 bp, Homo sapiens
taaaatgggaaataa

SEQ ID NO: 371180 - DNA, 15 bp, Homo sapiens
gtaaaatgggaaata

SEQ ID NO: 371181 - DNA, 15 bp, Homo sapiens
agtaaaatgggaaat

SEQ ID NO: 371182 - DNA, 15 bp, Homo sapiens
tagtaaaatgggaaa

SEQ ID NO: 371183 - DNA, 15 bp, Homo sapiens
ttagtaaaatgggaa

SEQ ID NO: 371184 - DNA, 15 bp, Homo sapiens
tttagtaaaatggga

SEQ ID NO: 371185 - DNA, 15 bp, Homo sapiens
ctttagtaaaatggg

SEQ ID NO: 371186 - DNA, 15 bp, Homo sapiens
tctttagtaaaatgg

SEQ ID NO: 371187 - DNA, 15 bp, Homo sapiens
ttctttagtaaaatg

SEQ ID NO: 371188 - DNA, 15 bp, Homo sapiens
attctttagtaaaat

SEQ ID NO: 371189 - DNA, 15 bp, Homo sapiens
gattctttagtaaaa

SEQ ID NO: 371190 - DNA, 15 bp, Homo sapiens
agattctttagtaaa

SEQ ID NO: 371191 - DNA, 15 bp, Homo sapiens
aagattctttagtaa

SEQ ID NO: 371192 - DNA, 15 bp, Homo sapiens
aaagattctttagta

SEQ ID NO: 371193 - DNA, 15 bp, Homo sapiens
gaaagattctttagt

SEQ ID NO: 371194 - DNA, 15 bp, Homo sapiens
tgaaagattctttag

SEQ ID NO: 371195 - DNA, 15 bp, Homo sapiens
atgaaagattcttta

SEQ ID NO: 371196 - DNA, 15 bp, Homo sapiens
catgaaagattcttt

SEQ ID NO: 371197 - DNA, 15 bp, Homo sapiens
tcatgaaagattctt

SEQ ID NO: 371198 - DNA, 15 bp, Homo sapiens
gtcatgaaagattct

SEQ ID NO: 371199 - DNA, 15 bp, Homo sapiens
agtcatgaaagattc

SEQ ID NO: 371200 - DNA, 15 bp, Homo sapiens
aagtcatgaaagatt

SEQ ID NO: 371201 - DNA, 15 bp, Homo sapiens
aaagtcatgaaagat

SEQ ID NO: 371202 - DNA, 15 bp, Homo sapiens
aaaagtcatgaaaga

SEQ ID NO: 371203 - DNA, 15 bp, Homo sapiens
aaaaagtcatgaaag

SEQ ID NO: 371204 - DNA, 15 bp, Homo sapiens
gaaaaagtcatgaaa

SEQ ID NO: 371205 - DNA, 15 bp, Homo sapiens
tgaaaaagtcatgaa

SEQ ID NO: 371206 - DNA, 15 bp, Homo sapiens
ctgaaaaagtcatga

SEQ ID NO: 371207 - DNA, 15 bp, Homo sapiens
gctgaaaaagtcatg

SEQ ID NO: 371208 - DNA, 15 bp, Homo sapiens
agctgaaaaagtcat

SEQ ID NO: 371209 - DNA, 15 bp, Homo sapiens
aagctgaaaaagtca

SEQ ID NO: 371210 - DNA, 15 bp, Homo sapiens
gaagctgaaaaagtc

SEQ ID NO: 371211 - DNA, 15 bp, Homo sapiens
ggaagctgaaaaagt

SEQ ID NO: 371212 - DNA, 15 bp, Homo sapiens
aggaagctgaaaaag

SEQ ID NO: 371213 - DNA, 15 bp, Homo sapiens
aaggaagctgaaaaa

SEQ ID NO: 371214 - DNA, 15 bp, Homo sapiens
gaaggaagctgaaaa

SEQ ID NO: 371215 - DNA, 15 bp, Homo sapiens
ggaaggaagctgaaa

SEQ ID NO: 371216 - DNA, 15 bp, Homo sapiens
gggaaggaagctgaa

SEQ ID NO: 371217 - DNA, 15 bp, Homo sapiens
ggggaaggaagctga

SEQ ID NO: 371218 - DNA, 15 bp, Homo sapiens
tggggaaggaagctg

SEQ ID NO: 371219 - DNA, 15 bp, Homo sapiens
ttggggaaggaagct

SEQ ID NO: 371220 - DNA, 15 bp, Homo sapiens
tttggggaaggaagc

SEQ ID NO: 371221 - DNA, 15 bp, Homo sapiens
atttggggaaggaag

SEQ ID NO: 371222 - DNA, 15 bp, Homo sapiens
catttggggaaggaa

SEQ ID NO: 371223 - DNA, 15 bp, Homo sapiens
ccatttggggaagga

SEQ ID NO: 371224 - DNA, 15 bp, Homo sapiens
accatttggggaagg

SEQ ID NO: 371225 - DNA, 15 bp, Homo sapiens
taccatttggggaag

SEQ ID NO: 371226 - DNA, 15 bp, Homo sapiens
ttaccatttggggaa

SEQ ID NO: 371227 - DNA, 15 bp, Homo sapiens
cttaccatttgggga

SEQ ID NO: 371228 - DNA, 15 bp, Homo sapiens
ccttaccatttgggg

SEQ ID NO: 371229 - DNA, 15 bp, Homo sapiens
gccttaccatttggg

SEQ ID NO: 371230 - DNA, 15 bp, Homo sapiens
ggccttaccatttgg

SEQ ID NO: 371231 - DNA, 15 bp, Homo sapiens
tggccttaccatttg

SEQ ID NO: 371232 - DNA, 15 bp, Homo sapiens
ttggccttaccattt

SEQ ID NO: 371233 - DNA, 15 bp, Homo sapiens
cttggccttaccatt

SEQ ID NO: 371234 - DNA, 15 bp, Homo sapiens
gcttggccttaccat

SEQ ID NO: 371235 - DNA, 15 bp, Homo sapiens
tgcttggccttacca

SEQ ID NO: 371236 - DNA, 15 bp, Homo sapiens
ctgcttggccttacc

SEQ ID NO: 371237 - DNA, 15 bp, Homo sapiens
gctgcttggccttac

SEQ ID NO: 371238 - DNA, 15 bp, Homo sapiens
agctgcttggcctta

SEQ ID NO: 371239 - DNA, 15 bp, Homo sapiens
gagctgcttggcctt

SEQ ID NO: 371240 - DNA, 15 bp, Homo sapiens
agagctgcttggcct

SEQ ID NO: 371241 - DNA, 15 bp, Homo sapiens
aagagctgcttggcc

SEQ ID NO: 371242 - DNA, 15 bp, Homo sapiens
caagagctgcttggc

SEQ ID NO: 371243 - DNA, 15 bp, Homo sapiens
ccaagagctgcttgg

SEQ ID NO: 371244 - DNA, 15 bp, Homo sapiens
gccaagagctgcttg

SEQ ID NO: 371245 - DNA, 15 bp, Homo sapiens
agccaagagctgctt

SEQ ID NO: 371246 - DNA, 15 bp, Homo sapiens
cagccaagagctgct

SEQ ID NO: 371247 - DNA, 15 bp, Homo sapiens
ccagccaagagctgc

SEQ ID NO: 371248 - DNA, 15 bp, Homo sapiens
tccagccaagagctg

SEQ ID NO: 371249 - DNA, 15 bp, Homo sapiens
ttccagccaagagct

SEQ ID NO: 371250 - DNA, 15 bp, Homo sapiens
cttccagccaagagc

SEQ ID NO: 371251 - DNA, 15 bp, Homo sapiens
gcttccagccaagag

SEQ ID NO: 371252 - DNA, 15 bp, Homo sapiens
agcttccagccaaga

SEQ ID NO: 371253 - DNA, 15 bp, Homo sapiens
tagcttccagccaag

SEQ ID NO: 371254 - DNA, 15 bp, Homo sapiens
ttagcttccagccaa

SEQ ID NO: 371255 - DNA, 15 bp, Homo sapiens
attagcttccagcca

SEQ ID NO: 371256 - DNA, 15 bp, Homo sapiens
aattagcttccagcc

SEQ ID NO: 371257 - DNA, 15 bp, Homo sapiens
aaattagcttccagc

SEQ ID NO: 371258 - DNA, 15 bp, Homo sapiens
aaaattagcttccag

SEQ ID NO: 371259 - DNA, 15 bp, Homo sapiens
caaaattagcttcca

SEQ ID NO: 371260 - DNA, 15 bp, Homo sapiens
ccaaaattagcttcc

SEQ ID NO: 371261 - DNA, 15 bp, Homo sapiens
accaaaattagcttc

SEQ ID NO: 371262 - DNA, 15 bp, Homo sapiens
aaccaaaattagctt

SEQ ID NO: 371263 - DNA, 15 bp, Homo sapiens
aaaccaaaattagct

SEQ ID NO: 371264 - DNA, 15 bp, Homo sapiens
caaaccaaaattagc

SEQ ID NO: 371265 - DNA, 15 bp, Homo sapiens
ccaaaccaaaattag

SEQ ID NO: 371266 - DNA, 15 bp, Homo sapiens
gccaaaccaaaatta

SEQ ID NO: 371267 - DNA, 15 bp, Homo sapiens
agccaaaccaaaatt

SEQ ID NO: 371268 - DNA, 15 bp, Homo sapiens
cagccaaaccaaaat

SEQ ID NO: 371269 - DNA, 15 bp, Homo sapiens
ccagccaaaccaaaa

SEQ ID NO: 371270 - DNA, 15 bp, Homo sapiens
cccagccaaaccaaa

SEQ ID NO: 371271 - DNA, 15 bp, Homo sapiens
ccccagccaaaccaa

SEQ ID NO: 371272 - DNA, 15 bp, Homo sapiens
tccccagccaaacca

SEQ ID NO: 371273 - DNA, 15 bp, Homo sapiens
ctccccagccaaacc

SEQ ID NO: 371274 - DNA, 15 bp, Homo sapiens
actccccagccaaac

SEQ ID NO: 371275 - DNA, 15 bp, Homo sapiens
gactccccagccaaa

SEQ ID NO: 371276 - DNA, 15 bp, Homo sapiens
ggactccccagccaa

SEQ ID NO: 371277 - DNA, 15 bp, Homo sapiens
aggactccccagcca

SEQ ID NO: 371278 - DNA, 15 bp, Homo sapiens
gaggactccccagcc

SEQ ID NO: 371279 - DNA, 15 bp, Homo sapiens
tgaggactccccagc

SEQ ID NO: 371280 - DNA, 15 bp, Homo sapiens
ttgaggactccccag

SEQ ID NO: 371281 - DNA, 15 bp, Homo sapiens
gttgaggactcccca

SEQ ID NO: 371282 - DNA, 15 bp, Homo sapiens
tgttgaggactcccc

SEQ ID NO: 371283 - DNA, 15 bp, Homo sapiens
gtgttgaggactccc

SEQ ID NO: 371284 - DNA, 15 bp, Homo sapiens
agtgttgaggactcc

SEQ ID NO: 371285 - DNA, 15 bp, Homo sapiens
cagtgttgaggactc

SEQ ID NO: 371286 - DNA, 15 bp, Homo sapiens
tcagtgttgaggact

SEQ ID NO: 371287 - DNA, 15 bp, Homo sapiens
ctcagtgttgaggac

SEQ ID NO: 371288 - DNA, 15 bp, Homo sapiens
gctcagtgttgagga

SEQ ID NO: 371289 - DNA, 15 bp, Homo sapiens
ggctcagtgttgagg

SEQ ID NO: 371290 - DNA, 15 bp, Homo sapiens
gggctcagtgttgag

SEQ ID NO: 371291 - DNA, 15 bp, Homo sapiens
ggggctcagtgttga

SEQ ID NO: 371292 - DNA, 15 bp, Homo sapiens
tggggctcagtgttg

SEQ ID NO: 371293 - DNA, 15 bp, Homo sapiens
gtggggctcagtgtt

SEQ ID NO: 371294 - DNA, 15 bp, Homo sapiens
ggtggggctcagtgt

SEQ ID NO: 371295 - DNA, 15 bp, Homo sapiens
gggtggggctcagtg

SEQ ID NO: 371296 - DNA, 15 bp, Homo sapiens
tgggtggggctcagt

SEQ ID NO: 371297 - DNA, 15 bp, Homo sapiens
ctgggtggggctcag

SEQ ID NO: 371298 - DNA, 15 bp, Homo sapiens
actgggtggggctca

SEQ ID NO: 371299 - DNA, 15 bp, Homo sapiens
cactgggtggggctc

SEQ ID NO: 371300 - DNA, 15 bp, Homo sapiens
acactgggtggggct

SEQ ID NO: 371301 - DNA, 15 bp, Homo sapiens
gacactgggtggggc

SEQ ID NO: 371302 - DNA, 15 bp, Homo sapiens
tgacactgggtgggg

SEQ ID NO: 371303 - DNA, 15 bp, Homo sapiens
atgacactgggtggg

SEQ ID NO: 371304 - DNA, 15 bp, Homo sapiens
aatgacactgggtgg

SEQ ID NO: 371305 - DNA, 15 bp, Homo sapiens
taatgacactgggtg

SEQ ID NO: 371306 - DNA, 15 bp, Homo sapiens
ctaatgacactgggt

SEQ ID NO: 371307 - DNA, 15 bp, Homo sapiens
gctaatgacactggg

SEQ ID NO: 371308 - DNA, 15 bp, Homo sapiens
agctaatgacactgg

SEQ ID NO: 371309 - DNA, 15 bp, Homo sapiens
gagctaatgacactg

SEQ ID NO: 371310 - DNA, 15 bp, Homo sapiens
tgagctaatgacact

SEQ ID NO: 371311 - DNA, 15 bp, Homo sapiens
ctgagctaatgacac

SEQ ID NO: 371312 - DNA, 15 bp, Homo sapiens
actgagctaatgaca

SEQ ID NO: 371313 - DNA, 15 bp, Homo sapiens
aactgagctaatgac

SEQ ID NO: 371314 - DNA, 15 bp, Homo sapiens
aaactgagctaatga

SEQ ID NO: 371315 - DNA, 15 bp, Homo sapiens
aaaactgagctaatg

SEQ ID NO: 371316 - DNA, 15 bp, Homo sapiens
taaaactgagctaat

SEQ ID NO: 371317 - DNA, 15 bp, Homo sapiens
ttaaaactgagctaa

SEQ ID NO: 371318 - DNA, 15 bp, Homo sapiens
gttaaaactgagcta

SEQ ID NO: 371319 - DNA, 15 bp, Homo sapiens
agttaaaactgagct

SEQ ID NO: 371320 - DNA, 15 bp, Homo sapiens
aagttaaaactgagc

SEQ ID NO: 371321 - DNA, 15 bp, Homo sapiens
caagttaaaactgag

SEQ ID NO: 371322 - DNA, 15 bp, Homo sapiens
gcaagttaaaactga

SEQ ID NO: 371323 - DNA, 15 bp, Homo sapiens
tgcaagttaaaactg

SEQ ID NO: 371324 - DNA, 15 bp, Homo sapiens
ttgcaagttaaaact

SEQ ID NO: 371325 - DNA, 15 bp, Homo sapiens
tttgcaagttaaaac

SEQ ID NO: 371326 - DNA, 15 bp, Homo sapiens
ttttgcaagttaaaa

SEQ ID NO: 371327 - DNA, 15 bp, Homo sapiens
tttttgcaagttaaa

SEQ ID NO: 371328 - DNA, 15 bp, Homo sapiens
ttttttgcaagttaa

SEQ ID NO: 371329 - DNA, 15 bp, Homo sapiens
tttttttgcaagtta

SEQ ID NO: 371330 - DNA, 15 bp, Homo sapiens
ttttttttgcaagtt

SEQ ID NO: 371331 - DNA, 15 bp, Homo sapiens
cttttttttgcaagt

SEQ ID NO: 371332 - DNA, 15 bp, Homo sapiens
tcttttttttgcaag

SEQ ID NO: 371333 - DNA, 15 bp, Homo sapiens
atcttttttttgcaa

SEQ ID NO: 371334 - DNA, 15 bp, Homo sapiens
aatcttttttttgca

SEQ ID NO: 371335 - DNA, 15 bp, Homo sapiens
caatcttttttttgc

SEQ ID NO: 371336 - DNA, 15 bp, Homo sapiens
acaatcttttttttg

SEQ ID NO: 371337 - DNA, 15 bp, Homo sapiens
tacaatctttttttt

SEQ ID NO: 371338 - DNA, 15 bp, Homo sapiens
atacaatcttttttt

SEQ ID NO: 371339 - DNA, 15 bp, Homo sapiens
aatacaatctttttt

SEQ ID NO: 371340 - DNA, 15 bp, Homo sapiens
aaatacaatcttttt

SEQ ID NO: 371341 - DNA, 15 bp, Homo sapiens
aaaatacaatctttt

SEQ ID NO: 371342 - DNA, 15 bp, Homo sapiens
aaaaatacaatcttt

SEQ ID NO: 371343 - DNA, 15 bp, Homo sapiens
aaaaaatacaatctt

SEQ ID NO: 371344 - DNA, 15 bp, Homo sapiens
aaaaaaatacaatct

SEQ ID NO: 371345 - DNA, 15 bp, Homo sapiens
aaaaaaaatacaatc

SEQ ID NO: 371346 - DNA, 15 bp, Homo sapiens
aaaaaaaaatacaat

SEQ ID NO: 371347 - DNA, 15 bp, Homo sapiens
aaaaaaaaaatacaa

SEQ ID NO: 371348 - DNA, 15 bp, Homo sapiens
aaaaaaaaaaataca

SEQ ID NO: 371349 - DNA, 15 bp, Homo sapiens
caaaaaaaaaaatac

SEQ ID NO: 371350 - DNA, 15 bp, Homo sapiens
tcaaaaaaaaaaata

SEQ ID NO: 371351 - DNA, 15 bp, Homo sapiens
atcaaaaaaaaaaat

SEQ ID NO: 371352 - DNA, 15 bp, Homo sapiens
catcaaaaaaaaaaa

SEQ ID NO: 371353 - DNA, 15 bp, Homo sapiens
ccatcaaaaaaaaaa

SEQ ID NO: 371354 - DNA, 15 bp, Homo sapiens
cccatcaaaaaaaaa

SEQ ID NO: 371355 - DNA, 15 bp, Homo sapiens
ccccatcaaaaaaaa

SEQ ID NO: 371356 - DNA, 15 bp, Homo sapiens
cccccatcaaaaaaa

SEQ ID NO: 371357 - DNA, 15 bp, Homo sapiens
ccccccatcaaaaaa

SEQ ID NO: 371358 - DNA, 15 bp, Homo sapiens
accccccatcaaaaa

SEQ ID NO: 371359 - DNA, 15 bp, Homo sapiens
taccccccatcaaaa

SEQ ID NO: 371360 - DNA, 15 bp, Homo sapiens
gtaccccccatcaaa

SEQ ID NO: 371361 - DNA, 15 bp, Homo sapiens
cgtaccccccatcaa

SEQ ID NO: 371362 - DNA, 15 bp, Homo sapiens
acgtaccccccatca

SEQ ID NO: 371363 - DNA, 15 bp, Homo sapiens
tacgtaccccccatc

SEQ ID NO: 371364 - DNA, 15 bp, Homo sapiens
ttacgtaccccccat

SEQ ID NO: 371365 - DNA, 15 bp, Homo sapiens
cttacgtacccccca

SEQ ID NO: 371366 - DNA, 15 bp, Homo sapiens
tcttacgtacccccc

SEQ ID NO: 371367 - DNA, 15 bp, Homo sapiens
ttcttacgtaccccc

SEQ ID NO: 371368 - DNA, 15 bp, Homo sapiens
attcttacgtacccc

SEQ ID NO: 371369 - DNA, 15 bp, Homo sapiens
aattcttacgtaccc

SEQ ID NO: 371370 - DNA, 15 bp, Homo sapiens
aaattcttacgtacc

SEQ ID NO: 371371 - DNA, 15 bp, Homo sapiens
taaattcttacgtac

SEQ ID NO: 371372 - DNA, 15 bp, Homo sapiens
gtaaattcttacgta

SEQ ID NO: 371373 - DNA, 15 bp, Homo sapiens
agtaaattcttacgt

SEQ ID NO: 371374 - DNA, 15 bp, Homo sapiens
gagtaaattcttacg

SEQ ID NO: 371375 - DNA, 15 bp, Homo sapiens
tgagtaaattcttac

SEQ ID NO: 371376 - DNA, 15 bp, Homo sapiens
gtgagtaaattctta

SEQ ID NO: 371377 - DNA, 15 bp, Homo sapiens
cgtgagtaaattctt

SEQ ID NO: 371378 - DNA, 15 bp, Homo sapiens
gcgtgagtaaattct

SEQ ID NO: 371379 - DNA, 15 bp, Homo sapiens
ggcgtgagtaaattc

SEQ ID NO: 371380 - DNA, 15 bp, Homo sapiens
aggcgtgagtaaatt

SEQ ID NO: 371381 - DNA, 15 bp, Homo sapiens
aaggcgtgagtaaat

SEQ ID NO: 371382 - DNA, 15 bp, Homo sapiens
aaaggcgtgagtaaa

SEQ ID NO: 371383 - DNA, 15 bp, Homo sapiens
taaaggcgtgagtaa

SEQ ID NO: 371384 - DNA, 15 bp, Homo sapiens
ctaaaggcgtgagta

SEQ ID NO: 371385 - DNA, 15 bp, Homo sapiens
gctaaaggcgtgagt

SEQ ID NO: 371386 - DNA, 15 bp, Homo sapiens
ggctaaaggcgtgag

SEQ ID NO: 371387 - DNA, 15 bp, Homo sapiens
aggctaaaggcgtga

SEQ ID NO: 371388 - DNA, 15 bp, Homo sapiens
aaggctaaaggcgtg

SEQ ID NO: 371389 - DNA, 15 bp, Homo sapiens
aaaggctaaaggcgt

SEQ ID NO: 371390 - DNA, 15 bp, Homo sapiens
aaaaggctaaaggcg

SEQ ID NO: 371391 - DNA, 15 bp, Homo sapiens
gtcaatacatatttg

SEQ ID NO: 371392 - DNA, 15 bp, Homo sapiens
tgtcaatacatattt

SEQ ID NO: 371393 - DNA, 15 bp, Homo sapiens
gtgtcaatacatatt

SEQ ID NO: 371394 - DNA, 15 bp, Homo sapiens
ggtgtcaatacatat

SEQ ID NO: 371395 - DNA, 15 bp, Homo sapiens
aggtgtcaatacata

SEQ ID NO: 371396 - DNA, 15 bp, Homo sapiens
taggtgtcaatacat

SEQ ID NO: 371397 - DNA, 15 bp, Homo sapiens
ataggtgtcaataca

SEQ ID NO: 371398 - DNA, 15 bp, Homo sapiens
aataggtgtcaatac

SEQ ID NO: 371399 - DNA, 15 bp, Homo sapiens
taataggtgtcaata

SEQ ID NO: 371400 - DNA, 15 bp, Homo sapiens
ataataggtgtcaat

SEQ ID NO: 371401 - DNA, 15 bp, Homo sapiens
cataataggtgtcaa

SEQ ID NO: 371402 - DNA, 15 bp, Homo sapiens
acataataggtgtca

SEQ ID NO: 371403 - DNA, 15 bp, Homo sapiens
cacataataggtgtc

SEQ ID NO: 371404 - DNA, 15 bp, Homo sapiens
gcacataataggtgt

SEQ ID NO: 371405 - DNA, 15 bp, Homo sapiens
ggcacataataggtg

SEQ ID NO: 371406 - DNA, 15 bp, Homo sapiens
tggcacataataggt

SEQ ID NO: 371407 - DNA, 15 bp, Homo sapiens
ctggcacataatagg

SEQ ID NO: 371408 - DNA, 15 bp, Homo sapiens
cctggcacataatag

SEQ ID NO: 371409 - DNA, 15 bp, Homo sapiens
gcctggcacataata

SEQ ID NO: 371410 - DNA, 15 bp, Homo sapiens
agcctggcacataat

SEQ ID NO: 371411 - DNA, 15 bp, Homo sapiens
cagcctggcacataa

SEQ ID NO: 371412 - DNA, 15 bp, Homo sapiens
acagcctggcacata

SEQ ID NO: 371413 - DNA, 15 bp, Homo sapiens
cacagcctggcacat

SEQ ID NO: 371414 - DNA, 15 bp, Homo sapiens
acacagcctggcaca

SEQ ID NO: 371415 - DNA, 15 bp, Homo sapiens
cacacagcctggcac

SEQ ID NO: 371416 - DNA, 15 bp, Homo sapiens
gcacacagcctggca

SEQ ID NO: 371417 - DNA, 15 bp, Homo sapiens
agcacacagcctggc

SEQ ID NO: 371418 - DNA, 15 bp, Homo sapiens
cagcacacagcctgg

SEQ ID NO: 371419 - DNA, 15 bp, Homo sapiens
acagcacacagcctg

SEQ ID NO: 371420 - DNA, 15 bp, Homo sapiens
cacagcacacagcct

SEQ ID NO: 371421 - DNA, 15 bp, Homo sapiens
gcacagcacacagcc

SEQ ID NO: 371422 - DNA, 15 bp, Homo sapiens
tgcacagcacacagc

SEQ ID NO: 371423 - DNA, 15 bp, Homo sapiens
ctgcacagcacacag

SEQ ID NO: 371424 - DNA, 15 bp, Homo sapiens
tctgcacagcacaca

SEQ ID NO: 371425 - DNA, 15 bp, Homo sapiens
ctctgcacagcacac

SEQ ID NO: 371426 - DNA, 15 bp, Homo sapiens
cctctgcacagcaca

SEQ ID NO: 371427 - DNA, 15 bp, Homo sapiens
tcctctgcacagcac

SEQ ID NO: 371428 - DNA, 15 bp, Homo sapiens
gtcctctgcacagca

SEQ ID NO: 371429 - DNA, 15 bp, Homo sapiens
ggtcctctgcacagc

SEQ ID NO: 371430 - DNA, 15 bp, Homo sapiens
tggtcctctgcacag

SEQ ID NO: 371431 - DNA, 15 bp, Homo sapiens
ctggtcctctgcaca

SEQ ID NO: 371432 - DNA, 15 bp, Homo sapiens
actggtcctctgcac

SEQ ID NO: 371433 - DNA, 15 bp, Homo sapiens
aactggtcctctgca

SEQ ID NO: 371434 - DNA, 15 bp, Homo sapiens
gaactggtcctctgc

SEQ ID NO: 371435 - DNA, 15 bp, Homo sapiens
ggaactggtcctctg

SEQ ID NO: 371436 - DNA, 15 bp, Homo sapiens
aggaactggtcctct

SEQ ID NO: 371437 - DNA, 15 bp, Homo sapiens
caggaactggtcctc

SEQ ID NO: 371438 - DNA, 15 bp, Homo sapiens
ccaggaactggtcct

SEQ ID NO: 371439 - DNA, 15 bp, Homo sapiens
cccaggaactggtcc

SEQ ID NO: 371440 - DNA, 15 bp, Homo sapiens
gcccaggaactggtc

SEQ ID NO: 371441 - DNA, 15 bp, Homo sapiens
agcccaggaactggt

SEQ ID NO: 371442 - DNA, 15 bp, Homo sapiens
cagcccaggaactgg

SEQ ID NO: 371443 - DNA, 15 bp, Homo sapiens
ccagcccaggaactg

SEQ ID NO: 371444 - DNA, 15 bp, Homo sapiens
cccagcccaggaact

SEQ ID NO: 371445 - DNA, 15 bp, Homo sapiens
acccagcccaggaac

SEQ ID NO: 371446 - DNA, 15 bp, Homo sapiens
aacccagcccaggaa

SEQ ID NO: 371447 - DNA, 15 bp, Homo sapiens
taacccagcccagga

SEQ ID NO: 371448 - DNA, 15 bp, Homo sapiens
ctaacccagcccagg

SEQ ID NO: 371449 - DNA, 15 bp, Homo sapiens
tctaacccagcccag

SEQ ID NO: 371450 - DNA, 15 bp, Homo sapiens
ttctaacccagccca

SEQ ID NO: 371451 - DNA, 15 bp, Homo sapiens
attctaacccagccc

SEQ ID NO: 371452 - DNA, 15 bp, Homo sapiens
aattctaacccagcc

SEQ ID NO: 371453 - DNA, 15 bp, Homo sapiens
taattctaacccagc

SEQ ID NO: 371454 - DNA, 15 bp, Homo sapiens
ttaattctaacccag

SEQ ID NO: 371455 - DNA, 15 bp, Homo sapiens
cttaattctaaccca

SEQ ID NO: 371456 - DNA, 15 bp, Homo sapiens
tcttaattctaaccc

SEQ ID NO: 371457 - DNA, 15 bp, Homo sapiens
ttcttaattctaacc

SEQ ID NO: 371458 - DNA, 15 bp, Homo sapiens
attcttaattctaac

SEQ ID NO: 371459 - DNA, 15 bp, Homo sapiens
aattcttaattctaa

SEQ ID NO: 371460 - DNA, 15 bp, Homo sapiens
caattcttaattcta

SEQ ID NO: 371461 - DNA, 15 bp, Homo sapiens
ccaattcttaattct

SEQ ID NO: 371462 - DNA, 15 bp, Homo sapiens
gccaattcttaattc

SEQ ID NO: 371463 - DNA, 15 bp, Homo sapiens
tgccaattcttaatt

SEQ ID NO: 371464 - DNA, 15 bp, Homo sapiens
ctgccaattcttaat

SEQ ID NO: 371465 - DNA, 15 bp, Homo sapiens
actgccaattcttaa

SEQ ID NO: 371466 - DNA, 15 bp, Homo sapiens
aactgccaattctta

SEQ ID NO: 371467 - DNA, 15 bp, Homo sapiens
caactgccaattctt

SEQ ID NO: 371468 - DNA, 15 bp, Homo sapiens
ccaactgccaattct

SEQ ID NO: 371469 - DNA, 15 bp, Homo sapiens
tccaactgccaattc

SEQ ID NO: 371470 - DNA, 15 bp, Homo sapiens
ttccaactgccaatt

SEQ ID NO: 371471 - DNA, 15 bp, Homo sapiens
attccaactgccaat

SEQ ID NO: 371472 - DNA, 15 bp, Homo sapiens
cattccaactgccaa

SEQ ID NO: 371473 - DNA, 15 bp, Homo sapiens
ccattccaactgcca

SEQ ID NO: 371474 - DNA, 15 bp, Homo sapiens
gccattccaactgcc

SEQ ID NO: 371475 - DNA, 15 bp, Homo sapiens
agccattccaactgc

SEQ ID NO: 371476 - DNA, 15 bp, Homo sapiens
aagccattccaactg

SEQ ID NO: 371477 - DNA, 15 bp, Homo sapiens
caagccattccaact

SEQ ID NO: 371478 - DNA, 15 bp, Homo sapiens
acaagccattccaac

SEQ ID NO: 371479 - DNA, 15 bp, Homo sapiens
gacaagccattccaa

SEQ ID NO: 371480 - DNA, 15 bp, Homo sapiens
ggacaagccattcca

SEQ ID NO: 371481 - DNA, 15 bp, Homo sapiens
cggacaagccattcc

SEQ ID NO: 371482 - DNA, 15 bp, Homo sapiens
tcggacaagccattc

SEQ ID NO: 371483 - DNA, 15 bp, Homo sapiens
ttcggacaagccatt

SEQ ID NO: 371484 - DNA, 15 bp, Homo sapiens
cttcggacaagccat

SEQ ID NO: 371485 - DNA, 15 bp, Homo sapiens
ccttcggacaagcca

SEQ ID NO: 371486 - DNA, 15 bp, Homo sapiens
accttcggacaagcc

SEQ ID NO: 371487 - DNA, 15 bp, Homo sapiens
caccttcggacaagc

SEQ ID NO: 371488 - DNA, 15 bp, Homo sapiens
tcaccttcggacaag

SEQ ID NO: 371489 - DNA, 15 bp, Homo sapiens
atcaccttcggacaa

SEQ ID NO: 371490 - DNA, 15 bp, Homo sapiens
catcaccttcggaca

SEQ ID NO: 371491 - DNA, 15 bp, Homo sapiens
acatcaccttcggac

SEQ ID NO: 371492 - DNA, 15 bp, Homo sapiens
aacatcaccttcgga

SEQ ID NO: 371493 - DNA, 15 bp, Homo sapiens
caacatcaccttcgg

SEQ ID NO: 371494 - DNA, 15 bp, Homo sapiens
tcaacatcaccttcg

SEQ ID NO: 371495 - DNA, 15 bp, Homo sapiens
ttcaacatcaccttc

SEQ ID NO: 371496 - DNA, 15 bp, Homo sapiens
attcaacatcacctt

SEQ ID NO: 371497 - DNA, 15 bp, Homo sapiens
gattcaacatcacct

SEQ ID NO: 371498 - DNA, 15 bp, Homo sapiens
ggattcaacatcacc

SEQ ID NO: 371499 - DNA, 15 bp, Homo sapiens
tggattcaacatcac

SEQ ID NO: 371500 - DNA, 15 bp, Homo sapiens
atggattcaacatca

SEQ ID NO: 371501 - DNA, 15 bp, Homo sapiens
catggattcaacatc

SEQ ID NO: 371502 - DNA, 15 bp, Homo sapiens
ccatggattcaacat

SEQ ID NO: 371503 - DNA, 15 bp, Homo sapiens
cccatggattcaaca

SEQ ID NO: 371504 - DNA, 15 bp, Homo sapiens
ccccatggattcaac

SEQ ID NO: 371505 - DNA, 15 bp, Homo sapiens
tccccatggattcaa

SEQ ID NO: 371506 - DNA, 15 bp, Homo sapiens
atccccatggattca

SEQ ID NO: 371507 - DNA, 15 bp, Homo sapiens
catccccatggattc

SEQ ID NO: 371508 - DNA, 15 bp, Homo sapiens
ccatccccatggatt

SEQ ID NO: 371509 - DNA, 15 bp, Homo sapiens
tccatccccatggat

SEQ ID NO: 371510 - DNA, 15 bp, Homo sapiens
ctccatccccatgga

SEQ ID NO: 371511 - DNA, 15 bp, Homo sapiens
gctccatccccatgg

SEQ ID NO: 371512 - DNA, 15 bp, Homo sapiens
ggctccatccccatg

SEQ ID NO: 371513 - DNA, 15 bp, Homo sapiens
cggctccatccccat

SEQ ID NO: 371514 - DNA, 15 bp, Homo sapiens
ccggctccatcccca

SEQ ID NO: 371515 - DNA, 15 bp, Homo sapiens
gccggctccatcccc

SEQ ID NO: 371516 - DNA, 15 bp, Homo sapiens
cgccggctccatccc

SEQ ID NO: 371517 - DNA, 15 bp, Homo sapiens
ccgccggctccatcc

SEQ ID NO: 371518 - DNA, 15 bp, Homo sapiens
cccgccggctccatc

SEQ ID NO: 371519 - DNA, 15 bp, Homo sapiens
tcccgccggctccat

SEQ ID NO: 371520 - DNA, 15 bp, Homo sapiens
ctcccgccggctcca

SEQ ID NO: 371521 - DNA, 15 bp, Homo sapiens
cctcccgccggctcc

SEQ ID NO: 371522 - DNA, 15 bp, Homo sapiens
ccctcccgccggctc

SEQ ID NO: 371523 - DNA, 15 bp, Homo sapiens
cccctcccgccggct

SEQ ID NO: 371524 - DNA, 15 bp, Homo sapiens
ccccctcccgccggc

SEQ ID NO: 371525 - DNA, 15 bp, Homo sapiens
cccccctcccgccgg

SEQ ID NO: 371526 - DNA, 15 bp, Homo sapiens
tcccccctcccgccg

SEQ ID NO: 371527 - DNA, 15 bp, Homo sapiens
atcccccctcccgcc

SEQ ID NO: 371528 - DNA, 15 bp, Homo sapiens
aatcccccctcccgc

SEQ ID NO: 371529 - DNA, 15 bp, Homo sapiens
caatcccccctcccg

SEQ ID NO: 371530 - DNA, 15 bp, Homo sapiens
tcaatcccccctccc

SEQ ID NO: 371531 - DNA, 15 bp, Homo sapiens
gtcaatcccccctcc

SEQ ID NO: 371532 - DNA, 15 bp, Homo sapiens
agtcaatcccccctc

SEQ ID NO: 371533 - DNA, 15 bp, Homo sapiens
tagtcaatcccccct

SEQ ID NO: 371534 - DNA, 15 bp, Homo sapiens
ctagtcaatcccccc

SEQ ID NO: 371535 - DNA, 15 bp, Homo sapiens
cctagtcaatccccc

SEQ ID NO: 371536 - DNA, 15 bp, Homo sapiens
tcctagtcaatcccc

SEQ ID NO: 371537 - DNA, 15 bp, Homo sapiens
ctcctagtcaatccc

SEQ ID NO: 371538 - DNA, 15 bp, Homo sapiens
actcctagtcaatcc

SEQ ID NO: 371539 - DNA, 15 bp, Homo sapiens
aactcctagtcaatc

SEQ ID NO: 371540 - DNA, 15 bp, Homo sapiens
caactcctagtcaat

SEQ ID NO: 371541 - DNA, 15 bp, Homo sapiens
gcaactcctagtcaa

SEQ ID NO: 371542 - DNA, 15 bp, Homo sapiens
ggcaactcctagtca

SEQ ID NO: 371543 - DNA, 15 bp, Homo sapiens
aggcaactcctagtc

SEQ ID NO: 371544 - DNA, 15 bp, Homo sapiens
gaggcaactcctagt

SEQ ID NO: 371545 - DNA, 15 bp, Homo sapiens
agaggcaactcctag

SEQ ID NO: 371546 - DNA, 15 bp, Homo sapiens
tagaggcaactccta

SEQ ID NO: 371547 - DNA, 15 bp, Homo sapiens
gtagaggcaactcct

SEQ ID NO: 371548 - DNA, 15 bp, Homo sapiens
ggtagaggcaactcc

SEQ ID NO: 371549 - DNA, 15 bp, Homo sapiens
aggtagaggcaactc

SEQ ID NO: 371550 - DNA, 15 bp, Homo sapiens
caggtagaggcaact

SEQ ID NO: 371551 - DNA, 15 bp, Homo sapiens
ccaggtagaggcaac

SEQ ID NO: 371552 - DNA, 15 bp, Homo sapiens
tccaggtagaggcaa

SEQ ID NO: 371553 - DNA, 15 bp, Homo sapiens
ctccaggtagaggca

SEQ ID NO: 371554 - DNA, 15 bp, Homo sapiens
cctccaggtagaggc

SEQ ID NO: 371555 - DNA, 15 bp, Homo sapiens
gcctccaggtagagg

SEQ ID NO: 371556 - DNA, 15 bp, Homo sapiens
tgcctccaggtagag

SEQ ID NO: 371557 - DNA, 15 bp, Homo sapiens
ctgcctccaggtaga

SEQ ID NO: 371558 - DNA, 15 bp, Homo sapiens
cctgcctccaggtag

SEQ ID NO: 371559 - DNA, 15 bp, Homo sapiens
gcctgcctccaggta

SEQ ID NO: 371560 - DNA, 15 bp, Homo sapiens
tgcctgcctccaggt

SEQ ID NO: 371561 - DNA, 15 bp, Homo sapiens
ctgcctgcctccagg

SEQ ID NO: 371562 - DNA, 15 bp, Homo sapiens
cctgcctgcctccag

SEQ ID NO: 371563 - DNA, 15 bp, Homo sapiens
ccctgcctgcctcca

SEQ ID NO: 371564 - DNA, 15 bp, Homo sapiens
cccctgcctgcctcc

SEQ ID NO: 371565 - DNA, 15 bp, Homo sapiens
gcccctgcctgcctc

SEQ ID NO: 371566 - DNA, 15 bp, Homo sapiens
tgcccctgcctgcct

SEQ ID NO: 371567 - DNA, 15 bp, Homo sapiens
ctgcccctgcctgcc

SEQ ID NO: 371568 - DNA, 15 bp, Homo sapiens
gctgcccctgcctgc

SEQ ID NO: 371569 - DNA, 15 bp, Homo sapiens
agctgcccctgcctg

SEQ ID NO: 371570 - DNA, 15 bp, Homo sapiens
aagctgcccctgcct

SEQ ID NO: 371571 - DNA, 15 bp, Homo sapiens
gaagctgcccctgcc

SEQ ID NO: 371572 - DNA, 15 bp, Homo sapiens
agaagctgcccctgc

SEQ ID NO: 371573 - DNA, 15 bp, Homo sapiens
cagaagctgcccctg

SEQ ID NO: 371574 - DNA, 15 bp, Homo sapiens
acagaagctgcccct

SEQ ID NO: 371575 - DNA, 15 bp, Homo sapiens
tacagaagctgcccc

SEQ ID NO: 371576 - DNA, 15 bp, Homo sapiens
ctacagaagctgccc

SEQ ID NO: 371577 - DNA, 15 bp, Homo sapiens
cctacagaagctgcc

SEQ ID NO: 371578 - DNA, 15 bp, Homo sapiens
tcctacagaagctgc

SEQ ID NO: 371579 - DNA, 15 bp, Homo sapiens
gtcctacagaagctg

SEQ ID NO: 371580 - DNA, 15 bp, Homo sapiens
tgtcctacagaagct

SEQ ID NO: 371581 - DNA, 15 bp, Homo sapiens
ctgtcctacagaagc

SEQ ID NO: 371582 - DNA, 15 bp, Homo sapiens
tctgtcctacagaag

SEQ ID NO: 371583 - DNA, 15 bp, Homo sapiens
ctctgtcctacagaa

SEQ ID NO: 371584 - DNA, 15 bp, Homo sapiens
cctctgtcctacaga

SEQ ID NO: 371585 - DNA, 15 bp, Homo sapiens
tcctctgtcctacag

SEQ ID NO: 371586 - DNA, 15 bp, Homo sapiens
ctcctctgtcctaca

SEQ ID NO: 371587 - DNA, 15 bp, Homo sapiens
gctcctctgtcctac

SEQ ID NO: 371588 - DNA, 15 bp, Homo sapiens
ggctcctctgtccta

SEQ ID NO: 371589 - DNA, 15 bp, Homo sapiens
aggctcctctgtcct

SEQ ID NO: 371590 - DNA, 15 bp, Homo sapiens
caggctcctctgtcc

SEQ ID NO: 371591 - DNA, 15 bp, Homo sapiens
ccaggctcctctgtc

SEQ ID NO: 371592 - DNA, 15 bp, Homo sapiens
accaggctcctctgt

SEQ ID NO: 371593 - DNA, 15 bp, Homo sapiens
gaccaggctcctctg

SEQ ID NO: 371594 - DNA, 15 bp, Homo sapiens
ggaccaggctcctct

SEQ ID NO: 371595 - DNA, 15 bp, Homo sapiens
gggaccaggctcctc

SEQ ID NO: 371596 - DNA, 15 bp, Homo sapiens
agggaccaggctcct

SEQ ID NO: 371597 - DNA, 15 bp, Homo sapiens
gagggaccaggctcc

SEQ ID NO: 371598 - DNA, 15 bp, Homo sapiens
ggagggaccaggctc

SEQ ID NO: 371599 - DNA, 15 bp, Homo sapiens
tggagggaccaggct

SEQ ID NO: 371600 - DNA, 15 bp, Homo sapiens
atggagggaccaggc

SEQ ID NO: 371601 - DNA, 15 bp, Homo sapiens
catggagggaccagg

SEQ ID NO: 371602 - DNA, 15 bp, Homo sapiens
tcatggagggaccag

SEQ ID NO: 371603 - DNA, 15 bp, Homo sapiens
ttcatggagggacca

SEQ ID NO: 371604 - DNA, 15 bp, Homo sapiens
cttcatggagggacc

SEQ ID NO: 371605 - DNA, 15 bp, Homo sapiens
gcttcatggagggac

SEQ ID NO: 371606 - DNA, 15 bp, Homo sapiens
ggcttcatggaggga

SEQ ID NO: 371607 - DNA, 15 bp, Homo sapiens
tggcttcatggaggg

SEQ ID NO: 371608 - DNA, 15 bp, Homo sapiens
ctggcttcatggagg

SEQ ID NO: 371609 - DNA, 15 bp, Homo sapiens
cctggcttcatggag

SEQ ID NO: 371610 - DNA, 15 bp, Homo sapiens
gcctggcttcatgga

SEQ ID NO: 371611 - DNA, 15 bp, Homo sapiens
ggcctggcttcatgg

SEQ ID NO: 371612 - DNA, 15 bp, Homo sapiens
tggcctggcttcatg

SEQ ID NO: 371613 - DNA, 15 bp, Homo sapiens
atggcctggcttcat

SEQ ID NO: 371614 - DNA, 15 bp, Homo sapiens
tatggcctggcttca

SEQ ID NO: 371615 - DNA, 15 bp, Homo sapiens
ctatggcctggcttc

SEQ ID NO: 371616 - DNA, 15 bp, Homo sapiens
cctatggcctggctt

SEQ ID NO: 371617 - DNA, 15 bp, Homo sapiens
acctatggcctggct

SEQ ID NO: 371618 - DNA, 15 bp, Homo sapiens
cacctatggcctggc

SEQ ID NO: 371619 - DNA, 15 bp, Homo sapiens
ccacctatggcctgg

SEQ ID NO: 371620 - DNA, 15 bp, Homo sapiens
cccacctatggcctg

SEQ ID NO: 371621 - DNA, 15 bp, Homo sapiens
ccccacctatggcct

SEQ ID NO: 371622 - DNA, 15 bp, Homo sapiens
cccccacctatggcc

SEQ ID NO: 371623 - DNA, 15 bp, Homo sapiens
tcccccacctatggc

SEQ ID NO: 371624 - DNA, 15 bp, Homo sapiens
ctcccccacctatgg

SEQ ID NO: 371625 - DNA, 15 bp, Homo sapiens
cctcccccacctatg

SEQ ID NO: 371626 - DNA, 15 bp, Homo sapiens
acctcccccacctat

SEQ ID NO: 371627 - DNA, 15 bp, Homo sapiens
cacctcccccaccta

SEQ ID NO: 371628 - DNA, 15 bp, Homo sapiens
gcacctcccccacct

SEQ ID NO: 371629 - DNA, 15 bp, Homo sapiens
tgcacctcccccacc

SEQ ID NO: 371630 - DNA, 15 bp, Homo sapiens
ctgcacctcccccac

SEQ ID NO: 371631 - DNA, 15 bp, Homo sapiens
cctgcacctccccca

SEQ ID NO: 371632 - DNA, 15 bp, Homo sapiens
ccctgcacctccccc

SEQ ID NO: 371633 - DNA, 15 bp, Homo sapiens
accctgcacctcccc

SEQ ID NO: 371634 - DNA, 15 bp, Homo sapiens
caccctgcacctccc

SEQ ID NO: 371635 - DNA, 15 bp, Homo sapiens
ccaccctgcacctcc

SEQ ID NO: 371636 - DNA, 15 bp, Homo sapiens
cccaccctgcacctc

SEQ ID NO: 371637 - DNA, 15 bp, Homo sapiens
gcccaccctgcacct

SEQ ID NO: 371638 - DNA, 15 bp, Homo sapiens
ggcccaccctgcacc

SEQ ID NO: 371639 - DNA, 15 bp, Homo sapiens
gggcccaccctgcac

SEQ ID NO: 371640 - DNA, 15 bp, Homo sapiens
ggggcccaccctgca

SEQ ID NO: 371641 - DNA, 15 bp, Homo sapiens
gggggcccaccctgc

SEQ ID NO: 371642 - DNA, 15 bp, Homo sapiens
agggggcccaccctg

SEQ ID NO: 371643 - DNA, 15 bp, Homo sapiens
cagggggcccaccct

SEQ ID NO: 371644 - DNA, 15 bp, Homo sapiens
ccagggggcccaccc

SEQ ID NO: 371645 - DNA, 15 bp, Homo sapiens
cccagggggcccacc

SEQ ID NO: 371646 - DNA, 15 bp, Homo sapiens
tcccagggggcccac

SEQ ID NO: 371647 - DNA, 15 bp, Homo sapiens
atcccagggggccca

SEQ ID NO: 371648 - DNA, 15 bp, Homo sapiens
catcccagggggccc

SEQ ID NO: 371649 - DNA, 15 bp, Homo sapiens
ccatcccagggggcc

SEQ ID NO: 371650 - DNA, 15 bp, Homo sapiens
cccatcccagggggc

SEQ ID NO: 371651 - DNA, 15 bp, Homo sapiens
gcccatcccaggggg

SEQ ID NO: 371652 - DNA, 15 bp, Homo sapiens
ggcccatcccagggg

SEQ ID NO: 371653 - DNA, 15 bp, Homo sapiens
aggcccatcccaggg

SEQ ID NO: 371654 - DNA, 15 bp, Homo sapiens
taggcccatcccagg

SEQ ID NO: 371655 - DNA, 15 bp, Homo sapiens
ctaggcccatcccag

SEQ ID NO: 371656 - DNA, 15 bp, Homo sapiens
gctaggcccatccca

SEQ ID NO: 371657 - DNA, 15 bp, Homo sapiens
agctaggcccatccc

SEQ ID NO: 371658 - DNA, 15 bp, Homo sapiens
gagctaggcccatcc

SEQ ID NO: 371659 - DNA, 15 bp, Homo sapiens
agagctaggcccatc

SEQ ID NO: 371660 - DNA, 15 bp, Homo sapiens
aagagctaggcccat

SEQ ID NO: 371661 - DNA, 15 bp, Homo sapiens
caagagctaggccca

SEQ ID NO: 371662 - DNA, 15 bp, Homo sapiens
tcaagagctaggccc

SEQ ID NO: 371663 - DNA, 15 bp, Homo sapiens
ctcaagagctaggcc

SEQ ID NO: 371664 - DNA, 15 bp, Homo sapiens
actcaagagctaggc

SEQ ID NO: 371665 - DNA, 15 bp, Homo sapiens
gactcaagagctagg

SEQ ID NO: 371666 - DNA, 15 bp, Homo sapiens
tgactcaagagctag

SEQ ID NO: 371667 - DNA, 15 bp, Homo sapiens
atgactcaagagcta

SEQ ID NO: 371668 - DNA, 15 bp, Homo sapiens
gatgactcaagagct

SEQ ID NO: 371669 - DNA, 15 bp, Homo sapiens
ggatgactcaagagc

SEQ ID NO: 371670 - DNA, 15 bp, Homo sapiens
tggatgactcaagag

SEQ ID NO: 371671 - DNA, 15 bp, Homo sapiens
gtggatgactcaaga

SEQ ID NO: 371672 - DNA, 15 bp, Homo sapiens
agtggatgactcaag

SEQ ID NO: 371673 - DNA, 15 bp, Homo sapiens
aagtggatgactcaa

SEQ ID NO: 371674 - DNA, 15 bp, Homo sapiens
gaagtggatgactca

SEQ ID NO: 371675 - DNA, 15 bp, Homo sapiens
agaagtggatgactc

SEQ ID NO: 371676 - DNA, 15 bp, Homo sapiens
tagaagtggatgact

SEQ ID NO: 371677 - DNA, 15 bp, Homo sapiens
gtagaagtggatgac

SEQ ID NO: 371678 - DNA, 15 bp, Homo sapiens
agtagaagtggatga

SEQ ID NO: 371679 - DNA, 15 bp, Homo sapiens
aagtagaagtggatg

SEQ ID NO: 371680 - DNA, 15 bp, Homo sapiens
gaagtagaagtggat

SEQ ID NO: 371681 - DNA, 15 bp, Homo sapiens
agaagtagaagtgga

SEQ ID NO: 371682 - DNA, 15 bp, Homo sapiens
cagaagtagaagtgg

SEQ ID NO: 371683 - DNA, 15 bp, Homo sapiens
gcagaagtagaagtg

SEQ ID NO: 371684 - DNA, 15 bp, Homo sapiens
agcagaagtagaagt

SEQ ID NO: 371685 - DNA, 15 bp, Homo sapiens
aagcagaagtagaag

SEQ ID NO: 371686 - DNA, 15 bp, Homo sapiens
aaagcagaagtagaa

SEQ ID NO: 371687 - DNA, 15 bp, Homo sapiens
caaagcagaagtaga

SEQ ID NO: 371688 - DNA, 15 bp, Homo sapiens
ccaaagcagaagtag

SEQ ID NO: 371689 - DNA, 15 bp, Homo sapiens
accaaagcagaagta

SEQ ID NO: 371690 - DNA, 15 bp, Homo sapiens
aaccaaagcagaagt

SEQ ID NO: 371691 - DNA, 15 bp, Homo sapiens
caaccaaagcagaag

SEQ ID NO: 371692 - DNA, 15 bp, Homo sapiens
acaaccaaagcagaa

SEQ ID NO: 371693 - DNA, 15 bp, Homo sapiens
cacaaccaaagcaga

SEQ ID NO: 371694 - DNA, 15 bp, Homo sapiens
acacaaccaaagcag

SEQ ID NO: 371695 - DNA, 15 bp, Homo sapiens
cacacaaccaaagca

SEQ ID NO: 371696 - DNA, 15 bp, Homo sapiens
ccacacaaccaaagc

SEQ ID NO: 371697 - DNA, 15 bp, Homo sapiens
accacacaaccaaag

SEQ ID NO: 371698 - DNA, 15 bp, Homo sapiens
gaccacacaaccaaa

SEQ ID NO: 371699 - DNA, 15 bp, Homo sapiens
agaccacacaaccaa

SEQ ID NO: 371700 - DNA, 15 bp, Homo sapiens
cagaccacacaacca

SEQ ID NO: 371701 - DNA, 15 bp, Homo sapiens
acagaccacacaacc

SEQ ID NO: 371702 - DNA, 15 bp, Homo sapiens
aacagaccacacaac

SEQ ID NO: 371703 - DNA, 15 bp, Homo sapiens
caacagaccacacaa

SEQ ID NO: 371704 - DNA, 15 bp, Homo sapiens
tcaacagaccacaca

SEQ ID NO: 371705 - DNA, 15 bp, Homo sapiens
ctcaacagaccacac

SEQ ID NO: 371706 - DNA, 15 bp, Homo sapiens
tctcaacagaccaca

SEQ ID NO: 371707 - DNA, 15 bp, Homo sapiens
ttctcaacagaccac

SEQ ID NO: 371708 - DNA, 15 bp, Homo sapiens
attctcaacagacca

SEQ ID NO: 371709 - DNA, 15 bp, Homo sapiens
aattctcaacagacc

SEQ ID NO: 371710 - DNA, 15 bp, Homo sapiens
caattctcaacagac

SEQ ID NO: 371711 - DNA, 15 bp, Homo sapiens
tcaattctcaacaga

SEQ ID NO: 371712 - DNA, 15 bp, Homo sapiens
ctcaattctcaacag

SEQ ID NO: 371713 - DNA, 15 bp, Homo sapiens
tctcaattctcaaca

SEQ ID NO: 371714 - DNA, 15 bp, Homo sapiens
atctcaattctcaac

SEQ ID NO: 371715 - DNA, 15 bp, Homo sapiens
tatctcaattctcaa

SEQ ID NO: 371716 - DNA, 15 bp, Homo sapiens
ttatctcaattctca

SEQ ID NO: 371717 - DNA, 15 bp, Homo sapiens
tttatctcaattctc

SEQ ID NO: 371718 - DNA, 15 bp, Homo sapiens
ctttatctcaattct

SEQ ID NO: 371719 - DNA, 15 bp, Homo sapiens
gctttatctcaattc

SEQ ID NO: 371720 - DNA, 15 bp, Homo sapiens
tgctttatctcaatt

SEQ ID NO: 371721 - DNA, 15 bp, Homo sapiens
ttgctttatctcaat

SEQ ID NO: 371722 - DNA, 15 bp, Homo sapiens
tttgctttatctcaa

SEQ ID NO: 371723 - DNA, 15 bp, Homo sapiens
ctttgctttatctca

SEQ ID NO: 371724 - DNA, 15 bp, Homo sapiens
gctttgctttatctc

SEQ ID NO: 371725 - DNA, 15 bp, Homo sapiens
agctttgctttatct

SEQ ID NO: 371726 - DNA, 15 bp, Homo sapiens
aagctttgctttatc

SEQ ID NO: 371727 - DNA, 15 bp, Homo sapiens
caagctttgctttat

SEQ ID NO: 371728 - DNA, 15 bp, Homo sapiens
acaagctttgcttta

SEQ ID NO: 371729 - DNA, 15 bp, Homo sapiens
cacaagctttgcttt

SEQ ID NO: 371730 - DNA, 15 bp, Homo sapiens
ccacaagctttgctt

SEQ ID NO: 371731 - DNA, 15 bp, Homo sapiens
tccacaagctttgct

SEQ ID NO: 371732 - DNA, 15 bp, Homo sapiens
atccacaagctttgc

SEQ ID NO: 371733 - DNA, 15 bp, Homo sapiens
tatccacaagctttg

SEQ ID NO: 371734 - DNA, 15 bp, Homo sapiens
ttatccacaagcttt

SEQ ID NO: 371735 - DNA, 15 bp, Homo sapiens
tttatccacaagctt

SEQ ID NO: 371736 - DNA, 15 bp, Homo sapiens
gtttatccacaagct

SEQ ID NO: 371737 - DNA, 15 bp, Homo sapiens
tgtttatccacaagc

SEQ ID NO: 371738 - DNA, 15 bp, Homo sapiens
ctgtttatccacaag

SEQ ID NO: 371739 - DNA, 15 bp, Homo sapiens
tctgtttatccacaa

SEQ ID NO: 371740 - DNA, 15 bp, Homo sapiens
ctctgtttatccaca

SEQ ID NO: 371741 - DNA, 15 bp, Homo sapiens
cctctgtttatccac

SEQ ID NO: 371742 - DNA, 15 bp, Homo sapiens
acctctgtttatcca

SEQ ID NO: 371743 - DNA, 15 bp, Homo sapiens
tacctctgtttatcc

SEQ ID NO: 371744 - DNA, 15 bp, Homo sapiens
ctacctctgtttatc

SEQ ID NO: 371745 - DNA, 15 bp, Homo sapiens
cctacctctgtttat

SEQ ID NO: 371746 - DNA, 15 bp, Homo sapiens
acctacctctgttta

SEQ ID NO: 371747 - DNA, 15 bp, Homo sapiens
gacctacctctgttt

SEQ ID NO: 371748 - DNA, 15 bp, Homo sapiens
agacctacctctgtt

SEQ ID NO: 371749 - DNA, 15 bp, Homo sapiens
gagacctacctctgt

SEQ ID NO: 371750 - DNA, 15 bp, Homo sapiens
ggagacctacctctg

SEQ ID NO: 371751 - DNA, 15 bp, Homo sapiens
gggagacctacctct

SEQ ID NO: 371752 - DNA, 15 bp, Homo sapiens
cgggagacctacctc

SEQ ID NO: 371753 - DNA, 15 bp, Homo sapiens
ccgggagacctacct

SEQ ID NO: 371754 - DNA, 15 bp, Homo sapiens
cccgggagacctacc

SEQ ID NO: 371755 - DNA, 15 bp, Homo sapiens
acccgggagacctac

SEQ ID NO: 371756 - DNA, 15 bp, Homo sapiens
aacccgggagaccta

SEQ ID NO: 371757 - DNA, 15 bp, Homo sapiens
aaacccgggagacct

SEQ ID NO: 371758 - DNA, 15 bp, Homo sapiens
aaaacccgggagacc

SEQ ID NO: 371759 - DNA, 15 bp, Homo sapiens
caaaacccgggagac

SEQ ID NO: 371760 - DNA, 15 bp, Homo sapiens
ccaaaacccgggaga

SEQ ID NO: 371761 - DNA, 15 bp, Homo sapiens
accaaaacccgggag

SEQ ID NO: 371762 - DNA, 15 bp, Homo sapiens
aaccaaaacccggga

SEQ ID NO: 371763 - DNA, 15 bp, Homo sapiens
gaaccaaaacccggg

SEQ ID NO: 371764 - DNA, 15 bp, Homo sapiens
ggaaccaaaacccgg

SEQ ID NO: 371765 - DNA, 15 bp, Homo sapiens
tggaaccaaaacccg

SEQ ID NO: 371766 - DNA, 15 bp, Homo sapiens
ctggaaccaaaaccc

SEQ ID NO: 371767 - DNA, 15 bp, Homo sapiens
gctggaaccaaaacc

SEQ ID NO: 371768 - DNA, 15 bp, Homo sapiens
ggctggaaccaaaac

SEQ ID NO: 371769 - DNA, 15 bp, Homo sapiens
gggctggaaccaaaa

SEQ ID NO: 371770 - DNA, 15 bp, Homo sapiens
cgggctggaaccaaa

SEQ ID NO: 371771 - DNA, 15 bp, Homo sapiens
gcgggctggaaccaa

SEQ ID NO: 371772 - DNA, 15 bp, Homo sapiens
ggcgggctggaacca

SEQ ID NO: 371773 - DNA, 15 bp, Homo sapiens
aggcgggctggaacc

SEQ ID NO: 371774 - DNA, 15 bp, Homo sapiens
gaggcgggctggaac

SEQ ID NO: 371775 - DNA, 15 bp, Homo sapiens
ggaggcgggctggaa

SEQ ID NO: 371776 - DNA, 15 bp, Homo sapiens
gggaggcgggctgga

SEQ ID NO: 371777 - DNA, 15 bp, Homo sapiens
ggggaggcgggctgg

SEQ ID NO: 371778 - DNA, 15 bp, Homo sapiens
tggggaggcgggctg

SEQ ID NO: 371779 - DNA, 15 bp, Homo sapiens
gtggggaggcgggct

SEQ ID NO: 371780 - DNA, 15 bp, Homo sapiens
ggtggggaggcgggc

SEQ ID NO: 371781 - DNA, 15 bp, Homo sapiens
gggtggggaggcggg

SEQ ID NO: 371782 - DNA, 15 bp, Homo sapiens
ggggtggggaggcgg

SEQ ID NO: 371783 - DNA, 15 bp, Homo sapiens
cggggtggggaggcg

SEQ ID NO: 371784 - DNA, 15 bp, Homo sapiens
gcggggtggggaggc

SEQ ID NO: 371785 - DNA, 15 bp, Homo sapiens
agcggggtggggagg

SEQ ID NO: 371786 - DNA, 15 bp, Homo sapiens
aagcggggtggggag

SEQ ID NO: 371787 - DNA, 15 bp, Homo sapiens
gaagcggggtgggga

SEQ ID NO: 371788 - DNA, 15 bp, Homo sapiens
agaagcggggtgggg

SEQ ID NO: 371789 - DNA, 15 bp, Homo sapiens
aagaagcggggtggg

SEQ ID NO: 371790 - DNA, 15 bp, Homo sapiens
caagaagcggggtgg

SEQ ID NO: 371791 - DNA, 15 bp, Homo sapiens
gcaagaagcggggtg

SEQ ID NO: 371792 - DNA, 15 bp, Homo sapiens
agcaagaagcggggt

SEQ ID NO: 371793 - DNA, 15 bp, Homo sapiens
cagcaagaagcgggg

SEQ ID NO: 371794 - DNA, 15 bp, Homo sapiens
tcagcaagaagcggg

SEQ ID NO: 371795 - DNA, 15 bp, Homo sapiens
atcagcaagaagcgg

SEQ ID NO: 371796 - DNA, 15 bp, Homo sapiens
aatcagcaagaagcg

SEQ ID NO: 371797 - DNA, 15 bp, Homo sapiens
caatcagcaagaagc

SEQ ID NO: 371798 - DNA, 15 bp, Homo sapiens
acaatcagcaagaag

SEQ ID NO: 371799 - DNA, 15 bp, Homo sapiens
tacaatcagcaagaa

SEQ ID NO: 371800 - DNA, 15 bp, Homo sapiens
ttacaatcagcaaga

SEQ ID NO: 371801 - DNA, 15 bp, Homo sapiens
cttacaatcagcaag

SEQ ID NO: 371802 - DNA, 15 bp, Homo sapiens
tcttacaatcagcaa

SEQ ID NO: 371803 - DNA, 15 bp, Homo sapiens
atcttacaatcagca

SEQ ID NO: 371804 - DNA, 15 bp, Homo sapiens
catcttacaatcagc

SEQ ID NO: 371805 - DNA, 15 bp, Homo sapiens
tcatcttacaatcag

SEQ ID NO: 371806 - DNA, 15 bp, Homo sapiens
gtcatcttacaatca

SEQ ID NO: 371807 - DNA, 15 bp, Homo sapiens
tgtcatcttacaatc

SEQ ID NO: 371808 - DNA, 15 bp, Homo sapiens
ctgtcatcttacaat

SEQ ID NO: 371809 - DNA, 15 bp, Homo sapiens
gctgtcatcttacaa

SEQ ID NO: 371810 - DNA, 15 bp, Homo sapiens
tgctgtcatcttaca

SEQ ID NO: 371811 - DNA, 15 bp, Homo sapiens
ctgctgtcatcttac

SEQ ID NO: 371812 - DNA, 15 bp, Homo sapiens
cctgctgtcatctta

SEQ ID NO: 371813 - DNA, 15 bp, Homo sapiens
tcctgctgtcatctt

SEQ ID NO: 371814 - DNA, 15 bp, Homo sapiens
ttcctgctgtcatct

SEQ ID NO: 371815 - DNA, 15 bp, Homo sapiens
cttcctgctgtcatc

SEQ ID NO: 371816 - DNA, 15 bp, Homo sapiens
tcttcctgctgtcat

SEQ ID NO: 371817 - DNA, 15 bp, Homo sapiens
ttcttcctgctgtca

SEQ ID NO: 371818 - DNA, 15 bp, Homo sapiens
gttcttcctgctgtc

SEQ ID NO: 371819 - DNA, 15 bp, Homo sapiens
tgttcttcctgctgt

SEQ ID NO: 371820 - DNA, 15 bp, Homo sapiens
ctgttcttcctgctg

SEQ ID NO: 371821 - DNA, 15 bp, Homo sapiens
cctgttcttcctgct

SEQ ID NO: 371822 - DNA, 15 bp, Homo sapiens
tcctgttcttcctgc

SEQ ID NO: 371823 - DNA, 15 bp, Homo sapiens
ctcctgttcttcctg

SEQ ID NO: 371824 - DNA, 15 bp, Homo sapiens
gctcctgttcttcct

SEQ ID NO: 371825 - DNA, 15 bp, Homo sapiens
agctcctgttcttcc

SEQ ID NO: 371826 - DNA, 15 bp, Homo sapiens
cagctcctgttcttc

SEQ ID NO: 371827 - DNA, 15 bp, Homo sapiens
acagctcctgttctt

SEQ ID NO: 371828 - DNA, 15 bp, Homo sapiens
cacagctcctgttct

SEQ ID NO: 371829 - DNA, 15 bp, Homo sapiens
ccacagctcctgttc

SEQ ID NO: 371830 - DNA, 15 bp, Homo sapiens
accacagctcctgtt

SEQ ID NO: 371831 - DNA, 15 bp, Homo sapiens
aaccacagctcctgt

SEQ ID NO: 371832 - DNA, 15 bp, Homo sapiens
taaccacagctcctg

SEQ ID NO: 371833 - DNA, 15 bp, Homo sapiens
ataaccacagctcct

SEQ ID NO: 371834 - DNA, 15 bp, Homo sapiens
tataaccacagctcc

SEQ ID NO: 371835 - DNA, 15 bp, Homo sapiens
ttataaccacagctc

SEQ ID NO: 371836 - DNA, 15 bp, Homo sapiens
attataaccacagct

SEQ ID NO: 371837 - DNA, 15 bp, Homo sapiens
gattataaccacagc

SEQ ID NO: 371838 - DNA, 15 bp, Homo sapiens
ggattataaccacag

SEQ ID NO: 371839 - DNA, 15 bp, Homo sapiens
tggattataaccaca

SEQ ID NO: 371840 - DNA, 15 bp, Homo sapiens
gtggattataaccac

SEQ ID NO: 371841 - DNA, 15 bp, Homo sapiens
ggtggattataacca

SEQ ID NO: 371842 - DNA, 15 bp, Homo sapiens
gggtggattataacc

SEQ ID NO: 371843 - DNA, 15 bp, Homo sapiens
agggtggattataac

SEQ ID NO: 371844 - DNA, 15 bp, Homo sapiens
gagggtggattataa

SEQ ID NO: 371845 - DNA, 15 bp, Homo sapiens
ggagggtggattata

SEQ ID NO: 371846 - DNA, 15 bp, Homo sapiens
tggagggtggattat

SEQ ID NO: 371847 - DNA, 15 bp, Homo sapiens
ctggagggtggatta

SEQ ID NO: 371848 - DNA, 15 bp, Homo sapiens
tctggagggtggatt

SEQ ID NO: 371849 - DNA, 15 bp, Homo sapiens
gtctggagggtggat

SEQ ID NO: 371850 - DNA, 15 bp, Homo sapiens
ggtctggagggtgga

SEQ ID NO: 371851 - DNA, 15 bp, Homo sapiens
gggtctggagggtgg

SEQ ID NO: 371852 - DNA, 15 bp, Homo sapiens
agggtctggagggtg

SEQ ID NO: 371853 - DNA, 15 bp, Homo sapiens
cagggtctggagggt

SEQ ID NO: 371854 - DNA, 15 bp, Homo sapiens
ccagggtctggaggg

SEQ ID NO: 371855 - DNA, 15 bp, Homo sapiens
accagggtctggagg

SEQ ID NO: 371856 - DNA, 15 bp, Homo sapiens
taccagggtctggag

SEQ ID NO: 371857 - DNA, 15 bp, Homo sapiens
ctaccagggtctgga

SEQ ID NO: 371858 - DNA, 15 bp, Homo sapiens
actaccagggtctgg

SEQ ID NO: 371859 - DNA, 15 bp, Homo sapiens
tactaccagggtctg

SEQ ID NO: 371860 - DNA, 15 bp, Homo sapiens
gtactaccagggtct

SEQ ID NO: 371861 - DNA, 15 bp, Homo sapiens
ggtactaccagggtc

SEQ ID NO: 371862 - DNA, 15 bp, Homo sapiens
aggtactaccagggt

SEQ ID NO: 371863 - DNA, 15 bp, Homo sapiens
caggtactaccaggg

SEQ ID NO: 371864 - DNA, 15 bp, Homo sapiens
ccaggtactaccagg

SEQ ID NO: 371865 - DNA, 15 bp, Homo sapiens
cccaggtactaccag

SEQ ID NO: 371866 - DNA, 15 bp, Homo sapiens
ccccaggtactacca

SEQ ID NO: 371867 - DNA, 15 bp, Homo sapiens
gccccaggtactacc

SEQ ID NO: 371868 - DNA, 15 bp, Homo sapiens
tgccccaggtactac

SEQ ID NO: 371869 - DNA, 15 bp, Homo sapiens
gtgccccaggtacta

SEQ ID NO: 371870 - DNA, 15 bp, Homo sapiens
tgtgccccaggtact

SEQ ID NO: 371871 - DNA, 15 bp, Homo sapiens
ctgtgccccaggtac

SEQ ID NO: 371872 - DNA, 15 bp, Homo sapiens
gctgtgccccaggta

SEQ ID NO: 371873 - DNA, 15 bp, Homo sapiens
tgctgtgccccaggt

SEQ ID NO: 371874 - DNA, 15 bp, Homo sapiens
gtgctgtgccccagg

SEQ ID NO: 371875 - DNA, 15 bp, Homo sapiens
tgtgctgtgccccag

SEQ ID NO: 371876 - DNA, 15 bp, Homo sapiens
ctgtgctgtgcccca

SEQ ID NO: 371877 - DNA, 15 bp, Homo sapiens
tctgtgctgtgcccc

SEQ ID NO: 371878 - DNA, 15 bp, Homo sapiens
ctctgtgctgtgccc

SEQ ID NO: 371879 - DNA, 15 bp, Homo sapiens
actctgtgctgtgcc

SEQ ID NO: 371880 - DNA, 15 bp, Homo sapiens
cactctgtgctgtgc

SEQ ID NO: 371881 - DNA, 15 bp, Homo sapiens
ccactctgtgctgtg

SEQ ID NO: 371882 - DNA, 15 bp, Homo sapiens
tccactctgtgctgt

SEQ ID NO: 371883 - DNA, 15 bp, Homo sapiens
ttccactctgtgctg

SEQ ID NO: 371884 - DNA, 15 bp, Homo sapiens
cttccactctgtgct

SEQ ID NO: 371885 - DNA, 15 bp, Homo sapiens
acttccactctgtgc

SEQ ID NO: 371886 - DNA, 15 bp, Homo sapiens
cacttccactctgtg

SEQ ID NO: 371887 - DNA, 15 bp, Homo sapiens
tcacttccactctgt

SEQ ID NO: 371888 - DNA, 15 bp, Homo sapiens
gtcacttccactctg

SEQ ID NO: 371889 - DNA, 15 bp, Homo sapiens
ggtcacttccactct

SEQ ID NO: 371890 - DNA, 15 bp, Homo sapiens
tggtcacttccactc

SEQ ID NO: 371891 - DNA, 15 bp, Homo sapiens
ctggtcacttccact

SEQ ID NO: 371892 - DNA, 15 bp, Homo sapiens
gctggtcacttccac

SEQ ID NO: 371893 - DNA, 15 bp, Homo sapiens
ggctggtcacttcca

SEQ ID NO: 371894 - DNA, 15 bp, Homo sapiens
aggctggtcacttcc

SEQ ID NO: 371895 - DNA, 15 bp, Homo sapiens
taggctggtcacttc

SEQ ID NO: 371896 - DNA, 15 bp, Homo sapiens
ctaggctggtcactt

SEQ ID NO: 371897 - DNA, 15 bp, Homo sapiens
gctaggctggtcact

SEQ ID NO: 371898 - DNA, 15 bp, Homo sapiens
cgctaggctggtcac

SEQ ID NO: 371899 - DNA, 15 bp, Homo sapiens
gcgctaggctggtca

SEQ ID NO: 371900 - DNA, 15 bp, Homo sapiens
ggcgctaggctggtc

SEQ ID NO: 371901 - DNA, 15 bp, Homo sapiens
tggcgctaggctggt

SEQ ID NO: 371902 - DNA, 15 bp, Homo sapiens
ctggcgctaggctgg

SEQ ID NO: 371903 - DNA, 15 bp, Homo sapiens
cctggcgctaggctg

SEQ ID NO: 371904 - DNA, 15 bp, Homo sapiens
gcctggcgctaggct

SEQ ID NO: 371905 - DNA, 15 bp, Homo sapiens
agcctggcgctaggc

SEQ ID NO: 371906 - DNA, 15 bp, Homo sapiens
gagcctggcgctagg

SEQ ID NO: 371907 - DNA, 15 bp, Homo sapiens
ggagcctggcgctag

SEQ ID NO: 371908 - DNA, 15 bp, Homo sapiens
aggagcctggcgcta

SEQ ID NO: 371909 - DNA, 15 bp, Homo sapiens
gaggagcctggcgct

SEQ ID NO: 371910 - DNA, 15 bp, Homo sapiens
tgaggagcctggcgc

SEQ ID NO: 371911 - DNA, 15 bp, Homo sapiens
ctgaggagcctggcg

SEQ ID NO: 371912 - DNA, 15 bp, Homo sapiens
actgaggagcctggc

SEQ ID NO: 371913 - DNA, 15 bp, Homo sapiens
cactgaggagcctgg

SEQ ID NO: 371914 - DNA, 15 bp, Homo sapiens
ccactgaggagcctg

SEQ ID NO: 371915 - DNA, 15 bp, Homo sapiens
tccactgaggagcct

SEQ ID NO: 371916 - DNA, 15 bp, Homo sapiens
gtccactgaggagcc

SEQ ID NO: 371917 - DNA, 15 bp, Homo sapiens
ggtccactgaggagc

SEQ ID NO: 371918 - DNA, 15 bp, Homo sapiens
tggtccactgaggag

SEQ ID NO: 371919 - DNA, 15 bp, Homo sapiens
gtggtccactgagga

SEQ ID NO: 371920 - DNA, 15 bp, Homo sapiens
cgtggtccactgagg

SEQ ID NO: 371921 - DNA, 15 bp, Homo sapiens
ccgtggtccactgag

SEQ ID NO: 371922 - DNA, 15 bp, Homo sapiens
gccgtggtccactga

SEQ ID NO: 371923 - DNA, 15 bp, Homo sapiens
ggccgtggtccactg

SEQ ID NO: 371924 - DNA, 15 bp, Homo sapiens
tggccgtggtccact

SEQ ID NO: 371925 - DNA, 15 bp, Homo sapiens
ttggccgtggtccac

SEQ ID NO: 371926 - DNA, 15 bp, Homo sapiens
cttggccgtggtcca

SEQ ID NO: 371927 - DNA, 15 bp, Homo sapiens
ccttggccgtggtcc

SEQ ID NO: 371928 - DNA, 15 bp, Homo sapiens
cccttggccgtggtc

SEQ ID NO: 371929 - DNA, 15 bp, Homo sapiens
ccccttggccgtggt

SEQ ID NO: 371930 - DNA, 15 bp, Homo sapiens
accccttggccgtgg

SEQ ID NO: 371931 - DNA, 15 bp, Homo sapiens
caccccttggccgtg

SEQ ID NO: 371932 - DNA, 15 bp, Homo sapiens
ccaccccttggccgt

SEQ ID NO: 371933 - DNA, 15 bp, Homo sapiens
cccaccccttggccg

SEQ ID NO: 371934 - DNA, 15 bp, Homo sapiens
ccccaccccttggcc

SEQ ID NO: 371935 - DNA, 15 bp, Homo sapiens
tccccaccccttggc

SEQ ID NO: 371936 - DNA, 15 bp, Homo sapiens
ttccccaccccttgg

SEQ ID NO: 371937 - DNA, 15 bp, Homo sapiens
tttccccaccccttg

SEQ ID NO: 371938 - DNA, 15 bp, Homo sapiens
gtttccccacccctt

SEQ ID NO: 371939 - DNA, 15 bp, Homo sapiens
tgtttccccacccct

SEQ ID NO: 371940 - DNA, 15 bp, Homo sapiens
atgtttccccacccc

SEQ ID NO: 371941 - DNA, 15 bp, Homo sapiens
gatgtttccccaccc

SEQ ID NO: 371942 - DNA, 15 bp, Homo sapiens
agatgtttccccacc

SEQ ID NO: 371943 - DNA, 15 bp, Homo sapiens
cagatgtttccccac

SEQ ID NO: 371944 - DNA, 15 bp, Homo sapiens
ccagatgtttcccca

SEQ ID NO: 371945 - DNA, 15 bp, Homo sapiens
tccagatgtttcccc

SEQ ID NO: 371946 - DNA, 15 bp, Homo sapiens
ttccagatgtttccc

SEQ ID NO: 371947 - DNA, 15 bp, Homo sapiens
tttccagatgtttcc

SEQ ID NO: 371948 - DNA, 15 bp, Homo sapiens
ctttccagatgtttc

SEQ ID NO: 371949 - DNA, 15 bp, Homo sapiens
tctttccagatgttt

SEQ ID NO: 371950 - DNA, 15 bp, Homo sapiens
gtctttccagatgtt

SEQ ID NO: 371951 - DNA, 15 bp, Homo sapiens
tgtctttccagatgt

SEQ ID NO: 371952 - DNA, 15 bp, Homo sapiens
ctgtctttccagatg

SEQ ID NO: 371953 - DNA, 15 bp, Homo sapiens
actgtctttccagat

SEQ ID NO: 371954 - DNA, 15 bp, Homo sapiens
tactgtctttccaga

SEQ ID NO: 371955 - DNA, 15 bp, Homo sapiens
atactgtctttccag

SEQ ID NO: 371956 - DNA, 15 bp, Homo sapiens
gatactgtctttcca

SEQ ID NO: 371957 - DNA, 15 bp, Homo sapiens
agatactgtctttcc

SEQ ID NO: 371958 - DNA, 15 bp, Homo sapiens
tagatactgtctttc

SEQ ID NO: 371959 - DNA, 15 bp, Homo sapiens
ttagatactgtcttt

SEQ ID NO: 371960 - DNA, 15 bp, Homo sapiens
attagatactgtctt

SEQ ID NO: 371961 - DNA, 15 bp, Homo sapiens
cattagatactgtct

SEQ ID NO: 371962 - DNA, 15 bp, Homo sapiens
acattagatactgtc

SEQ ID NO: 371963 - DNA, 15 bp, Homo sapiens
gacattagatactgt

SEQ ID NO: 371964 - DNA, 15 bp, Homo sapiens
agacattagatactg

SEQ ID NO: 371965 - DNA, 15 bp, Homo sapiens
aagacattagatact

SEQ ID NO: 371966 - DNA, 15 bp, Homo sapiens
caagacattagatac

SEQ ID NO: 371967 - DNA, 15 bp, Homo sapiens
tcaagacattagata

SEQ ID NO: 371968 - DNA, 15 bp, Homo sapiens
gtcaagacattagat

SEQ ID NO: 371969 - DNA, 15 bp, Homo sapiens
tgtcaagacattaga

SEQ ID NO: 371970 - DNA, 15 bp, Homo sapiens
ctgtcaagacattag

SEQ ID NO: 371971 - DNA, 15 bp, Homo sapiens
gctgtcaagacatta

SEQ ID NO: 371972 - DNA, 15 bp, Homo sapiens
ggctgtcaagacatt

SEQ ID NO: 371973 - DNA, 15 bp, Homo sapiens
tggctgtcaagacat

SEQ ID NO: 371974 - DNA, 15 bp, Homo sapiens
ctggctgtcaagaca

SEQ ID NO: 371975 - DNA, 15 bp, Homo sapiens
tctggctgtcaagac

SEQ ID NO: 371976 - DNA, 15 bp, Homo sapiens
ctctggctgtcaaga

SEQ ID NO: 371977 - DNA, 15 bp, Homo sapiens
cctctggctgtcaag

SEQ ID NO: 371978 - DNA, 15 bp, Homo sapiens
tcctctggctgtcaa

SEQ ID NO: 371979 - DNA, 15 bp, Homo sapiens
ctcctctggctgtca

SEQ ID NO: 371980 - DNA, 15 bp, Homo sapiens
tctcctctggctgtc

SEQ ID NO: 371981 - DNA, 15 bp, Homo sapiens
ttctcctctggctgt

SEQ ID NO: 371982 - DNA, 15 bp, Homo sapiens
cttctcctctggctg

SEQ ID NO: 371983 - DNA, 15 bp, Homo sapiens
acttctcctctggct

SEQ ID NO: 371984 - DNA, 15 bp, Homo sapiens
cacttctcctctggc

SEQ ID NO: 371985 - DNA, 15 bp, Homo sapiens
ccacttctcctctgg

SEQ ID NO: 371986 - DNA, 15 bp, Homo sapiens
cccacttctcctctg

SEQ ID NO: 371987 - DNA, 15 bp, Homo sapiens
tcccacttctcctct

SEQ ID NO: 371988 - DNA, 15 bp, Homo sapiens
atcccacttctcctc

SEQ ID NO: 371989 - DNA, 15 bp, Homo sapiens
catcccacttctcct

SEQ ID NO: 371990 - DNA, 15 bp, Homo sapiens
acatcccacttctcc

SEQ ID NO: 371991 - DNA, 15 bp, Homo sapiens
aacatcccacttctc

SEQ ID NO: 371992 - DNA, 15 bp, Homo sapiens
aaacatcccacttct

SEQ ID NO: 371993 - DNA, 15 bp, Homo sapiens
aaaacatcccacttc

SEQ ID NO: 371994 - DNA, 15 bp, Homo sapiens
gaaaacatcccactt

SEQ ID NO: 371995 - DNA, 15 bp, Homo sapiens
tgaaaacatcccact

SEQ ID NO: 371996 - DNA, 15 bp, Homo sapiens
ttgaaaacatcccac

SEQ ID NO: 371997 - DNA, 15 bp, Homo sapiens
tttgaaaacatccca

SEQ ID NO: 371998 - DNA, 15 bp, Homo sapiens
ctttgaaaacatccc

SEQ ID NO: 371999 - DNA, 15 bp, Homo sapiens
gctttgaaaacatcc

SEQ ID NO: 372000 - DNA, 15 bp, Homo sapiens
ggctttgaaaacatc

SEQ ID NO: 372001 - DNA, 15 bp, Homo sapiens
gggctttgaaaacat

SEQ ID NO: 372002 - DNA, 15 bp, Homo sapiens
tgggctttgaaaaca

SEQ ID NO: 372003 - DNA, 15 bp, Homo sapiens
ctgggctttgaaaac

SEQ ID NO: 372004 - DNA, 15 bp, Homo sapiens
cctgggctttgaaaa

SEQ ID NO: 372005 - DNA, 15 bp, Homo sapiens
tcctgggctttgaaa

SEQ ID NO: 372006 - DNA, 15 bp, Homo sapiens
ctcctgggctttgaa

SEQ ID NO: 372007 - DNA, 15 bp, Homo sapiens
actcctgggctttga

SEQ ID NO: 372008 - DNA, 15 bp, Homo sapiens
cactcctgggctttg

SEQ ID NO: 372009 - DNA, 15 bp, Homo sapiens
tcactcctgggcttt

SEQ ID NO: 372010 - DNA, 15 bp, Homo sapiens
gtcactcctgggctt

SEQ ID NO: 372011 - DNA, 15 bp, Homo sapiens
agtcactcctgggct

SEQ ID NO: 372012 - DNA, 15 bp, Homo sapiens
aagtcactcctgggc

SEQ ID NO: 372013 - DNA, 15 bp, Homo sapiens
aaagtcactcctggg

SEQ ID NO: 372014 - DNA, 15 bp, Homo sapiens
gaaagtcactcctgg

SEQ ID NO: 372015 - DNA, 15 bp, Homo sapiens
ggaaagtcactcctg

SEQ ID NO: 372016 - DNA, 15 bp, Homo sapiens
gggaaagtcactcct

SEQ ID NO: 372017 - DNA, 15 bp, Homo sapiens
agggaaagtcactcc

SEQ ID NO: 372018 - DNA, 15 bp, Homo sapiens
aagggaaagtcactc

SEQ ID NO: 372019 - DNA, 15 bp, Homo sapiens
aaagggaaagtcact

SEQ ID NO: 372020 - DNA, 15 bp, Homo sapiens
caaagggaaagtcac

SEQ ID NO: 372021 - DNA, 15 bp, Homo sapiens
acaaagggaaagtca

SEQ ID NO: 372022 - DNA, 15 bp, Homo sapiens
tacaaagggaaagtc

SEQ ID NO: 372023 - DNA, 15 bp, Homo sapiens
ttacaaagggaaagt

SEQ ID NO: 372024 - DNA, 15 bp, Homo sapiens
gttacaaagggaaag

SEQ ID NO: 372025 - DNA, 15 bp, Homo sapiens
agttacaaagggaaa

SEQ ID NO: 372026 - DNA, 15 bp, Homo sapiens
gagttacaaagggaa

SEQ ID NO: 372027 - DNA, 15 bp, Homo sapiens
ggagttacaaaggga

SEQ ID NO: 372028 - DNA, 15 bp, Homo sapiens
tggagttacaaaggg

SEQ ID NO: 372029 - DNA, 15 bp, Homo sapiens
ctggagttacaaagg

SEQ ID NO: 372030 - DNA, 15 bp, Homo sapiens
tctggagttacaaag

SEQ ID NO: 372031 - DNA, 15 bp, Homo sapiens
ctctggagttacaaa

SEQ ID NO: 372032 - DNA, 15 bp, Homo sapiens
cctctggagttacaa

SEQ ID NO: 372033 - DNA, 15 bp, Homo sapiens
tcctctggagttaca

SEQ ID NO: 372034 - DNA, 15 bp, Homo sapiens
gtcctctggagttac

SEQ ID NO: 372035 - DNA, 15 bp, Homo sapiens
agtcctctggagtta

SEQ ID NO: 372036 - DNA, 15 bp, Homo sapiens
aagtcctctggagtt

SEQ ID NO: 372037 - DNA, 15 bp, Homo sapiens
caagtcctctggagt

SEQ ID NO: 372038 - DNA, 15 bp, Homo sapiens
tcaagtcctctggag

SEQ ID NO: 372039 - DNA, 15 bp, Homo sapiens
atcaagtcctctgga

SEQ ID NO: 372040 - DNA, 15 bp, Homo sapiens
aatcaagtcctctgg

SEQ ID NO: 372041 - DNA, 15 bp, Homo sapiens
gaatcaagtcctctg

SEQ ID NO: 372042 - DNA, 15 bp, Homo sapiens
cgaatcaagtcctct

SEQ ID NO: 372043 - DNA, 15 bp, Homo sapiens
gcgaatcaagtcctc

SEQ ID NO: 372044 - DNA, 15 bp, Homo sapiens
tgcgaatcaagtcct

SEQ ID NO: 372045 - DNA, 15 bp, Homo sapiens
ttgcgaatcaagtcc

SEQ ID NO: 372046 - DNA, 15 bp, Homo sapiens
gttgcgaatcaagtc

SEQ ID NO: 372047 - DNA, 15 bp, Homo sapiens
cgttgcgaatcaagt

SEQ ID NO: 372048 - DNA, 15 bp, Homo sapiens
tcgttgcgaatcaag

SEQ ID NO: 372049 - DNA, 15 bp, Homo sapiens
ttcgttgcgaatcaa

SEQ ID NO: 372050 - DNA, 15 bp, Homo sapiens
cttcgttgcgaatca

SEQ ID NO: 372051 - DNA, 15 bp, Homo sapiens
tcttcgttgcgaatc

SEQ ID NO: 372052 - DNA, 15 bp, Homo sapiens
gtcttcgttgcgaat

SEQ ID NO: 372053 - DNA, 15 bp, Homo sapiens
ggtcttcgttgcgaa

SEQ ID NO: 372054 - DNA, 15 bp, Homo sapiens
tggtcttcgttgcga

SEQ ID NO: 372055 - DNA, 15 bp, Homo sapiens
atggtcttcgttgcg

SEQ ID NO: 372056 - DNA, 15 bp, Homo sapiens
gatggtcttcgttgc

SEQ ID NO: 372057 - DNA, 15 bp, Homo sapiens
agatggtcttcgttg

SEQ ID NO: 372058 - DNA, 15 bp, Homo sapiens
cagatggtcttcgtt

SEQ ID NO: 372059 - DNA, 15 bp, Homo sapiens
ccagatggtcttcgt

SEQ ID NO: 372060 - DNA, 15 bp, Homo sapiens
cccagatggtcttcg

SEQ ID NO: 372061 - DNA, 15 bp, Homo sapiens
ccccagatggtcttc

SEQ ID NO: 372062 - DNA, 15 bp, Homo sapiens
cccccagatggtctt

SEQ ID NO: 372063 - DNA, 15 bp, Homo sapiens
tcccccagatggtct

SEQ ID NO: 372064 - DNA, 15 bp, Homo sapiens
atcccccagatggtc

SEQ ID NO: 372065 - DNA, 15 bp, Homo sapiens
catcccccagatggt

SEQ ID NO: 372066 - DNA, 15 bp, Homo sapiens
tcatcccccagatgg

SEQ ID NO: 372067 - DNA, 15 bp, Homo sapiens
ttcatcccccagatg

SEQ ID NO: 372068 - DNA, 15 bp, Homo sapiens
cttcatcccccagat

SEQ ID NO: 372069 - DNA, 15 bp, Homo sapiens
ccttcatcccccaga

SEQ ID NO: 372070 - DNA, 15 bp, Homo sapiens
tccttcatcccccag

SEQ ID NO: 372071 - DNA, 15 bp, Homo sapiens
ttccttcatccccca

SEQ ID NO: 372072 - DNA, 15 bp, Homo sapiens
tttccttcatccccc

SEQ ID NO: 372073 - DNA, 15 bp, Homo sapiens
atttccttcatcccc

SEQ ID NO: 372074 - DNA, 15 bp, Homo sapiens
aatttccttcatccc

SEQ ID NO: 372075 - DNA, 15 bp, Homo sapiens
gaatttccttcatcc

SEQ ID NO: 372076 - DNA, 15 bp, Homo sapiens
agaatttccttcatc

SEQ ID NO: 372077 - DNA, 15 bp, Homo sapiens
aagaatttccttcat

SEQ ID NO: 372078 - DNA, 15 bp, Homo sapiens
caagaatttccttca

SEQ ID NO: 372079 - DNA, 15 bp, Homo sapiens
gcaagaatttccttc

SEQ ID NO: 372080 - DNA, 15 bp, Homo sapiens
agcaagaatttcctt

SEQ ID NO: 372081 - DNA, 15 bp, Homo sapiens
aagcaagaatttcct

SEQ ID NO: 372082 - DNA, 15 bp, Homo sapiens
aaagcaagaatttcc

SEQ ID NO: 372083 - DNA, 15 bp, Homo sapiens
aaaagcaagaatttc

SEQ ID NO: 372084 - DNA, 15 bp, Homo sapiens
aaaaagcaagaattt

SEQ ID NO: 372085 - DNA, 15 bp, Homo sapiens
taaaaagcaagaatt

SEQ ID NO: 372086 - DNA, 15 bp, Homo sapiens
ttaaaaagcaagaat

SEQ ID NO: 372087 - DNA, 15 bp, Homo sapiens
attaaaaagcaagaa

SEQ ID NO: 372088 - DNA, 15 bp, Homo sapiens
aattaaaaagcaaga

SEQ ID NO: 372089 - DNA, 15 bp, Homo sapiens
aaattaaaaagcaag

SEQ ID NO: 372090 - DNA, 15 bp, Homo sapiens
aaaattaaaaagcaa

SEQ ID NO: 372091 - DNA, 15 bp, Homo sapiens
taaaattaaaaagca

SEQ ID NO: 372092 - DNA, 15 bp, Homo sapiens
ttaaaattaaaaagc

SEQ ID NO: 372093 - DNA, 15 bp, Homo sapiens
tttaaaattaaaaag

SEQ ID NO: 372094 - DNA, 15 bp, Homo sapiens
atttaaaattaaaaa

SEQ ID NO: 372095 - DNA, 15 bp, Homo sapiens
gatttaaaattaaaa

SEQ ID NO: 372096 - DNA, 15 bp, Homo sapiens
agatttaaaattaaa

SEQ ID NO: 372097 - DNA, 15 bp, Homo sapiens
cagatttaaaattaa

SEQ ID NO: 372098 - DNA, 15 bp, Homo sapiens
tcagatttaaaatta

SEQ ID NO: 372099 - DNA, 15 bp, Homo sapiens
ctcagatttaaaatt

SEQ ID NO: 372100 - DNA, 15 bp, Homo sapiens
cctcagatttaaaat

SEQ ID NO: 372101 - DNA, 15 bp, Homo sapiens
ccctcagatttaaaa

SEQ ID NO: 372102 - DNA, 15 bp, Homo sapiens
accctcagatttaaa

SEQ ID NO: 372103 - DNA, 15 bp, Homo sapiens
aaccctcagatttaa

SEQ ID NO: 372104 - DNA, 15 bp, Homo sapiens
taaccctcagattta

SEQ ID NO: 372105 - DNA, 15 bp, Homo sapiens
ttaaccctcagattt

SEQ ID NO: 372106 - DNA, 15 bp, Homo sapiens
cttaaccctcagatt

SEQ ID NO: 372107 - DNA, 15 bp, Homo sapiens
gcttaaccctcagat

SEQ ID NO: 372108 - DNA, 15 bp, Homo sapiens
ggcttaaccctcaga

SEQ ID NO: 372109 - DNA, 15 bp, Homo sapiens
gggcttaaccctcag

SEQ ID NO: 372110 - DNA, 15 bp, Homo sapiens
cgggcttaaccctca

SEQ ID NO: 372111 - DNA, 15 bp, Homo sapiens
acgggcttaaccctc

SEQ ID NO: 372112 - DNA, 15 bp, Homo sapiens
aacgggcttaaccct

SEQ ID NO: 372113 - DNA, 15 bp, Homo sapiens
aaacgggcttaaccc

SEQ ID NO: 372114 - DNA, 15 bp, Homo sapiens
gaaacgggcttaacc

SEQ ID NO: 372115 - DNA, 15 bp, Homo sapiens
agaaacgggcttaac

SEQ ID NO: 372116 - DNA, 15 bp, Homo sapiens
cagaaacgggcttaa

SEQ ID NO: 372117 - DNA, 15 bp, Homo sapiens
tcagaaacgggctta

SEQ ID NO: 372118 - DNA, 15 bp, Homo sapiens
ctcagaaacgggctt

SEQ ID NO: 372119 - DNA, 15 bp, Homo sapiens
cctcagaaacgggct

SEQ ID NO: 372120 - DNA, 15 bp, Homo sapiens
acctcagaaacgggc

SEQ ID NO: 372121 - DNA, 15 bp, Homo sapiens
cacctcagaaacggg

SEQ ID NO: 372122 - DNA, 15 bp, Homo sapiens
acacctcagaaacgg

SEQ ID NO: 372123 - DNA, 15 bp, Homo sapiens
gacacctcagaaacg

SEQ ID NO: 372124 - DNA, 15 bp, Homo sapiens
tgacacctcagaaac

SEQ ID NO: 372125 - DNA, 15 bp, Homo sapiens
ctgacacctcagaaa

SEQ ID NO: 372126 - DNA, 15 bp, Homo sapiens
gctgacacctcagaa

SEQ ID NO: 372127 - DNA, 15 bp, Homo sapiens
ggctgacacctcaga

SEQ ID NO: 372128 - DNA, 15 bp, Homo sapiens
gggctgacacctcag

SEQ ID NO: 372129 - DNA, 15 bp, Homo sapiens
agggctgacacctca

SEQ ID NO: 372130 - DNA, 15 bp, Homo sapiens
cagggctgacacctc

SEQ ID NO: 372131 - DNA, 15 bp, Homo sapiens
acagggctgacacct

SEQ ID NO: 372132 - DNA, 15 bp, Homo sapiens
cacagggctgacacc

SEQ ID NO: 372133 - DNA, 15 bp, Homo sapiens
acacagggctgacac

SEQ ID NO: 372134 - DNA, 15 bp, Homo sapiens
cacacagggctgaca

SEQ ID NO: 372135 - DNA, 15 bp, Homo sapiens
acacacagggctgac

SEQ ID NO: 372136 - DNA, 15 bp, Homo sapiens
cacacacagggctga

SEQ ID NO: 372137 - DNA, 15 bp, Homo sapiens
tcacacacagggctg

SEQ ID NO: 372138 - DNA, 15 bp, Homo sapiens
ctcacacacagggct

SEQ ID NO: 372139 - DNA, 15 bp, Homo sapiens
cctcacacacagggc

SEQ ID NO: 372140 - DNA, 15 bp, Homo sapiens
gcctcacacacaggg

SEQ ID NO: 372141 - DNA, 15 bp, Homo sapiens
ggcctcacacacagg

SEQ ID NO: 372142 - DNA, 15 bp, Homo sapiens
gggcctcacacacag

SEQ ID NO: 372143 - DNA, 15 bp, Homo sapiens
agggcctcacacaca

SEQ ID NO: 372144 - DNA, 15 bp, Homo sapiens
cagggcctcacacac

SEQ ID NO: 372145 - DNA, 15 bp, Homo sapiens
ccagggcctcacaca

SEQ ID NO: 372146 - DNA, 15 bp, Homo sapiens
gccagggcctcacac

SEQ ID NO: 372147 - DNA, 15 bp, Homo sapiens
ggccagggcctcaca

SEQ ID NO: 372148 - DNA, 15 bp, Homo sapiens
aggccagggcctcac

SEQ ID NO: 372149 - DNA, 15 bp, Homo sapiens
caggccagggcctca

SEQ ID NO: 372150 - DNA, 15 bp, Homo sapiens
acaggccagggcctc

SEQ ID NO: 372151 - DNA, 15 bp, Homo sapiens
gacaggccagggcct

SEQ ID NO: 372152 - DNA, 15 bp, Homo sapiens
agacaggccagggcc

SEQ ID NO: 372153 - DNA, 15 bp, Homo sapiens
cagacaggccagggc

SEQ ID NO: 372154 - DNA, 15 bp, Homo sapiens
ccagacaggccaggg

SEQ ID NO: 372155 - DNA, 15 bp, Homo sapiens
cccagacaggccagg

SEQ ID NO: 372156 - DNA, 15 bp, Homo sapiens
ccccagacaggccag

SEQ ID NO: 372157 - DNA, 15 bp, Homo sapiens
accccagacaggcca

SEQ ID NO: 372158 - DNA, 15 bp, Homo sapiens
aaccccagacaggcc

SEQ ID NO: 372159 - DNA, 15 bp, Homo sapiens
caaccccagacaggc

SEQ ID NO: 372160 - DNA, 15 bp, Homo sapiens
ccaaccccagacagg

SEQ ID NO: 372161 - DNA, 15 bp, Homo sapiens
cccaaccccagacag

SEQ ID NO: 372162 - DNA, 15 bp, Homo sapiens
acccaaccccagaca

SEQ ID NO: 372163 - DNA, 15 bp, Homo sapiens
aacccaaccccagac

SEQ ID NO: 372164 - DNA, 15 bp, Homo sapiens
aaacccaaccccaga

SEQ ID NO: 372165 - DNA, 15 bp, Homo sapiens
caaacccaaccccag

SEQ ID NO: 372166 - DNA, 15 bp, Homo sapiens
ccaaacccaacccca

SEQ ID NO: 372167 - DNA, 15 bp, Homo sapiens
tccaaacccaacccc

SEQ ID NO: 372168 - DNA, 15 bp, Homo sapiens
atccaaacccaaccc

SEQ ID NO: 372169 - DNA, 15 bp, Homo sapiens
catccaaacccaacc

SEQ ID NO: 372170 - DNA, 15 bp, Homo sapiens
tcatccaaacccaac

SEQ ID NO: 372171 - DNA, 15 bp, Homo sapiens
ttcatccaaacccaa

SEQ ID NO: 372172 - DNA, 15 bp, Homo sapiens
tttcatccaaaccca

SEQ ID NO: 372173 - DNA, 15 bp, Homo sapiens
atttcatccaaaccc

SEQ ID NO: 372174 - DNA, 15 bp, Homo sapiens
tatttcatccaaacc

SEQ ID NO: 372175 - DNA, 15 bp, Homo sapiens
ttatttcatccaaac

SEQ ID NO: 372176 - DNA, 15 bp, Homo sapiens
attatttcatccaaa

SEQ ID NO: 372177 - DNA, 15 bp, Homo sapiens
gattatttcatccaa

SEQ ID NO: 372178 - DNA, 15 bp, Homo sapiens
agattatttcatcca

SEQ ID NO: 372179 - DNA, 15 bp, Homo sapiens
tagattatttcatcc

SEQ ID NO: 372180 - DNA, 15 bp, Homo sapiens
ttagattatttcatc

SEQ ID NO: 372181 - DNA, 15 bp, Homo sapiens
cttagattatttcat

SEQ ID NO: 372182 - DNA, 15 bp, Homo sapiens
tcttagattatttca

SEQ ID NO: 372183 - DNA, 15 bp, Homo sapiens
atcttagattatttc

SEQ ID NO: 372184 - DNA, 15 bp, Homo sapiens
catcttagattattt

SEQ ID NO: 372185 - DNA, 15 bp, Homo sapiens
gcatcttagattatt

SEQ ID NO: 372186 - DNA, 15 bp, Homo sapiens
tgcatcttagattat

SEQ ID NO: 372187 - DNA, 15 bp, Homo sapiens
ctgcatcttagatta

SEQ ID NO: 372188 - DNA, 15 bp, Homo sapiens
actgcatcttagatt

SEQ ID NO: 372189 - DNA, 15 bp, Homo sapiens
aactgcatcttagat

SEQ ID NO: 372190 - DNA, 15 bp, Homo sapiens
taactgcatcttaga

SEQ ID NO: 372191 - DNA, 15 bp, Homo sapiens
gtaactgcatcttag

SEQ ID NO: 372192 - DNA, 15 bp, Homo sapiens
ggtaactgcatctta

SEQ ID NO: 372193 - DNA, 15 bp, Homo sapiens
tggtaactgcatctt

SEQ ID NO: 372194 - DNA, 15 bp, Homo sapiens
ctggtaactgcatct

SEQ ID NO: 372195 - DNA, 15 bp, Homo sapiens
cctggtaactgcatc

SEQ ID NO: 372196 - DNA, 15 bp, Homo sapiens
ccctggtaactgcat

SEQ ID NO: 372197 - DNA, 15 bp, Homo sapiens
accctggtaactgca

SEQ ID NO: 372198 - DNA, 15 bp, Homo sapiens
caccctggtaactgc

SEQ ID NO: 372199 - DNA, 15 bp, Homo sapiens
acaccctggtaactg

SEQ ID NO: 372200 - DNA, 15 bp, Homo sapiens
aacaccctggtaact

SEQ ID NO: 372201 - DNA, 15 bp, Homo sapiens
aaacaccctggtaac

SEQ ID NO: 372202 - DNA, 15 bp, Homo sapiens
gaaacaccctggtaa

SEQ ID NO: 372203 - DNA, 15 bp, Homo sapiens
ggaaacaccctggta

SEQ ID NO: 372204 - DNA, 15 bp, Homo sapiens
aggaaacaccctggt

SEQ ID NO: 372205 - DNA, 15 bp, Homo sapiens
aaggaaacaccctgg

SEQ ID NO: 372206 - DNA, 15 bp, Homo sapiens
aaaggaaacaccctg

SEQ ID NO: 372207 - DNA, 15 bp, Homo sapiens
aaaaggaaacaccct

SEQ ID NO: 372208 - DNA, 15 bp, Homo sapiens
gaaaaggaaacaccc

SEQ ID NO: 372209 - DNA, 15 bp, Homo sapiens
tgaaaaggaaacacc

SEQ ID NO: 372210 - DNA, 15 bp, Homo sapiens
gtgaaaaggaaacac

SEQ ID NO: 372211 - DNA, 15 bp, Homo sapiens
tgtgaaaaggaaaca

SEQ ID NO: 372212 - DNA, 15 bp, Homo sapiens
atgtgaaaaggaaac

SEQ ID NO: 372213 - DNA, 15 bp, Homo sapiens
aatgtgaaaaggaaa

SEQ ID NO: 372214 - DNA, 15 bp, Homo sapiens
gaatgtgaaaaggaa

SEQ ID NO: 372215 - DNA, 15 bp, Homo sapiens
tgaatgtgaaaagga

SEQ ID NO: 372216 - DNA, 15 bp, Homo sapiens
atgaatgtgaaaagg

SEQ ID NO: 372217 - DNA, 15 bp, Homo sapiens
gatgaatgtgaaaag

SEQ ID NO: 372218 - DNA, 15 bp, Homo sapiens
ggatgaatgtgaaaa

SEQ ID NO: 372219 - DNA, 15 bp, Homo sapiens
aggatgaatgtgaaa

SEQ ID NO: 372220 - DNA, 15 bp, Homo sapiens
aaggatgaatgtgaa

SEQ ID NO: 372221 - DNA, 15 bp, Homo sapiens
gaaggatgaatgtga

SEQ ID NO: 372222 - DNA, 15 bp, Homo sapiens
agaaggatgaatgtg

SEQ ID NO: 372223 - DNA, 15 bp, Homo sapiens
gagaaggatgaatgt

SEQ ID NO: 372224 - DNA, 15 bp, Homo sapiens
agagaaggatgaatg

SEQ ID NO: 372225 - DNA, 15 bp, Homo sapiens
cagagaaggatgaat

SEQ ID NO: 372226 - DNA, 15 bp, Homo sapiens
acagagaaggatgaa

SEQ ID NO: 372227 - DNA, 15 bp, Homo sapiens
gacagagaaggatga

SEQ ID NO: 372228 - DNA, 15 bp, Homo sapiens
agacagagaaggatg

SEQ ID NO: 372229 - DNA, 15 bp, Homo sapiens
cagacagagaaggat

SEQ ID NO: 372230 - DNA, 15 bp, Homo sapiens
acagacagagaagga

SEQ ID NO: 372231 - DNA, 15 bp, Homo sapiens
aacagacagagaagg

SEQ ID NO: 372232 - DNA, 15 bp, Homo sapiens
gaacagacagagaag

SEQ ID NO: 372233 - DNA, 15 bp, Homo sapiens
ggaacagacagagaa

SEQ ID NO: 372234 - DNA, 15 bp, Homo sapiens
gggaacagacagaga

SEQ ID NO: 372235 - DNA, 15 bp, Homo sapiens
ggggaacagacagag

SEQ ID NO: 372236 - DNA, 15 bp, Homo sapiens
gggggaacagacaga

SEQ ID NO: 372237 - DNA, 15 bp, Homo sapiens
cgggggaacagacag

SEQ ID NO: 372238 - DNA, 15 bp, Homo sapiens
ccgggggaacagaca

SEQ ID NO: 372239 - DNA, 15 bp, Homo sapiens
cccgggggaacagac

SEQ ID NO: 372240 - DNA, 15 bp, Homo sapiens
ccccgggggaacaga

SEQ ID NO: 372241 - DNA, 15 bp, Homo sapiens
gccccgggggaacag

SEQ ID NO: 372242 - DNA, 15 bp, Homo sapiens
ggccccgggggaaca

SEQ ID NO: 372243 - DNA, 15 bp, Homo sapiens
tggccccgggggaac

SEQ ID NO: 372244 - DNA, 15 bp, Homo sapiens
ttggccccgggggaa

SEQ ID NO: 372245 - DNA, 15 bp, Homo sapiens
gttggccccggggga

SEQ ID NO: 372246 - DNA, 15 bp, Homo sapiens
ggttggccccggggg

SEQ ID NO: 372247 - DNA, 15 bp, Homo sapiens
cggttggccccgggg

SEQ ID NO: 372248 - DNA, 15 bp, Homo sapiens
tcggttggccccggg

SEQ ID NO: 372249 - DNA, 15 bp, Homo sapiens
atcggttggccccgg

SEQ ID NO: 372250 - DNA, 15 bp, Homo sapiens
catcggttggccccg

SEQ ID NO: 372251 - DNA, 15 bp, Homo sapiens
ccatcggttggcccc

SEQ ID NO: 372252 - DNA, 15 bp, Homo sapiens
gccatcggttggccc

SEQ ID NO: 372253 - DNA, 15 bp, Homo sapiens
agccatcggttggcc

SEQ ID NO: 372254 - DNA, 15 bp, Homo sapiens
aagccatcggttggc

SEQ ID NO: 372255 - DNA, 15 bp, Homo sapiens
gaagccatcggttgg

SEQ ID NO: 372256 - DNA, 15 bp, Homo sapiens
ggaagccatcggttg

SEQ ID NO: 372257 - DNA, 15 bp, Homo sapiens
tggaagccatcggtt

SEQ ID NO: 372258 - DNA, 15 bp, Homo sapiens
ttggaagccatcggt

SEQ ID NO: 372259 - DNA, 15 bp, Homo sapiens
cttggaagccatcgg

SEQ ID NO: 372260 - DNA, 15 bp, Homo sapiens
gcttggaagccatcg

SEQ ID NO: 372261 - DNA, 15 bp, Homo sapiens
agcttggaagccatc

SEQ ID NO: 372262 - DNA, 15 bp, Homo sapiens
gagcttggaagccat

SEQ ID NO: 372263 - DNA, 15 bp, Homo sapiens
agagcttggaagcca

SEQ ID NO: 372264 - DNA, 15 bp, Homo sapiens
cagagcttggaagcc

SEQ ID NO: 372265 - DNA, 15 bp, Homo sapiens
acagagcttggaagc

SEQ ID NO: 372266 - DNA, 15 bp, Homo sapiens
cacagagcttggaag

SEQ ID NO: 372267 - DNA, 15 bp, Homo sapiens
ccacagagcttggaa

SEQ ID NO: 372268 - DNA, 15 bp, Homo sapiens
tccacagagcttgga

SEQ ID NO: 372269 - DNA, 15 bp, Homo sapiens
ctccacagagcttgg

SEQ ID NO: 372270 - DNA, 15 bp, Homo sapiens
actccacagagcttg

SEQ ID NO: 372271 - DNA, 15 bp, Homo sapiens
aactccacagagctt

SEQ ID NO: 372272 - DNA, 15 bp, Homo sapiens
gaactccacagagct

SEQ ID NO: 372273 - DNA, 15 bp, Homo sapiens
tgaactccacagagc

SEQ ID NO: 372274 - DNA, 15 bp, Homo sapiens
gtgaactccacagag

SEQ ID NO: 372275 - DNA, 15 bp, Homo sapiens
agtgaactccacaga

SEQ ID NO: 372276 - DNA, 15 bp, Homo sapiens
tagtgaactccacag

SEQ ID NO: 372277 - DNA, 15 bp, Homo sapiens
ttagtgaactccaca

SEQ ID NO: 372278 - DNA, 15 bp, Homo sapiens
attagtgaactccac

SEQ ID NO: 372279 - DNA, 15 bp, Homo sapiens
aattagtgaactcca

SEQ ID NO: 372280 - DNA, 15 bp, Homo sapiens
caattagtgaactcc

SEQ ID NO: 372281 - DNA, 15 bp, Homo sapiens
tcaattagtgaactc

SEQ ID NO: 372282 - DNA, 15 bp, Homo sapiens
ttcaattagtgaact

SEQ ID NO: 372283 - DNA, 15 bp, Homo sapiens
attcaattagtgaac

SEQ ID NO: 372284 - DNA, 15 bp, Homo sapiens
aattcaattagtgaa

SEQ ID NO: 372285 - DNA, 15 bp, Homo sapiens
taattcaattagtga

SEQ ID NO: 372286 - DNA, 15 bp, Homo sapiens
gtaattcaattagtg

SEQ ID NO: 372287 - DNA, 15 bp, Homo sapiens
agtaattcaattagt

SEQ ID NO: 372288 - DNA, 15 bp, Homo sapiens
gagtaattcaattag

SEQ ID NO: 372289 - DNA, 15 bp, Homo sapiens
agagtaattcaatta

SEQ ID NO: 372290 - DNA, 15 bp, Homo sapiens
aagagtaattcaatt

SEQ ID NO: 372291 - DNA, 15 bp, Homo sapiens
gaagagtaattcaat

SEQ ID NO: 372292 - DNA, 15 bp, Homo sapiens
agaagagtaattcaa

SEQ ID NO: 372293 - DNA, 15 bp, Homo sapiens
gagaagagtaattca

SEQ ID NO: 372294 - DNA, 15 bp, Homo sapiens
cgagaagagtaattc

SEQ ID NO: 372295 - DNA, 15 bp, Homo sapiens
gcgagaagagtaatt

SEQ ID NO: 372296 - DNA, 15 bp, Homo sapiens
agcgagaagagtaat

SEQ ID NO: 372297 - DNA, 15 bp, Homo sapiens
gagcgagaagagtaa

SEQ ID NO: 372298 - DNA, 15 bp, Homo sapiens
ggagcgagaagagta

SEQ ID NO: 372299 - DNA, 15 bp, Homo sapiens
aggagcgagaagagt

SEQ ID NO: 372300 - DNA, 15 bp, Homo sapiens
gaggagcgagaagag

SEQ ID NO: 372301 - DNA, 15 bp, Homo sapiens
ggaggagcgagaaga

SEQ ID NO: 372302 - DNA, 15 bp, Homo sapiens
cggaggagcgagaag

SEQ ID NO: 372303 - DNA, 15 bp, Homo sapiens
acggaggagcgagaa

SEQ ID NO: 372304 - DNA, 15 bp, Homo sapiens
cacggaggagcgaga

SEQ ID NO: 372305 - DNA, 15 bp, Homo sapiens
tcacggaggagcgag

SEQ ID NO: 372306 - DNA, 15 bp, Homo sapiens
ttcacggaggagcga

SEQ ID NO: 372307 - DNA, 15 bp, Homo sapiens
cttcacggaggagcg

SEQ ID NO: 372308 - DNA, 15 bp, Homo sapiens
gcttcacggaggagc

SEQ ID NO: 372309 - DNA, 15 bp, Homo sapiens
ggcttcacggaggag

SEQ ID NO: 372310 - DNA, 15 bp, Homo sapiens
gggcttcacggagga

SEQ ID NO: 372311 - DNA, 15 bp, Homo sapiens
ggggcttcacggagg

SEQ ID NO: 372312 - DNA, 15 bp, Homo sapiens
tggggcttcacggag

SEQ ID NO: 372313 - DNA, 15 bp, Homo sapiens
gtggggcttcacgga

SEQ ID NO: 372314 - DNA, 15 bp, Homo sapiens
ggtggggcttcacgg

SEQ ID NO: 372315 - DNA, 15 bp, Homo sapiens
tggtggggcttcacg

SEQ ID NO: 372316 - DNA, 15 bp, Homo sapiens
ctggtggggcttcac

SEQ ID NO: 372317 - DNA, 15 bp, Homo sapiens
cctggtggggcttca

SEQ ID NO: 372318 - DNA, 15 bp, Homo sapiens
tcctggtggggcttc

SEQ ID NO: 372319 - DNA, 15 bp, Homo sapiens
ttcctggtggggctt

SEQ ID NO: 372320 - DNA, 15 bp, Homo sapiens
cttcctggtggggct

SEQ ID NO: 372321 - DNA, 15 bp, Homo sapiens
tcttcctggtggggc

SEQ ID NO: 372322 - DNA, 15 bp, Homo sapiens
ttcttcctggtgggg

SEQ ID NO: 372323 - DNA, 15 bp, Homo sapiens
tttcttcctggtggg

SEQ ID NO: 372324 - DNA, 15 bp, Homo sapiens
ttttcttcctggtgg

SEQ ID NO: 372325 - DNA, 15 bp, Homo sapiens
cttttcttcctggtg

SEQ ID NO: 372326 - DNA, 15 bp, Homo sapiens
ccttttcttcctggt

SEQ ID NO: 372327 - DNA, 15 bp, Homo sapiens
gccttttcttcctgg

SEQ ID NO: 372328 - DNA, 15 bp, Homo sapiens
cgccttttcttcctg

SEQ ID NO: 372329 - DNA, 15 bp, Homo sapiens
ccgccttttcttcct

SEQ ID NO: 372330 - DNA, 15 bp, Homo sapiens
cccgccttttcttcc

SEQ ID NO: 372331 - DNA, 15 bp, Homo sapiens
ccccgccttttcttc

SEQ ID NO: 372332 - DNA, 15 bp, Homo sapiens
tccccgccttttctt

SEQ ID NO: 372333 - DNA, 15 bp, Homo sapiens
ctccccgccttttct

SEQ ID NO: 372334 - DNA, 15 bp, Homo sapiens
tctccccgccttttc

SEQ ID NO: 372335 - DNA, 15 bp, Homo sapiens
ctctccccgcctttt

SEQ ID NO: 372336 - DNA, 15 bp, Homo sapiens
gctctccccgccttt

SEQ ID NO: 372337 - DNA, 15 bp, Homo sapiens
agctctccccgcctt

SEQ ID NO: 372338 - DNA, 15 bp, Homo sapiens
cagctctccccgcct

SEQ ID NO: 372339 - DNA, 15 bp, Homo sapiens
gcagctctccccgcc

SEQ ID NO: 372340 - DNA, 15 bp, Homo sapiens
agcagctctccccgc

SEQ ID NO: 372341 - DNA, 15 bp, Homo sapiens
aagcagctctccccg

SEQ ID NO: 372342 - DNA, 15 bp, Homo sapiens
aaagcagctctcccc

SEQ ID NO: 372343 - DNA, 15 bp, Homo sapiens
aaaagcagctctccc

SEQ ID NO: 372344 - DNA, 15 bp, Homo sapiens
caaaagcagctctcc

SEQ ID NO: 372345 - DNA, 15 bp, Homo sapiens
gcaaaagcagctctc

SEQ ID NO: 372346 - DNA, 15 bp, Homo sapiens
agcaaaagcagctct

SEQ ID NO: 372347 - DNA, 15 bp, Homo sapiens
cagcaaaagcagctc

SEQ ID NO: 372348 - DNA, 15 bp, Homo sapiens
ccagcaaaagcagct

SEQ ID NO: 372349 - DNA, 15 bp, Homo sapiens
cccagcaaaagcagc

SEQ ID NO: 372350 - DNA, 15 bp, Homo sapiens
ccccagcaaaagcag

SEQ ID NO: 372351 - DNA, 15 bp, Homo sapiens
cccccagcaaaagca

SEQ ID NO: 372352 - DNA, 15 bp, Homo sapiens
ccccccagcaaaagc

SEQ ID NO: 372353 - DNA, 15 bp, Homo sapiens
accccccagcaaaag

SEQ ID NO: 372354 - DNA, 15 bp, Homo sapiens
aaccccccagcaaaa

SEQ ID NO: 372355 - DNA, 15 bp, Homo sapiens
aaaccccccagcaaa

SEQ ID NO: 372356 - DNA, 15 bp, Homo sapiens
caaaccccccagcaa

SEQ ID NO: 372357 - DNA, 15 bp, Homo sapiens
tcaaaccccccagca

SEQ ID NO: 372358 - DNA, 15 bp, Homo sapiens
atcaaaccccccagc

SEQ ID NO: 372359 - DNA, 15 bp, Homo sapiens
gatcaaaccccccag

SEQ ID NO: 372360 - DNA, 15 bp, Homo sapiens
tgatcaaacccccca

SEQ ID NO: 372361 - DNA, 15 bp, Homo sapiens
ctgatcaaacccccc

SEQ ID NO: 372362 - DNA, 15 bp, Homo sapiens
tctgatcaaaccccc

SEQ ID NO: 372363 - DNA, 15 bp, Homo sapiens
ctctgatcaaacccc

SEQ ID NO: 372364 - DNA, 15 bp, Homo sapiens
gctctgatcaaaccc

SEQ ID NO: 372365 - DNA, 15 bp, Homo sapiens
tgctctgatcaaacc

SEQ ID NO: 372366 - DNA, 15 bp, Homo sapiens
ctgctctgatcaaac

SEQ ID NO: 372367 - DNA, 15 bp, Homo sapiens
tctgctctgatcaaa

SEQ ID NO: 372368 - DNA, 15 bp, Homo sapiens
ttctgctctgatcaa

SEQ ID NO: 372369 - DNA, 15 bp, Homo sapiens
tttctgctctgatca

SEQ ID NO: 372370 - DNA, 15 bp, Homo sapiens
ctttctgctctgatc

SEQ ID NO: 372371 - DNA, 15 bp, Homo sapiens
cctttctgctctgat

SEQ ID NO: 372372 - DNA, 15 bp, Homo sapiens
ccctttctgctctga

SEQ ID NO: 372373 - DNA, 15 bp, Homo sapiens
tccctttctgctctg

SEQ ID NO: 372374 - DNA, 15 bp, Homo sapiens
ttccctttctgctct

SEQ ID NO: 372375 - DNA, 15 bp, Homo sapiens
cttccctttctgctc

SEQ ID NO: 372376 - DNA, 15 bp, Homo sapiens
tcttccctttctgct

SEQ ID NO: 372377 - DNA, 15 bp, Homo sapiens
atcttccctttctgc

SEQ ID NO: 372378 - DNA, 15 bp, Homo sapiens
gatcttccctttctg

SEQ ID NO: 372379 - DNA, 15 bp, Homo sapiens
agatcttccctttct

SEQ ID NO: 372380 - DNA, 15 bp, Homo sapiens
cagatcttccctttc

SEQ ID NO: 372381 - DNA, 15 bp, Homo sapiens
ccagatcttcccttt

SEQ ID NO: 372382 - DNA, 15 bp, Homo sapiens
accagatcttccctt

SEQ ID NO: 372383 - DNA, 15 bp, Homo sapiens
gaccagatcttccct

SEQ ID NO: 372384 - DNA, 15 bp, Homo sapiens
agaccagatcttccc

SEQ ID NO: 372385 - DNA, 15 bp, Homo sapiens
gagaccagatcttcc

SEQ ID NO: 372386 - DNA, 15 bp, Homo sapiens
tgagaccagatcttc

SEQ ID NO: 372387 - DNA, 15 bp, Homo sapiens
ttgagaccagatctt

SEQ ID NO: 372388 - DNA, 15 bp, Homo sapiens
attgagaccagatct

SEQ ID NO: 372389 - DNA, 15 bp, Homo sapiens
aattgagaccagatc

SEQ ID NO: 372390 - DNA, 15 bp, Homo sapiens
gaattgagaccagat

SEQ ID NO: 372391 - DNA, 15 bp, Homo sapiens
ggaattgagaccaga

SEQ ID NO: 372392 - DNA, 15 bp, Homo sapiens
tggaattgagaccag

SEQ ID NO: 372393 - DNA, 15 bp, Homo sapiens
ttggaattgagacca

SEQ ID NO: 372394 - DNA, 15 bp, Homo sapiens
attggaattgagacc

SEQ ID NO: 372395 - DNA, 15 bp, Homo sapiens
aattggaattgagac

SEQ ID NO: 372396 - DNA, 15 bp, Homo sapiens
aaattggaattgaga

SEQ ID NO: 372397 - DNA, 15 bp, Homo sapiens
gaaattggaattgag

SEQ ID NO: 372398 - DNA, 15 bp, Homo sapiens
tgaaattggaattga

SEQ ID NO: 372399 - DNA, 15 bp, Homo sapiens
atgaaattggaattg

SEQ ID NO: 372400 - DNA, 15 bp, Homo sapiens
gatgaaattggaatt

SEQ ID NO: 372401 - DNA, 15 bp, Homo sapiens
agatgaaattggaat

SEQ ID NO: 372402 - DNA, 15 bp, Homo sapiens
aagatgaaattggaa

SEQ ID NO: 372403 - DNA, 15 bp, Homo sapiens
caagatgaaattgga

SEQ ID NO: 372404 - DNA, 15 bp, Homo sapiens
gcaagatgaaattgg

SEQ ID NO: 372405 - DNA, 15 bp, Homo sapiens
tgcaagatgaaattg

SEQ ID NO: 372406 - DNA, 15 bp, Homo sapiens
ttgcaagatgaaatt

SEQ ID NO: 372407 - DNA, 15 bp, Homo sapiens
tttgcaagatgaaat

SEQ ID NO: 372408 - DNA, 15 bp, Homo sapiens
ctttgcaagatgaaa

SEQ ID NO: 372409 - DNA, 15 bp, Homo sapiens
actttgcaagatgaa

SEQ ID NO: 372410 - DNA, 15 bp, Homo sapiens
gactttgcaagatga

SEQ ID NO: 372411 - DNA, 15 bp, Homo sapiens
cgactttgcaagatg

SEQ ID NO: 372412 - DNA, 15 bp, Homo sapiens
ccgactttgcaagat

SEQ ID NO: 372413 - DNA, 15 bp, Homo sapiens
cccgactttgcaaga

SEQ ID NO: 372414 - DNA, 15 bp, Homo sapiens
tcccgactttgcaag

SEQ ID NO: 372415 - DNA, 15 bp, Homo sapiens
gtcccgactttgcaa

SEQ ID NO: 372416 - DNA, 15 bp, Homo sapiens
agtcccgactttgca

SEQ ID NO: 372417 - DNA, 15 bp, Homo sapiens
aagtcccgactttgc

SEQ ID NO: 372418 - DNA, 15 bp, Homo sapiens
aaagtcccgactttg

SEQ ID NO: 372419 - DNA, 15 bp, Homo sapiens
gaaagtcccgacttt

SEQ ID NO: 372420 - DNA, 15 bp, Homo sapiens
agaaagtcccgactt

SEQ ID NO: 372421 - DNA, 15 bp, Homo sapiens
aagaaagtcccgact

SEQ ID NO: 372422 - DNA, 15 bp, Homo sapiens
aaagaaagtcccgac

SEQ ID NO: 372423 - DNA, 15 bp, Homo sapiens
gaaagaaagtcccga

SEQ ID NO: 372424 - DNA, 15 bp, Homo sapiens
tgaaagaaagtcccg

SEQ ID NO: 372425 - DNA, 15 bp, Homo sapiens
ctgaaagaaagtccc

SEQ ID NO: 372426 - DNA, 15 bp, Homo sapiens
gctgaaagaaagtcc

SEQ ID NO: 372427 - DNA, 15 bp, Homo sapiens
ggctgaaagaaagtc

SEQ ID NO: 372428 - DNA, 15 bp, Homo sapiens
tggctgaaagaaagt

SEQ ID NO: 372429 - DNA, 15 bp, Homo sapiens
ctggctgaaagaaag

SEQ ID NO: 372430 - DNA, 15 bp, Homo sapiens
tctggctgaaagaaa

SEQ ID NO: 372431 - DNA, 15 bp, Homo sapiens
ttctggctgaaagaa

SEQ ID NO: 372432 - DNA, 15 bp, Homo sapiens
cttctggctgaaaga

SEQ ID NO: 372433 - DNA, 15 bp, Homo sapiens
tcttctggctgaaag

SEQ ID NO: 372434 - DNA, 15 bp, Homo sapiens
gtcttctggctgaaa

SEQ ID NO: 372435 - DNA, 15 bp, Homo sapiens
tgtcttctggctgaa

SEQ ID NO: 372436 - DNA, 15 bp, Homo sapiens
ttgtcttctggctga

SEQ ID NO: 372437 - DNA, 15 bp, Homo sapiens
gttgtcttctggctg

SEQ ID NO: 372438 - DNA, 15 bp, Homo sapiens
agttgtcttctggct

SEQ ID NO: 372439 - DNA, 15 bp, Homo sapiens
gagttgtcttctggc

SEQ ID NO: 372440 - DNA, 15 bp, Homo sapiens
tgagttgtcttctgg

SEQ ID NO: 372441 - DNA, 15 bp, Homo sapiens
ctgagttgtcttctg

SEQ ID NO: 372442 - DNA, 15 bp, Homo sapiens
tctgagttgtcttct

SEQ ID NO: 372443 - DNA, 15 bp, Homo sapiens
atctgagttgtcttc

SEQ ID NO: 372444 - DNA, 15 bp, Homo sapiens
tatctgagttgtctt

SEQ ID NO: 372445 - DNA, 15 bp, Homo sapiens
ttatctgagttgtct

SEQ ID NO: 372446 - DNA, 15 bp, Homo sapiens
gttatctgagttgtc

SEQ ID NO: 372447 - DNA, 15 bp, Homo sapiens
ggttatctgagttgt

SEQ ID NO: 372448 - DNA, 15 bp, Homo sapiens
tggttatctgagttg

SEQ ID NO: 372449 - DNA, 15 bp, Homo sapiens
ctggttatctgagtt

SEQ ID NO: 372450 - DNA, 15 bp, Homo sapiens
cctggttatctgagt

SEQ ID NO: 372451 - DNA, 15 bp, Homo sapiens
gcctggttatctgag

SEQ ID NO: 372452 - DNA, 15 bp, Homo sapiens
ggcctggttatctga

SEQ ID NO: 372453 - DNA, 15 bp, Homo sapiens
tggcctggttatctg

SEQ ID NO: 372454 - DNA, 15 bp, Homo sapiens
ctggcctggttatct

SEQ ID NO: 372455 - DNA, 15 bp, Homo sapiens
gctggcctggttatc

SEQ ID NO: 372456 - DNA, 15 bp, Homo sapiens
cgctggcctggttat

SEQ ID NO: 372457 - DNA, 15 bp, Homo sapiens
tcgctggcctggtta

SEQ ID NO: 372458 - DNA, 15 bp, Homo sapiens
gtcgctggcctggtt

SEQ ID NO: 372459 - DNA, 15 bp, Homo sapiens
agtcgctggcctggt

SEQ ID NO: 372460 - DNA, 15 bp, Homo sapiens
cagtcgctggcctgg

SEQ ID NO: 372461 - DNA, 15 bp, Homo sapiens
acagtcgctggcctg

SEQ ID NO: 372462 - DNA, 15 bp, Homo sapiens
cacagtcgctggcct

SEQ ID NO: 372463 - DNA, 15 bp, Homo sapiens
acacagtcgctggcc

SEQ ID NO: 372464 - DNA, 15 bp, Homo sapiens
cacacagtcgctggc

SEQ ID NO: 372465 - DNA, 15 bp, Homo sapiens
gcacacagtcgctgg

SEQ ID NO: 372466 - DNA, 15 bp, Homo sapiens
agcacacagtcgctg

SEQ ID NO: 372467 - DNA, 15 bp, Homo sapiens
gagcacacagtcgct

SEQ ID NO: 372468 - DNA, 15 bp, Homo sapiens
tgagcacacagtcgc

SEQ ID NO: 372469 - DNA, 15 bp, Homo sapiens
atgagcacacagtcg

SEQ ID NO: 372470 - DNA, 15 bp, Homo sapiens
aatgagcacacagtc

SEQ ID NO: 372471 - DNA, 15 bp, Homo sapiens
aaatgagcacacagt

SEQ ID NO: 372472 - DNA, 15 bp, Homo sapiens
gaaatgagcacacag

SEQ ID NO: 372473 - DNA, 15 bp, Homo sapiens
tgaaatgagcacaca

SEQ ID NO: 372474 - DNA, 15 bp, Homo sapiens
ctgaaatgagcacac

SEQ ID NO: 372475 - DNA, 15 bp, Homo sapiens
actgaaatgagcaca

SEQ ID NO: 372476 - DNA, 15 bp, Homo sapiens
tactgaaatgagcac

SEQ ID NO: 372477 - DNA, 15 bp, Homo sapiens
atactgaaatgagca

SEQ ID NO: 372478 - DNA, 15 bp, Homo sapiens
aatactgaaatgagc

SEQ ID NO: 372479 - DNA, 15 bp, Homo sapiens
caatactgaaatgag

SEQ ID NO: 372480 - DNA, 15 bp, Homo sapiens
gcaatactgaaatga

SEQ ID NO: 372481 - DNA, 15 bp, Homo sapiens
agcaatactgaaatg

SEQ ID NO: 372482 - DNA, 15 bp, Homo sapiens
aagcaatactgaaat

SEQ ID NO: 372483 - DNA, 15 bp, Homo sapiens
aaagcaatactgaaa

SEQ ID NO: 372484 - DNA, 15 bp, Homo sapiens
gaaagcaatactgaa

SEQ ID NO: 372485 - DNA, 15 bp, Homo sapiens
agaaagcaatactga

SEQ ID NO: 372486 - DNA, 15 bp, Homo sapiens
aagaaagcaatactg

SEQ ID NO: 372487 - DNA, 15 bp, Homo sapiens
taagaaagcaatact

SEQ ID NO: 372488 - DNA, 15 bp, Homo sapiens
gtaagaaagcaatac

SEQ ID NO: 372489 - DNA, 15 bp, Homo sapiens
cgtaagaaagcaata

SEQ ID NO: 372490 - DNA, 15 bp, Homo sapiens
acgtaagaaagcaat

SEQ ID NO: 372491 - DNA, 15 bp, Homo sapiens
aacgtaagaaagcaa

SEQ ID NO: 372492 - DNA, 15 bp, Homo sapiens
aaacgtaagaaagca

SEQ ID NO: 372493 - DNA, 15 bp, Homo sapiens
aaaacgtaagaaagc

SEQ ID NO: 372494 - DNA, 15 bp, Homo sapiens
caaaacgtaagaaag

SEQ ID NO: 372495 - DNA, 15 bp, Homo sapiens
tcaaaacgtaagaaa

SEQ ID NO: 372496 - DNA, 15 bp, Homo sapiens
atcaaaacgtaagaa

SEQ ID NO: 372497 - DNA, 15 bp, Homo sapiens
gatcaaaacgtaaga

SEQ ID NO: 372498 - DNA, 15 bp, Homo sapiens
agatcaaaacgtaag

SEQ ID NO: 372499 - DNA, 15 bp, Homo sapiens
cagatcaaaacgtaa

SEQ ID NO: 372500 - DNA, 15 bp, Homo sapiens
gcagatcaaaacgta

SEQ ID NO: 372501 - DNA, 15 bp, Homo sapiens
cgcagatcaaaacgt

SEQ ID NO: 372502 - DNA, 15 bp, Homo sapiens
tcgcagatcaaaacg

SEQ ID NO: 372503 - DNA, 15 bp, Homo sapiens
gtcgcagatcaaaac

SEQ ID NO: 372504 - DNA, 15 bp, Homo sapiens
agtcgcagatcaaaa

SEQ ID NO: 372505 - DNA, 15 bp, Homo sapiens
cagtcgcagatcaaa

SEQ ID NO: 372506 - DNA, 15 bp, Homo sapiens
acagtcgcagatcaa

SEQ ID NO: 372507 - DNA, 15 bp, Homo sapiens
gacagtcgcagatca

SEQ ID NO: 372508 - DNA, 15 bp, Homo sapiens
tgacagtcgcagatc

SEQ ID NO: 372509 - DNA, 15 bp, Homo sapiens
gtgacagtcgcagat

SEQ ID NO: 372510 - DNA, 15 bp, Homo sapiens
agtgacagtcgcaga

SEQ ID NO: 372511 - DNA, 15 bp, Homo sapiens
gagtgacagtcgcag

SEQ ID NO: 372512 - DNA, 15 bp, Homo sapiens
tgagtgacagtcgca

SEQ ID NO: 372513 - DNA, 15 bp, Homo sapiens
ttgagtgacagtcgc

SEQ ID NO: 372514 - DNA, 15 bp, Homo sapiens
gttgagtgacagtcg

SEQ ID NO: 372515 - DNA, 15 bp, Homo sapiens
tgttgagtgacagtc

SEQ ID NO: 372516 - DNA, 15 bp, Homo sapiens
ctgttgagtgacagt

SEQ ID NO: 372517 - DNA, 15 bp, Homo sapiens
cctgttgagtgacag

SEQ ID NO: 372518 - DNA, 15 bp, Homo sapiens
tcctgttgagtgaca

SEQ ID NO: 372519 - DNA, 15 bp, Homo sapiens
ttcctgttgagtgac

SEQ ID NO: 372520 - DNA, 15 bp, Homo sapiens
gttcctgttgagtga

SEQ ID NO: 372521 - DNA, 15 bp, Homo sapiens
tgttcctgttgagtg

SEQ ID NO: 372522 - DNA, 15 bp, Homo sapiens
ttgttcctgttgagt

SEQ ID NO: 372523 - DNA, 15 bp, Homo sapiens
tttgttcctgttgag

SEQ ID NO: 372524 - DNA, 15 bp, Homo sapiens
ttttgttcctgttga

SEQ ID NO: 372525 - DNA, 15 bp, Homo sapiens
tttttgttcctgttg

SEQ ID NO: 372526 - DNA, 15 bp, Homo sapiens
gtttttgttcctgtt

SEQ ID NO: 372527 - DNA, 15 bp, Homo sapiens
tgtttttgttcctgt

SEQ ID NO: 372528 - DNA, 15 bp, Homo sapiens
ttgtttttgttcctg

SEQ ID NO: 372529 - DNA, 15 bp, Homo sapiens
attgtttttgttcct

SEQ ID NO: 372530 - DNA, 15 bp, Homo sapiens
tattgtttttgttcc

SEQ ID NO: 372531 - DNA, 15 bp, Homo sapiens
ttattgtttttgttc

SEQ ID NO: 372532 - DNA, 15 bp, Homo sapiens
cttattgtttttgtt

SEQ ID NO: 372533 - DNA, 15 bp, Homo sapiens
tcttattgtttttgt

SEQ ID NO: 372534 - DNA, 15 bp, Homo sapiens
gtcttattgtttttg

SEQ ID NO: 372535 - DNA, 15 bp, Homo sapiens
cgtcttattgttttt

SEQ ID NO: 372536 - DNA, 15 bp, Homo sapiens
gcgtcttattgtttt

SEQ ID NO: 372537 - DNA, 15 bp, Homo sapiens
ggcgtcttattgttt

SEQ ID NO: 372538 - DNA, 15 bp, Homo sapiens
tggcgtcttattgtt

SEQ ID NO: 372539 - DNA, 15 bp, Homo sapiens
ttggcgtcttattgt

SEQ ID NO: 372540 - DNA, 15 bp, Homo sapiens
cttggcgtcttattg

SEQ ID NO: 372541 - DNA, 15 bp, Homo sapiens
tcttggcgtcttatt

SEQ ID NO: 372542 - DNA, 15 bp, Homo sapiens
atcttggcgtcttat

SEQ ID NO: 372543 - DNA, 15 bp, Homo sapiens
tatcttggcgtctta

SEQ ID NO: 372544 - DNA, 15 bp, Homo sapiens
atatcttggcgtctt

SEQ ID NO: 372545 - DNA, 15 bp, Homo sapiens
catatcttggcgtct

SEQ ID NO: 372546 - DNA, 15 bp, Homo sapiens
tcatatcttggcgtc

SEQ ID NO: 372547 - DNA, 15 bp, Homo sapiens
gtcatatcttggcgt

SEQ ID NO: 372548 - DNA, 15 bp, Homo sapiens
agtcatatcttggcg

SEQ ID NO: 372549 - DNA, 15 bp, Homo sapiens
cagtcatatcttggc

SEQ ID NO: 372550 - DNA, 15 bp, Homo sapiens
acagtcatatcttgg

SEQ ID NO: 372551 - DNA, 15 bp, Homo sapiens
cacagtcatatcttg

SEQ ID NO: 372552 - DNA, 15 bp, Homo sapiens
gcacagtcatatctt

SEQ ID NO: 372553 - DNA, 15 bp, Homo sapiens
ggcacagtcatatct

SEQ ID NO: 372554 - DNA, 15 bp, Homo sapiens
cggcacagtcatatc

SEQ ID NO: 372555 - DNA, 15 bp, Homo sapiens
acggcacagtcatat

SEQ ID NO: 372556 - DNA, 15 bp, Homo sapiens
aacggcacagtcata

SEQ ID NO: 372557 - DNA, 15 bp, Homo sapiens
caacggcacagtcat

SEQ ID NO: 372558 - DNA, 15 bp, Homo sapiens
ccaacggcacagtca

SEQ ID NO: 372559 - DNA, 15 bp, Homo sapiens
gccaacggcacagtc

SEQ ID NO: 372560 - DNA, 15 bp, Homo sapiens
tgccaacggcacagt

SEQ ID NO: 372561 - DNA, 15 bp, Homo sapiens
ctgccaacggcacag

SEQ ID NO: 372562 - DNA, 15 bp, Homo sapiens
tctgccaacggcaca

SEQ ID NO: 372563 - DNA, 15 bp, Homo sapiens
atctgccaacggcac

SEQ ID NO: 372564 - DNA, 15 bp, Homo sapiens
aatctgccaacggca

SEQ ID NO: 372565 - DNA, 15 bp, Homo sapiens
taatctgccaacggc

SEQ ID NO: 372566 - DNA, 15 bp, Homo sapiens
ctaatctgccaacgg

SEQ ID NO: 372567 - DNA, 15 bp, Homo sapiens
gctaatctgccaacg

SEQ ID NO: 372568 - DNA, 15 bp, Homo sapiens
agctaatctgccaac

SEQ ID NO: 372569 - DNA, 15 bp, Homo sapiens
cagctaatctgccaa

SEQ ID NO: 372570 - DNA, 15 bp, Homo sapiens
acagctaatctgcca

SEQ ID NO: 372571 - DNA, 15 bp, Homo sapiens
gacagctaatctgcc

SEQ ID NO: 372572 - DNA, 15 bp, Homo sapiens
agacagctaatctgc

SEQ ID NO: 372573 - DNA, 15 bp, Homo sapiens
cagacagctaatctg

SEQ ID NO: 372574 - DNA, 15 bp, Homo sapiens
gcagacagctaatct

SEQ ID NO: 372575 - DNA, 15 bp, Homo sapiens
tgcagacagctaatc

SEQ ID NO: 372576 - DNA, 15 bp, Homo sapiens
atgcagacagctaat

SEQ ID NO: 372577 - DNA, 15 bp, Homo sapiens
aatgcagacagctaa

SEQ ID NO: 372578 - DNA, 15 bp, Homo sapiens
aaatgcagacagcta

SEQ ID NO: 372579 - DNA, 15 bp, Homo sapiens
aaaatgcagacagct

SEQ ID NO: 372580 - DNA, 15 bp, Homo sapiens
gaaaatgcagacagc

SEQ ID NO: 372581 - DNA, 15 bp, Homo sapiens
agaaaatgcagacag

SEQ ID NO: 372582 - DNA, 15 bp, Homo sapiens
cagaaaatgcagaca

SEQ ID NO: 372583 - DNA, 15 bp, Homo sapiens
ccagaaaatgcagac

SEQ ID NO: 372584 - DNA, 15 bp, Homo sapiens
cccagaaaatgcaga

SEQ ID NO: 372585 - DNA, 15 bp, Homo sapiens
ccccagaaaatgcag

SEQ ID NO: 372586 - DNA, 15 bp, Homo sapiens
accccagaaaatgca

SEQ ID NO: 372587 - DNA, 15 bp, Homo sapiens
caccccagaaaatgc

SEQ ID NO: 372588 - DNA, 15 bp, Homo sapiens
ccaccccagaaaatg

SEQ ID NO: 372589 - DNA, 15 bp, Homo sapiens
gccaccccagaaaat

SEQ ID NO: 372590 - DNA, 15 bp, Homo sapiens
agccaccccagaaaa

SEQ ID NO: 372591 - DNA, 15 bp, Homo sapiens
gagccaccccagaaa

SEQ ID NO: 372592 - DNA, 15 bp, Homo sapiens
tgagccaccccagaa

SEQ ID NO: 372593 - DNA, 15 bp, Homo sapiens
gtgagccaccccaga

SEQ ID NO: 372594 - DNA, 15 bp, Homo sapiens
agtgagccaccccag

SEQ ID NO: 372595 - DNA, 15 bp, Homo sapiens
gagtgagccacccca

SEQ ID NO: 372596 - DNA, 15 bp, Homo sapiens
cgagtgagccacccc

SEQ ID NO: 372597 - DNA, 15 bp, Homo sapiens
ccgagtgagccaccc

SEQ ID NO: 372598 - DNA, 15 bp, Homo sapiens
tccgagtgagccacc

SEQ ID NO: 372599 - DNA, 15 bp, Homo sapiens
ctccgagtgagccac

SEQ ID NO: 372600 - DNA, 15 bp, Homo sapiens
cctccgagtgagcca

SEQ ID NO: 372601 - DNA, 15 bp, Homo sapiens
acctccgagtgagcc

SEQ ID NO: 372602 - DNA, 15 bp, Homo sapiens
aacctccgagtgagc

SEQ ID NO: 372603 - DNA, 15 bp, Homo sapiens
taacctccgagtgag

SEQ ID NO: 372604 - DNA, 15 bp, Homo sapiens
ttaacctccgagtga

SEQ ID NO: 372605 - DNA, 15 bp, Homo sapiens
tttaacctccgagtg

SEQ ID NO: 372606 - DNA, 15 bp, Homo sapiens
atttaacctccgagt

SEQ ID NO: 372607 - DNA, 15 bp, Homo sapiens
catttaacctccgag

SEQ ID NO: 372608 - DNA, 15 bp, Homo sapiens
tcatttaacctccga

SEQ ID NO: 372609 - DNA, 15 bp, Homo sapiens
atcatttaacctccg

SEQ ID NO: 372610 - DNA, 15 bp, Homo sapiens
aatcatttaacctcc

SEQ ID NO: 372611 - DNA, 15 bp, Homo sapiens
caatcatttaacctc

SEQ ID NO: 372612 - DNA, 15 bp, Homo sapiens
acaatcatttaacct

SEQ ID NO: 372613 - DNA, 15 bp, Homo sapiens
gacaatcatttaacc

SEQ ID NO: 372614 - DNA, 15 bp, Homo sapiens
ggacaatcatttaac

SEQ ID NO: 372615 - DNA, 15 bp, Homo sapiens
gggacaatcatttaa

SEQ ID NO: 372616 - DNA, 15 bp, Homo sapiens
agggacaatcattta

SEQ ID NO: 372617 - DNA, 15 bp, Homo sapiens
cagggacaatcattt

SEQ ID NO: 372618 - DNA, 15 bp, Homo sapiens
acagggacaatcatt

SEQ ID NO: 372619 - DNA, 15 bp, Homo sapiens
gacagggacaatcat

SEQ ID NO: 372620 - DNA, 15 bp, Homo sapiens
ggacagggacaatca

SEQ ID NO: 372621 - DNA, 15 bp, Homo sapiens
gggacagggacaatc

SEQ ID NO: 372622 - DNA, 15 bp, Homo sapiens
ggggacagggacaat

SEQ ID NO: 372623 - DNA, 15 bp, Homo sapiens
aggggacagggacaa

SEQ ID NO: 372624 - DNA, 15 bp, Homo sapiens
caggggacagggaca

SEQ ID NO: 372625 - DNA, 15 bp, Homo sapiens
acaggggacagggac

SEQ ID NO: 372626 - DNA, 15 bp, Homo sapiens
gacaggggacaggga

SEQ ID NO: 372627 - DNA, 15 bp, Homo sapiens
ggacaggggacaggg

SEQ ID NO: 372628 - DNA, 15 bp, Homo sapiens
gggacaggggacagg

SEQ ID NO: 372629 - DNA, 15 bp, Homo sapiens
tgggacaggggacag

SEQ ID NO: 372630 - DNA, 15 bp, Homo sapiens
gtgggacaggggaca

SEQ ID NO: 372631 - DNA, 15 bp, Homo sapiens
ggtgggacaggggac

SEQ ID NO: 372632 - DNA, 15 bp, Homo sapiens
aggtgggacagggga

SEQ ID NO: 372633 - DNA, 15 bp, Homo sapiens
aaggtgggacagggg

SEQ ID NO: 372634 - DNA, 15 bp, Homo sapiens
gaaggtgggacaggg

SEQ ID NO: 372635 - DNA, 15 bp, Homo sapiens
ggaaggtgggacagg

SEQ ID NO: 372636 - DNA, 15 bp, Homo sapiens
tggaaggtgggacag

SEQ ID NO: 372637 - DNA, 15 bp, Homo sapiens
ctggaaggtgggaca

SEQ ID NO: 372638 - DNA, 15 bp, Homo sapiens
actggaaggtgggac

SEQ ID NO: 372639 - DNA, 15 bp, Homo sapiens
gactggaaggtggga

SEQ ID NO: 372640 - DNA, 15 bp, Homo sapiens
tgactggaaggtggg

SEQ ID NO: 372641 - DNA, 15 bp, Homo sapiens
gtgactggaaggtgg

SEQ ID NO: 372642 - DNA, 15 bp, Homo sapiens
ggtgactggaaggtg

SEQ ID NO: 372643 - DNA, 15 bp, Homo sapiens
aggtgactggaaggt

SEQ ID NO: 372644 - DNA, 15 bp, Homo sapiens
gaggtgactggaagg

SEQ ID NO: 372645 - DNA, 15 bp, Homo sapiens
tgaggtgactggaag

SEQ ID NO: 372646 - DNA, 15 bp, Homo sapiens
atgaggtgactggaa

SEQ ID NO: 372647 - DNA, 15 bp, Homo sapiens
catgaggtgactgga

SEQ ID NO: 372648 - DNA, 15 bp, Homo sapiens
tcatgaggtgactgg

SEQ ID NO: 372649 - DNA, 15 bp, Homo sapiens
ttcatgaggtgactg

SEQ ID NO: 372650 - DNA, 15 bp, Homo sapiens
cttcatgaggtgact

SEQ ID NO: 372651 - DNA, 15 bp, Homo sapiens
gcttcatgaggtgac

SEQ ID NO: 372652 - DNA, 15 bp, Homo sapiens
agcttcatgaggtga

SEQ ID NO: 372653 - DNA, 15 bp, Homo sapiens
cagcttcatgaggtg

SEQ ID NO: 372654 - DNA, 15 bp, Homo sapiens
acagcttcatgaggt

SEQ ID NO: 372655 - DNA, 15 bp, Homo sapiens
aacagcttcatgagg

SEQ ID NO: 372656 - DNA, 15 bp, Homo sapiens
taacagcttcatgag

SEQ ID NO: 372657 - DNA, 15 bp, Homo sapiens
ttaacagcttcatga

SEQ ID NO: 372658 - DNA, 15 bp, Homo sapiens
cttaacagcttcatg

SEQ ID NO: 372659 - DNA, 15 bp, Homo sapiens
acttaacagcttcat

SEQ ID NO: 372660 - DNA, 15 bp, Homo sapiens
cacttaacagcttca

SEQ ID NO: 372661 - DNA, 15 bp, Homo sapiens
acacttaacagcttc

SEQ ID NO: 372662 - DNA, 15 bp, Homo sapiens
gacacttaacagctt

SEQ ID NO: 372663 - DNA, 15 bp, Homo sapiens
agacacttaacagct

SEQ ID NO: 372664 - DNA, 15 bp, Homo sapiens
gagacacttaacagc

SEQ ID NO: 372665 - DNA, 15 bp, Homo sapiens
ggagacacttaacag

SEQ ID NO: 372666 - DNA, 15 bp, Homo sapiens
aggagacacttaaca

SEQ ID NO: 372667 - DNA, 15 bp, Homo sapiens
aaggagacacttaac

SEQ ID NO: 372668 - DNA, 15 bp, Homo sapiens
gaaggagacacttaa

SEQ ID NO: 372669 - DNA, 15 bp, Homo sapiens
ggaaggagacactta

SEQ ID NO: 372670 - DNA, 15 bp, Homo sapiens
gggaaggagacactt

SEQ ID NO: 372671 - DNA, 15 bp, Homo sapiens
ggggaaggagacact

SEQ ID NO: 372672 - DNA, 15 bp, Homo sapiens
aggggaaggagacac

SEQ ID NO: 372673 - DNA, 15 bp, Homo sapiens
caggggaaggagaca

SEQ ID NO: 372674 - DNA, 15 bp, Homo sapiens
gcaggggaaggagac

SEQ ID NO: 372675 - DNA, 15 bp, Homo sapiens
tgcaggggaaggaga

SEQ ID NO: 372676 - DNA, 15 bp, Homo sapiens
ctgcaggggaaggag

SEQ ID NO: 372677 - DNA, 15 bp, Homo sapiens
cctgcaggggaagga

SEQ ID NO: 372678 - DNA, 15 bp, Homo sapiens
gcctgcaggggaagg

SEQ ID NO: 372679 - DNA, 15 bp, Homo sapiens
agcctgcaggggaag

SEQ ID NO: 372680 - DNA, 15 bp, Homo sapiens
tagcctgcaggggaa

SEQ ID NO: 372681 - DNA, 15 bp, Homo sapiens
ttagcctgcagggga

SEQ ID NO: 372682 - DNA, 15 bp, Homo sapiens
cttagcctgcagggg

SEQ ID NO: 372683 - DNA, 15 bp, Homo sapiens
acttagcctgcaggg

SEQ ID NO: 372684 - DNA, 15 bp, Homo sapiens
cacttagcctgcagg

SEQ ID NO: 372685 - DNA, 15 bp, Homo sapiens
tcacttagcctgcag

SEQ ID NO: 372686 - DNA, 15 bp, Homo sapiens
ctcacttagcctgca

SEQ ID NO: 372687 - DNA, 15 bp, Homo sapiens
cctcacttagcctgc

SEQ ID NO: 372688 - DNA, 15 bp, Homo sapiens
tcctcacttagcctg

SEQ ID NO: 372689 - DNA, 15 bp, Homo sapiens
atcctcacttagcct

SEQ ID NO: 372690 - DNA, 15 bp, Homo sapiens
gatcctcacttagcc

SEQ ID NO: 372691 - DNA, 15 bp, Homo sapiens
tgatcctcacttagc

SEQ ID NO: 372692 - DNA, 15 bp, Homo sapiens
atgatcctcacttag

SEQ ID NO: 372693 - DNA, 15 bp, Homo sapiens
gatgatcctcactta

SEQ ID NO: 372694 - DNA, 15 bp, Homo sapiens
tgatgatcctcactt

SEQ ID NO: 372695 - DNA, 15 bp, Homo sapiens
ttgatgatcctcact

SEQ ID NO: 372696 - DNA, 15 bp, Homo sapiens
cttgatgatcctcac

SEQ ID NO: 372697 - DNA, 15 bp, Homo sapiens
tcttgatgatcctca

SEQ ID NO: 372698 - DNA, 15 bp, Homo sapiens
ctcttgatgatcctc

SEQ ID NO: 372699 - DNA, 15 bp, Homo sapiens
gctcttgatgatcct

SEQ ID NO: 372700 - DNA, 15 bp, Homo sapiens
agctcttgatgatcc

SEQ ID NO: 372701 - DNA, 15 bp, Homo sapiens
cagctcttgatgatc

SEQ ID NO: 372702 - DNA, 15 bp, Homo sapiens
ccagctcttgatgat

SEQ ID NO: 372703 - DNA, 15 bp, Homo sapiens
cccagctcttgatga

SEQ ID NO: 372704 - DNA, 15 bp, Homo sapiens
gcccagctcttgatg

SEQ ID NO: 372705 - DNA, 15 bp, Homo sapiens
ggcccagctcttgat

SEQ ID NO: 372706 - DNA, 15 bp, Homo sapiens
aggcccagctcttga

SEQ ID NO: 372707 - DNA, 15 bp, Homo sapiens
caggcccagctcttg

SEQ ID NO: 372708 - DNA, 15 bp, Homo sapiens
ccaggcccagctctt

SEQ ID NO: 372709 - DNA, 15 bp, Homo sapiens
cccaggcccagctct

SEQ ID NO: 372710 - DNA, 15 bp, Homo sapiens
ccccaggcccagctc

SEQ ID NO: 372711 - DNA, 15 bp, Homo sapiens
tccccaggcccagct

SEQ ID NO: 372712 - DNA, 15 bp, Homo sapiens
gtccccaggcccagc

SEQ ID NO: 372713 - DNA, 15 bp, Homo sapiens
ggtccccaggcccag

SEQ ID NO: 372714 - DNA, 15 bp, Homo sapiens
aggtccccaggccca

SEQ ID NO: 372715 - DNA, 15 bp, Homo sapiens
aaggtccccaggccc

SEQ ID NO: 372716 - DNA, 15 bp, Homo sapiens
caaggtccccaggcc

SEQ ID NO: 372717 - DNA, 15 bp, Homo sapiens
acaaggtccccaggc

SEQ ID NO: 372718 - DNA, 15 bp, Homo sapiens
gacaaggtccccagg

SEQ ID NO: 372719 - DNA, 15 bp, Homo sapiens
tgacaaggtccccag

SEQ ID NO: 372720 - DNA, 15 bp, Homo sapiens
ctgacaaggtcccca

SEQ ID NO: 372721 - DNA, 15 bp, Homo sapiens
gctgacaaggtcccc

SEQ ID NO: 372722 - DNA, 15 bp, Homo sapiens
ggctgacaaggtccc

SEQ ID NO: 372723 - DNA, 15 bp, Homo sapiens
aggctgacaaggtcc

SEQ ID NO: 372724 - DNA, 15 bp, Homo sapiens
gaggctgacaaggtc

SEQ ID NO: 372725 - DNA, 15 bp, Homo sapiens
tgaggctgacaaggt

SEQ ID NO: 372726 - DNA, 15 bp, Homo sapiens
gtgaggctgacaagg

SEQ ID NO: 372727 - DNA, 15 bp, Homo sapiens
agtgaggctgacaag

SEQ ID NO: 372728 - DNA, 15 bp, Homo sapiens
cagtgaggctgacaa

SEQ ID NO: 372729 - DNA, 15 bp, Homo sapiens
gcagtgaggctgaca

SEQ ID NO: 372730 - DNA, 15 bp, Homo sapiens
tgcagtgaggctgac

SEQ ID NO: 372731 - DNA, 15 bp, Homo sapiens
ctgcagtgaggctga

SEQ ID NO: 372732 - DNA, 15 bp, Homo sapiens
gctgcagtgaggctg

SEQ ID NO: 372733 - DNA, 15 bp, Homo sapiens
ggctgcagtgaggct

SEQ ID NO: 372734 - DNA, 15 bp, Homo sapiens
aggctgcagtgaggc

SEQ ID NO: 372735 - DNA, 15 bp, Homo sapiens
gaggctgcagtgagg

SEQ ID NO: 372736 - DNA, 15 bp, Homo sapiens
cagaggctgcagtga

SEQ ID NO: 372737 - DNA, 15 bp, Homo sapiens
tcagaggctgcagtg

SEQ ID NO: 372738 - DNA, 15 bp, Homo sapiens
ctcagaggctgcagt

SEQ ID NO: 372739 - DNA, 15 bp, Homo sapiens
gctcagaggctgcag

SEQ ID NO: 372740 - DNA, 15 bp, Homo sapiens
ggctcagaggctgca

SEQ ID NO: 372741 - DNA, 15 bp, Homo sapiens
tggctcagaggctgc

SEQ ID NO: 372742 - DNA, 15 bp, Homo sapiens
ctggctcagaggctg

SEQ ID NO: 372743 - DNA, 15 bp, Homo sapiens
gctggctcagaggct

SEQ ID NO: 372744 - DNA, 15 bp, Homo sapiens
ggctggctcagaggc

SEQ ID NO: 372745 - DNA, 15 bp, Homo sapiens
gggctggctcagagg

SEQ ID NO: 372746 - DNA, 15 bp, Homo sapiens
agggctggctcagag

SEQ ID NO: 372747 - DNA, 15 bp, Homo sapiens
cagggctggctcaga

SEQ ID NO: 372748 - DNA, 15 bp, Homo sapiens
gcagggctggctcag

SEQ ID NO: 372749 - DNA, 15 bp, Homo sapiens
ggcagggctggctca

SEQ ID NO: 372750 - DNA, 15 bp, Homo sapiens
gggcagggctggctc

SEQ ID NO: 372751 - DNA, 15 bp, Homo sapiens
ggggcagggctggct

SEQ ID NO: 372752 - DNA, 15 bp, Homo sapiens
tggggcagggctggc

SEQ ID NO: 372753 - DNA, 15 bp, Homo sapiens
gtggggcagggctgg

SEQ ID NO: 372754 - DNA, 15 bp, Homo sapiens
ggtggggcagggctg

SEQ ID NO: 372755 - DNA, 15 bp, Homo sapiens
gggtggggcagggct

SEQ ID NO: 372756 - DNA, 15 bp, Homo sapiens
ggggtggggcagggc

SEQ ID NO: 372757 - DNA, 15 bp, Homo sapiens
gggggtggggcaggg

SEQ ID NO: 372758 - DNA, 15 bp, Homo sapiens
agggggtggggcagg

SEQ ID NO: 372759 - DNA, 15 bp, Homo sapiens
gagggggtggggcag

SEQ ID NO: 372760 - DNA, 15 bp, Homo sapiens
tgagggggtggggca

SEQ ID NO: 372761 - DNA, 15 bp, Homo sapiens
atgagggggtggggc

SEQ ID NO: 372762 - DNA, 15 bp, Homo sapiens
catgagggggtgggg

SEQ ID NO: 372763 - DNA, 15 bp, Homo sapiens
tcatgagggggtggg

SEQ ID NO: 372764 - DNA, 15 bp, Homo sapiens
ttcatgagggggtgg

SEQ ID NO: 372765 - DNA, 15 bp, Homo sapiens
attcatgagggggtg

SEQ ID NO: 372766 - DNA, 15 bp, Homo sapiens
gattcatgagggggt

SEQ ID NO: 372767 - DNA, 15 bp, Homo sapiens
tgattcatgaggggg

SEQ ID NO: 372768 - DNA, 15 bp, Homo sapiens
ctgattcatgagggg

SEQ ID NO: 372769 - DNA, 15 bp, Homo sapiens
actgattcatgaggg

SEQ ID NO: 372770 - DNA, 15 bp, Homo sapiens
tactgattcatgagg

SEQ ID NO: 372771 - DNA, 15 bp, Homo sapiens
ttactgattcatgag

SEQ ID NO: 372772 - DNA, 15 bp, Homo sapiens
gttactgattcatga

SEQ ID NO: 372773 - DNA, 15 bp, Homo sapiens
ggttactgattcatg

SEQ ID NO: 372774 - DNA, 15 bp, Homo sapiens
tggttactgattcat

SEQ ID NO: 372775 - DNA, 15 bp, Homo sapiens
ttggttactgattca

SEQ ID NO: 372776 - DNA, 15 bp, Homo sapiens
cttggttactgattc

SEQ ID NO: 372777 - DNA, 15 bp, Homo sapiens
tcttggttactgatt

SEQ ID NO: 372778 - DNA, 15 bp, Homo sapiens
ctcttggttactgat

SEQ ID NO: 372779 - DNA, 15 bp, Homo sapiens
cctcttggttactga

SEQ ID NO: 372780 - DNA, 15 bp, Homo sapiens
ccctcttggttactg

SEQ ID NO: 372781 - DNA, 15 bp, Homo sapiens
tccctcttggttact

SEQ ID NO: 372782 - DNA, 15 bp, Homo sapiens
ttccctcttggttac

SEQ ID NO: 372783 - DNA, 15 bp, Homo sapiens
tttccctcttggtta

SEQ ID NO: 372784 - DNA, 15 bp, Homo sapiens
ttttccctcttggtt

SEQ ID NO: 372785 - DNA, 15 bp, Homo sapiens
attttccctcttggt

SEQ ID NO: 372786 - DNA, 15 bp, Homo sapiens
aattttccctcttgg

SEQ ID NO: 372787 - DNA, 15 bp, Homo sapiens
taattttccctcttg

SEQ ID NO: 372788 - DNA, 15 bp, Homo sapiens
ttaattttccctctt

SEQ ID NO: 372789 - DNA, 15 bp, Homo sapiens
tttaattttccctct

SEQ ID NO: 372790 - DNA, 15 bp, Homo sapiens
ttttaattttccctc

SEQ ID NO: 372791 - DNA, 15 bp, Homo sapiens
tttttaattttccct

SEQ ID NO: 372792 - DNA, 15 bp, Homo sapiens
ctttttaattttccc

SEQ ID NO: 372793 - DNA, 15 bp, Homo sapiens
actttttaattttcc

SEQ ID NO: 372794 - DNA, 15 bp, Homo sapiens
aactttttaattttc

SEQ ID NO: 372795 - DNA, 15 bp, Homo sapiens
taactttttaatttt

SEQ ID NO: 372796 - DNA, 15 bp, Homo sapiens
ctaactttttaattt

SEQ ID NO: 372797 - DNA, 15 bp, Homo sapiens
actaactttttaatt

SEQ ID NO: 372798 - DNA, 15 bp, Homo sapiens
aactaactttttaat

SEQ ID NO: 372799 - DNA, 15 bp, Homo sapiens
taactaactttttaa

SEQ ID NO: 372800 - DNA, 15 bp, Homo sapiens
ataactaacttttta

SEQ ID NO: 372801 - DNA, 15 bp, Homo sapiens
gataactaacttttt

SEQ ID NO: 372802 - DNA, 15 bp, Homo sapiens
tgataactaactttt

SEQ ID NO: 372803 - DNA, 15 bp, Homo sapiens
ctgataactaacttt

SEQ ID NO: 372804 - DNA, 15 bp, Homo sapiens
actgataactaactt

SEQ ID NO: 372805 - DNA, 15 bp, Homo sapiens
cactgataactaact

SEQ ID NO: 372806 - DNA, 15 bp, Homo sapiens
acactgataactaac

SEQ ID NO: 372807 - DNA, 15 bp, Homo sapiens
cacactgataactaa

SEQ ID NO: 372808 - DNA, 15 bp, Homo sapiens
tcacactgataacta

SEQ ID NO: 372809 - DNA, 15 bp, Homo sapiens
atcacactgataact

SEQ ID NO: 372810 - DNA, 15 bp, Homo sapiens
gatcacactgataac

SEQ ID NO: 372811 - DNA, 15 bp, Homo sapiens
agatcacactgataa

SEQ ID NO: 372812 - DNA, 15 bp, Homo sapiens
cagatcacactgata

SEQ ID NO: 372813 - DNA, 15 bp, Homo sapiens
tcagatcacactgat

SEQ ID NO: 372814 - DNA, 15 bp, Homo sapiens
ctcagatcacactga

SEQ ID NO: 372815 - DNA, 15 bp, Homo sapiens
actcagatcacactg

SEQ ID NO: 372816 - DNA, 15 bp, Homo sapiens
cactcagatcacact

SEQ ID NO: 372817 - DNA, 15 bp, Homo sapiens
gcactcagatcacac

SEQ ID NO: 372818 - DNA, 15 bp, Homo sapiens
tgcactcagatcaca

SEQ ID NO: 372819 - DNA, 15 bp, Homo sapiens
gtgcactcagatcac

SEQ ID NO: 372820 - DNA, 15 bp, Homo sapiens
ggtgcactcagatca

SEQ ID NO: 372821 - DNA, 15 bp, Homo sapiens
tggtgcactcagatc

SEQ ID NO: 372822 - DNA, 15 bp, Homo sapiens
atggtgcactcagat

SEQ ID NO: 372823 - DNA, 15 bp, Homo sapiens
tatggtgcactcaga

SEQ ID NO: 372824 - DNA, 15 bp, Homo sapiens
gtatggtgcactcag

SEQ ID NO: 372825 - DNA, 15 bp, Homo sapiens
ggtatggtgcactca

SEQ ID NO: 372826 - DNA, 15 bp, Homo sapiens
cggtatggtgcactc

SEQ ID NO: 372827 - DNA, 15 bp, Homo sapiens
acggtatggtgcact

SEQ ID NO: 372828 - DNA, 15 bp, Homo sapiens
aacggtatggtgcac

SEQ ID NO: 372829 - DNA, 15 bp, Homo sapiens
gaacggtatggtgca

SEQ ID NO: 372830 - DNA, 15 bp, Homo sapiens
agaacggtatggtgc

SEQ ID NO: 372831 - DNA, 15 bp, Homo sapiens
aagaacggtatggtg

SEQ ID NO: 372832 - DNA, 15 bp, Homo sapiens
taagaacggtatggt

SEQ ID NO: 372833 - DNA, 15 bp, Homo sapiens
gtaagaacggtatgg

SEQ ID NO: 372834 - DNA, 15 bp, Homo sapiens
tgtaagaacggtatg

SEQ ID NO: 372835 - DNA, 15 bp, Homo sapiens
ttgtaagaacggtat

SEQ ID NO: 372836 - DNA, 15 bp, Homo sapiens
tttgtaagaacggta

SEQ ID NO: 372837 - DNA, 15 bp, Homo sapiens
atttgtaagaacggt

SEQ ID NO: 372838 - DNA, 15 bp, Homo sapiens
tatttgtaagaacgg

SEQ ID NO: 372839 - DNA, 15 bp, Homo sapiens
ctatttgtaagaacg

SEQ ID NO: 372840 - DNA, 15 bp, Homo sapiens
tctatttgtaagaac

SEQ ID NO: 372841 - DNA, 15 bp, Homo sapiens
atctatttgtaagaa

SEQ ID NO: 372842 - DNA, 15 bp, Homo sapiens
catctatttgtaaga

SEQ ID NO: 372843 - DNA, 15 bp, Homo sapiens
ccatctatttgtaag

SEQ ID NO: 372844 - DNA, 15 bp, Homo sapiens
cccatctatttgtaa

SEQ ID NO: 372845 - DNA, 15 bp, Homo sapiens
gcccatctatttgta

SEQ ID NO: 372846 - DNA, 15 bp, Homo sapiens
ggcccatctatttgt

SEQ ID NO: 372847 - DNA, 15 bp, Homo sapiens
gggcccatctatttg

SEQ ID NO: 372848 - DNA, 15 bp, Homo sapiens
ggggcccatctattt

SEQ ID NO: 372849 - DNA, 15 bp, Homo sapiens
tggggcccatctatt

SEQ ID NO: 372850 - DNA, 15 bp, Homo sapiens
atggggcccatctat

SEQ ID NO: 372851 - DNA, 15 bp, Homo sapiens
gatggggcccatcta

SEQ ID NO: 372852 - DNA, 15 bp, Homo sapiens
agatggggcccatct

SEQ ID NO: 372853 - DNA, 15 bp, Homo sapiens
gagatggggcccatc

SEQ ID NO: 372854 - DNA, 15 bp, Homo sapiens
ggagatggggcccat

SEQ ID NO: 372855 - DNA, 15 bp, Homo sapiens
aggagatggggccca

SEQ ID NO: 372856 - DNA, 15 bp, Homo sapiens
caggagatggggccc

SEQ ID NO: 372857 - DNA, 15 bp, Homo sapiens
gcaggagatggggcc

SEQ ID NO: 372858 - DNA, 15 bp, Homo sapiens
agcaggagatggggc

SEQ ID NO: 372859 - DNA, 15 bp, Homo sapiens
gagcaggagatgggg

SEQ ID NO: 372860 - DNA, 15 bp, Homo sapiens
tgagcaggagatggg

SEQ ID NO: 372861 - DNA, 15 bp, Homo sapiens
ctgagcaggagatgg

SEQ ID NO: 372862 - DNA, 15 bp, Homo sapiens
actgagcaggagatg

SEQ ID NO: 372863 - DNA, 15 bp, Homo sapiens
cactgagcaggagat

SEQ ID NO: 372864 - DNA, 15 bp, Homo sapiens
ccactgagcaggaga

SEQ ID NO: 372865 - DNA, 15 bp, Homo sapiens
cccactgagcaggag

SEQ ID NO: 372866 - DNA, 15 bp, Homo sapiens
ccccactgagcagga

SEQ ID NO: 372867 - DNA, 15 bp, Homo sapiens
cccccactgagcagg

SEQ ID NO: 372868 - DNA, 15 bp, Homo sapiens
gcccccactgagcag

SEQ ID NO: 372869 - DNA, 15 bp, Homo sapiens
tgcccccactgagca

SEQ ID NO: 372870 - DNA, 15 bp, Homo sapiens
gtgcccccactgagc

SEQ ID NO: 372871 - DNA, 15 bp, Homo sapiens
tgtgcccccactgag

SEQ ID NO: 372872 - DNA, 15 bp, Homo sapiens
ttgtgcccccactga

SEQ ID NO: 372873 - DNA, 15 bp, Homo sapiens
attgtgcccccactg

SEQ ID NO: 372874 - DNA, 15 bp, Homo sapiens
gattgtgcccccact

SEQ ID NO: 372875 - DNA, 15 bp, Homo sapiens
tgattgtgcccccac

SEQ ID NO: 372876 - DNA, 15 bp, Homo sapiens
ttgattgtgccccca

SEQ ID NO: 372877 - DNA, 15 bp, Homo sapiens
tttgattgtgccccc

SEQ ID NO: 372878 - DNA, 15 bp, Homo sapiens
ttttgattgtgcccc

SEQ ID NO: 372879 - DNA, 15 bp, Homo sapiens
gttttgattgtgccc

SEQ ID NO: 372880 - DNA, 15 bp, Homo sapiens
ggttttgattgtgcc

SEQ ID NO: 372881 - DNA, 15 bp, Homo sapiens
gggttttgattgtgc

SEQ ID NO: 372882 - DNA, 15 bp, Homo sapiens
agggttttgattgtg

SEQ ID NO: 372883 - DNA, 15 bp, Homo sapiens
cagggttttgattgt

SEQ ID NO: 372884 - DNA, 15 bp, Homo sapiens
gcagggttttgattg

SEQ ID NO: 372885 - DNA, 15 bp, Homo sapiens
agcagggttttgatt

SEQ ID NO: 372886 - DNA, 15 bp, Homo sapiens
cagcagggttttgat

SEQ ID NO: 372887 - DNA, 15 bp, Homo sapiens
ccagcagggttttga

SEQ ID NO: 372888 - DNA, 15 bp, Homo sapiens
cccagcagggttttg

SEQ ID NO: 372889 - DNA, 15 bp, Homo sapiens
ccccagcagggtttt

SEQ ID NO: 372890 - DNA, 15 bp, Homo sapiens
cccccagcagggttt

SEQ ID NO: 372891 - DNA, 15 bp, Homo sapiens
ccccccagcagggtt

SEQ ID NO: 372892 - DNA, 15 bp, Homo sapiens
cccccccagcagggt

SEQ ID NO: 372893 - DNA, 15 bp, Homo sapiens
gcccccccagcaggg

SEQ ID NO: 372894 - DNA, 15 bp, Homo sapiens
agcccccccagcagg

SEQ ID NO: 372895 - DNA, 15 bp, Homo sapiens
cagcccccccagcag

SEQ ID NO: 372896 - DNA, 15 bp, Homo sapiens
acagcccccccagca

SEQ ID NO: 372897 - DNA, 15 bp, Homo sapiens
aacagcccccccagc

SEQ ID NO: 372898 - DNA, 15 bp, Homo sapiens
aaacagcccccccag

SEQ ID NO: 372899 - DNA, 15 bp, Homo sapiens
aaaacagccccccca

SEQ ID NO: 372900 - DNA, 15 bp, Homo sapiens
gaaaacagccccccc

SEQ ID NO: 372901 - DNA, 15 bp, Homo sapiens
agaaaacagcccccc

SEQ ID NO: 372902 - DNA, 15 bp, Homo sapiens
cagaaaacagccccc

SEQ ID NO: 372903 - DNA, 15 bp, Homo sapiens
ccagaaaacagcccc

SEQ ID NO: 372904 - DNA, 15 bp, Homo sapiens
cccagaaaacagccc

SEQ ID NO: 372905 - DNA, 15 bp, Homo sapiens
ccccagaaaacagcc

SEQ ID NO: 372906 - DNA, 15 bp, Homo sapiens
tccccagaaaacagc

SEQ ID NO: 372907 - DNA, 15 bp, Homo sapiens
ttccccagaaaacag

SEQ ID NO: 372908 - DNA, 15 bp, Homo sapiens
cttccccagaaaaca

SEQ ID NO: 372909 - DNA, 15 bp, Homo sapiens
tcttccccagaaaac

SEQ ID NO: 372910 - DNA, 15 bp, Homo sapiens
ctcttccccagaaaa

SEQ ID NO: 372911 - DNA, 15 bp, Homo sapiens
gctcttccccagaaa

SEQ ID NO: 372912 - DNA, 15 bp, Homo sapiens
ggctcttccccagaa

SEQ ID NO: 372913 - DNA, 15 bp, Homo sapiens
gggctcttccccaga

SEQ ID NO: 372914 - DNA, 15 bp, Homo sapiens
tgggctcttccccag

SEQ ID NO: 372915 - DNA, 15 bp, Homo sapiens
ctgggctcttcccca

SEQ ID NO: 372916 - DNA, 15 bp, Homo sapiens
cctgggctcttcccc

SEQ ID NO: 372917 - DNA, 15 bp, Homo sapiens
tcctgggctcttccc

SEQ ID NO: 372918 - DNA, 15 bp, Homo sapiens
atcctgggctcttcc

SEQ ID NO: 372919 - DNA, 15 bp, Homo sapiens
gatcctgggctcttc

SEQ ID NO: 372920 - DNA, 15 bp, Homo sapiens
cgatcctgggctctt

SEQ ID NO: 372921 - DNA, 15 bp, Homo sapiens
acgatcctgggctct

SEQ ID NO: 372922 - DNA, 15 bp, Homo sapiens
cacgatcctgggctc

SEQ ID NO: 372923 - DNA, 15 bp, Homo sapiens
ccacgatcctgggct

SEQ ID NO: 372924 - DNA, 15 bp, Homo sapiens
cccacgatcctgggc

SEQ ID NO: 372925 - DNA, 15 bp, Homo sapiens
ccccacgatcctggg

SEQ ID NO: 372926 - DNA, 15 bp, Homo sapiens
gccccacgatcctgg

SEQ ID NO: 372927 - DNA, 15 bp, Homo sapiens
ggccccacgatcctg

SEQ ID NO: 372928 - DNA, 15 bp, Homo sapiens
aggccccacgatcct

SEQ ID NO: 372929 - DNA, 15 bp, Homo sapiens
caggccccacgatcc

SEQ ID NO: 372930 - DNA, 15 bp, Homo sapiens
gcaggccccacgatc

SEQ ID NO: 372931 - DNA, 15 bp, Homo sapiens
tgcaggccccacgat

SEQ ID NO: 372932 - DNA, 15 bp, Homo sapiens
ttgcaggccccacga

SEQ ID NO: 372933 - DNA, 15 bp, Homo sapiens
tttgcaggccccacg

SEQ ID NO: 372934 - DNA, 15 bp, Homo sapiens
ttttgcaggccccac

SEQ ID NO: 372935 - DNA, 15 bp, Homo sapiens
tttttgcaggcccca

SEQ ID NO: 372936 - DNA, 15 bp, Homo sapiens
gtttttgcaggcccc

SEQ ID NO: 372937 - DNA, 15 bp, Homo sapiens
agtttttgcaggccc

SEQ ID NO: 372938 - DNA, 15 bp, Homo sapiens
gagtttttgcaggcc

SEQ ID NO: 372939 - DNA, 15 bp, Homo sapiens
tgagtttttgcaggc

SEQ ID NO: 372940 - DNA, 15 bp, Homo sapiens
ctgagtttttgcagg

SEQ ID NO: 372941 - DNA, 15 bp, Homo sapiens
tctgagtttttgcag

SEQ ID NO: 372942 - DNA, 15 bp, Homo sapiens
ttctgagtttttgca

SEQ ID NO: 372943 - DNA, 15 bp, Homo sapiens
cttctgagtttttgc

SEQ ID NO: 372944 - DNA, 15 bp, Homo sapiens
gcttctgagtttttg

SEQ ID NO: 372945 - DNA, 15 bp, Homo sapiens
ggcttctgagttttt

SEQ ID NO: 372946 - DNA, 15 bp, Homo sapiens
gggcttctgagtttt

SEQ ID NO: 372947 - DNA, 15 bp, Homo sapiens
ggggcttctgagttt

SEQ ID NO: 372948 - DNA, 15 bp, Homo sapiens
gggggcttctgagtt

SEQ ID NO: 372949 - DNA, 15 bp, Homo sapiens
ggggggcttctgagt

SEQ ID NO: 372950 - DNA, 15 bp, Homo sapiens
gggggggcttctgag

SEQ ID NO: 372951 - DNA, 15 bp, Homo sapiens
tgggggggcttctga

SEQ ID NO: 372952 - DNA, 15 bp, Homo sapiens
gtgggggggcttctg

SEQ ID NO: 372953 - DNA, 15 bp, Homo sapiens
ggtgggggggcttct

SEQ ID NO: 372954 - DNA, 15 bp, Homo sapiens
aggtgggggggcttc

SEQ ID NO: 372955 - DNA, 15 bp, Homo sapiens
aaggtgggggggctt

SEQ ID NO: 372956 - DNA, 15 bp, Homo sapiens
gaaggtgggggggct

SEQ ID NO: 372957 - DNA, 15 bp, Homo sapiens
ggaaggtgggggggc

SEQ ID NO: 372958 - DNA, 15 bp, Homo sapiens
gggaaggtggggggg

SEQ ID NO: 372959 - DNA, 15 bp, Homo sapiens
ggggaaggtgggggg

SEQ ID NO: 372960 - DNA, 15 bp, Homo sapiens
gggggaaggtggggg

SEQ ID NO: 372961 - DNA, 15 bp, Homo sapiens
ggggggaaggtgggg

SEQ ID NO: 372962 - DNA, 15 bp, Homo sapiens
tggggggaaggtggg

SEQ ID NO: 372963 - DNA, 15 bp, Homo sapiens
ctggggggaaggtgg

SEQ ID NO: 372964 - DNA, 15 bp, Homo sapiens
cctggggggaaggtg

SEQ ID NO: 372965 - DNA, 15 bp, Homo sapiens
ccctggggggaaggt

SEQ ID NO: 372966 - DNA, 15 bp, Homo sapiens
accctggggggaagg

SEQ ID NO: 372967 - DNA, 15 bp, Homo sapiens
caccctggggggaag

SEQ ID NO: 372968 - DNA, 15 bp, Homo sapiens
acaccctggggggaa

SEQ ID NO: 372969 - DNA, 15 bp, Homo sapiens
gacaccctgggggga

SEQ ID NO: 372970 - DNA, 15 bp, Homo sapiens
ggacaccctgggggg

SEQ ID NO: 372971 - DNA, 15 bp, Homo sapiens
tggacaccctggggg

SEQ ID NO: 372972 - DNA, 15 bp, Homo sapiens
ctggacaccctgggg

SEQ ID NO: 372973 - DNA, 15 bp, Homo sapiens
cctggacaccctggg

SEQ ID NO: 372974 - DNA, 15 bp, Homo sapiens
tcctggacaccctgg

SEQ ID NO: 372975 - DNA, 15 bp, Homo sapiens
atcctggacaccctg

SEQ ID NO: 372976 - DNA, 15 bp, Homo sapiens
catcctggacaccct

SEQ ID NO: 372977 - DNA, 15 bp, Homo sapiens
gcatcctggacaccc

SEQ ID NO: 372978 - DNA, 15 bp, Homo sapiens
ggcatcctggacacc

SEQ ID NO: 372979 - DNA, 15 bp, Homo sapiens
gggcatcctggacac

SEQ ID NO: 372980 - DNA, 15 bp, Homo sapiens
agggcatcctggaca

SEQ ID NO: 372981 - DNA, 15 bp, Homo sapiens
tagggcatcctggac

SEQ ID NO: 372982 - DNA, 15 bp, Homo sapiens
ctagggcatcctgga

SEQ ID NO: 372983 - DNA, 15 bp, Homo sapiens
actagggcatcctgg

SEQ ID NO: 372984 - DNA, 15 bp, Homo sapiens
gactagggcatcctg

SEQ ID NO: 372985 - DNA, 15 bp, Homo sapiens
ggactagggcatcct

SEQ ID NO: 372986 - DNA, 15 bp, Homo sapiens
gggactagggcatcc

SEQ ID NO: 372987 - DNA, 15 bp, Homo sapiens
tgggactagggcatc

SEQ ID NO: 372988 - DNA, 15 bp, Homo sapiens
ctgggactagggcat

SEQ ID NO: 372989 - DNA, 15 bp, Homo sapiens
cctgggactagggca

SEQ ID NO: 372990 - DNA, 15 bp, Homo sapiens
tcctgggactagggc

SEQ ID NO: 372991 - DNA, 15 bp, Homo sapiens
ctcctgggactaggg

SEQ ID NO: 372992 - DNA, 15 bp, Homo sapiens
cctcctgggactagg

SEQ ID NO: 372993 - DNA, 15 bp, Homo sapiens
ccctcctgggactag

SEQ ID NO: 372994 - DNA, 15 bp, Homo sapiens
cccctcctgggacta

SEQ ID NO: 372995 - DNA, 15 bp, Homo sapiens
ccccctcctgggact

SEQ ID NO: 372996 - DNA, 15 bp, Homo sapiens
gccccctcctgggac

SEQ ID NO: 372997 - DNA, 15 bp, Homo sapiens
agccccctcctggga

SEQ ID NO: 372998 - DNA, 15 bp, Homo sapiens
cagccccctcctggg

SEQ ID NO: 372999 - DNA, 15 bp, Homo sapiens
ccagccccctcctgg

SEQ ID NO: 373000 - DNA, 15 bp, Homo sapiens
cccagccccctcctg

SEQ ID NO: 373001 - DNA, 15 bp, Homo sapiens
tcccagccccctcct

SEQ ID NO: 373002 - DNA, 15 bp, Homo sapiens
ctcccagccccctcc

SEQ ID NO: 373003 - DNA, 15 bp, Homo sapiens
tctcccagccccctc

SEQ ID NO: 373004 - DNA, 15 bp, Homo sapiens
ctctcccagccccct

SEQ ID NO: 373005 - DNA, 15 bp, Homo sapiens
tctctcccagccccc

SEQ ID NO: 373006 - DNA, 15 bp, Homo sapiens
ttctctcccagcccc

SEQ ID NO: 373007 - DNA, 15 bp, Homo sapiens
attctctcccagccc

SEQ ID NO: 373008 - DNA, 15 bp, Homo sapiens
aattctctcccagcc

SEQ ID NO: 373009 - DNA, 15 bp, Homo sapiens
taattctctcccagc

SEQ ID NO: 373010 - DNA, 15 bp, Homo sapiens
gtaattctctcccag

SEQ ID NO: 373011 - DNA, 15 bp, Homo sapiens
tgtaattctctccca

SEQ ID NO: 373012 - DNA, 15 bp, Homo sapiens
ttgtaattctctccc

SEQ ID NO: 373013 - DNA, 15 bp, Homo sapiens
attgtaattctctcc

SEQ ID NO: 373014 - DNA, 15 bp, Homo sapiens
cattgtaattctctc

SEQ ID NO: 373015 - DNA, 15 bp, Homo sapiens
acattgtaattctct

SEQ ID NO: 373016 - DNA, 15 bp, Homo sapiens
gacattgtaattctc

SEQ ID NO: 373017 - DNA, 15 bp, Homo sapiens
cgacattgtaattct

SEQ ID NO: 373018 - DNA, 15 bp, Homo sapiens
ccgacattgtaattc

SEQ ID NO: 373019 - DNA, 15 bp, Homo sapiens
cccgacattgtaatt

SEQ ID NO: 373020 - DNA, 15 bp, Homo sapiens
ccccgacattgtaat

SEQ ID NO: 373021 - DNA, 15 bp, Homo sapiens
gccccgacattgtaa

SEQ ID NO: 373022 - DNA, 15 bp, Homo sapiens
ggccccgacattgta

SEQ ID NO: 373023 - DNA, 15 bp, Homo sapiens
tggccccgacattgt

SEQ ID NO: 373024 - DNA, 15 bp, Homo sapiens
ctggccccgacattg

SEQ ID NO: 373025 - DNA, 15 bp, Homo sapiens
gctggccccgacatt

SEQ ID NO: 373026 - DNA, 15 bp, Homo sapiens
tgctggccccgacat

SEQ ID NO: 373027 - DNA, 15 bp, Homo sapiens
atgctggccccgaca

SEQ ID NO: 373028 - DNA, 15 bp, Homo sapiens
gatgctggccccgac

SEQ ID NO: 373029 - DNA, 15 bp, Homo sapiens
ggatgctggccccga

SEQ ID NO: 373030 - DNA, 15 bp, Homo sapiens
aggatgctggccccg

SEQ ID NO: 373031 - DNA, 15 bp, Homo sapiens
gaggatgctggcccc

SEQ ID NO: 373032 - DNA, 15 bp, Homo sapiens
ggaggatgctggccc

SEQ ID NO: 373033 - DNA, 15 bp, Homo sapiens
tggaggatgctggcc

SEQ ID NO: 373034 - DNA, 15 bp, Homo sapiens
gtggaggatgctggc

SEQ ID NO: 373035 - DNA, 15 bp, Homo sapiens
agtggaggatgctgg

SEQ ID NO: 373036 - DNA, 15 bp, Homo sapiens
aagtggaggatgctg

SEQ ID NO: 373037 - DNA, 15 bp, Homo sapiens
aaagtggaggatgct

SEQ ID NO: 373038 - DNA, 15 bp, Homo sapiens
gaaagtggaggatgc

SEQ ID NO: 373039 - DNA, 15 bp, Homo sapiens
ggaaagtggaggatg

SEQ ID NO: 373040 - DNA, 15 bp, Homo sapiens
aggaaagtggaggat

SEQ ID NO: 373041 - DNA, 15 bp, Homo sapiens
caggaaagtggagga

SEQ ID NO: 373042 - DNA, 15 bp, Homo sapiens
acaggaaagtggagg

SEQ ID NO: 373043 - DNA, 15 bp, Homo sapiens
gacaggaaagtggag

SEQ ID NO: 373044 - DNA, 15 bp, Homo sapiens
tgacaggaaagtgga

SEQ ID NO: 373045 - DNA, 15 bp, Homo sapiens
gtgacaggaaagtgg

SEQ ID NO: 373046 - DNA, 15 bp, Homo sapiens
agtgacaggaaagtg

SEQ ID NO: 373047 - DNA, 15 bp, Homo sapiens
tagtgacaggaaagt

SEQ ID NO: 373048 - DNA, 15 bp, Homo sapiens
ctagtgacaggaaag

SEQ ID NO: 373049 - DNA, 15 bp, Homo sapiens
tctagtgacaggaaa

SEQ ID NO: 373050 - DNA, 15 bp, Homo sapiens
ctctagtgacaggaa

SEQ ID NO: 373051 - DNA, 15 bp, Homo sapiens
cctctagtgacagga

SEQ ID NO: 373052 - DNA, 15 bp, Homo sapiens
gcctctagtgacagg

SEQ ID NO: 373053 - DNA, 15 bp, Homo sapiens
agcctctagtgacag

SEQ ID NO: 373054 - DNA, 15 bp, Homo sapiens
cagcctctagtgaca

SEQ ID NO: 373055 - DNA, 15 bp, Homo sapiens
ccagcctctagtgac

SEQ ID NO: 373056 - DNA, 15 bp, Homo sapiens
gccagcctctagtga

SEQ ID NO: 373057 - DNA, 15 bp, Homo sapiens
ggccagcctctagtg

SEQ ID NO: 373058 - DNA, 15 bp, Homo sapiens
aggccagcctctagt

SEQ ID NO: 373059 - DNA, 15 bp, Homo sapiens
caggccagcctctag

SEQ ID NO: 373060 - DNA, 15 bp, Homo sapiens
gcaggccagcctcta

SEQ ID NO: 373061 - DNA, 15 bp, Homo sapiens
agcaggccagcctct

SEQ ID NO: 373062 - DNA, 15 bp, Homo sapiens
gagcaggccagcctc

SEQ ID NO: 373063 - DNA, 15 bp, Homo sapiens
agagcaggccagcct

SEQ ID NO: 373064 - DNA, 15 bp, Homo sapiens
gagagcaggccagcc

SEQ ID NO: 373065 - DNA, 15 bp, Homo sapiens
ggagagcaggccagc

SEQ ID NO: 373066 - DNA, 15 bp, Homo sapiens
aggagagcaggccag

SEQ ID NO: 373067 - DNA, 15 bp, Homo sapiens
caggagagcaggcca

SEQ ID NO: 373068 - DNA, 15 bp, Homo sapiens
ccaggagagcaggcc

SEQ ID NO: 373069 - DNA, 15 bp, Homo sapiens
cccaggagagcaggc

SEQ ID NO: 373070 - DNA, 15 bp, Homo sapiens
acccaggagagcagg

SEQ ID NO: 373071 - DNA, 15 bp, Homo sapiens
aacccaggagagcag

SEQ ID NO: 373072 - DNA, 15 bp, Homo sapiens
caacccaggagagca

SEQ ID NO: 373073 - DNA, 15 bp, Homo sapiens
tcaacccaggagagc

SEQ ID NO: 373074 - DNA, 15 bp, Homo sapiens
ctcaacccaggagag

SEQ ID NO: 373075 - DNA, 15 bp, Homo sapiens
cctcaacccaggaga

SEQ ID NO: 373076 - DNA, 15 bp, Homo sapiens
gcctcaacccaggag

SEQ ID NO: 373077 - DNA, 15 bp, Homo sapiens
ggcctcaacccagga

SEQ ID NO: 373078 - DNA, 15 bp, Homo sapiens
cggcctcaacccagg

SEQ ID NO: 373079 - DNA, 15 bp, Homo sapiens
tcggcctcaacccag

SEQ ID NO: 373080 - DNA, 15 bp, Homo sapiens
ctcggcctcaaccca

SEQ ID NO: 373081 - DNA, 15 bp, Homo sapiens
actcggcctcaaccc

SEQ ID NO: 373082 - DNA, 15 bp, Homo sapiens
cactcggcctcaacc

SEQ ID NO: 373083 - DNA, 15 bp, Homo sapiens
acactcggcctcaac

SEQ ID NO: 373084 - DNA, 15 bp, Homo sapiens
gacactcggcctcaa

SEQ ID NO: 373085 - DNA, 15 bp, Homo sapiens
agacactcggcctca

SEQ ID NO: 373086 - DNA, 15 bp, Homo sapiens
gagacactcggcctc

SEQ ID NO: 373087 - DNA, 15 bp, Homo sapiens
tgagacactcggcct

SEQ ID NO: 373088 - DNA, 15 bp, Homo sapiens
ctgagacactcggcc

SEQ ID NO: 373089 - DNA, 15 bp, Homo sapiens
gctgagacactcggc

SEQ ID NO: 373090 - DNA, 15 bp, Homo sapiens
ggctgagacactcgg

SEQ ID NO: 373091 - DNA, 15 bp, Homo sapiens
gggctgagacactcg

SEQ ID NO: 373092 - DNA, 15 bp, Homo sapiens
ggggctgagacactc

SEQ ID NO: 373093 - DNA, 15 bp, Homo sapiens
aggggctgagacact

SEQ ID NO: 373094 - DNA, 15 bp, Homo sapiens
caggggctgagacac

SEQ ID NO: 373095 - DNA, 15 bp, Homo sapiens
ccaggggctgagaca

SEQ ID NO: 373096 - DNA, 15 bp, Homo sapiens
gccaggggctgagac

SEQ ID NO: 373097 - DNA, 15 bp, Homo sapiens
agccaggggctgaga

SEQ ID NO: 373098 - DNA, 15 bp, Homo sapiens
cagccaggggctgag

SEQ ID NO: 373099 - DNA, 15 bp, Homo sapiens
ccagccaggggctga

SEQ ID NO: 373100 - DNA, 15 bp, Homo sapiens
gccagccaggggctg

SEQ ID NO: 373101 - DNA, 15 bp, Homo sapiens
ggccagccaggggct

SEQ ID NO: 373102 - DNA, 15 bp, Homo sapiens
tggccagccaggggc

SEQ ID NO: 373103 - DNA, 15 bp, Homo sapiens
gtggccagccagggg

SEQ ID NO: 373104 - DNA, 15 bp, Homo sapiens
tgtggccagccaggg

SEQ ID NO: 373105 - DNA, 15 bp, Homo sapiens
atgtggccagccagg

SEQ ID NO: 373106 - DNA, 15 bp, Homo sapiens
catgtggccagccag

SEQ ID NO: 373107 - DNA, 15 bp, Homo sapiens
ccatgtggccagcca

SEQ ID NO: 373108 - DNA, 15 bp, Homo sapiens
gccatgtggccagcc

SEQ ID NO: 373109 - DNA, 15 bp, Homo sapiens
ggccatgtggccagc

SEQ ID NO: 373110 - DNA, 15 bp, Homo sapiens
aggccatgtggccag

SEQ ID NO: 373111 - DNA, 15 bp, Homo sapiens
aaggccatgtggcca

SEQ ID NO: 373112 - DNA, 15 bp, Homo sapiens
caaggccatgtggcc

SEQ ID NO: 373113 - DNA, 15 bp, Homo sapiens
gcaaggccatgtggc

SEQ ID NO: 373114 - DNA, 15 bp, Homo sapiens
tgcaaggccatgtgg

SEQ ID NO: 373115 - DNA, 15 bp, Homo sapiens
ctgcaaggccatgtg

SEQ ID NO: 373116 - DNA, 15 bp, Homo sapiens
cctgcaaggccatgt

SEQ ID NO: 373117 - DNA, 15 bp, Homo sapiens
tcctgcaaggccatg

SEQ ID NO: 373118 - DNA, 15 bp, Homo sapiens
ctcctgcaaggccat

SEQ ID NO: 373119 - DNA, 15 bp, Homo sapiens
gctcctgcaaggcca

SEQ ID NO: 373120 - DNA, 15 bp, Homo sapiens
ggctcctgcaaggcc

SEQ ID NO: 373121 - DNA, 15 bp, Homo sapiens
tggctcctgcaaggc

SEQ ID NO: 373122 - DNA, 15 bp, Homo sapiens
atggctcctgcaagg

SEQ ID NO: 373123 - DNA, 15 bp, Homo sapiens
aatggctcctgcaag

SEQ ID NO: 373124 - DNA, 15 bp, Homo sapiens
aaatggctcctgcaa

SEQ ID NO: 373125 - DNA, 15 bp, Homo sapiens
gaaatggctcctgca

SEQ ID NO: 373126 - DNA, 15 bp, Homo sapiens
agaaatggctcctgc

SEQ ID NO: 373127 - DNA, 15 bp, Homo sapiens
cagaaatggctcctg

SEQ ID NO: 373128 - DNA, 15 bp, Homo sapiens
acagaaatggctcct

SEQ ID NO: 373129 - DNA, 15 bp, Homo sapiens
cacagaaatggctcc

SEQ ID NO: 373130 - DNA, 15 bp, Homo sapiens
acacagaaatggctc

SEQ ID NO: 373131 - DNA, 15 bp, Homo sapiens
aacacagaaatggct

SEQ ID NO: 373132 - DNA, 15 bp, Homo sapiens
gaacacagaaatggc

SEQ ID NO: 373133 - DNA, 15 bp, Homo sapiens
agaacacagaaatgg

SEQ ID NO: 373134 - DNA, 15 bp, Homo sapiens
cagaacacagaaatg

SEQ ID NO: 373135 - DNA, 15 bp, Homo sapiens
ccagaacacagaaat

SEQ ID NO: 373136 - DNA, 15 bp, Homo sapiens
cccagaacacagaaa

SEQ ID NO: 373137 - DNA, 15 bp, Homo sapiens
gcccagaacacagaa

SEQ ID NO: 373138 - DNA, 15 bp, Homo sapiens
ggcccagaacacaga

SEQ ID NO: 373139 - DNA, 15 bp, Homo sapiens
aggcccagaacacag

SEQ ID NO: 373140 - DNA, 15 bp, Homo sapiens
gaggcccagaacaca

SEQ ID NO: 373141 - DNA, 15 bp, Homo sapiens
tgaggcccagaacac

SEQ ID NO: 373142 - DNA, 15 bp, Homo sapiens
ctgaggcccagaaca

SEQ ID NO: 373143 - DNA, 15 bp, Homo sapiens
actgaggcccagaac

SEQ ID NO: 373144 - DNA, 15 bp, Homo sapiens
aactgaggcccagaa

SEQ ID NO: 373145 - DNA, 15 bp, Homo sapiens
aaactgaggcccaga

SEQ ID NO: 373146 - DNA, 15 bp, Homo sapiens
aaaactgaggcccag

SEQ ID NO: 373147 - DNA, 15 bp, Homo sapiens
gaaaactgaggccca

SEQ ID NO: 373148 - DNA, 15 bp, Homo sapiens
agaaaactgaggccc

SEQ ID NO: 373149 - DNA, 15 bp, Homo sapiens
gagaaaactgaggcc

SEQ ID NO: 373150 - DNA, 15 bp, Homo sapiens
tgagaaaactgaggc

SEQ ID NO: 373151 - DNA, 15 bp, Homo sapiens
atgagaaaactgagg

SEQ ID NO: 373152 - DNA, 15 bp, Homo sapiens
gatgagaaaactgag

SEQ ID NO: 373153 - DNA, 15 bp, Homo sapiens
agatgagaaaactga

SEQ ID NO: 373154 - DNA, 15 bp, Homo sapiens
cagatgagaaaactg

SEQ ID NO: 373155 - DNA, 15 bp, Homo sapiens
gcagatgagaaaact

SEQ ID NO: 373156 - DNA, 15 bp, Homo sapiens
tgcagatgagaaaac

SEQ ID NO: 373157 - DNA, 15 bp, Homo sapiens
ttgcagatgagaaaa

SEQ ID NO: 373158 - DNA, 15 bp, Homo sapiens
tttgcagatgagaaa

SEQ ID NO: 373159 - DNA, 15 bp, Homo sapiens
ttttgcagatgagaa

SEQ ID NO: 373160 - DNA, 15 bp, Homo sapiens
attttgcagatgaga

SEQ ID NO: 373161 - DNA, 15 bp, Homo sapiens
tattttgcagatgag

SEQ ID NO: 373162 - DNA, 15 bp, Homo sapiens
ttattttgcagatga

SEQ ID NO: 373163 - DNA, 15 bp, Homo sapiens
cttattttgcagatg

SEQ ID NO: 373164 - DNA, 15 bp, Homo sapiens
ccttattttgcagat

SEQ ID NO: 373165 - DNA, 15 bp, Homo sapiens
cccttattttgcaga

SEQ ID NO: 373166 - DNA, 15 bp, Homo sapiens
gcccttattttgcag

SEQ ID NO: 373167 - DNA, 15 bp, Homo sapiens
agcccttattttgca

SEQ ID NO: 373168 - DNA, 15 bp, Homo sapiens
aagcccttattttgc

SEQ ID NO: 373169 - DNA, 15 bp, Homo sapiens
caagcccttattttg

SEQ ID NO: 373170 - DNA, 15 bp, Homo sapiens
ccaagcccttatttt

SEQ ID NO: 373171 - DNA, 15 bp, Homo sapiens
cccaagcccttattt

SEQ ID NO: 373172 - DNA, 15 bp, Homo sapiens
gcccaagcccttatt

SEQ ID NO: 373173 - DNA, 15 bp, Homo sapiens
agcccaagcccttat

SEQ ID NO: 373174 - DNA, 15 bp, Homo sapiens
aagcccaagccctta

SEQ ID NO: 373175 - DNA, 15 bp, Homo sapiens
caagcccaagccctt

SEQ ID NO: 373176 - DNA, 15 bp, Homo sapiens
ccaagcccaagccct

SEQ ID NO: 373177 - DNA, 15 bp, Homo sapiens
gccaagcccaagccc

SEQ ID NO: 373178 - DNA, 15 bp, Homo sapiens
agccaagcccaagcc

SEQ ID NO: 373179 - DNA, 15 bp, Homo sapiens
cagccaagcccaagc

SEQ ID NO: 373180 - DNA, 15 bp, Homo sapiens
gcagccaagcccaag

SEQ ID NO: 373181 - DNA, 15 bp, Homo sapiens
ggcagccaagcccaa

SEQ ID NO: 373182 - DNA, 15 bp, Homo sapiens
tggcagccaagccca

SEQ ID NO: 373183 - DNA, 15 bp, Homo sapiens
ttggcagccaagccc

SEQ ID NO: 373184 - DNA, 15 bp, Homo sapiens
cttggcagccaagcc

SEQ ID NO: 373185 - DNA, 15 bp, Homo sapiens
acttggcagccaagc

SEQ ID NO: 373186 - DNA, 15 bp, Homo sapiens
gacttggcagccaag

SEQ ID NO: 373187 - DNA, 15 bp, Homo sapiens
ggacttggcagccaa

SEQ ID NO: 373188 - DNA, 15 bp, Homo sapiens
gggacttggcagcca

SEQ ID NO: 373189 - DNA, 15 bp, Homo sapiens
agggacttggcagcc

SEQ ID NO: 373190 - DNA, 15 bp, Homo sapiens
aagggacttggcagc

SEQ ID NO: 373191 - DNA, 15 bp, Homo sapiens
gaagggacttggcag

SEQ ID NO: 373192 - DNA, 15 bp, Homo sapiens
cgaagggacttggca

SEQ ID NO: 373193 - DNA, 15 bp, Homo sapiens
ccgaagggacttggc

SEQ ID NO: 373194 - DNA, 15 bp, Homo sapiens
accgaagggacttgg

SEQ ID NO: 373195 - DNA, 15 bp, Homo sapiens
caccgaagggacttg

SEQ ID NO: 373196 - DNA, 15 bp, Homo sapiens
tcaccgaagggactt

SEQ ID NO: 373197 - DNA, 15 bp, Homo sapiens
atcaccgaagggact

SEQ ID NO: 373198 - DNA, 15 bp, Homo sapiens
gatcaccgaagggac

SEQ ID NO: 373199 - DNA, 15 bp, Homo sapiens
agatcaccgaaggga

SEQ ID NO: 373200 - DNA, 15 bp, Homo sapiens
cagatcaccgaaggg

SEQ ID NO: 373201 - DNA, 15 bp, Homo sapiens
acagatcaccgaagg

SEQ ID NO: 373202 - DNA, 15 bp, Homo sapiens
cacagatcaccgaag

SEQ ID NO: 373203 - DNA, 15 bp, Homo sapiens
tcacagatcaccgaa

SEQ ID NO: 373204 - DNA, 15 bp, Homo sapiens
atcacagatcaccga

SEQ ID NO: 373205 - DNA, 15 bp, Homo sapiens
gatcacagatcaccg

SEQ ID NO: 373206 - DNA, 15 bp, Homo sapiens
agatcacagatcacc

SEQ ID NO: 373207 - DNA, 15 bp, Homo sapiens
aagatcacagatcac

SEQ ID NO: 373208 - DNA, 15 bp, Homo sapiens
aaagatcacagatca

SEQ ID NO: 373209 - DNA, 15 bp, Homo sapiens
caaagatcacagatc

SEQ ID NO: 373210 - DNA, 15 bp, Homo sapiens
acaaagatcacagat

SEQ ID NO: 373211 - DNA, 15 bp, Homo sapiens
gacaaagatcacaga

SEQ ID NO: 373212 - DNA, 15 bp, Homo sapiens
agacaaagatcacag

SEQ ID NO: 373213 - DNA, 15 bp, Homo sapiens
gagacaaagatcaca

SEQ ID NO: 373214 - DNA, 15 bp, Homo sapiens
agagacaaagatcac

SEQ ID NO: 373215 - DNA, 15 bp, Homo sapiens
aagagacaaagatca

SEQ ID NO: 373216 - DNA, 15 bp, Homo sapiens
caagagacaaagatc

SEQ ID NO: 373217 - DNA, 15 bp, Homo sapiens
ccaagagacaaagat

SEQ ID NO: 373218 - DNA, 15 bp, Homo sapiens
tccaagagacaaaga

SEQ ID NO: 373219 - DNA, 15 bp, Homo sapiens
atccaagagacaaag

SEQ ID NO: 373220 - DNA, 15 bp, Homo sapiens
aatccaagagacaaa

SEQ ID NO: 373221 - DNA, 15 bp, Homo sapiens
aaatccaagagacaa

SEQ ID NO: 373222 - DNA, 15 bp, Homo sapiens
caaatccaagagaca

SEQ ID NO: 373223 - DNA, 15 bp, Homo sapiens
tcaaatccaagagac

SEQ ID NO: 373224 - DNA, 15 bp, Homo sapiens
ctcaaatccaagaga

SEQ ID NO: 373225 - DNA, 15 bp, Homo sapiens
cctcaaatccaagag

SEQ ID NO: 373226 - DNA, 15 bp, Homo sapiens
ccctcaaatccaaga

SEQ ID NO: 373227 - DNA, 15 bp, Homo sapiens
cccctcaaatccaag

SEQ ID NO: 373228 - DNA, 15 bp, Homo sapiens
acccctcaaatccaa

SEQ ID NO: 373229 - DNA, 15 bp, Homo sapiens
cacccctcaaatcca

SEQ ID NO: 373230 - DNA, 15 bp, Homo sapiens
acacccctcaaatcc

SEQ ID NO: 373231 - DNA, 15 bp, Homo sapiens
cacacccctcaaatc

SEQ ID NO: 373232 - DNA, 15 bp, Homo sapiens
ccacacccctcaaat

SEQ ID NO: 373233 - DNA, 15 bp, Homo sapiens
cccacacccctcaaa

SEQ ID NO: 373234 - DNA, 15 bp, Homo sapiens
tcccacacccctcaa

SEQ ID NO: 373235 - DNA, 15 bp, Homo sapiens
ttcccacacccctca

SEQ ID NO: 373236 - DNA, 15 bp, Homo sapiens
attcccacacccctc

SEQ ID NO: 373237 - DNA, 15 bp, Homo sapiens
cattcccacacccct

SEQ ID NO: 373238 - DNA, 15 bp, Homo sapiens
tcattcccacacccc

SEQ ID NO: 373239 - DNA, 15 bp, Homo sapiens
atcattcccacaccc

SEQ ID NO: 373240 - DNA, 15 bp, Homo sapiens
gatcattcccacacc

SEQ ID NO: 373241 - DNA, 15 bp, Homo sapiens
ggatcattcccacac

SEQ ID NO: 373242 - DNA, 15 bp, Homo sapiens
gggatcattcccaca

SEQ ID NO: 373243 - DNA, 15 bp, Homo sapiens
ggggatcattcccac

SEQ ID NO: 373244 - DNA, 15 bp, Homo sapiens
gggggatcattccca

SEQ ID NO: 373245 - DNA, 15 bp, Homo sapiens
agggggatcattccc

SEQ ID NO: 373246 - DNA, 15 bp, Homo sapiens
tagggggatcattcc

SEQ ID NO: 373247 - DNA, 15 bp, Homo sapiens
atagggggatcattc

SEQ ID NO: 373248 - DNA, 15 bp, Homo sapiens
aatagggggatcatt

SEQ ID NO: 373249 - DNA, 15 bp, Homo sapiens
caatagggggatcat

SEQ ID NO: 373250 - DNA, 15 bp, Homo sapiens
tcaatagggggatca

SEQ ID NO: 373251 - DNA, 15 bp, Homo sapiens
atcaatagggggatc

SEQ ID NO: 373252 - DNA, 15 bp, Homo sapiens
catcaatagggggat

SEQ ID NO: 373253 - DNA, 15 bp, Homo sapiens
tcatcaataggggga

SEQ ID NO: 373254 - DNA, 15 bp, Homo sapiens
ctcatcaataggggg

SEQ ID NO: 373255 - DNA, 15 bp, Homo sapiens
tctcatcaatagggg

SEQ ID NO: 373256 - DNA, 15 bp, Homo sapiens
atctcatcaataggg

SEQ ID NO: 373257 - DNA, 15 bp, Homo sapiens
tatctcatcaatagg

SEQ ID NO: 373258 - DNA, 15 bp, Homo sapiens
atatctcatcaatag

SEQ ID NO: 373259 - DNA, 15 bp, Homo sapiens
gatatctcatcaata

SEQ ID NO: 373260 - DNA, 15 bp, Homo sapiens
ggatatctcatcaat

SEQ ID NO: 373261 - DNA, 15 bp, Homo sapiens
gggatatctcatcaa

SEQ ID NO: 373262 - DNA, 15 bp, Homo sapiens
agggatatctcatca

SEQ ID NO: 373263 - DNA, 15 bp, Homo sapiens
tagggatatctcatc

SEQ ID NO: 373264 - DNA, 15 bp, Homo sapiens
atagggatatctcat

SEQ ID NO: 373265 - DNA, 15 bp, Homo sapiens
catagggatatctca

SEQ ID NO: 373266 - DNA, 15 bp, Homo sapiens
ccatagggatatctc

SEQ ID NO: 373267 - DNA, 15 bp, Homo sapiens
tccatagggatatct

SEQ ID NO: 373268 - DNA, 15 bp, Homo sapiens
ttccatagggatatc

SEQ ID NO: 373269 - DNA, 15 bp, Homo sapiens
cttccatagggatat

SEQ ID NO: 373270 - DNA, 15 bp, Homo sapiens
gcttccatagggata

SEQ ID NO: 373271 - DNA, 15 bp, Homo sapiens
ggcttccatagggat

SEQ ID NO: 373272 - DNA, 15 bp, Homo sapiens
tggcttccataggga

SEQ ID NO: 373273 - DNA, 15 bp, Homo sapiens
ttggcttccataggg

SEQ ID NO: 373274 - DNA, 15 bp, Homo sapiens
tttggcttccatagg

SEQ ID NO: 373275 - DNA, 15 bp, Homo sapiens
ctttggcttccatag

SEQ ID NO: 373276 - DNA, 15 bp, Homo sapiens
tctttggcttccata

SEQ ID NO: 373277 - DNA, 15 bp, Homo sapiens
gtctttggcttccat

SEQ ID NO: 373278 - DNA, 15 bp, Homo sapiens
agtctttggcttcca

SEQ ID NO: 373279 - DNA, 15 bp, Homo sapiens
cagtctttggcttcc

SEQ ID NO: 373280 - DNA, 15 bp, Homo sapiens
gcagtctttggcttc

SEQ ID NO: 373281 - DNA, 15 bp, Homo sapiens
agcagtctttggctt

SEQ ID NO: 373282 - DNA, 15 bp, Homo sapiens
aagcagtctttggct

SEQ ID NO: 373283 - DNA, 15 bp, Homo sapiens
gaagcagtctttggc

SEQ ID NO: 373284 - DNA, 15 bp, Homo sapiens
ggaagcagtctttgg

SEQ ID NO: 373285 - DNA, 15 bp, Homo sapiens
tggaagcagtctttg

SEQ ID NO: 373286 - DNA, 15 bp, Homo sapiens
atggaagcagtcttt

SEQ ID NO: 373287 - DNA, 15 bp, Homo sapiens
aatggaagcagtctt

SEQ ID NO: 373288 - DNA, 15 bp, Homo sapiens
aaatggaagcagtct

SEQ ID NO: 373289 - DNA, 15 bp, Homo sapiens
aaaatggaagcagtc

SEQ ID NO: 373290 - DNA, 15 bp, Homo sapiens
taaaatggaagcagt

SEQ ID NO: 373291 - DNA, 15 bp, Homo sapiens
ttaaaatggaagcag

SEQ ID NO: 373292 - DNA, 15 bp, Homo sapiens
tttaaaatggaagca

SEQ ID NO: 373293 - DNA, 15 bp, Homo sapiens
ttttaaaatggaagc

SEQ ID NO: 373294 - DNA, 15 bp, Homo sapiens
attttaaaatggaag

SEQ ID NO: 373295 - DNA, 15 bp, Homo sapiens
tattttaaaatggaa

SEQ ID NO: 373296 - DNA, 15 bp, Homo sapiens
ttattttaaaatgga

SEQ ID NO: 373297 - DNA, 15 bp, Homo sapiens
tttattttaaaatgg

SEQ ID NO: 373298 - DNA, 15 bp, Homo sapiens
ttttattttaaaatg

SEQ ID NO: 373299 - DNA, 15 bp, Homo sapiens
tttttattttaaaat

SEQ ID NO: 373300 - DNA, 15 bp, Homo sapiens
ctttttattttaaaa

SEQ ID NO: 373301 - DNA, 15 bp, Homo sapiens
cctttttattttaaa

SEQ ID NO: 373302 - DNA, 15 bp, Homo sapiens
acctttttattttaa

SEQ ID NO: 373303 - DNA, 15 bp, Homo sapiens
aacctttttatttta

SEQ ID NO: 373304 - DNA, 15 bp, Homo sapiens
caacctttttatttt

SEQ ID NO: 373305 - DNA, 15 bp, Homo sapiens
acaacctttttattt

SEQ ID NO: 373306 - DNA, 15 bp, Homo sapiens
tacaacctttttatt

SEQ ID NO: 373307 - DNA, 15 bp, Homo sapiens
ctacaacctttttat

SEQ ID NO: 373308 - DNA, 15 bp, Homo sapiens
actacaaccttttta

SEQ ID NO: 373309 - DNA, 15 bp, Homo sapiens
aactacaaccttttt

SEQ ID NO: 373310 - DNA, 15 bp, Homo sapiens
gaactacaacctttt

SEQ ID NO: 373311 - DNA, 15 bp, Homo sapiens
agaactacaaccttt

SEQ ID NO: 373312 - DNA, 15 bp, Homo sapiens
aagaactacaacctt

SEQ ID NO: 373313 - DNA, 15 bp, Homo sapiens
aaagaactacaacct

SEQ ID NO: 373314 - DNA, 15 bp, Homo sapiens
gaaagaactacaacc

SEQ ID NO: 373315 - DNA, 15 bp, Homo sapiens
agaaagaactacaac

SEQ ID NO: 373316 - DNA, 15 bp, Homo sapiens
cagaaagaactacaa

SEQ ID NO: 373317 - DNA, 15 bp, Homo sapiens
acagaaagaactaca

SEQ ID NO: 373318 - DNA, 15 bp, Homo sapiens
gacagaaagaactac

SEQ ID NO: 373319 - DNA, 15 bp, Homo sapiens
agacagaaagaacta

SEQ ID NO: 373320 - DNA, 15 bp, Homo sapiens
gagacagaaagaact

SEQ ID NO: 373321 - DNA, 15 bp, Homo sapiens
agagacagaaagaac

SEQ ID NO: 373322 - DNA, 15 bp, Homo sapiens
aagagacagaaagaa

SEQ ID NO: 373323 - DNA, 15 bp, Homo sapiens
caagagacagaaaga

SEQ ID NO: 373324 - DNA, 15 bp, Homo sapiens
ccaagagacagaaag

SEQ ID NO: 373325 - DNA, 15 bp, Homo sapiens
gccaagagacagaaa

SEQ ID NO: 373326 - DNA, 15 bp, Homo sapiens
agccaagagacagaa

SEQ ID NO: 373327 - DNA, 15 bp, Homo sapiens
gagccaagagacaga

SEQ ID NO: 373328 - DNA, 15 bp, Homo sapiens
cgagccaagagacag

SEQ ID NO: 373329 - DNA, 15 bp, Homo sapiens
gcgagccaagagaca

SEQ ID NO: 373330 - DNA, 15 bp, Homo sapiens
tgcgagccaagagac

SEQ ID NO: 373331 - DNA, 15 bp, Homo sapiens
ttgcgagccaagaga

SEQ ID NO: 373332 - DNA, 15 bp, Homo sapiens
tttgcgagccaagag

SEQ ID NO: 373333 - DNA, 15 bp, Homo sapiens
gtttgcgagccaaga

SEQ ID NO: 373334 - DNA, 15 bp, Homo sapiens
agtttgcgagccaag

SEQ ID NO: 373335 - DNA, 15 bp, Homo sapiens
gagtttgcgagccaa

SEQ ID NO: 373336 - DNA, 15 bp, Homo sapiens
agagtttgcgagcca

SEQ ID NO: 373337 - DNA, 15 bp, Homo sapiens
aagagtttgcgagcc

SEQ ID NO: 373338 - DNA, 15 bp, Homo sapiens
gaagagtttgcgagc

SEQ ID NO: 373339 - DNA, 15 bp, Homo sapiens
ggaagagtttgcgag

SEQ ID NO: 373340 - DNA, 15 bp, Homo sapiens
tggaagagtttgcga

SEQ ID NO: 373341 - DNA, 15 bp, Homo sapiens
ttggaagagtttgcg

SEQ ID NO: 373342 - DNA, 15 bp, Homo sapiens
cttggaagagtttgc

SEQ ID NO: 373343 - DNA, 15 bp, Homo sapiens
acttggaagagtttg

SEQ ID NO: 373344 - DNA, 15 bp, Homo sapiens
tacttggaagagttt

SEQ ID NO: 373345 - DNA, 15 bp, Homo sapiens
atacttggaagagtt

SEQ ID NO: 373346 - DNA, 15 bp, Homo sapiens
catacttggaagagt

SEQ ID NO: 373347 - DNA, 15 bp, Homo sapiens
ccatacttggaagag

SEQ ID NO: 373348 - DNA, 15 bp, Homo sapiens
cccatacttggaaga

SEQ ID NO: 373349 - DNA, 15 bp, Homo sapiens
acccatacttggaag

SEQ ID NO: 373350 - DNA, 15 bp, Homo sapiens
cacccatacttggaa

SEQ ID NO: 373351 - DNA, 15 bp, Homo sapiens
tcacccatacttgga

SEQ ID NO: 373352 - DNA, 15 bp, Homo sapiens
ttcacccatacttgg

SEQ ID NO: 373353 - DNA, 15 bp, Homo sapiens
tttcacccatacttg

SEQ ID NO: 373354 - DNA, 15 bp, Homo sapiens
ctttcacccatactt

SEQ ID NO: 373355 - DNA, 15 bp, Homo sapiens
gctttcacccatact

SEQ ID NO: 373356 - DNA, 15 bp, Homo sapiens
agctttcacccatac

SEQ ID NO: 373357 - DNA, 15 bp, Homo sapiens
cagctttcacccata

SEQ ID NO: 373358 - DNA, 15 bp, Homo sapiens
tcagctttcacccat

SEQ ID NO: 373359 - DNA, 15 bp, Homo sapiens
ctcagctttcaccca

SEQ ID NO: 373360 - DNA, 15 bp, Homo sapiens
cctcagctttcaccc

SEQ ID NO: 373361 - DNA, 15 bp, Homo sapiens
tcctcagctttcacc

SEQ ID NO: 373362 - DNA, 15 bp, Homo sapiens
gtcctcagctttcac

SEQ ID NO: 373363 - DNA, 15 bp, Homo sapiens
agtcctcagctttca

SEQ ID NO: 373364 - DNA, 15 bp, Homo sapiens
gagtcctcagctttc

SEQ ID NO: 373365 - DNA, 15 bp, Homo sapiens
agagtcctcagcttt

SEQ ID NO: 373366 - DNA, 15 bp, Homo sapiens
cagagtcctcagctt

SEQ ID NO: 373367 - DNA, 15 bp, Homo sapiens
acagagtcctcagct

SEQ ID NO: 373368 - DNA, 15 bp, Homo sapiens
aacagagtcctcagc

SEQ ID NO: 373369 - DNA, 15 bp, Homo sapiens
gaacagagtcctcag

SEQ ID NO: 373370 - DNA, 15 bp, Homo sapiens
tgaacagagtcctca

SEQ ID NO: 373371 - DNA, 15 bp, Homo sapiens
ctgaacagagtcctc

SEQ ID NO: 373372 - DNA, 15 bp, Homo sapiens
tctgaacagagtcct

SEQ ID NO: 373373 - DNA, 15 bp, Homo sapiens
ttctgaacagagtcc

SEQ ID NO: 373374 - DNA, 15 bp, Homo sapiens
tttctgaacagagtc

SEQ ID NO: 373375 - DNA, 15 bp, Homo sapiens
ttttctgaacagagt

SEQ ID NO: 373376 - DNA, 15 bp, Homo sapiens
tttttctgaacagag

SEQ ID NO: 373377 - DNA, 15 bp, Homo sapiens
atttttctgaacaga

SEQ ID NO: 373378 - DNA, 15 bp, Homo sapiens
catttttctgaacag

SEQ ID NO: 373379 - DNA, 15 bp, Homo sapiens
gcatttttctgaaca

SEQ ID NO: 373380 - DNA, 15 bp, Homo sapiens
tgcatttttctgaac

SEQ ID NO: 373381 - DNA, 15 bp, Homo sapiens
atgcatttttctgaa

SEQ ID NO: 373382 - DNA, 15 bp, Homo sapiens
catgcatttttctga

SEQ ID NO: 373383 - DNA, 15 bp, Homo sapiens
gcatgcatttttctg

SEQ ID NO: 373384 - DNA, 15 bp, Homo sapiens
agcatgcatttttct

SEQ ID NO: 373385 - DNA, 15 bp, Homo sapiens
tagcatgcatttttc

SEQ ID NO: 373386 - DNA, 15 bp, Homo sapiens
atagcatgcattttt

SEQ ID NO: 373387 - DNA, 15 bp, Homo sapiens
tatagcatgcatttt

SEQ ID NO: 373388 - DNA, 15 bp, Homo sapiens
gtatagcatgcattt

SEQ ID NO: 373389 - DNA, 15 bp, Homo sapiens
ggtatagcatgcatt

SEQ ID NO: 373390 - DNA, 15 bp, Homo sapiens
tggtatagcatgcat

SEQ ID NO: 373391 - DNA, 15 bp, Homo sapiens
gtggtatagcatgca

SEQ ID NO: 373392 - DNA, 15 bp, Homo sapiens
tgtggtatagcatgc

SEQ ID NO: 373393 - DNA, 15 bp, Homo sapiens
ttgtggtatagcatg

SEQ ID NO: 373394 - DNA, 15 bp, Homo sapiens
attgtggtatagcat

SEQ ID NO: 373395 - DNA, 15 bp, Homo sapiens
aattgtggtatagca

SEQ ID NO: 373396 - DNA, 15 bp, Homo sapiens
aaattgtggtatagc

SEQ ID NO: 373397 - DNA, 15 bp, Homo sapiens
caaattgtggtatag

SEQ ID NO: 373398 - DNA, 15 bp, Homo sapiens
acaaattgtggtata

SEQ ID NO: 373399 - DNA, 15 bp, Homo sapiens
tacaaattgtggtat

SEQ ID NO: 373400 - DNA, 15 bp, Homo sapiens
atacaaattgtggta

SEQ ID NO: 373401 - DNA, 15 bp, Homo sapiens
tatacaaattgtggt

SEQ ID NO: 373402 - DNA, 15 bp, Homo sapiens
gtatacaaattgtgg

SEQ ID NO: 373403 - DNA, 15 bp, Homo sapiens
tgtatacaaattgtg

SEQ ID NO: 373404 - DNA, 15 bp, Homo sapiens
atgtatacaaattgt

SEQ ID NO: 373405 - DNA, 15 bp, Homo sapiens
gatgtatacaaattg

SEQ ID NO: 373406 - DNA, 15 bp, Homo sapiens
agatgtatacaaatt

SEQ ID NO: 373407 - DNA, 15 bp, Homo sapiens
cagatgtatacaaat

SEQ ID NO: 373408 - DNA, 15 bp, Homo sapiens
gcagatgtatacaaa

SEQ ID NO: 373409 - DNA, 15 bp, Homo sapiens
tgcagatgtatacaa

SEQ ID NO: 373410 - DNA, 15 bp, Homo sapiens
ctgcagatgtataca

SEQ ID NO: 373411 - DNA, 15 bp, Homo sapiens
cctgcagatgtatac

SEQ ID NO: 373412 - DNA, 15 bp, Homo sapiens
ccctgcagatgtata

SEQ ID NO: 373413 - DNA, 15 bp, Homo sapiens
cccctgcagatgtat

SEQ ID NO: 373414 - DNA, 15 bp, Homo sapiens
ccccctgcagatgta

SEQ ID NO: 373415 - DNA, 15 bp, Homo sapiens
gccccctgcagatgt

SEQ ID NO: 373416 - DNA, 15 bp, Homo sapiens
ggccccctgcagatg

SEQ ID NO: 373417 - DNA, 15 bp, Homo sapiens
cggccccctgcagat

SEQ ID NO: 373418 - DNA, 15 bp, Homo sapiens
tcggccccctgcaga

SEQ ID NO: 373419 - DNA, 15 bp, Homo sapiens
atcggccccctgcag

SEQ ID NO: 373420 - DNA, 15 bp, Homo sapiens
tatcggccccctgca

SEQ ID NO: 373421 - DNA, 15 bp, Homo sapiens
atatcggccccctgc

SEQ ID NO: 373422 - DNA, 15 bp, Homo sapiens
gatatcggccccctg

SEQ ID NO: 373423 - DNA, 15 bp, Homo sapiens
agatatcggccccct

SEQ ID NO: 373424 - DNA, 15 bp, Homo sapiens
aagatatcggccccc

SEQ ID NO: 373425 - DNA, 15 bp, Homo sapiens
aaagatatcggcccc

SEQ ID NO: 373426 - DNA, 15 bp, Homo sapiens
caaagatatcggccc

SEQ ID NO: 373427 - DNA, 15 bp, Homo sapiens
gcaaagatatcggcc

SEQ ID NO: 373428 - DNA, 15 bp, Homo sapiens
agcaaagatatcggc

SEQ ID NO: 373429 - DNA, 15 bp, Homo sapiens
cagcaaagatatcgg

SEQ ID NO: 373430 - DNA, 15 bp, Homo sapiens
tcagcaaagatatcg

SEQ ID NO: 373431 - DNA, 15 bp, Homo sapiens
ttcagcaaagatatc

SEQ ID NO: 373432 - DNA, 15 bp, Homo sapiens
cttcagcaaagatat

SEQ ID NO: 373433 - DNA, 15 bp, Homo sapiens
gcttcagcaaagata

SEQ ID NO: 373434 - DNA, 15 bp, Homo sapiens
ggcttcagcaaagat

SEQ ID NO: 373435 - DNA, 15 bp, Homo sapiens
gggcttcagcaaaga

SEQ ID NO: 373436 - DNA, 15 bp, Homo sapiens
tgggcttcagcaaag

SEQ ID NO: 373437 - DNA, 15 bp, Homo sapiens
ctgggcttcagcaaa

SEQ ID NO: 373438 - DNA, 15 bp, Homo sapiens
actgggcttcagcaa

SEQ ID NO: 373439 - DNA, 15 bp, Homo sapiens
gactgggcttcagca

SEQ ID NO: 373440 - DNA, 15 bp, Homo sapiens
ggactgggcttcagc

SEQ ID NO: 373441 - DNA, 15 bp, Homo sapiens
gggactgggcttcag

SEQ ID NO: 373442 - DNA, 15 bp, Homo sapiens
tgggactgggcttca

SEQ ID NO: 373443 - DNA, 15 bp, Homo sapiens
gtgggactgggcttc

SEQ ID NO: 373444 - DNA, 15 bp, Homo sapiens
ggtgggactgggctt

SEQ ID NO: 373445 - DNA, 15 bp, Homo sapiens
gggtgggactgggct

SEQ ID NO: 373446 - DNA, 15 bp, Homo sapiens
cgggtgggactgggc

SEQ ID NO: 373447 - DNA, 15 bp, Homo sapiens
acgggtgggactggg

SEQ ID NO: 373448 - DNA, 15 bp, Homo sapiens
cacgggtgggactgg

SEQ ID NO: 373449 - DNA, 15 bp, Homo sapiens
ccacgggtgggactg

SEQ ID NO: 373450 - DNA, 15 bp, Homo sapiens
tccacgggtgggact

SEQ ID NO: 373451 - DNA, 15 bp, Homo sapiens
ttccacgggtgggac

SEQ ID NO: 373452 - DNA, 15 bp, Homo sapiens
attccacgggtggga

SEQ ID NO: 373453 - DNA, 15 bp, Homo sapiens
gattccacgggtggg

SEQ ID NO: 373454 - DNA, 15 bp, Homo sapiens
ggattccacgggtgg

SEQ ID NO: 373455 - DNA, 15 bp, Homo sapiens
gggattccacgggtg

SEQ ID NO: 373456 - DNA, 15 bp, Homo sapiens
ggggattccacgggt

SEQ ID NO: 373457 - DNA, 15 bp, Homo sapiens
tggggattccacggg

SEQ ID NO: 373458 - DNA, 15 bp, Homo sapiens
ctggggattccacgg

SEQ ID NO: 373459 - DNA, 15 bp, Homo sapiens
actggggattccacg

SEQ ID NO: 373460 - DNA, 15 bp, Homo sapiens
aactggggattccac

SEQ ID NO: 373461 - DNA, 15 bp, Homo sapiens
gaactggggattcca

SEQ ID NO: 373462 - DNA, 15 bp, Homo sapiens
tgaactggggattcc

SEQ ID NO: 373463 - DNA, 15 bp, Homo sapiens
ctgaactggggattc

SEQ ID NO: 373464 - DNA, 15 bp, Homo sapiens
cctgaactggggatt

SEQ ID NO: 373465 - DNA, 15 bp, Homo sapiens
tcctgaactggggat

SEQ ID NO: 373466 - DNA, 15 bp, Homo sapiens
ttcctgaactgggga

SEQ ID NO: 373467 - DNA, 15 bp, Homo sapiens
tttcctgaactgggg

SEQ ID NO: 373468 - DNA, 15 bp, Homo sapiens
atttcctgaactggg

SEQ ID NO: 373469 - DNA, 15 bp, Homo sapiens
gatttcctgaactgg

SEQ ID NO: 373470 - DNA, 15 bp, Homo sapiens
agatttcctgaactg

SEQ ID NO: 373471 - DNA, 15 bp, Homo sapiens
tagatttcctgaact

SEQ ID NO: 373472 - DNA, 15 bp, Homo sapiens
atagatttcctgaac

SEQ ID NO: 373473 - DNA, 15 bp, Homo sapiens
catagatttcctgaa

SEQ ID NO: 373474 - DNA, 15 bp, Homo sapiens
gcatagatttcctga

SEQ ID NO: 373475 - DNA, 15 bp, Homo sapiens
agcatagatttcctg

SEQ ID NO: 373476 - DNA, 15 bp, Homo sapiens
aagcatagatttcct

SEQ ID NO: 373477 - DNA, 15 bp, Homo sapiens
taagcatagatttcc

SEQ ID NO: 373478 - DNA, 15 bp, Homo sapiens
ataagcatagatttc

SEQ ID NO: 373479 - DNA, 15 bp, Homo sapiens
cataagcatagattt

SEQ ID NO: 373480 - DNA, 15 bp, Homo sapiens
tcataagcatagatt

SEQ ID NO: 373481 - DNA, 15 bp, Homo sapiens
ctcataagcatagat

SEQ ID NO: 373482 - DNA, 15 bp, Homo sapiens
cctcataagcataga

SEQ ID NO: 373483 - DNA, 15 bp, Homo sapiens
tcctcataagcatag

SEQ ID NO: 373484 - DNA, 15 bp, Homo sapiens
gtcctcataagcata

SEQ ID NO: 373485 - DNA, 15 bp, Homo sapiens
agtcctcataagcat

SEQ ID NO: 373486 - DNA, 15 bp, Homo sapiens
tagtcctcataagca

SEQ ID NO: 373487 - DNA, 15 bp, Homo sapiens
ctagtcctcataagc

SEQ ID NO: 373488 - DNA, 15 bp, Homo sapiens
actagtcctcataag

SEQ ID NO: 373489 - DNA, 15 bp, Homo sapiens
aactagtcctcataa

SEQ ID NO: 373490 - DNA, 15 bp, Homo sapiens
taactagtcctcata

SEQ ID NO: 373491 - DNA, 15 bp, Homo sapiens
ataactagtcctcat

SEQ ID NO: 373492 - DNA, 15 bp, Homo sapiens
cataactagtcctca

SEQ ID NO: 373493 - DNA, 15 bp, Homo sapiens
ccataactagtcctc

SEQ ID NO: 373494 - DNA, 15 bp, Homo sapiens
cccataactagtcct

SEQ ID NO: 373495 - DNA, 15 bp, Homo sapiens
ccccataactagtcc

SEQ ID NO: 373496 - DNA, 15 bp, Homo sapiens
cccccataactagtc

SEQ ID NO: 373497 - DNA, 15 bp, Homo sapiens
acccccataactagt

SEQ ID NO: 373498 - DNA, 15 bp, Homo sapiens
cacccccataactag

SEQ ID NO: 373499 - DNA, 15 bp, Homo sapiens
gcacccccataacta

SEQ ID NO: 373500 - DNA, 15 bp, Homo sapiens
tgcacccccataact

SEQ ID NO: 373501 - DNA, 15 bp, Homo sapiens
ttgcacccccataac

SEQ ID NO: 373502 - DNA, 15 bp, Homo sapiens
tttgcacccccataa

SEQ ID NO: 373503 - DNA, 15 bp, Homo sapiens
ctttgcacccccata

SEQ ID NO: 373504 - DNA, 15 bp, Homo sapiens
cctttgcacccccat

SEQ ID NO: 373505 - DNA, 15 bp, Homo sapiens
tcctttgcaccccca

SEQ ID NO: 373506 - DNA, 15 bp, Homo sapiens
ctcctttgcaccccc

SEQ ID NO: 373507 - DNA, 15 bp, Homo sapiens
tctcctttgcacccc

SEQ ID NO: 373508 - DNA, 15 bp, Homo sapiens
ctctcctttgcaccc

SEQ ID NO: 373509 - DNA, 15 bp, Homo sapiens
gctctcctttgcacc

SEQ ID NO: 373510 - DNA, 15 bp, Homo sapiens
ggctctcctttgcac

SEQ ID NO: 373511 - DNA, 15 bp, Homo sapiens
aggctctcctttgca

SEQ ID NO: 373512 - DNA, 15 bp, Homo sapiens
aaggctctcctttgc

SEQ ID NO: 373513 - DNA, 15 bp, Homo sapiens
taaggctctcctttg

SEQ ID NO: 373514 - DNA, 15 bp, Homo sapiens
ttaaggctctccttt

SEQ ID NO: 373515 - DNA, 15 bp, Homo sapiens
cttaaggctctcctt

SEQ ID NO: 373516 - DNA, 15 bp, Homo sapiens
tcttaaggctctcct

SEQ ID NO: 373517 - DNA, 15 bp, Homo sapiens
ctcttaaggctctcc

SEQ ID NO: 373518 - DNA, 15 bp, Homo sapiens
tctcttaaggctctc

SEQ ID NO: 373519 - DNA, 15 bp, Homo sapiens
ctctcttaaggctct

SEQ ID NO: 373520 - DNA, 15 bp, Homo sapiens
gctctcttaaggctc

SEQ ID NO: 373521 - DNA, 15 bp, Homo sapiens
agctctcttaaggct

SEQ ID NO: 373522 - DNA, 15 bp, Homo sapiens
cagctctcttaaggc

SEQ ID NO: 373523 - DNA, 15 bp, Homo sapiens
tcagctctcttaagg

SEQ ID NO: 373524 - DNA, 15 bp, Homo sapiens
ctcagctctcttaag

SEQ ID NO: 373525 - DNA, 15 bp, Homo sapiens
cctcagctctcttaa

SEQ ID NO: 373526 - DNA, 15 bp, Homo sapiens
gcctcagctctctta

SEQ ID NO: 373527 - DNA, 15 bp, Homo sapiens
ggcctcagctctctt

SEQ ID NO: 373528 - DNA, 15 bp, Homo sapiens
aggcctcagctctct

SEQ ID NO: 373529 - DNA, 15 bp, Homo sapiens
aaggcctcagctctc

SEQ ID NO: 373530 - DNA, 15 bp, Homo sapiens
aaaggcctcagctct

SEQ ID NO: 373531 - DNA, 15 bp, Homo sapiens
aaaaggcctcagctc

SEQ ID NO: 373532 - DNA, 15 bp, Homo sapiens
aaaaaggcctcagct

SEQ ID NO: 373533 - DNA, 15 bp, Homo sapiens
gaaaaaggcctcagc

SEQ ID NO: 373534 - DNA, 15 bp, Homo sapiens
agaaaaaggcctcag

SEQ ID NO: 373535 - DNA, 15 bp, Homo sapiens
aagaaaaaggcctca

SEQ ID NO: 373536 - DNA, 15 bp, Homo sapiens
aaagaaaaaggcctc

SEQ ID NO: 373537 - DNA, 15 bp, Homo sapiens
aaaagaaaaaggcct

SEQ ID NO: 373538 - DNA, 15 bp, Homo sapiens
taaaagaaaaaggcc

SEQ ID NO: 373539 - DNA, 15 bp, Homo sapiens
ataaaagaaaaaggc

SEQ ID NO: 373540 - DNA, 15 bp, Homo sapiens
aataaaagaaaaagg

SEQ ID NO: 373541 - DNA, 15 bp, Homo sapiens
caataaaagaaaaag

SEQ ID NO: 373542 - DNA, 15 bp, Homo sapiens
acaataaaagaaaaa

SEQ ID NO: 373543 - DNA, 15 bp, Homo sapiens
cacaataaaagaaaa

SEQ ID NO: 373544 - DNA, 15 bp, Homo sapiens
ccacaataaaagaaa

SEQ ID NO: 373545 - DNA, 15 bp, Homo sapiens
accacaataaaagaa

SEQ ID NO: 373546 - DNA, 15 bp, Homo sapiens
taccacaataaaaga

SEQ ID NO: 373547 - DNA, 15 bp, Homo sapiens
ttaccacaataaaag

SEQ ID NO: 373548 - DNA, 15 bp, Homo sapiens
tttaccacaataaaa

SEQ ID NO: 373549 - DNA, 15 bp, Homo sapiens
ttttaccacaataaa

SEQ ID NO: 373550 - DNA, 15 bp, Homo sapiens
attttaccacaataa

SEQ ID NO: 373551 - DNA, 15 bp, Homo sapiens
tattttaccacaata

SEQ ID NO: 373552 - DNA, 15 bp, Homo sapiens
atattttaccacaat

SEQ ID NO: 373553 - DNA, 15 bp, Homo sapiens
tatattttaccacaa

SEQ ID NO: 373554 - DNA, 15 bp, Homo sapiens
gtatattttaccaca

SEQ ID NO: 373555 - DNA, 15 bp, Homo sapiens
tgtatattttaccac

SEQ ID NO: 373556 - DNA, 15 bp, Homo sapiens
atgtatattttacca

SEQ ID NO: 373557 - DNA, 15 bp, Homo sapiens
tatgtatattttacc

SEQ ID NO: 373558 - DNA, 15 bp, Homo sapiens
ttatgtatattttac

SEQ ID NO: 373559 - DNA, 15 bp, Homo sapiens
tttatgtatatttta

SEQ ID NO: 373560 - DNA, 15 bp, Homo sapiens
ttttatgtatatttt

SEQ ID NO: 373561 - DNA, 15 bp, Homo sapiens
attttatgtatattt

SEQ ID NO: 373562 - DNA, 15 bp, Homo sapiens
tattttatgtatatt

SEQ ID NO: 373563 - DNA, 15 bp, Homo sapiens
atattttatgtatat

SEQ ID NO: 373564 - DNA, 15 bp, Homo sapiens
tatattttatgtata

SEQ ID NO: 373565 - DNA, 15 bp, Homo sapiens
gtatattttatgtat

SEQ ID NO: 373566 - DNA, 15 bp, Homo sapiens
ggtatattttatgta

SEQ ID NO: 373567 - DNA, 15 bp, Homo sapiens
tggtatattttatgt

SEQ ID NO: 373568 - DNA, 15 bp, Homo sapiens
atggtatattttatg

SEQ ID NO: 373569 - DNA, 15 bp, Homo sapiens
tatggtatattttat

SEQ ID NO: 373570 - DNA, 15 bp, Homo sapiens
atatggtatatttta

SEQ ID NO: 373571 - DNA, 15 bp, Homo sapiens
aatatggtatatttt

SEQ ID NO: 373572 - DNA, 15 bp, Homo sapiens
taatatggtatattt

SEQ ID NO: 373573 - DNA, 15 bp, Homo sapiens
ttaatatggtatatt

SEQ ID NO: 373574 - DNA, 15 bp, Homo sapiens
gttaatatggtatat

SEQ ID NO: 373575 - DNA, 15 bp, Homo sapiens
tgttaatatggtata

SEQ ID NO: 373576 - DNA, 15 bp, Homo sapiens
ttgttaatatggtat

SEQ ID NO: 373577 - DNA, 15 bp, Homo sapiens
attgttaatatggta

SEQ ID NO: 373578 - DNA, 15 bp, Homo sapiens
aattgttaatatggt

SEQ ID NO: 373579 - DNA, 15 bp, Homo sapiens
aaattgttaatatgg

SEQ ID NO: 373580 - DNA, 15 bp, Homo sapiens
aaaattgttaatatg

SEQ ID NO: 373581 - DNA, 15 bp, Homo sapiens
aaaaattgttaatat

SEQ ID NO: 373582 - DNA, 15 bp, Homo sapiens
taaaaattgttaata

SEQ ID NO: 373583 - DNA, 15 bp, Homo sapiens
ttaaaaattgttaat

SEQ ID NO: 373584 - DNA, 15 bp, Homo sapiens
cttaaaaattgttaa

SEQ ID NO: 373585 - DNA, 15 bp, Homo sapiens
acttaaaaattgtta

SEQ ID NO: 373586 - DNA, 15 bp, Homo sapiens
cacttaaaaattgtt

SEQ ID NO: 373587 - DNA, 15 bp, Homo sapiens
acacttaaaaattgt

SEQ ID NO: 373588 - DNA, 15 bp, Homo sapiens
tacacttaaaaattg

SEQ ID NO: 373589 - DNA, 15 bp, Homo sapiens
atacacttaaaaatt

SEQ ID NO: 373590 - DNA, 15 bp, Homo sapiens
tatacacttaaaaat

SEQ ID NO: 373591 - DNA, 15 bp, Homo sapiens
ctatacacttaaaaa

SEQ ID NO: 373592 - DNA, 15 bp, Homo sapiens
actatacacttaaaa

SEQ ID NO: 373593 - DNA, 15 bp, Homo sapiens
aactatacacttaaa

SEQ ID NO: 373594 - DNA, 15 bp, Homo sapiens
gaactatacacttaa

SEQ ID NO: 373595 - DNA, 15 bp, Homo sapiens
agaactatacactta

SEQ ID NO: 373596 - DNA, 15 bp, Homo sapiens
cagaactatacactt

SEQ ID NO: 373597 - DNA, 15 bp, Homo sapiens
acagaactatacact

SEQ ID NO: 373598 - DNA, 15 bp, Homo sapiens
cacagaactatacac

SEQ ID NO: 373599 - DNA, 15 bp, Homo sapiens
ccacagaactataca

SEQ ID NO: 373600 - DNA, 15 bp, Homo sapiens
gccacagaactatac

SEQ ID NO: 373601 - DNA, 15 bp, Homo sapiens
tgccacagaactata

SEQ ID NO: 373602 - DNA, 15 bp, Homo sapiens
atgccacagaactat

SEQ ID NO: 373603 - DNA, 15 bp, Homo sapiens
aatgccacagaacta

SEQ ID NO: 373604 - DNA, 15 bp, Homo sapiens
taatgccacagaact

SEQ ID NO: 373605 - DNA, 15 bp, Homo sapiens
ttaatgccacagaac

SEQ ID NO: 373606 - DNA, 15 bp, Homo sapiens
cttaatgccacagaa

SEQ ID NO: 373607 - DNA, 15 bp, Homo sapiens
acttaatgccacaga

SEQ ID NO: 373608 - DNA, 15 bp, Homo sapiens
tacttaatgccacag

SEQ ID NO: 373609 - DNA, 15 bp, Homo sapiens
gtacttaatgccaca

SEQ ID NO: 373610 - DNA, 15 bp, Homo sapiens
tgtacttaatgccac

SEQ ID NO: 373611 - DNA, 15 bp, Homo sapiens
atgtacttaatgcca

SEQ ID NO: 373612 - DNA, 15 bp, Homo sapiens
aatgtacttaatgcc

SEQ ID NO: 373613 - DNA, 15 bp, Homo sapiens
gaatgtacttaatgc

SEQ ID NO: 373614 - DNA, 15 bp, Homo sapiens
tgaatgtacttaatg

SEQ ID NO: 373615 - DNA, 15 bp, Homo sapiens
atgaatgtacttaat

SEQ ID NO: 373616 - DNA, 15 bp, Homo sapiens
tatgaatgtacttaa

SEQ ID NO: 373617 - DNA, 15 bp, Homo sapiens
atatgaatgtactta

SEQ ID NO: 373618 - DNA, 15 bp, Homo sapiens
aatatgaatgtactt

SEQ ID NO: 373619 - DNA, 15 bp, Homo sapiens
caatatgaatgtact

SEQ ID NO: 373620 - DNA, 15 bp, Homo sapiens
acaatatgaatgtac

SEQ ID NO: 373621 - DNA, 15 bp, Homo sapiens
cacaatatgaatgta

SEQ ID NO: 373622 - DNA, 15 bp, Homo sapiens
gcacaatatgaatgt

SEQ ID NO: 373623 - DNA, 15 bp, Homo sapiens
agcacaatatgaatg

SEQ ID NO: 373624 - DNA, 15 bp, Homo sapiens
tagcacaatatgaat

SEQ ID NO: 373625 - DNA, 15 bp, Homo sapiens
atagcacaatatgaa

SEQ ID NO: 373626 - DNA, 15 bp, Homo sapiens
aatagcacaatatga

SEQ ID NO: 373627 - DNA, 15 bp, Homo sapiens
taatagcacaatatg

SEQ ID NO: 373628 - DNA, 15 bp, Homo sapiens
ataatagcacaatat

SEQ ID NO: 373629 - DNA, 15 bp, Homo sapiens
gataatagcacaata

SEQ ID NO: 373630 - DNA, 15 bp, Homo sapiens
ggataatagcacaat

SEQ ID NO: 373631 - DNA, 15 bp, Homo sapiens
gggataatagcacaa

SEQ ID NO: 373632 - DNA, 15 bp, Homo sapiens
ggggataatagcaca

SEQ ID NO: 373633 - DNA, 15 bp, Homo sapiens
tggggataatagcac

SEQ ID NO: 373634 - DNA, 15 bp, Homo sapiens
gtggggataatagca

SEQ ID NO: 373635 - DNA, 15 bp, Homo sapiens
ggtggggataatagc

SEQ ID NO: 373636 - DNA, 15 bp, Homo sapiens
cggtggggataatag

SEQ ID NO: 373637 - DNA, 15 bp, Homo sapiens
acggtggggataata

SEQ ID NO: 373638 - DNA, 15 bp, Homo sapiens
gacggtggggataat

SEQ ID NO: 373639 - DNA, 15 bp, Homo sapiens
ggacggtggggataa

SEQ ID NO: 373640 - DNA, 15 bp, Homo sapiens
tggacggtggggata

SEQ ID NO: 373641 - DNA, 15 bp, Homo sapiens
gtggacggtggggat

SEQ ID NO: 373642 - DNA, 15 bp, Homo sapiens
tgtggacggtgggga

SEQ ID NO: 373643 - DNA, 15 bp, Homo sapiens
atgtggacggtgggg

SEQ ID NO: 373644 - DNA, 15 bp, Homo sapiens
gatgtggacggtggg

SEQ ID NO: 373645 - DNA, 15 bp, Homo sapiens
ggatgtggacggtgg

SEQ ID NO: 373646 - DNA, 15 bp, Homo sapiens
tggatgtggacggtg

SEQ ID NO: 373647 - DNA, 15 bp, Homo sapiens
ctggatgtggacggt

SEQ ID NO: 373648 - DNA, 15 bp, Homo sapiens
tctggatgtggacgg

SEQ ID NO: 373649 - DNA, 15 bp, Homo sapiens
ttctggatgtggacg

SEQ ID NO: 373650 - DNA, 15 bp, Homo sapiens
gttctggatgtggac

SEQ ID NO: 373651 - DNA, 15 bp, Homo sapiens
agttctggatgtgga

SEQ ID NO: 373652 - DNA, 15 bp, Homo sapiens
aagttctggatgtgg

SEQ ID NO: 373653 - DNA, 15 bp, Homo sapiens
aaagttctggatgtg

SEQ ID NO: 373654 - DNA, 15 bp, Homo sapiens
aaaagttctggatgt

SEQ ID NO: 373655 - DNA, 15 bp, Homo sapiens
aaaaagttctggatg

SEQ ID NO: 373656 - DNA, 15 bp, Homo sapiens
gaaaaagttctggat

SEQ ID NO: 373657 - DNA, 15 bp, Homo sapiens
tgaaaaagttctgga

SEQ ID NO: 373658 - DNA, 15 bp, Homo sapiens
atgaaaaagttctgg

SEQ ID NO: 373659 - DNA, 15 bp, Homo sapiens
gatgaaaaagttctg

SEQ ID NO: 373660 - DNA, 15 bp, Homo sapiens
agatgaaaaagttct

SEQ ID NO: 373661 - DNA, 15 bp, Homo sapiens
aagatgaaaaagttc

SEQ ID NO: 373662 - DNA, 15 bp, Homo sapiens
gaagatgaaaaagtt

SEQ ID NO: 373663 - DNA, 15 bp, Homo sapiens
ggaagatgaaaaagt

SEQ ID NO: 373664 - DNA, 15 bp, Homo sapiens
gggaagatgaaaaag

SEQ ID NO: 373665 - DNA, 15 bp, Homo sapiens
agggaagatgaaaaa

SEQ ID NO: 373666 - DNA, 15 bp, Homo sapiens
tagggaagatgaaaa

SEQ ID NO: 373667 - DNA, 15 bp, Homo sapiens
ctagggaagatgaaa

SEQ ID NO: 373668 - DNA, 15 bp, Homo sapiens
gctagggaagatgaa

SEQ ID NO: 373669 - DNA, 15 bp, Homo sapiens
agctagggaagatga

SEQ ID NO: 373670 - DNA, 15 bp, Homo sapiens
cagctagggaagatg

SEQ ID NO: 373671 - DNA, 15 bp, Homo sapiens
tcagctagggaagat

SEQ ID NO: 373672 - DNA, 15 bp, Homo sapiens
ttcagctagggaaga

SEQ ID NO: 373673 - DNA, 15 bp, Homo sapiens
tttcagctagggaag

SEQ ID NO: 373674 - DNA, 15 bp, Homo sapiens
gtttcagctagggaa

SEQ ID NO: 373675 - DNA, 15 bp, Homo sapiens
agtttcagctaggga

SEQ ID NO: 373676 - DNA, 15 bp, Homo sapiens
aagtttcagctaggg

SEQ ID NO: 373677 - DNA, 15 bp, Homo sapiens
aaagtttcagctagg

SEQ ID NO: 373678 - DNA, 15 bp, Homo sapiens
caaagtttcagctag

SEQ ID NO: 373679 - DNA, 15 bp, Homo sapiens
acaaagtttcagcta

SEQ ID NO: 373680 - DNA, 15 bp, Homo sapiens
aacaaagtttcagct

SEQ ID NO: 373681 - DNA, 15 bp, Homo sapiens
gaacaaagtttcagc

SEQ ID NO: 373682 - DNA, 15 bp, Homo sapiens
ggaacaaagtttcag

SEQ ID NO: 373683 - DNA, 15 bp, Homo sapiens
gggaacaaagtttca

SEQ ID NO: 373684 - DNA, 15 bp, Homo sapiens
tgggaacaaagtttc

SEQ ID NO: 373685 - DNA, 15 bp, Homo sapiens
atgggaacaaagttt

SEQ ID NO: 373686 - DNA, 15 bp, Homo sapiens
catgggaacaaagtt

SEQ ID NO: 373687 - DNA, 15 bp, Homo sapiens
tcatgggaacaaagt

SEQ ID NO: 373688 - DNA, 15 bp, Homo sapiens
ttcatgggaacaaag

SEQ ID NO: 373689 - DNA, 15 bp, Homo sapiens
tttcatgggaacaaa

SEQ ID NO: 373690 - DNA, 15 bp, Homo sapiens
gtttcatgggaacaa

SEQ ID NO: 373691 - DNA, 15 bp, Homo sapiens
tgtttcatgggaaca

SEQ ID NO: 373692 - DNA, 15 bp, Homo sapiens
gtgtttcatgggaac

SEQ ID NO: 373693 - DNA, 15 bp, Homo sapiens
agtgtttcatgggaa

SEQ ID NO: 373694 - DNA, 15 bp, Homo sapiens
tagtgtttcatggga

SEQ ID NO: 373695 - DNA, 15 bp, Homo sapiens
ttagtgtttcatggg

SEQ ID NO: 373696 - DNA, 15 bp, Homo sapiens
gttagtgtttcatgg

SEQ ID NO: 373697 - DNA, 15 bp, Homo sapiens
agttagtgtttcatg

SEQ ID NO: 373698 - DNA, 15 bp, Homo sapiens
aagttagtgtttcat

SEQ ID NO: 373699 - DNA, 15 bp, Homo sapiens
gaagttagtgtttca

SEQ ID NO: 373700 - DNA, 15 bp, Homo sapiens
ggaagttagtgtttc

SEQ ID NO: 373701 - DNA, 15 bp, Homo sapiens
gggaagttagtgttt

SEQ ID NO: 373702 - DNA, 15 bp, Homo sapiens
agggaagttagtgtt

SEQ ID NO: 373703 - DNA, 15 bp, Homo sapiens
aagggaagttagtgt

SEQ ID NO: 373704 - DNA, 15 bp, Homo sapiens
gaagggaagttagtg

SEQ ID NO: 373705 - DNA, 15 bp, Homo sapiens
agaagggaagttagt

SEQ ID NO: 373706 - DNA, 15 bp, Homo sapiens
gagaagggaagttag

SEQ ID NO: 373707 - DNA, 15 bp, Homo sapiens
ggagaagggaagtta

SEQ ID NO: 373708 - DNA, 15 bp, Homo sapiens
gggagaagggaagtt

SEQ ID NO: 373709 - DNA, 15 bp, Homo sapiens
ggggagaagggaagt

SEQ ID NO: 373710 - DNA, 15 bp, Homo sapiens
aggggagaagggaag

SEQ ID NO: 373711 - DNA, 15 bp, Homo sapiens
gaggggagaagggaa

SEQ ID NO: 373712 - DNA, 15 bp, Homo sapiens
ggaggggagaaggga

SEQ ID NO: 373713 - DNA, 15 bp, Homo sapiens
gggaggggagaaggg

SEQ ID NO: 373714 - DNA, 15 bp, Homo sapiens
ggggaggggagaagg

SEQ ID NO: 373715 - DNA, 15 bp, Homo sapiens
gggggaggggagaag

SEQ ID NO: 373716 - DNA, 15 bp, Homo sapiens
tgggggaggggagaa

SEQ ID NO: 373717 - DNA, 15 bp, Homo sapiens
ctgggggaggggaga

SEQ ID NO: 373718 - DNA, 15 bp, Homo sapiens
gctgggggaggggag

SEQ ID NO: 373719 - DNA, 15 bp, Homo sapiens
tgctgggggagggga

SEQ ID NO: 373720 - DNA, 15 bp, Homo sapiens
gtgctgggggagggg

SEQ ID NO: 373721 - DNA, 15 bp, Homo sapiens
agtgctgggggaggg

SEQ ID NO: 373722 - DNA, 15 bp, Homo sapiens
aagtgctgggggagg

SEQ ID NO: 373723 - DNA, 15 bp, Homo sapiens
caagtgctgggggag

SEQ ID NO: 373724 - DNA, 15 bp, Homo sapiens
ccaagtgctggggga

SEQ ID NO: 373725 - DNA, 15 bp, Homo sapiens
gccaagtgctggggg

SEQ ID NO: 373726 - DNA, 15 bp, Homo sapiens
tgccaagtgctgggg

SEQ ID NO: 373727 - DNA, 15 bp, Homo sapiens
gtgccaagtgctggg

SEQ ID NO: 373728 - DNA, 15 bp, Homo sapiens
ggtgccaagtgctgg

SEQ ID NO: 373729 - DNA, 15 bp, Homo sapiens
gggtgccaagtgctg

SEQ ID NO: 373730 - DNA, 15 bp, Homo sapiens
tgggtgccaagtgct

SEQ ID NO: 373731 - DNA, 15 bp, Homo sapiens
gtgggtgccaagtgc

SEQ ID NO: 373732 - DNA, 15 bp, Homo sapiens
ggtgggtgccaagtg

SEQ ID NO: 373733 - DNA, 15 bp, Homo sapiens
tggtgggtgccaagt

SEQ ID NO: 373734 - DNA, 15 bp, Homo sapiens
atggtgggtgccaag

SEQ ID NO: 373735 - DNA, 15 bp, Homo sapiens
aatggtgggtgccaa

SEQ ID NO: 373736 - DNA, 15 bp, Homo sapiens
gaatggtgggtgcca

SEQ ID NO: 373737 - DNA, 15 bp, Homo sapiens
agaatggtgggtgcc

SEQ ID NO: 373738 - DNA, 15 bp, Homo sapiens
aagaatggtgggtgc

SEQ ID NO: 373739 - DNA, 15 bp, Homo sapiens
aaagaatggtgggtg

SEQ ID NO: 373740 - DNA, 15 bp, Homo sapiens
gaaagaatggtgggt

SEQ ID NO: 373741 - DNA, 15 bp, Homo sapiens
agaaagaatggtggg

SEQ ID NO: 373742 - DNA, 15 bp, Homo sapiens
cagaaagaatggtgg

SEQ ID NO: 373743 - DNA, 15 bp, Homo sapiens
acagaaagaatggtg

SEQ ID NO: 373744 - DNA, 15 bp, Homo sapiens
gacagaaagaatggt

SEQ ID NO: 373745 - DNA, 15 bp, Homo sapiens
agacagaaagaatgg

SEQ ID NO: 373746 - DNA, 15 bp, Homo sapiens
tagacagaaagaatg

SEQ ID NO: 373747 - DNA, 15 bp, Homo sapiens
atagacagaaagaat

SEQ ID NO: 373748 - DNA, 15 bp, Homo sapiens
catagacagaaagaa

SEQ ID NO: 373749 - DNA, 15 bp, Homo sapiens
tcatagacagaaaga

SEQ ID NO: 373750 - DNA, 15 bp, Homo sapiens
ttcatagacagaaag

SEQ ID NO: 373751 - DNA, 15 bp, Homo sapiens
attcatagacagaaa

SEQ ID NO: 373752 - DNA, 15 bp, Homo sapiens
aattcatagacagaa

SEQ ID NO: 373753 - DNA, 15 bp, Homo sapiens
aaattcatagacaga

SEQ ID NO: 373754 - DNA, 15 bp, Homo sapiens
caaattcatagacag

SEQ ID NO: 373755 - DNA, 15 bp, Homo sapiens
gcaaattcatagaca

SEQ ID NO: 373756 - DNA, 15 bp, Homo sapiens
ggcaaattcatagac

SEQ ID NO: 373757 - DNA, 15 bp, Homo sapiens
aggcaaattcataga

SEQ ID NO: 373758 - DNA, 15 bp, Homo sapiens
gaggcaaattcatag

SEQ ID NO: 373759 - DNA, 15 bp, Homo sapiens
ggaggcaaattcata

SEQ ID NO: 373760 - DNA, 15 bp, Homo sapiens
aggaggcaaattcat

SEQ ID NO: 373761 - DNA, 15 bp, Homo sapiens
gaggaggcaaattca

SEQ ID NO: 373762 - DNA, 15 bp, Homo sapiens
ggaggaggcaaattc

SEQ ID NO: 373763 - DNA, 15 bp, Homo sapiens
aggaggaggcaaatt

SEQ ID NO: 373764 - DNA, 15 bp, Homo sapiens
gaggaggaggcaaat

SEQ ID NO: 373765 - DNA, 15 bp, Homo sapiens
agaggaggaggcaaa

SEQ ID NO: 373766 - DNA, 15 bp, Homo sapiens
tagaggaggaggcaa

SEQ ID NO: 373767 - DNA, 15 bp, Homo sapiens
ctagaggaggaggca

SEQ ID NO: 373768 - DNA, 15 bp, Homo sapiens
cctagaggaggaggc

SEQ ID NO: 373769 - DNA, 15 bp, Homo sapiens
acctagaggaggagg

SEQ ID NO: 373770 - DNA, 15 bp, Homo sapiens
tacctagaggaggag

SEQ ID NO: 373771 - DNA, 15 bp, Homo sapiens
gtacctagaggagga

SEQ ID NO: 373772 - DNA, 15 bp, Homo sapiens
agtacctagaggagg

SEQ ID NO: 373773 - DNA, 15 bp, Homo sapiens
aagtacctagaggag

SEQ ID NO: 373774 - DNA, 15 bp, Homo sapiens
gaagtacctagagga

SEQ ID NO: 373775 - DNA, 15 bp, Homo sapiens
tgaagtacctagagg

SEQ ID NO: 373776 - DNA, 15 bp, Homo sapiens
atgaagtacctagag

SEQ ID NO: 373777 - DNA, 15 bp, Homo sapiens
tatgaagtacctaga

SEQ ID NO: 373778 - DNA, 15 bp, Homo sapiens
ctatgaagtacctag

SEQ ID NO: 373779 - DNA, 15 bp, Homo sapiens
tctatgaagtaccta

SEQ ID NO: 373780 - DNA, 15 bp, Homo sapiens
ttctatgaagtacct

SEQ ID NO: 373781 - DNA, 15 bp, Homo sapiens
attctatgaagtacc

SEQ ID NO: 373782 - DNA, 15 bp, Homo sapiens
tattctatgaagtac

SEQ ID NO: 373783 - DNA, 15 bp, Homo sapiens
ctattctatgaagta

SEQ ID NO: 373784 - DNA, 15 bp, Homo sapiens
actattctatgaagt

SEQ ID NO: 373785 - DNA, 15 bp, Homo sapiens
cactattctatgaag

SEQ ID NO: 373786 - DNA, 15 bp, Homo sapiens
ccactattctatgaa

SEQ ID NO: 373787 - DNA, 15 bp, Homo sapiens
tccactattctatga

SEQ ID NO: 373788 - DNA, 15 bp, Homo sapiens
ttccactattctatg

SEQ ID NO: 373789 - DNA, 15 bp, Homo sapiens
attccactattctat

SEQ ID NO: 373790 - DNA, 15 bp, Homo sapiens
gattccactattcta

SEQ ID NO: 373791 - DNA, 15 bp, Homo sapiens
tgattccactattct

SEQ ID NO: 373792 - DNA, 15 bp, Homo sapiens
ctgattccactattc

SEQ ID NO: 373793 - DNA, 15 bp, Homo sapiens
tctgattccactatt

SEQ ID NO: 373794 - DNA, 15 bp, Homo sapiens
gtctgattccactat

SEQ ID NO: 373795 - DNA, 15 bp, Homo sapiens
tgtctgattccacta

SEQ ID NO: 373796 - DNA, 15 bp, Homo sapiens
ctgtctgattccact

SEQ ID NO: 373797 - DNA, 15 bp, Homo sapiens
actgtctgattccac

SEQ ID NO: 373798 - DNA, 15 bp, Homo sapiens
cactgtctgattcca

SEQ ID NO: 373799 - DNA, 15 bp, Homo sapiens
acactgtctgattcc

SEQ ID NO: 373800 - DNA, 15 bp, Homo sapiens
aacactgtctgattc

SEQ ID NO: 373801 - DNA, 15 bp, Homo sapiens
aaacactgtctgatt

SEQ ID NO: 373802 - DNA, 15 bp, Homo sapiens
caaacactgtctgat

SEQ ID NO: 373803 - DNA, 15 bp, Homo sapiens
acaaacactgtctga

SEQ ID NO: 373804 - DNA, 15 bp, Homo sapiens
gacaaacactgtctg

SEQ ID NO: 373805 - DNA, 15 bp, Homo sapiens
ggacaaacactgtct

SEQ ID NO: 373806 - DNA, 15 bp, Homo sapiens
aggacaaacactgtc

SEQ ID NO: 373807 - DNA, 15 bp, Homo sapiens
aaggacaaacactgt

SEQ ID NO: 373808 - DNA, 15 bp, Homo sapiens
aaaggacaaacactg

SEQ ID NO: 373809 - DNA, 15 bp, Homo sapiens
aaaaggacaaacact

SEQ ID NO: 373810 - DNA, 15 bp, Homo sapiens
caaaaggacaaacac

SEQ ID NO: 373811 - DNA, 15 bp, Homo sapiens
acaaaaggacaaaca

SEQ ID NO: 373812 - DNA, 15 bp, Homo sapiens
cacaaaaggacaaac

SEQ ID NO: 373813 - DNA, 15 bp, Homo sapiens
tcacaaaaggacaaa

SEQ ID NO: 373814 - DNA, 15 bp, Homo sapiens
atcacaaaaggacaa

SEQ ID NO: 373815 - DNA, 15 bp, Homo sapiens
gatcacaaaaggaca

SEQ ID NO: 373816 - DNA, 15 bp, Homo sapiens
cgatcacaaaaggac

SEQ ID NO: 373817 - DNA, 15 bp, Homo sapiens
ccgatcacaaaagga

SEQ ID NO: 373818 - DNA, 15 bp, Homo sapiens
gccgatcacaaaagg

SEQ ID NO: 373819 - DNA, 15 bp, Homo sapiens
agccgatcacaaaag

SEQ ID NO: 373820 - DNA, 15 bp, Homo sapiens
aagccgatcacaaaa

SEQ ID NO: 373821 - DNA, 15 bp, Homo sapiens
taagccgatcacaaa

SEQ ID NO: 373822 - DNA, 15 bp, Homo sapiens
ataagccgatcacaa

SEQ ID NO: 373823 - DNA, 15 bp, Homo sapiens
aataagccgatcaca

SEQ ID NO: 373824 - DNA, 15 bp, Homo sapiens
aaataagccgatcac

SEQ ID NO: 373825 - DNA, 15 bp, Homo sapiens
gaaataagccgatca

SEQ ID NO: 373826 - DNA, 15 bp, Homo sapiens
tgaaataagccgatc

SEQ ID NO: 373827 - DNA, 15 bp, Homo sapiens
gtgaaataagccgat

SEQ ID NO: 373828 - DNA, 15 bp, Homo sapiens
agtgaaataagccga

SEQ ID NO: 373829 - DNA, 15 bp, Homo sapiens
aagtgaaataagccg

SEQ ID NO: 373830 - DNA, 15 bp, Homo sapiens
taagtgaaataagcc

SEQ ID NO: 373831 - DNA, 15 bp, Homo sapiens
ttaagtgaaataagc

SEQ ID NO: 373832 - DNA, 15 bp, Homo sapiens
gttaagtgaaataag

SEQ ID NO: 373833 - DNA, 15 bp, Homo sapiens
tgttaagtgaaataa

SEQ ID NO: 373834 - DNA, 15 bp, Homo sapiens
atgttaagtgaaata

SEQ ID NO: 373835 - DNA, 15 bp, Homo sapiens
tatgttaagtgaaat

SEQ ID NO: 373836 - DNA, 15 bp, Homo sapiens
ttatgttaagtgaaa

SEQ ID NO: 373837 - DNA, 15 bp, Homo sapiens
attatgttaagtgaa

SEQ ID NO: 373838 - DNA, 15 bp, Homo sapiens
cattatgttaagtga

SEQ ID NO: 373839 - DNA, 15 bp, Homo sapiens
gcattatgttaagtg

SEQ ID NO: 373840 - DNA, 15 bp, Homo sapiens
ggcattatgttaagt

SEQ ID NO: 373841 - DNA, 15 bp, Homo sapiens
gggcattatgttaag

SEQ ID NO: 373842 - DNA, 15 bp, Homo sapiens
agggcattatgttaa

SEQ ID NO: 373843 - DNA, 15 bp, Homo sapiens
gagggcattatgtta

SEQ ID NO: 373844 - DNA, 15 bp, Homo sapiens
tgagggcattatgtt

SEQ ID NO: 373845 - DNA, 15 bp, Homo sapiens
ctgagggcattatgt

SEQ ID NO: 373846 - DNA, 15 bp, Homo sapiens
cctgagggcattatg

SEQ ID NO: 373847 - DNA, 15 bp, Homo sapiens
ccctgagggcattat

SEQ ID NO: 373848 - DNA, 15 bp, Homo sapiens
accctgagggcatta

SEQ ID NO: 373849 - DNA, 15 bp, Homo sapiens
aaccctgagggcatt

SEQ ID NO: 373850 - DNA, 15 bp, Homo sapiens
gaaccctgagggcat

SEQ ID NO: 373851 - DNA, 15 bp, Homo sapiens
tgaaccctgagggca

SEQ ID NO: 373852 - DNA, 15 bp, Homo sapiens
atgaaccctgagggc

SEQ ID NO: 373853 - DNA, 15 bp, Homo sapiens
gatgaaccctgaggg

SEQ ID NO: 373854 - DNA, 15 bp, Homo sapiens
ggatgaaccctgagg

SEQ ID NO: 373855 - DNA, 15 bp, Homo sapiens
tggatgaaccctgag

SEQ ID NO: 373856 - DNA, 15 bp, Homo sapiens
atggatgaaccctga

SEQ ID NO: 373857 - DNA, 15 bp, Homo sapiens
tatggatgaaccctg

SEQ ID NO: 373858 - DNA, 15 bp, Homo sapiens
gtatggatgaaccct

SEQ ID NO: 373859 - DNA, 15 bp, Homo sapiens
agtatggatgaaccc

SEQ ID NO: 373860 - DNA, 15 bp, Homo sapiens
gagtatggatgaacc

SEQ ID NO: 373861 - DNA, 15 bp, Homo sapiens
agagtatggatgaac

SEQ ID NO: 373862 - DNA, 15 bp, Homo sapiens
tagagtatggatgaa

SEQ ID NO: 373863 - DNA, 15 bp, Homo sapiens
ctagagtatggatga

SEQ ID NO: 373864 - DNA, 15 bp, Homo sapiens
gctagagtatggatg

SEQ ID NO: 373865 - DNA, 15 bp, Homo sapiens
cgctagagtatggat

SEQ ID NO: 373866 - DNA, 15 bp, Homo sapiens
acgctagagtatgga

SEQ ID NO: 373867 - DNA, 15 bp, Homo sapiens
tacgctagagtatgg

SEQ ID NO: 373868 - DNA, 15 bp, Homo sapiens
atacgctagagtatg

SEQ ID NO: 373869 - DNA, 15 bp, Homo sapiens
catacgctagagtat

SEQ ID NO: 373870 - DNA, 15 bp, Homo sapiens
acatacgctagagta

SEQ ID NO: 373871 - DNA, 15 bp, Homo sapiens
gacatacgctagagt

SEQ ID NO: 373872 - DNA, 15 bp, Homo sapiens
tgacatacgctagag

SEQ ID NO: 373873 - DNA, 15 bp, Homo sapiens
ctgacatacgctaga

SEQ ID NO: 373874 - DNA, 15 bp, Homo sapiens
tctgacatacgctag

SEQ ID NO: 373875 - DNA, 15 bp, Homo sapiens
ttctgacatacgcta

SEQ ID NO: 373876 - DNA, 15 bp, Homo sapiens
attctgacatacgct

SEQ ID NO: 373877 - DNA, 15 bp, Homo sapiens
aattctgacatacgc

SEQ ID NO: 373878 - DNA, 15 bp, Homo sapiens
aaattctgacatacg

SEQ ID NO: 373879 - DNA, 15 bp, Homo sapiens
gaaattctgacatac

SEQ ID NO: 373880 - DNA, 15 bp, Homo sapiens
ggaaattctgacata

SEQ ID NO: 373881 - DNA, 15 bp, Homo sapiens
aggaaattctgacat

SEQ ID NO: 373882 - DNA, 15 bp, Homo sapiens
aaggaaattctgaca

SEQ ID NO: 373883 - DNA, 15 bp, Homo sapiens
gaaggaaattctgac

SEQ ID NO: 373884 - DNA, 15 bp, Homo sapiens
agaaggaaattctga

SEQ ID NO: 373885 - DNA, 15 bp, Homo sapiens
aagaaggaaattctg

SEQ ID NO: 373886 - DNA, 15 bp, Homo sapiens
aaagaaggaaattct

SEQ ID NO: 373887 - DNA, 15 bp, Homo sapiens
aaaagaaggaaattc

SEQ ID NO: 373888 - DNA, 15 bp, Homo sapiens
aaaaagaaggaaatt

SEQ ID NO: 373889 - DNA, 15 bp, Homo sapiens
aaaaaagaaggaaat

SEQ ID NO: 373890 - DNA, 15 bp, Homo sapiens
taaaaaagaaggaaa

SEQ ID NO: 373891 - DNA, 15 bp, Homo sapiens
ttaaaaaagaaggaa

SEQ ID NO: 373892 - DNA, 15 bp, Homo sapiens
cttaaaaaagaagga

SEQ ID NO: 373893 - DNA, 15 bp, Homo sapiens
ccttaaaaaagaagg

SEQ ID NO: 373894 - DNA, 15 bp, Homo sapiens
gccttaaaaaagaag

SEQ ID NO: 373895 - DNA, 15 bp, Homo sapiens
agccttaaaaaagaa

SEQ ID NO: 373896 - DNA, 15 bp, Homo sapiens
cagccttaaaaaaga

SEQ ID NO: 373897 - DNA, 15 bp, Homo sapiens
tcagccttaaaaaag

SEQ ID NO: 373898 - DNA, 15 bp, Homo sapiens
ttcagccttaaaaaa

SEQ ID NO: 373899 - DNA, 15 bp, Homo sapiens
attcagccttaaaaa

SEQ ID NO: 373900 - DNA, 15 bp, Homo sapiens
tattcagccttaaaa

SEQ ID NO: 373901 - DNA, 15 bp, Homo sapiens
ttattcagccttaaa

SEQ ID NO: 373902 - DNA, 15 bp, Homo sapiens
attattcagccttaa

SEQ ID NO: 373903 - DNA, 15 bp, Homo sapiens
tattattcagcctta

SEQ ID NO: 373904 - DNA, 15 bp, Homo sapiens
atattattcagcctt

SEQ ID NO: 373905 - DNA, 15 bp, Homo sapiens
aatattattcagcct

SEQ ID NO: 373906 - DNA, 15 bp, Homo sapiens
aaatattattcagcc

SEQ ID NO: 373907 - DNA, 15 bp, Homo sapiens
aaaatattattcagc

SEQ ID NO: 373908 - DNA, 15 bp, Homo sapiens
taaaatattattcag

SEQ ID NO: 373909 - DNA, 15 bp, Homo sapiens
ataaaatattattca

SEQ ID NO: 373910 - DNA, 15 bp, Homo sapiens
aataaaatattattc

SEQ ID NO: 373911 - DNA, 15 bp, Homo sapiens
caataaaatattatt

SEQ ID NO: 373912 - DNA, 15 bp, Homo sapiens
acaataaaatattat

SEQ ID NO: 373913 - DNA, 15 bp, Homo sapiens
tacaataaaatatta

SEQ ID NO: 373914 - DNA, 15 bp, Homo sapiens
atacaataaaatatt

SEQ ID NO: 373915 - DNA, 15 bp, Homo sapiens
catacaataaaatat

SEQ ID NO: 373916 - DNA, 15 bp, Homo sapiens
tcatacaataaaata

SEQ ID NO: 373917 - DNA, 15 bp, Homo sapiens
ttcatacaataaaat

SEQ ID NO: 373918 - DNA, 15 bp, Homo sapiens
attcatacaataaaa

SEQ ID NO: 373919 - DNA, 15 bp, Homo sapiens
tattcatacaataaa

SEQ ID NO: 373920 - DNA, 15 bp, Homo sapiens
atattcatacaataa

SEQ ID NO: 373921 - DNA, 15 bp, Homo sapiens
aatattcatacaata

SEQ ID NO: 373922 - DNA, 15 bp, Homo sapiens
gaatattcatacaat

SEQ ID NO: 373923 - DNA, 15 bp, Homo sapiens
ggaatattcatacaa

SEQ ID NO: 373924 - DNA, 15 bp, Homo sapiens
tggaatattcataca

SEQ ID NO: 373925 - DNA, 15 bp, Homo sapiens
atggaatattcatac

SEQ ID NO: 373926 - DNA, 15 bp, Homo sapiens
catggaatattcata

SEQ ID NO: 373927 - DNA, 15 bp, Homo sapiens
acatggaatattcat

SEQ ID NO: 373928 - DNA, 15 bp, Homo sapiens
gacatggaatattca

SEQ ID NO: 373929 - DNA, 15 bp, Homo sapiens
agacatggaatattc

SEQ ID NO: 373930 - DNA, 15 bp, Homo sapiens
cagacatggaatatt

SEQ ID NO: 373931 - DNA, 15 bp, Homo sapiens
ccagacatggaatat

SEQ ID NO: 373932 - DNA, 15 bp, Homo sapiens
accagacatggaata

SEQ ID NO: 373933 - DNA, 15 bp, Homo sapiens
aaccagacatggaat

SEQ ID NO: 373934 - DNA, 15 bp, Homo sapiens
caaccagacatggaa

SEQ ID NO: 373935 - DNA, 15 bp, Homo sapiens
tcaaccagacatgga

SEQ ID NO: 373936 - DNA, 15 bp, Homo sapiens
atcaaccagacatgg

SEQ ID NO: 373937 - DNA, 15 bp, Homo sapiens
aatcaaccagacatg

SEQ ID NO: 373938 - DNA, 15 bp, Homo sapiens
aaatcaaccagacat

SEQ ID NO: 373939 - DNA, 15 bp, Homo sapiens
taaatcaaccagaca

SEQ ID NO: 373940 - DNA, 15 bp, Homo sapiens
ataaatcaaccagac

SEQ ID NO: 373941 - DNA, 15 bp, Homo sapiens
aataaatcaaccaga

SEQ ID NO: 373942 - DNA, 15 bp, Homo sapiens
caataaatcaaccag

SEQ ID NO: 373943 - DNA, 15 bp, Homo sapiens
gcaataaatcaacca

SEQ ID NO: 373944 - DNA, 15 bp, Homo sapiens
agcaataaatcaacc

SEQ ID NO: 373945 - DNA, 15 bp, Homo sapiens
aagcaataaatcaac

SEQ ID NO: 373946 - DNA, 15 bp, Homo sapiens
caagcaataaatcaa

SEQ ID NO: 373947 - DNA, 15 bp, Homo sapiens
tcaagcaataaatca

SEQ ID NO: 373948 - DNA, 15 bp, Homo sapiens
atcaagcaataaatc

SEQ ID NO: 373949 - DNA, 15 bp, Homo sapiens
catcaagcaataaat

SEQ ID NO: 373950 - DNA, 15 bp, Homo sapiens
ccatcaagcaataaa

SEQ ID NO: 373951 - DNA, 15 bp, Homo sapiens
tccatcaagcaataa

SEQ ID NO: 373952 - DNA, 15 bp, Homo sapiens
gtccatcaagcaata

SEQ ID NO: 373953 - DNA, 15 bp, Homo sapiens
tgtccatcaagcaat

SEQ ID NO: 373954 - DNA, 15 bp, Homo sapiens
gtgtccatcaagcaa

SEQ ID NO: 373955 - DNA, 15 bp, Homo sapiens
agtgtccatcaagca

SEQ ID NO: 373956 - DNA, 15 bp, Homo sapiens
aagtgtccatcaagc

SEQ ID NO: 373957 - DNA, 15 bp, Homo sapiens
caagtgtccatcaag

SEQ ID NO: 373958 - DNA, 15 bp, Homo sapiens
ccaagtgtccatcaa

SEQ ID NO: 373959 - DNA, 15 bp, Homo sapiens
gccaagtgtccatca

SEQ ID NO: 373960 - DNA, 15 bp, Homo sapiens
agccaagtgtccatc

SEQ ID NO: 373961 - DNA, 15 bp, Homo sapiens
aagccaagtgtccat

SEQ ID NO: 373962 - DNA, 15 bp, Homo sapiens
caagccaagtgtcca

SEQ ID NO: 373963 - DNA, 15 bp, Homo sapiens
gcaagccaagtgtcc

SEQ ID NO: 373964 - DNA, 15 bp, Homo sapiens
agcaagccaagtgtc

SEQ ID NO: 373965 - DNA, 15 bp, Homo sapiens
aagcaagccaagtgt

SEQ ID NO: 373966 - DNA, 15 bp, Homo sapiens
gaagcaagccaagtg

SEQ ID NO: 373967 - DNA, 15 bp, Homo sapiens
agaagcaagccaagt

SEQ ID NO: 373968 - DNA, 15 bp, Homo sapiens
tagaagcaagccaag

SEQ ID NO: 373969 - DNA, 15 bp, Homo sapiens
gtagaagcaagccaa

SEQ ID NO: 373970 - DNA, 15 bp, Homo sapiens
ggtagaagcaagcca

SEQ ID NO: 373971 - DNA, 15 bp, Homo sapiens
aggtagaagcaagcc

SEQ ID NO: 373972 - DNA, 15 bp, Homo sapiens
aaggtagaagcaagc

SEQ ID NO: 373973 - DNA, 15 bp, Homo sapiens
aaaggtagaagcaag

SEQ ID NO: 373974 - DNA, 15 bp, Homo sapiens
aaaaggtagaagcaa

SEQ ID NO: 373975 - DNA, 15 bp, Homo sapiens
caaaaggtagaagca

SEQ ID NO: 373976 - DNA, 15 bp, Homo sapiens
ccaaaaggtagaagc

SEQ ID NO: 373977 - DNA, 15 bp, Homo sapiens
gccaaaaggtagaag

SEQ ID NO: 373978 - DNA, 15 bp, Homo sapiens
agccaaaaggtagaa

SEQ ID NO: 373979 - DNA, 15 bp, Homo sapiens
tagccaaaaggtaga

SEQ ID NO: 373980 - DNA, 15 bp, Homo sapiens
atagccaaaaggtag

SEQ ID NO: 373981 - DNA, 15 bp, Homo sapiens
aatagccaaaaggta

SEQ ID NO: 373982 - DNA, 15 bp, Homo sapiens
caatagccaaaaggt

SEQ ID NO: 373983 - DNA, 15 bp, Homo sapiens
acaatagccaaaagg

SEQ ID NO: 373984 - DNA, 15 bp, Homo sapiens
cacaatagccaaaag

SEQ ID NO: 373985 - DNA, 15 bp, Homo sapiens
tcacaatagccaaaa

SEQ ID NO: 373986 - DNA, 15 bp, Homo sapiens
ttcacaatagccaaa

SEQ ID NO: 373987 - DNA, 15 bp, Homo sapiens
attcacaatagccaa

SEQ ID NO: 373988 - DNA, 15 bp, Homo sapiens
tattcacaatagcca

SEQ ID NO: 373989 - DNA, 15 bp, Homo sapiens
ttattcacaatagcc

SEQ ID NO: 373990 - DNA, 15 bp, Homo sapiens
attattcacaatagc

SEQ ID NO: 373991 - DNA, 15 bp, Homo sapiens
cattattcacaatag

SEQ ID NO: 373992 - DNA, 15 bp, Homo sapiens
gcattattcacaata

SEQ ID NO: 373993 - DNA, 15 bp, Homo sapiens
agcattattcacaat

SEQ ID NO: 373994 - DNA, 15 bp, Homo sapiens
cagcattattcacaa

SEQ ID NO: 373995 - DNA, 15 bp, Homo sapiens
gcagcattattcaca

SEQ ID NO: 373996 - DNA, 15 bp, Homo sapiens
agcagcattattcac

SEQ ID NO: 373997 - DNA, 15 bp, Homo sapiens
cagcagcattattca

SEQ ID NO: 373998 - DNA, 15 bp, Homo sapiens
acagcagcattattc

SEQ ID NO: 373999 - DNA, 15 bp, Homo sapiens
cacagcagcattatt

SEQ ID NO: 374000 - DNA, 15 bp, Homo sapiens
tcacagcagcattat

SEQ ID NO: 374001 - DNA, 15 bp, Homo sapiens
ttcacagcagcatta

SEQ ID NO: 374002 - DNA, 15 bp, Homo sapiens
gttcacagcagcatt

SEQ ID NO: 374003 - DNA, 15 bp, Homo sapiens
tgttcacagcagcat

SEQ ID NO: 374004 - DNA, 15 bp, Homo sapiens
atgttcacagcagca

SEQ ID NO: 374005 - DNA, 15 bp, Homo sapiens
catgttcacagcagc

SEQ ID NO: 374006 - DNA, 15 bp, Homo sapiens
ccatgttcacagcag

SEQ ID NO: 374007 - DNA, 15 bp, Homo sapiens
tccatgttcacagca

SEQ ID NO: 374008 - DNA, 15 bp, Homo sapiens
atccatgttcacagc

SEQ ID NO: 374009 - DNA, 15 bp, Homo sapiens
catccatgttcacag

SEQ ID NO: 374010 - DNA, 15 bp, Homo sapiens
acatccatgttcaca

SEQ ID NO: 374011 - DNA, 15 bp, Homo sapiens
cacatccatgttcac

SEQ ID NO: 374012 - DNA, 15 bp, Homo sapiens
gcacatccatgttca

SEQ ID NO: 374013 - DNA, 15 bp, Homo sapiens
tgcacatccatgttc

SEQ ID NO: 374014 - DNA, 15 bp, Homo sapiens
ttgcacatccatgtt

SEQ ID NO: 374015 - DNA, 15 bp, Homo sapiens
tttgcacatccatgt

SEQ ID NO: 374016 - DNA, 15 bp, Homo sapiens
atttgcacatccatg

SEQ ID NO: 374017 - DNA, 15 bp, Homo sapiens
tatttgcacatccat

SEQ ID NO: 374018 - DNA, 15 bp, Homo sapiens
gtatttgcacatcca

SEQ ID NO: 374019 - DNA, 15 bp, Homo sapiens
ggtatttgcacatcc

SEQ ID NO: 374020 - DNA, 15 bp, Homo sapiens
tggtatttgcacatc

SEQ ID NO: 374021 - DNA, 15 bp, Homo sapiens
gtggtatttgcacat

SEQ ID NO: 374022 - DNA, 15 bp, Homo sapiens
agtggtatttgcaca

SEQ ID NO: 374023 - DNA, 15 bp, Homo sapiens
cagtggtatttgcac

SEQ ID NO: 374024 - DNA, 15 bp, Homo sapiens
ccagtggtatttgca

SEQ ID NO: 374025 - DNA, 15 bp, Homo sapiens
tccagtggtatttgc

SEQ ID NO: 374026 - DNA, 15 bp, Homo sapiens
ctccagtggtatttg

SEQ ID NO: 374027 - DNA, 15 bp, Homo sapiens
actccagtggtattt

SEQ ID NO: 374028 - DNA, 15 bp, Homo sapiens
gactccagtggtatt

SEQ ID NO: 374029 - DNA, 15 bp, Homo sapiens
cgactccagtggtat

SEQ ID NO: 374030 - DNA, 15 bp, Homo sapiens
gcgactccagtggta

SEQ ID NO: 374031 - DNA, 15 bp, Homo sapiens
ggcgactccagtggt

SEQ ID NO: 374032 - DNA, 15 bp, Homo sapiens
cggcgactccagtgg

SEQ ID NO: 374033 - DNA, 15 bp, Homo sapiens
gcggcgactccagtg

SEQ ID NO: 374034 - DNA, 15 bp, Homo sapiens
agcggcgactccagt

SEQ ID NO: 374035 - DNA, 15 bp, Homo sapiens
aagcggcgactccag

SEQ ID NO: 374036 - DNA, 15 bp, Homo sapiens
aaagcggcgactcca

SEQ ID NO: 374037 - DNA, 15 bp, Homo sapiens
gaaagcggcgactcc

SEQ ID NO: 374038 - DNA, 15 bp, Homo sapiens
tgaaagcggcgactc

SEQ ID NO: 374039 - DNA, 15 bp, Homo sapiens
ctgaaagcggcgact

SEQ ID NO: 374040 - DNA, 15 bp, Homo sapiens
actgaaagcggcgac

SEQ ID NO: 374041 - DNA, 15 bp, Homo sapiens
aactgaaagcggcga

SEQ ID NO: 374042 - DNA, 15 bp, Homo sapiens
gaactgaaagcggcg

SEQ ID NO: 374043 - DNA, 15 bp, Homo sapiens
agaactgaaagcggc

SEQ ID NO: 374044 - DNA, 15 bp, Homo sapiens
aagaactgaaagcgg

SEQ ID NO: 374045 - DNA, 15 bp, Homo sapiens
gaagaactgaaagcg

SEQ ID NO: 374046 - DNA, 15 bp, Homo sapiens
agaagaactgaaagc

SEQ ID NO: 374047 - DNA, 15 bp, Homo sapiens
cagaagaactgaaag

SEQ ID NO: 374048 - DNA, 15 bp, Homo sapiens
ccagaagaactgaaa

SEQ ID NO: 374049 - DNA, 15 bp, Homo sapiens
cccagaagaactgaa

SEQ ID NO: 374050 - DNA, 15 bp, Homo sapiens
acccagaagaactga

SEQ ID NO: 374051 - DNA, 15 bp, Homo sapiens
tacccagaagaactg

SEQ ID NO: 374052 - DNA, 15 bp, Homo sapiens
atacccagaagaact

SEQ ID NO: 374053 - DNA, 15 bp, Homo sapiens
tatacccagaagaac

SEQ ID NO: 374054 - DNA, 15 bp, Homo sapiens
atatacccagaagaa

SEQ ID NO: 374055 - DNA, 15 bp, Homo sapiens
tatatacccagaaga

SEQ ID NO: 374056 - DNA, 15 bp, Homo sapiens
gtatatacccagaag

SEQ ID NO: 374057 - DNA, 15 bp, Homo sapiens
ggtatatacccagaa

SEQ ID NO: 374058 - DNA, 15 bp, Homo sapiens
gggtatatacccaga

SEQ ID NO: 374059 - DNA, 15 bp, Homo sapiens
tgggtatatacccag

SEQ ID NO: 374060 - DNA, 15 bp, Homo sapiens
ctgggtatataccca

SEQ ID NO: 374061 - DNA, 15 bp, Homo sapiens
tctgggtatataccc

SEQ ID NO: 374062 - DNA, 15 bp, Homo sapiens
ctctgggtatatacc

SEQ ID NO: 374063 - DNA, 15 bp, Homo sapiens
cctctgggtatatac

SEQ ID NO: 374064 - DNA, 15 bp, Homo sapiens
acctctgggtatata

SEQ ID NO: 374065 - DNA, 15 bp, Homo sapiens
cacctctgggtatat

SEQ ID NO: 374066 - DNA, 15 bp, Homo sapiens
ccacctctgggtata

SEQ ID NO: 374067 - DNA, 15 bp, Homo sapiens
tccacctctgggtat

SEQ ID NO: 374068 - DNA, 15 bp, Homo sapiens
ttccacctctgggta

SEQ ID NO: 374069 - DNA, 15 bp, Homo sapiens
attccacctctgggt

SEQ ID NO: 374070 - DNA, 15 bp, Homo sapiens
aattccacctctggg

SEQ ID NO: 374071 - DNA, 15 bp, Homo sapiens
caattccacctctgg

SEQ ID NO: 374072 - DNA, 15 bp, Homo sapiens
gcaattccacctctg

SEQ ID NO: 374073 - DNA, 15 bp, Homo sapiens
agcaattccacctct

SEQ ID NO: 374074 - DNA, 15 bp, Homo sapiens
tagcaattccacctc

SEQ ID NO: 374075 - DNA, 15 bp, Homo sapiens
ttagcaattccacct

SEQ ID NO: 374076 - DNA, 15 bp, Homo sapiens
tttagcaattccacc

SEQ ID NO: 374077 - DNA, 15 bp, Homo sapiens
atttagcaattccac

SEQ ID NO: 374078 - DNA, 15 bp, Homo sapiens
aatttagcaattcca

SEQ ID NO: 374079 - DNA, 15 bp, Homo sapiens
taatttagcaattcc

SEQ ID NO: 374080 - DNA, 15 bp, Homo sapiens
gtaatttagcaattc

SEQ ID NO: 374081 - DNA, 15 bp, Homo sapiens
tgtaatttagcaatt

SEQ ID NO: 374082 - DNA, 15 bp, Homo sapiens
gtgtaatttagcaat

SEQ ID NO: 374083 - DNA, 15 bp, Homo sapiens
agtgtaatttagcaa

SEQ ID NO: 374084 - DNA, 15 bp, Homo sapiens
cagtgtaatttagca

SEQ ID NO: 374085 - DNA, 15 bp, Homo sapiens
acagtgtaatttagc

SEQ ID NO: 374086 - DNA, 15 bp, Homo sapiens
gacagtgtaatttag

SEQ ID NO: 374087 - DNA, 15 bp, Homo sapiens
tgacagtgtaattta

SEQ ID NO: 374088 - DNA, 15 bp, Homo sapiens
atgacagtgtaattt

SEQ ID NO: 374089 - DNA, 15 bp, Homo sapiens
aatgacagtgtaatt

SEQ ID NO: 374090 - DNA, 15 bp, Homo sapiens
gaatgacagtgtaat

SEQ ID NO: 374091 - DNA, 15 bp, Homo sapiens
agaatgacagtgtaa

SEQ ID NO: 374092 - DNA, 15 bp, Homo sapiens
cagaatgacagtgta

SEQ ID NO: 374093 - DNA, 15 bp, Homo sapiens
acagaatgacagtgt

SEQ ID NO: 374094 - DNA, 15 bp, Homo sapiens
cacagaatgacagtg

SEQ ID NO: 374095 - DNA, 15 bp, Homo sapiens
acacagaatgacagt

SEQ ID NO: 374096 - DNA, 15 bp, Homo sapiens
aacacagaatgacag

SEQ ID NO: 374097 - DNA, 15 bp, Homo sapiens
aaacacagaatgaca

SEQ ID NO: 374098 - DNA, 15 bp, Homo sapiens
taaacacagaatgac

SEQ ID NO: 374099 - DNA, 15 bp, Homo sapiens
ttaaacacagaatga

SEQ ID NO: 374100 - DNA, 15 bp, Homo sapiens
attaaacacagaatg

SEQ ID NO: 374101 - DNA, 15 bp, Homo sapiens
aattaaacacagaat

SEQ ID NO: 374102 - DNA, 15 bp, Homo sapiens
aaattaaacacagaa

SEQ ID NO: 374103 - DNA, 15 bp, Homo sapiens
aaaattaaacacaga

SEQ ID NO: 374104 - DNA, 15 bp, Homo sapiens
aaaaattaaacacag

SEQ ID NO: 374105 - DNA, 15 bp, Homo sapiens
aaaaaattaaacaca

SEQ ID NO: 374106 - DNA, 15 bp, Homo sapiens
taaaaaattaaacac

SEQ ID NO: 374107 - DNA, 15 bp, Homo sapiens
ttaaaaaattaaaca

SEQ ID NO: 374108 - DNA, 15 bp, Homo sapiens
cttaaaaaattaaac

SEQ ID NO: 374109 - DNA, 15 bp, Homo sapiens
ccttaaaaaattaaa

SEQ ID NO: 374110 - DNA, 15 bp, Homo sapiens
gccttaaaaaattaa

SEQ ID NO: 374111 - DNA, 15 bp, Homo sapiens
tgccttaaaaaatta

SEQ ID NO: 374112 - DNA, 15 bp, Homo sapiens
atgccttaaaaaatt

SEQ ID NO: 374113 - DNA, 15 bp, Homo sapiens
gatgccttaaaaaat

SEQ ID NO: 374114 - DNA, 15 bp, Homo sapiens
cgatgccttaaaaaa

SEQ ID NO: 374115 - DNA, 15 bp, Homo sapiens
gcgatgccttaaaaa

SEQ ID NO: 374116 - DNA, 15 bp, Homo sapiens
ggcgatgccttaaaa

SEQ ID NO: 374117 - DNA, 15 bp, Homo sapiens
tggcgatgccttaaa

SEQ ID NO: 374118 - DNA, 15 bp, Homo sapiens
ttggcgatgccttaa

SEQ ID NO: 374119 - DNA, 15 bp, Homo sapiens
gttggcgatgcctta

SEQ ID NO: 374120 - DNA, 15 bp, Homo sapiens
cgttggcgatgcctt

SEQ ID NO: 374121 - DNA, 15 bp, Homo sapiens
ccgttggcgatgcct

SEQ ID NO: 374122 - DNA, 15 bp, Homo sapiens
accgttggcgatgcc

SEQ ID NO: 374123 - DNA, 15 bp, Homo sapiens
taccgttggcgatgc

SEQ ID NO: 374124 - DNA, 15 bp, Homo sapiens
ctaccgttggcgatg

SEQ ID NO: 374125 - DNA, 15 bp, Homo sapiens
cctaccgttggcgat

SEQ ID NO: 374126 - DNA, 15 bp, Homo sapiens
ccctaccgttggcga

SEQ ID NO: 374127 - DNA, 15 bp, Homo sapiens
gccctaccgttggcg

SEQ ID NO: 374128 - DNA, 15 bp, Homo sapiens
ggccctaccgttggc

SEQ ID NO: 374129 - DNA, 15 bp, Homo sapiens
aggccctaccgttgg

SEQ ID NO: 374130 - DNA, 15 bp, Homo sapiens
gaggccctaccgttg

SEQ ID NO: 374131 - DNA, 15 bp, Homo sapiens
ggaggccctaccgtt

SEQ ID NO: 374132 - DNA, 15 bp, Homo sapiens
aggaggccctaccgt

SEQ ID NO: 374133 - DNA, 15 bp, Homo sapiens
aaggaggccctaccg

SEQ ID NO: 374134 - DNA, 15 bp, Homo sapiens
caaggaggccctacc

SEQ ID NO: 374135 - DNA, 15 bp, Homo sapiens
tcaaggaggccctac

SEQ ID NO: 374136 - DNA, 15 bp, Homo sapiens
gtcaaggaggcccta

SEQ ID NO: 374137 - DNA, 15 bp, Homo sapiens
agtcaaggaggccct

SEQ ID NO: 374138 - DNA, 15 bp, Homo sapiens
aagtcaaggaggccc

SEQ ID NO: 374139 - DNA, 15 bp, Homo sapiens
caagtcaaggaggcc

SEQ ID NO: 374140 - DNA, 15 bp, Homo sapiens
acaagtcaaggaggc

SEQ ID NO: 374141 - DNA, 15 bp, Homo sapiens
cacaagtcaaggagg

SEQ ID NO: 374142 - DNA, 15 bp, Homo sapiens
gcacaagtcaaggag

SEQ ID NO: 374143 - DNA, 15 bp, Homo sapiens
ggcacaagtcaagga

SEQ ID NO: 374144 - DNA, 15 bp, Homo sapiens
aggcacaagtcaagg

SEQ ID NO: 374145 - DNA, 15 bp, Homo sapiens
gaggcacaagtcaag

SEQ ID NO: 374146 - DNA, 15 bp, Homo sapiens
tgaggcacaagtcaa

SEQ ID NO: 374147 - DNA, 15 bp, Homo sapiens
atgaggcacaagtca

SEQ ID NO: 374148 - DNA, 15 bp, Homo sapiens
catgaggcacaagtc

SEQ ID NO: 374149 - DNA, 15 bp, Homo sapiens
acatgaggcacaagt

SEQ ID NO: 374150 - DNA, 15 bp, Homo sapiens
cacatgaggcacaag

SEQ ID NO: 374151 - DNA, 15 bp, Homo sapiens
acacatgaggcacaa

SEQ ID NO: 374152 - DNA, 15 bp, Homo sapiens
gacacatgaggcaca

SEQ ID NO: 374153 - DNA, 15 bp, Homo sapiens
cgacacatgaggcac

SEQ ID NO: 374154 - DNA, 15 bp, Homo sapiens
ccgacacatgaggca

SEQ ID NO: 374155 - DNA, 15 bp, Homo sapiens
gccgacacatgaggc

SEQ ID NO: 374156 - DNA, 15 bp, Homo sapiens
tgccgacacatgagg

SEQ ID NO: 374157 - DNA, 15 bp, Homo sapiens
gtgccgacacatgag

SEQ ID NO: 374158 - DNA, 15 bp, Homo sapiens
tgtgccgacacatga

SEQ ID NO: 374159 - DNA, 15 bp, Homo sapiens
gtgtgccgacacatg

SEQ ID NO: 374160 - DNA, 15 bp, Homo sapiens
tgtgtgccgacacat

SEQ ID NO: 374161 - DNA, 15 bp, Homo sapiens
gtgtgtgccgacaca

SEQ ID NO: 374162 - DNA, 15 bp, Homo sapiens
ggtgtgtgccgacac

SEQ ID NO: 374163 - DNA, 15 bp, Homo sapiens
cggtgtgtgccgaca

SEQ ID NO: 374164 - DNA, 15 bp, Homo sapiens
tcggtgtgtgccgac

SEQ ID NO: 374165 - DNA, 15 bp, Homo sapiens
atcggtgtgtgccga

SEQ ID NO: 374166 - DNA, 15 bp, Homo sapiens
gatcggtgtgtgccg

SEQ ID NO: 374167 - DNA, 15 bp, Homo sapiens
cgatcggtgtgtgcc

SEQ ID NO: 374168 - DNA, 15 bp, Homo sapiens
gcgatcggtgtgtgc

SEQ ID NO: 374169 - DNA, 15 bp, Homo sapiens
tgcgatcggtgtgtg

SEQ ID NO: 374170 - DNA, 15 bp, Homo sapiens
atgcgatcggtgtgt

SEQ ID NO: 374171 - DNA, 15 bp, Homo sapiens
catgcgatcggtgtg

SEQ ID NO: 374172 - DNA, 15 bp, Homo sapiens
gcatgcgatcggtgt

SEQ ID NO: 374173 - DNA, 15 bp, Homo sapiens
cgcatgcgatcggtg

SEQ ID NO: 374174 - DNA, 15 bp, Homo sapiens
ccgcatgcgatcggt

SEQ ID NO: 374175 - DNA, 15 bp, Homo sapiens
accgcatgcgatcgg

SEQ ID NO: 374176 - DNA, 15 bp, Homo sapiens
caccgcatgcgatcg

SEQ ID NO: 374177 - DNA, 15 bp, Homo sapiens
ccaccgcatgcgatc

SEQ ID NO: 374178 - DNA, 15 bp, Homo sapiens
cccaccgcatgcgat

SEQ ID NO: 374179 - DNA, 15 bp, Homo sapiens
ccccaccgcatgcga

SEQ ID NO: 374180 - DNA, 15 bp, Homo sapiens
cccccaccgcatgcg

SEQ ID NO: 374181 - DNA, 15 bp, Homo sapiens
tcccccaccgcatgc

SEQ ID NO: 374182 - DNA, 15 bp, Homo sapiens
ctcccccaccgcatg

SEQ ID NO: 374183 - DNA, 15 bp, Homo sapiens
gctcccccaccgcat

SEQ ID NO: 374184 - DNA, 15 bp, Homo sapiens
ggctcccccaccgca

SEQ ID NO: 374185 - DNA, 15 bp, Homo sapiens
gggctcccccaccgc

SEQ ID NO: 374186 - DNA, 15 bp, Homo sapiens
agggctcccccaccg

SEQ ID NO: 374187 - DNA, 15 bp, Homo sapiens
tagggctcccccacc

SEQ ID NO: 374188 - DNA, 15 bp, Homo sapiens
gtagggctcccccac

SEQ ID NO: 374189 - DNA, 15 bp, Homo sapiens
ggtagggctccccca

SEQ ID NO: 374190 - DNA, 15 bp, Homo sapiens
gggtagggctccccc

SEQ ID NO: 374191 - DNA, 15 bp, Homo sapiens
tgggtagggctcccc

SEQ ID NO: 374192 - DNA, 15 bp, Homo sapiens
gtgggtagggctccc

SEQ ID NO: 374193 - DNA, 15 bp, Homo sapiens
ggtgggtagggctcc

SEQ ID NO: 374194 - DNA, 15 bp, Homo sapiens
cggtgggtagggctc

SEQ ID NO: 374195 - DNA, 15 bp, Homo sapiens
ccggtgggtagggct

SEQ ID NO: 374196 - DNA, 15 bp, Homo sapiens
cccggtgggtagggc

SEQ ID NO: 374197 - DNA, 15 bp, Homo sapiens
ccccggtgggtaggg

SEQ ID NO: 374198 - DNA, 15 bp, Homo sapiens
accccggtgggtagg

SEQ ID NO: 374199 - DNA, 15 bp, Homo sapiens
caccccggtgggtag

SEQ ID NO: 374200 - DNA, 15 bp, Homo sapiens
ccaccccggtgggta

SEQ ID NO: 374201 - DNA, 15 bp, Homo sapiens
cccaccccggtgggt

SEQ ID NO: 374202 - DNA, 15 bp, Homo sapiens
gcccaccccggtggg

SEQ ID NO: 374203 - DNA, 15 bp, Homo sapiens
agcccaccccggtgg

SEQ ID NO: 374204 - DNA, 15 bp, Homo sapiens
aagcccaccccggtg

SEQ ID NO: 374205 - DNA, 15 bp, Homo sapiens
caagcccaccccggt

SEQ ID NO: 374206 - DNA, 15 bp, Homo sapiens
tcaagcccaccccgg

SEQ ID NO: 374207 - DNA, 15 bp, Homo sapiens
ctcaagcccaccccg

SEQ ID NO: 374208 - DNA, 15 bp, Homo sapiens
cctcaagcccacccc

SEQ ID NO: 374209 - DNA, 15 bp, Homo sapiens
ccctcaagcccaccc

SEQ ID NO: 374210 - DNA, 15 bp, Homo sapiens
gccctcaagcccacc

SEQ ID NO: 374211 - DNA, 15 bp, Homo sapiens
cgccctcaagcccac

SEQ ID NO: 374212 - DNA, 15 bp, Homo sapiens
tcgccctcaagccca

SEQ ID NO: 374213 - DNA, 15 bp, Homo sapiens
ttcgccctcaagccc

SEQ ID NO: 374214 - DNA, 15 bp, Homo sapiens
attcgccctcaagcc

SEQ ID NO: 374215 - DNA, 15 bp, Homo sapiens
gattcgccctcaagc

SEQ ID NO: 374216 - DNA, 15 bp, Homo sapiens
ggattcgccctcaag

SEQ ID NO: 374217 - DNA, 15 bp, Homo sapiens
aggattcgccctcaa

SEQ ID NO: 374218 - DNA, 15 bp, Homo sapiens
caggattcgccctca

SEQ ID NO: 374219 - DNA, 15 bp, Homo sapiens
ccaggattcgccctc

SEQ ID NO: 374220 - DNA, 15 bp, Homo sapiens
cccaggattcgccct

SEQ ID NO: 374221 - DNA, 15 bp, Homo sapiens
ccccaggattcgccc

SEQ ID NO: 374222 - DNA, 15 bp, Homo sapiens
gccccaggattcgcc

SEQ ID NO: 374223 - DNA, 15 bp, Homo sapiens
tgccccaggattcgc

SEQ ID NO: 374224 - DNA, 15 bp, Homo sapiens
ctgccccaggattcg

SEQ ID NO: 374225 - DNA, 15 bp, Homo sapiens
tctgccccaggattc

SEQ ID NO: 374226 - DNA, 15 bp, Homo sapiens
ctctgccccaggatt

SEQ ID NO: 374227 - DNA, 15 bp, Homo sapiens
cctctgccccaggat

SEQ ID NO: 374228 - DNA, 15 bp, Homo sapiens
ccctctgccccagga

SEQ ID NO: 374229 - DNA, 15 bp, Homo sapiens
tccctctgccccagg

SEQ ID NO: 374230 - DNA, 15 bp, Homo sapiens
ctccctctgccccag

SEQ ID NO: 374231 - DNA, 15 bp, Homo sapiens
actccctctgcccca

SEQ ID NO: 374232 - DNA, 15 bp, Homo sapiens
cactccctctgcccc

SEQ ID NO: 374233 - DNA, 15 bp, Homo sapiens
tcactccctctgccc

SEQ ID NO: 374234 - DNA, 15 bp, Homo sapiens
ctcactccctctgcc

SEQ ID NO: 374235 - DNA, 15 bp, Homo sapiens
tctcactccctctgc

SEQ ID NO: 374236 - DNA, 15 bp, Homo sapiens
ttctcactccctctg

SEQ ID NO: 374237 - DNA, 15 bp, Homo sapiens
tttctcactccctct

SEQ ID NO: 374238 - DNA, 15 bp, Homo sapiens
ctttctcactccctc

SEQ ID NO: 374239 - DNA, 15 bp, Homo sapiens
gctttctcactccct

SEQ ID NO: 374240 - DNA, 15 bp, Homo sapiens
cgctttctcactccc

SEQ ID NO: 374241 - DNA, 15 bp, Homo sapiens
ccgctttctcactcc

SEQ ID NO: 374242 - DNA, 15 bp, Homo sapiens
cccgctttctcactc

SEQ ID NO: 374243 - DNA, 15 bp, Homo sapiens
ccccgctttctcact

SEQ ID NO: 374244 - DNA, 15 bp, Homo sapiens
tccccgctttctcac

SEQ ID NO: 374245 - DNA, 15 bp, Homo sapiens
ctccccgctttctca

SEQ ID NO: 374246 - DNA, 15 bp, Homo sapiens
cctccccgctttctc

SEQ ID NO: 374247 - DNA, 15 bp, Homo sapiens
ccctccccgctttct

SEQ ID NO: 374248 - DNA, 15 bp, Homo sapiens
cccctccccgctttc

SEQ ID NO: 374249 - DNA, 15 bp, Homo sapiens
tcccctccccgcttt

SEQ ID NO: 374250 - DNA, 15 bp, Homo sapiens
gtcccctccccgctt

SEQ ID NO: 374251 - DNA, 15 bp, Homo sapiens
tgtcccctccccgct

SEQ ID NO: 374252 - DNA, 15 bp, Homo sapiens
ctgtcccctccccgc

SEQ ID NO: 374253 - DNA, 15 bp, Homo sapiens
actgtcccctccccg

SEQ ID NO: 374254 - DNA, 15 bp, Homo sapiens
gactgtcccctcccc

SEQ ID NO: 374255 - DNA, 15 bp, Homo sapiens
agactgtcccctccc

SEQ ID NO: 374256 - DNA, 15 bp, Homo sapiens
cagactgtcccctcc

SEQ ID NO: 374257 - DNA, 15 bp, Homo sapiens
acagactgtcccctc

SEQ ID NO: 374258 - DNA, 15 bp, Homo sapiens
gacagactgtcccct

SEQ ID NO: 374259 - DNA, 15 bp, Homo sapiens
ggacagactgtcccc

SEQ ID NO: 374260 - DNA, 15 bp, Homo sapiens
gggacagactgtccc

SEQ ID NO: 374261 - DNA, 15 bp, Homo sapiens
agggacagactgtcc

SEQ ID NO: 374262 - DNA, 15 bp, Homo sapiens
cagggacagactgtc

SEQ ID NO: 374263 - DNA, 15 bp, Homo sapiens
gcagggacagactgt

SEQ ID NO: 374264 - DNA, 15 bp, Homo sapiens
cgcagggacagactg

SEQ ID NO: 374265 - DNA, 15 bp, Homo sapiens
gcgcagggacagact

SEQ ID NO: 374266 - DNA, 15 bp, Homo sapiens
cgcgcagggacagac

SEQ ID NO: 374267 - DNA, 15 bp, Homo sapiens
ccgcgcagggacaga

SEQ ID NO: 374268 - DNA, 15 bp, Homo sapiens
accgcgcagggacag

SEQ ID NO: 374269 - DNA, 15 bp, Homo sapiens
caccgcgcagggaca

SEQ ID NO: 374270 - DNA, 15 bp, Homo sapiens
ccaccgcgcagggac

SEQ ID NO: 374271 - DNA, 15 bp, Homo sapiens
cccaccgcgcaggga

SEQ ID NO: 374272 - DNA, 15 bp, Homo sapiens
ccccaccgcgcaggg

SEQ ID NO: 374273 - DNA, 15 bp, Homo sapiens
cccccaccgcgcagg

SEQ ID NO: 374274 - DNA, 15 bp, Homo sapiens
tcccccaccgcgcag

SEQ ID NO: 374275 - DNA, 15 bp, Homo sapiens
ctcccccaccgcgca

SEQ ID NO: 374276 - DNA, 15 bp, Homo sapiens
cctcccccaccgcgc

SEQ ID NO: 374277 - DNA, 15 bp, Homo sapiens
ccctcccccaccgcg

SEQ ID NO: 374278 - DNA, 15 bp, Homo sapiens
cccctcccccaccgc

SEQ ID NO: 374279 - DNA, 15 bp, Homo sapiens
gcccctcccccaccg

SEQ ID NO: 374280 - DNA, 15 bp, Homo sapiens
tgcccctcccccacc

SEQ ID NO: 374281 - DNA, 15 bp, Homo sapiens
ctgcccctcccccac

SEQ ID NO: 374282 - DNA, 15 bp, Homo sapiens
actgcccctccccca

SEQ ID NO: 374283 - DNA, 15 bp, Homo sapiens
cactgcccctccccc

SEQ ID NO: 374284 - DNA, 15 bp, Homo sapiens
gcactgcccctcccc

SEQ ID NO: 374285 - DNA, 15 bp, Homo sapiens
agcactgcccctccc

SEQ ID NO: 374286 - DNA, 15 bp, Homo sapiens
cagcactgcccctcc

SEQ ID NO: 374287 - DNA, 15 bp, Homo sapiens
ccagcactgcccctc

SEQ ID NO: 374288 - DNA, 15 bp, Homo sapiens
cccagcactgcccct

SEQ ID NO: 374289 - DNA, 15 bp, Homo sapiens
gcccagcactgcccc

SEQ ID NO: 374290 - DNA, 15 bp, Homo sapiens
agcccagcactgccc

SEQ ID NO: 374291 - DNA, 15 bp, Homo sapiens
cagcccagcactgcc

SEQ ID NO: 374292 - DNA, 15 bp, Homo sapiens
gcagcccagcactgc

SEQ ID NO: 374293 - DNA, 15 bp, Homo sapiens
agcagcccagcactg

SEQ ID NO: 374294 - DNA, 15 bp, Homo sapiens
cagcagcccagcact

SEQ ID NO: 374295 - DNA, 15 bp, Homo sapiens
gcagcagcccagcac

SEQ ID NO: 374296 - DNA, 15 bp, Homo sapiens
tgcagcagcccagca

SEQ ID NO: 374297 - DNA, 15 bp, Homo sapiens
ctgcagcagcccagc

SEQ ID NO: 374298 - DNA, 15 bp, Homo sapiens
actgcagcagcccag

SEQ ID NO: 374299 - DNA, 15 bp, Homo sapiens
gactgcagcagccca

SEQ ID NO: 374300 - DNA, 15 bp, Homo sapiens
tgactgcagcagccc

SEQ ID NO: 374301 - DNA, 15 bp, Homo sapiens
gtgactgcagcagcc

SEQ ID NO: 374302 - DNA, 15 bp, Homo sapiens
ggtgactgcagcagc

SEQ ID NO: 374303 - DNA, 15 bp, Homo sapiens
tggtgactgcagcag

SEQ ID NO: 374304 - DNA, 15 bp, Homo sapiens
ctggtgactgcagca

SEQ ID NO: 374305 - DNA, 15 bp, Homo sapiens
gctggtgactgcagc

SEQ ID NO: 374306 - DNA, 15 bp, Homo sapiens
ggctggtgactgcag

SEQ ID NO: 374307 - DNA, 15 bp, Homo sapiens
tggctggtgactgca

SEQ ID NO: 374308 - DNA, 15 bp, Homo sapiens
ctggctggtgactgc

SEQ ID NO: 374309 - DNA, 15 bp, Homo sapiens
tctggctggtgactg

SEQ ID NO: 374310 - DNA, 15 bp, Homo sapiens
atctggctggtgact

SEQ ID NO: 374311 - DNA, 15 bp, Homo sapiens
aatctggctggtgac

SEQ ID NO: 374312 - DNA, 15 bp, Homo sapiens
caatctggctggtga

SEQ ID NO: 374313 - DNA, 15 bp, Homo sapiens
ccaatctggctggtg

SEQ ID NO: 374314 - DNA, 15 bp, Homo sapiens
tccaatctggctggt

SEQ ID NO: 374315 - DNA, 15 bp, Homo sapiens
ctccaatctggctgg

SEQ ID NO: 374316 - DNA, 15 bp, Homo sapiens
gctccaatctggctg

SEQ ID NO: 374317 - DNA, 15 bp, Homo sapiens
agctccaatctggct

SEQ ID NO: 374318 - DNA, 15 bp, Homo sapiens
gagctccaatctggc

SEQ ID NO: 374319 - DNA, 15 bp, Homo sapiens
tgagctccaatctgg

SEQ ID NO: 374320 - DNA, 15 bp, Homo sapiens
gtgagctccaatctg

SEQ ID NO: 374321 - DNA, 15 bp, Homo sapiens
tgtgagctccaatct

SEQ ID NO: 374322 - DNA, 15 bp, Homo sapiens
atgtgagctccaatc

SEQ ID NO: 374323 - DNA, 15 bp, Homo sapiens
aatgtgagctccaat

SEQ ID NO: 374324 - DNA, 15 bp, Homo sapiens
aaatgtgagctccaa

SEQ ID NO: 374325 - DNA, 15 bp, Homo sapiens
taaatgtgagctcca

SEQ ID NO: 374326 - DNA, 15 bp, Homo sapiens
ataaatgtgagctcc

SEQ ID NO: 374327 - DNA, 15 bp, Homo sapiens
cataaatgtgagctc

SEQ ID NO: 374328 - DNA, 15 bp, Homo sapiens
ccataaatgtgagct

SEQ ID NO: 374329 - DNA, 15 bp, Homo sapiens
cccataaatgtgagc

SEQ ID NO: 374330 - DNA, 15 bp, Homo sapiens
tcccataaatgtgag

SEQ ID NO: 374331 - DNA, 15 bp, Homo sapiens
ctcccataaatgtga

SEQ ID NO: 374332 - DNA, 15 bp, Homo sapiens
gctcccataaatgtg

SEQ ID NO: 374333 - DNA, 15 bp, Homo sapiens
ggctcccataaatgt

SEQ ID NO: 374334 - DNA, 15 bp, Homo sapiens
gggctcccataaatg

SEQ ID NO: 374335 - DNA, 15 bp, Homo sapiens
tgggctcccataaat

SEQ ID NO: 374336 - DNA, 15 bp, Homo sapiens
atgggctcccataaa

SEQ ID NO: 374337 - DNA, 15 bp, Homo sapiens
catgggctcccataa

SEQ ID NO: 374338 - DNA, 15 bp, Homo sapiens
acatgggctcccata

SEQ ID NO: 374339 - DNA, 15 bp, Homo sapiens
aacatgggctcccat

SEQ ID NO: 374340 - DNA, 15 bp, Homo sapiens
aaacatgggctccca

SEQ ID NO: 374341 - DNA, 15 bp, Homo sapiens
taaacatgggctccc

SEQ ID NO: 374342 - DNA, 15 bp, Homo sapiens
ataaacatgggctcc

SEQ ID NO: 374343 - DNA, 15 bp, Homo sapiens
cataaacatgggctc

SEQ ID NO: 374344 - DNA, 15 bp, Homo sapiens
ccataaacatgggct

SEQ ID NO: 374345 - DNA, 15 bp, Homo sapiens
cccataaacatgggc

SEQ ID NO: 374346 - DNA, 15 bp, Homo sapiens
tcccataaacatggg

SEQ ID NO: 374347 - DNA, 15 bp, Homo sapiens
ctcccataaacatgg

SEQ ID NO: 374348 - DNA, 15 bp, Homo sapiens
cctcccataaacatg

SEQ ID NO: 374349 - DNA, 15 bp, Homo sapiens
gcctcccataaacat

SEQ ID NO: 374350 - DNA, 15 bp, Homo sapiens
ggcctcccataaaca

SEQ ID NO: 374351 - DNA, 15 bp, Homo sapiens
aggcctcccataaac

SEQ ID NO: 374352 - DNA, 15 bp, Homo sapiens
caggcctcccataaa

SEQ ID NO: 374353 - DNA, 15 bp, Homo sapiens
ccaggcctcccataa

SEQ ID NO: 374354 - DNA, 15 bp, Homo sapiens
tccaggcctcccata

SEQ ID NO: 374355 - DNA, 15 bp, Homo sapiens
ctccaggcctcccat

SEQ ID NO: 374356 - DNA, 15 bp, Homo sapiens
cctccaggcctccca

SEQ ID NO: 374357 - DNA, 15 bp, Homo sapiens
gcctccaggcctccc

SEQ ID NO: 374358 - DNA, 15 bp, Homo sapiens
agcctccaggcctcc

SEQ ID NO: 374359 - DNA, 15 bp, Homo sapiens
gagcctccaggcctc

SEQ ID NO: 374360 - DNA, 15 bp, Homo sapiens
agagcctccaggcct

SEQ ID NO: 374361 - DNA, 15 bp, Homo sapiens
cagagcctccaggcc

SEQ ID NO: 374362 - DNA, 15 bp, Homo sapiens
tcagagcctccaggc

SEQ ID NO: 374363 - DNA, 15 bp, Homo sapiens
ttcagagcctccagg

SEQ ID NO: 374364 - DNA, 15 bp, Homo sapiens
tttcagagcctccag

SEQ ID NO: 374365 - DNA, 15 bp, Homo sapiens
ctttcagagcctcca

SEQ ID NO: 374366 - DNA, 15 bp, Homo sapiens
cctttcagagcctcc

SEQ ID NO: 374367 - DNA, 15 bp, Homo sapiens
acctttcagagcctc

SEQ ID NO: 374368 - DNA, 15 bp, Homo sapiens
cacctttcagagcct

SEQ ID NO: 374369 - DNA, 15 bp, Homo sapiens
ccacctttcagagcc

SEQ ID NO: 374370 - DNA, 15 bp, Homo sapiens
cccacctttcagagc

SEQ ID NO: 374371 - DNA, 15 bp, Homo sapiens
ccccacctttcagag

SEQ ID NO: 374372 - DNA, 15 bp, Homo sapiens
gccccacctttcaga

SEQ ID NO: 374373 - DNA, 15 bp, Homo sapiens
tgccccacctttcag

SEQ ID NO: 374374 - DNA, 15 bp, Homo sapiens
gtgccccacctttca

SEQ ID NO: 374375 - DNA, 15 bp, Homo sapiens
ggtgccccacctttc

SEQ ID NO: 374376 - DNA, 15 bp, Homo sapiens
gggtgccccaccttt

SEQ ID NO: 374377 - DNA, 15 bp, Homo sapiens
tgggtgccccacctt

SEQ ID NO: 374378 - DNA, 15 bp, Homo sapiens
ctgggtgccccacct

SEQ ID NO: 374379 - DNA, 15 bp, Homo sapiens
gctgggtgccccacc

SEQ ID NO: 374380 - DNA, 15 bp, Homo sapiens
tgctgggtgccccac

SEQ ID NO: 374381 - DNA, 15 bp, Homo sapiens
gtgctgggtgcccca

SEQ ID NO: 374382 - DNA, 15 bp, Homo sapiens
tgtgctgggtgcccc

SEQ ID NO: 374383 - DNA, 15 bp, Homo sapiens
ctgtgctgggtgccc

SEQ ID NO: 374384 - DNA, 15 bp, Homo sapiens
tctgtgctgggtgcc

SEQ ID NO: 374385 - DNA, 15 bp, Homo sapiens
ctctgtgctgggtgc

SEQ ID NO: 374386 - DNA, 15 bp, Homo sapiens
gctctgtgctgggtg

SEQ ID NO: 374387 - DNA, 15 bp, Homo sapiens
tgctctgtgctgggt

SEQ ID NO: 374388 - DNA, 15 bp, Homo sapiens
ctgctctgtgctggg

SEQ ID NO: 374389 - DNA, 15 bp, Homo sapiens
gctgctctgtgctgg

SEQ ID NO: 374390 - DNA, 15 bp, Homo sapiens
agctgctctgtgctg

SEQ ID NO: 374391 - DNA, 15 bp, Homo sapiens
cagctgctctgtgct

SEQ ID NO: 374392 - DNA, 15 bp, Homo sapiens
ccagctgctctgtgc

SEQ ID NO: 374393 - DNA, 15 bp, Homo sapiens
gccagctgctctgtg

SEQ ID NO: 374394 - DNA, 15 bp, Homo sapiens
ggccagctgctctgt

SEQ ID NO: 374395 - DNA, 15 bp, Homo sapiens
cggccagctgctctg

SEQ ID NO: 374396 - DNA, 15 bp, Homo sapiens
acggccagctgctct

SEQ ID NO: 374397 - DNA, 15 bp, Homo sapiens
cacggccagctgctc

SEQ ID NO: 374398 - DNA, 15 bp, Homo sapiens
acacggccagctgct

SEQ ID NO: 374399 - DNA, 15 bp, Homo sapiens
tacacggccagctgc

SEQ ID NO: 374400 - DNA, 15 bp, Homo sapiens
atacacggccagctg

SEQ ID NO: 374401 - DNA, 15 bp, Homo sapiens
catacacggccagct

SEQ ID NO: 374402 - DNA, 15 bp, Homo sapiens
acatacacggccagc

SEQ ID NO: 374403 - DNA, 15 bp, Homo sapiens
aacatacacggccag

SEQ ID NO: 374404 - DNA, 15 bp, Homo sapiens
caacatacacggcca

SEQ ID NO: 374405 - DNA, 15 bp, Homo sapiens
ccaacatacacggcc

SEQ ID NO: 374406 - DNA, 15 bp, Homo sapiens
tccaacatacacggc

SEQ ID NO: 374407 - DNA, 15 bp, Homo sapiens
gtccaacatacacgg

SEQ ID NO: 374408 - DNA, 15 bp, Homo sapiens
agtccaacatacacg

SEQ ID NO: 374409 - DNA, 15 bp, Homo sapiens
gagtccaacatacac

SEQ ID NO: 374410 - DNA, 15 bp, Homo sapiens
ggagtccaacataca

SEQ ID NO: 374411 - DNA, 15 bp, Homo sapiens
tggagtccaacatac

SEQ ID NO: 374412 - DNA, 15 bp, Homo sapiens
ctggagtccaacata

SEQ ID NO: 374413 - DNA, 15 bp, Homo sapiens
cctggagtccaacat

SEQ ID NO: 374414 - DNA, 15 bp, Homo sapiens
ccctggagtccaaca

SEQ ID NO: 374415 - DNA, 15 bp, Homo sapiens
gccctggagtccaac

SEQ ID NO: 374416 - DNA, 15 bp, Homo sapiens
ggccctggagtccaa

SEQ ID NO: 374417 - DNA, 15 bp, Homo sapiens
aggccctggagtcca

SEQ ID NO: 374418 - DNA, 15 bp, Homo sapiens
aaggccctggagtcc

SEQ ID NO: 374419 - DNA, 15 bp, Homo sapiens
caaggccctggagtc

SEQ ID NO: 374420 - DNA, 15 bp, Homo sapiens
acaaggccctggagt

SEQ ID NO: 374421 - DNA, 15 bp, Homo sapiens
cacaaggccctggag

SEQ ID NO: 374422 - DNA, 15 bp, Homo sapiens
tcacaaggccctgga

SEQ ID NO: 374423 - DNA, 15 bp, Homo sapiens
gtcacaaggccctgg

SEQ ID NO: 374424 - DNA, 15 bp, Homo sapiens
tgtcacaaggccctg

SEQ ID NO: 374425 - DNA, 15 bp, Homo sapiens
ctgtcacaaggccct

SEQ ID NO: 374426 - DNA, 15 bp, Homo sapiens
gctgtcacaaggccc

SEQ ID NO: 374427 - DNA, 15 bp, Homo sapiens
tgctgtcacaaggcc

SEQ ID NO: 374428 - DNA, 15 bp, Homo sapiens
ctgctgtcacaaggc

SEQ ID NO: 374429 - DNA, 15 bp, Homo sapiens
gctgctgtcacaagg

SEQ ID NO: 374430 - DNA, 15 bp, Homo sapiens
agctgctgtcacaag

SEQ ID NO: 374431 - DNA, 15 bp, Homo sapiens
aagctgctgtcacaa

SEQ ID NO: 374432 - DNA, 15 bp, Homo sapiens
gaagctgctgtcaca

SEQ ID NO: 374433 - DNA, 15 bp, Homo sapiens
agaagctgctgtcac

SEQ ID NO: 374434 - DNA, 15 bp, Homo sapiens
cagaagctgctgtca

SEQ ID NO: 374435 - DNA, 15 bp, Homo sapiens
ccagaagctgctgtc

SEQ ID NO: 374436 - DNA, 15 bp, Homo sapiens
cccagaagctgctgt

SEQ ID NO: 374437 - DNA, 15 bp, Homo sapiens
acccagaagctgctg

SEQ ID NO: 374438 - DNA, 15 bp, Homo sapiens
cacccagaagctgct

SEQ ID NO: 374439 - DNA, 15 bp, Homo sapiens
ccacccagaagctgc

SEQ ID NO: 374440 - DNA, 15 bp, Homo sapiens
cccacccagaagctg

SEQ ID NO: 374441 - DNA, 15 bp, Homo sapiens
ccccacccagaagct

SEQ ID NO: 374442 - DNA, 15 bp, Homo sapiens
cccccacccagaagc

SEQ ID NO: 374443 - DNA, 15 bp, Homo sapiens
tcccccacccagaag

SEQ ID NO: 374444 - DNA, 15 bp, Homo sapiens
gtcccccacccagaa

SEQ ID NO: 374445 - DNA, 15 bp, Homo sapiens
ggtcccccacccaga

SEQ ID NO: 374446 - DNA, 15 bp, Homo sapiens
gggtcccccacccag

SEQ ID NO: 374447 - DNA, 15 bp, Homo sapiens
agggtcccccaccca

SEQ ID NO: 374448 - DNA, 15 bp, Homo sapiens
aagggtcccccaccc

SEQ ID NO: 374449 - DNA, 15 bp, Homo sapiens
aaagggtcccccacc

SEQ ID NO: 374450 - DNA, 15 bp, Homo sapiens
gaaagggtcccccac

SEQ ID NO: 374451 - DNA, 15 bp, Homo sapiens
tgaaagggtccccca

SEQ ID NO: 374452 - DNA, 15 bp, Homo sapiens
atgaaagggtccccc

SEQ ID NO: 374453 - DNA, 15 bp, Homo sapiens
aatgaaagggtcccc

SEQ ID NO: 374454 - DNA, 15 bp, Homo sapiens
gaatgaaagggtccc

SEQ ID NO: 374455 - DNA, 15 bp, Homo sapiens
agaatgaaagggtcc

SEQ ID NO: 374456 - DNA, 15 bp, Homo sapiens
aagaatgaaagggtc

SEQ ID NO: 374457 - DNA, 15 bp, Homo sapiens
gaagaatgaaagggt

SEQ ID NO: 374458 - DNA, 15 bp, Homo sapiens
agaagaatgaaaggg

SEQ ID NO: 374459 - DNA, 15 bp, Homo sapiens
aagaagaatgaaagg

SEQ ID NO: 374460 - DNA, 15 bp, Homo sapiens
aaagaagaatgaaag

SEQ ID NO: 374461 - DNA, 15 bp, Homo sapiens
aaaagaagaatgaaa

SEQ ID NO: 374462 - DNA, 15 bp, Homo sapiens
taaaagaagaatgaa

SEQ ID NO: 374463 - DNA, 15 bp, Homo sapiens
ataaaagaagaatga

SEQ ID NO: 374464 - DNA, 15 bp, Homo sapiens
aataaaagaagaatg

SEQ ID NO: 374465 - DNA, 15 bp, Homo sapiens
gaataaaagaagaat

SEQ ID NO: 374466 - DNA, 15 bp, Homo sapiens
ggaataaaagaagaa

SEQ ID NO: 374467 - DNA, 15 bp, Homo sapiens
gggaataaaagaaga

SEQ ID NO: 374468 - DNA, 15 bp, Homo sapiens
agggaataaaagaag

SEQ ID NO: 374469 - DNA, 15 bp, Homo sapiens
aagggaataaaagaa

SEQ ID NO: 374470 - DNA, 15 bp, Homo sapiens
caagggaataaaaga

SEQ ID NO: 374471 - DNA, 15 bp, Homo sapiens
tcaagggaataaaag

SEQ ID NO: 374472 - DNA, 15 bp, Homo sapiens
gtcaagggaataaaa

SEQ ID NO: 374473 - DNA, 15 bp, Homo sapiens
ggtcaagggaataaa

SEQ ID NO: 374474 - DNA, 15 bp, Homo sapiens
aggtcaagggaataa

SEQ ID NO: 374475 - DNA, 15 bp, Homo sapiens
gaggtcaagggaata

SEQ ID NO: 374476 - DNA, 15 bp, Homo sapiens
ggaggtcaagggaat

SEQ ID NO: 374477 - DNA, 15 bp, Homo sapiens
aggaggtcaagggaa

SEQ ID NO: 374478 - DNA, 15 bp, Homo sapiens
taggaggtcaaggga

SEQ ID NO: 374479 - DNA, 15 bp, Homo sapiens
ttaggaggtcaaggg

SEQ ID NO: 374480 - DNA, 15 bp, Homo sapiens
gttaggaggtcaagg

SEQ ID NO: 374481 - DNA, 15 bp, Homo sapiens
agttaggaggtcaag

SEQ ID NO: 374482 - DNA, 15 bp, Homo sapiens
cagttaggaggtcaa

SEQ ID NO: 374483 - DNA, 15 bp, Homo sapiens
ccagttaggaggtca

SEQ ID NO: 374484 - DNA, 15 bp, Homo sapiens
tccagttaggaggtc

SEQ ID NO: 374485 - DNA, 15 bp, Homo sapiens
ctccagttaggaggt

SEQ ID NO: 374486 - DNA, 15 bp, Homo sapiens
cctccagttaggagg

SEQ ID NO: 374487 - DNA, 15 bp, Homo sapiens
acctccagttaggag

SEQ ID NO: 374488 - DNA, 15 bp, Homo sapiens
aacctccagttagga

SEQ ID NO: 374489 - DNA, 15 bp, Homo sapiens
taacctccagttagg

SEQ ID NO: 374490 - DNA, 15 bp, Homo sapiens
ctaacctccagttag

SEQ ID NO: 374491 - DNA, 15 bp, Homo sapiens
cctaacctccagtta

SEQ ID NO: 374492 - DNA, 15 bp, Homo sapiens
tcctaacctccagtt

SEQ ID NO: 374493 - DNA, 15 bp, Homo sapiens
ctcctaacctccagt

SEQ ID NO: 374494 - DNA, 15 bp, Homo sapiens
actcctaacctccag

SEQ ID NO: 374495 - DNA, 15 bp, Homo sapiens
cactcctaacctcca

SEQ ID NO: 374496 - DNA, 15 bp, Homo sapiens
ccactcctaacctcc

SEQ ID NO: 374497 - DNA, 15 bp, Homo sapiens
cccactcctaacctc

SEQ ID NO: 374498 - DNA, 15 bp, Homo sapiens
tcccactcctaacct

SEQ ID NO: 374499 - DNA, 15 bp, Homo sapiens
ctcccactcctaacc

SEQ ID NO: 374500 - DNA, 15 bp, Homo sapiens
cctcccactcctaac

SEQ ID NO: 374501 - DNA, 15 bp, Homo sapiens
tcctcccactcctaa

SEQ ID NO: 374502 - DNA, 15 bp, Homo sapiens
gtcctcccactccta

SEQ ID NO: 374503 - DNA, 15 bp, Homo sapiens
ggtcctcccactcct

SEQ ID NO: 374504 - DNA, 15 bp, Homo sapiens
gggtcctcccactcc

SEQ ID NO: 374505 - DNA, 15 bp, Homo sapiens
cgggtcctcccactc

SEQ ID NO: 374506 - DNA, 15 bp, Homo sapiens
gcgggtcctcccact

SEQ ID NO: 374507 - DNA, 15 bp, Homo sapiens
ggcgggtcctcccac

SEQ ID NO: 374508 - DNA, 15 bp, Homo sapiens
tggcgggtcctccca

SEQ ID NO: 374509 - DNA, 15 bp, Homo sapiens
ctggcgggtcctccc

SEQ ID NO: 374510 - DNA, 15 bp, Homo sapiens
tctggcgggtcctcc

SEQ ID NO: 374511 - DNA, 15 bp, Homo sapiens
ctctggcgggtcctc

SEQ ID NO: 374512 - DNA, 15 bp, Homo sapiens
cctctggcgggtcct

SEQ ID NO: 374513 - DNA, 15 bp, Homo sapiens
ccctctggcgggtcc

SEQ ID NO: 374514 - DNA, 15 bp, Homo sapiens
tccctctggcgggtc

SEQ ID NO: 374515 - DNA, 15 bp, Homo sapiens
ctccctctggcgggt

SEQ ID NO: 374516 - DNA, 15 bp, Homo sapiens
actccctctggcggg

SEQ ID NO: 374517 - DNA, 15 bp, Homo sapiens
cactccctctggcgg

SEQ ID NO: 374518 - DNA, 15 bp, Homo sapiens
ccactccctctggcg

SEQ ID NO: 374519 - DNA, 15 bp, Homo sapiens
cccactccctctggc

SEQ ID NO: 374520 - DNA, 15 bp, Homo sapiens
ccccactccctctgg

SEQ ID NO: 374521 - DNA, 15 bp, Homo sapiens
cccccactccctctg

SEQ ID NO: 374522 - DNA, 15 bp, Homo sapiens
gcccccactccctct

SEQ ID NO: 374523 - DNA, 15 bp, Homo sapiens
agcccccactccctc

SEQ ID NO: 374524 - DNA, 15 bp, Homo sapiens
aagcccccactccct

SEQ ID NO: 374525 - DNA, 15 bp, Homo sapiens
caagcccccactccc

SEQ ID NO: 374526 - DNA, 15 bp, Homo sapiens
ccaagcccccactcc

SEQ ID NO: 374527 - DNA, 15 bp, Homo sapiens
cccaagcccccactc

SEQ ID NO: 374528 - DNA, 15 bp, Homo sapiens
acccaagcccccact

SEQ ID NO: 374529 - DNA, 15 bp, Homo sapiens
gacccaagcccccac

SEQ ID NO: 374530 - DNA, 15 bp, Homo sapiens
agacccaagccccca

SEQ ID NO: 374531 - DNA, 15 bp, Homo sapiens
cagacccaagccccc

SEQ ID NO: 374532 - DNA, 15 bp, Homo sapiens
ccagacccaagcccc

SEQ ID NO: 374533 - DNA, 15 bp, Homo sapiens
cccagacccaagccc

SEQ ID NO: 374534 - DNA, 15 bp, Homo sapiens
tcccagacccaagcc

SEQ ID NO: 374535 - DNA, 15 bp, Homo sapiens
ctcccagacccaagc

SEQ ID NO: 374536 - DNA, 15 bp, Homo sapiens
cctcccagacccaag

SEQ ID NO: 374537 - DNA, 15 bp, Homo sapiens
acctcccagacccaa

SEQ ID NO: 374538 - DNA, 15 bp, Homo sapiens
gacctcccagaccca

SEQ ID NO: 374539 - DNA, 15 bp, Homo sapiens
ggacctcccagaccc

SEQ ID NO: 374540 - DNA, 15 bp, Homo sapiens
aggacctcccagacc

SEQ ID NO: 374541 - DNA, 15 bp, Homo sapiens
caggacctcccagac

SEQ ID NO: 374542 - DNA, 15 bp, Homo sapiens
ccaggacctcccaga

SEQ ID NO: 374543 - DNA, 15 bp, Homo sapiens
cccaggacctcccag

SEQ ID NO: 374544 - DNA, 15 bp, Homo sapiens
acccaggacctccca

SEQ ID NO: 374545 - DNA, 15 bp, Homo sapiens
cacccaggacctccc

SEQ ID NO: 374546 - DNA, 15 bp, Homo sapiens
gcacccaggacctcc

SEQ ID NO: 374547 - DNA, 15 bp, Homo sapiens
agcacccaggacctc

SEQ ID NO: 374548 - DNA, 15 bp, Homo sapiens
aagcacccaggacct

SEQ ID NO: 374549 - DNA, 15 bp, Homo sapiens
aaagcacccaggacc

SEQ ID NO: 374550 - DNA, 15 bp, Homo sapiens
taaagcacccaggac

SEQ ID NO: 374551 - DNA, 15 bp, Homo sapiens
ctaaagcacccagga

SEQ ID NO: 374552 - DNA, 15 bp, Homo sapiens
cctaaagcacccagg

SEQ ID NO: 374553 - DNA, 15 bp, Homo sapiens
ccctaaagcacccag

SEQ ID NO: 374554 - DNA, 15 bp, Homo sapiens
cccctaaagcaccca

SEQ ID NO: 374555 - DNA, 15 bp, Homo sapiens
acccctaaagcaccc

SEQ ID NO: 374556 - DNA, 15 bp, Homo sapiens
cacccctaaagcacc

SEQ ID NO: 374557 - DNA, 15 bp, Homo sapiens
tcacccctaaagcac

SEQ ID NO: 374558 - DNA, 15 bp, Homo sapiens
ttcacccctaaagca

SEQ ID NO: 374559 - DNA, 15 bp, Homo sapiens
tttcacccctaaagc

SEQ ID NO: 374560 - DNA, 15 bp, Homo sapiens
ctttcacccctaaag

SEQ ID NO: 374561 - DNA, 15 bp, Homo sapiens
cctttcacccctaaa

SEQ ID NO: 374562 - DNA, 15 bp, Homo sapiens
ccctttcacccctaa

SEQ ID NO: 374563 - DNA, 15 bp, Homo sapiens
gccctttcaccccta

SEQ ID NO: 374564 - DNA, 15 bp, Homo sapiens
agccctttcacccct

SEQ ID NO: 374565 - DNA, 15 bp, Homo sapiens
cagccctttcacccc

SEQ ID NO: 374566 - DNA, 15 bp, Homo sapiens
ccagccctttcaccc

SEQ ID NO: 374567 - DNA, 15 bp, Homo sapiens
cccagccctttcacc

SEQ ID NO: 374568 - DNA, 15 bp, Homo sapiens
tcccagccctttcac

SEQ ID NO: 374569 - DNA, 15 bp, Homo sapiens
atcccagccctttca

SEQ ID NO: 374570 - DNA, 15 bp, Homo sapiens
catcccagccctttc

SEQ ID NO: 374571 - DNA, 15 bp, Homo sapiens
ccatcccagcccttt

SEQ ID NO: 374572 - DNA, 15 bp, Homo sapiens
gccatcccagccctt

SEQ ID NO: 374573 - DNA, 15 bp, Homo sapiens
agccatcccagccct

SEQ ID NO: 374574 - DNA, 15 bp, Homo sapiens
cagccatcccagccc

SEQ ID NO: 374575 - DNA, 15 bp, Homo sapiens
tcagccatcccagcc

SEQ ID NO: 374576 - DNA, 15 bp, Homo sapiens
ttcagccatcccagc

SEQ ID NO: 374577 - DNA, 15 bp, Homo sapiens
gttcagccatcccag

SEQ ID NO: 374578 - DNA, 15 bp, Homo sapiens
tgttcagccatccca

SEQ ID NO: 374579 - DNA, 15 bp, Homo sapiens
ctgttcagccatccc

SEQ ID NO: 374580 - DNA, 15 bp, Homo sapiens
actgttcagccatcc

SEQ ID NO: 374581 - DNA, 15 bp, Homo sapiens
cactgttcagccatc

SEQ ID NO: 374582 - DNA, 15 bp, Homo sapiens
tcactgttcagccat

SEQ ID NO: 374583 - DNA, 15 bp, Homo sapiens
ctcactgttcagcca

SEQ ID NO: 374584 - DNA, 15 bp, Homo sapiens
actcactgttcagcc

SEQ ID NO: 374585 - DNA, 15 bp, Homo sapiens
cactcactgttcagc

SEQ ID NO: 374586 - DNA, 15 bp, Homo sapiens
acactcactgttcag

SEQ ID NO: 374587 - DNA, 15 bp, Homo sapiens
cacactcactgttca

SEQ ID NO: 374588 - DNA, 15 bp, Homo sapiens
acacactcactgttc

SEQ ID NO: 374589 - DNA, 15 bp, Homo sapiens
gacacactcactgtt

SEQ ID NO: 374590 - DNA, 15 bp, Homo sapiens
ggacacactcactgt

SEQ ID NO: 374591 - DNA, 15 bp, Homo sapiens
tggacacactcactg

SEQ ID NO: 374592 - DNA, 15 bp, Homo sapiens
ttggacacactcact

SEQ ID NO: 374593 - DNA, 15 bp, Homo sapiens
cttggacacactcac

SEQ ID NO: 374594 - DNA, 15 bp, Homo sapiens
gcttggacacactca

SEQ ID NO: 374595 - DNA, 15 bp, Homo sapiens
cgcttggacacactc

SEQ ID NO: 374596 - DNA, 15 bp, Homo sapiens
ccgcttggacacact

SEQ ID NO: 374597 - DNA, 15 bp, Homo sapiens
cccgcttggacacac

SEQ ID NO: 374598 - DNA, 15 bp, Homo sapiens
tcccgcttggacaca

SEQ ID NO: 374599 - DNA, 15 bp, Homo sapiens
ctcccgcttggacac

SEQ ID NO: 374600 - DNA, 15 bp, Homo sapiens
tctcccgcttggaca

SEQ ID NO: 374601 - DNA, 15 bp, Homo sapiens
ctctcccgcttggac

SEQ ID NO: 374602 - DNA, 15 bp, Homo sapiens
tctctcccgcttgga

SEQ ID NO: 374603 - DNA, 15 bp, Homo sapiens
atctctcccgcttgg

SEQ ID NO: 374604 - DNA, 15 bp, Homo sapiens
aatctctcccgcttg

SEQ ID NO: 374605 - DNA, 15 bp, Homo sapiens
taatctctcccgctt

SEQ ID NO: 374606 - DNA, 15 bp, Homo sapiens
ctaatctctcccgct

SEQ ID NO: 374607 - DNA, 15 bp, Homo sapiens
tctaatctctcccgc

SEQ ID NO: 374608 - DNA, 15 bp, Homo sapiens
atctaatctctcccg

SEQ ID NO: 374609 - DNA, 15 bp, Homo sapiens
aatctaatctctccc

SEQ ID NO: 374610 - DNA, 15 bp, Homo sapiens
taatctaatctctcc

SEQ ID NO: 374611 - DNA, 15 bp, Homo sapiens
gtaatctaatctctc

SEQ ID NO: 374612 - DNA, 15 bp, Homo sapiens
cgtaatctaatctct

SEQ ID NO: 374613 - DNA, 15 bp, Homo sapiens
ccgtaatctaatctc

SEQ ID NO: 374614 - DNA, 15 bp, Homo sapiens
tccgtaatctaatct

SEQ ID NO: 374615 - DNA, 15 bp, Homo sapiens
ctccgtaatctaatc

SEQ ID NO: 374616 - DNA, 15 bp, Homo sapiens
cctccgtaatctaat

SEQ ID NO: 374617 - DNA, 15 bp, Homo sapiens
gcctccgtaatctaa

SEQ ID NO: 374618 - DNA, 15 bp, Homo sapiens
tgcctccgtaatcta

SEQ ID NO: 374619 - DNA, 15 bp, Homo sapiens
ctgcctccgtaatct

SEQ ID NO: 374620 - DNA, 15 bp, Homo sapiens
tctgcctccgtaatc

SEQ ID NO: 374621 - DNA, 15 bp, Homo sapiens
gtctgcctccgtaat

SEQ ID NO: 374622 - DNA, 15 bp, Homo sapiens
tgtctgcctccgtaa

SEQ ID NO: 374623 - DNA, 15 bp, Homo sapiens
ctgtctgcctccgta

SEQ ID NO: 374624 - DNA, 15 bp, Homo sapiens
tctgtctgcctccgt

SEQ ID NO: 374625 - DNA, 15 bp, Homo sapiens
ttctgtctgcctccg

SEQ ID NO: 374626 - DNA, 15 bp, Homo sapiens
cttctgtctgcctcc

SEQ ID NO: 374627 - DNA, 15 bp, Homo sapiens
acttctgtctgcctc

SEQ ID NO: 374628 - DNA, 15 bp, Homo sapiens
tacttctgtctgcct

SEQ ID NO: 374629 - DNA, 15 bp, Homo sapiens
ttacttctgtctgcc

SEQ ID NO: 374630 - DNA, 15 bp, Homo sapiens
attacttctgtctgc

SEQ ID NO: 374631 - DNA, 15 bp, Homo sapiens
cattacttctgtctg

SEQ ID NO: 374632 - DNA, 15 bp, Homo sapiens
tcattacttctgtct

SEQ ID NO: 374633 - DNA, 15 bp, Homo sapiens
atcattacttctgtc

SEQ ID NO: 374634 - DNA, 15 bp, Homo sapiens
aatcattacttctgt

SEQ ID NO: 374635 - DNA, 15 bp, Homo sapiens
taatcattacttctg

SEQ ID NO: 374636 - DNA, 15 bp, Homo sapiens
ttaatcattacttct

SEQ ID NO: 374637 - DNA, 15 bp, Homo sapiens
gttaatcattacttc

SEQ ID NO: 374638 - DNA, 15 bp, Homo sapiens
agttaatcattactt

SEQ ID NO: 374639 - DNA, 15 bp, Homo sapiens
aagttaatcattact

SEQ ID NO: 374640 - DNA, 15 bp, Homo sapiens
aaagttaatcattac

SEQ ID NO: 374641 - DNA, 15 bp, Homo sapiens
aaaagttaatcatta

SEQ ID NO: 374642 - DNA, 15 bp, Homo sapiens
gaaaagttaatcatt

SEQ ID NO: 374643 - DNA, 15 bp, Homo sapiens
ggaaaagttaatcat

SEQ ID NO: 374644 - DNA, 15 bp, Homo sapiens
tggaaaagttaatca

SEQ ID NO: 374645 - DNA, 15 bp, Homo sapiens
ctggaaaagttaatc

SEQ ID NO: 374646 - DNA, 15 bp, Homo sapiens
actggaaaagttaat

SEQ ID NO: 374647 - DNA, 15 bp, Homo sapiens
gactggaaaagttaa

SEQ ID NO: 374648 - DNA, 15 bp, Homo sapiens
agactggaaaagtta

SEQ ID NO: 374649 - DNA, 15 bp, Homo sapiens
cagactggaaaagtt

SEQ ID NO: 374650 - DNA, 15 bp, Homo sapiens
gcagactggaaaagt

SEQ ID NO: 374651 - DNA, 15 bp, Homo sapiens
tgcagactggaaaag

SEQ ID NO: 374652 - DNA, 15 bp, Homo sapiens
gtgcagactggaaaa

SEQ ID NO: 374653 - DNA, 15 bp, Homo sapiens
cgtgcagactggaaa

SEQ ID NO: 374654 - DNA, 15 bp, Homo sapiens
gcgtgcagactggaa

SEQ ID NO: 374655 - DNA, 15 bp, Homo sapiens
agcgtgcagactgga

SEQ ID NO: 374656 - DNA, 15 bp, Homo sapiens
cagcgtgcagactgg

SEQ ID NO: 374657 - DNA, 15 bp, Homo sapiens
acagcgtgcagactg

SEQ ID NO: 374658 - DNA, 15 bp, Homo sapiens
gacagcgtgcagact

SEQ ID NO: 374659 - DNA, 15 bp, Homo sapiens
agacagcgtgcagac

SEQ ID NO: 374660 - DNA, 15 bp, Homo sapiens
gagacagcgtgcaga

SEQ ID NO: 374661 - DNA, 15 bp, Homo sapiens
ggagacagcgtgcag

SEQ ID NO: 374662 - DNA, 15 bp, Homo sapiens
tggagacagcgtgca

SEQ ID NO: 374663 - DNA, 15 bp, Homo sapiens
ctggagacagcgtgc

SEQ ID NO: 374664 - DNA, 15 bp, Homo sapiens
cctggagacagcgtg

SEQ ID NO: 374665 - DNA, 15 bp, Homo sapiens
gcctggagacagcgt

SEQ ID NO: 374666 - DNA, 15 bp, Homo sapiens
agcctggagacagcg

SEQ ID NO: 374667 - DNA, 15 bp, Homo sapiens
cagcctggagacagc

SEQ ID NO: 374668 - DNA, 15 bp, Homo sapiens
acagcctggagacag

SEQ ID NO: 374669 - DNA, 15 bp, Homo sapiens
gacagcctggagaca

SEQ ID NO: 374670 - DNA, 15 bp, Homo sapiens
cgacagcctggagac

SEQ ID NO: 374671 - DNA, 15 bp, Homo sapiens
acgacagcctggaga

SEQ ID NO: 374672 - DNA, 15 bp, Homo sapiens
tacgacagcctggag

SEQ ID NO: 374673 - DNA, 15 bp, Homo sapiens
gtacgacagcctgga

SEQ ID NO: 374674 - DNA, 15 bp, Homo sapiens
agtacgacagcctgg

SEQ ID NO: 374675 - DNA, 15 bp, Homo sapiens
cagtacgacagcctg

SEQ ID NO: 374676 - DNA, 15 bp, Homo sapiens
acagtacgacagcct

SEQ ID NO: 374677 - DNA, 15 bp, Homo sapiens
aacagtacgacagcc

SEQ ID NO: 374678 - DNA, 15 bp, Homo sapiens
caacagtacgacagc

SEQ ID NO: 374679 - DNA, 15 bp, Homo sapiens
acaacagtacgacag

SEQ ID NO: 374680 - DNA, 15 bp, Homo sapiens
aacaacagtacgaca

SEQ ID NO: 374681 - DNA, 15 bp, Homo sapiens
aaacaacagtacgac

SEQ ID NO: 374682 - DNA, 15 bp, Homo sapiens
aaaacaacagtacga

SEQ ID NO: 374683 - DNA, 15 bp, Homo sapiens
aaaaacaacagtacg

SEQ ID NO: 374684 - DNA, 15 bp, Homo sapiens
gaaaaacaacagtac

SEQ ID NO: 374685 - DNA, 15 bp, Homo sapiens
ggaaaaacaacagta

SEQ ID NO: 374686 - DNA, 15 bp, Homo sapiens
gggaaaaacaacagt

SEQ ID NO: 374687 - DNA, 15 bp, Homo sapiens
agggaaaaacaacag

SEQ ID NO: 374688 - DNA, 15 bp, Homo sapiens
gagggaaaaacaaca

SEQ ID NO: 374689 - DNA, 15 bp, Homo sapiens
agagggaaaaacaac

SEQ ID NO: 374690 - DNA, 15 bp, Homo sapiens
tagagggaaaaacaa

SEQ ID NO: 374691 - DNA, 15 bp, Homo sapiens
ttagagggaaaaaca

SEQ ID NO: 374692 - DNA, 15 bp, Homo sapiens
cttagagggaaaaac

SEQ ID NO: 374693 - DNA, 15 bp, Homo sapiens
acttagagggaaaaa

SEQ ID NO: 374694 - DNA, 15 bp, Homo sapiens
tacttagagggaaaa

SEQ ID NO: 374695 - DNA, 15 bp, Homo sapiens
gtacttagagggaaa

SEQ ID NO: 374696 - DNA, 15 bp, Homo sapiens
tgtacttagagggaa

SEQ ID NO: 374697 - DNA, 15 bp, Homo sapiens
ctgtacttagaggga

SEQ ID NO: 374698 - DNA, 15 bp, Homo sapiens
actgtacttagaggg

SEQ ID NO: 374699 - DNA, 15 bp, Homo sapiens
cactgtacttagagg

SEQ ID NO: 374700 - DNA, 15 bp, Homo sapiens
gcactgtacttagag

SEQ ID NO: 374701 - DNA, 15 bp, Homo sapiens
cgcactgtacttaga

SEQ ID NO: 374702 - DNA, 15 bp, Homo sapiens
ccgcactgtacttag

SEQ ID NO: 374703 - DNA, 15 bp, Homo sapiens
gccgcactgtactta

SEQ ID NO: 374704 - DNA, 15 bp, Homo sapiens
ggccgcactgtactt

SEQ ID NO: 374705 - DNA, 15 bp, Homo sapiens
gggccgcactgtact

SEQ ID NO: 374706 - DNA, 15 bp, Homo sapiens
agggccgcactgtac

SEQ ID NO: 374707 - DNA, 15 bp, Homo sapiens
cagggccgcactgta

SEQ ID NO: 374708 - DNA, 15 bp, Homo sapiens
ccagggccgcactgt

SEQ ID NO: 374709 - DNA, 15 bp, Homo sapiens
gccagggccgcactg

SEQ ID NO: 374710 - DNA, 15 bp, Homo sapiens
ggccagggccgcact

SEQ ID NO: 374711 - DNA, 15 bp, Homo sapiens
aggccagggccgcac

SEQ ID NO: 374712 - DNA, 15 bp, Homo sapiens
caggccagggccgca

SEQ ID NO: 374713 - DNA, 15 bp, Homo sapiens
ccaggccagggccgc

SEQ ID NO: 374714 - DNA, 15 bp, Homo sapiens
gccaggccagggccg

SEQ ID NO: 374715 - DNA, 15 bp, Homo sapiens
ggccaggccagggcc

SEQ ID NO: 374716 - DNA, 15 bp, Homo sapiens
tggccaggccagggc

SEQ ID NO: 374717 - DNA, 15 bp, Homo sapiens
ctggccaggccaggg

SEQ ID NO: 374718 - DNA, 15 bp, Homo sapiens
cctggccaggccagg

SEQ ID NO: 374719 - DNA, 15 bp, Homo sapiens
gcctggccaggccag

SEQ ID NO: 374720 - DNA, 15 bp, Homo sapiens
ggcctggccaggcca

SEQ ID NO: 374721 - DNA, 15 bp, Homo sapiens
gggcctggccaggcc

SEQ ID NO: 374722 - DNA, 15 bp, Homo sapiens
agggcctggccaggc

SEQ ID NO: 374723 - DNA, 15 bp, Homo sapiens
cagggcctggccagg

SEQ ID NO: 374724 - DNA, 15 bp, Homo sapiens
ccagggcctggccag

SEQ ID NO: 374725 - DNA, 15 bp, Homo sapiens
accagggcctggcca

SEQ ID NO: 374726 - DNA, 15 bp, Homo sapiens
taccagggcctggcc

SEQ ID NO: 374727 - DNA, 15 bp, Homo sapiens
ataccagggcctggc

SEQ ID NO: 374728 - DNA, 15 bp, Homo sapiens
aataccagggcctgg

SEQ ID NO: 374729 - DNA, 15 bp, Homo sapiens
caataccagggcctg

SEQ ID NO: 374730 - DNA, 15 bp, Homo sapiens
ccaataccagggcct

SEQ ID NO: 374731 - DNA, 15 bp, Homo sapiens
cccaataccagggcc

SEQ ID NO: 374732 - DNA, 15 bp, Homo sapiens
acccaataccagggc

SEQ ID NO: 374733 - DNA, 15 bp, Homo sapiens
aacccaataccaggg

SEQ ID NO: 374734 - DNA, 15 bp, Homo sapiens
caacccaataccagg

SEQ ID NO: 374735 - DNA, 15 bp, Homo sapiens
acaacccaataccag

SEQ ID NO: 374736 - DNA, 15 bp, Homo sapiens
tacaacccaatacca

SEQ ID NO: 374737 - DNA, 15 bp, Homo sapiens
ttacaacccaatacc

SEQ ID NO: 374738 - DNA, 15 bp, Homo sapiens
tttacaacccaatac

SEQ ID NO: 374739 - DNA, 15 bp, Homo sapiens
ctttacaacccaata

SEQ ID NO: 374740 - DNA, 15 bp, Homo sapiens
actttacaacccaat

SEQ ID NO: 374741 - DNA, 15 bp, Homo sapiens
cactttacaacccaa

SEQ ID NO: 374742 - DNA, 15 bp, Homo sapiens
tcactttacaaccca

SEQ ID NO: 374743 - DNA, 15 bp, Homo sapiens
ctcactttacaaccc

SEQ ID NO: 374744 - DNA, 15 bp, Homo sapiens
tctcactttacaacc

SEQ ID NO: 374745 - DNA, 15 bp, Homo sapiens
ctctcactttacaac

SEQ ID NO: 374746 - DNA, 15 bp, Homo sapiens
tctctcactttacaa

SEQ ID NO: 374747 - DNA, 15 bp, Homo sapiens
atctctcactttaca

SEQ ID NO: 374748 - DNA, 15 bp, Homo sapiens
catctctcactttac

SEQ ID NO: 374749 - DNA, 15 bp, Homo sapiens
ccatctctcacttta

SEQ ID NO: 374750 - DNA, 15 bp, Homo sapiens
tccatctctcacttt

SEQ ID NO: 374751 - DNA, 15 bp, Homo sapiens
ttccatctctcactt

SEQ ID NO: 374752 - DNA, 15 bp, Homo sapiens
attccatctctcact

SEQ ID NO: 374753 - DNA, 15 bp, Homo sapiens
cattccatctctcac

SEQ ID NO: 374754 - DNA, 15 bp, Homo sapiens
tcattccatctctca

SEQ ID NO: 374755 - DNA, 15 bp, Homo sapiens
ctcattccatctctc

SEQ ID NO: 374756 - DNA, 15 bp, Homo sapiens
cctcattccatctct

SEQ ID NO: 374757 - DNA, 15 bp, Homo sapiens
ccctcattccatctc

SEQ ID NO: 374758 - DNA, 15 bp, Homo sapiens
gccctcattccatct

SEQ ID NO: 374759 - DNA, 15 bp, Homo sapiens
agccctcattccatc

SEQ ID NO: 374760 - DNA, 15 bp, Homo sapiens
cagccctcattccat

SEQ ID NO: 374761 - DNA, 15 bp, Homo sapiens
ccagccctcattcca

SEQ ID NO: 374762 - DNA, 15 bp, Homo sapiens
cccagccctcattcc

SEQ ID NO: 374763 - DNA, 15 bp, Homo sapiens
tcccagccctcattc

SEQ ID NO: 374764 - DNA, 15 bp, Homo sapiens
ctcccagccctcatt

SEQ ID NO: 374765 - DNA, 15 bp, Homo sapiens
actcccagccctcat

SEQ ID NO: 374766 - DNA, 15 bp, Homo sapiens
cactcccagccctca

SEQ ID NO: 374767 - DNA, 15 bp, Homo sapiens
gcactcccagccctc

SEQ ID NO: 374768 - DNA, 15 bp, Homo sapiens
tgcactcccagccct

SEQ ID NO: 374769 - DNA, 15 bp, Homo sapiens
gtgcactcccagccc

SEQ ID NO: 374770 - DNA, 15 bp, Homo sapiens
cgtgcactcccagcc

SEQ ID NO: 374771 - DNA, 15 bp, Homo sapiens
ccgtgcactcccagc

SEQ ID NO: 374772 - DNA, 15 bp, Homo sapiens
cccgtgcactcccag

SEQ ID NO: 374773 - DNA, 15 bp, Homo sapiens
ccccgtgcactccca

SEQ ID NO: 374774 - DNA, 15 bp, Homo sapiens
tccccgtgcactccc

SEQ ID NO: 374775 - DNA, 15 bp, Homo sapiens
ctccccgtgcactcc

SEQ ID NO: 374776 - DNA, 15 bp, Homo sapiens
cctccccgtgcactc

SEQ ID NO: 374777 - DNA, 15 bp, Homo sapiens
ccctccccgtgcact

SEQ ID NO: 374778 - DNA, 15 bp, Homo sapiens
cccctccccgtgcac

SEQ ID NO: 374779 - DNA, 15 bp, Homo sapiens
ccccctccccgtgca

SEQ ID NO: 374780 - DNA, 15 bp, Homo sapiens
cccccctccccgtgc

SEQ ID NO: 374781 - DNA, 15 bp, Homo sapiens
gcccccctccccgtg

SEQ ID NO: 374782 - DNA, 15 bp, Homo sapiens
ggcccccctccccgt

SEQ ID NO: 374783 - DNA, 15 bp, Homo sapiens
tggcccccctccccg

SEQ ID NO: 374784 - DNA, 15 bp, Homo sapiens
ctggcccccctcccc

SEQ ID NO: 374785 - DNA, 15 bp, Homo sapiens
cctggcccccctccc

SEQ ID NO: 374786 - DNA, 15 bp, Homo sapiens
ccctggcccccctcc

SEQ ID NO: 374787 - DNA, 15 bp, Homo sapiens
tccctggcccccctc

SEQ ID NO: 374788 - DNA, 15 bp, Homo sapiens
ctccctggcccccct

SEQ ID NO: 374789 - DNA, 15 bp, Homo sapiens
cctccctggcccccc

SEQ ID NO: 374790 - DNA, 15 bp, Homo sapiens
ccctccctggccccc

SEQ ID NO: 374791 - DNA, 15 bp, Homo sapiens
tccctccctggcccc

SEQ ID NO: 374792 - DNA, 15 bp, Homo sapiens
ctccctccctggccc

SEQ ID NO: 374793 - DNA, 15 bp, Homo sapiens
gctccctccctggcc

SEQ ID NO: 374794 - DNA, 15 bp, Homo sapiens
agctccctccctggc

SEQ ID NO: 374795 - DNA, 15 bp, Homo sapiens
gagctccctccctgg

SEQ ID NO: 374796 - DNA, 15 bp, Homo sapiens
cgagctccctccctg

SEQ ID NO: 374797 - DNA, 15 bp, Homo sapiens
gcgagctccctccct

SEQ ID NO: 374798 - DNA, 15 bp, Homo sapiens
tgcgagctccctccc

SEQ ID NO: 374799 - DNA, 15 bp, Homo sapiens
ctgcgagctccctcc

SEQ ID NO: 374800 - DNA, 15 bp, Homo sapiens
cctgcgagctccctc

SEQ ID NO: 374801 - DNA, 15 bp, Homo sapiens
tcctgcgagctccct

SEQ ID NO: 374802 - DNA, 15 bp, Homo sapiens
ctcctgcgagctccc

SEQ ID NO: 374803 - DNA, 15 bp, Homo sapiens
tctcctgcgagctcc

SEQ ID NO: 374804 - DNA, 15 bp, Homo sapiens
ttctcctgcgagctc

SEQ ID NO: 374805 - DNA, 15 bp, Homo sapiens
cttctcctgcgagct

SEQ ID NO: 374806 - DNA, 15 bp, Homo sapiens
tcttctcctgcgagc

SEQ ID NO: 374807 - DNA, 15 bp, Homo sapiens
ttcttctcctgcgag

SEQ ID NO: 374808 - DNA, 15 bp, Homo sapiens
cttcttctcctgcga

SEQ ID NO: 374809 - DNA, 15 bp, Homo sapiens
ccttcttctcctgcg

SEQ ID NO: 374810 - DNA, 15 bp, Homo sapiens
tccttcttctcctgc

SEQ ID NO: 374811 - DNA, 15 bp, Homo sapiens
ctccttcttctcctg

SEQ ID NO: 374812 - DNA, 15 bp, Homo sapiens
gctccttcttctcct

SEQ ID NO: 374813 - DNA, 15 bp, Homo sapiens
agctccttcttctcc

SEQ ID NO: 374814 - DNA, 15 bp, Homo sapiens
aagctccttcttctc

SEQ ID NO: 374815 - DNA, 15 bp, Homo sapiens
aaagctccttcttct

SEQ ID NO: 374816 - DNA, 15 bp, Homo sapiens
aaaagctccttcttc

SEQ ID NO: 374817 - DNA, 15 bp, Homo sapiens
gaaaagctccttctt

SEQ ID NO: 374818 - DNA, 15 bp, Homo sapiens
ggaaaagctccttct

SEQ ID NO: 374819 - DNA, 15 bp, Homo sapiens
tggaaaagctccttc

SEQ ID NO: 374820 - DNA, 15 bp, Homo sapiens
atggaaaagctcctt

SEQ ID NO: 374821 - DNA, 15 bp, Homo sapiens
gatggaaaagctcct

SEQ ID NO: 374822 - DNA, 15 bp, Homo sapiens
cgatggaaaagctcc

SEQ ID NO: 374823 - DNA, 15 bp, Homo sapiens
ccgatggaaaagctc

SEQ ID NO: 374824 - DNA, 15 bp, Homo sapiens
tccgatggaaaagct

SEQ ID NO: 374825 - DNA, 15 bp, Homo sapiens
atccgatggaaaagc

SEQ ID NO: 374826 - DNA, 15 bp, Homo sapiens
gatccgatggaaaag

SEQ ID NO: 374827 - DNA, 15 bp, Homo sapiens
ggatccgatggaaaa

SEQ ID NO: 374828 - DNA, 15 bp, Homo sapiens
aggatccgatggaaa

SEQ ID NO: 374829 - DNA, 15 bp, Homo sapiens
caggatccgatggaa

SEQ ID NO: 374830 - DNA, 15 bp, Homo sapiens
gcaggatccgatgga

SEQ ID NO: 374831 - DNA, 15 bp, Homo sapiens
tgcaggatccgatgg

SEQ ID NO: 374832 - DNA, 15 bp, Homo sapiens
atgcaggatccgatg

SEQ ID NO: 374833 - DNA, 15 bp, Homo sapiens
aatgcaggatccgat

SEQ ID NO: 374834 - DNA, 15 bp, Homo sapiens
caatgcaggatccga

SEQ ID NO: 374835 - DNA, 15 bp, Homo sapiens
ccaatgcaggatccg

SEQ ID NO: 374836 - DNA, 15 bp, Homo sapiens
tccaatgcaggatcc

SEQ ID NO: 374837 - DNA, 15 bp, Homo sapiens
ttccaatgcaggatc

SEQ ID NO: 374838 - DNA, 15 bp, Homo sapiens
attccaatgcaggat

SEQ ID NO: 374839 - DNA, 15 bp, Homo sapiens
aattccaatgcagga

SEQ ID NO: 374840 - DNA, 15 bp, Homo sapiens
aaattccaatgcagg

SEQ ID NO: 374841 - DNA, 15 bp, Homo sapiens
taaattccaatgcag

SEQ ID NO: 374842 - DNA, 15 bp, Homo sapiens
ataaattccaatgca

SEQ ID NO: 374843 - DNA, 15 bp, Homo sapiens
aataaattccaatgc

SEQ ID NO: 374844 - DNA, 15 bp, Homo sapiens
caataaattccaatg

SEQ ID NO: 374845 - DNA, 15 bp, Homo sapiens
ccaataaattccaat

SEQ ID NO: 374846 - DNA, 15 bp, Homo sapiens
gccaataaattccaa

SEQ ID NO: 374847 - DNA, 15 bp, Homo sapiens
ggccaataaattcca

SEQ ID NO: 374848 - DNA, 15 bp, Homo sapiens
cggccaataaattcc

SEQ ID NO: 374849 - DNA, 15 bp, Homo sapiens
ccggccaataaattc

SEQ ID NO: 374850 - DNA, 15 bp, Homo sapiens
tccggccaataaatt

SEQ ID NO: 374851 - DNA, 15 bp, Homo sapiens
ttccggccaataaat

SEQ ID NO: 374852 - DNA, 15 bp, Homo sapiens
attccggccaataaa

SEQ ID NO: 374853 - DNA, 15 bp, Homo sapiens
cattccggccaataa

SEQ ID NO: 374854 - DNA, 15 bp, Homo sapiens
gcattccggccaata

SEQ ID NO: 374855 - DNA, 15 bp, Homo sapiens
tgcattccggccaat

SEQ ID NO: 374856 - DNA, 15 bp, Homo sapiens
ctgcattccggccaa

SEQ ID NO: 374857 - DNA, 15 bp, Homo sapiens
actgcattccggcca

SEQ ID NO: 374858 - DNA, 15 bp, Homo sapiens
tactgcattccggcc

SEQ ID NO: 374859 - DNA, 15 bp, Homo sapiens
ttactgcattccggc

SEQ ID NO: 374860 - DNA, 15 bp, Homo sapiens
tttactgcattccgg

SEQ ID NO: 374861 - DNA, 15 bp, Homo sapiens
atttactgcattccg

SEQ ID NO: 374862 - DNA, 15 bp, Homo sapiens
catttactgcattcc

SEQ ID NO: 374863 - DNA, 15 bp, Homo sapiens
acatttactgcattc

SEQ ID NO: 374864 - DNA, 15 bp, Homo sapiens
aacatttactgcatt

SEQ ID NO: 374865 - DNA, 15 bp, Homo sapiens
gaacatttactgcat

SEQ ID NO: 374866 - DNA, 15 bp, Homo sapiens
tgaacatttactgca

SEQ ID NO: 374867 - DNA, 15 bp, Homo sapiens
ttgaacatttactgc

SEQ ID NO: 374868 - DNA, 15 bp, Homo sapiens
tttgaacatttactg

SEQ ID NO: 374869 - DNA, 15 bp, Homo sapiens
ttttgaacatttact

SEQ ID NO: 374870 - DNA, 15 bp, Homo sapiens
attttgaacatttac

SEQ ID NO: 374871 - DNA, 15 bp, Homo sapiens
cattttgaacattta

SEQ ID NO: 374872 - DNA, 15 bp, Homo sapiens
gcattttgaacattt

SEQ ID NO: 374873 - DNA, 15 bp, Homo sapiens
ggcattttgaacatt

SEQ ID NO: 374874 - DNA, 15 bp, Homo sapiens
tggcattttgaacat

SEQ ID NO: 374875 - DNA, 15 bp, Homo sapiens
atggcattttgaaca

SEQ ID NO: 374876 - DNA, 15 bp, Homo sapiens
gatggcattttgaac

SEQ ID NO: 374877 - DNA, 15 bp, Homo sapiens
ggatggcattttgaa

SEQ ID NO: 374878 - DNA, 15 bp, Homo sapiens
gggatggcattttga

SEQ ID NO: 374879 - DNA, 15 bp, Homo sapiens
tgggatggcattttg

SEQ ID NO: 374880 - DNA, 15 bp, Homo sapiens
atgggatggcatttt

SEQ ID NO: 374881 - DNA, 15 bp, Homo sapiens
gatgggatggcattt

SEQ ID NO: 374882 - DNA, 15 bp, Homo sapiens
ggatgggatggcatt

SEQ ID NO: 374883 - DNA, 15 bp, Homo sapiens
tggatgggatggcat

SEQ ID NO: 374884 - DNA, 15 bp, Homo sapiens
ttggatgggatggca

SEQ ID NO: 374885 - DNA, 15 bp, Homo sapiens
gttggatgggatggc

SEQ ID NO: 374886 - DNA, 15 bp, Homo sapiens
tgttggatgggatgg

SEQ ID NO: 374887 - DNA, 15 bp, Homo sapiens
ctgttggatgggatg

SEQ ID NO: 374888 - DNA, 15 bp, Homo sapiens
actgttggatgggat

SEQ ID NO: 374889 - DNA, 15 bp, Homo sapiens
aactgttggatggga

SEQ ID NO: 374890 - DNA, 15 bp, Homo sapiens
aaactgttggatggg

SEQ ID NO: 374891 - DNA, 15 bp, Homo sapiens
aaaactgttggatgg

SEQ ID NO: 374892 - DNA, 15 bp, Homo sapiens
gaaaactgttggatg

SEQ ID NO: 374893 - DNA, 15 bp, Homo sapiens
tgaaaactgttggat

SEQ ID NO: 374894 - DNA, 15 bp, Homo sapiens
atgaaaactgttgga

SEQ ID NO: 374895 - DNA, 15 bp, Homo sapiens
tatgaaaactgttgg

SEQ ID NO: 374896 - DNA, 15 bp, Homo sapiens
ttatgaaaactgttg

SEQ ID NO: 374897 - DNA, 15 bp, Homo sapiens
attatgaaaactgtt

SEQ ID NO: 374898 - DNA, 15 bp, Homo sapiens
aattatgaaaactgt

SEQ ID NO: 374899 - DNA, 15 bp, Homo sapiens
caattatgaaaactg

SEQ ID NO: 374900 - DNA, 15 bp, Homo sapiens
acaattatgaaaact

SEQ ID NO: 374901 - DNA, 15 bp, Homo sapiens
aacaattatgaaaac

SEQ ID NO: 374902 - DNA, 15 bp, Homo sapiens
taacaattatgaaaa

SEQ ID NO: 374903 - DNA, 15 bp, Homo sapiens
ataacaattatgaaa

SEQ ID NO: 374904 - DNA, 15 bp, Homo sapiens
cataacaattatgaa

SEQ ID NO: 374905 - DNA, 15 bp, Homo sapiens
ccataacaattatga

SEQ ID NO: 374906 - DNA, 15 bp, Homo sapiens
tccataacaattatg

SEQ ID NO: 374907 - DNA, 15 bp, Homo sapiens
ttccataacaattat

SEQ ID NO: 374908 - DNA, 15 bp, Homo sapiens
gttccataacaatta

SEQ ID NO: 374909 - DNA, 15 bp, Homo sapiens
tgttccataacaatt

SEQ ID NO: 374910 - DNA, 15 bp, Homo sapiens
ttgttccataacaat

SEQ ID NO: 374911 - DNA, 15 bp, Homo sapiens
cttgttccataacaa

SEQ ID NO: 374912 - DNA, 15 bp, Homo sapiens
ccttgttccataaca

SEQ ID NO: 374913 - DNA, 15 bp, Homo sapiens
cccttgttccataac

SEQ ID NO: 374914 - DNA, 15 bp, Homo sapiens
ccccttgttccataa

SEQ ID NO: 374915 - DNA, 15 bp, Homo sapiens
tccccttgttccata

SEQ ID NO: 374916 - DNA, 15 bp, Homo sapiens
ctccccttgttccat

SEQ ID NO: 374917 - DNA, 15 bp, Homo sapiens
gctccccttgttcca

SEQ ID NO: 374918 - DNA, 15 bp, Homo sapiens
ggctccccttgttcc

SEQ ID NO: 374919 - DNA, 15 bp, Homo sapiens
cggctccccttgttc

SEQ ID NO: 374920 - DNA, 15 bp, Homo sapiens
ccggctccccttgtt

SEQ ID NO: 374921 - DNA, 15 bp, Homo sapiens
cccggctccccttgt

SEQ ID NO: 374922 - DNA, 15 bp, Homo sapiens
ccccggctccccttg

SEQ ID NO: 374923 - DNA, 15 bp, Homo sapiens
cccccggctcccctt

SEQ ID NO: 374924 - DNA, 15 bp, Homo sapiens
tcccccggctcccct

SEQ ID NO: 374925 - DNA, 15 bp, Homo sapiens
ctcccccggctcccc

SEQ ID NO: 374926 - DNA, 15 bp, Homo sapiens
cctcccccggctccc

SEQ ID NO: 374927 - DNA, 15 bp, Homo sapiens
ccctcccccggctcc

SEQ ID NO: 374928 - DNA, 15 bp, Homo sapiens
cccctcccccggctc

SEQ ID NO: 374929 - DNA, 15 bp, Homo sapiens
tcccctcccccggct

SEQ ID NO: 374930 - DNA, 15 bp, Homo sapiens
ctcccctcccccggc

SEQ ID NO: 374931 - DNA, 15 bp, Homo sapiens
cctcccctcccccgg

SEQ ID NO: 374932 - DNA, 15 bp, Homo sapiens
tcctcccctcccccg

SEQ ID NO: 374933 - DNA, 15 bp, Homo sapiens
ttcctcccctccccc

SEQ ID NO: 374934 - DNA, 15 bp, Homo sapiens
attcctcccctcccc

SEQ ID NO: 374935 - DNA, 15 bp, Homo sapiens
cattcctcccctccc

SEQ ID NO: 374936 - DNA, 15 bp, Homo sapiens
tcattcctcccctcc

SEQ ID NO: 374937 - DNA, 15 bp, Homo sapiens
ttcattcctcccctc

SEQ ID NO: 374938 - DNA, 15 bp, Homo sapiens
tttcattcctcccct

SEQ ID NO: 374939 - DNA, 15 bp, Homo sapiens
ttttcattcctcccc

SEQ ID NO: 374940 - DNA, 15 bp, Homo sapiens
cttttcattcctccc

SEQ ID NO: 374941 - DNA, 15 bp, Homo sapiens
ccttttcattcctcc

SEQ ID NO: 374942 - DNA, 15 bp, Homo sapiens
tccttttcattcctc

SEQ ID NO: 374943 - DNA, 15 bp, Homo sapiens
gtccttttcattcct

SEQ ID NO: 374944 - DNA, 15 bp, Homo sapiens
agtccttttcattcc

SEQ ID NO: 374945 - DNA, 15 bp, Homo sapiens
aagtccttttcattc

SEQ ID NO: 374946 - DNA, 15 bp, Homo sapiens
aaagtccttttcatt

SEQ ID NO: 374947 - DNA, 15 bp, Homo sapiens
aaaagtccttttcat

SEQ ID NO: 374948 - DNA, 15 bp, Homo sapiens
caaaagtccttttca

SEQ ID NO: 374949 - DNA, 15 bp, Homo sapiens
acaaaagtccttttc

SEQ ID NO: 374950 - DNA, 15 bp, Homo sapiens
aacaaaagtcctttt

SEQ ID NO: 374951 - DNA, 15 bp, Homo sapiens
aaacaaaagtccttt

SEQ ID NO: 374952 - DNA, 15 bp, Homo sapiens
gaaacaaaagtcctt

SEQ ID NO: 374953 - DNA, 15 bp, Homo sapiens
agaaacaaaagtcct

SEQ ID NO: 374954 - DNA, 15 bp, Homo sapiens
gagaaacaaaagtcc

SEQ ID NO: 374955 - DNA, 15 bp, Homo sapiens
tgagaaacaaaagtc

SEQ ID NO: 374956 - DNA, 15 bp, Homo sapiens
gtgagaaacaaaagt

SEQ ID NO: 374957 - DNA, 15 bp, Homo sapiens
agtgagaaacaaaag

SEQ ID NO: 374958 - DNA, 15 bp, Homo sapiens
cagtgagaaacaaaa

SEQ ID NO: 374959 - DNA, 15 bp, Homo sapiens
acagtgagaaacaaa

SEQ ID NO: 374960 - DNA, 15 bp, Homo sapiens
tacagtgagaaacaa

SEQ ID NO: 374961 - DNA, 15 bp, Homo sapiens
atacagtgagaaaca

SEQ ID NO: 374962 - DNA, 15 bp, Homo sapiens
aatacagtgagaaac

SEQ ID NO: 374963 - DNA, 15 bp, Homo sapiens
aaatacagtgagaaa

SEQ ID NO: 374964 - DNA, 15 bp, Homo sapiens
aaaatacagtgagaa

SEQ ID NO: 374965 - DNA, 15 bp, Homo sapiens
aaaaatacagtgaga

SEQ ID NO: 374966 - DNA, 15 bp, Homo sapiens
gaaaaatacagtgag

SEQ ID NO: 374967 - DNA, 15 bp, Homo sapiens
ggaaaaatacagtga

SEQ ID NO: 374968 - DNA, 15 bp, Homo sapiens
tggaaaaatacagtg

SEQ ID NO: 374969 - DNA, 15 bp, Homo sapiens
atggaaaaatacagt

SEQ ID NO: 374970 - DNA, 15 bp, Homo sapiens
catggaaaaatacag

SEQ ID NO: 374971 - DNA, 15 bp, Homo sapiens
acatggaaaaataca

SEQ ID NO: 374972 - DNA, 15 bp, Homo sapiens
gacatggaaaaatac

SEQ ID NO: 374973 - DNA, 15 bp, Homo sapiens
agacatggaaaaata

SEQ ID NO: 374974 - DNA, 15 bp, Homo sapiens
aagacatggaaaaat

SEQ ID NO: 374975 - DNA, 15 bp, Homo sapiens
gaagacatggaaaaa

SEQ ID NO: 374976 - DNA, 15 bp, Homo sapiens
cgaagacatggaaaa

SEQ ID NO: 374977 - DNA, 15 bp, Homo sapiens
ccgaagacatggaaa

SEQ ID NO: 374978 - DNA, 15 bp, Homo sapiens
tccgaagacatggaa

SEQ ID NO: 374979 - DNA, 15 bp, Homo sapiens
gtccgaagacatgga

SEQ ID NO: 374980 - DNA, 15 bp, Homo sapiens
tgtccgaagacatgg

SEQ ID NO: 374981 - DNA, 15 bp, Homo sapiens
ctgtccgaagacatg

SEQ ID NO: 374982 - DNA, 15 bp, Homo sapiens
actgtccgaagacat

SEQ ID NO: 374983 - DNA, 15 bp, Homo sapiens
aactgtccgaagaca

SEQ ID NO: 374984 - DNA, 15 bp, Homo sapiens
aaactgtccgaagac

SEQ ID NO: 374985 - DNA, 15 bp, Homo sapiens
aaaactgtccgaaga

SEQ ID NO: 374986 - DNA, 15 bp, Homo sapiens
gaaaactgtccgaag

SEQ ID NO: 374987 - DNA, 15 bp, Homo sapiens
ggaaaactgtccgaa

SEQ ID NO: 374988 - DNA, 15 bp, Homo sapiens
aggaaaactgtccga

SEQ ID NO: 374989 - DNA, 15 bp, Homo sapiens
taggaaaactgtccg

SEQ ID NO: 374990 - DNA, 15 bp, Homo sapiens
gtaggaaaactgtcc

SEQ ID NO: 374991 - DNA, 15 bp, Homo sapiens
ggtaggaaaactgtc

SEQ ID NO: 374992 - DNA, 15 bp, Homo sapiens
gggtaggaaaactgt

SEQ ID NO: 374993 - DNA, 15 bp, Homo sapiens
agggtaggaaaactg

SEQ ID NO: 374994 - DNA, 15 bp, Homo sapiens
gagggtaggaaaact

SEQ ID NO: 374995 - DNA, 15 bp, Homo sapiens
agagggtaggaaaac

SEQ ID NO: 374996 - DNA, 15 bp, Homo sapiens
tagagggtaggaaaa

SEQ ID NO: 374997 - DNA, 15 bp, Homo sapiens
ctagagggtaggaaa

SEQ ID NO: 374998 - DNA, 15 bp, Homo sapiens
tctagagggtaggaa

SEQ ID NO: 374999 - DNA, 15 bp, Homo sapiens
ttctagagggtagga

SEQ ID NO: 375000 - DNA, 15 bp, Homo sapiens
tttctagagggtagg

SEQ ID NO: 375001 - DNA, 15 bp, Homo sapiens
gtttctagagggtag

SEQ ID NO: 375002 - DNA, 15 bp, Homo sapiens
agtttctagagggta

SEQ ID NO: 375003 - DNA, 15 bp, Homo sapiens
cagtttctagagggt

SEQ ID NO: 375004 - DNA, 15 bp, Homo sapiens
ccagtttctagaggg

SEQ ID NO: 375005 - DNA, 15 bp, Homo sapiens
tccagtttctagagg

SEQ ID NO: 375006 - DNA, 15 bp, Homo sapiens
ctccagtttctagag

SEQ ID NO: 375007 - DNA, 15 bp, Homo sapiens
actccagtttctaga

SEQ ID NO: 375008 - DNA, 15 bp, Homo sapiens
cactccagtttctag

SEQ ID NO: 375009 - DNA, 15 bp, Homo sapiens
ccactccagtttcta

SEQ ID NO: 375010 - DNA, 15 bp, Homo sapiens
tccactccagtttct

SEQ ID NO: 375011 - DNA, 15 bp, Homo sapiens
ctccactccagtttc

SEQ ID NO: 375012 - DNA, 15 bp, Homo sapiens
actccactccagttt

SEQ ID NO: 375013 - DNA, 15 bp, Homo sapiens
aactccactccagtt

SEQ ID NO: 375014 - DNA, 15 bp, Homo sapiens
caactccactccagt

SEQ ID NO: 375015 - DNA, 15 bp, Homo sapiens
ccaactccactccag

SEQ ID NO: 375016 - DNA, 15 bp, Homo sapiens
tccaactccactcca

SEQ ID NO: 375017 - DNA, 15 bp, Homo sapiens
atccaactccactcc

SEQ ID NO: 375018 - DNA, 15 bp, Homo sapiens
gatccaactccactc

SEQ ID NO: 375019 - DNA, 15 bp, Homo sapiens
agatccaactccact

SEQ ID NO: 375020 - DNA, 15 bp, Homo sapiens
cagatccaactccac

SEQ ID NO: 375021 - DNA, 15 bp, Homo sapiens
acagatccaactcca

SEQ ID NO: 375022 - DNA, 15 bp, Homo sapiens
cacagatccaactcc

SEQ ID NO: 375023 - DNA, 15 bp, Homo sapiens
ccacagatccaactc

SEQ ID NO: 375024 - DNA, 15 bp, Homo sapiens
cccacagatccaact

SEQ ID NO: 375025 - DNA, 15 bp, Homo sapiens
ccccacagatccaac

SEQ ID NO: 375026 - DNA, 15 bp, Homo sapiens
cccccacagatccaa

SEQ ID NO: 375027 - DNA, 15 bp, Homo sapiens
tcccccacagatcca

SEQ ID NO: 375028 - DNA, 15 bp, Homo sapiens
atcccccacagatcc

SEQ ID NO: 375029 - DNA, 15 bp, Homo sapiens
tatcccccacagatc

SEQ ID NO: 375030 - DNA, 15 bp, Homo sapiens
ctatcccccacagat

SEQ ID NO: 375031 - DNA, 15 bp, Homo sapiens
cctatcccccacaga

SEQ ID NO: 375032 - DNA, 15 bp, Homo sapiens
ccctatcccccacag

SEQ ID NO: 375033 - DNA, 15 bp, Homo sapiens
accctatcccccaca

SEQ ID NO: 375034 - DNA, 15 bp, Homo sapiens
caccctatcccccac

SEQ ID NO: 375035 - DNA, 15 bp, Homo sapiens
ccaccctatccccca

SEQ ID NO: 375036 - DNA, 15 bp, Homo sapiens
cccaccctatccccc

SEQ ID NO: 375037 - DNA, 15 bp, Homo sapiens
tcccaccctatcccc

SEQ ID NO: 375038 - DNA, 15 bp, Homo sapiens
ctcccaccctatccc

SEQ ID NO: 375039 - DNA, 15 bp, Homo sapiens
tctcccaccctatcc

SEQ ID NO: 375040 - DNA, 15 bp, Homo sapiens
ttctcccaccctatc

SEQ ID NO: 375041 - DNA, 15 bp, Homo sapiens
cttctcccaccctat

SEQ ID NO: 375042 - DNA, 15 bp, Homo sapiens
ccttctcccacccta

SEQ ID NO: 375043 - DNA, 15 bp, Homo sapiens
cccttctcccaccct

SEQ ID NO: 375044 - DNA, 15 bp, Homo sapiens
acccttctcccaccc

SEQ ID NO: 375045 - DNA, 15 bp, Homo sapiens
gacccttctcccacc

SEQ ID NO: 375046 - DNA, 15 bp, Homo sapiens
agacccttctcccac

SEQ ID NO: 375047 - DNA, 15 bp, Homo sapiens
cagacccttctccca

SEQ ID NO: 375048 - DNA, 15 bp, Homo sapiens
gcagacccttctccc

SEQ ID NO: 375049 - DNA, 15 bp, Homo sapiens
ggcagacccttctcc

SEQ ID NO: 375050 - DNA, 15 bp, Homo sapiens
aggcagacccttctc

SEQ ID NO: 375051 - DNA, 15 bp, Homo sapiens
aaggcagacccttct

SEQ ID NO: 375052 - DNA, 15 bp, Homo sapiens
aaaggcagacccttc

SEQ ID NO: 375053 - DNA, 15 bp, Homo sapiens
caaaggcagaccctt

SEQ ID NO: 375054 - DNA, 15 bp, Homo sapiens
ccaaaggcagaccct

SEQ ID NO: 375055 - DNA, 15 bp, Homo sapiens
cccaaaggcagaccc

SEQ ID NO: 375056 - DNA, 15 bp, Homo sapiens
acccaaaggcagacc

SEQ ID NO: 375057 - DNA, 15 bp, Homo sapiens
gacccaaaggcagac

SEQ ID NO: 375058 - DNA, 15 bp, Homo sapiens
ggacccaaaggcaga

SEQ ID NO: 375059 - DNA, 15 bp, Homo sapiens
aggacccaaaggcag

SEQ ID NO: 375060 - DNA, 15 bp, Homo sapiens
caggacccaaaggca

SEQ ID NO: 375061 - DNA, 15 bp, Homo sapiens
acaggacccaaaggc

SEQ ID NO: 375062 - DNA, 15 bp, Homo sapiens
cacaggacccaaagg

SEQ ID NO: 375063 - DNA, 15 bp, Homo sapiens
tcacaggacccaaag

SEQ ID NO: 375064 - DNA, 15 bp, Homo sapiens
atcacaggacccaaa

SEQ ID NO: 375065 - DNA, 15 bp, Homo sapiens
catcacaggacccaa

SEQ ID NO: 375066 - DNA, 15 bp, Homo sapiens
gcatcacaggaccca

SEQ ID NO: 375067 - DNA, 15 bp, Homo sapiens
ggcatcacaggaccc

SEQ ID NO: 375068 - DNA, 15 bp, Homo sapiens
aggcatcacaggacc

SEQ ID NO: 375069 - DNA, 15 bp, Homo sapiens
aaggcatcacaggac

SEQ ID NO: 375070 - DNA, 15 bp, Homo sapiens
gaaggcatcacagga

SEQ ID NO: 375071 - DNA, 15 bp, Homo sapiens
ggaaggcatcacagg

SEQ ID NO: 375072 - DNA, 15 bp, Homo sapiens
tggaaggcatcacag

SEQ ID NO: 375073 - DNA, 15 bp, Homo sapiens
ttggaaggcatcaca

SEQ ID NO: 375074 - DNA, 15 bp, Homo sapiens
cttggaaggcatcac

SEQ ID NO: 375075 - DNA, 15 bp, Homo sapiens
ccttggaaggcatca

SEQ ID NO: 375076 - DNA, 15 bp, Homo sapiens
tccttggaaggcatc

SEQ ID NO: 375077 - DNA, 15 bp, Homo sapiens
gtccttggaaggcat

SEQ ID NO: 375078 - DNA, 15 bp, Homo sapiens
agtccttggaaggca

SEQ ID NO: 375079 - DNA, 15 bp, Homo sapiens
tagtccttggaaggc

SEQ ID NO: 375080 - DNA, 15 bp, Homo sapiens
ctagtccttggaagg

SEQ ID NO: 375081 - DNA, 15 bp, Homo sapiens
cctagtccttggaag

SEQ ID NO: 375082 - DNA, 15 bp, Homo sapiens
ccctagtccttggaa

SEQ ID NO: 375083 - DNA, 15 bp, Homo sapiens
cccctagtccttgga

SEQ ID NO: 375084 - DNA, 15 bp, Homo sapiens
acccctagtccttgg

SEQ ID NO: 375085 - DNA, 15 bp, Homo sapiens
gacccctagtccttg

SEQ ID NO: 375086 - DNA, 15 bp, Homo sapiens
ggacccctagtcctt

SEQ ID NO: 375087 - DNA, 15 bp, Homo sapiens
aggacccctagtcct

SEQ ID NO: 375088 - DNA, 15 bp, Homo sapiens
caggacccctagtcc

SEQ ID NO: 375089 - DNA, 15 bp, Homo sapiens
ccaggacccctagtc

SEQ ID NO: 375090 - DNA, 15 bp, Homo sapiens
accaggacccctagt

SEQ ID NO: 375091 - DNA, 15 bp, Homo sapiens
taccaggacccctag

SEQ ID NO: 375092 - DNA, 15 bp, Homo sapiens
ctaccaggaccccta

SEQ ID NO: 375093 - DNA, 15 bp, Homo sapiens
gctaccaggacccct

SEQ ID NO: 375094 - DNA, 15 bp, Homo sapiens
ggctaccaggacccc

SEQ ID NO: 375095 - DNA, 15 bp, Homo sapiens
aggctaccaggaccc

SEQ ID NO: 375096 - DNA, 15 bp, Homo sapiens
caggctaccaggacc

SEQ ID NO: 375097 - DNA, 15 bp, Homo sapiens
ccaggctaccaggac

SEQ ID NO: 375098 - DNA, 15 bp, Homo sapiens
cccaggctaccagga

SEQ ID NO: 375099 - DNA, 15 bp, Homo sapiens
ccccaggctaccagg

SEQ ID NO: 375100 - DNA, 15 bp, Homo sapiens
gccccaggctaccag

SEQ ID NO: 375101 - DNA, 15 bp, Homo sapiens
agccccaggctacca

SEQ ID NO: 375102 - DNA, 15 bp, Homo sapiens
aagccccaggctacc

SEQ ID NO: 375103 - DNA, 15 bp, Homo sapiens
aaagccccaggctac

SEQ ID NO: 375104 - DNA, 15 bp, Homo sapiens
taaagccccaggcta

SEQ ID NO: 375105 - DNA, 15 bp, Homo sapiens
ataaagccccaggct

SEQ ID NO: 375106 - DNA, 15 bp, Homo sapiens
aataaagccccaggc

SEQ ID NO: 375107 - DNA, 15 bp, Homo sapiens
taataaagccccagg

SEQ ID NO: 375108 - DNA, 15 bp, Homo sapiens
ttaataaagccccag

SEQ ID NO: 375109 - DNA, 15 bp, Homo sapiens
tttaataaagcccca

SEQ ID NO: 375110 - DNA, 15 bp, Homo sapiens
ttttaataaagcccc

SEQ ID NO: 375111 - DNA, 15 bp, Homo sapiens
gttttaataaagccc

SEQ ID NO: 375112 - DNA, 15 bp, Homo sapiens
cgttttaataaagcc

SEQ ID NO: 375113 - DNA, 15 bp, Homo sapiens
tcgttttaataaagc

SEQ ID NO: 375114 - DNA, 15 bp, Homo sapiens
ctcgttttaataaag

SEQ ID NO: 375115 - DNA, 15 bp, Homo sapiens
cctcgttttaataaa

SEQ ID NO: 375116 - DNA, 15 bp, Homo sapiens
gcctcgttttaataa

SEQ ID NO: 375117 - DNA, 15 bp, Homo sapiens
ggcctcgttttaata

SEQ ID NO: 375118 - DNA, 15 bp, Homo sapiens
gggcctcgttttaat

SEQ ID NO: 375119 - DNA, 15 bp, Homo sapiens
tgggcctcgttttaa

SEQ ID NO: 375120 - DNA, 15 bp, Homo sapiens
gtgggcctcgtttta

SEQ ID NO: 375121 - DNA, 15 bp, Homo sapiens
tgtgggcctcgtttt

SEQ ID NO: 375122 - DNA, 15 bp, Homo sapiens
ctgtgggcctcgttt

SEQ ID NO: 375123 - DNA, 15 bp, Homo sapiens
gctgtgggcctcgtt

SEQ ID NO: 375124 - DNA, 15 bp, Homo sapiens
tgctgtgggcctcgt

SEQ ID NO: 375125 - DNA, 15 bp, Homo sapiens
ttgctgtgggcctcg

SEQ ID NO: 375126 - DNA, 15 bp, Homo sapiens
tttgctgtgggcctc

SEQ ID NO: 375127 - DNA, 15 bp, Homo sapiens
ttttgctgtgggcct

SEQ ID NO: 375128 - DNA, 15 bp, Homo sapiens
cttttgctgtgggcc

SEQ ID NO: 375129 - DNA, 15 bp, Homo sapiens
acttttgctgtgggc

SEQ ID NO: 375130 - DNA, 15 bp, Homo sapiens
tacttttgctgtggg

SEQ ID NO: 375131 - DNA, 15 bp, Homo sapiens
ctacttttgctgtgg

SEQ ID NO: 375132 - DNA, 15 bp, Homo sapiens
gctacttttgctgtg

SEQ ID NO: 375133 - DNA, 15 bp, Homo sapiens
agctacttttgctgt

SEQ ID NO: 375134 - DNA, 15 bp, Homo sapiens
aagctacttttgctg

SEQ ID NO: 375135 - DNA, 15 bp, Homo sapiens
caagctacttttgct

SEQ ID NO: 375136 - DNA, 15 bp, Homo sapiens
ccaagctacttttgc

SEQ ID NO: 375137 - DNA, 15 bp, Homo sapiens
accaagctacttttg

SEQ ID NO: 375138 - DNA, 15 bp, Homo sapiens
aaccaagctactttt

SEQ ID NO: 375139 - DNA, 15 bp, Homo sapiens
aaaccaagctacttt

SEQ ID NO: 375140 - DNA, 15 bp, Homo sapiens
gaaaccaagctactt

SEQ ID NO: 375141 - DNA, 15 bp, Homo sapiens
agaaaccaagctact

SEQ ID NO: 375142 - DNA, 15 bp, Homo sapiens
aagaaaccaagctac

SEQ ID NO: 375143 - DNA, 15 bp, Homo sapiens
caagaaaccaagcta

SEQ ID NO: 375144 - DNA, 15 bp, Homo sapiens
gcaagaaaccaagct

SEQ ID NO: 375145 - DNA, 15 bp, Homo sapiens
tgcaagaaaccaagc

SEQ ID NO: 375146 - DNA, 15 bp, Homo sapiens
gtgcaagaaaccaag

SEQ ID NO: 375147 - DNA, 15 bp, Homo sapiens
tgtgcaagaaaccaa

SEQ ID NO: 375148 - DNA, 15 bp, Homo sapiens
gtgtgcaagaaacca

SEQ ID NO: 375149 - DNA, 15 bp, Homo sapiens
tgtgtgcaagaaacc

SEQ ID NO: 375150 - DNA, 15 bp, Homo sapiens
gtgtgtgcaagaaac

SEQ ID NO: 375151 - DNA, 15 bp, Homo sapiens
tgtgtgtgcaagaaa

SEQ ID NO: 375152 - DNA, 15 bp, Homo sapiens
ctgtgtgtgcaagaa

SEQ ID NO: 375153 - DNA, 15 bp, Homo sapiens
tctgtgtgtgcaaga

SEQ ID NO: 375154 - DNA, 15 bp, Homo sapiens
ctctgtgtgtgcaag

SEQ ID NO: 375155 - DNA, 15 bp, Homo sapiens
gctctgtgtgtgcaa

SEQ ID NO: 375156 - DNA, 15 bp, Homo sapiens
ggctctgtgtgtgca

SEQ ID NO: 375157 - DNA, 15 bp, Homo sapiens
gggctctgtgtgtgc

SEQ ID NO: 375158 - DNA, 15 bp, Homo sapiens
ggggctctgtgtgtg

SEQ ID NO: 375159 - DNA, 15 bp, Homo sapiens
gggggctctgtgtgt

SEQ ID NO: 375160 - DNA, 15 bp, Homo sapiens
ggggggctctgtgtg

SEQ ID NO: 375161 - DNA, 15 bp, Homo sapiens
gggggggctctgtgt

SEQ ID NO: 375162 - DNA, 15 bp, Homo sapiens
tgggggggctctgtg

SEQ ID NO: 375163 - DNA, 15 bp, Homo sapiens
gtgggggggctctgt

SEQ ID NO: 375164 - DNA, 15 bp, Homo sapiens
ggtgggggggctctg

SEQ ID NO: 375165 - DNA, 15 bp, Homo sapiens
tggtgggggggctct

SEQ ID NO: 375166 - DNA, 15 bp, Homo sapiens
gtggtgggggggctc

SEQ ID NO: 375167 - DNA, 15 bp, Homo sapiens
ggtggtgggggggct

SEQ ID NO: 375168 - DNA, 15 bp, Homo sapiens
aggtggtgggggggc

SEQ ID NO: 375169 - DNA, 15 bp, Homo sapiens
caggtggtggggggg

SEQ ID NO: 375170 - DNA, 15 bp, Homo sapiens
gcaggtggtgggggg

SEQ ID NO: 375171 - DNA, 15 bp, Homo sapiens
tgcaggtggtggggg

SEQ ID NO: 375172 - DNA, 15 bp, Homo sapiens
ttgcaggtggtgggg

SEQ ID NO: 375173 - DNA, 15 bp, Homo sapiens
tttgcaggtggtggg

SEQ ID NO: 375174 - DNA, 15 bp, Homo sapiens
ttttgcaggtggtgg

SEQ ID NO: 375175 - DNA, 15 bp, Homo sapiens
gttttgcaggtggtg

SEQ ID NO: 375176 - DNA, 15 bp, Homo sapiens
ggttttgcaggtggt

SEQ ID NO: 375177 - DNA, 15 bp, Homo sapiens
tggttttgcaggtgg

SEQ ID NO: 375178 - DNA, 15 bp, Homo sapiens
ctggttttgcaggtg

SEQ ID NO: 375179 - DNA, 15 bp, Homo sapiens
cctggttttgcaggt

SEQ ID NO: 375180 - DNA, 15 bp, Homo sapiens
ccctggttttgcagg

SEQ ID NO: 375181 - DNA, 15 bp, Homo sapiens
tccctggttttgcag

SEQ ID NO: 375182 - DNA, 15 bp, Homo sapiens
ttccctggttttgca

SEQ ID NO: 375183 - DNA, 15 bp, Homo sapiens
tttccctggttttgc

SEQ ID NO: 375184 - DNA, 15 bp, Homo sapiens
ttttccctggttttg

SEQ ID NO: 375185 - DNA, 15 bp, Homo sapiens
tttttccctggtttt

SEQ ID NO: 375186 - DNA, 15 bp, Homo sapiens
gtttttccctggttt

SEQ ID NO: 375187 - DNA, 15 bp, Homo sapiens
agtttttccctggtt

SEQ ID NO: 375188 - DNA, 15 bp, Homo sapiens
cagtttttccctggt

SEQ ID NO: 375189 - DNA, 15 bp, Homo sapiens
acagtttttccctgg

SEQ ID NO: 375190 - DNA, 15 bp, Homo sapiens
gacagtttttccctg

SEQ ID NO: 375191 - DNA, 15 bp, Homo sapiens
ggacagtttttccct

SEQ ID NO: 375192 - DNA, 15 bp, Homo sapiens
aggacagtttttccc

SEQ ID NO: 375193 - DNA, 15 bp, Homo sapiens
caggacagtttttcc

SEQ ID NO: 375194 - DNA, 15 bp, Homo sapiens
acaggacagtttttc

SEQ ID NO: 375195 - DNA, 15 bp, Homo sapiens
gacaggacagttttt

SEQ ID NO: 375196 - DNA, 15 bp, Homo sapiens
ggacaggacagtttt

SEQ ID NO: 375197 - DNA, 15 bp, Homo sapiens
aggacaggacagttt

SEQ ID NO: 375198 - DNA, 15 bp, Homo sapiens
aaggacaggacagtt

SEQ ID NO: 375199 - DNA, 15 bp, Homo sapiens
gaaggacaggacagt

SEQ ID NO: 375200 - DNA, 15 bp, Homo sapiens
agaaggacaggacag

SEQ ID NO: 375201 - DNA, 15 bp, Homo sapiens
tagaaggacaggaca

SEQ ID NO: 375202 - DNA, 15 bp, Homo sapiens
ctagaaggacaggac

SEQ ID NO: 375203 - DNA, 15 bp, Homo sapiens
cctagaaggacagga

SEQ ID NO: 375204 - DNA, 15 bp, Homo sapiens
ccctagaaggacagg

SEQ ID NO: 375205 - DNA, 15 bp, Homo sapiens
cccctagaaggacag

SEQ ID NO: 375206 - DNA, 15 bp, Homo sapiens
acccctagaaggaca

SEQ ID NO: 375207 - DNA, 15 bp, Homo sapiens
aacccctagaaggac

SEQ ID NO: 375208 - DNA, 15 bp, Homo sapiens
aaacccctagaagga

SEQ ID NO: 375209 - DNA, 15 bp, Homo sapiens
aaaacccctagaagg

SEQ ID NO: 375210 - DNA, 15 bp, Homo sapiens
caaaacccctagaag

SEQ ID NO: 375211 - DNA, 15 bp, Homo sapiens
acaaaacccctagaa

SEQ ID NO: 375212 - DNA, 15 bp, Homo sapiens
gacaaaacccctaga

SEQ ID NO: 375213 - DNA, 15 bp, Homo sapiens
ggacaaaacccctag

SEQ ID NO: 375214 - DNA, 15 bp, Homo sapiens
aggacaaaaccccta

SEQ ID NO: 375215 - DNA, 15 bp, Homo sapiens
aaggacaaaacccct

SEQ ID NO: 375216 - DNA, 15 bp, Homo sapiens
aaaggacaaaacccc

SEQ ID NO: 375217 - DNA, 15 bp, Homo sapiens
aaaaggacaaaaccc

SEQ ID NO: 375218 - DNA, 15 bp, Homo sapiens
caaaaggacaaaacc

SEQ ID NO: 375219 - DNA, 15 bp, Homo sapiens
ccaaaaggacaaaac

SEQ ID NO: 375220 - DNA, 15 bp, Homo sapiens
tccaaaaggacaaaa

SEQ ID NO: 375221 - DNA, 15 bp, Homo sapiens
ttccaaaaggacaaa

SEQ ID NO: 375222 - DNA, 15 bp, Homo sapiens
tttccaaaaggacaa

SEQ ID NO: 375223 - DNA, 15 bp, Homo sapiens
ttttccaaaaggaca

SEQ ID NO: 375224 - DNA, 15 bp, Homo sapiens
attttccaaaaggac

SEQ ID NO: 375225 - DNA, 15 bp, Homo sapiens
aattttccaaaagga

SEQ ID NO: 375226 - DNA, 15 bp, Homo sapiens
caattttccaaaagg

SEQ ID NO: 375227 - DNA, 15 bp, Homo sapiens
ccaattttccaaaag

SEQ ID NO: 375228 - DNA, 15 bp, Homo sapiens
gccaattttccaaaa

SEQ ID NO: 375229 - DNA, 15 bp, Homo sapiens
agccaattttccaaa

SEQ ID NO: 375230 - DNA, 15 bp, Homo sapiens
aagccaattttccaa

SEQ ID NO: 375231 - DNA, 15 bp, Homo sapiens
taagccaattttcca

SEQ ID NO: 375232 - DNA, 15 bp, Homo sapiens
ttaagccaattttcc

SEQ ID NO: 375233 - DNA, 15 bp, Homo sapiens
attaagccaattttc

SEQ ID NO: 375234 - DNA, 15 bp, Homo sapiens
cattaagccaatttt

SEQ ID NO: 375235 - DNA, 15 bp, Homo sapiens
tcattaagccaattt

SEQ ID NO: 375236 - DNA, 15 bp, Homo sapiens
atcattaagccaatt

SEQ ID NO: 375237 - DNA, 15 bp, Homo sapiens
catcattaagccaat

SEQ ID NO: 375238 - DNA, 15 bp, Homo sapiens
gcatcattaagccaa

SEQ ID NO: 375239 - DNA, 15 bp, Homo sapiens
tgcatcattaagcca

SEQ ID NO: 375240 - DNA, 15 bp, Homo sapiens
ctgcatcattaagcc

SEQ ID NO: 375241 - DNA, 15 bp, Homo sapiens
actgcatcattaagc

SEQ ID NO: 375242 - DNA, 15 bp, Homo sapiens
cactgcatcattaag

SEQ ID NO: 375243 - DNA, 15 bp, Homo sapiens
ccactgcatcattaa

SEQ ID NO: 375244 - DNA, 15 bp, Homo sapiens
accactgcatcatta

SEQ ID NO: 375245 - DNA, 15 bp, Homo sapiens
aaccactgcatcatt

SEQ ID NO: 375246 - DNA, 15 bp, Homo sapiens
aaaccactgcatcat

SEQ ID NO: 375247 - DNA, 15 bp, Homo sapiens
caaaccactgcatca

SEQ ID NO: 375248 - DNA, 15 bp, Homo sapiens
acaaaccactgcatc

SEQ ID NO: 375249 - DNA, 15 bp, Homo sapiens
tacaaaccactgcat

SEQ ID NO: 375250 - DNA, 15 bp, Homo sapiens
atacaaaccactgca

SEQ ID NO: 375251 - DNA, 15 bp, Homo sapiens
aatacaaaccactgc

SEQ ID NO: 375252 - DNA, 15 bp, Homo sapiens
taatacaaaccactg

SEQ ID NO: 375253 - DNA, 15 bp, Homo sapiens
ttaatacaaaccact

SEQ ID NO: 375254 - DNA, 15 bp, Homo sapiens
cttaatacaaaccac

SEQ ID NO: 375255 - DNA, 15 bp, Homo sapiens
tcttaatacaaacca

SEQ ID NO: 375256 - DNA, 15 bp, Homo sapiens
atcttaatacaaacc

SEQ ID NO: 375257 - DNA, 15 bp, Homo sapiens
aatcttaatacaaac

SEQ ID NO: 375258 - DNA, 15 bp, Homo sapiens
aaatcttaatacaaa

SEQ ID NO: 375259 - DNA, 15 bp, Homo sapiens
aaaatcttaatacaa

SEQ ID NO: 375260 - DNA, 15 bp, Homo sapiens
gaaaatcttaataca

SEQ ID NO: 375261 - DNA, 15 bp, Homo sapiens
tgaaaatcttaatac

SEQ ID NO: 375262 - DNA, 15 bp, Homo sapiens
atgaaaatcttaata

SEQ ID NO: 375263 - DNA, 15 bp, Homo sapiens
catgaaaatcttaat

SEQ ID NO: 375264 - DNA, 15 bp, Homo sapiens
tcatgaaaatcttaa

SEQ ID NO: 375265 - DNA, 15 bp, Homo sapiens
atcatgaaaatctta

SEQ ID NO: 375266 - DNA, 15 bp, Homo sapiens
catcatgaaaatctt

SEQ ID NO: 375267 - DNA, 15 bp, Homo sapiens
gcatcatgaaaatct

SEQ ID NO: 375268 - DNA, 15 bp, Homo sapiens
agcatcatgaaaatc

SEQ ID NO: 375269 - DNA, 15 bp, Homo sapiens
aagcatcatgaaaat

SEQ ID NO: 375270 - DNA, 15 bp, Homo sapiens
aaagcatcatgaaaa

SEQ ID NO: 375271 - DNA, 15 bp, Homo sapiens
taaagcatcatgaaa

SEQ ID NO: 375272 - DNA, 15 bp, Homo sapiens
ttaaagcatcatgaa

SEQ ID NO: 375273 - DNA, 15 bp, Homo sapiens
gttaaagcatcatga

SEQ ID NO: 375274 - DNA, 15 bp, Homo sapiens
cgttaaagcatcatg

SEQ ID NO: 375275 - DNA, 15 bp, Homo sapiens
acgttaaagcatcat

SEQ ID NO: 375276 - DNA, 15 bp, Homo sapiens
cacgttaaagcatca

SEQ ID NO: 375277 - DNA, 15 bp, Homo sapiens
acacgttaaagcatc

SEQ ID NO: 375278 - DNA, 15 bp, Homo sapiens
cacacgttaaagcat

SEQ ID NO: 375279 - DNA, 15 bp, Homo sapiens
acacacgttaaagca

SEQ ID NO: 375280 - DNA, 15 bp, Homo sapiens
cacacacgttaaagc

SEQ ID NO: 375281 - DNA, 15 bp, Homo sapiens
acacacacgttaaag

SEQ ID NO: 375282 - DNA, 15 bp, Homo sapiens
cacacacacgttaaa

SEQ ID NO: 375283 - DNA, 15 bp, Homo sapiens
acacacacacgttaa

SEQ ID NO: 375284 - DNA, 15 bp, Homo sapiens
cacacacacacgtta

SEQ ID NO: 375285 - DNA, 15 bp, Homo sapiens
acacacacacacgtt

SEQ ID NO: 375286 - DNA, 15 bp, Homo sapiens
cacacacacacacgt

SEQ ID NO: 375287 - DNA, 15 bp, Homo sapiens
tcacacacacacaca

SEQ ID NO: 375288 - DNA, 15 bp, Homo sapiens
ctcacacacacacac

SEQ ID NO: 375289 - DNA, 15 bp, Homo sapiens
actcacacacacaca

SEQ ID NO: 375290 - DNA, 15 bp, Homo sapiens
cactcacacacacac

SEQ ID NO: 375291 - DNA, 15 bp, Homo sapiens
tcactcacacacaca

SEQ ID NO: 375292 - DNA, 15 bp, Homo sapiens
ctcactcacacacac

SEQ ID NO: 375293 - DNA, 15 bp, Homo sapiens
tctcactcacacaca

SEQ ID NO: 375294 - DNA, 15 bp, Homo sapiens
ctctcactcacacac

SEQ ID NO: 375295 - DNA, 15 bp, Homo sapiens
tctctcactcacaca

SEQ ID NO: 375296 - DNA, 15 bp, Homo sapiens
ctctctcactcacac

SEQ ID NO: 375297 - DNA, 15 bp, Homo sapiens
tctctctcactcaca

SEQ ID NO: 375298 - DNA, 15 bp, Homo sapiens
ctctctctcactcac

SEQ ID NO: 375299 - DNA, 15 bp, Homo sapiens
tctctctctcactca

SEQ ID NO: 375300 - DNA, 15 bp, Homo sapiens
ctctctctctcactc

SEQ ID NO: 375301 - DNA, 15 bp, Homo sapiens
tctctctctctcact

SEQ ID NO: 375302 - DNA, 15 bp, Homo sapiens
ctctctctctctcac

SEQ ID NO: 375303 - DNA, 15 bp, Homo sapiens
tctctctctctctca

SEQ ID NO: 375304 - DNA, 15 bp, Homo sapiens
ctctctctctctctc

SEQ ID NO: 375305 - DNA, 15 bp, Homo sapiens
tctctctctctctct

SEQ ID NO: 375306 - DNA, 15 bp, Homo sapiens
ttctctctctctctc

SEQ ID NO: 375307 - DNA, 15 bp, Homo sapiens
tttctctctctctct

SEQ ID NO: 375308 - DNA, 15 bp, Homo sapiens
ctttctctctctctc

SEQ ID NO: 375309 - DNA, 15 bp, Homo sapiens
tctttctctctctct

SEQ ID NO: 375310 - DNA, 15 bp, Homo sapiens
ctctttctctctctc

SEQ ID NO: 375311 - DNA, 15 bp, Homo sapiens
tctctttctctctct

SEQ ID NO: 375312 - DNA, 15 bp, Homo sapiens
ctctctttctctctc

SEQ ID NO: 375313 - DNA, 15 bp, Homo sapiens
tctctctttctctct

SEQ ID NO: 375314 - DNA, 15 bp, Homo sapiens
ttctctctttctctc

SEQ ID NO: 375315 - DNA, 15 bp, Homo sapiens
tttctctctttctct

SEQ ID NO: 375316 - DNA, 15 bp, Homo sapiens
ctttctctctttctc

SEQ ID NO: 375317 - DNA, 15 bp, Homo sapiens
tctttctctctttct

SEQ ID NO: 375318 - DNA, 15 bp, Homo sapiens
ctctttctctctttc

SEQ ID NO: 375319 - DNA, 15 bp, Homo sapiens
tctctttctctcttt

SEQ ID NO: 375320 - DNA, 15 bp, Homo sapiens
atctctttctctctt

SEQ ID NO: 375321 - DNA, 15 bp, Homo sapiens
aatctctttctctct

SEQ ID NO: 375322 - DNA, 15 bp, Homo sapiens
caatctctttctctc

SEQ ID NO: 375323 - DNA, 15 bp, Homo sapiens
tcaatctctttctct

SEQ ID NO: 375324 - DNA, 15 bp, Homo sapiens
ctcaatctctttctc

SEQ ID NO: 375325 - DNA, 15 bp, Homo sapiens
tctcaatctctttct

SEQ ID NO: 375326 - DNA, 15 bp, Homo sapiens
ctctcaatctctttc

SEQ ID NO: 375327 - DNA, 15 bp, Homo sapiens
tctctcaatctcttt

SEQ ID NO: 375328 - DNA, 15 bp, Homo sapiens
ctctctcaatctctt

SEQ ID NO: 375329 - DNA, 15 bp, Homo sapiens
tctctctcaatctct

SEQ ID NO: 375330 - DNA, 15 bp, Homo sapiens
ctctctctcaatctc

SEQ ID NO: 375331 - DNA, 15 bp, Homo sapiens
tctctctctcaatct

SEQ ID NO: 375332 - DNA, 15 bp, Homo sapiens
ctctctctctcaatc

SEQ ID NO: 375333 - DNA, 15 bp, Homo sapiens
tctctctctctcaat

SEQ ID NO: 375334 - DNA, 15 bp, Homo sapiens
ctctctctctctcaa

SEQ ID NO: 375335 - DNA, 15 bp, Homo sapiens
attctctctctctct

SEQ ID NO: 375336 - DNA, 15 bp, Homo sapiens
cattctctctctctc

SEQ ID NO: 375337 - DNA, 15 bp, Homo sapiens
tcattctctctctct

SEQ ID NO: 375338 - DNA, 15 bp, Homo sapiens
ttcattctctctctc

SEQ ID NO: 375339 - DNA, 15 bp, Homo sapiens
attcattctctctct

SEQ ID NO: 375340 - DNA, 15 bp, Homo sapiens
gattcattctctctc

SEQ ID NO: 375341 - DNA, 15 bp, Homo sapiens
tgattcattctctct

SEQ ID NO: 375342 - DNA, 15 bp, Homo sapiens
ctgattcattctctc

SEQ ID NO: 375343 - DNA, 15 bp, Homo sapiens
gctgattcattctct

SEQ ID NO: 375344 - DNA, 15 bp, Homo sapiens
tgctgattcattctc

SEQ ID NO: 375345 - DNA, 15 bp, Homo sapiens
atgctgattcattct

SEQ ID NO: 375346 - DNA, 15 bp, Homo sapiens
aatgctgattcattc

SEQ ID NO: 375347 - DNA, 15 bp, Homo sapiens
gaatgctgattcatt

SEQ ID NO: 375348 - DNA, 15 bp, Homo sapiens
tgaatgctgattcat

SEQ ID NO: 375349 - DNA, 15 bp, Homo sapiens
ctgaatgctgattca

SEQ ID NO: 375350 - DNA, 15 bp, Homo sapiens
actgaatgctgattc

SEQ ID NO: 375351 - DNA, 15 bp, Homo sapiens
cactgaatgctgatt

SEQ ID NO: 375352 - DNA, 15 bp, Homo sapiens
gcactgaatgctgat

SEQ ID NO: 375353 - DNA, 15 bp, Homo sapiens
ggcactgaatgctga

SEQ ID NO: 375354 - DNA, 15 bp, Homo sapiens
tggcactgaatgctg

SEQ ID NO: 375355 - DNA, 15 bp, Homo sapiens
ctggcactgaatgct

SEQ ID NO: 375356 - DNA, 15 bp, Homo sapiens
gctggcactgaatgc

SEQ ID NO: 375357 - DNA, 15 bp, Homo sapiens
agctggcactgaatg

SEQ ID NO: 375358 - DNA, 15 bp, Homo sapiens
cagctggcactgaat

SEQ ID NO: 375359 - DNA, 15 bp, Homo sapiens
gcagctggcactgaa

SEQ ID NO: 375360 - DNA, 15 bp, Homo sapiens
ggcagctggcactga

SEQ ID NO: 375361 - DNA, 15 bp, Homo sapiens
gggcagctggcactg

SEQ ID NO: 375362 - DNA, 15 bp, Homo sapiens
tgggcagctggcact

SEQ ID NO: 375363 - DNA, 15 bp, Homo sapiens
ctgggcagctggcac

SEQ ID NO: 375364 - DNA, 15 bp, Homo sapiens
actgggcagctggca

SEQ ID NO: 375365 - DNA, 15 bp, Homo sapiens
aactgggcagctggc

SEQ ID NO: 375366 - DNA, 15 bp, Homo sapiens
caactgggcagctgg

SEQ ID NO: 375367 - DNA, 15 bp, Homo sapiens
ccaactgggcagctg

SEQ ID NO: 375368 - DNA, 15 bp, Homo sapiens
cccaactgggcagct

SEQ ID NO: 375369 - DNA, 15 bp, Homo sapiens
tcccaactgggcagc

SEQ ID NO: 375370 - DNA, 15 bp, Homo sapiens
ttcccaactgggcag

SEQ ID NO: 375371 - DNA, 15 bp, Homo sapiens
attcccaactgggca

SEQ ID NO: 375372 - DNA, 15 bp, Homo sapiens
gattcccaactgggc

SEQ ID NO: 375373 - DNA, 15 bp, Homo sapiens
ggattcccaactggg

SEQ ID NO: 375374 - DNA, 15 bp, Homo sapiens
tggattcccaactgg

SEQ ID NO: 375375 - DNA, 15 bp, Homo sapiens
ctggattcccaactg

SEQ ID NO: 375376 - DNA, 15 bp, Homo sapiens
tctggattcccaact

SEQ ID NO: 375377 - DNA, 15 bp, Homo sapiens
atctggattcccaac

SEQ ID NO: 375378 - DNA, 15 bp, Homo sapiens
tatctggattcccaa

SEQ ID NO: 375379 - DNA, 15 bp, Homo sapiens
ctatctggattccca

SEQ ID NO: 375380 - DNA, 15 bp, Homo sapiens
cctatctggattccc

SEQ ID NO: 375381 - DNA, 15 bp, Homo sapiens
ccctatctggattcc

SEQ ID NO: 375382 - DNA, 15 bp, Homo sapiens
tccctatctggattc

SEQ ID NO: 375383 - DNA, 15 bp, Homo sapiens
ttccctatctggatt

SEQ ID NO: 375384 - DNA, 15 bp, Homo sapiens
attccctatctggat

SEQ ID NO: 375385 - DNA, 15 bp, Homo sapiens
aattccctatctgga

SEQ ID NO: 375386 - DNA, 15 bp, Homo sapiens
aaattccctatctgg

SEQ ID NO: 375387 - DNA, 15 bp, Homo sapiens
caaattccctatctg

SEQ ID NO: 375388 - DNA, 15 bp, Homo sapiens
ccaaattccctatct

SEQ ID NO: 375389 - DNA, 15 bp, Homo sapiens
cccaaattccctatc

SEQ ID NO: 375390 - DNA, 15 bp, Homo sapiens
ccccaaattccctat

SEQ ID NO: 375391 - DNA, 15 bp, Homo sapiens
tccccaaattcccta

SEQ ID NO: 375392 - DNA, 15 bp, Homo sapiens
ttccccaaattccct

SEQ ID NO: 375393 - DNA, 15 bp, Homo sapiens
attccccaaattccc

SEQ ID NO: 375394 - DNA, 15 bp, Homo sapiens
gattccccaaattcc

SEQ ID NO: 375395 - DNA, 15 bp, Homo sapiens
agattccccaaattc

SEQ ID NO: 375396 - DNA, 15 bp, Homo sapiens
gagattccccaaatt

SEQ ID NO: 375397 - DNA, 15 bp, Homo sapiens
ggagattccccaaat

SEQ ID NO: 375398 - DNA, 15 bp, Homo sapiens
aggagattccccaaa

SEQ ID NO: 375399 - DNA, 15 bp, Homo sapiens
taggagattccccaa

SEQ ID NO: 375400 - DNA, 15 bp, Homo sapiens
gtaggagattcccca

SEQ ID NO: 375401 - DNA, 15 bp, Homo sapiens
tgtaggagattcccc

SEQ ID NO: 375402 - DNA, 15 bp, Homo sapiens
gtgtaggagattccc

SEQ ID NO: 375403 - DNA, 15 bp, Homo sapiens
agtgtaggagattcc

SEQ ID NO: 375404 - DNA, 15 bp, Homo sapiens
gagtgtaggagattc

SEQ ID NO: 375405 - DNA, 15 bp, Homo sapiens
agagtgtaggagatt

SEQ ID NO: 375406 - DNA, 15 bp, Homo sapiens
gagagtgtaggagat

SEQ ID NO: 375407 - DNA, 15 bp, Homo sapiens
tgagagtgtaggaga

SEQ ID NO: 375408 - DNA, 15 bp, Homo sapiens
ctgagagtgtaggag

SEQ ID NO: 375409 - DNA, 15 bp, Homo sapiens
cctgagagtgtagga

SEQ ID NO: 375410 - DNA, 15 bp, Homo sapiens
ccctgagagtgtagg

SEQ ID NO: 375411 - DNA, 15 bp, Homo sapiens
accctgagagtgtag

SEQ ID NO: 375412 - DNA, 15 bp, Homo sapiens
caccctgagagtgta

SEQ ID NO: 375413 - DNA, 15 bp, Homo sapiens
ccaccctgagagtgt

SEQ ID NO: 375414 - DNA, 15 bp, Homo sapiens
gccaccctgagagtg

SEQ ID NO: 375415 - DNA, 15 bp, Homo sapiens
tgccaccctgagagt

SEQ ID NO: 375416 - DNA, 15 bp, Homo sapiens
ctgccaccctgagag

SEQ ID NO: 375417 - DNA, 15 bp, Homo sapiens
cctgccaccctgaga

SEQ ID NO: 375418 - DNA, 15 bp, Homo sapiens
acctgccaccctgag

SEQ ID NO: 375419 - DNA, 15 bp, Homo sapiens
cacctgccaccctga

SEQ ID NO: 375420 - DNA, 15 bp, Homo sapiens
ccacctgccaccctg

SEQ ID NO: 375421 - DNA, 15 bp, Homo sapiens
cccacctgccaccct

SEQ ID NO: 375422 - DNA, 15 bp, Homo sapiens
acccacctgccaccc

SEQ ID NO: 375423 - DNA, 15 bp, Homo sapiens
tacccacctgccacc

SEQ ID NO: 375424 - DNA, 15 bp, Homo sapiens
ctacccacctgccac

SEQ ID NO: 375425 - DNA, 15 bp, Homo sapiens
cctacccacctgcca

SEQ ID NO: 375426 - DNA, 15 bp, Homo sapiens
acctacccacctgcc

SEQ ID NO: 375427 - DNA, 15 bp, Homo sapiens
cacctacccacctgc

SEQ ID NO: 375428 - DNA, 15 bp, Homo sapiens
ccacctacccacctg

SEQ ID NO: 375429 - DNA, 15 bp, Homo sapiens
cccacctacccacct

SEQ ID NO: 375430 - DNA, 15 bp, Homo sapiens
acccacctacccacc

SEQ ID NO: 375431 - DNA, 15 bp, Homo sapiens
cacccacctacccac

SEQ ID NO: 375432 - DNA, 15 bp, Homo sapiens
tcacccacctaccca

SEQ ID NO: 375433 - DNA, 15 bp, Homo sapiens
ctcacccacctaccc

SEQ ID NO: 375434 - DNA, 15 bp, Homo sapiens
cctcacccacctacc

SEQ ID NO: 375435 - DNA, 15 bp, Homo sapiens
acctcacccacctac

SEQ ID NO: 375436 - DNA, 15 bp, Homo sapiens
tacctcacccaccta

SEQ ID NO: 375437 - DNA, 15 bp, Homo sapiens
ttacctcacccacct

SEQ ID NO: 375438 - DNA, 15 bp, Homo sapiens
cttacctcacccacc

SEQ ID NO: 375439 - DNA, 15 bp, Homo sapiens
tcttacctcacccac

SEQ ID NO: 375440 - DNA, 15 bp, Homo sapiens
ctcttacctcaccca

SEQ ID NO: 375441 - DNA, 15 bp, Homo sapiens
tctcttacctcaccc

SEQ ID NO: 375442 - DNA, 15 bp, Homo sapiens
gtctcttacctcacc

SEQ ID NO: 375443 - DNA, 15 bp, Homo sapiens
agtctcttacctcac

SEQ ID NO: 375444 - DNA, 15 bp, Homo sapiens
aagtctcttacctca

SEQ ID NO: 375445 - DNA, 15 bp, Homo sapiens
caagtctcttacctc

SEQ ID NO: 375446 - DNA, 15 bp, Homo sapiens
tcaagtctcttacct

SEQ ID NO: 375447 - DNA, 15 bp, Homo sapiens
gtcaagtctcttacc

SEQ ID NO: 375448 - DNA, 15 bp, Homo sapiens
agtcaagtctcttac

SEQ ID NO: 375449 - DNA, 15 bp, Homo sapiens
aagtcaagtctctta

SEQ ID NO: 375450 - DNA, 15 bp, Homo sapiens
caagtcaagtctctt

SEQ ID NO: 375451 - DNA, 15 bp, Homo sapiens
ccaagtcaagtctct

SEQ ID NO: 375452 - DNA, 15 bp, Homo sapiens
accaagtcaagtctc

SEQ ID NO: 375453 - DNA, 15 bp, Homo sapiens
taccaagtcaagtct

SEQ ID NO: 375454 - DNA, 15 bp, Homo sapiens
ctaccaagtcaagtc

SEQ ID NO: 375455 - DNA, 15 bp, Homo sapiens
actaccaagtcaagt

SEQ ID NO: 375456 - DNA, 15 bp, Homo sapiens
aactaccaagtcaag

SEQ ID NO: 375457 - DNA, 15 bp, Homo sapiens
aaactaccaagtcaa

SEQ ID NO: 375458 - DNA, 15 bp, Homo sapiens
gaaactaccaagtca

SEQ ID NO: 375459 - DNA, 15 bp, Homo sapiens
agaaactaccaagtc

SEQ ID NO: 375460 - DNA, 15 bp, Homo sapiens
gagaaactaccaagt

SEQ ID NO: 375461 - DNA, 15 bp, Homo sapiens
agagaaactaccaag

SEQ ID NO: 375462 - DNA, 15 bp, Homo sapiens
aagagaaactaccaa

SEQ ID NO: 375463 - DNA, 15 bp, Homo sapiens
caagagaaactacca

SEQ ID NO: 375464 - DNA, 15 bp, Homo sapiens
ccaagagaaactacc

SEQ ID NO: 375465 - DNA, 15 bp, Homo sapiens
tccaagagaaactac

SEQ ID NO: 375466 - DNA, 15 bp, Homo sapiens
gtccaagagaaacta

SEQ ID NO: 375467 - DNA, 15 bp, Homo sapiens
tgtccaagagaaact

SEQ ID NO: 375468 - DNA, 15 bp, Homo sapiens
gtgtccaagagaaac

SEQ ID NO: 375469 - DNA, 15 bp, Homo sapiens
cgtgtccaagagaaa

SEQ ID NO: 375470 - DNA, 15 bp, Homo sapiens
tcgtgtccaagagaa

SEQ ID NO: 375471 - DNA, 15 bp, Homo sapiens
gtcgtgtccaagaga

SEQ ID NO: 375472 - DNA, 15 bp, Homo sapiens
tgtcgtgtccaagag

SEQ ID NO: 375473 - DNA, 15 bp, Homo sapiens
ctgtcgtgtccaaga

SEQ ID NO: 375474 - DNA, 15 bp, Homo sapiens
tctgtcgtgtccaag

SEQ ID NO: 375475 - DNA, 15 bp, Homo sapiens
gtctgtcgtgtccaa

SEQ ID NO: 375476 - DNA, 15 bp, Homo sapiens
agtctgtcgtgtcca

SEQ ID NO: 375477 - DNA, 15 bp, Homo sapiens
aagtctgtcgtgtcc

SEQ ID NO: 375478 - DNA, 15 bp, Homo sapiens
aaagtctgtcgtgtc

SEQ ID NO: 375479 - DNA, 15 bp, Homo sapiens
gaaagtctgtcgtgt

SEQ ID NO: 375480 - DNA, 15 bp, Homo sapiens
agaaagtctgtcgtg

SEQ ID NO: 375481 - DNA, 15 bp, Homo sapiens
cagaaagtctgtcgt

SEQ ID NO: 375482 - DNA, 15 bp, Homo sapiens
acagaaagtctgtcg

SEQ ID NO: 375483 - DNA, 15 bp, Homo sapiens
aacagaaagtctgtc

SEQ ID NO: 375484 - DNA, 15 bp, Homo sapiens
gaacagaaagtctgt

SEQ ID NO: 375485 - DNA, 15 bp, Homo sapiens
ggaacagaaagtctg

SEQ ID NO: 375486 - DNA, 15 bp, Homo sapiens
tggaacagaaagtct

SEQ ID NO: 375487 - DNA, 15 bp, Homo sapiens
atggaacagaaagtc

SEQ ID NO: 375488 - DNA, 15 bp, Homo sapiens
catggaacagaaagt

SEQ ID NO: 375489 - DNA, 15 bp, Homo sapiens
gcatggaacagaaag

SEQ ID NO: 375490 - DNA, 15 bp, Homo sapiens
agcatggaacagaaa

SEQ ID NO: 375491 - DNA, 15 bp, Homo sapiens
aagcatggaacagaa

SEQ ID NO: 375492 - DNA, 15 bp, Homo sapiens
caagcatggaacaga

SEQ ID NO: 375493 - DNA, 15 bp, Homo sapiens
acaagcatggaacag

SEQ ID NO: 375494 - DNA, 15 bp, Homo sapiens
gacaagcatggaaca

SEQ ID NO: 375495 - DNA, 15 bp, Homo sapiens
ggacaagcatggaac

SEQ ID NO: 375496 - DNA, 15 bp, Homo sapiens
gggacaagcatggaa

SEQ ID NO: 375497 - DNA, 15 bp, Homo sapiens
tgggacaagcatgga

SEQ ID NO: 375498 - DNA, 15 bp, Homo sapiens
ctgggacaagcatgg

SEQ ID NO: 375499 - DNA, 15 bp, Homo sapiens
gctgggacaagcatg

SEQ ID NO: 375500 - DNA, 15 bp, Homo sapiens
ggctgggacaagcat

SEQ ID NO: 375501 - DNA, 15 bp, Homo sapiens
gggctgggacaagca

SEQ ID NO: 375502 - DNA, 15 bp, Homo sapiens
agggctgggacaagc

SEQ ID NO: 375503 - DNA, 15 bp, Homo sapiens
aagggctgggacaag

SEQ ID NO: 375504 - DNA, 15 bp, Homo sapiens
caagggctgggacaa

SEQ ID NO: 375505 - DNA, 15 bp, Homo sapiens
acaagggctgggaca

SEQ ID NO: 375506 - DNA, 15 bp, Homo sapiens
cacaagggctgggac

SEQ ID NO: 375507 - DNA, 15 bp, Homo sapiens
acacaagggctggga

SEQ ID NO: 375508 - DNA, 15 bp, Homo sapiens
gacacaagggctggg

SEQ ID NO: 375509 - DNA, 15 bp, Homo sapiens
agacacaagggctgg

SEQ ID NO: 375510 - DNA, 15 bp, Homo sapiens
aagacacaagggctg

SEQ ID NO: 375511 - DNA, 15 bp, Homo sapiens
gaagacacaagggct

SEQ ID NO: 375512 - DNA, 15 bp, Homo sapiens
ggaagacacaagggc

SEQ ID NO: 375513 - DNA, 15 bp, Homo sapiens
aggaagacacaaggg

SEQ ID NO: 375514 - DNA, 15 bp, Homo sapiens
caggaagacacaagg

SEQ ID NO: 375515 - DNA, 15 bp, Homo sapiens
ccaggaagacacaag

SEQ ID NO: 375516 - DNA, 15 bp, Homo sapiens
cccaggaagacacaa

SEQ ID NO: 375517 - DNA, 15 bp, Homo sapiens
ccccaggaagacaca

SEQ ID NO: 375518 - DNA, 15 bp, Homo sapiens
cccccaggaagacac

SEQ ID NO: 375519 - DNA, 15 bp, Homo sapiens
acccccaggaagaca

SEQ ID NO: 375520 - DNA, 15 bp, Homo sapiens
cacccccaggaagac

SEQ ID NO: 375521 - DNA, 15 bp, Homo sapiens
gcacccccaggaaga

SEQ ID NO: 375522 - DNA, 15 bp, Homo sapiens
ggcacccccaggaag

SEQ ID NO: 375523 - DNA, 15 bp, Homo sapiens
tggcacccccaggaa

SEQ ID NO: 375524 - DNA, 15 bp, Homo sapiens
ctggcacccccagga

SEQ ID NO: 375525 - DNA, 15 bp, Homo sapiens
cctggcacccccagg

SEQ ID NO: 375526 - DNA, 15 bp, Homo sapiens
ccctggcacccccag

SEQ ID NO: 375527 - DNA, 15 bp, Homo sapiens
accctggcaccccca

SEQ ID NO: 375528 - DNA, 15 bp, Homo sapiens
gaccctggcaccccc

SEQ ID NO: 375529 - DNA, 15 bp, Homo sapiens
tgaccctggcacccc

SEQ ID NO: 375530 - DNA, 15 bp, Homo sapiens
atgaccctggcaccc

SEQ ID NO: 375531 - DNA, 15 bp, Homo sapiens
catgaccctggcacc

SEQ ID NO: 375532 - DNA, 15 bp, Homo sapiens
gcatgaccctggcac

SEQ ID NO: 375533 - DNA, 15 bp, Homo sapiens
ggcatgaccctggca

SEQ ID NO: 375534 - DNA, 15 bp, Homo sapiens
gggcatgaccctggc

SEQ ID NO: 375535 - DNA, 15 bp, Homo sapiens
tgggcatgaccctgg

SEQ ID NO: 375536 - DNA, 15 bp, Homo sapiens
ctgggcatgaccctg

SEQ ID NO: 375537 - DNA, 15 bp, Homo sapiens
tctgggcatgaccct

SEQ ID NO: 375538 - DNA, 15 bp, Homo sapiens
ctctgggcatgaccc

SEQ ID NO: 375539 - DNA, 15 bp, Homo sapiens
cctctgggcatgacc

SEQ ID NO: 375540 - DNA, 15 bp, Homo sapiens
ccctctgggcatgac

SEQ ID NO: 375541 - DNA, 15 bp, Homo sapiens
tccctctgggcatga

SEQ ID NO: 375542 - DNA, 15 bp, Homo sapiens
ttccctctgggcatg

SEQ ID NO: 375543 - DNA, 15 bp, Homo sapiens
cttccctctgggcat

SEQ ID NO: 375544 - DNA, 15 bp, Homo sapiens
ccttccctctgggca

SEQ ID NO: 375545 - DNA, 15 bp, Homo sapiens
gccttccctctgggc

SEQ ID NO: 375546 - DNA, 15 bp, Homo sapiens
tgccttccctctggg

SEQ ID NO: 375547 - DNA, 15 bp, Homo sapiens
ctgccttccctctgg

SEQ ID NO: 375548 - DNA, 15 bp, Homo sapiens
gctgccttccctctg

SEQ ID NO: 375549 - DNA, 15 bp, Homo sapiens
agctgccttccctct

SEQ ID NO: 375550 - DNA, 15 bp, Homo sapiens
cagctgccttccctc

SEQ ID NO: 375551 - DNA, 15 bp, Homo sapiens
tcagctgccttccct

SEQ ID NO: 375552 - DNA, 15 bp, Homo sapiens
ctcagctgccttccc

SEQ ID NO: 375553 - DNA, 15 bp, Homo sapiens
gctcagctgccttcc

SEQ ID NO: 375554 - DNA, 15 bp, Homo sapiens
tgctcagctgccttc

SEQ ID NO: 375555 - DNA, 15 bp, Homo sapiens
ctgctcagctgcctt

SEQ ID NO: 375556 - DNA, 15 bp, Homo sapiens
tctgctcagctgcct

SEQ ID NO: 375557 - DNA, 15 bp, Homo sapiens
gtctgctcagctgcc

SEQ ID NO: 375558 - DNA, 15 bp, Homo sapiens
tgtctgctcagctgc

SEQ ID NO: 375559 - DNA, 15 bp, Homo sapiens
ttgtctgctcagctg

SEQ ID NO: 375560 - DNA, 15 bp, Homo sapiens
attgtctgctcagct

SEQ ID NO: 375561 - DNA, 15 bp, Homo sapiens
cattgtctgctcagc

SEQ ID NO: 375562 - DNA, 15 bp, Homo sapiens
gcattgtctgctcag

SEQ ID NO: 375563 - DNA, 15 bp, Homo sapiens
cttcagaaagggggt

SEQ ID NO: 375564 - DNA, 15 bp, Homo sapiens
tcttcagaaaggggg

SEQ ID NO: 375565 - DNA, 15 bp, Homo sapiens
ctcttcagaaagggg

SEQ ID NO: 375566 - DNA, 15 bp, Homo sapiens
tctcttcagaaaggg

SEQ ID NO: 375567 - DNA, 15 bp, Homo sapiens
ctctcttcagaaagg

SEQ ID NO: 375568 - DNA, 15 bp, Homo sapiens
gctctcttcagaaag

SEQ ID NO: 375569 - DNA, 15 bp, Homo sapiens
agctctcttcagaaa

SEQ ID NO: 375570 - DNA, 15 bp, Homo sapiens
cagctctcttcagaa

SEQ ID NO: 375571 - DNA, 15 bp, Homo sapiens
gcagctctcttcaga

SEQ ID NO: 375572 - DNA, 15 bp, Homo sapiens
agcagctctcttcag

SEQ ID NO: 375573 - DNA, 15 bp, Homo sapiens
gagcagctctcttca

SEQ ID NO: 375574 - DNA, 15 bp, Homo sapiens
agagcagctctcttc

SEQ ID NO: 375575 - DNA, 15 bp, Homo sapiens
cagagcagctctctt

SEQ ID NO: 375576 - DNA, 15 bp, Homo sapiens
tcagagcagctctct

SEQ ID NO: 375577 - DNA, 15 bp, Homo sapiens
ctcagagcagctctc

SEQ ID NO: 375578 - DNA, 15 bp, Homo sapiens
actcagagcagctct

SEQ ID NO: 375579 - DNA, 15 bp, Homo sapiens
aactcagagcagctc

SEQ ID NO: 375580 - DNA, 15 bp, Homo sapiens
taactcagagcagct

SEQ ID NO: 375581 - DNA, 15 bp, Homo sapiens
gtaactcagagcagc

SEQ ID NO: 375582 - DNA, 15 bp, Homo sapiens
agtaactcagagcag

SEQ ID NO: 375583 - DNA, 15 bp, Homo sapiens
aagtaactcagagca

SEQ ID NO: 375584 - DNA, 15 bp, Homo sapiens
caagtaactcagagc

SEQ ID NO: 375585 - DNA, 15 bp, Homo sapiens
ccaagtaactcagag

SEQ ID NO: 375586 - DNA, 15 bp, Homo sapiens
cccaagtaactcaga

SEQ ID NO: 375587 - DNA, 15 bp, Homo sapiens
ccccaagtaactcag

SEQ ID NO: 375588 - DNA, 15 bp, Homo sapiens
cccccaagtaactca

SEQ ID NO: 375589 - DNA, 15 bp, Homo sapiens
ccccccaagtaactc

SEQ ID NO: 375590 - DNA, 15 bp, Homo sapiens
accccccaagtaact

SEQ ID NO: 375591 - DNA, 15 bp, Homo sapiens
taccccccaagtaac

SEQ ID NO: 375592 - DNA, 15 bp, Homo sapiens
ttaccccccaagtaa

SEQ ID NO: 375593 - DNA, 15 bp, Homo sapiens
gttaccccccaagta

SEQ ID NO: 375594 - DNA, 15 bp, Homo sapiens
tgttaccccccaagt

SEQ ID NO: 375595 - DNA, 15 bp, Homo sapiens
ctgttaccccccaag

SEQ ID NO: 375596 - DNA, 15 bp, Homo sapiens
actgttaccccccaa

SEQ ID NO: 375597 - DNA, 15 bp, Homo sapiens
cactgttacccccca

SEQ ID NO: 375598 - DNA, 15 bp, Homo sapiens
ccactgttacccccc

SEQ ID NO: 375599 - DNA, 15 bp, Homo sapiens
cccactgttaccccc

SEQ ID NO: 375600 - DNA, 15 bp, Homo sapiens
tcccactgttacccc

SEQ ID NO: 375601 - DNA, 15 bp, Homo sapiens
ttcccactgttaccc

SEQ ID NO: 375602 - DNA, 15 bp, Homo sapiens
gttcccactgttacc

SEQ ID NO: 375603 - DNA, 15 bp, Homo sapiens
ggttcccactgttac

SEQ ID NO: 375604 - DNA, 15 bp, Homo sapiens
aggttcccactgtta

SEQ ID NO: 375605 - DNA, 15 bp, Homo sapiens
caggttcccactgtt

SEQ ID NO: 375606 - DNA, 15 bp, Homo sapiens
ccaggttcccactgt

SEQ ID NO: 375607 - DNA, 15 bp, Homo sapiens
accaggttcccactg

SEQ ID NO: 375608 - DNA, 15 bp, Homo sapiens
aaccaggttcccact

SEQ ID NO: 375609 - DNA, 15 bp, Homo sapiens
caaccaggttcccac

SEQ ID NO: 375610 - DNA, 15 bp, Homo sapiens
ccaaccaggttccca

SEQ ID NO: 375611 - DNA, 15 bp, Homo sapiens
accaaccaggttccc

SEQ ID NO: 375612 - DNA, 15 bp, Homo sapiens
caccaaccaggttcc

SEQ ID NO: 375613 - DNA, 15 bp, Homo sapiens
acaccaaccaggttc

SEQ ID NO: 375614 - DNA, 15 bp, Homo sapiens
tacaccaaccaggtt

SEQ ID NO: 375615 - DNA, 15 bp, Homo sapiens
gtacaccaaccaggt

SEQ ID NO: 375616 - DNA, 15 bp, Homo sapiens
ggtacaccaaccagg

SEQ ID NO: 375617 - DNA, 15 bp, Homo sapiens
tggtacaccaaccag

SEQ ID NO: 375618 - DNA, 15 bp, Homo sapiens
atggtacaccaacca

SEQ ID NO: 375619 - DNA, 15 bp, Homo sapiens
catggtacaccaacc

SEQ ID NO: 375620 - DNA, 15 bp, Homo sapiens
ccatggtacaccaac

SEQ ID NO: 375621 - DNA, 15 bp, Homo sapiens
tccatggtacaccaa

SEQ ID NO: 375622 - DNA, 15 bp, Homo sapiens
ctccatggtacacca

SEQ ID NO: 375623 - DNA, 15 bp, Homo sapiens
cctccatggtacacc

SEQ ID NO: 375624 - DNA, 15 bp, Homo sapiens
ccctccatggtacac

SEQ ID NO: 375625 - DNA, 15 bp, Homo sapiens
cccctccatggtaca

SEQ ID NO: 375626 - DNA, 15 bp, Homo sapiens
tcccctccatggtac

SEQ ID NO: 375627 - DNA, 15 bp, Homo sapiens
ttcccctccatggta

SEQ ID NO: 375628 - DNA, 15 bp, Homo sapiens
cttcccctccatggt

SEQ ID NO: 375629 - DNA, 15 bp, Homo sapiens
acttcccctccatgg

SEQ ID NO: 375630 - DNA, 15 bp, Homo sapiens
tacttcccctccatg

SEQ ID NO: 375631 - DNA, 15 bp, Homo sapiens
atacttcccctccat

SEQ ID NO: 375632 - DNA, 15 bp, Homo sapiens
gatacttcccctcca

SEQ ID NO: 375633 - DNA, 15 bp, Homo sapiens
agatacttcccctcc

SEQ ID NO: 375634 - DNA, 15 bp, Homo sapiens
cagatacttcccctc

SEQ ID NO: 375635 - DNA, 15 bp, Homo sapiens
ccagatacttcccct

SEQ ID NO: 375636 - DNA, 15 bp, Homo sapiens
tccagatacttcccc

SEQ ID NO: 375637 - DNA, 15 bp, Homo sapiens
ttccagatacttccc

SEQ ID NO: 375638 - DNA, 15 bp, Homo sapiens
tttccagatacttcc

SEQ ID NO: 375639 - DNA, 15 bp, Homo sapiens
atttccagatacttc

SEQ ID NO: 375640 - DNA, 15 bp, Homo sapiens
aatttccagatactt

SEQ ID NO: 375641 - DNA, 15 bp, Homo sapiens
aaatttccagatact

SEQ ID NO: 375642 - DNA, 15 bp, Homo sapiens
caaatttccagatac

SEQ ID NO: 375643 - DNA, 15 bp, Homo sapiens
tcaaatttccagata

SEQ ID NO: 375644 - DNA, 15 bp, Homo sapiens
ttcaaatttccagat

SEQ ID NO: 375645 - DNA, 15 bp, Homo sapiens
gttcaaatttccaga

SEQ ID NO: 375646 - DNA, 15 bp, Homo sapiens
agttcaaatttccag

SEQ ID NO: 375647 - DNA, 15 bp, Homo sapiens
gagttcaaatttcca

SEQ ID NO: 375648 - DNA, 15 bp, Homo sapiens
cgagttcaaatttcc

SEQ ID NO: 375649 - DNA, 15 bp, Homo sapiens
tcgagttcaaatttc

SEQ ID NO: 375650 - DNA, 15 bp, Homo sapiens
ctcgagttcaaattt

SEQ ID NO: 375651 - DNA, 15 bp, Homo sapiens
tctcgagttcaaatt

SEQ ID NO: 375652 - DNA, 15 bp, Homo sapiens
ttctcgagttcaaat

SEQ ID NO: 375653 - DNA, 15 bp, Homo sapiens
tttctcgagttcaaa

SEQ ID NO: 375654 - DNA, 15 bp, Homo sapiens
atttctcgagttcaa

SEQ ID NO: 375655 - DNA, 15 bp, Homo sapiens
catttctcgagttca

SEQ ID NO: 375656 - DNA, 15 bp, Homo sapiens
tcatttctcgagttc

SEQ ID NO: 375657 - DNA, 15 bp, Homo sapiens
atcatttctcgagtt

SEQ ID NO: 375658 - DNA, 15 bp, Homo sapiens
aatcatttctcgagt

SEQ ID NO: 375659 - DNA, 15 bp, Homo sapiens
gaatcatttctcgag

SEQ ID NO: 375660 - DNA, 15 bp, Homo sapiens
cgaatcatttctcga

SEQ ID NO: 375661 - DNA, 15 bp, Homo sapiens
tcgaatcatttctcg

SEQ ID NO: 375662 - DNA, 15 bp, Homo sapiens
gtcgaatcatttctc

SEQ ID NO: 375663 - DNA, 15 bp, Homo sapiens
agtcgaatcatttct

SEQ ID NO: 375664 - DNA, 15 bp, Homo sapiens
cagtcgaatcatttc

SEQ ID NO: 375665 - DNA, 15 bp, Homo sapiens
gcagtcgaatcattt

SEQ ID NO: 375666 - DNA, 15 bp, Homo sapiens
tgcagtcgaatcatt

SEQ ID NO: 375667 - DNA, 15 bp, Homo sapiens
atgcagtcgaatcat

SEQ ID NO: 375668 - DNA, 15 bp, Homo sapiens
catgcagtcgaatca

SEQ ID NO: 375669 - DNA, 15 bp, Homo sapiens
gcatgcagtcgaatc

SEQ ID NO: 375670 - DNA, 15 bp, Homo sapiens
tgcatgcagtcgaat

SEQ ID NO: 375671 - DNA, 15 bp, Homo sapiens
gtgcatgcagtcgaa

SEQ ID NO: 375672 - DNA, 15 bp, Homo sapiens
tgtgcatgcagtcga

SEQ ID NO: 375673 - DNA, 15 bp, Homo sapiens
gtgtgcatgcagtcg

SEQ ID NO: 375674 - DNA, 15 bp, Homo sapiens
agtgtgcatgcagtc

SEQ ID NO: 375675 - DNA, 15 bp, Homo sapiens
tagtgtgcatgcagt

SEQ ID NO: 375676 - DNA, 15 bp, Homo sapiens
ttagtgtgcatgcag

SEQ ID NO: 375677 - DNA, 15 bp, Homo sapiens
tttagtgtgcatgca

SEQ ID NO: 375678 - DNA, 15 bp, Homo sapiens
gtttagtgtgcatgc

SEQ ID NO: 375679 - DNA, 15 bp, Homo sapiens
tgtttagtgtgcatg

SEQ ID NO: 375680 - DNA, 15 bp, Homo sapiens
ctgtttagtgtgcat

SEQ ID NO: 375681 - DNA, 15 bp, Homo sapiens
gctgtttagtgtgca

SEQ ID NO: 375682 - DNA, 15 bp, Homo sapiens
tgctgtttagtgtgc

SEQ ID NO: 375683 - DNA, 15 bp, Homo sapiens
ctgctgtttagtgtg

SEQ ID NO: 375684 - DNA, 15 bp, Homo sapiens
gctgctgtttagtgt

SEQ ID NO: 375685 - DNA, 15 bp, Homo sapiens
ggctgctgtttagtg

SEQ ID NO: 375686 - DNA, 15 bp, Homo sapiens
tggctgctgtttagt

SEQ ID NO: 375687 - DNA, 15 bp, Homo sapiens
ctggctgctgtttag

SEQ ID NO: 375688 - DNA, 15 bp, Homo sapiens
tctggctgctgttta

SEQ ID NO: 375689 - DNA, 15 bp, Homo sapiens
ctctggctgctgttt

SEQ ID NO: 375690 - DNA, 15 bp, Homo sapiens
tctctggctgctgtt

SEQ ID NO: 375691 - DNA, 15 bp, Homo sapiens
ctctctggctgctgt

SEQ ID NO: 375692 - DNA, 15 bp, Homo sapiens
cctctctggctgctg

SEQ ID NO: 375693 - DNA, 15 bp, Homo sapiens
gcctctctggctgct

SEQ ID NO: 375694 - DNA, 15 bp, Homo sapiens
ggcctctctggctgc

SEQ ID NO: 375695 - DNA, 15 bp, Homo sapiens
gggcctctctggctg

SEQ ID NO: 375696 - DNA, 15 bp, Homo sapiens
agggcctctctggct

SEQ ID NO: 375697 - DNA, 15 bp, Homo sapiens
aagggcctctctggc

SEQ ID NO: 375698 - DNA, 15 bp, Homo sapiens
aaagggcctctctgg

SEQ ID NO: 375699 - DNA, 15 bp, Homo sapiens
taaagggcctctctg

SEQ ID NO: 375700 - DNA, 15 bp, Homo sapiens
gtaaagggcctctct

SEQ ID NO: 375701 - DNA, 15 bp, Homo sapiens
agtaaagggcctctc

SEQ ID NO: 375702 - DNA, 15 bp, Homo sapiens
cagtaaagggcctct

SEQ ID NO: 375703 - DNA, 15 bp, Homo sapiens
acagtaaagggcctc

SEQ ID NO: 375704 - DNA, 15 bp, Homo sapiens
gacagtaaagggcct

SEQ ID NO: 375705 - DNA, 15 bp, Homo sapiens
tgacagtaaagggcc

SEQ ID NO: 375706 - DNA, 15 bp, Homo sapiens
ttgacagtaaagggc

SEQ ID NO: 375707 - DNA, 15 bp, Homo sapiens
attgacagtaaaggg

SEQ ID NO: 375708 - DNA, 15 bp, Homo sapiens
tattgacagtaaagg

SEQ ID NO: 375709 - DNA, 15 bp, Homo sapiens
atattgacagtaaag

SEQ ID NO: 375710 - DNA, 15 bp, Homo sapiens
aatattgacagtaaa

SEQ ID NO: 375711 - DNA, 15 bp, Homo sapiens
taatattgacagtaa

SEQ ID NO: 375712 - DNA, 15 bp, Homo sapiens
ataatattgacagta

SEQ ID NO: 375713 - DNA, 15 bp, Homo sapiens
cataatattgacagt

SEQ ID NO: 375714 - DNA, 15 bp, Homo sapiens
tcataatattgacag

SEQ ID NO: 375715 - DNA, 15 bp, Homo sapiens
ttcataatattgaca

SEQ ID NO: 375716 - DNA, 15 bp, Homo sapiens
attcataatattgac

SEQ ID NO: 375717 - DNA, 15 bp, Homo sapiens
cattcataatattga

SEQ ID NO: 375718 - DNA, 15 bp, Homo sapiens
ccattcataatattg

SEQ ID NO: 375719 - DNA, 15 bp, Homo sapiens
tccattcataatatt

SEQ ID NO: 375720 - DNA, 15 bp, Homo sapiens
ctccattcataatat

SEQ ID NO: 375721 - DNA, 15 bp, Homo sapiens
actccattcataata

SEQ ID NO: 375722 - DNA, 15 bp, Homo sapiens
aactccattcataat

SEQ ID NO: 375723 - DNA, 15 bp, Homo sapiens
caactccattcataa

SEQ ID NO: 375724 - DNA, 15 bp, Homo sapiens
ccaactccattcata

SEQ ID NO: 375725 - DNA, 15 bp, Homo sapiens
gccaactccattcat

SEQ ID NO: 375726 - DNA, 15 bp, Homo sapiens
agccaactccattca

SEQ ID NO: 375727 - DNA, 15 bp, Homo sapiens
cagccaactccattc

SEQ ID NO: 375728 - DNA, 15 bp, Homo sapiens
ccagccaactccatt

SEQ ID NO: 375729 - DNA, 15 bp, Homo sapiens
cccagccaactccat

SEQ ID NO: 375730 - DNA, 15 bp, Homo sapiens
acccagccaactcca

SEQ ID NO: 375731 - DNA, 15 bp, Homo sapiens
gacccagccaactcc

SEQ ID NO: 375732 - DNA, 15 bp, Homo sapiens
cgacccagccaactc

SEQ ID NO: 375733 - DNA, 15 bp, Homo sapiens
ccgacccagccaact

SEQ ID NO: 375734 - DNA, 15 bp, Homo sapiens
cccgacccagccaac

SEQ ID NO: 375735 - DNA, 15 bp, Homo sapiens
tcccgacccagccaa

SEQ ID NO: 375736 - DNA, 15 bp, Homo sapiens
ctcccgacccagcca

SEQ ID NO: 375737 - DNA, 15 bp, Homo sapiens
actcccgacccagcc

SEQ ID NO: 375738 - DNA, 15 bp, Homo sapiens
gactcccgacccagc

SEQ ID NO: 375739 - DNA, 15 bp, Homo sapiens
ggactcccgacccag

SEQ ID NO: 375740 - DNA, 15 bp, Homo sapiens
gggactcccgaccca

SEQ ID NO: 375741 - DNA, 15 bp, Homo sapiens
ggggactcccgaccc

SEQ ID NO: 375742 - DNA, 15 bp, Homo sapiens
tggggactcccgacc

SEQ ID NO: 375743 - DNA, 15 bp, Homo sapiens
gtggggactcccgac

SEQ ID NO: 375744 - DNA, 15 bp, Homo sapiens
ggtggggactcccga

SEQ ID NO: 375745 - DNA, 15 bp, Homo sapiens
gggtggggactcccg

SEQ ID NO: 375746 - DNA, 15 bp, Homo sapiens
agggtggggactccc

SEQ ID NO: 375747 - DNA, 15 bp, Homo sapiens
aagggtggggactcc

SEQ ID NO: 375748 - DNA, 15 bp, Homo sapiens
gaagggtggggactc

SEQ ID NO: 375749 - DNA, 15 bp, Homo sapiens
ggaagggtggggact

SEQ ID NO: 375750 - DNA, 15 bp, Homo sapiens
aggaagggtggggac

SEQ ID NO: 375751 - DNA, 15 bp, Homo sapiens
gaggaagggtgggga

SEQ ID NO: 375752 - DNA, 15 bp, Homo sapiens
agaggaagggtgggg

SEQ ID NO: 375753 - DNA, 15 bp, Homo sapiens
cagaggaagggtggg

SEQ ID NO: 375754 - DNA, 15 bp, Homo sapiens
tcagaggaagggtgg

SEQ ID NO: 375755 - DNA, 15 bp, Homo sapiens
ctcagaggaagggtg

SEQ ID NO: 375756 - DNA, 15 bp, Homo sapiens
cctcagaggaagggt

SEQ ID NO: 375757 - DNA, 15 bp, Homo sapiens
gcctcagaggaaggg

SEQ ID NO: 375758 - DNA, 15 bp, Homo sapiens
ggcctcagaggaagg

SEQ ID NO: 375759 - DNA, 15 bp, Homo sapiens
aggcctcagaggaag

SEQ ID NO: 375760 - DNA, 15 bp, Homo sapiens
gaggcctcagaggaa

SEQ ID NO: 375761 - DNA, 15 bp, Homo sapiens
agaggcctcagagga

SEQ ID NO: 375762 - DNA, 15 bp, Homo sapiens
gagaggcctcagagg

SEQ ID NO: 375763 - DNA, 15 bp, Homo sapiens
agagaggcctcagag

SEQ ID NO: 375764 - DNA, 15 bp, Homo sapiens
gagagaggcctcaga

SEQ ID NO: 375765 - DNA, 15 bp, Homo sapiens
tgagagaggcctcag

SEQ ID NO: 375766 - DNA, 15 bp, Homo sapiens
ctgagagaggcctca

SEQ ID NO: 375767 - DNA, 15 bp, Homo sapiens
tctgagagaggcctc

SEQ ID NO: 375768 - DNA, 15 bp, Homo sapiens
ctctgagagaggcct

SEQ ID NO: 375769 - DNA, 15 bp, Homo sapiens
cctctgagagaggcc

SEQ ID NO: 375770 - DNA, 15 bp, Homo sapiens
tcctctgagagaggc

SEQ ID NO: 375771 - DNA, 15 bp, Homo sapiens
ctcctctgagagagg

SEQ ID NO: 375772 - DNA, 15 bp, Homo sapiens
gctcctctgagagag

SEQ ID NO: 375773 - DNA, 15 bp, Homo sapiens
ggctcctctgagaga

SEQ ID NO: 375774 - DNA, 15 bp, Homo sapiens
aggctcctctgagag

SEQ ID NO: 375775 - DNA, 15 bp, Homo sapiens
caggctcctctgaga

SEQ ID NO: 375776 - DNA, 15 bp, Homo sapiens
ccaggctcctctgag

SEQ ID NO: 375777 - DNA, 15 bp, Homo sapiens
cccaggctcctctga

SEQ ID NO: 375778 - DNA, 15 bp, Homo sapiens
gcccaggctcctctg

SEQ ID NO: 375779 - DNA, 15 bp, Homo sapiens
tgcccaggctcctct

SEQ ID NO: 375780 - DNA, 15 bp, Homo sapiens
ctgcccaggctcctc

SEQ ID NO: 375781 - DNA, 15 bp, Homo sapiens
tctgcccaggctcct

SEQ ID NO: 375782 - DNA, 15 bp, Homo sapiens
ctctgcccaggctcc

SEQ ID NO: 375783 - DNA, 15 bp, Homo sapiens
actctgcccaggctc

SEQ ID NO: 375784 - DNA, 15 bp, Homo sapiens
cactctgcccaggct

SEQ ID NO: 375785 - DNA, 15 bp, Homo sapiens
ccactctgcccaggc

SEQ ID NO: 375786 - DNA, 15 bp, Homo sapiens
cccactctgcccagg

SEQ ID NO: 375787 - DNA, 15 bp, Homo sapiens
gcccactctgcccag

SEQ ID NO: 375788 - DNA, 15 bp, Homo sapiens
ggcccactctgccca

SEQ ID NO: 375789 - DNA, 15 bp, Homo sapiens
aggcccactctgccc

SEQ ID NO: 375790 - DNA, 15 bp, Homo sapiens
gaggcccactctgcc

SEQ ID NO: 375791 - DNA, 15 bp, Homo sapiens
ggaggcccactctgc

SEQ ID NO: 375792 - DNA, 15 bp, Homo sapiens
aggaggcccactctg

SEQ ID NO: 375793 - DNA, 15 bp, Homo sapiens
gaggaggcccactct

SEQ ID NO: 375794 - DNA, 15 bp, Homo sapiens
tgaggaggcccactc

SEQ ID NO: 375795 - DNA, 15 bp, Homo sapiens
ctgaggaggcccact

SEQ ID NO: 375796 - DNA, 15 bp, Homo sapiens
tctgaggaggcccac

SEQ ID NO: 375797 - DNA, 15 bp, Homo sapiens
gtctgaggaggccca

SEQ ID NO: 375798 - DNA, 15 bp, Homo sapiens
tgtctgaggaggccc

SEQ ID NO: 375799 - DNA, 15 bp, Homo sapiens
ctgtctgaggaggcc

SEQ ID NO: 375800 - DNA, 15 bp, Homo sapiens
gctgtctgaggaggc

SEQ ID NO: 375801 - DNA, 15 bp, Homo sapiens
tgctgtctgaggagg

SEQ ID NO: 375802 - DNA, 15 bp, Homo sapiens
ctgctgtctgaggag

SEQ ID NO: 375803 - DNA, 15 bp, Homo sapiens
actgctgtctgagga

SEQ ID NO: 375804 - DNA, 15 bp, Homo sapiens
cactgctgtctgagg

SEQ ID NO: 375805 - DNA, 15 bp, Homo sapiens
ccactgctgtctgag

SEQ ID NO: 375806 - DNA, 15 bp, Homo sapiens
gccactgctgtctga

SEQ ID NO: 375807 - DNA, 15 bp, Homo sapiens
agccactgctgtctg

SEQ ID NO: 375808 - DNA, 15 bp, Homo sapiens
cagccactgctgtct

SEQ ID NO: 375809 - DNA, 15 bp, Homo sapiens
gcagccactgctgtc

SEQ ID NO: 375810 - DNA, 15 bp, Homo sapiens
tgcagccactgctgt

SEQ ID NO: 375811 - DNA, 15 bp, Homo sapiens
ctgcagccactgctg

SEQ ID NO: 375812 - DNA, 15 bp, Homo sapiens
cctgcagccactgct

SEQ ID NO: 375813 - DNA, 15 bp, Homo sapiens
gcctgcagccactgc

SEQ ID NO: 375814 - DNA, 15 bp, Homo sapiens
tgcctgcagccactg

SEQ ID NO: 375815 - DNA, 15 bp, Homo sapiens
ctgcctgcagccact

SEQ ID NO: 375816 - DNA, 15 bp, Homo sapiens
gctgcctgcagccac

SEQ ID NO: 375817 - DNA, 15 bp, Homo sapiens
agctgcctgcagcca

SEQ ID NO: 375818 - DNA, 15 bp, Homo sapiens
cagctgcctgcagcc

SEQ ID NO: 375819 - DNA, 15 bp, Homo sapiens
ccagctgcctgcagc

SEQ ID NO: 375820 - DNA, 15 bp, Homo sapiens
cccagctgcctgcag

SEQ ID NO: 375821 - DNA, 15 bp, Homo sapiens
acccagctgcctgca

SEQ ID NO: 375822 - DNA, 15 bp, Homo sapiens
tacccagctgcctgc

SEQ ID NO: 375823 - DNA, 15 bp, Homo sapiens
gtacccagctgcctg

SEQ ID NO: 375824 - DNA, 15 bp, Homo sapiens
tgtacccagctgcct

SEQ ID NO: 375825 - DNA, 15 bp, Homo sapiens
gtgtacccagctgcc

SEQ ID NO: 375826 - DNA, 15 bp, Homo sapiens
cgtgtacccagctgc

SEQ ID NO: 375827 - DNA, 15 bp, Homo sapiens
gcgtgtacccagctg

SEQ ID NO: 375828 - DNA, 15 bp, Homo sapiens
agcgtgtacccagct

SEQ ID NO: 375829 - DNA, 15 bp, Homo sapiens
cagcgtgtacccagc

SEQ ID NO: 375830 - DNA, 15 bp, Homo sapiens
acagcgtgtacccag

SEQ ID NO: 375831 - DNA, 15 bp, Homo sapiens
tacagcgtgtaccca

SEQ ID NO: 375832 - DNA, 15 bp, Homo sapiens
ttacagcgtgtaccc

SEQ ID NO: 375833 - DNA, 15 bp, Homo sapiens
attacagcgtgtacc

SEQ ID NO: 375834 - DNA, 15 bp, Homo sapiens
aattacagcgtgtac

SEQ ID NO: 375835 - DNA, 15 bp, Homo sapiens
aaattacagcgtgta

SEQ ID NO: 375836 - DNA, 15 bp, Homo sapiens
caaattacagcgtgt

SEQ ID NO: 375837 - DNA, 15 bp, Homo sapiens
gcaaattacagcgtg

SEQ ID NO: 375838 - DNA, 15 bp, Homo sapiens
tgcaaattacagcgt

SEQ ID NO: 375839 - DNA, 15 bp, Homo sapiens
atgcaaattacagcg

SEQ ID NO: 375840 - DNA, 15 bp, Homo sapiens
catgcaaattacagc

SEQ ID NO: 375841 - DNA, 15 bp, Homo sapiens
ccatgcaaattacag

SEQ ID NO: 375842 - DNA, 15 bp, Homo sapiens
gccatgcaaattaca

SEQ ID NO: 375843 - DNA, 15 bp, Homo sapiens
agccatgcaaattac

SEQ ID NO: 375844 - DNA, 15 bp, Homo sapiens
cagccatgcaaatta

SEQ ID NO: 375845 - DNA, 15 bp, Homo sapiens
tcagccatgcaaatt

SEQ ID NO: 375846 - DNA, 15 bp, Homo sapiens
ttcagccatgcaaat

SEQ ID NO: 375847 - DNA, 15 bp, Homo sapiens
attcagccatgcaaa

SEQ ID NO: 375848 - DNA, 15 bp, Homo sapiens
cattcagccatgcaa

SEQ ID NO: 375849 - DNA, 15 bp, Homo sapiens
gcattcagccatgca

SEQ ID NO: 375850 - DNA, 15 bp, Homo sapiens
agcattcagccatgc

SEQ ID NO: 375851 - DNA, 15 bp, Homo sapiens
cagcattcagccatg

SEQ ID NO: 375852 - DNA, 15 bp, Homo sapiens
ccagcattcagccat

SEQ ID NO: 375853 - DNA, 15 bp, Homo sapiens
cccagcattcagcca

SEQ ID NO: 375854 - DNA, 15 bp, Homo sapiens
ccccagcattcagcc

SEQ ID NO: 375855 - DNA, 15 bp, Homo sapiens
gccccagcattcagc

SEQ ID NO: 375856 - DNA, 15 bp, Homo sapiens
tgccccagcattcag

SEQ ID NO: 375857 - DNA, 15 bp, Homo sapiens
gtgccccagcattca

SEQ ID NO: 375858 - DNA, 15 bp, Homo sapiens
tgtgccccagcattc

SEQ ID NO: 375859 - DNA, 15 bp, Homo sapiens
ctgtgccccagcatt

SEQ ID NO: 375860 - DNA, 15 bp, Homo sapiens
cctgtgccccagcat

SEQ ID NO: 375861 - DNA, 15 bp, Homo sapiens
tcctgtgccccagca

SEQ ID NO: 375862 - DNA, 15 bp, Homo sapiens
ttcctgtgccccagc

SEQ ID NO: 375863 - DNA, 15 bp, Homo sapiens
cttcctgtgccccag

SEQ ID NO: 375864 - DNA, 15 bp, Homo sapiens
gcttcctgtgcccca

SEQ ID NO: 375865 - DNA, 15 bp, Homo sapiens
ggcttcctgtgcccc

SEQ ID NO: 375866 - DNA, 15 bp, Homo sapiens
cggcttcctgtgccc

SEQ ID NO: 375867 - DNA, 15 bp, Homo sapiens
gcggcttcctgtgcc

SEQ ID NO: 375868 - DNA, 15 bp, Homo sapiens
cgcggcttcctgtgc

SEQ ID NO: 375869 - DNA, 15 bp, Homo sapiens
acgcggcttcctgtg

SEQ ID NO: 375870 - DNA, 15 bp, Homo sapiens
gacgcggcttcctgt

SEQ ID NO: 375871 - DNA, 15 bp, Homo sapiens
tgacgcggcttcctg

SEQ ID NO: 375872 - DNA, 15 bp, Homo sapiens
ctgacgcggcttcct

SEQ ID NO: 375873 - DNA, 15 bp, Homo sapiens
gctgacgcggcttcc

SEQ ID NO: 375874 - DNA, 15 bp, Homo sapiens
ggctgacgcggcttc

SEQ ID NO: 375875 - DNA, 15 bp, Homo sapiens
aggctgacgcggctt

SEQ ID NO: 375876 - DNA, 15 bp, Homo sapiens
caggctgacgcggct

SEQ ID NO: 375877 - DNA, 15 bp, Homo sapiens
tcaggctgacgcggc

SEQ ID NO: 375878 - DNA, 15 bp, Homo sapiens
gtcaggctgacgcgg

SEQ ID NO: 375879 - DNA, 15 bp, Homo sapiens
agtcaggctgacgcg

SEQ ID NO: 375880 - DNA, 15 bp, Homo sapiens
cagtcaggctgacgc

SEQ ID NO: 375881 - DNA, 15 bp, Homo sapiens
ccagtcaggctgacg

SEQ ID NO: 375882 - DNA, 15 bp, Homo sapiens
gccagtcaggctgac

SEQ ID NO: 375883 - DNA, 15 bp, Homo sapiens
cgccagtcaggctga

SEQ ID NO: 375884 - DNA, 15 bp, Homo sapiens
tcgccagtcaggctg

SEQ ID NO: 375885 - DNA, 15 bp, Homo sapiens
ctcgccagtcaggct

SEQ ID NO: 375886 - DNA, 15 bp, Homo sapiens
tctcgccagtcaggc

SEQ ID NO: 375887 - DNA, 15 bp, Homo sapiens
gtctcgccagtcagg

SEQ ID NO: 375888 - DNA, 15 bp, Homo sapiens
tgtctcgccagtcag

SEQ ID NO: 375889 - DNA, 15 bp, Homo sapiens
ctgtctcgccagtca

SEQ ID NO: 375890 - DNA, 15 bp, Homo sapiens
tctgtctcgccagtc

SEQ ID NO: 375891 - DNA, 15 bp, Homo sapiens
gtctgtctcgccagt

SEQ ID NO: 375892 - DNA, 15 bp, Homo sapiens
tgtctgtctcgccag

SEQ ID NO: 375893 - DNA, 15 bp, Homo sapiens
ttgtctgtctcgcca

SEQ ID NO: 375894 - DNA, 15 bp, Homo sapiens
cttgtctgtctcgcc

SEQ ID NO: 375895 - DNA, 15 bp, Homo sapiens
tcttgtctgtctcgc

SEQ ID NO: 375896 - DNA, 15 bp, Homo sapiens
ctcttgtctgtctcg

SEQ ID NO: 375897 - DNA, 15 bp, Homo sapiens
gctcttgtctgtctc

SEQ ID NO: 375898 - DNA, 15 bp, Homo sapiens
agctcttgtctgtct

SEQ ID NO: 375899 - DNA, 15 bp, Homo sapiens
aagctcttgtctgtc

SEQ ID NO: 375900 - DNA, 15 bp, Homo sapiens
aaagctcttgtctgt

SEQ ID NO: 375901 - DNA, 15 bp, Homo sapiens
aaaagctcttgtctg

SEQ ID NO: 375902 - DNA, 15 bp, Homo sapiens
caaaagctcttgtct

SEQ ID NO: 375903 - DNA, 15 bp, Homo sapiens
tcaaaagctcttgtc

SEQ ID NO: 375904 - DNA, 15 bp, Homo sapiens
atcaaaagctcttgt

SEQ ID NO: 375905 - DNA, 15 bp, Homo sapiens
aatcaaaagctcttg

SEQ ID NO: 375906 - DNA, 15 bp, Homo sapiens
aaatcaaaagctctt

SEQ ID NO: 375907 - DNA, 15 bp, Homo sapiens
caaatcaaaagctct

SEQ ID NO: 375908 - DNA, 15 bp, Homo sapiens
acaaatcaaaagctc

SEQ ID NO: 375909 - DNA, 15 bp, Homo sapiens
cacaaatcaaaagct

SEQ ID NO: 375910 - DNA, 15 bp, Homo sapiens
acacaaatcaaaagc

SEQ ID NO: 375911 - DNA, 15 bp, Homo sapiens
cacacaaatcaaaag

SEQ ID NO: 375912 - DNA, 15 bp, Homo sapiens
ccacacaaatcaaaa

SEQ ID NO: 375913 - DNA, 15 bp, Homo sapiens
gccacacaaatcaaa

SEQ ID NO: 375914 - DNA, 15 bp, Homo sapiens
agccacacaaatcaa

SEQ ID NO: 375915 - DNA, 15 bp, Homo sapiens
aagccacacaaatca

SEQ ID NO: 375916 - DNA, 15 bp, Homo sapiens
aaagccacacaaatc

SEQ ID NO: 375917 - DNA, 15 bp, Homo sapiens
gaaagccacacaaat

SEQ ID NO: 375918 - DNA, 15 bp, Homo sapiens
ggaaagccacacaaa

SEQ ID NO: 375919 - DNA, 15 bp, Homo sapiens
aggaaagccacacaa

SEQ ID NO: 375920 - DNA, 15 bp, Homo sapiens
gaggaaagccacaca

SEQ ID NO: 375921 - DNA, 15 bp, Homo sapiens
ggaggaaagccacac

SEQ ID NO: 375922 - DNA, 15 bp, Homo sapiens
gggaggaaagccaca

SEQ ID NO: 375923 - DNA, 15 bp, Homo sapiens
ggggaggaaagccac

SEQ ID NO: 375924 - DNA, 15 bp, Homo sapiens
aggggaggaaagcca

SEQ ID NO: 375925 - DNA, 15 bp, Homo sapiens
caggggaggaaagcc

SEQ ID NO: 375926 - DNA, 15 bp, Homo sapiens
gcaggggaggaaagc

SEQ ID NO: 375927 - DNA, 15 bp, Homo sapiens
ggcaggggaggaaag

SEQ ID NO: 375928 - DNA, 15 bp, Homo sapiens
gggcaggggaggaaa

SEQ ID NO: 375929 - DNA, 15 bp, Homo sapiens
ggggcaggggaggaa

SEQ ID NO: 375930 - DNA, 15 bp, Homo sapiens
cggggcaggggagga

SEQ ID NO: 375931 - DNA, 15 bp, Homo sapiens
acggggcaggggagg

SEQ ID NO: 375932 - DNA, 15 bp, Homo sapiens
cacggggcaggggag

SEQ ID NO: 375933 - DNA, 15 bp, Homo sapiens
gcacggggcagggga

SEQ ID NO: 375934 - DNA, 15 bp, Homo sapiens
ggcacggggcagggg

SEQ ID NO: 375935 - DNA, 15 bp, Homo sapiens
tggcacggggcaggg

SEQ ID NO: 375936 - DNA, 15 bp, Homo sapiens
gtggcacggggcagg

SEQ ID NO: 375937 - DNA, 15 bp, Homo sapiens
ggtggcacggggcag

SEQ ID NO: 375938 - DNA, 15 bp, Homo sapiens
gggtggcacggggca

SEQ ID NO: 375939 - DNA, 15 bp, Homo sapiens
agggtggcacggggc

SEQ ID NO: 375940 - DNA, 15 bp, Homo sapiens
gagggtggcacgggg

SEQ ID NO: 375941 - DNA, 15 bp, Homo sapiens
tgagggtggcacggg

SEQ ID NO: 375942 - DNA, 15 bp, Homo sapiens
ttgagggtggcacgg

SEQ ID NO: 375943 - DNA, 15 bp, Homo sapiens
attgagggtggcacg

SEQ ID NO: 375944 - DNA, 15 bp, Homo sapiens
aattgagggtggcac

SEQ ID NO: 375945 - DNA, 15 bp, Homo sapiens
taattgagggtggca

SEQ ID NO: 375946 - DNA, 15 bp, Homo sapiens
gtaattgagggtggc

SEQ ID NO: 375947 - DNA, 15 bp, Homo sapiens
tgtaattgagggtgg

SEQ ID NO: 375948 - DNA, 15 bp, Homo sapiens
atgtaattgagggtg

SEQ ID NO: 375949 - DNA, 15 bp, Homo sapiens
aatgtaattgagggt

SEQ ID NO: 375950 - DNA, 15 bp, Homo sapiens
gaatgtaattgaggg

SEQ ID NO: 375951 - DNA, 15 bp, Homo sapiens
agaatgtaattgagg

SEQ ID NO: 375952 - DNA, 15 bp, Homo sapiens
gagaatgtaattgag

SEQ ID NO: 375953 - DNA, 15 bp, Homo sapiens
ggagaatgtaattga

SEQ ID NO: 375954 - DNA, 15 bp, Homo sapiens
tggagaatgtaattg

SEQ ID NO: 375955 - DNA, 15 bp, Homo sapiens
atggagaatgtaatt

SEQ ID NO: 375956 - DNA, 15 bp, Homo sapiens
catggagaatgtaat

SEQ ID NO: 375957 - DNA, 15 bp, Homo sapiens
ccatggagaatgtaa

SEQ ID NO: 375958 - DNA, 15 bp, Homo sapiens
gccatggagaatgta

SEQ ID NO: 375959 - DNA, 15 bp, Homo sapiens
cgccatggagaatgt

SEQ ID NO: 375960 - DNA, 15 bp, Homo sapiens
tcgccatggagaatg

SEQ ID NO: 375961 - DNA, 15 bp, Homo sapiens
ctcgccatggagaat

SEQ ID NO: 375962 - DNA, 15 bp, Homo sapiens
tctcgccatggagaa

SEQ ID NO: 375963 - DNA, 15 bp, Homo sapiens
atctcgccatggaga

SEQ ID NO: 375964 - DNA, 15 bp, Homo sapiens
tatctcgccatggag

SEQ ID NO: 375965 - DNA, 15 bp, Homo sapiens
ttatctcgccatgga

SEQ ID NO: 375966 - DNA, 15 bp, Homo sapiens
tttatctcgccatgg

SEQ ID NO: 375967 - DNA, 15 bp, Homo sapiens
atttatctcgccatg

SEQ ID NO: 375968 - DNA, 15 bp, Homo sapiens
catttatctcgccat

SEQ ID NO: 375969 - DNA, 15 bp, Homo sapiens
gcatttatctcgcca

SEQ ID NO: 375970 - DNA, 15 bp, Homo sapiens
agcatttatctcgcc

SEQ ID NO: 375971 - DNA, 15 bp, Homo sapiens
gagcatttatctcgc

SEQ ID NO: 375972 - DNA, 15 bp, Homo sapiens
agagcatttatctcg

SEQ ID NO: 375973 - DNA, 15 bp, Homo sapiens
aagagcatttatctc

SEQ ID NO: 375974 - DNA, 15 bp, Homo sapiens
taagagcatttatct

SEQ ID NO: 375975 - DNA, 15 bp, Homo sapiens
ctaagagcatttatc

SEQ ID NO: 375976 - DNA, 15 bp, Homo sapiens
cctaagagcatttat

SEQ ID NO: 375977 - DNA, 15 bp, Homo sapiens
tcctaagagcattta

SEQ ID NO: 375978 - DNA, 15 bp, Homo sapiens
ctcctaagagcattt

SEQ ID NO: 375979 - DNA, 15 bp, Homo sapiens
gctcctaagagcatt

SEQ ID NO: 375980 - DNA, 15 bp, Homo sapiens
tgctcctaagagcat

SEQ ID NO: 375981 - DNA, 15 bp, Homo sapiens
atgctcctaagagca

SEQ ID NO: 375982 - DNA, 15 bp, Homo sapiens
aatgctcctaagagc

SEQ ID NO: 375983 - DNA, 15 bp, Homo sapiens
gaatgctcctaagag

SEQ ID NO: 375984 - DNA, 15 bp, Homo sapiens
tgaatgctcctaaga

SEQ ID NO: 375985 - DNA, 15 bp, Homo sapiens
atgaatgctcctaag

SEQ ID NO: 375986 - DNA, 15 bp, Homo sapiens
gatgaatgctcctaa

SEQ ID NO: 375987 - DNA, 15 bp, Homo sapiens
ggatgaatgctccta

SEQ ID NO: 375988 - DNA, 15 bp, Homo sapiens
gggatgaatgctcct

SEQ ID NO: 375989 - DNA, 15 bp, Homo sapiens
ggggatgaatgctcc

SEQ ID NO: 375990 - DNA, 15 bp, Homo sapiens
tggggatgaatgctc

SEQ ID NO: 375991 - DNA, 15 bp, Homo sapiens
ctggggatgaatgct

SEQ ID NO: 375992 - DNA, 15 bp, Homo sapiens
cctggggatgaatgc

SEQ ID NO: 375993 - DNA, 15 bp, Homo sapiens
acctggggatgaatg

SEQ ID NO: 375994 - DNA, 15 bp, Homo sapiens
aacctggggatgaat

SEQ ID NO: 375995 - DNA, 15 bp, Homo sapiens
caacctggggatgaa

SEQ ID NO: 375996 - DNA, 15 bp, Homo sapiens
ccaacctggggatga

SEQ ID NO: 375997 - DNA, 15 bp, Homo sapiens
cccaacctggggatg

SEQ ID NO: 375998 - DNA, 15 bp, Homo sapiens
ccccaacctggggat

SEQ ID NO: 375999 - DNA, 15 bp, Homo sapiens
cccccaacctgggga

SEQ ID NO: 376000 - DNA, 15 bp, Homo sapiens
gcccccaacctgggg

SEQ ID NO: 376001 - DNA, 15 bp, Homo sapiens
agcccccaacctggg

SEQ ID NO: 376002 - DNA, 15 bp, Homo sapiens
aagcccccaacctgg

SEQ ID NO: 376003 - DNA, 15 bp, Homo sapiens
gaagcccccaacctg

SEQ ID NO: 376004 - DNA, 15 bp, Homo sapiens
tgaagcccccaacct

SEQ ID NO: 376005 - DNA, 15 bp, Homo sapiens
ctgaagcccccaacc

SEQ ID NO: 376006 - DNA, 15 bp, Homo sapiens
tctgaagcccccaac

SEQ ID NO: 376007 - DNA, 15 bp, Homo sapiens
gtctgaagcccccaa

SEQ ID NO: 376008 - DNA, 15 bp, Homo sapiens
agtctgaagccccca

SEQ ID NO: 376009 - DNA, 15 bp, Homo sapiens
gagtctgaagccccc

SEQ ID NO: 376010 - DNA, 15 bp, Homo sapiens
tgagtctgaagcccc

SEQ ID NO: 376011 - DNA, 15 bp, Homo sapiens
ctgagtctgaagccc

SEQ ID NO: 376012 - DNA, 15 bp, Homo sapiens
tctgagtctgaagcc

SEQ ID NO: 376013 - DNA, 15 bp, Homo sapiens
atctgagtctgaagc

SEQ ID NO: 376014 - DNA, 15 bp, Homo sapiens
catctgagtctgaag

SEQ ID NO: 376015 - DNA, 15 bp, Homo sapiens
gcatctgagtctgaa

SEQ ID NO: 376016 - DNA, 15 bp, Homo sapiens
agcatctgagtctga

SEQ ID NO: 376017 - DNA, 15 bp, Homo sapiens
aagcatctgagtctg

SEQ ID NO: 376018 - DNA, 15 bp, Homo sapiens
caagcatctgagtct

SEQ ID NO: 376019 - DNA, 15 bp, Homo sapiens
ccaagcatctgagtc

SEQ ID NO: 376020 - DNA, 15 bp, Homo sapiens
cccaagcatctgagt

SEQ ID NO: 376021 - DNA, 15 bp, Homo sapiens
ccccaagcatctgag

SEQ ID NO: 376022 - DNA, 15 bp, Homo sapiens
cccccaagcatctga

SEQ ID NO: 376023 - DNA, 15 bp, Homo sapiens
ccccccaagcatctg

SEQ ID NO: 376024 - DNA, 15 bp, Homo sapiens
accccccaagcatct

SEQ ID NO: 376025 - DNA, 15 bp, Homo sapiens
aaccccccaagcatc

SEQ ID NO: 376026 - DNA, 15 bp, Homo sapiens
aaaccccccaagcat

SEQ ID NO: 376027 - DNA, 15 bp, Homo sapiens
aaaaccccccaagca

SEQ ID NO: 376028 - DNA, 15 bp, Homo sapiens
caaaaccccccaagc

SEQ ID NO: 376029 - DNA, 15 bp, Homo sapiens
ccaaaaccccccaag

SEQ ID NO: 376030 - DNA, 15 bp, Homo sapiens
cccaaaaccccccaa

SEQ ID NO: 376031 - DNA, 15 bp, Homo sapiens
tcccaaaacccccca

SEQ ID NO: 376032 - DNA, 15 bp, Homo sapiens
ctcccaaaacccccc

SEQ ID NO: 376033 - DNA, 15 bp, Homo sapiens
cctcccaaaaccccc

SEQ ID NO: 376034 - DNA, 15 bp, Homo sapiens
acctcccaaaacccc

SEQ ID NO: 376035 - DNA, 15 bp, Homo sapiens
cacctcccaaaaccc

SEQ ID NO: 376036 - DNA, 15 bp, Homo sapiens
ccacctcccaaaacc

SEQ ID NO: 376037 - DNA, 15 bp, Homo sapiens
accacctcccaaaac

SEQ ID NO: 376038 - DNA, 15 bp, Homo sapiens
caccacctcccaaaa

SEQ ID NO: 376039 - DNA, 15 bp, Homo sapiens
acaccacctcccaaa

SEQ ID NO: 376040 - DNA, 15 bp, Homo sapiens
cacaccacctcccaa

SEQ ID NO: 376041 - DNA, 15 bp, Homo sapiens
ccacaccacctccca

SEQ ID NO: 376042 - DNA, 15 bp, Homo sapiens
cccacaccacctccc

SEQ ID NO: 376043 - DNA, 15 bp, Homo sapiens
tcccacaccacctcc

SEQ ID NO: 376044 - DNA, 15 bp, Homo sapiens
gtcccacaccacctc

SEQ ID NO: 376045 - DNA, 15 bp, Homo sapiens
ggtcccacaccacct

SEQ ID NO: 376046 - DNA, 15 bp, Homo sapiens
tggtcccacaccacc

SEQ ID NO: 376047 - DNA, 15 bp, Homo sapiens
ctggtcccacaccac

SEQ ID NO: 376048 - DNA, 15 bp, Homo sapiens
actggtcccacacca

SEQ ID NO: 376049 - DNA, 15 bp, Homo sapiens
aactggtcccacacc

SEQ ID NO: 376050 - DNA, 15 bp, Homo sapiens
aaactggtcccacac

SEQ ID NO: 376051 - DNA, 15 bp, Homo sapiens
caaactggtcccaca

SEQ ID NO: 376052 - DNA, 15 bp, Homo sapiens
ccaaactggtcccac

SEQ ID NO: 376053 - DNA, 15 bp, Homo sapiens
cccaaactggtccca

SEQ ID NO: 376054 - DNA, 15 bp, Homo sapiens
accaacggttgcctc

SEQ ID NO: 376055 - DNA, 15 bp, Homo sapiens
caccaacggttgcct

SEQ ID NO: 376056 - DNA, 15 bp, Homo sapiens
ccaccaacggttgcc

SEQ ID NO: 376057 - DNA, 15 bp, Homo sapiens
gccaccaacggttgc

SEQ ID NO: 376058 - DNA, 15 bp, Homo sapiens
cgccaccaacggttg

SEQ ID NO: 376059 - DNA, 15 bp, Homo sapiens
gcgccaccaacggtt

SEQ ID NO: 376060 - DNA, 15 bp, Homo sapiens
ggcgccaccaacggt

SEQ ID NO: 376061 - DNA, 15 bp, Homo sapiens
aggcgccaccaacgg

SEQ ID NO: 376062 - DNA, 15 bp, Homo sapiens
caggcgccaccaacg

SEQ ID NO: 376063 - DNA, 15 bp, Homo sapiens
ccaggcgccaccaac

SEQ ID NO: 376064 - DNA, 15 bp, Homo sapiens
cccaggcgccaccaa

SEQ ID NO: 376065 - DNA, 15 bp, Homo sapiens
acccaggcgccacca

SEQ ID NO: 376066 - DNA, 15 bp, Homo sapiens
gacccaggcgccacc

SEQ ID NO: 376067 - DNA, 15 bp, Homo sapiens
ggacccaggcgccac

SEQ ID NO: 376068 - DNA, 15 bp, Homo sapiens
aggacccaggcgcca

SEQ ID NO: 376069 - DNA, 15 bp, Homo sapiens
caggacccaggcgcc

SEQ ID NO: 376070 - DNA, 15 bp, Homo sapiens
tcaggacccaggcgc

SEQ ID NO: 376071 - DNA, 15 bp, Homo sapiens
ctcaggacccaggcg

SEQ ID NO: 376072 - DNA, 15 bp, Homo sapiens
cctcaggacccaggc

SEQ ID NO: 376073 - DNA, 15 bp, Homo sapiens
tcctcaggacccagg

SEQ ID NO: 376074 - DNA, 15 bp, Homo sapiens
ctcctcaggacccag

SEQ ID NO: 376075 - DNA, 15 bp, Homo sapiens
cctcctcaggaccca

SEQ ID NO: 376076 - DNA, 15 bp, Homo sapiens
ccctcctcaggaccc

SEQ ID NO: 376077 - DNA, 15 bp, Homo sapiens
tccctcctcaggacc

SEQ ID NO: 376078 - DNA, 15 bp, Homo sapiens
ctccctcctcaggac

SEQ ID NO: 376079 - DNA, 15 bp, Homo sapiens
cctccctcctcagga

SEQ ID NO: 376080 - DNA, 15 bp, Homo sapiens
tcctccctcctcagg

SEQ ID NO: 376081 - DNA, 15 bp, Homo sapiens
gtcctccctcctcag

SEQ ID NO: 376082 - DNA, 15 bp, Homo sapiens
ggtcctccctcctca

SEQ ID NO: 376083 - DNA, 15 bp, Homo sapiens
gggtcctccctcctc

SEQ ID NO: 376084 - DNA, 15 bp, Homo sapiens
agggtcctccctcct

SEQ ID NO: 376085 - DNA, 15 bp, Homo sapiens
cagggtcctccctcc

SEQ ID NO: 376086 - DNA, 15 bp, Homo sapiens
ccagggtcctccctc

SEQ ID NO: 376087 - DNA, 15 bp, Homo sapiens
tccagggtcctccct

SEQ ID NO: 376088 - DNA, 15 bp, Homo sapiens
gtccagggtcctccc

SEQ ID NO: 376089 - DNA, 15 bp, Homo sapiens
ggtccagggtcctcc

SEQ ID NO: 376090 - DNA, 15 bp, Homo sapiens
aggtccagggtcctc

SEQ ID NO: 376091 - DNA, 15 bp, Homo sapiens
caggtccagggtcct

SEQ ID NO: 376092 - DNA, 15 bp, Homo sapiens
ccaggtccagggtcc

SEQ ID NO: 376093 - DNA, 15 bp, Homo sapiens
gccaggtccagggtc

SEQ ID NO: 376094 - DNA, 15 bp, Homo sapiens
cgccaggtccagggt

SEQ ID NO: 376095 - DNA, 15 bp, Homo sapiens
acgccaggtccaggg

SEQ ID NO: 376096 - DNA, 15 bp, Homo sapiens
aacgccaggtccagg

SEQ ID NO: 376097 - DNA, 15 bp, Homo sapiens
taacgccaggtccag

SEQ ID NO: 376098 - DNA, 15 bp, Homo sapiens
ctaacgccaggtcca

SEQ ID NO: 376099 - DNA, 15 bp, Homo sapiens
gctaacgccaggtcc

SEQ ID NO: 376100 - DNA, 15 bp, Homo sapiens
cgctaacgccaggtc

SEQ ID NO: 376101 - DNA, 15 bp, Homo sapiens
tcgctaacgccaggt

SEQ ID NO: 376102 - DNA, 15 bp, Homo sapiens
ctcgctaacgccagg

SEQ ID NO: 376103 - DNA, 15 bp, Homo sapiens
cctcgctaacgccag

SEQ ID NO: 376104 - DNA, 15 bp, Homo sapiens
gcctcgctaacgcca

SEQ ID NO: 376105 - DNA, 15 bp, Homo sapiens
cgcctcgctaacgcc

SEQ ID NO: 376106 - DNA, 15 bp, Homo sapiens
acgcctcgctaacgc

SEQ ID NO: 376107 - DNA, 15 bp, Homo sapiens
cacgcctcgctaacg

SEQ ID NO: 376108 - DNA, 15 bp, Homo sapiens
ccacgcctcgctaac

SEQ ID NO: 376109 - DNA, 15 bp, Homo sapiens
accacgcctcgctaa

SEQ ID NO: 376110 - DNA, 15 bp, Homo sapiens
caccacgcctcgcta

SEQ ID NO: 376111 - DNA, 15 bp, Homo sapiens
tcaccacgcctcgct

SEQ ID NO: 376112 - DNA, 15 bp, Homo sapiens
atcaccacgcctcgc

SEQ ID NO: 376113 - DNA, 15 bp, Homo sapiens
catcaccacgcctcg

SEQ ID NO: 376114 - DNA, 15 bp, Homo sapiens
acatcaccacgcctc

SEQ ID NO: 376115 - DNA, 15 bp, Homo sapiens
aacatcaccacgcct

SEQ ID NO: 376116 - DNA, 15 bp, Homo sapiens
aaacatcaccacgcc

SEQ ID NO: 376117 - DNA, 15 bp, Homo sapiens
caaacatcaccacgc

SEQ ID NO: 376118 - DNA, 15 bp, Homo sapiens
gcaaacatcaccacg

SEQ ID NO: 376119 - DNA, 15 bp, Homo sapiens
cgcaaacatcaccac

SEQ ID NO: 376120 - DNA, 15 bp, Homo sapiens
gcgcaaacatcacca

SEQ ID NO: 376121 - DNA, 15 bp, Homo sapiens
agcgcaaacatcacc

SEQ ID NO: 376122 - DNA, 15 bp, Homo sapiens
gagcgcaaacatcac

SEQ ID NO: 376123 - DNA, 15 bp, Homo sapiens
ggagcgcaaacatca

SEQ ID NO: 376124 - DNA, 15 bp, Homo sapiens
gggagcgcaaacatc

SEQ ID NO: 376125 - DNA, 15 bp, Homo sapiens
tgggagcgcaaacat

SEQ ID NO: 376126 - DNA, 15 bp, Homo sapiens
ctgggagcgcaaaca

SEQ ID NO: 376127 - DNA, 15 bp, Homo sapiens
cctgggagcgcaaac

SEQ ID NO: 376128 - DNA, 15 bp, Homo sapiens
acctgggagcgcaaa

SEQ ID NO: 376129 - DNA, 15 bp, Homo sapiens
aacctgggagcgcaa

SEQ ID NO: 376130 - DNA, 15 bp, Homo sapiens
caacctgggagcgca

SEQ ID NO: 376131 - DNA, 15 bp, Homo sapiens
gcaacctgggagcgc

SEQ ID NO: 376132 - DNA, 15 bp, Homo sapiens
ggcaacctgggagcg

SEQ ID NO: 376133 - DNA, 15 bp, Homo sapiens
tggcaacctgggagc

SEQ ID NO: 376134 - DNA, 15 bp, Homo sapiens
ctggcaacctgggag

SEQ ID NO: 376135 - DNA, 15 bp, Homo sapiens
cctggcaacctggga

SEQ ID NO: 376136 - DNA, 15 bp, Homo sapiens
acctggcaacctggg

SEQ ID NO: 376137 - DNA, 15 bp, Homo sapiens
cacctggcaacctgg

SEQ ID NO: 376138 - DNA, 15 bp, Homo sapiens
gcacctggcaacctg

SEQ ID NO: 376139 - DNA, 15 bp, Homo sapiens
tgcacctggcaacct

SEQ ID NO: 376140 - DNA, 15 bp, Homo sapiens
ttgcacctggcaacc

SEQ ID NO: 376141 - DNA, 15 bp, Homo sapiens
cttgcacctggcaac

SEQ ID NO: 376142 - DNA, 15 bp, Homo sapiens
gcttgcacctggcaa

SEQ ID NO: 376143 - DNA, 15 bp, Homo sapiens
agcttgcacctggca

SEQ ID NO: 376144 - DNA, 15 bp, Homo sapiens
cagcttgcacctggc

SEQ ID NO: 376145 - DNA, 15 bp, Homo sapiens
acagcttgcacctgg

SEQ ID NO: 376146 - DNA, 15 bp, Homo sapiens
gacagcttgcacctg

SEQ ID NO: 376147 - DNA, 15 bp, Homo sapiens
agacagcttgcacct

SEQ ID NO: 376148 - DNA, 15 bp, Homo sapiens
cagacagcttgcacc

SEQ ID NO: 376149 - DNA, 15 bp, Homo sapiens
acagacagcttgcac

SEQ ID NO: 376150 - DNA, 15 bp, Homo sapiens
cacagacagcttgca

SEQ ID NO: 376151 - DNA, 15 bp, Homo sapiens
acacagacagcttgc

SEQ ID NO: 376152 - DNA, 15 bp, Homo sapiens
gacacagacagcttg

SEQ ID NO: 376153 - DNA, 15 bp, Homo sapiens
ggacacagacagctt

SEQ ID NO: 376154 - DNA, 15 bp, Homo sapiens
tggacacagacagct

SEQ ID NO: 376155 - DNA, 15 bp, Homo sapiens
gtggacacagacagc

SEQ ID NO: 376156 - DNA, 15 bp, Homo sapiens
tgtggacacagacag

SEQ ID NO: 376157 - DNA, 15 bp, Homo sapiens
atgtggacacagaca

SEQ ID NO: 376158 - DNA, 15 bp, Homo sapiens
aatgtggacacagac

SEQ ID NO: 376159 - DNA, 15 bp, Homo sapiens
aaatgtggacacaga

SEQ ID NO: 376160 - DNA, 15 bp, Homo sapiens
gaaatgtggacacag

SEQ ID NO: 376161 - DNA, 15 bp, Homo sapiens
agaaatgtggacaca

SEQ ID NO: 376162 - DNA, 15 bp, Homo sapiens
cagaaatgtggacac

SEQ ID NO: 376163 - DNA, 15 bp, Homo sapiens
gcagaaatgtggaca

SEQ ID NO: 376164 - DNA, 15 bp, Homo sapiens
ggcagaaatgtggac

SEQ ID NO: 376165 - DNA, 15 bp, Homo sapiens
gggcagaaatgtgga

SEQ ID NO: 376166 - DNA, 15 bp, Homo sapiens
agggcagaaatgtgg

SEQ ID NO: 376167 - DNA, 15 bp, Homo sapiens
aagggcagaaatgtg

SEQ ID NO: 376168 - DNA, 15 bp, Homo sapiens
gaagggcagaaatgt

SEQ ID NO: 376169 - DNA, 15 bp, Homo sapiens
tgaagggcagaaatg

SEQ ID NO: 376170 - DNA, 15 bp, Homo sapiens
atgaagggcagaaat

SEQ ID NO: 376171 - DNA, 15 bp, Homo sapiens
aatgaagggcagaaa

SEQ ID NO: 376172 - DNA, 15 bp, Homo sapiens
aaatgaagggcagaa

SEQ ID NO: 376173 - DNA, 15 bp, Homo sapiens
caaatgaagggcaga

SEQ ID NO: 376174 - DNA, 15 bp, Homo sapiens
gcaaatgaagggcag

SEQ ID NO: 376175 - DNA, 15 bp, Homo sapiens
ggcaaatgaagggca

SEQ ID NO: 376176 - DNA, 15 bp, Homo sapiens
gggcaaatgaagggc

SEQ ID NO: 376177 - DNA, 15 bp, Homo sapiens
ggggcaaatgaaggg

SEQ ID NO: 376178 - DNA, 15 bp, Homo sapiens
aggggcaaatgaagg

SEQ ID NO: 376179 - DNA, 15 bp, Homo sapiens
caggggcaaatgaag

SEQ ID NO: 376180 - DNA, 15 bp, Homo sapiens
tcaggggcaaatgaa

SEQ ID NO: 376181 - DNA, 15 bp, Homo sapiens
atcaggggcaaatga

SEQ ID NO: 376182 - DNA, 15 bp, Homo sapiens
aatcaggggcaaatg

SEQ ID NO: 376183 - DNA, 15 bp, Homo sapiens
caatcaggggcaaat

SEQ ID NO: 376184 - DNA, 15 bp, Homo sapiens
ccaatcaggggcaaa

SEQ ID NO: 376185 - DNA, 15 bp, Homo sapiens
gccaatcaggggcaa

SEQ ID NO: 376186 - DNA, 15 bp, Homo sapiens
tgccaatcaggggca

SEQ ID NO: 376187 - DNA, 15 bp, Homo sapiens
gtgccaatcaggggc

SEQ ID NO: 376188 - DNA, 15 bp, Homo sapiens
tgtgccaatcagggg

SEQ ID NO: 376189 - DNA, 15 bp, Homo sapiens
ctgtgccaatcaggg

SEQ ID NO: 376190 - DNA, 15 bp, Homo sapiens
cctgtgccaatcagg

SEQ ID NO: 376191 - DNA, 15 bp, Homo sapiens
ccctgtgccaatcag

SEQ ID NO: 376192 - DNA, 15 bp, Homo sapiens
tccctgtgccaatca

SEQ ID NO: 376193 - DNA, 15 bp, Homo sapiens
ctccctgtgccaatc

SEQ ID NO: 376194 - DNA, 15 bp, Homo sapiens
gctccctgtgccaat

SEQ ID NO: 376195 - DNA, 15 bp, Homo sapiens
ggctccctgtgccaa

SEQ ID NO: 376196 - DNA, 15 bp, Homo sapiens
aggctccctgtgcca

SEQ ID NO: 376197 - DNA, 15 bp, Homo sapiens
caggctccctgtgcc

SEQ ID NO: 376198 - DNA, 15 bp, Homo sapiens
gcaggctccctgtgc

SEQ ID NO: 376199 - DNA, 15 bp, Homo sapiens
tgcaggctccctgtg

SEQ ID NO: 376200 - DNA, 15 bp, Homo sapiens
ctgcaggctccctgt

SEQ ID NO: 376201 - DNA, 15 bp, Homo sapiens
cctgcaggctccctg

SEQ ID NO: 376202 - DNA, 15 bp, Homo sapiens
tcctgcaggctccct

SEQ ID NO: 376203 - DNA, 15 bp, Homo sapiens
ctcctgcaggctccc

SEQ ID NO: 376204 - DNA, 15 bp, Homo sapiens
cctcctgcaggctcc

SEQ ID NO: 376205 - DNA, 15 bp, Homo sapiens
gcctcctgcaggctc

SEQ ID NO: 376206 - DNA, 15 bp, Homo sapiens
cgcctcctgcaggct

SEQ ID NO: 376207 - DNA, 15 bp, Homo sapiens
ccgcctcctgcaggc

SEQ ID NO: 376208 - DNA, 15 bp, Homo sapiens
gccgcctcctgcagg

SEQ ID NO: 376209 - DNA, 15 bp, Homo sapiens
ggccgcctcctgcag

SEQ ID NO: 376210 - DNA, 15 bp, Homo sapiens
cggccgcctcctgca

SEQ ID NO: 376211 - DNA, 15 bp, Homo sapiens
acggccgcctcctgc

SEQ ID NO: 376212 - DNA, 15 bp, Homo sapiens
cacggccgcctcctg

SEQ ID NO: 376213 - DNA, 15 bp, Homo sapiens
gcacggccgcctcct

SEQ ID NO: 376214 - DNA, 15 bp, Homo sapiens
ggcacggccgcctcc

SEQ ID NO: 376215 - DNA, 15 bp, Homo sapiens
aggcacggccgcctc

SEQ ID NO: 376216 - DNA, 15 bp, Homo sapiens
caggcacggccgcct

SEQ ID NO: 376217 - DNA, 15 bp, Homo sapiens
gcaggcacggccgcc

SEQ ID NO: 376218 - DNA, 15 bp, Homo sapiens
ggcaggcacggccgc

SEQ ID NO: 376219 - DNA, 15 bp, Homo sapiens
gggcaggcacggccg

SEQ ID NO: 376220 - DNA, 15 bp, Homo sapiens
tgggcaggcacggcc

SEQ ID NO: 376221 - DNA, 15 bp, Homo sapiens
ctgggcaggcacggc

SEQ ID NO: 376222 - DNA, 15 bp, Homo sapiens
cctgggcaggcacgg

SEQ ID NO: 376223 - DNA, 15 bp, Homo sapiens
gcctgggcaggcacg

SEQ ID NO: 376224 - DNA, 15 bp, Homo sapiens
cgcctgggcaggcac

SEQ ID NO: 376225 - DNA, 15 bp, Homo sapiens
gcgcctgggcaggca

SEQ ID NO: 376226 - DNA, 15 bp, Homo sapiens
ggcgcctgggcaggc

SEQ ID NO: 376227 - DNA, 15 bp, Homo sapiens
gggcgcctgggcagg

SEQ ID NO: 376228 - DNA, 15 bp, Homo sapiens
agggcgcctgggcag

SEQ ID NO: 376229 - DNA, 15 bp, Homo sapiens
aagggcgcctgggca

SEQ ID NO: 376230 - DNA, 15 bp, Homo sapiens
gaagggcgcctgggc

SEQ ID NO: 376231 - DNA, 15 bp, Homo sapiens
ggaagggcgcctggg

SEQ ID NO: 376232 - DNA, 15 bp, Homo sapiens
aggaagggcgcctgg

SEQ ID NO: 376233 - DNA, 15 bp, Homo sapiens
gaggaagggcgcctg

SEQ ID NO: 376234 - DNA, 15 bp, Homo sapiens
ggaggaagggcgcct

SEQ ID NO: 376235 - DNA, 15 bp, Homo sapiens
gggaggaagggcgcc

SEQ ID NO: 376236 - DNA, 15 bp, Homo sapiens
ggggaggaagggcgc

SEQ ID NO: 376237 - DNA, 15 bp, Homo sapiens
tggggaggaagggcg

SEQ ID NO: 376238 - DNA, 15 bp, Homo sapiens
ttggggaggaagggc

SEQ ID NO: 376239 - DNA, 15 bp, Homo sapiens
gttggggaggaaggg

SEQ ID NO: 376240 - DNA, 15 bp, Homo sapiens
agttggggaggaagg

SEQ ID NO: 376241 - DNA, 15 bp, Homo sapiens
aagttggggaggaag

SEQ ID NO: 376242 - DNA, 15 bp, Homo sapiens
gaagttggggaggaa

SEQ ID NO: 376243 - DNA, 15 bp, Homo sapiens
agaagttggggagga

SEQ ID NO: 376244 - DNA, 15 bp, Homo sapiens
gagaagttggggagg

SEQ ID NO: 376245 - DNA, 15 bp, Homo sapiens
ggagaagttggggag

SEQ ID NO: 376246 - DNA, 15 bp, Homo sapiens
cggagaagttgggga

SEQ ID NO: 376247 - DNA, 15 bp, Homo sapiens
acggagaagttgggg

SEQ ID NO: 376248 - DNA, 15 bp, Homo sapiens
gacggagaagttggg

SEQ ID NO: 376249 - DNA, 15 bp, Homo sapiens
ggacggagaagttgg

SEQ ID NO: 376250 - DNA, 15 bp, Homo sapiens
aggacggagaagttg

SEQ ID NO: 376251 - DNA, 15 bp, Homo sapiens
gaggacggagaagtt

SEQ ID NO: 376252 - DNA, 15 bp, Homo sapiens
tgaggacggagaagt

SEQ ID NO: 376253 - DNA, 15 bp, Homo sapiens
ctgaggacggagaag

SEQ ID NO: 376254 - DNA, 15 bp, Homo sapiens
gctgaggacggagaa

SEQ ID NO: 376255 - DNA, 15 bp, Homo sapiens
ggctgaggacggaga

SEQ ID NO: 376256 - DNA, 15 bp, Homo sapiens
aggctgaggacggag

SEQ ID NO: 376257 - DNA, 15 bp, Homo sapiens
aaggctgaggacgga

SEQ ID NO: 376258 - DNA, 15 bp, Homo sapiens
gaaggctgaggacgg

SEQ ID NO: 376259 - DNA, 15 bp, Homo sapiens
agaaggctgaggacg

SEQ ID NO: 376260 - DNA, 15 bp, Homo sapiens
cagaaggctgaggac

SEQ ID NO: 376261 - DNA, 15 bp, Homo sapiens
gcagaaggctgagga

SEQ ID NO: 376262 - DNA, 15 bp, Homo sapiens
agcagaaggctgagg

SEQ ID NO: 376263 - DNA, 15 bp, Homo sapiens
gagcagaaggctgag

SEQ ID NO: 376264 - DNA, 15 bp, Homo sapiens
agagcagaaggctga

SEQ ID NO: 376265 - DNA, 15 bp, Homo sapiens
cagagcagaaggctg

SEQ ID NO: 376266 - DNA, 15 bp, Homo sapiens
gcagagcagaaggct

SEQ ID NO: 376267 - DNA, 15 bp, Homo sapiens
agcagagcagaaggc

SEQ ID NO: 376268 - DNA, 15 bp, Homo sapiens
cagcagagcagaagg

SEQ ID NO: 376269 - DNA, 15 bp, Homo sapiens
ccagcagagcagaag

SEQ ID NO: 376270 - DNA, 15 bp, Homo sapiens
tccagcagagcagaa

SEQ ID NO: 376271 - DNA, 15 bp, Homo sapiens
gtccagcagagcaga

SEQ ID NO: 376272 - DNA, 15 bp, Homo sapiens
ggtccagcagagcag

SEQ ID NO: 376273 - DNA, 15 bp, Homo sapiens
tggtccagcagagca

SEQ ID NO: 376274 - DNA, 15 bp, Homo sapiens
atggtccagcagagc

SEQ ID NO: 376275 - DNA, 15 bp, Homo sapiens
catggtccagcagag

SEQ ID NO: 376276 - DNA, 15 bp, Homo sapiens
ccatggtccagcaga

SEQ ID NO: 376277 - DNA, 15 bp, Homo sapiens
tccatggtccagcag

SEQ ID NO: 376278 - DNA, 15 bp, Homo sapiens
ctccatggtccagca

SEQ ID NO: 376279 - DNA, 15 bp, Homo sapiens
cctccatggtccagc

SEQ ID NO: 376280 - DNA, 15 bp, Homo sapiens
tcctccatggtccag

SEQ ID NO: 376281 - DNA, 15 bp, Homo sapiens
ctcctccatggtcca

SEQ ID NO: 376282 - DNA, 15 bp, Homo sapiens
cctcctccatggtcc

SEQ ID NO: 376283 - DNA, 15 bp, Homo sapiens
ccctcctccatggtc

SEQ ID NO: 376284 - DNA, 15 bp, Homo sapiens
cccctcctccatggt

SEQ ID NO: 376285 - DNA, 15 bp, Homo sapiens
ccccctcctccatgg

SEQ ID NO: 376286 - DNA, 15 bp, Homo sapiens
gccccctcctccatg

SEQ ID NO: 376287 - DNA, 15 bp, Homo sapiens
agccccctcctccat

SEQ ID NO: 376288 - DNA, 15 bp, Homo sapiens
cagccccctcctcca

SEQ ID NO: 376289 - DNA, 15 bp, Homo sapiens
tcagccccctcctcc

SEQ ID NO: 376290 - DNA, 15 bp, Homo sapiens
atcagccccctcctc

SEQ ID NO: 376291 - DNA, 15 bp, Homo sapiens
tatcagccccctcct

SEQ ID NO: 376292 - DNA, 15 bp, Homo sapiens
ctatcagccccctcc

SEQ ID NO: 376293 - DNA, 15 bp, Homo sapiens
cctatcagccccctc

SEQ ID NO: 376294 - DNA, 15 bp, Homo sapiens
gcctatcagccccct

SEQ ID NO: 376295 - DNA, 15 bp, Homo sapiens
ggcctatcagccccc

SEQ ID NO: 376296 - DNA, 15 bp, Homo sapiens
gggcctatcagcccc

SEQ ID NO: 376297 - DNA, 15 bp, Homo sapiens
cgggcctatcagccc

SEQ ID NO: 376298 - DNA, 15 bp, Homo sapiens
acgggcctatcagcc

SEQ ID NO: 376299 - DNA, 15 bp, Homo sapiens
cacgggcctatcagc

SEQ ID NO: 376300 - DNA, 15 bp, Homo sapiens
ccacgggcctatcag

SEQ ID NO: 376301 - DNA, 15 bp, Homo sapiens
gccacgggcctatca

SEQ ID NO: 376302 - DNA, 15 bp, Homo sapiens
ggccacgggcctatc

SEQ ID NO: 376303 - DNA, 15 bp, Homo sapiens
gggccacgggcctat

SEQ ID NO: 376304 - DNA, 15 bp, Homo sapiens
agggccacgggccta

SEQ ID NO: 376305 - DNA, 15 bp, Homo sapiens
cagggccacgggcct

SEQ ID NO: 376306 - DNA, 15 bp, Homo sapiens
acagggccacgggcc

SEQ ID NO: 376307 - DNA, 15 bp, Homo sapiens
aacagggccacgggc

SEQ ID NO: 376308 - DNA, 15 bp, Homo sapiens
caacagggccacggg

SEQ ID NO: 376309 - DNA, 15 bp, Homo sapiens
ccaacagggccacgg

SEQ ID NO: 376310 - DNA, 15 bp, Homo sapiens
tccaacagggccacg

SEQ ID NO: 376311 - DNA, 15 bp, Homo sapiens
gtccaacagggccac

SEQ ID NO: 376312 - DNA, 15 bp, Homo sapiens
agtccaacagggcca

SEQ ID NO: 376313 - DNA, 15 bp, Homo sapiens
aagtccaacagggcc

SEQ ID NO: 376314 - DNA, 15 bp, Homo sapiens
aaagtccaacagggc

SEQ ID NO: 376315 - DNA, 15 bp, Homo sapiens
caaagtccaacaggg

SEQ ID NO: 376316 - DNA, 15 bp, Homo sapiens
ccaaagtccaacagg

SEQ ID NO: 376317 - DNA, 15 bp, Homo sapiens
gccaaagtccaacag

SEQ ID NO: 376318 - DNA, 15 bp, Homo sapiens
tgccaaagtccaaca

SEQ ID NO: 376319 - DNA, 15 bp, Homo sapiens
ctgccaaagtccaac

SEQ ID NO: 376320 - DNA, 15 bp, Homo sapiens
tctgccaaagtccaa

SEQ ID NO: 376321 - DNA, 15 bp, Homo sapiens
ctctgccaaagtcca

SEQ ID NO: 376322 - DNA, 15 bp, Homo sapiens
cctctgccaaagtcc

SEQ ID NO: 376323 - DNA, 15 bp, Homo sapiens
tcctctgccaaagtc

SEQ ID NO: 376324 - DNA, 15 bp, Homo sapiens
ttcctctgccaaagt

SEQ ID NO: 376325 - DNA, 15 bp, Homo sapiens
attcctctgccaaag

SEQ ID NO: 376326 - DNA, 15 bp, Homo sapiens
tattcctctgccaaa

SEQ ID NO: 376327 - DNA, 15 bp, Homo sapiens
atattcctctgccaa

SEQ ID NO: 376328 - DNA, 15 bp, Homo sapiens
gatattcctctgcca

SEQ ID NO: 376329 - DNA, 15 bp, Homo sapiens
tgatattcctctgcc

SEQ ID NO: 376330 - DNA, 15 bp, Homo sapiens
gtgatattcctctgc

SEQ ID NO: 376331 - DNA, 15 bp, Homo sapiens
agtgatattcctctg

SEQ ID NO: 376332 - DNA, 15 bp, Homo sapiens
aagtgatattcctct

SEQ ID NO: 376333 - DNA, 15 bp, Homo sapiens
gaagtgatattcctc

SEQ ID NO: 376334 - DNA, 15 bp, Homo sapiens
tgaagtgatattcct

SEQ ID NO: 376335 - DNA, 15 bp, Homo sapiens
atgaagtgatattcc

SEQ ID NO: 376336 - DNA, 15 bp, Homo sapiens
aatgaagtgatattc

SEQ ID NO: 376337 - DNA, 15 bp, Homo sapiens
taatgaagtgatatt

SEQ ID NO: 376338 - DNA, 15 bp, Homo sapiens
ataatgaagtgatat

SEQ ID NO: 376339 - DNA, 15 bp, Homo sapiens
gataatgaagtgata

SEQ ID NO: 376340 - DNA, 15 bp, Homo sapiens
ggataatgaagtgat

SEQ ID NO: 376341 - DNA, 15 bp, Homo sapiens
tggataatgaagtga

SEQ ID NO: 376342 - DNA, 15 bp, Homo sapiens
ttggataatgaagtg

SEQ ID NO: 376343 - DNA, 15 bp, Homo sapiens
cttggataatgaagt

SEQ ID NO: 376344 - DNA, 15 bp, Homo sapiens
acttggataatgaag

SEQ ID NO: 376345 - DNA, 15 bp, Homo sapiens
cacttggataatgaa

SEQ ID NO: 376346 - DNA, 15 bp, Homo sapiens
gcacttggataatga

SEQ ID NO: 376347 - DNA, 15 bp, Homo sapiens
ggcacttggataatg

SEQ ID NO: 376348 - DNA, 15 bp, Homo sapiens
aggcacttggataat

SEQ ID NO: 376349 - DNA, 15 bp, Homo sapiens
gaggcacttggataa

SEQ ID NO: 376350 - DNA, 15 bp, Homo sapiens
tgaggcacttggata

SEQ ID NO: 376351 - DNA, 15 bp, Homo sapiens
gtgaggcacttggat

SEQ ID NO: 376352 - DNA, 15 bp, Homo sapiens
tgtgaggcacttgga

SEQ ID NO: 376353 - DNA, 15 bp, Homo sapiens
ctgtgaggcacttgg

SEQ ID NO: 376354 - DNA, 15 bp, Homo sapiens
tctgtgaggcacttg

SEQ ID NO: 376355 - DNA, 15 bp, Homo sapiens
ctctgtgaggcactt

SEQ ID NO: 376356 - DNA, 15 bp, Homo sapiens
tctctgtgaggcact

SEQ ID NO: 376357 - DNA, 15 bp, Homo sapiens
atctctgtgaggcac

SEQ ID NO: 376358 - DNA, 15 bp, Homo sapiens
catctctgtgaggca

SEQ ID NO: 376359 - DNA, 15 bp, Homo sapiens
tcatctctgtgaggc

SEQ ID NO: 376360 - DNA, 15 bp, Homo sapiens
ctcatctctgtgagg

SEQ ID NO: 376361 - DNA, 15 bp, Homo sapiens
tctcatctctgtgag

SEQ ID NO: 376362 - DNA, 15 bp, Homo sapiens
ctctcatctctgtga

SEQ ID NO: 376363 - DNA, 15 bp, Homo sapiens
gctctcatctctgtg

SEQ ID NO: 376364 - DNA, 15 bp, Homo sapiens
ggctctcatctctgt

SEQ ID NO: 376365 - DNA, 15 bp, Homo sapiens
cggctctcatctctg

SEQ ID NO: 376366 - DNA, 15 bp, Homo sapiens
ccggctctcatctct

SEQ ID NO: 376367 - DNA, 15 bp, Homo sapiens
accggctctcatctc

SEQ ID NO: 376368 - DNA, 15 bp, Homo sapiens
caccggctctcatct

SEQ ID NO: 376369 - DNA, 15 bp, Homo sapiens
ccaccggctctcatc

SEQ ID NO: 376370 - DNA, 15 bp, Homo sapiens
tccaccggctctcat

SEQ ID NO: 376371 - DNA, 15 bp, Homo sapiens
ctccaccggctctca

SEQ ID NO: 376372 - DNA, 15 bp, Homo sapiens
tctccaccggctctc

SEQ ID NO: 376373 - DNA, 15 bp, Homo sapiens
gtctccaccggctct

SEQ ID NO: 376374 - DNA, 15 bp, Homo sapiens
ggtctccaccggctc

SEQ ID NO: 376375 - DNA, 15 bp, Homo sapiens
gggtctccaccggct

SEQ ID NO: 376376 - DNA, 15 bp, Homo sapiens
cgggtctccaccggc

SEQ ID NO: 376377 - DNA, 15 bp, Homo sapiens
acgggtctccaccgg

SEQ ID NO: 376378 - DNA, 15 bp, Homo sapiens
gacgggtctccaccg

SEQ ID NO: 376379 - DNA, 15 bp, Homo sapiens
ggacgggtctccacc

SEQ ID NO: 376380 - DNA, 15 bp, Homo sapiens
aggacgggtctccac

SEQ ID NO: 376381 - DNA, 15 bp, Homo sapiens
gaggacgggtctcca

SEQ ID NO: 376382 - DNA, 15 bp, Homo sapiens
tgaggacgggtctcc

SEQ ID NO: 376383 - DNA, 15 bp, Homo sapiens
gtgaggacgggtctc

SEQ ID NO: 376384 - DNA, 15 bp, Homo sapiens
agtgaggacgggtct

SEQ ID NO: 376385 - DNA, 15 bp, Homo sapiens
gagtgaggacgggtc

SEQ ID NO: 376386 - DNA, 15 bp, Homo sapiens
cgagtgaggacgggt

SEQ ID NO: 376387 - DNA, 15 bp, Homo sapiens
gcgagtgaggacggg

SEQ ID NO: 376388 - DNA, 15 bp, Homo sapiens
ggcgagtgaggacgg

SEQ ID NO: 376389 - DNA, 15 bp, Homo sapiens
aggcgagtgaggacg

SEQ ID NO: 376390 - DNA, 15 bp, Homo sapiens
aaggcgagtgaggac

SEQ ID NO: 376391 - DNA, 15 bp, Homo sapiens
aaaggcgagtgagga

SEQ ID NO: 376392 - DNA, 15 bp, Homo sapiens
caaaggcgagtgagg

SEQ ID NO: 376393 - DNA, 15 bp, Homo sapiens
tcaaaggcgagtgag

SEQ ID NO: 376394 - DNA, 15 bp, Homo sapiens
gtcaaaggcgagtga

SEQ ID NO: 376395 - DNA, 15 bp, Homo sapiens
ggtcaaaggcgagtg

SEQ ID NO: 376396 - DNA, 15 bp, Homo sapiens
gggtcaaaggcgagt

SEQ ID NO: 376397 - DNA, 15 bp, Homo sapiens
ggggtcaaaggcgag

SEQ ID NO: 376398 - DNA, 15 bp, Homo sapiens
tggggtcaaaggcga

SEQ ID NO: 376399 - DNA, 15 bp, Homo sapiens
ctggggtcaaaggcg

SEQ ID NO: 376400 - DNA, 15 bp, Homo sapiens
gctggggtcaaaggc

SEQ ID NO: 376401 - DNA, 15 bp, Homo sapiens
agctggggtcaaagg

SEQ ID NO: 376402 - DNA, 15 bp, Homo sapiens
gagctggggtcaaag

SEQ ID NO: 376403 - DNA, 15 bp, Homo sapiens
ggagctggggtcaaa

SEQ ID NO: 376404 - DNA, 15 bp, Homo sapiens
gggagctggggtcaa

SEQ ID NO: 376405 - DNA, 15 bp, Homo sapiens
cgggagctggggtca

SEQ ID NO: 376406 - DNA, 15 bp, Homo sapiens
ccgggagctggggtc

SEQ ID NO: 376407 - DNA, 15 bp, Homo sapiens
accgggagctggggt

SEQ ID NO: 376408 - DNA, 15 bp, Homo sapiens
taccgggagctgggg

SEQ ID NO: 376409 - DNA, 15 bp, Homo sapiens
gtaccgggagctggg

SEQ ID NO: 376410 - DNA, 15 bp, Homo sapiens
ggtaccgggagctgg

SEQ ID NO: 376411 - DNA, 15 bp, Homo sapiens
gggtaccgggagctg

SEQ ID NO: 376412 - DNA, 15 bp, Homo sapiens
agggtaccgggagct

SEQ ID NO: 376413 - DNA, 15 bp, Homo sapiens
tagggtaccgggagc

SEQ ID NO: 376414 - DNA, 15 bp, Homo sapiens
ctagggtaccgggag

SEQ ID NO: 376415 - DNA, 15 bp, Homo sapiens
gctagggtaccggga

SEQ ID NO: 376416 - DNA, 15 bp, Homo sapiens
tgctagggtaccggg

SEQ ID NO: 376417 - DNA, 15 bp, Homo sapiens
ttgctagggtaccgg

SEQ ID NO: 376418 - DNA, 15 bp, Homo sapiens
attgctagggtaccg

SEQ ID NO: 376419 - DNA, 15 bp, Homo sapiens
aattgctagggtacc

SEQ ID NO: 376420 - DNA, 15 bp, Homo sapiens
caattgctagggtac

SEQ ID NO: 376421 - DNA, 15 bp, Homo sapiens
ccaattgctagggta

SEQ ID NO: 376422 - DNA, 15 bp, Homo sapiens
cccaattgctagggt

SEQ ID NO: 376423 - DNA, 15 bp, Homo sapiens
gcccaattgctaggg

SEQ ID NO: 376424 - DNA, 15 bp, Homo sapiens
tgcccaattgctagg

SEQ ID NO: 376425 - DNA, 15 bp, Homo sapiens
gtgcccaattgctag

SEQ ID NO: 376426 - DNA, 15 bp, Homo sapiens
tgtgcccaattgcta

SEQ ID NO: 376427 - DNA, 15 bp, Homo sapiens
atgtgcccaattgct

SEQ ID NO: 376428 - DNA, 15 bp, Homo sapiens
aatgtgcccaattgc

SEQ ID NO: 376429 - DNA, 15 bp, Homo sapiens
aaatgtgcccaattg

SEQ ID NO: 376430 - DNA, 15 bp, Homo sapiens
taaatgtgcccaatt

SEQ ID NO: 376431 - DNA, 15 bp, Homo sapiens
ttaaatgtgcccaat

SEQ ID NO: 376432 - DNA, 15 bp, Homo sapiens
gttaaatgtgcccaa

SEQ ID NO: 376433 - DNA, 15 bp, Homo sapiens
ggttaaatgtgccca

SEQ ID NO: 376434 - DNA, 15 bp, Homo sapiens
cggttaaatgtgccc

SEQ ID NO: 376435 - DNA, 15 bp, Homo sapiens
acggttaaatgtgcc

SEQ ID NO: 376436 - DNA, 15 bp, Homo sapiens
cacggttaaatgtgc

SEQ ID NO: 376437 - DNA, 15 bp, Homo sapiens
ccacggttaaatgtg

SEQ ID NO: 376438 - DNA, 15 bp, Homo sapiens
cccacggttaaatgt

SEQ ID NO: 376439 - DNA, 15 bp, Homo sapiens
acccacggttaaatg

SEQ ID NO: 376440 - DNA, 15 bp, Homo sapiens
gacccacggttaaat

SEQ ID NO: 376441 - DNA, 15 bp, Homo sapiens
tgacccacggttaaa

SEQ ID NO: 376442 - DNA, 15 bp, Homo sapiens
atgacccacggttaa

SEQ ID NO: 376443 - DNA, 15 bp, Homo sapiens
gatgacccacggtta

SEQ ID NO: 376444 - DNA, 15 bp, Homo sapiens
tgatgacccacggtt

SEQ ID NO: 376445 - DNA, 15 bp, Homo sapiens
ctgatgacccacggt

SEQ ID NO: 376446 - DNA, 15 bp, Homo sapiens
gctgatgacccacgg

SEQ ID NO: 376447 - DNA, 15 bp, Homo sapiens
agctgatgacccacg

SEQ ID NO: 376448 - DNA, 15 bp, Homo sapiens
cagctgatgacccac

SEQ ID NO: 376449 - DNA, 15 bp, Homo sapiens
tcagctgatgaccca

SEQ ID NO: 376450 - DNA, 15 bp, Homo sapiens
atcagctgatgaccc

SEQ ID NO: 376451 - DNA, 15 bp, Homo sapiens
catcagctgatgacc

SEQ ID NO: 376452 - DNA, 15 bp, Homo sapiens
ccatcagctgatgac

SEQ ID NO: 376453 - DNA, 15 bp, Homo sapiens
tccatcagctgatga

SEQ ID NO: 376454 - DNA, 15 bp, Homo sapiens
ctccatcagctgatg

SEQ ID NO: 376455 - DNA, 15 bp, Homo sapiens
gctccatcagctgat

SEQ ID NO: 376456 - DNA, 15 bp, Homo sapiens
agctccatcagctga

SEQ ID NO: 376457 - DNA, 15 bp, Homo sapiens
gagctccatcagctg

SEQ ID NO: 376458 - DNA, 15 bp, Homo sapiens
tgagctccatcagct

SEQ ID NO: 376459 - DNA, 15 bp, Homo sapiens
atgagctccatcagc

SEQ ID NO: 376460 - DNA, 15 bp, Homo sapiens
catgagctccatcag

SEQ ID NO: 376461 - DNA, 15 bp, Homo sapiens
acatgagctccatca

SEQ ID NO: 376462 - DNA, 15 bp, Homo sapiens
gacatgagctccatc

SEQ ID NO: 376463 - DNA, 15 bp, Homo sapiens
agacatgagctccat

SEQ ID NO: 376464 - DNA, 15 bp, Homo sapiens
aagacatgagctcca

SEQ ID NO: 376465 - DNA, 15 bp, Homo sapiens
aaagacatgagctcc

SEQ ID NO: 376466 - DNA, 15 bp, Homo sapiens
taaagacatgagctc

SEQ ID NO: 376467 - DNA, 15 bp, Homo sapiens
gtaaagacatgagct

SEQ ID NO: 376468 - DNA, 15 bp, Homo sapiens
agtaaagacatgagc

SEQ ID NO: 376469 - DNA, 15 bp, Homo sapiens
cagtaaagacatgag

SEQ ID NO: 376470 - DNA, 15 bp, Homo sapiens
ccagtaaagacatga

SEQ ID NO: 376471 - DNA, 15 bp, Homo sapiens
gccagtaaagacatg

SEQ ID NO: 376472 - DNA, 15 bp, Homo sapiens
agccagtaaagacat

SEQ ID NO: 376473 - DNA, 15 bp, Homo sapiens
aagccagtaaagaca

SEQ ID NO: 376474 - DNA, 15 bp, Homo sapiens
aaagccagtaaagac

SEQ ID NO: 376475 - DNA, 15 bp, Homo sapiens
aaaagccagtaaaga

SEQ ID NO: 376476 - DNA, 15 bp, Homo sapiens
aaaaagccagtaaag

SEQ ID NO: 376477 - DNA, 15 bp, Homo sapiens
aaaaaagccagtaaa

SEQ ID NO: 376478 - DNA, 15 bp, Homo sapiens
gaaaaaagccagtaa

SEQ ID NO: 376479 - DNA, 15 bp, Homo sapiens
ggaaaaaagccagta

SEQ ID NO: 376480 - DNA, 15 bp, Homo sapiens
gggaaaaaagccagt

SEQ ID NO: 376481 - DNA, 15 bp, Homo sapiens
ggggaaaaaagccag

SEQ ID NO: 376482 - DNA, 15 bp, Homo sapiens
tggggaaaaaagcca

SEQ ID NO: 376483 - DNA, 15 bp, Homo sapiens
ttggggaaaaaagcc

SEQ ID NO: 376484 - DNA, 15 bp, Homo sapiens
cttggggaaaaaagc

SEQ ID NO: 376485 - DNA, 15 bp, Homo sapiens
gcttggggaaaaaag

SEQ ID NO: 376486 - DNA, 15 bp, Homo sapiens
agcttggggaaaaaa

SEQ ID NO: 376487 - DNA, 15 bp, Homo sapiens
aagcttggggaaaaa

SEQ ID NO: 376488 - DNA, 15 bp, Homo sapiens
caagcttggggaaaa

SEQ ID NO: 376489 - DNA, 15 bp, Homo sapiens
gcaagcttggggaaa

SEQ ID NO: 376490 - DNA, 15 bp, Homo sapiens
ggcaagcttggggaa

SEQ ID NO: 376491 - DNA, 15 bp, Homo sapiens
gggcaagcttgggga

SEQ ID NO: 376492 - DNA, 15 bp, Homo sapiens
agggcaagcttgggg

SEQ ID NO: 376493 - DNA, 15 bp, Homo sapiens
aagggcaagcttggg

SEQ ID NO: 376494 - DNA, 15 bp, Homo sapiens
caagggcaagcttgg

SEQ ID NO: 376495 - DNA, 15 bp, Homo sapiens
acaagggcaagcttg

SEQ ID NO: 376496 - DNA, 15 bp, Homo sapiens
aacaagggcaagctt

SEQ ID NO: 376497 - DNA, 15 bp, Homo sapiens
gaacaagggcaagct

SEQ ID NO: 376498 - DNA, 15 bp, Homo sapiens
ggaacaagggcaagc

SEQ ID NO: 376499 - DNA, 15 bp, Homo sapiens
aggaacaagggcaag

SEQ ID NO: 376500 - DNA, 15 bp, Homo sapiens
taggaacaagggcaa

SEQ ID NO: 376501 - DNA, 15 bp, Homo sapiens
ttaggaacaagggca

SEQ ID NO: 376502 - DNA, 15 bp, Homo sapiens
tttaggaacaagggc

SEQ ID NO: 376503 - DNA, 15 bp, Homo sapiens
atttaggaacaaggg

SEQ ID NO: 376504 - DNA, 15 bp, Homo sapiens
catttaggaacaagg

SEQ ID NO: 376505 - DNA, 15 bp, Homo sapiens
ccatttaggaacaag

SEQ ID NO: 376506 - DNA, 15 bp, Homo sapiens
tccatttaggaacaa

SEQ ID NO: 376507 - DNA, 15 bp, Homo sapiens
ttccatttaggaaca

SEQ ID NO: 376508 - DNA, 15 bp, Homo sapiens
attccatttaggaac

SEQ ID NO: 376509 - DNA, 15 bp, Homo sapiens
gattccatttaggaa

SEQ ID NO: 376510 - DNA, 15 bp, Homo sapiens
agattccatttagga

SEQ ID NO: 376511 - DNA, 15 bp, Homo sapiens
aagattccatttagg

SEQ ID NO: 376512 - DNA, 15 bp, Homo sapiens
caagattccatttag

SEQ ID NO: 376513 - DNA, 15 bp, Homo sapiens
ccaagattccattta

SEQ ID NO: 376514 - DNA, 15 bp, Homo sapiens
cccaagattccattt

SEQ ID NO: 376515 - DNA, 15 bp, Homo sapiens
ccccaagattccatt

SEQ ID NO: 376516 - DNA, 15 bp, Homo sapiens
cccccaagattccat

SEQ ID NO: 376517 - DNA, 15 bp, Homo sapiens
tcccccaagattcca

SEQ ID NO: 376518 - DNA, 15 bp, Homo sapiens
gtcccccaagattcc

SEQ ID NO: 376519 - DNA, 15 bp, Homo sapiens
ggtcccccaagattc

SEQ ID NO: 376520 - DNA, 15 bp, Homo sapiens
gggtcccccaagatt

SEQ ID NO: 376521 - DNA, 15 bp, Homo sapiens
ggggtcccccaagat

SEQ ID NO: 376522 - DNA, 15 bp, Homo sapiens
gggggtcccccaaga

SEQ ID NO: 376523 - DNA, 15 bp, Homo sapiens
agggggtcccccaag

SEQ ID NO: 376524 - DNA, 15 bp, Homo sapiens
gagggggtcccccaa

SEQ ID NO: 376525 - DNA, 15 bp, Homo sapiens
ggagggggtccccca

SEQ ID NO: 376526 - DNA, 15 bp, Homo sapiens
gggagggggtccccc

SEQ ID NO: 376527 - DNA, 15 bp, Homo sapiens
ggggagggggtcccc

SEQ ID NO: 376528 - DNA, 15 bp, Homo sapiens
tggggagggggtccc

SEQ ID NO: 376529 - DNA, 15 bp, Homo sapiens
gtggggagggggtcc

SEQ ID NO: 376530 - DNA, 15 bp, Homo sapiens
tgtggggagggggtc

SEQ ID NO: 376531 - DNA, 15 bp, Homo sapiens
ttgtggggagggggt

SEQ ID NO: 376532 - DNA, 15 bp, Homo sapiens
cttgtggggaggggg

SEQ ID NO: 376533 - DNA, 15 bp, Homo sapiens
acttgtggggagggg

SEQ ID NO: 376534 - DNA, 15 bp, Homo sapiens
tacttgtggggaggg

SEQ ID NO: 376535 - DNA, 15 bp, Homo sapiens
gtacttgtggggagg

SEQ ID NO: 376536 - DNA, 15 bp, Homo sapiens
cgtacttgtggggag

SEQ ID NO: 376537 - DNA, 15 bp, Homo sapiens
acgtacttgtgggga

SEQ ID NO: 376538 - DNA, 15 bp, Homo sapiens
aacgtacttgtgggg

SEQ ID NO: 376539 - DNA, 15 bp, Homo sapiens
gaacgtacttgtggg

SEQ ID NO: 376540 - DNA, 15 bp, Homo sapiens
agaacgtacttgtgg

SEQ ID NO: 376541 - DNA, 15 bp, Homo sapiens
aagaacgtacttgtg

SEQ ID NO: 376542 - DNA, 15 bp, Homo sapiens
aaagaacgtacttgt

SEQ ID NO: 376543 - DNA, 15 bp, Homo sapiens
caaagaacgtacttg

SEQ ID NO: 376544 - DNA, 15 bp, Homo sapiens
acaaagaacgtactt

SEQ ID NO: 376545 - DNA, 15 bp, Homo sapiens
cacaaagaacgtact

SEQ ID NO: 376546 - DNA, 15 bp, Homo sapiens
acacaaagaacgtac

SEQ ID NO: 376547 - DNA, 15 bp, Homo sapiens
cacacaaagaacgta

SEQ ID NO: 376548 - DNA, 15 bp, Homo sapiens
acacacaaagaacgt

SEQ ID NO: 376549 - DNA, 15 bp, Homo sapiens
gacacacaaagaacg

SEQ ID NO: 376550 - DNA, 15 bp, Homo sapiens
agacacacaaagaac

SEQ ID NO: 376551 - DNA, 15 bp, Homo sapiens
cagacacacaaagaa

SEQ ID NO: 376552 - DNA, 15 bp, Homo sapiens
ccagacacacaaaga

SEQ ID NO: 376553 - DNA, 15 bp, Homo sapiens
cccagacacacaaag

SEQ ID NO: 376554 - DNA, 15 bp, Homo sapiens
gcccagacacacaaa

SEQ ID NO: 376555 - DNA, 15 bp, Homo sapiens
ggcccagacacacaa

SEQ ID NO: 376556 - DNA, 15 bp, Homo sapiens
gggcccagacacaca

SEQ ID NO: 376557 - DNA, 15 bp, Homo sapiens
tgggcccagacacac

SEQ ID NO: 376558 - DNA, 15 bp, Homo sapiens
ctgggcccagacaca

SEQ ID NO: 376559 - DNA, 15 bp, Homo sapiens
actgggcccagacac

SEQ ID NO: 376560 - DNA, 15 bp, Homo sapiens
gactgggcccagaca

SEQ ID NO: 376561 - DNA, 15 bp, Homo sapiens
tgactgggcccagac

SEQ ID NO: 376562 - DNA, 15 bp, Homo sapiens
ctgactgggcccaga

SEQ ID NO: 376563 - DNA, 15 bp, Homo sapiens
cctgactgggcccag

SEQ ID NO: 376564 - DNA, 15 bp, Homo sapiens
gcctgactgggccca

SEQ ID NO: 376565 - DNA, 15 bp, Homo sapiens
ggcctgactgggccc

SEQ ID NO: 376566 - DNA, 15 bp, Homo sapiens
gggcctgactgggcc

SEQ ID NO: 376567 - DNA, 15 bp, Homo sapiens
tgggcctgactgggc

SEQ ID NO: 376568 - DNA, 15 bp, Homo sapiens
ctgggcctgactggg

SEQ ID NO: 376569 - DNA, 15 bp, Homo sapiens
tctgggcctgactgg

SEQ ID NO: 376570 - DNA, 15 bp, Homo sapiens
atctgggcctgactg

SEQ ID NO: 376571 - DNA, 15 bp, Homo sapiens
tatctgggcctgact

SEQ ID NO: 376572 - DNA, 15 bp, Homo sapiens
ctatctgggcctgac

SEQ ID NO: 376573 - DNA, 15 bp, Homo sapiens
gctatctgggcctga

SEQ ID NO: 376574 - DNA, 15 bp, Homo sapiens
agctatctgggcctg

SEQ ID NO: 376575 - DNA, 15 bp, Homo sapiens
aagctatctgggcct

SEQ ID NO: 376576 - DNA, 15 bp, Homo sapiens
gaagctatctgggcc

SEQ ID NO: 376577 - DNA, 15 bp, Homo sapiens
agaagctatctgggc

SEQ ID NO: 376578 - DNA, 15 bp, Homo sapiens
gagaagctatctggg

SEQ ID NO: 376579 - DNA, 15 bp, Homo sapiens
agagaagctatctgg

SEQ ID NO: 376580 - DNA, 15 bp, Homo sapiens
aagagaagctatctg

SEQ ID NO: 376581 - DNA, 15 bp, Homo sapiens
gaagagaagctatct

SEQ ID NO: 376582 - DNA, 15 bp, Homo sapiens
ggaagagaagctatc

SEQ ID NO: 376583 - DNA, 15 bp, Homo sapiens
tggaagagaagctat

SEQ ID NO: 376584 - DNA, 15 bp, Homo sapiens
gtggaagagaagcta

SEQ ID NO: 376585 - DNA, 15 bp, Homo sapiens
cgtggaagagaagct

SEQ ID NO: 376586 - DNA, 15 bp, Homo sapiens
gcgtggaagagaagc

SEQ ID NO: 376587 - DNA, 15 bp, Homo sapiens
cgcgtggaagagaag

SEQ ID NO: 376588 - DNA, 15 bp, Homo sapiens
acgcgtggaagagaa

SEQ ID NO: 376589 - DNA, 15 bp, Homo sapiens
cacgcgtggaagaga

SEQ ID NO: 376590 - DNA, 15 bp, Homo sapiens
gcacgcgtggaagag

SEQ ID NO: 376591 - DNA, 15 bp, Homo sapiens
ggcacgcgtggaaga

SEQ ID NO: 376592 - DNA, 15 bp, Homo sapiens
gggcacgcgtggaag

SEQ ID NO: 376593 - DNA, 15 bp, Homo sapiens
cgggcacgcgtggaa

SEQ ID NO: 376594 - DNA, 15 bp, Homo sapiens
acgggcacgcgtgga

SEQ ID NO: 376595 - DNA, 15 bp, Homo sapiens
cacgggcacgcgtgg

SEQ ID NO: 376596 - DNA, 15 bp, Homo sapiens
acacgggcacgcgtg

SEQ ID NO: 376597 - DNA, 15 bp, Homo sapiens
aacacgggcacgcgt

SEQ ID NO: 376598 - DNA, 15 bp, Homo sapiens
gaacacgggcacgcg

SEQ ID NO: 376599 - DNA, 15 bp, Homo sapiens
agaacacgggcacgc

SEQ ID NO: 376600 - DNA, 15 bp, Homo sapiens
gagaacacgggcacg

SEQ ID NO: 376601 - DNA, 15 bp, Homo sapiens
tgagaacacgggcac

SEQ ID NO: 376602 - DNA, 15 bp, Homo sapiens
atgagaacacgggca

SEQ ID NO: 376603 - DNA, 15 bp, Homo sapiens
tatgagaacacgggc

SEQ ID NO: 376604 - DNA, 15 bp, Homo sapiens
ttatgagaacacggg

SEQ ID NO: 376605 - DNA, 15 bp, Homo sapiens
gttatgagaacacgg

SEQ ID NO: 376606 - DNA, 15 bp, Homo sapiens
ggttatgagaacacg

SEQ ID NO: 376607 - DNA, 15 bp, Homo sapiens
gggttatgagaacac

SEQ ID NO: 376608 - DNA, 15 bp, Homo sapiens
ggggttatgagaaca

SEQ ID NO: 376609 - DNA, 15 bp, Homo sapiens
tggggttatgagaac

SEQ ID NO: 376610 - DNA, 15 bp, Homo sapiens
atggggttatgagaa

SEQ ID NO: 376611 - DNA, 15 bp, Homo sapiens
catggggttatgaga

SEQ ID NO: 376612 - DNA, 15 bp, Homo sapiens
ccatggggttatgag

SEQ ID NO: 376613 - DNA, 15 bp, Homo sapiens
gccatggggttatga

SEQ ID NO: 376614 - DNA, 15 bp, Homo sapiens
agccatggggttatg

SEQ ID NO: 376615 - DNA, 15 bp, Homo sapiens
cagccatggggttat

SEQ ID NO: 376616 - DNA, 15 bp, Homo sapiens
acagccatggggtta

SEQ ID NO: 376617 - DNA, 15 bp, Homo sapiens
aacagccatggggtt

SEQ ID NO: 376618 - DNA, 15 bp, Homo sapiens
gaacagccatggggt

SEQ ID NO: 376619 - DNA, 15 bp, Homo sapiens
agaacagccatgggg

SEQ ID NO: 376620 - DNA, 15 bp, Homo sapiens
aagaacagccatggg

SEQ ID NO: 376621 - DNA, 15 bp, Homo sapiens
caagaacagccatgg

SEQ ID NO: 376622 - DNA, 15 bp, Homo sapiens
ccaagaacagccatg

SEQ ID NO: 376623 - DNA, 15 bp, Homo sapiens
tccaagaacagccat

SEQ ID NO: 376624 - DNA, 15 bp, Homo sapiens
ctccaagaacagcca

SEQ ID NO: 376625 - DNA, 15 bp, Homo sapiens
gctccaagaacagcc

SEQ ID NO: 376626 - DNA, 15 bp, Homo sapiens
agctccaagaacagc

SEQ ID NO: 376627 - DNA, 15 bp, Homo sapiens
cagctccaagaacag

SEQ ID NO: 376628 - DNA, 15 bp, Homo sapiens
gcagctccaagaaca

SEQ ID NO: 376629 - DNA, 15 bp, Homo sapiens
agcagctccaagaac

SEQ ID NO: 376630 - DNA, 15 bp, Homo sapiens
gagcagctccaagaa

SEQ ID NO: 376631 - DNA, 15 bp, Homo sapiens
agagcagctccaaga

SEQ ID NO: 376632 - DNA, 15 bp, Homo sapiens
cagagcagctccaag

SEQ ID NO: 376633 - DNA, 15 bp, Homo sapiens
gcagagcagctccaa

SEQ ID NO: 376634 - DNA, 15 bp, Homo sapiens
ggcagagcagctcca

SEQ ID NO: 376635 - DNA, 15 bp, Homo sapiens
aggcagagcagctcc

SEQ ID NO: 376636 - DNA, 15 bp, Homo sapiens
gaggcagagcagctc

SEQ ID NO: 376637 - DNA, 15 bp, Homo sapiens
agaggcagagcagct

SEQ ID NO: 376638 - DNA, 15 bp, Homo sapiens
gagaggcagagcagc

SEQ ID NO: 376639 - DNA, 15 bp, Homo sapiens
agagaggcagagcag

SEQ ID NO: 376640 - DNA, 15 bp, Homo sapiens
cagagaggcagagca

SEQ ID NO: 376641 - DNA, 15 bp, Homo sapiens
gcagagaggcagagc

SEQ ID NO: 376642 - DNA, 15 bp, Homo sapiens
ggcagagaggcagag

SEQ ID NO: 376643 - DNA, 15 bp, Homo sapiens
gggcagagaggcaga

SEQ ID NO: 376644 - DNA, 15 bp, Homo sapiens
agggcagagaggcag

SEQ ID NO: 376645 - DNA, 15 bp, Homo sapiens
gagggcagagaggca

SEQ ID NO: 376646 - DNA, 15 bp, Homo sapiens
agagggcagagaggc

SEQ ID NO: 376647 - DNA, 15 bp, Homo sapiens
cagagggcagagagg

SEQ ID NO: 376648 - DNA, 15 bp, Homo sapiens
gcagagggcagagag

SEQ ID NO: 376649 - DNA, 15 bp, Homo sapiens
ggcagagggcagaga

SEQ ID NO: 376650 - DNA, 15 bp, Homo sapiens
aggcagagggcagag

SEQ ID NO: 376651 - DNA, 15 bp, Homo sapiens
aaggcagagggcaga

SEQ ID NO: 376652 - DNA, 15 bp, Homo sapiens
gaaggcagagggcag

SEQ ID NO: 376653 - DNA, 15 bp, Homo sapiens
tgaaggcagagggca

SEQ ID NO: 376654 - DNA, 15 bp, Homo sapiens
ctgaaggcagagggc

SEQ ID NO: 376655 - DNA, 15 bp, Homo sapiens
cctgaaggcagaggg

SEQ ID NO: 376656 - DNA, 15 bp, Homo sapiens
acctgaaggcagagg

SEQ ID NO: 376657 - DNA, 15 bp, Homo sapiens
cacctgaaggcagag

SEQ ID NO: 376658 - DNA, 15 bp, Homo sapiens
ccacctgaaggcaga

SEQ ID NO: 376659 - DNA, 15 bp, Homo sapiens
tccacctgaaggcag

SEQ ID NO: 376660 - DNA, 15 bp, Homo sapiens
ctccacctgaaggca

SEQ ID NO: 376661 - DNA, 15 bp, Homo sapiens
tctccacctgaaggc

SEQ ID NO: 376662 - DNA, 15 bp, Homo sapiens
ttctccacctgaagg

SEQ ID NO: 376663 - DNA, 15 bp, Homo sapiens
attctccacctgaag

SEQ ID NO: 376664 - DNA, 15 bp, Homo sapiens
cattctccacctgaa

SEQ ID NO: 376665 - DNA, 15 bp, Homo sapiens
ccattctccacctga

SEQ ID NO: 376666 - DNA, 15 bp, Homo sapiens
accattctccacctg

SEQ ID NO: 376667 - DNA, 15 bp, Homo sapiens
taccattctccacct

SEQ ID NO: 376668 - DNA, 15 bp, Homo sapiens
ataccattctccacc

SEQ ID NO: 376669 - DNA, 15 bp, Homo sapiens
aataccattctccac

SEQ ID NO: 376670 - DNA, 15 bp, Homo sapiens
caataccattctcca

SEQ ID NO: 376671 - DNA, 15 bp, Homo sapiens
acaataccattctcc

SEQ ID NO: 376672 - DNA, 15 bp, Homo sapiens
aacaataccattctc

SEQ ID NO: 376673 - DNA, 15 bp, Homo sapiens
caacaataccattct

SEQ ID NO: 376674 - DNA, 15 bp, Homo sapiens
tcaacaataccattc

SEQ ID NO: 376675 - DNA, 15 bp, Homo sapiens
ctcaacaataccatt

SEQ ID NO: 376676 - DNA, 15 bp, Homo sapiens
cctcaacaataccat

SEQ ID NO: 376677 - DNA, 15 bp, Homo sapiens
gcctcaacaatacca

SEQ ID NO: 376678 - DNA, 15 bp, Homo sapiens
tgcctcaacaatacc

SEQ ID NO: 376679 - DNA, 15 bp, Homo sapiens
gtgcctcaacaatac

SEQ ID NO: 376680 - DNA, 15 bp, Homo sapiens
agtgcctcaacaata

SEQ ID NO: 376681 - DNA, 15 bp, Homo sapiens
cagtgcctcaacaat

SEQ ID NO: 376682 - DNA, 15 bp, Homo sapiens
tcagtgcctcaacaa

SEQ ID NO: 376683 - DNA, 15 bp, Homo sapiens
ctcagtgcctcaaca

SEQ ID NO: 376684 - DNA, 15 bp, Homo sapiens
gctcagtgcctcaac

SEQ ID NO: 376685 - DNA, 15 bp, Homo sapiens
tgctcagtgcctcaa

SEQ ID NO: 376686 - DNA, 15 bp, Homo sapiens
ttgctcagtgcctca

SEQ ID NO: 376687 - DNA, 15 bp, Homo sapiens
cttgctcagtgcctc

SEQ ID NO: 376688 - DNA, 15 bp, Homo sapiens
ccttgctcagtgcct

SEQ ID NO: 376689 - DNA, 15 bp, Homo sapiens
gccttgctcagtgcc

SEQ ID NO: 376690 - DNA, 15 bp, Homo sapiens
ggccttgctcagtgc

SEQ ID NO: 376691 - DNA, 15 bp, Homo sapiens
aggccttgctcagtg

SEQ ID NO: 376692 - DNA, 15 bp, Homo sapiens
aaggccttgctcagt

SEQ ID NO: 376693 - DNA, 15 bp, Homo sapiens
aaaggccttgctcag

SEQ ID NO: 376694 - DNA, 15 bp, Homo sapiens
gaaaggccttgctca

SEQ ID NO: 376695 - DNA, 15 bp, Homo sapiens
ggaaaggccttgctc

SEQ ID NO: 376696 - DNA, 15 bp, Homo sapiens
gggaaaggccttgct

SEQ ID NO: 376697 - DNA, 15 bp, Homo sapiens
ggggaaaggccttgc

SEQ ID NO: 376698 - DNA, 15 bp, Homo sapiens
gggggaaaggccttg

SEQ ID NO: 376699 - DNA, 15 bp, Homo sapiens
ggggggaaaggcctt

SEQ ID NO: 376700 - DNA, 15 bp, Homo sapiens
aggggggaaaggcct

SEQ ID NO: 376701 - DNA, 15 bp, Homo sapiens
gaggggggaaaggcc

SEQ ID NO: 376702 - DNA, 15 bp, Homo sapiens
ggaggggggaaaggc

SEQ ID NO: 376703 - DNA, 15 bp, Homo sapiens
aggaggggggaaagg

SEQ ID NO: 376704 - DNA, 15 bp, Homo sapiens
gaggaggggggaaag

SEQ ID NO: 376705 - DNA, 15 bp, Homo sapiens
ggaggaggggggaaa

SEQ ID NO: 376706 - DNA, 15 bp, Homo sapiens
gggaggaggggggaa

SEQ ID NO: 376707 - DNA, 15 bp, Homo sapiens
tgggaggagggggga

SEQ ID NO: 376708 - DNA, 15 bp, Homo sapiens
atgggaggagggggg

SEQ ID NO: 376709 - DNA, 15 bp, Homo sapiens
aatgggaggaggggg

SEQ ID NO: 376710 - DNA, 15 bp, Homo sapiens
aaatgggaggagggg

SEQ ID NO: 376711 - DNA, 15 bp, Homo sapiens
aaaatgggaggaggg

SEQ ID NO: 376712 - DNA, 15 bp, Homo sapiens
aaaaatgggaggagg

SEQ ID NO: 376713 - DNA, 15 bp, Homo sapiens
gaaaaatgggaggag

SEQ ID NO: 376714 - DNA, 15 bp, Homo sapiens
agaaaaatgggagga

SEQ ID NO: 376715 - DNA, 15 bp, Homo sapiens
aagaaaaatgggagg

SEQ ID NO: 376716 - DNA, 15 bp, Homo sapiens
gaagaaaaatgggag

SEQ ID NO: 376717 - DNA, 15 bp, Homo sapiens
agaagaaaaatggga

SEQ ID NO: 376718 - DNA, 15 bp, Homo sapiens
aagaagaaaaatggg

SEQ ID NO: 376719 - DNA, 15 bp, Homo sapiens
aaagaagaaaaatgg

SEQ ID NO: 376720 - DNA, 15 bp, Homo sapiens
gaaagaagaaaaatg

SEQ ID NO: 376721 - DNA, 15 bp, Homo sapiens
agaaagaagaaaaat

SEQ ID NO: 376722 - DNA, 15 bp, Homo sapiens
gagaaagaagaaaaa

SEQ ID NO: 376723 - DNA, 15 bp, Homo sapiens
tgagaaagaagaaaa

SEQ ID NO: 376724 - DNA, 15 bp, Homo sapiens
atgagaaagaagaaa

SEQ ID NO: 376725 - DNA, 15 bp, Homo sapiens
gatgagaaagaagaa

SEQ ID NO: 376726 - DNA, 15 bp, Homo sapiens
agatgagaaagaaga

SEQ ID NO: 376727 - DNA, 15 bp, Homo sapiens
gagatgagaaagaag

SEQ ID NO: 376728 - DNA, 15 bp, Homo sapiens
ggagatgagaaagaa

SEQ ID NO: 376729 - DNA, 15 bp, Homo sapiens
aggagatgagaaaga

SEQ ID NO: 376730 - DNA, 15 bp, Homo sapiens
caggagatgagaaag

SEQ ID NO: 376731 - DNA, 15 bp, Homo sapiens
tcaggagatgagaaa

SEQ ID NO: 376732 - DNA, 15 bp, Homo sapiens
gtcaggagatgagaa

SEQ ID NO: 376733 - DNA, 15 bp, Homo sapiens
cgtcaggagatgaga

SEQ ID NO: 376734 - DNA, 15 bp, Homo sapiens
gcgtcaggagatgag

SEQ ID NO: 376735 - DNA, 15 bp, Homo sapiens
ggcgtcaggagatga

SEQ ID NO: 376736 - DNA, 15 bp, Homo sapiens
aggcgtcaggagatg

SEQ ID NO: 376737 - DNA, 15 bp, Homo sapiens
aaggcgtcaggagat

SEQ ID NO: 376738 - DNA, 15 bp, Homo sapiens
gaaggcgtcaggaga

SEQ ID NO: 376739 - DNA, 15 bp, Homo sapiens
tgaaggcgtcaggag

SEQ ID NO: 376740 - DNA, 15 bp, Homo sapiens
ttgaaggcgtcagga

SEQ ID NO: 376741 - DNA, 15 bp, Homo sapiens
tttgaaggcgtcagg

SEQ ID NO: 376742 - DNA, 15 bp, Homo sapiens
atttgaaggcgtcag

SEQ ID NO: 376743 - DNA, 15 bp, Homo sapiens
aatttgaaggcgtca

SEQ ID NO: 376744 - DNA, 15 bp, Homo sapiens
taatttgaaggcgtc

SEQ ID NO: 376745 - DNA, 15 bp, Homo sapiens
ttaatttgaaggcgt

SEQ ID NO: 376746 - DNA, 15 bp, Homo sapiens
tttaatttgaaggcg

SEQ ID NO: 376747 - DNA, 15 bp, Homo sapiens
ttttaatttgaaggc

SEQ ID NO: 376748 - DNA, 15 bp, Homo sapiens
tttttaatttgaagg

SEQ ID NO: 376749 - DNA, 15 bp, Homo sapiens
atttttaatttgaag

SEQ ID NO: 376750 - DNA, 15 bp, Homo sapiens
aatttttaatttgaa

SEQ ID NO: 376751 - DNA, 15 bp, Homo sapiens
aaatttttaatttga

SEQ ID NO: 376752 - DNA, 15 bp, Homo sapiens
taaatttttaatttg

SEQ ID NO: 376753 - DNA, 15 bp, Homo sapiens
ttaaatttttaattt

SEQ ID NO: 376754 - DNA, 15 bp, Homo sapiens
cttaaatttttaatt

SEQ ID NO: 376755 - DNA, 15 bp, Homo sapiens
tcttaaatttttaat

SEQ ID NO: 376756 - DNA, 15 bp, Homo sapiens
ttcttaaatttttaa

SEQ ID NO: 376757 - DNA, 15 bp, Homo sapiens
cttcttaaattttta

SEQ ID NO: 376758 - DNA, 15 bp, Homo sapiens
ccttcttaaattttt

SEQ ID NO: 376759 - DNA, 15 bp, Homo sapiens
cccttcttaaatttt

SEQ ID NO: 376760 - DNA, 15 bp, Homo sapiens
ccccttcttaaattt

SEQ ID NO: 376761 - DNA, 15 bp, Homo sapiens
accccttcttaaatt

SEQ ID NO: 376762 - DNA, 15 bp, Homo sapiens
gaccccttcttaaat

SEQ ID NO: 376763 - DNA, 15 bp, Homo sapiens
agaccccttcttaaa

SEQ ID NO: 376764 - DNA, 15 bp, Homo sapiens
cagaccccttcttaa

SEQ ID NO: 376765 - DNA, 15 bp, Homo sapiens
ccagaccccttctta

SEQ ID NO: 376766 - DNA, 15 bp, Homo sapiens
cccagaccccttctt

SEQ ID NO: 376767 - DNA, 15 bp, Homo sapiens
acccagaccccttct

SEQ ID NO: 376768 - DNA, 15 bp, Homo sapiens
cacccagaccccttc

SEQ ID NO: 376769 - DNA, 15 bp, Homo sapiens
gcacccagacccctt

SEQ ID NO: 376770 - DNA, 15 bp, Homo sapiens
cgcacccagacccct

SEQ ID NO: 376771 - DNA, 15 bp, Homo sapiens
ccgcacccagacccc

SEQ ID NO: 376772 - DNA, 15 bp, Homo sapiens
gccgcacccagaccc

SEQ ID NO: 376773 - DNA, 15 bp, Homo sapiens
cgccgcacccagacc

SEQ ID NO: 376774 - DNA, 15 bp, Homo sapiens
ccgccgcacccagac

SEQ ID NO: 376775 - DNA, 15 bp, Homo sapiens
gccgccgcacccaga

SEQ ID NO: 376776 - DNA, 15 bp, Homo sapiens
agccgccgcacccag

SEQ ID NO: 376777 - DNA, 15 bp, Homo sapiens
gagccgccgcaccca

SEQ ID NO: 376778 - DNA, 15 bp, Homo sapiens
tgagccgccgcaccc

SEQ ID NO: 376779 - DNA, 15 bp, Homo sapiens
gtgagccgccgcacc

SEQ ID NO: 376780 - DNA, 15 bp, Homo sapiens
cgtgagccgccgcac

SEQ ID NO: 376781 - DNA, 15 bp, Homo sapiens
gcgtgagccgccgca

SEQ ID NO: 376782 - DNA, 15 bp, Homo sapiens
ggcgtgagccgccgc

SEQ ID NO: 376783 - DNA, 15 bp, Homo sapiens
aggcgtgagccgccg

SEQ ID NO: 376784 - DNA, 15 bp, Homo sapiens
taggcgtgagccgcc

SEQ ID NO: 376785 - DNA, 15 bp, Homo sapiens
ataggcgtgagccgc

SEQ ID NO: 376786 - DNA, 15 bp, Homo sapiens
tataggcgtgagccg

SEQ ID NO: 376787 - DNA, 15 bp, Homo sapiens
ttataggcgtgagcc

SEQ ID NO: 376788 - DNA, 15 bp, Homo sapiens
attataggcgtgagc

SEQ ID NO: 376789 - DNA, 15 bp, Homo sapiens
gattataggcgtgag

SEQ ID NO: 376790 - DNA, 15 bp, Homo sapiens
ggattataggcgtga

SEQ ID NO: 376791 - DNA, 15 bp, Homo sapiens
gggattataggcgtg

SEQ ID NO: 376792 - DNA, 15 bp, Homo sapiens
tgggattataggcgt

SEQ ID NO: 376793 - DNA, 15 bp, Homo sapiens
ctgggattataggcg

SEQ ID NO: 376794 - DNA, 15 bp, Homo sapiens
gctgggattataggc

SEQ ID NO: 376795 - DNA, 15 bp, Homo sapiens
tgctgggattatagg

SEQ ID NO: 376796 - DNA, 15 bp, Homo sapiens
gtgctgggattatag

SEQ ID NO: 376797 - DNA, 15 bp, Homo sapiens
agtgctgggattata

SEQ ID NO: 376798 - DNA, 15 bp, Homo sapiens
aagtgctgggattat

SEQ ID NO: 376799 - DNA, 15 bp, Homo sapiens
aaagtgctgggatta

SEQ ID NO: 376800 - DNA, 15 bp, Homo sapiens
caaagtgctgggatt

SEQ ID NO: 376801 - DNA, 15 bp, Homo sapiens
ccaaagtgctgggat

SEQ ID NO: 376802 - DNA, 15 bp, Homo sapiens
cccaaagtgctggga

SEQ ID NO: 376803 - DNA, 15 bp, Homo sapiens
tcccaaagtgctggg

SEQ ID NO: 376804 - DNA, 15 bp, Homo sapiens
ctcccaaagtgctgg

SEQ ID NO: 376805 - DNA, 15 bp, Homo sapiens
cctcccaaagtgctg

SEQ ID NO: 376806 - DNA, 15 bp, Homo sapiens
gcctcccaaagtgct

SEQ ID NO: 376807 - DNA, 15 bp, Homo sapiens
agcctcccaaagtgc

SEQ ID NO: 376808 - DNA, 15 bp, Homo sapiens
agcctcagcctccca

SEQ ID NO: 376809 - DNA, 15 bp, Homo sapiens
cagcctcagcctccc

SEQ ID NO: 376810 - DNA, 15 bp, Homo sapiens
ccagcctcagcctcc

SEQ ID NO: 376811 - DNA, 15 bp, Homo sapiens
gccagcctcagcctc

SEQ ID NO: 376812 - DNA, 15 bp, Homo sapiens
cgccagcctcagcct

SEQ ID NO: 376813 - DNA, 15 bp, Homo sapiens
ccgccagcctcagcc

SEQ ID NO: 376814 - DNA, 15 bp, Homo sapiens
tccgccagcctcagc

SEQ ID NO: 376815 - DNA, 15 bp, Homo sapiens
atccgccagcctcag

SEQ ID NO: 376816 - DNA, 15 bp, Homo sapiens
gatccgccagcctca

SEQ ID NO: 376817 - DNA, 15 bp, Homo sapiens
tgatccgccagcctc

SEQ ID NO: 376818 - DNA, 15 bp, Homo sapiens
gtgatccgccagcct

SEQ ID NO: 376819 - DNA, 15 bp, Homo sapiens
cgtgatccgccagcc

SEQ ID NO: 376820 - DNA, 15 bp, Homo sapiens
tcgtgatccgccagc

SEQ ID NO: 376821 - DNA, 15 bp, Homo sapiens
ctcgtgatccgccag

SEQ ID NO: 376822 - DNA, 15 bp, Homo sapiens
cctcgtgatccgcca

SEQ ID NO: 376823 - DNA, 15 bp, Homo sapiens
acctcgtgatccgcc

SEQ ID NO: 376824 - DNA, 15 bp, Homo sapiens
gacctcgtgatccgc

SEQ ID NO: 376825 - DNA, 15 bp, Homo sapiens
tgacctcgtgatccg

SEQ ID NO: 376826 - DNA, 15 bp, Homo sapiens
ctgacctcgtgatcc

SEQ ID NO: 376827 - DNA, 15 bp, Homo sapiens
cctgacctcgtgatc

SEQ ID NO: 376828 - DNA, 15 bp, Homo sapiens
tcctgacctcgtgat

SEQ ID NO: 376829 - DNA, 15 bp, Homo sapiens
ctcctgacctcgtga

SEQ ID NO: 376830 - DNA, 15 bp, Homo sapiens
tctcctgacctcgtg

SEQ ID NO: 376831 - DNA, 15 bp, Homo sapiens
atctcctgacctcgt

SEQ ID NO: 376832 - DNA, 15 bp, Homo sapiens
gatctcctgacctcg

SEQ ID NO: 376833 - DNA, 15 bp, Homo sapiens
cgatctcctgacctc

SEQ ID NO: 376834 - DNA, 15 bp, Homo sapiens
tcgatctcctgacct

SEQ ID NO: 376835 - DNA, 15 bp, Homo sapiens
ctcgatctcctgacc

SEQ ID NO: 376836 - DNA, 15 bp, Homo sapiens
tctcgatctcctgac

SEQ ID NO: 376837 - DNA, 15 bp, Homo sapiens
gtctcgatctcctga

SEQ ID NO: 376838 - DNA, 15 bp, Homo sapiens
ggtctcgatctcctg

SEQ ID NO: 376839 - DNA, 15 bp, Homo sapiens
tggtctcgatctcct

SEQ ID NO: 376840 - DNA, 15 bp, Homo sapiens
atggtctcgatctcc

SEQ ID NO: 376841 - DNA, 15 bp, Homo sapiens
gatggtctcgatctc

SEQ ID NO: 376842 - DNA, 15 bp, Homo sapiens
ggatggtctcgatct

SEQ ID NO: 376843 - DNA, 15 bp, Homo sapiens
aggatggtctcgatc

SEQ ID NO: 376844 - DNA, 15 bp, Homo sapiens
caggatggtctcgat

SEQ ID NO: 376845 - DNA, 15 bp, Homo sapiens
ccaggatggtctcga

SEQ ID NO: 376846 - DNA, 15 bp, Homo sapiens
gccaggatggtctcg

SEQ ID NO: 376847 - DNA, 15 bp, Homo sapiens
agccaggatggtctc

SEQ ID NO: 376848 - DNA, 15 bp, Homo sapiens
tagccaggatggtct

SEQ ID NO: 376849 - DNA, 15 bp, Homo sapiens
ttagccaggatggtc

SEQ ID NO: 376850 - DNA, 15 bp, Homo sapiens
gttagccaggatggt

SEQ ID NO: 376851 - DNA, 15 bp, Homo sapiens
tgttagccaggatgg

SEQ ID NO: 376852 - DNA, 15 bp, Homo sapiens
gtgttagccaggatg

SEQ ID NO: 376853 - DNA, 15 bp, Homo sapiens
cgtgttagccaggat

SEQ ID NO: 376854 - DNA, 15 bp, Homo sapiens
ccgtgttagccagga

SEQ ID NO: 376855 - DNA, 15 bp, Homo sapiens
accgtgttagccagg

SEQ ID NO: 376856 - DNA, 15 bp, Homo sapiens
caccgtgttagccag

SEQ ID NO: 376857 - DNA, 15 bp, Homo sapiens
tcaccgtgttagcca

SEQ ID NO: 376858 - DNA, 15 bp, Homo sapiens
ttcaccgtgttagcc

SEQ ID NO: 376859 - DNA, 15 bp, Homo sapiens
tttcaccgtgttagc

SEQ ID NO: 376860 - DNA, 15 bp, Homo sapiens
gtttcaccgtgttag

SEQ ID NO: 376861 - DNA, 15 bp, Homo sapiens
ggtttcaccgtgtta

SEQ ID NO: 376862 - DNA, 15 bp, Homo sapiens
gggtttcaccgtgtt

SEQ ID NO: 376863 - DNA, 15 bp, Homo sapiens
agggtttcaccgtgt

SEQ ID NO: 376864 - DNA, 15 bp, Homo sapiens
cagggtttcaccgtg

SEQ ID NO: 376865 - DNA, 15 bp, Homo sapiens
acagggtttcaccgt

SEQ ID NO: 376866 - DNA, 15 bp, Homo sapiens
gacagggtttcaccg

SEQ ID NO: 376867 - DNA, 15 bp, Homo sapiens
agacagggtttcacc

SEQ ID NO: 376868 - DNA, 15 bp, Homo sapiens
gagacagggtttcac

SEQ ID NO: 376869 - DNA, 15 bp, Homo sapiens
agagacagggtttca

SEQ ID NO: 376870 - DNA, 15 bp, Homo sapiens
tagagacagggtttc

SEQ ID NO: 376871 - DNA, 15 bp, Homo sapiens
gtagagacagggttt

SEQ ID NO: 376872 - DNA, 15 bp, Homo sapiens
agtagagacagggtt

SEQ ID NO: 376873 - DNA, 15 bp, Homo sapiens
tagtagagacagggt

SEQ ID NO: 376874 - DNA, 15 bp, Homo sapiens
ttagtagagacaggg

SEQ ID NO: 376875 - DNA, 15 bp, Homo sapiens
tttagtagagacagg

SEQ ID NO: 376876 - DNA, 15 bp, Homo sapiens
ttttagtagagacag

SEQ ID NO: 376877 - DNA, 15 bp, Homo sapiens
tttttagtagagaca

SEQ ID NO: 376878 - DNA, 15 bp, Homo sapiens
atttttagtagagac

SEQ ID NO: 376879 - DNA, 15 bp, Homo sapiens
tatttttagtagaga

SEQ ID NO: 376880 - DNA, 15 bp, Homo sapiens
gtatttttagtagag

SEQ ID NO: 376881 - DNA, 15 bp, Homo sapiens
ttttttgtattttta

SEQ ID NO: 376882 - DNA, 15 bp, Homo sapiens
attttttgtattttt

SEQ ID NO: 376883 - DNA, 15 bp, Homo sapiens
aattttttgtatttt

SEQ ID NO: 376884 - DNA, 15 bp, Homo sapiens
taattttttgtattt

SEQ ID NO: 376885 - DNA, 15 bp, Homo sapiens
ctaattttttgtatt

SEQ ID NO: 376886 - DNA, 15 bp, Homo sapiens
gctaattttttgtat

SEQ ID NO: 376887 - DNA, 15 bp, Homo sapiens
ggctaattttttgta

SEQ ID NO: 376888 - DNA, 15 bp, Homo sapiens
tggctaattttttgt

SEQ ID NO: 376889 - DNA, 15 bp, Homo sapiens
ctggctaattttttg

SEQ ID NO: 376890 - DNA, 15 bp, Homo sapiens
cctggctaatttttt

SEQ ID NO: 376891 - DNA, 15 bp, Homo sapiens
gcctggctaattttt

SEQ ID NO: 376892 - DNA, 15 bp, Homo sapiens
cgcctggctaatttt

SEQ ID NO: 376893 - DNA, 15 bp, Homo sapiens
acgcctggctaattt

SEQ ID NO: 376894 - DNA, 15 bp, Homo sapiens
cacgcctggctaatt

SEQ ID NO: 376895 - DNA, 15 bp, Homo sapiens
ccacgcctggctaat

SEQ ID NO: 376896 - DNA, 15 bp, Homo sapiens
accacgcctggctaa

SEQ ID NO: 376897 - DNA, 15 bp, Homo sapiens
caccacgcctggcta

SEQ ID NO: 376898 - DNA, 15 bp, Homo sapiens
ccaccacgcctggct

SEQ ID NO: 376899 - DNA, 15 bp, Homo sapiens
gccaccacgcctggc

SEQ ID NO: 376900 - DNA, 15 bp, Homo sapiens
cgccaccacgcctgg

SEQ ID NO: 376901 - DNA, 15 bp, Homo sapiens
ccgccaccacgcctg

SEQ ID NO: 376902 - DNA, 15 bp, Homo sapiens
cccgccaccacgcct

SEQ ID NO: 376903 - DNA, 15 bp, Homo sapiens
acccgccaccacgcc

SEQ ID NO: 376904 - DNA, 15 bp, Homo sapiens
cacccgccaccacgc

SEQ ID NO: 376905 - DNA, 15 bp, Homo sapiens
gcacccgccaccacg

SEQ ID NO: 376906 - DNA, 15 bp, Homo sapiens
ggcacccgccaccac

SEQ ID NO: 376907 - DNA, 15 bp, Homo sapiens
aggcacccgccacca

SEQ ID NO: 376908 - DNA, 15 bp, Homo sapiens
caggcacccgccacc

SEQ ID NO: 376909 - DNA, 15 bp, Homo sapiens
acaggcacccgccac

SEQ ID NO: 376910 - DNA, 15 bp, Homo sapiens
tacaggcacccgcca

SEQ ID NO: 376911 - DNA, 15 bp, Homo sapiens
ctacaggcacccgcc

SEQ ID NO: 376912 - DNA, 15 bp, Homo sapiens
actacaggcacccgc

SEQ ID NO: 376913 - DNA, 15 bp, Homo sapiens
gactacaggcacccg

SEQ ID NO: 376914 - DNA, 15 bp, Homo sapiens
ggactacaggcaccc

SEQ ID NO: 376915 - DNA, 15 bp, Homo sapiens
gggactacaggcacc

SEQ ID NO: 376916 - DNA, 15 bp, Homo sapiens
tgggactacaggcac

SEQ ID NO: 376917 - DNA, 15 bp, Homo sapiens
ctgggactacaggca

SEQ ID NO: 376918 - DNA, 15 bp, Homo sapiens
cgagtagctgggact

SEQ ID NO: 376919 - DNA, 15 bp, Homo sapiens
ccgagtagctgggac

SEQ ID NO: 376920 - DNA, 15 bp, Homo sapiens
cccgagtagctggga

SEQ ID NO: 376921 - DNA, 15 bp, Homo sapiens
tcccgagtagctggg

SEQ ID NO: 376922 - DNA, 15 bp, Homo sapiens
ctcccgagtagctgg

SEQ ID NO: 376923 - DNA, 15 bp, Homo sapiens
cctcccgagtagctg

SEQ ID NO: 376924 - DNA, 15 bp, Homo sapiens
gcctcccgagtagct

SEQ ID NO: 376925 - DNA, 15 bp, Homo sapiens
agcctcccgagtagc

SEQ ID NO: 376926 - DNA, 15 bp, Homo sapiens
cagcctcccgagtag

SEQ ID NO: 376927 - DNA, 15 bp, Homo sapiens
tcagcctcccgagta

SEQ ID NO: 376928 - DNA, 15 bp, Homo sapiens
ctcagcctcccgagt

SEQ ID NO: 376929 - DNA, 15 bp, Homo sapiens
cctcagcctcccgag

SEQ ID NO: 376930 - DNA, 15 bp, Homo sapiens
gcctcagcctcccga

SEQ ID NO: 376931 - DNA, 15 bp, Homo sapiens
tgcctcagcctcccg

SEQ ID NO: 376932 - DNA, 15 bp, Homo sapiens
cattctcctgcctca

SEQ ID NO: 376933 - DNA, 15 bp, Homo sapiens
ccattctcctgcctc

SEQ ID NO: 376934 - DNA, 15 bp, Homo sapiens
gccattctcctgcct

SEQ ID NO: 376935 - DNA, 15 bp, Homo sapiens
cgccattctcctgcc

SEQ ID NO: 376936 - DNA, 15 bp, Homo sapiens
acgccattctcctgc

SEQ ID NO: 376937 - DNA, 15 bp, Homo sapiens
cacgccattctcctg

SEQ ID NO: 376938 - DNA, 15 bp, Homo sapiens
tcacgccattctcct

SEQ ID NO: 376939 - DNA, 15 bp, Homo sapiens
ttcacgccattctcc

SEQ ID NO: 376940 - DNA, 15 bp, Homo sapiens
gttcacgccattctc

SEQ ID NO: 376941 - DNA, 15 bp, Homo sapiens
ggttcacgccattct

SEQ ID NO: 376942 - DNA, 15 bp, Homo sapiens
gggttcacgccattc

SEQ ID NO: 376943 - DNA, 15 bp, Homo sapiens
cgggttcacgccatt

SEQ ID NO: 376944 - DNA, 15 bp, Homo sapiens
ccgggttcacgccat

SEQ ID NO: 376945 - DNA, 15 bp, Homo sapiens
cccgggttcacgcca

SEQ ID NO: 376946 - DNA, 15 bp, Homo sapiens
tcccgggttcacgcc

SEQ ID NO: 376947 - DNA, 15 bp, Homo sapiens
ctcccgggttcacgc

SEQ ID NO: 376948 - DNA, 15 bp, Homo sapiens
cctcccgggttcacg

SEQ ID NO: 376949 - DNA, 15 bp, Homo sapiens
gcctcccgggttcac

SEQ ID NO: 376950 - DNA, 15 bp, Homo sapiens
cgcctcccgggttca

SEQ ID NO: 376951 - DNA, 15 bp, Homo sapiens
ccgcctcccgggttc

SEQ ID NO: 376952 - DNA, 15 bp, Homo sapiens
tccgcctcccgggtt

SEQ ID NO: 376953 - DNA, 15 bp, Homo sapiens
ctccgcctcccgggt

SEQ ID NO: 376954 - DNA, 15 bp, Homo sapiens
gctccgcctcccggg

SEQ ID NO: 376955 - DNA, 15 bp, Homo sapiens
agctccgcctcccgg

SEQ ID NO: 376956 - DNA, 15 bp, Homo sapiens
aagctccgcctcccg

SEQ ID NO: 376957 - DNA, 15 bp, Homo sapiens
caagctccgcctccc

SEQ ID NO: 376958 - DNA, 15 bp, Homo sapiens
gcaagctccgcctcc

SEQ ID NO: 376959 - DNA, 15 bp, Homo sapiens
tgcaagctccgcctc

SEQ ID NO: 376960 - DNA, 15 bp, Homo sapiens
ctgcaagctccgcct

SEQ ID NO: 376961 - DNA, 15 bp, Homo sapiens
actgcaagctccgcc

SEQ ID NO: 376962 - DNA, 15 bp, Homo sapiens
cactgcaagctccgc

SEQ ID NO: 376963 - DNA, 15 bp, Homo sapiens
tcactgcaagctccg

SEQ ID NO: 376964 - DNA, 15 bp, Homo sapiens
ctcactgcaagctcc

SEQ ID NO: 376965 - DNA, 15 bp, Homo sapiens
gctcactgcaagctc

SEQ ID NO: 376966 - DNA, 15 bp, Homo sapiens
ggctcactgcaagct

SEQ ID NO: 376967 - DNA, 15 bp, Homo sapiens
cggctcactgcaagc

SEQ ID NO: 376968 - DNA, 15 bp, Homo sapiens
tcggctcactgcaag

SEQ ID NO: 376969 - DNA, 15 bp, Homo sapiens
ctcggctcactgcaa

SEQ ID NO: 376970 - DNA, 15 bp, Homo sapiens
tctcggctcactgca

SEQ ID NO: 376971 - DNA, 15 bp, Homo sapiens
atctcggctcactgc

SEQ ID NO: 376972 - DNA, 15 bp, Homo sapiens
aatctcggctcactg

SEQ ID NO: 376973 - DNA, 15 bp, Homo sapiens
caatctcggctcact

SEQ ID NO: 376974 - DNA, 15 bp, Homo sapiens
acaatctcggctcac

SEQ ID NO: 376975 - DNA, 15 bp, Homo sapiens
cacaatctcggctca

SEQ ID NO: 376976 - DNA, 15 bp, Homo sapiens
gcacaatctcggctc

SEQ ID NO: 376977 - DNA, 15 bp, Homo sapiens
ggcacaatctcggct

SEQ ID NO: 376978 - DNA, 15 bp, Homo sapiens
tggcacaatctcggc

SEQ ID NO: 376979 - DNA, 15 bp, Homo sapiens
gtggcacaatctcgg

SEQ ID NO: 376980 - DNA, 15 bp, Homo sapiens
agtggcacaatctcg

SEQ ID NO: 376981 - DNA, 15 bp, Homo sapiens
cagtggcacaatctc

SEQ ID NO: 376982 - DNA, 15 bp, Homo sapiens
gcagtggcacaatct

SEQ ID NO: 376983 - DNA, 15 bp, Homo sapiens
tgcagtggcacaatc

SEQ ID NO: 376984 - DNA, 15 bp, Homo sapiens
gtgcagtggcacaat

SEQ ID NO: 376985 - DNA, 15 bp, Homo sapiens
agtgcagtggcacaa

SEQ ID NO: 376986 - DNA, 15 bp, Homo sapiens
gagtgcagtggcaca

SEQ ID NO: 376987 - DNA, 15 bp, Homo sapiens
ggagtgcagtggcac

SEQ ID NO: 376988 - DNA, 15 bp, Homo sapiens
tggagtgcagtggca

SEQ ID NO: 376989 - DNA, 15 bp, Homo sapiens
ctggagtgcagtggc

SEQ ID NO: 376990 - DNA, 15 bp, Homo sapiens
gctggagtgcagtgg

SEQ ID NO: 376991 - DNA, 15 bp, Homo sapiens
ggctggagtgcagtg

SEQ ID NO: 376992 - DNA, 15 bp, Homo sapiens
aggctggagtgcagt

SEQ ID NO: 376993 - DNA, 15 bp, Homo sapiens
caggctggagtgcag

SEQ ID NO: 376994 - DNA, 15 bp, Homo sapiens
ccaggctggagtgca

SEQ ID NO: 376995 - DNA, 15 bp, Homo sapiens
cccaggctggagtgc

SEQ ID NO: 376996 - DNA, 15 bp, Homo sapiens
gcccaggctggagtg

SEQ ID NO: 376997 - DNA, 15 bp, Homo sapiens
cgcccaggctggagt

SEQ ID NO: 376998 - DNA, 15 bp, Homo sapiens
tcgcccaggctggag

SEQ ID NO: 376999 - DNA, 15 bp, Homo sapiens
gtcgcccaggctgga

SEQ ID NO: 377000 - DNA, 15 bp, Homo sapiens
tgtcgcccaggctgg

SEQ ID NO: 377001 - DNA, 15 bp, Homo sapiens
ctgtcgcccaggctg

SEQ ID NO: 377002 - DNA, 15 bp, Homo sapiens
tctgtcgcccaggct

SEQ ID NO: 377003 - DNA, 15 bp, Homo sapiens
ctctgtcgcccaggc

SEQ ID NO: 377004 - DNA, 15 bp, Homo sapiens
gctctgtcgcccagg

SEQ ID NO: 377005 - DNA, 15 bp, Homo sapiens
cgctctgtcgcccag

SEQ ID NO: 377006 - DNA, 15 bp, Homo sapiens
tcgctctgtcgccca

SEQ ID NO: 377007 - DNA, 15 bp, Homo sapiens
ctcgctctgtcgccc

SEQ ID NO: 377008 - DNA, 15 bp, Homo sapiens
tctcgctctgtcgcc

SEQ ID NO: 377009 - DNA, 15 bp, Homo sapiens
gtctcgctctgtcgc

SEQ ID NO: 377010 - DNA, 15 bp, Homo sapiens
agtctcgctctgtcg

SEQ ID NO: 377011 - DNA, 15 bp, Homo sapiens
ggagtctcgctctgt

SEQ ID NO: 377012 - DNA, 15 bp, Homo sapiens
tggagtctcgctctg

SEQ ID NO: 377013 - DNA, 15 bp, Homo sapiens
atggagtctcgctct

SEQ ID NO: 377014 - DNA, 15 bp, Homo sapiens
gatggagtctcgctc

SEQ ID NO: 377015 - DNA, 15 bp, Homo sapiens
agatggagtctcgct

SEQ ID NO: 377016 - DNA, 15 bp, Homo sapiens
gagatggagtctcgc

SEQ ID NO: 377017 - DNA, 15 bp, Homo sapiens
tgagatggagtctcg

SEQ ID NO: 377018 - DNA, 15 bp, Homo sapiens
ttgagatggagtctc

SEQ ID NO: 377019 - DNA, 15 bp, Homo sapiens
tttgagatggagtct

SEQ ID NO: 377020 - DNA, 15 bp, Homo sapiens
ttttgagatggagtc

SEQ ID NO: 377021 - DNA, 15 bp, Homo sapiens
tttttgagatggagt

SEQ ID NO: 377022 - DNA, 15 bp, Homo sapiens
cttttttttttttga

SEQ ID NO: 377023 - DNA, 15 bp, Homo sapiens
tcttttttttttttg

SEQ ID NO: 377024 - DNA, 15 bp, Homo sapiens
ttttctttttttttt

SEQ ID NO: 377025 - DNA, 15 bp, Homo sapiens
tttttcttttttttt

SEQ ID NO: 377026 - DNA, 15 bp, Homo sapiens
gtttttctttttttt

SEQ ID NO: 377027 - DNA, 15 bp, Homo sapiens
tgtttttcttttttt

SEQ ID NO: 377028 - DNA, 15 bp, Homo sapiens
atgtttttctttttt

SEQ ID NO: 377029 - DNA, 15 bp, Homo sapiens
aatgtttttcttttt

SEQ ID NO: 377030 - DNA, 15 bp, Homo sapiens
aaatgtttttctttt

SEQ ID NO: 377031 - DNA, 15 bp, Homo sapiens
taaatgtttttcttt

SEQ ID NO: 377032 - DNA, 15 bp, Homo sapiens
ttaaatgtttttctt

SEQ ID NO: 377033 - DNA, 15 bp, Homo sapiens
cttaaatgtttttct

SEQ ID NO: 377034 - DNA, 15 bp, Homo sapiens
tcttaaatgtttttc

SEQ ID NO: 377035 - DNA, 15 bp, Homo sapiens
ttcttaaatgttttt

SEQ ID NO: 377036 - DNA, 15 bp, Homo sapiens
cttcttaaatgtttt

SEQ ID NO: 377037 - DNA, 15 bp, Homo sapiens
ccttcttaaatgttt

SEQ ID NO: 377038 - DNA, 15 bp, Homo sapiens
cccttcttaaatgtt

SEQ ID NO: 377039 - DNA, 15 bp, Homo sapiens
ccccttcttaaatgt

SEQ ID NO: 377040 - DNA, 15 bp, Homo sapiens
tccccttcttaaatg

SEQ ID NO: 377041 - DNA, 15 bp, Homo sapiens
ttccccttcttaaat

SEQ ID NO: 377042 - DNA, 15 bp, Homo sapiens
tttccccttcttaaa

SEQ ID NO: 377043 - DNA, 15 bp, Homo sapiens
ttttccccttcttaa

SEQ ID NO: 377044 - DNA, 15 bp, Homo sapiens
attttccccttctta

SEQ ID NO: 377045 - DNA, 15 bp, Homo sapiens
aattttccccttctt

SEQ ID NO: 377046 - DNA, 15 bp, Homo sapiens
gaattttccccttct

SEQ ID NO: 377047 - DNA, 15 bp, Homo sapiens
ggaattttccccttc

SEQ ID NO: 377048 - DNA, 15 bp, Homo sapiens
aggaattttcccctt

SEQ ID NO: 377049 - DNA, 15 bp, Homo sapiens
aaggaattttcccct

SEQ ID NO: 377050 - DNA, 15 bp, Homo sapiens
caaggaattttcccc

SEQ ID NO: 377051 - DNA, 15 bp, Homo sapiens
gcaaggaattttccc

SEQ ID NO: 377052 - DNA, 15 bp, Homo sapiens
agcaaggaattttcc

SEQ ID NO: 377053 - DNA, 15 bp, Homo sapiens
aagcaaggaattttc

SEQ ID NO: 377054 - DNA, 15 bp, Homo sapiens
taagcaaggaatttt

SEQ ID NO: 377055 - DNA, 15 bp, Homo sapiens
ttaagcaaggaattt

SEQ ID NO: 377056 - DNA, 15 bp, Homo sapiens
gttaagcaaggaatt

SEQ ID NO: 377057 - DNA, 15 bp, Homo sapiens
ggttaagcaaggaat

SEQ ID NO: 377058 - DNA, 15 bp, Homo sapiens
aggttaagcaaggaa

SEQ ID NO: 377059 - DNA, 15 bp, Homo sapiens
taggttaagcaagga

SEQ ID NO: 377060 - DNA, 15 bp, Homo sapiens
ttaggttaagcaagg

SEQ ID NO: 377061 - DNA, 15 bp, Homo sapiens
tttaggttaagcaag

SEQ ID NO: 377062 - DNA, 15 bp, Homo sapiens
ttttaggttaagcaa

SEQ ID NO: 377063 - DNA, 15 bp, Homo sapiens
attttaggttaagca

SEQ ID NO: 377064 - DNA, 15 bp, Homo sapiens
cattttaggttaagc

SEQ ID NO: 377065 - DNA, 15 bp, Homo sapiens
acattttaggttaag

SEQ ID NO: 377066 - DNA, 15 bp, Homo sapiens
cacattttaggttaa

SEQ ID NO: 377067 - DNA, 15 bp, Homo sapiens
ccacattttaggtta

SEQ ID NO: 377068 - DNA, 15 bp, Homo sapiens
gccacattttaggtt

SEQ ID NO: 377069 - DNA, 15 bp, Homo sapiens
ggccacattttaggt

SEQ ID NO: 377070 - DNA, 15 bp, Homo sapiens
aggccacattttagg

SEQ ID NO: 377071 - DNA, 15 bp, Homo sapiens
aaggccacattttag

SEQ ID NO: 377072 - DNA, 15 bp, Homo sapiens
caaggccacatttta

SEQ ID NO: 377073 - DNA, 15 bp, Homo sapiens
tcaaggccacatttt

SEQ ID NO: 377074 - DNA, 15 bp, Homo sapiens
ctcaaggccacattt

SEQ ID NO: 377075 - DNA, 15 bp, Homo sapiens
cctcaaggccacatt

SEQ ID NO: 377076 - DNA, 15 bp, Homo sapiens
gcctcaaggccacat

SEQ ID NO: 377077 - DNA, 15 bp, Homo sapiens
ggcctcaaggccaca

SEQ ID NO: 377078 - DNA, 15 bp, Homo sapiens
aggcctcaaggccac

SEQ ID NO: 377079 - DNA, 15 bp, Homo sapiens
caggcctcaaggcca

SEQ ID NO: 377080 - DNA, 15 bp, Homo sapiens
ccaggcctcaaggcc

SEQ ID NO: 377081 - DNA, 15 bp, Homo sapiens
accaggcctcaaggc

SEQ ID NO: 377082 - DNA, 15 bp, Homo sapiens
gaccaggcctcaagg

SEQ ID NO: 377083 - DNA, 15 bp, Homo sapiens
tgaccaggcctcaag

SEQ ID NO: 377084 - DNA, 15 bp, Homo sapiens
gtgaccaggcctcaa

SEQ ID NO: 377085 - DNA, 15 bp, Homo sapiens
ggtgaccaggcctca

SEQ ID NO: 377086 - DNA, 15 bp, Homo sapiens
gggtgaccaggcctc

SEQ ID NO: 377087 - DNA, 15 bp, Homo sapiens
agggtgaccaggcct

SEQ ID NO: 377088 - DNA, 15 bp, Homo sapiens
cagggtgaccaggcc

SEQ ID NO: 377089 - DNA, 15 bp, Homo sapiens
acagggtgaccaggc

SEQ ID NO: 377090 - DNA, 15 bp, Homo sapiens
cacagggtgaccagg

SEQ ID NO: 377091 - DNA, 15 bp, Homo sapiens
gcacagggtgaccag

SEQ ID NO: 377092 - DNA, 15 bp, Homo sapiens
ggcacagggtgacca

SEQ ID NO: 377093 - DNA, 15 bp, Homo sapiens
tggcacagggtgacc

SEQ ID NO: 377094 - DNA, 15 bp, Homo sapiens
atggcacagggtgac

SEQ ID NO: 377095 - DNA, 15 bp, Homo sapiens
aatggcacagggtga

SEQ ID NO: 377096 - DNA, 15 bp, Homo sapiens
caatggcacagggtg

SEQ ID NO: 377097 - DNA, 15 bp, Homo sapiens
tcaatggcacagggt

SEQ ID NO: 377098 - DNA, 15 bp, Homo sapiens
ctcaatggcacaggg

SEQ ID NO: 377099 - DNA, 15 bp, Homo sapiens
tctcaatggcacagg

SEQ ID NO: 377100 - DNA, 15 bp, Homo sapiens
gtctcaatggcacag

SEQ ID NO: 377101 - DNA, 15 bp, Homo sapiens
ggtctcaatggcaca

SEQ ID NO: 377102 - DNA, 15 bp, Homo sapiens
aggtctcaatggcac

SEQ ID NO: 377103 - DNA, 15 bp, Homo sapiens
caggtctcaatggca

SEQ ID NO: 377104 - DNA, 15 bp, Homo sapiens
ccaggtctcaatggc

SEQ ID NO: 377105 - DNA, 15 bp, Homo sapiens
cccaggtctcaatgg

SEQ ID NO: 377106 - DNA, 15 bp, Homo sapiens
ccccaggtctcaatg

SEQ ID NO: 377107 - DNA, 15 bp, Homo sapiens
accccaggtctcaat

SEQ ID NO: 377108 - DNA, 15 bp, Homo sapiens
caccccaggtctcaa

SEQ ID NO: 377109 - DNA, 15 bp, Homo sapiens
acaccccaggtctca

SEQ ID NO: 377110 - DNA, 15 bp, Homo sapiens
cacaccccaggtctc

SEQ ID NO: 377111 - DNA, 15 bp, Homo sapiens
tcacaccccaggtct

SEQ ID NO: 377112 - DNA, 15 bp, Homo sapiens
ctcacaccccaggtc

SEQ ID NO: 377113 - DNA, 15 bp, Homo sapiens
cctcacaccccaggt

SEQ ID NO: 377114 - DNA, 15 bp, Homo sapiens
acctcacaccccagg

SEQ ID NO: 377115 - DNA, 15 bp, Homo sapiens
aacctcacaccccag

SEQ ID NO: 377116 - DNA, 15 bp, Homo sapiens
gaacctcacacccca

SEQ ID NO: 377117 - DNA, 15 bp, Homo sapiens
tgaacctcacacccc

SEQ ID NO: 377118 - DNA, 15 bp, Homo sapiens
atgaacctcacaccc

SEQ ID NO: 377119 - DNA, 15 bp, Homo sapiens
aatgaacctcacacc

SEQ ID NO: 377120 - DNA, 15 bp, Homo sapiens
gaatgaacctcacac

SEQ ID NO: 377121 - DNA, 15 bp, Homo sapiens
tgaatgaacctcaca

SEQ ID NO: 377122 - DNA, 15 bp, Homo sapiens
gtgaatgaacctcac

SEQ ID NO: 377123 - DNA, 15 bp, Homo sapiens
cgtgaatgaacctca

SEQ ID NO: 377124 - DNA, 15 bp, Homo sapiens
tcgtgaatgaacctc

SEQ ID NO: 377125 - DNA, 15 bp, Homo sapiens
ctcgtgaatgaacct

SEQ ID NO: 377126 - DNA, 15 bp, Homo sapiens
gctcgtgaatgaacc

SEQ ID NO: 377127 - DNA, 15 bp, Homo sapiens
ggctcgtgaatgaac

SEQ ID NO: 377128 - DNA, 15 bp, Homo sapiens
aggctcgtgaatgaa

SEQ ID NO: 377129 - DNA, 15 bp, Homo sapiens
gaggctcgtgaatga

SEQ ID NO: 377130 - DNA, 15 bp, Homo sapiens
agaggctcgtgaatg

SEQ ID NO: 377131 - DNA, 15 bp, Homo sapiens
cagaggctcgtgaat

SEQ ID NO: 377132 - DNA, 15 bp, Homo sapiens
ccagaggctcgtgaa

SEQ ID NO: 377133 - DNA, 15 bp, Homo sapiens
accagaggctcgtga

SEQ ID NO: 377134 - DNA, 15 bp, Homo sapiens
gaccagaggctcgtg

SEQ ID NO: 377135 - DNA, 15 bp, Homo sapiens
agaccagaggctcgt

SEQ ID NO: 377136 - DNA, 15 bp, Homo sapiens
gagaccagaggctcg

SEQ ID NO: 377137 - DNA, 15 bp, Homo sapiens
ggagaccagaggctc

SEQ ID NO: 377138 - DNA, 15 bp, Homo sapiens
aggagaccagaggct

SEQ ID NO: 377139 - DNA, 15 bp, Homo sapiens
caggagaccagaggc

SEQ ID NO: 377140 - DNA, 15 bp, Homo sapiens
ccaggagaccagagg

SEQ ID NO: 377141 - DNA, 15 bp, Homo sapiens
tccaggagaccagag

SEQ ID NO: 377142 - DNA, 15 bp, Homo sapiens
ttccaggagaccaga

SEQ ID NO: 377143 - DNA, 15 bp, Homo sapiens
cttccaggagaccag

SEQ ID NO: 377144 - DNA, 15 bp, Homo sapiens
ccttccaggagacca

SEQ ID NO: 377145 - DNA, 15 bp, Homo sapiens
cccttccaggagacc

SEQ ID NO: 377146 - DNA, 15 bp, Homo sapiens
acccttccaggagac

SEQ ID NO: 377147 - DNA, 15 bp, Homo sapiens
gacccttccaggaga

SEQ ID NO: 377148 - DNA, 15 bp, Homo sapiens
agacccttccaggag

SEQ ID NO: 377149 - DNA, 15 bp, Homo sapiens
cagacccttccagga

SEQ ID NO: 377150 - DNA, 15 bp, Homo sapiens
ccagacccttccagg

SEQ ID NO: 377151 - DNA, 15 bp, Homo sapiens
accagacccttccag

SEQ ID NO: 377152 - DNA, 15 bp, Homo sapiens
gaccagacccttcca

SEQ ID NO: 377153 - DNA, 15 bp, Homo sapiens
agaccagacccttcc

SEQ ID NO: 377154 - DNA, 15 bp, Homo sapiens
cagaccagacccttc

SEQ ID NO: 377155 - DNA, 15 bp, Homo sapiens
acagaccagaccctt

SEQ ID NO: 377156 - DNA, 15 bp, Homo sapiens
aacagaccagaccct

SEQ ID NO: 377157 - DNA, 15 bp, Homo sapiens
gaacagaccagaccc

SEQ ID NO: 377158 - DNA, 15 bp, Homo sapiens
tgaacagaccagacc

SEQ ID NO: 377159 - DNA, 15 bp, Homo sapiens
atgaacagaccagac

SEQ ID NO: 377160 - DNA, 15 bp, Homo sapiens
aatgaacagaccaga

SEQ ID NO: 377161 - DNA, 15 bp, Homo sapiens
gaatgaacagaccag

SEQ ID NO: 377162 - DNA, 15 bp, Homo sapiens
tgaatgaacagacca

SEQ ID NO: 377163 - DNA, 15 bp, Homo sapiens
atgaatgaacagacc

SEQ ID NO: 377164 - DNA, 15 bp, Homo sapiens
catgaatgaacagac

SEQ ID NO: 377165 - DNA, 15 bp, Homo sapiens
tcatgaatgaacaga

SEQ ID NO: 377166 - DNA, 15 bp, Homo sapiens
ctcatgaatgaacag

SEQ ID NO: 377167 - DNA, 15 bp, Homo sapiens
gctcatgaatgaaca

SEQ ID NO: 377168 - DNA, 15 bp, Homo sapiens
tgctcatgaatgaac

SEQ ID NO: 377169 - DNA, 15 bp, Homo sapiens
ctgctcatgaatgaa

SEQ ID NO: 377170 - DNA, 15 bp, Homo sapiens
cctgctcatgaatga

SEQ ID NO: 377171 - DNA, 15 bp, Homo sapiens
ccctgctcatgaatg

SEQ ID NO: 377172 - DNA, 15 bp, Homo sapiens
accctgctcatgaat

SEQ ID NO: 377173 - DNA, 15 bp, Homo sapiens
taccctgctcatgaa

SEQ ID NO: 377174 - DNA, 15 bp, Homo sapiens
ttaccctgctcatga

SEQ ID NO: 377175 - DNA, 15 bp, Homo sapiens
attaccctgctcatg

SEQ ID NO: 377176 - DNA, 15 bp, Homo sapiens
aattaccctgctcat

SEQ ID NO: 377177 - DNA, 15 bp, Homo sapiens
taattaccctgctca

SEQ ID NO: 377178 - DNA, 15 bp, Homo sapiens
ttaattaccctgctc

SEQ ID NO: 377179 - DNA, 15 bp, Homo sapiens
tttaattaccctgct

SEQ ID NO: 377180 - DNA, 15 bp, Homo sapiens
atttaattaccctgc

SEQ ID NO: 377181 - DNA, 15 bp, Homo sapiens
tatttaattaccctg

SEQ ID NO: 377182 - DNA, 15 bp, Homo sapiens
ttatttaattaccct

SEQ ID NO: 377183 - DNA, 15 bp, Homo sapiens
gttatttaattaccc

SEQ ID NO: 377184 - DNA, 15 bp, Homo sapiens
agttatttaattacc

SEQ ID NO: 377185 - DNA, 15 bp, Homo sapiens
gagttatttaattac

SEQ ID NO: 377186 - DNA, 15 bp, Homo sapiens
agagttatttaatta

SEQ ID NO: 377187 - DNA, 15 bp, Homo sapiens
aagagttatttaatt

SEQ ID NO: 377188 - DNA, 15 bp, Homo sapiens
aaagagttatttaat

SEQ ID NO: 377189 - DNA, 15 bp, Homo sapiens
caaagagttatttaa

SEQ ID NO: 377190 - DNA, 15 bp, Homo sapiens
acaaagagttattta

SEQ ID NO: 377191 - DNA, 15 bp, Homo sapiens
tacaaagagttattt

SEQ ID NO: 377192 - DNA, 15 bp, Homo sapiens
ttacaaagagttatt

SEQ ID NO: 377193 - DNA, 15 bp, Homo sapiens
cttacaaagagttat

SEQ ID NO: 377194 - DNA, 15 bp, Homo sapiens
tcttacaaagagtta

SEQ ID NO: 377195 - DNA, 15 bp, Homo sapiens
ctcttacaaagagtt

SEQ ID NO: 377196 - DNA, 15 bp, Homo sapiens
actcttacaaagagt

SEQ ID NO: 377197 - DNA, 15 bp, Homo sapiens
gactcttacaaagag

SEQ ID NO: 377198 - DNA, 15 bp, Homo sapiens
tgactcttacaaaga

SEQ ID NO: 377199 - DNA, 15 bp, Homo sapiens
ctgactcttacaaag

SEQ ID NO: 377200 - DNA, 15 bp, Homo sapiens
cctgactcttacaaa

SEQ ID NO: 377201 - DNA, 15 bp, Homo sapiens
ccctgactcttacaa

SEQ ID NO: 377202 - DNA, 15 bp, Homo sapiens
tccctgactcttaca

SEQ ID NO: 377203 - DNA, 15 bp, Homo sapiens
ctccctgactcttac

SEQ ID NO: 377204 - DNA, 15 bp, Homo sapiens
gctccctgactctta

SEQ ID NO: 377205 - DNA, 15 bp, Homo sapiens
agctccctgactctt

SEQ ID NO: 377206 - DNA, 15 bp, Homo sapiens
gagctccctgactct

SEQ ID NO: 377207 - DNA, 15 bp, Homo sapiens
ggagctccctgactc

SEQ ID NO: 377208 - DNA, 15 bp, Homo sapiens
aggagctccctgact

SEQ ID NO: 377209 - DNA, 15 bp, Homo sapiens
aaggagctccctgac

SEQ ID NO: 377210 - DNA, 15 bp, Homo sapiens
caaggagctccctga

SEQ ID NO: 377211 - DNA, 15 bp, Homo sapiens
gcaaggagctccctg

SEQ ID NO: 377212 - DNA, 15 bp, Homo sapiens
agcaaggagctccct

SEQ ID NO: 377213 - DNA, 15 bp, Homo sapiens
tagcaaggagctccc

SEQ ID NO: 377214 - DNA, 15 bp, Homo sapiens
ttagcaaggagctcc

SEQ ID NO: 377215 - DNA, 15 bp, Homo sapiens
cttagcaaggagctc

SEQ ID NO: 377216 - DNA, 15 bp, Homo sapiens
acttagcaaggagct

SEQ ID NO: 377217 - DNA, 15 bp, Homo sapiens
cacttagcaaggagc

SEQ ID NO: 377218 - DNA, 15 bp, Homo sapiens
ccacttagcaaggag

SEQ ID NO: 377219 - DNA, 15 bp, Homo sapiens
accacttagcaagga

SEQ ID NO: 377220 - DNA, 15 bp, Homo sapiens
gaccacttagcaagg

SEQ ID NO: 377221 - DNA, 15 bp, Homo sapiens
agaccacttagcaag

SEQ ID NO: 377222 - DNA, 15 bp, Homo sapiens
aagaccacttagcaa

SEQ ID NO: 377223 - DNA, 15 bp, Homo sapiens
gaagaccacttagca

SEQ ID NO: 377224 - DNA, 15 bp, Homo sapiens
ggaagaccacttagc

SEQ ID NO: 377225 - DNA, 15 bp, Homo sapiens
gggaagaccacttag

SEQ ID NO: 377226 - DNA, 15 bp, Homo sapiens
ggggaagaccactta

SEQ ID NO: 377227 - DNA, 15 bp, Homo sapiens
tggggaagaccactt

SEQ ID NO: 377228 - DNA, 15 bp, Homo sapiens
ctggggaagaccact

SEQ ID NO: 377229 - DNA, 15 bp, Homo sapiens
actggggaagaccac

SEQ ID NO: 377230 - DNA, 15 bp, Homo sapiens
aactggggaagacca

SEQ ID NO: 377231 - DNA, 15 bp, Homo sapiens
caactggggaagacc

SEQ ID NO: 377232 - DNA, 15 bp, Homo sapiens
ccaactggggaagac

SEQ ID NO: 377233 - DNA, 15 bp, Homo sapiens
tccaactggggaaga

SEQ ID NO: 377234 - DNA, 15 bp, Homo sapiens
ctccaactggggaag

SEQ ID NO: 377235 - DNA, 15 bp, Homo sapiens
gctccaactggggaa

SEQ ID NO: 377236 - DNA, 15 bp, Homo sapiens
cgctccaactgggga

SEQ ID NO: 377237 - DNA, 15 bp, Homo sapiens
gcgctccaactgggg

SEQ ID NO: 377238 - DNA, 15 bp, Homo sapiens
tgcgctccaactggg

SEQ ID NO: 377239 - DNA, 15 bp, Homo sapiens
ttgcgctccaactgg

SEQ ID NO: 377240 - DNA, 15 bp, Homo sapiens
tttgcgctccaactg

SEQ ID NO: 377241 - DNA, 15 bp, Homo sapiens
gtttgcgctccaact

SEQ ID NO: 377242 - DNA, 15 bp, Homo sapiens
tgtttgcgctccaac

SEQ ID NO: 377243 - DNA, 15 bp, Homo sapiens
gtgtttgcgctccaa

SEQ ID NO: 377244 - DNA, 15 bp, Homo sapiens
tgtgtttgcgctcca

SEQ ID NO: 377245 - DNA, 15 bp, Homo sapiens
ctgtgtttgcgctcc

SEQ ID NO: 377246 - DNA, 15 bp, Homo sapiens
cctgtgtttgcgctc

SEQ ID NO: 377247 - DNA, 15 bp, Homo sapiens
gcctgtgtttgcgct

SEQ ID NO: 377248 - DNA, 15 bp, Homo sapiens
agcctgtgtttgcgc

SEQ ID NO: 377249 - DNA, 15 bp, Homo sapiens
cagcctgtgtttgcg

SEQ ID NO: 377250 - DNA, 15 bp, Homo sapiens
tcagcctgtgtttgc

SEQ ID NO: 377251 - DNA, 15 bp, Homo sapiens
ttcagcctgtgtttg

SEQ ID NO: 377252 - DNA, 15 bp, Homo sapiens
cttcagcctgtgttt

SEQ ID NO: 377253 - DNA, 15 bp, Homo sapiens
acttcagcctgtgtt

SEQ ID NO: 377254 - DNA, 15 bp, Homo sapiens
gacttcagcctgtgt

SEQ ID NO: 377255 - DNA, 15 bp, Homo sapiens
ggacttcagcctgtg

SEQ ID NO: 377256 - DNA, 15 bp, Homo sapiens
aggacttcagcctgt

SEQ ID NO: 377257 - DNA, 15 bp, Homo sapiens
gaggacttcagcctg

SEQ ID NO: 377258 - DNA, 15 bp, Homo sapiens
agaggacttcagcct

SEQ ID NO: 377259 - DNA, 15 bp, Homo sapiens
gagaggacttcagcc

SEQ ID NO: 377260 - DNA, 15 bp, Homo sapiens
ggagaggacttcagc

SEQ ID NO: 377261 - DNA, 15 bp, Homo sapiens
aggagaggacttcag

SEQ ID NO: 377262 - DNA, 15 bp, Homo sapiens
aaggagaggacttca

SEQ ID NO: 377263 - DNA, 15 bp, Homo sapiens
aaaggagaggacttc

SEQ ID NO: 377264 - DNA, 15 bp, Homo sapiens
gaaaggagaggactt

SEQ ID NO: 377265 - DNA, 15 bp, Homo sapiens
agaaaggagaggact

SEQ ID NO: 377266 - DNA, 15 bp, Homo sapiens
gagaaaggagaggac

SEQ ID NO: 377267 - DNA, 15 bp, Homo sapiens
tgagaaaggagagga

SEQ ID NO: 377268 - DNA, 15 bp, Homo sapiens
ttgagaaaggagagg

SEQ ID NO: 377269 - DNA, 15 bp, Homo sapiens
gttgagaaaggagag

SEQ ID NO: 377270 - DNA, 15 bp, Homo sapiens
tgttgagaaaggaga

SEQ ID NO: 377271 - DNA, 15 bp, Homo sapiens
gtgttgagaaaggag

SEQ ID NO: 377272 - DNA, 15 bp, Homo sapiens
ggtgttgagaaagga

SEQ ID NO: 377273 - DNA, 15 bp, Homo sapiens
gggtgttgagaaagg

SEQ ID NO: 377274 - DNA, 15 bp, Homo sapiens
tgggtgttgagaaag

SEQ ID NO: 377275 - DNA, 15 bp, Homo sapiens
gtgggtgttgagaaa

SEQ ID NO: 377276 - DNA, 15 bp, Homo sapiens
ggtgggtgttgagaa

SEQ ID NO: 377277 - DNA, 15 bp, Homo sapiens
aggtgggtgttgaga

SEQ ID NO: 377278 - DNA, 15 bp, Homo sapiens
gaggtgggtgttgag

SEQ ID NO: 377279 - DNA, 15 bp, Homo sapiens
ggaggtgggtgttga

SEQ ID NO: 377280 - DNA, 15 bp, Homo sapiens
gggaggtgggtgttg

SEQ ID NO: 377281 - DNA, 15 bp, Homo sapiens
ggggaggtgggtgtt

SEQ ID NO: 377282 - DNA, 15 bp, Homo sapiens
gggggaggtgggtgt

SEQ ID NO: 377283 - DNA, 15 bp, Homo sapiens
agggggaggtgggtg

SEQ ID NO: 377284 - DNA, 15 bp, Homo sapiens
aagggggaggtgggt

SEQ ID NO: 377285 - DNA, 15 bp, Homo sapiens
gaagggggaggtggg

SEQ ID NO: 377286 - DNA, 15 bp, Homo sapiens
ggaagggggaggtgg

SEQ ID NO: 377287 - DNA, 15 bp, Homo sapiens
gggaagggggaggtg

SEQ ID NO: 377288 - DNA, 15 bp, Homo sapiens
agggaagggggaggt

SEQ ID NO: 377289 - DNA, 15 bp, Homo sapiens
aagggaagggggagg

SEQ ID NO: 377290 - DNA, 15 bp, Homo sapiens
aaagggaagggggag

SEQ ID NO: 377291 - DNA, 15 bp, Homo sapiens
taaagggaaggggga

SEQ ID NO: 377292 - DNA, 15 bp, Homo sapiens
ttaaagggaaggggg

SEQ ID NO: 377293 - DNA, 15 bp, Homo sapiens
tttaaagggaagggg

SEQ ID NO: 377294 - DNA, 15 bp, Homo sapiens
ctttaaagggaaggg

SEQ ID NO: 377295 - DNA, 15 bp, Homo sapiens
cctttaaagggaagg

SEQ ID NO: 377296 - DNA, 15 bp, Homo sapiens
ccctttaaagggaag

SEQ ID NO: 377297 - DNA, 15 bp, Homo sapiens
tccctttaaagggaa

SEQ ID NO: 377298 - DNA, 15 bp, Homo sapiens
ctccctttaaaggga

SEQ ID NO: 377299 - DNA, 15 bp, Homo sapiens
cctccctttaaaggg

SEQ ID NO: 377300 - DNA, 15 bp, Homo sapiens
tcctccctttaaagg

SEQ ID NO: 377301 - DNA, 15 bp, Homo sapiens
atcctccctttaaag

SEQ ID NO: 377302 - DNA, 15 bp, Homo sapiens
aatcctccctttaaa

SEQ ID NO: 377303 - DNA, 15 bp, Homo sapiens
aaatcctccctttaa

SEQ ID NO: 377304 - DNA, 15 bp, Homo sapiens
aaaatcctcccttta

SEQ ID NO: 377305 - DNA, 15 bp, Homo sapiens
taaaatcctcccttt

SEQ ID NO: 377306 - DNA, 15 bp, Homo sapiens
ataaaatcctccctt

SEQ ID NO: 377307 - DNA, 15 bp, Homo sapiens
cataaaatcctccct

SEQ ID NO: 377308 - DNA, 15 bp, Homo sapiens
gcataaaatcctccc

SEQ ID NO: 377309 - DNA, 15 bp, Homo sapiens
agcataaaatcctcc

SEQ ID NO: 377310 - DNA, 15 bp, Homo sapiens
aagcataaaatcctc

SEQ ID NO: 377311 - DNA, 15 bp, Homo sapiens
aaagcataaaatcct

SEQ ID NO: 377312 - DNA, 15 bp, Homo sapiens
taaagcataaaatcc

SEQ ID NO: 377313 - DNA, 15 bp, Homo sapiens
ttaaagcataaaatc

SEQ ID NO: 377314 - DNA, 15 bp, Homo sapiens
cttaaagcataaaat

SEQ ID NO: 377315 - DNA, 15 bp, Homo sapiens
ccttaaagcataaaa

SEQ ID NO: 377316 - DNA, 15 bp, Homo sapiens
cccttaaagcataaa

SEQ ID NO: 377317 - DNA, 15 bp, Homo sapiens
tcccttaaagcataa

SEQ ID NO: 377318 - DNA, 15 bp, Homo sapiens
ttcccttaaagcata

SEQ ID NO: 377319 - DNA, 15 bp, Homo sapiens
tttcccttaaagcat

SEQ ID NO: 377320 - DNA, 15 bp, Homo sapiens
atttcccttaaagca

SEQ ID NO: 377321 - DNA, 15 bp, Homo sapiens
catttcccttaaagc

SEQ ID NO: 377322 - DNA, 15 bp, Homo sapiens
ccatttcccttaaag

SEQ ID NO: 377323 - DNA, 15 bp, Homo sapiens
cccatttcccttaaa

SEQ ID NO: 377324 - DNA, 15 bp, Homo sapiens
ccccatttcccttaa

SEQ ID NO: 377325 - DNA, 15 bp, Homo sapiens
tccccatttccctta

SEQ ID NO: 377326 - DNA, 15 bp, Homo sapiens
ttccccatttccctt

SEQ ID NO: 377327 - DNA, 15 bp, Homo sapiens
cttccccatttccct

SEQ ID NO: 377328 - DNA, 15 bp, Homo sapiens
ccttccccatttccc

SEQ ID NO: 377329 - DNA, 15 bp, Homo sapiens
accttccccatttcc

SEQ ID NO: 377330 - DNA, 15 bp, Homo sapiens
aaccttccccatttc

SEQ ID NO: 377331 - DNA, 15 bp, Homo sapiens
caaccttccccattt

SEQ ID NO: 377332 - DNA, 15 bp, Homo sapiens
ccaaccttccccatt

SEQ ID NO: 377333 - DNA, 15 bp, Homo sapiens
cccaaccttccccat

SEQ ID NO: 377334 - DNA, 15 bp, Homo sapiens
ccccaaccttcccca

SEQ ID NO: 377335 - DNA, 15 bp, Homo sapiens
cccccaaccttcccc

SEQ ID NO: 377336 - DNA, 15 bp, Homo sapiens
ccccccaaccttccc

SEQ ID NO: 377337 - DNA, 15 bp, Homo sapiens
cccccccaaccttcc

SEQ ID NO: 377338 - DNA, 15 bp, Homo sapiens
ccccccccaaccttc

SEQ ID NO: 377339 - DNA, 15 bp, Homo sapiens
cccccccccaacctt

SEQ ID NO: 377340 - DNA, 15 bp, Homo sapiens
gcccccccccaacct

SEQ ID NO: 377341 - DNA, 15 bp, Homo sapiens
tgcccccccccaacc

SEQ ID NO: 377342 - DNA, 15 bp, Homo sapiens
ttgcccccccccaac

SEQ ID NO: 377343 - DNA, 15 bp, Homo sapiens
gttgcccccccccaa

SEQ ID NO: 377344 - DNA, 15 bp, Homo sapiens
tgttgccccccccca

SEQ ID NO: 377345 - DNA, 15 bp, Homo sapiens
gtgttgccccccccc

SEQ ID NO: 377346 - DNA, 15 bp, Homo sapiens
ggtgttgcccccccc

SEQ ID NO: 377347 - DNA, 15 bp, Homo sapiens
aggtgttgccccccc

SEQ ID NO: 377348 - DNA, 15 bp, Homo sapiens
aaggtgttgcccccc

SEQ ID NO: 377349 - DNA, 15 bp, Homo sapiens
taaggtgttgccccc

SEQ ID NO: 377350 - DNA, 15 bp, Homo sapiens
ttaaggtgttgcccc

SEQ ID NO: 377351 - DNA, 15 bp, Homo sapiens
tttaaggtgttgccc

SEQ ID NO: 377352 - DNA, 15 bp, Homo sapiens
ctttaaggtgttgcc

SEQ ID NO: 377353 - DNA, 15 bp, Homo sapiens
cctttaaggtgttgc

SEQ ID NO: 377354 - DNA, 15 bp, Homo sapiens
tcctttaaggtgttg

SEQ ID NO: 377355 - DNA, 15 bp, Homo sapiens
ttcctttaaggtgtt

SEQ ID NO: 377356 - DNA, 15 bp, Homo sapiens
attcctttaaggtgt

SEQ ID NO: 377357 - DNA, 15 bp, Homo sapiens
aattcctttaaggtg

SEQ ID NO: 377358 - DNA, 15 bp, Homo sapiens
aaattcctttaaggt

SEQ ID NO: 377359 - DNA, 15 bp, Homo sapiens
aaaattcctttaagg

SEQ ID NO: 377360 - DNA, 15 bp, Homo sapiens
taaaattcctttaag

SEQ ID NO: 377361 - DNA, 15 bp, Homo sapiens
ctaaaattcctttaa

SEQ ID NO: 377362 - DNA, 15 bp, Homo sapiens
cctaaaattccttta

SEQ ID NO: 377363 - DNA, 15 bp, Homo sapiens
gcctaaaattccttt

SEQ ID NO: 377364 - DNA, 15 bp, Homo sapiens
tgcctaaaattcctt

SEQ ID NO: 377365 - DNA, 15 bp, Homo sapiens
ctgcctaaaattcct

SEQ ID NO: 377366 - DNA, 15 bp, Homo sapiens
tctgcctaaaattcc

SEQ ID NO: 377367 - DNA, 15 bp, Homo sapiens
atctgcctaaaattc

SEQ ID NO: 377368 - DNA, 15 bp, Homo sapiens
aatctgcctaaaatt

SEQ ID NO: 377369 - DNA, 15 bp, Homo sapiens
gaatctgcctaaaat

SEQ ID NO: 377370 - DNA, 15 bp, Homo sapiens
tgaatctgcctaaaa

SEQ ID NO: 377371 - DNA, 15 bp, Homo sapiens
ctgaatctgcctaaa

SEQ ID NO: 377372 - DNA, 15 bp, Homo sapiens
gctgaatctgcctaa

SEQ ID NO: 377373 - DNA, 15 bp, Homo sapiens
tgctgaatctgccta

SEQ ID NO: 377374 - DNA, 15 bp, Homo sapiens
atgctgaatctgcct

SEQ ID NO: 377375 - DNA, 15 bp, Homo sapiens
aatgctgaatctgcc

SEQ ID NO: 377376 - DNA, 15 bp, Homo sapiens
aaatgctgaatctgc

SEQ ID NO: 377377 - DNA, 15 bp, Homo sapiens
aaaatgctgaatctg

SEQ ID NO: 377378 - DNA, 15 bp, Homo sapiens
aaaaatgctgaatct

SEQ ID NO: 377379 - DNA, 15 bp, Homo sapiens
gaaaaatgctgaatc

SEQ ID NO: 377380 - DNA, 15 bp, Homo sapiens
agaaaaatgctgaat

SEQ ID NO: 377381 - DNA, 15 bp, Homo sapiens
cagaaaaatgctgaa

SEQ ID NO: 377382 - DNA, 15 bp, Homo sapiens
ccagaaaaatgctga

SEQ ID NO: 377383 - DNA, 15 bp, Homo sapiens
accagaaaaatgctg

SEQ ID NO: 377384 - DNA, 15 bp, Homo sapiens
caccagaaaaatgct

SEQ ID NO: 377385 - DNA, 15 bp, Homo sapiens
acaccagaaaaatgc

SEQ ID NO: 377386 - DNA, 15 bp, Homo sapiens
aacaccagaaaaatg

SEQ ID NO: 377387 - DNA, 15 bp, Homo sapiens
caacaccagaaaaat

SEQ ID NO: 377388 - DNA, 15 bp, Homo sapiens
gcaacaccagaaaaa

SEQ ID NO: 377389 - DNA, 15 bp, Homo sapiens
agcaacaccagaaaa

SEQ ID NO: 377390 - DNA, 15 bp, Homo sapiens
gagcaacaccagaaa

SEQ ID NO: 377391 - DNA, 15 bp, Homo sapiens
ggagcaacaccagaa

SEQ ID NO: 377392 - DNA, 15 bp, Homo sapiens
tggagcaacaccaga

SEQ ID NO: 377393 - DNA, 15 bp, Homo sapiens
ttggagcaacaccag

SEQ ID NO: 377394 - DNA, 15 bp, Homo sapiens
tttggagcaacacca

SEQ ID NO: 377395 - DNA, 15 bp, Homo sapiens
ttttggagcaacacc

SEQ ID NO: 377396 - DNA, 15 bp, Homo sapiens
tttttggagcaacac

SEQ ID NO: 377397 - DNA, 15 bp, Homo sapiens
atttttggagcaaca

SEQ ID NO: 377398 - DNA, 15 bp, Homo sapiens
aatttttggagcaac

SEQ ID NO: 377399 - DNA, 15 bp, Homo sapiens
gaatttttggagcaa

SEQ ID NO: 377400 - DNA, 15 bp, Homo sapiens
ggaatttttggagca

SEQ ID NO: 377401 - DNA, 15 bp, Homo sapiens
gggaatttttggagc

SEQ ID NO: 377402 - DNA, 15 bp, Homo sapiens
ggggaatttttggag

SEQ ID NO: 377403 - DNA, 15 bp, Homo sapiens
tggggaatttttgga

SEQ ID NO: 377404 - DNA, 15 bp, Homo sapiens
gtggggaatttttgg

SEQ ID NO: 377405 - DNA, 15 bp, Homo sapiens
tgtggggaatttttg

SEQ ID NO: 377406 - DNA, 15 bp, Homo sapiens
gtgtggggaattttt

SEQ ID NO: 377407 - DNA, 15 bp, Homo sapiens
agtgtggggaatttt

SEQ ID NO: 377408 - DNA, 15 bp, Homo sapiens
cagtgtggggaattt

SEQ ID NO: 377409 - DNA, 15 bp, Homo sapiens
acagtgtggggaatt

SEQ ID NO: 377410 - DNA, 15 bp, Homo sapiens
tacagtgtggggaat

SEQ ID NO: 377411 - DNA, 15 bp, Homo sapiens
ttacagtgtggggaa

SEQ ID NO: 377412 - DNA, 15 bp, Homo sapiens
attacagtgtgggga

SEQ ID NO: 377413 - DNA, 15 bp, Homo sapiens
tattacagtgtgggg

SEQ ID NO: 377414 - DNA, 15 bp, Homo sapiens
ttattacagtgtggg

SEQ ID NO: 377415 - DNA, 15 bp, Homo sapiens
tttattacagtgtgg

SEQ ID NO: 377416 - DNA, 15 bp, Homo sapiens
ttttattacagtgtg

SEQ ID NO: 377417 - DNA, 15 bp, Homo sapiens
tttttattacagtgt

SEQ ID NO: 377418 - DNA, 15 bp, Homo sapiens
ctttttattacagtg

SEQ ID NO: 377419 - DNA, 15 bp, Homo sapiens
tctttttattacagt

SEQ ID NO: 377420 - DNA, 15 bp, Homo sapiens
atctttttattacag

SEQ ID NO: 377421 - DNA, 15 bp, Homo sapiens
tatctttttattaca

SEQ ID NO: 377422 - DNA, 15 bp, Homo sapiens
gtatctttttattac

SEQ ID NO: 377423 - DNA, 15 bp, Homo sapiens
tgtatctttttatta

SEQ ID NO: 377424 - DNA, 15 bp, Homo sapiens
ttgtatctttttatt

SEQ ID NO: 377425 - DNA, 15 bp, Homo sapiens
gttgtatctttttat

SEQ ID NO: 377426 - DNA, 15 bp, Homo sapiens
agttgtatcttttta

SEQ ID NO: 377427 - DNA, 15 bp, Homo sapiens
cagttgtatcttttt

SEQ ID NO: 377428 - DNA, 15 bp, Homo sapiens
acagttgtatctttt

SEQ ID NO: 377429 - DNA, 15 bp, Homo sapiens
cacagttgtatcttt

SEQ ID NO: 377430 - DNA, 15 bp, Homo sapiens
tcacagttgtatctt

SEQ ID NO: 377431 - DNA, 15 bp, Homo sapiens
ctcacagttgtatct

SEQ ID NO: 377432 - DNA, 15 bp, Homo sapiens
gctcacagttgtatc

SEQ ID NO: 377433 - DNA, 15 bp, Homo sapiens
tgctcacagttgtat

SEQ ID NO: 377434 - DNA, 15 bp, Homo sapiens
ctgctcacagttgta

SEQ ID NO: 377435 - DNA, 15 bp, Homo sapiens
cctgctcacagttgt

SEQ ID NO: 377436 - DNA, 15 bp, Homo sapiens
gcctgctcacagttg

SEQ ID NO: 377437 - DNA, 15 bp, Homo sapiens
tgcctgctcacagtt

SEQ ID NO: 377438 - DNA, 15 bp, Homo sapiens
atgcctgctcacagt

SEQ ID NO: 377439 - DNA, 15 bp, Homo sapiens
gatgcctgctcacag

SEQ ID NO: 377440 - DNA, 15 bp, Homo sapiens
agatgcctgctcaca

SEQ ID NO: 377441 - DNA, 15 bp, Homo sapiens
cagatgcctgctcac

SEQ ID NO: 377442 - DNA, 15 bp, Homo sapiens
tcagatgcctgctca

SEQ ID NO: 377443 - DNA, 15 bp, Homo sapiens
atcagatgcctgctc

SEQ ID NO: 377444 - DNA, 15 bp, Homo sapiens
aatcagatgcctgct

SEQ ID NO: 377445 - DNA, 15 bp, Homo sapiens
taatcagatgcctgc

SEQ ID NO: 377446 - DNA, 15 bp, Homo sapiens
ctaatcagatgcctg

SEQ ID NO: 377447 - DNA, 15 bp, Homo sapiens
actaatcagatgcct

SEQ ID NO: 377448 - DNA, 15 bp, Homo sapiens
cactaatcagatgcc

SEQ ID NO: 377449 - DNA, 15 bp, Homo sapiens
tcactaatcagatgc

SEQ ID NO: 377450 - DNA, 15 bp, Homo sapiens
ctcactaatcagatg

SEQ ID NO: 377451 - DNA, 15 bp, Homo sapiens
gctcactaatcagat

SEQ ID NO: 377452 - DNA, 15 bp, Homo sapiens
agctcactaatcaga

SEQ ID NO: 377453 - DNA, 15 bp, Homo sapiens
aagctcactaatcag

SEQ ID NO: 377454 - DNA, 15 bp, Homo sapiens
aaagctcactaatca

SEQ ID NO: 377455 - DNA, 15 bp, Homo sapiens
aaaagctcactaatc

SEQ ID NO: 377456 - DNA, 15 bp, Homo sapiens
aaaaagctcactaat

SEQ ID NO: 377457 - DNA, 15 bp, Homo sapiens
taaaaagctcactaa

SEQ ID NO: 377458 - DNA, 15 bp, Homo sapiens
gtaaaaagctcacta

SEQ ID NO: 377459 - DNA, 15 bp, Homo sapiens
tgtaaaaagctcact

SEQ ID NO: 377460 - DNA, 15 bp, Homo sapiens
ttgtaaaaagctcac

SEQ ID NO: 377461 - DNA, 15 bp, Homo sapiens
gttgtaaaaagctca

SEQ ID NO: 377462 - DNA, 15 bp, Homo sapiens
tgttgtaaaaagctc

SEQ ID NO: 377463 - DNA, 15 bp, Homo sapiens
gtgttgtaaaaagct

SEQ ID NO: 377464 - DNA, 15 bp, Homo sapiens
tgtgttgtaaaaagc

SEQ ID NO: 377465 - DNA, 15 bp, Homo sapiens
ctgtgttgtaaaaag

SEQ ID NO: 377466 - DNA, 15 bp, Homo sapiens
gctgtgttgtaaaaa

SEQ ID NO: 377467 - DNA, 15 bp, Homo sapiens
agctgtgttgtaaaa

SEQ ID NO: 377468 - DNA, 15 bp, Homo sapiens
aagctgtgttgtaaa

SEQ ID NO: 377469 - DNA, 15 bp, Homo sapiens
aaagctgtgttgtaa

SEQ ID NO: 377470 - DNA, 15 bp, Homo sapiens
aaaagctgtgttgta

SEQ ID NO: 377471 - DNA, 15 bp, Homo sapiens
gaaaagctgtgttgt

SEQ ID NO: 377472 - DNA, 15 bp, Homo sapiens
agaaaagctgtgttg

SEQ ID NO: 377473 - DNA, 15 bp, Homo sapiens
aagaaaagctgtgtt

SEQ ID NO: 377474 - DNA, 15 bp, Homo sapiens
aaagaaaagctgtgt

SEQ ID NO: 377475 - DNA, 15 bp, Homo sapiens
aaaagaaaagctgtg

SEQ ID NO: 377476 - DNA, 15 bp, Homo sapiens
caaaagaaaagctgt

SEQ ID NO: 377477 - DNA, 15 bp, Homo sapiens
ccaaaagaaaagctg

SEQ ID NO: 377478 - DNA, 15 bp, Homo sapiens
tccaaaagaaaagct

SEQ ID NO: 377479 - DNA, 15 bp, Homo sapiens
atccaaaagaaaagc

SEQ ID NO: 377480 - DNA, 15 bp, Homo sapiens
catccaaaagaaaag

SEQ ID NO: 377481 - DNA, 15 bp, Homo sapiens
gcatccaaaagaaaa

SEQ ID NO: 377482 - DNA, 15 bp, Homo sapiens
agcatccaaaagaaa

SEQ ID NO: 377483 - DNA, 15 bp, Homo sapiens
aagcatccaaaagaa

SEQ ID NO: 377484 - DNA, 15 bp, Homo sapiens
aaagcatccaaaaga

SEQ ID NO: 377485 - DNA, 15 bp, Homo sapiens
taaagcatccaaaag

SEQ ID NO: 377486 - DNA, 15 bp, Homo sapiens
ttaaagcatccaaaa

SEQ ID NO: 377487 - DNA, 15 bp, Homo sapiens
tttaaagcatccaaa

SEQ ID NO: 377488 - DNA, 15 bp, Homo sapiens
ttttaaagcatccaa

SEQ ID NO: 377489 - DNA, 15 bp, Homo sapiens
attttaaagcatcca

SEQ ID NO: 377490 - DNA, 15 bp, Homo sapiens
cattttaaagcatcc

SEQ ID NO: 377491 - DNA, 15 bp, Homo sapiens
tcattttaaagcatc

SEQ ID NO: 377492 - DNA, 15 bp, Homo sapiens
ttcattttaaagcat

SEQ ID NO: 377493 - DNA, 15 bp, Homo sapiens
gttcattttaaagca

SEQ ID NO: 377494 - DNA, 15 bp, Homo sapiens
tgttcattttaaagc

SEQ ID NO: 377495 - DNA, 15 bp, Homo sapiens
gtgttcattttaaag

SEQ ID NO: 377496 - DNA, 15 bp, Homo sapiens
tgtgttcattttaaa

SEQ ID NO: 377497 - DNA, 15 bp, Homo sapiens
atgtgttcattttaa

SEQ ID NO: 377498 - DNA, 15 bp, Homo sapiens
tatgtgttcatttta

SEQ ID NO: 377499 - DNA, 15 bp, Homo sapiens
gtatgtgttcatttt

SEQ ID NO: 377500 - DNA, 15 bp, Homo sapiens
agtatgtgttcattt

SEQ ID NO: 377501 - DNA, 15 bp, Homo sapiens
cagtatgtgttcatt

SEQ ID NO: 377502 - DNA, 15 bp, Homo sapiens
acagtatgtgttcat

SEQ ID NO: 377503 - DNA, 15 bp, Homo sapiens
aacagtatgtgttca

SEQ ID NO: 377504 - DNA, 15 bp, Homo sapiens
aaacagtatgtgttc

SEQ ID NO: 377505 - DNA, 15 bp, Homo sapiens
aaaacagtatgtgtt

SEQ ID NO: 377506 - DNA, 15 bp, Homo sapiens
taaaacagtatgtgt

SEQ ID NO: 377507 - DNA, 15 bp, Homo sapiens
ttaaaacagtatgtg

SEQ ID NO: 377508 - DNA, 15 bp, Homo sapiens
tttaaaacagtatgt

SEQ ID NO: 377509 - DNA, 15 bp, Homo sapiens
ttttaaaacagtatg

SEQ ID NO: 377510 - DNA, 15 bp, Homo sapiens
gttttaaaacagtat

SEQ ID NO: 377511 - DNA, 15 bp, Homo sapiens
tgttttaaaacagta

SEQ ID NO: 377512 - DNA, 15 bp, Homo sapiens
ttgttttaaaacagt

SEQ ID NO: 377513 - DNA, 15 bp, Homo sapiens
cttgttttaaaacag

SEQ ID NO: 377514 - DNA, 15 bp, Homo sapiens
gcttgttttaaaaca

SEQ ID NO: 377515 - DNA, 15 bp, Homo sapiens
ggcttgttttaaaac

SEQ ID NO: 377516 - DNA, 15 bp, Homo sapiens
gggcttgttttaaaa

SEQ ID NO: 377517 - DNA, 15 bp, Homo sapiens
ggggcttgttttaaa

SEQ ID NO: 377518 - DNA, 15 bp, Homo sapiens
aggggcttgttttaa

SEQ ID NO: 377519 - DNA, 15 bp, Homo sapiens
caggggcttgtttta

SEQ ID NO: 377520 - DNA, 15 bp, Homo sapiens
acaggggcttgtttt

SEQ ID NO: 377521 - DNA, 15 bp, Homo sapiens
tacaggggcttgttt

SEQ ID NO: 377522 - DNA, 15 bp, Homo sapiens
gtacaggggcttgtt

SEQ ID NO: 377523 - DNA, 15 bp, Homo sapiens
tgtacaggggcttgt

SEQ ID NO: 377524 - DNA, 15 bp, Homo sapiens
ctgtacaggggcttg

SEQ ID NO: 377525 - DNA, 15 bp, Homo sapiens
actgtacaggggctt

SEQ ID NO: 377526 - DNA, 15 bp, Homo sapiens
aactgtacaggggct

SEQ ID NO: 377527 - DNA, 15 bp, Homo sapiens
aaactgtacaggggc

SEQ ID NO: 377528 - DNA, 15 bp, Homo sapiens
aaaactgtacagggg

SEQ ID NO: 377529 - DNA, 15 bp, Homo sapiens
gaaaactgtacaggg

SEQ ID NO: 377530 - DNA, 15 bp, Homo sapiens
agaaaactgtacagg

SEQ ID NO: 377531 - DNA, 15 bp, Homo sapiens
cagaaaactgtacag

SEQ ID NO: 377532 - DNA, 15 bp, Homo sapiens
ccagaaaactgtaca

SEQ ID NO: 377533 - DNA, 15 bp, Homo sapiens
cccagaaaactgtac

SEQ ID NO: 377534 - DNA, 15 bp, Homo sapiens
ccccagaaaactgta

SEQ ID NO: 377535 - DNA, 15 bp, Homo sapiens
tccccagaaaactgt

SEQ ID NO: 377536 - DNA, 15 bp, Homo sapiens
ctccccagaaaactg

SEQ ID NO: 377537 - DNA, 15 bp, Homo sapiens
cctccccagaaaact

SEQ ID NO: 377538 - DNA, 15 bp, Homo sapiens
ccctccccagaaaac

SEQ ID NO: 377539 - DNA, 15 bp, Homo sapiens
cccctccccagaaaa

SEQ ID NO: 377540 - DNA, 15 bp, Homo sapiens
ccccctccccagaaa

SEQ ID NO: 377541 - DNA, 15 bp, Homo sapiens
tccccctccccagaa

SEQ ID NO: 377542 - DNA, 15 bp, Homo sapiens
ctccccctccccaga

SEQ ID NO: 377543 - DNA, 15 bp, Homo sapiens
tctccccctccccag

SEQ ID NO: 377544 - DNA, 15 bp, Homo sapiens
ttctccccctcccca

SEQ ID NO: 377545 - DNA, 15 bp, Homo sapiens
cttctccccctcccc

SEQ ID NO: 377546 - DNA, 15 bp, Homo sapiens
acttctccccctccc

SEQ ID NO: 377547 - DNA, 15 bp, Homo sapiens
aacttctccccctcc

SEQ ID NO: 377548 - DNA, 15 bp, Homo sapiens
aaacttctccccctc

SEQ ID NO: 377549 - DNA, 15 bp, Homo sapiens
caaacttctccccct

SEQ ID NO: 377550 - DNA, 15 bp, Homo sapiens
acaaacttctccccc

SEQ ID NO: 377551 - DNA, 15 bp, Homo sapiens
cacaaacttctcccc

SEQ ID NO: 377552 - DNA, 15 bp, Homo sapiens
ccacaaacttctccc

SEQ ID NO: 377553 - DNA, 15 bp, Homo sapiens
tccacaaacttctcc

SEQ ID NO: 377554 - DNA, 15 bp, Homo sapiens
ttccacaaacttctc

SEQ ID NO: 377555 - DNA, 15 bp, Homo sapiens
tttccacaaacttct

SEQ ID NO: 377556 - DNA, 15 bp, Homo sapiens
ttttccacaaacttc

SEQ ID NO: 377557 - DNA, 15 bp, Homo sapiens
attttccacaaactt

SEQ ID NO: 377558 - DNA, 15 bp, Homo sapiens
tattttccacaaact

SEQ ID NO: 377559 - DNA, 15 bp, Homo sapiens
gtattttccacaaac

SEQ ID NO: 377560 - DNA, 15 bp, Homo sapiens
ggtattttccacaaa

SEQ ID NO: 377561 - DNA, 15 bp, Homo sapiens
cggtattttccacaa

SEQ ID NO: 377562 - DNA, 15 bp, Homo sapiens
ccggtattttccaca

SEQ ID NO: 377563 - DNA, 15 bp, Homo sapiens
tccggtattttccac

SEQ ID NO: 377564 - DNA, 15 bp, Homo sapiens
ttccggtattttcca

SEQ ID NO: 377565 - DNA, 15 bp, Homo sapiens
tttccggtattttcc

SEQ ID NO: 377566 - DNA, 15 bp, Homo sapiens
ttttccggtattttc

SEQ ID NO: 377567 - DNA, 15 bp, Homo sapiens
cttttccggtatttt

SEQ ID NO: 377568 - DNA, 15 bp, Homo sapiens
ccttttccggtattt

SEQ ID NO: 377569 - DNA, 15 bp, Homo sapiens
accttttccggtatt

SEQ ID NO: 377570 - DNA, 15 bp, Homo sapiens
aaccttttccggtat

SEQ ID NO: 377571 - DNA, 15 bp, Homo sapiens
taaccttttccggta

SEQ ID NO: 377572 - DNA, 15 bp, Homo sapiens
ataaccttttccggt

SEQ ID NO: 377573 - DNA, 15 bp, Homo sapiens
tataaccttttccgg

SEQ ID NO: 377574 - DNA, 15 bp, Homo sapiens
ttataaccttttccg

SEQ ID NO: 377575 - DNA, 15 bp, Homo sapiens
tttataaccttttcc

SEQ ID NO: 377576 - DNA, 15 bp, Homo sapiens
ctttataaccttttc

SEQ ID NO: 377577 - DNA, 15 bp, Homo sapiens
gctttataacctttt

SEQ ID NO: 377578 - DNA, 15 bp, Homo sapiens
agctttataaccttt

SEQ ID NO: 377579 - DNA, 15 bp, Homo sapiens
cagctttataacctt

SEQ ID NO: 377580 - DNA, 15 bp, Homo sapiens
tcagctttataacct

SEQ ID NO: 377581 - DNA, 15 bp, Homo sapiens
ctcagctttataacc

SEQ ID NO: 377582 - DNA, 15 bp, Homo sapiens
cctcagctttataac

SEQ ID NO: 377583 - DNA, 15 bp, Homo sapiens
ccctcagctttataa

SEQ ID NO: 377584 - DNA, 15 bp, Homo sapiens
tccctcagctttata

SEQ ID NO: 377585 - DNA, 15 bp, Homo sapiens
ttccctcagctttat

SEQ ID NO: 377586 - DNA, 15 bp, Homo sapiens
tttccctcagcttta

SEQ ID NO: 377587 - DNA, 15 bp, Homo sapiens
atttccctcagcttt

SEQ ID NO: 377588 - DNA, 15 bp, Homo sapiens
aatttccctcagctt

SEQ ID NO: 377589 - DNA, 15 bp, Homo sapiens
taatttccctcagct

SEQ ID NO: 377590 - DNA, 15 bp, Homo sapiens
ttaatttccctcagc

SEQ ID NO: 377591 - DNA, 15 bp, Homo sapiens
gttaatttccctcag

SEQ ID NO: 377592 - DNA, 15 bp, Homo sapiens
tgttaatttccctca

SEQ ID NO: 377593 - DNA, 15 bp, Homo sapiens
ttgttaatttccctc

SEQ ID NO: 377594 - DNA, 15 bp, Homo sapiens
tttgttaatttccct

SEQ ID NO: 377595 - DNA, 15 bp, Homo sapiens
ctttgttaatttccc

SEQ ID NO: 377596 - DNA, 15 bp, Homo sapiens
cctttgttaatttcc

SEQ ID NO: 377597 - DNA, 15 bp, Homo sapiens
tcctttgttaatttc

SEQ ID NO: 377598 - DNA, 15 bp, Homo sapiens
gtcctttgttaattt

SEQ ID NO: 377599 - DNA, 15 bp, Homo sapiens
agtcctttgttaatt

SEQ ID NO: 377600 - DNA, 15 bp, Homo sapiens
cagtcctttgttaat

SEQ ID NO: 377601 - DNA, 15 bp, Homo sapiens
acagtcctttgttaa

SEQ ID NO: 377602 - DNA, 15 bp, Homo sapiens
cacagtcctttgtta

SEQ ID NO: 377603 - DNA, 15 bp, Homo sapiens
tcacagtcctttgtt

SEQ ID NO: 377604 - DNA, 15 bp, Homo sapiens
ctcacagtcctttgt

SEQ ID NO: 377605 - DNA, 15 bp, Homo sapiens
actcacagtcctttg

SEQ ID NO: 377606 - DNA, 15 bp, Homo sapiens
aactcacagtccttt

SEQ ID NO: 377607 - DNA, 15 bp, Homo sapiens
aaactcacagtcctt

SEQ ID NO: 377608 - DNA, 15 bp, Homo sapiens
aaaactcacagtcct

SEQ ID NO: 377609 - DNA, 15 bp, Homo sapiens
caaaactcacagtcc

SEQ ID NO: 377610 - DNA, 15 bp, Homo sapiens
gcaaaactcacagtc

SEQ ID NO: 377611 - DNA, 15 bp, Homo sapiens
ggcaaaactcacagt

SEQ ID NO: 377612 - DNA, 15 bp, Homo sapiens
aggcaaaactcacag

SEQ ID NO: 377613 - DNA, 15 bp, Homo sapiens
aaggcaaaactcaca

SEQ ID NO: 377614 - DNA, 15 bp, Homo sapiens
gaaggcaaaactcac

SEQ ID NO: 377615 - DNA, 15 bp, Homo sapiens
tgaaggcaaaactca

SEQ ID NO: 377616 - DNA, 15 bp, Homo sapiens
ctgaaggcaaaactc

SEQ ID NO: 377617 - DNA, 15 bp, Homo sapiens
tctgaaggcaaaact

SEQ ID NO: 377618 - DNA, 15 bp, Homo sapiens
ctctgaaggcaaaac

SEQ ID NO: 377619 - DNA, 15 bp, Homo sapiens
cctctgaaggcaaaa

SEQ ID NO: 377620 - DNA, 15 bp, Homo sapiens
acctctgaaggcaaa

SEQ ID NO: 377621 - DNA, 15 bp, Homo sapiens
aacctctgaaggcaa

SEQ ID NO: 377622 - DNA, 15 bp, Homo sapiens
taacctctgaaggca

SEQ ID NO: 377623 - DNA, 15 bp, Homo sapiens
ttaacctctgaaggc

SEQ ID NO: 377624 - DNA, 15 bp, Homo sapiens
gttaacctctgaagg

SEQ ID NO: 377625 - DNA, 15 bp, Homo sapiens
agttaacctctgaag

SEQ ID NO: 377626 - DNA, 15 bp, Homo sapiens
tagttaacctctgaa

SEQ ID NO: 377627 - DNA, 15 bp, Homo sapiens
atagttaacctctga

SEQ ID NO: 377628 - DNA, 15 bp, Homo sapiens
gatagttaacctctg

SEQ ID NO: 377629 - DNA, 15 bp, Homo sapiens
tgatagttaacctct

SEQ ID NO: 377630 - DNA, 15 bp, Homo sapiens
ctgatagttaacctc

SEQ ID NO: 377631 - DNA, 15 bp, Homo sapiens
gctgatagttaacct

SEQ ID NO: 377632 - DNA, 15 bp, Homo sapiens
cgctgatagttaacc

SEQ ID NO: 377633 - DNA, 15 bp, Homo sapiens
tcgctgatagttaac

SEQ ID NO: 377634 - DNA, 15 bp, Homo sapiens
ctcgctgatagttaa

SEQ ID NO: 377635 - DNA, 15 bp, Homo sapiens
tctcgctgatagtta

SEQ ID NO: 377636 - DNA, 15 bp, Homo sapiens
ctctcgctgatagtt

SEQ ID NO: 377637 - DNA, 15 bp, Homo sapiens
cctctcgctgatagt

SEQ ID NO: 377638 - DNA, 15 bp, Homo sapiens
gcctctcgctgatag

SEQ ID NO: 377639 - DNA, 15 bp, Homo sapiens
ggcctctcgctgata

SEQ ID NO: 377640 - DNA, 15 bp, Homo sapiens
tggcctctcgctgat

SEQ ID NO: 377641 - DNA, 15 bp, Homo sapiens
ttggcctctcgctga

SEQ ID NO: 377642 - DNA, 15 bp, Homo sapiens
cttggcctctcgctg

SEQ ID NO: 377643 - DNA, 15 bp, Homo sapiens
ccttggcctctcgct

SEQ ID NO: 377644 - DNA, 15 bp, Homo sapiens
gccttggcctctcgc

SEQ ID NO: 377645 - DNA, 15 bp, Homo sapiens
agccttggcctctcg

SEQ ID NO: 377646 - DNA, 15 bp, Homo sapiens
gagccttggcctctc

SEQ ID NO: 377647 - DNA, 15 bp, Homo sapiens
agagccttggcctct

SEQ ID NO: 377648 - DNA, 15 bp, Homo sapiens
aagagccttggcctc

SEQ ID NO: 377649 - DNA, 15 bp, Homo sapiens
gaagagccttggcct

SEQ ID NO: 377650 - DNA, 15 bp, Homo sapiens
ggaagagccttggcc

SEQ ID NO: 377651 - DNA, 15 bp, Homo sapiens
aggaagagccttggc

SEQ ID NO: 377652 - DNA, 15 bp, Homo sapiens
aaggaagagccttgg

SEQ ID NO: 377653 - DNA, 15 bp, Homo sapiens
taaggaagagccttg

SEQ ID NO: 377654 - DNA, 15 bp, Homo sapiens
ctaaggaagagcctt

SEQ ID NO: 377655 - DNA, 15 bp, Homo sapiens
actaaggaagagcct

SEQ ID NO: 377656 - DNA, 15 bp, Homo sapiens
gactaaggaagagcc

SEQ ID NO: 377657 - DNA, 15 bp, Homo sapiens
ggactaaggaagagc

SEQ ID NO: 377658 - DNA, 15 bp, Homo sapiens
aggactaaggaagag

SEQ ID NO: 377659 - DNA, 15 bp, Homo sapiens
aaggactaaggaaga

SEQ ID NO: 377660 - DNA, 15 bp, Homo sapiens
caaggactaaggaag

SEQ ID NO: 377661 - DNA, 15 bp, Homo sapiens
acaaggactaaggaa

SEQ ID NO: 377662 - DNA, 15 bp, Homo sapiens
tacaaggactaagga

SEQ ID NO: 377663 - DNA, 15 bp, Homo sapiens
gtacaaggactaagg

SEQ ID NO: 377664 - DNA, 15 bp, Homo sapiens
agtacaaggactaag

SEQ ID NO: 377665 - DNA, 15 bp, Homo sapiens
cagtacaaggactaa

SEQ ID NO: 377666 - DNA, 15 bp, Homo sapiens
tcagtacaaggacta

SEQ ID NO: 377667 - DNA, 15 bp, Homo sapiens
gtcagtacaaggact

SEQ ID NO: 377668 - DNA, 15 bp, Homo sapiens
agtcagtacaaggac

SEQ ID NO: 377669 - DNA, 15 bp, Homo sapiens
cagtcagtacaagga

SEQ ID NO: 377670 - DNA, 15 bp, Homo sapiens
tcagtcagtacaagg

SEQ ID NO: 377671 - DNA, 15 bp, Homo sapiens
ttcagtcagtacaag

SEQ ID NO: 377672 - DNA, 15 bp, Homo sapiens
gttcagtcagtacaa

SEQ ID NO: 377673 - DNA, 15 bp, Homo sapiens
agttcagtcagtaca

SEQ ID NO: 377674 - DNA, 15 bp, Homo sapiens
aagttcagtcagtac

SEQ ID NO: 377675 - DNA, 15 bp, Homo sapiens
gaagttcagtcagta

SEQ ID NO: 377676 - DNA, 15 bp, Homo sapiens
ggaagttcagtcagt

SEQ ID NO: 377677 - DNA, 15 bp, Homo sapiens
gggaagttcagtcag

SEQ ID NO: 377678 - DNA, 15 bp, Homo sapiens
tgggaagttcagtca

SEQ ID NO: 377679 - DNA, 15 bp, Homo sapiens
ctgggaagttcagtc

SEQ ID NO: 377680 - DNA, 15 bp, Homo sapiens
gctgggaagttcagt

SEQ ID NO: 377681 - DNA, 15 bp, Homo sapiens
ggctgggaagttcag

SEQ ID NO: 377682 - DNA, 15 bp, Homo sapiens
gggctgggaagttca

SEQ ID NO: 377683 - DNA, 15 bp, Homo sapiens
ggggctgggaagttc

SEQ ID NO: 377684 - DNA, 15 bp, Homo sapiens
aggggctgggaagtt

SEQ ID NO: 377685 - DNA, 15 bp, Homo sapiens
gaggggctgggaagt

SEQ ID NO: 377686 - DNA, 15 bp, Homo sapiens
cgaggggctgggaag

SEQ ID NO: 377687 - DNA, 15 bp, Homo sapiens
tcgaggggctgggaa

SEQ ID NO: 377688 - DNA, 15 bp, Homo sapiens
gtcgaggggctggga

SEQ ID NO: 377689 - DNA, 15 bp, Homo sapiens
tgtcgaggggctggg

SEQ ID NO: 377690 - DNA, 15 bp, Homo sapiens
gtgtcgaggggctgg

SEQ ID NO: 377691 - DNA, 15 bp, Homo sapiens
cgtgtcgaggggctg

SEQ ID NO: 377692 - DNA, 15 bp, Homo sapiens
acgtgtcgaggggct

SEQ ID NO: 377693 - DNA, 15 bp, Homo sapiens
cacgtgtcgaggggc

SEQ ID NO: 377694 - DNA, 15 bp, Homo sapiens
ccacgtgtcgagggg

SEQ ID NO: 377695 - DNA, 15 bp, Homo sapiens
gccacgtgtcgaggg

SEQ ID NO: 377696 - DNA, 15 bp, Homo sapiens
ggccacgtgtcgagg

SEQ ID NO: 377697 - DNA, 15 bp, Homo sapiens
gggccacgtgtcgag

SEQ ID NO: 377698 - DNA, 15 bp, Homo sapiens
cgggccacgtgtcga

SEQ ID NO: 377699 - DNA, 15 bp, Homo sapiens
ccgggccacgtgtcg

SEQ ID NO: 377700 - DNA, 15 bp, Homo sapiens
cccgggccacgtgtc

SEQ ID NO: 377701 - DNA, 15 bp, Homo sapiens
tcccgggccacgtgt

SEQ ID NO: 377702 - DNA, 15 bp, Homo sapiens
ttcccgggccacgtg

SEQ ID NO: 377703 - DNA, 15 bp, Homo sapiens
cttcccgggccacgt

SEQ ID NO: 377704 - DNA, 15 bp, Homo sapiens
acttcccgggccacg

SEQ ID NO: 377705 - DNA, 15 bp, Homo sapiens
gacttcccgggccac

SEQ ID NO: 377706 - DNA, 15 bp, Homo sapiens
ggacttcccgggcca

SEQ ID NO: 377707 - DNA, 15 bp, Homo sapiens
gggacttcccgggcc

SEQ ID NO: 377708 - DNA, 15 bp, Homo sapiens
agggacttcccgggc

SEQ ID NO: 377709 - DNA, 15 bp, Homo sapiens
cagggacttcccggg

SEQ ID NO: 377710 - DNA, 15 bp, Homo sapiens
ccagggacttcccgg

SEQ ID NO: 377711 - DNA, 15 bp, Homo sapiens
cccagggacttcccg

SEQ ID NO: 377712 - DNA, 15 bp, Homo sapiens
tcccagggacttccc

SEQ ID NO: 377713 - DNA, 15 bp, Homo sapiens
ctcccagggacttcc

SEQ ID NO: 377714 - DNA, 15 bp, Homo sapiens
gctcccagggacttc

SEQ ID NO: 377715 - DNA, 15 bp, Homo sapiens
tgctcccagggactt

SEQ ID NO: 377716 - DNA, 15 bp, Homo sapiens
ttgctcccagggact

SEQ ID NO: 377717 - DNA, 15 bp, Homo sapiens
tttgctcccagggac

SEQ ID NO: 377718 - DNA, 15 bp, Homo sapiens
ctttgctcccaggga

SEQ ID NO: 377719 - DNA, 15 bp, Homo sapiens
gctttgctcccaggg

SEQ ID NO: 377720 - DNA, 15 bp, Homo sapiens
cgctttgctcccagg

SEQ ID NO: 377721 - DNA, 15 bp, Homo sapiens
acgctttgctcccag

SEQ ID NO: 377722 - DNA, 15 bp, Homo sapiens
gacgctttgctccca

SEQ ID NO: 377723 - DNA, 15 bp, Homo sapiens
ggacgctttgctccc

SEQ ID NO: 377724 - DNA, 15 bp, Homo sapiens
tggacgctttgctcc

SEQ ID NO: 377725 - DNA, 15 bp, Homo sapiens
gtggacgctttgctc

SEQ ID NO: 377726 - DNA, 15 bp, Homo sapiens
tgtggacgctttgct

SEQ ID NO: 377727 - DNA, 15 bp, Homo sapiens
gtgtggacgctttgc

SEQ ID NO: 377728 - DNA, 15 bp, Homo sapiens
tgtgtggacgctttg

SEQ ID NO: 377729 - DNA, 15 bp, Homo sapiens
ctgtgtggacgcttt

SEQ ID NO: 377730 - DNA, 15 bp, Homo sapiens
tctgtgtggacgctt

SEQ ID NO: 377731 - DNA, 15 bp, Homo sapiens
gtctgtgtggacgct

SEQ ID NO: 377732 - DNA, 15 bp, Homo sapiens
ggtctgtgtggacgc

SEQ ID NO: 377733 - DNA, 15 bp, Homo sapiens
aggtctgtgtggacg

SEQ ID NO: 377734 - DNA, 15 bp, Homo sapiens
aaggtctgtgtggac

SEQ ID NO: 377735 - DNA, 15 bp, Homo sapiens
aaaggtctgtgtgga

SEQ ID NO: 377736 - DNA, 15 bp, Homo sapiens
caaaggtctgtgtgg

SEQ ID NO: 377737 - DNA, 15 bp, Homo sapiens
acaaaggtctgtgtg

SEQ ID NO: 377738 - DNA, 15 bp, Homo sapiens
cacaaaggtctgtgt

SEQ ID NO: 377739 - DNA, 15 bp, Homo sapiens
ccacaaaggtctgtg

SEQ ID NO: 377740 - DNA, 15 bp, Homo sapiens
cccacaaaggtctgt

SEQ ID NO: 377741 - DNA, 15 bp, Homo sapiens
ccccacaaaggtctg

SEQ ID NO: 377742 - DNA, 15 bp, Homo sapiens
tccccacaaaggtct

SEQ ID NO: 377743 - DNA, 15 bp, Homo sapiens
ctccccacaaaggtc

SEQ ID NO: 377744 - DNA, 15 bp, Homo sapiens
tctccccacaaaggt

SEQ ID NO: 377745 - DNA, 15 bp, Homo sapiens
gtctccccacaaagg

SEQ ID NO: 377746 - DNA, 15 bp, Homo sapiens
agtctccccacaaag

SEQ ID NO: 377747 - DNA, 15 bp, Homo sapiens
gagtctccccacaaa

SEQ ID NO: 377748 - DNA, 15 bp, Homo sapiens
cgagtctccccacaa

SEQ ID NO: 377749 - DNA, 15 bp, Homo sapiens
acgagtctccccaca

SEQ ID NO: 377750 - DNA, 15 bp, Homo sapiens
cacgagtctccccac

SEQ ID NO: 377751 - DNA, 15 bp, Homo sapiens
acacgagtctcccca

SEQ ID NO: 377752 - DNA, 15 bp, Homo sapiens
cacacgagtctcccc

SEQ ID NO: 377753 - DNA, 15 bp, Homo sapiens
ccacacgagtctccc

SEQ ID NO: 377754 - DNA, 15 bp, Homo sapiens
cccacacgagtctcc

SEQ ID NO: 377755 - DNA, 15 bp, Homo sapiens
gcccacacgagtctc

SEQ ID NO: 377756 - DNA, 15 bp, Homo sapiens
agcccacacgagtct

SEQ ID NO: 377757 - DNA, 15 bp, Homo sapiens
cagcccacacgagtc

SEQ ID NO: 377758 - DNA, 15 bp, Homo sapiens
acagcccacacgagt

SEQ ID NO: 377759 - DNA, 15 bp, Homo sapiens
cacagcccacacgag

SEQ ID NO: 377760 - DNA, 15 bp, Homo sapiens
ccacagcccacacga

SEQ ID NO: 377761 - DNA, 15 bp, Homo sapiens
cccacagcccacacg

SEQ ID NO: 377762 - DNA, 15 bp, Homo sapiens
gcccacagcccacac

SEQ ID NO: 377763 - DNA, 15 bp, Homo sapiens
ggcccacagcccaca

SEQ ID NO: 377764 - DNA, 15 bp, Homo sapiens
gggcccacagcccac

SEQ ID NO: 377765 - DNA, 15 bp, Homo sapiens
cgggcccacagccca

SEQ ID NO: 377766 - DNA, 15 bp, Homo sapiens
tcgggcccacagccc

SEQ ID NO: 377767 - DNA, 15 bp, Homo sapiens
atcgggcccacagcc

SEQ ID NO: 377768 - DNA, 15 bp, Homo sapiens
aatcgggcccacagc

SEQ ID NO: 377769 - DNA, 15 bp, Homo sapiens
gaatcgggcccacag

SEQ ID NO: 377770 - DNA, 15 bp, Homo sapiens
tgaatcgggcccaca

SEQ ID NO: 377771 - DNA, 15 bp, Homo sapiens
ctgaatcgggcccac

SEQ ID NO: 377772 - DNA, 15 bp, Homo sapiens
cctgaatcgggccca

SEQ ID NO: 377773 - DNA, 15 bp, Homo sapiens
ccctgaatcgggccc

SEQ ID NO: 377774 - DNA, 15 bp, Homo sapiens
tccctgaatcgggcc

SEQ ID NO: 377775 - DNA, 15 bp, Homo sapiens
ttccctgaatcgggc

SEQ ID NO: 377776 - DNA, 15 bp, Homo sapiens
gttccctgaatcggg

SEQ ID NO: 377777 - DNA, 15 bp, Homo sapiens
agttccctgaatcgg

SEQ ID NO: 377778 - DNA, 15 bp, Homo sapiens
cagttccctgaatcg

SEQ ID NO: 377779 - DNA, 15 bp, Homo sapiens
acagttccctgaatc

SEQ ID NO: 377780 - DNA, 15 bp, Homo sapiens
cacagttccctgaat

SEQ ID NO: 377781 - DNA, 15 bp, Homo sapiens
acacagttccctgaa

SEQ ID NO: 377782 - DNA, 15 bp, Homo sapiens
aacacagttccctga

SEQ ID NO: 377783 - DNA, 15 bp, Homo sapiens
aaacacagttccctg

SEQ ID NO: 377784 - DNA, 15 bp, Homo sapiens
gaaacacagttccct

SEQ ID NO: 377785 - DNA, 15 bp, Homo sapiens
agaaacacagttccc

SEQ ID NO: 377786 - DNA, 15 bp, Homo sapiens
cagaaacacagttcc

SEQ ID NO: 377787 - DNA, 15 bp, Homo sapiens
acagaaacacagttc

SEQ ID NO: 377788 - DNA, 15 bp, Homo sapiens
cacagaaacacagtt

SEQ ID NO: 377789 - DNA, 15 bp, Homo sapiens
tcacagaaacacagt

SEQ ID NO: 377790 - DNA, 15 bp, Homo sapiens
ttcacagaaacacag

SEQ ID NO: 377791 - DNA, 15 bp, Homo sapiens
cttcacagaaacaca

SEQ ID NO: 377792 - DNA, 15 bp, Homo sapiens
tcttcacagaaacac

SEQ ID NO: 377793 - DNA, 15 bp, Homo sapiens
atcttcacagaaaca

SEQ ID NO: 377794 - DNA, 15 bp, Homo sapiens
catcttcacagaaac

SEQ ID NO: 377795 - DNA, 15 bp, Homo sapiens
tcatcttcacagaaa

SEQ ID NO: 377796 - DNA, 15 bp, Homo sapiens
ttcatcttcacagaa

SEQ ID NO: 377797 - DNA, 15 bp, Homo sapiens
cttcatcttcacaga

SEQ ID NO: 377798 - DNA, 15 bp, Homo sapiens
gcttcatcttcacag

SEQ ID NO: 377799 - DNA, 15 bp, Homo sapiens
agcttcatcttcaca

SEQ ID NO: 377800 - DNA, 15 bp, Homo sapiens
cagcttcatcttcac

SEQ ID NO: 377801 - DNA, 15 bp, Homo sapiens
tcagcttcatcttca

SEQ ID NO: 377802 - DNA, 15 bp, Homo sapiens
ctcagcttcatcttc

SEQ ID NO: 377803 - DNA, 15 bp, Homo sapiens
gctcagcttcatctt

SEQ ID NO: 377804 - DNA, 15 bp, Homo sapiens
tgctcagcttcatct

SEQ ID NO: 377805 - DNA, 15 bp, Homo sapiens
atgctcagcttcatc

SEQ ID NO: 377806 - DNA, 15 bp, Homo sapiens
aatgctcagcttcat

SEQ ID NO: 377807 - DNA, 15 bp, Homo sapiens
aaatgctcagcttca

SEQ ID NO: 377808 - DNA, 15 bp, Homo sapiens
gaaatgctcagcttc

SEQ ID NO: 377809 - DNA, 15 bp, Homo sapiens
ggaaatgctcagctt

SEQ ID NO: 377810 - DNA, 15 bp, Homo sapiens
gggaaatgctcagct

SEQ ID NO: 377811 - DNA, 15 bp, Homo sapiens
tgggaaatgctcagc

SEQ ID NO: 377812 - DNA, 15 bp, Homo sapiens
ctgggaaatgctcag

SEQ ID NO: 377813 - DNA, 15 bp, Homo sapiens
tctgggaaatgctca

SEQ ID NO: 377814 - DNA, 15 bp, Homo sapiens
ttctgggaaatgctc

SEQ ID NO: 377815 - DNA, 15 bp, Homo sapiens
tttctgggaaatgct

SEQ ID NO: 377816 - DNA, 15 bp, Homo sapiens
atttctgggaaatgc

SEQ ID NO: 377817 - DNA, 15 bp, Homo sapiens
catttctgggaaatg

SEQ ID NO: 377818 - DNA, 15 bp, Homo sapiens
tcatttctgggaaat

SEQ ID NO: 377819 - DNA, 15 bp, Homo sapiens
ctcatttctgggaaa

SEQ ID NO: 377820 - DNA, 15 bp, Homo sapiens
gctcatttctgggaa

SEQ ID NO: 377821 - DNA, 15 bp, Homo sapiens
ggctcatttctggga

SEQ ID NO: 377822 - DNA, 15 bp, Homo sapiens
gggctcatttctggg

SEQ ID NO: 377823 - DNA, 15 bp, Homo sapiens
tgggctcatttctgg

SEQ ID NO: 377824 - DNA, 15 bp, Homo sapiens
ttgggctcatttctg

SEQ ID NO: 377825 - DNA, 15 bp, Homo sapiens
tttgggctcatttct

SEQ ID NO: 377826 - DNA, 15 bp, Homo sapiens
atttgggctcatttc

SEQ ID NO: 377827 - DNA, 15 bp, Homo sapiens
catttgggctcattt

SEQ ID NO: 377828 - DNA, 15 bp, Homo sapiens
ccatttgggctcatt

SEQ ID NO: 377829 - DNA, 15 bp, Homo sapiens
gccatttgggctcat

SEQ ID NO: 377830 - DNA, 15 bp, Homo sapiens
cgccatttgggctca

SEQ ID NO: 377831 - DNA, 15 bp, Homo sapiens
ccgccatttgggctc

SEQ ID NO: 377832 - DNA, 15 bp, Homo sapiens
cccgccatttgggct

SEQ ID NO: 377833 - DNA, 15 bp, Homo sapiens
ccccgccatttgggc

SEQ ID NO: 377834 - DNA, 15 bp, Homo sapiens
tccccgccatttggg

SEQ ID NO: 377835 - DNA, 15 bp, Homo sapiens
ttccccgccatttgg

SEQ ID NO: 377836 - DNA, 15 bp, Homo sapiens
attccccgccatttg

SEQ ID NO: 377837 - DNA, 15 bp, Homo sapiens
aattccccgccattt

SEQ ID NO: 377838 - DNA, 15 bp, Homo sapiens
gaattccccgccatt

SEQ ID NO: 377839 - DNA, 15 bp, Homo sapiens
tgaattccccgccat

SEQ ID NO: 377840 - DNA, 15 bp, Homo sapiens
ctgaattccccgcca

SEQ ID NO: 377841 - DNA, 15 bp, Homo sapiens
cctgaattccccgcc

SEQ ID NO: 377842 - DNA, 15 bp, Homo sapiens
ccctgaattccccgc

SEQ ID NO: 377843 - DNA, 15 bp, Homo sapiens
gccctgaattccccg

SEQ ID NO: 377844 - DNA, 15 bp, Homo sapiens
tgccctgaattcccc

SEQ ID NO: 377845 - DNA, 15 bp, Homo sapiens
ttgccctgaattccc

SEQ ID NO: 377846 - DNA, 15 bp, Homo sapiens
tttgccctgaattcc

SEQ ID NO: 377847 - DNA, 15 bp, Homo sapiens
ctttgccctgaattc

SEQ ID NO: 377848 - DNA, 15 bp, Homo sapiens
cctttgccctgaatt

SEQ ID NO: 377849 - DNA, 15 bp, Homo sapiens
ccctttgccctgaat

SEQ ID NO: 377850 - DNA, 15 bp, Homo sapiens
cccctttgccctgaa

SEQ ID NO: 377851 - DNA, 15 bp, Homo sapiens
tcccctttgccctga

SEQ ID NO: 377852 - DNA, 15 bp, Homo sapiens
ttcccctttgccctg

SEQ ID NO: 377853 - DNA, 15 bp, Homo sapiens
attcccctttgccct

SEQ ID NO: 377854 - DNA, 15 bp, Homo sapiens
gattcccctttgccc

SEQ ID NO: 377855 - DNA, 15 bp, Homo sapiens
agattcccctttgcc

SEQ ID NO: 377856 - DNA, 15 bp, Homo sapiens
gagattcccctttgc

SEQ ID NO: 377857 - DNA, 15 bp, Homo sapiens
agagattcccctttg

SEQ ID NO: 377858 - DNA, 15 bp, Homo sapiens
cagagattccccttt

SEQ ID NO: 377859 - DNA, 15 bp, Homo sapiens
acagagattcccctt

SEQ ID NO: 377860 - DNA, 15 bp, Homo sapiens
tacagagattcccct

SEQ ID NO: 377861 - DNA, 15 bp, Homo sapiens
ctacagagattcccc

SEQ ID NO: 377862 - DNA, 15 bp, Homo sapiens
actacagagattccc

SEQ ID NO: 377863 - DNA, 15 bp, Homo sapiens
cactacagagattcc

SEQ ID NO: 377864 - DNA, 15 bp, Homo sapiens
ccactacagagattc

SEQ ID NO: 377865 - DNA, 15 bp, Homo sapiens
gccactacagagatt

SEQ ID NO: 377866 - DNA, 15 bp, Homo sapiens
tgccactacagagat

SEQ ID NO: 377867 - DNA, 15 bp, Homo sapiens
ttgccactacagaga

SEQ ID NO: 377868 - DNA, 15 bp, Homo sapiens
attgccactacagag

SEQ ID NO: 377869 - DNA, 15 bp, Homo sapiens
cattgccactacaga

SEQ ID NO: 377870 - DNA, 15 bp, Homo sapiens
ccattgccactacag

SEQ ID NO: 377871 - DNA, 15 bp, Homo sapiens
cccattgccactaca

SEQ ID NO: 377872 - DNA, 15 bp, Homo sapiens
ccccattgccactac

SEQ ID NO: 377873 - DNA, 15 bp, Homo sapiens
cccccattgccacta

SEQ ID NO: 377874 - DNA, 15 bp, Homo sapiens
tcccccattgccact

SEQ ID NO: 377875 - DNA, 15 bp, Homo sapiens
atcccccattgccac

SEQ ID NO: 377876 - DNA, 15 bp, Homo sapiens
catcccccattgcca

SEQ ID NO: 377877 - DNA, 15 bp, Homo sapiens
acatcccccattgcc

SEQ ID NO: 377878 - DNA, 15 bp, Homo sapiens
gacatcccccattgc

SEQ ID NO: 377879 - DNA, 15 bp, Homo sapiens
cgacatcccccattg

SEQ ID NO: 377880 - DNA, 15 bp, Homo sapiens
acgacatcccccatt

SEQ ID NO: 377881 - DNA, 15 bp, Homo sapiens
cacgacatcccccat

SEQ ID NO: 377882 - DNA, 15 bp, Homo sapiens
gcacgacatccccca

SEQ ID NO: 377883 - DNA, 15 bp, Homo sapiens
cgcacgacatccccc

SEQ ID NO: 377884 - DNA, 15 bp, Homo sapiens
ccgcacgacatcccc

SEQ ID NO: 377885 - DNA, 15 bp, Homo sapiens
cccgcacgacatccc

SEQ ID NO: 377886 - DNA, 15 bp, Homo sapiens
ccccgcacgacatcc

SEQ ID NO: 377887 - DNA, 15 bp, Homo sapiens
accccgcacgacatc

SEQ ID NO: 377888 - DNA, 15 bp, Homo sapiens
gaccccgcacgacat

SEQ ID NO: 377889 - DNA, 15 bp, Homo sapiens
ggaccccgcacgaca

SEQ ID NO: 377890 - DNA, 15 bp, Homo sapiens
gggaccccgcacgac

SEQ ID NO: 377891 - DNA, 15 bp, Homo sapiens
ggggaccccgcacga

SEQ ID NO: 377892 - DNA, 15 bp, Homo sapiens
tggggaccccgcacg

SEQ ID NO: 377893 - DNA, 15 bp, Homo sapiens
ctggggaccccgcac

SEQ ID NO: 377894 - DNA, 15 bp, Homo sapiens
tctggggaccccgca

SEQ ID NO: 377895 - DNA, 15 bp, Homo sapiens
ttctggggaccccgc

SEQ ID NO: 377896 - DNA, 15 bp, Homo sapiens
cttctggggaccccg

SEQ ID NO: 377897 - DNA, 15 bp, Homo sapiens
ccttctggggacccc

SEQ ID NO: 377898 - DNA, 15 bp, Homo sapiens
accttctggggaccc

SEQ ID NO: 377899 - DNA, 15 bp, Homo sapiens
caccttctggggacc

SEQ ID NO: 377900 - DNA, 15 bp, Homo sapiens
acaccttctggggac

SEQ ID NO: 377901 - DNA, 15 bp, Homo sapiens
cacaccttctgggga

SEQ ID NO: 377902 - DNA, 15 bp, Homo sapiens
tcacaccttctgggg

SEQ ID NO: 377903 - DNA, 15 bp, Homo sapiens
atcacaccttctggg

SEQ ID NO: 377904 - DNA, 15 bp, Homo sapiens
catcacaccttctgg

SEQ ID NO: 377905 - DNA, 15 bp, Homo sapiens
acatcacaccttctg

SEQ ID NO: 377906 - DNA, 15 bp, Homo sapiens
gacatcacaccttct

SEQ ID NO: 377907 - DNA, 15 bp, Homo sapiens
ggacatcacaccttc

SEQ ID NO: 377908 - DNA, 15 bp, Homo sapiens
tggacatcacacctt

SEQ ID NO: 377909 - DNA, 15 bp, Homo sapiens
gtggacatcacacct

SEQ ID NO: 377910 - DNA, 15 bp, Homo sapiens
tgtggacatcacacc

SEQ ID NO: 377911 - DNA, 15 bp, Homo sapiens
gtgtggacatcacac

SEQ ID NO: 377912 - DNA, 15 bp, Homo sapiens
tgtgtggacatcaca

SEQ ID NO: 377913 - DNA, 15 bp, Homo sapiens
ttgtgtggacatcac

SEQ ID NO: 377914 - DNA, 15 bp, Homo sapiens
cttgtgtggacatca

SEQ ID NO: 377915 - DNA, 15 bp, Homo sapiens
ccttgtgtggacatc

SEQ ID NO: 377916 - DNA, 15 bp, Homo sapiens
cccttgtgtggacat

SEQ ID NO: 377917 - DNA, 15 bp, Homo sapiens
acccttgtgtggaca

SEQ ID NO: 377918 - DNA, 15 bp, Homo sapiens
cacccttgtgtggac

SEQ ID NO: 377919 - DNA, 15 bp, Homo sapiens
acacccttgtgtgga

SEQ ID NO: 377920 - DNA, 15 bp, Homo sapiens
cacacccttgtgtgg

SEQ ID NO: 377921 - DNA, 15 bp, Homo sapiens
acacacccttgtgtg

SEQ ID NO: 377922 - DNA, 15 bp, Homo sapiens
cacacacccttgtgt

SEQ ID NO: 377923 - DNA, 15 bp, Homo sapiens
acacacacccttgtg

SEQ ID NO: 377924 - DNA, 15 bp, Homo sapiens
aacacacacccttgt

SEQ ID NO: 377925 - DNA, 15 bp, Homo sapiens
gaacacacacccttg

SEQ ID NO: 377926 - DNA, 15 bp, Homo sapiens
cgaacacacaccctt

SEQ ID NO: 377927 - DNA, 15 bp, Homo sapiens
tcgaacacacaccct

SEQ ID NO: 377928 - DNA, 15 bp, Homo sapiens
ctcgaacacacaccc

SEQ ID NO: 377929 - DNA, 15 bp, Homo sapiens
cctcgaacacacacc

SEQ ID NO: 377930 - DNA, 15 bp, Homo sapiens
ccctcgaacacacac

SEQ ID NO: 377931 - DNA, 15 bp, Homo sapiens
cccctcgaacacaca

SEQ ID NO: 377932 - DNA, 15 bp, Homo sapiens
gcccctcgaacacac

SEQ ID NO: 377933 - DNA, 15 bp, Homo sapiens
ggcccctcgaacaca

SEQ ID NO: 377934 - DNA, 15 bp, Homo sapiens
aggcccctcgaacac

SEQ ID NO: 377935 - DNA, 15 bp, Homo sapiens
aaggcccctcgaaca

SEQ ID NO: 377936 - DNA, 15 bp, Homo sapiens
aaaggcccctcgaac

SEQ ID NO: 377937 - DNA, 15 bp, Homo sapiens
caaaggcccctcgaa

SEQ ID NO: 377938 - DNA, 15 bp, Homo sapiens
gcaaaggcccctcga

SEQ ID NO: 377939 - DNA, 15 bp, Homo sapiens
agcaaaggcccctcg

SEQ ID NO: 377940 - DNA, 15 bp, Homo sapiens
cagcaaaggcccctc

SEQ ID NO: 377941 - DNA, 15 bp, Homo sapiens
acagcaaaggcccct

SEQ ID NO: 377942 - DNA, 15 bp, Homo sapiens
aacagcaaaggcccc

SEQ ID NO: 377943 - DNA, 15 bp, Homo sapiens
caacagcaaaggccc

SEQ ID NO: 377944 - DNA, 15 bp, Homo sapiens
gcaacagcaaaggcc

SEQ ID NO: 377945 - DNA, 15 bp, Homo sapiens
ggcaacagcaaaggc

SEQ ID NO: 377946 - DNA, 15 bp, Homo sapiens
cggcaacagcaaagg

SEQ ID NO: 377947 - DNA, 15 bp, Homo sapiens
tcggcaacagcaaag

SEQ ID NO: 377948 - DNA, 15 bp, Homo sapiens
ttcggcaacagcaaa

SEQ ID NO: 377949 - DNA, 15 bp, Homo sapiens
attcggcaacagcaa

SEQ ID NO: 377950 - DNA, 15 bp, Homo sapiens
cattcggcaacagca

SEQ ID NO: 377951 - DNA, 15 bp, Homo sapiens
ccattcggcaacagc

SEQ ID NO: 377952 - DNA, 15 bp, Homo sapiens
accattcggcaacag

SEQ ID NO: 377953 - DNA, 15 bp, Homo sapiens
aaccattcggcaaca

SEQ ID NO: 377954 - DNA, 15 bp, Homo sapiens
aaaccattcggcaac

SEQ ID NO: 377955 - DNA, 15 bp, Homo sapiens
aaaaccattcggcaa

SEQ ID NO: 377956 - DNA, 15 bp, Homo sapiens
caaaaccattcggca

SEQ ID NO: 377957 - DNA, 15 bp, Homo sapiens
gcaaaaccattcggc

SEQ ID NO: 377958 - DNA, 15 bp, Homo sapiens
agcaaaaccattcgg

SEQ ID NO: 377959 - DNA, 15 bp, Homo sapiens
cagcaaaaccattcg

SEQ ID NO: 377960 - DNA, 15 bp, Homo sapiens
ccagcaaaaccattc

SEQ ID NO: 377961 - DNA, 15 bp, Homo sapiens
tccagcaaaaccatt

SEQ ID NO: 377962 - DNA, 15 bp, Homo sapiens
ttccagcaaaaccat

SEQ ID NO: 377963 - DNA, 15 bp, Homo sapiens
tttccagcaaaacca

SEQ ID NO: 377964 - DNA, 15 bp, Homo sapiens
ctttccagcaaaacc

SEQ ID NO: 377965 - DNA, 15 bp, Homo sapiens
gctttccagcaaaac

SEQ ID NO: 377966 - DNA, 15 bp, Homo sapiens
agctttccagcaaaa

SEQ ID NO: 377967 - DNA, 15 bp, Homo sapiens
aagctttccagcaaa

SEQ ID NO: 377968 - DNA, 15 bp, Homo sapiens
caagctttccagcaa

SEQ ID NO: 377969 - DNA, 15 bp, Homo sapiens
acaagctttccagca

SEQ ID NO: 377970 - DNA, 15 bp, Homo sapiens
aacaagctttccagc

SEQ ID NO: 377971 - DNA, 15 bp, Homo sapiens
aaacaagctttccag

SEQ ID NO: 377972 - DNA, 15 bp, Homo sapiens
aaaacaagctttcca

SEQ ID NO: 377973 - DNA, 15 bp, Homo sapiens
aaaaacaagctttcc

SEQ ID NO: 377974 - DNA, 15 bp, Homo sapiens
aaaaaacaagctttc

SEQ ID NO: 377975 - DNA, 15 bp, Homo sapiens
caaaaaacaagcttt

SEQ ID NO: 377976 - DNA, 15 bp, Homo sapiens
acaaaaaacaagctt

SEQ ID NO: 377977 - DNA, 15 bp, Homo sapiens
cacaaaaaacaagct

SEQ ID NO: 377978 - DNA, 15 bp, Homo sapiens
acacaaaaaacaagc

SEQ ID NO: 377979 - DNA, 15 bp, Homo sapiens
cacacaaaaaacaag

SEQ ID NO: 377980 - DNA, 15 bp, Homo sapiens
acacacaaaaaacaa

SEQ ID NO: 377981 - DNA, 15 bp, Homo sapiens
cacacacaaaaaaca

SEQ ID NO: 377982 - DNA, 15 bp, Homo sapiens
gcacacacaaaaaac

SEQ ID NO: 377983 - DNA, 15 bp, Homo sapiens
agcacacacaaaaaa

SEQ ID NO: 377984 - DNA, 15 bp, Homo sapiens
aagcacacacaaaaa

SEQ ID NO: 377985 - DNA, 15 bp, Homo sapiens
taagcacacacaaaa

SEQ ID NO: 377986 - DNA, 15 bp, Homo sapiens
ctaagcacacacaaa

SEQ ID NO: 377987 - DNA, 15 bp, Homo sapiens
tctaagcacacacaa

SEQ ID NO: 377988 - DNA, 15 bp, Homo sapiens
ctctaagcacacaca

SEQ ID NO: 377989 - DNA, 15 bp, Homo sapiens
tctctaagcacacac

SEQ ID NO: 377990 - DNA, 15 bp, Homo sapiens
atctctaagcacaca

SEQ ID NO: 377991 - DNA, 15 bp, Homo sapiens
tatctctaagcacac

SEQ ID NO: 377992 - DNA, 15 bp, Homo sapiens
ctatctctaagcaca

SEQ ID NO: 377993 - DNA, 15 bp, Homo sapiens
actatctctaagcac

SEQ ID NO: 377994 - DNA, 15 bp, Homo sapiens
gactatctctaagca

SEQ ID NO: 377995 - DNA, 15 bp, Homo sapiens
ggactatctctaagc

SEQ ID NO: 377996 - DNA, 15 bp, Homo sapiens
gggactatctctaag

SEQ ID NO: 377997 - DNA, 15 bp, Homo sapiens
cgggactatctctaa

SEQ ID NO: 377998 - DNA, 15 bp, Homo sapiens
ccgggactatctcta

SEQ ID NO: 377999 - DNA, 15 bp, Homo sapiens
gccgggactatctct

SEQ ID NO: 378000 - DNA, 15 bp, Homo sapiens
tgccgggactatctc

SEQ ID NO: 378001 - DNA, 15 bp, Homo sapiens
ctgccgggactatct

SEQ ID NO: 378002 - DNA, 15 bp, Homo sapiens
cctgccgggactatc

SEQ ID NO: 378003 - DNA, 15 bp, Homo sapiens
tcctgccgggactat

SEQ ID NO: 378004 - DNA, 15 bp, Homo sapiens
ctcctgccgggacta

SEQ ID NO: 378005 - DNA, 15 bp, Homo sapiens
cctcctgccgggact

SEQ ID NO: 378006 - DNA, 15 bp, Homo sapiens
tcctcctgccgggac

SEQ ID NO: 378007 - DNA, 15 bp, Homo sapiens
ctcctcctgccggga

SEQ ID NO: 378008 - DNA, 15 bp, Homo sapiens
tctcctcctgccggg

SEQ ID NO: 378009 - DNA, 15 bp, Homo sapiens
gtctcctcctgccgg

SEQ ID NO: 378010 - DNA, 15 bp, Homo sapiens
agtctcctcctgccg

SEQ ID NO: 378011 - DNA, 15 bp, Homo sapiens
cagtctcctcctgcc

SEQ ID NO: 378012 - DNA, 15 bp, Homo sapiens
ccagtctcctcctgc

SEQ ID NO: 378013 - DNA, 15 bp, Homo sapiens
tccagtctcctcctg

SEQ ID NO: 378014 - DNA, 15 bp, Homo sapiens
ctccagtctcctcct

SEQ ID NO: 378015 - DNA, 15 bp, Homo sapiens
gctccagtctcctcc

SEQ ID NO: 378016 - DNA, 15 bp, Homo sapiens
agctccagtctcctc

SEQ ID NO: 378017 - DNA, 15 bp, Homo sapiens
cagctccagtctcct

SEQ ID NO: 378018 - DNA, 15 bp, Homo sapiens
acagctccagtctcc

SEQ ID NO: 378019 - DNA, 15 bp, Homo sapiens
gacagctccagtctc

SEQ ID NO: 378020 - DNA, 15 bp, Homo sapiens
ggacagctccagtct

SEQ ID NO: 378021 - DNA, 15 bp, Homo sapiens
aggacagctccagtc

SEQ ID NO: 378022 - DNA, 15 bp, Homo sapiens
taggacagctccagt

SEQ ID NO: 378023 - DNA, 15 bp, Homo sapiens
ttaggacagctccag

SEQ ID NO: 378024 - DNA, 15 bp, Homo sapiens
gttaggacagctcca

SEQ ID NO: 378025 - DNA, 15 bp, Homo sapiens
cgttaggacagctcc

SEQ ID NO: 378026 - DNA, 15 bp, Homo sapiens
ccgttaggacagctc

SEQ ID NO: 378027 - DNA, 15 bp, Homo sapiens
cccgttaggacagct

SEQ ID NO: 378028 - DNA, 15 bp, Homo sapiens
tcccgttaggacagc

SEQ ID NO: 378029 - DNA, 15 bp, Homo sapiens
ctcccgttaggacag

SEQ ID NO: 378030 - DNA, 15 bp, Homo sapiens
cctcccgttaggaca

SEQ ID NO: 378031 - DNA, 15 bp, Homo sapiens
tcctcccgttaggac

SEQ ID NO: 378032 - DNA, 15 bp, Homo sapiens
gtcctcccgttagga

SEQ ID NO: 378033 - DNA, 15 bp, Homo sapiens
tgtcctcccgttagg

SEQ ID NO: 378034 - DNA, 15 bp, Homo sapiens
ctgtcctcccgttag

SEQ ID NO: 378035 - DNA, 15 bp, Homo sapiens
tctgtcctcccgtta

SEQ ID NO: 378036 - DNA, 15 bp, Homo sapiens
ctctgtcctcccgtt

SEQ ID NO: 378037 - DNA, 15 bp, Homo sapiens
cctctgtcctcccgt

SEQ ID NO: 378038 - DNA, 15 bp, Homo sapiens
gcctctgtcctcccg

SEQ ID NO: 378039 - DNA, 15 bp, Homo sapiens
agcctctgtcctccc

SEQ ID NO: 378040 - DNA, 15 bp, Homo sapiens
cagcctctgtcctcc

SEQ ID NO: 378041 - DNA, 15 bp, Homo sapiens
gcagcctctgtcctc

SEQ ID NO: 378042 - DNA, 15 bp, Homo sapiens
agcagcctctgtcct

SEQ ID NO: 378043 - DNA, 15 bp, Homo sapiens
cagcagcctctgtcc

SEQ ID NO: 378044 - DNA, 15 bp, Homo sapiens
ccagcagcctctgtc

SEQ ID NO: 378045 - DNA, 15 bp, Homo sapiens
accagcagcctctgt

SEQ ID NO: 378046 - DNA, 15 bp, Homo sapiens
caccagcagcctctg

SEQ ID NO: 378047 - DNA, 15 bp, Homo sapiens
ccaccagcagcctct

SEQ ID NO: 378048 - DNA, 15 bp, Homo sapiens
cccaccagcagcctc

SEQ ID NO: 378049 - DNA, 15 bp, Homo sapiens
ccccaccagcagcct

SEQ ID NO: 378050 - DNA, 15 bp, Homo sapiens
cccccaccagcagcc

SEQ ID NO: 378051 - DNA, 15 bp, Homo sapiens
tcccccaccagcagc

SEQ ID NO: 378052 - DNA, 15 bp, Homo sapiens
ctcccccaccagcag

SEQ ID NO: 378053 - DNA, 15 bp, Homo sapiens
gctcccccaccagca

SEQ ID NO: 378054 - DNA, 15 bp, Homo sapiens
agctcccccaccagc

SEQ ID NO: 378055 - DNA, 15 bp, Homo sapiens
cagctcccccaccag

SEQ ID NO: 378056 - DNA, 15 bp, Homo sapiens
ccagctcccccacca

SEQ ID NO: 378057 - DNA, 15 bp, Homo sapiens
tccagctcccccacc

SEQ ID NO: 378058 - DNA, 15 bp, Homo sapiens
ctccagctcccccac

SEQ ID NO: 378059 - DNA, 15 bp, Homo sapiens
cctccagctccccca

SEQ ID NO: 378060 - DNA, 15 bp, Homo sapiens
ccctccagctccccc

SEQ ID NO: 378061 - DNA, 15 bp, Homo sapiens
cccctccagctcccc

SEQ ID NO: 378062 - DNA, 15 bp, Homo sapiens
tcccctccagctccc

SEQ ID NO: 378063 - DNA, 15 bp, Homo sapiens
gtcccctccagctcc

SEQ ID NO: 378064 - DNA, 15 bp, Homo sapiens
tgtcccctccagctc

SEQ ID NO: 378065 - DNA, 15 bp, Homo sapiens
ctgtcccctccagct

SEQ ID NO: 378066 - DNA, 15 bp, Homo sapiens
gctgtcccctccagc

SEQ ID NO: 378067 - DNA, 15 bp, Homo sapiens
cgctgtcccctccag

SEQ ID NO: 378068 - DNA, 15 bp, Homo sapiens
tcgctgtcccctcca

SEQ ID NO: 378069 - DNA, 15 bp, Homo sapiens
ctcgctgtcccctcc

SEQ ID NO: 378070 - DNA, 15 bp, Homo sapiens
cctcgctgtcccctc

SEQ ID NO: 378071 - DNA, 15 bp, Homo sapiens
ccctcgctgtcccct

SEQ ID NO: 378072 - DNA, 15 bp, Homo sapiens
tccctcgctgtcccc

SEQ ID NO: 378073 - DNA, 15 bp, Homo sapiens
ctccctcgctgtccc

SEQ ID NO: 378074 - DNA, 15 bp, Homo sapiens
cctccctcgctgtcc

SEQ ID NO: 378075 - DNA, 15 bp, Homo sapiens
tcctccctcgctgtc

SEQ ID NO: 378076 - DNA, 15 bp, Homo sapiens
ctcctccctcgctgt

SEQ ID NO: 378077 - DNA, 15 bp, Homo sapiens
gctcctccctcgctg

SEQ ID NO: 378078 - DNA, 15 bp, Homo sapiens
tgctcctccctcgct

SEQ ID NO: 378079 - DNA, 15 bp, Homo sapiens
ctgctcctccctcgc

SEQ ID NO: 378080 - DNA, 15 bp, Homo sapiens
cctgctcctccctcg

SEQ ID NO: 378081 - DNA, 15 bp, Homo sapiens
gcctgctcctccctc

SEQ ID NO: 378082 - DNA, 15 bp, Homo sapiens
tgcctgctcctccct

SEQ ID NO: 378083 - DNA, 15 bp, Homo sapiens
ctgcctgctcctccc

SEQ ID NO: 378084 - DNA, 15 bp, Homo sapiens
cctgcctgctcctcc

SEQ ID NO: 378085 - DNA, 15 bp, Homo sapiens
tcctgcctgctcctc

SEQ ID NO: 378086 - DNA, 15 bp, Homo sapiens
ctcctgcctgctcct

SEQ ID NO: 378087 - DNA, 15 bp, Homo sapiens
actcctgcctgctcc

SEQ ID NO: 378088 - DNA, 15 bp, Homo sapiens
gactcctgcctgctc

SEQ ID NO: 378089 - DNA, 15 bp, Homo sapiens
agactcctgcctgct

SEQ ID NO: 378090 - DNA, 15 bp, Homo sapiens
gagactcctgcctgc

SEQ ID NO: 378091 - DNA, 15 bp, Homo sapiens
ggagactcctgcctg

SEQ ID NO: 378092 - DNA, 15 bp, Homo sapiens
gggagactcctgcct

SEQ ID NO: 378093 - DNA, 15 bp, Homo sapiens
agggagactcctgcc

SEQ ID NO: 378094 - DNA, 15 bp, Homo sapiens
cagggagactcctgc

SEQ ID NO: 378095 - DNA, 15 bp, Homo sapiens
gcagggagactcctg

SEQ ID NO: 378096 - DNA, 15 bp, Homo sapiens
cgcagggagactcct

SEQ ID NO: 378097 - DNA, 15 bp, Homo sapiens
ccgcagggagactcc

SEQ ID NO: 378098 - DNA, 15 bp, Homo sapiens
accgcagggagactc

SEQ ID NO: 378099 - DNA, 15 bp, Homo sapiens
caccgcagggagact

SEQ ID NO: 378100 - DNA, 15 bp, Homo sapiens
ccaccgcagggagac

SEQ ID NO: 378101 - DNA, 15 bp, Homo sapiens
cccaccgcagggaga

SEQ ID NO: 378102 - DNA, 15 bp, Homo sapiens
acccaccgcagggag

SEQ ID NO: 378103 - DNA, 15 bp, Homo sapiens
aacccaccgcaggga

SEQ ID NO: 378104 - DNA, 15 bp, Homo sapiens
taacccaccgcaggg

SEQ ID NO: 378105 - DNA, 15 bp, Homo sapiens
ctaacccaccgcagg

SEQ ID NO: 378106 - DNA, 15 bp, Homo sapiens
cctaacccaccgcag

SEQ ID NO: 378107 - DNA, 15 bp, Homo sapiens
ccctaacccaccgca

SEQ ID NO: 378108 - DNA, 15 bp, Homo sapiens
gccctaacccaccgc

SEQ ID NO: 378109 - DNA, 15 bp, Homo sapiens
tgccctaacccaccg

SEQ ID NO: 378110 - DNA, 15 bp, Homo sapiens
gtgccctaacccacc

SEQ ID NO: 378111 - DNA, 15 bp, Homo sapiens
ggtgccctaacccac

SEQ ID NO: 378112 - DNA, 15 bp, Homo sapiens
tggtgccctaaccca

SEQ ID NO: 378113 - DNA, 15 bp, Homo sapiens
ttggtgccctaaccc

SEQ ID NO: 378114 - DNA, 15 bp, Homo sapiens
tttggtgccctaacc

SEQ ID NO: 378115 - DNA, 15 bp, Homo sapiens
atttggtgccctaac

SEQ ID NO: 378116 - DNA, 15 bp, Homo sapiens
catttggtgccctaa

SEQ ID NO: 378117 - DNA, 15 bp, Homo sapiens
ccatttggtgcccta

SEQ ID NO: 378118 - DNA, 15 bp, Homo sapiens
tccatttggtgccct

SEQ ID NO: 378119 - DNA, 15 bp, Homo sapiens
gtccatttggtgccc

SEQ ID NO: 378120 - DNA, 15 bp, Homo sapiens
agtccatttggtgcc

SEQ ID NO: 378121 - DNA, 15 bp, Homo sapiens
aagtccatttggtgc

SEQ ID NO: 378122 - DNA, 15 bp, Homo sapiens
gaagtccatttggtg

SEQ ID NO: 378123 - DNA, 15 bp, Homo sapiens
tgaagtccatttggt

SEQ ID NO: 378124 - DNA, 15 bp, Homo sapiens
ctgaagtccatttgg

SEQ ID NO: 378125 - DNA, 15 bp, Homo sapiens
cctgaagtccatttg

SEQ ID NO: 378126 - DNA, 15 bp, Homo sapiens
ccctgaagtccattt

SEQ ID NO: 378127 - DNA, 15 bp, Homo sapiens
gccctgaagtccatt

SEQ ID NO: 378128 - DNA, 15 bp, Homo sapiens
ggccctgaagtccat

SEQ ID NO: 378129 - DNA, 15 bp, Homo sapiens
gggccctgaagtcca

SEQ ID NO: 378130 - DNA, 15 bp, Homo sapiens
agggccctgaagtcc

SEQ ID NO: 378131 - DNA, 15 bp, Homo sapiens
aagggccctgaagtc

SEQ ID NO: 378132 - DNA, 15 bp, Homo sapiens
caagggccctgaagt

SEQ ID NO: 378133 - DNA, 15 bp, Homo sapiens
acaagggccctgaag

SEQ ID NO: 378134 - DNA, 15 bp, Homo sapiens
aacaagggccctgaa

SEQ ID NO: 378135 - DNA, 15 bp, Homo sapiens
gaacaagggccctga

SEQ ID NO: 378136 - DNA, 15 bp, Homo sapiens
tgaacaagggccctg

SEQ ID NO: 378137 - DNA, 15 bp, Homo sapiens
gtgaacaagggccct

SEQ ID NO: 378138 - DNA, 15 bp, Homo sapiens
tgtgaacaagggccc

SEQ ID NO: 378139 - DNA, 15 bp, Homo sapiens
gtgtgaacaagggcc

SEQ ID NO: 378140 - DNA, 15 bp, Homo sapiens
tgtgtgaacaagggc

SEQ ID NO: 378141 - DNA, 15 bp, Homo sapiens
gtgtgtgaacaaggg

SEQ ID NO: 378142 - DNA, 15 bp, Homo sapiens
tgtgtgtgaacaagg

SEQ ID NO: 378143 - DNA, 15 bp, Homo sapiens
ctgtgtgtgaacaag

SEQ ID NO: 378144 - DNA, 15 bp, Homo sapiens
gctgtgtgtgaacaa

SEQ ID NO: 378145 - DNA, 15 bp, Homo sapiens
tgctgtgtgtgaaca

SEQ ID NO: 378146 - DNA, 15 bp, Homo sapiens
ctgctgtgtgtgaac

SEQ ID NO: 378147 - DNA, 15 bp, Homo sapiens
gctgctgtgtgtgaa

SEQ ID NO: 378148 - DNA, 15 bp, Homo sapiens
tgctgctgtgtgtga

SEQ ID NO: 378149 - DNA, 15 bp, Homo sapiens
atgctgctgtgtgtg

SEQ ID NO: 378150 - DNA, 15 bp, Homo sapiens
aatgctgctgtgtgt

SEQ ID NO: 378151 - DNA, 15 bp, Homo sapiens
gaatgctgctgtgtg

SEQ ID NO: 378152 - DNA, 15 bp, Homo sapiens
tgaatgctgctgtgt

SEQ ID NO: 378153 - DNA, 15 bp, Homo sapiens
gtgaatgctgctgtg

SEQ ID NO: 378154 - DNA, 15 bp, Homo sapiens
cgtgaatgctgctgt

SEQ ID NO: 378155 - DNA, 15 bp, Homo sapiens
tcgtgaatgctgctg

SEQ ID NO: 378156 - DNA, 15 bp, Homo sapiens
gtcgtgaatgctgct

SEQ ID NO: 378157 - DNA, 15 bp, Homo sapiens
tgtcgtgaatgctgc

SEQ ID NO: 378158 - DNA, 15 bp, Homo sapiens
atgtcgtgaatgctg

SEQ ID NO: 378159 - DNA, 15 bp, Homo sapiens
gatgtcgtgaatgct

SEQ ID NO: 378160 - DNA, 15 bp, Homo sapiens
ggatgtcgtgaatgc

SEQ ID NO: 378161 - DNA, 15 bp, Homo sapiens
tggatgtcgtgaatg

SEQ ID NO: 378162 - DNA, 15 bp, Homo sapiens
atggatgtcgtgaat

SEQ ID NO: 378163 - DNA, 15 bp, Homo sapiens
catggatgtcgtgaa

SEQ ID NO: 378164 - DNA, 15 bp, Homo sapiens
gcatggatgtcgtga

SEQ ID NO: 378165 - DNA, 15 bp, Homo sapiens
tgcatggatgtcgtg

SEQ ID NO: 378166 - DNA, 15 bp, Homo sapiens
atgcatggatgtcgt

SEQ ID NO: 378167 - DNA, 15 bp, Homo sapiens
aatgcatggatgtcg

SEQ ID NO: 378168 - DNA, 15 bp, Homo sapiens
caatgcatggatgtc

SEQ ID NO: 378169 - DNA, 15 bp, Homo sapiens
gcaatgcatggatgt

SEQ ID NO: 378170 - DNA, 15 bp, Homo sapiens
tgcaatgcatggatg

SEQ ID NO: 378171 - DNA, 15 bp, Homo sapiens
ctgcaatgcatggat

SEQ ID NO: 378172 - DNA, 15 bp, Homo sapiens
actgcaatgcatgga

SEQ ID NO: 378173 - DNA, 15 bp, Homo sapiens
aactgcaatgcatgg

SEQ ID NO: 378174 - DNA, 15 bp, Homo sapiens
aaactgcaatgcatg

SEQ ID NO: 378175 - DNA, 15 bp, Homo sapiens
aaaactgcaatgcat

SEQ ID NO: 378176 - DNA, 15 bp, Homo sapiens
aaaaactgcaatgca

SEQ ID NO: 378177 - DNA, 15 bp, Homo sapiens
gaaaaactgcaatgc

SEQ ID NO: 378178 - DNA, 15 bp, Homo sapiens
agaaaaactgcaatg

SEQ ID NO: 378179 - DNA, 15 bp, Homo sapiens
cagaaaaactgcaat

SEQ ID NO: 378180 - DNA, 15 bp, Homo sapiens
ccagaaaaactgcaa

SEQ ID NO: 378181 - DNA, 15 bp, Homo sapiens
cccagaaaaactgca

SEQ ID NO: 378182 - DNA, 15 bp, Homo sapiens
gcccagaaaaactgc

SEQ ID NO: 378183 - DNA, 15 bp, Homo sapiens
agcccagaaaaactg

SEQ ID NO: 378184 - DNA, 15 bp, Homo sapiens
cagcccagaaaaact

SEQ ID NO: 378185 - DNA, 15 bp, Homo sapiens
ccagcccagaaaaac

SEQ ID NO: 378186 - DNA, 15 bp, Homo sapiens
cccagcccagaaaaa

SEQ ID NO: 378187 - DNA, 15 bp, Homo sapiens
gcccagcccagaaaa

SEQ ID NO: 378188 - DNA, 15 bp, Homo sapiens
ggcccagcccagaaa

SEQ ID NO: 378189 - DNA, 15 bp, Homo sapiens
tggcccagcccagaa

SEQ ID NO: 378190 - DNA, 15 bp, Homo sapiens
atggcccagcccaga

SEQ ID NO: 378191 - DNA, 15 bp, Homo sapiens
aatggcccagcccag

SEQ ID NO: 378192 - DNA, 15 bp, Homo sapiens
taatggcccagccca

SEQ ID NO: 378193 - DNA, 15 bp, Homo sapiens
ttaatggcccagccc

SEQ ID NO: 378194 - DNA, 15 bp, Homo sapiens
gttaatggcccagcc

SEQ ID NO: 378195 - DNA, 15 bp, Homo sapiens
ggttaatggcccagc

SEQ ID NO: 378196 - DNA, 15 bp, Homo sapiens
aggttaatggcccag

SEQ ID NO: 378197 - DNA, 15 bp, Homo sapiens
gaggttaatggccca

SEQ ID NO: 378198 - DNA, 15 bp, Homo sapiens
tgaggttaatggccc

SEQ ID NO: 378199 - DNA, 15 bp, Homo sapiens
ctgaggttaatggcc

SEQ ID NO: 378200 - DNA, 15 bp, Homo sapiens
gctgaggttaatggc

SEQ ID NO: 378201 - DNA, 15 bp, Homo sapiens
tgctgaggttaatgg

SEQ ID NO: 378202 - DNA, 15 bp, Homo sapiens
ctgctgaggttaatg

SEQ ID NO: 378203 - DNA, 15 bp, Homo sapiens
tctgctgaggttaat

SEQ ID NO: 378204 - DNA, 15 bp, Homo sapiens
ttctgctgaggttaa

SEQ ID NO: 378205 - DNA, 15 bp, Homo sapiens
tttctgctgaggtta

SEQ ID NO: 378206 - DNA, 15 bp, Homo sapiens
ttttctgctgaggtt

SEQ ID NO: 378207 - DNA, 15 bp, Homo sapiens
tttttctgctgaggt

SEQ ID NO: 378208 - DNA, 15 bp, Homo sapiens
atttttctgctgagg

SEQ ID NO: 378209 - DNA, 15 bp, Homo sapiens
catttttctgctgag

SEQ ID NO: 378210 - DNA, 15 bp, Homo sapiens
gcatttttctgctga

SEQ ID NO: 378211 - DNA, 15 bp, Homo sapiens
agcatttttctgctg

SEQ ID NO: 378212 - DNA, 15 bp, Homo sapiens
aagcatttttctgct

SEQ ID NO: 378213 - DNA, 15 bp, Homo sapiens
aaagcatttttctgc

SEQ ID NO: 378214 - DNA, 15 bp, Homo sapiens
aaaagcatttttctg

SEQ ID NO: 378215 - DNA, 15 bp, Homo sapiens
aaaaagcatttttct

SEQ ID NO: 378216 - DNA, 15 bp, Homo sapiens
gaaaaagcatttttc

SEQ ID NO: 378217 - DNA, 15 bp, Homo sapiens
ggaaaaagcattttt

SEQ ID NO: 378218 - DNA, 15 bp, Homo sapiens
tggaaaaagcatttt

SEQ ID NO: 378219 - DNA, 15 bp, Homo sapiens
ctggaaaaagcattt

SEQ ID NO: 378220 - DNA, 15 bp, Homo sapiens
cctggaaaaagcatt

SEQ ID NO: 378221 - DNA, 15 bp, Homo sapiens
ccctggaaaaagcat

SEQ ID NO: 378222 - DNA, 15 bp, Homo sapiens
cccctggaaaaagca

SEQ ID NO: 378223 - DNA, 15 bp, Homo sapiens
ccccctggaaaaagc

SEQ ID NO: 378224 - DNA, 15 bp, Homo sapiens
accccctggaaaaag

SEQ ID NO: 378225 - DNA, 15 bp, Homo sapiens
caccccctggaaaaa

SEQ ID NO: 378226 - DNA, 15 bp, Homo sapiens
acaccccctggaaaa

SEQ ID NO: 378227 - DNA, 15 bp, Homo sapiens
gacaccccctggaaa

SEQ ID NO: 378228 - DNA, 15 bp, Homo sapiens
agacaccccctggaa

SEQ ID NO: 378229 - DNA, 15 bp, Homo sapiens
cagacaccccctgga

SEQ ID NO: 378230 - DNA, 15 bp, Homo sapiens
ccagacaccccctgg

SEQ ID NO: 378231 - DNA, 15 bp, Homo sapiens
gccagacaccccctg

SEQ ID NO: 378232 - DNA, 15 bp, Homo sapiens
tgccagacaccccct

SEQ ID NO: 378233 - DNA, 15 bp, Homo sapiens
ctgccagacaccccc

SEQ ID NO: 378234 - DNA, 15 bp, Homo sapiens
gctgccagacacccc

SEQ ID NO: 378235 - DNA, 15 bp, Homo sapiens
tgctgccagacaccc

SEQ ID NO: 378236 - DNA, 15 bp, Homo sapiens
gtgctgccagacacc

SEQ ID NO: 378237 - DNA, 15 bp, Homo sapiens
tgtgctgccagacac

SEQ ID NO: 378238 - DNA, 15 bp, Homo sapiens
atgtgctgccagaca

SEQ ID NO: 378239 - DNA, 15 bp, Homo sapiens
aatgtgctgccagac

SEQ ID NO: 378240 - DNA, 15 bp, Homo sapiens
caatgtgctgccaga

SEQ ID NO: 378241 - DNA, 15 bp, Homo sapiens
gcaatgtgctgccag

SEQ ID NO: 378242 - DNA, 15 bp, Homo sapiens
agcaatgtgctgcca

SEQ ID NO: 378243 - DNA, 15 bp, Homo sapiens
cagcaatgtgctgcc

SEQ ID NO: 378244 - DNA, 15 bp, Homo sapiens
ccagcaatgtgctgc

SEQ ID NO: 378245 - DNA, 15 bp, Homo sapiens
gccagcaatgtgctg

SEQ ID NO: 378246 - DNA, 15 bp, Homo sapiens
cgccagcaatgtgct

SEQ ID NO: 378247 - DNA, 15 bp, Homo sapiens
ccgccagcaatgtgc

SEQ ID NO: 378248 - DNA, 15 bp, Homo sapiens
cccgccagcaatgtg

SEQ ID NO: 378249 - DNA, 15 bp, Homo sapiens
gcccgccagcaatgt

SEQ ID NO: 378250 - DNA, 15 bp, Homo sapiens
agcccgccagcaatg

SEQ ID NO: 378251 - DNA, 15 bp, Homo sapiens
cagcccgccagcaat

SEQ ID NO: 378252 - DNA, 15 bp, Homo sapiens
gcagcccgccagcaa

SEQ ID NO: 378253 - DNA, 15 bp, Homo sapiens
tgcagcccgccagca

SEQ ID NO: 378254 - DNA, 15 bp, Homo sapiens
gtgcagcccgccagc

SEQ ID NO: 378255 - DNA, 15 bp, Homo sapiens
tgtgcagcccgccag

SEQ ID NO: 378256 - DNA, 15 bp, Homo sapiens
ctgtgcagcccgcca

SEQ ID NO: 378257 - DNA, 15 bp, Homo sapiens
tctgtgcagcccgcc

SEQ ID NO: 378258 - DNA, 15 bp, Homo sapiens
atctgtgcagcccgc

SEQ ID NO: 378259 - DNA, 15 bp, Homo sapiens
catctgtgcagcccg

SEQ ID NO: 378260 - DNA, 15 bp, Homo sapiens
tcatctgtgcagccc

SEQ ID NO: 378261 - DNA, 15 bp, Homo sapiens
ttcatctgtgcagcc

SEQ ID NO: 378262 - DNA, 15 bp, Homo sapiens
tttcatctgtgcagc

SEQ ID NO: 378263 - DNA, 15 bp, Homo sapiens
gtttcatctgtgcag

SEQ ID NO: 378264 - DNA, 15 bp, Homo sapiens
tgtttcatctgtgca

SEQ ID NO: 378265 - DNA, 15 bp, Homo sapiens
ctgtttcatctgtgc

SEQ ID NO: 378266 - DNA, 15 bp, Homo sapiens
tctgtttcatctgtg

SEQ ID NO: 378267 - DNA, 15 bp, Homo sapiens
ttctgtttcatctgt

SEQ ID NO: 378268 - DNA, 15 bp, Homo sapiens
tttctgtttcatctg

SEQ ID NO: 378269 - DNA, 15 bp, Homo sapiens
gtttctgtttcatct

SEQ ID NO: 378270 - DNA, 15 bp, Homo sapiens
ggtttctgtttcatc

SEQ ID NO: 378271 - DNA, 15 bp, Homo sapiens
gggtttctgtttcat

SEQ ID NO: 378272 - DNA, 15 bp, Homo sapiens
tgggtttctgtttca

SEQ ID NO: 378273 - DNA, 15 bp, Homo sapiens
gtgggtttctgtttc

SEQ ID NO: 378274 - DNA, 15 bp, Homo sapiens
ggtgggtttctgttt

SEQ ID NO: 378275 - DNA, 15 bp, Homo sapiens
aggtgggtttctgtt

SEQ ID NO: 378276 - DNA, 15 bp, Homo sapiens
caggtgggtttctgt

SEQ ID NO: 378277 - DNA, 15 bp, Homo sapiens
tcaggtgggtttctg

SEQ ID NO: 378278 - DNA, 15 bp, Homo sapiens
gtcaggtgggtttct

SEQ ID NO: 378279 - DNA, 15 bp, Homo sapiens
tgtcaggtgggtttc

SEQ ID NO: 378280 - DNA, 15 bp, Homo sapiens
gtgtcaggtgggttt

SEQ ID NO: 378281 - DNA, 15 bp, Homo sapiens
agtgtcaggtgggtt

SEQ ID NO: 378282 - DNA, 15 bp, Homo sapiens
aagtgtcaggtgggt

SEQ ID NO: 378283 - DNA, 15 bp, Homo sapiens
ccaattcgggacaac

SEQ ID NO: 378284 - DNA, 15 bp, Homo sapiens
cccaattcgggacaa

SEQ ID NO: 378285 - DNA, 15 bp, Homo sapiens
tcccaattcgggaca

SEQ ID NO: 378286 - DNA, 15 bp, Homo sapiens
ttcccaattcgggac

SEQ ID NO: 378287 - DNA, 15 bp, Homo sapiens
tttcccaattcggga

SEQ ID NO: 378288 - DNA, 15 bp, Homo sapiens
ttttcccaattcggg

SEQ ID NO: 378289 - DNA, 15 bp, Homo sapiens
attttcccaattcgg

SEQ ID NO: 378290 - DNA, 15 bp, Homo sapiens
tattttcccaattcg

SEQ ID NO: 378291 - DNA, 15 bp, Homo sapiens
ttattttcccaattc

SEQ ID NO: 378292 - DNA, 15 bp, Homo sapiens
cttattttcccaatt

SEQ ID NO: 378293 - DNA, 15 bp, Homo sapiens
gcttattttcccaat

SEQ ID NO: 378294 - DNA, 15 bp, Homo sapiens
tgcttattttcccaa

SEQ ID NO: 378295 - DNA, 15 bp, Homo sapiens
ttgcttattttccca

SEQ ID NO: 378296 - DNA, 15 bp, Homo sapiens
tttgcttattttccc

SEQ ID NO: 378297 - DNA, 15 bp, Homo sapiens
ttttgcttattttcc

SEQ ID NO: 378298 - DNA, 15 bp, Homo sapiens
cttttgcttattttc

SEQ ID NO: 378299 - DNA, 15 bp, Homo sapiens
gcttttgcttatttt

SEQ ID NO: 378300 - DNA, 15 bp, Homo sapiens
agcttttgcttattt

SEQ ID NO: 378301 - DNA, 15 bp, Homo sapiens
aagcttttgcttatt

SEQ ID NO: 378302 - DNA, 15 bp, Homo sapiens
gaagcttttgcttat

SEQ ID NO: 378303 - DNA, 15 bp, Homo sapiens
agaagcttttgctta

SEQ ID NO: 378304 - DNA, 15 bp, Homo sapiens
aagaagcttttgctt

SEQ ID NO: 378305 - DNA, 15 bp, Homo sapiens
caagaagcttttgct

SEQ ID NO: 378306 - DNA, 15 bp, Homo sapiens
acaagaagcttttgc

SEQ ID NO: 378307 - DNA, 15 bp, Homo sapiens
cacaagaagcttttg

SEQ ID NO: 378308 - DNA, 15 bp, Homo sapiens
acacaagaagctttt

SEQ ID NO: 378309 - DNA, 15 bp, Homo sapiens
aacacaagaagcttt

SEQ ID NO: 378310 - DNA, 15 bp, Homo sapiens
aaacacaagaagctt

SEQ ID NO: 378311 - DNA, 15 bp, Homo sapiens
gaaacacaagaagct

SEQ ID NO: 378312 - DNA, 15 bp, Homo sapiens
tgaaacacaagaagc

SEQ ID NO: 378313 - DNA, 15 bp, Homo sapiens
ctgaaacacaagaag

SEQ ID NO: 378314 - DNA, 15 bp, Homo sapiens
tctgaaacacaagaa

SEQ ID NO: 378315 - DNA, 15 bp, Homo sapiens
ttctgaaacacaaga

SEQ ID NO: 378316 - DNA, 15 bp, Homo sapiens
gttctgaaacacaag

SEQ ID NO: 378317 - DNA, 15 bp, Homo sapiens
tgttctgaaacacaa

SEQ ID NO: 378318 - DNA, 15 bp, Homo sapiens
gtgttctgaaacaca

SEQ ID NO: 378319 - DNA, 15 bp, Homo sapiens
ggtgttctgaaacac

SEQ ID NO: 378320 - DNA, 15 bp, Homo sapiens
gggtgttctgaaaca

SEQ ID NO: 378321 - DNA, 15 bp, Homo sapiens
agggtgttctgaaac

SEQ ID NO: 378322 - DNA, 15 bp, Homo sapiens
gagggtgttctgaaa

SEQ ID NO: 378323 - DNA, 15 bp, Homo sapiens
ggagggtgttctgaa

SEQ ID NO: 378324 - DNA, 15 bp, Homo sapiens
aggagggtgttctga

SEQ ID NO: 378325 - DNA, 15 bp, Homo sapiens
gaggagggtgttctg

SEQ ID NO: 378326 - DNA, 15 bp, Homo sapiens
ggaggagggtgttct

SEQ ID NO: 378327 - DNA, 15 bp, Homo sapiens
tggaggagggtgttc

SEQ ID NO: 378328 - DNA, 15 bp, Homo sapiens
gtggaggagggtgtt

SEQ ID NO: 378329 - DNA, 15 bp, Homo sapiens
tgtggaggagggtgt

SEQ ID NO: 378330 - DNA, 15 bp, Homo sapiens
gtgtggaggagggtg

SEQ ID NO: 378331 - DNA, 15 bp, Homo sapiens
ggtgtggaggagggt

SEQ ID NO: 378332 - DNA, 15 bp, Homo sapiens
tggtgtggaggaggg

SEQ ID NO: 378333 - DNA, 15 bp, Homo sapiens
ttggtgtggaggagg

SEQ ID NO: 378334 - DNA, 15 bp, Homo sapiens
tttggtgtggaggag

SEQ ID NO: 378335 - DNA, 15 bp, Homo sapiens
ttttggtgtggagga

SEQ ID NO: 378336 - DNA, 15 bp, Homo sapiens
cttttggtgtggagg

SEQ ID NO: 378337 - DNA, 15 bp, Homo sapiens
ccttttggtgtggag

SEQ ID NO: 378338 - DNA, 15 bp, Homo sapiens
cccttttggtgtgga

SEQ ID NO: 378339 - DNA, 15 bp, Homo sapiens
acccttttggtgtgg

SEQ ID NO: 378340 - DNA, 15 bp, Homo sapiens
cacccttttggtgtg

SEQ ID NO: 378341 - DNA, 15 bp, Homo sapiens
ccacccttttggtgt

SEQ ID NO: 378342 - DNA, 15 bp, Homo sapiens
tccacccttttggtg

SEQ ID NO: 378343 - DNA, 15 bp, Homo sapiens
atccacccttttggt

SEQ ID NO: 378344 - DNA, 15 bp, Homo sapiens
catccacccttttgg

SEQ ID NO: 378345 - DNA, 15 bp, Homo sapiens
acatccacccttttg

SEQ ID NO: 378346 - DNA, 15 bp, Homo sapiens
cacatccaccctttt

SEQ ID NO: 378347 - DNA, 15 bp, Homo sapiens
gcacatccacccttt

SEQ ID NO: 378348 - DNA, 15 bp, Homo sapiens
agcacatccaccctt

SEQ ID NO: 378349 - DNA, 15 bp, Homo sapiens
cagcacatccaccct

SEQ ID NO: 378350 - DNA, 15 bp, Homo sapiens
acagcacatccaccc

SEQ ID NO: 378351 - DNA, 15 bp, Homo sapiens
cacagcacatccacc

SEQ ID NO: 378352 - DNA, 15 bp, Homo sapiens
gcacagcacatccac

SEQ ID NO: 378353 - DNA, 15 bp, Homo sapiens
ggcacagcacatcca

SEQ ID NO: 378354 - DNA, 15 bp, Homo sapiens
aggcacagcacatcc

SEQ ID NO: 378355 - DNA, 15 bp, Homo sapiens
gaggcacagcacatc

SEQ ID NO: 378356 - DNA, 15 bp, Homo sapiens
ggaggcacagcacat

SEQ ID NO: 378357 - DNA, 15 bp, Homo sapiens
gggaggcacagcaca

SEQ ID NO: 378358 - DNA, 15 bp, Homo sapiens
cgggaggcacagcac

SEQ ID NO: 378359 - DNA, 15 bp, Homo sapiens
ccgggaggcacagca

SEQ ID NO: 378360 - DNA, 15 bp, Homo sapiens
tccgggaggcacagc

SEQ ID NO: 378361 - DNA, 15 bp, Homo sapiens
ttccgggaggcacag

SEQ ID NO: 378362 - DNA, 15 bp, Homo sapiens
cttccgggaggcaca

SEQ ID NO: 378363 - DNA, 15 bp, Homo sapiens
tcttccgggaggcac

SEQ ID NO: 378364 - DNA, 15 bp, Homo sapiens
ctcttccgggaggca

SEQ ID NO: 378365 - DNA, 15 bp, Homo sapiens
cctcttccgggaggc

SEQ ID NO: 378366 - DNA, 15 bp, Homo sapiens
ccctcttccgggagg

SEQ ID NO: 378367 - DNA, 15 bp, Homo sapiens
gccctcttccgggag

SEQ ID NO: 378368 - DNA, 15 bp, Homo sapiens
agccctcttccggga

SEQ ID NO: 378369 - DNA, 15 bp, Homo sapiens
aagccctcttccggg

SEQ ID NO: 378370 - DNA, 15 bp, Homo sapiens
aaagccctcttccgg

SEQ ID NO: 378371 - DNA, 15 bp, Homo sapiens
gaaagccctcttccg

SEQ ID NO: 378372 - DNA, 15 bp, Homo sapiens
agaaagccctcttcc

SEQ ID NO: 378373 - DNA, 15 bp, Homo sapiens
gagaaagccctcttc

SEQ ID NO: 378374 - DNA, 15 bp, Homo sapiens
ggagaaagccctctt

SEQ ID NO: 378375 - DNA, 15 bp, Homo sapiens
gggagaaagccctct

SEQ ID NO: 378376 - DNA, 15 bp, Homo sapiens
ggggagaaagccctc

SEQ ID NO: 378377 - DNA, 15 bp, Homo sapiens
gggggagaaagccct

SEQ ID NO: 378378 - DNA, 15 bp, Homo sapiens
cgggggagaaagccc

SEQ ID NO: 378379 - DNA, 15 bp, Homo sapiens
gcgggggagaaagcc

SEQ ID NO: 378380 - DNA, 15 bp, Homo sapiens
agcgggggagaaagc

SEQ ID NO: 378381 - DNA, 15 bp, Homo sapiens
aagcgggggagaaag

SEQ ID NO: 378382 - DNA, 15 bp, Homo sapiens
gaagcgggggagaaa

SEQ ID NO: 378383 - DNA, 15 bp, Homo sapiens
tgaagcgggggagaa

SEQ ID NO: 378384 - DNA, 15 bp, Homo sapiens
gtgaagcgggggaga

SEQ ID NO: 378385 - DNA, 15 bp, Homo sapiens
tgtgaagcgggggag

SEQ ID NO: 378386 - DNA, 15 bp, Homo sapiens
gtgtgaagcggggga

SEQ ID NO: 378387 - DNA, 15 bp, Homo sapiens
agtgtgaagcggggg

SEQ ID NO: 378388 - DNA, 15 bp, Homo sapiens
aagtgtgaagcgggg

SEQ ID NO: 378389 - DNA, 15 bp, Homo sapiens
caagtgtgaagcggg

SEQ ID NO: 378390 - DNA, 15 bp, Homo sapiens
tcaagtgtgaagcgg

SEQ ID NO: 378391 - DNA, 15 bp, Homo sapiens
atcaagtgtgaagcg

SEQ ID NO: 378392 - DNA, 15 bp, Homo sapiens
catcaagtgtgaagc

SEQ ID NO: 378393 - DNA, 15 bp, Homo sapiens
gcatcaagtgtgaag

SEQ ID NO: 378394 - DNA, 15 bp, Homo sapiens
ggcatcaagtgtgaa

SEQ ID NO: 378395 - DNA, 15 bp, Homo sapiens
tggcatcaagtgtga

SEQ ID NO: 378396 - DNA, 15 bp, Homo sapiens
ttggcatcaagtgtg

SEQ ID NO: 378397 - DNA, 15 bp, Homo sapiens
attggcatcaagtgt

SEQ ID NO: 378398 - DNA, 15 bp, Homo sapiens
cattggcatcaagtg

SEQ ID NO: 378399 - DNA, 15 bp, Homo sapiens
acattggcatcaagt

SEQ ID NO: 378400 - DNA, 15 bp, Homo sapiens
cacattggcatcaag

SEQ ID NO: 378401 - DNA, 15 bp, Homo sapiens
acacattggcatcaa

SEQ ID NO: 378402 - DNA, 15 bp, Homo sapiens
gacacattggcatca

SEQ ID NO: 378403 - DNA, 15 bp, Homo sapiens
ggacacattggcatc

SEQ ID NO: 378404 - DNA, 15 bp, Homo sapiens
aggacacattggcat

SEQ ID NO: 378405 - DNA, 15 bp, Homo sapiens
aaggacacattggca

SEQ ID NO: 378406 - DNA, 15 bp, Homo sapiens
gaaggacacattggc

SEQ ID NO: 378407 - DNA, 15 bp, Homo sapiens
ggaaggacacattgg

SEQ ID NO: 378408 - DNA, 15 bp, Homo sapiens
aggaaggacacattg

SEQ ID NO: 378409 - DNA, 15 bp, Homo sapiens
aaggaaggacacatt

SEQ ID NO: 378410 - DNA, 15 bp, Homo sapiens
gaaggaaggacacat

SEQ ID NO: 378411 - DNA, 15 bp, Homo sapiens
ggaaggaaggacaca

SEQ ID NO: 378412 - DNA, 15 bp, Homo sapiens
gggaaggaaggacac

SEQ ID NO: 378413 - DNA, 15 bp, Homo sapiens
agggaaggaaggaca

SEQ ID NO: 378414 - DNA, 15 bp, Homo sapiens
cagggaaggaaggac

SEQ ID NO: 378415 - DNA, 15 bp, Homo sapiens
ccagggaaggaagga

SEQ ID NO: 378416 - DNA, 15 bp, Homo sapiens
cccagggaaggaagg

SEQ ID NO: 378417 - DNA, 15 bp, Homo sapiens
gcccagggaaggaag

SEQ ID NO: 378418 - DNA, 15 bp, Homo sapiens
cgcccagggaaggaa

SEQ ID NO: 378419 - DNA, 15 bp, Homo sapiens
acgcccagggaagga

SEQ ID NO: 378420 - DNA, 15 bp, Homo sapiens
aacgcccagggaagg

SEQ ID NO: 378421 - DNA, 15 bp, Homo sapiens
gaacgcccagggaag

SEQ ID NO: 378422 - DNA, 15 bp, Homo sapiens
tgaacgcccagggaa

SEQ ID NO: 378423 - DNA, 15 bp, Homo sapiens
ctgaacgcccaggga

SEQ ID NO: 378424 - DNA, 15 bp, Homo sapiens
cctgaacgcccaggg

SEQ ID NO: 378425 - DNA, 15 bp, Homo sapiens
acctgaacgcccagg

SEQ ID NO: 378426 - DNA, 15 bp, Homo sapiens
gacctgaacgcccag

SEQ ID NO: 378427 - DNA, 15 bp, Homo sapiens
agacctgaacgccca

SEQ ID NO: 378428 - DNA, 15 bp, Homo sapiens
aagacctgaacgccc

SEQ ID NO: 378429 - DNA, 15 bp, Homo sapiens
aaagacctgaacgcc

SEQ ID NO: 378430 - DNA, 15 bp, Homo sapiens
caaagacctgaacgc

SEQ ID NO: 378431 - DNA, 15 bp, Homo sapiens
ccaaagacctgaacg

SEQ ID NO: 378432 - DNA, 15 bp, Homo sapiens
accaaagacctgaac

SEQ ID NO: 378433 - DNA, 15 bp, Homo sapiens
caccaaagacctgaa

SEQ ID NO: 378434 - DNA, 15 bp, Homo sapiens
acaccaaagacctga

SEQ ID NO: 378435 - DNA, 15 bp, Homo sapiens
tacaccaaagacctg

SEQ ID NO: 378436 - DNA, 15 bp, Homo sapiens
ctacaccaaagacct

SEQ ID NO: 378437 - DNA, 15 bp, Homo sapiens
gctacaccaaagacc

SEQ ID NO: 378438 - DNA, 15 bp, Homo sapiens
ggctacaccaaagac

SEQ ID NO: 378439 - DNA, 15 bp, Homo sapiens
aggctacaccaaaga

SEQ ID NO: 378440 - DNA, 15 bp, Homo sapiens
aaggctacaccaaag

SEQ ID NO: 378441 - DNA, 15 bp, Homo sapiens
gaaggctacaccaaa

SEQ ID NO: 378442 - DNA, 15 bp, Homo sapiens
tgaaggctacaccaa

SEQ ID NO: 378443 - DNA, 15 bp, Homo sapiens
ctgaaggctacacca

SEQ ID NO: 378444 - DNA, 15 bp, Homo sapiens
tctgaaggctacacc

SEQ ID NO: 378445 - DNA, 15 bp, Homo sapiens
ctctgaaggctacac

SEQ ID NO: 378446 - DNA, 15 bp, Homo sapiens
gctctgaaggctaca

SEQ ID NO: 378447 - DNA, 15 bp, Homo sapiens
agctctgaaggctac

SEQ ID NO: 378448 - DNA, 15 bp, Homo sapiens
cagctctgaaggcta

SEQ ID NO: 378449 - DNA, 15 bp, Homo sapiens
tcagctctgaaggct

SEQ ID NO: 378450 - DNA, 15 bp, Homo sapiens
ctcagctctgaaggc

SEQ ID NO: 378451 - DNA, 15 bp, Homo sapiens
actcagctctgaagg

SEQ ID NO: 378452 - DNA, 15 bp, Homo sapiens
aactcagctctgaag

SEQ ID NO: 378453 - DNA, 15 bp, Homo sapiens
gaactcagctctgaa

SEQ ID NO: 378454 - DNA, 15 bp, Homo sapiens
ggaactcagctctga

SEQ ID NO: 378455 - DNA, 15 bp, Homo sapiens
gggaactcagctctg

SEQ ID NO: 378456 - DNA, 15 bp, Homo sapiens
agggaactcagctct

SEQ ID NO: 378457 - DNA, 15 bp, Homo sapiens
gagggaactcagctc

SEQ ID NO: 378458 - DNA, 15 bp, Homo sapiens
tgagggaactcagct

SEQ ID NO: 378459 - DNA, 15 bp, Homo sapiens
ctgagggaactcagc

SEQ ID NO: 378460 - DNA, 15 bp, Homo sapiens
gctgagggaactcag

SEQ ID NO: 378461 - DNA, 15 bp, Homo sapiens
tgctgagggaactca

SEQ ID NO: 378462 - DNA, 15 bp, Homo sapiens
ttgctgagggaactc

SEQ ID NO: 378463 - DNA, 15 bp, Homo sapiens
cttgctgagggaact

SEQ ID NO: 378464 - DNA, 15 bp, Homo sapiens
tcttgctgagggaac

SEQ ID NO: 378465 - DNA, 15 bp, Homo sapiens
ttcttgctgagggaa

SEQ ID NO: 378466 - DNA, 15 bp, Homo sapiens
tttcttgctgaggga

SEQ ID NO: 378467 - DNA, 15 bp, Homo sapiens
ctttcttgctgaggg

SEQ ID NO: 378468 - DNA, 15 bp, Homo sapiens
actttcttgctgagg

SEQ ID NO: 378469 - DNA, 15 bp, Homo sapiens
aactttcttgctgag

SEQ ID NO: 378470 - DNA, 15 bp, Homo sapiens
gaactttcttgctga

SEQ ID NO: 378471 - DNA, 15 bp, Homo sapiens
tgaactttcttgctg

SEQ ID NO: 378472 - DNA, 15 bp, Homo sapiens
ttgaactttcttgct

SEQ ID NO: 378473 - DNA, 15 bp, Homo sapiens
tttgaactttcttgc

SEQ ID NO: 378474 - DNA, 15 bp, Homo sapiens
ctttgaactttcttg

SEQ ID NO: 378475 - DNA, 15 bp, Homo sapiens
tctttgaactttctt

SEQ ID NO: 378476 - DNA, 15 bp, Homo sapiens
atctttgaactttct

SEQ ID NO: 378477 - DNA, 15 bp, Homo sapiens
aatctttgaactttc

SEQ ID NO: 378478 - DNA, 15 bp, Homo sapiens
caatctttgaacttt

SEQ ID NO: 378479 - DNA, 15 bp, Homo sapiens
gcaatctttgaactt

SEQ ID NO: 378480 - DNA, 15 bp, Homo sapiens
ggcaatctttgaact

SEQ ID NO: 378481 - DNA, 15 bp, Homo sapiens
tggcaatctttgaac

SEQ ID NO: 378482 - DNA, 15 bp, Homo sapiens
ctggcaatctttgaa

SEQ ID NO: 378483 - DNA, 15 bp, Homo sapiens
gctggcaatctttga

SEQ ID NO: 378484 - DNA, 15 bp, Homo sapiens
cgctggcaatctttg

SEQ ID NO: 378485 - DNA, 15 bp, Homo sapiens
gcgctggcaatcttt

SEQ ID NO: 378486 - DNA, 15 bp, Homo sapiens
agcgctggcaatctt

SEQ ID NO: 378487 - DNA, 15 bp, Homo sapiens
gagcgctggcaatct

SEQ ID NO: 378488 - DNA, 15 bp, Homo sapiens
tgagcgctggcaatc

SEQ ID NO: 378489 - DNA, 15 bp, Homo sapiens
gtgagcgctggcaat

SEQ ID NO: 378490 - DNA, 15 bp, Homo sapiens
tgtgagcgctggcaa

SEQ ID NO: 378491 - DNA, 15 bp, Homo sapiens
ttgtgagcgctggca

SEQ ID NO: 378492 - DNA, 15 bp, Homo sapiens
cttgtgagcgctggc

SEQ ID NO: 378493 - DNA, 15 bp, Homo sapiens
acttgtgagcgctgg

SEQ ID NO: 378494 - DNA, 15 bp, Homo sapiens
aacttgtgagcgctg

SEQ ID NO: 378495 - DNA, 15 bp, Homo sapiens
aaacttgtgagcgct

SEQ ID NO: 378496 - DNA, 15 bp, Homo sapiens
taaacttgtgagcgc

SEQ ID NO: 378497 - DNA, 15 bp, Homo sapiens
ataaacttgtgagcg

SEQ ID NO: 378498 - DNA, 15 bp, Homo sapiens
aataaacttgtgagc

SEQ ID NO: 378499 - DNA, 15 bp, Homo sapiens
taataaacttgtgag

SEQ ID NO: 378500 - DNA, 15 bp, Homo sapiens
ctaataaacttgtga

SEQ ID NO: 378501 - DNA, 15 bp, Homo sapiens
gctaataaacttgtg

SEQ ID NO: 378502 - DNA, 15 bp, Homo sapiens
tgctaataaacttgt

SEQ ID NO: 378503 - DNA, 15 bp, Homo sapiens
ctgctaataaacttg

SEQ ID NO: 378504 - DNA, 15 bp, Homo sapiens
actgctaataaactt

SEQ ID NO: 378505 - DNA, 15 bp, Homo sapiens
aactgctaataaact

SEQ ID NO: 378506 - DNA, 15 bp, Homo sapiens
caactgctaataaac

SEQ ID NO: 378507 - DNA, 15 bp, Homo sapiens
tcaactgctaataaa

SEQ ID NO: 378508 - DNA, 15 bp, Homo sapiens
atcaactgctaataa

SEQ ID NO: 378509 - DNA, 15 bp, Homo sapiens
catcaactgctaata

SEQ ID NO: 378510 - DNA, 15 bp, Homo sapiens
ccatcaactgctaat

SEQ ID NO: 378511 - DNA, 15 bp, Homo sapiens
tccatcaactgctaa

SEQ ID NO: 378512 - DNA, 15 bp, Homo sapiens
atccatcaactgcta

SEQ ID NO: 378513 - DNA, 15 bp, Homo sapiens
tatccatcaactgct

SEQ ID NO: 378514 - DNA, 15 bp, Homo sapiens
gtatccatcaactgc

SEQ ID NO: 378515 - DNA, 15 bp, Homo sapiens
agtatccatcaactg

SEQ ID NO: 378516 - DNA, 15 bp, Homo sapiens
aagtatccatcaact

SEQ ID NO: 378517 - DNA, 15 bp, Homo sapiens
aaagtatccatcaac

SEQ ID NO: 378518 - DNA, 15 bp, Homo sapiens
caaagtatccatcaa

SEQ ID NO: 378519 - DNA, 15 bp, Homo sapiens
gcaaagtatccatca

SEQ ID NO: 378520 - DNA, 15 bp, Homo sapiens
tgcaaagtatccatc

SEQ ID NO: 378521 - DNA, 15 bp, Homo sapiens
ctgcaaagtatccat

SEQ ID NO: 378522 - DNA, 15 bp, Homo sapiens
tctgcaaagtatcca

SEQ ID NO: 378523 - DNA, 15 bp, Homo sapiens
ttctgcaaagtatcc

SEQ ID NO: 378524 - DNA, 15 bp, Homo sapiens
tttctgcaaagtatc

SEQ ID NO: 378525 - DNA, 15 bp, Homo sapiens
gtttctgcaaagtat

SEQ ID NO: 378526 - DNA, 15 bp, Homo sapiens
tgtttctgcaaagta

SEQ ID NO: 378527 - DNA, 15 bp, Homo sapiens
ttgtttctgcaaagt

SEQ ID NO: 378528 - DNA, 15 bp, Homo sapiens
cttgtttctgcaaag

SEQ ID NO: 378529 - DNA, 15 bp, Homo sapiens
acttgtttctgcaaa

SEQ ID NO: 378530 - DNA, 15 bp, Homo sapiens
cacttgtttctgcaa

SEQ ID NO: 378531 - DNA, 15 bp, Homo sapiens
tcacttgtttctgca

SEQ ID NO: 378532 - DNA, 15 bp, Homo sapiens
ttcacttgtttctgc

SEQ ID NO: 378533 - DNA, 15 bp, Homo sapiens
attcacttgtttctg

SEQ ID NO: 378534 - DNA, 15 bp, Homo sapiens
cattcacttgtttct

SEQ ID NO: 378535 - DNA, 15 bp, Homo sapiens
gcattcacttgtttc

SEQ ID NO: 378536 - DNA, 15 bp, Homo sapiens
ggcattcacttgttt

SEQ ID NO: 378537 - DNA, 15 bp, Homo sapiens
aggcattcacttgtt

SEQ ID NO: 378538 - DNA, 15 bp, Homo sapiens
caggcattcacttgt

SEQ ID NO: 378539 - DNA, 15 bp, Homo sapiens
tcaggcattcacttg

SEQ ID NO: 378540 - DNA, 15 bp, Homo sapiens
atcaggcattcactt

SEQ ID NO: 378541 - DNA, 15 bp, Homo sapiens
catcaggcattcact

SEQ ID NO: 378542 - DNA, 15 bp, Homo sapiens
tcatcaggcattcac

SEQ ID NO: 378543 - DNA, 15 bp, Homo sapiens
ctcatcaggcattca

SEQ ID NO: 378544 - DNA, 15 bp, Homo sapiens
actcatcaggcattc

SEQ ID NO: 378545 - DNA, 15 bp, Homo sapiens
gactcatcaggcatt

SEQ ID NO: 378546 - DNA, 15 bp, Homo sapiens
tgactcatcaggcat

SEQ ID NO: 378547 - DNA, 15 bp, Homo sapiens
gtgactcatcaggca

SEQ ID NO: 378548 - DNA, 15 bp, Homo sapiens
ggtgactcatcaggc

SEQ ID NO: 378549 - DNA, 15 bp, Homo sapiens
aggtgactcatcagg

SEQ ID NO: 378550 - DNA, 15 bp, Homo sapiens
aaggtgactcatcag

SEQ ID NO: 378551 - DNA, 15 bp, Homo sapiens
gaaggtgactcatca

SEQ ID NO: 378552 - DNA, 15 bp, Homo sapiens
agaaggtgactcatc

SEQ ID NO: 378553 - DNA, 15 bp, Homo sapiens
gagaaggtgactcat

SEQ ID NO: 378554 - DNA, 15 bp, Homo sapiens
ggagaaggtgactca

SEQ ID NO: 378555 - DNA, 15 bp, Homo sapiens
gggagaaggtgactc

SEQ ID NO: 378556 - DNA, 15 bp, Homo sapiens
agggagaaggtgact

SEQ ID NO: 378557 - DNA, 15 bp, Homo sapiens
cagggagaaggtgac

SEQ ID NO: 378558 - DNA, 15 bp, Homo sapiens
acagggagaaggtga

SEQ ID NO: 378559 - DNA, 15 bp, Homo sapiens
gacagggagaaggtg

SEQ ID NO: 378560 - DNA, 15 bp, Homo sapiens
ggacagggagaaggt

SEQ ID NO: 378561 - DNA, 15 bp, Homo sapiens
gggacagggagaagg

SEQ ID NO: 378562 - DNA, 15 bp, Homo sapiens
agggacagggagaag

SEQ ID NO: 378563 - DNA, 15 bp, Homo sapiens
cagggacagggagaa

SEQ ID NO: 378564 - DNA, 15 bp, Homo sapiens
acagggacagggaga

SEQ ID NO: 378565 - DNA, 15 bp, Homo sapiens
gacagggacagggag

SEQ ID NO: 378566 - DNA, 15 bp, Homo sapiens
agacagggacaggga

SEQ ID NO: 378567 - DNA, 15 bp, Homo sapiens
aagacagggacaggg

SEQ ID NO: 378568 - DNA, 15 bp, Homo sapiens
caagacagggacagg

SEQ ID NO: 378569 - DNA, 15 bp, Homo sapiens
acaagacagggacag

SEQ ID NO: 378570 - DNA, 15 bp, Homo sapiens
aacaagacagggaca

SEQ ID NO: 378571 - DNA, 15 bp, Homo sapiens
aaacaagacagggac

SEQ ID NO: 378572 - DNA, 15 bp, Homo sapiens
aaaacaagacaggga

SEQ ID NO: 378573 - DNA, 15 bp, Homo sapiens
gaaaacaagacaggg

SEQ ID NO: 378574 - DNA, 15 bp, Homo sapiens
ggaaaacaagacagg

SEQ ID NO: 378575 - DNA, 15 bp, Homo sapiens
tggaaaacaagacag

SEQ ID NO: 378576 - DNA, 15 bp, Homo sapiens
atggaaaacaagaca

SEQ ID NO: 378577 - DNA, 15 bp, Homo sapiens
tatggaaaacaagac

SEQ ID NO: 378578 - DNA, 15 bp, Homo sapiens
atatggaaaacaaga

SEQ ID NO: 378579 - DNA, 15 bp, Homo sapiens
catatggaaaacaag

SEQ ID NO: 378580 - DNA, 15 bp, Homo sapiens
acatatggaaaacaa

SEQ ID NO: 378581 - DNA, 15 bp, Homo sapiens
aacatatggaaaaca

SEQ ID NO: 378582 - DNA, 15 bp, Homo sapiens
gaacatatggaaaac

SEQ ID NO: 378583 - DNA, 15 bp, Homo sapiens
ggaacatatggaaaa

SEQ ID NO: 378584 - DNA, 15 bp, Homo sapiens
tggaacatatggaaa

SEQ ID NO: 378585 - DNA, 15 bp, Homo sapiens
ctggaacatatggaa

SEQ ID NO: 378586 - DNA, 15 bp, Homo sapiens
actggaacatatgga

SEQ ID NO: 378587 - DNA, 15 bp, Homo sapiens
tactggaacatatgg

SEQ ID NO: 378588 - DNA, 15 bp, Homo sapiens
gtactggaacatatg

SEQ ID NO: 378589 - DNA, 15 bp, Homo sapiens
cgtactggaacatat

SEQ ID NO: 378590 - DNA, 15 bp, Homo sapiens
acgtactggaacata

SEQ ID NO: 378591 - DNA, 15 bp, Homo sapiens
tacgtactggaacat

SEQ ID NO: 378592 - DNA, 15 bp, Homo sapiens
atacgtactggaaca

SEQ ID NO: 378593 - DNA, 15 bp, Homo sapiens
catacgtactggaac

SEQ ID NO: 378594 - DNA, 15 bp, Homo sapiens
acatacgtactggaa

SEQ ID NO: 378595 - DNA, 15 bp, Homo sapiens
cacatacgtactgga

SEQ ID NO: 378596 - DNA, 15 bp, Homo sapiens
gcacatacgtactgg

SEQ ID NO: 378597 - DNA, 15 bp, Homo sapiens
tgcacatacgtactg

SEQ ID NO: 378598 - DNA, 15 bp, Homo sapiens
gtgcacatacgtact

SEQ ID NO: 378599 - DNA, 15 bp, Homo sapiens
tgtgcacatacgtac

SEQ ID NO: 378600 - DNA, 15 bp, Homo sapiens
gtgtgcacatacgta

SEQ ID NO: 378601 - DNA, 15 bp, Homo sapiens
tgtgtgcacatacgt

SEQ ID NO: 378602 - DNA, 15 bp, Homo sapiens
ctgtgtgcacatacg

SEQ ID NO: 378603 - DNA, 15 bp, Homo sapiens
tctgtgtgcacatac

SEQ ID NO: 378604 - DNA, 15 bp, Homo sapiens
ttctgtgtgcacata

SEQ ID NO: 378605 - DNA, 15 bp, Homo sapiens
tttctgtgtgcacat

SEQ ID NO: 378606 - DNA, 15 bp, Homo sapiens
gtttctgtgtgcaca

SEQ ID NO: 378607 - DNA, 15 bp, Homo sapiens
tgtttctgtgtgcac

SEQ ID NO: 378608 - DNA, 15 bp, Homo sapiens
gtgtttctgtgtgca

SEQ ID NO: 378609 - DNA, 15 bp, Homo sapiens
tgtgtttctgtgtgc

SEQ ID NO: 378610 - DNA, 15 bp, Homo sapiens
gtgtgtttctgtgtg

SEQ ID NO: 378611 - DNA, 15 bp, Homo sapiens
tgtgtgtttctgtgt

SEQ ID NO: 378612 - DNA, 15 bp, Homo sapiens
atgtgtgtttctgtg

SEQ ID NO: 378613 - DNA, 15 bp, Homo sapiens
tatgtgtgtttctgt

SEQ ID NO: 378614 - DNA, 15 bp, Homo sapiens
ttatgtgtgtttctg

SEQ ID NO: 378615 - DNA, 15 bp, Homo sapiens
gttatgtgtgtttct

SEQ ID NO: 378616 - DNA, 15 bp, Homo sapiens
tgttatgtgtgtttc

SEQ ID NO: 378617 - DNA, 15 bp, Homo sapiens
gtgttatgtgtgttt

SEQ ID NO: 378618 - DNA, 15 bp, Homo sapiens
tgtgttatgtgtgtt

SEQ ID NO: 378619 - DNA, 15 bp, Homo sapiens
gtgtgttatgtgtgt

SEQ ID NO: 378620 - DNA, 15 bp, Homo sapiens
tgtgtgttatgtgtg

SEQ ID NO: 378621 - DNA, 15 bp, Homo sapiens
gtgtgtgttatgtgt

SEQ ID NO: 378622 - DNA, 15 bp, Homo sapiens
agtgtgtgttatgtg

SEQ ID NO: 378623 - DNA, 15 bp, Homo sapiens
gagtgtgtgttatgt

SEQ ID NO: 378624 - DNA, 15 bp, Homo sapiens
cgagtgtgtgttatg

SEQ ID NO: 378625 - DNA, 15 bp, Homo sapiens
acgagtgtgtgttat

SEQ ID NO: 378626 - DNA, 15 bp, Homo sapiens
tacgagtgtgtgtta

SEQ ID NO: 378627 - DNA, 15 bp, Homo sapiens
gtacgagtgtgtgtt

SEQ ID NO: 378628 - DNA, 15 bp, Homo sapiens
tgtacgagtgtgtgt

SEQ ID NO: 378629 - DNA, 15 bp, Homo sapiens
gtgtacgagtgtgtg

SEQ ID NO: 378630 - DNA, 15 bp, Homo sapiens
tgtgtacgagtgtgt

SEQ ID NO: 378631 - DNA, 15 bp, Homo sapiens
gtgtgtacgagtgtg

SEQ ID NO: 378632 - DNA, 15 bp, Homo sapiens
agtgtgtacgagtgt

SEQ ID NO: 378633 - DNA, 15 bp, Homo sapiens
cagtgtgtacgagtg

SEQ ID NO: 378634 - DNA, 15 bp, Homo sapiens
tcagtgtgtacgagt

SEQ ID NO: 378635 - DNA, 15 bp, Homo sapiens
gtcagtgtgtacgag

SEQ ID NO: 378636 - DNA, 15 bp, Homo sapiens
tgtcagtgtgtacga

SEQ ID NO: 378637 - DNA, 15 bp, Homo sapiens
atgtcagtgtgtacg

SEQ ID NO: 378638 - DNA, 15 bp, Homo sapiens
gatgtcagtgtgtac

SEQ ID NO: 378639 - DNA, 15 bp, Homo sapiens
tgatgtcagtgtgta

SEQ ID NO: 378640 - DNA, 15 bp, Homo sapiens
atgatgtcagtgtgt

SEQ ID NO: 378641 - DNA, 15 bp, Homo sapiens
catgatgtcagtgtg

SEQ ID NO: 378642 - DNA, 15 bp, Homo sapiens
ccatgatgtcagtgt

SEQ ID NO: 378643 - DNA, 15 bp, Homo sapiens
tccatgatgtcagtg

SEQ ID NO: 378644 - DNA, 15 bp, Homo sapiens
gtccatgatgtcagt

SEQ ID NO: 378645 - DNA, 15 bp, Homo sapiens
tgtccatgatgtcag

SEQ ID NO: 378646 - DNA, 15 bp, Homo sapiens
gtgtccatgatgtca

SEQ ID NO: 378647 - DNA, 15 bp, Homo sapiens
tgtgtccatgatgtc

SEQ ID NO: 378648 - DNA, 15 bp, Homo sapiens
ctgtgtccatgatgt

SEQ ID NO: 378649 - DNA, 15 bp, Homo sapiens
actgtgtccatgatg

SEQ ID NO: 378650 - DNA, 15 bp, Homo sapiens
gactgtgtccatgat

SEQ ID NO: 378651 - DNA, 15 bp, Homo sapiens
agactgtgtccatga

SEQ ID NO: 378652 - DNA, 15 bp, Homo sapiens
aagactgtgtccatg

SEQ ID NO: 378653 - DNA, 15 bp, Homo sapiens
caagactgtgtccat

SEQ ID NO: 378654 - DNA, 15 bp, Homo sapiens
gcaagactgtgtcca

SEQ ID NO: 378655 - DNA, 15 bp, Homo sapiens
tgcaagactgtgtcc

SEQ ID NO: 378656 - DNA, 15 bp, Homo sapiens
gtgcaagactgtgtc

SEQ ID NO: 378657 - DNA, 15 bp, Homo sapiens
tgtgcaagactgtgt

SEQ ID NO: 378658 - DNA, 15 bp, Homo sapiens
gtgtgcaagactgtg

SEQ ID NO: 378659 - DNA, 15 bp, Homo sapiens
cgtgtgcaagactgt

SEQ ID NO: 378660 - DNA, 15 bp, Homo sapiens
gcgtgtgcaagactg

SEQ ID NO: 378661 - DNA, 15 bp, Homo sapiens
tgcgtgtgcaagact

SEQ ID NO: 378662 - DNA, 15 bp, Homo sapiens
gtgcgtgtgcaagac

SEQ ID NO: 378663 - DNA, 15 bp, Homo sapiens
tgtgcgtgtgcaaga

SEQ ID NO: 378664 - DNA, 15 bp, Homo sapiens
atgtgcgtgtgcaag

SEQ ID NO: 378665 - DNA, 15 bp, Homo sapiens
catgtgcgtgtgcaa

SEQ ID NO: 378666 - DNA, 15 bp, Homo sapiens
gcatgtgcgtgtgca

SEQ ID NO: 378667 - DNA, 15 bp, Homo sapiens
tgcatgtgcgtgtgc

SEQ ID NO: 378668 - DNA, 15 bp, Homo sapiens
gtgcatgtgcgtgtg

SEQ ID NO: 378669 - DNA, 15 bp, Homo sapiens
tgtgcatgtgcgtgt

SEQ ID NO: 378670 - DNA, 15 bp, Homo sapiens
ttgtgcatgtgcgtg

SEQ ID NO: 378671 - DNA, 15 bp, Homo sapiens
cttgtgcatgtgcgt

SEQ ID NO: 378672 - DNA, 15 bp, Homo sapiens
gcttgtgcatgtgcg

SEQ ID NO: 378673 - DNA, 15 bp, Homo sapiens
tgcttgtgcatgtgc

SEQ ID NO: 378674 - DNA, 15 bp, Homo sapiens
gtgcttgtgcatgtg

SEQ ID NO: 378675 - DNA, 15 bp, Homo sapiens
agtgcttgtgcatgt

SEQ ID NO: 378676 - DNA, 15 bp, Homo sapiens
cagtgcttgtgcatg

SEQ ID NO: 378677 - DNA, 15 bp, Homo sapiens
ccagtgcttgtgcat

SEQ ID NO: 378678 - DNA, 15 bp, Homo sapiens
tccagtgcttgtgca

SEQ ID NO: 378679 - DNA, 15 bp, Homo sapiens
gtccagtgcttgtgc

SEQ ID NO: 378680 - DNA, 15 bp, Homo sapiens
agtccagtgcttgtg

SEQ ID NO: 378681 - DNA, 15 bp, Homo sapiens
aagtccagtgcttgt

SEQ ID NO: 378682 - DNA, 15 bp, Homo sapiens
gaagtccagtgcttg

SEQ ID NO: 378683 - DNA, 15 bp, Homo sapiens
ggaagtccagtgctt

SEQ ID NO: 378684 - DNA, 15 bp, Homo sapiens
tggaagtccagtgct

SEQ ID NO: 378685 - DNA, 15 bp, Homo sapiens
ttggaagtccagtgc

SEQ ID NO: 378686 - DNA, 15 bp, Homo sapiens
cttggaagtccagtg

SEQ ID NO: 378687 - DNA, 15 bp, Homo sapiens
gcttggaagtccagt

SEQ ID NO: 378688 - DNA, 15 bp, Homo sapiens
agcttggaagtccag

SEQ ID NO: 378689 - DNA, 15 bp, Homo sapiens
tagcttggaagtcca

SEQ ID NO: 378690 - DNA, 15 bp, Homo sapiens
gtagcttggaagtcc

SEQ ID NO: 378691 - DNA, 15 bp, Homo sapiens
tgtagcttggaagtc

SEQ ID NO: 378692 - DNA, 15 bp, Homo sapiens
atgtagcttggaagt

SEQ ID NO: 378693 - DNA, 15 bp, Homo sapiens
catgtagcttggaag

SEQ ID NO: 378694 - DNA, 15 bp, Homo sapiens
ccatgtagcttggaa

SEQ ID NO: 378695 - DNA, 15 bp, Homo sapiens
cccatgtagcttgga

SEQ ID NO: 378696 - DNA, 15 bp, Homo sapiens
ccccatgtagcttgg

SEQ ID NO: 378697 - DNA, 15 bp, Homo sapiens
cccccatgtagcttg

SEQ ID NO: 378698 - DNA, 15 bp, Homo sapiens
ccccccatgtagctt

SEQ ID NO: 378699 - DNA, 15 bp, Homo sapiens
accccccatgtagct

SEQ ID NO: 378700 - DNA, 15 bp, Homo sapiens
caccccccatgtagc

SEQ ID NO: 378701 - DNA, 15 bp, Homo sapiens
ccaccccccatgtag

SEQ ID NO: 378702 - DNA, 15 bp, Homo sapiens
accaccccccatgta

SEQ ID NO: 378703 - DNA, 15 bp, Homo sapiens
caccaccccccatgt

SEQ ID NO: 378704 - DNA, 15 bp, Homo sapiens
tcaccaccccccatg

SEQ ID NO: 378705 - DNA, 15 bp, Homo sapiens
gtcaccaccccccat

SEQ ID NO: 378706 - DNA, 15 bp, Homo sapiens
ggtcaccacccccca

SEQ ID NO: 378707 - DNA, 15 bp, Homo sapiens
cggtcaccacccccc

SEQ ID NO: 378708 - DNA, 15 bp, Homo sapiens
ccggtcaccaccccc

SEQ ID NO: 378709 - DNA, 15 bp, Homo sapiens
gccggtcaccacccc

SEQ ID NO: 378710 - DNA, 15 bp, Homo sapiens
ggccggtcaccaccc

SEQ ID NO: 378711 - DNA, 15 bp, Homo sapiens
tggccggtcaccacc

SEQ ID NO: 378712 - DNA, 15 bp, Homo sapiens
ctggccggtcaccac

SEQ ID NO: 378713 - DNA, 15 bp, Homo sapiens
actggccggtcacca

SEQ ID NO: 378714 - DNA, 15 bp, Homo sapiens
aactggccggtcacc

SEQ ID NO: 378715 - DNA, 15 bp, Homo sapiens
aaactggccggtcac

SEQ ID NO: 378716 - DNA, 15 bp, Homo sapiens
aaaactggccggtca

SEQ ID NO: 378717 - DNA, 15 bp, Homo sapiens
gaaaactggccggtc

SEQ ID NO: 378718 - DNA, 15 bp, Homo sapiens
agaaaactggccggt

SEQ ID NO: 378719 - DNA, 15 bp, Homo sapiens
cagaaaactggccgg

SEQ ID NO: 378720 - DNA, 15 bp, Homo sapiens
ccagaaaactggccg

SEQ ID NO: 378721 - DNA, 15 bp, Homo sapiens
accagaaaactggcc

SEQ ID NO: 378722 - DNA, 15 bp, Homo sapiens
caccagaaaactggc

SEQ ID NO: 378723 - DNA, 15 bp, Homo sapiens
acaccagaaaactgg

SEQ ID NO: 378724 - DNA, 15 bp, Homo sapiens
aacaccagaaaactg

SEQ ID NO: 378725 - DNA, 15 bp, Homo sapiens
caacaccagaaaact

SEQ ID NO: 378726 - DNA, 15 bp, Homo sapiens
tcaacaccagaaaac

SEQ ID NO: 378727 - DNA, 15 bp, Homo sapiens
atcaacaccagaaaa

SEQ ID NO: 378728 - DNA, 15 bp, Homo sapiens
aatcaacaccagaaa

SEQ ID NO: 378729 - DNA, 15 bp, Homo sapiens
aaatcaacaccagaa

SEQ ID NO: 378730 - DNA, 15 bp, Homo sapiens
aaaatcaacaccaga

SEQ ID NO: 378731 - DNA, 15 bp, Homo sapiens
aaaaatcaacaccag

SEQ ID NO: 378732 - DNA, 15 bp, Homo sapiens
taaaaatcaacacca

SEQ ID NO: 378733 - DNA, 15 bp, Homo sapiens
ctaaaaatcaacacc

SEQ ID NO: 378734 - DNA, 15 bp, Homo sapiens
actaaaaatcaacac

SEQ ID NO: 378735 - DNA, 15 bp, Homo sapiens
cactaaaaatcaaca

SEQ ID NO: 378736 - DNA, 15 bp, Homo sapiens
ccactaaaaatcaac

SEQ ID NO: 378737 - DNA, 15 bp, Homo sapiens
cccactaaaaatcaa

SEQ ID NO: 378738 - DNA, 15 bp, Homo sapiens
ccccactaaaaatca

SEQ ID NO: 378739 - DNA, 15 bp, Homo sapiens
cccccactaaaaatc

SEQ ID NO: 378740 - DNA, 15 bp, Homo sapiens
acccccactaaaaat

SEQ ID NO: 378741 - DNA, 15 bp, Homo sapiens
aacccccactaaaaa

SEQ ID NO: 378742 - DNA, 15 bp, Homo sapiens
caacccccactaaaa

SEQ ID NO: 378743 - DNA, 15 bp, Homo sapiens
ccaacccccactaaa

SEQ ID NO: 378744 - DNA, 15 bp, Homo sapiens
cccaacccccactaa

SEQ ID NO: 378745 - DNA, 15 bp, Homo sapiens
ccccaacccccacta

SEQ ID NO: 378746 - DNA, 15 bp, Homo sapiens
cccccaacccccact

SEQ ID NO: 378747 - DNA, 15 bp, Homo sapiens
acccccaacccccac

SEQ ID NO: 378748 - DNA, 15 bp, Homo sapiens
aacccccaaccccca

SEQ ID NO: 378749 - DNA, 15 bp, Homo sapiens
caacccccaaccccc

SEQ ID NO: 378750 - DNA, 15 bp, Homo sapiens
tcaacccccaacccc

SEQ ID NO: 378751 - DNA, 15 bp, Homo sapiens
ctcaacccccaaccc

SEQ ID NO: 378752 - DNA, 15 bp, Homo sapiens
cctcaacccccaacc

SEQ ID NO: 378753 - DNA, 15 bp, Homo sapiens
ccctcaacccccaac

SEQ ID NO: 378754 - DNA, 15 bp, Homo sapiens
tccctcaacccccaa

SEQ ID NO: 378755 - DNA, 15 bp, Homo sapiens
ttccctcaaccccca

SEQ ID NO: 378756 - DNA, 15 bp, Homo sapiens
tttccctcaaccccc

SEQ ID NO: 378757 - DNA, 15 bp, Homo sapiens
ctttccctcaacccc

SEQ ID NO: 378758 - DNA, 15 bp, Homo sapiens
cctttccctcaaccc

SEQ ID NO: 378759 - DNA, 15 bp, Homo sapiens
tcctttccctcaacc

SEQ ID NO: 378760 - DNA, 15 bp, Homo sapiens
ttcctttccctcaac

SEQ ID NO: 378761 - DNA, 15 bp, Homo sapiens
attcctttccctcaa

SEQ ID NO: 378762 - DNA, 15 bp, Homo sapiens
cattcctttccctca

SEQ ID NO: 378763 - DNA, 15 bp, Homo sapiens
tcattcctttccctc

SEQ ID NO: 378764 - DNA, 15 bp, Homo sapiens
ctcattcctttccct

SEQ ID NO: 378765 - DNA, 15 bp, Homo sapiens
tctcattcctttccc

SEQ ID NO: 378766 - DNA, 15 bp, Homo sapiens
gtctcattcctttcc

SEQ ID NO: 378767 - DNA, 15 bp, Homo sapiens
ggtctcattcctttc

SEQ ID NO: 378768 - DNA, 15 bp, Homo sapiens
aggtctcattccttt

SEQ ID NO: 378769 - DNA, 15 bp, Homo sapiens
gaggtctcattcctt

SEQ ID NO: 378770 - DNA, 15 bp, Homo sapiens
tgaggtctcattcct

SEQ ID NO: 378771 - DNA, 15 bp, Homo sapiens
ctgaggtctcattcc

SEQ ID NO: 378772 - DNA, 15 bp, Homo sapiens
actgaggtctcattc

SEQ ID NO: 378773 - DNA, 15 bp, Homo sapiens
cactgaggtctcatt

SEQ ID NO: 378774 - DNA, 15 bp, Homo sapiens
acactgaggtctcat

SEQ ID NO: 378775 - DNA, 15 bp, Homo sapiens
gacactgaggtctca

SEQ ID NO: 378776 - DNA, 15 bp, Homo sapiens
ggacactgaggtctc

SEQ ID NO: 378777 - DNA, 15 bp, Homo sapiens
gggacactgaggtct

SEQ ID NO: 378778 - DNA, 15 bp, Homo sapiens
ggggacactgaggtc

SEQ ID NO: 378779 - DNA, 15 bp, Homo sapiens
aggggacactgaggt

SEQ ID NO: 378780 - DNA, 15 bp, Homo sapiens
aaggggacactgagg

SEQ ID NO: 378781 - DNA, 15 bp, Homo sapiens
aaaggggacactgag

SEQ ID NO: 378782 - DNA, 15 bp, Homo sapiens
aaaaggggacactga

SEQ ID NO: 378783 - DNA, 15 bp, Homo sapiens
aaaaaggggacactg

SEQ ID NO: 378784 - DNA, 15 bp, Homo sapiens
caaaaaggggacact

SEQ ID NO: 378785 - DNA, 15 bp, Homo sapiens
acaaaaaggggacac

SEQ ID NO: 378786 - DNA, 15 bp, Homo sapiens
cacaaaaaggggaca

SEQ ID NO: 378787 - DNA, 15 bp, Homo sapiens
ccacaaaaaggggac

SEQ ID NO: 378788 - DNA, 15 bp, Homo sapiens
tccacaaaaagggga

SEQ ID NO: 378789 - DNA, 15 bp, Homo sapiens
ctccacaaaaagggg

SEQ ID NO: 378790 - DNA, 15 bp, Homo sapiens
gctccacaaaaaggg

SEQ ID NO: 378791 - DNA, 15 bp, Homo sapiens
agctccacaaaaagg

SEQ ID NO: 378792 - DNA, 15 bp, Homo sapiens
aagctccacaaaaag

SEQ ID NO: 378793 - DNA, 15 bp, Homo sapiens
aaagctccacaaaaa

SEQ ID NO: 378794 - DNA, 15 bp, Homo sapiens
aaaagctccacaaaa

SEQ ID NO: 378795 - DNA, 15 bp, Homo sapiens
caaaagctccacaaa

SEQ ID NO: 378796 - DNA, 15 bp, Homo sapiens
ccaaaagctccacaa

SEQ ID NO: 378797 - DNA, 15 bp, Homo sapiens
cccaaaagctccaca

SEQ ID NO: 378798 - DNA, 15 bp, Homo sapiens
ccccaaaagctccac

SEQ ID NO: 378799 - DNA, 15 bp, Homo sapiens
gccccaaaagctcca

SEQ ID NO: 378800 - DNA, 15 bp, Homo sapiens
tgccccaaaagctcc

SEQ ID NO: 378801 - DNA, 15 bp, Homo sapiens
ctgccccaaaagctc

SEQ ID NO: 378802 - DNA, 15 bp, Homo sapiens
cctgccccaaaagct

SEQ ID NO: 378803 - DNA, 15 bp, Homo sapiens
gcctgccccaaaagc

SEQ ID NO: 378804 - DNA, 15 bp, Homo sapiens
tgcctgccccaaaag

SEQ ID NO: 378805 - DNA, 15 bp, Homo sapiens
atgcctgccccaaaa

SEQ ID NO: 378806 - DNA, 15 bp, Homo sapiens
aatgcctgccccaaa

SEQ ID NO: 378807 - DNA, 15 bp, Homo sapiens
aaatgcctgccccaa

SEQ ID NO: 378808 - DNA, 15 bp, Homo sapiens
caaatgcctgcccca

SEQ ID NO: 378809 - DNA, 15 bp, Homo sapiens
ccaaatgcctgcccc

SEQ ID NO: 378810 - DNA, 15 bp, Homo sapiens
cccaaatgcctgccc

SEQ ID NO: 378811 - DNA, 15 bp, Homo sapiens
tcccaaatgcctgcc

SEQ ID NO: 378812 - DNA, 15 bp, Homo sapiens
ttcccaaatgcctgc

SEQ ID NO: 378813 - DNA, 15 bp, Homo sapiens
cttcccaaatgcctg

SEQ ID NO: 378814 - DNA, 15 bp, Homo sapiens
ccttcccaaatgcct

SEQ ID NO: 378815 - DNA, 15 bp, Homo sapiens
gccttcccaaatgcc

SEQ ID NO: 378816 - DNA, 15 bp, Homo sapiens
ggccttcccaaatgc

SEQ ID NO: 378817 - DNA, 15 bp, Homo sapiens
tggccttcccaaatg

SEQ ID NO: 378818 - DNA, 15 bp, Homo sapiens
ctggccttcccaaat

SEQ ID NO: 378819 - DNA, 15 bp, Homo sapiens
gctggccttcccaaa

SEQ ID NO: 378820 - DNA, 15 bp, Homo sapiens
agctggccttcccaa

SEQ ID NO: 378821 - DNA, 15 bp, Homo sapiens
aagctggccttccca

SEQ ID NO: 378822 - DNA, 15 bp, Homo sapiens
caagctggccttccc

SEQ ID NO: 378823 - DNA, 15 bp, Homo sapiens
ccaagctggccttcc

SEQ ID NO: 378824 - DNA, 15 bp, Homo sapiens
cccaagctggccttc

SEQ ID NO: 378825 - DNA, 15 bp, Homo sapiens
ccccaagctggcctt

SEQ ID NO: 378826 - DNA, 15 bp, Homo sapiens
accccaagctggcct

SEQ ID NO: 378827 - DNA, 15 bp, Homo sapiens
caccccaagctggcc

SEQ ID NO: 378828 - DNA, 15 bp, Homo sapiens
acaccccaagctggc

SEQ ID NO: 378829 - DNA, 15 bp, Homo sapiens
gacaccccaagctgg

SEQ ID NO: 378830 - DNA, 15 bp, Homo sapiens
agacaccccaagctg

SEQ ID NO: 378831 - DNA, 15 bp, Homo sapiens
cagacaccccaagct

SEQ ID NO: 378832 - DNA, 15 bp, Homo sapiens
acagacaccccaagc

SEQ ID NO: 378833 - DNA, 15 bp, Homo sapiens
tacagacaccccaag

SEQ ID NO: 378834 - DNA, 15 bp, Homo sapiens
ctacagacaccccaa

SEQ ID NO: 378835 - DNA, 15 bp, Homo sapiens
cctacagacacccca

SEQ ID NO: 378836 - DNA, 15 bp, Homo sapiens
ccctacagacacccc

SEQ ID NO: 378837 - DNA, 15 bp, Homo sapiens
tccctacagacaccc

SEQ ID NO: 378838 - DNA, 15 bp, Homo sapiens
ttccctacagacacc

SEQ ID NO: 378839 - DNA, 15 bp, Homo sapiens
gttccctacagacac

SEQ ID NO: 378840 - DNA, 15 bp, Homo sapiens
ggttccctacagaca

SEQ ID NO: 378841 - DNA, 15 bp, Homo sapiens
cggttccctacagac

SEQ ID NO: 378842 - DNA, 15 bp, Homo sapiens
gcggttccctacaga

SEQ ID NO: 378843 - DNA, 15 bp, Homo sapiens
agcggttccctacag

SEQ ID NO: 378844 - DNA, 15 bp, Homo sapiens
cagcggttccctaca

SEQ ID NO: 378845 - DNA, 15 bp, Homo sapiens
gcagcggttccctac

SEQ ID NO: 378846 - DNA, 15 bp, Homo sapiens
agcagcggttcccta

SEQ ID NO: 378847 - DNA, 15 bp, Homo sapiens
gagcagcggttccct

SEQ ID NO: 378848 - DNA, 15 bp, Homo sapiens
agagcagcggttccc

SEQ ID NO: 378849 - DNA, 15 bp, Homo sapiens
cagagcagcggttcc

SEQ ID NO: 378850 - DNA, 15 bp, Homo sapiens
ccagagcagcggttc

SEQ ID NO: 378851 - DNA, 15 bp, Homo sapiens
cccagagcagcggtt

SEQ ID NO: 378852 - DNA, 15 bp, Homo sapiens
acccagagcagcggt

SEQ ID NO: 378853 - DNA, 15 bp, Homo sapiens
cacccagagcagcgg

SEQ ID NO: 378854 - DNA, 15 bp, Homo sapiens
acacccagagcagcg

SEQ ID NO: 378855 - DNA, 15 bp, Homo sapiens
cacacccagagcagc

SEQ ID NO: 378856 - DNA, 15 bp, Homo sapiens
acacacccagagcag

SEQ ID NO: 378857 - DNA, 15 bp, Homo sapiens
cacacacccagagca

SEQ ID NO: 378858 - DNA, 15 bp, Homo sapiens
acacacacccagagc

SEQ ID NO: 378859 - DNA, 15 bp, Homo sapiens
cacacacacccagag

SEQ ID NO: 378860 - DNA, 15 bp, Homo sapiens
acacacacacccaga

SEQ ID NO: 378861 - DNA, 15 bp, Homo sapiens
gacacacacacccag

SEQ ID NO: 378862 - DNA, 15 bp, Homo sapiens
agacacacacaccca

SEQ ID NO: 378863 - DNA, 15 bp, Homo sapiens
cagacacacacaccc

SEQ ID NO: 378864 - DNA, 15 bp, Homo sapiens
acagacacacacacc

SEQ ID NO: 378865 - DNA, 15 bp, Homo sapiens
cacagacacacacac

SEQ ID NO: 378866 - DNA, 15 bp, Homo sapiens
ccacagacacacaca

SEQ ID NO: 378867 - DNA, 15 bp, Homo sapiens
gccacagacacacac

SEQ ID NO: 378868 - DNA, 15 bp, Homo sapiens
agccacagacacaca

SEQ ID NO: 378869 - DNA, 15 bp, Homo sapiens
cagccacagacacac

SEQ ID NO: 378870 - DNA, 15 bp, Homo sapiens
gcagccacagacaca

SEQ ID NO: 378871 - DNA, 15 bp, Homo sapiens
ggcagccacagacac

SEQ ID NO: 378872 - DNA, 15 bp, Homo sapiens
gggcagccacagaca

SEQ ID NO: 378873 - DNA, 15 bp, Homo sapiens
ggggcagccacagac

SEQ ID NO: 378874 - DNA, 15 bp, Homo sapiens
tggggcagccacaga

SEQ ID NO: 378875 - DNA, 15 bp, Homo sapiens
ctggggcagccacag

SEQ ID NO: 378876 - DNA, 15 bp, Homo sapiens
gctggggcagccaca

SEQ ID NO: 378877 - DNA, 15 bp, Homo sapiens
tgctggggcagccac

SEQ ID NO: 378878 - DNA, 15 bp, Homo sapiens
ctgctggggcagcca

SEQ ID NO: 378879 - DNA, 15 bp, Homo sapiens
cctgctggggcagcc

SEQ ID NO: 378880 - DNA, 15 bp, Homo sapiens
gcctgctggggcagc

SEQ ID NO: 378881 - DNA, 15 bp, Homo sapiens
ggcctgctggggcag

SEQ ID NO: 378882 - DNA, 15 bp, Homo sapiens
cggcctgctggggca

SEQ ID NO: 378883 - DNA, 15 bp, Homo sapiens
gcggcctgctggggc

SEQ ID NO: 378884 - DNA, 15 bp, Homo sapiens
tgcggcctgctgggg

SEQ ID NO: 378885 - DNA, 15 bp, Homo sapiens
ctgcggcctgctggg

SEQ ID NO: 378886 - DNA, 15 bp, Homo sapiens
actgcggcctgctgg

SEQ ID NO: 378887 - DNA, 15 bp, Homo sapiens
cactgcggcctgctg

SEQ ID NO: 378888 - DNA, 15 bp, Homo sapiens
acactgcggcctgct

SEQ ID NO: 378889 - DNA, 15 bp, Homo sapiens
cacactgcggcctgc

SEQ ID NO: 378890 - DNA, 15 bp, Homo sapiens
gcacactgcggcctg

SEQ ID NO: 378891 - DNA, 15 bp, Homo sapiens
tgcacactgcggcct

SEQ ID NO: 378892 - DNA, 15 bp, Homo sapiens
gtgcacactgcggcc

SEQ ID NO: 378893 - DNA, 15 bp, Homo sapiens
tgtgcacactgcggc

SEQ ID NO: 378894 - DNA, 15 bp, Homo sapiens
atgtgcacactgcgg

SEQ ID NO: 378895 - DNA, 15 bp, Homo sapiens
aatgtgcacactgcg

SEQ ID NO: 378896 - DNA, 15 bp, Homo sapiens
aaatgtgcacactgc

SEQ ID NO: 378897 - DNA, 15 bp, Homo sapiens
caaatgtgcacactg

SEQ ID NO: 378898 - DNA, 15 bp, Homo sapiens
acaaatgtgcacact

SEQ ID NO: 378899 - DNA, 15 bp, Homo sapiens
tacaaatgtgcacac

SEQ ID NO: 378900 - DNA, 15 bp, Homo sapiens
atacaaatgtgcaca

SEQ ID NO: 378901 - DNA, 15 bp, Homo sapiens
catacaaatgtgcac

SEQ ID NO: 378902 - DNA, 15 bp, Homo sapiens
ccatacaaatgtgca

SEQ ID NO: 378903 - DNA, 15 bp, Homo sapiens
gccatacaaatgtgc

SEQ ID NO: 378904 - DNA, 15 bp, Homo sapiens
ggccatacaaatgtg

SEQ ID NO: 378905 - DNA, 15 bp, Homo sapiens
aggccatacaaatgt

SEQ ID NO: 378906 - DNA, 15 bp, Homo sapiens
aaggccatacaaatg

SEQ ID NO: 378907 - DNA, 15 bp, Homo sapiens
taaggccatacaaat

SEQ ID NO: 378908 - DNA, 15 bp, Homo sapiens
gtaaggccatacaaa

SEQ ID NO: 378909 - DNA, 15 bp, Homo sapiens
agtaaggccatacaa

SEQ ID NO: 378910 - DNA, 15 bp, Homo sapiens
cagtaaggccataca

SEQ ID NO: 378911 - DNA, 15 bp, Homo sapiens
tcagtaaggccatac

SEQ ID NO: 378912 - DNA, 15 bp, Homo sapiens
gtcagtaaggccata

SEQ ID NO: 378913 - DNA, 15 bp, Homo sapiens
cgtcagtaaggccat

SEQ ID NO: 378914 - DNA, 15 bp, Homo sapiens
ccgtcagtaaggcca

SEQ ID NO: 378915 - DNA, 15 bp, Homo sapiens
cccgtcagtaaggcc

SEQ ID NO: 378916 - DNA, 15 bp, Homo sapiens
gcccgtcagtaaggc

SEQ ID NO: 378917 - DNA, 15 bp, Homo sapiens
tgcccgtcagtaagg

SEQ ID NO: 378918 - DNA, 15 bp, Homo sapiens
gtgcccgtcagtaag

SEQ ID NO: 378919 - DNA, 15 bp, Homo sapiens
ggtgcccgtcagtaa

SEQ ID NO: 378920 - DNA, 15 bp, Homo sapiens
aggtgcccgtcagta

SEQ ID NO: 378921 - DNA, 15 bp, Homo sapiens
gaggtgcccgtcagt

SEQ ID NO: 378922 - DNA, 15 bp, Homo sapiens
ggaggtgcccgtcag

SEQ ID NO: 378923 - DNA, 15 bp, Homo sapiens
tggaggtgcccgtca

SEQ ID NO: 378924 - DNA, 15 bp, Homo sapiens
atggaggtgcccgtc

SEQ ID NO: 378925 - DNA, 15 bp, Homo sapiens
gatggaggtgcccgt

SEQ ID NO: 378926 - DNA, 15 bp, Homo sapiens
ggatggaggtgcccg

SEQ ID NO: 378927 - DNA, 15 bp, Homo sapiens
tggatggaggtgccc

SEQ ID NO: 378928 - DNA, 15 bp, Homo sapiens
ttggatggaggtgcc

SEQ ID NO: 378929 - DNA, 15 bp, Homo sapiens
gttggatggaggtgc

SEQ ID NO: 378930 - DNA, 15 bp, Homo sapiens
tgttggatggaggtg

SEQ ID NO: 378931 - DNA, 15 bp, Homo sapiens
gtgttggatggaggt

SEQ ID NO: 378932 - DNA, 15 bp, Homo sapiens
agtgttggatggagg

SEQ ID NO: 378933 - DNA, 15 bp, Homo sapiens
cagtgttggatggag

SEQ ID NO: 378934 - DNA, 15 bp, Homo sapiens
ccagtgttggatgga

SEQ ID NO: 378935 - DNA, 15 bp, Homo sapiens
gccagtgttggatgg

SEQ ID NO: 378936 - DNA, 15 bp, Homo sapiens
agccagtgttggatg

SEQ ID NO: 378937 - DNA, 15 bp, Homo sapiens
cagccagtgttggat

SEQ ID NO: 378938 - DNA, 15 bp, Homo sapiens
gcagccagtgttgga

SEQ ID NO: 378939 - DNA, 15 bp, Homo sapiens
agcagccagtgttgg

SEQ ID NO: 378940 - DNA, 15 bp, Homo sapiens
tagcagccagtgttg

SEQ ID NO: 378941 - DNA, 15 bp, Homo sapiens
gtagcagccagtgtt

SEQ ID NO: 378942 - DNA, 15 bp, Homo sapiens
agtagcagccagtgt

SEQ ID NO: 378943 - DNA, 15 bp, Homo sapiens
aagtagcagccagtg

SEQ ID NO: 378944 - DNA, 15 bp, Homo sapiens
taagtagcagccagt

SEQ ID NO: 378945 - DNA, 15 bp, Homo sapiens
ttaagtagcagccag

SEQ ID NO: 378946 - DNA, 15 bp, Homo sapiens
tttaagtagcagcca

SEQ ID NO: 378947 - DNA, 15 bp, Homo sapiens
ttttaagtagcagcc

SEQ ID NO: 378948 - DNA, 15 bp, Homo sapiens
gttttaagtagcagc

SEQ ID NO: 378949 - DNA, 15 bp, Homo sapiens
tgttttaagtagcag

SEQ ID NO: 378950 - DNA, 15 bp, Homo sapiens
ttgttttaagtagca

SEQ ID NO: 378951 - DNA, 15 bp, Homo sapiens
gttgttttaagtagc

SEQ ID NO: 378952 - DNA, 15 bp, Homo sapiens
tgttgttttaagtag

SEQ ID NO: 378953 - DNA, 15 bp, Homo sapiens
ttgttgttttaagta

SEQ ID NO: 378954 - DNA, 15 bp, Homo sapiens
gttgttgttttaagt

SEQ ID NO: 378955 - DNA, 15 bp, Homo sapiens
tgttgttgttttaag

SEQ ID NO: 378956 - DNA, 15 bp, Homo sapiens
ttgttgttgttttaa

SEQ ID NO: 378957 - DNA, 15 bp, Homo sapiens
gttgttgttgtttta

SEQ ID NO: 378958 - DNA, 15 bp, Homo sapiens
tgttgttgttgtttt

SEQ ID NO: 378959 - DNA, 15 bp, Homo sapiens
ttgttgttgttgttt

SEQ ID NO: 378960 - DNA, 15 bp, Homo sapiens
gttgttgttgttgtt

SEQ ID NO: 378961 - DNA, 15 bp, Homo sapiens
tgttgttgttgttgt

SEQ ID NO: 378962 - DNA, 15 bp, Homo sapiens
ttgttgttgttgttg

SEQ ID NO: 378963 - DNA, 15 bp, Homo sapiens
agttgttgttgttgt

SEQ ID NO: 378964 - DNA, 15 bp, Homo sapiens
cagttgttgttgttg

SEQ ID NO: 378965 - DNA, 15 bp, Homo sapiens
tcagttgttgttgtt

SEQ ID NO: 378966 - DNA, 15 bp, Homo sapiens
ctcagttgttgttgt

SEQ ID NO: 378967 - DNA, 15 bp, Homo sapiens
actcagttgttgttg

SEQ ID NO: 378968 - DNA, 15 bp, Homo sapiens
cactcagttgttgtt

SEQ ID NO: 378969 - DNA, 15 bp, Homo sapiens
ccactcagttgttgt

SEQ ID NO: 378970 - DNA, 15 bp, Homo sapiens
tccactcagttgttg

SEQ ID NO: 378971 - DNA, 15 bp, Homo sapiens
ctccactcagttgtt

SEQ ID NO: 378972 - DNA, 15 bp, Homo sapiens
gctccactcagttgt

SEQ ID NO: 378973 - DNA, 15 bp, Homo sapiens
ggctccactcagttg

SEQ ID NO: 378974 - DNA, 15 bp, Homo sapiens
tggctccactcagtt

SEQ ID NO: 378975 - DNA, 15 bp, Homo sapiens
ctggctccactcagt

SEQ ID NO: 378976 - DNA, 15 bp, Homo sapiens
actggctccactcag

SEQ ID NO: 378977 - DNA, 15 bp, Homo sapiens
cactggctccactca

SEQ ID NO: 378978 - DNA, 15 bp, Homo sapiens
ccactggctccactc

SEQ ID NO: 378979 - DNA, 15 bp, Homo sapiens
cccactggctccact

SEQ ID NO: 378980 - DNA, 15 bp, Homo sapiens
acccactggctccac

SEQ ID NO: 378981 - DNA, 15 bp, Homo sapiens
aacccactggctcca

SEQ ID NO: 378982 - DNA, 15 bp, Homo sapiens
gaacccactggctcc

SEQ ID NO: 378983 - DNA, 15 bp, Homo sapiens
ggaacccactggctc

SEQ ID NO: 378984 - DNA, 15 bp, Homo sapiens
gggaacccactggct

SEQ ID NO: 378985 - DNA, 15 bp, Homo sapiens
tgggaacccactggc

SEQ ID NO: 378986 - DNA, 15 bp, Homo sapiens
ctgggaacccactgg

SEQ ID NO: 378987 - DNA, 15 bp, Homo sapiens
cctgggaacccactg

SEQ ID NO: 378988 - DNA, 15 bp, Homo sapiens
acctgggaacccact

SEQ ID NO: 378989 - DNA, 15 bp, Homo sapiens
gacctgggaacccac

SEQ ID NO: 378990 - DNA, 15 bp, Homo sapiens
ggacctgggaaccca

SEQ ID NO: 378991 - DNA, 15 bp, Homo sapiens
aggacctgggaaccc

SEQ ID NO: 378992 - DNA, 15 bp, Homo sapiens
taggacctgggaacc

SEQ ID NO: 378993 - DNA, 15 bp, Homo sapiens
ttaggacctgggaac

SEQ ID NO: 378994 - DNA, 15 bp, Homo sapiens
gttaggacctgggaa

SEQ ID NO: 378995 - DNA, 15 bp, Homo sapiens
tgttaggacctggga

SEQ ID NO: 378996 - DNA, 15 bp, Homo sapiens
gtgttaggacctggg

SEQ ID NO: 378997 - DNA, 15 bp, Homo sapiens
cgtgttaggacctgg

SEQ ID NO: 378998 - DNA, 15 bp, Homo sapiens
gcgtgttaggacctg

SEQ ID NO: 378999 - DNA, 15 bp, Homo sapiens
ggcgtgttaggacct

SEQ ID NO: 379000 - DNA, 15 bp, Homo sapiens
aggcgtgttaggacc

SEQ ID NO: 379001 - DNA, 15 bp, Homo sapiens
caggcgtgttaggac

SEQ ID NO: 379002 - DNA, 15 bp, Homo sapiens
acaggcgtgttagga

SEQ ID NO: 379003 - DNA, 15 bp, Homo sapiens
tacaggcgtgttagg

SEQ ID NO: 379004 - DNA, 15 bp, Homo sapiens
ttacaggcgtgttag

SEQ ID NO: 379005 - DNA, 15 bp, Homo sapiens
tttacaggcgtgtta

SEQ ID NO: 379006 - DNA, 15 bp, Homo sapiens
ttttacaggcgtgtt

SEQ ID NO: 379007 - DNA, 15 bp, Homo sapiens
cttttacaggcgtgt

SEQ ID NO: 379008 - DNA, 15 bp, Homo sapiens
acttttacaggcgtg

SEQ ID NO: 379009 - DNA, 15 bp, Homo sapiens
aacttttacaggcgt

SEQ ID NO: 379010 - DNA, 15 bp, Homo sapiens
caacttttacaggcg

SEQ ID NO: 379011 - DNA, 15 bp, Homo sapiens
ccaacttttacaggc

SEQ ID NO: 379012 - DNA, 15 bp, Homo sapiens
tccaacttttacagg

SEQ ID NO: 379013 - DNA, 15 bp, Homo sapiens
ctccaacttttacag

SEQ ID NO: 379014 - DNA, 15 bp, Homo sapiens
gctccaacttttaca

SEQ ID NO: 379015 - DNA, 15 bp, Homo sapiens
ggctccaacttttac

SEQ ID NO: 379016 - DNA, 15 bp, Homo sapiens
tggctccaactttta

SEQ ID NO: 379017 - DNA, 15 bp, Homo sapiens
ctggctccaactttt

SEQ ID NO: 379018 - DNA, 15 bp, Homo sapiens
actggctccaacttt

SEQ ID NO: 379019 - DNA, 15 bp, Homo sapiens
aactggctccaactt

SEQ ID NO: 379020 - DNA, 15 bp, Homo sapiens
taactggctccaact

SEQ ID NO: 379021 - DNA, 15 bp, Homo sapiens
ctaactggctccaac

SEQ ID NO: 379022 - DNA, 15 bp, Homo sapiens
actaactggctccaa

SEQ ID NO: 379023 - DNA, 15 bp, Homo sapiens
cactaactggctcca

SEQ ID NO: 379024 - DNA, 15 bp, Homo sapiens
acactaactggctcc

SEQ ID NO: 379025 - DNA, 15 bp, Homo sapiens
gacactaactggctc

SEQ ID NO: 379026 - DNA, 15 bp, Homo sapiens
ggacactaactggct

SEQ ID NO: 379027 - DNA, 15 bp, Homo sapiens
aggacactaactggc

SEQ ID NO: 379028 - DNA, 15 bp, Homo sapiens
caggacactaactgg

SEQ ID NO: 379029 - DNA, 15 bp, Homo sapiens
ccaggacactaactg

SEQ ID NO: 379030 - DNA, 15 bp, Homo sapiens
cccaggacactaact

SEQ ID NO: 379031 - DNA, 15 bp, Homo sapiens
gcccaggacactaac

SEQ ID NO: 379032 - DNA, 15 bp, Homo sapiens
agcccaggacactaa

SEQ ID NO: 379033 - DNA, 15 bp, Homo sapiens
cagcccaggacacta

SEQ ID NO: 379034 - DNA, 15 bp, Homo sapiens
gcagcccaggacact

SEQ ID NO: 379035 - DNA, 15 bp, Homo sapiens
ggcagcccaggacac

SEQ ID NO: 379036 - DNA, 15 bp, Homo sapiens
gggcagcccaggaca

SEQ ID NO: 379037 - DNA, 15 bp, Homo sapiens
ggggcagcccaggac

SEQ ID NO: 379038 - DNA, 15 bp, Homo sapiens
tggggcagcccagga

SEQ ID NO: 379039 - DNA, 15 bp, Homo sapiens
ctggggcagcccagg

SEQ ID NO: 379040 - DNA, 15 bp, Homo sapiens
actggggcagcccag

SEQ ID NO: 379041 - DNA, 15 bp, Homo sapiens
aactggggcagccca

SEQ ID NO: 379042 - DNA, 15 bp, Homo sapiens
taactggggcagccc

SEQ ID NO: 379043 - DNA, 15 bp, Homo sapiens
gtaactggggcagcc

SEQ ID NO: 379044 - DNA, 15 bp, Homo sapiens
ggtaactggggcagc

SEQ ID NO: 379045 - DNA, 15 bp, Homo sapiens
gggtaactggggcag

SEQ ID NO: 379046 - DNA, 15 bp, Homo sapiens
tgggtaactggggca

SEQ ID NO: 379047 - DNA, 15 bp, Homo sapiens
ctgggtaactggggc

SEQ ID NO: 379048 - DNA, 15 bp, Homo sapiens
gctgggtaactgggg

SEQ ID NO: 379049 - DNA, 15 bp, Homo sapiens
ggctgggtaactggg

SEQ ID NO: 379050 - DNA, 15 bp, Homo sapiens
aggctgggtaactgg

SEQ ID NO: 379051 - DNA, 15 bp, Homo sapiens
caggctgggtaactg

SEQ ID NO: 379052 - DNA, 15 bp, Homo sapiens
gcaggctgggtaact

SEQ ID NO: 379053 - DNA, 15 bp, Homo sapiens
agcaggctgggtaac

SEQ ID NO: 379054 - DNA, 15 bp, Homo sapiens
cagcaggctgggtaa

SEQ ID NO: 379055 - DNA, 15 bp, Homo sapiens
ccagcaggctgggta

SEQ ID NO: 379056 - DNA, 15 bp, Homo sapiens
cccagcaggctgggt

SEQ ID NO: 379057 - DNA, 15 bp, Homo sapiens
ccccagcaggctggg

SEQ ID NO: 379058 - DNA, 15 bp, Homo sapiens
gccccagcaggctgg

SEQ ID NO: 379059 - DNA, 15 bp, Homo sapiens
tgccccagcaggctg

SEQ ID NO: 379060 - DNA, 15 bp, Homo sapiens
ctgccccagcaggct

SEQ ID NO: 379061 - DNA, 15 bp, Homo sapiens
gctgccccagcaggc

SEQ ID NO: 379062 - DNA, 15 bp, Homo sapiens
tgctgccccagcagg

SEQ ID NO: 379063 - DNA, 15 bp, Homo sapiens
ctgctgccccagcag

SEQ ID NO: 379064 - DNA, 15 bp, Homo sapiens
cctgctgccccagca

SEQ ID NO: 379065 - DNA, 15 bp, Homo sapiens
tcctgctgccccagc

SEQ ID NO: 379066 - DNA, 15 bp, Homo sapiens
atcctgctgccccag

SEQ ID NO: 379067 - DNA, 15 bp, Homo sapiens
catcctgctgcccca

SEQ ID NO: 379068 - DNA, 15 bp, Homo sapiens
gcatcctgctgcccc

SEQ ID NO: 379069 - DNA, 15 bp, Homo sapiens
cgcatcctgctgccc

SEQ ID NO: 379070 - DNA, 15 bp, Homo sapiens
ccgcatcctgctgcc

SEQ ID NO: 379071 - DNA, 15 bp, Homo sapiens
gccgcatcctgctgc

SEQ ID NO: 379072 - DNA, 15 bp, Homo sapiens
ggccgcatcctgctg

SEQ ID NO: 379073 - DNA, 15 bp, Homo sapiens
gggccgcatcctgct

SEQ ID NO: 379074 - DNA, 15 bp, Homo sapiens
ggggccgcatcctgc

SEQ ID NO: 379075 - DNA, 15 bp, Homo sapiens
tggggccgcatcctg

SEQ ID NO: 379076 - DNA, 15 bp, Homo sapiens
atggggccgcatcct

SEQ ID NO: 379077 - DNA, 15 bp, Homo sapiens
gatggggccgcatcc

SEQ ID NO: 379078 - DNA, 15 bp, Homo sapiens
agatggggccgcatc

SEQ ID NO: 379079 - DNA, 15 bp, Homo sapiens
aagatggggccgcat

SEQ ID NO: 379080 - DNA, 15 bp, Homo sapiens
gaagatggggccgca

SEQ ID NO: 379081 - DNA, 15 bp, Homo sapiens
ggaagatggggccgc

SEQ ID NO: 379082 - DNA, 15 bp, Homo sapiens
cggaagatggggccg

SEQ ID NO: 379083 - DNA, 15 bp, Homo sapiens
gcggaagatggggcc

SEQ ID NO: 379084 - DNA, 15 bp, Homo sapiens
ggcggaagatggggc

SEQ ID NO: 379085 - DNA, 15 bp, Homo sapiens
tggcggaagatgggg

SEQ ID NO: 379086 - DNA, 15 bp, Homo sapiens
atggcggaagatggg

SEQ ID NO: 379087 - DNA, 15 bp, Homo sapiens
catggcggaagatgg

SEQ ID NO: 379088 - DNA, 15 bp, Homo sapiens
ccatggcggaagatg

SEQ ID NO: 379089 - DNA, 15 bp, Homo sapiens
tccatggcggaagat

SEQ ID NO: 379090 - DNA, 15 bp, Homo sapiens
gtccatggcggaaga

SEQ ID NO: 379091 - DNA, 15 bp, Homo sapiens
ggtccatggcggaag

SEQ ID NO: 379092 - DNA, 15 bp, Homo sapiens
gggtccatggcggaa

SEQ ID NO: 379093 - DNA, 15 bp, Homo sapiens
ggggtccatggcgga

SEQ ID NO: 379094 - DNA, 15 bp, Homo sapiens
gggggtccatggcgg

SEQ ID NO: 379095 - DNA, 15 bp, Homo sapiens
agggggtccatggcg

SEQ ID NO: 379096 - DNA, 15 bp, Homo sapiens
cagggggtccatggc

SEQ ID NO: 379097 - DNA, 15 bp, Homo sapiens
gcagggggtccatgg

SEQ ID NO: 379098 - DNA, 15 bp, Homo sapiens
tgcagggggtccatg

SEQ ID NO: 379099 - DNA, 15 bp, Homo sapiens
ctgcagggggtccat

SEQ ID NO: 379100 - DNA, 15 bp, Homo sapiens
cctgcagggggtcca

SEQ ID NO: 379101 - DNA, 15 bp, Homo sapiens
ccctgcagggggtcc

SEQ ID NO: 379102 - DNA, 15 bp, Homo sapiens
accctgcagggggtc

SEQ ID NO: 379103 - DNA, 15 bp, Homo sapiens
caccctgcagggggt

SEQ ID NO: 379104 - DNA, 15 bp, Homo sapiens
gcaccctgcaggggg

SEQ ID NO: 379105 - DNA, 15 bp, Homo sapiens
tgcaccctgcagggg

SEQ ID NO: 379106 - DNA, 15 bp, Homo sapiens
ttgcaccctgcaggg

SEQ ID NO: 379107 - DNA, 15 bp, Homo sapiens
gttgcaccctgcagg

SEQ ID NO: 379108 - DNA, 15 bp, Homo sapiens
gacccagaaagcctg

SEQ ID NO: 379109 - DNA, 15 bp, Homo sapiens
ggacccagaaagcct

SEQ ID NO: 379110 - DNA, 15 bp, Homo sapiens
aggacccagaaagcc

SEQ ID NO: 379111 - DNA, 15 bp, Homo sapiens
caggacccagaaagc

SEQ ID NO: 379112 - DNA, 15 bp, Homo sapiens
ccaggacccagaaag

SEQ ID NO: 379113 - DNA, 15 bp, Homo sapiens
accaggacccagaaa

SEQ ID NO: 379114 - DNA, 15 bp, Homo sapiens
aaccaggacccagaa

SEQ ID NO: 379115 - DNA, 15 bp, Homo sapiens
aaaccaggacccaga

SEQ ID NO: 379116 - DNA, 15 bp, Homo sapiens
aaaaccaggacccag

SEQ ID NO: 379117 - DNA, 15 bp, Homo sapiens
gaaaaccaggaccca

SEQ ID NO: 379118 - DNA, 15 bp, Homo sapiens
agaaaaccaggaccc

SEQ ID NO: 379119 - DNA, 15 bp, Homo sapiens
gagaaaaccaggacc

SEQ ID NO: 379120 - DNA, 15 bp, Homo sapiens
tgagaaaaccaggac

SEQ ID NO: 379121 - DNA, 15 bp, Homo sapiens
atgagaaaaccagga

SEQ ID NO: 379122 - DNA, 15 bp, Homo sapiens
gatgagaaaaccagg

SEQ ID NO: 379123 - DNA, 15 bp, Homo sapiens
tgatgagaaaaccag

SEQ ID NO: 379124 - DNA, 15 bp, Homo sapiens
ctgatgagaaaacca

SEQ ID NO: 379125 - DNA, 15 bp, Homo sapiens
cctgatgagaaaacc

SEQ ID NO: 379126 - DNA, 15 bp, Homo sapiens
tcctgatgagaaaac

SEQ ID NO: 379127 - DNA, 15 bp, Homo sapiens
atcctgatgagaaaa

SEQ ID NO: 379128 - DNA, 15 bp, Homo sapiens
catcctgatgagaaa

SEQ ID NO: 379129 - DNA, 15 bp, Homo sapiens
tcatcctgatgagaa

SEQ ID NO: 379130 - DNA, 15 bp, Homo sapiens
gtcatcctgatgaga

SEQ ID NO: 379131 - DNA, 15 bp, Homo sapiens
tgtcatcctgatgag

SEQ ID NO: 379132 - DNA, 15 bp, Homo sapiens
ttgtcatcctgatga

SEQ ID NO: 379133 - DNA, 15 bp, Homo sapiens
cttgtcatcctgatg

SEQ ID NO: 379134 - DNA, 15 bp, Homo sapiens
ccttgtcatcctgat

SEQ ID NO: 379135 - DNA, 15 bp, Homo sapiens
cccttgtcatcctga

SEQ ID NO: 379136 - DNA, 15 bp, Homo sapiens
ccccttgtcatcctg

SEQ ID NO: 379137 - DNA, 15 bp, Homo sapiens
gccccttgtcatcct

SEQ ID NO: 379138 - DNA, 15 bp, Homo sapiens
agccccttgtcatcc

SEQ ID NO: 379139 - DNA, 15 bp, Homo sapiens
cagccccttgtcatc

SEQ ID NO: 379140 - DNA, 15 bp, Homo sapiens
ccagccccttgtcat

SEQ ID NO: 379141 - DNA, 15 bp, Homo sapiens
tccagccccttgtca

SEQ ID NO: 379142 - DNA, 15 bp, Homo sapiens
ctccagccccttgtc

SEQ ID NO: 379143 - DNA, 15 bp, Homo sapiens
cctccagccccttgt

SEQ ID NO: 379144 - DNA, 15 bp, Homo sapiens
tcctccagccccttg

SEQ ID NO: 379145 - DNA, 15 bp, Homo sapiens
ctcctccagcccctt

SEQ ID NO: 379146 - DNA, 15 bp, Homo sapiens
gctcctccagcccct

SEQ ID NO: 379147 - DNA, 15 bp, Homo sapiens
agctcctccagcccc

SEQ ID NO: 379148 - DNA, 15 bp, Homo sapiens
cagctcctccagccc

SEQ ID NO: 379149 - DNA, 15 bp, Homo sapiens
ccagctcctccagcc

SEQ ID NO: 379150 - DNA, 15 bp, Homo sapiens
gccagctcctccagc

SEQ ID NO: 379151 - DNA, 15 bp, Homo sapiens
ggccagctcctccag

SEQ ID NO: 379152 - DNA, 15 bp, Homo sapiens
aggccagctcctcca

SEQ ID NO: 379153 - DNA, 15 bp, Homo sapiens
aaggccagctcctcc

SEQ ID NO: 379154 - DNA, 15 bp, Homo sapiens
gaaggccagctcctc

SEQ ID NO: 379155 - DNA, 15 bp, Homo sapiens
tgaaggccagctcct

SEQ ID NO: 379156 - DNA, 15 bp, Homo sapiens
ttgaaggccagctcc

SEQ ID NO: 379157 - DNA, 15 bp, Homo sapiens
cttgaaggccagctc

SEQ ID NO: 379158 - DNA, 15 bp, Homo sapiens
ccttgaaggccagct

SEQ ID NO: 379159 - DNA, 15 bp, Homo sapiens
accttgaaggccagc

SEQ ID NO: 379160 - DNA, 15 bp, Homo sapiens
aaccttgaaggccag

SEQ ID NO: 379161 - DNA, 15 bp, Homo sapiens
gaaccttgaaggcca

SEQ ID NO: 379162 - DNA, 15 bp, Homo sapiens
ggaaccttgaaggcc

SEQ ID NO: 379163 - DNA, 15 bp, Homo sapiens
tggaaccttgaaggc

SEQ ID NO: 379164 - DNA, 15 bp, Homo sapiens
atggaaccttgaagg

SEQ ID NO: 379165 - DNA, 15 bp, Homo sapiens
gatggaaccttgaag

SEQ ID NO: 379166 - DNA, 15 bp, Homo sapiens
ggatggaaccttgaa

SEQ ID NO: 379167 - DNA, 15 bp, Homo sapiens
tggatggaaccttga

SEQ ID NO: 379168 - DNA, 15 bp, Homo sapiens
ctggatggaaccttg

SEQ ID NO: 379169 - DNA, 15 bp, Homo sapiens
actggatggaacctt

SEQ ID NO: 379170 - DNA, 15 bp, Homo sapiens
aactggatggaacct

SEQ ID NO: 379171 - DNA, 15 bp, Homo sapiens
caactggatggaacc

SEQ ID NO: 379172 - DNA, 15 bp, Homo sapiens
tcaactggatggaac

SEQ ID NO: 379173 - DNA, 15 bp, Homo sapiens
ttcaactggatggaa

SEQ ID NO: 379174 - DNA, 15 bp, Homo sapiens
tttcaactggatgga

SEQ ID NO: 379175 - DNA, 15 bp, Homo sapiens
ctttcaactggatgg

SEQ ID NO: 379176 - DNA, 15 bp, Homo sapiens
tctttcaactggatg

SEQ ID NO: 379177 - DNA, 15 bp, Homo sapiens
atctttcaactggat

SEQ ID NO: 379178 - DNA, 15 bp, Homo sapiens
gatctttcaactgga

SEQ ID NO: 379179 - DNA, 15 bp, Homo sapiens
agatctttcaactgg

SEQ ID NO: 379180 - DNA, 15 bp, Homo sapiens
cagatctttcaactg

SEQ ID NO: 379181 - DNA, 15 bp, Homo sapiens
acagatctttcaact

SEQ ID NO: 379182 - DNA, 15 bp, Homo sapiens
tacagatctttcaac

SEQ ID NO: 379183 - DNA, 15 bp, Homo sapiens
ttacagatctttcaa

SEQ ID NO: 379184 - DNA, 15 bp, Homo sapiens
gttacagatctttca

SEQ ID NO: 379185 - DNA, 15 bp, Homo sapiens
agttacagatctttc

SEQ ID NO: 379186 - DNA, 15 bp, Homo sapiens
gagttacagatcttt

SEQ ID NO: 379187 - DNA, 15 bp, Homo sapiens
ggagttacagatctt

SEQ ID NO: 379188 - DNA, 15 bp, Homo sapiens
tggagttacagatct

SEQ ID NO: 379189 - DNA, 15 bp, Homo sapiens
ctggagttacagatc

SEQ ID NO: 379190 - DNA, 15 bp, Homo sapiens
cctggagttacagat

SEQ ID NO: 379191 - DNA, 15 bp, Homo sapiens
tcctggagttacaga

SEQ ID NO: 379192 - DNA, 15 bp, Homo sapiens
gtcctggagttacag

SEQ ID NO: 379193 - DNA, 15 bp, Homo sapiens
cgtcctggagttaca

SEQ ID NO: 379194 - DNA, 15 bp, Homo sapiens
acgtcctggagttac

SEQ ID NO: 379195 - DNA, 15 bp, Homo sapiens
aacgtcctggagtta

SEQ ID NO: 379196 - DNA, 15 bp, Homo sapiens
caacgtcctggagtt

SEQ ID NO: 379197 - DNA, 15 bp, Homo sapiens
gcaacgtcctggagt

SEQ ID NO: 379198 - DNA, 15 bp, Homo sapiens
agcaacgtcctggag

SEQ ID NO: 379199 - DNA, 15 bp, Homo sapiens
cagcaacgtcctgga

SEQ ID NO: 379200 - DNA, 15 bp, Homo sapiens
tcagcaacgtcctgg

SEQ ID NO: 379201 - DNA, 15 bp, Homo sapiens
ctcagcaacgtcctg

SEQ ID NO: 379202 - DNA, 15 bp, Homo sapiens
cctcagcaacgtcct

SEQ ID NO: 379203 - DNA, 15 bp, Homo sapiens
gcctcagcaacgtcc

SEQ ID NO: 379204 - DNA, 15 bp, Homo sapiens
agcctcagcaacgtc

SEQ ID NO: 379205 - DNA, 15 bp, Homo sapiens
aagcctcagcaacgt

SEQ ID NO: 379206 - DNA, 15 bp, Homo sapiens
aaagcctcagcaacg

SEQ ID NO: 379207 - DNA, 15 bp, Homo sapiens
aaaagcctcagcaac

SEQ ID NO: 379208 - DNA, 15 bp, Homo sapiens
aaaaagcctcagcaa

SEQ ID NO: 379209 - DNA, 15 bp, Homo sapiens
caaaaagcctcagca

SEQ ID NO: 379210 - DNA, 15 bp, Homo sapiens
tcaaaaagcctcagc

SEQ ID NO: 379211 - DNA, 15 bp, Homo sapiens
ctcaaaaagcctcag

SEQ ID NO: 379212 - DNA, 15 bp, Homo sapiens
cctcaaaaagcctca

SEQ ID NO: 379213 - DNA, 15 bp, Homo sapiens
gcctcaaaaagcctc

SEQ ID NO: 379214 - DNA, 15 bp, Homo sapiens
ggcctcaaaaagcct

SEQ ID NO: 379215 - DNA, 15 bp, Homo sapiens
gggcctcaaaaagcc

SEQ ID NO: 379216 - DNA, 15 bp, Homo sapiens
agggcctcaaaaagc

SEQ ID NO: 379217 - DNA, 15 bp, Homo sapiens
tagggcctcaaaaag

SEQ ID NO: 379218 - DNA, 15 bp, Homo sapiens
ttagggcctcaaaaa

SEQ ID NO: 379219 - DNA, 15 bp, Homo sapiens
tttagggcctcaaaa

SEQ ID NO: 379220 - DNA, 15 bp, Homo sapiens
ttttagggcctcaaa

SEQ ID NO: 379221 - DNA, 15 bp, Homo sapiens
cttttagggcctcaa

SEQ ID NO: 379222 - DNA, 15 bp, Homo sapiens
gcttttagggcctca

SEQ ID NO: 379223 - DNA, 15 bp, Homo sapiens
tgcttttagggcctc

SEQ ID NO: 379224 - DNA, 15 bp, Homo sapiens
ctgcttttagggcct

SEQ ID NO: 379225 - DNA, 15 bp, Homo sapiens
tctgcttttagggcc

SEQ ID NO: 379226 - DNA, 15 bp, Homo sapiens
gtctgcttttagggc

SEQ ID NO: 379227 - DNA, 15 bp, Homo sapiens
agtctgcttttaggg

SEQ ID NO: 379228 - DNA, 15 bp, Homo sapiens
tagtctgcttttagg

SEQ ID NO: 379229 - DNA, 15 bp, Homo sapiens
gtagtctgcttttag

SEQ ID NO: 379230 - DNA, 15 bp, Homo sapiens
ggtagtctgctttta

SEQ ID NO: 379231 - DNA, 15 bp, Homo sapiens
gggtagtctgctttt

SEQ ID NO: 379232 - DNA, 15 bp, Homo sapiens
tgggtagtctgcttt

SEQ ID NO: 379233 - DNA, 15 bp, Homo sapiens
ttgggtagtctgctt

SEQ ID NO: 379234 - DNA, 15 bp, Homo sapiens
cttgggtagtctgct

SEQ ID NO: 379235 - DNA, 15 bp, Homo sapiens
gcttgggtagtctgc

SEQ ID NO: 379236 - DNA, 15 bp, Homo sapiens
agcttgggtagtctg

SEQ ID NO: 379237 - DNA, 15 bp, Homo sapiens
tagcttgggtagtct

SEQ ID NO: 379238 - DNA, 15 bp, Homo sapiens
atagcttgggtagtc

SEQ ID NO: 379239 - DNA, 15 bp, Homo sapiens
aatagcttgggtagt

SEQ ID NO: 379240 - DNA, 15 bp, Homo sapiens
taatagcttgggtag

SEQ ID NO: 379241 - DNA, 15 bp, Homo sapiens
ttaatagcttgggta

SEQ ID NO: 379242 - DNA, 15 bp, Homo sapiens
cttaatagcttgggt

SEQ ID NO: 379243 - DNA, 15 bp, Homo sapiens
ccttaatagcttggg

SEQ ID NO: 379244 - DNA, 15 bp, Homo sapiens
cccttaatagcttgg

SEQ ID NO: 379245 - DNA, 15 bp, Homo sapiens
acccttaatagcttg

SEQ ID NO: 379246 - DNA, 15 bp, Homo sapiens
gacccttaatagctt

SEQ ID NO: 379247 - DNA, 15 bp, Homo sapiens
ggacccttaatagct

SEQ ID NO: 379248 - DNA, 15 bp, Homo sapiens
gggacccttaatagc

SEQ ID NO: 379249 - DNA, 15 bp, Homo sapiens
agggacccttaatag

SEQ ID NO: 379250 - DNA, 15 bp, Homo sapiens
aagggacccttaata

SEQ ID NO: 379251 - DNA, 15 bp, Homo sapiens
aaagggacccttaat

SEQ ID NO: 379252 - DNA, 15 bp, Homo sapiens
caaagggacccttaa

SEQ ID NO: 379253 - DNA, 15 bp, Homo sapiens
gcaaagggaccctta

SEQ ID NO: 379254 - DNA, 15 bp, Homo sapiens
tgcaaagggaccctt

SEQ ID NO: 379255 - DNA, 15 bp, Homo sapiens
atgcaaagggaccct

SEQ ID NO: 379256 - DNA, 15 bp, Homo sapiens
gatgcaaagggaccc

SEQ ID NO: 379257 - DNA, 15 bp, Homo sapiens
agatgcaaagggacc

SEQ ID NO: 379258 - DNA, 15 bp, Homo sapiens
cagatgcaaagggac

SEQ ID NO: 379259 - DNA, 15 bp, Homo sapiens
acagatgcaaaggga

SEQ ID NO: 379260 - DNA, 15 bp, Homo sapiens
cacagatgcaaaggg

SEQ ID NO: 379261 - DNA, 15 bp, Homo sapiens
gcacagatgcaaagg

SEQ ID NO: 379262 - DNA, 15 bp, Homo sapiens
agcacagatgcaaag

SEQ ID NO: 379263 - DNA, 15 bp, Homo sapiens
gagcacagatgcaaa

SEQ ID NO: 379264 - DNA, 15 bp, Homo sapiens
agagcacagatgcaa

SEQ ID NO: 379265 - DNA, 15 bp, Homo sapiens
cagagcacagatgca

SEQ ID NO: 379266 - DNA, 15 bp, Homo sapiens
gcagagcacagatgc

SEQ ID NO: 379267 - DNA, 15 bp, Homo sapiens
tgcagagcacagatg

SEQ ID NO: 379268 - DNA, 15 bp, Homo sapiens
ctgcagagcacagat

SEQ ID NO: 379269 - DNA, 15 bp, Homo sapiens
tctgcagagcacaga

SEQ ID NO: 379270 - DNA, 15 bp, Homo sapiens
ctctgcagagcacag

SEQ ID NO: 379271 - DNA, 15 bp, Homo sapiens
tctctgcagagcaca

SEQ ID NO: 379272 - DNA, 15 bp, Homo sapiens
ttctctgcagagcac

SEQ ID NO: 379273 - DNA, 15 bp, Homo sapiens
cttctctgcagagca

SEQ ID NO: 379274 - DNA, 15 bp, Homo sapiens
tcttctctgcagagc

SEQ ID NO: 379275 - DNA, 15 bp, Homo sapiens
ctcttctctgcagag

SEQ ID NO: 379276 - DNA, 15 bp, Homo sapiens
cctcttctctgcaga

SEQ ID NO: 379277 - DNA, 15 bp, Homo sapiens
gcctcttctctgcag

SEQ ID NO: 379278 - DNA, 15 bp, Homo sapiens
agcctcttctctgca

SEQ ID NO: 379279 - DNA, 15 bp, Homo sapiens
aagcctcttctctgc

SEQ ID NO: 379280 - DNA, 15 bp, Homo sapiens
aaagcctcttctctg

SEQ ID NO: 379281 - DNA, 15 bp, Homo sapiens
caaagcctcttctct

SEQ ID NO: 379282 - DNA, 15 bp, Homo sapiens
acaaagcctcttctc

SEQ ID NO: 379283 - DNA, 15 bp, Homo sapiens
aacaaagcctcttct

SEQ ID NO: 379284 - DNA, 15 bp, Homo sapiens
caacaaagcctcttc

SEQ ID NO: 379285 - DNA, 15 bp, Homo sapiens
ccaacaaagcctctt

SEQ ID NO: 379286 - DNA, 15 bp, Homo sapiens
gccaacaaagcctct

SEQ ID NO: 379287 - DNA, 15 bp, Homo sapiens
ggccaacaaagcctc

SEQ ID NO: 379288 - DNA, 15 bp, Homo sapiens
tggccaacaaagcct

SEQ ID NO: 379289 - DNA, 15 bp, Homo sapiens
ctggccaacaaagcc

SEQ ID NO: 379290 - DNA, 15 bp, Homo sapiens
cctggccaacaaagc

SEQ ID NO: 379291 - DNA, 15 bp, Homo sapiens
acctggccaacaaag

SEQ ID NO: 379292 - DNA, 15 bp, Homo sapiens
cacctggccaacaaa

SEQ ID NO: 379293 - DNA, 15 bp, Homo sapiens
ccacctggccaacaa

SEQ ID NO: 379294 - DNA, 15 bp, Homo sapiens
cccacctggccaaca

SEQ ID NO: 379295 - DNA, 15 bp, Homo sapiens
gcccacctggccaac

SEQ ID NO: 379296 - DNA, 15 bp, Homo sapiens
tgcccacctggccaa

SEQ ID NO: 379297 - DNA, 15 bp, Homo sapiens
gtgcccacctggcca

SEQ ID NO: 379298 - DNA, 15 bp, Homo sapiens
tgtgcccacctggcc

SEQ ID NO: 379299 - DNA, 15 bp, Homo sapiens
ctgtgcccacctggc

SEQ ID NO: 379300 - DNA, 15 bp, Homo sapiens
tctgtgcccacctgg

SEQ ID NO: 379301 - DNA, 15 bp, Homo sapiens
atctgtgcccacctg

SEQ ID NO: 379302 - DNA, 15 bp, Homo sapiens
catctgtgcccacct

SEQ ID NO: 379303 - DNA, 15 bp, Homo sapiens
gcatctgtgcccacc

SEQ ID NO: 379304 - DNA, 15 bp, Homo sapiens
agcatctgtgcccac

SEQ ID NO: 379305 - DNA, 15 bp, Homo sapiens
cagcatctgtgccca

SEQ ID NO: 379306 - DNA, 15 bp, Homo sapiens
ccagcatctgtgccc

SEQ ID NO: 379307 - DNA, 15 bp, Homo sapiens
accagcatctgtgcc

SEQ ID NO: 379308 - DNA, 15 bp, Homo sapiens
caccagcatctgtgc

SEQ ID NO: 379309 - DNA, 15 bp, Homo sapiens
acaccagcatctgtg

SEQ ID NO: 379310 - DNA, 15 bp, Homo sapiens
tacaccagcatctgt

SEQ ID NO: 379311 - DNA, 15 bp, Homo sapiens
gtacaccagcatctg

SEQ ID NO: 379312 - DNA, 15 bp, Homo sapiens
agtacaccagcatct

SEQ ID NO: 379313 - DNA, 15 bp, Homo sapiens
cagtacaccagcatc

SEQ ID NO: 379314 - DNA, 15 bp, Homo sapiens
ccagtacaccagcat

SEQ ID NO: 379315 - DNA, 15 bp, Homo sapiens
tccagtacaccagca

SEQ ID NO: 379316 - DNA, 15 bp, Homo sapiens
gtccagtacaccagc

SEQ ID NO: 379317 - DNA, 15 bp, Homo sapiens
agtccagtacaccag

SEQ ID NO: 379318 - DNA, 15 bp, Homo sapiens
gagtccagtacacca

SEQ ID NO: 379319 - DNA, 15 bp, Homo sapiens
ggagtccagtacacc

SEQ ID NO: 379320 - DNA, 15 bp, Homo sapiens
aggagtccagtacac

SEQ ID NO: 379321 - DNA, 15 bp, Homo sapiens
caggagtccagtaca

SEQ ID NO: 379322 - DNA, 15 bp, Homo sapiens
tcaggagtccagtac

SEQ ID NO: 379323 - DNA, 15 bp, Homo sapiens
atcaggagtccagta

SEQ ID NO: 379324 - DNA, 15 bp, Homo sapiens
catcaggagtccagt

SEQ ID NO: 379325 - DNA, 15 bp, Homo sapiens
ccatcaggagtccag

SEQ ID NO: 379326 - DNA, 15 bp, Homo sapiens
cccatcaggagtcca

SEQ ID NO: 379327 - DNA, 15 bp, Homo sapiens
gcccatcaggagtcc

SEQ ID NO: 379328 - DNA, 15 bp, Homo sapiens
tgcccatcaggagtc

SEQ ID NO: 379329 - DNA, 15 bp, Homo sapiens
ctgcccatcaggagt

SEQ ID NO: 379330 - DNA, 15 bp, Homo sapiens
cctgcccatcaggag

SEQ ID NO: 379331 - DNA, 15 bp, Homo sapiens
ccctgcccatcagga

SEQ ID NO: 379332 - DNA, 15 bp, Homo sapiens
cccctgcccatcagg

SEQ ID NO: 379333 - DNA, 15 bp, Homo sapiens
gcccctgcccatcag

SEQ ID NO: 379334 - DNA, 15 bp, Homo sapiens
ggcccctgcccatca

SEQ ID NO: 379335 - DNA, 15 bp, Homo sapiens
aggcccctgcccatc

SEQ ID NO: 379336 - DNA, 15 bp, Homo sapiens
caggcccctgcccat

SEQ ID NO: 379337 - DNA, 15 bp, Homo sapiens
ccaggcccctgccca

SEQ ID NO: 379338 - DNA, 15 bp, Homo sapiens
tccaggcccctgccc

SEQ ID NO: 379339 - DNA, 15 bp, Homo sapiens
ctccaggcccctgcc

SEQ ID NO: 379340 - DNA, 15 bp, Homo sapiens
tctccaggcccctgc

SEQ ID NO: 379341 - DNA, 15 bp, Homo sapiens
ctctccaggcccctg

SEQ ID NO: 379342 - DNA, 15 bp, Homo sapiens
tctctccaggcccct

SEQ ID NO: 379343 - DNA, 15 bp, Homo sapiens
ttctctccaggcccc

SEQ ID NO: 379344 - DNA, 15 bp, Homo sapiens
cttctctccaggccc

SEQ ID NO: 379345 - DNA, 15 bp, Homo sapiens
gcttctctccaggcc

SEQ ID NO: 379346 - DNA, 15 bp, Homo sapiens
tgcttctctccaggc

SEQ ID NO: 379347 - DNA, 15 bp, Homo sapiens
ctgcttctctccagg

SEQ ID NO: 379348 - DNA, 15 bp, Homo sapiens
gctgcttctctccag

SEQ ID NO: 379349 - DNA, 15 bp, Homo sapiens
tgctgcttctctcca

SEQ ID NO: 379350 - DNA, 15 bp, Homo sapiens
gtgctgcttctctcc

SEQ ID NO: 379351 - DNA, 15 bp, Homo sapiens
ggtgctgcttctctc

SEQ ID NO: 379352 - DNA, 15 bp, Homo sapiens
gggtgctgcttctct

SEQ ID NO: 379353 - DNA, 15 bp, Homo sapiens
tgggtgctgcttctc

SEQ ID NO: 379354 - DNA, 15 bp, Homo sapiens
ctgggtgctgcttct

SEQ ID NO: 379355 - DNA, 15 bp, Homo sapiens
gctgggtgctgcttc

SEQ ID NO: 379356 - DNA, 15 bp, Homo sapiens
cgctgggtgctgctt

SEQ ID NO: 379357 - DNA, 15 bp, Homo sapiens
gcgctgggtgctgct

SEQ ID NO: 379358 - DNA, 15 bp, Homo sapiens
agcgctgggtgctgc

SEQ ID NO: 379359 - DNA, 15 bp, Homo sapiens
aagcgctgggtgctg

SEQ ID NO: 379360 - DNA, 15 bp, Homo sapiens
gaagcgctgggtgct

SEQ ID NO: 379361 - DNA, 15 bp, Homo sapiens
ggaagcgctgggtgc

SEQ ID NO: 379362 - DNA, 15 bp, Homo sapiens
aggaagcgctgggtg

SEQ ID NO: 379363 - DNA, 15 bp, Homo sapiens
taggaagcgctgggt

SEQ ID NO: 379364 - DNA, 15 bp, Homo sapiens
ataggaagcgctggg

SEQ ID NO: 379365 - DNA, 15 bp, Homo sapiens
cataggaagcgctgg

SEQ ID NO: 379366 - DNA, 15 bp, Homo sapiens
gcataggaagcgctg

SEQ ID NO: 379367 - DNA, 15 bp, Homo sapiens
agcataggaagcgct

SEQ ID NO: 379368 - DNA, 15 bp, Homo sapiens
aagcataggaagcgc

SEQ ID NO: 379369 - DNA, 15 bp, Homo sapiens
taagcataggaagcg

SEQ ID NO: 379370 - DNA, 15 bp, Homo sapiens
ttaagcataggaagc

SEQ ID NO: 379371 - DNA, 15 bp, Homo sapiens
tttaagcataggaag

SEQ ID NO: 379372 - DNA, 15 bp, Homo sapiens
ctttaagcataggaa

SEQ ID NO: 379373 - DNA, 15 bp, Homo sapiens
tctttaagcatagga

SEQ ID NO: 379374 - DNA, 15 bp, Homo sapiens
ttctttaagcatagg

SEQ ID NO: 379375 - DNA, 15 bp, Homo sapiens
tttctttaagcatag

SEQ ID NO: 379376 - DNA, 15 bp, Homo sapiens
ctttctttaagcata

SEQ ID NO: 379377 - DNA, 15 bp, Homo sapiens
cctttctttaagcat

SEQ ID NO: 379378 - DNA, 15 bp, Homo sapiens
gcctttctttaagca

SEQ ID NO: 379379 - DNA, 15 bp, Homo sapiens
tgcctttctttaagc

SEQ ID NO: 379380 - DNA, 15 bp, Homo sapiens
ctgcctttctttaag

SEQ ID NO: 379381 - DNA, 15 bp, Homo sapiens
cctgcctttctttaa

SEQ ID NO: 379382 - DNA, 15 bp, Homo sapiens
ccctgcctttcttta

SEQ ID NO: 379383 - DNA, 15 bp, Homo sapiens
accctgcctttcttt

SEQ ID NO: 379384 - DNA, 15 bp, Homo sapiens
gaccctgcctttctt

SEQ ID NO: 379385 - DNA, 15 bp, Homo sapiens
ggaccctgcctttct

SEQ ID NO: 379386 - DNA, 15 bp, Homo sapiens
aggaccctgcctttc

SEQ ID NO: 379387 - DNA, 15 bp, Homo sapiens
caggaccctgccttt

SEQ ID NO: 379388 - DNA, 15 bp, Homo sapiens
ccaggaccctgcctt

SEQ ID NO: 379389 - DNA, 15 bp, Homo sapiens
accaggaccctgcct

SEQ ID NO: 379390 - DNA, 15 bp, Homo sapiens
gaccaggaccctgcc

SEQ ID NO: 379391 - DNA, 15 bp, Homo sapiens
tgaccaggaccctgc

SEQ ID NO: 379392 - DNA, 15 bp, Homo sapiens
ttgaccaggaccctg

SEQ ID NO: 379393 - DNA, 15 bp, Homo sapiens
tttgaccaggaccct

SEQ ID NO: 379394 - DNA, 15 bp, Homo sapiens
ctttgaccaggaccc

SEQ ID NO: 379395 - DNA, 15 bp, Homo sapiens
cctttgaccaggacc

SEQ ID NO: 379396 - DNA, 15 bp, Homo sapiens
ccctttgaccaggac

SEQ ID NO: 379397 - DNA, 15 bp, Homo sapiens
gccctttgaccagga

SEQ ID NO: 379398 - DNA, 15 bp, Homo sapiens
agccctttgaccagg

SEQ ID NO: 379399 - DNA, 15 bp, Homo sapiens
cagccctttgaccag

SEQ ID NO: 379400 - DNA, 15 bp, Homo sapiens
acagccctttgacca

SEQ ID NO: 379401 - DNA, 15 bp, Homo sapiens
tacagccctttgacc

SEQ ID NO: 379402 - DNA, 15 bp, Homo sapiens
ttacagccctttgac

SEQ ID NO: 379403 - DNA, 15 bp, Homo sapiens
cttacagccctttga

SEQ ID NO: 379404 - DNA, 15 bp, Homo sapiens
tcttacagccctttg

SEQ ID NO: 379405 - DNA, 15 bp, Homo sapiens
ctcttacagcccttt

SEQ ID NO: 379406 - DNA, 15 bp, Homo sapiens
gctcttacagccctt

SEQ ID NO: 379407 - DNA, 15 bp, Homo sapiens
ggctcttacagccct

SEQ ID NO: 379408 - DNA, 15 bp, Homo sapiens
aggctcttacagccc

SEQ ID NO: 379409 - DNA, 15 bp, Homo sapiens
caggctcttacagcc

SEQ ID NO: 379410 - DNA, 15 bp, Homo sapiens
ccaggctcttacagc

SEQ ID NO: 379411 - DNA, 15 bp, Homo sapiens
cccaggctcttacag

SEQ ID NO: 379412 - DNA, 15 bp, Homo sapiens
gcccaggctcttaca

SEQ ID NO: 379413 - DNA, 15 bp, Homo sapiens
tgcccaggctcttac

SEQ ID NO: 379414 - DNA, 15 bp, Homo sapiens
ttgcccaggctctta

SEQ ID NO: 379415 - DNA, 15 bp, Homo sapiens
cttgcccaggctctt

SEQ ID NO: 379416 - DNA, 15 bp, Homo sapiens
acttgcccaggctct

SEQ ID NO: 379417 - DNA, 15 bp, Homo sapiens
gacttgcccaggctc

SEQ ID NO: 379418 - DNA, 15 bp, Homo sapiens
ggacttgcccaggct

SEQ ID NO: 379419 - DNA, 15 bp, Homo sapiens
tggacttgcccaggc

SEQ ID NO: 379420 - DNA, 15 bp, Homo sapiens
ctggacttgcccagg

SEQ ID NO: 379421 - DNA, 15 bp, Homo sapiens
cctggacttgcccag

SEQ ID NO: 379422 - DNA, 15 bp, Homo sapiens
tcctggacttgccca

SEQ ID NO: 379423 - DNA, 15 bp, Homo sapiens
gtcctggacttgccc

SEQ ID NO: 379424 - DNA, 15 bp, Homo sapiens
agtcctggacttgcc

SEQ ID NO: 379425 - DNA, 15 bp, Homo sapiens
tagtcctggacttgc

SEQ ID NO: 379426 - DNA, 15 bp, Homo sapiens
ctagtcctggacttg

SEQ ID NO: 379427 - DNA, 15 bp, Homo sapiens
gctagtcctggactt

SEQ ID NO: 379428 - DNA, 15 bp, Homo sapiens
ggctagtcctggact

SEQ ID NO: 379429 - DNA, 15 bp, Homo sapiens
aggctagtcctggac

SEQ ID NO: 379430 - DNA, 15 bp, Homo sapiens
gaggctagtcctgga

SEQ ID NO: 379431 - DNA, 15 bp, Homo sapiens
tgaggctagtcctgg

SEQ ID NO: 379432 - DNA, 15 bp, Homo sapiens
gtgaggctagtcctg

SEQ ID NO: 379433 - DNA, 15 bp, Homo sapiens
ggtgaggctagtcct

SEQ ID NO: 379434 - DNA, 15 bp, Homo sapiens
cggtgaggctagtcc

SEQ ID NO: 379435 - DNA, 15 bp, Homo sapiens
gcggtgaggctagtc

SEQ ID NO: 379436 - DNA, 15 bp, Homo sapiens
ggcggtgaggctagt

SEQ ID NO: 379437 - DNA, 15 bp, Homo sapiens
aggcggtgaggctag

SEQ ID NO: 379438 - DNA, 15 bp, Homo sapiens
gaggcggtgaggcta

SEQ ID NO: 379439 - DNA, 15 bp, Homo sapiens
ggaggcggtgaggct

SEQ ID NO: 379440 - DNA, 15 bp, Homo sapiens
aggaggcggtgaggc

SEQ ID NO: 379441 - DNA, 15 bp, Homo sapiens
aaggaggcggtgagg

SEQ ID NO: 379442 - DNA, 15 bp, Homo sapiens
gaaggaggcggtgag

SEQ ID NO: 379443 - DNA, 15 bp, Homo sapiens
agaaggaggcggtga

SEQ ID NO: 379444 - DNA, 15 bp, Homo sapiens
aagaaggaggcggtg

SEQ ID NO: 379445 - DNA, 15 bp, Homo sapiens
aaagaaggaggcggt

SEQ ID NO: 379446 - DNA, 15 bp, Homo sapiens
gaaagaaggaggcgg

SEQ ID NO: 379447 - DNA, 15 bp, Homo sapiens
agaaagaaggaggcg

SEQ ID NO: 379448 - DNA, 15 bp, Homo sapiens
cagaaagaaggaggc

SEQ ID NO: 379449 - DNA, 15 bp, Homo sapiens
acagaaagaaggagg

SEQ ID NO: 379450 - DNA, 15 bp, Homo sapiens
gacagaaagaaggag

SEQ ID NO: 379451 - DNA, 15 bp, Homo sapiens
agacagaaagaagga

SEQ ID NO: 379452 - DNA, 15 bp, Homo sapiens
gagacagaaagaagg

SEQ ID NO: 379453 - DNA, 15 bp, Homo sapiens
cgagacagaaagaag

SEQ ID NO: 379454 - DNA, 15 bp, Homo sapiens
acgagacagaaagaa

SEQ ID NO: 379455 - DNA, 15 bp, Homo sapiens
gacgagacagaaaga

SEQ ID NO: 379456 - DNA, 15 bp, Homo sapiens
ggacgagacagaaag

SEQ ID NO: 379457 - DNA, 15 bp, Homo sapiens
aggacgagacagaaa

SEQ ID NO: 379458 - DNA, 15 bp, Homo sapiens
caggacgagacagaa

SEQ ID NO: 379459 - DNA, 15 bp, Homo sapiens
tcaggacgagacaga

SEQ ID NO: 379460 - DNA, 15 bp, Homo sapiens
ctcaggacgagacag

SEQ ID NO: 379461 - DNA, 15 bp, Homo sapiens
tctcaggacgagaca

SEQ ID NO: 379462 - DNA, 15 bp, Homo sapiens
ctctcaggacgagac

SEQ ID NO: 379463 - DNA, 15 bp, Homo sapiens
tctctcaggacgaga

SEQ ID NO: 379464 - DNA, 15 bp, Homo sapiens
atctctcaggacgag

SEQ ID NO: 379465 - DNA, 15 bp, Homo sapiens
catctctcaggacga

SEQ ID NO: 379466 - DNA, 15 bp, Homo sapiens
tcatctctcaggacg

SEQ ID NO: 379467 - DNA, 15 bp, Homo sapiens
ctcatctctcaggac

SEQ ID NO: 379468 - DNA, 15 bp, Homo sapiens
gctcatctctcagga

SEQ ID NO: 379469 - DNA, 15 bp, Homo sapiens
agctcatctctcagg

SEQ ID NO: 379470 - DNA, 15 bp, Homo sapiens
cagctcatctctcag

SEQ ID NO: 379471 - DNA, 15 bp, Homo sapiens
ccagctcatctctca

SEQ ID NO: 379472 - DNA, 15 bp, Homo sapiens
accagctcatctctc

SEQ ID NO: 379473 - DNA, 15 bp, Homo sapiens
caccagctcatctct

SEQ ID NO: 379474 - DNA, 15 bp, Homo sapiens
tcaccagctcatctc

SEQ ID NO: 379475 - DNA, 15 bp, Homo sapiens
gtcaccagctcatct

SEQ ID NO: 379476 - DNA, 15 bp, Homo sapiens
agtcaccagctcatc

SEQ ID NO: 379477 - DNA, 15 bp, Homo sapiens
cagtcaccagctcat

SEQ ID NO: 379478 - DNA, 15 bp, Homo sapiens
ccagtcaccagctca

SEQ ID NO: 379479 - DNA, 15 bp, Homo sapiens
cccagtcaccagctc

SEQ ID NO: 379480 - DNA, 15 bp, Homo sapiens
acccagtcaccagct

SEQ ID NO: 379481 - DNA, 15 bp, Homo sapiens
cacccagtcaccagc

SEQ ID NO: 379482 - DNA, 15 bp, Homo sapiens
gcacccagtcaccag

SEQ ID NO: 379483 - DNA, 15 bp, Homo sapiens
tgcacccagtcacca

SEQ ID NO: 379484 - DNA, 15 bp, Homo sapiens
ctgcacccagtcacc

SEQ ID NO: 379485 - DNA, 15 bp, Homo sapiens
actgcacccagtcac

SEQ ID NO: 379486 - DNA, 15 bp, Homo sapiens
cactgcacccagtca

SEQ ID NO: 379487 - DNA, 15 bp, Homo sapiens
ccactgcacccagtc

SEQ ID NO: 379488 - DNA, 15 bp, Homo sapiens
cccactgcacccagt

SEQ ID NO: 379489 - DNA, 15 bp, Homo sapiens
ccccactgcacccag

SEQ ID NO: 379490 - DNA, 15 bp, Homo sapiens
cccccactgcaccca

SEQ ID NO: 379491 - DNA, 15 bp, Homo sapiens
ccccccactgcaccc

SEQ ID NO: 379492 - DNA, 15 bp, Homo sapiens
cccccccactgcacc

SEQ ID NO: 379493 - DNA, 15 bp, Homo sapiens
gcccccccactgcac

SEQ ID NO: 379494 - DNA, 15 bp, Homo sapiens
cgcccccccactgca

SEQ ID NO: 379495 - DNA, 15 bp, Homo sapiens
ccgcccccccactgc

SEQ ID NO: 379496 - DNA, 15 bp, Homo sapiens
cccgcccccccactg

SEQ ID NO: 379497 - DNA, 15 bp, Homo sapiens
acccgcccccccact

SEQ ID NO: 379498 - DNA, 15 bp, Homo sapiens
cacccgcccccccac

SEQ ID NO: 379499 - DNA, 15 bp, Homo sapiens
acacccgccccccca

SEQ ID NO: 379500 - DNA, 15 bp, Homo sapiens
gacacccgccccccc

SEQ ID NO: 379501 - DNA, 15 bp, Homo sapiens
agacacccgcccccc

SEQ ID NO: 379502 - DNA, 15 bp, Homo sapiens
aagacacccgccccc

SEQ ID NO: 379503 - DNA, 15 bp, Homo sapiens
gaagacacccgcccc

SEQ ID NO: 379504 - DNA, 15 bp, Homo sapiens
tgaagacacccgccc

SEQ ID NO: 379505 - DNA, 15 bp, Homo sapiens
atgaagacacccgcc

SEQ ID NO: 379506 - DNA, 15 bp, Homo sapiens
aatgaagacacccgc

SEQ ID NO: 379507 - DNA, 15 bp, Homo sapiens
gaatgaagacacccg

SEQ ID NO: 379508 - DNA, 15 bp, Homo sapiens
agaatgaagacaccc

SEQ ID NO: 379509 - DNA, 15 bp, Homo sapiens
tagaatgaagacacc

SEQ ID NO: 379510 - DNA, 15 bp, Homo sapiens
ctagaatgaagacac

SEQ ID NO: 379511 - DNA, 15 bp, Homo sapiens
cctagaatgaagaca

SEQ ID NO: 379512 - DNA, 15 bp, Homo sapiens
tcctagaatgaagac

SEQ ID NO: 379513 - DNA, 15 bp, Homo sapiens
ctcctagaatgaaga

SEQ ID NO: 379514 - DNA, 15 bp, Homo sapiens
actcctagaatgaag

SEQ ID NO: 379515 - DNA, 15 bp, Homo sapiens
gactcctagaatgaa

SEQ ID NO: 379516 - DNA, 15 bp, Homo sapiens
tgactcctagaatga

SEQ ID NO: 379517 - DNA, 15 bp, Homo sapiens
gtgactcctagaatg

SEQ ID NO: 379518 - DNA, 15 bp, Homo sapiens
ggtgactcctagaat

SEQ ID NO: 379519 - DNA, 15 bp, Homo sapiens
tggtgactcctagaa

SEQ ID NO: 379520 - DNA, 15 bp, Homo sapiens
ttggtgactcctaga

SEQ ID NO: 379521 - DNA, 15 bp, Homo sapiens
attggtgactcctag

SEQ ID NO: 379522 - DNA, 15 bp, Homo sapiens
cattggtgactccta

SEQ ID NO: 379523 - DNA, 15 bp, Homo sapiens
gcattggtgactcct

SEQ ID NO: 379524 - DNA, 15 bp, Homo sapiens
ggcattggtgactcc

SEQ ID NO: 379525 - DNA, 15 bp, Homo sapiens
aggcattggtgactc

SEQ ID NO: 379526 - DNA, 15 bp, Homo sapiens
caggcattggtgact

SEQ ID NO: 379527 - DNA, 15 bp, Homo sapiens
acaggcattggtgac

SEQ ID NO: 379528 - DNA, 15 bp, Homo sapiens
gacaggcattggtga

SEQ ID NO: 379529 - DNA, 15 bp, Homo sapiens
ggacaggcattggtg

SEQ ID NO: 379530 - DNA, 15 bp, Homo sapiens
gggacaggcattggt

SEQ ID NO: 379531 - DNA, 15 bp, Homo sapiens
ggggacaggcattgg

SEQ ID NO: 379532 - DNA, 15 bp, Homo sapiens
tggggacaggcattg

SEQ ID NO: 379533 - DNA, 15 bp, Homo sapiens
gtggggacaggcatt

SEQ ID NO: 379534 - DNA, 15 bp, Homo sapiens
agtggggacaggcat

SEQ ID NO: 379535 - DNA, 15 bp, Homo sapiens
tagtggggacaggca

SEQ ID NO: 379536 - DNA, 15 bp, Homo sapiens
ttagtggggacaggc

SEQ ID NO: 379537 - DNA, 15 bp, Homo sapiens
gttagtggggacagg

SEQ ID NO: 379538 - DNA, 15 bp, Homo sapiens
ggttagtggggacag

SEQ ID NO: 379539 - DNA, 15 bp, Homo sapiens
gggttagtggggaca

SEQ ID NO: 379540 - DNA, 15 bp, Homo sapiens
agggttagtggggac

SEQ ID NO: 379541 - DNA, 15 bp, Homo sapiens
gagggttagtgggga

SEQ ID NO: 379542 - DNA, 15 bp, Homo sapiens
agagggttagtgggg

SEQ ID NO: 379543 - DNA, 15 bp, Homo sapiens
gagagggttagtggg

SEQ ID NO: 379544 - DNA, 15 bp, Homo sapiens
agagagggttagtgg

SEQ ID NO: 379545 - DNA, 15 bp, Homo sapiens
cagagagggttagtg

SEQ ID NO: 379546 - DNA, 15 bp, Homo sapiens
gcagagagggttagt

SEQ ID NO: 379547 - DNA, 15 bp, Homo sapiens
ggcagagagggttag

SEQ ID NO: 379548 - DNA, 15 bp, Homo sapiens
tggcagagagggtta

SEQ ID NO: 379549 - DNA, 15 bp, Homo sapiens
ttggcagagagggtt

SEQ ID NO: 379550 - DNA, 15 bp, Homo sapiens
attggcagagagggt

SEQ ID NO: 379551 - DNA, 15 bp, Homo sapiens
cattggcagagaggg

SEQ ID NO: 379552 - DNA, 15 bp, Homo sapiens
acattggcagagagg

SEQ ID NO: 379553 - DNA, 15 bp, Homo sapiens
cacattggcagagag

SEQ ID NO: 379554 - DNA, 15 bp, Homo sapiens
acacattggcagaga

SEQ ID NO: 379555 - DNA, 15 bp, Homo sapiens
aacacattggcagag

SEQ ID NO: 379556 - DNA, 15 bp, Homo sapiens
aaacacattggcaga

SEQ ID NO: 379557 - DNA, 15 bp, Homo sapiens
aaaacacattggcag

SEQ ID NO: 379558 - DNA, 15 bp, Homo sapiens
gaaaacacattggca

SEQ ID NO: 379559 - DNA, 15 bp, Homo sapiens
agaaaacacattggc

SEQ ID NO: 379560 - DNA, 15 bp, Homo sapiens
tagaaaacacattgg

SEQ ID NO: 379561 - DNA, 15 bp, Homo sapiens
ctagaaaacacattg

SEQ ID NO: 379562 - DNA, 15 bp, Homo sapiens
tctagaaaacacatt

SEQ ID NO: 379563 - DNA, 15 bp, Homo sapiens
atctagaaaacacat

SEQ ID NO: 379564 - DNA, 15 bp, Homo sapiens
aatctagaaaacaca

SEQ ID NO: 379565 - DNA, 15 bp, Homo sapiens
gaatctagaaaacac

SEQ ID NO: 379566 - DNA, 15 bp, Homo sapiens
ggaatctagaaaaca

SEQ ID NO: 379567 - DNA, 15 bp, Homo sapiens
gggaatctagaaaac

SEQ ID NO: 379568 - DNA, 15 bp, Homo sapiens
tgggaatctagaaaa

SEQ ID NO: 379569 - DNA, 15 bp, Homo sapiens
ttgggaatctagaaa

SEQ ID NO: 379570 - DNA, 15 bp, Homo sapiens
gttgggaatctagaa

SEQ ID NO: 379571 - DNA, 15 bp, Homo sapiens
agttgggaatctaga

SEQ ID NO: 379572 - DNA, 15 bp, Homo sapiens
aagttgggaatctag

SEQ ID NO: 379573 - DNA, 15 bp, Homo sapiens
gaagttgggaatcta

SEQ ID NO: 379574 - DNA, 15 bp, Homo sapiens
agaagttgggaatct

SEQ ID NO: 379575 - DNA, 15 bp, Homo sapiens
aagaagttgggaatc

SEQ ID NO: 379576 - DNA, 15 bp, Homo sapiens
gaagaagttgggaat

SEQ ID NO: 379577 - DNA, 15 bp, Homo sapiens
agaagaagttgggaa

SEQ ID NO: 379578 - DNA, 15 bp, Homo sapiens
cagaagaagttggga

SEQ ID NO: 379579 - DNA, 15 bp, Homo sapiens
ccagaagaagttggg

SEQ ID NO: 379580 - DNA, 15 bp, Homo sapiens
tccagaagaagttgg

SEQ ID NO: 379581 - DNA, 15 bp, Homo sapiens
ctccagaagaagttg

SEQ ID NO: 379582 - DNA, 15 bp, Homo sapiens
gctccagaagaagtt

SEQ ID NO: 379583 - DNA, 15 bp, Homo sapiens
ggctccagaagaagt

SEQ ID NO: 379584 - DNA, 15 bp, Homo sapiens
aggctccagaagaag

SEQ ID NO: 379585 - DNA, 15 bp, Homo sapiens
caggctccagaagaa

SEQ ID NO: 379586 - DNA, 15 bp, Homo sapiens
ccaggctccagaaga

SEQ ID NO: 379587 - DNA, 15 bp, Homo sapiens
cccaggctccagaag

SEQ ID NO: 379588 - DNA, 15 bp, Homo sapiens
ccccaggctccagaa

SEQ ID NO: 379589 - DNA, 15 bp, Homo sapiens
tccccaggctccaga

SEQ ID NO: 379590 - DNA, 15 bp, Homo sapiens
atccccaggctccag

SEQ ID NO: 379591 - DNA, 15 bp, Homo sapiens
gatccccaggctcca

SEQ ID NO: 379592 - DNA, 15 bp, Homo sapiens
cgatccccaggctcc

SEQ ID NO: 379593 - DNA, 15 bp, Homo sapiens
ccgatccccaggctc

SEQ ID NO: 379594 - DNA, 15 bp, Homo sapiens
accgatccccaggct

SEQ ID NO: 379595 - DNA, 15 bp, Homo sapiens
gaccgatccccaggc

SEQ ID NO: 379596 - DNA, 15 bp, Homo sapiens
tgaccgatccccagg

SEQ ID NO: 379597 - DNA, 15 bp, Homo sapiens
gtgaccgatccccag

SEQ ID NO: 379598 - DNA, 15 bp, Homo sapiens
tgtgaccgatcccca

SEQ ID NO: 379599 - DNA, 15 bp, Homo sapiens
gtgtgaccgatcccc

SEQ ID NO: 379600 - DNA, 15 bp, Homo sapiens
agtgtgaccgatccc

SEQ ID NO: 379601 - DNA, 15 bp, Homo sapiens
cagtgtgaccgatcc

SEQ ID NO: 379602 - DNA, 15 bp, Homo sapiens
ccagtgtgaccgatc

SEQ ID NO: 379603 - DNA, 15 bp, Homo sapiens
accagtgtgaccgat

SEQ ID NO: 379604 - DNA, 15 bp, Homo sapiens
caccagtgtgaccga

SEQ ID NO: 379605 - DNA, 15 bp, Homo sapiens
gcaccagtgtgaccg

SEQ ID NO: 379606 - DNA, 15 bp, Homo sapiens
cgcaccagtgtgacc

SEQ ID NO: 379607 - DNA, 15 bp, Homo sapiens
acgcaccagtgtgac

SEQ ID NO: 379608 - DNA, 15 bp, Homo sapiens
cacgcaccagtgtga

SEQ ID NO: 379609 - DNA, 15 bp, Homo sapiens
ccacgcaccagtgtg

SEQ ID NO: 379610 - DNA, 15 bp, Homo sapiens
accacgcaccagtgt

SEQ ID NO: 379611 - DNA, 15 bp, Homo sapiens
caccacgcaccagtg

SEQ ID NO: 379612 - DNA, 15 bp, Homo sapiens
ccaccacgcaccagt

SEQ ID NO: 379613 - DNA, 15 bp, Homo sapiens
gccaccacgcaccag

SEQ ID NO: 379614 - DNA, 15 bp, Homo sapiens
tgccaccacgcacca

SEQ ID NO: 379615 - DNA, 15 bp, Homo sapiens
atgccaccacgcacc

SEQ ID NO: 379616 - DNA, 15 bp, Homo sapiens
tatgccaccacgcac

SEQ ID NO: 379617 - DNA, 15 bp, Homo sapiens
gtatgccaccacgca

SEQ ID NO: 379618 - DNA, 15 bp, Homo sapiens
agtatgccaccacgc

SEQ ID NO: 379619 - DNA, 15 bp, Homo sapiens
cagtatgccaccacg

SEQ ID NO: 379620 - DNA, 15 bp, Homo sapiens
ccagtatgccaccac

SEQ ID NO: 379621 - DNA, 15 bp, Homo sapiens
cccagtatgccacca

SEQ ID NO: 379622 - DNA, 15 bp, Homo sapiens
tcccagtatgccacc

SEQ ID NO: 379623 - DNA, 15 bp, Homo sapiens
ctcccagtatgccac

SEQ ID NO: 379624 - DNA, 15 bp, Homo sapiens
cctcccagtatgcca

SEQ ID NO: 379625 - DNA, 15 bp, Homo sapiens
tcctcccagtatgcc

SEQ ID NO: 379626 - DNA, 15 bp, Homo sapiens
ctcctcccagtatgc

SEQ ID NO: 379627 - DNA, 15 bp, Homo sapiens
tctcctcccagtatg

SEQ ID NO: 379628 - DNA, 15 bp, Homo sapiens
ttctcctcccagtat

SEQ ID NO: 379629 - DNA, 15 bp, Homo sapiens
cttctcctcccagta

SEQ ID NO: 379630 - DNA, 15 bp, Homo sapiens
tcttctcctcccagt

SEQ ID NO: 379631 - DNA, 15 bp, Homo sapiens
gtcttctcctcccag

SEQ ID NO: 379632 - DNA, 15 bp, Homo sapiens
cgtcttctcctccca

SEQ ID NO: 379633 - DNA, 15 bp, Homo sapiens
tcgtcttctcctccc

SEQ ID NO: 379634 - DNA, 15 bp, Homo sapiens
ctcgtcttctcctcc

SEQ ID NO: 379635 - DNA, 15 bp, Homo sapiens
tctcgtcttctcctc

SEQ ID NO: 379636 - DNA, 15 bp, Homo sapiens
ctctcgtcttctcct

SEQ ID NO: 379637 - DNA, 15 bp, Homo sapiens
actctcgtcttctcc

SEQ ID NO: 379638 - DNA, 15 bp, Homo sapiens
cactctcgtcttctc

SEQ ID NO: 379639 - DNA, 15 bp, Homo sapiens
ccactctcgtcttct

SEQ ID NO: 379640 - DNA, 15 bp, Homo sapiens
cccactctcgtcttc

SEQ ID NO: 379641 - DNA, 15 bp, Homo sapiens
ccccactctcgtctt

SEQ ID NO: 379642 - DNA, 15 bp, Homo sapiens
tccccactctcgtct

SEQ ID NO: 379643 - DNA, 15 bp, Homo sapiens
ctccccactctcgtc

SEQ ID NO: 379644 - DNA, 15 bp, Homo sapiens
cctccccactctcgt

SEQ ID NO: 379645 - DNA, 15 bp, Homo sapiens
gcctccccactctcg

SEQ ID NO: 379646 - DNA, 15 bp, Homo sapiens
agcctccccactctc

SEQ ID NO: 379647 - DNA, 15 bp, Homo sapiens
gagcctccccactct

SEQ ID NO: 379648 - DNA, 15 bp, Homo sapiens
agagcctccccactc

SEQ ID NO: 379649 - DNA, 15 bp, Homo sapiens
tagagcctccccact

SEQ ID NO: 379650 - DNA, 15 bp, Homo sapiens
gtagagcctccccac

SEQ ID NO: 379651 - DNA, 15 bp, Homo sapiens
agtagagcctcccca

SEQ ID NO: 379652 - DNA, 15 bp, Homo sapiens
cagtagagcctcccc

SEQ ID NO: 379653 - DNA, 15 bp, Homo sapiens
acagtagagcctccc

SEQ ID NO: 379654 - DNA, 15 bp, Homo sapiens
cacagtagagcctcc

SEQ ID NO: 379655 - DNA, 15 bp, Homo sapiens
acacagtagagcctc

SEQ ID NO: 379656 - DNA, 15 bp, Homo sapiens
gacacagtagagcct

SEQ ID NO: 379657 - DNA, 15 bp, Homo sapiens
ggacacagtagagcc

SEQ ID NO: 379658 - DNA, 15 bp, Homo sapiens
tggacacagtagagc

SEQ ID NO: 379659 - DNA, 15 bp, Homo sapiens
ctggacacagtagag

SEQ ID NO: 379660 - DNA, 15 bp, Homo sapiens
cctggacacagtaga

SEQ ID NO: 379661 - DNA, 15 bp, Homo sapiens
tcctggacacagtag

SEQ ID NO: 379662 - DNA, 15 bp, Homo sapiens
ctcctggacacagta

SEQ ID NO: 379663 - DNA, 15 bp, Homo sapiens
gctcctggacacagt

SEQ ID NO: 379664 - DNA, 15 bp, Homo sapiens
ggctcctggacacag

SEQ ID NO: 379665 - DNA, 15 bp, Homo sapiens
gggctcctggacaca

SEQ ID NO: 379666 - DNA, 15 bp, Homo sapiens
agggctcctggacac

SEQ ID NO: 379667 - DNA, 15 bp, Homo sapiens
gagggctcctggaca

SEQ ID NO: 379668 - DNA, 15 bp, Homo sapiens
agagggctcctggac

SEQ ID NO: 379669 - DNA, 15 bp, Homo sapiens
gagagggctcctgga

SEQ ID NO: 379670 - DNA, 15 bp, Homo sapiens
agagagggctcctgg

SEQ ID NO: 379671 - DNA, 15 bp, Homo sapiens
cagagagggctcctg

SEQ ID NO: 379672 - DNA, 15 bp, Homo sapiens
ccagagagggctcct

SEQ ID NO: 379673 - DNA, 15 bp, Homo sapiens
tccagagagggctcc

SEQ ID NO: 379674 - DNA, 15 bp, Homo sapiens
atccagagagggctc

SEQ ID NO: 379675 - DNA, 15 bp, Homo sapiens
tatccagagagggct

SEQ ID NO: 379676 - DNA, 15 bp, Homo sapiens
atatccagagagggc

SEQ ID NO: 379677 - DNA, 15 bp, Homo sapiens
gatatccagagaggg

SEQ ID NO: 379678 - DNA, 15 bp, Homo sapiens
agatatccagagagg

SEQ ID NO: 379679 - DNA, 15 bp, Homo sapiens
aagatatccagagag

SEQ ID NO: 379680 - DNA, 15 bp, Homo sapiens
gaagatatccagaga

SEQ ID NO: 379681 - DNA, 15 bp, Homo sapiens
agaagatatccagag

SEQ ID NO: 379682 - DNA, 15 bp, Homo sapiens
tagaagatatccaga

SEQ ID NO: 379683 - DNA, 15 bp, Homo sapiens
atagaagatatccag

SEQ ID NO: 379684 - DNA, 15 bp, Homo sapiens
catagaagatatcca

SEQ ID NO: 379685 - DNA, 15 bp, Homo sapiens
tcatagaagatatcc

SEQ ID NO: 379686 - DNA, 15 bp, Homo sapiens
atcatagaagatatc

SEQ ID NO: 379687 - DNA, 15 bp, Homo sapiens
gatcatagaagatat

SEQ ID NO: 379688 - DNA, 15 bp, Homo sapiens
agatcatagaagata

SEQ ID NO: 379689 - DNA, 15 bp, Homo sapiens
tagatcatagaagat

SEQ ID NO: 379690 - DNA, 15 bp, Homo sapiens
gtagatcatagaaga

SEQ ID NO: 379691 - DNA, 15 bp, Homo sapiens
ggtagatcatagaag

SEQ ID NO: 379692 - DNA, 15 bp, Homo sapiens
aggtagatcatagaa

SEQ ID NO: 379693 - DNA, 15 bp, Homo sapiens
gaggtagatcataga

SEQ ID NO: 379694 - DNA, 15 bp, Homo sapiens
tgaggtagatcatag

SEQ ID NO: 379695 - DNA, 15 bp, Homo sapiens
ctgaggtagatcata

SEQ ID NO: 379696 - DNA, 15 bp, Homo sapiens
cctgaggtagatcat

SEQ ID NO: 379697 - DNA, 15 bp, Homo sapiens
ccctgaggtagatca

SEQ ID NO: 379698 - DNA, 15 bp, Homo sapiens
cccctgaggtagatc

SEQ ID NO: 379699 - DNA, 15 bp, Homo sapiens
tcccctgaggtagat

SEQ ID NO: 379700 - DNA, 15 bp, Homo sapiens
ttcccctgaggtaga

SEQ ID NO: 379701 - DNA, 15 bp, Homo sapiens
attcccctgaggtag

SEQ ID NO: 379702 - DNA, 15 bp, Homo sapiens
cattcccctgaggta

SEQ ID NO: 379703 - DNA, 15 bp, Homo sapiens
ccattcccctgaggt

SEQ ID NO: 379704 - DNA, 15 bp, Homo sapiens
gccattcccctgagg

SEQ ID NO: 379705 - DNA, 15 bp, Homo sapiens
agccattcccctgag

SEQ ID NO: 379706 - DNA, 15 bp, Homo sapiens
aagccattcccctga

SEQ ID NO: 379707 - DNA, 15 bp, Homo sapiens
aaagccattcccctg

SEQ ID NO: 379708 - DNA, 15 bp, Homo sapiens
aaaagccattcccct

SEQ ID NO: 379709 - DNA, 15 bp, Homo sapiens
caaaagccattcccc

SEQ ID NO: 379710 - DNA, 15 bp, Homo sapiens
gcaaaagccattccc

SEQ ID NO: 379711 - DNA, 15 bp, Homo sapiens
ggcaaaagccattcc

SEQ ID NO: 379712 - DNA, 15 bp, Homo sapiens
aggcaaaagccattc

SEQ ID NO: 379713 - DNA, 15 bp, Homo sapiens
gaggcaaaagccatt

SEQ ID NO: 379714 - DNA, 15 bp, Homo sapiens
cgaggcaaaagccat

SEQ ID NO: 379715 - DNA, 15 bp, Homo sapiens
ccgaggcaaaagcca

SEQ ID NO: 379716 - DNA, 15 bp, Homo sapiens
tccgaggcaaaagcc

SEQ ID NO: 379717 - DNA, 15 bp, Homo sapiens
gtccgaggcaaaagc

SEQ ID NO: 379718 - DNA, 15 bp, Homo sapiens
tgtccgaggcaaaag

SEQ ID NO: 379719 - DNA, 15 bp, Homo sapiens
ctgtccgaggcaaaa

SEQ ID NO: 379720 - DNA, 15 bp, Homo sapiens
gctgtccgaggcaaa

SEQ ID NO: 379721 - DNA, 15 bp, Homo sapiens
agctgtccgaggcaa

SEQ ID NO: 379722 - DNA, 15 bp, Homo sapiens
gagctgtccgaggca

SEQ ID NO: 379723 - DNA, 15 bp, Homo sapiens
tgagctgtccgaggc

SEQ ID NO: 379724 - DNA, 15 bp, Homo sapiens
ttgagctgtccgagg

SEQ ID NO: 379725 - DNA, 15 bp, Homo sapiens
attgagctgtccgag

SEQ ID NO: 379726 - DNA, 15 bp, Homo sapiens
aattgagctgtccga

SEQ ID NO: 379727 - DNA, 15 bp, Homo sapiens
gaattgagctgtccg

SEQ ID NO: 379728 - DNA, 15 bp, Homo sapiens
cgaattgagctgtcc

SEQ ID NO: 379729 - DNA, 15 bp, Homo sapiens
ccgaattgagctgtc

SEQ ID NO: 379730 - DNA, 15 bp, Homo sapiens
tccgaattgagctgt

SEQ ID NO: 379731 - DNA, 15 bp, Homo sapiens
gtccgaattgagctg

SEQ ID NO: 379732 - DNA, 15 bp, Homo sapiens
tgtccgaattgagct

SEQ ID NO: 379733 - DNA, 15 bp, Homo sapiens
ttgtccgaattgagc

SEQ ID NO: 379734 - DNA, 15 bp, Homo sapiens
gttgtccgaattgag

SEQ ID NO: 379735 - DNA, 15 bp, Homo sapiens
tgttgtccgaattga

SEQ ID NO: 379736 - DNA, 15 bp, Homo sapiens
ttgttgtccgaattg

SEQ ID NO: 379737 - DNA, 15 bp, Homo sapiens
cttgttgtccgaatt

SEQ ID NO: 379738 - DNA, 15 bp, Homo sapiens
tcttgttgtccgaat

SEQ ID NO: 379739 - DNA, 15 bp, Homo sapiens
ctcttgttgtccgaa

SEQ ID NO: 379740 - DNA, 15 bp, Homo sapiens
actcttgttgtccga

SEQ ID NO: 379741 - DNA, 15 bp, Homo sapiens
gactcttgttgtccg

SEQ ID NO: 379742 - DNA, 15 bp, Homo sapiens
tgactcttgttgtcc

SEQ ID NO: 379743 - DNA, 15 bp, Homo sapiens
ctgactcttgttgtc

SEQ ID NO: 379744 - DNA, 15 bp, Homo sapiens
gctgactcttgttgt

SEQ ID NO: 379745 - DNA, 15 bp, Homo sapiens
agctgactcttgttg

SEQ ID NO: 379746 - DNA, 15 bp, Homo sapiens
cagctgactcttgtt

SEQ ID NO: 379747 - DNA, 15 bp, Homo sapiens
ccagctgactcttgt

SEQ ID NO: 379748 - DNA, 15 bp, Homo sapiens
accagctgactcttg

SEQ ID NO: 379749 - DNA, 15 bp, Homo sapiens
caccagctgactctt

SEQ ID NO: 379750 - DNA, 15 bp, Homo sapiens
gcaccagctgactct

SEQ ID NO: 379751 - DNA, 15 bp, Homo sapiens
tgcaccagctgactc

SEQ ID NO: 379752 - DNA, 15 bp, Homo sapiens
ctgcaccagctgact

SEQ ID NO: 379753 - DNA, 15 bp, Homo sapiens
tctgcaccagctgac

SEQ ID NO: 379754 - DNA, 15 bp, Homo sapiens
ttctgcaccagctga

SEQ ID NO: 379755 - DNA, 15 bp, Homo sapiens
cttctgcaccagctg

SEQ ID NO: 379756 - DNA, 15 bp, Homo sapiens
ccttctgcaccagct

SEQ ID NO: 379757 - DNA, 15 bp, Homo sapiens
accttctgcaccagc

SEQ ID NO: 379758 - DNA, 15 bp, Homo sapiens
caccttctgcaccag

SEQ ID NO: 379759 - DNA, 15 bp, Homo sapiens
gcaccttctgcacca

SEQ ID NO: 379760 - DNA, 15 bp, Homo sapiens
cgcaccttctgcacc

SEQ ID NO: 379761 - DNA, 15 bp, Homo sapiens
ccgcaccttctgcac

SEQ ID NO: 379762 - DNA, 15 bp, Homo sapiens
tccgcaccttctgca

SEQ ID NO: 379763 - DNA, 15 bp, Homo sapiens
ctccgcaccttctgc

SEQ ID NO: 379764 - DNA, 15 bp, Homo sapiens
gctccgcaccttctg

SEQ ID NO: 379765 - DNA, 15 bp, Homo sapiens
tgctccgcaccttct

SEQ ID NO: 379766 - DNA, 15 bp, Homo sapiens
ttgctccgcaccttc

SEQ ID NO: 379767 - DNA, 15 bp, Homo sapiens
tttgctccgcacctt

SEQ ID NO: 379768 - DNA, 15 bp, Homo sapiens
ttttgctccgcacct

SEQ ID NO: 379769 - DNA, 15 bp, Homo sapiens
attttgctccgcacc

SEQ ID NO: 379770 - DNA, 15 bp, Homo sapiens
gattttgctccgcac

SEQ ID NO: 379771 - DNA, 15 bp, Homo sapiens
cgattttgctccgca

SEQ ID NO: 379772 - DNA, 15 bp, Homo sapiens
ccgattttgctccgc

SEQ ID NO: 379773 - DNA, 15 bp, Homo sapiens
gccgattttgctccg

SEQ ID NO: 379774 - DNA, 15 bp, Homo sapiens
agccgattttgctcc

SEQ ID NO: 379775 - DNA, 15 bp, Homo sapiens
cagccgattttgctc

SEQ ID NO: 379776 - DNA, 15 bp, Homo sapiens
gcagccgattttgct

SEQ ID NO: 379777 - DNA, 15 bp, Homo sapiens
cgcagccgattttgc

SEQ ID NO: 379778 - DNA, 15 bp, Homo sapiens
ccgcagccgattttg

SEQ ID NO: 379779 - DNA, 15 bp, Homo sapiens
gccgcagccgatttt

SEQ ID NO: 379780 - DNA, 15 bp, Homo sapiens
tgccgcagccgattt

SEQ ID NO: 379781 - DNA, 15 bp, Homo sapiens
atgccgcagccgatt

SEQ ID NO: 379782 - DNA, 15 bp, Homo sapiens
gatgccgcagccgat

SEQ ID NO: 379783 - DNA, 15 bp, Homo sapiens
ggatgccgcagccga

SEQ ID NO: 379784 - DNA, 15 bp, Homo sapiens
tggatgccgcagccg

SEQ ID NO: 379785 - DNA, 15 bp, Homo sapiens
ctggatgccgcagcc

SEQ ID NO: 379786 - DNA, 15 bp, Homo sapiens
gctggatgccgcagc

SEQ ID NO: 379787 - DNA, 15 bp, Homo sapiens
agctggatgccgcag

SEQ ID NO: 379788 - DNA, 15 bp, Homo sapiens
cagctggatgccgca

SEQ ID NO: 379789 - DNA, 15 bp, Homo sapiens
tcagctggatgccgc

SEQ ID NO: 379790 - DNA, 15 bp, Homo sapiens
gtcagctggatgccg

SEQ ID NO: 379791 - DNA, 15 bp, Homo sapiens
cgtcagctggatgcc

SEQ ID NO: 379792 - DNA, 15 bp, Homo sapiens
gcgtcagctggatgc

SEQ ID NO: 379793 - DNA, 15 bp, Homo sapiens
cgcgtcagctggatg

SEQ ID NO: 379794 - DNA, 15 bp, Homo sapiens
ccgcgtcagctggat

SEQ ID NO: 379795 - DNA, 15 bp, Homo sapiens
cccgcgtcagctgga

SEQ ID NO: 379796 - DNA, 15 bp, Homo sapiens
tcccgcgtcagctgg

SEQ ID NO: 379797 - DNA, 15 bp, Homo sapiens
ctcccgcgtcagctg

SEQ ID NO: 379798 - DNA, 15 bp, Homo sapiens
cctcccgcgtcagct

SEQ ID NO: 379799 - DNA, 15 bp, Homo sapiens
acctcccgcgtcagc

SEQ ID NO: 379800 - DNA, 15 bp, Homo sapiens
cacctcccgcgtcag

SEQ ID NO: 379801 - DNA, 15 bp, Homo sapiens
ccacctcccgcgtca

SEQ ID NO: 379802 - DNA, 15 bp, Homo sapiens
tccacctcccgcgtc

SEQ ID NO: 379803 - DNA, 15 bp, Homo sapiens
atccacctcccgcgt

SEQ ID NO: 379804 - DNA, 15 bp, Homo sapiens
catccacctcccgcg

SEQ ID NO: 379805 - DNA, 15 bp, Homo sapiens
ccatccacctcccgc

SEQ ID NO: 379806 - DNA, 15 bp, Homo sapiens
accatccacctcccg

SEQ ID NO: 379807 - DNA, 15 bp, Homo sapiens
caccatccacctccc

SEQ ID NO: 379808 - DNA, 15 bp, Homo sapiens
acaccatccacctcc

SEQ ID NO: 379809 - DNA, 15 bp, Homo sapiens
cacaccatccacctc

SEQ ID NO: 379810 - DNA, 15 bp, Homo sapiens
acacaccatccacct

SEQ ID NO: 379811 - DNA, 15 bp, Homo sapiens
cacacaccatccacc

SEQ ID NO: 379812 - DNA, 15 bp, Homo sapiens
ccacacaccatccac

SEQ ID NO: 379813 - DNA, 15 bp, Homo sapiens
cccacacaccatcca

SEQ ID NO: 379814 - DNA, 15 bp, Homo sapiens
acccacacaccatcc

SEQ ID NO: 379815 - DNA, 15 bp, Homo sapiens
cacccacacaccatc

SEQ ID NO: 379816 - DNA, 15 bp, Homo sapiens
acacccacacaccat

SEQ ID NO: 379817 - DNA, 15 bp, Homo sapiens
tacacccacacacca

SEQ ID NO: 379818 - DNA, 15 bp, Homo sapiens
gtacacccacacacc

SEQ ID NO: 379819 - DNA, 15 bp, Homo sapiens
tgtacacccacacac

SEQ ID NO: 379820 - DNA, 15 bp, Homo sapiens
ttgtacacccacaca

SEQ ID NO: 379821 - DNA, 15 bp, Homo sapiens
gttgtacacccacac

SEQ ID NO: 379822 - DNA, 15 bp, Homo sapiens
ggttgtacacccaca

SEQ ID NO: 379823 - DNA, 15 bp, Homo sapiens
cggttgtacacccac

SEQ ID NO: 379824 - DNA, 15 bp, Homo sapiens
gcggttgtacaccca

SEQ ID NO: 379825 - DNA, 15 bp, Homo sapiens
tgcggttgtacaccc

SEQ ID NO: 379826 - DNA, 15 bp, Homo sapiens
ctgcggttgtacacc

SEQ ID NO: 379827 - DNA, 15 bp, Homo sapiens
gctgcggttgtacac

SEQ ID NO: 379828 - DNA, 15 bp, Homo sapiens
tgctgcggttgtaca

SEQ ID NO: 379829 - DNA, 15 bp, Homo sapiens
ctgctgcggttgtac

SEQ ID NO: 379830 - DNA, 15 bp, Homo sapiens
actgctgcggttgta

SEQ ID NO: 379831 - DNA, 15 bp, Homo sapiens
aactgctgcggttgt

SEQ ID NO: 379832 - DNA, 15 bp, Homo sapiens
taactgctgcggttg

SEQ ID NO: 379833 - DNA, 15 bp, Homo sapiens
gtaactgctgcggtt

SEQ ID NO: 379834 - DNA, 15 bp, Homo sapiens
ggtaactgctgcggt

SEQ ID NO: 379835 - DNA, 15 bp, Homo sapiens
gggtaactgctgcgg

SEQ ID NO: 379836 - DNA, 15 bp, Homo sapiens
ggggtaactgctgcg

SEQ ID NO: 379837 - DNA, 15 bp, Homo sapiens
tggggtaactgctgc

SEQ ID NO: 379838 - DNA, 15 bp, Homo sapiens
atggggtaactgctg

SEQ ID NO: 379839 - DNA, 15 bp, Homo sapiens
gatggggtaactgct

SEQ ID NO: 379840 - DNA, 15 bp, Homo sapiens
agatggggtaactgc

SEQ ID NO: 379841 - DNA, 15 bp, Homo sapiens
aagatggggtaactg

SEQ ID NO: 379842 - DNA, 15 bp, Homo sapiens
gaagatggggtaact

SEQ ID NO: 379843 - DNA, 15 bp, Homo sapiens
tgaagatggggtaac

SEQ ID NO: 379844 - DNA, 15 bp, Homo sapiens
atgaagatggggtaa

SEQ ID NO: 379845 - DNA, 15 bp, Homo sapiens
gatgaagatggggta

SEQ ID NO: 379846 - DNA, 15 bp, Homo sapiens
tgatgaagatggggt

SEQ ID NO: 379847 - DNA, 15 bp, Homo sapiens
ttgatgaagatgggg

SEQ ID NO: 379848 - DNA, 15 bp, Homo sapiens
cttgatgaagatggg

SEQ ID NO: 379849 - DNA, 15 bp, Homo sapiens
acttgatgaagatgg

SEQ ID NO: 379850 - DNA, 15 bp, Homo sapiens
gacttgatgaagatg

SEQ ID NO: 379851 - DNA, 15 bp, Homo sapiens
ggacttgatgaagat

SEQ ID NO: 379852 - DNA, 15 bp, Homo sapiens
cggacttgatgaaga

SEQ ID NO: 379853 - DNA, 15 bp, Homo sapiens
gcggacttgatgaag

SEQ ID NO: 379854 - DNA, 15 bp, Homo sapiens
ggcggacttgatgaa

SEQ ID NO: 379855 - DNA, 15 bp, Homo sapiens
tggcggacttgatga

SEQ ID NO: 379856 - DNA, 15 bp, Homo sapiens
gtggcggacttgatg

SEQ ID NO: 379857 - DNA, 15 bp, Homo sapiens
tgtggcggacttgat

SEQ ID NO: 379858 - DNA, 15 bp, Homo sapiens
gtgtggcggacttga

SEQ ID NO: 379859 - DNA, 15 bp, Homo sapiens
agtgtggcggacttg

SEQ ID NO: 379860 - DNA, 15 bp, Homo sapiens
cagtgtggcggactt

SEQ ID NO: 379861 - DNA, 15 bp, Homo sapiens
ccagtgtggcggact

SEQ ID NO: 379862 - DNA, 15 bp, Homo sapiens
tccagtgtggcggac

SEQ ID NO: 379863 - DNA, 15 bp, Homo sapiens
gtccagtgtggcgga

SEQ ID NO: 379864 - DNA, 15 bp, Homo sapiens
tgtccagtgtggcgg

SEQ ID NO: 379865 - DNA, 15 bp, Homo sapiens
ttgtccagtgtggcg

SEQ ID NO: 379866 - DNA, 15 bp, Homo sapiens
gttgtccagtgtggc

SEQ ID NO: 379867 - DNA, 15 bp, Homo sapiens
ggttgtccagtgtgg

SEQ ID NO: 379868 - DNA, 15 bp, Homo sapiens
gggttgtccagtgtg

SEQ ID NO: 379869 - DNA, 15 bp, Homo sapiens
cgggttgtccagtgt

SEQ ID NO: 379870 - DNA, 15 bp, Homo sapiens
ccgggttgtccagtg

SEQ ID NO: 379871 - DNA, 15 bp, Homo sapiens
tccgggttgtccagt

SEQ ID NO: 379872 - DNA, 15 bp, Homo sapiens
gtccgggttgtccag

SEQ ID NO: 379873 - DNA, 15 bp, Homo sapiens
agtccgggttgtcca

SEQ ID NO: 379874 - DNA, 15 bp, Homo sapiens
gagtccgggttgtcc

SEQ ID NO: 379875 - DNA, 15 bp, Homo sapiens
ggagtccgggttgtc

SEQ ID NO: 379876 - DNA, 15 bp, Homo sapiens
tggagtccgggttgt

SEQ ID NO: 379877 - DNA, 15 bp, Homo sapiens
ctggagtccgggttg

SEQ ID NO: 379878 - DNA, 15 bp, Homo sapiens
cctggagtccgggtt

SEQ ID NO: 379879 - DNA, 15 bp, Homo sapiens
tcctggagtccgggt

SEQ ID NO: 379880 - DNA, 15 bp, Homo sapiens
gtcctggagtccggg

SEQ ID NO: 379881 - DNA, 15 bp, Homo sapiens
cgtcctggagtccgg

SEQ ID NO: 379882 - DNA, 15 bp, Homo sapiens
gcgtcctggagtccg

SEQ ID NO: 379883 - DNA, 15 bp, Homo sapiens
agcgtcctggagtcc

SEQ ID NO: 379884 - DNA, 15 bp, Homo sapiens
cagcgtcctggagtc

SEQ ID NO: 379885 - DNA, 15 bp, Homo sapiens
acagcgtcctggagt

SEQ ID NO: 379886 - DNA, 15 bp, Homo sapiens
aacagcgtcctggag

SEQ ID NO: 379887 - DNA, 15 bp, Homo sapiens
caacagcgtcctgga

SEQ ID NO: 379888 - DNA, 15 bp, Homo sapiens
ccaacagcgtcctgg

SEQ ID NO: 379889 - DNA, 15 bp, Homo sapiens
accaacagcgtcctg

SEQ ID NO: 379890 - DNA, 15 bp, Homo sapiens
taccaacagcgtcct

SEQ ID NO: 379891 - DNA, 15 bp, Homo sapiens
gtaccaacagcgtcc

SEQ ID NO: 379892 - DNA, 15 bp, Homo sapiens
tgtaccaacagcgtc

SEQ ID NO: 379893 - DNA, 15 bp, Homo sapiens
gtgtaccaacagcgt

SEQ ID NO: 379894 - DNA, 15 bp, Homo sapiens
tgtgtaccaacagcg

SEQ ID NO: 379895 - DNA, 15 bp, Homo sapiens
ttgtgtaccaacagc

SEQ ID NO: 379896 - DNA, 15 bp, Homo sapiens
cttgtgtaccaacag

SEQ ID NO: 379897 - DNA, 15 bp, Homo sapiens
ccttgtgtaccaaca

SEQ ID NO: 379898 - DNA, 15 bp, Homo sapiens
accttgtgtaccaac

SEQ ID NO: 379899 - DNA, 15 bp, Homo sapiens
caccttgtgtaccaa

SEQ ID NO: 379900 - DNA, 15 bp, Homo sapiens
acaccttgtgtacca

SEQ ID NO: 379901 - DNA, 15 bp, Homo sapiens
aacaccttgtgtacc

SEQ ID NO: 379902 - DNA, 15 bp, Homo sapiens
gaacaccttgtgtac

SEQ ID NO: 379903 - DNA, 15 bp, Homo sapiens
ggaacaccttgtgta

SEQ ID NO: 379904 - DNA, 15 bp, Homo sapiens
gggaacaccttgtgt

SEQ ID NO: 379905 - DNA, 15 bp, Homo sapiens
ggggaacaccttgtg

SEQ ID NO: 379906 - DNA, 15 bp, Homo sapiens
cggggaacaccttgt

SEQ ID NO: 379907 - DNA, 15 bp, Homo sapiens
ccggggaacaccttg

SEQ ID NO: 379908 - DNA, 15 bp, Homo sapiens
accggggaacacctt

SEQ ID NO: 379909 - DNA, 15 bp, Homo sapiens
aaccggggaacacct

SEQ ID NO: 379910 - DNA, 15 bp, Homo sapiens
aaaccggggaacacc

SEQ ID NO: 379911 - DNA, 15 bp, Homo sapiens
gaaaccggggaacac

SEQ ID NO: 379912 - DNA, 15 bp, Homo sapiens
agaaaccggggaaca

SEQ ID NO: 379913 - DNA, 15 bp, Homo sapiens
gagaaaccggggaac

SEQ ID NO: 379914 - DNA, 15 bp, Homo sapiens
ggagaaaccggggaa

SEQ ID NO: 379915 - DNA, 15 bp, Homo sapiens
tggagaaaccgggga

SEQ ID NO: 379916 - DNA, 15 bp, Homo sapiens
atggagaaaccgggg

SEQ ID NO: 379917 - DNA, 15 bp, Homo sapiens
gatggagaaaccggg

SEQ ID NO: 379918 - DNA, 15 bp, Homo sapiens
tgatggagaaaccgg

SEQ ID NO: 379919 - DNA, 15 bp, Homo sapiens
ttgatggagaaaccg

SEQ ID NO: 379920 - DNA, 15 bp, Homo sapiens
cttgatggagaaacc

SEQ ID NO: 379921 - DNA, 15 bp, Homo sapiens
ccttgatggagaaac

SEQ ID NO: 379922 - DNA, 15 bp, Homo sapiens
gccttgatggagaaa

SEQ ID NO: 379923 - DNA, 15 bp, Homo sapiens
agccttgatggagaa

SEQ ID NO: 379924 - DNA, 15 bp, Homo sapiens
aagccttgatggaga

SEQ ID NO: 379925 - DNA, 15 bp, Homo sapiens
aaagccttgatggag

SEQ ID NO: 379926 - DNA, 15 bp, Homo sapiens
gaaagccttgatgga

SEQ ID NO: 379927 - DNA, 15 bp, Homo sapiens
cgaaagccttgatgg

SEQ ID NO: 379928 - DNA, 15 bp, Homo sapiens
tcgaaagccttgatg

SEQ ID NO: 379929 - DNA, 15 bp, Homo sapiens
gtcgaaagccttgat

SEQ ID NO: 379930 - DNA, 15 bp, Homo sapiens
agtcgaaagccttga

SEQ ID NO: 379931 - DNA, 15 bp, Homo sapiens
tagtcgaaagccttg

SEQ ID NO: 379932 - DNA, 15 bp, Homo sapiens
gtagtcgaaagcctt

SEQ ID NO: 379933 - DNA, 15 bp, Homo sapiens
cgtagtcgaaagcct

SEQ ID NO: 379934 - DNA, 15 bp, Homo sapiens
tcgtagtcgaaagcc

SEQ ID NO: 379935 - DNA, 15 bp, Homo sapiens
ctcgtagtcgaaagc

SEQ ID NO: 379936 - DNA, 15 bp, Homo sapiens
tctcgtagtcgaaag

SEQ ID NO: 379937 - DNA, 15 bp, Homo sapiens
ttctcgtagtcgaaa

SEQ ID NO: 379938 - DNA, 15 bp, Homo sapiens
cttctcgtagtcgaa

SEQ ID NO: 379939 - DNA, 15 bp, Homo sapiens
ccttctcgtagtcga

SEQ ID NO: 379940 - DNA, 15 bp, Homo sapiens
gccttctcgtagtcg

SEQ ID NO: 379941 - DNA, 15 bp, Homo sapiens
cgccttctcgtagtc

SEQ ID NO: 379942 - DNA, 15 bp, Homo sapiens
acgccttctcgtagt

SEQ ID NO: 379943 - DNA, 15 bp, Homo sapiens
tacgccttctcgtag

SEQ ID NO: 379944 - DNA, 15 bp, Homo sapiens
gtacgccttctcgta

SEQ ID NO: 379945 - DNA, 15 bp, Homo sapiens
tgtacgccttctcgt

SEQ ID NO: 379946 - DNA, 15 bp, Homo sapiens
ctgtacgccttctcg

SEQ ID NO: 379947 - DNA, 15 bp, Homo sapiens
gctgtacgccttctc

SEQ ID NO: 379948 - DNA, 15 bp, Homo sapiens
ggctgtacgccttct

SEQ ID NO: 379949 - DNA, 15 bp, Homo sapiens
aggctgtacgccttc

SEQ ID NO: 379950 - DNA, 15 bp, Homo sapiens
caggctgtacgcctt

SEQ ID NO: 379951 - DNA, 15 bp, Homo sapiens
gcaggctgtacgcct

SEQ ID NO: 379952 - DNA, 15 bp, Homo sapiens
tgcaggctgtacgcc

SEQ ID NO: 379953 - DNA, 15 bp, Homo sapiens
ctgcaggctgtacgc

SEQ ID NO: 379954 - DNA, 15 bp, Homo sapiens
gctgcaggctgtacg

SEQ ID NO: 379955 - DNA, 15 bp, Homo sapiens
cgctgcaggctgtac

SEQ ID NO: 379956 - DNA, 15 bp, Homo sapiens
ccgctgcaggctgta

SEQ ID NO: 379957 - DNA, 15 bp, Homo sapiens
gccgctgcaggctgt

SEQ ID NO: 379958 - DNA, 15 bp, Homo sapiens
ggccgctgcaggctg

SEQ ID NO: 379959 - DNA, 15 bp, Homo sapiens
gggccgctgcaggct

SEQ ID NO: 379960 - DNA, 15 bp, Homo sapiens
tgggccgctgcaggc

SEQ ID NO: 379961 - DNA, 15 bp, Homo sapiens
ttgggccgctgcagg

SEQ ID NO: 379962 - DNA, 15 bp, Homo sapiens
attgggccgctgcag

SEQ ID NO: 379963 - DNA, 15 bp, Homo sapiens
cattgggccgctgca

SEQ ID NO: 379964 - DNA, 15 bp, Homo sapiens
tcattgggccgctgc

SEQ ID NO: 379965 - DNA, 15 bp, Homo sapiens
gtcattgggccgctg

SEQ ID NO: 379966 - DNA, 15 bp, Homo sapiens
ggtcattgggccgct

SEQ ID NO: 379967 - DNA, 15 bp, Homo sapiens
tggtcattgggccgc

SEQ ID NO: 379968 - DNA, 15 bp, Homo sapiens
gtggtcattgggccg

SEQ ID NO: 379969 - DNA, 15 bp, Homo sapiens
cgtggtcattgggcc

SEQ ID NO: 379970 - DNA, 15 bp, Homo sapiens
tcgtggtcattgggc

SEQ ID NO: 379971 - DNA, 15 bp, Homo sapiens
ctcgtggtcattggg

SEQ ID NO: 379972 - DNA, 15 bp, Homo sapiens
actcgtggtcattgg

SEQ ID NO: 379973 - DNA, 15 bp, Homo sapiens
aactcgtggtcattg

SEQ ID NO: 379974 - DNA, 15 bp, Homo sapiens
aaactcgtggtcatt

SEQ ID NO: 379975 - DNA, 15 bp, Homo sapiens
taaactcgtggtcat

SEQ ID NO: 379976 - DNA, 15 bp, Homo sapiens
ataaactcgtggtca

SEQ ID NO: 379977 - DNA, 15 bp, Homo sapiens
cataaactcgtggtc

SEQ ID NO: 379978 - DNA, 15 bp, Homo sapiens
gcataaactcgtggt

SEQ ID NO: 379979 - DNA, 15 bp, Homo sapiens
tgcataaactcgtgg

SEQ ID NO: 379980 - DNA, 15 bp, Homo sapiens
ctgcataaactcgtg

SEQ ID NO: 379981 - DNA, 15 bp, Homo sapiens
gctgcataaactcgt

SEQ ID NO: 379982 - DNA, 15 bp, Homo sapiens
tgctgcataaactcg

SEQ ID NO: 379983 - DNA, 15 bp, Homo sapiens
ctgctgcataaactc

SEQ ID NO: 379984 - DNA, 15 bp, Homo sapiens
gctgctgcataaact

SEQ ID NO: 379985 - DNA, 15 bp, Homo sapiens
ggctgctgcataaac

SEQ ID NO: 379986 - DNA, 15 bp, Homo sapiens
cggctgctgcataaa

SEQ ID NO: 379987 - DNA, 15 bp, Homo sapiens
acggctgctgcataa

SEQ ID NO: 379988 - DNA, 15 bp, Homo sapiens
cacggctgctgcata

SEQ ID NO: 379989 - DNA, 15 bp, Homo sapiens
ccacggctgctgcat

SEQ ID NO: 379990 - DNA, 15 bp, Homo sapiens
tccacggctgctgca

SEQ ID NO: 379991 - DNA, 15 bp, Homo sapiens
gtccacggctgctgc

SEQ ID NO: 379992 - DNA, 15 bp, Homo sapiens
cgtccacggctgctg

SEQ ID NO: 379993 - DNA, 15 bp, Homo sapiens
ccgtccacggctgct

SEQ ID NO: 379994 - DNA, 15 bp, Homo sapiens
cccgtccacggctgc

SEQ ID NO: 379995 - DNA, 15 bp, Homo sapiens
gcccgtccacggctg

SEQ ID NO: 379996 - DNA, 15 bp, Homo sapiens
agcccgtccacggct

SEQ ID NO: 379997 - DNA, 15 bp, Homo sapiens
aagcccgtccacggc

SEQ ID NO: 379998 - DNA, 15 bp, Homo sapiens
aaagcccgtccacgg

SEQ ID NO: 379999 - DNA, 15 bp, Homo sapiens
taaagcccgtccacg

SEQ ID NO: 380000 - DNA, 15 bp, Homo sapiens
gtaaagcccgtccac

SEQ ID NO: 380001 - DNA, 15 bp, Homo sapiens
ggtaaagcccgtcca

SEQ ID NO: 380002 - DNA, 15 bp, Homo sapiens
cggtaaagcccgtcc

SEQ ID NO: 380003 - DNA, 15 bp, Homo sapiens
acggtaaagcccgtc

SEQ ID NO: 380004 - DNA, 15 bp, Homo sapiens
cacggtaaagcccgt

SEQ ID NO: 380005 - DNA, 15 bp, Homo sapiens
gcacggtaaagcccg

SEQ ID NO: 380006 - DNA, 15 bp, Homo sapiens
tgcacggtaaagccc

SEQ ID NO: 380007 - DNA, 15 bp, Homo sapiens
ctgcacggtaaagcc

SEQ ID NO: 380008 - DNA, 15 bp, Homo sapiens
tctgcacggtaaagc

SEQ ID NO: 380009 - DNA, 15 bp, Homo sapiens
atctgcacggtaaag

SEQ ID NO: 380010 - DNA, 15 bp, Homo sapiens
gatctgcacggtaaa

SEQ ID NO: 380011 - DNA, 15 bp, Homo sapiens
tgatctgcacggtaa

SEQ ID NO: 380012 - DNA, 15 bp, Homo sapiens
ctgatctgcacggta

SEQ ID NO: 380013 - DNA, 15 bp, Homo sapiens
gctgatctgcacggt

SEQ ID NO: 380014 - DNA, 15 bp, Homo sapiens
agctgatctgcacgg

SEQ ID NO: 380015 - DNA, 15 bp, Homo sapiens
aagctgatctgcacg

SEQ ID NO: 380016 - DNA, 15 bp, Homo sapiens
aaagctgatctgcac

SEQ ID NO: 380017 - DNA, 15 bp, Homo sapiens
caaagctgatctgca

SEQ ID NO: 380018 - DNA, 15 bp, Homo sapiens
acaaagctgatctgc

SEQ ID NO: 380019 - DNA, 15 bp, Homo sapiens
cacaaagctgatctg

SEQ ID NO: 380020 - DNA, 15 bp, Homo sapiens
tcacaaagctgatct

SEQ ID NO: 380021 - DNA, 15 bp, Homo sapiens
ttcacaaagctgatc

SEQ ID NO: 380022 - DNA, 15 bp, Homo sapiens
cttcacaaagctgat

SEQ ID NO: 380023 - DNA, 15 bp, Homo sapiens
ccttcacaaagctga

SEQ ID NO: 380024 - DNA, 15 bp, Homo sapiens
cccttcacaaagctg

SEQ ID NO: 380025 - DNA, 15 bp, Homo sapiens
gcccttcacaaagct

SEQ ID NO: 380026 - DNA, 15 bp, Homo sapiens
agcccttcacaaagc

SEQ ID NO: 380027 - DNA, 15 bp, Homo sapiens
cagcccttcacaaag

SEQ ID NO: 380028 - DNA, 15 bp, Homo sapiens
ccagcccttcacaaa

SEQ ID NO: 380029 - DNA, 15 bp, Homo sapiens
cccagcccttcacaa

SEQ ID NO: 380030 - DNA, 15 bp, Homo sapiens
ccccagcccttcaca

SEQ ID NO: 380031 - DNA, 15 bp, Homo sapiens
gccccagcccttcac

SEQ ID NO: 380032 - DNA, 15 bp, Homo sapiens
ggccccagcccttca

SEQ ID NO: 380033 - DNA, 15 bp, Homo sapiens
tggccccagcccttc

SEQ ID NO: 380034 - DNA, 15 bp, Homo sapiens
ctggccccagccctt

SEQ ID NO: 380035 - DNA, 15 bp, Homo sapiens
actggccccagccct

SEQ ID NO: 380036 - DNA, 15 bp, Homo sapiens
cactggccccagccc

SEQ ID NO: 380037 - DNA, 15 bp, Homo sapiens
gcactggccccagcc

SEQ ID NO: 380038 - DNA, 15 bp, Homo sapiens
agcactggccccagc

SEQ ID NO: 380039 - DNA, 15 bp, Homo sapiens
tagcactggccccag

SEQ ID NO: 380040 - DNA, 15 bp, Homo sapiens
gtagcactggcccca

SEQ ID NO: 380041 - DNA, 15 bp, Homo sapiens
tgtagcactggcccc

SEQ ID NO: 380042 - DNA, 15 bp, Homo sapiens
gtgtagcactggccc

SEQ ID NO: 380043 - DNA, 15 bp, Homo sapiens
ggtgtagcactggcc

SEQ ID NO: 380044 - DNA, 15 bp, Homo sapiens
gggtgtagcactggc

SEQ ID NO: 380045 - DNA, 15 bp, Homo sapiens
cgggtgtagcactgg

SEQ ID NO: 380046 - DNA, 15 bp, Homo sapiens
gcgggtgtagcactg

SEQ ID NO: 380047 - DNA, 15 bp, Homo sapiens
ggcgggtgtagcact

SEQ ID NO: 380048 - DNA, 15 bp, Homo sapiens
tggcgggtgtagcac

SEQ ID NO: 380049 - DNA, 15 bp, Homo sapiens
ctggcgggtgtagca

SEQ ID NO: 380050 - DNA, 15 bp, Homo sapiens
actggcgggtgtagc

SEQ ID NO: 380051 - DNA, 15 bp, Homo sapiens
aactggcgggtgtag

SEQ ID NO: 380052 - DNA, 15 bp, Homo sapiens
gaactggcgggtgta

SEQ ID NO: 380053 - DNA, 15 bp, Homo sapiens
tgaactggcgggtgt

SEQ ID NO: 380054 - DNA, 15 bp, Homo sapiens
atgaactggcgggtg

SEQ ID NO: 380055 - DNA, 15 bp, Homo sapiens
gatgaactggcgggt

SEQ ID NO: 380056 - DNA, 15 bp, Homo sapiens
tgatgaactggcggg

SEQ ID NO: 380057 - DNA, 15 bp, Homo sapiens
ctgatgaactggcgg

SEQ ID NO: 380058 - DNA, 15 bp, Homo sapiens
gctgatgaactggcg

SEQ ID NO: 380059 - DNA, 15 bp, Homo sapiens
tgctgatgaactggc

SEQ ID NO: 380060 - DNA, 15 bp, Homo sapiens
ctgctgatgaactgg

SEQ ID NO: 380061 - DNA, 15 bp, Homo sapiens
gctgctgatgaactg

SEQ ID NO: 380062 - DNA, 15 bp, Homo sapiens
agctgctgatgaact

SEQ ID NO: 380063 - DNA, 15 bp, Homo sapiens
cagctgctgatgaac

SEQ ID NO: 380064 - DNA, 15 bp, Homo sapiens
gcagctgctgatgaa

SEQ ID NO: 380065 - DNA, 15 bp, Homo sapiens
ggcagctgctgatga

SEQ ID NO: 380066 - DNA, 15 bp, Homo sapiens
gggcagctgctgatg

SEQ ID NO: 380067 - DNA, 15 bp, Homo sapiens
cgggcagctgctgat

SEQ ID NO: 380068 - DNA, 15 bp, Homo sapiens
acgggcagctgctga

SEQ ID NO: 380069 - DNA, 15 bp, Homo sapiens
cacgggcagctgctg

SEQ ID NO: 380070 - DNA, 15 bp, Homo sapiens
gcacgggcagctgct

SEQ ID NO: 380071 - DNA, 15 bp, Homo sapiens
agcacgggcagctgc

SEQ ID NO: 380072 - DNA, 15 bp, Homo sapiens
cagcacgggcagctg

SEQ ID NO: 380073 - DNA, 15 bp, Homo sapiens
ccagcacgggcagct

SEQ ID NO: 380074 - DNA, 15 bp, Homo sapiens
gccagcacgggcagc

SEQ ID NO: 380075 - DNA, 15 bp, Homo sapiens
agccagcacgggcag

SEQ ID NO: 380076 - DNA, 15 bp, Homo sapiens
tagccagcacgggca

SEQ ID NO: 380077 - DNA, 15 bp, Homo sapiens
ctagccagcacgggc

SEQ ID NO: 380078 - DNA, 15 bp, Homo sapiens
tctagccagcacggg

SEQ ID NO: 380079 - DNA, 15 bp, Homo sapiens
ctctagccagcacgg

SEQ ID NO: 380080 - DNA, 15 bp, Homo sapiens
cctctagccagcacg

SEQ ID NO: 380081 - DNA, 15 bp, Homo sapiens
acctctagccagcac

SEQ ID NO: 380082 - DNA, 15 bp, Homo sapiens
gacctctagccagca

SEQ ID NO: 380083 - DNA, 15 bp, Homo sapiens
tgacctctagccagc

SEQ ID NO: 380084 - DNA, 15 bp, Homo sapiens
atgacctctagccag

SEQ ID NO: 380085 - DNA, 15 bp, Homo sapiens
gatgacctctagcca

SEQ ID NO: 380086 - DNA, 15 bp, Homo sapiens
agatgacctctagcc

SEQ ID NO: 380087 - DNA, 15 bp, Homo sapiens
aagatgacctctagc

SEQ ID NO: 380088 - DNA, 15 bp, Homo sapiens
gaagatgacctctag

SEQ ID NO: 380089 - DNA, 15 bp, Homo sapiens
tgaagatgacctcta

SEQ ID NO: 380090 - DNA, 15 bp, Homo sapiens
ttgaagatgacctct

SEQ ID NO: 380091 - DNA, 15 bp, Homo sapiens
gttgaagatgacctc

SEQ ID NO: 380092 - DNA, 15 bp, Homo sapiens
tgttgaagatgacct

SEQ ID NO: 380093 - DNA, 15 bp, Homo sapiens
ctgttgaagatgacc

SEQ ID NO: 380094 - DNA, 15 bp, Homo sapiens
gctgttgaagatgac

SEQ ID NO: 380095 - DNA, 15 bp, Homo sapiens
ggctgttgaagatga

SEQ ID NO: 380096 - DNA, 15 bp, Homo sapiens
cggctgttgaagatg

SEQ ID NO: 380097 - DNA, 15 bp, Homo sapiens
ccggctgttgaagat

SEQ ID NO: 380098 - DNA, 15 bp, Homo sapiens
accggctgttgaaga

SEQ ID NO: 380099 - DNA, 15 bp, Homo sapiens
taccggctgttgaag

SEQ ID NO: 380100 - DNA, 15 bp, Homo sapiens
ctaccggctgttgaa

SEQ ID NO: 380101 - DNA, 15 bp, Homo sapiens
gctaccggctgttga

SEQ ID NO: 380102 - DNA, 15 bp, Homo sapiens
ggctaccggctgttg

SEQ ID NO: 380103 - DNA, 15 bp, Homo sapiens
cggctaccggctgtt

SEQ ID NO: 380104 - DNA, 15 bp, Homo sapiens
gcggctaccggctgt

SEQ ID NO: 380105 - DNA, 15 bp, Homo sapiens
cgcggctaccggctg

SEQ ID NO: 380106 - DNA, 15 bp, Homo sapiens
acgcggctaccggct

SEQ ID NO: 380107 - DNA, 15 bp, Homo sapiens
cacgcggctaccggc

SEQ ID NO: 380108 - DNA, 15 bp, Homo sapiens
gcacgcggctaccgg

SEQ ID NO: 380109 - DNA, 15 bp, Homo sapiens
cgcacgcggctaccg

SEQ ID NO: 380110 - DNA, 15 bp, Homo sapiens
ccgcacgcggctacc

SEQ ID NO: 380111 - DNA, 15 bp, Homo sapiens
tccgcacgcggctac

SEQ ID NO: 380112 - DNA, 15 bp, Homo sapiens
ctccgcacgcggcta

SEQ ID NO: 380113 - DNA, 15 bp, Homo sapiens
cctccgcacgcggct

SEQ ID NO: 380114 - DNA, 15 bp, Homo sapiens
ccctccgcacgcggc

SEQ ID NO: 380115 - DNA, 15 bp, Homo sapiens
cccctccgcacgcgg

SEQ ID NO: 380116 - DNA, 15 bp, Homo sapiens
tcccctccgcacgcg

SEQ ID NO: 380117 - DNA, 15 bp, Homo sapiens
gtcccctccgcacgc

SEQ ID NO: 380118 - DNA, 15 bp, Homo sapiens
tgtcccctccgcacg

SEQ ID NO: 380119 - DNA, 15 bp, Homo sapiens
ctgtcccctccgcac

SEQ ID NO: 380120 - DNA, 15 bp, Homo sapiens
tctgtcccctccgca

SEQ ID NO: 380121 - DNA, 15 bp, Homo sapiens
ctctgtcccctccgc

SEQ ID NO: 380122 - DNA, 15 bp, Homo sapiens
gctctgtcccctccg

SEQ ID NO: 380123 - DNA, 15 bp, Homo sapiens
cgctctgtcccctcc

SEQ ID NO: 380124 - DNA, 15 bp, Homo sapiens
acgctctgtcccctc

SEQ ID NO: 380125 - DNA, 15 bp, Homo sapiens
cacgctctgtcccct

SEQ ID NO: 380126 - DNA, 15 bp, Homo sapiens
tcacgctctgtcccc

SEQ ID NO: 380127 - DNA, 15 bp, Homo sapiens
ctcacgctctgtccc

SEQ ID NO: 380128 - DNA, 15 bp, Homo sapiens
gctcacgctctgtcc

SEQ ID NO: 380129 - DNA, 15 bp, Homo sapiens
agctcacgctctgtc

SEQ ID NO: 380130 - DNA, 15 bp, Homo sapiens
cagctcacgctctgt

SEQ ID NO: 380131 - DNA, 15 bp, Homo sapiens
tcagctcacgctctg

SEQ ID NO: 380132 - DNA, 15 bp, Homo sapiens
ctcagctcacgctct

SEQ ID NO: 380133 - DNA, 15 bp, Homo sapiens
gctcagctcacgctc

SEQ ID NO: 380134 - DNA, 15 bp, Homo sapiens
tgctcagctcacgct

SEQ ID NO: 380135 - DNA, 15 bp, Homo sapiens
ctgctcagctcacgc

SEQ ID NO: 380136 - DNA, 15 bp, Homo sapiens
cctgctcagctcacg

SEQ ID NO: 380137 - DNA, 15 bp, Homo sapiens
gcctgctcagctcac

SEQ ID NO: 380138 - DNA, 15 bp, Homo sapiens
ggcctgctcagctca

SEQ ID NO: 380139 - DNA, 15 bp, Homo sapiens
tggcctgctcagctc

SEQ ID NO: 380140 - DNA, 15 bp, Homo sapiens
gtggcctgctcagct

SEQ ID NO: 380141 - DNA, 15 bp, Homo sapiens
tgtggcctgctcagc

SEQ ID NO: 380142 - DNA, 15 bp, Homo sapiens
gtgtggcctgctcag

SEQ ID NO: 380143 - DNA, 15 bp, Homo sapiens
agtgtggcctgctca

SEQ ID NO: 380144 - DNA, 15 bp, Homo sapiens
aagtgtggcctgctc

SEQ ID NO: 380145 - DNA, 15 bp, Homo sapiens
gaagtgtggcctgct

SEQ ID NO: 380146 - DNA, 15 bp, Homo sapiens
tgaagtgtggcctgc

SEQ ID NO: 380147 - DNA, 15 bp, Homo sapiens
ttgaagtgtggcctg

SEQ ID NO: 380148 - DNA, 15 bp, Homo sapiens
tttgaagtgtggcct

SEQ ID NO: 380149 - DNA, 15 bp, Homo sapiens
gtttgaagtgtggcc

SEQ ID NO: 380150 - DNA, 15 bp, Homo sapiens
agtttgaagtgtggc

SEQ ID NO: 380151 - DNA, 15 bp, Homo sapiens
tagtttgaagtgtgg

SEQ ID NO: 380152 - DNA, 15 bp, Homo sapiens
gtagtttgaagtgtg

SEQ ID NO: 380153 - DNA, 15 bp, Homo sapiens
agtagtttgaagtgt

SEQ ID NO: 380154 - DNA, 15 bp, Homo sapiens
aagtagtttgaagtg

SEQ ID NO: 380155 - DNA, 15 bp, Homo sapiens
aaagtagtttgaagt

SEQ ID NO: 380156 - DNA, 15 bp, Homo sapiens
caaagtagtttgaag

SEQ ID NO: 380157 - DNA, 15 bp, Homo sapiens
gcaaagtagtttgaa

SEQ ID NO: 380158 - DNA, 15 bp, Homo sapiens
agcaaagtagtttga

SEQ ID NO: 380159 - DNA, 15 bp, Homo sapiens
cagcaaagtagtttg

SEQ ID NO: 380160 - DNA, 15 bp, Homo sapiens
gcagcaaagtagttt

SEQ ID NO: 380161 - DNA, 15 bp, Homo sapiens
agcagcaaagtagtt

SEQ ID NO: 380162 - DNA, 15 bp, Homo sapiens
tagcagcaaagtagt

SEQ ID NO: 380163 - DNA, 15 bp, Homo sapiens
ttagcagcaaagtag

SEQ ID NO: 380164 - DNA, 15 bp, Homo sapiens
attagcagcaaagta

SEQ ID NO: 380165 - DNA, 15 bp, Homo sapiens
tattagcagcaaagt

SEQ ID NO: 380166 - DNA, 15 bp, Homo sapiens
atattagcagcaaag

SEQ ID NO: 380167 - DNA, 15 bp, Homo sapiens
aatattagcagcaaa

SEQ ID NO: 380168 - DNA, 15 bp, Homo sapiens
aaatattagcagcaa

SEQ ID NO: 380169 - DNA, 15 bp, Homo sapiens
aaaatattagcagca

SEQ ID NO: 380170 - DNA, 15 bp, Homo sapiens
gaaaatattagcagc

SEQ ID NO: 380171 - DNA, 15 bp, Homo sapiens
ggaaaatattagcag

SEQ ID NO: 380172 - DNA, 15 bp, Homo sapiens
aggaaaatattagca

SEQ ID NO: 380173 - DNA, 15 bp, Homo sapiens
gaggaaaatattagc

SEQ ID NO: 380174 - DNA, 15 bp, Homo sapiens
ggaggaaaatattag

SEQ ID NO: 380175 - DNA, 15 bp, Homo sapiens
aggaggaaaatatta

SEQ ID NO: 380176 - DNA, 15 bp, Homo sapiens
caggaggaaaatatt

SEQ ID NO: 380177 - DNA, 15 bp, Homo sapiens
tcaggaggaaaatat

SEQ ID NO: 380178 - DNA, 15 bp, Homo sapiens
ctcaggaggaaaata

SEQ ID NO: 380179 - DNA, 15 bp, Homo sapiens
actcaggaggaaaat

SEQ ID NO: 380180 - DNA, 15 bp, Homo sapiens
cactcaggaggaaaa

SEQ ID NO: 380181 - DNA, 15 bp, Homo sapiens
gcactcaggaggaaa

SEQ ID NO: 380182 - DNA, 15 bp, Homo sapiens
agcactcaggaggaa

SEQ ID NO: 380183 - DNA, 15 bp, Homo sapiens
aagcactcaggagga

SEQ ID NO: 380184 - DNA, 15 bp, Homo sapiens
caagcactcaggagg

SEQ ID NO: 380185 - DNA, 15 bp, Homo sapiens
gcaagcactcaggag

SEQ ID NO: 380186 - DNA, 15 bp, Homo sapiens
agcaagcactcagga

SEQ ID NO: 380187 - DNA, 15 bp, Homo sapiens
aagcaagcactcagg

SEQ ID NO: 380188 - DNA, 15 bp, Homo sapiens
aaagcaagcactcag

SEQ ID NO: 380189 - DNA, 15 bp, Homo sapiens
aaaagcaagcactca

SEQ ID NO: 380190 - DNA, 15 bp, Homo sapiens
gaaaagcaagcactc

SEQ ID NO: 380191 - DNA, 15 bp, Homo sapiens
tgaaaagcaagcact

SEQ ID NO: 380192 - DNA, 15 bp, Homo sapiens
atgaaaagcaagcac

SEQ ID NO: 380193 - DNA, 15 bp, Homo sapiens
catgaaaagcaagca

SEQ ID NO: 380194 - DNA, 15 bp, Homo sapiens
gcatgaaaagcaagc

SEQ ID NO: 380195 - DNA, 15 bp, Homo sapiens
tgcatgaaaagcaag

SEQ ID NO: 380196 - DNA, 15 bp, Homo sapiens
ttgcatgaaaagcaa

SEQ ID NO: 380197 - DNA, 15 bp, Homo sapiens
tttgcatgaaaagca

SEQ ID NO: 380198 - DNA, 15 bp, Homo sapiens
gtttgcatgaaaagc

SEQ ID NO: 380199 - DNA, 15 bp, Homo sapiens
agtttgcatgaaaag

SEQ ID NO: 380200 - DNA, 15 bp, Homo sapiens
gagtttgcatgaaaa

SEQ ID NO: 380201 - DNA, 15 bp, Homo sapiens
agagtttgcatgaaa

SEQ ID NO: 380202 - DNA, 15 bp, Homo sapiens
aagagtttgcatgaa

SEQ ID NO: 380203 - DNA, 15 bp, Homo sapiens
aaagagtttgcatga

SEQ ID NO: 380204 - DNA, 15 bp, Homo sapiens
caaagagtttgcatg

SEQ ID NO: 380205 - DNA, 15 bp, Homo sapiens
ccaaagagtttgcat

SEQ ID NO: 380206 - DNA, 15 bp, Homo sapiens
accaaagagtttgca

SEQ ID NO: 380207 - DNA, 15 bp, Homo sapiens
gaccaaagagtttgc

SEQ ID NO: 380208 - DNA, 15 bp, Homo sapiens
cgaccaaagagtttg

SEQ ID NO: 380209 - DNA, 15 bp, Homo sapiens
acgaccaaagagttt

SEQ ID NO: 380210 - DNA, 15 bp, Homo sapiens
aacgaccaaagagtt

SEQ ID NO: 380211 - DNA, 15 bp, Homo sapiens
aaacgaccaaagagt

SEQ ID NO: 380212 - DNA, 15 bp, Homo sapiens
aaaacgaccaaagag

SEQ ID NO: 380213 - DNA, 15 bp, Homo sapiens
aaaaacgaccaaaga

SEQ ID NO: 380214 - DNA, 15 bp, Homo sapiens
aaaaaacgaccaaag

SEQ ID NO: 380215 - DNA, 15 bp, Homo sapiens
aaaaaaacgaccaaa

SEQ ID NO: 380216 - DNA, 15 bp, Homo sapiens
aaaaaaaacgaccaa

SEQ ID NO: 380217 - DNA, 15 bp, Homo sapiens
aaaaaaaaacgacca

SEQ ID NO: 380218 - DNA, 15 bp, Homo sapiens
aaaaaaaaaacgacc

SEQ ID NO: 380219 - DNA, 15 bp, Homo sapiens
caaaaaaaaaacgac

SEQ ID NO: 380220 - DNA, 15 bp, Homo sapiens
acaaaaaaaaaacga

SEQ ID NO: 380221 - DNA, 15 bp, Homo sapiens
aacaaaaaaaaaacg

SEQ ID NO: 380222 - DNA, 15 bp, Homo sapiens
aaacaaaaaaaaaac

SEQ ID NO: 380223 - DNA, 15 bp, Homo sapiens
caaacaaaaaaaaaa

SEQ ID NO: 380224 - DNA, 15 bp, Homo sapiens
acaaacaaaaaaaaa

SEQ ID NO: 380225 - DNA, 15 bp, Homo sapiens
aacaaacaaaaaaaa

SEQ ID NO: 380226 - DNA, 15 bp, Homo sapiens
caacaaacaaaaaaa

SEQ ID NO: 380227 - DNA, 15 bp, Homo sapiens
ccaacaaacaaaaaa

SEQ ID NO: 380228 - DNA, 15 bp, Homo sapiens
accaacaaacaaaaa

SEQ ID NO: 380229 - DNA, 15 bp, Homo sapiens
aaccaacaaacaaaa

SEQ ID NO: 380230 - DNA, 15 bp, Homo sapiens
caaccaacaaacaaa

SEQ ID NO: 380231 - DNA, 15 bp, Homo sapiens
ccaaccaacaaacaa

SEQ ID NO: 380232 - DNA, 15 bp, Homo sapiens
accaaccaacaaaca

SEQ ID NO: 380233 - DNA, 15 bp, Homo sapiens
aaccaaccaacaaac

SEQ ID NO: 380234 - DNA, 15 bp, Homo sapiens
aaaccaaccaacaaa

SEQ ID NO: 380235 - DNA, 15 bp, Homo sapiens
aaaaccaaccaacaa

SEQ ID NO: 380236 - DNA, 15 bp, Homo sapiens
gaaaaccaaccaaca

SEQ ID NO: 380237 - DNA, 15 bp, Homo sapiens
agaaaaccaaccaac

SEQ ID NO: 380238 - DNA, 15 bp, Homo sapiens
aagaaaaccaaccaa

SEQ ID NO: 380239 - DNA, 15 bp, Homo sapiens
gaagaaaaccaacca

SEQ ID NO: 380240 - DNA, 15 bp, Homo sapiens
agaagaaaaccaacc

SEQ ID NO: 380241 - DNA, 15 bp, Homo sapiens
aagaagaaaaccaac

SEQ ID NO: 380242 - DNA, 15 bp, Homo sapiens
gaagaagaaaaccaa

SEQ ID NO: 380243 - DNA, 15 bp, Homo sapiens
agaagaagaaaacca

SEQ ID NO: 380244 - DNA, 15 bp, Homo sapiens
gagaagaagaaaacc

SEQ ID NO: 380245 - DNA, 15 bp, Homo sapiens
cgagaagaagaaaac

SEQ ID NO: 380246 - DNA, 15 bp, Homo sapiens
acgagaagaagaaaa

SEQ ID NO: 380247 - DNA, 15 bp, Homo sapiens
gacgagaagaagaaa

SEQ ID NO: 380248 - DNA, 15 bp, Homo sapiens
ggacgagaagaagaa

SEQ ID NO: 380249 - DNA, 15 bp, Homo sapiens
aggacgagaagaaga

SEQ ID NO: 380250 - DNA, 15 bp, Homo sapiens
gaggacgagaagaag

SEQ ID NO: 380251 - DNA, 15 bp, Homo sapiens
cgaggacgagaagaa

SEQ ID NO: 380252 - DNA, 15 bp, Homo sapiens
acgaggacgagaaga

SEQ ID NO: 380253 - DNA, 15 bp, Homo sapiens
aacgaggacgagaag

SEQ ID NO: 380254 - DNA, 15 bp, Homo sapiens
aaacgaggacgagaa

SEQ ID NO: 380255 - DNA, 15 bp, Homo sapiens
caaacgaggacgaga

SEQ ID NO: 380256 - DNA, 15 bp, Homo sapiens
acaaacgaggacgag

SEQ ID NO: 380257 - DNA, 15 bp, Homo sapiens
cacaaacgaggacga

SEQ ID NO: 380258 - DNA, 15 bp, Homo sapiens
acacaaacgaggacg

SEQ ID NO: 380259 - DNA, 15 bp, Homo sapiens
aacacaaacgaggac

SEQ ID NO: 380260 - DNA, 15 bp, Homo sapiens
gaacacaaacgagga

SEQ ID NO: 380261 - DNA, 15 bp, Homo sapiens
agaacacaaacgagg

SEQ ID NO: 380262 - DNA, 15 bp, Homo sapiens
cagaacacaaacgag

SEQ ID NO: 380263 - DNA, 15 bp, Homo sapiens
acagaacacaaacga

SEQ ID NO: 380264 - DNA, 15 bp, Homo sapiens
aacagaacacaaacg

SEQ ID NO: 380265 - DNA, 15 bp, Homo sapiens
aaacagaacacaaac

SEQ ID NO: 380266 - DNA, 15 bp, Homo sapiens
aaaacagaacacaaa

SEQ ID NO: 380267 - DNA, 15 bp, Homo sapiens
caaaacagaacacaa

SEQ ID NO: 380268 - DNA, 15 bp, Homo sapiens
acaaaacagaacaca

SEQ ID NO: 380269 - DNA, 15 bp, Homo sapiens
aacaaaacagaacac

SEQ ID NO: 380270 - DNA, 15 bp, Homo sapiens
aaacaaaacagaaca

SEQ ID NO: 380271 - DNA, 15 bp, Homo sapiens
gaaacaaaacagaac

SEQ ID NO: 380272 - DNA, 15 bp, Homo sapiens
cgaaacaaaacagaa

SEQ ID NO: 380273 - DNA, 15 bp, Homo sapiens
gcgaaacaaaacaga

SEQ ID NO: 380274 - DNA, 15 bp, Homo sapiens
agcgaaacaaaacag

SEQ ID NO: 380275 - DNA, 15 bp, Homo sapiens
gagcgaaacaaaaca

SEQ ID NO: 380276 - DNA, 15 bp, Homo sapiens
agagcgaaacaaaac

SEQ ID NO: 380277 - DNA, 15 bp, Homo sapiens
aagagcgaaacaaaa

SEQ ID NO: 380278 - DNA, 15 bp, Homo sapiens
aaagagcgaaacaaa

SEQ ID NO: 380279 - DNA, 15 bp, Homo sapiens
caaagagcgaaacaa

SEQ ID NO: 380280 - DNA, 15 bp, Homo sapiens
tcaaagagcgaaaca

SEQ ID NO: 380281 - DNA, 15 bp, Homo sapiens
ctcaaagagcgaaac

SEQ ID NO: 380282 - DNA, 15 bp, Homo sapiens
tctcaaagagcgaaa

SEQ ID NO: 380283 - DNA, 15 bp, Homo sapiens
ttctcaaagagcgaa

SEQ ID NO: 380284 - DNA, 15 bp, Homo sapiens
tttctcaaagagcga

SEQ ID NO: 380285 - DNA, 15 bp, Homo sapiens
atttctcaaagagcg

SEQ ID NO: 380286 - DNA, 15 bp, Homo sapiens
tatttctcaaagagc

SEQ ID NO: 380287 - DNA, 15 bp, Homo sapiens
ctatttctcaaagag

SEQ ID NO: 380288 - DNA, 15 bp, Homo sapiens
gctatttctcaaaga

SEQ ID NO: 380289 - DNA, 15 bp, Homo sapiens
agctatttctcaaag

SEQ ID NO: 380290 - DNA, 15 bp, Homo sapiens
aagctatttctcaaa

SEQ ID NO: 380291 - DNA, 15 bp, Homo sapiens
taagctatttctcaa

SEQ ID NO: 380292 - DNA, 15 bp, Homo sapiens
ataagctatttctca

SEQ ID NO: 380293 - DNA, 15 bp, Homo sapiens
cataagctatttctc

SEQ ID NO: 380294 - DNA, 15 bp, Homo sapiens
tcataagctatttct

SEQ ID NO: 380295 - DNA, 15 bp, Homo sapiens
ttcataagctatttc

SEQ ID NO: 380296 - DNA, 15 bp, Homo sapiens
tttcataagctattt

SEQ ID NO: 380297 - DNA, 15 bp, Homo sapiens
ttttcataagctatt

SEQ ID NO: 380298 - DNA, 15 bp, Homo sapiens
cttttcataagctat

SEQ ID NO: 380299 - DNA, 15 bp, Homo sapiens
tcttttcataagcta

SEQ ID NO: 380300 - DNA, 15 bp, Homo sapiens
ttcttttcataagct

SEQ ID NO: 380301 - DNA, 15 bp, Homo sapiens
attcttttcataagc

SEQ ID NO: 380302 - DNA, 15 bp, Homo sapiens
aattcttttcataag

SEQ ID NO: 380303 - DNA, 15 bp, Homo sapiens
caattcttttcataa

SEQ ID NO: 380304 - DNA, 15 bp, Homo sapiens
acaattcttttcata

SEQ ID NO: 380305 - DNA, 15 bp, Homo sapiens
aacaattcttttcat

SEQ ID NO: 380306 - DNA, 15 bp, Homo sapiens
caacaattcttttca

SEQ ID NO: 380307 - DNA, 15 bp, Homo sapiens
ccaacaattcttttc

SEQ ID NO: 380308 - DNA, 15 bp, Homo sapiens
cccaacaattctttt

SEQ ID NO: 380309 - DNA, 15 bp, Homo sapiens
ccccaacaattcttt

SEQ ID NO: 380310 - DNA, 15 bp, Homo sapiens
cccccaacaattctt

SEQ ID NO: 380311 - DNA, 15 bp, Homo sapiens
acccccaacaattct

SEQ ID NO: 380312 - DNA, 15 bp, Homo sapiens
aacccccaacaattc

SEQ ID NO: 380313 - DNA, 15 bp, Homo sapiens
aaacccccaacaatt

SEQ ID NO: 380314 - DNA, 15 bp, Homo sapiens
aaaacccccaacaat

SEQ ID NO: 380315 - DNA, 15 bp, Homo sapiens
aaaaacccccaacaa

SEQ ID NO: 380316 - DNA, 15 bp, Homo sapiens
aaaaaacccccaaca

SEQ ID NO: 380317 - DNA, 15 bp, Homo sapiens
aaaaaaacccccaac

SEQ ID NO: 380318 - DNA, 15 bp, Homo sapiens
caaaaaaacccccaa

SEQ ID NO: 380319 - DNA, 15 bp, Homo sapiens
ccaaaaaaaccccca

SEQ ID NO: 380320 - DNA, 15 bp, Homo sapiens
tccaaaaaaaccccc

SEQ ID NO: 380321 - DNA, 15 bp, Homo sapiens
ttccaaaaaaacccc

SEQ ID NO: 380322 - DNA, 15 bp, Homo sapiens
cttccaaaaaaaccc

SEQ ID NO: 380323 - DNA, 15 bp, Homo sapiens
tcttccaaaaaaacc

SEQ ID NO: 380324 - DNA, 15 bp, Homo sapiens
ttcttccaaaaaaac

SEQ ID NO: 380325 - DNA, 15 bp, Homo sapiens
cttcttccaaaaaaa

SEQ ID NO: 380326 - DNA, 15 bp, Homo sapiens
ccttcttccaaaaaa

SEQ ID NO: 380327 - DNA, 15 bp, Homo sapiens
cccttcttccaaaaa

SEQ ID NO: 380328 - DNA, 15 bp, Homo sapiens
ccccttcttccaaaa

SEQ ID NO: 380329 - DNA, 15 bp, Homo sapiens
gccccttcttccaaa

SEQ ID NO: 380330 - DNA, 15 bp, Homo sapiens
tgccccttcttccaa

SEQ ID NO: 380331 - DNA, 15 bp, Homo sapiens
ctgccccttcttcca

SEQ ID NO: 380332 - DNA, 15 bp, Homo sapiens
cctgccccttcttcc

SEQ ID NO: 380333 - DNA, 15 bp, Homo sapiens
acctgccccttcttc

SEQ ID NO: 380334 - DNA, 15 bp, Homo sapiens
tacctgccccttctt

SEQ ID NO: 380335 - DNA, 15 bp, Homo sapiens
atacctgccccttct

SEQ ID NO: 380336 - DNA, 15 bp, Homo sapiens
catacctgccccttc

SEQ ID NO: 380337 - DNA, 15 bp, Homo sapiens
tcatacctgcccctt

SEQ ID NO: 380338 - DNA, 15 bp, Homo sapiens
atcatacctgcccct

SEQ ID NO: 380339 - DNA, 15 bp, Homo sapiens
gatcatacctgcccc

SEQ ID NO: 380340 - DNA, 15 bp, Homo sapiens
cgatcatacctgccc

SEQ ID NO: 380341 - DNA, 15 bp, Homo sapiens
ccgatcatacctgcc

SEQ ID NO: 380342 - DNA, 15 bp, Homo sapiens
gccgatcatacctgc

SEQ ID NO: 380343 - DNA, 15 bp, Homo sapiens
tgccgatcatacctg

SEQ ID NO: 380344 - DNA, 15 bp, Homo sapiens
ctgccgatcatacct

SEQ ID NO: 380345 - DNA, 15 bp, Homo sapiens
cctgccgatcatacc

SEQ ID NO: 380346 - DNA, 15 bp, Homo sapiens
tcctgccgatcatac

SEQ ID NO: 380347 - DNA, 15 bp, Homo sapiens
gtcctgccgatcata

SEQ ID NO: 380348 - DNA, 15 bp, Homo sapiens
tgtcctgccgatcat

SEQ ID NO: 380349 - DNA, 15 bp, Homo sapiens
gtgtcctgccgatca

SEQ ID NO: 380350 - DNA, 15 bp, Homo sapiens
ggtgtcctgccgatc

SEQ ID NO: 380351 - DNA, 15 bp, Homo sapiens
gggtgtcctgccgat

SEQ ID NO: 380352 - DNA, 15 bp, Homo sapiens
agggtgtcctgccga

SEQ ID NO: 380353 - DNA, 15 bp, Homo sapiens
cagggtgtcctgccg

SEQ ID NO: 380354 - DNA, 15 bp, Homo sapiens
tcagggtgtcctgcc

SEQ ID NO: 380355 - DNA, 15 bp, Homo sapiens
atcagggtgtcctgc

SEQ ID NO: 380356 - DNA, 15 bp, Homo sapiens
tatcagggtgtcctg

SEQ ID NO: 380357 - DNA, 15 bp, Homo sapiens
ctatcagggtgtcct

SEQ ID NO: 380358 - DNA, 15 bp, Homo sapiens
cctatcagggtgtcc

SEQ ID NO: 380359 - DNA, 15 bp, Homo sapiens
tcctatcagggtgtc

SEQ ID NO: 380360 - DNA, 15 bp, Homo sapiens
ttcctatcagggtgt

SEQ ID NO: 380361 - DNA, 15 bp, Homo sapiens
cttcctatcagggtg

SEQ ID NO: 380362 - DNA, 15 bp, Homo sapiens
tcttcctatcagggt

SEQ ID NO: 380363 - DNA, 15 bp, Homo sapiens
ctcttcctatcaggg

SEQ ID NO: 380364 - DNA, 15 bp, Homo sapiens
cctcttcctatcagg

SEQ ID NO: 380365 - DNA, 15 bp, Homo sapiens
ccctcttcctatcag

SEQ ID NO: 380366 - DNA, 15 bp, Homo sapiens
cccctcttcctatca

SEQ ID NO: 380367 - DNA, 15 bp, Homo sapiens
tcccctcttcctatc

SEQ ID NO: 380368 - DNA, 15 bp, Homo sapiens
ttcccctcttcctat

SEQ ID NO: 380369 - DNA, 15 bp, Homo sapiens
cttcccctcttccta

SEQ ID NO: 380370 - DNA, 15 bp, Homo sapiens
gcttcccctcttcct

SEQ ID NO: 380371 - DNA, 15 bp, Homo sapiens
tgcttcccctcttcc

SEQ ID NO: 380372 - DNA, 15 bp, Homo sapiens
ctgcttcccctcttc

SEQ ID NO: 380373 - DNA, 15 bp, Homo sapiens
tctgcttcccctctt

SEQ ID NO: 380374 - DNA, 15 bp, Homo sapiens
ttctgcttcccctct

SEQ ID NO: 380375 - DNA, 15 bp, Homo sapiens
tttctgcttcccctc

SEQ ID NO: 380376 - DNA, 15 bp, Homo sapiens
atttctgcttcccct

SEQ ID NO: 380377 - DNA, 15 bp, Homo sapiens
gatttctgcttcccc

SEQ ID NO: 380378 - DNA, 15 bp, Homo sapiens
ggatttctgcttccc

SEQ ID NO: 380379 - DNA, 15 bp, Homo sapiens
tggatttctgcttcc

SEQ ID NO: 380380 - DNA, 15 bp, Homo sapiens
ttggatttctgcttc

SEQ ID NO: 380381 - DNA, 15 bp, Homo sapiens
cttggatttctgctt

SEQ ID NO: 380382 - DNA, 15 bp, Homo sapiens
gcttggatttctgct

SEQ ID NO: 380383 - DNA, 15 bp, Homo sapiens
tgcttggatttctgc

SEQ ID NO: 380384 - DNA, 15 bp, Homo sapiens
gtgcttggatttctg

SEQ ID NO: 380385 - DNA, 15 bp, Homo sapiens
ggtgcttggatttct

SEQ ID NO: 380386 - DNA, 15 bp, Homo sapiens
tggtgcttggatttc

SEQ ID NO: 380387 - DNA, 15 bp, Homo sapiens
gtggtgcttggattt

SEQ ID NO: 380388 - DNA, 15 bp, Homo sapiens
ggtggtgcttggatt

SEQ ID NO: 380389 - DNA, 15 bp, Homo sapiens
tggtggtgcttggat

SEQ ID NO: 380390 - DNA, 15 bp, Homo sapiens
ttggtggtgcttgga

SEQ ID NO: 380391 - DNA, 15 bp, Homo sapiens
tttggtggtgcttgg

SEQ ID NO: 380392 - DNA, 15 bp, Homo sapiens
gtttggtggtgcttg

SEQ ID NO: 380393 - DNA, 15 bp, Homo sapiens
tgtttggtggtgctt

SEQ ID NO: 380394 - DNA, 15 bp, Homo sapiens
gtgtttggtggtgct

SEQ ID NO: 380395 - DNA, 15 bp, Homo sapiens
tgtgtttggtggtgc

SEQ ID NO: 380396 - DNA, 15 bp, Homo sapiens
ctgtgtttggtggtg

SEQ ID NO: 380397 - DNA, 15 bp, Homo sapiens
actgtgtttggtggt

SEQ ID NO: 380398 - DNA, 15 bp, Homo sapiens
cactgtgtttggtgg

SEQ ID NO: 380399 - DNA, 15 bp, Homo sapiens
acactgtgtttggtg

SEQ ID NO: 380400 - DNA, 15 bp, Homo sapiens
tacactgtgtttggt

SEQ ID NO: 380401 - DNA, 15 bp, Homo sapiens
atacactgtgtttgg

SEQ ID NO: 380402 - DNA, 15 bp, Homo sapiens
catacactgtgtttg

SEQ ID NO: 380403 - DNA, 15 bp, Homo sapiens
tcatacactgtgttt

SEQ ID NO: 380404 - DNA, 15 bp, Homo sapiens
ttcatacactgtgtt

SEQ ID NO: 380405 - DNA, 15 bp, Homo sapiens
cttcatacactgtgt

SEQ ID NO: 380406 - DNA, 15 bp, Homo sapiens
ccttcatacactgtg

SEQ ID NO: 380407 - DNA, 15 bp, Homo sapiens
cccttcatacactgt

SEQ ID NO: 380408 - DNA, 15 bp, Homo sapiens
ccccttcatacactg

SEQ ID NO: 380409 - DNA, 15 bp, Homo sapiens
cccccttcatacact

SEQ ID NO: 380410 - DNA, 15 bp, Homo sapiens
ccccccttcatacac

SEQ ID NO: 380411 - DNA, 15 bp, Homo sapiens
gccccccttcataca

SEQ ID NO: 380412 - DNA, 15 bp, Homo sapiens
cgccccccttcatac

SEQ ID NO: 380413 - DNA, 15 bp, Homo sapiens
ccgccccccttcata

SEQ ID NO: 380414 - DNA, 15 bp, Homo sapiens
accgccccccttcat

SEQ ID NO: 380415 - DNA, 15 bp, Homo sapiens
gaccgccccccttca

SEQ ID NO: 380416 - DNA, 15 bp, Homo sapiens
tgaccgccccccttc

SEQ ID NO: 380417 - DNA, 15 bp, Homo sapiens
atgaccgcccccctt

SEQ ID NO: 380418 - DNA, 15 bp, Homo sapiens
gatgaccgcccccct

SEQ ID NO: 380419 - DNA, 15 bp, Homo sapiens
tgatgaccgcccccc

SEQ ID NO: 380420 - DNA, 15 bp, Homo sapiens
atgatgaccgccccc

SEQ ID NO: 380421 - DNA, 15 bp, Homo sapiens
aatgatgaccgcccc

SEQ ID NO: 380422 - DNA, 15 bp, Homo sapiens
aaatgatgaccgccc

SEQ ID NO: 380423 - DNA, 15 bp, Homo sapiens
gaaatgatgaccgcc

SEQ ID NO: 380424 - DNA, 15 bp, Homo sapiens
tgaaatgatgaccgc

SEQ ID NO: 380425 - DNA, 15 bp, Homo sapiens
gtgaaatgatgaccg

SEQ ID NO: 380426 - DNA, 15 bp, Homo sapiens
agtgaaatgatgacc

SEQ ID NO: 380427 - DNA, 15 bp, Homo sapiens
aagtgaaatgatgac

SEQ ID NO: 380428 - DNA, 15 bp, Homo sapiens
caagtgaaatgatga

SEQ ID NO: 380429 - DNA, 15 bp, Homo sapiens
acaagtgaaatgatg

SEQ ID NO: 380430 - DNA, 15 bp, Homo sapiens
gacaagtgaaatgat

SEQ ID NO: 380431 - DNA, 15 bp, Homo sapiens
tgacaagtgaaatga

SEQ ID NO: 380432 - DNA, 15 bp, Homo sapiens
ctgacaagtgaaatg

SEQ ID NO: 380433 - DNA, 15 bp, Homo sapiens
cctgacaagtgaaat

SEQ ID NO: 380434 - DNA, 15 bp, Homo sapiens
tcctgacaagtgaaa

SEQ ID NO: 380435 - DNA, 15 bp, Homo sapiens
ctcctgacaagtgaa

SEQ ID NO: 380436 - DNA, 15 bp, Homo sapiens
actcctgacaagtga

SEQ ID NO: 380437 - DNA, 15 bp, Homo sapiens
cactcctgacaagtg

SEQ ID NO: 380438 - DNA, 15 bp, Homo sapiens
acactcctgacaagt

SEQ ID NO: 380439 - DNA, 15 bp, Homo sapiens
cacactcctgacaag

SEQ ID NO: 380440 - DNA, 15 bp, Homo sapiens
acacactcctgacaa

SEQ ID NO: 380441 - DNA, 15 bp, Homo sapiens
cacacactcctgaca

SEQ ID NO: 380442 - DNA, 15 bp, Homo sapiens
acacacactcctgac

SEQ ID NO: 380443 - DNA, 15 bp, Homo sapiens
cacacacactcctga

SEQ ID NO: 380444 - DNA, 15 bp, Homo sapiens
tcacacacactcctg

SEQ ID NO: 380445 - DNA, 15 bp, Homo sapiens
ctcacacacactcct

SEQ ID NO: 380446 - DNA, 15 bp, Homo sapiens
actcacacacactcc

SEQ ID NO: 380447 - DNA, 15 bp, Homo sapiens
cactcacacacactc

SEQ ID NO: 380448 - DNA, 15 bp, Homo sapiens
acactcacacacact

SEQ ID NO: 380449 - DNA, 15 bp, Homo sapiens
cacactcacacacac

SEQ ID NO: 380450 - DNA, 15 bp, Homo sapiens
tcacactcacacaca

SEQ ID NO: 380451 - DNA, 15 bp, Homo sapiens
ctcacactcacacac

SEQ ID NO: 380452 - DNA, 15 bp, Homo sapiens
actcacactcacaca

SEQ ID NO: 380453 - DNA, 15 bp, Homo sapiens
cactcacactcacac

SEQ ID NO: 380454 - DNA, 15 bp, Homo sapiens
acactcacactcaca

SEQ ID NO: 380455 - DNA, 15 bp, Homo sapiens
cacactcacactcac

SEQ ID NO: 380456 - DNA, 15 bp, Homo sapiens
gcacactcacactca

SEQ ID NO: 380457 - DNA, 15 bp, Homo sapiens
cgcacactcacactc

SEQ ID NO: 380458 - DNA, 15 bp, Homo sapiens
ccgcacactcacact

SEQ ID NO: 380459 - DNA, 15 bp, Homo sapiens
gccgcacactcacac

SEQ ID NO: 380460 - DNA, 15 bp, Homo sapiens
agccgcacactcaca

SEQ ID NO: 380461 - DNA, 15 bp, Homo sapiens
cagccgcacactcac

SEQ ID NO: 380462 - DNA, 15 bp, Homo sapiens
acagccgcacactca

SEQ ID NO: 380463 - DNA, 15 bp, Homo sapiens
cacagccgcacactc

SEQ ID NO: 380464 - DNA, 15 bp, Homo sapiens
acacagccgcacact

SEQ ID NO: 380465 - DNA, 15 bp, Homo sapiens
cacacagccgcacac

SEQ ID NO: 380466 - DNA, 15 bp, Homo sapiens
acacacagccgcaca

SEQ ID NO: 380467 - DNA, 15 bp, Homo sapiens
cacacacagccgcac

SEQ ID NO: 380468 - DNA, 15 bp, Homo sapiens
gcacacacagccgca

SEQ ID NO: 380469 - DNA, 15 bp, Homo sapiens
tgcacacacagccgc

SEQ ID NO: 380470 - DNA, 15 bp, Homo sapiens
gtgcacacacagccg

SEQ ID NO: 380471 - DNA, 15 bp, Homo sapiens
cgtgcacacacagcc

SEQ ID NO: 380472 - DNA, 15 bp, Homo sapiens
gcgtgcacacacagc

SEQ ID NO: 380473 - DNA, 15 bp, Homo sapiens
cgcgtgcacacacag

SEQ ID NO: 380474 - DNA, 15 bp, Homo sapiens
acgcgtgcacacaca

SEQ ID NO: 380475 - DNA, 15 bp, Homo sapiens
cacgcgtgcacacac

SEQ ID NO: 380476 - DNA, 15 bp, Homo sapiens
acacgcgtgcacaca

SEQ ID NO: 380477 - DNA, 15 bp, Homo sapiens
cacacgcgtgcacac

SEQ ID NO: 380478 - DNA, 15 bp, Homo sapiens
gcacacgcgtgcaca

SEQ ID NO: 380479 - DNA, 15 bp, Homo sapiens
tgcacacgcgtgcac

SEQ ID NO: 380480 - DNA, 15 bp, Homo sapiens
ctgcacacgcgtgca

SEQ ID NO: 380481 - DNA, 15 bp, Homo sapiens
cctgcacacgcgtgc

SEQ ID NO: 380482 - DNA, 15 bp, Homo sapiens
tcctgcacacgcgtg

SEQ ID NO: 380483 - DNA, 15 bp, Homo sapiens
ctcctgcacacgcgt

SEQ ID NO: 380484 - DNA, 15 bp, Homo sapiens
gctcctgcacacgcg

SEQ ID NO: 380485 - DNA, 15 bp, Homo sapiens
cgctcctgcacacgc

SEQ ID NO: 380486 - DNA, 15 bp, Homo sapiens
ccgctcctgcacacg

SEQ ID NO: 380487 - DNA, 15 bp, Homo sapiens
gccgctcctgcacac

SEQ ID NO: 380488 - DNA, 15 bp, Homo sapiens
tgccgctcctgcaca

SEQ ID NO: 380489 - DNA, 15 bp, Homo sapiens
ctgccgctcctgcac

SEQ ID NO: 380490 - DNA, 15 bp, Homo sapiens
tctgccgctcctgca

SEQ ID NO: 380491 - DNA, 15 bp, Homo sapiens
atctgccgctcctgc

SEQ ID NO: 380492 - DNA, 15 bp, Homo sapiens
catctgccgctcctg

SEQ ID NO: 380493 - DNA, 15 bp, Homo sapiens
ccatctgccgctcct

SEQ ID NO: 380494 - DNA, 15 bp, Homo sapiens
cccatctgccgctcc

SEQ ID NO: 380495 - DNA, 15 bp, Homo sapiens
ccccatctgccgctc

SEQ ID NO: 380496 - DNA, 15 bp, Homo sapiens
tccccatctgccgct

SEQ ID NO: 380497 - DNA, 15 bp, Homo sapiens
ctccccatctgccgc

SEQ ID NO: 380498 - DNA, 15 bp, Homo sapiens
tctccccatctgccg

SEQ ID NO: 380499 - DNA, 15 bp, Homo sapiens
gtctccccatctgcc

SEQ ID NO: 380500 - DNA, 15 bp, Homo sapiens
tgtctccccatctgc

SEQ ID NO: 380501 - DNA, 15 bp, Homo sapiens
ttgtctccccatctg

SEQ ID NO: 380502 - DNA, 15 bp, Homo sapiens
gttgtctccccatct

SEQ ID NO: 380503 - DNA, 15 bp, Homo sapiens
cgttgtctccccatc

SEQ ID NO: 380504 - DNA, 15 bp, Homo sapiens
acgttgtctccccat

SEQ ID NO: 380505 - DNA, 15 bp, Homo sapiens
cacgttgtctcccca

SEQ ID NO: 380506 - DNA, 15 bp, Homo sapiens
gcacgttgtctcccc

SEQ ID NO: 380507 - DNA, 15 bp, Homo sapiens
agcacgttgtctccc

SEQ ID NO: 380508 - DNA, 15 bp, Homo sapiens
gagcacgttgtctcc

SEQ ID NO: 380509 - DNA, 15 bp, Homo sapiens
agagcacgttgtctc

SEQ ID NO: 380510 - DNA, 15 bp, Homo sapiens
aagagcacgttgtct

SEQ ID NO: 380511 - DNA, 15 bp, Homo sapiens
aaagagcacgttgtc

SEQ ID NO: 380512 - DNA, 15 bp, Homo sapiens
caaagagcacgttgt

SEQ ID NO: 380513 - DNA, 15 bp, Homo sapiens
acaaagagcacgttg

SEQ ID NO: 380514 - DNA, 15 bp, Homo sapiens
aacaaagagcacgtt

SEQ ID NO: 380515 - DNA, 15 bp, Homo sapiens
aaacaaagagcacgt

SEQ ID NO: 380516 - DNA, 15 bp, Homo sapiens
aaaacaaagagcacg

SEQ ID NO: 380517 - DNA, 15 bp, Homo sapiens
caaaacaaagagcac

SEQ ID NO: 380518 - DNA, 15 bp, Homo sapiens
acaaaacaaagagca

SEQ ID NO: 380519 - DNA, 15 bp, Homo sapiens
cacaaaacaaagagc

SEQ ID NO: 380520 - DNA, 15 bp, Homo sapiens
acacaaaacaaagag

SEQ ID NO: 380521 - DNA, 15 bp, Homo sapiens
gacacaaaacaaaga

SEQ ID NO: 380522 - DNA, 15 bp, Homo sapiens
agacacaaaacaaag

SEQ ID NO: 380523 - DNA, 15 bp, Homo sapiens
gagacacaaaacaaa

SEQ ID NO: 380524 - DNA, 15 bp, Homo sapiens
agagacacaaaacaa

SEQ ID NO: 380525 - DNA, 15 bp, Homo sapiens
aagagacacaaaaca

SEQ ID NO: 380526 - DNA, 15 bp, Homo sapiens
taagagacacaaaac

SEQ ID NO: 380527 - DNA, 15 bp, Homo sapiens
ataagagacacaaaa

SEQ ID NO: 380528 - DNA, 15 bp, Homo sapiens
cataagagacacaaa

SEQ ID NO: 380529 - DNA, 15 bp, Homo sapiens
ccataagagacacaa

SEQ ID NO: 380530 - DNA, 15 bp, Homo sapiens
tccataagagacaca

SEQ ID NO: 380531 - DNA, 15 bp, Homo sapiens
atccataagagacac

SEQ ID NO: 380532 - DNA, 15 bp, Homo sapiens
catccataagagaca

SEQ ID NO: 380533 - DNA, 15 bp, Homo sapiens
acatccataagagac

SEQ ID NO: 380534 - DNA, 15 bp, Homo sapiens
gacatccataagaga

SEQ ID NO: 380535 - DNA, 15 bp, Homo sapiens
ggacatccataagag

SEQ ID NO: 380536 - DNA, 15 bp, Homo sapiens
gggacatccataaga

SEQ ID NO: 380537 - DNA, 15 bp, Homo sapiens
ggggacatccataag

SEQ ID NO: 380538 - DNA, 15 bp, Homo sapiens
tggggacatccataa

SEQ ID NO: 380539 - DNA, 15 bp, Homo sapiens
ctggggacatccata

SEQ ID NO: 380540 - DNA, 15 bp, Homo sapiens
gctggggacatccat

SEQ ID NO: 380541 - DNA, 15 bp, Homo sapiens
tgctggggacatcca

SEQ ID NO: 380542 - DNA, 15 bp, Homo sapiens
ctgctggggacatcc

SEQ ID NO: 380543 - DNA, 15 bp, Homo sapiens
tctgctggggacatc

SEQ ID NO: 380544 - DNA, 15 bp, Homo sapiens
ctctgctggggacat

SEQ ID NO: 380545 - DNA, 15 bp, Homo sapiens
tctctgctggggaca

SEQ ID NO: 380546 - DNA, 15 bp, Homo sapiens
ctctctgctggggac

SEQ ID NO: 380547 - DNA, 15 bp, Homo sapiens
cctctctgctgggga

SEQ ID NO: 380548 - DNA, 15 bp, Homo sapiens
acctctctgctgggg

SEQ ID NO: 380549 - DNA, 15 bp, Homo sapiens
aacctctctgctggg

SEQ ID NO: 380550 - DNA, 15 bp, Homo sapiens
aaacctctctgctgg

SEQ ID NO: 380551 - DNA, 15 bp, Homo sapiens
caaacctctctgctg

SEQ ID NO: 380552 - DNA, 15 bp, Homo sapiens
gcaaacctctctgct

SEQ ID NO: 380553 - DNA, 15 bp, Homo sapiens
tgcaaacctctctgc

SEQ ID NO: 380554 - DNA, 15 bp, Homo sapiens
ctgcaaacctctctg

SEQ ID NO: 380555 - DNA, 15 bp, Homo sapiens
actgcaaacctctct

SEQ ID NO: 380556 - DNA, 15 bp, Homo sapiens
gactgcaaacctctc

SEQ ID NO: 380557 - DNA, 15 bp, Homo sapiens
ggactgcaaacctct

SEQ ID NO: 380558 - DNA, 15 bp, Homo sapiens
gggactgcaaacctc

SEQ ID NO: 380559 - DNA, 15 bp, Homo sapiens
tgggactgcaaacct

SEQ ID NO: 380560 - DNA, 15 bp, Homo sapiens
ttgggactgcaaacc

SEQ ID NO: 380561 - DNA, 15 bp, Homo sapiens
cttgggactgcaaac

SEQ ID NO: 380562 - DNA, 15 bp, Homo sapiens
gcttgggactgcaaa

SEQ ID NO: 380563 - DNA, 15 bp, Homo sapiens
cgcttgggactgcaa

SEQ ID NO: 380564 - DNA, 15 bp, Homo sapiens
ccgcttgggactgca

SEQ ID NO: 380565 - DNA, 15 bp, Homo sapiens
accgcttgggactgc

SEQ ID NO: 380566 - DNA, 15 bp, Homo sapiens
caccgcttgggactg

SEQ ID NO: 380567 - DNA, 15 bp, Homo sapiens
acaccgcttgggact

SEQ ID NO: 380568 - DNA, 15 bp, Homo sapiens
gacaccgcttgggac

SEQ ID NO: 380569 - DNA, 15 bp, Homo sapiens
agacaccgcttggga

SEQ ID NO: 380570 - DNA, 15 bp, Homo sapiens
gagacaccgcttggg

SEQ ID NO: 380571 - DNA, 15 bp, Homo sapiens
agagacaccgcttgg

SEQ ID NO: 380572 - DNA, 15 bp, Homo sapiens
gagagacaccgcttg

SEQ ID NO: 380573 - DNA, 15 bp, Homo sapiens
ggagagacaccgctt

SEQ ID NO: 380574 - DNA, 15 bp, Homo sapiens
aggagagacaccgct

SEQ ID NO: 380575 - DNA, 15 bp, Homo sapiens
caggagagacaccgc

SEQ ID NO: 380576 - DNA, 15 bp, Homo sapiens
gcaggagagacaccg

SEQ ID NO: 380577 - DNA, 15 bp, Homo sapiens
ggcaggagagacacc

SEQ ID NO: 380578 - DNA, 15 bp, Homo sapiens
gggcaggagagacac

SEQ ID NO: 380579 - DNA, 15 bp, Homo sapiens
ggggcaggagagaca

SEQ ID NO: 380580 - DNA, 15 bp, Homo sapiens
aggggcaggagagac

SEQ ID NO: 380581 - DNA, 15 bp, Homo sapiens
aaggggcaggagaga

SEQ ID NO: 380582 - DNA, 15 bp, Homo sapiens
caaggggcaggagag

SEQ ID NO: 380583 - DNA, 15 bp, Homo sapiens
ccaaggggcaggaga

SEQ ID NO: 380584 - DNA, 15 bp, Homo sapiens
tccaaggggcaggag

SEQ ID NO: 380585 - DNA, 15 bp, Homo sapiens
gtccaaggggcagga

SEQ ID NO: 380586 - DNA, 15 bp, Homo sapiens
tgtccaaggggcagg

SEQ ID NO: 380587 - DNA, 15 bp, Homo sapiens
gtgtccaaggggcag

SEQ ID NO: 380588 - DNA, 15 bp, Homo sapiens
cgtgtccaaggggca

SEQ ID NO: 380589 - DNA, 15 bp, Homo sapiens
gcgtgtccaaggggc

SEQ ID NO: 380590 - DNA, 15 bp, Homo sapiens
agcgtgtccaagggg

SEQ ID NO: 380591 - DNA, 15 bp, Homo sapiens
gagcgtgtccaaggg

SEQ ID NO: 380592 - DNA, 15 bp, Homo sapiens
tgagcgtgtccaagg

SEQ ID NO: 380593 - DNA, 15 bp, Homo sapiens
ctgagcgtgtccaag

SEQ ID NO: 380594 - DNA, 15 bp, Homo sapiens
actgagcgtgtccaa

SEQ ID NO: 380595 - DNA, 15 bp, Homo sapiens
cactgagcgtgtcca

SEQ ID NO: 380596 - DNA, 15 bp, Homo sapiens
ccactgagcgtgtcc

SEQ ID NO: 380597 - DNA, 15 bp, Homo sapiens
cccactgagcgtgtc

SEQ ID NO: 380598 - DNA, 15 bp, Homo sapiens
ccccactgagcgtgt

SEQ ID NO: 380599 - DNA, 15 bp, Homo sapiens
gccccactgagcgtg

SEQ ID NO: 380600 - DNA, 15 bp, Homo sapiens
tgccccactgagcgt

SEQ ID NO: 380601 - DNA, 15 bp, Homo sapiens
ctgccccactgagcg

SEQ ID NO: 380602 - DNA, 15 bp, Homo sapiens
tctgccccactgagc

SEQ ID NO: 380603 - DNA, 15 bp, Homo sapiens
ctctgccccactgag

SEQ ID NO: 380604 - DNA, 15 bp, Homo sapiens
cctctgccccactga

SEQ ID NO: 380605 - DNA, 15 bp, Homo sapiens
gcctctgccccactg

SEQ ID NO: 380606 - DNA, 15 bp, Homo sapiens
tgcctctgccccact

SEQ ID NO: 380607 - DNA, 15 bp, Homo sapiens
ctgcctctgccccac

SEQ ID NO: 380608 - DNA, 15 bp, Homo sapiens
actgcctctgcccca

SEQ ID NO: 380609 - DNA, 15 bp, Homo sapiens
tactgcctctgcccc

SEQ ID NO: 380610 - DNA, 15 bp, Homo sapiens
gtactgcctctgccc

SEQ ID NO: 380611 - DNA, 15 bp, Homo sapiens
ggtactgcctctgcc

SEQ ID NO: 380612 - DNA, 15 bp, Homo sapiens
aggtactgcctctgc

SEQ ID NO: 380613 - DNA, 15 bp, Homo sapiens
caggtactgcctctg

SEQ ID NO: 380614 - DNA, 15 bp, Homo sapiens
ccaggtactgcctct

SEQ ID NO: 380615 - DNA, 15 bp, Homo sapiens
cccaggtactgcctc

SEQ ID NO: 380616 - DNA, 15 bp, Homo sapiens
gcccaggtactgcct

SEQ ID NO: 380617 - DNA, 15 bp, Homo sapiens
tgcccaggtactgcc

SEQ ID NO: 380618 - DNA, 15 bp, Homo sapiens
ttgcccaggtactgc

SEQ ID NO: 380619 - DNA, 15 bp, Homo sapiens
cttgcccaggtactg

SEQ ID NO: 380620 - DNA, 15 bp, Homo sapiens
gcttgcccaggtact

SEQ ID NO: 380621 - DNA, 15 bp, Homo sapiens
agcttgcccaggtac

SEQ ID NO: 380622 - DNA, 15 bp, Homo sapiens
cagcttgcccaggta

SEQ ID NO: 380623 - DNA, 15 bp, Homo sapiens
ccagcttgcccaggt

SEQ ID NO: 380624 - DNA, 15 bp, Homo sapiens
gccagcttgcccagg

SEQ ID NO: 380625 - DNA, 15 bp, Homo sapiens
cgccagcttgcccag

SEQ ID NO: 380626 - DNA, 15 bp, Homo sapiens
ccgccagcttgccca

SEQ ID NO: 380627 - DNA, 15 bp, Homo sapiens
gccgccagcttgccc

SEQ ID NO: 380628 - DNA, 15 bp, Homo sapiens
agccgccagcttgcc

SEQ ID NO: 380629 - DNA, 15 bp, Homo sapiens
cagccgccagcttgc

SEQ ID NO: 380630 - DNA, 15 bp, Homo sapiens
ccagccgccagcttg

SEQ ID NO: 380631 - DNA, 15 bp, Homo sapiens
cccagccgccagctt

SEQ ID NO: 380632 - DNA, 15 bp, Homo sapiens
ccccagccgccagct

SEQ ID NO: 380633 - DNA, 15 bp, Homo sapiens
accccagccgccagc

SEQ ID NO: 380634 - DNA, 15 bp, Homo sapiens
gaccccagccgccag

SEQ ID NO: 380635 - DNA, 15 bp, Homo sapiens
ggaccccagccgcca

SEQ ID NO: 380636 - DNA, 15 bp, Homo sapiens
gggaccccagccgcc

SEQ ID NO: 380637 - DNA, 15 bp, Homo sapiens
tgggaccccagccgc

SEQ ID NO: 380638 - DNA, 15 bp, Homo sapiens
ctgggaccccagccg

SEQ ID NO: 380639 - DNA, 15 bp, Homo sapiens
gctgggaccccagcc

SEQ ID NO: 380640 - DNA, 15 bp, Homo sapiens
tgctgggaccccagc

SEQ ID NO: 380641 - DNA, 15 bp, Homo sapiens
ctgctgggaccccag

SEQ ID NO: 380642 - DNA, 15 bp, Homo sapiens
gctgctgggacccca

SEQ ID NO: 380643 - DNA, 15 bp, Homo sapiens
agctgctgggacccc

SEQ ID NO: 380644 - DNA, 15 bp, Homo sapiens
cagctgctgggaccc

SEQ ID NO: 380645 - DNA, 15 bp, Homo sapiens
gcagctgctgggacc

SEQ ID NO: 380646 - DNA, 15 bp, Homo sapiens
ggcagctgctgggac

SEQ ID NO: 380647 - DNA, 15 bp, Homo sapiens
tggcagctgctggga

SEQ ID NO: 380648 - DNA, 15 bp, Homo sapiens
ctggcagctgctggg

SEQ ID NO: 380649 - DNA, 15 bp, Homo sapiens
cctggcagctgctgg

SEQ ID NO: 380650 - DNA, 15 bp, Homo sapiens
tcctggcagctgctg

SEQ ID NO: 380651 - DNA, 15 bp, Homo sapiens
ctcctggcagctgct

SEQ ID NO: 380652 - DNA, 15 bp, Homo sapiens
gctcctggcagctgc

SEQ ID NO: 380653 - DNA, 15 bp, Homo sapiens
tgctcctggcagctg

SEQ ID NO: 380654 - DNA, 15 bp, Homo sapiens
gtgctcctggcagct

SEQ ID NO: 380655 - DNA, 15 bp, Homo sapiens
cgtgctcctggcagc

SEQ ID NO: 380656 - DNA, 15 bp, Homo sapiens
ccgtgctcctggcag

SEQ ID NO: 380657 - DNA, 15 bp, Homo sapiens
gccgtgctcctggca

SEQ ID NO: 380658 - DNA, 15 bp, Homo sapiens
agccgtgctcctggc

SEQ ID NO: 380659 - DNA, 15 bp, Homo sapiens
gagccgtgctcctgg

SEQ ID NO: 380660 - DNA, 15 bp, Homo sapiens
agagccgtgctcctg

SEQ ID NO: 380661 - DNA, 15 bp, Homo sapiens
cagagccgtgctcct

SEQ ID NO: 380662 - DNA, 15 bp, Homo sapiens
acagagccgtgctcc

SEQ ID NO: 380663 - DNA, 15 bp, Homo sapiens
gacagagccgtgctc

SEQ ID NO: 380664 - DNA, 15 bp, Homo sapiens
ggacagagccgtgct

SEQ ID NO: 380665 - DNA, 15 bp, Homo sapiens
gggacagagccgtgc

SEQ ID NO: 380666 - DNA, 15 bp, Homo sapiens
ggggacagagccgtg

SEQ ID NO: 380667 - DNA, 15 bp, Homo sapiens
tggggacagagccgt

SEQ ID NO: 380668 - DNA, 15 bp, Homo sapiens
ctggggacagagccg

SEQ ID NO: 380669 - DNA, 15 bp, Homo sapiens
gctggggacagagcc

SEQ ID NO: 380670 - DNA, 15 bp, Homo sapiens
ggctggggacagagc

SEQ ID NO: 380671 - DNA, 15 bp, Homo sapiens
aggctggggacagag

SEQ ID NO: 380672 - DNA, 15 bp, Homo sapiens
caggctggggacaga

SEQ ID NO: 380673 - DNA, 15 bp, Homo sapiens
ccaggctggggacag

SEQ ID NO: 380674 - DNA, 15 bp, Homo sapiens
cccaggctggggaca

SEQ ID NO: 380675 - DNA, 15 bp, Homo sapiens
tcccaggctggggac

SEQ ID NO: 380676 - DNA, 15 bp, Homo sapiens
ttcccaggctgggga

SEQ ID NO: 380677 - DNA, 15 bp, Homo sapiens
tttcccaggctgggg

SEQ ID NO: 380678 - DNA, 15 bp, Homo sapiens
ctttcccaggctggg

SEQ ID NO: 380679 - DNA, 15 bp, Homo sapiens
gctttcccaggctgg

SEQ ID NO: 380680 - DNA, 15 bp, Homo sapiens
ggctttcccaggctg

SEQ ID NO: 380681 - DNA, 15 bp, Homo sapiens
gggctttcccaggct

SEQ ID NO: 380682 - DNA, 15 bp, Homo sapiens
ggggctttcccaggc

SEQ ID NO: 380683 - DNA, 15 bp, Homo sapiens
aggggctttcccagg

SEQ ID NO: 380684 - DNA, 15 bp, Homo sapiens
caggggctttcccag

SEQ ID NO: 380685 - DNA, 15 bp, Homo sapiens
gcaggggctttccca

SEQ ID NO: 380686 - DNA, 15 bp, Homo sapiens
ggcaggggctttccc

SEQ ID NO: 380687 - DNA, 15 bp, Homo sapiens
gggcaggggctttcc

SEQ ID NO: 380688 - DNA, 15 bp, Homo sapiens
ggggcaggggctttc

SEQ ID NO: 380689 - DNA, 15 bp, Homo sapiens
aggggcaggggcttt

SEQ ID NO: 380690 - DNA, 15 bp, Homo sapiens
gaggggcaggggctt

SEQ ID NO: 380691 - DNA, 15 bp, Homo sapiens
ggaggggcaggggct

SEQ ID NO: 380692 - DNA, 15 bp, Homo sapiens
aggaggggcaggggc

SEQ ID NO: 380693 - DNA, 15 bp, Homo sapiens
gaggaggggcagggg

SEQ ID NO: 380694 - DNA, 15 bp, Homo sapiens
agaggaggggcaggg

SEQ ID NO: 380695 - DNA, 15 bp, Homo sapiens
gagaggaggggcagg

SEQ ID NO: 380696 - DNA, 15 bp, Homo sapiens
ggagaggaggggcag

SEQ ID NO: 380697 - DNA, 15 bp, Homo sapiens
gggagaggaggggca

SEQ ID NO: 380698 - DNA, 15 bp, Homo sapiens
agggagaggaggggc

SEQ ID NO: 380699 - DNA, 15 bp, Homo sapiens
gagggagaggagggg

SEQ ID NO: 380700 - DNA, 15 bp, Homo sapiens
tgagggagaggaggg

SEQ ID NO: 380701 - DNA, 15 bp, Homo sapiens
atgagggagaggagg

SEQ ID NO: 380702 - DNA, 15 bp, Homo sapiens
gatgagggagaggag

SEQ ID NO: 380703 - DNA, 15 bp, Homo sapiens
tgatgagggagagga

SEQ ID NO: 380704 - DNA, 15 bp, Homo sapiens
ttgatgagggagagg

SEQ ID NO: 380705 - DNA, 15 bp, Homo sapiens
cttgatgagggagag

SEQ ID NO: 380706 - DNA, 15 bp, Homo sapiens
ccttgatgagggaga

SEQ ID NO: 380707 - DNA, 15 bp, Homo sapiens
tccttgatgagggag

SEQ ID NO: 380708 - DNA, 15 bp, Homo sapiens
gtccttgatgaggga

SEQ ID NO: 380709 - DNA, 15 bp, Homo sapiens
tgtccttgatgaggg

SEQ ID NO: 380710 - DNA, 15 bp, Homo sapiens
gtgtccttgatgagg

SEQ ID NO: 380711 - DNA, 15 bp, Homo sapiens
cgtgtccttgatgag

SEQ ID NO: 380712 - DNA, 15 bp, Homo sapiens
ccgtgtccttgatga

SEQ ID NO: 380713 - DNA, 15 bp, Homo sapiens
cccgtgtccttgatg

SEQ ID NO: 380714 - DNA, 15 bp, Homo sapiens
gcccgtgtccttgat

SEQ ID NO: 380715 - DNA, 15 bp, Homo sapiens
ggcccgtgtccttga

SEQ ID NO: 380716 - DNA, 15 bp, Homo sapiens
aggcccgtgtccttg

SEQ ID NO: 380717 - DNA, 15 bp, Homo sapiens
caggcccgtgtcctt

SEQ ID NO: 380718 - DNA, 15 bp, Homo sapiens
acaggcccgtgtcct

SEQ ID NO: 380719 - DNA, 15 bp, Homo sapiens
gacaggcccgtgtcc

SEQ ID NO: 380720 - DNA, 15 bp, Homo sapiens
ggacaggcccgtgtc

SEQ ID NO: 380721 - DNA, 15 bp, Homo sapiens
tggacaggcccgtgt

SEQ ID NO: 380722 - DNA, 15 bp, Homo sapiens
gtggacaggcccgtg

SEQ ID NO: 380723 - DNA, 15 bp, Homo sapiens
tgtggacaggcccgt

SEQ ID NO: 380724 - DNA, 15 bp, Homo sapiens
ctgtggacaggcccg

SEQ ID NO: 380725 - DNA, 15 bp, Homo sapiens
cctgtggacaggccc

SEQ ID NO: 380726 - DNA, 15 bp, Homo sapiens
gcctgtggacaggcc

SEQ ID NO: 380727 - DNA, 15 bp, Homo sapiens
agcctgtggacaggc

SEQ ID NO: 380728 - DNA, 15 bp, Homo sapiens
aagcctgtggacagg

SEQ ID NO: 380729 - DNA, 15 bp, Homo sapiens
gaagcctgtggacag

SEQ ID NO: 380730 - DNA, 15 bp, Homo sapiens
agaagcctgtggaca

SEQ ID NO: 380731 - DNA, 15 bp, Homo sapiens
cagaagcctgtggac

SEQ ID NO: 380732 - DNA, 15 bp, Homo sapiens
tcagaagcctgtgga

SEQ ID NO: 380733 - DNA, 15 bp, Homo sapiens
ctcagaagcctgtgg

SEQ ID NO: 380734 - DNA, 15 bp, Homo sapiens
gctcagaagcctgtg

SEQ ID NO: 380735 - DNA, 15 bp, Homo sapiens
tgctcagaagcctgt

SEQ ID NO: 380736 - DNA, 15 bp, Homo sapiens
ctgctcagaagcctg

SEQ ID NO: 380737 - DNA, 15 bp, Homo sapiens
gctgctcagaagcct

SEQ ID NO: 380738 - DNA, 15 bp, Homo sapiens
cgctgctcagaagcc

SEQ ID NO: 380739 - DNA, 15 bp, Homo sapiens
tcgctgctcagaagc

SEQ ID NO: 380740 - DNA, 15 bp, Homo sapiens
ctcgctgctcagaag

SEQ ID NO: 380741 - DNA, 15 bp, Homo sapiens
gctcgctgctcagaa

SEQ ID NO: 380742 - DNA, 15 bp, Homo sapiens
ggctcgctgctcaga

SEQ ID NO: 380743 - DNA, 15 bp, Homo sapiens
aggctcgctgctcag

SEQ ID NO: 380744 - DNA, 15 bp, Homo sapiens
caggctcgctgctca

SEQ ID NO: 380745 - DNA, 15 bp, Homo sapiens
gcaggctcgctgctc

SEQ ID NO: 380746 - DNA, 15 bp, Homo sapiens
agcaggctcgctgct

SEQ ID NO: 380747 - DNA, 15 bp, Homo sapiens
tagcaggctcgctgc

SEQ ID NO: 380748 - DNA, 15 bp, Homo sapiens
ctagcaggctcgctg

SEQ ID NO: 380749 - DNA, 15 bp, Homo sapiens
actagcaggctcgct

SEQ ID NO: 380750 - DNA, 15 bp, Homo sapiens
cactagcaggctcgc

SEQ ID NO: 380751 - DNA, 15 bp, Homo sapiens
ccactagcaggctcg

SEQ ID NO: 380752 - DNA, 15 bp, Homo sapiens
gccactagcaggctc

SEQ ID NO: 380753 - DNA, 15 bp, Homo sapiens
ggccactagcaggct

SEQ ID NO: 380754 - DNA, 15 bp, Homo sapiens
cggccactagcaggc

SEQ ID NO: 380755 - DNA, 15 bp, Homo sapiens
tcggccactagcagg

SEQ ID NO: 380756 - DNA, 15 bp, Homo sapiens
ttcggccactagcag

SEQ ID NO: 380757 - DNA, 15 bp, Homo sapiens
gttcggccactagca

SEQ ID NO: 380758 - DNA, 15 bp, Homo sapiens
ggttcggccactagc

SEQ ID NO: 380759 - DNA, 15 bp, Homo sapiens
tggttcggccactag

SEQ ID NO: 380760 - DNA, 15 bp, Homo sapiens
ctggttcggccacta

SEQ ID NO: 380761 - DNA, 15 bp, Homo sapiens
tctggttcggccact

SEQ ID NO: 380762 - DNA, 15 bp, Homo sapiens
ttctggttcggccac

SEQ ID NO: 380763 - DNA, 15 bp, Homo sapiens
gttctggttcggcca

SEQ ID NO: 380764 - DNA, 15 bp, Homo sapiens
ggttctggttcggcc

SEQ ID NO: 380765 - DNA, 15 bp, Homo sapiens
tggttctggttcggc

SEQ ID NO: 380766 - DNA, 15 bp, Homo sapiens
ttggttctggttcgg

SEQ ID NO: 380767 - DNA, 15 bp, Homo sapiens
attggttctggttcg

SEQ ID NO: 380768 - DNA, 15 bp, Homo sapiens
aattggttctggttc

SEQ ID NO: 380769 - DNA, 15 bp, Homo sapiens
taattggttctggtt

SEQ ID NO: 380770 - DNA, 15 bp, Homo sapiens
ataattggttctggt

SEQ ID NO: 380771 - DNA, 15 bp, Homo sapiens
aataattggttctgg

SEQ ID NO: 380772 - DNA, 15 bp, Homo sapiens
aaataattggttctg

SEQ ID NO: 380773 - DNA, 15 bp, Homo sapiens
aaaataattggttct

SEQ ID NO: 380774 - DNA, 15 bp, Homo sapiens
gaaaataattggttc

SEQ ID NO: 380775 - DNA, 15 bp, Homo sapiens
tgaaaataattggtt

SEQ ID NO: 380776 - DNA, 15 bp, Homo sapiens
atgaaaataattggt

SEQ ID NO: 380777 - DNA, 15 bp, Homo sapiens
gatgaaaataattgg

SEQ ID NO: 380778 - DNA, 15 bp, Homo sapiens
ggatgaaaataattg

SEQ ID NO: 380779 - DNA, 15 bp, Homo sapiens
aggatgaaaataatt

SEQ ID NO: 380780 - DNA, 15 bp, Homo sapiens
aaggatgaaaataat

SEQ ID NO: 380781 - DNA, 15 bp, Homo sapiens
caaggatgaaaataa

SEQ ID NO: 380782 - DNA, 15 bp, Homo sapiens
acaaggatgaaaata

SEQ ID NO: 380783 - DNA, 15 bp, Homo sapiens
gacaaggatgaaaat

SEQ ID NO: 380784 - DNA, 15 bp, Homo sapiens
agacaaggatgaaaa

SEQ ID NO: 380785 - DNA, 15 bp, Homo sapiens
aagacaaggatgaaa

SEQ ID NO: 380786 - DNA, 15 bp, Homo sapiens
taagacaaggatgaa

SEQ ID NO: 380787 - DNA, 15 bp, Homo sapiens
ataagacaaggatga

SEQ ID NO: 380788 - DNA, 15 bp, Homo sapiens
aataagacaaggatg

SEQ ID NO: 380789 - DNA, 15 bp, Homo sapiens
gaataagacaaggat

SEQ ID NO: 380790 - DNA, 15 bp, Homo sapiens
ggaataagacaagga

SEQ ID NO: 380791 - DNA, 15 bp, Homo sapiens
gggaataagacaagg

SEQ ID NO: 380792 - DNA, 15 bp, Homo sapiens
agggaataagacaag

SEQ ID NO: 380793 - DNA, 15 bp, Homo sapiens
aagggaataagacaa

SEQ ID NO: 380794 - DNA, 15 bp, Homo sapiens
gaagggaataagaca

SEQ ID NO: 380795 - DNA, 15 bp, Homo sapiens
ggaagggaataagac

SEQ ID NO: 380796 - DNA, 15 bp, Homo sapiens
aggaagggaataaga

SEQ ID NO: 380797 - DNA, 15 bp, Homo sapiens
caggaagggaataag

SEQ ID NO: 380798 - DNA, 15 bp, Homo sapiens
gcaggaagggaataa

SEQ ID NO: 380799 - DNA, 15 bp, Homo sapiens
ggcaggaagggaata

SEQ ID NO: 380800 - DNA, 15 bp, Homo sapiens
tggcaggaagggaat

SEQ ID NO: 380801 - DNA, 15 bp, Homo sapiens
ctggcaggaagggaa

SEQ ID NO: 380802 - DNA, 15 bp, Homo sapiens
gctggcaggaaggga

SEQ ID NO: 380803 - DNA, 15 bp, Homo sapiens
ggctggcaggaaggg

SEQ ID NO: 380804 - DNA, 15 bp, Homo sapiens
gggctggcaggaagg

SEQ ID NO: 380805 - DNA, 15 bp, Homo sapiens
ggggctggcaggaag

SEQ ID NO: 380806 - DNA, 15 bp, Homo sapiens
tgtccctcccaggga

SEQ ID NO: 380807 - DNA, 15 bp, Homo sapiens
atgtccctcccaggg

SEQ ID NO: 380808 - DNA, 15 bp, Homo sapiens
catgtccctcccagg

SEQ ID NO: 380809 - DNA, 15 bp, Homo sapiens
gcatgtccctcccag

SEQ ID NO: 380810 - DNA, 15 bp, Homo sapiens
agcatgtccctccca

SEQ ID NO: 380811 - DNA, 15 bp, Homo sapiens
aagcatgtccctccc

SEQ ID NO: 380812 - DNA, 15 bp, Homo sapiens
taagcatgtccctcc

SEQ ID NO: 380813 - DNA, 15 bp, Homo sapiens
ctaagcatgtccctc

SEQ ID NO: 380814 - DNA, 15 bp, Homo sapiens
gctaagcatgtccct

SEQ ID NO: 380815 - DNA, 15 bp, Homo sapiens
tgctaagcatgtccc

SEQ ID NO: 380816 - DNA, 15 bp, Homo sapiens
ctgctaagcatgtcc

SEQ ID NO: 380817 - DNA, 15 bp, Homo sapiens
actgctaagcatgtc

SEQ ID NO: 380818 - DNA, 15 bp, Homo sapiens
gactgctaagcatgt

SEQ ID NO: 380819 - DNA, 15 bp, Homo sapiens
ggactgctaagcatg

SEQ ID NO: 380820 - DNA, 15 bp, Homo sapiens
gggactgctaagcat

SEQ ID NO: 380821 - DNA, 15 bp, Homo sapiens
ggggactgctaagca

SEQ ID NO: 380822 - DNA, 15 bp, Homo sapiens
aggggactgctaagc

SEQ ID NO: 380823 - DNA, 15 bp, Homo sapiens
aaggggactgctaag

SEQ ID NO: 380824 - DNA, 15 bp, Homo sapiens
gaaggggactgctaa

SEQ ID NO: 380825 - DNA, 15 bp, Homo sapiens
ggaaggggactgcta

SEQ ID NO: 380826 - DNA, 15 bp, Homo sapiens
gggaaggggactgct

SEQ ID NO: 380827 - DNA, 15 bp, Homo sapiens
agggaaggggactgc

SEQ ID NO: 380828 - DNA, 15 bp, Homo sapiens
gagggaaggggactg

SEQ ID NO: 380829 - DNA, 15 bp, Homo sapiens
ggagggaaggggact

SEQ ID NO: 380830 - DNA, 15 bp, Homo sapiens
tggagggaaggggac

SEQ ID NO: 380831 - DNA, 15 bp, Homo sapiens
ttggagggaagggga

SEQ ID NO: 380832 - DNA, 15 bp, Homo sapiens
cttggagggaagggg

SEQ ID NO: 380833 - DNA, 15 bp, Homo sapiens
tcttggagggaaggg

SEQ ID NO: 380834 - DNA, 15 bp, Homo sapiens
ttcttggagggaagg

SEQ ID NO: 380835 - DNA, 15 bp, Homo sapiens
cttcttggagggaag

SEQ ID NO: 380836 - DNA, 15 bp, Homo sapiens
ccttcttggagggaa

SEQ ID NO: 380837 - DNA, 15 bp, Homo sapiens
tccttcttggaggga

SEQ ID NO: 380838 - DNA, 15 bp, Homo sapiens
atccttcttggaggg

SEQ ID NO: 380839 - DNA, 15 bp, Homo sapiens
aatccttcttggagg

SEQ ID NO: 380840 - DNA, 15 bp, Homo sapiens
aaatccttcttggag

SEQ ID NO: 380841 - DNA, 15 bp, Homo sapiens
caaatccttcttgga

SEQ ID NO: 380842 - DNA, 15 bp, Homo sapiens
ccaaatccttcttgg

SEQ ID NO: 380843 - DNA, 15 bp, Homo sapiens
accaaatccttcttg

SEQ ID NO: 380844 - DNA, 15 bp, Homo sapiens
gaccaaatccttctt

SEQ ID NO: 380845 - DNA, 15 bp, Homo sapiens
ggaccaaatccttct

SEQ ID NO: 380846 - DNA, 15 bp, Homo sapiens
cggaccaaatccttc

SEQ ID NO: 380847 - DNA, 15 bp, Homo sapiens
acggaccaaatcctt

SEQ ID NO: 380848 - DNA, 15 bp, Homo sapiens
gacggaccaaatcct

SEQ ID NO: 380849 - DNA, 15 bp, Homo sapiens
tgacggaccaaatcc

SEQ ID NO: 380850 - DNA, 15 bp, Homo sapiens
atgacggaccaaatc

SEQ ID NO: 380851 - DNA, 15 bp, Homo sapiens
tatgacggaccaaat

SEQ ID NO: 380852 - DNA, 15 bp, Homo sapiens
ttatgacggaccaaa

SEQ ID NO: 380853 - DNA, 15 bp, Homo sapiens
gttatgacggaccaa

SEQ ID NO: 380854 - DNA, 15 bp, Homo sapiens
ggttatgacggacca

SEQ ID NO: 380855 - DNA, 15 bp, Homo sapiens
gggttatgacggacc

SEQ ID NO: 380856 - DNA, 15 bp, Homo sapiens
tgggttatgacggac

SEQ ID NO: 380857 - DNA, 15 bp, Homo sapiens
ttgggttatgacgga

SEQ ID NO: 380858 - DNA, 15 bp, Homo sapiens
cttgggttatgacgg

SEQ ID NO: 380859 - DNA, 15 bp, Homo sapiens
ccttgggttatgacg

SEQ ID NO: 380860 - DNA, 15 bp, Homo sapiens
accttgggttatgac

SEQ ID NO: 380861 - DNA, 15 bp, Homo sapiens
taccttgggttatga

SEQ ID NO: 380862 - DNA, 15 bp, Homo sapiens
gtaccttgggttatg

SEQ ID NO: 380863 - DNA, 15 bp, Homo sapiens
ggtaccttgggttat

SEQ ID NO: 380864 - DNA, 15 bp, Homo sapiens
tggtaccttgggtta

SEQ ID NO: 380865 - DNA, 15 bp, Homo sapiens
atggtaccttgggtt

SEQ ID NO: 380866 - DNA, 15 bp, Homo sapiens
gatggtaccttgggt

SEQ ID NO: 380867 - DNA, 15 bp, Homo sapiens
ggatggtaccttggg

SEQ ID NO: 380868 - DNA, 15 bp, Homo sapiens
aggatggtaccttgg

SEQ ID NO: 380869 - DNA, 15 bp, Homo sapiens
taggatggtaccttg

SEQ ID NO: 380870 - DNA, 15 bp, Homo sapiens
ctaggatggtacctt

SEQ ID NO: 380871 - DNA, 15 bp, Homo sapiens
cctaggatggtacct

SEQ ID NO: 380872 - DNA, 15 bp, Homo sapiens
gcctaggatggtacc

SEQ ID NO: 380873 - DNA, 15 bp, Homo sapiens
agcctaggatggtac

SEQ ID NO: 380874 - DNA, 15 bp, Homo sapiens
cagcctaggatggta

SEQ ID NO: 380875 - DNA, 15 bp, Homo sapiens
tcagcctaggatggt

SEQ ID NO: 380876 - DNA, 15 bp, Homo sapiens
gtcagcctaggatgg

SEQ ID NO: 380877 - DNA, 15 bp, Homo sapiens
tgtcagcctaggatg

SEQ ID NO: 380878 - DNA, 15 bp, Homo sapiens
gtgtcagcctaggat

SEQ ID NO: 380879 - DNA, 15 bp, Homo sapiens
ggtgtcagcctagga

SEQ ID NO: 380880 - DNA, 15 bp, Homo sapiens
aggtgtcagcctagg

SEQ ID NO: 380881 - DNA, 15 bp, Homo sapiens
taggtgtcagcctag

SEQ ID NO: 380882 - DNA, 15 bp, Homo sapiens
ttaggtgtcagccta

SEQ ID NO: 380883 - DNA, 15 bp, Homo sapiens
gttaggtgtcagcct

SEQ ID NO: 380884 - DNA, 15 bp, Homo sapiens
agttaggtgtcagcc

SEQ ID NO: 380885 - DNA, 15 bp, Homo sapiens
gagttaggtgtcagc

SEQ ID NO: 380886 - DNA, 15 bp, Homo sapiens
agagttaggtgtcag

SEQ ID NO: 380887 - DNA, 15 bp, Homo sapiens
aagagttaggtgtca

SEQ ID NO: 380888 - DNA, 15 bp, Homo sapiens
gaagagttaggtgtc

SEQ ID NO: 380889 - DNA, 15 bp, Homo sapiens
agaagagttaggtgt

SEQ ID NO: 380890 - DNA, 15 bp, Homo sapiens
aagaagagttaggtg

SEQ ID NO: 380891 - DNA, 15 bp, Homo sapiens
aaagaagagttaggt

SEQ ID NO: 380892 - DNA, 15 bp, Homo sapiens
gaaagaagagttagg

SEQ ID NO: 380893 - DNA, 15 bp, Homo sapiens
tgaaagaagagttag

SEQ ID NO: 380894 - DNA, 15 bp, Homo sapiens
atgaaagaagagtta

SEQ ID NO: 380895 - DNA, 15 bp, Homo sapiens
aatgaaagaagagtt

SEQ ID NO: 380896 - DNA, 15 bp, Homo sapiens
aaatgaaagaagagt

SEQ ID NO: 380897 - DNA, 15 bp, Homo sapiens
gaaatgaaagaagag

SEQ ID NO: 380898 - DNA, 15 bp, Homo sapiens
agaaatgaaagaaga

SEQ ID NO: 380899 - DNA, 15 bp, Homo sapiens
aagaaatgaaagaag

SEQ ID NO: 380900 - DNA, 15 bp, Homo sapiens
gaagaaatgaaagaa

SEQ ID NO: 380901 - DNA, 15 bp, Homo sapiens
agaagaaatgaaaga

SEQ ID NO: 380902 - DNA, 15 bp, Homo sapiens
tagaagaaatgaaag

SEQ ID NO: 380903 - DNA, 15 bp, Homo sapiens
gtagaagaaatgaaa

SEQ ID NO: 380904 - DNA, 15 bp, Homo sapiens
tgtagaagaaatgaa

SEQ ID NO: 380905 - DNA, 15 bp, Homo sapiens
ttgtagaagaaatga

SEQ ID NO: 380906 - DNA, 15 bp, Homo sapiens
gttgtagaagaaatg

SEQ ID NO: 380907 - DNA, 15 bp, Homo sapiens
agttgtagaagaaat

SEQ ID NO: 380908 - DNA, 15 bp, Homo sapiens
gagttgtagaagaaa

SEQ ID NO: 380909 - DNA, 15 bp, Homo sapiens
tgagttgtagaagaa

SEQ ID NO: 380910 - DNA, 15 bp, Homo sapiens
atgagttgtagaaga

SEQ ID NO: 380911 - DNA, 15 bp, Homo sapiens
tatgagttgtagaag

SEQ ID NO: 380912 - DNA, 15 bp, Homo sapiens
gtatgagttgtagaa

SEQ ID NO: 380913 - DNA, 15 bp, Homo sapiens
tgtatgagttgtaga

SEQ ID NO: 380914 - DNA, 15 bp, Homo sapiens
gtgtatgagttgtag

SEQ ID NO: 380915 - DNA, 15 bp, Homo sapiens
agtgtatgagttgta

SEQ ID NO: 380916 - DNA, 15 bp, Homo sapiens
gagtgtatgagttgt

SEQ ID NO: 380917 - DNA, 15 bp, Homo sapiens
cgagtgtatgagttg

SEQ ID NO: 380918 - DNA, 15 bp, Homo sapiens
acgagtgtatgagtt

SEQ ID NO: 380919 - DNA, 15 bp, Homo sapiens
tacgagtgtatgagt

SEQ ID NO: 380920 - DNA, 15 bp, Homo sapiens
atacgagtgtatgag

SEQ ID NO: 380921 - DNA, 15 bp, Homo sapiens
catacgagtgtatga

SEQ ID NO: 380922 - DNA, 15 bp, Homo sapiens
tcatacgagtgtatg

SEQ ID NO: 380923 - DNA, 15 bp, Homo sapiens
atcatacgagtgtat

SEQ ID NO: 380924 - DNA, 15 bp, Homo sapiens
tatcatacgagtgta

SEQ ID NO: 380925 - DNA, 15 bp, Homo sapiens
gtatcatacgagtgt

SEQ ID NO: 380926 - DNA, 15 bp, Homo sapiens
agtatcatacgagtg

SEQ ID NO: 380927 - DNA, 15 bp, Homo sapiens
aagtatcatacgagt

SEQ ID NO: 380928 - DNA, 15 bp, Homo sapiens
gaagtatcatacgag

SEQ ID NO: 380929 - DNA, 15 bp, Homo sapiens
cgaagtatcatacga

SEQ ID NO: 380930 - DNA, 15 bp, Homo sapiens
tcgaagtatcatacg

SEQ ID NO: 380931 - DNA, 15 bp, Homo sapiens
gtcgaagtatcatac

SEQ ID NO: 380932 - DNA, 15 bp, Homo sapiens
tgtcgaagtatcata

SEQ ID NO: 380933 - DNA, 15 bp, Homo sapiens
gtgtcgaagtatcat

SEQ ID NO: 380934 - DNA, 15 bp, Homo sapiens
agtgtcgaagtatca

SEQ ID NO: 380935 - DNA, 15 bp, Homo sapiens
cagtgtcgaagtatc

SEQ ID NO: 380936 - DNA, 15 bp, Homo sapiens
acagtgtcgaagtat

SEQ ID NO: 380937 - DNA, 15 bp, Homo sapiens
aacagtgtcgaagta

SEQ ID NO: 380938 - DNA, 15 bp, Homo sapiens
gaacagtgtcgaagt

SEQ ID NO: 380939 - DNA, 15 bp, Homo sapiens
agaacagtgtcgaag

SEQ ID NO: 380940 - DNA, 15 bp, Homo sapiens
aagaacagtgtcgaa

SEQ ID NO: 380941 - DNA, 15 bp, Homo sapiens
taagaacagtgtcga

SEQ ID NO: 380942 - DNA, 15 bp, Homo sapiens
ctaagaacagtgtcg

SEQ ID NO: 380943 - DNA, 15 bp, Homo sapiens
gctaagaacagtgtc

SEQ ID NO: 380944 - DNA, 15 bp, Homo sapiens
agctaagaacagtgt

SEQ ID NO: 380945 - DNA, 15 bp, Homo sapiens
gagctaagaacagtg

SEQ ID NO: 380946 - DNA, 15 bp, Homo sapiens
tgagctaagaacagt

SEQ ID NO: 380947 - DNA, 15 bp, Homo sapiens
ttgagctaagaacag

SEQ ID NO: 380948 - DNA, 15 bp, Homo sapiens
attgagctaagaaca

SEQ ID NO: 380949 - DNA, 15 bp, Homo sapiens
cattgagctaagaac

SEQ ID NO: 380950 - DNA, 15 bp, Homo sapiens
tcattgagctaagaa

SEQ ID NO: 380951 - DNA, 15 bp, Homo sapiens
ctcattgagctaaga

SEQ ID NO: 380952 - DNA, 15 bp, Homo sapiens
gctcattgagctaag

SEQ ID NO: 380953 - DNA, 15 bp, Homo sapiens
tgctcattgagctaa

SEQ ID NO: 380954 - DNA, 15 bp, Homo sapiens
atgctcattgagcta

SEQ ID NO: 380955 - DNA, 15 bp, Homo sapiens
catgctcattgagct

SEQ ID NO: 380956 - DNA, 15 bp, Homo sapiens
acatgctcattgagc

SEQ ID NO: 380957 - DNA, 15 bp, Homo sapiens
aacatgctcattgag

SEQ ID NO: 380958 - DNA, 15 bp, Homo sapiens
aaacatgctcattga

SEQ ID NO: 380959 - DNA, 15 bp, Homo sapiens
taaacatgctcattg

SEQ ID NO: 380960 - DNA, 15 bp, Homo sapiens
ctaaacatgctcatt

SEQ ID NO: 380961 - DNA, 15 bp, Homo sapiens
tctaaacatgctcat

SEQ ID NO: 380962 - DNA, 15 bp, Homo sapiens
gtctaaacatgctca

SEQ ID NO: 380963 - DNA, 15 bp, Homo sapiens
agtctaaacatgctc

SEQ ID NO: 380964 - DNA, 15 bp, Homo sapiens
aagtctaaacatgct

SEQ ID NO: 380965 - DNA, 15 bp, Homo sapiens
aaagtctaaacatgc

SEQ ID NO: 380966 - DNA, 15 bp, Homo sapiens
taaagtctaaacatg

SEQ ID NO: 380967 - DNA, 15 bp, Homo sapiens
ttaaagtctaaacat

SEQ ID NO: 380968 - DNA, 15 bp, Homo sapiens
gttaaagtctaaaca

SEQ ID NO: 380969 - DNA, 15 bp, Homo sapiens
tgttaaagtctaaac

SEQ ID NO: 380970 - DNA, 15 bp, Homo sapiens
atgttaaagtctaaa

SEQ ID NO: 380971 - DNA, 15 bp, Homo sapiens
tatgttaaagtctaa

SEQ ID NO: 380972 - DNA, 15 bp, Homo sapiens
ttatgttaaagtcta

SEQ ID NO: 380973 - DNA, 15 bp, Homo sapiens
cttatgttaaagtct

SEQ ID NO: 380974 - DNA, 15 bp, Homo sapiens
gcttatgttaaagtc

SEQ ID NO: 380975 - DNA, 15 bp, Homo sapiens
agcttatgttaaagt

SEQ ID NO: 380976 - DNA, 15 bp, Homo sapiens
tagcttatgttaaag

SEQ ID NO: 380977 - DNA, 15 bp, Homo sapiens
atagcttatgttaaa

SEQ ID NO: 380978 - DNA, 15 bp, Homo sapiens
aatagcttatgttaa

SEQ ID NO: 380979 - DNA, 15 bp, Homo sapiens
aaatagcttatgtta

SEQ ID NO: 380980 - DNA, 15 bp, Homo sapiens
aaaatagcttatgtt

SEQ ID NO: 380981 - DNA, 15 bp, Homo sapiens
aaaaatagcttatgt

SEQ ID NO: 380982 - DNA, 15 bp, Homo sapiens
gaaaaatagcttatg

SEQ ID NO: 380983 - DNA, 15 bp, Homo sapiens
agaaaaatagcttat

SEQ ID NO: 380984 - DNA, 15 bp, Homo sapiens
tagaaaaatagctta

SEQ ID NO: 380985 - DNA, 15 bp, Homo sapiens
ttagaaaaatagctt

SEQ ID NO: 380986 - DNA, 15 bp, Homo sapiens
gttagaaaaatagct

SEQ ID NO: 380987 - DNA, 15 bp, Homo sapiens
agttagaaaaatagc

SEQ ID NO: 380988 - DNA, 15 bp, Homo sapiens
tagttagaaaaatag

SEQ ID NO: 380989 - DNA, 15 bp, Homo sapiens
gtagttagaaaaata

SEQ ID NO: 380990 - DNA, 15 bp, Homo sapiens
tgtagttagaaaaat

SEQ ID NO: 380991 - DNA, 15 bp, Homo sapiens
ttgtagttagaaaaa

SEQ ID NO: 380992 - DNA, 15 bp, Homo sapiens
tttgtagttagaaaa

SEQ ID NO: 380993 - DNA, 15 bp, Homo sapiens
ctttgtagttagaaa

SEQ ID NO: 380994 - DNA, 15 bp, Homo sapiens
cctttgtagttagaa

SEQ ID NO: 380995 - DNA, 15 bp, Homo sapiens
acctttgtagttaga

SEQ ID NO: 380996 - DNA, 15 bp, Homo sapiens
aacctttgtagttag

SEQ ID NO: 380997 - DNA, 15 bp, Homo sapiens
aaacctttgtagtta

SEQ ID NO: 380998 - DNA, 15 bp, Homo sapiens
taaacctttgtagtt

SEQ ID NO: 380999 - DNA, 15 bp, Homo sapiens
ttaaacctttgtagt

SEQ ID NO: 381000 - DNA, 15 bp, Homo sapiens
tttaaacctttgtag

SEQ ID NO: 381001 - DNA, 15 bp, Homo sapiens
atttaaacctttgta

SEQ ID NO: 381002 - DNA, 15 bp, Homo sapiens
catttaaacctttgt

SEQ ID NO: 381003 - DNA, 15 bp, Homo sapiens
tcatttaaacctttg

SEQ ID NO: 381004 - DNA, 15 bp, Homo sapiens
ttcatttaaaccttt

SEQ ID NO: 381005 - DNA, 15 bp, Homo sapiens
gttcatttaaacctt

SEQ ID NO: 381006 - DNA, 15 bp, Homo sapiens
tgttcatttaaacct

SEQ ID NO: 381007 - DNA, 15 bp, Homo sapiens
ttgttcatttaaacc

SEQ ID NO: 381008 - DNA, 15 bp, Homo sapiens
cttgttcatttaaac

SEQ ID NO: 381009 - DNA, 15 bp, Homo sapiens
tcttgttcatttaaa

SEQ ID NO: 381010 - DNA, 15 bp, Homo sapiens
ctcttgttcatttaa

SEQ ID NO: 381011 - DNA, 15 bp, Homo sapiens
tctcttgttcattta

SEQ ID NO: 381012 - DNA, 15 bp, Homo sapiens
ttctcttgttcattt

SEQ ID NO: 381013 - DNA, 15 bp, Homo sapiens
cttctcttgttcatt

SEQ ID NO: 381014 - DNA, 15 bp, Homo sapiens
gcttctcttgttcat

SEQ ID NO: 381015 - DNA, 15 bp, Homo sapiens
tgcttctcttgttca

SEQ ID NO: 381016 - DNA, 15 bp, Homo sapiens
atgcttctcttgttc

SEQ ID NO: 381017 - DNA, 15 bp, Homo sapiens
aatgcttctcttgtt

SEQ ID NO: 381018 - DNA, 15 bp, Homo sapiens
gaatgcttctcttgt

SEQ ID NO: 381019 - DNA, 15 bp, Homo sapiens
agaatgcttctcttg

SEQ ID NO: 381020 - DNA, 15 bp, Homo sapiens
gagaatgcttctctt

SEQ ID NO: 381021 - DNA, 15 bp, Homo sapiens
tgagaatgcttctct

SEQ ID NO: 381022 - DNA, 15 bp, Homo sapiens
atgagaatgcttctc

SEQ ID NO: 381023 - DNA, 15 bp, Homo sapiens
aatgagaatgcttct

SEQ ID NO: 381024 - DNA, 15 bp, Homo sapiens
caatgagaatgcttc

SEQ ID NO: 381025 - DNA, 15 bp, Homo sapiens
ccaatgagaatgctt

SEQ ID NO: 381026 - DNA, 15 bp, Homo sapiens
tccaatgagaatgct

SEQ ID NO: 381027 - DNA, 15 bp, Homo sapiens
ttccaatgagaatgc

SEQ ID NO: 381028 - DNA, 15 bp, Homo sapiens
tttccaatgagaatg

SEQ ID NO: 381029 - DNA, 15 bp, Homo sapiens
atttccaatgagaat

SEQ ID NO: 381030 - DNA, 15 bp, Homo sapiens
aatttccaatgagaa

SEQ ID NO: 381031 - DNA, 15 bp, Homo sapiens
aaatttccaatgaga

SEQ ID NO: 381032 - DNA, 15 bp, Homo sapiens
taaatttccaatgag

SEQ ID NO: 381033 - DNA, 15 bp, Homo sapiens
ctaaatttccaatga

SEQ ID NO: 381034 - DNA, 15 bp, Homo sapiens
gctaaatttccaatg

SEQ ID NO: 381035 - DNA, 15 bp, Homo sapiens
tgctaaatttccaat

SEQ ID NO: 381036 - DNA, 15 bp, Homo sapiens
atgctaaatttccaa

SEQ ID NO: 381037 - DNA, 15 bp, Homo sapiens
aatgctaaatttcca

SEQ ID NO: 381038 - DNA, 15 bp, Homo sapiens
caatgctaaatttcc

SEQ ID NO: 381039 - DNA, 15 bp, Homo sapiens
acaatgctaaatttc

SEQ ID NO: 381040 - DNA, 15 bp, Homo sapiens
tacaatgctaaattt

SEQ ID NO: 381041 - DNA, 15 bp, Homo sapiens
ctacaatgctaaatt

SEQ ID NO: 381042 - DNA, 15 bp, Homo sapiens
actacaatgctaaat

SEQ ID NO: 381043 - DNA, 15 bp, Homo sapiens
cactacaatgctaaa

SEQ ID NO: 381044 - DNA, 15 bp, Homo sapiens
gcactacaatgctaa

SEQ ID NO: 381045 - DNA, 15 bp, Homo sapiens
agcactacaatgcta

SEQ ID NO: 381046 - DNA, 15 bp, Homo sapiens
aagcactacaatgct

SEQ ID NO: 381047 - DNA, 15 bp, Homo sapiens
aaagcactacaatgc

SEQ ID NO: 381048 - DNA, 15 bp, Homo sapiens
caaagcactacaatg

SEQ ID NO: 381049 - DNA, 15 bp, Homo sapiens
tcaaagcactacaat

SEQ ID NO: 381050 - DNA, 15 bp, Homo sapiens
ctcaaagcactacaa

SEQ ID NO: 381051 - DNA, 15 bp, Homo sapiens
tctcaaagcactaca

SEQ ID NO: 381052 - DNA, 15 bp, Homo sapiens
ctctcaaagcactac

SEQ ID NO: 381053 - DNA, 15 bp, Homo sapiens
tctctcaaagcacta

SEQ ID NO: 381054 - DNA, 15 bp, Homo sapiens
ctctctcaaagcact

SEQ ID NO: 381055 - DNA, 15 bp, Homo sapiens
tctctctcaaagcac

SEQ ID NO: 381056 - DNA, 15 bp, Homo sapiens
ttctctctcaaagca

SEQ ID NO: 381057 - DNA, 15 bp, Homo sapiens
tttctctctcaaagc

SEQ ID NO: 381058 - DNA, 15 bp, Homo sapiens
ctttctctctcaaag

SEQ ID NO: 381059 - DNA, 15 bp, Homo sapiens
cctttctctctcaaa

SEQ ID NO: 381060 - DNA, 15 bp, Homo sapiens
tcctttctctctcaa

SEQ ID NO: 381061 - DNA, 15 bp, Homo sapiens
gtcctttctctctca

SEQ ID NO: 381062 - DNA, 15 bp, Homo sapiens
agtcctttctctctc

SEQ ID NO: 381063 - DNA, 15 bp, Homo sapiens
gagtcctttctctct

SEQ ID NO: 381064 - DNA, 15 bp, Homo sapiens
ggagtcctttctctc

SEQ ID NO: 381065 - DNA, 15 bp, Homo sapiens
aggagtcctttctct

SEQ ID NO: 381066 - DNA, 15 bp, Homo sapiens
caggagtcctttctc

SEQ ID NO: 381067 - DNA, 15 bp, Homo sapiens
tcaggagtcctttct

SEQ ID NO: 381068 - DNA, 15 bp, Homo sapiens
ttcaggagtcctttc

SEQ ID NO: 381069 - DNA, 15 bp, Homo sapiens
tttcaggagtccttt

SEQ ID NO: 381070 - DNA, 15 bp, Homo sapiens
ttttcaggagtcctt

SEQ ID NO: 381071 - DNA, 15 bp, Homo sapiens
tttttcaggagtcct

SEQ ID NO: 381072 - DNA, 15 bp, Homo sapiens
ttttttcaggagtcc

SEQ ID NO: 381073 - DNA, 15 bp, Homo sapiens
tttttttcaggagtc

SEQ ID NO: 381074 - DNA, 15 bp, Homo sapiens
ttttttttcaggagt

SEQ ID NO: 381075 - DNA, 15 bp, Homo sapiens
gttttttttcaggag

SEQ ID NO: 381076 - DNA, 15 bp, Homo sapiens
ggttttttttcagga

SEQ ID NO: 381077 - DNA, 15 bp, Homo sapiens
aggttttttttcagg

SEQ ID NO: 381078 - DNA, 15 bp, Homo sapiens
caggttttttttcag

SEQ ID NO: 381079 - DNA, 15 bp, Homo sapiens
tcaggttttttttca

SEQ ID NO: 381080 - DNA, 15 bp, Homo sapiens
ctcaggttttttttc

SEQ ID NO: 381081 - DNA, 15 bp, Homo sapiens
tctcaggtttttttt

SEQ ID NO: 381082 - DNA, 15 bp, Homo sapiens
atctcaggttttttt

SEQ ID NO: 381083 - DNA, 15 bp, Homo sapiens
aatctcaggtttttt

SEQ ID NO: 381084 - DNA, 15 bp, Homo sapiens
aaatctcaggttttt

SEQ ID NO: 381085 - DNA, 15 bp, Homo sapiens
taaatctcaggtttt

SEQ ID NO: 381086 - DNA, 15 bp, Homo sapiens
ataaatctcaggttt

SEQ ID NO: 381087 - DNA, 15 bp, Homo sapiens
aataaatctcaggtt

SEQ ID NO: 381088 - DNA, 15 bp, Homo sapiens
taataaatctcaggt

SEQ ID NO: 381089 - DNA, 15 bp, Homo sapiens
ttaataaatctcagg

SEQ ID NO: 381090 - DNA, 15 bp, Homo sapiens
tttaataaatctcag

SEQ ID NO: 381091 - DNA, 15 bp, Homo sapiens
ctttaataaatctca

SEQ ID NO: 381092 - DNA, 15 bp, Homo sapiens
tctttaataaatctc

SEQ ID NO: 381093 - DNA, 15 bp, Homo sapiens
ttctttaataaatct

SEQ ID NO: 381094 - DNA, 15 bp, Homo sapiens
tttctttaataaatc

SEQ ID NO: 381095 - DNA, 15 bp, Homo sapiens
ttttctttaataaat

SEQ ID NO: 381096 - DNA, 15 bp, Homo sapiens
tttttctttaataaa

SEQ ID NO: 381097 - DNA, 15 bp, Homo sapiens
ttttttctttaataa

SEQ ID NO: 381098 - DNA, 15 bp, Homo sapiens
tttttttctttaata

SEQ ID NO: 381099 - DNA, 15 bp, Homo sapiens
atttttttctttaat

SEQ ID NO: 381100 - DNA, 15 bp, Homo sapiens
catttttttctttaa

SEQ ID NO: 381101 - DNA, 15 bp, Homo sapiens
acatttttttcttta

SEQ ID NO: 381102 - DNA, 15 bp, Homo sapiens
tacatttttttcttt

SEQ ID NO: 381103 - DNA, 15 bp, Homo sapiens
atacatttttttctt

SEQ ID NO: 381104 - DNA, 15 bp, Homo sapiens
aatacatttttttct

SEQ ID NO: 381105 - DNA, 15 bp, Homo sapiens
aaatacatttttttc

SEQ ID NO: 381106 - DNA, 15 bp, Homo sapiens
aaaatacattttttt

SEQ ID NO: 381107 - DNA, 15 bp, Homo sapiens
taaaatacatttttt

SEQ ID NO: 381108 - DNA, 15 bp, Homo sapiens
ataaaatacattttt

SEQ ID NO: 381109 - DNA, 15 bp, Homo sapiens
cataaaatacatttt

SEQ ID NO: 381110 - DNA, 15 bp, Homo sapiens
acataaaatacattt

SEQ ID NO: 381111 - DNA, 15 bp, Homo sapiens
aacataaaatacatt

SEQ ID NO: 381112 - DNA, 15 bp, Homo sapiens
taacataaaatacat

SEQ ID NO: 381113 - DNA, 15 bp, Homo sapiens
ataacataaaataca

SEQ ID NO: 381114 - DNA, 15 bp, Homo sapiens
tataacataaaatac

SEQ ID NO: 381115 - DNA, 15 bp, Homo sapiens
atataacataaaata

SEQ ID NO: 381116 - DNA, 15 bp, Homo sapiens
tatataacataaaat

SEQ ID NO: 381117 - DNA, 15 bp, Homo sapiens
atatataacataaaa

SEQ ID NO: 381118 - DNA, 15 bp, Homo sapiens
tatatataacataaa

SEQ ID NO: 381119 - DNA, 15 bp, Homo sapiens
ttatatataacataa

SEQ ID NO: 381120 - DNA, 15 bp, Homo sapiens
tttatatataacata

SEQ ID NO: 381121 - DNA, 15 bp, Homo sapiens
atttatatataacat

SEQ ID NO: 381122 - DNA, 15 bp, Homo sapiens
tatttatatataaca

SEQ ID NO: 381123 - DNA, 15 bp, Homo sapiens
atatttatatataac

SEQ ID NO: 381124 - DNA, 15 bp, Homo sapiens
tatatttatatataa

SEQ ID NO: 381125 - DNA, 15 bp, Homo sapiens
atatatttatatata

SEQ ID NO: 381126 - DNA, 15 bp, Homo sapiens
aatatatttatatat

SEQ ID NO: 381127 - DNA, 15 bp, Homo sapiens
taatatatttatata

SEQ ID NO: 381128 - DNA, 15 bp, Homo sapiens
ataatatatttatat

SEQ ID NO: 381129 - DNA, 15 bp, Homo sapiens
aataatatatttata

SEQ ID NO: 381130 - DNA, 15 bp, Homo sapiens
taataatatatttat

SEQ ID NO: 381131 - DNA, 15 bp, Homo sapiens
gtaataatatattta

SEQ ID NO: 381132 - DNA, 15 bp, Homo sapiens
agtaataatatattt

SEQ ID NO: 381133 - DNA, 15 bp, Homo sapiens
aagtaataatatatt

SEQ ID NO: 381134 - DNA, 15 bp, Homo sapiens
caagtaataatatat

SEQ ID NO: 381135 - DNA, 15 bp, Homo sapiens
acaagtaataatata

SEQ ID NO: 381136 - DNA, 15 bp, Homo sapiens
tacaagtaataatat

SEQ ID NO: 381137 - DNA, 15 bp, Homo sapiens
ttacaagtaataata

SEQ ID NO: 381138 - DNA, 15 bp, Homo sapiens
tttacaagtaataat

SEQ ID NO: 381139 - DNA, 15 bp, Homo sapiens
atttacaagtaataa

SEQ ID NO: 381140 - DNA, 15 bp, Homo sapiens
tatttacaagtaata

SEQ ID NO: 381141 - DNA, 15 bp, Homo sapiens
atatttacaagtaat

SEQ ID NO: 381142 - DNA, 15 bp, Homo sapiens
tatatttacaagtaa

SEQ ID NO: 381143 - DNA, 15 bp, Homo sapiens
ttatatttacaagta

SEQ ID NO: 381144 - DNA, 15 bp, Homo sapiens
tttatatttacaagt

SEQ ID NO: 381145 - DNA, 15 bp, Homo sapiens
ctttatatttacaag

SEQ ID NO: 381146 - DNA, 15 bp, Homo sapiens
tctttatatttacaa

SEQ ID NO: 381147 - DNA, 15 bp, Homo sapiens
gtctttatatttaca

SEQ ID NO: 381148 - DNA, 15 bp, Homo sapiens
cgtctttatatttac

SEQ ID NO: 381149 - DNA, 15 bp, Homo sapiens
acgtctttatattta

SEQ ID NO: 381150 - DNA, 15 bp, Homo sapiens
aacgtctttatattt

SEQ ID NO: 381151 - DNA, 15 bp, Homo sapiens
aaacgtctttatatt

SEQ ID NO: 381152 - DNA, 15 bp, Homo sapiens
aaaacgtctttatat

SEQ ID NO: 381153 - DNA, 15 bp, Homo sapiens
taaaacgtctttata

SEQ ID NO: 381154 - DNA, 15 bp, Homo sapiens
ataaaacgtctttat

SEQ ID NO: 381155 - DNA, 15 bp, Homo sapiens
tataaaacgtcttta

SEQ ID NO: 381156 - DNA, 15 bp, Homo sapiens
ttataaaacgtcttt

SEQ ID NO: 381157 - DNA, 15 bp, Homo sapiens
cttataaaacgtctt

SEQ ID NO: 381158 - DNA, 15 bp, Homo sapiens
gcttataaaacgtct

SEQ ID NO: 381159 - DNA, 15 bp, Homo sapiens
tgcttataaaacgtc

SEQ ID NO: 381160 - DNA, 15 bp, Homo sapiens
atgcttataaaacgt

SEQ ID NO: 381161 - DNA, 15 bp, Homo sapiens
gatgcttataaaacg

SEQ ID NO: 381162 - DNA, 15 bp, Homo sapiens
tgatgcttataaaac

SEQ ID NO: 381163 - DNA, 15 bp, Homo sapiens
atgatgcttataaaa

SEQ ID NO: 381164 - DNA, 15 bp, Homo sapiens
aatgatgcttataaa

SEQ ID NO: 381165 - DNA, 15 bp, Homo sapiens
taatgatgcttataa

SEQ ID NO: 381166 - DNA, 15 bp, Homo sapiens
ataatgatgcttata

SEQ ID NO: 381167 - DNA, 15 bp, Homo sapiens
aataatgatgcttat

SEQ ID NO: 381168 - DNA, 15 bp, Homo sapiens
aaataatgatgctta

SEQ ID NO: 381169 - DNA, 15 bp, Homo sapiens
taaataatgatgctt

SEQ ID NO: 381170 - DNA, 15 bp, Homo sapiens
ataaataatgatgct

SEQ ID NO: 381171 - DNA, 15 bp, Homo sapiens
cataaataatgatgc

SEQ ID NO: 381172 - DNA, 15 bp, Homo sapiens
acataaataatgatg

SEQ ID NO: 381173 - DNA, 15 bp, Homo sapiens
tacataaataatgat

SEQ ID NO: 381174 - DNA, 15 bp, Homo sapiens
atacataaataatga

SEQ ID NO: 381175 - DNA, 15 bp, Homo sapiens
aatacataaataatg

SEQ ID NO: 381176 - DNA, 15 bp, Homo sapiens
caatacataaataat

SEQ ID NO: 381177 - DNA, 15 bp, Homo sapiens
acaatacataaataa

SEQ ID NO: 381178 - DNA, 15 bp, Homo sapiens
cacaatacataaata

SEQ ID NO: 381179 - DNA, 15 bp, Homo sapiens
gcacaatacataaat

SEQ ID NO: 381180 - DNA, 15 bp, Homo sapiens
tgcacaatacataaa

SEQ ID NO: 381181 - DNA, 15 bp, Homo sapiens
ttgcacaatacataa

SEQ ID NO: 381182 - DNA, 15 bp, Homo sapiens
attgcacaatacata

SEQ ID NO: 381183 - DNA, 15 bp, Homo sapiens
cattgcacaatacat

SEQ ID NO: 381184 - DNA, 15 bp, Homo sapiens
acattgcacaataca

SEQ ID NO: 381185 - DNA, 15 bp, Homo sapiens
cacattgcacaatac

SEQ ID NO: 381186 - DNA, 15 bp, Homo sapiens
acacattgcacaata

SEQ ID NO: 381187 - DNA, 15 bp, Homo sapiens
tacacattgcacaat

SEQ ID NO: 381188 - DNA, 15 bp, Homo sapiens
atacacattgcacaa

SEQ ID NO: 381189 - DNA, 15 bp, Homo sapiens
tatacacattgcaca

SEQ ID NO: 381190 - DNA, 15 bp, Homo sapiens
ttatacacattgcac

SEQ ID NO: 381191 - DNA, 15 bp, Homo sapiens
tttatacacattgca

SEQ ID NO: 381192 - DNA, 15 bp, Homo sapiens
gtttatacacattgc

SEQ ID NO: 381193 - DNA, 15 bp, Homo sapiens
tgtttatacacattg

SEQ ID NO: 381194 - DNA, 15 bp, Homo sapiens
ttgtttatacacatt

SEQ ID NO: 381195 - DNA, 15 bp, Homo sapiens
cttgtttatacacat

SEQ ID NO: 381196 - DNA, 15 bp, Homo sapiens
tcttgtttatacaca

SEQ ID NO: 381197 - DNA, 15 bp, Homo sapiens
ttcttgtttatacac

SEQ ID NO: 381198 - DNA, 15 bp, Homo sapiens
tttcttgtttataca

SEQ ID NO: 381199 - DNA, 15 bp, Homo sapiens
ttttcttgtttatac

SEQ ID NO: 381200 - DNA, 15 bp, Homo sapiens
tttttcttgtttata

SEQ ID NO: 381201 - DNA, 15 bp, Homo sapiens
atttttcttgtttat

SEQ ID NO: 381202 - DNA, 15 bp, Homo sapiens
tatttttcttgttta

SEQ ID NO: 381203 - DNA, 15 bp, Homo sapiens
ttatttttcttgttt

SEQ ID NO: 381204 - DNA, 15 bp, Homo sapiens
tttatttttcttgtt

SEQ ID NO: 381205 - DNA, 15 bp, Homo sapiens
ctttatttttcttgt

SEQ ID NO: 381206 - DNA, 15 bp, Homo sapiens
tctttatttttcttg

SEQ ID NO: 381207 - DNA, 15 bp, Homo sapiens
ttctttatttttctt

SEQ ID NO: 381208 - DNA, 15 bp, Homo sapiens
tttctttatttttct

SEQ ID NO: 381209 - DNA, 15 bp, Homo sapiens
ttttctttatttttc

SEQ ID NO: 381210 - DNA, 15 bp, Homo sapiens
cttttctttattttt

SEQ ID NO: 381211 - DNA, 15 bp, Homo sapiens
tcttttctttatttt

SEQ ID NO: 381212 - DNA, 15 bp, Homo sapiens
atcttttctttattt

SEQ ID NO: 381213 - DNA, 15 bp, Homo sapiens
catcttttctttatt

SEQ ID NO: 381214 - DNA, 15 bp, Homo sapiens
gcatcttttctttat

SEQ ID NO: 381215 - DNA, 15 bp, Homo sapiens
tgcatcttttcttta

SEQ ID NO: 381216 - DNA, 15 bp, Homo sapiens
gtgcatcttttcttt

SEQ ID NO: 381217 - DNA, 15 bp, Homo sapiens
agtgcatcttttctt

SEQ ID NO: 381218 - DNA, 15 bp, Homo sapiens
aagtgcatcttttct

SEQ ID NO: 381219 - DNA, 15 bp, Homo sapiens
aaagtgcatcttttc

SEQ ID NO: 381220 - DNA, 15 bp, Homo sapiens
caaagtgcatctttt

SEQ ID NO: 381221 - DNA, 15 bp, Homo sapiens
gcaaagtgcatcttt

SEQ ID NO: 381222 - DNA, 15 bp, Homo sapiens
agcaaagtgcatctt

SEQ ID NO: 381223 - DNA, 15 bp, Homo sapiens
aagcaaagtgcatct

SEQ ID NO: 381224 - DNA, 15 bp, Homo sapiens
aaagcaaagtgcatc

SEQ ID NO: 381225 - DNA, 15 bp, Homo sapiens
taaagcaaagtgcat

SEQ ID NO: 381226 - DNA, 15 bp, Homo sapiens
ttaaagcaaagtgca

SEQ ID NO: 381227 - DNA, 15 bp, Homo sapiens
attaaagcaaagtgc

SEQ ID NO: 381228 - DNA, 15 bp, Homo sapiens
tattaaagcaaagtg

SEQ ID NO: 381229 - DNA, 15 bp, Homo sapiens
atattaaagcaaagt

SEQ ID NO: 381230 - DNA, 15 bp, Homo sapiens
tatattaaagcaaag

SEQ ID NO: 381231 - DNA, 15 bp, Homo sapiens
ttatattaaagcaaa

SEQ ID NO: 381232 - DNA, 15 bp, Homo sapiens
tttatattaaagcaa

SEQ ID NO: 381233 - DNA, 15 bp, Homo sapiens
atttatattaaagca

SEQ ID NO: 381234 - DNA, 15 bp, Homo sapiens
catttatattaaagc

SEQ ID NO: 381235 - DNA, 15 bp, Homo sapiens
gcatttatattaaag

SEQ ID NO: 381236 - DNA, 15 bp, Homo sapiens
tgcatttatattaaa

SEQ ID NO: 381237 - DNA, 15 bp, Homo sapiens
ttgcatttatattaa

SEQ ID NO: 381238 - DNA, 15 bp, Homo sapiens
tttgcatttatatta

SEQ ID NO: 381239 - DNA, 15 bp, Homo sapiens
atttgcatttatatt

SEQ ID NO: 381240 - DNA, 15 bp, Homo sapiens
tatttgcatttatat

SEQ ID NO: 381241 - DNA, 15 bp, Homo sapiens
ttatttgcatttata

SEQ ID NO: 381242 - DNA, 15 bp, Homo sapiens
gttatttgcatttat

SEQ ID NO: 381243 - DNA, 15 bp, Homo sapiens
tgttatttgcattta

SEQ ID NO: 381244 - DNA, 15 bp, Homo sapiens
ttgttatttgcattt

SEQ ID NO: 381245 - DNA, 15 bp, Homo sapiens
tttgttatttgcatt

SEQ ID NO: 381246 - DNA, 15 bp, Homo sapiens
atttgttatttgcat

SEQ ID NO: 381247 - DNA, 15 bp, Homo sapiens
catttgttatttgca

SEQ ID NO: 381248 - DNA, 15 bp, Homo sapiens
gcatttgttatttgc

SEQ ID NO: 381249 - DNA, 15 bp, Homo sapiens
ggcatttgttatttg

SEQ ID NO: 381250 - DNA, 15 bp, Homo sapiens
tggcatttgttattt

SEQ ID NO: 381251 - DNA, 15 bp, Homo sapiens
ttggcatttgttatt

SEQ ID NO: 381252 - DNA, 15 bp, Homo sapiens
tttggcatttgttat

SEQ ID NO: 381253 - DNA, 15 bp, Homo sapiens
atttggcatttgtta

SEQ ID NO: 381254 - DNA, 15 bp, Homo sapiens
aatttggcatttgtt

SEQ ID NO: 381255 - DNA, 15 bp, Homo sapiens
taatttggcatttgt

SEQ ID NO: 381256 - DNA, 15 bp, Homo sapiens
ttaatttggcatttg

SEQ ID NO: 381257 - DNA, 15 bp, Homo sapiens
tttaatttggcattt

SEQ ID NO: 381258 - DNA, 15 bp, Homo sapiens
ttttaatttggcatt

SEQ ID NO: 381259 - DNA, 15 bp, Homo sapiens
tttttaatttggcat

SEQ ID NO: 381260 - DNA, 15 bp, Homo sapiens
ttttttaatttggca

SEQ ID NO: 381261 - DNA, 15 bp, Homo sapiens
cttttttaatttggc

SEQ ID NO: 381262 - DNA, 15 bp, Homo sapiens
tcttttttaatttgg

SEQ ID NO: 381263 - DNA, 15 bp, Homo sapiens
atcttttttaatttg

SEQ ID NO: 381264 - DNA, 15 bp, Homo sapiens
tatcttttttaattt

SEQ ID NO: 381265 - DNA, 15 bp, Homo sapiens
ttatcttttttaatt

SEQ ID NO: 381266 - DNA, 15 bp, Homo sapiens
tttatcttttttaat

SEQ ID NO: 381267 - DNA, 15 bp, Homo sapiens
gtttatcttttttaa

SEQ ID NO: 381268 - DNA, 15 bp, Homo sapiens
tgtttatctttttta

SEQ ID NO: 381269 - DNA, 15 bp, Homo sapiens
gtgtttatctttttt

SEQ ID NO: 381270 - DNA, 15 bp, Homo sapiens
tgtgtttatcttttt

SEQ ID NO: 381271 - DNA, 15 bp, Homo sapiens
ttgtgtttatctttt

SEQ ID NO: 381272 - DNA, 15 bp, Homo sapiens
cttgtgtttatcttt

SEQ ID NO: 381273 - DNA, 15 bp, Homo sapiens
tcttgtgtttatctt

SEQ ID NO: 381274 - DNA, 15 bp, Homo sapiens
atcttgtgtttatct

SEQ ID NO: 381275 - DNA, 15 bp, Homo sapiens
aatcttgtgtttatc

SEQ ID NO: 381276 - DNA, 15 bp, Homo sapiens
caatcttgtgtttat

SEQ ID NO: 381277 - DNA, 15 bp, Homo sapiens
ccaatcttgtgttta

SEQ ID NO: 381278 - DNA, 15 bp, Homo sapiens
accaatcttgtgttt

SEQ ID NO: 381279 - DNA, 15 bp, Homo sapiens
caccaatcttgtgtt

SEQ ID NO: 381280 - DNA, 15 bp, Homo sapiens
acaccaatcttgtgt

SEQ ID NO: 381281 - DNA, 15 bp, Homo sapiens
aacaccaatcttgtg

SEQ ID NO: 381282 - DNA, 15 bp, Homo sapiens
aaacaccaatcttgt

SEQ ID NO: 381283 - DNA, 15 bp, Homo sapiens
aaaacaccaatcttg

SEQ ID NO: 381284 - DNA, 15 bp, Homo sapiens
aaaaacaccaatctt

SEQ ID NO: 381285 - DNA, 15 bp, Homo sapiens
aaaaaacaccaatct

SEQ ID NO: 381286 - DNA, 15 bp, Homo sapiens
aaaaaaacaccaatc

SEQ ID NO: 381287 - DNA, 15 bp, Homo sapiens
gaaaaaaacaccaat

SEQ ID NO: 381288 - DNA, 15 bp, Homo sapiens
agaaaaaaacaccaa

SEQ ID NO: 381289 - DNA, 15 bp, Homo sapiens
tagaaaaaaacacca

SEQ ID NO: 381290 - DNA, 15 bp, Homo sapiens
atagaaaaaaacacc

SEQ ID NO: 381291 - DNA, 15 bp, Homo sapiens
catagaaaaaaacac

SEQ ID NO: 381292 - DNA, 15 bp, Homo sapiens
ccatagaaaaaaaca

SEQ ID NO: 381293 - DNA, 15 bp, Homo sapiens
cccatagaaaaaaac

SEQ ID NO: 381294 - DNA, 15 bp, Homo sapiens
acccatagaaaaaaa

SEQ ID NO: 381295 - DNA, 15 bp, Homo sapiens
cacccatagaaaaaa

SEQ ID NO: 381296 - DNA, 15 bp, Homo sapiens
acacccatagaaaaa

SEQ ID NO: 381297 - DNA, 15 bp, Homo sapiens
aacacccatagaaaa

SEQ ID NO: 381298 - DNA, 15 bp, Homo sapiens
taacacccatagaaa

SEQ ID NO: 381299 - DNA, 15 bp, Homo sapiens
ataacacccatagaa

SEQ ID NO: 381300 - DNA, 15 bp, Homo sapiens
gataacacccataga

SEQ ID NO: 381301 - DNA, 15 bp, Homo sapiens
tgataacacccatag

SEQ ID NO: 381302 - DNA, 15 bp, Homo sapiens
gtgataacacccata

SEQ ID NO: 381303 - DNA, 15 bp, Homo sapiens
ggtgataacacccat

SEQ ID NO: 381304 - DNA, 15 bp, Homo sapiens
aggtgataacaccca

SEQ ID NO: 381305 - DNA, 15 bp, Homo sapiens
taggtgataacaccc

SEQ ID NO: 381306 - DNA, 15 bp, Homo sapiens
ctaggtgataacacc

SEQ ID NO: 381307 - DNA, 15 bp, Homo sapiens
gctaggtgataacac

SEQ ID NO: 381308 - DNA, 15 bp, Homo sapiens
agctaggtgataaca

SEQ ID NO: 381309 - DNA, 15 bp, Homo sapiens
cagctaggtgataac

SEQ ID NO: 381310 - DNA, 15 bp, Homo sapiens
tcagctaggtgataa

SEQ ID NO: 381311 - DNA, 15 bp, Homo sapiens
ttcagctaggtgata

SEQ ID NO: 381312 - DNA, 15 bp, Homo sapiens
attcagctaggtgat

SEQ ID NO: 381313 - DNA, 15 bp, Homo sapiens
cattcagctaggtga

SEQ ID NO: 381314 - DNA, 15 bp, Homo sapiens
acattcagctaggtg

SEQ ID NO: 381315 - DNA, 15 bp, Homo sapiens
aacattcagctaggt

SEQ ID NO: 381316 - DNA, 15 bp, Homo sapiens
aaacattcagctagg

SEQ ID NO: 381317 - DNA, 15 bp, Homo sapiens
aaaacattcagctag

SEQ ID NO: 381318 - DNA, 15 bp, Homo sapiens
aaaaacattcagcta

SEQ ID NO: 381319 - DNA, 15 bp, Homo sapiens
gaaaaacattcagct

SEQ ID NO: 381320 - DNA, 15 bp, Homo sapiens
agaaaaacattcagc

SEQ ID NO: 381321 - DNA, 15 bp, Homo sapiens
tagaaaaacattcag

SEQ ID NO: 381322 - DNA, 15 bp, Homo sapiens
ttagaaaaacattca

SEQ ID NO: 381323 - DNA, 15 bp, Homo sapiens
tttagaaaaacattc

SEQ ID NO: 381324 - DNA, 15 bp, Homo sapiens
ctttagaaaaacatt

SEQ ID NO: 381325 - DNA, 15 bp, Homo sapiens
cctttagaaaaacat

SEQ ID NO: 381326 - DNA, 15 bp, Homo sapiens
tcctttagaaaaaca

SEQ ID NO: 381327 - DNA, 15 bp, Homo sapiens
ctcctttagaaaaac

SEQ ID NO: 381328 - DNA, 15 bp, Homo sapiens
actcctttagaaaaa

SEQ ID NO: 381329 - DNA, 15 bp, Homo sapiens
aactcctttagaaaa

SEQ ID NO: 381330 - DNA, 15 bp, Homo sapiens
aaactcctttagaaa

SEQ ID NO: 381331 - DNA, 15 bp, Homo sapiens
taaactcctttagaa

SEQ ID NO: 381332 - DNA, 15 bp, Homo sapiens
ataaactcctttaga

SEQ ID NO: 381333 - DNA, 15 bp, Homo sapiens
cataaactcctttag

SEQ ID NO: 381334 - DNA, 15 bp, Homo sapiens
acataaactccttta

SEQ ID NO: 381335 - DNA, 15 bp, Homo sapiens
aacataaactccttt

SEQ ID NO: 381336 - DNA, 15 bp, Homo sapiens
gaacataaactcctt

SEQ ID NO: 381337 - DNA, 15 bp, Homo sapiens
ggaacataaactcct

SEQ ID NO: 381338 - DNA, 15 bp, Homo sapiens
tggaacataaactcc

SEQ ID NO: 381339 - DNA, 15 bp, Homo sapiens
atggaacataaactc

SEQ ID NO: 381340 - DNA, 15 bp, Homo sapiens
aatggaacataaact

SEQ ID NO: 381341 - DNA, 15 bp, Homo sapiens
taatggaacataaac

SEQ ID NO: 381342 - DNA, 15 bp, Homo sapiens
ttaatggaacataaa

SEQ ID NO: 381343 - DNA, 15 bp, Homo sapiens
tttaatggaacataa

SEQ ID NO: 381344 - DNA, 15 bp, Homo sapiens
gtttaatggaacata

SEQ ID NO: 381345 - DNA, 15 bp, Homo sapiens
cgtttaatggaacat

SEQ ID NO: 381346 - DNA, 15 bp, Homo sapiens
tcgtttaatggaaca

SEQ ID NO: 381347 - DNA, 15 bp, Homo sapiens
atcgtttaatggaac

SEQ ID NO: 381348 - DNA, 15 bp, Homo sapiens
aatcgtttaatggaa

SEQ ID NO: 381349 - DNA, 15 bp, Homo sapiens
aaatcgtttaatgga

SEQ ID NO: 381350 - DNA, 15 bp, Homo sapiens
aaaatcgtttaatgg

SEQ ID NO: 381351 - DNA, 15 bp, Homo sapiens
aaaaatcgtttaatg

SEQ ID NO: 381352 - DNA, 15 bp, Homo sapiens
taaaaatcgtttaat

SEQ ID NO: 381353 - DNA, 15 bp, Homo sapiens
ttaaaaatcgtttaa

SEQ ID NO: 381354 - DNA, 15 bp, Homo sapiens
tttaaaaatcgttta

SEQ ID NO: 381355 - DNA, 15 bp, Homo sapiens
ttttaaaaatcgttt

SEQ ID NO: 381356 - DNA, 15 bp, Homo sapiens
attttaaaaatcgtt

SEQ ID NO: 381357 - DNA, 15 bp, Homo sapiens
cattttaaaaatcgt

SEQ ID NO: 381358 - DNA, 15 bp, Homo sapiens
acattttaaaaatcg

SEQ ID NO: 381359 - DNA, 15 bp, Homo sapiens
tacattttaaaaatc

SEQ ID NO: 381360 - DNA, 15 bp, Homo sapiens
gtacattttaaaaat

SEQ ID NO: 381361 - DNA, 15 bp, Homo sapiens
tgtacattttaaaaa

SEQ ID NO: 381362 - DNA, 15 bp, Homo sapiens
gtgtacattttaaaa

SEQ ID NO: 381363 - DNA, 15 bp, Homo sapiens
agtgtacattttaaa

SEQ ID NO: 381364 - DNA, 15 bp, Homo sapiens
aagtgtacattttaa

SEQ ID NO: 381365 - DNA, 15 bp, Homo sapiens
caagtgtacatttta

SEQ ID NO: 381366 - DNA, 15 bp, Homo sapiens
tcaagtgtacatttt

SEQ ID NO: 381367 - DNA, 15 bp, Homo sapiens
atcaagtgtacattt

SEQ ID NO: 381368 - DNA, 15 bp, Homo sapiens
aatcaagtgtacatt

SEQ ID NO: 381369 - DNA, 15 bp, Homo sapiens
aaatcaagtgtacat

SEQ ID NO: 381370 - DNA, 15 bp, Homo sapiens
gaaatcaagtgtaca

SEQ ID NO: 381371 - DNA, 15 bp, Homo sapiens
tgaaatcaagtgtac

SEQ ID NO: 381372 - DNA, 15 bp, Homo sapiens
atgaaatcaagtgta

SEQ ID NO: 381373 - DNA, 15 bp, Homo sapiens
catgaaatcaagtgt

SEQ ID NO: 381374 - DNA, 15 bp, Homo sapiens
acatgaaatcaagtg

SEQ ID NO: 381375 - DNA, 15 bp, Homo sapiens
aacatgaaatcaagt

SEQ ID NO: 381376 - DNA, 15 bp, Homo sapiens
caacatgaaatcaag

SEQ ID NO: 381377 - DNA, 15 bp, Homo sapiens
acaacatgaaatcaa

SEQ ID NO: 381378 - DNA, 15 bp, Homo sapiens
gacaacatgaaatca

SEQ ID NO: 381379 - DNA, 15 bp, Homo sapiens
ggacaacatgaaatc

SEQ ID NO: 381380 - DNA, 15 bp, Homo sapiens
aggacaacatgaaat

SEQ ID NO: 381381 - DNA, 15 bp, Homo sapiens
gaggacaacatgaaa

SEQ ID NO: 381382 - DNA, 15 bp, Homo sapiens
ggaggacaacatgaa

SEQ ID NO: 381383 - DNA, 15 bp, Homo sapiens
tggaggacaacatga

SEQ ID NO: 381384 - DNA, 15 bp, Homo sapiens
ttggaggacaacatg

SEQ ID NO: 381385 - DNA, 15 bp, Homo sapiens
gttggaggacaacat

SEQ ID NO: 381386 - DNA, 15 bp, Homo sapiens
agttggaggacaaca

SEQ ID NO: 381387 - DNA, 15 bp, Homo sapiens
gagttggaggacaac

SEQ ID NO: 381388 - DNA, 15 bp, Homo sapiens
ggagttggaggacaa

SEQ ID NO: 381389 - DNA, 15 bp, Homo sapiens
aggagttggaggaca

SEQ ID NO: 381390 - DNA, 15 bp, Homo sapiens
aaggagttggaggac

SEQ ID NO: 381391 - DNA, 15 bp, Homo sapiens
aaaggagttggagga

SEQ ID NO: 381392 - DNA, 15 bp, Homo sapiens
aaaaggagttggagg

SEQ ID NO: 381393 - DNA, 15 bp, Homo sapiens
aaaaaggagttggag

SEQ ID NO: 381394 - DNA, 15 bp, Homo sapiens
gaaaaaggagttgga

SEQ ID NO: 381395 - DNA, 15 bp, Homo sapiens
agaaaaaggagttgg

SEQ ID NO: 381396 - DNA, 15 bp, Homo sapiens
aagaaaaaggagttg

SEQ ID NO: 381397 - DNA, 15 bp, Homo sapiens
gaagaaaaaggagtt

SEQ ID NO: 381398 - DNA, 15 bp, Homo sapiens
agaagaaaaaggagt

SEQ ID NO: 381399 - DNA, 15 bp, Homo sapiens
cagaagaaaaaggag

SEQ ID NO: 381400 - DNA, 15 bp, Homo sapiens
gcagaagaaaaagga

SEQ ID NO: 381401 - DNA, 15 bp, Homo sapiens
agcagaagaaaaagg

SEQ ID NO: 381402 - DNA, 15 bp, Homo sapiens
cagcagaagaaaaag

SEQ ID NO: 381403 - DNA, 15 bp, Homo sapiens
gcagcagaagaaaaa

SEQ ID NO: 381404 - DNA, 15 bp, Homo sapiens
agcagcagaagaaaa

SEQ ID NO: 381405 - DNA, 15 bp, Homo sapiens
aagcagcagaagaaa

SEQ ID NO: 381406 - DNA, 15 bp, Homo sapiens
caagcagcagaagaa

SEQ ID NO: 381407 - DNA, 15 bp, Homo sapiens
ccaagcagcagaaga

SEQ ID NO: 381408 - DNA, 15 bp, Homo sapiens
tccaagcagcagaag

SEQ ID NO: 381409 - DNA, 15 bp, Homo sapiens
ctccaagcagcagaa

SEQ ID NO: 381410 - DNA, 15 bp, Homo sapiens
cctccaagcagcaga

SEQ ID NO: 381411 - DNA, 15 bp, Homo sapiens
ccctccaagcagcag

SEQ ID NO: 381412 - DNA, 15 bp, Homo sapiens
tccctccaagcagca

SEQ ID NO: 381413 - DNA, 15 bp, Homo sapiens
ctccctccaagcagc

SEQ ID NO: 381414 - DNA, 15 bp, Homo sapiens
actccctccaagcag

SEQ ID NO: 381415 - DNA, 15 bp, Homo sapiens
cactccctccaagca

SEQ ID NO: 381416 - DNA, 15 bp, Homo sapiens
ccactccctccaagc

SEQ ID NO: 381417 - DNA, 15 bp, Homo sapiens
cccactccctccaag

SEQ ID NO: 381418 - DNA, 15 bp, Homo sapiens
ccccactccctccaa

SEQ ID NO: 381419 - DNA, 15 bp, Homo sapiens
tccccactccctcca

SEQ ID NO: 381420 - DNA, 15 bp, Homo sapiens
ctccccactccctcc

SEQ ID NO: 381421 - DNA, 15 bp, Homo sapiens
cctccccactccctc

SEQ ID NO: 381422 - DNA, 15 bp, Homo sapiens
tcctccccactccct

SEQ ID NO: 381423 - DNA, 15 bp, Homo sapiens
ctcctccccactccc

SEQ ID NO: 381424 - DNA, 15 bp, Homo sapiens
actcctccccactcc

SEQ ID NO: 381425 - DNA, 15 bp, Homo sapiens
cactcctccccactc

SEQ ID NO: 381426 - DNA, 15 bp, Homo sapiens
tcactcctccccact

SEQ ID NO: 381427 - DNA, 15 bp, Homo sapiens
ctcactcctccccac

SEQ ID NO: 381428 - DNA, 15 bp, Homo sapiens
actcactcctcccca

SEQ ID NO: 381429 - DNA, 15 bp, Homo sapiens
tactcactcctcccc

SEQ ID NO: 381430 - DNA, 15 bp, Homo sapiens
atactcactcctccc

SEQ ID NO: 381431 - DNA, 15 bp, Homo sapiens
aatactcactcctcc

SEQ ID NO: 381432 - DNA, 15 bp, Homo sapiens
gaatactcactcctc

SEQ ID NO: 381433 - DNA, 15 bp, Homo sapiens
tgaatactcactcct

SEQ ID NO: 381434 - DNA, 15 bp, Homo sapiens
atgaatactcactcc

SEQ ID NO: 381435 - DNA, 15 bp, Homo sapiens
gatgaatactcactc

SEQ ID NO: 381436 - DNA, 15 bp, Homo sapiens
ggatgaatactcact

SEQ ID NO: 381437 - DNA, 15 bp, Homo sapiens
tggatgaatactcac

SEQ ID NO: 381438 - DNA, 15 bp, Homo sapiens
ttggatgaatactca

SEQ ID NO: 381439 - DNA, 15 bp, Homo sapiens
tttggatgaatactc

SEQ ID NO: 381440 - DNA, 15 bp, Homo sapiens
atttggatgaatact

SEQ ID NO: 381441 - DNA, 15 bp, Homo sapiens
aatttggatgaatac

SEQ ID NO: 381442 - DNA, 15 bp, Homo sapiens
gaatttggatgaata

SEQ ID NO: 381443 - DNA, 15 bp, Homo sapiens
tgaatttggatgaat

SEQ ID NO: 381444 - DNA, 15 bp, Homo sapiens
ctgaatttggatgaa

SEQ ID NO: 381445 - DNA, 15 bp, Homo sapiens
actgaatttggatga

SEQ ID NO: 381446 - DNA, 15 bp, Homo sapiens
aactgaatttggatg

SEQ ID NO: 381447 - DNA, 15 bp, Homo sapiens
caactgaatttggat

SEQ ID NO: 381448 - DNA, 15 bp, Homo sapiens
tcaactgaatttgga

SEQ ID NO: 381449 - DNA, 15 bp, Homo sapiens
ctcaactgaatttgg

SEQ ID NO: 381450 - DNA, 15 bp, Homo sapiens
actcaactgaatttg

SEQ ID NO: 381451 - DNA, 15 bp, Homo sapiens
aactcaactgaattt

SEQ ID NO: 381452 - DNA, 15 bp, Homo sapiens
caactcaactgaatt

SEQ ID NO: 381453 - DNA, 15 bp, Homo sapiens
ccaactcaactgaat

SEQ ID NO: 381454 - DNA, 15 bp, Homo sapiens
gccaactcaactgaa

SEQ ID NO: 381455 - DNA, 15 bp, Homo sapiens
cgccaactcaactga

SEQ ID NO: 381456 - DNA, 15 bp, Homo sapiens
acgccaactcaactg

SEQ ID NO: 381457 - DNA, 15 bp, Homo sapiens
gacgccaactcaact

SEQ ID NO: 381458 - DNA, 15 bp, Homo sapiens
agacgccaactcaac

SEQ ID NO: 381459 - DNA, 15 bp, Homo sapiens
aagacgccaactcaa

SEQ ID NO: 381460 - DNA, 15 bp, Homo sapiens
gaagacgccaactca

SEQ ID NO: 381461 - DNA, 15 bp, Homo sapiens
ggaagacgccaactc

SEQ ID NO: 381462 - DNA, 15 bp, Homo sapiens
gggaagacgccaact

SEQ ID NO: 381463 - DNA, 15 bp, Homo sapiens
tgggaagacgccaac

SEQ ID NO: 381464 - DNA, 15 bp, Homo sapiens
ctgggaagacgccaa

SEQ ID NO: 381465 - DNA, 15 bp, Homo sapiens
gctgggaagacgcca

SEQ ID NO: 381466 - DNA, 15 bp, Homo sapiens
ggctgggaagacgcc

SEQ ID NO: 381467 - DNA, 15 bp, Homo sapiens
gggctgggaagacgc

SEQ ID NO: 381468 - DNA, 15 bp, Homo sapiens
tgggctgggaagacg

SEQ ID NO: 381469 - DNA, 15 bp, Homo sapiens
ctgggctgggaagac

SEQ ID NO: 381470 - DNA, 15 bp, Homo sapiens
actgggctgggaaga

SEQ ID NO: 381471 - DNA, 15 bp, Homo sapiens
cactgggctgggaag

SEQ ID NO: 381472 - DNA, 15 bp, Homo sapiens
gcactgggctgggaa

SEQ ID NO: 381473 - DNA, 15 bp, Homo sapiens
agcactgggctggga

SEQ ID NO: 381474 - DNA, 15 bp, Homo sapiens
aagcactgggctggg

SEQ ID NO: 381475 - DNA, 15 bp, Homo sapiens
caagcactgggctgg

SEQ ID NO: 381476 - DNA, 15 bp, Homo sapiens
ccaagcactgggctg

SEQ ID NO: 381477 - DNA, 15 bp, Homo sapiens
tccaagcactgggct

SEQ ID NO: 381478 - DNA, 15 bp, Homo sapiens
ctccaagcactgggc

SEQ ID NO: 381479 - DNA, 15 bp, Homo sapiens
cctccaagcactggg

SEQ ID NO: 381480 - DNA, 15 bp, Homo sapiens
tcctccaagcactgg

SEQ ID NO: 381481 - DNA, 15 bp, Homo sapiens
atcctccaagcactg

SEQ ID NO: 381482 - DNA, 15 bp, Homo sapiens
catcctccaagcact

SEQ ID NO: 381483 - DNA, 15 bp, Homo sapiens
ccatcctccaagcac

SEQ ID NO: 381484 - DNA, 15 bp, Homo sapiens
cccatcctccaagca

SEQ ID NO: 381485 - DNA, 15 bp, Homo sapiens
tcccatcctccaagc

SEQ ID NO: 381486 - DNA, 15 bp, Homo sapiens
ctcccatcctccaag

SEQ ID NO: 381487 - DNA, 15 bp, Homo sapiens
tctcccatcctccaa

SEQ ID NO: 381488 - DNA, 15 bp, Homo sapiens
gtctcccatcctcca

SEQ ID NO: 381489 - DNA, 15 bp, Homo sapiens
cgtctcccatcctcc

SEQ ID NO: 381490 - DNA, 15 bp, Homo sapiens
acgtctcccatcctc

SEQ ID NO: 381491 - DNA, 15 bp, Homo sapiens
cacgtctcccatcct

SEQ ID NO: 381492 - DNA, 15 bp, Homo sapiens
ccacgtctcccatcc

SEQ ID NO: 381493 - DNA, 15 bp, Homo sapiens
cccacgtctcccatc

SEQ ID NO: 381494 - DNA, 15 bp, Homo sapiens
gcccacgtctcccat

SEQ ID NO: 381495 - DNA, 15 bp, Homo sapiens
ggcccacgtctccca

SEQ ID NO: 381496 - DNA, 15 bp, Homo sapiens
tggcccacgtctccc

SEQ ID NO: 381497 - DNA, 15 bp, Homo sapiens
gtggcccacgtctcc

SEQ ID NO: 381498 - DNA, 15 bp, Homo sapiens
tgtggcccacgtctc

SEQ ID NO: 381499 - DNA, 15 bp, Homo sapiens
ttgtggcccacgtct

SEQ ID NO: 381500 - DNA, 15 bp, Homo sapiens
tttgtggcccacgtc

SEQ ID NO: 381501 - DNA, 15 bp, Homo sapiens
ttttgtggcccacgt

SEQ ID NO: 381502 - DNA, 15 bp, Homo sapiens
cttttgtggcccacg

SEQ ID NO: 381503 - DNA, 15 bp, Homo sapiens
tcttttgtggcccac

SEQ ID NO: 381504 - DNA, 15 bp, Homo sapiens
ctcttttgtggccca

SEQ ID NO: 381505 - DNA, 15 bp, Homo sapiens
tctcttttgtggccc

SEQ ID NO: 381506 - DNA, 15 bp, Homo sapiens
gtctcttttgtggcc

SEQ ID NO: 381507 - DNA, 15 bp, Homo sapiens
tgtctcttttgtggc

SEQ ID NO: 381508 - DNA, 15 bp, Homo sapiens
atgtctcttttgtgg

SEQ ID NO: 381509 - DNA, 15 bp, Homo sapiens
gatgtctcttttgtg

SEQ ID NO: 381510 - DNA, 15 bp, Homo sapiens
agatgtctcttttgt

SEQ ID NO: 381511 - DNA, 15 bp, Homo sapiens
tagatgtctcttttg

SEQ ID NO: 381512 - DNA, 15 bp, Homo sapiens
ctagatgtctctttt

SEQ ID NO: 381513 - DNA, 15 bp, Homo sapiens
tctagatgtctcttt

SEQ ID NO: 381514 - DNA, 15 bp, Homo sapiens
ttctagatgtctctt

SEQ ID NO: 381515 - DNA, 15 bp, Homo sapiens
gttctagatgtctct

SEQ ID NO: 381516 - DNA, 15 bp, Homo sapiens
tgttctagatgtctc

SEQ ID NO: 381517 - DNA, 15 bp, Homo sapiens
ctgttctagatgtct

SEQ ID NO: 381518 - DNA, 15 bp, Homo sapiens
gctgttctagatgtc

SEQ ID NO: 381519 - DNA, 15 bp, Homo sapiens
ggctgttctagatgt

SEQ ID NO: 381520 - DNA, 15 bp, Homo sapiens
gggctgttctagatg

SEQ ID NO: 381521 - DNA, 15 bp, Homo sapiens
agggctgttctagat

SEQ ID NO: 381522 - DNA, 15 bp, Homo sapiens
cagggctgttctaga

SEQ ID NO: 381523 - DNA, 15 bp, Homo sapiens
ccagggctgttctag

SEQ ID NO: 381524 - DNA, 15 bp, Homo sapiens
accagggctgttcta

SEQ ID NO: 381525 - DNA, 15 bp, Homo sapiens
gaccagggctgttct

SEQ ID NO: 381526 - DNA, 15 bp, Homo sapiens
agaccagggctgttc

SEQ ID NO: 381527 - DNA, 15 bp, Homo sapiens
aagaccagggctgtt

SEQ ID NO: 381528 - DNA, 15 bp, Homo sapiens
gaagaccagggctgt

SEQ ID NO: 381529 - DNA, 15 bp, Homo sapiens
tgaagaccagggctg

SEQ ID NO: 381530 - DNA, 15 bp, Homo sapiens
ttgaagaccagggct

SEQ ID NO: 381531 - DNA, 15 bp, Homo sapiens
cttgaagaccagggc

SEQ ID NO: 381532 - DNA, 15 bp, Homo sapiens
tcttgaagaccaggg

SEQ ID NO: 381533 - DNA, 15 bp, Homo sapiens
ctcttgaagaccagg

SEQ ID NO: 381534 - DNA, 15 bp, Homo sapiens
actcttgaagaccag

SEQ ID NO: 381535 - DNA, 15 bp, Homo sapiens
cactcttgaagacca

SEQ ID NO: 381536 - DNA, 15 bp, Homo sapiens
gcactcttgaagacc

SEQ ID NO: 381537 - DNA, 15 bp, Homo sapiens
agcactcttgaagac

SEQ ID NO: 381538 - DNA, 15 bp, Homo sapiens
cagcactcttgaaga

SEQ ID NO: 381539 - DNA, 15 bp, Homo sapiens
ccagcactcttgaag

SEQ ID NO: 381540 - DNA, 15 bp, Homo sapiens
tccagcactcttgaa

SEQ ID NO: 381541 - DNA, 15 bp, Homo sapiens
ttccagcactcttga

SEQ ID NO: 381542 - DNA, 15 bp, Homo sapiens
tttccagcactcttg

SEQ ID NO: 381543 - DNA, 15 bp, Homo sapiens
ctttccagcactctt

SEQ ID NO: 381544 - DNA, 15 bp, Homo sapiens
tctttccagcactct

SEQ ID NO: 381545 - DNA, 15 bp, Homo sapiens
gtctttccagcactc

SEQ ID NO: 381546 - DNA, 15 bp, Homo sapiens
ggtctttccagcact

SEQ ID NO: 381547 - DNA, 15 bp, Homo sapiens
aggtctttccagcac

SEQ ID NO: 381548 - DNA, 15 bp, Homo sapiens
caggtctttccagca

SEQ ID NO: 381549 - DNA, 15 bp, Homo sapiens
gcaggtctttccagc

SEQ ID NO: 381550 - DNA, 15 bp, Homo sapiens
tgcaggtctttccag

SEQ ID NO: 381551 - DNA, 15 bp, Homo sapiens
ctgcaggtctttcca

SEQ ID NO: 381552 - DNA, 15 bp, Homo sapiens
gctgcaggtctttcc

SEQ ID NO: 381553 - DNA, 15 bp, Homo sapiens
ggctgcaggtctttc

SEQ ID NO: 381554 - DNA, 15 bp, Homo sapiens
tggctgcaggtcttt

SEQ ID NO: 381555 - DNA, 15 bp, Homo sapiens
gtggctgcaggtctt

SEQ ID NO: 381556 - DNA, 15 bp, Homo sapiens
ggtggctgcaggtct

SEQ ID NO: 381557 - DNA, 15 bp, Homo sapiens
gggtggctgcaggtc

SEQ ID NO: 381558 - DNA, 15 bp, Homo sapiens
tgggtggctgcaggt

SEQ ID NO: 381559 - DNA, 15 bp, Homo sapiens
ctgggtggctgcagg

SEQ ID NO: 381560 - DNA, 15 bp, Homo sapiens
tctgggtggctgcag

SEQ ID NO: 381561 - DNA, 15 bp, Homo sapiens
gtctgggtggctgca

SEQ ID NO: 381562 - DNA, 15 bp, Homo sapiens
tgtctgggtggctgc

SEQ ID NO: 381563 - DNA, 15 bp, Homo sapiens
atgtctgggtggctg

SEQ ID NO: 381564 - DNA, 15 bp, Homo sapiens
gatgtctgggtggct

SEQ ID NO: 381565 - DNA, 15 bp, Homo sapiens
ggatgtctgggtggc

SEQ ID NO: 381566 - DNA, 15 bp, Homo sapiens
gggatgtctgggtgg

SEQ ID NO: 381567 - DNA, 15 bp, Homo sapiens
agggatgtctgggtg

SEQ ID NO: 381568 - DNA, 15 bp, Homo sapiens
gagggatgtctgggt

SEQ ID NO: 381569 - DNA, 15 bp, Homo sapiens
ggagggatgtctggg

SEQ ID NO: 381570 - DNA, 15 bp, Homo sapiens
aggagggatgtctgg

SEQ ID NO: 381571 - DNA, 15 bp, Homo sapiens
aaggagggatgtctg

SEQ ID NO: 381572 - DNA, 15 bp, Homo sapiens
gaaggagggatgtct

SEQ ID NO: 381573 - DNA, 15 bp, Homo sapiens
agaaggagggatgtc

SEQ ID NO: 381574 - DNA, 15 bp, Homo sapiens
aagaaggagggatgt

SEQ ID NO: 381575 - DNA, 15 bp, Homo sapiens
caagaaggagggatg

SEQ ID NO: 381576 - DNA, 15 bp, Homo sapiens
acaagaaggagggat

SEQ ID NO: 381577 - DNA, 15 bp, Homo sapiens
cacaagaaggaggga

SEQ ID NO: 381578 - DNA, 15 bp, Homo sapiens
acacaagaaggaggg

SEQ ID NO: 381579 - DNA, 15 bp, Homo sapiens
gacacaagaaggagg

SEQ ID NO: 381580 - DNA, 15 bp, Homo sapiens
agacacaagaaggag

SEQ ID NO: 381581 - DNA, 15 bp, Homo sapiens
aagacacaagaagga

SEQ ID NO: 381582 - DNA, 15 bp, Homo sapiens
caagacacaagaagg

SEQ ID NO: 381583 - DNA, 15 bp, Homo sapiens
tcaagacacaagaag

SEQ ID NO: 381584 - DNA, 15 bp, Homo sapiens
ttcaagacacaagaa

SEQ ID NO: 381585 - DNA, 15 bp, Homo sapiens
attcaagacacaaga

SEQ ID NO: 381586 - DNA, 15 bp, Homo sapiens
aattcaagacacaag

SEQ ID NO: 381587 - DNA, 15 bp, Homo sapiens
aaattcaagacacaa

SEQ ID NO: 381588 - DNA, 15 bp, Homo sapiens
caaattcaagacaca

SEQ ID NO: 381589 - DNA, 15 bp, Homo sapiens
acaaattcaagacac

SEQ ID NO: 381590 - DNA, 15 bp, Homo sapiens
tacaaattcaagaca

SEQ ID NO: 381591 - DNA, 15 bp, Homo sapiens
ttacaaattcaagac

SEQ ID NO: 381592 - DNA, 15 bp, Homo sapiens
attacaaattcaaga

SEQ ID NO: 381593 - DNA, 15 bp, Homo sapiens
cattacaaattcaag

SEQ ID NO: 381594 - DNA, 15 bp, Homo sapiens
ccattacaaattcaa

SEQ ID NO: 381595 - DNA, 15 bp, Homo sapiens
cccattacaaattca

SEQ ID NO: 381596 - DNA, 15 bp, Homo sapiens
tcccattacaaattc

SEQ ID NO: 381597 - DNA, 15 bp, Homo sapiens
ctcccattacaaatt

SEQ ID NO: 381598 - DNA, 15 bp, Homo sapiens
tctcccattacaaat

SEQ ID NO: 381599 - DNA, 15 bp, Homo sapiens
gtctcccattacaaa

SEQ ID NO: 381600 - DNA, 15 bp, Homo sapiens
tgtctcccattacaa

SEQ ID NO: 381601 - DNA, 15 bp, Homo sapiens
ttgtctcccattaca

SEQ ID NO: 381602 - DNA, 15 bp, Homo sapiens
gttgtctcccattac

SEQ ID NO: 381603 - DNA, 15 bp, Homo sapiens
ggttgtctcccatta

SEQ ID NO: 381604 - DNA, 15 bp, Homo sapiens
aggttgtctcccatt

SEQ ID NO: 381605 - DNA, 15 bp, Homo sapiens
taggttgtctcccat

SEQ ID NO: 381606 - DNA, 15 bp, Homo sapiens
gtaggttgtctccca

SEQ ID NO: 381607 - DNA, 15 bp, Homo sapiens
tgtaggttgtctccc

SEQ ID NO: 381608 - DNA, 15 bp, Homo sapiens
ctgtaggttgtctcc

SEQ ID NO: 381609 - DNA, 15 bp, Homo sapiens
cctgtaggttgtctc

SEQ ID NO: 381610 - DNA, 15 bp, Homo sapiens
tcctgtaggttgtct

SEQ ID NO: 381611 - DNA, 15 bp, Homo sapiens
ctcctgtaggttgtc

SEQ ID NO: 381612 - DNA, 15 bp, Homo sapiens
gctcctgtaggttgt

SEQ ID NO: 381613 - DNA, 15 bp, Homo sapiens
agctcctgtaggttg

SEQ ID NO: 381614 - DNA, 15 bp, Homo sapiens
gagctcctgtaggtt

SEQ ID NO: 381615 - DNA, 15 bp, Homo sapiens
agagctcctgtaggt

SEQ ID NO: 381616 - DNA, 15 bp, Homo sapiens
cagagctcctgtagg

SEQ ID NO: 381617 - DNA, 15 bp, Homo sapiens
acagagctcctgtag

SEQ ID NO: 381618 - DNA, 15 bp, Homo sapiens
cacagagctcctgta

SEQ ID NO: 381619 - DNA, 15 bp, Homo sapiens
ccacagagctcctgt

SEQ ID NO: 381620 - DNA, 15 bp, Homo sapiens
cccacagagctcctg

SEQ ID NO: 381621 - DNA, 15 bp, Homo sapiens
acccacagagctcct

SEQ ID NO: 381622 - DNA, 15 bp, Homo sapiens
cacccacagagctcc

SEQ ID NO: 381623 - DNA, 15 bp, Homo sapiens
tcacccacagagctc

SEQ ID NO: 381624 - DNA, 15 bp, Homo sapiens
atcacccacagagct

SEQ ID NO: 381625 - DNA, 15 bp, Homo sapiens
tatcacccacagagc

SEQ ID NO: 381626 - DNA, 15 bp, Homo sapiens
ttatcacccacagag

SEQ ID NO: 381627 - DNA, 15 bp, Homo sapiens
attatcacccacaga

SEQ ID NO: 381628 - DNA, 15 bp, Homo sapiens
aattatcacccacag

SEQ ID NO: 381629 - DNA, 15 bp, Homo sapiens
gaattatcacccaca

SEQ ID NO: 381630 - DNA, 15 bp, Homo sapiens
tgaattatcacccac

SEQ ID NO: 381631 - DNA, 15 bp, Homo sapiens
ttgaattatcaccca

SEQ ID NO: 381632 - DNA, 15 bp, Homo sapiens
tttgaattatcaccc

SEQ ID NO: 381633 - DNA, 15 bp, Homo sapiens
ctttgaattatcacc

SEQ ID NO: 381634 - DNA, 15 bp, Homo sapiens
gctttgaattatcac

SEQ ID NO: 381635 - DNA, 15 bp, Homo sapiens
agctttgaattatca

SEQ ID NO: 381636 - DNA, 15 bp, Homo sapiens
aagctttgaattatc

SEQ ID NO: 381637 - DNA, 15 bp, Homo sapiens
caagctttgaattat

SEQ ID NO: 381638 - DNA, 15 bp, Homo sapiens
acaagctttgaatta

SEQ ID NO: 381639 - DNA, 15 bp, Homo sapiens
tacaagctttgaatt

SEQ ID NO: 381640 - DNA, 15 bp, Homo sapiens
ctacaagctttgaat

SEQ ID NO: 381641 - DNA, 15 bp, Homo sapiens
tctacaagctttgaa

SEQ ID NO: 381642 - DNA, 15 bp, Homo sapiens
ttctacaagctttga

SEQ ID NO: 381643 - DNA, 15 bp, Homo sapiens
attctacaagctttg

SEQ ID NO: 381644 - DNA, 15 bp, Homo sapiens
aattctacaagcttt

SEQ ID NO: 381645 - DNA, 15 bp, Homo sapiens
caattctacaagctt

SEQ ID NO: 381646 - DNA, 15 bp, Homo sapiens
tcaattctacaagct

SEQ ID NO: 381647 - DNA, 15 bp, Homo sapiens
ctcaattctacaagc

SEQ ID NO: 381648 - DNA, 15 bp, Homo sapiens
cctcaattctacaag

SEQ ID NO: 381649 - DNA, 15 bp, Homo sapiens
tcctcaattctacaa

SEQ ID NO: 381650 - DNA, 15 bp, Homo sapiens
gtcctcaattctaca

SEQ ID NO: 381651 - DNA, 15 bp, Homo sapiens
tgtcctcaattctac

SEQ ID NO: 381652 - DNA, 15 bp, Homo sapiens
ctgtcctcaattcta

SEQ ID NO: 381653 - DNA, 15 bp, Homo sapiens
cctgtcctcaattct

SEQ ID NO: 381654 - DNA, 15 bp, Homo sapiens
ccctgtcctcaattc

SEQ ID NO: 381655 - DNA, 15 bp, Homo sapiens
tccctgtcctcaatt

SEQ ID NO: 381656 - DNA, 15 bp, Homo sapiens
ttccctgtcctcaat

SEQ ID NO: 381657 - DNA, 15 bp, Homo sapiens
attccctgtcctcaa

SEQ ID NO: 381658 - DNA, 15 bp, Homo sapiens
aattccctgtcctca

SEQ ID NO: 381659 - DNA, 15 bp, Homo sapiens
taattccctgtcctc

SEQ ID NO: 381660 - DNA, 15 bp, Homo sapiens
gtaattccctgtcct

SEQ ID NO: 381661 - DNA, 15 bp, Homo sapiens
tgtaattccctgtcc

SEQ ID NO: 381662 - DNA, 15 bp, Homo sapiens
atgtaattccctgtc

SEQ ID NO: 381663 - DNA, 15 bp, Homo sapiens
gatgtaattccctgt

SEQ ID NO: 381664 - DNA, 15 bp, Homo sapiens
agatgtaattccctg

SEQ ID NO: 381665 - DNA, 15 bp, Homo sapiens
tagatgtaattccct

SEQ ID NO: 381666 - DNA, 15 bp, Homo sapiens
ctagatgtaattccc

SEQ ID NO: 381667 - DNA, 15 bp, Homo sapiens
cctagatgtaattcc

SEQ ID NO: 381668 - DNA, 15 bp, Homo sapiens
ccctagatgtaattc

SEQ ID NO: 381669 - DNA, 15 bp, Homo sapiens
accctagatgtaatt

SEQ ID NO: 381670 - DNA, 15 bp, Homo sapiens
taccctagatgtaat

SEQ ID NO: 381671 - DNA, 15 bp, Homo sapiens
ttaccctagatgtaa

SEQ ID NO: 381672 - DNA, 15 bp, Homo sapiens
attaccctagatgta

SEQ ID NO: 381673 - DNA, 15 bp, Homo sapiens
cattaccctagatgt

SEQ ID NO: 381674 - DNA, 15 bp, Homo sapiens
ccattaccctagatg

SEQ ID NO: 381675 - DNA, 15 bp, Homo sapiens
cccattaccctagat

SEQ ID NO: 381676 - DNA, 15 bp, Homo sapiens
tcccattaccctaga

SEQ ID NO: 381677 - DNA, 15 bp, Homo sapiens
ttcccattaccctag

SEQ ID NO: 381678 - DNA, 15 bp, Homo sapiens
cttcccattacccta

SEQ ID NO: 381679 - DNA, 15 bp, Homo sapiens
ccttcccattaccct

SEQ ID NO: 381680 - DNA, 15 bp, Homo sapiens
tccttcccattaccc

SEQ ID NO: 381681 - DNA, 15 bp, Homo sapiens
ctccttcccattacc

SEQ ID NO: 381682 - DNA, 15 bp, Homo sapiens
tctccttcccattac

SEQ ID NO: 381683 - DNA, 15 bp, Homo sapiens
gtctccttcccatta

SEQ ID NO: 381684 - DNA, 15 bp, Homo sapiens
tgtctccttcccatt

SEQ ID NO: 381685 - DNA, 15 bp, Homo sapiens
ctgtctccttcccat

SEQ ID NO: 381686 - DNA, 15 bp, Homo sapiens
cctgtctccttccca

SEQ ID NO: 381687 - DNA, 15 bp, Homo sapiens
tcctgtctccttccc

SEQ ID NO: 381688 - DNA, 15 bp, Homo sapiens
atcctgtctccttcc

SEQ ID NO: 381689 - DNA, 15 bp, Homo sapiens
aatcctgtctccttc

SEQ ID NO: 381690 - DNA, 15 bp, Homo sapiens
taatcctgtctcctt

SEQ ID NO: 381691 - DNA, 15 bp, Homo sapiens
ctaatcctgtctcct

SEQ ID NO: 381692 - DNA, 15 bp, Homo sapiens
tctaatcctgtctcc

SEQ ID NO: 381693 - DNA, 15 bp, Homo sapiens
ctctaatcctgtctc

SEQ ID NO: 381694 - DNA, 15 bp, Homo sapiens
cctctaatcctgtct

SEQ ID NO: 381695 - DNA, 15 bp, Homo sapiens
tcctctaatcctgtc

SEQ ID NO: 381696 - DNA, 15 bp, Homo sapiens
atcctctaatcctgt

SEQ ID NO: 381697 - DNA, 15 bp, Homo sapiens
catcctctaatcctg

SEQ ID NO: 381698 - DNA, 15 bp, Homo sapiens
ccatcctctaatcct

SEQ ID NO: 381699 - DNA, 15 bp, Homo sapiens
tccatcctctaatcc

SEQ ID NO: 381700 - DNA, 15 bp, Homo sapiens
atccatcctctaatc

SEQ ID NO: 381701 - DNA, 15 bp, Homo sapiens
catccatcctctaat

SEQ ID NO: 381702 - DNA, 15 bp, Homo sapiens
ccatccatcctctaa

SEQ ID NO: 381703 - DNA, 15 bp, Homo sapiens
tccatccatcctcta

SEQ ID NO: 381704 - DNA, 15 bp, Homo sapiens
atccatccatcctct

SEQ ID NO: 381705 - DNA, 15 bp, Homo sapiens
catccatccatcctc

SEQ ID NO: 381706 - DNA, 15 bp, Homo sapiens
ccatccatccatcct

SEQ ID NO: 381707 - DNA, 15 bp, Homo sapiens
tccatccatccatcc

SEQ ID NO: 381708 - DNA, 15 bp, Homo sapiens
ctccatccatccatc

SEQ ID NO: 381709 - DNA, 15 bp, Homo sapiens
tctccatccatccat

SEQ ID NO: 381710 - DNA, 15 bp, Homo sapiens
ttctccatccatcca

SEQ ID NO: 381711 - DNA, 15 bp, Homo sapiens
cttctccatccatcc

SEQ ID NO: 381712 - DNA, 15 bp, Homo sapiens
acttctccatccatc

SEQ ID NO: 381713 - DNA, 15 bp, Homo sapiens
aacttctccatccat

SEQ ID NO: 381714 - DNA, 15 bp, Homo sapiens
aaacttctccatcca

SEQ ID NO: 381715 - DNA, 15 bp, Homo sapiens
taaacttctccatcc

SEQ ID NO: 381716 - DNA, 15 bp, Homo sapiens
ctaaacttctccatc

SEQ ID NO: 381717 - DNA, 15 bp, Homo sapiens
gctaaacttctccat

SEQ ID NO: 381718 - DNA, 15 bp, Homo sapiens
ggctaaacttctcca

SEQ ID NO: 381719 - DNA, 15 bp, Homo sapiens
gggctaaacttctcc

SEQ ID NO: 381720 - DNA, 15 bp, Homo sapiens
ggggctaaacttctc

SEQ ID NO: 381721 - DNA, 15 bp, Homo sapiens
tggggctaaacttct

SEQ ID NO: 381722 - DNA, 15 bp, Homo sapiens
ttggggctaaacttc

SEQ ID NO: 381723 - DNA, 15 bp, Homo sapiens
cttggggctaaactt

SEQ ID NO: 381724 - DNA, 15 bp, Homo sapiens
tcttggggctaaact

SEQ ID NO: 381725 - DNA, 15 bp, Homo sapiens
ttcttggggctaaac

SEQ ID NO: 381726 - DNA, 15 bp, Homo sapiens
gttcttggggctaaa

SEQ ID NO: 381727 - DNA, 15 bp, Homo sapiens
ggttcttggggctaa

SEQ ID NO: 381728 - DNA, 15 bp, Homo sapiens
aggttcttggggcta

SEQ ID NO: 381729 - DNA, 15 bp, Homo sapiens
caggttcttggggct

SEQ ID NO: 381730 - DNA, 15 bp, Homo sapiens
ccaggttcttggggc

SEQ ID NO: 381731 - DNA, 15 bp, Homo sapiens
cccaggttcttgggg

SEQ ID NO: 381732 - DNA, 15 bp, Homo sapiens
acccaggttcttggg

SEQ ID NO: 381733 - DNA, 15 bp, Homo sapiens
gacccaggttcttgg

SEQ ID NO: 381734 - DNA, 15 bp, Homo sapiens
ggacccaggttcttg

SEQ ID NO: 381735 - DNA, 15 bp, Homo sapiens
tggacccaggttctt

SEQ ID NO: 381736 - DNA, 15 bp, Homo sapiens
atggacccaggttct

SEQ ID NO: 381737 - DNA, 15 bp, Homo sapiens
gatggacccaggttc

SEQ ID NO: 381738 - DNA, 15 bp, Homo sapiens
agatggacccaggtt

SEQ ID NO: 381739 - DNA, 15 bp, Homo sapiens
cagatggacccaggt

SEQ ID NO: 381740 - DNA, 15 bp, Homo sapiens
ccagatggacccagg

SEQ ID NO: 381741 - DNA, 15 bp, Homo sapiens
accagatggacccag

SEQ ID NO: 381742 - DNA, 15 bp, Homo sapiens
aaccagatggaccca

SEQ ID NO: 381743 - DNA, 15 bp, Homo sapiens
gaaccagatggaccc

SEQ ID NO: 381744 - DNA, 15 bp, Homo sapiens
agaaccagatggacc

SEQ ID NO: 381745 - DNA, 15 bp, Homo sapiens
aagaaccagatggac

SEQ ID NO: 381746 - DNA, 15 bp, Homo sapiens
caagaaccagatgga

SEQ ID NO: 381747 - DNA, 15 bp, Homo sapiens
gcaagaaccagatgg

SEQ ID NO: 381748 - DNA, 15 bp, Homo sapiens
ggcaagaaccagatg

SEQ ID NO: 381749 - DNA, 15 bp, Homo sapiens
tggcaagaaccagat

SEQ ID NO: 381750 - DNA, 15 bp, Homo sapiens
ttggcaagaaccaga

SEQ ID NO: 381751 - DNA, 15 bp, Homo sapiens
gttggcaagaaccag

SEQ ID NO: 381752 - DNA, 15 bp, Homo sapiens
agttggcaagaacca

SEQ ID NO: 381753 - DNA, 15 bp, Homo sapiens
gagttggcaagaacc

SEQ ID NO: 381754 - DNA, 15 bp, Homo sapiens
ggagttggcaagaac

SEQ ID NO: 381755 - DNA, 15 bp, Homo sapiens
aggagttggcaagaa

SEQ ID NO: 381756 - DNA, 15 bp, Homo sapiens
gaggagttggcaaga

SEQ ID NO: 381757 - DNA, 15 bp, Homo sapiens
tgaggagttggcaag

SEQ ID NO: 381758 - DNA, 15 bp, Homo sapiens
gtgaggagttggcaa

SEQ ID NO: 381759 - DNA, 15 bp, Homo sapiens
agtgaggagttggca

SEQ ID NO: 381760 - DNA, 15 bp, Homo sapiens
aagtgaggagttggc

SEQ ID NO: 381761 - DNA, 15 bp, Homo sapiens
caagtgaggagttgg

SEQ ID NO: 381762 - DNA, 15 bp, Homo sapiens
ccaagtgaggagttg

SEQ ID NO: 381763 - DNA, 15 bp, Homo sapiens
accaagtgaggagtt

SEQ ID NO: 381764 - DNA, 15 bp, Homo sapiens
taccaagtgaggagt

SEQ ID NO: 381765 - DNA, 15 bp, Homo sapiens
ataccaagtgaggag

SEQ ID NO: 381766 - DNA, 15 bp, Homo sapiens
aataccaagtgagga

SEQ ID NO: 381767 - DNA, 15 bp, Homo sapiens
taataccaagtgagg

SEQ ID NO: 381768 - DNA, 15 bp, Homo sapiens
ttaataccaagtgag

SEQ ID NO: 381769 - DNA, 15 bp, Homo sapiens
tttaataccaagtga

SEQ ID NO: 381770 - DNA, 15 bp, Homo sapiens
atttaataccaagtg

SEQ ID NO: 381771 - DNA, 15 bp, Homo sapiens
gatttaataccaagt

SEQ ID NO: 381772 - DNA, 15 bp, Homo sapiens
ggatttaataccaag

SEQ ID NO: 381773 - DNA, 15 bp, Homo sapiens
aggatttaataccaa

SEQ ID NO: 381774 - DNA, 15 bp, Homo sapiens
taggatttaatacca

SEQ ID NO: 381775 - DNA, 15 bp, Homo sapiens
ttaggatttaatacc

SEQ ID NO: 381776 - DNA, 15 bp, Homo sapiens
cttaggatttaatac

SEQ ID NO: 381777 - DNA, 15 bp, Homo sapiens
gcttaggatttaata

SEQ ID NO: 381778 - DNA, 15 bp, Homo sapiens
ggcttaggatttaat

SEQ ID NO: 381779 - DNA, 15 bp, Homo sapiens
aggcttaggatttaa

SEQ ID NO: 381780 - DNA, 15 bp, Homo sapiens
taggcttaggattta

SEQ ID NO: 381781 - DNA, 15 bp, Homo sapiens
gtaggcttaggattt

SEQ ID NO: 381782 - DNA, 15 bp, Homo sapiens
agtaggcttaggatt

SEQ ID NO: 381783 - DNA, 15 bp, Homo sapiens
cagtaggcttaggat

SEQ ID NO: 381784 - DNA, 15 bp, Homo sapiens
acagtaggcttagga

SEQ ID NO: 381785 - DNA, 15 bp, Homo sapiens
tacagtaggcttagg

SEQ ID NO: 381786 - DNA, 15 bp, Homo sapiens
gtacagtaggcttag

SEQ ID NO: 381787 - DNA, 15 bp, Homo sapiens
ggtacagtaggctta

SEQ ID NO: 381788 - DNA, 15 bp, Homo sapiens
gggtacagtaggctt

SEQ ID NO: 381789 - DNA, 15 bp, Homo sapiens
ggggtacagtaggct

SEQ ID NO: 381790 - DNA, 15 bp, Homo sapiens
aggggtacagtaggc

SEQ ID NO: 381791 - DNA, 15 bp, Homo sapiens
caggggtacagtagg

SEQ ID NO: 381792 - DNA, 15 bp, Homo sapiens
gcaggggtacagtag

SEQ ID NO: 381793 - DNA, 15 bp, Homo sapiens
agcaggggtacagta

SEQ ID NO: 381794 - DNA, 15 bp, Homo sapiens
tagcaggggtacagt

SEQ ID NO: 381795 - DNA, 15 bp, Homo sapiens
ctagcaggggtacag

SEQ ID NO: 381796 - DNA, 15 bp, Homo sapiens
tctagcaggggtaca

SEQ ID NO: 381797 - DNA, 15 bp, Homo sapiens
gtctagcaggggtac

SEQ ID NO: 381798 - DNA, 15 bp, Homo sapiens
agtctagcaggggta

SEQ ID NO: 381799 - DNA, 15 bp, Homo sapiens
cagtctagcaggggt

SEQ ID NO: 381800 - DNA, 15 bp, Homo sapiens
ccagtctagcagggg

SEQ ID NO: 381801 - DNA, 15 bp, Homo sapiens
tccagtctagcaggg

SEQ ID NO: 381802 - DNA, 15 bp, Homo sapiens
atccagtctagcagg

SEQ ID NO: 381803 - DNA, 15 bp, Homo sapiens
aatccagtctagcag

SEQ ID NO: 381804 - DNA, 15 bp, Homo sapiens
gaatccagtctagca

SEQ ID NO: 381805 - DNA, 15 bp, Homo sapiens
ggaatccagtctagc

SEQ ID NO: 381806 - DNA, 15 bp, Homo sapiens
tggaatccagtctag

SEQ ID NO: 381807 - DNA, 15 bp, Homo sapiens
ctggaatccagtcta

SEQ ID NO: 381808 - DNA, 15 bp, Homo sapiens
cctggaatccagtct

SEQ ID NO: 381809 - DNA, 15 bp, Homo sapiens
tcctggaatccagtc

SEQ ID NO: 381810 - DNA, 15 bp, Homo sapiens
ctcctggaatccagt

SEQ ID NO: 381811 - DNA, 15 bp, Homo sapiens
tctcctggaatccag

SEQ ID NO: 381812 - DNA, 15 bp, Homo sapiens
ttctcctggaatcca

SEQ ID NO: 381813 - DNA, 15 bp, Homo sapiens
cttctcctggaatcc

SEQ ID NO: 381814 - DNA, 15 bp, Homo sapiens
acttctcctggaatc

SEQ ID NO: 381815 - DNA, 15 bp, Homo sapiens
aacttctcctggaat

SEQ ID NO: 381816 - DNA, 15 bp, Homo sapiens
aaacttctcctggaa

SEQ ID NO: 381817 - DNA, 15 bp, Homo sapiens
gaaacttctcctgga

SEQ ID NO: 381818 - DNA, 15 bp, Homo sapiens
ggaaacttctcctgg

SEQ ID NO: 381819 - DNA, 15 bp, Homo sapiens
aggaaacttctcctg

SEQ ID NO: 381820 - DNA, 15 bp, Homo sapiens
caggaaacttctcct

SEQ ID NO: 381821 - DNA, 15 bp, Homo sapiens
ccaggaaacttctcc

SEQ ID NO: 381822 - DNA, 15 bp, Homo sapiens
cccaggaaacttctc

SEQ ID NO: 381823 - DNA, 15 bp, Homo sapiens
ccccaggaaacttct

SEQ ID NO: 381824 - DNA, 15 bp, Homo sapiens
cccccaggaaacttc

SEQ ID NO: 381825 - DNA, 15 bp, Homo sapiens
gcccccaggaaactt

SEQ ID NO: 381826 - DNA, 15 bp, Homo sapiens
agcccccaggaaact

SEQ ID NO: 381827 - DNA, 15 bp, Homo sapiens
cagcccccaggaaac

SEQ ID NO: 381828 - DNA, 15 bp, Homo sapiens
tcagcccccaggaaa

SEQ ID NO: 381829 - DNA, 15 bp, Homo sapiens
ctcagcccccaggaa

SEQ ID NO: 381830 - DNA, 15 bp, Homo sapiens
tctcagcccccagga

SEQ ID NO: 381831 - DNA, 15 bp, Homo sapiens
gtctcagcccccagg

SEQ ID NO: 381832 - DNA, 15 bp, Homo sapiens
ggtctcagcccccag

SEQ ID NO: 381833 - DNA, 15 bp, Homo sapiens
gggtctcagccccca

SEQ ID NO: 381834 - DNA, 15 bp, Homo sapiens
agggtctcagccccc

SEQ ID NO: 381835 - DNA, 15 bp, Homo sapiens
cagggtctcagcccc

SEQ ID NO: 381836 - DNA, 15 bp, Homo sapiens
ccagggtctcagccc

SEQ ID NO: 381837 - DNA, 15 bp, Homo sapiens
tccagggtctcagcc

SEQ ID NO: 381838 - DNA, 15 bp, Homo sapiens
ttccagggtctcagc

SEQ ID NO: 381839 - DNA, 15 bp, Homo sapiens
cttccagggtctcag

SEQ ID NO: 381840 - DNA, 15 bp, Homo sapiens
ccttccagggtctca

SEQ ID NO: 381841 - DNA, 15 bp, Homo sapiens
cccttccagggtctc

SEQ ID NO: 381842 - DNA, 15 bp, Homo sapiens
acccttccagggtct

SEQ ID NO: 381843 - DNA, 15 bp, Homo sapiens
cacccttccagggtc

SEQ ID NO: 381844 - DNA, 15 bp, Homo sapiens
tcacccttccagggt

SEQ ID NO: 381845 - DNA, 15 bp, Homo sapiens
atcacccttccaggg

SEQ ID NO: 381846 - DNA, 15 bp, Homo sapiens
catcacccttccagg

SEQ ID NO: 381847 - DNA, 15 bp, Homo sapiens
tcatcacccttccag

SEQ ID NO: 381848 - DNA, 15 bp, Homo sapiens
ttcatcacccttcca

SEQ ID NO: 381849 - DNA, 15 bp, Homo sapiens
cttcatcacccttcc

SEQ ID NO: 381850 - DNA, 15 bp, Homo sapiens
ccttcatcacccttc

SEQ ID NO: 381851 - DNA, 15 bp, Homo sapiens
accttcatcaccctt

SEQ ID NO: 381852 - DNA, 15 bp, Homo sapiens
caccttcatcaccct

SEQ ID NO: 381853 - DNA, 15 bp, Homo sapiens
ccaccttcatcaccc

SEQ ID NO: 381854 - DNA, 15 bp, Homo sapiens
cccaccttcatcacc

SEQ ID NO: 381855 - DNA, 15 bp, Homo sapiens
ccccaccttcatcac

SEQ ID NO: 381856 - DNA, 15 bp, Homo sapiens
cccccaccttcatca

SEQ ID NO: 381857 - DNA, 15 bp, Homo sapiens
acccccaccttcatc

SEQ ID NO: 381858 - DNA, 15 bp, Homo sapiens
aacccccaccttcat

SEQ ID NO: 381859 - DNA, 15 bp, Homo sapiens
caacccccaccttca

SEQ ID NO: 381860 - DNA, 15 bp, Homo sapiens
tcaacccccaccttc

SEQ ID NO: 381861 - DNA, 15 bp, Homo sapiens
ttcaacccccacctt

SEQ ID NO: 381862 - DNA, 15 bp, Homo sapiens
attcaacccccacct

SEQ ID NO: 381863 - DNA, 15 bp, Homo sapiens
cattcaacccccacc

SEQ ID NO: 381864 - DNA, 15 bp, Homo sapiens
acattcaacccccac

SEQ ID NO: 381865 - DNA, 15 bp, Homo sapiens
gacattcaaccccca

SEQ ID NO: 381866 - DNA, 15 bp, Homo sapiens
tgacattcaaccccc

SEQ ID NO: 381867 - DNA, 15 bp, Homo sapiens
ctgacattcaacccc

SEQ ID NO: 381868 - DNA, 15 bp, Homo sapiens
actgacattcaaccc

SEQ ID NO: 381869 - DNA, 15 bp, Homo sapiens
cactgacattcaacc

SEQ ID NO: 381870 - DNA, 15 bp, Homo sapiens
ccactgacattcaac

SEQ ID NO: 381871 - DNA, 15 bp, Homo sapiens
accactgacattcaa

SEQ ID NO: 381872 - DNA, 15 bp, Homo sapiens
caccactgacattca

SEQ ID NO: 381873 - DNA, 15 bp, Homo sapiens
acaccactgacattc

SEQ ID NO: 381874 - DNA, 15 bp, Homo sapiens
aacaccactgacatt

SEQ ID NO: 381875 - DNA, 15 bp, Homo sapiens
gaacaccactgacat

SEQ ID NO: 381876 - DNA, 15 bp, Homo sapiens
tgaacaccactgaca

SEQ ID NO: 381877 - DNA, 15 bp, Homo sapiens
ctgaacaccactgac

SEQ ID NO: 381878 - DNA, 15 bp, Homo sapiens
tctgaacaccactga

SEQ ID NO: 381879 - DNA, 15 bp, Homo sapiens
ctctgaacaccactg

SEQ ID NO: 381880 - DNA, 15 bp, Homo sapiens
cctctgaacaccact

SEQ ID NO: 381881 - DNA, 15 bp, Homo sapiens
ccctctgaacaccac

SEQ ID NO: 381882 - DNA, 15 bp, Homo sapiens
tccctctgaacacca

SEQ ID NO: 381883 - DNA, 15 bp, Homo sapiens
gtccctctgaacacc

SEQ ID NO: 381884 - DNA, 15 bp, Homo sapiens
agtccctctgaacac

SEQ ID NO: 381885 - DNA, 15 bp, Homo sapiens
tagtccctctgaaca

SEQ ID NO: 381886 - DNA, 15 bp, Homo sapiens
ctagtccctctgaac

SEQ ID NO: 381887 - DNA, 15 bp, Homo sapiens
cctagtccctctgaa

SEQ ID NO: 381888 - DNA, 15 bp, Homo sapiens
gcctagtccctctga

SEQ ID NO: 381889 - DNA, 15 bp, Homo sapiens
ggcctagtccctctg

SEQ ID NO: 381890 - DNA, 15 bp, Homo sapiens
tggcctagtccctct

SEQ ID NO: 381891 - DNA, 15 bp, Homo sapiens
gtggcctagtccctc

SEQ ID NO: 381892 - DNA, 15 bp, Homo sapiens
ggtggcctagtccct

SEQ ID NO: 381893 - DNA, 15 bp, Homo sapiens
aggtggcctagtccc

SEQ ID NO: 381894 - DNA, 15 bp, Homo sapiens
gaggtggcctagtcc

SEQ ID NO: 381895 - DNA, 15 bp, Homo sapiens
ggaggtggcctagtc

SEQ ID NO: 381896 - DNA, 15 bp, Homo sapiens
aggaggtggcctagt

SEQ ID NO: 381897 - DNA, 15 bp, Homo sapiens
caggaggtggcctag

SEQ ID NO: 381898 - DNA, 15 bp, Homo sapiens
ccaggaggtggccta

SEQ ID NO: 381899 - DNA, 15 bp, Homo sapiens
gccaggaggtggcct

SEQ ID NO: 381900 - DNA, 15 bp, Homo sapiens
cgccaggaggtggcc

SEQ ID NO: 381901 - DNA, 15 bp, Homo sapiens
gcgccaggaggtggc

SEQ ID NO: 381902 - DNA, 15 bp, Homo sapiens
ggcgccaggaggtgg

SEQ ID NO: 381903 - DNA, 15 bp, Homo sapiens
gggcgccaggaggtg

SEQ ID NO: 381904 - DNA, 15 bp, Homo sapiens
agggcgccaggaggt

SEQ ID NO: 381905 - DNA, 15 bp, Homo sapiens
gagggcgccaggagg

SEQ ID NO: 381906 - DNA, 15 bp, Homo sapiens
ggagggcgccaggag

SEQ ID NO: 381907 - DNA, 15 bp, Homo sapiens
gggagggcgccagga

SEQ ID NO: 381908 - DNA, 15 bp, Homo sapiens
tgggagggcgccagg

SEQ ID NO: 381909 - DNA, 15 bp, Homo sapiens
ttgggagggcgccag

SEQ ID NO: 381910 - DNA, 15 bp, Homo sapiens
tttgggagggcgcca

SEQ ID NO: 381911 - DNA, 15 bp, Homo sapiens
atttgggagggcgcc

SEQ ID NO: 381912 - DNA, 15 bp, Homo sapiens
tatttgggagggcgc

SEQ ID NO: 381913 - DNA, 15 bp, Homo sapiens
gtatttgggagggcg

SEQ ID NO: 381914 - DNA, 15 bp, Homo sapiens
agtatttgggagggc

SEQ ID NO: 381915 - DNA, 15 bp, Homo sapiens
cagtatttgggaggg

SEQ ID NO: 381916 - DNA, 15 bp, Homo sapiens
acagtatttgggagg

SEQ ID NO: 381917 - DNA, 15 bp, Homo sapiens
gacagtatttgggag

SEQ ID NO: 381918 - DNA, 15 bp, Homo sapiens
ggacagtatttggga

SEQ ID NO: 381919 - DNA, 15 bp, Homo sapiens
aggacagtatttggg

SEQ ID NO: 381920 - DNA, 15 bp, Homo sapiens
caggacagtatttgg

SEQ ID NO: 381921 - DNA, 15 bp, Homo sapiens
ccaggacagtatttg

SEQ ID NO: 381922 - DNA, 15 bp, Homo sapiens
cccaggacagtattt

SEQ ID NO: 381923 - DNA, 15 bp, Homo sapiens
gcccaggacagtatt

SEQ ID NO: 381924 - DNA, 15 bp, Homo sapiens
ggcccaggacagtat

SEQ ID NO: 381925 - DNA, 15 bp, Homo sapiens
tggcccaggacagta

SEQ ID NO: 381926 - DNA, 15 bp, Homo sapiens
gtggcccaggacagt

SEQ ID NO: 381927 - DNA, 15 bp, Homo sapiens
tgtggcccaggacag

SEQ ID NO: 381928 - DNA, 15 bp, Homo sapiens
ctgtggcccaggaca

SEQ ID NO: 381929 - DNA, 15 bp, Homo sapiens
tctgtggcccaggac

SEQ ID NO: 381930 - DNA, 15 bp, Homo sapiens
ttctgtggcccagga

SEQ ID NO: 381931 - DNA, 15 bp, Homo sapiens
cttctgtggcccagg

SEQ ID NO: 381932 - DNA, 15 bp, Homo sapiens
acttctgtggcccag

SEQ ID NO: 381933 - DNA, 15 bp, Homo sapiens
gacttctgtggccca

SEQ ID NO: 381934 - DNA, 15 bp, Homo sapiens
tgacttctgtggccc

SEQ ID NO: 381935 - DNA, 15 bp, Homo sapiens
gtgacttctgtggcc

SEQ ID NO: 381936 - DNA, 15 bp, Homo sapiens
tgtgacttctgtggc

SEQ ID NO: 381937 - DNA, 15 bp, Homo sapiens
ctgtgacttctgtgg

SEQ ID NO: 381938 - DNA, 15 bp, Homo sapiens
tctgtgacttctgtg

SEQ ID NO: 381939 - DNA, 15 bp, Homo sapiens
ctctgtgacttctgt

SEQ ID NO: 381940 - DNA, 15 bp, Homo sapiens
actctgtgacttctg

SEQ ID NO: 381941 - DNA, 15 bp, Homo sapiens
tactctgtgacttct

SEQ ID NO: 381942 - DNA, 15 bp, Homo sapiens
gtactctgtgacttc

SEQ ID NO: 381943 - DNA, 15 bp, Homo sapiens
tgtactctgtgactt

SEQ ID NO: 381944 - DNA, 15 bp, Homo sapiens
ttgtactctgtgact

SEQ ID NO: 381945 - DNA, 15 bp, Homo sapiens
cttgtactctgtgac

SEQ ID NO: 381946 - DNA, 15 bp, Homo sapiens
acttgtactctgtga

SEQ ID NO: 381947 - DNA, 15 bp, Homo sapiens
aacttgtactctgtg

SEQ ID NO: 381948 - DNA, 15 bp, Homo sapiens
gaacttgtactctgt

SEQ ID NO: 381949 - DNA, 15 bp, Homo sapiens
ggaacttgtactctg

SEQ ID NO: 381950 - DNA, 15 bp, Homo sapiens
tggaacttgtactct

SEQ ID NO: 381951 - DNA, 15 bp, Homo sapiens
gtggaacttgtactc

SEQ ID NO: 381952 - DNA, 15 bp, Homo sapiens
agtggaacttgtact

SEQ ID NO: 381953 - DNA, 15 bp, Homo sapiens
gagtggaacttgtac

SEQ ID NO: 381954 - DNA, 15 bp, Homo sapiens
agagtggaacttgta

SEQ ID NO: 381955 - DNA, 15 bp, Homo sapiens
cagagtggaacttgt

SEQ ID NO: 381956 - DNA, 15 bp, Homo sapiens
gcagagtggaacttg

SEQ ID NO: 381957 - DNA, 15 bp, Homo sapiens
tgcagagtggaactt

SEQ ID NO: 381958 - DNA, 15 bp, Homo sapiens
ttgcagagtggaact

SEQ ID NO: 381959 - DNA, 15 bp, Homo sapiens
attgcagagtggaac

SEQ ID NO: 381960 - DNA, 15 bp, Homo sapiens
tattgcagagtggaa

SEQ ID NO: 381961 - DNA, 15 bp, Homo sapiens
atattgcagagtgga

SEQ ID NO: 381962 - DNA, 15 bp, Homo sapiens
gatattgcagagtgg

SEQ ID NO: 381963 - DNA, 15 bp, Homo sapiens
cgatattgcagagtg

SEQ ID NO: 381964 - DNA, 15 bp, Homo sapiens
acgatattgcagagt

SEQ ID NO: 381965 - DNA, 15 bp, Homo sapiens
gacgatattgcagag

SEQ ID NO: 381966 - DNA, 15 bp, Homo sapiens
ggacgatattgcaga

SEQ ID NO: 381967 - DNA, 15 bp, Homo sapiens
gggacgatattgcag

SEQ ID NO: 381968 - DNA, 15 bp, Homo sapiens
agggacgatattgca

SEQ ID NO: 381969 - DNA, 15 bp, Homo sapiens
aagggacgatattgc

SEQ ID NO: 381970 - DNA, 15 bp, Homo sapiens
caagggacgatattg

SEQ ID NO: 381971 - DNA, 15 bp, Homo sapiens
acaagggacgatatt

SEQ ID NO: 381972 - DNA, 15 bp, Homo sapiens
gacaagggacgatat

SEQ ID NO: 381973 - DNA, 15 bp, Homo sapiens
agacaagggacgata

SEQ ID NO: 381974 - DNA, 15 bp, Homo sapiens
cagacaagggacgat

SEQ ID NO: 381975 - DNA, 15 bp, Homo sapiens
gcagacaagggacga

SEQ ID NO: 381976 - DNA, 15 bp, Homo sapiens
agcagacaagggacg

SEQ ID NO: 381977 - DNA, 15 bp, Homo sapiens
cagcagacaagggac

SEQ ID NO: 381978 - DNA, 15 bp, Homo sapiens
ccagcagacaaggga

SEQ ID NO: 381979 - DNA, 15 bp, Homo sapiens
cccagcagacaaggg

SEQ ID NO: 381980 - DNA, 15 bp, Homo sapiens
tcccagcagacaagg

SEQ ID NO: 381981 - DNA, 15 bp, Homo sapiens
gtcccagcagacaag

SEQ ID NO: 381982 - DNA, 15 bp, Homo sapiens
agtcccagcagacaa

SEQ ID NO: 381983 - DNA, 15 bp, Homo sapiens
aagtcccagcagaca

SEQ ID NO: 381984 - DNA, 15 bp, Homo sapiens
taagtcccagcagac

SEQ ID NO: 381985 - DNA, 15 bp, Homo sapiens
ttaagtcccagcaga

SEQ ID NO: 381986 - DNA, 15 bp, Homo sapiens
cttaagtcccagcag

SEQ ID NO: 381987 - DNA, 15 bp, Homo sapiens
acttaagtcccagca

SEQ ID NO: 381988 - DNA, 15 bp, Homo sapiens
cacttaagtcccagc

SEQ ID NO: 381989 - DNA, 15 bp, Homo sapiens
tcacttaagtcccag

SEQ ID NO: 381990 - DNA, 15 bp, Homo sapiens
gtcacttaagtccca

SEQ ID NO: 381991 - DNA, 15 bp, Homo sapiens
tgtcacttaagtccc

SEQ ID NO: 381992 - DNA, 15 bp, Homo sapiens
ctgtcacttaagtcc

SEQ ID NO: 381993 - DNA, 15 bp, Homo sapiens
actgtcacttaagtc

SEQ ID NO: 381994 - DNA, 15 bp, Homo sapiens
aactgtcacttaagt

SEQ ID NO: 381995 - DNA, 15 bp, Homo sapiens
gaactgtcacttaag

SEQ ID NO: 381996 - DNA, 15 bp, Homo sapiens
tgaactgtcacttaa

SEQ ID NO: 381997 - DNA, 15 bp, Homo sapiens
gtgaactgtcactta

SEQ ID NO: 381998 - DNA, 15 bp, Homo sapiens
agtgaactgtcactt

SEQ ID NO: 381999 - DNA, 15 bp, Homo sapiens
tagtgaactgtcact

SEQ ID NO: 382000 - DNA, 15 bp, Homo sapiens
ctagtgaactgtcac

SEQ ID NO: 382001 - DNA, 15 bp, Homo sapiens
actagtgaactgtca

SEQ ID NO: 382002 - DNA, 15 bp, Homo sapiens
gactagtgaactgtc

SEQ ID NO: 382003 - DNA, 15 bp, Homo sapiens
ggactagtgaactgt

SEQ ID NO: 382004 - DNA, 15 bp, Homo sapiens
gggactagtgaactg

SEQ ID NO: 382005 - DNA, 15 bp, Homo sapiens
ggggactagtgaact

SEQ ID NO: 382006 - DNA, 15 bp, Homo sapiens
aggggactagtgaac

SEQ ID NO: 382007 - DNA, 15 bp, Homo sapiens
aaggggactagtgaa

SEQ ID NO: 382008 - DNA, 15 bp, Homo sapiens
gaaggggactagtga

SEQ ID NO: 382009 - DNA, 15 bp, Homo sapiens
ggaaggggactagtg

SEQ ID NO: 382010 - DNA, 15 bp, Homo sapiens
gggaaggggactagt

SEQ ID NO: 382011 - DNA, 15 bp, Homo sapiens
ggggaaggggactag

SEQ ID NO: 382012 - DNA, 15 bp, Homo sapiens
tggggaaggggacta

SEQ ID NO: 382013 - DNA, 15 bp, Homo sapiens
ctggggaaggggact

SEQ ID NO: 382014 - DNA, 15 bp, Homo sapiens
gctggggaaggggac

SEQ ID NO: 382015 - DNA, 15 bp, Homo sapiens
ggctggggaagggga

SEQ ID NO: 382016 - DNA, 15 bp, Homo sapiens
aggctggggaagggg

SEQ ID NO: 382017 - DNA, 15 bp, Homo sapiens
taggctggggaaggg

SEQ ID NO: 382018 - DNA, 15 bp, Homo sapiens
ctaggctggggaagg

SEQ ID NO: 382019 - DNA, 15 bp, Homo sapiens
gctaggctggggaag

SEQ ID NO: 382020 - DNA, 15 bp, Homo sapiens
agctaggctggggaa

SEQ ID NO: 382021 - DNA, 15 bp, Homo sapiens
gagctaggctgggga

SEQ ID NO: 382022 - DNA, 15 bp, Homo sapiens
agagctaggctgggg

SEQ ID NO: 382023 - DNA, 15 bp, Homo sapiens
cagagctaggctggg

SEQ ID NO: 382024 - DNA, 15 bp, Homo sapiens
ccagagctaggctgg

SEQ ID NO: 382025 - DNA, 15 bp, Homo sapiens
accagagctaggctg

SEQ ID NO: 382026 - DNA, 15 bp, Homo sapiens
caccagagctaggct

SEQ ID NO: 382027 - DNA, 15 bp, Homo sapiens
ccaccagagctaggc

SEQ ID NO: 382028 - DNA, 15 bp, Homo sapiens
gccaccagagctagg

SEQ ID NO: 382029 - DNA, 15 bp, Homo sapiens
tgccaccagagctag

SEQ ID NO: 382030 - DNA, 15 bp, Homo sapiens
gtgccaccagagcta

SEQ ID NO: 382031 - DNA, 15 bp, Homo sapiens
agtgccaccagagct

SEQ ID NO: 382032 - DNA, 15 bp, Homo sapiens
aagtgccaccagagc

SEQ ID NO: 382033 - DNA, 15 bp, Homo sapiens
caagtgccaccagag

SEQ ID NO: 382034 - DNA, 15 bp, Homo sapiens
gcaagtgccaccaga

SEQ ID NO: 382035 - DNA, 15 bp, Homo sapiens
tgcaagtgccaccag

SEQ ID NO: 382036 - DNA, 15 bp, Homo sapiens
ctgcaagtgccacca

SEQ ID NO: 382037 - DNA, 15 bp, Homo sapiens
actgcaagtgccacc

SEQ ID NO: 382038 - DNA, 15 bp, Homo sapiens
gactgcaagtgccac

SEQ ID NO: 382039 - DNA, 15 bp, Homo sapiens
tgactgcaagtgcca

SEQ ID NO: 382040 - DNA, 15 bp, Homo sapiens
ttgactgcaagtgcc

SEQ ID NO: 382041 - DNA, 15 bp, Homo sapiens
tttgactgcaagtgc

SEQ ID NO: 382042 - DNA, 15 bp, Homo sapiens
ttttgactgcaagtg

SEQ ID NO: 382043 - DNA, 15 bp, Homo sapiens
attttgactgcaagt

SEQ ID NO: 382044 - DNA, 15 bp, Homo sapiens
cattttgactgcaag

SEQ ID NO: 382045 - DNA, 15 bp, Homo sapiens
gcattttgactgcaa

SEQ ID NO: 382046 - DNA, 15 bp, Homo sapiens
ggcattttgactgca

SEQ ID NO: 382047 - DNA, 15 bp, Homo sapiens
aggcattttgactgc

SEQ ID NO: 382048 - DNA, 15 bp, Homo sapiens
gaggcattttgactg

SEQ ID NO: 382049 - DNA, 15 bp, Homo sapiens
agaggcattttgact

SEQ ID NO: 382050 - DNA, 15 bp, Homo sapiens
aagaggcattttgac

SEQ ID NO: 382051 - DNA, 15 bp, Homo sapiens
gaagaggcattttga

SEQ ID NO: 382052 - DNA, 15 bp, Homo sapiens
tgaagaggcattttg

SEQ ID NO: 382053 - DNA, 15 bp, Homo sapiens
ctgaagaggcatttt

SEQ ID NO: 382054 - DNA, 15 bp, Homo sapiens
actgaagaggcattt

SEQ ID NO: 382055 - DNA, 15 bp, Homo sapiens
cactgaagaggcatt

SEQ ID NO: 382056 - DNA, 15 bp, Homo sapiens
gcactgaagaggcat

SEQ ID NO: 382057 - DNA, 15 bp, Homo sapiens
agcactgaagaggca

SEQ ID NO: 382058 - DNA, 15 bp, Homo sapiens
cagcactgaagaggc

SEQ ID NO: 382059 - DNA, 15 bp, Homo sapiens
acagcactgaagagg

SEQ ID NO: 382060 - DNA, 15 bp, Homo sapiens
gacagcactgaagag

SEQ ID NO: 382061 - DNA, 15 bp, Homo sapiens
agacagcactgaaga

SEQ ID NO: 382062 - DNA, 15 bp, Homo sapiens
aagacagcactgaag

SEQ ID NO: 382063 - DNA, 15 bp, Homo sapiens
aaagacagcactgaa

SEQ ID NO: 382064 - DNA, 15 bp, Homo sapiens
caaagacagcactga

SEQ ID NO: 382065 - DNA, 15 bp, Homo sapiens
gcaaagacagcactg

SEQ ID NO: 382066 - DNA, 15 bp, Homo sapiens
tgcaaagacagcact

SEQ ID NO: 382067 - DNA, 15 bp, Homo sapiens
atgcaaagacagcac

SEQ ID NO: 382068 - DNA, 15 bp, Homo sapiens
gatgcaaagacagca

SEQ ID NO: 382069 - DNA, 15 bp, Homo sapiens
tgatgcaaagacagc

SEQ ID NO: 382070 - DNA, 15 bp, Homo sapiens
ctgatgcaaagacag

SEQ ID NO: 382071 - DNA, 15 bp, Homo sapiens
gctgatgcaaagaca

SEQ ID NO: 382072 - DNA, 15 bp, Homo sapiens
ggctgatgcaaagac

SEQ ID NO: 382073 - DNA, 15 bp, Homo sapiens
aggctgatgcaaaga

SEQ ID NO: 382074 - DNA, 15 bp, Homo sapiens
caggctgatgcaaag

SEQ ID NO: 382075 - DNA, 15 bp, Homo sapiens
gcaggctgatgcaaa

SEQ ID NO: 382076 - DNA, 15 bp, Homo sapiens
ggcaggctgatgcaa

SEQ ID NO: 382077 - DNA, 15 bp, Homo sapiens
aggcaggctgatgca

SEQ ID NO: 382078 - DNA, 15 bp, Homo sapiens
aaggcaggctgatgc

SEQ ID NO: 382079 - DNA, 15 bp, Homo sapiens
caaggcaggctgatg

SEQ ID NO: 382080 - DNA, 15 bp, Homo sapiens
ccaaggcaggctgat

SEQ ID NO: 382081 - DNA, 15 bp, Homo sapiens
accaaggcaggctga

SEQ ID NO: 382082 - DNA, 15 bp, Homo sapiens
aaccaaggcaggctg

SEQ ID NO: 382083 - DNA, 15 bp, Homo sapiens
gaaccaaggcaggct

SEQ ID NO: 382084 - DNA, 15 bp, Homo sapiens
cgaaccaaggcaggc

SEQ ID NO: 382085 - DNA, 15 bp, Homo sapiens
gcgaaccaaggcagg

SEQ ID NO: 382086 - DNA, 15 bp, Homo sapiens
agcgaaccaaggcag

SEQ ID NO: 382087 - DNA, 15 bp, Homo sapiens
cagcgaaccaaggca

SEQ ID NO: 382088 - DNA, 15 bp, Homo sapiens
gcagcgaaccaaggc

SEQ ID NO: 382089 - DNA, 15 bp, Homo sapiens
agcagcgaaccaagg

SEQ ID NO: 382090 - DNA, 15 bp, Homo sapiens
cagcagcgaaccaag

SEQ ID NO: 382091 - DNA, 15 bp, Homo sapiens
tcagcagcgaaccaa

SEQ ID NO: 382092 - DNA, 15 bp, Homo sapiens
ttcagcagcgaacca

SEQ ID NO: 382093 - DNA, 15 bp, Homo sapiens
gttcagcagcgaacc

SEQ ID NO: 382094 - DNA, 15 bp, Homo sapiens
ggttcagcagcgaac

SEQ ID NO: 382095 - DNA, 15 bp, Homo sapiens
cggttcagcagcgaa

SEQ ID NO: 382096 - DNA, 15 bp, Homo sapiens
acggttcagcagcga

SEQ ID NO: 382097 - DNA, 15 bp, Homo sapiens
cacggttcagcagcg

SEQ ID NO: 382098 - DNA, 15 bp, Homo sapiens
tcacggttcagcagc

SEQ ID NO: 382099 - DNA, 15 bp, Homo sapiens
atcacggttcagcag

SEQ ID NO: 382100 - DNA, 15 bp, Homo sapiens
gatcacggttcagca

SEQ ID NO: 382101 - DNA, 15 bp, Homo sapiens
agatcacggttcagc

SEQ ID NO: 382102 - DNA, 15 bp, Homo sapiens
cagatcacggttcag

SEQ ID NO: 382103 - DNA, 15 bp, Homo sapiens
tcagatcacggttca

SEQ ID NO: 382104 - DNA, 15 bp, Homo sapiens
ctcagatcacggttc

SEQ ID NO: 382105 - DNA, 15 bp, Homo sapiens
gctcagatcacggtt

SEQ ID NO: 382106 - DNA, 15 bp, Homo sapiens
ggctcagatcacggt

SEQ ID NO: 382107 - DNA, 15 bp, Homo sapiens
tggctcagatcacgg

SEQ ID NO: 382108 - DNA, 15 bp, Homo sapiens
atggctcagatcacg

SEQ ID NO: 382109 - DNA, 15 bp, Homo sapiens
catggctcagatcac

SEQ ID NO: 382110 - DNA, 15 bp, Homo sapiens
acatggctcagatca

SEQ ID NO: 382111 - DNA, 15 bp, Homo sapiens
aacatggctcagatc

SEQ ID NO: 382112 - DNA, 15 bp, Homo sapiens
aaacatggctcagat

SEQ ID NO: 382113 - DNA, 15 bp, Homo sapiens
aaaacatggctcaga

SEQ ID NO: 382114 - DNA, 15 bp, Homo sapiens
taaaacatggctcag

SEQ ID NO: 382115 - DNA, 15 bp, Homo sapiens
ctaaaacatggctca

SEQ ID NO: 382116 - DNA, 15 bp, Homo sapiens
tctaaaacatggctc

SEQ ID NO: 382117 - DNA, 15 bp, Homo sapiens
atctaaaacatggct

SEQ ID NO: 382118 - DNA, 15 bp, Homo sapiens
aatctaaaacatggc

SEQ ID NO: 382119 - DNA, 15 bp, Homo sapiens
aaatctaaaacatgg

SEQ ID NO: 382120 - DNA, 15 bp, Homo sapiens
caaatctaaaacatg

SEQ ID NO: 382121 - DNA, 15 bp, Homo sapiens
ccaaatctaaaacat

SEQ ID NO: 382122 - DNA, 15 bp, Homo sapiens
cccaaatctaaaaca

SEQ ID NO: 382123 - DNA, 15 bp, Homo sapiens
tcccaaatctaaaac

SEQ ID NO: 382124 - DNA, 15 bp, Homo sapiens
ttcccaaatctaaaa

SEQ ID NO: 382125 - DNA, 15 bp, Homo sapiens
tttcccaaatctaaa

SEQ ID NO: 382126 - DNA, 15 bp, Homo sapiens
atttcccaaatctaa

SEQ ID NO: 382127 - DNA, 15 bp, Homo sapiens
gatttcccaaatcta

SEQ ID NO: 382128 - DNA, 15 bp, Homo sapiens
agatttcccaaatct

SEQ ID NO: 382129 - DNA, 15 bp, Homo sapiens
aagatttcccaaatc

SEQ ID NO: 382130 - DNA, 15 bp, Homo sapiens
caagatttcccaaat

SEQ ID NO: 382131 - DNA, 15 bp, Homo sapiens
gcaagatttcccaaa

SEQ ID NO: 382132 - DNA, 15 bp, Homo sapiens
tgcaagatttcccaa

SEQ ID NO: 382133 - DNA, 15 bp, Homo sapiens
gtgcaagatttccca

SEQ ID NO: 382134 - DNA, 15 bp, Homo sapiens
tgtgcaagatttccc

SEQ ID NO: 382135 - DNA, 15 bp, Homo sapiens
ttgtgcaagatttcc

SEQ ID NO: 382136 - DNA, 15 bp, Homo sapiens
cttgtgcaagatttc

SEQ ID NO: 382137 - DNA, 15 bp, Homo sapiens
tcttgtgcaagattt

SEQ ID NO: 382138 - DNA, 15 bp, Homo sapiens
ctcttgtgcaagatt

SEQ ID NO: 382139 - DNA, 15 bp, Homo sapiens
tctcttgtgcaagat

SEQ ID NO: 382140 - DNA, 15 bp, Homo sapiens
atctcttgtgcaaga

SEQ ID NO: 382141 - DNA, 15 bp, Homo sapiens
catctcttgtgcaag

SEQ ID NO: 382142 - DNA, 15 bp, Homo sapiens
ccatctcttgtgcaa

SEQ ID NO: 382143 - DNA, 15 bp, Homo sapiens
accatctcttgtgca

SEQ ID NO: 382144 - DNA, 15 bp, Homo sapiens
gaccatctcttgtgc

SEQ ID NO: 382145 - DNA, 15 bp, Homo sapiens
agaccatctcttgtg

SEQ ID NO: 382146 - DNA, 15 bp, Homo sapiens
tagaccatctcttgt

SEQ ID NO: 382147 - DNA, 15 bp, Homo sapiens
ttagaccatctcttg

SEQ ID NO: 382148 - DNA, 15 bp, Homo sapiens
tttagaccatctctt

SEQ ID NO: 382149 - DNA, 15 bp, Homo sapiens
atttagaccatctct

SEQ ID NO: 382150 - DNA, 15 bp, Homo sapiens
aatttagaccatctc

SEQ ID NO: 382151 - DNA, 15 bp, Homo sapiens
caatttagaccatct

SEQ ID NO: 382152 - DNA, 15 bp, Homo sapiens
ccaatttagaccatc

SEQ ID NO: 382153 - DNA, 15 bp, Homo sapiens
cccaatttagaccat

SEQ ID NO: 382154 - DNA, 15 bp, Homo sapiens
acccaatttagacca

SEQ ID NO: 382155 - DNA, 15 bp, Homo sapiens
tacccaatttagacc

SEQ ID NO: 382156 - DNA, 15 bp, Homo sapiens
gtacccaatttagac

SEQ ID NO: 382157 - DNA, 15 bp, Homo sapiens
ggtacccaatttaga

SEQ ID NO: 382158 - DNA, 15 bp, Homo sapiens
tggtacccaatttag

SEQ ID NO: 382159 - DNA, 15 bp, Homo sapiens
ttggtacccaattta

SEQ ID NO: 382160 - DNA, 15 bp, Homo sapiens
tttggtacccaattt

SEQ ID NO: 382161 - DNA, 15 bp, Homo sapiens
gtttggtacccaatt

SEQ ID NO: 382162 - DNA, 15 bp, Homo sapiens
tgtttggtacccaat

SEQ ID NO: 382163 - DNA, 15 bp, Homo sapiens
ttgtttggtacccaa

SEQ ID NO: 382164 - DNA, 15 bp, Homo sapiens
tttgtttggtaccca

SEQ ID NO: 382165 - DNA, 15 bp, Homo sapiens
gtttgtttggtaccc

SEQ ID NO: 382166 - DNA, 15 bp, Homo sapiens
cgtttgtttggtacc

SEQ ID NO: 382167 - DNA, 15 bp, Homo sapiens
ccgtttgtttggtac

SEQ ID NO: 382168 - DNA, 15 bp, Homo sapiens
gccgtttgtttggta

SEQ ID NO: 382169 - DNA, 15 bp, Homo sapiens
agccgtttgtttggt

SEQ ID NO: 382170 - DNA, 15 bp, Homo sapiens
cagccgtttgtttgg

SEQ ID NO: 382171 - DNA, 15 bp, Homo sapiens
acagccgtttgtttg

SEQ ID NO: 382172 - DNA, 15 bp, Homo sapiens
cacagccgtttgttt

SEQ ID NO: 382173 - DNA, 15 bp, Homo sapiens
gcacagccgtttgtt

SEQ ID NO: 382174 - DNA, 15 bp, Homo sapiens
tgcacagccgtttgt

SEQ ID NO: 382175 - DNA, 15 bp, Homo sapiens
ctgcacagccgtttg

SEQ ID NO: 382176 - DNA, 15 bp, Homo sapiens
cctgcacagccgttt

SEQ ID NO: 382177 - DNA, 15 bp, Homo sapiens
acctgcacagccgtt

SEQ ID NO: 382178 - DNA, 15 bp, Homo sapiens
cacctgcacagccgt

SEQ ID NO: 382179 - DNA, 15 bp, Homo sapiens
acacctgcacagccg

SEQ ID NO: 382180 - DNA, 15 bp, Homo sapiens
gacacctgcacagcc

SEQ ID NO: 382181 - DNA, 15 bp, Homo sapiens
agacacctgcacagc

SEQ ID NO: 382182 - DNA, 15 bp, Homo sapiens
tagacacctgcacag

SEQ ID NO: 382183 - DNA, 15 bp, Homo sapiens
atagacacctgcaca

SEQ ID NO: 382184 - DNA, 15 bp, Homo sapiens
catagacacctgcac

SEQ ID NO: 382185 - DNA, 15 bp, Homo sapiens
acatagacacctgca

SEQ ID NO: 382186 - DNA, 15 bp, Homo sapiens
tacatagacacctgc

SEQ ID NO: 382187 - DNA, 15 bp, Homo sapiens
ttacatagacacctg

SEQ ID NO: 382188 - DNA, 15 bp, Homo sapiens
cttacatagacacct

SEQ ID NO: 382189 - DNA, 15 bp, Homo sapiens
ccttacatagacacc

SEQ ID NO: 382190 - DNA, 15 bp, Homo sapiens
cccttacatagacac

SEQ ID NO: 382191 - DNA, 15 bp, Homo sapiens
ccccttacatagaca

SEQ ID NO: 382192 - DNA, 15 bp, Homo sapiens
accccttacatagac

SEQ ID NO: 382193 - DNA, 15 bp, Homo sapiens
aaccccttacataga

SEQ ID NO: 382194 - DNA, 15 bp, Homo sapiens
aaaccccttacatag

SEQ ID NO: 382195 - DNA, 15 bp, Homo sapiens
aaaaccccttacata

SEQ ID NO: 382196 - DNA, 15 bp, Homo sapiens
caaaaccccttacat

SEQ ID NO: 382197 - DNA, 15 bp, Homo sapiens
tcaaaaccccttaca

SEQ ID NO: 382198 - DNA, 15 bp, Homo sapiens
ttcaaaaccccttac

SEQ ID NO: 382199 - DNA, 15 bp, Homo sapiens
gttcaaaacccctta

SEQ ID NO: 382200 - DNA, 15 bp, Homo sapiens
ggttcaaaacccctt

SEQ ID NO: 382201 - DNA, 15 bp, Homo sapiens
aggttcaaaacccct

SEQ ID NO: 382202 - DNA, 15 bp, Homo sapiens
aaggttcaaaacccc

SEQ ID NO: 382203 - DNA, 15 bp, Homo sapiens
taaggttcaaaaccc

SEQ ID NO: 382204 - DNA, 15 bp, Homo sapiens
ataaggttcaaaacc

SEQ ID NO: 382205 - DNA, 15 bp, Homo sapiens
tataaggttcaaaac

SEQ ID NO: 382206 - DNA, 15 bp, Homo sapiens
atataaggttcaaaa

SEQ ID NO: 382207 - DNA, 15 bp, Homo sapiens
gatataaggttcaaa

SEQ ID NO: 382208 - DNA, 15 bp, Homo sapiens
ggatataaggttcaa

SEQ ID NO: 382209 - DNA, 15 bp, Homo sapiens
tggatataaggttca

SEQ ID NO: 382210 - DNA, 15 bp, Homo sapiens
ctggatataaggttc

SEQ ID NO: 382211 - DNA, 15 bp, Homo sapiens
cctggatataaggtt

SEQ ID NO: 382212 - DNA, 15 bp, Homo sapiens
tcctggatataaggt

SEQ ID NO: 382213 - DNA, 15 bp, Homo sapiens
ttcctggatataagg

SEQ ID NO: 382214 - DNA, 15 bp, Homo sapiens
cttcctggatataag

SEQ ID NO: 382215 - DNA, 15 bp, Homo sapiens
ccttcctggatataa

SEQ ID NO: 382216 - DNA, 15 bp, Homo sapiens
cccttcctggatata

SEQ ID NO: 382217 - DNA, 15 bp, Homo sapiens
ccccttcctggatat

SEQ ID NO: 382218 - DNA, 15 bp, Homo sapiens
cccccttcctggata

SEQ ID NO: 382219 - DNA, 15 bp, Homo sapiens
acccccttcctggat

SEQ ID NO: 382220 - DNA, 15 bp, Homo sapiens
gacccccttcctgga

SEQ ID NO: 382221 - DNA, 15 bp, Homo sapiens
ggacccccttcctgg

SEQ ID NO: 382222 - DNA, 15 bp, Homo sapiens
aggacccccttcctg

SEQ ID NO: 382223 - DNA, 15 bp, Homo sapiens
aaggacccccttcct

SEQ ID NO: 382224 - DNA, 15 bp, Homo sapiens
aaaggacccccttcc

SEQ ID NO: 382225 - DNA, 15 bp, Homo sapiens
aaaaggacccccttc

SEQ ID NO: 382226 - DNA, 15 bp, Homo sapiens
caaaaggaccccctt

SEQ ID NO: 382227 - DNA, 15 bp, Homo sapiens
tcaaaaggaccccct

SEQ ID NO: 382228 - DNA, 15 bp, Homo sapiens
ttcaaaaggaccccc

SEQ ID NO: 382229 - DNA, 15 bp, Homo sapiens
cttcaaaaggacccc

SEQ ID NO: 382230 - DNA, 15 bp, Homo sapiens
acttcaaaaggaccc

SEQ ID NO: 382231 - DNA, 15 bp, Homo sapiens
cacttcaaaaggacc

SEQ ID NO: 382232 - DNA, 15 bp, Homo sapiens
ccacttcaaaaggac

SEQ ID NO: 382233 - DNA, 15 bp, Homo sapiens
cccacttcaaaagga

SEQ ID NO: 382234 - DNA, 15 bp, Homo sapiens
ccccacttcaaaagg

SEQ ID NO: 382235 - DNA, 15 bp, Homo sapiens
cccccacttcaaaag

SEQ ID NO: 382236 - DNA, 15 bp, Homo sapiens
acccccacttcaaaa

SEQ ID NO: 382237 - DNA, 15 bp, Homo sapiens
aacccccacttcaaa

SEQ ID NO: 382238 - DNA, 15 bp, Homo sapiens
taacccccacttcaa

SEQ ID NO: 382239 - DNA, 15 bp, Homo sapiens
ttaacccccacttca

SEQ ID NO: 382240 - DNA, 15 bp, Homo sapiens
cttaacccccacttc

SEQ ID NO: 382241 - DNA, 15 bp, Homo sapiens
tcttaacccccactt

SEQ ID NO: 382242 - DNA, 15 bp, Homo sapiens
atcttaacccccact

SEQ ID NO: 382243 - DNA, 15 bp, Homo sapiens
aatcttaacccccac

SEQ ID NO: 382244 - DNA, 15 bp, Homo sapiens
aaatcttaaccccca

SEQ ID NO: 382245 - DNA, 15 bp, Homo sapiens
caaatcttaaccccc

SEQ ID NO: 382246 - DNA, 15 bp, Homo sapiens
tcaaatcttaacccc

SEQ ID NO: 382247 - DNA, 15 bp, Homo sapiens
ttcaaatcttaaccc

SEQ ID NO: 382248 - DNA, 15 bp, Homo sapiens
attcaaatcttaacc

SEQ ID NO: 382249 - DNA, 15 bp, Homo sapiens
tattcaaatcttaac

SEQ ID NO: 382250 - DNA, 15 bp, Homo sapiens
atattcaaatcttaa

SEQ ID NO: 382251 - DNA, 15 bp, Homo sapiens
gatattcaaatctta

SEQ ID NO: 382252 - DNA, 15 bp, Homo sapiens
tgatattcaaatctt

SEQ ID NO: 382253 - DNA, 15 bp, Homo sapiens
atgatattcaaatct

SEQ ID NO: 382254 - DNA, 15 bp, Homo sapiens
tatgatattcaaatc

SEQ ID NO: 382255 - DNA, 15 bp, Homo sapiens
ttatgatattcaaat

SEQ ID NO: 382256 - DNA, 15 bp, Homo sapiens
cttatgatattcaaa

SEQ ID NO: 382257 - DNA, 15 bp, Homo sapiens
gcttatgatattcaa

SEQ ID NO: 382258 - DNA, 15 bp, Homo sapiens
ggcttatgatattca

SEQ ID NO: 382259 - DNA, 15 bp, Homo sapiens
aggcttatgatattc

SEQ ID NO: 382260 - DNA, 15 bp, Homo sapiens
caggcttatgatatt

SEQ ID NO: 382261 - DNA, 15 bp, Homo sapiens
acaggcttatgatat

SEQ ID NO: 382262 - DNA, 15 bp, Homo sapiens
tacaggcttatgata

SEQ ID NO: 382263 - DNA, 15 bp, Homo sapiens
gtacaggcttatgat

SEQ ID NO: 382264 - DNA, 15 bp, Homo sapiens
tgtacaggcttatga

SEQ ID NO: 382265 - DNA, 15 bp, Homo sapiens
ttgtacaggcttatg

SEQ ID NO: 382266 - DNA, 15 bp, Homo sapiens
attgtacaggcttat

SEQ ID NO: 382267 - DNA, 15 bp, Homo sapiens
aattgtacaggctta

SEQ ID NO: 382268 - DNA, 15 bp, Homo sapiens
aaattgtacaggctt

SEQ ID NO: 382269 - DNA, 15 bp, Homo sapiens
gaaattgtacaggct

SEQ ID NO: 382270 - DNA, 15 bp, Homo sapiens
tgaaattgtacaggc

SEQ ID NO: 382271 - DNA, 15 bp, Homo sapiens
atgaaattgtacagg

SEQ ID NO: 382272 - DNA, 15 bp, Homo sapiens
catgaaattgtacag

SEQ ID NO: 382273 - DNA, 15 bp, Homo sapiens
tcatgaaattgtaca

SEQ ID NO: 382274 - DNA, 15 bp, Homo sapiens
ttcatgaaattgtac

SEQ ID NO: 382275 - DNA, 15 bp, Homo sapiens
tttcatgaaattgta

SEQ ID NO: 382276 - DNA, 15 bp, Homo sapiens
ctttcatgaaattgt

SEQ ID NO: 382277 - DNA, 15 bp, Homo sapiens
gctttcatgaaattg

SEQ ID NO: 382278 - DNA, 15 bp, Homo sapiens
agctttcatgaaatt

SEQ ID NO: 382279 - DNA, 15 bp, Homo sapiens
aagctttcatgaaat

SEQ ID NO: 382280 - DNA, 15 bp, Homo sapiens
aaagctttcatgaaa

SEQ ID NO: 382281 - DNA, 15 bp, Homo sapiens
aaaagctttcatgaa

SEQ ID NO: 382282 - DNA, 15 bp, Homo sapiens
aaaaagctttcatga

SEQ ID NO: 382283 - DNA, 15 bp, Homo sapiens
caaaaagctttcatg

SEQ ID NO: 382284 - DNA, 15 bp, Homo sapiens
ccaaaaagctttcat

SEQ ID NO: 382285 - DNA, 15 bp, Homo sapiens
tccaaaaagctttca

SEQ ID NO: 382286 - DNA, 15 bp, Homo sapiens
ttccaaaaagctttc

SEQ ID NO: 382287 - DNA, 15 bp, Homo sapiens
cttccaaaaagcttt

SEQ ID NO: 382288 - DNA, 15 bp, Homo sapiens
ccttccaaaaagctt

SEQ ID NO: 382289 - DNA, 15 bp, Homo sapiens
gccttccaaaaagct

SEQ ID NO: 382290 - DNA, 15 bp, Homo sapiens
ggccttccaaaaagc

SEQ ID NO: 382291 - DNA, 15 bp, Homo sapiens
tggccttccaaaaag

SEQ ID NO: 382292 - DNA, 15 bp, Homo sapiens
ttggccttccaaaaa

SEQ ID NO: 382293 - DNA, 15 bp, Homo sapiens
attggccttccaaaa

SEQ ID NO: 382294 - DNA, 15 bp, Homo sapiens
cattggccttccaaa

SEQ ID NO: 382295 - DNA, 15 bp, Homo sapiens
acattggccttccaa

SEQ ID NO: 382296 - DNA, 15 bp, Homo sapiens
tacattggccttcca

SEQ ID NO: 382297 - DNA, 15 bp, Homo sapiens
ctacattggccttcc

SEQ ID NO: 382298 - DNA, 15 bp, Homo sapiens
cctacattggccttc

SEQ ID NO: 382299 - DNA, 15 bp, Homo sapiens
tcctacattggcctt

SEQ ID NO: 382300 - DNA, 15 bp, Homo sapiens
gtcctacattggcct

SEQ ID NO: 382301 - DNA, 15 bp, Homo sapiens
tgtcctacattggcc

SEQ ID NO: 382302 - DNA, 15 bp, Homo sapiens
ctgtcctacattggc

SEQ ID NO: 382303 - DNA, 15 bp, Homo sapiens
gctgtcctacattgg

SEQ ID NO: 382304 - DNA, 15 bp, Homo sapiens
ggctgtcctacattg

SEQ ID NO: 382305 - DNA, 15 bp, Homo sapiens
tggctgtcctacatt

SEQ ID NO: 382306 - DNA, 15 bp, Homo sapiens
ttggctgtcctacat

SEQ ID NO: 382307 - DNA, 15 bp, Homo sapiens
gttggctgtcctaca

SEQ ID NO: 382308 - DNA, 15 bp, Homo sapiens
agttggctgtcctac

SEQ ID NO: 382309 - DNA, 15 bp, Homo sapiens
aagttggctgtccta

SEQ ID NO: 382310 - DNA, 15 bp, Homo sapiens
aaagttggctgtcct

SEQ ID NO: 382311 - DNA, 15 bp, Homo sapiens
gaaagttggctgtcc

SEQ ID NO: 382312 - DNA, 15 bp, Homo sapiens
agaaagttggctgtc

SEQ ID NO: 382313 - DNA, 15 bp, Homo sapiens
tagaaagttggctgt

SEQ ID NO: 382314 - DNA, 15 bp, Homo sapiens
atagaaagttggctg

SEQ ID NO: 382315 - DNA, 15 bp, Homo sapiens
aatagaaagttggct

SEQ ID NO: 382316 - DNA, 15 bp, Homo sapiens
aaatagaaagttggc

SEQ ID NO: 382317 - DNA, 15 bp, Homo sapiens
aaaatagaaagttgg

SEQ ID NO: 382318 - DNA, 15 bp, Homo sapiens
caaaatagaaagttg

SEQ ID NO: 382319 - DNA, 15 bp, Homo sapiens
gcaaaatagaaagtt

SEQ ID NO: 382320 - DNA, 15 bp, Homo sapiens
ggcaaaatagaaagt

SEQ ID NO: 382321 - DNA, 15 bp, Homo sapiens
tggcaaaatagaaag

SEQ ID NO: 382322 - DNA, 15 bp, Homo sapiens
ttggcaaaatagaaa

SEQ ID NO: 382323 - DNA, 15 bp, Homo sapiens
tttggcaaaatagaa

SEQ ID NO: 382324 - DNA, 15 bp, Homo sapiens
ttttggcaaaataga

SEQ ID NO: 382325 - DNA, 15 bp, Homo sapiens
tttttggcaaaatag

SEQ ID NO: 382326 - DNA, 15 bp, Homo sapiens
ttttttggcaaaata

SEQ ID NO: 382327 - DNA, 15 bp, Homo sapiens
attttttggcaaaat

SEQ ID NO: 382328 - DNA, 15 bp, Homo sapiens
cattttttggcaaaa

SEQ ID NO: 382329 - DNA, 15 bp, Homo sapiens
tcattttttggcaaa

SEQ ID NO: 382330 - DNA, 15 bp, Homo sapiens
gtcattttttggcaa

SEQ ID NO: 382331 - DNA, 15 bp, Homo sapiens
ggtcattttttggca

SEQ ID NO: 382332 - DNA, 15 bp, Homo sapiens
tggtcattttttggc

SEQ ID NO: 382333 - DNA, 15 bp, Homo sapiens
ttggtcattttttgg

SEQ ID NO: 382334 - DNA, 15 bp, Homo sapiens
tttggtcattttttg

SEQ ID NO: 382335 - DNA, 15 bp, Homo sapiens
ttttggtcatttttt

SEQ ID NO: 382336 - DNA, 15 bp, Homo sapiens
cttttggtcattttt

SEQ ID NO: 382337 - DNA, 15 bp, Homo sapiens
gcttttggtcatttt

SEQ ID NO: 382338 - DNA, 15 bp, Homo sapiens
cgcttttggtcattt

SEQ ID NO: 382339 - DNA, 15 bp, Homo sapiens
gcgcttttggtcatt

SEQ ID NO: 382340 - DNA, 15 bp, Homo sapiens
agcgcttttggtcat

SEQ ID NO: 382341 - DNA, 15 bp, Homo sapiens
tagcgcttttggtca

SEQ ID NO: 382342 - DNA, 15 bp, Homo sapiens
gtagcgcttttggtc

SEQ ID NO: 382343 - DNA, 15 bp, Homo sapiens
tgtagcgcttttggt

SEQ ID NO: 382344 - DNA, 15 bp, Homo sapiens
ctgtagcgcttttgg

SEQ ID NO: 382345 - DNA, 15 bp, Homo sapiens
gctgtagcgcttttg

SEQ ID NO: 382346 - DNA, 15 bp, Homo sapiens
ggctgtagcgctttt

SEQ ID NO: 382347 - DNA, 15 bp, Homo sapiens
aggctgtagcgcttt

SEQ ID NO: 382348 - DNA, 15 bp, Homo sapiens
taggctgtagcgctt

SEQ ID NO: 382349 - DNA, 15 bp, Homo sapiens
gtaggctgtagcgct

SEQ ID NO: 382350 - DNA, 15 bp, Homo sapiens
agtaggctgtagcgc

SEQ ID NO: 382351 - DNA, 15 bp, Homo sapiens
cagtaggctgtagcg

SEQ ID NO: 382352 - DNA, 15 bp, Homo sapiens
ccagtaggctgtagc

SEQ ID NO: 382353 - DNA, 15 bp, Homo sapiens
gccagtaggctgtag

SEQ ID NO: 382354 - DNA, 15 bp, Homo sapiens
cgccagtaggctgta

SEQ ID NO: 382355 - DNA, 15 bp, Homo sapiens
gcgccagtaggctgt

SEQ ID NO: 382356 - DNA, 15 bp, Homo sapiens
ggcgccagtaggctg

SEQ ID NO: 382357 - DNA, 15 bp, Homo sapiens
tggcgccagtaggct

SEQ ID NO: 382358 - DNA, 15 bp, Homo sapiens
gtggcgccagtaggc

SEQ ID NO: 382359 - DNA, 15 bp, Homo sapiens
ggtggcgccagtagg

SEQ ID NO: 382360 - DNA, 15 bp, Homo sapiens
tggtggcgccagtag

SEQ ID NO: 382361 - DNA, 15 bp, Homo sapiens
gtggtggcgccagta

SEQ ID NO: 382362 - DNA, 15 bp, Homo sapiens
agtggtggcgccagt

SEQ ID NO: 382363 - DNA, 15 bp, Homo sapiens
aagtggtggcgccag

SEQ ID NO: 382364 - DNA, 15 bp, Homo sapiens
gaagtggtggcgcca

SEQ ID NO: 382365 - DNA, 15 bp, Homo sapiens
tgaagtggtggcgcc

SEQ ID NO: 382366 - DNA, 15 bp, Homo sapiens
atgaagtggtggcgc

SEQ ID NO: 382367 - DNA, 15 bp, Homo sapiens
aatgaagtggtggcg

SEQ ID NO: 382368 - DNA, 15 bp, Homo sapiens
taatgaagtggtggc

SEQ ID NO: 382369 - DNA, 15 bp, Homo sapiens
ttaatgaagtggtgg

SEQ ID NO: 382370 - DNA, 15 bp, Homo sapiens
tttaatgaagtggtg

SEQ ID NO: 382371 - DNA, 15 bp, Homo sapiens
ctttaatgaagtggt

SEQ ID NO: 382372 - DNA, 15 bp, Homo sapiens
cctttaatgaagtgg

SEQ ID NO: 382373 - DNA, 15 bp, Homo sapiens
ccctttaatgaagtg

SEQ ID NO: 382374 - DNA, 15 bp, Homo sapiens
tccctttaatgaagt

SEQ ID NO: 382375 - DNA, 15 bp, Homo sapiens
ttccctttaatgaag

SEQ ID NO: 382376 - DNA, 15 bp, Homo sapiens
attccctttaatgaa

SEQ ID NO: 382377 - DNA, 15 bp, Homo sapiens
cattccctttaatga

SEQ ID NO: 382378 - DNA, 15 bp, Homo sapiens
tcattccctttaatg

SEQ ID NO: 382379 - DNA, 15 bp, Homo sapiens
gtcattccctttaat

SEQ ID NO: 382380 - DNA, 15 bp, Homo sapiens
tgtcattccctttaa

SEQ ID NO: 382381 - DNA, 15 bp, Homo sapiens
ctgtcattcccttta

SEQ ID NO: 382382 - DNA, 15 bp, Homo sapiens
actgtcattcccttt

SEQ ID NO: 382383 - DNA, 15 bp, Homo sapiens
tactgtcattccctt

SEQ ID NO: 382384 - DNA, 15 bp, Homo sapiens
gtactgtcattccct

SEQ ID NO: 382385 - DNA, 15 bp, Homo sapiens
tgtactgtcattccc

SEQ ID NO: 382386 - DNA, 15 bp, Homo sapiens
ttgtactgtcattcc

SEQ ID NO: 382387 - DNA, 15 bp, Homo sapiens
attgtactgtcattc

SEQ ID NO: 382388 - DNA, 15 bp, Homo sapiens
aattgtactgtcatt

SEQ ID NO: 382389 - DNA, 15 bp, Homo sapiens
caattgtactgtcat

SEQ ID NO: 382390 - DNA, 15 bp, Homo sapiens
ccaattgtactgtca

SEQ ID NO: 382391 - DNA, 15 bp, Homo sapiens
accaattgtactgtc

SEQ ID NO: 382392 - DNA, 15 bp, Homo sapiens
aaccaattgtactgt

SEQ ID NO: 382393 - DNA, 15 bp, Homo sapiens
taaccaattgtactg

SEQ ID NO: 382394 - DNA, 15 bp, Homo sapiens
ctaaccaattgtact

SEQ ID NO: 382395 - DNA, 15 bp, Homo sapiens
gctaaccaattgtac

SEQ ID NO: 382396 - DNA, 15 bp, Homo sapiens
tgctaaccaattgta

SEQ ID NO: 382397 - DNA, 15 bp, Homo sapiens
ttgctaaccaattgt

SEQ ID NO: 382398 - DNA, 15 bp, Homo sapiens
cttgctaaccaattg

SEQ ID NO: 382399 - DNA, 15 bp, Homo sapiens
tcttgctaaccaatt

SEQ ID NO: 382400 - DNA, 15 bp, Homo sapiens
ttcttgctaaccaat

SEQ ID NO: 382401 - DNA, 15 bp, Homo sapiens
tttcttgctaaccaa

SEQ ID NO: 382402 - DNA, 15 bp, Homo sapiens
atttcttgctaacca

SEQ ID NO: 382403 - DNA, 15 bp, Homo sapiens
tatttcttgctaacc

SEQ ID NO: 382404 - DNA, 15 bp, Homo sapiens
atatttcttgctaac

SEQ ID NO: 382405 - DNA, 15 bp, Homo sapiens
aatatttcttgctaa

SEQ ID NO: 382406 - DNA, 15 bp, Homo sapiens
taatatttcttgcta

SEQ ID NO: 382407 - DNA, 15 bp, Homo sapiens
ttaatatttcttgct

SEQ ID NO: 382408 - DNA, 15 bp, Homo sapiens
attaatatttcttgc

SEQ ID NO: 382409 - DNA, 15 bp, Homo sapiens
tattaatatttcttg

SEQ ID NO: 382410 - DNA, 15 bp, Homo sapiens
gtattaatatttctt

SEQ ID NO: 382411 - DNA, 15 bp, Homo sapiens
tgtattaatatttct

SEQ ID NO: 382412 - DNA, 15 bp, Homo sapiens
atgtattaatatttc

SEQ ID NO: 382413 - DNA, 15 bp, Homo sapiens
catgtattaatattt

SEQ ID NO: 382414 - DNA, 15 bp, Homo sapiens
acatgtattaatatt

SEQ ID NO: 382415 - DNA, 15 bp, Homo sapiens
aacatgtattaatat

SEQ ID NO: 382416 - DNA, 15 bp, Homo sapiens
caacatgtattaata

SEQ ID NO: 382417 - DNA, 15 bp, Homo sapiens
tcaacatgtattaat

SEQ ID NO: 382418 - DNA, 15 bp, Homo sapiens
atcaacatgtattaa

SEQ ID NO: 382419 - DNA, 15 bp, Homo sapiens
aatcaacatgtatta

SEQ ID NO: 382420 - DNA, 15 bp, Homo sapiens
caatcaacatgtatt

SEQ ID NO: 382421 - DNA, 15 bp, Homo sapiens
gcaatcaacatgtat

SEQ ID NO: 382422 - DNA, 15 bp, Homo sapiens
agcaatcaacatgta

SEQ ID NO: 382423 - DNA, 15 bp, Homo sapiens
cagcaatcaacatgt

SEQ ID NO: 382424 - DNA, 15 bp, Homo sapiens
tcagcaatcaacatg

SEQ ID NO: 382425 - DNA, 15 bp, Homo sapiens
atcagcaatcaacat

SEQ ID NO: 382426 - DNA, 15 bp, Homo sapiens
aatcagcaatcaaca

SEQ ID NO: 382427 - DNA, 15 bp, Homo sapiens
aaatcagcaatcaac

SEQ ID NO: 382428 - DNA, 15 bp, Homo sapiens
taaatcagcaatcaa

SEQ ID NO: 382429 - DNA, 15 bp, Homo sapiens
ataaatcagcaatca

SEQ ID NO: 382430 - DNA, 15 bp, Homo sapiens
cataaatcagcaatc

SEQ ID NO: 382431 - DNA, 15 bp, Homo sapiens
gcataaatcagcaat

SEQ ID NO: 382432 - DNA, 15 bp, Homo sapiens
agcataaatcagcaa

SEQ ID NO: 382433 - DNA, 15 bp, Homo sapiens
gagcataaatcagca

SEQ ID NO: 382434 - DNA, 15 bp, Homo sapiens
ggagcataaatcagc

SEQ ID NO: 382435 - DNA, 15 bp, Homo sapiens
tggagcataaatcag

SEQ ID NO: 382436 - DNA, 15 bp, Homo sapiens
ctggagcataaatca

SEQ ID NO: 382437 - DNA, 15 bp, Homo sapiens
cctggagcataaatc

SEQ ID NO: 382438 - DNA, 15 bp, Homo sapiens
ccctggagcataaat

SEQ ID NO: 382439 - DNA, 15 bp, Homo sapiens
gccctggagcataaa

SEQ ID NO: 382440 - DNA, 15 bp, Homo sapiens
tgccctggagcataa

SEQ ID NO: 382441 - DNA, 15 bp, Homo sapiens
atgccctggagcata

SEQ ID NO: 382442 - DNA, 15 bp, Homo sapiens
aatgccctggagcat

SEQ ID NO: 382443 - DNA, 15 bp, Homo sapiens
taatgccctggagca

SEQ ID NO: 382444 - DNA, 15 bp, Homo sapiens
ttaatgccctggagc

SEQ ID NO: 382445 - DNA, 15 bp, Homo sapiens
attaatgccctggag

SEQ ID NO: 382446 - DNA, 15 bp, Homo sapiens
cattaatgccctgga

SEQ ID NO: 382447 - DNA, 15 bp, Homo sapiens
gcattaatgccctgg

SEQ ID NO: 382448 - DNA, 15 bp, Homo sapiens
ggcattaatgccctg

SEQ ID NO: 382449 - DNA, 15 bp, Homo sapiens
tggcattaatgccct

SEQ ID NO: 382450 - DNA, 15 bp, Homo sapiens
ttggcattaatgccc

SEQ ID NO: 382451 - DNA, 15 bp, Homo sapiens
cttggcattaatgcc

SEQ ID NO: 382452 - DNA, 15 bp, Homo sapiens
acttggcattaatgc

SEQ ID NO: 382453 - DNA, 15 bp, Homo sapiens
cacttggcattaatg

SEQ ID NO: 382454 - DNA, 15 bp, Homo sapiens
ccacttggcattaat

SEQ ID NO: 382455 - DNA, 15 bp, Homo sapiens
accacttggcattaa

SEQ ID NO: 382456 - DNA, 15 bp, Homo sapiens
gaccacttggcatta

SEQ ID NO: 382457 - DNA, 15 bp, Homo sapiens
tgaccacttggcatt

SEQ ID NO: 382458 - DNA, 15 bp, Homo sapiens
atgaccacttggcat

SEQ ID NO: 382459 - DNA, 15 bp, Homo sapiens
gatgaccacttggca

SEQ ID NO: 382460 - DNA, 15 bp, Homo sapiens
ggatgaccacttggc

SEQ ID NO: 382461 - DNA, 15 bp, Homo sapiens
aggatgaccacttgg

SEQ ID NO: 382462 - DNA, 15 bp, Homo sapiens
caggatgaccacttg

SEQ ID NO: 382463 - DNA, 15 bp, Homo sapiens
ccaggatgaccactt

SEQ ID NO: 382464 - DNA, 15 bp, Homo sapiens
gccaggatgaccact

SEQ ID NO: 382465 - DNA, 15 bp, Homo sapiens
ggccaggatgaccac

SEQ ID NO: 382466 - DNA, 15 bp, Homo sapiens
tggccaggatgacca

SEQ ID NO: 382467 - DNA, 15 bp, Homo sapiens
ttggccaggatgacc

SEQ ID NO: 382468 - DNA, 15 bp, Homo sapiens
gttggccaggatgac

SEQ ID NO: 382469 - DNA, 15 bp, Homo sapiens
agttggccaggatga

SEQ ID NO: 382470 - DNA, 15 bp, Homo sapiens
aagttggccaggatg

SEQ ID NO: 382471 - DNA, 15 bp, Homo sapiens
caagttggccaggat

SEQ ID NO: 382472 - DNA, 15 bp, Homo sapiens
acaagttggccagga

SEQ ID NO: 382473 - DNA, 15 bp, Homo sapiens
aacaagttggccagg

SEQ ID NO: 382474 - DNA, 15 bp, Homo sapiens
aaacaagttggccag

SEQ ID NO: 382475 - DNA, 15 bp, Homo sapiens
taaacaagttggcca

SEQ ID NO: 382476 - DNA, 15 bp, Homo sapiens
gtaaacaagttggcc

SEQ ID NO: 382477 - DNA, 15 bp, Homo sapiens
tgtaaacaagttggc

SEQ ID NO: 382478 - DNA, 15 bp, Homo sapiens
atgtaaacaagttgg

SEQ ID NO: 382479 - DNA, 15 bp, Homo sapiens
catgtaaacaagttg

SEQ ID NO: 382480 - DNA, 15 bp, Homo sapiens
acatgtaaacaagtt

SEQ ID NO: 382481 - DNA, 15 bp, Homo sapiens
cacatgtaaacaagt

SEQ ID NO: 382482 - DNA, 15 bp, Homo sapiens
tcacatgtaaacaag

SEQ ID NO: 382483 - DNA, 15 bp, Homo sapiens
atcacatgtaaacaa

SEQ ID NO: 382484 - DNA, 15 bp, Homo sapiens
tatcacatgtaaaca

SEQ ID NO: 382485 - DNA, 15 bp, Homo sapiens
ctatcacatgtaaac

SEQ ID NO: 382486 - DNA, 15 bp, Homo sapiens
cctatcacatgtaaa

SEQ ID NO: 382487 - DNA, 15 bp, Homo sapiens
ccctatcacatgtaa

SEQ ID NO: 382488 - DNA, 15 bp, Homo sapiens
tccctatcacatgta

SEQ ID NO: 382489 - DNA, 15 bp, Homo sapiens
ctccctatcacatgt

SEQ ID NO: 382490 - DNA, 15 bp, Homo sapiens
gctccctatcacatg

SEQ ID NO: 382491 - DNA, 15 bp, Homo sapiens
agctccctatcacat

SEQ ID NO: 382492 - DNA, 15 bp, Homo sapiens
aagctccctatcaca

SEQ ID NO: 382493 - DNA, 15 bp, Homo sapiens
taagctccctatcac

SEQ ID NO: 382494 - DNA, 15 bp, Homo sapiens
gtaagctccctatca

SEQ ID NO: 382495 - DNA, 15 bp, Homo sapiens
agtaagctccctatc

SEQ ID NO: 382496 - DNA, 15 bp, Homo sapiens
tagtaagctccctat

SEQ ID NO: 382497 - DNA, 15 bp, Homo sapiens
gtagtaagctcccta

SEQ ID NO: 382498 - DNA, 15 bp, Homo sapiens
ggtagtaagctccct

SEQ ID NO: 382499 - DNA, 15 bp, Homo sapiens
aggtagtaagctccc

SEQ ID NO: 382500 - DNA, 15 bp, Homo sapiens
gaggtagtaagctcc

SEQ ID NO: 382501 - DNA, 15 bp, Homo sapiens
agaggtagtaagctc

SEQ ID NO: 382502 - DNA, 15 bp, Homo sapiens
tagaggtagtaagct

SEQ ID NO: 382503 - DNA, 15 bp, Homo sapiens
ttagaggtagtaagc

SEQ ID NO: 382504 - DNA, 15 bp, Homo sapiens
tttagaggtagtaag

SEQ ID NO: 382505 - DNA, 15 bp, Homo sapiens
ttttagaggtagtaa

SEQ ID NO: 382506 - DNA, 15 bp, Homo sapiens
cttttagaggtagta

SEQ ID NO: 382507 - DNA, 15 bp, Homo sapiens
acttttagaggtagt

SEQ ID NO: 382508 - DNA, 15 bp, Homo sapiens
tacttttagaggtag

SEQ ID NO: 382509 - DNA, 15 bp, Homo sapiens
ctacttttagaggta

SEQ ID NO: 382510 - DNA, 15 bp, Homo sapiens
gctacttttagaggt

SEQ ID NO: 382511 - DNA, 15 bp, Homo sapiens
agctacttttagagg

SEQ ID NO: 382512 - DNA, 15 bp, Homo sapiens
aagctacttttagag

SEQ ID NO: 382513 - DNA, 15 bp, Homo sapiens
aaagctacttttaga

SEQ ID NO: 382514 - DNA, 15 bp, Homo sapiens
aaaagctacttttag

SEQ ID NO: 382515 - DNA, 15 bp, Homo sapiens
caaaagctactttta

SEQ ID NO: 382516 - DNA, 15 bp, Homo sapiens
gcaaaagctactttt

SEQ ID NO: 382517 - DNA, 15 bp, Homo sapiens
agcaaaagctacttt

SEQ ID NO: 382518 - DNA, 15 bp, Homo sapiens
aagcaaaagctactt

SEQ ID NO: 382519 - DNA, 15 bp, Homo sapiens
aaagcaaaagctact

SEQ ID NO: 382520 - DNA, 15 bp, Homo sapiens
aaaagcaaaagctac

SEQ ID NO: 382521 - DNA, 15 bp, Homo sapiens
aaaaagcaaaagcta

SEQ ID NO: 382522 - DNA, 15 bp, Homo sapiens
aaaaaagcaaaagct

SEQ ID NO: 382523 - DNA, 15 bp, Homo sapiens
aaaaaaagcaaaagc

SEQ ID NO: 382524 - DNA, 15 bp, Homo sapiens
aaaaaaaagcaaaag

SEQ ID NO: 382525 - DNA, 15 bp, Homo sapiens
caaaaaaaagcaaaa

SEQ ID NO: 382526 - DNA, 15 bp, Homo sapiens
acaaaaaaaagcaaa

SEQ ID NO: 382527 - DNA, 15 bp, Homo sapiens
aacaaaaaaaagcaa

SEQ ID NO: 382528 - DNA, 15 bp, Homo sapiens
aaacaaaaaaaagca

SEQ ID NO: 382529 - DNA, 15 bp, Homo sapiens
aaaacaaaaaaaagc

SEQ ID NO: 382530 - DNA, 15 bp, Homo sapiens
aaaaacaaaaaaaag

SEQ ID NO: 382531 - DNA, 15 bp, Homo sapiens
aaaaaacaaaaaaaa

SEQ ID NO: 382532 - DNA, 15 bp, Homo sapiens
aaaaaaacaaaaaaa

SEQ ID NO: 382533 - DNA, 15 bp, Homo sapiens
aaaaaaaacaaaaaa

SEQ ID NO: 382534 - DNA, 15 bp, Homo sapiens
caaaaaaaacaaaaa

SEQ ID NO: 382535 - DNA, 15 bp, Homo sapiens
tcaaaaaaaacaaaa

SEQ ID NO: 382536 - DNA, 15 bp, Homo sapiens
ctcaaaaaaaacaaa

SEQ ID NO: 382537 - DNA, 15 bp, Homo sapiens
tctcaaaaaaaacaa

SEQ ID NO: 382538 - DNA, 15 bp, Homo sapiens
atctcaaaaaaaaca

SEQ ID NO: 382539 - DNA, 15 bp, Homo sapiens
catctcaaaaaaaac

SEQ ID NO: 382540 - DNA, 15 bp, Homo sapiens
ttccatctcaaaaaa

SEQ ID NO: 382541 - DNA, 15 bp, Homo sapiens
attccatctcaaaaa

SEQ ID NO: 382542 - DNA, 15 bp, Homo sapiens
gattccatctcaaaa

SEQ ID NO: 382543 - DNA, 15 bp, Homo sapiens
agattccatctcaaa

SEQ ID NO: 382544 - DNA, 15 bp, Homo sapiens
gagattccatctcaa

SEQ ID NO: 382545 - DNA, 15 bp, Homo sapiens
cgagattccatctca

SEQ ID NO: 382546 - DNA, 15 bp, Homo sapiens
gcgagattccatctc

SEQ ID NO: 382547 - DNA, 15 bp, Homo sapiens
agcgagattccatct

SEQ ID NO: 382548 - DNA, 15 bp, Homo sapiens
aagcgagattccatc

SEQ ID NO: 382549 - DNA, 15 bp, Homo sapiens
aaagcgagattccat

SEQ ID NO: 382550 - DNA, 15 bp, Homo sapiens
caaagcgagattcca

SEQ ID NO: 382551 - DNA, 15 bp, Homo sapiens
acaaagcgagattcc

SEQ ID NO: 382552 - DNA, 15 bp, Homo sapiens
gacaaagcgagattc

SEQ ID NO: 382553 - DNA, 15 bp, Homo sapiens
cgacaaagcgagatt

SEQ ID NO: 382554 - DNA, 15 bp, Homo sapiens
gcgacaaagcgagat

SEQ ID NO: 382555 - DNA, 15 bp, Homo sapiens
ggcgacaaagcgaga

SEQ ID NO: 382556 - DNA, 15 bp, Homo sapiens
gggcgacaaagcgag

SEQ ID NO: 382557 - DNA, 15 bp, Homo sapiens
tgggcgacaaagcga

SEQ ID NO: 382558 - DNA, 15 bp, Homo sapiens
ctgggcgacaaagcg

SEQ ID NO: 382559 - DNA, 15 bp, Homo sapiens
cctgggcgacaaagc

SEQ ID NO: 382560 - DNA, 15 bp, Homo sapiens
gcctgggcgacaaag

SEQ ID NO: 382561 - DNA, 15 bp, Homo sapiens
agcctgggcgacaaa

SEQ ID NO: 382562 - DNA, 15 bp, Homo sapiens
tagcctgggcgacaa

SEQ ID NO: 382563 - DNA, 15 bp, Homo sapiens
tcactgcactctagc

SEQ ID NO: 382564 - DNA, 15 bp, Homo sapiens
atcactgcactctag

SEQ ID NO: 382565 - DNA, 15 bp, Homo sapiens
gatcactgcactcta

SEQ ID NO: 382566 - DNA, 15 bp, Homo sapiens
agatcactgcactct

SEQ ID NO: 382567 - DNA, 15 bp, Homo sapiens
gagatcactgcactc

SEQ ID NO: 382568 - DNA, 15 bp, Homo sapiens
cgagatcactgcact

SEQ ID NO: 382569 - DNA, 15 bp, Homo sapiens
ccgagatcactgcac

SEQ ID NO: 382570 - DNA, 15 bp, Homo sapiens
gccgagatcactgca

SEQ ID NO: 382571 - DNA, 15 bp, Homo sapiens
agccgagatcactgc

SEQ ID NO: 382572 - DNA, 15 bp, Homo sapiens
gagccgagatcactg

SEQ ID NO: 382573 - DNA, 15 bp, Homo sapiens
tgagccgagatcact

SEQ ID NO: 382574 - DNA, 15 bp, Homo sapiens
ctgcagtgagccgag

SEQ ID NO: 382575 - DNA, 15 bp, Homo sapiens
gctgcagtgagccga

SEQ ID NO: 382576 - DNA, 15 bp, Homo sapiens
ggctgcagtgagccg

SEQ ID NO: 382577 - DNA, 15 bp, Homo sapiens
aggctgcagtgagcc

SEQ ID NO: 382578 - DNA, 15 bp, Homo sapiens
gcagaggctgcagtg

SEQ ID NO: 382579 - DNA, 15 bp, Homo sapiens
ggcagaggctgcagt

SEQ ID NO: 382580 - DNA, 15 bp, Homo sapiens
aggcagaggctgcag

SEQ ID NO: 382581 - DNA, 15 bp, Homo sapiens
gaggcagaggctgca

SEQ ID NO: 382582 - DNA, 15 bp, Homo sapiens
ggaggcagaggctgc

SEQ ID NO: 382583 - DNA, 15 bp, Homo sapiens
gggaggcagaggctg

SEQ ID NO: 382584 - DNA, 15 bp, Homo sapiens
cgggaggcagaggct

SEQ ID NO: 382585 - DNA, 15 bp, Homo sapiens
ccgggaggcagaggc

SEQ ID NO: 382586 - DNA, 15 bp, Homo sapiens
ctgaacccgggaggc

SEQ ID NO: 382587 - DNA, 15 bp, Homo sapiens
cctgaacccgggagg

SEQ ID NO: 382588 - DNA, 15 bp, Homo sapiens
gcctgaacccgggag

SEQ ID NO: 382589 - DNA, 15 bp, Homo sapiens
tgcctgaacccggga

SEQ ID NO: 382590 - DNA, 15 bp, Homo sapiens
ttgcctgaacccggg

SEQ ID NO: 382591 - DNA, 15 bp, Homo sapiens
attgcctgaacccgg

SEQ ID NO: 382592 - DNA, 15 bp, Homo sapiens
aattgcctgaacccg

SEQ ID NO: 382593 - DNA, 15 bp, Homo sapiens
aaattgcctgaaccc

SEQ ID NO: 382594 - DNA, 15 bp, Homo sapiens
aaaattgcctgaacc

SEQ ID NO: 382595 - DNA, 15 bp, Homo sapiens
caaaattgcctgaac

SEQ ID NO: 382596 - DNA, 15 bp, Homo sapiens
gcaaaattgcctgaa

SEQ ID NO: 382597 - DNA, 15 bp, Homo sapiens
agcaaaattgcctga

SEQ ID NO: 382598 - DNA, 15 bp, Homo sapiens
cagcaaaattgcctg

SEQ ID NO: 382599 - DNA, 15 bp, Homo sapiens
gcagcaaaattgcct

SEQ ID NO: 382600 - DNA, 15 bp, Homo sapiens
ggcagcaaaattgcc

SEQ ID NO: 382601 - DNA, 15 bp, Homo sapiens
aggcagcaaaattgc

SEQ ID NO: 382602 - DNA, 15 bp, Homo sapiens
gaggcagcaaaattg

SEQ ID NO: 382603 - DNA, 15 bp, Homo sapiens
tgaggcagcaaaatt

SEQ ID NO: 382604 - DNA, 15 bp, Homo sapiens
ctgaggcagcaaaat

SEQ ID NO: 382605 - DNA, 15 bp, Homo sapiens
gctgaggcagcaaaa

SEQ ID NO: 382606 - DNA, 15 bp, Homo sapiens
ggctgaggcagcaaa

SEQ ID NO: 382607 - DNA, 15 bp, Homo sapiens
aggctgaggcagcaa

SEQ ID NO: 382608 - DNA, 15 bp, Homo sapiens
gaggctgaggcagca

SEQ ID NO: 382609 - DNA, 15 bp, Homo sapiens
ggaggctgaggcagc

SEQ ID NO: 382610 - DNA, 15 bp, Homo sapiens
ttactcaggaggctg

SEQ ID NO: 382611 - DNA, 15 bp, Homo sapiens
gttactcaggaggct

SEQ ID NO: 382612 - DNA, 15 bp, Homo sapiens
agttactcaggaggc

SEQ ID NO: 382613 - DNA, 15 bp, Homo sapiens
cagttactcaggagg

SEQ ID NO: 382614 - DNA, 15 bp, Homo sapiens
ccagttactcaggag

SEQ ID NO: 382615 - DNA, 15 bp, Homo sapiens
cccagttactcagga

SEQ ID NO: 382616 - DNA, 15 bp, Homo sapiens
tcccagttactcagg

SEQ ID NO: 382617 - DNA, 15 bp, Homo sapiens
atcccagttactcag

SEQ ID NO: 382618 - DNA, 15 bp, Homo sapiens
aatcccagttactca

SEQ ID NO: 382619 - DNA, 15 bp, Homo sapiens
taatcccagttactc

SEQ ID NO: 382620 - DNA, 15 bp, Homo sapiens
gtaatcccagttact

SEQ ID NO: 382621 - DNA, 15 bp, Homo sapiens
tgtaatcccagttac

SEQ ID NO: 382622 - DNA, 15 bp, Homo sapiens
ctgtaatcccagtta

SEQ ID NO: 382623 - DNA, 15 bp, Homo sapiens
cctgtaatcccagtt

SEQ ID NO: 382624 - DNA, 15 bp, Homo sapiens
tcctgtaatcccagt

SEQ ID NO: 382625 - DNA, 15 bp, Homo sapiens
ttcctgtaatcccag

SEQ ID NO: 382626 - DNA, 15 bp, Homo sapiens
gttcctgtaatccca

SEQ ID NO: 382627 - DNA, 15 bp, Homo sapiens
tgttcctgtaatccc

SEQ ID NO: 382628 - DNA, 15 bp, Homo sapiens
gtgttcctgtaatcc

SEQ ID NO: 382629 - DNA, 15 bp, Homo sapiens
tgtgttcctgtaatc

SEQ ID NO: 382630 - DNA, 15 bp, Homo sapiens
gtgtgttcctgtaat

SEQ ID NO: 382631 - DNA, 15 bp, Homo sapiens
agtgtgttcctgtaa

SEQ ID NO: 382632 - DNA, 15 bp, Homo sapiens
tagtgtgttcctgta

SEQ ID NO: 382633 - DNA, 15 bp, Homo sapiens
gtagtgtgttcctgt

SEQ ID NO: 382634 - DNA, 15 bp, Homo sapiens
ggtagtgtgttcctg

SEQ ID NO: 382635 - DNA, 15 bp, Homo sapiens
tggtagtgtgttcct

SEQ ID NO: 382636 - DNA, 15 bp, Homo sapiens
gtggtagtgtgttcc

SEQ ID NO: 382637 - DNA, 15 bp, Homo sapiens
tgtggtagtgtgttc

SEQ ID NO: 382638 - DNA, 15 bp, Homo sapiens
gtgtggtagtgtgtt

SEQ ID NO: 382639 - DNA, 15 bp, Homo sapiens
ggtgtggtagtgtgt

SEQ ID NO: 382640 - DNA, 15 bp, Homo sapiens
gggtgtggtagtgtg

SEQ ID NO: 382641 - DNA, 15 bp, Homo sapiens
cgggtgtggtagtgt

SEQ ID NO: 382642 - DNA, 15 bp, Homo sapiens
ccgggtgtggtagtg

SEQ ID NO: 382643 - DNA, 15 bp, Homo sapiens
gccgggtgtggtagt

SEQ ID NO: 382644 - DNA, 15 bp, Homo sapiens
agccgggtgtggtag

SEQ ID NO: 382645 - DNA, 15 bp, Homo sapiens
tagccgggtgtggta

SEQ ID NO: 382646 - DNA, 15 bp, Homo sapiens
ttagccgggtgtggt

SEQ ID NO: 382647 - DNA, 15 bp, Homo sapiens
attagccgggtgtgg

SEQ ID NO: 382648 - DNA, 15 bp, Homo sapiens
aattagccgggtgtg

SEQ ID NO: 382649 - DNA, 15 bp, Homo sapiens
aaattagccgggtgt

SEQ ID NO: 382650 - DNA, 15 bp, Homo sapiens
aaaattagccgggtg

SEQ ID NO: 382651 - DNA, 15 bp, Homo sapiens
aaaaattagccgggt

SEQ ID NO: 382652 - DNA, 15 bp, Homo sapiens
aaaaaattagccggg

SEQ ID NO: 382653 - DNA, 15 bp, Homo sapiens
caaaaaattagccgg

SEQ ID NO: 382654 - DNA, 15 bp, Homo sapiens
acaaaaaattagccg

SEQ ID NO: 382655 - DNA, 15 bp, Homo sapiens
tacaaaaaattagcc

SEQ ID NO: 382656 - DNA, 15 bp, Homo sapiens
ttaaaaatacaaaaa

SEQ ID NO: 382657 - DNA, 15 bp, Homo sapiens
gttaaaaatacaaaa

SEQ ID NO: 382658 - DNA, 15 bp, Homo sapiens
tgttaaaaatacaaa

SEQ ID NO: 382659 - DNA, 15 bp, Homo sapiens
ctgttaaaaatacaa

SEQ ID NO: 382660 - DNA, 15 bp, Homo sapiens
tctgttaaaaataca

SEQ ID NO: 382661 - DNA, 15 bp, Homo sapiens
ctctgttaaaaatac

SEQ ID NO: 382662 - DNA, 15 bp, Homo sapiens
tctctgttaaaaata

SEQ ID NO: 382663 - DNA, 15 bp, Homo sapiens
atctctgttaaaaat

SEQ ID NO: 382664 - DNA, 15 bp, Homo sapiens
catctctgttaaaaa

SEQ ID NO: 382665 - DNA, 15 bp, Homo sapiens
ccatctctgttaaaa

SEQ ID NO: 382666 - DNA, 15 bp, Homo sapiens
cccatctctgttaaa

SEQ ID NO: 382667 - DNA, 15 bp, Homo sapiens
ccccatctctgttaa

SEQ ID NO: 382668 - DNA, 15 bp, Homo sapiens
accccatctctgtta

SEQ ID NO: 382669 - DNA, 15 bp, Homo sapiens
aaccccatctctgtt

SEQ ID NO: 382670 - DNA, 15 bp, Homo sapiens
aaaccccatctctgt

SEQ ID NO: 382671 - DNA, 15 bp, Homo sapiens
gaaaccccatctctg

SEQ ID NO: 382672 - DNA, 15 bp, Homo sapiens
tgaaaccccatctct

SEQ ID NO: 382673 - DNA, 15 bp, Homo sapiens
atgaaaccccatctc

SEQ ID NO: 382674 - DNA, 15 bp, Homo sapiens
gatgaaaccccatct

SEQ ID NO: 382675 - DNA, 15 bp, Homo sapiens
tgatgaaaccccatc

SEQ ID NO: 382676 - DNA, 15 bp, Homo sapiens
gtgatgaaaccccat

SEQ ID NO: 382677 - DNA, 15 bp, Homo sapiens
cgtgatgaaacccca

SEQ ID NO: 382678 - DNA, 15 bp, Homo sapiens
acgtgatgaaacccc

SEQ ID NO: 382679 - DNA, 15 bp, Homo sapiens
aacgtgatgaaaccc

SEQ ID NO: 382680 - DNA, 15 bp, Homo sapiens
caacgtgatgaaacc

SEQ ID NO: 382681 - DNA, 15 bp, Homo sapiens
ccaacgtgatgaaac

SEQ ID NO: 382682 - DNA, 15 bp, Homo sapiens
gccaacgtgatgaaa

SEQ ID NO: 382683 - DNA, 15 bp, Homo sapiens
ggccaacgtgatgaa

SEQ ID NO: 382684 - DNA, 15 bp, Homo sapiens
tggccaacgtgatga

SEQ ID NO: 382685 - DNA, 15 bp, Homo sapiens
ctggccaacgtgatg

SEQ ID NO: 382686 - DNA, 15 bp, Homo sapiens
cctggccaacgtgat

SEQ ID NO: 382687 - DNA, 15 bp, Homo sapiens
gcctggccaacgtga

SEQ ID NO: 382688 - DNA, 15 bp, Homo sapiens
agcctggccaacgtg

SEQ ID NO: 382689 - DNA, 15 bp, Homo sapiens
cagcctggccaacgt

SEQ ID NO: 382690 - DNA, 15 bp, Homo sapiens
ccagcctggccaacg

SEQ ID NO: 382691 - DNA, 15 bp, Homo sapiens
aaggtcaggagttca

SEQ ID NO: 382692 - DNA, 15 bp, Homo sapiens
taaggtcaggagttc

SEQ ID NO: 382693 - DNA, 15 bp, Homo sapiens
ctaaggtcaggagtt

SEQ ID NO: 382694 - DNA, 15 bp, Homo sapiens
cctaaggtcaggagt

SEQ ID NO: 382695 - DNA, 15 bp, Homo sapiens
acctaaggtcaggag

SEQ ID NO: 382696 - DNA, 15 bp, Homo sapiens
cacctaaggtcagga

SEQ ID NO: 382697 - DNA, 15 bp, Homo sapiens
tcacctaaggtcagg

SEQ ID NO: 382698 - DNA, 15 bp, Homo sapiens
atcacctaaggtcag

SEQ ID NO: 382699 - DNA, 15 bp, Homo sapiens
gatcacctaaggtca

SEQ ID NO: 382700 - DNA, 15 bp, Homo sapiens
ggatcacctaaggtc

SEQ ID NO: 382701 - DNA, 15 bp, Homo sapiens
tggatcacctaaggt

SEQ ID NO: 382702 - DNA, 15 bp, Homo sapiens
gtggatcacctaagg

SEQ ID NO: 382703 - DNA, 15 bp, Homo sapiens
ggtggatcacctaag

SEQ ID NO: 382704 - DNA, 15 bp, Homo sapiens
gggtggatcacctaa

SEQ ID NO: 382705 - DNA, 15 bp, Homo sapiens
cgggtggatcaccta

SEQ ID NO: 382706 - DNA, 15 bp, Homo sapiens
gcgggtggatcacct

SEQ ID NO: 382707 - DNA, 15 bp, Homo sapiens
ggcgggtggatcacc

SEQ ID NO: 382708 - DNA, 15 bp, Homo sapiens
aggcgggtggatcac

SEQ ID NO: 382709 - DNA, 15 bp, Homo sapiens
gaggcgggtggatca

SEQ ID NO: 382710 - DNA, 15 bp, Homo sapiens
cgaggcgggtggatc

SEQ ID NO: 382711 - DNA, 15 bp, Homo sapiens
ccgaggcgggtggat

SEQ ID NO: 382712 - DNA, 15 bp, Homo sapiens
gccgaggcgggtgga

SEQ ID NO: 382713 - DNA, 15 bp, Homo sapiens
ggccgaggcgggtgg

SEQ ID NO: 382714 - DNA, 15 bp, Homo sapiens
aggccgaggcgggtg

SEQ ID NO: 382715 - DNA, 15 bp, Homo sapiens
aaggccgaggcgggt

SEQ ID NO: 382716 - DNA, 15 bp, Homo sapiens
aaaggccgaggcggg

SEQ ID NO: 382717 - DNA, 15 bp, Homo sapiens
gaaaggccgaggcgg

SEQ ID NO: 382718 - DNA, 15 bp, Homo sapiens
ggaaaggccgaggcg

SEQ ID NO: 382719 - DNA, 15 bp, Homo sapiens
gggaaaggccgaggc

SEQ ID NO: 382720 - DNA, 15 bp, Homo sapiens
tgggaaaggccgagg

SEQ ID NO: 382721 - DNA, 15 bp, Homo sapiens
ttgggaaaggccgag

SEQ ID NO: 382722 - DNA, 15 bp, Homo sapiens
tttgggaaaggccga

SEQ ID NO: 382723 - DNA, 15 bp, Homo sapiens
ctttgggaaaggccg

SEQ ID NO: 382724 - DNA, 15 bp, Homo sapiens
actttgggaaaggcc

SEQ ID NO: 382725 - DNA, 15 bp, Homo sapiens
cactttgggaaaggc

SEQ ID NO: 382726 - DNA, 15 bp, Homo sapiens
acactttgggaaagg

SEQ ID NO: 382727 - DNA, 15 bp, Homo sapiens
aacactttgggaaag

SEQ ID NO: 382728 - DNA, 15 bp, Homo sapiens
caacactttgggaaa

SEQ ID NO: 382729 - DNA, 15 bp, Homo sapiens
ccaacactttgggaa

SEQ ID NO: 382730 - DNA, 15 bp, Homo sapiens
cccaacactttggga

SEQ ID NO: 382731 - DNA, 15 bp, Homo sapiens
tcccaacactttggg

SEQ ID NO: 382732 - DNA, 15 bp, Homo sapiens
atcccaacactttgg

SEQ ID NO: 382733 - DNA, 15 bp, Homo sapiens
aatcccaacactttg

SEQ ID NO: 382734 - DNA, 15 bp, Homo sapiens
taatcccaacacttt

SEQ ID NO: 382735 - DNA, 15 bp, Homo sapiens
gtaatcccaacactt

SEQ ID NO: 382736 - DNA, 15 bp, Homo sapiens
tgtaatcccaacact

SEQ ID NO: 382737 - DNA, 15 bp, Homo sapiens
ctgtaatcccaacac

SEQ ID NO: 382738 - DNA, 15 bp, Homo sapiens
cctgtaatcccaaca

SEQ ID NO: 382739 - DNA, 15 bp, Homo sapiens
acctgtaatcccaac

SEQ ID NO: 382740 - DNA, 15 bp, Homo sapiens
cacctgtaatcccaa

SEQ ID NO: 382741 - DNA, 15 bp, Homo sapiens
acacctgtaatccca

SEQ ID NO: 382742 - DNA, 15 bp, Homo sapiens
cacacctgtaatccc

SEQ ID NO: 382743 - DNA, 15 bp, Homo sapiens
tcacacctgtaatcc

SEQ ID NO: 382744 - DNA, 15 bp, Homo sapiens
ggtggctcacacctg

SEQ ID NO: 382745 - DNA, 15 bp, Homo sapiens
tggtggctcacacct

SEQ ID NO: 382746 - DNA, 15 bp, Homo sapiens
gtggtggctcacacc

SEQ ID NO: 382747 - DNA, 15 bp, Homo sapiens
cgtggtggctcacac

SEQ ID NO: 382748 - DNA, 15 bp, Homo sapiens
gcgtggtggctcaca

SEQ ID NO: 382749 - DNA, 15 bp, Homo sapiens
ggcgtggtggctcac

SEQ ID NO: 382750 - DNA, 15 bp, Homo sapiens
aggcgtggtggctca

SEQ ID NO: 382751 - DNA, 15 bp, Homo sapiens
caggcgtggtggctc

SEQ ID NO: 382752 - DNA, 15 bp, Homo sapiens
ccaggcgtggtggct

SEQ ID NO: 382753 - DNA, 15 bp, Homo sapiens
accaggcgtggtggc

SEQ ID NO: 382754 - DNA, 15 bp, Homo sapiens
gaccaggcgtggtgg

SEQ ID NO: 382755 - DNA, 15 bp, Homo sapiens
cgaccaggcgtggtg

SEQ ID NO: 382756 - DNA, 15 bp, Homo sapiens
gcgaccaggcgtggt

SEQ ID NO: 382757 - DNA, 15 bp, Homo sapiens
agcgaccaggcgtgg

SEQ ID NO: 382758 - DNA, 15 bp, Homo sapiens
aagcgaccaggcgtg

SEQ ID NO: 382759 - DNA, 15 bp, Homo sapiens
aaagcgaccaggcgt

SEQ ID NO: 382760 - DNA, 15 bp, Homo sapiens
aaaagcgaccaggcg

SEQ ID NO: 382761 - DNA, 15 bp, Homo sapiens
aaaaagcgaccaggc

SEQ ID NO: 382762 - DNA, 15 bp, Homo sapiens
caaaaagcgaccagg

SEQ ID NO: 382763 - DNA, 15 bp, Homo sapiens
gcaaaaagcgaccag

SEQ ID NO: 382764 - DNA, 15 bp, Homo sapiens
agcaaaaagcgacca

SEQ ID NO: 382765 - DNA, 15 bp, Homo sapiens
aagcaaaaagcgacc

SEQ ID NO: 382766 - DNA, 15 bp, Homo sapiens
aaagcaaaaagcgac

SEQ ID NO: 382767 - DNA, 15 bp, Homo sapiens
aaaagcaaaaagcga

SEQ ID NO: 382768 - DNA, 15 bp, Homo sapiens
aaaaagcaaaaagcg

SEQ ID NO: 382769 - DNA, 15 bp, Homo sapiens
taaaaagcaaaaagc

SEQ ID NO: 382770 - DNA, 15 bp, Homo sapiens
ataaaaagcaaaaag

SEQ ID NO: 382771 - DNA, 15 bp, Homo sapiens
gataaaaagcaaaaa

SEQ ID NO: 382772 - DNA, 15 bp, Homo sapiens
tgataaaaagcaaaa

SEQ ID NO: 382773 - DNA, 15 bp, Homo sapiens
atgataaaaagcaaa

SEQ ID NO: 382774 - DNA, 15 bp, Homo sapiens
aatgataaaaagcaa

SEQ ID NO: 382775 - DNA, 15 bp, Homo sapiens
caatgataaaaagca

SEQ ID NO: 382776 - DNA, 15 bp, Homo sapiens
tcaatgataaaaagc

SEQ ID NO: 382777 - DNA, 15 bp, Homo sapiens
ttcaatgataaaaag

SEQ ID NO: 382778 - DNA, 15 bp, Homo sapiens
gttcaatgataaaaa

SEQ ID NO: 382779 - DNA, 15 bp, Homo sapiens
agttcaatgataaaa

SEQ ID NO: 382780 - DNA, 15 bp, Homo sapiens
cagttcaatgataaa

SEQ ID NO: 382781 - DNA, 15 bp, Homo sapiens
tcagttcaatgataa

SEQ ID NO: 382782 - DNA, 15 bp, Homo sapiens
ttcagttcaatgata

SEQ ID NO: 382783 - DNA, 15 bp, Homo sapiens
tttcagttcaatgat

SEQ ID NO: 382784 - DNA, 15 bp, Homo sapiens
gtttcagttcaatga

SEQ ID NO: 382785 - DNA, 15 bp, Homo sapiens
agtttcagttcaatg

SEQ ID NO: 382786 - DNA, 15 bp, Homo sapiens
aagtttcagttcaat

SEQ ID NO: 382787 - DNA, 15 bp, Homo sapiens
caagtttcagttcaa

SEQ ID NO: 382788 - DNA, 15 bp, Homo sapiens
gcaagtttcagttca

SEQ ID NO: 382789 - DNA, 15 bp, Homo sapiens
agcaagtttcagttc

SEQ ID NO: 382790 - DNA, 15 bp, Homo sapiens
aagcaagtttcagtt

SEQ ID NO: 382791 - DNA, 15 bp, Homo sapiens
taagcaagtttcagt

SEQ ID NO: 382792 - DNA, 15 bp, Homo sapiens
gtaagcaagtttcag

SEQ ID NO: 382793 - DNA, 15 bp, Homo sapiens
tgtaagcaagtttca

SEQ ID NO: 382794 - DNA, 15 bp, Homo sapiens
atgtaagcaagtttc

SEQ ID NO: 382795 - DNA, 15 bp, Homo sapiens
gatgtaagcaagttt

SEQ ID NO: 382796 - DNA, 15 bp, Homo sapiens
cgatgtaagcaagtt

SEQ ID NO: 382797 - DNA, 15 bp, Homo sapiens
acgatgtaagcaagt

SEQ ID NO: 382798 - DNA, 15 bp, Homo sapiens
tacgatgtaagcaag

SEQ ID NO: 382799 - DNA, 15 bp, Homo sapiens
ctacgatgtaagcaa

SEQ ID NO: 382800 - DNA, 15 bp, Homo sapiens
actacgatgtaagca

SEQ ID NO: 382801 - DNA, 15 bp, Homo sapiens
aactacgatgtaagc

SEQ ID NO: 382802 - DNA, 15 bp, Homo sapiens
gaactacgatgtaag

SEQ ID NO: 382803 - DNA, 15 bp, Homo sapiens
agaactacgatgtaa

SEQ ID NO: 382804 - DNA, 15 bp, Homo sapiens
cagaactacgatgta

SEQ ID NO: 382805 - DNA, 15 bp, Homo sapiens
acagaactacgatgt

SEQ ID NO: 382806 - DNA, 15 bp, Homo sapiens
tacagaactacgatg

SEQ ID NO: 382807 - DNA, 15 bp, Homo sapiens
ttacagaactacgat

SEQ ID NO: 382808 - DNA, 15 bp, Homo sapiens
gttacagaactacga

SEQ ID NO: 382809 - DNA, 15 bp, Homo sapiens
ggttacagaactacg

SEQ ID NO: 382810 - DNA, 15 bp, Homo sapiens
gggttacagaactac

SEQ ID NO: 382811 - DNA, 15 bp, Homo sapiens
tgggttacagaacta

SEQ ID NO: 382812 - DNA, 15 bp, Homo sapiens
ctgggttacagaact

SEQ ID NO: 382813 - DNA, 15 bp, Homo sapiens
tctgggttacagaac

SEQ ID NO: 382814 - DNA, 15 bp, Homo sapiens
ttctgggttacagaa

SEQ ID NO: 382815 - DNA, 15 bp, Homo sapiens
attctgggttacaga

SEQ ID NO: 382816 - DNA, 15 bp, Homo sapiens
tattctgggttacag

SEQ ID NO: 382817 - DNA, 15 bp, Homo sapiens
ttattctgggttaca

SEQ ID NO: 382818 - DNA, 15 bp, Homo sapiens
cttattctgggttac

SEQ ID NO: 382819 - DNA, 15 bp, Homo sapiens
acttattctgggtta

SEQ ID NO: 382820 - DNA, 15 bp, Homo sapiens
cacttattctgggtt

SEQ ID NO: 382821 - DNA, 15 bp, Homo sapiens
gcacttattctgggt

SEQ ID NO: 382822 - DNA, 15 bp, Homo sapiens
tgcacttattctggg

SEQ ID NO: 382823 - DNA, 15 bp, Homo sapiens
ttgcacttattctgg

SEQ ID NO: 382824 - DNA, 15 bp, Homo sapiens
tttgcacttattctg

SEQ ID NO: 382825 - DNA, 15 bp, Homo sapiens
ttttgcacttattct

SEQ ID NO: 382826 - DNA, 15 bp, Homo sapiens
attttgcacttattc

SEQ ID NO: 382827 - DNA, 15 bp, Homo sapiens
gattttgcacttatt

SEQ ID NO: 382828 - DNA, 15 bp, Homo sapiens
agattttgcacttat

SEQ ID NO: 382829 - DNA, 15 bp, Homo sapiens
gagattttgcactta

SEQ ID NO: 382830 - DNA, 15 bp, Homo sapiens
tgagattttgcactt

SEQ ID NO: 382831 - DNA, 15 bp, Homo sapiens
atgagattttgcact

SEQ ID NO: 382832 - DNA, 15 bp, Homo sapiens
gatgagattttgcac

SEQ ID NO: 382833 - DNA, 15 bp, Homo sapiens
agatgagattttgca

SEQ ID NO: 382834 - DNA, 15 bp, Homo sapiens
gagatgagattttgc

SEQ ID NO: 382835 - DNA, 15 bp, Homo sapiens
agagatgagattttg

SEQ ID NO: 382836 - DNA, 15 bp, Homo sapiens
tagagatgagatttt

SEQ ID NO: 382837 - DNA, 15 bp, Homo sapiens
ctagagatgagattt

SEQ ID NO: 382838 - DNA, 15 bp, Homo sapiens
tctagagatgagatt

SEQ ID NO: 382839 - DNA, 15 bp, Homo sapiens
ttctagagatgagat

SEQ ID NO: 382840 - DNA, 15 bp, Homo sapiens
tttctagagatgaga

SEQ ID NO: 382841 - DNA, 15 bp, Homo sapiens
ttttctagagatgag

SEQ ID NO: 382842 - DNA, 15 bp, Homo sapiens
gttttctagagatga

SEQ ID NO: 382843 - DNA, 15 bp, Homo sapiens
tgttttctagagatg

SEQ ID NO: 382844 - DNA, 15 bp, Homo sapiens
gtgttttctagagat

SEQ ID NO: 382845 - DNA, 15 bp, Homo sapiens
ggtgttttctagaga

SEQ ID NO: 382846 - DNA, 15 bp, Homo sapiens
gggtgttttctagag

SEQ ID NO: 382847 - DNA, 15 bp, Homo sapiens
tgggtgttttctaga

SEQ ID NO: 382848 - DNA, 15 bp, Homo sapiens
ttgggtgttttctag

SEQ ID NO: 382849 - DNA, 15 bp, Homo sapiens
cttgggtgttttcta

SEQ ID NO: 382850 - DNA, 15 bp, Homo sapiens
ccttgggtgttttct

SEQ ID NO: 382851 - DNA, 15 bp, Homo sapiens
tccttgggtgttttc

SEQ ID NO: 382852 - DNA, 15 bp, Homo sapiens
ctccttgggtgtttt

SEQ ID NO: 382853 - DNA, 15 bp, Homo sapiens
cctccttgggtgttt

SEQ ID NO: 382854 - DNA, 15 bp, Homo sapiens
ccctccttgggtgtt

SEQ ID NO: 382855 - DNA, 15 bp, Homo sapiens
accctccttgggtgt

SEQ ID NO: 382856 - DNA, 15 bp, Homo sapiens
aaccctccttgggtg

SEQ ID NO: 382857 - DNA, 15 bp, Homo sapiens
gaaccctccttgggt

SEQ ID NO: 382858 - DNA, 15 bp, Homo sapiens
agaaccctccttggg

SEQ ID NO: 382859 - DNA, 15 bp, Homo sapiens
tagaaccctccttgg

SEQ ID NO: 382860 - DNA, 15 bp, Homo sapiens
ttagaaccctccttg

SEQ ID NO: 382861 - DNA, 15 bp, Homo sapiens
attagaaccctcctt

SEQ ID NO: 382862 - DNA, 15 bp, Homo sapiens
aattagaaccctcct

SEQ ID NO: 382863 - DNA, 15 bp, Homo sapiens
taattagaaccctcc

SEQ ID NO: 382864 - DNA, 15 bp, Homo sapiens
ttaattagaaccctc

SEQ ID NO: 382865 - DNA, 15 bp, Homo sapiens
gttaattagaaccct

SEQ ID NO: 382866 - DNA, 15 bp, Homo sapiens
agttaattagaaccc

SEQ ID NO: 382867 - DNA, 15 bp, Homo sapiens
gagttaattagaacc

SEQ ID NO: 382868 - DNA, 15 bp, Homo sapiens
agagttaattagaac

SEQ ID NO: 382869 - DNA, 15 bp, Homo sapiens
tagagttaattagaa

SEQ ID NO: 382870 - DNA, 15 bp, Homo sapiens
ctagagttaattaga

SEQ ID NO: 382871 - DNA, 15 bp, Homo sapiens
cctagagttaattag

SEQ ID NO: 382872 - DNA, 15 bp, Homo sapiens
ccctagagttaatta

SEQ ID NO: 382873 - DNA, 15 bp, Homo sapiens
accctagagttaatt

SEQ ID NO: 382874 - DNA, 15 bp, Homo sapiens
caccctagagttaat

SEQ ID NO: 382875 - DNA, 15 bp, Homo sapiens
ccaccctagagttaa

SEQ ID NO: 382876 - DNA, 15 bp, Homo sapiens
accaccctagagtta

SEQ ID NO: 382877 - DNA, 15 bp, Homo sapiens
taccaccctagagtt

SEQ ID NO: 382878 - DNA, 15 bp, Homo sapiens
ctaccaccctagagt

SEQ ID NO: 382879 - DNA, 15 bp, Homo sapiens
gctaccaccctagag

SEQ ID NO: 382880 - DNA, 15 bp, Homo sapiens
cgctaccaccctaga

SEQ ID NO: 382881 - DNA, 15 bp, Homo sapiens
ccgctaccaccctag

SEQ ID NO: 382882 - DNA, 15 bp, Homo sapiens
gccgctaccacccta

SEQ ID NO: 382883 - DNA, 15 bp, Homo sapiens
cgccgctaccaccct

SEQ ID NO: 382884 - DNA, 15 bp, Homo sapiens
ccgccgctaccaccc

SEQ ID NO: 382885 - DNA, 15 bp, Homo sapiens
tccgccgctaccacc

SEQ ID NO: 382886 - DNA, 15 bp, Homo sapiens
ctccgccgctaccac

SEQ ID NO: 382887 - DNA, 15 bp, Homo sapiens
cctccgccgctacca

SEQ ID NO: 382888 - DNA, 15 bp, Homo sapiens
tcctccgccgctacc

SEQ ID NO: 382889 - DNA, 15 bp, Homo sapiens
ctcctccgccgctac

SEQ ID NO: 382890 - DNA, 15 bp, Homo sapiens
cctcctccgccgcta

SEQ ID NO: 382891 - DNA, 15 bp, Homo sapiens
ccctcctccgccgct

SEQ ID NO: 382892 - DNA, 15 bp, Homo sapiens
cccctcctccgccgc

SEQ ID NO: 382893 - DNA, 15 bp, Homo sapiens
gcccctcctccgccg

SEQ ID NO: 382894 - DNA, 15 bp, Homo sapiens
tgcccctcctccgcc

SEQ ID NO: 382895 - DNA, 15 bp, Homo sapiens
ctgcccctcctccgc

SEQ ID NO: 382896 - DNA, 15 bp, Homo sapiens
cctgcccctcctccg

SEQ ID NO: 382897 - DNA, 15 bp, Homo sapiens
ccctgcccctcctcc

SEQ ID NO: 382898 - DNA, 15 bp, Homo sapiens
tccctgcccctcctc

SEQ ID NO: 382899 - DNA, 15 bp, Homo sapiens
ctccctgcccctcct

SEQ ID NO: 382900 - DNA, 15 bp, Homo sapiens
cctccctgcccctcc

SEQ ID NO: 382901 - DNA, 15 bp, Homo sapiens
ccctccctgcccctc

SEQ ID NO: 382902 - DNA, 15 bp, Homo sapiens
tccctccctgcccct

SEQ ID NO: 382903 - DNA, 15 bp, Homo sapiens
ttccctccctgcccc

SEQ ID NO: 382904 - DNA, 15 bp, Homo sapiens
cttccctccctgccc

SEQ ID NO: 382905 - DNA, 15 bp, Homo sapiens
ccttccctccctgcc

SEQ ID NO: 382906 - DNA, 15 bp, Homo sapiens
accttccctccctgc

SEQ ID NO: 382907 - DNA, 15 bp, Homo sapiens
caccttccctccctg

SEQ ID NO: 382908 - DNA, 15 bp, Homo sapiens
acaccttccctccct

SEQ ID NO: 382909 - DNA, 15 bp, Homo sapiens
aacaccttccctccc

SEQ ID NO: 382910 - DNA, 15 bp, Homo sapiens
aaacaccttccctcc

SEQ ID NO: 382911 - DNA, 15 bp, Homo sapiens
gaaacaccttccctc

SEQ ID NO: 382912 - DNA, 15 bp, Homo sapiens
tgaaacaccttccct

SEQ ID NO: 382913 - DNA, 15 bp, Homo sapiens
gtgaaacaccttccc

SEQ ID NO: 382914 - DNA, 15 bp, Homo sapiens
agtgaaacaccttcc

SEQ ID NO: 382915 - DNA, 15 bp, Homo sapiens
cagtgaaacaccttc

SEQ ID NO: 382916 - DNA, 15 bp, Homo sapiens
ccagtgaaacacctt

SEQ ID NO: 382917 - DNA, 15 bp, Homo sapiens
cccagtgaaacacct

SEQ ID NO: 382918 - DNA, 15 bp, Homo sapiens
ccccagtgaaacacc

SEQ ID NO: 382919 - DNA, 15 bp, Homo sapiens
cccccagtgaaacac

SEQ ID NO: 382920 - DNA, 15 bp, Homo sapiens
gcccccagtgaaaca

SEQ ID NO: 382921 - DNA, 15 bp, Homo sapiens
agcccccagtgaaac

SEQ ID NO: 382922 - DNA, 15 bp, Homo sapiens
cagcccccagtgaaa

SEQ ID NO: 382923 - DNA, 15 bp, Homo sapiens
acagcccccagtgaa

SEQ ID NO: 382924 - DNA, 15 bp, Homo sapiens
gacagcccccagtga

SEQ ID NO: 382925 - DNA, 15 bp, Homo sapiens
tgacagcccccagtg

SEQ ID NO: 382926 - DNA, 15 bp, Homo sapiens
ttgacagcccccagt

SEQ ID NO: 382927 - DNA, 15 bp, Homo sapiens
tttgacagcccccag

SEQ ID NO: 382928 - DNA, 15 bp, Homo sapiens
ctttgacagccccca

SEQ ID NO: 382929 - DNA, 15 bp, Homo sapiens
actttgacagccccc

SEQ ID NO: 382930 - DNA, 15 bp, Homo sapiens
aactttgacagcccc

SEQ ID NO: 382931 - DNA, 15 bp, Homo sapiens
taactttgacagccc

SEQ ID NO: 382932 - DNA, 15 bp, Homo sapiens
ataactttgacagcc

SEQ ID NO: 382933 - DNA, 15 bp, Homo sapiens
aataactttgacagc

SEQ ID NO: 382934 - DNA, 15 bp, Homo sapiens
aaataactttgacag

SEQ ID NO: 382935 - DNA, 15 bp, Homo sapiens
aaaataactttgaca

SEQ ID NO: 382936 - DNA, 15 bp, Homo sapiens
taaaataactttgac

SEQ ID NO: 382937 - DNA, 15 bp, Homo sapiens
ctaaaataactttga

SEQ ID NO: 382938 - DNA, 15 bp, Homo sapiens
actaaaataactttg

SEQ ID NO: 382939 - DNA, 15 bp, Homo sapiens
aactaaaataacttt

SEQ ID NO: 382940 - DNA, 15 bp, Homo sapiens
aaactaaaataactt

SEQ ID NO: 382941 - DNA, 15 bp, Homo sapiens
caaactaaaataact

SEQ ID NO: 382942 - DNA, 15 bp, Homo sapiens
gcaaactaaaataac

SEQ ID NO: 382943 - DNA, 15 bp, Homo sapiens
agcaaactaaaataa

SEQ ID NO: 382944 - DNA, 15 bp, Homo sapiens
gagcaaactaaaata

SEQ ID NO: 382945 - DNA, 15 bp, Homo sapiens
agagcaaactaaaat

SEQ ID NO: 382946 - DNA, 15 bp, Homo sapiens
tagagcaaactaaaa

SEQ ID NO: 382947 - DNA, 15 bp, Homo sapiens
ttagagcaaactaaa

SEQ ID NO: 382948 - DNA, 15 bp, Homo sapiens
tttagagcaaactaa

SEQ ID NO: 382949 - DNA, 15 bp, Homo sapiens
atttagagcaaacta

SEQ ID NO: 382950 - DNA, 15 bp, Homo sapiens
aatttagagcaaact

SEQ ID NO: 382951 - DNA, 15 bp, Homo sapiens
caatttagagcaaac

SEQ ID NO: 382952 - DNA, 15 bp, Homo sapiens
gcaatttagagcaaa

SEQ ID NO: 382953 - DNA, 15 bp, Homo sapiens
cgcaatttagagcaa

SEQ ID NO: 382954 - DNA, 15 bp, Homo sapiens
acgcaatttagagca

SEQ ID NO: 382955 - DNA, 15 bp, Homo sapiens
gacgcaatttagagc

SEQ ID NO: 382956 - DNA, 15 bp, Homo sapiens
cgacgcaatttagag

SEQ ID NO: 382957 - DNA, 15 bp, Homo sapiens
ccgacgcaatttaga

SEQ ID NO: 382958 - DNA, 15 bp, Homo sapiens
gccgacgcaatttag

SEQ ID NO: 382959 - DNA, 15 bp, Homo sapiens
tgccgacgcaattta

SEQ ID NO: 382960 - DNA, 15 bp, Homo sapiens
atgccgacgcaattt

SEQ ID NO: 382961 - DNA, 15 bp, Homo sapiens
catgccgacgcaatt

SEQ ID NO: 382962 - DNA, 15 bp, Homo sapiens
gcatgccgacgcaat

SEQ ID NO: 382963 - DNA, 15 bp, Homo sapiens
ggcatgccgacgcaa

SEQ ID NO: 382964 - DNA, 15 bp, Homo sapiens
gggcatgccgacgca

SEQ ID NO: 382965 - DNA, 15 bp, Homo sapiens
cgggcatgccgacgc

SEQ ID NO: 382966 - DNA, 15 bp, Homo sapiens
ccgggcatgccgacg

SEQ ID NO: 382967 - DNA, 15 bp, Homo sapiens
tccgggcatgccgac

SEQ ID NO: 382968 - DNA, 15 bp, Homo sapiens
ttccgggcatgccga

SEQ ID NO: 382969 - DNA, 15 bp, Homo sapiens
cttccgggcatgccg

SEQ ID NO: 382970 - DNA, 15 bp, Homo sapiens
gcttccgggcatgcc

SEQ ID NO: 382971 - DNA, 15 bp, Homo sapiens
agcttccgggcatgc

SEQ ID NO: 382972 - DNA, 15 bp, Homo sapiens
gagcttccgggcatg

SEQ ID NO: 382973 - DNA, 15 bp, Homo sapiens
agagcttccgggcat

SEQ ID NO: 382974 - DNA, 15 bp, Homo sapiens
aagagcttccgggca

SEQ ID NO: 382975 - DNA, 15 bp, Homo sapiens
aaagagcttccgggc

SEQ ID NO: 382976 - DNA, 15 bp, Homo sapiens
taaagagcttccggg

SEQ ID NO: 382977 - DNA, 15 bp, Homo sapiens
ttaaagagcttccgg

SEQ ID NO: 382978 - DNA, 15 bp, Homo sapiens
attaaagagcttccg

SEQ ID NO: 382979 - DNA, 15 bp, Homo sapiens
tattaaagagcttcc

SEQ ID NO: 382980 - DNA, 15 bp, Homo sapiens
ttattaaagagcttc

SEQ ID NO: 382981 - DNA, 15 bp, Homo sapiens
attattaaagagctt

SEQ ID NO: 382982 - DNA, 15 bp, Homo sapiens
aattattaaagagct

SEQ ID NO: 382983 - DNA, 15 bp, Homo sapiens
caattattaaagagc

SEQ ID NO: 382984 - DNA, 15 bp, Homo sapiens
acaattattaaagag

SEQ ID NO: 382985 - DNA, 15 bp, Homo sapiens
tacaattattaaaga

SEQ ID NO: 382986 - DNA, 15 bp, Homo sapiens
ctacaattattaaag

SEQ ID NO: 382987 - DNA, 15 bp, Homo sapiens
gctacaattattaaa

SEQ ID NO: 382988 - DNA, 15 bp, Homo sapiens
agctacaattattaa

SEQ ID NO: 382989 - DNA, 15 bp, Homo sapiens
tagctacaattatta

SEQ ID NO: 382990 - DNA, 15 bp, Homo sapiens
gtagctacaattatt

SEQ ID NO: 382991 - DNA, 15 bp, Homo sapiens
ggtagctacaattat

SEQ ID NO: 382992 - DNA, 15 bp, Homo sapiens
tggtagctacaatta

SEQ ID NO: 382993 - DNA, 15 bp, Homo sapiens
atggtagctacaatt

SEQ ID NO: 382994 - DNA, 15 bp, Homo sapiens
aatggtagctacaat

SEQ ID NO: 382995 - DNA, 15 bp, Homo sapiens
aaatggtagctacaa

SEQ ID NO: 382996 - DNA, 15 bp, Homo sapiens
taaatggtagctaca

SEQ ID NO: 382997 - DNA, 15 bp, Homo sapiens
gtaaatggtagctac

SEQ ID NO: 382998 - DNA, 15 bp, Homo sapiens
agtaaatggtagcta

SEQ ID NO: 382999 - DNA, 15 bp, Homo sapiens
cagtaaatggtagct

SEQ ID NO: 383000 - DNA, 15 bp, Homo sapiens
tcagtaaatggtagc

SEQ ID NO: 383001 - DNA, 15 bp, Homo sapiens
ttcagtaaatggtag

SEQ ID NO: 383002 - DNA, 15 bp, Homo sapiens
attcagtaaatggta

SEQ ID NO: 383003 - DNA, 15 bp, Homo sapiens
cattcagtaaatggt

SEQ ID NO: 383004 - DNA, 15 bp, Homo sapiens
gcattcagtaaatgg

SEQ ID NO: 383005 - DNA, 15 bp, Homo sapiens
agcattcagtaaatg

SEQ ID NO: 383006 - DNA, 15 bp, Homo sapiens
aagcattcagtaaat

SEQ ID NO: 383007 - DNA, 15 bp, Homo sapiens
gaagcattcagtaaa

SEQ ID NO: 383008 - DNA, 15 bp, Homo sapiens
tgaagcattcagtaa

SEQ ID NO: 383009 - DNA, 15 bp, Homo sapiens
gtgaagcattcagta

SEQ ID NO: 383010 - DNA, 15 bp, Homo sapiens
agtgaagcattcagt

SEQ ID NO: 383011 - DNA, 15 bp, Homo sapiens
tagtgaagcattcag

SEQ ID NO: 383012 - DNA, 15 bp, Homo sapiens
ctagtgaagcattca

SEQ ID NO: 383013 - DNA, 15 bp, Homo sapiens
cctagtgaagcattc

SEQ ID NO: 383014 - DNA, 15 bp, Homo sapiens
acctagtgaagcatt

SEQ ID NO: 383015 - DNA, 15 bp, Homo sapiens
cacctagtgaagcat

SEQ ID NO: 383016 - DNA, 15 bp, Homo sapiens
gcacctagtgaagca

SEQ ID NO: 383017 - DNA, 15 bp, Homo sapiens
ggcacctagtgaagc

SEQ ID NO: 383018 - DNA, 15 bp, Homo sapiens
tggcacctagtgaag

SEQ ID NO: 383019 - DNA, 15 bp, Homo sapiens
ctggcacctagtgaa

SEQ ID NO: 383020 - DNA, 15 bp, Homo sapiens
cctggcacctagtga

SEQ ID NO: 383021 - DNA, 15 bp, Homo sapiens
gcctggcacctagtg

SEQ ID NO: 383022 - DNA, 15 bp, Homo sapiens
tgcctggcacctagt

SEQ ID NO: 383023 - DNA, 15 bp, Homo sapiens
atgcctggcacctag

SEQ ID NO: 383024 - DNA, 15 bp, Homo sapiens
tatgcctggcaccta

SEQ ID NO: 383025 - DNA, 15 bp, Homo sapiens
ttatgcctggcacct

SEQ ID NO: 383026 - DNA, 15 bp, Homo sapiens
attatgcctggcacc

SEQ ID NO: 383027 - DNA, 15 bp, Homo sapiens
cattatgcctggcac

SEQ ID NO: 383028 - DNA, 15 bp, Homo sapiens
acattatgcctggca

SEQ ID NO: 383029 - DNA, 15 bp, Homo sapiens
aacattatgcctggc

SEQ ID NO: 383030 - DNA, 15 bp, Homo sapiens
gaacattatgcctgg

SEQ ID NO: 383031 - DNA, 15 bp, Homo sapiens
tgaacattatgcctg

SEQ ID NO: 383032 - DNA, 15 bp, Homo sapiens
ctgaacattatgcct

SEQ ID NO: 383033 - DNA, 15 bp, Homo sapiens
cctgaacattatgcc

SEQ ID NO: 383034 - DNA, 15 bp, Homo sapiens
gcctgaacattatgc

SEQ ID NO: 383035 - DNA, 15 bp, Homo sapiens
cgcctgaacattatg

SEQ ID NO: 383036 - DNA, 15 bp, Homo sapiens
acgcctgaacattat

SEQ ID NO: 383037 - DNA, 15 bp, Homo sapiens
aacgcctgaacatta

SEQ ID NO: 383038 - DNA, 15 bp, Homo sapiens
aaacgcctgaacatt

SEQ ID NO: 383039 - DNA, 15 bp, Homo sapiens
caaacgcctgaacat

SEQ ID NO: 383040 - DNA, 15 bp, Homo sapiens
tcaaacgcctgaaca

SEQ ID NO: 383041 - DNA, 15 bp, Homo sapiens
ctcaaacgcctgaac

SEQ ID NO: 383042 - DNA, 15 bp, Homo sapiens
cctcaaacgcctgaa

SEQ ID NO: 383043 - DNA, 15 bp, Homo sapiens
ccctcaaacgcctga

SEQ ID NO: 383044 - DNA, 15 bp, Homo sapiens
tccctcaaacgcctg

SEQ ID NO: 383045 - DNA, 15 bp, Homo sapiens
ttccctcaaacgcct

SEQ ID NO: 383046 - DNA, 15 bp, Homo sapiens
attccctcaaacgcc

SEQ ID NO: 383047 - DNA, 15 bp, Homo sapiens
aattccctcaaacgc

SEQ ID NO: 383048 - DNA, 15 bp, Homo sapiens
gaattccctcaaacg

SEQ ID NO: 383049 - DNA, 15 bp, Homo sapiens
agaattccctcaaac

SEQ ID NO: 383050 - DNA, 15 bp, Homo sapiens
gagaattccctcaaa

SEQ ID NO: 383051 - DNA, 15 bp, Homo sapiens
tgagaattccctcaa

SEQ ID NO: 383052 - DNA, 15 bp, Homo sapiens
atgagaattccctca

SEQ ID NO: 383053 - DNA, 15 bp, Homo sapiens
aatgagaattccctc

SEQ ID NO: 383054 - DNA, 15 bp, Homo sapiens
aaatgagaattccct

SEQ ID NO: 383055 - DNA, 15 bp, Homo sapiens
gaaatgagaattccc

SEQ ID NO: 383056 - DNA, 15 bp, Homo sapiens
tgaaatgagaattcc

SEQ ID NO: 383057 - DNA, 15 bp, Homo sapiens
atgaaatgagaattc

SEQ ID NO: 383058 - DNA, 15 bp, Homo sapiens
gatgaaatgagaatt

SEQ ID NO: 383059 - DNA, 15 bp, Homo sapiens
agatgaaatgagaat

SEQ ID NO: 383060 - DNA, 15 bp, Homo sapiens
aagatgaaatgagaa

SEQ ID NO: 383061 - DNA, 15 bp, Homo sapiens
gaagatgaaatgaga

SEQ ID NO: 383062 - DNA, 15 bp, Homo sapiens
tgaagatgaaatgag

SEQ ID NO: 383063 - DNA, 15 bp, Homo sapiens
atgaagatgaaatga

SEQ ID NO: 383064 - DNA, 15 bp, Homo sapiens
aatgaagatgaaatg

SEQ ID NO: 383065 - DNA, 15 bp, Homo sapiens
taatgaagatgaaat

SEQ ID NO: 383066 - DNA, 15 bp, Homo sapiens
ctaatgaagatgaaa

SEQ ID NO: 383067 - DNA, 15 bp, Homo sapiens
cctaatgaagatgaa

SEQ ID NO: 383068 - DNA, 15 bp, Homo sapiens
tcctaatgaagatga

SEQ ID NO: 383069 - DNA, 15 bp, Homo sapiens
gtcctaatgaagatg

SEQ ID NO: 383070 - DNA, 15 bp, Homo sapiens
tgtcctaatgaagat

SEQ ID NO: 383071 - DNA, 15 bp, Homo sapiens
gtgtcctaatgaaga

SEQ ID NO: 383072 - DNA, 15 bp, Homo sapiens
cgtgtcctaatgaag

SEQ ID NO: 383073 - DNA, 15 bp, Homo sapiens
gcgtgtcctaatgaa

SEQ ID NO: 383074 - DNA, 15 bp, Homo sapiens
agcgtgtcctaatga

SEQ ID NO: 383075 - DNA, 15 bp, Homo sapiens
cagcgtgtcctaatg

SEQ ID NO: 383076 - DNA, 15 bp, Homo sapiens
gcagcgtgtcctaat

SEQ ID NO: 383077 - DNA, 15 bp, Homo sapiens
tgcagcgtgtcctaa

SEQ ID NO: 383078 - DNA, 15 bp, Homo sapiens
ttgcagcgtgtccta

SEQ ID NO: 383079 - DNA, 15 bp, Homo sapiens
tttgcagcgtgtcct

SEQ ID NO: 383080 - DNA, 15 bp, Homo sapiens
ttttgcagcgtgtcc

SEQ ID NO: 383081 - DNA, 15 bp, Homo sapiens
tttttgcagcgtgtc

SEQ ID NO: 383082 - DNA, 15 bp, Homo sapiens
atttttgcagcgtgt

SEQ ID NO: 383083 - DNA, 15 bp, Homo sapiens
catttttgcagcgtg

SEQ ID NO: 383084 - DNA, 15 bp, Homo sapiens
ccatttttgcagcgt

SEQ ID NO: 383085 - DNA, 15 bp, Homo sapiens
tccatttttgcagcg

SEQ ID NO: 383086 - DNA, 15 bp, Homo sapiens
ctccatttttgcagc

SEQ ID NO: 383087 - DNA, 15 bp, Homo sapiens
cctccatttttgcag

SEQ ID NO: 383088 - DNA, 15 bp, Homo sapiens
gcctccatttttgca

SEQ ID NO: 383089 - DNA, 15 bp, Homo sapiens
agcctccatttttgc

SEQ ID NO: 383090 - DNA, 15 bp, Homo sapiens
aagcctccatttttg

SEQ ID NO: 383091 - DNA, 15 bp, Homo sapiens
aaagcctccattttt

SEQ ID NO: 383092 - DNA, 15 bp, Homo sapiens
caaagcctccatttt

SEQ ID NO: 383093 - DNA, 15 bp, Homo sapiens
tcaaagcctccattt

SEQ ID NO: 383094 - DNA, 15 bp, Homo sapiens
ctcaaagcctccatt

SEQ ID NO: 383095 - DNA, 15 bp, Homo sapiens
tctcaaagcctccat

SEQ ID NO: 383096 - DNA, 15 bp, Homo sapiens
ctctcaaagcctcca

SEQ ID NO: 383097 - DNA, 15 bp, Homo sapiens
cctctcaaagcctcc

SEQ ID NO: 383098 - DNA, 15 bp, Homo sapiens
acctctcaaagcctc

SEQ ID NO: 383099 - DNA, 15 bp, Homo sapiens
cacctctcaaagcct

SEQ ID NO: 383100 - DNA, 15 bp, Homo sapiens
tcacctctcaaagcc

SEQ ID NO: 383101 - DNA, 15 bp, Homo sapiens
ttcacctctcaaagc

SEQ ID NO: 383102 - DNA, 15 bp, Homo sapiens
tttcacctctcaaag

SEQ ID NO: 383103 - DNA, 15 bp, Homo sapiens
atttcacctctcaaa

SEQ ID NO: 383104 - DNA, 15 bp, Homo sapiens
catttcacctctcaa

SEQ ID NO: 383105 - DNA, 15 bp, Homo sapiens
tcatttcacctctca

SEQ ID NO: 383106 - DNA, 15 bp, Homo sapiens
gtcatttcacctctc

SEQ ID NO: 383107 - DNA, 15 bp, Homo sapiens
agtcatttcacctct

SEQ ID NO: 383108 - DNA, 15 bp, Homo sapiens
cagtcatttcacctc

SEQ ID NO: 383109 - DNA, 15 bp, Homo sapiens
ccagtcatttcacct

SEQ ID NO: 383110 - DNA, 15 bp, Homo sapiens
gccagtcatttcacc

SEQ ID NO: 383111 - DNA, 15 bp, Homo sapiens
agccagtcatttcac

SEQ ID NO: 383112 - DNA, 15 bp, Homo sapiens
gagccagtcatttca

SEQ ID NO: 383113 - DNA, 15 bp, Homo sapiens
tgagccagtcatttc

SEQ ID NO: 383114 - DNA, 15 bp, Homo sapiens
ttgagccagtcattt

SEQ ID NO: 383115 - DNA, 15 bp, Homo sapiens
cttgagccagtcatt

SEQ ID NO: 383116 - DNA, 15 bp, Homo sapiens
ccttgagccagtcat

SEQ ID NO: 383117 - DNA, 15 bp, Homo sapiens
accttgagccagtca

SEQ ID NO: 383118 - DNA, 15 bp, Homo sapiens
gaccttgagccagtc

SEQ ID NO: 383119 - DNA, 15 bp, Homo sapiens
tgaccttgagccagt

SEQ ID NO: 383120 - DNA, 15 bp, Homo sapiens
gtgaccttgagccag

SEQ ID NO: 383121 - DNA, 15 bp, Homo sapiens
tgtgaccttgagcca

SEQ ID NO: 383122 - DNA, 15 bp, Homo sapiens
gtgtgaccttgagcc

SEQ ID NO: 383123 - DNA, 15 bp, Homo sapiens
tgtgtgaccttgagc

SEQ ID NO: 383124 - DNA, 15 bp, Homo sapiens
ctgtgtgaccttgag

SEQ ID NO: 383125 - DNA, 15 bp, Homo sapiens
actgtgtgaccttga

SEQ ID NO: 383126 - DNA, 15 bp, Homo sapiens
cactgtgtgaccttg

SEQ ID NO: 383127 - DNA, 15 bp, Homo sapiens
tcactgtgtgacctt

SEQ ID NO: 383128 - DNA, 15 bp, Homo sapiens
ctcactgtgtgacct

SEQ ID NO: 383129 - DNA, 15 bp, Homo sapiens
tctcactgtgtgacc

SEQ ID NO: 383130 - DNA, 15 bp, Homo sapiens
atctcactgtgtgac

SEQ ID NO: 383131 - DNA, 15 bp, Homo sapiens
tatctcactgtgtga

SEQ ID NO: 383132 - DNA, 15 bp, Homo sapiens
ctatctcactgtgtg

SEQ ID NO: 383133 - DNA, 15 bp, Homo sapiens
actatctcactgtgt

SEQ ID NO: 383134 - DNA, 15 bp, Homo sapiens
tactatctcactgtg

SEQ ID NO: 383135 - DNA, 15 bp, Homo sapiens
ttactatctcactgt

SEQ ID NO: 383136 - DNA, 15 bp, Homo sapiens
cttactatctcactg

SEQ ID NO: 383137 - DNA, 15 bp, Homo sapiens
acttactatctcact

SEQ ID NO: 383138 - DNA, 15 bp, Homo sapiens
cacttactatctcac

SEQ ID NO: 383139 - DNA, 15 bp, Homo sapiens
ccacttactatctca

SEQ ID NO: 383140 - DNA, 15 bp, Homo sapiens
accacttactatctc

SEQ ID NO: 383141 - DNA, 15 bp, Homo sapiens
aaccacttactatct

SEQ ID NO: 383142 - DNA, 15 bp, Homo sapiens
taaccacttactatc

SEQ ID NO: 383143 - DNA, 15 bp, Homo sapiens
ctaaccacttactat

SEQ ID NO: 383144 - DNA, 15 bp, Homo sapiens
cctaaccacttacta

SEQ ID NO: 383145 - DNA, 15 bp, Homo sapiens
ccctaaccacttact

SEQ ID NO: 383146 - DNA, 15 bp, Homo sapiens
tccctaaccacttac

SEQ ID NO: 383147 - DNA, 15 bp, Homo sapiens
ctccctaaccactta

SEQ ID NO: 383148 - DNA, 15 bp, Homo sapiens
tctccctaaccactt

SEQ ID NO: 383149 - DNA, 15 bp, Homo sapiens
atctccctaaccact

SEQ ID NO: 383150 - DNA, 15 bp, Homo sapiens
gatctccctaaccac

SEQ ID NO: 383151 - DNA, 15 bp, Homo sapiens
tgatctccctaacca

SEQ ID NO: 383152 - DNA, 15 bp, Homo sapiens
ctgatctccctaacc

SEQ ID NO: 383153 - DNA, 15 bp, Homo sapiens
cctgatctccctaac

SEQ ID NO: 383154 - DNA, 15 bp, Homo sapiens
tcctgatctccctaa

SEQ ID NO: 383155 - DNA, 15 bp, Homo sapiens
atcctgatctcccta

SEQ ID NO: 383156 - DNA, 15 bp, Homo sapiens
gatcctgatctccct

SEQ ID NO: 383157 - DNA, 15 bp, Homo sapiens
agatcctgatctccc

SEQ ID NO: 383158 - DNA, 15 bp, Homo sapiens
cagatcctgatctcc

SEQ ID NO: 383159 - DNA, 15 bp, Homo sapiens
tcagatcctgatctc

SEQ ID NO: 383160 - DNA, 15 bp, Homo sapiens
gtcagatcctgatct

SEQ ID NO: 383161 - DNA, 15 bp, Homo sapiens
agtcagatcctgatc

SEQ ID NO: 383162 - DNA, 15 bp, Homo sapiens
gagtcagatcctgat

SEQ ID NO: 383163 - DNA, 15 bp, Homo sapiens
ggagtcagatcctga

SEQ ID NO: 383164 - DNA, 15 bp, Homo sapiens
cggagtcagatcctg

SEQ ID NO: 383165 - DNA, 15 bp, Homo sapiens
ccggagtcagatcct

SEQ ID NO: 383166 - DNA, 15 bp, Homo sapiens
cccggagtcagatcc

SEQ ID NO: 383167 - DNA, 15 bp, Homo sapiens
gcccggagtcagatc

SEQ ID NO: 383168 - DNA, 15 bp, Homo sapiens
agcccggagtcagat

SEQ ID NO: 383169 - DNA, 15 bp, Homo sapiens
cagcccggagtcaga

SEQ ID NO: 383170 - DNA, 15 bp, Homo sapiens
tcagcccggagtcag

SEQ ID NO: 383171 - DNA, 15 bp, Homo sapiens
ctcagcccggagtca

SEQ ID NO: 383172 - DNA, 15 bp, Homo sapiens
actcagcccggagtc

SEQ ID NO: 383173 - DNA, 15 bp, Homo sapiens
cactcagcccggagt

SEQ ID NO: 383174 - DNA, 15 bp, Homo sapiens
ccactcagcccggag

SEQ ID NO: 383175 - DNA, 15 bp, Homo sapiens
accactcagcccgga

SEQ ID NO: 383176 - DNA, 15 bp, Homo sapiens
aaccactcagcccgg

SEQ ID NO: 383177 - DNA, 15 bp, Homo sapiens
gaaccactcagcccg

SEQ ID NO: 383178 - DNA, 15 bp, Homo sapiens
agaaccactcagccc

SEQ ID NO: 383179 - DNA, 15 bp, Homo sapiens
aagaaccactcagcc

SEQ ID NO: 383180 - DNA, 15 bp, Homo sapiens
gaagaaccactcagc

SEQ ID NO: 383181 - DNA, 15 bp, Homo sapiens
ggaagaaccactcag

SEQ ID NO: 383182 - DNA, 15 bp, Homo sapiens
aggaagaaccactca

SEQ ID NO: 383183 - DNA, 15 bp, Homo sapiens
caggaagaaccactc

SEQ ID NO: 383184 - DNA, 15 bp, Homo sapiens
gcaggaagaaccact

SEQ ID NO: 383185 - DNA, 15 bp, Homo sapiens
agcaggaagaaccac

SEQ ID NO: 383186 - DNA, 15 bp, Homo sapiens
aagcaggaagaacca

SEQ ID NO: 383187 - DNA, 15 bp, Homo sapiens
caagcaggaagaacc

SEQ ID NO: 383188 - DNA, 15 bp, Homo sapiens
ccaagcaggaagaac

SEQ ID NO: 383189 - DNA, 15 bp, Homo sapiens
accaagcaggaagaa

SEQ ID NO: 383190 - DNA, 15 bp, Homo sapiens
gaccaagcaggaaga

SEQ ID NO: 383191 - DNA, 15 bp, Homo sapiens
ggaccaagcaggaag

SEQ ID NO: 383192 - DNA, 15 bp, Homo sapiens
tggaccaagcaggaa

SEQ ID NO: 383193 - DNA, 15 bp, Homo sapiens
gtggaccaagcagga

SEQ ID NO: 383194 - DNA, 15 bp, Homo sapiens
cgtggaccaagcagg

SEQ ID NO: 383195 - DNA, 15 bp, Homo sapiens
gcgtggaccaagcag

SEQ ID NO: 383196 - DNA, 15 bp, Homo sapiens
ggcgtggaccaagca

SEQ ID NO: 383197 - DNA, 15 bp, Homo sapiens
gggcgtggaccaagc

SEQ ID NO: 383198 - DNA, 15 bp, Homo sapiens
agggcgtggaccaag

SEQ ID NO: 383199 - DNA, 15 bp, Homo sapiens
cagggcgtggaccaa

SEQ ID NO: 383200 - DNA, 15 bp, Homo sapiens
acagggcgtggacca

SEQ ID NO: 383201 - DNA, 15 bp, Homo sapiens
aacagggcgtggacc

SEQ ID NO: 383202 - DNA, 15 bp, Homo sapiens
caacagggcgtggac

SEQ ID NO: 383203 - DNA, 15 bp, Homo sapiens
tcaacagggcgtgga

SEQ ID NO: 383204 - DNA, 15 bp, Homo sapiens
ctcaacagggcgtgg

SEQ ID NO: 383205 - DNA, 15 bp, Homo sapiens
tctcaacagggcgtg

SEQ ID NO: 383206 - DNA, 15 bp, Homo sapiens
atctcaacagggcgt

SEQ ID NO: 383207 - DNA, 15 bp, Homo sapiens
catctcaacagggcg

SEQ ID NO: 383208 - DNA, 15 bp, Homo sapiens
acatctcaacagggc

SEQ ID NO: 383209 - DNA, 15 bp, Homo sapiens
aacatctcaacaggg

SEQ ID NO: 383210 - DNA, 15 bp, Homo sapiens
aaacatctcaacagg

SEQ ID NO: 383211 - DNA, 15 bp, Homo sapiens
taaacatctcaacag

SEQ ID NO: 383212 - DNA, 15 bp, Homo sapiens
ataaacatctcaaca

SEQ ID NO: 383213 - DNA, 15 bp, Homo sapiens
aataaacatctcaac

SEQ ID NO: 383214 - DNA, 15 bp, Homo sapiens
aaataaacatctcaa

SEQ ID NO: 383215 - DNA, 15 bp, Homo sapiens
caaataaacatctca

SEQ ID NO: 383216 - DNA, 15 bp, Homo sapiens
ccaaataaacatctc

SEQ ID NO: 383217 - DNA, 15 bp, Homo sapiens
accaaataaacatct

SEQ ID NO: 383218 - DNA, 15 bp, Homo sapiens
aagatatatatgtgt

SEQ ID NO: 383219 - DNA, 15 bp, Homo sapiens
gaagatatatatgtg

SEQ ID NO: 383220 - DNA, 15 bp, Homo sapiens
ggaagatatatatgt

SEQ ID NO: 383221 - DNA, 15 bp, Homo sapiens
gggaagatatatatg

SEQ ID NO: 383222 - DNA, 15 bp, Homo sapiens
agggaagatatatat

SEQ ID NO: 383223 - DNA, 15 bp, Homo sapiens
aagggaagatatata

SEQ ID NO: 383224 - DNA, 15 bp, Homo sapiens
caagggaagatatat

SEQ ID NO: 383225 - DNA, 15 bp, Homo sapiens
acaagggaagatata

SEQ ID NO: 383226 - DNA, 15 bp, Homo sapiens
aacaagggaagatat

SEQ ID NO: 383227 - DNA, 15 bp, Homo sapiens
taacaagggaagata

SEQ ID NO: 383228 - DNA, 15 bp, Homo sapiens
ttaacaagggaagat

SEQ ID NO: 383229 - DNA, 15 bp, Homo sapiens
attaacaagggaaga

SEQ ID NO: 383230 - DNA, 15 bp, Homo sapiens
gattaacaagggaag

SEQ ID NO: 383231 - DNA, 15 bp, Homo sapiens
agattaacaagggaa

SEQ ID NO: 383232 - DNA, 15 bp, Homo sapiens
gagattaacaaggga

SEQ ID NO: 383233 - DNA, 15 bp, Homo sapiens
ggagattaacaaggg

SEQ ID NO: 383234 - DNA, 15 bp, Homo sapiens
tggagattaacaagg

SEQ ID NO: 383235 - DNA, 15 bp, Homo sapiens
atggagattaacaag

SEQ ID NO: 383236 - DNA, 15 bp, Homo sapiens
tatggagattaacaa

SEQ ID NO: 383237 - DNA, 15 bp, Homo sapiens
gtatggagattaaca

SEQ ID NO: 383238 - DNA, 15 bp, Homo sapiens
agtatggagattaac

SEQ ID NO: 383239 - DNA, 15 bp, Homo sapiens
gagtatggagattaa

SEQ ID NO: 383240 - DNA, 15 bp, Homo sapiens
agagtatggagatta

SEQ ID NO: 383241 - DNA, 15 bp, Homo sapiens
cagagtatggagatt

SEQ ID NO: 383242 - DNA, 15 bp, Homo sapiens
ccagagtatggagat

SEQ ID NO: 383243 - DNA, 15 bp, Homo sapiens
cccagagtatggaga

SEQ ID NO: 383244 - DNA, 15 bp, Homo sapiens
tcccagagtatggag

SEQ ID NO: 383245 - DNA, 15 bp, Homo sapiens
ctcccagagtatgga

SEQ ID NO: 383246 - DNA, 15 bp, Homo sapiens
actcccagagtatgg

SEQ ID NO: 383247 - DNA, 15 bp, Homo sapiens
cactcccagagtatg

SEQ ID NO: 383248 - DNA, 15 bp, Homo sapiens
gcactcccagagtat

SEQ ID NO: 383249 - DNA, 15 bp, Homo sapiens
tgcactcccagagta

SEQ ID NO: 383250 - DNA, 15 bp, Homo sapiens
ttgcactcccagagt

SEQ ID NO: 383251 - DNA, 15 bp, Homo sapiens
cttgcactcccagag

SEQ ID NO: 383252 - DNA, 15 bp, Homo sapiens
acttgcactcccaga

SEQ ID NO: 383253 - DNA, 15 bp, Homo sapiens
gacttgcactcccag

SEQ ID NO: 383254 - DNA, 15 bp, Homo sapiens
agacttgcactccca

SEQ ID NO: 383255 - DNA, 15 bp, Homo sapiens
cagacttgcactccc

SEQ ID NO: 383256 - DNA, 15 bp, Homo sapiens
ccagacttgcactcc

SEQ ID NO: 383257 - DNA, 15 bp, Homo sapiens
tccagacttgcactc

SEQ ID NO: 383258 - DNA, 15 bp, Homo sapiens
ttccagacttgcact

SEQ ID NO: 383259 - DNA, 15 bp, Homo sapiens
tttccagacttgcac

SEQ ID NO: 383260 - DNA, 15 bp, Homo sapiens
atttccagacttgca

SEQ ID NO: 383261 - DNA, 15 bp, Homo sapiens
catttccagacttgc

SEQ ID NO: 383262 - DNA, 15 bp, Homo sapiens
gcatttccagacttg

SEQ ID NO: 383263 - DNA, 15 bp, Homo sapiens
tgcatttccagactt

SEQ ID NO: 383264 - DNA, 15 bp, Homo sapiens
atgcatttccagact

SEQ ID NO: 383265 - DNA, 15 bp, Homo sapiens
aatgcatttccagac

SEQ ID NO: 383266 - DNA, 15 bp, Homo sapiens
aaatgcatttccaga

SEQ ID NO: 383267 - DNA, 15 bp, Homo sapiens
aaaatgcatttccag

SEQ ID NO: 383268 - DNA, 15 bp, Homo sapiens
gaaaatgcatttcca

SEQ ID NO: 383269 - DNA, 15 bp, Homo sapiens
ggaaaatgcatttcc

SEQ ID NO: 383270 - DNA, 15 bp, Homo sapiens
aggaaaatgcatttc

SEQ ID NO: 383271 - DNA, 15 bp, Homo sapiens
gaggaaaatgcattt

SEQ ID NO: 383272 - DNA, 15 bp, Homo sapiens
tgaggaaaatgcatt

SEQ ID NO: 383273 - DNA, 15 bp, Homo sapiens
ctgaggaaaatgcat

SEQ ID NO: 383274 - DNA, 15 bp, Homo sapiens
cctgaggaaaatgca

SEQ ID NO: 383275 - DNA, 15 bp, Homo sapiens
acctgaggaaaatgc

SEQ ID NO: 383276 - DNA, 15 bp, Homo sapiens
cacctgaggaaaatg

SEQ ID NO: 383277 - DNA, 15 bp, Homo sapiens
acacctgaggaaaat

SEQ ID NO: 383278 - DNA, 15 bp, Homo sapiens
aacacctgaggaaaa

SEQ ID NO: 383279 - DNA, 15 bp, Homo sapiens
aaacacctgaggaaa

SEQ ID NO: 383280 - DNA, 15 bp, Homo sapiens
taaacacctgaggaa

SEQ ID NO: 383281 - DNA, 15 bp, Homo sapiens
ctaaacacctgagga

SEQ ID NO: 383282 - DNA, 15 bp, Homo sapiens
gctaaacacctgagg

SEQ ID NO: 383283 - DNA, 15 bp, Homo sapiens
agctaaacacctgag

SEQ ID NO: 383284 - DNA, 15 bp, Homo sapiens
cagctaaacacctga

SEQ ID NO: 383285 - DNA, 15 bp, Homo sapiens
gcagctaaacacctg

SEQ ID NO: 383286 - DNA, 15 bp, Homo sapiens
tgcagctaaacacct

SEQ ID NO: 383287 - DNA, 15 bp, Homo sapiens
atgcagctaaacacc

SEQ ID NO: 383288 - DNA, 15 bp, Homo sapiens
aatgcagctaaacac

SEQ ID NO: 383289 - DNA, 15 bp, Homo sapiens
taatgcagctaaaca

SEQ ID NO: 383290 - DNA, 15 bp, Homo sapiens
ttaatgcagctaaac

SEQ ID NO: 383291 - DNA, 15 bp, Homo sapiens
tttaatgcagctaaa

SEQ ID NO: 383292 - DNA, 15 bp, Homo sapiens
ttttaatgcagctaa

SEQ ID NO: 383293 - DNA, 15 bp, Homo sapiens
gttttaatgcagcta

SEQ ID NO: 383294 - DNA, 15 bp, Homo sapiens
cgttttaatgcagct

SEQ ID NO: 383295 - DNA, 15 bp, Homo sapiens
gcgttttaatgcagc

SEQ ID NO: 383296 - DNA, 15 bp, Homo sapiens
agcgttttaatgcag

SEQ ID NO: 383297 - DNA, 15 bp, Homo sapiens
aagcgttttaatgca

SEQ ID NO: 383298 - DNA, 15 bp, Homo sapiens
aaagcgttttaatgc

SEQ ID NO: 383299 - DNA, 15 bp, Homo sapiens
aaaagcgttttaatg

SEQ ID NO: 383300 - DNA, 15 bp, Homo sapiens
aaaaagcgttttaat

SEQ ID NO: 383301 - DNA, 15 bp, Homo sapiens
taaaaagcgttttaa

SEQ ID NO: 383302 - DNA, 15 bp, Homo sapiens
ttaaaaagcgtttta

SEQ ID NO: 383303 - DNA, 15 bp, Homo sapiens
tttaaaaagcgtttt

SEQ ID NO: 383304 - DNA, 15 bp, Homo sapiens
ttttaaaaagcgttt

SEQ ID NO: 383305 - DNA, 15 bp, Homo sapiens
gttttaaaaagcgtt

SEQ ID NO: 383306 - DNA, 15 bp, Homo sapiens
cgttttaaaaagcgt

SEQ ID NO: 383307 - DNA, 15 bp, Homo sapiens
gcgttttaaaaagcg

SEQ ID NO: 383308 - DNA, 15 bp, Homo sapiens
agcgttttaaaaagc

SEQ ID NO: 383309 - DNA, 15 bp, Homo sapiens
aagcgttttaaaaag

SEQ ID NO: 383310 - DNA, 15 bp, Homo sapiens
caagcgttttaaaaa

SEQ ID NO: 383311 - DNA, 15 bp, Homo sapiens
tcaagcgttttaaaa

SEQ ID NO: 383312 - DNA, 15 bp, Homo sapiens
ctcaagcgttttaaa

SEQ ID NO: 383313 - DNA, 15 bp, Homo sapiens
tctcaagcgttttaa

SEQ ID NO: 383314 - DNA, 15 bp, Homo sapiens
atctcaagcgtttta

SEQ ID NO: 383315 - DNA, 15 bp, Homo sapiens
tatctcaagcgtttt

SEQ ID NO: 383316 - DNA, 15 bp, Homo sapiens
ttatctcaagcgttt

SEQ ID NO: 383317 - DNA, 15 bp, Homo sapiens
attatctcaagcgtt

SEQ ID NO: 383318 - DNA, 15 bp, Homo sapiens
cattatctcaagcgt

SEQ ID NO: 383319 - DNA, 15 bp, Homo sapiens
acattatctcaagcg

SEQ ID NO: 383320 - DNA, 15 bp, Homo sapiens
tacattatctcaagc

SEQ ID NO: 383321 - DNA, 15 bp, Homo sapiens
gtacattatctcaag

SEQ ID NO: 383322 - DNA, 15 bp, Homo sapiens
agtacattatctcaa

SEQ ID NO: 383323 - DNA, 15 bp, Homo sapiens
gagtacattatctca

SEQ ID NO: 383324 - DNA, 15 bp, Homo sapiens
tgagtacattatctc

SEQ ID NO: 383325 - DNA, 15 bp, Homo sapiens
atgagtacattatct

SEQ ID NO: 383326 - DNA, 15 bp, Homo sapiens
aatgagtacattatc

SEQ ID NO: 383327 - DNA, 15 bp, Homo sapiens
aaatgagtacattat

SEQ ID NO: 383328 - DNA, 15 bp, Homo sapiens
aaaatgagtacatta

SEQ ID NO: 383329 - DNA, 15 bp, Homo sapiens
caaaatgagtacatt

SEQ ID NO: 383330 - DNA, 15 bp, Homo sapiens
acaaaatgagtacat

SEQ ID NO: 383331 - DNA, 15 bp, Homo sapiens
aacaaaatgagtaca

SEQ ID NO: 383332 - DNA, 15 bp, Homo sapiens
taacaaaatgagtac

SEQ ID NO: 383333 - DNA, 15 bp, Homo sapiens
ctaacaaaatgagta

SEQ ID NO: 383334 - DNA, 15 bp, Homo sapiens
cctaacaaaatgagt

SEQ ID NO: 383335 - DNA, 15 bp, Homo sapiens
tcctaacaaaatgag

SEQ ID NO: 383336 - DNA, 15 bp, Homo sapiens
ttcctaacaaaatga

SEQ ID NO: 383337 - DNA, 15 bp, Homo sapiens
tttcctaacaaaatg

SEQ ID NO: 383338 - DNA, 15 bp, Homo sapiens
gtttcctaacaaaat

SEQ ID NO: 383339 - DNA, 15 bp, Homo sapiens
agtttcctaacaaaa

SEQ ID NO: 383340 - DNA, 15 bp, Homo sapiens
aagtttcctaacaaa

SEQ ID NO: 383341 - DNA, 15 bp, Homo sapiens
caagtttcctaacaa

SEQ ID NO: 383342 - DNA, 15 bp, Homo sapiens
acaagtttcctaaca

SEQ ID NO: 383343 - DNA, 15 bp, Homo sapiens
tacaagtttcctaac

SEQ ID NO: 383344 - DNA, 15 bp, Homo sapiens
gtacaagtttcctaa

SEQ ID NO: 383345 - DNA, 15 bp, Homo sapiens
ggtacaagtttccta

SEQ ID NO: 383346 - DNA, 15 bp, Homo sapiens
aggtacaagtttcct

SEQ ID NO: 383347 - DNA, 15 bp, Homo sapiens
aaggtacaagtttcc

SEQ ID NO: 383348 - DNA, 15 bp, Homo sapiens
aaaggtacaagtttc

SEQ ID NO: 383349 - DNA, 15 bp, Homo sapiens
gaaaggtacaagttt

SEQ ID NO: 383350 - DNA, 15 bp, Homo sapiens
tgaaaggtacaagtt

SEQ ID NO: 383351 - DNA, 15 bp, Homo sapiens
ctgaaaggtacaagt

SEQ ID NO: 383352 - DNA, 15 bp, Homo sapiens
tctgaaaggtacaag

SEQ ID NO: 383353 - DNA, 15 bp, Homo sapiens
atctgaaaggtacaa

SEQ ID NO: 383354 - DNA, 15 bp, Homo sapiens
tatctgaaaggtaca

SEQ ID NO: 383355 - DNA, 15 bp, Homo sapiens
gtatctgaaaggtac

SEQ ID NO: 383356 - DNA, 15 bp, Homo sapiens
agtatctgaaaggta

SEQ ID NO: 383357 - DNA, 15 bp, Homo sapiens
tagtatctgaaaggt

SEQ ID NO: 383358 - DNA, 15 bp, Homo sapiens
ttagtatctgaaagg

SEQ ID NO: 383359 - DNA, 15 bp, Homo sapiens
gttagtatctgaaag

SEQ ID NO: 383360 - DNA, 15 bp, Homo sapiens
agttagtatctgaaa

SEQ ID NO: 383361 - DNA, 15 bp, Homo sapiens
aagttagtatctgaa

SEQ ID NO: 383362 - DNA, 15 bp, Homo sapiens
taagttagtatctga

SEQ ID NO: 383363 - DNA, 15 bp, Homo sapiens
ttaagttagtatctg

SEQ ID NO: 383364 - DNA, 15 bp, Homo sapiens
cttaagttagtatct

SEQ ID NO: 383365 - DNA, 15 bp, Homo sapiens
acttaagttagtatc

SEQ ID NO: 383366 - DNA, 15 bp, Homo sapiens
tacttaagttagtat

SEQ ID NO: 383367 - DNA, 15 bp, Homo sapiens
atacttaagttagta

SEQ ID NO: 383368 - DNA, 15 bp, Homo sapiens
aatacttaagttagt

SEQ ID NO: 383369 - DNA, 15 bp, Homo sapiens
aaatacttaagttag

SEQ ID NO: 383370 - DNA, 15 bp, Homo sapiens
aaaatacttaagtta

SEQ ID NO: 383371 - DNA, 15 bp, Homo sapiens
caaaatacttaagtt

SEQ ID NO: 383372 - DNA, 15 bp, Homo sapiens
tcaaaatacttaagt

SEQ ID NO: 383373 - DNA, 15 bp, Homo sapiens
atcaaaatacttaag

SEQ ID NO: 383374 - DNA, 15 bp, Homo sapiens
aatcaaaatacttaa

SEQ ID NO: 383375 - DNA, 15 bp, Homo sapiens
taatcaaaatactta

SEQ ID NO: 383376 - DNA, 15 bp, Homo sapiens
gtaatcaaaatactt

SEQ ID NO: 383377 - DNA, 15 bp, Homo sapiens
agtaatcaaaatact

SEQ ID NO: 383378 - DNA, 15 bp, Homo sapiens
tagtaatcaaaatac

SEQ ID NO: 383379 - DNA, 15 bp, Homo sapiens
ttagtaatcaaaata

SEQ ID NO: 383380 - DNA, 15 bp, Homo sapiens
gttagtaatcaaaat

SEQ ID NO: 383381 - DNA, 15 bp, Homo sapiens
agttagtaatcaaaa

SEQ ID NO: 383382 - DNA, 15 bp, Homo sapiens
aagttagtaatcaaa

SEQ ID NO: 383383 - DNA, 15 bp, Homo sapiens
caagttagtaatcaa

SEQ ID NO: 383384 - DNA, 15 bp, Homo sapiens
tcaagttagtaatca

SEQ ID NO: 383385 - DNA, 15 bp, Homo sapiens
ttcaagttagtaatc

SEQ ID NO: 383386 - DNA, 15 bp, Homo sapiens
gttcaagttagtaat

SEQ ID NO: 383387 - DNA, 15 bp, Homo sapiens
agttcaagttagtaa

SEQ ID NO: 383388 - DNA, 15 bp, Homo sapiens
gagttcaagttagta

SEQ ID NO: 383389 - DNA, 15 bp, Homo sapiens
tgagttcaagttagt

SEQ ID NO: 383390 - DNA, 15 bp, Homo sapiens
atgagttcaagttag

SEQ ID NO: 383391 - DNA, 15 bp, Homo sapiens
catgagttcaagtta

SEQ ID NO: 383392 - DNA, 15 bp, Homo sapiens
acatgagttcaagtt

SEQ ID NO: 383393 - DNA, 15 bp, Homo sapiens
aacatgagttcaagt

SEQ ID NO: 383394 - DNA, 15 bp, Homo sapiens
gaacatgagttcaag

SEQ ID NO: 383395 - DNA, 15 bp, Homo sapiens
tgaacatgagttcaa

SEQ ID NO: 383396 - DNA, 15 bp, Homo sapiens
atgaacatgagttca

SEQ ID NO: 383397 - DNA, 15 bp, Homo sapiens
tatgaacatgagttc

SEQ ID NO: 383398 - DNA, 15 bp, Homo sapiens
atatgaacatgagtt

SEQ ID NO: 383399 - DNA, 15 bp, Homo sapiens
aatatgaacatgagt

SEQ ID NO: 383400 - DNA, 15 bp, Homo sapiens
aaatatgaacatgag

SEQ ID NO: 383401 - DNA, 15 bp, Homo sapiens
taaatatgaacatga

SEQ ID NO: 383402 - DNA, 15 bp, Homo sapiens
gtaaatatgaacatg

SEQ ID NO: 383403 - DNA, 15 bp, Homo sapiens
tgtaaatatgaacat

SEQ ID NO: 383404 - DNA, 15 bp, Homo sapiens
atgtaaatatgaaca

SEQ ID NO: 383405 - DNA, 15 bp, Homo sapiens
aatgtaaatatgaac

SEQ ID NO: 383406 - DNA, 15 bp, Homo sapiens
aaatgtaaatatgaa

SEQ ID NO: 383407 - DNA, 15 bp, Homo sapiens
caaatgtaaatatga

SEQ ID NO: 383408 - DNA, 15 bp, Homo sapiens
acaaatgtaaatatg

SEQ ID NO: 383409 - DNA, 15 bp, Homo sapiens
aacaaatgtaaatat

SEQ ID NO: 383410 - DNA, 15 bp, Homo sapiens
aaacaaatgtaaata

SEQ ID NO: 383411 - DNA, 15 bp, Homo sapiens
aaaacaaatgtaaat

SEQ ID NO: 383412 - DNA, 15 bp, Homo sapiens
caaaacaaatgtaaa

SEQ ID NO: 383413 - DNA, 15 bp, Homo sapiens
acaaaacaaatgtaa

SEQ ID NO: 383414 - DNA, 15 bp, Homo sapiens
tacaaaacaaatgta

SEQ ID NO: 383415 - DNA, 15 bp, Homo sapiens
ctacaaaacaaatgt

SEQ ID NO: 383416 - DNA, 15 bp, Homo sapiens
actacaaaacaaatg

SEQ ID NO: 383417 - DNA, 15 bp, Homo sapiens
tactacaaaacaaat

SEQ ID NO: 383418 - DNA, 15 bp, Homo sapiens
atactacaaaacaaa

SEQ ID NO: 383419 - DNA, 15 bp, Homo sapiens
gatactacaaaacaa

SEQ ID NO: 383420 - DNA, 15 bp, Homo sapiens
ggatactacaaaaca

SEQ ID NO: 383421 - DNA, 15 bp, Homo sapiens
gggatactacaaaac

SEQ ID NO: 383422 - DNA, 15 bp, Homo sapiens
agggatactacaaaa

SEQ ID NO: 383423 - DNA, 15 bp, Homo sapiens
gagggatactacaaa

SEQ ID NO: 383424 - DNA, 15 bp, Homo sapiens
cgagggatactacaa

SEQ ID NO: 383425 - DNA, 15 bp, Homo sapiens
ccgagggatactaca

SEQ ID NO: 383426 - DNA, 15 bp, Homo sapiens
cccgagggatactac

SEQ ID NO: 383427 - DNA, 15 bp, Homo sapiens
tcccgagggatacta

SEQ ID NO: 383428 - DNA, 15 bp, Homo sapiens
atcccgagggatact

SEQ ID NO: 383429 - DNA, 15 bp, Homo sapiens
gatcccgagggatac

SEQ ID NO: 383430 - DNA, 15 bp, Homo sapiens
cgatcccgagggata

SEQ ID NO: 383431 - DNA, 15 bp, Homo sapiens
acgatcccgagggat

SEQ ID NO: 383432 - DNA, 15 bp, Homo sapiens
cacgatcccgaggga

SEQ ID NO: 383433 - DNA, 15 bp, Homo sapiens
acacgatcccgaggg

SEQ ID NO: 383434 - DNA, 15 bp, Homo sapiens
gacacgatcccgagg

SEQ ID NO: 383435 - DNA, 15 bp, Homo sapiens
ggacacgatcccgag

SEQ ID NO: 383436 - DNA, 15 bp, Homo sapiens
gggacacgatcccga

SEQ ID NO: 383437 - DNA, 15 bp, Homo sapiens
agggacacgatcccg

SEQ ID NO: 383438 - DNA, 15 bp, Homo sapiens
cagggacacgatccc

SEQ ID NO: 383439 - DNA, 15 bp, Homo sapiens
ccagggacacgatcc

SEQ ID NO: 383440 - DNA, 15 bp, Homo sapiens
cccagggacacgatc

SEQ ID NO: 383441 - DNA, 15 bp, Homo sapiens
tcccagggacacgat

SEQ ID NO: 383442 - DNA, 15 bp, Homo sapiens
ctcccagggacacga

SEQ ID NO: 383443 - DNA, 15 bp, Homo sapiens
cctcccagggacacg

SEQ ID NO: 383444 - DNA, 15 bp, Homo sapiens
gcctcccagggacac

SEQ ID NO: 383445 - DNA, 15 bp, Homo sapiens
cgcctcccagggaca

SEQ ID NO: 383446 - DNA, 15 bp, Homo sapiens
ccgcctcccagggac

SEQ ID NO: 383447 - DNA, 15 bp, Homo sapiens
tccgcctcccaggga

SEQ ID NO: 383448 - DNA, 15 bp, Homo sapiens
atccgcctcccaggg

SEQ ID NO: 383449 - DNA, 15 bp, Homo sapiens
tatccgcctcccagg

SEQ ID NO: 383450 - DNA, 15 bp, Homo sapiens
ctatccgcctcccag

SEQ ID NO: 383451 - DNA, 15 bp, Homo sapiens
cctatccgcctccca

SEQ ID NO: 383452 - DNA, 15 bp, Homo sapiens
tcctatccgcctccc

SEQ ID NO: 383453 - DNA, 15 bp, Homo sapiens
atcctatccgcctcc

SEQ ID NO: 383454 - DNA, 15 bp, Homo sapiens
aatcctatccgcctc

SEQ ID NO: 383455 - DNA, 15 bp, Homo sapiens
gaatcctatccgcct

SEQ ID NO: 383456 - DNA, 15 bp, Homo sapiens
tgaatcctatccgcc

SEQ ID NO: 383457 - DNA, 15 bp, Homo sapiens
ctgaatcctatccgc

SEQ ID NO: 383458 - DNA, 15 bp, Homo sapiens
gctgaatcctatccg

SEQ ID NO: 383459 - DNA, 15 bp, Homo sapiens
tgctgaatcctatcc

SEQ ID NO: 383460 - DNA, 15 bp, Homo sapiens
gtgctgaatcctatc

SEQ ID NO: 383461 - DNA, 15 bp, Homo sapiens
agtgctgaatcctat

SEQ ID NO: 383462 - DNA, 15 bp, Homo sapiens
gagtgctgaatccta

SEQ ID NO: 383463 - DNA, 15 bp, Homo sapiens
agagtgctgaatcct

SEQ ID NO: 383464 - DNA, 15 bp, Homo sapiens
tagagtgctgaatcc

SEQ ID NO: 383465 - DNA, 15 bp, Homo sapiens
ctagagtgctgaatc

SEQ ID NO: 383466 - DNA, 15 bp, Homo sapiens
tctagagtgctgaat

SEQ ID NO: 383467 - DNA, 15 bp, Homo sapiens
ttctagagtgctgaa

SEQ ID NO: 383468 - DNA, 15 bp, Homo sapiens
attctagagtgctga

SEQ ID NO: 383469 - DNA, 15 bp, Homo sapiens
aattctagagtgctg

SEQ ID NO: 383470 - DNA, 15 bp, Homo sapiens
caattctagagtgct

SEQ ID NO: 383471 - DNA, 15 bp, Homo sapiens
acaattctagagtgc

SEQ ID NO: 383472 - DNA, 15 bp, Homo sapiens
gacaattctagagtg

SEQ ID NO: 383473 - DNA, 15 bp, Homo sapiens
agacaattctagagt

SEQ ID NO: 383474 - DNA, 15 bp, Homo sapiens
gagacaattctagag

SEQ ID NO: 383475 - DNA, 15 bp, Homo sapiens
tgagacaattctaga

SEQ ID NO: 383476 - DNA, 15 bp, Homo sapiens
gtgagacaattctag

SEQ ID NO: 383477 - DNA, 15 bp, Homo sapiens
ggtgagacaattcta

SEQ ID NO: 383478 - DNA, 15 bp, Homo sapiens
tggtgagacaattct

SEQ ID NO: 383479 - DNA, 15 bp, Homo sapiens
atggtgagacaattc

SEQ ID NO: 383480 - DNA, 15 bp, Homo sapiens
aatggtgagacaatt

SEQ ID NO: 383481 - DNA, 15 bp, Homo sapiens
aaatggtgagacaat

SEQ ID NO: 383482 - DNA, 15 bp, Homo sapiens
caaatggtgagacaa

SEQ ID NO: 383483 - DNA, 15 bp, Homo sapiens
tcaaatggtgagaca

SEQ ID NO: 383484 - DNA, 15 bp, Homo sapiens
ttcaaatggtgagac

SEQ ID NO: 383485 - DNA, 15 bp, Homo sapiens
attcaaatggtgaga

SEQ ID NO: 383486 - DNA, 15 bp, Homo sapiens
tattcaaatggtgag

SEQ ID NO: 383487 - DNA, 15 bp, Homo sapiens
ctattcaaatggtga

SEQ ID NO: 383488 - DNA, 15 bp, Homo sapiens
cctattcaaatggtg

SEQ ID NO: 383489 - DNA, 15 bp, Homo sapiens
acctattcaaatggt

SEQ ID NO: 383490 - DNA, 15 bp, Homo sapiens
cacctattcaaatgg

SEQ ID NO: 383491 - DNA, 15 bp, Homo sapiens
gcacctattcaaatg

SEQ ID NO: 383492 - DNA, 15 bp, Homo sapiens
agcacctattcaaat

SEQ ID NO: 383493 - DNA, 15 bp, Homo sapiens
cagcacctattcaaa

SEQ ID NO: 383494 - DNA, 15 bp, Homo sapiens
gcagcacctattcaa

SEQ ID NO: 383495 - DNA, 15 bp, Homo sapiens
agcagcacctattca

SEQ ID NO: 383496 - DNA, 15 bp, Homo sapiens
gagcagcacctattc

SEQ ID NO: 383497 - DNA, 15 bp, Homo sapiens
tgagcagcacctatt

SEQ ID NO: 383498 - DNA, 15 bp, Homo sapiens
ctgagcagcacctat

SEQ ID NO: 383499 - DNA, 15 bp, Homo sapiens
gctgagcagcaccta

SEQ ID NO: 383500 - DNA, 15 bp, Homo sapiens
ggctgagcagcacct

SEQ ID NO: 383501 - DNA, 15 bp, Homo sapiens
gggctgagcagcacc

SEQ ID NO: 383502 - DNA, 15 bp, Homo sapiens
agggctgagcagcac

SEQ ID NO: 383503 - DNA, 15 bp, Homo sapiens
aagggctgagcagca

SEQ ID NO: 383504 - DNA, 15 bp, Homo sapiens
aaagggctgagcagc

SEQ ID NO: 383505 - DNA, 15 bp, Homo sapiens
aaaagggctgagcag

SEQ ID NO: 383506 - DNA, 15 bp, Homo sapiens
caaaagggctgagca

SEQ ID NO: 383507 - DNA, 15 bp, Homo sapiens
tcaaaagggctgagc

SEQ ID NO: 383508 - DNA, 15 bp, Homo sapiens
ctcaaaagggctgag

SEQ ID NO: 383509 - DNA, 15 bp, Homo sapiens
actcaaaagggctga

SEQ ID NO: 383510 - DNA, 15 bp, Homo sapiens
gactcaaaagggctg

SEQ ID NO: 383511 - DNA, 15 bp, Homo sapiens
agactcaaaagggct

SEQ ID NO: 383512 - DNA, 15 bp, Homo sapiens
cagactcaaaagggc

SEQ ID NO: 383513 - DNA, 15 bp, Homo sapiens
acagactcaaaaggg

SEQ ID NO: 383514 - DNA, 15 bp, Homo sapiens
gacagactcaaaagg

SEQ ID NO: 383515 - DNA, 15 bp, Homo sapiens
tgacagactcaaaag

SEQ ID NO: 383516 - DNA, 15 bp, Homo sapiens
atgacagactcaaaa

SEQ ID NO: 383517 - DNA, 15 bp, Homo sapiens
gatgacagactcaaa

SEQ ID NO: 383518 - DNA, 15 bp, Homo sapiens
cgatgacagactcaa

SEQ ID NO: 383519 - DNA, 15 bp, Homo sapiens
ccgatgacagactca

SEQ ID NO: 383520 - DNA, 15 bp, Homo sapiens
tccgatgacagactc

SEQ ID NO: 383521 - DNA, 15 bp, Homo sapiens
ttccgatgacagact

SEQ ID NO: 383522 - DNA, 15 bp, Homo sapiens
tttccgatgacagac

SEQ ID NO: 383523 - DNA, 15 bp, Homo sapiens
ctttccgatgacaga

SEQ ID NO: 383524 - DNA, 15 bp, Homo sapiens
tctttccgatgacag

SEQ ID NO: 383525 - DNA, 15 bp, Homo sapiens
gtctttccgatgaca

SEQ ID NO: 383526 - DNA, 15 bp, Homo sapiens
ggtctttccgatgac

SEQ ID NO: 383527 - DNA, 15 bp, Homo sapiens
tggtctttccgatga

SEQ ID NO: 383528 - DNA, 15 bp, Homo sapiens
atggtctttccgatg

SEQ ID NO: 383529 - DNA, 15 bp, Homo sapiens
catggtctttccgat

SEQ ID NO: 383530 - DNA, 15 bp, Homo sapiens
ccatggtctttccga

SEQ ID NO: 383531 - DNA, 15 bp, Homo sapiens
gccatggtctttccg

SEQ ID NO: 383532 - DNA, 15 bp, Homo sapiens
agccatggtctttcc

SEQ ID NO: 383533 - DNA, 15 bp, Homo sapiens
aagccatggtctttc

SEQ ID NO: 383534 - DNA, 15 bp, Homo sapiens
aaagccatggtcttt

SEQ ID NO: 383535 - DNA, 15 bp, Homo sapiens
gaaagccatggtctt

SEQ ID NO: 383536 - DNA, 15 bp, Homo sapiens
agaaagccatggtct

SEQ ID NO: 383537 - DNA, 15 bp, Homo sapiens
gagaaagccatggtc

SEQ ID NO: 383538 - DNA, 15 bp, Homo sapiens
cgagaaagccatggt

SEQ ID NO: 383539 - DNA, 15 bp, Homo sapiens
gcgagaaagccatgg

SEQ ID NO: 383540 - DNA, 15 bp, Homo sapiens
agcgagaaagccatg

SEQ ID NO: 383541 - DNA, 15 bp, Homo sapiens
aagcgagaaagccat

SEQ ID NO: 383542 - DNA, 15 bp, Homo sapiens
aaagcgagaaagcca

SEQ ID NO: 383543 - DNA, 15 bp, Homo sapiens
aaaagcgagaaagcc

SEQ ID NO: 383544 - DNA, 15 bp, Homo sapiens
gaaaagcgagaaagc

SEQ ID NO: 383545 - DNA, 15 bp, Homo sapiens
tgaaaagcgagaaag

SEQ ID NO: 383546 - DNA, 15 bp, Homo sapiens
atgaaaagcgagaaa

SEQ ID NO: 383547 - DNA, 15 bp, Homo sapiens
gatgaaaagcgagaa

SEQ ID NO: 383548 - DNA, 15 bp, Homo sapiens
agatgaaaagcgaga

SEQ ID NO: 383549 - DNA, 15 bp, Homo sapiens
aagatgaaaagcgag

SEQ ID NO: 383550 - DNA, 15 bp, Homo sapiens
aaagatgaaaagcga

SEQ ID NO: 383551 - DNA, 15 bp, Homo sapiens
aaaagatgaaaagcg

SEQ ID NO: 383552 - DNA, 15 bp, Homo sapiens
aaaaagatgaaaagc

SEQ ID NO: 383553 - DNA, 15 bp, Homo sapiens
caaaaagatgaaaag

SEQ ID NO: 383554 - DNA, 15 bp, Homo sapiens
ccaaaaagatgaaaa

SEQ ID NO: 383555 - DNA, 15 bp, Homo sapiens
tccaaaaagatgaaa

SEQ ID NO: 383556 - DNA, 15 bp, Homo sapiens
atccaaaaagatgaa

SEQ ID NO: 383557 - DNA, 15 bp, Homo sapiens
catccaaaaagatga

SEQ ID NO: 383558 - DNA, 15 bp, Homo sapiens
ccatccaaaaagatg

SEQ ID NO: 383559 - DNA, 15 bp, Homo sapiens
gccatccaaaaagat

SEQ ID NO: 383560 - DNA, 15 bp, Homo sapiens
agccatccaaaaaga

SEQ ID NO: 383561 - DNA, 15 bp, Homo sapiens
cagccatccaaaaag

SEQ ID NO: 383562 - DNA, 15 bp, Homo sapiens
gcagccatccaaaaa

SEQ ID NO: 383563 - DNA, 15 bp, Homo sapiens
agcagccatccaaaa

SEQ ID NO: 383564 - DNA, 15 bp, Homo sapiens
aagcagccatccaaa

SEQ ID NO: 383565 - DNA, 15 bp, Homo sapiens
caagcagccatccaa

SEQ ID NO: 383566 - DNA, 15 bp, Homo sapiens
acaagcagccatcca

SEQ ID NO: 383567 - DNA, 15 bp, Homo sapiens
gacaagcagccatcc

SEQ ID NO: 383568 - DNA, 15 bp, Homo sapiens
cgacaagcagccatc

SEQ ID NO: 383569 - DNA, 15 bp, Homo sapiens
gcgacaagcagccat

SEQ ID NO: 383570 - DNA, 15 bp, Homo sapiens
tgcgacaagcagcca

SEQ ID NO: 383571 - DNA, 15 bp, Homo sapiens
ttgcgacaagcagcc

SEQ ID NO: 383572 - DNA, 15 bp, Homo sapiens
attgcgacaagcagc

SEQ ID NO: 383573 - DNA, 15 bp, Homo sapiens
tattgcgacaagcag

SEQ ID NO: 383574 - DNA, 15 bp, Homo sapiens
atattgcgacaagca

SEQ ID NO: 383575 - DNA, 15 bp, Homo sapiens
aatattgcgacaagc

SEQ ID NO: 383576 - DNA, 15 bp, Homo sapiens
caatattgcgacaag

SEQ ID NO: 383577 - DNA, 15 bp, Homo sapiens
acaatattgcgacaa

SEQ ID NO: 383578 - DNA, 15 bp, Homo sapiens
gacaatattgcgaca

SEQ ID NO: 383579 - DNA, 15 bp, Homo sapiens
agacaatattgcgac

SEQ ID NO: 383580 - DNA, 15 bp, Homo sapiens
aagacaatattgcga

SEQ ID NO: 383581 - DNA, 15 bp, Homo sapiens
gaagacaatattgcg

SEQ ID NO: 383582 - DNA, 15 bp, Homo sapiens
agaagacaatattgc

SEQ ID NO: 383583 - DNA, 15 bp, Homo sapiens
aagaagacaatattg

SEQ ID NO: 383584 - DNA, 15 bp, Homo sapiens
gaagaagacaatatt

SEQ ID NO: 383585 - DNA, 15 bp, Homo sapiens
cgaagaagacaatat

SEQ ID NO: 383586 - DNA, 15 bp, Homo sapiens
gcgaagaagacaata

SEQ ID NO: 383587 - DNA, 15 bp, Homo sapiens
agcgaagaagacaat

SEQ ID NO: 383588 - DNA, 15 bp, Homo sapiens
aagcgaagaagacaa

SEQ ID NO: 383589 - DNA, 15 bp, Homo sapiens
aaagcgaagaagaca

SEQ ID NO: 383590 - DNA, 15 bp, Homo sapiens
taaagcgaagaagac

SEQ ID NO: 383591 - DNA, 15 bp, Homo sapiens
ctaaagcgaagaaga

SEQ ID NO: 383592 - DNA, 15 bp, Homo sapiens
tctaaagcgaagaag

SEQ ID NO: 383593 - DNA, 15 bp, Homo sapiens
gtctaaagcgaagaa

SEQ ID NO: 383594 - DNA, 15 bp, Homo sapiens
tgtctaaagcgaaga

SEQ ID NO: 383595 - DNA, 15 bp, Homo sapiens
ttgtctaaagcgaag

SEQ ID NO: 383596 - DNA, 15 bp, Homo sapiens
cttgtctaaagcgaa

SEQ ID NO: 383597 - DNA, 15 bp, Homo sapiens
acttgtctaaagcga

SEQ ID NO: 383598 - DNA, 15 bp, Homo sapiens
tacttgtctaaagcg

SEQ ID NO: 383599 - DNA, 15 bp, Homo sapiens
atacttgtctaaagc

SEQ ID NO: 383600 - DNA, 15 bp, Homo sapiens
catacttgtctaaag

SEQ ID NO: 383601 - DNA, 15 bp, Homo sapiens
acatacttgtctaaa

SEQ ID NO: 383602 - DNA, 15 bp, Homo sapiens
gacatacttgtctaa

SEQ ID NO: 383603 - DNA, 15 bp, Homo sapiens
agacatacttgtcta

SEQ ID NO: 383604 - DNA, 15 bp, Homo sapiens
gagacatacttgtct

SEQ ID NO: 383605 - DNA, 15 bp, Homo sapiens
ggagacatacttgtc

SEQ ID NO: 383606 - DNA, 15 bp, Homo sapiens
tggagacatacttgt

SEQ ID NO: 383607 - DNA, 15 bp, Homo sapiens
ctggagacatacttg

SEQ ID NO: 383608 - DNA, 15 bp, Homo sapiens
cctggagacatactt

SEQ ID NO: 383609 - DNA, 15 bp, Homo sapiens
tcctggagacatact

SEQ ID NO: 383610 - DNA, 15 bp, Homo sapiens
atcctggagacatac

SEQ ID NO: 383611 - DNA, 15 bp, Homo sapiens
tatcctggagacata

SEQ ID NO: 383612 - DNA, 15 bp, Homo sapiens
gtatcctggagacat

SEQ ID NO: 383613 - DNA, 15 bp, Homo sapiens
ggtatcctggagaca

SEQ ID NO: 383614 - DNA, 15 bp, Homo sapiens
aggtatcctggagac

SEQ ID NO: 383615 - DNA, 15 bp, Homo sapiens
aaggtatcctggaga

SEQ ID NO: 383616 - DNA, 15 bp, Homo sapiens
gaaggtatcctggag

SEQ ID NO: 383617 - DNA, 15 bp, Homo sapiens
agaaggtatcctgga

SEQ ID NO: 383618 - DNA, 15 bp, Homo sapiens
cagaaggtatcctgg

SEQ ID NO: 383619 - DNA, 15 bp, Homo sapiens
ccagaaggtatcctg

SEQ ID NO: 383620 - DNA, 15 bp, Homo sapiens
accagaaggtatcct

SEQ ID NO: 383621 - DNA, 15 bp, Homo sapiens
gaccagaaggtatcc

SEQ ID NO: 383622 - DNA, 15 bp, Homo sapiens
agaccagaaggtatc

SEQ ID NO: 383623 - DNA, 15 bp, Homo sapiens
gagaccagaaggtat

SEQ ID NO: 383624 - DNA, 15 bp, Homo sapiens
tgagaccagaaggta

SEQ ID NO: 383625 - DNA, 15 bp, Homo sapiens
ttgagaccagaaggt

SEQ ID NO: 383626 - DNA, 15 bp, Homo sapiens
tttgagaccagaagg

SEQ ID NO: 383627 - DNA, 15 bp, Homo sapiens
ctttgagaccagaag

SEQ ID NO: 383628 - DNA, 15 bp, Homo sapiens
actttgagaccagaa

SEQ ID NO: 383629 - DNA, 15 bp, Homo sapiens
aactttgagaccaga

SEQ ID NO: 383630 - DNA, 15 bp, Homo sapiens
gaactttgagaccag

SEQ ID NO: 383631 - DNA, 15 bp, Homo sapiens
agaactttgagacca

SEQ ID NO: 383632 - DNA, 15 bp, Homo sapiens
tagaactttgagacc

SEQ ID NO: 383633 - DNA, 15 bp, Homo sapiens
atagaactttgagac

SEQ ID NO: 383634 - DNA, 15 bp, Homo sapiens
tatagaactttgaga

SEQ ID NO: 383635 - DNA, 15 bp, Homo sapiens
gtatagaactttgag

SEQ ID NO: 383636 - DNA, 15 bp, Homo sapiens
ggtatagaactttga

SEQ ID NO: 383637 - DNA, 15 bp, Homo sapiens
aggtatagaactttg

SEQ ID NO: 383638 - DNA, 15 bp, Homo sapiens
aaggtatagaacttt

SEQ ID NO: 383639 - DNA, 15 bp, Homo sapiens
aaaggtatagaactt

SEQ ID NO: 383640 - DNA, 15 bp, Homo sapiens
taaaggtatagaact

SEQ ID NO: 383641 - DNA, 15 bp, Homo sapiens
ttaaaggtatagaac

SEQ ID NO: 383642 - DNA, 15 bp, Homo sapiens
cttaaaggtatagaa

SEQ ID NO: 383643 - DNA, 15 bp, Homo sapiens
tcttaaaggtataga

SEQ ID NO: 383644 - DNA, 15 bp, Homo sapiens
ttcttaaaggtatag

SEQ ID NO: 383645 - DNA, 15 bp, Homo sapiens
cttcttaaaggtata

SEQ ID NO: 383646 - DNA, 15 bp, Homo sapiens
acttcttaaaggtat

SEQ ID NO: 383647 - DNA, 15 bp, Homo sapiens
aacttcttaaaggta

SEQ ID NO: 383648 - DNA, 15 bp, Homo sapiens
caacttcttaaaggt

SEQ ID NO: 383649 - DNA, 15 bp, Homo sapiens
acaacttcttaaagg

SEQ ID NO: 383650 - DNA, 15 bp, Homo sapiens
aacaacttcttaaag

SEQ ID NO: 383651 - DNA, 15 bp, Homo sapiens
aaacaacttcttaaa

SEQ ID NO: 383652 - DNA, 15 bp, Homo sapiens
caaacaacttcttaa

SEQ ID NO: 383653 - DNA, 15 bp, Homo sapiens
tcaaacaacttctta

SEQ ID NO: 383654 - DNA, 15 bp, Homo sapiens
ttcaaacaacttctt

SEQ ID NO: 383655 - DNA, 15 bp, Homo sapiens
attcaaacaacttct

SEQ ID NO: 383656 - DNA, 15 bp, Homo sapiens
tattcaaacaacttc

SEQ ID NO: 383657 - DNA, 15 bp, Homo sapiens
atattcaaacaactt

SEQ ID NO: 383658 - DNA, 15 bp, Homo sapiens
tatattcaaacaact

SEQ ID NO: 383659 - DNA, 15 bp, Homo sapiens
atatattcaaacaac

SEQ ID NO: 383660 - DNA, 15 bp, Homo sapiens
catatattcaaacaa

SEQ ID NO: 383661 - DNA, 15 bp, Homo sapiens
acatatattcaaaca

SEQ ID NO: 383662 - DNA, 15 bp, Homo sapiens
aacatatattcaaac

SEQ ID NO: 383663 - DNA, 15 bp, Homo sapiens
aaacatatattcaaa

SEQ ID NO: 383664 - DNA, 15 bp, Homo sapiens
aaaacatatattcaa

SEQ ID NO: 383665 - DNA, 15 bp, Homo sapiens
taaaacatatattca

SEQ ID NO: 383666 - DNA, 15 bp, Homo sapiens
ttaaaacatatattc

SEQ ID NO: 383667 - DNA, 15 bp, Homo sapiens
attaaaacatatatt

SEQ ID NO: 383668 - DNA, 15 bp, Homo sapiens
cattaaaacatatat

SEQ ID NO: 383669 - DNA, 15 bp, Homo sapiens
ccattaaaacatata

SEQ ID NO: 383670 - DNA, 15 bp, Homo sapiens
tccattaaaacatat

SEQ ID NO: 383671 - DNA, 15 bp, Homo sapiens
ttccattaaaacata

SEQ ID NO: 383672 - DNA, 15 bp, Homo sapiens
attccattaaaacat

SEQ ID NO: 383673 - DNA, 15 bp, Homo sapiens
aattccattaaaaca

SEQ ID NO: 383674 - DNA, 15 bp, Homo sapiens
taattccattaaaac

SEQ ID NO: 383675 - DNA, 15 bp, Homo sapiens
gtaattccattaaaa

SEQ ID NO: 383676 - DNA, 15 bp, Homo sapiens
cgtaattccattaaa

SEQ ID NO: 383677 - DNA, 15 bp, Homo sapiens
acgtaattccattaa

SEQ ID NO: 383678 - DNA, 15 bp, Homo sapiens
tacgtaattccatta

SEQ ID NO: 383679 - DNA, 15 bp, Homo sapiens
atacgtaattccatt

SEQ ID NO: 383680 - DNA, 15 bp, Homo sapiens
aatacgtaattccat

SEQ ID NO: 383681 - DNA, 15 bp, Homo sapiens
aaatacgtaattcca

SEQ ID NO: 383682 - DNA, 15 bp, Homo sapiens
caaatacgtaattcc

SEQ ID NO: 383683 - DNA, 15 bp, Homo sapiens
acaaatacgtaattc

SEQ ID NO: 383684 - DNA, 15 bp, Homo sapiens
aacaaatacgtaatt

SEQ ID NO: 383685 - DNA, 15 bp, Homo sapiens
caacaaatacgtaat

SEQ ID NO: 383686 - DNA, 15 bp, Homo sapiens
ccaacaaatacgtaa

SEQ ID NO: 383687 - DNA, 15 bp, Homo sapiens
accaacaaatacgta

SEQ ID NO: 383688 - DNA, 15 bp, Homo sapiens
taccaacaaatacgt

SEQ ID NO: 383689 - DNA, 15 bp, Homo sapiens
ttaccaacaaatacg

SEQ ID NO: 383690 - DNA, 15 bp, Homo sapiens
gttaccaacaaatac

SEQ ID NO: 383691 - DNA, 15 bp, Homo sapiens
tgttaccaacaaata

SEQ ID NO: 383692 - DNA, 15 bp, Homo sapiens
ctgttaccaacaaat

SEQ ID NO: 383693 - DNA, 15 bp, Homo sapiens
actgttaccaacaaa

SEQ ID NO: 383694 - DNA, 15 bp, Homo sapiens
cactgttaccaacaa

SEQ ID NO: 383695 - DNA, 15 bp, Homo sapiens
acactgttaccaaca

SEQ ID NO: 383696 - DNA, 15 bp, Homo sapiens
aacactgttaccaac

SEQ ID NO: 383697 - DNA, 15 bp, Homo sapiens
taacactgttaccaa

SEQ ID NO: 383698 - DNA, 15 bp, Homo sapiens
ctaacactgttacca

SEQ ID NO: 383699 - DNA, 15 bp, Homo sapiens
actaacactgttacc

SEQ ID NO: 383700 - DNA, 15 bp, Homo sapiens
gactaacactgttac

SEQ ID NO: 383701 - DNA, 15 bp, Homo sapiens
agactaacactgtta

SEQ ID NO: 383702 - DNA, 15 bp, Homo sapiens
cagactaacactgtt

SEQ ID NO: 383703 - DNA, 15 bp, Homo sapiens
acagactaacactgt

SEQ ID NO: 383704 - DNA, 15 bp, Homo sapiens
aacagactaacactg

SEQ ID NO: 383705 - DNA, 15 bp, Homo sapiens
aaacagactaacact

SEQ ID NO: 383706 - DNA, 15 bp, Homo sapiens
aaaacagactaacac

SEQ ID NO: 383707 - DNA, 15 bp, Homo sapiens
caaaacagactaaca

SEQ ID NO: 383708 - DNA, 15 bp, Homo sapiens
acaaaacagactaac

SEQ ID NO: 383709 - DNA, 15 bp, Homo sapiens
cacaaaacagactaa

SEQ ID NO: 383710 - DNA, 15 bp, Homo sapiens
gcacaaaacagacta

SEQ ID NO: 383711 - DNA, 15 bp, Homo sapiens
agcacaaaacagact

SEQ ID NO: 383712 - DNA, 15 bp, Homo sapiens
cagcacaaaacagac

SEQ ID NO: 383713 - DNA, 15 bp, Homo sapiens
gcagcacaaaacaga

SEQ ID NO: 383714 - DNA, 15 bp, Homo sapiens
agcagcacaaaacag

SEQ ID NO: 383715 - DNA, 15 bp, Homo sapiens
cagcagcacaaaaca

SEQ ID NO: 383716 - DNA, 15 bp, Homo sapiens
acagcagcacaaaac

SEQ ID NO: 383717 - DNA, 15 bp, Homo sapiens
tacagcagcacaaaa

SEQ ID NO: 383718 - DNA, 15 bp, Homo sapiens
ttacagcagcacaaa

SEQ ID NO: 383719 - DNA, 15 bp, Homo sapiens
gttacagcagcacaa

SEQ ID NO: 383720 - DNA, 15 bp, Homo sapiens
tgttacagcagcaca

SEQ ID NO: 383721 - DNA, 15 bp, Homo sapiens
ctgttacagcagcac

SEQ ID NO: 383722 - DNA, 15 bp, Homo sapiens
tctgttacagcagca

SEQ ID NO: 383723 - DNA, 15 bp, Homo sapiens
ttctgttacagcagc

SEQ ID NO: 383724 - DNA, 15 bp, Homo sapiens
attctgttacagcag

SEQ ID NO: 383725 - DNA, 15 bp, Homo sapiens
tattctgttacagca

SEQ ID NO: 383726 - DNA, 15 bp, Homo sapiens
gtattctgttacagc

SEQ ID NO: 383727 - DNA, 15 bp, Homo sapiens
ggtattctgttacag

SEQ ID NO: 383728 - DNA, 15 bp, Homo sapiens
tggtattctgttaca

SEQ ID NO: 383729 - DNA, 15 bp, Homo sapiens
gtggtattctgttac

SEQ ID NO: 383730 - DNA, 15 bp, Homo sapiens
tgtggtattctgtta

SEQ ID NO: 383731 - DNA, 15 bp, Homo sapiens
ctgtggtattctgtt

SEQ ID NO: 383732 - DNA, 15 bp, Homo sapiens
tctgtggtattctgt

SEQ ID NO: 383733 - DNA, 15 bp, Homo sapiens
atctgtggtattctg

SEQ ID NO: 383734 - DNA, 15 bp, Homo sapiens
aatctgtggtattct

SEQ ID NO: 383735 - DNA, 15 bp, Homo sapiens
caatctgtggtattc

SEQ ID NO: 383736 - DNA, 15 bp, Homo sapiens
ccaatctgtggtatt

SEQ ID NO: 383737 - DNA, 15 bp, Homo sapiens
cccaatctgtggtat

SEQ ID NO: 383738 - DNA, 15 bp, Homo sapiens
acccaatctgtggta

SEQ ID NO: 383739 - DNA, 15 bp, Homo sapiens
tacccaatctgtggt

SEQ ID NO: 383740 - DNA, 15 bp, Homo sapiens
ttacccaatctgtgg

SEQ ID NO: 383741 - DNA, 15 bp, Homo sapiens
attacccaatctgtg

SEQ ID NO: 383742 - DNA, 15 bp, Homo sapiens
aattacccaatctgt

SEQ ID NO: 383743 - DNA, 15 bp, Homo sapiens
aaattacccaatctg

SEQ ID NO: 383744 - DNA, 15 bp, Homo sapiens
aaaattacccaatct

SEQ ID NO: 383745 - DNA, 15 bp, Homo sapiens
aaaaattacccaatc

SEQ ID NO: 383746 - DNA, 15 bp, Homo sapiens
taaaaattacccaat

SEQ ID NO: 383747 - DNA, 15 bp, Homo sapiens
ttaaaaattacccaa

SEQ ID NO: 383748 - DNA, 15 bp, Homo sapiens
tttaaaaattaccca

SEQ ID NO: 383749 - DNA, 15 bp, Homo sapiens
ctttaaaaattaccc

SEQ ID NO: 383750 - DNA, 15 bp, Homo sapiens
tctttaaaaattacc

SEQ ID NO: 383751 - DNA, 15 bp, Homo sapiens
ttctttaaaaattac

SEQ ID NO: 383752 - DNA, 15 bp, Homo sapiens
gttctttaaaaatta

SEQ ID NO: 383753 - DNA, 15 bp, Homo sapiens
tgttctttaaaaatt

SEQ ID NO: 383754 - DNA, 15 bp, Homo sapiens
gtgttctttaaaaat

SEQ ID NO: 383755 - DNA, 15 bp, Homo sapiens
tgtgttctttaaaaa

SEQ ID NO: 383756 - DNA, 15 bp, Homo sapiens
atgtgttctttaaaa

SEQ ID NO: 383757 - DNA, 15 bp, Homo sapiens
aatgtgttctttaaa

SEQ ID NO: 383758 - DNA, 15 bp, Homo sapiens
aaatgtgttctttaa

SEQ ID NO: 383759 - DNA, 15 bp, Homo sapiens
aaaatgtgttcttta

SEQ ID NO: 383760 - DNA, 15 bp, Homo sapiens
taaaatgtgttcttt

SEQ ID NO: 383761 - DNA, 15 bp, Homo sapiens
ataaaatgtgttctt

SEQ ID NO: 383762 - DNA, 15 bp, Homo sapiens
aataaaatgtgttct

SEQ ID NO: 383763 - DNA, 15 bp, Homo sapiens
aaataaaatgtgttc

SEQ ID NO: 383764 - DNA, 15 bp, Homo sapiens
gaaataaaatgtgtt

SEQ ID NO: 383765 - DNA, 15 bp, Homo sapiens
agaaataaaatgtgt

SEQ ID NO: 383766 - DNA, 15 bp, Homo sapiens
aagaaataaaatgtg

SEQ ID NO: 383767 - DNA, 15 bp, Homo sapiens
caagaaataaaatgt

SEQ ID NO: 383768 - DNA, 15 bp, Homo sapiens
acaagaaataaaatg

SEQ ID NO: 383769 - DNA, 15 bp, Homo sapiens
tacaagaaataaaat

SEQ ID NO: 383770 - DNA, 15 bp, Homo sapiens
ctacaagaaataaaa

SEQ ID NO: 383771 - DNA, 15 bp, Homo sapiens
actacaagaaataaa

SEQ ID NO: 383772 - DNA, 15 bp, Homo sapiens
aactacaagaaataa

SEQ ID NO: 383773 - DNA, 15 bp, Homo sapiens
gaactacaagaaata

SEQ ID NO: 383774 - DNA, 15 bp, Homo sapiens
tgaactacaagaaat

SEQ ID NO: 383775 - DNA, 15 bp, Homo sapiens
ctgaactacaagaaa

SEQ ID NO: 383776 - DNA, 15 bp, Homo sapiens
cctgaactacaagaa

SEQ ID NO: 383777 - DNA, 15 bp, Homo sapiens
tcctgaactacaaga

SEQ ID NO: 383778 - DNA, 15 bp, Homo sapiens
ctcctgaactacaag

SEQ ID NO: 383779 - DNA, 15 bp, Homo sapiens
actcctgaactacaa

SEQ ID NO: 383780 - DNA, 15 bp, Homo sapiens
gactcctgaactaca

SEQ ID NO: 383781 - DNA, 15 bp, Homo sapiens
tgactcctgaactac

SEQ ID NO: 383782 - DNA, 15 bp, Homo sapiens
ctgactcctgaacta

SEQ ID NO: 383783 - DNA, 15 bp, Homo sapiens
cctgactcctgaact

SEQ ID NO: 383784 - DNA, 15 bp, Homo sapiens
ccctgactcctgaac

SEQ ID NO: 383785 - DNA, 15 bp, Homo sapiens
tccctgactcctgaa

SEQ ID NO: 383786 - DNA, 15 bp, Homo sapiens
ttccctgactcctga

SEQ ID NO: 383787 - DNA, 15 bp, Homo sapiens
cttccctgactcctg

SEQ ID NO: 383788 - DNA, 15 bp, Homo sapiens
acttccctgactcct

SEQ ID NO: 383789 - DNA, 15 bp, Homo sapiens
gacttccctgactcc

SEQ ID NO: 383790 - DNA, 15 bp, Homo sapiens
agacttccctgactc

SEQ ID NO: 383791 - DNA, 15 bp, Homo sapiens
aagacttccctgact

SEQ ID NO: 383792 - DNA, 15 bp, Homo sapiens
caagacttccctgac

SEQ ID NO: 383793 - DNA, 15 bp, Homo sapiens
tcaagacttccctga

SEQ ID NO: 383794 - DNA, 15 bp, Homo sapiens
ctcaagacttccctg

SEQ ID NO: 383795 - DNA, 15 bp, Homo sapiens
tctcaagacttccct

SEQ ID NO: 383796 - DNA, 15 bp, Homo sapiens
atctcaagacttccc

SEQ ID NO: 383797 - DNA, 15 bp, Homo sapiens
gatctcaagacttcc

SEQ ID NO: 383798 - DNA, 15 bp, Homo sapiens
tgatctcaagacttc

SEQ ID NO: 383799 - DNA, 15 bp, Homo sapiens
ttgatctcaagactt

SEQ ID NO: 383800 - DNA, 15 bp, Homo sapiens
cttgatctcaagact

SEQ ID NO: 383801 - DNA, 15 bp, Homo sapiens
ccttgatctcaagac

SEQ ID NO: 383802 - DNA, 15 bp, Homo sapiens
cccttgatctcaaga

SEQ ID NO: 383803 - DNA, 15 bp, Homo sapiens
tcccttgatctcaag

SEQ ID NO: 383804 - DNA, 15 bp, Homo sapiens
gtcccttgatctcaa

SEQ ID NO: 383805 - DNA, 15 bp, Homo sapiens
agtcccttgatctca

SEQ ID NO: 383806 - DNA, 15 bp, Homo sapiens
cagtcccttgatctc

SEQ ID NO: 383807 - DNA, 15 bp, Homo sapiens
ccagtcccttgatct

SEQ ID NO: 383808 - DNA, 15 bp, Homo sapiens
gccagtcccttgatc

SEQ ID NO: 383809 - DNA, 15 bp, Homo sapiens
tgccagtcccttgat

SEQ ID NO: 383810 - DNA, 15 bp, Homo sapiens
atgccagtcccttga

SEQ ID NO: 383811 - DNA, 15 bp, Homo sapiens
catgccagtcccttg

SEQ ID NO: 383812 - DNA, 15 bp, Homo sapiens
acatgccagtccctt

SEQ ID NO: 383813 - DNA, 15 bp, Homo sapiens
cacatgccagtccct

SEQ ID NO: 383814 - DNA, 15 bp, Homo sapiens
ccacatgccagtccc

SEQ ID NO: 383815 - DNA, 15 bp, Homo sapiens
cccacatgccagtcc

SEQ ID NO: 383816 - DNA, 15 bp, Homo sapiens
ccccacatgccagtc

SEQ ID NO: 383817 - DNA, 15 bp, Homo sapiens
tccccacatgccagt

SEQ ID NO: 383818 - DNA, 15 bp, Homo sapiens
ctccccacatgccag

SEQ ID NO: 383819 - DNA, 15 bp, Homo sapiens
cctccccacatgcca

SEQ ID NO: 383820 - DNA, 15 bp, Homo sapiens
acctccccacatgcc

SEQ ID NO: 383821 - DNA, 15 bp, Homo sapiens
gacctccccacatgc

SEQ ID NO: 383822 - DNA, 15 bp, Homo sapiens
ggacctccccacatg

SEQ ID NO: 383823 - DNA, 15 bp, Homo sapiens
aggacctccccacat

SEQ ID NO: 383824 - DNA, 15 bp, Homo sapiens
aaggacctccccaca

SEQ ID NO: 383825 - DNA, 15 bp, Homo sapiens
gaaggacctccccac

SEQ ID NO: 383826 - DNA, 15 bp, Homo sapiens
agaaggacctcccca

SEQ ID NO: 383827 - DNA, 15 bp, Homo sapiens
aagaaggacctcccc

SEQ ID NO: 383828 - DNA, 15 bp, Homo sapiens
caagaaggacctccc

SEQ ID NO: 383829 - DNA, 15 bp, Homo sapiens
gcaagaaggacctcc

SEQ ID NO: 383830 - DNA, 15 bp, Homo sapiens
agcaagaaggacctc

SEQ ID NO: 383831 - DNA, 15 bp, Homo sapiens
cagcaagaaggacct

SEQ ID NO: 383832 - DNA, 15 bp, Homo sapiens
acagcaagaaggacc

SEQ ID NO: 383833 - DNA, 15 bp, Homo sapiens
gacagcaagaaggac

SEQ ID NO: 383834 - DNA, 15 bp, Homo sapiens
tgacagcaagaagga

SEQ ID NO: 383835 - DNA, 15 bp, Homo sapiens
atgacagcaagaagg

SEQ ID NO: 383836 - DNA, 15 bp, Homo sapiens
gatgacagcaagaag

SEQ ID NO: 383837 - DNA, 15 bp, Homo sapiens
ggatgacagcaagaa

SEQ ID NO: 383838 - DNA, 15 bp, Homo sapiens
gggatgacagcaaga

SEQ ID NO: 383839 - DNA, 15 bp, Homo sapiens
agggatgacagcaag

SEQ ID NO: 383840 - DNA, 15 bp, Homo sapiens
aagggatgacagcaa

SEQ ID NO: 383841 - DNA, 15 bp, Homo sapiens
caagggatgacagca

SEQ ID NO: 383842 - DNA, 15 bp, Homo sapiens
ccaagggatgacagc

SEQ ID NO: 383843 - DNA, 15 bp, Homo sapiens
accaagggatgacag

SEQ ID NO: 383844 - DNA, 15 bp, Homo sapiens
caccaagggatgaca

SEQ ID NO: 383845 - DNA, 15 bp, Homo sapiens
ccaccaagggatgac

SEQ ID NO: 383846 - DNA, 15 bp, Homo sapiens
tccaccaagggatga

SEQ ID NO: 383847 - DNA, 15 bp, Homo sapiens
ttccaccaagggatg

SEQ ID NO: 383848 - DNA, 15 bp, Homo sapiens
cttccaccaagggat

SEQ ID NO: 383849 - DNA, 15 bp, Homo sapiens
ccttccaccaaggga

SEQ ID NO: 383850 - DNA, 15 bp, Homo sapiens
accttccaccaaggg

SEQ ID NO: 383851 - DNA, 15 bp, Homo sapiens
caccttccaccaagg

SEQ ID NO: 383852 - DNA, 15 bp, Homo sapiens
ccaccttccaccaag

SEQ ID NO: 383853 - DNA, 15 bp, Homo sapiens
tccaccttccaccaa

SEQ ID NO: 383854 - DNA, 15 bp, Homo sapiens
ttccaccttccacca

SEQ ID NO: 383855 - DNA, 15 bp, Homo sapiens
cttccaccttccacc

SEQ ID NO: 383856 - DNA, 15 bp, Homo sapiens
ccttccaccttccac

SEQ ID NO: 383857 - DNA, 15 bp, Homo sapiens
cccttccaccttcca

SEQ ID NO: 383858 - DNA, 15 bp, Homo sapiens
acccttccaccttcc

SEQ ID NO: 383859 - DNA, 15 bp, Homo sapiens
tacccttccaccttc

SEQ ID NO: 383860 - DNA, 15 bp, Homo sapiens
ttacccttccacctt

SEQ ID NO: 383861 - DNA, 15 bp, Homo sapiens
cttacccttccacct

SEQ ID NO: 383862 - DNA, 15 bp, Homo sapiens
tcttacccttccacc

SEQ ID NO: 383863 - DNA, 15 bp, Homo sapiens
ctcttacccttccac

SEQ ID NO: 383864 - DNA, 15 bp, Homo sapiens
tctcttacccttcca

SEQ ID NO: 383865 - DNA, 15 bp, Homo sapiens
ttctcttacccttcc

SEQ ID NO: 383866 - DNA, 15 bp, Homo sapiens
gttctcttacccttc

SEQ ID NO: 383867 - DNA, 15 bp, Homo sapiens
tgttctcttaccctt

SEQ ID NO: 383868 - DNA, 15 bp, Homo sapiens
atgttctcttaccct

SEQ ID NO: 383869 - DNA, 15 bp, Homo sapiens
catgttctcttaccc

SEQ ID NO: 383870 - DNA, 15 bp, Homo sapiens
tcatgttctcttacc

SEQ ID NO: 383871 - DNA, 15 bp, Homo sapiens
ctcatgttctcttac

SEQ ID NO: 383872 - DNA, 15 bp, Homo sapiens
tctcatgttctctta

SEQ ID NO: 383873 - DNA, 15 bp, Homo sapiens
ttctcatgttctctt

SEQ ID NO: 383874 - DNA, 15 bp, Homo sapiens
tttctcatgttctct

SEQ ID NO: 383875 - DNA, 15 bp, Homo sapiens
ttttctcatgttctc

SEQ ID NO: 383876 - DNA, 15 bp, Homo sapiens
gttttctcatgttct

SEQ ID NO: 383877 - DNA, 15 bp, Homo sapiens
tgttttctcatgttc

SEQ ID NO: 383878 - DNA, 15 bp, Homo sapiens
ttgttttctcatgtt

SEQ ID NO: 383879 - DNA, 15 bp, Homo sapiens
cttgttttctcatgt

SEQ ID NO: 383880 - DNA, 15 bp, Homo sapiens
tcttgttttctcatg

SEQ ID NO: 383881 - DNA, 15 bp, Homo sapiens
ctcttgttttctcat

SEQ ID NO: 383882 - DNA, 15 bp, Homo sapiens
cctcttgttttctca

SEQ ID NO: 383883 - DNA, 15 bp, Homo sapiens
ccctcttgttttctc

SEQ ID NO: 383884 - DNA, 15 bp, Homo sapiens
cccctcttgttttct

SEQ ID NO: 383885 - DNA, 15 bp, Homo sapiens
ccccctcttgttttc

SEQ ID NO: 383886 - DNA, 15 bp, Homo sapiens
gccccctcttgtttt

SEQ ID NO: 383887 - DNA, 15 bp, Homo sapiens
ggccccctcttgttt

SEQ ID NO: 383888 - DNA, 15 bp, Homo sapiens
gggccccctcttgtt

SEQ ID NO: 383889 - DNA, 15 bp, Homo sapiens
tgggccccctcttgt

SEQ ID NO: 383890 - DNA, 15 bp, Homo sapiens
gtgggccccctcttg

SEQ ID NO: 383891 - DNA, 15 bp, Homo sapiens
agtgggccccctctt

SEQ ID NO: 383892 - DNA, 15 bp, Homo sapiens
aagtgggccccctct

SEQ ID NO: 383893 - DNA, 15 bp, Homo sapiens
aaagtgggccccctc

SEQ ID NO: 383894 - DNA, 15 bp, Homo sapiens
gaaagtgggccccct

SEQ ID NO: 383895 - DNA, 15 bp, Homo sapiens
tgaaagtgggccccc

SEQ ID NO: 383896 - DNA, 15 bp, Homo sapiens
gtgaaagtgggcccc

SEQ ID NO: 383897 - DNA, 15 bp, Homo sapiens
agtgaaagtgggccc

SEQ ID NO: 383898 - DNA, 15 bp, Homo sapiens
aagtgaaagtgggcc

SEQ ID NO: 383899 - DNA, 15 bp, Homo sapiens
aaagtgaaagtgggc

SEQ ID NO: 383900 - DNA, 15 bp, Homo sapiens
aaaagtgaaagtggg

SEQ ID NO: 383901 - DNA, 15 bp, Homo sapiens
taaaagtgaaagtgg

SEQ ID NO: 383902 - DNA, 15 bp, Homo sapiens
ataaaagtgaaagtg

SEQ ID NO: 383903 - DNA, 15 bp, Homo sapiens
tataaaagtgaaagt

SEQ ID NO: 383904 - DNA, 15 bp, Homo sapiens
ttataaaagtgaaag

SEQ ID NO: 383905 - DNA, 15 bp, Homo sapiens
gttataaaagtgaaa

SEQ ID NO: 383906 - DNA, 15 bp, Homo sapiens
tgttataaaagtgaa

SEQ ID NO: 383907 - DNA, 15 bp, Homo sapiens
ttgttataaaagtga

SEQ ID NO: 383908 - DNA, 15 bp, Homo sapiens
tttgttataaaagtg

SEQ ID NO: 383909 - DNA, 15 bp, Homo sapiens
gtttgttataaaagt

SEQ ID NO: 383910 - DNA, 15 bp, Homo sapiens
ggtttgttataaaag

SEQ ID NO: 383911 - DNA, 15 bp, Homo sapiens
aggtttgttataaaa

SEQ ID NO: 383912 - DNA, 15 bp, Homo sapiens
taggtttgttataaa

SEQ ID NO: 383913 - DNA, 15 bp, Homo sapiens
gtaggtttgttataa

SEQ ID NO: 383914 - DNA, 15 bp, Homo sapiens
agtaggtttgttata

SEQ ID NO: 383915 - DNA, 15 bp, Homo sapiens
gagtaggtttgttat

SEQ ID NO: 383916 - DNA, 15 bp, Homo sapiens
ggagtaggtttgtta

SEQ ID NO: 383917 - DNA, 15 bp, Homo sapiens
gggagtaggtttgtt

SEQ ID NO: 383918 - DNA, 15 bp, Homo sapiens
agggagtaggtttgt

SEQ ID NO: 383919 - DNA, 15 bp, Homo sapiens
gagggagtaggtttg

SEQ ID NO: 383920 - DNA, 15 bp, Homo sapiens
tgagggagtaggttt

SEQ ID NO: 383921 - DNA, 15 bp, Homo sapiens
ttgagggagtaggtt

SEQ ID NO: 383922 - DNA, 15 bp, Homo sapiens
attgagggagtaggt

SEQ ID NO: 383923 - DNA, 15 bp, Homo sapiens
tattgagggagtagg

SEQ ID NO: 383924 - DNA, 15 bp, Homo sapiens
ttattgagggagtag

SEQ ID NO: 383925 - DNA, 15 bp, Homo sapiens
gttattgagggagta

SEQ ID NO: 383926 - DNA, 15 bp, Homo sapiens
tgttattgagggagt

SEQ ID NO: 383927 - DNA, 15 bp, Homo sapiens
ttgttattgagggag

SEQ ID NO: 383928 - DNA, 15 bp, Homo sapiens
tttgttattgaggga

SEQ ID NO: 383929 - DNA, 15 bp, Homo sapiens
ttttgttattgaggg

SEQ ID NO: 383930 - DNA, 15 bp, Homo sapiens
attttgttattgagg

SEQ ID NO: 383931 - DNA, 15 bp, Homo sapiens
aattttgttattgag

SEQ ID NO: 383932 - DNA, 15 bp, Homo sapiens
taattttgttattga

SEQ ID NO: 383933 - DNA, 15 bp, Homo sapiens
ttaattttgttattg

SEQ ID NO: 383934 - DNA, 15 bp, Homo sapiens
attaattttgttatt

SEQ ID NO: 383935 - DNA, 15 bp, Homo sapiens
aattaattttgttat

SEQ ID NO: 383936 - DNA, 15 bp, Homo sapiens
gaattaattttgtta

SEQ ID NO: 383937 - DNA, 15 bp, Homo sapiens
tgaattaattttgtt

SEQ ID NO: 383938 - DNA, 15 bp, Homo sapiens
atgaattaattttgt

SEQ ID NO: 383939 - DNA, 15 bp, Homo sapiens
aatgaattaattttg

SEQ ID NO: 383940 - DNA, 15 bp, Homo sapiens
gaatgaattaatttt

SEQ ID NO: 383941 - DNA, 15 bp, Homo sapiens
agaatgaattaattt

SEQ ID NO: 383942 - DNA, 15 bp, Homo sapiens
aagaatgaattaatt

SEQ ID NO: 383943 - DNA, 15 bp, Homo sapiens
caagaatgaattaat

SEQ ID NO: 383944 - DNA, 15 bp, Homo sapiens
tcaagaatgaattaa

SEQ ID NO: 383945 - DNA, 15 bp, Homo sapiens
ttcaagaatgaatta

SEQ ID NO: 383946 - DNA, 15 bp, Homo sapiens
cttcaagaatgaatt

SEQ ID NO: 383947 - DNA, 15 bp, Homo sapiens
ccttcaagaatgaat

SEQ ID NO: 383948 - DNA, 15 bp, Homo sapiens
gccttcaagaatgaa

SEQ ID NO: 383949 - DNA, 15 bp, Homo sapiens
tgccttcaagaatga

SEQ ID NO: 383950 - DNA, 15 bp, Homo sapiens
ctgccttcaagaatg

SEQ ID NO: 383951 - DNA, 15 bp, Homo sapiens
tctgccttcaagaat

SEQ ID NO: 383952 - DNA, 15 bp, Homo sapiens
ctctgccttcaagaa

SEQ ID NO: 383953 - DNA, 15 bp, Homo sapiens
gctctgccttcaaga

SEQ ID NO: 383954 - DNA, 15 bp, Homo sapiens
ggctctgccttcaag

SEQ ID NO: 383955 - DNA, 15 bp, Homo sapiens
aggctctgccttcaa

SEQ ID NO: 383956 - DNA, 15 bp, Homo sapiens
aaggctctgccttca

SEQ ID NO: 383957 - DNA, 15 bp, Homo sapiens
gaaggctctgccttc

SEQ ID NO: 383958 - DNA, 15 bp, Homo sapiens
tgaaggctctgcctt

SEQ ID NO: 383959 - DNA, 15 bp, Homo sapiens
atgaaggctctgcct

SEQ ID NO: 383960 - DNA, 15 bp, Homo sapiens
catgaaggctctgcc

SEQ ID NO: 383961 - DNA, 15 bp, Homo sapiens
tcatgaaggctctgc

SEQ ID NO: 383962 - DNA, 15 bp, Homo sapiens
gtcatgaaggctctg

SEQ ID NO: 383963 - DNA, 15 bp, Homo sapiens
ggtcatgaaggctct

SEQ ID NO: 383964 - DNA, 15 bp, Homo sapiens
aggtcatgaaggctc

SEQ ID NO: 383965 - DNA, 15 bp, Homo sapiens
taggtcatgaaggct

SEQ ID NO: 383966 - DNA, 15 bp, Homo sapiens
ttaggtcatgaaggc

SEQ ID NO: 383967 - DNA, 15 bp, Homo sapiens
attaggtcatgaagg

SEQ ID NO: 383968 - DNA, 15 bp, Homo sapiens
aattaggtcatgaag

SEQ ID NO: 383969 - DNA, 15 bp, Homo sapiens
taattaggtcatgaa

SEQ ID NO: 383970 - DNA, 15 bp, Homo sapiens
gtaattaggtcatga

SEQ ID NO: 383971 - DNA, 15 bp, Homo sapiens
ggtaattaggtcatg

SEQ ID NO: 383972 - DNA, 15 bp, Homo sapiens
tggtaattaggtcat

SEQ ID NO: 383973 - DNA, 15 bp, Homo sapiens
gtggtaattaggtca

SEQ ID NO: 383974 - DNA, 15 bp, Homo sapiens
agtggtaattaggtc

SEQ ID NO: 383975 - DNA, 15 bp, Homo sapiens
gagtggtaattaggt

SEQ ID NO: 383976 - DNA, 15 bp, Homo sapiens
tgagtggtaattagg

SEQ ID NO: 383977 - DNA, 15 bp, Homo sapiens
gtgagtggtaattag

SEQ ID NO: 383978 - DNA, 15 bp, Homo sapiens
tgtgagtggtaatta

SEQ ID NO: 383979 - DNA, 15 bp, Homo sapiens
ctgtgagtggtaatt

SEQ ID NO: 383980 - DNA, 15 bp, Homo sapiens
cctgtgagtggtaat

SEQ ID NO: 383981 - DNA, 15 bp, Homo sapiens
acctgtgagtggtaa

SEQ ID NO: 383982 - DNA, 15 bp, Homo sapiens
gacctgtgagtggta

SEQ ID NO: 383983 - DNA, 15 bp, Homo sapiens
ggacctgtgagtggt

SEQ ID NO: 383984 - DNA, 15 bp, Homo sapiens
gggacctgtgagtgg

SEQ ID NO: 383985 - DNA, 15 bp, Homo sapiens
tgggacctgtgagtg

SEQ ID NO: 383986 - DNA, 15 bp, Homo sapiens
gtgggacctgtgagt

SEQ ID NO: 383987 - DNA, 15 bp, Homo sapiens
ggtgggacctgtgag

SEQ ID NO: 383988 - DNA, 15 bp, Homo sapiens
aggtgggacctgtga

SEQ ID NO: 383989 - DNA, 15 bp, Homo sapiens
aaggtgggacctgtg

SEQ ID NO: 383990 - DNA, 15 bp, Homo sapiens
aaaggtgggacctgt

SEQ ID NO: 383991 - DNA, 15 bp, Homo sapiens
gaaaggtgggacctg

SEQ ID NO: 383992 - DNA, 15 bp, Homo sapiens
tgaaaggtgggacct

SEQ ID NO: 383993 - DNA, 15 bp, Homo sapiens
ttgaaaggtgggacc

SEQ ID NO: 383994 - DNA, 15 bp, Homo sapiens
gttgaaaggtgggac

SEQ ID NO: 383995 - DNA, 15 bp, Homo sapiens
tgttgaaaggtggga

SEQ ID NO: 383996 - DNA, 15 bp, Homo sapiens
gtgttgaaaggtggg

SEQ ID NO: 383997 - DNA, 15 bp, Homo sapiens
agtgttgaaaggtgg

SEQ ID NO: 383998 - DNA, 15 bp, Homo sapiens
aagtgttgaaaggtg

SEQ ID NO: 383999 - DNA, 15 bp, Homo sapiens
aaagtgttgaaaggt

SEQ ID NO: 384000 - DNA, 15 bp, Homo sapiens
aaaagtgttgaaagg

SEQ ID NO: 384001 - DNA, 15 bp, Homo sapiens
caaaagtgttgaaag

SEQ ID NO: 384002 - DNA, 15 bp, Homo sapiens
gcaaaagtgttgaaa

SEQ ID NO: 384003 - DNA, 15 bp, Homo sapiens
tgcaaaagtgttgaa

SEQ ID NO: 384004 - DNA, 15 bp, Homo sapiens
gtgcaaaagtgttga

SEQ ID NO: 384005 - DNA, 15 bp, Homo sapiens
agtgcaaaagtgttg

SEQ ID NO: 384006 - DNA, 15 bp, Homo sapiens
aagtgcaaaagtgtt

SEQ ID NO: 384007 - DNA, 15 bp, Homo sapiens
caagtgcaaaagtgt

SEQ ID NO: 384008 - DNA, 15 bp, Homo sapiens
ccaagtgcaaaagtg

SEQ ID NO: 384009 - DNA, 15 bp, Homo sapiens
cccaagtgcaaaagt

SEQ ID NO: 384010 - DNA, 15 bp, Homo sapiens
tcccaagtgcaaaag

SEQ ID NO: 384011 - DNA, 15 bp, Homo sapiens
atcccaagtgcaaaa

SEQ ID NO: 384012 - DNA, 15 bp, Homo sapiens
aatcccaagtgcaaa

SEQ ID NO: 384013 - DNA, 15 bp, Homo sapiens
aaatcccaagtgcaa

SEQ ID NO: 384014 - DNA, 15 bp, Homo sapiens
aaaatcccaagtgca

SEQ ID NO: 384015 - DNA, 15 bp, Homo sapiens
gaaaatcccaagtgc

SEQ ID NO: 384016 - DNA, 15 bp, Homo sapiens
tgaaaatcccaagtg

SEQ ID NO: 384017 - DNA, 15 bp, Homo sapiens
ttgaaaatcccaagt

SEQ ID NO: 384018 - DNA, 15 bp, Homo sapiens
tttgaaaatcccaag

SEQ ID NO: 384019 - DNA, 15 bp, Homo sapiens
gtttgaaaatcccaa

SEQ ID NO: 384020 - DNA, 15 bp, Homo sapiens
tgtttgaaaatccca

SEQ ID NO: 384021 - DNA, 15 bp, Homo sapiens
gtgtttgaaaatccc

SEQ ID NO: 384022 - DNA, 15 bp, Homo sapiens
tgtgtttgaaaatcc

SEQ ID NO: 384023 - DNA, 15 bp, Homo sapiens
gtgtgtttgaaaatc

SEQ ID NO: 384024 - DNA, 15 bp, Homo sapiens
agtgtgtttgaaaat

SEQ ID NO: 384025 - DNA, 15 bp, Homo sapiens
tagtgtgtttgaaaa

SEQ ID NO: 384026 - DNA, 15 bp, Homo sapiens
ctagtgtgtttgaaa

SEQ ID NO: 384027 - DNA, 15 bp, Homo sapiens
actagtgtgtttgaa

SEQ ID NO: 384028 - DNA, 15 bp, Homo sapiens
aactagtgtgtttga

SEQ ID NO: 384029 - DNA, 15 bp, Homo sapiens
aaactagtgtgtttg

SEQ ID NO: 384030 - DNA, 15 bp, Homo sapiens
aaaactagtgtgttt

SEQ ID NO: 384031 - DNA, 15 bp, Homo sapiens
aaaaactagtgtgtt

SEQ ID NO: 384032 - DNA, 15 bp, Homo sapiens
taaaaactagtgtgt

SEQ ID NO: 384033 - DNA, 15 bp, Homo sapiens
ttaaaaactagtgtg

SEQ ID NO: 384034 - DNA, 15 bp, Homo sapiens
tttaaaaactagtgt

SEQ ID NO: 384035 - DNA, 15 bp, Homo sapiens
ttttaaaaactagtg

SEQ ID NO: 384036 - DNA, 15 bp, Homo sapiens
attttaaaaactagt

SEQ ID NO: 384037 - DNA, 15 bp, Homo sapiens
tattttaaaaactag

SEQ ID NO: 384038 - DNA, 15 bp, Homo sapiens
atattttaaaaacta

SEQ ID NO: 384039 - DNA, 15 bp, Homo sapiens
aatattttaaaaact

SEQ ID NO: 384040 - DNA, 15 bp, Homo sapiens
taatattttaaaaac

SEQ ID NO: 384041 - DNA, 15 bp, Homo sapiens
ttaatattttaaaaa

SEQ ID NO: 384042 - DNA, 15 bp, Homo sapiens
attaatattttaaaa

SEQ ID NO: 384043 - DNA, 15 bp, Homo sapiens
cattaatattttaaa

SEQ ID NO: 384044 - DNA, 15 bp, Homo sapiens
acattaatattttaa

SEQ ID NO: 384045 - DNA, 15 bp, Homo sapiens
aacattaatatttta

SEQ ID NO: 384046 - DNA, 15 bp, Homo sapiens
aaacattaatatttt

SEQ ID NO: 384047 - DNA, 15 bp, Homo sapiens
gaaacattaatattt

SEQ ID NO: 384048 - DNA, 15 bp, Homo sapiens
agaaacattaatatt

SEQ ID NO: 384049 - DNA, 15 bp, Homo sapiens
gagaaacattaatat

SEQ ID NO: 384050 - DNA, 15 bp, Homo sapiens
ggagaaacattaata

SEQ ID NO: 384051 - DNA, 15 bp, Homo sapiens
aggagaaacattaat

SEQ ID NO: 384052 - DNA, 15 bp, Homo sapiens
aaggagaaacattaa

SEQ ID NO: 384053 - DNA, 15 bp, Homo sapiens
taaggagaaacatta

SEQ ID NO: 384054 - DNA, 15 bp, Homo sapiens
ataaggagaaacatt

SEQ ID NO: 384055 - DNA, 15 bp, Homo sapiens
aataaggagaaacat

SEQ ID NO: 384056 - DNA, 15 bp, Homo sapiens
taataaggagaaaca

SEQ ID NO: 384057 - DNA, 15 bp, Homo sapiens
gtaataaggagaaac

SEQ ID NO: 384058 - DNA, 15 bp, Homo sapiens
tgtaataaggagaaa

SEQ ID NO: 384059 - DNA, 15 bp, Homo sapiens
gtgtaataaggagaa

SEQ ID NO: 384060 - DNA, 15 bp, Homo sapiens
tgtgtaataaggaga

SEQ ID NO: 384061 - DNA, 15 bp, Homo sapiens
gtgtgtaataaggag

SEQ ID NO: 384062 - DNA, 15 bp, Homo sapiens
agtgtgtaataagga

SEQ ID NO: 384063 - DNA, 15 bp, Homo sapiens
aagtgtgtaataagg

SEQ ID NO: 384064 - DNA, 15 bp, Homo sapiens
taagtgtgtaataag

SEQ ID NO: 384065 - DNA, 15 bp, Homo sapiens
ttaagtgtgtaataa

SEQ ID NO: 384066 - DNA, 15 bp, Homo sapiens
tttaagtgtgtaata

SEQ ID NO: 384067 - DNA, 15 bp, Homo sapiens
ttttaagtgtgtaat

SEQ ID NO: 384068 - DNA, 15 bp, Homo sapiens
attttaagtgtgtaa

SEQ ID NO: 384069 - DNA, 15 bp, Homo sapiens
aattttaagtgtgta

SEQ ID NO: 384070 - DNA, 15 bp, Homo sapiens
aaattttaagtgtgt

SEQ ID NO: 384071 - DNA, 15 bp, Homo sapiens
aaaattttaagtgtg

SEQ ID NO: 384072 - DNA, 15 bp, Homo sapiens
taaaattttaagtgt

SEQ ID NO: 384073 - DNA, 15 bp, Homo sapiens
ataaaattttaagtg

SEQ ID NO: 384074 - DNA, 15 bp, Homo sapiens
aataaaattttaagt

SEQ ID NO: 384075 - DNA, 15 bp, Homo sapiens
aaataaaattttaag

SEQ ID NO: 384076 - DNA, 15 bp, Homo sapiens
gaaataaaattttaa

SEQ ID NO: 384077 - DNA, 15 bp, Homo sapiens
tgaaataaaatttta

SEQ ID NO: 384078 - DNA, 15 bp, Homo sapiens
atgaaataaaatttt

SEQ ID NO: 384079 - DNA, 15 bp, Homo sapiens
catgaaataaaattt

SEQ ID NO: 384080 - DNA, 15 bp, Homo sapiens
tcatgaaataaaatt

SEQ ID NO: 384081 - DNA, 15 bp, Homo sapiens
atcatgaaataaaat

SEQ ID NO: 384082 - DNA, 15 bp, Homo sapiens
tatcatgaaataaaa

SEQ ID NO: 384083 - DNA, 15 bp, Homo sapiens
atatcatgaaataaa

SEQ ID NO: 384084 - DNA, 15 bp, Homo sapiens
tatatcatgaaataa

SEQ ID NO: 384085 - DNA, 15 bp, Homo sapiens
gtatatcatgaaata

SEQ ID NO: 384086 - DNA, 15 bp, Homo sapiens
tgtatatcatgaaat

SEQ ID NO: 384087 - DNA, 15 bp, Homo sapiens
atgtatatcatgaaa

SEQ ID NO: 384088 - DNA, 15 bp, Homo sapiens
aatgtatatcatgaa

SEQ ID NO: 384089 - DNA, 15 bp, Homo sapiens
aaatgtatatcatga

SEQ ID NO: 384090 - DNA, 15 bp, Homo sapiens
caaatgtatatcatg

SEQ ID NO: 384091 - DNA, 15 bp, Homo sapiens
acaaatgtatatcat

SEQ ID NO: 384092 - DNA, 15 bp, Homo sapiens
tacaaatgtatatca

SEQ ID NO: 384093 - DNA, 15 bp, Homo sapiens
atacaaatgtatatc

SEQ ID NO: 384094 - DNA, 15 bp, Homo sapiens
tatacaaatgtatat

SEQ ID NO: 384095 - DNA, 15 bp, Homo sapiens
atatacaaatgtata

SEQ ID NO: 384096 - DNA, 15 bp, Homo sapiens
gatatacaaatgtat

SEQ ID NO: 384097 - DNA, 15 bp, Homo sapiens
tgatatacaaatgta

SEQ ID NO: 384098 - DNA, 15 bp, Homo sapiens
gtgatatacaaatgt

SEQ ID NO: 384099 - DNA, 15 bp, Homo sapiens
tgtgatatacaaatg

SEQ ID NO: 384100 - DNA, 15 bp, Homo sapiens
atgtgatatacaaat

SEQ ID NO: 384101 - DNA, 15 bp, Homo sapiens
aatgtgatatacaaa

SEQ ID NO: 384102 - DNA, 15 bp, Homo sapiens
aaatgtgatatacaa

SEQ ID NO: 384103 - DNA, 15 bp, Homo sapiens
aaaatgtgatataca

SEQ ID NO: 384104 - DNA, 15 bp, Homo sapiens
gaaaatgtgatatac

SEQ ID NO: 384105 - DNA, 15 bp, Homo sapiens
tgaaaatgtgatata

SEQ ID NO: 384106 - DNA, 15 bp, Homo sapiens
atgaaaatgtgatat

SEQ ID NO: 384107 - DNA, 15 bp, Homo sapiens
gatgaaaatgtgata

SEQ ID NO: 384108 - DNA, 15 bp, Homo sapiens
tgatgaaaatgtgat

SEQ ID NO: 384109 - DNA, 15 bp, Homo sapiens
ctgatgaaaatgtga

SEQ ID NO: 384110 - DNA, 15 bp, Homo sapiens
cctgatgaaaatgtg

SEQ ID NO: 384111 - DNA, 15 bp, Homo sapiens
acctgatgaaaatgt

SEQ ID NO: 384112 - DNA, 15 bp, Homo sapiens
aacctgatgaaaatg

SEQ ID NO: 384113 - DNA, 15 bp, Homo sapiens
taacctgatgaaaat

SEQ ID NO: 384114 - DNA, 15 bp, Homo sapiens
ttaacctgatgaaaa

SEQ ID NO: 384115 - DNA, 15 bp, Homo sapiens
tttaacctgatgaaa

SEQ ID NO: 384116 - DNA, 15 bp, Homo sapiens
atttaacctgatgaa

SEQ ID NO: 384117 - DNA, 15 bp, Homo sapiens
tatttaacctgatga

SEQ ID NO: 384118 - DNA, 15 bp, Homo sapiens
ttatttaacctgatg

SEQ ID NO: 384119 - DNA, 15 bp, Homo sapiens
attatttaacctgat

SEQ ID NO: 384120 - DNA, 15 bp, Homo sapiens
aattatttaacctga

SEQ ID NO: 384121 - DNA, 15 bp, Homo sapiens
taattatttaacctg

SEQ ID NO: 384122 - DNA, 15 bp, Homo sapiens
gtaattatttaacct

SEQ ID NO: 384123 - DNA, 15 bp, Homo sapiens
ggtaattatttaacc

SEQ ID NO: 384124 - DNA, 15 bp, Homo sapiens
gggtaattatttaac

SEQ ID NO: 384125 - DNA, 15 bp, Homo sapiens
tgggtaattatttaa

SEQ ID NO: 384126 - DNA, 15 bp, Homo sapiens
atgggtaattattta

SEQ ID NO: 384127 - DNA, 15 bp, Homo sapiens
catgggtaattattt

SEQ ID NO: 384128 - DNA, 15 bp, Homo sapiens
acatgggtaattatt

SEQ ID NO: 384129 - DNA, 15 bp, Homo sapiens
tacatgggtaattat

SEQ ID NO: 384130 - DNA, 15 bp, Homo sapiens
atacatgggtaatta

SEQ ID NO: 384131 - DNA, 15 bp, Homo sapiens
tatacatgggtaatt

SEQ ID NO: 384132 - DNA, 15 bp, Homo sapiens
atatacatgggtaat

SEQ ID NO: 384133 - DNA, 15 bp, Homo sapiens
tatatacatgggtaa

SEQ ID NO: 384134 - DNA, 15 bp, Homo sapiens
atatatacatgggta

SEQ ID NO: 384135 - DNA, 15 bp, Homo sapiens
catatatacatgggt

SEQ ID NO: 384136 - DNA, 15 bp, Homo sapiens
acatatatacatggg

SEQ ID NO: 384137 - DNA, 15 bp, Homo sapiens
cacatatatacatgg

SEQ ID NO: 384138 - DNA, 15 bp, Homo sapiens
acacatatatacatg

SEQ ID NO: 384139 - DNA, 15 bp, Homo sapiens
tacacatatatacat

SEQ ID NO: 384140 - DNA, 15 bp, Homo sapiens
ttacacatatataca

SEQ ID NO: 384141 - DNA, 15 bp, Homo sapiens
cttacacatatatac

SEQ ID NO: 384142 - DNA, 15 bp, Homo sapiens
acttacacatatata

SEQ ID NO: 384143 - DNA, 15 bp, Homo sapiens
cacttacacatatat

SEQ ID NO: 384144 - DNA, 15 bp, Homo sapiens
acacttacacatata

SEQ ID NO: 384145 - DNA, 15 bp, Homo sapiens
gacacttacacatat

SEQ ID NO: 384146 - DNA, 15 bp, Homo sapiens
tgacacttacacata

SEQ ID NO: 384147 - DNA, 15 bp, Homo sapiens
gtgacacttacacat

SEQ ID NO: 384148 - DNA, 15 bp, Homo sapiens
tgtgacacttacaca

SEQ ID NO: 384149 - DNA, 15 bp, Homo sapiens
atgtgacacttacac

SEQ ID NO: 384150 - DNA, 15 bp, Homo sapiens
gatgtgacacttaca

SEQ ID NO: 384151 - DNA, 15 bp, Homo sapiens
ggatgtgacacttac

SEQ ID NO: 384152 - DNA, 15 bp, Homo sapiens
tggatgtgacactta

SEQ ID NO: 384153 - DNA, 15 bp, Homo sapiens
ctggatgtgacactt

SEQ ID NO: 384154 - DNA, 15 bp, Homo sapiens
actggatgtgacact

SEQ ID NO: 384155 - DNA, 15 bp, Homo sapiens
cactggatgtgacac

SEQ ID NO: 384156 - DNA, 15 bp, Homo sapiens
gcactggatgtgaca

SEQ ID NO: 384157 - DNA, 15 bp, Homo sapiens
agcactggatgtgac

SEQ ID NO: 384158 - DNA, 15 bp, Homo sapiens
gagcactggatgtga

SEQ ID NO: 384159 - DNA, 15 bp, Homo sapiens
agagcactggatgtg

SEQ ID NO: 384160 - DNA, 15 bp, Homo sapiens
cagagcactggatgt

SEQ ID NO: 384161 - DNA, 15 bp, Homo sapiens
acagagcactggatg

SEQ ID NO: 384162 - DNA, 15 bp, Homo sapiens
cacagagcactggat

SEQ ID NO: 384163 - DNA, 15 bp, Homo sapiens
gcacagagcactgga

SEQ ID NO: 384164 - DNA, 15 bp, Homo sapiens
tgcacagagcactgg

SEQ ID NO: 384165 - DNA, 15 bp, Homo sapiens
ctgcacagagcactg

SEQ ID NO: 384166 - DNA, 15 bp, Homo sapiens
tctgcacagagcact

SEQ ID NO: 384167 - DNA, 15 bp, Homo sapiens
atctgcacagagcac

SEQ ID NO: 384168 - DNA, 15 bp, Homo sapiens
gatctgcacagagca

SEQ ID NO: 384169 - DNA, 15 bp, Homo sapiens
tgatctgcacagagc

SEQ ID NO: 384170 - DNA, 15 bp, Homo sapiens
ctgatctgcacagag

SEQ ID NO: 384171 - DNA, 15 bp, Homo sapiens
cctgatctgcacaga

SEQ ID NO: 384172 - DNA, 15 bp, Homo sapiens
gcctgatctgcacag

SEQ ID NO: 384173 - DNA, 15 bp, Homo sapiens
tgcctgatctgcaca

SEQ ID NO: 384174 - DNA, 15 bp, Homo sapiens
ttgcctgatctgcac

SEQ ID NO: 384175 - DNA, 15 bp, Homo sapiens
cttgcctgatctgca

SEQ ID NO: 384176 - DNA, 15 bp, Homo sapiens
tcttgcctgatctgc

SEQ ID NO: 384177 - DNA, 15 bp, Homo sapiens
ttcttgcctgatctg

SEQ ID NO: 384178 - DNA, 15 bp, Homo sapiens
cttcttgcctgatct

SEQ ID NO: 384179 - DNA, 15 bp, Homo sapiens
gcttcttgcctgatc

SEQ ID NO: 384180 - DNA, 15 bp, Homo sapiens
tgcttcttgcctgat

SEQ ID NO: 384181 - DNA, 15 bp, Homo sapiens
ttgcttcttgcctga

SEQ ID NO: 384182 - DNA, 15 bp, Homo sapiens
tttgcttcttgcctg

SEQ ID NO: 384183 - DNA, 15 bp, Homo sapiens
ttttgcttcttgcct

SEQ ID NO: 384184 - DNA, 15 bp, Homo sapiens
attttgcttcttgcc

SEQ ID NO: 384185 - DNA, 15 bp, Homo sapiens
tattttgcttcttgc

SEQ ID NO: 384186 - DNA, 15 bp, Homo sapiens
atattttgcttcttg

SEQ ID NO: 384187 - DNA, 15 bp, Homo sapiens
gatattttgcttctt

SEQ ID NO: 384188 - DNA, 15 bp, Homo sapiens
agatattttgcttct

SEQ ID NO: 384189 - DNA, 15 bp, Homo sapiens
tagatattttgcttc

SEQ ID NO: 384190 - DNA, 15 bp, Homo sapiens
gtagatattttgctt

SEQ ID NO: 384191 - DNA, 15 bp, Homo sapiens
agtagatattttgct

SEQ ID NO: 384192 - DNA, 15 bp, Homo sapiens
cagtagatattttgc

SEQ ID NO: 384193 - DNA, 15 bp, Homo sapiens
ccagtagatattttg

SEQ ID NO: 384194 - DNA, 15 bp, Homo sapiens
cccagtagatatttt

SEQ ID NO: 384195 - DNA, 15 bp, Homo sapiens
tcccagtagatattt

SEQ ID NO: 384196 - DNA, 15 bp, Homo sapiens
ttcccagtagatatt

SEQ ID NO: 384197 - DNA, 15 bp, Homo sapiens
tttcccagtagatat

SEQ ID NO: 384198 - DNA, 15 bp, Homo sapiens
ttttcccagtagata

SEQ ID NO: 384199 - DNA, 15 bp, Homo sapiens
attttcccagtagat

SEQ ID NO: 384200 - DNA, 15 bp, Homo sapiens
cattttcccagtaga

SEQ ID NO: 384201 - DNA, 15 bp, Homo sapiens
acattttcccagtag

SEQ ID NO: 384202 - DNA, 15 bp, Homo sapiens
cacattttcccagta

SEQ ID NO: 384203 - DNA, 15 bp, Homo sapiens
acacattttcccagt

SEQ ID NO: 384204 - DNA, 15 bp, Homo sapiens
tacacattttcccag

SEQ ID NO: 384205 - DNA, 15 bp, Homo sapiens
gtacacattttccca

SEQ ID NO: 384206 - DNA, 15 bp, Homo sapiens
agtacacattttccc

SEQ ID NO: 384207 - DNA, 15 bp, Homo sapiens
aagtacacattttcc

SEQ ID NO: 384208 - DNA, 15 bp, Homo sapiens
gaagtacacattttc

SEQ ID NO: 384209 - DNA, 15 bp, Homo sapiens
agaagtacacatttt

SEQ ID NO: 384210 - DNA, 15 bp, Homo sapiens
aagaagtacacattt

SEQ ID NO: 384211 - DNA, 15 bp, Homo sapiens
taagaagtacacatt

SEQ ID NO: 384212 - DNA, 15 bp, Homo sapiens
ttaagaagtacacat

SEQ ID NO: 384213 - DNA, 15 bp, Homo sapiens
cttaagaagtacaca

SEQ ID NO: 384214 - DNA, 15 bp, Homo sapiens
ccttaagaagtacac

SEQ ID NO: 384215 - DNA, 15 bp, Homo sapiens
tccttaagaagtaca

SEQ ID NO: 384216 - DNA, 15 bp, Homo sapiens
ttccttaagaagtac

SEQ ID NO: 384217 - DNA, 15 bp, Homo sapiens
cttccttaagaagta

SEQ ID NO: 384218 - DNA, 15 bp, Homo sapiens
ccttccttaagaagt

SEQ ID NO: 384219 - DNA, 15 bp, Homo sapiens
cccttccttaagaag

SEQ ID NO: 384220 - DNA, 15 bp, Homo sapiens
gcccttccttaagaa

SEQ ID NO: 384221 - DNA, 15 bp, Homo sapiens
tgcccttccttaaga

SEQ ID NO: 384222 - DNA, 15 bp, Homo sapiens
atgcccttccttaag

SEQ ID NO: 384223 - DNA, 15 bp, Homo sapiens
aatgcccttccttaa

SEQ ID NO: 384224 - DNA, 15 bp, Homo sapiens
caatgcccttcctta

SEQ ID NO: 384225 - DNA, 15 bp, Homo sapiens
acaatgcccttcctt

SEQ ID NO: 384226 - DNA, 15 bp, Homo sapiens
aacaatgcccttcct

SEQ ID NO: 384227 - DNA, 15 bp, Homo sapiens
taacaatgcccttcc

SEQ ID NO: 384228 - DNA, 15 bp, Homo sapiens
ctaacaatgcccttc

SEQ ID NO: 384229 - DNA, 15 bp, Homo sapiens
cctaacaatgccctt

SEQ ID NO: 384230 - DNA, 15 bp, Homo sapiens
acctaacaatgccct

SEQ ID NO: 384231 - DNA, 15 bp, Homo sapiens
gacctaacaatgccc

SEQ ID NO: 384232 - DNA, 15 bp, Homo sapiens
agacctaacaatgcc

SEQ ID NO: 384233 - DNA, 15 bp, Homo sapiens
aagacctaacaatgc

SEQ ID NO: 384234 - DNA, 15 bp, Homo sapiens
gaagacctaacaatg

SEQ ID NO: 384235 - DNA, 15 bp, Homo sapiens
agaagacctaacaat

SEQ ID NO: 384236 - DNA, 15 bp, Homo sapiens
tagaagacctaacaa

SEQ ID NO: 384237 - DNA, 15 bp, Homo sapiens
ctagaagacctaaca

SEQ ID NO: 384238 - DNA, 15 bp, Homo sapiens
gctagaagacctaac

SEQ ID NO: 384239 - DNA, 15 bp, Homo sapiens
tgctagaagacctaa

SEQ ID NO: 384240 - DNA, 15 bp, Homo sapiens
ttgctagaagaccta

SEQ ID NO: 384241 - DNA, 15 bp, Homo sapiens
attgctagaagacct

SEQ ID NO: 384242 - DNA, 15 bp, Homo sapiens
aattgctagaagacc

SEQ ID NO: 384243 - DNA, 15 bp, Homo sapiens
aaattgctagaagac

SEQ ID NO: 384244 - DNA, 15 bp, Homo sapiens
taaattgctagaaga

SEQ ID NO: 384245 - DNA, 15 bp, Homo sapiens
ttaaattgctagaag

SEQ ID NO: 384246 - DNA, 15 bp, Homo sapiens
tttaaattgctagaa

SEQ ID NO: 384247 - DNA, 15 bp, Homo sapiens
atttaaattgctaga

SEQ ID NO: 384248 - DNA, 15 bp, Homo sapiens
gatttaaattgctag

SEQ ID NO: 384249 - DNA, 15 bp, Homo sapiens
agatttaaattgcta

SEQ ID NO: 384250 - DNA, 15 bp, Homo sapiens
tagatttaaattgct

SEQ ID NO: 384251 - DNA, 15 bp, Homo sapiens
ctagatttaaattgc

SEQ ID NO: 384252 - DNA, 15 bp, Homo sapiens
gctagatttaaattg

SEQ ID NO: 384253 - DNA, 15 bp, Homo sapiens
tgctagatttaaatt

SEQ ID NO: 384254 - DNA, 15 bp, Homo sapiens
atgctagatttaaat

SEQ ID NO: 384255 - DNA, 15 bp, Homo sapiens
aatgctagatttaaa

SEQ ID NO: 384256 - DNA, 15 bp, Homo sapiens
aaatgctagatttaa

SEQ ID NO: 384257 - DNA, 15 bp, Homo sapiens
gaaatgctagattta

SEQ ID NO: 384258 - DNA, 15 bp, Homo sapiens
agaaatgctagattt

SEQ ID NO: 384259 - DNA, 15 bp, Homo sapiens
gagaaatgctagatt

SEQ ID NO: 384260 - DNA, 15 bp, Homo sapiens
tgagaaatgctagat

SEQ ID NO: 384261 - DNA, 15 bp, Homo sapiens
ctgagaaatgctaga

SEQ ID NO: 384262 - DNA, 15 bp, Homo sapiens
tctgagaaatgctag

SEQ ID NO: 384263 - DNA, 15 bp, Homo sapiens
ctctgagaaatgcta

SEQ ID NO: 384264 - DNA, 15 bp, Homo sapiens
tctctgagaaatgct

SEQ ID NO: 384265 - DNA, 15 bp, Homo sapiens
atctctgagaaatgc

SEQ ID NO: 384266 - DNA, 15 bp, Homo sapiens
catctctgagaaatg

SEQ ID NO: 384267 - DNA, 15 bp, Homo sapiens
gcatctctgagaaat

SEQ ID NO: 384268 - DNA, 15 bp, Homo sapiens
ggcatctctgagaaa

SEQ ID NO: 384269 - DNA, 15 bp, Homo sapiens
aggcatctctgagaa

SEQ ID NO: 384270 - DNA, 15 bp, Homo sapiens
aaggcatctctgaga

SEQ ID NO: 384271 - DNA, 15 bp, Homo sapiens
aaaggcatctctgag

SEQ ID NO: 384272 - DNA, 15 bp, Homo sapiens
caaaggcatctctga

SEQ ID NO: 384273 - DNA, 15 bp, Homo sapiens
acaaaggcatctctg

SEQ ID NO: 384274 - DNA, 15 bp, Homo sapiens
aacaaaggcatctct

SEQ ID NO: 384275 - DNA, 15 bp, Homo sapiens
taacaaaggcatctc

SEQ ID NO: 384276 - DNA, 15 bp, Homo sapiens
ttaacaaaggcatct

SEQ ID NO: 384277 - DNA, 15 bp, Homo sapiens
attaacaaaggcatc

SEQ ID NO: 384278 - DNA, 15 bp, Homo sapiens
aattaacaaaggcat

SEQ ID NO: 384279 - DNA, 15 bp, Homo sapiens
aaattaacaaaggca

SEQ ID NO: 384280 - DNA, 15 bp, Homo sapiens
caaattaacaaaggc

SEQ ID NO: 384281 - DNA, 15 bp, Homo sapiens
acaaattaacaaagg

SEQ ID NO: 384282 - DNA, 15 bp, Homo sapiens
cacaaattaacaaag

SEQ ID NO: 384283 - DNA, 15 bp, Homo sapiens
acacaaattaacaaa

SEQ ID NO: 384284 - DNA, 15 bp, Homo sapiens
tacacaaattaacaa

SEQ ID NO: 384285 - DNA, 15 bp, Homo sapiens
ctacacaaattaaca

SEQ ID NO: 384286 - DNA, 15 bp, Homo sapiens
cctacacaaattaac

SEQ ID NO: 384287 - DNA, 15 bp, Homo sapiens
ccctacacaaattaa

SEQ ID NO: 384288 - DNA, 15 bp, Homo sapiens
cccctacacaaatta

SEQ ID NO: 384289 - DNA, 15 bp, Homo sapiens
gcccctacacaaatt

SEQ ID NO: 384290 - DNA, 15 bp, Homo sapiens
tgcccctacacaaat

SEQ ID NO: 384291 - DNA, 15 bp, Homo sapiens
ctgcccctacacaaa

SEQ ID NO: 384292 - DNA, 15 bp, Homo sapiens
actgcccctacacaa

SEQ ID NO: 384293 - DNA, 15 bp, Homo sapiens
aactgcccctacaca

SEQ ID NO: 384294 - DNA, 15 bp, Homo sapiens
gaactgcccctacac

SEQ ID NO: 384295 - DNA, 15 bp, Homo sapiens
agaactgcccctaca

SEQ ID NO: 384296 - DNA, 15 bp, Homo sapiens
tagaactgcccctac

SEQ ID NO: 384297 - DNA, 15 bp, Homo sapiens
ttagaactgccccta

SEQ ID NO: 384298 - DNA, 15 bp, Homo sapiens
cttagaactgcccct

SEQ ID NO: 384299 - DNA, 15 bp, Homo sapiens
tcttagaactgcccc

SEQ ID NO: 384300 - DNA, 15 bp, Homo sapiens
ctcttagaactgccc

SEQ ID NO: 384301 - DNA, 15 bp, Homo sapiens
tctcttagaactgcc

SEQ ID NO: 384302 - DNA, 15 bp, Homo sapiens
atctcttagaactgc

SEQ ID NO: 384303 - DNA, 15 bp, Homo sapiens
tatctcttagaactg

SEQ ID NO: 384304 - DNA, 15 bp, Homo sapiens
ctatctcttagaact

SEQ ID NO: 384305 - DNA, 15 bp, Homo sapiens
gctatctcttagaac

SEQ ID NO: 384306 - DNA, 15 bp, Homo sapiens
cgctatctcttagaa

SEQ ID NO: 384307 - DNA, 15 bp, Homo sapiens
tcgctatctcttaga

SEQ ID NO: 384308 - DNA, 15 bp, Homo sapiens
ttcgctatctcttag

SEQ ID NO: 384309 - DNA, 15 bp, Homo sapiens
tttcgctatctctta

SEQ ID NO: 384310 - DNA, 15 bp, Homo sapiens
ttttcgctatctctt

SEQ ID NO: 384311 - DNA, 15 bp, Homo sapiens
attttcgctatctct

SEQ ID NO: 384312 - DNA, 15 bp, Homo sapiens
tattttcgctatctc

SEQ ID NO: 384313 - DNA, 15 bp, Homo sapiens
atattttcgctatct

SEQ ID NO: 384314 - DNA, 15 bp, Homo sapiens
catattttcgctatc

SEQ ID NO: 384315 - DNA, 15 bp, Homo sapiens
tcatattttcgctat

SEQ ID NO: 384316 - DNA, 15 bp, Homo sapiens
ttcatattttcgcta

SEQ ID NO: 384317 - DNA, 15 bp, Homo sapiens
cttcatattttcgct

SEQ ID NO: 384318 - DNA, 15 bp, Homo sapiens
tcttcatattttcgc

SEQ ID NO: 384319 - DNA, 15 bp, Homo sapiens
atcttcatattttcg

SEQ ID NO: 384320 - DNA, 15 bp, Homo sapiens
catcttcatattttc

SEQ ID NO: 384321 - DNA, 15 bp, Homo sapiens
tcatcttcatatttt

SEQ ID NO: 384322 - DNA, 15 bp, Homo sapiens
ttcatcttcatattt

SEQ ID NO: 384323 - DNA, 15 bp, Homo sapiens
gttcatcttcatatt

SEQ ID NO: 384324 - DNA, 15 bp, Homo sapiens
cgttcatcttcatat

SEQ ID NO: 384325 - DNA, 15 bp, Homo sapiens
acgttcatcttcata

SEQ ID NO: 384326 - DNA, 15 bp, Homo sapiens
cacgttcatcttcat

SEQ ID NO: 384327 - DNA, 15 bp, Homo sapiens
gcacgttcatcttca

SEQ ID NO: 384328 - DNA, 15 bp, Homo sapiens
ggcacgttcatcttc

SEQ ID NO: 384329 - DNA, 15 bp, Homo sapiens
tggcacgttcatctt

SEQ ID NO: 384330 - DNA, 15 bp, Homo sapiens
atggcacgttcatct

SEQ ID NO: 384331 - DNA, 15 bp, Homo sapiens
gatggcacgttcatc

SEQ ID NO: 384332 - DNA, 15 bp, Homo sapiens
ggatggcacgttcat

SEQ ID NO: 384333 - DNA, 15 bp, Homo sapiens
cggatggcacgttca

SEQ ID NO: 384334 - DNA, 15 bp, Homo sapiens
ccggatggcacgttc

SEQ ID NO: 384335 - DNA, 15 bp, Homo sapiens
cccggatggcacgtt

SEQ ID NO: 384336 - DNA, 15 bp, Homo sapiens
gcccggatggcacgt

SEQ ID NO: 384337 - DNA, 15 bp, Homo sapiens
agcccggatggcacg

SEQ ID NO: 384338 - DNA, 15 bp, Homo sapiens
cagcccggatggcac

SEQ ID NO: 384339 - DNA, 15 bp, Homo sapiens
acagcccggatggca

SEQ ID NO: 384340 - DNA, 15 bp, Homo sapiens
tacagcccggatggc

SEQ ID NO: 384341 - DNA, 15 bp, Homo sapiens
gtacagcccggatgg

SEQ ID NO: 384342 - DNA, 15 bp, Homo sapiens
ggtacagcccggatg

SEQ ID NO: 384343 - DNA, 15 bp, Homo sapiens
aggtacagcccggat

SEQ ID NO: 384344 - DNA, 15 bp, Homo sapiens
aaggtacagcccgga

SEQ ID NO: 384345 - DNA, 15 bp, Homo sapiens
caaggtacagcccgg

SEQ ID NO: 384346 - DNA, 15 bp, Homo sapiens
gcaaggtacagcccg

SEQ ID NO: 384347 - DNA, 15 bp, Homo sapiens
agcaaggtacagccc

SEQ ID NO: 384348 - DNA, 15 bp, Homo sapiens
tagcaaggtacagcc

SEQ ID NO: 384349 - DNA, 15 bp, Homo sapiens
ctagcaaggtacagc

SEQ ID NO: 384350 - DNA, 15 bp, Homo sapiens
tctagcaaggtacag

SEQ ID NO: 384351 - DNA, 15 bp, Homo sapiens
gtctagcaaggtaca

SEQ ID NO: 384352 - DNA, 15 bp, Homo sapiens
tgtctagcaaggtac

SEQ ID NO: 384353 - DNA, 15 bp, Homo sapiens
gtgtctagcaaggta

SEQ ID NO: 384354 - DNA, 15 bp, Homo sapiens
tgtgtctagcaaggt

SEQ ID NO: 384355 - DNA, 15 bp, Homo sapiens
atgtgtctagcaagg

SEQ ID NO: 384356 - DNA, 15 bp, Homo sapiens
catgtgtctagcaag

SEQ ID NO: 384357 - DNA, 15 bp, Homo sapiens
tcatgtgtctagcaa

SEQ ID NO: 384358 - DNA, 15 bp, Homo sapiens
atcatgtgtctagca

SEQ ID NO: 384359 - DNA, 15 bp, Homo sapiens
tatcatgtgtctagc

SEQ ID NO: 384360 - DNA, 15 bp, Homo sapiens
ctatcatgtgtctag

SEQ ID NO: 384361 - DNA, 15 bp, Homo sapiens
tctatcatgtgtcta

SEQ ID NO: 384362 - DNA, 15 bp, Homo sapiens
ttctatcatgtgtct

SEQ ID NO: 384363 - DNA, 15 bp, Homo sapiens
cttctatcatgtgtc

SEQ ID NO: 384364 - DNA, 15 bp, Homo sapiens
tcttctatcatgtgt

SEQ ID NO: 384365 - DNA, 15 bp, Homo sapiens
gtcttctatcatgtg

SEQ ID NO: 384366 - DNA, 15 bp, Homo sapiens
ggtcttctatcatgt

SEQ ID NO: 384367 - DNA, 15 bp, Homo sapiens
aggtcttctatcatg

SEQ ID NO: 384368 - DNA, 15 bp, Homo sapiens
caggtcttctatcat

SEQ ID NO: 384369 - DNA, 15 bp, Homo sapiens
tcaggtcttctatca

SEQ ID NO: 384370 - DNA, 15 bp, Homo sapiens
atcaggtcttctatc

SEQ ID NO: 384371 - DNA, 15 bp, Homo sapiens
catcaggtcttctat

SEQ ID NO: 384372 - DNA, 15 bp, Homo sapiens
tcatcaggtcttcta

SEQ ID NO: 384373 - DNA, 15 bp, Homo sapiens
atcatcaggtcttct

SEQ ID NO: 384374 - DNA, 15 bp, Homo sapiens
catcatcaggtcttc

SEQ ID NO: 384375 - DNA, 15 bp, Homo sapiens
gcatcatcaggtctt

SEQ ID NO: 384376 - DNA, 15 bp, Homo sapiens
agcatcatcaggtct

SEQ ID NO: 384377 - DNA, 15 bp, Homo sapiens
cagcatcatcaggtc

SEQ ID NO: 384378 - DNA, 15 bp, Homo sapiens
ccagcatcatcaggt

SEQ ID NO: 384379 - DNA, 15 bp, Homo sapiens
tccagcatcatcagg

SEQ ID NO: 384380 - DNA, 15 bp, Homo sapiens
gtccagcatcatcag

SEQ ID NO: 384381 - DNA, 15 bp, Homo sapiens
agtccagcatcatca

SEQ ID NO: 384382 - DNA, 15 bp, Homo sapiens
aagtccagcatcatc

SEQ ID NO: 384383 - DNA, 15 bp, Homo sapiens
aaagtccagcatcat

SEQ ID NO: 384384 - DNA, 15 bp, Homo sapiens
aaaagtccagcatca

SEQ ID NO: 384385 - DNA, 15 bp, Homo sapiens
gaaaagtccagcatc

SEQ ID NO: 384386 - DNA, 15 bp, Homo sapiens
tgaaaagtccagcat

SEQ ID NO: 384387 - DNA, 15 bp, Homo sapiens
ctgaaaagtccagca

SEQ ID NO: 384388 - DNA, 15 bp, Homo sapiens
actgaaaagtccagc

SEQ ID NO: 384389 - DNA, 15 bp, Homo sapiens
aactgaaaagtccag

SEQ ID NO: 384390 - DNA, 15 bp, Homo sapiens
aaactgaaaagtcca

SEQ ID NO: 384391 - DNA, 15 bp, Homo sapiens
caaactgaaaagtcc

SEQ ID NO: 384392 - DNA, 15 bp, Homo sapiens
ccaaactgaaaagtc

SEQ ID NO: 384393 - DNA, 15 bp, Homo sapiens
accaaactgaaaagt

SEQ ID NO: 384394 - DNA, 15 bp, Homo sapiens
aaccaaactgaaaag

SEQ ID NO: 384395 - DNA, 15 bp, Homo sapiens
aaaccaaactgaaaa

SEQ ID NO: 384396 - DNA, 15 bp, Homo sapiens
gaaaccaaactgaaa

SEQ ID NO: 384397 - DNA, 15 bp, Homo sapiens
tgaaaccaaactgaa

SEQ ID NO: 384398 - DNA, 15 bp, Homo sapiens
atgaaaccaaactga

SEQ ID NO: 384399 - DNA, 15 bp, Homo sapiens
catgaaaccaaactg

SEQ ID NO: 384400 - DNA, 15 bp, Homo sapiens
gcatgaaaccaaact

SEQ ID NO: 384401 - DNA, 15 bp, Homo sapiens
agcatgaaaccaaac

SEQ ID NO: 384402 - DNA, 15 bp, Homo sapiens
gagcatgaaaccaaa

SEQ ID NO: 384403 - DNA, 15 bp, Homo sapiens
tgagcatgaaaccaa

SEQ ID NO: 384404 - DNA, 15 bp, Homo sapiens
atgagcatgaaacca

SEQ ID NO: 384405 - DNA, 15 bp, Homo sapiens
aatgagcatgaaacc

SEQ ID NO: 384406 - DNA, 15 bp, Homo sapiens
aaatgagcatgaaac

SEQ ID NO: 384407 - DNA, 15 bp, Homo sapiens
gaaatgagcatgaaa

SEQ ID NO: 384408 - DNA, 15 bp, Homo sapiens
tgaaatgagcatgaa

SEQ ID NO: 384409 - DNA, 15 bp, Homo sapiens
ctgaaatgagcatga

SEQ ID NO: 384410 - DNA, 15 bp, Homo sapiens
actgaaatgagcatg

SEQ ID NO: 384411 - DNA, 15 bp, Homo sapiens
gactgaaatgagcat

SEQ ID NO: 384412 - DNA, 15 bp, Homo sapiens
tgactgaaatgagca

SEQ ID NO: 384413 - DNA, 15 bp, Homo sapiens
atgactgaaatgagc

SEQ ID NO: 384414 - DNA, 15 bp, Homo sapiens
tatgactgaaatgag

SEQ ID NO: 384415 - DNA, 15 bp, Homo sapiens
ttatgactgaaatga

SEQ ID NO: 384416 - DNA, 15 bp, Homo sapiens
tttatgactgaaatg

SEQ ID NO: 384417 - DNA, 15 bp, Homo sapiens
ctttatgactgaaat

SEQ ID NO: 384418 - DNA, 15 bp, Homo sapiens
tctttatgactgaaa

SEQ ID NO: 384419 - DNA, 15 bp, Homo sapiens
ttctttatgactgaa

SEQ ID NO: 384420 - DNA, 15 bp, Homo sapiens
tttctttatgactga

SEQ ID NO: 384421 - DNA, 15 bp, Homo sapiens
ctttctttatgactg

SEQ ID NO: 384422 - DNA, 15 bp, Homo sapiens
tctttctttatgact

SEQ ID NO: 384423 - DNA, 15 bp, Homo sapiens
atctttctttatgac

SEQ ID NO: 384424 - DNA, 15 bp, Homo sapiens
tatctttctttatga

SEQ ID NO: 384425 - DNA, 15 bp, Homo sapiens
ttatctttctttatg

SEQ ID NO: 384426 - DNA, 15 bp, Homo sapiens
tttatctttctttat

SEQ ID NO: 384427 - DNA, 15 bp, Homo sapiens
ttttatctttcttta

SEQ ID NO: 384428 - DNA, 15 bp, Homo sapiens
cttttatctttcttt

SEQ ID NO: 384429 - DNA, 15 bp, Homo sapiens
ccttttatctttctt

SEQ ID NO: 384430 - DNA, 15 bp, Homo sapiens
cccttttatctttct

SEQ ID NO: 384431 - DNA, 15 bp, Homo sapiens
ccccttttatctttc

SEQ ID NO: 384432 - DNA, 15 bp, Homo sapiens
tccccttttatcttt

SEQ ID NO: 384433 - DNA, 15 bp, Homo sapiens
ttccccttttatctt

SEQ ID NO: 384434 - DNA, 15 bp, Homo sapiens
cttccccttttatct

SEQ ID NO: 384435 - DNA, 15 bp, Homo sapiens
gcttccccttttatc

SEQ ID NO: 384436 - DNA, 15 bp, Homo sapiens
tgcttccccttttat

SEQ ID NO: 384437 - DNA, 15 bp, Homo sapiens
gtgcttcccctttta

SEQ ID NO: 384438 - DNA, 15 bp, Homo sapiens
tgtgcttcccctttt

SEQ ID NO: 384439 - DNA, 15 bp, Homo sapiens
gtgtgcttccccttt

SEQ ID NO: 384440 - DNA, 15 bp, Homo sapiens
tgtgtgcttcccctt

SEQ ID NO: 384441 - DNA, 15 bp, Homo sapiens
ctgtgtgcttcccct

SEQ ID NO: 384442 - DNA, 15 bp, Homo sapiens
tctgtgtgcttcccc

SEQ ID NO: 384443 - DNA, 15 bp, Homo sapiens
ctctgtgtgcttccc

SEQ ID NO: 384444 - DNA, 15 bp, Homo sapiens
tctctgtgtgcttcc

SEQ ID NO: 384445 - DNA, 15 bp, Homo sapiens
ctctctgtgtgcttc

SEQ ID NO: 384446 - DNA, 15 bp, Homo sapiens
gctctctgtgtgctt

SEQ ID NO: 384447 - DNA, 15 bp, Homo sapiens
tgctctctgtgtgct

SEQ ID NO: 384448 - DNA, 15 bp, Homo sapiens
gtgctctctgtgtgc

SEQ ID NO: 384449 - DNA, 15 bp, Homo sapiens
agtgctctctgtgtg

SEQ ID NO: 384450 - DNA, 15 bp, Homo sapiens
gagtgctctctgtgt

SEQ ID NO: 384451 - DNA, 15 bp, Homo sapiens
tgagtgctctctgtg

SEQ ID NO: 384452 - DNA, 15 bp, Homo sapiens
gtgagtgctctctgt

SEQ ID NO: 384453 - DNA, 15 bp, Homo sapiens
ggtgagtgctctctg

SEQ ID NO: 384454 - DNA, 15 bp, Homo sapiens
aggtgagtgctctct

SEQ ID NO: 384455 - DNA, 15 bp, Homo sapiens
gaggtgagtgctctc

SEQ ID NO: 384456 - DNA, 15 bp, Homo sapiens
agaggtgagtgctct

SEQ ID NO: 384457 - DNA, 15 bp, Homo sapiens
gagaggtgagtgctc

SEQ ID NO: 384458 - DNA, 15 bp, Homo sapiens
agagaggtgagtgct

SEQ ID NO: 384459 - DNA, 15 bp, Homo sapiens
cagagaggtgagtgc

SEQ ID NO: 384460 - DNA, 15 bp, Homo sapiens
gcagagaggtgagtg

SEQ ID NO: 384461 - DNA, 15 bp, Homo sapiens
agcagagaggtgagt

SEQ ID NO: 384462 - DNA, 15 bp, Homo sapiens
cagcagagaggtgag

SEQ ID NO: 384463 - DNA, 15 bp, Homo sapiens
acagcagagaggtga

SEQ ID NO: 384464 - DNA, 15 bp, Homo sapiens
aacagcagagaggtg

SEQ ID NO: 384465 - DNA, 15 bp, Homo sapiens
aaacagcagagaggt

SEQ ID NO: 384466 - DNA, 15 bp, Homo sapiens
aaaacagcagagagg

SEQ ID NO: 384467 - DNA, 15 bp, Homo sapiens
aaaaacagcagagag

SEQ ID NO: 384468 - DNA, 15 bp, Homo sapiens
taaaaacagcagaga

SEQ ID NO: 384469 - DNA, 15 bp, Homo sapiens
ataaaaacagcagag

SEQ ID NO: 384470 - DNA, 15 bp, Homo sapiens
cataaaaacagcaga

SEQ ID NO: 384471 - DNA, 15 bp, Homo sapiens
tcataaaaacagcag

SEQ ID NO: 384472 - DNA, 15 bp, Homo sapiens
ctcataaaaacagca

SEQ ID NO: 384473 - DNA, 15 bp, Homo sapiens
tctcataaaaacagc

SEQ ID NO: 384474 - DNA, 15 bp, Homo sapiens
ctctcataaaaacag

SEQ ID NO: 384475 - DNA, 15 bp, Homo sapiens
cctctcataaaaaca

SEQ ID NO: 384476 - DNA, 15 bp, Homo sapiens
ccctctcataaaaac

SEQ ID NO: 384477 - DNA, 15 bp, Homo sapiens
accctctcataaaaa

SEQ ID NO: 384478 - DNA, 15 bp, Homo sapiens
taccctctcataaaa

SEQ ID NO: 384479 - DNA, 15 bp, Homo sapiens
ctaccctctcataaa

SEQ ID NO: 384480 - DNA, 15 bp, Homo sapiens
gctaccctctcataa

SEQ ID NO: 384481 - DNA, 15 bp, Homo sapiens
tgctaccctctcata

SEQ ID NO: 384482 - DNA, 15 bp, Homo sapiens
ctgctaccctctcat

SEQ ID NO: 384483 - DNA, 15 bp, Homo sapiens
cctgctaccctctca

SEQ ID NO: 384484 - DNA, 15 bp, Homo sapiens
tcctgctaccctctc

SEQ ID NO: 384485 - DNA, 15 bp, Homo sapiens
atcctgctaccctct

SEQ ID NO: 384486 - DNA, 15 bp, Homo sapiens
gatcctgctaccctc

SEQ ID NO: 384487 - DNA, 15 bp, Homo sapiens
agatcctgctaccct

SEQ ID NO: 384488 - DNA, 15 bp, Homo sapiens
cagatcctgctaccc

SEQ ID NO: 384489 - DNA, 15 bp, Homo sapiens
ccagatcctgctacc

SEQ ID NO: 384490 - DNA, 15 bp, Homo sapiens
cccagatcctgctac

SEQ ID NO: 384491 - DNA, 15 bp, Homo sapiens
ccccagatcctgcta

SEQ ID NO: 384492 - DNA, 15 bp, Homo sapiens
accccagatcctgct

SEQ ID NO: 384493 - DNA, 15 bp, Homo sapiens
caccccagatcctgc

SEQ ID NO: 384494 - DNA, 15 bp, Homo sapiens
ccaccccagatcctg

SEQ ID NO: 384495 - DNA, 15 bp, Homo sapiens
cccaccccagatcct

SEQ ID NO: 384496 - DNA, 15 bp, Homo sapiens
tcccaccccagatcc

SEQ ID NO: 384497 - DNA, 15 bp, Homo sapiens
ctcccaccccagatc

SEQ ID NO: 384498 - DNA, 15 bp, Homo sapiens
cctcccaccccagat

SEQ ID NO: 384499 - DNA, 15 bp, Homo sapiens
tcctcccaccccaga

SEQ ID NO: 384500 - DNA, 15 bp, Homo sapiens
ctcctcccaccccag

SEQ ID NO: 384501 - DNA, 15 bp, Homo sapiens
cctcctcccacccca

SEQ ID NO: 384502 - DNA, 15 bp, Homo sapiens
tcctcctcccacccc

SEQ ID NO: 384503 - DNA, 15 bp, Homo sapiens
gtcctcctcccaccc

SEQ ID NO: 384504 - DNA, 15 bp, Homo sapiens
agtcctcctcccacc

SEQ ID NO: 384505 - DNA, 15 bp, Homo sapiens
aagtcctcctcccac

SEQ ID NO: 384506 - DNA, 15 bp, Homo sapiens
aaagtcctcctccca

SEQ ID NO: 384507 - DNA, 15 bp, Homo sapiens
caaagtcctcctccc

SEQ ID NO: 384508 - DNA, 15 bp, Homo sapiens
ccaaagtcctcctcc

SEQ ID NO: 384509 - DNA, 15 bp, Homo sapiens
gccaaagtcctcctc

SEQ ID NO: 384510 - DNA, 15 bp, Homo sapiens
tgccaaagtcctcct

SEQ ID NO: 384511 - DNA, 15 bp, Homo sapiens
atgccaaagtcctcc

SEQ ID NO: 384512 - DNA, 15 bp, Homo sapiens
aatgccaaagtcctc

SEQ ID NO: 384513 - DNA, 15 bp, Homo sapiens
taatgccaaagtcct

SEQ ID NO: 384514 - DNA, 15 bp, Homo sapiens
ttaatgccaaagtcc

SEQ ID NO: 384515 - DNA, 15 bp, Homo sapiens
attaatgccaaagtc

SEQ ID NO: 384516 - DNA, 15 bp, Homo sapiens
aattaatgccaaagt

SEQ ID NO: 384517 - DNA, 15 bp, Homo sapiens
aaattaatgccaaag

SEQ ID NO: 384518 - DNA, 15 bp, Homo sapiens
aaaattaatgccaaa

SEQ ID NO: 384519 - DNA, 15 bp, Homo sapiens
caaaattaatgccaa

SEQ ID NO: 384520 - DNA, 15 bp, Homo sapiens
tcaaaattaatgcca

SEQ ID NO: 384521 - DNA, 15 bp, Homo sapiens
ctcaaaattaatgcc

SEQ ID NO: 384522 - DNA, 15 bp, Homo sapiens
tctcaaaattaatgc

SEQ ID NO: 384523 - DNA, 15 bp, Homo sapiens
gtctcaaaattaatg

SEQ ID NO: 384524 - DNA, 15 bp, Homo sapiens
tgtctcaaaattaat

SEQ ID NO: 384525 - DNA, 15 bp, Homo sapiens
atgtctcaaaattaa

SEQ ID NO: 384526 - DNA, 15 bp, Homo sapiens
catgtctcaaaatta

SEQ ID NO: 384527 - DNA, 15 bp, Homo sapiens
tcatgtctcaaaatt

SEQ ID NO: 384528 - DNA, 15 bp, Homo sapiens
ttcatgtctcaaaat

SEQ ID NO: 384529 - DNA, 15 bp, Homo sapiens
tttcatgtctcaaaa

SEQ ID NO: 384530 - DNA, 15 bp, Homo sapiens
atttcatgtctcaaa

SEQ ID NO: 384531 - DNA, 15 bp, Homo sapiens
aatttcatgtctcaa

SEQ ID NO: 384532 - DNA, 15 bp, Homo sapiens
taatttcatgtctca

SEQ ID NO: 384533 - DNA, 15 bp, Homo sapiens
ataatttcatgtctc

SEQ ID NO: 384534 - DNA, 15 bp, Homo sapiens
tataatttcatgtct

SEQ ID NO: 384535 - DNA, 15 bp, Homo sapiens
ctataatttcatgtc

SEQ ID NO: 384536 - DNA, 15 bp, Homo sapiens
gctataatttcatgt

SEQ ID NO: 384537 - DNA, 15 bp, Homo sapiens
ggctataatttcatg

SEQ ID NO: 384538 - DNA, 15 bp, Homo sapiens
tggctataatttcat

SEQ ID NO: 384539 - DNA, 15 bp, Homo sapiens
gtggctataatttca

SEQ ID NO: 384540 - DNA, 15 bp, Homo sapiens
tgtggctataatttc

SEQ ID NO: 384541 - DNA, 15 bp, Homo sapiens
ttgtggctataattt

SEQ ID NO: 384542 - DNA, 15 bp, Homo sapiens
tttgtggctataatt

SEQ ID NO: 384543 - DNA, 15 bp, Homo sapiens
gtttgtggctataat

SEQ ID NO: 384544 - DNA, 15 bp, Homo sapiens
ggtttgtggctataa

SEQ ID NO: 384545 - DNA, 15 bp, Homo sapiens
tggtttgtggctata

SEQ ID NO: 384546 - DNA, 15 bp, Homo sapiens
gtggtttgtggctat

SEQ ID NO: 384547 - DNA, 15 bp, Homo sapiens
ggtggtttgtggcta

SEQ ID NO: 384548 - DNA, 15 bp, Homo sapiens
gggtggtttgtggct

SEQ ID NO: 384549 - DNA, 15 bp, Homo sapiens
agggtggtttgtggc

SEQ ID NO: 384550 - DNA, 15 bp, Homo sapiens
tagggtggtttgtgg

SEQ ID NO: 384551 - DNA, 15 bp, Homo sapiens
ctagggtggtttgtg

SEQ ID NO: 384552 - DNA, 15 bp, Homo sapiens
tctagggtggtttgt

SEQ ID NO: 384553 - DNA, 15 bp, Homo sapiens
ttctagggtggtttg

SEQ ID NO: 384554 - DNA, 15 bp, Homo sapiens
gttctagggtggttt

SEQ ID NO: 384555 - DNA, 15 bp, Homo sapiens
tgttctagggtggtt

SEQ ID NO: 384556 - DNA, 15 bp, Homo sapiens
ctgttctagggtggt

SEQ ID NO: 384557 - DNA, 15 bp, Homo sapiens
actgttctagggtgg

SEQ ID NO: 384558 - DNA, 15 bp, Homo sapiens
aactgttctagggtg

SEQ ID NO: 384559 - DNA, 15 bp, Homo sapiens
aaactgttctagggt

SEQ ID NO: 384560 - DNA, 15 bp, Homo sapiens
taaactgttctaggg

SEQ ID NO: 384561 - DNA, 15 bp, Homo sapiens
ctaaactgttctagg

SEQ ID NO: 384562 - DNA, 15 bp, Homo sapiens
cctaaactgttctag

SEQ ID NO: 384563 - DNA, 15 bp, Homo sapiens
acctaaactgttcta

SEQ ID NO: 384564 - DNA, 15 bp, Homo sapiens
aacctaaactgttct

SEQ ID NO: 384565 - DNA, 15 bp, Homo sapiens
aaacctaaactgttc

SEQ ID NO: 384566 - DNA, 15 bp, Homo sapiens
aaaacctaaactgtt

SEQ ID NO: 384567 - DNA, 15 bp, Homo sapiens
aaaaacctaaactgt

SEQ ID NO: 384568 - DNA, 15 bp, Homo sapiens
gaaaaacctaaactg

SEQ ID NO: 384569 - DNA, 15 bp, Homo sapiens
tgaaaaacctaaact

SEQ ID NO: 384570 - DNA, 15 bp, Homo sapiens
ttgaaaaacctaaac

SEQ ID NO: 384571 - DNA, 15 bp, Homo sapiens
tttgaaaaacctaaa

SEQ ID NO: 384572 - DNA, 15 bp, Homo sapiens
ttttgaaaaacctaa

SEQ ID NO: 384573 - DNA, 15 bp, Homo sapiens
tttttgaaaaaccta

SEQ ID NO: 384574 - DNA, 15 bp, Homo sapiens
ttttttgaaaaacct

SEQ ID NO: 384575 - DNA, 15 bp, Homo sapiens
gttttttgaaaaacc

SEQ ID NO: 384576 - DNA, 15 bp, Homo sapiens
tgttttttgaaaaac

SEQ ID NO: 384577 - DNA, 15 bp, Homo sapiens
ctgttttttgaaaaa

SEQ ID NO: 384578 - DNA, 15 bp, Homo sapiens
actgttttttgaaaa

SEQ ID NO: 384579 - DNA, 15 bp, Homo sapiens
aactgttttttgaaa

SEQ ID NO: 384580 - DNA, 15 bp, Homo sapiens
caactgttttttgaa

SEQ ID NO: 384581 - DNA, 15 bp, Homo sapiens
gcaactgttttttga

SEQ ID NO: 384582 - DNA, 15 bp, Homo sapiens
tgcaactgttttttg

SEQ ID NO: 384583 - DNA, 15 bp, Homo sapiens
ctgcaactgtttttt

SEQ ID NO: 384584 - DNA, 15 bp, Homo sapiens
tctgcaactgttttt

SEQ ID NO: 384585 - DNA, 15 bp, Homo sapiens
gtctgcaactgtttt

SEQ ID NO: 384586 - DNA, 15 bp, Homo sapiens
tgtctgcaactgttt

SEQ ID NO: 384587 - DNA, 15 bp, Homo sapiens
atgtctgcaactgtt

SEQ ID NO: 384588 - DNA, 15 bp, Homo sapiens
aatgtctgcaactgt

SEQ ID NO: 384589 - DNA, 15 bp, Homo sapiens
taatgtctgcaactg

SEQ ID NO: 384590 - DNA, 15 bp, Homo sapiens
ctaatgtctgcaact

SEQ ID NO: 384591 - DNA, 15 bp, Homo sapiens
tctaatgtctgcaac

SEQ ID NO: 384592 - DNA, 15 bp, Homo sapiens
ctctaatgtctgcaa

SEQ ID NO: 384593 - DNA, 15 bp, Homo sapiens
cctctaatgtctgca

SEQ ID NO: 384594 - DNA, 15 bp, Homo sapiens
gcctctaatgtctgc

SEQ ID NO: 384595 - DNA, 15 bp, Homo sapiens
ggcctctaatgtctg

SEQ ID NO: 384596 - DNA, 15 bp, Homo sapiens
aggcctctaatgtct

SEQ ID NO: 384597 - DNA, 15 bp, Homo sapiens
taggcctctaatgtc

SEQ ID NO: 384598 - DNA, 15 bp, Homo sapiens
ataggcctctaatgt

SEQ ID NO: 384599 - DNA, 15 bp, Homo sapiens
aataggcctctaatg

SEQ ID NO: 384600 - DNA, 15 bp, Homo sapiens
aaataggcctctaat

SEQ ID NO: 384601 - DNA, 15 bp, Homo sapiens
aaaataggcctctaa

SEQ ID NO: 384602 - DNA, 15 bp, Homo sapiens
gaaaataggcctcta

SEQ ID NO: 384603 - DNA, 15 bp, Homo sapiens
agaaaataggcctct

SEQ ID NO: 384604 - DNA, 15 bp, Homo sapiens
aagaaaataggcctc

SEQ ID NO: 384605 - DNA, 15 bp, Homo sapiens
gaagaaaataggcct

SEQ ID NO: 384606 - DNA, 15 bp, Homo sapiens
ggaagaaaataggcc

SEQ ID NO: 384607 - DNA, 15 bp, Homo sapiens
gggaagaaaataggc

SEQ ID NO: 384608 - DNA, 15 bp, Homo sapiens
agggaagaaaatagg

SEQ ID NO: 384609 - DNA, 15 bp, Homo sapiens
aagggaagaaaatag

SEQ ID NO: 384610 - DNA, 15 bp, Homo sapiens
aaagggaagaaaata

SEQ ID NO: 384611 - DNA, 15 bp, Homo sapiens
aaaagggaagaaaat

SEQ ID NO: 384612 - DNA, 15 bp, Homo sapiens
taaaagggaagaaaa

SEQ ID NO: 384613 - DNA, 15 bp, Homo sapiens
ttaaaagggaagaaa

SEQ ID NO: 384614 - DNA, 15 bp, Homo sapiens
cttaaaagggaagaa

SEQ ID NO: 384615 - DNA, 15 bp, Homo sapiens
acttaaaagggaaga

SEQ ID NO: 384616 - DNA, 15 bp, Homo sapiens
tacttaaaagggaag

SEQ ID NO: 384617 - DNA, 15 bp, Homo sapiens
ttacttaaaagggaa

SEQ ID NO: 384618 - DNA, 15 bp, Homo sapiens
gttacttaaaaggga

SEQ ID NO: 384619 - DNA, 15 bp, Homo sapiens
tgttacttaaaaggg

SEQ ID NO: 384620 - DNA, 15 bp, Homo sapiens
ctgttacttaaaagg

SEQ ID NO: 384621 - DNA, 15 bp, Homo sapiens
actgttacttaaaag

SEQ ID NO: 384622 - DNA, 15 bp, Homo sapiens
cactgttacttaaaa

SEQ ID NO: 384623 - DNA, 15 bp, Homo sapiens
tcactgttacttaaa

SEQ ID NO: 384624 - DNA, 15 bp, Homo sapiens
ctcactgttacttaa

SEQ ID NO: 384625 - DNA, 15 bp, Homo sapiens
tctcactgttactta

SEQ ID NO: 384626 - DNA, 15 bp, Homo sapiens
ttctcactgttactt

SEQ ID NO: 384627 - DNA, 15 bp, Homo sapiens
cttctcactgttact

SEQ ID NO: 384628 - DNA, 15 bp, Homo sapiens
acttctcactgttac

SEQ ID NO: 384629 - DNA, 15 bp, Homo sapiens
aacttctcactgtta

SEQ ID NO: 384630 - DNA, 15 bp, Homo sapiens
taacttctcactgtt

SEQ ID NO: 384631 - DNA, 15 bp, Homo sapiens
ataacttctcactgt

SEQ ID NO: 384632 - DNA, 15 bp, Homo sapiens
tataacttctcactg

SEQ ID NO: 384633 - DNA, 15 bp, Homo sapiens
ctataacttctcact

SEQ ID NO: 384634 - DNA, 15 bp, Homo sapiens
actataacttctcac

SEQ ID NO: 384635 - DNA, 15 bp, Homo sapiens
tactataacttctca

SEQ ID NO: 384636 - DNA, 15 bp, Homo sapiens
ctactataacttctc

SEQ ID NO: 384637 - DNA, 15 bp, Homo sapiens
cctactataacttct

SEQ ID NO: 384638 - DNA, 15 bp, Homo sapiens
tcctactataacttc

SEQ ID NO: 384639 - DNA, 15 bp, Homo sapiens
ttcctactataactt

SEQ ID NO: 384640 - DNA, 15 bp, Homo sapiens
tttcctactataact

SEQ ID NO: 384641 - DNA, 15 bp, Homo sapiens
ttttcctactataac

SEQ ID NO: 384642 - DNA, 15 bp, Homo sapiens
gttttcctactataa

SEQ ID NO: 384643 - DNA, 15 bp, Homo sapiens
agttttcctactata

SEQ ID NO: 384644 - DNA, 15 bp, Homo sapiens
cagttttcctactat

SEQ ID NO: 384645 - DNA, 15 bp, Homo sapiens
gcagttttcctacta

SEQ ID NO: 384646 - DNA, 15 bp, Homo sapiens
ggcagttttcctact

SEQ ID NO: 384647 - DNA, 15 bp, Homo sapiens
tggcagttttcctac

SEQ ID NO: 384648 - DNA, 15 bp, Homo sapiens
ttggcagttttccta

SEQ ID NO: 384649 - DNA, 15 bp, Homo sapiens
tttggcagttttcct

SEQ ID NO: 384650 - DNA, 15 bp, Homo sapiens
ttttggcagttttcc

SEQ ID NO: 384651 - DNA, 15 bp, Homo sapiens
cttttggcagttttc

SEQ ID NO: 384652 - DNA, 15 bp, Homo sapiens
ccttttggcagtttt

SEQ ID NO: 384653 - DNA, 15 bp, Homo sapiens
accttttggcagttt

SEQ ID NO: 384654 - DNA, 15 bp, Homo sapiens
aaccttttggcagtt

SEQ ID NO: 384655 - DNA, 15 bp, Homo sapiens
caaccttttggcagt

SEQ ID NO: 384656 - DNA, 15 bp, Homo sapiens
acaaccttttggcag

SEQ ID NO: 384657 - DNA, 15 bp, Homo sapiens
aacaaccttttggca

SEQ ID NO: 384658 - DNA, 15 bp, Homo sapiens
caacaaccttttggc

SEQ ID NO: 384659 - DNA, 15 bp, Homo sapiens
acaacaaccttttgg

SEQ ID NO: 384660 - DNA, 15 bp, Homo sapiens
gacaacaaccttttg

SEQ ID NO: 384661 - DNA, 15 bp, Homo sapiens
tgacaacaacctttt

SEQ ID NO: 384662 - DNA, 15 bp, Homo sapiens
ttgacaacaaccttt

SEQ ID NO: 384663 - DNA, 15 bp, Homo sapiens
gttgacaacaacctt

SEQ ID NO: 384664 - DNA, 15 bp, Homo sapiens
agttgacaacaacct

SEQ ID NO: 384665 - DNA, 15 bp, Homo sapiens
aagttgacaacaacc

SEQ ID NO: 384666 - DNA, 15 bp, Homo sapiens
taagttgacaacaac

SEQ ID NO: 384667 - DNA, 15 bp, Homo sapiens
ttaagttgacaacaa

SEQ ID NO: 384668 - DNA, 15 bp, Homo sapiens
attaagttgacaaca

SEQ ID NO: 384669 - DNA, 15 bp, Homo sapiens
aattaagttgacaac

SEQ ID NO: 384670 - DNA, 15 bp, Homo sapiens
gaattaagttgacaa

SEQ ID NO: 384671 - DNA, 15 bp, Homo sapiens
ggaattaagttgaca

SEQ ID NO: 384672 - DNA, 15 bp, Homo sapiens
gggaattaagttgac

SEQ ID NO: 384673 - DNA, 15 bp, Homo sapiens
agggaattaagttga

SEQ ID NO: 384674 - DNA, 15 bp, Homo sapiens
gagggaattaagttg

SEQ ID NO: 384675 - DNA, 15 bp, Homo sapiens
ggagggaattaagtt

SEQ ID NO: 384676 - DNA, 15 bp, Homo sapiens
aggagggaattaagt

SEQ ID NO: 384677 - DNA, 15 bp, Homo sapiens
aaggagggaattaag

SEQ ID NO: 384678 - DNA, 15 bp, Homo sapiens
aaaggagggaattaa

SEQ ID NO: 384679 - DNA, 15 bp, Homo sapiens
gaaaggagggaatta

SEQ ID NO: 384680 - DNA, 15 bp, Homo sapiens
ggaaaggagggaatt

SEQ ID NO: 384681 - DNA, 15 bp, Homo sapiens
aggaaaggagggaat

SEQ ID NO: 384682 - DNA, 15 bp, Homo sapiens
aaggaaaggagggaa

SEQ ID NO: 384683 - DNA, 15 bp, Homo sapiens
caaggaaaggaggga

SEQ ID NO: 384684 - DNA, 15 bp, Homo sapiens
gcaaggaaaggaggg

SEQ ID NO: 384685 - DNA, 15 bp, Homo sapiens
ggcaaggaaaggagg

SEQ ID NO: 384686 - DNA, 15 bp, Homo sapiens
tggcaaggaaaggag

SEQ ID NO: 384687 - DNA, 15 bp, Homo sapiens
ttggcaaggaaagga

SEQ ID NO: 384688 - DNA, 15 bp, Homo sapiens
attggcaaggaaagg

SEQ ID NO: 384689 - DNA, 15 bp, Homo sapiens
aattggcaaggaaag

SEQ ID NO: 384690 - DNA, 15 bp, Homo sapiens
gaattggcaaggaaa

SEQ ID NO: 384691 - DNA, 15 bp, Homo sapiens
ggaattggcaaggaa

SEQ ID NO: 384692 - DNA, 15 bp, Homo sapiens
gggaattggcaagga

SEQ ID NO: 384693 - DNA, 15 bp, Homo sapiens
ggggaattggcaagg

SEQ ID NO: 384694 - DNA, 15 bp, Homo sapiens
aggggaattggcaag

SEQ ID NO: 384695 - DNA, 15 bp, Homo sapiens
gaggggaattggcaa

SEQ ID NO: 384696 - DNA, 15 bp, Homo sapiens
ggaggggaattggca

SEQ ID NO: 384697 - DNA, 15 bp, Homo sapiens
gggaggggaattggc

SEQ ID NO: 384698 - DNA, 15 bp, Homo sapiens
ggggaggggaattgg

SEQ ID NO: 384699 - DNA, 15 bp, Homo sapiens
aggggaggggaattg

SEQ ID NO: 384700 - DNA, 15 bp, Homo sapiens
aaggggaggggaatt

SEQ ID NO: 384701 - DNA, 15 bp, Homo sapiens
aaaggggaggggaat

SEQ ID NO: 384702 - DNA, 15 bp, Homo sapiens
caaaggggaggggaa

SEQ ID NO: 384703 - DNA, 15 bp, Homo sapiens
ccaaaggggagggga

SEQ ID NO: 384704 - DNA, 15 bp, Homo sapiens
cccaaaggggagggg

SEQ ID NO: 384705 - DNA, 15 bp, Homo sapiens
tcccaaaggggaggg

SEQ ID NO: 384706 - DNA, 15 bp, Homo sapiens
ttcccaaaggggagg

SEQ ID NO: 384707 - DNA, 15 bp, Homo sapiens
tttcccaaaggggag

SEQ ID NO: 384708 - DNA, 15 bp, Homo sapiens
ttttcccaaagggga

SEQ ID NO: 384709 - DNA, 15 bp, Homo sapiens
tttttcccaaagggg

SEQ ID NO: 384710 - DNA, 15 bp, Homo sapiens
ctttttcccaaaggg

SEQ ID NO: 384711 - DNA, 15 bp, Homo sapiens
actttttcccaaagg

SEQ ID NO: 384712 - DNA, 15 bp, Homo sapiens
aactttttcccaaag

SEQ ID NO: 384713 - DNA, 15 bp, Homo sapiens
aaactttttcccaaa

SEQ ID NO: 384714 - DNA, 15 bp, Homo sapiens
gaaactttttcccaa

SEQ ID NO: 384715 - DNA, 15 bp, Homo sapiens
agaaactttttccca

SEQ ID NO: 384716 - DNA, 15 bp, Homo sapiens
cagaaactttttccc

SEQ ID NO: 384717 - DNA, 15 bp, Homo sapiens
acagaaactttttcc

SEQ ID NO: 384718 - DNA, 15 bp, Homo sapiens
tacagaaactttttc

SEQ ID NO: 384719 - DNA, 15 bp, Homo sapiens
gtacagaaacttttt

SEQ ID NO: 384720 - DNA, 15 bp, Homo sapiens
agtacagaaactttt

SEQ ID NO: 384721 - DNA, 15 bp, Homo sapiens
cagtacagaaacttt

SEQ ID NO: 384722 - DNA, 15 bp, Homo sapiens
tcagtacagaaactt

SEQ ID NO: 384723 - DNA, 15 bp, Homo sapiens
ttcagtacagaaact

SEQ ID NO: 384724 - DNA, 15 bp, Homo sapiens
cttcagtacagaaac

SEQ ID NO: 384725 - DNA, 15 bp, Homo sapiens
acttcagtacagaaa

SEQ ID NO: 384726 - DNA, 15 bp, Homo sapiens
aacttcagtacagaa

SEQ ID NO: 384727 - DNA, 15 bp, Homo sapiens
taacttcagtacaga

SEQ ID NO: 384728 - DNA, 15 bp, Homo sapiens
ataacttcagtacag

SEQ ID NO: 384729 - DNA, 15 bp, Homo sapiens
aataacttcagtaca

SEQ ID NO: 384730 - DNA, 15 bp, Homo sapiens
caataacttcagtac

SEQ ID NO: 384731 - DNA, 15 bp, Homo sapiens
ccaataacttcagta

SEQ ID NO: 384732 - DNA, 15 bp, Homo sapiens
gccaataacttcagt

SEQ ID NO: 384733 - DNA, 15 bp, Homo sapiens
tgccaataacttcag

SEQ ID NO: 384734 - DNA, 15 bp, Homo sapiens
ttgccaataacttca

SEQ ID NO: 384735 - DNA, 15 bp, Homo sapiens
cttgccaataacttc

SEQ ID NO: 384736 - DNA, 15 bp, Homo sapiens
ccttgccaataactt

SEQ ID NO: 384737 - DNA, 15 bp, Homo sapiens
tccttgccaataact

SEQ ID NO: 384738 - DNA, 15 bp, Homo sapiens
ttccttgccaataac

SEQ ID NO: 384739 - DNA, 15 bp, Homo sapiens
cttccttgccaataa

SEQ ID NO: 384740 - DNA, 15 bp, Homo sapiens
ccttccttgccaata

SEQ ID NO: 384741 - DNA, 15 bp, Homo sapiens
gccttccttgccaat

SEQ ID NO: 384742 - DNA, 15 bp, Homo sapiens
ggccttccttgccaa

SEQ ID NO: 384743 - DNA, 15 bp, Homo sapiens
gggccttccttgcca

SEQ ID NO: 384744 - DNA, 15 bp, Homo sapiens
tgggccttccttgcc

SEQ ID NO: 384745 - DNA, 15 bp, Homo sapiens
ctgggccttccttgc

SEQ ID NO: 384746 - DNA, 15 bp, Homo sapiens
cctgggccttccttg

SEQ ID NO: 384747 - DNA, 15 bp, Homo sapiens
ccctgggccttcctt

SEQ ID NO: 384748 - DNA, 15 bp, Homo sapiens
tccctgggccttcct

SEQ ID NO: 384749 - DNA, 15 bp, Homo sapiens
ctccctgggccttcc

SEQ ID NO: 384750 - DNA, 15 bp, Homo sapiens
tctccctgggccttc

SEQ ID NO: 384751 - DNA, 15 bp, Homo sapiens
ttctccctgggcctt

SEQ ID NO: 384752 - DNA, 15 bp, Homo sapiens
tttctccctgggcct

SEQ ID NO: 384753 - DNA, 15 bp, Homo sapiens
ctttctccctgggcc

SEQ ID NO: 384754 - DNA, 15 bp, Homo sapiens
tctttctccctgggc

SEQ ID NO: 384755 - DNA, 15 bp, Homo sapiens
ttctttctccctggg

SEQ ID NO: 384756 - DNA, 15 bp, Homo sapiens
cttctttctccctgg

SEQ ID NO: 384757 - DNA, 15 bp, Homo sapiens
acttctttctccctg

SEQ ID NO: 384758 - DNA, 15 bp, Homo sapiens
gacttctttctccct

SEQ ID NO: 384759 - DNA, 15 bp, Homo sapiens
tgacttctttctccc

SEQ ID NO: 384760 - DNA, 15 bp, Homo sapiens
atgacttctttctcc

SEQ ID NO: 384761 - DNA, 15 bp, Homo sapiens
aatgacttctttctc

SEQ ID NO: 384762 - DNA, 15 bp, Homo sapiens
taatgacttctttct

SEQ ID NO: 384763 - DNA, 15 bp, Homo sapiens
ctaatgacttctttc

SEQ ID NO: 384764 - DNA, 15 bp, Homo sapiens
gctaatgacttcttt

SEQ ID NO: 384765 - DNA, 15 bp, Homo sapiens
ggctaatgacttctt

SEQ ID NO: 384766 - DNA, 15 bp, Homo sapiens
tggctaatgacttct

SEQ ID NO: 384767 - DNA, 15 bp, Homo sapiens
ctggctaatgacttc

SEQ ID NO: 384768 - DNA, 15 bp, Homo sapiens
gctggctaatgactt

SEQ ID NO: 384769 - DNA, 15 bp, Homo sapiens
tgctggctaatgact

SEQ ID NO: 384770 - DNA, 15 bp, Homo sapiens
gtgctggctaatgac

SEQ ID NO: 384771 - DNA, 15 bp, Homo sapiens
ggtgctggctaatga

SEQ ID NO: 384772 - DNA, 15 bp, Homo sapiens
gggtgctggctaatg

SEQ ID NO: 384773 - DNA, 15 bp, Homo sapiens
ggggtgctggctaat

SEQ ID NO: 384774 - DNA, 15 bp, Homo sapiens
aggggtgctggctaa

SEQ ID NO: 384775 - DNA, 15 bp, Homo sapiens
caggggtgctggcta

SEQ ID NO: 384776 - DNA, 15 bp, Homo sapiens
tcaggggtgctggct

SEQ ID NO: 384777 - DNA, 15 bp, Homo sapiens
ctcaggggtgctggc

SEQ ID NO: 384778 - DNA, 15 bp, Homo sapiens
tctcaggggtgctgg

SEQ ID NO: 384779 - DNA, 15 bp, Homo sapiens
ctctcaggggtgctg

SEQ ID NO: 384780 - DNA, 15 bp, Homo sapiens
cctctcaggggtgct

SEQ ID NO: 384781 - DNA, 15 bp, Homo sapiens
ccctctcaggggtgc

SEQ ID NO: 384782 - DNA, 15 bp, Homo sapiens
cccctctcaggggtg

SEQ ID NO: 384783 - DNA, 15 bp, Homo sapiens
tcccctctcaggggt

SEQ ID NO: 384784 - DNA, 15 bp, Homo sapiens
ctcccctctcagggg

SEQ ID NO: 384785 - DNA, 15 bp, Homo sapiens
cctcccctctcaggg

SEQ ID NO: 384786 - DNA, 15 bp, Homo sapiens
gcctcccctctcagg

SEQ ID NO: 384787 - DNA, 15 bp, Homo sapiens
tgcctcccctctcag

SEQ ID NO: 384788 - DNA, 15 bp, Homo sapiens
ctgcctcccctctca

SEQ ID NO: 384789 - DNA, 15 bp, Homo sapiens
cctgcctcccctctc

SEQ ID NO: 384790 - DNA, 15 bp, Homo sapiens
tcctgcctcccctct

SEQ ID NO: 384791 - DNA, 15 bp, Homo sapiens
ctcctgcctcccctc

SEQ ID NO: 384792 - DNA, 15 bp, Homo sapiens
gctcctgcctcccct

SEQ ID NO: 384793 - DNA, 15 bp, Homo sapiens
agctcctgcctcccc

SEQ ID NO: 384794 - DNA, 15 bp, Homo sapiens
tagctcctgcctccc

SEQ ID NO: 384795 - DNA, 15 bp, Homo sapiens
ctagctcctgcctcc

SEQ ID NO: 384796 - DNA, 15 bp, Homo sapiens
gctagctcctgcctc

SEQ ID NO: 384797 - DNA, 15 bp, Homo sapiens
ggctagctcctgcct

SEQ ID NO: 384798 - DNA, 15 bp, Homo sapiens
aggctagctcctgcc

SEQ ID NO: 384799 - DNA, 15 bp, Homo sapiens
caggctagctcctgc

SEQ ID NO: 384800 - DNA, 15 bp, Homo sapiens
ccaggctagctcctg

SEQ ID NO: 384801 - DNA, 15 bp, Homo sapiens
accaggctagctcct

SEQ ID NO: 384802 - DNA, 15 bp, Homo sapiens
gaccaggctagctcc

SEQ ID NO: 384803 - DNA, 15 bp, Homo sapiens
agaccaggctagctc

SEQ ID NO: 384804 - DNA, 15 bp, Homo sapiens
tagaccaggctagct

SEQ ID NO: 384805 - DNA, 15 bp, Homo sapiens
ttagaccaggctagc

SEQ ID NO: 384806 - DNA, 15 bp, Homo sapiens
gttagaccaggctag

SEQ ID NO: 384807 - DNA, 15 bp, Homo sapiens
agttagaccaggcta

SEQ ID NO: 384808 - DNA, 15 bp, Homo sapiens
aagttagaccaggct

SEQ ID NO: 384809 - DNA, 15 bp, Homo sapiens
caagttagaccaggc

SEQ ID NO: 384810 - DNA, 15 bp, Homo sapiens
acaagttagaccagg

SEQ ID NO: 384811 - DNA, 15 bp, Homo sapiens
gacaagttagaccag

SEQ ID NO: 384812 - DNA, 15 bp, Homo sapiens
ggacaagttagacca

SEQ ID NO: 384813 - DNA, 15 bp, Homo sapiens
aggacaagttagacc

SEQ ID NO: 384814 - DNA, 15 bp, Homo sapiens
aaggacaagttagac

SEQ ID NO: 384815 - DNA, 15 bp, Homo sapiens
caaggacaagttaga

SEQ ID NO: 384816 - DNA, 15 bp, Homo sapiens
gcaaggacaagttag

SEQ ID NO: 384817 - DNA, 15 bp, Homo sapiens
tgcaaggacaagtta

SEQ ID NO: 384818 - DNA, 15 bp, Homo sapiens
ctgcaaggacaagtt

SEQ ID NO: 384819 - DNA, 15 bp, Homo sapiens
cctgcaaggacaagt

SEQ ID NO: 384820 - DNA, 15 bp, Homo sapiens
ccctgcaaggacaag

SEQ ID NO: 384821 - DNA, 15 bp, Homo sapiens
tccctgcaaggacaa

SEQ ID NO: 384822 - DNA, 15 bp, Homo sapiens
ctccctgcaaggaca

SEQ ID NO: 384823 - DNA, 15 bp, Homo sapiens
cctccctgcaaggac

SEQ ID NO: 384824 - DNA, 15 bp, Homo sapiens
acctccctgcaagga

SEQ ID NO: 384825 - DNA, 15 bp, Homo sapiens
gacctccctgcaagg

SEQ ID NO: 384826 - DNA, 15 bp, Homo sapiens
agacctccctgcaag

SEQ ID NO: 384827 - DNA, 15 bp, Homo sapiens
tagacctccctgcaa

SEQ ID NO: 384828 - DNA, 15 bp, Homo sapiens
ttagacctccctgca

SEQ ID NO: 384829 - DNA, 15 bp, Homo sapiens
tttagacctccctgc

SEQ ID NO: 384830 - DNA, 15 bp, Homo sapiens
ttttagacctccctg

SEQ ID NO: 384831 - DNA, 15 bp, Homo sapiens
cttttagacctccct

SEQ ID NO: 384832 - DNA, 15 bp, Homo sapiens
tcttttagacctccc

SEQ ID NO: 384833 - DNA, 15 bp, Homo sapiens
ctcttttagacctcc

SEQ ID NO: 384834 - DNA, 15 bp, Homo sapiens
actcttttagacctc

SEQ ID NO: 384835 - DNA, 15 bp, Homo sapiens
aactcttttagacct

SEQ ID NO: 384836 - DNA, 15 bp, Homo sapiens
gaactcttttagacc

SEQ ID NO: 384837 - DNA, 15 bp, Homo sapiens
agaactcttttagac

SEQ ID NO: 384838 - DNA, 15 bp, Homo sapiens
tagaactcttttaga

SEQ ID NO: 384839 - DNA, 15 bp, Homo sapiens
ttagaactcttttag

SEQ ID NO: 384840 - DNA, 15 bp, Homo sapiens
gttagaactctttta

SEQ ID NO: 384841 - DNA, 15 bp, Homo sapiens
cgttagaactctttt

SEQ ID NO: 384842 - DNA, 15 bp, Homo sapiens
ccgttagaactcttt

SEQ ID NO: 384843 - DNA, 15 bp, Homo sapiens
cccgttagaactctt

SEQ ID NO: 384844 - DNA, 15 bp, Homo sapiens
tcccgttagaactct

SEQ ID NO: 384845 - DNA, 15 bp, Homo sapiens
gtcccgttagaactc

SEQ ID NO: 384846 - DNA, 15 bp, Homo sapiens
agtcccgttagaact

SEQ ID NO: 384847 - DNA, 15 bp, Homo sapiens
tagtcccgttagaac

SEQ ID NO: 384848 - DNA, 15 bp, Homo sapiens
ttagtcccgttagaa

SEQ ID NO: 384849 - DNA, 15 bp, Homo sapiens
gttagtcccgttaga

SEQ ID NO: 384850 - DNA, 15 bp, Homo sapiens
agttagtcccgttag

SEQ ID NO: 384851 - DNA, 15 bp, Homo sapiens
aagttagtcccgtta

SEQ ID NO: 384852 - DNA, 15 bp, Homo sapiens
aaagttagtcccgtt

SEQ ID NO: 384853 - DNA, 15 bp, Homo sapiens
caaagttagtcccgt

SEQ ID NO: 384854 - DNA, 15 bp, Homo sapiens
gcaaagttagtcccg

SEQ ID NO: 384855 - DNA, 15 bp, Homo sapiens
agcaaagttagtccc

SEQ ID NO: 384856 - DNA, 15 bp, Homo sapiens
cagcaaagttagtcc

SEQ ID NO: 384857 - DNA, 15 bp, Homo sapiens
acagcaaagttagtc

SEQ ID NO: 384858 - DNA, 15 bp, Homo sapiens
aacagcaaagttagt

SEQ ID NO: 384859 - DNA, 15 bp, Homo sapiens
gaacagcaaagttag

SEQ ID NO: 384860 - DNA, 15 bp, Homo sapiens
agaacagcaaagtta

SEQ ID NO: 384861 - DNA, 15 bp, Homo sapiens
aagaacagcaaagtt

SEQ ID NO: 384862 - DNA, 15 bp, Homo sapiens
gaagaacagcaaagt

SEQ ID NO: 384863 - DNA, 15 bp, Homo sapiens
tgaagaacagcaaag

SEQ ID NO: 384864 - DNA, 15 bp, Homo sapiens
ctgaagaacagcaaa

SEQ ID NO: 384865 - DNA, 15 bp, Homo sapiens
gctgaagaacagcaa

SEQ ID NO: 384866 - DNA, 15 bp, Homo sapiens
ggctgaagaacagca

SEQ ID NO: 384867 - DNA, 15 bp, Homo sapiens
gggctgaagaacagc

SEQ ID NO: 384868 - DNA, 15 bp, Homo sapiens
agggctgaagaacag

SEQ ID NO: 384869 - DNA, 15 bp, Homo sapiens
cagggctgaagaaca

SEQ ID NO: 384870 - DNA, 15 bp, Homo sapiens
acagggctgaagaac

SEQ ID NO: 384871 - DNA, 15 bp, Homo sapiens
cacagggctgaagaa

SEQ ID NO: 384872 - DNA, 15 bp, Homo sapiens
ccacagggctgaaga

SEQ ID NO: 384873 - DNA, 15 bp, Homo sapiens
accacagggctgaag

SEQ ID NO: 384874 - DNA, 15 bp, Homo sapiens
caccacagggctgaa

SEQ ID NO: 384875 - DNA, 15 bp, Homo sapiens
gcaccacagggctga

SEQ ID NO: 384876 - DNA, 15 bp, Homo sapiens
agcaccacagggctg

SEQ ID NO: 384877 - DNA, 15 bp, Homo sapiens
aagcaccacagggct

SEQ ID NO: 384878 - DNA, 15 bp, Homo sapiens
taagcaccacagggc

SEQ ID NO: 384879 - DNA, 15 bp, Homo sapiens
gtaagcaccacaggg

SEQ ID NO: 384880 - DNA, 15 bp, Homo sapiens
agtaagcaccacagg

SEQ ID NO: 384881 - DNA, 15 bp, Homo sapiens
gagtaagcaccacag

SEQ ID NO: 384882 - DNA, 15 bp, Homo sapiens
agagtaagcaccaca

SEQ ID NO: 384883 - DNA, 15 bp, Homo sapiens
aagagtaagcaccac

SEQ ID NO: 384884 - DNA, 15 bp, Homo sapiens
gaagagtaagcacca

SEQ ID NO: 384885 - DNA, 15 bp, Homo sapiens
ggaagagtaagcacc

SEQ ID NO: 384886 - DNA, 15 bp, Homo sapiens
aggaagagtaagcac

SEQ ID NO: 384887 - DNA, 15 bp, Homo sapiens
caggaagagtaagca

SEQ ID NO: 384888 - DNA, 15 bp, Homo sapiens
acaggaagagtaagc

SEQ ID NO: 384889 - DNA, 15 bp, Homo sapiens
cacaggaagagtaag

SEQ ID NO: 384890 - DNA, 15 bp, Homo sapiens
tcacaggaagagtaa

SEQ ID NO: 384891 - DNA, 15 bp, Homo sapiens
atcacaggaagagta

SEQ ID NO: 384892 - DNA, 15 bp, Homo sapiens
catcacaggaagagt

SEQ ID NO: 384893 - DNA, 15 bp, Homo sapiens
tcatcacaggaagag

SEQ ID NO: 384894 - DNA, 15 bp, Homo sapiens
ttcatcacaggaaga

SEQ ID NO: 384895 - DNA, 15 bp, Homo sapiens
cttcatcacaggaag

SEQ ID NO: 384896 - DNA, 15 bp, Homo sapiens
ccttcatcacaggaa

SEQ ID NO: 384897 - DNA, 15 bp, Homo sapiens
gccttcatcacagga

SEQ ID NO: 384898 - DNA, 15 bp, Homo sapiens
tgccttcatcacagg

SEQ ID NO: 384899 - DNA, 15 bp, Homo sapiens
ttgccttcatcacag

SEQ ID NO: 384900 - DNA, 15 bp, Homo sapiens
cttgccttcatcaca

SEQ ID NO: 384901 - DNA, 15 bp, Homo sapiens
acttgccttcatcac

SEQ ID NO: 384902 - DNA, 15 bp, Homo sapiens
cacttgccttcatca

SEQ ID NO: 384903 - DNA, 15 bp, Homo sapiens
acacttgccttcatc

SEQ ID NO: 384904 - DNA, 15 bp, Homo sapiens
cacacttgccttcat

SEQ ID NO: 384905 - DNA, 15 bp, Homo sapiens
acacacttgccttca

SEQ ID NO: 384906 - DNA, 15 bp, Homo sapiens
aacacacttgccttc

SEQ ID NO: 384907 - DNA, 15 bp, Homo sapiens
gaacacacttgcctt

SEQ ID NO: 384908 - DNA, 15 bp, Homo sapiens
ggaacacacttgcct

SEQ ID NO: 384909 - DNA, 15 bp, Homo sapiens
aggaacacacttgcc

SEQ ID NO: 384910 - DNA, 15 bp, Homo sapiens
caggaacacacttgc

SEQ ID NO: 384911 - DNA, 15 bp, Homo sapiens
ccaggaacacacttg

SEQ ID NO: 384912 - DNA, 15 bp, Homo sapiens
tccaggaacacactt

SEQ ID NO: 384913 - DNA, 15 bp, Homo sapiens
ctccaggaacacact

SEQ ID NO: 384914 - DNA, 15 bp, Homo sapiens
tctccaggaacacac

SEQ ID NO: 384915 - DNA, 15 bp, Homo sapiens
ctctccaggaacaca

SEQ ID NO: 384916 - DNA, 15 bp, Homo sapiens
cctctccaggaacac

SEQ ID NO: 384917 - DNA, 15 bp, Homo sapiens
acctctccaggaaca

SEQ ID NO: 384918 - DNA, 15 bp, Homo sapiens
aacctctccaggaac

SEQ ID NO: 384919 - DNA, 15 bp, Homo sapiens
taacctctccaggaa

SEQ ID NO: 384920 - DNA, 15 bp, Homo sapiens
gtaacctctccagga

SEQ ID NO: 384921 - DNA, 15 bp, Homo sapiens
agtaacctctccagg

SEQ ID NO: 384922 - DNA, 15 bp, Homo sapiens
cagtaacctctccag

SEQ ID NO: 384923 - DNA, 15 bp, Homo sapiens
tcagtaacctctcca

SEQ ID NO: 384924 - DNA, 15 bp, Homo sapiens
ttcagtaacctctcc

SEQ ID NO: 384925 - DNA, 15 bp, Homo sapiens
attcagtaacctctc

SEQ ID NO: 384926 - DNA, 15 bp, Homo sapiens
gattcagtaacctct

SEQ ID NO: 384927 - DNA, 15 bp, Homo sapiens
agattcagtaacctc

SEQ ID NO: 384928 - DNA, 15 bp, Homo sapiens
cagattcagtaacct

SEQ ID NO: 384929 - DNA, 15 bp, Homo sapiens
ccagattcagtaacc

SEQ ID NO: 384930 - DNA, 15 bp, Homo sapiens
tccagattcagtaac

SEQ ID NO: 384931 - DNA, 15 bp, Homo sapiens
ctccagattcagtaa

SEQ ID NO: 384932 - DNA, 15 bp, Homo sapiens
gctccagattcagta

SEQ ID NO: 384933 - DNA, 15 bp, Homo sapiens
agctccagattcagt

SEQ ID NO: 384934 - DNA, 15 bp, Homo sapiens
cagctccagattcag

SEQ ID NO: 384935 - DNA, 15 bp, Homo sapiens
gcagctccagattca

SEQ ID NO: 384936 - DNA, 15 bp, Homo sapiens
agcagctccagattc

SEQ ID NO: 384937 - DNA, 15 bp, Homo sapiens
aagcagctccagatt

SEQ ID NO: 384938 - DNA, 15 bp, Homo sapiens
aaagcagctccagat

SEQ ID NO: 384939 - DNA, 15 bp, Homo sapiens
aaaagcagctccaga

SEQ ID NO: 384940 - DNA, 15 bp, Homo sapiens
taaaagcagctccag

SEQ ID NO: 384941 - DNA, 15 bp, Homo sapiens
ctaaaagcagctcca

SEQ ID NO: 384942 - DNA, 15 bp, Homo sapiens
cctaaaagcagctcc

SEQ ID NO: 384943 - DNA, 15 bp, Homo sapiens
ccctaaaagcagctc

SEQ ID NO: 384944 - DNA, 15 bp, Homo sapiens
tccctaaaagcagct

SEQ ID NO: 384945 - DNA, 15 bp, Homo sapiens
ctccctaaaagcagc

SEQ ID NO: 384946 - DNA, 15 bp, Homo sapiens
actccctaaaagcag

SEQ ID NO: 384947 - DNA, 15 bp, Homo sapiens
aactccctaaaagca

SEQ ID NO: 384948 - DNA, 15 bp, Homo sapiens
caactccctaaaagc

SEQ ID NO: 384949 - DNA, 15 bp, Homo sapiens
gcaactccctaaaag

SEQ ID NO: 384950 - DNA, 15 bp, Homo sapiens
tgcaactccctaaaa

SEQ ID NO: 384951 - DNA, 15 bp, Homo sapiens
ctgcaactccctaaa

SEQ ID NO: 384952 - DNA, 15 bp, Homo sapiens
tctgcaactccctaa

SEQ ID NO: 384953 - DNA, 15 bp, Homo sapiens
atctgcaactcccta

SEQ ID NO: 384954 - DNA, 15 bp, Homo sapiens
catctgcaactccct

SEQ ID NO: 384955 - DNA, 15 bp, Homo sapiens
ccatctgcaactccc

SEQ ID NO: 384956 - DNA, 15 bp, Homo sapiens
gccatctgcaactcc

SEQ ID NO: 384957 - DNA, 15 bp, Homo sapiens
cgccatctgcaactc

SEQ ID NO: 384958 - DNA, 15 bp, Homo sapiens
gcgccatctgcaact

SEQ ID NO: 384959 - DNA, 15 bp, Homo sapiens
tgcgccatctgcaac

SEQ ID NO: 384960 - DNA, 15 bp, Homo sapiens
ctgcgccatctgcaa

SEQ ID NO: 384961 - DNA, 15 bp, Homo sapiens
cctgcgccatctgca

SEQ ID NO: 384962 - DNA, 15 bp, Homo sapiens
gcctgcgccatctgc

SEQ ID NO: 384963 - DNA, 15 bp, Homo sapiens
ggcctgcgccatctg

SEQ ID NO: 384964 - DNA, 15 bp, Homo sapiens
aggcctgcgccatct

SEQ ID NO: 384965 - DNA, 15 bp, Homo sapiens
gaggcctgcgccatc

SEQ ID NO: 384966 - DNA, 15 bp, Homo sapiens
ggaggcctgcgccat

SEQ ID NO: 384967 - DNA, 15 bp, Homo sapiens
gggaggcctgcgcca

SEQ ID NO: 384968 - DNA, 15 bp, Homo sapiens
agggaggcctgcgcc

SEQ ID NO: 384969 - DNA, 15 bp, Homo sapiens
aagggaggcctgcgc

SEQ ID NO: 384970 - DNA, 15 bp, Homo sapiens
gaagggaggcctgcg

SEQ ID NO: 384971 - DNA, 15 bp, Homo sapiens
ggaagggaggcctgc

SEQ ID NO: 384972 - DNA, 15 bp, Homo sapiens
aggaagggaggcctg

SEQ ID NO: 384973 - DNA, 15 bp, Homo sapiens
gaggaagggaggcct

SEQ ID NO: 384974 - DNA, 15 bp, Homo sapiens
ggaggaagggaggcc

SEQ ID NO: 384975 - DNA, 15 bp, Homo sapiens
aggaggaagggaggc

SEQ ID NO: 384976 - DNA, 15 bp, Homo sapiens
gaggaggaagggagg

SEQ ID NO: 384977 - DNA, 15 bp, Homo sapiens
tgaggaggaagggag

SEQ ID NO: 384978 - DNA, 15 bp, Homo sapiens
ttgaggaggaaggga

SEQ ID NO: 384979 - DNA, 15 bp, Homo sapiens
cttgaggaggaaggg

SEQ ID NO: 384980 - DNA, 15 bp, Homo sapiens
ccttgaggaggaagg

SEQ ID NO: 384981 - DNA, 15 bp, Homo sapiens
tccttgaggaggaag

SEQ ID NO: 384982 - DNA, 15 bp, Homo sapiens
ttccttgaggaggaa

SEQ ID NO: 384983 - DNA, 15 bp, Homo sapiens
cttccttgaggagga

SEQ ID NO: 384984 - DNA, 15 bp, Homo sapiens
gcttccttgaggagg

SEQ ID NO: 384985 - DNA, 15 bp, Homo sapiens
ggcttccttgaggag

SEQ ID NO: 384986 - DNA, 15 bp, Homo sapiens
tggcttccttgagga

SEQ ID NO: 384987 - DNA, 15 bp, Homo sapiens
ttggcttccttgagg

SEQ ID NO: 384988 - DNA, 15 bp, Homo sapiens
tttggcttccttgag

SEQ ID NO: 384989 - DNA, 15 bp, Homo sapiens
ctttggcttccttga

SEQ ID NO: 384990 - DNA, 15 bp, Homo sapiens
tctttggcttccttg

SEQ ID NO: 384991 - DNA, 15 bp, Homo sapiens
gtctttggcttcctt

SEQ ID NO: 384992 - DNA, 15 bp, Homo sapiens
tgtctttggcttcct

SEQ ID NO: 384993 - DNA, 15 bp, Homo sapiens
gtgtctttggcttcc

SEQ ID NO: 384994 - DNA, 15 bp, Homo sapiens
ggtgtctttggcttc

SEQ ID NO: 384995 - DNA, 15 bp, Homo sapiens
tggtgtctttggctt

SEQ ID NO: 384996 - DNA, 15 bp, Homo sapiens
atggtgtctttggct

SEQ ID NO: 384997 - DNA, 15 bp, Homo sapiens
gatggtgtctttggc

SEQ ID NO: 384998 - DNA, 15 bp, Homo sapiens
tgatggtgtctttgg

SEQ ID NO: 384999 - DNA, 15 bp, Homo sapiens
gtgatggtgtctttg

SEQ ID NO: 385000 - DNA, 15 bp, Homo sapiens
tgtgatggtgtcttt

SEQ ID NO: 385001 - DNA, 15 bp, Homo sapiens
ttgtgatggtgtctt

SEQ ID NO: 385002 - DNA, 15 bp, Homo sapiens
attgtgatggtgtct

SEQ ID NO: 385003 - DNA, 15 bp, Homo sapiens
gattgtgatggtgtc

SEQ ID NO: 385004 - DNA, 15 bp, Homo sapiens
tgattgtgatggtgt

SEQ ID NO: 385005 - DNA, 15 bp, Homo sapiens
ctgattgtgatggtg

SEQ ID NO: 385006 - DNA, 15 bp, Homo sapiens
cctgattgtgatggt

SEQ ID NO: 385007 - DNA, 15 bp, Homo sapiens
gcctgattgtgatgg

SEQ ID NO: 385008 - DNA, 15 bp, Homo sapiens
tgcctgattgtgatg

SEQ ID NO: 385009 - DNA, 15 bp, Homo sapiens
ctgcctgattgtgat

SEQ ID NO: 385010 - DNA, 15 bp, Homo sapiens
gctgcctgattgtga

SEQ ID NO: 385011 - DNA, 15 bp, Homo sapiens
ggctgcctgattgtg

SEQ ID NO: 385012 - DNA, 15 bp, Homo sapiens
tggctgcctgattgt

SEQ ID NO: 385013 - DNA, 15 bp, Homo sapiens
ctggctgcctgattg

SEQ ID NO: 385014 - DNA, 15 bp, Homo sapiens
cctggctgcctgatt

SEQ ID NO: 385015 - DNA, 15 bp, Homo sapiens
tcctggctgcctgat

SEQ ID NO: 385016 - DNA, 15 bp, Homo sapiens
ctcctggctgcctga

SEQ ID NO: 385017 - DNA, 15 bp, Homo sapiens
gctcctggctgcctg

SEQ ID NO: 385018 - DNA, 15 bp, Homo sapiens
ggctcctggctgcct

SEQ ID NO: 385019 - DNA, 15 bp, Homo sapiens
tggctcctggctgcc

SEQ ID NO: 385020 - DNA, 15 bp, Homo sapiens
ctggctcctggctgc

SEQ ID NO: 385021 - DNA, 15 bp, Homo sapiens
cctggctcctggctg

SEQ ID NO: 385022 - DNA, 15 bp, Homo sapiens
ccctggctcctggct

SEQ ID NO: 385023 - DNA, 15 bp, Homo sapiens
gccctggctcctggc

SEQ ID NO: 385024 - DNA, 15 bp, Homo sapiens
agccctggctcctgg

SEQ ID NO: 385025 - DNA, 15 bp, Homo sapiens
aagccctggctcctg

SEQ ID NO: 385026 - DNA, 15 bp, Homo sapiens
gaagccctggctcct

SEQ ID NO: 385027 - DNA, 15 bp, Homo sapiens
ggaagccctggctcc

SEQ ID NO: 385028 - DNA, 15 bp, Homo sapiens
tggaagccctggctc

SEQ ID NO: 385029 - DNA, 15 bp, Homo sapiens
atggaagccctggct

SEQ ID NO: 385030 - DNA, 15 bp, Homo sapiens
tatggaagccctggc

SEQ ID NO: 385031 - DNA, 15 bp, Homo sapiens
ctatggaagccctgg

SEQ ID NO: 385032 - DNA, 15 bp, Homo sapiens
cctatggaagccctg

SEQ ID NO: 385033 - DNA, 15 bp, Homo sapiens
gcctatggaagccct

SEQ ID NO: 385034 - DNA, 15 bp, Homo sapiens
ggcctatggaagccc

SEQ ID NO: 385035 - DNA, 15 bp, Homo sapiens
gggcctatggaagcc

SEQ ID NO: 385036 - DNA, 15 bp, Homo sapiens
tgggcctatggaagc

SEQ ID NO: 385037 - DNA, 15 bp, Homo sapiens
ctgggcctatggaag

SEQ ID NO: 385038 - DNA, 15 bp, Homo sapiens
gctgggcctatggaa

SEQ ID NO: 385039 - DNA, 15 bp, Homo sapiens
agctgggcctatgga

SEQ ID NO: 385040 - DNA, 15 bp, Homo sapiens
gagctgggcctatgg

SEQ ID NO: 385041 - DNA, 15 bp, Homo sapiens
agagctgggcctatg

SEQ ID NO: 385042 - DNA, 15 bp, Homo sapiens
cagagctgggcctat

SEQ ID NO: 385043 - DNA, 15 bp, Homo sapiens
acagagctgggccta

SEQ ID NO: 385044 - DNA, 15 bp, Homo sapiens
tacagagctgggcct

SEQ ID NO: 385045 - DNA, 15 bp, Homo sapiens
gtacagagctgggcc

SEQ ID NO: 385046 - DNA, 15 bp, Homo sapiens
ggtacagagctgggc

SEQ ID NO: 385047 - DNA, 15 bp, Homo sapiens
aggtacagagctggg

SEQ ID NO: 385048 - DNA, 15 bp, Homo sapiens
caggtacagagctgg

SEQ ID NO: 385049 - DNA, 15 bp, Homo sapiens
acaggtacagagctg

SEQ ID NO: 385050 - DNA, 15 bp, Homo sapiens
tacaggtacagagct

SEQ ID NO: 385051 - DNA, 15 bp, Homo sapiens
ctacaggtacagagc

SEQ ID NO: 385052 - DNA, 15 bp, Homo sapiens
cctacaggtacagag

SEQ ID NO: 385053 - DNA, 15 bp, Homo sapiens
ccctacaggtacaga

SEQ ID NO: 385054 - DNA, 15 bp, Homo sapiens
cccctacaggtacag

SEQ ID NO: 385055 - DNA, 15 bp, Homo sapiens
ccccctacaggtaca

SEQ ID NO: 385056 - DNA, 15 bp, Homo sapiens
tccccctacaggtac

SEQ ID NO: 385057 - DNA, 15 bp, Homo sapiens
atccccctacaggta

SEQ ID NO: 385058 - DNA, 15 bp, Homo sapiens
catccccctacaggt

SEQ ID NO: 385059 - DNA, 15 bp, Homo sapiens
ccatccccctacagg

SEQ ID NO: 385060 - DNA, 15 bp, Homo sapiens
tccatccccctacag

SEQ ID NO: 385061 - DNA, 15 bp, Homo sapiens
ttccatccccctaca

SEQ ID NO: 385062 - DNA, 15 bp, Homo sapiens
attccatccccctac

SEQ ID NO: 385063 - DNA, 15 bp, Homo sapiens
gattccatcccccta

SEQ ID NO: 385064 - DNA, 15 bp, Homo sapiens
agattccatccccct

SEQ ID NO: 385065 - DNA, 15 bp, Homo sapiens
cagattccatccccc

SEQ ID NO: 385066 - DNA, 15 bp, Homo sapiens
gcagattccatcccc

SEQ ID NO: 385067 - DNA, 15 bp, Homo sapiens
agcagattccatccc

SEQ ID NO: 385068 - DNA, 15 bp, Homo sapiens
tagcagattccatcc

SEQ ID NO: 385069 - DNA, 15 bp, Homo sapiens
ttagcagattccatc

SEQ ID NO: 385070 - DNA, 15 bp, Homo sapiens
tttagcagattccat

SEQ ID NO: 385071 - DNA, 15 bp, Homo sapiens
ttttagcagattcca

SEQ ID NO: 385072 - DNA, 15 bp, Homo sapiens
cttttagcagattcc

SEQ ID NO: 385073 - DNA, 15 bp, Homo sapiens
acttttagcagattc

SEQ ID NO: 385074 - DNA, 15 bp, Homo sapiens
cacttttagcagatt

SEQ ID NO: 385075 - DNA, 15 bp, Homo sapiens
acacttttagcagat

SEQ ID NO: 385076 - DNA, 15 bp, Homo sapiens
aacacttttagcaga

SEQ ID NO: 385077 - DNA, 15 bp, Homo sapiens
gaacacttttagcag

SEQ ID NO: 385078 - DNA, 15 bp, Homo sapiens
agaacacttttagca

SEQ ID NO: 385079 - DNA, 15 bp, Homo sapiens
cagaacacttttagc

SEQ ID NO: 385080 - DNA, 15 bp, Homo sapiens
ccagaacacttttag

SEQ ID NO: 385081 - DNA, 15 bp, Homo sapiens
tccagaacactttta

SEQ ID NO: 385082 - DNA, 15 bp, Homo sapiens
ctccagaacactttt

SEQ ID NO: 385083 - DNA, 15 bp, Homo sapiens
actccagaacacttt

SEQ ID NO: 385084 - DNA, 15 bp, Homo sapiens
gactccagaacactt

SEQ ID NO: 385085 - DNA, 15 bp, Homo sapiens
tgactccagaacact

SEQ ID NO: 385086 - DNA, 15 bp, Homo sapiens
atgactccagaacac

SEQ ID NO: 385087 - DNA, 15 bp, Homo sapiens
aatgactccagaaca

SEQ ID NO: 385088 - DNA, 15 bp, Homo sapiens
gaatgactccagaac

SEQ ID NO: 385089 - DNA, 15 bp, Homo sapiens
agaatgactccagaa

SEQ ID NO: 385090 - DNA, 15 bp, Homo sapiens
aagaatgactccaga

SEQ ID NO: 385091 - DNA, 15 bp, Homo sapiens
caagaatgactccag

SEQ ID NO: 385092 - DNA, 15 bp, Homo sapiens
ccaagaatgactcca

SEQ ID NO: 385093 - DNA, 15 bp, Homo sapiens
tccaagaatgactcc

SEQ ID NO: 385094 - DNA, 15 bp, Homo sapiens
atccaagaatgactc

SEQ ID NO: 385095 - DNA, 15 bp, Homo sapiens
tatccaagaatgact

SEQ ID NO: 385096 - DNA, 15 bp, Homo sapiens
atatccaagaatgac

SEQ ID NO: 385097 - DNA, 15 bp, Homo sapiens
gatatccaagaatga

SEQ ID NO: 385098 - DNA, 15 bp, Homo sapiens
agatatccaagaatg

SEQ ID NO: 385099 - DNA, 15 bp, Homo sapiens
cagatatccaagaat

SEQ ID NO: 385100 - DNA, 15 bp, Homo sapiens
gcagatatccaagaa

SEQ ID NO: 385101 - DNA, 15 bp, Homo sapiens
agcagatatccaaga

SEQ ID NO: 385102 - DNA, 15 bp, Homo sapiens
aagcagatatccaag

SEQ ID NO: 385103 - DNA, 15 bp, Homo sapiens
caagcagatatccaa

SEQ ID NO: 385104 - DNA, 15 bp, Homo sapiens
ccaagcagatatcca

SEQ ID NO: 385105 - DNA, 15 bp, Homo sapiens
accaagcagatatcc

SEQ ID NO: 385106 - DNA, 15 bp, Homo sapiens
taccaagcagatatc

SEQ ID NO: 385107 - DNA, 15 bp, Homo sapiens
ataccaagcagatat

SEQ ID NO: 385108 - DNA, 15 bp, Homo sapiens
gataccaagcagata

SEQ ID NO: 385109 - DNA, 15 bp, Homo sapiens
agataccaagcagat

SEQ ID NO: 385110 - DNA, 15 bp, Homo sapiens
aagataccaagcaga

SEQ ID NO: 385111 - DNA, 15 bp, Homo sapiens
gaagataccaagcag

SEQ ID NO: 385112 - DNA, 15 bp, Homo sapiens
agaagataccaagca

SEQ ID NO: 385113 - DNA, 15 bp, Homo sapiens
gagaagataccaagc

SEQ ID NO: 385114 - DNA, 15 bp, Homo sapiens
tgagaagataccaag

SEQ ID NO: 385115 - DNA, 15 bp, Homo sapiens
ttgagaagataccaa

SEQ ID NO: 385116 - DNA, 15 bp, Homo sapiens
attgagaagatacca

SEQ ID NO: 385117 - DNA, 15 bp, Homo sapiens
tattgagaagatacc

SEQ ID NO: 385118 - DNA, 15 bp, Homo sapiens
atattgagaagatac

SEQ ID NO: 385119 - DNA, 15 bp, Homo sapiens
gatattgagaagata

SEQ ID NO: 385120 - DNA, 15 bp, Homo sapiens
agatattgagaagat

SEQ ID NO: 385121 - DNA, 15 bp, Homo sapiens
aagatattgagaaga

SEQ ID NO: 385122 - DNA, 15 bp, Homo sapiens
caagatattgagaag

SEQ ID NO: 385123 - DNA, 15 bp, Homo sapiens
tcaagatattgagaa

SEQ ID NO: 385124 - DNA, 15 bp, Homo sapiens
gtcaagatattgaga

SEQ ID NO: 385125 - DNA, 15 bp, Homo sapiens
ggtcaagatattgag

SEQ ID NO: 385126 - DNA, 15 bp, Homo sapiens
tggtcaagatattga

SEQ ID NO: 385127 - DNA, 15 bp, Homo sapiens
atggtcaagatattg

SEQ ID NO: 385128 - DNA, 15 bp, Homo sapiens
gatggtcaagatatt

SEQ ID NO: 385129 - DNA, 15 bp, Homo sapiens
agatggtcaagatat

SEQ ID NO: 385130 - DNA, 15 bp, Homo sapiens
cagatggtcaagata

SEQ ID NO: 385131 - DNA, 15 bp, Homo sapiens
acagatggtcaagat

SEQ ID NO: 385132 - DNA, 15 bp, Homo sapiens
cacagatggtcaaga

SEQ ID NO: 385133 - DNA, 15 bp, Homo sapiens
tcacagatggtcaag

SEQ ID NO: 385134 - DNA, 15 bp, Homo sapiens
gtcacagatggtcaa

SEQ ID NO: 385135 - DNA, 15 bp, Homo sapiens
tgtcacagatggtca

SEQ ID NO: 385136 - DNA, 15 bp, Homo sapiens
ttgtcacagatggtc

SEQ ID NO: 385137 - DNA, 15 bp, Homo sapiens
attgtcacagatggt

SEQ ID NO: 385138 - DNA, 15 bp, Homo sapiens
aattgtcacagatgg

SEQ ID NO: 385139 - DNA, 15 bp, Homo sapiens
aaattgtcacagatg

SEQ ID NO: 385140 - DNA, 15 bp, Homo sapiens
aaaattgtcacagat

SEQ ID NO: 385141 - DNA, 15 bp, Homo sapiens
taaaattgtcacaga

SEQ ID NO: 385142 - DNA, 15 bp, Homo sapiens
ttaaaattgtcacag

SEQ ID NO: 385143 - DNA, 15 bp, Homo sapiens
attaaaattgtcaca

SEQ ID NO: 385144 - DNA, 15 bp, Homo sapiens
gattaaaattgtcac

SEQ ID NO: 385145 - DNA, 15 bp, Homo sapiens
ggattaaaattgtca

SEQ ID NO: 385146 - DNA, 15 bp, Homo sapiens
aggattaaaattgtc

SEQ ID NO: 385147 - DNA, 15 bp, Homo sapiens
gaggattaaaattgt

SEQ ID NO: 385148 - DNA, 15 bp, Homo sapiens
tgaggattaaaattg

SEQ ID NO: 385149 - DNA, 15 bp, Homo sapiens
atgaggattaaaatt

SEQ ID NO: 385150 - DNA, 15 bp, Homo sapiens
aatgaggattaaaat

SEQ ID NO: 385151 - DNA, 15 bp, Homo sapiens
aaatgaggattaaaa

SEQ ID NO: 385152 - DNA, 15 bp, Homo sapiens
caaatgaggattaaa

SEQ ID NO: 385153 - DNA, 15 bp, Homo sapiens
tcaaatgaggattaa

SEQ ID NO: 385154 - DNA, 15 bp, Homo sapiens
atcaaatgaggatta

SEQ ID NO: 385155 - DNA, 15 bp, Homo sapiens
gatcaaatgaggatt

SEQ ID NO: 385156 - DNA, 15 bp, Homo sapiens
tgatcaaatgaggat

SEQ ID NO: 385157 - DNA, 15 bp, Homo sapiens
atgatcaaatgagga

SEQ ID NO: 385158 - DNA, 15 bp, Homo sapiens
tatgatcaaatgagg

SEQ ID NO: 385159 - DNA, 15 bp, Homo sapiens
atatgatcaaatgag

SEQ ID NO: 385160 - DNA, 15 bp, Homo sapiens
aatatgatcaaatga

SEQ ID NO: 385161 - DNA, 15 bp, Homo sapiens
aaatatgatcaaatg

SEQ ID NO: 385162 - DNA, 15 bp, Homo sapiens
aaaatatgatcaaat

SEQ ID NO: 385163 - DNA, 15 bp, Homo sapiens
taaaatatgatcaaa

SEQ ID NO: 385164 - DNA, 15 bp, Homo sapiens
ataaaatatgatcaa

SEQ ID NO: 385165 - DNA, 15 bp, Homo sapiens
cataaaatatgatca

SEQ ID NO: 385166 - DNA, 15 bp, Homo sapiens
ccataaaatatgatc

SEQ ID NO: 385167 - DNA, 15 bp, Homo sapiens
accataaaatatgat

SEQ ID NO: 385168 - DNA, 15 bp, Homo sapiens
taccataaaatatga

SEQ ID NO: 385169 - DNA, 15 bp, Homo sapiens
ttaccataaaatatg

SEQ ID NO: 385170 - DNA, 15 bp, Homo sapiens
tttaccataaaatat

SEQ ID NO: 385171 - DNA, 15 bp, Homo sapiens
atttaccataaaata

SEQ ID NO: 385172 - DNA, 15 bp, Homo sapiens
catttaccataaaat

SEQ ID NO: 385173 - DNA, 15 bp, Homo sapiens
tcatttaccataaaa

SEQ ID NO: 385174 - DNA, 15 bp, Homo sapiens
ctcatttaccataaa

SEQ ID NO: 385175 - DNA, 15 bp, Homo sapiens
gctcatttaccataa

SEQ ID NO: 385176 - DNA, 15 bp, Homo sapiens
agctcatttaccata

SEQ ID NO: 385177 - DNA, 15 bp, Homo sapiens
aagctcatttaccat

SEQ ID NO: 385178 - DNA, 15 bp, Homo sapiens
taagctcatttacca

SEQ ID NO: 385179 - DNA, 15 bp, Homo sapiens
ttaagctcatttacc

SEQ ID NO: 385180 - DNA, 15 bp, Homo sapiens
gttaagctcatttac

SEQ ID NO: 385181 - DNA, 15 bp, Homo sapiens
agttaagctcattta

SEQ ID NO: 385182 - DNA, 15 bp, Homo sapiens
gagttaagctcattt

SEQ ID NO: 385183 - DNA, 15 bp, Homo sapiens
cgagttaagctcatt

SEQ ID NO: 385184 - DNA, 15 bp, Homo sapiens
tcgagttaagctcat

SEQ ID NO: 385185 - DNA, 15 bp, Homo sapiens
atcgagttaagctca

SEQ ID NO: 385186 - DNA, 15 bp, Homo sapiens
aatcgagttaagctc

SEQ ID NO: 385187 - DNA, 15 bp, Homo sapiens
aaatcgagttaagct

SEQ ID NO: 385188 - DNA, 15 bp, Homo sapiens
aaaatcgagttaagc

SEQ ID NO: 385189 - DNA, 15 bp, Homo sapiens
aaaaatcgagttaag

SEQ ID NO: 385190 - DNA, 15 bp, Homo sapiens
aaaaaatcgagttaa

SEQ ID NO: 385191 - DNA, 15 bp, Homo sapiens
aaaaaaatcgagtta

SEQ ID NO: 385192 - DNA, 15 bp, Homo sapiens
aaaaaaaatcgagtt

SEQ ID NO: 385193 - DNA, 15 bp, Homo sapiens
aaaaaaaaatcgagt

SEQ ID NO: 385194 - DNA, 15 bp, Homo sapiens
taaaaaaaaatcgag

SEQ ID NO: 385195 - DNA, 15 bp, Homo sapiens
ttaaaaaaaaatcga

SEQ ID NO: 385196 - DNA, 15 bp, Homo sapiens
attaaaaaaaaatcg

SEQ ID NO: 385197 - DNA, 15 bp, Homo sapiens
aattaaaaaaaaatc

SEQ ID NO: 385198 - DNA, 15 bp, Homo sapiens
aaattaaaaaaaaat

SEQ ID NO: 385199 - DNA, 15 bp, Homo sapiens
taaattaaaaaaaaa

SEQ ID NO: 385200 - DNA, 15 bp, Homo sapiens
ctaaattaaaaaaaa

SEQ ID NO: 385201 - DNA, 15 bp, Homo sapiens
tctaaattaaaaaaa

SEQ ID NO: 385202 - DNA, 15 bp, Homo sapiens
atctaaattaaaaaa

SEQ ID NO: 385203 - DNA, 15 bp, Homo sapiens
catctaaattaaaaa

SEQ ID NO: 385204 - DNA, 15 bp, Homo sapiens
gcatctaaattaaaa

SEQ ID NO: 385205 - DNA, 15 bp, Homo sapiens
ggcatctaaattaaa

SEQ ID NO: 385206 - DNA, 15 bp, Homo sapiens
aggcatctaaattaa

SEQ ID NO: 385207 - DNA, 15 bp, Homo sapiens
gaggcatctaaatta

SEQ ID NO: 385208 - DNA, 15 bp, Homo sapiens
ggaggcatctaaatt

SEQ ID NO: 385209 - DNA, 15 bp, Homo sapiens
aggaggcatctaaat

SEQ ID NO: 385210 - DNA, 15 bp, Homo sapiens
taggaggcatctaaa

SEQ ID NO: 385211 - DNA, 15 bp, Homo sapiens
ttaggaggcatctaa

SEQ ID NO: 385212 - DNA, 15 bp, Homo sapiens
attaggaggcatcta

SEQ ID NO: 385213 - DNA, 15 bp, Homo sapiens
cattaggaggcatct

SEQ ID NO: 385214 - DNA, 15 bp, Homo sapiens
acattaggaggcatc

SEQ ID NO: 385215 - DNA, 15 bp, Homo sapiens
tacattaggaggcat

SEQ ID NO: 385216 - DNA, 15 bp, Homo sapiens
gtacattaggaggca

SEQ ID NO: 385217 - DNA, 15 bp, Homo sapiens
agtacattaggaggc

SEQ ID NO: 385218 - DNA, 15 bp, Homo sapiens
tagtacattaggagg

SEQ ID NO: 385219 - DNA, 15 bp, Homo sapiens
atagtacattaggag

SEQ ID NO: 385220 - DNA, 15 bp, Homo sapiens
tatagtacattagga

SEQ ID NO: 385221 - DNA, 15 bp, Homo sapiens
ttatagtacattagg

SEQ ID NO: 385222 - DNA, 15 bp, Homo sapiens
gttatagtacattag

SEQ ID NO: 385223 - DNA, 15 bp, Homo sapiens
tgttatagtacatta

SEQ ID NO: 385224 - DNA, 15 bp, Homo sapiens
ctgttatagtacatt

SEQ ID NO: 385225 - DNA, 15 bp, Homo sapiens
cctgttatagtacat

SEQ ID NO: 385226 - DNA, 15 bp, Homo sapiens
acctgttatagtaca

SEQ ID NO: 385227 - DNA, 15 bp, Homo sapiens
cacctgttatagtac

SEQ ID NO: 385228 - DNA, 15 bp, Homo sapiens
gcacctgttatagta

SEQ ID NO: 385229 - DNA, 15 bp, Homo sapiens
agcacctgttatagt

SEQ ID NO: 385230 - DNA, 15 bp, Homo sapiens
tagcacctgttatag

SEQ ID NO: 385231 - DNA, 15 bp, Homo sapiens
atagcacctgttata

SEQ ID NO: 385232 - DNA, 15 bp, Homo sapiens
catagcacctgttat

SEQ ID NO: 385233 - DNA, 15 bp, Homo sapiens
tcatagcacctgtta

SEQ ID NO: 385234 - DNA, 15 bp, Homo sapiens
atcatagcacctgtt

SEQ ID NO: 385235 - DNA, 15 bp, Homo sapiens
tatcatagcacctgt

SEQ ID NO: 385236 - DNA, 15 bp, Homo sapiens
ttatcatagcacctg

SEQ ID NO: 385237 - DNA, 15 bp, Homo sapiens
cttatcatagcacct

SEQ ID NO: 385238 - DNA, 15 bp, Homo sapiens
tcttatcatagcacc

SEQ ID NO: 385239 - DNA, 15 bp, Homo sapiens
ttcttatcatagcac

SEQ ID NO: 385240 - DNA, 15 bp, Homo sapiens
tttcttatcatagca

SEQ ID NO: 385241 - DNA, 15 bp, Homo sapiens
ctttcttatcatagc

SEQ ID NO: 385242 - DNA, 15 bp, Homo sapiens
tctttcttatcatag

SEQ ID NO: 385243 - DNA, 15 bp, Homo sapiens
atctttcttatcata

SEQ ID NO: 385244 - DNA, 15 bp, Homo sapiens
catctttcttatcat

SEQ ID NO: 385245 - DNA, 15 bp, Homo sapiens
tcatctttcttatca

SEQ ID NO: 385246 - DNA, 15 bp, Homo sapiens
ttcatctttcttatc

SEQ ID NO: 385247 - DNA, 15 bp, Homo sapiens
attcatctttcttat

SEQ ID NO: 385248 - DNA, 15 bp, Homo sapiens
cattcatctttctta

SEQ ID NO: 385249 - DNA, 15 bp, Homo sapiens
tcattcatctttctt

SEQ ID NO: 385250 - DNA, 15 bp, Homo sapiens
ctcattcatctttct

SEQ ID NO: 385251 - DNA, 15 bp, Homo sapiens
actcattcatctttc

SEQ ID NO: 385252 - DNA, 15 bp, Homo sapiens
aactcattcatcttt

SEQ ID NO: 385253 - DNA, 15 bp, Homo sapiens
aaactcattcatctt

SEQ ID NO: 385254 - DNA, 15 bp, Homo sapiens
caaactcattcatct

SEQ ID NO: 385255 - DNA, 15 bp, Homo sapiens
acaaactcattcatc

SEQ ID NO: 385256 - DNA, 15 bp, Homo sapiens
tacaaactcattcat

SEQ ID NO: 385257 - DNA, 15 bp, Homo sapiens
ttacaaactcattca

SEQ ID NO: 385258 - DNA, 15 bp, Homo sapiens
tttacaaactcattc

SEQ ID NO: 385259 - DNA, 15 bp, Homo sapiens
ttttacaaactcatt

SEQ ID NO: 385260 - DNA, 15 bp, Homo sapiens
gttttacaaactcat

SEQ ID NO: 385261 - DNA, 15 bp, Homo sapiens
ggttttacaaactca

SEQ ID NO: 385262 - DNA, 15 bp, Homo sapiens
gggttttacaaactc

SEQ ID NO: 385263 - DNA, 15 bp, Homo sapiens
tgggttttacaaact

SEQ ID NO: 385264 - DNA, 15 bp, Homo sapiens
ctgggttttacaaac

SEQ ID NO: 385265 - DNA, 15 bp, Homo sapiens
cctgggttttacaaa

SEQ ID NO: 385266 - DNA, 15 bp, Homo sapiens
ccctgggttttacaa

SEQ ID NO: 385267 - DNA, 15 bp, Homo sapiens
accctgggttttaca

SEQ ID NO: 385268 - DNA, 15 bp, Homo sapiens
taccctgggttttac

SEQ ID NO: 385269 - DNA, 15 bp, Homo sapiens
ttaccctgggtttta

SEQ ID NO: 385270 - DNA, 15 bp, Homo sapiens
tttaccctgggtttt

SEQ ID NO: 385271 - DNA, 15 bp, Homo sapiens
atttaccctgggttt

SEQ ID NO: 385272 - DNA, 15 bp, Homo sapiens
tatttaccctgggtt

SEQ ID NO: 385273 - DNA, 15 bp, Homo sapiens
ttatttaccctgggt

SEQ ID NO: 385274 - DNA, 15 bp, Homo sapiens
cttatttaccctggg

SEQ ID NO: 385275 - DNA, 15 bp, Homo sapiens
ccttatttaccctgg

SEQ ID NO: 385276 - DNA, 15 bp, Homo sapiens
tccttatttaccctg

SEQ ID NO: 385277 - DNA, 15 bp, Homo sapiens
ctccttatttaccct

SEQ ID NO: 385278 - DNA, 15 bp, Homo sapiens
actccttatttaccc

SEQ ID NO: 385279 - DNA, 15 bp, Homo sapiens
aactccttatttacc

SEQ ID NO: 385280 - DNA, 15 bp, Homo sapiens
aaactccttatttac

SEQ ID NO: 385281 - DNA, 15 bp, Homo sapiens
taaactccttattta

SEQ ID NO: 385282 - DNA, 15 bp, Homo sapiens
gtaaactccttattt

SEQ ID NO: 385283 - DNA, 15 bp, Homo sapiens
agtaaactccttatt

SEQ ID NO: 385284 - DNA, 15 bp, Homo sapiens
tagtaaactccttat

SEQ ID NO: 385285 - DNA, 15 bp, Homo sapiens
gtagtaaactcctta

SEQ ID NO: 385286 - DNA, 15 bp, Homo sapiens
tgtagtaaactcctt

SEQ ID NO: 385287 - DNA, 15 bp, Homo sapiens
ttgtagtaaactcct

SEQ ID NO: 385288 - DNA, 15 bp, Homo sapiens
cttgtagtaaactcc

SEQ ID NO: 385289 - DNA, 15 bp, Homo sapiens
tcttgtagtaaactc

SEQ ID NO: 385290 - DNA, 15 bp, Homo sapiens
ttcttgtagtaaact

SEQ ID NO: 385291 - DNA, 15 bp, Homo sapiens
attcttgtagtaaac

SEQ ID NO: 385292 - DNA, 15 bp, Homo sapiens
tattcttgtagtaaa

SEQ ID NO: 385293 - DNA, 15 bp, Homo sapiens
gtattcttgtagtaa

SEQ ID NO: 385294 - DNA, 15 bp, Homo sapiens
tgtattcttgtagta

SEQ ID NO: 385295 - DNA, 15 bp, Homo sapiens
ttgtattcttgtagt

SEQ ID NO: 385296 - DNA, 15 bp, Homo sapiens
gttgtattcttgtag

SEQ ID NO: 385297 - DNA, 15 bp, Homo sapiens
agttgtattcttgta

SEQ ID NO: 385298 - DNA, 15 bp, Homo sapiens
aagttgtattcttgt

SEQ ID NO: 385299 - DNA, 15 bp, Homo sapiens
gaagttgtattcttg

SEQ ID NO: 385300 - DNA, 15 bp, Homo sapiens
ggaagttgtattctt

SEQ ID NO: 385301 - DNA, 15 bp, Homo sapiens
gggaagttgtattct

SEQ ID NO: 385302 - DNA, 15 bp, Homo sapiens
tgggaagttgtattc

SEQ ID NO: 385303 - DNA, 15 bp, Homo sapiens
atgggaagttgtatt

SEQ ID NO: 385304 - DNA, 15 bp, Homo sapiens
tatgggaagttgtat

SEQ ID NO: 385305 - DNA, 15 bp, Homo sapiens
atatgggaagttgta

SEQ ID NO: 385306 - DNA, 15 bp, Homo sapiens
catatgggaagttgt

SEQ ID NO: 385307 - DNA, 15 bp, Homo sapiens
gcatatgggaagttg

SEQ ID NO: 385308 - DNA, 15 bp, Homo sapiens
tgcatatgggaagtt

SEQ ID NO: 385309 - DNA, 15 bp, Homo sapiens
ttgcatatgggaagt

SEQ ID NO: 385310 - DNA, 15 bp, Homo sapiens
cttgcatatgggaag

SEQ ID NO: 385311 - DNA, 15 bp, Homo sapiens
tcttgcatatgggaa

SEQ ID NO: 385312 - DNA, 15 bp, Homo sapiens
atcttgcatatggga

SEQ ID NO: 385313 - DNA, 15 bp, Homo sapiens
catcttgcatatggg

SEQ ID NO: 385314 - DNA, 15 bp, Homo sapiens
ccatcttgcatatgg

SEQ ID NO: 385315 - DNA, 15 bp, Homo sapiens
cccatcttgcatatg

SEQ ID NO: 385316 - DNA, 15 bp, Homo sapiens
ccccatcttgcatat

SEQ ID NO: 385317 - DNA, 15 bp, Homo sapiens
gccccatcttgcata

SEQ ID NO: 385318 - DNA, 15 bp, Homo sapiens
agccccatcttgcat

SEQ ID NO: 385319 - DNA, 15 bp, Homo sapiens
cagccccatcttgca

SEQ ID NO: 385320 - DNA, 15 bp, Homo sapiens
ccagccccatcttgc

SEQ ID NO: 385321 - DNA, 15 bp, Homo sapiens
cccagccccatcttg

SEQ ID NO: 385322 - DNA, 15 bp, Homo sapiens
gcccagccccatctt

SEQ ID NO: 385323 - DNA, 15 bp, Homo sapiens
tgcccagccccatct

SEQ ID NO: 385324 - DNA, 15 bp, Homo sapiens
ttgcccagccccatc

SEQ ID NO: 385325 - DNA, 15 bp, Homo sapiens
cttgcccagccccat

SEQ ID NO: 385326 - DNA, 15 bp, Homo sapiens
ccttgcccagcccca

SEQ ID NO: 385327 - DNA, 15 bp, Homo sapiens
gccttgcccagcccc

SEQ ID NO: 385328 - DNA, 15 bp, Homo sapiens
agccttgcccagccc

SEQ ID NO: 385329 - DNA, 15 bp, Homo sapiens
cagccttgcccagcc

SEQ ID NO: 385330 - DNA, 15 bp, Homo sapiens
acagccttgcccagc

SEQ ID NO: 385331 - DNA, 15 bp, Homo sapiens
cacagccttgcccag

SEQ ID NO: 385332 - DNA, 15 bp, Homo sapiens
tcacagccttgccca

SEQ ID NO: 385333 - DNA, 15 bp, Homo sapiens
ctcacagccttgccc

SEQ ID NO: 385334 - DNA, 15 bp, Homo sapiens
tctcacagccttgcc

SEQ ID NO: 385335 - DNA, 15 bp, Homo sapiens
ctctcacagccttgc

SEQ ID NO: 385336 - DNA, 15 bp, Homo sapiens
gctctcacagccttg

SEQ ID NO: 385337 - DNA, 15 bp, Homo sapiens
agctctcacagcctt

SEQ ID NO: 385338 - DNA, 15 bp, Homo sapiens
aagctctcacagcct

SEQ ID NO: 385339 - DNA, 15 bp, Homo sapiens
gaagctctcacagcc

SEQ ID NO: 385340 - DNA, 15 bp, Homo sapiens
agaagctctcacagc

SEQ ID NO: 385341 - DNA, 15 bp, Homo sapiens
gagaagctctcacag

SEQ ID NO: 385342 - DNA, 15 bp, Homo sapiens
agagaagctctcaca

SEQ ID NO: 385343 - DNA, 15 bp, Homo sapiens
aagagaagctctcac

SEQ ID NO: 385344 - DNA, 15 bp, Homo sapiens
caagagaagctctca

SEQ ID NO: 385345 - DNA, 15 bp, Homo sapiens
tcaagagaagctctc

SEQ ID NO: 385346 - DNA, 15 bp, Homo sapiens
ttcaagagaagctct

SEQ ID NO: 385347 - DNA, 15 bp, Homo sapiens
attcaagagaagctc

SEQ ID NO: 385348 - DNA, 15 bp, Homo sapiens
aattcaagagaagct

SEQ ID NO: 385349 - DNA, 15 bp, Homo sapiens
caattcaagagaagc

SEQ ID NO: 385350 - DNA, 15 bp, Homo sapiens
tcaattcaagagaag

SEQ ID NO: 385351 - DNA, 15 bp, Homo sapiens
ctcaattcaagagaa

SEQ ID NO: 385352 - DNA, 15 bp, Homo sapiens
gctcaattcaagaga

SEQ ID NO: 385353 - DNA, 15 bp, Homo sapiens
ggctcaattcaagag

SEQ ID NO: 385354 - DNA, 15 bp, Homo sapiens
aggctcaattcaaga

SEQ ID NO: 385355 - DNA, 15 bp, Homo sapiens
taggctcaattcaag

SEQ ID NO: 385356 - DNA, 15 bp, Homo sapiens
ttaggctcaattcaa

SEQ ID NO: 385357 - DNA, 15 bp, Homo sapiens
cttaggctcaattca

SEQ ID NO: 385358 - DNA, 15 bp, Homo sapiens
tcttaggctcaattc

SEQ ID NO: 385359 - DNA, 15 bp, Homo sapiens
ctcttaggctcaatt

SEQ ID NO: 385360 - DNA, 15 bp, Homo sapiens
cctcttaggctcaat

SEQ ID NO: 385361 - DNA, 15 bp, Homo sapiens
tcctcttaggctcaa

SEQ ID NO: 385362 - DNA, 15 bp, Homo sapiens
atcctcttaggctca

SEQ ID NO: 385363 - DNA, 15 bp, Homo sapiens
catcctcttaggctc

SEQ ID NO: 385364 - DNA, 15 bp, Homo sapiens
tcatcctcttaggct

SEQ ID NO: 385365 - DNA, 15 bp, Homo sapiens
ctcatcctcttaggc

SEQ ID NO: 385366 - DNA, 15 bp, Homo sapiens
cctcatcctcttagg

SEQ ID NO: 385367 - DNA, 15 bp, Homo sapiens
tcctcatcctcttag

SEQ ID NO: 385368 - DNA, 15 bp, Homo sapiens
ctcctcatcctctta

SEQ ID NO: 385369 - DNA, 15 bp, Homo sapiens
tctcctcatcctctt

SEQ ID NO: 385370 - DNA, 15 bp, Homo sapiens
ttctcctcatcctct

SEQ ID NO: 385371 - DNA, 15 bp, Homo sapiens
attctcctcatcctc

SEQ ID NO: 385372 - DNA, 15 bp, Homo sapiens
aattctcctcatcct

SEQ ID NO: 385373 - DNA, 15 bp, Homo sapiens
gaattctcctcatcc

SEQ ID NO: 385374 - DNA, 15 bp, Homo sapiens
ggaattctcctcatc

SEQ ID NO: 385375 - DNA, 15 bp, Homo sapiens
tggaattctcctcat

SEQ ID NO: 385376 - DNA, 15 bp, Homo sapiens
atggaattctcctca

SEQ ID NO: 385377 - DNA, 15 bp, Homo sapiens
catggaattctcctc

SEQ ID NO: 385378 - DNA, 15 bp, Homo sapiens
tcatggaattctcct

SEQ ID NO: 385379 - DNA, 15 bp, Homo sapiens
atcatggaattctcc

SEQ ID NO: 385380 - DNA, 15 bp, Homo sapiens
aatcatggaattctc

SEQ ID NO: 385381 - DNA, 15 bp, Homo sapiens
caatcatggaattct

SEQ ID NO: 385382 - DNA, 15 bp, Homo sapiens
tcaatcatggaattc

SEQ ID NO: 385383 - DNA, 15 bp, Homo sapiens
ctcaatcatggaatt

SEQ ID NO: 385384 - DNA, 15 bp, Homo sapiens
cctcaatcatggaat

SEQ ID NO: 385385 - DNA, 15 bp, Homo sapiens
tcctcaatcatggaa

SEQ ID NO: 385386 - DNA, 15 bp, Homo sapiens
gtcctcaatcatgga

SEQ ID NO: 385387 - DNA, 15 bp, Homo sapiens
agtcctcaatcatgg

SEQ ID NO: 385388 - DNA, 15 bp, Homo sapiens
gagtcctcaatcatg

SEQ ID NO: 385389 - DNA, 15 bp, Homo sapiens
tgagtcctcaatcat

SEQ ID NO: 385390 - DNA, 15 bp, Homo sapiens
ctgagtcctcaatca

SEQ ID NO: 385391 - DNA, 15 bp, Homo sapiens
tctgagtcctcaatc

SEQ ID NO: 385392 - DNA, 15 bp, Homo sapiens
ctctgagtcctcaat

SEQ ID NO: 385393 - DNA, 15 bp, Homo sapiens
cctctgagtcctcaa

SEQ ID NO: 385394 - DNA, 15 bp, Homo sapiens
acctctgagtcctca

SEQ ID NO: 385395 - DNA, 15 bp, Homo sapiens
cacctctgagtcctc

SEQ ID NO: 385396 - DNA, 15 bp, Homo sapiens
ccacctctgagtcct

SEQ ID NO: 385397 - DNA, 15 bp, Homo sapiens
tccacctctgagtcc

SEQ ID NO: 385398 - DNA, 15 bp, Homo sapiens
gtccacctctgagtc

SEQ ID NO: 385399 - DNA, 15 bp, Homo sapiens
ggtccacctctgagt

SEQ ID NO: 385400 - DNA, 15 bp, Homo sapiens
aggtccacctctgag

SEQ ID NO: 385401 - DNA, 15 bp, Homo sapiens
gaggtccacctctga

SEQ ID NO: 385402 - DNA, 15 bp, Homo sapiens
ggaggtccacctctg

SEQ ID NO: 385403 - DNA, 15 bp, Homo sapiens
gggaggtccacctct

SEQ ID NO: 385404 - DNA, 15 bp, Homo sapiens
tgggaggtccacctc

SEQ ID NO: 385405 - DNA, 15 bp, Homo sapiens
ttgggaggtccacct

SEQ ID NO: 385406 - DNA, 15 bp, Homo sapiens
tttgggaggtccacc

SEQ ID NO: 385407 - DNA, 15 bp, Homo sapiens
gtttgggaggtccac

SEQ ID NO: 385408 - DNA, 15 bp, Homo sapiens
tgtttgggaggtcca

SEQ ID NO: 385409 - DNA, 15 bp, Homo sapiens
ttgtttgggaggtcc

SEQ ID NO: 385410 - DNA, 15 bp, Homo sapiens
tttgtttgggaggtc

SEQ ID NO: 385411 - DNA, 15 bp, Homo sapiens
ctttgtttgggaggt

SEQ ID NO: 385412 - DNA, 15 bp, Homo sapiens
cctttgtttgggagg

SEQ ID NO: 385413 - DNA, 15 bp, Homo sapiens
ccctttgtttgggag

SEQ ID NO: 385414 - DNA, 15 bp, Homo sapiens
tccctttgtttggga

SEQ ID NO: 385415 - DNA, 15 bp, Homo sapiens
gtccctttgtttggg

SEQ ID NO: 385416 - DNA, 15 bp, Homo sapiens
tgtccctttgtttgg

SEQ ID NO: 385417 - DNA, 15 bp, Homo sapiens
ttgtccctttgtttg

SEQ ID NO: 385418 - DNA, 15 bp, Homo sapiens
tttgtccctttgttt

SEQ ID NO: 385419 - DNA, 15 bp, Homo sapiens
ctttgtccctttgtt

SEQ ID NO: 385420 - DNA, 15 bp, Homo sapiens
actttgtccctttgt

SEQ ID NO: 385421 - DNA, 15 bp, Homo sapiens
aactttgtccctttg

SEQ ID NO: 385422 - DNA, 15 bp, Homo sapiens
caactttgtcccttt

SEQ ID NO: 385423 - DNA, 15 bp, Homo sapiens
acaactttgtccctt

SEQ ID NO: 385424 - DNA, 15 bp, Homo sapiens
cacaactttgtccct

SEQ ID NO: 385425 - DNA, 15 bp, Homo sapiens
tcacaactttgtccc

SEQ ID NO: 385426 - DNA, 15 bp, Homo sapiens
ttcacaactttgtcc

SEQ ID NO: 385427 - DNA, 15 bp, Homo sapiens
tttcacaactttgtc

SEQ ID NO: 385428 - DNA, 15 bp, Homo sapiens
ctttcacaactttgt

SEQ ID NO: 385429 - DNA, 15 bp, Homo sapiens
actttcacaactttg

SEQ ID NO: 385430 - DNA, 15 bp, Homo sapiens
cactttcacaacttt

SEQ ID NO: 385431 - DNA, 15 bp, Homo sapiens
gcactttcacaactt

SEQ ID NO: 385432 - DNA, 15 bp, Homo sapiens
tgcactttcacaact

SEQ ID NO: 385433 - DNA, 15 bp, Homo sapiens
ctgcactttcacaac

SEQ ID NO: 385434 - DNA, 15 bp, Homo sapiens
cctgcactttcacaa

SEQ ID NO: 385435 - DNA, 15 bp, Homo sapiens
acctgcactttcaca

SEQ ID NO: 385436 - DNA, 15 bp, Homo sapiens
gacctgcactttcac

SEQ ID NO: 385437 - DNA, 15 bp, Homo sapiens
tgacctgcactttca

SEQ ID NO: 385438 - DNA, 15 bp, Homo sapiens
ctgacctgcactttc

SEQ ID NO: 385439 - DNA, 15 bp, Homo sapiens
tctgacctgcacttt

SEQ ID NO: 385440 - DNA, 15 bp, Homo sapiens
atctgacctgcactt

SEQ ID NO: 385441 - DNA, 15 bp, Homo sapiens
aatctgacctgcact

SEQ ID NO: 385442 - DNA, 15 bp, Homo sapiens
gaatctgacctgcac

SEQ ID NO: 385443 - DNA, 15 bp, Homo sapiens
tgaatctgacctgca

SEQ ID NO: 385444 - DNA, 15 bp, Homo sapiens
ctgaatctgacctgc

SEQ ID NO: 385445 - DNA, 15 bp, Homo sapiens
tctgaatctgacctg

SEQ ID NO: 385446 - DNA, 15 bp, Homo sapiens
ctctgaatctgacct

SEQ ID NO: 385447 - DNA, 15 bp, Homo sapiens
tctctgaatctgacc

SEQ ID NO: 385448 - DNA, 15 bp, Homo sapiens
ttctctgaatctgac

SEQ ID NO: 385449 - DNA, 15 bp, Homo sapiens
cttctctgaatctga

SEQ ID NO: 385450 - DNA, 15 bp, Homo sapiens
tcttctctgaatctg

SEQ ID NO: 385451 - DNA, 15 bp, Homo sapiens
ctcttctctgaatct

SEQ ID NO: 385452 - DNA, 15 bp, Homo sapiens
gctcttctctgaatc

SEQ ID NO: 385453 - DNA, 15 bp, Homo sapiens
agctcttctctgaat

SEQ ID NO: 385454 - DNA, 15 bp, Homo sapiens
tagctcttctctgaa

SEQ ID NO: 385455 - DNA, 15 bp, Homo sapiens
ttagctcttctctga

SEQ ID NO: 385456 - DNA, 15 bp, Homo sapiens
attagctcttctctg

SEQ ID NO: 385457 - DNA, 15 bp, Homo sapiens
gattagctcttctct

SEQ ID NO: 385458 - DNA, 15 bp, Homo sapiens
cgattagctcttctc

SEQ ID NO: 385459 - DNA, 15 bp, Homo sapiens
acgattagctcttct

SEQ ID NO: 385460 - DNA, 15 bp, Homo sapiens
cacgattagctcttc

SEQ ID NO: 385461 - DNA, 15 bp, Homo sapiens
ccacgattagctctt

SEQ ID NO: 385462 - DNA, 15 bp, Homo sapiens
tccacgattagctct

SEQ ID NO: 385463 - DNA, 15 bp, Homo sapiens
ttccacgattagctc

SEQ ID NO: 385464 - DNA, 15 bp, Homo sapiens
attccacgattagct

SEQ ID NO: 385465 - DNA, 15 bp, Homo sapiens
aattccacgattagc

SEQ ID NO: 385466 - DNA, 15 bp, Homo sapiens
aaattccacgattag

SEQ ID NO: 385467 - DNA, 15 bp, Homo sapiens
taaattccacgatta

SEQ ID NO: 385468 - DNA, 15 bp, Homo sapiens
ttaaattccacgatt

SEQ ID NO: 385469 - DNA, 15 bp, Homo sapiens
attaaattccacgat

SEQ ID NO: 385470 - DNA, 15 bp, Homo sapiens
aattaaattccacga

SEQ ID NO: 385471 - DNA, 15 bp, Homo sapiens
aaattaaattccacg

SEQ ID NO: 385472 - DNA, 15 bp, Homo sapiens
taaattaaattccac

SEQ ID NO: 385473 - DNA, 15 bp, Homo sapiens
ttaaattaaattcca

SEQ ID NO: 385474 - DNA, 15 bp, Homo sapiens
tttaaattaaattcc

SEQ ID NO: 385475 - DNA, 15 bp, Homo sapiens
ttttaaattaaattc

SEQ ID NO: 385476 - DNA, 15 bp, Homo sapiens
attttaaattaaatt

SEQ ID NO: 385477 - DNA, 15 bp, Homo sapiens
tattttaaattaaat

SEQ ID NO: 385478 - DNA, 15 bp, Homo sapiens
ttattttaaattaaa

SEQ ID NO: 385479 - DNA, 15 bp, Homo sapiens
attattttaaattaa

SEQ ID NO: 385480 - DNA, 15 bp, Homo sapiens
tattattttaaatta

SEQ ID NO: 385481 - DNA, 15 bp, Homo sapiens
ttattattttaaatt

SEQ ID NO: 385482 - DNA, 15 bp, Homo sapiens
tttattattttaaat

SEQ ID NO: 385483 - DNA, 15 bp, Homo sapiens
ttttattattttaaa

SEQ ID NO: 385484 - DNA, 15 bp, Homo sapiens
cttttattattttaa

SEQ ID NO: 385485 - DNA, 15 bp, Homo sapiens
tcttttattatttta

SEQ ID NO: 385486 - DNA, 15 bp, Homo sapiens
ttcttttattatttt

SEQ ID NO: 385487 - DNA, 15 bp, Homo sapiens
tttcttttattattt

SEQ ID NO: 385488 - DNA, 15 bp, Homo sapiens
ttttcttttattatt

SEQ ID NO: 385489 - DNA, 15 bp, Homo sapiens
cttttcttttattat

SEQ ID NO: 385490 - DNA, 15 bp, Homo sapiens
ccttttcttttatta

SEQ ID NO: 385491 - DNA, 15 bp, Homo sapiens
tccttttcttttatt

SEQ ID NO: 385492 - DNA, 15 bp, Homo sapiens
gtccttttcttttat

SEQ ID NO: 385493 - DNA, 15 bp, Homo sapiens
agtccttttctttta

SEQ ID NO: 385494 - DNA, 15 bp, Homo sapiens
aagtccttttctttt

SEQ ID NO: 385495 - DNA, 15 bp, Homo sapiens
aaagtccttttcttt

SEQ ID NO: 385496 - DNA, 15 bp, Homo sapiens
caaagtccttttctt

SEQ ID NO: 385497 - DNA, 15 bp, Homo sapiens
tcaaagtccttttct

SEQ ID NO: 385498 - DNA, 15 bp, Homo sapiens
atcaaagtccttttc

SEQ ID NO: 385499 - DNA, 15 bp, Homo sapiens
catcaaagtcctttt

SEQ ID NO: 385500 - DNA, 15 bp, Homo sapiens
tcatcaaagtccttt

SEQ ID NO: 385501 - DNA, 15 bp, Homo sapiens
ttcatcaaagtcctt

SEQ ID NO: 385502 - DNA, 15 bp, Homo sapiens
gttcatcaaagtcct

SEQ ID NO: 385503 - DNA, 15 bp, Homo sapiens
tgttcatcaaagtcc

SEQ ID NO: 385504 - DNA, 15 bp, Homo sapiens
ttgttcatcaaagtc

SEQ ID NO: 385505 - DNA, 15 bp, Homo sapiens
gttgttcatcaaagt

SEQ ID NO: 385506 - DNA, 15 bp, Homo sapiens
ggttgttcatcaaag

SEQ ID NO: 385507 - DNA, 15 bp, Homo sapiens
tggttgttcatcaaa

SEQ ID NO: 385508 - DNA, 15 bp, Homo sapiens
atggttgttcatcaa

SEQ ID NO: 385509 - DNA, 15 bp, Homo sapiens
tatggttgttcatca

SEQ ID NO: 385510 - DNA, 15 bp, Homo sapiens
gtatggttgttcatc

SEQ ID NO: 385511 - DNA, 15 bp, Homo sapiens
ggtatggttgttcat

SEQ ID NO: 385512 - DNA, 15 bp, Homo sapiens
cggtatggttgttca

SEQ ID NO: 385513 - DNA, 15 bp, Homo sapiens
acggtatggttgttc

SEQ ID NO: 385514 - DNA, 15 bp, Homo sapiens
aacggtatggttgtt

SEQ ID NO: 385515 - DNA, 15 bp, Homo sapiens
aaacggtatggttgt

SEQ ID NO: 385516 - DNA, 15 bp, Homo sapiens
aaaacggtatggttg

SEQ ID NO: 385517 - DNA, 15 bp, Homo sapiens
aaaaacggtatggtt

SEQ ID NO: 385518 - DNA, 15 bp, Homo sapiens
taaaaacggtatggt

SEQ ID NO: 385519 - DNA, 15 bp, Homo sapiens
ctaaaaacggtatgg

SEQ ID NO: 385520 - DNA, 15 bp, Homo sapiens
gctaaaaacggtatg

SEQ ID NO: 385521 - DNA, 15 bp, Homo sapiens
agctaaaaacggtat

SEQ ID NO: 385522 - DNA, 15 bp, Homo sapiens
gagctaaaaacggta

SEQ ID NO: 385523 - DNA, 15 bp, Homo sapiens
agagctaaaaacggt

SEQ ID NO: 385524 - DNA, 15 bp, Homo sapiens
aagagctaaaaacgg

SEQ ID NO: 385525 - DNA, 15 bp, Homo sapiens
taagagctaaaaacg

SEQ ID NO: 385526 - DNA, 15 bp, Homo sapiens
gtaagagctaaaaac

SEQ ID NO: 385527 - DNA, 15 bp, Homo sapiens
tgtaagagctaaaaa

SEQ ID NO: 385528 - DNA, 15 bp, Homo sapiens
atgtaagagctaaaa

SEQ ID NO: 385529 - DNA, 15 bp, Homo sapiens
gatgtaagagctaaa

SEQ ID NO: 385530 - DNA, 15 bp, Homo sapiens
cgatgtaagagctaa

SEQ ID NO: 385531 - DNA, 15 bp, Homo sapiens
acgatgtaagagcta

SEQ ID NO: 385532 - DNA, 15 bp, Homo sapiens
cacgatgtaagagct

SEQ ID NO: 385533 - DNA, 15 bp, Homo sapiens
acacgatgtaagagc

SEQ ID NO: 385534 - DNA, 15 bp, Homo sapiens
tacacgatgtaagag

SEQ ID NO: 385535 - DNA, 15 bp, Homo sapiens
ctacacgatgtaaga

SEQ ID NO: 385536 - DNA, 15 bp, Homo sapiens
actacacgatgtaag

SEQ ID NO: 385537 - DNA, 15 bp, Homo sapiens
aactacacgatgtaa

SEQ ID NO: 385538 - DNA, 15 bp, Homo sapiens
aaactacacgatgta

SEQ ID NO: 385539 - DNA, 15 bp, Homo sapiens
aaaactacacgatgt

SEQ ID NO: 385540 - DNA, 15 bp, Homo sapiens
gaaaactacacgatg

SEQ ID NO: 385541 - DNA, 15 bp, Homo sapiens
ggaaaactacacgat

SEQ ID NO: 385542 - DNA, 15 bp, Homo sapiens
tggaaaactacacga

SEQ ID NO: 385543 - DNA, 15 bp, Homo sapiens
ttggaaaactacacg

SEQ ID NO: 385544 - DNA, 15 bp, Homo sapiens
cttggaaaactacac

SEQ ID NO: 385545 - DNA, 15 bp, Homo sapiens
acttggaaaactaca

SEQ ID NO: 385546 - DNA, 15 bp, Homo sapiens
tacttggaaaactac

SEQ ID NO: 385547 - DNA, 15 bp, Homo sapiens
ttacttggaaaacta

SEQ ID NO: 385548 - DNA, 15 bp, Homo sapiens
tttacttggaaaact

SEQ ID NO: 385549 - DNA, 15 bp, Homo sapiens
ttttacttggaaaac

SEQ ID NO: 385550 - DNA, 15 bp, Homo sapiens
tttttacttggaaaa

SEQ ID NO: 385551 - DNA, 15 bp, Homo sapiens
atttttacttggaaa

SEQ ID NO: 385552 - DNA, 15 bp, Homo sapiens
catttttacttggaa

SEQ ID NO: 385553 - DNA, 15 bp, Homo sapiens
gcatttttacttgga

SEQ ID NO: 385554 - DNA, 15 bp, Homo sapiens
agcatttttacttgg

SEQ ID NO: 385555 - DNA, 15 bp, Homo sapiens
aagcatttttacttg

SEQ ID NO: 385556 - DNA, 15 bp, Homo sapiens
aaagcatttttactt

SEQ ID NO: 385557 - DNA, 15 bp, Homo sapiens
caaagcatttttact

SEQ ID NO: 385558 - DNA, 15 bp, Homo sapiens
tcaaagcatttttac

SEQ ID NO: 385559 - DNA, 15 bp, Homo sapiens
ttcaaagcattttta

SEQ ID NO: 385560 - DNA, 15 bp, Homo sapiens
attcaaagcattttt

SEQ ID NO: 385561 - DNA, 15 bp, Homo sapiens
cattcaaagcatttt

SEQ ID NO: 385562 - DNA, 15 bp, Homo sapiens
gcattcaaagcattt

SEQ ID NO: 385563 - DNA, 15 bp, Homo sapiens
agcattcaaagcatt

SEQ ID NO: 385564 - DNA, 15 bp, Homo sapiens
cagcattcaaagcat

SEQ ID NO: 385565 - DNA, 15 bp, Homo sapiens
acagcattcaaagca

SEQ ID NO: 385566 - DNA, 15 bp, Homo sapiens
aacagcattcaaagc

SEQ ID NO: 385567 - DNA, 15 bp, Homo sapiens
aaacagcattcaaag

SEQ ID NO: 385568 - DNA, 15 bp, Homo sapiens
aaaacagcattcaaa

SEQ ID NO: 385569 - DNA, 15 bp, Homo sapiens
aaaaacagcattcaa

SEQ ID NO: 385570 - DNA, 15 bp, Homo sapiens
caaaaacagcattca

SEQ ID NO: 385571 - DNA, 15 bp, Homo sapiens
tcaaaaacagcattc

SEQ ID NO: 385572 - DNA, 15 bp, Homo sapiens
ctcaaaaacagcatt

SEQ ID NO: 385573 - DNA, 15 bp, Homo sapiens
cctcaaaaacagcat

SEQ ID NO: 385574 - DNA, 15 bp, Homo sapiens
acctcaaaaacagca

SEQ ID NO: 385575 - DNA, 15 bp, Homo sapiens
tacctcaaaaacagc

SEQ ID NO: 385576 - DNA, 15 bp, Homo sapiens
atacctcaaaaacag

SEQ ID NO: 385577 - DNA, 15 bp, Homo sapiens
tatacctcaaaaaca

SEQ ID NO: 385578 - DNA, 15 bp, Homo sapiens
gtatacctcaaaaac

SEQ ID NO: 385579 - DNA, 15 bp, Homo sapiens
agtatacctcaaaaa

SEQ ID NO: 385580 - DNA, 15 bp, Homo sapiens
tagtatacctcaaaa

SEQ ID NO: 385581 - DNA, 15 bp, Homo sapiens
gtagtatacctcaaa

SEQ ID NO: 385582 - DNA, 15 bp, Homo sapiens
agtagtatacctcaa

SEQ ID NO: 385583 - DNA, 15 bp, Homo sapiens
aagtagtatacctca

SEQ ID NO: 385584 - DNA, 15 bp, Homo sapiens
gaagtagtatacctc

SEQ ID NO: 385585 - DNA, 15 bp, Homo sapiens
ggaagtagtatacct

SEQ ID NO: 385586 - DNA, 15 bp, Homo sapiens
gggaagtagtatacc

SEQ ID NO: 385587 - DNA, 15 bp, Homo sapiens
agggaagtagtatac

SEQ ID NO: 385588 - DNA, 15 bp, Homo sapiens
tagggaagtagtata

SEQ ID NO: 385589 - DNA, 15 bp, Homo sapiens
gtagggaagtagtat

SEQ ID NO: 385590 - DNA, 15 bp, Homo sapiens
agtagggaagtagta

SEQ ID NO: 385591 - DNA, 15 bp, Homo sapiens
gagtagggaagtagt

SEQ ID NO: 385592 - DNA, 15 bp, Homo sapiens
ggagtagggaagtag

SEQ ID NO: 385593 - DNA, 15 bp, Homo sapiens
gggagtagggaagta

SEQ ID NO: 385594 - DNA, 15 bp, Homo sapiens
tgggagtagggaagt

SEQ ID NO: 385595 - DNA, 15 bp, Homo sapiens
gtgggagtagggaag

SEQ ID NO: 385596 - DNA, 15 bp, Homo sapiens
ggtgggagtagggaa

SEQ ID NO: 385597 - DNA, 15 bp, Homo sapiens
tggtgggagtaggga

SEQ ID NO: 385598 - DNA, 15 bp, Homo sapiens
ctggtgggagtaggg

SEQ ID NO: 385599 - DNA, 15 bp, Homo sapiens
gctggtgggagtagg

SEQ ID NO: 385600 - DNA, 15 bp, Homo sapiens
agctggtgggagtag

SEQ ID NO: 385601 - DNA, 15 bp, Homo sapiens
aagctggtgggagta

SEQ ID NO: 385602 - DNA, 15 bp, Homo sapiens
caagctggtgggagt

SEQ ID NO: 385603 - DNA, 15 bp, Homo sapiens
ccaagctggtgggag

SEQ ID NO: 385604 - DNA, 15 bp, Homo sapiens
gccaagctggtggga

SEQ ID NO: 385605 - DNA, 15 bp, Homo sapiens
agccaagctggtggg

SEQ ID NO: 385606 - DNA, 15 bp, Homo sapiens
gagccaagctggtgg

SEQ ID NO: 385607 - DNA, 15 bp, Homo sapiens
cgagccaagctggtg

SEQ ID NO: 385608 - DNA, 15 bp, Homo sapiens
acgagccaagctggt

SEQ ID NO: 385609 - DNA, 15 bp, Homo sapiens
cacgagccaagctgg

SEQ ID NO: 385610 - DNA, 15 bp, Homo sapiens
acacgagccaagctg

SEQ ID NO: 385611 - DNA, 15 bp, Homo sapiens
cacacgagccaagct

SEQ ID NO: 385612 - DNA, 15 bp, Homo sapiens
tcacacgagccaagc

SEQ ID NO: 385613 - DNA, 15 bp, Homo sapiens
gtcacacgagccaag

SEQ ID NO: 385614 - DNA, 15 bp, Homo sapiens
ggtcacacgagccaa

SEQ ID NO: 385615 - DNA, 15 bp, Homo sapiens
aggtcacacgagcca

SEQ ID NO: 385616 - DNA, 15 bp, Homo sapiens
aaggtcacacgagcc

SEQ ID NO: 385617 - DNA, 15 bp, Homo sapiens
gaaggtcacacgagc

SEQ ID NO: 385618 - DNA, 15 bp, Homo sapiens
cgaaggtcacacgag

SEQ ID NO: 385619 - DNA, 15 bp, Homo sapiens
acgaaggtcacacga

SEQ ID NO: 385620 - DNA, 15 bp, Homo sapiens
aacgaaggtcacacg

SEQ ID NO: 385621 - DNA, 15 bp, Homo sapiens
caacgaaggtcacac

SEQ ID NO: 385622 - DNA, 15 bp, Homo sapiens
gcaacgaaggtcaca

SEQ ID NO: 385623 - DNA, 15 bp, Homo sapiens
tgcaacgaaggtcac

SEQ ID NO: 385624 - DNA, 15 bp, Homo sapiens
atgcaacgaaggtca

SEQ ID NO: 385625 - DNA, 15 bp, Homo sapiens
aatgcaacgaaggtc

SEQ ID NO: 385626 - DNA, 15 bp, Homo sapiens
caatgcaacgaaggt

SEQ ID NO: 385627 - DNA, 15 bp, Homo sapiens
tcaatgcaacgaagg

SEQ ID NO: 385628 - DNA, 15 bp, Homo sapiens
ctcaatgcaacgaag

SEQ ID NO: 385629 - DNA, 15 bp, Homo sapiens
gctcaatgcaacgaa

SEQ ID NO: 385630 - DNA, 15 bp, Homo sapiens
ggctcaatgcaacga

SEQ ID NO: 385631 - DNA, 15 bp, Homo sapiens
tggctcaatgcaacg

SEQ ID NO: 385632 - DNA, 15 bp, Homo sapiens
ctggctcaatgcaac

SEQ ID NO: 385633 - DNA, 15 bp, Homo sapiens
actggctcaatgcaa

SEQ ID NO: 385634 - DNA, 15 bp, Homo sapiens
cactggctcaatgca

SEQ ID NO: 385635 - DNA, 15 bp, Homo sapiens
gcactggctcaatgc

SEQ ID NO: 385636 - DNA, 15 bp, Homo sapiens
ggcactggctcaatg

SEQ ID NO: 385637 - DNA, 15 bp, Homo sapiens
tggcactggctcaat

SEQ ID NO: 385638 - DNA, 15 bp, Homo sapiens
atggcactggctcaa

SEQ ID NO: 385639 - DNA, 15 bp, Homo sapiens
aatggcactggctca

SEQ ID NO: 385640 - DNA, 15 bp, Homo sapiens
aaatggcactggctc

SEQ ID NO: 385641 - DNA, 15 bp, Homo sapiens
taaatggcactggct

SEQ ID NO: 385642 - DNA, 15 bp, Homo sapiens
ctaaatggcactggc

SEQ ID NO: 385643 - DNA, 15 bp, Homo sapiens
cctaaatggcactgg

SEQ ID NO: 385644 - DNA, 15 bp, Homo sapiens
ccctaaatggcactg

SEQ ID NO: 385645 - DNA, 15 bp, Homo sapiens
accctaaatggcact

SEQ ID NO: 385646 - DNA, 15 bp, Homo sapiens
taccctaaatggcac

SEQ ID NO: 385647 - DNA, 15 bp, Homo sapiens
ctaccctaaatggca

SEQ ID NO: 385648 - DNA, 15 bp, Homo sapiens
cctaccctaaatggc

SEQ ID NO: 385649 - DNA, 15 bp, Homo sapiens
ccctaccctaaatgg

SEQ ID NO: 385650 - DNA, 15 bp, Homo sapiens
tccctaccctaaatg

SEQ ID NO: 385651 - DNA, 15 bp, Homo sapiens
atccctaccctaaat

SEQ ID NO: 385652 - DNA, 15 bp, Homo sapiens
tatccctaccctaaa

SEQ ID NO: 385653 - DNA, 15 bp, Homo sapiens
atatccctaccctaa

SEQ ID NO: 385654 - DNA, 15 bp, Homo sapiens
tatatccctacccta

SEQ ID NO: 385655 - DNA, 15 bp, Homo sapiens
ctatatccctaccct

SEQ ID NO: 385656 - DNA, 15 bp, Homo sapiens
actatatccctaccc

SEQ ID NO: 385657 - DNA, 15 bp, Homo sapiens
aactatatccctacc

SEQ ID NO: 385658 - DNA, 15 bp, Homo sapiens
gaactatatccctac

SEQ ID NO: 385659 - DNA, 15 bp, Homo sapiens
tgaactatatcccta

SEQ ID NO: 385660 - DNA, 15 bp, Homo sapiens
ttgaactatatccct

SEQ ID NO: 385661 - DNA, 15 bp, Homo sapiens
tttgaactatatccc

SEQ ID NO: 385662 - DNA, 15 bp, Homo sapiens
ctttgaactatatcc

SEQ ID NO: 385663 - DNA, 15 bp, Homo sapiens
tctttgaactatatc

SEQ ID NO: 385664 - DNA, 15 bp, Homo sapiens
ttctttgaactatat

SEQ ID NO: 385665 - DNA, 15 bp, Homo sapiens
attctttgaactata

SEQ ID NO: 385666 - DNA, 15 bp, Homo sapiens
aattctttgaactat

SEQ ID NO: 385667 - DNA, 15 bp, Homo sapiens
gaattctttgaacta

SEQ ID NO: 385668 - DNA, 15 bp, Homo sapiens
ggaattctttgaact

SEQ ID NO: 385669 - DNA, 15 bp, Homo sapiens
tggaattctttgaac

SEQ ID NO: 385670 - DNA, 15 bp, Homo sapiens
gtggaattctttgaa

SEQ ID NO: 385671 - DNA, 15 bp, Homo sapiens
tgtggaattctttga

SEQ ID NO: 385672 - DNA, 15 bp, Homo sapiens
ctgtggaattctttg

SEQ ID NO: 385673 - DNA, 15 bp, Homo sapiens
actgtggaattcttt

SEQ ID NO: 385674 - DNA, 15 bp, Homo sapiens
tactgtggaattctt

SEQ ID NO: 385675 - DNA, 15 bp, Homo sapiens
atactgtggaattct

SEQ ID NO: 385676 - DNA, 15 bp, Homo sapiens
aatactgtggaattc

SEQ ID NO: 385677 - DNA, 15 bp, Homo sapiens
gaatactgtggaatt

SEQ ID NO: 385678 - DNA, 15 bp, Homo sapiens
agaatactgtggaat

SEQ ID NO: 385679 - DNA, 15 bp, Homo sapiens
gagaatactgtggaa

SEQ ID NO: 385680 - DNA, 15 bp, Homo sapiens
agagaatactgtgga

SEQ ID NO: 385681 - DNA, 15 bp, Homo sapiens
aagagaatactgtgg

SEQ ID NO: 385682 - DNA, 15 bp, Homo sapiens
taagagaatactgtg

SEQ ID NO: 385683 - DNA, 15 bp, Homo sapiens
ctaagagaatactgt

SEQ ID NO: 385684 - DNA, 15 bp, Homo sapiens
tctaagagaatactg

SEQ ID NO: 385685 - DNA, 15 bp, Homo sapiens
gtctaagagaatact

SEQ ID NO: 385686 - DNA, 15 bp, Homo sapiens
ggtctaagagaatac

SEQ ID NO: 385687 - DNA, 15 bp, Homo sapiens
tggtctaagagaata

SEQ ID NO: 385688 - DNA, 15 bp, Homo sapiens
atggtctaagagaat

SEQ ID NO: 385689 - DNA, 15 bp, Homo sapiens
tatggtctaagagaa

SEQ ID NO: 385690 - DNA, 15 bp, Homo sapiens
gtatggtctaagaga

SEQ ID NO: 385691 - DNA, 15 bp, Homo sapiens
tgtatggtctaagag

SEQ ID NO: 385692 - DNA, 15 bp, Homo sapiens
ctgtatggtctaaga

SEQ ID NO: 385693 - DNA, 15 bp, Homo sapiens
tctgtatggtctaag

SEQ ID NO: 385694 - DNA, 15 bp, Homo sapiens
ctctgtatggtctaa

SEQ ID NO: 385695 - DNA, 15 bp, Homo sapiens
tctctgtatggtcta

SEQ ID NO: 385696 - DNA, 15 bp, Homo sapiens
ttctctgtatggtct

SEQ ID NO: 385697 - DNA, 15 bp, Homo sapiens
tttctctgtatggtc

SEQ ID NO: 385698 - DNA, 15 bp, Homo sapiens
gtttctctgtatggt

SEQ ID NO: 385699 - DNA, 15 bp, Homo sapiens
ggtttctctgtatgg

SEQ ID NO: 385700 - DNA, 15 bp, Homo sapiens
aggtttctctgtatg

SEQ ID NO: 385701 - DNA, 15 bp, Homo sapiens
aaggtttctctgtat

SEQ ID NO: 385702 - DNA, 15 bp, Homo sapiens
taaggtttctctgta

SEQ ID NO: 385703 - DNA, 15 bp, Homo sapiens
ttaaggtttctctgt

SEQ ID NO: 385704 - DNA, 15 bp, Homo sapiens
gttaaggtttctctg

SEQ ID NO: 385705 - DNA, 15 bp, Homo sapiens
tgttaaggtttctct

SEQ ID NO: 385706 - DNA, 15 bp, Homo sapiens
atgttaaggtttctc

SEQ ID NO: 385707 - DNA, 15 bp, Homo sapiens
aatgttaaggtttct

SEQ ID NO: 385708 - DNA, 15 bp, Homo sapiens
caatgttaaggtttc

SEQ ID NO: 385709 - DNA, 15 bp, Homo sapiens
ccaatgttaaggttt

SEQ ID NO: 385710 - DNA, 15 bp, Homo sapiens
gccaatgttaaggtt

SEQ ID NO: 385711 - DNA, 15 bp, Homo sapiens
tgccaatgttaaggt

SEQ ID NO: 385712 - DNA, 15 bp, Homo sapiens
ttgccaatgttaagg

SEQ ID NO: 385713 - DNA, 15 bp, Homo sapiens
attgccaatgttaag

SEQ ID NO: 385714 - DNA, 15 bp, Homo sapiens
gattgccaatgttaa

SEQ ID NO: 385715 - DNA, 15 bp, Homo sapiens
tgattgccaatgtta

SEQ ID NO: 385716 - DNA, 15 bp, Homo sapiens
gtgattgccaatgtt

SEQ ID NO: 385717 - DNA, 15 bp, Homo sapiens
tgtgattgccaatgt

SEQ ID NO: 385718 - DNA, 15 bp, Homo sapiens
atgtgattgccaatg

SEQ ID NO: 385719 - DNA, 15 bp, Homo sapiens
gatgtgattgccaat

SEQ ID NO: 385720 - DNA, 15 bp, Homo sapiens
agatgtgattgccaa

SEQ ID NO: 385721 - DNA, 15 bp, Homo sapiens
aagatgtgattgcca

SEQ ID NO: 385722 - DNA, 15 bp, Homo sapiens
caagatgtgattgcc

SEQ ID NO: 385723 - DNA, 15 bp, Homo sapiens
acaagatgtgattgc

SEQ ID NO: 385724 - DNA, 15 bp, Homo sapiens
tacaagatgtgattg

SEQ ID NO: 385725 - DNA, 15 bp, Homo sapiens
ttacaagatgtgatt

SEQ ID NO: 385726 - DNA, 15 bp, Homo sapiens
attacaagatgtgat

SEQ ID NO: 385727 - DNA, 15 bp, Homo sapiens
cattacaagatgtga

SEQ ID NO: 385728 - DNA, 15 bp, Homo sapiens
tcattacaagatgtg

SEQ ID NO: 385729 - DNA, 15 bp, Homo sapiens
ttcattacaagatgt

SEQ ID NO: 385730 - DNA, 15 bp, Homo sapiens
tttcattacaagatg

SEQ ID NO: 385731 - DNA, 15 bp, Homo sapiens
ttttcattacaagat

SEQ ID NO: 385732 - DNA, 15 bp, Homo sapiens
attttcattacaaga

SEQ ID NO: 385733 - DNA, 15 bp, Homo sapiens
cattttcattacaag

SEQ ID NO: 385734 - DNA, 15 bp, Homo sapiens
tcattttcattacaa

SEQ ID NO: 385735 - DNA, 15 bp, Homo sapiens
ttcattttcattaca

SEQ ID NO: 385736 - DNA, 15 bp, Homo sapiens
attcattttcattac

SEQ ID NO: 385737 - DNA, 15 bp, Homo sapiens
aattcattttcatta

SEQ ID NO: 385738 - DNA, 15 bp, Homo sapiens
aaattcattttcatt

SEQ ID NO: 385739 - DNA, 15 bp, Homo sapiens
aaaattcattttcat

SEQ ID NO: 385740 - DNA, 15 bp, Homo sapiens
taaaattcattttca

SEQ ID NO: 385741 - DNA, 15 bp, Homo sapiens
ttaaaattcattttc

SEQ ID NO: 385742 - DNA, 15 bp, Homo sapiens
tttaaaattcatttt

SEQ ID NO: 385743 - DNA, 15 bp, Homo sapiens
ttttaaaattcattt

SEQ ID NO: 385744 - DNA, 15 bp, Homo sapiens
tttttaaaattcatt

SEQ ID NO: 385745 - DNA, 15 bp, Homo sapiens
ttttttaaaattcat

SEQ ID NO: 385746 - DNA, 15 bp, Homo sapiens
cttttttaaaattca

SEQ ID NO: 385747 - DNA, 15 bp, Homo sapiens
tcttttttaaaattc

SEQ ID NO: 385748 - DNA, 15 bp, Homo sapiens
ttcttttttaaaatt

SEQ ID NO: 385749 - DNA, 15 bp, Homo sapiens
tttcttttttaaaat

SEQ ID NO: 385750 - DNA, 15 bp, Homo sapiens
ctttcttttttaaaa

SEQ ID NO: 385751 - DNA, 15 bp, Homo sapiens
cctttcttttttaaa

SEQ ID NO: 385752 - DNA, 15 bp, Homo sapiens
ccctttcttttttaa

SEQ ID NO: 385753 - DNA, 15 bp, Homo sapiens
cccctttctttttta

SEQ ID NO: 385754 - DNA, 15 bp, Homo sapiens
tcccctttctttttt

SEQ ID NO: 385755 - DNA, 15 bp, Homo sapiens
ctcccctttcttttt

SEQ ID NO: 385756 - DNA, 15 bp, Homo sapiens
tctcccctttctttt

SEQ ID NO: 385757 - DNA, 15 bp, Homo sapiens
ttctcccctttcttt

SEQ ID NO: 385758 - DNA, 15 bp, Homo sapiens
tttctcccctttctt

SEQ ID NO: 385759 - DNA, 15 bp, Homo sapiens
ttttctcccctttct

SEQ ID NO: 385760 - DNA, 15 bp, Homo sapiens
gttttctcccctttc

SEQ ID NO: 385761 - DNA, 15 bp, Homo sapiens
cgttttctccccttt

SEQ ID NO: 385762 - DNA, 15 bp, Homo sapiens
tcgttttctcccctt

SEQ ID NO: 385763 - DNA, 15 bp, Homo sapiens
ttcgttttctcccct

SEQ ID NO: 385764 - DNA, 15 bp, Homo sapiens
gttcgttttctcccc

SEQ ID NO: 385765 - DNA, 15 bp, Homo sapiens
tgttcgttttctccc

SEQ ID NO: 385766 - DNA, 15 bp, Homo sapiens
atgttcgttttctcc

SEQ ID NO: 385767 - DNA, 15 bp, Homo sapiens
tatgttcgttttctc

SEQ ID NO: 385768 - DNA, 15 bp, Homo sapiens
ttatgttcgttttct

SEQ ID NO: 385769 - DNA, 15 bp, Homo sapiens
attatgttcgttttc

SEQ ID NO: 385770 - DNA, 15 bp, Homo sapiens
tattatgttcgtttt

SEQ ID NO: 385771 - DNA, 15 bp, Homo sapiens
ctattatgttcgttt

SEQ ID NO: 385772 - DNA, 15 bp, Homo sapiens
cctattatgttcgtt

SEQ ID NO: 385773 - DNA, 15 bp, Homo sapiens
tcctattatgttcgt

SEQ ID NO: 385774 - DNA, 15 bp, Homo sapiens
ttcctattatgttcg

SEQ ID NO: 385775 - DNA, 15 bp, Homo sapiens
attcctattatgttc

SEQ ID NO: 385776 - DNA, 15 bp, Homo sapiens
tattcctattatgtt

SEQ ID NO: 385777 - DNA, 15 bp, Homo sapiens
ctattcctattatgt

SEQ ID NO: 385778 - DNA, 15 bp, Homo sapiens
actattcctattatg

SEQ ID NO: 385779 - DNA, 15 bp, Homo sapiens
tactattcctattat

SEQ ID NO: 385780 - DNA, 15 bp, Homo sapiens
gtactattcctatta

SEQ ID NO: 385781 - DNA, 15 bp, Homo sapiens
tgtactattcctatt

SEQ ID NO: 385782 - DNA, 15 bp, Homo sapiens
atgtactattcctat

SEQ ID NO: 385783 - DNA, 15 bp, Homo sapiens
tatgtactattccta

SEQ ID NO: 385784 - DNA, 15 bp, Homo sapiens
ctatgtactattcct

SEQ ID NO: 385785 - DNA, 15 bp, Homo sapiens
actatgtactattcc

SEQ ID NO: 385786 - DNA, 15 bp, Homo sapiens
cactatgtactattc

SEQ ID NO: 385787 - DNA, 15 bp, Homo sapiens
ccactatgtactatt

SEQ ID NO: 385788 - DNA, 15 bp, Homo sapiens
gccactatgtactat

SEQ ID NO: 385789 - DNA, 15 bp, Homo sapiens
agccactatgtacta

SEQ ID NO: 385790 - DNA, 15 bp, Homo sapiens
tagccactatgtact

SEQ ID NO: 385791 - DNA, 15 bp, Homo sapiens
ctagccactatgtac

SEQ ID NO: 385792 - DNA, 15 bp, Homo sapiens
gctagccactatgta

SEQ ID NO: 385793 - DNA, 15 bp, Homo sapiens
agctagccactatgt

SEQ ID NO: 385794 - DNA, 15 bp, Homo sapiens
aagctagccactatg

SEQ ID NO: 385795 - DNA, 15 bp, Homo sapiens
aaagctagccactat

SEQ ID NO: 385796 - DNA, 15 bp, Homo sapiens
caaagctagccacta

SEQ ID NO: 385797 - DNA, 15 bp, Homo sapiens
tcaaagctagccact

SEQ ID NO: 385798 - DNA, 15 bp, Homo sapiens
atcaaagctagccac

SEQ ID NO: 385799 - DNA, 15 bp, Homo sapiens
tatcaaagctagcca

SEQ ID NO: 385800 - DNA, 15 bp, Homo sapiens
ttatcaaagctagcc

SEQ ID NO: 385801 - DNA, 15 bp, Homo sapiens
attatcaaagctagc

SEQ ID NO: 385802 - DNA, 15 bp, Homo sapiens
tattatcaaagctag

SEQ ID NO: 385803 - DNA, 15 bp, Homo sapiens
ctattatcaaagcta

SEQ ID NO: 385804 - DNA, 15 bp, Homo sapiens
actattatcaaagct

SEQ ID NO: 385805 - DNA, 15 bp, Homo sapiens
aactattatcaaagc

SEQ ID NO: 385806 - DNA, 15 bp, Homo sapiens
aaactattatcaaag

SEQ ID NO: 385807 - DNA, 15 bp, Homo sapiens
aaaactattatcaaa

SEQ ID NO: 385808 - DNA, 15 bp, Homo sapiens
aaaaactattatcaa

SEQ ID NO: 385809 - DNA, 15 bp, Homo sapiens
aaaaaactattatca

SEQ ID NO: 385810 - DNA, 15 bp, Homo sapiens
aaaaaaactattatc

SEQ ID NO: 385811 - DNA, 15 bp, Homo sapiens
aaaaaaaactattat

SEQ ID NO: 385812 - DNA, 15 bp, Homo sapiens
aaaaaaaaactatta

SEQ ID NO: 385813 - DNA, 15 bp, Homo sapiens
aaaaaaaaaactatt

SEQ ID NO: 385814 - DNA, 15 bp, Homo sapiens
caaaaaaaaaaacta

SEQ ID NO: 385815 - DNA, 15 bp, Homo sapiens
acaaaaaaaaaaact

SEQ ID NO: 385816 - DNA, 15 bp, Homo sapiens
aacaaaaaaaaaaac

SEQ ID NO: 385817 - DNA, 15 bp, Homo sapiens
aaacaaaaaaaaaaa

SEQ ID NO: 385818 - DNA, 15 bp, Homo sapiens
caaacaaaaaaaaaa

SEQ ID NO: 385819 - DNA, 15 bp, Homo sapiens
acaaacaaaaaaaaa

SEQ ID NO: 385820 - DNA, 15 bp, Homo sapiens
aacaaacaaaaaaaa

SEQ ID NO: 385821 - DNA, 15 bp, Homo sapiens
aaacaaacaaaaaaa

SEQ ID NO: 385822 - DNA, 15 bp, Homo sapiens
aaaacaaacaaaaaa

SEQ ID NO: 385823 - DNA, 15 bp, Homo sapiens
aaaaacaaacaaaaa

SEQ ID NO: 385824 - DNA, 15 bp, Homo sapiens
aaaaaacaaacaaaa

SEQ ID NO: 385825 - DNA, 15 bp, Homo sapiens
taaaaaacaaacaaa

SEQ ID NO: 385826 - DNA, 15 bp, Homo sapiens
ttaaaaaacaaacaa

SEQ ID NO: 385827 - DNA, 15 bp, Homo sapiens
cttaaaaaacaaaca

SEQ ID NO: 385828 - DNA, 15 bp, Homo sapiens
tcttaaaaaacaaac

SEQ ID NO: 385829 - DNA, 15 bp, Homo sapiens
ctcttaaaaaacaaa

SEQ ID NO: 385830 - DNA, 15 bp, Homo sapiens
tctcttaaaaaacaa

SEQ ID NO: 385831 - DNA, 15 bp, Homo sapiens
ctctcttaaaaaaca

SEQ ID NO: 385832 - DNA, 15 bp, Homo sapiens
actctcttaaaaaac

SEQ ID NO: 385833 - DNA, 15 bp, Homo sapiens
gactctcttaaaaaa

SEQ ID NO: 385834 - DNA, 15 bp, Homo sapiens
agactctcttaaaaa

SEQ ID NO: 385835 - DNA, 15 bp, Homo sapiens
aagactctcttaaaa

SEQ ID NO: 385836 - DNA, 15 bp, Homo sapiens
taagactctcttaaa

SEQ ID NO: 385837 - DNA, 15 bp, Homo sapiens
ctaagactctcttaa

SEQ ID NO: 385838 - DNA, 15 bp, Homo sapiens
actaagactctctta

SEQ ID NO: 385839 - DNA, 15 bp, Homo sapiens
tactaagactctctt

SEQ ID NO: 385840 - DNA, 15 bp, Homo sapiens
atactaagactctct

SEQ ID NO: 385841 - DNA, 15 bp, Homo sapiens
catactaagactctc

SEQ ID NO: 385842 - DNA, 15 bp, Homo sapiens
acatactaagactct

SEQ ID NO: 385843 - DNA, 15 bp, Homo sapiens
aacatactaagactc

SEQ ID NO: 385844 - DNA, 15 bp, Homo sapiens
taacatactaagact

SEQ ID NO: 385845 - DNA, 15 bp, Homo sapiens
gtaacatactaagac

SEQ ID NO: 385846 - DNA, 15 bp, Homo sapiens
ggtaacatactaaga

SEQ ID NO: 385847 - DNA, 15 bp, Homo sapiens
aggtaacatactaag

SEQ ID NO: 385848 - DNA, 15 bp, Homo sapiens
taggtaacatactaa

SEQ ID NO: 385849 - DNA, 15 bp, Homo sapiens
ctaggtaacatacta

SEQ ID NO: 385850 - DNA, 15 bp, Homo sapiens
cctaggtaacatact

SEQ ID NO: 385851 - DNA, 15 bp, Homo sapiens
acctaggtaacatac

SEQ ID NO: 385852 - DNA, 15 bp, Homo sapiens
aacctaggtaacata

SEQ ID NO: 385853 - DNA, 15 bp, Homo sapiens
caacctaggtaacat

SEQ ID NO: 385854 - DNA, 15 bp, Homo sapiens
ccaacctaggtaaca

SEQ ID NO: 385855 - DNA, 15 bp, Homo sapiens
cccaacctaggtaac

SEQ ID NO: 385856 - DNA, 15 bp, Homo sapiens
gcccaacctaggtaa

SEQ ID NO: 385857 - DNA, 15 bp, Homo sapiens
agcccaacctaggta

SEQ ID NO: 385858 - DNA, 15 bp, Homo sapiens
aagcccaacctaggt

SEQ ID NO: 385859 - DNA, 15 bp, Homo sapiens
caagcccaacctagg

SEQ ID NO: 385860 - DNA, 15 bp, Homo sapiens
tcaagcccaacctag

SEQ ID NO: 385861 - DNA, 15 bp, Homo sapiens
ttcaagcccaaccta

SEQ ID NO: 385862 - DNA, 15 bp, Homo sapiens
gttcaagcccaacct

SEQ ID NO: 385863 - DNA, 15 bp, Homo sapiens
agttcaagcccaacc

SEQ ID NO: 385864 - DNA, 15 bp, Homo sapiens
gagttcaagcccaac

SEQ ID NO: 385865 - DNA, 15 bp, Homo sapiens
ggagttcaagcccaa

SEQ ID NO: 385866 - DNA, 15 bp, Homo sapiens
aggagttcaagccca

SEQ ID NO: 385867 - DNA, 15 bp, Homo sapiens
caggagttcaagccc

SEQ ID NO: 385868 - DNA, 15 bp, Homo sapiens
ccaggagttcaagcc

SEQ ID NO: 385869 - DNA, 15 bp, Homo sapiens
cccaggagttcaagc

SEQ ID NO: 385870 - DNA, 15 bp, Homo sapiens
gcccaggagttcaag

SEQ ID NO: 385871 - DNA, 15 bp, Homo sapiens
agcccaggagttcaa

SEQ ID NO: 385872 - DNA, 15 bp, Homo sapiens
aagcccaggagttca

SEQ ID NO: 385873 - DNA, 15 bp, Homo sapiens
taagcccaggagttc

SEQ ID NO: 385874 - DNA, 15 bp, Homo sapiens
ttaagcccaggagtt

SEQ ID NO: 385875 - DNA, 15 bp, Homo sapiens
cttaagcccaggagt

SEQ ID NO: 385876 - DNA, 15 bp, Homo sapiens
ccttaagcccaggag

SEQ ID NO: 385877 - DNA, 15 bp, Homo sapiens
cccttaagcccagga

SEQ ID NO: 385878 - DNA, 15 bp, Homo sapiens
tcccttaagcccagg

SEQ ID NO: 385879 - DNA, 15 bp, Homo sapiens
atcccttaagcccag

SEQ ID NO: 385880 - DNA, 15 bp, Homo sapiens
gatcccttaagccca

SEQ ID NO: 385881 - DNA, 15 bp, Homo sapiens
ggatcccttaagccc

SEQ ID NO: 385882 - DNA, 15 bp, Homo sapiens
aggatcccttaagcc

SEQ ID NO: 385883 - DNA, 15 bp, Homo sapiens
gaggatcccttaagc

SEQ ID NO: 385884 - DNA, 15 bp, Homo sapiens
ggaggatcccttaag

SEQ ID NO: 385885 - DNA, 15 bp, Homo sapiens
gggaggatcccttaa

SEQ ID NO: 385886 - DNA, 15 bp, Homo sapiens
tgggaggatccctta

SEQ ID NO: 385887 - DNA, 15 bp, Homo sapiens
gtgggaggatccctt

SEQ ID NO: 385888 - DNA, 15 bp, Homo sapiens
ggtgggaggatccct

SEQ ID NO: 385889 - DNA, 15 bp, Homo sapiens
aggtgggaggatccc

SEQ ID NO: 385890 - DNA, 15 bp, Homo sapiens
gaggtgggaggatcc

SEQ ID NO: 385891 - DNA, 15 bp, Homo sapiens
tgaggtgggaggatc

SEQ ID NO: 385892 - DNA, 15 bp, Homo sapiens
ctgaggtgggaggat

SEQ ID NO: 385893 - DNA, 15 bp, Homo sapiens
gctgaggtgggagga

SEQ ID NO: 385894 - DNA, 15 bp, Homo sapiens
ggctgaggtgggagg

SEQ ID NO: 385895 - DNA, 15 bp, Homo sapiens
aggctgaggtgggag

SEQ ID NO: 385896 - DNA, 15 bp, Homo sapiens
gaggctgaggtggga

SEQ ID NO: 385897 - DNA, 15 bp, Homo sapiens
ggaggctgaggtggg

SEQ ID NO: 385898 - DNA, 15 bp, Homo sapiens
gggaggctgaggtgg

SEQ ID NO: 385899 - DNA, 15 bp, Homo sapiens
agggaggctgaggtg

SEQ ID NO: 385900 - DNA, 15 bp, Homo sapiens
tagggaggctgaggt

SEQ ID NO: 385901 - DNA, 15 bp, Homo sapiens
ctagggaggctgagg

SEQ ID NO: 385902 - DNA, 15 bp, Homo sapiens
actagggaggctgag

SEQ ID NO: 385903 - DNA, 15 bp, Homo sapiens
tactagggaggctga

SEQ ID NO: 385904 - DNA, 15 bp, Homo sapiens
ctactagggaggctg

SEQ ID NO: 385905 - DNA, 15 bp, Homo sapiens
gctactagggaggct

SEQ ID NO: 385906 - DNA, 15 bp, Homo sapiens
cgctactagggaggc

SEQ ID NO: 385907 - DNA, 15 bp, Homo sapiens
tcgctactagggagg

SEQ ID NO: 385908 - DNA, 15 bp, Homo sapiens
ctcgctactagggag

SEQ ID NO: 385909 - DNA, 15 bp, Homo sapiens
actcgctactaggga

SEQ ID NO: 385910 - DNA, 15 bp, Homo sapiens
tactcgctactaggg

SEQ ID NO: 385911 - DNA, 15 bp, Homo sapiens
gtactcgctactagg

SEQ ID NO: 385912 - DNA, 15 bp, Homo sapiens
agtactcgctactag

SEQ ID NO: 385913 - DNA, 15 bp, Homo sapiens
tagtactcgctacta

SEQ ID NO: 385914 - DNA, 15 bp, Homo sapiens
gtagtactcgctact

SEQ ID NO: 385915 - DNA, 15 bp, Homo sapiens
tgtagtactcgctac

SEQ ID NO: 385916 - DNA, 15 bp, Homo sapiens
ctgtagtactcgcta

SEQ ID NO: 385917 - DNA, 15 bp, Homo sapiens
cctgtagtactcgct

SEQ ID NO: 385918 - DNA, 15 bp, Homo sapiens
acctgtagtactcgc

SEQ ID NO: 385919 - DNA, 15 bp, Homo sapiens
cacctgtagtactcg

SEQ ID NO: 385920 - DNA, 15 bp, Homo sapiens
acacctgtagtactc

SEQ ID NO: 385921 - DNA, 15 bp, Homo sapiens
cacacctgtagtact

SEQ ID NO: 385922 - DNA, 15 bp, Homo sapiens
acacacctgtagtac

SEQ ID NO: 385923 - DNA, 15 bp, Homo sapiens
cacacacctgtagta

SEQ ID NO: 385924 - DNA, 15 bp, Homo sapiens
gcacacacctgtagt

SEQ ID NO: 385925 - DNA, 15 bp, Homo sapiens
ggcacacacctgtag

SEQ ID NO: 385926 - DNA, 15 bp, Homo sapiens
tggcacacacctgta

SEQ ID NO: 385927 - DNA, 15 bp, Homo sapiens
gtggcacacacctgt

SEQ ID NO: 385928 - DNA, 15 bp, Homo sapiens
ggtggcacacacctg

SEQ ID NO: 385929 - DNA, 15 bp, Homo sapiens
tggtggcacacacct

SEQ ID NO: 385930 - DNA, 15 bp, Homo sapiens
atggtggcacacacc

SEQ ID NO: 385931 - DNA, 15 bp, Homo sapiens
catggtggcacacac

SEQ ID NO: 385932 - DNA, 15 bp, Homo sapiens
gcatggtggcacaca

SEQ ID NO: 385933 - DNA, 15 bp, Homo sapiens
ggcatggtggcacac

SEQ ID NO: 385934 - DNA, 15 bp, Homo sapiens
gggcatggtggcaca

SEQ ID NO: 385935 - DNA, 15 bp, Homo sapiens
tgggcatggtggcac

SEQ ID NO: 385936 - DNA, 15 bp, Homo sapiens
ctgggcatggtggca

SEQ ID NO: 385937 - DNA, 15 bp, Homo sapiens
gctgggcatggtggc

SEQ ID NO: 385938 - DNA, 15 bp, Homo sapiens
agctgggcatggtgg

SEQ ID NO: 385939 - DNA, 15 bp, Homo sapiens
cagctgggcatggtg

SEQ ID NO: 385940 - DNA, 15 bp, Homo sapiens
gcagctgggcatggt

SEQ ID NO: 385941 - DNA, 15 bp, Homo sapiens
agcagctgggcatgg

SEQ ID NO: 385942 - DNA, 15 bp, Homo sapiens
cagcagctgggcatg

SEQ ID NO: 385943 - DNA, 15 bp, Homo sapiens
ccagcagctgggcat

SEQ ID NO: 385944 - DNA, 15 bp, Homo sapiens
accagcagctgggca

SEQ ID NO: 385945 - DNA, 15 bp, Homo sapiens
taccagcagctgggc

SEQ ID NO: 385946 - DNA, 15 bp, Homo sapiens
ttaccagcagctggg

SEQ ID NO: 385947 - DNA, 15 bp, Homo sapiens
gttaccagcagctgg

SEQ ID NO: 385948 - DNA, 15 bp, Homo sapiens
agttaccagcagctg

SEQ ID NO: 385949 - DNA, 15 bp, Homo sapiens
cagttaccagcagct

SEQ ID NO: 385950 - DNA, 15 bp, Homo sapiens
tcagttaccagcagc

SEQ ID NO: 385951 - DNA, 15 bp, Homo sapiens
atcagttaccagcag

SEQ ID NO: 385952 - DNA, 15 bp, Homo sapiens
aatcagttaccagca

SEQ ID NO: 385953 - DNA, 15 bp, Homo sapiens
aaatcagttaccagc

SEQ ID NO: 385954 - DNA, 15 bp, Homo sapiens
aaaatcagttaccag

SEQ ID NO: 385955 - DNA, 15 bp, Homo sapiens
aaaaatcagttacca

SEQ ID NO: 385956 - DNA, 15 bp, Homo sapiens
caaaaatcagttacc

SEQ ID NO: 385957 - DNA, 15 bp, Homo sapiens
tcaaaaatcagttac

SEQ ID NO: 385958 - DNA, 15 bp, Homo sapiens
ctcaaaaatcagtta

SEQ ID NO: 385959 - DNA, 15 bp, Homo sapiens
cctcaaaaatcagtt

SEQ ID NO: 385960 - DNA, 15 bp, Homo sapiens
gcctcaaaaatcagt

SEQ ID NO: 385961 - DNA, 15 bp, Homo sapiens
agcctcaaaaatcag

SEQ ID NO: 385962 - DNA, 15 bp, Homo sapiens
gagcctcaaaaatca

SEQ ID NO: 385963 - DNA, 15 bp, Homo sapiens
agagcctcaaaaatc

SEQ ID NO: 385964 - DNA, 15 bp, Homo sapiens
cagagcctcaaaaat

SEQ ID NO: 385965 - DNA, 15 bp, Homo sapiens
gcagagcctcaaaaa

SEQ ID NO: 385966 - DNA, 15 bp, Homo sapiens
agcagagcctcaaaa

SEQ ID NO: 385967 - DNA, 15 bp, Homo sapiens
gagcagagcctcaaa

SEQ ID NO: 385968 - DNA, 15 bp, Homo sapiens
agagcagagcctcaa

SEQ ID NO: 385969 - DNA, 15 bp, Homo sapiens
aagagcagagcctca

SEQ ID NO: 385970 - DNA, 15 bp, Homo sapiens
caagagcagagcctc

SEQ ID NO: 385971 - DNA, 15 bp, Homo sapiens
tcaagagcagagcct

SEQ ID NO: 385972 - DNA, 15 bp, Homo sapiens
atcaagagcagagcc

SEQ ID NO: 385973 - DNA, 15 bp, Homo sapiens
aatcaagagcagagc

SEQ ID NO: 385974 - DNA, 15 bp, Homo sapiens
aaatcaagagcagag

SEQ ID NO: 385975 - DNA, 15 bp, Homo sapiens
caaatcaagagcaga

SEQ ID NO: 385976 - DNA, 15 bp, Homo sapiens
ccaaatcaagagcag

SEQ ID NO: 385977 - DNA, 15 bp, Homo sapiens
tccaaatcaagagca

SEQ ID NO: 385978 - DNA, 15 bp, Homo sapiens
atccaaatcaagagc

SEQ ID NO: 385979 - DNA, 15 bp, Homo sapiens
tatccaaatcaagag

SEQ ID NO: 385980 - DNA, 15 bp, Homo sapiens
gtatccaaatcaaga

SEQ ID NO: 385981 - DNA, 15 bp, Homo sapiens
tgtatccaaatcaag

SEQ ID NO: 385982 - DNA, 15 bp, Homo sapiens
ttgtatccaaatcaa

SEQ ID NO: 385983 - DNA, 15 bp, Homo sapiens
attgtatccaaatca

SEQ ID NO: 385984 - DNA, 15 bp, Homo sapiens
tattgtatccaaatc

SEQ ID NO: 385985 - DNA, 15 bp, Homo sapiens
ctattgtatccaaat

SEQ ID NO: 385986 - DNA, 15 bp, Homo sapiens
actattgtatccaaa

SEQ ID NO: 385987 - DNA, 15 bp, Homo sapiens
cactattgtatccaa

SEQ ID NO: 385988 - DNA, 15 bp, Homo sapiens
acactattgtatcca

SEQ ID NO: 385989 - DNA, 15 bp, Homo sapiens
aacactattgtatcc

SEQ ID NO: 385990 - DNA, 15 bp, Homo sapiens
taacactattgtatc

SEQ ID NO: 385991 - DNA, 15 bp, Homo sapiens
ttaacactattgtat

SEQ ID NO: 385992 - DNA, 15 bp, Homo sapiens
tttaacactattgta

SEQ ID NO: 385993 - DNA, 15 bp, Homo sapiens
ttttaacactattgt

SEQ ID NO: 385994 - DNA, 15 bp, Homo sapiens
attttaacactattg

SEQ ID NO: 385995 - DNA, 15 bp, Homo sapiens
tattttaacactatt

SEQ ID NO: 385996 - DNA, 15 bp, Homo sapiens
ctattttaacactat

SEQ ID NO: 385997 - DNA, 15 bp, Homo sapiens
actattttaacacta

SEQ ID NO: 385998 - DNA, 15 bp, Homo sapiens
aactattttaacact

SEQ ID NO: 385999 - DNA, 15 bp, Homo sapiens
aaactattttaacac

SEQ ID NO: 386000 - DNA, 15 bp, Homo sapiens
aaaactattttaaca

SEQ ID NO: 386001 - DNA, 15 bp, Homo sapiens
taaaactattttaac

SEQ ID NO: 386002 - DNA, 15 bp, Homo sapiens
ataaaactattttaa

SEQ ID NO: 386003 - DNA, 15 bp, Homo sapiens
cataaaactatttta

SEQ ID NO: 386004 - DNA, 15 bp, Homo sapiens
tcataaaactatttt

SEQ ID NO: 386005 - DNA, 15 bp, Homo sapiens
atcataaaactattt

SEQ ID NO: 386006 - DNA, 15 bp, Homo sapiens
aatcataaaactatt

SEQ ID NO: 386007 - DNA, 15 bp, Homo sapiens
aaatcataaaactat

SEQ ID NO: 386008 - DNA, 15 bp, Homo sapiens
taaatcataaaacta

SEQ ID NO: 386009 - DNA, 15 bp, Homo sapiens
gtaaatcataaaact

SEQ ID NO: 386010 - DNA, 15 bp, Homo sapiens
agtaaatcataaaac

SEQ ID NO: 386011 - DNA, 15 bp, Homo sapiens
cagtaaatcataaaa

SEQ ID NO: 386012 - DNA, 15 bp, Homo sapiens
tcagtaaatcataaa

SEQ ID NO: 386013 - DNA, 15 bp, Homo sapiens
ttcagtaaatcataa

SEQ ID NO: 386014 - DNA, 15 bp, Homo sapiens
tttcagtaaatcata

SEQ ID NO: 386015 - DNA, 15 bp, Homo sapiens
ttttcagtaaatcat

SEQ ID NO: 386016 - DNA, 15 bp, Homo sapiens
attttcagtaaatca

SEQ ID NO: 386017 - DNA, 15 bp, Homo sapiens
tattttcagtaaatc

SEQ ID NO: 386018 - DNA, 15 bp, Homo sapiens
ctattttcagtaaat

SEQ ID NO: 386019 - DNA, 15 bp, Homo sapiens
tctattttcagtaaa

SEQ ID NO: 386020 - DNA, 15 bp, Homo sapiens
ttctattttcagtaa

SEQ ID NO: 386021 - DNA, 15 bp, Homo sapiens
attctattttcagta

SEQ ID NO: 386022 - DNA, 15 bp, Homo sapiens
cattctattttcagt

SEQ ID NO: 386023 - DNA, 15 bp, Homo sapiens
tcattctattttcag

SEQ ID NO: 386024 - DNA, 15 bp, Homo sapiens
ttcattctattttca

SEQ ID NO: 386025 - DNA, 15 bp, Homo sapiens
tttcattctattttc

SEQ ID NO: 386026 - DNA, 15 bp, Homo sapiens
atttcattctatttt

SEQ ID NO: 386027 - DNA, 15 bp, Homo sapiens
aatttcattctattt

SEQ ID NO: 386028 - DNA, 15 bp, Homo sapiens
aaatttcattctatt

SEQ ID NO: 386029 - DNA, 15 bp, Homo sapiens
aaaatttcattctat

SEQ ID NO: 386030 - DNA, 15 bp, Homo sapiens
taaaatttcattcta

SEQ ID NO: 386031 - DNA, 15 bp, Homo sapiens
ttaaaatttcattct

SEQ ID NO: 386032 - DNA, 15 bp, Homo sapiens
gttaaaatttcattc

SEQ ID NO: 386033 - DNA, 15 bp, Homo sapiens
tgttaaaatttcatt

SEQ ID NO: 386034 - DNA, 15 bp, Homo sapiens
ttgttaaaatttcat

SEQ ID NO: 386035 - DNA, 15 bp, Homo sapiens
cttgttaaaatttca

SEQ ID NO: 386036 - DNA, 15 bp, Homo sapiens
ccttgttaaaatttc

SEQ ID NO: 386037 - DNA, 15 bp, Homo sapiens
accttgttaaaattt

SEQ ID NO: 386038 - DNA, 15 bp, Homo sapiens
aaccttgttaaaatt

SEQ ID NO: 386039 - DNA, 15 bp, Homo sapiens
aaaccttgttaaaat

SEQ ID NO: 386040 - DNA, 15 bp, Homo sapiens
aaaaccttgttaaaa

SEQ ID NO: 386041 - DNA, 15 bp, Homo sapiens
aaaaaccttgttaaa

SEQ ID NO: 386042 - DNA, 15 bp, Homo sapiens
taaaaaccttgttaa

SEQ ID NO: 386043 - DNA, 15 bp, Homo sapiens
ttaaaaaccttgtta

SEQ ID NO: 386044 - DNA, 15 bp, Homo sapiens
tttaaaaaccttgtt

SEQ ID NO: 386045 - DNA, 15 bp, Homo sapiens
ttttaaaaaccttgt

SEQ ID NO: 386046 - DNA, 15 bp, Homo sapiens
cttttaaaaaccttg

SEQ ID NO: 386047 - DNA, 15 bp, Homo sapiens
tcttttaaaaacctt

SEQ ID NO: 386048 - DNA, 15 bp, Homo sapiens
gtcttttaaaaacct

SEQ ID NO: 386049 - DNA, 15 bp, Homo sapiens
ggtcttttaaaaacc

SEQ ID NO: 386050 - DNA, 15 bp, Homo sapiens
gggtcttttaaaaac

SEQ ID NO: 386051 - DNA, 15 bp, Homo sapiens
ggggtcttttaaaaa

SEQ ID NO: 386052 - DNA, 15 bp, Homo sapiens
tggggtcttttaaaa

SEQ ID NO: 386053 - DNA, 15 bp, Homo sapiens
ttggggtcttttaaa

SEQ ID NO: 386054 - DNA, 15 bp, Homo sapiens
tttggggtcttttaa

SEQ ID NO: 386055 - DNA, 15 bp, Homo sapiens
atttggggtctttta

SEQ ID NO: 386056 - DNA, 15 bp, Homo sapiens
tatttggggtctttt

SEQ ID NO: 386057 - DNA, 15 bp, Homo sapiens
ttatttggggtcttt

SEQ ID NO: 386058 - DNA, 15 bp, Homo sapiens
attatttggggtctt

SEQ ID NO: 386059 - DNA, 15 bp, Homo sapiens
tattatttggggtct

SEQ ID NO: 386060 - DNA, 15 bp, Homo sapiens
atattatttggggtc

SEQ ID NO: 386061 - DNA, 15 bp, Homo sapiens
aatattatttggggt

SEQ ID NO: 386062 - DNA, 15 bp, Homo sapiens
taatattatttgggg

SEQ ID NO: 386063 - DNA, 15 bp, Homo sapiens
gtaatattatttggg

SEQ ID NO: 386064 - DNA, 15 bp, Homo sapiens
agtaatattatttgg

SEQ ID NO: 386065 - DNA, 15 bp, Homo sapiens
aagtaatattatttg

SEQ ID NO: 386066 - DNA, 15 bp, Homo sapiens
caagtaatattattt

SEQ ID NO: 386067 - DNA, 15 bp, Homo sapiens
acaagtaatattatt

SEQ ID NO: 386068 - DNA, 15 bp, Homo sapiens
gacaagtaatattat

SEQ ID NO: 386069 - DNA, 15 bp, Homo sapiens
tgacaagtaatatta

SEQ ID NO: 386070 - DNA, 15 bp, Homo sapiens
ctgacaagtaatatt

SEQ ID NO: 386071 - DNA, 15 bp, Homo sapiens
actgacaagtaatat

SEQ ID NO: 386072 - DNA, 15 bp, Homo sapiens
aactgacaagtaata

SEQ ID NO: 386073 - DNA, 15 bp, Homo sapiens
aaactgacaagtaat

SEQ ID NO: 386074 - DNA, 15 bp, Homo sapiens
aaaactgacaagtaa

SEQ ID NO: 386075 - DNA, 15 bp, Homo sapiens
gaaaactgacaagta

SEQ ID NO: 386076 - DNA, 15 bp, Homo sapiens
tgaaaactgacaagt

SEQ ID NO: 386077 - DNA, 15 bp, Homo sapiens
ttgaaaactgacaag

SEQ ID NO: 386078 - DNA, 15 bp, Homo sapiens
cttgaaaactgacaa

SEQ ID NO: 386079 - DNA, 15 bp, Homo sapiens
acttgaaaactgaca

SEQ ID NO: 386080 - DNA, 15 bp, Homo sapiens
cacttgaaaactgac

SEQ ID NO: 386081 - DNA, 15 bp, Homo sapiens
tcacttgaaaactga

SEQ ID NO: 386082 - DNA, 15 bp, Homo sapiens
ttcacttgaaaactg

SEQ ID NO: 386083 - DNA, 15 bp, Homo sapiens
attcacttgaaaact

SEQ ID NO: 386084 - DNA, 15 bp, Homo sapiens
aattcacttgaaaac

SEQ ID NO: 386085 - DNA, 15 bp, Homo sapiens
taattcacttgaaaa

SEQ ID NO: 386086 - DNA, 15 bp, Homo sapiens
ttaattcacttgaaa

SEQ ID NO: 386087 - DNA, 15 bp, Homo sapiens
attaattcacttgaa

SEQ ID NO: 386088 - DNA, 15 bp, Homo sapiens
tattaattcacttga

SEQ ID NO: 386089 - DNA, 15 bp, Homo sapiens
atattaattcacttg

SEQ ID NO: 386090 - DNA, 15 bp, Homo sapiens
gatattaattcactt

SEQ ID NO: 386091 - DNA, 15 bp, Homo sapiens
tgatattaattcact

SEQ ID NO: 386092 - DNA, 15 bp, Homo sapiens
atgatattaattcac

SEQ ID NO: 386093 - DNA, 15 bp, Homo sapiens
tatgatattaattca

SEQ ID NO: 386094 - DNA, 15 bp, Homo sapiens
ttatgatattaattc

SEQ ID NO: 386095 - DNA, 15 bp, Homo sapiens
tttatgatattaatt

SEQ ID NO: 386096 - DNA, 15 bp, Homo sapiens
ctttatgatattaat

SEQ ID NO: 386097 - DNA, 15 bp, Homo sapiens
gctttatgatattaa

SEQ ID NO: 386098 - DNA, 15 bp, Homo sapiens
tgctttatgatatta

SEQ ID NO: 386099 - DNA, 15 bp, Homo sapiens
ttgctttatgatatt

SEQ ID NO: 386100 - DNA, 15 bp, Homo sapiens
attgctttatgatat

SEQ ID NO: 386101 - DNA, 15 bp, Homo sapiens
tattgctttatgata

SEQ ID NO: 386102 - DNA, 15 bp, Homo sapiens
gtattgctttatgat

SEQ ID NO: 386103 - DNA, 15 bp, Homo sapiens
agtattgctttatga

SEQ ID NO: 386104 - DNA, 15 bp, Homo sapiens
aagtattgctttatg

SEQ ID NO: 386105 - DNA, 15 bp, Homo sapiens
aaagtattgctttat

SEQ ID NO: 386106 - DNA, 15 bp, Homo sapiens
aaaagtattgcttta

SEQ ID NO: 386107 - DNA, 15 bp, Homo sapiens
gaaaagtattgcttt

SEQ ID NO: 386108 - DNA, 15 bp, Homo sapiens
ggaaaagtattgctt

SEQ ID NO: 386109 - DNA, 15 bp, Homo sapiens
tggaaaagtattgct

SEQ ID NO: 386110 - DNA, 15 bp, Homo sapiens
ttggaaaagtattgc

SEQ ID NO: 386111 - DNA, 15 bp, Homo sapiens
tttggaaaagtattg

SEQ ID NO: 386112 - DNA, 15 bp, Homo sapiens
ctttggaaaagtatt

SEQ ID NO: 386113 - DNA, 15 bp, Homo sapiens
cctttggaaaagtat

SEQ ID NO: 386114 - DNA, 15 bp, Homo sapiens
ccctttggaaaagta

SEQ ID NO: 386115 - DNA, 15 bp, Homo sapiens
gccctttggaaaagt

SEQ ID NO: 386116 - DNA, 15 bp, Homo sapiens
tgccctttggaaaag

SEQ ID NO: 386117 - DNA, 15 bp, Homo sapiens
ctgccctttggaaaa

SEQ ID NO: 386118 - DNA, 15 bp, Homo sapiens
tctgccctttggaaa

SEQ ID NO: 386119 - DNA, 15 bp, Homo sapiens
ttctgccctttggaa

SEQ ID NO: 386120 - DNA, 15 bp, Homo sapiens
tttctgccctttgga

SEQ ID NO: 386121 - DNA, 15 bp, Homo sapiens
ttttctgccctttgg

SEQ ID NO: 386122 - DNA, 15 bp, Homo sapiens
attttctgccctttg

SEQ ID NO: 386123 - DNA, 15 bp, Homo sapiens
aattttctgcccttt

SEQ ID NO: 386124 - DNA, 15 bp, Homo sapiens
taattttctgccctt

SEQ ID NO: 386125 - DNA, 15 bp, Homo sapiens
ttaattttctgccct

SEQ ID NO: 386126 - DNA, 15 bp, Homo sapiens
attaattttctgccc

SEQ ID NO: 386127 - DNA, 15 bp, Homo sapiens
aattaattttctgcc

SEQ ID NO: 386128 - DNA, 15 bp, Homo sapiens
caattaattttctgc

SEQ ID NO: 386129 - DNA, 15 bp, Homo sapiens
acaattaattttctg

SEQ ID NO: 386130 - DNA, 15 bp, Homo sapiens
tacaattaattttct

SEQ ID NO: 386131 - DNA, 15 bp, Homo sapiens
ctacaattaattttc

SEQ ID NO: 386132 - DNA, 15 bp, Homo sapiens
tctacaattaatttt

SEQ ID NO: 386133 - DNA, 15 bp, Homo sapiens
atctacaattaattt

SEQ ID NO: 386134 - DNA, 15 bp, Homo sapiens
aatctacaattaatt

SEQ ID NO: 386135 - DNA, 15 bp, Homo sapiens
caatctacaattaat

SEQ ID NO: 386136 - DNA, 15 bp, Homo sapiens
ccaatctacaattaa

SEQ ID NO: 386137 - DNA, 15 bp, Homo sapiens
gccaatctacaatta

SEQ ID NO: 386138 - DNA, 15 bp, Homo sapiens
tgccaatctacaatt

SEQ ID NO: 386139 - DNA, 15 bp, Homo sapiens
gtgccaatctacaat

SEQ ID NO: 386140 - DNA, 15 bp, Homo sapiens
tgtgccaatctacaa

SEQ ID NO: 386141 - DNA, 15 bp, Homo sapiens
ctgtgccaatctaca

SEQ ID NO: 386142 - DNA, 15 bp, Homo sapiens
actgtgccaatctac

SEQ ID NO: 386143 - DNA, 15 bp, Homo sapiens
gactgtgccaatcta

SEQ ID NO: 386144 - DNA, 15 bp, Homo sapiens
tgactgtgccaatct

SEQ ID NO: 386145 - DNA, 15 bp, Homo sapiens
atgactgtgccaatc

SEQ ID NO: 386146 - DNA, 15 bp, Homo sapiens
catgactgtgccaat

SEQ ID NO: 386147 - DNA, 15 bp, Homo sapiens
gcatgactgtgccaa

SEQ ID NO: 386148 - DNA, 15 bp, Homo sapiens
tgcatgactgtgcca

SEQ ID NO: 386149 - DNA, 15 bp, Homo sapiens
ctgcatgactgtgcc

SEQ ID NO: 386150 - DNA, 15 bp, Homo sapiens
cctgcatgactgtgc

SEQ ID NO: 386151 - DNA, 15 bp, Homo sapiens
tcctgcatgactgtg

SEQ ID NO: 386152 - DNA, 15 bp, Homo sapiens
atcctgcatgactgt

SEQ ID NO: 386153 - DNA, 15 bp, Homo sapiens
tatcctgcatgactg

SEQ ID NO: 386154 - DNA, 15 bp, Homo sapiens
atatcctgcatgact

SEQ ID NO: 386155 - DNA, 15 bp, Homo sapiens
aatatcctgcatgac

SEQ ID NO: 386156 - DNA, 15 bp, Homo sapiens
taatatcctgcatga

SEQ ID NO: 386157 - DNA, 15 bp, Homo sapiens
ataatatcctgcatg

SEQ ID NO: 386158 - DNA, 15 bp, Homo sapiens
aataatatcctgcat

SEQ ID NO: 386159 - DNA, 15 bp, Homo sapiens
taataatatcctgca

SEQ ID NO: 386160 - DNA, 15 bp, Homo sapiens
ttaataatatcctgc

SEQ ID NO: 386161 - DNA, 15 bp, Homo sapiens
tttaataatatcctg

SEQ ID NO: 386162 - DNA, 15 bp, Homo sapiens
ttttaataatatcct

SEQ ID NO: 386163 - DNA, 15 bp, Homo sapiens
attttaataatatcc

SEQ ID NO: 386164 - DNA, 15 bp, Homo sapiens
tattttaataatatc

SEQ ID NO: 386165 - DNA, 15 bp, Homo sapiens
ctattttaataatat

SEQ ID NO: 386166 - DNA, 15 bp, Homo sapiens
cctattttaataata

SEQ ID NO: 386167 - DNA, 15 bp, Homo sapiens
acctattttaataat

SEQ ID NO: 386168 - DNA, 15 bp, Homo sapiens
cacctattttaataa

SEQ ID NO: 386169 - DNA, 15 bp, Homo sapiens
tcacctattttaata

SEQ ID NO: 386170 - DNA, 15 bp, Homo sapiens
ctcacctattttaat

SEQ ID NO: 386171 - DNA, 15 bp, Homo sapiens
actcacctattttaa

SEQ ID NO: 386172 - DNA, 15 bp, Homo sapiens
gactcacctatttta

SEQ ID NO: 386173 - DNA, 15 bp, Homo sapiens
agactcacctatttt

SEQ ID NO: 386174 - DNA, 15 bp, Homo sapiens
aagactcacctattt

SEQ ID NO: 386175 - DNA, 15 bp, Homo sapiens
taagactcacctatt

SEQ ID NO: 386176 - DNA, 15 bp, Homo sapiens
ttaagactcacctat

SEQ ID NO: 386177 - DNA, 15 bp, Homo sapiens
tttaagactcaccta

SEQ ID NO: 386178 - DNA, 15 bp, Homo sapiens
ttttaagactcacct

SEQ ID NO: 386179 - DNA, 15 bp, Homo sapiens
tttttaagactcacc

SEQ ID NO: 386180 - DNA, 15 bp, Homo sapiens
ttttttaagactcac

SEQ ID NO: 386181 - DNA, 15 bp, Homo sapiens
attttttaagactca

SEQ ID NO: 386182 - DNA, 15 bp, Homo sapiens
tattttttaagactc

SEQ ID NO: 386183 - DNA, 15 bp, Homo sapiens
ctattttttaagact

SEQ ID NO: 386184 - DNA, 15 bp, Homo sapiens
actattttttaagac

SEQ ID NO: 386185 - DNA, 15 bp, Homo sapiens
tactattttttaaga

SEQ ID NO: 386186 - DNA, 15 bp, Homo sapiens
gtactattttttaag

SEQ ID NO: 386187 - DNA, 15 bp, Homo sapiens
ggtactattttttaa

SEQ ID NO: 386188 - DNA, 15 bp, Homo sapiens
tggtactatttttta

SEQ ID NO: 386189 - DNA, 15 bp, Homo sapiens
atggtactatttttt

SEQ ID NO: 386190 - DNA, 15 bp, Homo sapiens
tatggtactattttt

SEQ ID NO: 386191 - DNA, 15 bp, Homo sapiens
ttatggtactatttt

SEQ ID NO: 386192 - DNA, 15 bp, Homo sapiens
gttatggtactattt

SEQ ID NO: 386193 - DNA, 15 bp, Homo sapiens
agttatggtactatt

SEQ ID NO: 386194 - DNA, 15 bp, Homo sapiens
aagttatggtactat

SEQ ID NO: 386195 - DNA, 15 bp, Homo sapiens
taagttatggtacta

SEQ ID NO: 386196 - DNA, 15 bp, Homo sapiens
ataagttatggtact

SEQ ID NO: 386197 - DNA, 15 bp, Homo sapiens
tataagttatggtac

SEQ ID NO: 386198 - DNA, 15 bp, Homo sapiens
gtataagttatggta

SEQ ID NO: 386199 - DNA, 15 bp, Homo sapiens
tgtataagttatggt

SEQ ID NO: 386200 - DNA, 15 bp, Homo sapiens
ctgtataagttatgg

SEQ ID NO: 386201 - DNA, 15 bp, Homo sapiens
actgtataagttatg

SEQ ID NO: 386202 - DNA, 15 bp, Homo sapiens
cactgtataagttat

SEQ ID NO: 386203 - DNA, 15 bp, Homo sapiens
ccactgtataagtta

SEQ ID NO: 386204 - DNA, 15 bp, Homo sapiens
accactgtataagtt

SEQ ID NO: 386205 - DNA, 15 bp, Homo sapiens
caccactgtataagt

SEQ ID NO: 386206 - DNA, 15 bp, Homo sapiens
acaccactgtataag

SEQ ID NO: 386207 - DNA, 15 bp, Homo sapiens
aacaccactgtataa

SEQ ID NO: 386208 - DNA, 15 bp, Homo sapiens
caacaccactgtata

SEQ ID NO: 386209 - DNA, 15 bp, Homo sapiens
tcaacaccactgtat

SEQ ID NO: 386210 - DNA, 15 bp, Homo sapiens
atcaacaccactgta

SEQ ID NO: 386211 - DNA, 15 bp, Homo sapiens
catcaacaccactgt

SEQ ID NO: 386212 - DNA, 15 bp, Homo sapiens
ccatcaacaccactg

SEQ ID NO: 386213 - DNA, 15 bp, Homo sapiens
gccatcaacaccact

SEQ ID NO: 386214 - DNA, 15 bp, Homo sapiens
tgccatcaacaccac

SEQ ID NO: 386215 - DNA, 15 bp, Homo sapiens
gtgccatcaacacca

SEQ ID NO: 386216 - DNA, 15 bp, Homo sapiens
agtgccatcaacacc

SEQ ID NO: 386217 - DNA, 15 bp, Homo sapiens
aagtgccatcaacac

SEQ ID NO: 386218 - DNA, 15 bp, Homo sapiens
aaagtgccatcaaca

SEQ ID NO: 386219 - DNA, 15 bp, Homo sapiens
gaaagtgccatcaac

SEQ ID NO: 386220 - DNA, 15 bp, Homo sapiens
agaaagtgccatcaa

SEQ ID NO: 386221 - DNA, 15 bp, Homo sapiens
gagaaagtgccatca

SEQ ID NO: 386222 - DNA, 15 bp, Homo sapiens
tgagaaagtgccatc

SEQ ID NO: 386223 - DNA, 15 bp, Homo sapiens
atgagaaagtgccat

SEQ ID NO: 386224 - DNA, 15 bp, Homo sapiens
gatgagaaagtgcca

SEQ ID NO: 386225 - DNA, 15 bp, Homo sapiens
agatgagaaagtgcc

SEQ ID NO: 386226 - DNA, 15 bp, Homo sapiens
tagatgagaaagtgc

SEQ ID NO: 386227 - DNA, 15 bp, Homo sapiens
gtagatgagaaagtg

SEQ ID NO: 386228 - DNA, 15 bp, Homo sapiens
ggtagatgagaaagt

SEQ ID NO: 386229 - DNA, 15 bp, Homo sapiens
gggtagatgagaaag

SEQ ID NO: 386230 - DNA, 15 bp, Homo sapiens
agggtagatgagaaa

SEQ ID NO: 386231 - DNA, 15 bp, Homo sapiens
tagggtagatgagaa

SEQ ID NO: 386232 - DNA, 15 bp, Homo sapiens
atagggtagatgaga

SEQ ID NO: 386233 - DNA, 15 bp, Homo sapiens
catagggtagatgag

SEQ ID NO: 386234 - DNA, 15 bp, Homo sapiens
acatagggtagatga

SEQ ID NO: 386235 - DNA, 15 bp, Homo sapiens
aacatagggtagatg

SEQ ID NO: 386236 - DNA, 15 bp, Homo sapiens
taacatagggtagat

SEQ ID NO: 386237 - DNA, 15 bp, Homo sapiens
ataacatagggtaga

SEQ ID NO: 386238 - DNA, 15 bp, Homo sapiens
tataacatagggtag

SEQ ID NO: 386239 - DNA, 15 bp, Homo sapiens
ttataacatagggta

SEQ ID NO: 386240 - DNA, 15 bp, Homo sapiens
tttataacatagggt

SEQ ID NO: 386241 - DNA, 15 bp, Homo sapiens
ctttataacataggg

SEQ ID NO: 386242 - DNA, 15 bp, Homo sapiens
actttataacatagg

SEQ ID NO: 386243 - DNA, 15 bp, Homo sapiens
aactttataacatag

SEQ ID NO: 386244 - DNA, 15 bp, Homo sapiens
aaactttataacata

SEQ ID NO: 386245 - DNA, 15 bp, Homo sapiens
aaaactttataacat

SEQ ID NO: 386246 - DNA, 15 bp, Homo sapiens
aaaaactttataaca

SEQ ID NO: 386247 - DNA, 15 bp, Homo sapiens
aaaaaactttataac

SEQ ID NO: 386248 - DNA, 15 bp, Homo sapiens
caaaaaactttataa

SEQ ID NO: 386249 - DNA, 15 bp, Homo sapiens
gcaaaaaactttata

SEQ ID NO: 386250 - DNA, 15 bp, Homo sapiens
agcaaaaaactttat

SEQ ID NO: 386251 - DNA, 15 bp, Homo sapiens
cagcaaaaaacttta

SEQ ID NO: 386252 - DNA, 15 bp, Homo sapiens
gcagcaaaaaacttt

SEQ ID NO: 386253 - DNA, 15 bp, Homo sapiens
agcagcaaaaaactt

SEQ ID NO: 386254 - DNA, 15 bp, Homo sapiens
cagcagcaaaaaact

SEQ ID NO: 386255 - DNA, 15 bp, Homo sapiens
tcagcagcaaaaaac

SEQ ID NO: 386256 - DNA, 15 bp, Homo sapiens
ttcagcagcaaaaaa

SEQ ID NO: 386257 - DNA, 15 bp, Homo sapiens
attcagcagcaaaaa

SEQ ID NO: 386258 - DNA, 15 bp, Homo sapiens
aattcagcagcaaaa

SEQ ID NO: 386259 - DNA, 15 bp, Homo sapiens
aaattcagcagcaaa

SEQ ID NO: 386260 - DNA, 15 bp, Homo sapiens
taaattcagcagcaa

SEQ ID NO: 386261 - DNA, 15 bp, Homo sapiens
ttaaattcagcagca

SEQ ID NO: 386262 - DNA, 15 bp, Homo sapiens
tttaaattcagcagc

SEQ ID NO: 386263 - DNA, 15 bp, Homo sapiens
gtttaaattcagcag

SEQ ID NO: 386264 - DNA, 15 bp, Homo sapiens
tgtttaaattcagca

SEQ ID NO: 386265 - DNA, 15 bp, Homo sapiens
gtgtttaaattcagc

SEQ ID NO: 386266 - DNA, 15 bp, Homo sapiens
ggtgtttaaattcag

SEQ ID NO: 386267 - DNA, 15 bp, Homo sapiens
aggtgtttaaattca

SEQ ID NO: 386268 - DNA, 15 bp, Homo sapiens
aaggtgtttaaattc

SEQ ID NO: 386269 - DNA, 15 bp, Homo sapiens
aaaggtgtttaaatt

SEQ ID NO: 386270 - DNA, 15 bp, Homo sapiens
aaaaggtgtttaaat

SEQ ID NO: 386271 - DNA, 15 bp, Homo sapiens
gaaaaggtgtttaaa

SEQ ID NO: 386272 - DNA, 15 bp, Homo sapiens
ggaaaaggtgtttaa

SEQ ID NO: 386273 - DNA, 15 bp, Homo sapiens
aggaaaaggtgttta

SEQ ID NO: 386274 - DNA, 15 bp, Homo sapiens
taggaaaaggtgttt

SEQ ID NO: 386275 - DNA, 15 bp, Homo sapiens
ttaggaaaaggtgtt

SEQ ID NO: 386276 - DNA, 15 bp, Homo sapiens
tttaggaaaaggtgt

SEQ ID NO: 386277 - DNA, 15 bp, Homo sapiens
ttttaggaaaaggtg

SEQ ID NO: 386278 - DNA, 15 bp, Homo sapiens
gttttaggaaaaggt

SEQ ID NO: 386279 - DNA, 15 bp, Homo sapiens
cgttttaggaaaagg

SEQ ID NO: 386280 - DNA, 15 bp, Homo sapiens
ccgttttaggaaaag

SEQ ID NO: 386281 - DNA, 15 bp, Homo sapiens
cccgttttaggaaaa

SEQ ID NO: 386282 - DNA, 15 bp, Homo sapiens
gcccgttttaggaaa

SEQ ID NO: 386283 - DNA, 15 bp, Homo sapiens
tgcccgttttaggaa

SEQ ID NO: 386284 - DNA, 15 bp, Homo sapiens
ttgcccgttttagga

SEQ ID NO: 386285 - DNA, 15 bp, Homo sapiens
gttgcccgttttagg

SEQ ID NO: 386286 - DNA, 15 bp, Homo sapiens
agttgcccgttttag

SEQ ID NO: 386287 - DNA, 15 bp, Homo sapiens
aagttgcccgtttta

SEQ ID NO: 386288 - DNA, 15 bp, Homo sapiens
aaagttgcccgtttt

SEQ ID NO: 386289 - DNA, 15 bp, Homo sapiens
caaagttgcccgttt

SEQ ID NO: 386290 - DNA, 15 bp, Homo sapiens
gcaaagttgcccgtt

SEQ ID NO: 386291 - DNA, 15 bp, Homo sapiens
agcaaagttgcccgt

SEQ ID NO: 386292 - DNA, 15 bp, Homo sapiens
cagcaaagttgcccg

SEQ ID NO: 386293 - DNA, 15 bp, Homo sapiens
acagcaaagttgccc

SEQ ID NO: 386294 - DNA, 15 bp, Homo sapiens
aacagcaaagttgcc

SEQ ID NO: 386295 - DNA, 15 bp, Homo sapiens
aaacagcaaagttgc

SEQ ID NO: 386296 - DNA, 15 bp, Homo sapiens
aaaacagcaaagttg

SEQ ID NO: 386297 - DNA, 15 bp, Homo sapiens
aaaaacagcaaagtt

SEQ ID NO: 386298 - DNA, 15 bp, Homo sapiens
caaaaacagcaaagt

SEQ ID NO: 386299 - DNA, 15 bp, Homo sapiens
gcaaaaacagcaaag

SEQ ID NO: 386300 - DNA, 15 bp, Homo sapiens
tgcaaaaacagcaaa

SEQ ID NO: 386301 - DNA, 15 bp, Homo sapiens
ttgcaaaaacagcaa

SEQ ID NO: 386302 - DNA, 15 bp, Homo sapiens
tttgcaaaaacagca

SEQ ID NO: 386303 - DNA, 15 bp, Homo sapiens
ttttgcaaaaacagc

SEQ ID NO: 386304 - DNA, 15 bp, Homo sapiens
tttttgcaaaaacag

SEQ ID NO: 386305 - DNA, 15 bp, Homo sapiens
ctttttgcaaaaaca

SEQ ID NO: 386306 - DNA, 15 bp, Homo sapiens
gctttttgcaaaaac

SEQ ID NO: 386307 - DNA, 15 bp, Homo sapiens
tgctttttgcaaaaa

SEQ ID NO: 386308 - DNA, 15 bp, Homo sapiens
ctgctttttgcaaaa

SEQ ID NO: 386309 - DNA, 15 bp, Homo sapiens
gctgctttttgcaaa

SEQ ID NO: 386310 - DNA, 15 bp, Homo sapiens
tgctgctttttgcaa

SEQ ID NO: 386311 - DNA, 15 bp, Homo sapiens
atgctgctttttgca

SEQ ID NO: 386312 - DNA, 15 bp, Homo sapiens
tatgctgctttttgc

SEQ ID NO: 386313 - DNA, 15 bp, Homo sapiens
ttatgctgctttttg

SEQ ID NO: 386314 - DNA, 15 bp, Homo sapiens
cttatgctgcttttt

SEQ ID NO: 386315 - DNA, 15 bp, Homo sapiens
acttatgctgctttt

SEQ ID NO: 386316 - DNA, 15 bp, Homo sapiens
cacttatgctgcttt

SEQ ID NO: 386317 - DNA, 15 bp, Homo sapiens
tcacttatgctgctt

SEQ ID NO: 386318 - DNA, 15 bp, Homo sapiens
atcacttatgctgct

SEQ ID NO: 386319 - DNA, 15 bp, Homo sapiens
aatcacttatgctgc

SEQ ID NO: 386320 - DNA, 15 bp, Homo sapiens
aaatcacttatgctg

SEQ ID NO: 386321 - DNA, 15 bp, Homo sapiens
aaaatcacttatgct

SEQ ID NO: 386322 - DNA, 15 bp, Homo sapiens
gaaaatcacttatgc

SEQ ID NO: 386323 - DNA, 15 bp, Homo sapiens
ggaaaatcacttatg

SEQ ID NO: 386324 - DNA, 15 bp, Homo sapiens
tggaaaatcacttat

SEQ ID NO: 386325 - DNA, 15 bp, Homo sapiens
ttggaaaatcactta

SEQ ID NO: 386326 - DNA, 15 bp, Homo sapiens
attggaaaatcactt

SEQ ID NO: 386327 - DNA, 15 bp, Homo sapiens
aattggaaaatcact

SEQ ID NO: 386328 - DNA, 15 bp, Homo sapiens
gaattggaaaatcac

SEQ ID NO: 386329 - DNA, 15 bp, Homo sapiens
agaattggaaaatca

SEQ ID NO: 386330 - DNA, 15 bp, Homo sapiens
aagaattggaaaatc

SEQ ID NO: 386331 - DNA, 15 bp, Homo sapiens
aaagaattggaaaat

SEQ ID NO: 386332 - DNA, 15 bp, Homo sapiens
aaaagaattggaaaa

SEQ ID NO: 386333 - DNA, 15 bp, Homo sapiens
aaaaagaattggaaa

SEQ ID NO: 386334 - DNA, 15 bp, Homo sapiens
gaaaaagaattggaa

SEQ ID NO: 386335 - DNA, 15 bp, Homo sapiens
agaaaaagaattgga

SEQ ID NO: 386336 - DNA, 15 bp, Homo sapiens
tagaaaaagaattgg

SEQ ID NO: 386337 - DNA, 15 bp, Homo sapiens
atagaaaaagaattg

SEQ ID NO: 386338 - DNA, 15 bp, Homo sapiens
aatagaaaaagaatt

SEQ ID NO: 386339 - DNA, 15 bp, Homo sapiens
aaatagaaaaagaat

SEQ ID NO: 386340 - DNA, 15 bp, Homo sapiens
caaatagaaaaagaa

SEQ ID NO: 386341 - DNA, 15 bp, Homo sapiens
gcaaatagaaaaaga

SEQ ID NO: 386342 - DNA, 15 bp, Homo sapiens
agcaaatagaaaaag

SEQ ID NO: 386343 - DNA, 15 bp, Homo sapiens
cagcaaatagaaaaa

SEQ ID NO: 386344 - DNA, 15 bp, Homo sapiens
tcagcaaatagaaaa

SEQ ID NO: 386345 - DNA, 15 bp, Homo sapiens
ttcagcaaatagaaa

SEQ ID NO: 386346 - DNA, 15 bp, Homo sapiens
tttcagcaaatagaa

SEQ ID NO: 386347 - DNA, 15 bp, Homo sapiens
ttttcagcaaataga

SEQ ID NO: 386348 - DNA, 15 bp, Homo sapiens
cttttcagcaaatag

SEQ ID NO: 386349 - DNA, 15 bp, Homo sapiens
gcttttcagcaaata

SEQ ID NO: 386350 - DNA, 15 bp, Homo sapiens
tgcttttcagcaaat

SEQ ID NO: 386351 - DNA, 15 bp, Homo sapiens
ttgcttttcagcaaa

SEQ ID NO: 386352 - DNA, 15 bp, Homo sapiens
cttgcttttcagcaa

SEQ ID NO: 386353 - DNA, 15 bp, Homo sapiens
acttgcttttcagca

SEQ ID NO: 386354 - DNA, 15 bp, Homo sapiens
aacttgcttttcagc

SEQ ID NO: 386355 - DNA, 15 bp, Homo sapiens
aaacttgcttttcag

SEQ ID NO: 386356 - DNA, 15 bp, Homo sapiens
aaaacttgcttttca

SEQ ID NO: 386357 - DNA, 15 bp, Homo sapiens
gaaaacttgcttttc

SEQ ID NO: 386358 - DNA, 15 bp, Homo sapiens
tgaaaacttgctttt

SEQ ID NO: 386359 - DNA, 15 bp, Homo sapiens
ttgaaaacttgcttt

SEQ ID NO: 386360 - DNA, 15 bp, Homo sapiens
tttgaaaacttgctt

SEQ ID NO: 386361 - DNA, 15 bp, Homo sapiens
ctttgaaaacttgct

SEQ ID NO: 386362 - DNA, 15 bp, Homo sapiens
tctttgaaaacttgc

SEQ ID NO: 386363 - DNA, 15 bp, Homo sapiens
atctttgaaaacttg

SEQ ID NO: 386364 - DNA, 15 bp, Homo sapiens
gatctttgaaaactt

SEQ ID NO: 386365 - DNA, 15 bp, Homo sapiens
agatctttgaaaact

SEQ ID NO: 386366 - DNA, 15 bp, Homo sapiens
aagatctttgaaaac

SEQ ID NO: 386367 - DNA, 15 bp, Homo sapiens
aaagatctttgaaaa

SEQ ID NO: 386368 - DNA, 15 bp, Homo sapiens
caaagatctttgaaa

SEQ ID NO: 386369 - DNA, 15 bp, Homo sapiens
tcaaagatctttgaa

SEQ ID NO: 386370 - DNA, 15 bp, Homo sapiens
ttcaaagatctttga

SEQ ID NO: 386371 - DNA, 15 bp, Homo sapiens
tttcaaagatctttg

SEQ ID NO: 386372 - DNA, 15 bp, Homo sapiens
atttcaaagatcttt

SEQ ID NO: 386373 - DNA, 15 bp, Homo sapiens
gatttcaaagatctt

SEQ ID NO: 386374 - DNA, 15 bp, Homo sapiens
ggatttcaaagatct

SEQ ID NO: 386375 - DNA, 15 bp, Homo sapiens
cggatttcaaagatc

SEQ ID NO: 386376 - DNA, 15 bp, Homo sapiens
acggatttcaaagat

SEQ ID NO: 386377 - DNA, 15 bp, Homo sapiens
aacggatttcaaaga

SEQ ID NO: 386378 - DNA, 15 bp, Homo sapiens
aaacggatttcaaag

SEQ ID NO: 386379 - DNA, 15 bp, Homo sapiens
aaaacggatttcaaa

SEQ ID NO: 386380 - DNA, 15 bp, Homo sapiens
gaaaacggatttcaa

SEQ ID NO: 386381 - DNA, 15 bp, Homo sapiens
tgaaaacggatttca

SEQ ID NO: 386382 - DNA, 15 bp, Homo sapiens
atgaaaacggatttc

SEQ ID NO: 386383 - DNA, 15 bp, Homo sapiens
aatgaaaacggattt

SEQ ID NO: 386384 - DNA, 15 bp, Homo sapiens
gaatgaaaacggatt

SEQ ID NO: 386385 - DNA, 15 bp, Homo sapiens
ggaatgaaaacggat

SEQ ID NO: 386386 - DNA, 15 bp, Homo sapiens
aggaatgaaaacgga

SEQ ID NO: 386387 - DNA, 15 bp, Homo sapiens
aaggaatgaaaacgg

SEQ ID NO: 386388 - DNA, 15 bp, Homo sapiens
aaaggaatgaaaacg

SEQ ID NO: 386389 - DNA, 15 bp, Homo sapiens
aaaaggaatgaaaac

SEQ ID NO: 386390 - DNA, 15 bp, Homo sapiens
caaaaggaatgaaaa

SEQ ID NO: 386391 - DNA, 15 bp, Homo sapiens
ccaaaaggaatgaaa

SEQ ID NO: 386392 - DNA, 15 bp, Homo sapiens
tccaaaaggaatgaa

SEQ ID NO: 386393 - DNA, 15 bp, Homo sapiens
ttccaaaaggaatga

SEQ ID NO: 386394 - DNA, 15 bp, Homo sapiens
tttccaaaaggaatg

SEQ ID NO: 386395 - DNA, 15 bp, Homo sapiens
ttttccaaaaggaat

SEQ ID NO: 386396 - DNA, 15 bp, Homo sapiens
gttttccaaaaggaa

SEQ ID NO: 386397 - DNA, 15 bp, Homo sapiens
tgttttccaaaagga

SEQ ID NO: 386398 - DNA, 15 bp, Homo sapiens
ttgttttccaaaagg

SEQ ID NO: 386399 - DNA, 15 bp, Homo sapiens
tttgttttccaaaag

SEQ ID NO: 386400 - DNA, 15 bp, Homo sapiens
atttgttttccaaaa

SEQ ID NO: 386401 - DNA, 15 bp, Homo sapiens
catttgttttccaaa

SEQ ID NO: 386402 - DNA, 15 bp, Homo sapiens
acatttgttttccaa

SEQ ID NO: 386403 - DNA, 15 bp, Homo sapiens
tacatttgttttcca

SEQ ID NO: 386404 - DNA, 15 bp, Homo sapiens
ttacatttgttttcc

SEQ ID NO: 386405 - DNA, 15 bp, Homo sapiens
attacatttgttttc

SEQ ID NO: 386406 - DNA, 15 bp, Homo sapiens
tattacatttgtttt

SEQ ID NO: 386407 - DNA, 15 bp, Homo sapiens
ctattacatttgttt

SEQ ID NO: 386408 - DNA, 15 bp, Homo sapiens
gctattacatttgtt

SEQ ID NO: 386409 - DNA, 15 bp, Homo sapiens
ggctattacatttgt

SEQ ID NO: 386410 - DNA, 15 bp, Homo sapiens
aggctattacatttg

SEQ ID NO: 386411 - DNA, 15 bp, Homo sapiens
caggctattacattt

SEQ ID NO: 386412 - DNA, 15 bp, Homo sapiens
tcaggctattacatt

SEQ ID NO: 386413 - DNA, 15 bp, Homo sapiens
atcaggctattacat

SEQ ID NO: 386414 - DNA, 15 bp, Homo sapiens
gatcaggctattaca

SEQ ID NO: 386415 - DNA, 15 bp, Homo sapiens
agatcaggctattac

SEQ ID NO: 386416 - DNA, 15 bp, Homo sapiens
tagatcaggctatta

SEQ ID NO: 386417 - DNA, 15 bp, Homo sapiens
ctagatcaggctatt

SEQ ID NO: 386418 - DNA, 15 bp, Homo sapiens
cctagatcaggctat

SEQ ID NO: 386419 - DNA, 15 bp, Homo sapiens
gcctagatcaggcta

SEQ ID NO: 386420 - DNA, 15 bp, Homo sapiens
agcctagatcaggct

SEQ ID NO: 386421 - DNA, 15 bp, Homo sapiens
aagcctagatcaggc

SEQ ID NO: 386422 - DNA, 15 bp, Homo sapiens
taagcctagatcagg

SEQ ID NO: 386423 - DNA, 15 bp, Homo sapiens
ttaagcctagatcag

SEQ ID NO: 386424 - DNA, 15 bp, Homo sapiens
tttaagcctagatca

SEQ ID NO: 386425 - DNA, 15 bp, Homo sapiens
ctttaagcctagatc

SEQ ID NO: 386426 - DNA, 15 bp, Homo sapiens
actttaagcctagat

SEQ ID NO: 386427 - DNA, 15 bp, Homo sapiens
aactttaagcctaga

SEQ ID NO: 386428 - DNA, 15 bp, Homo sapiens
taactttaagcctag

SEQ ID NO: 386429 - DNA, 15 bp, Homo sapiens
ataactttaagccta

SEQ ID NO: 386430 - DNA, 15 bp, Homo sapiens
aataactttaagcct

SEQ ID NO: 386431 - DNA, 15 bp, Homo sapiens
aaataactttaagcc

SEQ ID NO: 386432 - DNA, 15 bp, Homo sapiens
taaataactttaagc

SEQ ID NO: 386433 - DNA, 15 bp, Homo sapiens
ataaataactttaag

SEQ ID NO: 386434 - DNA, 15 bp, Homo sapiens
aataaataactttaa

SEQ ID NO: 386435 - DNA, 15 bp, Homo sapiens
aaataaataacttta

SEQ ID NO: 386436 - DNA, 15 bp, Homo sapiens
taaataaataacttt

SEQ ID NO: 386437 - DNA, 15 bp, Homo sapiens
gtaaataaataactt

SEQ ID NO: 386438 - DNA, 15 bp, Homo sapiens
agtaaataaataact

SEQ ID NO: 386439 - DNA, 15 bp, Homo sapiens
gacacacacacacac

SEQ ID NO: 386440 - DNA, 15 bp, Homo sapiens
agacacacacacaca

SEQ ID NO: 386441 - DNA, 15 bp, Homo sapiens
tagacacacacacac

SEQ ID NO: 386442 - DNA, 15 bp, Homo sapiens
atagacacacacaca

SEQ ID NO: 386443 - DNA, 15 bp, Homo sapiens
gatagacacacacac

SEQ ID NO: 386444 - DNA, 15 bp, Homo sapiens
agatagacacacaca

SEQ ID NO: 386445 - DNA, 15 bp, Homo sapiens
cagatagacacacac

SEQ ID NO: 386446 - DNA, 15 bp, Homo sapiens
acagatagacacaca

SEQ ID NO: 386447 - DNA, 15 bp, Homo sapiens
gacagatagacacac

SEQ ID NO: 386448 - DNA, 15 bp, Homo sapiens
agacagatagacaca

SEQ ID NO: 386449 - DNA, 15 bp, Homo sapiens
cagacagatagacac

SEQ ID NO: 386450 - DNA, 15 bp, Homo sapiens
tcagacagatagaca

SEQ ID NO: 386451 - DNA, 15 bp, Homo sapiens
ctcagacagatagac

SEQ ID NO: 386452 - DNA, 15 bp, Homo sapiens
tctcagacagataga

SEQ ID NO: 386453 - DNA, 15 bp, Homo sapiens
ttctcagacagatag

SEQ ID NO: 386454 - DNA, 15 bp, Homo sapiens
tttctcagacagata

SEQ ID NO: 386455 - DNA, 15 bp, Homo sapiens
ctttctcagacagat

SEQ ID NO: 386456 - DNA, 15 bp, Homo sapiens
tctttctcagacaga

SEQ ID NO: 386457 - DNA, 15 bp, Homo sapiens
ttctttctcagacag

SEQ ID NO: 386458 - DNA, 15 bp, Homo sapiens
cttctttctcagaca

SEQ ID NO: 386459 - DNA, 15 bp, Homo sapiens
tcttctttctcagac

SEQ ID NO: 386460 - DNA, 15 bp, Homo sapiens
ctcttctttctcaga

SEQ ID NO: 386461 - DNA, 15 bp, Homo sapiens
tctcttctttctcag

SEQ ID NO: 386462 - DNA, 15 bp, Homo sapiens
ttctcttctttctca

SEQ ID NO: 386463 - DNA, 15 bp, Homo sapiens
tttctcttctttctc

SEQ ID NO: 386464 - DNA, 15 bp, Homo sapiens
gtttctcttctttct

SEQ ID NO: 386465 - DNA, 15 bp, Homo sapiens
agtttctcttctttc

SEQ ID NO: 386466 - DNA, 15 bp, Homo sapiens
aagtttctcttcttt

SEQ ID NO: 386467 - DNA, 15 bp, Homo sapiens
aaagtttctcttctt

SEQ ID NO: 386468 - DNA, 15 bp, Homo sapiens
aaaagtttctcttct

SEQ ID NO: 386469 - DNA, 15 bp, Homo sapiens
caaaagtttctcttc

SEQ ID NO: 386470 - DNA, 15 bp, Homo sapiens
tcaaaagtttctctt

SEQ ID NO: 386471 - DNA, 15 bp, Homo sapiens
ttcaaaagtttctct

SEQ ID NO: 386472 - DNA, 15 bp, Homo sapiens
tttcaaaagtttctc

SEQ ID NO: 386473 - DNA, 15 bp, Homo sapiens
atttcaaaagtttct

SEQ ID NO: 386474 - DNA, 15 bp, Homo sapiens
aatttcaaaagtttc

SEQ ID NO: 386475 - DNA, 15 bp, Homo sapiens
caatttcaaaagttt

SEQ ID NO: 386476 - DNA, 15 bp, Homo sapiens
ccaatttcaaaagtt

SEQ ID NO: 386477 - DNA, 15 bp, Homo sapiens
cccaatttcaaaagt

SEQ ID NO: 386478 - DNA, 15 bp, Homo sapiens
gcccaatttcaaaag

SEQ ID NO: 386479 - DNA, 15 bp, Homo sapiens
agcccaatttcaaaa

SEQ ID NO: 386480 - DNA, 15 bp, Homo sapiens
cagcccaatttcaaa

SEQ ID NO: 386481 - DNA, 15 bp, Homo sapiens
tcagcccaatttcaa

SEQ ID NO: 386482 - DNA, 15 bp, Homo sapiens
ttcagcccaatttca

SEQ ID NO: 386483 - DNA, 15 bp, Homo sapiens
attcagcccaatttc

SEQ ID NO: 386484 - DNA, 15 bp, Homo sapiens
tattcagcccaattt

SEQ ID NO: 386485 - DNA, 15 bp, Homo sapiens
ttattcagcccaatt

SEQ ID NO: 386486 - DNA, 15 bp, Homo sapiens
attattcagcccaat

SEQ ID NO: 386487 - DNA, 15 bp, Homo sapiens
aattattcagcccaa

SEQ ID NO: 386488 - DNA, 15 bp, Homo sapiens
aaattattcagccca

SEQ ID NO: 386489 - DNA, 15 bp, Homo sapiens
taaattattcagccc

SEQ ID NO: 386490 - DNA, 15 bp, Homo sapiens
ataaattattcagcc

SEQ ID NO: 386491 - DNA, 15 bp, Homo sapiens
tataaattattcagc

SEQ ID NO: 386492 - DNA, 15 bp, Homo sapiens
ttataaattattcag

SEQ ID NO: 386493 - DNA, 15 bp, Homo sapiens
tttataaattattca

SEQ ID NO: 386494 - DNA, 15 bp, Homo sapiens
ctttataaattattc

SEQ ID NO: 386495 - DNA, 15 bp, Homo sapiens
cctttataaattatt

SEQ ID NO: 386496 - DNA, 15 bp, Homo sapiens
tcctttataaattat

SEQ ID NO: 386497 - DNA, 15 bp, Homo sapiens
gtcctttataaatta

SEQ ID NO: 386498 - DNA, 15 bp, Homo sapiens
agtcctttataaatt

SEQ ID NO: 386499 - DNA, 15 bp, Homo sapiens
gagtcctttataaat

SEQ ID NO: 386500 - DNA, 15 bp, Homo sapiens
ggagtcctttataaa

SEQ ID NO: 386501 - DNA, 15 bp, Homo sapiens
gggagtcctttataa

SEQ ID NO: 386502 - DNA, 15 bp, Homo sapiens
agggagtcctttata

SEQ ID NO: 386503 - DNA, 15 bp, Homo sapiens
aagggagtcctttat

SEQ ID NO: 386504 - DNA, 15 bp, Homo sapiens
caagggagtccttta

SEQ ID NO: 386505 - DNA, 15 bp, Homo sapiens
acaagggagtccttt

SEQ ID NO: 386506 - DNA, 15 bp, Homo sapiens
aacaagggagtcctt

SEQ ID NO: 386507 - DNA, 15 bp, Homo sapiens
caacaagggagtcct

SEQ ID NO: 386508 - DNA, 15 bp, Homo sapiens
acaacaagggagtcc

SEQ ID NO: 386509 - DNA, 15 bp, Homo sapiens
cacaacaagggagtc

SEQ ID NO: 386510 - DNA, 15 bp, Homo sapiens
tcacaacaagggagt

SEQ ID NO: 386511 - DNA, 15 bp, Homo sapiens
atcacaacaagggag

SEQ ID NO: 386512 - DNA, 15 bp, Homo sapiens
tatcacaacaaggga

SEQ ID NO: 386513 - DNA, 15 bp, Homo sapiens
ctatcacaacaaggg

SEQ ID NO: 386514 - DNA, 15 bp, Homo sapiens
actatcacaacaagg

SEQ ID NO: 386515 - DNA, 15 bp, Homo sapiens
gactatcacaacaag

SEQ ID NO: 386516 - DNA, 15 bp, Homo sapiens
agactatcacaacaa

SEQ ID NO: 386517 - DNA, 15 bp, Homo sapiens
aagactatcacaaca

SEQ ID NO: 386518 - DNA, 15 bp, Homo sapiens
aaagactatcacaac

SEQ ID NO: 386519 - DNA, 15 bp, Homo sapiens
taaagactatcacaa

SEQ ID NO: 386520 - DNA, 15 bp, Homo sapiens
ttaaagactatcaca

SEQ ID NO: 386521 - DNA, 15 bp, Homo sapiens
tttaaagactatcac

SEQ ID NO: 386522 - DNA, 15 bp, Homo sapiens
gtttaaagactatca

SEQ ID NO: 386523 - DNA, 15 bp, Homo sapiens
tgtttaaagactatc

SEQ ID NO: 386524 - DNA, 15 bp, Homo sapiens
atgtttaaagactat

SEQ ID NO: 386525 - DNA, 15 bp, Homo sapiens
gatgtttaaagacta

SEQ ID NO: 386526 - DNA, 15 bp, Homo sapiens
ggatgtttaaagact

SEQ ID NO: 386527 - DNA, 15 bp, Homo sapiens
gggatgtttaaagac

SEQ ID NO: 386528 - DNA, 15 bp, Homo sapiens
ggggatgtttaaaga

SEQ ID NO: 386529 - DNA, 15 bp, Homo sapiens
tggggatgtttaaag

SEQ ID NO: 386530 - DNA, 15 bp, Homo sapiens
ctggggatgtttaaa

SEQ ID NO: 386531 - DNA, 15 bp, Homo sapiens
tctggggatgtttaa

SEQ ID NO: 386532 - DNA, 15 bp, Homo sapiens
atctggggatgttta

SEQ ID NO: 386533 - DNA, 15 bp, Homo sapiens
gatctggggatgttt

SEQ ID NO: 386534 - DNA, 15 bp, Homo sapiens
agatctggggatgtt

SEQ ID NO: 386535 - DNA, 15 bp, Homo sapiens
cagatctggggatgt

SEQ ID NO: 386536 - DNA, 15 bp, Homo sapiens
ccagatctggggatg

SEQ ID NO: 386537 - DNA, 15 bp, Homo sapiens
gccagatctggggat

SEQ ID NO: 386538 - DNA, 15 bp, Homo sapiens
ggccagatctgggga

SEQ ID NO: 386539 - DNA, 15 bp, Homo sapiens
aggccagatctgggg

SEQ ID NO: 386540 - DNA, 15 bp, Homo sapiens
caggccagatctggg

SEQ ID NO: 386541 - DNA, 15 bp, Homo sapiens
acaggccagatctgg

SEQ ID NO: 386542 - DNA, 15 bp, Homo sapiens
gacaggccagatctg

SEQ ID NO: 386543 - DNA, 15 bp, Homo sapiens
tgacaggccagatct

SEQ ID NO: 386544 - DNA, 15 bp, Homo sapiens
ttgacaggccagatc

SEQ ID NO: 386545 - DNA, 15 bp, Homo sapiens
attgacaggccagat

SEQ ID NO: 386546 - DNA, 15 bp, Homo sapiens
gattgacaggccaga

SEQ ID NO: 386547 - DNA, 15 bp, Homo sapiens
agattgacaggccag

SEQ ID NO: 386548 - DNA, 15 bp, Homo sapiens
cagattgacaggcca

SEQ ID NO: 386549 - DNA, 15 bp, Homo sapiens
tcagattgacaggcc

SEQ ID NO: 386550 - DNA, 15 bp, Homo sapiens
ctcagattgacaggc

SEQ ID NO: 386551 - DNA, 15 bp, Homo sapiens
tctcagattgacagg

SEQ ID NO: 386552 - DNA, 15 bp, Homo sapiens
gtctcagattgacag

SEQ ID NO: 386553 - DNA, 15 bp, Homo sapiens
agtctcagattgaca

SEQ ID NO: 386554 - DNA, 15 bp, Homo sapiens
aagtctcagattgac

SEQ ID NO: 386555 - DNA, 15 bp, Homo sapiens
gaagtctcagattga

SEQ ID NO: 386556 - DNA, 15 bp, Homo sapiens
agaagtctcagattg

SEQ ID NO: 386557 - DNA, 15 bp, Homo sapiens
gagaagtctcagatt

SEQ ID NO: 386558 - DNA, 15 bp, Homo sapiens
tgagaagtctcagat

SEQ ID NO: 386559 - DNA, 15 bp, Homo sapiens
ctgagaagtctcaga

SEQ ID NO: 386560 - DNA, 15 bp, Homo sapiens
gctgagaagtctcag

SEQ ID NO: 386561 - DNA, 15 bp, Homo sapiens
ggctgagaagtctca

SEQ ID NO: 386562 - DNA, 15 bp, Homo sapiens
aggctgagaagtctc

SEQ ID NO: 386563 - DNA, 15 bp, Homo sapiens
gaggctgagaagtct

SEQ ID NO: 386564 - DNA, 15 bp, Homo sapiens
ggaggctgagaagtc

SEQ ID NO: 386565 - DNA, 15 bp, Homo sapiens
tggaggctgagaagt

SEQ ID NO: 386566 - DNA, 15 bp, Homo sapiens
atggaggctgagaag

SEQ ID NO: 386567 - DNA, 15 bp, Homo sapiens
tatggaggctgagaa

SEQ ID NO: 386568 - DNA, 15 bp, Homo sapiens
ttatggaggctgaga

SEQ ID NO: 386569 - DNA, 15 bp, Homo sapiens
gttatggaggctgag

SEQ ID NO: 386570 - DNA, 15 bp, Homo sapiens
agttatggaggctga

SEQ ID NO: 386571 - DNA, 15 bp, Homo sapiens
cagttatggaggctg

SEQ ID NO: 386572 - DNA, 15 bp, Homo sapiens
gcagttatggaggct

SEQ ID NO: 386573 - DNA, 15 bp, Homo sapiens
tgcagttatggaggc

SEQ ID NO: 386574 - DNA, 15 bp, Homo sapiens
ttgcagttatggagg

SEQ ID NO: 386575 - DNA, 15 bp, Homo sapiens
cttgcagttatggag

SEQ ID NO: 386576 - DNA, 15 bp, Homo sapiens
tcttgcagttatgga

SEQ ID NO: 386577 - DNA, 15 bp, Homo sapiens
ttcttgcagttatgg

SEQ ID NO: 386578 - DNA, 15 bp, Homo sapiens
tttcttgcagttatg

SEQ ID NO: 386579 - DNA, 15 bp, Homo sapiens
atttcttgcagttat

SEQ ID NO: 386580 - DNA, 15 bp, Homo sapiens
tatttcttgcagtta

SEQ ID NO: 386581 - DNA, 15 bp, Homo sapiens
ttatttcttgcagtt

SEQ ID NO: 386582 - DNA, 15 bp, Homo sapiens
tttatttcttgcagt

SEQ ID NO: 386583 - DNA, 15 bp, Homo sapiens
atttatttcttgcag

SEQ ID NO: 386584 - DNA, 15 bp, Homo sapiens
aatttatttcttgca

SEQ ID NO: 386585 - DNA, 15 bp, Homo sapiens
gaatttatttcttgc

SEQ ID NO: 386586 - DNA, 15 bp, Homo sapiens
ggaatttatttcttg

SEQ ID NO: 386587 - DNA, 15 bp, Homo sapiens
aggaatttatttctt

SEQ ID NO: 386588 - DNA, 15 bp, Homo sapiens
aaggaatttatttct

SEQ ID NO: 386589 - DNA, 15 bp, Homo sapiens
aaaggaatttatttc

SEQ ID NO: 386590 - DNA, 15 bp, Homo sapiens
aaaaggaatttattt

SEQ ID NO: 386591 - DNA, 15 bp, Homo sapiens
gaaaaggaatttatt

SEQ ID NO: 386592 - DNA, 15 bp, Homo sapiens
agaaaaggaatttat

SEQ ID NO: 386593 - DNA, 15 bp, Homo sapiens
aagaaaaggaattta

SEQ ID NO: 386594 - DNA, 15 bp, Homo sapiens
aaagaaaaggaattt

SEQ ID NO: 386595 - DNA, 15 bp, Homo sapiens
taaagaaaaggaatt

SEQ ID NO: 386596 - DNA, 15 bp, Homo sapiens
ataaagaaaaggaat

SEQ ID NO: 386597 - DNA, 15 bp, Homo sapiens
tataaagaaaaggaa

SEQ ID NO: 386598 - DNA, 15 bp, Homo sapiens
ttataaagaaaagga

SEQ ID NO: 386599 - DNA, 15 bp, Homo sapiens
tttataaagaaaagg

SEQ ID NO: 386600 - DNA, 15 bp, Homo sapiens
atttataaagaaaag

SEQ ID NO: 386601 - DNA, 15 bp, Homo sapiens
aatttataaagaaaa

SEQ ID NO: 386602 - DNA, 15 bp, Homo sapiens
taatttataaagaaa

SEQ ID NO: 386603 - DNA, 15 bp, Homo sapiens
gtaatttataaagaa

SEQ ID NO: 386604 - DNA, 15 bp, Homo sapiens
ggtaatttataaaga

SEQ ID NO: 386605 - DNA, 15 bp, Homo sapiens
aggtaatttataaag

SEQ ID NO: 386606 - DNA, 15 bp, Homo sapiens
taggtaatttataaa

SEQ ID NO: 386607 - DNA, 15 bp, Homo sapiens
ctaggtaatttataa

SEQ ID NO: 386608 - DNA, 15 bp, Homo sapiens
actaggtaatttata

SEQ ID NO: 386609 - DNA, 15 bp, Homo sapiens
aactaggtaatttat

SEQ ID NO: 386610 - DNA, 15 bp, Homo sapiens
aaactaggtaattta

SEQ ID NO: 386611 - DNA, 15 bp, Homo sapiens
gaaactaggtaattt

SEQ ID NO: 386612 - DNA, 15 bp, Homo sapiens
tgaaactaggtaatt

SEQ ID NO: 386613 - DNA, 15 bp, Homo sapiens
ctgaaactaggtaat

SEQ ID NO: 386614 - DNA, 15 bp, Homo sapiens
cctgaaactaggtaa

SEQ ID NO: 386615 - DNA, 15 bp, Homo sapiens
acctgaaactaggta

SEQ ID NO: 386616 - DNA, 15 bp, Homo sapiens
tacctgaaactaggt

SEQ ID NO: 386617 - DNA, 15 bp, Homo sapiens
atacctgaaactagg

SEQ ID NO: 386618 - DNA, 15 bp, Homo sapiens
aatacctgaaactag

SEQ ID NO: 386619 - DNA, 15 bp, Homo sapiens
gaatacctgaaacta

SEQ ID NO: 386620 - DNA, 15 bp, Homo sapiens
agaatacctgaaact

SEQ ID NO: 386621 - DNA, 15 bp, Homo sapiens
tagaatacctgaaac

SEQ ID NO: 386622 - DNA, 15 bp, Homo sapiens
atagaatacctgaaa

SEQ ID NO: 386623 - DNA, 15 bp, Homo sapiens
aatagaatacctgaa

SEQ ID NO: 386624 - DNA, 15 bp, Homo sapiens
taatagaatacctga

SEQ ID NO: 386625 - DNA, 15 bp, Homo sapiens
ataatagaatacctg

SEQ ID NO: 386626 - DNA, 15 bp, Homo sapiens
cataatagaatacct

SEQ ID NO: 386627 - DNA, 15 bp, Homo sapiens
tcataatagaatacc

SEQ ID NO: 386628 - DNA, 15 bp, Homo sapiens
ctcataatagaatac

SEQ ID NO: 386629 - DNA, 15 bp, Homo sapiens
gctcataatagaata

SEQ ID NO: 386630 - DNA, 15 bp, Homo sapiens
tgctcataatagaat

SEQ ID NO: 386631 - DNA, 15 bp, Homo sapiens
ttgctcataatagaa

SEQ ID NO: 386632 - DNA, 15 bp, Homo sapiens
gttgctcataataga

SEQ ID NO: 386633 - DNA, 15 bp, Homo sapiens
tgttgctcataatag

SEQ ID NO: 386634 - DNA, 15 bp, Homo sapiens
ctgttgctcataata

SEQ ID NO: 386635 - DNA, 15 bp, Homo sapiens
tctgttgctcataat

SEQ ID NO: 386636 - DNA, 15 bp, Homo sapiens
ttctgttgctcataa

SEQ ID NO: 386637 - DNA, 15 bp, Homo sapiens
tttctgttgctcata

SEQ ID NO: 386638 - DNA, 15 bp, Homo sapiens
ttttctgttgctcat

SEQ ID NO: 386639 - DNA, 15 bp, Homo sapiens
attttctgttgctca

SEQ ID NO: 386640 - DNA, 15 bp, Homo sapiens
tattttctgttgctc

SEQ ID NO: 386641 - DNA, 15 bp, Homo sapiens
ctattttctgttgct

SEQ ID NO: 386642 - DNA, 15 bp, Homo sapiens
tctattttctgttgc

SEQ ID NO: 386643 - DNA, 15 bp, Homo sapiens
gtctattttctgttg

SEQ ID NO: 386644 - DNA, 15 bp, Homo sapiens
agtctattttctgtt

SEQ ID NO: 386645 - DNA, 15 bp, Homo sapiens
tagtctattttctgt

SEQ ID NO: 386646 - DNA, 15 bp, Homo sapiens
ttagtctattttctg

SEQ ID NO: 386647 - DNA, 15 bp, Homo sapiens
attagtctattttct

SEQ ID NO: 386648 - DNA, 15 bp, Homo sapiens
tattagtctattttc

SEQ ID NO: 386649 - DNA, 15 bp, Homo sapiens
gtattagtctatttt

SEQ ID NO: 386650 - DNA, 15 bp, Homo sapiens
tgtattagtctattt

SEQ ID NO: 386651 - DNA, 15 bp, Homo sapiens
ctgtattagtctatt

SEQ ID NO: 386652 - DNA, 15 bp, Homo sapiens
cctgtattagtctat

SEQ ID NO: 386653 - DNA, 15 bp, Homo sapiens
gcctgtattagtcta

SEQ ID NO: 386654 - DNA, 15 bp, Homo sapiens
agcctgtattagtct

SEQ ID NO: 386655 - DNA, 15 bp, Homo sapiens
gagcctgtattagtc

SEQ ID NO: 386656 - DNA, 15 bp, Homo sapiens
agagcctgtattagt

SEQ ID NO: 386657 - DNA, 15 bp, Homo sapiens
cagagcctgtattag

SEQ ID NO: 386658 - DNA, 15 bp, Homo sapiens
acagagcctgtatta

SEQ ID NO: 386659 - DNA, 15 bp, Homo sapiens
aacagagcctgtatt

SEQ ID NO: 386660 - DNA, 15 bp, Homo sapiens
aaacagagcctgtat

SEQ ID NO: 386661 - DNA, 15 bp, Homo sapiens
aaaacagagcctgta

SEQ ID NO: 386662 - DNA, 15 bp, Homo sapiens
gaaaacagagcctgt

SEQ ID NO: 386663 - DNA, 15 bp, Homo sapiens
agaaaacagagcctg

SEQ ID NO: 386664 - DNA, 15 bp, Homo sapiens
aagaaaacagagcct

SEQ ID NO: 386665 - DNA, 15 bp, Homo sapiens
aaagaaaacagagcc

SEQ ID NO: 386666 - DNA, 15 bp, Homo sapiens
aaaagaaaacagagc

SEQ ID NO: 386667 - DNA, 15 bp, Homo sapiens
taaaagaaaacagag

SEQ ID NO: 386668 - DNA, 15 bp, Homo sapiens
ttaaaagaaaacaga

SEQ ID NO: 386669 - DNA, 15 bp, Homo sapiens
cttaaaagaaaacag

SEQ ID NO: 386670 - DNA, 15 bp, Homo sapiens
tcttaaaagaaaaca

SEQ ID NO: 386671 - DNA, 15 bp, Homo sapiens
atcttaaaagaaaac

SEQ ID NO: 386672 - DNA, 15 bp, Homo sapiens
catcttaaaagaaaa

SEQ ID NO: 386673 - DNA, 15 bp, Homo sapiens
ccatcttaaaagaaa

SEQ ID NO: 386674 - DNA, 15 bp, Homo sapiens
gccatcttaaaagaa

SEQ ID NO: 386675 - DNA, 15 bp, Homo sapiens
tgccatcttaaaaga

SEQ ID NO: 386676 - DNA, 15 bp, Homo sapiens
ctgccatcttaaaag

SEQ ID NO: 386677 - DNA, 15 bp, Homo sapiens
gctgccatcttaaaa

SEQ ID NO: 386678 - DNA, 15 bp, Homo sapiens
tgctgccatcttaaa

SEQ ID NO: 386679 - DNA, 15 bp, Homo sapiens
ctgctgccatcttaa

SEQ ID NO: 386680 - DNA, 15 bp, Homo sapiens
actgctgccatctta

SEQ ID NO: 386681 - DNA, 15 bp, Homo sapiens
gactgctgccatctt

SEQ ID NO: 386682 - DNA, 15 bp, Homo sapiens
agactgctgccatct

SEQ ID NO: 386683 - DNA, 15 bp, Homo sapiens
cagactgctgccatc

SEQ ID NO: 386684 - DNA, 15 bp, Homo sapiens
ccagactgctgccat

SEQ ID NO: 386685 - DNA, 15 bp, Homo sapiens
accagactgctgcca

SEQ ID NO: 386686 - DNA, 15 bp, Homo sapiens
aaccagactgctgcc

SEQ ID NO: 386687 - DNA, 15 bp, Homo sapiens
taaccagactgctgc

SEQ ID NO: 386688 - DNA, 15 bp, Homo sapiens
ttaaccagactgctg

SEQ ID NO: 386689 - DNA, 15 bp, Homo sapiens
attaaccagactgct

SEQ ID NO: 386690 - DNA, 15 bp, Homo sapiens
gattaaccagactgc

SEQ ID NO: 386691 - DNA, 15 bp, Homo sapiens
ggattaaccagactg

SEQ ID NO: 386692 - DNA, 15 bp, Homo sapiens
aggattaaccagact

SEQ ID NO: 386693 - DNA, 15 bp, Homo sapiens
taggattaaccagac

SEQ ID NO: 386694 - DNA, 15 bp, Homo sapiens
ttaggattaaccaga

SEQ ID NO: 386695 - DNA, 15 bp, Homo sapiens
tttaggattaaccag

SEQ ID NO: 386696 - DNA, 15 bp, Homo sapiens
ctttaggattaacca

SEQ ID NO: 386697 - DNA, 15 bp, Homo sapiens
actttaggattaacc

SEQ ID NO: 386698 - DNA, 15 bp, Homo sapiens
gactttaggattaac

SEQ ID NO: 386699 - DNA, 15 bp, Homo sapiens
agactttaggattaa

SEQ ID NO: 386700 - DNA, 15 bp, Homo sapiens
cagactttaggatta

SEQ ID NO: 386701 - DNA, 15 bp, Homo sapiens
acagactttaggatt

SEQ ID NO: 386702 - DNA, 15 bp, Homo sapiens
cacagactttaggat

SEQ ID NO: 386703 - DNA, 15 bp, Homo sapiens
ccacagactttagga

SEQ ID NO: 386704 - DNA, 15 bp, Homo sapiens
cccacagactttagg

SEQ ID NO: 386705 - DNA, 15 bp, Homo sapiens
tcccacagactttag

SEQ ID NO: 386706 - DNA, 15 bp, Homo sapiens
atcccacagacttta

SEQ ID NO: 386707 - DNA, 15 bp, Homo sapiens
aatcccacagacttt

SEQ ID NO: 386708 - DNA, 15 bp, Homo sapiens
taatcccacagactt

SEQ ID NO: 386709 - DNA, 15 bp, Homo sapiens
ataatcccacagact

SEQ ID NO: 386710 - DNA, 15 bp, Homo sapiens
gataatcccacagac

SEQ ID NO: 386711 - DNA, 15 bp, Homo sapiens
agataatcccacaga

SEQ ID NO: 386712 - DNA, 15 bp, Homo sapiens
cagataatcccacag

SEQ ID NO: 386713 - DNA, 15 bp, Homo sapiens
acagataatcccaca

SEQ ID NO: 386714 - DNA, 15 bp, Homo sapiens
aacagataatcccac

SEQ ID NO: 386715 - DNA, 15 bp, Homo sapiens
taacagataatccca

SEQ ID NO: 386716 - DNA, 15 bp, Homo sapiens
ataacagataatccc

SEQ ID NO: 386717 - DNA, 15 bp, Homo sapiens
tataacagataatcc

SEQ ID NO: 386718 - DNA, 15 bp, Homo sapiens
gtataacagataatc

SEQ ID NO: 386719 - DNA, 15 bp, Homo sapiens
tgtataacagataat

SEQ ID NO: 386720 - DNA, 15 bp, Homo sapiens
ttgtataacagataa

SEQ ID NO: 386721 - DNA, 15 bp, Homo sapiens
attgtataacagata

SEQ ID NO: 386722 - DNA, 15 bp, Homo sapiens
tattgtataacagat

SEQ ID NO: 386723 - DNA, 15 bp, Homo sapiens
ctattgtataacaga

SEQ ID NO: 386724 - DNA, 15 bp, Homo sapiens
gctattgtataacag

SEQ ID NO: 386725 - DNA, 15 bp, Homo sapiens
cgctattgtataaca

SEQ ID NO: 386726 - DNA, 15 bp, Homo sapiens
gcgctattgtataac

SEQ ID NO: 386727 - DNA, 15 bp, Homo sapiens
tgcgctattgtataa

SEQ ID NO: 386728 - DNA, 15 bp, Homo sapiens
atgcgctattgtata

SEQ ID NO: 386729 - DNA, 15 bp, Homo sapiens
gatgcgctattgtat

SEQ ID NO: 386730 - DNA, 15 bp, Homo sapiens
agatgcgctattgta

SEQ ID NO: 386731 - DNA, 15 bp, Homo sapiens
gagatgcgctattgt

SEQ ID NO: 386732 - DNA, 15 bp, Homo sapiens
agagatgcgctattg

SEQ ID NO: 386733 - DNA, 15 bp, Homo sapiens
gagagatgcgctatt

SEQ ID NO: 386734 - DNA, 15 bp, Homo sapiens
agagagatgcgctat

SEQ ID NO: 386735 - DNA, 15 bp, Homo sapiens
aagagagatgcgcta

SEQ ID NO: 386736 - DNA, 15 bp, Homo sapiens
aaagagagatgcgct

SEQ ID NO: 386737 - DNA, 15 bp, Homo sapiens
aaaagagagatgcgc

SEQ ID NO: 386738 - DNA, 15 bp, Homo sapiens
gaaaagagagatgcg

SEQ ID NO: 386739 - DNA, 15 bp, Homo sapiens
ggaaaagagagatgc

SEQ ID NO: 386740 - DNA, 15 bp, Homo sapiens
tggaaaagagagatg

SEQ ID NO: 386741 - DNA, 15 bp, Homo sapiens
atggaaaagagagat

SEQ ID NO: 386742 - DNA, 15 bp, Homo sapiens
catggaaaagagaga

SEQ ID NO: 386743 - DNA, 15 bp, Homo sapiens
acatggaaaagagag

SEQ ID NO: 386744 - DNA, 15 bp, Homo sapiens
aacatggaaaagaga

SEQ ID NO: 386745 - DNA, 15 bp, Homo sapiens
caacatggaaaagag

SEQ ID NO: 386746 - DNA, 15 bp, Homo sapiens
ccaacatggaaaaga

SEQ ID NO: 386747 - DNA, 15 bp, Homo sapiens
cccaacatggaaaag

SEQ ID NO: 386748 - DNA, 15 bp, Homo sapiens
ccccaacatggaaaa

SEQ ID NO: 386749 - DNA, 15 bp, Homo sapiens
accccaacatggaaa

SEQ ID NO: 386750 - DNA, 15 bp, Homo sapiens
gaccccaacatggaa

SEQ ID NO: 386751 - DNA, 15 bp, Homo sapiens
cgaccccaacatgga

SEQ ID NO: 386752 - DNA, 15 bp, Homo sapiens
ccgaccccaacatgg

SEQ ID NO: 386753 - DNA, 15 bp, Homo sapiens
accgaccccaacatg

SEQ ID NO: 386754 - DNA, 15 bp, Homo sapiens
aaccgaccccaacat

SEQ ID NO: 386755 - DNA, 15 bp, Homo sapiens
taaccgaccccaaca

SEQ ID NO: 386756 - DNA, 15 bp, Homo sapiens
gtaaccgaccccaac

SEQ ID NO: 386757 - DNA, 15 bp, Homo sapiens
cgtaaccgaccccaa

SEQ ID NO: 386758 - DNA, 15 bp, Homo sapiens
acgtaaccgacccca

SEQ ID NO: 386759 - DNA, 15 bp, Homo sapiens
cacgtaaccgacccc

SEQ ID NO: 386760 - DNA, 15 bp, Homo sapiens
acacgtaaccgaccc

SEQ ID NO: 386761 - DNA, 15 bp, Homo sapiens
cacacgtaaccgacc

SEQ ID NO: 386762 - DNA, 15 bp, Homo sapiens
gcacacgtaaccgac

SEQ ID NO: 386763 - DNA, 15 bp, Homo sapiens
ggcacacgtaaccga

SEQ ID NO: 386764 - DNA, 15 bp, Homo sapiens
gggcacacgtaaccg

SEQ ID NO: 386765 - DNA, 15 bp, Homo sapiens
agggcacacgtaacc

SEQ ID NO: 386766 - DNA, 15 bp, Homo sapiens
tagggcacacgtaac

SEQ ID NO: 386767 - DNA, 15 bp, Homo sapiens
ttagggcacacgtaa

SEQ ID NO: 386768 - DNA, 15 bp, Homo sapiens
tttagggcacacgta

SEQ ID NO: 386769 - DNA, 15 bp, Homo sapiens
gtttagggcacacgt

SEQ ID NO: 386770 - DNA, 15 bp, Homo sapiens
agtttagggcacacg

SEQ ID NO: 386771 - DNA, 15 bp, Homo sapiens
tagtttagggcacac

SEQ ID NO: 386772 - DNA, 15 bp, Homo sapiens
ttagtttagggcaca

SEQ ID NO: 386773 - DNA, 15 bp, Homo sapiens
cttagtttagggcac

SEQ ID NO: 386774 - DNA, 15 bp, Homo sapiens
acttagtttagggca

SEQ ID NO: 386775 - DNA, 15 bp, Homo sapiens
cacttagtttagggc

SEQ ID NO: 386776 - DNA, 15 bp, Homo sapiens
gcacttagtttaggg

SEQ ID NO: 386777 - DNA, 15 bp, Homo sapiens
agcacttagtttagg

SEQ ID NO: 386778 - DNA, 15 bp, Homo sapiens
gagcacttagtttag

SEQ ID NO: 386779 - DNA, 15 bp, Homo sapiens
tgagcacttagttta

SEQ ID NO: 386780 - DNA, 15 bp, Homo sapiens
ctgagcacttagttt

SEQ ID NO: 386781 - DNA, 15 bp, Homo sapiens
actgagcacttagtt

SEQ ID NO: 386782 - DNA, 15 bp, Homo sapiens
cactgagcacttagt

SEQ ID NO: 386783 - DNA, 15 bp, Homo sapiens
tcactgagcacttag

SEQ ID NO: 386784 - DNA, 15 bp, Homo sapiens
ctcactgagcactta

SEQ ID NO: 386785 - DNA, 15 bp, Homo sapiens
actcactgagcactt

SEQ ID NO: 386786 - DNA, 15 bp, Homo sapiens
aactcactgagcact

SEQ ID NO: 386787 - DNA, 15 bp, Homo sapiens
aaactcactgagcac

SEQ ID NO: 386788 - DNA, 15 bp, Homo sapiens
gaaactcactgagca

SEQ ID NO: 386789 - DNA, 15 bp, Homo sapiens
agaaactcactgagc

SEQ ID NO: 386790 - DNA, 15 bp, Homo sapiens
cagaaactcactgag

SEQ ID NO: 386791 - DNA, 15 bp, Homo sapiens
acagaaactcactga

SEQ ID NO: 386792 - DNA, 15 bp, Homo sapiens
cacagaaactcactg

SEQ ID NO: 386793 - DNA, 15 bp, Homo sapiens
gcacagaaactcact

SEQ ID NO: 386794 - DNA, 15 bp, Homo sapiens
tgcacagaaactcac

SEQ ID NO: 386795 - DNA, 15 bp, Homo sapiens
gtgcacagaaactca

SEQ ID NO: 386796 - DNA, 15 bp, Homo sapiens
agtgcacagaaactc

SEQ ID NO: 386797 - DNA, 15 bp, Homo sapiens
aagtgcacagaaact

SEQ ID NO: 386798 - DNA, 15 bp, Homo sapiens
gaagtgcacagaaac

SEQ ID NO: 386799 - DNA, 15 bp, Homo sapiens
agaagtgcacagaaa

SEQ ID NO: 386800 - DNA, 15 bp, Homo sapiens
aagaagtgcacagaa

SEQ ID NO: 386801 - DNA, 15 bp, Homo sapiens
gaagaagtgcacaga

SEQ ID NO: 386802 - DNA, 15 bp, Homo sapiens
agaagaagtgcacag

SEQ ID NO: 386803 - DNA, 15 bp, Homo sapiens
tagaagaagtgcaca

SEQ ID NO: 386804 - DNA, 15 bp, Homo sapiens
atagaagaagtgcac

SEQ ID NO: 386805 - DNA, 15 bp, Homo sapiens
aatagaagaagtgca

SEQ ID NO: 386806 - DNA, 15 bp, Homo sapiens
caatagaagaagtgc

SEQ ID NO: 386807 - DNA, 15 bp, Homo sapiens
acaatagaagaagtg

SEQ ID NO: 386808 - DNA, 15 bp, Homo sapiens
tacaatagaagaagt

SEQ ID NO: 386809 - DNA, 15 bp, Homo sapiens
atacaatagaagaag

SEQ ID NO: 386810 - DNA, 15 bp, Homo sapiens
aatacaatagaagaa

SEQ ID NO: 386811 - DNA, 15 bp, Homo sapiens
taatacaatagaaga

SEQ ID NO: 386812 - DNA, 15 bp, Homo sapiens
gtaatacaatagaag

SEQ ID NO: 386813 - DNA, 15 bp, Homo sapiens
agtaatacaatagaa

SEQ ID NO: 386814 - DNA, 15 bp, Homo sapiens
aagtaatacaataga

SEQ ID NO: 386815 - DNA, 15 bp, Homo sapiens
taagtaatacaatag

SEQ ID NO: 386816 - DNA, 15 bp, Homo sapiens
ttaagtaatacaata

SEQ ID NO: 386817 - DNA, 15 bp, Homo sapiens
attaagtaatacaat

SEQ ID NO: 386818 - DNA, 15 bp, Homo sapiens
aattaagtaatacaa

SEQ ID NO: 386819 - DNA, 15 bp, Homo sapiens
aaattaagtaataca

SEQ ID NO: 386820 - DNA, 15 bp, Homo sapiens
aaaattaagtaatac

SEQ ID NO: 386821 - DNA, 15 bp, Homo sapiens
aaaaattaagtaata

SEQ ID NO: 386822 - DNA, 15 bp, Homo sapiens
aaaaaattaagtaat

SEQ ID NO: 386823 - DNA, 15 bp, Homo sapiens
gaaaaaattaagtaa

SEQ ID NO: 386824 - DNA, 15 bp, Homo sapiens
ggaaaaaattaagta

SEQ ID NO: 386825 - DNA, 15 bp, Homo sapiens
gggaaaaaattaagt

SEQ ID NO: 386826 - DNA, 15 bp, Homo sapiens
tgggaaaaaattaag

SEQ ID NO: 386827 - DNA, 15 bp, Homo sapiens
ttgggaaaaaattaa

SEQ ID NO: 386828 - DNA, 15 bp, Homo sapiens
cttgggaaaaaatta

SEQ ID NO: 386829 - DNA, 15 bp, Homo sapiens
ccttgggaaaaaatt

SEQ ID NO: 386830 - DNA, 15 bp, Homo sapiens
tccttgggaaaaaat

SEQ ID NO: 386831 - DNA, 15 bp, Homo sapiens
gtccttgggaaaaaa

SEQ ID NO: 386832 - DNA, 15 bp, Homo sapiens
ggtccttgggaaaaa

SEQ ID NO: 386833 - DNA, 15 bp, Homo sapiens
gggtccttgggaaaa

SEQ ID NO: 386834 - DNA, 15 bp, Homo sapiens
tgggtccttgggaaa

SEQ ID NO: 386835 - DNA, 15 bp, Homo sapiens
ctgggtccttgggaa

SEQ ID NO: 386836 - DNA, 15 bp, Homo sapiens
actgggtccttggga

SEQ ID NO: 386837 - DNA, 15 bp, Homo sapiens
tactgggtccttggg

SEQ ID NO: 386838 - DNA, 15 bp, Homo sapiens
ttactgggtccttgg

SEQ ID NO: 386839 - DNA, 15 bp, Homo sapiens
attactgggtccttg

SEQ ID NO: 386840 - DNA, 15 bp, Homo sapiens
tattactgggtcctt

SEQ ID NO: 386841 - DNA, 15 bp, Homo sapiens
ctattactgggtcct

SEQ ID NO: 386842 - DNA, 15 bp, Homo sapiens
tctattactgggtcc

SEQ ID NO: 386843 - DNA, 15 bp, Homo sapiens
atctattactgggtc

SEQ ID NO: 386844 - DNA, 15 bp, Homo sapiens
catctattactgggt

SEQ ID NO: 386845 - DNA, 15 bp, Homo sapiens
ccatctattactggg

SEQ ID NO: 386846 - DNA, 15 bp, Homo sapiens
gccatctattactgg

SEQ ID NO: 386847 - DNA, 15 bp, Homo sapiens
tgccatctattactg

SEQ ID NO: 386848 - DNA, 15 bp, Homo sapiens
ctgccatctattact

SEQ ID NO: 386849 - DNA, 15 bp, Homo sapiens
cctgccatctattac

SEQ ID NO: 386850 - DNA, 15 bp, Homo sapiens
ccctgccatctatta

SEQ ID NO: 386851 - DNA, 15 bp, Homo sapiens
cccctgccatctatt

SEQ ID NO: 386852 - DNA, 15 bp, Homo sapiens
ccccctgccatctat

SEQ ID NO: 386853 - DNA, 15 bp, Homo sapiens
accccctgccatcta

SEQ ID NO: 386854 - DNA, 15 bp, Homo sapiens
caccccctgccatct

SEQ ID NO: 386855 - DNA, 15 bp, Homo sapiens
ccaccccctgccatc

SEQ ID NO: 386856 - DNA, 15 bp, Homo sapiens
cccaccccctgccat

SEQ ID NO: 386857 - DNA, 15 bp, Homo sapiens
ccccaccccctgcca

SEQ ID NO: 386858 - DNA, 15 bp, Homo sapiens
accccaccccctgcc

SEQ ID NO: 386859 - DNA, 15 bp, Homo sapiens
taccccaccccctgc

SEQ ID NO: 386860 - DNA, 15 bp, Homo sapiens
ctaccccaccccctg

SEQ ID NO: 386861 - DNA, 15 bp, Homo sapiens
tctaccccaccccct

SEQ ID NO: 386862 - DNA, 15 bp, Homo sapiens
atctaccccaccccc

SEQ ID NO: 386863 - DNA, 15 bp, Homo sapiens
catctaccccacccc

SEQ ID NO: 386864 - DNA, 15 bp, Homo sapiens
tcatctaccccaccc

SEQ ID NO: 386865 - DNA, 15 bp, Homo sapiens
ctcatctaccccacc

SEQ ID NO: 386866 - DNA, 15 bp, Homo sapiens
cctcatctaccccac

SEQ ID NO: 386867 - DNA, 15 bp, Homo sapiens
tcctcatctacccca

SEQ ID NO: 386868 - DNA, 15 bp, Homo sapiens
ctcctcatctacccc

SEQ ID NO: 386869 - DNA, 15 bp, Homo sapiens
tctcctcatctaccc

SEQ ID NO: 386870 - DNA, 15 bp, Homo sapiens
atctcctcatctacc

SEQ ID NO: 386871 - DNA, 15 bp, Homo sapiens
catctcctcatctac

SEQ ID NO: 386872 - DNA, 15 bp, Homo sapiens
tcatctcctcatcta

SEQ ID NO: 386873 - DNA, 15 bp, Homo sapiens
gtcatctcctcatct

SEQ ID NO: 386874 - DNA, 15 bp, Homo sapiens
agtcatctcctcatc

SEQ ID NO: 386875 - DNA, 15 bp, Homo sapiens
gagtcatctcctcat

SEQ ID NO: 386876 - DNA, 15 bp, Homo sapiens
agagtcatctcctca

SEQ ID NO: 386877 - DNA, 15 bp, Homo sapiens
tagagtcatctcctc

SEQ ID NO: 386878 - DNA, 15 bp, Homo sapiens
atagagtcatctcct

SEQ ID NO: 386879 - DNA, 15 bp, Homo sapiens
gatagagtcatctcc

SEQ ID NO: 386880 - DNA, 15 bp, Homo sapiens
tgatagagtcatctc

SEQ ID NO: 386881 - DNA, 15 bp, Homo sapiens
gtgatagagtcatct

SEQ ID NO: 386882 - DNA, 15 bp, Homo sapiens
agtgatagagtcatc

SEQ ID NO: 386883 - DNA, 15 bp, Homo sapiens
aagtgatagagtcat

SEQ ID NO: 386884 - DNA, 15 bp, Homo sapiens
taagtgatagagtca

SEQ ID NO: 386885 - DNA, 15 bp, Homo sapiens
ttaagtgatagagtc

SEQ ID NO: 386886 - DNA, 15 bp, Homo sapiens
attaagtgatagagt

SEQ ID NO: 386887 - DNA, 15 bp, Homo sapiens
cattaagtgatagag

SEQ ID NO: 386888 - DNA, 15 bp, Homo sapiens
acattaagtgataga

SEQ ID NO: 386889 - DNA, 15 bp, Homo sapiens
gacattaagtgatag

SEQ ID NO: 386890 - DNA, 15 bp, Homo sapiens
agacattaagtgata

SEQ ID NO: 386891 - DNA, 15 bp, Homo sapiens
cagacattaagtgat

SEQ ID NO: 386892 - DNA, 15 bp, Homo sapiens
acagacattaagtga

SEQ ID NO: 386893 - DNA, 15 bp, Homo sapiens
tacagacattaagtg

SEQ ID NO: 386894 - DNA, 15 bp, Homo sapiens
atacagacattaagt

SEQ ID NO: 386895 - DNA, 15 bp, Homo sapiens
catacagacattaag

SEQ ID NO: 386896 - DNA, 15 bp, Homo sapiens
tcatacagacattaa

SEQ ID NO: 386897 - DNA, 15 bp, Homo sapiens
gtcatacagacatta

SEQ ID NO: 386898 - DNA, 15 bp, Homo sapiens
agtcatacagacatt

SEQ ID NO: 386899 - DNA, 15 bp, Homo sapiens
aagtcatacagacat

SEQ ID NO: 386900 - DNA, 15 bp, Homo sapiens
taagtcatacagaca

SEQ ID NO: 386901 - DNA, 15 bp, Homo sapiens
ctaagtcatacagac

SEQ ID NO: 386902 - DNA, 15 bp, Homo sapiens
cctaagtcatacaga

SEQ ID NO: 386903 - DNA, 15 bp, Homo sapiens
tcctaagtcatacag

SEQ ID NO: 386904 - DNA, 15 bp, Homo sapiens
atcctaagtcataca

SEQ ID NO: 386905 - DNA, 15 bp, Homo sapiens
tatcctaagtcatac

SEQ ID NO: 386906 - DNA, 15 bp, Homo sapiens
gtatcctaagtcata

SEQ ID NO: 386907 - DNA, 15 bp, Homo sapiens
tgtatcctaagtcat

SEQ ID NO: 386908 - DNA, 15 bp, Homo sapiens
atgtatcctaagtca

SEQ ID NO: 386909 - DNA, 15 bp, Homo sapiens
aatgtatcctaagtc

SEQ ID NO: 386910 - DNA, 15 bp, Homo sapiens
taatgtatcctaagt

SEQ ID NO: 386911 - DNA, 15 bp, Homo sapiens
ataatgtatcctaag

SEQ ID NO: 386912 - DNA, 15 bp, Homo sapiens
aataatgtatcctaa

SEQ ID NO: 386913 - DNA, 15 bp, Homo sapiens
aaataatgtatccta

SEQ ID NO: 386914 - DNA, 15 bp, Homo sapiens
taaataatgtatcct

SEQ ID NO: 386915 - DNA, 15 bp, Homo sapiens
ttaaataatgtatcc

SEQ ID NO: 386916 - DNA, 15 bp, Homo sapiens
attaaataatgtatc

SEQ ID NO: 386917 - DNA, 15 bp, Homo sapiens
tattaaataatgtat

SEQ ID NO: 386918 - DNA, 15 bp, Homo sapiens
gtattaaataatgta

SEQ ID NO: 386919 - DNA, 15 bp, Homo sapiens
cgtattaaataatgt

SEQ ID NO: 386920 - DNA, 15 bp, Homo sapiens
acgtattaaataatg

SEQ ID NO: 386921 - DNA, 15 bp, Homo sapiens
cacgtattaaataat

SEQ ID NO: 386922 - DNA, 15 bp, Homo sapiens
tcacgtattaaataa

SEQ ID NO: 386923 - DNA, 15 bp, Homo sapiens
ctcacgtattaaata

SEQ ID NO: 386924 - DNA, 15 bp, Homo sapiens
cctcacgtattaaat

SEQ ID NO: 386925 - DNA, 15 bp, Homo sapiens
ccctcacgtattaaa

SEQ ID NO: 386926 - DNA, 15 bp, Homo sapiens
accctcacgtattaa

SEQ ID NO: 386927 - DNA, 15 bp, Homo sapiens
gaccctcacgtatta

SEQ ID NO: 386928 - DNA, 15 bp, Homo sapiens
tgaccctcacgtatt

SEQ ID NO: 386929 - DNA, 15 bp, Homo sapiens
ctgaccctcacgtat

SEQ ID NO: 386930 - DNA, 15 bp, Homo sapiens
actgaccctcacgta

SEQ ID NO: 386931 - DNA, 15 bp, Homo sapiens
aactgaccctcacgt

SEQ ID NO: 386932 - DNA, 15 bp, Homo sapiens
aaactgaccctcacg

SEQ ID NO: 386933 - DNA, 15 bp, Homo sapiens
aaaactgaccctcac

SEQ ID NO: 386934 - DNA, 15 bp, Homo sapiens
gaaaactgaccctca

SEQ ID NO: 386935 - DNA, 15 bp, Homo sapiens
agaaaactgaccctc

SEQ ID NO: 386936 - DNA, 15 bp, Homo sapiens
gagaaaactgaccct

SEQ ID NO: 386937 - DNA, 15 bp, Homo sapiens
tgagaaaactgaccc

SEQ ID NO: 386938 - DNA, 15 bp, Homo sapiens
atgagaaaactgacc

SEQ ID NO: 386939 - DNA, 15 bp, Homo sapiens
aatgagaaaactgac

SEQ ID NO: 386940 - DNA, 15 bp, Homo sapiens
aaatgagaaaactga

SEQ ID NO: 386941 - DNA, 15 bp, Homo sapiens
caaatgagaaaactg

SEQ ID NO: 386942 - DNA, 15 bp, Homo sapiens
acaaatgagaaaact

SEQ ID NO: 386943 - DNA, 15 bp, Homo sapiens
tacaaatgagaaaac

SEQ ID NO: 386944 - DNA, 15 bp, Homo sapiens
gtacaaatgagaaaa

SEQ ID NO: 386945 - DNA, 15 bp, Homo sapiens
tgtacaaatgagaaa

SEQ ID NO: 386946 - DNA, 15 bp, Homo sapiens
ctgtacaaatgagaa

SEQ ID NO: 386947 - DNA, 15 bp, Homo sapiens
actgtacaaatgaga

SEQ ID NO: 386948 - DNA, 15 bp, Homo sapiens
cactgtacaaatgag

SEQ ID NO: 386949 - DNA, 15 bp, Homo sapiens
ccactgtacaaatga

SEQ ID NO: 386950 - DNA, 15 bp, Homo sapiens
cccactgtacaaatg

SEQ ID NO: 386951 - DNA, 15 bp, Homo sapiens
ccccactgtacaaat

SEQ ID NO: 386952 - DNA, 15 bp, Homo sapiens
tccccactgtacaaa

SEQ ID NO: 386953 - DNA, 15 bp, Homo sapiens
atccccactgtacaa

SEQ ID NO: 386954 - DNA, 15 bp, Homo sapiens
aatccccactgtaca

SEQ ID NO: 386955 - DNA, 15 bp, Homo sapiens
aaatccccactgtac

SEQ ID NO: 386956 - DNA, 15 bp, Homo sapiens
aaaatccccactgta

SEQ ID NO: 386957 - DNA, 15 bp, Homo sapiens
taaaatccccactgt

SEQ ID NO: 386958 - DNA, 15 bp, Homo sapiens
ttaaaatccccactg

SEQ ID NO: 386959 - DNA, 15 bp, Homo sapiens
attaaaatccccact

SEQ ID NO: 386960 - DNA, 15 bp, Homo sapiens
tattaaaatccccac

SEQ ID NO: 386961 - DNA, 15 bp, Homo sapiens
ttattaaaatcccca

SEQ ID NO: 386962 - DNA, 15 bp, Homo sapiens
gttattaaaatcccc

SEQ ID NO: 386963 - DNA, 15 bp, Homo sapiens
agttattaaaatccc

SEQ ID NO: 386964 - DNA, 15 bp, Homo sapiens
aagttattaaaatcc

SEQ ID NO: 386965 - DNA, 15 bp, Homo sapiens
aaagttattaaaatc

SEQ ID NO: 386966 - DNA, 15 bp, Homo sapiens
gaaagttattaaaat

SEQ ID NO: 386967 - DNA, 15 bp, Homo sapiens
agaaagttattaaaa

SEQ ID NO: 386968 - DNA, 15 bp, Homo sapiens
aagaaagttattaaa

SEQ ID NO: 386969 - DNA, 15 bp, Homo sapiens
taagaaagttattaa

SEQ ID NO: 386970 - DNA, 15 bp, Homo sapiens
gtaagaaagttatta

SEQ ID NO: 386971 - DNA, 15 bp, Homo sapiens
ggtaagaaagttatt

SEQ ID NO: 386972 - DNA, 15 bp, Homo sapiens
gggtaagaaagttat

SEQ ID NO: 386973 - DNA, 15 bp, Homo sapiens
agggtaagaaagtta

SEQ ID NO: 386974 - DNA, 15 bp, Homo sapiens
cagggtaagaaagtt

SEQ ID NO: 386975 - DNA, 15 bp, Homo sapiens
acagggtaagaaagt

SEQ ID NO: 386976 - DNA, 15 bp, Homo sapiens
aacagggtaagaaag

SEQ ID NO: 386977 - DNA, 15 bp, Homo sapiens
gaacagggtaagaaa

SEQ ID NO: 386978 - DNA, 15 bp, Homo sapiens
ggaacagggtaagaa

SEQ ID NO: 386979 - DNA, 15 bp, Homo sapiens
aggaacagggtaaga

SEQ ID NO: 386980 - DNA, 15 bp, Homo sapiens
caggaacagggtaag

SEQ ID NO: 386981 - DNA, 15 bp, Homo sapiens
acaggaacagggtaa

SEQ ID NO: 386982 - DNA, 15 bp, Homo sapiens
cacaggaacagggta

SEQ ID NO: 386983 - DNA, 15 bp, Homo sapiens
tcacaggaacagggt

SEQ ID NO: 386984 - DNA, 15 bp, Homo sapiens
ctcacaggaacaggg

SEQ ID NO: 386985 - DNA, 15 bp, Homo sapiens
cctcacaggaacagg

SEQ ID NO: 386986 - DNA, 15 bp, Homo sapiens
ccctcacaggaacag

SEQ ID NO: 386987 - DNA, 15 bp, Homo sapiens
accctcacaggaaca

SEQ ID NO: 386988 - DNA, 15 bp, Homo sapiens
aaccctcacaggaac

SEQ ID NO: 386989 - DNA, 15 bp, Homo sapiens
taaccctcacaggaa

SEQ ID NO: 386990 - DNA, 15 bp, Homo sapiens
ttaaccctcacagga

SEQ ID NO: 386991 - DNA, 15 bp, Homo sapiens
tttaaccctcacagg

SEQ ID NO: 386992 - DNA, 15 bp, Homo sapiens
atttaaccctcacag

SEQ ID NO: 386993 - DNA, 15 bp, Homo sapiens
catttaaccctcaca

SEQ ID NO: 386994 - DNA, 15 bp, Homo sapiens
tcatttaaccctcac

SEQ ID NO: 386995 - DNA, 15 bp, Homo sapiens
ctcatttaaccctca

SEQ ID NO: 386996 - DNA, 15 bp, Homo sapiens
tctcatttaaccctc

SEQ ID NO: 386997 - DNA, 15 bp, Homo sapiens
atctcatttaaccct

SEQ ID NO: 386998 - DNA, 15 bp, Homo sapiens
tatctcatttaaccc

SEQ ID NO: 386999 - DNA, 15 bp, Homo sapiens
gtatctcatttaacc

SEQ ID NO: 387000 - DNA, 15 bp, Homo sapiens
tgtatctcatttaac

SEQ ID NO: 387001 - DNA, 15 bp, Homo sapiens
ttgtatctcatttaa

SEQ ID NO: 387002 - DNA, 15 bp, Homo sapiens
gttgtatctcattta

SEQ ID NO: 387003 - DNA, 15 bp, Homo sapiens
tgttgtatctcattt

SEQ ID NO: 387004 - DNA, 15 bp, Homo sapiens
atgttgtatctcatt

SEQ ID NO: 387005 - DNA, 15 bp, Homo sapiens
tatgttgtatctcat

SEQ ID NO: 387006 - DNA, 15 bp, Homo sapiens
atatgttgtatctca

SEQ ID NO: 387007 - DNA, 15 bp, Homo sapiens
catatgttgtatctc

SEQ ID NO: 387008 - DNA, 15 bp, Homo sapiens
acatatgttgtatct

SEQ ID NO: 387009 - DNA, 15 bp, Homo sapiens
tacatatgttgtatc

SEQ ID NO: 387010 - DNA, 15 bp, Homo sapiens
ttacatatgttgtat

SEQ ID NO: 387011 - DNA, 15 bp, Homo sapiens
tttacatatgttgta

SEQ ID NO: 387012 - DNA, 15 bp, Homo sapiens
atttacatatgttgt

SEQ ID NO: 387013 - DNA, 15 bp, Homo sapiens
tatttacatatgttg

SEQ ID NO: 387014 - DNA, 15 bp, Homo sapiens
atatttacatatgtt

SEQ ID NO: 387015 - DNA, 15 bp, Homo sapiens
catatttacatatgt

SEQ ID NO: 387016 - DNA, 15 bp, Homo sapiens
gcatatttacatatg

SEQ ID NO: 387017 - DNA, 15 bp, Homo sapiens
ggcatatttacatat

SEQ ID NO: 387018 - DNA, 15 bp, Homo sapiens
gggcatatttacata

SEQ ID NO: 387019 - DNA, 15 bp, Homo sapiens
tgggcatatttacat

SEQ ID NO: 387020 - DNA, 15 bp, Homo sapiens
ttgggcatatttaca

SEQ ID NO: 387021 - DNA, 15 bp, Homo sapiens
gttgggcatatttac

SEQ ID NO: 387022 - DNA, 15 bp, Homo sapiens
tgttgggcatattta

SEQ ID NO: 387023 - DNA, 15 bp, Homo sapiens
gtgttgggcatattt

SEQ ID NO: 387024 - DNA, 15 bp, Homo sapiens
tgtgttgggcatatt

SEQ ID NO: 387025 - DNA, 15 bp, Homo sapiens
atgtgttgggcatat

SEQ ID NO: 387026 - DNA, 15 bp, Homo sapiens
catgtgttgggcata

SEQ ID NO: 387027 - DNA, 15 bp, Homo sapiens
acatgtgttgggcat

SEQ ID NO: 387028 - DNA, 15 bp, Homo sapiens
cacatgtgttgggca

SEQ ID NO: 387029 - DNA, 15 bp, Homo sapiens
gcacatgtgttgggc

SEQ ID NO: 387030 - DNA, 15 bp, Homo sapiens
tgcacatgtgttggg

SEQ ID NO: 387031 - DNA, 15 bp, Homo sapiens
ctgcacatgtgttgg

SEQ ID NO: 387032 - DNA, 15 bp, Homo sapiens
tctgcacatgtgttg

SEQ ID NO: 387033 - DNA, 15 bp, Homo sapiens
ctctgcacatgtgtt

SEQ ID NO: 387034 - DNA, 15 bp, Homo sapiens
actctgcacatgtgt

SEQ ID NO: 387035 - DNA, 15 bp, Homo sapiens
gactctgcacatgtg

SEQ ID NO: 387036 - DNA, 15 bp, Homo sapiens
tgactctgcacatgt

SEQ ID NO: 387037 - DNA, 15 bp, Homo sapiens
ctgactctgcacatg

SEQ ID NO: 387038 - DNA, 15 bp, Homo sapiens
actgactctgcacat

SEQ ID NO: 387039 - DNA, 15 bp, Homo sapiens
cactgactctgcaca

SEQ ID NO: 387040 - DNA, 15 bp, Homo sapiens
gcactgactctgcac

SEQ ID NO: 387041 - DNA, 15 bp, Homo sapiens
agcactgactctgca

SEQ ID NO: 387042 - DNA, 15 bp, Homo sapiens
gagcactgactctgc

SEQ ID NO: 387043 - DNA, 15 bp, Homo sapiens
tgagcactgactctg

SEQ ID NO: 387044 - DNA, 15 bp, Homo sapiens
ttgagcactgactct

SEQ ID NO: 387045 - DNA, 15 bp, Homo sapiens
attgagcactgactc

SEQ ID NO: 387046 - DNA, 15 bp, Homo sapiens
tattgagcactgact

SEQ ID NO: 387047 - DNA, 15 bp, Homo sapiens
atattgagcactgac

SEQ ID NO: 387048 - DNA, 15 bp, Homo sapiens
tatattgagcactga

SEQ ID NO: 387049 - DNA, 15 bp, Homo sapiens
ctatattgagcactg

SEQ ID NO: 387050 - DNA, 15 bp, Homo sapiens
cctatattgagcact

SEQ ID NO: 387051 - DNA, 15 bp, Homo sapiens
gcctatattgagcac

SEQ ID NO: 387052 - DNA, 15 bp, Homo sapiens
tgcctatattgagca

SEQ ID NO: 387053 - DNA, 15 bp, Homo sapiens
atgcctatattgagc

SEQ ID NO: 387054 - DNA, 15 bp, Homo sapiens
aatgcctatattgag

SEQ ID NO: 387055 - DNA, 15 bp, Homo sapiens
aaatgcctatattga

SEQ ID NO: 387056 - DNA, 15 bp, Homo sapiens
caaatgcctatattg

SEQ ID NO: 387057 - DNA, 15 bp, Homo sapiens
gcaaatgcctatatt

SEQ ID NO: 387058 - DNA, 15 bp, Homo sapiens
agcaaatgcctatat

SEQ ID NO: 387059 - DNA, 15 bp, Homo sapiens
aagcaaatgcctata

SEQ ID NO: 387060 - DNA, 15 bp, Homo sapiens
aaagcaaatgcctat

SEQ ID NO: 387061 - DNA, 15 bp, Homo sapiens
gaaagcaaatgccta

SEQ ID NO: 387062 - DNA, 15 bp, Homo sapiens
ggaaagcaaatgcct

SEQ ID NO: 387063 - DNA, 15 bp, Homo sapiens
aggaaagcaaatgcc

SEQ ID NO: 387064 - DNA, 15 bp, Homo sapiens
gaggaaagcaaatgc

SEQ ID NO: 387065 - DNA, 15 bp, Homo sapiens
agaggaaagcaaatg

SEQ ID NO: 387066 - DNA, 15 bp, Homo sapiens
tagaggaaagcaaat

SEQ ID NO: 387067 - DNA, 15 bp, Homo sapiens
gtagaggaaagcaaa

SEQ ID NO: 387068 - DNA, 15 bp, Homo sapiens
agtagaggaaagcaa

SEQ ID NO: 387069 - DNA, 15 bp, Homo sapiens
tagtagaggaaagca

SEQ ID NO: 387070 - DNA, 15 bp, Homo sapiens
atagtagaggaaagc

SEQ ID NO: 387071 - DNA, 15 bp, Homo sapiens
catagtagaggaaag

SEQ ID NO: 387072 - DNA, 15 bp, Homo sapiens
ccatagtagaggaaa

SEQ ID NO: 387073 - DNA, 15 bp, Homo sapiens
cccatagtagaggaa

SEQ ID NO: 387074 - DNA, 15 bp, Homo sapiens
acccatagtagagga

SEQ ID NO: 387075 - DNA, 15 bp, Homo sapiens
aacccatagtagagg

SEQ ID NO: 387076 - DNA, 15 bp, Homo sapiens
aaacccatagtagag

SEQ ID NO: 387077 - DNA, 15 bp, Homo sapiens
taaacccatagtaga

SEQ ID NO: 387078 - DNA, 15 bp, Homo sapiens
ttaaacccatagtag

SEQ ID NO: 387079 - DNA, 15 bp, Homo sapiens
cttaaacccatagta

SEQ ID NO: 387080 - DNA, 15 bp, Homo sapiens
tcttaaacccatagt

SEQ ID NO: 387081 - DNA, 15 bp, Homo sapiens
atcttaaacccatag

SEQ ID NO: 387082 - DNA, 15 bp, Homo sapiens
aatcttaaacccata

SEQ ID NO: 387083 - DNA, 15 bp, Homo sapiens
gaatcttaaacccat

SEQ ID NO: 387084 - DNA, 15 bp, Homo sapiens
tgaatcttaaaccca

SEQ ID NO: 387085 - DNA, 15 bp, Homo sapiens
atgaatcttaaaccc

SEQ ID NO: 387086 - DNA, 15 bp, Homo sapiens
catgaatcttaaacc

SEQ ID NO: 387087 - DNA, 15 bp, Homo sapiens
gcatgaatcttaaac

SEQ ID NO: 387088 - DNA, 15 bp, Homo sapiens
tgcatgaatcttaaa

SEQ ID NO: 387089 - DNA, 15 bp, Homo sapiens
ttgcatgaatcttaa

SEQ ID NO: 387090 - DNA, 15 bp, Homo sapiens
cttgcatgaatctta

SEQ ID NO: 387091 - DNA, 15 bp, Homo sapiens
ccttgcatgaatctt

SEQ ID NO: 387092 - DNA, 15 bp, Homo sapiens
tccttgcatgaatct

SEQ ID NO: 387093 - DNA, 15 bp, Homo sapiens
atccttgcatgaatc

SEQ ID NO: 387094 - DNA, 15 bp, Homo sapiens
catccttgcatgaat

SEQ ID NO: 387095 - DNA, 15 bp, Homo sapiens
acatccttgcatgaa

SEQ ID NO: 387096 - DNA, 15 bp, Homo sapiens
aacatccttgcatga

SEQ ID NO: 387097 - DNA, 15 bp, Homo sapiens
taacatccttgcatg

SEQ ID NO: 387098 - DNA, 15 bp, Homo sapiens
ttaacatccttgcat

SEQ ID NO: 387099 - DNA, 15 bp, Homo sapiens
tttaacatccttgca

SEQ ID NO: 387100 - DNA, 15 bp, Homo sapiens
ttttaacatccttgc

SEQ ID NO: 387101 - DNA, 15 bp, Homo sapiens
gttttaacatccttg

SEQ ID NO: 387102 - DNA, 15 bp, Homo sapiens
tgttttaacatcctt

SEQ ID NO: 387103 - DNA, 15 bp, Homo sapiens
ctgttttaacatcct

SEQ ID NO: 387104 - DNA, 15 bp, Homo sapiens
gctgttttaacatcc

SEQ ID NO: 387105 - DNA, 15 bp, Homo sapiens
agctgttttaacatc

SEQ ID NO: 387106 - DNA, 15 bp, Homo sapiens
gagctgttttaacat

SEQ ID NO: 387107 - DNA, 15 bp, Homo sapiens
tgagctgttttaaca

SEQ ID NO: 387108 - DNA, 15 bp, Homo sapiens
ttgagctgttttaac

SEQ ID NO: 387109 - DNA, 15 bp, Homo sapiens
attgagctgttttaa

SEQ ID NO: 387110 - DNA, 15 bp, Homo sapiens
gattgagctgtttta

SEQ ID NO: 387111 - DNA, 15 bp, Homo sapiens
agattgagctgtttt

SEQ ID NO: 387112 - DNA, 15 bp, Homo sapiens
cagattgagctgttt

SEQ ID NO: 387113 - DNA, 15 bp, Homo sapiens
ccagattgagctgtt

SEQ ID NO: 387114 - DNA, 15 bp, Homo sapiens
tccagattgagctgt

SEQ ID NO: 387115 - DNA, 15 bp, Homo sapiens
gtccagattgagctg

SEQ ID NO: 387116 - DNA, 15 bp, Homo sapiens
agtccagattgagct

SEQ ID NO: 387117 - DNA, 15 bp, Homo sapiens
cagtccagattgagc

SEQ ID NO: 387118 - DNA, 15 bp, Homo sapiens
acagtccagattgag

SEQ ID NO: 387119 - DNA, 15 bp, Homo sapiens
aacagtccagattga

SEQ ID NO: 387120 - DNA, 15 bp, Homo sapiens
gaacagtccagattg

SEQ ID NO: 387121 - DNA, 15 bp, Homo sapiens
agaacagtccagatt

SEQ ID NO: 387122 - DNA, 15 bp, Homo sapiens
gagaacagtccagat

SEQ ID NO: 387123 - DNA, 15 bp, Homo sapiens
tgagaacagtccaga

SEQ ID NO: 387124 - DNA, 15 bp, Homo sapiens
atgagaacagtccag

SEQ ID NO: 387125 - DNA, 15 bp, Homo sapiens
catgagaacagtcca

SEQ ID NO: 387126 - DNA, 15 bp, Homo sapiens
tcatgagaacagtcc

SEQ ID NO: 387127 - DNA, 15 bp, Homo sapiens
gtcatgagaacagtc

SEQ ID NO: 387128 - DNA, 15 bp, Homo sapiens
ggtcatgagaacagt

SEQ ID NO: 387129 - DNA, 15 bp, Homo sapiens
tggtcatgagaacag

SEQ ID NO: 387130 - DNA, 15 bp, Homo sapiens
atggtcatgagaaca

SEQ ID NO: 387131 - DNA, 15 bp, Homo sapiens
aatggtcatgagaac

SEQ ID NO: 387132 - DNA, 15 bp, Homo sapiens
gaatggtcatgagaa

SEQ ID NO: 387133 - DNA, 15 bp, Homo sapiens
tgaatggtcatgaga

SEQ ID NO: 387134 - DNA, 15 bp, Homo sapiens
ctgaatggtcatgag

SEQ ID NO: 387135 - DNA, 15 bp, Homo sapiens
tctgaatggtcatga

SEQ ID NO: 387136 - DNA, 15 bp, Homo sapiens
gtctgaatggtcatg

SEQ ID NO: 387137 - DNA, 15 bp, Homo sapiens
agtctgaatggtcat

SEQ ID NO: 387138 - DNA, 15 bp, Homo sapiens
aagtctgaatggtca

SEQ ID NO: 387139 - DNA, 15 bp, Homo sapiens
taagtctgaatggtc

SEQ ID NO: 387140 - DNA, 15 bp, Homo sapiens
ttaagtctgaatggt

SEQ ID NO: 387141 - DNA, 15 bp, Homo sapiens
attaagtctgaatgg

SEQ ID NO: 387142 - DNA, 15 bp, Homo sapiens
tattaagtctgaatg

SEQ ID NO: 387143 - DNA, 15 bp, Homo sapiens
atattaagtctgaat

SEQ ID NO: 387144 - DNA, 15 bp, Homo sapiens
aatattaagtctgaa

SEQ ID NO: 387145 - DNA, 15 bp, Homo sapiens
aaatattaagtctga

SEQ ID NO: 387146 - DNA, 15 bp, Homo sapiens
taaatattaagtctg

SEQ ID NO: 387147 - DNA, 15 bp, Homo sapiens
gtaaatattaagtct

SEQ ID NO: 387148 - DNA, 15 bp, Homo sapiens
ggtaaatattaagtc

SEQ ID NO: 387149 - DNA, 15 bp, Homo sapiens
gggtaaatattaagt

SEQ ID NO: 387150 - DNA, 15 bp, Homo sapiens
agggtaaatattaag

SEQ ID NO: 387151 - DNA, 15 bp, Homo sapiens
tagggtaaatattaa

SEQ ID NO: 387152 - DNA, 15 bp, Homo sapiens
ttagggtaaatatta

SEQ ID NO: 387153 - DNA, 15 bp, Homo sapiens
tttagggtaaatatt

SEQ ID NO: 387154 - DNA, 15 bp, Homo sapiens
ttttagggtaaatat

SEQ ID NO: 387155 - DNA, 15 bp, Homo sapiens
gttttagggtaaata

SEQ ID NO: 387156 - DNA, 15 bp, Homo sapiens
agttttagggtaaat

SEQ ID NO: 387157 - DNA, 15 bp, Homo sapiens
cagttttagggtaaa

SEQ ID NO: 387158 - DNA, 15 bp, Homo sapiens
ccagttttagggtaa

SEQ ID NO: 387159 - DNA, 15 bp, Homo sapiens
gccagttttagggta

SEQ ID NO: 387160 - DNA, 15 bp, Homo sapiens
tgccagttttagggt

SEQ ID NO: 387161 - DNA, 15 bp, Homo sapiens
atgccagttttaggg

SEQ ID NO: 387162 - DNA, 15 bp, Homo sapiens
aatgccagttttagg

SEQ ID NO: 387163 - DNA, 15 bp, Homo sapiens
taatgccagttttag

SEQ ID NO: 387164 - DNA, 15 bp, Homo sapiens
gtaatgccagtttta

SEQ ID NO: 387165 - DNA, 15 bp, Homo sapiens
ggtaatgccagtttt

SEQ ID NO: 387166 - DNA, 15 bp, Homo sapiens
gggtaatgccagttt

SEQ ID NO: 387167 - DNA, 15 bp, Homo sapiens
agggtaatgccagtt

SEQ ID NO: 387168 - DNA, 15 bp, Homo sapiens
aagggtaatgccagt

SEQ ID NO: 387169 - DNA, 15 bp, Homo sapiens
caagggtaatgccag

SEQ ID NO: 387170 - DNA, 15 bp, Homo sapiens
tcaagggtaatgcca

SEQ ID NO: 387171 - DNA, 15 bp, Homo sapiens
atcaagggtaatgcc

SEQ ID NO: 387172 - DNA, 15 bp, Homo sapiens
aatcaagggtaatgc

SEQ ID NO: 387173 - DNA, 15 bp, Homo sapiens
aaatcaagggtaatg

SEQ ID NO: 387174 - DNA, 15 bp, Homo sapiens
taaatcaagggtaat

SEQ ID NO: 387175 - DNA, 15 bp, Homo sapiens
ctaaatcaagggtaa

SEQ ID NO: 387176 - DNA, 15 bp, Homo sapiens
actaaatcaagggta

SEQ ID NO: 387177 - DNA, 15 bp, Homo sapiens
gactaaatcaagggt

SEQ ID NO: 387178 - DNA, 15 bp, Homo sapiens
tgactaaatcaaggg

SEQ ID NO: 387179 - DNA, 15 bp, Homo sapiens
atgactaaatcaagg

SEQ ID NO: 387180 - DNA, 15 bp, Homo sapiens
catgactaaatcaag

SEQ ID NO: 387181 - DNA, 15 bp, Homo sapiens
tcatgactaaatcaa

SEQ ID NO: 387182 - DNA, 15 bp, Homo sapiens
gtcatgactaaatca

SEQ ID NO: 387183 - DNA, 15 bp, Homo sapiens
cgtcatgactaaatc

SEQ ID NO: 387184 - DNA, 15 bp, Homo sapiens
acgtcatgactaaat

SEQ ID NO: 387185 - DNA, 15 bp, Homo sapiens
cacgtcatgactaaa

SEQ ID NO: 387186 - DNA, 15 bp, Homo sapiens
tcacgtcatgactaa

SEQ ID NO: 387187 - DNA, 15 bp, Homo sapiens
atcacgtcatgacta

SEQ ID NO: 387188 - DNA, 15 bp, Homo sapiens
aatcacgtcatgact

SEQ ID NO: 387189 - DNA, 15 bp, Homo sapiens
taatcacgtcatgac

SEQ ID NO: 387190 - DNA, 15 bp, Homo sapiens
ataatcacgtcatga

SEQ ID NO: 387191 - DNA, 15 bp, Homo sapiens
aataatcacgtcatg

SEQ ID NO: 387192 - DNA, 15 bp, Homo sapiens
taataatcacgtcat

SEQ ID NO: 387193 - DNA, 15 bp, Homo sapiens
ttaataatcacgtca

SEQ ID NO: 387194 - DNA, 15 bp, Homo sapiens
tttaataatcacgtc

SEQ ID NO: 387195 - DNA, 15 bp, Homo sapiens
atttaataatcacgt

SEQ ID NO: 387196 - DNA, 15 bp, Homo sapiens
aatttaataatcacg

SEQ ID NO: 387197 - DNA, 15 bp, Homo sapiens
aaatttaataatcac

SEQ ID NO: 387198 - DNA, 15 bp, Homo sapiens
caaatttaataatca

SEQ ID NO: 387199 - DNA, 15 bp, Homo sapiens
acaaatttaataatc

SEQ ID NO: 387200 - DNA, 15 bp, Homo sapiens
aacaaatttaataat

SEQ ID NO: 387201 - DNA, 15 bp, Homo sapiens
taacaaatttaataa

SEQ ID NO: 387202 - DNA, 15 bp, Homo sapiens
ttaacaaatttaata

SEQ ID NO: 387203 - DNA, 15 bp, Homo sapiens
tttaacaaatttaat

SEQ ID NO: 387204 - DNA, 15 bp, Homo sapiens
ttttaacaaatttaa

SEQ ID NO: 387205 - DNA, 15 bp, Homo sapiens
tttttaacaaattta

SEQ ID NO: 387206 - DNA, 15 bp, Homo sapiens
ttttttaacaaattt

SEQ ID NO: 387207 - DNA, 15 bp, Homo sapiens
tttttttaacaaatt

SEQ ID NO: 387208 - DNA, 15 bp, Homo sapiens
atttttttaacaaat

SEQ ID NO: 387209 - DNA, 15 bp, Homo sapiens
aatttttttaacaaa

SEQ ID NO: 387210 - DNA, 15 bp, Homo sapiens
caatttttttaacaa

SEQ ID NO: 387211 - DNA, 15 bp, Homo sapiens
ccaatttttttaaca

SEQ ID NO: 387212 - DNA, 15 bp, Homo sapiens
cccaatttttttaac

SEQ ID NO: 387213 - DNA, 15 bp, Homo sapiens
acccaatttttttaa

SEQ ID NO: 387214 - DNA, 15 bp, Homo sapiens
gacccaattttttta

SEQ ID NO: 387215 - DNA, 15 bp, Homo sapiens
ggacccaattttttt

SEQ ID NO: 387216 - DNA, 15 bp, Homo sapiens
aggacccaatttttt

SEQ ID NO: 387217 - DNA, 15 bp, Homo sapiens
caggacccaattttt

SEQ ID NO: 387218 - DNA, 15 bp, Homo sapiens
acaggacccaatttt

SEQ ID NO: 387219 - DNA, 15 bp, Homo sapiens
tacaggacccaattt

SEQ ID NO: 387220 - DNA, 15 bp, Homo sapiens
atacaggacccaatt

SEQ ID NO: 387221 - DNA, 15 bp, Homo sapiens
tatacaggacccaat

SEQ ID NO: 387222 - DNA, 15 bp, Homo sapiens
ttatacaggacccaa

SEQ ID NO: 387223 - DNA, 15 bp, Homo sapiens
cttatacaggaccca

SEQ ID NO: 387224 - DNA, 15 bp, Homo sapiens
tcttatacaggaccc

SEQ ID NO: 387225 - DNA, 15 bp, Homo sapiens
ttcttatacaggacc

SEQ ID NO: 387226 - DNA, 15 bp, Homo sapiens
gttcttatacaggac

SEQ ID NO: 387227 - DNA, 15 bp, Homo sapiens
agttcttatacagga

SEQ ID NO: 387228 - DNA, 15 bp, Homo sapiens
cagttcttatacagg

SEQ ID NO: 387229 - DNA, 15 bp, Homo sapiens
gcagttcttatacag

SEQ ID NO: 387230 - DNA, 15 bp, Homo sapiens
ggcagttcttataca

SEQ ID NO: 387231 - DNA, 15 bp, Homo sapiens
gggcagttcttatac

SEQ ID NO: 387232 - DNA, 15 bp, Homo sapiens
tgggcagttcttata

SEQ ID NO: 387233 - DNA, 15 bp, Homo sapiens
atgggcagttcttat

SEQ ID NO: 387234 - DNA, 15 bp, Homo sapiens
catgggcagttctta

SEQ ID NO: 387235 - DNA, 15 bp, Homo sapiens
tcatgggcagttctt

SEQ ID NO: 387236 - DNA, 15 bp, Homo sapiens
atcatgggcagttct

SEQ ID NO: 387237 - DNA, 15 bp, Homo sapiens
aatcatgggcagttc

SEQ ID NO: 387238 - DNA, 15 bp, Homo sapiens
aaatcatgggcagtt

SEQ ID NO: 387239 - DNA, 15 bp, Homo sapiens
caaatcatgggcagt

SEQ ID NO: 387240 - DNA, 15 bp, Homo sapiens
ccaaatcatgggcag

SEQ ID NO: 387241 - DNA, 15 bp, Homo sapiens
tccaaatcatgggca

SEQ ID NO: 387242 - DNA, 15 bp, Homo sapiens
atccaaatcatgggc

SEQ ID NO: 387243 - DNA, 15 bp, Homo sapiens
aatccaaatcatggg

SEQ ID NO: 387244 - DNA, 15 bp, Homo sapiens
aaatccaaatcatgg

SEQ ID NO: 387245 - DNA, 15 bp, Homo sapiens
aaaatccaaatcatg

SEQ ID NO: 387246 - DNA, 15 bp, Homo sapiens
caaaatccaaatcat

SEQ ID NO: 387247 - DNA, 15 bp, Homo sapiens
ccaaaatccaaatca

SEQ ID NO: 387248 - DNA, 15 bp, Homo sapiens
gccaaaatccaaatc

SEQ ID NO: 387249 - DNA, 15 bp, Homo sapiens
tgccaaaatccaaat

SEQ ID NO: 387250 - DNA, 15 bp, Homo sapiens
ctgccaaaatccaaa

SEQ ID NO: 387251 - DNA, 15 bp, Homo sapiens
cctgccaaaatccaa

SEQ ID NO: 387252 - DNA, 15 bp, Homo sapiens
acctgccaaaatcca

SEQ ID NO: 387253 - DNA, 15 bp, Homo sapiens
tacctgccaaaatcc

SEQ ID NO: 387254 - DNA, 15 bp, Homo sapiens
ttacctgccaaaatc

SEQ ID NO: 387255 - DNA, 15 bp, Homo sapiens
attacctgccaaaat

SEQ ID NO: 387256 - DNA, 15 bp, Homo sapiens
aattacctgccaaaa

SEQ ID NO: 387257 - DNA, 15 bp, Homo sapiens
aaattacctgccaaa

SEQ ID NO: 387258 - DNA, 15 bp, Homo sapiens
taaattacctgccaa

SEQ ID NO: 387259 - DNA, 15 bp, Homo sapiens
ctaaattacctgcca

SEQ ID NO: 387260 - DNA, 15 bp, Homo sapiens
gctaaattacctgcc

SEQ ID NO: 387261 - DNA, 15 bp, Homo sapiens
agctaaattacctgc

SEQ ID NO: 387262 - DNA, 15 bp, Homo sapiens
cagctaaattacctg

SEQ ID NO: 387263 - DNA, 15 bp, Homo sapiens
acagctaaattacct

SEQ ID NO: 387264 - DNA, 15 bp, Homo sapiens
tacagctaaattacc

SEQ ID NO: 387265 - DNA, 15 bp, Homo sapiens
gtacagctaaattac

SEQ ID NO: 387266 - DNA, 15 bp, Homo sapiens
ggtacagctaaatta

SEQ ID NO: 387267 - DNA, 15 bp, Homo sapiens
tggtacagctaaatt

SEQ ID NO: 387268 - DNA, 15 bp, Homo sapiens
atggtacagctaaat

SEQ ID NO: 387269 - DNA, 15 bp, Homo sapiens
gatggtacagctaaa

SEQ ID NO: 387270 - DNA, 15 bp, Homo sapiens
tgatggtacagctaa

SEQ ID NO: 387271 - DNA, 15 bp, Homo sapiens
ttgatggtacagcta

SEQ ID NO: 387272 - DNA, 15 bp, Homo sapiens
attgatggtacagct

SEQ ID NO: 387273 - DNA, 15 bp, Homo sapiens
cattgatggtacagc

SEQ ID NO: 387274 - DNA, 15 bp, Homo sapiens
ccattgatggtacag

SEQ ID NO: 387275 - DNA, 15 bp, Homo sapiens
accattgatggtaca

SEQ ID NO: 387276 - DNA, 15 bp, Homo sapiens
taccattgatggtac

SEQ ID NO: 387277 - DNA, 15 bp, Homo sapiens
ttaccattgatggta

SEQ ID NO: 387278 - DNA, 15 bp, Homo sapiens
gttaccattgatggt

SEQ ID NO: 387279 - DNA, 15 bp, Homo sapiens
agttaccattgatgg

SEQ ID NO: 387280 - DNA, 15 bp, Homo sapiens
cagttaccattgatg

SEQ ID NO: 387281 - DNA, 15 bp, Homo sapiens
acagttaccattgat

SEQ ID NO: 387282 - DNA, 15 bp, Homo sapiens
aacagttaccattga

SEQ ID NO: 387283 - DNA, 15 bp, Homo sapiens
aaacagttaccattg

SEQ ID NO: 387284 - DNA, 15 bp, Homo sapiens
taaacagttaccatt

SEQ ID NO: 387285 - DNA, 15 bp, Homo sapiens
ataaacagttaccat

SEQ ID NO: 387286 - DNA, 15 bp, Homo sapiens
gataaacagttacca

SEQ ID NO: 387287 - DNA, 15 bp, Homo sapiens
ggataaacagttacc

SEQ ID NO: 387288 - DNA, 15 bp, Homo sapiens
tggataaacagttac

SEQ ID NO: 387289 - DNA, 15 bp, Homo sapiens
ctggataaacagtta

SEQ ID NO: 387290 - DNA, 15 bp, Homo sapiens
tctggataaacagtt

SEQ ID NO: 387291 - DNA, 15 bp, Homo sapiens
ctctggataaacagt

SEQ ID NO: 387292 - DNA, 15 bp, Homo sapiens
actctggataaacag

SEQ ID NO: 387293 - DNA, 15 bp, Homo sapiens
tactctggataaaca

SEQ ID NO: 387294 - DNA, 15 bp, Homo sapiens
ttactctggataaac

SEQ ID NO: 387295 - DNA, 15 bp, Homo sapiens
attactctggataaa

SEQ ID NO: 387296 - DNA, 15 bp, Homo sapiens
aattactctggataa

SEQ ID NO: 387297 - DNA, 15 bp, Homo sapiens
gaattactctggata

SEQ ID NO: 387298 - DNA, 15 bp, Homo sapiens
agaattactctggat

SEQ ID NO: 387299 - DNA, 15 bp, Homo sapiens
aagaattactctgga

SEQ ID NO: 387300 - DNA, 15 bp, Homo sapiens
aaagaattactctgg

SEQ ID NO: 387301 - DNA, 15 bp, Homo sapiens
gaaagaattactctg

SEQ ID NO: 387302 - DNA, 15 bp, Homo sapiens
agaaagaattactct

SEQ ID NO: 387303 - DNA, 15 bp, Homo sapiens
tagaaagaattactc

SEQ ID NO: 387304 - DNA, 15 bp, Homo sapiens
gtagaaagaattact

SEQ ID NO: 387305 - DNA, 15 bp, Homo sapiens
ggtagaaagaattac

SEQ ID NO: 387306 - DNA, 15 bp, Homo sapiens
tggtagaaagaatta

SEQ ID NO: 387307 - DNA, 15 bp, Homo sapiens
gtggtagaaagaatt

SEQ ID NO: 387308 - DNA, 15 bp, Homo sapiens
agtggtagaaagaat

SEQ ID NO: 387309 - DNA, 15 bp, Homo sapiens
tagtggtagaaagaa

SEQ ID NO: 387310 - DNA, 15 bp, Homo sapiens
ctagtggtagaaaga

SEQ ID NO: 387311 - DNA, 15 bp, Homo sapiens
tctagtggtagaaag

SEQ ID NO: 387312 - DNA, 15 bp, Homo sapiens
atctagtggtagaaa

SEQ ID NO: 387313 - DNA, 15 bp, Homo sapiens
catctagtggtagaa

SEQ ID NO: 387314 - DNA, 15 bp, Homo sapiens
ccatctagtggtaga

SEQ ID NO: 387315 - DNA, 15 bp, Homo sapiens
accatctagtggtag

SEQ ID NO: 387316 - DNA, 15 bp, Homo sapiens
caccatctagtggta

SEQ ID NO: 387317 - DNA, 15 bp, Homo sapiens
gcaccatctagtggt

SEQ ID NO: 387318 - DNA, 15 bp, Homo sapiens
agcaccatctagtgg

SEQ ID NO: 387319 - DNA, 15 bp, Homo sapiens
aagcaccatctagtg

SEQ ID NO: 387320 - DNA, 15 bp, Homo sapiens
caagcaccatctagt

SEQ ID NO: 387321 - DNA, 15 bp, Homo sapiens
acaagcaccatctag

SEQ ID NO: 387322 - DNA, 15 bp, Homo sapiens
gacaagcaccatcta

SEQ ID NO: 387323 - DNA, 15 bp, Homo sapiens
ggacaagcaccatct

SEQ ID NO: 387324 - DNA, 15 bp, Homo sapiens
tggacaagcaccatc

SEQ ID NO: 387325 - DNA, 15 bp, Homo sapiens
atggacaagcaccat

SEQ ID NO: 387326 - DNA, 15 bp, Homo sapiens
tatggacaagcacca

SEQ ID NO: 387327 - DNA, 15 bp, Homo sapiens
atatggacaagcacc

SEQ ID NO: 387328 - DNA, 15 bp, Homo sapiens
tatatggacaagcac

SEQ ID NO: 387329 - DNA, 15 bp, Homo sapiens
atatatggacaagca

SEQ ID NO: 387330 - DNA, 15 bp, Homo sapiens
aatatatggacaagc

SEQ ID NO: 387331 - DNA, 15 bp, Homo sapiens
aaatatatggacaag

SEQ ID NO: 387332 - DNA, 15 bp, Homo sapiens
caaatatatggacaa

SEQ ID NO: 387333 - DNA, 15 bp, Homo sapiens
acaaatatatggaca

SEQ ID NO: 387334 - DNA, 15 bp, Homo sapiens
cacaaatatatggac

SEQ ID NO: 387335 - DNA, 15 bp, Homo sapiens
tcacaaatatatgga

SEQ ID NO: 387336 - DNA, 15 bp, Homo sapiens
ctcacaaatatatgg

SEQ ID NO: 387337 - DNA, 15 bp, Homo sapiens
cctcacaaatatatg

SEQ ID NO: 387338 - DNA, 15 bp, Homo sapiens
gcctcacaaatatat

SEQ ID NO: 387339 - DNA, 15 bp, Homo sapiens
agcctcacaaatata

SEQ ID NO: 387340 - DNA, 15 bp, Homo sapiens
gagcctcacaaatat

SEQ ID NO: 387341 - DNA, 15 bp, Homo sapiens
agagcctcacaaata

SEQ ID NO: 387342 - DNA, 15 bp, Homo sapiens
gagagcctcacaaat

SEQ ID NO: 387343 - DNA, 15 bp, Homo sapiens
ggagagcctcacaaa

SEQ ID NO: 387344 - DNA, 15 bp, Homo sapiens
aggagagcctcacaa

SEQ ID NO: 387345 - DNA, 15 bp, Homo sapiens
taggagagcctcaca

SEQ ID NO: 387346 - DNA, 15 bp, Homo sapiens
ataggagagcctcac

SEQ ID NO: 387347 - DNA, 15 bp, Homo sapiens
tataggagagcctca

SEQ ID NO: 387348 - DNA, 15 bp, Homo sapiens
atataggagagcctc

SEQ ID NO: 387349 - DNA, 15 bp, Homo sapiens
tatataggagagcct

SEQ ID NO: 387350 - DNA, 15 bp, Homo sapiens
ttatataggagagcc

SEQ ID NO: 387351 - DNA, 15 bp, Homo sapiens
tttatataggagagc

SEQ ID NO: 387352 - DNA, 15 bp, Homo sapiens
ctttatataggagag

SEQ ID NO: 387353 - DNA, 15 bp, Homo sapiens
actttatataggaga

SEQ ID NO: 387354 - DNA, 15 bp, Homo sapiens
aactttatataggag

SEQ ID NO: 387355 - DNA, 15 bp, Homo sapiens
taactttatatagga

SEQ ID NO: 387356 - DNA, 15 bp, Homo sapiens
gtaactttatatagg

SEQ ID NO: 387357 - DNA, 15 bp, Homo sapiens
tgtaactttatatag

SEQ ID NO: 387358 - DNA, 15 bp, Homo sapiens
atgtaactttatata

SEQ ID NO: 387359 - DNA, 15 bp, Homo sapiens
tatgtaactttatat

SEQ ID NO: 387360 - DNA, 15 bp, Homo sapiens
ttatgtaactttata

SEQ ID NO: 387361 - DNA, 15 bp, Homo sapiens
attatgtaactttat

SEQ ID NO: 387362 - DNA, 15 bp, Homo sapiens
aattatgtaacttta

SEQ ID NO: 387363 - DNA, 15 bp, Homo sapiens
aaattatgtaacttt

SEQ ID NO: 387364 - DNA, 15 bp, Homo sapiens
caaattatgtaactt

SEQ ID NO: 387365 - DNA, 15 bp, Homo sapiens
ccaaattatgtaact

SEQ ID NO: 387366 - DNA, 15 bp, Homo sapiens
cccaaattatgtaac

SEQ ID NO: 387367 - DNA, 15 bp, Homo sapiens
ccccaaattatgtaa

SEQ ID NO: 387368 - DNA, 15 bp, Homo sapiens
accccaaattatgta

SEQ ID NO: 387369 - DNA, 15 bp, Homo sapiens
taccccaaattatgt

SEQ ID NO: 387370 - DNA, 15 bp, Homo sapiens
ttaccccaaattatg

SEQ ID NO: 387371 - DNA, 15 bp, Homo sapiens
tttaccccaaattat

SEQ ID NO: 387372 - DNA, 15 bp, Homo sapiens
ttttaccccaaatta

SEQ ID NO: 387373 - DNA, 15 bp, Homo sapiens
gttttaccccaaatt

SEQ ID NO: 387374 - DNA, 15 bp, Homo sapiens
tgttttaccccaaat

SEQ ID NO: 387375 - DNA, 15 bp, Homo sapiens
gtgttttaccccaaa

SEQ ID NO: 387376 - DNA, 15 bp, Homo sapiens
tgtgttttaccccaa

SEQ ID NO: 387377 - DNA, 15 bp, Homo sapiens
atgtgttttacccca

SEQ ID NO: 387378 - DNA, 15 bp, Homo sapiens
gatgtgttttacccc

SEQ ID NO: 387379 - DNA, 15 bp, Homo sapiens
agatgtgttttaccc

SEQ ID NO: 387380 - DNA, 15 bp, Homo sapiens
aagatgtgttttacc

SEQ ID NO: 387381 - DNA, 15 bp, Homo sapiens
caagatgtgttttac

SEQ ID NO: 387382 - DNA, 15 bp, Homo sapiens
acaagatgtgtttta

SEQ ID NO: 387383 - DNA, 15 bp, Homo sapiens
aacaagatgtgtttt

SEQ ID NO: 387384 - DNA, 15 bp, Homo sapiens
caacaagatgtgttt

SEQ ID NO: 387385 - DNA, 15 bp, Homo sapiens
tcaacaagatgtgtt

SEQ ID NO: 387386 - DNA, 15 bp, Homo sapiens
gtcaacaagatgtgt

SEQ ID NO: 387387 - DNA, 15 bp, Homo sapiens
ggtcaacaagatgtg

SEQ ID NO: 387388 - DNA, 15 bp, Homo sapiens
aggtcaacaagatgt

SEQ ID NO: 387389 - DNA, 15 bp, Homo sapiens
aaggtcaacaagatg

SEQ ID NO: 387390 - DNA, 15 bp, Homo sapiens
aaaggtcaacaagat

SEQ ID NO: 387391 - DNA, 15 bp, Homo sapiens
caaaggtcaacaaga

SEQ ID NO: 387392 - DNA, 15 bp, Homo sapiens
tcaaaggtcaacaag

SEQ ID NO: 387393 - DNA, 15 bp, Homo sapiens
ctcaaaggtcaacaa

SEQ ID NO: 387394 - DNA, 15 bp, Homo sapiens
tctcaaaggtcaaca

SEQ ID NO: 387395 - DNA, 15 bp, Homo sapiens
ttctcaaaggtcaac

SEQ ID NO: 387396 - DNA, 15 bp, Homo sapiens
attctcaaaggtcaa

SEQ ID NO: 387397 - DNA, 15 bp, Homo sapiens
aattctcaaaggtca

SEQ ID NO: 387398 - DNA, 15 bp, Homo sapiens
caattctcaaaggtc

SEQ ID NO: 387399 - DNA, 15 bp, Homo sapiens
acaattctcaaaggt

SEQ ID NO: 387400 - DNA, 15 bp, Homo sapiens
tacaattctcaaagg

SEQ ID NO: 387401 - DNA, 15 bp, Homo sapiens
atacaattctcaaag

SEQ ID NO: 387402 - DNA, 15 bp, Homo sapiens
tatacaattctcaaa

SEQ ID NO: 387403 - DNA, 15 bp, Homo sapiens
ctatacaattctcaa

SEQ ID NO: 387404 - DNA, 15 bp, Homo sapiens
actatacaattctca

SEQ ID NO: 387405 - DNA, 15 bp, Homo sapiens
cactatacaattctc

SEQ ID NO: 387406 - DNA, 15 bp, Homo sapiens
ccactatacaattct

SEQ ID NO: 387407 - DNA, 15 bp, Homo sapiens
accactatacaattc

SEQ ID NO: 387408 - DNA, 15 bp, Homo sapiens
taccactatacaatt

SEQ ID NO: 387409 - DNA, 15 bp, Homo sapiens
ataccactatacaat

SEQ ID NO: 387410 - DNA, 15 bp, Homo sapiens
aataccactatacaa

SEQ ID NO: 387411 - DNA, 15 bp, Homo sapiens
caataccactataca

SEQ ID NO: 387412 - DNA, 15 bp, Homo sapiens
tcaataccactatac

SEQ ID NO: 387413 - DNA, 15 bp, Homo sapiens
atcaataccactata

SEQ ID NO: 387414 - DNA, 15 bp, Homo sapiens
tatcaataccactat

SEQ ID NO: 387415 - DNA, 15 bp, Homo sapiens
gtatcaataccacta

SEQ ID NO: 387416 - DNA, 15 bp, Homo sapiens
agtatcaataccact

SEQ ID NO: 387417 - DNA, 15 bp, Homo sapiens
gagtatcaataccac

SEQ ID NO: 387418 - DNA, 15 bp, Homo sapiens
tgagtatcaatacca

SEQ ID NO: 387419 - DNA, 15 bp, Homo sapiens
atgagtatcaatacc

SEQ ID NO: 387420 - DNA, 15 bp, Homo sapiens
catgagtatcaatac

SEQ ID NO: 387421 - DNA, 15 bp, Homo sapiens
acatgagtatcaata

SEQ ID NO: 387422 - DNA, 15 bp, Homo sapiens
aacatgagtatcaat

SEQ ID NO: 387423 - DNA, 15 bp, Homo sapiens
gaacatgagtatcaa

SEQ ID NO: 387424 - DNA, 15 bp, Homo sapiens
tgaacatgagtatca

SEQ ID NO: 387425 - DNA, 15 bp, Homo sapiens
gtgaacatgagtatc

SEQ ID NO: 387426 - DNA, 15 bp, Homo sapiens
ggtgaacatgagtat

SEQ ID NO: 387427 - DNA, 15 bp, Homo sapiens
aggtgaacatgagta

SEQ ID NO: 387428 - DNA, 15 bp, Homo sapiens
aaggtgaacatgagt

SEQ ID NO: 387429 - DNA, 15 bp, Homo sapiens
caaggtgaacatgag

SEQ ID NO: 387430 - DNA, 15 bp, Homo sapiens
acaaggtgaacatga

SEQ ID NO: 387431 - DNA, 15 bp, Homo sapiens
aacaaggtgaacatg

SEQ ID NO: 387432 - DNA, 15 bp, Homo sapiens
caacaaggtgaacat

SEQ ID NO: 387433 - DNA, 15 bp, Homo sapiens
tcaacaaggtgaaca

SEQ ID NO: 387434 - DNA, 15 bp, Homo sapiens
atcaacaaggtgaac

SEQ ID NO: 387435 - DNA, 15 bp, Homo sapiens
catcaacaaggtgaa

SEQ ID NO: 387436 - DNA, 15 bp, Homo sapiens
tcatcaacaaggtga

SEQ ID NO: 387437 - DNA, 15 bp, Homo sapiens
ctcatcaacaaggtg

SEQ ID NO: 387438 - DNA, 15 bp, Homo sapiens
tctcatcaacaaggt

SEQ ID NO: 387439 - DNA, 15 bp, Homo sapiens
atctcatcaacaagg

SEQ ID NO: 387440 - DNA, 15 bp, Homo sapiens
catctcatcaacaag

SEQ ID NO: 387441 - DNA, 15 bp, Homo sapiens
acatctcatcaacaa

SEQ ID NO: 387442 - DNA, 15 bp, Homo sapiens
aacatctcatcaaca

SEQ ID NO: 387443 - DNA, 15 bp, Homo sapiens
aaacatctcatcaac

SEQ ID NO: 387444 - DNA, 15 bp, Homo sapiens
aaaacatctcatcaa

SEQ ID NO: 387445 - DNA, 15 bp, Homo sapiens
aaaaacatctcatca

SEQ ID NO: 387446 - DNA, 15 bp, Homo sapiens
taaaaacatctcatc

SEQ ID NO: 387447 - DNA, 15 bp, Homo sapiens
ttaaaaacatctcat

SEQ ID NO: 387448 - DNA, 15 bp, Homo sapiens
cttaaaaacatctca

SEQ ID NO: 387449 - DNA, 15 bp, Homo sapiens
ccttaaaaacatctc

SEQ ID NO: 387450 - DNA, 15 bp, Homo sapiens
cccttaaaaacatct

SEQ ID NO: 387451 - DNA, 15 bp, Homo sapiens
acccttaaaaacatc

SEQ ID NO: 387452 - DNA, 15 bp, Homo sapiens
tacccttaaaaacat

SEQ ID NO: 387453 - DNA, 15 bp, Homo sapiens
ttacccttaaaaaca

SEQ ID NO: 387454 - DNA, 15 bp, Homo sapiens
tttacccttaaaaac

SEQ ID NO: 387455 - DNA, 15 bp, Homo sapiens
ttttacccttaaaaa

SEQ ID NO: 387456 - DNA, 15 bp, Homo sapiens
attttacccttaaaa

SEQ ID NO: 387457 - DNA, 15 bp, Homo sapiens
aattttacccttaaa

SEQ ID NO: 387458 - DNA, 15 bp, Homo sapiens
aaattttacccttaa

SEQ ID NO: 387459 - DNA, 15 bp, Homo sapiens
taaattttaccctta

SEQ ID NO: 387460 - DNA, 15 bp, Homo sapiens
ctaaattttaccctt

SEQ ID NO: 387461 - DNA, 15 bp, Homo sapiens
cctaaattttaccct

SEQ ID NO: 387462 - DNA, 15 bp, Homo sapiens
ccctaaattttaccc

SEQ ID NO: 387463 - DNA, 15 bp, Homo sapiens
accctaaattttacc

SEQ ID NO: 387464 - DNA, 15 bp, Homo sapiens
taccctaaattttac

SEQ ID NO: 387465 - DNA, 15 bp, Homo sapiens
ctaccctaaatttta

SEQ ID NO: 387466 - DNA, 15 bp, Homo sapiens
cctaccctaaatttt

SEQ ID NO: 387467 - DNA, 15 bp, Homo sapiens
tcctaccctaaattt

SEQ ID NO: 387468 - DNA, 15 bp, Homo sapiens
atcctaccctaaatt

SEQ ID NO: 387469 - DNA, 15 bp, Homo sapiens
aatcctaccctaaat

SEQ ID NO: 387470 - DNA, 15 bp, Homo sapiens
aaatcctaccctaaa

SEQ ID NO: 387471 - DNA, 15 bp, Homo sapiens
caaatcctaccctaa

SEQ ID NO: 387472 - DNA, 15 bp, Homo sapiens
tcaaatcctacccta

SEQ ID NO: 387473 - DNA, 15 bp, Homo sapiens
atcaaatcctaccct

SEQ ID NO: 387474 - DNA, 15 bp, Homo sapiens
catcaaatcctaccc

SEQ ID NO: 387475 - DNA, 15 bp, Homo sapiens
tcatcaaatcctacc

SEQ ID NO: 387476 - DNA, 15 bp, Homo sapiens
ttcatcaaatcctac

SEQ ID NO: 387477 - DNA, 15 bp, Homo sapiens
tttcatcaaatccta

SEQ ID NO: 387478 - DNA, 15 bp, Homo sapiens
ttttcatcaaatcct

SEQ ID NO: 387479 - DNA, 15 bp, Homo sapiens
attttcatcaaatcc

SEQ ID NO: 387480 - DNA, 15 bp, Homo sapiens
aattttcatcaaatc

SEQ ID NO: 387481 - DNA, 15 bp, Homo sapiens
aaattttcatcaaat

SEQ ID NO: 387482 - DNA, 15 bp, Homo sapiens
taaattttcatcaaa

SEQ ID NO: 387483 - DNA, 15 bp, Homo sapiens
ttaaattttcatcaa

SEQ ID NO: 387484 - DNA, 15 bp, Homo sapiens
tttaaattttcatca

SEQ ID NO: 387485 - DNA, 15 bp, Homo sapiens
ttttaaattttcatc

SEQ ID NO: 387486 - DNA, 15 bp, Homo sapiens
cttttaaattttcat

SEQ ID NO: 387487 - DNA, 15 bp, Homo sapiens
acttttaaattttca

SEQ ID NO: 387488 - DNA, 15 bp, Homo sapiens
aacttttaaattttc

SEQ ID NO: 387489 - DNA, 15 bp, Homo sapiens
aaacttttaaatttt

SEQ ID NO: 387490 - DNA, 15 bp, Homo sapiens
caaacttttaaattt

SEQ ID NO: 387491 - DNA, 15 bp, Homo sapiens
ccaaacttttaaatt

SEQ ID NO: 387492 - DNA, 15 bp, Homo sapiens
tccaaacttttaaat

SEQ ID NO: 387493 - DNA, 15 bp, Homo sapiens
atccaaacttttaaa

SEQ ID NO: 387494 - DNA, 15 bp, Homo sapiens
gatccaaacttttaa

SEQ ID NO: 387495 - DNA, 15 bp, Homo sapiens
tgatccaaactttta

SEQ ID NO: 387496 - DNA, 15 bp, Homo sapiens
gtgatccaaactttt

SEQ ID NO: 387497 - DNA, 15 bp, Homo sapiens
agtgatccaaacttt

SEQ ID NO: 387498 - DNA, 15 bp, Homo sapiens
aagtgatccaaactt

SEQ ID NO: 387499 - DNA, 15 bp, Homo sapiens
aaagtgatccaaact

SEQ ID NO: 387500 - DNA, 15 bp, Homo sapiens
caaagtgatccaaac

SEQ ID NO: 387501 - DNA, 15 bp, Homo sapiens
acaaagtgatccaaa

SEQ ID NO: 387502 - DNA, 15 bp, Homo sapiens
aacaaagtgatccaa

SEQ ID NO: 387503 - DNA, 15 bp, Homo sapiens
aaacaaagtgatcca

SEQ ID NO: 387504 - DNA, 15 bp, Homo sapiens
taaacaaagtgatcc

SEQ ID NO: 387505 - DNA, 15 bp, Homo sapiens
gtaaacaaagtgatc

SEQ ID NO: 387506 - DNA, 15 bp, Homo sapiens
ggtaaacaaagtgat

SEQ ID NO: 387507 - DNA, 15 bp, Homo sapiens
gggtaaacaaagtga

SEQ ID NO: 387508 - DNA, 15 bp, Homo sapiens
tgggtaaacaaagtg

SEQ ID NO: 387509 - DNA, 15 bp, Homo sapiens
atgggtaaacaaagt

SEQ ID NO: 387510 - DNA, 15 bp, Homo sapiens
tatgggtaaacaaag

SEQ ID NO: 387511 - DNA, 15 bp, Homo sapiens
ctatgggtaaacaaa

SEQ ID NO: 387512 - DNA, 15 bp, Homo sapiens
gctatgggtaaacaa

SEQ ID NO: 387513 - DNA, 15 bp, Homo sapiens
tgctatgggtaaaca

SEQ ID NO: 387514 - DNA, 15 bp, Homo sapiens
atgctatgggtaaac

SEQ ID NO: 387515 - DNA, 15 bp, Homo sapiens
aatgctatgggtaaa

SEQ ID NO: 387516 - DNA, 15 bp, Homo sapiens
gaatgctatgggtaa

SEQ ID NO: 387517 - DNA, 15 bp, Homo sapiens
ggaatgctatgggta

SEQ ID NO: 387518 - DNA, 15 bp, Homo sapiens
gggaatgctatgggt

SEQ ID NO: 387519 - DNA, 15 bp, Homo sapiens
tgggaatgctatggg

SEQ ID NO: 387520 - DNA, 15 bp, Homo sapiens
ttgggaatgctatgg

SEQ ID NO: 387521 - DNA, 15 bp, Homo sapiens
cttgggaatgctatg

SEQ ID NO: 387522 - DNA, 15 bp, Homo sapiens
acttgggaatgctat

SEQ ID NO: 387523 - DNA, 15 bp, Homo sapiens
gacttgggaatgcta

SEQ ID NO: 387524 - DNA, 15 bp, Homo sapiens
ggacttgggaatgct

SEQ ID NO: 387525 - DNA, 15 bp, Homo sapiens
aggacttgggaatgc

SEQ ID NO: 387526 - DNA, 15 bp, Homo sapiens
taggacttgggaatg

SEQ ID NO: 387527 - DNA, 15 bp, Homo sapiens
ttaggacttgggaat

SEQ ID NO: 387528 - DNA, 15 bp, Homo sapiens
cttaggacttgggaa

SEQ ID NO: 387529 - DNA, 15 bp, Homo sapiens
acttaggacttggga

SEQ ID NO: 387530 - DNA, 15 bp, Homo sapiens
tacttaggacttggg

SEQ ID NO: 387531 - DNA, 15 bp, Homo sapiens
atacttaggacttgg

SEQ ID NO: 387532 - DNA, 15 bp, Homo sapiens
tatacttaggacttg

SEQ ID NO: 387533 - DNA, 15 bp, Homo sapiens
ttatacttaggactt

SEQ ID NO: 387534 - DNA, 15 bp, Homo sapiens
cttatacttaggact

SEQ ID NO: 387535 - DNA, 15 bp, Homo sapiens
tcttatacttaggac

SEQ ID NO: 387536 - DNA, 15 bp, Homo sapiens
atcttatacttagga

SEQ ID NO: 387537 - DNA, 15 bp, Homo sapiens
tatcttatacttagg

SEQ ID NO: 387538 - DNA, 15 bp, Homo sapiens
atatcttatacttag

SEQ ID NO: 387539 - DNA, 15 bp, Homo sapiens
aatatcttatactta

SEQ ID NO: 387540 - DNA, 15 bp, Homo sapiens
aaatatcttatactt

SEQ ID NO: 387541 - DNA, 15 bp, Homo sapiens
taaatatcttatact

SEQ ID NO: 387542 - DNA, 15 bp, Homo sapiens
gtaaatatcttatac

SEQ ID NO: 387543 - DNA, 15 bp, Homo sapiens
agtaaatatcttata

SEQ ID NO: 387544 - DNA, 15 bp, Homo sapiens
tagtaaatatcttat

SEQ ID NO: 387545 - DNA, 15 bp, Homo sapiens
ttagtaaatatctta

SEQ ID NO: 387546 - DNA, 15 bp, Homo sapiens
tttagtaaatatctt

SEQ ID NO: 387547 - DNA, 15 bp, Homo sapiens
ttttagtaaatatct

SEQ ID NO: 387548 - DNA, 15 bp, Homo sapiens
tttttagtaaatatc

SEQ ID NO: 387549 - DNA, 15 bp, Homo sapiens
ttttttagtaaatat

SEQ ID NO: 387550 - DNA, 15 bp, Homo sapiens
tttttttagtaaata

SEQ ID NO: 387551 - DNA, 15 bp, Homo sapiens
atttttttagtaaat

SEQ ID NO: 387552 - DNA, 15 bp, Homo sapiens
catttttttagtaaa

SEQ ID NO: 387553 - DNA, 15 bp, Homo sapiens
tcatttttttagtaa

SEQ ID NO: 387554 - DNA, 15 bp, Homo sapiens
atcatttttttagta

SEQ ID NO: 387555 - DNA, 15 bp, Homo sapiens
catcatttttttagt

SEQ ID NO: 387556 - DNA, 15 bp, Homo sapiens
tcatcatttttttag

SEQ ID NO: 387557 - DNA, 15 bp, Homo sapiens
ctcatcattttttta

SEQ ID NO: 387558 - DNA, 15 bp, Homo sapiens
tctcatcattttttt

SEQ ID NO: 387559 - DNA, 15 bp, Homo sapiens
atctcatcatttttt

SEQ ID NO: 387560 - DNA, 15 bp, Homo sapiens
catctcatcattttt

SEQ ID NO: 387561 - DNA, 15 bp, Homo sapiens
ccatctcatcatttt

SEQ ID NO: 387562 - DNA, 15 bp, Homo sapiens
cccatctcatcattt

SEQ ID NO: 387563 - DNA, 15 bp, Homo sapiens
tcccatctcatcatt

SEQ ID NO: 387564 - DNA, 15 bp, Homo sapiens
ttcccatctcatcat

SEQ ID NO: 387565 - DNA, 15 bp, Homo sapiens
cttcccatctcatca

SEQ ID NO: 387566 - DNA, 15 bp, Homo sapiens
tcttcccatctcatc

SEQ ID NO: 387567 - DNA, 15 bp, Homo sapiens
ttcttcccatctcat

SEQ ID NO: 387568 - DNA, 15 bp, Homo sapiens
attcttcccatctca

SEQ ID NO: 387569 - DNA, 15 bp, Homo sapiens
aattcttcccatctc

SEQ ID NO: 387570 - DNA, 15 bp, Homo sapiens
taattcttcccatct

SEQ ID NO: 387571 - DNA, 15 bp, Homo sapiens
ttaattcttcccatc

SEQ ID NO: 387572 - DNA, 15 bp, Homo sapiens
attaattcttcccat

SEQ ID NO: 387573 - DNA, 15 bp, Homo sapiens
cattaattcttccca

SEQ ID NO: 387574 - DNA, 15 bp, Homo sapiens
acattaattcttccc

SEQ ID NO: 387575 - DNA, 15 bp, Homo sapiens
cacattaattcttcc

SEQ ID NO: 387576 - DNA, 15 bp, Homo sapiens
ccacattaattcttc

SEQ ID NO: 387577 - DNA, 15 bp, Homo sapiens
cccacattaattctt

SEQ ID NO: 387578 - DNA, 15 bp, Homo sapiens
acccacattaattct

SEQ ID NO: 387579 - DNA, 15 bp, Homo sapiens
tacccacattaattc

SEQ ID NO: 387580 - DNA, 15 bp, Homo sapiens
ttacccacattaatt

SEQ ID NO: 387581 - DNA, 15 bp, Homo sapiens
attacccacattaat

SEQ ID NO: 387582 - DNA, 15 bp, Homo sapiens
tattacccacattaa

SEQ ID NO: 387583 - DNA, 15 bp, Homo sapiens
atattacccacatta

SEQ ID NO: 387584 - DNA, 15 bp, Homo sapiens
catattacccacatt

SEQ ID NO: 387585 - DNA, 15 bp, Homo sapiens
ccatattacccacat

SEQ ID NO: 387586 - DNA, 15 bp, Homo sapiens
accatattacccaca

SEQ ID NO: 387587 - DNA, 15 bp, Homo sapiens
taccatattacccac

SEQ ID NO: 387588 - DNA, 15 bp, Homo sapiens
ataccatattaccca

SEQ ID NO: 387589 - DNA, 15 bp, Homo sapiens
aataccatattaccc

SEQ ID NO: 387590 - DNA, 15 bp, Homo sapiens
gaataccatattacc

SEQ ID NO: 387591 - DNA, 15 bp, Homo sapiens
cgaataccatattac

SEQ ID NO: 387592 - DNA, 15 bp, Homo sapiens
acgaataccatatta

SEQ ID NO: 387593 - DNA, 15 bp, Homo sapiens
tacgaataccatatt

SEQ ID NO: 387594 - DNA, 15 bp, Homo sapiens
atacgaataccatat

SEQ ID NO: 387595 - DNA, 15 bp, Homo sapiens
aatacgaataccata

SEQ ID NO: 387596 - DNA, 15 bp, Homo sapiens
aaatacgaataccat

SEQ ID NO: 387597 - DNA, 15 bp, Homo sapiens
aaaatacgaatacca

SEQ ID NO: 387598 - DNA, 15 bp, Homo sapiens
aaaaatacgaatacc

SEQ ID NO: 387599 - DNA, 15 bp, Homo sapiens
caaaaatacgaatac

SEQ ID NO: 387600 - DNA, 15 bp, Homo sapiens
tcaaaaatacgaata

SEQ ID NO: 387601 - DNA, 15 bp, Homo sapiens
ttcaaaaatacgaat

SEQ ID NO: 387602 - DNA, 15 bp, Homo sapiens
tttcaaaaatacgaa

SEQ ID NO: 387603 - DNA, 15 bp, Homo sapiens
atttcaaaaatacga

SEQ ID NO: 387604 - DNA, 15 bp, Homo sapiens
catttcaaaaatacg

SEQ ID NO: 387605 - DNA, 15 bp, Homo sapiens
acatttcaaaaatac

SEQ ID NO: 387606 - DNA, 15 bp, Homo sapiens
cacatttcaaaaata

SEQ ID NO: 387607 - DNA, 15 bp, Homo sapiens
acacatttcaaaaat

SEQ ID NO: 387608 - DNA, 15 bp, Homo sapiens
cacacatttcaaaaa

SEQ ID NO: 387609 - DNA, 15 bp, Homo sapiens
gcacacatttcaaaa

SEQ ID NO: 387610 - DNA, 15 bp, Homo sapiens
cgcacacatttcaaa

SEQ ID NO: 387611 - DNA, 15 bp, Homo sapiens
tcgcacacatttcaa

SEQ ID NO: 387612 - DNA, 15 bp, Homo sapiens
ttcgcacacatttca

SEQ ID NO: 387613 - DNA, 15 bp, Homo sapiens
tttcgcacacatttc

SEQ ID NO: 387614 - DNA, 15 bp, Homo sapiens
atttcgcacacattt

SEQ ID NO: 387615 - DNA, 15 bp, Homo sapiens
aatttcgcacacatt

SEQ ID NO: 387616 - DNA, 15 bp, Homo sapiens
caatttcgcacacat

SEQ ID NO: 387617 - DNA, 15 bp, Homo sapiens
ccaatttcgcacaca

SEQ ID NO: 387618 - DNA, 15 bp, Homo sapiens
tccaatttcgcacac

SEQ ID NO: 387619 - DNA, 15 bp, Homo sapiens
gtccaatttcgcaca

SEQ ID NO: 387620 - DNA, 15 bp, Homo sapiens
ggtccaatttcgcac

SEQ ID NO: 387621 - DNA, 15 bp, Homo sapiens
aggtccaatttcgca

SEQ ID NO: 387622 - DNA, 15 bp, Homo sapiens
taggtccaatttcgc

SEQ ID NO: 387623 - DNA, 15 bp, Homo sapiens
ctaggtccaatttcg

SEQ ID NO: 387624 - DNA, 15 bp, Homo sapiens
cctaggtccaatttc

SEQ ID NO: 387625 - DNA, 15 bp, Homo sapiens
gcctaggtccaattt

SEQ ID NO: 387626 - DNA, 15 bp, Homo sapiens
agcctaggtccaatt

SEQ ID NO: 387627 - DNA, 15 bp, Homo sapiens
tagcctaggtccaat

SEQ ID NO: 387628 - DNA, 15 bp, Homo sapiens
ctagcctaggtccaa

SEQ ID NO: 387629 - DNA, 15 bp, Homo sapiens
actagcctaggtcca

SEQ ID NO: 387630 - DNA, 15 bp, Homo sapiens
aactagcctaggtcc

SEQ ID NO: 387631 - DNA, 15 bp, Homo sapiens
gaactagcctaggtc

SEQ ID NO: 387632 - DNA, 15 bp, Homo sapiens
tgaactagcctaggt

SEQ ID NO: 387633 - DNA, 15 bp, Homo sapiens
atgaactagcctagg

SEQ ID NO: 387634 - DNA, 15 bp, Homo sapiens
catgaactagcctag

SEQ ID NO: 387635 - DNA, 15 bp, Homo sapiens
tcatgaactagccta

SEQ ID NO: 387636 - DNA, 15 bp, Homo sapiens
ttcatgaactagcct

SEQ ID NO: 387637 - DNA, 15 bp, Homo sapiens
attcatgaactagcc

SEQ ID NO: 387638 - DNA, 15 bp, Homo sapiens
aattcatgaactagc

SEQ ID NO: 387639 - DNA, 15 bp, Homo sapiens
aaattcatgaactag

SEQ ID NO: 387640 - DNA, 15 bp, Homo sapiens
caaattcatgaacta

SEQ ID NO: 387641 - DNA, 15 bp, Homo sapiens
acaaattcatgaact

SEQ ID NO: 387642 - DNA, 15 bp, Homo sapiens
aacaaattcatgaac

SEQ ID NO: 387643 - DNA, 15 bp, Homo sapiens
taacaaattcatgaa

SEQ ID NO: 387644 - DNA, 15 bp, Homo sapiens
ctaacaaattcatga

SEQ ID NO: 387645 - DNA, 15 bp, Homo sapiens
tctaacaaattcatg

SEQ ID NO: 387646 - DNA, 15 bp, Homo sapiens
ttctaacaaattcat

SEQ ID NO: 387647 - DNA, 15 bp, Homo sapiens
cttctaacaaattca

SEQ ID NO: 387648 - DNA, 15 bp, Homo sapiens
acttctaacaaattc

SEQ ID NO: 387649 - DNA, 15 bp, Homo sapiens
tacttctaacaaatt

SEQ ID NO: 387650 - DNA, 15 bp, Homo sapiens
atacttctaacaaat

SEQ ID NO: 387651 - DNA, 15 bp, Homo sapiens
gatacttctaacaaa

SEQ ID NO: 387652 - DNA, 15 bp, Homo sapiens
tgatacttctaacaa

SEQ ID NO: 387653 - DNA, 15 bp, Homo sapiens
ttgatacttctaaca

SEQ ID NO: 387654 - DNA, 15 bp, Homo sapiens
cttgatacttctaac

SEQ ID NO: 387655 - DNA, 15 bp, Homo sapiens
tcttgatacttctaa

SEQ ID NO: 387656 - DNA, 15 bp, Homo sapiens
atcttgatacttcta

SEQ ID NO: 387657 - DNA, 15 bp, Homo sapiens
tatcttgatacttct

SEQ ID NO: 387658 - DNA, 15 bp, Homo sapiens
ttatcttgatacttc

SEQ ID NO: 387659 - DNA, 15 bp, Homo sapiens
attatcttgatactt

SEQ ID NO: 387660 - DNA, 15 bp, Homo sapiens
aattatcttgatact

SEQ ID NO: 387661 - DNA, 15 bp, Homo sapiens
taattatcttgatac

SEQ ID NO: 387662 - DNA, 15 bp, Homo sapiens
ttaattatcttgata

SEQ ID NO: 387663 - DNA, 15 bp, Homo sapiens
cttaattatcttgat

SEQ ID NO: 387664 - DNA, 15 bp, Homo sapiens
gcttaattatcttga

SEQ ID NO: 387665 - DNA, 15 bp, Homo sapiens
tgcttaattatcttg

SEQ ID NO: 387666 - DNA, 15 bp, Homo sapiens
ttgcttaattatctt

SEQ ID NO: 387667 - DNA, 15 bp, Homo sapiens
gttgcttaattatct

SEQ ID NO: 387668 - DNA, 15 bp, Homo sapiens
ggttgcttaattatc

SEQ ID NO: 387669 - DNA, 15 bp, Homo sapiens
aggttgcttaattat

SEQ ID NO: 387670 - DNA, 15 bp, Homo sapiens
caggttgcttaatta

SEQ ID NO: 387671 - DNA, 15 bp, Homo sapiens
acaggttgcttaatt

SEQ ID NO: 387672 - DNA, 15 bp, Homo sapiens
tacaggttgcttaat

SEQ ID NO: 387673 - DNA, 15 bp, Homo sapiens
ctacaggttgcttaa

SEQ ID NO: 387674 - DNA, 15 bp, Homo sapiens
cctacaggttgctta

SEQ ID NO: 387675 - DNA, 15 bp, Homo sapiens
gcctacaggttgctt

SEQ ID NO: 387676 - DNA, 15 bp, Homo sapiens
ggcctacaggttgct

SEQ ID NO: 387677 - DNA, 15 bp, Homo sapiens
gggcctacaggttgc

SEQ ID NO: 387678 - DNA, 15 bp, Homo sapiens
tgggcctacaggttg

SEQ ID NO: 387679 - DNA, 15 bp, Homo sapiens
gtgggcctacaggtt

SEQ ID NO: 387680 - DNA, 15 bp, Homo sapiens
tgtgggcctacaggt

SEQ ID NO: 387681 - DNA, 15 bp, Homo sapiens
atgtgggcctacagg

SEQ ID NO: 387682 - DNA, 15 bp, Homo sapiens
tatgtgggcctacag

SEQ ID NO: 387683 - DNA, 15 bp, Homo sapiens
ttatgtgggcctaca

SEQ ID NO: 387684 - DNA, 15 bp, Homo sapiens
attatgtgggcctac

SEQ ID NO: 387685 - DNA, 15 bp, Homo sapiens
aattatgtgggccta

SEQ ID NO: 387686 - DNA, 15 bp, Homo sapiens
aaattatgtgggcct

SEQ ID NO: 387687 - DNA, 15 bp, Homo sapiens
gaaattatgtgggcc

SEQ ID NO: 387688 - DNA, 15 bp, Homo sapiens
ggaaattatgtgggc

SEQ ID NO: 387689 - DNA, 15 bp, Homo sapiens
aggaaattatgtggg

SEQ ID NO: 387690 - DNA, 15 bp, Homo sapiens
gaggaaattatgtgg

SEQ ID NO: 387691 - DNA, 15 bp, Homo sapiens
agaggaaattatgtg

SEQ ID NO: 387692 - DNA, 15 bp, Homo sapiens
aagaggaaattatgt

SEQ ID NO: 387693 - DNA, 15 bp, Homo sapiens
caagaggaaattatg

SEQ ID NO: 387694 - DNA, 15 bp, Homo sapiens
tcaagaggaaattat

SEQ ID NO: 387695 - DNA, 15 bp, Homo sapiens
atcaagaggaaatta

SEQ ID NO: 387696 - DNA, 15 bp, Homo sapiens
aatcaagaggaaatt

SEQ ID NO: 387697 - DNA, 15 bp, Homo sapiens
aaatcaagaggaaat

SEQ ID NO: 387698 - DNA, 15 bp, Homo sapiens
aaaatcaagaggaaa

SEQ ID NO: 387699 - DNA, 15 bp, Homo sapiens
aaaaatcaagaggaa

SEQ ID NO: 387700 - DNA, 15 bp, Homo sapiens
gaaaaatcaagagga

SEQ ID NO: 387701 - DNA, 15 bp, Homo sapiens
tgaaaaatcaagagg

SEQ ID NO: 387702 - DNA, 15 bp, Homo sapiens
ttgaaaaatcaagag

SEQ ID NO: 387703 - DNA, 15 bp, Homo sapiens
attgaaaaatcaaga

SEQ ID NO: 387704 - DNA, 15 bp, Homo sapiens
tattgaaaaatcaag

SEQ ID NO: 387705 - DNA, 15 bp, Homo sapiens
atattgaaaaatcaa

SEQ ID NO: 387706 - DNA, 15 bp, Homo sapiens
catattgaaaaatca

SEQ ID NO: 387707 - DNA, 15 bp, Homo sapiens
tcatattgaaaaatc

SEQ ID NO: 387708 - DNA, 15 bp, Homo sapiens
ttcatattgaaaaat

SEQ ID NO: 387709 - DNA, 15 bp, Homo sapiens
gttcatattgaaaaa

SEQ ID NO: 387710 - DNA, 15 bp, Homo sapiens
tgttcatattgaaaa

SEQ ID NO: 387711 - DNA, 15 bp, Homo sapiens
ctgttcatattgaaa

SEQ ID NO: 387712 - DNA, 15 bp, Homo sapiens
tctgttcatattgaa

SEQ ID NO: 387713 - DNA, 15 bp, Homo sapiens
ttctgttcatattga

SEQ ID NO: 387714 - DNA, 15 bp, Homo sapiens
tttctgttcatattg

SEQ ID NO: 387715 - DNA, 15 bp, Homo sapiens
ttttctgttcatatt

SEQ ID NO: 387716 - DNA, 15 bp, Homo sapiens
cttttctgttcatat

SEQ ID NO: 387717 - DNA, 15 bp, Homo sapiens
gcttttctgttcata

SEQ ID NO: 387718 - DNA, 15 bp, Homo sapiens
agcttttctgttcat

SEQ ID NO: 387719 - DNA, 15 bp, Homo sapiens
aagcttttctgttca

SEQ ID NO: 387720 - DNA, 15 bp, Homo sapiens
taagcttttctgttc

SEQ ID NO: 387721 - DNA, 15 bp, Homo sapiens
ctaagcttttctgtt

SEQ ID NO: 387722 - DNA, 15 bp, Homo sapiens
gctaagcttttctgt

SEQ ID NO: 387723 - DNA, 15 bp, Homo sapiens
tgctaagcttttctg

SEQ ID NO: 387724 - DNA, 15 bp, Homo sapiens
ctgctaagcttttct

SEQ ID NO: 387725 - DNA, 15 bp, Homo sapiens
tctgctaagcttttc

SEQ ID NO: 387726 - DNA, 15 bp, Homo sapiens
gtctgctaagctttt

SEQ ID NO: 387727 - DNA, 15 bp, Homo sapiens
tgtctgctaagcttt

SEQ ID NO: 387728 - DNA, 15 bp, Homo sapiens
atgtctgctaagctt

SEQ ID NO: 387729 - DNA, 15 bp, Homo sapiens
aatgtctgctaagct

SEQ ID NO: 387730 - DNA, 15 bp, Homo sapiens
aaatgtctgctaagc

SEQ ID NO: 387731 - DNA, 15 bp, Homo sapiens
gaaatgtctgctaag

SEQ ID NO: 387732 - DNA, 15 bp, Homo sapiens
tgaaatgtctgctaa

SEQ ID NO: 387733 - DNA, 15 bp, Homo sapiens
gtgaaatgtctgcta

SEQ ID NO: 387734 - DNA, 15 bp, Homo sapiens
tgtgaaatgtctgct

SEQ ID NO: 387735 - DNA, 15 bp, Homo sapiens
gtgtgaaatgtctgc

SEQ ID NO: 387736 - DNA, 15 bp, Homo sapiens
agtgtgaaatgtctg

SEQ ID NO: 387737 - DNA, 15 bp, Homo sapiens
gagtgtgaaatgtct

SEQ ID NO: 387738 - DNA, 15 bp, Homo sapiens
tgagtgtgaaatgtc

SEQ ID NO: 387739 - DNA, 15 bp, Homo sapiens
ttgagtgtgaaatgt

SEQ ID NO: 387740 - DNA, 15 bp, Homo sapiens
tttgagtgtgaaatg

SEQ ID NO: 387741 - DNA, 15 bp, Homo sapiens
atttgagtgtgaaat

SEQ ID NO: 387742 - DNA, 15 bp, Homo sapiens
catttgagtgtgaaa

SEQ ID NO: 387743 - DNA, 15 bp, Homo sapiens
acatttgagtgtgaa

SEQ ID NO: 387744 - DNA, 15 bp, Homo sapiens
tacatttgagtgtga

SEQ ID NO: 387745 - DNA, 15 bp, Homo sapiens
gtacatttgagtgtg

SEQ ID NO: 387746 - DNA, 15 bp, Homo sapiens
agtacatttgagtgt

SEQ ID NO: 387747 - DNA, 15 bp, Homo sapiens
tagtacatttgagtg

SEQ ID NO: 387748 - DNA, 15 bp, Homo sapiens
ctagtacatttgagt

SEQ ID NO: 387749 - DNA, 15 bp, Homo sapiens
actagtacatttgag

SEQ ID NO: 387750 - DNA, 15 bp, Homo sapiens
tactagtacatttga

SEQ ID NO: 387751 - DNA, 15 bp, Homo sapiens
ctactagtacatttg

SEQ ID NO: 387752 - DNA, 15 bp, Homo sapiens
actactagtacattt

SEQ ID NO: 387753 - DNA, 15 bp, Homo sapiens
cactactagtacatt

SEQ ID NO: 387754 - DNA, 15 bp, Homo sapiens
ccactactagtacat

SEQ ID NO: 387755 - DNA, 15 bp, Homo sapiens
tccactactagtaca

SEQ ID NO: 387756 - DNA, 15 bp, Homo sapiens
atccactactagtac

SEQ ID NO: 387757 - DNA, 15 bp, Homo sapiens
tatccactactagta

SEQ ID NO: 387758 - DNA, 15 bp, Homo sapiens
ctatccactactagt

SEQ ID NO: 387759 - DNA, 15 bp, Homo sapiens
actatccactactag

SEQ ID NO: 387760 - DNA, 15 bp, Homo sapiens
gactatccactacta

SEQ ID NO: 387761 - DNA, 15 bp, Homo sapiens
tgactatccactact

SEQ ID NO: 387762 - DNA, 15 bp, Homo sapiens
ttgactatccactac

SEQ ID NO: 387763 - DNA, 15 bp, Homo sapiens
gttgactatccacta

SEQ ID NO: 387764 - DNA, 15 bp, Homo sapiens
tgttgactatccact

SEQ ID NO: 387765 - DNA, 15 bp, Homo sapiens
atgttgactatccac

SEQ ID NO: 387766 - DNA, 15 bp, Homo sapiens
gatgttgactatcca

SEQ ID NO: 387767 - DNA, 15 bp, Homo sapiens
tgatgttgactatcc

SEQ ID NO: 387768 - DNA, 15 bp, Homo sapiens
gtgatgttgactatc

SEQ ID NO: 387769 - DNA, 15 bp, Homo sapiens
tgtgatgttgactat

SEQ ID NO: 387770 - DNA, 15 bp, Homo sapiens
atgtgatgttgacta

SEQ ID NO: 387771 - DNA, 15 bp, Homo sapiens
tatgtgatgttgact

SEQ ID NO: 387772 - DNA, 15 bp, Homo sapiens
gtatgtgatgttgac

SEQ ID NO: 387773 - DNA, 15 bp, Homo sapiens
tgtatgtgatgttga

SEQ ID NO: 387774 - DNA, 15 bp, Homo sapiens
ttgtatgtgatgttg

SEQ ID NO: 387775 - DNA, 15 bp, Homo sapiens
gttgtatgtgatgtt

SEQ ID NO: 387776 - DNA, 15 bp, Homo sapiens
agttgtatgtgatgt

SEQ ID NO: 387777 - DNA, 15 bp, Homo sapiens
gagttgtatgtgatg

SEQ ID NO: 387778 - DNA, 15 bp, Homo sapiens
tgagttgtatgtgat

SEQ ID NO: 387779 - DNA, 15 bp, Homo sapiens
ctgagttgtatgtga

SEQ ID NO: 387780 - DNA, 15 bp, Homo sapiens
tctgagttgtatgtg

SEQ ID NO: 387781 - DNA, 15 bp, Homo sapiens
ctctgagttgtatgt

SEQ ID NO: 387782 - DNA, 15 bp, Homo sapiens
actctgagttgtatg

SEQ ID NO: 387783 - DNA, 15 bp, Homo sapiens
tactctgagttgtat

SEQ ID NO: 387784 - DNA, 15 bp, Homo sapiens
atactctgagttgta

SEQ ID NO: 387785 - DNA, 15 bp, Homo sapiens
catactctgagttgt

SEQ ID NO: 387786 - DNA, 15 bp, Homo sapiens
gcatactctgagttg

SEQ ID NO: 387787 - DNA, 15 bp, Homo sapiens
tgcatactctgagtt

SEQ ID NO: 387788 - DNA, 15 bp, Homo sapiens
atgcatactctgagt

SEQ ID NO: 387789 - DNA, 15 bp, Homo sapiens
gatgcatactctgag

SEQ ID NO: 387790 - DNA, 15 bp, Homo sapiens
tgatgcatactctga

SEQ ID NO: 387791 - DNA, 15 bp, Homo sapiens
atgatgcatactctg

SEQ ID NO: 387792 - DNA, 15 bp, Homo sapiens
aatgatgcatactct

SEQ ID NO: 387793 - DNA, 15 bp, Homo sapiens
aaatgatgcatactc

SEQ ID NO: 387794 - DNA, 15 bp, Homo sapiens
caaatgatgcatact

SEQ ID NO: 387795 - DNA, 15 bp, Homo sapiens
tcaaatgatgcatac

SEQ ID NO: 387796 - DNA, 15 bp, Homo sapiens
ttcaaatgatgcata

SEQ ID NO: 387797 - DNA, 15 bp, Homo sapiens
cttcaaatgatgcat

SEQ ID NO: 387798 - DNA, 15 bp, Homo sapiens
acttcaaatgatgca

SEQ ID NO: 387799 - DNA, 15 bp, Homo sapiens
tacttcaaatgatgc

SEQ ID NO: 387800 - DNA, 15 bp, Homo sapiens
atacttcaaatgatg

SEQ ID NO: 387801 - DNA, 15 bp, Homo sapiens
catacttcaaatgat

SEQ ID NO: 387802 - DNA, 15 bp, Homo sapiens
ccatacttcaaatga

SEQ ID NO: 387803 - DNA, 15 bp, Homo sapiens
accatacttcaaatg

SEQ ID NO: 387804 - DNA, 15 bp, Homo sapiens
caccatacttcaaat

SEQ ID NO: 387805 - DNA, 15 bp, Homo sapiens
tcaccatacttcaaa

SEQ ID NO: 387806 - DNA, 15 bp, Homo sapiens
gtcaccatacttcaa

SEQ ID NO: 387807 - DNA, 15 bp, Homo sapiens
tgtcaccatacttca

SEQ ID NO: 387808 - DNA, 15 bp, Homo sapiens
atgtcaccatacttc

SEQ ID NO: 387809 - DNA, 15 bp, Homo sapiens
gatgtcaccatactt

SEQ ID NO: 387810 - DNA, 15 bp, Homo sapiens
tgatgtcaccatact

SEQ ID NO: 387811 - DNA, 15 bp, Homo sapiens
ttgatgtcaccatac

SEQ ID NO: 387812 - DNA, 15 bp, Homo sapiens
tttgatgtcaccata

SEQ ID NO: 387813 - DNA, 15 bp, Homo sapiens
ttttgatgtcaccat

SEQ ID NO: 387814 - DNA, 15 bp, Homo sapiens
tttttgatgtcacca

SEQ ID NO: 387815 - DNA, 15 bp, Homo sapiens
ttttttgatgtcacc

SEQ ID NO: 387816 - DNA, 15 bp, Homo sapiens
attttttgatgtcac

SEQ ID NO: 387817 - DNA, 15 bp, Homo sapiens
tattttttgatgtca

SEQ ID NO: 387818 - DNA, 15 bp, Homo sapiens
atattttttgatgtc

SEQ ID NO: 387819 - DNA, 15 bp, Homo sapiens
tatattttttgatgt

SEQ ID NO: 387820 - DNA, 15 bp, Homo sapiens
ttatattttttgatg

SEQ ID NO: 387821 - DNA, 15 bp, Homo sapiens
tttatattttttgat

SEQ ID NO: 387822 - DNA, 15 bp, Homo sapiens
ctttatattttttga

SEQ ID NO: 387823 - DNA, 15 bp, Homo sapiens
gctttatattttttg

SEQ ID NO: 387824 - DNA, 15 bp, Homo sapiens
tgctttatatttttt

SEQ ID NO: 387825 - DNA, 15 bp, Homo sapiens
ttgctttatattttt

SEQ ID NO: 387826 - DNA, 15 bp, Homo sapiens
attgctttatatttt

SEQ ID NO: 387827 - DNA, 15 bp, Homo sapiens
aattgctttatattt

SEQ ID NO: 387828 - DNA, 15 bp, Homo sapiens
aaattgctttatatt

SEQ ID NO: 387829 - DNA, 15 bp, Homo sapiens
aaaattgctttatat

SEQ ID NO: 387830 - DNA, 15 bp, Homo sapiens
aaaaattgctttata

SEQ ID NO: 387831 - DNA, 15 bp, Homo sapiens
caaaaattgctttat

SEQ ID NO: 387832 - DNA, 15 bp, Homo sapiens
acaaaaattgcttta

SEQ ID NO: 387833 - DNA, 15 bp, Homo sapiens
aacaaaaattgcttt

SEQ ID NO: 387834 - DNA, 15 bp, Homo sapiens
aaacaaaaattgctt

SEQ ID NO: 387835 - DNA, 15 bp, Homo sapiens
aaaacaaaaattgct

SEQ ID NO: 387836 - DNA, 15 bp, Homo sapiens
taaaacaaaaattgc

SEQ ID NO: 387837 - DNA, 15 bp, Homo sapiens
gtaaaacaaaaattg

SEQ ID NO: 387838 - DNA, 15 bp, Homo sapiens
agtaaaacaaaaatt

SEQ ID NO: 387839 - DNA, 15 bp, Homo sapiens
aagtaaaacaaaaat

SEQ ID NO: 387840 - DNA, 15 bp, Homo sapiens
aaagtaaaacaaaaa

SEQ ID NO: 387841 - DNA, 15 bp, Homo sapiens
gaaagtaaaacaaaa

SEQ ID NO: 387842 - DNA, 15 bp, Homo sapiens
agaaagtaaaacaaa

SEQ ID NO: 387843 - DNA, 15 bp, Homo sapiens
cagaaagtaaaacaa

SEQ ID NO: 387844 - DNA, 15 bp, Homo sapiens
tcagaaagtaaaaca

SEQ ID NO: 387845 - DNA, 15 bp, Homo sapiens
ttcagaaagtaaaac

SEQ ID NO: 387846 - DNA, 15 bp, Homo sapiens
gttcagaaagtaaaa

SEQ ID NO: 387847 - DNA, 15 bp, Homo sapiens
tgttcagaaagtaaa

SEQ ID NO: 387848 - DNA, 15 bp, Homo sapiens
ttgttcagaaagtaa

SEQ ID NO: 387849 - DNA, 15 bp, Homo sapiens
tttgttcagaaagta

SEQ ID NO: 387850 - DNA, 15 bp, Homo sapiens
atttgttcagaaagt

SEQ ID NO: 387851 - DNA, 15 bp, Homo sapiens
aatttgttcagaaag

SEQ ID NO: 387852 - DNA, 15 bp, Homo sapiens
gaatttgttcagaaa

SEQ ID NO: 387853 - DNA, 15 bp, Homo sapiens
tgaatttgttcagaa

SEQ ID NO: 387854 - DNA, 15 bp, Homo sapiens
ttgaatttgttcaga

SEQ ID NO: 387855 - DNA, 15 bp, Homo sapiens
gttgaatttgttcag

SEQ ID NO: 387856 - DNA, 15 bp, Homo sapiens
tgttgaatttgttca

SEQ ID NO: 387857 - DNA, 15 bp, Homo sapiens
ttgttgaatttgttc

SEQ ID NO: 387858 - DNA, 15 bp, Homo sapiens
cttgttgaatttgtt

SEQ ID NO: 387859 - DNA, 15 bp, Homo sapiens
gcttgttgaatttgt

SEQ ID NO: 387860 - DNA, 15 bp, Homo sapiens
tgcttgttgaatttg

SEQ ID NO: 387861 - DNA, 15 bp, Homo sapiens
ttgcttgttgaattt

SEQ ID NO: 387862 - DNA, 15 bp, Homo sapiens
tttgcttgttgaatt

SEQ ID NO: 387863 - DNA, 15 bp, Homo sapiens
atttgcttgttgaat

SEQ ID NO: 387864 - DNA, 15 bp, Homo sapiens
aatttgcttgttgaa

SEQ ID NO: 387865 - DNA, 15 bp, Homo sapiens
gaatttgcttgttga

SEQ ID NO: 387866 - DNA, 15 bp, Homo sapiens
tgaatttgcttgttg

SEQ ID NO: 387867 - DNA, 15 bp, Homo sapiens
ttgaatttgcttgtt

SEQ ID NO: 387868 - DNA, 15 bp, Homo sapiens
gttgaatttgcttgt

SEQ ID NO: 387869 - DNA, 15 bp, Homo sapiens
cgttgaatttgcttg

SEQ ID NO: 387870 - DNA, 15 bp, Homo sapiens
acgttgaatttgctt

SEQ ID NO: 387871 - DNA, 15 bp, Homo sapiens
cacgttgaatttgct

SEQ ID NO: 387872 - DNA, 15 bp, Homo sapiens
gcacgttgaatttgc

SEQ ID NO: 387873 - DNA, 15 bp, Homo sapiens
ggcacgttgaatttg

SEQ ID NO: 387874 - DNA, 15 bp, Homo sapiens
aggcacgttgaattt

SEQ ID NO: 387875 - DNA, 15 bp, Homo sapiens
gaggcacgttgaatt

SEQ ID NO: 387876 - DNA, 15 bp, Homo sapiens
tgaggcacgttgaat

SEQ ID NO: 387877 - DNA, 15 bp, Homo sapiens
gtgaggcacgttgaa

SEQ ID NO: 387878 - DNA, 15 bp, Homo sapiens
tgtgaggcacgttga

SEQ ID NO: 387879 - DNA, 15 bp, Homo sapiens
atgtgaggcacgttg

SEQ ID NO: 387880 - DNA, 15 bp, Homo sapiens
catgtgaggcacgtt

SEQ ID NO: 387881 - DNA, 15 bp, Homo sapiens
ccatgtgaggcacgt

SEQ ID NO: 387882 - DNA, 15 bp, Homo sapiens
cccatgtgaggcacg

SEQ ID NO: 387883 - DNA, 15 bp, Homo sapiens
ccccatgtgaggcac

SEQ ID NO: 387884 - DNA, 15 bp, Homo sapiens
gccccatgtgaggca

SEQ ID NO: 387885 - DNA, 15 bp, Homo sapiens
agccccatgtgaggc

SEQ ID NO: 387886 - DNA, 15 bp, Homo sapiens
tagccccatgtgagg

SEQ ID NO: 387887 - DNA, 15 bp, Homo sapiens
gtagccccatgtgag

SEQ ID NO: 387888 - DNA, 15 bp, Homo sapiens
tgtagccccatgtga

SEQ ID NO: 387889 - DNA, 15 bp, Homo sapiens
ctgtagccccatgtg

SEQ ID NO: 387890 - DNA, 15 bp, Homo sapiens
tctgtagccccatgt

SEQ ID NO: 387891 - DNA, 15 bp, Homo sapiens
ctctgtagccccatg

SEQ ID NO: 387892 - DNA, 15 bp, Homo sapiens
tctctgtagccccat

SEQ ID NO: 387893 - DNA, 15 bp, Homo sapiens
atctctgtagcccca

SEQ ID NO: 387894 - DNA, 15 bp, Homo sapiens
catctctgtagcccc

SEQ ID NO: 387895 - DNA, 15 bp, Homo sapiens
tcatctctgtagccc

SEQ ID NO: 387896 - DNA, 15 bp, Homo sapiens
ctcatctctgtagcc

SEQ ID NO: 387897 - DNA, 15 bp, Homo sapiens
tctcatctctgtagc

SEQ ID NO: 387898 - DNA, 15 bp, Homo sapiens
gtctcatctctgtag

SEQ ID NO: 387899 - DNA, 15 bp, Homo sapiens
tgtctcatctctgta

SEQ ID NO: 387900 - DNA, 15 bp, Homo sapiens
atgtctcatctctgt

SEQ ID NO: 387901 - DNA, 15 bp, Homo sapiens
tatgtctcatctctg

SEQ ID NO: 387902 - DNA, 15 bp, Homo sapiens
ctatgtctcatctct

SEQ ID NO: 387903 - DNA, 15 bp, Homo sapiens
actatgtctcatctc

SEQ ID NO: 387904 - DNA, 15 bp, Homo sapiens
gactatgtctcatct

SEQ ID NO: 387905 - DNA, 15 bp, Homo sapiens
ggactatgtctcatc

SEQ ID NO: 387906 - DNA, 15 bp, Homo sapiens
gggactatgtctcat

SEQ ID NO: 387907 - DNA, 15 bp, Homo sapiens
agggactatgtctca

SEQ ID NO: 387908 - DNA, 15 bp, Homo sapiens
aagggactatgtctc

SEQ ID NO: 387909 - DNA, 15 bp, Homo sapiens
gaagggactatgtct

SEQ ID NO: 387910 - DNA, 15 bp, Homo sapiens
agaagggactatgtc

SEQ ID NO: 387911 - DNA, 15 bp, Homo sapiens
aagaagggactatgt

SEQ ID NO: 387912 - DNA, 15 bp, Homo sapiens
aaagaagggactatg

SEQ ID NO: 387913 - DNA, 15 bp, Homo sapiens
gaaagaagggactat

SEQ ID NO: 387914 - DNA, 15 bp, Homo sapiens
tgaaagaagggacta

SEQ ID NO: 387915 - DNA, 15 bp, Homo sapiens
atgaaagaagggact

SEQ ID NO: 387916 - DNA, 15 bp, Homo sapiens
catgaaagaagggac

SEQ ID NO: 387917 - DNA, 15 bp, Homo sapiens
tcatgaaagaaggga

SEQ ID NO: 387918 - DNA, 15 bp, Homo sapiens
ttcatgaaagaaggg

SEQ ID NO: 387919 - DNA, 15 bp, Homo sapiens
cttcatgaaagaagg

SEQ ID NO: 387920 - DNA, 15 bp, Homo sapiens
acttcatgaaagaag

SEQ ID NO: 387921 - DNA, 15 bp, Homo sapiens
aacttcatgaaagaa

SEQ ID NO: 387922 - DNA, 15 bp, Homo sapiens
taacttcatgaaaga

SEQ ID NO: 387923 - DNA, 15 bp, Homo sapiens
ctaacttcatgaaag

SEQ ID NO: 387924 - DNA, 15 bp, Homo sapiens
cctaacttcatgaaa

SEQ ID NO: 387925 - DNA, 15 bp, Homo sapiens
tcctaacttcatgaa

SEQ ID NO: 387926 - DNA, 15 bp, Homo sapiens
ttcctaacttcatga

SEQ ID NO: 387927 - DNA, 15 bp, Homo sapiens
attcctaacttcatg

SEQ ID NO: 387928 - DNA, 15 bp, Homo sapiens
tattcctaacttcat

SEQ ID NO: 387929 - DNA, 15 bp, Homo sapiens
ttattcctaacttca

SEQ ID NO: 387930 - DNA, 15 bp, Homo sapiens
attattcctaacttc

SEQ ID NO: 387931 - DNA, 15 bp, Homo sapiens
aattattcctaactt

SEQ ID NO: 387932 - DNA, 15 bp, Homo sapiens
taattattcctaact

SEQ ID NO: 387933 - DNA, 15 bp, Homo sapiens
ttaattattcctaac

SEQ ID NO: 387934 - DNA, 15 bp, Homo sapiens
attaattattcctaa

SEQ ID NO: 387935 - DNA, 15 bp, Homo sapiens
aattaattattccta

SEQ ID NO: 387936 - DNA, 15 bp, Homo sapiens
caattaattattcct

SEQ ID NO: 387937 - DNA, 15 bp, Homo sapiens
acaattaattattcc

SEQ ID NO: 387938 - DNA, 15 bp, Homo sapiens
cacaattaattattc

SEQ ID NO: 387939 - DNA, 15 bp, Homo sapiens
acacaattaattatt

SEQ ID NO: 387940 - DNA, 15 bp, Homo sapiens
aacacaattaattat

SEQ ID NO: 387941 - DNA, 15 bp, Homo sapiens
aaacacaattaatta

SEQ ID NO: 387942 - DNA, 15 bp, Homo sapiens
caaacacaattaatt

SEQ ID NO: 387943 - DNA, 15 bp, Homo sapiens
tcaaacacaattaat

SEQ ID NO: 387944 - DNA, 15 bp, Homo sapiens
gtcaaacacaattaa

SEQ ID NO: 387945 - DNA, 15 bp, Homo sapiens
agtcaaacacaatta

SEQ ID NO: 387946 - DNA, 15 bp, Homo sapiens
cagtcaaacacaatt

SEQ ID NO: 387947 - DNA, 15 bp, Homo sapiens
tcagtcaaacacaat

SEQ ID NO: 387948 - DNA, 15 bp, Homo sapiens
ctcagtcaaacacaa

SEQ ID NO: 387949 - DNA, 15 bp, Homo sapiens
cctcagtcaaacaca

SEQ ID NO: 387950 - DNA, 15 bp, Homo sapiens
acctcagtcaaacac

SEQ ID NO: 387951 - DNA, 15 bp, Homo sapiens
aacctcagtcaaaca

SEQ ID NO: 387952 - DNA, 15 bp, Homo sapiens
taacctcagtcaaac

SEQ ID NO: 387953 - DNA, 15 bp, Homo sapiens
ctaacctcagtcaaa

SEQ ID NO: 387954 - DNA, 15 bp, Homo sapiens
gctaacctcagtcaa

SEQ ID NO: 387955 - DNA, 15 bp, Homo sapiens
agctaacctcagtca

SEQ ID NO: 387956 - DNA, 15 bp, Homo sapiens
cagctaacctcagtc

SEQ ID NO: 387957 - DNA, 15 bp, Homo sapiens
ccagctaacctcagt

SEQ ID NO: 387958 - DNA, 15 bp, Homo sapiens
accagctaacctcag

SEQ ID NO: 387959 - DNA, 15 bp, Homo sapiens
taccagctaacctca

SEQ ID NO: 387960 - DNA, 15 bp, Homo sapiens
ataccagctaacctc

SEQ ID NO: 387961 - DNA, 15 bp, Homo sapiens
tataccagctaacct

SEQ ID NO: 387962 - DNA, 15 bp, Homo sapiens
ttataccagctaacc

SEQ ID NO: 387963 - DNA, 15 bp, Homo sapiens
attataccagctaac

SEQ ID NO: 387964 - DNA, 15 bp, Homo sapiens
tattataccagctaa

SEQ ID NO: 387965 - DNA, 15 bp, Homo sapiens
ctattataccagcta

SEQ ID NO: 387966 - DNA, 15 bp, Homo sapiens
tctattataccagct

SEQ ID NO: 387967 - DNA, 15 bp, Homo sapiens
ctctattataccagc

SEQ ID NO: 387968 - DNA, 15 bp, Homo sapiens
tctctattataccag

SEQ ID NO: 387969 - DNA, 15 bp, Homo sapiens
atctctattatacca

SEQ ID NO: 387970 - DNA, 15 bp, Homo sapiens
aatctctattatacc

SEQ ID NO: 387971 - DNA, 15 bp, Homo sapiens
caatctctattatac

SEQ ID NO: 387972 - DNA, 15 bp, Homo sapiens
acaatctctattata

SEQ ID NO: 387973 - DNA, 15 bp, Homo sapiens
cacaatctctattat

SEQ ID NO: 387974 - DNA, 15 bp, Homo sapiens
acacaatctctatta

SEQ ID NO: 387975 - DNA, 15 bp, Homo sapiens
cacacaatctctatt

SEQ ID NO: 387976 - DNA, 15 bp, Homo sapiens
ccacacaatctctat

SEQ ID NO: 387977 - DNA, 15 bp, Homo sapiens
cccacacaatctcta

SEQ ID NO: 387978 - DNA, 15 bp, Homo sapiens
tcccacacaatctct

SEQ ID NO: 387979 - DNA, 15 bp, Homo sapiens
atcccacacaatctc

SEQ ID NO: 387980 - DNA, 15 bp, Homo sapiens
gatcccacacaatct

SEQ ID NO: 387981 - DNA, 15 bp, Homo sapiens
tgatcccacacaatc

SEQ ID NO: 387982 - DNA, 15 bp, Homo sapiens
ctgatcccacacaat

SEQ ID NO: 387983 - DNA, 15 bp, Homo sapiens
tctgatcccacacaa

SEQ ID NO: 387984 - DNA, 15 bp, Homo sapiens
ctctgatcccacaca

SEQ ID NO: 387985 - DNA, 15 bp, Homo sapiens
cctctgatcccacac

SEQ ID NO: 387986 - DNA, 15 bp, Homo sapiens
tcctctgatcccaca

SEQ ID NO: 387987 - DNA, 15 bp, Homo sapiens
ttcctctgatcccac

SEQ ID NO: 387988 - DNA, 15 bp, Homo sapiens
tttcctctgatccca

SEQ ID NO: 387989 - DNA, 15 bp, Homo sapiens
ttttcctctgatccc

SEQ ID NO: 387990 - DNA, 15 bp, Homo sapiens
cttttcctctgatcc

SEQ ID NO: 387991 - DNA, 15 bp, Homo sapiens
ccttttcctctgatc

SEQ ID NO: 387992 - DNA, 15 bp, Homo sapiens
accttttcctctgat

SEQ ID NO: 387993 - DNA, 15 bp, Homo sapiens
caccttttcctctga

SEQ ID NO: 387994 - DNA, 15 bp, Homo sapiens
tcaccttttcctctg

SEQ ID NO: 387995 - DNA, 15 bp, Homo sapiens
atcaccttttcctct

SEQ ID NO: 387996 - DNA, 15 bp, Homo sapiens
gatcaccttttcctc

SEQ ID NO: 387997 - DNA, 15 bp, Homo sapiens
tgatcaccttttcct

SEQ ID NO: 387998 - DNA, 15 bp, Homo sapiens
ctgatcaccttttcc

SEQ ID NO: 387999 - DNA, 15 bp, Homo sapiens
tctgatcaccttttc

SEQ ID NO: 388000 - DNA, 15 bp, Homo sapiens
ttctgatcacctttt

SEQ ID NO: 388001 - DNA, 15 bp, Homo sapiens
attctgatcaccttt

SEQ ID NO: 388002 - DNA, 15 bp, Homo sapiens
aattctgatcacctt

SEQ ID NO: 388003 - DNA, 15 bp, Homo sapiens
aaattctgatcacct

SEQ ID NO: 388004 - DNA, 15 bp, Homo sapiens
caaattctgatcacc

SEQ ID NO: 388005 - DNA, 15 bp, Homo sapiens
acaaattctgatcac

SEQ ID NO: 388006 - DNA, 15 bp, Homo sapiens
cacaaattctgatca

SEQ ID NO: 388007 - DNA, 15 bp, Homo sapiens
acacaaattctgatc

SEQ ID NO: 388008 - DNA, 15 bp, Homo sapiens
aacacaaattctgat

SEQ ID NO: 388009 - DNA, 15 bp, Homo sapiens
taacacaaattctga

SEQ ID NO: 388010 - DNA, 15 bp, Homo sapiens
ataacacaaattctg

SEQ ID NO: 388011 - DNA, 15 bp, Homo sapiens
cataacacaaattct

SEQ ID NO: 388012 - DNA, 15 bp, Homo sapiens
gcataacacaaattc

SEQ ID NO: 388013 - DNA, 15 bp, Homo sapiens
tgcataacacaaatt

SEQ ID NO: 388014 - DNA, 15 bp, Homo sapiens
ttgcataacacaaat

SEQ ID NO: 388015 - DNA, 15 bp, Homo sapiens
gttgcataacacaaa

SEQ ID NO: 388016 - DNA, 15 bp, Homo sapiens
agttgcataacacaa

SEQ ID NO: 388017 - DNA, 15 bp, Homo sapiens
tagttgcataacaca

SEQ ID NO: 388018 - DNA, 15 bp, Homo sapiens
atagttgcataacac

SEQ ID NO: 388019 - DNA, 15 bp, Homo sapiens
aatagttgcataaca

SEQ ID NO: 388020 - DNA, 15 bp, Homo sapiens
aaatagttgcataac

SEQ ID NO: 388021 - DNA, 15 bp, Homo sapiens
aaaatagttgcataa

SEQ ID NO: 388022 - DNA, 15 bp, Homo sapiens
taaaatagttgcata

SEQ ID NO: 388023 - DNA, 15 bp, Homo sapiens
ctaaaatagttgcat

SEQ ID NO: 388024 - DNA, 15 bp, Homo sapiens
tctaaaatagttgca

SEQ ID NO: 388025 - DNA, 15 bp, Homo sapiens
atctaaaatagttgc

SEQ ID NO: 388026 - DNA, 15 bp, Homo sapiens
catctaaaatagttg

SEQ ID NO: 388027 - DNA, 15 bp, Homo sapiens
tcatctaaaatagtt

SEQ ID NO: 388028 - DNA, 15 bp, Homo sapiens
ctcatctaaaatagt

SEQ ID NO: 388029 - DNA, 15 bp, Homo sapiens
gctcatctaaaatag

SEQ ID NO: 388030 - DNA, 15 bp, Homo sapiens
agctcatctaaaata

SEQ ID NO: 388031 - DNA, 15 bp, Homo sapiens
cagctcatctaaaat

SEQ ID NO: 388032 - DNA, 15 bp, Homo sapiens
acagctcatctaaaa

SEQ ID NO: 388033 - DNA, 15 bp, Homo sapiens
cacagctcatctaaa

SEQ ID NO: 388034 - DNA, 15 bp, Homo sapiens
tcacagctcatctaa

SEQ ID NO: 388035 - DNA, 15 bp, Homo sapiens
ctcacagctcatcta

SEQ ID NO: 388036 - DNA, 15 bp, Homo sapiens
cctcacagctcatct

SEQ ID NO: 388037 - DNA, 15 bp, Homo sapiens
tcctcacagctcatc

SEQ ID NO: 388038 - DNA, 15 bp, Homo sapiens
ttcctcacagctcat

SEQ ID NO: 388039 - DNA, 15 bp, Homo sapiens
tttcctcacagctca

SEQ ID NO: 388040 - DNA, 15 bp, Homo sapiens
atttcctcacagctc

SEQ ID NO: 388041 - DNA, 15 bp, Homo sapiens
gatttcctcacagct

SEQ ID NO: 388042 - DNA, 15 bp, Homo sapiens
ggatttcctcacagc

SEQ ID NO: 388043 - DNA, 15 bp, Homo sapiens
gggatttcctcacag

SEQ ID NO: 388044 - DNA, 15 bp, Homo sapiens
agggatttcctcaca

SEQ ID NO: 388045 - DNA, 15 bp, Homo sapiens
cagggatttcctcac

SEQ ID NO: 388046 - DNA, 15 bp, Homo sapiens
gcagggatttcctca

SEQ ID NO: 388047 - DNA, 15 bp, Homo sapiens
agcagggatttcctc

SEQ ID NO: 388048 - DNA, 15 bp, Homo sapiens
tagcagggatttcct

SEQ ID NO: 388049 - DNA, 15 bp, Homo sapiens
ctagcagggatttcc

SEQ ID NO: 388050 - DNA, 15 bp, Homo sapiens
tctagcagggatttc

SEQ ID NO: 388051 - DNA, 15 bp, Homo sapiens
ctctagcagggattt

SEQ ID NO: 388052 - DNA, 15 bp, Homo sapiens
tctctagcagggatt

SEQ ID NO: 388053 - DNA, 15 bp, Homo sapiens
atctctagcagggat

SEQ ID NO: 388054 - DNA, 15 bp, Homo sapiens
aatctctagcaggga

SEQ ID NO: 388055 - DNA, 15 bp, Homo sapiens
aaatctctagcaggg

SEQ ID NO: 388056 - DNA, 15 bp, Homo sapiens
caaatctctagcagg

SEQ ID NO: 388057 - DNA, 15 bp, Homo sapiens
gcaaatctctagcag

SEQ ID NO: 388058 - DNA, 15 bp, Homo sapiens
agcaaatctctagca

SEQ ID NO: 388059 - DNA, 15 bp, Homo sapiens
tagcaaatctctagc

SEQ ID NO: 388060 - DNA, 15 bp, Homo sapiens
gtagcaaatctctag

SEQ ID NO: 388061 - DNA, 15 bp, Homo sapiens
agtagcaaatctcta

SEQ ID NO: 388062 - DNA, 15 bp, Homo sapiens
gagtagcaaatctct

SEQ ID NO: 388063 - DNA, 15 bp, Homo sapiens
agagtagcaaatctc

SEQ ID NO: 388064 - DNA, 15 bp, Homo sapiens
cagagtagcaaatct

SEQ ID NO: 388065 - DNA, 15 bp, Homo sapiens
acagagtagcaaatc

SEQ ID NO: 388066 - DNA, 15 bp, Homo sapiens
cacagagtagcaaat

SEQ ID NO: 388067 - DNA, 15 bp, Homo sapiens
gcacagagtagcaaa

SEQ ID NO: 388068 - DNA, 15 bp, Homo sapiens
agcacagagtagcaa

SEQ ID NO: 388069 - DNA, 15 bp, Homo sapiens
aagcacagagtagca

SEQ ID NO: 388070 - DNA, 15 bp, Homo sapiens
aaagcacagagtagc

SEQ ID NO: 388071 - DNA, 15 bp, Homo sapiens
gaaagcacagagtag

SEQ ID NO: 388072 - DNA, 15 bp, Homo sapiens
ggaaagcacagagta

SEQ ID NO: 388073 - DNA, 15 bp, Homo sapiens
tggaaagcacagagt

SEQ ID NO: 388074 - DNA, 15 bp, Homo sapiens
gtggaaagcacagag

SEQ ID NO: 388075 - DNA, 15 bp, Homo sapiens
tgtggaaagcacaga

SEQ ID NO: 388076 - DNA, 15 bp, Homo sapiens
ttgtggaaagcacag

SEQ ID NO: 388077 - DNA, 15 bp, Homo sapiens
tttgtggaaagcaca

SEQ ID NO: 388078 - DNA, 15 bp, Homo sapiens
atttgtggaaagcac

SEQ ID NO: 388079 - DNA, 15 bp, Homo sapiens
tatttgtggaaagca

SEQ ID NO: 388080 - DNA, 15 bp, Homo sapiens
ctatttgtggaaagc

SEQ ID NO: 388081 - DNA, 15 bp, Homo sapiens
gctatttgtggaaag

SEQ ID NO: 388082 - DNA, 15 bp, Homo sapiens
agctatttgtggaaa

SEQ ID NO: 388083 - DNA, 15 bp, Homo sapiens
cagctatttgtggaa

SEQ ID NO: 388084 - DNA, 15 bp, Homo sapiens
tcagctatttgtgga

SEQ ID NO: 388085 - DNA, 15 bp, Homo sapiens
gtcagctatttgtgg

SEQ ID NO: 388086 - DNA, 15 bp, Homo sapiens
tgtcagctatttgtg

SEQ ID NO: 388087 - DNA, 15 bp, Homo sapiens
atgtcagctatttgt

SEQ ID NO: 388088 - DNA, 15 bp, Homo sapiens
tatgtcagctatttg

SEQ ID NO: 388089 - DNA, 15 bp, Homo sapiens
ctatgtcagctattt

SEQ ID NO: 388090 - DNA, 15 bp, Homo sapiens
gctatgtcagctatt

SEQ ID NO: 388091 - DNA, 15 bp, Homo sapiens
ggctatgtcagctat

SEQ ID NO: 388092 - DNA, 15 bp, Homo sapiens
tggctatgtcagcta

SEQ ID NO: 388093 - DNA, 15 bp, Homo sapiens
ctggctatgtcagct

SEQ ID NO: 388094 - DNA, 15 bp, Homo sapiens
actggctatgtcagc

SEQ ID NO: 388095 - DNA, 15 bp, Homo sapiens
aactggctatgtcag

SEQ ID NO: 388096 - DNA, 15 bp, Homo sapiens
aaactggctatgtca

SEQ ID NO: 388097 - DNA, 15 bp, Homo sapiens
caaactggctatgtc

SEQ ID NO: 388098 - DNA, 15 bp, Homo sapiens
ccaaactggctatgt

SEQ ID NO: 388099 - DNA, 15 bp, Homo sapiens
tccaaactggctatg

SEQ ID NO: 388100 - DNA, 15 bp, Homo sapiens
ttccaaactggctat

SEQ ID NO: 388101 - DNA, 15 bp, Homo sapiens
tttccaaactggcta

SEQ ID NO: 388102 - DNA, 15 bp, Homo sapiens
atttccaaactggct

SEQ ID NO: 388103 - DNA, 15 bp, Homo sapiens
tatttccaaactggc

SEQ ID NO: 388104 - DNA, 15 bp, Homo sapiens
ttatttccaaactgg

SEQ ID NO: 388105 - DNA, 15 bp, Homo sapiens
tttatttccaaactg

SEQ ID NO: 388106 - DNA, 15 bp, Homo sapiens
atttatttccaaact

SEQ ID NO: 388107 - DNA, 15 bp, Homo sapiens
tatttatttccaaac

SEQ ID NO: 388108 - DNA, 15 bp, Homo sapiens
gtatttatttccaaa

SEQ ID NO: 388109 - DNA, 15 bp, Homo sapiens
agtatttatttccaa

SEQ ID NO: 388110 - DNA, 15 bp, Homo sapiens
aagtatttatttcca

SEQ ID NO: 388111 - DNA, 15 bp, Homo sapiens
aaagtatttatttcc

SEQ ID NO: 388112 - DNA, 15 bp, Homo sapiens
caaagtatttatttc

SEQ ID NO: 388113 - DNA, 15 bp, Homo sapiens
ccaaagtatttattt

SEQ ID NO: 388114 - DNA, 15 bp, Homo sapiens
accaaagtatttatt

SEQ ID NO: 388115 - DNA, 15 bp, Homo sapiens
caccaaagtatttat

SEQ ID NO: 388116 - DNA, 15 bp, Homo sapiens
tcaccaaagtattta

SEQ ID NO: 388117 - DNA, 15 bp, Homo sapiens
atcaccaaagtattt

SEQ ID NO: 388118 - DNA, 15 bp, Homo sapiens
aatcaccaaagtatt

SEQ ID NO: 388119 - DNA, 15 bp, Homo sapiens
aaatcaccaaagtat

SEQ ID NO: 388120 - DNA, 15 bp, Homo sapiens
taaatcaccaaagta

SEQ ID NO: 388121 - DNA, 15 bp, Homo sapiens
ataaatcaccaaagt

SEQ ID NO: 388122 - DNA, 15 bp, Homo sapiens
aataaatcaccaaag

SEQ ID NO: 388123 - DNA, 15 bp, Homo sapiens
aaataaatcaccaaa

SEQ ID NO: 388124 - DNA, 15 bp, Homo sapiens
aaaataaatcaccaa

SEQ ID NO: 388125 - DNA, 15 bp, Homo sapiens
taaaataaatcacca

SEQ ID NO: 388126 - DNA, 15 bp, Homo sapiens
ataaaataaatcacc

SEQ ID NO: 388127 - DNA, 15 bp, Homo sapiens
aataaaataaatcac

SEQ ID NO: 388128 - DNA, 15 bp, Homo sapiens
aaataaaataaatca

SEQ ID NO: 388129 - DNA, 15 bp, Homo sapiens
aaaataaaataaatc

SEQ ID NO: 388130 - DNA, 15 bp, Homo sapiens
taaaataaaataaat

SEQ ID NO: 388131 - DNA, 15 bp, Homo sapiens
gtaaaataaaataaa

SEQ ID NO: 388132 - DNA, 15 bp, Homo sapiens
agtaaaataaaataa

SEQ ID NO: 388133 - DNA, 15 bp, Homo sapiens
aagtaaaataaaata

SEQ ID NO: 388134 - DNA, 15 bp, Homo sapiens
aaagtaaaataaaat

SEQ ID NO: 388135 - DNA, 15 bp, Homo sapiens
taaagtaaaataaaa

SEQ ID NO: 388136 - DNA, 15 bp, Homo sapiens
ataaagtaaaataaa

SEQ ID NO: 388137 - DNA, 15 bp, Homo sapiens
aataaagtaaaataa

SEQ ID NO: 388138 - DNA, 15 bp, Homo sapiens
aaataaagtaaaata

SEQ ID NO: 388139 - DNA, 15 bp, Homo sapiens
gaaataaagtaaaat

SEQ ID NO: 388140 - DNA, 15 bp, Homo sapiens
tgaaataaagtaaaa

SEQ ID NO: 388141 - DNA, 15 bp, Homo sapiens
atgaaataaagtaaa

SEQ ID NO: 388142 - DNA, 15 bp, Homo sapiens
aatgaaataaagtaa

SEQ ID NO: 388143 - DNA, 15 bp, Homo sapiens
aaatgaaataaagta

SEQ ID NO: 388144 - DNA, 15 bp, Homo sapiens
aaaatgaaataaagt

SEQ ID NO: 388145 - DNA, 15 bp, Homo sapiens
caaaatgaaataaag

SEQ ID NO: 388146 - DNA, 15 bp, Homo sapiens
tcaaaatgaaataaa

SEQ ID NO: 388147 - DNA, 15 bp, Homo sapiens
ctcaaaatgaaataa

SEQ ID NO: 388148 - DNA, 15 bp, Homo sapiens
tctcaaaatgaaata

SEQ ID NO: 388149 - DNA, 15 bp, Homo sapiens
gtctcaaaatgaaat

SEQ ID NO: 388150 - DNA, 15 bp, Homo sapiens
tgtctcaaaatgaaa

SEQ ID NO: 388151 - DNA, 15 bp, Homo sapiens
ctgtctcaaaatgaa

SEQ ID NO: 388152 - DNA, 15 bp, Homo sapiens
tctgtctcaaaatga

SEQ ID NO: 388153 - DNA, 15 bp, Homo sapiens
ctctgtctcaaaatg

SEQ ID NO: 388154 - DNA, 15 bp, Homo sapiens
actctgtctcaaaat

SEQ ID NO: 388155 - DNA, 15 bp, Homo sapiens
gactctgtctcaaaa

SEQ ID NO: 388156 - DNA, 15 bp, Homo sapiens
agactctgtctcaaa

SEQ ID NO: 388157 - DNA, 15 bp, Homo sapiens
gagactctgtctcaa

SEQ ID NO: 388158 - DNA, 15 bp, Homo sapiens
cgagactctgtctca

SEQ ID NO: 388159 - DNA, 15 bp, Homo sapiens
gcgagactctgtctc

SEQ ID NO: 388160 - DNA, 15 bp, Homo sapiens
agcaacagagcgaga

SEQ ID NO: 388161 - DNA, 15 bp, Homo sapiens
cagcaacagagcgag

SEQ ID NO: 388162 - DNA, 15 bp, Homo sapiens
tcagcaacagagcga

SEQ ID NO: 388163 - DNA, 15 bp, Homo sapiens
ctcagcaacagagcg

SEQ ID NO: 388164 - DNA, 15 bp, Homo sapiens
cctcagcaacagagc

SEQ ID NO: 388165 - DNA, 15 bp, Homo sapiens
gcctcagcaacagag

SEQ ID NO: 388166 - DNA, 15 bp, Homo sapiens
agcctcagcaacaga

SEQ ID NO: 388167 - DNA, 15 bp, Homo sapiens
cagcctcagcaacag

SEQ ID NO: 388168 - DNA, 15 bp, Homo sapiens
ccagcctcagcaaca

SEQ ID NO: 388169 - DNA, 15 bp, Homo sapiens
tccagcctcagcaac

SEQ ID NO: 388170 - DNA, 15 bp, Homo sapiens
ctccagcctcagcaa

SEQ ID NO: 388171 - DNA, 15 bp, Homo sapiens
actccagcctcagca

SEQ ID NO: 388172 - DNA, 15 bp, Homo sapiens
cactccagcctcagc

SEQ ID NO: 388173 - DNA, 15 bp, Homo sapiens
acactccagcctcag

SEQ ID NO: 388174 - DNA, 15 bp, Homo sapiens
tacactccagcctca

SEQ ID NO: 388175 - DNA, 15 bp, Homo sapiens
ctacactccagcctc

SEQ ID NO: 388176 - DNA, 15 bp, Homo sapiens
actacactccagcct

SEQ ID NO: 388177 - DNA, 15 bp, Homo sapiens
tactacactccagcc

SEQ ID NO: 388178 - DNA, 15 bp, Homo sapiens
ctactacactccagc

SEQ ID NO: 388179 - DNA, 15 bp, Homo sapiens
gctactacactccag

SEQ ID NO: 388180 - DNA, 15 bp, Homo sapiens
tgctactacactcca

SEQ ID NO: 388181 - DNA, 15 bp, Homo sapiens
atgctactacactcc

SEQ ID NO: 388182 - DNA, 15 bp, Homo sapiens
catgctactacactc

SEQ ID NO: 388183 - DNA, 15 bp, Homo sapiens
tcatgctactacact

SEQ ID NO: 388184 - DNA, 15 bp, Homo sapiens
atcatgctactacac

SEQ ID NO: 388185 - DNA, 15 bp, Homo sapiens
gatcatgctactaca

SEQ ID NO: 388186 - DNA, 15 bp, Homo sapiens
agatcatgctactac

SEQ ID NO: 388187 - DNA, 15 bp, Homo sapiens
aagatcatgctacta

SEQ ID NO: 388188 - DNA, 15 bp, Homo sapiens
caagatcatgctact

SEQ ID NO: 388189 - DNA, 15 bp, Homo sapiens
ccaagatcatgctac

SEQ ID NO: 388190 - DNA, 15 bp, Homo sapiens
gccaagatcatgcta

SEQ ID NO: 388191 - DNA, 15 bp, Homo sapiens
agccaagatcatgct

SEQ ID NO: 388192 - DNA, 15 bp, Homo sapiens
atgagccaagatcat

SEQ ID NO: 388193 - DNA, 15 bp, Homo sapiens
aatgagccaagatca

SEQ ID NO: 388194 - DNA, 15 bp, Homo sapiens
ttgcaatgagccaag

SEQ ID NO: 388195 - DNA, 15 bp, Homo sapiens
gttgcaatgagccaa

SEQ ID NO: 388196 - DNA, 15 bp, Homo sapiens
ggttgcaatgagcca

SEQ ID NO: 388197 - DNA, 15 bp, Homo sapiens
aggttgcaatgagcc

SEQ ID NO: 388198 - DNA, 15 bp, Homo sapiens
gaggttgcaatgagc

SEQ ID NO: 388199 - DNA, 15 bp, Homo sapiens
ggaggttgcaatgag

SEQ ID NO: 388200 - DNA, 15 bp, Homo sapiens
cggaggttgcaatga

SEQ ID NO: 388201 - DNA, 15 bp, Homo sapiens
gcggaggttgcaatg

SEQ ID NO: 388202 - DNA, 15 bp, Homo sapiens
ggcggaggttgcaat

SEQ ID NO: 388203 - DNA, 15 bp, Homo sapiens
aggcggaggttgcaa

SEQ ID NO: 388204 - DNA, 15 bp, Homo sapiens
gtcgcttgaacctgg

SEQ ID NO: 388205 - DNA, 15 bp, Homo sapiens
agtcgcttgaacctg

SEQ ID NO: 388206 - DNA, 15 bp, Homo sapiens
gagtcgcttgaacct

SEQ ID NO: 388207 - DNA, 15 bp, Homo sapiens
agagtcgcttgaacc

SEQ ID NO: 388208 - DNA, 15 bp, Homo sapiens
aagagtcgcttgaac

SEQ ID NO: 388209 - DNA, 15 bp, Homo sapiens
taagagtcgcttgaa

SEQ ID NO: 388210 - DNA, 15 bp, Homo sapiens
ataagagtcgcttga

SEQ ID NO: 388211 - DNA, 15 bp, Homo sapiens
cataagagtcgcttg

SEQ ID NO: 388212 - DNA, 15 bp, Homo sapiens
acataagagtcgctt

SEQ ID NO: 388213 - DNA, 15 bp, Homo sapiens
gacataagagtcgct

SEQ ID NO: 388214 - DNA, 15 bp, Homo sapiens
cgacataagagtcgc

SEQ ID NO: 388215 - DNA, 15 bp, Homo sapiens
gcgacataagagtcg

SEQ ID NO: 388216 - DNA, 15 bp, Homo sapiens
tgcgacataagagtc

SEQ ID NO: 388217 - DNA, 15 bp, Homo sapiens
ctgcgacataagagt

SEQ ID NO: 388218 - DNA, 15 bp, Homo sapiens
gctgcgacataagag

SEQ ID NO: 388219 - DNA, 15 bp, Homo sapiens
ggctgcgacataaga

SEQ ID NO: 388220 - DNA, 15 bp, Homo sapiens
aggctgcgacataag

SEQ ID NO: 388221 - DNA, 15 bp, Homo sapiens
gaggctgcgacataa

SEQ ID NO: 388222 - DNA, 15 bp, Homo sapiens
cgaggctgcgacata

SEQ ID NO: 388223 - DNA, 15 bp, Homo sapiens
gcgaggctgcgacat

SEQ ID NO: 388224 - DNA, 15 bp, Homo sapiens
tgcgaggctgcgaca

SEQ ID NO: 388225 - DNA, 15 bp, Homo sapiens
ttgcgaggctgcgac

SEQ ID NO: 388226 - DNA, 15 bp, Homo sapiens
cttgcgaggctgcga

SEQ ID NO: 388227 - DNA, 15 bp, Homo sapiens
acttgcgaggctgcg

SEQ ID NO: 388228 - DNA, 15 bp, Homo sapiens
tacttgcgaggctgc

SEQ ID NO: 388229 - DNA, 15 bp, Homo sapiens
ctacttgcgaggctg

SEQ ID NO: 388230 - DNA, 15 bp, Homo sapiens
gctacttgcgaggct

SEQ ID NO: 388231 - DNA, 15 bp, Homo sapiens
agctacttgcgaggc

SEQ ID NO: 388232 - DNA, 15 bp, Homo sapiens
cagctacttgcgagg

SEQ ID NO: 388233 - DNA, 15 bp, Homo sapiens
ccagctacttgcgag

SEQ ID NO: 388234 - DNA, 15 bp, Homo sapiens
cccagctacttgcga

SEQ ID NO: 388235 - DNA, 15 bp, Homo sapiens
tcccagctacttgcg

SEQ ID NO: 388236 - DNA, 15 bp, Homo sapiens
atcccagctacttgc

SEQ ID NO: 388237 - DNA, 15 bp, Homo sapiens
gcatgcctgtaatcc

SEQ ID NO: 388238 - DNA, 15 bp, Homo sapiens
tgcatgcctgtaatc

SEQ ID NO: 388239 - DNA, 15 bp, Homo sapiens
gtgcatgcctgtaat

SEQ ID NO: 388240 - DNA, 15 bp, Homo sapiens
ggtgcatgcctgtaa

SEQ ID NO: 388241 - DNA, 15 bp, Homo sapiens
atggtggtgcatgcc

SEQ ID NO: 388242 - DNA, 15 bp, Homo sapiens
catggtggtgcatgc

SEQ ID NO: 388243 - DNA, 15 bp, Homo sapiens
gcatggtggtgcatg

SEQ ID NO: 388244 - DNA, 15 bp, Homo sapiens
ggcatggtggtgcat

SEQ ID NO: 388245 - DNA, 15 bp, Homo sapiens
aggcatggtggtgca

SEQ ID NO: 388246 - DNA, 15 bp, Homo sapiens
caggcatggtggtgc

SEQ ID NO: 388247 - DNA, 15 bp, Homo sapiens
ccaggcatggtggtg

SEQ ID NO: 388248 - DNA, 15 bp, Homo sapiens
gccaggcatggtggt

SEQ ID NO: 388249 - DNA, 15 bp, Homo sapiens
tagccaggcatggtg

SEQ ID NO: 388250 - DNA, 15 bp, Homo sapiens
ttagccaggcatggt

SEQ ID NO: 388251 - DNA, 15 bp, Homo sapiens
attagccaggcatgg

SEQ ID NO: 388252 - DNA, 15 bp, Homo sapiens
tattagccaggcatg

SEQ ID NO: 388253 - DNA, 15 bp, Homo sapiens
atattagccaggcat

SEQ ID NO: 388254 - DNA, 15 bp, Homo sapiens
aatattagccaggca

SEQ ID NO: 388255 - DNA, 15 bp, Homo sapiens
aaatattagccaggc

SEQ ID NO: 388256 - DNA, 15 bp, Homo sapiens
caaatattagccagg

SEQ ID NO: 388257 - DNA, 15 bp, Homo sapiens
acaaatattagccag

SEQ ID NO: 388258 - DNA, 15 bp, Homo sapiens
tacaaatattagcca

SEQ ID NO: 388259 - DNA, 15 bp, Homo sapiens
atacaaatattagcc

SEQ ID NO: 388260 - DNA, 15 bp, Homo sapiens
aatacaaatattagc

SEQ ID NO: 388261 - DNA, 15 bp, Homo sapiens
aaatacaaatattag

SEQ ID NO: 388262 - DNA, 15 bp, Homo sapiens
aaaatacaaatatta

SEQ ID NO: 388263 - DNA, 15 bp, Homo sapiens
aaaaatacaaatatt

SEQ ID NO: 388264 - DNA, 15 bp, Homo sapiens
taaaaatacaaatat

SEQ ID NO: 388265 - DNA, 15 bp, Homo sapiens
ctaaaaatacaaata

SEQ ID NO: 388266 - DNA, 15 bp, Homo sapiens
actaaaaatacaaat

SEQ ID NO: 388267 - DNA, 15 bp, Homo sapiens
gtactaaaaatacaa

SEQ ID NO: 388268 - DNA, 15 bp, Homo sapiens
tgtactaaaaataca

SEQ ID NO: 388269 - DNA, 15 bp, Homo sapiens
ctgtactaaaaatac

SEQ ID NO: 388270 - DNA, 15 bp, Homo sapiens
tctgtactaaaaata

SEQ ID NO: 388271 - DNA, 15 bp, Homo sapiens
atctgtactaaaaat

SEQ ID NO: 388272 - DNA, 15 bp, Homo sapiens
catctgtactaaaaa

SEQ ID NO: 388273 - DNA, 15 bp, Homo sapiens
tcatctgtactaaaa

SEQ ID NO: 388274 - DNA, 15 bp, Homo sapiens
ctcatctgtactaaa

SEQ ID NO: 388275 - DNA, 15 bp, Homo sapiens
cctcatctgtactaa

SEQ ID NO: 388276 - DNA, 15 bp, Homo sapiens
acctcatctgtacta

SEQ ID NO: 388277 - DNA, 15 bp, Homo sapiens
aacctcatctgtact

SEQ ID NO: 388278 - DNA, 15 bp, Homo sapiens
aaacctcatctgtac

SEQ ID NO: 388279 - DNA, 15 bp, Homo sapiens
aaaacctcatctgta

SEQ ID NO: 388280 - DNA, 15 bp, Homo sapiens
caaaacctcatctgt

SEQ ID NO: 388281 - DNA, 15 bp, Homo sapiens
gcaaaacctcatctg

SEQ ID NO: 388282 - DNA, 15 bp, Homo sapiens
ggcaaaacctcatct

SEQ ID NO: 388283 - DNA, 15 bp, Homo sapiens
tggcaaaacctcatc

SEQ ID NO: 388284 - DNA, 15 bp, Homo sapiens
atggcaaaacctcat

SEQ ID NO: 388285 - DNA, 15 bp, Homo sapiens
catggcaaaacctca

SEQ ID NO: 388286 - DNA, 15 bp, Homo sapiens
acatggcaaaacctc

SEQ ID NO: 388287 - DNA, 15 bp, Homo sapiens
aacatggcaaaacct

SEQ ID NO: 388288 - DNA, 15 bp, Homo sapiens
caacatggcaaaacc

SEQ ID NO: 388289 - DNA, 15 bp, Homo sapiens
ccaacatggcaaaac

SEQ ID NO: 388290 - DNA, 15 bp, Homo sapiens
gccaacatggcaaaa

SEQ ID NO: 388291 - DNA, 15 bp, Homo sapiens
ggccaacatggcaaa

SEQ ID NO: 388292 - DNA, 15 bp, Homo sapiens
tggccaacatggcaa

SEQ ID NO: 388293 - DNA, 15 bp, Homo sapiens
ctggccaacatggca

SEQ ID NO: 388294 - DNA, 15 bp, Homo sapiens
ggaggtcaggagttt

SEQ ID NO: 388295 - DNA, 15 bp, Homo sapiens
tggaggtcaggagtt

SEQ ID NO: 388296 - DNA, 15 bp, Homo sapiens
ctggaggtcaggagt

SEQ ID NO: 388297 - DNA, 15 bp, Homo sapiens
actggaggtcaggag

SEQ ID NO: 388298 - DNA, 15 bp, Homo sapiens
cactggaggtcagga

SEQ ID NO: 388299 - DNA, 15 bp, Homo sapiens
tcactggaggtcagg

SEQ ID NO: 388300 - DNA, 15 bp, Homo sapiens
atcactggaggtcag

SEQ ID NO: 388301 - DNA, 15 bp, Homo sapiens
gatcactggaggtca

SEQ ID NO: 388302 - DNA, 15 bp, Homo sapiens
agatcactggaggtc

SEQ ID NO: 388303 - DNA, 15 bp, Homo sapiens
tagatcactggaggt

SEQ ID NO: 388304 - DNA, 15 bp, Homo sapiens
gtagatcactggagg

SEQ ID NO: 388305 - DNA, 15 bp, Homo sapiens
ggtagatcactggag

SEQ ID NO: 388306 - DNA, 15 bp, Homo sapiens
gggtagatcactgga

SEQ ID NO: 388307 - DNA, 15 bp, Homo sapiens
tgggtagatcactgg

SEQ ID NO: 388308 - DNA, 15 bp, Homo sapiens
gtgggtagatcactg

SEQ ID NO: 388309 - DNA, 15 bp, Homo sapiens
ggtgggtagatcact

SEQ ID NO: 388310 - DNA, 15 bp, Homo sapiens
aggtgggtagatcac

SEQ ID NO: 388311 - DNA, 15 bp, Homo sapiens
aaggtgggtagatca

SEQ ID NO: 388312 - DNA, 15 bp, Homo sapiens
caaggtgggtagatc

SEQ ID NO: 388313 - DNA, 15 bp, Homo sapiens
ccaaggtgggtagat

SEQ ID NO: 388314 - DNA, 15 bp, Homo sapiens
gccaaggtgggtaga

SEQ ID NO: 388315 - DNA, 15 bp, Homo sapiens
ggccaaggtgggtag

SEQ ID NO: 388316 - DNA, 15 bp, Homo sapiens
aggccaaggtgggta

SEQ ID NO: 388317 - DNA, 15 bp, Homo sapiens
gaggccaaggtgggt

SEQ ID NO: 388318 - DNA, 15 bp, Homo sapiens
gtcccagcactttgg

SEQ ID NO: 388319 - DNA, 15 bp, Homo sapiens
agtcccagcactttg

SEQ ID NO: 388320 - DNA, 15 bp, Homo sapiens
tagtcccagcacttt

SEQ ID NO: 388321 - DNA, 15 bp, Homo sapiens
gtagtcccagcactt

SEQ ID NO: 388322 - DNA, 15 bp, Homo sapiens
tgtagtcccagcact

SEQ ID NO: 388323 - DNA, 15 bp, Homo sapiens
ctgtagtcccagcac

SEQ ID NO: 388324 - DNA, 15 bp, Homo sapiens
tctgtagtcccagca

SEQ ID NO: 388325 - DNA, 15 bp, Homo sapiens
atctgtagtcccagc

SEQ ID NO: 388326 - DNA, 15 bp, Homo sapiens
catctgtagtcccag

SEQ ID NO: 388327 - DNA, 15 bp, Homo sapiens
acatctgtagtccca

SEQ ID NO: 388328 - DNA, 15 bp, Homo sapiens
cacatctgtagtccc

SEQ ID NO: 388329 - DNA, 15 bp, Homo sapiens
tcacatctgtagtcc

SEQ ID NO: 388330 - DNA, 15 bp, Homo sapiens
ctcacatctgtagtc

SEQ ID NO: 388331 - DNA, 15 bp, Homo sapiens
gctcacatctgtagt

SEQ ID NO: 388332 - DNA, 15 bp, Homo sapiens
ggctcacatctgtag

SEQ ID NO: 388333 - DNA, 15 bp, Homo sapiens
tggctcacatctgta

SEQ ID NO: 388334 - DNA, 15 bp, Homo sapiens
gtggctcacatctgt

SEQ ID NO: 388335 - DNA, 15 bp, Homo sapiens
ggtggctcacatctg

SEQ ID NO: 388336 - DNA, 15 bp, Homo sapiens
tggtggctcacatct

SEQ ID NO: 388337 - DNA, 15 bp, Homo sapiens
gtggtggctcacatc

SEQ ID NO: 388338 - DNA, 15 bp, Homo sapiens
cgtggtggctcacat

SEQ ID NO: 388339 - DNA, 15 bp, Homo sapiens
cgctgggcgtggtgg

SEQ ID NO: 388340 - DNA, 15 bp, Homo sapiens
acgctgggcgtggtg

SEQ ID NO: 388341 - DNA, 15 bp, Homo sapiens
cacgctgggcgtggt

SEQ ID NO: 388342 - DNA, 15 bp, Homo sapiens
tcacgctgggcgtgg

SEQ ID NO: 388343 - DNA, 15 bp, Homo sapiens
atcacgctgggcgtg

SEQ ID NO: 388344 - DNA, 15 bp, Homo sapiens
tatcacgctgggcgt

SEQ ID NO: 388345 - DNA, 15 bp, Homo sapiens
ttatcacgctgggcg

SEQ ID NO: 388346 - DNA, 15 bp, Homo sapiens
attatcacgctgggc

SEQ ID NO: 388347 - DNA, 15 bp, Homo sapiens
aattatcacgctggg

SEQ ID NO: 388348 - DNA, 15 bp, Homo sapiens
aaattatcacgctgg

SEQ ID NO: 388349 - DNA, 15 bp, Homo sapiens
aaaattatcacgctg

SEQ ID NO: 388350 - DNA, 15 bp, Homo sapiens
taaaattatcacgct

SEQ ID NO: 388351 - DNA, 15 bp, Homo sapiens
ttaaaattatcacgc

SEQ ID NO: 388352 - DNA, 15 bp, Homo sapiens
attaaaattatcacg

SEQ ID NO: 388353 - DNA, 15 bp, Homo sapiens
aattaaaattatcac

SEQ ID NO: 388354 - DNA, 15 bp, Homo sapiens
aaattaaaattatca

SEQ ID NO: 388355 - DNA, 15 bp, Homo sapiens
aaaattaaaattatc

SEQ ID NO: 388356 - DNA, 15 bp, Homo sapiens
gaaaattaaaattat

SEQ ID NO: 388357 - DNA, 15 bp, Homo sapiens
tgaaaattaaaatta

SEQ ID NO: 388358 - DNA, 15 bp, Homo sapiens
ctgaaaattaaaatt

SEQ ID NO: 388359 - DNA, 15 bp, Homo sapiens
tctgaaaattaaaat

SEQ ID NO: 388360 - DNA, 15 bp, Homo sapiens
ttctgaaaattaaaa

SEQ ID NO: 388361 - DNA, 15 bp, Homo sapiens
attctgaaaattaaa

SEQ ID NO: 388362 - DNA, 15 bp, Homo sapiens
aattctgaaaattaa

SEQ ID NO: 388363 - DNA, 15 bp, Homo sapiens
aaattctgaaaatta

SEQ ID NO: 388364 - DNA, 15 bp, Homo sapiens
gaaattctgaaaatt

SEQ ID NO: 388365 - DNA, 15 bp, Homo sapiens
agaaattctgaaaat

SEQ ID NO: 388366 - DNA, 15 bp, Homo sapiens
gagaaattctgaaaa

SEQ ID NO: 388367 - DNA, 15 bp, Homo sapiens
tgagaaattctgaaa

SEQ ID NO: 388368 - DNA, 15 bp, Homo sapiens
ttgagaaattctgaa

SEQ ID NO: 388369 - DNA, 15 bp, Homo sapiens
gttgagaaattctga

SEQ ID NO: 388370 - DNA, 15 bp, Homo sapiens
tgttgagaaattctg

SEQ ID NO: 388371 - DNA, 15 bp, Homo sapiens
gtgttgagaaattct

SEQ ID NO: 388372 - DNA, 15 bp, Homo sapiens
agtgttgagaaattc

SEQ ID NO: 388373 - DNA, 15 bp, Homo sapiens
tagtgttgagaaatt

SEQ ID NO: 388374 - DNA, 15 bp, Homo sapiens
ttagtgttgagaaat

SEQ ID NO: 388375 - DNA, 15 bp, Homo sapiens
cttagtgttgagaaa

SEQ ID NO: 388376 - DNA, 15 bp, Homo sapiens
tcttagtgttgagaa

SEQ ID NO: 388377 - DNA, 15 bp, Homo sapiens
ctcttagtgttgaga

SEQ ID NO: 388378 - DNA, 15 bp, Homo sapiens
gctcttagtgttgag

SEQ ID NO: 388379 - DNA, 15 bp, Homo sapiens
tgctcttagtgttga

SEQ ID NO: 388380 - DNA, 15 bp, Homo sapiens
atgctcttagtgttg

SEQ ID NO: 388381 - DNA, 15 bp, Homo sapiens
aatgctcttagtgtt

SEQ ID NO: 388382 - DNA, 15 bp, Homo sapiens
gaatgctcttagtgt

SEQ ID NO: 388383 - DNA, 15 bp, Homo sapiens
agaatgctcttagtg

SEQ ID NO: 388384 - DNA, 15 bp, Homo sapiens
cagaatgctcttagt

SEQ ID NO: 388385 - DNA, 15 bp, Homo sapiens
ccagaatgctcttag

SEQ ID NO: 388386 - DNA, 15 bp, Homo sapiens
cccagaatgctctta

SEQ ID NO: 388387 - DNA, 15 bp, Homo sapiens
acccagaatgctctt

SEQ ID NO: 388388 - DNA, 15 bp, Homo sapiens
aacccagaatgctct

SEQ ID NO: 388389 - DNA, 15 bp, Homo sapiens
caacccagaatgctc

SEQ ID NO: 388390 - DNA, 15 bp, Homo sapiens
acaacccagaatgct

SEQ ID NO: 388391 - DNA, 15 bp, Homo sapiens
cacaacccagaatgc

SEQ ID NO: 388392 - DNA, 15 bp, Homo sapiens
acacaacccagaatg

SEQ ID NO: 388393 - DNA, 15 bp, Homo sapiens
cacacaacccagaat

SEQ ID NO: 388394 - DNA, 15 bp, Homo sapiens
tcacacaacccagaa

SEQ ID NO: 388395 - DNA, 15 bp, Homo sapiens
ctcacacaacccaga

SEQ ID NO: 388396 - DNA, 15 bp, Homo sapiens
actcacacaacccag

SEQ ID NO: 388397 - DNA, 15 bp, Homo sapiens
tactcacacaaccca

SEQ ID NO: 388398 - DNA, 15 bp, Homo sapiens
ctactcacacaaccc

SEQ ID NO: 388399 - DNA, 15 bp, Homo sapiens
tctactcacacaacc

SEQ ID NO: 388400 - DNA, 15 bp, Homo sapiens
ctctactcacacaac

SEQ ID NO: 388401 - DNA, 15 bp, Homo sapiens
actctactcacacaa

SEQ ID NO: 388402 - DNA, 15 bp, Homo sapiens
gactctactcacaca

SEQ ID NO: 388403 - DNA, 15 bp, Homo sapiens
agactctactcacac

SEQ ID NO: 388404 - DNA, 15 bp, Homo sapiens
tagactctactcaca

SEQ ID NO: 388405 - DNA, 15 bp, Homo sapiens
atagactctactcac

SEQ ID NO: 388406 - DNA, 15 bp, Homo sapiens
aatagactctactca

SEQ ID NO: 388407 - DNA, 15 bp, Homo sapiens
aaatagactctactc

SEQ ID NO: 388408 - DNA, 15 bp, Homo sapiens
aaaatagactctact

SEQ ID NO: 388409 - DNA, 15 bp, Homo sapiens
taaaatagactctac

SEQ ID NO: 388410 - DNA, 15 bp, Homo sapiens
ctaaaatagactcta

SEQ ID NO: 388411 - DNA, 15 bp, Homo sapiens
actaaaatagactct

SEQ ID NO: 388412 - DNA, 15 bp, Homo sapiens
aactaaaatagactc

SEQ ID NO: 388413 - DNA, 15 bp, Homo sapiens
caactaaaatagact

SEQ ID NO: 388414 - DNA, 15 bp, Homo sapiens
tcaactaaaatagac

SEQ ID NO: 388415 - DNA, 15 bp, Homo sapiens
ttcaactaaaataga

SEQ ID NO: 388416 - DNA, 15 bp, Homo sapiens
tttcaactaaaatag

SEQ ID NO: 388417 - DNA, 15 bp, Homo sapiens
ctttcaactaaaata

SEQ ID NO: 388418 - DNA, 15 bp, Homo sapiens
actttcaactaaaat

SEQ ID NO: 388419 - DNA, 15 bp, Homo sapiens
cactttcaactaaaa

SEQ ID NO: 388420 - DNA, 15 bp, Homo sapiens
ccactttcaactaaa

SEQ ID NO: 388421 - DNA, 15 bp, Homo sapiens
cccactttcaactaa

SEQ ID NO: 388422 - DNA, 15 bp, Homo sapiens
tcccactttcaacta

SEQ ID NO: 388423 - DNA, 15 bp, Homo sapiens
atcccactttcaact

SEQ ID NO: 388424 - DNA, 15 bp, Homo sapiens
catcccactttcaac

SEQ ID NO: 388425 - DNA, 15 bp, Homo sapiens
tcatcccactttcaa

SEQ ID NO: 388426 - DNA, 15 bp, Homo sapiens
atcatcccactttca

SEQ ID NO: 388427 - DNA, 15 bp, Homo sapiens
aatcatcccactttc

SEQ ID NO: 388428 - DNA, 15 bp, Homo sapiens
gaatcatcccacttt

SEQ ID NO: 388429 - DNA, 15 bp, Homo sapiens
agaatcatcccactt

SEQ ID NO: 388430 - DNA, 15 bp, Homo sapiens
cagaatcatcccact

SEQ ID NO: 388431 - DNA, 15 bp, Homo sapiens
gcagaatcatcccac

SEQ ID NO: 388432 - DNA, 15 bp, Homo sapiens
agcagaatcatccca

SEQ ID NO: 388433 - DNA, 15 bp, Homo sapiens
cagcagaatcatccc

SEQ ID NO: 388434 - DNA, 15 bp, Homo sapiens
acagcagaatcatcc

SEQ ID NO: 388435 - DNA, 15 bp, Homo sapiens
aacagcagaatcatc

SEQ ID NO: 388436 - DNA, 15 bp, Homo sapiens
aaacagcagaatcat

SEQ ID NO: 388437 - DNA, 15 bp, Homo sapiens
gaaacagcagaatca

SEQ ID NO: 388438 - DNA, 15 bp, Homo sapiens
tgaaacagcagaatc

SEQ ID NO: 388439 - DNA, 15 bp, Homo sapiens
atgaaacagcagaat

SEQ ID NO: 388440 - DNA, 15 bp, Homo sapiens
aatgaaacagcagaa

SEQ ID NO: 388441 - DNA, 15 bp, Homo sapiens
gaatgaaacagcaga

SEQ ID NO: 388442 - DNA, 15 bp, Homo sapiens
agaatgaaacagcag

SEQ ID NO: 388443 - DNA, 15 bp, Homo sapiens
tagaatgaaacagca

SEQ ID NO: 388444 - DNA, 15 bp, Homo sapiens
ttagaatgaaacagc

SEQ ID NO: 388445 - DNA, 15 bp, Homo sapiens
gttagaatgaaacag

SEQ ID NO: 388446 - DNA, 15 bp, Homo sapiens
agttagaatgaaaca

SEQ ID NO: 388447 - DNA, 15 bp, Homo sapiens
cagttagaatgaaac

SEQ ID NO: 388448 - DNA, 15 bp, Homo sapiens
acagttagaatgaaa

SEQ ID NO: 388449 - DNA, 15 bp, Homo sapiens
tacagttagaatgaa

SEQ ID NO: 388450 - DNA, 15 bp, Homo sapiens
ttacagttagaatga

SEQ ID NO: 388451 - DNA, 15 bp, Homo sapiens
cttacagttagaatg

SEQ ID NO: 388452 - DNA, 15 bp, Homo sapiens
acttacagttagaat

SEQ ID NO: 388453 - DNA, 15 bp, Homo sapiens
cacttacagttagaa

SEQ ID NO: 388454 - DNA, 15 bp, Homo sapiens
ccacttacagttaga

SEQ ID NO: 388455 - DNA, 15 bp, Homo sapiens
tccacttacagttag

SEQ ID NO: 388456 - DNA, 15 bp, Homo sapiens
ttccacttacagtta

SEQ ID NO: 388457 - DNA, 15 bp, Homo sapiens
tttccacttacagtt

SEQ ID NO: 388458 - DNA, 15 bp, Homo sapiens
ctttccacttacagt

SEQ ID NO: 388459 - DNA, 15 bp, Homo sapiens
cctttccacttacag

SEQ ID NO: 388460 - DNA, 15 bp, Homo sapiens
tcctttccacttaca

SEQ ID NO: 388461 - DNA, 15 bp, Homo sapiens
ctcctttccacttac

SEQ ID NO: 388462 - DNA, 15 bp, Homo sapiens
cctcctttccactta

SEQ ID NO: 388463 - DNA, 15 bp, Homo sapiens
ccctcctttccactt

SEQ ID NO: 388464 - DNA, 15 bp, Homo sapiens
cccctcctttccact

SEQ ID NO: 388465 - DNA, 15 bp, Homo sapiens
tcccctcctttccac

SEQ ID NO: 388466 - DNA, 15 bp, Homo sapiens
ctcccctcctttcca

SEQ ID NO: 388467 - DNA, 15 bp, Homo sapiens
cctcccctcctttcc

SEQ ID NO: 388468 - DNA, 15 bp, Homo sapiens
tcctcccctcctttc

SEQ ID NO: 388469 - DNA, 15 bp, Homo sapiens
ctcctcccctccttt

SEQ ID NO: 388470 - DNA, 15 bp, Homo sapiens
tctcctcccctcctt

SEQ ID NO: 388471 - DNA, 15 bp, Homo sapiens
atctcctcccctcct

SEQ ID NO: 388472 - DNA, 15 bp, Homo sapiens
catctcctcccctcc

SEQ ID NO: 388473 - DNA, 15 bp, Homo sapiens
ccatctcctcccctc

SEQ ID NO: 388474 - DNA, 15 bp, Homo sapiens
cccatctcctcccct

SEQ ID NO: 388475 - DNA, 15 bp, Homo sapiens
tcccatctcctcccc

SEQ ID NO: 388476 - DNA, 15 bp, Homo sapiens
gtcccatctcctccc

SEQ ID NO: 388477 - DNA, 15 bp, Homo sapiens
agtcccatctcctcc

SEQ ID NO: 388478 - DNA, 15 bp, Homo sapiens
cagtcccatctcctc

SEQ ID NO: 388479 - DNA, 15 bp, Homo sapiens
ccagtcccatctcct

SEQ ID NO: 388480 - DNA, 15 bp, Homo sapiens
accagtcccatctcc

SEQ ID NO: 388481 - DNA, 15 bp, Homo sapiens
caccagtcccatctc

SEQ ID NO: 388482 - DNA, 15 bp, Homo sapiens
ccaccagtcccatct

SEQ ID NO: 388483 - DNA, 15 bp, Homo sapiens
accaccagtcccatc

SEQ ID NO: 388484 - DNA, 15 bp, Homo sapiens
caccaccagtcccat

SEQ ID NO: 388485 - DNA, 15 bp, Homo sapiens
tcaccaccagtccca

SEQ ID NO: 388486 - DNA, 15 bp, Homo sapiens
ttcaccaccagtccc

SEQ ID NO: 388487 - DNA, 15 bp, Homo sapiens
attcaccaccagtcc

SEQ ID NO: 388488 - DNA, 15 bp, Homo sapiens
aattcaccaccagtc

SEQ ID NO: 388489 - DNA, 15 bp, Homo sapiens
caattcaccaccagt

SEQ ID NO: 388490 - DNA, 15 bp, Homo sapiens
tcaattcaccaccag

SEQ ID NO: 388491 - DNA, 15 bp, Homo sapiens
ctcaattcaccacca

SEQ ID NO: 388492 - DNA, 15 bp, Homo sapiens
tctcaattcaccacc

SEQ ID NO: 388493 - DNA, 15 bp, Homo sapiens
ctctcaattcaccac

SEQ ID NO: 388494 - DNA, 15 bp, Homo sapiens
actctcaattcacca

SEQ ID NO: 388495 - DNA, 15 bp, Homo sapiens
aactctcaattcacc

SEQ ID NO: 388496 - DNA, 15 bp, Homo sapiens
caactctcaattcac

SEQ ID NO: 388497 - DNA, 15 bp, Homo sapiens
tcaactctcaattca

SEQ ID NO: 388498 - DNA, 15 bp, Homo sapiens
ctcaactctcaattc

SEQ ID NO: 388499 - DNA, 15 bp, Homo sapiens
cctcaactctcaatt

SEQ ID NO: 388500 - DNA, 15 bp, Homo sapiens
ccctcaactctcaat

SEQ ID NO: 388501 - DNA, 15 bp, Homo sapiens
cccctcaactctcaa

SEQ ID NO: 388502 - DNA, 15 bp, Homo sapiens
acccctcaactctca

SEQ ID NO: 388503 - DNA, 15 bp, Homo sapiens
tacccctcaactctc

SEQ ID NO: 388504 - DNA, 15 bp, Homo sapiens
gtacccctcaactct

SEQ ID NO: 388505 - DNA, 15 bp, Homo sapiens
agtacccctcaactc

SEQ ID NO: 388506 - DNA, 15 bp, Homo sapiens
cagtacccctcaact

SEQ ID NO: 388507 - DNA, 15 bp, Homo sapiens
tcagtacccctcaac

SEQ ID NO: 388508 - DNA, 15 bp, Homo sapiens
ttcagtacccctcaa

SEQ ID NO: 388509 - DNA, 15 bp, Homo sapiens
cttcagtacccctca

SEQ ID NO: 388510 - DNA, 15 bp, Homo sapiens
gcttcagtacccctc

SEQ ID NO: 388511 - DNA, 15 bp, Homo sapiens
tgcttcagtacccct

SEQ ID NO: 388512 - DNA, 15 bp, Homo sapiens
ctgcttcagtacccc

SEQ ID NO: 388513 - DNA, 15 bp, Homo sapiens
tctgcttcagtaccc

SEQ ID NO: 388514 - DNA, 15 bp, Homo sapiens
ctctgcttcagtacc

SEQ ID NO: 388515 - DNA, 15 bp, Homo sapiens
actctgcttcagtac

SEQ ID NO: 388516 - DNA, 15 bp, Homo sapiens
gactctgcttcagta

SEQ ID NO: 388517 - DNA, 15 bp, Homo sapiens
tgactctgcttcagt

SEQ ID NO: 388518 - DNA, 15 bp, Homo sapiens
ttgactctgcttcag

SEQ ID NO: 388519 - DNA, 15 bp, Homo sapiens
attgactctgcttca

SEQ ID NO: 388520 - DNA, 15 bp, Homo sapiens
cattgactctgcttc

SEQ ID NO: 388521 - DNA, 15 bp, Homo sapiens
tcattgactctgctt

SEQ ID NO: 388522 - DNA, 15 bp, Homo sapiens
ctcattgactctgct

SEQ ID NO: 388523 - DNA, 15 bp, Homo sapiens
actcattgactctgc

SEQ ID NO: 388524 - DNA, 15 bp, Homo sapiens
aactcattgactctg

SEQ ID NO: 388525 - DNA, 15 bp, Homo sapiens
caactcattgactct

SEQ ID NO: 388526 - DNA, 15 bp, Homo sapiens
tcaactcattgactc

SEQ ID NO: 388527 - DNA, 15 bp, Homo sapiens
ctcaactcattgact

SEQ ID NO: 388528 - DNA, 15 bp, Homo sapiens
tctcaactcattgac

SEQ ID NO: 388529 - DNA, 15 bp, Homo sapiens
ctctcaactcattga

SEQ ID NO: 388530 - DNA, 15 bp, Homo sapiens
cctctcaactcattg

SEQ ID NO: 388531 - DNA, 15 bp, Homo sapiens
acctctcaactcatt

SEQ ID NO: 388532 - DNA, 15 bp, Homo sapiens
cacctctcaactcat

SEQ ID NO: 388533 - DNA, 15 bp, Homo sapiens
ccacctctcaactca

SEQ ID NO: 388534 - DNA, 15 bp, Homo sapiens
accacctctcaactc

SEQ ID NO: 388535 - DNA, 15 bp, Homo sapiens
caccacctctcaact

SEQ ID NO: 388536 - DNA, 15 bp, Homo sapiens
ccaccacctctcaac

SEQ ID NO: 388537 - DNA, 15 bp, Homo sapiens
accaccacctctcaa

SEQ ID NO: 388538 - DNA, 15 bp, Homo sapiens
gaccaccacctctca

SEQ ID NO: 388539 - DNA, 15 bp, Homo sapiens
tgaccaccacctctc

SEQ ID NO: 388540 - DNA, 15 bp, Homo sapiens
atgaccaccacctct

SEQ ID NO: 388541 - DNA, 15 bp, Homo sapiens
catgaccaccacctc

SEQ ID NO: 388542 - DNA, 15 bp, Homo sapiens
acatgaccaccacct

SEQ ID NO: 388543 - DNA, 15 bp, Homo sapiens
tacatgaccaccacc

SEQ ID NO: 388544 - DNA, 15 bp, Homo sapiens
ctacatgaccaccac

SEQ ID NO: 388545 - DNA, 15 bp, Homo sapiens
cctacatgaccacca

SEQ ID NO: 388546 - DNA, 15 bp, Homo sapiens
tcctacatgaccacc

SEQ ID NO: 388547 - DNA, 15 bp, Homo sapiens
atcctacatgaccac

SEQ ID NO: 388548 - DNA, 15 bp, Homo sapiens
tatcctacatgacca

SEQ ID NO: 388549 - DNA, 15 bp, Homo sapiens
ttatcctacatgacc

SEQ ID NO: 388550 - DNA, 15 bp, Homo sapiens
cttatcctacatgac

SEQ ID NO: 388551 - DNA, 15 bp, Homo sapiens
ccttatcctacatga

SEQ ID NO: 388552 - DNA, 15 bp, Homo sapiens
cccttatcctacatg

SEQ ID NO: 388553 - DNA, 15 bp, Homo sapiens
ccccttatcctacat

SEQ ID NO: 388554 - DNA, 15 bp, Homo sapiens
accccttatcctaca

SEQ ID NO: 388555 - DNA, 15 bp, Homo sapiens
aaccccttatcctac

SEQ ID NO: 388556 - DNA, 15 bp, Homo sapiens
aaaccccttatccta

SEQ ID NO: 388557 - DNA, 15 bp, Homo sapiens
aaaaccccttatcct

SEQ ID NO: 388558 - DNA, 15 bp, Homo sapiens
taaaaccccttatcc

SEQ ID NO: 388559 - DNA, 15 bp, Homo sapiens
ataaaaccccttatc

SEQ ID NO: 388560 - DNA, 15 bp, Homo sapiens
aataaaaccccttat

SEQ ID NO: 388561 - DNA, 15 bp, Homo sapiens
aaataaaacccctta

SEQ ID NO: 388562 - DNA, 15 bp, Homo sapiens
caaataaaacccctt

SEQ ID NO: 388563 - DNA, 15 bp, Homo sapiens
acaaataaaacccct

SEQ ID NO: 388564 - DNA, 15 bp, Homo sapiens
tacaaataaaacccc

SEQ ID NO: 388565 - DNA, 15 bp, Homo sapiens
ttacaaataaaaccc

SEQ ID NO: 388566 - DNA, 15 bp, Homo sapiens
cttacaaataaaacc

SEQ ID NO: 388567 - DNA, 15 bp, Homo sapiens
gcttacaaataaaac

SEQ ID NO: 388568 - DNA, 15 bp, Homo sapiens
tgcttacaaataaaa

SEQ ID NO: 388569 - DNA, 15 bp, Homo sapiens
ttgcttacaaataaa

SEQ ID NO: 388570 - DNA, 15 bp, Homo sapiens
gttgcttacaaataa

SEQ ID NO: 388571 - DNA, 15 bp, Homo sapiens
tgttgcttacaaata

SEQ ID NO: 388572 - DNA, 15 bp, Homo sapiens
ctgttgcttacaaat

SEQ ID NO: 388573 - DNA, 15 bp, Homo sapiens
tctgttgcttacaaa

SEQ ID NO: 388574 - DNA, 15 bp, Homo sapiens
ttctgttgcttacaa

SEQ ID NO: 388575 - DNA, 15 bp, Homo sapiens
tttctgttgcttaca

SEQ ID NO: 388576 - DNA, 15 bp, Homo sapiens
gtttctgttgcttac

SEQ ID NO: 388577 - DNA, 15 bp, Homo sapiens
agtttctgttgctta

SEQ ID NO: 388578 - DNA, 15 bp, Homo sapiens
cagtttctgttgctt

SEQ ID NO: 388579 - DNA, 15 bp, Homo sapiens
tcagtttctgttgct

SEQ ID NO: 388580 - DNA, 15 bp, Homo sapiens
gtcagtttctgttgc

SEQ ID NO: 388581 - DNA, 15 bp, Homo sapiens
agtcagtttctgttg

SEQ ID NO: 388582 - DNA, 15 bp, Homo sapiens
gagtcagtttctgtt

SEQ ID NO: 388583 - DNA, 15 bp, Homo sapiens
agagtcagtttctgt

SEQ ID NO: 388584 - DNA, 15 bp, Homo sapiens
tagagtcagtttctg

SEQ ID NO: 388585 - DNA, 15 bp, Homo sapiens
atagagtcagtttct

SEQ ID NO: 388586 - DNA, 15 bp, Homo sapiens
aatagagtcagtttc

SEQ ID NO: 388587 - DNA, 15 bp, Homo sapiens
aaatagagtcagttt

SEQ ID NO: 388588 - DNA, 15 bp, Homo sapiens
aaaatagagtcagtt

SEQ ID NO: 388589 - DNA, 15 bp, Homo sapiens
taaaatagagtcagt

SEQ ID NO: 388590 - DNA, 15 bp, Homo sapiens
ttaaaatagagtcag

SEQ ID NO: 388591 - DNA, 15 bp, Homo sapiens
cttaaaatagagtca

SEQ ID NO: 388592 - DNA, 15 bp, Homo sapiens
ccttaaaatagagtc

SEQ ID NO: 388593 - DNA, 15 bp, Homo sapiens
tccttaaaatagagt

SEQ ID NO: 388594 - DNA, 15 bp, Homo sapiens
ttccttaaaatagag

SEQ ID NO: 388595 - DNA, 15 bp, Homo sapiens
tttccttaaaataga

SEQ ID NO: 388596 - DNA, 15 bp, Homo sapiens
ttttccttaaaatag

SEQ ID NO: 388597 - DNA, 15 bp, Homo sapiens
cttttccttaaaata

SEQ ID NO: 388598 - DNA, 15 bp, Homo sapiens
acttttccttaaaat

SEQ ID NO: 388599 - DNA, 15 bp, Homo sapiens
cacttttccttaaaa

SEQ ID NO: 388600 - DNA, 15 bp, Homo sapiens
tcacttttccttaaa

SEQ ID NO: 388601 - DNA, 15 bp, Homo sapiens
ttcacttttccttaa

SEQ ID NO: 388602 - DNA, 15 bp, Homo sapiens
tttcacttttcctta

SEQ ID NO: 388603 - DNA, 15 bp, Homo sapiens
ttttcacttttcctt

SEQ ID NO: 388604 - DNA, 15 bp, Homo sapiens
tttttcacttttcct

SEQ ID NO: 388605 - DNA, 15 bp, Homo sapiens
atttttcacttttcc

SEQ ID NO: 388606 - DNA, 15 bp, Homo sapiens
aatttttcacttttc

SEQ ID NO: 388607 - DNA, 15 bp, Homo sapiens
aaatttttcactttt

SEQ ID NO: 388608 - DNA, 15 bp, Homo sapiens
aaaatttttcacttt

SEQ ID NO: 388609 - DNA, 15 bp, Homo sapiens
gaaaatttttcactt

SEQ ID NO: 388610 - DNA, 15 bp, Homo sapiens
tgaaaatttttcact

SEQ ID NO: 388611 - DNA, 15 bp, Homo sapiens
ctgaaaatttttcac

SEQ ID NO: 388612 - DNA, 15 bp, Homo sapiens
tctgaaaatttttca

SEQ ID NO: 388613 - DNA, 15 bp, Homo sapiens
ttctgaaaatttttc

SEQ ID NO: 388614 - DNA, 15 bp, Homo sapiens
attctgaaaattttt

SEQ ID NO: 388615 - DNA, 15 bp, Homo sapiens
gattctgaaaatttt

SEQ ID NO: 388616 - DNA, 15 bp, Homo sapiens
agattctgaaaattt

SEQ ID NO: 388617 - DNA, 15 bp, Homo sapiens
tagattctgaaaatt

SEQ ID NO: 388618 - DNA, 15 bp, Homo sapiens
ttagattctgaaaat

SEQ ID NO: 388619 - DNA, 15 bp, Homo sapiens
attagattctgaaaa

SEQ ID NO: 388620 - DNA, 15 bp, Homo sapiens
tattagattctgaaa

SEQ ID NO: 388621 - DNA, 15 bp, Homo sapiens
ttattagattctgaa

SEQ ID NO: 388622 - DNA, 15 bp, Homo sapiens
tttattagattctga

SEQ ID NO: 388623 - DNA, 15 bp, Homo sapiens
ttttattagattctg

SEQ ID NO: 388624 - DNA, 15 bp, Homo sapiens
tttttattagattct

SEQ ID NO: 388625 - DNA, 15 bp, Homo sapiens
ctttttattagattc

SEQ ID NO: 388626 - DNA, 15 bp, Homo sapiens
gctttttattagatt

SEQ ID NO: 388627 - DNA, 15 bp, Homo sapiens
agctttttattagat

SEQ ID NO: 388628 - DNA, 15 bp, Homo sapiens
cagctttttattaga

SEQ ID NO: 388629 - DNA, 15 bp, Homo sapiens
tcagctttttattag

SEQ ID NO: 388630 - DNA, 15 bp, Homo sapiens
ttcagctttttatta

SEQ ID NO: 388631 - DNA, 15 bp, Homo sapiens
tttcagctttttatt

SEQ ID NO: 388632 - DNA, 15 bp, Homo sapiens
ttttcagctttttat

SEQ ID NO: 388633 - DNA, 15 bp, Homo sapiens
tttttcagcttttta

SEQ ID NO: 388634 - DNA, 15 bp, Homo sapiens
atttttcagcttttt

SEQ ID NO: 388635 - DNA, 15 bp, Homo sapiens
aatttttcagctttt

SEQ ID NO: 388636 - DNA, 15 bp, Homo sapiens
gaatttttcagcttt

SEQ ID NO: 388637 - DNA, 15 bp, Homo sapiens
tgaatttttcagctt

SEQ ID NO: 388638 - DNA, 15 bp, Homo sapiens
ctgaatttttcagct

SEQ ID NO: 388639 - DNA, 15 bp, Homo sapiens
actgaatttttcagc

SEQ ID NO: 388640 - DNA, 15 bp, Homo sapiens
aactgaatttttcag

SEQ ID NO: 388641 - DNA, 15 bp, Homo sapiens
aaactgaatttttca

SEQ ID NO: 388642 - DNA, 15 bp, Homo sapiens
gaaactgaatttttc

SEQ ID NO: 388643 - DNA, 15 bp, Homo sapiens
tgaaactgaattttt

SEQ ID NO: 388644 - DNA, 15 bp, Homo sapiens
ctgaaactgaatttt

SEQ ID NO: 388645 - DNA, 15 bp, Homo sapiens
tctgaaactgaattt

SEQ ID NO: 388646 - DNA, 15 bp, Homo sapiens
ttctgaaactgaatt

SEQ ID NO: 388647 - DNA, 15 bp, Homo sapiens
tttctgaaactgaat

SEQ ID NO: 388648 - DNA, 15 bp, Homo sapiens
ctttctgaaactgaa

SEQ ID NO: 388649 - DNA, 15 bp, Homo sapiens
cctttctgaaactga

SEQ ID NO: 388650 - DNA, 15 bp, Homo sapiens
tcctttctgaaactg

SEQ ID NO: 388651 - DNA, 15 bp, Homo sapiens
gtcctttctgaaact

SEQ ID NO: 388652 - DNA, 15 bp, Homo sapiens
tgtcctttctgaaac

SEQ ID NO: 388653 - DNA, 15 bp, Homo sapiens
ttgtcctttctgaaa

SEQ ID NO: 388654 - DNA, 15 bp, Homo sapiens
tttgtcctttctgaa

SEQ ID NO: 388655 - DNA, 15 bp, Homo sapiens
ttttgtcctttctga

SEQ ID NO: 388656 - DNA, 15 bp, Homo sapiens
attttgtcctttctg

SEQ ID NO: 388657 - DNA, 15 bp, Homo sapiens
gattttgtcctttct

SEQ ID NO: 388658 - DNA, 15 bp, Homo sapiens
tgattttgtcctttc

SEQ ID NO: 388659 - DNA, 15 bp, Homo sapiens
ttgattttgtccttt

SEQ ID NO: 388660 - DNA, 15 bp, Homo sapiens
cttgattttgtcctt

SEQ ID NO: 388661 - DNA, 15 bp, Homo sapiens
tcttgattttgtcct

SEQ ID NO: 388662 - DNA, 15 bp, Homo sapiens
ctcttgattttgtcc

SEQ ID NO: 388663 - DNA, 15 bp, Homo sapiens
gctcttgattttgtc

SEQ ID NO: 388664 - DNA, 15 bp, Homo sapiens
tgctcttgattttgt

SEQ ID NO: 388665 - DNA, 15 bp, Homo sapiens
atgctcttgattttg

SEQ ID NO: 388666 - DNA, 15 bp, Homo sapiens
aatgctcttgatttt

SEQ ID NO: 388667 - DNA, 15 bp, Homo sapiens
aaatgctcttgattt

SEQ ID NO: 388668 - DNA, 15 bp, Homo sapiens
aaaatgctcttgatt

SEQ ID NO: 388669 - DNA, 15 bp, Homo sapiens
gaaaatgctcttgat

SEQ ID NO: 388670 - DNA, 15 bp, Homo sapiens
tgaaaatgctcttga

SEQ ID NO: 388671 - DNA, 15 bp, Homo sapiens
ctgaaaatgctcttg

SEQ ID NO: 388672 - DNA, 15 bp, Homo sapiens
cctgaaaatgctctt

SEQ ID NO: 388673 - DNA, 15 bp, Homo sapiens
ccctgaaaatgctct

SEQ ID NO: 388674 - DNA, 15 bp, Homo sapiens
tccctgaaaatgctc

SEQ ID NO: 388675 - DNA, 15 bp, Homo sapiens
atccctgaaaatgct

SEQ ID NO: 388676 - DNA, 15 bp, Homo sapiens
aatccctgaaaatgc

SEQ ID NO: 388677 - DNA, 15 bp, Homo sapiens
aaatccctgaaaatg

SEQ ID NO: 388678 - DNA, 15 bp, Homo sapiens
taaatccctgaaaat

SEQ ID NO: 388679 - DNA, 15 bp, Homo sapiens
ctaaatccctgaaaa

SEQ ID NO: 388680 - DNA, 15 bp, Homo sapiens
cctaaatccctgaaa

SEQ ID NO: 388681 - DNA, 15 bp, Homo sapiens
acctaaatccctgaa

SEQ ID NO: 388682 - DNA, 15 bp, Homo sapiens
tacctaaatccctga

SEQ ID NO: 388683 - DNA, 15 bp, Homo sapiens
ctacctaaatccctg

SEQ ID NO: 388684 - DNA, 15 bp, Homo sapiens
actacctaaatccct

SEQ ID NO: 388685 - DNA, 15 bp, Homo sapiens
tactacctaaatccc

SEQ ID NO: 388686 - DNA, 15 bp, Homo sapiens
ctactacctaaatcc

SEQ ID NO: 388687 - DNA, 15 bp, Homo sapiens
cctactacctaaatc

SEQ ID NO: 388688 - DNA, 15 bp, Homo sapiens
tcctactacctaaat

SEQ ID NO: 388689 - DNA, 15 bp, Homo sapiens
ttcctactacctaaa

SEQ ID NO: 388690 - DNA, 15 bp, Homo sapiens
tttcctactacctaa

SEQ ID NO: 388691 - DNA, 15 bp, Homo sapiens
atttcctactaccta

SEQ ID NO: 388692 - DNA, 15 bp, Homo sapiens
tatttcctactacct

SEQ ID NO: 388693 - DNA, 15 bp, Homo sapiens
ttatttcctactacc

SEQ ID NO: 388694 - DNA, 15 bp, Homo sapiens
attatttcctactac

SEQ ID NO: 388695 - DNA, 15 bp, Homo sapiens
tattatttcctacta

SEQ ID NO: 388696 - DNA, 15 bp, Homo sapiens
ttattatttcctact

SEQ ID NO: 388697 - DNA, 15 bp, Homo sapiens
tttattatttcctac

SEQ ID NO: 388698 - DNA, 15 bp, Homo sapiens
atttattatttccta

SEQ ID NO: 388699 - DNA, 15 bp, Homo sapiens
gatttattatttcct

SEQ ID NO: 388700 - DNA, 15 bp, Homo sapiens
tgatttattatttcc

SEQ ID NO: 388701 - DNA, 15 bp, Homo sapiens
atgatttattatttc

SEQ ID NO: 388702 - DNA, 15 bp, Homo sapiens
aatgatttattattt

SEQ ID NO: 388703 - DNA, 15 bp, Homo sapiens
aaatgatttattatt

SEQ ID NO: 388704 - DNA, 15 bp, Homo sapiens
aaaatgatttattat

SEQ ID NO: 388705 - DNA, 15 bp, Homo sapiens
gaaaatgatttatta

SEQ ID NO: 388706 - DNA, 15 bp, Homo sapiens
agaaaatgatttatt

SEQ ID NO: 388707 - DNA, 15 bp, Homo sapiens
cagaaaatgatttat

SEQ ID NO: 388708 - DNA, 15 bp, Homo sapiens
tcagaaaatgattta

SEQ ID NO: 388709 - DNA, 15 bp, Homo sapiens
ctcagaaaatgattt

SEQ ID NO: 388710 - DNA, 15 bp, Homo sapiens
tctcagaaaatgatt

SEQ ID NO: 388711 - DNA, 15 bp, Homo sapiens
ttctcagaaaatgat

SEQ ID NO: 388712 - DNA, 15 bp, Homo sapiens
attctcagaaaatga

SEQ ID NO: 388713 - DNA, 15 bp, Homo sapiens
cattctcagaaaatg

SEQ ID NO: 388714 - DNA, 15 bp, Homo sapiens
gcattctcagaaaat

SEQ ID NO: 388715 - DNA, 15 bp, Homo sapiens
ggcattctcagaaaa

SEQ ID NO: 388716 - DNA, 15 bp, Homo sapiens
tggcattctcagaaa

SEQ ID NO: 388717 - DNA, 15 bp, Homo sapiens
gtggcattctcagaa

SEQ ID NO: 388718 - DNA, 15 bp, Homo sapiens
agtggcattctcaga

SEQ ID NO: 388719 - DNA, 15 bp, Homo sapiens
cagtggcattctcag

SEQ ID NO: 388720 - DNA, 15 bp, Homo sapiens
acagtggcattctca

SEQ ID NO: 388721 - DNA, 15 bp, Homo sapiens
tacagtggcattctc

SEQ ID NO: 388722 - DNA, 15 bp, Homo sapiens
ttacagtggcattct

SEQ ID NO: 388723 - DNA, 15 bp, Homo sapiens
cttacagtggcattc

SEQ ID NO: 388724 - DNA, 15 bp, Homo sapiens
tcttacagtggcatt

SEQ ID NO: 388725 - DNA, 15 bp, Homo sapiens
ttcttacagtggcat

SEQ ID NO: 388726 - DNA, 15 bp, Homo sapiens
attcttacagtggca

SEQ ID NO: 388727 - DNA, 15 bp, Homo sapiens
tattcttacagtggc

SEQ ID NO: 388728 - DNA, 15 bp, Homo sapiens
ttattcttacagtgg

SEQ ID NO: 388729 - DNA, 15 bp, Homo sapiens
tttattcttacagtg

SEQ ID NO: 388730 - DNA, 15 bp, Homo sapiens
atttattcttacagt

SEQ ID NO: 388731 - DNA, 15 bp, Homo sapiens
catttattcttacag

SEQ ID NO: 388732 - DNA, 15 bp, Homo sapiens
ccatttattcttaca

SEQ ID NO: 388733 - DNA, 15 bp, Homo sapiens
tccatttattcttac

SEQ ID NO: 388734 - DNA, 15 bp, Homo sapiens
atccatttattctta

SEQ ID NO: 388735 - DNA, 15 bp, Homo sapiens
aatccatttattctt

SEQ ID NO: 388736 - DNA, 15 bp, Homo sapiens
gaatccatttattct

SEQ ID NO: 388737 - DNA, 15 bp, Homo sapiens
ggaatccatttattc

SEQ ID NO: 388738 - DNA, 15 bp, Homo sapiens
tggaatccatttatt

SEQ ID NO: 388739 - DNA, 15 bp, Homo sapiens
ctggaatccatttat

SEQ ID NO: 388740 - DNA, 15 bp, Homo sapiens
gctggaatccattta

SEQ ID NO: 388741 - DNA, 15 bp, Homo sapiens
agctggaatccattt

SEQ ID NO: 388742 - DNA, 15 bp, Homo sapiens
cagctggaatccatt

SEQ ID NO: 388743 - DNA, 15 bp, Homo sapiens
gcagctggaatccat

SEQ ID NO: 388744 - DNA, 15 bp, Homo sapiens
agcagctggaatcca

SEQ ID NO: 388745 - DNA, 15 bp, Homo sapiens
aagcagctggaatcc

SEQ ID NO: 388746 - DNA, 15 bp, Homo sapiens
gaagcagctggaatc

SEQ ID NO: 388747 - DNA, 15 bp, Homo sapiens
tgaagcagctggaat

SEQ ID NO: 388748 - DNA, 15 bp, Homo sapiens
ctgaagcagctggaa

SEQ ID NO: 388749 - DNA, 15 bp, Homo sapiens
actgaagcagctgga

SEQ ID NO: 388750 - DNA, 15 bp, Homo sapiens
aactgaagcagctgg

SEQ ID NO: 388751 - DNA, 15 bp, Homo sapiens
aaactgaagcagctg

SEQ ID NO: 388752 - DNA, 15 bp, Homo sapiens
aaaactgaagcagct

SEQ ID NO: 388753 - DNA, 15 bp, Homo sapiens
aaaaactgaagcagc

SEQ ID NO: 388754 - DNA, 15 bp, Homo sapiens
aaaaaactgaagcag

SEQ ID NO: 388755 - DNA, 15 bp, Homo sapiens
aaaaaaactgaagca

SEQ ID NO: 388756 - DNA, 15 bp, Homo sapiens
gaaaaaaactgaagc

SEQ ID NO: 388757 - DNA, 15 bp, Homo sapiens
agaaaaaaactgaag

SEQ ID NO: 388758 - DNA, 15 bp, Homo sapiens
aagaaaaaaactgaa

SEQ ID NO: 388759 - DNA, 15 bp, Homo sapiens
aaagaaaaaaactga

SEQ ID NO: 388760 - DNA, 15 bp, Homo sapiens
aaaagaaaaaaactg

SEQ ID NO: 388761 - DNA, 15 bp, Homo sapiens
taaaagaaaaaaact

SEQ ID NO: 388762 - DNA, 15 bp, Homo sapiens
ataaaagaaaaaaac

SEQ ID NO: 388763 - DNA, 15 bp, Homo sapiens
aataaaagaaaaaaa

SEQ ID NO: 388764 - DNA, 15 bp, Homo sapiens
taataaaagaaaaaa

SEQ ID NO: 388765 - DNA, 15 bp, Homo sapiens
ataataaaagaaaaa

SEQ ID NO: 388766 - DNA, 15 bp, Homo sapiens
aataataaaagaaaa

SEQ ID NO: 388767 - DNA, 15 bp, Homo sapiens
aaataataaaagaaa

SEQ ID NO: 388768 - DNA, 15 bp, Homo sapiens
taaataataaaagaa

SEQ ID NO: 388769 - DNA, 15 bp, Homo sapiens
ttaaataataaaaga

SEQ ID NO: 388770 - DNA, 15 bp, Homo sapiens
tttaaataataaaag

SEQ ID NO: 388771 - DNA, 15 bp, Homo sapiens
gatttttttaaataa

SEQ ID NO: 388772 - DNA, 15 bp, Homo sapiens
tgatttttttaaata

SEQ ID NO: 388773 - DNA, 15 bp, Homo sapiens
gtgatttttttaaat

SEQ ID NO: 388774 - DNA, 15 bp, Homo sapiens
agtgatttttttaaa

SEQ ID NO: 388775 - DNA, 15 bp, Homo sapiens
cagtgatttttttaa

SEQ ID NO: 388776 - DNA, 15 bp, Homo sapiens
tcagtgattttttta

SEQ ID NO: 388777 - DNA, 15 bp, Homo sapiens
atcagtgattttttt

SEQ ID NO: 388778 - DNA, 15 bp, Homo sapiens
tatcagtgatttttt

SEQ ID NO: 388779 - DNA, 15 bp, Homo sapiens
ttatcagtgattttt

SEQ ID NO: 388780 - DNA, 15 bp, Homo sapiens
tttatcagtgatttt

SEQ ID NO: 388781 - DNA, 15 bp, Homo sapiens
atttatcagtgattt

SEQ ID NO: 388782 - DNA, 15 bp, Homo sapiens
tatttatcagtgatt

SEQ ID NO: 388783 - DNA, 15 bp, Homo sapiens
gtatttatcagtgat

SEQ ID NO: 388784 - DNA, 15 bp, Homo sapiens
ggtatttatcagtga

SEQ ID NO: 388785 - DNA, 15 bp, Homo sapiens
tggtatttatcagtg

SEQ ID NO: 388786 - DNA, 15 bp, Homo sapiens
atggtatttatcagt

SEQ ID NO: 388787 - DNA, 15 bp, Homo sapiens
tatggtatttatcag

SEQ ID NO: 388788 - DNA, 15 bp, Homo sapiens
atatggtatttatca

SEQ ID NO: 388789 - DNA, 15 bp, Homo sapiens
aatatggtatttatc

SEQ ID NO: 388790 - DNA, 15 bp, Homo sapiens
gaatatggtatttat

SEQ ID NO: 388791 - DNA, 15 bp, Homo sapiens
agaatatggtattta

SEQ ID NO: 388792 - DNA, 15 bp, Homo sapiens
aagaatatggtattt

SEQ ID NO: 388793 - DNA, 15 bp, Homo sapiens
aaagaatatggtatt

SEQ ID NO: 388794 - DNA, 15 bp, Homo sapiens
caaagaatatggtat

SEQ ID NO: 388795 - DNA, 15 bp, Homo sapiens
gcaaagaatatggta

SEQ ID NO: 388796 - DNA, 15 bp, Homo sapiens
tgcaaagaatatggt

SEQ ID NO: 388797 - DNA, 15 bp, Homo sapiens
ctgcaaagaatatgg

SEQ ID NO: 388798 - DNA, 15 bp, Homo sapiens
tctgcaaagaatatg

SEQ ID NO: 388799 - DNA, 15 bp, Homo sapiens
gtctgcaaagaatat

SEQ ID NO: 388800 - DNA, 15 bp, Homo sapiens
tgtctgcaaagaata

SEQ ID NO: 388801 - DNA, 15 bp, Homo sapiens
ctgtctgcaaagaat

SEQ ID NO: 388802 - DNA, 15 bp, Homo sapiens
gctgtctgcaaagaa

SEQ ID NO: 388803 - DNA, 15 bp, Homo sapiens
tgctgtctgcaaaga

SEQ ID NO: 388804 - DNA, 15 bp, Homo sapiens
atgctgtctgcaaag

SEQ ID NO: 388805 - DNA, 15 bp, Homo sapiens
tatgctgtctgcaaa

SEQ ID NO: 388806 - DNA, 15 bp, Homo sapiens
ttatgctgtctgcaa

SEQ ID NO: 388807 - DNA, 15 bp, Homo sapiens
cttatgctgtctgca

SEQ ID NO: 388808 - DNA, 15 bp, Homo sapiens
acttatgctgtctgc

SEQ ID NO: 388809 - DNA, 15 bp, Homo sapiens
tacttatgctgtctg

SEQ ID NO: 388810 - DNA, 15 bp, Homo sapiens
gtacttatgctgtct

SEQ ID NO: 388811 - DNA, 15 bp, Homo sapiens
ggtacttatgctgtc

SEQ ID NO: 388812 - DNA, 15 bp, Homo sapiens
tggtacttatgctgt

SEQ ID NO: 388813 - DNA, 15 bp, Homo sapiens
ttggtacttatgctg

SEQ ID NO: 388814 - DNA, 15 bp, Homo sapiens
attggtacttatgct

SEQ ID NO: 388815 - DNA, 15 bp, Homo sapiens
gattggtacttatgc

SEQ ID NO: 388816 - DNA, 15 bp, Homo sapiens
ggattggtacttatg

SEQ ID NO: 388817 - DNA, 15 bp, Homo sapiens
gggattggtacttat

SEQ ID NO: 388818 - DNA, 15 bp, Homo sapiens
tgggattggtactta

SEQ ID NO: 388819 - DNA, 15 bp, Homo sapiens
ctgggattggtactt

SEQ ID NO: 388820 - DNA, 15 bp, Homo sapiens
actgggattggtact

SEQ ID NO: 388821 - DNA, 15 bp, Homo sapiens
aactgggattggtac

SEQ ID NO: 388822 - DNA, 15 bp, Homo sapiens
caactgggattggta

SEQ ID NO: 388823 - DNA, 15 bp, Homo sapiens
tcaactgggattggt

SEQ ID NO: 388824 - DNA, 15 bp, Homo sapiens
gtcaactgggattgg

SEQ ID NO: 388825 - DNA, 15 bp, Homo sapiens
tgtcaactgggattg

SEQ ID NO: 388826 - DNA, 15 bp, Homo sapiens
atgtcaactgggatt

SEQ ID NO: 388827 - DNA, 15 bp, Homo sapiens
gatgtcaactgggat

SEQ ID NO: 388828 - DNA, 15 bp, Homo sapiens
tgatgtcaactggga

SEQ ID NO: 388829 - DNA, 15 bp, Homo sapiens
ctgatgtcaactggg

SEQ ID NO: 388830 - DNA, 15 bp, Homo sapiens
tctgatgtcaactgg

SEQ ID NO: 388831 - DNA, 15 bp, Homo sapiens
atctgatgtcaactg

SEQ ID NO: 388832 - DNA, 15 bp, Homo sapiens
catctgatgtcaact

SEQ ID NO: 388833 - DNA, 15 bp, Homo sapiens
tcatctgatgtcaac

SEQ ID NO: 388834 - DNA, 15 bp, Homo sapiens
ttcatctgatgtcaa

SEQ ID NO: 388835 - DNA, 15 bp, Homo sapiens
tttcatctgatgtca

SEQ ID NO: 388836 - DNA, 15 bp, Homo sapiens
atttcatctgatgtc

SEQ ID NO: 388837 - DNA, 15 bp, Homo sapiens
catttcatctgatgt

SEQ ID NO: 388838 - DNA, 15 bp, Homo sapiens
ccatttcatctgatg

SEQ ID NO: 388839 - DNA, 15 bp, Homo sapiens
cccatttcatctgat

SEQ ID NO: 388840 - DNA, 15 bp, Homo sapiens
ccccatttcatctga

SEQ ID NO: 388841 - DNA, 15 bp, Homo sapiens
tccccatttcatctg

SEQ ID NO: 388842 - DNA, 15 bp, Homo sapiens
ttccccatttcatct

SEQ ID NO: 388843 - DNA, 15 bp, Homo sapiens
cttccccatttcatc

SEQ ID NO: 388844 - DNA, 15 bp, Homo sapiens
ccttccccatttcat

SEQ ID NO: 388845 - DNA, 15 bp, Homo sapiens
gccttccccatttca

SEQ ID NO: 388846 - DNA, 15 bp, Homo sapiens
agccttccccatttc

SEQ ID NO: 388847 - DNA, 15 bp, Homo sapiens
tagccttccccattt

SEQ ID NO: 388848 - DNA, 15 bp, Homo sapiens
ctagccttccccatt

SEQ ID NO: 388849 - DNA, 15 bp, Homo sapiens
actagccttccccat

SEQ ID NO: 388850 - DNA, 15 bp, Homo sapiens
cactagccttcccca

SEQ ID NO: 388851 - DNA, 15 bp, Homo sapiens
acactagccttcccc

SEQ ID NO: 388852 - DNA, 15 bp, Homo sapiens
cacactagccttccc

SEQ ID NO: 388853 - DNA, 15 bp, Homo sapiens
tcacactagccttcc

SEQ ID NO: 388854 - DNA, 15 bp, Homo sapiens
ctcacactagccttc

SEQ ID NO: 388855 - DNA, 15 bp, Homo sapiens
cctcacactagcctt

SEQ ID NO: 388856 - DNA, 15 bp, Homo sapiens
ccctcacactagcct

SEQ ID NO: 388857 - DNA, 15 bp, Homo sapiens
tccctcacactagcc

SEQ ID NO: 388858 - DNA, 15 bp, Homo sapiens
ttccctcacactagc

SEQ ID NO: 388859 - DNA, 15 bp, Homo sapiens
tttccctcacactag

SEQ ID NO: 388860 - DNA, 15 bp, Homo sapiens
ttttccctcacacta

SEQ ID NO: 388861 - DNA, 15 bp, Homo sapiens
cttttccctcacact

SEQ ID NO: 388862 - DNA, 15 bp, Homo sapiens
tcttttccctcacac

SEQ ID NO: 388863 - DNA, 15 bp, Homo sapiens
ctcttttccctcaca

SEQ ID NO: 388864 - DNA, 15 bp, Homo sapiens
cctcttttccctcac

SEQ ID NO: 388865 - DNA, 15 bp, Homo sapiens
tcctcttttccctca

SEQ ID NO: 388866 - DNA, 15 bp, Homo sapiens
ctcctcttttccctc

SEQ ID NO: 388867 - DNA, 15 bp, Homo sapiens
gctcctcttttccct

SEQ ID NO: 388868 - DNA, 15 bp, Homo sapiens
tgctcctcttttccc

SEQ ID NO: 388869 - DNA, 15 bp, Homo sapiens
ctgctcctcttttcc

SEQ ID NO: 388870 - DNA, 15 bp, Homo sapiens
cctgctcctcttttc

SEQ ID NO: 388871 - DNA, 15 bp, Homo sapiens
acctgctcctctttt

SEQ ID NO: 388872 - DNA, 15 bp, Homo sapiens
aacctgctcctcttt

SEQ ID NO: 388873 - DNA, 15 bp, Homo sapiens
aaacctgctcctctt

SEQ ID NO: 388874 - DNA, 15 bp, Homo sapiens
aaaacctgctcctct

SEQ ID NO: 388875 - DNA, 15 bp, Homo sapiens
caaaacctgctcctc

SEQ ID NO: 388876 - DNA, 15 bp, Homo sapiens
ccaaaacctgctcct

SEQ ID NO: 388877 - DNA, 15 bp, Homo sapiens
gccaaaacctgctcc

SEQ ID NO: 388878 - DNA, 15 bp, Homo sapiens
cgccaaaacctgctc

SEQ ID NO: 388879 - DNA, 15 bp, Homo sapiens
ccgccaaaacctgct

SEQ ID NO: 388880 - DNA, 15 bp, Homo sapiens
tccgccaaaacctgc

SEQ ID NO: 388881 - DNA, 15 bp, Homo sapiens
ttccgccaaaacctg

SEQ ID NO: 388882 - DNA, 15 bp, Homo sapiens
tttccgccaaaacct

SEQ ID NO: 388883 - DNA, 15 bp, Homo sapiens
ctttccgccaaaacc

SEQ ID NO: 388884 - DNA, 15 bp, Homo sapiens
tctttccgccaaaac

SEQ ID NO: 388885 - DNA, 15 bp, Homo sapiens
gtctttccgccaaaa

SEQ ID NO: 388886 - DNA, 15 bp, Homo sapiens
agtctttccgccaaa

SEQ ID NO: 388887 - DNA, 15 bp, Homo sapiens
tagtctttccgccaa

SEQ ID NO: 388888 - DNA, 15 bp, Homo sapiens
ctagtctttccgcca

SEQ ID NO: 388889 - DNA, 15 bp, Homo sapiens
actagtctttccgcc

SEQ ID NO: 388890 - DNA, 15 bp, Homo sapiens
aactagtctttccgc

SEQ ID NO: 388891 - DNA, 15 bp, Homo sapiens
aaactagtctttccg

SEQ ID NO: 388892 - DNA, 15 bp, Homo sapiens
aaaactagtctttcc

SEQ ID NO: 388893 - DNA, 15 bp, Homo sapiens
caaaactagtctttc

SEQ ID NO: 388894 - DNA, 15 bp, Homo sapiens
ccaaaactagtcttt

SEQ ID NO: 388895 - DNA, 15 bp, Homo sapiens
tccaaaactagtctt

SEQ ID NO: 388896 - DNA, 15 bp, Homo sapiens
atccaaaactagtct

SEQ ID NO: 388897 - DNA, 15 bp, Homo sapiens
catccaaaactagtc

SEQ ID NO: 388898 - DNA, 15 bp, Homo sapiens
acatccaaaactagt

SEQ ID NO: 388899 - DNA, 15 bp, Homo sapiens
gacatccaaaactag

SEQ ID NO: 388900 - DNA, 15 bp, Homo sapiens
tgacatccaaaacta

SEQ ID NO: 388901 - DNA, 15 bp, Homo sapiens
ctgacatccaaaact

SEQ ID NO: 388902 - DNA, 15 bp, Homo sapiens
actgacatccaaaac

SEQ ID NO: 388903 - DNA, 15 bp, Homo sapiens
cactgacatccaaaa

SEQ ID NO: 388904 - DNA, 15 bp, Homo sapiens
ccactgacatccaaa

SEQ ID NO: 388905 - DNA, 15 bp, Homo sapiens
tccactgacatccaa

SEQ ID NO: 388906 - DNA, 15 bp, Homo sapiens
ttccactgacatcca

SEQ ID NO: 388907 - DNA, 15 bp, Homo sapiens
cttccactgacatcc

SEQ ID NO: 388908 - DNA, 15 bp, Homo sapiens
tcttccactgacatc

SEQ ID NO: 388909 - DNA, 15 bp, Homo sapiens
ctcttccactgacat

SEQ ID NO: 388910 - DNA, 15 bp, Homo sapiens
tctcttccactgaca

SEQ ID NO: 388911 - DNA, 15 bp, Homo sapiens
atctcttccactgac

SEQ ID NO: 388912 - DNA, 15 bp, Homo sapiens
aatctcttccactga

SEQ ID NO: 388913 - DNA, 15 bp, Homo sapiens
gaatctcttccactg

SEQ ID NO: 388914 - DNA, 15 bp, Homo sapiens
tgaatctcttccact

SEQ ID NO: 388915 - DNA, 15 bp, Homo sapiens
ttgaatctcttccac

SEQ ID NO: 388916 - DNA, 15 bp, Homo sapiens
tttgaatctcttcca

SEQ ID NO: 388917 - DNA, 15 bp, Homo sapiens
atttgaatctcttcc

SEQ ID NO: 388918 - DNA, 15 bp, Homo sapiens
tatttgaatctcttc

SEQ ID NO: 388919 - DNA, 15 bp, Homo sapiens
atatttgaatctctt

SEQ ID NO: 388920 - DNA, 15 bp, Homo sapiens
aatatttgaatctct

SEQ ID NO: 388921 - DNA, 15 bp, Homo sapiens
gaatatttgaatctc

SEQ ID NO: 388922 - DNA, 15 bp, Homo sapiens
tgaatatttgaatct

SEQ ID NO: 388923 - DNA, 15 bp, Homo sapiens
ttgaatatttgaatc

SEQ ID NO: 388924 - DNA, 15 bp, Homo sapiens
tttgaatatttgaat

SEQ ID NO: 388925 - DNA, 15 bp, Homo sapiens
atttgaatatttgaa

SEQ ID NO: 388926 - DNA, 15 bp, Homo sapiens
aatttgaatatttga

SEQ ID NO: 388927 - DNA, 15 bp, Homo sapiens
caatttgaatatttg

SEQ ID NO: 388928 - DNA, 15 bp, Homo sapiens
tcaatttgaatattt

SEQ ID NO: 388929 - DNA, 15 bp, Homo sapiens
ctcaatttgaatatt

SEQ ID NO: 388930 - DNA, 15 bp, Homo sapiens
tctcaatttgaatat

SEQ ID NO: 388931 - DNA, 15 bp, Homo sapiens
atctcaatttgaata

SEQ ID NO: 388932 - DNA, 15 bp, Homo sapiens
tatctcaatttgaat

SEQ ID NO: 388933 - DNA, 15 bp, Homo sapiens
atatctcaatttgaa

SEQ ID NO: 388934 - DNA, 15 bp, Homo sapiens
aatatctcaatttga

SEQ ID NO: 388935 - DNA, 15 bp, Homo sapiens
caatatctcaatttg

SEQ ID NO: 388936 - DNA, 15 bp, Homo sapiens
ccaatatctcaattt

SEQ ID NO: 388937 - DNA, 15 bp, Homo sapiens
cccaatatctcaatt

SEQ ID NO: 388938 - DNA, 15 bp, Homo sapiens
acccaatatctcaat

SEQ ID NO: 388939 - DNA, 15 bp, Homo sapiens
tacccaatatctcaa

SEQ ID NO: 388940 - DNA, 15 bp, Homo sapiens
ctacccaatatctca

SEQ ID NO: 388941 - DNA, 15 bp, Homo sapiens
cctacccaatatctc

SEQ ID NO: 388942 - DNA, 15 bp, Homo sapiens
acctacccaatatct

SEQ ID NO: 388943 - DNA, 15 bp, Homo sapiens
tacctacccaatatc

SEQ ID NO: 388944 - DNA, 15 bp, Homo sapiens
ctacctacccaatat

SEQ ID NO: 388945 - DNA, 15 bp, Homo sapiens
actacctacccaata

SEQ ID NO: 388946 - DNA, 15 bp, Homo sapiens
aactacctacccaat

SEQ ID NO: 388947 - DNA, 15 bp, Homo sapiens
caactacctacccaa

SEQ ID NO: 388948 - DNA, 15 bp, Homo sapiens
ccaactacctaccca

SEQ ID NO: 388949 - DNA, 15 bp, Homo sapiens
tccaactacctaccc

SEQ ID NO: 388950 - DNA, 15 bp, Homo sapiens
atccaactacctacc

SEQ ID NO: 388951 - DNA, 15 bp, Homo sapiens
tatccaactacctac

SEQ ID NO: 388952 - DNA, 15 bp, Homo sapiens
atatccaactaccta

SEQ ID NO: 388953 - DNA, 15 bp, Homo sapiens
catatccaactacct

SEQ ID NO: 388954 - DNA, 15 bp, Homo sapiens
acatatccaactacc

SEQ ID NO: 388955 - DNA, 15 bp, Homo sapiens
cacatatccaactac

SEQ ID NO: 388956 - DNA, 15 bp, Homo sapiens
tcacatatccaacta

SEQ ID NO: 388957 - DNA, 15 bp, Homo sapiens
ctcacatatccaact

SEQ ID NO: 388958 - DNA, 15 bp, Homo sapiens
actcacatatccaac

SEQ ID NO: 388959 - DNA, 15 bp, Homo sapiens
gactcacatatccaa

SEQ ID NO: 388960 - DNA, 15 bp, Homo sapiens
agactcacatatcca

SEQ ID NO: 388961 - DNA, 15 bp, Homo sapiens
cagactcacatatcc

SEQ ID NO: 388962 - DNA, 15 bp, Homo sapiens
ccagactcacatatc

SEQ ID NO: 388963 - DNA, 15 bp, Homo sapiens
tccagactcacatat

SEQ ID NO: 388964 - DNA, 15 bp, Homo sapiens
ctccagactcacata

SEQ ID NO: 388965 - DNA, 15 bp, Homo sapiens
cctccagactcacat

SEQ ID NO: 388966 - DNA, 15 bp, Homo sapiens
acctccagactcaca

SEQ ID NO: 388967 - DNA, 15 bp, Homo sapiens
tacctccagactcac

SEQ ID NO: 388968 - DNA, 15 bp, Homo sapiens
ctacctccagactca

SEQ ID NO: 388969 - DNA, 15 bp, Homo sapiens
tctacctccagactc

SEQ ID NO: 388970 - DNA, 15 bp, Homo sapiens
ctctacctccagact

SEQ ID NO: 388971 - DNA, 15 bp, Homo sapiens
tctctacctccagac

SEQ ID NO: 388972 - DNA, 15 bp, Homo sapiens
ctctctacctccaga

SEQ ID NO: 388973 - DNA, 15 bp, Homo sapiens
tctctctacctccag

SEQ ID NO: 388974 - DNA, 15 bp, Homo sapiens
ctctctctacctcca

SEQ ID NO: 388975 - DNA, 15 bp, Homo sapiens
tctctctctacctcc

SEQ ID NO: 388976 - DNA, 15 bp, Homo sapiens
ctctctctctacctc

SEQ ID NO: 388977 - DNA, 15 bp, Homo sapiens
tctctctctctacct

SEQ ID NO: 388978 - DNA, 15 bp, Homo sapiens
ctctctctctctacc

SEQ ID NO: 388979 - DNA, 15 bp, Homo sapiens
tctctctctctctac

SEQ ID NO: 388980 - DNA, 15 bp, Homo sapiens
atctctctctctcta

SEQ ID NO: 388981 - DNA, 15 bp, Homo sapiens
aatctctctctctct

SEQ ID NO: 388982 - DNA, 15 bp, Homo sapiens
aaatctctctctctc

SEQ ID NO: 388983 - DNA, 15 bp, Homo sapiens
gaaatctctctctct

SEQ ID NO: 388984 - DNA, 15 bp, Homo sapiens
tgaaatctctctctc

SEQ ID NO: 388985 - DNA, 15 bp, Homo sapiens
ctgaaatctctctct

SEQ ID NO: 388986 - DNA, 15 bp, Homo sapiens
tctgaaatctctctc

SEQ ID NO: 388987 - DNA, 15 bp, Homo sapiens
atctgaaatctctct

SEQ ID NO: 388988 - DNA, 15 bp, Homo sapiens
tatctgaaatctctc

SEQ ID NO: 388989 - DNA, 15 bp, Homo sapiens
ctatctgaaatctct

SEQ ID NO: 388990 - DNA, 15 bp, Homo sapiens
cctatctgaaatctc

SEQ ID NO: 388991 - DNA, 15 bp, Homo sapiens
acctatctgaaatct

SEQ ID NO: 388992 - DNA, 15 bp, Homo sapiens
cacctatctgaaatc

SEQ ID NO: 388993 - DNA, 15 bp, Homo sapiens
ccacctatctgaaat

SEQ ID NO: 388994 - DNA, 15 bp, Homo sapiens
accacctatctgaaa

SEQ ID NO: 388995 - DNA, 15 bp, Homo sapiens
taccacctatctgaa

SEQ ID NO: 388996 - DNA, 15 bp, Homo sapiens
ataccacctatctga

SEQ ID NO: 388997 - DNA, 15 bp, Homo sapiens
aataccacctatctg

SEQ ID NO: 388998 - DNA, 15 bp, Homo sapiens
aaataccacctatct

SEQ ID NO: 388999 - DNA, 15 bp, Homo sapiens
taaataccacctatc

SEQ ID NO: 389000 - DNA, 15 bp, Homo sapiens
ttaaataccacctat

SEQ ID NO: 389001 - DNA, 15 bp, Homo sapiens
tttaaataccaccta

SEQ ID NO: 389002 - DNA, 15 bp, Homo sapiens
ctttaaataccacct

SEQ ID NO: 389003 - DNA, 15 bp, Homo sapiens
actttaaataccacc

SEQ ID NO: 389004 - DNA, 15 bp, Homo sapiens
gactttaaataccac

SEQ ID NO: 389005 - DNA, 15 bp, Homo sapiens
tgactttaaatacca

SEQ ID NO: 389006 - DNA, 15 bp, Homo sapiens
atgactttaaatacc

SEQ ID NO: 389007 - DNA, 15 bp, Homo sapiens
catgactttaaatac

SEQ ID NO: 389008 - DNA, 15 bp, Homo sapiens
ccatgactttaaata

SEQ ID NO: 389009 - DNA, 15 bp, Homo sapiens
cccatgactttaaat

SEQ ID NO: 389010 - DNA, 15 bp, Homo sapiens
tcccatgactttaaa

SEQ ID NO: 389011 - DNA, 15 bp, Homo sapiens
atcccatgactttaa

SEQ ID NO: 389012 - DNA, 15 bp, Homo sapiens
aatcccatgacttta

SEQ ID NO: 389013 - DNA, 15 bp, Homo sapiens
taatcccatgacttt

SEQ ID NO: 389014 - DNA, 15 bp, Homo sapiens
ctaatcccatgactt

SEQ ID NO: 389015 - DNA, 15 bp, Homo sapiens
tctaatcccatgact

SEQ ID NO: 389016 - DNA, 15 bp, Homo sapiens
atctaatcccatgac

SEQ ID NO: 389017 - DNA, 15 bp, Homo sapiens
tatctaatcccatga

SEQ ID NO: 389018 - DNA, 15 bp, Homo sapiens
atatctaatcccatg

SEQ ID NO: 389019 - DNA, 15 bp, Homo sapiens
catatctaatcccat

SEQ ID NO: 389020 - DNA, 15 bp, Homo sapiens
ccatatctaatccca

SEQ ID NO: 389021 - DNA, 15 bp, Homo sapiens
accatatctaatccc

SEQ ID NO: 389022 - DNA, 15 bp, Homo sapiens
aaccatatctaatcc

SEQ ID NO: 389023 - DNA, 15 bp, Homo sapiens
taaccatatctaatc

SEQ ID NO: 389024 - DNA, 15 bp, Homo sapiens
gtaaccatatctaat

SEQ ID NO: 389025 - DNA, 15 bp, Homo sapiens
agtaaccatatctaa

SEQ ID NO: 389026 - DNA, 15 bp, Homo sapiens
tagtaaccatatcta

SEQ ID NO: 389027 - DNA, 15 bp, Homo sapiens
ttagtaaccatatct

SEQ ID NO: 389028 - DNA, 15 bp, Homo sapiens
tttagtaaccatatc

SEQ ID NO: 389029 - DNA, 15 bp, Homo sapiens
ctttagtaaccatat

SEQ ID NO: 389030 - DNA, 15 bp, Homo sapiens
tctttagtaaccata

SEQ ID NO: 389031 - DNA, 15 bp, Homo sapiens
ttctttagtaaccat

SEQ ID NO: 389032 - DNA, 15 bp, Homo sapiens
cttctttagtaacca

SEQ ID NO: 389033 - DNA, 15 bp, Homo sapiens
acttctttagtaacc

SEQ ID NO: 389034 - DNA, 15 bp, Homo sapiens
cacttctttagtaac

SEQ ID NO: 389035 - DNA, 15 bp, Homo sapiens
tcacttctttagtaa

SEQ ID NO: 389036 - DNA, 15 bp, Homo sapiens
ctcacttctttagta

SEQ ID NO: 389037 - DNA, 15 bp, Homo sapiens
actcacttctttagt

SEQ ID NO: 389038 - DNA, 15 bp, Homo sapiens
tactcacttctttag

SEQ ID NO: 389039 - DNA, 15 bp, Homo sapiens
atactcacttcttta

SEQ ID NO: 389040 - DNA, 15 bp, Homo sapiens
tatactcacttcttt

SEQ ID NO: 389041 - DNA, 15 bp, Homo sapiens
gtatactcacttctt

SEQ ID NO: 389042 - DNA, 15 bp, Homo sapiens
tgtatactcacttct

SEQ ID NO: 389043 - DNA, 15 bp, Homo sapiens
atgtatactcacttc

SEQ ID NO: 389044 - DNA, 15 bp, Homo sapiens
catgtatactcactt

SEQ ID NO: 389045 - DNA, 15 bp, Homo sapiens
tcatgtatactcact

SEQ ID NO: 389046 - DNA, 15 bp, Homo sapiens
ctcatgtatactcac

SEQ ID NO: 389047 - DNA, 15 bp, Homo sapiens
tctcatgtatactca

SEQ ID NO: 389048 - DNA, 15 bp, Homo sapiens
ctctcatgtatactc

SEQ ID NO: 389049 - DNA, 15 bp, Homo sapiens
actctcatgtatact

SEQ ID NO: 389050 - DNA, 15 bp, Homo sapiens
gactctcatgtatac

SEQ ID NO: 389051 - DNA, 15 bp, Homo sapiens
ggactctcatgtata

SEQ ID NO: 389052 - DNA, 15 bp, Homo sapiens
aggactctcatgtat

SEQ ID NO: 389053 - DNA, 15 bp, Homo sapiens
aaggactctcatgta

SEQ ID NO: 389054 - DNA, 15 bp, Homo sapiens
taaggactctcatgt

SEQ ID NO: 389055 - DNA, 15 bp, Homo sapiens
ttaaggactctcatg

SEQ ID NO: 389056 - DNA, 15 bp, Homo sapiens
tttaaggactctcat

SEQ ID NO: 389057 - DNA, 15 bp, Homo sapiens
atttaaggactctca

SEQ ID NO: 389058 - DNA, 15 bp, Homo sapiens
aatttaaggactctc

SEQ ID NO: 389059 - DNA, 15 bp, Homo sapiens
caatttaaggactct

SEQ ID NO: 389060 - DNA, 15 bp, Homo sapiens
gcaatttaaggactc

SEQ ID NO: 389061 - DNA, 15 bp, Homo sapiens
tgcaatttaaggact

SEQ ID NO: 389062 - DNA, 15 bp, Homo sapiens
atgcaatttaaggac

SEQ ID NO: 389063 - DNA, 15 bp, Homo sapiens
catgcaatttaagga

SEQ ID NO: 389064 - DNA, 15 bp, Homo sapiens
ccatgcaatttaagg

SEQ ID NO: 389065 - DNA, 15 bp, Homo sapiens
accatgcaatttaag

SEQ ID NO: 389066 - DNA, 15 bp, Homo sapiens
caccatgcaatttaa

SEQ ID NO: 389067 - DNA, 15 bp, Homo sapiens
ccaccatgcaattta

SEQ ID NO: 389068 - DNA, 15 bp, Homo sapiens
cccaccatgcaattt

SEQ ID NO: 389069 - DNA, 15 bp, Homo sapiens
ccccaccatgcaatt

SEQ ID NO: 389070 - DNA, 15 bp, Homo sapiens
gccccaccatgcaat

SEQ ID NO: 389071 - DNA, 15 bp, Homo sapiens
agccccaccatgcaa

SEQ ID NO: 389072 - DNA, 15 bp, Homo sapiens
aagccccaccatgca

SEQ ID NO: 389073 - DNA, 15 bp, Homo sapiens
aaagccccaccatgc

SEQ ID NO: 389074 - DNA, 15 bp, Homo sapiens
gaaagccccaccatg

SEQ ID NO: 389075 - DNA, 15 bp, Homo sapiens
ggaaagccccaccat

SEQ ID NO: 389076 - DNA, 15 bp, Homo sapiens
tggaaagccccacca

SEQ ID NO: 389077 - DNA, 15 bp, Homo sapiens
ttggaaagccccacc

SEQ ID NO: 389078 - DNA, 15 bp, Homo sapiens
gttggaaagccccac

SEQ ID NO: 389079 - DNA, 15 bp, Homo sapiens
ggttggaaagcccca

SEQ ID NO: 389080 - DNA, 15 bp, Homo sapiens
gggttggaaagcccc

SEQ ID NO: 389081 - DNA, 15 bp, Homo sapiens
tgggttggaaagccc

SEQ ID NO: 389082 - DNA, 15 bp, Homo sapiens
ttgggttggaaagcc

SEQ ID NO: 389083 - DNA, 15 bp, Homo sapiens
tttgggttggaaagc

SEQ ID NO: 389084 - DNA, 15 bp, Homo sapiens
ctttgggttggaaag

SEQ ID NO: 389085 - DNA, 15 bp, Homo sapiens
tctttgggttggaaa

SEQ ID NO: 389086 - DNA, 15 bp, Homo sapiens
ctctttgggttggaa

SEQ ID NO: 389087 - DNA, 15 bp, Homo sapiens
cctctttgggttgga

SEQ ID NO: 389088 - DNA, 15 bp, Homo sapiens
tcctctttgggttgg

SEQ ID NO: 389089 - DNA, 15 bp, Homo sapiens
atcctctttgggttg

SEQ ID NO: 389090 - DNA, 15 bp, Homo sapiens
catcctctttgggtt

SEQ ID NO: 389091 - DNA, 15 bp, Homo sapiens
ccatcctctttgggt

SEQ ID NO: 389092 - DNA, 15 bp, Homo sapiens
cccatcctctttggg

SEQ ID NO: 389093 - DNA, 15 bp, Homo sapiens
tcccatcctctttgg

SEQ ID NO: 389094 - DNA, 15 bp, Homo sapiens
ctcccatcctctttg

SEQ ID NO: 389095 - DNA, 15 bp, Homo sapiens
cctcccatcctcttt

SEQ ID NO: 389096 - DNA, 15 bp, Homo sapiens
tcctcccatcctctt

SEQ ID NO: 389097 - DNA, 15 bp, Homo sapiens
ttcctcccatcctct

SEQ ID NO: 389098 - DNA, 15 bp, Homo sapiens
cttcctcccatcctc

SEQ ID NO: 389099 - DNA, 15 bp, Homo sapiens
tcttcctcccatcct

SEQ ID NO: 389100 - DNA, 15 bp, Homo sapiens
ttcttcctcccatcc

SEQ ID NO: 389101 - DNA, 15 bp, Homo sapiens
cttcttcctcccatc

SEQ ID NO: 389102 - DNA, 15 bp, Homo sapiens
tcttcttcctcccat

SEQ ID NO: 389103 - DNA, 15 bp, Homo sapiens
ttcttcttcctccca

SEQ ID NO: 389104 - DNA, 15 bp, Homo sapiens
gttcttcttcctccc

SEQ ID NO: 389105 - DNA, 15 bp, Homo sapiens
ggttcttcttcctcc

SEQ ID NO: 389106 - DNA, 15 bp, Homo sapiens
cggttcttcttcctc

SEQ ID NO: 389107 - DNA, 15 bp, Homo sapiens
ccggttcttcttcct

SEQ ID NO: 389108 - DNA, 15 bp, Homo sapiens
gccggttcttcttcc

SEQ ID NO: 389109 - DNA, 15 bp, Homo sapiens
tgccggttcttcttc

SEQ ID NO: 389110 - DNA, 15 bp, Homo sapiens
ttgccggttcttctt

SEQ ID NO: 389111 - DNA, 15 bp, Homo sapiens
tttgccggttcttct

SEQ ID NO: 389112 - DNA, 15 bp, Homo sapiens
ctttgccggttcttc

SEQ ID NO: 389113 - DNA, 15 bp, Homo sapiens
cctttgccggttctt

SEQ ID NO: 389114 - DNA, 15 bp, Homo sapiens
tcctttgccggttct

SEQ ID NO: 389115 - DNA, 15 bp, Homo sapiens
ctcctttgccggttc

SEQ ID NO: 389116 - DNA, 15 bp, Homo sapiens
tctcctttgccggtt

SEQ ID NO: 389117 - DNA, 15 bp, Homo sapiens
gtctcctttgccggt

SEQ ID NO: 389118 - DNA, 15 bp, Homo sapiens
agtctcctttgccgg

SEQ ID NO: 389119 - DNA, 15 bp, Homo sapiens
cagtctcctttgccg

SEQ ID NO: 389120 - DNA, 15 bp, Homo sapiens
tcagtctcctttgcc

SEQ ID NO: 389121 - DNA, 15 bp, Homo sapiens
ctcagtctcctttgc

SEQ ID NO: 389122 - DNA, 15 bp, Homo sapiens
tctcagtctcctttg

SEQ ID NO: 389123 - DNA, 15 bp, Homo sapiens
ttctcagtctccttt

SEQ ID NO: 389124 - DNA, 15 bp, Homo sapiens
cttctcagtctcctt

SEQ ID NO: 389125 - DNA, 15 bp, Homo sapiens
ccttctcagtctcct

SEQ ID NO: 389126 - DNA, 15 bp, Homo sapiens
tccttctcagtctcc

SEQ ID NO: 389127 - DNA, 15 bp, Homo sapiens
atccttctcagtctc

SEQ ID NO: 389128 - DNA, 15 bp, Homo sapiens
catccttctcagtct

SEQ ID NO: 389129 - DNA, 15 bp, Homo sapiens
tcatccttctcagtc

SEQ ID NO: 389130 - DNA, 15 bp, Homo sapiens
atcatccttctcagt

SEQ ID NO: 389131 - DNA, 15 bp, Homo sapiens
aatcatccttctcag

SEQ ID NO: 389132 - DNA, 15 bp, Homo sapiens
taatcatccttctca

SEQ ID NO: 389133 - DNA, 15 bp, Homo sapiens
ttaatcatccttctc

SEQ ID NO: 389134 - DNA, 15 bp, Homo sapiens
cttaatcatccttct

SEQ ID NO: 389135 - DNA, 15 bp, Homo sapiens
tcttaatcatccttc

SEQ ID NO: 389136 - DNA, 15 bp, Homo sapiens
ttcttaatcatcctt

SEQ ID NO: 389137 - DNA, 15 bp, Homo sapiens
gttcttaatcatcct

SEQ ID NO: 389138 - DNA, 15 bp, Homo sapiens
agttcttaatcatcc

SEQ ID NO: 389139 - DNA, 15 bp, Homo sapiens
aagttcttaatcatc

SEQ ID NO: 389140 - DNA, 15 bp, Homo sapiens
gaagttcttaatcat

SEQ ID NO: 389141 - DNA, 15 bp, Homo sapiens
agaagttcttaatca

SEQ ID NO: 389142 - DNA, 15 bp, Homo sapiens
cagaagttcttaatc

SEQ ID NO: 389143 - DNA, 15 bp, Homo sapiens
gcagaagttcttaat

SEQ ID NO: 389144 - DNA, 15 bp, Homo sapiens
agcagaagttcttaa

SEQ ID NO: 389145 - DNA, 15 bp, Homo sapiens
cagcagaagttctta

SEQ ID NO: 389146 - DNA, 15 bp, Homo sapiens
gcagcagaagttctt

SEQ ID NO: 389147 - DNA, 15 bp, Homo sapiens
agcagcagaagttct

SEQ ID NO: 389148 - DNA, 15 bp, Homo sapiens
cagcagcagaagttc

SEQ ID NO: 389149 - DNA, 15 bp, Homo sapiens
ccagcagcagaagtt

SEQ ID NO: 389150 - DNA, 15 bp, Homo sapiens
cccagcagcagaagt

SEQ ID NO: 389151 - DNA, 15 bp, Homo sapiens
gcccagcagcagaag

SEQ ID NO: 389152 - DNA, 15 bp, Homo sapiens
ggcccagcagcagaa

SEQ ID NO: 389153 - DNA, 15 bp, Homo sapiens
aggcccagcagcaga

SEQ ID NO: 389154 - DNA, 15 bp, Homo sapiens
aaggcccagcagcag

SEQ ID NO: 389155 - DNA, 15 bp, Homo sapiens
aaaggcccagcagca

SEQ ID NO: 389156 - DNA, 15 bp, Homo sapiens
taaaggcccagcagc

SEQ ID NO: 389157 - DNA, 15 bp, Homo sapiens
ttaaaggcccagcag

SEQ ID NO: 389158 - DNA, 15 bp, Homo sapiens
cttaaaggcccagca

SEQ ID NO: 389159 - DNA, 15 bp, Homo sapiens
acttaaaggcccagc

SEQ ID NO: 389160 - DNA, 15 bp, Homo sapiens
cacttaaaggcccag

SEQ ID NO: 389161 - DNA, 15 bp, Homo sapiens
tcacttaaaggccca

SEQ ID NO: 389162 - DNA, 15 bp, Homo sapiens
ctcacttaaaggccc

SEQ ID NO: 389163 - DNA, 15 bp, Homo sapiens
tctcacttaaaggcc

SEQ ID NO: 389164 - DNA, 15 bp, Homo sapiens
ttctcacttaaaggc

SEQ ID NO: 389165 - DNA, 15 bp, Homo sapiens
attctcacttaaagg

SEQ ID NO: 389166 - DNA, 15 bp, Homo sapiens
aattctcacttaaag

SEQ ID NO: 389167 - DNA, 15 bp, Homo sapiens
gaattctcacttaaa

SEQ ID NO: 389168 - DNA, 15 bp, Homo sapiens
tgaattctcacttaa

SEQ ID NO: 389169 - DNA, 15 bp, Homo sapiens
atgaattctcactta

SEQ ID NO: 389170 - DNA, 15 bp, Homo sapiens
catgaattctcactt

SEQ ID NO: 389171 - DNA, 15 bp, Homo sapiens
acatgaattctcact

SEQ ID NO: 389172 - DNA, 15 bp, Homo sapiens
cacatgaattctcac

SEQ ID NO: 389173 - DNA, 15 bp, Homo sapiens
acacatgaattctca

SEQ ID NO: 389174 - DNA, 15 bp, Homo sapiens
cacacatgaattctc

SEQ ID NO: 389175 - DNA, 15 bp, Homo sapiens
acacacatgaattct

SEQ ID NO: 389176 - DNA, 15 bp, Homo sapiens
cacacacatgaattc

SEQ ID NO: 389177 - DNA, 15 bp, Homo sapiens
acacacacatgaatt

SEQ ID NO: 389178 - DNA, 15 bp, Homo sapiens
aacacacacatgaat

SEQ ID NO: 389179 - DNA, 15 bp, Homo sapiens
gaacacacacatgaa

SEQ ID NO: 389180 - DNA, 15 bp, Homo sapiens
tgaacacacacatga

SEQ ID NO: 389181 - DNA, 15 bp, Homo sapiens
ttgaacacacacatg

SEQ ID NO: 389182 - DNA, 15 bp, Homo sapiens
tttgaacacacacat

SEQ ID NO: 389183 - DNA, 15 bp, Homo sapiens
atttgaacacacaca

SEQ ID NO: 389184 - DNA, 15 bp, Homo sapiens
aatttgaacacacac

SEQ ID NO: 389185 - DNA, 15 bp, Homo sapiens
gaatttgaacacaca

SEQ ID NO: 389186 - DNA, 15 bp, Homo sapiens
agaatttgaacacac

SEQ ID NO: 389187 - DNA, 15 bp, Homo sapiens
gagaatttgaacaca

SEQ ID NO: 389188 - DNA, 15 bp, Homo sapiens
agagaatttgaacac

SEQ ID NO: 389189 - DNA, 15 bp, Homo sapiens
cagagaatttgaaca

SEQ ID NO: 389190 - DNA, 15 bp, Homo sapiens
tcagagaatttgaac

SEQ ID NO: 389191 - DNA, 15 bp, Homo sapiens
ctcagagaatttgaa

SEQ ID NO: 389192 - DNA, 15 bp, Homo sapiens
gctcagagaatttga

SEQ ID NO: 389193 - DNA, 15 bp, Homo sapiens
ggctcagagaatttg

SEQ ID NO: 389194 - DNA, 15 bp, Homo sapiens
gggctcagagaattt

SEQ ID NO: 389195 - DNA, 15 bp, Homo sapiens
agggctcagagaatt

SEQ ID NO: 389196 - DNA, 15 bp, Homo sapiens
aagggctcagagaat

SEQ ID NO: 389197 - DNA, 15 bp, Homo sapiens
aaagggctcagagaa

SEQ ID NO: 389198 - DNA, 15 bp, Homo sapiens
gaaagggctcagaga

SEQ ID NO: 389199 - DNA, 15 bp, Homo sapiens
tgaaagggctcagag

SEQ ID NO: 389200 - DNA, 15 bp, Homo sapiens
gtgaaagggctcaga

SEQ ID NO: 389201 - DNA, 15 bp, Homo sapiens
tgtgaaagggctcag

SEQ ID NO: 389202 - DNA, 15 bp, Homo sapiens
atgtgaaagggctca

SEQ ID NO: 389203 - DNA, 15 bp, Homo sapiens
tatgtgaaagggctc

SEQ ID NO: 389204 - DNA, 15 bp, Homo sapiens
ctatgtgaaagggct

SEQ ID NO: 389205 - DNA, 15 bp, Homo sapiens
actatgtgaaagggc

SEQ ID NO: 389206 - DNA, 15 bp, Homo sapiens
gactatgtgaaaggg

SEQ ID NO: 389207 - DNA, 15 bp, Homo sapiens
agactatgtgaaagg

SEQ ID NO: 389208 - DNA, 15 bp, Homo sapiens
cagactatgtgaaag

SEQ ID NO: 389209 - DNA, 15 bp, Homo sapiens
gcagactatgtgaaa

SEQ ID NO: 389210 - DNA, 15 bp, Homo sapiens
ggcagactatgtgaa

SEQ ID NO: 389211 - DNA, 15 bp, Homo sapiens
aggcagactatgtga

SEQ ID NO: 389212 - DNA, 15 bp, Homo sapiens
taggcagactatgtg

SEQ ID NO: 389213 - DNA, 15 bp, Homo sapiens
ataggcagactatgt

SEQ ID NO: 389214 - DNA, 15 bp, Homo sapiens
gataggcagactatg

SEQ ID NO: 389215 - DNA, 15 bp, Homo sapiens
ggataggcagactat

SEQ ID NO: 389216 - DNA, 15 bp, Homo sapiens
tggataggcagacta

SEQ ID NO: 389217 - DNA, 15 bp, Homo sapiens
gtggataggcagact

SEQ ID NO: 389218 - DNA, 15 bp, Homo sapiens
tgtggataggcagac

SEQ ID NO: 389219 - DNA, 15 bp, Homo sapiens
atgtggataggcaga

SEQ ID NO: 389220 - DNA, 15 bp, Homo sapiens
aatgtggataggcag

SEQ ID NO: 389221 - DNA, 15 bp, Homo sapiens
gaatgtggataggca

SEQ ID NO: 389222 - DNA, 15 bp, Homo sapiens
agaatgtggataggc

SEQ ID NO: 389223 - DNA, 15 bp, Homo sapiens
aagaatgtggatagg

SEQ ID NO: 389224 - DNA, 15 bp, Homo sapiens
taagaatgtggatag

SEQ ID NO: 389225 - DNA, 15 bp, Homo sapiens
ttaagaatgtggata

SEQ ID NO: 389226 - DNA, 15 bp, Homo sapiens
attaagaatgtggat

SEQ ID NO: 389227 - DNA, 15 bp, Homo sapiens
gattaagaatgtgga

SEQ ID NO: 389228 - DNA, 15 bp, Homo sapiens
agattaagaatgtgg

SEQ ID NO: 389229 - DNA, 15 bp, Homo sapiens
gagattaagaatgtg

SEQ ID NO: 389230 - DNA, 15 bp, Homo sapiens
ggagattaagaatgt

SEQ ID NO: 389231 - DNA, 15 bp, Homo sapiens
tggagattaagaatg

SEQ ID NO: 389232 - DNA, 15 bp, Homo sapiens
ttggagattaagaat

SEQ ID NO: 389233 - DNA, 15 bp, Homo sapiens
gttggagattaagaa

SEQ ID NO: 389234 - DNA, 15 bp, Homo sapiens
ggttggagattaaga

SEQ ID NO: 389235 - DNA, 15 bp, Homo sapiens
aggttggagattaag

SEQ ID NO: 389236 - DNA, 15 bp, Homo sapiens
aaggttggagattaa

SEQ ID NO: 389237 - DNA, 15 bp, Homo sapiens
aaaggttggagatta

SEQ ID NO: 389238 - DNA, 15 bp, Homo sapiens
caaaggttggagatt

SEQ ID NO: 389239 - DNA, 15 bp, Homo sapiens
acaaaggttggagat

SEQ ID NO: 389240 - DNA, 15 bp, Homo sapiens
cacaaaggttggaga

SEQ ID NO: 389241 - DNA, 15 bp, Homo sapiens
gcacaaaggttggag

SEQ ID NO: 389242 - DNA, 15 bp, Homo sapiens
agcacaaaggttgga

SEQ ID NO: 389243 - DNA, 15 bp, Homo sapiens
tagcacaaaggttgg

SEQ ID NO: 389244 - DNA, 15 bp, Homo sapiens
gtagcacaaaggttg

SEQ ID NO: 389245 - DNA, 15 bp, Homo sapiens
ggtagcacaaaggtt

SEQ ID NO: 389246 - DNA, 15 bp, Homo sapiens
tggtagcacaaaggt

SEQ ID NO: 389247 - DNA, 15 bp, Homo sapiens
ttggtagcacaaagg

SEQ ID NO: 389248 - DNA, 15 bp, Homo sapiens
attggtagcacaaag

SEQ ID NO: 389249 - DNA, 15 bp, Homo sapiens
gattggtagcacaaa

SEQ ID NO: 389250 - DNA, 15 bp, Homo sapiens
ggattggtagcacaa

SEQ ID NO: 389251 - DNA, 15 bp, Homo sapiens
aggattggtagcaca

SEQ ID NO: 389252 - DNA, 15 bp, Homo sapiens
aaggattggtagcac

SEQ ID NO: 389253 - DNA, 15 bp, Homo sapiens
gaaggattggtagca

SEQ ID NO: 389254 - DNA, 15 bp, Homo sapiens
tgaaggattggtagc

SEQ ID NO: 389255 - DNA, 15 bp, Homo sapiens
ctgaaggattggtag

SEQ ID NO: 389256 - DNA, 15 bp, Homo sapiens
actgaaggattggta

SEQ ID NO: 389257 - DNA, 15 bp, Homo sapiens
gactgaaggattggt

SEQ ID NO: 389258 - DNA, 15 bp, Homo sapiens
ggactgaaggattgg

SEQ ID NO: 389259 - DNA, 15 bp, Homo sapiens
tggactgaaggattg

SEQ ID NO: 389260 - DNA, 15 bp, Homo sapiens
ctggactgaaggatt

SEQ ID NO: 389261 - DNA, 15 bp, Homo sapiens
gctggactgaaggat

SEQ ID NO: 389262 - DNA, 15 bp, Homo sapiens
agctggactgaagga

SEQ ID NO: 389263 - DNA, 15 bp, Homo sapiens
aagctggactgaagg

SEQ ID NO: 389264 - DNA, 15 bp, Homo sapiens
aaagctggactgaag

SEQ ID NO: 389265 - DNA, 15 bp, Homo sapiens
aaaagctggactgaa

SEQ ID NO: 389266 - DNA, 15 bp, Homo sapiens
aaaaagctggactga

SEQ ID NO: 389267 - DNA, 15 bp, Homo sapiens
gaaaaagctggactg

SEQ ID NO: 389268 - DNA, 15 bp, Homo sapiens
tgaaaaagctggact

SEQ ID NO: 389269 - DNA, 15 bp, Homo sapiens
ctgaaaaagctggac

SEQ ID NO: 389270 - DNA, 15 bp, Homo sapiens
gctgaaaaagctgga

SEQ ID NO: 389271 - DNA, 15 bp, Homo sapiens
tgctgaaaaagctgg

SEQ ID NO: 389272 - DNA, 15 bp, Homo sapiens
ctgctgaaaaagctg

SEQ ID NO: 389273 - DNA, 15 bp, Homo sapiens
cctgctgaaaaagct

SEQ ID NO: 389274 - DNA, 15 bp, Homo sapiens
tcctgctgaaaaagc

SEQ ID NO: 389275 - DNA, 15 bp, Homo sapiens
gtcctgctgaaaaag

SEQ ID NO: 389276 - DNA, 15 bp, Homo sapiens
tgtcctgctgaaaaa

SEQ ID NO: 389277 - DNA, 15 bp, Homo sapiens
atgtcctgctgaaaa

SEQ ID NO: 389278 - DNA, 15 bp, Homo sapiens
aatgtcctgctgaaa

SEQ ID NO: 389279 - DNA, 15 bp, Homo sapiens
taatgtcctgctgaa

SEQ ID NO: 389280 - DNA, 15 bp, Homo sapiens
ctaatgtcctgctga

SEQ ID NO: 389281 - DNA, 15 bp, Homo sapiens
tctaatgtcctgctg

SEQ ID NO: 389282 - DNA, 15 bp, Homo sapiens
gtctaatgtcctgct

SEQ ID NO: 389283 - DNA, 15 bp, Homo sapiens
tgtctaatgtcctgc

SEQ ID NO: 389284 - DNA, 15 bp, Homo sapiens
atgtctaatgtcctg

SEQ ID NO: 389285 - DNA, 15 bp, Homo sapiens
aatgtctaatgtcct

SEQ ID NO: 389286 - DNA, 15 bp, Homo sapiens
caatgtctaatgtcc

SEQ ID NO: 389287 - DNA, 15 bp, Homo sapiens
gcaatgtctaatgtc

SEQ ID NO: 389288 - DNA, 15 bp, Homo sapiens
agcaatgtctaatgt

SEQ ID NO: 389289 - DNA, 15 bp, Homo sapiens
gagcaatgtctaatg

SEQ ID NO: 389290 - DNA, 15 bp, Homo sapiens
tgagcaatgtctaat

SEQ ID NO: 389291 - DNA, 15 bp, Homo sapiens
ctgagcaatgtctaa

SEQ ID NO: 389292 - DNA, 15 bp, Homo sapiens
cctgagcaatgtcta

SEQ ID NO: 389293 - DNA, 15 bp, Homo sapiens
tcctgagcaatgtct

SEQ ID NO: 389294 - DNA, 15 bp, Homo sapiens
ttcctgagcaatgtc

SEQ ID NO: 389295 - DNA, 15 bp, Homo sapiens
attcctgagcaatgt

SEQ ID NO: 389296 - DNA, 15 bp, Homo sapiens
aattcctgagcaatg

SEQ ID NO: 389297 - DNA, 15 bp, Homo sapiens
aaattcctgagcaat

SEQ ID NO: 389298 - DNA, 15 bp, Homo sapiens
taaattcctgagcaa

SEQ ID NO: 389299 - DNA, 15 bp, Homo sapiens
ataaattcctgagca

SEQ ID NO: 389300 - DNA, 15 bp, Homo sapiens
tataaattcctgagc

SEQ ID NO: 389301 - DNA, 15 bp, Homo sapiens
atataaattcctgag

SEQ ID NO: 389302 - DNA, 15 bp, Homo sapiens
tatataaattcctga

SEQ ID NO: 389303 - DNA, 15 bp, Homo sapiens
ctatataaattcctg

SEQ ID NO: 389304 - DNA, 15 bp, Homo sapiens
tctatataaattcct

SEQ ID NO: 389305 - DNA, 15 bp, Homo sapiens
atctatataaattcc

SEQ ID NO: 389306 - DNA, 15 bp, Homo sapiens
aatctatataaattc

SEQ ID NO: 389307 - DNA, 15 bp, Homo sapiens
gaatctatataaatt

SEQ ID NO: 389308 - DNA, 15 bp, Homo sapiens
agaatctatataaat

SEQ ID NO: 389309 - DNA, 15 bp, Homo sapiens
cagaatctatataaa

SEQ ID NO: 389310 - DNA, 15 bp, Homo sapiens
tcagaatctatataa

SEQ ID NO: 389311 - DNA, 15 bp, Homo sapiens
atcagaatctatata

SEQ ID NO: 389312 - DNA, 15 bp, Homo sapiens
gatcagaatctatat

SEQ ID NO: 389313 - DNA, 15 bp, Homo sapiens
ggatcagaatctata

SEQ ID NO: 389314 - DNA, 15 bp, Homo sapiens
aggatcagaatctat

SEQ ID NO: 389315 - DNA, 15 bp, Homo sapiens
taggatcagaatcta

SEQ ID NO: 389316 - DNA, 15 bp, Homo sapiens
ataggatcagaatct

SEQ ID NO: 389317 - DNA, 15 bp, Homo sapiens
cataggatcagaatc

SEQ ID NO: 389318 - DNA, 15 bp, Homo sapiens
ccataggatcagaat

SEQ ID NO: 389319 - DNA, 15 bp, Homo sapiens
gccataggatcagaa

SEQ ID NO: 389320 - DNA, 15 bp, Homo sapiens
agccataggatcaga

SEQ ID NO: 389321 - DNA, 15 bp, Homo sapiens
aagccataggatcag

SEQ ID NO: 389322 - DNA, 15 bp, Homo sapiens
aaagccataggatca

SEQ ID NO: 389323 - DNA, 15 bp, Homo sapiens
aaaagccataggatc

SEQ ID NO: 389324 - DNA, 15 bp, Homo sapiens
gaaaagccataggat

SEQ ID NO: 389325 - DNA, 15 bp, Homo sapiens
agaaaagccatagga

SEQ ID NO: 389326 - DNA, 15 bp, Homo sapiens
aagaaaagccatagg

SEQ ID NO: 389327 - DNA, 15 bp, Homo sapiens
gaagaaaagccatag

SEQ ID NO: 389328 - DNA, 15 bp, Homo sapiens
agaagaaaagccata

SEQ ID NO: 389329 - DNA, 15 bp, Homo sapiens
cagaagaaaagccat

SEQ ID NO: 389330 - DNA, 15 bp, Homo sapiens
ccagaagaaaagcca

SEQ ID NO: 389331 - DNA, 15 bp, Homo sapiens
gccagaagaaaagcc

SEQ ID NO: 389332 - DNA, 15 bp, Homo sapiens
tgccagaagaaaagc

SEQ ID NO: 389333 - DNA, 15 bp, Homo sapiens
ctgccagaagaaaag

SEQ ID NO: 389334 - DNA, 15 bp, Homo sapiens
tctgccagaagaaaa

SEQ ID NO: 389335 - DNA, 15 bp, Homo sapiens
gtctgccagaagaaa

SEQ ID NO: 389336 - DNA, 15 bp, Homo sapiens
tgtctgccagaagaa

SEQ ID NO: 389337 - DNA, 15 bp, Homo sapiens
ttgtctgccagaaga

SEQ ID NO: 389338 - DNA, 15 bp, Homo sapiens
tttgtctgccagaag

SEQ ID NO: 389339 - DNA, 15 bp, Homo sapiens
ctttgtctgccagaa

SEQ ID NO: 389340 - DNA, 15 bp, Homo sapiens
actttgtctgccaga

SEQ ID NO: 389341 - DNA, 15 bp, Homo sapiens
tactttgtctgccag

SEQ ID NO: 389342 - DNA, 15 bp, Homo sapiens
ttactttgtctgcca

SEQ ID NO: 389343 - DNA, 15 bp, Homo sapiens
cttactttgtctgcc

SEQ ID NO: 389344 - DNA, 15 bp, Homo sapiens
tcttactttgtctgc

SEQ ID NO: 389345 - DNA, 15 bp, Homo sapiens
ttcttactttgtctg

SEQ ID NO: 389346 - DNA, 15 bp, Homo sapiens
cttcttactttgtct

SEQ ID NO: 389347 - DNA, 15 bp, Homo sapiens
tcttcttactttgtc

SEQ ID NO: 389348 - DNA, 15 bp, Homo sapiens
atcttcttactttgt

SEQ ID NO: 389349 - DNA, 15 bp, Homo sapiens
catcttcttactttg

SEQ ID NO: 389350 - DNA, 15 bp, Homo sapiens
acatcttcttacttt

SEQ ID NO: 389351 - DNA, 15 bp, Homo sapiens
tacatcttcttactt

SEQ ID NO: 389352 - DNA, 15 bp, Homo sapiens
atacatcttcttact

SEQ ID NO: 389353 - DNA, 15 bp, Homo sapiens
aatacatcttcttac

SEQ ID NO: 389354 - DNA, 15 bp, Homo sapiens
taatacatcttctta

SEQ ID NO: 389355 - DNA, 15 bp, Homo sapiens
ataatacatcttctt

SEQ ID NO: 389356 - DNA, 15 bp, Homo sapiens
aataatacatcttct

SEQ ID NO: 389357 - DNA, 15 bp, Homo sapiens
aaataatacatcttc

SEQ ID NO: 389358 - DNA, 15 bp, Homo sapiens
caaataatacatctt

SEQ ID NO: 389359 - DNA, 15 bp, Homo sapiens
tcaaataatacatct

SEQ ID NO: 389360 - DNA, 15 bp, Homo sapiens
ttcaaataatacatc

SEQ ID NO: 389361 - DNA, 15 bp, Homo sapiens
cttcaaataatacat

SEQ ID NO: 389362 - DNA, 15 bp, Homo sapiens
tcttcaaataataca

SEQ ID NO: 389363 - DNA, 15 bp, Homo sapiens
gtcttcaaataatac

SEQ ID NO: 389364 - DNA, 15 bp, Homo sapiens
agtcttcaaataata

SEQ ID NO: 389365 - DNA, 15 bp, Homo sapiens
gagtcttcaaataat

SEQ ID NO: 389366 - DNA, 15 bp, Homo sapiens
agagtcttcaaataa

SEQ ID NO: 389367 - DNA, 15 bp, Homo sapiens
gagagtcttcaaata

SEQ ID NO: 389368 - DNA, 15 bp, Homo sapiens
agagagtcttcaaat

SEQ ID NO: 389369 - DNA, 15 bp, Homo sapiens
gagagagtcttcaaa

SEQ ID NO: 389370 - DNA, 15 bp, Homo sapiens
agagagagtcttcaa

SEQ ID NO: 389371 - DNA, 15 bp, Homo sapiens
aagagagagtcttca

SEQ ID NO: 389372 - DNA, 15 bp, Homo sapiens
gaagagagagtcttc

SEQ ID NO: 389373 - DNA, 15 bp, Homo sapiens
agaagagagagtctt

SEQ ID NO: 389374 - DNA, 15 bp, Homo sapiens
aagaagagagagtct

SEQ ID NO: 389375 - DNA, 15 bp, Homo sapiens
gaagaagagagagtc

SEQ ID NO: 389376 - DNA, 15 bp, Homo sapiens
tgaagaagagagagt

SEQ ID NO: 389377 - DNA, 15 bp, Homo sapiens
atgaagaagagagag

SEQ ID NO: 389378 - DNA, 15 bp, Homo sapiens
aatgaagaagagaga

SEQ ID NO: 389379 - DNA, 15 bp, Homo sapiens
taatgaagaagagag

SEQ ID NO: 389380 - DNA, 15 bp, Homo sapiens
ataatgaagaagaga

SEQ ID NO: 389381 - DNA, 15 bp, Homo sapiens
aataatgaagaagag

SEQ ID NO: 389382 - DNA, 15 bp, Homo sapiens
gaataatgaagaaga

SEQ ID NO: 389383 - DNA, 15 bp, Homo sapiens
agaataatgaagaag

SEQ ID NO: 389384 - DNA, 15 bp, Homo sapiens
gagaataatgaagaa

SEQ ID NO: 389385 - DNA, 15 bp, Homo sapiens
tgagaataatgaaga

SEQ ID NO: 389386 - DNA, 15 bp, Homo sapiens
ctgagaataatgaag

SEQ ID NO: 389387 - DNA, 15 bp, Homo sapiens
actgagaataatgaa

SEQ ID NO: 389388 - DNA, 15 bp, Homo sapiens
gactgagaataatga

SEQ ID NO: 389389 - DNA, 15 bp, Homo sapiens
tgactgagaataatg

SEQ ID NO: 389390 - DNA, 15 bp, Homo sapiens
gtgactgagaataat

SEQ ID NO: 389391 - DNA, 15 bp, Homo sapiens
ggtgactgagaataa

SEQ ID NO: 389392 - DNA, 15 bp, Homo sapiens
gggtgactgagaata

SEQ ID NO: 389393 - DNA, 15 bp, Homo sapiens
ggggtgactgagaat

SEQ ID NO: 389394 - DNA, 15 bp, Homo sapiens
tggggtgactgagaa

SEQ ID NO: 389395 - DNA, 15 bp, Homo sapiens
ttggggtgactgaga

SEQ ID NO: 389396 - DNA, 15 bp, Homo sapiens
tttggggtgactgag

SEQ ID NO: 389397 - DNA, 15 bp, Homo sapiens
ctttggggtgactga

SEQ ID NO: 389398 - DNA, 15 bp, Homo sapiens
tctttggggtgactg

SEQ ID NO: 389399 - DNA, 15 bp, Homo sapiens
ttctttggggtgact

SEQ ID NO: 389400 - DNA, 15 bp, Homo sapiens
cttctttggggtgac

SEQ ID NO: 389401 - DNA, 15 bp, Homo sapiens
tcttctttggggtga

SEQ ID NO: 389402 - DNA, 15 bp, Homo sapiens
ctcttctttggggtg

SEQ ID NO: 389403 - DNA, 15 bp, Homo sapiens
gctcttctttggggt

SEQ ID NO: 389404 - DNA, 15 bp, Homo sapiens
agctcttctttgggg

SEQ ID NO: 389405 - DNA, 15 bp, Homo sapiens
tagctcttctttggg

SEQ ID NO: 389406 - DNA, 15 bp, Homo sapiens
atagctcttctttgg

SEQ ID NO: 389407 - DNA, 15 bp, Homo sapiens
tatagctcttctttg

SEQ ID NO: 389408 - DNA, 15 bp, Homo sapiens
ttatagctcttcttt

SEQ ID NO: 389409 - DNA, 15 bp, Homo sapiens
cttatagctcttctt

SEQ ID NO: 389410 - DNA, 15 bp, Homo sapiens
gcttatagctcttct

SEQ ID NO: 389411 - DNA, 15 bp, Homo sapiens
tgcttatagctcttc

SEQ ID NO: 389412 - DNA, 15 bp, Homo sapiens
ctgcttatagctctt

SEQ ID NO: 389413 - DNA, 15 bp, Homo sapiens
actgcttatagctct

SEQ ID NO: 389414 - DNA, 15 bp, Homo sapiens
tactgcttatagctc

SEQ ID NO: 389415 - DNA, 15 bp, Homo sapiens
ttactgcttatagct

SEQ ID NO: 389416 - DNA, 15 bp, Homo sapiens
tttactgcttatagc

SEQ ID NO: 389417 - DNA, 15 bp, Homo sapiens
atttactgcttatag

SEQ ID NO: 389418 - DNA, 15 bp, Homo sapiens
catttactgcttata

SEQ ID NO: 389419 - DNA, 15 bp, Homo sapiens
tcatttactgcttat

SEQ ID NO: 389420 - DNA, 15 bp, Homo sapiens
ctcatttactgctta

SEQ ID NO: 389421 - DNA, 15 bp, Homo sapiens
actcatttactgctt

SEQ ID NO: 389422 - DNA, 15 bp, Homo sapiens
tactcatttactgct

SEQ ID NO: 389423 - DNA, 15 bp, Homo sapiens
gtactcatttactgc

SEQ ID NO: 389424 - DNA, 15 bp, Homo sapiens
agtactcatttactg

SEQ ID NO: 389425 - DNA, 15 bp, Homo sapiens
cagtactcatttact

SEQ ID NO: 389426 - DNA, 15 bp, Homo sapiens
ccagtactcatttac

SEQ ID NO: 389427 - DNA, 15 bp, Homo sapiens
gccagtactcattta

SEQ ID NO: 389428 - DNA, 15 bp, Homo sapiens
tgccagtactcattt

SEQ ID NO: 389429 - DNA, 15 bp, Homo sapiens
atgccagtactcatt

SEQ ID NO: 389430 - DNA, 15 bp, Homo sapiens
catgccagtactcat

SEQ ID NO: 389431 - DNA, 15 bp, Homo sapiens
acatgccagtactca

SEQ ID NO: 389432 - DNA, 15 bp, Homo sapiens
gacatgccagtactc

SEQ ID NO: 389433 - DNA, 15 bp, Homo sapiens
tgacatgccagtact

SEQ ID NO: 389434 - DNA, 15 bp, Homo sapiens
gtgacatgccagtac

SEQ ID NO: 389435 - DNA, 15 bp, Homo sapiens
tgtgacatgccagta

SEQ ID NO: 389436 - DNA, 15 bp, Homo sapiens
atgtgacatgccagt

SEQ ID NO: 389437 - DNA, 15 bp, Homo sapiens
tatgtgacatgccag

SEQ ID NO: 389438 - DNA, 15 bp, Homo sapiens
ctatgtgacatgcca

SEQ ID NO: 389439 - DNA, 15 bp, Homo sapiens
tctatgtgacatgcc

SEQ ID NO: 389440 - DNA, 15 bp, Homo sapiens
ctctatgtgacatgc

SEQ ID NO: 389441 - DNA, 15 bp, Homo sapiens
gctctatgtgacatg

SEQ ID NO: 389442 - DNA, 15 bp, Homo sapiens
ggctctatgtgacat

SEQ ID NO: 389443 - DNA, 15 bp, Homo sapiens
tggctctatgtgaca

SEQ ID NO: 389444 - DNA, 15 bp, Homo sapiens
atggctctatgtgac

SEQ ID NO: 389445 - DNA, 15 bp, Homo sapiens
gatggctctatgtga

SEQ ID NO: 389446 - DNA, 15 bp, Homo sapiens
tgatggctctatgtg

SEQ ID NO: 389447 - DNA, 15 bp, Homo sapiens
ttgatggctctatgt

SEQ ID NO: 389448 - DNA, 15 bp, Homo sapiens
tttgatggctctatg

SEQ ID NO: 389449 - DNA, 15 bp, Homo sapiens
ttttgatggctctat

SEQ ID NO: 389450 - DNA, 15 bp, Homo sapiens
attttgatggctcta

SEQ ID NO: 389451 - DNA, 15 bp, Homo sapiens
cattttgatggctct

SEQ ID NO: 389452 - DNA, 15 bp, Homo sapiens
ccattttgatggctc

SEQ ID NO: 389453 - DNA, 15 bp, Homo sapiens
cccattttgatggct

SEQ ID NO: 389454 - DNA, 15 bp, Homo sapiens
gcccattttgatggc

SEQ ID NO: 389455 - DNA, 15 bp, Homo sapiens
agcccattttgatgg

SEQ ID NO: 389456 - DNA, 15 bp, Homo sapiens
cagcccattttgatg

SEQ ID NO: 389457 - DNA, 15 bp, Homo sapiens
ccagcccattttgat

SEQ ID NO: 389458 - DNA, 15 bp, Homo sapiens
cccagcccattttga

SEQ ID NO: 389459 - DNA, 15 bp, Homo sapiens
acccagcccattttg

SEQ ID NO: 389460 - DNA, 15 bp, Homo sapiens
tacccagcccatttt

SEQ ID NO: 389461 - DNA, 15 bp, Homo sapiens
atacccagcccattt

SEQ ID NO: 389462 - DNA, 15 bp, Homo sapiens
aatacccagcccatt

SEQ ID NO: 389463 - DNA, 15 bp, Homo sapiens
aaatacccagcccat

SEQ ID NO: 389464 - DNA, 15 bp, Homo sapiens
aaaatacccagccca

SEQ ID NO: 389465 - DNA, 15 bp, Homo sapiens
aaaaatacccagccc

SEQ ID NO: 389466 - DNA, 15 bp, Homo sapiens
gaaaaatacccagcc

SEQ ID NO: 389467 - DNA, 15 bp, Homo sapiens
tgaaaaatacccagc

SEQ ID NO: 389468 - DNA, 15 bp, Homo sapiens
atgaaaaatacccag

SEQ ID NO: 389469 - DNA, 15 bp, Homo sapiens
gatgaaaaataccca

SEQ ID NO: 389470 - DNA, 15 bp, Homo sapiens
agatgaaaaataccc

SEQ ID NO: 389471 - DNA, 15 bp, Homo sapiens
aagatgaaaaatacc

SEQ ID NO: 389472 - DNA, 15 bp, Homo sapiens
aaagatgaaaaatac

SEQ ID NO: 389473 - DNA, 15 bp, Homo sapiens
taaagatgaaaaata

SEQ ID NO: 389474 - DNA, 15 bp, Homo sapiens
ttaaagatgaaaaat

SEQ ID NO: 389475 - DNA, 15 bp, Homo sapiens
cttaaagatgaaaaa

SEQ ID NO: 389476 - DNA, 15 bp, Homo sapiens
acttaaagatgaaaa

SEQ ID NO: 389477 - DNA, 15 bp, Homo sapiens
tacttaaagatgaaa

SEQ ID NO: 389478 - DNA, 15 bp, Homo sapiens
atacttaaagatgaa

SEQ ID NO: 389479 - DNA, 15 bp, Homo sapiens
gatacttaaagatga

SEQ ID NO: 389480 - DNA, 15 bp, Homo sapiens
agatacttaaagatg

SEQ ID NO: 389481 - DNA, 15 bp, Homo sapiens
tagatacttaaagat

SEQ ID NO: 389482 - DNA, 15 bp, Homo sapiens
ttagatacttaaaga

SEQ ID NO: 389483 - DNA, 15 bp, Homo sapiens
gttagatacttaaag

SEQ ID NO: 389484 - DNA, 15 bp, Homo sapiens
agttagatacttaaa

SEQ ID NO: 389485 - DNA, 15 bp, Homo sapiens
cagttagatacttaa

SEQ ID NO: 389486 - DNA, 15 bp, Homo sapiens
ccagttagatactta

SEQ ID NO: 389487 - DNA, 15 bp, Homo sapiens
cccagttagatactt

SEQ ID NO: 389488 - DNA, 15 bp, Homo sapiens
acccagttagatact

SEQ ID NO: 389489 - DNA, 15 bp, Homo sapiens
aacccagttagatac

SEQ ID NO: 389490 - DNA, 15 bp, Homo sapiens
gaacccagttagata

SEQ ID NO: 389491 - DNA, 15 bp, Homo sapiens
agaacccagttagat

SEQ ID NO: 389492 - DNA, 15 bp, Homo sapiens
cagaacccagttaga

SEQ ID NO: 389493 - DNA, 15 bp, Homo sapiens
ccagaacccagttag

SEQ ID NO: 389494 - DNA, 15 bp, Homo sapiens
cccagaacccagtta

SEQ ID NO: 389495 - DNA, 15 bp, Homo sapiens
acccagaacccagtt

SEQ ID NO: 389496 - DNA, 15 bp, Homo sapiens
cacccagaacccagt

SEQ ID NO: 389497 - DNA, 15 bp, Homo sapiens
tcacccagaacccag

SEQ ID NO: 389498 - DNA, 15 bp, Homo sapiens
ctcacccagaaccca

SEQ ID NO: 389499 - DNA, 15 bp, Homo sapiens
actcacccagaaccc

SEQ ID NO: 389500 - DNA, 15 bp, Homo sapiens
gactcacccagaacc

SEQ ID NO: 389501 - DNA, 15 bp, Homo sapiens
ggactcacccagaac

SEQ ID NO: 389502 - DNA, 15 bp, Homo sapiens
gggactcacccagaa

SEQ ID NO: 389503 - DNA, 15 bp, Homo sapiens
ggggactcacccaga

SEQ ID NO: 389504 - DNA, 15 bp, Homo sapiens
tggggactcacccag

SEQ ID NO: 389505 - DNA, 15 bp, Homo sapiens
atggggactcaccca

SEQ ID NO: 389506 - DNA, 15 bp, Homo sapiens
catggggactcaccc

SEQ ID NO: 389507 - DNA, 15 bp, Homo sapiens
tcatggggactcacc

SEQ ID NO: 389508 - DNA, 15 bp, Homo sapiens
ttcatggggactcac

SEQ ID NO: 389509 - DNA, 15 bp, Homo sapiens
gttcatggggactca

SEQ ID NO: 389510 - DNA, 15 bp, Homo sapiens
agttcatggggactc

SEQ ID NO: 389511 - DNA, 15 bp, Homo sapiens
cagttcatggggact

SEQ ID NO: 389512 - DNA, 15 bp, Homo sapiens
ccagttcatggggac

SEQ ID NO: 389513 - DNA, 15 bp, Homo sapiens
accagttcatgggga

SEQ ID NO: 389514 - DNA, 15 bp, Homo sapiens
taccagttcatgggg

SEQ ID NO: 389515 - DNA, 15 bp, Homo sapiens
ataccagttcatggg

SEQ ID NO: 389516 - DNA, 15 bp, Homo sapiens
tataccagttcatgg

SEQ ID NO: 389517 - DNA, 15 bp, Homo sapiens
atataccagttcatg

SEQ ID NO: 389518 - DNA, 15 bp, Homo sapiens
catataccagttcat

SEQ ID NO: 389519 - DNA, 15 bp, Homo sapiens
acatataccagttca

SEQ ID NO: 389520 - DNA, 15 bp, Homo sapiens
aacatataccagttc

SEQ ID NO: 389521 - DNA, 15 bp, Homo sapiens
aaacatataccagtt

SEQ ID NO: 389522 - DNA, 15 bp, Homo sapiens
caaacatataccagt

SEQ ID NO: 389523 - DNA, 15 bp, Homo sapiens
tcaaacatataccag

SEQ ID NO: 389524 - DNA, 15 bp, Homo sapiens
ctcaaacatatacca

SEQ ID NO: 389525 - DNA, 15 bp, Homo sapiens
cctcaaacatatacc

SEQ ID NO: 389526 - DNA, 15 bp, Homo sapiens
gcctcaaacatatac

SEQ ID NO: 389527 - DNA, 15 bp, Homo sapiens
tgcctcaaacatata

SEQ ID NO: 389528 - DNA, 15 bp, Homo sapiens
gtgcctcaaacatat

SEQ ID NO: 389529 - DNA, 15 bp, Homo sapiens
tgtgcctcaaacata

SEQ ID NO: 389530 - DNA, 15 bp, Homo sapiens
ctgtgcctcaaacat

SEQ ID NO: 389531 - DNA, 15 bp, Homo sapiens
cctgtgcctcaaaca

SEQ ID NO: 389532 - DNA, 15 bp, Homo sapiens
tcctgtgcctcaaac

SEQ ID NO: 389533 - DNA, 15 bp, Homo sapiens
ctcctgtgcctcaaa

SEQ ID NO: 389534 - DNA, 15 bp, Homo sapiens
actcctgtgcctcaa

SEQ ID NO: 389535 - DNA, 15 bp, Homo sapiens
tactcctgtgcctca

SEQ ID NO: 389536 - DNA, 15 bp, Homo sapiens
ctactcctgtgcctc

SEQ ID NO: 389537 - DNA, 15 bp, Homo sapiens
tctactcctgtgcct

SEQ ID NO: 389538 - DNA, 15 bp, Homo sapiens
gtctactcctgtgcc

SEQ ID NO: 389539 - DNA, 15 bp, Homo sapiens
agtctactcctgtgc

SEQ ID NO: 389540 - DNA, 15 bp, Homo sapiens
aagtctactcctgtg

SEQ ID NO: 389541 - DNA, 15 bp, Homo sapiens
taagtctactcctgt

SEQ ID NO: 389542 - DNA, 15 bp, Homo sapiens
gtaagtctactcctg

SEQ ID NO: 389543 - DNA, 15 bp, Homo sapiens
agtaagtctactcct

SEQ ID NO: 389544 - DNA, 15 bp, Homo sapiens
cagtaagtctactcc

SEQ ID NO: 389545 - DNA, 15 bp, Homo sapiens
ccagtaagtctactc

SEQ ID NO: 389546 - DNA, 15 bp, Homo sapiens
cccagtaagtctact

SEQ ID NO: 389547 - DNA, 15 bp, Homo sapiens
acccagtaagtctac

SEQ ID NO: 389548 - DNA, 15 bp, Homo sapiens
cacccagtaagtcta

SEQ ID NO: 389549 - DNA, 15 bp, Homo sapiens
acacccagtaagtct

SEQ ID NO: 389550 - DNA, 15 bp, Homo sapiens
cacacccagtaagtc

SEQ ID NO: 389551 - DNA, 15 bp, Homo sapiens
gcacacccagtaagt

SEQ ID NO: 389552 - DNA, 15 bp, Homo sapiens
tgcacacccagtaag

SEQ ID NO: 389553 - DNA, 15 bp, Homo sapiens
gtgcacacccagtaa

SEQ ID NO: 389554 - DNA, 15 bp, Homo sapiens
tgtgcacacccagta

SEQ ID NO: 389555 - DNA, 15 bp, Homo sapiens
atgtgcacacccagt

SEQ ID NO: 389556 - DNA, 15 bp, Homo sapiens
gatgtgcacacccag

SEQ ID NO: 389557 - DNA, 15 bp, Homo sapiens
ggatgtgcacaccca

SEQ ID NO: 389558 - DNA, 15 bp, Homo sapiens
aggatgtgcacaccc

SEQ ID NO: 389559 - DNA, 15 bp, Homo sapiens
taggatgtgcacacc

SEQ ID NO: 389560 - DNA, 15 bp, Homo sapiens
ataggatgtgcacac

SEQ ID NO: 389561 - DNA, 15 bp, Homo sapiens
aataggatgtgcaca

SEQ ID NO: 389562 - DNA, 15 bp, Homo sapiens
taataggatgtgcac

SEQ ID NO: 389563 - DNA, 15 bp, Homo sapiens
ataataggatgtgca

SEQ ID NO: 389564 - DNA, 15 bp, Homo sapiens
cataataggatgtgc

SEQ ID NO: 389565 - DNA, 15 bp, Homo sapiens
gcataataggatgtg

SEQ ID NO: 389566 - DNA, 15 bp, Homo sapiens
tgcataataggatgt

SEQ ID NO: 389567 - DNA, 15 bp, Homo sapiens
ttgcataataggatg

SEQ ID NO: 389568 - DNA, 15 bp, Homo sapiens
gttgcataataggat

SEQ ID NO: 389569 - DNA, 15 bp, Homo sapiens
cgttgcataatagga

SEQ ID NO: 389570 - DNA, 15 bp, Homo sapiens
acgttgcataatagg

SEQ ID NO: 389571 - DNA, 15 bp, Homo sapiens
gacgttgcataatag

SEQ ID NO: 389572 - DNA, 15 bp, Homo sapiens
ggacgttgcataata

SEQ ID NO: 389573 - DNA, 15 bp, Homo sapiens
aggacgttgcataat

SEQ ID NO: 389574 - DNA, 15 bp, Homo sapiens
caggacgttgcataa

SEQ ID NO: 389575 - DNA, 15 bp, Homo sapiens
ccaggacgttgcata

SEQ ID NO: 389576 - DNA, 15 bp, Homo sapiens
cccaggacgttgcat

SEQ ID NO: 389577 - DNA, 15 bp, Homo sapiens
gcccaggacgttgca

SEQ ID NO: 389578 - DNA, 15 bp, Homo sapiens
ggcccaggacgttgc

SEQ ID NO: 389579 - DNA, 15 bp, Homo sapiens
aggcccaggacgttg

SEQ ID NO: 389580 - DNA, 15 bp, Homo sapiens
aaggcccaggacgtt

SEQ ID NO: 389581 - DNA, 15 bp, Homo sapiens
aaaggcccaggacgt

SEQ ID NO: 389582 - DNA, 15 bp, Homo sapiens
caaaggcccaggacg

SEQ ID NO: 389583 - DNA, 15 bp, Homo sapiens
ccaaaggcccaggac

SEQ ID NO: 389584 - DNA, 15 bp, Homo sapiens
cccaaaggcccagga

SEQ ID NO: 389585 - DNA, 15 bp, Homo sapiens
gcccaaaggcccagg

SEQ ID NO: 389586 - DNA, 15 bp, Homo sapiens
ggcccaaaggcccag

SEQ ID NO: 389587 - DNA, 15 bp, Homo sapiens
aggcccaaaggccca

SEQ ID NO: 389588 - DNA, 15 bp, Homo sapiens
caggcccaaaggccc

SEQ ID NO: 389589 - DNA, 15 bp, Homo sapiens
gcaggcccaaaggcc

SEQ ID NO: 389590 - DNA, 15 bp, Homo sapiens
agcaggcccaaaggc

SEQ ID NO: 389591 - DNA, 15 bp, Homo sapiens
cagcaggcccaaagg

SEQ ID NO: 389592 - DNA, 15 bp, Homo sapiens
acagcaggcccaaag

SEQ ID NO: 389593 - DNA, 15 bp, Homo sapiens
cacagcaggcccaaa

SEQ ID NO: 389594 - DNA, 15 bp, Homo sapiens
ccacagcaggcccaa

SEQ ID NO: 389595 - DNA, 15 bp, Homo sapiens
gccacagcaggccca

SEQ ID NO: 389596 - DNA, 15 bp, Homo sapiens
tgccacagcaggccc

SEQ ID NO: 389597 - DNA, 15 bp, Homo sapiens
atgccacagcaggcc

SEQ ID NO: 389598 - DNA, 15 bp, Homo sapiens
gatgccacagcaggc

SEQ ID NO: 389599 - DNA, 15 bp, Homo sapiens
tgatgccacagcagg

SEQ ID NO: 389600 - DNA, 15 bp, Homo sapiens
gtgatgccacagcag

SEQ ID NO: 389601 - DNA, 15 bp, Homo sapiens
agtgatgccacagca

SEQ ID NO: 389602 - DNA, 15 bp, Homo sapiens
cagtgatgccacagc

SEQ ID NO: 389603 - DNA, 15 bp, Homo sapiens
ccagtgatgccacag

SEQ ID NO: 389604 - DNA, 15 bp, Homo sapiens
gccagtgatgccaca

SEQ ID NO: 389605 - DNA, 15 bp, Homo sapiens
agccagtgatgccac

SEQ ID NO: 389606 - DNA, 15 bp, Homo sapiens
aagccagtgatgcca

SEQ ID NO: 389607 - DNA, 15 bp, Homo sapiens
caagccagtgatgcc

SEQ ID NO: 389608 - DNA, 15 bp, Homo sapiens
ccaagccagtgatgc

SEQ ID NO: 389609 - DNA, 15 bp, Homo sapiens
gccaagccagtgatg

SEQ ID NO: 389610 - DNA, 15 bp, Homo sapiens
agccaagccagtgat

SEQ ID NO: 389611 - DNA, 15 bp, Homo sapiens
cagccaagccagtga

SEQ ID NO: 389612 - DNA, 15 bp, Homo sapiens
acagccaagccagtg

SEQ ID NO: 389613 - DNA, 15 bp, Homo sapiens
aacagccaagccagt

SEQ ID NO: 389614 - DNA, 15 bp, Homo sapiens
gaacagccaagccag

SEQ ID NO: 389615 - DNA, 15 bp, Homo sapiens
tgaacagccaagcca

SEQ ID NO: 389616 - DNA, 15 bp, Homo sapiens
ttgaacagccaagcc

SEQ ID NO: 389617 - DNA, 15 bp, Homo sapiens
cttgaacagccaagc

SEQ ID NO: 389618 - DNA, 15 bp, Homo sapiens
ccttgaacagccaag

SEQ ID NO: 389619 - DNA, 15 bp, Homo sapiens
gccttgaacagccaa

SEQ ID NO: 389620 - DNA, 15 bp, Homo sapiens
agccttgaacagcca

SEQ ID NO: 389621 - DNA, 15 bp, Homo sapiens
cagccttgaacagcc

SEQ ID NO: 389622 - DNA, 15 bp, Homo sapiens
gcagccttgaacagc

SEQ ID NO: 389623 - DNA, 15 bp, Homo sapiens
tgcagccttgaacag

SEQ ID NO: 389624 - DNA, 15 bp, Homo sapiens
ctgcagccttgaaca

SEQ ID NO: 389625 - DNA, 15 bp, Homo sapiens
gctgcagccttgaac

SEQ ID NO: 389626 - DNA, 15 bp, Homo sapiens
tgctgcagccttgaa

SEQ ID NO: 389627 - DNA, 15 bp, Homo sapiens
ttgctgcagccttga

SEQ ID NO: 389628 - DNA, 15 bp, Homo sapiens
cttgctgcagccttg

SEQ ID NO: 389629 - DNA, 15 bp, Homo sapiens
tcttgctgcagcctt

SEQ ID NO: 389630 - DNA, 15 bp, Homo sapiens
ttcttgctgcagcct

SEQ ID NO: 389631 - DNA, 15 bp, Homo sapiens
tttcttgctgcagcc

SEQ ID NO: 389632 - DNA, 15 bp, Homo sapiens
ttttcttgctgcagc

SEQ ID NO: 389633 - DNA, 15 bp, Homo sapiens
gttttcttgctgcag

SEQ ID NO: 389634 - DNA, 15 bp, Homo sapiens
agttttcttgctgca

SEQ ID NO: 389635 - DNA, 15 bp, Homo sapiens
cagttttcttgctgc

SEQ ID NO: 389636 - DNA, 15 bp, Homo sapiens
gcagttttcttgctg

SEQ ID NO: 389637 - DNA, 15 bp, Homo sapiens
agcagttttcttgct

SEQ ID NO: 389638 - DNA, 15 bp, Homo sapiens
gagcagttttcttgc

SEQ ID NO: 389639 - DNA, 15 bp, Homo sapiens
ggagcagttttcttg

SEQ ID NO: 389640 - DNA, 15 bp, Homo sapiens
aggagcagttttctt

SEQ ID NO: 389641 - DNA, 15 bp, Homo sapiens
gaggagcagttttct

SEQ ID NO: 389642 - DNA, 15 bp, Homo sapiens
agaggagcagttttc

SEQ ID NO: 389643 - DNA, 15 bp, Homo sapiens
aagaggagcagtttt

SEQ ID NO: 389644 - DNA, 15 bp, Homo sapiens
aaagaggagcagttt

SEQ ID NO: 389645 - DNA, 15 bp, Homo sapiens
aaaagaggagcagtt

SEQ ID NO: 389646 - DNA, 15 bp, Homo sapiens
caaaagaggagcagt

SEQ ID NO: 389647 - DNA, 15 bp, Homo sapiens
tcaaaagaggagcag

SEQ ID NO: 389648 - DNA, 15 bp, Homo sapiens
gtcaaaagaggagca

SEQ ID NO: 389649 - DNA, 15 bp, Homo sapiens
cgtcaaaagaggagc

SEQ ID NO: 389650 - DNA, 15 bp, Homo sapiens
acgtcaaaagaggag

SEQ ID NO: 389651 - DNA, 15 bp, Homo sapiens
aacgtcaaaagagga

SEQ ID NO: 389652 - DNA, 15 bp, Homo sapiens
gaacgtcaaaagagg

SEQ ID NO: 389653 - DNA, 15 bp, Homo sapiens
agaacgtcaaaagag

SEQ ID NO: 389654 - DNA, 15 bp, Homo sapiens
aagaacgtcaaaaga

SEQ ID NO: 389655 - DNA, 15 bp, Homo sapiens
aaagaacgtcaaaag

SEQ ID NO: 389656 - DNA, 15 bp, Homo sapiens
caaagaacgtcaaaa

SEQ ID NO: 389657 - DNA, 15 bp, Homo sapiens
gcaaagaacgtcaaa

SEQ ID NO: 389658 - DNA, 15 bp, Homo sapiens
ggcaaagaacgtcaa

SEQ ID NO: 389659 - DNA, 15 bp, Homo sapiens
aggcaaagaacgtca

SEQ ID NO: 389660 - DNA, 15 bp, Homo sapiens
taggcaaagaacgtc

SEQ ID NO: 389661 - DNA, 15 bp, Homo sapiens
ctaggcaaagaacgt

SEQ ID NO: 389662 - DNA, 15 bp, Homo sapiens
actaggcaaagaacg

SEQ ID NO: 389663 - DNA, 15 bp, Homo sapiens
gactaggcaaagaac

SEQ ID NO: 389664 - DNA, 15 bp, Homo sapiens
ggactaggcaaagaa

SEQ ID NO: 389665 - DNA, 15 bp, Homo sapiens
gggactaggcaaaga

SEQ ID NO: 389666 - DNA, 15 bp, Homo sapiens
tgggactaggcaaag

SEQ ID NO: 389667 - DNA, 15 bp, Homo sapiens
ctgggactaggcaaa

SEQ ID NO: 389668 - DNA, 15 bp, Homo sapiens
tctgggactaggcaa

SEQ ID NO: 389669 - DNA, 15 bp, Homo sapiens
atctgggactaggca

SEQ ID NO: 389670 - DNA, 15 bp, Homo sapiens
aatctgggactaggc

SEQ ID NO: 389671 - DNA, 15 bp, Homo sapiens
gaatctgggactagg

SEQ ID NO: 389672 - DNA, 15 bp, Homo sapiens
agaatctgggactag

SEQ ID NO: 389673 - DNA, 15 bp, Homo sapiens
aagaatctgggacta

SEQ ID NO: 389674 - DNA, 15 bp, Homo sapiens
caagaatctgggact

SEQ ID NO: 389675 - DNA, 15 bp, Homo sapiens
acaagaatctgggac

SEQ ID NO: 389676 - DNA, 15 bp, Homo sapiens
gacaagaatctggga

SEQ ID NO: 389677 - DNA, 15 bp, Homo sapiens
tgacaagaatctggg

SEQ ID NO: 389678 - DNA, 15 bp, Homo sapiens
gtgacaagaatctgg

SEQ ID NO: 389679 - DNA, 15 bp, Homo sapiens
agtgacaagaatctg

SEQ ID NO: 389680 - DNA, 15 bp, Homo sapiens
tagtgacaagaatct

SEQ ID NO: 389681 - DNA, 15 bp, Homo sapiens
ttagtgacaagaatc

SEQ ID NO: 389682 - DNA, 15 bp, Homo sapiens
tttagtgacaagaat

SEQ ID NO: 389683 - DNA, 15 bp, Homo sapiens
ttttagtgacaagaa

SEQ ID NO: 389684 - DNA, 15 bp, Homo sapiens
tttttagtgacaaga

SEQ ID NO: 389685 - DNA, 15 bp, Homo sapiens
atttttagtgacaag

SEQ ID NO: 389686 - DNA, 15 bp, Homo sapiens
aatttttagtgacaa

SEQ ID NO: 389687 - DNA, 15 bp, Homo sapiens
caatttttagtgaca

SEQ ID NO: 389688 - DNA, 15 bp, Homo sapiens
ccaatttttagtgac

SEQ ID NO: 389689 - DNA, 15 bp, Homo sapiens
gccaatttttagtga

SEQ ID NO: 389690 - DNA, 15 bp, Homo sapiens
ggccaatttttagtg

SEQ ID NO: 389691 - DNA, 15 bp, Homo sapiens
aggccaatttttagt

SEQ ID NO: 389692 - DNA, 15 bp, Homo sapiens
gaggccaatttttag

SEQ ID NO: 389693 - DNA, 15 bp, Homo sapiens
agaggccaattttta

SEQ ID NO: 389694 - DNA, 15 bp, Homo sapiens
cagaggccaattttt

SEQ ID NO: 389695 - DNA, 15 bp, Homo sapiens
tcagaggccaatttt

SEQ ID NO: 389696 - DNA, 15 bp, Homo sapiens
atcagaggccaattt

SEQ ID NO: 389697 - DNA, 15 bp, Homo sapiens
aatcagaggccaatt

SEQ ID NO: 389698 - DNA, 15 bp, Homo sapiens
aaatcagaggccaat

SEQ ID NO: 389699 - DNA, 15 bp, Homo sapiens
caaatcagaggccaa

SEQ ID NO: 389700 - DNA, 15 bp, Homo sapiens
ccaaatcagaggcca

SEQ ID NO: 389701 - DNA, 15 bp, Homo sapiens
accaaatcagaggcc

SEQ ID NO: 389702 - DNA, 15 bp, Homo sapiens
aaccaaatcagaggc

SEQ ID NO: 389703 - DNA, 15 bp, Homo sapiens
gaaccaaatcagagg

SEQ ID NO: 389704 - DNA, 15 bp, Homo sapiens
ggaaccaaatcagag

SEQ ID NO: 389705 - DNA, 15 bp, Homo sapiens
aggaaccaaatcaga

SEQ ID NO: 389706 - DNA, 15 bp, Homo sapiens
caggaaccaaatcag

SEQ ID NO: 389707 - DNA, 15 bp, Homo sapiens
tcaggaaccaaatca

SEQ ID NO: 389708 - DNA, 15 bp, Homo sapiens
gtcaggaaccaaatc

SEQ ID NO: 389709 - DNA, 15 bp, Homo sapiens
agtcaggaaccaaat

SEQ ID NO: 389710 - DNA, 15 bp, Homo sapiens
gagtcaggaaccaaa

SEQ ID NO: 389711 - DNA, 15 bp, Homo sapiens
agagtcaggaaccaa

SEQ ID NO: 389712 - DNA, 15 bp, Homo sapiens
cagagtcaggaacca

SEQ ID NO: 389713 - DNA, 15 bp, Homo sapiens
gcagagtcaggaacc

SEQ ID NO: 389714 - DNA, 15 bp, Homo sapiens
tgcagagtcaggaac

SEQ ID NO: 389715 - DNA, 15 bp, Homo sapiens
atgcagagtcaggaa

SEQ ID NO: 389716 - DNA, 15 bp, Homo sapiens
gatgcagagtcagga

SEQ ID NO: 389717 - DNA, 15 bp, Homo sapiens
tgatgcagagtcagg

SEQ ID NO: 389718 - DNA, 15 bp, Homo sapiens
gtgatgcagagtcag

SEQ ID NO: 389719 - DNA, 15 bp, Homo sapiens
tgtgatgcagagtca

SEQ ID NO: 389720 - DNA, 15 bp, Homo sapiens
gtgtgatgcagagtc

SEQ ID NO: 389721 - DNA, 15 bp, Homo sapiens
ggtgtgatgcagagt

SEQ ID NO: 389722 - DNA, 15 bp, Homo sapiens
gggtgtgatgcagag

SEQ ID NO: 389723 - DNA, 15 bp, Homo sapiens
agggtgtgatgcaga

SEQ ID NO: 389724 - DNA, 15 bp, Homo sapiens
cagggtgtgatgcag

SEQ ID NO: 389725 - DNA, 15 bp, Homo sapiens
tcagggtgtgatgca

SEQ ID NO: 389726 - DNA, 15 bp, Homo sapiens
ttcagggtgtgatgc

SEQ ID NO: 389727 - DNA, 15 bp, Homo sapiens
gttcagggtgtgatg

SEQ ID NO: 389728 - DNA, 15 bp, Homo sapiens
agttcagggtgtgat

SEQ ID NO: 389729 - DNA, 15 bp, Homo sapiens
aagttcagggtgtga

SEQ ID NO: 389730 - DNA, 15 bp, Homo sapiens
gaagttcagggtgtg

SEQ ID NO: 389731 - DNA, 15 bp, Homo sapiens
tgaagttcagggtgt

SEQ ID NO: 389732 - DNA, 15 bp, Homo sapiens
ctgaagttcagggtg

SEQ ID NO: 389733 - DNA, 15 bp, Homo sapiens
tctgaagttcagggt

SEQ ID NO: 389734 - DNA, 15 bp, Homo sapiens
gtctgaagttcaggg

SEQ ID NO: 389735 - DNA, 15 bp, Homo sapiens
tgtctgaagttcagg

SEQ ID NO: 389736 - DNA, 15 bp, Homo sapiens
atgtctgaagttcag

SEQ ID NO: 389737 - DNA, 15 bp, Homo sapiens
tatgtctgaagttca

SEQ ID NO: 389738 - DNA, 15 bp, Homo sapiens
gtatgtctgaagttc

SEQ ID NO: 389739 - DNA, 15 bp, Homo sapiens
agtatgtctgaagtt

SEQ ID NO: 389740 - DNA, 15 bp, Homo sapiens
cagtatgtctgaagt

SEQ ID NO: 389741 - DNA, 15 bp, Homo sapiens
tcagtatgtctgaag

SEQ ID NO: 389742 - DNA, 15 bp, Homo sapiens
atcagtatgtctgaa

SEQ ID NO: 389743 - DNA, 15 bp, Homo sapiens
aatcagtatgtctga

SEQ ID NO: 389744 - DNA, 15 bp, Homo sapiens
aaatcagtatgtctg

SEQ ID NO: 389745 - DNA, 15 bp, Homo sapiens
aaaatcagtatgtct

SEQ ID NO: 389746 - DNA, 15 bp, Homo sapiens
gaaaatcagtatgtc

SEQ ID NO: 389747 - DNA, 15 bp, Homo sapiens
ggaaaatcagtatgt

SEQ ID NO: 389748 - DNA, 15 bp, Homo sapiens
tggaaaatcagtatg

SEQ ID NO: 389749 - DNA, 15 bp, Homo sapiens
atggaaaatcagtat

SEQ ID NO: 389750 - DNA, 15 bp, Homo sapiens
catggaaaatcagta

SEQ ID NO: 389751 - DNA, 15 bp, Homo sapiens
tcatggaaaatcagt

SEQ ID NO: 389752 - DNA, 15 bp, Homo sapiens
ctcatggaaaatcag

SEQ ID NO: 389753 - DNA, 15 bp, Homo sapiens
tctcatggaaaatca

SEQ ID NO: 389754 - DNA, 15 bp, Homo sapiens
atctcatggaaaatc

SEQ ID NO: 389755 - DNA, 15 bp, Homo sapiens
aatctcatggaaaat

SEQ ID NO: 389756 - DNA, 15 bp, Homo sapiens
caatctcatggaaaa

SEQ ID NO: 389757 - DNA, 15 bp, Homo sapiens
gcaatctcatggaaa

SEQ ID NO: 389758 - DNA, 15 bp, Homo sapiens
agcaatctcatggaa

SEQ ID NO: 389759 - DNA, 15 bp, Homo sapiens
gagcaatctcatgga

SEQ ID NO: 389760 - DNA, 15 bp, Homo sapiens
agagcaatctcatgg

SEQ ID NO: 389761 - DNA, 15 bp, Homo sapiens
aagagcaatctcatg

SEQ ID NO: 389762 - DNA, 15 bp, Homo sapiens
caagagcaatctcat

SEQ ID NO: 389763 - DNA, 15 bp, Homo sapiens
ccaagagcaatctca

SEQ ID NO: 389764 - DNA, 15 bp, Homo sapiens
gccaagagcaatctc

SEQ ID NO: 389765 - DNA, 15 bp, Homo sapiens
tgccaagagcaatct

SEQ ID NO: 389766 - DNA, 15 bp, Homo sapiens
gtgccaagagcaatc

SEQ ID NO: 389767 - DNA, 15 bp, Homo sapiens
ggtgccaagagcaat

SEQ ID NO: 389768 - DNA, 15 bp, Homo sapiens
tggtgccaagagcaa

SEQ ID NO: 389769 - DNA, 15 bp, Homo sapiens
ctggtgccaagagca

SEQ ID NO: 389770 - DNA, 15 bp, Homo sapiens
actggtgccaagagc

SEQ ID NO: 389771 - DNA, 15 bp, Homo sapiens
gactggtgccaagag

SEQ ID NO: 389772 - DNA, 15 bp, Homo sapiens
ggactggtgccaaga

SEQ ID NO: 389773 - DNA, 15 bp, Homo sapiens
gggactggtgccaag

SEQ ID NO: 389774 - DNA, 15 bp, Homo sapiens
agggactggtgccaa

SEQ ID NO: 389775 - DNA, 15 bp, Homo sapiens
aagggactggtgcca

SEQ ID NO: 389776 - DNA, 15 bp, Homo sapiens
gaagggactggtgcc

SEQ ID NO: 389777 - DNA, 15 bp, Homo sapiens
tgaagggactggtgc

SEQ ID NO: 389778 - DNA, 15 bp, Homo sapiens
gtgaagggactggtg

SEQ ID NO: 389779 - DNA, 15 bp, Homo sapiens
agtgaagggactggt

SEQ ID NO: 389780 - DNA, 15 bp, Homo sapiens
aagtgaagggactgg

SEQ ID NO: 389781 - DNA, 15 bp, Homo sapiens
taagtgaagggactg

SEQ ID NO: 389782 - DNA, 15 bp, Homo sapiens
ataagtgaagggact

SEQ ID NO: 389783 - DNA, 15 bp, Homo sapiens
tataagtgaagggac

SEQ ID NO: 389784 - DNA, 15 bp, Homo sapiens
atataagtgaaggga

SEQ ID NO: 389785 - DNA, 15 bp, Homo sapiens
aatataagtgaaggg

SEQ ID NO: 389786 - DNA, 15 bp, Homo sapiens
caatataagtgaagg

SEQ ID NO: 389787 - DNA, 15 bp, Homo sapiens
ccaatataagtgaag

SEQ ID NO: 389788 - DNA, 15 bp, Homo sapiens
gccaatataagtgaa

SEQ ID NO: 389789 - DNA, 15 bp, Homo sapiens
ggccaatataagtga

SEQ ID NO: 389790 - DNA, 15 bp, Homo sapiens
tggccaatataagtg

SEQ ID NO: 389791 - DNA, 15 bp, Homo sapiens
gtggccaatataagt

SEQ ID NO: 389792 - DNA, 15 bp, Homo sapiens
tgtggccaatataag

SEQ ID NO: 389793 - DNA, 15 bp, Homo sapiens
atgtggccaatataa

SEQ ID NO: 389794 - DNA, 15 bp, Homo sapiens
aatgtggccaatata

SEQ ID NO: 389795 - DNA, 15 bp, Homo sapiens
aaatgtggccaatat

SEQ ID NO: 389796 - DNA, 15 bp, Homo sapiens
gaaatgtggccaata

SEQ ID NO: 389797 - DNA, 15 bp, Homo sapiens
agaaatgtggccaat

SEQ ID NO: 389798 - DNA, 15 bp, Homo sapiens
aagaaatgtggccaa

SEQ ID NO: 389799 - DNA, 15 bp, Homo sapiens
gaagaaatgtggcca

SEQ ID NO: 389800 - DNA, 15 bp, Homo sapiens
tgaagaaatgtggcc

SEQ ID NO: 389801 - DNA, 15 bp, Homo sapiens
ctgaagaaatgtggc

SEQ ID NO: 389802 - DNA, 15 bp, Homo sapiens
tctgaagaaatgtgg

SEQ ID NO: 389803 - DNA, 15 bp, Homo sapiens
ctctgaagaaatgtg

SEQ ID NO: 389804 - DNA, 15 bp, Homo sapiens
actctgaagaaatgt

SEQ ID NO: 389805 - DNA, 15 bp, Homo sapiens
tactctgaagaaatg

SEQ ID NO: 389806 - DNA, 15 bp, Homo sapiens
ttactctgaagaaat

SEQ ID NO: 389807 - DNA, 15 bp, Homo sapiens
attactctgaagaaa

SEQ ID NO: 389808 - DNA, 15 bp, Homo sapiens
aattactctgaagaa

SEQ ID NO: 389809 - DNA, 15 bp, Homo sapiens
aaattactctgaaga

SEQ ID NO: 389810 - DNA, 15 bp, Homo sapiens
gaaattactctgaag

SEQ ID NO: 389811 - DNA, 15 bp, Homo sapiens
agaaattactctgaa

SEQ ID NO: 389812 - DNA, 15 bp, Homo sapiens
cagaaattactctga

SEQ ID NO: 389813 - DNA, 15 bp, Homo sapiens
tcagaaattactctg

SEQ ID NO: 389814 - DNA, 15 bp, Homo sapiens
gtcagaaattactct

SEQ ID NO: 389815 - DNA, 15 bp, Homo sapiens
ggtcagaaattactc

SEQ ID NO: 389816 - DNA, 15 bp, Homo sapiens
aggtcagaaattact

SEQ ID NO: 389817 - DNA, 15 bp, Homo sapiens
aaggtcagaaattac

SEQ ID NO: 389818 - DNA, 15 bp, Homo sapiens
aaaggtcagaaatta

SEQ ID NO: 389819 - DNA, 15 bp, Homo sapiens
aaaaggtcagaaatt

SEQ ID NO: 389820 - DNA, 15 bp, Homo sapiens
aaaaaggtcagaaat

SEQ ID NO: 389821 - DNA, 15 bp, Homo sapiens
taaaaaggtcagaaa

SEQ ID NO: 389822 - DNA, 15 bp, Homo sapiens
ataaaaaggtcagaa

SEQ ID NO: 389823 - DNA, 15 bp, Homo sapiens
aataaaaaggtcaga

SEQ ID NO: 389824 - DNA, 15 bp, Homo sapiens
caataaaaaggtcag

SEQ ID NO: 389825 - DNA, 15 bp, Homo sapiens
ccaataaaaaggtca

SEQ ID NO: 389826 - DNA, 15 bp, Homo sapiens
gccaataaaaaggtc

SEQ ID NO: 389827 - DNA, 15 bp, Homo sapiens
agccaataaaaaggt

SEQ ID NO: 389828 - DNA, 15 bp, Homo sapiens
aagccaataaaaagg

SEQ ID NO: 389829 - DNA, 15 bp, Homo sapiens
taagccaataaaaag

SEQ ID NO: 389830 - DNA, 15 bp, Homo sapiens
ctaagccaataaaaa

SEQ ID NO: 389831 - DNA, 15 bp, Homo sapiens
tctaagccaataaaa

SEQ ID NO: 389832 - DNA, 15 bp, Homo sapiens
atctaagccaataaa

SEQ ID NO: 389833 - DNA, 15 bp, Homo sapiens
tatctaagccaataa

SEQ ID NO: 389834 - DNA, 15 bp, Homo sapiens
gtatctaagccaata

SEQ ID NO: 389835 - DNA, 15 bp, Homo sapiens
ggtatctaagccaat

SEQ ID NO: 389836 - DNA, 15 bp, Homo sapiens
aggtatctaagccaa

SEQ ID NO: 389837 - DNA, 15 bp, Homo sapiens
gaggtatctaagcca

SEQ ID NO: 389838 - DNA, 15 bp, Homo sapiens
tgaggtatctaagcc

SEQ ID NO: 389839 - DNA, 15 bp, Homo sapiens
ttgaggtatctaagc

SEQ ID NO: 389840 - DNA, 15 bp, Homo sapiens
tttgaggtatctaag

SEQ ID NO: 389841 - DNA, 15 bp, Homo sapiens
ctttgaggtatctaa

SEQ ID NO: 389842 - DNA, 15 bp, Homo sapiens
cctttgaggtatcta

SEQ ID NO: 389843 - DNA, 15 bp, Homo sapiens
tcctttgaggtatct

SEQ ID NO: 389844 - DNA, 15 bp, Homo sapiens
ttcctttgaggtatc

SEQ ID NO: 389845 - DNA, 15 bp, Homo sapiens
tttcctttgaggtat

SEQ ID NO: 389846 - DNA, 15 bp, Homo sapiens
ctttcctttgaggta

SEQ ID NO: 389847 - DNA, 15 bp, Homo sapiens
tctttcctttgaggt

SEQ ID NO: 389848 - DNA, 15 bp, Homo sapiens
ttctttcctttgagg

SEQ ID NO: 389849 - DNA, 15 bp, Homo sapiens
tttctttcctttgag

SEQ ID NO: 389850 - DNA, 15 bp, Homo sapiens
gtttctttcctttga

SEQ ID NO: 389851 - DNA, 15 bp, Homo sapiens
ggtttctttcctttg

SEQ ID NO: 389852 - DNA, 15 bp, Homo sapiens
aggtttctttccttt

SEQ ID NO: 389853 - DNA, 15 bp, Homo sapiens
taggtttctttcctt

SEQ ID NO: 389854 - DNA, 15 bp, Homo sapiens
ataggtttctttcct

SEQ ID NO: 389855 - DNA, 15 bp, Homo sapiens
aataggtttctttcc

SEQ ID NO: 389856 - DNA, 15 bp, Homo sapiens
taataggtttctttc

SEQ ID NO: 389857 - DNA, 15 bp, Homo sapiens
ataataggtttcttt

SEQ ID NO: 389858 - DNA, 15 bp, Homo sapiens
gataataggtttctt

SEQ ID NO: 389859 - DNA, 15 bp, Homo sapiens
tgataataggtttct

SEQ ID NO: 389860 - DNA, 15 bp, Homo sapiens
ctgataataggtttc

SEQ ID NO: 389861 - DNA, 15 bp, Homo sapiens
cctgataataggttt

SEQ ID NO: 389862 - DNA, 15 bp, Homo sapiens
ccctgataataggtt

SEQ ID NO: 389863 - DNA, 15 bp, Homo sapiens
cccctgataataggt

SEQ ID NO: 389864 - DNA, 15 bp, Homo sapiens
gcccctgataatagg

SEQ ID NO: 389865 - DNA, 15 bp, Homo sapiens
agcccctgataatag

SEQ ID NO: 389866 - DNA, 15 bp, Homo sapiens
aagcccctgataata

SEQ ID NO: 389867 - DNA, 15 bp, Homo sapiens
gaagcccctgataat

SEQ ID NO: 389868 - DNA, 15 bp, Homo sapiens
agaagcccctgataa

SEQ ID NO: 389869 - DNA, 15 bp, Homo sapiens
gagaagcccctgata

SEQ ID NO: 389870 - DNA, 15 bp, Homo sapiens
agagaagcccctgat

SEQ ID NO: 389871 - DNA, 15 bp, Homo sapiens
aagagaagcccctga

SEQ ID NO: 389872 - DNA, 15 bp, Homo sapiens
caagagaagcccctg

SEQ ID NO: 389873 - DNA, 15 bp, Homo sapiens
acaagagaagcccct

SEQ ID NO: 389874 - DNA, 15 bp, Homo sapiens
aacaagagaagcccc

SEQ ID NO: 389875 - DNA, 15 bp, Homo sapiens
gaacaagagaagccc

SEQ ID NO: 389876 - DNA, 15 bp, Homo sapiens
tgaacaagagaagcc

SEQ ID NO: 389877 - DNA, 15 bp, Homo sapiens
gtgaacaagagaagc

SEQ ID NO: 389878 - DNA, 15 bp, Homo sapiens
cgtgaacaagagaag

SEQ ID NO: 389879 - DNA, 15 bp, Homo sapiens
acgtgaacaagagaa

SEQ ID NO: 389880 - DNA, 15 bp, Homo sapiens
gacgtgaacaagaga

SEQ ID NO: 389881 - DNA, 15 bp, Homo sapiens
agacgtgaacaagag

SEQ ID NO: 389882 - DNA, 15 bp, Homo sapiens
cagacgtgaacaaga

SEQ ID NO: 389883 - DNA, 15 bp, Homo sapiens
ccagacgtgaacaag

SEQ ID NO: 389884 - DNA, 15 bp, Homo sapiens
gccagacgtgaacaa

SEQ ID NO: 389885 - DNA, 15 bp, Homo sapiens
tgccagacgtgaaca

SEQ ID NO: 389886 - DNA, 15 bp, Homo sapiens
atgccagacgtgaac

SEQ ID NO: 389887 - DNA, 15 bp, Homo sapiens
gatgccagacgtgaa

SEQ ID NO: 389888 - DNA, 15 bp, Homo sapiens
tgatgccagacgtga

SEQ ID NO: 389889 - DNA, 15 bp, Homo sapiens
ctgatgccagacgtg

SEQ ID NO: 389890 - DNA, 15 bp, Homo sapiens
actgatgccagacgt

SEQ ID NO: 389891 - DNA, 15 bp, Homo sapiens
gactgatgccagacg

SEQ ID NO: 389892 - DNA, 15 bp, Homo sapiens
agactgatgccagac

SEQ ID NO: 389893 - DNA, 15 bp, Homo sapiens
gagactgatgccaga

SEQ ID NO: 389894 - DNA, 15 bp, Homo sapiens
agagactgatgccag

SEQ ID NO: 389895 - DNA, 15 bp, Homo sapiens
gagagactgatgcca

SEQ ID NO: 389896 - DNA, 15 bp, Homo sapiens
agagagactgatgcc

SEQ ID NO: 389897 - DNA, 15 bp, Homo sapiens
aagagagactgatgc

SEQ ID NO: 389898 - DNA, 15 bp, Homo sapiens
aaagagagactgatg

SEQ ID NO: 389899 - DNA, 15 bp, Homo sapiens
caaagagagactgat

SEQ ID NO: 389900 - DNA, 15 bp, Homo sapiens
ccaaagagagactga

SEQ ID NO: 389901 - DNA, 15 bp, Homo sapiens
accaaagagagactg

SEQ ID NO: 389902 - DNA, 15 bp, Homo sapiens
taccaaagagagact

SEQ ID NO: 389903 - DNA, 15 bp, Homo sapiens
gtaccaaagagagac

SEQ ID NO: 389904 - DNA, 15 bp, Homo sapiens
ggtaccaaagagaga

SEQ ID NO: 389905 - DNA, 15 bp, Homo sapiens
tggtaccaaagagag

SEQ ID NO: 389906 - DNA, 15 bp, Homo sapiens
ctggtaccaaagaga

SEQ ID NO: 389907 - DNA, 15 bp, Homo sapiens
tctggtaccaaagag

SEQ ID NO: 389908 - DNA, 15 bp, Homo sapiens
ttctggtaccaaaga

SEQ ID NO: 389909 - DNA, 15 bp, Homo sapiens
tttctggtaccaaag

SEQ ID NO: 389910 - DNA, 15 bp, Homo sapiens
atttctggtaccaaa

SEQ ID NO: 389911 - DNA, 15 bp, Homo sapiens
gatttctggtaccaa

SEQ ID NO: 389912 - DNA, 15 bp, Homo sapiens
tgatttctggtacca

SEQ ID NO: 389913 - DNA, 15 bp, Homo sapiens
gtgatttctggtacc

SEQ ID NO: 389914 - DNA, 15 bp, Homo sapiens
ggtgatttctggtac

SEQ ID NO: 389915 - DNA, 15 bp, Homo sapiens
gggtgatttctggta

SEQ ID NO: 389916 - DNA, 15 bp, Homo sapiens
tgggtgatttctggt

SEQ ID NO: 389917 - DNA, 15 bp, Homo sapiens
gtgggtgatttctgg

SEQ ID NO: 389918 - DNA, 15 bp, Homo sapiens
agtgggtgatttctg

SEQ ID NO: 389919 - DNA, 15 bp, Homo sapiens
cagtgggtgatttct

SEQ ID NO: 389920 - DNA, 15 bp, Homo sapiens
acagtgggtgatttc

SEQ ID NO: 389921 - DNA, 15 bp, Homo sapiens
cacagtgggtgattt

SEQ ID NO: 389922 - DNA, 15 bp, Homo sapiens
tcacagtgggtgatt

SEQ ID NO: 389923 - DNA, 15 bp, Homo sapiens
ttcacagtgggtgat

SEQ ID NO: 389924 - DNA, 15 bp, Homo sapiens
attcacagtgggtga

SEQ ID NO: 389925 - DNA, 15 bp, Homo sapiens
tattcacagtgggtg

SEQ ID NO: 389926 - DNA, 15 bp, Homo sapiens
ttattcacagtgggt

SEQ ID NO: 389927 - DNA, 15 bp, Homo sapiens
tttattcacagtggg

SEQ ID NO: 389928 - DNA, 15 bp, Homo sapiens
gtttattcacagtgg

SEQ ID NO: 389929 - DNA, 15 bp, Homo sapiens
ggtttattcacagtg

SEQ ID NO: 389930 - DNA, 15 bp, Homo sapiens
aggtttattcacagt

SEQ ID NO: 389931 - DNA, 15 bp, Homo sapiens
aaggtttattcacag

SEQ ID NO: 389932 - DNA, 15 bp, Homo sapiens
aaaggtttattcaca

SEQ ID NO: 389933 - DNA, 15 bp, Homo sapiens
aaaaggtttattcac

SEQ ID NO: 389934 - DNA, 15 bp, Homo sapiens
aaaaaggtttattca

SEQ ID NO: 389935 - DNA, 15 bp, Homo sapiens
aaaaaaggtttattc

SEQ ID NO: 389936 - DNA, 15 bp, Homo sapiens
gaaaaaaggtttatt

SEQ ID NO: 389937 - DNA, 15 bp, Homo sapiens
agaaaaaaggtttat

SEQ ID NO: 389938 - DNA, 15 bp, Homo sapiens
aagaaaaaaggttta

SEQ ID NO: 389939 - DNA, 15 bp, Homo sapiens
gaagaaaaaaggttt

SEQ ID NO: 389940 - DNA, 15 bp, Homo sapiens
agaagaaaaaaggtt

SEQ ID NO: 389941 - DNA, 15 bp, Homo sapiens
aagaagaaaaaaggt

SEQ ID NO: 389942 - DNA, 15 bp, Homo sapiens
aaagaagaaaaaagg

SEQ ID NO: 389943 - DNA, 15 bp, Homo sapiens
aaaagaagaaaaaag

SEQ ID NO: 389944 - DNA, 15 bp, Homo sapiens
caaaagaagaaaaaa

SEQ ID NO: 389945 - DNA, 15 bp, Homo sapiens
tcaaaagaagaaaaa

SEQ ID NO: 389946 - DNA, 15 bp, Homo sapiens
gtcaaaagaagaaaa

SEQ ID NO: 389947 - DNA, 15 bp, Homo sapiens
tgtcaaaagaagaaa

SEQ ID NO: 389948 - DNA, 15 bp, Homo sapiens
gtgtcaaaagaagaa

SEQ ID NO: 389949 - DNA, 15 bp, Homo sapiens
cgtgtcaaaagaaga

SEQ ID NO: 389950 - DNA, 15 bp, Homo sapiens
ccgtgtcaaaagaag

SEQ ID NO: 389951 - DNA, 15 bp, Homo sapiens
tccgtgtcaaaagaa

SEQ ID NO: 389952 - DNA, 15 bp, Homo sapiens
ctccgtgtcaaaaga

SEQ ID NO: 389953 - DNA, 15 bp, Homo sapiens
actccgtgtcaaaag

SEQ ID NO: 389954 - DNA, 15 bp, Homo sapiens
gactccgtgtcaaaa

SEQ ID NO: 389955 - DNA, 15 bp, Homo sapiens
agactccgtgtcaaa

SEQ ID NO: 389956 - DNA, 15 bp, Homo sapiens
gagactccgtgtcaa

SEQ ID NO: 389957 - DNA, 15 bp, Homo sapiens
tgagactccgtgtca

SEQ ID NO: 389958 - DNA, 15 bp, Homo sapiens
gtgagactccgtgtc

SEQ ID NO: 389959 - DNA, 15 bp, Homo sapiens
agtgagactccgtgt

SEQ ID NO: 389960 - DNA, 15 bp, Homo sapiens
gagtgagactccgtg

SEQ ID NO: 389961 - DNA, 15 bp, Homo sapiens
gagaaattgtcaact

SEQ ID NO: 389962 - DNA, 15 bp, Homo sapiens
tgagaaattgtcaac

SEQ ID NO: 389963 - DNA, 15 bp, Homo sapiens
ctgagaaattgtcaa

SEQ ID NO: 389964 - DNA, 15 bp, Homo sapiens
tctgagaaattgtca

SEQ ID NO: 389965 - DNA, 15 bp, Homo sapiens
ttctgagaaattgtc

SEQ ID NO: 389966 - DNA, 15 bp, Homo sapiens
tttctgagaaattgt

SEQ ID NO: 389967 - DNA, 15 bp, Homo sapiens
atttctgagaaattg

SEQ ID NO: 389968 - DNA, 15 bp, Homo sapiens
aatttctgagaaatt

SEQ ID NO: 389969 - DNA, 15 bp, Homo sapiens
caatttctgagaaat

SEQ ID NO: 389970 - DNA, 15 bp, Homo sapiens
tcaatttctgagaaa

SEQ ID NO: 389971 - DNA, 15 bp, Homo sapiens
ctcaatttctgagaa

SEQ ID NO: 389972 - DNA, 15 bp, Homo sapiens
gctcaatttctgaga

SEQ ID NO: 389973 - DNA, 15 bp, Homo sapiens
tgctcaatttctgag

SEQ ID NO: 389974 - DNA, 15 bp, Homo sapiens
atgctcaatttctga

SEQ ID NO: 389975 - DNA, 15 bp, Homo sapiens
aatgctcaatttctg

SEQ ID NO: 389976 - DNA, 15 bp, Homo sapiens
aaatgctcaatttct

SEQ ID NO: 389977 - DNA, 15 bp, Homo sapiens
taaatgctcaatttc

SEQ ID NO: 389978 - DNA, 15 bp, Homo sapiens
ataaatgctcaattt

SEQ ID NO: 389979 - DNA, 15 bp, Homo sapiens
gataaatgctcaatt

SEQ ID NO: 389980 - DNA, 15 bp, Homo sapiens
tgataaatgctcaat

SEQ ID NO: 389981 - DNA, 15 bp, Homo sapiens
gtgataaatgctcaa

SEQ ID NO: 389982 - DNA, 15 bp, Homo sapiens
ggtgataaatgctca

SEQ ID NO: 389983 - DNA, 15 bp, Homo sapiens
tggtgataaatgctc

SEQ ID NO: 389984 - DNA, 15 bp, Homo sapiens
ctggtgataaatgct

SEQ ID NO: 389985 - DNA, 15 bp, Homo sapiens
actggtgataaatgc

SEQ ID NO: 389986 - DNA, 15 bp, Homo sapiens
aactggtgataaatg

SEQ ID NO: 389987 - DNA, 15 bp, Homo sapiens
gaactggtgataaat

SEQ ID NO: 389988 - DNA, 15 bp, Homo sapiens
agaactggtgataaa

SEQ ID NO: 389989 - DNA, 15 bp, Homo sapiens
tagaactggtgataa

SEQ ID NO: 389990 - DNA, 15 bp, Homo sapiens
ttagaactggtgata

SEQ ID NO: 389991 - DNA, 15 bp, Homo sapiens
attagaactggtgat

SEQ ID NO: 389992 - DNA, 15 bp, Homo sapiens
cattagaactggtga

SEQ ID NO: 389993 - DNA, 15 bp, Homo sapiens
acattagaactggtg

SEQ ID NO: 389994 - DNA, 15 bp, Homo sapiens
cacattagaactggt

SEQ ID NO: 389995 - DNA, 15 bp, Homo sapiens
tcacattagaactgg

SEQ ID NO: 389996 - DNA, 15 bp, Homo sapiens
atcacattagaactg

SEQ ID NO: 389997 - DNA, 15 bp, Homo sapiens
tatcacattagaact

SEQ ID NO: 389998 - DNA, 15 bp, Homo sapiens
ctatcacattagaac

SEQ ID NO: 389999 - DNA, 15 bp, Homo sapiens
cctatcacattagaa

SEQ ID NO: 390000 - DNA, 15 bp, Homo sapiens
ccctatcacattaga

SEQ ID NO: 390001 - DNA, 15 bp, Homo sapiens
tccctatcacattag

SEQ ID NO: 390002 - DNA, 15 bp, Homo sapiens
ttccctatcacatta

SEQ ID NO: 390003 - DNA, 15 bp, Homo sapiens
attccctatcacatt

SEQ ID NO: 390004 - DNA, 15 bp, Homo sapiens
cattccctatcacat

SEQ ID NO: 390005 - DNA, 15 bp, Homo sapiens
tcattccctatcaca

SEQ ID NO: 390006 - DNA, 15 bp, Homo sapiens
ctcattccctatcac

SEQ ID NO: 390007 - DNA, 15 bp, Homo sapiens
cctcattccctatca

SEQ ID NO: 390008 - DNA, 15 bp, Homo sapiens
acctcattccctatc

SEQ ID NO: 390009 - DNA, 15 bp, Homo sapiens
tacctcattccctat

SEQ ID NO: 390010 - DNA, 15 bp, Homo sapiens
atacctcattcccta

SEQ ID NO: 390011 - DNA, 15 bp, Homo sapiens
aatacctcattccct

SEQ ID NO: 390012 - DNA, 15 bp, Homo sapiens
caatacctcattccc

SEQ ID NO: 390013 - DNA, 15 bp, Homo sapiens
acaatacctcattcc

SEQ ID NO: 390014 - DNA, 15 bp, Homo sapiens
aacaatacctcattc

SEQ ID NO: 390015 - DNA, 15 bp, Homo sapiens
gaacaatacctcatt

SEQ ID NO: 390016 - DNA, 15 bp, Homo sapiens
tgaacaatacctcat

SEQ ID NO: 390017 - DNA, 15 bp, Homo sapiens
atgaacaatacctca

SEQ ID NO: 390018 - DNA, 15 bp, Homo sapiens
tatgaacaatacctc

SEQ ID NO: 390019 - DNA, 15 bp, Homo sapiens
ctatgaacaatacct

SEQ ID NO: 390020 - DNA, 15 bp, Homo sapiens
actatgaacaatacc

SEQ ID NO: 390021 - DNA, 15 bp, Homo sapiens
tactatgaacaatac

SEQ ID NO: 390022 - DNA, 15 bp, Homo sapiens
atactatgaacaata

SEQ ID NO: 390023 - DNA, 15 bp, Homo sapiens
gatactatgaacaat

SEQ ID NO: 390024 - DNA, 15 bp, Homo sapiens
tgatactatgaacaa

SEQ ID NO: 390025 - DNA, 15 bp, Homo sapiens
atgatactatgaaca

SEQ ID NO: 390026 - DNA, 15 bp, Homo sapiens
gatgatactatgaac

SEQ ID NO: 390027 - DNA, 15 bp, Homo sapiens
tgatgatactatgaa

SEQ ID NO: 390028 - DNA, 15 bp, Homo sapiens
ctgatgatactatga

SEQ ID NO: 390029 - DNA, 15 bp, Homo sapiens
tctgatgatactatg

SEQ ID NO: 390030 - DNA, 15 bp, Homo sapiens
ttctgatgatactat

SEQ ID NO: 390031 - DNA, 15 bp, Homo sapiens
tttctgatgatacta

SEQ ID NO: 390032 - DNA, 15 bp, Homo sapiens
atttctgatgatact

SEQ ID NO: 390033 - DNA, 15 bp, Homo sapiens
catttctgatgatac

SEQ ID NO: 390034 - DNA, 15 bp, Homo sapiens
tcatttctgatgata

SEQ ID NO: 390035 - DNA, 15 bp, Homo sapiens
ttcatttctgatgat

SEQ ID NO: 390036 - DNA, 15 bp, Homo sapiens
cttcatttctgatga

SEQ ID NO: 390037 - DNA, 15 bp, Homo sapiens
ccttcatttctgatg

SEQ ID NO: 390038 - DNA, 15 bp, Homo sapiens
cccttcatttctgat

SEQ ID NO: 390039 - DNA, 15 bp, Homo sapiens
tcccttcatttctga

SEQ ID NO: 390040 - DNA, 15 bp, Homo sapiens
ttcccttcatttctg

SEQ ID NO: 390041 - DNA, 15 bp, Homo sapiens
attcccttcatttct

SEQ ID NO: 390042 - DNA, 15 bp, Homo sapiens
aattcccttcatttc

SEQ ID NO: 390043 - DNA, 15 bp, Homo sapiens
caattcccttcattt

SEQ ID NO: 390044 - DNA, 15 bp, Homo sapiens
ccaattcccttcatt

SEQ ID NO: 390045 - DNA, 15 bp, Homo sapiens
cccaattcccttcat

SEQ ID NO: 390046 - DNA, 15 bp, Homo sapiens
tcccaattcccttca

SEQ ID NO: 390047 - DNA, 15 bp, Homo sapiens
atcccaattcccttc

SEQ ID NO: 390048 - DNA, 15 bp, Homo sapiens
catcccaattccctt

SEQ ID NO: 390049 - DNA, 15 bp, Homo sapiens
tcatcccaattccct

SEQ ID NO: 390050 - DNA, 15 bp, Homo sapiens
ttcatcccaattccc

SEQ ID NO: 390051 - DNA, 15 bp, Homo sapiens
tttcatcccaattcc

SEQ ID NO: 390052 - DNA, 15 bp, Homo sapiens
gtttcatcccaattc

SEQ ID NO: 390053 - DNA, 15 bp, Homo sapiens
agtttcatcccaatt

SEQ ID NO: 390054 - DNA, 15 bp, Homo sapiens
aagtttcatcccaat

SEQ ID NO: 390055 - DNA, 15 bp, Homo sapiens
aaagtttcatcccaa

SEQ ID NO: 390056 - DNA, 15 bp, Homo sapiens
aaaagtttcatccca

SEQ ID NO: 390057 - DNA, 15 bp, Homo sapiens
gaaaagtttcatccc

SEQ ID NO: 390058 - DNA, 15 bp, Homo sapiens
agaaaagtttcatcc

SEQ ID NO: 390059 - DNA, 15 bp, Homo sapiens
aagaaaagtttcatc

SEQ ID NO: 390060 - DNA, 15 bp, Homo sapiens
caagaaaagtttcat

SEQ ID NO: 390061 - DNA, 15 bp, Homo sapiens
tcaagaaaagtttca

SEQ ID NO: 390062 - DNA, 15 bp, Homo sapiens
ttcaagaaaagtttc

SEQ ID NO: 390063 - DNA, 15 bp, Homo sapiens
attcaagaaaagttt

SEQ ID NO: 390064 - DNA, 15 bp, Homo sapiens
aattcaagaaaagtt

SEQ ID NO: 390065 - DNA, 15 bp, Homo sapiens
aaattcaagaaaagt

SEQ ID NO: 390066 - DNA, 15 bp, Homo sapiens
gaaattcaagaaaag

SEQ ID NO: 390067 - DNA, 15 bp, Homo sapiens
agaaattcaagaaaa

SEQ ID NO: 390068 - DNA, 15 bp, Homo sapiens
cagaaattcaagaaa

SEQ ID NO: 390069 - DNA, 15 bp, Homo sapiens
tcagaaattcaagaa

SEQ ID NO: 390070 - DNA, 15 bp, Homo sapiens
gtcagaaattcaaga

SEQ ID NO: 390071 - DNA, 15 bp, Homo sapiens
ggtcagaaattcaag

SEQ ID NO: 390072 - DNA, 15 bp, Homo sapiens
gggtcagaaattcaa

SEQ ID NO: 390073 - DNA, 15 bp, Homo sapiens
agggtcagaaattca

SEQ ID NO: 390074 - DNA, 15 bp, Homo sapiens
cagggtcagaaattc

SEQ ID NO: 390075 - DNA, 15 bp, Homo sapiens
tcagggtcagaaatt

SEQ ID NO: 390076 - DNA, 15 bp, Homo sapiens
atcagggtcagaaat

SEQ ID NO: 390077 - DNA, 15 bp, Homo sapiens
catcagggtcagaaa

SEQ ID NO: 390078 - DNA, 15 bp, Homo sapiens
gcatcagggtcagaa

SEQ ID NO: 390079 - DNA, 15 bp, Homo sapiens
tgcatcagggtcaga

SEQ ID NO: 390080 - DNA, 15 bp, Homo sapiens
ttgcatcagggtcag

SEQ ID NO: 390081 - DNA, 15 bp, Homo sapiens
attgcatcagggtca

SEQ ID NO: 390082 - DNA, 15 bp, Homo sapiens
gattgcatcagggtc

SEQ ID NO: 390083 - DNA, 15 bp, Homo sapiens
tgattgcatcagggt

SEQ ID NO: 390084 - DNA, 15 bp, Homo sapiens
ctgattgcatcaggg

SEQ ID NO: 390085 - DNA, 15 bp, Homo sapiens
cctgattgcatcagg

SEQ ID NO: 390086 - DNA, 15 bp, Homo sapiens
gcctgattgcatcag

SEQ ID NO: 390087 - DNA, 15 bp, Homo sapiens
tgcctgattgcatca

SEQ ID NO: 390088 - DNA, 15 bp, Homo sapiens
ctgcctgattgcatc

SEQ ID NO: 390089 - DNA, 15 bp, Homo sapiens
actgcctgattgcat

SEQ ID NO: 390090 - DNA, 15 bp, Homo sapiens
aactgcctgattgca

SEQ ID NO: 390091 - DNA, 15 bp, Homo sapiens
caactgcctgattgc

SEQ ID NO: 390092 - DNA, 15 bp, Homo sapiens
acaactgcctgattg

SEQ ID NO: 390093 - DNA, 15 bp, Homo sapiens
aacaactgcctgatt

SEQ ID NO: 390094 - DNA, 15 bp, Homo sapiens
caacaactgcctgat

SEQ ID NO: 390095 - DNA, 15 bp, Homo sapiens
tcaacaactgcctga

SEQ ID NO: 390096 - DNA, 15 bp, Homo sapiens
atcaacaactgcctg

SEQ ID NO: 390097 - DNA, 15 bp, Homo sapiens
catcaacaactgcct

SEQ ID NO: 390098 - DNA, 15 bp, Homo sapiens
ccatcaacaactgcc

SEQ ID NO: 390099 - DNA, 15 bp, Homo sapiens
tccatcaacaactgc

SEQ ID NO: 390100 - DNA, 15 bp, Homo sapiens
atccatcaacaactg

SEQ ID NO: 390101 - DNA, 15 bp, Homo sapiens
aatccatcaacaact

SEQ ID NO: 390102 - DNA, 15 bp, Homo sapiens
gaatccatcaacaac

SEQ ID NO: 390103 - DNA, 15 bp, Homo sapiens
ggaatccatcaacaa

SEQ ID NO: 390104 - DNA, 15 bp, Homo sapiens
tggaatccatcaaca

SEQ ID NO: 390105 - DNA, 15 bp, Homo sapiens
atggaatccatcaac

SEQ ID NO: 390106 - DNA, 15 bp, Homo sapiens
aatggaatccatcaa

SEQ ID NO: 390107 - DNA, 15 bp, Homo sapiens
taatggaatccatca

SEQ ID NO: 390108 - DNA, 15 bp, Homo sapiens
ataatggaatccatc

SEQ ID NO: 390109 - DNA, 15 bp, Homo sapiens
gataatggaatccat

SEQ ID NO: 390110 - DNA, 15 bp, Homo sapiens
agataatggaatcca

SEQ ID NO: 390111 - DNA, 15 bp, Homo sapiens
aagataatggaatcc

SEQ ID NO: 390112 - DNA, 15 bp, Homo sapiens
gaagataatggaatc

SEQ ID NO: 390113 - DNA, 15 bp, Homo sapiens
cgaagataatggaat

SEQ ID NO: 390114 - DNA, 15 bp, Homo sapiens
acgaagataatggaa

SEQ ID NO: 390115 - DNA, 15 bp, Homo sapiens
cacgaagataatgga

SEQ ID NO: 390116 - DNA, 15 bp, Homo sapiens
tcacgaagataatgg

SEQ ID NO: 390117 - DNA, 15 bp, Homo sapiens
ctcacgaagataatg

SEQ ID NO: 390118 - DNA, 15 bp, Homo sapiens
actcacgaagataat

SEQ ID NO: 390119 - DNA, 15 bp, Homo sapiens
gactcacgaagataa

SEQ ID NO: 390120 - DNA, 15 bp, Homo sapiens
agactcacgaagata

SEQ ID NO: 390121 - DNA, 15 bp, Homo sapiens
aagactcacgaagat

SEQ ID NO: 390122 - DNA, 15 bp, Homo sapiens
caagactcacgaaga

SEQ ID NO: 390123 - DNA, 15 bp, Homo sapiens
acaagactcacgaag

SEQ ID NO: 390124 - DNA, 15 bp, Homo sapiens
gacaagactcacgaa

SEQ ID NO: 390125 - DNA, 15 bp, Homo sapiens
tgacaagactcacga

SEQ ID NO: 390126 - DNA, 15 bp, Homo sapiens
ttgacaagactcacg

SEQ ID NO: 390127 - DNA, 15 bp, Homo sapiens
attgacaagactcac

SEQ ID NO: 390128 - DNA, 15 bp, Homo sapiens
cattgacaagactca

SEQ ID NO: 390129 - DNA, 15 bp, Homo sapiens
ccattgacaagactc

SEQ ID NO: 390130 - DNA, 15 bp, Homo sapiens
gccattgacaagact

SEQ ID NO: 390131 - DNA, 15 bp, Homo sapiens
tgccattgacaagac

SEQ ID NO: 390132 - DNA, 15 bp, Homo sapiens
ctgccattgacaaga

SEQ ID NO: 390133 - DNA, 15 bp, Homo sapiens
tctgccattgacaag

SEQ ID NO: 390134 - DNA, 15 bp, Homo sapiens
ctctgccattgacaa

SEQ ID NO: 390135 - DNA, 15 bp, Homo sapiens
tctctgccattgaca

SEQ ID NO: 390136 - DNA, 15 bp, Homo sapiens
gtctctgccattgac

SEQ ID NO: 390137 - DNA, 15 bp, Homo sapiens
ggtctctgccattga

SEQ ID NO: 390138 - DNA, 15 bp, Homo sapiens
aggtctctgccattg

SEQ ID NO: 390139 - DNA, 15 bp, Homo sapiens
taggtctctgccatt

SEQ ID NO: 390140 - DNA, 15 bp, Homo sapiens
ttaggtctctgccat

SEQ ID NO: 390141 - DNA, 15 bp, Homo sapiens
attaggtctctgcca

SEQ ID NO: 390142 - DNA, 15 bp, Homo sapiens
aattaggtctctgcc

SEQ ID NO: 390143 - DNA, 15 bp, Homo sapiens
caattaggtctctgc

SEQ ID NO: 390144 - DNA, 15 bp, Homo sapiens
tcaattaggtctctg

SEQ ID NO: 390145 - DNA, 15 bp, Homo sapiens
ttcaattaggtctct

SEQ ID NO: 390146 - DNA, 15 bp, Homo sapiens
cttcaattaggtctc

SEQ ID NO: 390147 - DNA, 15 bp, Homo sapiens
tcttcaattaggtct

SEQ ID NO: 390148 - DNA, 15 bp, Homo sapiens
atcttcaattaggtc

SEQ ID NO: 390149 - DNA, 15 bp, Homo sapiens
aatcttcaattaggt

SEQ ID NO: 390150 - DNA, 15 bp, Homo sapiens
taatcttcaattagg

SEQ ID NO: 390151 - DNA, 15 bp, Homo sapiens
ctaatcttcaattag

SEQ ID NO: 390152 - DNA, 15 bp, Homo sapiens
tctaatcttcaatta

SEQ ID NO: 390153 - DNA, 15 bp, Homo sapiens
ctctaatcttcaatt

SEQ ID NO: 390154 - DNA, 15 bp, Homo sapiens
gctctaatcttcaat

SEQ ID NO: 390155 - DNA, 15 bp, Homo sapiens
agctctaatcttcaa

SEQ ID NO: 390156 - DNA, 15 bp, Homo sapiens
gagctctaatcttca

SEQ ID NO: 390157 - DNA, 15 bp, Homo sapiens
agagctctaatcttc

SEQ ID NO: 390158 - DNA, 15 bp, Homo sapiens
aagagctctaatctt

SEQ ID NO: 390159 - DNA, 15 bp, Homo sapiens
caagagctctaatct

SEQ ID NO: 390160 - DNA, 15 bp, Homo sapiens
gcaagagctctaatc

SEQ ID NO: 390161 - DNA, 15 bp, Homo sapiens
tgcaagagctctaat

SEQ ID NO: 390162 - DNA, 15 bp, Homo sapiens
ctgcaagagctctaa

SEQ ID NO: 390163 - DNA, 15 bp, Homo sapiens
tctgcaagagctcta

SEQ ID NO: 390164 - DNA, 15 bp, Homo sapiens
ctctgcaagagctct

SEQ ID NO: 390165 - DNA, 15 bp, Homo sapiens
tctctgcaagagctc

SEQ ID NO: 390166 - DNA, 15 bp, Homo sapiens
ttctctgcaagagct

SEQ ID NO: 390167 - DNA, 15 bp, Homo sapiens
tttctctgcaagagc

SEQ ID NO: 390168 - DNA, 15 bp, Homo sapiens
ctttctctgcaagag

SEQ ID NO: 390169 - DNA, 15 bp, Homo sapiens
cctttctctgcaaga

SEQ ID NO: 390170 - DNA, 15 bp, Homo sapiens
acctttctctgcaag

SEQ ID NO: 390171 - DNA, 15 bp, Homo sapiens
gacctttctctgcaa

SEQ ID NO: 390172 - DNA, 15 bp, Homo sapiens
tgacctttctctgca

SEQ ID NO: 390173 - DNA, 15 bp, Homo sapiens
ttgacctttctctgc

SEQ ID NO: 390174 - DNA, 15 bp, Homo sapiens
tttgacctttctctg

SEQ ID NO: 390175 - DNA, 15 bp, Homo sapiens
atttgacctttctct

SEQ ID NO: 390176 - DNA, 15 bp, Homo sapiens
gatttgacctttctc

SEQ ID NO: 390177 - DNA, 15 bp, Homo sapiens
tgatttgacctttct

SEQ ID NO: 390178 - DNA, 15 bp, Homo sapiens
ttgatttgacctttc

SEQ ID NO: 390179 - DNA, 15 bp, Homo sapiens
gttgatttgaccttt

SEQ ID NO: 390180 - DNA, 15 bp, Homo sapiens
ggttgatttgacctt

SEQ ID NO: 390181 - DNA, 15 bp, Homo sapiens
tggttgatttgacct

SEQ ID NO: 390182 - DNA, 15 bp, Homo sapiens
gtggttgatttgacc

SEQ ID NO: 390183 - DNA, 15 bp, Homo sapiens
tgtggttgatttgac

SEQ ID NO: 390184 - DNA, 15 bp, Homo sapiens
ctgtggttgatttga

SEQ ID NO: 390185 - DNA, 15 bp, Homo sapiens
actgtggttgatttg

SEQ ID NO: 390186 - DNA, 15 bp, Homo sapiens
tactgtggttgattt

SEQ ID NO: 390187 - DNA, 15 bp, Homo sapiens
ttactgtggttgatt

SEQ ID NO: 390188 - DNA, 15 bp, Homo sapiens
tttactgtggttgat

SEQ ID NO: 390189 - DNA, 15 bp, Homo sapiens
atttactgtggttga

SEQ ID NO: 390190 - DNA, 15 bp, Homo sapiens
tatttactgtggttg

SEQ ID NO: 390191 - DNA, 15 bp, Homo sapiens
atatttactgtggtt

SEQ ID NO: 390192 - DNA, 15 bp, Homo sapiens
aatatttactgtggt

SEQ ID NO: 390193 - DNA, 15 bp, Homo sapiens
caatatttactgtgg

SEQ ID NO: 390194 - DNA, 15 bp, Homo sapiens
acaatatttactgtg

SEQ ID NO: 390195 - DNA, 15 bp, Homo sapiens
aacaatatttactgt

SEQ ID NO: 390196 - DNA, 15 bp, Homo sapiens
caacaatatttactg

SEQ ID NO: 390197 - DNA, 15 bp, Homo sapiens
tcaacaatatttact

SEQ ID NO: 390198 - DNA, 15 bp, Homo sapiens
ttcaacaatatttac

SEQ ID NO: 390199 - DNA, 15 bp, Homo sapiens
gttcaacaatattta

SEQ ID NO: 390200 - DNA, 15 bp, Homo sapiens
tgttcaacaatattt

SEQ ID NO: 390201 - DNA, 15 bp, Homo sapiens
ctgttcaacaatatt

SEQ ID NO: 390202 - DNA, 15 bp, Homo sapiens
cctgttcaacaatat

SEQ ID NO: 390203 - DNA, 15 bp, Homo sapiens
ccctgttcaacaata

SEQ ID NO: 390204 - DNA, 15 bp, Homo sapiens
accctgttcaacaat

SEQ ID NO: 390205 - DNA, 15 bp, Homo sapiens
aaccctgttcaacaa

SEQ ID NO: 390206 - DNA, 15 bp, Homo sapiens
aaaccctgttcaaca

SEQ ID NO: 390207 - DNA, 15 bp, Homo sapiens
caaaccctgttcaac

SEQ ID NO: 390208 - DNA, 15 bp, Homo sapiens
ccaaaccctgttcaa

SEQ ID NO: 390209 - DNA, 15 bp, Homo sapiens
gccaaaccctgttca

SEQ ID NO: 390210 - DNA, 15 bp, Homo sapiens
tgccaaaccctgttc

SEQ ID NO: 390211 - DNA, 15 bp, Homo sapiens
ttgccaaaccctgtt

SEQ ID NO: 390212 - DNA, 15 bp, Homo sapiens
tttgccaaaccctgt

SEQ ID NO: 390213 - DNA, 15 bp, Homo sapiens
gtttgccaaaccctg

SEQ ID NO: 390214 - DNA, 15 bp, Homo sapiens
agtttgccaaaccct

SEQ ID NO: 390215 - DNA, 15 bp, Homo sapiens
cagtttgccaaaccc

SEQ ID NO: 390216 - DNA, 15 bp, Homo sapiens
acagtttgccaaacc

SEQ ID NO: 390217 - DNA, 15 bp, Homo sapiens
tacagtttgccaaac

SEQ ID NO: 390218 - DNA, 15 bp, Homo sapiens
ctacagtttgccaaa

SEQ ID NO: 390219 - DNA, 15 bp, Homo sapiens
gctacagtttgccaa

SEQ ID NO: 390220 - DNA, 15 bp, Homo sapiens
ggctacagtttgcca

SEQ ID NO: 390221 - DNA, 15 bp, Homo sapiens
gggctacagtttgcc

SEQ ID NO: 390222 - DNA, 15 bp, Homo sapiens
tgggctacagtttgc

SEQ ID NO: 390223 - DNA, 15 bp, Homo sapiens
atgggctacagtttg

SEQ ID NO: 390224 - DNA, 15 bp, Homo sapiens
catgggctacagttt

SEQ ID NO: 390225 - DNA, 15 bp, Homo sapiens
ccatgggctacagtt

SEQ ID NO: 390226 - DNA, 15 bp, Homo sapiens
cccatgggctacagt

SEQ ID NO: 390227 - DNA, 15 bp, Homo sapiens
gcccatgggctacag

SEQ ID NO: 390228 - DNA, 15 bp, Homo sapiens
agcccatgggctaca

SEQ ID NO: 390229 - DNA, 15 bp, Homo sapiens
cagcccatgggctac

SEQ ID NO: 390230 - DNA, 15 bp, Homo sapiens
gcagcccatgggcta

SEQ ID NO: 390231 - DNA, 15 bp, Homo sapiens
ggcagcccatgggct

SEQ ID NO: 390232 - DNA, 15 bp, Homo sapiens
aggcagcccatgggc

SEQ ID NO: 390233 - DNA, 15 bp, Homo sapiens
caggcagcccatggg

SEQ ID NO: 390234 - DNA, 15 bp, Homo sapiens
acaggcagcccatgg

SEQ ID NO: 390235 - DNA, 15 bp, Homo sapiens
aacaggcagcccatg

SEQ ID NO: 390236 - DNA, 15 bp, Homo sapiens
aaacaggcagcccat

SEQ ID NO: 390237 - DNA, 15 bp, Homo sapiens
gaaacaggcagccca

SEQ ID NO: 390238 - DNA, 15 bp, Homo sapiens
agaaacaggcagccc

SEQ ID NO: 390239 - DNA, 15 bp, Homo sapiens
cagaaacaggcagcc

SEQ ID NO: 390240 - DNA, 15 bp, Homo sapiens
acagaaacaggcagc

SEQ ID NO: 390241 - DNA, 15 bp, Homo sapiens
cacagaaacaggcag

SEQ ID NO: 390242 - DNA, 15 bp, Homo sapiens
tcacagaaacaggca

SEQ ID NO: 390243 - DNA, 15 bp, Homo sapiens
ctcacagaaacaggc

SEQ ID NO: 390244 - DNA, 15 bp, Homo sapiens
tctcacagaaacagg

SEQ ID NO: 390245 - DNA, 15 bp, Homo sapiens
atctcacagaaacag

SEQ ID NO: 390246 - DNA, 15 bp, Homo sapiens
aatctcacagaaaca

SEQ ID NO: 390247 - DNA, 15 bp, Homo sapiens
aaatctcacagaaac

SEQ ID NO: 390248 - DNA, 15 bp, Homo sapiens
taaatctcacagaaa

SEQ ID NO: 390249 - DNA, 15 bp, Homo sapiens
ataaatctcacagaa

SEQ ID NO: 390250 - DNA, 15 bp, Homo sapiens
tataaatctcacaga

SEQ ID NO: 390251 - DNA, 15 bp, Homo sapiens
ttataaatctcacag

SEQ ID NO: 390252 - DNA, 15 bp, Homo sapiens
cttataaatctcaca

SEQ ID NO: 390253 - DNA, 15 bp, Homo sapiens
gcttataaatctcac

SEQ ID NO: 390254 - DNA, 15 bp, Homo sapiens
agcttataaatctca

SEQ ID NO: 390255 - DNA, 15 bp, Homo sapiens
tagcttataaatctc

SEQ ID NO: 390256 - DNA, 15 bp, Homo sapiens
ttagcttataaatct

SEQ ID NO: 390257 - DNA, 15 bp, Homo sapiens
gttagcttataaatc

SEQ ID NO: 390258 - DNA, 15 bp, Homo sapiens
agttagcttataaat

SEQ ID NO: 390259 - DNA, 15 bp, Homo sapiens
aagttagcttataaa

SEQ ID NO: 390260 - DNA, 15 bp, Homo sapiens
aaagttagcttataa

SEQ ID NO: 390261 - DNA, 15 bp, Homo sapiens
aaaagttagcttata

SEQ ID NO: 390262 - DNA, 15 bp, Homo sapiens
aaaaagttagcttat

SEQ ID NO: 390263 - DNA, 15 bp, Homo sapiens
aaaaaagttagctta

SEQ ID NO: 390264 - DNA, 15 bp, Homo sapiens
aaaaaaagttagctt

SEQ ID NO: 390265 - DNA, 15 bp, Homo sapiens
aaaaaaaagttagct

SEQ ID NO: 390266 - DNA, 15 bp, Homo sapiens
aaaaaaaaagttagc

SEQ ID NO: 390267 - DNA, 15 bp, Homo sapiens
taaaaaaaaagttag

SEQ ID NO: 390268 - DNA, 15 bp, Homo sapiens
ttaaaaaaaaagtta

SEQ ID NO: 390269 - DNA, 15 bp, Homo sapiens
gttaaaaaaaaagtt

SEQ ID NO: 390270 - DNA, 15 bp, Homo sapiens
tgttaaaaaaaaagt

SEQ ID NO: 390271 - DNA, 15 bp, Homo sapiens
atgttaaaaaaaaag

SEQ ID NO: 390272 - DNA, 15 bp, Homo sapiens
aatgttaaaaaaaaa

SEQ ID NO: 390273 - DNA, 15 bp, Homo sapiens
aaatgttaaaaaaaa

SEQ ID NO: 390274 - DNA, 15 bp, Homo sapiens
aaaatgttaaaaaaa

SEQ ID NO: 390275 - DNA, 15 bp, Homo sapiens
aaaaatgttaaaaaa

SEQ ID NO: 390276 - DNA, 15 bp, Homo sapiens
taaaaatgttaaaaa

SEQ ID NO: 390277 - DNA, 15 bp, Homo sapiens
ttaaaaatgttaaaa

SEQ ID NO: 390278 - DNA, 15 bp, Homo sapiens
tttaaaaatgttaaa

SEQ ID NO: 390279 - DNA, 15 bp, Homo sapiens
atttaaaaatgttaa

SEQ ID NO: 390280 - DNA, 15 bp, Homo sapiens
gatttaaaaatgtta

SEQ ID NO: 390281 - DNA, 15 bp, Homo sapiens
cgatttaaaaatgtt

SEQ ID NO: 390282 - DNA, 15 bp, Homo sapiens
gcgatttaaaaatgt

SEQ ID NO: 390283 - DNA, 15 bp, Homo sapiens
agcgatttaaaaatg

SEQ ID NO: 390284 - DNA, 15 bp, Homo sapiens
cagcgatttaaaaat

SEQ ID NO: 390285 - DNA, 15 bp, Homo sapiens
tcagcgatttaaaaa

SEQ ID NO: 390286 - DNA, 15 bp, Homo sapiens
ttcagcgatttaaaa

SEQ ID NO: 390287 - DNA, 15 bp, Homo sapiens
tttcagcgatttaaa

SEQ ID NO: 390288 - DNA, 15 bp, Homo sapiens
ttttcagcgatttaa

SEQ ID NO: 390289 - DNA, 15 bp, Homo sapiens
tttttcagcgattta

SEQ ID NO: 390290 - DNA, 15 bp, Homo sapiens
atttttcagcgattt

SEQ ID NO: 390291 - DNA, 15 bp, Homo sapiens
aatttttcagcgatt

SEQ ID NO: 390292 - DNA, 15 bp, Homo sapiens
aaatttttcagcgat

SEQ ID NO: 390293 - DNA, 15 bp, Homo sapiens
aaaatttttcagcga

SEQ ID NO: 390294 - DNA, 15 bp, Homo sapiens
gaaaatttttcagcg

SEQ ID NO: 390295 - DNA, 15 bp, Homo sapiens
tgaaaatttttcagc

SEQ ID NO: 390296 - DNA, 15 bp, Homo sapiens
ttgaaaatttttcag

SEQ ID NO: 390297 - DNA, 15 bp, Homo sapiens
tttgaaaatttttca

SEQ ID NO: 390298 - DNA, 15 bp, Homo sapiens
ttttgaaaatttttc

SEQ ID NO: 390299 - DNA, 15 bp, Homo sapiens
cttttgaaaattttt

SEQ ID NO: 390300 - DNA, 15 bp, Homo sapiens
tcttttgaaaatttt

SEQ ID NO: 390301 - DNA, 15 bp, Homo sapiens
ttcttttgaaaattt

SEQ ID NO: 390302 - DNA, 15 bp, Homo sapiens
attcttttgaaaatt

SEQ ID NO: 390303 - DNA, 15 bp, Homo sapiens
tattcttttgaaaat

SEQ ID NO: 390304 - DNA, 15 bp, Homo sapiens
gtattcttttgaaaa

SEQ ID NO: 390305 - DNA, 15 bp, Homo sapiens
cgtattcttttgaaa

SEQ ID NO: 390306 - DNA, 15 bp, Homo sapiens
acgtattcttttgaa

SEQ ID NO: 390307 - DNA, 15 bp, Homo sapiens
gacgtattcttttga

SEQ ID NO: 390308 - DNA, 15 bp, Homo sapiens
tgacgtattcttttg

SEQ ID NO: 390309 - DNA, 15 bp, Homo sapiens
atgacgtattctttt

SEQ ID NO: 390310 - DNA, 15 bp, Homo sapiens
catgacgtattcttt

SEQ ID NO: 390311 - DNA, 15 bp, Homo sapiens
tcatgacgtattctt

SEQ ID NO: 390312 - DNA, 15 bp, Homo sapiens
atcatgacgtattct

SEQ ID NO: 390313 - DNA, 15 bp, Homo sapiens
tatcatgacgtattc

SEQ ID NO: 390314 - DNA, 15 bp, Homo sapiens
atatcatgacgtatt

SEQ ID NO: 390315 - DNA, 15 bp, Homo sapiens
catatcatgacgtat

SEQ ID NO: 390316 - DNA, 15 bp, Homo sapiens
acatatcatgacgta

SEQ ID NO: 390317 - DNA, 15 bp, Homo sapiens
cacatatcatgacgt

SEQ ID NO: 390318 - DNA, 15 bp, Homo sapiens
tcacatatcatgacg

SEQ ID NO: 390319 - DNA, 15 bp, Homo sapiens
ttcacatatcatgac

SEQ ID NO: 390320 - DNA, 15 bp, Homo sapiens
gttcacatatcatga

SEQ ID NO: 390321 - DNA, 15 bp, Homo sapiens
tgttcacatatcatg

SEQ ID NO: 390322 - DNA, 15 bp, Homo sapiens
atgttcacatatcat

SEQ ID NO: 390323 - DNA, 15 bp, Homo sapiens
aatgttcacatatca

SEQ ID NO: 390324 - DNA, 15 bp, Homo sapiens
taatgttcacatatc

SEQ ID NO: 390325 - DNA, 15 bp, Homo sapiens
gtaatgttcacatat

SEQ ID NO: 390326 - DNA, 15 bp, Homo sapiens
tgtaatgttcacata

SEQ ID NO: 390327 - DNA, 15 bp, Homo sapiens
ttgtaatgttcacat

SEQ ID NO: 390328 - DNA, 15 bp, Homo sapiens
cttgtaatgttcaca

SEQ ID NO: 390329 - DNA, 15 bp, Homo sapiens
tcttgtaatgttcac

SEQ ID NO: 390330 - DNA, 15 bp, Homo sapiens
ttcttgtaatgttca

SEQ ID NO: 390331 - DNA, 15 bp, Homo sapiens
tttcttgtaatgttc

SEQ ID NO: 390332 - DNA, 15 bp, Homo sapiens
atttcttgtaatgtt

SEQ ID NO: 390333 - DNA, 15 bp, Homo sapiens
aatttcttgtaatgt

SEQ ID NO: 390334 - DNA, 15 bp, Homo sapiens
aaatttcttgtaatg

SEQ ID NO: 390335 - DNA, 15 bp, Homo sapiens
taaatttcttgtaat

SEQ ID NO: 390336 - DNA, 15 bp, Homo sapiens
ttaaatttcttgtaa

SEQ ID NO: 390337 - DNA, 15 bp, Homo sapiens
attaaatttcttgta

SEQ ID NO: 390338 - DNA, 15 bp, Homo sapiens
aattaaatttcttgt

SEQ ID NO: 390339 - DNA, 15 bp, Homo sapiens
aaattaaatttcttg

SEQ ID NO: 390340 - DNA, 15 bp, Homo sapiens
gaaattaaatttctt

SEQ ID NO: 390341 - DNA, 15 bp, Homo sapiens
tgaaattaaatttct

SEQ ID NO: 390342 - DNA, 15 bp, Homo sapiens
ttgaaattaaatttc

SEQ ID NO: 390343 - DNA, 15 bp, Homo sapiens
tttgaaattaaattt

SEQ ID NO: 390344 - DNA, 15 bp, Homo sapiens
ctttgaaattaaatt

SEQ ID NO: 390345 - DNA, 15 bp, Homo sapiens
actttgaaattaaat

SEQ ID NO: 390346 - DNA, 15 bp, Homo sapiens
aactttgaaattaaa

SEQ ID NO: 390347 - DNA, 15 bp, Homo sapiens
aaactttgaaattaa

SEQ ID NO: 390348 - DNA, 15 bp, Homo sapiens
taaactttgaaatta

SEQ ID NO: 390349 - DNA, 15 bp, Homo sapiens
ataaactttgaaatt

SEQ ID NO: 390350 - DNA, 15 bp, Homo sapiens
tataaactttgaaat

SEQ ID NO: 390351 - DNA, 15 bp, Homo sapiens
ttataaactttgaaa

SEQ ID NO: 390352 - DNA, 15 bp, Homo sapiens
tttataaactttgaa

SEQ ID NO: 390353 - DNA, 15 bp, Homo sapiens
atttataaactttga

SEQ ID NO: 390354 - DNA, 15 bp, Homo sapiens
tatttataaactttg

SEQ ID NO: 390355 - DNA, 15 bp, Homo sapiens
ttatttataaacttt

SEQ ID NO: 390356 - DNA, 15 bp, Homo sapiens
tttatttataaactt

SEQ ID NO: 390357 - DNA, 15 bp, Homo sapiens
ctttatttataaact

SEQ ID NO: 390358 - DNA, 15 bp, Homo sapiens
actttatttataaac

SEQ ID NO: 390359 - DNA, 15 bp, Homo sapiens
aactttatttataaa

SEQ ID NO: 390360 - DNA, 15 bp, Homo sapiens
aaactttatttataa

SEQ ID NO: 390361 - DNA, 15 bp, Homo sapiens
aaaactttatttata

SEQ ID NO: 390362 - DNA, 15 bp, Homo sapiens
taaaactttatttat

SEQ ID NO: 390363 - DNA, 15 bp, Homo sapiens
ataaaactttattta

SEQ ID NO: 390364 - DNA, 15 bp, Homo sapiens
aataaaactttattt

SEQ ID NO: 390365 - DNA, 15 bp, Homo sapiens
caataaaactttatt

SEQ ID NO: 390366 - DNA, 15 bp, Homo sapiens
ccaataaaactttat

SEQ ID NO: 390367 - DNA, 15 bp, Homo sapiens
tccaataaaacttta

SEQ ID NO: 390368 - DNA, 15 bp, Homo sapiens
ttccaataaaacttt

SEQ ID NO: 390369 - DNA, 15 bp, Homo sapiens
gttccaataaaactt

SEQ ID NO: 390370 - DNA, 15 bp, Homo sapiens
tgttccaataaaact

SEQ ID NO: 390371 - DNA, 15 bp, Homo sapiens
atgttccaataaaac

SEQ ID NO: 390372 - DNA, 15 bp, Homo sapiens
catgttccaataaaa

SEQ ID NO: 390373 - DNA, 15 bp, Homo sapiens
ccatgttccaataaa

SEQ ID NO: 390374 - DNA, 15 bp, Homo sapiens
gccatgttccaataa

SEQ ID NO: 390375 - DNA, 15 bp, Homo sapiens
agccatgttccaata

SEQ ID NO: 390376 - DNA, 15 bp, Homo sapiens
tagccatgttccaat

SEQ ID NO: 390377 - DNA, 15 bp, Homo sapiens
gtagccatgttccaa

SEQ ID NO: 390378 - DNA, 15 bp, Homo sapiens
tgtagccatgttcca

SEQ ID NO: 390379 - DNA, 15 bp, Homo sapiens
atgtagccatgttcc

SEQ ID NO: 390380 - DNA, 15 bp, Homo sapiens
aatgtagccatgttc

SEQ ID NO: 390381 - DNA, 15 bp, Homo sapiens
taatgtagccatgtt

SEQ ID NO: 390382 - DNA, 15 bp, Homo sapiens
ttaatgtagccatgt

SEQ ID NO: 390383 - DNA, 15 bp, Homo sapiens
attaatgtagccatg

SEQ ID NO: 390384 - DNA, 15 bp, Homo sapiens
aattaatgtagccat

SEQ ID NO: 390385 - DNA, 15 bp, Homo sapiens
aaattaatgtagcca

SEQ ID NO: 390386 - DNA, 15 bp, Homo sapiens
taaattaatgtagcc

SEQ ID NO: 390387 - DNA, 15 bp, Homo sapiens
ataaattaatgtagc

SEQ ID NO: 390388 - DNA, 15 bp, Homo sapiens
cataaattaatgtag

SEQ ID NO: 390389 - DNA, 15 bp, Homo sapiens
acataaattaatgta

SEQ ID NO: 390390 - DNA, 15 bp, Homo sapiens
tacataaattaatgt

SEQ ID NO: 390391 - DNA, 15 bp, Homo sapiens
atacataaattaatg

SEQ ID NO: 390392 - DNA, 15 bp, Homo sapiens
aatacataaattaat

SEQ ID NO: 390393 - DNA, 15 bp, Homo sapiens
caatacataaattaa

SEQ ID NO: 390394 - DNA, 15 bp, Homo sapiens
acaatacataaatta

SEQ ID NO: 390395 - DNA, 15 bp, Homo sapiens
aacaatacataaatt

SEQ ID NO: 390396 - DNA, 15 bp, Homo sapiens
aaacaatacataaat

SEQ ID NO: 390397 - DNA, 15 bp, Homo sapiens
taaacaatacataaa

SEQ ID NO: 390398 - DNA, 15 bp, Homo sapiens
ataaacaatacataa

SEQ ID NO: 390399 - DNA, 15 bp, Homo sapiens
cataaacaatacata

SEQ ID NO: 390400 - DNA, 15 bp, Homo sapiens
tcataaacaatacat

SEQ ID NO: 390401 - DNA, 15 bp, Homo sapiens
gtcataaacaataca

SEQ ID NO: 390402 - DNA, 15 bp, Homo sapiens
agtcataaacaatac

SEQ ID NO: 390403 - DNA, 15 bp, Homo sapiens
tagtcataaacaata

SEQ ID NO: 390404 - DNA, 15 bp, Homo sapiens
atagtcataaacaat

SEQ ID NO: 390405 - DNA, 15 bp, Homo sapiens
aatagtcataaacaa

SEQ ID NO: 390406 - DNA, 15 bp, Homo sapiens
aaatagtcataaaca

SEQ ID NO: 390407 - DNA, 15 bp, Homo sapiens
aaaatagtcataaac

SEQ ID NO: 390408 - DNA, 15 bp, Homo sapiens
aaaaatagtcataaa

SEQ ID NO: 390409 - DNA, 15 bp, Homo sapiens
caaaaatagtcataa

SEQ ID NO: 390410 - DNA, 15 bp, Homo sapiens
gcaaaaatagtcata

SEQ ID NO: 390411 - DNA, 15 bp, Homo sapiens
tgcaaaaatagtcat

SEQ ID NO: 390412 - DNA, 15 bp, Homo sapiens
gtgcaaaaatagtca

SEQ ID NO: 390413 - DNA, 15 bp, Homo sapiens
agtgcaaaaatagtc

SEQ ID NO: 390414 - DNA, 15 bp, Homo sapiens
cagtgcaaaaatagt

SEQ ID NO: 390415 - DNA, 15 bp, Homo sapiens
tcagtgcaaaaatag

SEQ ID NO: 390416 - DNA, 15 bp, Homo sapiens
ttcagtgcaaaaata

SEQ ID NO: 390417 - DNA, 15 bp, Homo sapiens
tttcagtgcaaaaat

SEQ ID NO: 390418 - DNA, 15 bp, Homo sapiens
gtttcagtgcaaaaa

SEQ ID NO: 390419 - DNA, 15 bp, Homo sapiens
tgtttcagtgcaaaa

SEQ ID NO: 390420 - DNA, 15 bp, Homo sapiens
ttgtttcagtgcaaa

SEQ ID NO: 390421 - DNA, 15 bp, Homo sapiens
attgtttcagtgcaa

SEQ ID NO: 390422 - DNA, 15 bp, Homo sapiens
tattgtttcagtgca

SEQ ID NO: 390423 - DNA, 15 bp, Homo sapiens
ctattgtttcagtgc

SEQ ID NO: 390424 - DNA, 15 bp, Homo sapiens
tctattgtttcagtg

SEQ ID NO: 390425 - DNA, 15 bp, Homo sapiens
ctctattgtttcagt

SEQ ID NO: 390426 - DNA, 15 bp, Homo sapiens
actctattgtttcag

SEQ ID NO: 390427 - DNA, 15 bp, Homo sapiens
tactctattgtttca

SEQ ID NO: 390428 - DNA, 15 bp, Homo sapiens
ctactctattgtttc

SEQ ID NO: 390429 - DNA, 15 bp, Homo sapiens
actactctattgttt

SEQ ID NO: 390430 - DNA, 15 bp, Homo sapiens
aactactctattgtt

SEQ ID NO: 390431 - DNA, 15 bp, Homo sapiens
caactactctattgt

SEQ ID NO: 390432 - DNA, 15 bp, Homo sapiens
acaactactctattg

SEQ ID NO: 390433 - DNA, 15 bp, Homo sapiens
cacaactactctatt

SEQ ID NO: 390434 - DNA, 15 bp, Homo sapiens
tcacaactactctat

SEQ ID NO: 390435 - DNA, 15 bp, Homo sapiens
gtcacaactactcta

SEQ ID NO: 390436 - DNA, 15 bp, Homo sapiens
tgtcacaactactct

SEQ ID NO: 390437 - DNA, 15 bp, Homo sapiens
ctgtcacaactactc

SEQ ID NO: 390438 - DNA, 15 bp, Homo sapiens
tctgtcacaactact

SEQ ID NO: 390439 - DNA, 15 bp, Homo sapiens
ctctgtcacaactac

SEQ ID NO: 390440 - DNA, 15 bp, Homo sapiens
tctctgtcacaacta

SEQ ID NO: 390441 - DNA, 15 bp, Homo sapiens
ttctctgtcacaact

SEQ ID NO: 390442 - DNA, 15 bp, Homo sapiens
gttctctgtcacaac

SEQ ID NO: 390443 - DNA, 15 bp, Homo sapiens
tgttctctgtcacaa

SEQ ID NO: 390444 - DNA, 15 bp, Homo sapiens
ctgttctctgtcaca

SEQ ID NO: 390445 - DNA, 15 bp, Homo sapiens
tctgttctctgtcac

SEQ ID NO: 390446 - DNA, 15 bp, Homo sapiens
atctgttctctgtca

SEQ ID NO: 390447 - DNA, 15 bp, Homo sapiens
catctgttctctgtc

SEQ ID NO: 390448 - DNA, 15 bp, Homo sapiens
ccatctgttctctgt

SEQ ID NO: 390449 - DNA, 15 bp, Homo sapiens
accatctgttctctg

SEQ ID NO: 390450 - DNA, 15 bp, Homo sapiens
gaccatctgttctct

SEQ ID NO: 390451 - DNA, 15 bp, Homo sapiens
ggaccatctgttctc

SEQ ID NO: 390452 - DNA, 15 bp, Homo sapiens
gggaccatctgttct

SEQ ID NO: 390453 - DNA, 15 bp, Homo sapiens
tgggaccatctgttc

SEQ ID NO: 390454 - DNA, 15 bp, Homo sapiens
gtgggaccatctgtt

SEQ ID NO: 390455 - DNA, 15 bp, Homo sapiens
tgtgggaccatctgt

SEQ ID NO: 390456 - DNA, 15 bp, Homo sapiens
ttgtgggaccatctg

SEQ ID NO: 390457 - DNA, 15 bp, Homo sapiens
tttgtgggaccatct

SEQ ID NO: 390458 - DNA, 15 bp, Homo sapiens
ttttgtgggaccatc

SEQ ID NO: 390459 - DNA, 15 bp, Homo sapiens
attttgtgggaccat

SEQ ID NO: 390460 - DNA, 15 bp, Homo sapiens
gattttgtgggacca

SEQ ID NO: 390461 - DNA, 15 bp, Homo sapiens
agattttgtgggacc

SEQ ID NO: 390462 - DNA, 15 bp, Homo sapiens
tagattttgtgggac

SEQ ID NO: 390463 - DNA, 15 bp, Homo sapiens
ttagattttgtggga

SEQ ID NO: 390464 - DNA, 15 bp, Homo sapiens
tttagattttgtggg

SEQ ID NO: 390465 - DNA, 15 bp, Homo sapiens
gtttagattttgtgg

SEQ ID NO: 390466 - DNA, 15 bp, Homo sapiens
agtttagattttgtg

SEQ ID NO: 390467 - DNA, 15 bp, Homo sapiens
cagtttagattttgt

SEQ ID NO: 390468 - DNA, 15 bp, Homo sapiens
acagtttagattttg

SEQ ID NO: 390469 - DNA, 15 bp, Homo sapiens
aacagtttagatttt

SEQ ID NO: 390470 - DNA, 15 bp, Homo sapiens
aaacagtttagattt

SEQ ID NO: 390471 - DNA, 15 bp, Homo sapiens
taaacagtttagatt

SEQ ID NO: 390472 - DNA, 15 bp, Homo sapiens
gtaaacagtttagat

SEQ ID NO: 390473 - DNA, 15 bp, Homo sapiens
agtaaacagtttaga

SEQ ID NO: 390474 - DNA, 15 bp, Homo sapiens
tagtaaacagtttag

SEQ ID NO: 390475 - DNA, 15 bp, Homo sapiens
atagtaaacagttta

SEQ ID NO: 390476 - DNA, 15 bp, Homo sapiens
aatagtaaacagttt

SEQ ID NO: 390477 - DNA, 15 bp, Homo sapiens
aaatagtaaacagtt

SEQ ID NO: 390478 - DNA, 15 bp, Homo sapiens
caaatagtaaacagt

SEQ ID NO: 390479 - DNA, 15 bp, Homo sapiens
ccaaatagtaaacag

SEQ ID NO: 390480 - DNA, 15 bp, Homo sapiens
gccaaatagtaaaca

SEQ ID NO: 390481 - DNA, 15 bp, Homo sapiens
ggccaaatagtaaac

SEQ ID NO: 390482 - DNA, 15 bp, Homo sapiens
gggccaaatagtaaa

SEQ ID NO: 390483 - DNA, 15 bp, Homo sapiens
agggccaaatagtaa

SEQ ID NO: 390484 - DNA, 15 bp, Homo sapiens
aagggccaaatagta

SEQ ID NO: 390485 - DNA, 15 bp, Homo sapiens
aaagggccaaatagt

SEQ ID NO: 390486 - DNA, 15 bp, Homo sapiens
taaagggccaaatag

SEQ ID NO: 390487 - DNA, 15 bp, Homo sapiens
ataaagggccaaata

SEQ ID NO: 390488 - DNA, 15 bp, Homo sapiens
tataaagggccaaat

SEQ ID NO: 390489 - DNA, 15 bp, Homo sapiens
ttataaagggccaaa

SEQ ID NO: 390490 - DNA, 15 bp, Homo sapiens
tttataaagggccaa

SEQ ID NO: 390491 - DNA, 15 bp, Homo sapiens
ttttataaagggcca

SEQ ID NO: 390492 - DNA, 15 bp, Homo sapiens
tttttataaagggcc

SEQ ID NO: 390493 - DNA, 15 bp, Homo sapiens
ctttttataaagggc

SEQ ID NO: 390494 - DNA, 15 bp, Homo sapiens
cctttttataaaggg

SEQ ID NO: 390495 - DNA, 15 bp, Homo sapiens
tcctttttataaagg

SEQ ID NO: 390496 - DNA, 15 bp, Homo sapiens
atcctttttataaag

SEQ ID NO: 390497 - DNA, 15 bp, Homo sapiens
aatcctttttataaa

SEQ ID NO: 390498 - DNA, 15 bp, Homo sapiens
aaatcctttttataa

SEQ ID NO: 390499 - DNA, 15 bp, Homo sapiens
caaatcctttttata

SEQ ID NO: 390500 - DNA, 15 bp, Homo sapiens
gcaaatcctttttat

SEQ ID NO: 390501 - DNA, 15 bp, Homo sapiens
ggcaaatccttttta

SEQ ID NO: 390502 - DNA, 15 bp, Homo sapiens
tggcaaatccttttt

SEQ ID NO: 390503 - DNA, 15 bp, Homo sapiens
ctggcaaatcctttt

SEQ ID NO: 390504 - DNA, 15 bp, Homo sapiens
gctggcaaatccttt

SEQ ID NO: 390505 - DNA, 15 bp, Homo sapiens
agctggcaaatcctt

SEQ ID NO: 390506 - DNA, 15 bp, Homo sapiens
gagctggcaaatcct

SEQ ID NO: 390507 - DNA, 15 bp, Homo sapiens
ggagctggcaaatcc

SEQ ID NO: 390508 - DNA, 15 bp, Homo sapiens
aggagctggcaaatc

SEQ ID NO: 390509 - DNA, 15 bp, Homo sapiens
caggagctggcaaat

SEQ ID NO: 390510 - DNA, 15 bp, Homo sapiens
gcaggagctggcaaa

SEQ ID NO: 390511 - DNA, 15 bp, Homo sapiens
agcaggagctggcaa

SEQ ID NO: 390512 - DNA, 15 bp, Homo sapiens
tagcaggagctggca

SEQ ID NO: 390513 - DNA, 15 bp, Homo sapiens
ctagcaggagctggc

SEQ ID NO: 390514 - DNA, 15 bp, Homo sapiens
tctagcaggagctgg

SEQ ID NO: 390515 - DNA, 15 bp, Homo sapiens
ttctagcaggagctg

SEQ ID NO: 390516 - DNA, 15 bp, Homo sapiens
tttctagcaggagct

SEQ ID NO: 390517 - DNA, 15 bp, Homo sapiens
ttttctagcaggagc

SEQ ID NO: 390518 - DNA, 15 bp, Homo sapiens
gttttctagcaggag

SEQ ID NO: 390519 - DNA, 15 bp, Homo sapiens
tgttttctagcagga

SEQ ID NO: 390520 - DNA, 15 bp, Homo sapiens
atgttttctagcagg

SEQ ID NO: 390521 - DNA, 15 bp, Homo sapiens
aatgttttctagcag

SEQ ID NO: 390522 - DNA, 15 bp, Homo sapiens
caatgttttctagca

SEQ ID NO: 390523 - DNA, 15 bp, Homo sapiens
tcaatgttttctagc

SEQ ID NO: 390524 - DNA, 15 bp, Homo sapiens
ctcaatgttttctag

SEQ ID NO: 390525 - DNA, 15 bp, Homo sapiens
tctcaatgttttcta

SEQ ID NO: 390526 - DNA, 15 bp, Homo sapiens
ttctcaatgttttct

SEQ ID NO: 390527 - DNA, 15 bp, Homo sapiens
attctcaatgttttc

SEQ ID NO: 390528 - DNA, 15 bp, Homo sapiens
cattctcaatgtttt

SEQ ID NO: 390529 - DNA, 15 bp, Homo sapiens
tcattctcaatgttt

SEQ ID NO: 390530 - DNA, 15 bp, Homo sapiens
atcattctcaatgtt

SEQ ID NO: 390531 - DNA, 15 bp, Homo sapiens
aatcattctcaatgt

SEQ ID NO: 390532 - DNA, 15 bp, Homo sapiens
aaatcattctcaatg

SEQ ID NO: 390533 - DNA, 15 bp, Homo sapiens
caaatcattctcaat

SEQ ID NO: 390534 - DNA, 15 bp, Homo sapiens
acaaatcattctcaa

SEQ ID NO: 390535 - DNA, 15 bp, Homo sapiens
aacaaatcattctca

SEQ ID NO: 390536 - DNA, 15 bp, Homo sapiens
aaacaaatcattctc

SEQ ID NO: 390537 - DNA, 15 bp, Homo sapiens
aaaacaaatcattct

SEQ ID NO: 390538 - DNA, 15 bp, Homo sapiens
caaaacaaatcattc

SEQ ID NO: 390539 - DNA, 15 bp, Homo sapiens
acaaaacaaatcatt

SEQ ID NO: 390540 - DNA, 15 bp, Homo sapiens
tacaaaacaaatcat

SEQ ID NO: 390541 - DNA, 15 bp, Homo sapiens
ctacaaaacaaatca

SEQ ID NO: 390542 - DNA, 15 bp, Homo sapiens
actacaaaacaaatc

SEQ ID NO: 390543 - DNA, 15 bp, Homo sapiens
gtactacaaaacaaa

SEQ ID NO: 390544 - DNA, 15 bp, Homo sapiens
ggtactacaaaacaa

SEQ ID NO: 390545 - DNA, 15 bp, Homo sapiens
tggtactacaaaaca

SEQ ID NO: 390546 - DNA, 15 bp, Homo sapiens
atggtactacaaaac

SEQ ID NO: 390547 - DNA, 15 bp, Homo sapiens
catggtactacaaaa

SEQ ID NO: 390548 - DNA, 15 bp, Homo sapiens
ccatggtactacaaa

SEQ ID NO: 390549 - DNA, 15 bp, Homo sapiens
tccatggtactacaa

SEQ ID NO: 390550 - DNA, 15 bp, Homo sapiens
ttccatggtactaca

SEQ ID NO: 390551 - DNA, 15 bp, Homo sapiens
tttccatggtactac

SEQ ID NO: 390552 - DNA, 15 bp, Homo sapiens
atttccatggtacta

SEQ ID NO: 390553 - DNA, 15 bp, Homo sapiens
aatttccatggtact

SEQ ID NO: 390554 - DNA, 15 bp, Homo sapiens
aaatttccatggtac

SEQ ID NO: 390555 - DNA, 15 bp, Homo sapiens
caaatttccatggta

SEQ ID NO: 390556 - DNA, 15 bp, Homo sapiens
acaaatttccatggt

SEQ ID NO: 390557 - DNA, 15 bp, Homo sapiens
cacaaatttccatgg

SEQ ID NO: 390558 - DNA, 15 bp, Homo sapiens
tcacaaatttccatg

SEQ ID NO: 390559 - DNA, 15 bp, Homo sapiens
atcacaaatttccat

SEQ ID NO: 390560 - DNA, 15 bp, Homo sapiens
gatcacaaatttcca

SEQ ID NO: 390561 - DNA, 15 bp, Homo sapiens
agatcacaaatttcc

SEQ ID NO: 390562 - DNA, 15 bp, Homo sapiens
aagatcacaaatttc

SEQ ID NO: 390563 - DNA, 15 bp, Homo sapiens
gaagatcacaaattt

SEQ ID NO: 390564 - DNA, 15 bp, Homo sapiens
agaagatcacaaatt

SEQ ID NO: 390565 - DNA, 15 bp, Homo sapiens
aagaagatcacaaat

SEQ ID NO: 390566 - DNA, 15 bp, Homo sapiens
aaagaagatcacaaa

SEQ ID NO: 390567 - DNA, 15 bp, Homo sapiens
caaagaagatcacaa

SEQ ID NO: 390568 - DNA, 15 bp, Homo sapiens
gcaaagaagatcaca

SEQ ID NO: 390569 - DNA, 15 bp, Homo sapiens
agcaaagaagatcac

SEQ ID NO: 390570 - DNA, 15 bp, Homo sapiens
aagcaaagaagatca

SEQ ID NO: 390571 - DNA, 15 bp, Homo sapiens
taagcaaagaagatc

SEQ ID NO: 390572 - DNA, 15 bp, Homo sapiens
gtaagcaaagaagat

SEQ ID NO: 390573 - DNA, 15 bp, Homo sapiens
ggtaagcaaagaaga

SEQ ID NO: 390574 - DNA, 15 bp, Homo sapiens
aggtaagcaaagaag

SEQ ID NO: 390575 - DNA, 15 bp, Homo sapiens
taggtaagcaaagaa

SEQ ID NO: 390576 - DNA, 15 bp, Homo sapiens
ctaggtaagcaaaga

SEQ ID NO: 390577 - DNA, 15 bp, Homo sapiens
tctaggtaagcaaag

SEQ ID NO: 390578 - DNA, 15 bp, Homo sapiens
ttctaggtaagcaaa

SEQ ID NO: 390579 - DNA, 15 bp, Homo sapiens
gttctaggtaagcaa

SEQ ID NO: 390580 - DNA, 15 bp, Homo sapiens
agttctaggtaagca

SEQ ID NO: 390581 - DNA, 15 bp, Homo sapiens
cagttctaggtaagc

SEQ ID NO: 390582 - DNA, 15 bp, Homo sapiens
gcagttctaggtaag

SEQ ID NO: 390583 - DNA, 15 bp, Homo sapiens
tgcagttctaggtaa

SEQ ID NO: 390584 - DNA, 15 bp, Homo sapiens
ctgcagttctaggta

SEQ ID NO: 390585 - DNA, 15 bp, Homo sapiens
gctgcagttctaggt

SEQ ID NO: 390586 - DNA, 15 bp, Homo sapiens
agctgcagttctagg

SEQ ID NO: 390587 - DNA, 15 bp, Homo sapiens
cagctgcagttctag

SEQ ID NO: 390588 - DNA, 15 bp, Homo sapiens
acagctgcagttcta

SEQ ID NO: 390589 - DNA, 15 bp, Homo sapiens
tacagctgcagttct

SEQ ID NO: 390590 - DNA, 15 bp, Homo sapiens
atacagctgcagttc

SEQ ID NO: 390591 - DNA, 15 bp, Homo sapiens
catacagctgcagtt

SEQ ID NO: 390592 - DNA, 15 bp, Homo sapiens
gcatacagctgcagt

SEQ ID NO: 390593 - DNA, 15 bp, Homo sapiens
agcatacagctgcag

SEQ ID NO: 390594 - DNA, 15 bp, Homo sapiens
tagcatacagctgca

SEQ ID NO: 390595 - DNA, 15 bp, Homo sapiens
gtagcatacagctgc

SEQ ID NO: 390596 - DNA, 15 bp, Homo sapiens
tgtagcatacagctg

SEQ ID NO: 390597 - DNA, 15 bp, Homo sapiens
ctgtagcatacagct

SEQ ID NO: 390598 - DNA, 15 bp, Homo sapiens
gctgtagcatacagc

SEQ ID NO: 390599 - DNA, 15 bp, Homo sapiens
agctgtagcatacag

SEQ ID NO: 390600 - DNA, 15 bp, Homo sapiens
tagctgtagcataca

SEQ ID NO: 390601 - DNA, 15 bp, Homo sapiens
ttagctgtagcatac

SEQ ID NO: 390602 - DNA, 15 bp, Homo sapiens
cttagctgtagcata

SEQ ID NO: 390603 - DNA, 15 bp, Homo sapiens
tcttagctgtagcat

SEQ ID NO: 390604 - DNA, 15 bp, Homo sapiens
ttcttagctgtagca

SEQ ID NO: 390605 - DNA, 15 bp, Homo sapiens
tttcttagctgtagc

SEQ ID NO: 390606 - DNA, 15 bp, Homo sapiens
atttcttagctgtag

SEQ ID NO: 390607 - DNA, 15 bp, Homo sapiens
aatttcttagctgta

SEQ ID NO: 390608 - DNA, 15 bp, Homo sapiens
gaatttcttagctgt

SEQ ID NO: 390609 - DNA, 15 bp, Homo sapiens
ggaatttcttagctg

SEQ ID NO: 390610 - DNA, 15 bp, Homo sapiens
aggaatttcttagct

SEQ ID NO: 390611 - DNA, 15 bp, Homo sapiens
aaggaatttcttagc

SEQ ID NO: 390612 - DNA, 15 bp, Homo sapiens
taaggaatttcttag

SEQ ID NO: 390613 - DNA, 15 bp, Homo sapiens
ttaaggaatttctta

SEQ ID NO: 390614 - DNA, 15 bp, Homo sapiens
tttaaggaatttctt

SEQ ID NO: 390615 - DNA, 15 bp, Homo sapiens
ctttaaggaatttct

SEQ ID NO: 390616 - DNA, 15 bp, Homo sapiens
tctttaaggaatttc

SEQ ID NO: 390617 - DNA, 15 bp, Homo sapiens
ttctttaaggaattt

SEQ ID NO: 390618 - DNA, 15 bp, Homo sapiens
gttctttaaggaatt

SEQ ID NO: 390619 - DNA, 15 bp, Homo sapiens
agttctttaaggaat

SEQ ID NO: 390620 - DNA, 15 bp, Homo sapiens
aagttctttaaggaa

SEQ ID NO: 390621 - DNA, 15 bp, Homo sapiens
gaagttctttaagga

SEQ ID NO: 390622 - DNA, 15 bp, Homo sapiens
agaagttctttaagg

SEQ ID NO: 390623 - DNA, 15 bp, Homo sapiens
gagaagttctttaag

SEQ ID NO: 390624 - DNA, 15 bp, Homo sapiens
ggagaagttctttaa

SEQ ID NO: 390625 - DNA, 15 bp, Homo sapiens
tggagaagttcttta

SEQ ID NO: 390626 - DNA, 15 bp, Homo sapiens
gtggagaagttcttt

SEQ ID NO: 390627 - DNA, 15 bp, Homo sapiens
agtggagaagttctt

SEQ ID NO: 390628 - DNA, 15 bp, Homo sapiens
aagtggagaagttct

SEQ ID NO: 390629 - DNA, 15 bp, Homo sapiens
aaagtggagaagttc

SEQ ID NO: 390630 - DNA, 15 bp, Homo sapiens
aaaagtggagaagtt

SEQ ID NO: 390631 - DNA, 15 bp, Homo sapiens
aaaaagtggagaagt

SEQ ID NO: 390632 - DNA, 15 bp, Homo sapiens
aaaaaagtggagaag

SEQ ID NO: 390633 - DNA, 15 bp, Homo sapiens
aaaaaaagtggagaa

SEQ ID NO: 390634 - DNA, 15 bp, Homo sapiens
aaaaaaaagtggaga

SEQ ID NO: 390635 - DNA, 15 bp, Homo sapiens
aaaaaaaaagtggag

SEQ ID NO: 390636 - DNA, 15 bp, Homo sapiens
caaaaaaaaagtgga

SEQ ID NO: 390637 - DNA, 15 bp, Homo sapiens
acaaaaaaaaagtgg

SEQ ID NO: 390638 - DNA, 15 bp, Homo sapiens
aacaaaaaaaaagtg

SEQ ID NO: 390639 - DNA, 15 bp, Homo sapiens
aaacaaaaaaaaagt

SEQ ID NO: 390640 - DNA, 15 bp, Homo sapiens
aaaacaaaaaaaaag

SEQ ID NO: 390641 - DNA, 15 bp, Homo sapiens
aaaaacaaaaaaaaa

SEQ ID NO: 390642 - DNA, 15 bp, Homo sapiens
aaaaaacaaaaaaaa

SEQ ID NO: 390643 - DNA, 15 bp, Homo sapiens
aaaaaaacaaaaaaa

SEQ ID NO: 390644 - DNA, 15 bp, Homo sapiens
aaaaaaaacaaaaaa

SEQ ID NO: 390645 - DNA, 15 bp, Homo sapiens
aaaaaaaaacaaaaa

SEQ ID NO: 390646 - DNA, 15 bp, Homo sapiens
aaaaaaaaaaaacaa

SEQ ID NO: 390647 - DNA, 15 bp, Homo sapiens
aaaaaaaaaaaaaca

SEQ ID NO: 390648 - DNA, 15 bp, Homo sapiens
caaaaaaaaaaaaac

SEQ ID NO: 390649 - DNA, 15 bp, Homo sapiens
caaaaacaaaaaaaa

SEQ ID NO: 390650 - DNA, 15 bp, Homo sapiens
ccaaaaacaaaaaaa

SEQ ID NO: 390651 - DNA, 15 bp, Homo sapiens
gccaaaaacaaaaaa

SEQ ID NO: 390652 - DNA, 15 bp, Homo sapiens
ggccaaaaacaaaaa

SEQ ID NO: 390653 - DNA, 15 bp, Homo sapiens
aggccaaaaacaaaa

SEQ ID NO: 390654 - DNA, 15 bp, Homo sapiens
gaggccaaaaacaaa

SEQ ID NO: 390655 - DNA, 15 bp, Homo sapiens
agaggccaaaaacaa

SEQ ID NO: 390656 - DNA, 15 bp, Homo sapiens
cagaggccaaaaaca

SEQ ID NO: 390657 - DNA, 15 bp, Homo sapiens
ccagaggccaaaaac

SEQ ID NO: 390658 - DNA, 15 bp, Homo sapiens
cccagaggccaaaaa

SEQ ID NO: 390659 - DNA, 15 bp, Homo sapiens
tcccagaggccaaaa

SEQ ID NO: 390660 - DNA, 15 bp, Homo sapiens
gtcccagaggccaaa

SEQ ID NO: 390661 - DNA, 15 bp, Homo sapiens
tgtcccagaggccaa

SEQ ID NO: 390662 - DNA, 15 bp, Homo sapiens
ttgtcccagaggcca

SEQ ID NO: 390663 - DNA, 15 bp, Homo sapiens
gttgtcccagaggcc

SEQ ID NO: 390664 - DNA, 15 bp, Homo sapiens
ggttgtcccagaggc

SEQ ID NO: 390665 - DNA, 15 bp, Homo sapiens
gggttgtcccagagg

SEQ ID NO: 390666 - DNA, 15 bp, Homo sapiens
tgggttgtcccagag

SEQ ID NO: 390667 - DNA, 15 bp, Homo sapiens
gtgggttgtcccaga

SEQ ID NO: 390668 - DNA, 15 bp, Homo sapiens
tgtgggttgtcccag

SEQ ID NO: 390669 - DNA, 15 bp, Homo sapiens
gtgtgggttgtccca

SEQ ID NO: 390670 - DNA, 15 bp, Homo sapiens
agtgtgggttgtccc

SEQ ID NO: 390671 - DNA, 15 bp, Homo sapiens
tagtgtgggttgtcc

SEQ ID NO: 390672 - DNA, 15 bp, Homo sapiens
ctagtgtgggttgtc

SEQ ID NO: 390673 - DNA, 15 bp, Homo sapiens
actagtgtgggttgt

SEQ ID NO: 390674 - DNA, 15 bp, Homo sapiens
gactagtgtgggttg

SEQ ID NO: 390675 - DNA, 15 bp, Homo sapiens
ggactagtgtgggtt

SEQ ID NO: 390676 - DNA, 15 bp, Homo sapiens
tggactagtgtgggt

SEQ ID NO: 390677 - DNA, 15 bp, Homo sapiens
atggactagtgtggg

SEQ ID NO: 390678 - DNA, 15 bp, Homo sapiens
aatggactagtgtgg

SEQ ID NO: 390679 - DNA, 15 bp, Homo sapiens
gaatggactagtgtg

SEQ ID NO: 390680 - DNA, 15 bp, Homo sapiens
tgaatggactagtgt

SEQ ID NO: 390681 - DNA, 15 bp, Homo sapiens
atgaatggactagtg

SEQ ID NO: 390682 - DNA, 15 bp, Homo sapiens
catgaatggactagt

SEQ ID NO: 390683 - DNA, 15 bp, Homo sapiens
tcatgaatggactag

SEQ ID NO: 390684 - DNA, 15 bp, Homo sapiens
gtcatgaatggacta

SEQ ID NO: 390685 - DNA, 15 bp, Homo sapiens
agtcatgaatggact

SEQ ID NO: 390686 - DNA, 15 bp, Homo sapiens
tagtcatgaatggac

SEQ ID NO: 390687 - DNA, 15 bp, Homo sapiens
atagtcatgaatgga

SEQ ID NO: 390688 - DNA, 15 bp, Homo sapiens
aatagtcatgaatgg

SEQ ID NO: 390689 - DNA, 15 bp, Homo sapiens
aaatagtcatgaatg

SEQ ID NO: 390690 - DNA, 15 bp, Homo sapiens
aaaatagtcatgaat

SEQ ID NO: 390691 - DNA, 15 bp, Homo sapiens
aaaaatagtcatgaa

SEQ ID NO: 390692 - DNA, 15 bp, Homo sapiens
aaaaaatagtcatga

SEQ ID NO: 390693 - DNA, 15 bp, Homo sapiens
taaaaaatagtcatg

SEQ ID NO: 390694 - DNA, 15 bp, Homo sapiens
ataaaaaatagtcat

SEQ ID NO: 390695 - DNA, 15 bp, Homo sapiens
cataaaaaatagtca

SEQ ID NO: 390696 - DNA, 15 bp, Homo sapiens
tcataaaaaatagtc

SEQ ID NO: 390697 - DNA, 15 bp, Homo sapiens
gtcataaaaaatagt

SEQ ID NO: 390698 - DNA, 15 bp, Homo sapiens
agtcataaaaaatag

SEQ ID NO: 390699 - DNA, 15 bp, Homo sapiens
aagtcataaaaaata

SEQ ID NO: 390700 - DNA, 15 bp, Homo sapiens
aaagtcataaaaaat

SEQ ID NO: 390701 - DNA, 15 bp, Homo sapiens
gaaagtcataaaaaa

SEQ ID NO: 390702 - DNA, 15 bp, Homo sapiens
agaaagtcataaaaa

SEQ ID NO: 390703 - DNA, 15 bp, Homo sapiens
aagaaagtcataaaa

SEQ ID NO: 390704 - DNA, 15 bp, Homo sapiens
aaagaaagtcataaa

SEQ ID NO: 390705 - DNA, 15 bp, Homo sapiens
caaagaaagtcataa

SEQ ID NO: 390706 - DNA, 15 bp, Homo sapiens
gcaaagaaagtcata

SEQ ID NO: 390707 - DNA, 15 bp, Homo sapiens
agcaaagaaagtcat

SEQ ID NO: 390708 - DNA, 15 bp, Homo sapiens
aagcaaagaaagtca

SEQ ID NO: 390709 - DNA, 15 bp, Homo sapiens
taagcaaagaaagtc

SEQ ID NO: 390710 - DNA, 15 bp, Homo sapiens
ataagcaaagaaagt

SEQ ID NO: 390711 - DNA, 15 bp, Homo sapiens
aataagcaaagaaag

SEQ ID NO: 390712 - DNA, 15 bp, Homo sapiens
aaataagcaaagaaa

SEQ ID NO: 390713 - DNA, 15 bp, Homo sapiens
aaaataagcaaagaa

SEQ ID NO: 390714 - DNA, 15 bp, Homo sapiens
gaaaataagcaaaga

SEQ ID NO: 390715 - DNA, 15 bp, Homo sapiens
ggaaaataagcaaag

SEQ ID NO: 390716 - DNA, 15 bp, Homo sapiens
tggaaaataagcaaa

SEQ ID NO: 390717 - DNA, 15 bp, Homo sapiens
ctggaaaataagcaa

SEQ ID NO: 390718 - DNA, 15 bp, Homo sapiens
actggaaaataagca

SEQ ID NO: 390719 - DNA, 15 bp, Homo sapiens
cactggaaaataagc

SEQ ID NO: 390720 - DNA, 15 bp, Homo sapiens
ccactggaaaataag

SEQ ID NO: 390721 - DNA, 15 bp, Homo sapiens
accactggaaaataa

SEQ ID NO: 390722 - DNA, 15 bp, Homo sapiens
aaccactggaaaata

SEQ ID NO: 390723 - DNA, 15 bp, Homo sapiens
gaaccactggaaaat

SEQ ID NO: 390724 - DNA, 15 bp, Homo sapiens
ggaaccactggaaaa

SEQ ID NO: 390725 - DNA, 15 bp, Homo sapiens
aggaaccactggaaa

SEQ ID NO: 390726 - DNA, 15 bp, Homo sapiens
aaggaaccactggaa

SEQ ID NO: 390727 - DNA, 15 bp, Homo sapiens
aaaggaaccactgga

SEQ ID NO: 390728 - DNA, 15 bp, Homo sapiens
aaaaggaaccactgg

SEQ ID NO: 390729 - DNA, 15 bp, Homo sapiens
caaaaggaaccactg

SEQ ID NO: 390730 - DNA, 15 bp, Homo sapiens
gcaaaaggaaccact

SEQ ID NO: 390731 - DNA, 15 bp, Homo sapiens
ggcaaaaggaaccac

SEQ ID NO: 390732 - DNA, 15 bp, Homo sapiens
tggcaaaaggaacca

SEQ ID NO: 390733 - DNA, 15 bp, Homo sapiens
ttggcaaaaggaacc

SEQ ID NO: 390734 - DNA, 15 bp, Homo sapiens
attggcaaaaggaac

SEQ ID NO: 390735 - DNA, 15 bp, Homo sapiens
gattggcaaaaggaa

SEQ ID NO: 390736 - DNA, 15 bp, Homo sapiens
tgattggcaaaagga

SEQ ID NO: 390737 - DNA, 15 bp, Homo sapiens
atgattggcaaaagg

SEQ ID NO: 390738 - DNA, 15 bp, Homo sapiens
catgattggcaaaag

SEQ ID NO: 390739 - DNA, 15 bp, Homo sapiens
acatgattggcaaaa

SEQ ID NO: 390740 - DNA, 15 bp, Homo sapiens
cacatgattggcaaa

SEQ ID NO: 390741 - DNA, 15 bp, Homo sapiens
tcacatgattggcaa

SEQ ID NO: 390742 - DNA, 15 bp, Homo sapiens
ttcacatgattggca

SEQ ID NO: 390743 - DNA, 15 bp, Homo sapiens
gttcacatgattggc

SEQ ID NO: 390744 - DNA, 15 bp, Homo sapiens
tgttcacatgattgg

SEQ ID NO: 390745 - DNA, 15 bp, Homo sapiens
ctgttcacatgattg

SEQ ID NO: 390746 - DNA, 15 bp, Homo sapiens
tctgttcacatgatt

SEQ ID NO: 390747 - DNA, 15 bp, Homo sapiens
gtctgttcacatgat

SEQ ID NO: 390748 - DNA, 15 bp, Homo sapiens
ggtctgttcacatga

SEQ ID NO: 390749 - DNA, 15 bp, Homo sapiens
tggtctgttcacatg

SEQ ID NO: 390750 - DNA, 15 bp, Homo sapiens
ttggtctgttcacat

SEQ ID NO: 390751 - DNA, 15 bp, Homo sapiens
tttggtctgttcaca

SEQ ID NO: 390752 - DNA, 15 bp, Homo sapiens
ttttggtctgttcac

SEQ ID NO: 390753 - DNA, 15 bp, Homo sapiens
gttttggtctgttca

SEQ ID NO: 390754 - DNA, 15 bp, Homo sapiens
ggttttggtctgttc

SEQ ID NO: 390755 - DNA, 15 bp, Homo sapiens
tggttttggtctgtt

SEQ ID NO: 390756 - DNA, 15 bp, Homo sapiens
gtggttttggtctgt

SEQ ID NO: 390757 - DNA, 15 bp, Homo sapiens
tgtggttttggtctg

SEQ ID NO: 390758 - DNA, 15 bp, Homo sapiens
gtgtggttttggtct

SEQ ID NO: 390759 - DNA, 15 bp, Homo sapiens
tgtgtggttttggtc

SEQ ID NO: 390760 - DNA, 15 bp, Homo sapiens
ctgtgtggttttggt

SEQ ID NO: 390761 - DNA, 15 bp, Homo sapiens
cctgtgtggttttgg

SEQ ID NO: 390762 - DNA, 15 bp, Homo sapiens
tcctgtgtggttttg

SEQ ID NO: 390763 - DNA, 15 bp, Homo sapiens
ttcctgtgtggtttt

SEQ ID NO: 390764 - DNA, 15 bp, Homo sapiens
cttcctgtgtggttt

SEQ ID NO: 390765 - DNA, 15 bp, Homo sapiens
ccttcctgtgtggtt

SEQ ID NO: 390766 - DNA, 15 bp, Homo sapiens
accttcctgtgtggt

SEQ ID NO: 390767 - DNA, 15 bp, Homo sapiens
gaccttcctgtgtgg

SEQ ID NO: 390768 - DNA, 15 bp, Homo sapiens
agaccttcctgtgtg

SEQ ID NO: 390769 - DNA, 15 bp, Homo sapiens
cagaccttcctgtgt

SEQ ID NO: 390770 - DNA, 15 bp, Homo sapiens
acagaccttcctgtg

SEQ ID NO: 390771 - DNA, 15 bp, Homo sapiens
cacagaccttcctgt

SEQ ID NO: 390772 - DNA, 15 bp, Homo sapiens
ccacagaccttcctg

SEQ ID NO: 390773 - DNA, 15 bp, Homo sapiens
accacagaccttcct

SEQ ID NO: 390774 - DNA, 15 bp, Homo sapiens
aaccacagaccttcc

SEQ ID NO: 390775 - DNA, 15 bp, Homo sapiens
aaaccacagaccttc

SEQ ID NO: 390776 - DNA, 15 bp, Homo sapiens
caaaccacagacctt

SEQ ID NO: 390777 - DNA, 15 bp, Homo sapiens
gcaaaccacagacct

SEQ ID NO: 390778 - DNA, 15 bp, Homo sapiens
ggcaaaccacagacc

SEQ ID NO: 390779 - DNA, 15 bp, Homo sapiens
aggcaaaccacagac

SEQ ID NO: 390780 - DNA, 15 bp, Homo sapiens
taggcaaaccacaga

SEQ ID NO: 390781 - DNA, 15 bp, Homo sapiens
ttaggcaaaccacag

SEQ ID NO: 390782 - DNA, 15 bp, Homo sapiens
tttaggcaaaccaca

SEQ ID NO: 390783 - DNA, 15 bp, Homo sapiens
ctttaggcaaaccac

SEQ ID NO: 390784 - DNA, 15 bp, Homo sapiens
tctttaggcaaacca

SEQ ID NO: 390785 - DNA, 15 bp, Homo sapiens
ttctttaggcaaacc

SEQ ID NO: 390786 - DNA, 15 bp, Homo sapiens
cttctttaggcaaac

SEQ ID NO: 390787 - DNA, 15 bp, Homo sapiens
gcttctttaggcaaa

SEQ ID NO: 390788 - DNA, 15 bp, Homo sapiens
agcttctttaggcaa

SEQ ID NO: 390789 - DNA, 15 bp, Homo sapiens
aagcttctttaggca

SEQ ID NO: 390790 - DNA, 15 bp, Homo sapiens
aaagcttctttaggc

SEQ ID NO: 390791 - DNA, 15 bp, Homo sapiens
aaaagcttctttagg

SEQ ID NO: 390792 - DNA, 15 bp, Homo sapiens
gaaaagcttctttag

SEQ ID NO: 390793 - DNA, 15 bp, Homo sapiens
agaaaagcttcttta

SEQ ID NO: 390794 - DNA, 15 bp, Homo sapiens
tagaaaagcttcttt

SEQ ID NO: 390795 - DNA, 15 bp, Homo sapiens
gtagaaaagcttctt

SEQ ID NO: 390796 - DNA, 15 bp, Homo sapiens
tgtagaaaagcttct

SEQ ID NO: 390797 - DNA, 15 bp, Homo sapiens
ctgtagaaaagcttc

SEQ ID NO: 390798 - DNA, 15 bp, Homo sapiens
tctgtagaaaagctt

SEQ ID NO: 390799 - DNA, 15 bp, Homo sapiens
ctctgtagaaaagct

SEQ ID NO: 390800 - DNA, 15 bp, Homo sapiens
cctctgtagaaaagc

SEQ ID NO: 390801 - DNA, 15 bp, Homo sapiens
ccctctgtagaaaag

SEQ ID NO: 390802 - DNA, 15 bp, Homo sapiens
tccctctgtagaaaa

SEQ ID NO: 390803 - DNA, 15 bp, Homo sapiens
atccctctgtagaaa

SEQ ID NO: 390804 - DNA, 15 bp, Homo sapiens
tatccctctgtagaa

SEQ ID NO: 390805 - DNA, 15 bp, Homo sapiens
atatccctctgtaga

SEQ ID NO: 390806 - DNA, 15 bp, Homo sapiens
catatccctctgtag

SEQ ID NO: 390807 - DNA, 15 bp, Homo sapiens
acatatccctctgta

SEQ ID NO: 390808 - DNA, 15 bp, Homo sapiens
gacatatccctctgt

SEQ ID NO: 390809 - DNA, 15 bp, Homo sapiens
agacatatccctctg

SEQ ID NO: 390810 - DNA, 15 bp, Homo sapiens
cagacatatccctct

SEQ ID NO: 390811 - DNA, 15 bp, Homo sapiens
ccagacatatccctc

SEQ ID NO: 390812 - DNA, 15 bp, Homo sapiens
gccagacatatccct

SEQ ID NO: 390813 - DNA, 15 bp, Homo sapiens
agccagacatatccc

SEQ ID NO: 390814 - DNA, 15 bp, Homo sapiens
aagccagacatatcc

SEQ ID NO: 390815 - DNA, 15 bp, Homo sapiens
caagccagacatatc

SEQ ID NO: 390816 - DNA, 15 bp, Homo sapiens
ccaagccagacatat

SEQ ID NO: 390817 - DNA, 15 bp, Homo sapiens
cccaagccagacata

SEQ ID NO: 390818 - DNA, 15 bp, Homo sapiens
acccaagccagacat

SEQ ID NO: 390819 - DNA, 15 bp, Homo sapiens
tacccaagccagaca

SEQ ID NO: 390820 - DNA, 15 bp, Homo sapiens
gtacccaagccagac

SEQ ID NO: 390821 - DNA, 15 bp, Homo sapiens
ggtacccaagccaga

SEQ ID NO: 390822 - DNA, 15 bp, Homo sapiens
aggtacccaagccag

SEQ ID NO: 390823 - DNA, 15 bp, Homo sapiens
gaggtacccaagcca

SEQ ID NO: 390824 - DNA, 15 bp, Homo sapiens
ggaggtacccaagcc

SEQ ID NO: 390825 - DNA, 15 bp, Homo sapiens
gggaggtacccaagc

SEQ ID NO: 390826 - DNA, 15 bp, Homo sapiens
agggaggtacccaag

SEQ ID NO: 390827 - DNA, 15 bp, Homo sapiens
cagggaggtacccaa

SEQ ID NO: 390828 - DNA, 15 bp, Homo sapiens
acagggaggtaccca

SEQ ID NO: 390829 - DNA, 15 bp, Homo sapiens
aacagggaggtaccc

SEQ ID NO: 390830 - DNA, 15 bp, Homo sapiens
aaacagggaggtacc

SEQ ID NO: 390831 - DNA, 15 bp, Homo sapiens
caaacagggaggtac

SEQ ID NO: 390832 - DNA, 15 bp, Homo sapiens
acaaacagggaggta

SEQ ID NO: 390833 - DNA, 15 bp, Homo sapiens
aacaaacagggaggt

SEQ ID NO: 390834 - DNA, 15 bp, Homo sapiens
caacaaacagggagg

SEQ ID NO: 390835 - DNA, 15 bp, Homo sapiens
acaacaaacagggag

SEQ ID NO: 390836 - DNA, 15 bp, Homo sapiens
tacaacaaacaggga

SEQ ID NO: 390837 - DNA, 15 bp, Homo sapiens
gtacaacaaacaggg

SEQ ID NO: 390838 - DNA, 15 bp, Homo sapiens
tgtacaacaaacagg

SEQ ID NO: 390839 - DNA, 15 bp, Homo sapiens
ttgtacaacaaacag

SEQ ID NO: 390840 - DNA, 15 bp, Homo sapiens
tttgtacaacaaaca

SEQ ID NO: 390841 - DNA, 15 bp, Homo sapiens
gtttgtacaacaaac

SEQ ID NO: 390842 - DNA, 15 bp, Homo sapiens
ggtttgtacaacaaa

SEQ ID NO: 390843 - DNA, 15 bp, Homo sapiens
aggtttgtacaacaa

SEQ ID NO: 390844 - DNA, 15 bp, Homo sapiens
taggtttgtacaaca

SEQ ID NO: 390845 - DNA, 15 bp, Homo sapiens
ataggtttgtacaac

SEQ ID NO: 390846 - DNA, 15 bp, Homo sapiens
tataggtttgtacaa

SEQ ID NO: 390847 - DNA, 15 bp, Homo sapiens
ctataggtttgtaca

SEQ ID NO: 390848 - DNA, 15 bp, Homo sapiens
actataggtttgtac

SEQ ID NO: 390849 - DNA, 15 bp, Homo sapiens
aactataggtttgta

SEQ ID NO: 390850 - DNA, 15 bp, Homo sapiens
aaactataggtttgt

SEQ ID NO: 390851 - DNA, 15 bp, Homo sapiens
caaactataggtttg

SEQ ID NO: 390852 - DNA, 15 bp, Homo sapiens
tcaaactataggttt

SEQ ID NO: 390853 - DNA, 15 bp, Homo sapiens
atcaaactataggtt

SEQ ID NO: 390854 - DNA, 15 bp, Homo sapiens
aatcaaactataggt

SEQ ID NO: 390855 - DNA, 15 bp, Homo sapiens
gaatcaaactatagg

SEQ ID NO: 390856 - DNA, 15 bp, Homo sapiens
agaatcaaactatag

SEQ ID NO: 390857 - DNA, 15 bp, Homo sapiens
cagaatcaaactata

SEQ ID NO: 390858 - DNA, 15 bp, Homo sapiens
tcagaatcaaactat

SEQ ID NO: 390859 - DNA, 15 bp, Homo sapiens
atcagaatcaaacta

SEQ ID NO: 390860 - DNA, 15 bp, Homo sapiens
gatcagaatcaaact

SEQ ID NO: 390861 - DNA, 15 bp, Homo sapiens
tgatcagaatcaaac

SEQ ID NO: 390862 - DNA, 15 bp, Homo sapiens
atgatcagaatcaaa

SEQ ID NO: 390863 - DNA, 15 bp, Homo sapiens
aatgatcagaatcaa

SEQ ID NO: 390864 - DNA, 15 bp, Homo sapiens
taatgatcagaatca

SEQ ID NO: 390865 - DNA, 15 bp, Homo sapiens
gtaatgatcagaatc

SEQ ID NO: 390866 - DNA, 15 bp, Homo sapiens
tgtaatgatcagaat

SEQ ID NO: 390867 - DNA, 15 bp, Homo sapiens
gtgtaatgatcagaa

SEQ ID NO: 390868 - DNA, 15 bp, Homo sapiens
agtgtaatgatcaga

SEQ ID NO: 390869 - DNA, 15 bp, Homo sapiens
tagtgtaatgatcag

SEQ ID NO: 390870 - DNA, 15 bp, Homo sapiens
ctagtgtaatgatca

SEQ ID NO: 390871 - DNA, 15 bp, Homo sapiens
tctagtgtaatgatc

SEQ ID NO: 390872 - DNA, 15 bp, Homo sapiens
ctctagtgtaatgat

SEQ ID NO: 390873 - DNA, 15 bp, Homo sapiens
gctctagtgtaatga

SEQ ID NO: 390874 - DNA, 15 bp, Homo sapiens
agctctagtgtaatg

SEQ ID NO: 390875 - DNA, 15 bp, Homo sapiens
aagctctagtgtaat

SEQ ID NO: 390876 - DNA, 15 bp, Homo sapiens
aaagctctagtgtaa

SEQ ID NO: 390877 - DNA, 15 bp, Homo sapiens
caaagctctagtgta

SEQ ID NO: 390878 - DNA, 15 bp, Homo sapiens
tcaaagctctagtgt

SEQ ID NO: 390879 - DNA, 15 bp, Homo sapiens
atcaaagctctagtg

SEQ ID NO: 390880 - DNA, 15 bp, Homo sapiens
aatcaaagctctagt

SEQ ID NO: 390881 - DNA, 15 bp, Homo sapiens
gaatcaaagctctag

SEQ ID NO: 390882 - DNA, 15 bp, Homo sapiens
tgaatcaaagctcta

SEQ ID NO: 390883 - DNA, 15 bp, Homo sapiens
ttgaatcaaagctct

SEQ ID NO: 390884 - DNA, 15 bp, Homo sapiens
tttgaatcaaagctc

SEQ ID NO: 390885 - DNA, 15 bp, Homo sapiens
atttgaatcaaagct

SEQ ID NO: 390886 - DNA, 15 bp, Homo sapiens
catttgaatcaaagc

SEQ ID NO: 390887 - DNA, 15 bp, Homo sapiens
acatttgaatcaaag

SEQ ID NO: 390888 - DNA, 15 bp, Homo sapiens
tacatttgaatcaaa

SEQ ID NO: 390889 - DNA, 15 bp, Homo sapiens
atacatttgaatcaa

SEQ ID NO: 390890 - DNA, 15 bp, Homo sapiens
tatacatttgaatca

SEQ ID NO: 390891 - DNA, 15 bp, Homo sapiens
atatacatttgaatc

SEQ ID NO: 390892 - DNA, 15 bp, Homo sapiens
tatatacatttgaat

SEQ ID NO: 390893 - DNA, 15 bp, Homo sapiens
ttatatacatttgaa

SEQ ID NO: 390894 - DNA, 15 bp, Homo sapiens
tttatatacatttga

SEQ ID NO: 390895 - DNA, 15 bp, Homo sapiens
ttttatatacatttg

SEQ ID NO: 390896 - DNA, 15 bp, Homo sapiens
attttatatacattt

SEQ ID NO: 390897 - DNA, 15 bp, Homo sapiens
cattttatatacatt

SEQ ID NO: 390898 - DNA, 15 bp, Homo sapiens
tcattttatatacat

SEQ ID NO: 390899 - DNA, 15 bp, Homo sapiens
gtcattttatataca

SEQ ID NO: 390900 - DNA, 15 bp, Homo sapiens
ggtcattttatatac

SEQ ID NO: 390901 - DNA, 15 bp, Homo sapiens
tggtcattttatata

SEQ ID NO: 390902 - DNA, 15 bp, Homo sapiens
atggtcattttatat

SEQ ID NO: 390903 - DNA, 15 bp, Homo sapiens
gatggtcattttata

SEQ ID NO: 390904 - DNA, 15 bp, Homo sapiens
tgatggtcattttat

SEQ ID NO: 390905 - DNA, 15 bp, Homo sapiens
gtgatggtcatttta

SEQ ID NO: 390906 - DNA, 15 bp, Homo sapiens
agtgatggtcatttt

SEQ ID NO: 390907 - DNA, 15 bp, Homo sapiens
cagtgatggtcattt

SEQ ID NO: 390908 - DNA, 15 bp, Homo sapiens
acagtgatggtcatt

SEQ ID NO: 390909 - DNA, 15 bp, Homo sapiens
gacagtgatggtcat

SEQ ID NO: 390910 - DNA, 15 bp, Homo sapiens
tgacagtgatggtca

SEQ ID NO: 390911 - DNA, 15 bp, Homo sapiens
ctgacagtgatggtc

SEQ ID NO: 390912 - DNA, 15 bp, Homo sapiens
cctgacagtgatggt

SEQ ID NO: 390913 - DNA, 15 bp, Homo sapiens
tcctgacagtgatgg

SEQ ID NO: 390914 - DNA, 15 bp, Homo sapiens
atcctgacagtgatg

SEQ ID NO: 390915 - DNA, 15 bp, Homo sapiens
catcctgacagtgat

SEQ ID NO: 390916 - DNA, 15 bp, Homo sapiens
acatcctgacagtga

SEQ ID NO: 390917 - DNA, 15 bp, Homo sapiens
tacatcctgacagtg

SEQ ID NO: 390918 - DNA, 15 bp, Homo sapiens
ttacatcctgacagt

SEQ ID NO: 390919 - DNA, 15 bp, Homo sapiens
tttacatcctgacag

SEQ ID NO: 390920 - DNA, 15 bp, Homo sapiens
ttttacatcctgaca

SEQ ID NO: 390921 - DNA, 15 bp, Homo sapiens
attttacatcctgac

SEQ ID NO: 390922 - DNA, 15 bp, Homo sapiens
cattttacatcctga

SEQ ID NO: 390923 - DNA, 15 bp, Homo sapiens
tcattttacatcctg

SEQ ID NO: 390924 - DNA, 15 bp, Homo sapiens
ttcattttacatcct

SEQ ID NO: 390925 - DNA, 15 bp, Homo sapiens
attcattttacatcc

SEQ ID NO: 390926 - DNA, 15 bp, Homo sapiens
tattcattttacatc

SEQ ID NO: 390927 - DNA, 15 bp, Homo sapiens
ttattcattttacat

SEQ ID NO: 390928 - DNA, 15 bp, Homo sapiens
gcttattcattttac

SEQ ID NO: 390929 - DNA, 15 bp, Homo sapiens
tgcttattcatttta

SEQ ID NO: 390930 - DNA, 15 bp, Homo sapiens
atgcttattcatttt

SEQ ID NO: 390931 - DNA, 15 bp, Homo sapiens
tatgcttattcattt

SEQ ID NO: 390932 - DNA, 15 bp, Homo sapiens
atatgcttattcatt

SEQ ID NO: 390933 - DNA, 15 bp, Homo sapiens
aatatgcttattcat

SEQ ID NO: 390934 - DNA, 15 bp, Homo sapiens
aaatatgcttattca

SEQ ID NO: 390935 - DNA, 15 bp, Homo sapiens
taaatatgcttattc

SEQ ID NO: 390936 - DNA, 15 bp, Homo sapiens
ataaatatgcttatt

SEQ ID NO: 390937 - DNA, 15 bp, Homo sapiens
aataaatatgcttat

SEQ ID NO: 390938 - DNA, 15 bp, Homo sapiens
caataaatatgctta

SEQ ID NO: 390939 - DNA, 15 bp, Homo sapiens
acaataaatatgctt

SEQ ID NO: 390940 - DNA, 15 bp, Homo sapiens
aacaataaatatgct

SEQ ID NO: 390941 - DNA, 15 bp, Homo sapiens
caacaataaatatgc

SEQ ID NO: 390942 - DNA, 15 bp, Homo sapiens
ccaacaataaatatg

SEQ ID NO: 390943 - DNA, 15 bp, Homo sapiens
tccaacaataaatat

SEQ ID NO: 390944 - DNA, 15 bp, Homo sapiens
atccaacaataaata

SEQ ID NO: 390945 - DNA, 15 bp, Homo sapiens
aatccaacaataaat

SEQ ID NO: 390946 - DNA, 15 bp, Homo sapiens
gaatccaacaataaa

SEQ ID NO: 390947 - DNA, 15 bp, Homo sapiens
tgaatccaacaataa

SEQ ID NO: 390948 - DNA, 15 bp, Homo sapiens
atgaatccaacaata

SEQ ID NO: 390949 - DNA, 15 bp, Homo sapiens
tatgaatccaacaat

SEQ ID NO: 390950 - DNA, 15 bp, Homo sapiens
atatgaatccaacaa

SEQ ID NO: 390951 - DNA, 15 bp, Homo sapiens
aatatgaatccaaca

SEQ ID NO: 390952 - DNA, 15 bp, Homo sapiens
aaatatgaatccaac

SEQ ID NO: 390953 - DNA, 15 bp, Homo sapiens
caaatatgaatccaa

SEQ ID NO: 390954 - DNA, 15 bp, Homo sapiens
acaaatatgaatcca

SEQ ID NO: 390955 - DNA, 15 bp, Homo sapiens
tacaaatatgaatcc

SEQ ID NO: 390956 - DNA, 15 bp, Homo sapiens
ctacaaatatgaatc

SEQ ID NO: 390957 - DNA, 15 bp, Homo sapiens
cctacaaatatgaat

SEQ ID NO: 390958 - DNA, 15 bp, Homo sapiens
tcctacaaatatgaa

SEQ ID NO: 390959 - DNA, 15 bp, Homo sapiens
gtcctacaaatatga

SEQ ID NO: 390960 - DNA, 15 bp, Homo sapiens
cgtcctacaaatatg

SEQ ID NO: 390961 - DNA, 15 bp, Homo sapiens
tcgtcctacaaatat

SEQ ID NO: 390962 - DNA, 15 bp, Homo sapiens
ttcgtcctacaaata

SEQ ID NO: 390963 - DNA, 15 bp, Homo sapiens
tttcgtcctacaaat

SEQ ID NO: 390964 - DNA, 15 bp, Homo sapiens
ttttcgtcctacaaa

SEQ ID NO: 390965 - DNA, 15 bp, Homo sapiens
attttcgtcctacaa

SEQ ID NO: 390966 - DNA, 15 bp, Homo sapiens
gattttcgtcctaca

SEQ ID NO: 390967 - DNA, 15 bp, Homo sapiens
agattttcgtcctac

SEQ ID NO: 390968 - DNA, 15 bp, Homo sapiens
aagattttcgtccta

SEQ ID NO: 390969 - DNA, 15 bp, Homo sapiens
taagattttcgtcct

SEQ ID NO: 390970 - DNA, 15 bp, Homo sapiens
ttaagattttcgtcc

SEQ ID NO: 390971 - DNA, 15 bp, Homo sapiens
attaagattttcgtc

SEQ ID NO: 390972 - DNA, 15 bp, Homo sapiens
gattaagattttcgt

SEQ ID NO: 390973 - DNA, 15 bp, Homo sapiens
agattaagattttcg

SEQ ID NO: 390974 - DNA, 15 bp, Homo sapiens
aagattaagattttc

SEQ ID NO: 390975 - DNA, 15 bp, Homo sapiens
aaagattaagatttt

SEQ ID NO: 390976 - DNA, 15 bp, Homo sapiens
gaaagattaagattt

SEQ ID NO: 390977 - DNA, 15 bp, Homo sapiens
agaaagattaagatt

SEQ ID NO: 390978 - DNA, 15 bp, Homo sapiens
aagaaagattaagat

SEQ ID NO: 390979 - DNA, 15 bp, Homo sapiens
taagaaagattaaga

SEQ ID NO: 390980 - DNA, 15 bp, Homo sapiens
ataagaaagattaag

SEQ ID NO: 390981 - DNA, 15 bp, Homo sapiens
aataagaaagattaa

SEQ ID NO: 390982 - DNA, 15 bp, Homo sapiens
aaataagaaagatta

SEQ ID NO: 390983 - DNA, 15 bp, Homo sapiens
aaaataagaaagatt

SEQ ID NO: 390984 - DNA, 15 bp, Homo sapiens
aaaaataagaaagat

SEQ ID NO: 390985 - DNA, 15 bp, Homo sapiens
taaaaataagaaaga

SEQ ID NO: 390986 - DNA, 15 bp, Homo sapiens
ataaaaataagaaag

SEQ ID NO: 390987 - DNA, 15 bp, Homo sapiens
gataaaaataagaaa

SEQ ID NO: 390988 - DNA, 15 bp, Homo sapiens
tgataaaaataagaa

SEQ ID NO: 390989 - DNA, 15 bp, Homo sapiens
ctgataaaaataaga

SEQ ID NO: 390990 - DNA, 15 bp, Homo sapiens
cctgataaaaataag

SEQ ID NO: 390991 - DNA, 15 bp, Homo sapiens
gcctgataaaaataa

SEQ ID NO: 390992 - DNA, 15 bp, Homo sapiens
tgcctgataaaaata

SEQ ID NO: 390993 - DNA, 15 bp, Homo sapiens
atgcctgataaaaat

SEQ ID NO: 390994 - DNA, 15 bp, Homo sapiens
aatgcctgataaaaa

SEQ ID NO: 390995 - DNA, 15 bp, Homo sapiens
aaatgcctgataaaa

SEQ ID NO: 390996 - DNA, 15 bp, Homo sapiens
aaaatgcctgataaa

SEQ ID NO: 390997 - DNA, 15 bp, Homo sapiens
taaaatgcctgataa

SEQ ID NO: 390998 - DNA, 15 bp, Homo sapiens
ctaaaatgcctgata

SEQ ID NO: 390999 - DNA, 15 bp, Homo sapiens
actaaaatgcctgat

SEQ ID NO: 391000 - DNA, 15 bp, Homo sapiens
tactaaaatgcctga

SEQ ID NO: 391001 - DNA, 15 bp, Homo sapiens
ttactaaaatgcctg

SEQ ID NO: 391002 - DNA, 15 bp, Homo sapiens
gttactaaaatgcct

SEQ ID NO: 391003 - DNA, 15 bp, Homo sapiens
agttactaaaatgcc

SEQ ID NO: 391004 - DNA, 15 bp, Homo sapiens
aagttactaaaatgc

SEQ ID NO: 391005 - DNA, 15 bp, Homo sapiens
aaagttactaaaatg

SEQ ID NO: 391006 - DNA, 15 bp, Homo sapiens
taaagttactaaaat

SEQ ID NO: 391007 - DNA, 15 bp, Homo sapiens
ctaaagttactaaaa

SEQ ID NO: 391008 - DNA, 15 bp, Homo sapiens
actaaagttactaaa

SEQ ID NO: 391009 - DNA, 15 bp, Homo sapiens
tactaaagttactaa

SEQ ID NO: 391010 - DNA, 15 bp, Homo sapiens
ttactaaagttacta

SEQ ID NO: 391011 - DNA, 15 bp, Homo sapiens
attactaaagttact

SEQ ID NO: 391012 - DNA, 15 bp, Homo sapiens
cattactaaagttac

SEQ ID NO: 391013 - DNA, 15 bp, Homo sapiens
acattactaaagtta

SEQ ID NO: 391014 - DNA, 15 bp, Homo sapiens
aacattactaaagtt

SEQ ID NO: 391015 - DNA, 15 bp, Homo sapiens
aaacattactaaagt

SEQ ID NO: 391016 - DNA, 15 bp, Homo sapiens
gaaacattactaaag

SEQ ID NO: 391017 - DNA, 15 bp, Homo sapiens
agaaacattactaaa

SEQ ID NO: 391018 - DNA, 15 bp, Homo sapiens
gagaaacattactaa

SEQ ID NO: 391019 - DNA, 15 bp, Homo sapiens
tgagaaacattacta

SEQ ID NO: 391020 - DNA, 15 bp, Homo sapiens
atgagaaacattact

SEQ ID NO: 391021 - DNA, 15 bp, Homo sapiens
catgagaaacattac

SEQ ID NO: 391022 - DNA, 15 bp, Homo sapiens
tcatgagaaacatta

SEQ ID NO: 391023 - DNA, 15 bp, Homo sapiens
gtcatgagaaacatt

SEQ ID NO: 391024 - DNA, 15 bp, Homo sapiens
agtcatgagaaacat

SEQ ID NO: 391025 - DNA, 15 bp, Homo sapiens
cagtcatgagaaaca

SEQ ID NO: 391026 - DNA, 15 bp, Homo sapiens
gcagtcatgagaaac

SEQ ID NO: 391027 - DNA, 15 bp, Homo sapiens
agcagtcatgagaaa

SEQ ID NO: 391028 - DNA, 15 bp, Homo sapiens
tagcagtcatgagaa

SEQ ID NO: 391029 - DNA, 15 bp, Homo sapiens
ttagcagtcatgaga

SEQ ID NO: 391030 - DNA, 15 bp, Homo sapiens
attagcagtcatgag

SEQ ID NO: 391031 - DNA, 15 bp, Homo sapiens
aattagcagtcatga

SEQ ID NO: 391032 - DNA, 15 bp, Homo sapiens
taattagcagtcatg

SEQ ID NO: 391033 - DNA, 15 bp, Homo sapiens
ataattagcagtcat

SEQ ID NO: 391034 - DNA, 15 bp, Homo sapiens
tataattagcagtca

SEQ ID NO: 391035 - DNA, 15 bp, Homo sapiens
gtataattagcagtc

SEQ ID NO: 391036 - DNA, 15 bp, Homo sapiens
tgtataattagcagt

SEQ ID NO: 391037 - DNA, 15 bp, Homo sapiens
atgtataattagcag

SEQ ID NO: 391038 - DNA, 15 bp, Homo sapiens
gatgtataattagca

SEQ ID NO: 391039 - DNA, 15 bp, Homo sapiens
tgatgtataattagc

SEQ ID NO: 391040 - DNA, 15 bp, Homo sapiens
ttgatgtataattag

SEQ ID NO: 391041 - DNA, 15 bp, Homo sapiens
cttgatgtataatta

SEQ ID NO: 391042 - DNA, 15 bp, Homo sapiens
tcttgatgtataatt

SEQ ID NO: 391043 - DNA, 15 bp, Homo sapiens
atcttgatgtataat

SEQ ID NO: 391044 - DNA, 15 bp, Homo sapiens
aatcttgatgtataa

SEQ ID NO: 391045 - DNA, 15 bp, Homo sapiens
taatcttgatgtata

SEQ ID NO: 391046 - DNA, 15 bp, Homo sapiens
ttaatcttgatgtat

SEQ ID NO: 391047 - DNA, 15 bp, Homo sapiens
attaatcttgatgta

SEQ ID NO: 391048 - DNA, 15 bp, Homo sapiens
aattaatcttgatgt

SEQ ID NO: 391049 - DNA, 15 bp, Homo sapiens
caattaatcttgatg

SEQ ID NO: 391050 - DNA, 15 bp, Homo sapiens
gcaattaatcttgat

SEQ ID NO: 391051 - DNA, 15 bp, Homo sapiens
agcaattaatcttga

SEQ ID NO: 391052 - DNA, 15 bp, Homo sapiens
tagcaattaatcttg

SEQ ID NO: 391053 - DNA, 15 bp, Homo sapiens
atagcaattaatctt

SEQ ID NO: 391054 - DNA, 15 bp, Homo sapiens
tatagcaattaatct

SEQ ID NO: 391055 - DNA, 15 bp, Homo sapiens
atatagcaattaatc

SEQ ID NO: 391056 - DNA, 15 bp, Homo sapiens
aatatagcaattaat

SEQ ID NO: 391057 - DNA, 15 bp, Homo sapiens
aaatatagcaattaa

SEQ ID NO: 391058 - DNA, 15 bp, Homo sapiens
aaaatatagcaatta

SEQ ID NO: 391059 - DNA, 15 bp, Homo sapiens
aaaaatatagcaatt

SEQ ID NO: 391060 - DNA, 15 bp, Homo sapiens
aaaaaatatagcaat

SEQ ID NO: 391061 - DNA, 15 bp, Homo sapiens
aaaaaaatatagcaa

SEQ ID NO: 391062 - DNA, 15 bp, Homo sapiens
aaaaaaaatatagca

SEQ ID NO: 391063 - DNA, 15 bp, Homo sapiens
aaaaaaaaatatagc

SEQ ID NO: 391064 - DNA, 15 bp, Homo sapiens
taaaaaaaaatatag

SEQ ID NO: 391065 - DNA, 15 bp, Homo sapiens
ttaaaaaaaaatata

SEQ ID NO: 391066 - DNA, 15 bp, Homo sapiens
attaaaaaaaaatat

SEQ ID NO: 391067 - DNA, 15 bp, Homo sapiens
aattaaaaaaaaata

SEQ ID NO: 391068 - DNA, 15 bp, Homo sapiens
caattaaaaaaaaat

SEQ ID NO: 391069 - DNA, 15 bp, Homo sapiens
ccaattaaaaaaaaa

SEQ ID NO: 391070 - DNA, 15 bp, Homo sapiens
gccaattaaaaaaaa

SEQ ID NO: 391071 - DNA, 15 bp, Homo sapiens
agccaattaaaaaaa

SEQ ID NO: 391072 - DNA, 15 bp, Homo sapiens
tagccaattaaaaaa

SEQ ID NO: 391073 - DNA, 15 bp, Homo sapiens
ttagccaattaaaaa

SEQ ID NO: 391074 - DNA, 15 bp, Homo sapiens
gttagccaattaaaa

SEQ ID NO: 391075 - DNA, 15 bp, Homo sapiens
ggttagccaattaaa

SEQ ID NO: 391076 - DNA, 15 bp, Homo sapiens
aggttagccaattaa

SEQ ID NO: 391077 - DNA, 15 bp, Homo sapiens
aaggttagccaatta

SEQ ID NO: 391078 - DNA, 15 bp, Homo sapiens
taaggttagccaatt

SEQ ID NO: 391079 - DNA, 15 bp, Homo sapiens
ttaaggttagccaat

SEQ ID NO: 391080 - DNA, 15 bp, Homo sapiens
tttaaggttagccaa

SEQ ID NO: 391081 - DNA, 15 bp, Homo sapiens
gtttaaggttagcca

SEQ ID NO: 391082 - DNA, 15 bp, Homo sapiens
tgtttaaggttagcc

SEQ ID NO: 391083 - DNA, 15 bp, Homo sapiens
gtgtttaaggttagc

SEQ ID NO: 391084 - DNA, 15 bp, Homo sapiens
tgtgtttaaggttag

SEQ ID NO: 391085 - DNA, 15 bp, Homo sapiens
atgtgtttaaggtta

SEQ ID NO: 391086 - DNA, 15 bp, Homo sapiens
tatgtgtttaaggtt

SEQ ID NO: 391087 - DNA, 15 bp, Homo sapiens
ttatgtgtttaaggt

SEQ ID NO: 391088 - DNA, 15 bp, Homo sapiens
tttatgtgtttaagg

SEQ ID NO: 391089 - DNA, 15 bp, Homo sapiens
gtttatgtgtttaag

SEQ ID NO: 391090 - DNA, 15 bp, Homo sapiens
ggtttatgtgtttaa

SEQ ID NO: 391091 - DNA, 15 bp, Homo sapiens
gggtttatgtgttta

SEQ ID NO: 391092 - DNA, 15 bp, Homo sapiens
tgggtttatgtgttt

SEQ ID NO: 391093 - DNA, 15 bp, Homo sapiens
ttgggtttatgtgtt

SEQ ID NO: 391094 - DNA, 15 bp, Homo sapiens
attgggtttatgtgt

SEQ ID NO: 391095 - DNA, 15 bp, Homo sapiens
cattgggtttatgtg

SEQ ID NO: 391096 - DNA, 15 bp, Homo sapiens
acattgggtttatgt

SEQ ID NO: 391097 - DNA, 15 bp, Homo sapiens
gacattgggtttatg

SEQ ID NO: 391098 - DNA, 15 bp, Homo sapiens
ggacattgggtttat

SEQ ID NO: 391099 - DNA, 15 bp, Homo sapiens
aggacattgggttta

SEQ ID NO: 391100 - DNA, 15 bp, Homo sapiens
aaggacattgggttt

SEQ ID NO: 391101 - DNA, 15 bp, Homo sapiens
aaaggacattgggtt

SEQ ID NO: 391102 - DNA, 15 bp, Homo sapiens
aaaaggacattgggt

SEQ ID NO: 391103 - DNA, 15 bp, Homo sapiens
aaaaaggacattggg

SEQ ID NO: 391104 - DNA, 15 bp, Homo sapiens
aaaaaaggacattgg

SEQ ID NO: 391105 - DNA, 15 bp, Homo sapiens
taaaaaaggacattg

SEQ ID NO: 391106 - DNA, 15 bp, Homo sapiens
ataaaaaaggacatt

SEQ ID NO: 391107 - DNA, 15 bp, Homo sapiens
tataaaaaaggacat

SEQ ID NO: 391108 - DNA, 15 bp, Homo sapiens
ctataaaaaaggaca

SEQ ID NO: 391109 - DNA, 15 bp, Homo sapiens
actataaaaaaggac

SEQ ID NO: 391110 - DNA, 15 bp, Homo sapiens
gactataaaaaagga

SEQ ID NO: 391111 - DNA, 15 bp, Homo sapiens
tgactataaaaaagg

SEQ ID NO: 391112 - DNA, 15 bp, Homo sapiens
atgactataaaaaag

SEQ ID NO: 391113 - DNA, 15 bp, Homo sapiens
gatgactataaaaaa

SEQ ID NO: 391114 - DNA, 15 bp, Homo sapiens
agatgactataaaaa

SEQ ID NO: 391115 - DNA, 15 bp, Homo sapiens
aagatgactataaaa

SEQ ID NO: 391116 - DNA, 15 bp, Homo sapiens
gaagatgactataaa

SEQ ID NO: 391117 - DNA, 15 bp, Homo sapiens
agaagatgactataa

SEQ ID NO: 391118 - DNA, 15 bp, Homo sapiens
cagaagatgactata

SEQ ID NO: 391119 - DNA, 15 bp, Homo sapiens
tcagaagatgactat

SEQ ID NO: 391120 - DNA, 15 bp, Homo sapiens
atcagaagatgacta

SEQ ID NO: 391121 - DNA, 15 bp, Homo sapiens
tatcagaagatgact

SEQ ID NO: 391122 - DNA, 15 bp, Homo sapiens
ctatcagaagatgac

SEQ ID NO: 391123 - DNA, 15 bp, Homo sapiens
tctatcagaagatga

SEQ ID NO: 391124 - DNA, 15 bp, Homo sapiens
ctctatcagaagatg

SEQ ID NO: 391125 - DNA, 15 bp, Homo sapiens
actctatcagaagat

SEQ ID NO: 391126 - DNA, 15 bp, Homo sapiens
aactctatcagaaga

SEQ ID NO: 391127 - DNA, 15 bp, Homo sapiens
taactctatcagaag

SEQ ID NO: 391128 - DNA, 15 bp, Homo sapiens
ttaactctatcagaa

SEQ ID NO: 391129 - DNA, 15 bp, Homo sapiens
tttaactctatcaga

SEQ ID NO: 391130 - DNA, 15 bp, Homo sapiens
ttttaactctatcag

SEQ ID NO: 391131 - DNA, 15 bp, Homo sapiens
gttttaactctatca

SEQ ID NO: 391132 - DNA, 15 bp, Homo sapiens
tgttttaactctatc

SEQ ID NO: 391133 - DNA, 15 bp, Homo sapiens
atgttttaactctat

SEQ ID NO: 391134 - DNA, 15 bp, Homo sapiens
gatgttttaactcta

SEQ ID NO: 391135 - DNA, 15 bp, Homo sapiens
tgatgttttaactct

SEQ ID NO: 391136 - DNA, 15 bp, Homo sapiens
ctgatgttttaactc

SEQ ID NO: 391137 - DNA, 15 bp, Homo sapiens
actgatgttttaact

SEQ ID NO: 391138 - DNA, 15 bp, Homo sapiens
cactgatgttttaac

SEQ ID NO: 391139 - DNA, 15 bp, Homo sapiens
tcactgatgttttaa

SEQ ID NO: 391140 - DNA, 15 bp, Homo sapiens
atcactgatgtttta

SEQ ID NO: 391141 - DNA, 15 bp, Homo sapiens
tatcactgatgtttt

SEQ ID NO: 391142 - DNA, 15 bp, Homo sapiens
ctatcactgatgttt

SEQ ID NO: 391143 - DNA, 15 bp, Homo sapiens
cctatcactgatgtt

SEQ ID NO: 391144 - DNA, 15 bp, Homo sapiens
ccctatcactgatgt

SEQ ID NO: 391145 - DNA, 15 bp, Homo sapiens
tccctatcactgatg

SEQ ID NO: 391146 - DNA, 15 bp, Homo sapiens
ctccctatcactgat

SEQ ID NO: 391147 - DNA, 15 bp, Homo sapiens
tctccctatcactga

SEQ ID NO: 391148 - DNA, 15 bp, Homo sapiens
gtctccctatcactg

SEQ ID NO: 391149 - DNA, 15 bp, Homo sapiens
ggtctccctatcact

SEQ ID NO: 391150 - DNA, 15 bp, Homo sapiens
tggtctccctatcac

SEQ ID NO: 391151 - DNA, 15 bp, Homo sapiens
gtggtctccctatca

SEQ ID NO: 391152 - DNA, 15 bp, Homo sapiens
tgtggtctccctatc

SEQ ID NO: 391153 - DNA, 15 bp, Homo sapiens
gtgtggtctccctat

SEQ ID NO: 391154 - DNA, 15 bp, Homo sapiens
tgtgtggtctcccta

SEQ ID NO: 391155 - DNA, 15 bp, Homo sapiens
ctgtgtggtctccct

SEQ ID NO: 391156 - DNA, 15 bp, Homo sapiens
gctgtgtggtctccc

SEQ ID NO: 391157 - DNA, 15 bp, Homo sapiens
tgctgtgtggtctcc

SEQ ID NO: 391158 - DNA, 15 bp, Homo sapiens
gtgctgtgtggtctc

SEQ ID NO: 391159 - DNA, 15 bp, Homo sapiens
ggtgctgtgtggtct

SEQ ID NO: 391160 - DNA, 15 bp, Homo sapiens
aggtgctgtgtggtc

SEQ ID NO: 391161 - DNA, 15 bp, Homo sapiens
gaggtgctgtgtggt

SEQ ID NO: 391162 - DNA, 15 bp, Homo sapiens
agaggtgctgtgtgg

SEQ ID NO: 391163 - DNA, 15 bp, Homo sapiens
aagaggtgctgtgtg

SEQ ID NO: 391164 - DNA, 15 bp, Homo sapiens
taagaggtgctgtgt

SEQ ID NO: 391165 - DNA, 15 bp, Homo sapiens
ataagaggtgctgtg

SEQ ID NO: 391166 - DNA, 15 bp, Homo sapiens
tataagaggtgctgt

SEQ ID NO: 391167 - DNA, 15 bp, Homo sapiens
ttataagaggtgctg

SEQ ID NO: 391168 - DNA, 15 bp, Homo sapiens
tttataagaggtgct

SEQ ID NO: 391169 - DNA, 15 bp, Homo sapiens
ttttataagaggtgc

SEQ ID NO: 391170 - DNA, 15 bp, Homo sapiens
cttttataagaggtg

SEQ ID NO: 391171 - DNA, 15 bp, Homo sapiens
acttttataagaggt

SEQ ID NO: 391172 - DNA, 15 bp, Homo sapiens
aacttttataagagg

SEQ ID NO: 391173 - DNA, 15 bp, Homo sapiens
taacttttataagag

SEQ ID NO: 391174 - DNA, 15 bp, Homo sapiens
ataacttttataaga

SEQ ID NO: 391175 - DNA, 15 bp, Homo sapiens
aataacttttataag

SEQ ID NO: 391176 - DNA, 15 bp, Homo sapiens
aaataacttttataa

SEQ ID NO: 391177 - DNA, 15 bp, Homo sapiens
taaataacttttata

SEQ ID NO: 391178 - DNA, 15 bp, Homo sapiens
gtaaataacttttat

SEQ ID NO: 391179 - DNA, 15 bp, Homo sapiens
ggtaaataactttta

SEQ ID NO: 391180 - DNA, 15 bp, Homo sapiens
aggtaaataactttt

SEQ ID NO: 391181 - DNA, 15 bp, Homo sapiens
gaggtaaataacttt

SEQ ID NO: 391182 - DNA, 15 bp, Homo sapiens
ggaggtaaataactt

SEQ ID NO: 391183 - DNA, 15 bp, Homo sapiens
aggaggtaaataact

SEQ ID NO: 391184 - DNA, 15 bp, Homo sapiens
aaggaggtaaataac

SEQ ID NO: 391185 - DNA, 15 bp, Homo sapiens
aaaggaggtaaataa

SEQ ID NO: 391186 - DNA, 15 bp, Homo sapiens
aaaaggaggtaaata

SEQ ID NO: 391187 - DNA, 15 bp, Homo sapiens
aaaaaggaggtaaat

SEQ ID NO: 391188 - DNA, 15 bp, Homo sapiens
gaaaaaggaggtaaa

SEQ ID NO: 391189 - DNA, 15 bp, Homo sapiens
ggaaaaaggaggtaa

SEQ ID NO: 391190 - DNA, 15 bp, Homo sapiens
tggaaaaaggaggta

SEQ ID NO: 391191 - DNA, 15 bp, Homo sapiens
ctggaaaaaggaggt

SEQ ID NO: 391192 - DNA, 15 bp, Homo sapiens
gctggaaaaaggagg

SEQ ID NO: 391193 - DNA, 15 bp, Homo sapiens
agctggaaaaaggag

SEQ ID NO: 391194 - DNA, 15 bp, Homo sapiens
cagctggaaaaagga

SEQ ID NO: 391195 - DNA, 15 bp, Homo sapiens
acagctggaaaaagg

SEQ ID NO: 391196 - DNA, 15 bp, Homo sapiens
cacagctggaaaaag

SEQ ID NO: 391197 - DNA, 15 bp, Homo sapiens
ccacagctggaaaaa

SEQ ID NO: 391198 - DNA, 15 bp, Homo sapiens
accacagctggaaaa

SEQ ID NO: 391199 - DNA, 15 bp, Homo sapiens
aaccacagctggaaa

SEQ ID NO: 391200 - DNA, 15 bp, Homo sapiens
taaccacagctggaa

SEQ ID NO: 391201 - DNA, 15 bp, Homo sapiens
gtaaccacagctgga

SEQ ID NO: 391202 - DNA, 15 bp, Homo sapiens
agtaaccacagctgg

SEQ ID NO: 391203 - DNA, 15 bp, Homo sapiens
aagtaaccacagctg

SEQ ID NO: 391204 - DNA, 15 bp, Homo sapiens
caagtaaccacagct

SEQ ID NO: 391205 - DNA, 15 bp, Homo sapiens
tcaagtaaccacagc

SEQ ID NO: 391206 - DNA, 15 bp, Homo sapiens
atcaagtaaccacag

SEQ ID NO: 391207 - DNA, 15 bp, Homo sapiens
aatcaagtaaccaca

SEQ ID NO: 391208 - DNA, 15 bp, Homo sapiens
aaatcaagtaaccac

SEQ ID NO: 391209 - DNA, 15 bp, Homo sapiens
aaaatcaagtaacca

SEQ ID NO: 391210 - DNA, 15 bp, Homo sapiens
taaaatcaagtaacc

SEQ ID NO: 391211 - DNA, 15 bp, Homo sapiens
ctaaaatcaagtaac

SEQ ID NO: 391212 - DNA, 15 bp, Homo sapiens
actaaaatcaagtaa

SEQ ID NO: 391213 - DNA, 15 bp, Homo sapiens
aactaaaatcaagta

SEQ ID NO: 391214 - DNA, 15 bp, Homo sapiens
gaactaaaatcaagt

SEQ ID NO: 391215 - DNA, 15 bp, Homo sapiens
agaactaaaatcaag

SEQ ID NO: 391216 - DNA, 15 bp, Homo sapiens
gagaactaaaatcaa

SEQ ID NO: 391217 - DNA, 15 bp, Homo sapiens
agagaactaaaatca

SEQ ID NO: 391218 - DNA, 15 bp, Homo sapiens
aagagaactaaaatc

SEQ ID NO: 391219 - DNA, 15 bp, Homo sapiens
caagagaactaaaat

SEQ ID NO: 391220 - DNA, 15 bp, Homo sapiens
tcaagagaactaaaa

SEQ ID NO: 391221 - DNA, 15 bp, Homo sapiens
ctcaagagaactaaa

SEQ ID NO: 391222 - DNA, 15 bp, Homo sapiens
cctcaagagaactaa

SEQ ID NO: 391223 - DNA, 15 bp, Homo sapiens
gcctcaagagaacta

SEQ ID NO: 391224 - DNA, 15 bp, Homo sapiens
ggcctcaagagaact

SEQ ID NO: 391225 - DNA, 15 bp, Homo sapiens
tggcctcaagagaac

SEQ ID NO: 391226 - DNA, 15 bp, Homo sapiens
gtggcctcaagagaa

SEQ ID NO: 391227 - DNA, 15 bp, Homo sapiens
agtggcctcaagaga

SEQ ID NO: 391228 - DNA, 15 bp, Homo sapiens
cagtggcctcaagag

SEQ ID NO: 391229 - DNA, 15 bp, Homo sapiens
acagtggcctcaaga

SEQ ID NO: 391230 - DNA, 15 bp, Homo sapiens
tacagtggcctcaag

SEQ ID NO: 391231 - DNA, 15 bp, Homo sapiens
ttacagtggcctcaa

SEQ ID NO: 391232 - DNA, 15 bp, Homo sapiens
cttacagtggcctca

SEQ ID NO: 391233 - DNA, 15 bp, Homo sapiens
tcttacagtggcctc

SEQ ID NO: 391234 - DNA, 15 bp, Homo sapiens
ttcttacagtggcct

SEQ ID NO: 391235 - DNA, 15 bp, Homo sapiens
cttcttacagtggcc

SEQ ID NO: 391236 - DNA, 15 bp, Homo sapiens
ccttcttacagtggc

SEQ ID NO: 391237 - DNA, 15 bp, Homo sapiens
cccttcttacagtgg

SEQ ID NO: 391238 - DNA, 15 bp, Homo sapiens
tcccttcttacagtg

SEQ ID NO: 391239 - DNA, 15 bp, Homo sapiens
ctcccttcttacagt

SEQ ID NO: 391240 - DNA, 15 bp, Homo sapiens
actcccttcttacag

SEQ ID NO: 391241 - DNA, 15 bp, Homo sapiens
cactcccttcttaca

SEQ ID NO: 391242 - DNA, 15 bp, Homo sapiens
ccactcccttcttac

SEQ ID NO: 391243 - DNA, 15 bp, Homo sapiens
gccactcccttctta

SEQ ID NO: 391244 - DNA, 15 bp, Homo sapiens
ggccactcccttctt

SEQ ID NO: 391245 - DNA, 15 bp, Homo sapiens
gggccactcccttct

SEQ ID NO: 391246 - DNA, 15 bp, Homo sapiens
agggccactcccttc

SEQ ID NO: 391247 - DNA, 15 bp, Homo sapiens
tagggccactccctt

SEQ ID NO: 391248 - DNA, 15 bp, Homo sapiens
gtagggccactccct

SEQ ID NO: 391249 - DNA, 15 bp, Homo sapiens
tgtagggccactccc

SEQ ID NO: 391250 - DNA, 15 bp, Homo sapiens
ttgtagggccactcc

SEQ ID NO: 391251 - DNA, 15 bp, Homo sapiens
gttgtagggccactc

SEQ ID NO: 391252 - DNA, 15 bp, Homo sapiens
ggttgtagggccact

SEQ ID NO: 391253 - DNA, 15 bp, Homo sapiens
tggttgtagggccac

SEQ ID NO: 391254 - DNA, 15 bp, Homo sapiens
atggttgtagggcca

SEQ ID NO: 391255 - DNA, 15 bp, Homo sapiens
catggttgtagggcc

SEQ ID NO: 391256 - DNA, 15 bp, Homo sapiens
acatggttgtagggc

SEQ ID NO: 391257 - DNA, 15 bp, Homo sapiens
tacatggttgtaggg

SEQ ID NO: 391258 - DNA, 15 bp, Homo sapiens
ttacatggttgtagg

SEQ ID NO: 391259 - DNA, 15 bp, Homo sapiens
cttacatggttgtag

SEQ ID NO: 391260 - DNA, 15 bp, Homo sapiens
tcttacatggttgta

SEQ ID NO: 391261 - DNA, 15 bp, Homo sapiens
ctcttacatggttgt

SEQ ID NO: 391262 - DNA, 15 bp, Homo sapiens
tctcttacatggttg

SEQ ID NO: 391263 - DNA, 15 bp, Homo sapiens
atctcttacatggtt

SEQ ID NO: 391264 - DNA, 15 bp, Homo sapiens
gatctcttacatggt

SEQ ID NO: 391265 - DNA, 15 bp, Homo sapiens
agatctcttacatgg

SEQ ID NO: 391266 - DNA, 15 bp, Homo sapiens
cagatctcttacatg

SEQ ID NO: 391267 - DNA, 15 bp, Homo sapiens
acagatctcttacat

SEQ ID NO: 391268 - DNA, 15 bp, Homo sapiens
cacagatctcttaca

SEQ ID NO: 391269 - DNA, 15 bp, Homo sapiens
gcacagatctcttac

SEQ ID NO: 391270 - DNA, 15 bp, Homo sapiens
agcacagatctctta

SEQ ID NO: 391271 - DNA, 15 bp, Homo sapiens
aagcacagatctctt

SEQ ID NO: 391272 - DNA, 15 bp, Homo sapiens
aaagcacagatctct

SEQ ID NO: 391273 - DNA, 15 bp, Homo sapiens
caaagcacagatctc

SEQ ID NO: 391274 - DNA, 15 bp, Homo sapiens
gcaaagcacagatct

SEQ ID NO: 391275 - DNA, 15 bp, Homo sapiens
tgcaaagcacagatc

SEQ ID NO: 391276 - DNA, 15 bp, Homo sapiens
ctgcaaagcacagat

SEQ ID NO: 391277 - DNA, 15 bp, Homo sapiens
gctgcaaagcacaga

SEQ ID NO: 391278 - DNA, 15 bp, Homo sapiens
ggctgcaaagcacag

SEQ ID NO: 391279 - DNA, 15 bp, Homo sapiens
tggctgcaaagcaca

SEQ ID NO: 391280 - DNA, 15 bp, Homo sapiens
gtggctgcaaagcac

SEQ ID NO: 391281 - DNA, 15 bp, Homo sapiens
agtggctgcaaagca

SEQ ID NO: 391282 - DNA, 15 bp, Homo sapiens
cagtggctgcaaagc

SEQ ID NO: 391283 - DNA, 15 bp, Homo sapiens
tcagtggctgcaaag

SEQ ID NO: 391284 - DNA, 15 bp, Homo sapiens
ctcagtggctgcaaa

SEQ ID NO: 391285 - DNA, 15 bp, Homo sapiens
tctcagtggctgcaa

SEQ ID NO: 391286 - DNA, 15 bp, Homo sapiens
ttctcagtggctgca

SEQ ID NO: 391287 - DNA, 15 bp, Homo sapiens
gttctcagtggctgc

SEQ ID NO: 391288 - DNA, 15 bp, Homo sapiens
ggttctcagtggctg

SEQ ID NO: 391289 - DNA, 15 bp, Homo sapiens
cggttctcagtggct

SEQ ID NO: 391290 - DNA, 15 bp, Homo sapiens
ccggttctcagtggc

SEQ ID NO: 391291 - DNA, 15 bp, Homo sapiens
cccggttctcagtgg

SEQ ID NO: 391292 - DNA, 15 bp, Homo sapiens
ccccggttctcagtg

SEQ ID NO: 391293 - DNA, 15 bp, Homo sapiens
tccccggttctcagt

SEQ ID NO: 391294 - DNA, 15 bp, Homo sapiens
atccccggttctcag

SEQ ID NO: 391295 - DNA, 15 bp, Homo sapiens
gatccccggttctca

SEQ ID NO: 391296 - DNA, 15 bp, Homo sapiens
ggatccccggttctc

SEQ ID NO: 391297 - DNA, 15 bp, Homo sapiens
aggatccccggttct

SEQ ID NO: 391298 - DNA, 15 bp, Homo sapiens
caggatccccggttc

SEQ ID NO: 391299 - DNA, 15 bp, Homo sapiens
gcaggatccccggtt

SEQ ID NO: 391300 - DNA, 15 bp, Homo sapiens
ggcaggatccccggt

SEQ ID NO: 391301 - DNA, 15 bp, Homo sapiens
tggcaggatccccgg

SEQ ID NO: 391302 - DNA, 15 bp, Homo sapiens
gtggcaggatccccg

SEQ ID NO: 391303 - DNA, 15 bp, Homo sapiens
agtggcaggatcccc

SEQ ID NO: 391304 - DNA, 15 bp, Homo sapiens
tagtggcaggatccc

SEQ ID NO: 391305 - DNA, 15 bp, Homo sapiens
atagtggcaggatcc

SEQ ID NO: 391306 - DNA, 15 bp, Homo sapiens
aatagtggcaggatc

SEQ ID NO: 391307 - DNA, 15 bp, Homo sapiens
caatagtggcaggat

SEQ ID NO: 391308 - DNA, 15 bp, Homo sapiens
gcaatagtggcagga

SEQ ID NO: 391309 - DNA, 15 bp, Homo sapiens
ggcaatagtggcagg

SEQ ID NO: 391310 - DNA, 15 bp, Homo sapiens
tggcaatagtggcag

SEQ ID NO: 391311 - DNA, 15 bp, Homo sapiens
gtggcaatagtggca

SEQ ID NO: 391312 - DNA, 15 bp, Homo sapiens
ggtggcaatagtggc

SEQ ID NO: 391313 - DNA, 15 bp, Homo sapiens
tggtggcaatagtgg

SEQ ID NO: 391314 - DNA, 15 bp, Homo sapiens
atggtggcaatagtg

SEQ ID NO: 391315 - DNA, 15 bp, Homo sapiens
gatggtggcaatagt

SEQ ID NO: 391316 - DNA, 15 bp, Homo sapiens
ggatggtggcaatag

SEQ ID NO: 391317 - DNA, 15 bp, Homo sapiens
aggatggtggcaata

SEQ ID NO: 391318 - DNA, 15 bp, Homo sapiens
aaggatggtggcaat

SEQ ID NO: 391319 - DNA, 15 bp, Homo sapiens
aaaggatggtggcaa

SEQ ID NO: 391320 - DNA, 15 bp, Homo sapiens
aaaaggatggtggca

SEQ ID NO: 391321 - DNA, 15 bp, Homo sapiens
taaaaggatggtggc

SEQ ID NO: 391322 - DNA, 15 bp, Homo sapiens
ttaaaaggatggtgg

SEQ ID NO: 391323 - DNA, 15 bp, Homo sapiens
tttaaaaggatggtg

SEQ ID NO: 391324 - DNA, 15 bp, Homo sapiens
ctttaaaaggatggt

SEQ ID NO: 391325 - DNA, 15 bp, Homo sapiens
gctttaaaaggatgg

SEQ ID NO: 391326 - DNA, 15 bp, Homo sapiens
tgctttaaaaggatg

SEQ ID NO: 391327 - DNA, 15 bp, Homo sapiens
atgctttaaaaggat

SEQ ID NO: 391328 - DNA, 15 bp, Homo sapiens
tatgctttaaaagga

SEQ ID NO: 391329 - DNA, 15 bp, Homo sapiens
ttatgctttaaaagg

SEQ ID NO: 391330 - DNA, 15 bp, Homo sapiens
gttatgctttaaaag

SEQ ID NO: 391331 - DNA, 15 bp, Homo sapiens
tgttatgctttaaaa

SEQ ID NO: 391332 - DNA, 15 bp, Homo sapiens
ttgttatgctttaaa

SEQ ID NO: 391333 - DNA, 15 bp, Homo sapiens
gttgttatgctttaa

SEQ ID NO: 391334 - DNA, 15 bp, Homo sapiens
tgttgttatgcttta

SEQ ID NO: 391335 - DNA, 15 bp, Homo sapiens
ttgttgttatgcttt

SEQ ID NO: 391336 - DNA, 15 bp, Homo sapiens
tttgttgttatgctt

SEQ ID NO: 391337 - DNA, 15 bp, Homo sapiens
gtttgttgttatgct

SEQ ID NO: 391338 - DNA, 15 bp, Homo sapiens
tgtttgttgttatgc

SEQ ID NO: 391339 - DNA, 15 bp, Homo sapiens
ctgtttgttgttatg

SEQ ID NO: 391340 - DNA, 15 bp, Homo sapiens
cctgtttgttgttat

SEQ ID NO: 391341 - DNA, 15 bp, Homo sapiens
acctgtttgttgtta

SEQ ID NO: 391342 - DNA, 15 bp, Homo sapiens
cacctgtttgttgtt

SEQ ID NO: 391343 - DNA, 15 bp, Homo sapiens
acacctgtttgttgt

SEQ ID NO: 391344 - DNA, 15 bp, Homo sapiens
aacacctgtttgttg

SEQ ID NO: 391345 - DNA, 15 bp, Homo sapiens
caacacctgtttgtt

SEQ ID NO: 391346 - DNA, 15 bp, Homo sapiens
acaacacctgtttgt

SEQ ID NO: 391347 - DNA, 15 bp, Homo sapiens
cacaacacctgtttg

SEQ ID NO: 391348 - DNA, 15 bp, Homo sapiens
acacaacacctgttt

SEQ ID NO: 391349 - DNA, 15 bp, Homo sapiens
tacacaacacctgtt

SEQ ID NO: 391350 - DNA, 15 bp, Homo sapiens
atacacaacacctgt

SEQ ID NO: 391351 - DNA, 15 bp, Homo sapiens
gatacacaacacctg

SEQ ID NO: 391352 - DNA, 15 bp, Homo sapiens
ggatacacaacacct

SEQ ID NO: 391353 - DNA, 15 bp, Homo sapiens
tggatacacaacacc

SEQ ID NO: 391354 - DNA, 15 bp, Homo sapiens
ctggatacacaacac

SEQ ID NO: 391355 - DNA, 15 bp, Homo sapiens
tctggatacacaaca

SEQ ID NO: 391356 - DNA, 15 bp, Homo sapiens
ttctggatacacaac

SEQ ID NO: 391357 - DNA, 15 bp, Homo sapiens
tttctggatacacaa

SEQ ID NO: 391358 - DNA, 15 bp, Homo sapiens
ctttctggatacaca

SEQ ID NO: 391359 - DNA, 15 bp, Homo sapiens
tctttctggatacac

SEQ ID NO: 391360 - DNA, 15 bp, Homo sapiens
ctctttctggataca

SEQ ID NO: 391361 - DNA, 15 bp, Homo sapiens
gctctttctggatac

SEQ ID NO: 391362 - DNA, 15 bp, Homo sapiens
ggctctttctggata

SEQ ID NO: 391363 - DNA, 15 bp, Homo sapiens
gggctctttctggat

SEQ ID NO: 391364 - DNA, 15 bp, Homo sapiens
agggctctttctgga

SEQ ID NO: 391365 - DNA, 15 bp, Homo sapiens
aagggctctttctgg

SEQ ID NO: 391366 - DNA, 15 bp, Homo sapiens
taagggctctttctg

SEQ ID NO: 391367 - DNA, 15 bp, Homo sapiens
ataagggctctttct

SEQ ID NO: 391368 - DNA, 15 bp, Homo sapiens
gataagggctctttc

SEQ ID NO: 391369 - DNA, 15 bp, Homo sapiens
agataagggctcttt

SEQ ID NO: 391370 - DNA, 15 bp, Homo sapiens
cagataagggctctt

SEQ ID NO: 391371 - DNA, 15 bp, Homo sapiens
tcagataagggctct

SEQ ID NO: 391372 - DNA, 15 bp, Homo sapiens
ttcagataagggctc

SEQ ID NO: 391373 - DNA, 15 bp, Homo sapiens
cttcagataagggct

SEQ ID NO: 391374 - DNA, 15 bp, Homo sapiens
ccttcagataagggc

SEQ ID NO: 391375 - DNA, 15 bp, Homo sapiens
accttcagataaggg

SEQ ID NO: 391376 - DNA, 15 bp, Homo sapiens
aaccttcagataagg

SEQ ID NO: 391377 - DNA, 15 bp, Homo sapiens
aaaccttcagataag

SEQ ID NO: 391378 - DNA, 15 bp, Homo sapiens
caaaccttcagataa

SEQ ID NO: 391379 - DNA, 15 bp, Homo sapiens
ccaaaccttcagata

SEQ ID NO: 391380 - DNA, 15 bp, Homo sapiens
tccaaaccttcagat

SEQ ID NO: 391381 - DNA, 15 bp, Homo sapiens
ctccaaaccttcaga

SEQ ID NO: 391382 - DNA, 15 bp, Homo sapiens
actccaaaccttcag

SEQ ID NO: 391383 - DNA, 15 bp, Homo sapiens
aactccaaaccttca

SEQ ID NO: 391384 - DNA, 15 bp, Homo sapiens
aaactccaaaccttc

SEQ ID NO: 391385 - DNA, 15 bp, Homo sapiens
caaactccaaacctt

SEQ ID NO: 391386 - DNA, 15 bp, Homo sapiens
ccaaactccaaacct

SEQ ID NO: 391387 - DNA, 15 bp, Homo sapiens
accaaactccaaacc

SEQ ID NO: 391388 - DNA, 15 bp, Homo sapiens
aaccaaactccaaac

SEQ ID NO: 391389 - DNA, 15 bp, Homo sapiens
taaccaaactccaaa

SEQ ID NO: 391390 - DNA, 15 bp, Homo sapiens
ttaaccaaactccaa

SEQ ID NO: 391391 - DNA, 15 bp, Homo sapiens
cttaaccaaactcca

SEQ ID NO: 391392 - DNA, 15 bp, Homo sapiens
gcttaaccaaactcc

SEQ ID NO: 391393 - DNA, 15 bp, Homo sapiens
tgcttaaccaaactc

SEQ ID NO: 391394 - DNA, 15 bp, Homo sapiens
ctgcttaaccaaact

SEQ ID NO: 391395 - DNA, 15 bp, Homo sapiens
tctgcttaaccaaac

SEQ ID NO: 391396 - DNA, 15 bp, Homo sapiens
atctgcttaaccaaa

SEQ ID NO: 391397 - DNA, 15 bp, Homo sapiens
gatctgcttaaccaa

SEQ ID NO: 391398 - DNA, 15 bp, Homo sapiens
agatctgcttaacca

SEQ ID NO: 391399 - DNA, 15 bp, Homo sapiens
aagatctgcttaacc

SEQ ID NO: 391400 - DNA, 15 bp, Homo sapiens
aaagatctgcttaac

SEQ ID NO: 391401 - DNA, 15 bp, Homo sapiens
aaaagatctgcttaa

SEQ ID NO: 391402 - DNA, 15 bp, Homo sapiens
taaaagatctgctta

SEQ ID NO: 391403 - DNA, 15 bp, Homo sapiens
ataaaagatctgctt

SEQ ID NO: 391404 - DNA, 15 bp, Homo sapiens
aataaaagatctgct

SEQ ID NO: 391405 - DNA, 15 bp, Homo sapiens
taataaaagatctgc

SEQ ID NO: 391406 - DNA, 15 bp, Homo sapiens
ataataaaagatctg

SEQ ID NO: 391407 - DNA, 15 bp, Homo sapiens
cataataaaagatct

SEQ ID NO: 391408 - DNA, 15 bp, Homo sapiens
acataataaaagatc

SEQ ID NO: 391409 - DNA, 15 bp, Homo sapiens
aacataataaaagat

SEQ ID NO: 391410 - DNA, 15 bp, Homo sapiens
aaacataataaaaga

SEQ ID NO: 391411 - DNA, 15 bp, Homo sapiens
aaaacataataaaag

SEQ ID NO: 391412 - DNA, 15 bp, Homo sapiens
taaaacataataaaa

SEQ ID NO: 391413 - DNA, 15 bp, Homo sapiens
gtaaaacataataaa

SEQ ID NO: 391414 - DNA, 15 bp, Homo sapiens
agtaaaacataataa

SEQ ID NO: 391415 - DNA, 15 bp, Homo sapiens
gagtaaaacataata

SEQ ID NO: 391416 - DNA, 15 bp, Homo sapiens
tgagtaaaacataat

SEQ ID NO: 391417 - DNA, 15 bp, Homo sapiens
atgagtaaaacataa

SEQ ID NO: 391418 - DNA, 15 bp, Homo sapiens
catgagtaaaacata

SEQ ID NO: 391419 - DNA, 15 bp, Homo sapiens
gcatgagtaaaacat

SEQ ID NO: 391420 - DNA, 15 bp, Homo sapiens
cgcatgagtaaaaca

SEQ ID NO: 391421 - DNA, 15 bp, Homo sapiens
acgcatgagtaaaac

SEQ ID NO: 391422 - DNA, 15 bp, Homo sapiens
aacgcatgagtaaaa

SEQ ID NO: 391423 - DNA, 15 bp, Homo sapiens
aaacgcatgagtaaa

SEQ ID NO: 391424 - DNA, 15 bp, Homo sapiens
caaacgcatgagtaa

SEQ ID NO: 391425 - DNA, 15 bp, Homo sapiens
ccaaacgcatgagta

SEQ ID NO: 391426 - DNA, 15 bp, Homo sapiens
accaaacgcatgagt

SEQ ID NO: 391427 - DNA, 15 bp, Homo sapiens
gaccaaacgcatgag

SEQ ID NO: 391428 - DNA, 15 bp, Homo sapiens
tgaccaaacgcatga

SEQ ID NO: 391429 - DNA, 15 bp, Homo sapiens
atgaccaaacgcatg

SEQ ID NO: 391430 - DNA, 15 bp, Homo sapiens
tatgaccaaacgcat

SEQ ID NO: 391431 - DNA, 15 bp, Homo sapiens
ttatgaccaaacgca

SEQ ID NO: 391432 - DNA, 15 bp, Homo sapiens
attatgaccaaacgc

SEQ ID NO: 391433 - DNA, 15 bp, Homo sapiens
aattatgaccaaacg

SEQ ID NO: 391434 - DNA, 15 bp, Homo sapiens
taattatgaccaaac

SEQ ID NO: 391435 - DNA, 15 bp, Homo sapiens
ataattatgaccaaa

SEQ ID NO: 391436 - DNA, 15 bp, Homo sapiens
cataattatgaccaa

SEQ ID NO: 391437 - DNA, 15 bp, Homo sapiens
gcataattatgacca

SEQ ID NO: 391438 - DNA, 15 bp, Homo sapiens
agcataattatgacc

SEQ ID NO: 391439 - DNA, 15 bp, Homo sapiens
aagcataattatgac

SEQ ID NO: 391440 - DNA, 15 bp, Homo sapiens
aaagcataattatga

SEQ ID NO: 391441 - DNA, 15 bp, Homo sapiens
aaaagcataattatg

SEQ ID NO: 391442 - DNA, 15 bp, Homo sapiens
caaaagcataattat

SEQ ID NO: 391443 - DNA, 15 bp, Homo sapiens
acaaaagcataatta

SEQ ID NO: 391444 - DNA, 15 bp, Homo sapiens
cacaaaagcataatt

SEQ ID NO: 391445 - DNA, 15 bp, Homo sapiens
gcacaaaagcataat

SEQ ID NO: 391446 - DNA, 15 bp, Homo sapiens
agcacaaaagcataa

SEQ ID NO: 391447 - DNA, 15 bp, Homo sapiens
gagcacaaaagcata

SEQ ID NO: 391448 - DNA, 15 bp, Homo sapiens
tgagcacaaaagcat

SEQ ID NO: 391449 - DNA, 15 bp, Homo sapiens
ttgagcacaaaagca

SEQ ID NO: 391450 - DNA, 15 bp, Homo sapiens
attgagcacaaaagc

SEQ ID NO: 391451 - DNA, 15 bp, Homo sapiens
tattgagcacaaaag

SEQ ID NO: 391452 - DNA, 15 bp, Homo sapiens
ttattgagcacaaaa

SEQ ID NO: 391453 - DNA, 15 bp, Homo sapiens
cttattgagcacaaa

SEQ ID NO: 391454 - DNA, 15 bp, Homo sapiens
ccttattgagcacaa

SEQ ID NO: 391455 - DNA, 15 bp, Homo sapiens
tccttattgagcaca

SEQ ID NO: 391456 - DNA, 15 bp, Homo sapiens
atccttattgagcac

SEQ ID NO: 391457 - DNA, 15 bp, Homo sapiens
catccttattgagca

SEQ ID NO: 391458 - DNA, 15 bp, Homo sapiens
tcatccttattgagc

SEQ ID NO: 391459 - DNA, 15 bp, Homo sapiens
atcatccttattgag

SEQ ID NO: 391460 - DNA, 15 bp, Homo sapiens
aatcatccttattga

SEQ ID NO: 391461 - DNA, 15 bp, Homo sapiens
caatcatccttattg

SEQ ID NO: 391462 - DNA, 15 bp, Homo sapiens
acaatcatccttatt

SEQ ID NO: 391463 - DNA, 15 bp, Homo sapiens
aacaatcatccttat

SEQ ID NO: 391464 - DNA, 15 bp, Homo sapiens
taacaatcatcctta

SEQ ID NO: 391465 - DNA, 15 bp, Homo sapiens
ataacaatcatcctt

SEQ ID NO: 391466 - DNA, 15 bp, Homo sapiens
gataacaatcatcct

SEQ ID NO: 391467 - DNA, 15 bp, Homo sapiens
agataacaatcatcc

SEQ ID NO: 391468 - DNA, 15 bp, Homo sapiens
cagataacaatcatc

SEQ ID NO: 391469 - DNA, 15 bp, Homo sapiens
acagataacaatcat

SEQ ID NO: 391470 - DNA, 15 bp, Homo sapiens
cacagataacaatca

SEQ ID NO: 391471 - DNA, 15 bp, Homo sapiens
tcacagataacaatc

SEQ ID NO: 391472 - DNA, 15 bp, Homo sapiens
ttcacagataacaat

SEQ ID NO: 391473 - DNA, 15 bp, Homo sapiens
tttcacagataacaa

SEQ ID NO: 391474 - DNA, 15 bp, Homo sapiens
ctttcacagataaca

SEQ ID NO: 391475 - DNA, 15 bp, Homo sapiens
actttcacagataac

SEQ ID NO: 391476 - DNA, 15 bp, Homo sapiens
tactttcacagataa

SEQ ID NO: 391477 - DNA, 15 bp, Homo sapiens
ttactttcacagata

SEQ ID NO: 391478 - DNA, 15 bp, Homo sapiens
gttactttcacagat

SEQ ID NO: 391479 - DNA, 15 bp, Homo sapiens
agttactttcacaga

SEQ ID NO: 391480 - DNA, 15 bp, Homo sapiens
cagttactttcacag

SEQ ID NO: 391481 - DNA, 15 bp, Homo sapiens
tcagttactttcaca

SEQ ID NO: 391482 - DNA, 15 bp, Homo sapiens
gtcagttactttcac

SEQ ID NO: 391483 - DNA, 15 bp, Homo sapiens
tgtcagttactttca

SEQ ID NO: 391484 - DNA, 15 bp, Homo sapiens
ttgtcagttactttc

SEQ ID NO: 391485 - DNA, 15 bp, Homo sapiens
attgtcagttacttt

SEQ ID NO: 391486 - DNA, 15 bp, Homo sapiens
aattgtcagttactt

SEQ ID NO: 391487 - DNA, 15 bp, Homo sapiens
aaattgtcagttact

SEQ ID NO: 391488 - DNA, 15 bp, Homo sapiens
gaaattgtcagttac

SEQ ID NO: 391489 - DNA, 15 bp, Homo sapiens
agaaattgtcagtta

SEQ ID NO: 391490 - DNA, 15 bp, Homo sapiens
gagaaattgtcagtt

SEQ ID NO: 391491 - DNA, 15 bp, Homo sapiens
tgagaaattgtcagt

SEQ ID NO: 391492 - DNA, 15 bp, Homo sapiens
ctgagaaattgtcag

SEQ ID NO: 391493 - DNA, 15 bp, Homo sapiens
gttctgagaaattgt

SEQ ID NO: 391494 - DNA, 15 bp, Homo sapiens
ggttctgagaaattg

SEQ ID NO: 391495 - DNA, 15 bp, Homo sapiens
tggttctgagaaatt

SEQ ID NO: 391496 - DNA, 15 bp, Homo sapiens
atggttctgagaaat

SEQ ID NO: 391497 - DNA, 15 bp, Homo sapiens
aatggttctgagaaa

SEQ ID NO: 391498 - DNA, 15 bp, Homo sapiens
caatggttctgagaa

SEQ ID NO: 391499 - DNA, 15 bp, Homo sapiens
gcaatggttctgaga

SEQ ID NO: 391500 - DNA, 15 bp, Homo sapiens
ggcaatggttctgag

SEQ ID NO: 391501 - DNA, 15 bp, Homo sapiens
aggcaatggttctga

SEQ ID NO: 391502 - DNA, 15 bp, Homo sapiens
aaggcaatggttctg

SEQ ID NO: 391503 - DNA, 15 bp, Homo sapiens
caaggcaatggttct

SEQ ID NO: 391504 - DNA, 15 bp, Homo sapiens
ccaaggcaatggttc

SEQ ID NO: 391505 - DNA, 15 bp, Homo sapiens
accaaggcaatggtt

SEQ ID NO: 391506 - DNA, 15 bp, Homo sapiens
aaccaaggcaatggt

SEQ ID NO: 391507 - DNA, 15 bp, Homo sapiens
gaaccaaggcaatgg

SEQ ID NO: 391508 - DNA, 15 bp, Homo sapiens
agaaccaaggcaatg

SEQ ID NO: 391509 - DNA, 15 bp, Homo sapiens
tagaaccaaggcaat

SEQ ID NO: 391510 - DNA, 15 bp, Homo sapiens
ctagaaccaaggcaa

SEQ ID NO: 391511 - DNA, 15 bp, Homo sapiens
cctagaaccaaggca

SEQ ID NO: 391512 - DNA, 15 bp, Homo sapiens
acctagaaccaaggc

SEQ ID NO: 391513 - DNA, 15 bp, Homo sapiens
aacctagaaccaagg

SEQ ID NO: 391514 - DNA, 15 bp, Homo sapiens
gaacctagaaccaag

SEQ ID NO: 391515 - DNA, 15 bp, Homo sapiens
agaacctagaaccaa

SEQ ID NO: 391516 - DNA, 15 bp, Homo sapiens
tagaacctagaacca

SEQ ID NO: 391517 - DNA, 15 bp, Homo sapiens
ctagaacctagaacc

SEQ ID NO: 391518 - DNA, 15 bp, Homo sapiens
cctagaacctagaac

SEQ ID NO: 391519 - DNA, 15 bp, Homo sapiens
acctagaacctagaa

SEQ ID NO: 391520 - DNA, 15 bp, Homo sapiens
tacctagaacctaga

SEQ ID NO: 391521 - DNA, 15 bp, Homo sapiens
ctacctagaacctag

SEQ ID NO: 391522 - DNA, 15 bp, Homo sapiens
gctacctagaaccta

SEQ ID NO: 391523 - DNA, 15 bp, Homo sapiens
agctacctagaacct

SEQ ID NO: 391524 - DNA, 15 bp, Homo sapiens
tagctacctagaacc

SEQ ID NO: 391525 - DNA, 15 bp, Homo sapiens
ctagctacctagaac

SEQ ID NO: 391526 - DNA, 15 bp, Homo sapiens
actagctacctagaa

SEQ ID NO: 391527 - DNA, 15 bp, Homo sapiens
tactagctacctaga

SEQ ID NO: 391528 - DNA, 15 bp, Homo sapiens
ttactagctacctag

SEQ ID NO: 391529 - DNA, 15 bp, Homo sapiens
gttactagctaccta

SEQ ID NO: 391530 - DNA, 15 bp, Homo sapiens
agttactagctacct

SEQ ID NO: 391531 - DNA, 15 bp, Homo sapiens
tagttactagctacc

SEQ ID NO: 391532 - DNA, 15 bp, Homo sapiens
ctagttactagctac

SEQ ID NO: 391533 - DNA, 15 bp, Homo sapiens
actagttactagcta

SEQ ID NO: 391534 - DNA, 15 bp, Homo sapiens
gactagttactagct

SEQ ID NO: 391535 - DNA, 15 bp, Homo sapiens
agactagttactagc

SEQ ID NO: 391536 - DNA, 15 bp, Homo sapiens
cagactagttactag

SEQ ID NO: 391537 - DNA, 15 bp, Homo sapiens
ccagactagttacta

SEQ ID NO: 391538 - DNA, 15 bp, Homo sapiens
accagactagttact

SEQ ID NO: 391539 - DNA, 15 bp, Homo sapiens
aaccagactagttac

SEQ ID NO: 391540 - DNA, 15 bp, Homo sapiens
taaccagactagtta

SEQ ID NO: 391541 - DNA, 15 bp, Homo sapiens
ctaaccagactagtt

SEQ ID NO: 391542 - DNA, 15 bp, Homo sapiens
actaaccagactagt

SEQ ID NO: 391543 - DNA, 15 bp, Homo sapiens
cactaaccagactag

SEQ ID NO: 391544 - DNA, 15 bp, Homo sapiens
gcactaaccagacta

SEQ ID NO: 391545 - DNA, 15 bp, Homo sapiens
ggcactaaccagact

SEQ ID NO: 391546 - DNA, 15 bp, Homo sapiens
tggcactaaccagac

SEQ ID NO: 391547 - DNA, 15 bp, Homo sapiens
atggcactaaccaga

SEQ ID NO: 391548 - DNA, 15 bp, Homo sapiens
catggcactaaccag

SEQ ID NO: 391549 - DNA, 15 bp, Homo sapiens
ccatggcactaacca

SEQ ID NO: 391550 - DNA, 15 bp, Homo sapiens
tccatggcactaacc

SEQ ID NO: 391551 - DNA, 15 bp, Homo sapiens
ctccatggcactaac

SEQ ID NO: 391552 - DNA, 15 bp, Homo sapiens
tctccatggcactaa

SEQ ID NO: 391553 - DNA, 15 bp, Homo sapiens
ttctccatggcacta

SEQ ID NO: 391554 - DNA, 15 bp, Homo sapiens
attctccatggcact

SEQ ID NO: 391555 - DNA, 15 bp, Homo sapiens
cattctccatggcac

SEQ ID NO: 391556 - DNA, 15 bp, Homo sapiens
acattctccatggca

SEQ ID NO: 391557 - DNA, 15 bp, Homo sapiens
cacattctccatggc

SEQ ID NO: 391558 - DNA, 15 bp, Homo sapiens
ccacattctccatgg

SEQ ID NO: 391559 - DNA, 15 bp, Homo sapiens
tccacattctccatg

SEQ ID NO: 391560 - DNA, 15 bp, Homo sapiens
ctccacattctccat

SEQ ID NO: 391561 - DNA, 15 bp, Homo sapiens
gctccacattctcca

SEQ ID NO: 391562 - DNA, 15 bp, Homo sapiens
tgctccacattctcc

SEQ ID NO: 391563 - DNA, 15 bp, Homo sapiens
gtgctccacattctc

SEQ ID NO: 391564 - DNA, 15 bp, Homo sapiens
agtgctccacattct

SEQ ID NO: 391565 - DNA, 15 bp, Homo sapiens
cagtgctccacattc

SEQ ID NO: 391566 - DNA, 15 bp, Homo sapiens
ccagtgctccacatt

SEQ ID NO: 391567 - DNA, 15 bp, Homo sapiens
accagtgctccacat

SEQ ID NO: 391568 - DNA, 15 bp, Homo sapiens
gaccagtgctccaca

SEQ ID NO: 391569 - DNA, 15 bp, Homo sapiens
agaccagtgctccac

SEQ ID NO: 391570 - DNA, 15 bp, Homo sapiens
cagaccagtgctcca

SEQ ID NO: 391571 - DNA, 15 bp, Homo sapiens
ccagaccagtgctcc

SEQ ID NO: 391572 - DNA, 15 bp, Homo sapiens
cccagaccagtgctc

SEQ ID NO: 391573 - DNA, 15 bp, Homo sapiens
acccagaccagtgct

SEQ ID NO: 391574 - DNA, 15 bp, Homo sapiens
gacccagaccagtgc

SEQ ID NO: 391575 - DNA, 15 bp, Homo sapiens
tgacccagaccagtg

SEQ ID NO: 391576 - DNA, 15 bp, Homo sapiens
atgacccagaccagt

SEQ ID NO: 391577 - DNA, 15 bp, Homo sapiens
catgacccagaccag

SEQ ID NO: 391578 - DNA, 15 bp, Homo sapiens
tcatgacccagacca

SEQ ID NO: 391579 - DNA, 15 bp, Homo sapiens
atcatgacccagacc

SEQ ID NO: 391580 - DNA, 15 bp, Homo sapiens
tatcatgacccagac

SEQ ID NO: 391581 - DNA, 15 bp, Homo sapiens
atatcatgacccaga

SEQ ID NO: 391582 - DNA, 15 bp, Homo sapiens
aatatcatgacccag

SEQ ID NO: 391583 - DNA, 15 bp, Homo sapiens
caatatcatgaccca

SEQ ID NO: 391584 - DNA, 15 bp, Homo sapiens
tcaatatcatgaccc

SEQ ID NO: 391585 - DNA, 15 bp, Homo sapiens
ctcaatatcatgacc

SEQ ID NO: 391586 - DNA, 15 bp, Homo sapiens
actcaatatcatgac

SEQ ID NO: 391587 - DNA, 15 bp, Homo sapiens
aactcaatatcatga

SEQ ID NO: 391588 - DNA, 15 bp, Homo sapiens
caactcaatatcatg

SEQ ID NO: 391589 - DNA, 15 bp, Homo sapiens
tcaactcaatatcat

SEQ ID NO: 391590 - DNA, 15 bp, Homo sapiens
ctcaactcaatatca

SEQ ID NO: 391591 - DNA, 15 bp, Homo sapiens
actcaactcaatatc

SEQ ID NO: 391592 - DNA, 15 bp, Homo sapiens
tactcaactcaatat

SEQ ID NO: 391593 - DNA, 15 bp, Homo sapiens
ctactcaactcaata

SEQ ID NO: 391594 - DNA, 15 bp, Homo sapiens
gctactcaactcaat

SEQ ID NO: 391595 - DNA, 15 bp, Homo sapiens
agctactcaactcaa

SEQ ID NO: 391596 - DNA, 15 bp, Homo sapiens
cagctactcaactca

SEQ ID NO: 391597 - DNA, 15 bp, Homo sapiens
tcagctactcaactc

SEQ ID NO: 391598 - DNA, 15 bp, Homo sapiens
ttcagctactcaact

SEQ ID NO: 391599 - DNA, 15 bp, Homo sapiens
attcagctactcaac

SEQ ID NO: 391600 - DNA, 15 bp, Homo sapiens
aattcagctactcaa

SEQ ID NO: 391601 - DNA, 15 bp, Homo sapiens
gaattcagctactca

SEQ ID NO: 391602 - DNA, 15 bp, Homo sapiens
agaattcagctactc

SEQ ID NO: 391603 - DNA, 15 bp, Homo sapiens
gagaattcagctact

SEQ ID NO: 391604 - DNA, 15 bp, Homo sapiens
agagaattcagctac

SEQ ID NO: 391605 - DNA, 15 bp, Homo sapiens
gagagaattcagcta

SEQ ID NO: 391606 - DNA, 15 bp, Homo sapiens
ggagagaattcagct

SEQ ID NO: 391607 - DNA, 15 bp, Homo sapiens
aggagagaattcagc

SEQ ID NO: 391608 - DNA, 15 bp, Homo sapiens
gaggagagaattcag

SEQ ID NO: 391609 - DNA, 15 bp, Homo sapiens
tgaggagagaattca

SEQ ID NO: 391610 - DNA, 15 bp, Homo sapiens
gtgaggagagaattc

SEQ ID NO: 391611 - DNA, 15 bp, Homo sapiens
agtgaggagagaatt

SEQ ID NO: 391612 - DNA, 15 bp, Homo sapiens
aagtgaggagagaat

SEQ ID NO: 391613 - DNA, 15 bp, Homo sapiens
gaagtgaggagagaa

SEQ ID NO: 391614 - DNA, 15 bp, Homo sapiens
tgaagtgaggagaga

SEQ ID NO: 391615 - DNA, 15 bp, Homo sapiens
atgaagtgaggagag

SEQ ID NO: 391616 - DNA, 15 bp, Homo sapiens
tatgaagtgaggaga

SEQ ID NO: 391617 - DNA, 15 bp, Homo sapiens
ctatgaagtgaggag

SEQ ID NO: 391618 - DNA, 15 bp, Homo sapiens
cctatgaagtgagga

SEQ ID NO: 391619 - DNA, 15 bp, Homo sapiens
ccctatgaagtgagg

SEQ ID NO: 391620 - DNA, 15 bp, Homo sapiens
accctatgaagtgag

SEQ ID NO: 391621 - DNA, 15 bp, Homo sapiens
taccctatgaagtga

SEQ ID NO: 391622 - DNA, 15 bp, Homo sapiens
ctaccctatgaagtg

SEQ ID NO: 391623 - DNA, 15 bp, Homo sapiens
actaccctatgaagt

SEQ ID NO: 391624 - DNA, 15 bp, Homo sapiens
aactaccctatgaag

SEQ ID NO: 391625 - DNA, 15 bp, Homo sapiens
gaactaccctatgaa

SEQ ID NO: 391626 - DNA, 15 bp, Homo sapiens
agaactaccctatga

SEQ ID NO: 391627 - DNA, 15 bp, Homo sapiens
aagaactaccctatg

SEQ ID NO: 391628 - DNA, 15 bp, Homo sapiens
aaagaactaccctat

SEQ ID NO: 391629 - DNA, 15 bp, Homo sapiens
aaaagaactacccta

SEQ ID NO: 391630 - DNA, 15 bp, Homo sapiens
taaaagaactaccct

SEQ ID NO: 391631 - DNA, 15 bp, Homo sapiens
ataaaagaactaccc

SEQ ID NO: 391632 - DNA, 15 bp, Homo sapiens
gataaaagaactacc

SEQ ID NO: 391633 - DNA, 15 bp, Homo sapiens
agataaaagaactac

SEQ ID NO: 391634 - DNA, 15 bp, Homo sapiens
cagataaaagaacta

SEQ ID NO: 391635 - DNA, 15 bp, Homo sapiens
ccagataaaagaact

SEQ ID NO: 391636 - DNA, 15 bp, Homo sapiens
accagataaaagaac

SEQ ID NO: 391637 - DNA, 15 bp, Homo sapiens
aaccagataaaagaa

SEQ ID NO: 391638 - DNA, 15 bp, Homo sapiens
taaccagataaaaga

SEQ ID NO: 391639 - DNA, 15 bp, Homo sapiens
ctaaccagataaaag

SEQ ID NO: 391640 - DNA, 15 bp, Homo sapiens
actaaccagataaaa

SEQ ID NO: 391641 - DNA, 15 bp, Homo sapiens
cactaaccagataaa

SEQ ID NO: 391642 - DNA, 15 bp, Homo sapiens
gcactaaccagataa

SEQ ID NO: 391643 - DNA, 15 bp, Homo sapiens
agcactaaccagata

SEQ ID NO: 391644 - DNA, 15 bp, Homo sapiens
tagcactaaccagat

SEQ ID NO: 391645 - DNA, 15 bp, Homo sapiens
ctagcactaaccaga

SEQ ID NO: 391646 - DNA, 15 bp, Homo sapiens
tctagcactaaccag

SEQ ID NO: 391647 - DNA, 15 bp, Homo sapiens
atctagcactaacca

SEQ ID NO: 391648 - DNA, 15 bp, Homo sapiens
catctagcactaacc

SEQ ID NO: 391649 - DNA, 15 bp, Homo sapiens
gcatctagcactaac

SEQ ID NO: 391650 - DNA, 15 bp, Homo sapiens
agcatctagcactaa

SEQ ID NO: 391651 - DNA, 15 bp, Homo sapiens
gagcatctagcacta

SEQ ID NO: 391652 - DNA, 15 bp, Homo sapiens
tgagcatctagcact

SEQ ID NO: 391653 - DNA, 15 bp, Homo sapiens
atgagcatctagcac

SEQ ID NO: 391654 - DNA, 15 bp, Homo sapiens
gatgagcatctagca

SEQ ID NO: 391655 - DNA, 15 bp, Homo sapiens
agatgagcatctagc

SEQ ID NO: 391656 - DNA, 15 bp, Homo sapiens
cagatgagcatctag

SEQ ID NO: 391657 - DNA, 15 bp, Homo sapiens
acagatgagcatcta

SEQ ID NO: 391658 - DNA, 15 bp, Homo sapiens
gacagatgagcatct

SEQ ID NO: 391659 - DNA, 15 bp, Homo sapiens
agacagatgagcatc

SEQ ID NO: 391660 - DNA, 15 bp, Homo sapiens
aagacagatgagcat

SEQ ID NO: 391661 - DNA, 15 bp, Homo sapiens
taagacagatgagca

SEQ ID NO: 391662 - DNA, 15 bp, Homo sapiens
ctaagacagatgagc

SEQ ID NO: 391663 - DNA, 15 bp, Homo sapiens
gctaagacagatgag

SEQ ID NO: 391664 - DNA, 15 bp, Homo sapiens
agctaagacagatga

SEQ ID NO: 391665 - DNA, 15 bp, Homo sapiens
aagctaagacagatg

SEQ ID NO: 391666 - DNA, 15 bp, Homo sapiens
taagctaagacagat

SEQ ID NO: 391667 - DNA, 15 bp, Homo sapiens
gtaagctaagacaga

SEQ ID NO: 391668 - DNA, 15 bp, Homo sapiens
agtaagctaagacag

SEQ ID NO: 391669 - DNA, 15 bp, Homo sapiens
aagtaagctaagaca

SEQ ID NO: 391670 - DNA, 15 bp, Homo sapiens
taagtaagctaagac

SEQ ID NO: 391671 - DNA, 15 bp, Homo sapiens
ttaagtaagctaaga

SEQ ID NO: 391672 - DNA, 15 bp, Homo sapiens
tttaagtaagctaag

SEQ ID NO: 391673 - DNA, 15 bp, Homo sapiens
atttaagtaagctaa

SEQ ID NO: 391674 - DNA, 15 bp, Homo sapiens
aatttaagtaagcta

SEQ ID NO: 391675 - DNA, 15 bp, Homo sapiens
aaatttaagtaagct

SEQ ID NO: 391676 - DNA, 15 bp, Homo sapiens
aaaatttaagtaagc

SEQ ID NO: 391677 - DNA, 15 bp, Homo sapiens
caaaatttaagtaag

SEQ ID NO: 391678 - DNA, 15 bp, Homo sapiens
tcaaaatttaagtaa

SEQ ID NO: 391679 - DNA, 15 bp, Homo sapiens
ctcaaaatttaagta

SEQ ID NO: 391680 - DNA, 15 bp, Homo sapiens
cctcaaaatttaagt

SEQ ID NO: 391681 - DNA, 15 bp, Homo sapiens
acctcaaaatttaag

SEQ ID NO: 391682 - DNA, 15 bp, Homo sapiens
gacctcaaaatttaa

SEQ ID NO: 391683 - DNA, 15 bp, Homo sapiens
agacctcaaaattta

SEQ ID NO: 391684 - DNA, 15 bp, Homo sapiens
aagacctcaaaattt

SEQ ID NO: 391685 - DNA, 15 bp, Homo sapiens
caagacctcaaaatt

SEQ ID NO: 391686 - DNA, 15 bp, Homo sapiens
ccaagacctcaaaat

SEQ ID NO: 391687 - DNA, 15 bp, Homo sapiens
cccaagacctcaaaa

SEQ ID NO: 391688 - DNA, 15 bp, Homo sapiens
tcccaagacctcaaa

SEQ ID NO: 391689 - DNA, 15 bp, Homo sapiens
ctcccaagacctcaa

SEQ ID NO: 391690 - DNA, 15 bp, Homo sapiens
actcccaagacctca

SEQ ID NO: 391691 - DNA, 15 bp, Homo sapiens
tactcccaagacctc

SEQ ID NO: 391692 - DNA, 15 bp, Homo sapiens
ctactcccaagacct

SEQ ID NO: 391693 - DNA, 15 bp, Homo sapiens
tctactcccaagacc

SEQ ID NO: 391694 - DNA, 15 bp, Homo sapiens
ctctactcccaagac

SEQ ID NO: 391695 - DNA, 15 bp, Homo sapiens
gctctactcccaaga

SEQ ID NO: 391696 - DNA, 15 bp, Homo sapiens
ggctctactcccaag

SEQ ID NO: 391697 - DNA, 15 bp, Homo sapiens
gggctctactcccaa

SEQ ID NO: 391698 - DNA, 15 bp, Homo sapiens
tgggctctactccca

SEQ ID NO: 391699 - DNA, 15 bp, Homo sapiens
ctgggctctactccc

SEQ ID NO: 391700 - DNA, 15 bp, Homo sapiens
actgggctctactcc

SEQ ID NO: 391701 - DNA, 15 bp, Homo sapiens
tactgggctctactc

SEQ ID NO: 391702 - DNA, 15 bp, Homo sapiens
ttactgggctctact

SEQ ID NO: 391703 - DNA, 15 bp, Homo sapiens
attactgggctctac

SEQ ID NO: 391704 - DNA, 15 bp, Homo sapiens
cattactgggctcta

SEQ ID NO: 391705 - DNA, 15 bp, Homo sapiens
ccattactgggctct

SEQ ID NO: 391706 - DNA, 15 bp, Homo sapiens
cccattactgggctc

SEQ ID NO: 391707 - DNA, 15 bp, Homo sapiens
tcccattactgggct

SEQ ID NO: 391708 - DNA, 15 bp, Homo sapiens
ctcccattactgggc

SEQ ID NO: 391709 - DNA, 15 bp, Homo sapiens
cctcccattactggg

SEQ ID NO: 391710 - DNA, 15 bp, Homo sapiens
tcctcccattactgg

SEQ ID NO: 391711 - DNA, 15 bp, Homo sapiens
ctcctcccattactg

SEQ ID NO: 391712 - DNA, 15 bp, Homo sapiens
gctcctcccattact

SEQ ID NO: 391713 - DNA, 15 bp, Homo sapiens
agctcctcccattac

SEQ ID NO: 391714 - DNA, 15 bp, Homo sapiens
cagctcctcccatta

SEQ ID NO: 391715 - DNA, 15 bp, Homo sapiens
ccagctcctcccatt

SEQ ID NO: 391716 - DNA, 15 bp, Homo sapiens
cccagctcctcccat

SEQ ID NO: 391717 - DNA, 15 bp, Homo sapiens
gcccagctcctccca

SEQ ID NO: 391718 - DNA, 15 bp, Homo sapiens
tgcccagctcctccc

SEQ ID NO: 391719 - DNA, 15 bp, Homo sapiens
atgcccagctcctcc

SEQ ID NO: 391720 - DNA, 15 bp, Homo sapiens
tatgcccagctcctc

SEQ ID NO: 391721 - DNA, 15 bp, Homo sapiens
gtatgcccagctcct

SEQ ID NO: 391722 - DNA, 15 bp, Homo sapiens
cgtatgcccagctcc

SEQ ID NO: 391723 - DNA, 15 bp, Homo sapiens
gcgtatgcccagctc

SEQ ID NO: 391724 - DNA, 15 bp, Homo sapiens
agcgtatgcccagct

SEQ ID NO: 391725 - DNA, 15 bp, Homo sapiens
gagcgtatgcccagc

SEQ ID NO: 391726 - DNA, 15 bp, Homo sapiens
agagcgtatgcccag

SEQ ID NO: 391727 - DNA, 15 bp, Homo sapiens
tagagcgtatgccca

SEQ ID NO: 391728 - DNA, 15 bp, Homo sapiens
ctagagcgtatgccc

SEQ ID NO: 391729 - DNA, 15 bp, Homo sapiens
cctagagcgtatgcc

SEQ ID NO: 391730 - DNA, 15 bp, Homo sapiens
tcctagagcgtatgc

SEQ ID NO: 391731 - DNA, 15 bp, Homo sapiens
ttcctagagcgtatg

SEQ ID NO: 391732 - DNA, 15 bp, Homo sapiens
attcctagagcgtat

SEQ ID NO: 391733 - DNA, 15 bp, Homo sapiens
gattcctagagcgta

SEQ ID NO: 391734 - DNA, 15 bp, Homo sapiens
agattcctagagcgt

SEQ ID NO: 391735 - DNA, 15 bp, Homo sapiens
aagattcctagagcg

SEQ ID NO: 391736 - DNA, 15 bp, Homo sapiens
gaagattcctagagc

SEQ ID NO: 391737 - DNA, 15 bp, Homo sapiens
agaagattcctagag

SEQ ID NO: 391738 - DNA, 15 bp, Homo sapiens
cagaagattcctaga

SEQ ID NO: 391739 - DNA, 15 bp, Homo sapiens
gcagaagattcctag

SEQ ID NO: 391740 - DNA, 15 bp, Homo sapiens
tgcagaagattccta

SEQ ID NO: 391741 - DNA, 15 bp, Homo sapiens
atgcagaagattcct

SEQ ID NO: 391742 - DNA, 15 bp, Homo sapiens
gatgcagaagattcc

SEQ ID NO: 391743 - DNA, 15 bp, Homo sapiens
ggatgcagaagattc

SEQ ID NO: 391744 - DNA, 15 bp, Homo sapiens
tggatgcagaagatt

SEQ ID NO: 391745 - DNA, 15 bp, Homo sapiens
ctggatgcagaagat

SEQ ID NO: 391746 - DNA, 15 bp, Homo sapiens
tctggatgcagaaga

SEQ ID NO: 391747 - DNA, 15 bp, Homo sapiens
atctggatgcagaag

SEQ ID NO: 391748 - DNA, 15 bp, Homo sapiens
tatctggatgcagaa

SEQ ID NO: 391749 - DNA, 15 bp, Homo sapiens
ttatctggatgcaga

SEQ ID NO: 391750 - DNA, 15 bp, Homo sapiens
attatctggatgcag

SEQ ID NO: 391751 - DNA, 15 bp, Homo sapiens
gattatctggatgca

SEQ ID NO: 391752 - DNA, 15 bp, Homo sapiens
ggattatctggatgc

SEQ ID NO: 391753 - DNA, 15 bp, Homo sapiens
aggattatctggatg

SEQ ID NO: 391754 - DNA, 15 bp, Homo sapiens
aaggattatctggat

SEQ ID NO: 391755 - DNA, 15 bp, Homo sapiens
aaaggattatctgga

SEQ ID NO: 391756 - DNA, 15 bp, Homo sapiens
aaaaggattatctgg

SEQ ID NO: 391757 - DNA, 15 bp, Homo sapiens
aaaaaggattatctg

SEQ ID NO: 391758 - DNA, 15 bp, Homo sapiens
aaaaaaggattatct

SEQ ID NO: 391759 - DNA, 15 bp, Homo sapiens
aaaaaaaggattatc

SEQ ID NO: 391760 - DNA, 15 bp, Homo sapiens
taaaaaaaggattat

SEQ ID NO: 391761 - DNA, 15 bp, Homo sapiens
ctaaaaaaaggatta

SEQ ID NO: 391762 - DNA, 15 bp, Homo sapiens
actaaaaaaaggatt

SEQ ID NO: 391763 - DNA, 15 bp, Homo sapiens
cactaaaaaaaggat

SEQ ID NO: 391764 - DNA, 15 bp, Homo sapiens
ccactaaaaaaagga

SEQ ID NO: 391765 - DNA, 15 bp, Homo sapiens
tccactaaaaaaagg

SEQ ID NO: 391766 - DNA, 15 bp, Homo sapiens
ctccactaaaaaaag

SEQ ID NO: 391767 - DNA, 15 bp, Homo sapiens
actccactaaaaaaa

SEQ ID NO: 391768 - DNA, 15 bp, Homo sapiens
gactccactaaaaaa

SEQ ID NO: 391769 - DNA, 15 bp, Homo sapiens
agactccactaaaaa

SEQ ID NO: 391770 - DNA, 15 bp, Homo sapiens
aagactccactaaaa

SEQ ID NO: 391771 - DNA, 15 bp, Homo sapiens
gaagactccactaaa

SEQ ID NO: 391772 - DNA, 15 bp, Homo sapiens
agaagactccactaa

SEQ ID NO: 391773 - DNA, 15 bp, Homo sapiens
gagaagactccacta

SEQ ID NO: 391774 - DNA, 15 bp, Homo sapiens
tgagaagactccact

SEQ ID NO: 391775 - DNA, 15 bp, Homo sapiens
gtgagaagactccac

SEQ ID NO: 391776 - DNA, 15 bp, Homo sapiens
tgtgagaagactcca

SEQ ID NO: 391777 - DNA, 15 bp, Homo sapiens
atgtgagaagactcc

SEQ ID NO: 391778 - DNA, 15 bp, Homo sapiens
aatgtgagaagactc

SEQ ID NO: 391779 - DNA, 15 bp, Homo sapiens
aaatgtgagaagact

SEQ ID NO: 391780 - DNA, 15 bp, Homo sapiens
aaaatgtgagaagac

SEQ ID NO: 391781 - DNA, 15 bp, Homo sapiens
caaaatgtgagaaga

SEQ ID NO: 391782 - DNA, 15 bp, Homo sapiens
ccaaaatgtgagaag

SEQ ID NO: 391783 - DNA, 15 bp, Homo sapiens
cccaaaatgtgagaa

SEQ ID NO: 391784 - DNA, 15 bp, Homo sapiens
tcccaaaatgtgaga

SEQ ID NO: 391785 - DNA, 15 bp, Homo sapiens
atcccaaaatgtgag

SEQ ID NO: 391786 - DNA, 15 bp, Homo sapiens
tatcccaaaatgtga

SEQ ID NO: 391787 - DNA, 15 bp, Homo sapiens
ctatcccaaaatgtg

SEQ ID NO: 391788 - DNA, 15 bp, Homo sapiens
cctatcccaaaatgt

SEQ ID NO: 391789 - DNA, 15 bp, Homo sapiens
gcctatcccaaaatg

SEQ ID NO: 391790 - DNA, 15 bp, Homo sapiens
ggcctatcccaaaat

SEQ ID NO: 391791 - DNA, 15 bp, Homo sapiens
tggcctatcccaaaa

SEQ ID NO: 391792 - DNA, 15 bp, Homo sapiens
atggcctatcccaaa

SEQ ID NO: 391793 - DNA, 15 bp, Homo sapiens
catggcctatcccaa

SEQ ID NO: 391794 - DNA, 15 bp, Homo sapiens
tcatggcctatccca

SEQ ID NO: 391795 - DNA, 15 bp, Homo sapiens
ctcatggcctatccc

SEQ ID NO: 391796 - DNA, 15 bp, Homo sapiens
cctcatggcctatcc

SEQ ID NO: 391797 - DNA, 15 bp, Homo sapiens
acctcatggcctatc

SEQ ID NO: 391798 - DNA, 15 bp, Homo sapiens
tacctcatggcctat

SEQ ID NO: 391799 - DNA, 15 bp, Homo sapiens
ctacctcatggccta

SEQ ID NO: 391800 - DNA, 15 bp, Homo sapiens
tctacctcatggcct

SEQ ID NO: 391801 - DNA, 15 bp, Homo sapiens
gtctacctcatggcc

SEQ ID NO: 391802 - DNA, 15 bp, Homo sapiens
agtctacctcatggc

SEQ ID NO: 391803 - DNA, 15 bp, Homo sapiens
aagtctacctcatgg

SEQ ID NO: 391804 - DNA, 15 bp, Homo sapiens
caagtctacctcatg

SEQ ID NO: 391805 - DNA, 15 bp, Homo sapiens
ccaagtctacctcat

SEQ ID NO: 391806 - DNA, 15 bp, Homo sapiens
cccaagtctacctca

SEQ ID NO: 391807 - DNA, 15 bp, Homo sapiens
ccccaagtctacctc

SEQ ID NO: 391808 - DNA, 15 bp, Homo sapiens
gccccaagtctacct

SEQ ID NO: 391809 - DNA, 15 bp, Homo sapiens
agccccaagtctacc

SEQ ID NO: 391810 - DNA, 15 bp, Homo sapiens
gagccccaagtctac

SEQ ID NO: 391811 - DNA, 15 bp, Homo sapiens
tgagccccaagtcta

SEQ ID NO: 391812 - DNA, 15 bp, Homo sapiens
ctgagccccaagtct

SEQ ID NO: 391813 - DNA, 15 bp, Homo sapiens
actgagccccaagtc

SEQ ID NO: 391814 - DNA, 15 bp, Homo sapiens
tactgagccccaagt

SEQ ID NO: 391815 - DNA, 15 bp, Homo sapiens
ttactgagccccaag

SEQ ID NO: 391816 - DNA, 15 bp, Homo sapiens
cttactgagccccaa

SEQ ID NO: 391817 - DNA, 15 bp, Homo sapiens
gcttactgagcccca

SEQ ID NO: 391818 - DNA, 15 bp, Homo sapiens
tgcttactgagcccc

SEQ ID NO: 391819 - DNA, 15 bp, Homo sapiens
ttgcttactgagccc

SEQ ID NO: 391820 - DNA, 15 bp, Homo sapiens
tttgcttactgagcc

SEQ ID NO: 391821 - DNA, 15 bp, Homo sapiens
ctttgcttactgagc

SEQ ID NO: 391822 - DNA, 15 bp, Homo sapiens
gctttgcttactgag

SEQ ID NO: 391823 - DNA, 15 bp, Homo sapiens
ggctttgcttactga

SEQ ID NO: 391824 - DNA, 15 bp, Homo sapiens
tggctttgcttactg

SEQ ID NO: 391825 - DNA, 15 bp, Homo sapiens
ttggctttgcttact

SEQ ID NO: 391826 - DNA, 15 bp, Homo sapiens
attggctttgcttac

SEQ ID NO: 391827 - DNA, 15 bp, Homo sapiens
cattggctttgctta

SEQ ID NO: 391828 - DNA, 15 bp, Homo sapiens
tcattggctttgctt

SEQ ID NO: 391829 - DNA, 15 bp, Homo sapiens
ctcattggctttgct

SEQ ID NO: 391830 - DNA, 15 bp, Homo sapiens
cctcattggctttgc

SEQ ID NO: 391831 - DNA, 15 bp, Homo sapiens
tcctcattggctttg

SEQ ID NO: 391832 - DNA, 15 bp, Homo sapiens
atcctcattggcttt

SEQ ID NO: 391833 - DNA, 15 bp, Homo sapiens
catcctcattggctt

SEQ ID NO: 391834 - DNA, 15 bp, Homo sapiens
tcatcctcattggct

SEQ ID NO: 391835 - DNA, 15 bp, Homo sapiens
gtcatcctcattggc

SEQ ID NO: 391836 - DNA, 15 bp, Homo sapiens
tgtcatcctcattgg

SEQ ID NO: 391837 - DNA, 15 bp, Homo sapiens
ttgtcatcctcattg

SEQ ID NO: 391838 - DNA, 15 bp, Homo sapiens
tttgtcatcctcatt

SEQ ID NO: 391839 - DNA, 15 bp, Homo sapiens
ttttgtcatcctcat

SEQ ID NO: 391840 - DNA, 15 bp, Homo sapiens
gttttgtcatcctca

SEQ ID NO: 391841 - DNA, 15 bp, Homo sapiens
tgttttgtcatcctc

SEQ ID NO: 391842 - DNA, 15 bp, Homo sapiens
atgttttgtcatcct

SEQ ID NO: 391843 - DNA, 15 bp, Homo sapiens
catgttttgtcatcc

SEQ ID NO: 391844 - DNA, 15 bp, Homo sapiens
tcatgttttgtcatc

SEQ ID NO: 391845 - DNA, 15 bp, Homo sapiens
ttcatgttttgtcat

SEQ ID NO: 391846 - DNA, 15 bp, Homo sapiens
tttcatgttttgtca

SEQ ID NO: 391847 - DNA, 15 bp, Homo sapiens
ttttcatgttttgtc

SEQ ID NO: 391848 - DNA, 15 bp, Homo sapiens
cttttcatgttttgt

SEQ ID NO: 391849 - DNA, 15 bp, Homo sapiens
ccttttcatgttttg

SEQ ID NO: 391850 - DNA, 15 bp, Homo sapiens
tccttttcatgtttt

SEQ ID NO: 391851 - DNA, 15 bp, Homo sapiens
ttccttttcatgttt

SEQ ID NO: 391852 - DNA, 15 bp, Homo sapiens
tttccttttcatgtt

SEQ ID NO: 391853 - DNA, 15 bp, Homo sapiens
atttccttttcatgt

SEQ ID NO: 391854 - DNA, 15 bp, Homo sapiens
catttccttttcatg

SEQ ID NO: 391855 - DNA, 15 bp, Homo sapiens
gcatttccttttcat

SEQ ID NO: 391856 - DNA, 15 bp, Homo sapiens
agcatttccttttca

SEQ ID NO: 391857 - DNA, 15 bp, Homo sapiens
cagcatttccttttc

SEQ ID NO: 391858 - DNA, 15 bp, Homo sapiens
tcagcatttcctttt

SEQ ID NO: 391859 - DNA, 15 bp, Homo sapiens
atcagcatttccttt

SEQ ID NO: 391860 - DNA, 15 bp, Homo sapiens
catcagcatttcctt

SEQ ID NO: 391861 - DNA, 15 bp, Homo sapiens
gcatcagcatttcct

SEQ ID NO: 391862 - DNA, 15 bp, Homo sapiens
tgcatcagcatttcc

SEQ ID NO: 391863 - DNA, 15 bp, Homo sapiens
ctgcatcagcatttc

SEQ ID NO: 391864 - DNA, 15 bp, Homo sapiens
tctgcatcagcattt

SEQ ID NO: 391865 - DNA, 15 bp, Homo sapiens
atctgcatcagcatt

SEQ ID NO: 391866 - DNA, 15 bp, Homo sapiens
catctgcatcagcat

SEQ ID NO: 391867 - DNA, 15 bp, Homo sapiens
gcatctgcatcagca

SEQ ID NO: 391868 - DNA, 15 bp, Homo sapiens
tgcatctgcatcagc

SEQ ID NO: 391869 - DNA, 15 bp, Homo sapiens
ctgcatctgcatcag

SEQ ID NO: 391870 - DNA, 15 bp, Homo sapiens
cctgcatctgcatca

SEQ ID NO: 391871 - DNA, 15 bp, Homo sapiens
gcctgcatctgcatc

SEQ ID NO: 391872 - DNA, 15 bp, Homo sapiens
agcctgcatctgcat

SEQ ID NO: 391873 - DNA, 15 bp, Homo sapiens
cagcctgcatctgca

SEQ ID NO: 391874 - DNA, 15 bp, Homo sapiens
ccagcctgcatctgc

SEQ ID NO: 391875 - DNA, 15 bp, Homo sapiens
tccagcctgcatctg

SEQ ID NO: 391876 - DNA, 15 bp, Homo sapiens
ctccagcctgcatct

SEQ ID NO: 391877 - DNA, 15 bp, Homo sapiens
actccagcctgcatc

SEQ ID NO: 391878 - DNA, 15 bp, Homo sapiens
cactccagcctgcat

SEQ ID NO: 391879 - DNA, 15 bp, Homo sapiens
ccactccagcctgca

SEQ ID NO: 391880 - DNA, 15 bp, Homo sapiens
cccactccagcctgc

SEQ ID NO: 391881 - DNA, 15 bp, Homo sapiens
acccactccagcctg

SEQ ID NO: 391882 - DNA, 15 bp, Homo sapiens
cacccactccagcct

SEQ ID NO: 391883 - DNA, 15 bp, Homo sapiens
ccacccactccagcc

SEQ ID NO: 391884 - DNA, 15 bp, Homo sapiens
accacccactccagc

SEQ ID NO: 391885 - DNA, 15 bp, Homo sapiens
taccacccactccag

SEQ ID NO: 391886 - DNA, 15 bp, Homo sapiens
ttaccacccactcca

SEQ ID NO: 391887 - DNA, 15 bp, Homo sapiens
cttaccacccactcc

SEQ ID NO: 391888 - DNA, 15 bp, Homo sapiens
tcttaccacccactc

SEQ ID NO: 391889 - DNA, 15 bp, Homo sapiens
ctcttaccacccact

SEQ ID NO: 391890 - DNA, 15 bp, Homo sapiens
cctcttaccacccac

SEQ ID NO: 391891 - DNA, 15 bp, Homo sapiens
gcctcttaccaccca

SEQ ID NO: 391892 - DNA, 15 bp, Homo sapiens
ggcctcttaccaccc

SEQ ID NO: 391893 - DNA, 15 bp, Homo sapiens
aggcctcttaccacc

SEQ ID NO: 391894 - DNA, 15 bp, Homo sapiens
caggcctcttaccac

SEQ ID NO: 391895 - DNA, 15 bp, Homo sapiens
ccaggcctcttacca

SEQ ID NO: 391896 - DNA, 15 bp, Homo sapiens
cccaggcctcttacc

SEQ ID NO: 391897 - DNA, 15 bp, Homo sapiens
tcccaggcctcttac

SEQ ID NO: 391898 - DNA, 15 bp, Homo sapiens
ctcccaggcctctta

SEQ ID NO: 391899 - DNA, 15 bp, Homo sapiens
tctcccaggcctctt

SEQ ID NO: 391900 - DNA, 15 bp, Homo sapiens
ctctcccaggcctct

SEQ ID NO: 391901 - DNA, 15 bp, Homo sapiens
gctctcccaggcctc

SEQ ID NO: 391902 - DNA, 15 bp, Homo sapiens
tgctctcccaggcct

SEQ ID NO: 391903 - DNA, 15 bp, Homo sapiens
ctgctctcccaggcc

SEQ ID NO: 391904 - DNA, 15 bp, Homo sapiens
gctgctctcccaggc

SEQ ID NO: 391905 - DNA, 15 bp, Homo sapiens
tgctgctctcccagg

SEQ ID NO: 391906 - DNA, 15 bp, Homo sapiens
ttgctgctctcccag

SEQ ID NO: 391907 - DNA, 15 bp, Homo sapiens
cttgctgctctccca

SEQ ID NO: 391908 - DNA, 15 bp, Homo sapiens
tcttgctgctctccc

SEQ ID NO: 391909 - DNA, 15 bp, Homo sapiens
atcttgctgctctcc

SEQ ID NO: 391910 - DNA, 15 bp, Homo sapiens
catcttgctgctctc

SEQ ID NO: 391911 - DNA, 15 bp, Homo sapiens
tcatcttgctgctct

SEQ ID NO: 391912 - DNA, 15 bp, Homo sapiens
ctcatcttgctgctc

SEQ ID NO: 391913 - DNA, 15 bp, Homo sapiens
tctcatcttgctgct

SEQ ID NO: 391914 - DNA, 15 bp, Homo sapiens
atctcatcttgctgc

SEQ ID NO: 391915 - DNA, 15 bp, Homo sapiens
tatctcatcttgctg

SEQ ID NO: 391916 - DNA, 15 bp, Homo sapiens
atatctcatcttgct

SEQ ID NO: 391917 - DNA, 15 bp, Homo sapiens
gatatctcatcttgc

SEQ ID NO: 391918 - DNA, 15 bp, Homo sapiens
agatatctcatcttg

SEQ ID NO: 391919 - DNA, 15 bp, Homo sapiens
aagatatctcatctt

SEQ ID NO: 391920 - DNA, 15 bp, Homo sapiens
taagatatctcatct

SEQ ID NO: 391921 - DNA, 15 bp, Homo sapiens
ctaagatatctcatc

SEQ ID NO: 391922 - DNA, 15 bp, Homo sapiens
tctaagatatctcat

SEQ ID NO: 391923 - DNA, 15 bp, Homo sapiens
atctaagatatctca

SEQ ID NO: 391924 - DNA, 15 bp, Homo sapiens
tatctaagatatctc

SEQ ID NO: 391925 - DNA, 15 bp, Homo sapiens
ttatctaagatatct

SEQ ID NO: 391926 - DNA, 15 bp, Homo sapiens
attatctaagatatc

SEQ ID NO: 391927 - DNA, 15 bp, Homo sapiens
cattatctaagatat

SEQ ID NO: 391928 - DNA, 15 bp, Homo sapiens
acattatctaagata

SEQ ID NO: 391929 - DNA, 15 bp, Homo sapiens
aacattatctaagat

SEQ ID NO: 391930 - DNA, 15 bp, Homo sapiens
aaacattatctaaga

SEQ ID NO: 391931 - DNA, 15 bp, Homo sapiens
caaacattatctaag

SEQ ID NO: 391932 - DNA, 15 bp, Homo sapiens
acaaacattatctaa

SEQ ID NO: 391933 - DNA, 15 bp, Homo sapiens
aacaaacattatcta

SEQ ID NO: 391934 - DNA, 15 bp, Homo sapiens
gaacaaacattatct

SEQ ID NO: 391935 - DNA, 15 bp, Homo sapiens
agaacaaacattatc

SEQ ID NO: 391936 - DNA, 15 bp, Homo sapiens
cagaacaaacattat

SEQ ID NO: 391937 - DNA, 15 bp, Homo sapiens
tcagaacaaacatta

SEQ ID NO: 391938 - DNA, 15 bp, Homo sapiens
gtcagaacaaacatt

SEQ ID NO: 391939 - DNA, 15 bp, Homo sapiens
agtcagaacaaacat

SEQ ID NO: 391940 - DNA, 15 bp, Homo sapiens
aagtcagaacaaaca

SEQ ID NO: 391941 - DNA, 15 bp, Homo sapiens
taagtcagaacaaac

SEQ ID NO: 391942 - DNA, 15 bp, Homo sapiens
ctaagtcagaacaaa

SEQ ID NO: 391943 - DNA, 15 bp, Homo sapiens
actaagtcagaacaa

SEQ ID NO: 391944 - DNA, 15 bp, Homo sapiens
tactaagtcagaaca

SEQ ID NO: 391945 - DNA, 15 bp, Homo sapiens
ttactaagtcagaac

SEQ ID NO: 391946 - DNA, 15 bp, Homo sapiens
attactaagtcagaa

SEQ ID NO: 391947 - DNA, 15 bp, Homo sapiens
tattactaagtcaga

SEQ ID NO: 391948 - DNA, 15 bp, Homo sapiens
ttattactaagtcag

SEQ ID NO: 391949 - DNA, 15 bp, Homo sapiens
cttattactaagtca

SEQ ID NO: 391950 - DNA, 15 bp, Homo sapiens
ccttattactaagtc

SEQ ID NO: 391951 - DNA, 15 bp, Homo sapiens
accttattactaagt

SEQ ID NO: 391952 - DNA, 15 bp, Homo sapiens
caccttattactaag

SEQ ID NO: 391953 - DNA, 15 bp, Homo sapiens
tcaccttattactaa

SEQ ID NO: 391954 - DNA, 15 bp, Homo sapiens
ttcaccttattacta

SEQ ID NO: 391955 - DNA, 15 bp, Homo sapiens
tttcaccttattact

SEQ ID NO: 391956 - DNA, 15 bp, Homo sapiens
atttcaccttattac

SEQ ID NO: 391957 - DNA, 15 bp, Homo sapiens
aatttcaccttatta

SEQ ID NO: 391958 - DNA, 15 bp, Homo sapiens
caatttcaccttatt

SEQ ID NO: 391959 - DNA, 15 bp, Homo sapiens
ccaatttcaccttat

SEQ ID NO: 391960 - DNA, 15 bp, Homo sapiens
cccaatttcacctta

SEQ ID NO: 391961 - DNA, 15 bp, Homo sapiens
tcccaatttcacctt

SEQ ID NO: 391962 - DNA, 15 bp, Homo sapiens
atcccaatttcacct

SEQ ID NO: 391963 - DNA, 15 bp, Homo sapiens
catcccaatttcacc

SEQ ID NO: 391964 - DNA, 15 bp, Homo sapiens
acatcccaatttcac

SEQ ID NO: 391965 - DNA, 15 bp, Homo sapiens
cacatcccaatttca

SEQ ID NO: 391966 - DNA, 15 bp, Homo sapiens
tcacatcccaatttc

SEQ ID NO: 391967 - DNA, 15 bp, Homo sapiens
gtcacatcccaattt

SEQ ID NO: 391968 - DNA, 15 bp, Homo sapiens
tgtcacatcccaatt

SEQ ID NO: 391969 - DNA, 15 bp, Homo sapiens
atgtcacatcccaat

SEQ ID NO: 391970 - DNA, 15 bp, Homo sapiens
tatgtcacatcccaa

SEQ ID NO: 391971 - DNA, 15 bp, Homo sapiens
ttatgtcacatccca

SEQ ID NO: 391972 - DNA, 15 bp, Homo sapiens
gttatgtcacatccc

SEQ ID NO: 391973 - DNA, 15 bp, Homo sapiens
ggttatgtcacatcc

SEQ ID NO: 391974 - DNA, 15 bp, Homo sapiens
aggttatgtcacatc

SEQ ID NO: 391975 - DNA, 15 bp, Homo sapiens
aaggttatgtcacat

SEQ ID NO: 391976 - DNA, 15 bp, Homo sapiens
taaggttatgtcaca

SEQ ID NO: 391977 - DNA, 15 bp, Homo sapiens
ttaaggttatgtcac

SEQ ID NO: 391978 - DNA, 15 bp, Homo sapiens
cttaaggttatgtca

SEQ ID NO: 391979 - DNA, 15 bp, Homo sapiens
ccttaaggttatgtc

SEQ ID NO: 391980 - DNA, 15 bp, Homo sapiens
gccttaaggttatgt

SEQ ID NO: 391981 - DNA, 15 bp, Homo sapiens
tgccttaaggttatg

SEQ ID NO: 391982 - DNA, 15 bp, Homo sapiens
atgccttaaggttat

SEQ ID NO: 391983 - DNA, 15 bp, Homo sapiens
aatgccttaaggtta

SEQ ID NO: 391984 - DNA, 15 bp, Homo sapiens
aaatgccttaaggtt

SEQ ID NO: 391985 - DNA, 15 bp, Homo sapiens
aaaatgccttaaggt

SEQ ID NO: 391986 - DNA, 15 bp, Homo sapiens
caaaatgccttaagg

SEQ ID NO: 391987 - DNA, 15 bp, Homo sapiens
tcaaaatgccttaag

SEQ ID NO: 391988 - DNA, 15 bp, Homo sapiens
gtcaaaatgccttaa

SEQ ID NO: 391989 - DNA, 15 bp, Homo sapiens
agtcaaaatgcctta

SEQ ID NO: 391990 - DNA, 15 bp, Homo sapiens
aagtcaaaatgcctt

SEQ ID NO: 391991 - DNA, 15 bp, Homo sapiens
taagtcaaaatgcct

SEQ ID NO: 391992 - DNA, 15 bp, Homo sapiens
ctaagtcaaaatgcc

SEQ ID NO: 391993 - DNA, 15 bp, Homo sapiens
gctaagtcaaaatgc

SEQ ID NO: 391994 - DNA, 15 bp, Homo sapiens
agctaagtcaaaatg

SEQ ID NO: 391995 - DNA, 15 bp, Homo sapiens
gagctaagtcaaaat

SEQ ID NO: 391996 - DNA, 15 bp, Homo sapiens
agagctaagtcaaaa

SEQ ID NO: 391997 - DNA, 15 bp, Homo sapiens
gagagctaagtcaaa

SEQ ID NO: 391998 - DNA, 15 bp, Homo sapiens
tgagagctaagtcaa

SEQ ID NO: 391999 - DNA, 15 bp, Homo sapiens
gtgagagctaagtca

SEQ ID NO: 392000 - DNA, 15 bp, Homo sapiens
tgtgagagctaagtc

SEQ ID NO: 392001 - DNA, 15 bp, Homo sapiens
atgtgagagctaagt

SEQ ID NO: 392002 - DNA, 15 bp, Homo sapiens
catgtgagagctaag

SEQ ID NO: 392003 - DNA, 15 bp, Homo sapiens
acatgtgagagctaa

SEQ ID NO: 392004 - DNA, 15 bp, Homo sapiens
aacatgtgagagcta

SEQ ID NO: 392005 - DNA, 15 bp, Homo sapiens
caacatgtgagagct

SEQ ID NO: 392006 - DNA, 15 bp, Homo sapiens
ccaacatgtgagagc

SEQ ID NO: 392007 - DNA, 15 bp, Homo sapiens
accaacatgtgagag

SEQ ID NO: 392008 - DNA, 15 bp, Homo sapiens
caccaacatgtgaga

SEQ ID NO: 392009 - DNA, 15 bp, Homo sapiens
tcaccaacatgtgag

SEQ ID NO: 392010 - DNA, 15 bp, Homo sapiens
ctcaccaacatgtga

SEQ ID NO: 392011 - DNA, 15 bp, Homo sapiens
tctcaccaacatgtg

SEQ ID NO: 392012 - DNA, 15 bp, Homo sapiens
ttctcaccaacatgt

SEQ ID NO: 392013 - DNA, 15 bp, Homo sapiens
attctcaccaacatg

SEQ ID NO: 392014 - DNA, 15 bp, Homo sapiens
aattctcaccaacat

SEQ ID NO: 392015 - DNA, 15 bp, Homo sapiens
caattctcaccaaca

SEQ ID NO: 392016 - DNA, 15 bp, Homo sapiens
tcaattctcaccaac

SEQ ID NO: 392017 - DNA, 15 bp, Homo sapiens
ctcaattctcaccaa

SEQ ID NO: 392018 - DNA, 15 bp, Homo sapiens
tctcaattctcacca

SEQ ID NO: 392019 - DNA, 15 bp, Homo sapiens
gtctcaattctcacc

SEQ ID NO: 392020 - DNA, 15 bp, Homo sapiens
agtctcaattctcac

SEQ ID NO: 392021 - DNA, 15 bp, Homo sapiens
tagtctcaattctca

SEQ ID NO: 392022 - DNA, 15 bp, Homo sapiens
ctagtctcaattctc

SEQ ID NO: 392023 - DNA, 15 bp, Homo sapiens
tctagtctcaattct

SEQ ID NO: 392024 - DNA, 15 bp, Homo sapiens
ctctagtctcaattc

SEQ ID NO: 392025 - DNA, 15 bp, Homo sapiens
cctctagtctcaatt

SEQ ID NO: 392026 - DNA, 15 bp, Homo sapiens
ccctctagtctcaat

SEQ ID NO: 392027 - DNA, 15 bp, Homo sapiens
tccctctagtctcaa

SEQ ID NO: 392028 - DNA, 15 bp, Homo sapiens
ttccctctagtctca

SEQ ID NO: 392029 - DNA, 15 bp, Homo sapiens
tttccctctagtctc

SEQ ID NO: 392030 - DNA, 15 bp, Homo sapiens
ttttccctctagtct

SEQ ID NO: 392031 - DNA, 15 bp, Homo sapiens
gttttccctctagtc

SEQ ID NO: 392032 - DNA, 15 bp, Homo sapiens
ggttttccctctagt

SEQ ID NO: 392033 - DNA, 15 bp, Homo sapiens
gggttttccctctag

SEQ ID NO: 392034 - DNA, 15 bp, Homo sapiens
ggggttttccctcta

SEQ ID NO: 392035 - DNA, 15 bp, Homo sapiens
gggggttttccctct

SEQ ID NO: 392036 - DNA, 15 bp, Homo sapiens
agggggttttccctc

SEQ ID NO: 392037 - DNA, 15 bp, Homo sapiens
tagggggttttccct

SEQ ID NO: 392038 - DNA, 15 bp, Homo sapiens
atagggggttttccc

SEQ ID NO: 392039 - DNA, 15 bp, Homo sapiens
aatagggggttttcc

SEQ ID NO: 392040 - DNA, 15 bp, Homo sapiens
aaatagggggttttc

SEQ ID NO: 392041 - DNA, 15 bp, Homo sapiens
aaaatagggggtttt

SEQ ID NO: 392042 - DNA, 15 bp, Homo sapiens
gaaaatagggggttt

SEQ ID NO: 392043 - DNA, 15 bp, Homo sapiens
tgaaaatagggggtt

SEQ ID NO: 392044 - DNA, 15 bp, Homo sapiens
atgaaaatagggggt

SEQ ID NO: 392045 - DNA, 15 bp, Homo sapiens
aatgaaaataggggg

SEQ ID NO: 392046 - DNA, 15 bp, Homo sapiens
aaatgaaaatagggg

SEQ ID NO: 392047 - DNA, 15 bp, Homo sapiens
gaaatgaaaataggg

SEQ ID NO: 392048 - DNA, 15 bp, Homo sapiens
agaaatgaaaatagg

SEQ ID NO: 392049 - DNA, 15 bp, Homo sapiens
cagaaatgaaaatag

SEQ ID NO: 392050 - DNA, 15 bp, Homo sapiens
tcagaaatgaaaata

SEQ ID NO: 392051 - DNA, 15 bp, Homo sapiens
ttcagaaatgaaaat

SEQ ID NO: 392052 - DNA, 15 bp, Homo sapiens
tttcagaaatgaaaa

SEQ ID NO: 392053 - DNA, 15 bp, Homo sapiens
atttcagaaatgaaa

SEQ ID NO: 392054 - DNA, 15 bp, Homo sapiens
catttcagaaatgaa

SEQ ID NO: 392055 - DNA, 15 bp, Homo sapiens
gcatttcagaaatga

SEQ ID NO: 392056 - DNA, 15 bp, Homo sapiens
tgcatttcagaaatg

SEQ ID NO: 392057 - DNA, 15 bp, Homo sapiens
ctgcatttcagaaat

SEQ ID NO: 392058 - DNA, 15 bp, Homo sapiens
tctgcatttcagaaa

SEQ ID NO: 392059 - DNA, 15 bp, Homo sapiens
ttctgcatttcagaa

SEQ ID NO: 392060 - DNA, 15 bp, Homo sapiens
tttctgcatttcaga

SEQ ID NO: 392061 - DNA, 15 bp, Homo sapiens
ttttctgcatttcag

SEQ ID NO: 392062 - DNA, 15 bp, Homo sapiens
tttttctgcatttca

SEQ ID NO: 392063 - DNA, 15 bp, Homo sapiens
atttttctgcatttc

SEQ ID NO: 392064 - DNA, 15 bp, Homo sapiens
tatttttctgcattt

SEQ ID NO: 392065 - DNA, 15 bp, Homo sapiens
ctatttttctgcatt

SEQ ID NO: 392066 - DNA, 15 bp, Homo sapiens
tctatttttctgcat

SEQ ID NO: 392067 - DNA, 15 bp, Homo sapiens
ctctatttttctgca

SEQ ID NO: 392068 - DNA, 15 bp, Homo sapiens
actctatttttctgc

SEQ ID NO: 392069 - DNA, 15 bp, Homo sapiens
cactctatttttctg

SEQ ID NO: 392070 - DNA, 15 bp, Homo sapiens
tcactctatttttct

SEQ ID NO: 392071 - DNA, 15 bp, Homo sapiens
ttcactctatttttc

SEQ ID NO: 392072 - DNA, 15 bp, Homo sapiens
gttcactctattttt

SEQ ID NO: 392073 - DNA, 15 bp, Homo sapiens
tgttcactctatttt

SEQ ID NO: 392074 - DNA, 15 bp, Homo sapiens
atgttcactctattt

SEQ ID NO: 392075 - DNA, 15 bp, Homo sapiens
aatgttcactctatt

SEQ ID NO: 392076 - DNA, 15 bp, Homo sapiens
aaatgttcactctat

SEQ ID NO: 392077 - DNA, 15 bp, Homo sapiens
taaatgttcactcta

SEQ ID NO: 392078 - DNA, 15 bp, Homo sapiens
ataaatgttcactct

SEQ ID NO: 392079 - DNA, 15 bp, Homo sapiens
tataaatgttcactc

SEQ ID NO: 392080 - DNA, 15 bp, Homo sapiens
ttataaatgttcact

SEQ ID NO: 392081 - DNA, 15 bp, Homo sapiens
attataaatgttcac

SEQ ID NO: 392082 - DNA, 15 bp, Homo sapiens
gattataaatgttca

SEQ ID NO: 392083 - DNA, 15 bp, Homo sapiens
ggattataaatgttc

SEQ ID NO: 392084 - DNA, 15 bp, Homo sapiens
tggattataaatgtt

SEQ ID NO: 392085 - DNA, 15 bp, Homo sapiens
ttggattataaatgt

SEQ ID NO: 392086 - DNA, 15 bp, Homo sapiens
gttggattataaatg

SEQ ID NO: 392087 - DNA, 15 bp, Homo sapiens
ggttggattataaat

SEQ ID NO: 392088 - DNA, 15 bp, Homo sapiens
gggttggattataaa

SEQ ID NO: 392089 - DNA, 15 bp, Homo sapiens
agggttggattataa

SEQ ID NO: 392090 - DNA, 15 bp, Homo sapiens
cagggttggattata

SEQ ID NO: 392091 - DNA, 15 bp, Homo sapiens
ccagggttggattat

SEQ ID NO: 392092 - DNA, 15 bp, Homo sapiens
accagggttggatta

SEQ ID NO: 392093 - DNA, 15 bp, Homo sapiens
taccagggttggatt

SEQ ID NO: 392094 - DNA, 15 bp, Homo sapiens
ataccagggttggat

SEQ ID NO: 392095 - DNA, 15 bp, Homo sapiens
aataccagggttgga

SEQ ID NO: 392096 - DNA, 15 bp, Homo sapiens
aaataccagggttgg

SEQ ID NO: 392097 - DNA, 15 bp, Homo sapiens
aaaataccagggttg

SEQ ID NO: 392098 - DNA, 15 bp, Homo sapiens
taaaataccagggtt

SEQ ID NO: 392099 - DNA, 15 bp, Homo sapiens
ttaaaataccagggt

SEQ ID NO: 392100 - DNA, 15 bp, Homo sapiens
tttaaaataccaggg

SEQ ID NO: 392101 - DNA, 15 bp, Homo sapiens
ttttaaaataccagg

SEQ ID NO: 392102 - DNA, 15 bp, Homo sapiens
gttttaaaataccag

SEQ ID NO: 392103 - DNA, 15 bp, Homo sapiens
tgttttaaaatacca

SEQ ID NO: 392104 - DNA, 15 bp, Homo sapiens
atgttttaaaatacc

SEQ ID NO: 392105 - DNA, 15 bp, Homo sapiens
catgttttaaaatac

SEQ ID NO: 392106 - DNA, 15 bp, Homo sapiens
acatgttttaaaata

SEQ ID NO: 392107 - DNA, 15 bp, Homo sapiens
cacatgttttaaaat

SEQ ID NO: 392108 - DNA, 15 bp, Homo sapiens
acacatgttttaaaa

SEQ ID NO: 392109 - DNA, 15 bp, Homo sapiens
tacacatgttttaaa

SEQ ID NO: 392110 - DNA, 15 bp, Homo sapiens
ttacacatgttttaa

SEQ ID NO: 392111 - DNA, 15 bp, Homo sapiens
attacacatgtttta

SEQ ID NO: 392112 - DNA, 15 bp, Homo sapiens
tattacacatgtttt

SEQ ID NO: 392113 - DNA, 15 bp, Homo sapiens
ttattacacatgttt

SEQ ID NO: 392114 - DNA, 15 bp, Homo sapiens
gttattacacatgtt

SEQ ID NO: 392115 - DNA, 15 bp, Homo sapiens
tgttattacacatgt

SEQ ID NO: 392116 - DNA, 15 bp, Homo sapiens
ttgttattacacatg

SEQ ID NO: 392117 - DNA, 15 bp, Homo sapiens
tttgttattacacat

SEQ ID NO: 392118 - DNA, 15 bp, Homo sapiens
ctttgttattacaca

SEQ ID NO: 392119 - DNA, 15 bp, Homo sapiens
actttgttattacac

SEQ ID NO: 392120 - DNA, 15 bp, Homo sapiens
gactttgttattaca

SEQ ID NO: 392121 - DNA, 15 bp, Homo sapiens
cgactttgttattac

SEQ ID NO: 392122 - DNA, 15 bp, Homo sapiens
ccgactttgttatta

SEQ ID NO: 392123 - DNA, 15 bp, Homo sapiens
accgactttgttatt

SEQ ID NO: 392124 - DNA, 15 bp, Homo sapiens
aaccgactttgttat

SEQ ID NO: 392125 - DNA, 15 bp, Homo sapiens
taaccgactttgtta

SEQ ID NO: 392126 - DNA, 15 bp, Homo sapiens
ataaccgactttgtt

SEQ ID NO: 392127 - DNA, 15 bp, Homo sapiens
aataaccgactttgt

SEQ ID NO: 392128 - DNA, 15 bp, Homo sapiens
caataaccgactttg

SEQ ID NO: 392129 - DNA, 15 bp, Homo sapiens
acaataaccgacttt

SEQ ID NO: 392130 - DNA, 15 bp, Homo sapiens
tacaataaccgactt

SEQ ID NO: 392131 - DNA, 15 bp, Homo sapiens
atacaataaccgact

SEQ ID NO: 392132 - DNA, 15 bp, Homo sapiens
tatacaataaccgac

SEQ ID NO: 392133 - DNA, 15 bp, Homo sapiens
ttatacaataaccga

SEQ ID NO: 392134 - DNA, 15 bp, Homo sapiens
attatacaataaccg

SEQ ID NO: 392135 - DNA, 15 bp, Homo sapiens
aattatacaataacc

SEQ ID NO: 392136 - DNA, 15 bp, Homo sapiens
aaattatacaataac

SEQ ID NO: 392137 - DNA, 15 bp, Homo sapiens
caaattatacaataa

SEQ ID NO: 392138 - DNA, 15 bp, Homo sapiens
ccaaattatacaata

SEQ ID NO: 392139 - DNA, 15 bp, Homo sapiens
tccaaattatacaat

SEQ ID NO: 392140 - DNA, 15 bp, Homo sapiens
ttccaaattatacaa

SEQ ID NO: 392141 - DNA, 15 bp, Homo sapiens
tttccaaattataca

SEQ ID NO: 392142 - DNA, 15 bp, Homo sapiens
atttccaaattatac

SEQ ID NO: 392143 - DNA, 15 bp, Homo sapiens
catttccaaattata

SEQ ID NO: 392144 - DNA, 15 bp, Homo sapiens
gcatttccaaattat

SEQ ID NO: 392145 - DNA, 15 bp, Homo sapiens
cgcatttccaaatta

SEQ ID NO: 392146 - DNA, 15 bp, Homo sapiens
tcgcatttccaaatt

SEQ ID NO: 392147 - DNA, 15 bp, Homo sapiens
atcgcatttccaaat

SEQ ID NO: 392148 - DNA, 15 bp, Homo sapiens
catcgcatttccaaa

SEQ ID NO: 392149 - DNA, 15 bp, Homo sapiens
acatcgcatttccaa

SEQ ID NO: 392150 - DNA, 15 bp, Homo sapiens
tacatcgcatttcca

SEQ ID NO: 392151 - DNA, 15 bp, Homo sapiens
ttacatcgcatttcc

SEQ ID NO: 392152 - DNA, 15 bp, Homo sapiens
cttacatcgcatttc

SEQ ID NO: 392153 - DNA, 15 bp, Homo sapiens
tcttacatcgcattt

SEQ ID NO: 392154 - DNA, 15 bp, Homo sapiens
atcttacatcgcatt

SEQ ID NO: 392155 - DNA, 15 bp, Homo sapiens
tatcttacatcgcat

SEQ ID NO: 392156 - DNA, 15 bp, Homo sapiens
atatcttacatcgca

SEQ ID NO: 392157 - DNA, 15 bp, Homo sapiens
aatatcttacatcgc

SEQ ID NO: 392158 - DNA, 15 bp, Homo sapiens
taatatcttacatcg

SEQ ID NO: 392159 - DNA, 15 bp, Homo sapiens
ataatatcttacatc

SEQ ID NO: 392160 - DNA, 15 bp, Homo sapiens
cataatatcttacat

SEQ ID NO: 392161 - DNA, 15 bp, Homo sapiens
tcataatatcttaca

SEQ ID NO: 392162 - DNA, 15 bp, Homo sapiens
atcataatatcttac

SEQ ID NO: 392163 - DNA, 15 bp, Homo sapiens
tatcataatatctta

SEQ ID NO: 392164 - DNA, 15 bp, Homo sapiens
ttatcataatatctt

SEQ ID NO: 392165 - DNA, 15 bp, Homo sapiens
tttatcataatatct

SEQ ID NO: 392166 - DNA, 15 bp, Homo sapiens
ctttatcataatatc

SEQ ID NO: 392167 - DNA, 15 bp, Homo sapiens
gctttatcataatat

SEQ ID NO: 392168 - DNA, 15 bp, Homo sapiens
agctttatcataata

SEQ ID NO: 392169 - DNA, 15 bp, Homo sapiens
cagctttatcataat

SEQ ID NO: 392170 - DNA, 15 bp, Homo sapiens
acagctttatcataa

SEQ ID NO: 392171 - DNA, 15 bp, Homo sapiens
cacagctttatcata

SEQ ID NO: 392172 - DNA, 15 bp, Homo sapiens
tcacagctttatcat

SEQ ID NO: 392173 - DNA, 15 bp, Homo sapiens
atcacagctttatca

SEQ ID NO: 392174 - DNA, 15 bp, Homo sapiens
aatcacagctttatc

SEQ ID NO: 392175 - DNA, 15 bp, Homo sapiens
aaatcacagctttat

SEQ ID NO: 392176 - DNA, 15 bp, Homo sapiens
aaaatcacagcttta

SEQ ID NO: 392177 - DNA, 15 bp, Homo sapiens
gaaaatcacagcttt

SEQ ID NO: 392178 - DNA, 15 bp, Homo sapiens
agaaaatcacagctt

SEQ ID NO: 392179 - DNA, 15 bp, Homo sapiens
cagaaaatcacagct

SEQ ID NO: 392180 - DNA, 15 bp, Homo sapiens
tcagaaaatcacagc

SEQ ID NO: 392181 - DNA, 15 bp, Homo sapiens
atcagaaaatcacag

SEQ ID NO: 392182 - DNA, 15 bp, Homo sapiens
aatcagaaaatcaca

SEQ ID NO: 392183 - DNA, 15 bp, Homo sapiens
aaatcagaaaatcac

SEQ ID NO: 392184 - DNA, 15 bp, Homo sapiens
taaatcagaaaatca

SEQ ID NO: 392185 - DNA, 15 bp, Homo sapiens
ttaaatcagaaaatc

SEQ ID NO: 392186 - DNA, 15 bp, Homo sapiens
cttaaatcagaaaat

SEQ ID NO: 392187 - DNA, 15 bp, Homo sapiens
tcttaaatcagaaaa

SEQ ID NO: 392188 - DNA, 15 bp, Homo sapiens
ctcttaaatcagaaa

SEQ ID NO: 392189 - DNA, 15 bp, Homo sapiens
cctcttaaatcagaa

SEQ ID NO: 392190 - DNA, 15 bp, Homo sapiens
ccctcttaaatcaga

SEQ ID NO: 392191 - DNA, 15 bp, Homo sapiens
tccctcttaaatcag

SEQ ID NO: 392192 - DNA, 15 bp, Homo sapiens
ttccctcttaaatca

SEQ ID NO: 392193 - DNA, 15 bp, Homo sapiens
cttccctcttaaatc

SEQ ID NO: 392194 - DNA, 15 bp, Homo sapiens
tcttccctcttaaat

SEQ ID NO: 392195 - DNA, 15 bp, Homo sapiens
ctcttccctcttaaa

SEQ ID NO: 392196 - DNA, 15 bp, Homo sapiens
actcttccctcttaa

SEQ ID NO: 392197 - DNA, 15 bp, Homo sapiens
cactcttccctctta

SEQ ID NO: 392198 - DNA, 15 bp, Homo sapiens
tcactcttccctctt

SEQ ID NO: 392199 - DNA, 15 bp, Homo sapiens
ttcactcttccctct

SEQ ID NO: 392200 - DNA, 15 bp, Homo sapiens
cttcactcttccctc

SEQ ID NO: 392201 - DNA, 15 bp, Homo sapiens
acttcactcttccct

SEQ ID NO: 392202 - DNA, 15 bp, Homo sapiens
cacttcactcttccc

SEQ ID NO: 392203 - DNA, 15 bp, Homo sapiens
ccacttcactcttcc

SEQ ID NO: 392204 - DNA, 15 bp, Homo sapiens
tccacttcactcttc

SEQ ID NO: 392205 - DNA, 15 bp, Homo sapiens
ttccacttcactctt

SEQ ID NO: 392206 - DNA, 15 bp, Homo sapiens
cttccacttcactct

SEQ ID NO: 392207 - DNA, 15 bp, Homo sapiens
gcttccacttcactc

SEQ ID NO: 392208 - DNA, 15 bp, Homo sapiens
ggcttccacttcact

SEQ ID NO: 392209 - DNA, 15 bp, Homo sapiens
tggcttccacttcac

SEQ ID NO: 392210 - DNA, 15 bp, Homo sapiens
atggcttccacttca

SEQ ID NO: 392211 - DNA, 15 bp, Homo sapiens
catggcttccacttc

SEQ ID NO: 392212 - DNA, 15 bp, Homo sapiens
gcatggcttccactt

SEQ ID NO: 392213 - DNA, 15 bp, Homo sapiens
agcatggcttccact

SEQ ID NO: 392214 - DNA, 15 bp, Homo sapiens
gagcatggcttccac

SEQ ID NO: 392215 - DNA, 15 bp, Homo sapiens
cgagcatggcttcca

SEQ ID NO: 392216 - DNA, 15 bp, Homo sapiens
acgagcatggcttcc

SEQ ID NO: 392217 - DNA, 15 bp, Homo sapiens
aacgagcatggcttc

SEQ ID NO: 392218 - DNA, 15 bp, Homo sapiens
gaacgagcatggctt

SEQ ID NO: 392219 - DNA, 15 bp, Homo sapiens
agaacgagcatggct

SEQ ID NO: 392220 - DNA, 15 bp, Homo sapiens
gagaacgagcatggc

SEQ ID NO: 392221 - DNA, 15 bp, Homo sapiens
ggagaacgagcatgg

SEQ ID NO: 392222 - DNA, 15 bp, Homo sapiens
aggagaacgagcatg

SEQ ID NO: 392223 - DNA, 15 bp, Homo sapiens
gaggagaacgagcat

SEQ ID NO: 392224 - DNA, 15 bp, Homo sapiens
agaggagaacgagca

SEQ ID NO: 392225 - DNA, 15 bp, Homo sapiens
cagaggagaacgagc

SEQ ID NO: 392226 - DNA, 15 bp, Homo sapiens
tcagaggagaacgag

SEQ ID NO: 392227 - DNA, 15 bp, Homo sapiens
ctcagaggagaacga

SEQ ID NO: 392228 - DNA, 15 bp, Homo sapiens
cctcagaggagaacg

SEQ ID NO: 392229 - DNA, 15 bp, Homo sapiens
tcctcagaggagaac

SEQ ID NO: 392230 - DNA, 15 bp, Homo sapiens
ctcctcagaggagaa

SEQ ID NO: 392231 - DNA, 15 bp, Homo sapiens
cctcctcagaggaga

SEQ ID NO: 392232 - DNA, 15 bp, Homo sapiens
ccctcctcagaggag

SEQ ID NO: 392233 - DNA, 15 bp, Homo sapiens
accctcctcagagga

SEQ ID NO: 392234 - DNA, 15 bp, Homo sapiens
taccctcctcagagg

SEQ ID NO: 392235 - DNA, 15 bp, Homo sapiens
ctaccctcctcagag

SEQ ID NO: 392236 - DNA, 15 bp, Homo sapiens
tctaccctcctcaga

SEQ ID NO: 392237 - DNA, 15 bp, Homo sapiens
ctctaccctcctcag

SEQ ID NO: 392238 - DNA, 15 bp, Homo sapiens
cctctaccctcctca

SEQ ID NO: 392239 - DNA, 15 bp, Homo sapiens
tcctctaccctcctc

SEQ ID NO: 392240 - DNA, 15 bp, Homo sapiens
gtcctctaccctcct

SEQ ID NO: 392241 - DNA, 15 bp, Homo sapiens
ggtcctctaccctcc

SEQ ID NO: 392242 - DNA, 15 bp, Homo sapiens
cggtcctctaccctc

SEQ ID NO: 392243 - DNA, 15 bp, Homo sapiens
acggtcctctaccct

SEQ ID NO: 392244 - DNA, 15 bp, Homo sapiens
cacggtcctctaccc

SEQ ID NO: 392245 - DNA, 15 bp, Homo sapiens
ccacggtcctctacc

SEQ ID NO: 392246 - DNA, 15 bp, Homo sapiens
tccacggtcctctac

SEQ ID NO: 392247 - DNA, 15 bp, Homo sapiens
gtccacggtcctcta

SEQ ID NO: 392248 - DNA, 15 bp, Homo sapiens
agtccacggtcctct

SEQ ID NO: 392249 - DNA, 15 bp, Homo sapiens
gagtccacggtcctc

SEQ ID NO: 392250 - DNA, 15 bp, Homo sapiens
cgagtccacggtcct

SEQ ID NO: 392251 - DNA, 15 bp, Homo sapiens
gcgagtccacggtcc

SEQ ID NO: 392252 - DNA, 15 bp, Homo sapiens
cgcgagtccacggtc

SEQ ID NO: 392253 - DNA, 15 bp, Homo sapiens
acgcgagtccacggt

SEQ ID NO: 392254 - DNA, 15 bp, Homo sapiens
cacgcgagtccacgg

SEQ ID NO: 392255 - DNA, 15 bp, Homo sapiens
ccacgcgagtccacg

SEQ ID NO: 392256 - DNA, 15 bp, Homo sapiens
gccacgcgagtccac

SEQ ID NO: 392257 - DNA, 15 bp, Homo sapiens
tgccacgcgagtcca

SEQ ID NO: 392258 - DNA, 15 bp, Homo sapiens
ctgccacgcgagtcc

SEQ ID NO: 392259 - DNA, 15 bp, Homo sapiens
cctgccacgcgagtc

SEQ ID NO: 392260 - DNA, 15 bp, Homo sapiens
gcctgccacgcgagt

SEQ ID NO: 392261 - DNA, 15 bp, Homo sapiens
tgcctgccacgcgag

SEQ ID NO: 392262 - DNA, 15 bp, Homo sapiens
gtgcctgccacgcga

SEQ ID NO: 392263 - DNA, 15 bp, Homo sapiens
agtgcctgccacgcg

SEQ ID NO: 392264 - DNA, 15 bp, Homo sapiens
tagtgcctgccacgc

SEQ ID NO: 392265 - DNA, 15 bp, Homo sapiens
ctagtgcctgccacg

SEQ ID NO: 392266 - DNA, 15 bp, Homo sapiens
actagtgcctgccac

SEQ ID NO: 392267 - DNA, 15 bp, Homo sapiens
gactagtgcctgcca

SEQ ID NO: 392268 - DNA, 15 bp, Homo sapiens
ggactagtgcctgcc

SEQ ID NO: 392269 - DNA, 15 bp, Homo sapiens
tggactagtgcctgc

SEQ ID NO: 392270 - DNA, 15 bp, Homo sapiens
ctggactagtgcctg

SEQ ID NO: 392271 - DNA, 15 bp, Homo sapiens
cctggactagtgcct

SEQ ID NO: 392272 - DNA, 15 bp, Homo sapiens
ccctggactagtgcc

SEQ ID NO: 392273 - DNA, 15 bp, Homo sapiens
tccctggactagtgc

SEQ ID NO: 392274 - DNA, 15 bp, Homo sapiens
ctccctggactagtg

SEQ ID NO: 392275 - DNA, 15 bp, Homo sapiens
cctccctggactagt

SEQ ID NO: 392276 - DNA, 15 bp, Homo sapiens
ccctccctggactag

SEQ ID NO: 392277 - DNA, 15 bp, Homo sapiens
tccctccctggacta

SEQ ID NO: 392278 - DNA, 15 bp, Homo sapiens
ttccctccctggact

SEQ ID NO: 392279 - DNA, 15 bp, Homo sapiens
cttccctccctggac

SEQ ID NO: 392280 - DNA, 15 bp, Homo sapiens
gcttccctccctgga

SEQ ID NO: 392281 - DNA, 15 bp, Homo sapiens
ggcttccctccctgg

SEQ ID NO: 392282 - DNA, 15 bp, Homo sapiens
tggcttccctccctg

SEQ ID NO: 392283 - DNA, 15 bp, Homo sapiens
atggcttccctccct

SEQ ID NO: 392284 - DNA, 15 bp, Homo sapiens
catggcttccctccc

SEQ ID NO: 392285 - DNA, 15 bp, Homo sapiens
tcatggcttccctcc

SEQ ID NO: 392286 - DNA, 15 bp, Homo sapiens
ttcatggcttccctc

SEQ ID NO: 392287 - DNA, 15 bp, Homo sapiens
tttcatggcttccct

SEQ ID NO: 392288 - DNA, 15 bp, Homo sapiens
ctttcatggcttccc

SEQ ID NO: 392289 - DNA, 15 bp, Homo sapiens
tctttcatggcttcc

SEQ ID NO: 392290 - DNA, 15 bp, Homo sapiens
ctctttcatggcttc

SEQ ID NO: 392291 - DNA, 15 bp, Homo sapiens
tctctttcatggctt

SEQ ID NO: 392292 - DNA, 15 bp, Homo sapiens
ttctctttcatggct

SEQ ID NO: 392293 - DNA, 15 bp, Homo sapiens
tttctctttcatggc

SEQ ID NO: 392294 - DNA, 15 bp, Homo sapiens
ctttctctttcatgg

SEQ ID NO: 392295 - DNA, 15 bp, Homo sapiens
tctttctctttcatg

SEQ ID NO: 392296 - DNA, 15 bp, Homo sapiens
ctctttctctttcat

SEQ ID NO: 392297 - DNA, 15 bp, Homo sapiens
tctctttctctttca

SEQ ID NO: 392298 - DNA, 15 bp, Homo sapiens
ctctctttctctttc

SEQ ID NO: 392299 - DNA, 15 bp, Homo sapiens
cctctctttctcttt

SEQ ID NO: 392300 - DNA, 15 bp, Homo sapiens
tcctctctttctctt

SEQ ID NO: 392301 - DNA, 15 bp, Homo sapiens
ctcctctctttctct

SEQ ID NO: 392302 - DNA, 15 bp, Homo sapiens
tctcctctctttctc

SEQ ID NO: 392303 - DNA, 15 bp, Homo sapiens
ctctcctctctttct

SEQ ID NO: 392304 - DNA, 15 bp, Homo sapiens
gctctcctctctttc

SEQ ID NO: 392305 - DNA, 15 bp, Homo sapiens
agctctcctctcttt

SEQ ID NO: 392306 - DNA, 15 bp, Homo sapiens
tagctctcctctctt

SEQ ID NO: 392307 - DNA, 15 bp, Homo sapiens
atagctctcctctct

SEQ ID NO: 392308 - DNA, 15 bp, Homo sapiens
catagctctcctctc

SEQ ID NO: 392309 - DNA, 15 bp, Homo sapiens
acatagctctcctct

SEQ ID NO: 392310 - DNA, 15 bp, Homo sapiens
gacatagctctcctc

SEQ ID NO: 392311 - DNA, 15 bp, Homo sapiens
agacatagctctcct

SEQ ID NO: 392312 - DNA, 15 bp, Homo sapiens
gagacatagctctcc

SEQ ID NO: 392313 - DNA, 15 bp, Homo sapiens
tgagacatagctctc

SEQ ID NO: 392314 - DNA, 15 bp, Homo sapiens
ctgagacatagctct

SEQ ID NO: 392315 - DNA, 15 bp, Homo sapiens
gctgagacatagctc

SEQ ID NO: 392316 - DNA, 15 bp, Homo sapiens
ggctgagacatagct

SEQ ID NO: 392317 - DNA, 15 bp, Homo sapiens
gggctgagacatagc

SEQ ID NO: 392318 - DNA, 15 bp, Homo sapiens
ggggctgagacatag

SEQ ID NO: 392319 - DNA, 15 bp, Homo sapiens
aggggctgagacata

SEQ ID NO: 392320 - DNA, 15 bp, Homo sapiens
caggggctgagacat

SEQ ID NO: 392321 - DNA, 15 bp, Homo sapiens
tcaggggctgagaca

SEQ ID NO: 392322 - DNA, 15 bp, Homo sapiens
ctcaggggctgagac

SEQ ID NO: 392323 - DNA, 15 bp, Homo sapiens
gctcaggggctgaga

SEQ ID NO: 392324 - DNA, 15 bp, Homo sapiens
agctcaggggctgag

SEQ ID NO: 392325 - DNA, 15 bp, Homo sapiens
cagctcaggggctga

SEQ ID NO: 392326 - DNA, 15 bp, Homo sapiens
acagctcaggggctg

SEQ ID NO: 392327 - DNA, 15 bp, Homo sapiens
gacagctcaggggct

SEQ ID NO: 392328 - DNA, 15 bp, Homo sapiens
ggacagctcaggggc

SEQ ID NO: 392329 - DNA, 15 bp, Homo sapiens
aggacagctcagggg

SEQ ID NO: 392330 - DNA, 15 bp, Homo sapiens
gaggacagctcaggg

SEQ ID NO: 392331 - DNA, 15 bp, Homo sapiens
agaggacagctcagg

SEQ ID NO: 392332 - DNA, 15 bp, Homo sapiens
tagaggacagctcag

SEQ ID NO: 392333 - DNA, 15 bp, Homo sapiens
atagaggacagctca

SEQ ID NO: 392334 - DNA, 15 bp, Homo sapiens
catagaggacagctc

SEQ ID NO: 392335 - DNA, 15 bp, Homo sapiens
tcatagaggacagct

SEQ ID NO: 392336 - DNA, 15 bp, Homo sapiens
ttcatagaggacagc

SEQ ID NO: 392337 - DNA, 15 bp, Homo sapiens
tttcatagaggacag

SEQ ID NO: 392338 - DNA, 15 bp, Homo sapiens
ttttcatagaggaca

SEQ ID NO: 392339 - DNA, 15 bp, Homo sapiens
cttttcatagaggac

SEQ ID NO: 392340 - DNA, 15 bp, Homo sapiens
gcttttcatagagga

SEQ ID NO: 392341 - DNA, 15 bp, Homo sapiens
agcttttcatagagg

SEQ ID NO: 392342 - DNA, 15 bp, Homo sapiens
aagcttttcatagag

SEQ ID NO: 392343 - DNA, 15 bp, Homo sapiens
gaagcttttcataga

SEQ ID NO: 392344 - DNA, 15 bp, Homo sapiens
tgaagcttttcatag

SEQ ID NO: 392345 - DNA, 15 bp, Homo sapiens
gtgaagcttttcata

SEQ ID NO: 392346 - DNA, 15 bp, Homo sapiens
tgtgaagcttttcat

SEQ ID NO: 392347 - DNA, 15 bp, Homo sapiens
gtgtgaagcttttca

SEQ ID NO: 392348 - DNA, 15 bp, Homo sapiens
agtgtgaagcttttc

SEQ ID NO: 392349 - DNA, 15 bp, Homo sapiens
gagtgtgaagctttt

SEQ ID NO: 392350 - DNA, 15 bp, Homo sapiens
agagtgtgaagcttt

SEQ ID NO: 392351 - DNA, 15 bp, Homo sapiens
cagagtgtgaagctt

SEQ ID NO: 392352 - DNA, 15 bp, Homo sapiens
acagagtgtgaagct

SEQ ID NO: 392353 - DNA, 15 bp, Homo sapiens
cacagagtgtgaagc

SEQ ID NO: 392354 - DNA, 15 bp, Homo sapiens
acacagagtgtgaag

SEQ ID NO: 392355 - DNA, 15 bp, Homo sapiens
gacacagagtgtgaa

SEQ ID NO: 392356 - DNA, 15 bp, Homo sapiens
ggacacagagtgtga

SEQ ID NO: 392357 - DNA, 15 bp, Homo sapiens
tggacacagagtgtg

SEQ ID NO: 392358 - DNA, 15 bp, Homo sapiens
ctggacacagagtgt

SEQ ID NO: 392359 - DNA, 15 bp, Homo sapiens
gctggacacagagtg

SEQ ID NO: 392360 - DNA, 15 bp, Homo sapiens
agctggacacagagt

SEQ ID NO: 392361 - DNA, 15 bp, Homo sapiens
cagctggacacagag

SEQ ID NO: 392362 - DNA, 15 bp, Homo sapiens
acagctggacacaga

SEQ ID NO: 392363 - DNA, 15 bp, Homo sapiens
gacagctggacacag

SEQ ID NO: 392364 - DNA, 15 bp, Homo sapiens
agacagctggacaca

SEQ ID NO: 392365 - DNA, 15 bp, Homo sapiens
gagacagctggacac

SEQ ID NO: 392366 - DNA, 15 bp, Homo sapiens
tgagacagctggaca

SEQ ID NO: 392367 - DNA, 15 bp, Homo sapiens
ttgagacagctggac

SEQ ID NO: 392368 - DNA, 15 bp, Homo sapiens
attgagacagctgga

SEQ ID NO: 392369 - DNA, 15 bp, Homo sapiens
gattgagacagctgg

SEQ ID NO: 392370 - DNA, 15 bp, Homo sapiens
tgattgagacagctg

SEQ ID NO: 392371 - DNA, 15 bp, Homo sapiens
ttgattgagacagct

SEQ ID NO: 392372 - DNA, 15 bp, Homo sapiens
cttgattgagacagc

SEQ ID NO: 392373 - DNA, 15 bp, Homo sapiens
acttgattgagacag

SEQ ID NO: 392374 - DNA, 15 bp, Homo sapiens
gacttgattgagaca

SEQ ID NO: 392375 - DNA, 15 bp, Homo sapiens
ggacttgattgagac

SEQ ID NO: 392376 - DNA, 15 bp, Homo sapiens
aggacttgattgaga

SEQ ID NO: 392377 - DNA, 15 bp, Homo sapiens
caggacttgattgag

SEQ ID NO: 392378 - DNA, 15 bp, Homo sapiens
ccaggacttgattga

SEQ ID NO: 392379 - DNA, 15 bp, Homo sapiens
tccaggacttgattg

SEQ ID NO: 392380 - DNA, 15 bp, Homo sapiens
ttccaggacttgatt

SEQ ID NO: 392381 - DNA, 15 bp, Homo sapiens
cttccaggacttgat

SEQ ID NO: 392382 - DNA, 15 bp, Homo sapiens
tcttccaggacttga

SEQ ID NO: 392383 - DNA, 15 bp, Homo sapiens
ttcttccaggacttg

SEQ ID NO: 392384 - DNA, 15 bp, Homo sapiens
attcttccaggactt

SEQ ID NO: 392385 - DNA, 15 bp, Homo sapiens
cattcttccaggact

SEQ ID NO: 392386 - DNA, 15 bp, Homo sapiens
ccattcttccaggac

SEQ ID NO: 392387 - DNA, 15 bp, Homo sapiens
accattcttccagga

SEQ ID NO: 392388 - DNA, 15 bp, Homo sapiens
gaccattcttccagg

SEQ ID NO: 392389 - DNA, 15 bp, Homo sapiens
agaccattcttccag

SEQ ID NO: 392390 - DNA, 15 bp, Homo sapiens
gagaccattcttcca

SEQ ID NO: 392391 - DNA, 15 bp, Homo sapiens
ggagaccattcttcc

SEQ ID NO: 392392 - DNA, 15 bp, Homo sapiens
aggagaccattcttc

SEQ ID NO: 392393 - DNA, 15 bp, Homo sapiens
aaggagaccattctt

SEQ ID NO: 392394 - DNA, 15 bp, Homo sapiens
gaaggagaccattct

SEQ ID NO: 392395 - DNA, 15 bp, Homo sapiens
tgaaggagaccattc

SEQ ID NO: 392396 - DNA, 15 bp, Homo sapiens
ctgaaggagaccatt

SEQ ID NO: 392397 - DNA, 15 bp, Homo sapiens
tctgaaggagaccat

SEQ ID NO: 392398 - DNA, 15 bp, Homo sapiens
ttctgaaggagacca

SEQ ID NO: 392399 - DNA, 15 bp, Homo sapiens
cttctgaaggagacc

SEQ ID NO: 392400 - DNA, 15 bp, Homo sapiens
gcttctgaaggagac

SEQ ID NO: 392401 - DNA, 15 bp, Homo sapiens
agcttctgaaggaga

SEQ ID NO: 392402 - DNA, 15 bp, Homo sapiens
aagcttctgaaggag

SEQ ID NO: 392403 - DNA, 15 bp, Homo sapiens
aaagcttctgaagga

SEQ ID NO: 392404 - DNA, 15 bp, Homo sapiens
taaagcttctgaagg

SEQ ID NO: 392405 - DNA, 15 bp, Homo sapiens
ataaagcttctgaag

SEQ ID NO: 392406 - DNA, 15 bp, Homo sapiens
aataaagcttctgaa

SEQ ID NO: 392407 - DNA, 15 bp, Homo sapiens
caataaagcttctga

SEQ ID NO: 392408 - DNA, 15 bp, Homo sapiens
gcaataaagcttctg

SEQ ID NO: 392409 - DNA, 15 bp, Homo sapiens
agcaataaagcttct

SEQ ID NO: 392410 - DNA, 15 bp, Homo sapiens
cagcaataaagcttc

SEQ ID NO: 392411 - DNA, 15 bp, Homo sapiens
ccagcaataaagctt

SEQ ID NO: 392412 - DNA, 15 bp, Homo sapiens
gccagcaataaagct

SEQ ID NO: 392413 - DNA, 15 bp, Homo sapiens
tgccagcaataaagc

SEQ ID NO: 392414 - DNA, 15 bp, Homo sapiens
gtgccagcaataaag

SEQ ID NO: 392415 - DNA, 15 bp, Homo sapiens
ggtgccagcaataaa

SEQ ID NO: 392416 - DNA, 15 bp, Homo sapiens
gggtgccagcaataa

SEQ ID NO: 392417 - DNA, 15 bp, Homo sapiens
tgggtgccagcaata

SEQ ID NO: 392418 - DNA, 15 bp, Homo sapiens
ctgggtgccagcaat

SEQ ID NO: 392419 - DNA, 15 bp, Homo sapiens
cctgggtgccagcaa

SEQ ID NO: 392420 - DNA, 15 bp, Homo sapiens
gcctgggtgccagca

SEQ ID NO: 392421 - DNA, 15 bp, Homo sapiens
ggcctgggtgccagc

SEQ ID NO: 392422 - DNA, 15 bp, Homo sapiens
tggcctgggtgccag

SEQ ID NO: 392423 - DNA, 15 bp, Homo sapiens
gtggcctgggtgcca

SEQ ID NO: 392424 - DNA, 15 bp, Homo sapiens
tgtggcctgggtgcc

SEQ ID NO: 392425 - DNA, 15 bp, Homo sapiens
atgtggcctgggtgc

SEQ ID NO: 392426 - DNA, 15 bp, Homo sapiens
aatgtggcctgggtg

SEQ ID NO: 392427 - DNA, 15 bp, Homo sapiens
caatgtggcctgggt

SEQ ID NO: 392428 - DNA, 15 bp, Homo sapiens
acaatgtggcctggg

SEQ ID NO: 392429 - DNA, 15 bp, Homo sapiens
gacaatgtggcctgg

SEQ ID NO: 392430 - DNA, 15 bp, Homo sapiens
ggacaatgtggcctg

SEQ ID NO: 392431 - DNA, 15 bp, Homo sapiens
aggacaatgtggcct

SEQ ID NO: 392432 - DNA, 15 bp, Homo sapiens
taggacaatgtggcc

SEQ ID NO: 392433 - DNA, 15 bp, Homo sapiens
ttaggacaatgtggc

SEQ ID NO: 392434 - DNA, 15 bp, Homo sapiens
cttaggacaatgtgg

SEQ ID NO: 392435 - DNA, 15 bp, Homo sapiens
tcttaggacaatgtg

SEQ ID NO: 392436 - DNA, 15 bp, Homo sapiens
ctcttaggacaatgt

SEQ ID NO: 392437 - DNA, 15 bp, Homo sapiens
cctcttaggacaatg

SEQ ID NO: 392438 - DNA, 15 bp, Homo sapiens
acctcttaggacaat

SEQ ID NO: 392439 - DNA, 15 bp, Homo sapiens
cacctcttaggacaa

SEQ ID NO: 392440 - DNA, 15 bp, Homo sapiens
acacctcttaggaca

SEQ ID NO: 392441 - DNA, 15 bp, Homo sapiens
cacacctcttaggac

SEQ ID NO: 392442 - DNA, 15 bp, Homo sapiens
tcacacctcttagga

SEQ ID NO: 392443 - DNA, 15 bp, Homo sapiens
gtcacacctcttagg

SEQ ID NO: 392444 - DNA, 15 bp, Homo sapiens
ggtcacacctcttag

SEQ ID NO: 392445 - DNA, 15 bp, Homo sapiens
gggtcacacctctta

SEQ ID NO: 392446 - DNA, 15 bp, Homo sapiens
tgggtcacacctctt

SEQ ID NO: 392447 - DNA, 15 bp, Homo sapiens
gtgggtcacacctct

SEQ ID NO: 392448 - DNA, 15 bp, Homo sapiens
ggtgggtcacacctc

SEQ ID NO: 392449 - DNA, 15 bp, Homo sapiens
tggtgggtcacacct

SEQ ID NO: 392450 - DNA, 15 bp, Homo sapiens
ctggtgggtcacacc

SEQ ID NO: 392451 - DNA, 15 bp, Homo sapiens
cctggtgggtcacac

SEQ ID NO: 392452 - DNA, 15 bp, Homo sapiens
acctggtgggtcaca

SEQ ID NO: 392453 - DNA, 15 bp, Homo sapiens
gacctggtgggtcac

SEQ ID NO: 392454 - DNA, 15 bp, Homo sapiens
tgacctggtgggtca

SEQ ID NO: 392455 - DNA, 15 bp, Homo sapiens
atgacctggtgggtc

SEQ ID NO: 392456 - DNA, 15 bp, Homo sapiens
catgacctggtgggt

SEQ ID NO: 392457 - DNA, 15 bp, Homo sapiens
tcatgacctggtggg

SEQ ID NO: 392458 - DNA, 15 bp, Homo sapiens
ctcatgacctggtgg

SEQ ID NO: 392459 - DNA, 15 bp, Homo sapiens
gctcatgacctggtg

SEQ ID NO: 392460 - DNA, 15 bp, Homo sapiens
ggctcatgacctggt

SEQ ID NO: 392461 - DNA, 15 bp, Homo sapiens
tggctcatgacctgg

SEQ ID NO: 392462 - DNA, 15 bp, Homo sapiens
atggctcatgacctg

SEQ ID NO: 392463 - DNA, 15 bp, Homo sapiens
catggctcatgacct

SEQ ID NO: 392464 - DNA, 15 bp, Homo sapiens
tcatggctcatgacc

SEQ ID NO: 392465 - DNA, 15 bp, Homo sapiens
ttcatggctcatgac

SEQ ID NO: 392466 - DNA, 15 bp, Homo sapiens
gttcatggctcatga

SEQ ID NO: 392467 - DNA, 15 bp, Homo sapiens
ggttcatggctcatg

SEQ ID NO: 392468 - DNA, 15 bp, Homo sapiens
gggttcatggctcat

SEQ ID NO: 392469 - DNA, 15 bp, Homo sapiens
agggttcatggctca

SEQ ID NO: 392470 - DNA, 15 bp, Homo sapiens
gagggttcatggctc

SEQ ID NO: 392471 - DNA, 15 bp, Homo sapiens
agagggttcatggct

SEQ ID NO: 392472 - DNA, 15 bp, Homo sapiens
tagagggttcatggc

SEQ ID NO: 392473 - DNA, 15 bp, Homo sapiens
ctagagggttcatgg

SEQ ID NO: 392474 - DNA, 15 bp, Homo sapiens
actagagggttcatg

SEQ ID NO: 392475 - DNA, 15 bp, Homo sapiens
tactagagggttcat

SEQ ID NO: 392476 - DNA, 15 bp, Homo sapiens
ctactagagggttca

SEQ ID NO: 392477 - DNA, 15 bp, Homo sapiens
cctactagagggttc

SEQ ID NO: 392478 - DNA, 15 bp, Homo sapiens
gcctactagagggtt

SEQ ID NO: 392479 - DNA, 15 bp, Homo sapiens
tgcctactagagggt

SEQ ID NO: 392480 - DNA, 15 bp, Homo sapiens
ctgcctactagaggg

SEQ ID NO: 392481 - DNA, 15 bp, Homo sapiens
tctgcctactagagg

SEQ ID NO: 392482 - DNA, 15 bp, Homo sapiens
atctgcctactagag

SEQ ID NO: 392483 - DNA, 15 bp, Homo sapiens
gatctgcctactaga

SEQ ID NO: 392484 - DNA, 15 bp, Homo sapiens
ggatctgcctactag

SEQ ID NO: 392485 - DNA, 15 bp, Homo sapiens
aggatctgcctacta

SEQ ID NO: 392486 - DNA, 15 bp, Homo sapiens
gaggatctgcctact

SEQ ID NO: 392487 - DNA, 15 bp, Homo sapiens
ggaggatctgcctac

SEQ ID NO: 392488 - DNA, 15 bp, Homo sapiens
tggaggatctgccta

SEQ ID NO: 392489 - DNA, 15 bp, Homo sapiens
ttggaggatctgcct

SEQ ID NO: 392490 - DNA, 15 bp, Homo sapiens
gttggaggatctgcc

SEQ ID NO: 392491 - DNA, 15 bp, Homo sapiens
tgttggaggatctgc

SEQ ID NO: 392492 - DNA, 15 bp, Homo sapiens
ctgttggaggatctg

SEQ ID NO: 392493 - DNA, 15 bp, Homo sapiens
actgttggaggatct

SEQ ID NO: 392494 - DNA, 15 bp, Homo sapiens
aactgttggaggatc

SEQ ID NO: 392495 - DNA, 15 bp, Homo sapiens
aaactgttggaggat

SEQ ID NO: 392496 - DNA, 15 bp, Homo sapiens
taaactgttggagga

SEQ ID NO: 392497 - DNA, 15 bp, Homo sapiens
ttaaactgttggagg

SEQ ID NO: 392498 - DNA, 15 bp, Homo sapiens
cttaaactgttggag

SEQ ID NO: 392499 - DNA, 15 bp, Homo sapiens
acttaaactgttgga

SEQ ID NO: 392500 - DNA, 15 bp, Homo sapiens
tacttaaactgttgg

SEQ ID NO: 392501 - DNA, 15 bp, Homo sapiens
atacttaaactgttg

SEQ ID NO: 392502 - DNA, 15 bp, Homo sapiens
aatacttaaactgtt

SEQ ID NO: 392503 - DNA, 15 bp, Homo sapiens
aaatacttaaactgt

SEQ ID NO: 392504 - DNA, 15 bp, Homo sapiens
aaaatacttaaactg

SEQ ID NO: 392505 - DNA, 15 bp, Homo sapiens
caaaatacttaaact

SEQ ID NO: 392506 - DNA, 15 bp, Homo sapiens
acaaaatacttaaac

SEQ ID NO: 392507 - DNA, 15 bp, Homo sapiens
cacaaaatacttaaa

SEQ ID NO: 392508 - DNA, 15 bp, Homo sapiens
acacaaaatacttaa

SEQ ID NO: 392509 - DNA, 15 bp, Homo sapiens
cacacaaaatactta

SEQ ID NO: 392510 - DNA, 15 bp, Homo sapiens
acacacaaaatactt

SEQ ID NO: 392511 - DNA, 15 bp, Homo sapiens
cacacacaaaatact

SEQ ID NO: 392512 - DNA, 15 bp, Homo sapiens
acacacacaaaatac

SEQ ID NO: 392513 - DNA, 15 bp, Homo sapiens
cacacacacaaaata

SEQ ID NO: 392514 - DNA, 15 bp, Homo sapiens
acacacacacaaaat

SEQ ID NO: 392515 - DNA, 15 bp, Homo sapiens
taacacacacacaca

SEQ ID NO: 392516 - DNA, 15 bp, Homo sapiens
ttaacacacacacac

SEQ ID NO: 392517 - DNA, 15 bp, Homo sapiens
attaacacacacaca

SEQ ID NO: 392518 - DNA, 15 bp, Homo sapiens
cattaacacacacac

SEQ ID NO: 392519 - DNA, 15 bp, Homo sapiens
acattaacacacaca

SEQ ID NO: 392520 - DNA, 15 bp, Homo sapiens
cacattaacacacac

SEQ ID NO: 392521 - DNA, 15 bp, Homo sapiens
acacattaacacaca

SEQ ID NO: 392522 - DNA, 15 bp, Homo sapiens
cacacattaacacac

SEQ ID NO: 392523 - DNA, 15 bp, Homo sapiens
acacacattaacaca

SEQ ID NO: 392524 - DNA, 15 bp, Homo sapiens
cacacacattaacac

SEQ ID NO: 392525 - DNA, 15 bp, Homo sapiens
acacacacattaaca

SEQ ID NO: 392526 - DNA, 15 bp, Homo sapiens
cacacacacattaac

SEQ ID NO: 392527 - DNA, 15 bp, Homo sapiens
acacacacacattaa

SEQ ID NO: 392528 - DNA, 15 bp, Homo sapiens
cacacacacacatta

SEQ ID NO: 392529 - DNA, 15 bp, Homo sapiens
acacacacacacatt

SEQ ID NO: 392530 - DNA, 15 bp, Homo sapiens
tacacacacacacat

SEQ ID NO: 392531 - DNA, 15 bp, Homo sapiens
atacacacacacaca

SEQ ID NO: 392532 - DNA, 15 bp, Homo sapiens
gatacacacacacac

SEQ ID NO: 392533 - DNA, 15 bp, Homo sapiens
agatacacacacaca

SEQ ID NO: 392534 - DNA, 15 bp, Homo sapiens
cagatacacacacac

SEQ ID NO: 392535 - DNA, 15 bp, Homo sapiens
acagatacacacaca

SEQ ID NO: 392536 - DNA, 15 bp, Homo sapiens
gacagatacacacac

SEQ ID NO: 392537 - DNA, 15 bp, Homo sapiens
agacagatacacaca

SEQ ID NO: 392538 - DNA, 15 bp, Homo sapiens
tagacagatacacac

SEQ ID NO: 392539 - DNA, 15 bp, Homo sapiens
gtagacagatacaca

SEQ ID NO: 392540 - DNA, 15 bp, Homo sapiens
agtagacagatacac

SEQ ID NO: 392541 - DNA, 15 bp, Homo sapiens
aagtagacagataca

SEQ ID NO: 392542 - DNA, 15 bp, Homo sapiens
taagtagacagatac

SEQ ID NO: 392543 - DNA, 15 bp, Homo sapiens
gtaagtagacagata

SEQ ID NO: 392544 - DNA, 15 bp, Homo sapiens
ggtaagtagacagat

SEQ ID NO: 392545 - DNA, 15 bp, Homo sapiens
tggtaagtagacaga

SEQ ID NO: 392546 - DNA, 15 bp, Homo sapiens
gtggtaagtagacag

SEQ ID NO: 392547 - DNA, 15 bp, Homo sapiens
ggtggtaagtagaca

SEQ ID NO: 392548 - DNA, 15 bp, Homo sapiens
tggtggtaagtagac

SEQ ID NO: 392549 - DNA, 15 bp, Homo sapiens
ctggtggtaagtaga

SEQ ID NO: 392550 - DNA, 15 bp, Homo sapiens
cctggtggtaagtag

SEQ ID NO: 392551 - DNA, 15 bp, Homo sapiens
gcctggtggtaagta

SEQ ID NO: 392552 - DNA, 15 bp, Homo sapiens
agcctggtggtaagt

SEQ ID NO: 392553 - DNA, 15 bp, Homo sapiens
cagcctggtggtaag

SEQ ID NO: 392554 - DNA, 15 bp, Homo sapiens
tcagcctggtggtaa

SEQ ID NO: 392555 - DNA, 15 bp, Homo sapiens
ctcagcctggtggta

SEQ ID NO: 392556 - DNA, 15 bp, Homo sapiens
actcagcctggtggt

SEQ ID NO: 392557 - DNA, 15 bp, Homo sapiens
aactcagcctggtgg

SEQ ID NO: 392558 - DNA, 15 bp, Homo sapiens
taactcagcctggtg

SEQ ID NO: 392559 - DNA, 15 bp, Homo sapiens
gtaactcagcctggt

SEQ ID NO: 392560 - DNA, 15 bp, Homo sapiens
agtaactcagcctgg

SEQ ID NO: 392561 - DNA, 15 bp, Homo sapiens
cagtaactcagcctg

SEQ ID NO: 392562 - DNA, 15 bp, Homo sapiens
ccagtaactcagcct

SEQ ID NO: 392563 - DNA, 15 bp, Homo sapiens
cccagtaactcagcc

SEQ ID NO: 392564 - DNA, 15 bp, Homo sapiens
ccccagtaactcagc

SEQ ID NO: 392565 - DNA, 15 bp, Homo sapiens
cccccagtaactcag

SEQ ID NO: 392566 - DNA, 15 bp, Homo sapiens
acccccagtaactca

SEQ ID NO: 392567 - DNA, 15 bp, Homo sapiens
gacccccagtaactc

SEQ ID NO: 392568 - DNA, 15 bp, Homo sapiens
agacccccagtaact

SEQ ID NO: 392569 - DNA, 15 bp, Homo sapiens
cagacccccagtaac

SEQ ID NO: 392570 - DNA, 15 bp, Homo sapiens
gcagacccccagtaa

SEQ ID NO: 392571 - DNA, 15 bp, Homo sapiens
ggcagacccccagta

SEQ ID NO: 392572 - DNA, 15 bp, Homo sapiens
aggcagacccccagt

SEQ ID NO: 392573 - DNA, 15 bp, Homo sapiens
taggcagacccccag

SEQ ID NO: 392574 - DNA, 15 bp, Homo sapiens
ctaggcagaccccca

SEQ ID NO: 392575 - DNA, 15 bp, Homo sapiens
tctaggcagaccccc

SEQ ID NO: 392576 - DNA, 15 bp, Homo sapiens
ttctaggcagacccc

SEQ ID NO: 392577 - DNA, 15 bp, Homo sapiens
tttctaggcagaccc

SEQ ID NO: 392578 - DNA, 15 bp, Homo sapiens
ctttctaggcagacc

SEQ ID NO: 392579 - DNA, 15 bp, Homo sapiens
cctttctaggcagac

SEQ ID NO: 392580 - DNA, 15 bp, Homo sapiens
tcctttctaggcaga

SEQ ID NO: 392581 - DNA, 15 bp, Homo sapiens
ttcctttctaggcag

SEQ ID NO: 392582 - DNA, 15 bp, Homo sapiens
gttcctttctaggca

SEQ ID NO: 392583 - DNA, 15 bp, Homo sapiens
tgttcctttctaggc

SEQ ID NO: 392584 - DNA, 15 bp, Homo sapiens
ctgttcctttctagg

SEQ ID NO: 392585 - DNA, 15 bp, Homo sapiens
actgttcctttctag

SEQ ID NO: 392586 - DNA, 15 bp, Homo sapiens
cactgttcctttcta

SEQ ID NO: 392587 - DNA, 15 bp, Homo sapiens
acactgttcctttct

SEQ ID NO: 392588 - DNA, 15 bp, Homo sapiens
gacactgttcctttc

SEQ ID NO: 392589 - DNA, 15 bp, Homo sapiens
ggacactgttccttt

SEQ ID NO: 392590 - DNA, 15 bp, Homo sapiens
gggacactgttcctt

SEQ ID NO: 392591 - DNA, 15 bp, Homo sapiens
agggacactgttcct

SEQ ID NO: 392592 - DNA, 15 bp, Homo sapiens
cagggacactgttcc

SEQ ID NO: 392593 - DNA, 15 bp, Homo sapiens
acagggacactgttc

SEQ ID NO: 392594 - DNA, 15 bp, Homo sapiens
tacagggacactgtt

SEQ ID NO: 392595 - DNA, 15 bp, Homo sapiens
ttacagggacactgt

SEQ ID NO: 392596 - DNA, 15 bp, Homo sapiens
tttacagggacactg

SEQ ID NO: 392597 - DNA, 15 bp, Homo sapiens
gtttacagggacact

SEQ ID NO: 392598 - DNA, 15 bp, Homo sapiens
tgtttacagggacac

SEQ ID NO: 392599 - DNA, 15 bp, Homo sapiens
ctgtttacagggaca

SEQ ID NO: 392600 - DNA, 15 bp, Homo sapiens
cctgtttacagggac

SEQ ID NO: 392601 - DNA, 15 bp, Homo sapiens
tcctgtttacaggga

SEQ ID NO: 392602 - DNA, 15 bp, Homo sapiens
ctcctgtttacaggg

SEQ ID NO: 392603 - DNA, 15 bp, Homo sapiens
cctcctgtttacagg

SEQ ID NO: 392604 - DNA, 15 bp, Homo sapiens
tcctcctgtttacag

SEQ ID NO: 392605 - DNA, 15 bp, Homo sapiens
ctcctcctgtttaca

SEQ ID NO: 392606 - DNA, 15 bp, Homo sapiens
cctcctcctgtttac

SEQ ID NO: 392607 - DNA, 15 bp, Homo sapiens
gcctcctcctgttta

SEQ ID NO: 392608 - DNA, 15 bp, Homo sapiens
agcctcctcctgttt

SEQ ID NO: 392609 - DNA, 15 bp, Homo sapiens
gagcctcctcctgtt

SEQ ID NO: 392610 - DNA, 15 bp, Homo sapiens
ggagcctcctcctgt

SEQ ID NO: 392611 - DNA, 15 bp, Homo sapiens
gggagcctcctcctg

SEQ ID NO: 392612 - DNA, 15 bp, Homo sapiens
ggggagcctcctcct

SEQ ID NO: 392613 - DNA, 15 bp, Homo sapiens
tggggagcctcctcc

SEQ ID NO: 392614 - DNA, 15 bp, Homo sapiens
ctggggagcctcctc

SEQ ID NO: 392615 - DNA, 15 bp, Homo sapiens
tctggggagcctcct

SEQ ID NO: 392616 - DNA, 15 bp, Homo sapiens
ttctggggagcctcc

SEQ ID NO: 392617 - DNA, 15 bp, Homo sapiens
gttctggggagcctc

SEQ ID NO: 392618 - DNA, 15 bp, Homo sapiens
tgttctggggagcct

SEQ ID NO: 392619 - DNA, 15 bp, Homo sapiens
atgttctggggagcc

SEQ ID NO: 392620 - DNA, 15 bp, Homo sapiens
gatgttctggggagc

SEQ ID NO: 392621 - DNA, 15 bp, Homo sapiens
tgatgttctggggag

SEQ ID NO: 392622 - DNA, 15 bp, Homo sapiens
ctgatgttctgggga

SEQ ID NO: 392623 - DNA, 15 bp, Homo sapiens
gctgatgttctgggg

SEQ ID NO: 392624 - DNA, 15 bp, Homo sapiens
tgctgatgttctggg

SEQ ID NO: 392625 - DNA, 15 bp, Homo sapiens
atgctgatgttctgg

SEQ ID NO: 392626 - DNA, 15 bp, Homo sapiens
gatgctgatgttctg

SEQ ID NO: 392627 - DNA, 15 bp, Homo sapiens
ggatgctgatgttct

SEQ ID NO: 392628 - DNA, 15 bp, Homo sapiens
tggatgctgatgttc

SEQ ID NO: 392629 - DNA, 15 bp, Homo sapiens
ttggatgctgatgtt

SEQ ID NO: 392630 - DNA, 15 bp, Homo sapiens
gttggatgctgatgt

SEQ ID NO: 392631 - DNA, 15 bp, Homo sapiens
tgttggatgctgatg

SEQ ID NO: 392632 - DNA, 15 bp, Homo sapiens
atgttggatgctgat

SEQ ID NO: 392633 - DNA, 15 bp, Homo sapiens
tatgttggatgctga

SEQ ID NO: 392634 - DNA, 15 bp, Homo sapiens
ttatgttggatgctg

SEQ ID NO: 392635 - DNA, 15 bp, Homo sapiens
tttatgttggatgct

SEQ ID NO: 392636 - DNA, 15 bp, Homo sapiens
gtttatgttggatgc

SEQ ID NO: 392637 - DNA, 15 bp, Homo sapiens
tgtttatgttggatg

SEQ ID NO: 392638 - DNA, 15 bp, Homo sapiens
gtgtttatgttggat

SEQ ID NO: 392639 - DNA, 15 bp, Homo sapiens
cgtgtttatgttgga

SEQ ID NO: 392640 - DNA, 15 bp, Homo sapiens
gcgtgtttatgttgg

SEQ ID NO: 392641 - DNA, 15 bp, Homo sapiens
agcgtgtttatgttg

SEQ ID NO: 392642 - DNA, 15 bp, Homo sapiens
cagcgtgtttatgtt

SEQ ID NO: 392643 - DNA, 15 bp, Homo sapiens
tcagcgtgtttatgt

SEQ ID NO: 392644 - DNA, 15 bp, Homo sapiens
ttcagcgtgtttatg

SEQ ID NO: 392645 - DNA, 15 bp, Homo sapiens
attcagcgtgtttat

SEQ ID NO: 392646 - DNA, 15 bp, Homo sapiens
aattcagcgtgttta

SEQ ID NO: 392647 - DNA, 15 bp, Homo sapiens
taattcagcgtgttt

SEQ ID NO: 392648 - DNA, 15 bp, Homo sapiens
ctaattcagcgtgtt

SEQ ID NO: 392649 - DNA, 15 bp, Homo sapiens
cctaattcagcgtgt

SEQ ID NO: 392650 - DNA, 15 bp, Homo sapiens
tcctaattcagcgtg

SEQ ID NO: 392651 - DNA, 15 bp, Homo sapiens
gtcctaattcagcgt

SEQ ID NO: 392652 - DNA, 15 bp, Homo sapiens
tgtcctaattcagcg

SEQ ID NO: 392653 - DNA, 15 bp, Homo sapiens
ttgtcctaattcagc

SEQ ID NO: 392654 - DNA, 15 bp, Homo sapiens
attgtcctaattcag

SEQ ID NO: 392655 - DNA, 15 bp, Homo sapiens
tattgtcctaattca

SEQ ID NO: 392656 - DNA, 15 bp, Homo sapiens
gtattgtcctaattc

SEQ ID NO: 392657 - DNA, 15 bp, Homo sapiens
tgtattgtcctaatt

SEQ ID NO: 392658 - DNA, 15 bp, Homo sapiens
atgtattgtcctaat

SEQ ID NO: 392659 - DNA, 15 bp, Homo sapiens
gatgtattgtcctaa

SEQ ID NO: 392660 - DNA, 15 bp, Homo sapiens
ggatgtattgtccta

SEQ ID NO: 392661 - DNA, 15 bp, Homo sapiens
aggatgtattgtcct

SEQ ID NO: 392662 - DNA, 15 bp, Homo sapiens
caggatgtattgtcc

SEQ ID NO: 392663 - DNA, 15 bp, Homo sapiens
ccaggatgtattgtc

SEQ ID NO: 392664 - DNA, 15 bp, Homo sapiens
gccaggatgtattgt

SEQ ID NO: 392665 - DNA, 15 bp, Homo sapiens
agccaggatgtattg

SEQ ID NO: 392666 - DNA, 15 bp, Homo sapiens
gagccaggatgtatt

SEQ ID NO: 392667 - DNA, 15 bp, Homo sapiens
ggagccaggatgtat

SEQ ID NO: 392668 - DNA, 15 bp, Homo sapiens
aggagccaggatgta

SEQ ID NO: 392669 - DNA, 15 bp, Homo sapiens
aaggagccaggatgt

SEQ ID NO: 392670 - DNA, 15 bp, Homo sapiens
aaaggagccaggatg

SEQ ID NO: 392671 - DNA, 15 bp, Homo sapiens
caaaggagccaggat

SEQ ID NO: 392672 - DNA, 15 bp, Homo sapiens
tcaaaggagccagga

SEQ ID NO: 392673 - DNA, 15 bp, Homo sapiens
ctcaaaggagccagg

SEQ ID NO: 392674 - DNA, 15 bp, Homo sapiens
cctcaaaggagccag

SEQ ID NO: 392675 - DNA, 15 bp, Homo sapiens
tcctcaaaggagcca

SEQ ID NO: 392676 - DNA, 15 bp, Homo sapiens
ctcctcaaaggagcc

SEQ ID NO: 392677 - DNA, 15 bp, Homo sapiens
cctcctcaaaggagc

SEQ ID NO: 392678 - DNA, 15 bp, Homo sapiens
ccctcctcaaaggag

SEQ ID NO: 392679 - DNA, 15 bp, Homo sapiens
cccctcctcaaagga

SEQ ID NO: 392680 - DNA, 15 bp, Homo sapiens
gcccctcctcaaagg

SEQ ID NO: 392681 - DNA, 15 bp, Homo sapiens
agcccctcctcaaag

SEQ ID NO: 392682 - DNA, 15 bp, Homo sapiens
cagcccctcctcaaa

SEQ ID NO: 392683 - DNA, 15 bp, Homo sapiens
acagcccctcctcaa

SEQ ID NO: 392684 - DNA, 15 bp, Homo sapiens
aacagcccctcctca

SEQ ID NO: 392685 - DNA, 15 bp, Homo sapiens
gaacagcccctcctc

SEQ ID NO: 392686 - DNA, 15 bp, Homo sapiens
ggaacagcccctcct

SEQ ID NO: 392687 - DNA, 15 bp, Homo sapiens
gggaacagcccctcc

SEQ ID NO: 392688 - DNA, 15 bp, Homo sapiens
tgggaacagcccctc

SEQ ID NO: 392689 - DNA, 15 bp, Homo sapiens
ttgggaacagcccct

SEQ ID NO: 392690 - DNA, 15 bp, Homo sapiens
tttgggaacagcccc

SEQ ID NO: 392691 - DNA, 15 bp, Homo sapiens
ctttgggaacagccc

SEQ ID NO: 392692 - DNA, 15 bp, Homo sapiens
gctttgggaacagcc

SEQ ID NO: 392693 - DNA, 15 bp, Homo sapiens
ggctttgggaacagc

SEQ ID NO: 392694 - DNA, 15 bp, Homo sapiens
gggctttgggaacag

SEQ ID NO: 392695 - DNA, 15 bp, Homo sapiens
agggctttgggaaca

SEQ ID NO: 392696 - DNA, 15 bp, Homo sapiens
cagggctttgggaac

SEQ ID NO: 392697 - DNA, 15 bp, Homo sapiens
ccagggctttgggaa

SEQ ID NO: 392698 - DNA, 15 bp, Homo sapiens
gccagggctttggga

SEQ ID NO: 392699 - DNA, 15 bp, Homo sapiens
tgccagggctttggg

SEQ ID NO: 392700 - DNA, 15 bp, Homo sapiens
ctgccagggctttgg

SEQ ID NO: 392701 - DNA, 15 bp, Homo sapiens
cctgccagggctttg

SEQ ID NO: 392702 - DNA, 15 bp, Homo sapiens
tcctgccagggcttt

SEQ ID NO: 392703 - DNA, 15 bp, Homo sapiens
atcctgccagggctt

SEQ ID NO: 392704 - DNA, 15 bp, Homo sapiens
tatcctgccagggct

SEQ ID NO: 392705 - DNA, 15 bp, Homo sapiens
ctatcctgccagggc

SEQ ID NO: 392706 - DNA, 15 bp, Homo sapiens
tctatcctgccaggg

SEQ ID NO: 392707 - DNA, 15 bp, Homo sapiens
ttctatcctgccagg

SEQ ID NO: 392708 - DNA, 15 bp, Homo sapiens
cttctatcctgccag

SEQ ID NO: 392709 - DNA, 15 bp, Homo sapiens
tcttctatcctgcca

SEQ ID NO: 392710 - DNA, 15 bp, Homo sapiens
ctcttctatcctgcc

SEQ ID NO: 392711 - DNA, 15 bp, Homo sapiens
cctcttctatcctgc

SEQ ID NO: 392712 - DNA, 15 bp, Homo sapiens
ccctcttctatcctg

SEQ ID NO: 392713 - DNA, 15 bp, Homo sapiens
cccctcttctatcct

SEQ ID NO: 392714 - DNA, 15 bp, Homo sapiens
tcccctcttctatcc

SEQ ID NO: 392715 - DNA, 15 bp, Homo sapiens
gtcccctcttctatc

SEQ ID NO: 392716 - DNA, 15 bp, Homo sapiens
tgtcccctcttctat

SEQ ID NO: 392717 - DNA, 15 bp, Homo sapiens
ctgtcccctcttcta

SEQ ID NO: 392718 - DNA, 15 bp, Homo sapiens
actgtcccctcttct

SEQ ID NO: 392719 - DNA, 15 bp, Homo sapiens
cactgtcccctcttc

SEQ ID NO: 392720 - DNA, 15 bp, Homo sapiens
ccactgtcccctctt

SEQ ID NO: 392721 - DNA, 15 bp, Homo sapiens
cccactgtcccctct

SEQ ID NO: 392722 - DNA, 15 bp, Homo sapiens
ccccactgtcccctc

SEQ ID NO: 392723 - DNA, 15 bp, Homo sapiens
cccccactgtcccct

SEQ ID NO: 392724 - DNA, 15 bp, Homo sapiens
gcccccactgtcccc

SEQ ID NO: 392725 - DNA, 15 bp, Homo sapiens
agcccccactgtccc

SEQ ID NO: 392726 - DNA, 15 bp, Homo sapiens
tagcccccactgtcc

SEQ ID NO: 392727 - DNA, 15 bp, Homo sapiens
ctagcccccactgtc

SEQ ID NO: 392728 - DNA, 15 bp, Homo sapiens
tctagcccccactgt

SEQ ID NO: 392729 - DNA, 15 bp, Homo sapiens
ttctagcccccactg

SEQ ID NO: 392730 - DNA, 15 bp, Homo sapiens
tttctagcccccact

SEQ ID NO: 392731 - DNA, 15 bp, Homo sapiens
ttttctagcccccac

SEQ ID NO: 392732 - DNA, 15 bp, Homo sapiens
cttttctagccccca

SEQ ID NO: 392733 - DNA, 15 bp, Homo sapiens
ccttttctagccccc

SEQ ID NO: 392734 - DNA, 15 bp, Homo sapiens
tccttttctagcccc

SEQ ID NO: 392735 - DNA, 15 bp, Homo sapiens
ctccttttctagccc

SEQ ID NO: 392736 - DNA, 15 bp, Homo sapiens
actccttttctagcc

SEQ ID NO: 392737 - DNA, 15 bp, Homo sapiens
tactccttttctagc

SEQ ID NO: 392738 - DNA, 15 bp, Homo sapiens
ctactccttttctag

SEQ ID NO: 392739 - DNA, 15 bp, Homo sapiens
cctactccttttcta

SEQ ID NO: 392740 - DNA, 15 bp, Homo sapiens
acctactccttttct

SEQ ID NO: 392741 - DNA, 15 bp, Homo sapiens
tacctactccttttc

SEQ ID NO: 392742 - DNA, 15 bp, Homo sapiens
atacctactcctttt

SEQ ID NO: 392743 - DNA, 15 bp, Homo sapiens
gatacctactccttt

SEQ ID NO: 392744 - DNA, 15 bp, Homo sapiens
tgatacctactcctt

SEQ ID NO: 392745 - DNA, 15 bp, Homo sapiens
ctgatacctactcct

SEQ ID NO: 392746 - DNA, 15 bp, Homo sapiens
gctgatacctactcc

SEQ ID NO: 392747 - DNA, 15 bp, Homo sapiens
tgctgatacctactc

SEQ ID NO: 392748 - DNA, 15 bp, Homo sapiens
ctgctgatacctact

SEQ ID NO: 392749 - DNA, 15 bp, Homo sapiens
cctgctgatacctac

SEQ ID NO: 392750 - DNA, 15 bp, Homo sapiens
tcctgctgataccta

SEQ ID NO: 392751 - DNA, 15 bp, Homo sapiens
ctcctgctgatacct

SEQ ID NO: 392752 - DNA, 15 bp, Homo sapiens
actcctgctgatacc

SEQ ID NO: 392753 - DNA, 15 bp, Homo sapiens
aactcctgctgatac

SEQ ID NO: 392754 - DNA, 15 bp, Homo sapiens
taactcctgctgata

SEQ ID NO: 392755 - DNA, 15 bp, Homo sapiens
gtaactcctgctgat

SEQ ID NO: 392756 - DNA, 15 bp, Homo sapiens
agtaactcctgctga

SEQ ID NO: 392757 - DNA, 15 bp, Homo sapiens
aagtaactcctgctg

SEQ ID NO: 392758 - DNA, 15 bp, Homo sapiens
caagtaactcctgct

SEQ ID NO: 392759 - DNA, 15 bp, Homo sapiens
tcaagtaactcctgc

SEQ ID NO: 392760 - DNA, 15 bp, Homo sapiens
ctcaagtaactcctg

SEQ ID NO: 392761 - DNA, 15 bp, Homo sapiens
actcaagtaactcct

SEQ ID NO: 392762 - DNA, 15 bp, Homo sapiens
aactcaagtaactcc

SEQ ID NO: 392763 - DNA, 15 bp, Homo sapiens
aaactcaagtaactc

SEQ ID NO: 392764 - DNA, 15 bp, Homo sapiens
aaaactcaagtaact

SEQ ID NO: 392765 - DNA, 15 bp, Homo sapiens
gaaaactcaagtaac

SEQ ID NO: 392766 - DNA, 15 bp, Homo sapiens
agaaaactcaagtaa

SEQ ID NO: 392767 - DNA, 15 bp, Homo sapiens
gagaaaactcaagta

SEQ ID NO: 392768 - DNA, 15 bp, Homo sapiens
ggagaaaactcaagt

SEQ ID NO: 392769 - DNA, 15 bp, Homo sapiens
aggagaaaactcaag

SEQ ID NO: 392770 - DNA, 15 bp, Homo sapiens
gaggagaaaactcaa

SEQ ID NO: 392771 - DNA, 15 bp, Homo sapiens
agaggagaaaactca

SEQ ID NO: 392772 - DNA, 15 bp, Homo sapiens
cagaggagaaaactc

SEQ ID NO: 392773 - DNA, 15 bp, Homo sapiens
tcagaggagaaaact

SEQ ID NO: 392774 - DNA, 15 bp, Homo sapiens
gtcagaggagaaaac

SEQ ID NO: 392775 - DNA, 15 bp, Homo sapiens
agtcagaggagaaaa

SEQ ID NO: 392776 - DNA, 15 bp, Homo sapiens
cagtcagaggagaaa

SEQ ID NO: 392777 - DNA, 15 bp, Homo sapiens
acagtcagaggagaa

SEQ ID NO: 392778 - DNA, 15 bp, Homo sapiens
tacagtcagaggaga

SEQ ID NO: 392779 - DNA, 15 bp, Homo sapiens
ttacagtcagaggag

SEQ ID NO: 392780 - DNA, 15 bp, Homo sapiens
attacagtcagagga

SEQ ID NO: 392781 - DNA, 15 bp, Homo sapiens
aattacagtcagagg

SEQ ID NO: 392782 - DNA, 15 bp, Homo sapiens
caattacagtcagag

SEQ ID NO: 392783 - DNA, 15 bp, Homo sapiens
ccaattacagtcaga

SEQ ID NO: 392784 - DNA, 15 bp, Homo sapiens
accaattacagtcag

SEQ ID NO: 392785 - DNA, 15 bp, Homo sapiens
aaccaattacagtca

SEQ ID NO: 392786 - DNA, 15 bp, Homo sapiens
aaaccaattacagtc

SEQ ID NO: 392787 - DNA, 15 bp, Homo sapiens
taaaccaattacagt

SEQ ID NO: 392788 - DNA, 15 bp, Homo sapiens
ttaaaccaattacag

SEQ ID NO: 392789 - DNA, 15 bp, Homo sapiens
tttaaaccaattaca

SEQ ID NO: 392790 - DNA, 15 bp, Homo sapiens
ctttaaaccaattac

SEQ ID NO: 392791 - DNA, 15 bp, Homo sapiens
actttaaaccaatta

SEQ ID NO: 392792 - DNA, 15 bp, Homo sapiens
tactttaaaccaatt

SEQ ID NO: 392793 - DNA, 15 bp, Homo sapiens
ctactttaaaccaat

SEQ ID NO: 392794 - DNA, 15 bp, Homo sapiens
tctactttaaaccaa

SEQ ID NO: 392795 - DNA, 15 bp, Homo sapiens
ctctactttaaacca

SEQ ID NO: 392796 - DNA, 15 bp, Homo sapiens
actctactttaaacc

SEQ ID NO: 392797 - DNA, 15 bp, Homo sapiens
gactctactttaaac

SEQ ID NO: 392798 - DNA, 15 bp, Homo sapiens
ggactctactttaaa

SEQ ID NO: 392799 - DNA, 15 bp, Homo sapiens
tggactctactttaa

SEQ ID NO: 392800 - DNA, 15 bp, Homo sapiens
ttggactctacttta

SEQ ID NO: 392801 - DNA, 15 bp, Homo sapiens
cttggactctacttt

SEQ ID NO: 392802 - DNA, 15 bp, Homo sapiens
tcttggactctactt

SEQ ID NO: 392803 - DNA, 15 bp, Homo sapiens
atcttggactctact

SEQ ID NO: 392804 - DNA, 15 bp, Homo sapiens
aatcttggactctac

SEQ ID NO: 392805 - DNA, 15 bp, Homo sapiens
taatcttggactcta

SEQ ID NO: 392806 - DNA, 15 bp, Homo sapiens
ataatcttggactct

SEQ ID NO: 392807 - DNA, 15 bp, Homo sapiens
aataatcttggactc

SEQ ID NO: 392808 - DNA, 15 bp, Homo sapiens
taataatcttggact

SEQ ID NO: 392809 - DNA, 15 bp, Homo sapiens
ttaataatcttggac

SEQ ID NO: 392810 - DNA, 15 bp, Homo sapiens
tttaataatcttgga

SEQ ID NO: 392811 - DNA, 15 bp, Homo sapiens
ctttaataatcttgg

SEQ ID NO: 392812 - DNA, 15 bp, Homo sapiens
actttaataatcttg

SEQ ID NO: 392813 - DNA, 15 bp, Homo sapiens
aactttaataatctt

SEQ ID NO: 392814 - DNA, 15 bp, Homo sapiens
caactttaataatct

SEQ ID NO: 392815 - DNA, 15 bp, Homo sapiens
ccaactttaataatc

SEQ ID NO: 392816 - DNA, 15 bp, Homo sapiens
tccaactttaataat

SEQ ID NO: 392817 - DNA, 15 bp, Homo sapiens
gtccaactttaataa

SEQ ID NO: 392818 - DNA, 15 bp, Homo sapiens
agtccaactttaata

SEQ ID NO: 392819 - DNA, 15 bp, Homo sapiens
tagtccaactttaat

SEQ ID NO: 392820 - DNA, 15 bp, Homo sapiens
ctagtccaactttaa

SEQ ID NO: 392821 - DNA, 15 bp, Homo sapiens
tctagtccaacttta

SEQ ID NO: 392822 - DNA, 15 bp, Homo sapiens
atctagtccaacttt

SEQ ID NO: 392823 - DNA, 15 bp, Homo sapiens
gatctagtccaactt

SEQ ID NO: 392824 - DNA, 15 bp, Homo sapiens
agatctagtccaact

SEQ ID NO: 392825 - DNA, 15 bp, Homo sapiens
aagatctagtccaac

SEQ ID NO: 392826 - DNA, 15 bp, Homo sapiens
taagatctagtccaa

SEQ ID NO: 392827 - DNA, 15 bp, Homo sapiens
ctaagatctagtcca

SEQ ID NO: 392828 - DNA, 15 bp, Homo sapiens
cctaagatctagtcc

SEQ ID NO: 392829 - DNA, 15 bp, Homo sapiens
ccctaagatctagtc

SEQ ID NO: 392830 - DNA, 15 bp, Homo sapiens
tccctaagatctagt

SEQ ID NO: 392831 - DNA, 15 bp, Homo sapiens
atccctaagatctag

SEQ ID NO: 392832 - DNA, 15 bp, Homo sapiens
aatccctaagatcta

SEQ ID NO: 392833 - DNA, 15 bp, Homo sapiens
aaatccctaagatct

SEQ ID NO: 392834 - DNA, 15 bp, Homo sapiens
aaaatccctaagatc

SEQ ID NO: 392835 - DNA, 15 bp, Homo sapiens
gaaaatccctaagat

SEQ ID NO: 392836 - DNA, 15 bp, Homo sapiens
ggaaaatccctaaga

SEQ ID NO: 392837 - DNA, 15 bp, Homo sapiens
tggaaaatccctaag

SEQ ID NO: 392838 - DNA, 15 bp, Homo sapiens
ctggaaaatccctaa

SEQ ID NO: 392839 - DNA, 15 bp, Homo sapiens
actggaaaatcccta

SEQ ID NO: 392840 - DNA, 15 bp, Homo sapiens
aactggaaaatccct

SEQ ID NO: 392841 - DNA, 15 bp, Homo sapiens
gaactggaaaatccc

SEQ ID NO: 392842 - DNA, 15 bp, Homo sapiens
ggaactggaaaatcc

SEQ ID NO: 392843 - DNA, 15 bp, Homo sapiens
tggaactggaaaatc

SEQ ID NO: 392844 - DNA, 15 bp, Homo sapiens
gtggaactggaaaat

SEQ ID NO: 392845 - DNA, 15 bp, Homo sapiens
ggtggaactggaaaa

SEQ ID NO: 392846 - DNA, 15 bp, Homo sapiens
aggtggaactggaaa

SEQ ID NO: 392847 - DNA, 15 bp, Homo sapiens
gaggtggaactggaa

SEQ ID NO: 392848 - DNA, 15 bp, Homo sapiens
ggaggtggaactgga

SEQ ID NO: 392849 - DNA, 15 bp, Homo sapiens
aggaggtggaactgg

SEQ ID NO: 392850 - DNA, 15 bp, Homo sapiens
gaggaggtggaactg

SEQ ID NO: 392851 - DNA, 15 bp, Homo sapiens
tgaggaggtggaact

SEQ ID NO: 392852 - DNA, 15 bp, Homo sapiens
atgaggaggtggaac

SEQ ID NO: 392853 - DNA, 15 bp, Homo sapiens
aatgaggaggtggaa

SEQ ID NO: 392854 - DNA, 15 bp, Homo sapiens
aaatgaggaggtgga

SEQ ID NO: 392855 - DNA, 15 bp, Homo sapiens
aaaatgaggaggtgg

SEQ ID NO: 392856 - DNA, 15 bp, Homo sapiens
taaaatgaggaggtg

SEQ ID NO: 392857 - DNA, 15 bp, Homo sapiens
gtaaaatgaggaggt

SEQ ID NO: 392858 - DNA, 15 bp, Homo sapiens
ggtaaaatgaggagg

SEQ ID NO: 392859 - DNA, 15 bp, Homo sapiens
tggtaaaatgaggag

SEQ ID NO: 392860 - DNA, 15 bp, Homo sapiens
ctggtaaaatgagga

SEQ ID NO: 392861 - DNA, 15 bp, Homo sapiens
actggtaaaatgagg

SEQ ID NO: 392862 - DNA, 15 bp, Homo sapiens
cactggtaaaatgag

SEQ ID NO: 392863 - DNA, 15 bp, Homo sapiens
tcactggtaaaatga

SEQ ID NO: 392864 - DNA, 15 bp, Homo sapiens
ttcactggtaaaatg

SEQ ID NO: 392865 - DNA, 15 bp, Homo sapiens
cttcactggtaaaat

SEQ ID NO: 392866 - DNA, 15 bp, Homo sapiens
ccttcactggtaaaa

SEQ ID NO: 392867 - DNA, 15 bp, Homo sapiens
tccttcactggtaaa

SEQ ID NO: 392868 - DNA, 15 bp, Homo sapiens
ttccttcactggtaa

SEQ ID NO: 392869 - DNA, 15 bp, Homo sapiens
gttccttcactggta

SEQ ID NO: 392870 - DNA, 15 bp, Homo sapiens
tgttccttcactggt

SEQ ID NO: 392871 - DNA, 15 bp, Homo sapiens
ctgttccttcactgg

SEQ ID NO: 392872 - DNA, 15 bp, Homo sapiens
tctgttccttcactg

SEQ ID NO: 392873 - DNA, 15 bp, Homo sapiens
atctgttccttcact

SEQ ID NO: 392874 - DNA, 15 bp, Homo sapiens
tatctgttccttcac

SEQ ID NO: 392875 - DNA, 15 bp, Homo sapiens
gtatctgttccttca

SEQ ID NO: 392876 - DNA, 15 bp, Homo sapiens
tgtatctgttccttc

SEQ ID NO: 392877 - DNA, 15 bp, Homo sapiens
atgtatctgttcctt

SEQ ID NO: 392878 - DNA, 15 bp, Homo sapiens
tatgtatctgttcct

SEQ ID NO: 392879 - DNA, 15 bp, Homo sapiens
gtatgtatctgttcc

SEQ ID NO: 392880 - DNA, 15 bp, Homo sapiens
tgtatgtatctgttc

SEQ ID NO: 392881 - DNA, 15 bp, Homo sapiens
ctgtatgtatctgtt

SEQ ID NO: 392882 - DNA, 15 bp, Homo sapiens
cctgtatgtatctgt

SEQ ID NO: 392883 - DNA, 15 bp, Homo sapiens
ccctgtatgtatctg

SEQ ID NO: 392884 - DNA, 15 bp, Homo sapiens
cccctgtatgtatct

SEQ ID NO: 392885 - DNA, 15 bp, Homo sapiens
acccctgtatgtatc

SEQ ID NO: 392886 - DNA, 15 bp, Homo sapiens
aacccctgtatgtat

SEQ ID NO: 392887 - DNA, 15 bp, Homo sapiens
gaacccctgtatgta

SEQ ID NO: 392888 - DNA, 15 bp, Homo sapiens
agaacccctgtatgt

SEQ ID NO: 392889 - DNA, 15 bp, Homo sapiens
tagaacccctgtatg

SEQ ID NO: 392890 - DNA, 15 bp, Homo sapiens
ctagaacccctgtat

SEQ ID NO: 392891 - DNA, 15 bp, Homo sapiens
tctagaacccctgta

SEQ ID NO: 392892 - DNA, 15 bp, Homo sapiens
ttctagaacccctgt

SEQ ID NO: 392893 - DNA, 15 bp, Homo sapiens
attctagaacccctg

SEQ ID NO: 392894 - DNA, 15 bp, Homo sapiens
aattctagaacccct

SEQ ID NO: 392895 - DNA, 15 bp, Homo sapiens
aaattctagaacccc

SEQ ID NO: 392896 - DNA, 15 bp, Homo sapiens
taaattctagaaccc

SEQ ID NO: 392897 - DNA, 15 bp, Homo sapiens
ataaattctagaacc

SEQ ID NO: 392898 - DNA, 15 bp, Homo sapiens
gataaattctagaac

SEQ ID NO: 392899 - DNA, 15 bp, Homo sapiens
agataaattctagaa

SEQ ID NO: 392900 - DNA, 15 bp, Homo sapiens
aagataaattctaga

SEQ ID NO: 392901 - DNA, 15 bp, Homo sapiens
taagataaattctag

SEQ ID NO: 392902 - DNA, 15 bp, Homo sapiens
ctaagataaattcta

SEQ ID NO: 392903 - DNA, 15 bp, Homo sapiens
tctaagataaattct

SEQ ID NO: 392904 - DNA, 15 bp, Homo sapiens
atctaagataaattc

SEQ ID NO: 392905 - DNA, 15 bp, Homo sapiens
gatctaagataaatt

SEQ ID NO: 392906 - DNA, 15 bp, Homo sapiens
tgatctaagataaat

SEQ ID NO: 392907 - DNA, 15 bp, Homo sapiens
ctgatctaagataaa

SEQ ID NO: 392908 - DNA, 15 bp, Homo sapiens
tctgatctaagataa

SEQ ID NO: 392909 - DNA, 15 bp, Homo sapiens
ctctgatctaagata

SEQ ID NO: 392910 - DNA, 15 bp, Homo sapiens
tctctgatctaagat

SEQ ID NO: 392911 - DNA, 15 bp, Homo sapiens
ctctctgatctaaga

SEQ ID NO: 392912 - DNA, 15 bp, Homo sapiens
cctctctgatctaag

SEQ ID NO: 392913 - DNA, 15 bp, Homo sapiens
acctctctgatctaa

SEQ ID NO: 392914 - DNA, 15 bp, Homo sapiens
tacctctctgatcta

SEQ ID NO: 392915 - DNA, 15 bp, Homo sapiens
ttacctctctgatct

SEQ ID NO: 392916 - DNA, 15 bp, Homo sapiens
attacctctctgatc

SEQ ID NO: 392917 - DNA, 15 bp, Homo sapiens
cattacctctctgat

SEQ ID NO: 392918 - DNA, 15 bp, Homo sapiens
tcattacctctctga

SEQ ID NO: 392919 - DNA, 15 bp, Homo sapiens
ctcattacctctctg

SEQ ID NO: 392920 - DNA, 15 bp, Homo sapiens
actcattacctctct

SEQ ID NO: 392921 - DNA, 15 bp, Homo sapiens
cactcattacctctc

SEQ ID NO: 392922 - DNA, 15 bp, Homo sapiens
ccactcattacctct

SEQ ID NO: 392923 - DNA, 15 bp, Homo sapiens
gccactcattacctc

SEQ ID NO: 392924 - DNA, 15 bp, Homo sapiens
ggccactcattacct

SEQ ID NO: 392925 - DNA, 15 bp, Homo sapiens
cggccactcattacc

SEQ ID NO: 392926 - DNA, 15 bp, Homo sapiens
acggccactcattac

SEQ ID NO: 392927 - DNA, 15 bp, Homo sapiens
cacggccactcatta

SEQ ID NO: 392928 - DNA, 15 bp, Homo sapiens
acacggccactcatt

SEQ ID NO: 392929 - DNA, 15 bp, Homo sapiens
aacacggccactcat

SEQ ID NO: 392930 - DNA, 15 bp, Homo sapiens
caacacggccactca

SEQ ID NO: 392931 - DNA, 15 bp, Homo sapiens
ccaacacggccactc

SEQ ID NO: 392932 - DNA, 15 bp, Homo sapiens
gccaacacggccact

SEQ ID NO: 392933 - DNA, 15 bp, Homo sapiens
agccaacacggccac

SEQ ID NO: 392934 - DNA, 15 bp, Homo sapiens
tagccaacacggcca

SEQ ID NO: 392935 - DNA, 15 bp, Homo sapiens
ctagccaacacggcc

SEQ ID NO: 392936 - DNA, 15 bp, Homo sapiens
tctagccaacacggc

SEQ ID NO: 392937 - DNA, 15 bp, Homo sapiens
gtctagccaacacgg

SEQ ID NO: 392938 - DNA, 15 bp, Homo sapiens
agtctagccaacacg

SEQ ID NO: 392939 - DNA, 15 bp, Homo sapiens
gagtctagccaacac

SEQ ID NO: 392940 - DNA, 15 bp, Homo sapiens
ggagtctagccaaca

SEQ ID NO: 392941 - DNA, 15 bp, Homo sapiens
tggagtctagccaac

SEQ ID NO: 392942 - DNA, 15 bp, Homo sapiens
ctggagtctagccaa

SEQ ID NO: 392943 - DNA, 15 bp, Homo sapiens
cctggagtctagcca

SEQ ID NO: 392944 - DNA, 15 bp, Homo sapiens
acctggagtctagcc

SEQ ID NO: 392945 - DNA, 15 bp, Homo sapiens
gacctggagtctagc

SEQ ID NO: 392946 - DNA, 15 bp, Homo sapiens
agacctggagtctag

SEQ ID NO: 392947 - DNA, 15 bp, Homo sapiens
gagacctggagtcta

SEQ ID NO: 392948 - DNA, 15 bp, Homo sapiens
agagacctggagtct

SEQ ID NO: 392949 - DNA, 15 bp, Homo sapiens
aagagacctggagtc

SEQ ID NO: 392950 - DNA, 15 bp, Homo sapiens
caagagacctggagt

SEQ ID NO: 392951 - DNA, 15 bp, Homo sapiens
tcaagagacctggag

SEQ ID NO: 392952 - DNA, 15 bp, Homo sapiens
atcaagagacctgga

SEQ ID NO: 392953 - DNA, 15 bp, Homo sapiens
aatcaagagacctgg

SEQ ID NO: 392954 - DNA, 15 bp, Homo sapiens
gaatcaagagacctg

SEQ ID NO: 392955 - DNA, 15 bp, Homo sapiens
tgaatcaagagacct

SEQ ID NO: 392956 - DNA, 15 bp, Homo sapiens
ctgaatcaagagacc

SEQ ID NO: 392957 - DNA, 15 bp, Homo sapiens
actgaatcaagagac

SEQ ID NO: 392958 - DNA, 15 bp, Homo sapiens
tactgaatcaagaga

SEQ ID NO: 392959 - DNA, 15 bp, Homo sapiens
ttactgaatcaagag

SEQ ID NO: 392960 - DNA, 15 bp, Homo sapiens
attactgaatcaaga

SEQ ID NO: 392961 - DNA, 15 bp, Homo sapiens
cattactgaatcaag

SEQ ID NO: 392962 - DNA, 15 bp, Homo sapiens
tcattactgaatcaa

SEQ ID NO: 392963 - DNA, 15 bp, Homo sapiens
atcattactgaatca

SEQ ID NO: 392964 - DNA, 15 bp, Homo sapiens
aatcattactgaatc

SEQ ID NO: 392965 - DNA, 15 bp, Homo sapiens
gaatcattactgaat

SEQ ID NO: 392966 - DNA, 15 bp, Homo sapiens
agaatcattactgaa

SEQ ID NO: 392967 - DNA, 15 bp, Homo sapiens
aagaatcattactga

SEQ ID NO: 392968 - DNA, 15 bp, Homo sapiens
aaagaatcattactg

SEQ ID NO: 392969 - DNA, 15 bp, Homo sapiens
gaaagaatcattact

SEQ ID NO: 392970 - DNA, 15 bp, Homo sapiens
agaaagaatcattac

SEQ ID NO: 392971 - DNA, 15 bp, Homo sapiens
gagaaagaatcatta

SEQ ID NO: 392972 - DNA, 15 bp, Homo sapiens
ggagaaagaatcatt

SEQ ID NO: 392973 - DNA, 15 bp, Homo sapiens
tggagaaagaatcat

SEQ ID NO: 392974 - DNA, 15 bp, Homo sapiens
ttggagaaagaatca

SEQ ID NO: 392975 - DNA, 15 bp, Homo sapiens
gttggagaaagaatc

SEQ ID NO: 392976 - DNA, 15 bp, Homo sapiens
ggttggagaaagaat

SEQ ID NO: 392977 - DNA, 15 bp, Homo sapiens
aggttggagaaagaa

SEQ ID NO: 392978 - DNA, 15 bp, Homo sapiens
caggttggagaaaga

SEQ ID NO: 392979 - DNA, 15 bp, Homo sapiens
ccaggttggagaaag

SEQ ID NO: 392980 - DNA, 15 bp, Homo sapiens
tccaggttggagaaa

SEQ ID NO: 392981 - DNA, 15 bp, Homo sapiens
atccaggttggagaa

SEQ ID NO: 392982 - DNA, 15 bp, Homo sapiens
gatccaggttggaga

SEQ ID NO: 392983 - DNA, 15 bp, Homo sapiens
tgatccaggttggag

SEQ ID NO: 392984 - DNA, 15 bp, Homo sapiens
gtgatccaggttgga

SEQ ID NO: 392985 - DNA, 15 bp, Homo sapiens
cgtgatccaggttgg

SEQ ID NO: 392986 - DNA, 15 bp, Homo sapiens
tcgtgatccaggttg

SEQ ID NO: 392987 - DNA, 15 bp, Homo sapiens
ttcgtgatccaggtt

SEQ ID NO: 392988 - DNA, 15 bp, Homo sapiens
cttcgtgatccaggt

SEQ ID NO: 392989 - DNA, 15 bp, Homo sapiens
ccttcgtgatccagg

SEQ ID NO: 392990 - DNA, 15 bp, Homo sapiens
cccttcgtgatccag

SEQ ID NO: 392991 - DNA, 15 bp, Homo sapiens
acccttcgtgatcca

SEQ ID NO: 392992 - DNA, 15 bp, Homo sapiens
aacccttcgtgatcc

SEQ ID NO: 392993 - DNA, 15 bp, Homo sapiens
taacccttcgtgatc

SEQ ID NO: 392994 - DNA, 15 bp, Homo sapiens
ttaacccttcgtgat

SEQ ID NO: 392995 - DNA, 15 bp, Homo sapiens
tttaacccttcgtga

SEQ ID NO: 392996 - DNA, 15 bp, Homo sapiens
atttaacccttcgtg

SEQ ID NO: 392997 - DNA, 15 bp, Homo sapiens
aatttaacccttcgt

SEQ ID NO: 392998 - DNA, 15 bp, Homo sapiens
caatttaacccttcg

SEQ ID NO: 392999 - DNA, 15 bp, Homo sapiens
acaatttaacccttc

SEQ ID NO: 393000 - DNA, 15 bp, Homo sapiens
tacaatttaaccctt

SEQ ID NO: 393001 - DNA, 15 bp, Homo sapiens
ctacaatttaaccct

SEQ ID NO: 393002 - DNA, 15 bp, Homo sapiens
gctacaatttaaccc

SEQ ID NO: 393003 - DNA, 15 bp, Homo sapiens
tgctacaatttaacc

SEQ ID NO: 393004 - DNA, 15 bp, Homo sapiens
ctgctacaatttaac

SEQ ID NO: 393005 - DNA, 15 bp, Homo sapiens
cctgctacaatttaa

SEQ ID NO: 393006 - DNA, 15 bp, Homo sapiens
tcctgctacaattta

SEQ ID NO: 393007 - DNA, 15 bp, Homo sapiens
gtcctgctacaattt

SEQ ID NO: 393008 - DNA, 15 bp, Homo sapiens
agtcctgctacaatt

SEQ ID NO: 393009 - DNA, 15 bp, Homo sapiens
gagtcctgctacaat

SEQ ID NO: 393010 - DNA, 15 bp, Homo sapiens
agagtcctgctacaa

SEQ ID NO: 393011 - DNA, 15 bp, Homo sapiens
cagagtcctgctaca

SEQ ID NO: 393012 - DNA, 15 bp, Homo sapiens
ccagagtcctgctac

SEQ ID NO: 393013 - DNA, 15 bp, Homo sapiens
cccagagtcctgcta

SEQ ID NO: 393014 - DNA, 15 bp, Homo sapiens
tcccagagtcctgct

SEQ ID NO: 393015 - DNA, 15 bp, Homo sapiens
atcccagagtcctgc

SEQ ID NO: 393016 - DNA, 15 bp, Homo sapiens
catcccagagtcctg

SEQ ID NO: 393017 - DNA, 15 bp, Homo sapiens
ccatcccagagtcct

SEQ ID NO: 393018 - DNA, 15 bp, Homo sapiens
cccatcccagagtcc

SEQ ID NO: 393019 - DNA, 15 bp, Homo sapiens
tcccatcccagagtc

SEQ ID NO: 393020 - DNA, 15 bp, Homo sapiens
atcccatcccagagt

SEQ ID NO: 393021 - DNA, 15 bp, Homo sapiens
aatcccatcccagag

SEQ ID NO: 393022 - DNA, 15 bp, Homo sapiens
gaatcccatcccaga

SEQ ID NO: 393023 - DNA, 15 bp, Homo sapiens
tgaatcccatcccag

SEQ ID NO: 393024 - DNA, 15 bp, Homo sapiens
ctgaatcccatccca

SEQ ID NO: 393025 - DNA, 15 bp, Homo sapiens
cctgaatcccatccc

SEQ ID NO: 393026 - DNA, 15 bp, Homo sapiens
ccctgaatcccatcc

SEQ ID NO: 393027 - DNA, 15 bp, Homo sapiens
cccctgaatcccatc

SEQ ID NO: 393028 - DNA, 15 bp, Homo sapiens
acccctgaatcccat

SEQ ID NO: 393029 - DNA, 15 bp, Homo sapiens
cacccctgaatccca

SEQ ID NO: 393030 - DNA, 15 bp, Homo sapiens
gcacccctgaatccc

SEQ ID NO: 393031 - DNA, 15 bp, Homo sapiens
ggcacccctgaatcc

SEQ ID NO: 393032 - DNA, 15 bp, Homo sapiens
tggcacccctgaatc

SEQ ID NO: 393033 - DNA, 15 bp, Homo sapiens
ttggcacccctgaat

SEQ ID NO: 393034 - DNA, 15 bp, Homo sapiens
tttggcacccctgaa

SEQ ID NO: 393035 - DNA, 15 bp, Homo sapiens
atttggcacccctga

SEQ ID NO: 393036 - DNA, 15 bp, Homo sapiens
catttggcacccctg

SEQ ID NO: 393037 - DNA, 15 bp, Homo sapiens
gcatttggcacccct

SEQ ID NO: 393038 - DNA, 15 bp, Homo sapiens
agcatttggcacccc

SEQ ID NO: 393039 - DNA, 15 bp, Homo sapiens
tagcatttggcaccc

SEQ ID NO: 393040 - DNA, 15 bp, Homo sapiens
atagcatttggcacc

SEQ ID NO: 393041 - DNA, 15 bp, Homo sapiens
tatagcatttggcac

SEQ ID NO: 393042 - DNA, 15 bp, Homo sapiens
ttatagcatttggca

SEQ ID NO: 393043 - DNA, 15 bp, Homo sapiens
cttatagcatttggc

SEQ ID NO: 393044 - DNA, 15 bp, Homo sapiens
acttatagcatttgg

SEQ ID NO: 393045 - DNA, 15 bp, Homo sapiens
tacttatagcatttg

SEQ ID NO: 393046 - DNA, 15 bp, Homo sapiens
gtacttatagcattt

SEQ ID NO: 393047 - DNA, 15 bp, Homo sapiens
tgtacttatagcatt

SEQ ID NO: 393048 - DNA, 15 bp, Homo sapiens
ttgtacttatagcat

SEQ ID NO: 393049 - DNA, 15 bp, Homo sapiens
gttgtacttatagca

SEQ ID NO: 393050 - DNA, 15 bp, Homo sapiens
ggttgtacttatagc

SEQ ID NO: 393051 - DNA, 15 bp, Homo sapiens
gggttgtacttatag

SEQ ID NO: 393052 - DNA, 15 bp, Homo sapiens
tgggttgtacttata

SEQ ID NO: 393053 - DNA, 15 bp, Homo sapiens
gtgggttgtacttat

SEQ ID NO: 393054 - DNA, 15 bp, Homo sapiens
agtgggttgtactta

SEQ ID NO: 393055 - DNA, 15 bp, Homo sapiens
cagtgggttgtactt

SEQ ID NO: 393056 - DNA, 15 bp, Homo sapiens
gcagtgggttgtact

SEQ ID NO: 393057 - DNA, 15 bp, Homo sapiens
agcagtgggttgtac

SEQ ID NO: 393058 - DNA, 15 bp, Homo sapiens
cagcagtgggttgta

SEQ ID NO: 393059 - DNA, 15 bp, Homo sapiens
acagcagtgggttgt

SEQ ID NO: 393060 - DNA, 15 bp, Homo sapiens
gacagcagtgggttg

SEQ ID NO: 393061 - DNA, 15 bp, Homo sapiens
agacagcagtgggtt

SEQ ID NO: 393062 - DNA, 15 bp, Homo sapiens
gagacagcagtgggt

SEQ ID NO: 393063 - DNA, 15 bp, Homo sapiens
tgagacagcagtggg

SEQ ID NO: 393064 - DNA, 15 bp, Homo sapiens
ctgagacagcagtgg

SEQ ID NO: 393065 - DNA, 15 bp, Homo sapiens
cctgagacagcagtg

SEQ ID NO: 393066 - DNA, 15 bp, Homo sapiens
tcctgagacagcagt

SEQ ID NO: 393067 - DNA, 15 bp, Homo sapiens
ttcctgagacagcag

SEQ ID NO: 393068 - DNA, 15 bp, Homo sapiens
tttcctgagacagca

SEQ ID NO: 393069 - DNA, 15 bp, Homo sapiens
atttcctgagacagc

SEQ ID NO: 393070 - DNA, 15 bp, Homo sapiens
aatttcctgagacag

SEQ ID NO: 393071 - DNA, 15 bp, Homo sapiens
caatttcctgagaca

SEQ ID NO: 393072 - DNA, 15 bp, Homo sapiens
acaatttcctgagac

SEQ ID NO: 393073 - DNA, 15 bp, Homo sapiens
cacaatttcctgaga

SEQ ID NO: 393074 - DNA, 15 bp, Homo sapiens
ccacaatttcctgag

SEQ ID NO: 393075 - DNA, 15 bp, Homo sapiens
accacaatttcctga

SEQ ID NO: 393076 - DNA, 15 bp, Homo sapiens
aaccacaatttcctg

SEQ ID NO: 393077 - DNA, 15 bp, Homo sapiens
taaccacaatttcct

SEQ ID NO: 393078 - DNA, 15 bp, Homo sapiens
ctaaccacaatttcc

SEQ ID NO: 393079 - DNA, 15 bp, Homo sapiens
cctaaccacaatttc

SEQ ID NO: 393080 - DNA, 15 bp, Homo sapiens
tcctaaccacaattt

SEQ ID NO: 393081 - DNA, 15 bp, Homo sapiens
atcctaaccacaatt

SEQ ID NO: 393082 - DNA, 15 bp, Homo sapiens
tatcctaaccacaat

SEQ ID NO: 393083 - DNA, 15 bp, Homo sapiens
ctatcctaaccacaa

SEQ ID NO: 393084 - DNA, 15 bp, Homo sapiens
actatcctaaccaca

SEQ ID NO: 393085 - DNA, 15 bp, Homo sapiens
cactatcctaaccac

SEQ ID NO: 393086 - DNA, 15 bp, Homo sapiens
ccactatcctaacca

SEQ ID NO: 393087 - DNA, 15 bp, Homo sapiens
accactatcctaacc

SEQ ID NO: 393088 - DNA, 15 bp, Homo sapiens
gaccactatcctaac

SEQ ID NO: 393089 - DNA, 15 bp, Homo sapiens
ggaccactatcctaa

SEQ ID NO: 393090 - DNA, 15 bp, Homo sapiens
gggaccactatccta

SEQ ID NO: 393091 - DNA, 15 bp, Homo sapiens
agggaccactatcct

SEQ ID NO: 393092 - DNA, 15 bp, Homo sapiens
tagggaccactatcc

SEQ ID NO: 393093 - DNA, 15 bp, Homo sapiens
ctagggaccactatc

SEQ ID NO: 393094 - DNA, 15 bp, Homo sapiens
tctagggaccactat

SEQ ID NO: 393095 - DNA, 15 bp, Homo sapiens
ttctagggaccacta

SEQ ID NO: 393096 - DNA, 15 bp, Homo sapiens
gttctagggaccact

SEQ ID NO: 393097 - DNA, 15 bp, Homo sapiens
tgttctagggaccac

SEQ ID NO: 393098 - DNA, 15 bp, Homo sapiens
ctgttctagggacca

SEQ ID NO: 393099 - DNA, 15 bp, Homo sapiens
cctgttctagggacc

SEQ ID NO: 393100 - DNA, 15 bp, Homo sapiens
acctgttctagggac

SEQ ID NO: 393101 - DNA, 15 bp, Homo sapiens
cacctgttctaggga

SEQ ID NO: 393102 - DNA, 15 bp, Homo sapiens
tcacctgttctaggg

SEQ ID NO: 393103 - DNA, 15 bp, Homo sapiens
gtcacctgttctagg

SEQ ID NO: 393104 - DNA, 15 bp, Homo sapiens
ggtcacctgttctag

SEQ ID NO: 393105 - DNA, 15 bp, Homo sapiens
gggtcacctgttcta

SEQ ID NO: 393106 - DNA, 15 bp, Homo sapiens
cgggtcacctgttct

SEQ ID NO: 393107 - DNA, 15 bp, Homo sapiens
tcgggtcacctgttc

SEQ ID NO: 393108 - DNA, 15 bp, Homo sapiens
ctcgggtcacctgtt

SEQ ID NO: 393109 - DNA, 15 bp, Homo sapiens
tctcgggtcacctgt

SEQ ID NO: 393110 - DNA, 15 bp, Homo sapiens
ttctcgggtcacctg

SEQ ID NO: 393111 - DNA, 15 bp, Homo sapiens
cttctcgggtcacct

SEQ ID NO: 393112 - DNA, 15 bp, Homo sapiens
tcttctcgggtcacc

SEQ ID NO: 393113 - DNA, 15 bp, Homo sapiens
ttcttctcgggtcac

SEQ ID NO: 393114 - DNA, 15 bp, Homo sapiens
gttcttctcgggtca

SEQ ID NO: 393115 - DNA, 15 bp, Homo sapiens
agttcttctcgggtc

SEQ ID NO: 393116 - DNA, 15 bp, Homo sapiens
aagttcttctcgggt

SEQ ID NO: 393117 - DNA, 15 bp, Homo sapiens
gaagttcttctcggg

SEQ ID NO: 393118 - DNA, 15 bp, Homo sapiens
agaagttcttctcgg

SEQ ID NO: 393119 - DNA, 15 bp, Homo sapiens
cagaagttcttctcg

SEQ ID NO: 393120 - DNA, 15 bp, Homo sapiens
tcagaagttcttctc

SEQ ID NO: 393121 - DNA, 15 bp, Homo sapiens
gtcagaagttcttct

SEQ ID NO: 393122 - DNA, 15 bp, Homo sapiens
agtcagaagttcttc

SEQ ID NO: 393123 - DNA, 15 bp, Homo sapiens
aagtcagaagttctt

SEQ ID NO: 393124 - DNA, 15 bp, Homo sapiens
taagtcagaagttct

SEQ ID NO: 393125 - DNA, 15 bp, Homo sapiens
ctaagtcagaagttc

SEQ ID NO: 393126 - DNA, 15 bp, Homo sapiens
cctaagtcagaagtt

SEQ ID NO: 393127 - DNA, 15 bp, Homo sapiens
acctaagtcagaagt

SEQ ID NO: 393128 - DNA, 15 bp, Homo sapiens
cacctaagtcagaag

SEQ ID NO: 393129 - DNA, 15 bp, Homo sapiens
tcacctaagtcagaa

SEQ ID NO: 393130 - DNA, 15 bp, Homo sapiens
ttcacctaagtcaga

SEQ ID NO: 393131 - DNA, 15 bp, Homo sapiens
gttcacctaagtcag

SEQ ID NO: 393132 - DNA, 15 bp, Homo sapiens
cgttcacctaagtca

SEQ ID NO: 393133 - DNA, 15 bp, Homo sapiens
acgttcacctaagtc

SEQ ID NO: 393134 - DNA, 15 bp, Homo sapiens
aacgttcacctaagt

SEQ ID NO: 393135 - DNA, 15 bp, Homo sapiens
taacgttcacctaag

SEQ ID NO: 393136 - DNA, 15 bp, Homo sapiens
ataacgttcacctaa

SEQ ID NO: 393137 - DNA, 15 bp, Homo sapiens
tataacgttcaccta

SEQ ID NO: 393138 - DNA, 15 bp, Homo sapiens
gtataacgttcacct

SEQ ID NO: 393139 - DNA, 15 bp, Homo sapiens
cgtataacgttcacc

SEQ ID NO: 393140 - DNA, 15 bp, Homo sapiens
acgtataacgttcac

SEQ ID NO: 393141 - DNA, 15 bp, Homo sapiens
aacgtataacgttca

SEQ ID NO: 393142 - DNA, 15 bp, Homo sapiens
aaacgtataacgttc

SEQ ID NO: 393143 - DNA, 15 bp, Homo sapiens
aaaacgtataacgtt

SEQ ID NO: 393144 - DNA, 15 bp, Homo sapiens
caaaacgtataacgt

SEQ ID NO: 393145 - DNA, 15 bp, Homo sapiens
ccaaaacgtataacg

SEQ ID NO: 393146 - DNA, 15 bp, Homo sapiens
tccaaaacgtataac

SEQ ID NO: 393147 - DNA, 15 bp, Homo sapiens
ctccaaaacgtataa

SEQ ID NO: 393148 - DNA, 15 bp, Homo sapiens
tctccaaaacgtata

SEQ ID NO: 393149 - DNA, 15 bp, Homo sapiens
ctctccaaaacgtat

SEQ ID NO: 393150 - DNA, 15 bp, Homo sapiens
cctctccaaaacgta

SEQ ID NO: 393151 - DNA, 15 bp, Homo sapiens
tcctctccaaaacgt

SEQ ID NO: 393152 - DNA, 15 bp, Homo sapiens
gtcctctccaaaacg

SEQ ID NO: 393153 - DNA, 15 bp, Homo sapiens
agtcctctccaaaac

SEQ ID NO: 393154 - DNA, 15 bp, Homo sapiens
tagtcctctccaaaa

SEQ ID NO: 393155 - DNA, 15 bp, Homo sapiens
atagtcctctccaaa

SEQ ID NO: 393156 - DNA, 15 bp, Homo sapiens
catagtcctctccaa

SEQ ID NO: 393157 - DNA, 15 bp, Homo sapiens
tcatagtcctctcca

SEQ ID NO: 393158 - DNA, 15 bp, Homo sapiens
atcatagtcctctcc

SEQ ID NO: 393159 - DNA, 15 bp, Homo sapiens
catcatagtcctctc

SEQ ID NO: 393160 - DNA, 15 bp, Homo sapiens
acatcatagtcctct

SEQ ID NO: 393161 - DNA, 15 bp, Homo sapiens
cacatcatagtcctc

SEQ ID NO: 393162 - DNA, 15 bp, Homo sapiens
tcacatcatagtcct

SEQ ID NO: 393163 - DNA, 15 bp, Homo sapiens
atcacatcatagtcc

SEQ ID NO: 393164 - DNA, 15 bp, Homo sapiens
aatcacatcatagtc

SEQ ID NO: 393165 - DNA, 15 bp, Homo sapiens
caatcacatcatagt

SEQ ID NO: 393166 - DNA, 15 bp, Homo sapiens
acaatcacatcatag

SEQ ID NO: 393167 - DNA, 15 bp, Homo sapiens
aacaatcacatcata

SEQ ID NO: 393168 - DNA, 15 bp, Homo sapiens
aaacaatcacatcat

SEQ ID NO: 393169 - DNA, 15 bp, Homo sapiens
caaacaatcacatca

SEQ ID NO: 393170 - DNA, 15 bp, Homo sapiens
ccaaacaatcacatc

SEQ ID NO: 393171 - DNA, 15 bp, Homo sapiens
cccaaacaatcacat

SEQ ID NO: 393172 - DNA, 15 bp, Homo sapiens
tcccaaacaatcaca

SEQ ID NO: 393173 - DNA, 15 bp, Homo sapiens
ttcccaaacaatcac

SEQ ID NO: 393174 - DNA, 15 bp, Homo sapiens
cttcccaaacaatca

SEQ ID NO: 393175 - DNA, 15 bp, Homo sapiens
ccttcccaaacaatc

SEQ ID NO: 393176 - DNA, 15 bp, Homo sapiens
cccttcccaaacaat

SEQ ID NO: 393177 - DNA, 15 bp, Homo sapiens
ccccttcccaaacaa

SEQ ID NO: 393178 - DNA, 15 bp, Homo sapiens
cccccttcccaaaca

SEQ ID NO: 393179 - DNA, 15 bp, Homo sapiens
gcccccttcccaaac

SEQ ID NO: 393180 - DNA, 15 bp, Homo sapiens
tgcccccttcccaaa

SEQ ID NO: 393181 - DNA, 15 bp, Homo sapiens
atgcccccttcccaa

SEQ ID NO: 393182 - DNA, 15 bp, Homo sapiens
gatgcccccttccca

SEQ ID NO: 393183 - DNA, 15 bp, Homo sapiens
agatgcccccttccc

SEQ ID NO: 393184 - DNA, 15 bp, Homo sapiens
tagatgcccccttcc

SEQ ID NO: 393185 - DNA, 15 bp, Homo sapiens
ctagatgcccccttc

SEQ ID NO: 393186 - DNA, 15 bp, Homo sapiens
cctagatgccccctt

SEQ ID NO: 393187 - DNA, 15 bp, Homo sapiens
gcctagatgccccct

SEQ ID NO: 393188 - DNA, 15 bp, Homo sapiens
tgcctagatgccccc

SEQ ID NO: 393189 - DNA, 15 bp, Homo sapiens
atgcctagatgcccc

SEQ ID NO: 393190 - DNA, 15 bp, Homo sapiens
tatgcctagatgccc

SEQ ID NO: 393191 - DNA, 15 bp, Homo sapiens
atatgcctagatgcc

SEQ ID NO: 393192 - DNA, 15 bp, Homo sapiens
gatatgcctagatgc

SEQ ID NO: 393193 - DNA, 15 bp, Homo sapiens
tgatatgcctagatg

SEQ ID NO: 393194 - DNA, 15 bp, Homo sapiens
ctgatatgcctagat

SEQ ID NO: 393195 - DNA, 15 bp, Homo sapiens
gctgatatgcctaga

SEQ ID NO: 393196 - DNA, 15 bp, Homo sapiens
tgctgatatgcctag

SEQ ID NO: 393197 - DNA, 15 bp, Homo sapiens
ttgctgatatgccta

SEQ ID NO: 393198 - DNA, 15 bp, Homo sapiens
cttgctgatatgcct

SEQ ID NO: 393199 - DNA, 15 bp, Homo sapiens
acttgctgatatgcc

SEQ ID NO: 393200 - DNA, 15 bp, Homo sapiens
gacttgctgatatgc

SEQ ID NO: 393201 - DNA, 15 bp, Homo sapiens
agacttgctgatatg

SEQ ID NO: 393202 - DNA, 15 bp, Homo sapiens
gagacttgctgatat

SEQ ID NO: 393203 - DNA, 15 bp, Homo sapiens
tgagacttgctgata

SEQ ID NO: 393204 - DNA, 15 bp, Homo sapiens
gtgagacttgctgat

SEQ ID NO: 393205 - DNA, 15 bp, Homo sapiens
agtgagacttgctga

SEQ ID NO: 393206 - DNA, 15 bp, Homo sapiens
aagtgagacttgctg

SEQ ID NO: 393207 - DNA, 15 bp, Homo sapiens
caagtgagacttgct

SEQ ID NO: 393208 - DNA, 15 bp, Homo sapiens
gcaagtgagacttgc

SEQ ID NO: 393209 - DNA, 15 bp, Homo sapiens
agcaagtgagacttg

SEQ ID NO: 393210 - DNA, 15 bp, Homo sapiens
cagcaagtgagactt

SEQ ID NO: 393211 - DNA, 15 bp, Homo sapiens
tcagcaagtgagact

SEQ ID NO: 393212 - DNA, 15 bp, Homo sapiens
ctcagcaagtgagac

SEQ ID NO: 393213 - DNA, 15 bp, Homo sapiens
tctcagcaagtgaga

SEQ ID NO: 393214 - DNA, 15 bp, Homo sapiens
ctctcagcaagtgag

SEQ ID NO: 393215 - DNA, 15 bp, Homo sapiens
actctcagcaagtga

SEQ ID NO: 393216 - DNA, 15 bp, Homo sapiens
cactctcagcaagtg

SEQ ID NO: 393217 - DNA, 15 bp, Homo sapiens
tcactctcagcaagt

SEQ ID NO: 393218 - DNA, 15 bp, Homo sapiens
ctcactctcagcaag

SEQ ID NO: 393219 - DNA, 15 bp, Homo sapiens
tctcactctcagcaa

SEQ ID NO: 393220 - DNA, 15 bp, Homo sapiens
atctcactctcagca

SEQ ID NO: 393221 - DNA, 15 bp, Homo sapiens
catctcactctcagc

SEQ ID NO: 393222 - DNA, 15 bp, Homo sapiens
ccatctcactctcag

SEQ ID NO: 393223 - DNA, 15 bp, Homo sapiens
tccatctcactctca

SEQ ID NO: 393224 - DNA, 15 bp, Homo sapiens
ctccatctcactctc

SEQ ID NO: 393225 - DNA, 15 bp, Homo sapiens
tctccatctcactct

SEQ ID NO: 393226 - DNA, 15 bp, Homo sapiens
atctccatctcactc

SEQ ID NO: 393227 - DNA, 15 bp, Homo sapiens
tatctccatctcact

SEQ ID NO: 393228 - DNA, 15 bp, Homo sapiens
ctatctccatctcac

SEQ ID NO: 393229 - DNA, 15 bp, Homo sapiens
tctatctccatctca

SEQ ID NO: 393230 - DNA, 15 bp, Homo sapiens
ctctatctccatctc

SEQ ID NO: 393231 - DNA, 15 bp, Homo sapiens
tctctatctccatct

SEQ ID NO: 393232 - DNA, 15 bp, Homo sapiens
ttctctatctccatc

SEQ ID NO: 393233 - DNA, 15 bp, Homo sapiens
tttctctatctccat

SEQ ID NO: 393234 - DNA, 15 bp, Homo sapiens
ttttctctatctcca

SEQ ID NO: 393235 - DNA, 15 bp, Homo sapiens
attttctctatctcc

SEQ ID NO: 393236 - DNA, 15 bp, Homo sapiens
aattttctctatctc

SEQ ID NO: 393237 - DNA, 15 bp, Homo sapiens
gaattttctctatct

SEQ ID NO: 393238 - DNA, 15 bp, Homo sapiens
agaattttctctatc

SEQ ID NO: 393239 - DNA, 15 bp, Homo sapiens
aagaattttctctat

SEQ ID NO: 393240 - DNA, 15 bp, Homo sapiens
aaagaattttctcta

SEQ ID NO: 393241 - DNA, 15 bp, Homo sapiens
caaagaattttctct

SEQ ID NO: 393242 - DNA, 15 bp, Homo sapiens
tcaaagaattttctc

SEQ ID NO: 393243 - DNA, 15 bp, Homo sapiens
ctcaaagaattttct

SEQ ID NO: 393244 - DNA, 15 bp, Homo sapiens
tctcaaagaattttc

SEQ ID NO: 393245 - DNA, 15 bp, Homo sapiens
ctctcaaagaatttt

SEQ ID NO: 393246 - DNA, 15 bp, Homo sapiens
cctctcaaagaattt

SEQ ID NO: 393247 - DNA, 15 bp, Homo sapiens
acctctcaaagaatt

SEQ ID NO: 393248 - DNA, 15 bp, Homo sapiens
cacctctcaaagaat

SEQ ID NO: 393249 - DNA, 15 bp, Homo sapiens
ccacctctcaaagaa

SEQ ID NO: 393250 - DNA, 15 bp, Homo sapiens
cccacctctcaaaga

SEQ ID NO: 393251 - DNA, 15 bp, Homo sapiens
acccacctctcaaag

SEQ ID NO: 393252 - DNA, 15 bp, Homo sapiens
cacccacctctcaaa

SEQ ID NO: 393253 - DNA, 15 bp, Homo sapiens
ccacccacctctcaa

SEQ ID NO: 393254 - DNA, 15 bp, Homo sapiens
tccacccacctctca

SEQ ID NO: 393255 - DNA, 15 bp, Homo sapiens
ctccacccacctctc

SEQ ID NO: 393256 - DNA, 15 bp, Homo sapiens
cctccacccacctct

SEQ ID NO: 393257 - DNA, 15 bp, Homo sapiens
ccctccacccacctc

SEQ ID NO: 393258 - DNA, 15 bp, Homo sapiens
tccctccacccacct

SEQ ID NO: 393259 - DNA, 15 bp, Homo sapiens
atccctccacccacc

SEQ ID NO: 393260 - DNA, 15 bp, Homo sapiens
gatccctccacccac

SEQ ID NO: 393261 - DNA, 15 bp, Homo sapiens
agatccctccaccca

SEQ ID NO: 393262 - DNA, 15 bp, Homo sapiens
tagatccctccaccc

SEQ ID NO: 393263 - DNA, 15 bp, Homo sapiens
ctagatccctccacc

SEQ ID NO: 393264 - DNA, 15 bp, Homo sapiens
actagatccctccac

SEQ ID NO: 393265 - DNA, 15 bp, Homo sapiens
aactagatccctcca

SEQ ID NO: 393266 - DNA, 15 bp, Homo sapiens
caactagatccctcc

SEQ ID NO: 393267 - DNA, 15 bp, Homo sapiens
tcaactagatccctc

SEQ ID NO: 393268 - DNA, 15 bp, Homo sapiens
ttcaactagatccct

SEQ ID NO: 393269 - DNA, 15 bp, Homo sapiens
cttcaactagatccc

SEQ ID NO: 393270 - DNA, 15 bp, Homo sapiens
ccttcaactagatcc

SEQ ID NO: 393271 - DNA, 15 bp, Homo sapiens
gccttcaactagatc

SEQ ID NO: 393272 - DNA, 15 bp, Homo sapiens
agccttcaactagat

SEQ ID NO: 393273 - DNA, 15 bp, Homo sapiens
gagccttcaactaga

SEQ ID NO: 393274 - DNA, 15 bp, Homo sapiens
agagccttcaactag

SEQ ID NO: 393275 - DNA, 15 bp, Homo sapiens
gagagccttcaacta

SEQ ID NO: 393276 - DNA, 15 bp, Homo sapiens
ggagagccttcaact

SEQ ID NO: 393277 - DNA, 15 bp, Homo sapiens
aggagagccttcaac

SEQ ID NO: 393278 - DNA, 15 bp, Homo sapiens
caggagagccttcaa

SEQ ID NO: 393279 - DNA, 15 bp, Homo sapiens
acaggagagccttca

SEQ ID NO: 393280 - DNA, 15 bp, Homo sapiens
aacaggagagccttc

SEQ ID NO: 393281 - DNA, 15 bp, Homo sapiens
caacaggagagcctt

SEQ ID NO: 393282 - DNA, 15 bp, Homo sapiens
tcaacaggagagcct

SEQ ID NO: 393283 - DNA, 15 bp, Homo sapiens
ctcaacaggagagcc

SEQ ID NO: 393284 - DNA, 15 bp, Homo sapiens
gctcaacaggagagc

SEQ ID NO: 393285 - DNA, 15 bp, Homo sapiens
agctcaacaggagag

SEQ ID NO: 393286 - DNA, 15 bp, Homo sapiens
aagctcaacaggaga

SEQ ID NO: 393287 - DNA, 15 bp, Homo sapiens
aaagctcaacaggag

SEQ ID NO: 393288 - DNA, 15 bp, Homo sapiens
caaagctcaacagga

SEQ ID NO: 393289 - DNA, 15 bp, Homo sapiens
tcaaagctcaacagg

SEQ ID NO: 393290 - DNA, 15 bp, Homo sapiens
ttcaaagctcaacag

SEQ ID NO: 393291 - DNA, 15 bp, Homo sapiens
attcaaagctcaaca

SEQ ID NO: 393292 - DNA, 15 bp, Homo sapiens
aattcaaagctcaac

SEQ ID NO: 393293 - DNA, 15 bp, Homo sapiens
aaattcaaagctcaa

SEQ ID NO: 393294 - DNA, 15 bp, Homo sapiens
taaattcaaagctca

SEQ ID NO: 393295 - DNA, 15 bp, Homo sapiens
ataaattcaaagctc

SEQ ID NO: 393296 - DNA, 15 bp, Homo sapiens
tataaattcaaagct

SEQ ID NO: 393297 - DNA, 15 bp, Homo sapiens
ctataaattcaaagc

SEQ ID NO: 393298 - DNA, 15 bp, Homo sapiens
actataaattcaaag

SEQ ID NO: 393299 - DNA, 15 bp, Homo sapiens
gactataaattcaaa

SEQ ID NO: 393300 - DNA, 15 bp, Homo sapiens
tgactataaattcaa

SEQ ID NO: 393301 - DNA, 15 bp, Homo sapiens
ctgactataaattca

SEQ ID NO: 393302 - DNA, 15 bp, Homo sapiens
actgactataaattc

SEQ ID NO: 393303 - DNA, 15 bp, Homo sapiens
cactgactataaatt

SEQ ID NO: 393304 - DNA, 15 bp, Homo sapiens
acactgactataaat

SEQ ID NO: 393305 - DNA, 15 bp, Homo sapiens
aacactgactataaa

SEQ ID NO: 393306 - DNA, 15 bp, Homo sapiens
aaacactgactataa

SEQ ID NO: 393307 - DNA, 15 bp, Homo sapiens
taaacactgactata

SEQ ID NO: 393308 - DNA, 15 bp, Homo sapiens
ataaacactgactat

SEQ ID NO: 393309 - DNA, 15 bp, Homo sapiens
tataaacactgacta

SEQ ID NO: 393310 - DNA, 15 bp, Homo sapiens
ctataaacactgact

SEQ ID NO: 393311 - DNA, 15 bp, Homo sapiens
tctataaacactgac

SEQ ID NO: 393312 - DNA, 15 bp, Homo sapiens
ctctataaacactga

SEQ ID NO: 393313 - DNA, 15 bp, Homo sapiens
actctataaacactg

SEQ ID NO: 393314 - DNA, 15 bp, Homo sapiens
gactctataaacact

SEQ ID NO: 393315 - DNA, 15 bp, Homo sapiens
agactctataaacac

SEQ ID NO: 393316 - DNA, 15 bp, Homo sapiens
tagactctataaaca

SEQ ID NO: 393317 - DNA, 15 bp, Homo sapiens
ctagactctataaac

SEQ ID NO: 393318 - DNA, 15 bp, Homo sapiens
cctagactctataaa

SEQ ID NO: 393319 - DNA, 15 bp, Homo sapiens
gcctagactctataa

SEQ ID NO: 393320 - DNA, 15 bp, Homo sapiens
tgcctagactctata

SEQ ID NO: 393321 - DNA, 15 bp, Homo sapiens
ttgcctagactctat

SEQ ID NO: 393322 - DNA, 15 bp, Homo sapiens
cttgcctagactcta

SEQ ID NO: 393323 - DNA, 15 bp, Homo sapiens
acttgcctagactct

SEQ ID NO: 393324 - DNA, 15 bp, Homo sapiens
tacttgcctagactc

SEQ ID NO: 393325 - DNA, 15 bp, Homo sapiens
ctacttgcctagact

SEQ ID NO: 393326 - DNA, 15 bp, Homo sapiens
actacttgcctagac

SEQ ID NO: 393327 - DNA, 15 bp, Homo sapiens
tactacttgcctaga

SEQ ID NO: 393328 - DNA, 15 bp, Homo sapiens
atactacttgcctag

SEQ ID NO: 393329 - DNA, 15 bp, Homo sapiens
gatactacttgccta

SEQ ID NO: 393330 - DNA, 15 bp, Homo sapiens
agatactacttgcct

SEQ ID NO: 393331 - DNA, 15 bp, Homo sapiens
tagatactacttgcc

SEQ ID NO: 393332 - DNA, 15 bp, Homo sapiens
gtagatactacttgc

SEQ ID NO: 393333 - DNA, 15 bp, Homo sapiens
agtagatactacttg

SEQ ID NO: 393334 - DNA, 15 bp, Homo sapiens
cagtagatactactt

SEQ ID NO: 393335 - DNA, 15 bp, Homo sapiens
acagtagatactact

SEQ ID NO: 393336 - DNA, 15 bp, Homo sapiens
cacagtagatactac

SEQ ID NO: 393337 - DNA, 15 bp, Homo sapiens
tcacagtagatacta

SEQ ID NO: 393338 - DNA, 15 bp, Homo sapiens
gtcacagtagatact

SEQ ID NO: 393339 - DNA, 15 bp, Homo sapiens
tgtcacagtagatac

SEQ ID NO: 393340 - DNA, 15 bp, Homo sapiens
atgtcacagtagata

SEQ ID NO: 393341 - DNA, 15 bp, Homo sapiens
aatgtcacagtagat

SEQ ID NO: 393342 - DNA, 15 bp, Homo sapiens
aaatgtcacagtaga

SEQ ID NO: 393343 - DNA, 15 bp, Homo sapiens
caaatgtcacagtag

SEQ ID NO: 393344 - DNA, 15 bp, Homo sapiens
ccaaatgtcacagta

SEQ ID NO: 393345 - DNA, 15 bp, Homo sapiens
tccaaatgtcacagt

SEQ ID NO: 393346 - DNA, 15 bp, Homo sapiens
ctccaaatgtcacag

SEQ ID NO: 393347 - DNA, 15 bp, Homo sapiens
tctccaaatgtcaca

SEQ ID NO: 393348 - DNA, 15 bp, Homo sapiens
ttctccaaatgtcac

SEQ ID NO: 393349 - DNA, 15 bp, Homo sapiens
gttctccaaatgtca

SEQ ID NO: 393350 - DNA, 15 bp, Homo sapiens
agttctccaaatgtc

SEQ ID NO: 393351 - DNA, 15 bp, Homo sapiens
cagttctccaaatgt

SEQ ID NO: 393352 - DNA, 15 bp, Homo sapiens
tcagttctccaaatg

SEQ ID NO: 393353 - DNA, 15 bp, Homo sapiens
ttcagttctccaaat

SEQ ID NO: 393354 - DNA, 15 bp, Homo sapiens
tttcagttctccaaa

SEQ ID NO: 393355 - DNA, 15 bp, Homo sapiens
ttttcagttctccaa

SEQ ID NO: 393356 - DNA, 15 bp, Homo sapiens
cttttcagttctcca

SEQ ID NO: 393357 - DNA, 15 bp, Homo sapiens
acttttcagttctcc

SEQ ID NO: 393358 - DNA, 15 bp, Homo sapiens
tacttttcagttctc

SEQ ID NO: 393359 - DNA, 15 bp, Homo sapiens
ctacttttcagttct

SEQ ID NO: 393360 - DNA, 15 bp, Homo sapiens
tctacttttcagttc

SEQ ID NO: 393361 - DNA, 15 bp, Homo sapiens
ctctacttttcagtt

SEQ ID NO: 393362 - DNA, 15 bp, Homo sapiens
actctacttttcagt

SEQ ID NO: 393363 - DNA, 15 bp, Homo sapiens
cactctacttttcag

SEQ ID NO: 393364 - DNA, 15 bp, Homo sapiens
ccactctacttttca

SEQ ID NO: 393365 - DNA, 15 bp, Homo sapiens
cccactctacttttc

SEQ ID NO: 393366 - DNA, 15 bp, Homo sapiens
tcccactctactttt

SEQ ID NO: 393367 - DNA, 15 bp, Homo sapiens
atcccactctacttt

SEQ ID NO: 393368 - DNA, 15 bp, Homo sapiens
aatcccactctactt

SEQ ID NO: 393369 - DNA, 15 bp, Homo sapiens
aaatcccactctact

SEQ ID NO: 393370 - DNA, 15 bp, Homo sapiens
taaatcccactctac

SEQ ID NO: 393371 - DNA, 15 bp, Homo sapiens
ctaaatcccactcta

SEQ ID NO: 393372 - DNA, 15 bp, Homo sapiens
actaaatcccactct

SEQ ID NO: 393373 - DNA, 15 bp, Homo sapiens
cactaaatcccactc

SEQ ID NO: 393374 - DNA, 15 bp, Homo sapiens
ccactaaatcccact

SEQ ID NO: 393375 - DNA, 15 bp, Homo sapiens
accactaaatcccac

SEQ ID NO: 393376 - DNA, 15 bp, Homo sapiens
aaccactaaatccca

SEQ ID NO: 393377 - DNA, 15 bp, Homo sapiens
taaccactaaatccc

SEQ ID NO: 393378 - DNA, 15 bp, Homo sapiens
gtaaccactaaatcc

SEQ ID NO: 393379 - DNA, 15 bp, Homo sapiens
agtaaccactaaatc

SEQ ID NO: 393380 - DNA, 15 bp, Homo sapiens
cagtaaccactaaat

SEQ ID NO: 393381 - DNA, 15 bp, Homo sapiens
tcagtaaccactaaa

SEQ ID NO: 393382 - DNA, 15 bp, Homo sapiens
ctcagtaaccactaa

SEQ ID NO: 393383 - DNA, 15 bp, Homo sapiens
actcagtaaccacta

SEQ ID NO: 393384 - DNA, 15 bp, Homo sapiens
cactcagtaaccact

SEQ ID NO: 393385 - DNA, 15 bp, Homo sapiens
acactcagtaaccac

SEQ ID NO: 393386 - DNA, 15 bp, Homo sapiens
cacactcagtaacca

SEQ ID NO: 393387 - DNA, 15 bp, Homo sapiens
gcacactcagtaacc

SEQ ID NO: 393388 - DNA, 15 bp, Homo sapiens
ggcacactcagtaac

SEQ ID NO: 393389 - DNA, 15 bp, Homo sapiens
aggcacactcagtaa

SEQ ID NO: 393390 - DNA, 15 bp, Homo sapiens
aaggcacactcagta

SEQ ID NO: 393391 - DNA, 15 bp, Homo sapiens
caaggcacactcagt

SEQ ID NO: 393392 - DNA, 15 bp, Homo sapiens
ccaaggcacactcag

SEQ ID NO: 393393 - DNA, 15 bp, Homo sapiens
cccaaggcacactca

SEQ ID NO: 393394 - DNA, 15 bp, Homo sapiens
acccaaggcacactc

SEQ ID NO: 393395 - DNA, 15 bp, Homo sapiens
tacccaaggcacact

SEQ ID NO: 393396 - DNA, 15 bp, Homo sapiens
ctacccaaggcacac

SEQ ID NO: 393397 - DNA, 15 bp, Homo sapiens
cctacccaaggcaca

SEQ ID NO: 393398 - DNA, 15 bp, Homo sapiens
tcctacccaaggcac

SEQ ID NO: 393399 - DNA, 15 bp, Homo sapiens
gtcctacccaaggca

SEQ ID NO: 393400 - DNA, 15 bp, Homo sapiens
tgtcctacccaaggc

SEQ ID NO: 393401 - DNA, 15 bp, Homo sapiens
ctgtcctacccaagg

SEQ ID NO: 393402 - DNA, 15 bp, Homo sapiens
cctgtcctacccaag

SEQ ID NO: 393403 - DNA, 15 bp, Homo sapiens
acctgtcctacccaa

SEQ ID NO: 393404 - DNA, 15 bp, Homo sapiens
gacctgtcctaccca

SEQ ID NO: 393405 - DNA, 15 bp, Homo sapiens
ggacctgtcctaccc

SEQ ID NO: 393406 - DNA, 15 bp, Homo sapiens
aggacctgtcctacc

SEQ ID NO: 393407 - DNA, 15 bp, Homo sapiens
aaggacctgtcctac

SEQ ID NO: 393408 - DNA, 15 bp, Homo sapiens
aaaggacctgtccta

SEQ ID NO: 393409 - DNA, 15 bp, Homo sapiens
aaaaggacctgtcct

SEQ ID NO: 393410 - DNA, 15 bp, Homo sapiens
taaaaggacctgtcc

SEQ ID NO: 393411 - DNA, 15 bp, Homo sapiens
ataaaaggacctgtc

SEQ ID NO: 393412 - DNA, 15 bp, Homo sapiens
cataaaaggacctgt

SEQ ID NO: 393413 - DNA, 15 bp, Homo sapiens
ccataaaaggacctg

SEQ ID NO: 393414 - DNA, 15 bp, Homo sapiens
accataaaaggacct

SEQ ID NO: 393415 - DNA, 15 bp, Homo sapiens
aaccataaaaggacc

SEQ ID NO: 393416 - DNA, 15 bp, Homo sapiens
caaccataaaaggac

SEQ ID NO: 393417 - DNA, 15 bp, Homo sapiens
acaaccataaaagga

SEQ ID NO: 393418 - DNA, 15 bp, Homo sapiens
tacaaccataaaagg

SEQ ID NO: 393419 - DNA, 15 bp, Homo sapiens
ctacaaccataaaag

SEQ ID NO: 393420 - DNA, 15 bp, Homo sapiens
gctacaaccataaaa

SEQ ID NO: 393421 - DNA, 15 bp, Homo sapiens
agctacaaccataaa

SEQ ID NO: 393422 - DNA, 15 bp, Homo sapiens
aagctacaaccataa

SEQ ID NO: 393423 - DNA, 15 bp, Homo sapiens
aaagctacaaccata

SEQ ID NO: 393424 - DNA, 15 bp, Homo sapiens
gaaagctacaaccat

SEQ ID NO: 393425 - DNA, 15 bp, Homo sapiens
agaaagctacaacca

SEQ ID NO: 393426 - DNA, 15 bp, Homo sapiens
cagaaagctacaacc

SEQ ID NO: 393427 - DNA, 15 bp, Homo sapiens
gcagaaagctacaac

SEQ ID NO: 393428 - DNA, 15 bp, Homo sapiens
tgcagaaagctacaa

SEQ ID NO: 393429 - DNA, 15 bp, Homo sapiens
gtgcagaaagctaca

SEQ ID NO: 393430 - DNA, 15 bp, Homo sapiens
agtgcagaaagctac

SEQ ID NO: 393431 - DNA, 15 bp, Homo sapiens
aagtgcagaaagcta

SEQ ID NO: 393432 - DNA, 15 bp, Homo sapiens
caagtgcagaaagct

SEQ ID NO: 393433 - DNA, 15 bp, Homo sapiens
tcaagtgcagaaagc

SEQ ID NO: 393434 - DNA, 15 bp, Homo sapiens
ctcaagtgcagaaag

SEQ ID NO: 393435 - DNA, 15 bp, Homo sapiens
actcaagtgcagaaa

SEQ ID NO: 393436 - DNA, 15 bp, Homo sapiens
tactcaagtgcagaa

SEQ ID NO: 393437 - DNA, 15 bp, Homo sapiens
gtactcaagtgcaga

SEQ ID NO: 393438 - DNA, 15 bp, Homo sapiens
agtactcaagtgcag

SEQ ID NO: 393439 - DNA, 15 bp, Homo sapiens
aagtactcaagtgca

SEQ ID NO: 393440 - DNA, 15 bp, Homo sapiens
taagtactcaagtgc

SEQ ID NO: 393441 - DNA, 15 bp, Homo sapiens
ataagtactcaagtg

SEQ ID NO: 393442 - DNA, 15 bp, Homo sapiens
aataagtactcaagt

SEQ ID NO: 393443 - DNA, 15 bp, Homo sapiens
aaataagtactcaag

SEQ ID NO: 393444 - DNA, 15 bp, Homo sapiens
gaaataagtactcaa

SEQ ID NO: 393445 - DNA, 15 bp, Homo sapiens
agaaataagtactca

SEQ ID NO: 393446 - DNA, 15 bp, Homo sapiens
cagaaataagtactc

SEQ ID NO: 393447 - DNA, 15 bp, Homo sapiens
gcagaaataagtact

SEQ ID NO: 393448 - DNA, 15 bp, Homo sapiens
agcagaaataagtac

SEQ ID NO: 393449 - DNA, 15 bp, Homo sapiens
aagcagaaataagta

SEQ ID NO: 393450 - DNA, 15 bp, Homo sapiens
aaagcagaaataagt

SEQ ID NO: 393451 - DNA, 15 bp, Homo sapiens
taaagcagaaataag

SEQ ID NO: 393452 - DNA, 15 bp, Homo sapiens
gtaaagcagaaataa

SEQ ID NO: 393453 - DNA, 15 bp, Homo sapiens
agtaaagcagaaata

SEQ ID NO: 393454 - DNA, 15 bp, Homo sapiens
cagtaaagcagaaat

SEQ ID NO: 393455 - DNA, 15 bp, Homo sapiens
ccagtaaagcagaaa

SEQ ID NO: 393456 - DNA, 15 bp, Homo sapiens
gccagtaaagcagaa

SEQ ID NO: 393457 - DNA, 15 bp, Homo sapiens
agccagtaaagcaga

SEQ ID NO: 393458 - DNA, 15 bp, Homo sapiens
tagccagtaaagcag

SEQ ID NO: 393459 - DNA, 15 bp, Homo sapiens
ttagccagtaaagca

SEQ ID NO: 393460 - DNA, 15 bp, Homo sapiens
attagccagtaaagc

SEQ ID NO: 393461 - DNA, 15 bp, Homo sapiens
cattagccagtaaag

SEQ ID NO: 393462 - DNA, 15 bp, Homo sapiens
gcattagccagtaaa

SEQ ID NO: 393463 - DNA, 15 bp, Homo sapiens
ggcattagccagtaa

SEQ ID NO: 393464 - DNA, 15 bp, Homo sapiens
tggcattagccagta

SEQ ID NO: 393465 - DNA, 15 bp, Homo sapiens
gtggcattagccagt

SEQ ID NO: 393466 - DNA, 15 bp, Homo sapiens
agtggcattagccag

SEQ ID NO: 393467 - DNA, 15 bp, Homo sapiens
gagtggcattagcca

SEQ ID NO: 393468 - DNA, 15 bp, Homo sapiens
agagtggcattagcc

SEQ ID NO: 393469 - DNA, 15 bp, Homo sapiens
gagagtggcattagc

SEQ ID NO: 393470 - DNA, 15 bp, Homo sapiens
tgagagtggcattag

SEQ ID NO: 393471 - DNA, 15 bp, Homo sapiens
atgagagtggcatta

SEQ ID NO: 393472 - DNA, 15 bp, Homo sapiens
aatgagagtggcatt

SEQ ID NO: 393473 - DNA, 15 bp, Homo sapiens
aaatgagagtggcat

SEQ ID NO: 393474 - DNA, 15 bp, Homo sapiens
aaaatgagagtggca

SEQ ID NO: 393475 - DNA, 15 bp, Homo sapiens
taaaatgagagtggc

SEQ ID NO: 393476 - DNA, 15 bp, Homo sapiens
ttaaaatgagagtgg

SEQ ID NO: 393477 - DNA, 15 bp, Homo sapiens
cttaaaatgagagtg

SEQ ID NO: 393478 - DNA, 15 bp, Homo sapiens
gcttaaaatgagagt

SEQ ID NO: 393479 - DNA, 15 bp, Homo sapiens
agcttaaaatgagag

SEQ ID NO: 393480 - DNA, 15 bp, Homo sapiens
tagcttaaaatgaga

SEQ ID NO: 393481 - DNA, 15 bp, Homo sapiens
atagcttaaaatgag

SEQ ID NO: 393482 - DNA, 15 bp, Homo sapiens
gatagcttaaaatga

SEQ ID NO: 393483 - DNA, 15 bp, Homo sapiens
tgatagcttaaaatg

SEQ ID NO: 393484 - DNA, 15 bp, Homo sapiens
gtgatagcttaaaat

SEQ ID NO: 393485 - DNA, 15 bp, Homo sapiens
tgtgatagcttaaaa

SEQ ID NO: 393486 - DNA, 15 bp, Homo sapiens
ttgtgatagcttaaa

SEQ ID NO: 393487 - DNA, 15 bp, Homo sapiens
attgtgatagcttaa

SEQ ID NO: 393488 - DNA, 15 bp, Homo sapiens
cattgtgatagctta

SEQ ID NO: 393489 - DNA, 15 bp, Homo sapiens
tcattgtgatagctt

SEQ ID NO: 393490 - DNA, 15 bp, Homo sapiens
gtcattgtgatagct

SEQ ID NO: 393491 - DNA, 15 bp, Homo sapiens
agtcattgtgatagc

SEQ ID NO: 393492 - DNA, 15 bp, Homo sapiens
tagtcattgtgatag

SEQ ID NO: 393493 - DNA, 15 bp, Homo sapiens
ttagtcattgtgata

SEQ ID NO: 393494 - DNA, 15 bp, Homo sapiens
tttagtcattgtgat

SEQ ID NO: 393495 - DNA, 15 bp, Homo sapiens
gtttagtcattgtga

SEQ ID NO: 393496 - DNA, 15 bp, Homo sapiens
tgtttagtcattgtg

SEQ ID NO: 393497 - DNA, 15 bp, Homo sapiens
atgtttagtcattgt

SEQ ID NO: 393498 - DNA, 15 bp, Homo sapiens
aatgtttagtcattg

SEQ ID NO: 393499 - DNA, 15 bp, Homo sapiens
taatgtttagtcatt

SEQ ID NO: 393500 - DNA, 15 bp, Homo sapiens
ataatgtttagtcat

SEQ ID NO: 393501 - DNA, 15 bp, Homo sapiens
gataatgtttagtca

SEQ ID NO: 393502 - DNA, 15 bp, Homo sapiens
ggataatgtttagtc

SEQ ID NO: 393503 - DNA, 15 bp, Homo sapiens
gggataatgtttagt

SEQ ID NO: 393504 - DNA, 15 bp, Homo sapiens
agggataatgtttag

SEQ ID NO: 393505 - DNA, 15 bp, Homo sapiens
aagggataatgttta

SEQ ID NO: 393506 - DNA, 15 bp, Homo sapiens
aaagggataatgttt

SEQ ID NO: 393507 - DNA, 15 bp, Homo sapiens
gaaagggataatgtt

SEQ ID NO: 393508 - DNA, 15 bp, Homo sapiens
tgaaagggataatgt

SEQ ID NO: 393509 - DNA, 15 bp, Homo sapiens
atgaaagggataatg

SEQ ID NO: 393510 - DNA, 15 bp, Homo sapiens
aatgaaagggataat

SEQ ID NO: 393511 - DNA, 15 bp, Homo sapiens
gaatgaaagggataa

SEQ ID NO: 393512 - DNA, 15 bp, Homo sapiens
agaatgaaagggata

SEQ ID NO: 393513 - DNA, 15 bp, Homo sapiens
cagaatgaaagggat

SEQ ID NO: 393514 - DNA, 15 bp, Homo sapiens
tcagaatgaaaggga

SEQ ID NO: 393515 - DNA, 15 bp, Homo sapiens
atcagaatgaaaggg

SEQ ID NO: 393516 - DNA, 15 bp, Homo sapiens
aatcagaatgaaagg

SEQ ID NO: 393517 - DNA, 15 bp, Homo sapiens
gaatcagaatgaaag

SEQ ID NO: 393518 - DNA, 15 bp, Homo sapiens
agaatcagaatgaaa

SEQ ID NO: 393519 - DNA, 15 bp, Homo sapiens
gagaatcagaatgaa

SEQ ID NO: 393520 - DNA, 15 bp, Homo sapiens
agagaatcagaatga

SEQ ID NO: 393521 - DNA, 15 bp, Homo sapiens
cagagaatcagaatg

SEQ ID NO: 393522 - DNA, 15 bp, Homo sapiens
acagagaatcagaat

SEQ ID NO: 393523 - DNA, 15 bp, Homo sapiens
aacagagaatcagaa

SEQ ID NO: 393524 - DNA, 15 bp, Homo sapiens
gaacagagaatcaga

SEQ ID NO: 393525 - DNA, 15 bp, Homo sapiens
tgaacagagaatcag

SEQ ID NO: 393526 - DNA, 15 bp, Homo sapiens
ttgaacagagaatca

SEQ ID NO: 393527 - DNA, 15 bp, Homo sapiens
attgaacagagaatc

SEQ ID NO: 393528 - DNA, 15 bp, Homo sapiens
aattgaacagagaat

SEQ ID NO: 393529 - DNA, 15 bp, Homo sapiens
aaattgaacagagaa

SEQ ID NO: 393530 - DNA, 15 bp, Homo sapiens
aaaattgaacagaga

SEQ ID NO: 393531 - DNA, 15 bp, Homo sapiens
aaaaattgaacagag

SEQ ID NO: 393532 - DNA, 15 bp, Homo sapiens
aaaaaattgaacaga

SEQ ID NO: 393533 - DNA, 15 bp, Homo sapiens
gaaaaaattgaacag

SEQ ID NO: 393534 - DNA, 15 bp, Homo sapiens
tgaaaaaattgaaca

SEQ ID NO: 393535 - DNA, 15 bp, Homo sapiens
atgaaaaaattgaac

SEQ ID NO: 393536 - DNA, 15 bp, Homo sapiens
tatgaaaaaattgaa

SEQ ID NO: 393537 - DNA, 15 bp, Homo sapiens
atatgaaaaaattga

SEQ ID NO: 393538 - DNA, 15 bp, Homo sapiens
catatgaaaaaattg

SEQ ID NO: 393539 - DNA, 15 bp, Homo sapiens
acatatgaaaaaatt

SEQ ID NO: 393540 - DNA, 15 bp, Homo sapiens
aacatatgaaaaaat

SEQ ID NO: 393541 - DNA, 15 bp, Homo sapiens
caacatatgaaaaaa

SEQ ID NO: 393542 - DNA, 15 bp, Homo sapiens
ccaacatatgaaaaa

SEQ ID NO: 393543 - DNA, 15 bp, Homo sapiens
tccaacatatgaaaa

SEQ ID NO: 393544 - DNA, 15 bp, Homo sapiens
ttccaacatatgaaa

SEQ ID NO: 393545 - DNA, 15 bp, Homo sapiens
attccaacatatgaa

SEQ ID NO: 393546 - DNA, 15 bp, Homo sapiens
aattccaacatatga

SEQ ID NO: 393547 - DNA, 15 bp, Homo sapiens
caattccaacatatg

SEQ ID NO: 393548 - DNA, 15 bp, Homo sapiens
tcaattccaacatat

SEQ ID NO: 393549 - DNA, 15 bp, Homo sapiens
atcaattccaacata

SEQ ID NO: 393550 - DNA, 15 bp, Homo sapiens
gatcaattccaacat

SEQ ID NO: 393551 - DNA, 15 bp, Homo sapiens
tgatcaattccaaca

SEQ ID NO: 393552 - DNA, 15 bp, Homo sapiens
atgatcaattccaac

SEQ ID NO: 393553 - DNA, 15 bp, Homo sapiens
tatgatcaattccaa

SEQ ID NO: 393554 - DNA, 15 bp, Homo sapiens
ctatgatcaattcca

SEQ ID NO: 393555 - DNA, 15 bp, Homo sapiens
tctatgatcaattcc

SEQ ID NO: 393556 - DNA, 15 bp, Homo sapiens
ttctatgatcaattc

SEQ ID NO: 393557 - DNA, 15 bp, Homo sapiens
attctatgatcaatt

SEQ ID NO: 393558 - DNA, 15 bp, Homo sapiens
tattctatgatcaat

SEQ ID NO: 393559 - DNA, 15 bp, Homo sapiens
atattctatgatcaa

SEQ ID NO: 393560 - DNA, 15 bp, Homo sapiens
tatattctatgatca

SEQ ID NO: 393561 - DNA, 15 bp, Homo sapiens
ctatattctatgatc

SEQ ID NO: 393562 - DNA, 15 bp, Homo sapiens
tctatattctatgat

SEQ ID NO: 393563 - DNA, 15 bp, Homo sapiens
ttctatattctatga

SEQ ID NO: 393564 - DNA, 15 bp, Homo sapiens
tttctatattctatg

SEQ ID NO: 393565 - DNA, 15 bp, Homo sapiens
ctttctatattctat

SEQ ID NO: 393566 - DNA, 15 bp, Homo sapiens
tctttctatattcta

SEQ ID NO: 393567 - DNA, 15 bp, Homo sapiens
ttctttctatattct

SEQ ID NO: 393568 - DNA, 15 bp, Homo sapiens
attctttctatattc

SEQ ID NO: 393569 - DNA, 15 bp, Homo sapiens
aattctttctatatt

SEQ ID NO: 393570 - DNA, 15 bp, Homo sapiens
aaattctttctatat

SEQ ID NO: 393571 - DNA, 15 bp, Homo sapiens
aaaattctttctata

SEQ ID NO: 393572 - DNA, 15 bp, Homo sapiens
aaaaattctttctat

SEQ ID NO: 393573 - DNA, 15 bp, Homo sapiens
taaaaattctttcta

SEQ ID NO: 393574 - DNA, 15 bp, Homo sapiens
ataaaaattctttct

SEQ ID NO: 393575 - DNA, 15 bp, Homo sapiens
cataaaaattctttc

SEQ ID NO: 393576 - DNA, 15 bp, Homo sapiens
tcataaaaattcttt

SEQ ID NO: 393577 - DNA, 15 bp, Homo sapiens
ttcataaaaattctt

SEQ ID NO: 393578 - DNA, 15 bp, Homo sapiens
attcataaaaattct

SEQ ID NO: 393579 - DNA, 15 bp, Homo sapiens
aattcataaaaattc

SEQ ID NO: 393580 - DNA, 15 bp, Homo sapiens
gaattcataaaaatt

SEQ ID NO: 393581 - DNA, 15 bp, Homo sapiens
cgaattcataaaaat

SEQ ID NO: 393582 - DNA, 15 bp, Homo sapiens
ccgaattcataaaaa

SEQ ID NO: 393583 - DNA, 15 bp, Homo sapiens
tccgaattcataaaa

SEQ ID NO: 393584 - DNA, 15 bp, Homo sapiens
ttccgaattcataaa

SEQ ID NO: 393585 - DNA, 15 bp, Homo sapiens
gttccgaattcataa

SEQ ID NO: 393586 - DNA, 15 bp, Homo sapiens
agttccgaattcata

SEQ ID NO: 393587 - DNA, 15 bp, Homo sapiens
cagttccgaattcat

SEQ ID NO: 393588 - DNA, 15 bp, Homo sapiens
tcagttccgaattca

SEQ ID NO: 393589 - DNA, 15 bp, Homo sapiens
ttcagttccgaattc

SEQ ID NO: 393590 - DNA, 15 bp, Homo sapiens
gttcagttccgaatt

SEQ ID NO: 393591 - DNA, 15 bp, Homo sapiens
agttcagttccgaat

SEQ ID NO: 393592 - DNA, 15 bp, Homo sapiens
cagttcagttccgaa

SEQ ID NO: 393593 - DNA, 15 bp, Homo sapiens
acagttcagttccga

SEQ ID NO: 393594 - DNA, 15 bp, Homo sapiens
aacagttcagttccg

SEQ ID NO: 393595 - DNA, 15 bp, Homo sapiens
aaacagttcagttcc

SEQ ID NO: 393596 - DNA, 15 bp, Homo sapiens
caaacagttcagttc

SEQ ID NO: 393597 - DNA, 15 bp, Homo sapiens
ccaaacagttcagtt

SEQ ID NO: 393598 - DNA, 15 bp, Homo sapiens
gccaaacagttcagt

SEQ ID NO: 393599 - DNA, 15 bp, Homo sapiens
ggccaaacagttcag

SEQ ID NO: 393600 - DNA, 15 bp, Homo sapiens
gggccaaacagttca

SEQ ID NO: 393601 - DNA, 15 bp, Homo sapiens
tgggccaaacagttc

SEQ ID NO: 393602 - DNA, 15 bp, Homo sapiens
gtgggccaaacagtt

SEQ ID NO: 393603 - DNA, 15 bp, Homo sapiens
agtgggccaaacagt

SEQ ID NO: 393604 - DNA, 15 bp, Homo sapiens
cagtgggccaaacag

SEQ ID NO: 393605 - DNA, 15 bp, Homo sapiens
acagtgggccaaaca

SEQ ID NO: 393606 - DNA, 15 bp, Homo sapiens
tacagtgggccaaac

SEQ ID NO: 393607 - DNA, 15 bp, Homo sapiens
ctacagtgggccaaa

SEQ ID NO: 393608 - DNA, 15 bp, Homo sapiens
tctacagtgggccaa

SEQ ID NO: 393609 - DNA, 15 bp, Homo sapiens
atctacagtgggcca

SEQ ID NO: 393610 - DNA, 15 bp, Homo sapiens
aatctacagtgggcc

SEQ ID NO: 393611 - DNA, 15 bp, Homo sapiens
aaatctacagtgggc

SEQ ID NO: 393612 - DNA, 15 bp, Homo sapiens
caaatctacagtggg

SEQ ID NO: 393613 - DNA, 15 bp, Homo sapiens
ccaaatctacagtgg

SEQ ID NO: 393614 - DNA, 15 bp, Homo sapiens
accaaatctacagtg

SEQ ID NO: 393615 - DNA, 15 bp, Homo sapiens
aaccaaatctacagt

SEQ ID NO: 393616 - DNA, 15 bp, Homo sapiens
aaaccaaatctacag

SEQ ID NO: 393617 - DNA, 15 bp, Homo sapiens
aaaaccaaatctaca

SEQ ID NO: 393618 - DNA, 15 bp, Homo sapiens
taaaaccaaatctac

SEQ ID NO: 393619 - DNA, 15 bp, Homo sapiens
ataaaaccaaatcta

SEQ ID NO: 393620 - DNA, 15 bp, Homo sapiens
aataaaaccaaatct

SEQ ID NO: 393621 - DNA, 15 bp, Homo sapiens
caataaaaccaaatc

SEQ ID NO: 393622 - DNA, 15 bp, Homo sapiens
ccaataaaaccaaat

SEQ ID NO: 393623 - DNA, 15 bp, Homo sapiens
tccaataaaaccaaa

SEQ ID NO: 393624 - DNA, 15 bp, Homo sapiens
ttccaataaaaccaa

SEQ ID NO: 393625 - DNA, 15 bp, Homo sapiens
tttccaataaaacca

SEQ ID NO: 393626 - DNA, 15 bp, Homo sapiens
ctttccaataaaacc

SEQ ID NO: 393627 - DNA, 15 bp, Homo sapiens
tctttccaataaaac

SEQ ID NO: 393628 - DNA, 15 bp, Homo sapiens
ttctttccaataaaa

SEQ ID NO: 393629 - DNA, 15 bp, Homo sapiens
gttctttccaataaa

SEQ ID NO: 393630 - DNA, 15 bp, Homo sapiens
ggttctttccaataa

SEQ ID NO: 393631 - DNA, 15 bp, Homo sapiens
aggttctttccaata

SEQ ID NO: 393632 - DNA, 15 bp, Homo sapiens
taggttctttccaat

SEQ ID NO: 393633 - DNA, 15 bp, Homo sapiens
ctaggttctttccaa

SEQ ID NO: 393634 - DNA, 15 bp, Homo sapiens
actaggttctttcca

SEQ ID NO: 393635 - DNA, 15 bp, Homo sapiens
aactaggttctttcc

SEQ ID NO: 393636 - DNA, 15 bp, Homo sapiens
aaactaggttctttc

SEQ ID NO: 393637 - DNA, 15 bp, Homo sapiens
aaaactaggttcttt

SEQ ID NO: 393638 - DNA, 15 bp, Homo sapiens
aaaaactaggttctt

SEQ ID NO: 393639 - DNA, 15 bp, Homo sapiens
aaaaaactaggttct

SEQ ID NO: 393640 - DNA, 15 bp, Homo sapiens
caaaaaactaggttc

SEQ ID NO: 393641 - DNA, 15 bp, Homo sapiens
tcaaaaaactaggtt

SEQ ID NO: 393642 - DNA, 15 bp, Homo sapiens
ttcaaaaaactaggt

SEQ ID NO: 393643 - DNA, 15 bp, Homo sapiens
tttcaaaaaactagg

SEQ ID NO: 393644 - DNA, 15 bp, Homo sapiens
atttcaaaaaactag

SEQ ID NO: 393645 - DNA, 15 bp, Homo sapiens
aatttcaaaaaacta

SEQ ID NO: 393646 - DNA, 15 bp, Homo sapiens
aaatttcaaaaaact

SEQ ID NO: 393647 - DNA, 15 bp, Homo sapiens
aaaatttcaaaaaac

SEQ ID NO: 393648 - DNA, 15 bp, Homo sapiens
aaaaatttcaaaaaa

SEQ ID NO: 393649 - DNA, 15 bp, Homo sapiens
aaaaaatttcaaaaa

SEQ ID NO: 393650 - DNA, 15 bp, Homo sapiens
aaaaaaatttcaaaa

SEQ ID NO: 393651 - DNA, 15 bp, Homo sapiens
aaaaaaaatttcaaa

SEQ ID NO: 393652 - DNA, 15 bp, Homo sapiens
aaaaaaaaatttcaa

SEQ ID NO: 393653 - DNA, 15 bp, Homo sapiens
aaaaaaaaaatttca

SEQ ID NO: 393654 - DNA, 15 bp, Homo sapiens
aaaaaaaaaaatttc

SEQ ID NO: 393655 - DNA, 15 bp, Homo sapiens
aaaaaaaaaaaattt

SEQ ID NO: 393656 - DNA, 15 bp, Homo sapiens
gccaaaaaaaaaaaa

SEQ ID NO: 393657 - DNA, 15 bp, Homo sapiens
agccaaaaaaaaaaa

SEQ ID NO: 393658 - DNA, 15 bp, Homo sapiens
aagccaaaaaaaaaa

SEQ ID NO: 393659 - DNA, 15 bp, Homo sapiens
gaagccaaaaaaaaa

SEQ ID NO: 393660 - DNA, 15 bp, Homo sapiens
ggaagccaaaaaaaa

SEQ ID NO: 393661 - DNA, 15 bp, Homo sapiens
cggaagccaaaaaaa

SEQ ID NO: 393662 - DNA, 15 bp, Homo sapiens
acggaagccaaaaaa

SEQ ID NO: 393663 - DNA, 15 bp, Homo sapiens
tacggaagccaaaaa

SEQ ID NO: 393664 - DNA, 15 bp, Homo sapiens
atacggaagccaaaa

SEQ ID NO: 393665 - DNA, 15 bp, Homo sapiens
catacggaagccaaa

SEQ ID NO: 393666 - DNA, 15 bp, Homo sapiens
tcatacggaagccaa

SEQ ID NO: 393667 - DNA, 15 bp, Homo sapiens
atcatacggaagcca

SEQ ID NO: 393668 - DNA, 15 bp, Homo sapiens
gatcatacggaagcc

SEQ ID NO: 393669 - DNA, 15 bp, Homo sapiens
tgatcatacggaagc

SEQ ID NO: 393670 - DNA, 15 bp, Homo sapiens
gtgatcatacggaag

SEQ ID NO: 393671 - DNA, 15 bp, Homo sapiens
ggtgatcatacggaa

SEQ ID NO: 393672 - DNA, 15 bp, Homo sapiens
aggtgatcatacgga

SEQ ID NO: 393673 - DNA, 15 bp, Homo sapiens
taggtgatcatacgg

SEQ ID NO: 393674 - DNA, 15 bp, Homo sapiens
gtaggtgatcatacg

SEQ ID NO: 393675 - DNA, 15 bp, Homo sapiens
agtaggtgatcatac

SEQ ID NO: 393676 - DNA, 15 bp, Homo sapiens
gagtaggtgatcata

SEQ ID NO: 393677 - DNA, 15 bp, Homo sapiens
agagtaggtgatcat

SEQ ID NO: 393678 - DNA, 15 bp, Homo sapiens
tagagtaggtgatca

SEQ ID NO: 393679 - DNA, 15 bp, Homo sapiens
gtagagtaggtgatc

SEQ ID NO: 393680 - DNA, 15 bp, Homo sapiens
tgtagagtaggtgat

SEQ ID NO: 393681 - DNA, 15 bp, Homo sapiens
gtgtagagtaggtga

SEQ ID NO: 393682 - DNA, 15 bp, Homo sapiens
tgtgtagagtaggtg

SEQ ID NO: 393683 - DNA, 15 bp, Homo sapiens
ctgtgtagagtaggt

SEQ ID NO: 393684 - DNA, 15 bp, Homo sapiens
cctgtgtagagtagg

SEQ ID NO: 393685 - DNA, 15 bp, Homo sapiens
gcctgtgtagagtag

SEQ ID NO: 393686 - DNA, 15 bp, Homo sapiens
tgcctgtgtagagta

SEQ ID NO: 393687 - DNA, 15 bp, Homo sapiens
ctgcctgtgtagagt

SEQ ID NO: 393688 - DNA, 15 bp, Homo sapiens
actgcctgtgtagag

SEQ ID NO: 393689 - DNA, 15 bp, Homo sapiens
tactgcctgtgtaga

SEQ ID NO: 393690 - DNA, 15 bp, Homo sapiens
atactgcctgtgtag

SEQ ID NO: 393691 - DNA, 15 bp, Homo sapiens
aatactgcctgtgta

SEQ ID NO: 393692 - DNA, 15 bp, Homo sapiens
caatactgcctgtgt

SEQ ID NO: 393693 - DNA, 15 bp, Homo sapiens
acaatactgcctgtg

SEQ ID NO: 393694 - DNA, 15 bp, Homo sapiens
cacaatactgcctgt

SEQ ID NO: 393695 - DNA, 15 bp, Homo sapiens
acacaatactgcctg

SEQ ID NO: 393696 - DNA, 15 bp, Homo sapiens
tacacaatactgcct

SEQ ID NO: 393697 - DNA, 15 bp, Homo sapiens
gtacacaatactgcc

SEQ ID NO: 393698 - DNA, 15 bp, Homo sapiens
agtacacaatactgc

SEQ ID NO: 393699 - DNA, 15 bp, Homo sapiens
cagtacacaatactg

SEQ ID NO: 393700 - DNA, 15 bp, Homo sapiens
ccagtacacaatact

SEQ ID NO: 393701 - DNA, 15 bp, Homo sapiens
accagtacacaatac

SEQ ID NO: 393702 - DNA, 15 bp, Homo sapiens
aaccagtacacaata

SEQ ID NO: 393703 - DNA, 15 bp, Homo sapiens
taaccagtacacaat

SEQ ID NO: 393704 - DNA, 15 bp, Homo sapiens
ttaaccagtacacaa

SEQ ID NO: 393705 - DNA, 15 bp, Homo sapiens
cttaaccagtacaca

SEQ ID NO: 393706 - DNA, 15 bp, Homo sapiens
gcttaaccagtacac

SEQ ID NO: 393707 - DNA, 15 bp, Homo sapiens
tgcttaaccagtaca

SEQ ID NO: 393708 - DNA, 15 bp, Homo sapiens
gtgcttaaccagtac

SEQ ID NO: 393709 - DNA, 15 bp, Homo sapiens
tgtgcttaaccagta

SEQ ID NO: 393710 - DNA, 15 bp, Homo sapiens
ttgtgcttaaccagt

SEQ ID NO: 393711 - DNA, 15 bp, Homo sapiens
cttgtgcttaaccag

SEQ ID NO: 393712 - DNA, 15 bp, Homo sapiens
ccttgtgcttaacca

SEQ ID NO: 393713 - DNA, 15 bp, Homo sapiens
tccttgtgcttaacc

SEQ ID NO: 393714 - DNA, 15 bp, Homo sapiens
atccttgtgcttaac

SEQ ID NO: 393715 - DNA, 15 bp, Homo sapiens
aatccttgtgcttaa

SEQ ID NO: 393716 - DNA, 15 bp, Homo sapiens
gaatccttgtgctta

SEQ ID NO: 393717 - DNA, 15 bp, Homo sapiens
agaatccttgtgctt

SEQ ID NO: 393718 - DNA, 15 bp, Homo sapiens
cagaatccttgtgct

SEQ ID NO: 393719 - DNA, 15 bp, Homo sapiens
tcagaatccttgtgc

SEQ ID NO: 393720 - DNA, 15 bp, Homo sapiens
ctcagaatccttgtg

SEQ ID NO: 393721 - DNA, 15 bp, Homo sapiens
gctcagaatccttgt

SEQ ID NO: 393722 - DNA, 15 bp, Homo sapiens
agctcagaatccttg

SEQ ID NO: 393723 - DNA, 15 bp, Homo sapiens
tagctcagaatcctt

SEQ ID NO: 393724 - DNA, 15 bp, Homo sapiens
ctagctcagaatcct

SEQ ID NO: 393725 - DNA, 15 bp, Homo sapiens
tctagctcagaatcc

SEQ ID NO: 393726 - DNA, 15 bp, Homo sapiens
ctctagctcagaatc

SEQ ID NO: 393727 - DNA, 15 bp, Homo sapiens
cctctagctcagaat

SEQ ID NO: 393728 - DNA, 15 bp, Homo sapiens
gcctctagctcagaa

SEQ ID NO: 393729 - DNA, 15 bp, Homo sapiens
agcctctagctcaga

SEQ ID NO: 393730 - DNA, 15 bp, Homo sapiens
tagcctctagctcag

SEQ ID NO: 393731 - DNA, 15 bp, Homo sapiens
gtagcctctagctca

SEQ ID NO: 393732 - DNA, 15 bp, Homo sapiens
agtagcctctagctc

SEQ ID NO: 393733 - DNA, 15 bp, Homo sapiens
gagtagcctctagct

SEQ ID NO: 393734 - DNA, 15 bp, Homo sapiens
ggagtagcctctagc

SEQ ID NO: 393735 - DNA, 15 bp, Homo sapiens
tggagtagcctctag

SEQ ID NO: 393736 - DNA, 15 bp, Homo sapiens
ctggagtagcctcta

SEQ ID NO: 393737 - DNA, 15 bp, Homo sapiens
actggagtagcctct

SEQ ID NO: 393738 - DNA, 15 bp, Homo sapiens
aactggagtagcctc

SEQ ID NO: 393739 - DNA, 15 bp, Homo sapiens
caactggagtagcct

SEQ ID NO: 393740 - DNA, 15 bp, Homo sapiens
tcaactggagtagcc

SEQ ID NO: 393741 - DNA, 15 bp, Homo sapiens
ttcaactggagtagc

SEQ ID NO: 393742 - DNA, 15 bp, Homo sapiens
attcaactggagtag

SEQ ID NO: 393743 - DNA, 15 bp, Homo sapiens
gattcaactggagta

SEQ ID NO: 393744 - DNA, 15 bp, Homo sapiens
ggattcaactggagt

SEQ ID NO: 393745 - DNA, 15 bp, Homo sapiens
aggattcaactggag

SEQ ID NO: 393746 - DNA, 15 bp, Homo sapiens
caggattcaactgga

SEQ ID NO: 393747 - DNA, 15 bp, Homo sapiens
ccaggattcaactgg

SEQ ID NO: 393748 - DNA, 15 bp, Homo sapiens
gccaggattcaactg

SEQ ID NO: 393749 - DNA, 15 bp, Homo sapiens
agccaggattcaact

SEQ ID NO: 393750 - DNA, 15 bp, Homo sapiens
gagccaggattcaac

SEQ ID NO: 393751 - DNA, 15 bp, Homo sapiens
agagccaggattcaa

SEQ ID NO: 393752 - DNA, 15 bp, Homo sapiens
cagagccaggattca

SEQ ID NO: 393753 - DNA, 15 bp, Homo sapiens
tcagagccaggattc

SEQ ID NO: 393754 - DNA, 15 bp, Homo sapiens
atcagagccaggatt

SEQ ID NO: 393755 - DNA, 15 bp, Homo sapiens
gatcagagccaggat

SEQ ID NO: 393756 - DNA, 15 bp, Homo sapiens
agatcagagccagga

SEQ ID NO: 393757 - DNA, 15 bp, Homo sapiens
aagatcagagccagg

SEQ ID NO: 393758 - DNA, 15 bp, Homo sapiens
taagatcagagccag

SEQ ID NO: 393759 - DNA, 15 bp, Homo sapiens
ctaagatcagagcca

SEQ ID NO: 393760 - DNA, 15 bp, Homo sapiens
tctaagatcagagcc

SEQ ID NO: 393761 - DNA, 15 bp, Homo sapiens
atctaagatcagagc

SEQ ID NO: 393762 - DNA, 15 bp, Homo sapiens
tatctaagatcagag

SEQ ID NO: 393763 - DNA, 15 bp, Homo sapiens
ttatctaagatcaga

SEQ ID NO: 393764 - DNA, 15 bp, Homo sapiens
cttatctaagatcag

SEQ ID NO: 393765 - DNA, 15 bp, Homo sapiens
acttatctaagatca

SEQ ID NO: 393766 - DNA, 15 bp, Homo sapiens
aacttatctaagatc

SEQ ID NO: 393767 - DNA, 15 bp, Homo sapiens
caacttatctaagat

SEQ ID NO: 393768 - DNA, 15 bp, Homo sapiens
acaacttatctaaga

SEQ ID NO: 393769 - DNA, 15 bp, Homo sapiens
aacaacttatctaag

SEQ ID NO: 393770 - DNA, 15 bp, Homo sapiens
aaacaacttatctaa

SEQ ID NO: 393771 - DNA, 15 bp, Homo sapiens
taaacaacttatcta

SEQ ID NO: 393772 - DNA, 15 bp, Homo sapiens
ataaacaacttatct

SEQ ID NO: 393773 - DNA, 15 bp, Homo sapiens
gataaacaacttatc

SEQ ID NO: 393774 - DNA, 15 bp, Homo sapiens
ggataaacaacttat

SEQ ID NO: 393775 - DNA, 15 bp, Homo sapiens
aggataaacaactta

SEQ ID NO: 393776 - DNA, 15 bp, Homo sapiens
gaggataaacaactt

SEQ ID NO: 393777 - DNA, 15 bp, Homo sapiens
ggaggataaacaact

SEQ ID NO: 393778 - DNA, 15 bp, Homo sapiens
tggaggataaacaac

SEQ ID NO: 393779 - DNA, 15 bp, Homo sapiens
atggaggataaacaa

SEQ ID NO: 393780 - DNA, 15 bp, Homo sapiens
catggaggataaaca

SEQ ID NO: 393781 - DNA, 15 bp, Homo sapiens
gcatggaggataaac

SEQ ID NO: 393782 - DNA, 15 bp, Homo sapiens
ggcatggaggataaa

SEQ ID NO: 393783 - DNA, 15 bp, Homo sapiens
aggcatggaggataa

SEQ ID NO: 393784 - DNA, 15 bp, Homo sapiens
gaggcatggaggata

SEQ ID NO: 393785 - DNA, 15 bp, Homo sapiens
tgaggcatggaggat

SEQ ID NO: 393786 - DNA, 15 bp, Homo sapiens
ctgaggcatggagga

SEQ ID NO: 393787 - DNA, 15 bp, Homo sapiens
actgaggcatggagg

SEQ ID NO: 393788 - DNA, 15 bp, Homo sapiens
aactgaggcatggag

SEQ ID NO: 393789 - DNA, 15 bp, Homo sapiens
gaactgaggcatgga

SEQ ID NO: 393790 - DNA, 15 bp, Homo sapiens
agaactgaggcatgg

SEQ ID NO: 393791 - DNA, 15 bp, Homo sapiens
aagaactgaggcatg

SEQ ID NO: 393792 - DNA, 15 bp, Homo sapiens
gaagaactgaggcat

SEQ ID NO: 393793 - DNA, 15 bp, Homo sapiens
tgaagaactgaggca

SEQ ID NO: 393794 - DNA, 15 bp, Homo sapiens
atgaagaactgaggc

SEQ ID NO: 393795 - DNA, 15 bp, Homo sapiens
gatgaagaactgagg

SEQ ID NO: 393796 - DNA, 15 bp, Homo sapiens
agatgaagaactgag

SEQ ID NO: 393797 - DNA, 15 bp, Homo sapiens
gagatgaagaactga

SEQ ID NO: 393798 - DNA, 15 bp, Homo sapiens
agagatgaagaactg

SEQ ID NO: 393799 - DNA, 15 bp, Homo sapiens
tagagatgaagaact

SEQ ID NO: 393800 - DNA, 15 bp, Homo sapiens
ttagagatgaagaac

SEQ ID NO: 393801 - DNA, 15 bp, Homo sapiens
tttagagatgaagaa

SEQ ID NO: 393802 - DNA, 15 bp, Homo sapiens
ttttagagatgaaga

SEQ ID NO: 393803 - DNA, 15 bp, Homo sapiens
attttagagatgaag

SEQ ID NO: 393804 - DNA, 15 bp, Homo sapiens
cattttagagatgaa

SEQ ID NO: 393805 - DNA, 15 bp, Homo sapiens
ccattttagagatga

SEQ ID NO: 393806 - DNA, 15 bp, Homo sapiens
cccattttagagatg

SEQ ID NO: 393807 - DNA, 15 bp, Homo sapiens
ccccattttagagat

SEQ ID NO: 393808 - DNA, 15 bp, Homo sapiens
tccccattttagaga

SEQ ID NO: 393809 - DNA, 15 bp, Homo sapiens
atccccattttagag

SEQ ID NO: 393810 - DNA, 15 bp, Homo sapiens
tatccccattttaga

SEQ ID NO: 393811 - DNA, 15 bp, Homo sapiens
ttatccccattttag

SEQ ID NO: 393812 - DNA, 15 bp, Homo sapiens
attatccccatttta

SEQ ID NO: 393813 - DNA, 15 bp, Homo sapiens
tattatccccatttt

SEQ ID NO: 393814 - DNA, 15 bp, Homo sapiens
gtattatccccattt

SEQ ID NO: 393815 - DNA, 15 bp, Homo sapiens
ggtattatccccatt

SEQ ID NO: 393816 - DNA, 15 bp, Homo sapiens
aggtattatccccat

SEQ ID NO: 393817 - DNA, 15 bp, Homo sapiens
gaggtattatcccca

SEQ ID NO: 393818 - DNA, 15 bp, Homo sapiens
ggaggtattatcccc

SEQ ID NO: 393819 - DNA, 15 bp, Homo sapiens
aggaggtattatccc

SEQ ID NO: 393820 - DNA, 15 bp, Homo sapiens
taggaggtattatcc

SEQ ID NO: 393821 - DNA, 15 bp, Homo sapiens
ctaggaggtattatc

SEQ ID NO: 393822 - DNA, 15 bp, Homo sapiens
cctaggaggtattat

SEQ ID NO: 393823 - DNA, 15 bp, Homo sapiens
ccctaggaggtatta

SEQ ID NO: 393824 - DNA, 15 bp, Homo sapiens
accctaggaggtatt

SEQ ID NO: 393825 - DNA, 15 bp, Homo sapiens
gaccctaggaggtat

SEQ ID NO: 393826 - DNA, 15 bp, Homo sapiens
cgaccctaggaggta

SEQ ID NO: 393827 - DNA, 15 bp, Homo sapiens
acgaccctaggaggt

SEQ ID NO: 393828 - DNA, 15 bp, Homo sapiens
aacgaccctaggagg

SEQ ID NO: 393829 - DNA, 15 bp, Homo sapiens
aaacgaccctaggag

SEQ ID NO: 393830 - DNA, 15 bp, Homo sapiens
aaaacgaccctagga

SEQ ID NO: 393831 - DNA, 15 bp, Homo sapiens
taaaacgaccctagg

SEQ ID NO: 393832 - DNA, 15 bp, Homo sapiens
ttaaaacgaccctag

SEQ ID NO: 393833 - DNA, 15 bp, Homo sapiens
cttaaaacgacccta

SEQ ID NO: 393834 - DNA, 15 bp, Homo sapiens
ccttaaaacgaccct

SEQ ID NO: 393835 - DNA, 15 bp, Homo sapiens
cccttaaaacgaccc

SEQ ID NO: 393836 - DNA, 15 bp, Homo sapiens
acccttaaaacgacc

SEQ ID NO: 393837 - DNA, 15 bp, Homo sapiens
aacccttaaaacgac

SEQ ID NO: 393838 - DNA, 15 bp, Homo sapiens
taacccttaaaacga

SEQ ID NO: 393839 - DNA, 15 bp, Homo sapiens
ttaacccttaaaacg

SEQ ID NO: 393840 - DNA, 15 bp, Homo sapiens
tttaacccttaaaac

SEQ ID NO: 393841 - DNA, 15 bp, Homo sapiens
atttaacccttaaaa

SEQ ID NO: 393842 - DNA, 15 bp, Homo sapiens
tatttaacccttaaa

SEQ ID NO: 393843 - DNA, 15 bp, Homo sapiens
ctatttaacccttaa

SEQ ID NO: 393844 - DNA, 15 bp, Homo sapiens
cctatttaaccctta

SEQ ID NO: 393845 - DNA, 15 bp, Homo sapiens
acctatttaaccctt

SEQ ID NO: 393846 - DNA, 15 bp, Homo sapiens
aacctatttaaccct

SEQ ID NO: 393847 - DNA, 15 bp, Homo sapiens
taacctatttaaccc

SEQ ID NO: 393848 - DNA, 15 bp, Homo sapiens
ttaacctatttaacc

SEQ ID NO: 393849 - DNA, 15 bp, Homo sapiens
attaacctatttaac

SEQ ID NO: 393850 - DNA, 15 bp, Homo sapiens
tattaacctatttaa

SEQ ID NO: 393851 - DNA, 15 bp, Homo sapiens
gtattaacctattta

SEQ ID NO: 393852 - DNA, 15 bp, Homo sapiens
tgtattaacctattt

SEQ ID NO: 393853 - DNA, 15 bp, Homo sapiens
atgtattaacctatt

SEQ ID NO: 393854 - DNA, 15 bp, Homo sapiens
catgtattaacctat

SEQ ID NO: 393855 - DNA, 15 bp, Homo sapiens
tcatgtattaaccta

SEQ ID NO: 393856 - DNA, 15 bp, Homo sapiens
ttcatgtattaacct

SEQ ID NO: 393857 - DNA, 15 bp, Homo sapiens
attcatgtattaacc

SEQ ID NO: 393858 - DNA, 15 bp, Homo sapiens
aattcatgtattaac

SEQ ID NO: 393859 - DNA, 15 bp, Homo sapiens
taattcatgtattaa

SEQ ID NO: 393860 - DNA, 15 bp, Homo sapiens
ctaattcatgtatta

SEQ ID NO: 393861 - DNA, 15 bp, Homo sapiens
tctaattcatgtatt

SEQ ID NO: 393862 - DNA, 15 bp, Homo sapiens
ttctaattcatgtat

SEQ ID NO: 393863 - DNA, 15 bp, Homo sapiens
gttctaattcatgta

SEQ ID NO: 393864 - DNA, 15 bp, Homo sapiens
tgttctaattcatgt

SEQ ID NO: 393865 - DNA, 15 bp, Homo sapiens
ttgttctaattcatg

SEQ ID NO: 393866 - DNA, 15 bp, Homo sapiens
attgttctaattcat

SEQ ID NO: 393867 - DNA, 15 bp, Homo sapiens
cattgttctaattca

SEQ ID NO: 393868 - DNA, 15 bp, Homo sapiens
gcattgttctaattc

SEQ ID NO: 393869 - DNA, 15 bp, Homo sapiens
ggcattgttctaatt

SEQ ID NO: 393870 - DNA, 15 bp, Homo sapiens
aggcattgttctaat

SEQ ID NO: 393871 - DNA, 15 bp, Homo sapiens
caggcattgttctaa

SEQ ID NO: 393872 - DNA, 15 bp, Homo sapiens
ccaggcattgttcta

SEQ ID NO: 393873 - DNA, 15 bp, Homo sapiens
accaggcattgttct

SEQ ID NO: 393874 - DNA, 15 bp, Homo sapiens
taccaggcattgttc

SEQ ID NO: 393875 - DNA, 15 bp, Homo sapiens
gtaccaggcattgtt

SEQ ID NO: 393876 - DNA, 15 bp, Homo sapiens
tgtaccaggcattgt

SEQ ID NO: 393877 - DNA, 15 bp, Homo sapiens
gtgtaccaggcattg

SEQ ID NO: 393878 - DNA, 15 bp, Homo sapiens
tgtgtaccaggcatt

SEQ ID NO: 393879 - DNA, 15 bp, Homo sapiens
gtgtgtaccaggcat

SEQ ID NO: 393880 - DNA, 15 bp, Homo sapiens
tgtgtgtaccaggca

SEQ ID NO: 393881 - DNA, 15 bp, Homo sapiens
ttgtgtgtaccaggc

SEQ ID NO: 393882 - DNA, 15 bp, Homo sapiens
tttgtgtgtaccagg

SEQ ID NO: 393883 - DNA, 15 bp, Homo sapiens
ctttgtgtgtaccag

SEQ ID NO: 393884 - DNA, 15 bp, Homo sapiens
actttgtgtgtacca

SEQ ID NO: 393885 - DNA, 15 bp, Homo sapiens
cactttgtgtgtacc

SEQ ID NO: 393886 - DNA, 15 bp, Homo sapiens
gcactttgtgtgtac

SEQ ID NO: 393887 - DNA, 15 bp, Homo sapiens
agcactttgtgtgta

SEQ ID NO: 393888 - DNA, 15 bp, Homo sapiens
tagcactttgtgtgt

SEQ ID NO: 393889 - DNA, 15 bp, Homo sapiens
atagcactttgtgtg

SEQ ID NO: 393890 - DNA, 15 bp, Homo sapiens
aatagcactttgtgt

SEQ ID NO: 393891 - DNA, 15 bp, Homo sapiens
aaatagcactttgtg

SEQ ID NO: 393892 - DNA, 15 bp, Homo sapiens
taaatagcactttgt

SEQ ID NO: 393893 - DNA, 15 bp, Homo sapiens
gtaaatagcactttg

SEQ ID NO: 393894 - DNA, 15 bp, Homo sapiens
tgtaaatagcacttt

SEQ ID NO: 393895 - DNA, 15 bp, Homo sapiens
atgtaaatagcactt

SEQ ID NO: 393896 - DNA, 15 bp, Homo sapiens
tatgtaaatagcact

SEQ ID NO: 393897 - DNA, 15 bp, Homo sapiens
atatgtaaatagcac

SEQ ID NO: 393898 - DNA, 15 bp, Homo sapiens
aatatgtaaatagca

SEQ ID NO: 393899 - DNA, 15 bp, Homo sapiens
taatatgtaaatagc

SEQ ID NO: 393900 - DNA, 15 bp, Homo sapiens
ctaatatgtaaatag

SEQ ID NO: 393901 - DNA, 15 bp, Homo sapiens
gctaatatgtaaata

SEQ ID NO: 393902 - DNA, 15 bp, Homo sapiens
agctaatatgtaaat

SEQ ID NO: 393903 - DNA, 15 bp, Homo sapiens
cagctaatatgtaaa

SEQ ID NO: 393904 - DNA, 15 bp, Homo sapiens
acagctaatatgtaa

SEQ ID NO: 393905 - DNA, 15 bp, Homo sapiens
aacagctaatatgta

SEQ ID NO: 393906 - DNA, 15 bp, Homo sapiens
taacagctaatatgt

SEQ ID NO: 393907 - DNA, 15 bp, Homo sapiens
ttaacagctaatatg

SEQ ID NO: 393908 - DNA, 15 bp, Homo sapiens
attaacagctaatat

SEQ ID NO: 393909 - DNA, 15 bp, Homo sapiens
tattaacagctaata

SEQ ID NO: 393910 - DNA, 15 bp, Homo sapiens
gtattaacagctaat

SEQ ID NO: 393911 - DNA, 15 bp, Homo sapiens
tgtattaacagctaa

SEQ ID NO: 393912 - DNA, 15 bp, Homo sapiens
atgtattaacagcta

SEQ ID NO: 393913 - DNA, 15 bp, Homo sapiens
aatgtattaacagct

SEQ ID NO: 393914 - DNA, 15 bp, Homo sapiens
gaatgtattaacagc

SEQ ID NO: 393915 - DNA, 15 bp, Homo sapiens
ggaatgtattaacag

SEQ ID NO: 393916 - DNA, 15 bp, Homo sapiens
tggaatgtattaaca

SEQ ID NO: 393917 - DNA, 15 bp, Homo sapiens
ttggaatgtattaac

SEQ ID NO: 393918 - DNA, 15 bp, Homo sapiens
cttggaatgtattaa

SEQ ID NO: 393919 - DNA, 15 bp, Homo sapiens
gcttggaatgtatta

SEQ ID NO: 393920 - DNA, 15 bp, Homo sapiens
tgcttggaatgtatt

SEQ ID NO: 393921 - DNA, 15 bp, Homo sapiens
atgcttggaatgtat

SEQ ID NO: 393922 - DNA, 15 bp, Homo sapiens
aatgcttggaatgta

SEQ ID NO: 393923 - DNA, 15 bp, Homo sapiens
caatgcttggaatgt

SEQ ID NO: 393924 - DNA, 15 bp, Homo sapiens
tcaatgcttggaatg

SEQ ID NO: 393925 - DNA, 15 bp, Homo sapiens
atcaatgcttggaat

SEQ ID NO: 393926 - DNA, 15 bp, Homo sapiens
gatcaatgcttggaa

SEQ ID NO: 393927 - DNA, 15 bp, Homo sapiens
agatcaatgcttgga

SEQ ID NO: 393928 - DNA, 15 bp, Homo sapiens
tagatcaatgcttgg

SEQ ID NO: 393929 - DNA, 15 bp, Homo sapiens
ctagatcaatgcttg

SEQ ID NO: 393930 - DNA, 15 bp, Homo sapiens
cctagatcaatgctt

SEQ ID NO: 393931 - DNA, 15 bp, Homo sapiens
gcctagatcaatgct

SEQ ID NO: 393932 - DNA, 15 bp, Homo sapiens
ggcctagatcaatgc

SEQ ID NO: 393933 - DNA, 15 bp, Homo sapiens
aggcctagatcaatg

SEQ ID NO: 393934 - DNA, 15 bp, Homo sapiens
aaggcctagatcaat

SEQ ID NO: 393935 - DNA, 15 bp, Homo sapiens
aaaggcctagatcaa

SEQ ID NO: 393936 - DNA, 15 bp, Homo sapiens
aaaaggcctagatca

SEQ ID NO: 393937 - DNA, 15 bp, Homo sapiens
caaaaggcctagatc

SEQ ID NO: 393938 - DNA, 15 bp, Homo sapiens
acaaaaggcctagat

SEQ ID NO: 393939 - DNA, 15 bp, Homo sapiens
gacaaaaggcctaga

SEQ ID NO: 393940 - DNA, 15 bp, Homo sapiens
tgacaaaaggcctag

SEQ ID NO: 393941 - DNA, 15 bp, Homo sapiens
ttgacaaaaggccta

SEQ ID NO: 393942 - DNA, 15 bp, Homo sapiens
attgacaaaaggcct

SEQ ID NO: 393943 - DNA, 15 bp, Homo sapiens
aattgacaaaaggcc

SEQ ID NO: 393944 - DNA, 15 bp, Homo sapiens
aaattgacaaaaggc

SEQ ID NO: 393945 - DNA, 15 bp, Homo sapiens
taaattgacaaaagg

SEQ ID NO: 393946 - DNA, 15 bp, Homo sapiens
ataaattgacaaaag

SEQ ID NO: 393947 - DNA, 15 bp, Homo sapiens
tataaattgacaaaa

SEQ ID NO: 393948 - DNA, 15 bp, Homo sapiens
ttataaattgacaaa

SEQ ID NO: 393949 - DNA, 15 bp, Homo sapiens
cttataaattgacaa

SEQ ID NO: 393950 - DNA, 15 bp, Homo sapiens
acttataaattgaca

SEQ ID NO: 393951 - DNA, 15 bp, Homo sapiens
tacttataaattgac

SEQ ID NO: 393952 - DNA, 15 bp, Homo sapiens
ttacttataaattga

SEQ ID NO: 393953 - DNA, 15 bp, Homo sapiens
tttacttataaattg

SEQ ID NO: 393954 - DNA, 15 bp, Homo sapiens
gtttacttataaatt

SEQ ID NO: 393955 - DNA, 15 bp, Homo sapiens
ggtttacttataaat

SEQ ID NO: 393956 - DNA, 15 bp, Homo sapiens
tggtttacttataaa

SEQ ID NO: 393957 - DNA, 15 bp, Homo sapiens
ttggtttacttataa

SEQ ID NO: 393958 - DNA, 15 bp, Homo sapiens
cttggtttacttata

SEQ ID NO: 393959 - DNA, 15 bp, Homo sapiens
ccttggtttacttat

SEQ ID NO: 393960 - DNA, 15 bp, Homo sapiens
gccttggtttactta

SEQ ID NO: 393961 - DNA, 15 bp, Homo sapiens
agccttggtttactt

SEQ ID NO: 393962 - DNA, 15 bp, Homo sapiens
gagccttggtttact

SEQ ID NO: 393963 - DNA, 15 bp, Homo sapiens
tgagccttggtttac

SEQ ID NO: 393964 - DNA, 15 bp, Homo sapiens
ctgagccttggttta

SEQ ID NO: 393965 - DNA, 15 bp, Homo sapiens
tctgagccttggttt

SEQ ID NO: 393966 - DNA, 15 bp, Homo sapiens
ctctgagccttggtt

SEQ ID NO: 393967 - DNA, 15 bp, Homo sapiens
tctctgagccttggt

SEQ ID NO: 393968 - DNA, 15 bp, Homo sapiens
ctctctgagccttgg

SEQ ID NO: 393969 - DNA, 15 bp, Homo sapiens
cctctctgagccttg

SEQ ID NO: 393970 - DNA, 15 bp, Homo sapiens
acctctctgagcctt

SEQ ID NO: 393971 - DNA, 15 bp, Homo sapiens
aacctctctgagcct

SEQ ID NO: 393972 - DNA, 15 bp, Homo sapiens
aaacctctctgagcc

SEQ ID NO: 393973 - DNA, 15 bp, Homo sapiens
taaacctctctgagc

SEQ ID NO: 393974 - DNA, 15 bp, Homo sapiens
ttaaacctctctgag

SEQ ID NO: 393975 - DNA, 15 bp, Homo sapiens
tttaaacctctctga

SEQ ID NO: 393976 - DNA, 15 bp, Homo sapiens
ttttaaacctctctg

SEQ ID NO: 393977 - DNA, 15 bp, Homo sapiens
tttttaaacctctct

SEQ ID NO: 393978 - DNA, 15 bp, Homo sapiens
gtttttaaacctctc

SEQ ID NO: 393979 - DNA, 15 bp, Homo sapiens
agtttttaaacctct

SEQ ID NO: 393980 - DNA, 15 bp, Homo sapiens
aagtttttaaacctc

SEQ ID NO: 393981 - DNA, 15 bp, Homo sapiens
caagtttttaaacct

SEQ ID NO: 393982 - DNA, 15 bp, Homo sapiens
gcaagtttttaaacc

SEQ ID NO: 393983 - DNA, 15 bp, Homo sapiens
agcaagtttttaaac

SEQ ID NO: 393984 - DNA, 15 bp, Homo sapiens
aagcaagtttttaaa

SEQ ID NO: 393985 - DNA, 15 bp, Homo sapiens
taagcaagtttttaa

SEQ ID NO: 393986 - DNA, 15 bp, Homo sapiens
ttaagcaagttttta

SEQ ID NO: 393987 - DNA, 15 bp, Homo sapiens
attaagcaagttttt

SEQ ID NO: 393988 - DNA, 15 bp, Homo sapiens
cattaagcaagtttt

SEQ ID NO: 393989 - DNA, 15 bp, Homo sapiens
tcattaagcaagttt

SEQ ID NO: 393990 - DNA, 15 bp, Homo sapiens
ttcattaagcaagtt

SEQ ID NO: 393991 - DNA, 15 bp, Homo sapiens
cttcattaagcaagt

SEQ ID NO: 393992 - DNA, 15 bp, Homo sapiens
tcttcattaagcaag

SEQ ID NO: 393993 - DNA, 15 bp, Homo sapiens
atcttcattaagcaa

SEQ ID NO: 393994 - DNA, 15 bp, Homo sapiens
tatcttcattaagca

SEQ ID NO: 393995 - DNA, 15 bp, Homo sapiens
ttatcttcattaagc

SEQ ID NO: 393996 - DNA, 15 bp, Homo sapiens
attatcttcattaag

SEQ ID NO: 393997 - DNA, 15 bp, Homo sapiens
gattatcttcattaa

SEQ ID NO: 393998 - DNA, 15 bp, Homo sapiens
agattatcttcatta

SEQ ID NO: 393999 - DNA, 15 bp, Homo sapiens
tagattatcttcatt

SEQ ID NO: 394000 - DNA, 15 bp, Homo sapiens
atagattatcttcat

SEQ ID NO: 394001 - DNA, 15 bp, Homo sapiens
gatagattatcttca

SEQ ID NO: 394002 - DNA, 15 bp, Homo sapiens
agatagattatcttc

SEQ ID NO: 394003 - DNA, 15 bp, Homo sapiens
catttgacagatggt

SEQ ID NO: 394004 - DNA, 15 bp, Homo sapiens
acatttgacagatgg

SEQ ID NO: 394005 - DNA, 15 bp, Homo sapiens
cacatttgacagatg

SEQ ID NO: 394006 - DNA, 15 bp, Homo sapiens
ccacatttgacagat

SEQ ID NO: 394007 - DNA, 15 bp, Homo sapiens
tccacatttgacaga

SEQ ID NO: 394008 - DNA, 15 bp, Homo sapiens
atccacatttgacag

SEQ ID NO: 394009 - DNA, 15 bp, Homo sapiens
tatccacatttgaca

SEQ ID NO: 394010 - DNA, 15 bp, Homo sapiens
ttatccacatttgac

SEQ ID NO: 394011 - DNA, 15 bp, Homo sapiens
tttatccacatttga

SEQ ID NO: 394012 - DNA, 15 bp, Homo sapiens
ttttatccacatttg

SEQ ID NO: 394013 - DNA, 15 bp, Homo sapiens
cttttatccacattt

SEQ ID NO: 394014 - DNA, 15 bp, Homo sapiens
acttttatccacatt

SEQ ID NO: 394015 - DNA, 15 bp, Homo sapiens
cacttttatccacat

SEQ ID NO: 394016 - DNA, 15 bp, Homo sapiens
ccacttttatccaca

SEQ ID NO: 394017 - DNA, 15 bp, Homo sapiens
accacttttatccac

SEQ ID NO: 394018 - DNA, 15 bp, Homo sapiens
taccacttttatcca

SEQ ID NO: 394019 - DNA, 15 bp, Homo sapiens
ataccacttttatcc

SEQ ID NO: 394020 - DNA, 15 bp, Homo sapiens
tataccacttttatc

SEQ ID NO: 394021 - DNA, 15 bp, Homo sapiens
atataccacttttat

SEQ ID NO: 394022 - DNA, 15 bp, Homo sapiens
tatataccactttta

SEQ ID NO: 394023 - DNA, 15 bp, Homo sapiens
gtatataccactttt

SEQ ID NO: 394024 - DNA, 15 bp, Homo sapiens
ggtatataccacttt

SEQ ID NO: 394025 - DNA, 15 bp, Homo sapiens
aggtatataccactt

SEQ ID NO: 394026 - DNA, 15 bp, Homo sapiens
aaggtatataccact

SEQ ID NO: 394027 - DNA, 15 bp, Homo sapiens
caaggtatataccac

SEQ ID NO: 394028 - DNA, 15 bp, Homo sapiens
acaaggtatatacca

SEQ ID NO: 394029 - DNA, 15 bp, Homo sapiens
tacaaggtatatacc

SEQ ID NO: 394030 - DNA, 15 bp, Homo sapiens
ctacaaggtatatac

SEQ ID NO: 394031 - DNA, 15 bp, Homo sapiens
cctacaaggtatata

SEQ ID NO: 394032 - DNA, 15 bp, Homo sapiens
ccctacaaggtatat

SEQ ID NO: 394033 - DNA, 15 bp, Homo sapiens
accctacaaggtata

SEQ ID NO: 394034 - DNA, 15 bp, Homo sapiens
aaccctacaaggtat

SEQ ID NO: 394035 - DNA, 15 bp, Homo sapiens
taaccctacaaggta

SEQ ID NO: 394036 - DNA, 15 bp, Homo sapiens
ataaccctacaaggt

SEQ ID NO: 394037 - DNA, 15 bp, Homo sapiens
aataaccctacaagg

SEQ ID NO: 394038 - DNA, 15 bp, Homo sapiens
taataaccctacaag

SEQ ID NO: 394039 - DNA, 15 bp, Homo sapiens
ataataaccctacaa

SEQ ID NO: 394040 - DNA, 15 bp, Homo sapiens
cataataaccctaca

SEQ ID NO: 394041 - DNA, 15 bp, Homo sapiens
tcataataaccctac

SEQ ID NO: 394042 - DNA, 15 bp, Homo sapiens
ttcataataacccta

SEQ ID NO: 394043 - DNA, 15 bp, Homo sapiens
cttcataataaccct

SEQ ID NO: 394044 - DNA, 15 bp, Homo sapiens
tcttcataataaccc

SEQ ID NO: 394045 - DNA, 15 bp, Homo sapiens
atcttcataataacc

SEQ ID NO: 394046 - DNA, 15 bp, Homo sapiens
aatcttcataataac

SEQ ID NO: 394047 - DNA, 15 bp, Homo sapiens
taatcttcataataa

SEQ ID NO: 394048 - DNA, 15 bp, Homo sapiens
ttaatcttcataata

SEQ ID NO: 394049 - DNA, 15 bp, Homo sapiens
tttaatcttcataat

SEQ ID NO: 394050 - DNA, 15 bp, Homo sapiens
atttaatcttcataa

SEQ ID NO: 394051 - DNA, 15 bp, Homo sapiens
catttaatcttcata

SEQ ID NO: 394052 - DNA, 15 bp, Homo sapiens
ccatttaatcttcat

SEQ ID NO: 394053 - DNA, 15 bp, Homo sapiens
cccatttaatcttca

SEQ ID NO: 394054 - DNA, 15 bp, Homo sapiens
acccatttaatcttc

SEQ ID NO: 394055 - DNA, 15 bp, Homo sapiens
aacccatttaatctt

SEQ ID NO: 394056 - DNA, 15 bp, Homo sapiens
aaacccatttaatct

SEQ ID NO: 394057 - DNA, 15 bp, Homo sapiens
taaacccatttaatc

SEQ ID NO: 394058 - DNA, 15 bp, Homo sapiens
ataaacccatttaat

SEQ ID NO: 394059 - DNA, 15 bp, Homo sapiens
tataaacccatttaa

SEQ ID NO: 394060 - DNA, 15 bp, Homo sapiens
gtataaacccattta

SEQ ID NO: 394061 - DNA, 15 bp, Homo sapiens
tgtataaacccattt

SEQ ID NO: 394062 - DNA, 15 bp, Homo sapiens
atgtataaacccatt

SEQ ID NO: 394063 - DNA, 15 bp, Homo sapiens
catgtataaacccat

SEQ ID NO: 394064 - DNA, 15 bp, Homo sapiens
acatgtataaaccca

SEQ ID NO: 394065 - DNA, 15 bp, Homo sapiens
tacatgtataaaccc

SEQ ID NO: 394066 - DNA, 15 bp, Homo sapiens
ttacatgtataaacc

SEQ ID NO: 394067 - DNA, 15 bp, Homo sapiens
tttacatgtataaac

SEQ ID NO: 394068 - DNA, 15 bp, Homo sapiens
ctttacatgtataaa

SEQ ID NO: 394069 - DNA, 15 bp, Homo sapiens
cctttacatgtataa

SEQ ID NO: 394070 - DNA, 15 bp, Homo sapiens
tcctttacatgtata

SEQ ID NO: 394071 - DNA, 15 bp, Homo sapiens
gtcctttacatgtat

SEQ ID NO: 394072 - DNA, 15 bp, Homo sapiens
ggtcctttacatgta

SEQ ID NO: 394073 - DNA, 15 bp, Homo sapiens
gggtcctttacatgt

SEQ ID NO: 394074 - DNA, 15 bp, Homo sapiens
tgggtcctttacatg

SEQ ID NO: 394075 - DNA, 15 bp, Homo sapiens
ctgggtcctttacat

SEQ ID NO: 394076 - DNA, 15 bp, Homo sapiens
cctgggtcctttaca

SEQ ID NO: 394077 - DNA, 15 bp, Homo sapiens
tcctgggtcctttac

SEQ ID NO: 394078 - DNA, 15 bp, Homo sapiens
atcctgggtccttta

SEQ ID NO: 394079 - DNA, 15 bp, Homo sapiens
tatcctgggtccttt

SEQ ID NO: 394080 - DNA, 15 bp, Homo sapiens
ctatcctgggtcctt

SEQ ID NO: 394081 - DNA, 15 bp, Homo sapiens
actatcctgggtcct

SEQ ID NO: 394082 - DNA, 15 bp, Homo sapiens
cactatcctgggtcc

SEQ ID NO: 394083 - DNA, 15 bp, Homo sapiens
gcactatcctgggtc

SEQ ID NO: 394084 - DNA, 15 bp, Homo sapiens
ggcactatcctgggt

SEQ ID NO: 394085 - DNA, 15 bp, Homo sapiens
aggcactatcctggg

SEQ ID NO: 394086 - DNA, 15 bp, Homo sapiens
caggcactatcctgg

SEQ ID NO: 394087 - DNA, 15 bp, Homo sapiens
ccaggcactatcctg

SEQ ID NO: 394088 - DNA, 15 bp, Homo sapiens
gccaggcactatcct

SEQ ID NO: 394089 - DNA, 15 bp, Homo sapiens
tgccaggcactatcc

SEQ ID NO: 394090 - DNA, 15 bp, Homo sapiens
gtgccaggcactatc

SEQ ID NO: 394091 - DNA, 15 bp, Homo sapiens
tgtgccaggcactat

SEQ ID NO: 394092 - DNA, 15 bp, Homo sapiens
atgtgccaggcacta

SEQ ID NO: 394093 - DNA, 15 bp, Homo sapiens
tatgtgccaggcact

SEQ ID NO: 394094 - DNA, 15 bp, Homo sapiens
ctatgtgccaggcac

SEQ ID NO: 394095 - DNA, 15 bp, Homo sapiens
actatgtgccaggca

SEQ ID NO: 394096 - DNA, 15 bp, Homo sapiens
tactatgtgccaggc

SEQ ID NO: 394097 - DNA, 15 bp, Homo sapiens
ttactatgtgccagg

SEQ ID NO: 394098 - DNA, 15 bp, Homo sapiens
tttactatgtgccag

SEQ ID NO: 394099 - DNA, 15 bp, Homo sapiens
gtttactatgtgcca

SEQ ID NO: 394100 - DNA, 15 bp, Homo sapiens
tgtttactatgtgcc

SEQ ID NO: 394101 - DNA, 15 bp, Homo sapiens
gtgtttactatgtgc

SEQ ID NO: 394102 - DNA, 15 bp, Homo sapiens
agtgtttactatgtg

SEQ ID NO: 394103 - DNA, 15 bp, Homo sapiens
gagtgtttactatgt

SEQ ID NO: 394104 - DNA, 15 bp, Homo sapiens
tgagtgtttactatg

SEQ ID NO: 394105 - DNA, 15 bp, Homo sapiens
ctgagtgtttactat

SEQ ID NO: 394106 - DNA, 15 bp, Homo sapiens
actgagtgtttacta

SEQ ID NO: 394107 - DNA, 15 bp, Homo sapiens
tactgagtgtttact

SEQ ID NO: 394108 - DNA, 15 bp, Homo sapiens
ttactgagtgtttac

SEQ ID NO: 394109 - DNA, 15 bp, Homo sapiens
tttactgagtgttta

SEQ ID NO: 394110 - DNA, 15 bp, Homo sapiens
atttactgagtgttt

SEQ ID NO: 394111 - DNA, 15 bp, Homo sapiens
tatttactgagtgtt

SEQ ID NO: 394112 - DNA, 15 bp, Homo sapiens
atatttactgagtgt

SEQ ID NO: 394113 - DNA, 15 bp, Homo sapiens
aatatttactgagtg

SEQ ID NO: 394114 - DNA, 15 bp, Homo sapiens
taatatttactgagt

SEQ ID NO: 394115 - DNA, 15 bp, Homo sapiens
ctaatatttactgag

SEQ ID NO: 394116 - DNA, 15 bp, Homo sapiens
gctaatatttactga

SEQ ID NO: 394117 - DNA, 15 bp, Homo sapiens
agctaatatttactg

SEQ ID NO: 394118 - DNA, 15 bp, Homo sapiens
tagctaatatttact

SEQ ID NO: 394119 - DNA, 15 bp, Homo sapiens
atagctaatatttac

SEQ ID NO: 394120 - DNA, 15 bp, Homo sapiens
aatagctaatattta

SEQ ID NO: 394121 - DNA, 15 bp, Homo sapiens
caatagctaatattt

SEQ ID NO: 394122 - DNA, 15 bp, Homo sapiens
acaatagctaatatt

SEQ ID NO: 394123 - DNA, 15 bp, Homo sapiens
aacaatagctaatat

SEQ ID NO: 394124 - DNA, 15 bp, Homo sapiens
taacaatagctaata

SEQ ID NO: 394125 - DNA, 15 bp, Homo sapiens
ataacaatagctaat

SEQ ID NO: 394126 - DNA, 15 bp, Homo sapiens
aataacaatagctaa

SEQ ID NO: 394127 - DNA, 15 bp, Homo sapiens
gaataacaatagcta

SEQ ID NO: 394128 - DNA, 15 bp, Homo sapiens
agaataacaatagct

SEQ ID NO: 394129 - DNA, 15 bp, Homo sapiens
aagaataacaatagc

SEQ ID NO: 394130 - DNA, 15 bp, Homo sapiens
aaagaataacaatag

SEQ ID NO: 394131 - DNA, 15 bp, Homo sapiens
gaaagaataacaata

SEQ ID NO: 394132 - DNA, 15 bp, Homo sapiens
ggaaagaataacaat

SEQ ID NO: 394133 - DNA, 15 bp, Homo sapiens
gggaaagaataacaa

SEQ ID NO: 394134 - DNA, 15 bp, Homo sapiens
cgggaaagaataaca

SEQ ID NO: 394135 - DNA, 15 bp, Homo sapiens
gcgggaaagaataac

SEQ ID NO: 394136 - DNA, 15 bp, Homo sapiens
tgcgggaaagaataa

SEQ ID NO: 394137 - DNA, 15 bp, Homo sapiens
ttgcgggaaagaata

SEQ ID NO: 394138 - DNA, 15 bp, Homo sapiens
gttgcgggaaagaat

SEQ ID NO: 394139 - DNA, 15 bp, Homo sapiens
tgttgcgggaaagaa

SEQ ID NO: 394140 - DNA, 15 bp, Homo sapiens
ctgttgcgggaaaga

SEQ ID NO: 394141 - DNA, 15 bp, Homo sapiens
tctgttgcgggaaag

SEQ ID NO: 394142 - DNA, 15 bp, Homo sapiens
atctgttgcgggaaa

SEQ ID NO: 394143 - DNA, 15 bp, Homo sapiens
catctgttgcgggaa

SEQ ID NO: 394144 - DNA, 15 bp, Homo sapiens
tcatctgttgcggga

SEQ ID NO: 394145 - DNA, 15 bp, Homo sapiens
atcatctgttgcggg

SEQ ID NO: 394146 - DNA, 15 bp, Homo sapiens
aatcatctgttgcgg

SEQ ID NO: 394147 - DNA, 15 bp, Homo sapiens
aaatcatctgttgcg

SEQ ID NO: 394148 - DNA, 15 bp, Homo sapiens
caaatcatctgttgc

SEQ ID NO: 394149 - DNA, 15 bp, Homo sapiens
acaaatcatctgttg

SEQ ID NO: 394150 - DNA, 15 bp, Homo sapiens
aacaaatcatctgtt

SEQ ID NO: 394151 - DNA, 15 bp, Homo sapiens
gaacaaatcatctgt

SEQ ID NO: 394152 - DNA, 15 bp, Homo sapiens
agaacaaatcatctg

SEQ ID NO: 394153 - DNA, 15 bp, Homo sapiens
aagaacaaatcatct

SEQ ID NO: 394154 - DNA, 15 bp, Homo sapiens
aaagaacaaatcatc

SEQ ID NO: 394155 - DNA, 15 bp, Homo sapiens
taaagaacaaatcat

SEQ ID NO: 394156 - DNA, 15 bp, Homo sapiens
ataaagaacaaatca

SEQ ID NO: 394157 - DNA, 15 bp, Homo sapiens
gataaagaacaaatc

SEQ ID NO: 394158 - DNA, 15 bp, Homo sapiens
agataaagaacaaat

SEQ ID NO: 394159 - DNA, 15 bp, Homo sapiens
aagataaagaacaaa

SEQ ID NO: 394160 - DNA, 15 bp, Homo sapiens
taagataaagaacaa

SEQ ID NO: 394161 - DNA, 15 bp, Homo sapiens
ataagataaagaaca

SEQ ID NO: 394162 - DNA, 15 bp, Homo sapiens
aataagataaagaac

SEQ ID NO: 394163 - DNA, 15 bp, Homo sapiens
aaataagataaagaa

SEQ ID NO: 394164 - DNA, 15 bp, Homo sapiens
taaataagataaaga

SEQ ID NO: 394165 - DNA, 15 bp, Homo sapiens
ctaaataagataaag

SEQ ID NO: 394166 - DNA, 15 bp, Homo sapiens
gctaaataagataaa

SEQ ID NO: 394167 - DNA, 15 bp, Homo sapiens
tgctaaataagataa

SEQ ID NO: 394168 - DNA, 15 bp, Homo sapiens
atgctaaataagata

SEQ ID NO: 394169 - DNA, 15 bp, Homo sapiens
gatgctaaataagat

SEQ ID NO: 394170 - DNA, 15 bp, Homo sapiens
tgatgctaaataaga

SEQ ID NO: 394171 - DNA, 15 bp, Homo sapiens
atgatgctaaataag

SEQ ID NO: 394172 - DNA, 15 bp, Homo sapiens
gatgatgctaaataa

SEQ ID NO: 394173 - DNA, 15 bp, Homo sapiens
tgatgatgctaaata

SEQ ID NO: 394174 - DNA, 15 bp, Homo sapiens
ttgatgatgctaaat

SEQ ID NO: 394175 - DNA, 15 bp, Homo sapiens
tttgatgatgctaaa

SEQ ID NO: 394176 - DNA, 15 bp, Homo sapiens
atttgatgatgctaa

SEQ ID NO: 394177 - DNA, 15 bp, Homo sapiens
catttgatgatgcta

SEQ ID NO: 394178 - DNA, 15 bp, Homo sapiens
acatttgatgatgct

SEQ ID NO: 394179 - DNA, 15 bp, Homo sapiens
aacatttgatgatgc

SEQ ID NO: 394180 - DNA, 15 bp, Homo sapiens
gaacatttgatgatg

SEQ ID NO: 394181 - DNA, 15 bp, Homo sapiens
agaacatttgatgat

SEQ ID NO: 394182 - DNA, 15 bp, Homo sapiens
aagaacatttgatga

SEQ ID NO: 394183 - DNA, 15 bp, Homo sapiens
gaagaacatttgatg

SEQ ID NO: 394184 - DNA, 15 bp, Homo sapiens
agaagaacatttgat

SEQ ID NO: 394185 - DNA, 15 bp, Homo sapiens
aagaagaacatttga

SEQ ID NO: 394186 - DNA, 15 bp, Homo sapiens
taagaagaacatttg

SEQ ID NO: 394187 - DNA, 15 bp, Homo sapiens
ttaagaagaacattt

SEQ ID NO: 394188 - DNA, 15 bp, Homo sapiens
attaagaagaacatt

SEQ ID NO: 394189 - DNA, 15 bp, Homo sapiens
cattaagaagaacat

SEQ ID NO: 394190 - DNA, 15 bp, Homo sapiens
ccattaagaagaaca

SEQ ID NO: 394191 - DNA, 15 bp, Homo sapiens
gccattaagaagaac

SEQ ID NO: 394192 - DNA, 15 bp, Homo sapiens
agccattaagaagaa

SEQ ID NO: 394193 - DNA, 15 bp, Homo sapiens
gagccattaagaaga

SEQ ID NO: 394194 - DNA, 15 bp, Homo sapiens
tgagccattaagaag

SEQ ID NO: 394195 - DNA, 15 bp, Homo sapiens
ctgagccattaagaa

SEQ ID NO: 394196 - DNA, 15 bp, Homo sapiens
gctgagccattaaga

SEQ ID NO: 394197 - DNA, 15 bp, Homo sapiens
tgctgagccattaag

SEQ ID NO: 394198 - DNA, 15 bp, Homo sapiens
atgctgagccattaa

SEQ ID NO: 394199 - DNA, 15 bp, Homo sapiens
aatgctgagccatta

SEQ ID NO: 394200 - DNA, 15 bp, Homo sapiens
aaatgctgagccatt

SEQ ID NO: 394201 - DNA, 15 bp, Homo sapiens
aaaatgctgagccat

SEQ ID NO: 394202 - DNA, 15 bp, Homo sapiens
aaaaatgctgagcca

SEQ ID NO: 394203 - DNA, 15 bp, Homo sapiens
taaaaatgctgagcc

SEQ ID NO: 394204 - DNA, 15 bp, Homo sapiens
ctaaaaatgctgagc

SEQ ID NO: 394205 - DNA, 15 bp, Homo sapiens
actaaaaatgctgag

SEQ ID NO: 394206 - DNA, 15 bp, Homo sapiens
tactaaaaatgctga

SEQ ID NO: 394207 - DNA, 15 bp, Homo sapiens
ttactaaaaatgctg

SEQ ID NO: 394208 - DNA, 15 bp, Homo sapiens
cttactaaaaatgct

SEQ ID NO: 394209 - DNA, 15 bp, Homo sapiens
gcttactaaaaatgc

SEQ ID NO: 394210 - DNA, 15 bp, Homo sapiens
agcttactaaaaatg

SEQ ID NO: 394211 - DNA, 15 bp, Homo sapiens
tagcttactaaaaat

SEQ ID NO: 394212 - DNA, 15 bp, Homo sapiens
ttagcttactaaaaa

SEQ ID NO: 394213 - DNA, 15 bp, Homo sapiens
tttagcttactaaaa

SEQ ID NO: 394214 - DNA, 15 bp, Homo sapiens
ctttagcttactaaa

SEQ ID NO: 394215 - DNA, 15 bp, Homo sapiens
tctttagcttactaa

SEQ ID NO: 394216 - DNA, 15 bp, Homo sapiens
atctttagcttacta

SEQ ID NO: 394217 - DNA, 15 bp, Homo sapiens
gatctttagcttact

SEQ ID NO: 394218 - DNA, 15 bp, Homo sapiens
tgatctttagcttac

SEQ ID NO: 394219 - DNA, 15 bp, Homo sapiens
ttgatctttagctta

SEQ ID NO: 394220 - DNA, 15 bp, Homo sapiens
cttgatctttagctt

SEQ ID NO: 394221 - DNA, 15 bp, Homo sapiens
acttgatctttagct

SEQ ID NO: 394222 - DNA, 15 bp, Homo sapiens
aacttgatctttagc

SEQ ID NO: 394223 - DNA, 15 bp, Homo sapiens
taacttgatctttag

SEQ ID NO: 394224 - DNA, 15 bp, Homo sapiens
gtaacttgatcttta

SEQ ID NO: 394225 - DNA, 15 bp, Homo sapiens
ggtaacttgatcttt

SEQ ID NO: 394226 - DNA, 15 bp, Homo sapiens
gggtaacttgatctt

SEQ ID NO: 394227 - DNA, 15 bp, Homo sapiens
agggtaacttgatct

SEQ ID NO: 394228 - DNA, 15 bp, Homo sapiens
cagggtaacttgatc

SEQ ID NO: 394229 - DNA, 15 bp, Homo sapiens
tcagggtaacttgat

SEQ ID NO: 394230 - DNA, 15 bp, Homo sapiens
ttcagggtaacttga

SEQ ID NO: 394231 - DNA, 15 bp, Homo sapiens
attcagggtaacttg

SEQ ID NO: 394232 - DNA, 15 bp, Homo sapiens
tattcagggtaactt

SEQ ID NO: 394233 - DNA, 15 bp, Homo sapiens
ttattcagggtaact

SEQ ID NO: 394234 - DNA, 15 bp, Homo sapiens
tttattcagggtaac

SEQ ID NO: 394235 - DNA, 15 bp, Homo sapiens
gtttattcagggtaa

SEQ ID NO: 394236 - DNA, 15 bp, Homo sapiens
agtttattcagggta

SEQ ID NO: 394237 - DNA, 15 bp, Homo sapiens
cagtttattcagggt

SEQ ID NO: 394238 - DNA, 15 bp, Homo sapiens
acagtttattcaggg

SEQ ID NO: 394239 - DNA, 15 bp, Homo sapiens
cacagtttattcagg

SEQ ID NO: 394240 - DNA, 15 bp, Homo sapiens
ccacagtttattcag

SEQ ID NO: 394241 - DNA, 15 bp, Homo sapiens
accacagtttattca

SEQ ID NO: 394242 - DNA, 15 bp, Homo sapiens
taccacagtttattc

SEQ ID NO: 394243 - DNA, 15 bp, Homo sapiens
gtaccacagtttatt

SEQ ID NO: 394244 - DNA, 15 bp, Homo sapiens
tgtaccacagtttat

SEQ ID NO: 394245 - DNA, 15 bp, Homo sapiens
atgtaccacagttta

SEQ ID NO: 394246 - DNA, 15 bp, Homo sapiens
aatgtaccacagttt

SEQ ID NO: 394247 - DNA, 15 bp, Homo sapiens
gaatgtaccacagtt

SEQ ID NO: 394248 - DNA, 15 bp, Homo sapiens
tgaatgtaccacagt

SEQ ID NO: 394249 - DNA, 15 bp, Homo sapiens
atgaatgtaccacag

SEQ ID NO: 394250 - DNA, 15 bp, Homo sapiens
tatgaatgtaccaca

SEQ ID NO: 394251 - DNA, 15 bp, Homo sapiens
gtatgaatgtaccac

SEQ ID NO: 394252 - DNA, 15 bp, Homo sapiens
tgtatgaatgtacca

SEQ ID NO: 394253 - DNA, 15 bp, Homo sapiens
ctgtatgaatgtacc

SEQ ID NO: 394254 - DNA, 15 bp, Homo sapiens
actgtatgaatgtac

SEQ ID NO: 394255 - DNA, 15 bp, Homo sapiens
cactgtatgaatgta

SEQ ID NO: 394256 - DNA, 15 bp, Homo sapiens
ccactgtatgaatgt

SEQ ID NO: 394257 - DNA, 15 bp, Homo sapiens
tccactgtatgaatg

SEQ ID NO: 394258 - DNA, 15 bp, Homo sapiens
ttccactgtatgaat

SEQ ID NO: 394259 - DNA, 15 bp, Homo sapiens
attccactgtatgaa

SEQ ID NO: 394260 - DNA, 15 bp, Homo sapiens
gattccactgtatga

SEQ ID NO: 394261 - DNA, 15 bp, Homo sapiens
agattccactgtatg

SEQ ID NO: 394262 - DNA, 15 bp, Homo sapiens
aagattccactgtat

SEQ ID NO: 394263 - DNA, 15 bp, Homo sapiens
taagattccactgta

SEQ ID NO: 394264 - DNA, 15 bp, Homo sapiens
ataagattccactgt

SEQ ID NO: 394265 - DNA, 15 bp, Homo sapiens
cataagattccactg

SEQ ID NO: 394266 - DNA, 15 bp, Homo sapiens
gcataagattccact

SEQ ID NO: 394267 - DNA, 15 bp, Homo sapiens
tgcataagattccac

SEQ ID NO: 394268 - DNA, 15 bp, Homo sapiens
ctgcataagattcca

SEQ ID NO: 394269 - DNA, 15 bp, Homo sapiens
actgcataagattcc

SEQ ID NO: 394270 - DNA, 15 bp, Homo sapiens
gactgcataagattc

SEQ ID NO: 394271 - DNA, 15 bp, Homo sapiens
agactgcataagatt

SEQ ID NO: 394272 - DNA, 15 bp, Homo sapiens
aagactgcataagat

SEQ ID NO: 394273 - DNA, 15 bp, Homo sapiens
aaagactgcataaga

SEQ ID NO: 394274 - DNA, 15 bp, Homo sapiens
taaagactgcataag

SEQ ID NO: 394275 - DNA, 15 bp, Homo sapiens
ttaaagactgcataa

SEQ ID NO: 394276 - DNA, 15 bp, Homo sapiens
tttaaagactgcata

SEQ ID NO: 394277 - DNA, 15 bp, Homo sapiens
ttttaaagactgcat

SEQ ID NO: 394278 - DNA, 15 bp, Homo sapiens
cttttaaagactgca

SEQ ID NO: 394279 - DNA, 15 bp, Homo sapiens
ccttttaaagactgc

SEQ ID NO: 394280 - DNA, 15 bp, Homo sapiens
tccttttaaagactg

SEQ ID NO: 394281 - DNA, 15 bp, Homo sapiens
atccttttaaagact

SEQ ID NO: 394282 - DNA, 15 bp, Homo sapiens
catccttttaaagac

SEQ ID NO: 394283 - DNA, 15 bp, Homo sapiens
tcatccttttaaaga

SEQ ID NO: 394284 - DNA, 15 bp, Homo sapiens
ctcatccttttaaag

SEQ ID NO: 394285 - DNA, 15 bp, Homo sapiens
cctcatccttttaaa

SEQ ID NO: 394286 - DNA, 15 bp, Homo sapiens
acctcatccttttaa

SEQ ID NO: 394287 - DNA, 15 bp, Homo sapiens
tacctcatcctttta

SEQ ID NO: 394288 - DNA, 15 bp, Homo sapiens
ctacctcatcctttt

SEQ ID NO: 394289 - DNA, 15 bp, Homo sapiens
tctacctcatccttt

SEQ ID NO: 394290 - DNA, 15 bp, Homo sapiens
atctacctcatcctt

SEQ ID NO: 394291 - DNA, 15 bp, Homo sapiens
gatctacctcatcct

SEQ ID NO: 394292 - DNA, 15 bp, Homo sapiens
ggatctacctcatcc

SEQ ID NO: 394293 - DNA, 15 bp, Homo sapiens
aggatctacctcatc

SEQ ID NO: 394294 - DNA, 15 bp, Homo sapiens
taggatctacctcat

SEQ ID NO: 394295 - DNA, 15 bp, Homo sapiens
gtaggatctacctca

SEQ ID NO: 394296 - DNA, 15 bp, Homo sapiens
tgtaggatctacctc

SEQ ID NO: 394297 - DNA, 15 bp, Homo sapiens
atgtaggatctacct

SEQ ID NO: 394298 - DNA, 15 bp, Homo sapiens
tatgtaggatctacc

SEQ ID NO: 394299 - DNA, 15 bp, Homo sapiens
atatgtaggatctac

SEQ ID NO: 394300 - DNA, 15 bp, Homo sapiens
tatatgtaggatcta

SEQ ID NO: 394301 - DNA, 15 bp, Homo sapiens
gtatatgtaggatct

SEQ ID NO: 394302 - DNA, 15 bp, Homo sapiens
agtatatgtaggatc

SEQ ID NO: 394303 - DNA, 15 bp, Homo sapiens
cagtatatgtaggat

SEQ ID NO: 394304 - DNA, 15 bp, Homo sapiens
tcagtatatgtagga

SEQ ID NO: 394305 - DNA, 15 bp, Homo sapiens
gtcagtatatgtagg

SEQ ID NO: 394306 - DNA, 15 bp, Homo sapiens
ggtcagtatatgtag

SEQ ID NO: 394307 - DNA, 15 bp, Homo sapiens
tggtcagtatatgta

SEQ ID NO: 394308 - DNA, 15 bp, Homo sapiens
ctggtcagtatatgt

SEQ ID NO: 394309 - DNA, 15 bp, Homo sapiens
tctggtcagtatatg

SEQ ID NO: 394310 - DNA, 15 bp, Homo sapiens
ttctggtcagtatat

SEQ ID NO: 394311 - DNA, 15 bp, Homo sapiens
tttctggtcagtata

SEQ ID NO: 394312 - DNA, 15 bp, Homo sapiens
ttttctggtcagtat

SEQ ID NO: 394313 - DNA, 15 bp, Homo sapiens
tttttctggtcagta

SEQ ID NO: 394314 - DNA, 15 bp, Homo sapiens
ctttttctggtcagt

SEQ ID NO: 394315 - DNA, 15 bp, Homo sapiens
actttttctggtcag

SEQ ID NO: 394316 - DNA, 15 bp, Homo sapiens
tactttttctggtca

SEQ ID NO: 394317 - DNA, 15 bp, Homo sapiens
gtactttttctggtc

SEQ ID NO: 394318 - DNA, 15 bp, Homo sapiens
agtactttttctggt

SEQ ID NO: 394319 - DNA, 15 bp, Homo sapiens
tagtactttttctgg

SEQ ID NO: 394320 - DNA, 15 bp, Homo sapiens
ttagtactttttctg

SEQ ID NO: 394321 - DNA, 15 bp, Homo sapiens
attagtactttttct

SEQ ID NO: 394322 - DNA, 15 bp, Homo sapiens
cattagtactttttc

SEQ ID NO: 394323 - DNA, 15 bp, Homo sapiens
tcattagtacttttt

SEQ ID NO: 394324 - DNA, 15 bp, Homo sapiens
atcattagtactttt

SEQ ID NO: 394325 - DNA, 15 bp, Homo sapiens
tatcattagtacttt

SEQ ID NO: 394326 - DNA, 15 bp, Homo sapiens
atatcattagtactt

SEQ ID NO: 394327 - DNA, 15 bp, Homo sapiens
aatatcattagtact

SEQ ID NO: 394328 - DNA, 15 bp, Homo sapiens
aaatatcattagtac

SEQ ID NO: 394329 - DNA, 15 bp, Homo sapiens
aaaatatcattagta

SEQ ID NO: 394330 - DNA, 15 bp, Homo sapiens
aaaaatatcattagt

SEQ ID NO: 394331 - DNA, 15 bp, Homo sapiens
taaaaatatcattag

SEQ ID NO: 394332 - DNA, 15 bp, Homo sapiens
ctaaaaatatcatta

SEQ ID NO: 394333 - DNA, 15 bp, Homo sapiens
tctaaaaatatcatt

SEQ ID NO: 394334 - DNA, 15 bp, Homo sapiens
atctaaaaatatcat

SEQ ID NO: 394335 - DNA, 15 bp, Homo sapiens
catctaaaaatatca

SEQ ID NO: 394336 - DNA, 15 bp, Homo sapiens
acatctaaaaatatc

SEQ ID NO: 394337 - DNA, 15 bp, Homo sapiens
aacatctaaaaatat

SEQ ID NO: 394338 - DNA, 15 bp, Homo sapiens
taacatctaaaaata

SEQ ID NO: 394339 - DNA, 15 bp, Homo sapiens
ttaacatctaaaaat

SEQ ID NO: 394340 - DNA, 15 bp, Homo sapiens
tttaacatctaaaaa

SEQ ID NO: 394341 - DNA, 15 bp, Homo sapiens
ctttaacatctaaaa

SEQ ID NO: 394342 - DNA, 15 bp, Homo sapiens
actttaacatctaaa

SEQ ID NO: 394343 - DNA, 15 bp, Homo sapiens
tactttaacatctaa

SEQ ID NO: 394344 - DNA, 15 bp, Homo sapiens
ttactttaacatcta

SEQ ID NO: 394345 - DNA, 15 bp, Homo sapiens
attactttaacatct

SEQ ID NO: 394346 - DNA, 15 bp, Homo sapiens
tattactttaacatc

SEQ ID NO: 394347 - DNA, 15 bp, Homo sapiens
atattactttaacat

SEQ ID NO: 394348 - DNA, 15 bp, Homo sapiens
catattactttaaca

SEQ ID NO: 394349 - DNA, 15 bp, Homo sapiens
acatattactttaac

SEQ ID NO: 394350 - DNA, 15 bp, Homo sapiens
cacatattactttaa

SEQ ID NO: 394351 - DNA, 15 bp, Homo sapiens
ccacatattacttta

SEQ ID NO: 394352 - DNA, 15 bp, Homo sapiens
accacatattacttt

SEQ ID NO: 394353 - DNA, 15 bp, Homo sapiens
aaccacatattactt

SEQ ID NO: 394354 - DNA, 15 bp, Homo sapiens
gaaccacatattact

SEQ ID NO: 394355 - DNA, 15 bp, Homo sapiens
ggaaccacatattac

SEQ ID NO: 394356 - DNA, 15 bp, Homo sapiens
tggaaccacatatta

SEQ ID NO: 394357 - DNA, 15 bp, Homo sapiens
gtggaaccacatatt

SEQ ID NO: 394358 - DNA, 15 bp, Homo sapiens
agtggaaccacatat

SEQ ID NO: 394359 - DNA, 15 bp, Homo sapiens
aagtggaaccacata

SEQ ID NO: 394360 - DNA, 15 bp, Homo sapiens
aaagtggaaccacat

SEQ ID NO: 394361 - DNA, 15 bp, Homo sapiens
gaaagtggaaccaca

SEQ ID NO: 394362 - DNA, 15 bp, Homo sapiens
tgaaagtggaaccac

SEQ ID NO: 394363 - DNA, 15 bp, Homo sapiens
atgaaagtggaacca

SEQ ID NO: 394364 - DNA, 15 bp, Homo sapiens
tatgaaagtggaacc

SEQ ID NO: 394365 - DNA, 15 bp, Homo sapiens
ctatgaaagtggaac

SEQ ID NO: 394366 - DNA, 15 bp, Homo sapiens
gctatgaaagtggaa

SEQ ID NO: 394367 - DNA, 15 bp, Homo sapiens
tgctatgaaagtgga

SEQ ID NO: 394368 - DNA, 15 bp, Homo sapiens
ctgctatgaaagtgg

SEQ ID NO: 394369 - DNA, 15 bp, Homo sapiens
tctgctatgaaagtg

SEQ ID NO: 394370 - DNA, 15 bp, Homo sapiens
ttctgctatgaaagt

SEQ ID NO: 394371 - DNA, 15 bp, Homo sapiens
attctgctatgaaag

SEQ ID NO: 394372 - DNA, 15 bp, Homo sapiens
aattctgctatgaaa

SEQ ID NO: 394373 - DNA, 15 bp, Homo sapiens
aaattctgctatgaa

SEQ ID NO: 394374 - DNA, 15 bp, Homo sapiens
taaattctgctatga

SEQ ID NO: 394375 - DNA, 15 bp, Homo sapiens
ttaaattctgctatg

SEQ ID NO: 394376 - DNA, 15 bp, Homo sapiens
attaaattctgctat

SEQ ID NO: 394377 - DNA, 15 bp, Homo sapiens
tattaaattctgcta

SEQ ID NO: 394378 - DNA, 15 bp, Homo sapiens
atattaaattctgct

SEQ ID NO: 394379 - DNA, 15 bp, Homo sapiens
aatattaaattctgc

SEQ ID NO: 394380 - DNA, 15 bp, Homo sapiens
aaatattaaattctg

SEQ ID NO: 394381 - DNA, 15 bp, Homo sapiens
taaatattaaattct

SEQ ID NO: 394382 - DNA, 15 bp, Homo sapiens
ttaaatattaaattc

SEQ ID NO: 394383 - DNA, 15 bp, Homo sapiens
tttaaatattaaatt

SEQ ID NO: 394384 - DNA, 15 bp, Homo sapiens
ttttaaatattaaat

SEQ ID NO: 394385 - DNA, 15 bp, Homo sapiens
tttttaaatattaaa

SEQ ID NO: 394386 - DNA, 15 bp, Homo sapiens
gtttttaaatattaa

SEQ ID NO: 394387 - DNA, 15 bp, Homo sapiens
agtttttaaatatta

SEQ ID NO: 394388 - DNA, 15 bp, Homo sapiens
cagtttttaaatatt

SEQ ID NO: 394389 - DNA, 15 bp, Homo sapiens
acagtttttaaatat

SEQ ID NO: 394390 - DNA, 15 bp, Homo sapiens
tacagtttttaaata

SEQ ID NO: 394391 - DNA, 15 bp, Homo sapiens
atacagtttttaaat

SEQ ID NO: 394392 - DNA, 15 bp, Homo sapiens
aatacagtttttaaa

SEQ ID NO: 394393 - DNA, 15 bp, Homo sapiens
caatacagtttttaa

SEQ ID NO: 394394 - DNA, 15 bp, Homo sapiens
tcaatacagttttta

SEQ ID NO: 394395 - DNA, 15 bp, Homo sapiens
ctcaatacagttttt

SEQ ID NO: 394396 - DNA, 15 bp, Homo sapiens
tctcaatacagtttt

SEQ ID NO: 394397 - DNA, 15 bp, Homo sapiens
atctcaatacagttt

SEQ ID NO: 394398 - DNA, 15 bp, Homo sapiens
gatctcaatacagtt

SEQ ID NO: 394399 - DNA, 15 bp, Homo sapiens
tgatctcaatacagt

SEQ ID NO: 394400 - DNA, 15 bp, Homo sapiens
ttgatctcaatacag

SEQ ID NO: 394401 - DNA, 15 bp, Homo sapiens
cttgatctcaataca

SEQ ID NO: 394402 - DNA, 15 bp, Homo sapiens
tcttgatctcaatac

SEQ ID NO: 394403 - DNA, 15 bp, Homo sapiens
gtcttgatctcaata

SEQ ID NO: 394404 - DNA, 15 bp, Homo sapiens
tgtcttgatctcaat

SEQ ID NO: 394405 - DNA, 15 bp, Homo sapiens
atgtcttgatctcaa

SEQ ID NO: 394406 - DNA, 15 bp, Homo sapiens
catgtcttgatctca

SEQ ID NO: 394407 - DNA, 15 bp, Homo sapiens
acatgtcttgatctc

SEQ ID NO: 394408 - DNA, 15 bp, Homo sapiens
gacatgtcttgatct

SEQ ID NO: 394409 - DNA, 15 bp, Homo sapiens
agacatgtcttgatc

SEQ ID NO: 394410 - DNA, 15 bp, Homo sapiens
aagacatgtcttgat

SEQ ID NO: 394411 - DNA, 15 bp, Homo sapiens
aaagacatgtcttga

SEQ ID NO: 394412 - DNA, 15 bp, Homo sapiens
caaagacatgtcttg

SEQ ID NO: 394413 - DNA, 15 bp, Homo sapiens
acaaagacatgtctt

SEQ ID NO: 394414 - DNA, 15 bp, Homo sapiens
cacaaagacatgtct

SEQ ID NO: 394415 - DNA, 15 bp, Homo sapiens
tcacaaagacatgtc

SEQ ID NO: 394416 - DNA, 15 bp, Homo sapiens
ttcacaaagacatgt

SEQ ID NO: 394417 - DNA, 15 bp, Homo sapiens
gttcacaaagacatg

SEQ ID NO: 394418 - DNA, 15 bp, Homo sapiens
tgttcacaaagacat

SEQ ID NO: 394419 - DNA, 15 bp, Homo sapiens
gtgttcacaaagaca

SEQ ID NO: 394420 - DNA, 15 bp, Homo sapiens
tgtgttcacaaagac

SEQ ID NO: 394421 - DNA, 15 bp, Homo sapiens
ttgtgttcacaaaga

SEQ ID NO: 394422 - DNA, 15 bp, Homo sapiens
cttgtgttcacaaag

SEQ ID NO: 394423 - DNA, 15 bp, Homo sapiens
tcttgtgttcacaaa

SEQ ID NO: 394424 - DNA, 15 bp, Homo sapiens
ttcttgtgttcacaa

SEQ ID NO: 394425 - DNA, 15 bp, Homo sapiens
tttcttgtgttcaca

SEQ ID NO: 394426 - DNA, 15 bp, Homo sapiens
atttcttgtgttcac

SEQ ID NO: 394427 - DNA, 15 bp, Homo sapiens
aatttcttgtgttca

SEQ ID NO: 394428 - DNA, 15 bp, Homo sapiens
taatttcttgtgttc

SEQ ID NO: 394429 - DNA, 15 bp, Homo sapiens
ttaatttcttgtgtt

SEQ ID NO: 394430 - DNA, 15 bp, Homo sapiens
attaatttcttgtgt

SEQ ID NO: 394431 - DNA, 15 bp, Homo sapiens
aattaatttcttgtg

SEQ ID NO: 394432 - DNA, 15 bp, Homo sapiens
taattaatttcttgt

SEQ ID NO: 394433 - DNA, 15 bp, Homo sapiens
ctaattaatttcttg

SEQ ID NO: 394434 - DNA, 15 bp, Homo sapiens
ttctaattaatttct

SEQ ID NO: 394435 - DNA, 15 bp, Homo sapiens
tttctaattaatttc

SEQ ID NO: 394436 - DNA, 15 bp, Homo sapiens
ttttctaattaattt

SEQ ID NO: 394437 - DNA, 15 bp, Homo sapiens
cttttctaattaatt

SEQ ID NO: 394438 - DNA, 15 bp, Homo sapiens
ccttttctaattaat

SEQ ID NO: 394439 - DNA, 15 bp, Homo sapiens
gccttttctaattaa

SEQ ID NO: 394440 - DNA, 15 bp, Homo sapiens
tgccttttctaatta

SEQ ID NO: 394441 - DNA, 15 bp, Homo sapiens
atgccttttctaatt

SEQ ID NO: 394442 - DNA, 15 bp, Homo sapiens
tatgccttttctaat

SEQ ID NO: 394443 - DNA, 15 bp, Homo sapiens
atatgccttttctaa

SEQ ID NO: 394444 - DNA, 15 bp, Homo sapiens
tatatgccttttcta

SEQ ID NO: 394445 - DNA, 15 bp, Homo sapiens
gtatatgccttttct

SEQ ID NO: 394446 - DNA, 15 bp, Homo sapiens
ggtatatgccttttc

SEQ ID NO: 394447 - DNA, 15 bp, Homo sapiens
aggtatatgcctttt

SEQ ID NO: 394448 - DNA, 15 bp, Homo sapiens
aaggtatatgccttt

SEQ ID NO: 394449 - DNA, 15 bp, Homo sapiens
caaggtatatgcctt

SEQ ID NO: 394450 - DNA, 15 bp, Homo sapiens
ccaaggtatatgcct

SEQ ID NO: 394451 - DNA, 15 bp, Homo sapiens
tccaaggtatatgcc

SEQ ID NO: 394452 - DNA, 15 bp, Homo sapiens
atccaaggtatatgc

SEQ ID NO: 394453 - DNA, 15 bp, Homo sapiens
catccaaggtatatg

SEQ ID NO: 394454 - DNA, 15 bp, Homo sapiens
tcatccaaggtatat

SEQ ID NO: 394455 - DNA, 15 bp, Homo sapiens
ttcatccaaggtata

SEQ ID NO: 394456 - DNA, 15 bp, Homo sapiens
attcatccaaggtat

SEQ ID NO: 394457 - DNA, 15 bp, Homo sapiens
cattcatccaaggta

SEQ ID NO: 394458 - DNA, 15 bp, Homo sapiens
ccattcatccaaggt

SEQ ID NO: 394459 - DNA, 15 bp, Homo sapiens
cccattcatccaagg

SEQ ID NO: 394460 - DNA, 15 bp, Homo sapiens
acccattcatccaag

SEQ ID NO: 394461 - DNA, 15 bp, Homo sapiens
cacccattcatccaa

SEQ ID NO: 394462 - DNA, 15 bp, Homo sapiens
ccacccattcatcca

SEQ ID NO: 394463 - DNA, 15 bp, Homo sapiens
tccacccattcatcc

SEQ ID NO: 394464 - DNA, 15 bp, Homo sapiens
ctccacccattcatc

SEQ ID NO: 394465 - DNA, 15 bp, Homo sapiens
tctccacccattcat

SEQ ID NO: 394466 - DNA, 15 bp, Homo sapiens
ctctccacccattca

SEQ ID NO: 394467 - DNA, 15 bp, Homo sapiens
cctctccacccattc

SEQ ID NO: 394468 - DNA, 15 bp, Homo sapiens
tcctctccacccatt

SEQ ID NO: 394469 - DNA, 15 bp, Homo sapiens
ctcctctccacccat

SEQ ID NO: 394470 - DNA, 15 bp, Homo sapiens
tctcctctccaccca

SEQ ID NO: 394471 - DNA, 15 bp, Homo sapiens
gtctcctctccaccc

SEQ ID NO: 394472 - DNA, 15 bp, Homo sapiens
agtctcctctccacc

SEQ ID NO: 394473 - DNA, 15 bp, Homo sapiens
aagtctcctctccac

SEQ ID NO: 394474 - DNA, 15 bp, Homo sapiens
caagtctcctctcca

SEQ ID NO: 394475 - DNA, 15 bp, Homo sapiens
tcaagtctcctctcc

SEQ ID NO: 394476 - DNA, 15 bp, Homo sapiens
ttcaagtctcctctc

SEQ ID NO: 394477 - DNA, 15 bp, Homo sapiens
gttcaagtctcctct

SEQ ID NO: 394478 - DNA, 15 bp, Homo sapiens
agttcaagtctcctc

SEQ ID NO: 394479 - DNA, 15 bp, Homo sapiens
tagttcaagtctcct

SEQ ID NO: 394480 - DNA, 15 bp, Homo sapiens
atagttcaagtctcc

SEQ ID NO: 394481 - DNA, 15 bp, Homo sapiens
aatagttcaagtctc

SEQ ID NO: 394482 - DNA, 15 bp, Homo sapiens
caatagttcaagtct

SEQ ID NO: 394483 - DNA, 15 bp, Homo sapiens
tcaatagttcaagtc

SEQ ID NO: 394484 - DNA, 15 bp, Homo sapiens
ttcaatagttcaagt

SEQ ID NO: 394485 - DNA, 15 bp, Homo sapiens
gttcaatagttcaag

SEQ ID NO: 394486 - DNA, 15 bp, Homo sapiens
agttcaatagttcaa

SEQ ID NO: 394487 - DNA, 15 bp, Homo sapiens
aagttcaatagttca

SEQ ID NO: 394488 - DNA, 15 bp, Homo sapiens
aaagttcaatagttc

SEQ ID NO: 394489 - DNA, 15 bp, Homo sapiens
gaaagttcaatagtt

SEQ ID NO: 394490 - DNA, 15 bp, Homo sapiens
agaaagttcaatagt

SEQ ID NO: 394491 - DNA, 15 bp, Homo sapiens
tagaaagttcaatag

SEQ ID NO: 394492 - DNA, 15 bp, Homo sapiens
gtagaaagttcaata

SEQ ID NO: 394493 - DNA, 15 bp, Homo sapiens
agtagaaagttcaat

SEQ ID NO: 394494 - DNA, 15 bp, Homo sapiens
tagtagaaagttcaa

SEQ ID NO: 394495 - DNA, 15 bp, Homo sapiens
atagtagaaagttca

SEQ ID NO: 394496 - DNA, 15 bp, Homo sapiens
tatagtagaaagttc

SEQ ID NO: 394497 - DNA, 15 bp, Homo sapiens
atatagtagaaagtt

SEQ ID NO: 394498 - DNA, 15 bp, Homo sapiens
tatatagtagaaagt

SEQ ID NO: 394499 - DNA, 15 bp, Homo sapiens
atatatagtagaaag

SEQ ID NO: 394500 - DNA, 15 bp, Homo sapiens
catatatagtagaaa

SEQ ID NO: 394501 - DNA, 15 bp, Homo sapiens
tcatatatagtagaa

SEQ ID NO: 394502 - DNA, 15 bp, Homo sapiens
atcatatatagtaga

SEQ ID NO: 394503 - DNA, 15 bp, Homo sapiens
aatcatatatagtag

SEQ ID NO: 394504 - DNA, 15 bp, Homo sapiens
aaatcatatatagta

SEQ ID NO: 394505 - DNA, 15 bp, Homo sapiens
aaaatcatatatagt

SEQ ID NO: 394506 - DNA, 15 bp, Homo sapiens
taaaatcatatatag

SEQ ID NO: 394507 - DNA, 15 bp, Homo sapiens
ttaaaatcatatata

SEQ ID NO: 394508 - DNA, 15 bp, Homo sapiens
tttaaaatcatatat

SEQ ID NO: 394509 - DNA, 15 bp, Homo sapiens
ttttaaaatcatata

SEQ ID NO: 394510 - DNA, 15 bp, Homo sapiens
cttttaaaatcatat

SEQ ID NO: 394511 - DNA, 15 bp, Homo sapiens
acttttaaaatcata

SEQ ID NO: 394512 - DNA, 15 bp, Homo sapiens
aacttttaaaatcat

SEQ ID NO: 394513 - DNA, 15 bp, Homo sapiens
taacttttaaaatca

SEQ ID NO: 394514 - DNA, 15 bp, Homo sapiens
gtaacttttaaaatc

SEQ ID NO: 394515 - DNA, 15 bp, Homo sapiens
cgtaacttttaaaat

SEQ ID NO: 394516 - DNA, 15 bp, Homo sapiens
acgtaacttttaaaa

SEQ ID NO: 394517 - DNA, 15 bp, Homo sapiens
tacgtaacttttaaa

SEQ ID NO: 394518 - DNA, 15 bp, Homo sapiens
atacgtaacttttaa

SEQ ID NO: 394519 - DNA, 15 bp, Homo sapiens
tatacgtaactttta

SEQ ID NO: 394520 - DNA, 15 bp, Homo sapiens
atatacgtaactttt

SEQ ID NO: 394521 - DNA, 15 bp, Homo sapiens
tatatacgtaacttt

SEQ ID NO: 394522 - DNA, 15 bp, Homo sapiens
atatatacgtaactt

SEQ ID NO: 394523 - DNA, 15 bp, Homo sapiens
catatatacgtaact

SEQ ID NO: 394524 - DNA, 15 bp, Homo sapiens
acatatatacgtaac

SEQ ID NO: 394525 - DNA, 15 bp, Homo sapiens
tacatatatacgtaa

SEQ ID NO: 394526 - DNA, 15 bp, Homo sapiens
atacatatatacgta

SEQ ID NO: 394527 - DNA, 15 bp, Homo sapiens
tatacatatatacgt

SEQ ID NO: 394528 - DNA, 15 bp, Homo sapiens
atatacatatatacg

SEQ ID NO: 394529 - DNA, 15 bp, Homo sapiens
tatatacatatatac

SEQ ID NO: 394530 - DNA, 15 bp, Homo sapiens
atatatacatatata

SEQ ID NO: 394531 - DNA, 15 bp, Homo sapiens
tatatatacatatat

SEQ ID NO: 394532 - DNA, 15 bp, Homo sapiens
atatatatacatata

SEQ ID NO: 394533 - DNA, 15 bp, Homo sapiens
aatatatatacatat

SEQ ID NO: 394534 - DNA, 15 bp, Homo sapiens
aaatatatatacata

SEQ ID NO: 394535 - DNA, 15 bp, Homo sapiens
taaatatatatacat

SEQ ID NO: 394536 - DNA, 15 bp, Homo sapiens
gtaaatatatataca

SEQ ID NO: 394537 - DNA, 15 bp, Homo sapiens
agtaaatatatatac

SEQ ID NO: 394538 - DNA, 15 bp, Homo sapiens
aagtaaatatatata

SEQ ID NO: 394539 - DNA, 15 bp, Homo sapiens
aaagtaaatatatat

SEQ ID NO: 394540 - DNA, 15 bp, Homo sapiens
aaaagtaaatatata

SEQ ID NO: 394541 - DNA, 15 bp, Homo sapiens
aaaaagtaaatatat

SEQ ID NO: 394542 - DNA, 15 bp, Homo sapiens
caaaaagtaaatata

SEQ ID NO: 394543 - DNA, 15 bp, Homo sapiens
acaaaaagtaaatat

SEQ ID NO: 394544 - DNA, 15 bp, Homo sapiens
cacaaaaagtaaata

SEQ ID NO: 394545 - DNA, 15 bp, Homo sapiens
gcacaaaaagtaaat

SEQ ID NO: 394546 - DNA, 15 bp, Homo sapiens
tgcacaaaaagtaaa

SEQ ID NO: 394547 - DNA, 15 bp, Homo sapiens
atgcacaaaaagtaa

SEQ ID NO: 394548 - DNA, 15 bp, Homo sapiens
aatgcacaaaaagta

SEQ ID NO: 394549 - DNA, 15 bp, Homo sapiens
aaatgcacaaaaagt

SEQ ID NO: 394550 - DNA, 15 bp, Homo sapiens
gaaatgcacaaaaag

SEQ ID NO: 394551 - DNA, 15 bp, Homo sapiens
tgaaatgcacaaaaa

SEQ ID NO: 394552 - DNA, 15 bp, Homo sapiens
ctgaaatgcacaaaa

SEQ ID NO: 394553 - DNA, 15 bp, Homo sapiens
actgaaatgcacaaa

SEQ ID NO: 394554 - DNA, 15 bp, Homo sapiens
tactgaaatgcacaa

SEQ ID NO: 394555 - DNA, 15 bp, Homo sapiens
atactgaaatgcaca

SEQ ID NO: 394556 - DNA, 15 bp, Homo sapiens
aatactgaaatgcac

SEQ ID NO: 394557 - DNA, 15 bp, Homo sapiens
aaatactgaaatgca

SEQ ID NO: 394558 - DNA, 15 bp, Homo sapiens
aaaatactgaaatgc

SEQ ID NO: 394559 - DNA, 15 bp, Homo sapiens
taaaatactgaaatg

SEQ ID NO: 394560 - DNA, 15 bp, Homo sapiens
ttaaaatactgaaat

SEQ ID NO: 394561 - DNA, 15 bp, Homo sapiens
tttaaaatactgaaa

SEQ ID NO: 394562 - DNA, 15 bp, Homo sapiens
ttttaaaatactgaa

SEQ ID NO: 394563 - DNA, 15 bp, Homo sapiens
tttttaaaatactga

SEQ ID NO: 394564 - DNA, 15 bp, Homo sapiens
gtttttaaaatactg

SEQ ID NO: 394565 - DNA, 15 bp, Homo sapiens
tgtttttaaaatact

SEQ ID NO: 394566 - DNA, 15 bp, Homo sapiens
atgtttttaaaatac

SEQ ID NO: 394567 - DNA, 15 bp, Homo sapiens
tatgtttttaaaata

SEQ ID NO: 394568 - DNA, 15 bp, Homo sapiens
ttatgtttttaaaat

SEQ ID NO: 394569 - DNA, 15 bp, Homo sapiens
gttatgtttttaaaa

SEQ ID NO: 394570 - DNA, 15 bp, Homo sapiens
tgttatgtttttaaa

SEQ ID NO: 394571 - DNA, 15 bp, Homo sapiens
ttgttatgtttttaa

SEQ ID NO: 394572 - DNA, 15 bp, Homo sapiens
tttgttatgttttta

SEQ ID NO: 394573 - DNA, 15 bp, Homo sapiens
ttttgttatgttttt

SEQ ID NO: 394574 - DNA, 15 bp, Homo sapiens
gttttgttatgtttt

SEQ ID NO: 394575 - DNA, 15 bp, Homo sapiens
agttttgttatgttt

SEQ ID NO: 394576 - DNA, 15 bp, Homo sapiens
gagttttgttatgtt

SEQ ID NO: 394577 - DNA, 15 bp, Homo sapiens
agagttttgttatgt

SEQ ID NO: 394578 - DNA, 15 bp, Homo sapiens
aagagttttgttatg

SEQ ID NO: 394579 - DNA, 15 bp, Homo sapiens
aaagagttttgttat

SEQ ID NO: 394580 - DNA, 15 bp, Homo sapiens
aaaagagttttgtta

SEQ ID NO: 394581 - DNA, 15 bp, Homo sapiens
aaaaagagttttgtt

SEQ ID NO: 394582 - DNA, 15 bp, Homo sapiens
aaaaaagagttttgt

SEQ ID NO: 394583 - DNA, 15 bp, Homo sapiens
aaaaaaagagttttg

SEQ ID NO: 394584 - DNA, 15 bp, Homo sapiens
caaaaaaagagtttt

SEQ ID NO: 394585 - DNA, 15 bp, Homo sapiens
ccaaaaaaagagttt

SEQ ID NO: 394586 - DNA, 15 bp, Homo sapiens
gccaaaaaaagagtt

SEQ ID NO: 394587 - DNA, 15 bp, Homo sapiens
agccaaaaaaagagt

SEQ ID NO: 394588 - DNA, 15 bp, Homo sapiens
aagccaaaaaaagag

SEQ ID NO: 394589 - DNA, 15 bp, Homo sapiens
caagccaaaaaaaga

SEQ ID NO: 394590 - DNA, 15 bp, Homo sapiens
acaagccaaaaaaag

SEQ ID NO: 394591 - DNA, 15 bp, Homo sapiens
cacaagccaaaaaaa

SEQ ID NO: 394592 - DNA, 15 bp, Homo sapiens
acacaagccaaaaaa

SEQ ID NO: 394593 - DNA, 15 bp, Homo sapiens
aacacaagccaaaaa

SEQ ID NO: 394594 - DNA, 15 bp, Homo sapiens
caacacaagccaaaa

SEQ ID NO: 394595 - DNA, 15 bp, Homo sapiens
ccaacacaagccaaa

SEQ ID NO: 394596 - DNA, 15 bp, Homo sapiens
tccaacacaagccaa

SEQ ID NO: 394597 - DNA, 15 bp, Homo sapiens
atccaacacaagcca

SEQ ID NO: 394598 - DNA, 15 bp, Homo sapiens
tatccaacacaagcc

SEQ ID NO: 394599 - DNA, 15 bp, Homo sapiens
ctatccaacacaagc

SEQ ID NO: 394600 - DNA, 15 bp, Homo sapiens
gctatccaacacaag

SEQ ID NO: 394601 - DNA, 15 bp, Homo sapiens
agctatccaacacaa

SEQ ID NO: 394602 - DNA, 15 bp, Homo sapiens
tagctatccaacaca

SEQ ID NO: 394603 - DNA, 15 bp, Homo sapiens
ttagctatccaacac

SEQ ID NO: 394604 - DNA, 15 bp, Homo sapiens
attagctatccaaca

SEQ ID NO: 394605 - DNA, 15 bp, Homo sapiens
cattagctatccaac

SEQ ID NO: 394606 - DNA, 15 bp, Homo sapiens
tcattagctatccaa

SEQ ID NO: 394607 - DNA, 15 bp, Homo sapiens
ttcattagctatcca

SEQ ID NO: 394608 - DNA, 15 bp, Homo sapiens
tttcattagctatcc

SEQ ID NO: 394609 - DNA, 15 bp, Homo sapiens
ctttcattagctatc

SEQ ID NO: 394610 - DNA, 15 bp, Homo sapiens
actttcattagctat

SEQ ID NO: 394611 - DNA, 15 bp, Homo sapiens
aactttcattagcta

SEQ ID NO: 394612 - DNA, 15 bp, Homo sapiens
gaactttcattagct

SEQ ID NO: 394613 - DNA, 15 bp, Homo sapiens
tgaactttcattagc

SEQ ID NO: 394614 - DNA, 15 bp, Homo sapiens
atgaactttcattag

SEQ ID NO: 394615 - DNA, 15 bp, Homo sapiens
tatgaactttcatta

SEQ ID NO: 394616 - DNA, 15 bp, Homo sapiens
atatgaactttcatt

SEQ ID NO: 394617 - DNA, 15 bp, Homo sapiens
catatgaactttcat

SEQ ID NO: 394618 - DNA, 15 bp, Homo sapiens
gcatatgaactttca

SEQ ID NO: 394619 - DNA, 15 bp, Homo sapiens
agcatatgaactttc

SEQ ID NO: 394620 - DNA, 15 bp, Homo sapiens
aagcatatgaacttt

SEQ ID NO: 394621 - DNA, 15 bp, Homo sapiens
gaagcatatgaactt

SEQ ID NO: 394622 - DNA, 15 bp, Homo sapiens
agaagcatatgaact

SEQ ID NO: 394623 - DNA, 15 bp, Homo sapiens
tagaagcatatgaac

SEQ ID NO: 394624 - DNA, 15 bp, Homo sapiens
ctagaagcatatgaa

SEQ ID NO: 394625 - DNA, 15 bp, Homo sapiens
actagaagcatatga

SEQ ID NO: 394626 - DNA, 15 bp, Homo sapiens
tactagaagcatatg

SEQ ID NO: 394627 - DNA, 15 bp, Homo sapiens
gtactagaagcatat

SEQ ID NO: 394628 - DNA, 15 bp, Homo sapiens
agtactagaagcata

SEQ ID NO: 394629 - DNA, 15 bp, Homo sapiens
aagtactagaagcat

SEQ ID NO: 394630 - DNA, 15 bp, Homo sapiens
aaagtactagaagca

SEQ ID NO: 394631 - DNA, 15 bp, Homo sapiens
aaaagtactagaagc

SEQ ID NO: 394632 - DNA, 15 bp, Homo sapiens
aaaaagtactagaag

SEQ ID NO: 394633 - DNA, 15 bp, Homo sapiens
gaaaaagtactagaa

SEQ ID NO: 394634 - DNA, 15 bp, Homo sapiens
agaaaaagtactaga

SEQ ID NO: 394635 - DNA, 15 bp, Homo sapiens
aagaaaaagtactag

SEQ ID NO: 394636 - DNA, 15 bp, Homo sapiens
aaagaaaaagtacta

SEQ ID NO: 394637 - DNA, 15 bp, Homo sapiens
taaagaaaaagtact

SEQ ID NO: 394638 - DNA, 15 bp, Homo sapiens
ttaaagaaaaagtac

SEQ ID NO: 394639 - DNA, 15 bp, Homo sapiens
tttaaagaaaaagta

SEQ ID NO: 394640 - DNA, 15 bp, Homo sapiens
ttttaaagaaaaagt

SEQ ID NO: 394641 - DNA, 15 bp, Homo sapiens
tttttaaagaaaaag

SEQ ID NO: 394642 - DNA, 15 bp, Homo sapiens
gtttttaaagaaaaa

SEQ ID NO: 394643 - DNA, 15 bp, Homo sapiens
tgtttttaaagaaaa

SEQ ID NO: 394644 - DNA, 15 bp, Homo sapiens
ctgtttttaaagaaa

SEQ ID NO: 394645 - DNA, 15 bp, Homo sapiens
tctgtttttaaagaa

SEQ ID NO: 394646 - DNA, 15 bp, Homo sapiens
atctgtttttaaaga

SEQ ID NO: 394647 - DNA, 15 bp, Homo sapiens
aatctgtttttaaag

SEQ ID NO: 394648 - DNA, 15 bp, Homo sapiens
aaatctgtttttaaa

SEQ ID NO: 394649 - DNA, 15 bp, Homo sapiens
taaatctgtttttaa

SEQ ID NO: 394650 - DNA, 15 bp, Homo sapiens
ataaatctgttttta

SEQ ID NO: 394651 - DNA, 15 bp, Homo sapiens
tataaatctgttttt

SEQ ID NO: 394652 - DNA, 15 bp, Homo sapiens
ttataaatctgtttt

SEQ ID NO: 394653 - DNA, 15 bp, Homo sapiens
cttataaatctgttt

SEQ ID NO: 394654 - DNA, 15 bp, Homo sapiens
tcttataaatctgtt

SEQ ID NO: 394655 - DNA, 15 bp, Homo sapiens
ttcttataaatctgt

SEQ ID NO: 394656 - DNA, 15 bp, Homo sapiens
attcttataaatctg

SEQ ID NO: 394657 - DNA, 15 bp, Homo sapiens
tattcttataaatct

SEQ ID NO: 394658 - DNA, 15 bp, Homo sapiens
atattcttataaatc

SEQ ID NO: 394659 - DNA, 15 bp, Homo sapiens
catattcttataaat

SEQ ID NO: 394660 - DNA, 15 bp, Homo sapiens
ccatattcttataaa

SEQ ID NO: 394661 - DNA, 15 bp, Homo sapiens
accatattcttataa

SEQ ID NO: 394662 - DNA, 15 bp, Homo sapiens
taccatattcttata

SEQ ID NO: 394663 - DNA, 15 bp, Homo sapiens
ttaccatattcttat

SEQ ID NO: 394664 - DNA, 15 bp, Homo sapiens
gttaccatattctta

SEQ ID NO: 394665 - DNA, 15 bp, Homo sapiens
tgttaccatattctt

SEQ ID NO: 394666 - DNA, 15 bp, Homo sapiens
gtgttaccatattct

SEQ ID NO: 394667 - DNA, 15 bp, Homo sapiens
tgtgttaccatattc

SEQ ID NO: 394668 - DNA, 15 bp, Homo sapiens
ctgtgttaccatatt

SEQ ID NO: 394669 - DNA, 15 bp, Homo sapiens
cctgtgttaccatat

SEQ ID NO: 394670 - DNA, 15 bp, Homo sapiens
tcctgtgttaccata

SEQ ID NO: 394671 - DNA, 15 bp, Homo sapiens
ttcctgtgttaccat

SEQ ID NO: 394672 - DNA, 15 bp, Homo sapiens
cttcctgtgttacca

SEQ ID NO: 394673 - DNA, 15 bp, Homo sapiens
tcttcctgtgttacc

SEQ ID NO: 394674 - DNA, 15 bp, Homo sapiens
gtcttcctgtgttac

SEQ ID NO: 394675 - DNA, 15 bp, Homo sapiens
tgtcttcctgtgtta

SEQ ID NO: 394676 - DNA, 15 bp, Homo sapiens
atgtcttcctgtgtt

SEQ ID NO: 394677 - DNA, 15 bp, Homo sapiens
aatgtcttcctgtgt

SEQ ID NO: 394678 - DNA, 15 bp, Homo sapiens
aaatgtcttcctgtg

SEQ ID NO: 394679 - DNA, 15 bp, Homo sapiens
aaaatgtcttcctgt

SEQ ID NO: 394680 - DNA, 15 bp, Homo sapiens
aaaaatgtcttcctg

SEQ ID NO: 394681 - DNA, 15 bp, Homo sapiens
aaaaaatgtcttcct

SEQ ID NO: 394682 - DNA, 15 bp, Homo sapiens
caaaaaatgtcttcc

SEQ ID NO: 394683 - DNA, 15 bp, Homo sapiens
acaaaaaatgtcttc

SEQ ID NO: 394684 - DNA, 15 bp, Homo sapiens
aacaaaaaatgtctt

SEQ ID NO: 394685 - DNA, 15 bp, Homo sapiens
gaacaaaaaatgtct

SEQ ID NO: 394686 - DNA, 15 bp, Homo sapiens
ggaacaaaaaatgtc

SEQ ID NO: 394687 - DNA, 15 bp, Homo sapiens
tggaacaaaaaatgt

SEQ ID NO: 394688 - DNA, 15 bp, Homo sapiens
ctggaacaaaaaatg

SEQ ID NO: 394689 - DNA, 15 bp, Homo sapiens
actggaacaaaaaat

SEQ ID NO: 394690 - DNA, 15 bp, Homo sapiens
cactggaacaaaaaa

SEQ ID NO: 394691 - DNA, 15 bp, Homo sapiens
tcactggaacaaaaa

SEQ ID NO: 394692 - DNA, 15 bp, Homo sapiens
ctcactggaacaaaa

SEQ ID NO: 394693 - DNA, 15 bp, Homo sapiens
actcactggaacaaa

SEQ ID NO: 394694 - DNA, 15 bp, Homo sapiens
gactcactggaacaa

SEQ ID NO: 394695 - DNA, 15 bp, Homo sapiens
tgactcactggaaca

SEQ ID NO: 394696 - DNA, 15 bp, Homo sapiens
ttgactcactggaac

SEQ ID NO: 394697 - DNA, 15 bp, Homo sapiens
cttgactcactggaa

SEQ ID NO: 394698 - DNA, 15 bp, Homo sapiens
tcttgactcactgga

SEQ ID NO: 394699 - DNA, 15 bp, Homo sapiens
ctcttgactcactgg

SEQ ID NO: 394700 - DNA, 15 bp, Homo sapiens
tctcttgactcactg

SEQ ID NO: 394701 - DNA, 15 bp, Homo sapiens
atctcttgactcact

SEQ ID NO: 394702 - DNA, 15 bp, Homo sapiens
tatctcttgactcac

SEQ ID NO: 394703 - DNA, 15 bp, Homo sapiens
ttatctcttgactca

SEQ ID NO: 394704 - DNA, 15 bp, Homo sapiens
tttatctcttgactc

SEQ ID NO: 394705 - DNA, 15 bp, Homo sapiens
ttttatctcttgact

SEQ ID NO: 394706 - DNA, 15 bp, Homo sapiens
attttatctcttgac

SEQ ID NO: 394707 - DNA, 15 bp, Homo sapiens
tattttatctcttga

SEQ ID NO: 394708 - DNA, 15 bp, Homo sapiens
atattttatctcttg

SEQ ID NO: 394709 - DNA, 15 bp, Homo sapiens
aatattttatctctt

SEQ ID NO: 394710 - DNA, 15 bp, Homo sapiens
aaatattttatctct

SEQ ID NO: 394711 - DNA, 15 bp, Homo sapiens
aaaatattttatctc

SEQ ID NO: 394712 - DNA, 15 bp, Homo sapiens
gaaaatattttatct

SEQ ID NO: 394713 - DNA, 15 bp, Homo sapiens
tgaaaatattttatc

SEQ ID NO: 394714 - DNA, 15 bp, Homo sapiens
ttgaaaatattttat

SEQ ID NO: 394715 - DNA, 15 bp, Homo sapiens
attgaaaatatttta

SEQ ID NO: 394716 - DNA, 15 bp, Homo sapiens
aattgaaaatatttt

SEQ ID NO: 394717 - DNA, 15 bp, Homo sapiens
taattgaaaatattt

SEQ ID NO: 394718 - DNA, 15 bp, Homo sapiens
aaataattgaaaata

SEQ ID NO: 394719 - DNA, 15 bp, Homo sapiens
gaaataattgaaaat

SEQ ID NO: 394720 - DNA, 15 bp, Homo sapiens
agaaataattgaaaa

SEQ ID NO: 394721 - DNA, 15 bp, Homo sapiens
aagaaataattgaaa

SEQ ID NO: 394722 - DNA, 15 bp, Homo sapiens
aaagaaataattgaa

SEQ ID NO: 394723 - DNA, 15 bp, Homo sapiens
caaagaaataattga

SEQ ID NO: 394724 - DNA, 15 bp, Homo sapiens
acaaagaaataattg

SEQ ID NO: 394725 - DNA, 15 bp, Homo sapiens
cacaaagaaataatt

SEQ ID NO: 394726 - DNA, 15 bp, Homo sapiens
acacaaagaaataat

SEQ ID NO: 394727 - DNA, 15 bp, Homo sapiens
cacacaaagaaataa

SEQ ID NO: 394728 - DNA, 15 bp, Homo sapiens
ccacacaaagaaata

SEQ ID NO: 394729 - DNA, 15 bp, Homo sapiens
cccacacaaagaaat

SEQ ID NO: 394730 - DNA, 15 bp, Homo sapiens
acccacacaaagaaa

SEQ ID NO: 394731 - DNA, 15 bp, Homo sapiens
tacccacacaaagaa

SEQ ID NO: 394732 - DNA, 15 bp, Homo sapiens
ctacccacacaaaga

SEQ ID NO: 394733 - DNA, 15 bp, Homo sapiens
tctacccacacaaag

SEQ ID NO: 394734 - DNA, 15 bp, Homo sapiens
atctacccacacaaa

SEQ ID NO: 394735 - DNA, 15 bp, Homo sapiens
gatctacccacacaa

SEQ ID NO: 394736 - DNA, 15 bp, Homo sapiens
tgatctacccacaca

SEQ ID NO: 394737 - DNA, 15 bp, Homo sapiens
ttgatctacccacac

SEQ ID NO: 394738 - DNA, 15 bp, Homo sapiens
tttgatctacccaca

SEQ ID NO: 394739 - DNA, 15 bp, Homo sapiens
ttttgatctacccac

SEQ ID NO: 394740 - DNA, 15 bp, Homo sapiens
tttttgatctaccca

SEQ ID NO: 394741 - DNA, 15 bp, Homo sapiens
ctttttgatctaccc

SEQ ID NO: 394742 - DNA, 15 bp, Homo sapiens
tctttttgatctacc

SEQ ID NO: 394743 - DNA, 15 bp, Homo sapiens
ttctttttgatctac

SEQ ID NO: 394744 - DNA, 15 bp, Homo sapiens
tttctttttgatcta

SEQ ID NO: 394745 - DNA, 15 bp, Homo sapiens
atttctttttgatct

SEQ ID NO: 394746 - DNA, 15 bp, Homo sapiens
catttctttttgatc

SEQ ID NO: 394747 - DNA, 15 bp, Homo sapiens
ccatttctttttgat

SEQ ID NO: 394748 - DNA, 15 bp, Homo sapiens
cccatttctttttga

SEQ ID NO: 394749 - DNA, 15 bp, Homo sapiens
acccatttctttttg

SEQ ID NO: 394750 - DNA, 15 bp, Homo sapiens
aacccatttcttttt

SEQ ID NO: 394751 - DNA, 15 bp, Homo sapiens
caacccatttctttt

SEQ ID NO: 394752 - DNA, 15 bp, Homo sapiens
ccaacccatttcttt

SEQ ID NO: 394753 - DNA, 15 bp, Homo sapiens
accaacccatttctt

SEQ ID NO: 394754 - DNA, 15 bp, Homo sapiens
gaccaacccatttct

SEQ ID NO: 394755 - DNA, 15 bp, Homo sapiens
tgaccaacccatttc

SEQ ID NO: 394756 - DNA, 15 bp, Homo sapiens
gtgaccaacccattt

SEQ ID NO: 394757 - DNA, 15 bp, Homo sapiens
tgtgaccaacccatt

SEQ ID NO: 394758 - DNA, 15 bp, Homo sapiens
ttgtgaccaacccat

SEQ ID NO: 394759 - DNA, 15 bp, Homo sapiens
tttgtgaccaaccca

SEQ ID NO: 394760 - DNA, 15 bp, Homo sapiens
atttgtgaccaaccc

SEQ ID NO: 394761 - DNA, 15 bp, Homo sapiens
catttgtgaccaacc

SEQ ID NO: 394762 - DNA, 15 bp, Homo sapiens
gcatttgtgaccaac

SEQ ID NO: 394763 - DNA, 15 bp, Homo sapiens
agcatttgtgaccaa

SEQ ID NO: 394764 - DNA, 15 bp, Homo sapiens
aagcatttgtgacca

SEQ ID NO: 394765 - DNA, 15 bp, Homo sapiens
taagcatttgtgacc

SEQ ID NO: 394766 - DNA, 15 bp, Homo sapiens
gtaagcatttgtgac

SEQ ID NO: 394767 - DNA, 15 bp, Homo sapiens
agtaagcatttgtga

SEQ ID NO: 394768 - DNA, 15 bp, Homo sapiens
gagtaagcatttgtg

SEQ ID NO: 394769 - DNA, 15 bp, Homo sapiens
tgagtaagcatttgt

SEQ ID NO: 394770 - DNA, 15 bp, Homo sapiens
atgagtaagcatttg

SEQ ID NO: 394771 - DNA, 15 bp, Homo sapiens
tatgagtaagcattt

SEQ ID NO: 394772 - DNA, 15 bp, Homo sapiens
gtatgagtaagcatt

SEQ ID NO: 394773 - DNA, 15 bp, Homo sapiens
tgtatgagtaagcat

SEQ ID NO: 394774 - DNA, 15 bp, Homo sapiens
ctgtatgagtaagca

SEQ ID NO: 394775 - DNA, 15 bp, Homo sapiens
tctgtatgagtaagc

SEQ ID NO: 394776 - DNA, 15 bp, Homo sapiens
ctctgtatgagtaag

SEQ ID NO: 394777 - DNA, 15 bp, Homo sapiens
cctctgtatgagtaa

SEQ ID NO: 394778 - DNA, 15 bp, Homo sapiens
acctctgtatgagta

SEQ ID NO: 394779 - DNA, 15 bp, Homo sapiens
tacctctgtatgagt

SEQ ID NO: 394780 - DNA, 15 bp, Homo sapiens
atacctctgtatgag

SEQ ID NO: 394781 - DNA, 15 bp, Homo sapiens
tatacctctgtatga

SEQ ID NO: 394782 - DNA, 15 bp, Homo sapiens
gtatacctctgtatg

SEQ ID NO: 394783 - DNA, 15 bp, Homo sapiens
tgtatacctctgtat

SEQ ID NO: 394784 - DNA, 15 bp, Homo sapiens
gtgtatacctctgta

SEQ ID NO: 394785 - DNA, 15 bp, Homo sapiens
tgtgtatacctctgt

SEQ ID NO: 394786 - DNA, 15 bp, Homo sapiens
ctgtgtatacctctg

SEQ ID NO: 394787 - DNA, 15 bp, Homo sapiens
cctgtgtatacctct

SEQ ID NO: 394788 - DNA, 15 bp, Homo sapiens
acctgtgtatacctc

SEQ ID NO: 394789 - DNA, 15 bp, Homo sapiens
cacctgtgtatacct

SEQ ID NO: 394790 - DNA, 15 bp, Homo sapiens
acacctgtgtatacc

SEQ ID NO: 394791 - DNA, 15 bp, Homo sapiens
cacacctgtgtatac

SEQ ID NO: 394792 - DNA, 15 bp, Homo sapiens
acacacctgtgtata

SEQ ID NO: 394793 - DNA, 15 bp, Homo sapiens
cacacacctgtgtat

SEQ ID NO: 394794 - DNA, 15 bp, Homo sapiens
gcacacacctgtgta

SEQ ID NO: 394795 - DNA, 15 bp, Homo sapiens
tgcacacacctgtgt

SEQ ID NO: 394796 - DNA, 15 bp, Homo sapiens
gtgcacacacctgtg

SEQ ID NO: 394797 - DNA, 15 bp, Homo sapiens
tgtgcacacacctgt

SEQ ID NO: 394798 - DNA, 15 bp, Homo sapiens
gtgtgcacacacctg

SEQ ID NO: 394799 - DNA, 15 bp, Homo sapiens
tgtgtgcacacacct

SEQ ID NO: 394800 - DNA, 15 bp, Homo sapiens
ctgtgtgcacacacc

SEQ ID NO: 394801 - DNA, 15 bp, Homo sapiens
gctgtgtgcacacac

SEQ ID NO: 394802 - DNA, 15 bp, Homo sapiens
ggctgtgtgcacaca

SEQ ID NO: 394803 - DNA, 15 bp, Homo sapiens
aggctgtgtgcacac

SEQ ID NO: 394804 - DNA, 15 bp, Homo sapiens
aaggctgtgtgcaca

SEQ ID NO: 394805 - DNA, 15 bp, Homo sapiens
taaggctgtgtgcac

SEQ ID NO: 394806 - DNA, 15 bp, Homo sapiens
ttaaggctgtgtgca

SEQ ID NO: 394807 - DNA, 15 bp, Homo sapiens
tttaaggctgtgtgc

SEQ ID NO: 394808 - DNA, 15 bp, Homo sapiens
ttttaaggctgtgtg

SEQ ID NO: 394809 - DNA, 15 bp, Homo sapiens
attttaaggctgtgt

SEQ ID NO: 394810 - DNA, 15 bp, Homo sapiens
cattttaaggctgtg

SEQ ID NO: 394811 - DNA, 15 bp, Homo sapiens
tcattttaaggctgt

SEQ ID NO: 394812 - DNA, 15 bp, Homo sapiens
gtcattttaaggctg

SEQ ID NO: 394813 - DNA, 15 bp, Homo sapiens
agtcattttaaggct

SEQ ID NO: 394814 - DNA, 15 bp, Homo sapiens
cagtcattttaaggc

SEQ ID NO: 394815 - DNA, 15 bp, Homo sapiens
tcagtcattttaagg

SEQ ID NO: 394816 - DNA, 15 bp, Homo sapiens
ctcagtcattttaag

SEQ ID NO: 394817 - DNA, 15 bp, Homo sapiens
actcagtcattttaa

SEQ ID NO: 394818 - DNA, 15 bp, Homo sapiens
aactcagtcatttta

SEQ ID NO: 394819 - DNA, 15 bp, Homo sapiens
caactcagtcatttt

SEQ ID NO: 394820 - DNA, 15 bp, Homo sapiens
gcaactcagtcattt

SEQ ID NO: 394821 - DNA, 15 bp, Homo sapiens
agcaactcagtcatt

SEQ ID NO: 394822 - DNA, 15 bp, Homo sapiens
gagcaactcagtcat

SEQ ID NO: 394823 - DNA, 15 bp, Homo sapiens
agagcaactcagtca

SEQ ID NO: 394824 - DNA, 15 bp, Homo sapiens
cagagcaactcagtc

SEQ ID NO: 394825 - DNA, 15 bp, Homo sapiens
ccagagcaactcagt

SEQ ID NO: 394826 - DNA, 15 bp, Homo sapiens
tccagagcaactcag

SEQ ID NO: 394827 - DNA, 15 bp, Homo sapiens
ttccagagcaactca

SEQ ID NO: 394828 - DNA, 15 bp, Homo sapiens
tttccagagcaactc

SEQ ID NO: 394829 - DNA, 15 bp, Homo sapiens
ttttccagagcaact

SEQ ID NO: 394830 - DNA, 15 bp, Homo sapiens
attttccagagcaac

SEQ ID NO: 394831 - DNA, 15 bp, Homo sapiens
cattttccagagcaa

SEQ ID NO: 394832 - DNA, 15 bp, Homo sapiens
tcattttccagagca

SEQ ID NO: 394833 - DNA, 15 bp, Homo sapiens
gtcattttccagagc

SEQ ID NO: 394834 - DNA, 15 bp, Homo sapiens
tgtcattttccagag

SEQ ID NO: 394835 - DNA, 15 bp, Homo sapiens
ctgtcattttccaga

SEQ ID NO: 394836 - DNA, 15 bp, Homo sapiens
tctgtcattttccag

SEQ ID NO: 394837 - DNA, 15 bp, Homo sapiens
ttctgtcattttcca

SEQ ID NO: 394838 - DNA, 15 bp, Homo sapiens
tttctgtcattttcc

SEQ ID NO: 394839 - DNA, 15 bp, Homo sapiens
atttctgtcattttc

SEQ ID NO: 394840 - DNA, 15 bp, Homo sapiens
aatttctgtcatttt

SEQ ID NO: 394841 - DNA, 15 bp, Homo sapiens
gaatttctgtcattt

SEQ ID NO: 394842 - DNA, 15 bp, Homo sapiens
tgaatttctgtcatt

SEQ ID NO: 394843 - DNA, 15 bp, Homo sapiens
atgaatttctgtcat

SEQ ID NO: 394844 - DNA, 15 bp, Homo sapiens
catgaatttctgtca

SEQ ID NO: 394845 - DNA, 15 bp, Homo sapiens
acatgaatttctgtc

SEQ ID NO: 394846 - DNA, 15 bp, Homo sapiens
tacatgaatttctgt

SEQ ID NO: 394847 - DNA, 15 bp, Homo sapiens
ttacatgaatttctg

SEQ ID NO: 394848 - DNA, 15 bp, Homo sapiens
cttacatgaatttct

SEQ ID NO: 394849 - DNA, 15 bp, Homo sapiens
ccttacatgaatttc

SEQ ID NO: 394850 - DNA, 15 bp, Homo sapiens
gccttacatgaattt

SEQ ID NO: 394851 - DNA, 15 bp, Homo sapiens
tgccttacatgaatt

SEQ ID NO: 394852 - DNA, 15 bp, Homo sapiens
gtgccttacatgaat

SEQ ID NO: 394853 - DNA, 15 bp, Homo sapiens
cgtgccttacatgaa

SEQ ID NO: 394854 - DNA, 15 bp, Homo sapiens
tcgtgccttacatga

SEQ ID NO: 394855 - DNA, 15 bp, Homo sapiens
atcgtgccttacatg

SEQ ID NO: 394856 - DNA, 15 bp, Homo sapiens
catcgtgccttacat

SEQ ID NO: 394857 - DNA, 15 bp, Homo sapiens
tcatcgtgccttaca

SEQ ID NO: 394858 - DNA, 15 bp, Homo sapiens
ttcatcgtgccttac

SEQ ID NO: 394859 - DNA, 15 bp, Homo sapiens
cttcatcgtgcctta

SEQ ID NO: 394860 - DNA, 15 bp, Homo sapiens
tcttcatcgtgcctt

SEQ ID NO: 394861 - DNA, 15 bp, Homo sapiens
ttcttcatcgtgcct

SEQ ID NO: 394862 - DNA, 15 bp, Homo sapiens
tttcttcatcgtgcc

SEQ ID NO: 394863 - DNA, 15 bp, Homo sapiens
atttcttcatcgtgc

SEQ ID NO: 394864 - DNA, 15 bp, Homo sapiens
tatttcttcatcgtg

SEQ ID NO: 394865 - DNA, 15 bp, Homo sapiens
ctatttcttcatcgt

SEQ ID NO: 394866 - DNA, 15 bp, Homo sapiens
cctatttcttcatcg

SEQ ID NO: 394867 - DNA, 15 bp, Homo sapiens
tcctatttcttcatc

SEQ ID NO: 394868 - DNA, 15 bp, Homo sapiens
ctcctatttcttcat

SEQ ID NO: 394869 - DNA, 15 bp, Homo sapiens
tctcctatttcttca

SEQ ID NO: 394870 - DNA, 15 bp, Homo sapiens
ttctcctatttcttc

SEQ ID NO: 394871 - DNA, 15 bp, Homo sapiens
tttctcctatttctt

SEQ ID NO: 394872 - DNA, 15 bp, Homo sapiens
atttctcctatttct

SEQ ID NO: 394873 - DNA, 15 bp, Homo sapiens
tatttctcctatttc

SEQ ID NO: 394874 - DNA, 15 bp, Homo sapiens
gtatttctcctattt

SEQ ID NO: 394875 - DNA, 15 bp, Homo sapiens
tgtatttctcctatt

SEQ ID NO: 394876 - DNA, 15 bp, Homo sapiens
atgtatttctcctat

SEQ ID NO: 394877 - DNA, 15 bp, Homo sapiens
catgtatttctccta

SEQ ID NO: 394878 - DNA, 15 bp, Homo sapiens
acatgtatttctcct

SEQ ID NO: 394879 - DNA, 15 bp, Homo sapiens
tacatgtatttctcc

SEQ ID NO: 394880 - DNA, 15 bp, Homo sapiens
atacatgtatttctc

SEQ ID NO: 394881 - DNA, 15 bp, Homo sapiens
catacatgtatttct

SEQ ID NO: 394882 - DNA, 15 bp, Homo sapiens
acatacatgtatttc

SEQ ID NO: 394883 - DNA, 15 bp, Homo sapiens
tacatacatgtattt

SEQ ID NO: 394884 - DNA, 15 bp, Homo sapiens
ttacatacatgtatt

SEQ ID NO: 394885 - DNA, 15 bp, Homo sapiens
tttacatacatgtat

SEQ ID NO: 394886 - DNA, 15 bp, Homo sapiens
atttacatacatgta

SEQ ID NO: 394887 - DNA, 15 bp, Homo sapiens
tatttacatacatgt

SEQ ID NO: 394888 - DNA, 15 bp, Homo sapiens
atatttacatacatg

SEQ ID NO: 394889 - DNA, 15 bp, Homo sapiens
tatatttacatacat

SEQ ID NO: 394890 - DNA, 15 bp, Homo sapiens
atatatttacataca

SEQ ID NO: 394891 - DNA, 15 bp, Homo sapiens
aatatatttacatac

SEQ ID NO: 394892 - DNA, 15 bp, Homo sapiens
gaatatatttacata

SEQ ID NO: 394893 - DNA, 15 bp, Homo sapiens
ggaatatatttacat

SEQ ID NO: 394894 - DNA, 15 bp, Homo sapiens
aggaatatatttaca

SEQ ID NO: 394895 - DNA, 15 bp, Homo sapiens
taggaatatatttac

SEQ ID NO: 394896 - DNA, 15 bp, Homo sapiens
ctaggaatatattta

SEQ ID NO: 394897 - DNA, 15 bp, Homo sapiens
tctaggaatatattt

SEQ ID NO: 394898 - DNA, 15 bp, Homo sapiens
ctctaggaatatatt

SEQ ID NO: 394899 - DNA, 15 bp, Homo sapiens
gctctaggaatatat

SEQ ID NO: 394900 - DNA, 15 bp, Homo sapiens
tgctctaggaatata

SEQ ID NO: 394901 - DNA, 15 bp, Homo sapiens
ctgctctaggaatat

SEQ ID NO: 394902 - DNA, 15 bp, Homo sapiens
gctgctctaggaata

SEQ ID NO: 394903 - DNA, 15 bp, Homo sapiens
cgctgctctaggaat

SEQ ID NO: 394904 - DNA, 15 bp, Homo sapiens
acgctgctctaggaa

SEQ ID NO: 394905 - DNA, 15 bp, Homo sapiens
aacgctgctctagga

SEQ ID NO: 394906 - DNA, 15 bp, Homo sapiens
aaacgctgctctagg

SEQ ID NO: 394907 - DNA, 15 bp, Homo sapiens
aaaacgctgctctag

SEQ ID NO: 394908 - DNA, 15 bp, Homo sapiens
aaaaacgctgctcta

SEQ ID NO: 394909 - DNA, 15 bp, Homo sapiens
gaaaaacgctgctct

SEQ ID NO: 394910 - DNA, 15 bp, Homo sapiens
tgaaaaacgctgctc

SEQ ID NO: 394911 - DNA, 15 bp, Homo sapiens
gtgaaaaacgctgct

SEQ ID NO: 394912 - DNA, 15 bp, Homo sapiens
tgtgaaaaacgctgc

SEQ ID NO: 394913 - DNA, 15 bp, Homo sapiens
atgtgaaaaacgctg

SEQ ID NO: 394914 - DNA, 15 bp, Homo sapiens
aatgtgaaaaacgct

SEQ ID NO: 394915 - DNA, 15 bp, Homo sapiens
aaatgtgaaaaacgc

SEQ ID NO: 394916 - DNA, 15 bp, Homo sapiens
caaatgtgaaaaacg

SEQ ID NO: 394917 - DNA, 15 bp, Homo sapiens
tcaaatgtgaaaaac

SEQ ID NO: 394918 - DNA, 15 bp, Homo sapiens
ttcaaatgtgaaaaa

SEQ ID NO: 394919 - DNA, 15 bp, Homo sapiens
gttcaaatgtgaaaa

SEQ ID NO: 394920 - DNA, 15 bp, Homo sapiens
tgttcaaatgtgaaa

SEQ ID NO: 394921 - DNA, 15 bp, Homo sapiens
ttgttcaaatgtgaa

SEQ ID NO: 394922 - DNA, 15 bp, Homo sapiens
attgttcaaatgtga

SEQ ID NO: 394923 - DNA, 15 bp, Homo sapiens
tattgttcaaatgtg

SEQ ID NO: 394924 - DNA, 15 bp, Homo sapiens
ctattgttcaaatgt

SEQ ID NO: 394925 - DNA, 15 bp, Homo sapiens
actattgttcaaatg

SEQ ID NO: 394926 - DNA, 15 bp, Homo sapiens
aactattgttcaaat

SEQ ID NO: 394927 - DNA, 15 bp, Homo sapiens
caactattgttcaaa

SEQ ID NO: 394928 - DNA, 15 bp, Homo sapiens
gcaactattgttcaa

SEQ ID NO: 394929 - DNA, 15 bp, Homo sapiens
tgcaactattgttca

SEQ ID NO: 394930 - DNA, 15 bp, Homo sapiens
ttgcaactattgttc

SEQ ID NO: 394931 - DNA, 15 bp, Homo sapiens
tttgcaactattgtt

SEQ ID NO: 394932 - DNA, 15 bp, Homo sapiens
ttttgcaactattgt

SEQ ID NO: 394933 - DNA, 15 bp, Homo sapiens
attttgcaactattg

SEQ ID NO: 394934 - DNA, 15 bp, Homo sapiens
tattttgcaactatt

SEQ ID NO: 394935 - DNA, 15 bp, Homo sapiens
ctattttgcaactat

SEQ ID NO: 394936 - DNA, 15 bp, Homo sapiens
gctattttgcaacta

SEQ ID NO: 394937 - DNA, 15 bp, Homo sapiens
agctattttgcaact

SEQ ID NO: 394938 - DNA, 15 bp, Homo sapiens
tagctattttgcaac

SEQ ID NO: 394939 - DNA, 15 bp, Homo sapiens
ctagctattttgcaa

SEQ ID NO: 394940 - DNA, 15 bp, Homo sapiens
actagctattttgca

SEQ ID NO: 394941 - DNA, 15 bp, Homo sapiens
tactagctattttgc

SEQ ID NO: 394942 - DNA, 15 bp, Homo sapiens
ttactagctattttg

SEQ ID NO: 394943 - DNA, 15 bp, Homo sapiens
attactagctatttt

SEQ ID NO: 394944 - DNA, 15 bp, Homo sapiens
cattactagctattt

SEQ ID NO: 394945 - DNA, 15 bp, Homo sapiens
ccattactagctatt

SEQ ID NO: 394946 - DNA, 15 bp, Homo sapiens
tccattactagctat

SEQ ID NO: 394947 - DNA, 15 bp, Homo sapiens
ttccattactagcta

SEQ ID NO: 394948 - DNA, 15 bp, Homo sapiens
attccattactagct

SEQ ID NO: 394949 - DNA, 15 bp, Homo sapiens
aattccattactagc

SEQ ID NO: 394950 - DNA, 15 bp, Homo sapiens
caattccattactag

SEQ ID NO: 394951 - DNA, 15 bp, Homo sapiens
gcaattccattacta

SEQ ID NO: 394952 - DNA, 15 bp, Homo sapiens
ggcaattccattact

SEQ ID NO: 394953 - DNA, 15 bp, Homo sapiens
aggcaattccattac

SEQ ID NO: 394954 - DNA, 15 bp, Homo sapiens
caggcaattccatta

SEQ ID NO: 394955 - DNA, 15 bp, Homo sapiens
gcaggcaattccatt

SEQ ID NO: 394956 - DNA, 15 bp, Homo sapiens
tgcaggcaattccat

SEQ ID NO: 394957 - DNA, 15 bp, Homo sapiens
atgcaggcaattcca

SEQ ID NO: 394958 - DNA, 15 bp, Homo sapiens
aatgcaggcaattcc

SEQ ID NO: 394959 - DNA, 15 bp, Homo sapiens
aaatgcaggcaattc

SEQ ID NO: 394960 - DNA, 15 bp, Homo sapiens
caaatgcaggcaatt

SEQ ID NO: 394961 - DNA, 15 bp, Homo sapiens
tcaaatgcaggcaat

SEQ ID NO: 394962 - DNA, 15 bp, Homo sapiens
ctcaaatgcaggcaa

SEQ ID NO: 394963 - DNA, 15 bp, Homo sapiens
actcaaatgcaggca

SEQ ID NO: 394964 - DNA, 15 bp, Homo sapiens
tactcaaatgcaggc

SEQ ID NO: 394965 - DNA, 15 bp, Homo sapiens
gtactcaaatgcagg

SEQ ID NO: 394966 - DNA, 15 bp, Homo sapiens
agtactcaaatgcag

SEQ ID NO: 394967 - DNA, 15 bp, Homo sapiens
gagtactcaaatgca

SEQ ID NO: 394968 - DNA, 15 bp, Homo sapiens
tgagtactcaaatgc

SEQ ID NO: 394969 - DNA, 15 bp, Homo sapiens
gtgagtactcaaatg

SEQ ID NO: 394970 - DNA, 15 bp, Homo sapiens
agtgagtactcaaat

SEQ ID NO: 394971 - DNA, 15 bp, Homo sapiens
cagtgagtactcaaa

SEQ ID NO: 394972 - DNA, 15 bp, Homo sapiens
acagtgagtactcaa

SEQ ID NO: 394973 - DNA, 15 bp, Homo sapiens
cacagtgagtactca

SEQ ID NO: 394974 - DNA, 15 bp, Homo sapiens
acacagtgagtactc

SEQ ID NO: 394975 - DNA, 15 bp, Homo sapiens
cacacagtgagtact

SEQ ID NO: 394976 - DNA, 15 bp, Homo sapiens
gcacacagtgagtac

SEQ ID NO: 394977 - DNA, 15 bp, Homo sapiens
ggcacacagtgagta

SEQ ID NO: 394978 - DNA, 15 bp, Homo sapiens
tggcacacagtgagt

SEQ ID NO: 394979 - DNA, 15 bp, Homo sapiens
ttggcacacagtgag

SEQ ID NO: 394980 - DNA, 15 bp, Homo sapiens
cttggcacacagtga

SEQ ID NO: 394981 - DNA, 15 bp, Homo sapiens
gcttggcacacagtg

SEQ ID NO: 394982 - DNA, 15 bp, Homo sapiens
tgcttggcacacagt

SEQ ID NO: 394983 - DNA, 15 bp, Homo sapiens
ctgcttggcacacag

SEQ ID NO: 394984 - DNA, 15 bp, Homo sapiens
actgcttggcacaca

SEQ ID NO: 394985 - DNA, 15 bp, Homo sapiens
cactgcttggcacac

SEQ ID NO: 394986 - DNA, 15 bp, Homo sapiens
acactgcttggcaca

SEQ ID NO: 394987 - DNA, 15 bp, Homo sapiens
aacactgcttggcac

SEQ ID NO: 394988 - DNA, 15 bp, Homo sapiens
gaacactgcttggca

SEQ ID NO: 394989 - DNA, 15 bp, Homo sapiens
agaacactgcttggc

SEQ ID NO: 394990 - DNA, 15 bp, Homo sapiens
tagaacactgcttgg

SEQ ID NO: 394991 - DNA, 15 bp, Homo sapiens
ttagaacactgcttg

SEQ ID NO: 394992 - DNA, 15 bp, Homo sapiens
cttagaacactgctt

SEQ ID NO: 394993 - DNA, 15 bp, Homo sapiens
acttagaacactgct

SEQ ID NO: 394994 - DNA, 15 bp, Homo sapiens
tacttagaacactgc

SEQ ID NO: 394995 - DNA, 15 bp, Homo sapiens
gtacttagaacactg

SEQ ID NO: 394996 - DNA, 15 bp, Homo sapiens
agtacttagaacact

SEQ ID NO: 394997 - DNA, 15 bp, Homo sapiens
aagtacttagaacac

SEQ ID NO: 394998 - DNA, 15 bp, Homo sapiens
taagtacttagaaca

SEQ ID NO: 394999 - DNA, 15 bp, Homo sapiens
ttaagtacttagaac

SEQ ID NO: 395000 - DNA, 15 bp, Homo sapiens
cttaagtacttagaa

SEQ ID NO: 395001 - DNA, 15 bp, Homo sapiens
tcttaagtacttaga

SEQ ID NO: 395002 - DNA, 15 bp, Homo sapiens
atcttaagtacttag

SEQ ID NO: 395003 - DNA, 15 bp, Homo sapiens
aatcttaagtactta

SEQ ID NO: 395004 - DNA, 15 bp, Homo sapiens
taatcttaagtactt

SEQ ID NO: 395005 - DNA, 15 bp, Homo sapiens
gtaatcttaagtact

SEQ ID NO: 395006 - DNA, 15 bp, Homo sapiens
agtaatcttaagtac

SEQ ID NO: 395007 - DNA, 15 bp, Homo sapiens
tagtaatcttaagta

SEQ ID NO: 395008 - DNA, 15 bp, Homo sapiens
atagtaatcttaagt

SEQ ID NO: 395009 - DNA, 15 bp, Homo sapiens
aatagtaatcttaag

SEQ ID NO: 395010 - DNA, 15 bp, Homo sapiens
aaatagtaatcttaa

SEQ ID NO: 395011 - DNA, 15 bp, Homo sapiens
aaaatagtaatctta

SEQ ID NO: 395012 - DNA, 15 bp, Homo sapiens
taaaatagtaatctt

SEQ ID NO: 395013 - DNA, 15 bp, Homo sapiens
gtaaaatagtaatct

SEQ ID NO: 395014 - DNA, 15 bp, Homo sapiens
agtaaaatagtaatc

SEQ ID NO: 395015 - DNA, 15 bp, Homo sapiens
cagtaaaatagtaat

SEQ ID NO: 395016 - DNA, 15 bp, Homo sapiens
acagtaaaatagtaa

SEQ ID NO: 395017 - DNA, 15 bp, Homo sapiens
aacagtaaaatagta

SEQ ID NO: 395018 - DNA, 15 bp, Homo sapiens
taacagtaaaatagt

SEQ ID NO: 395019 - DNA, 15 bp, Homo sapiens
gtaacagtaaaatag

SEQ ID NO: 395020 - DNA, 15 bp, Homo sapiens
tgtaacagtaaaata

SEQ ID NO: 395021 - DNA, 15 bp, Homo sapiens
atgtaacagtaaaat

SEQ ID NO: 395022 - DNA, 15 bp, Homo sapiens
aatgtaacagtaaaa

SEQ ID NO: 395023 - DNA, 15 bp, Homo sapiens
aaatgtaacagtaaa

SEQ ID NO: 395024 - DNA, 15 bp, Homo sapiens
caaatgtaacagtaa

SEQ ID NO: 395025 - DNA, 15 bp, Homo sapiens
acaaatgtaacagta

SEQ ID NO: 395026 - DNA, 15 bp, Homo sapiens
tacaaatgtaacagt

SEQ ID NO: 395027 - DNA, 15 bp, Homo sapiens
atacaaatgtaacag

SEQ ID NO: 395028 - DNA, 15 bp, Homo sapiens
catacaaatgtaaca

SEQ ID NO: 395029 - DNA, 15 bp, Homo sapiens
acatacaaatgtaac

SEQ ID NO: 395030 - DNA, 15 bp, Homo sapiens
tacatacaaatgtaa

SEQ ID NO: 395031 - DNA, 15 bp, Homo sapiens
atacatacaaatgta

SEQ ID NO: 395032 - DNA, 15 bp, Homo sapiens
aatacatacaaatgt

SEQ ID NO: 395033 - DNA, 15 bp, Homo sapiens
aaatacatacaaatg

SEQ ID NO: 395034 - DNA, 15 bp, Homo sapiens
taaatacatacaaat

SEQ ID NO: 395035 - DNA, 15 bp, Homo sapiens
ataaatacatacaaa

SEQ ID NO: 395036 - DNA, 15 bp, Homo sapiens
cataaatacatacaa

SEQ ID NO: 395037 - DNA, 15 bp, Homo sapiens
acataaatacataca

SEQ ID NO: 395038 - DNA, 15 bp, Homo sapiens
cacataaatacatac

SEQ ID NO: 395039 - DNA, 15 bp, Homo sapiens
gcacataaatacata

SEQ ID NO: 395040 - DNA, 15 bp, Homo sapiens
ggcacataaatacat

SEQ ID NO: 395041 - DNA, 15 bp, Homo sapiens
aggcacataaataca

SEQ ID NO: 395042 - DNA, 15 bp, Homo sapiens
taggcacataaatac

SEQ ID NO: 395043 - DNA, 15 bp, Homo sapiens
ctaggcacataaata

SEQ ID NO: 395044 - DNA, 15 bp, Homo sapiens
tctaggcacataaat

SEQ ID NO: 395045 - DNA, 15 bp, Homo sapiens
ttctaggcacataaa

SEQ ID NO: 395046 - DNA, 15 bp, Homo sapiens
attctaggcacataa

SEQ ID NO: 395047 - DNA, 15 bp, Homo sapiens
tattctaggcacata

SEQ ID NO: 395048 - DNA, 15 bp, Homo sapiens
atattctaggcacat

SEQ ID NO: 395049 - DNA, 15 bp, Homo sapiens
tatattctaggcaca

SEQ ID NO: 395050 - DNA, 15 bp, Homo sapiens
atatattctaggcac

SEQ ID NO: 395051 - DNA, 15 bp, Homo sapiens
catatattctaggca

SEQ ID NO: 395052 - DNA, 15 bp, Homo sapiens
acatatattctaggc

SEQ ID NO: 395053 - DNA, 15 bp, Homo sapiens
cacatatattctagg

SEQ ID NO: 395054 - DNA, 15 bp, Homo sapiens
acacatatattctag

SEQ ID NO: 395055 - DNA, 15 bp, Homo sapiens
tacacatatattcta

SEQ ID NO: 395056 - DNA, 15 bp, Homo sapiens
ttacacatatattct

SEQ ID NO: 395057 - DNA, 15 bp, Homo sapiens
attacacatatattc

SEQ ID NO: 395058 - DNA, 15 bp, Homo sapiens
tattacacatatatt

SEQ ID NO: 395059 - DNA, 15 bp, Homo sapiens
ctattacacatatat

SEQ ID NO: 395060 - DNA, 15 bp, Homo sapiens
actattacacatata

SEQ ID NO: 395061 - DNA, 15 bp, Homo sapiens
tactattacacatat

SEQ ID NO: 395062 - DNA, 15 bp, Homo sapiens
atactattacacata

SEQ ID NO: 395063 - DNA, 15 bp, Homo sapiens
tatactattacacat

SEQ ID NO: 395064 - DNA, 15 bp, Homo sapiens
gtatactattacaca

SEQ ID NO: 395065 - DNA, 15 bp, Homo sapiens
tgtatactattacac

SEQ ID NO: 395066 - DNA, 15 bp, Homo sapiens
atgtatactattaca

SEQ ID NO: 395067 - DNA, 15 bp, Homo sapiens
tatgtatactattac

SEQ ID NO: 395068 - DNA, 15 bp, Homo sapiens
atatgtatactatta

SEQ ID NO: 395069 - DNA, 15 bp, Homo sapiens
aatatgtatactatt

SEQ ID NO: 395070 - DNA, 15 bp, Homo sapiens
aaatatgtatactat

SEQ ID NO: 395071 - DNA, 15 bp, Homo sapiens
aaaatatgtatacta

SEQ ID NO: 395072 - DNA, 15 bp, Homo sapiens
gaaaatatgtatact

SEQ ID NO: 395073 - DNA, 15 bp, Homo sapiens
tgaaaatatgtatac

SEQ ID NO: 395074 - DNA, 15 bp, Homo sapiens
gtgaaaatatgtata

SEQ ID NO: 395075 - DNA, 15 bp, Homo sapiens
tgtgaaaatatgtat

SEQ ID NO: 395076 - DNA, 15 bp, Homo sapiens
atgtgaaaatatgta

SEQ ID NO: 395077 - DNA, 15 bp, Homo sapiens
tatgtgaaaatatgt

SEQ ID NO: 395078 - DNA, 15 bp, Homo sapiens
gtatgtgaaaatatg

SEQ ID NO: 395079 - DNA, 15 bp, Homo sapiens
agtatgtgaaaatat

SEQ ID NO: 395080 - DNA, 15 bp, Homo sapiens
aagtatgtgaaaata

SEQ ID NO: 395081 - DNA, 15 bp, Homo sapiens
caagtatgtgaaaat

SEQ ID NO: 395082 - DNA, 15 bp, Homo sapiens
acaagtatgtgaaaa

SEQ ID NO: 395083 - DNA, 15 bp, Homo sapiens
cacaagtatgtgaaa

SEQ ID NO: 395084 - DNA, 15 bp, Homo sapiens
tcacaagtatgtgaa

SEQ ID NO: 395085 - DNA, 15 bp, Homo sapiens
atcacaagtatgtga

SEQ ID NO: 395086 - DNA, 15 bp, Homo sapiens
aatcacaagtatgtg

SEQ ID NO: 395087 - DNA, 15 bp, Homo sapiens
caatcacaagtatgt

SEQ ID NO: 395088 - DNA, 15 bp, Homo sapiens
tcaatcacaagtatg

SEQ ID NO: 395089 - DNA, 15 bp, Homo sapiens
ctcaatcacaagtat

SEQ ID NO: 395090 - DNA, 15 bp, Homo sapiens
actcaatcacaagta

SEQ ID NO: 395091 - DNA, 15 bp, Homo sapiens
cactcaatcacaagt

SEQ ID NO: 395092 - DNA, 15 bp, Homo sapiens
acactcaatcacaag

SEQ ID NO: 395093 - DNA, 15 bp, Homo sapiens
tacactcaatcacaa

SEQ ID NO: 395094 - DNA, 15 bp, Homo sapiens
gtacactcaatcaca

SEQ ID NO: 395095 - DNA, 15 bp, Homo sapiens
tgtacactcaatcac

SEQ ID NO: 395096 - DNA, 15 bp, Homo sapiens
ttgtacactcaatca

SEQ ID NO: 395097 - DNA, 15 bp, Homo sapiens
attgtacactcaatc

SEQ ID NO: 395098 - DNA, 15 bp, Homo sapiens
gattgtacactcaat

SEQ ID NO: 395099 - DNA, 15 bp, Homo sapiens
ggattgtacactcaa

SEQ ID NO: 395100 - DNA, 15 bp, Homo sapiens
aggattgtacactca

SEQ ID NO: 395101 - DNA, 15 bp, Homo sapiens
aaggattgtacactc

SEQ ID NO: 395102 - DNA, 15 bp, Homo sapiens
caaggattgtacact

SEQ ID NO: 395103 - DNA, 15 bp, Homo sapiens
tcaaggattgtacac

SEQ ID NO: 395104 - DNA, 15 bp, Homo sapiens
atcaaggattgtaca

SEQ ID NO: 395105 - DNA, 15 bp, Homo sapiens
gatcaaggattgtac

SEQ ID NO: 395106 - DNA, 15 bp, Homo sapiens
agatcaaggattgta

SEQ ID NO: 395107 - DNA, 15 bp, Homo sapiens
cagatcaaggattgt

SEQ ID NO: 395108 - DNA, 15 bp, Homo sapiens
acagatcaaggattg

SEQ ID NO: 395109 - DNA, 15 bp, Homo sapiens
gacagatcaaggatt

SEQ ID NO: 395110 - DNA, 15 bp, Homo sapiens
tgacagatcaaggat

SEQ ID NO: 395111 - DNA, 15 bp, Homo sapiens
ttgacagatcaagga

SEQ ID NO: 395112 - DNA, 15 bp, Homo sapiens
attgacagatcaagg

SEQ ID NO: 395113 - DNA, 15 bp, Homo sapiens
gattgacagatcaag

SEQ ID NO: 395114 - DNA, 15 bp, Homo sapiens
agattgacagatcaa

SEQ ID NO: 395115 - DNA, 15 bp, Homo sapiens
tagattgacagatca

SEQ ID NO: 395116 - DNA, 15 bp, Homo sapiens
gtagattgacagatc

SEQ ID NO: 395117 - DNA, 15 bp, Homo sapiens
ggtagattgacagat

SEQ ID NO: 395118 - DNA, 15 bp, Homo sapiens
tggtagattgacaga

SEQ ID NO: 395119 - DNA, 15 bp, Homo sapiens
atggtagattgacag

SEQ ID NO: 395120 - DNA, 15 bp, Homo sapiens
tatggtagattgaca

SEQ ID NO: 395121 - DNA, 15 bp, Homo sapiens
ttatggtagattgac

SEQ ID NO: 395122 - DNA, 15 bp, Homo sapiens
cttatggtagattga

SEQ ID NO: 395123 - DNA, 15 bp, Homo sapiens
gcttatggtagattg

SEQ ID NO: 395124 - DNA, 15 bp, Homo sapiens
agcttatggtagatt

SEQ ID NO: 395125 - DNA, 15 bp, Homo sapiens
aagcttatggtagat

SEQ ID NO: 395126 - DNA, 15 bp, Homo sapiens
aaagcttatggtaga

SEQ ID NO: 395127 - DNA, 15 bp, Homo sapiens
caaagcttatggtag

SEQ ID NO: 395128 - DNA, 15 bp, Homo sapiens
tcaaagcttatggta

SEQ ID NO: 395129 - DNA, 15 bp, Homo sapiens
ctcaaagcttatggt

SEQ ID NO: 395130 - DNA, 15 bp, Homo sapiens
tctcaaagcttatgg

SEQ ID NO: 395131 - DNA, 15 bp, Homo sapiens
ttctcaaagcttatg

SEQ ID NO: 395132 - DNA, 15 bp, Homo sapiens
cttctcaaagcttat

SEQ ID NO: 395133 - DNA, 15 bp, Homo sapiens
tcttctcaaagctta

SEQ ID NO: 395134 - DNA, 15 bp, Homo sapiens
atcttctcaaagctt

SEQ ID NO: 395135 - DNA, 15 bp, Homo sapiens
tatcttctcaaagct

SEQ ID NO: 395136 - DNA, 15 bp, Homo sapiens
ttatcttctcaaagc

SEQ ID NO: 395137 - DNA, 15 bp, Homo sapiens
gttatcttctcaaag

SEQ ID NO: 395138 - DNA, 15 bp, Homo sapiens
tgttatcttctcaaa

SEQ ID NO: 395139 - DNA, 15 bp, Homo sapiens
ttgttatcttctcaa

SEQ ID NO: 395140 - DNA, 15 bp, Homo sapiens
attgttatcttctca

SEQ ID NO: 395141 - DNA, 15 bp, Homo sapiens
cattgttatcttctc

SEQ ID NO: 395142 - DNA, 15 bp, Homo sapiens
tcattgttatcttct

SEQ ID NO: 395143 - DNA, 15 bp, Homo sapiens
ttcattgttatcttc

SEQ ID NO: 395144 - DNA, 15 bp, Homo sapiens
gttcattgttatctt

SEQ ID NO: 395145 - DNA, 15 bp, Homo sapiens
agttcattgttatct

SEQ ID NO: 395146 - DNA, 15 bp, Homo sapiens
gagttcattgttatc

SEQ ID NO: 395147 - DNA, 15 bp, Homo sapiens
agagttcattgttat

SEQ ID NO: 395148 - DNA, 15 bp, Homo sapiens
aagagttcattgtta

SEQ ID NO: 395149 - DNA, 15 bp, Homo sapiens
gaagagttcattgtt

SEQ ID NO: 395150 - DNA, 15 bp, Homo sapiens
agaagagttcattgt

SEQ ID NO: 395151 - DNA, 15 bp, Homo sapiens
cagaagagttcattg

SEQ ID NO: 395152 - DNA, 15 bp, Homo sapiens
acagaagagttcatt

SEQ ID NO: 395153 - DNA, 15 bp, Homo sapiens
tacagaagagttcat

SEQ ID NO: 395154 - DNA, 15 bp, Homo sapiens
ttacagaagagttca

SEQ ID NO: 395155 - DNA, 15 bp, Homo sapiens
attacagaagagttc

SEQ ID NO: 395156 - DNA, 15 bp, Homo sapiens
aattacagaagagtt

SEQ ID NO: 395157 - DNA, 15 bp, Homo sapiens
taattacagaagagt

SEQ ID NO: 395158 - DNA, 15 bp, Homo sapiens
gtaattacagaagag

SEQ ID NO: 395159 - DNA, 15 bp, Homo sapiens
agtaattacagaaga

SEQ ID NO: 395160 - DNA, 15 bp, Homo sapiens
aagtaattacagaag

SEQ ID NO: 395161 - DNA, 15 bp, Homo sapiens
gaagtaattacagaa

SEQ ID NO: 395162 - DNA, 15 bp, Homo sapiens
agaagtaattacaga

SEQ ID NO: 395163 - DNA, 15 bp, Homo sapiens
tagaagtaattacag

SEQ ID NO: 395164 - DNA, 15 bp, Homo sapiens
ttagaagtaattaca

SEQ ID NO: 395165 - DNA, 15 bp, Homo sapiens
tttagaagtaattac

SEQ ID NO: 395166 - DNA, 15 bp, Homo sapiens
ctttagaagtaatta

SEQ ID NO: 395167 - DNA, 15 bp, Homo sapiens
tctttagaagtaatt

SEQ ID NO: 395168 - DNA, 15 bp, Homo sapiens
gtctttagaagtaat

SEQ ID NO: 395169 - DNA, 15 bp, Homo sapiens
tgtctttagaagtaa

SEQ ID NO: 395170 - DNA, 15 bp, Homo sapiens
ctgtctttagaagta

SEQ ID NO: 395171 - DNA, 15 bp, Homo sapiens
tctgtctttagaagt

SEQ ID NO: 395172 - DNA, 15 bp, Homo sapiens
atctgtctttagaag

SEQ ID NO: 395173 - DNA, 15 bp, Homo sapiens
tatctgtctttagaa

SEQ ID NO: 395174 - DNA, 15 bp, Homo sapiens
ttatctgtctttaga

SEQ ID NO: 395175 - DNA, 15 bp, Homo sapiens
attatctgtctttag

SEQ ID NO: 395176 - DNA, 15 bp, Homo sapiens
cattatctgtcttta

SEQ ID NO: 395177 - DNA, 15 bp, Homo sapiens
acattatctgtcttt

SEQ ID NO: 395178 - DNA, 15 bp, Homo sapiens
aacattatctgtctt

SEQ ID NO: 395179 - DNA, 15 bp, Homo sapiens
aaacattatctgtct

SEQ ID NO: 395180 - DNA, 15 bp, Homo sapiens
gaaacattatctgtc

SEQ ID NO: 395181 - DNA, 15 bp, Homo sapiens
agaaacattatctgt

SEQ ID NO: 395182 - DNA, 15 bp, Homo sapiens
gagaaacattatctg

SEQ ID NO: 395183 - DNA, 15 bp, Homo sapiens
tgagaaacattatct

SEQ ID NO: 395184 - DNA, 15 bp, Homo sapiens
atgagaaacattatc

SEQ ID NO: 395185 - DNA, 15 bp, Homo sapiens
aatgagaaacattat

SEQ ID NO: 395186 - DNA, 15 bp, Homo sapiens
aaatgagaaacatta

SEQ ID NO: 395187 - DNA, 15 bp, Homo sapiens
gaaatgagaaacatt

SEQ ID NO: 395188 - DNA, 15 bp, Homo sapiens
agaaatgagaaacat

SEQ ID NO: 395189 - DNA, 15 bp, Homo sapiens
cagaaatgagaaaca

SEQ ID NO: 395190 - DNA, 15 bp, Homo sapiens
tcagaaatgagaaac

SEQ ID NO: 395191 - DNA, 15 bp, Homo sapiens
atcagaaatgagaaa

SEQ ID NO: 395192 - DNA, 15 bp, Homo sapiens
tatcagaaatgagaa

SEQ ID NO: 395193 - DNA, 15 bp, Homo sapiens
atatcagaaatgaga

SEQ ID NO: 395194 - DNA, 15 bp, Homo sapiens
aatatcagaaatgag

SEQ ID NO: 395195 - DNA, 15 bp, Homo sapiens
gaatatcagaaatga

SEQ ID NO: 395196 - DNA, 15 bp, Homo sapiens
agaatatcagaaatg

SEQ ID NO: 395197 - DNA, 15 bp, Homo sapiens
aagaatatcagaaat

SEQ ID NO: 395198 - DNA, 15 bp, Homo sapiens
taagaatatcagaaa

SEQ ID NO: 395199 - DNA, 15 bp, Homo sapiens
ttaagaatatcagaa

SEQ ID NO: 395200 - DNA, 15 bp, Homo sapiens
attaagaatatcaga

SEQ ID NO: 395201 - DNA, 15 bp, Homo sapiens
aattaagaatatcag

SEQ ID NO: 395202 - DNA, 15 bp, Homo sapiens
gaattaagaatatca

SEQ ID NO: 395203 - DNA, 15 bp, Homo sapiens
ggaattaagaatatc

SEQ ID NO: 395204 - DNA, 15 bp, Homo sapiens
gggaattaagaatat

SEQ ID NO: 395205 - DNA, 15 bp, Homo sapiens
agggaattaagaata

SEQ ID NO: 395206 - DNA, 15 bp, Homo sapiens
aagggaattaagaat

SEQ ID NO: 395207 - DNA, 15 bp, Homo sapiens
caagggaattaagaa

SEQ ID NO: 395208 - DNA, 15 bp, Homo sapiens
tcaagggaattaaga

SEQ ID NO: 395209 - DNA, 15 bp, Homo sapiens
ttcaagggaattaag

SEQ ID NO: 395210 - DNA, 15 bp, Homo sapiens
tttcaagggaattaa

SEQ ID NO: 395211 - DNA, 15 bp, Homo sapiens
ttttcaagggaatta

SEQ ID NO: 395212 - DNA, 15 bp, Homo sapiens
cttttcaagggaatt

SEQ ID NO: 395213 - DNA, 15 bp, Homo sapiens
acttttcaagggaat

SEQ ID NO: 395214 - DNA, 15 bp, Homo sapiens
aacttttcaagggaa

SEQ ID NO: 395215 - DNA, 15 bp, Homo sapiens
gaacttttcaaggga

SEQ ID NO: 395216 - DNA, 15 bp, Homo sapiens
agaacttttcaaggg

SEQ ID NO: 395217 - DNA, 15 bp, Homo sapiens
aagaacttttcaagg

SEQ ID NO: 395218 - DNA, 15 bp, Homo sapiens
aaagaacttttcaag

SEQ ID NO: 395219 - DNA, 15 bp, Homo sapiens
gaaagaacttttcaa

SEQ ID NO: 395220 - DNA, 15 bp, Homo sapiens
agaaagaacttttca

SEQ ID NO: 395221 - DNA, 15 bp, Homo sapiens
tagaaagaacttttc

SEQ ID NO: 395222 - DNA, 15 bp, Homo sapiens
atagaaagaactttt

SEQ ID NO: 395223 - DNA, 15 bp, Homo sapiens
tatagaaagaacttt

SEQ ID NO: 395224 - DNA, 15 bp, Homo sapiens
atatagaaagaactt

SEQ ID NO: 395225 - DNA, 15 bp, Homo sapiens
catatagaaagaact

SEQ ID NO: 395226 - DNA, 15 bp, Homo sapiens
gcatatagaaagaac

SEQ ID NO: 395227 - DNA, 15 bp, Homo sapiens
agcatatagaaagaa

SEQ ID NO: 395228 - DNA, 15 bp, Homo sapiens
cagcatatagaaaga

SEQ ID NO: 395229 - DNA, 15 bp, Homo sapiens
gcagcatatagaaag

SEQ ID NO: 395230 - DNA, 15 bp, Homo sapiens
cgcagcatatagaaa

SEQ ID NO: 395231 - DNA, 15 bp, Homo sapiens
gcgcagcatatagaa

SEQ ID NO: 395232 - DNA, 15 bp, Homo sapiens
tgcgcagcatataga

SEQ ID NO: 395233 - DNA, 15 bp, Homo sapiens
ttgcgcagcatatag

SEQ ID NO: 395234 - DNA, 15 bp, Homo sapiens
tttgcgcagcatata

SEQ ID NO: 395235 - DNA, 15 bp, Homo sapiens
ttttgcgcagcatat

SEQ ID NO: 395236 - DNA, 15 bp, Homo sapiens
gttttgcgcagcata

SEQ ID NO: 395237 - DNA, 15 bp, Homo sapiens
ggttttgcgcagcat

SEQ ID NO: 395238 - DNA, 15 bp, Homo sapiens
tggttttgcgcagca

SEQ ID NO: 395239 - DNA, 15 bp, Homo sapiens
ttggttttgcgcagc

SEQ ID NO: 395240 - DNA, 15 bp, Homo sapiens
cttggttttgcgcag

SEQ ID NO: 395241 - DNA, 15 bp, Homo sapiens
tcttggttttgcgca

SEQ ID NO: 395242 - DNA, 15 bp, Homo sapiens
ttcttggttttgcgc

SEQ ID NO: 395243 - DNA, 15 bp, Homo sapiens
cttcttggttttgcg

SEQ ID NO: 395244 - DNA, 15 bp, Homo sapiens
tcttcttggttttgc

SEQ ID NO: 395245 - DNA, 15 bp, Homo sapiens
gtcttcttggttttg

SEQ ID NO: 395246 - DNA, 15 bp, Homo sapiens
agtcttcttggtttt

SEQ ID NO: 395247 - DNA, 15 bp, Homo sapiens
cagtcttcttggttt

SEQ ID NO: 395248 - DNA, 15 bp, Homo sapiens
tcagtcttcttggtt

SEQ ID NO: 395249 - DNA, 15 bp, Homo sapiens
atcagtcttcttggt

SEQ ID NO: 395250 - DNA, 15 bp, Homo sapiens
tatcagtcttcttgg

SEQ ID NO: 395251 - DNA, 15 bp, Homo sapiens
atatcagtcttcttg

SEQ ID NO: 395252 - DNA, 15 bp, Homo sapiens
catatcagtcttctt

SEQ ID NO: 395253 - DNA, 15 bp, Homo sapiens
gcatatcagtcttct

SEQ ID NO: 395254 - DNA, 15 bp, Homo sapiens
tgcatatcagtcttc

SEQ ID NO: 395255 - DNA, 15 bp, Homo sapiens
atgcatatcagtctt

SEQ ID NO: 395256 - DNA, 15 bp, Homo sapiens
catgcatatcagtct

SEQ ID NO: 395257 - DNA, 15 bp, Homo sapiens
tcatgcatatcagtc

SEQ ID NO: 395258 - DNA, 15 bp, Homo sapiens
atcatgcatatcagt

SEQ ID NO: 395259 - DNA, 15 bp, Homo sapiens
catcatgcatatcag

SEQ ID NO: 395260 - DNA, 15 bp, Homo sapiens
acatcatgcatatca

SEQ ID NO: 395261 - DNA, 15 bp, Homo sapiens
gacatcatgcatatc

SEQ ID NO: 395262 - DNA, 15 bp, Homo sapiens
agacatcatgcatat

SEQ ID NO: 395263 - DNA, 15 bp, Homo sapiens
aagacatcatgcata

SEQ ID NO: 395264 - DNA, 15 bp, Homo sapiens
aaagacatcatgcat

SEQ ID NO: 395265 - DNA, 15 bp, Homo sapiens
caaagacatcatgca

SEQ ID NO: 395266 - DNA, 15 bp, Homo sapiens
acaaagacatcatgc

SEQ ID NO: 395267 - DNA, 15 bp, Homo sapiens
cacaaagacatcatg

SEQ ID NO: 395268 - DNA, 15 bp, Homo sapiens
ccacaaagacatcat

SEQ ID NO: 395269 - DNA, 15 bp, Homo sapiens
accacaaagacatca

SEQ ID NO: 395270 - DNA, 15 bp, Homo sapiens
aaccacaaagacatc

SEQ ID NO: 395271 - DNA, 15 bp, Homo sapiens
taaccacaaagacat

SEQ ID NO: 395272 - DNA, 15 bp, Homo sapiens
ttaaccacaaagaca

SEQ ID NO: 395273 - DNA, 15 bp, Homo sapiens
attaaccacaaagac

SEQ ID NO: 395274 - DNA, 15 bp, Homo sapiens
aattaaccacaaaga

SEQ ID NO: 395275 - DNA, 15 bp, Homo sapiens
caattaaccacaaag

SEQ ID NO: 395276 - DNA, 15 bp, Homo sapiens
gcaattaaccacaaa

SEQ ID NO: 395277 - DNA, 15 bp, Homo sapiens
agcaattaaccacaa

SEQ ID NO: 395278 - DNA, 15 bp, Homo sapiens
tagcaattaaccaca

SEQ ID NO: 395279 - DNA, 15 bp, Homo sapiens
atagcaattaaccac

SEQ ID NO: 395280 - DNA, 15 bp, Homo sapiens
tatagcaattaacca

SEQ ID NO: 395281 - DNA, 15 bp, Homo sapiens
ttatagcaattaacc

SEQ ID NO: 395282 - DNA, 15 bp, Homo sapiens
tttatagcaattaac

SEQ ID NO: 395283 - DNA, 15 bp, Homo sapiens
ctttatagcaattaa

SEQ ID NO: 395284 - DNA, 15 bp, Homo sapiens
gctttatagcaatta

SEQ ID NO: 395285 - DNA, 15 bp, Homo sapiens
ggctttatagcaatt

SEQ ID NO: 395286 - DNA, 15 bp, Homo sapiens
tggctttatagcaat

SEQ ID NO: 395287 - DNA, 15 bp, Homo sapiens
ttggctttatagcaa

SEQ ID NO: 395288 - DNA, 15 bp, Homo sapiens
attggctttatagca

SEQ ID NO: 395289 - DNA, 15 bp, Homo sapiens
tattggctttatagc

SEQ ID NO: 395290 - DNA, 15 bp, Homo sapiens
atattggctttatag

SEQ ID NO: 395291 - DNA, 15 bp, Homo sapiens
aatattggctttata

SEQ ID NO: 395292 - DNA, 15 bp, Homo sapiens
aaatattggctttat

SEQ ID NO: 395293 - DNA, 15 bp, Homo sapiens
taaatattggcttta

SEQ ID NO: 395294 - DNA, 15 bp, Homo sapiens
ttaaatattggcttt

SEQ ID NO: 395295 - DNA, 15 bp, Homo sapiens
tttaaatattggctt

SEQ ID NO: 395296 - DNA, 15 bp, Homo sapiens
atttaaatattggct

SEQ ID NO: 395297 - DNA, 15 bp, Homo sapiens
aatttaaatattggc

SEQ ID NO: 395298 - DNA, 15 bp, Homo sapiens
aaatttaaatattgg

SEQ ID NO: 395299 - DNA, 15 bp, Homo sapiens
gaaatttaaatattg

SEQ ID NO: 395300 - DNA, 15 bp, Homo sapiens
agaaatttaaatatt

SEQ ID NO: 395301 - DNA, 15 bp, Homo sapiens
aagaaatttaaatat

SEQ ID NO: 395302 - DNA, 15 bp, Homo sapiens
aaagaaatttaaata

SEQ ID NO: 395303 - DNA, 15 bp, Homo sapiens
caaagaaatttaaat

SEQ ID NO: 395304 - DNA, 15 bp, Homo sapiens
tcaaagaaatttaaa

SEQ ID NO: 395305 - DNA, 15 bp, Homo sapiens
ctcaaagaaatttaa

SEQ ID NO: 395306 - DNA, 15 bp, Homo sapiens
actcaaagaaattta

SEQ ID NO: 395307 - DNA, 15 bp, Homo sapiens
gactcaaagaaattt

SEQ ID NO: 395308 - DNA, 15 bp, Homo sapiens
ggactcaaagaaatt

SEQ ID NO: 395309 - DNA, 15 bp, Homo sapiens
aggactcaaagaaat

SEQ ID NO: 395310 - DNA, 15 bp, Homo sapiens
gaggactcaaagaaa

SEQ ID NO: 395311 - DNA, 15 bp, Homo sapiens
agaggactcaaagaa

SEQ ID NO: 395312 - DNA, 15 bp, Homo sapiens
aagaggactcaaaga

SEQ ID NO: 395313 - DNA, 15 bp, Homo sapiens
aaagaggactcaaag

SEQ ID NO: 395314 - DNA, 15 bp, Homo sapiens
aaaagaggactcaaa

SEQ ID NO: 395315 - DNA, 15 bp, Homo sapiens
taaaagaggactcaa

SEQ ID NO: 395316 - DNA, 15 bp, Homo sapiens
gtaaaagaggactca

SEQ ID NO: 395317 - DNA, 15 bp, Homo sapiens
agtaaaagaggactc

SEQ ID NO: 395318 - DNA, 15 bp, Homo sapiens
cagtaaaagaggact

SEQ ID NO: 395319 - DNA, 15 bp, Homo sapiens
gcagtaaaagaggac

SEQ ID NO: 395320 - DNA, 15 bp, Homo sapiens
ggcagtaaaagagga

SEQ ID NO: 395321 - DNA, 15 bp, Homo sapiens
aggcagtaaaagagg

SEQ ID NO: 395322 - DNA, 15 bp, Homo sapiens
caggcagtaaaagag

SEQ ID NO: 395323 - DNA, 15 bp, Homo sapiens
ccaggcagtaaaaga

SEQ ID NO: 395324 - DNA, 15 bp, Homo sapiens
accaggcagtaaaag

SEQ ID NO: 395325 - DNA, 15 bp, Homo sapiens
taccaggcagtaaaa

SEQ ID NO: 395326 - DNA, 15 bp, Homo sapiens
ataccaggcagtaaa

SEQ ID NO: 395327 - DNA, 15 bp, Homo sapiens
gataccaggcagtaa

SEQ ID NO: 395328 - DNA, 15 bp, Homo sapiens
tgataccaggcagta

SEQ ID NO: 395329 - DNA, 15 bp, Homo sapiens
atgataccaggcagt

SEQ ID NO: 395330 - DNA, 15 bp, Homo sapiens
catgataccaggcag

SEQ ID NO: 395331 - DNA, 15 bp, Homo sapiens
ccatgataccaggca

SEQ ID NO: 395332 - DNA, 15 bp, Homo sapiens
cccatgataccaggc

SEQ ID NO: 395333 - DNA, 15 bp, Homo sapiens
tcccatgataccagg

SEQ ID NO: 395334 - DNA, 15 bp, Homo sapiens
atcccatgataccag

SEQ ID NO: 395335 - DNA, 15 bp, Homo sapiens
catcccatgatacca

SEQ ID NO: 395336 - DNA, 15 bp, Homo sapiens
tcatcccatgatacc

SEQ ID NO: 395337 - DNA, 15 bp, Homo sapiens
ttcatcccatgatac

SEQ ID NO: 395338 - DNA, 15 bp, Homo sapiens
cttcatcccatgata

SEQ ID NO: 395339 - DNA, 15 bp, Homo sapiens
tcttcatcccatgat

SEQ ID NO: 395340 - DNA, 15 bp, Homo sapiens
ctcttcatcccatga

SEQ ID NO: 395341 - DNA, 15 bp, Homo sapiens
gctcttcatcccatg

SEQ ID NO: 395342 - DNA, 15 bp, Homo sapiens
agctcttcatcccat

SEQ ID NO: 395343 - DNA, 15 bp, Homo sapiens
cagctcttcatccca

SEQ ID NO: 395344 - DNA, 15 bp, Homo sapiens
gcagctcttcatccc

SEQ ID NO: 395345 - DNA, 15 bp, Homo sapiens
cgcagctcttcatcc

SEQ ID NO: 395346 - DNA, 15 bp, Homo sapiens
gcgcagctcttcatc

SEQ ID NO: 395347 - DNA, 15 bp, Homo sapiens
tgcgcagctcttcat

SEQ ID NO: 395348 - DNA, 15 bp, Homo sapiens
ctgcgcagctcttca

SEQ ID NO: 395349 - DNA, 15 bp, Homo sapiens
cctgcgcagctcttc

SEQ ID NO: 395350 - DNA, 15 bp, Homo sapiens
tcctgcgcagctctt

SEQ ID NO: 395351 - DNA, 15 bp, Homo sapiens
ctcctgcgcagctct

SEQ ID NO: 395352 - DNA, 15 bp, Homo sapiens
cctcctgcgcagctc

SEQ ID NO: 395353 - DNA, 15 bp, Homo sapiens
ccctcctgcgcagct

SEQ ID NO: 395354 - DNA, 15 bp, Homo sapiens
cccctcctgcgcagc

SEQ ID NO: 395355 - DNA, 15 bp, Homo sapiens
tcccctcctgcgcag

SEQ ID NO: 395356 - DNA, 15 bp, Homo sapiens
ctcccctcctgcgca

SEQ ID NO: 395357 - DNA, 15 bp, Homo sapiens
actcccctcctgcgc

SEQ ID NO: 395358 - DNA, 15 bp, Homo sapiens
cactcccctcctgcg

SEQ ID NO: 395359 - DNA, 15 bp, Homo sapiens
acactcccctcctgc

SEQ ID NO: 395360 - DNA, 15 bp, Homo sapiens
tacactcccctcctg

SEQ ID NO: 395361 - DNA, 15 bp, Homo sapiens
atacactcccctcct

SEQ ID NO: 395362 - DNA, 15 bp, Homo sapiens
tatacactcccctcc

SEQ ID NO: 395363 - DNA, 15 bp, Homo sapiens
gtatacactcccctc

SEQ ID NO: 395364 - DNA, 15 bp, Homo sapiens
cgtatacactcccct

SEQ ID NO: 395365 - DNA, 15 bp, Homo sapiens
acgtatacactcccc

SEQ ID NO: 395366 - DNA, 15 bp, Homo sapiens
cacgtatacactccc

SEQ ID NO: 395367 - DNA, 15 bp, Homo sapiens
ccacgtatacactcc

SEQ ID NO: 395368 - DNA, 15 bp, Homo sapiens
gccacgtatacactc

SEQ ID NO: 395369 - DNA, 15 bp, Homo sapiens
agccacgtatacact

SEQ ID NO: 395370 - DNA, 15 bp, Homo sapiens
gagccacgtatacac

SEQ ID NO: 395371 - DNA, 15 bp, Homo sapiens
agagccacgtataca

SEQ ID NO: 395372 - DNA, 15 bp, Homo sapiens
gagagccacgtatac

SEQ ID NO: 395373 - DNA, 15 bp, Homo sapiens
cgagagccacgtata

SEQ ID NO: 395374 - DNA, 15 bp, Homo sapiens
ccgagagccacgtat

SEQ ID NO: 395375 - DNA, 15 bp, Homo sapiens
accgagagccacgta

SEQ ID NO: 395376 - DNA, 15 bp, Homo sapiens
gaccgagagccacgt

SEQ ID NO: 395377 - DNA, 15 bp, Homo sapiens
agaccgagagccacg

SEQ ID NO: 395378 - DNA, 15 bp, Homo sapiens
aagaccgagagccac

SEQ ID NO: 395379 - DNA, 15 bp, Homo sapiens
caagaccgagagcca

SEQ ID NO: 395380 - DNA, 15 bp, Homo sapiens
acaagaccgagagcc

SEQ ID NO: 395381 - DNA, 15 bp, Homo sapiens
cacaagaccgagagc

SEQ ID NO: 395382 - DNA, 15 bp, Homo sapiens
gcacaagaccgagag

SEQ ID NO: 395383 - DNA, 15 bp, Homo sapiens
tgcacaagaccgaga

SEQ ID NO: 395384 - DNA, 15 bp, Homo sapiens
atgcacaagaccgag

SEQ ID NO: 395385 - DNA, 15 bp, Homo sapiens
aatgcacaagaccga

SEQ ID NO: 395386 - DNA, 15 bp, Homo sapiens
aaatgcacaagaccg

SEQ ID NO: 395387 - DNA, 15 bp, Homo sapiens
aaaatgcacaagacc

SEQ ID NO: 395388 - DNA, 15 bp, Homo sapiens
caaaatgcacaagac

SEQ ID NO: 395389 - DNA, 15 bp, Homo sapiens
acaaaatgcacaaga

SEQ ID NO: 395390 - DNA, 15 bp, Homo sapiens
cacaaaatgcacaag

SEQ ID NO: 395391 - DNA, 15 bp, Homo sapiens
tcacaaaatgcacaa

SEQ ID NO: 395392 - DNA, 15 bp, Homo sapiens
gtcacaaaatgcaca

SEQ ID NO: 395393 - DNA, 15 bp, Homo sapiens
tgtcacaaaatgcac

SEQ ID NO: 395394 - DNA, 15 bp, Homo sapiens
ttgtcacaaaatgca

SEQ ID NO: 395395 - DNA, 15 bp, Homo sapiens
tttgtcacaaaatgc

SEQ ID NO: 395396 - DNA, 15 bp, Homo sapiens
ctttgtcacaaaatg

SEQ ID NO: 395397 - DNA, 15 bp, Homo sapiens
cctttgtcacaaaat

SEQ ID NO: 395398 - DNA, 15 bp, Homo sapiens
tcctttgtcacaaaa

SEQ ID NO: 395399 - DNA, 15 bp, Homo sapiens
ttcctttgtcacaaa

SEQ ID NO: 395400 - DNA, 15 bp, Homo sapiens
attcctttgtcacaa

SEQ ID NO: 395401 - DNA, 15 bp, Homo sapiens
aattcctttgtcaca

SEQ ID NO: 395402 - DNA, 15 bp, Homo sapiens
gaattcctttgtcac

SEQ ID NO: 395403 - DNA, 15 bp, Homo sapiens
ggaattcctttgtca

SEQ ID NO: 395404 - DNA, 15 bp, Homo sapiens
gggaattcctttgtc

SEQ ID NO: 395405 - DNA, 15 bp, Homo sapiens
ggggaattcctttgt

SEQ ID NO: 395406 - DNA, 15 bp, Homo sapiens
aggggaattcctttg

SEQ ID NO: 395407 - DNA, 15 bp, Homo sapiens
aaggggaattccttt

SEQ ID NO: 395408 - DNA, 15 bp, Homo sapiens
aaaggggaattcctt

SEQ ID NO: 395409 - DNA, 15 bp, Homo sapiens
gaaaggggaattcct

SEQ ID NO: 395410 - DNA, 15 bp, Homo sapiens
tgaaaggggaattcc

SEQ ID NO: 395411 - DNA, 15 bp, Homo sapiens
ttgaaaggggaattc

SEQ ID NO: 395412 - DNA, 15 bp, Homo sapiens
attgaaaggggaatt

SEQ ID NO: 395413 - DNA, 15 bp, Homo sapiens
gattgaaaggggaat

SEQ ID NO: 395414 - DNA, 15 bp, Homo sapiens
tgattgaaaggggaa

SEQ ID NO: 395415 - DNA, 15 bp, Homo sapiens
gtgattgaaagggga

SEQ ID NO: 395416 - DNA, 15 bp, Homo sapiens
cgtgattgaaagggg

SEQ ID NO: 395417 - DNA, 15 bp, Homo sapiens
gcgtgattgaaaggg

SEQ ID NO: 395418 - DNA, 15 bp, Homo sapiens
agcgtgattgaaagg

SEQ ID NO: 395419 - DNA, 15 bp, Homo sapiens
cagcgtgattgaaag

SEQ ID NO: 395420 - DNA, 15 bp, Homo sapiens
gcagcgtgattgaaa

SEQ ID NO: 395421 - DNA, 15 bp, Homo sapiens
agcagcgtgattgaa

SEQ ID NO: 395422 - DNA, 15 bp, Homo sapiens
gagcagcgtgattga

SEQ ID NO: 395423 - DNA, 15 bp, Homo sapiens
agagcagcgtgattg

SEQ ID NO: 395424 - DNA, 15 bp, Homo sapiens
gagagcagcgtgatt

SEQ ID NO: 395425 - DNA, 15 bp, Homo sapiens
ggagagcagcgtgat

SEQ ID NO: 395426 - DNA, 15 bp, Homo sapiens
aggagagcagcgtga

SEQ ID NO: 395427 - DNA, 15 bp, Homo sapiens
caggagagcagcgtg

SEQ ID NO: 395428 - DNA, 15 bp, Homo sapiens
ccaggagagcagcgt

SEQ ID NO: 395429 - DNA, 15 bp, Homo sapiens
tccaggagagcagcg

SEQ ID NO: 395430 - DNA, 15 bp, Homo sapiens
ctccaggagagcagc

SEQ ID NO: 395431 - DNA, 15 bp, Homo sapiens
gctccaggagagcag

SEQ ID NO: 395432 - DNA, 15 bp, Homo sapiens
ggctccaggagagca

SEQ ID NO: 395433 - DNA, 15 bp, Homo sapiens
gggctccaggagagc

SEQ ID NO: 395434 - DNA, 15 bp, Homo sapiens
ggggctccaggagag

SEQ ID NO: 395435 - DNA, 15 bp, Homo sapiens
aggggctccaggaga

SEQ ID NO: 395436 - DNA, 15 bp, Homo sapiens
caggggctccaggag

SEQ ID NO: 395437 - DNA, 15 bp, Homo sapiens
ccaggggctccagga

SEQ ID NO: 395438 - DNA, 15 bp, Homo sapiens
tccaggggctccagg

SEQ ID NO: 395439 - DNA, 15 bp, Homo sapiens
ctccaggggctccag

SEQ ID NO: 395440 - DNA, 15 bp, Homo sapiens
gctccaggggctcca

SEQ ID NO: 395441 - DNA, 15 bp, Homo sapiens
ggctccaggggctcc

SEQ ID NO: 395442 - DNA, 15 bp, Homo sapiens
aggctccaggggctc

SEQ ID NO: 395443 - DNA, 15 bp, Homo sapiens
gaggctccaggggct

SEQ ID NO: 395444 - DNA, 15 bp, Homo sapiens
agaggctccaggggc

SEQ ID NO: 395445 - DNA, 15 bp, Homo sapiens
cagaggctccagggg

SEQ ID NO: 395446 - DNA, 15 bp, Homo sapiens
ccagaggctccaggg

SEQ ID NO: 395447 - DNA, 15 bp, Homo sapiens
gccagaggctccagg

SEQ ID NO: 395448 - DNA, 15 bp, Homo sapiens
agccagaggctccag

SEQ ID NO: 395449 - DNA, 15 bp, Homo sapiens
gagccagaggctcca

SEQ ID NO: 395450 - DNA, 15 bp, Homo sapiens
tgagccagaggctcc

SEQ ID NO: 395451 - DNA, 15 bp, Homo sapiens
ttgagccagaggctc

SEQ ID NO: 395452 - DNA, 15 bp, Homo sapiens
cttgagccagaggct

SEQ ID NO: 395453 - DNA, 15 bp, Homo sapiens
gcttgagccagaggc

SEQ ID NO: 395454 - DNA, 15 bp, Homo sapiens
tgcttgagccagagg

SEQ ID NO: 395455 - DNA, 15 bp, Homo sapiens
ctgcttgagccagag

SEQ ID NO: 395456 - DNA, 15 bp, Homo sapiens
gctgcttgagccaga

SEQ ID NO: 395457 - DNA, 15 bp, Homo sapiens
cgctgcttgagccag

SEQ ID NO: 395458 - DNA, 15 bp, Homo sapiens
gcgctgcttgagcca

SEQ ID NO: 395459 - DNA, 15 bp, Homo sapiens
tgcgctgcttgagcc

SEQ ID NO: 395460 - DNA, 15 bp, Homo sapiens
ctgcgctgcttgagc

SEQ ID NO: 395461 - DNA, 15 bp, Homo sapiens
actgcgctgcttgag

SEQ ID NO: 395462 - DNA, 15 bp, Homo sapiens
gactgcgctgcttga

SEQ ID NO: 395463 - DNA, 15 bp, Homo sapiens
cgactgcgctgcttg

SEQ ID NO: 395464 - DNA, 15 bp, Homo sapiens
ccgactgcgctgctt

SEQ ID NO: 395465 - DNA, 15 bp, Homo sapiens
accgactgcgctgct

SEQ ID NO: 395466 - DNA, 15 bp, Homo sapiens
gaccgactgcgctgc

SEQ ID NO: 395467 - DNA, 15 bp, Homo sapiens
agaccgactgcgctg

SEQ ID NO: 395468 - DNA, 15 bp, Homo sapiens
cagaccgactgcgct

SEQ ID NO: 395469 - DNA, 15 bp, Homo sapiens
acagaccgactgcgc

SEQ ID NO: 395470 - DNA, 15 bp, Homo sapiens
cacagaccgactgcg

SEQ ID NO: 395471 - DNA, 15 bp, Homo sapiens
gcacagaccgactgc

SEQ ID NO: 395472 - DNA, 15 bp, Homo sapiens
tgcacagaccgactg

SEQ ID NO: 395473 - DNA, 15 bp, Homo sapiens
ctgcacagaccgact

SEQ ID NO: 395474 - DNA, 15 bp, Homo sapiens
actgcacagaccgac

SEQ ID NO: 395475 - DNA, 15 bp, Homo sapiens
cactgcacagaccga

SEQ ID NO: 395476 - DNA, 15 bp, Homo sapiens
acactgcacagaccg

SEQ ID NO: 395477 - DNA, 15 bp, Homo sapiens
gacactgcacagacc

SEQ ID NO: 395478 - DNA, 15 bp, Homo sapiens
ggacactgcacagac

SEQ ID NO: 395479 - DNA, 15 bp, Homo sapiens
gggacactgcacaga

SEQ ID NO: 395480 - DNA, 15 bp, Homo sapiens
agggacactgcacag

SEQ ID NO: 395481 - DNA, 15 bp, Homo sapiens
cagggacactgcaca

SEQ ID NO: 395482 - DNA, 15 bp, Homo sapiens
tcagggacactgcac

SEQ ID NO: 395483 - DNA, 15 bp, Homo sapiens
gtcagggacactgca

SEQ ID NO: 395484 - DNA, 15 bp, Homo sapiens
cgtcagggacactgc

SEQ ID NO: 395485 - DNA, 15 bp, Homo sapiens
acgtcagggacactg

SEQ ID NO: 395486 - DNA, 15 bp, Homo sapiens
gacgtcagggacact

SEQ ID NO: 395487 - DNA, 15 bp, Homo sapiens
tgacgtcagggacac

SEQ ID NO: 395488 - DNA, 15 bp, Homo sapiens
atgacgtcagggaca

SEQ ID NO: 395489 - DNA, 15 bp, Homo sapiens
gatgacgtcagggac

SEQ ID NO: 395490 - DNA, 15 bp, Homo sapiens
ggatgacgtcaggga

SEQ ID NO: 395491 - DNA, 15 bp, Homo sapiens
tggatgacgtcaggg

SEQ ID NO: 395492 - DNA, 15 bp, Homo sapiens
ctggatgacgtcagg

SEQ ID NO: 395493 - DNA, 15 bp, Homo sapiens
gctggatgacgtcag

SEQ ID NO: 395494 - DNA, 15 bp, Homo sapiens
cgctggatgacgtca

SEQ ID NO: 395495 - DNA, 15 bp, Homo sapiens
acgctggatgacgtc

SEQ ID NO: 395496 - DNA, 15 bp, Homo sapiens
tacgctggatgacgt

SEQ ID NO: 395497 - DNA, 15 bp, Homo sapiens
atacgctggatgacg

SEQ ID NO: 395498 - DNA, 15 bp, Homo sapiens
catacgctggatgac

SEQ ID NO: 395499 - DNA, 15 bp, Homo sapiens
gcatacgctggatga

SEQ ID NO: 395500 - DNA, 15 bp, Homo sapiens
tgcatacgctggatg

SEQ ID NO: 395501 - DNA, 15 bp, Homo sapiens
atgcatacgctggat

SEQ ID NO: 395502 - DNA, 15 bp, Homo sapiens
tatgcatacgctgga

SEQ ID NO: 395503 - DNA, 15 bp, Homo sapiens
ttatgcatacgctgg

SEQ ID NO: 395504 - DNA, 15 bp, Homo sapiens
cttatgcatacgctg

SEQ ID NO: 395505 - DNA, 15 bp, Homo sapiens
gcttatgcatacgct

SEQ ID NO: 395506 - DNA, 15 bp, Homo sapiens
ggcttatgcatacgc

SEQ ID NO: 395507 - DNA, 15 bp, Homo sapiens
gggcttatgcatacg

SEQ ID NO: 395508 - DNA, 15 bp, Homo sapiens
agggcttatgcatac

SEQ ID NO: 395509 - DNA, 15 bp, Homo sapiens
cagggcttatgcata

SEQ ID NO: 395510 - DNA, 15 bp, Homo sapiens
gcagggcttatgcat

SEQ ID NO: 395511 - DNA, 15 bp, Homo sapiens
agcagggcttatgca

SEQ ID NO: 395512 - DNA, 15 bp, Homo sapiens
tagcagggcttatgc

SEQ ID NO: 395513 - DNA, 15 bp, Homo sapiens
atagcagggcttatg

SEQ ID NO: 395514 - DNA, 15 bp, Homo sapiens
aatagcagggcttat

SEQ ID NO: 395515 - DNA, 15 bp, Homo sapiens
caatagcagggctta

SEQ ID NO: 395516 - DNA, 15 bp, Homo sapiens
acaatagcagggctt

SEQ ID NO: 395517 - DNA, 15 bp, Homo sapiens
gacaatagcagggct

SEQ ID NO: 395518 - DNA, 15 bp, Homo sapiens
agacaatagcagggc

SEQ ID NO: 395519 - DNA, 15 bp, Homo sapiens
aagacaatagcaggg

SEQ ID NO: 395520 - DNA, 15 bp, Homo sapiens
taagacaatagcagg

SEQ ID NO: 395521 - DNA, 15 bp, Homo sapiens
gtaagacaatagcag

SEQ ID NO: 395522 - DNA, 15 bp, Homo sapiens
agtaagacaatagca

SEQ ID NO: 395523 - DNA, 15 bp, Homo sapiens
cagtaagacaatagc

SEQ ID NO: 395524 - DNA, 15 bp, Homo sapiens
gcagtaagacaatag

SEQ ID NO: 395525 - DNA, 15 bp, Homo sapiens
agcagtaagacaata

SEQ ID NO: 395526 - DNA, 15 bp, Homo sapiens
tagcagtaagacaat

SEQ ID NO: 395527 - DNA, 15 bp, Homo sapiens
gtagcagtaagacaa

SEQ ID NO: 395528 - DNA, 15 bp, Homo sapiens
tgtagcagtaagaca

SEQ ID NO: 395529 - DNA, 15 bp, Homo sapiens
ctgtagcagtaagac

SEQ ID NO: 395530 - DNA, 15 bp, Homo sapiens
gctgtagcagtaaga

SEQ ID NO: 395531 - DNA, 15 bp, Homo sapiens
tgctgtagcagtaag

SEQ ID NO: 395532 - DNA, 15 bp, Homo sapiens
ctgctgtagcagtaa

SEQ ID NO: 395533 - DNA, 15 bp, Homo sapiens
cctgctgtagcagta

SEQ ID NO: 395534 - DNA, 15 bp, Homo sapiens
ccctgctgtagcagt

SEQ ID NO: 395535 - DNA, 15 bp, Homo sapiens
gccctgctgtagcag

SEQ ID NO: 395536 - DNA, 15 bp, Homo sapiens
agccctgctgtagca

SEQ ID NO: 395537 - DNA, 15 bp, Homo sapiens
cagccctgctgtagc

SEQ ID NO: 395538 - DNA, 15 bp, Homo sapiens
ccagccctgctgtag

SEQ ID NO: 395539 - DNA, 15 bp, Homo sapiens
cccagccctgctgta

SEQ ID NO: 395540 - DNA, 15 bp, Homo sapiens
ccccagccctgctgt

SEQ ID NO: 395541 - DNA, 15 bp, Homo sapiens
tccccagccctgctg

SEQ ID NO: 395542 - DNA, 15 bp, Homo sapiens
atccccagccctgct

SEQ ID NO: 395543 - DNA, 15 bp, Homo sapiens
aatccccagccctgc

SEQ ID NO: 395544 - DNA, 15 bp, Homo sapiens
caatccccagccctg

SEQ ID NO: 395545 - DNA, 15 bp, Homo sapiens
gcaatccccagccct

SEQ ID NO: 395546 - DNA, 15 bp, Homo sapiens
tgcaatccccagccc

SEQ ID NO: 395547 - DNA, 15 bp, Homo sapiens
ctgcaatccccagcc

SEQ ID NO: 395548 - DNA, 15 bp, Homo sapiens
actgcaatccccagc

SEQ ID NO: 395549 - DNA, 15 bp, Homo sapiens
tactgcaatccccag

SEQ ID NO: 395550 - DNA, 15 bp, Homo sapiens
atactgcaatcccca

SEQ ID NO: 395551 - DNA, 15 bp, Homo sapiens
gatactgcaatcccc

SEQ ID NO: 395552 - DNA, 15 bp, Homo sapiens
ggatactgcaatccc

SEQ ID NO: 395553 - DNA, 15 bp, Homo sapiens
cggatactgcaatcc

SEQ ID NO: 395554 - DNA, 15 bp, Homo sapiens
gcggatactgcaatc

SEQ ID NO: 395555 - DNA, 15 bp, Homo sapiens
agcggatactgcaat

SEQ ID NO: 395556 - DNA, 15 bp, Homo sapiens
cagcggatactgcaa

SEQ ID NO: 395557 - DNA, 15 bp, Homo sapiens
acagcggatactgca

SEQ ID NO: 395558 - DNA, 15 bp, Homo sapiens
aacagcggatactgc

SEQ ID NO: 395559 - DNA, 15 bp, Homo sapiens
caacagcggatactg

SEQ ID NO: 395560 - DNA, 15 bp, Homo sapiens
gcaacagcggatact

SEQ ID NO: 395561 - DNA, 15 bp, Homo sapiens
agcaacagcggatac

SEQ ID NO: 395562 - DNA, 15 bp, Homo sapiens
cagcaacagcggata

SEQ ID NO: 395563 - DNA, 15 bp, Homo sapiens
gcagcaacagcggat

SEQ ID NO: 395564 - DNA, 15 bp, Homo sapiens
agcagcaacagcgga

SEQ ID NO: 395565 - DNA, 15 bp, Homo sapiens
cagcagcaacagcgg

SEQ ID NO: 395566 - DNA, 15 bp, Homo sapiens
gcagcagcaacagcg

SEQ ID NO: 395567 - DNA, 15 bp, Homo sapiens
agcagcagcaacagc

SEQ ID NO: 395568 - DNA, 15 bp, Homo sapiens
gagcagcagcaacag

SEQ ID NO: 395569 - DNA, 15 bp, Homo sapiens
ggagcagcagcaaca

SEQ ID NO: 395570 - DNA, 15 bp, Homo sapiens
gggagcagcagcaac

SEQ ID NO: 395571 - DNA, 15 bp, Homo sapiens
tgggagcagcagcaa

SEQ ID NO: 395572 - DNA, 15 bp, Homo sapiens
ctgggagcagcagca

SEQ ID NO: 395573 - DNA, 15 bp, Homo sapiens
actgggagcagcagc

SEQ ID NO: 395574 - DNA, 15 bp, Homo sapiens
gactgggagcagcag

SEQ ID NO: 395575 - DNA, 15 bp, Homo sapiens
ggactgggagcagca

SEQ ID NO: 395576 - DNA, 15 bp, Homo sapiens
aggactgggagcagc

SEQ ID NO: 395577 - DNA, 15 bp, Homo sapiens
caggactgggagcag

SEQ ID NO: 395578 - DNA, 15 bp, Homo sapiens
gcaggactgggagca

SEQ ID NO: 395579 - DNA, 15 bp, Homo sapiens
ggcaggactgggagc

SEQ ID NO: 395580 - DNA, 15 bp, Homo sapiens
gggcaggactgggag

SEQ ID NO: 395581 - DNA, 15 bp, Homo sapiens
ggggcaggactggga

SEQ ID NO: 395582 - DNA, 15 bp, Homo sapiens
aggggcaggactggg

SEQ ID NO: 395583 - DNA, 15 bp, Homo sapiens
caggggcaggactgg

SEQ ID NO: 395584 - DNA, 15 bp, Homo sapiens
gcaggggcaggactg

SEQ ID NO: 395585 - DNA, 15 bp, Homo sapiens
agcaggggcaggact

SEQ ID NO: 395586 - DNA, 15 bp, Homo sapiens
cagcaggggcaggac

SEQ ID NO: 395587 - DNA, 15 bp, Homo sapiens
gcagcaggggcagga

SEQ ID NO: 395588 - DNA, 15 bp, Homo sapiens
agcagcaggggcagg

SEQ ID NO: 395589 - DNA, 15 bp, Homo sapiens
tagcagcaggggcag

SEQ ID NO: 395590 - DNA, 15 bp, Homo sapiens
gtagcagcaggggca

SEQ ID NO: 395591 - DNA, 15 bp, Homo sapiens
ggtagcagcaggggc

SEQ ID NO: 395592 - DNA, 15 bp, Homo sapiens
aggtagcagcagggg

SEQ ID NO: 395593 - DNA, 15 bp, Homo sapiens
taggtagcagcaggg

SEQ ID NO: 395594 - DNA, 15 bp, Homo sapiens
ctaggtagcagcagg

SEQ ID NO: 395595 - DNA, 15 bp, Homo sapiens
actaggtagcagcag

SEQ ID NO: 395596 - DNA, 15 bp, Homo sapiens
gactaggtagcagca

SEQ ID NO: 395597 - DNA, 15 bp, Homo sapiens
ggactaggtagcagc

SEQ ID NO: 395598 - DNA, 15 bp, Homo sapiens
tggactaggtagcag

SEQ ID NO: 395599 - DNA, 15 bp, Homo sapiens
ctggactaggtagca

SEQ ID NO: 395600 - DNA, 15 bp, Homo sapiens
gctggactaggtagc

SEQ ID NO: 395601 - DNA, 15 bp, Homo sapiens
ggctggactaggtag

SEQ ID NO: 395602 - DNA, 15 bp, Homo sapiens
aggctggactaggta

SEQ ID NO: 395603 - DNA, 15 bp, Homo sapiens
gaggctggactaggt

SEQ ID NO: 395604 - DNA, 15 bp, Homo sapiens
tgaggctggactagg

SEQ ID NO: 395605 - DNA, 15 bp, Homo sapiens
gtgaggctggactag

SEQ ID NO: 395606 - DNA, 15 bp, Homo sapiens
ggtgaggctggacta

SEQ ID NO: 395607 - DNA, 15 bp, Homo sapiens
cggtgaggctggact

SEQ ID NO: 395608 - DNA, 15 bp, Homo sapiens
gcggtgaggctggac

SEQ ID NO: 395609 - DNA, 15 bp, Homo sapiens
tgcggtgaggctgga

SEQ ID NO: 395610 - DNA, 15 bp, Homo sapiens
atgcggtgaggctgg

SEQ ID NO: 395611 - DNA, 15 bp, Homo sapiens
gatgcggtgaggctg

SEQ ID NO: 395612 - DNA, 15 bp, Homo sapiens
ggatgcggtgaggct

SEQ ID NO: 395613 - DNA, 15 bp, Homo sapiens
gggatgcggtgaggc

SEQ ID NO: 395614 - DNA, 15 bp, Homo sapiens
tgggatgcggtgagg

SEQ ID NO: 395615 - DNA, 15 bp, Homo sapiens
ctgggatgcggtgag

SEQ ID NO: 395616 - DNA, 15 bp, Homo sapiens
tctgggatgcggtga

SEQ ID NO: 395617 - DNA, 15 bp, Homo sapiens
ttctgggatgcggtg

SEQ ID NO: 395618 - DNA, 15 bp, Homo sapiens
cttctgggatgcggt

SEQ ID NO: 395619 - DNA, 15 bp, Homo sapiens
tcttctgggatgcgg

SEQ ID NO: 395620 - DNA, 15 bp, Homo sapiens
ctcttctgggatgcg

SEQ ID NO: 395621 - DNA, 15 bp, Homo sapiens
cctcttctgggatgc

SEQ ID NO: 395622 - DNA, 15 bp, Homo sapiens
gcctcttctgggatg

SEQ ID NO: 395623 - DNA, 15 bp, Homo sapiens
tgcctcttctgggat

SEQ ID NO: 395624 - DNA, 15 bp, Homo sapiens
gtgcctcttctggga

SEQ ID NO: 395625 - DNA, 15 bp, Homo sapiens
cgtgcctcttctggg

SEQ ID NO: 395626 - DNA, 15 bp, Homo sapiens
acgtgcctcttctgg

SEQ ID NO: 395627 - DNA, 15 bp, Homo sapiens
gacgtgcctcttctg

SEQ ID NO: 395628 - DNA, 15 bp, Homo sapiens
cgacgtgcctcttct

SEQ ID NO: 395629 - DNA, 15 bp, Homo sapiens
ccgacgtgcctcttc

SEQ ID NO: 395630 - DNA, 15 bp, Homo sapiens
gccgacgtgcctctt

SEQ ID NO: 395631 - DNA, 15 bp, Homo sapiens
ggccgacgtgcctct

SEQ ID NO: 395632 - DNA, 15 bp, Homo sapiens
aggccgacgtgcctc

SEQ ID NO: 395633 - DNA, 15 bp, Homo sapiens
aaggccgacgtgcct

SEQ ID NO: 395634 - DNA, 15 bp, Homo sapiens
gaaggccgacgtgcc

SEQ ID NO: 395635 - DNA, 15 bp, Homo sapiens
tgaaggccgacgtgc

SEQ ID NO: 395636 - DNA, 15 bp, Homo sapiens
atgaaggccgacgtg

SEQ ID NO: 395637 - DNA, 15 bp, Homo sapiens
aatgaaggccgacgt

SEQ ID NO: 395638 - DNA, 15 bp, Homo sapiens
aaatgaaggccgacg

SEQ ID NO: 395639 - DNA, 15 bp, Homo sapiens
caaatgaaggccgac

SEQ ID NO: 395640 - DNA, 15 bp, Homo sapiens
gcaaatgaaggccga

SEQ ID NO: 395641 - DNA, 15 bp, Homo sapiens
ggcaaatgaaggccg

SEQ ID NO: 395642 - DNA, 15 bp, Homo sapiens
aggcaaatgaaggcc

SEQ ID NO: 395643 - DNA, 15 bp, Homo sapiens
taggcaaatgaaggc

SEQ ID NO: 395644 - DNA, 15 bp, Homo sapiens
ctaggcaaatgaagg

SEQ ID NO: 395645 - DNA, 15 bp, Homo sapiens
actaggcaaatgaag

SEQ ID NO: 395646 - DNA, 15 bp, Homo sapiens
cactaggcaaatgaa

SEQ ID NO: 395647 - DNA, 15 bp, Homo sapiens
ccactaggcaaatga

SEQ ID NO: 395648 - DNA, 15 bp, Homo sapiens
tccactaggcaaatg

SEQ ID NO: 395649 - DNA, 15 bp, Homo sapiens
atccactaggcaaat

SEQ ID NO: 395650 - DNA, 15 bp, Homo sapiens
aatccactaggcaaa

SEQ ID NO: 395651 - DNA, 15 bp, Homo sapiens
aaatccactaggcaa

SEQ ID NO: 395652 - DNA, 15 bp, Homo sapiens
aaaatccactaggca

SEQ ID NO: 395653 - DNA, 15 bp, Homo sapiens
gaaaatccactaggc

SEQ ID NO: 395654 - DNA, 15 bp, Homo sapiens
tgaaaatccactagg

SEQ ID NO: 395655 - DNA, 15 bp, Homo sapiens
ttgaaaatccactag

SEQ ID NO: 395656 - DNA, 15 bp, Homo sapiens
tttgaaaatccacta

SEQ ID NO: 395657 - DNA, 15 bp, Homo sapiens
ttttgaaaatccact

SEQ ID NO: 395658 - DNA, 15 bp, Homo sapiens
cttttgaaaatccac

SEQ ID NO: 395659 - DNA, 15 bp, Homo sapiens
gcttttgaaaatcca

SEQ ID NO: 395660 - DNA, 15 bp, Homo sapiens
tgcttttgaaaatcc

SEQ ID NO: 395661 - DNA, 15 bp, Homo sapiens
ctgcttttgaaaatc

SEQ ID NO: 395662 - DNA, 15 bp, Homo sapiens
gctgcttttgaaaat

SEQ ID NO: 395663 - DNA, 15 bp, Homo sapiens
agctgcttttgaaaa

SEQ ID NO: 395664 - DNA, 15 bp, Homo sapiens
gagctgcttttgaaa

SEQ ID NO: 395665 - DNA, 15 bp, Homo sapiens
agagctgcttttgaa

SEQ ID NO: 395666 - DNA, 15 bp, Homo sapiens
aagagctgcttttga

SEQ ID NO: 395667 - DNA, 15 bp, Homo sapiens
gaagagctgcttttg

SEQ ID NO: 395668 - DNA, 15 bp, Homo sapiens
cgaagagctgctttt

SEQ ID NO: 395669 - DNA, 15 bp, Homo sapiens
ccgaagagctgcttt

SEQ ID NO: 395670 - DNA, 15 bp, Homo sapiens
accgaagagctgctt

SEQ ID NO: 395671 - DNA, 15 bp, Homo sapiens
aaccgaagagctgct

SEQ ID NO: 395672 - DNA, 15 bp, Homo sapiens
aaaccgaagagctgc

SEQ ID NO: 395673 - DNA, 15 bp, Homo sapiens
aaaaccgaagagctg

SEQ ID NO: 395674 - DNA, 15 bp, Homo sapiens
aaaaaccgaagagct

SEQ ID NO: 395675 - DNA, 15 bp, Homo sapiens
caaaaaccgaagagc

SEQ ID NO: 395676 - DNA, 15 bp, Homo sapiens
ccaaaaaccgaagag

SEQ ID NO: 395677 - DNA, 15 bp, Homo sapiens
accaaaaaccgaaga

SEQ ID NO: 395678 - DNA, 15 bp, Homo sapiens
caccaaaaaccgaag

SEQ ID NO: 395679 - DNA, 15 bp, Homo sapiens
gcaccaaaaaccgaa

SEQ ID NO: 395680 - DNA, 15 bp, Homo sapiens
agcaccaaaaaccga

SEQ ID NO: 395681 - DNA, 15 bp, Homo sapiens
cagcaccaaaaaccg

SEQ ID NO: 395682 - DNA, 15 bp, Homo sapiens
acagcaccaaaaacc

SEQ ID NO: 395683 - DNA, 15 bp, Homo sapiens
aacagcaccaaaaac

SEQ ID NO: 395684 - DNA, 15 bp, Homo sapiens
taacagcaccaaaaa

SEQ ID NO: 395685 - DNA, 15 bp, Homo sapiens
ttaacagcaccaaaa

SEQ ID NO: 395686 - DNA, 15 bp, Homo sapiens
cttaacagcaccaaa

SEQ ID NO: 395687 - DNA, 15 bp, Homo sapiens
tcttaacagcaccaa

SEQ ID NO: 395688 - DNA, 15 bp, Homo sapiens
ctcttaacagcacca

SEQ ID NO: 395689 - DNA, 15 bp, Homo sapiens
tctcttaacagcacc

SEQ ID NO: 395690 - DNA, 15 bp, Homo sapiens
gtctcttaacagcac

SEQ ID NO: 395691 - DNA, 15 bp, Homo sapiens
ggtctcttaacagca

SEQ ID NO: 395692 - DNA, 15 bp, Homo sapiens
aggtctcttaacagc

SEQ ID NO: 395693 - DNA, 15 bp, Homo sapiens
aaggtctcttaacag

SEQ ID NO: 395694 - DNA, 15 bp, Homo sapiens
caaggtctcttaaca

SEQ ID NO: 395695 - DNA, 15 bp, Homo sapiens
gcaaggtctcttaac

SEQ ID NO: 395696 - DNA, 15 bp, Homo sapiens
tgcaaggtctcttaa

SEQ ID NO: 395697 - DNA, 15 bp, Homo sapiens
atgcaaggtctctta

SEQ ID NO: 395698 - DNA, 15 bp, Homo sapiens
aatgcaaggtctctt

SEQ ID NO: 395699 - DNA, 15 bp, Homo sapiens
aaatgcaaggtctct

SEQ ID NO: 395700 - DNA, 15 bp, Homo sapiens
gaaatgcaaggtctc

SEQ ID NO: 395701 - DNA, 15 bp, Homo sapiens
tgaaatgcaaggtct

SEQ ID NO: 395702 - DNA, 15 bp, Homo sapiens
ttgaaatgcaaggtc

SEQ ID NO: 395703 - DNA, 15 bp, Homo sapiens
attgaaatgcaaggt

SEQ ID NO: 395704 - DNA, 15 bp, Homo sapiens
gattgaaatgcaagg

SEQ ID NO: 395705 - DNA, 15 bp, Homo sapiens
tgattgaaatgcaag

SEQ ID NO: 395706 - DNA, 15 bp, Homo sapiens
gtgattgaaatgcaa

SEQ ID NO: 395707 - DNA, 15 bp, Homo sapiens
tgtgattgaaatgca

SEQ ID NO: 395708 - DNA, 15 bp, Homo sapiens
gtgtgattgaaatgc

SEQ ID NO: 395709 - DNA, 15 bp, Homo sapiens
ggtgtgattgaaatg

SEQ ID NO: 395710 - DNA, 15 bp, Homo sapiens
cggtgtgattgaaat

SEQ ID NO: 395711 - DNA, 15 bp, Homo sapiens
ccggtgtgattgaaa

SEQ ID NO: 395712 - DNA, 15 bp, Homo sapiens
cccggtgtgattgaa

SEQ ID NO: 395713 - DNA, 15 bp, Homo sapiens
tcccggtgtgattga

SEQ ID NO: 395714 - DNA, 15 bp, Homo sapiens
ctcccggtgtgattg

SEQ ID NO: 395715 - DNA, 15 bp, Homo sapiens
tctcccggtgtgatt

SEQ ID NO: 395716 - DNA, 15 bp, Homo sapiens
ttctcccggtgtgat

SEQ ID NO: 395717 - DNA, 15 bp, Homo sapiens
tttctcccggtgtga

SEQ ID NO: 395718 - DNA, 15 bp, Homo sapiens
ttttctcccggtgtg

SEQ ID NO: 395719 - DNA, 15 bp, Homo sapiens
gttttctcccggtgt

SEQ ID NO: 395720 - DNA, 15 bp, Homo sapiens
agttttctcccggtg

SEQ ID NO: 395721 - DNA, 15 bp, Homo sapiens
cagttttctcccggt

SEQ ID NO: 395722 - DNA, 15 bp, Homo sapiens
tcagttttctcccgg

SEQ ID NO: 395723 - DNA, 15 bp, Homo sapiens
ttcagttttctcccg

SEQ ID NO: 395724 - DNA, 15 bp, Homo sapiens
cttcagttttctccc

SEQ ID NO: 395725 - DNA, 15 bp, Homo sapiens
gcttcagttttctcc

SEQ ID NO: 395726 - DNA, 15 bp, Homo sapiens
agcttcagttttctc

SEQ ID NO: 395727 - DNA, 15 bp, Homo sapiens
gagcttcagttttct

SEQ ID NO: 395728 - DNA, 15 bp, Homo sapiens
cgagcttcagttttc

SEQ ID NO: 395729 - DNA, 15 bp, Homo sapiens
acgagcttcagtttt

SEQ ID NO: 395730 - DNA, 15 bp, Homo sapiens
tacgagcttcagttt

SEQ ID NO: 395731 - DNA, 15 bp, Homo sapiens
ttacgagcttcagtt

SEQ ID NO: 395732 - DNA, 15 bp, Homo sapiens
gttacgagcttcagt

SEQ ID NO: 395733 - DNA, 15 bp, Homo sapiens
tgttacgagcttcag

SEQ ID NO: 395734 - DNA, 15 bp, Homo sapiens
ctgttacgagcttca

SEQ ID NO: 395735 - DNA, 15 bp, Homo sapiens
cctgttacgagcttc

SEQ ID NO: 395736 - DNA, 15 bp, Homo sapiens
tcctgttacgagctt

SEQ ID NO: 395737 - DNA, 15 bp, Homo sapiens
ctcctgttacgagct

SEQ ID NO: 395738 - DNA, 15 bp, Homo sapiens
tctcctgttacgagc

SEQ ID NO: 395739 - DNA, 15 bp, Homo sapiens
ttctcctgttacgag

SEQ ID NO: 395740 - DNA, 15 bp, Homo sapiens
attctcctgttacga

SEQ ID NO: 395741 - DNA, 15 bp, Homo sapiens
gattctcctgttacg

SEQ ID NO: 395742 - DNA, 15 bp, Homo sapiens
agattctcctgttac

SEQ ID NO: 395743 - DNA, 15 bp, Homo sapiens
cagattctcctgtta

SEQ ID NO: 395744 - DNA, 15 bp, Homo sapiens
ccagattctcctgtt

SEQ ID NO: 395745 - DNA, 15 bp, Homo sapiens
gccagattctcctgt

SEQ ID NO: 395746 - DNA, 15 bp, Homo sapiens
tgccagattctcctg

SEQ ID NO: 395747 - DNA, 15 bp, Homo sapiens
ctgccagattctcct

SEQ ID NO: 395748 - DNA, 15 bp, Homo sapiens
gctgccagattctcc

SEQ ID NO: 395749 - DNA, 15 bp, Homo sapiens
agctgccagattctc

SEQ ID NO: 395750 - DNA, 15 bp, Homo sapiens
cagctgccagattct

SEQ ID NO: 395751 - DNA, 15 bp, Homo sapiens
ccagctgccagattc

SEQ ID NO: 395752 - DNA, 15 bp, Homo sapiens
tccagctgccagatt

SEQ ID NO: 395753 - DNA, 15 bp, Homo sapiens
gtccagctgccagat

SEQ ID NO: 395754 - DNA, 15 bp, Homo sapiens
tgtccagctgccaga

SEQ ID NO: 395755 - DNA, 15 bp, Homo sapiens
gtgtccagctgccag

SEQ ID NO: 395756 - DNA, 15 bp, Homo sapiens
tgtgtccagctgcca

SEQ ID NO: 395757 - DNA, 15 bp, Homo sapiens
ctgtgtccagctgcc

SEQ ID NO: 395758 - DNA, 15 bp, Homo sapiens
gctgtgtccagctgc

SEQ ID NO: 395759 - DNA, 15 bp, Homo sapiens
agctgtgtccagctg

SEQ ID NO: 395760 - DNA, 15 bp, Homo sapiens
aagctgtgtccagct

SEQ ID NO: 395761 - DNA, 15 bp, Homo sapiens
caagctgtgtccagc

SEQ ID NO: 395762 - DNA, 15 bp, Homo sapiens
ccaagctgtgtccag

SEQ ID NO: 395763 - DNA, 15 bp, Homo sapiens
tccaagctgtgtcca

SEQ ID NO: 395764 - DNA, 15 bp, Homo sapiens
gtccaagctgtgtcc

SEQ ID NO: 395765 - DNA, 15 bp, Homo sapiens
agtccaagctgtgtc

SEQ ID NO: 395766 - DNA, 15 bp, Homo sapiens
cagtccaagctgtgt

SEQ ID NO: 395767 - DNA, 15 bp, Homo sapiens
gcagtccaagctgtg

SEQ ID NO: 395768 - DNA, 15 bp, Homo sapiens
tgcagtccaagctgt

SEQ ID NO: 395769 - DNA, 15 bp, Homo sapiens
atgcagtccaagctg

SEQ ID NO: 395770 - DNA, 15 bp, Homo sapiens
aatgcagtccaagct

SEQ ID NO: 395771 - DNA, 15 bp, Homo sapiens
caatgcagtccaagc

SEQ ID NO: 395772 - DNA, 15 bp, Homo sapiens
acaatgcagtccaag

SEQ ID NO: 395773 - DNA, 15 bp, Homo sapiens
gacaatgcagtccaa

SEQ ID NO: 395774 - DNA, 15 bp, Homo sapiens
agacaatgcagtcca

SEQ ID NO: 395775 - DNA, 15 bp, Homo sapiens
cagacaatgcagtcc

SEQ ID NO: 395776 - DNA, 15 bp, Homo sapiens
ccagacaatgcagtc

SEQ ID NO: 395777 - DNA, 15 bp, Homo sapiens
gccagacaatgcagt

SEQ ID NO: 395778 - DNA, 15 bp, Homo sapiens
agccagacaatgcag

SEQ ID NO: 395779 - DNA, 15 bp, Homo sapiens
aagccagacaatgca

SEQ ID NO: 395780 - DNA, 15 bp, Homo sapiens
gaagccagacaatgc

SEQ ID NO: 395781 - DNA, 15 bp, Homo sapiens
tgaagccagacaatg

SEQ ID NO: 395782 - DNA, 15 bp, Homo sapiens
atgaagccagacaat

SEQ ID NO: 395783 - DNA, 15 bp, Homo sapiens
catgaagccagacaa

SEQ ID NO: 395784 - DNA, 15 bp, Homo sapiens
tcatgaagccagaca

SEQ ID NO: 395785 - DNA, 15 bp, Homo sapiens
gtcatgaagccagac

SEQ ID NO: 395786 - DNA, 15 bp, Homo sapiens
ggtcatgaagccaga

SEQ ID NO: 395787 - DNA, 15 bp, Homo sapiens
gggtcatgaagccag

SEQ ID NO: 395788 - DNA, 15 bp, Homo sapiens
ggggtcatgaagcca

SEQ ID NO: 395789 - DNA, 15 bp, Homo sapiens
aggggtcatgaagcc

SEQ ID NO: 395790 - DNA, 15 bp, Homo sapiens
caggggtcatgaagc

SEQ ID NO: 395791 - DNA, 15 bp, Homo sapiens
gcaggggtcatgaag

SEQ ID NO: 395792 - DNA, 15 bp, Homo sapiens
agcaggggtcatgaa

SEQ ID NO: 395793 - DNA, 15 bp, Homo sapiens
cagcaggggtcatga

SEQ ID NO: 395794 - DNA, 15 bp, Homo sapiens
acagcaggggtcatg

SEQ ID NO: 395795 - DNA, 15 bp, Homo sapiens
cacagcaggggtcat

SEQ ID NO: 395796 - DNA, 15 bp, Homo sapiens
acacagcaggggtca

SEQ ID NO: 395797 - DNA, 15 bp, Homo sapiens
tacacagcaggggtc

SEQ ID NO: 395798 - DNA, 15 bp, Homo sapiens
ctacacagcaggggt

SEQ ID NO: 395799 - DNA, 15 bp, Homo sapiens
gctacacagcagggg

SEQ ID NO: 395800 - DNA, 15 bp, Homo sapiens
ggctacacagcaggg

SEQ ID NO: 395801 - DNA, 15 bp, Homo sapiens
cggctacacagcagg

SEQ ID NO: 395802 - DNA, 15 bp, Homo sapiens
ccggctacacagcag

SEQ ID NO: 395803 - DNA, 15 bp, Homo sapiens
gccggctacacagca

SEQ ID NO: 395804 - DNA, 15 bp, Homo sapiens
agccggctacacagc

SEQ ID NO: 395805 - DNA, 15 bp, Homo sapiens
gagccggctacacag

SEQ ID NO: 395806 - DNA, 15 bp, Homo sapiens
tgagccggctacaca

SEQ ID NO: 395807 - DNA, 15 bp, Homo sapiens
atgagccggctacac

SEQ ID NO: 395808 - DNA, 15 bp, Homo sapiens
gatgagccggctaca

SEQ ID NO: 395809 - DNA, 15 bp, Homo sapiens
agatgagccggctac

SEQ ID NO: 395810 - DNA, 15 bp, Homo sapiens
gagatgagccggcta

SEQ ID NO: 395811 - DNA, 15 bp, Homo sapiens
agagatgagccggct

SEQ ID NO: 395812 - DNA, 15 bp, Homo sapiens
aagagatgagccggc

SEQ ID NO: 395813 - DNA, 15 bp, Homo sapiens
gaagagatgagccgg

SEQ ID NO: 395814 - DNA, 15 bp, Homo sapiens
tgaagagatgagccg

SEQ ID NO: 395815 - DNA, 15 bp, Homo sapiens
gtgaagagatgagcc

SEQ ID NO: 395816 - DNA, 15 bp, Homo sapiens
agtgaagagatgagc

SEQ ID NO: 395817 - DNA, 15 bp, Homo sapiens
gagtgaagagatgag

SEQ ID NO: 395818 - DNA, 15 bp, Homo sapiens
agagtgaagagatga

SEQ ID NO: 395819 - DNA, 15 bp, Homo sapiens
gagagtgaagagatg

SEQ ID NO: 395820 - DNA, 15 bp, Homo sapiens
tgagagtgaagagat

SEQ ID NO: 395821 - DNA, 15 bp, Homo sapiens
gtgagagtgaagaga

SEQ ID NO: 395822 - DNA, 15 bp, Homo sapiens
tgtgagagtgaagag

SEQ ID NO: 395823 - DNA, 15 bp, Homo sapiens
atgtgagagtgaaga

SEQ ID NO: 395824 - DNA, 15 bp, Homo sapiens
catgtgagagtgaag

SEQ ID NO: 395825 - DNA, 15 bp, Homo sapiens
acatgtgagagtgaa

SEQ ID NO: 395826 - DNA, 15 bp, Homo sapiens
tacatgtgagagtga

SEQ ID NO: 395827 - DNA, 15 bp, Homo sapiens
gtacatgtgagagtg

SEQ ID NO: 395828 - DNA, 15 bp, Homo sapiens
tgtacatgtgagagt

SEQ ID NO: 395829 - DNA, 15 bp, Homo sapiens
gtgtacatgtgagag

SEQ ID NO: 395830 - DNA, 15 bp, Homo sapiens
agtgtacatgtgaga

SEQ ID NO: 395831 - DNA, 15 bp, Homo sapiens
gagtgtacatgtgag

SEQ ID NO: 395832 - DNA, 15 bp, Homo sapiens
agagtgtacatgtga

SEQ ID NO: 395833 - DNA, 15 bp, Homo sapiens
gagagtgtacatgtg

SEQ ID NO: 395834 - DNA, 15 bp, Homo sapiens
ggagagtgtacatgt

SEQ ID NO: 395835 - DNA, 15 bp, Homo sapiens
aggagagtgtacatg

SEQ ID NO: 395836 - DNA, 15 bp, Homo sapiens
gaggagagtgtacat

SEQ ID NO: 395837 - DNA, 15 bp, Homo sapiens
cgaggagagtgtaca

SEQ ID NO: 395838 - DNA, 15 bp, Homo sapiens
gcgaggagagtgtac

SEQ ID NO: 395839 - DNA, 15 bp, Homo sapiens
agcgaggagagtgta

SEQ ID NO: 395840 - DNA, 15 bp, Homo sapiens
aagcgaggagagtgt

SEQ ID NO: 395841 - DNA, 15 bp, Homo sapiens
aaagcgaggagagtg

SEQ ID NO: 395842 - DNA, 15 bp, Homo sapiens
aaaagcgaggagagt

SEQ ID NO: 395843 - DNA, 15 bp, Homo sapiens
gaaaagcgaggagag

SEQ ID NO: 395844 - DNA, 15 bp, Homo sapiens
agaaaagcgaggaga

SEQ ID NO: 395845 - DNA, 15 bp, Homo sapiens
aagaaaagcgaggag

SEQ ID NO: 395846 - DNA, 15 bp, Homo sapiens
aaagaaaagcgagga

SEQ ID NO: 395847 - DNA, 15 bp, Homo sapiens
gaaagaaaagcgagg

SEQ ID NO: 395848 - DNA, 15 bp, Homo sapiens
agaaagaaaagcgag

SEQ ID NO: 395849 - DNA, 15 bp, Homo sapiens
aagaaagaaaagcga

SEQ ID NO: 395850 - DNA, 15 bp, Homo sapiens
aaagaaagaaaagcg

SEQ ID NO: 395851 - DNA, 15 bp, Homo sapiens
aaaagaaagaaaagc

SEQ ID NO: 395852 - DNA, 15 bp, Homo sapiens
aaaaagaaagaaaag

SEQ ID NO: 395853 - DNA, 15 bp, Homo sapiens
gaaaaaaaaaagaaa

SEQ ID NO: 395854 - DNA, 15 bp, Homo sapiens
ggaaaaaaaaaagaa

SEQ ID NO: 395855 - DNA, 15 bp, Homo sapiens
gggaaaaaaaaaaga

SEQ ID NO: 395856 - DNA, 15 bp, Homo sapiens
agggaaaaaaaaaag

SEQ ID NO: 395857 - DNA, 15 bp, Homo sapiens
aagggaaaaaaaaaa

SEQ ID NO: 395858 - DNA, 15 bp, Homo sapiens
aaagggaaaaaaaaa

SEQ ID NO: 395859 - DNA, 15 bp, Homo sapiens
aaaagggaaaaaaaa

SEQ ID NO: 395860 - DNA, 15 bp, Homo sapiens
gaaaagggaaaaaaa

SEQ ID NO: 395861 - DNA, 15 bp, Homo sapiens
agaaaagggaaaaaa

SEQ ID NO: 395862 - DNA, 15 bp, Homo sapiens
aagaaaagggaaaaa

SEQ ID NO: 395863 - DNA, 15 bp, Homo sapiens
aaagaaaagggaaaa

SEQ ID NO: 395864 - DNA, 15 bp, Homo sapiens
gaaagaaaagggaaa

SEQ ID NO: 395865 - DNA, 15 bp, Homo sapiens
agaaagaaaagggaa

SEQ ID NO: 395866 - DNA, 15 bp, Homo sapiens
aagaaagaaaaggga

SEQ ID NO: 395867 - DNA, 15 bp, Homo sapiens
gaagaaagaaaaggg

SEQ ID NO: 395868 - DNA, 15 bp, Homo sapiens
agaagaaagaaaagg

SEQ ID NO: 395869 - DNA, 15 bp, Homo sapiens
tagaagaaagaaaag

SEQ ID NO: 395870 - DNA, 15 bp, Homo sapiens
ttagaagaaagaaaa

SEQ ID NO: 395871 - DNA, 15 bp, Homo sapiens
attagaagaaagaaa

SEQ ID NO: 395872 - DNA, 15 bp, Homo sapiens
aattagaagaaagaa

SEQ ID NO: 395873 - DNA, 15 bp, Homo sapiens
aaattagaagaaaga

SEQ ID NO: 395874 - DNA, 15 bp, Homo sapiens
aaaattagaagaaag

SEQ ID NO: 395875 - DNA, 15 bp, Homo sapiens
aaaaattagaagaaa

SEQ ID NO: 395876 - DNA, 15 bp, Homo sapiens
taaaaattagaagaa

SEQ ID NO: 395877 - DNA, 15 bp, Homo sapiens
ttaaaaattagaaga

SEQ ID NO: 395878 - DNA, 15 bp, Homo sapiens
tttaaaaattagaag

SEQ ID NO: 395879 - DNA, 15 bp, Homo sapiens
ttttaaaaattagaa

SEQ ID NO: 395880 - DNA, 15 bp, Homo sapiens
tttttaaaaattaga

SEQ ID NO: 395881 - DNA, 15 bp, Homo sapiens
ctttttaaaaattag

SEQ ID NO: 395882 - DNA, 15 bp, Homo sapiens
gctttttaaaaatta

SEQ ID NO: 395883 - DNA, 15 bp, Homo sapiens
tgctttttaaaaatt

SEQ ID NO: 395884 - DNA, 15 bp, Homo sapiens
ctgctttttaaaaat

SEQ ID NO: 395885 - DNA, 15 bp, Homo sapiens
gctgctttttaaaaa

SEQ ID NO: 395886 - DNA, 15 bp, Homo sapiens
ggctgctttttaaaa

SEQ ID NO: 395887 - DNA, 15 bp, Homo sapiens
aggctgctttttaaa

SEQ ID NO: 395888 - DNA, 15 bp, Homo sapiens
gaggctgctttttaa

SEQ ID NO: 395889 - DNA, 15 bp, Homo sapiens
agaggctgcttttta

SEQ ID NO: 395890 - DNA, 15 bp, Homo sapiens
cagaggctgcttttt

SEQ ID NO: 395891 - DNA, 15 bp, Homo sapiens
ccagaggctgctttt

SEQ ID NO: 395892 - DNA, 15 bp, Homo sapiens
tccagaggctgcttt

SEQ ID NO: 395893 - DNA, 15 bp, Homo sapiens
ctccagaggctgctt

SEQ ID NO: 395894 - DNA, 15 bp, Homo sapiens
gctccagaggctgct

SEQ ID NO: 395895 - DNA, 15 bp, Homo sapiens
ggctccagaggctgc

SEQ ID NO: 395896 - DNA, 15 bp, Homo sapiens
tggctccagaggctg

SEQ ID NO: 395897 - DNA, 15 bp, Homo sapiens
ctggctccagaggct

SEQ ID NO: 395898 - DNA, 15 bp, Homo sapiens
gctggctccagaggc

SEQ ID NO: 395899 - DNA, 15 bp, Homo sapiens
ggctggctccagagg

SEQ ID NO: 395900 - DNA, 15 bp, Homo sapiens
tggctggctccagag

SEQ ID NO: 395901 - DNA, 15 bp, Homo sapiens
atggctggctccaga

SEQ ID NO: 395902 - DNA, 15 bp, Homo sapiens
catggctggctccag

SEQ ID NO: 395903 - DNA, 15 bp, Homo sapiens
acatggctggctcca

SEQ ID NO: 395904 - DNA, 15 bp, Homo sapiens
aacatggctggctcc

SEQ ID NO: 395905 - DNA, 15 bp, Homo sapiens
aaacatggctggctc

SEQ ID NO: 395906 - DNA, 15 bp, Homo sapiens
caaacatggctggct

SEQ ID NO: 395907 - DNA, 15 bp, Homo sapiens
ccaaacatggctggc

SEQ ID NO: 395908 - DNA, 15 bp, Homo sapiens
gccaaacatggctgg

SEQ ID NO: 395909 - DNA, 15 bp, Homo sapiens
tgccaaacatggctg

SEQ ID NO: 395910 - DNA, 15 bp, Homo sapiens
gtgccaaacatggct

SEQ ID NO: 395911 - DNA, 15 bp, Homo sapiens
agtgccaaacatggc

SEQ ID NO: 395912 - DNA, 15 bp, Homo sapiens
cagtgccaaacatgg

SEQ ID NO: 395913 - DNA, 15 bp, Homo sapiens
tcagtgccaaacatg

SEQ ID NO: 395914 - DNA, 15 bp, Homo sapiens
ttcagtgccaaacat

SEQ ID NO: 395915 - DNA, 15 bp, Homo sapiens
attcagtgccaaaca

SEQ ID NO: 395916 - DNA, 15 bp, Homo sapiens
gattcagtgccaaac

SEQ ID NO: 395917 - DNA, 15 bp, Homo sapiens
agattcagtgccaaa

SEQ ID NO: 395918 - DNA, 15 bp, Homo sapiens
aagattcagtgccaa

SEQ ID NO: 395919 - DNA, 15 bp, Homo sapiens
gaagattcagtgcca

SEQ ID NO: 395920 - DNA, 15 bp, Homo sapiens
tgaagattcagtgcc

SEQ ID NO: 395921 - DNA, 15 bp, Homo sapiens
atgaagattcagtgc

SEQ ID NO: 395922 - DNA, 15 bp, Homo sapiens
catgaagattcagtg

SEQ ID NO: 395923 - DNA, 15 bp, Homo sapiens
acatgaagattcagt

SEQ ID NO: 395924 - DNA, 15 bp, Homo sapiens
tacatgaagattcag

SEQ ID NO: 395925 - DNA, 15 bp, Homo sapiens
ttacatgaagattca

SEQ ID NO: 395926 - DNA, 15 bp, Homo sapiens
cttacatgaagattc

SEQ ID NO: 395927 - DNA, 15 bp, Homo sapiens
acttacatgaagatt

SEQ ID NO: 395928 - DNA, 15 bp, Homo sapiens
tacttacatgaagat

SEQ ID NO: 395929 - DNA, 15 bp, Homo sapiens
ttacttacatgaaga

SEQ ID NO: 395930 - DNA, 15 bp, Homo sapiens
tttacttacatgaag

SEQ ID NO: 395931 - DNA, 15 bp, Homo sapiens
atttacttacatgaa

SEQ ID NO: 395932 - DNA, 15 bp, Homo sapiens
catttacttacatga

SEQ ID NO: 395933 - DNA, 15 bp, Homo sapiens
ccatttacttacatg

SEQ ID NO: 395934 - DNA, 15 bp, Homo sapiens
tccatttacttacat

SEQ ID NO: 395935 - DNA, 15 bp, Homo sapiens
atccatttacttaca

SEQ ID NO: 395936 - DNA, 15 bp, Homo sapiens
gatccatttacttac

SEQ ID NO: 395937 - DNA, 15 bp, Homo sapiens
ggatccatttactta

SEQ ID NO: 395938 - DNA, 15 bp, Homo sapiens
gggatccatttactt

SEQ ID NO: 395939 - DNA, 15 bp, Homo sapiens
tgggatccatttact

SEQ ID NO: 395940 - DNA, 15 bp, Homo sapiens
gtgggatccatttac

SEQ ID NO: 395941 - DNA, 15 bp, Homo sapiens
agtgggatccattta

SEQ ID NO: 395942 - DNA, 15 bp, Homo sapiens
aagtgggatccattt

SEQ ID NO: 395943 - DNA, 15 bp, Homo sapiens
gaagtgggatccatt

SEQ ID NO: 395944 - DNA, 15 bp, Homo sapiens
agaagtgggatccat

SEQ ID NO: 395945 - DNA, 15 bp, Homo sapiens
gagaagtgggatcca

SEQ ID NO: 395946 - DNA, 15 bp, Homo sapiens
agagaagtgggatcc

SEQ ID NO: 395947 - DNA, 15 bp, Homo sapiens
cagagaagtgggatc

SEQ ID NO: 395948 - DNA, 15 bp, Homo sapiens
gcagagaagtgggat

SEQ ID NO: 395949 - DNA, 15 bp, Homo sapiens
agcagagaagtggga

SEQ ID NO: 395950 - DNA, 15 bp, Homo sapiens
tagcagagaagtggg

SEQ ID NO: 395951 - DNA, 15 bp, Homo sapiens
atagcagagaagtgg

SEQ ID NO: 395952 - DNA, 15 bp, Homo sapiens
aatagcagagaagtg

SEQ ID NO: 395953 - DNA, 15 bp, Homo sapiens
aaatagcagagaagt

SEQ ID NO: 395954 - DNA, 15 bp, Homo sapiens
taaatagcagagaag

SEQ ID NO: 395955 - DNA, 15 bp, Homo sapiens
ctaaatagcagagaa

SEQ ID NO: 395956 - DNA, 15 bp, Homo sapiens
tctaaatagcagaga

SEQ ID NO: 395957 - DNA, 15 bp, Homo sapiens
ttctaaatagcagag

SEQ ID NO: 395958 - DNA, 15 bp, Homo sapiens
tttctaaatagcaga

SEQ ID NO: 395959 - DNA, 15 bp, Homo sapiens
atttctaaatagcag

SEQ ID NO: 395960 - DNA, 15 bp, Homo sapiens
gatttctaaatagca

SEQ ID NO: 395961 - DNA, 15 bp, Homo sapiens
agatttctaaatagc

SEQ ID NO: 395962 - DNA, 15 bp, Homo sapiens
cagatttctaaatag

SEQ ID NO: 395963 - DNA, 15 bp, Homo sapiens
gcagatttctaaata

SEQ ID NO: 395964 - DNA, 15 bp, Homo sapiens
agcagatttctaaat

SEQ ID NO: 395965 - DNA, 15 bp, Homo sapiens
aagcagatttctaaa

SEQ ID NO: 395966 - DNA, 15 bp, Homo sapiens
caagcagatttctaa

SEQ ID NO: 395967 - DNA, 15 bp, Homo sapiens
gcaagcagatttcta

SEQ ID NO: 395968 - DNA, 15 bp, Homo sapiens
agcaagcagatttct

SEQ ID NO: 395969 - DNA, 15 bp, Homo sapiens
cagcaagcagatttc

SEQ ID NO: 395970 - DNA, 15 bp, Homo sapiens
acagcaagcagattt

SEQ ID NO: 395971 - DNA, 15 bp, Homo sapiens
gacagcaagcagatt

SEQ ID NO: 395972 - DNA, 15 bp, Homo sapiens
tgacagcaagcagat

SEQ ID NO: 395973 - DNA, 15 bp, Homo sapiens
atgacagcaagcaga

SEQ ID NO: 395974 - DNA, 15 bp, Homo sapiens
catgacagcaagcag

SEQ ID NO: 395975 - DNA, 15 bp, Homo sapiens
ccatgacagcaagca

SEQ ID NO: 395976 - DNA, 15 bp, Homo sapiens
accatgacagcaagc

SEQ ID NO: 395977 - DNA, 15 bp, Homo sapiens
aaccatgacagcaag

SEQ ID NO: 395978 - DNA, 15 bp, Homo sapiens
aaaccatgacagcaa

SEQ ID NO: 395979 - DNA, 15 bp, Homo sapiens
gaaaccatgacagca

SEQ ID NO: 395980 - DNA, 15 bp, Homo sapiens
tgaaaccatgacagc

SEQ ID NO: 395981 - DNA, 15 bp, Homo sapiens
atgaaaccatgacag

SEQ ID NO: 395982 - DNA, 15 bp, Homo sapiens
aatgaaaccatgaca

SEQ ID NO: 395983 - DNA, 15 bp, Homo sapiens
caatgaaaccatgac

SEQ ID NO: 395984 - DNA, 15 bp, Homo sapiens
ccaatgaaaccatga

SEQ ID NO: 395985 - DNA, 15 bp, Homo sapiens
gccaatgaaaccatg

SEQ ID NO: 395986 - DNA, 15 bp, Homo sapiens
agccaatgaaaccat

SEQ ID NO: 395987 - DNA, 15 bp, Homo sapiens
aagccaatgaaacca

SEQ ID NO: 395988 - DNA, 15 bp, Homo sapiens
taagccaatgaaacc

SEQ ID NO: 395989 - DNA, 15 bp, Homo sapiens
ctaagccaatgaaac

SEQ ID NO: 395990 - DNA, 15 bp, Homo sapiens
tctaagccaatgaaa

SEQ ID NO: 395991 - DNA, 15 bp, Homo sapiens
ctctaagccaatgaa

SEQ ID NO: 395992 - DNA, 15 bp, Homo sapiens
actctaagccaatga

SEQ ID NO: 395993 - DNA, 15 bp, Homo sapiens
aactctaagccaatg

SEQ ID NO: 395994 - DNA, 15 bp, Homo sapiens
gaactctaagccaat

SEQ ID NO: 395995 - DNA, 15 bp, Homo sapiens
tgaactctaagccaa

SEQ ID NO: 395996 - DNA, 15 bp, Homo sapiens
atgaactctaagcca

SEQ ID NO: 395997 - DNA, 15 bp, Homo sapiens
tatgaactctaagcc

SEQ ID NO: 395998 - DNA, 15 bp, Homo sapiens
atatgaactctaagc

SEQ ID NO: 395999 - DNA, 15 bp, Homo sapiens
gatatgaactctaag

SEQ ID NO: 396000 - DNA, 15 bp, Homo sapiens
tgatatgaactctaa

SEQ ID NO: 396001 - DNA, 15 bp, Homo sapiens
gtgatatgaactcta

SEQ ID NO: 396002 - DNA, 15 bp, Homo sapiens
agtgatatgaactct

SEQ ID NO: 396003 - DNA, 15 bp, Homo sapiens
aagtgatatgaactc

SEQ ID NO: 396004 - DNA, 15 bp, Homo sapiens
aaagtgatatgaact

SEQ ID NO: 396005 - DNA, 15 bp, Homo sapiens
caaagtgatatgaac

SEQ ID NO: 396006 - DNA, 15 bp, Homo sapiens
gcaaagtgatatgaa

SEQ ID NO: 396007 - DNA, 15 bp, Homo sapiens
ggcaaagtgatatga

SEQ ID NO: 396008 - DNA, 15 bp, Homo sapiens
aggcaaagtgatatg

SEQ ID NO: 396009 - DNA, 15 bp, Homo sapiens
aaggcaaagtgatat

SEQ ID NO: 396010 - DNA, 15 bp, Homo sapiens
taaggcaaagtgata

SEQ ID NO: 396011 - DNA, 15 bp, Homo sapiens
ctaaggcaaagtgat

SEQ ID NO: 396012 - DNA, 15 bp, Homo sapiens
cctaaggcaaagtga

SEQ ID NO: 396013 - DNA, 15 bp, Homo sapiens
acctaaggcaaagtg

SEQ ID NO: 396014 - DNA, 15 bp, Homo sapiens
gacctaaggcaaagt

SEQ ID NO: 396015 - DNA, 15 bp, Homo sapiens
tgacctaaggcaaag

SEQ ID NO: 396016 - DNA, 15 bp, Homo sapiens
atgacctaaggcaaa

SEQ ID NO: 396017 - DNA, 15 bp, Homo sapiens
aatgacctaaggcaa

SEQ ID NO: 396018 - DNA, 15 bp, Homo sapiens
taatgacctaaggca

SEQ ID NO: 396019 - DNA, 15 bp, Homo sapiens
ttaatgacctaaggc

SEQ ID NO: 396020 - DNA, 15 bp, Homo sapiens
gttaatgacctaagg

SEQ ID NO: 396021 - DNA, 15 bp, Homo sapiens
tgttaatgacctaag

SEQ ID NO: 396022 - DNA, 15 bp, Homo sapiens
ttgttaatgacctaa

SEQ ID NO: 396023 - DNA, 15 bp, Homo sapiens
gttgttaatgaccta

SEQ ID NO: 396024 - DNA, 15 bp, Homo sapiens
ggttgttaatgacct

SEQ ID NO: 396025 - DNA, 15 bp, Homo sapiens
aggttgttaatgacc

SEQ ID NO: 396026 - DNA, 15 bp, Homo sapiens
aaggttgttaatgac

SEQ ID NO: 396027 - DNA, 15 bp, Homo sapiens
aaaggttgttaatga

SEQ ID NO: 396028 - DNA, 15 bp, Homo sapiens
caaaggttgttaatg

SEQ ID NO: 396029 - DNA, 15 bp, Homo sapiens
acaaaggttgttaat

SEQ ID NO: 396030 - DNA, 15 bp, Homo sapiens
tacaaaggttgttaa

SEQ ID NO: 396031 - DNA, 15 bp, Homo sapiens
atacaaaggttgtta

SEQ ID NO: 396032 - DNA, 15 bp, Homo sapiens
aatacaaaggttgtt

SEQ ID NO: 396033 - DNA, 15 bp, Homo sapiens
aaatacaaaggttgt

SEQ ID NO: 396034 - DNA, 15 bp, Homo sapiens
aaaatacaaaggttg

SEQ ID NO: 396035 - DNA, 15 bp, Homo sapiens
caaaatacaaaggtt

SEQ ID NO: 396036 - DNA, 15 bp, Homo sapiens
ccaaaatacaaaggt

SEQ ID NO: 396037 - DNA, 15 bp, Homo sapiens
gccaaaatacaaagg

SEQ ID NO: 396038 - DNA, 15 bp, Homo sapiens
agccaaaatacaaag

SEQ ID NO: 396039 - DNA, 15 bp, Homo sapiens
gagccaaaatacaaa

SEQ ID NO: 396040 - DNA, 15 bp, Homo sapiens
agagccaaaatacaa

SEQ ID NO: 396041 - DNA, 15 bp, Homo sapiens
tagagccaaaataca

SEQ ID NO: 396042 - DNA, 15 bp, Homo sapiens
ttagagccaaaatac

SEQ ID NO: 396043 - DNA, 15 bp, Homo sapiens
attagagccaaaata

SEQ ID NO: 396044 - DNA, 15 bp, Homo sapiens
aattagagccaaaat

SEQ ID NO: 396045 - DNA, 15 bp, Homo sapiens
taattagagccaaaa

SEQ ID NO: 396046 - DNA, 15 bp, Homo sapiens
gtaattagagccaaa

SEQ ID NO: 396047 - DNA, 15 bp, Homo sapiens
tgtaattagagccaa

SEQ ID NO: 396048 - DNA, 15 bp, Homo sapiens
ttgtaattagagcca

SEQ ID NO: 396049 - DNA, 15 bp, Homo sapiens
tttgtaattagagcc

SEQ ID NO: 396050 - DNA, 15 bp, Homo sapiens
ctttgtaattagagc

SEQ ID NO: 396051 - DNA, 15 bp, Homo sapiens
cctttgtaattagag

SEQ ID NO: 396052 - DNA, 15 bp, Homo sapiens
tcctttgtaattaga

SEQ ID NO: 396053 - DNA, 15 bp, Homo sapiens
ttcctttgtaattag

SEQ ID NO: 396054 - DNA, 15 bp, Homo sapiens
attcctttgtaatta

SEQ ID NO: 396055 - DNA, 15 bp, Homo sapiens
aattcctttgtaatt

SEQ ID NO: 396056 - DNA, 15 bp, Homo sapiens
caattcctttgtaat

SEQ ID NO: 396057 - DNA, 15 bp, Homo sapiens
ccaattcctttgtaa

SEQ ID NO: 396058 - DNA, 15 bp, Homo sapiens
accaattcctttgta

SEQ ID NO: 396059 - DNA, 15 bp, Homo sapiens
gaccaattcctttgt

SEQ ID NO: 396060 - DNA, 15 bp, Homo sapiens
agaccaattcctttg

SEQ ID NO: 396061 - DNA, 15 bp, Homo sapiens
gagaccaattccttt

SEQ ID NO: 396062 - DNA, 15 bp, Homo sapiens
tgagaccaattcctt

SEQ ID NO: 396063 - DNA, 15 bp, Homo sapiens
ctgagaccaattcct

SEQ ID NO: 396064 - DNA, 15 bp, Homo sapiens
cctgagaccaattcc

SEQ ID NO: 396065 - DNA, 15 bp, Homo sapiens
ccctgagaccaattc

SEQ ID NO: 396066 - DNA, 15 bp, Homo sapiens
tccctgagaccaatt

SEQ ID NO: 396067 - DNA, 15 bp, Homo sapiens
ttccctgagaccaat

SEQ ID NO: 396068 - DNA, 15 bp, Homo sapiens
cttccctgagaccaa

SEQ ID NO: 396069 - DNA, 15 bp, Homo sapiens
ccttccctgagacca

SEQ ID NO: 396070 - DNA, 15 bp, Homo sapiens
tccttccctgagacc

SEQ ID NO: 396071 - DNA, 15 bp, Homo sapiens
ttccttccctgagac

SEQ ID NO: 396072 - DNA, 15 bp, Homo sapiens
gttccttccctgaga

SEQ ID NO: 396073 - DNA, 15 bp, Homo sapiens
agttccttccctgag

SEQ ID NO: 396074 - DNA, 15 bp, Homo sapiens
gagttccttccctga

SEQ ID NO: 396075 - DNA, 15 bp, Homo sapiens
ggagttccttccctg

SEQ ID NO: 396076 - DNA, 15 bp, Homo sapiens
gggagttccttccct

SEQ ID NO: 396077 - DNA, 15 bp, Homo sapiens
ggggagttccttccc

SEQ ID NO: 396078 - DNA, 15 bp, Homo sapiens
aggggagttccttcc

SEQ ID NO: 396079 - DNA, 15 bp, Homo sapiens
aaggggagttccttc

SEQ ID NO: 396080 - DNA, 15 bp, Homo sapiens
taaggggagttcctt

SEQ ID NO: 396081 - DNA, 15 bp, Homo sapiens
ttaaggggagttcct

SEQ ID NO: 396082 - DNA, 15 bp, Homo sapiens
gttaaggggagttcc

SEQ ID NO: 396083 - DNA, 15 bp, Homo sapiens
agttaaggggagttc

SEQ ID NO: 396084 - DNA, 15 bp, Homo sapiens
cagttaaggggagtt

SEQ ID NO: 396085 - DNA, 15 bp, Homo sapiens
ccagttaaggggagt

SEQ ID NO: 396086 - DNA, 15 bp, Homo sapiens
cccagttaaggggag

SEQ ID NO: 396087 - DNA, 15 bp, Homo sapiens
acccagttaagggga

SEQ ID NO: 396088 - DNA, 15 bp, Homo sapiens
aacccagttaagggg

SEQ ID NO: 396089 - DNA, 15 bp, Homo sapiens
taacccagttaaggg

SEQ ID NO: 396090 - DNA, 15 bp, Homo sapiens
ataacccagttaagg

SEQ ID NO: 396091 - DNA, 15 bp, Homo sapiens
aataacccagttaag

SEQ ID NO: 396092 - DNA, 15 bp, Homo sapiens
gaataacccagttaa

SEQ ID NO: 396093 - DNA, 15 bp, Homo sapiens
tgaataacccagtta

SEQ ID NO: 396094 - DNA, 15 bp, Homo sapiens
atgaataacccagtt

SEQ ID NO: 396095 - DNA, 15 bp, Homo sapiens
gatgaataacccagt

SEQ ID NO: 396096 - DNA, 15 bp, Homo sapiens
ggatgaataacccag

SEQ ID NO: 396097 - DNA, 15 bp, Homo sapiens
aggatgaataaccca

SEQ ID NO: 396098 - DNA, 15 bp, Homo sapiens
aaggatgaataaccc

SEQ ID NO: 396099 - DNA, 15 bp, Homo sapiens
taaggatgaataacc

SEQ ID NO: 396100 - DNA, 15 bp, Homo sapiens
ttaaggatgaataac

SEQ ID NO: 396101 - DNA, 15 bp, Homo sapiens
cttaaggatgaataa

SEQ ID NO: 396102 - DNA, 15 bp, Homo sapiens
ccttaaggatgaata

SEQ ID NO: 396103 - DNA, 15 bp, Homo sapiens
gccttaaggatgaat

SEQ ID NO: 396104 - DNA, 15 bp, Homo sapiens
ggccttaaggatgaa

SEQ ID NO: 396105 - DNA, 15 bp, Homo sapiens
tggccttaaggatga

SEQ ID NO: 396106 - DNA, 15 bp, Homo sapiens
ctggccttaaggatg

SEQ ID NO: 396107 - DNA, 15 bp, Homo sapiens
cctggccttaaggat

SEQ ID NO: 396108 - DNA, 15 bp, Homo sapiens
ccctggccttaagga

SEQ ID NO: 396109 - DNA, 15 bp, Homo sapiens
tccctggccttaagg

SEQ ID NO: 396110 - DNA, 15 bp, Homo sapiens
atccctggccttaag

SEQ ID NO: 396111 - DNA, 15 bp, Homo sapiens
catccctggccttaa

SEQ ID NO: 396112 - DNA, 15 bp, Homo sapiens
acatccctggcctta

SEQ ID NO: 396113 - DNA, 15 bp, Homo sapiens
gacatccctggcctt

SEQ ID NO: 396114 - DNA, 15 bp, Homo sapiens
tgacatccctggcct

SEQ ID NO: 396115 - DNA, 15 bp, Homo sapiens
ttgacatccctggcc

SEQ ID NO: 396116 - DNA, 15 bp, Homo sapiens
attgacatccctggc

SEQ ID NO: 396117 - DNA, 15 bp, Homo sapiens
cattgacatccctgg

SEQ ID NO: 396118 - DNA, 15 bp, Homo sapiens
acattgacatccctg

SEQ ID NO: 396119 - DNA, 15 bp, Homo sapiens
cacattgacatccct

SEQ ID NO: 396120 - DNA, 15 bp, Homo sapiens
acacattgacatccc

SEQ ID NO: 396121 - DNA, 15 bp, Homo sapiens
gacacattgacatcc

SEQ ID NO: 396122 - DNA, 15 bp, Homo sapiens
tgacacattgacatc

SEQ ID NO: 396123 - DNA, 15 bp, Homo sapiens
ttgacacattgacat

SEQ ID NO: 396124 - DNA, 15 bp, Homo sapiens
tttgacacattgaca

SEQ ID NO: 396125 - DNA, 15 bp, Homo sapiens
ttttgacacattgac

SEQ ID NO: 396126 - DNA, 15 bp, Homo sapiens
gttttgacacattga

SEQ ID NO: 396127 - DNA, 15 bp, Homo sapiens
ggttttgacacattg

SEQ ID NO: 396128 - DNA, 15 bp, Homo sapiens
tggttttgacacatt

SEQ ID NO: 396129 - DNA, 15 bp, Homo sapiens
ctggttttgacacat

SEQ ID NO: 396130 - DNA, 15 bp, Homo sapiens
cctggttttgacaca

SEQ ID NO: 396131 - DNA, 15 bp, Homo sapiens
gcctggttttgacac

SEQ ID NO: 396132 - DNA, 15 bp, Homo sapiens
ggcctggttttgaca

SEQ ID NO: 396133 - DNA, 15 bp, Homo sapiens
aggcctggttttgac

SEQ ID NO: 396134 - DNA, 15 bp, Homo sapiens
caggcctggttttga

SEQ ID NO: 396135 - DNA, 15 bp, Homo sapiens
acaggcctggttttg

SEQ ID NO: 396136 - DNA, 15 bp, Homo sapiens
tacaggcctggtttt

SEQ ID NO: 396137 - DNA, 15 bp, Homo sapiens
ttacaggcctggttt

SEQ ID NO: 396138 - DNA, 15 bp, Homo sapiens
cttacaggcctggtt

SEQ ID NO: 396139 - DNA, 15 bp, Homo sapiens
tcttacaggcctggt

SEQ ID NO: 396140 - DNA, 15 bp, Homo sapiens
ctcttacaggcctgg

SEQ ID NO: 396141 - DNA, 15 bp, Homo sapiens
cctcttacaggcctg

SEQ ID NO: 396142 - DNA, 15 bp, Homo sapiens
ccctcttacaggcct

SEQ ID NO: 396143 - DNA, 15 bp, Homo sapiens
tccctcttacaggcc

SEQ ID NO: 396144 - DNA, 15 bp, Homo sapiens
ctccctcttacaggc

SEQ ID NO: 396145 - DNA, 15 bp, Homo sapiens
cctccctcttacagg

SEQ ID NO: 396146 - DNA, 15 bp, Homo sapiens
acctccctcttacag

SEQ ID NO: 396147 - DNA, 15 bp, Homo sapiens
tacctccctcttaca

SEQ ID NO: 396148 - DNA, 15 bp, Homo sapiens
ctacctccctcttac

SEQ ID NO: 396149 - DNA, 15 bp, Homo sapiens
cctacctccctctta

SEQ ID NO: 396150 - DNA, 15 bp, Homo sapiens
tcctacctccctctt

SEQ ID NO: 396151 - DNA, 15 bp, Homo sapiens
ttcctacctccctct

SEQ ID NO: 396152 - DNA, 15 bp, Homo sapiens
tttcctacctccctc

SEQ ID NO: 396153 - DNA, 15 bp, Homo sapiens
ttttcctacctccct

SEQ ID NO: 396154 - DNA, 15 bp, Homo sapiens
gttttcctacctccc

SEQ ID NO: 396155 - DNA, 15 bp, Homo sapiens
ggttttcctacctcc

SEQ ID NO: 396156 - DNA, 15 bp, Homo sapiens
tggttttcctacctc

SEQ ID NO: 396157 - DNA, 15 bp, Homo sapiens
ctggttttcctacct

SEQ ID NO: 396158 - DNA, 15 bp, Homo sapiens
tctggttttcctacc

SEQ ID NO: 396159 - DNA, 15 bp, Homo sapiens
ttctggttttcctac

SEQ ID NO: 396160 - DNA, 15 bp, Homo sapiens
attctggttttccta

SEQ ID NO: 396161 - DNA, 15 bp, Homo sapiens
gattctggttttcct

SEQ ID NO: 396162 - DNA, 15 bp, Homo sapiens
ggattctggttttcc

SEQ ID NO: 396163 - DNA, 15 bp, Homo sapiens
tggattctggttttc

SEQ ID NO: 396164 - DNA, 15 bp, Homo sapiens
atggattctggtttt

SEQ ID NO: 396165 - DNA, 15 bp, Homo sapiens
tatggattctggttt

SEQ ID NO: 396166 - DNA, 15 bp, Homo sapiens
gtatggattctggtt

SEQ ID NO: 396167 - DNA, 15 bp, Homo sapiens
tgtatggattctggt

SEQ ID NO: 396168 - DNA, 15 bp, Homo sapiens
ctgtatggattctgg

SEQ ID NO: 396169 - DNA, 15 bp, Homo sapiens
gctgtatggattctg

SEQ ID NO: 396170 - DNA, 15 bp, Homo sapiens
ggctgtatggattct

SEQ ID NO: 396171 - DNA, 15 bp, Homo sapiens
tggctgtatggattc

SEQ ID NO: 396172 - DNA, 15 bp, Homo sapiens
gtggctgtatggatt

SEQ ID NO: 396173 - DNA, 15 bp, Homo sapiens
ggtggctgtatggat

SEQ ID NO: 396174 - DNA, 15 bp, Homo sapiens
gggtggctgtatgga

SEQ ID NO: 396175 - DNA, 15 bp, Homo sapiens
agggtggctgtatgg

SEQ ID NO: 396176 - DNA, 15 bp, Homo sapiens
tagggtggctgtatg

SEQ ID NO: 396177 - DNA, 15 bp, Homo sapiens
ctagggtggctgtat

SEQ ID NO: 396178 - DNA, 15 bp, Homo sapiens
tctagggtggctgta

SEQ ID NO: 396179 - DNA, 15 bp, Homo sapiens
ttctagggtggctgt

SEQ ID NO: 396180 - DNA, 15 bp, Homo sapiens
attctagggtggctg

SEQ ID NO: 396181 - DNA, 15 bp, Homo sapiens
cattctagggtggct

SEQ ID NO: 396182 - DNA, 15 bp, Homo sapiens
acattctagggtggc

SEQ ID NO: 396183 - DNA, 15 bp, Homo sapiens
cacattctagggtgg

SEQ ID NO: 396184 - DNA, 15 bp, Homo sapiens
acacattctagggtg

SEQ ID NO: 396185 - DNA, 15 bp, Homo sapiens
aacacattctagggt

SEQ ID NO: 396186 - DNA, 15 bp, Homo sapiens
taacacattctaggg

SEQ ID NO: 396187 - DNA, 15 bp, Homo sapiens
ttaacacattctagg

SEQ ID NO: 396188 - DNA, 15 bp, Homo sapiens
attaacacattctag

SEQ ID NO: 396189 - DNA, 15 bp, Homo sapiens
aattaacacattcta

SEQ ID NO: 396190 - DNA, 15 bp, Homo sapiens
caattaacacattct

SEQ ID NO: 396191 - DNA, 15 bp, Homo sapiens
tcaattaacacattc

SEQ ID NO: 396192 - DNA, 15 bp, Homo sapiens
atcaattaacacatt

SEQ ID NO: 396193 - DNA, 15 bp, Homo sapiens
catcaattaacacat

SEQ ID NO: 396194 - DNA, 15 bp, Homo sapiens
ccatcaattaacaca

SEQ ID NO: 396195 - DNA, 15 bp, Homo sapiens
cccatcaattaacac

SEQ ID NO: 396196 - DNA, 15 bp, Homo sapiens
tcccatcaattaaca

SEQ ID NO: 396197 - DNA, 15 bp, Homo sapiens
atcccatcaattaac

SEQ ID NO: 396198 - DNA, 15 bp, Homo sapiens
gatcccatcaattaa

SEQ ID NO: 396199 - DNA, 15 bp, Homo sapiens
tgatcccatcaatta

SEQ ID NO: 396200 - DNA, 15 bp, Homo sapiens
ctgatcccatcaatt

SEQ ID NO: 396201 - DNA, 15 bp, Homo sapiens
cctgatcccatcaat

SEQ ID NO: 396202 - DNA, 15 bp, Homo sapiens
gcctgatcccatcaa

SEQ ID NO: 396203 - DNA, 15 bp, Homo sapiens
ggcctgatcccatca

SEQ ID NO: 396204 - DNA, 15 bp, Homo sapiens
aggcctgatcccatc

SEQ ID NO: 396205 - DNA, 15 bp, Homo sapiens
caggcctgatcccat

SEQ ID NO: 396206 - DNA, 15 bp, Homo sapiens
acaggcctgatccca

SEQ ID NO: 396207 - DNA, 15 bp, Homo sapiens
gacaggcctgatccc

SEQ ID NO: 396208 - DNA, 15 bp, Homo sapiens
tgacaggcctgatcc

SEQ ID NO: 396209 - DNA, 15 bp, Homo sapiens
gtgacaggcctgatc

SEQ ID NO: 396210 - DNA, 15 bp, Homo sapiens
agtgacaggcctgat

SEQ ID NO: 396211 - DNA, 15 bp, Homo sapiens
cagtgacaggcctga

SEQ ID NO: 396212 - DNA, 15 bp, Homo sapiens
tcagtgacaggcctg

SEQ ID NO: 396213 - DNA, 15 bp, Homo sapiens
atcagtgacaggcct

SEQ ID NO: 396214 - DNA, 15 bp, Homo sapiens
gatcagtgacaggcc

SEQ ID NO: 396215 - DNA, 15 bp, Homo sapiens
agatcagtgacaggc

SEQ ID NO: 396216 - DNA, 15 bp, Homo sapiens
tagatcagtgacagg

SEQ ID NO: 396217 - DNA, 15 bp, Homo sapiens
atagatcagtgacag

SEQ ID NO: 396218 - DNA, 15 bp, Homo sapiens
aatagatcagtgaca

SEQ ID NO: 396219 - DNA, 15 bp, Homo sapiens
caatagatcagtgac

SEQ ID NO: 396220 - DNA, 15 bp, Homo sapiens
acaatagatcagtga

SEQ ID NO: 396221 - DNA, 15 bp, Homo sapiens
aacaatagatcagtg

SEQ ID NO: 396222 - DNA, 15 bp, Homo sapiens
caacaatagatcagt

SEQ ID NO: 396223 - DNA, 15 bp, Homo sapiens
acaacaatagatcag

SEQ ID NO: 396224 - DNA, 15 bp, Homo sapiens
tacaacaatagatca

SEQ ID NO: 396225 - DNA, 15 bp, Homo sapiens
ctacaacaatagatc

SEQ ID NO: 396226 - DNA, 15 bp, Homo sapiens
cctacaacaatagat

SEQ ID NO: 396227 - DNA, 15 bp, Homo sapiens
gcctacaacaataga

SEQ ID NO: 396228 - DNA, 15 bp, Homo sapiens
agcctacaacaatag

SEQ ID NO: 396229 - DNA, 15 bp, Homo sapiens
gagcctacaacaata

SEQ ID NO: 396230 - DNA, 15 bp, Homo sapiens
ggagcctacaacaat

SEQ ID NO: 396231 - DNA, 15 bp, Homo sapiens
cggagcctacaacaa

SEQ ID NO: 396232 - DNA, 15 bp, Homo sapiens
acggagcctacaaca

SEQ ID NO: 396233 - DNA, 15 bp, Homo sapiens
tacggagcctacaac

SEQ ID NO: 396234 - DNA, 15 bp, Homo sapiens
ttacggagcctacaa

SEQ ID NO: 396235 - DNA, 15 bp, Homo sapiens
attacggagcctaca

SEQ ID NO: 396236 - DNA, 15 bp, Homo sapiens
cattacggagcctac

SEQ ID NO: 396237 - DNA, 15 bp, Homo sapiens
ccattacggagccta

SEQ ID NO: 396238 - DNA, 15 bp, Homo sapiens
accattacggagcct

SEQ ID NO: 396239 - DNA, 15 bp, Homo sapiens
caccattacggagcc

SEQ ID NO: 396240 - DNA, 15 bp, Homo sapiens
gcaccattacggagc

SEQ ID NO: 396241 - DNA, 15 bp, Homo sapiens
agcaccattacggag

SEQ ID NO: 396242 - DNA, 15 bp, Homo sapiens
aagcaccattacgga

SEQ ID NO: 396243 - DNA, 15 bp, Homo sapiens
taagcaccattacgg

SEQ ID NO: 396244 - DNA, 15 bp, Homo sapiens
ttaagcaccattacg

SEQ ID NO: 396245 - DNA, 15 bp, Homo sapiens
tttaagcaccattac

SEQ ID NO: 396246 - DNA, 15 bp, Homo sapiens
gtttaagcaccatta

SEQ ID NO: 396247 - DNA, 15 bp, Homo sapiens
ggtttaagcaccatt

SEQ ID NO: 396248 - DNA, 15 bp, Homo sapiens
aggtttaagcaccat

SEQ ID NO: 396249 - DNA, 15 bp, Homo sapiens
aaggtttaagcacca

SEQ ID NO: 396250 - DNA, 15 bp, Homo sapiens
taaggtttaagcacc

SEQ ID NO: 396251 - DNA, 15 bp, Homo sapiens
ttaaggtttaagcac

SEQ ID NO: 396252 - DNA, 15 bp, Homo sapiens
tttaaggtttaagca

SEQ ID NO: 396253 - DNA, 15 bp, Homo sapiens
ttttaaggtttaagc

SEQ ID NO: 396254 - DNA, 15 bp, Homo sapiens
attttaaggtttaag

SEQ ID NO: 396255 - DNA, 15 bp, Homo sapiens
tattttaaggtttaa

SEQ ID NO: 396256 - DNA, 15 bp, Homo sapiens
ctattttaaggttta

SEQ ID NO: 396257 - DNA, 15 bp, Homo sapiens
tctattttaaggttt

SEQ ID NO: 396258 - DNA, 15 bp, Homo sapiens
atctattttaaggtt

SEQ ID NO: 396259 - DNA, 15 bp, Homo sapiens
tatctattttaaggt

SEQ ID NO: 396260 - DNA, 15 bp, Homo sapiens
gtatctattttaagg

SEQ ID NO: 396261 - DNA, 15 bp, Homo sapiens
agtatctattttaag

SEQ ID NO: 396262 - DNA, 15 bp, Homo sapiens
cagtatctattttaa

SEQ ID NO: 396263 - DNA, 15 bp, Homo sapiens
ccagtatctatttta

SEQ ID NO: 396264 - DNA, 15 bp, Homo sapiens
cccagtatctatttt

SEQ ID NO: 396265 - DNA, 15 bp, Homo sapiens
tcccagtatctattt

SEQ ID NO: 396266 - DNA, 15 bp, Homo sapiens
ctcccagtatctatt

SEQ ID NO: 396267 - DNA, 15 bp, Homo sapiens
cctcccagtatctat

SEQ ID NO: 396268 - DNA, 15 bp, Homo sapiens
tcctcccagtatcta

SEQ ID NO: 396269 - DNA, 15 bp, Homo sapiens
atcctcccagtatct

SEQ ID NO: 396270 - DNA, 15 bp, Homo sapiens
gatcctcccagtatc

SEQ ID NO: 396271 - DNA, 15 bp, Homo sapiens
agatcctcccagtat

SEQ ID NO: 396272 - DNA, 15 bp, Homo sapiens
cagatcctcccagta

SEQ ID NO: 396273 - DNA, 15 bp, Homo sapiens
tcagatcctcccagt

SEQ ID NO: 396274 - DNA, 15 bp, Homo sapiens
ctcagatcctcccag

SEQ ID NO: 396275 - DNA, 15 bp, Homo sapiens
tctcagatcctccca

SEQ ID NO: 396276 - DNA, 15 bp, Homo sapiens
atctcagatcctccc

SEQ ID NO: 396277 - DNA, 15 bp, Homo sapiens
catctcagatcctcc

SEQ ID NO: 396278 - DNA, 15 bp, Homo sapiens
tcatctcagatcctc

SEQ ID NO: 396279 - DNA, 15 bp, Homo sapiens
atcatctcagatcct

SEQ ID NO: 396280 - DNA, 15 bp, Homo sapiens
tatcatctcagatcc

SEQ ID NO: 396281 - DNA, 15 bp, Homo sapiens
ctatcatctcagatc

SEQ ID NO: 396282 - DNA, 15 bp, Homo sapiens
actatcatctcagat

SEQ ID NO: 396283 - DNA, 15 bp, Homo sapiens
cactatcatctcaga

SEQ ID NO: 396284 - DNA, 15 bp, Homo sapiens
acactatcatctcag

SEQ ID NO: 396285 - DNA, 15 bp, Homo sapiens
aacactatcatctca

SEQ ID NO: 396286 - DNA, 15 bp, Homo sapiens
aaacactatcatctc

SEQ ID NO: 396287 - DNA, 15 bp, Homo sapiens
taaacactatcatct

SEQ ID NO: 396288 - DNA, 15 bp, Homo sapiens
ataaacactatcatc

SEQ ID NO: 396289 - DNA, 15 bp, Homo sapiens
aataaacactatcat

SEQ ID NO: 396290 - DNA, 15 bp, Homo sapiens
taataaacactatca

SEQ ID NO: 396291 - DNA, 15 bp, Homo sapiens
ctaataaacactatc

SEQ ID NO: 396292 - DNA, 15 bp, Homo sapiens
tctaataaacactat

SEQ ID NO: 396293 - DNA, 15 bp, Homo sapiens
ttctaataaacacta

SEQ ID NO: 396294 - DNA, 15 bp, Homo sapiens
tttctaataaacact

SEQ ID NO: 396295 - DNA, 15 bp, Homo sapiens
ctttctaataaacac

SEQ ID NO: 396296 - DNA, 15 bp, Homo sapiens
cctttctaataaaca

SEQ ID NO: 396297 - DNA, 15 bp, Homo sapiens
tcctttctaataaac

SEQ ID NO: 396298 - DNA, 15 bp, Homo sapiens
ttcctttctaataaa

SEQ ID NO: 396299 - DNA, 15 bp, Homo sapiens
tttcctttctaataa

SEQ ID NO: 396300 - DNA, 15 bp, Homo sapiens
ctttcctttctaata

SEQ ID NO: 396301 - DNA, 15 bp, Homo sapiens
tctttcctttctaat

SEQ ID NO: 396302 - DNA, 15 bp, Homo sapiens
ttctttcctttctaa

SEQ ID NO: 396303 - DNA, 15 bp, Homo sapiens
tttctttcctttcta

SEQ ID NO: 396304 - DNA, 15 bp, Homo sapiens
ctttctttcctttct

SEQ ID NO: 396305 - DNA, 15 bp, Homo sapiens
cctttctttcctttc

SEQ ID NO: 396306 - DNA, 15 bp, Homo sapiens
gcctttctttccttt

SEQ ID NO: 396307 - DNA, 15 bp, Homo sapiens
agcctttctttcctt

SEQ ID NO: 396308 - DNA, 15 bp, Homo sapiens
aagcctttctttcct

SEQ ID NO: 396309 - DNA, 15 bp, Homo sapiens
taagcctttctttcc

SEQ ID NO: 396310 - DNA, 15 bp, Homo sapiens
gtaagcctttctttc

SEQ ID NO: 396311 - DNA, 15 bp, Homo sapiens
tgtaagcctttcttt

SEQ ID NO: 396312 - DNA, 15 bp, Homo sapiens
atgtaagcctttctt

SEQ ID NO: 396313 - DNA, 15 bp, Homo sapiens
aatgtaagcctttct

SEQ ID NO: 396314 - DNA, 15 bp, Homo sapiens
aaatgtaagcctttc

SEQ ID NO: 396315 - DNA, 15 bp, Homo sapiens
aaaatgtaagccttt

SEQ ID NO: 396316 - DNA, 15 bp, Homo sapiens
aaaaatgtaagcctt

SEQ ID NO: 396317 - DNA, 15 bp, Homo sapiens
aaaaaatgtaagcct

SEQ ID NO: 396318 - DNA, 15 bp, Homo sapiens
gaaaaaatgtaagcc

SEQ ID NO: 396319 - DNA, 15 bp, Homo sapiens
tgaaaaaatgtaagc

SEQ ID NO: 396320 - DNA, 15 bp, Homo sapiens
atgaaaaaatgtaag

SEQ ID NO: 396321 - DNA, 15 bp, Homo sapiens
gatgaaaaaatgtaa

SEQ ID NO: 396322 - DNA, 15 bp, Homo sapiens
agatgaaaaaatgta

SEQ ID NO: 396323 - DNA, 15 bp, Homo sapiens
tagatgaaaaaatgt

SEQ ID NO: 396324 - DNA, 15 bp, Homo sapiens
ttagatgaaaaaatg

SEQ ID NO: 396325 - DNA, 15 bp, Homo sapiens
tttagatgaaaaaat

SEQ ID NO: 396326 - DNA, 15 bp, Homo sapiens
ctttagatgaaaaaa

SEQ ID NO: 396327 - DNA, 15 bp, Homo sapiens
tctttagatgaaaaa

SEQ ID NO: 396328 - DNA, 15 bp, Homo sapiens
ctctttagatgaaaa

SEQ ID NO: 396329 - DNA, 15 bp, Homo sapiens
tctctttagatgaaa

SEQ ID NO: 396330 - DNA, 15 bp, Homo sapiens
atctctttagatgaa

SEQ ID NO: 396331 - DNA, 15 bp, Homo sapiens
tatctctttagatga

SEQ ID NO: 396332 - DNA, 15 bp, Homo sapiens
ttatctctttagatg

SEQ ID NO: 396333 - DNA, 15 bp, Homo sapiens
tttatctctttagat

SEQ ID NO: 396334 - DNA, 15 bp, Homo sapiens
atttatctctttaga

SEQ ID NO: 396335 - DNA, 15 bp, Homo sapiens
tatttatctctttag

SEQ ID NO: 396336 - DNA, 15 bp, Homo sapiens
ctatttatctcttta

SEQ ID NO: 396337 - DNA, 15 bp, Homo sapiens
actatttatctcttt

SEQ ID NO: 396338 - DNA, 15 bp, Homo sapiens
aactatttatctctt

SEQ ID NO: 396339 - DNA, 15 bp, Homo sapiens
taactatttatctct

SEQ ID NO: 396340 - DNA, 15 bp, Homo sapiens
ataactatttatctc

SEQ ID NO: 396341 - DNA, 15 bp, Homo sapiens
gataactatttatct

SEQ ID NO: 396342 - DNA, 15 bp, Homo sapiens
tgataactatttatc

SEQ ID NO: 396343 - DNA, 15 bp, Homo sapiens
atgataactatttat

SEQ ID NO: 396344 - DNA, 15 bp, Homo sapiens
aatgataactattta

SEQ ID NO: 396345 - DNA, 15 bp, Homo sapiens
taatgataactattt

SEQ ID NO: 396346 - DNA, 15 bp, Homo sapiens
ataatgataactatt

SEQ ID NO: 396347 - DNA, 15 bp, Homo sapiens
tataatgataactat

SEQ ID NO: 396348 - DNA, 15 bp, Homo sapiens
atataatgataacta

SEQ ID NO: 396349 - DNA, 15 bp, Homo sapiens
tatataatgataact

SEQ ID NO: 396350 - DNA, 15 bp, Homo sapiens
gtatataatgataac

SEQ ID NO: 396351 - DNA, 15 bp, Homo sapiens
agtatataatgataa

SEQ ID NO: 396352 - DNA, 15 bp, Homo sapiens
gagtatataatgata

SEQ ID NO: 396353 - DNA, 15 bp, Homo sapiens
agagtatataatgat

SEQ ID NO: 396354 - DNA, 15 bp, Homo sapiens
aagagtatataatga

SEQ ID NO: 396355 - DNA, 15 bp, Homo sapiens
gaagagtatataatg

SEQ ID NO: 396356 - DNA, 15 bp, Homo sapiens
ggaagagtatataat

SEQ ID NO: 396357 - DNA, 15 bp, Homo sapiens
tggaagagtatataa

SEQ ID NO: 396358 - DNA, 15 bp, Homo sapiens
atggaagagtatata

SEQ ID NO: 396359 - DNA, 15 bp, Homo sapiens
tatggaagagtatat

SEQ ID NO: 396360 - DNA, 15 bp, Homo sapiens
atatggaagagtata

SEQ ID NO: 396361 - DNA, 15 bp, Homo sapiens
aatatggaagagtat

SEQ ID NO: 396362 - DNA, 15 bp, Homo sapiens
aaatatggaagagta

SEQ ID NO: 396363 - DNA, 15 bp, Homo sapiens
aaaatatggaagagt

SEQ ID NO: 396364 - DNA, 15 bp, Homo sapiens
gaaaatatggaagag

SEQ ID NO: 396365 - DNA, 15 bp, Homo sapiens
tgaaaatatggaaga

SEQ ID NO: 396366 - DNA, 15 bp, Homo sapiens
gtgaaaatatggaag

SEQ ID NO: 396367 - DNA, 15 bp, Homo sapiens
tgtgaaaatatggaa

SEQ ID NO: 396368 - DNA, 15 bp, Homo sapiens
ttgtgaaaatatgga

SEQ ID NO: 396369 - DNA, 15 bp, Homo sapiens
tttgtgaaaatatgg

SEQ ID NO: 396370 - DNA, 15 bp, Homo sapiens
ttttgtgaaaatatg

SEQ ID NO: 396371 - DNA, 15 bp, Homo sapiens
tttttgtgaaaatat

SEQ ID NO: 396372 - DNA, 15 bp, Homo sapiens
gtttttgtgaaaata

SEQ ID NO: 396373 - DNA, 15 bp, Homo sapiens
tgtttttgtgaaaat

SEQ ID NO: 396374 - DNA, 15 bp, Homo sapiens
atgtttttgtgaaaa

SEQ ID NO: 396375 - DNA, 15 bp, Homo sapiens
tatgtttttgtgaaa

SEQ ID NO: 396376 - DNA, 15 bp, Homo sapiens
ctatgtttttgtgaa

SEQ ID NO: 396377 - DNA, 15 bp, Homo sapiens
tctatgtttttgtga

SEQ ID NO: 396378 - DNA, 15 bp, Homo sapiens
gtctatgtttttgtg

SEQ ID NO: 396379 - DNA, 15 bp, Homo sapiens
tgtctatgtttttgt

SEQ ID NO: 396380 - DNA, 15 bp, Homo sapiens
atgtctatgtttttg

SEQ ID NO: 396381 - DNA, 15 bp, Homo sapiens
aatgtctatgttttt

SEQ ID NO: 396382 - DNA, 15 bp, Homo sapiens
taatgtctatgtttt

SEQ ID NO: 396383 - DNA, 15 bp, Homo sapiens
ataatgtctatgttt

SEQ ID NO: 396384 - DNA, 15 bp, Homo sapiens
tataatgtctatgtt

SEQ ID NO: 396385 - DNA, 15 bp, Homo sapiens
ctataatgtctatgt

SEQ ID NO: 396386 - DNA, 15 bp, Homo sapiens
cctataatgtctatg

SEQ ID NO: 396387 - DNA, 15 bp, Homo sapiens
acctataatgtctat

SEQ ID NO: 396388 - DNA, 15 bp, Homo sapiens
tacctataatgtcta

SEQ ID NO: 396389 - DNA, 15 bp, Homo sapiens
ctacctataatgtct

SEQ ID NO: 396390 - DNA, 15 bp, Homo sapiens
tctacctataatgtc

SEQ ID NO: 396391 - DNA, 15 bp, Homo sapiens
atctacctataatgt

SEQ ID NO: 396392 - DNA, 15 bp, Homo sapiens
aatctacctataatg

SEQ ID NO: 396393 - DNA, 15 bp, Homo sapiens
gaatctacctataat

SEQ ID NO: 396394 - DNA, 15 bp, Homo sapiens
tgaatctacctataa

SEQ ID NO: 396395 - DNA, 15 bp, Homo sapiens
ctgaatctacctata

SEQ ID NO: 396396 - DNA, 15 bp, Homo sapiens
tctgaatctacctat

SEQ ID NO: 396397 - DNA, 15 bp, Homo sapiens
ttctgaatctaccta

SEQ ID NO: 396398 - DNA, 15 bp, Homo sapiens
attctgaatctacct

SEQ ID NO: 396399 - DNA, 15 bp, Homo sapiens
cattctgaatctacc

SEQ ID NO: 396400 - DNA, 15 bp, Homo sapiens
tcattctgaatctac

SEQ ID NO: 396401 - DNA, 15 bp, Homo sapiens
ctcattctgaatcta

SEQ ID NO: 396402 - DNA, 15 bp, Homo sapiens
actcattctgaatct

SEQ ID NO: 396403 - DNA, 15 bp, Homo sapiens
tactcattctgaatc

SEQ ID NO: 396404 - DNA, 15 bp, Homo sapiens
ttactcattctgaat

SEQ ID NO: 396405 - DNA, 15 bp, Homo sapiens
cttactcattctgaa

SEQ ID NO: 396406 - DNA, 15 bp, Homo sapiens
tcttactcattctga

SEQ ID NO: 396407 - DNA, 15 bp, Homo sapiens
ttcttactcattctg

SEQ ID NO: 396408 - DNA, 15 bp, Homo sapiens
tttcttactcattct

SEQ ID NO: 396409 - DNA, 15 bp, Homo sapiens
atttcttactcattc

SEQ ID NO: 396410 - DNA, 15 bp, Homo sapiens
gatttcttactcatt

SEQ ID NO: 396411 - DNA, 15 bp, Homo sapiens
cgatttcttactcat

SEQ ID NO: 396412 - DNA, 15 bp, Homo sapiens
gcgatttcttactca

SEQ ID NO: 396413 - DNA, 15 bp, Homo sapiens
agcgatttcttactc

SEQ ID NO: 396414 - DNA, 15 bp, Homo sapiens
aagcgatttcttact

SEQ ID NO: 396415 - DNA, 15 bp, Homo sapiens
aaagcgatttcttac

SEQ ID NO: 396416 - DNA, 15 bp, Homo sapiens
taaagcgatttctta

SEQ ID NO: 396417 - DNA, 15 bp, Homo sapiens
ataaagcgatttctt

SEQ ID NO: 396418 - DNA, 15 bp, Homo sapiens
aataaagcgatttct

SEQ ID NO: 396419 - DNA, 15 bp, Homo sapiens
aaataaagcgatttc

SEQ ID NO: 396420 - DNA, 15 bp, Homo sapiens
aaaataaagcgattt

SEQ ID NO: 396421 - DNA, 15 bp, Homo sapiens
aaaaataaagcgatt

SEQ ID NO: 396422 - DNA, 15 bp, Homo sapiens
caaaaataaagcgat

SEQ ID NO: 396423 - DNA, 15 bp, Homo sapiens
tcaaaaataaagcga

SEQ ID NO: 396424 - DNA, 15 bp, Homo sapiens
ctcaaaaataaagcg

SEQ ID NO: 396425 - DNA, 15 bp, Homo sapiens
cctcaaaaataaagc

SEQ ID NO: 396426 - DNA, 15 bp, Homo sapiens
tcctcaaaaataaag

SEQ ID NO: 396427 - DNA, 15 bp, Homo sapiens
atcctcaaaaataaa

SEQ ID NO: 396428 - DNA, 15 bp, Homo sapiens
catcctcaaaaataa

SEQ ID NO: 396429 - DNA, 15 bp, Homo sapiens
ccatcctcaaaaata

SEQ ID NO: 396430 - DNA, 15 bp, Homo sapiens
tccatcctcaaaaat

SEQ ID NO: 396431 - DNA, 15 bp, Homo sapiens
atccatcctcaaaaa

SEQ ID NO: 396432 - DNA, 15 bp, Homo sapiens
aatccatcctcaaaa

SEQ ID NO: 396433 - DNA, 15 bp, Homo sapiens
aaatccatcctcaaa

SEQ ID NO: 396434 - DNA, 15 bp, Homo sapiens
aaaatccatcctcaa

SEQ ID NO: 396435 - DNA, 15 bp, Homo sapiens
aaaaatccatcctca

SEQ ID NO: 396436 - DNA, 15 bp, Homo sapiens
aaaaaatccatcctc

SEQ ID NO: 396437 - DNA, 15 bp, Homo sapiens
aaaaaaatccatcct

SEQ ID NO: 396438 - DNA, 15 bp, Homo sapiens
aaaaaaaatccatcc

SEQ ID NO: 396439 - DNA, 15 bp, Homo sapiens
aaaaaaaaatccatc

SEQ ID NO: 396440 - DNA, 15 bp, Homo sapiens
aaaaaaaaaatccat

SEQ ID NO: 396441 - DNA, 15 bp, Homo sapiens
aaaaaaaaaaatcca

SEQ ID NO: 396442 - DNA, 15 bp, Homo sapiens
gaaaaaaaaaaatcc

SEQ ID NO: 396443 - DNA, 15 bp, Homo sapiens
ggaaaaaaaaaaatc

SEQ ID NO: 396444 - DNA, 15 bp, Homo sapiens
gggaaaaaaaaaaat

SEQ ID NO: 396445 - DNA, 15 bp, Homo sapiens
tgggaaaaaaaaaaa

SEQ ID NO: 396446 - DNA, 15 bp, Homo sapiens
gtgggaaaaaaaaaa

SEQ ID NO: 396447 - DNA, 15 bp, Homo sapiens
tgtgggaaaaaaaaa

SEQ ID NO: 396448 - DNA, 15 bp, Homo sapiens
ctgtgggaaaaaaaa

SEQ ID NO: 396449 - DNA, 15 bp, Homo sapiens
actgtgggaaaaaaa

SEQ ID NO: 396450 - DNA, 15 bp, Homo sapiens
cactgtgggaaaaaa

SEQ ID NO: 396451 - DNA, 15 bp, Homo sapiens
ccactgtgggaaaaa

SEQ ID NO: 396452 - DNA, 15 bp, Homo sapiens
gccactgtgggaaaa

SEQ ID NO: 396453 - DNA, 15 bp, Homo sapiens
agccactgtgggaaa

SEQ ID NO: 396454 - DNA, 15 bp, Homo sapiens
aagccactgtgggaa

SEQ ID NO: 396455 - DNA, 15 bp, Homo sapiens
gaagccactgtggga

SEQ ID NO: 396456 - DNA, 15 bp, Homo sapiens
tgaagccactgtggg

SEQ ID NO: 396457 - DNA, 15 bp, Homo sapiens
ttgaagccactgtgg

SEQ ID NO: 396458 - DNA, 15 bp, Homo sapiens
attgaagccactgtg

SEQ ID NO: 396459 - DNA, 15 bp, Homo sapiens
aattgaagccactgt

SEQ ID NO: 396460 - DNA, 15 bp, Homo sapiens
aaattgaagccactg

SEQ ID NO: 396461 - DNA, 15 bp, Homo sapiens
aaaattgaagccact

SEQ ID NO: 396462 - DNA, 15 bp, Homo sapiens
caaaattgaagccac

SEQ ID NO: 396463 - DNA, 15 bp, Homo sapiens
tcaaaattgaagcca

SEQ ID NO: 396464 - DNA, 15 bp, Homo sapiens
atcaaaattgaagcc

SEQ ID NO: 396465 - DNA, 15 bp, Homo sapiens
tatcaaaattgaagc

SEQ ID NO: 396466 - DNA, 15 bp, Homo sapiens
atatcaaaattgaag

SEQ ID NO: 396467 - DNA, 15 bp, Homo sapiens
catatcaaaattgaa

SEQ ID NO: 396468 - DNA, 15 bp, Homo sapiens
gcatatcaaaattga

SEQ ID NO: 396469 - DNA, 15 bp, Homo sapiens
agcatatcaaaattg

SEQ ID NO: 396470 - DNA, 15 bp, Homo sapiens
cagcatatcaaaatt

SEQ ID NO: 396471 - DNA, 15 bp, Homo sapiens
ccagcatatcaaaat

SEQ ID NO: 396472 - DNA, 15 bp, Homo sapiens
gccagcatatcaaaa

SEQ ID NO: 396473 - DNA, 15 bp, Homo sapiens
agccagcatatcaaa

SEQ ID NO: 396474 - DNA, 15 bp, Homo sapiens
tagccagcatatcaa

SEQ ID NO: 396475 - DNA, 15 bp, Homo sapiens
ctagccagcatatca

SEQ ID NO: 396476 - DNA, 15 bp, Homo sapiens
gctagccagcatatc

SEQ ID NO: 396477 - DNA, 15 bp, Homo sapiens
tgctagccagcatat

SEQ ID NO: 396478 - DNA, 15 bp, Homo sapiens
atgctagccagcata

SEQ ID NO: 396479 - DNA, 15 bp, Homo sapiens
gatgctagccagcat

SEQ ID NO: 396480 - DNA, 15 bp, Homo sapiens
tgatgctagccagca

SEQ ID NO: 396481 - DNA, 15 bp, Homo sapiens
gtgatgctagccagc

SEQ ID NO: 396482 - DNA, 15 bp, Homo sapiens
tgtgatgctagccag

SEQ ID NO: 396483 - DNA, 15 bp, Homo sapiens
ctgtgatgctagcca

SEQ ID NO: 396484 - DNA, 15 bp, Homo sapiens
actgtgatgctagcc

SEQ ID NO: 396485 - DNA, 15 bp, Homo sapiens
gactgtgatgctagc

SEQ ID NO: 396486 - DNA, 15 bp, Homo sapiens
ggactgtgatgctag

SEQ ID NO: 396487 - DNA, 15 bp, Homo sapiens
tggactgtgatgcta

SEQ ID NO: 396488 - DNA, 15 bp, Homo sapiens
ctggactgtgatgct

SEQ ID NO: 396489 - DNA, 15 bp, Homo sapiens
gctggactgtgatgc

SEQ ID NO: 396490 - DNA, 15 bp, Homo sapiens
tgctggactgtgatg

SEQ ID NO: 396491 - DNA, 15 bp, Homo sapiens
ctgctggactgtgat

SEQ ID NO: 396492 - DNA, 15 bp, Homo sapiens
cctgctggactgtga

SEQ ID NO: 396493 - DNA, 15 bp, Homo sapiens
tcctgctggactgtg

SEQ ID NO: 396494 - DNA, 15 bp, Homo sapiens
atcctgctggactgt

SEQ ID NO: 396495 - DNA, 15 bp, Homo sapiens
gatcctgctggactg

SEQ ID NO: 396496 - DNA, 15 bp, Homo sapiens
tgatcctgctggact

SEQ ID NO: 396497 - DNA, 15 bp, Homo sapiens
atgatcctgctggac

SEQ ID NO: 396498 - DNA, 15 bp, Homo sapiens
tatgatcctgctgga

SEQ ID NO: 396499 - DNA, 15 bp, Homo sapiens
atatgatcctgctgg

SEQ ID NO: 396500 - DNA, 15 bp, Homo sapiens
gatatgatcctgctg

SEQ ID NO: 396501 - DNA, 15 bp, Homo sapiens
agatatgatcctgct

SEQ ID NO: 396502 - DNA, 15 bp, Homo sapiens
aagatatgatcctgc

SEQ ID NO: 396503 - DNA, 15 bp, Homo sapiens
aaagatatgatcctg

SEQ ID NO: 396504 - DNA, 15 bp, Homo sapiens
aaaagatatgatcct

SEQ ID NO: 396505 - DNA, 15 bp, Homo sapiens
aaaaagatatgatcc

SEQ ID NO: 396506 - DNA, 15 bp, Homo sapiens
taaaaagatatgatc

SEQ ID NO: 396507 - DNA, 15 bp, Homo sapiens
ttaaaaagatatgat

SEQ ID NO: 396508 - DNA, 15 bp, Homo sapiens
tttaaaaagatatga

SEQ ID NO: 396509 - DNA, 15 bp, Homo sapiens
ttttaaaaagatatg

SEQ ID NO: 396510 - DNA, 15 bp, Homo sapiens
tttttaaaaagatat

SEQ ID NO: 396511 - DNA, 15 bp, Homo sapiens
gtttttaaaaagata

SEQ ID NO: 396512 - DNA, 15 bp, Homo sapiens
agtttttaaaaagat

SEQ ID NO: 396513 - DNA, 15 bp, Homo sapiens
aagtttttaaaaaga

SEQ ID NO: 396514 - DNA, 15 bp, Homo sapiens
taagtttttaaaaag

SEQ ID NO: 396515 - DNA, 15 bp, Homo sapiens
ataagtttttaaaaa

SEQ ID NO: 396516 - DNA, 15 bp, Homo sapiens
tataagtttttaaaa

SEQ ID NO: 396517 - DNA, 15 bp, Homo sapiens
gtataagtttttaaa

SEQ ID NO: 396518 - DNA, 15 bp, Homo sapiens
tgtataagtttttaa

SEQ ID NO: 396519 - DNA, 15 bp, Homo sapiens
ttgtataagttttta

SEQ ID NO: 396520 - DNA, 15 bp, Homo sapiens
attgtataagttttt

SEQ ID NO: 396521 - DNA, 15 bp, Homo sapiens
cattgtataagtttt

SEQ ID NO: 396522 - DNA, 15 bp, Homo sapiens
tcattgtataagttt

SEQ ID NO: 396523 - DNA, 15 bp, Homo sapiens
ttcattgtataagtt

SEQ ID NO: 396524 - DNA, 15 bp, Homo sapiens
tttcattgtataagt

SEQ ID NO: 396525 - DNA, 15 bp, Homo sapiens
atttcattgtataag

SEQ ID NO: 396526 - DNA, 15 bp, Homo sapiens
aatttcattgtataa

SEQ ID NO: 396527 - DNA, 15 bp, Homo sapiens
caatttcattgtata

SEQ ID NO: 396528 - DNA, 15 bp, Homo sapiens
gcaatttcattgtat

SEQ ID NO: 396529 - DNA, 15 bp, Homo sapiens
agcaatttcattgta

SEQ ID NO: 396530 - DNA, 15 bp, Homo sapiens
aagcaatttcattgt

SEQ ID NO: 396531 - DNA, 15 bp, Homo sapiens
aaagcaatttcattg

SEQ ID NO: 396532 - DNA, 15 bp, Homo sapiens
caaagcaatttcatt

SEQ ID NO: 396533 - DNA, 15 bp, Homo sapiens
ccaaagcaatttcat

SEQ ID NO: 396534 - DNA, 15 bp, Homo sapiens
accaaagcaatttca

SEQ ID NO: 396535 - DNA, 15 bp, Homo sapiens
caccaaagcaatttc

SEQ ID NO: 396536 - DNA, 15 bp, Homo sapiens
gcaccaaagcaattt

SEQ ID NO: 396537 - DNA, 15 bp, Homo sapiens
tgcaccaaagcaatt

SEQ ID NO: 396538 - DNA, 15 bp, Homo sapiens
ctgcaccaaagcaat

SEQ ID NO: 396539 - DNA, 15 bp, Homo sapiens
tctgcaccaaagcaa

SEQ ID NO: 396540 - DNA, 15 bp, Homo sapiens
ctctgcaccaaagca

SEQ ID NO: 396541 - DNA, 15 bp, Homo sapiens
tctctgcaccaaagc

SEQ ID NO: 396542 - DNA, 15 bp, Homo sapiens
ttctctgcaccaaag

SEQ ID NO: 396543 - DNA, 15 bp, Homo sapiens
cttctctgcaccaaa

SEQ ID NO: 396544 - DNA, 15 bp, Homo sapiens
ccttctctgcaccaa

SEQ ID NO: 396545 - DNA, 15 bp, Homo sapiens
gccttctctgcacca

SEQ ID NO: 396546 - DNA, 15 bp, Homo sapiens
ggccttctctgcacc

SEQ ID NO: 396547 - DNA, 15 bp, Homo sapiens
aacagagcttaacac

SEQ ID NO: 396548 - DNA, 15 bp, Homo sapiens
aaacagagcttaaca

SEQ ID NO: 396549 - DNA, 15 bp, Homo sapiens
gaaacagagcttaac

SEQ ID NO: 396550 - DNA, 15 bp, Homo sapiens
agaaacagagcttaa

SEQ ID NO: 396551 - DNA, 15 bp, Homo sapiens
aagaaacagagctta

SEQ ID NO: 396552 - DNA, 15 bp, Homo sapiens
caagaaacagagctt

SEQ ID NO: 396553 - DNA, 15 bp, Homo sapiens
gcaagaaacagagct

SEQ ID NO: 396554 - DNA, 15 bp, Homo sapiens
agcaagaaacagagc

SEQ ID NO: 396555 - DNA, 15 bp, Homo sapiens
aagcaagaaacagag

SEQ ID NO: 396556 - DNA, 15 bp, Homo sapiens
taagcaagaaacaga

SEQ ID NO: 396557 - DNA, 15 bp, Homo sapiens
ataagcaagaaacag

SEQ ID NO: 396558 - DNA, 15 bp, Homo sapiens
tataagcaagaaaca

SEQ ID NO: 396559 - DNA, 15 bp, Homo sapiens
ctataagcaagaaac

SEQ ID NO: 396560 - DNA, 15 bp, Homo sapiens
cctataagcaagaaa

SEQ ID NO: 396561 - DNA, 15 bp, Homo sapiens
acctataagcaagaa

SEQ ID NO: 396562 - DNA, 15 bp, Homo sapiens
tacctataagcaaga

SEQ ID NO: 396563 - DNA, 15 bp, Homo sapiens
ctacctataagcaag

SEQ ID NO: 396564 - DNA, 15 bp, Homo sapiens
tctacctataagcaa

SEQ ID NO: 396565 - DNA, 15 bp, Homo sapiens
atctacctataagca

SEQ ID NO: 396566 - DNA, 15 bp, Homo sapiens
aatctacctataagc

SEQ ID NO: 396567 - DNA, 15 bp, Homo sapiens
gaatctacctataag

SEQ ID NO: 396568 - DNA, 15 bp, Homo sapiens
cgaatctacctataa

SEQ ID NO: 396569 - DNA, 15 bp, Homo sapiens
acgaatctacctata

SEQ ID NO: 396570 - DNA, 15 bp, Homo sapiens
tacgaatctacctat

SEQ ID NO: 396571 - DNA, 15 bp, Homo sapiens
gtacgaatctaccta

SEQ ID NO: 396572 - DNA, 15 bp, Homo sapiens
agtacgaatctacct

SEQ ID NO: 396573 - DNA, 15 bp, Homo sapiens
cagtacgaatctacc

SEQ ID NO: 396574 - DNA, 15 bp, Homo sapiens
acagtacgaatctac

SEQ ID NO: 396575 - DNA, 15 bp, Homo sapiens
gacagtacgaatcta

SEQ ID NO: 396576 - DNA, 15 bp, Homo sapiens
tgacagtacgaatct

SEQ ID NO: 396577 - DNA, 15 bp, Homo sapiens
ctgacagtacgaatc

SEQ ID NO: 396578 - DNA, 15 bp, Homo sapiens
actgacagtacgaat

SEQ ID NO: 396579 - DNA, 15 bp, Homo sapiens
cactgacagtacgaa

SEQ ID NO: 396580 - DNA, 15 bp, Homo sapiens
ccactgacagtacga

SEQ ID NO: 396581 - DNA, 15 bp, Homo sapiens
tccactgacagtacg

SEQ ID NO: 396582 - DNA, 15 bp, Homo sapiens
atccactgacagtac

SEQ ID NO: 396583 - DNA, 15 bp, Homo sapiens
tatccactgacagta

SEQ ID NO: 396584 - DNA, 15 bp, Homo sapiens
atatccactgacagt

SEQ ID NO: 396585 - DNA, 15 bp, Homo sapiens
gatatccactgacag

SEQ ID NO: 396586 - DNA, 15 bp, Homo sapiens
cgatatccactgaca

SEQ ID NO: 396587 - DNA, 15 bp, Homo sapiens
acgatatccactgac

SEQ ID NO: 396588 - DNA, 15 bp, Homo sapiens
cacgatatccactga

SEQ ID NO: 396589 - DNA, 15 bp, Homo sapiens
acacgatatccactg

SEQ ID NO: 396590 - DNA, 15 bp, Homo sapiens
aacacgatatccact

SEQ ID NO: 396591 - DNA, 15 bp, Homo sapiens
caacacgatatccac

SEQ ID NO: 396592 - DNA, 15 bp, Homo sapiens
tcaacacgatatcca

SEQ ID NO: 396593 - DNA, 15 bp, Homo sapiens
ttcaacacgatatcc

SEQ ID NO: 396594 - DNA, 15 bp, Homo sapiens
tttcaacacgatatc

SEQ ID NO: 396595 - DNA, 15 bp, Homo sapiens
ttttcaacacgatat

SEQ ID NO: 396596 - DNA, 15 bp, Homo sapiens
attttcaacacgata

SEQ ID NO: 396597 - DNA, 15 bp, Homo sapiens
cattttcaacacgat

SEQ ID NO: 396598 - DNA, 15 bp, Homo sapiens
tcattttcaacacga

SEQ ID NO: 396599 - DNA, 15 bp, Homo sapiens
ttcattttcaacacg

SEQ ID NO: 396600 - DNA, 15 bp, Homo sapiens
attcattttcaacac

SEQ ID NO: 396601 - DNA, 15 bp, Homo sapiens
aattcattttcaaca

SEQ ID NO: 396602 - DNA, 15 bp, Homo sapiens
caattcattttcaac

SEQ ID NO: 396603 - DNA, 15 bp, Homo sapiens
gcaattcattttcaa

SEQ ID NO: 396604 - DNA, 15 bp, Homo sapiens
ggcaattcattttca

SEQ ID NO: 396605 - DNA, 15 bp, Homo sapiens
aggcaattcattttc

SEQ ID NO: 396606 - DNA, 15 bp, Homo sapiens
aaggcaattcatttt

SEQ ID NO: 396607 - DNA, 15 bp, Homo sapiens
gaaggcaattcattt

SEQ ID NO: 396608 - DNA, 15 bp, Homo sapiens
agaaggcaattcatt

SEQ ID NO: 396609 - DNA, 15 bp, Homo sapiens
aagaaggcaattcat

SEQ ID NO: 396610 - DNA, 15 bp, Homo sapiens
aaagaaggcaattca

SEQ ID NO: 396611 - DNA, 15 bp, Homo sapiens
caaagaaggcaattc

SEQ ID NO: 396612 - DNA, 15 bp, Homo sapiens
ccaaagaaggcaatt

SEQ ID NO: 396613 - DNA, 15 bp, Homo sapiens
gccaaagaaggcaat

SEQ ID NO: 396614 - DNA, 15 bp, Homo sapiens
tgccaaagaaggcaa

SEQ ID NO: 396615 - DNA, 15 bp, Homo sapiens
gtgccaaagaaggca

SEQ ID NO: 396616 - DNA, 15 bp, Homo sapiens
cgtgccaaagaaggc

SEQ ID NO: 396617 - DNA, 15 bp, Homo sapiens
acgtgccaaagaagg

SEQ ID NO: 396618 - DNA, 15 bp, Homo sapiens
cacgtgccaaagaag

SEQ ID NO: 396619 - DNA, 15 bp, Homo sapiens
acacgtgccaaagaa

SEQ ID NO: 396620 - DNA, 15 bp, Homo sapiens
tacacgtgccaaaga

SEQ ID NO: 396621 - DNA, 15 bp, Homo sapiens
atacacgtgccaaag

SEQ ID NO: 396622 - DNA, 15 bp, Homo sapiens
tatacacgtgccaaa

SEQ ID NO: 396623 - DNA, 15 bp, Homo sapiens
gtatacacgtgccaa

SEQ ID NO: 396624 - DNA, 15 bp, Homo sapiens
ggtatacacgtgcca

SEQ ID NO: 396625 - DNA, 15 bp, Homo sapiens
aggtatacacgtgcc

SEQ ID NO: 396626 - DNA, 15 bp, Homo sapiens
taggtatacacgtgc

SEQ ID NO: 396627 - DNA, 15 bp, Homo sapiens
ataggtatacacgtg

SEQ ID NO: 396628 - DNA, 15 bp, Homo sapiens
cataggtatacacgt

SEQ ID NO: 396629 - DNA, 15 bp, Homo sapiens
acataggtatacacg

SEQ ID NO: 396630 - DNA, 15 bp, Homo sapiens
tacataggtatacac

SEQ ID NO: 396631 - DNA, 15 bp, Homo sapiens
ttacataggtataca

SEQ ID NO: 396632 - DNA, 15 bp, Homo sapiens
tgtgcaggtttgtta

SEQ ID NO: 396633 - DNA, 15 bp, Homo sapiens
atgtgcaggtttgtt

SEQ ID NO: 396634 - DNA, 15 bp, Homo sapiens
aatgtgcaggtttgt

SEQ ID NO: 396635 - DNA, 15 bp, Homo sapiens
gaatgtgcaggtttg

SEQ ID NO: 396636 - DNA, 15 bp, Homo sapiens
agaatgtgcaggttt

SEQ ID NO: 396637 - DNA, 15 bp, Homo sapiens
cagaatgtgcaggtt

SEQ ID NO: 396638 - DNA, 15 bp, Homo sapiens
gcagaatgtgcaggt

SEQ ID NO: 396639 - DNA, 15 bp, Homo sapiens
tgcagaatgtgcagg

SEQ ID NO: 396640 - DNA, 15 bp, Homo sapiens
gtgcagaatgtgcag

SEQ ID NO: 396641 - DNA, 15 bp, Homo sapiens
tgtgcagaatgtgca

SEQ ID NO: 396642 - DNA, 15 bp, Homo sapiens
atgtgcagaatgtgc

SEQ ID NO: 396643 - DNA, 15 bp, Homo sapiens
catgtgcagaatgtg

SEQ ID NO: 396644 - DNA, 15 bp, Homo sapiens
acatgtgcagaatgt

SEQ ID NO: 396645 - DNA, 15 bp, Homo sapiens
tacatgtgcagaatg

SEQ ID NO: 396646 - DNA, 15 bp, Homo sapiens
gtacatgtgcagaat

SEQ ID NO: 396647 - DNA, 15 bp, Homo sapiens
ggtacatgtgcagaa

SEQ ID NO: 396648 - DNA, 15 bp, Homo sapiens
gggtacatgtgcaga

SEQ ID NO: 396649 - DNA, 15 bp, Homo sapiens
ggggtacatgtgcag

SEQ ID NO: 396650 - DNA, 15 bp, Homo sapiens
tggggtacatgtgca

SEQ ID NO: 396651 - DNA, 15 bp, Homo sapiens
ctggggtacatgtgc

SEQ ID NO: 396652 - DNA, 15 bp, Homo sapiens
tctggggtacatgtg

SEQ ID NO: 396653 - DNA, 15 bp, Homo sapiens
ttctggggtacatgt

SEQ ID NO: 396654 - DNA, 15 bp, Homo sapiens
gttctggggtacatg

SEQ ID NO: 396655 - DNA, 15 bp, Homo sapiens
agttctggggtacat

SEQ ID NO: 396656 - DNA, 15 bp, Homo sapiens
aagttctggggtaca

SEQ ID NO: 396657 - DNA, 15 bp, Homo sapiens
taagttctggggtac

SEQ ID NO: 396658 - DNA, 15 bp, Homo sapiens
ttaagttctggggta

SEQ ID NO: 396659 - DNA, 15 bp, Homo sapiens
tttaagttctggggt

SEQ ID NO: 396660 - DNA, 15 bp, Homo sapiens
ctttaagttctgggg

SEQ ID NO: 396661 - DNA, 15 bp, Homo sapiens
attattatactttaa

SEQ ID NO: 396662 - DNA, 15 bp, Homo sapiens
tattattatacttta

SEQ ID NO: 396663 - DNA, 15 bp, Homo sapiens
ttattattatacttt

SEQ ID NO: 396664 - DNA, 15 bp, Homo sapiens
attattattatactt

SEQ ID NO: 396665 - DNA, 15 bp, Homo sapiens
tattattattatact

SEQ ID NO: 396666 - DNA, 15 bp, Homo sapiens
ttattattattatac

SEQ ID NO: 396667 - DNA, 15 bp, Homo sapiens
attattattattata

SEQ ID NO: 396668 - DNA, 15 bp, Homo sapiens
tattattattattat

SEQ ID NO: 396669 - DNA, 15 bp, Homo sapiens
ttattattattatta

SEQ ID NO: 396670 - DNA, 15 bp, Homo sapiens
tttattattattatt

SEQ ID NO: 396671 - DNA, 15 bp, Homo sapiens
ttttattattattat

SEQ ID NO: 396672 - DNA, 15 bp, Homo sapiens
cttttattattatta

SEQ ID NO: 396673 - DNA, 15 bp, Homo sapiens
tcttttattattatt

SEQ ID NO: 396674 - DNA, 15 bp, Homo sapiens
ttcttttattattat

SEQ ID NO: 396675 - DNA, 15 bp, Homo sapiens
cttcttttattatta

SEQ ID NO: 396676 - DNA, 15 bp, Homo sapiens
tcttcttttattatt

SEQ ID NO: 396677 - DNA, 15 bp, Homo sapiens
atcttcttttattat

SEQ ID NO: 396678 - DNA, 15 bp, Homo sapiens
aatcttcttttatta

SEQ ID NO: 396679 - DNA, 15 bp, Homo sapiens
gaatcttcttttatt

SEQ ID NO: 396680 - DNA, 15 bp, Homo sapiens
ggaatcttcttttat

SEQ ID NO: 396681 - DNA, 15 bp, Homo sapiens
gggaatcttctttta

SEQ ID NO: 396682 - DNA, 15 bp, Homo sapiens
agggaatcttctttt

SEQ ID NO: 396683 - DNA, 15 bp, Homo sapiens
tagggaatcttcttt

SEQ ID NO: 396684 - DNA, 15 bp, Homo sapiens
ttagggaatcttctt

SEQ ID NO: 396685 - DNA, 15 bp, Homo sapiens
cttagggaatcttct

SEQ ID NO: 396686 - DNA, 15 bp, Homo sapiens
acttagggaatcttc

SEQ ID NO: 396687 - DNA, 15 bp, Homo sapiens
gacttagggaatctt

SEQ ID NO: 396688 - DNA, 15 bp, Homo sapiens
agacttagggaatct

SEQ ID NO: 396689 - DNA, 15 bp, Homo sapiens
cagacttagggaatc

SEQ ID NO: 396690 - DNA, 15 bp, Homo sapiens
gcagacttagggaat

SEQ ID NO: 396691 - DNA, 15 bp, Homo sapiens
tgcagacttagggaa

SEQ ID NO: 396692 - DNA, 15 bp, Homo sapiens
atgcagacttaggga

SEQ ID NO: 396693 - DNA, 15 bp, Homo sapiens
aatgcagacttaggg

SEQ ID NO: 396694 - DNA, 15 bp, Homo sapiens
gaatgcagacttagg

SEQ ID NO: 396695 - DNA, 15 bp, Homo sapiens
tgaatgcagacttag

SEQ ID NO: 396696 - DNA, 15 bp, Homo sapiens
ctgaatgcagactta

SEQ ID NO: 396697 - DNA, 15 bp, Homo sapiens
actgaatgcagactt

SEQ ID NO: 396698 - DNA, 15 bp, Homo sapiens
cactgaatgcagact

SEQ ID NO: 396699 - DNA, 15 bp, Homo sapiens
acactgaatgcagac

SEQ ID NO: 396700 - DNA, 15 bp, Homo sapiens
aacactgaatgcaga

SEQ ID NO: 396701 - DNA, 15 bp, Homo sapiens
taacactgaatgcag

SEQ ID NO: 396702 - DNA, 15 bp, Homo sapiens
ctaacactgaatgca

SEQ ID NO: 396703 - DNA, 15 bp, Homo sapiens
cctaacactgaatgc

SEQ ID NO: 396704 - DNA, 15 bp, Homo sapiens
tcctaacactgaatg

SEQ ID NO: 396705 - DNA, 15 bp, Homo sapiens
gtcctaacactgaat

SEQ ID NO: 396706 - DNA, 15 bp, Homo sapiens
tgtcctaacactgaa

SEQ ID NO: 396707 - DNA, 15 bp, Homo sapiens
ttgtcctaacactga

SEQ ID NO: 396708 - DNA, 15 bp, Homo sapiens
cttgtcctaacactg

SEQ ID NO: 396709 - DNA, 15 bp, Homo sapiens
acttgtcctaacact

SEQ ID NO: 396710 - DNA, 15 bp, Homo sapiens
cacttgtcctaacac

SEQ ID NO: 396711 - DNA, 15 bp, Homo sapiens
acacttgtcctaaca

SEQ ID NO: 396712 - DNA, 15 bp, Homo sapiens
tacacttgtcctaac

SEQ ID NO: 396713 - DNA, 15 bp, Homo sapiens
atacacttgtcctaa

SEQ ID NO: 396714 - DNA, 15 bp, Homo sapiens
aatacacttgtccta

SEQ ID NO: 396715 - DNA, 15 bp, Homo sapiens
aaatacacttgtcct

SEQ ID NO: 396716 - DNA, 15 bp, Homo sapiens
aaaatacacttgtcc

SEQ ID NO: 396717 - DNA, 15 bp, Homo sapiens
gaaaatacacttgtc

SEQ ID NO: 396718 - DNA, 15 bp, Homo sapiens
agaaaatacacttgt

SEQ ID NO: 396719 - DNA, 15 bp, Homo sapiens
aagaaaatacacttg

SEQ ID NO: 396720 - DNA, 15 bp, Homo sapiens
aaagaaaatacactt

SEQ ID NO: 396721 - DNA, 15 bp, Homo sapiens
caaagaaaatacact

SEQ ID NO: 396722 - DNA, 15 bp, Homo sapiens
acaaagaaaatacac

SEQ ID NO: 396723 - DNA, 15 bp, Homo sapiens
cacaaagaaaataca

SEQ ID NO: 396724 - DNA, 15 bp, Homo sapiens
acacaaagaaaatac

SEQ ID NO: 396725 - DNA, 15 bp, Homo sapiens
aacacaaagaaaata

SEQ ID NO: 396726 - DNA, 15 bp, Homo sapiens
gaacacaaagaaaat

SEQ ID NO: 396727 - DNA, 15 bp, Homo sapiens
agaacacaaagaaaa

SEQ ID NO: 396728 - DNA, 15 bp, Homo sapiens
cagaacacaaagaaa

SEQ ID NO: 396729 - DNA, 15 bp, Homo sapiens
tcagaacacaaagaa

SEQ ID NO: 396730 - DNA, 15 bp, Homo sapiens
ctcagaacacaaaga

SEQ ID NO: 396731 - DNA, 15 bp, Homo sapiens
tctcagaacacaaag

SEQ ID NO: 396732 - DNA, 15 bp, Homo sapiens
gtctcagaacacaaa

SEQ ID NO: 396733 - DNA, 15 bp, Homo sapiens
tgtctcagaacacaa

SEQ ID NO: 396734 - DNA, 15 bp, Homo sapiens
atgtctcagaacaca

SEQ ID NO: 396735 - DNA, 15 bp, Homo sapiens
tatgtctcagaacac

SEQ ID NO: 396736 - DNA, 15 bp, Homo sapiens
ctatgtctcagaaca

SEQ ID NO: 396737 - DNA, 15 bp, Homo sapiens
gctatgtctcagaac

SEQ ID NO: 396738 - DNA, 15 bp, Homo sapiens
agctatgtctcagaa

SEQ ID NO: 396739 - DNA, 15 bp, Homo sapiens
aagctatgtctcaga

SEQ ID NO: 396740 - DNA, 15 bp, Homo sapiens
aaagctatgtctcag

SEQ ID NO: 396741 - DNA, 15 bp, Homo sapiens
gaaagctatgtctca

SEQ ID NO: 396742 - DNA, 15 bp, Homo sapiens
agaaagctatgtctc

SEQ ID NO: 396743 - DNA, 15 bp, Homo sapiens
aagaaagctatgtct

SEQ ID NO: 396744 - DNA, 15 bp, Homo sapiens
caagaaagctatgtc

SEQ ID NO: 396745 - DNA, 15 bp, Homo sapiens
ccaagaaagctatgt

SEQ ID NO: 396746 - DNA, 15 bp, Homo sapiens
gccaagaaagctatg

SEQ ID NO: 396747 - DNA, 15 bp, Homo sapiens
ggccaagaaagctat

SEQ ID NO: 396748 - DNA, 15 bp, Homo sapiens
aggccaagaaagcta

SEQ ID NO: 396749 - DNA, 15 bp, Homo sapiens
aaggccaagaaagct

SEQ ID NO: 396750 - DNA, 15 bp, Homo sapiens
aaaggccaagaaagc

SEQ ID NO: 396751 - DNA, 15 bp, Homo sapiens
caaaggccaagaaag

SEQ ID NO: 396752 - DNA, 15 bp, Homo sapiens
tcaaaggccaagaaa

SEQ ID NO: 396753 - DNA, 15 bp, Homo sapiens
atcaaaggccaagaa

SEQ ID NO: 396754 - DNA, 15 bp, Homo sapiens
catcaaaggccaaga

SEQ ID NO: 396755 - DNA, 15 bp, Homo sapiens
acatcaaaggccaag

SEQ ID NO: 396756 - DNA, 15 bp, Homo sapiens
gacatcaaaggccaa

SEQ ID NO: 396757 - DNA, 15 bp, Homo sapiens
tgacatcaaaggcca

SEQ ID NO: 396758 - DNA, 15 bp, Homo sapiens
ttgacatcaaaggcc

SEQ ID NO: 396759 - DNA, 15 bp, Homo sapiens
gttgacatcaaaggc

SEQ ID NO: 396760 - DNA, 15 bp, Homo sapiens
ggttgacatcaaagg

SEQ ID NO: 396761 - DNA, 15 bp, Homo sapiens
aggttgacatcaaag

SEQ ID NO: 396762 - DNA, 15 bp, Homo sapiens
aaggttgacatcaaa

SEQ ID NO: 396763 - DNA, 15 bp, Homo sapiens
aaaggttgacatcaa

SEQ ID NO: 396764 - DNA, 15 bp, Homo sapiens
aaaaggttgacatca

SEQ ID NO: 396765 - DNA, 15 bp, Homo sapiens
caaaaggttgacatc

SEQ ID NO: 396766 - DNA, 15 bp, Homo sapiens
ccaaaaggttgacat

SEQ ID NO: 396767 - DNA, 15 bp, Homo sapiens
tccaaaaggttgaca

SEQ ID NO: 396768 - DNA, 15 bp, Homo sapiens
ctccaaaaggttgac

SEQ ID NO: 396769 - DNA, 15 bp, Homo sapiens
cctccaaaaggttga

SEQ ID NO: 396770 - DNA, 15 bp, Homo sapiens
gcctccaaaaggttg

SEQ ID NO: 396771 - DNA, 15 bp, Homo sapiens
agcctccaaaaggtt

SEQ ID NO: 396772 - DNA, 15 bp, Homo sapiens
tagcctccaaaaggt

SEQ ID NO: 396773 - DNA, 15 bp, Homo sapiens
atagcctccaaaagg

SEQ ID NO: 396774 - DNA, 15 bp, Homo sapiens
aatagcctccaaaag

SEQ ID NO: 396775 - DNA, 15 bp, Homo sapiens
aaatagcctccaaaa

SEQ ID NO: 396776 - DNA, 15 bp, Homo sapiens
aaaatagcctccaaa

SEQ ID NO: 396777 - DNA, 15 bp, Homo sapiens
aaaaatagcctccaa

SEQ ID NO: 396778 - DNA, 15 bp, Homo sapiens
aaaaaatagcctcca

SEQ ID NO: 396779 - DNA, 15 bp, Homo sapiens
taaaaaatagcctcc

SEQ ID NO: 396780 - DNA, 15 bp, Homo sapiens
ctaaaaaatagcctc

SEQ ID NO: 396781 - DNA, 15 bp, Homo sapiens
cctaaaaaatagcct

SEQ ID NO: 396782 - DNA, 15 bp, Homo sapiens
acctaaaaaatagcc

SEQ ID NO: 396783 - DNA, 15 bp, Homo sapiens
aacctaaaaaatagc

SEQ ID NO: 396784 - DNA, 15 bp, Homo sapiens
aaacctaaaaaatag

SEQ ID NO: 396785 - DNA, 15 bp, Homo sapiens
caaacctaaaaaata

SEQ ID NO: 396786 - DNA, 15 bp, Homo sapiens
tcaaacctaaaaaat

SEQ ID NO: 396787 - DNA, 15 bp, Homo sapiens
ttcaaacctaaaaaa

SEQ ID NO: 396788 - DNA, 15 bp, Homo sapiens
tttcaaacctaaaaa

SEQ ID NO: 396789 - DNA, 15 bp, Homo sapiens
gtttcaaacctaaaa

SEQ ID NO: 396790 - DNA, 15 bp, Homo sapiens
agtttcaaacctaaa

SEQ ID NO: 396791 - DNA, 15 bp, Homo sapiens
cagtttcaaacctaa

SEQ ID NO: 396792 - DNA, 15 bp, Homo sapiens
acagtttcaaaccta

SEQ ID NO: 396793 - DNA, 15 bp, Homo sapiens
tacagtttcaaacct

SEQ ID NO: 396794 - DNA, 15 bp, Homo sapiens
gtacagtttcaaacc

SEQ ID NO: 396795 - DNA, 15 bp, Homo sapiens
agtacagtttcaaac

SEQ ID NO: 396796 - DNA, 15 bp, Homo sapiens
aagtacagtttcaaa

SEQ ID NO: 396797 - DNA, 15 bp, Homo sapiens
taagtacagtttcaa

SEQ ID NO: 396798 - DNA, 15 bp, Homo sapiens
ttaagtacagtttca

SEQ ID NO: 396799 - DNA, 15 bp, Homo sapiens
tttaagtacagtttc

SEQ ID NO: 396800 - DNA, 15 bp, Homo sapiens
ttttaagtacagttt

SEQ ID NO: 396801 - DNA, 15 bp, Homo sapiens
attttaagtacagtt

SEQ ID NO: 396802 - DNA, 15 bp, Homo sapiens
tattttaagtacagt

SEQ ID NO: 396803 - DNA, 15 bp, Homo sapiens
atattttaagtacag

SEQ ID NO: 396804 - DNA, 15 bp, Homo sapiens
aatattttaagtaca

SEQ ID NO: 396805 - DNA, 15 bp, Homo sapiens
gaatattttaagtac

SEQ ID NO: 396806 - DNA, 15 bp, Homo sapiens
tgaatattttaagta

SEQ ID NO: 396807 - DNA, 15 bp, Homo sapiens
ctgaatattttaagt

SEQ ID NO: 396808 - DNA, 15 bp, Homo sapiens
cctgaatattttaag

SEQ ID NO: 396809 - DNA, 15 bp, Homo sapiens
tcctgaatattttaa

SEQ ID NO: 396810 - DNA, 15 bp, Homo sapiens
ttcctgaatatttta

SEQ ID NO: 396811 - DNA, 15 bp, Homo sapiens
tttcctgaatatttt

SEQ ID NO: 396812 - DNA, 15 bp, Homo sapiens
ttttcctgaatattt

SEQ ID NO: 396813 - DNA, 15 bp, Homo sapiens
attttcctgaatatt

SEQ ID NO: 396814 - DNA, 15 bp, Homo sapiens
tattttcctgaatat

SEQ ID NO: 396815 - DNA, 15 bp, Homo sapiens
ctattttcctgaata

SEQ ID NO: 396816 - DNA, 15 bp, Homo sapiens
actattttcctgaat

SEQ ID NO: 396817 - DNA, 15 bp, Homo sapiens
gactattttcctgaa

SEQ ID NO: 396818 - DNA, 15 bp, Homo sapiens
tgactattttcctga

SEQ ID NO: 396819 - DNA, 15 bp, Homo sapiens
gtgactattttcctg

SEQ ID NO: 396820 - DNA, 15 bp, Homo sapiens
tgtgactattttcct

SEQ ID NO: 396821 - DNA, 15 bp, Homo sapiens
atgtgactattttcc

SEQ ID NO: 396822 - DNA, 15 bp, Homo sapiens
aatgtgactattttc

SEQ ID NO: 396823 - DNA, 15 bp, Homo sapiens
aaatgtgactatttt

SEQ ID NO: 396824 - DNA, 15 bp, Homo sapiens
caaatgtgactattt

SEQ ID NO: 396825 - DNA, 15 bp, Homo sapiens
tcaaatgtgactatt

SEQ ID NO: 396826 - DNA, 15 bp, Homo sapiens
ttcaaatgtgactat

SEQ ID NO: 396827 - DNA, 15 bp, Homo sapiens
tttcaaatgtgacta

SEQ ID NO: 396828 - DNA, 15 bp, Homo sapiens
atttcaaatgtgact

SEQ ID NO: 396829 - DNA, 15 bp, Homo sapiens
aatttcaaatgtgac

SEQ ID NO: 396830 - DNA, 15 bp, Homo sapiens
gaatttcaaatgtga

SEQ ID NO: 396831 - DNA, 15 bp, Homo sapiens
ggaatttcaaatgtg

SEQ ID NO: 396832 - DNA, 15 bp, Homo sapiens
tggaatttcaaatgt

SEQ ID NO: 396833 - DNA, 15 bp, Homo sapiens
ttggaatttcaaatg

SEQ ID NO: 396834 - DNA, 15 bp, Homo sapiens
attggaatttcaaat

SEQ ID NO: 396835 - DNA, 15 bp, Homo sapiens
aattggaatttcaaa

SEQ ID NO: 396836 - DNA, 15 bp, Homo sapiens
taattggaatttcaa

SEQ ID NO: 396837 - DNA, 15 bp, Homo sapiens
ctaattggaatttca

SEQ ID NO: 396838 - DNA, 15 bp, Homo sapiens
actaattggaatttc

SEQ ID NO: 396839 - DNA, 15 bp, Homo sapiens
aactaattggaattt

SEQ ID NO: 396840 - DNA, 15 bp, Homo sapiens
gaactaattggaatt

SEQ ID NO: 396841 - DNA, 15 bp, Homo sapiens
tgaactaattggaat

SEQ ID NO: 396842 - DNA, 15 bp, Homo sapiens
ttgaactaattggaa

SEQ ID NO: 396843 - DNA, 15 bp, Homo sapiens
tttgaactaattgga

SEQ ID NO: 396844 - DNA, 15 bp, Homo sapiens
ttttgaactaattgg

SEQ ID NO: 396845 - DNA, 15 bp, Homo sapiens
cttttgaactaattg

SEQ ID NO: 396846 - DNA, 15 bp, Homo sapiens
ccttttgaactaatt

SEQ ID NO: 396847 - DNA, 15 bp, Homo sapiens
cccttttgaactaat

SEQ ID NO: 396848 - DNA, 15 bp, Homo sapiens
tcccttttgaactaa

SEQ ID NO: 396849 - DNA, 15 bp, Homo sapiens
atcccttttgaacta

SEQ ID NO: 396850 - DNA, 15 bp, Homo sapiens
gatcccttttgaact

SEQ ID NO: 396851 - DNA, 15 bp, Homo sapiens
agatcccttttgaac

SEQ ID NO: 396852 - DNA, 15 bp, Homo sapiens
gagatcccttttgaa

SEQ ID NO: 396853 - DNA, 15 bp, Homo sapiens
ggagatcccttttga

SEQ ID NO: 396854 - DNA, 15 bp, Homo sapiens
gggagatcccttttg

SEQ ID NO: 396855 - DNA, 15 bp, Homo sapiens
tgggagatccctttt

SEQ ID NO: 396856 - DNA, 15 bp, Homo sapiens
ttgggagatcccttt

SEQ ID NO: 396857 - DNA, 15 bp, Homo sapiens
tttgggagatccctt

SEQ ID NO: 396858 - DNA, 15 bp, Homo sapiens
gtttgggagatccct

SEQ ID NO: 396859 - DNA, 15 bp, Homo sapiens
ggtttgggagatccc

SEQ ID NO: 396860 - DNA, 15 bp, Homo sapiens
tggtttgggagatcc

SEQ ID NO: 396861 - DNA, 15 bp, Homo sapiens
atggtttgggagatc

SEQ ID NO: 396862 - DNA, 15 bp, Homo sapiens
gatggtttgggagat

SEQ ID NO: 396863 - DNA, 15 bp, Homo sapiens
agatggtttgggaga

SEQ ID NO: 396864 - DNA, 15 bp, Homo sapiens
tagatggtttgggag

SEQ ID NO: 396865 - DNA, 15 bp, Homo sapiens
ctagatggtttggga

SEQ ID NO: 396866 - DNA, 15 bp, Homo sapiens
cctagatggtttggg

SEQ ID NO: 396867 - DNA, 15 bp, Homo sapiens
ccctagatggtttgg

SEQ ID NO: 396868 - DNA, 15 bp, Homo sapiens
accctagatggtttg

SEQ ID NO: 396869 - DNA, 15 bp, Homo sapiens
caccctagatggttt

SEQ ID NO: 396870 - DNA, 15 bp, Homo sapiens
acaccctagatggtt

SEQ ID NO: 396871 - DNA, 15 bp, Homo sapiens
aacaccctagatggt

SEQ ID NO: 396872 - DNA, 15 bp, Homo sapiens
gaacaccctagatgg

SEQ ID NO: 396873 - DNA, 15 bp, Homo sapiens
agaacaccctagatg

SEQ ID NO: 396874 - DNA, 15 bp, Homo sapiens
aagaacaccctagat

SEQ ID NO: 396875 - DNA, 15 bp, Homo sapiens
taagaacaccctaga

SEQ ID NO: 396876 - DNA, 15 bp, Homo sapiens
gtaagaacaccctag

SEQ ID NO: 396877 - DNA, 15 bp, Homo sapiens
agtaagaacacccta

SEQ ID NO: 396878 - DNA, 15 bp, Homo sapiens
tagtaagaacaccct

SEQ ID NO: 396879 - DNA, 15 bp, Homo sapiens
ttagtaagaacaccc

SEQ ID NO: 396880 - DNA, 15 bp, Homo sapiens
tttagtaagaacacc

SEQ ID NO: 396881 - DNA, 15 bp, Homo sapiens
atttagtaagaacac

SEQ ID NO: 396882 - DNA, 15 bp, Homo sapiens
aatttagtaagaaca

SEQ ID NO: 396883 - DNA, 15 bp, Homo sapiens
taatttagtaagaac

SEQ ID NO: 396884 - DNA, 15 bp, Homo sapiens
ataatttagtaagaa

SEQ ID NO: 396885 - DNA, 15 bp, Homo sapiens
gataatttagtaaga

SEQ ID NO: 396886 - DNA, 15 bp, Homo sapiens
cgataatttagtaag

SEQ ID NO: 396887 - DNA, 15 bp, Homo sapiens
acgataatttagtaa

SEQ ID NO: 396888 - DNA, 15 bp, Homo sapiens
tacgataatttagta

SEQ ID NO: 396889 - DNA, 15 bp, Homo sapiens
ttacgataatttagt

SEQ ID NO: 396890 - DNA, 15 bp, Homo sapiens
cttacgataatttag

SEQ ID NO: 396891 - DNA, 15 bp, Homo sapiens
tcttacgataattta

SEQ ID NO: 396892 - DNA, 15 bp, Homo sapiens
ttcttacgataattt

SEQ ID NO: 396893 - DNA, 15 bp, Homo sapiens
tttcttacgataatt

SEQ ID NO: 396894 - DNA, 15 bp, Homo sapiens
atttcttacgataat

SEQ ID NO: 396895 - DNA, 15 bp, Homo sapiens
tatttcttacgataa

SEQ ID NO: 396896 - DNA, 15 bp, Homo sapiens
gtatttcttacgata

SEQ ID NO: 396897 - DNA, 15 bp, Homo sapiens
agtatttcttacgat

SEQ ID NO: 396898 - DNA, 15 bp, Homo sapiens
aagtatttcttacga

SEQ ID NO: 396899 - DNA, 15 bp, Homo sapiens
caagtatttcttacg

SEQ ID NO: 396900 - DNA, 15 bp, Homo sapiens
acaagtatttcttac

SEQ ID NO: 396901 - DNA, 15 bp, Homo sapiens
aacaagtatttctta

SEQ ID NO: 396902 - DNA, 15 bp, Homo sapiens
aaacaagtatttctt

SEQ ID NO: 396903 - DNA, 15 bp, Homo sapiens
taaacaagtatttct

SEQ ID NO: 396904 - DNA, 15 bp, Homo sapiens
ttaaacaagtatttc

SEQ ID NO: 396905 - DNA, 15 bp, Homo sapiens
gttaaacaagtattt

SEQ ID NO: 396906 - DNA, 15 bp, Homo sapiens
agttaaacaagtatt

SEQ ID NO: 396907 - DNA, 15 bp, Homo sapiens
tagttaaacaagtat

SEQ ID NO: 396908 - DNA, 15 bp, Homo sapiens
atagttaaacaagta

SEQ ID NO: 396909 - DNA, 15 bp, Homo sapiens
gatagttaaacaagt

SEQ ID NO: 396910 - DNA, 15 bp, Homo sapiens
agatagttaaacaag

SEQ ID NO: 396911 - DNA, 15 bp, Homo sapiens
tagatagttaaacaa

SEQ ID NO: 396912 - DNA, 15 bp, Homo sapiens
atagatagttaaaca

SEQ ID NO: 396913 - DNA, 15 bp, Homo sapiens
aatagatagttaaac

SEQ ID NO: 396914 - DNA, 15 bp, Homo sapiens
gaatagatagttaaa

SEQ ID NO: 396915 - DNA, 15 bp, Homo sapiens
agaatagatagttaa

SEQ ID NO: 396916 - DNA, 15 bp, Homo sapiens
cagaatagatagtta

SEQ ID NO: 396917 - DNA, 15 bp, Homo sapiens
tacagaatagatagt

SEQ ID NO: 396918 - DNA, 15 bp, Homo sapiens
atacagaatagatag

SEQ ID NO: 396919 - DNA, 15 bp, Homo sapiens
tatacagaatagata

SEQ ID NO: 396920 - DNA, 15 bp, Homo sapiens
gtatacagaatagat

SEQ ID NO: 396921 - DNA, 15 bp, Homo sapiens
tgtatacagaataga

SEQ ID NO: 396922 - DNA, 15 bp, Homo sapiens
ctgtatacagaatag

SEQ ID NO: 396923 - DNA, 15 bp, Homo sapiens
actgtatacagaata

SEQ ID NO: 396924 - DNA, 15 bp, Homo sapiens
tactgtatacagaat

SEQ ID NO: 396925 - DNA, 15 bp, Homo sapiens
gtactgtatacagaa

SEQ ID NO: 396926 - DNA, 15 bp, Homo sapiens
agtactgtatacaga

SEQ ID NO: 396927 - DNA, 15 bp, Homo sapiens
cagtactgtatacag

SEQ ID NO: 396928 - DNA, 15 bp, Homo sapiens
acagtactgtataca

SEQ ID NO: 396929 - DNA, 15 bp, Homo sapiens
cacagtactgtatac

SEQ ID NO: 396930 - DNA, 15 bp, Homo sapiens
ccacagtactgtata

SEQ ID NO: 396931 - DNA, 15 bp, Homo sapiens
accacagtactgtat

SEQ ID NO: 396932 - DNA, 15 bp, Homo sapiens
taccacagtactgta

SEQ ID NO: 396933 - DNA, 15 bp, Homo sapiens
ctaccacagtactgt

SEQ ID NO: 396934 - DNA, 15 bp, Homo sapiens
tctaccacagtactg

SEQ ID NO: 396935 - DNA, 15 bp, Homo sapiens
atctaccacagtact

SEQ ID NO: 396936 - DNA, 15 bp, Homo sapiens
gatctaccacagtac

SEQ ID NO: 396937 - DNA, 15 bp, Homo sapiens
ggatctaccacagta

SEQ ID NO: 396938 - DNA, 15 bp, Homo sapiens
aggatctaccacagt

SEQ ID NO: 396939 - DNA, 15 bp, Homo sapiens
caggatctaccacag

SEQ ID NO: 396940 - DNA, 15 bp, Homo sapiens
ccaggatctaccaca

SEQ ID NO: 396941 - DNA, 15 bp, Homo sapiens
accaggatctaccac

SEQ ID NO: 396942 - DNA, 15 bp, Homo sapiens
taccaggatctacca

SEQ ID NO: 396943 - DNA, 15 bp, Homo sapiens
ttaccaggatctacc

SEQ ID NO: 396944 - DNA, 15 bp, Homo sapiens
cttaccaggatctac

SEQ ID NO: 396945 - DNA, 15 bp, Homo sapiens
ccttaccaggatcta

SEQ ID NO: 396946 - DNA, 15 bp, Homo sapiens
cccttaccaggatct

SEQ ID NO: 396947 - DNA, 15 bp, Homo sapiens
acccttaccaggatc

SEQ ID NO: 396948 - DNA, 15 bp, Homo sapiens
aacccttaccaggat

SEQ ID NO: 396949 - DNA, 15 bp, Homo sapiens
taacccttaccagga

SEQ ID NO: 396950 - DNA, 15 bp, Homo sapiens
ttaacccttaccagg

SEQ ID NO: 396951 - DNA, 15 bp, Homo sapiens
attaacccttaccag

SEQ ID NO: 396952 - DNA, 15 bp, Homo sapiens
aattaacccttacca

SEQ ID NO: 396953 - DNA, 15 bp, Homo sapiens
aaattaacccttacc

SEQ ID NO: 396954 - DNA, 15 bp, Homo sapiens
aaaattaacccttac

SEQ ID NO: 396955 - DNA, 15 bp, Homo sapiens
aaaaattaaccctta

SEQ ID NO: 396956 - DNA, 15 bp, Homo sapiens
aaaaaattaaccctt

SEQ ID NO: 396957 - DNA, 15 bp, Homo sapiens
aaaaaaattaaccct

SEQ ID NO: 396958 - DNA, 15 bp, Homo sapiens
gaaaaaaattaaccc

SEQ ID NO: 396959 - DNA, 15 bp, Homo sapiens
agaaaaaaattaacc

SEQ ID NO: 396960 - DNA, 15 bp, Homo sapiens
tagaaaaaaattaac

SEQ ID NO: 396961 - DNA, 15 bp, Homo sapiens
ttagaaaaaaattaa

SEQ ID NO: 396962 - DNA, 15 bp, Homo sapiens
gttagaaaaaaatta

SEQ ID NO: 396963 - DNA, 15 bp, Homo sapiens
agttagaaaaaaatt

SEQ ID NO: 396964 - DNA, 15 bp, Homo sapiens
aagttagaaaaaaat

SEQ ID NO: 396965 - DNA, 15 bp, Homo sapiens
taagttagaaaaaaa

SEQ ID NO: 396966 - DNA, 15 bp, Homo sapiens
ataagttagaaaaaa

SEQ ID NO: 396967 - DNA, 15 bp, Homo sapiens
aataagttagaaaaa

SEQ ID NO: 396968 - DNA, 15 bp, Homo sapiens
gaataagttagaaaa

SEQ ID NO: 396969 - DNA, 15 bp, Homo sapiens
agaataagttagaaa

SEQ ID NO: 396970 - DNA, 15 bp, Homo sapiens
cagaataagttagaa

SEQ ID NO: 396971 - DNA, 15 bp, Homo sapiens
tcagaataagttaga

SEQ ID NO: 396972 - DNA, 15 bp, Homo sapiens
atcagaataagttag

SEQ ID NO: 396973 - DNA, 15 bp, Homo sapiens
aatcagaataagtta

SEQ ID NO: 396974 - DNA, 15 bp, Homo sapiens
aaatcagaataagtt

SEQ ID NO: 396975 - DNA, 15 bp, Homo sapiens
gaaatcagaataagt

SEQ ID NO: 396976 - DNA, 15 bp, Homo sapiens
cgaaatcagaataag

SEQ ID NO: 396977 - DNA, 15 bp, Homo sapiens
acgaaatcagaataa

SEQ ID NO: 396978 - DNA, 15 bp, Homo sapiens
cacgaaatcagaata

SEQ ID NO: 396979 - DNA, 15 bp, Homo sapiens
tcacgaaatcagaat

SEQ ID NO: 396980 - DNA, 15 bp, Homo sapiens
atcacgaaatcagaa

SEQ ID NO: 396981 - DNA, 15 bp, Homo sapiens
aatcacgaaatcaga

SEQ ID NO: 396982 - DNA, 15 bp, Homo sapiens
gaatcacgaaatcag

SEQ ID NO: 396983 - DNA, 15 bp, Homo sapiens
agaatcacgaaatca

SEQ ID NO: 396984 - DNA, 15 bp, Homo sapiens
aagaatcacgaaatc

SEQ ID NO: 396985 - DNA, 15 bp, Homo sapiens
taagaatcacgaaat

SEQ ID NO: 396986 - DNA, 15 bp, Homo sapiens
gtaagaatcacgaaa

SEQ ID NO: 396987 - DNA, 15 bp, Homo sapiens
ggtaagaatcacgaa

SEQ ID NO: 396988 - DNA, 15 bp, Homo sapiens
gggtaagaatcacga

SEQ ID NO: 396989 - DNA, 15 bp, Homo sapiens
agggtaagaatcacg

SEQ ID NO: 396990 - DNA, 15 bp, Homo sapiens
aagggtaagaatcac

SEQ ID NO: 396991 - DNA, 15 bp, Homo sapiens
caagggtaagaatca

SEQ ID NO: 396992 - DNA, 15 bp, Homo sapiens
tcaagggtaagaatc

SEQ ID NO: 396993 - DNA, 15 bp, Homo sapiens
atcaagggtaagaat

SEQ ID NO: 396994 - DNA, 15 bp, Homo sapiens
aatcaagggtaagaa

SEQ ID NO: 396995 - DNA, 15 bp, Homo sapiens
taatcaagggtaaga

SEQ ID NO: 396996 - DNA, 15 bp, Homo sapiens
ataatcaagggtaag

SEQ ID NO: 396997 - DNA, 15 bp, Homo sapiens
cataatcaagggtaa

SEQ ID NO: 396998 - DNA, 15 bp, Homo sapiens
ccataatcaagggta

SEQ ID NO: 396999 - DNA, 15 bp, Homo sapiens
accataatcaagggt

SEQ ID NO: 397000 - DNA, 15 bp, Homo sapiens
aaccataatcaaggg

SEQ ID NO: 397001 - DNA, 15 bp, Homo sapiens
caaccataatcaagg

SEQ ID NO: 397002 - DNA, 15 bp, Homo sapiens
gcaaccataatcaag

SEQ ID NO: 397003 - DNA, 15 bp, Homo sapiens
tgcaaccataatcaa

SEQ ID NO: 397004 - DNA, 15 bp, Homo sapiens
ctgcaaccataatca

SEQ ID NO: 397005 - DNA, 15 bp, Homo sapiens
actgcaaccataatc

SEQ ID NO: 397006 - DNA, 15 bp, Homo sapiens
cactgcaaccataat

SEQ ID NO: 397007 - DNA, 15 bp, Homo sapiens
gcactgcaaccataa

SEQ ID NO: 397008 - DNA, 15 bp, Homo sapiens
ggcactgcaaccata

SEQ ID NO: 397009 - DNA, 15 bp, Homo sapiens
aggcactgcaaccat

SEQ ID NO: 397010 - DNA, 15 bp, Homo sapiens
aaggcactgcaacca

SEQ ID NO: 397011 - DNA, 15 bp, Homo sapiens
taaggcactgcaacc

SEQ ID NO: 397012 - DNA, 15 bp, Homo sapiens
gtaaggcactgcaac

SEQ ID NO: 397013 - DNA, 15 bp, Homo sapiens
agtaaggcactgcaa

SEQ ID NO: 397014 - DNA, 15 bp, Homo sapiens
aagtaaggcactgca

SEQ ID NO: 397015 - DNA, 15 bp, Homo sapiens
caagtaaggcactgc

SEQ ID NO: 397016 - DNA, 15 bp, Homo sapiens
acaagtaaggcactg

SEQ ID NO: 397017 - DNA, 15 bp, Homo sapiens
tacaagtaaggcact

SEQ ID NO: 397018 - DNA, 15 bp, Homo sapiens
atacaagtaaggcac

SEQ ID NO: 397019 - DNA, 15 bp, Homo sapiens
tatacaagtaaggca

SEQ ID NO: 397020 - DNA, 15 bp, Homo sapiens
ctatacaagtaaggc

SEQ ID NO: 397021 - DNA, 15 bp, Homo sapiens
cctatacaagtaagg

SEQ ID NO: 397022 - DNA, 15 bp, Homo sapiens
tcctatacaagtaag

SEQ ID NO: 397023 - DNA, 15 bp, Homo sapiens
atcctatacaagtaa

SEQ ID NO: 397024 - DNA, 15 bp, Homo sapiens
catcctatacaagta

SEQ ID NO: 397025 - DNA, 15 bp, Homo sapiens
gcatcctatacaagt

SEQ ID NO: 397026 - DNA, 15 bp, Homo sapiens
agcatcctatacaag

SEQ ID NO: 397027 - DNA, 15 bp, Homo sapiens
aagcatcctatacaa

SEQ ID NO: 397028 - DNA, 15 bp, Homo sapiens
aaagcatcctataca

SEQ ID NO: 397029 - DNA, 15 bp, Homo sapiens
aaaagcatcctatac

SEQ ID NO: 397030 - DNA, 15 bp, Homo sapiens
taaaagcatcctata

SEQ ID NO: 397031 - DNA, 15 bp, Homo sapiens
gtaaaagcatcctat

SEQ ID NO: 397032 - DNA, 15 bp, Homo sapiens
agtaaaagcatccta

SEQ ID NO: 397033 - DNA, 15 bp, Homo sapiens
aagtaaaagcatcct

SEQ ID NO: 397034 - DNA, 15 bp, Homo sapiens
aaagtaaaagcatcc

SEQ ID NO: 397035 - DNA, 15 bp, Homo sapiens
aaaagtaaaagcatc

SEQ ID NO: 397036 - DNA, 15 bp, Homo sapiens
aaaaagtaaaagcat

SEQ ID NO: 397037 - DNA, 15 bp, Homo sapiens
taaaaagtaaaagca

SEQ ID NO: 397038 - DNA, 15 bp, Homo sapiens
ttaaaaagtaaaagc

SEQ ID NO: 397039 - DNA, 15 bp, Homo sapiens
tttaaaaagtaaaag

SEQ ID NO: 397040 - DNA, 15 bp, Homo sapiens
atttaaaaagtaaaa

SEQ ID NO: 397041 - DNA, 15 bp, Homo sapiens
aatttaaaaagtaaa

SEQ ID NO: 397042 - DNA, 15 bp, Homo sapiens
caatttaaaaagtaa

SEQ ID NO: 397043 - DNA, 15 bp, Homo sapiens
tcaatttaaaaagta

SEQ ID NO: 397044 - DNA, 15 bp, Homo sapiens
ctcaatttaaaaagt

SEQ ID NO: 397045 - DNA, 15 bp, Homo sapiens
cctcaatttaaaaag

SEQ ID NO: 397046 - DNA, 15 bp, Homo sapiens
acctcaatttaaaaa

SEQ ID NO: 397047 - DNA, 15 bp, Homo sapiens
tacctcaatttaaaa

SEQ ID NO: 397048 - DNA, 15 bp, Homo sapiens
atacctcaatttaaa

SEQ ID NO: 397049 - DNA, 15 bp, Homo sapiens
catacctcaatttaa

SEQ ID NO: 397050 - DNA, 15 bp, Homo sapiens
tcatacctcaattta

SEQ ID NO: 397051 - DNA, 15 bp, Homo sapiens
atcatacctcaattt

SEQ ID NO: 397052 - DNA, 15 bp, Homo sapiens
aatcatacctcaatt

SEQ ID NO: 397053 - DNA, 15 bp, Homo sapiens
aaatcatacctcaat

SEQ ID NO: 397054 - DNA, 15 bp, Homo sapiens
taaatcatacctcaa

SEQ ID NO: 397055 - DNA, 15 bp, Homo sapiens
gtaaatcatacctca

SEQ ID NO: 397056 - DNA, 15 bp, Homo sapiens
tgtaaatcatacctc

SEQ ID NO: 397057 - DNA, 15 bp, Homo sapiens
atgtaaatcatacct

SEQ ID NO: 397058 - DNA, 15 bp, Homo sapiens
catgtaaatcatacc

SEQ ID NO: 397059 - DNA, 15 bp, Homo sapiens
gcatgtaaatcatac

SEQ ID NO: 397060 - DNA, 15 bp, Homo sapiens
tgcatgtaaatcata

SEQ ID NO: 397061 - DNA, 15 bp, Homo sapiens
ctgcatgtaaatcat

SEQ ID NO: 397062 - DNA, 15 bp, Homo sapiens
actgcatgtaaatca

SEQ ID NO: 397063 - DNA, 15 bp, Homo sapiens
tactgcatgtaaatc

SEQ ID NO: 397064 - DNA, 15 bp, Homo sapiens
ttactgcatgtaaat

SEQ ID NO: 397065 - DNA, 15 bp, Homo sapiens
tttactgcatgtaaa

SEQ ID NO: 397066 - DNA, 15 bp, Homo sapiens
ttttactgcatgtaa

SEQ ID NO: 397067 - DNA, 15 bp, Homo sapiens
attttactgcatgta

SEQ ID NO: 397068 - DNA, 15 bp, Homo sapiens
cattttactgcatgt

SEQ ID NO: 397069 - DNA, 15 bp, Homo sapiens
gcattttactgcatg

SEQ ID NO: 397070 - DNA, 15 bp, Homo sapiens
agcattttactgcat

SEQ ID NO: 397071 - DNA, 15 bp, Homo sapiens
aagcattttactgca

SEQ ID NO: 397072 - DNA, 15 bp, Homo sapiens
taagcattttactgc

SEQ ID NO: 397073 - DNA, 15 bp, Homo sapiens
ttaagcattttactg

SEQ ID NO: 397074 - DNA, 15 bp, Homo sapiens
cttaagcattttact

SEQ ID NO: 397075 - DNA, 15 bp, Homo sapiens
acttaagcattttac

SEQ ID NO: 397076 - DNA, 15 bp, Homo sapiens
gacttaagcatttta

SEQ ID NO: 397077 - DNA, 15 bp, Homo sapiens
agacttaagcatttt

SEQ ID NO: 397078 - DNA, 15 bp, Homo sapiens
tagacttaagcattt

SEQ ID NO: 397079 - DNA, 15 bp, Homo sapiens
ctagacttaagcatt

SEQ ID NO: 397080 - DNA, 15 bp, Homo sapiens
cctagacttaagcat

SEQ ID NO: 397081 - DNA, 15 bp, Homo sapiens
acctagacttaagca

SEQ ID NO: 397082 - DNA, 15 bp, Homo sapiens
cacctagacttaagc

SEQ ID NO: 397083 - DNA, 15 bp, Homo sapiens
acacctagacttaag

SEQ ID NO: 397084 - DNA, 15 bp, Homo sapiens
cacacctagacttaa

SEQ ID NO: 397085 - DNA, 15 bp, Homo sapiens
gcacacctagactta

SEQ ID NO: 397086 - DNA, 15 bp, Homo sapiens
tgcacacctagactt

SEQ ID NO: 397087 - DNA, 15 bp, Homo sapiens
ctgcacacctagact

SEQ ID NO: 397088 - DNA, 15 bp, Homo sapiens
gctgcacacctagac

SEQ ID NO: 397089 - DNA, 15 bp, Homo sapiens
agctgcacacctaga

SEQ ID NO: 397090 - DNA, 15 bp, Homo sapiens
gagctgcacacctag

SEQ ID NO: 397091 - DNA, 15 bp, Homo sapiens
tgagctgcacaccta

SEQ ID NO: 397092 - DNA, 15 bp, Homo sapiens
ctgagctgcacacct

SEQ ID NO: 397093 - DNA, 15 bp, Homo sapiens
actgagctgcacacc

SEQ ID NO: 397094 - DNA, 15 bp, Homo sapiens
cactgagctgcacac

SEQ ID NO: 397095 - DNA, 15 bp, Homo sapiens
tcactgagctgcaca

SEQ ID NO: 397096 - DNA, 15 bp, Homo sapiens
ttcactgagctgcac

SEQ ID NO: 397097 - DNA, 15 bp, Homo sapiens
attcactgagctgca

SEQ ID NO: 397098 - DNA, 15 bp, Homo sapiens
aattcactgagctgc

SEQ ID NO: 397099 - DNA, 15 bp, Homo sapiens
aaattcactgagctg

SEQ ID NO: 397100 - DNA, 15 bp, Homo sapiens
aaaattcactgagct

SEQ ID NO: 397101 - DNA, 15 bp, Homo sapiens
aaaaattcactgagc

SEQ ID NO: 397102 - DNA, 15 bp, Homo sapiens
caaaaattcactgag

SEQ ID NO: 397103 - DNA, 15 bp, Homo sapiens
gcaaaaattcactga

SEQ ID NO: 397104 - DNA, 15 bp, Homo sapiens
ggcaaaaattcactg

SEQ ID NO: 397105 - DNA, 15 bp, Homo sapiens
gggcaaaaattcact

SEQ ID NO: 397106 - DNA, 15 bp, Homo sapiens
tgggcaaaaattcac

SEQ ID NO: 397107 - DNA, 15 bp, Homo sapiens
atgggcaaaaattca

SEQ ID NO: 397108 - DNA, 15 bp, Homo sapiens
catgggcaaaaattc

SEQ ID NO: 397109 - DNA, 15 bp, Homo sapiens
acatgggcaaaaatt

SEQ ID NO: 397110 - DNA, 15 bp, Homo sapiens
aacatgggcaaaaat

SEQ ID NO: 397111 - DNA, 15 bp, Homo sapiens
aaacatgggcaaaaa

SEQ ID NO: 397112 - DNA, 15 bp, Homo sapiens
taaacatgggcaaaa

SEQ ID NO: 397113 - DNA, 15 bp, Homo sapiens
ataaacatgggcaaa

SEQ ID NO: 397114 - DNA, 15 bp, Homo sapiens
tataaacatgggcaa

SEQ ID NO: 397115 - DNA, 15 bp, Homo sapiens
gtataaacatgggca

SEQ ID NO: 397116 - DNA, 15 bp, Homo sapiens
ggtataaacatgggc

SEQ ID NO: 397117 - DNA, 15 bp, Homo sapiens
gggtataaacatggg

SEQ ID NO: 397118 - DNA, 15 bp, Homo sapiens
tgggtataaacatgg

SEQ ID NO: 397119 - DNA, 15 bp, Homo sapiens
atgggtataaacatg

SEQ ID NO: 397120 - DNA, 15 bp, Homo sapiens
tatgggtataaacat

SEQ ID NO: 397121 - DNA, 15 bp, Homo sapiens
ctatgggtataaaca

SEQ ID NO: 397122 - DNA, 15 bp, Homo sapiens
tctatgggtataaac

SEQ ID NO: 397123 - DNA, 15 bp, Homo sapiens
ttctatgggtataaa

SEQ ID NO: 397124 - DNA, 15 bp, Homo sapiens
gttctatgggtataa

SEQ ID NO: 397125 - DNA, 15 bp, Homo sapiens
agttctatgggtata

SEQ ID NO: 397126 - DNA, 15 bp, Homo sapiens
gagttctatgggtat

SEQ ID NO: 397127 - DNA, 15 bp, Homo sapiens
agagttctatgggta

SEQ ID NO: 397128 - DNA, 15 bp, Homo sapiens
tagagttctatgggt

SEQ ID NO: 397129 - DNA, 15 bp, Homo sapiens
gtagagttctatggg

SEQ ID NO: 397130 - DNA, 15 bp, Homo sapiens
agtagagttctatgg

SEQ ID NO: 397131 - DNA, 15 bp, Homo sapiens
gagtagagttctatg

SEQ ID NO: 397132 - DNA, 15 bp, Homo sapiens
tgagtagagttctat

SEQ ID NO: 397133 - DNA, 15 bp, Homo sapiens
ctgagtagagttcta

SEQ ID NO: 397134 - DNA, 15 bp, Homo sapiens
gctgagtagagttct

SEQ ID NO: 397135 - DNA, 15 bp, Homo sapiens
agctgagtagagttc

SEQ ID NO: 397136 - DNA, 15 bp, Homo sapiens
gagctgagtagagtt

SEQ ID NO: 397137 - DNA, 15 bp, Homo sapiens
tgagctgagtagagt

SEQ ID NO: 397138 - DNA, 15 bp, Homo sapiens
ttgagctgagtagag

SEQ ID NO: 397139 - DNA, 15 bp, Homo sapiens
tttgagctgagtaga

SEQ ID NO: 397140 - DNA, 15 bp, Homo sapiens
ttttgagctgagtag

SEQ ID NO: 397141 - DNA, 15 bp, Homo sapiens
attttgagctgagta

SEQ ID NO: 397142 - DNA, 15 bp, Homo sapiens
tattttgagctgagt

SEQ ID NO: 397143 - DNA, 15 bp, Homo sapiens
gtattttgagctgag

SEQ ID NO: 397144 - DNA, 15 bp, Homo sapiens
tgtattttgagctga

SEQ ID NO: 397145 - DNA, 15 bp, Homo sapiens
ctgtattttgagctg

SEQ ID NO: 397146 - DNA, 15 bp, Homo sapiens
tctgtattttgagct

SEQ ID NO: 397147 - DNA, 15 bp, Homo sapiens
ttctgtattttgagc

SEQ ID NO: 397148 - DNA, 15 bp, Homo sapiens
gttctgtattttgag

SEQ ID NO: 397149 - DNA, 15 bp, Homo sapiens
tgttctgtattttga

SEQ ID NO: 397150 - DNA, 15 bp, Homo sapiens
atgttctgtattttg

SEQ ID NO: 397151 - DNA, 15 bp, Homo sapiens
aatgttctgtatttt

SEQ ID NO: 397152 - DNA, 15 bp, Homo sapiens
aaatgttctgtattt

SEQ ID NO: 397153 - DNA, 15 bp, Homo sapiens
gaaatgttctgtatt

SEQ ID NO: 397154 - DNA, 15 bp, Homo sapiens
ggaaatgttctgtat

SEQ ID NO: 397155 - DNA, 15 bp, Homo sapiens
tggaaatgttctgta

SEQ ID NO: 397156 - DNA, 15 bp, Homo sapiens
atggaaatgttctgt

SEQ ID NO: 397157 - DNA, 15 bp, Homo sapiens
aatggaaatgttctg

SEQ ID NO: 397158 - DNA, 15 bp, Homo sapiens
aaatggaaatgttct

SEQ ID NO: 397159 - DNA, 15 bp, Homo sapiens
gaaatggaaatgttc

SEQ ID NO: 397160 - DNA, 15 bp, Homo sapiens
ggaaatggaaatgtt

SEQ ID NO: 397161 - DNA, 15 bp, Homo sapiens
gggaaatggaaatgt

SEQ ID NO: 397162 - DNA, 15 bp, Homo sapiens
ggggaaatggaaatg

SEQ ID NO: 397163 - DNA, 15 bp, Homo sapiens
aggggaaatggaaat

SEQ ID NO: 397164 - DNA, 15 bp, Homo sapiens
caggggaaatggaaa

SEQ ID NO: 397165 - DNA, 15 bp, Homo sapiens
ccaggggaaatggaa

SEQ ID NO: 397166 - DNA, 15 bp, Homo sapiens
tccaggggaaatgga

SEQ ID NO: 397167 - DNA, 15 bp, Homo sapiens
ttccaggggaaatgg

SEQ ID NO: 397168 - DNA, 15 bp, Homo sapiens
cttccaggggaaatg

SEQ ID NO: 397169 - DNA, 15 bp, Homo sapiens
acttccaggggaaat

SEQ ID NO: 397170 - DNA, 15 bp, Homo sapiens
aacttccaggggaaa

SEQ ID NO: 397171 - DNA, 15 bp, Homo sapiens
gaacttccaggggaa

SEQ ID NO: 397172 - DNA, 15 bp, Homo sapiens
agaacttccagggga

SEQ ID NO: 397173 - DNA, 15 bp, Homo sapiens
gagaacttccagggg

SEQ ID NO: 397174 - DNA, 15 bp, Homo sapiens
agagaacttccaggg

SEQ ID NO: 397175 - DNA, 15 bp, Homo sapiens
aagagaacttccagg

SEQ ID NO: 397176 - DNA, 15 bp, Homo sapiens
caagagaacttccag

SEQ ID NO: 397177 - DNA, 15 bp, Homo sapiens
acaagagaacttcca

SEQ ID NO: 397178 - DNA, 15 bp, Homo sapiens
cacaagagaacttcc

SEQ ID NO: 397179 - DNA, 15 bp, Homo sapiens
ccacaagagaacttc

SEQ ID NO: 397180 - DNA, 15 bp, Homo sapiens
gccacaagagaactt

SEQ ID NO: 397181 - DNA, 15 bp, Homo sapiens
ggccacaagagaact

SEQ ID NO: 397182 - DNA, 15 bp, Homo sapiens
aggccacaagagaac

SEQ ID NO: 397183 - DNA, 15 bp, Homo sapiens
aaggccacaagagaa

SEQ ID NO: 397184 - DNA, 15 bp, Homo sapiens
aaaggccacaagaga

SEQ ID NO: 397185 - DNA, 15 bp, Homo sapiens
gaaaggccacaagag

SEQ ID NO: 397186 - DNA, 15 bp, Homo sapiens
ggaaaggccacaaga

SEQ ID NO: 397187 - DNA, 15 bp, Homo sapiens
gggaaaggccacaag

SEQ ID NO: 397188 - DNA, 15 bp, Homo sapiens
tgggaaaggccacaa

SEQ ID NO: 397189 - DNA, 15 bp, Homo sapiens
ctgggaaaggccaca

SEQ ID NO: 397190 - DNA, 15 bp, Homo sapiens
actgggaaaggccac

SEQ ID NO: 397191 - DNA, 15 bp, Homo sapiens
gactgggaaaggcca

SEQ ID NO: 397192 - DNA, 15 bp, Homo sapiens
tgactgggaaaggcc

SEQ ID NO: 397193 - DNA, 15 bp, Homo sapiens
ttgactgggaaaggc

SEQ ID NO: 397194 - DNA, 15 bp, Homo sapiens
attgactgggaaagg

SEQ ID NO: 397195 - DNA, 15 bp, Homo sapiens
tattgactgggaaag

SEQ ID NO: 397196 - DNA, 15 bp, Homo sapiens
atattgactgggaaa

SEQ ID NO: 397197 - DNA, 15 bp, Homo sapiens
aatattgactgggaa

SEQ ID NO: 397198 - DNA, 15 bp, Homo sapiens
taatattgactggga

SEQ ID NO: 397199 - DNA, 15 bp, Homo sapiens
ataatattgactggg

SEQ ID NO: 397200 - DNA, 15 bp, Homo sapiens
aataatattgactgg

SEQ ID NO: 397201 - DNA, 15 bp, Homo sapiens
aaataatattgactg

SEQ ID NO: 397202 - DNA, 15 bp, Homo sapiens
gaaataatattgact

SEQ ID NO: 397203 - DNA, 15 bp, Homo sapiens
ggaaataatattgac

SEQ ID NO: 397204 - DNA, 15 bp, Homo sapiens
gggaaataatattga

SEQ ID NO: 397205 - DNA, 15 bp, Homo sapiens
ggggaaataatattg

SEQ ID NO: 397206 - DNA, 15 bp, Homo sapiens
aggggaaataatatt

SEQ ID NO: 397207 - DNA, 15 bp, Homo sapiens
gaggggaaataatat

SEQ ID NO: 397208 - DNA, 15 bp, Homo sapiens
agaggggaaataata

SEQ ID NO: 397209 - DNA, 15 bp, Homo sapiens
aagaggggaaataat

SEQ ID NO: 397210 - DNA, 15 bp, Homo sapiens
gaagaggggaaataa

SEQ ID NO: 397211 - DNA, 15 bp, Homo sapiens
tgaagaggggaaata

SEQ ID NO: 397212 - DNA, 15 bp, Homo sapiens
atgaagaggggaaat

SEQ ID NO: 397213 - DNA, 15 bp, Homo sapiens
catgaagaggggaaa

SEQ ID NO: 397214 - DNA, 15 bp, Homo sapiens
tcatgaagaggggaa

SEQ ID NO: 397215 - DNA, 15 bp, Homo sapiens
ttcatgaagagggga

SEQ ID NO: 397216 - DNA, 15 bp, Homo sapiens
tttcatgaagagggg

SEQ ID NO: 397217 - DNA, 15 bp, Homo sapiens
ttttcatgaagaggg

SEQ ID NO: 397218 - DNA, 15 bp, Homo sapiens
cttttcatgaagagg

SEQ ID NO: 397219 - DNA, 15 bp, Homo sapiens
ccttttcatgaagag

SEQ ID NO: 397220 - DNA, 15 bp, Homo sapiens
accttttcatgaaga

SEQ ID NO: 397221 - DNA, 15 bp, Homo sapiens
taccttttcatgaag

SEQ ID NO: 397222 - DNA, 15 bp, Homo sapiens
ttaccttttcatgaa

SEQ ID NO: 397223 - DNA, 15 bp, Homo sapiens
gttaccttttcatga

SEQ ID NO: 397224 - DNA, 15 bp, Homo sapiens
ggttaccttttcatg

SEQ ID NO: 397225 - DNA, 15 bp, Homo sapiens
tggttaccttttcat

SEQ ID NO: 397226 - DNA, 15 bp, Homo sapiens
gtggttaccttttca

SEQ ID NO: 397227 - DNA, 15 bp, Homo sapiens
agtggttaccttttc

SEQ ID NO: 397228 - DNA, 15 bp, Homo sapiens
tagtggttacctttt

SEQ ID NO: 397229 - DNA, 15 bp, Homo sapiens
atagtggttaccttt

SEQ ID NO: 397230 - DNA, 15 bp, Homo sapiens
aatagtggttacctt

SEQ ID NO: 397231 - DNA, 15 bp, Homo sapiens
gaatagtggttacct

SEQ ID NO: 397232 - DNA, 15 bp, Homo sapiens
agaatagtggttacc

SEQ ID NO: 397233 - DNA, 15 bp, Homo sapiens
cagaatagtggttac

SEQ ID NO: 397234 - DNA, 15 bp, Homo sapiens
tcagaatagtggtta

SEQ ID NO: 397235 - DNA, 15 bp, Homo sapiens
gtcagaatagtggtt

SEQ ID NO: 397236 - DNA, 15 bp, Homo sapiens
agtcagaatagtggt

SEQ ID NO: 397237 - DNA, 15 bp, Homo sapiens
aagtcagaatagtgg

SEQ ID NO: 397238 - DNA, 15 bp, Homo sapiens
gaagtcagaatagtg

SEQ ID NO: 397239 - DNA, 15 bp, Homo sapiens
agaagtcagaatagt

SEQ ID NO: 397240 - DNA, 15 bp, Homo sapiens
cagaagtcagaatag

SEQ ID NO: 397241 - DNA, 15 bp, Homo sapiens
tcagaagtcagaata

SEQ ID NO: 397242 - DNA, 15 bp, Homo sapiens
atcagaagtcagaat

SEQ ID NO: 397243 - DNA, 15 bp, Homo sapiens
catcagaagtcagaa

SEQ ID NO: 397244 - DNA, 15 bp, Homo sapiens
gcatcagaagtcaga

SEQ ID NO: 397245 - DNA, 15 bp, Homo sapiens
ggcatcagaagtcag

SEQ ID NO: 397246 - DNA, 15 bp, Homo sapiens
tggcatcagaagtca

SEQ ID NO: 397247 - DNA, 15 bp, Homo sapiens
atggcatcagaagtc

SEQ ID NO: 397248 - DNA, 15 bp, Homo sapiens
tatggcatcagaagt

SEQ ID NO: 397249 - DNA, 15 bp, Homo sapiens
ctatggcatcagaag

SEQ ID NO: 397250 - DNA, 15 bp, Homo sapiens
tctatggcatcagaa

SEQ ID NO: 397251 - DNA, 15 bp, Homo sapiens
atctatggcatcaga

SEQ ID NO: 397252 - DNA, 15 bp, Homo sapiens
aatctatggcatcag

SEQ ID NO: 397253 - DNA, 15 bp, Homo sapiens
gaatctatggcatca

SEQ ID NO: 397254 - DNA, 15 bp, Homo sapiens
tgaatctatggcatc

SEQ ID NO: 397255 - DNA, 15 bp, Homo sapiens
atgaatctatggcat

SEQ ID NO: 397256 - DNA, 15 bp, Homo sapiens
catgaatctatggca

SEQ ID NO: 397257 - DNA, 15 bp, Homo sapiens
acatgaatctatggc

SEQ ID NO: 397258 - DNA, 15 bp, Homo sapiens
aacatgaatctatgg

SEQ ID NO: 397259 - DNA, 15 bp, Homo sapiens
caacatgaatctatg

SEQ ID NO: 397260 - DNA, 15 bp, Homo sapiens
acaacatgaatctat

SEQ ID NO: 397261 - DNA, 15 bp, Homo sapiens
tacaacatgaatcta

SEQ ID NO: 397262 - DNA, 15 bp, Homo sapiens
ttacaacatgaatct

SEQ ID NO: 397263 - DNA, 15 bp, Homo sapiens
cttacaacatgaatc

SEQ ID NO: 397264 - DNA, 15 bp, Homo sapiens
acttacaacatgaat

SEQ ID NO: 397265 - DNA, 15 bp, Homo sapiens
cacttacaacatgaa

SEQ ID NO: 397266 - DNA, 15 bp, Homo sapiens
ccacttacaacatga

SEQ ID NO: 397267 - DNA, 15 bp, Homo sapiens
gccacttacaacatg

SEQ ID NO: 397268 - DNA, 15 bp, Homo sapiens
agccacttacaacat

SEQ ID NO: 397269 - DNA, 15 bp, Homo sapiens
gagccacttacaaca

SEQ ID NO: 397270 - DNA, 15 bp, Homo sapiens
agagccacttacaac

SEQ ID NO: 397271 - DNA, 15 bp, Homo sapiens
aagagccacttacaa

SEQ ID NO: 397272 - DNA, 15 bp, Homo sapiens
aaagagccacttaca

SEQ ID NO: 397273 - DNA, 15 bp, Homo sapiens
aaaagagccacttac

SEQ ID NO: 397274 - DNA, 15 bp, Homo sapiens
taaaagagccactta

SEQ ID NO: 397275 - DNA, 15 bp, Homo sapiens
ttaaaagagccactt

SEQ ID NO: 397276 - DNA, 15 bp, Homo sapiens
tttaaaagagccact

SEQ ID NO: 397277 - DNA, 15 bp, Homo sapiens
gtttaaaagagccac

SEQ ID NO: 397278 - DNA, 15 bp, Homo sapiens
agtttaaaagagcca

SEQ ID NO: 397279 - DNA, 15 bp, Homo sapiens
aagtttaaaagagcc

SEQ ID NO: 397280 - DNA, 15 bp, Homo sapiens
aaagtttaaaagagc

SEQ ID NO: 397281 - DNA, 15 bp, Homo sapiens
gaaagtttaaaagag

SEQ ID NO: 397282 - DNA, 15 bp, Homo sapiens
agaaagtttaaaaga

SEQ ID NO: 397283 - DNA, 15 bp, Homo sapiens
aagaaagtttaaaag

SEQ ID NO: 397284 - DNA, 15 bp, Homo sapiens
aaagaaagtttaaaa

SEQ ID NO: 397285 - DNA, 15 bp, Homo sapiens
taaagaaagtttaaa

SEQ ID NO: 397286 - DNA, 15 bp, Homo sapiens
ataaagaaagtttaa

SEQ ID NO: 397287 - DNA, 15 bp, Homo sapiens
gataaagaaagttta

SEQ ID NO: 397288 - DNA, 15 bp, Homo sapiens
agataaagaaagttt

SEQ ID NO: 397289 - DNA, 15 bp, Homo sapiens
gagataaagaaagtt

SEQ ID NO: 397290 - DNA, 15 bp, Homo sapiens
ggagataaagaaagt

SEQ ID NO: 397291 - DNA, 15 bp, Homo sapiens
gggagataaagaaag

SEQ ID NO: 397292 - DNA, 15 bp, Homo sapiens
ggggagataaagaaa

SEQ ID NO: 397293 - DNA, 15 bp, Homo sapiens
gggggagataaagaa

SEQ ID NO: 397294 - DNA, 15 bp, Homo sapiens
agggggagataaaga

SEQ ID NO: 397295 - DNA, 15 bp, Homo sapiens
aagggggagataaag

SEQ ID NO: 397296 - DNA, 15 bp, Homo sapiens
caagggggagataaa

SEQ ID NO: 397297 - DNA, 15 bp, Homo sapiens
gcaagggggagataa

SEQ ID NO: 397298 - DNA, 15 bp, Homo sapiens
agcaagggggagata

SEQ ID NO: 397299 - DNA, 15 bp, Homo sapiens
gagcaagggggagat

SEQ ID NO: 397300 - DNA, 15 bp, Homo sapiens
agagcaagggggaga

SEQ ID NO: 397301 - DNA, 15 bp, Homo sapiens
aagagcaagggggag

SEQ ID NO: 397302 - DNA, 15 bp, Homo sapiens
aaagagcaaggggga

SEQ ID NO: 397303 - DNA, 15 bp, Homo sapiens
caaagagcaaggggg

SEQ ID NO: 397304 - DNA, 15 bp, Homo sapiens
gcaaagagcaagggg

SEQ ID NO: 397305 - DNA, 15 bp, Homo sapiens
ggcaaagagcaaggg

SEQ ID NO: 397306 - DNA, 15 bp, Homo sapiens
aggcaaagagcaagg

SEQ ID NO: 397307 - DNA, 15 bp, Homo sapiens
caggcaaagagcaag

SEQ ID NO: 397308 - DNA, 15 bp, Homo sapiens
acaggcaaagagcaa

SEQ ID NO: 397309 - DNA, 15 bp, Homo sapiens
tacaggcaaagagca

SEQ ID NO: 397310 - DNA, 15 bp, Homo sapiens
ttacaggcaaagagc

SEQ ID NO: 397311 - DNA, 15 bp, Homo sapiens
cttacaggcaaagag

SEQ ID NO: 397312 - DNA, 15 bp, Homo sapiens
tcttacaggcaaaga

SEQ ID NO: 397313 - DNA, 15 bp, Homo sapiens
ctcttacaggcaaag

SEQ ID NO: 397314 - DNA, 15 bp, Homo sapiens
tctcttacaggcaaa

SEQ ID NO: 397315 - DNA, 15 bp, Homo sapiens
ttctcttacaggcaa

SEQ ID NO: 397316 - DNA, 15 bp, Homo sapiens
cttctcttacaggca

SEQ ID NO: 397317 - DNA, 15 bp, Homo sapiens
ccttctcttacaggc

SEQ ID NO: 397318 - DNA, 15 bp, Homo sapiens
tccttctcttacagg

SEQ ID NO: 397319 - DNA, 15 bp, Homo sapiens
ttccttctcttacag

SEQ ID NO: 397320 - DNA, 15 bp, Homo sapiens
tttccttctcttaca

SEQ ID NO: 397321 - DNA, 15 bp, Homo sapiens
atttccttctcttac

SEQ ID NO: 397322 - DNA, 15 bp, Homo sapiens
catttccttctctta

SEQ ID NO: 397323 - DNA, 15 bp, Homo sapiens
acatttccttctctt

SEQ ID NO: 397324 - DNA, 15 bp, Homo sapiens
gacatttccttctct

SEQ ID NO: 397325 - DNA, 15 bp, Homo sapiens
agacatttccttctc

SEQ ID NO: 397326 - DNA, 15 bp, Homo sapiens
aagacatttccttct

SEQ ID NO: 397327 - DNA, 15 bp, Homo sapiens
gaagacatttccttc

SEQ ID NO: 397328 - DNA, 15 bp, Homo sapiens
tgaagacatttcctt

SEQ ID NO: 397329 - DNA, 15 bp, Homo sapiens
atgaagacatttcct

SEQ ID NO: 397330 - DNA, 15 bp, Homo sapiens
aatgaagacatttcc

SEQ ID NO: 397331 - DNA, 15 bp, Homo sapiens
aaatgaagacatttc

SEQ ID NO: 397332 - DNA, 15 bp, Homo sapiens
aaaatgaagacattt

SEQ ID NO: 397333 - DNA, 15 bp, Homo sapiens
gaaaatgaagacatt

SEQ ID NO: 397334 - DNA, 15 bp, Homo sapiens
tgaaaatgaagacat

SEQ ID NO: 397335 - DNA, 15 bp, Homo sapiens
ttgaaaatgaagaca

SEQ ID NO: 397336 - DNA, 15 bp, Homo sapiens
tttgaaaatgaagac

SEQ ID NO: 397337 - DNA, 15 bp, Homo sapiens
atttgaaaatgaaga

SEQ ID NO: 397338 - DNA, 15 bp, Homo sapiens
tatttgaaaatgaag

SEQ ID NO: 397339 - DNA, 15 bp, Homo sapiens
atatttgaaaatgaa

SEQ ID NO: 397340 - DNA, 15 bp, Homo sapiens
aatatttgaaaatga

SEQ ID NO: 397341 - DNA, 15 bp, Homo sapiens
caatatttgaaaatg

SEQ ID NO: 397342 - DNA, 15 bp, Homo sapiens
acaatatttgaaaat

SEQ ID NO: 397343 - DNA, 15 bp, Homo sapiens
tacaatatttgaaaa

SEQ ID NO: 397344 - DNA, 15 bp, Homo sapiens
atacaatatttgaaa

SEQ ID NO: 397345 - DNA, 15 bp, Homo sapiens
aatacaatatttgaa

SEQ ID NO: 397346 - DNA, 15 bp, Homo sapiens
caatacaatatttga

SEQ ID NO: 397347 - DNA, 15 bp, Homo sapiens
tcaatacaatatttg

SEQ ID NO: 397348 - DNA, 15 bp, Homo sapiens
atcaatacaatattt

SEQ ID NO: 397349 - DNA, 15 bp, Homo sapiens
aatcaatacaatatt

SEQ ID NO: 397350 - DNA, 15 bp, Homo sapiens
taatcaatacaatat

SEQ ID NO: 397351 - DNA, 15 bp, Homo sapiens
ttaatcaatacaata

SEQ ID NO: 397352 - DNA, 15 bp, Homo sapiens
cttaatcaatacaat

SEQ ID NO: 397353 - DNA, 15 bp, Homo sapiens
acttaatcaatacaa

SEQ ID NO: 397354 - DNA, 15 bp, Homo sapiens
aacttaatcaataca

SEQ ID NO: 397355 - DNA, 15 bp, Homo sapiens
caacttaatcaatac

SEQ ID NO: 397356 - DNA, 15 bp, Homo sapiens
tcaacttaatcaata

SEQ ID NO: 397357 - DNA, 15 bp, Homo sapiens
atcaacttaatcaat

SEQ ID NO: 397358 - DNA, 15 bp, Homo sapiens
aatcaacttaatcaa

SEQ ID NO: 397359 - DNA, 15 bp, Homo sapiens
aaatcaacttaatca

SEQ ID NO: 397360 - DNA, 15 bp, Homo sapiens
aaaatcaacttaatc

SEQ ID NO: 397361 - DNA, 15 bp, Homo sapiens
taaaatcaacttaat

SEQ ID NO: 397362 - DNA, 15 bp, Homo sapiens
ataaaatcaacttaa

SEQ ID NO: 397363 - DNA, 15 bp, Homo sapiens
cataaaatcaactta

SEQ ID NO: 397364 - DNA, 15 bp, Homo sapiens
acataaaatcaactt

SEQ ID NO: 397365 - DNA, 15 bp, Homo sapiens
aacataaaatcaact

SEQ ID NO: 397366 - DNA, 15 bp, Homo sapiens
aaacataaaatcaac

SEQ ID NO: 397367 - DNA, 15 bp, Homo sapiens
gaaacataaaatcaa

SEQ ID NO: 397368 - DNA, 15 bp, Homo sapiens
tgaaacataaaatca

SEQ ID NO: 397369 - DNA, 15 bp, Homo sapiens
ctgaaacataaaatc

SEQ ID NO: 397370 - DNA, 15 bp, Homo sapiens
tctgaaacataaaat

SEQ ID NO: 397371 - DNA, 15 bp, Homo sapiens
gtctgaaacataaaa

SEQ ID NO: 397372 - DNA, 15 bp, Homo sapiens
ggtctgaaacataaa

SEQ ID NO: 397373 - DNA, 15 bp, Homo sapiens
aggtctgaaacataa

SEQ ID NO: 397374 - DNA, 15 bp, Homo sapiens
aaggtctgaaacata

SEQ ID NO: 397375 - DNA, 15 bp, Homo sapiens
aaaggtctgaaacat

SEQ ID NO: 397376 - DNA, 15 bp, Homo sapiens
caaaggtctgaaaca

SEQ ID NO: 397377 - DNA, 15 bp, Homo sapiens
tcaaaggtctgaaac

SEQ ID NO: 397378 - DNA, 15 bp, Homo sapiens
ctcaaaggtctgaaa

SEQ ID NO: 397379 - DNA, 15 bp, Homo sapiens
cctcaaaggtctgaa

SEQ ID NO: 397380 - DNA, 15 bp, Homo sapiens
acctcaaaggtctga

SEQ ID NO: 397381 - DNA, 15 bp, Homo sapiens
gacctcaaaggtctg

SEQ ID NO: 397382 - DNA, 15 bp, Homo sapiens
tgacctcaaaggtct

SEQ ID NO: 397383 - DNA, 15 bp, Homo sapiens
ctgacctcaaaggtc

SEQ ID NO: 397384 - DNA, 15 bp, Homo sapiens
tctgacctcaaaggt

SEQ ID NO: 397385 - DNA, 15 bp, Homo sapiens
ttctgacctcaaagg

SEQ ID NO: 397386 - DNA, 15 bp, Homo sapiens
tttctgacctcaaag

SEQ ID NO: 397387 - DNA, 15 bp, Homo sapiens
atttctgacctcaaa

SEQ ID NO: 397388 - DNA, 15 bp, Homo sapiens
aatttctgacctcaa

SEQ ID NO: 397389 - DNA, 15 bp, Homo sapiens
aaatttctgacctca

SEQ ID NO: 397390 - DNA, 15 bp, Homo sapiens
caaatttctgacctc

SEQ ID NO: 397391 - DNA, 15 bp, Homo sapiens
gcaaatttctgacct

SEQ ID NO: 397392 - DNA, 15 bp, Homo sapiens
tgcaaatttctgacc

SEQ ID NO: 397393 - DNA, 15 bp, Homo sapiens
ctgcaaatttctgac

SEQ ID NO: 397394 - DNA, 15 bp, Homo sapiens
actgcaaatttctga

SEQ ID NO: 397395 - DNA, 15 bp, Homo sapiens
tactgcaaatttctg

SEQ ID NO: 397396 - DNA, 15 bp, Homo sapiens
ctactgcaaatttct

SEQ ID NO: 397397 - DNA, 15 bp, Homo sapiens
gctactgcaaatttc

SEQ ID NO: 397398 - DNA, 15 bp, Homo sapiens
ggctactgcaaattt

SEQ ID NO: 397399 - DNA, 15 bp, Homo sapiens
aggctactgcaaatt

SEQ ID NO: 397400 - DNA, 15 bp, Homo sapiens
caggctactgcaaat

SEQ ID NO: 397401 - DNA, 15 bp, Homo sapiens
ccaggctactgcaaa

SEQ ID NO: 397402 - DNA, 15 bp, Homo sapiens
tccaggctactgcaa

SEQ ID NO: 397403 - DNA, 15 bp, Homo sapiens
atccaggctactgca

SEQ ID NO: 397404 - DNA, 15 bp, Homo sapiens
tatccaggctactgc

SEQ ID NO: 397405 - DNA, 15 bp, Homo sapiens
atatccaggctactg

SEQ ID NO: 397406 - DNA, 15 bp, Homo sapiens
gatatccaggctact

SEQ ID NO: 397407 - DNA, 15 bp, Homo sapiens
tgatatccaggctac

SEQ ID NO: 397408 - DNA, 15 bp, Homo sapiens
gtgatatccaggcta

SEQ ID NO: 397409 - DNA, 15 bp, Homo sapiens
tgtgatatccaggct

SEQ ID NO: 397410 - DNA, 15 bp, Homo sapiens
atgtgatatccaggc

SEQ ID NO: 397411 - DNA, 15 bp, Homo sapiens
aatgtgatatccagg

SEQ ID NO: 397412 - DNA, 15 bp, Homo sapiens
taatgtgatatccag

SEQ ID NO: 397413 - DNA, 15 bp, Homo sapiens
ataatgtgatatcca

SEQ ID NO: 397414 - DNA, 15 bp, Homo sapiens
tataatgtgatatcc

SEQ ID NO: 397415 - DNA, 15 bp, Homo sapiens
ttataatgtgatatc

SEQ ID NO: 397416 - DNA, 15 bp, Homo sapiens
attataatgtgatat

SEQ ID NO: 397417 - DNA, 15 bp, Homo sapiens
tattataatgtgata

SEQ ID NO: 397418 - DNA, 15 bp, Homo sapiens
gtattataatgtgat

SEQ ID NO: 397419 - DNA, 15 bp, Homo sapiens
tgtattataatgtga

SEQ ID NO: 397420 - DNA, 15 bp, Homo sapiens
atgtattataatgtg

SEQ ID NO: 397421 - DNA, 15 bp, Homo sapiens
aatgtattataatgt

SEQ ID NO: 397422 - DNA, 15 bp, Homo sapiens
gaatgtattataatg

SEQ ID NO: 397423 - DNA, 15 bp, Homo sapiens
agaatgtattataat

SEQ ID NO: 397424 - DNA, 15 bp, Homo sapiens
cagaatgtattataa

SEQ ID NO: 397425 - DNA, 15 bp, Homo sapiens
acagaatgtattata

SEQ ID NO: 397426 - DNA, 15 bp, Homo sapiens
gacagaatgtattat

SEQ ID NO: 397427 - DNA, 15 bp, Homo sapiens
agacagaatgtatta

SEQ ID NO: 397428 - DNA, 15 bp, Homo sapiens
aagacagaatgtatt

SEQ ID NO: 397429 - DNA, 15 bp, Homo sapiens
taagacagaatgtat

SEQ ID NO: 397430 - DNA, 15 bp, Homo sapiens
gtaagacagaatgta

SEQ ID NO: 397431 - DNA, 15 bp, Homo sapiens
agtaagacagaatgt

SEQ ID NO: 397432 - DNA, 15 bp, Homo sapiens
cagtaagacagaatg

SEQ ID NO: 397433 - DNA, 15 bp, Homo sapiens
tcagtaagacagaat

SEQ ID NO: 397434 - DNA, 15 bp, Homo sapiens
ttcagtaagacagaa

SEQ ID NO: 397435 - DNA, 15 bp, Homo sapiens
tttcagtaagacaga

SEQ ID NO: 397436 - DNA, 15 bp, Homo sapiens
atttcagtaagacag

SEQ ID NO: 397437 - DNA, 15 bp, Homo sapiens
tatttcagtaagaca

SEQ ID NO: 397438 - DNA, 15 bp, Homo sapiens
ttatttcagtaagac

SEQ ID NO: 397439 - DNA, 15 bp, Homo sapiens
attatttcagtaaga

SEQ ID NO: 397440 - DNA, 15 bp, Homo sapiens
tattatttcagtaag

SEQ ID NO: 397441 - DNA, 15 bp, Homo sapiens
atattatttcagtaa

SEQ ID NO: 397442 - DNA, 15 bp, Homo sapiens
aatattatttcagta

SEQ ID NO: 397443 - DNA, 15 bp, Homo sapiens
caatattatttcagt

SEQ ID NO: 397444 - DNA, 15 bp, Homo sapiens
acaatattatttcag

SEQ ID NO: 397445 - DNA, 15 bp, Homo sapiens
aacaatattatttca

SEQ ID NO: 397446 - DNA, 15 bp, Homo sapiens
aaacaatattatttc

SEQ ID NO: 397447 - DNA, 15 bp, Homo sapiens
aaaacaatattattt

SEQ ID NO: 397448 - DNA, 15 bp, Homo sapiens
taaaacaatattatt

SEQ ID NO: 397449 - DNA, 15 bp, Homo sapiens
ttaaaacaatattat

SEQ ID NO: 397450 - DNA, 15 bp, Homo sapiens
tttaaaacaatatta

SEQ ID NO: 397451 - DNA, 15 bp, Homo sapiens
atttaaaacaatatt

SEQ ID NO: 397452 - DNA, 15 bp, Homo sapiens
tatttaaaacaatat

SEQ ID NO: 397453 - DNA, 15 bp, Homo sapiens
gtatttaaaacaata

SEQ ID NO: 397454 - DNA, 15 bp, Homo sapiens
agtatttaaaacaat

SEQ ID NO: 397455 - DNA, 15 bp, Homo sapiens
aagtatttaaaacaa

SEQ ID NO: 397456 - DNA, 15 bp, Homo sapiens
caagtatttaaaaca

SEQ ID NO: 397457 - DNA, 15 bp, Homo sapiens
gcaagtatttaaaac

SEQ ID NO: 397458 - DNA, 15 bp, Homo sapiens
tgcaagtatttaaaa

SEQ ID NO: 397459 - DNA, 15 bp, Homo sapiens
gtgcaagtatttaaa

SEQ ID NO: 397460 - DNA, 15 bp, Homo sapiens
ggtgcaagtatttaa

SEQ ID NO: 397461 - DNA, 15 bp, Homo sapiens
gggtgcaagtattta

SEQ ID NO: 397462 - DNA, 15 bp, Homo sapiens
agggtgcaagtattt

SEQ ID NO: 397463 - DNA, 15 bp, Homo sapiens
aagggtgcaagtatt

SEQ ID NO: 397464 - DNA, 15 bp, Homo sapiens
gaagggtgcaagtat

SEQ ID NO: 397465 - DNA, 15 bp, Homo sapiens
ggaagggtgcaagta

SEQ ID NO: 397466 - DNA, 15 bp, Homo sapiens
aggaagggtgcaagt

SEQ ID NO: 397467 - DNA, 15 bp, Homo sapiens
gaggaagggtgcaag

SEQ ID NO: 397468 - DNA, 15 bp, Homo sapiens
tgaggaagggtgcaa

SEQ ID NO: 397469 - DNA, 15 bp, Homo sapiens
gtgaggaagggtgca

SEQ ID NO: 397470 - DNA, 15 bp, Homo sapiens
ggtgaggaagggtgc

SEQ ID NO: 397471 - DNA, 15 bp, Homo sapiens
tggtgaggaagggtg

SEQ ID NO: 397472 - DNA, 15 bp, Homo sapiens
ttggtgaggaagggt

SEQ ID NO: 397473 - DNA, 15 bp, Homo sapiens
tttggtgaggaaggg

SEQ ID NO: 397474 - DNA, 15 bp, Homo sapiens
ttttggtgaggaagg

SEQ ID NO: 397475 - DNA, 15 bp, Homo sapiens
tttttggtgaggaag

SEQ ID NO: 397476 - DNA, 15 bp, Homo sapiens
ttttttggtgaggaa

SEQ ID NO: 397477 - DNA, 15 bp, Homo sapiens
tttttttggtgagga

SEQ ID NO: 397478 - DNA, 15 bp, Homo sapiens
ttttttttggtgagg

SEQ ID NO: 397479 - DNA, 15 bp, Homo sapiens
gttttttttggtgag

SEQ ID NO: 397480 - DNA, 15 bp, Homo sapiens
tgttttttttggtga

SEQ ID NO: 397481 - DNA, 15 bp, Homo sapiens
ctgttttttttggtg

SEQ ID NO: 397482 - DNA, 15 bp, Homo sapiens
tctgttttttttggt

SEQ ID NO: 397483 - DNA, 15 bp, Homo sapiens
gtctgttttttttgg

SEQ ID NO: 397484 - DNA, 15 bp, Homo sapiens
tgtctgttttttttg

SEQ ID NO: 397485 - DNA, 15 bp, Homo sapiens
ttgtctgtttttttt

SEQ ID NO: 397486 - DNA, 15 bp, Homo sapiens
tttgtctgttttttt

SEQ ID NO: 397487 - DNA, 15 bp, Homo sapiens
ttttgtctgtttttt

SEQ ID NO: 397488 - DNA, 15 bp, Homo sapiens
tttttgtctgttttt

SEQ ID NO: 397489 - DNA, 15 bp, Homo sapiens
ttttttgtctgtttt

SEQ ID NO: 397490 - DNA, 15 bp, Homo sapiens
tttttttgtctgttt

SEQ ID NO: 397491 - DNA, 15 bp, Homo sapiens
ctttttttgtctgtt

SEQ ID NO: 397492 - DNA, 15 bp, Homo sapiens
gctttttttgtctgt

SEQ ID NO: 397493 - DNA, 15 bp, Homo sapiens
ggctttttttgtctg

SEQ ID NO: 397494 - DNA, 15 bp, Homo sapiens
aggctttttttgtct

SEQ ID NO: 397495 - DNA, 15 bp, Homo sapiens
aaggctttttttgtc

SEQ ID NO: 397496 - DNA, 15 bp, Homo sapiens
aaaggctttttttgt

SEQ ID NO: 397497 - DNA, 15 bp, Homo sapiens
taaaggctttttttg

SEQ ID NO: 397498 - DNA, 15 bp, Homo sapiens
ttaaaggcttttttt

SEQ ID NO: 397499 - DNA, 15 bp, Homo sapiens
tttaaaggctttttt

SEQ ID NO: 397500 - DNA, 15 bp, Homo sapiens
ttttaaaggcttttt

SEQ ID NO: 397501 - DNA, 15 bp, Homo sapiens
attttaaaggctttt

SEQ ID NO: 397502 - DNA, 15 bp, Homo sapiens
tattttaaaggcttt

SEQ ID NO: 397503 - DNA, 15 bp, Homo sapiens
gtattttaaaggctt

SEQ ID NO: 397504 - DNA, 15 bp, Homo sapiens
ggtattttaaaggct

SEQ ID NO: 397505 - DNA, 15 bp, Homo sapiens
tggtattttaaaggc

SEQ ID NO: 397506 - DNA, 15 bp, Homo sapiens
ttggtattttaaagg

SEQ ID NO: 397507 - DNA, 15 bp, Homo sapiens
tttggtattttaaag

SEQ ID NO: 397508 - DNA, 15 bp, Homo sapiens
ttttggtattttaaa

SEQ ID NO: 397509 - DNA, 15 bp, Homo sapiens
tttttggtattttaa

SEQ ID NO: 397510 - DNA, 15 bp, Homo sapiens
ttttttggtatttta

SEQ ID NO: 397511 - DNA, 15 bp, Homo sapiens
tttttttggtatttt

SEQ ID NO: 397512 - DNA, 15 bp, Homo sapiens
atttttttggtattt

SEQ ID NO: 397513 - DNA, 15 bp, Homo sapiens
aatttttttggtatt

SEQ ID NO: 397514 - DNA, 15 bp, Homo sapiens
taatttttttggtat

SEQ ID NO: 397515 - DNA, 15 bp, Homo sapiens
ataatttttttggta

SEQ ID NO: 397516 - DNA, 15 bp, Homo sapiens
cataatttttttggt

SEQ ID NO: 397517 - DNA, 15 bp, Homo sapiens
acataatttttttgg

SEQ ID NO: 397518 - DNA, 15 bp, Homo sapiens
cacataatttttttg

SEQ ID NO: 397519 - DNA, 15 bp, Homo sapiens
ccacataattttttt

SEQ ID NO: 397520 - DNA, 15 bp, Homo sapiens
tccacataatttttt

SEQ ID NO: 397521 - DNA, 15 bp, Homo sapiens
ttccacataattttt

SEQ ID NO: 397522 - DNA, 15 bp, Homo sapiens
cttccacataatttt

SEQ ID NO: 397523 - DNA, 15 bp, Homo sapiens
tcttccacataattt

SEQ ID NO: 397524 - DNA, 15 bp, Homo sapiens
ctcttccacataatt

SEQ ID NO: 397525 - DNA, 15 bp, Homo sapiens
actcttccacataat

SEQ ID NO: 397526 - DNA, 15 bp, Homo sapiens
tactcttccacataa

SEQ ID NO: 397527 - DNA, 15 bp, Homo sapiens
ttactcttccacata

SEQ ID NO: 397528 - DNA, 15 bp, Homo sapiens
tttactcttccacat

SEQ ID NO: 397529 - DNA, 15 bp, Homo sapiens
gtttactcttccaca

SEQ ID NO: 397530 - DNA, 15 bp, Homo sapiens
cgtttactcttccac

SEQ ID NO: 397531 - DNA, 15 bp, Homo sapiens
gcgtttactcttcca

SEQ ID NO: 397532 - DNA, 15 bp, Homo sapiens
agcgtttactcttcc

SEQ ID NO: 397533 - DNA, 15 bp, Homo sapiens
tagcgtttactcttc

SEQ ID NO: 397534 - DNA, 15 bp, Homo sapiens
ctagcgtttactctt

SEQ ID NO: 397535 - DNA, 15 bp, Homo sapiens
actagcgtttactct

SEQ ID NO: 397536 - DNA, 15 bp, Homo sapiens
aactagcgtttactc

SEQ ID NO: 397537 - DNA, 15 bp, Homo sapiens
gaactagcgtttact

SEQ ID NO: 397538 - DNA, 15 bp, Homo sapiens
agaactagcgtttac

SEQ ID NO: 397539 - DNA, 15 bp, Homo sapiens
aagaactagcgttta

SEQ ID NO: 397540 - DNA, 15 bp, Homo sapiens
gaagaactagcgttt

SEQ ID NO: 397541 - DNA, 15 bp, Homo sapiens
tgaagaactagcgtt

SEQ ID NO: 397542 - DNA, 15 bp, Homo sapiens
ttgaagaactagcgt

SEQ ID NO: 397543 - DNA, 15 bp, Homo sapiens
tttgaagaactagcg

SEQ ID NO: 397544 - DNA, 15 bp, Homo sapiens
ctttgaagaactagc

SEQ ID NO: 397545 - DNA, 15 bp, Homo sapiens
actttgaagaactag

SEQ ID NO: 397546 - DNA, 15 bp, Homo sapiens
aactttgaagaacta

SEQ ID NO: 397547 - DNA, 15 bp, Homo sapiens
taactttgaagaact

SEQ ID NO: 397548 - DNA, 15 bp, Homo sapiens
ttaactttgaagaac

SEQ ID NO: 397549 - DNA, 15 bp, Homo sapiens
tttaactttgaagaa

SEQ ID NO: 397550 - DNA, 15 bp, Homo sapiens
ctttaactttgaaga

SEQ ID NO: 397551 - DNA, 15 bp, Homo sapiens
tctttaactttgaag

SEQ ID NO: 397552 - DNA, 15 bp, Homo sapiens
gtctttaactttgaa

SEQ ID NO: 397553 - DNA, 15 bp, Homo sapiens
agtctttaactttga

SEQ ID NO: 397554 - DNA, 15 bp, Homo sapiens
aagtctttaactttg

SEQ ID NO: 397555 - DNA, 15 bp, Homo sapiens
taagtctttaacttt

SEQ ID NO: 397556 - DNA, 15 bp, Homo sapiens
gtaagtctttaactt

SEQ ID NO: 397557 - DNA, 15 bp, Homo sapiens
tgtaagtctttaact

SEQ ID NO: 397558 - DNA, 15 bp, Homo sapiens
gtgtaagtctttaac

SEQ ID NO: 397559 - DNA, 15 bp, Homo sapiens
tgtgtaagtctttaa

SEQ ID NO: 397560 - DNA, 15 bp, Homo sapiens
ctgtgtaagtcttta

SEQ ID NO: 397561 - DNA, 15 bp, Homo sapiens
gctgtgtaagtcttt

SEQ ID NO: 397562 - DNA, 15 bp, Homo sapiens
agctgtgtaagtctt

SEQ ID NO: 397563 - DNA, 15 bp, Homo sapiens
tagctgtgtaagtct

SEQ ID NO: 397564 - DNA, 15 bp, Homo sapiens
atagctgtgtaagtc

SEQ ID NO: 397565 - DNA, 15 bp, Homo sapiens
catagctgtgtaagt

SEQ ID NO: 397566 - DNA, 15 bp, Homo sapiens
ccatagctgtgtaag

SEQ ID NO: 397567 - DNA, 15 bp, Homo sapiens
gccatagctgtgtaa

SEQ ID NO: 397568 - DNA, 15 bp, Homo sapiens
tgccatagctgtgta

SEQ ID NO: 397569 - DNA, 15 bp, Homo sapiens
ttgccatagctgtgt

SEQ ID NO: 397570 - DNA, 15 bp, Homo sapiens
attgccatagctgtg

SEQ ID NO: 397571 - DNA, 15 bp, Homo sapiens
tattgccatagctgt

SEQ ID NO: 397572 - DNA, 15 bp, Homo sapiens
ctattgccatagctg

SEQ ID NO: 397573 - DNA, 15 bp, Homo sapiens
tctattgccatagct

SEQ ID NO: 397574 - DNA, 15 bp, Homo sapiens
ttctattgccatagc

SEQ ID NO: 397575 - DNA, 15 bp, Homo sapiens
attctattgccatag

SEQ ID NO: 397576 - DNA, 15 bp, Homo sapiens
aattctattgccata

SEQ ID NO: 397577 - DNA, 15 bp, Homo sapiens
taattctattgccat

SEQ ID NO: 397578 - DNA, 15 bp, Homo sapiens
ttaattctattgcca

SEQ ID NO: 397579 - DNA, 15 bp, Homo sapiens
attaattctattgcc

SEQ ID NO: 397580 - DNA, 15 bp, Homo sapiens
tattaattctattgc

SEQ ID NO: 397581 - DNA, 15 bp, Homo sapiens
ttattaattctattg

SEQ ID NO: 397582 - DNA, 15 bp, Homo sapiens
tttattaattctatt

SEQ ID NO: 397583 - DNA, 15 bp, Homo sapiens
atttattaattctat

SEQ ID NO: 397584 - DNA, 15 bp, Homo sapiens
catttattaattcta

SEQ ID NO: 397585 - DNA, 15 bp, Homo sapiens
gcatttattaattct

SEQ ID NO: 397586 - DNA, 15 bp, Homo sapiens
agcatttattaattc

SEQ ID NO: 397587 - DNA, 15 bp, Homo sapiens
gagcatttattaatt

SEQ ID NO: 397588 - DNA, 15 bp, Homo sapiens
agagcatttattaat

SEQ ID NO: 397589 - DNA, 15 bp, Homo sapiens
aagagcatttattaa

SEQ ID NO: 397590 - DNA, 15 bp, Homo sapiens
aaagagcatttatta

SEQ ID NO: 397591 - DNA, 15 bp, Homo sapiens
aaaagagcatttatt

SEQ ID NO: 397592 - DNA, 15 bp, Homo sapiens
taaaagagcatttat

SEQ ID NO: 397593 - DNA, 15 bp, Homo sapiens
ataaaagagcattta

SEQ ID NO: 397594 - DNA, 15 bp, Homo sapiens
cataaaagagcattt

SEQ ID NO: 397595 - DNA, 15 bp, Homo sapiens
gcataaaagagcatt

SEQ ID NO: 397596 - DNA, 15 bp, Homo sapiens
ggcataaaagagcat

SEQ ID NO: 397597 - DNA, 15 bp, Homo sapiens
aggcataaaagagca

SEQ ID NO: 397598 - DNA, 15 bp, Homo sapiens
caggcataaaagagc

SEQ ID NO: 397599 - DNA, 15 bp, Homo sapiens
tcaggcataaaagag

SEQ ID NO: 397600 - DNA, 15 bp, Homo sapiens
gtcaggcataaaaga

SEQ ID NO: 397601 - DNA, 15 bp, Homo sapiens
tgtcaggcataaaag

SEQ ID NO: 397602 - DNA, 15 bp, Homo sapiens
gtgtcaggcataaaa

SEQ ID NO: 397603 - DNA, 15 bp, Homo sapiens
agtgtcaggcataaa

SEQ ID NO: 397604 - DNA, 15 bp, Homo sapiens
cagtgtcaggcataa

SEQ ID NO: 397605 - DNA, 15 bp, Homo sapiens
gcagtgtcaggcata

SEQ ID NO: 397606 - DNA, 15 bp, Homo sapiens
agcagtgtcaggcat

SEQ ID NO: 397607 - DNA, 15 bp, Homo sapiens
aagcagtgtcaggca

SEQ ID NO: 397608 - DNA, 15 bp, Homo sapiens
aaagcagtgtcaggc

SEQ ID NO: 397609 - DNA, 15 bp, Homo sapiens
gaaagcagtgtcagg

SEQ ID NO: 397610 - DNA, 15 bp, Homo sapiens
tgaaagcagtgtcag

SEQ ID NO: 397611 - DNA, 15 bp, Homo sapiens
atgaaagcagtgtca

SEQ ID NO: 397612 - DNA, 15 bp, Homo sapiens
gatgaaagcagtgtc

SEQ ID NO: 397613 - DNA, 15 bp, Homo sapiens
tgatgaaagcagtgt

SEQ ID NO: 397614 - DNA, 15 bp, Homo sapiens
ttgatgaaagcagtg

SEQ ID NO: 397615 - DNA, 15 bp, Homo sapiens
attgatgaaagcagt

SEQ ID NO: 397616 - DNA, 15 bp, Homo sapiens
tattgatgaaagcag

SEQ ID NO: 397617 - DNA, 15 bp, Homo sapiens
atattgatgaaagca

SEQ ID NO: 397618 - DNA, 15 bp, Homo sapiens
gatattgatgaaagc

SEQ ID NO: 397619 - DNA, 15 bp, Homo sapiens
agatattgatgaaag

SEQ ID NO: 397620 - DNA, 15 bp, Homo sapiens
gagatattgatgaaa

SEQ ID NO: 397621 - DNA, 15 bp, Homo sapiens
ggagatattgatgaa

SEQ ID NO: 397622 - DNA, 15 bp, Homo sapiens
tggagatattgatga

SEQ ID NO: 397623 - DNA, 15 bp, Homo sapiens
ttggagatattgatg

SEQ ID NO: 397624 - DNA, 15 bp, Homo sapiens
attggagatattgat

SEQ ID NO: 397625 - DNA, 15 bp, Homo sapiens
cattggagatattga

SEQ ID NO: 397626 - DNA, 15 bp, Homo sapiens
tcattggagatattg

SEQ ID NO: 397627 - DNA, 15 bp, Homo sapiens
atcattggagatatt

SEQ ID NO: 397628 - DNA, 15 bp, Homo sapiens
tatcattggagatat

SEQ ID NO: 397629 - DNA, 15 bp, Homo sapiens
gtatcattggagata

SEQ ID NO: 397630 - DNA, 15 bp, Homo sapiens
agtatcattggagat

SEQ ID NO: 397631 - DNA, 15 bp, Homo sapiens
tagtatcattggaga

SEQ ID NO: 397632 - DNA, 15 bp, Homo sapiens
ctagtatcattggag

SEQ ID NO: 397633 - DNA, 15 bp, Homo sapiens
actagtatcattgga

SEQ ID NO: 397634 - DNA, 15 bp, Homo sapiens
gactagtatcattgg

SEQ ID NO: 397635 - DNA, 15 bp, Homo sapiens
agactagtatcattg

SEQ ID NO: 397636 - DNA, 15 bp, Homo sapiens
gagactagtatcatt

SEQ ID NO: 397637 - DNA, 15 bp, Homo sapiens
tgagactagtatcat

SEQ ID NO: 397638 - DNA, 15 bp, Homo sapiens
atgagactagtatca

SEQ ID NO: 397639 - DNA, 15 bp, Homo sapiens
gatgagactagtatc

SEQ ID NO: 397640 - DNA, 15 bp, Homo sapiens
agatgagactagtat

SEQ ID NO: 397641 - DNA, 15 bp, Homo sapiens
gagatgagactagta

SEQ ID NO: 397642 - DNA, 15 bp, Homo sapiens
agagatgagactagt

SEQ ID NO: 397643 - DNA, 15 bp, Homo sapiens
aagagatgagactag

SEQ ID NO: 397644 - DNA, 15 bp, Homo sapiens
aaagagatgagacta

SEQ ID NO: 397645 - DNA, 15 bp, Homo sapiens
caaagagatgagact

SEQ ID NO: 397646 - DNA, 15 bp, Homo sapiens
tcaaagagatgagac

SEQ ID NO: 397647 - DNA, 15 bp, Homo sapiens
gtcaaagagatgaga

SEQ ID NO: 397648 - DNA, 15 bp, Homo sapiens
agtcaaagagatgag

SEQ ID NO: 397649 - DNA, 15 bp, Homo sapiens
aagtcaaagagatga

SEQ ID NO: 397650 - DNA, 15 bp, Homo sapiens
taagtcaaagagatg

SEQ ID NO: 397651 - DNA, 15 bp, Homo sapiens
ctaagtcaaagagat

SEQ ID NO: 397652 - DNA, 15 bp, Homo sapiens
actaagtcaaagaga

SEQ ID NO: 397653 - DNA, 15 bp, Homo sapiens
cactaagtcaaagag

SEQ ID NO: 397654 - DNA, 15 bp, Homo sapiens
tcactaagtcaaaga

SEQ ID NO: 397655 - DNA, 15 bp, Homo sapiens
ttcactaagtcaaag

SEQ ID NO: 397656 - DNA, 15 bp, Homo sapiens
attcactaagtcaaa

SEQ ID NO: 397657 - DNA, 15 bp, Homo sapiens
gattcactaagtcaa

SEQ ID NO: 397658 - DNA, 15 bp, Homo sapiens
agattcactaagtca

SEQ ID NO: 397659 - DNA, 15 bp, Homo sapiens
cagattcactaagtc

SEQ ID NO: 397660 - DNA, 15 bp, Homo sapiens
tcagattcactaagt

SEQ ID NO: 397661 - DNA, 15 bp, Homo sapiens
ttcagattcactaag

SEQ ID NO: 397662 - DNA, 15 bp, Homo sapiens
attcagattcactaa

SEQ ID NO: 397663 - DNA, 15 bp, Homo sapiens
gattcagattcacta

SEQ ID NO: 397664 - DNA, 15 bp, Homo sapiens
agattcagattcact

SEQ ID NO: 397665 - DNA, 15 bp, Homo sapiens
gagattcagattcac

SEQ ID NO: 397666 - DNA, 15 bp, Homo sapiens
ggagattcagattca

SEQ ID NO: 397667 - DNA, 15 bp, Homo sapiens
gggagattcagattc

SEQ ID NO: 397668 - DNA, 15 bp, Homo sapiens
tgggagattcagatt

SEQ ID NO: 397669 - DNA, 15 bp, Homo sapiens
gtgggagattcagat

SEQ ID NO: 397670 - DNA, 15 bp, Homo sapiens
tgtgggagattcaga

SEQ ID NO: 397671 - DNA, 15 bp, Homo sapiens
ctgtgggagattcag

SEQ ID NO: 397672 - DNA, 15 bp, Homo sapiens
actgtgggagattca

SEQ ID NO: 397673 - DNA, 15 bp, Homo sapiens
aactgtgggagattc

SEQ ID NO: 397674 - DNA, 15 bp, Homo sapiens
caactgtgggagatt

SEQ ID NO: 397675 - DNA, 15 bp, Homo sapiens
acaactgtgggagat

SEQ ID NO: 397676 - DNA, 15 bp, Homo sapiens
cacaactgtgggaga

SEQ ID NO: 397677 - DNA, 15 bp, Homo sapiens
gcacaactgtgggag

SEQ ID NO: 397678 - DNA, 15 bp, Homo sapiens
tgcacaactgtggga

SEQ ID NO: 397679 - DNA, 15 bp, Homo sapiens
ctgcacaactgtggg

SEQ ID NO: 397680 - DNA, 15 bp, Homo sapiens
tctgcacaactgtgg

SEQ ID NO: 397681 - DNA, 15 bp, Homo sapiens
atctgcacaactgtg

SEQ ID NO: 397682 - DNA, 15 bp, Homo sapiens
aatctgcacaactgt

SEQ ID NO: 397683 - DNA, 15 bp, Homo sapiens
caatctgcacaactg

SEQ ID NO: 397684 - DNA, 15 bp, Homo sapiens
ccaatctgcacaact

SEQ ID NO: 397685 - DNA, 15 bp, Homo sapiens
gccaatctgcacaac

SEQ ID NO: 397686 - DNA, 15 bp, Homo sapiens
ggccaatctgcacaa

SEQ ID NO: 397687 - DNA, 15 bp, Homo sapiens
tggccaatctgcaca

SEQ ID NO: 397688 - DNA, 15 bp, Homo sapiens
gtggccaatctgcac

SEQ ID NO: 397689 - DNA, 15 bp, Homo sapiens
tgtggccaatctgca

SEQ ID NO: 397690 - DNA, 15 bp, Homo sapiens
ctgtggccaatctgc

SEQ ID NO: 397691 - DNA, 15 bp, Homo sapiens
actgtggccaatctg

SEQ ID NO: 397692 - DNA, 15 bp, Homo sapiens
gactgtggccaatct

SEQ ID NO: 397693 - DNA, 15 bp, Homo sapiens
tgactgtggccaatc

SEQ ID NO: 397694 - DNA, 15 bp, Homo sapiens
ctgactgtggccaat

SEQ ID NO: 397695 - DNA, 15 bp, Homo sapiens
actgactgtggccaa

SEQ ID NO: 397696 - DNA, 15 bp, Homo sapiens
gactgactgtggcca

SEQ ID NO: 397697 - DNA, 15 bp, Homo sapiens
agactgactgtggcc

SEQ ID NO: 397698 - DNA, 15 bp, Homo sapiens
tagactgactgtggc

SEQ ID NO: 397699 - DNA, 15 bp, Homo sapiens
atagactgactgtgg

SEQ ID NO: 397700 - DNA, 15 bp, Homo sapiens
aatagactgactgtg

SEQ ID NO: 397701 - DNA, 15 bp, Homo sapiens
aaatagactgactgt

SEQ ID NO: 397702 - DNA, 15 bp, Homo sapiens
aaaatagactgactg

SEQ ID NO: 397703 - DNA, 15 bp, Homo sapiens
caaaatagactgact

SEQ ID NO: 397704 - DNA, 15 bp, Homo sapiens
ccaaaatagactgac

SEQ ID NO: 397705 - DNA, 15 bp, Homo sapiens
cccaaaatagactga

SEQ ID NO: 397706 - DNA, 15 bp, Homo sapiens
gcccaaaatagactg

SEQ ID NO: 397707 - DNA, 15 bp, Homo sapiens
agcccaaaatagact

SEQ ID NO: 397708 - DNA, 15 bp, Homo sapiens
gagcccaaaatagac

SEQ ID NO: 397709 - DNA, 15 bp, Homo sapiens
tgagcccaaaataga

SEQ ID NO: 397710 - DNA, 15 bp, Homo sapiens
gtgagcccaaaatag

SEQ ID NO: 397711 - DNA, 15 bp, Homo sapiens
agtgagcccaaaata

SEQ ID NO: 397712 - DNA, 15 bp, Homo sapiens
aagtgagcccaaaat

SEQ ID NO: 397713 - DNA, 15 bp, Homo sapiens
aaagtgagcccaaaa

SEQ ID NO: 397714 - DNA, 15 bp, Homo sapiens
caaagtgagcccaaa

SEQ ID NO: 397715 - DNA, 15 bp, Homo sapiens
tcaaagtgagcccaa

SEQ ID NO: 397716 - DNA, 15 bp, Homo sapiens
ttcaaagtgagccca

SEQ ID NO: 397717 - DNA, 15 bp, Homo sapiens
tttcaaagtgagccc

SEQ ID NO: 397718 - DNA, 15 bp, Homo sapiens
atttcaaagtgagcc

SEQ ID NO: 397719 - DNA, 15 bp, Homo sapiens
catttcaaagtgagc

SEQ ID NO: 397720 - DNA, 15 bp, Homo sapiens
ccatttcaaagtgag

SEQ ID NO: 397721 - DNA, 15 bp, Homo sapiens
cccatttcaaagtga

SEQ ID NO: 397722 - DNA, 15 bp, Homo sapiens
acccatttcaaagtg

SEQ ID NO: 397723 - DNA, 15 bp, Homo sapiens
cacccatttcaaagt

SEQ ID NO: 397724 - DNA, 15 bp, Homo sapiens
acacccatttcaaag

SEQ ID NO: 397725 - DNA, 15 bp, Homo sapiens
aacacccatttcaaa

SEQ ID NO: 397726 - DNA, 15 bp, Homo sapiens
gaacacccatttcaa

SEQ ID NO: 397727 - DNA, 15 bp, Homo sapiens
agaacacccatttca

SEQ ID NO: 397728 - DNA, 15 bp, Homo sapiens
tagaacacccatttc

SEQ ID NO: 397729 - DNA, 15 bp, Homo sapiens
atagaacacccattt

SEQ ID NO: 397730 - DNA, 15 bp, Homo sapiens
tatagaacacccatt

SEQ ID NO: 397731 - DNA, 15 bp, Homo sapiens
ctatagaacacccat

SEQ ID NO: 397732 - DNA, 15 bp, Homo sapiens
actatagaacaccca

SEQ ID NO: 397733 - DNA, 15 bp, Homo sapiens
tactatagaacaccc

SEQ ID NO: 397734 - DNA, 15 bp, Homo sapiens
atactatagaacacc

SEQ ID NO: 397735 - DNA, 15 bp, Homo sapiens
catactatagaacac

SEQ ID NO: 397736 - DNA, 15 bp, Homo sapiens
acatactatagaaca

SEQ ID NO: 397737 - DNA, 15 bp, Homo sapiens
cacatactatagaac

SEQ ID NO: 397738 - DNA, 15 bp, Homo sapiens
acacatactatagaa

SEQ ID NO: 397739 - DNA, 15 bp, Homo sapiens
tacacatactataga

SEQ ID NO: 397740 - DNA, 15 bp, Homo sapiens
ctacacatactatag

SEQ ID NO: 397741 - DNA, 15 bp, Homo sapiens
tctacacatactata

SEQ ID NO: 397742 - DNA, 15 bp, Homo sapiens
gtctacacatactat

SEQ ID NO: 397743 - DNA, 15 bp, Homo sapiens
agtctacacatacta

SEQ ID NO: 397744 - DNA, 15 bp, Homo sapiens
tagtctacacatact

SEQ ID NO: 397745 - DNA, 15 bp, Homo sapiens
ttagtctacacatac

SEQ ID NO: 397746 - DNA, 15 bp, Homo sapiens
attagtctacacata

SEQ ID NO: 397747 - DNA, 15 bp, Homo sapiens
gattagtctacacat

SEQ ID NO: 397748 - DNA, 15 bp, Homo sapiens
tgattagtctacaca

SEQ ID NO: 397749 - DNA, 15 bp, Homo sapiens
atgattagtctacac

SEQ ID NO: 397750 - DNA, 15 bp, Homo sapiens
gatgattagtctaca

SEQ ID NO: 397751 - DNA, 15 bp, Homo sapiens
tgatgattagtctac

SEQ ID NO: 397752 - DNA, 15 bp, Homo sapiens
gtgatgattagtcta

SEQ ID NO: 397753 - DNA, 15 bp, Homo sapiens
tgtgatgattagtct

SEQ ID NO: 397754 - DNA, 15 bp, Homo sapiens
ttgtgatgattagtc

SEQ ID NO: 397755 - DNA, 15 bp, Homo sapiens
tttgtgatgattagt

SEQ ID NO: 397756 - DNA, 15 bp, Homo sapiens
ctttgtgatgattag

SEQ ID NO: 397757 - DNA, 15 bp, Homo sapiens
gctttgtgatgatta

SEQ ID NO: 397758 - DNA, 15 bp, Homo sapiens
tgctttgtgatgatt

SEQ ID NO: 397759 - DNA, 15 bp, Homo sapiens
ctgctttgtgatgat

SEQ ID NO: 397760 - DNA, 15 bp, Homo sapiens
cctgctttgtgatga

SEQ ID NO: 397761 - DNA, 15 bp, Homo sapiens
tcctgctttgtgatg

SEQ ID NO: 397762 - DNA, 15 bp, Homo sapiens
ttcctgctttgtgat

SEQ ID NO: 397763 - DNA, 15 bp, Homo sapiens
cttcctgctttgtga

SEQ ID NO: 397764 - DNA, 15 bp, Homo sapiens
acttcctgctttgtg

SEQ ID NO: 397765 - DNA, 15 bp, Homo sapiens
tacttcctgctttgt

SEQ ID NO: 397766 - DNA, 15 bp, Homo sapiens
atacttcctgctttg

SEQ ID NO: 397767 - DNA, 15 bp, Homo sapiens
tatacttcctgcttt

SEQ ID NO: 397768 - DNA, 15 bp, Homo sapiens
ctatacttcctgctt

SEQ ID NO: 397769 - DNA, 15 bp, Homo sapiens
gctatacttcctgct

SEQ ID NO: 397770 - DNA, 15 bp, Homo sapiens
agctatacttcctgc

SEQ ID NO: 397771 - DNA, 15 bp, Homo sapiens
aagctatacttcctg

SEQ ID NO: 397772 - DNA, 15 bp, Homo sapiens
gaagctatacttcct

SEQ ID NO: 397773 - DNA, 15 bp, Homo sapiens
agaagctatacttcc

SEQ ID NO: 397774 - DNA, 15 bp, Homo sapiens
cagaagctatacttc

SEQ ID NO: 397775 - DNA, 15 bp, Homo sapiens
acagaagctatactt

SEQ ID NO: 397776 - DNA, 15 bp, Homo sapiens
tacagaagctatact

SEQ ID NO: 397777 - DNA, 15 bp, Homo sapiens
ttacagaagctatac

SEQ ID NO: 397778 - DNA, 15 bp, Homo sapiens
gttacagaagctata

SEQ ID NO: 397779 - DNA, 15 bp, Homo sapiens
agttacagaagctat

SEQ ID NO: 397780 - DNA, 15 bp, Homo sapiens
gagttacagaagcta

SEQ ID NO: 397781 - DNA, 15 bp, Homo sapiens
ggagttacagaagct

SEQ ID NO: 397782 - DNA, 15 bp, Homo sapiens
cggagttacagaagc

SEQ ID NO: 397783 - DNA, 15 bp, Homo sapiens
acggagttacagaag

SEQ ID NO: 397784 - DNA, 15 bp, Homo sapiens
aacggagttacagaa

SEQ ID NO: 397785 - DNA, 15 bp, Homo sapiens
aaacggagttacaga

SEQ ID NO: 397786 - DNA, 15 bp, Homo sapiens
taaacggagttacag

SEQ ID NO: 397787 - DNA, 15 bp, Homo sapiens
ataaacggagttaca

SEQ ID NO: 397788 - DNA, 15 bp, Homo sapiens
aataaacggagttac

SEQ ID NO: 397789 - DNA, 15 bp, Homo sapiens
taataaacggagtta

SEQ ID NO: 397790 - DNA, 15 bp, Homo sapiens
gtaataaacggagtt

SEQ ID NO: 397791 - DNA, 15 bp, Homo sapiens
ggtaataaacggagt

SEQ ID NO: 397792 - DNA, 15 bp, Homo sapiens
tggtaataaacggag

SEQ ID NO: 397793 - DNA, 15 bp, Homo sapiens
atggtaataaacgga

SEQ ID NO: 397794 - DNA, 15 bp, Homo sapiens
gatggtaataaacgg

SEQ ID NO: 397795 - DNA, 15 bp, Homo sapiens
agatggtaataaacg

SEQ ID NO: 397796 - DNA, 15 bp, Homo sapiens
aagatggtaataaac

SEQ ID NO: 397797 - DNA, 15 bp, Homo sapiens
caagatggtaataaa

SEQ ID NO: 397798 - DNA, 15 bp, Homo sapiens
tcaagatggtaataa

SEQ ID NO: 397799 - DNA, 15 bp, Homo sapiens
atcaagatggtaata

SEQ ID NO: 397800 - DNA, 15 bp, Homo sapiens
catcaagatggtaat

SEQ ID NO: 397801 - DNA, 15 bp, Homo sapiens
acatcaagatggtaa

SEQ ID NO: 397802 - DNA, 15 bp, Homo sapiens
tacatcaagatggta

SEQ ID NO: 397803 - DNA, 15 bp, Homo sapiens
atacatcaagatggt

SEQ ID NO: 397804 - DNA, 15 bp, Homo sapiens
aatacatcaagatgg

SEQ ID NO: 397805 - DNA, 15 bp, Homo sapiens
aaatacatcaagatg

SEQ ID NO: 397806 - DNA, 15 bp, Homo sapiens
gaaatacatcaagat

SEQ ID NO: 397807 - DNA, 15 bp, Homo sapiens
tgaaatacatcaaga

SEQ ID NO: 397808 - DNA, 15 bp, Homo sapiens
gtgaaatacatcaag

SEQ ID NO: 397809 - DNA, 15 bp, Homo sapiens
agtgaaatacatcaa

SEQ ID NO: 397810 - DNA, 15 bp, Homo sapiens
cagtgaaatacatca

SEQ ID NO: 397811 - DNA, 15 bp, Homo sapiens
tcagtgaaatacatc

SEQ ID NO: 397812 - DNA, 15 bp, Homo sapiens
ctcagtgaaatacat

SEQ ID NO: 397813 - DNA, 15 bp, Homo sapiens
gctcagtgaaataca

SEQ ID NO: 397814 - DNA, 15 bp, Homo sapiens
agctcagtgaaatac

SEQ ID NO: 397815 - DNA, 15 bp, Homo sapiens
aagctcagtgaaata

SEQ ID NO: 397816 - DNA, 15 bp, Homo sapiens
aaagctcagtgaaat

SEQ ID NO: 397817 - DNA, 15 bp, Homo sapiens
aaaagctcagtgaaa

SEQ ID NO: 397818 - DNA, 15 bp, Homo sapiens
gaaaagctcagtgaa

SEQ ID NO: 397819 - DNA, 15 bp, Homo sapiens
ggaaaagctcagtga

SEQ ID NO: 397820 - DNA, 15 bp, Homo sapiens
aggaaaagctcagtg

SEQ ID NO: 397821 - DNA, 15 bp, Homo sapiens
aaggaaaagctcagt

SEQ ID NO: 397822 - DNA, 15 bp, Homo sapiens
aaaggaaaagctcag

SEQ ID NO: 397823 - DNA, 15 bp, Homo sapiens
taaaggaaaagctca

SEQ ID NO: 397824 - DNA, 15 bp, Homo sapiens
gtaaaggaaaagctc

SEQ ID NO: 397825 - DNA, 15 bp, Homo sapiens
agtaaaggaaaagct

SEQ ID NO: 397826 - DNA, 15 bp, Homo sapiens
tagtaaaggaaaagc

SEQ ID NO: 397827 - DNA, 15 bp, Homo sapiens
ttagtaaaggaaaag

SEQ ID NO: 397828 - DNA, 15 bp, Homo sapiens
tttagtaaaggaaaa

SEQ ID NO: 397829 - DNA, 15 bp, Homo sapiens
ctttagtaaaggaaa

SEQ ID NO: 397830 - DNA, 15 bp, Homo sapiens
actttagtaaaggaa

SEQ ID NO: 397831 - DNA, 15 bp, Homo sapiens
aactttagtaaagga

SEQ ID NO: 397832 - DNA, 15 bp, Homo sapiens
aaactttagtaaagg

SEQ ID NO: 397833 - DNA, 15 bp, Homo sapiens
gaaactttagtaaag

SEQ ID NO: 397834 - DNA, 15 bp, Homo sapiens
ggaaactttagtaaa

SEQ ID NO: 397835 - DNA, 15 bp, Homo sapiens
gggaaactttagtaa

SEQ ID NO: 397836 - DNA, 15 bp, Homo sapiens
tgggaaactttagta

SEQ ID NO: 397837 - DNA, 15 bp, Homo sapiens
atgggaaactttagt

SEQ ID NO: 397838 - DNA, 15 bp, Homo sapiens
catgggaaactttag

SEQ ID NO: 397839 - DNA, 15 bp, Homo sapiens
acatgggaaacttta

SEQ ID NO: 397840 - DNA, 15 bp, Homo sapiens
gacatgggaaacttt

SEQ ID NO: 397841 - DNA, 15 bp, Homo sapiens
agacatgggaaactt

SEQ ID NO: 397842 - DNA, 15 bp, Homo sapiens
tagacatgggaaact

SEQ ID NO: 397843 - DNA, 15 bp, Homo sapiens
ttagacatgggaaac

SEQ ID NO: 397844 - DNA, 15 bp, Homo sapiens
tttagacatgggaaa

SEQ ID NO: 397845 - DNA, 15 bp, Homo sapiens
ttttagacatgggaa

SEQ ID NO: 397846 - DNA, 15 bp, Homo sapiens
tttttagacatggga

SEQ ID NO: 397847 - DNA, 15 bp, Homo sapiens
atttttagacatggg

SEQ ID NO: 397848 - DNA, 15 bp, Homo sapiens
catttttagacatgg

SEQ ID NO: 397849 - DNA, 15 bp, Homo sapiens
ccatttttagacatg

SEQ ID NO: 397850 - DNA, 15 bp, Homo sapiens
cccatttttagacat

SEQ ID NO: 397851 - DNA, 15 bp, Homo sapiens
tcccatttttagaca

SEQ ID NO: 397852 - DNA, 15 bp, Homo sapiens
ctcccatttttagac

SEQ ID NO: 397853 - DNA, 15 bp, Homo sapiens
actcccatttttaga

SEQ ID NO: 397854 - DNA, 15 bp, Homo sapiens
tactcccatttttag

SEQ ID NO: 397855 - DNA, 15 bp, Homo sapiens
ctactcccattttta

SEQ ID NO: 397856 - DNA, 15 bp, Homo sapiens
gctactcccattttt

SEQ ID NO: 397857 - DNA, 15 bp, Homo sapiens
cgctactcccatttt

SEQ ID NO: 397858 - DNA, 15 bp, Homo sapiens
acgctactcccattt

SEQ ID NO: 397859 - DNA, 15 bp, Homo sapiens
cacgctactcccatt

SEQ ID NO: 397860 - DNA, 15 bp, Homo sapiens
acacgctactcccat

SEQ ID NO: 397861 - DNA, 15 bp, Homo sapiens
gacacgctactccca

SEQ ID NO: 397862 - DNA, 15 bp, Homo sapiens
agacacgctactccc

SEQ ID NO: 397863 - DNA, 15 bp, Homo sapiens
cagacacgctactcc

SEQ ID NO: 397864 - DNA, 15 bp, Homo sapiens
gcagacacgctactc

SEQ ID NO: 397865 - DNA, 15 bp, Homo sapiens
agcagacacgctact

SEQ ID NO: 397866 - DNA, 15 bp, Homo sapiens
gagcagacacgctac

SEQ ID NO: 397867 - DNA, 15 bp, Homo sapiens
agagcagacacgcta

SEQ ID NO: 397868 - DNA, 15 bp, Homo sapiens
aagagcagacacgct

SEQ ID NO: 397869 - DNA, 15 bp, Homo sapiens
aaagagcagacacgc

SEQ ID NO: 397870 - DNA, 15 bp, Homo sapiens
taaagagcagacacg

SEQ ID NO: 397871 - DNA, 15 bp, Homo sapiens
ttaaagagcagacac

SEQ ID NO: 397872 - DNA, 15 bp, Homo sapiens
gttaaagagcagaca

SEQ ID NO: 397873 - DNA, 15 bp, Homo sapiens
agttaaagagcagac

SEQ ID NO: 397874 - DNA, 15 bp, Homo sapiens
cagttaaagagcaga

SEQ ID NO: 397875 - DNA, 15 bp, Homo sapiens
gcagttaaagagcag

SEQ ID NO: 397876 - DNA, 15 bp, Homo sapiens
agcagttaaagagca

SEQ ID NO: 397877 - DNA, 15 bp, Homo sapiens
aagcagttaaagagc

SEQ ID NO: 397878 - DNA, 15 bp, Homo sapiens
aaagcagttaaagag

SEQ ID NO: 397879 - DNA, 15 bp, Homo sapiens
caaagcagttaaaga

SEQ ID NO: 397880 - DNA, 15 bp, Homo sapiens
tcaaagcagttaaag

SEQ ID NO: 397881 - DNA, 15 bp, Homo sapiens
ttcaaagcagttaaa

SEQ ID NO: 397882 - DNA, 15 bp, Homo sapiens
cttcaaagcagttaa

SEQ ID NO: 397883 - DNA, 15 bp, Homo sapiens
tcttcaaagcagtta

SEQ ID NO: 397884 - DNA, 15 bp, Homo sapiens
atcttcaaagcagtt

SEQ ID NO: 397885 - DNA, 15 bp, Homo sapiens
tatcttcaaagcagt

SEQ ID NO: 397886 - DNA, 15 bp, Homo sapiens
atatcttcaaagcag

SEQ ID NO: 397887 - DNA, 15 bp, Homo sapiens
tatatcttcaaagca

SEQ ID NO: 397888 - DNA, 15 bp, Homo sapiens
gtatatcttcaaagc

SEQ ID NO: 397889 - DNA, 15 bp, Homo sapiens
tgtatatcttcaaag

SEQ ID NO: 397890 - DNA, 15 bp, Homo sapiens
ctgtatatcttcaaa

SEQ ID NO: 397891 - DNA, 15 bp, Homo sapiens
actgtatatcttcaa

SEQ ID NO: 397892 - DNA, 15 bp, Homo sapiens
aactgtatatcttca

SEQ ID NO: 397893 - DNA, 15 bp, Homo sapiens
aaactgtatatcttc

SEQ ID NO: 397894 - DNA, 15 bp, Homo sapiens
aaaactgtatatctt

SEQ ID NO: 397895 - DNA, 15 bp, Homo sapiens
taaaactgtatatct

SEQ ID NO: 397896 - DNA, 15 bp, Homo sapiens
ctaaaactgtatatc

SEQ ID NO: 397897 - DNA, 15 bp, Homo sapiens
actaaaactgtatat

SEQ ID NO: 397898 - DNA, 15 bp, Homo sapiens
aactaaaactgtata

SEQ ID NO: 397899 - DNA, 15 bp, Homo sapiens
aaactaaaactgtat

SEQ ID NO: 397900 - DNA, 15 bp, Homo sapiens
gaaactaaaactgta

SEQ ID NO: 397901 - DNA, 15 bp, Homo sapiens
agaaactaaaactgt

SEQ ID NO: 397902 - DNA, 15 bp, Homo sapiens
cagaaactaaaactg

SEQ ID NO: 397903 - DNA, 15 bp, Homo sapiens
acagaaactaaaact

SEQ ID NO: 397904 - DNA, 15 bp, Homo sapiens
cacagaaactaaaac

SEQ ID NO: 397905 - DNA, 15 bp, Homo sapiens
ccacagaaactaaaa

SEQ ID NO: 397906 - DNA, 15 bp, Homo sapiens
accacagaaactaaa

SEQ ID NO: 397907 - DNA, 15 bp, Homo sapiens
gaccacagaaactaa

SEQ ID NO: 397908 - DNA, 15 bp, Homo sapiens
tgaccacagaaacta

SEQ ID NO: 397909 - DNA, 15 bp, Homo sapiens
ctgaccacagaaact

SEQ ID NO: 397910 - DNA, 15 bp, Homo sapiens
tctgaccacagaaac

SEQ ID NO: 397911 - DNA, 15 bp, Homo sapiens
ttctgaccacagaaa

SEQ ID NO: 397912 - DNA, 15 bp, Homo sapiens
attctgaccacagaa

SEQ ID NO: 397913 - DNA, 15 bp, Homo sapiens
tattctgaccacaga

SEQ ID NO: 397914 - DNA, 15 bp, Homo sapiens
gtattctgaccacag

SEQ ID NO: 397915 - DNA, 15 bp, Homo sapiens
agtattctgaccaca

SEQ ID NO: 397916 - DNA, 15 bp, Homo sapiens
aagtattctgaccac

SEQ ID NO: 397917 - DNA, 15 bp, Homo sapiens
aaagtattctgacca

SEQ ID NO: 397918 - DNA, 15 bp, Homo sapiens
taaagtattctgacc

SEQ ID NO: 397919 - DNA, 15 bp, Homo sapiens
ctaaagtattctgac

SEQ ID NO: 397920 - DNA, 15 bp, Homo sapiens
cctaaagtattctga

SEQ ID NO: 397921 - DNA, 15 bp, Homo sapiens
acctaaagtattctg

SEQ ID NO: 397922 - DNA, 15 bp, Homo sapiens
cacctaaagtattct

SEQ ID NO: 397923 - DNA, 15 bp, Homo sapiens
acacctaaagtattc

SEQ ID NO: 397924 - DNA, 15 bp, Homo sapiens
tacacctaaagtatt

SEQ ID NO: 397925 - DNA, 15 bp, Homo sapiens
ttacacctaaagtat

SEQ ID NO: 397926 - DNA, 15 bp, Homo sapiens
cttacacctaaagta

SEQ ID NO: 397927 - DNA, 15 bp, Homo sapiens
tcttacacctaaagt

SEQ ID NO: 397928 - DNA, 15 bp, Homo sapiens
ttcttacacctaaag

SEQ ID NO: 397929 - DNA, 15 bp, Homo sapiens
cttcttacacctaaa

SEQ ID NO: 397930 - DNA, 15 bp, Homo sapiens
tcttcttacacctaa

SEQ ID NO: 397931 - DNA, 15 bp, Homo sapiens
ttcttcttacaccta

SEQ ID NO: 397932 - DNA, 15 bp, Homo sapiens
tttcttcttacacct

SEQ ID NO: 397933 - DNA, 15 bp, Homo sapiens
ctttcttcttacacc

SEQ ID NO: 397934 - DNA, 15 bp, Homo sapiens
actttcttcttacac

SEQ ID NO: 397935 - DNA, 15 bp, Homo sapiens
tactttcttcttaca

SEQ ID NO: 397936 - DNA, 15 bp, Homo sapiens
gtactttcttcttac

SEQ ID NO: 397937 - DNA, 15 bp, Homo sapiens
agtactttcttctta

SEQ ID NO: 397938 - DNA, 15 bp, Homo sapiens
tagtactttcttctt

SEQ ID NO: 397939 - DNA, 15 bp, Homo sapiens
atagtactttcttct

SEQ ID NO: 397940 - DNA, 15 bp, Homo sapiens
gatagtactttcttc

SEQ ID NO: 397941 - DNA, 15 bp, Homo sapiens
tgatagtactttctt

SEQ ID NO: 397942 - DNA, 15 bp, Homo sapiens
ttgatagtactttct

SEQ ID NO: 397943 - DNA, 15 bp, Homo sapiens
cttgatagtactttc

SEQ ID NO: 397944 - DNA, 15 bp, Homo sapiens
acttgatagtacttt

SEQ ID NO: 397945 - DNA, 15 bp, Homo sapiens
aacttgatagtactt

SEQ ID NO: 397946 - DNA, 15 bp, Homo sapiens
aaacttgatagtact

SEQ ID NO: 397947 - DNA, 15 bp, Homo sapiens
aaaacttgatagtac

SEQ ID NO: 397948 - DNA, 15 bp, Homo sapiens
caaaacttgatagta

SEQ ID NO: 397949 - DNA, 15 bp, Homo sapiens
acaaaacttgatagt

SEQ ID NO: 397950 - DNA, 15 bp, Homo sapiens
aacaaaacttgatag

SEQ ID NO: 397951 - DNA, 15 bp, Homo sapiens
caacaaaacttgata

SEQ ID NO: 397952 - DNA, 15 bp, Homo sapiens
tcaacaaaacttgat

SEQ ID NO: 397953 - DNA, 15 bp, Homo sapiens
ctcaacaaaacttga

SEQ ID NO: 397954 - DNA, 15 bp, Homo sapiens
cctcaacaaaacttg

SEQ ID NO: 397955 - DNA, 15 bp, Homo sapiens
tcctcaacaaaactt

SEQ ID NO: 397956 - DNA, 15 bp, Homo sapiens
ttcctcaacaaaact

SEQ ID NO: 397957 - DNA, 15 bp, Homo sapiens
cttcctcaacaaaac

SEQ ID NO: 397958 - DNA, 15 bp, Homo sapiens
ccttcctcaacaaaa

SEQ ID NO: 397959 - DNA, 15 bp, Homo sapiens
accttcctcaacaaa

SEQ ID NO: 397960 - DNA, 15 bp, Homo sapiens
caccttcctcaacaa

SEQ ID NO: 397961 - DNA, 15 bp, Homo sapiens
tcaccttcctcaaca

SEQ ID NO: 397962 - DNA, 15 bp, Homo sapiens
atcaccttcctcaac

SEQ ID NO: 397963 - DNA, 15 bp, Homo sapiens
tatcaccttcctcaa

SEQ ID NO: 397964 - DNA, 15 bp, Homo sapiens
ttatcaccttcctca

SEQ ID NO: 397965 - DNA, 15 bp, Homo sapiens
attatcaccttcctc

SEQ ID NO: 397966 - DNA, 15 bp, Homo sapiens
aattatcaccttcct

SEQ ID NO: 397967 - DNA, 15 bp, Homo sapiens
taattatcaccttcc

SEQ ID NO: 397968 - DNA, 15 bp, Homo sapiens
ttaattatcaccttc

SEQ ID NO: 397969 - DNA, 15 bp, Homo sapiens
tttaattatcacctt

SEQ ID NO: 397970 - DNA, 15 bp, Homo sapiens
ttttaattatcacct

SEQ ID NO: 397971 - DNA, 15 bp, Homo sapiens
attttaattatcacc

SEQ ID NO: 397972 - DNA, 15 bp, Homo sapiens
cattttaattatcac

SEQ ID NO: 397973 - DNA, 15 bp, Homo sapiens
acattttaattatca

SEQ ID NO: 397974 - DNA, 15 bp, Homo sapiens
tacattttaattatc

SEQ ID NO: 397975 - DNA, 15 bp, Homo sapiens
atacattttaattat

SEQ ID NO: 397976 - DNA, 15 bp, Homo sapiens
tatacattttaatta

SEQ ID NO: 397977 - DNA, 15 bp, Homo sapiens
atatacattttaatt

SEQ ID NO: 397978 - DNA, 15 bp, Homo sapiens
aatatacattttaat

SEQ ID NO: 397979 - DNA, 15 bp, Homo sapiens
aaatatacattttaa

SEQ ID NO: 397980 - DNA, 15 bp, Homo sapiens
caaatatacatttta

SEQ ID NO: 397981 - DNA, 15 bp, Homo sapiens
ccaaatatacatttt

SEQ ID NO: 397982 - DNA, 15 bp, Homo sapiens
tccaaatatacattt

SEQ ID NO: 397983 - DNA, 15 bp, Homo sapiens
ctccaaatatacatt

SEQ ID NO: 397984 - DNA, 15 bp, Homo sapiens
actccaaatatacat

SEQ ID NO: 397985 - DNA, 15 bp, Homo sapiens
aactccaaatataca

SEQ ID NO: 397986 - DNA, 15 bp, Homo sapiens
gaactccaaatatac

SEQ ID NO: 397987 - DNA, 15 bp, Homo sapiens
agaactccaaatata

SEQ ID NO: 397988 - DNA, 15 bp, Homo sapiens
aagaactccaaatat

SEQ ID NO: 397989 - DNA, 15 bp, Homo sapiens
taagaactccaaata

SEQ ID NO: 397990 - DNA, 15 bp, Homo sapiens
ttaagaactccaaat

SEQ ID NO: 397991 - DNA, 15 bp, Homo sapiens
attaagaactccaaa

SEQ ID NO: 397992 - DNA, 15 bp, Homo sapiens
aattaagaactccaa

SEQ ID NO: 397993 - DNA, 15 bp, Homo sapiens
aaattaagaactcca

SEQ ID NO: 397994 - DNA, 15 bp, Homo sapiens
caaattaagaactcc

SEQ ID NO: 397995 - DNA, 15 bp, Homo sapiens
tcaaattaagaactc

SEQ ID NO: 397996 - DNA, 15 bp, Homo sapiens
atcaaattaagaact

SEQ ID NO: 397997 - DNA, 15 bp, Homo sapiens
aatcaaattaagaac

SEQ ID NO: 397998 - DNA, 15 bp, Homo sapiens
taatcaaattaagaa

SEQ ID NO: 397999 - DNA, 15 bp, Homo sapiens
ataatcaaattaaga

SEQ ID NO: 398000 - DNA, 15 bp, Homo sapiens
tataatcaaattaag

SEQ ID NO: 398001 - DNA, 15 bp, Homo sapiens
atataatcaaattaa

SEQ ID NO: 398002 - DNA, 15 bp, Homo sapiens
tatataatcaaatta

SEQ ID NO: 398003 - DNA, 15 bp, Homo sapiens
atatataatcaaatt

SEQ ID NO: 398004 - DNA, 15 bp, Homo sapiens
tatatataatcaaat

SEQ ID NO: 398005 - DNA, 15 bp, Homo sapiens
atatatataatcaaa

SEQ ID NO: 398006 - DNA, 15 bp, Homo sapiens
tatatatataatcaa

SEQ ID NO: 398007 - DNA, 15 bp, Homo sapiens
atatatatataatca

SEQ ID NO: 398008 - DNA, 15 bp, Homo sapiens
tatatatatataatc

SEQ ID NO: 398009 - DNA, 15 bp, Homo sapiens
atatatatatataat

SEQ ID NO: 398010 - DNA, 15 bp, Homo sapiens
tatatatatatataa

SEQ ID NO: 398011 - DNA, 15 bp, Homo sapiens
atatatatatatata

SEQ ID NO: 398012 - DNA, 15 bp, Homo sapiens
tatatatatatatat

SEQ ID NO: 398013 - DNA, 15 bp, Homo sapiens
gatatatatatatat

SEQ ID NO: 398014 - DNA, 15 bp, Homo sapiens
cgatatatatatata

SEQ ID NO: 398015 - DNA, 15 bp, Homo sapiens
acgatatatatatat

SEQ ID NO: 398016 - DNA, 15 bp, Homo sapiens
cacgatatatatata

SEQ ID NO: 398017 - DNA, 15 bp, Homo sapiens
acacgatatatatat

SEQ ID NO: 398018 - DNA, 15 bp, Homo sapiens
cacacgatatatata

SEQ ID NO: 398019 - DNA, 15 bp, Homo sapiens
acacacgatatatat

SEQ ID NO: 398020 - DNA, 15 bp, Homo sapiens
cacacacgatatata

SEQ ID NO: 398021 - DNA, 15 bp, Homo sapiens
acacacacgatatat

SEQ ID NO: 398022 - DNA, 15 bp, Homo sapiens
cacacacacgatata

SEQ ID NO: 398023 - DNA, 15 bp, Homo sapiens
gcacacacacgatat

SEQ ID NO: 398024 - DNA, 15 bp, Homo sapiens
cgcacacacacgata

SEQ ID NO: 398025 - DNA, 15 bp, Homo sapiens
acgcacacacacgat

SEQ ID NO: 398026 - DNA, 15 bp, Homo sapiens
cacgcacacacacga

SEQ ID NO: 398027 - DNA, 15 bp, Homo sapiens
acacgcacacacacg

SEQ ID NO: 398028 - DNA, 15 bp, Homo sapiens
cacacgcacacacac

SEQ ID NO: 398029 - DNA, 15 bp, Homo sapiens
acacacgcacacaca

SEQ ID NO: 398030 - DNA, 15 bp, Homo sapiens
cacacacgcacacac

SEQ ID NO: 398031 - DNA, 15 bp, Homo sapiens
acacacacgcacaca

SEQ ID NO: 398032 - DNA, 15 bp, Homo sapiens
cacacacacgcacac

SEQ ID NO: 398033 - DNA, 15 bp, Homo sapiens
acacacacacgcaca

SEQ ID NO: 398034 - DNA, 15 bp, Homo sapiens
cacacacacacgcac

SEQ ID NO: 398035 - DNA, 15 bp, Homo sapiens
acacacacacacgca

SEQ ID NO: 398036 - DNA, 15 bp, Homo sapiens
cacacacacacacgc

SEQ ID NO: 398037 - DNA, 15 bp, Homo sapiens
gtcacacacacacac

SEQ ID NO: 398038 - DNA, 15 bp, Homo sapiens
cgtcacacacacaca

SEQ ID NO: 398039 - DNA, 15 bp, Homo sapiens
ccgtcacacacacac

SEQ ID NO: 398040 - DNA, 15 bp, Homo sapiens
tccgtcacacacaca

SEQ ID NO: 398041 - DNA, 15 bp, Homo sapiens
ctccgtcacacacac

SEQ ID NO: 398042 - DNA, 15 bp, Homo sapiens
actccgtcacacaca

SEQ ID NO: 398043 - DNA, 15 bp, Homo sapiens
gactccgtcacacac

SEQ ID NO: 398044 - DNA, 15 bp, Homo sapiens
agactccgtcacaca

SEQ ID NO: 398045 - DNA, 15 bp, Homo sapiens
gagactccgtcacac

SEQ ID NO: 398046 - DNA, 15 bp, Homo sapiens
tgagactccgtcaca

SEQ ID NO: 398047 - DNA, 15 bp, Homo sapiens
gtgagactccgtcac

SEQ ID NO: 398048 - DNA, 15 bp, Homo sapiens
ggtgagactccgtca

SEQ ID NO: 398049 - DNA, 15 bp, Homo sapiens
gggtgagactccgtc

SEQ ID NO: 398050 - DNA, 15 bp, Homo sapiens
agggtgagactccgt

SEQ ID NO: 398051 - DNA, 15 bp, Homo sapiens
cagggtgagactccg

SEQ ID NO: 398052 - DNA, 15 bp, Homo sapiens
acagggtgagactcc

SEQ ID NO: 398053 - DNA, 15 bp, Homo sapiens
aacagggtgagactc

SEQ ID NO: 398054 - DNA, 15 bp, Homo sapiens
caacagggtgagact

SEQ ID NO: 398055 - DNA, 15 bp, Homo sapiens
gcaacagggtgagac

SEQ ID NO: 398056 - DNA, 15 bp, Homo sapiens
agcaacagggtgaga

SEQ ID NO: 398057 - DNA, 15 bp, Homo sapiens
gagcaacagggtgag

SEQ ID NO: 398058 - DNA, 15 bp, Homo sapiens
agagcaacagggtga

SEQ ID NO: 398059 - DNA, 15 bp, Homo sapiens
cagagcaacagggtg

SEQ ID NO: 398060 - DNA, 15 bp, Homo sapiens
acagagcaacagggt

SEQ ID NO: 398061 - DNA, 15 bp, Homo sapiens
cacagagcaacaggg

SEQ ID NO: 398062 - DNA, 15 bp, Homo sapiens
ccacagagcaacagg

SEQ ID NO: 398063 - DNA, 15 bp, Homo sapiens
gccacagagcaacag

SEQ ID NO: 398064 - DNA, 15 bp, Homo sapiens
ggccacagagcaaca

SEQ ID NO: 398065 - DNA, 15 bp, Homo sapiens
gggccacagagcaac

SEQ ID NO: 398066 - DNA, 15 bp, Homo sapiens
tgggccacagagcaa

SEQ ID NO: 398067 - DNA, 15 bp, Homo sapiens
ctgggccacagagca

SEQ ID NO: 398068 - DNA, 15 bp, Homo sapiens
cctgggccacagagc

SEQ ID NO: 398069 - DNA, 15 bp, Homo sapiens
gcctgggccacagag

SEQ ID NO: 398070 - DNA, 15 bp, Homo sapiens
agcctgggccacaga

SEQ ID NO: 398071 - DNA, 15 bp, Homo sapiens
cagcctgggccacag

SEQ ID NO: 398072 - DNA, 15 bp, Homo sapiens
ccagcctgggccaca

SEQ ID NO: 398073 - DNA, 15 bp, Homo sapiens
tccagcctgggccac

SEQ ID NO: 398074 - DNA, 15 bp, Homo sapiens
ctccagcctgggcca

SEQ ID NO: 398075 - DNA, 15 bp, Homo sapiens
actccagcctgggcc

SEQ ID NO: 398076 - DNA, 15 bp, Homo sapiens
agattgtgccactgc

SEQ ID NO: 398077 - DNA, 15 bp, Homo sapiens
aagattgtgccactg

SEQ ID NO: 398078 - DNA, 15 bp, Homo sapiens
caagattgtgccact

SEQ ID NO: 398079 - DNA, 15 bp, Homo sapiens
ccaagattgtgccac

SEQ ID NO: 398080 - DNA, 15 bp, Homo sapiens
gccaagattgtgcca

SEQ ID NO: 398081 - DNA, 15 bp, Homo sapiens
agccaagattgtgcc

SEQ ID NO: 398082 - DNA, 15 bp, Homo sapiens
gagccaagattgtgc

SEQ ID NO: 398083 - DNA, 15 bp, Homo sapiens
tgagccaagattgtg

SEQ ID NO: 398084 - DNA, 15 bp, Homo sapiens
gtgagccaagattgt

SEQ ID NO: 398085 - DNA, 15 bp, Homo sapiens
agaggttgcagtgag

SEQ ID NO: 398086 - DNA, 15 bp, Homo sapiens
cagaggttgcagtga

SEQ ID NO: 398087 - DNA, 15 bp, Homo sapiens
gcagaggttgcagtg

SEQ ID NO: 398088 - DNA, 15 bp, Homo sapiens
aaatcacttgaaccc

SEQ ID NO: 398089 - DNA, 15 bp, Homo sapiens
aaaatcacttgaacc

SEQ ID NO: 398090 - DNA, 15 bp, Homo sapiens
gaaaatcacttgaac

SEQ ID NO: 398091 - DNA, 15 bp, Homo sapiens
ggaaaatcacttgaa

SEQ ID NO: 398092 - DNA, 15 bp, Homo sapiens
aggaaaatcacttga

SEQ ID NO: 398093 - DNA, 15 bp, Homo sapiens
caggaaaatcacttg

SEQ ID NO: 398094 - DNA, 15 bp, Homo sapiens
gcaggaaaatcactt

SEQ ID NO: 398095 - DNA, 15 bp, Homo sapiens
ggcaggaaaatcact

SEQ ID NO: 398096 - DNA, 15 bp, Homo sapiens
aggcaggaaaatcac

SEQ ID NO: 398097 - DNA, 15 bp, Homo sapiens
gaggcaggaaaatca

SEQ ID NO: 398098 - DNA, 15 bp, Homo sapiens
tgaggcaggaaaatc

SEQ ID NO: 398099 - DNA, 15 bp, Homo sapiens
ctgaggcaggaaaat

SEQ ID NO: 398100 - DNA, 15 bp, Homo sapiens
gctgaggcaggaaaa

SEQ ID NO: 398101 - DNA, 15 bp, Homo sapiens
ggctgaggcaggaaa

SEQ ID NO: 398102 - DNA, 15 bp, Homo sapiens
catggcacatgcctg

SEQ ID NO: 398103 - DNA, 15 bp, Homo sapiens
tcatggcacatgcct

SEQ ID NO: 398104 - DNA, 15 bp, Homo sapiens
gtcatggcacatgcc

SEQ ID NO: 398105 - DNA, 15 bp, Homo sapiens
tgtcatggcacatgc

SEQ ID NO: 398106 - DNA, 15 bp, Homo sapiens
gtgtcatggcacatg

SEQ ID NO: 398107 - DNA, 15 bp, Homo sapiens
ggtgtcatggcacat

SEQ ID NO: 398108 - DNA, 15 bp, Homo sapiens
gggtgtcatggcaca

SEQ ID NO: 398109 - DNA, 15 bp, Homo sapiens
tgggtgtcatggcac

SEQ ID NO: 398110 - DNA, 15 bp, Homo sapiens
ctgggtgtcatggca

SEQ ID NO: 398111 - DNA, 15 bp, Homo sapiens
gctgggtgtcatggc

SEQ ID NO: 398112 - DNA, 15 bp, Homo sapiens
agctgggtgtcatgg

SEQ ID NO: 398113 - DNA, 15 bp, Homo sapiens
tagctgggtgtcatg

SEQ ID NO: 398114 - DNA, 15 bp, Homo sapiens
ttagctgggtgtcat

SEQ ID NO: 398115 - DNA, 15 bp, Homo sapiens
attagctgggtgtca

SEQ ID NO: 398116 - DNA, 15 bp, Homo sapiens
aattagctgggtgtc

SEQ ID NO: 398117 - DNA, 15 bp, Homo sapiens
caaaaattagctggg

SEQ ID NO: 398118 - DNA, 15 bp, Homo sapiens
acaaaaattagctgg

SEQ ID NO: 398119 - DNA, 15 bp, Homo sapiens
tacaaaaattagctg

SEQ ID NO: 398120 - DNA, 15 bp, Homo sapiens
atacaaaaattagct

SEQ ID NO: 398121 - DNA, 15 bp, Homo sapiens
caaaaatacaaaaat

SEQ ID NO: 398122 - DNA, 15 bp, Homo sapiens
acaaaaatacaaaaa

SEQ ID NO: 398123 - DNA, 15 bp, Homo sapiens
aacaaaaatacaaaa

SEQ ID NO: 398124 - DNA, 15 bp, Homo sapiens
gaacaaaaatacaaa

SEQ ID NO: 398125 - DNA, 15 bp, Homo sapiens
tgaacaaaaatacaa

SEQ ID NO: 398126 - DNA, 15 bp, Homo sapiens
ctgaacaaaaataca

SEQ ID NO: 398127 - DNA, 15 bp, Homo sapiens
actgaacaaaaatac

SEQ ID NO: 398128 - DNA, 15 bp, Homo sapiens
tactgaacaaaaata

SEQ ID NO: 398129 - DNA, 15 bp, Homo sapiens
ctactgaacaaaaat

SEQ ID NO: 398130 - DNA, 15 bp, Homo sapiens
tctactgaacaaaaa

SEQ ID NO: 398131 - DNA, 15 bp, Homo sapiens
ctctactgaacaaaa

SEQ ID NO: 398132 - DNA, 15 bp, Homo sapiens
tctctactgaacaaa

SEQ ID NO: 398133 - DNA, 15 bp, Homo sapiens
atctctactgaacaa

SEQ ID NO: 398134 - DNA, 15 bp, Homo sapiens
catctctactgaaca

SEQ ID NO: 398135 - DNA, 15 bp, Homo sapiens
gcatctctactgaac

SEQ ID NO: 398136 - DNA, 15 bp, Homo sapiens
tgcatctctactgaa

SEQ ID NO: 398137 - DNA, 15 bp, Homo sapiens
ctgcatctctactga

SEQ ID NO: 398138 - DNA, 15 bp, Homo sapiens
actgcatctctactg

SEQ ID NO: 398139 - DNA, 15 bp, Homo sapiens
aactgcatctctact

SEQ ID NO: 398140 - DNA, 15 bp, Homo sapiens
aaactgcatctctac

SEQ ID NO: 398141 - DNA, 15 bp, Homo sapiens
gaaactgcatctcta

SEQ ID NO: 398142 - DNA, 15 bp, Homo sapiens
tgaaactgcatctct

SEQ ID NO: 398143 - DNA, 15 bp, Homo sapiens
gtgaaactgcatctc

SEQ ID NO: 398144 - DNA, 15 bp, Homo sapiens
ggtgaaactgcatct

SEQ ID NO: 398145 - DNA, 15 bp, Homo sapiens
tggtgaaactgcatc

SEQ ID NO: 398146 - DNA, 15 bp, Homo sapiens
atggtgaaactgcat

SEQ ID NO: 398147 - DNA, 15 bp, Homo sapiens
catggtgaaactgca

SEQ ID NO: 398148 - DNA, 15 bp, Homo sapiens
acatggtgaaactgc

SEQ ID NO: 398149 - DNA, 15 bp, Homo sapiens
aacatggtgaaactg

SEQ ID NO: 398150 - DNA, 15 bp, Homo sapiens
ggaccagcctggcca

SEQ ID NO: 398151 - DNA, 15 bp, Homo sapiens
aggaccagcctggcc

SEQ ID NO: 398152 - DNA, 15 bp, Homo sapiens
caggaccagcctggc

SEQ ID NO: 398153 - DNA, 15 bp, Homo sapiens
tcaggaccagcctgg

SEQ ID NO: 398154 - DNA, 15 bp, Homo sapiens
ttcaggaccagcctg

SEQ ID NO: 398155 - DNA, 15 bp, Homo sapiens
gttcaggaccagcct

SEQ ID NO: 398156 - DNA, 15 bp, Homo sapiens
ggttcaggaccagcc

SEQ ID NO: 398157 - DNA, 15 bp, Homo sapiens
gggttcaggaccagc

SEQ ID NO: 398158 - DNA, 15 bp, Homo sapiens
agggttcaggaccag

SEQ ID NO: 398159 - DNA, 15 bp, Homo sapiens
aagggttcaggacca

SEQ ID NO: 398160 - DNA, 15 bp, Homo sapiens
caagggttcaggacc

SEQ ID NO: 398161 - DNA, 15 bp, Homo sapiens
tcaagggttcaggac

SEQ ID NO: 398162 - DNA, 15 bp, Homo sapiens
gtcaagggttcagga

SEQ ID NO: 398163 - DNA, 15 bp, Homo sapiens
agtcaagggttcagg

SEQ ID NO: 398164 - DNA, 15 bp, Homo sapiens
cagtcaagggttcag

SEQ ID NO: 398165 - DNA, 15 bp, Homo sapiens
gcagtcaagggttca

SEQ ID NO: 398166 - DNA, 15 bp, Homo sapiens
tgcagtcaagggttc

SEQ ID NO: 398167 - DNA, 15 bp, Homo sapiens
ctgcagtcaagggtt

SEQ ID NO: 398168 - DNA, 15 bp, Homo sapiens
cctgcagtcaagggt

SEQ ID NO: 398169 - DNA, 15 bp, Homo sapiens
acctgcagtcaaggg

SEQ ID NO: 398170 - DNA, 15 bp, Homo sapiens
cacctgcagtcaagg

SEQ ID NO: 398171 - DNA, 15 bp, Homo sapiens
tcacctgcagtcaag

SEQ ID NO: 398172 - DNA, 15 bp, Homo sapiens
atcacctgcagtcaa

SEQ ID NO: 398173 - DNA, 15 bp, Homo sapiens
gatcacctgcagtca

SEQ ID NO: 398174 - DNA, 15 bp, Homo sapiens
ggatcacctgcagtc

SEQ ID NO: 398175 - DNA, 15 bp, Homo sapiens
aggatcacctgcagt

SEQ ID NO: 398176 - DNA, 15 bp, Homo sapiens
gaggatcacctgcag

SEQ ID NO: 398177 - DNA, 15 bp, Homo sapiens
ggaggatcacctgca

SEQ ID NO: 398178 - DNA, 15 bp, Homo sapiens
gggaggatcacctgc

SEQ ID NO: 398179 - DNA, 15 bp, Homo sapiens
cgggaggatcacctg

SEQ ID NO: 398180 - DNA, 15 bp, Homo sapiens
gcgggaggatcacct

SEQ ID NO: 398181 - DNA, 15 bp, Homo sapiens
ggcgggaggatcacc

SEQ ID NO: 398182 - DNA, 15 bp, Homo sapiens
aggcgggaggatcac

SEQ ID NO: 398183 - DNA, 15 bp, Homo sapiens
gaggcgggaggatca

SEQ ID NO: 398184 - DNA, 15 bp, Homo sapiens
tgaggcgggaggatc

SEQ ID NO: 398185 - DNA, 15 bp, Homo sapiens
ttgaggcgggaggat

SEQ ID NO: 398186 - DNA, 15 bp, Homo sapiens
gttgaggcgggagga

SEQ ID NO: 398187 - DNA, 15 bp, Homo sapiens
ggttgaggcgggagg

SEQ ID NO: 398188 - DNA, 15 bp, Homo sapiens
aggttgaggcgggag

SEQ ID NO: 398189 - DNA, 15 bp, Homo sapiens
gaggttgaggcggga

SEQ ID NO: 398190 - DNA, 15 bp, Homo sapiens
ggaggttgaggcggg

SEQ ID NO: 398191 - DNA, 15 bp, Homo sapiens
gggaggttgaggcgg

SEQ ID NO: 398192 - DNA, 15 bp, Homo sapiens
tgggaggttgaggcg

SEQ ID NO: 398193 - DNA, 15 bp, Homo sapiens
ttgggaggttgaggc

SEQ ID NO: 398194 - DNA, 15 bp, Homo sapiens
tttgggaggttgagg

SEQ ID NO: 398195 - DNA, 15 bp, Homo sapiens
ctttgggaggttgag

SEQ ID NO: 398196 - DNA, 15 bp, Homo sapiens
actttgggaggttga

SEQ ID NO: 398197 - DNA, 15 bp, Homo sapiens
cactttgggaggttg

SEQ ID NO: 398198 - DNA, 15 bp, Homo sapiens
gcactttgggaggtt

SEQ ID NO: 398199 - DNA, 15 bp, Homo sapiens
cctataatcccagca

SEQ ID NO: 398200 - DNA, 15 bp, Homo sapiens
acctataatcccagc

SEQ ID NO: 398201 - DNA, 15 bp, Homo sapiens
cacctataatcccag

SEQ ID NO: 398202 - DNA, 15 bp, Homo sapiens
acacctataatccca

SEQ ID NO: 398203 - DNA, 15 bp, Homo sapiens
tacacctataatccc

SEQ ID NO: 398204 - DNA, 15 bp, Homo sapiens
ttacacctataatcc

SEQ ID NO: 398205 - DNA, 15 bp, Homo sapiens
cttacacctataatc

SEQ ID NO: 398206 - DNA, 15 bp, Homo sapiens
gcttacacctataat

SEQ ID NO: 398207 - DNA, 15 bp, Homo sapiens
ggcttacacctataa

SEQ ID NO: 398208 - DNA, 15 bp, Homo sapiens
tggcttacacctata

SEQ ID NO: 398209 - DNA, 15 bp, Homo sapiens
gtggcttacacctat

SEQ ID NO: 398210 - DNA, 15 bp, Homo sapiens
ggtggcttacaccta

SEQ ID NO: 398211 - DNA, 15 bp, Homo sapiens
tggtggcttacacct

SEQ ID NO: 398212 - DNA, 15 bp, Homo sapiens
gtggtggcttacacc

SEQ ID NO: 398213 - DNA, 15 bp, Homo sapiens
tgtggtggcttacac

SEQ ID NO: 398214 - DNA, 15 bp, Homo sapiens
gtgtggtggcttaca

SEQ ID NO: 398215 - DNA, 15 bp, Homo sapiens
ggtgtggtggcttac

SEQ ID NO: 398216 - DNA, 15 bp, Homo sapiens
aggtgtggtggctta

SEQ ID NO: 398217 - DNA, 15 bp, Homo sapiens
caggtgtggtggctt

SEQ ID NO: 398218 - DNA, 15 bp, Homo sapiens
ccaggtgtggtggct

SEQ ID NO: 398219 - DNA, 15 bp, Homo sapiens
cagccaggtgtggtg

SEQ ID NO: 398220 - DNA, 15 bp, Homo sapiens
tcagccaggtgtggt

SEQ ID NO: 398221 - DNA, 15 bp, Homo sapiens
atcagccaggtgtgg

SEQ ID NO: 398222 - DNA, 15 bp, Homo sapiens
aatcagccaggtgtg

SEQ ID NO: 398223 - DNA, 15 bp, Homo sapiens
aaatcagccaggtgt

SEQ ID NO: 398224 - DNA, 15 bp, Homo sapiens
taaatcagccaggtg

SEQ ID NO: 398225 - DNA, 15 bp, Homo sapiens
ttaaatcagccaggt

SEQ ID NO: 398226 - DNA, 15 bp, Homo sapiens
attaaatcagccagg

SEQ ID NO: 398227 - DNA, 15 bp, Homo sapiens
cattaaatcagccag

SEQ ID NO: 398228 - DNA, 15 bp, Homo sapiens
tcattaaatcagcca

SEQ ID NO: 398229 - DNA, 15 bp, Homo sapiens
atcattaaatcagcc

SEQ ID NO: 398230 - DNA, 15 bp, Homo sapiens
tatcattaaatcagc

SEQ ID NO: 398231 - DNA, 15 bp, Homo sapiens
atatcattaaatcag

SEQ ID NO: 398232 - DNA, 15 bp, Homo sapiens
tatatcattaaatca

SEQ ID NO: 398233 - DNA, 15 bp, Homo sapiens
atatatcattaaatc

SEQ ID NO: 398234 - DNA, 15 bp, Homo sapiens
aatatatcattaaat

SEQ ID NO: 398235 - DNA, 15 bp, Homo sapiens
aaatatatcattaaa

SEQ ID NO: 398236 - DNA, 15 bp, Homo sapiens
aaaatatatcattaa

SEQ ID NO: 398237 - DNA, 15 bp, Homo sapiens
taaaatatatcatta

SEQ ID NO: 398238 - DNA, 15 bp, Homo sapiens
ttaaaatatatcatt

SEQ ID NO: 398239 - DNA, 15 bp, Homo sapiens
tttaaaatatatcat

SEQ ID NO: 398240 - DNA, 15 bp, Homo sapiens
ttttaaaatatatca

SEQ ID NO: 398241 - DNA, 15 bp, Homo sapiens
attttaaaatatatc

SEQ ID NO: 398242 - DNA, 15 bp, Homo sapiens
tattttaaaatatat

SEQ ID NO: 398243 - DNA, 15 bp, Homo sapiens
ttattttaaaatata

SEQ ID NO: 398244 - DNA, 15 bp, Homo sapiens
tttattttaaaatat

SEQ ID NO: 398245 - DNA, 15 bp, Homo sapiens
atttattttaaaata

SEQ ID NO: 398246 - DNA, 15 bp, Homo sapiens
aatttattttaaaat

SEQ ID NO: 398247 - DNA, 15 bp, Homo sapiens
caatttattttaaaa

SEQ ID NO: 398248 - DNA, 15 bp, Homo sapiens
tcaatttattttaaa

SEQ ID NO: 398249 - DNA, 15 bp, Homo sapiens
atcaatttattttaa

SEQ ID NO: 398250 - DNA, 15 bp, Homo sapiens
aatcaatttatttta

SEQ ID NO: 398251 - DNA, 15 bp, Homo sapiens
taatcaatttatttt

SEQ ID NO: 398252 - DNA, 15 bp, Homo sapiens
ttaatcaatttattt

SEQ ID NO: 398253 - DNA, 15 bp, Homo sapiens
tttaatcaatttatt

SEQ ID NO: 398254 - DNA, 15 bp, Homo sapiens
atttaatcaatttat

SEQ ID NO: 398255 - DNA, 15 bp, Homo sapiens
aatttaatcaattta

SEQ ID NO: 398256 - DNA, 15 bp, Homo sapiens
gaatttaatcaattt

SEQ ID NO: 398257 - DNA, 15 bp, Homo sapiens
agaatttaatcaatt

SEQ ID NO: 398258 - DNA, 15 bp, Homo sapiens
aagaatttaatcaat

SEQ ID NO: 398259 - DNA, 15 bp, Homo sapiens
gaagaatttaatcaa

SEQ ID NO: 398260 - DNA, 15 bp, Homo sapiens
tgaagaatttaatca

SEQ ID NO: 398261 - DNA, 15 bp, Homo sapiens
ttgaagaatttaatc

SEQ ID NO: 398262 - DNA, 15 bp, Homo sapiens
tttgaagaatttaat

SEQ ID NO: 398263 - DNA, 15 bp, Homo sapiens
ttttgaagaatttaa

SEQ ID NO: 398264 - DNA, 15 bp, Homo sapiens
attttgaagaattta

SEQ ID NO: 398265 - DNA, 15 bp, Homo sapiens
aattttgaagaattt

SEQ ID NO: 398266 - DNA, 15 bp, Homo sapiens
taattttgaagaatt

SEQ ID NO: 398267 - DNA, 15 bp, Homo sapiens
ttaattttgaagaat

SEQ ID NO: 398268 - DNA, 15 bp, Homo sapiens
tttaattttgaagaa

SEQ ID NO: 398269 - DNA, 15 bp, Homo sapiens
gtttaattttgaaga

SEQ ID NO: 398270 - DNA, 15 bp, Homo sapiens
tgtttaattttgaag

SEQ ID NO: 398271 - DNA, 15 bp, Homo sapiens
ttgtttaattttgaa

SEQ ID NO: 398272 - DNA, 15 bp, Homo sapiens
attgtttaattttga

SEQ ID NO: 398273 - DNA, 15 bp, Homo sapiens
aattgtttaattttg

SEQ ID NO: 398274 - DNA, 15 bp, Homo sapiens
aaattgtttaatttt

SEQ ID NO: 398275 - DNA, 15 bp, Homo sapiens
aaaattgtttaattt

SEQ ID NO: 398276 - DNA, 15 bp, Homo sapiens
aaaaattgtttaatt

SEQ ID NO: 398277 - DNA, 15 bp, Homo sapiens
gaaaaattgtttaat

SEQ ID NO: 398278 - DNA, 15 bp, Homo sapiens
agaaaaattgtttaa

SEQ ID NO: 398279 - DNA, 15 bp, Homo sapiens
gagaaaaattgttta

SEQ ID NO: 398280 - DNA, 15 bp, Homo sapiens
agagaaaaattgttt

SEQ ID NO: 398281 - DNA, 15 bp, Homo sapiens
aagagaaaaattgtt

SEQ ID NO: 398282 - DNA, 15 bp, Homo sapiens
taagagaaaaattgt

SEQ ID NO: 398283 - DNA, 15 bp, Homo sapiens
ttaagagaaaaattg

SEQ ID NO: 398284 - DNA, 15 bp, Homo sapiens
tttaagagaaaaatt

SEQ ID NO: 398285 - DNA, 15 bp, Homo sapiens
ttttaagagaaaaat

SEQ ID NO: 398286 - DNA, 15 bp, Homo sapiens
attttaagagaaaaa

SEQ ID NO: 398287 - DNA, 15 bp, Homo sapiens
aattttaagagaaaa

SEQ ID NO: 398288 - DNA, 15 bp, Homo sapiens
aaattttaagagaaa

SEQ ID NO: 398289 - DNA, 15 bp, Homo sapiens
aaaattttaagagaa

SEQ ID NO: 398290 - DNA, 15 bp, Homo sapiens
taaaattttaagaga

SEQ ID NO: 398291 - DNA, 15 bp, Homo sapiens
ataaaattttaagag

SEQ ID NO: 398292 - DNA, 15 bp, Homo sapiens
tataaaattttaaga

SEQ ID NO: 398293 - DNA, 15 bp, Homo sapiens
ttataaaattttaag

SEQ ID NO: 398294 - DNA, 15 bp, Homo sapiens
cttataaaattttaa

SEQ ID NO: 398295 - DNA, 15 bp, Homo sapiens
tcttataaaatttta

SEQ ID NO: 398296 - DNA, 15 bp, Homo sapiens
ctcttataaaatttt

SEQ ID NO: 398297 - DNA, 15 bp, Homo sapiens
cctcttataaaattt

SEQ ID NO: 398298 - DNA, 15 bp, Homo sapiens
tcctcttataaaatt

SEQ ID NO: 398299 - DNA, 15 bp, Homo sapiens
ctcctcttataaaat

SEQ ID NO: 398300 - DNA, 15 bp, Homo sapiens
tctcctcttataaaa

SEQ ID NO: 398301 - DNA, 15 bp, Homo sapiens
ttctcctcttataaa

SEQ ID NO: 398302 - DNA, 15 bp, Homo sapiens
tttctcctcttataa

SEQ ID NO: 398303 - DNA, 15 bp, Homo sapiens
ttttctcctcttata

SEQ ID NO: 398304 - DNA, 15 bp, Homo sapiens
attttctcctcttat

SEQ ID NO: 398305 - DNA, 15 bp, Homo sapiens
tattttctcctctta

SEQ ID NO: 398306 - DNA, 15 bp, Homo sapiens
atattttctcctctt

SEQ ID NO: 398307 - DNA, 15 bp, Homo sapiens
aatattttctcctct

SEQ ID NO: 398308 - DNA, 15 bp, Homo sapiens
aaatattttctcctc

SEQ ID NO: 398309 - DNA, 15 bp, Homo sapiens
aaaatattttctcct

SEQ ID NO: 398310 - DNA, 15 bp, Homo sapiens
aaaaatattttctcc

SEQ ID NO: 398311 - DNA, 15 bp, Homo sapiens
taaaaatattttctc

SEQ ID NO: 398312 - DNA, 15 bp, Homo sapiens
ctaaaaatattttct

SEQ ID NO: 398313 - DNA, 15 bp, Homo sapiens
cctaaaaatattttc

SEQ ID NO: 398314 - DNA, 15 bp, Homo sapiens
ccctaaaaatatttt

SEQ ID NO: 398315 - DNA, 15 bp, Homo sapiens
tccctaaaaatattt

SEQ ID NO: 398316 - DNA, 15 bp, Homo sapiens
ctccctaaaaatatt

SEQ ID NO: 398317 - DNA, 15 bp, Homo sapiens
tctccctaaaaatat

SEQ ID NO: 398318 - DNA, 15 bp, Homo sapiens
ttctccctaaaaata

SEQ ID NO: 398319 - DNA, 15 bp, Homo sapiens
tttctccctaaaaat

SEQ ID NO: 398320 - DNA, 15 bp, Homo sapiens
ctttctccctaaaaa

SEQ ID NO: 398321 - DNA, 15 bp, Homo sapiens
cctttctccctaaaa

SEQ ID NO: 398322 - DNA, 15 bp, Homo sapiens
ccctttctccctaaa

SEQ ID NO: 398323 - DNA, 15 bp, Homo sapiens
tccctttctccctaa

SEQ ID NO: 398324 - DNA, 15 bp, Homo sapiens
ctccctttctcccta

SEQ ID NO: 398325 - DNA, 15 bp, Homo sapiens
tctccctttctccct

SEQ ID NO: 398326 - DNA, 15 bp, Homo sapiens
ttctccctttctccc

SEQ ID NO: 398327 - DNA, 15 bp, Homo sapiens
tttctccctttctcc

SEQ ID NO: 398328 - DNA, 15 bp, Homo sapiens
ttttctccctttctc

SEQ ID NO: 398329 - DNA, 15 bp, Homo sapiens
tttttctccctttct

SEQ ID NO: 398330 - DNA, 15 bp, Homo sapiens
ttttttctccctttc

SEQ ID NO: 398331 - DNA, 15 bp, Homo sapiens
attttttctcccttt

SEQ ID NO: 398332 - DNA, 15 bp, Homo sapiens
aattttttctccctt

SEQ ID NO: 398333 - DNA, 15 bp, Homo sapiens
aaattttttctccct

SEQ ID NO: 398334 - DNA, 15 bp, Homo sapiens
gaaattttttctccc

SEQ ID NO: 398335 - DNA, 15 bp, Homo sapiens
tgaaattttttctcc

SEQ ID NO: 398336 - DNA, 15 bp, Homo sapiens
atgaaattttttctc

SEQ ID NO: 398337 - DNA, 15 bp, Homo sapiens
gatgaaattttttct

SEQ ID NO: 398338 - DNA, 15 bp, Homo sapiens
ggatgaaattttttc

SEQ ID NO: 398339 - DNA, 15 bp, Homo sapiens
aggatgaaatttttt

SEQ ID NO: 398340 - DNA, 15 bp, Homo sapiens
aaggatgaaattttt

SEQ ID NO: 398341 - DNA, 15 bp, Homo sapiens
aaaggatgaaatttt

SEQ ID NO: 398342 - DNA, 15 bp, Homo sapiens
gaaaggatgaaattt

SEQ ID NO: 398343 - DNA, 15 bp, Homo sapiens
agaaaggatgaaatt

SEQ ID NO: 398344 - DNA, 15 bp, Homo sapiens
aagaaaggatgaaat

SEQ ID NO: 398345 - DNA, 15 bp, Homo sapiens
aaagaaaggatgaaa

SEQ ID NO: 398346 - DNA, 15 bp, Homo sapiens
aaaagaaaggatgaa

SEQ ID NO: 398347 - DNA, 15 bp, Homo sapiens
aaaaagaaaggatga

SEQ ID NO: 398348 - DNA, 15 bp, Homo sapiens
caaaaagaaaggatg

SEQ ID NO: 398349 - DNA, 15 bp, Homo sapiens
acaaaaagaaaggat

SEQ ID NO: 398350 - DNA, 15 bp, Homo sapiens
cacaaaaagaaagga

SEQ ID NO: 398351 - DNA, 15 bp, Homo sapiens
ccacaaaaagaaagg

SEQ ID NO: 398352 - DNA, 15 bp, Homo sapiens
tccacaaaaagaaag

SEQ ID NO: 398353 - DNA, 15 bp, Homo sapiens
ctccacaaaaagaaa

SEQ ID NO: 398354 - DNA, 15 bp, Homo sapiens
actccacaaaaagaa

SEQ ID NO: 398355 - DNA, 15 bp, Homo sapiens
tactccacaaaaaga

SEQ ID NO: 398356 - DNA, 15 bp, Homo sapiens
ttactccacaaaaag

SEQ ID NO: 398357 - DNA, 15 bp, Homo sapiens
tttactccacaaaaa

SEQ ID NO: 398358 - DNA, 15 bp, Homo sapiens
atttactccacaaaa

SEQ ID NO: 398359 - DNA, 15 bp, Homo sapiens
catttactccacaaa

SEQ ID NO: 398360 - DNA, 15 bp, Homo sapiens
ccatttactccacaa

SEQ ID NO: 398361 - DNA, 15 bp, Homo sapiens
accatttactccaca

SEQ ID NO: 398362 - DNA, 15 bp, Homo sapiens
aaccatttactccac

SEQ ID NO: 398363 - DNA, 15 bp, Homo sapiens
aaaccatttactcca

SEQ ID NO: 398364 - DNA, 15 bp, Homo sapiens
aaaaccatttactcc

SEQ ID NO: 398365 - DNA, 15 bp, Homo sapiens
caaaaccatttactc

SEQ ID NO: 398366 - DNA, 15 bp, Homo sapiens
tcaaaaccatttact

SEQ ID NO: 398367 - DNA, 15 bp, Homo sapiens
ctcaaaaccatttac

SEQ ID NO: 398368 - DNA, 15 bp, Homo sapiens
cctcaaaaccattta

SEQ ID NO: 398369 - DNA, 15 bp, Homo sapiens
tcctcaaaaccattt

SEQ ID NO: 398370 - DNA, 15 bp, Homo sapiens
ttcctcaaaaccatt

SEQ ID NO: 398371 - DNA, 15 bp, Homo sapiens
tttcctcaaaaccat

SEQ ID NO: 398372 - DNA, 15 bp, Homo sapiens
ttttcctcaaaacca

SEQ ID NO: 398373 - DNA, 15 bp, Homo sapiens
gttttcctcaaaacc

SEQ ID NO: 398374 - DNA, 15 bp, Homo sapiens
agttttcctcaaaac

SEQ ID NO: 398375 - DNA, 15 bp, Homo sapiens
cagttttcctcaaaa

SEQ ID NO: 398376 - DNA, 15 bp, Homo sapiens
tcagttttcctcaaa

SEQ ID NO: 398377 - DNA, 15 bp, Homo sapiens
atcagttttcctcaa

SEQ ID NO: 398378 - DNA, 15 bp, Homo sapiens
aatcagttttcctca

SEQ ID NO: 398379 - DNA, 15 bp, Homo sapiens
aaatcagttttcctc

SEQ ID NO: 398380 - DNA, 15 bp, Homo sapiens
aaaatcagttttcct

SEQ ID NO: 398381 - DNA, 15 bp, Homo sapiens
caaaatcagttttcc

SEQ ID NO: 398382 - DNA, 15 bp, Homo sapiens
gcaaaatcagttttc

SEQ ID NO: 398383 - DNA, 15 bp, Homo sapiens
tgcaaaatcagtttt

SEQ ID NO: 398384 - DNA, 15 bp, Homo sapiens
gtgcaaaatcagttt

SEQ ID NO: 398385 - DNA, 15 bp, Homo sapiens
agtgcaaaatcagtt

SEQ ID NO: 398386 - DNA, 15 bp, Homo sapiens
cagtgcaaaatcagt

SEQ ID NO: 398387 - DNA, 15 bp, Homo sapiens
gcagtgcaaaatcag

SEQ ID NO: 398388 - DNA, 15 bp, Homo sapiens
agcagtgcaaaatca

SEQ ID NO: 398389 - DNA, 15 bp, Homo sapiens
cagcagtgcaaaatc

SEQ ID NO: 398390 - DNA, 15 bp, Homo sapiens
tcagcagtgcaaaat

SEQ ID NO: 398391 - DNA, 15 bp, Homo sapiens
gtcagcagtgcaaaa

SEQ ID NO: 398392 - DNA, 15 bp, Homo sapiens
tgtcagcagtgcaaa

SEQ ID NO: 398393 - DNA, 15 bp, Homo sapiens
atgtcagcagtgcaa

SEQ ID NO: 398394 - DNA, 15 bp, Homo sapiens
gatgtcagcagtgca

SEQ ID NO: 398395 - DNA, 15 bp, Homo sapiens
agatgtcagcagtgc

SEQ ID NO: 398396 - DNA, 15 bp, Homo sapiens
cagatgtcagcagtg

SEQ ID NO: 398397 - DNA, 15 bp, Homo sapiens
ccagatgtcagcagt

SEQ ID NO: 398398 - DNA, 15 bp, Homo sapiens
accagatgtcagcag

SEQ ID NO: 398399 - DNA, 15 bp, Homo sapiens
aaccagatgtcagca

SEQ ID NO: 398400 - DNA, 15 bp, Homo sapiens
taaccagatgtcagc

SEQ ID NO: 398401 - DNA, 15 bp, Homo sapiens
gtaaccagatgtcag

SEQ ID NO: 398402 - DNA, 15 bp, Homo sapiens
tgtaaccagatgtca

SEQ ID NO: 398403 - DNA, 15 bp, Homo sapiens
atgtaaccagatgtc

SEQ ID NO: 398404 - DNA, 15 bp, Homo sapiens
gatgtaaccagatgt

SEQ ID NO: 398405 - DNA, 15 bp, Homo sapiens
ggatgtaaccagatg

SEQ ID NO: 398406 - DNA, 15 bp, Homo sapiens
aggatgtaaccagat

SEQ ID NO: 398407 - DNA, 15 bp, Homo sapiens
gaggatgtaaccaga

SEQ ID NO: 398408 - DNA, 15 bp, Homo sapiens
ggaggatgtaaccag

SEQ ID NO: 398409 - DNA, 15 bp, Homo sapiens
aggaggatgtaacca

SEQ ID NO: 398410 - DNA, 15 bp, Homo sapiens
aaggaggatgtaacc

SEQ ID NO: 398411 - DNA, 15 bp, Homo sapiens
caaggaggatgtaac

SEQ ID NO: 398412 - DNA, 15 bp, Homo sapiens
tcaaggaggatgtaa

SEQ ID NO: 398413 - DNA, 15 bp, Homo sapiens
atcaaggaggatgta

SEQ ID NO: 398414 - DNA, 15 bp, Homo sapiens
tatcaaggaggatgt

SEQ ID NO: 398415 - DNA, 15 bp, Homo sapiens
ttatcaaggaggatg

SEQ ID NO: 398416 - DNA, 15 bp, Homo sapiens
tttatcaaggaggat

SEQ ID NO: 398417 - DNA, 15 bp, Homo sapiens
ctttatcaaggagga

SEQ ID NO: 398418 - DNA, 15 bp, Homo sapiens
gctttatcaaggagg

SEQ ID NO: 398419 - DNA, 15 bp, Homo sapiens
ggctttatcaaggag

SEQ ID NO: 398420 - DNA, 15 bp, Homo sapiens
tggctttatcaagga

SEQ ID NO: 398421 - DNA, 15 bp, Homo sapiens
ctggctttatcaagg

SEQ ID NO: 398422 - DNA, 15 bp, Homo sapiens
actggctttatcaag

SEQ ID NO: 398423 - DNA, 15 bp, Homo sapiens
aactggctttatcaa

SEQ ID NO: 398424 - DNA, 15 bp, Homo sapiens
taactggctttatca

SEQ ID NO: 398425 - DNA, 15 bp, Homo sapiens
ataactggctttatc

SEQ ID NO: 398426 - DNA, 15 bp, Homo sapiens
aataactggctttat

SEQ ID NO: 398427 - DNA, 15 bp, Homo sapiens
gaataactggcttta

SEQ ID NO: 398428 - DNA, 15 bp, Homo sapiens
agaataactggcttt

SEQ ID NO: 398429 - DNA, 15 bp, Homo sapiens
aagaataactggctt

SEQ ID NO: 398430 - DNA, 15 bp, Homo sapiens
gaagaataactggct

SEQ ID NO: 398431 - DNA, 15 bp, Homo sapiens
tgaagaataactggc

SEQ ID NO: 398432 - DNA, 15 bp, Homo sapiens
ttgaagaataactgg

SEQ ID NO: 398433 - DNA, 15 bp, Homo sapiens
tttgaagaataactg

SEQ ID NO: 398434 - DNA, 15 bp, Homo sapiens
ctttgaagaataact

SEQ ID NO: 398435 - DNA, 15 bp, Homo sapiens
tctttgaagaataac

SEQ ID NO: 398436 - DNA, 15 bp, Homo sapiens
ctctttgaagaataa

SEQ ID NO: 398437 - DNA, 15 bp, Homo sapiens
actctttgaagaata

SEQ ID NO: 398438 - DNA, 15 bp, Homo sapiens
tactctttgaagaat

SEQ ID NO: 398439 - DNA, 15 bp, Homo sapiens
ctactctttgaagaa

SEQ ID NO: 398440 - DNA, 15 bp, Homo sapiens
tctactctttgaaga

SEQ ID NO: 398441 - DNA, 15 bp, Homo sapiens
atctactctttgaag

SEQ ID NO: 398442 - DNA, 15 bp, Homo sapiens
tatctactctttgaa

SEQ ID NO: 398443 - DNA, 15 bp, Homo sapiens
gtatctactctttga

SEQ ID NO: 398444 - DNA, 15 bp, Homo sapiens
agtatctactctttg

SEQ ID NO: 398445 - DNA, 15 bp, Homo sapiens
aagtatctactcttt

SEQ ID NO: 398446 - DNA, 15 bp, Homo sapiens
aaagtatctactctt

SEQ ID NO: 398447 - DNA, 15 bp, Homo sapiens
taaagtatctactct

SEQ ID NO: 398448 - DNA, 15 bp, Homo sapiens
ttaaagtatctactc

SEQ ID NO: 398449 - DNA, 15 bp, Homo sapiens
cttaaagtatctact

SEQ ID NO: 398450 - DNA, 15 bp, Homo sapiens
acttaaagtatctac

SEQ ID NO: 398451 - DNA, 15 bp, Homo sapiens
tacttaaagtatcta

SEQ ID NO: 398452 - DNA, 15 bp, Homo sapiens
atacttaaagtatct

SEQ ID NO: 398453 - DNA, 15 bp, Homo sapiens
catacttaaagtatc

SEQ ID NO: 398454 - DNA, 15 bp, Homo sapiens
tcatacttaaagtat

SEQ ID NO: 398455 - DNA, 15 bp, Homo sapiens
atcatacttaaagta

SEQ ID NO: 398456 - DNA, 15 bp, Homo sapiens
catcatacttaaagt

SEQ ID NO: 398457 - DNA, 15 bp, Homo sapiens
tcatcatacttaaag

SEQ ID NO: 398458 - DNA, 15 bp, Homo sapiens
ttcatcatacttaaa

SEQ ID NO: 398459 - DNA, 15 bp, Homo sapiens
attcatcatacttaa

SEQ ID NO: 398460 - DNA, 15 bp, Homo sapiens
aattcatcatactta

SEQ ID NO: 398461 - DNA, 15 bp, Homo sapiens
taattcatcatactt

SEQ ID NO: 398462 - DNA, 15 bp, Homo sapiens
ataattcatcatact

SEQ ID NO: 398463 - DNA, 15 bp, Homo sapiens
aataattcatcatac

SEQ ID NO: 398464 - DNA, 15 bp, Homo sapiens
aaataattcatcata

SEQ ID NO: 398465 - DNA, 15 bp, Homo sapiens
taaataattcatcat

SEQ ID NO: 398466 - DNA, 15 bp, Homo sapiens
ttaaataattcatca

SEQ ID NO: 398467 - DNA, 15 bp, Homo sapiens
attaaataattcatc

SEQ ID NO: 398468 - DNA, 15 bp, Homo sapiens
aattaaataattcat

SEQ ID NO: 398469 - DNA, 15 bp, Homo sapiens
taattaaataattca

SEQ ID NO: 398470 - DNA, 15 bp, Homo sapiens
ctaattaaataattc

SEQ ID NO: 398471 - DNA, 15 bp, Homo sapiens
gctaattaaataatt

SEQ ID NO: 398472 - DNA, 15 bp, Homo sapiens
tgctaattaaataat

SEQ ID NO: 398473 - DNA, 15 bp, Homo sapiens
atgctaattaaataa

SEQ ID NO: 398474 - DNA, 15 bp, Homo sapiens
aatgctaattaaata

SEQ ID NO: 398475 - DNA, 15 bp, Homo sapiens
aaatgctaattaaat

SEQ ID NO: 398476 - DNA, 15 bp, Homo sapiens
taaatgctaattaaa

SEQ ID NO: 398477 - DNA, 15 bp, Homo sapiens
ataaatgctaattaa

SEQ ID NO: 398478 - DNA, 15 bp, Homo sapiens
aataaatgctaatta

SEQ ID NO: 398479 - DNA, 15 bp, Homo sapiens
caataaatgctaatt

SEQ ID NO: 398480 - DNA, 15 bp, Homo sapiens
ccaataaatgctaat

SEQ ID NO: 398481 - DNA, 15 bp, Homo sapiens
cccaataaatgctaa

SEQ ID NO: 398482 - DNA, 15 bp, Homo sapiens
gcccaataaatgcta

SEQ ID NO: 398483 - DNA, 15 bp, Homo sapiens
agcccaataaatgct

SEQ ID NO: 398484 - DNA, 15 bp, Homo sapiens
gagcccaataaatgc

SEQ ID NO: 398485 - DNA, 15 bp, Homo sapiens
tgagcccaataaatg

SEQ ID NO: 398486 - DNA, 15 bp, Homo sapiens
ctgagcccaataaat

SEQ ID NO: 398487 - DNA, 15 bp, Homo sapiens
actgagcccaataaa

SEQ ID NO: 398488 - DNA, 15 bp, Homo sapiens
gactgagcccaataa

SEQ ID NO: 398489 - DNA, 15 bp, Homo sapiens
ggactgagcccaata

SEQ ID NO: 398490 - DNA, 15 bp, Homo sapiens
aggactgagcccaat

SEQ ID NO: 398491 - DNA, 15 bp, Homo sapiens
gaggactgagcccaa

SEQ ID NO: 398492 - DNA, 15 bp, Homo sapiens
ggaggactgagccca

SEQ ID NO: 398493 - DNA, 15 bp, Homo sapiens
aggaggactgagccc

SEQ ID NO: 398494 - DNA, 15 bp, Homo sapiens
gaggaggactgagcc

SEQ ID NO: 398495 - DNA, 15 bp, Homo sapiens
agaggaggactgagc

SEQ ID NO: 398496 - DNA, 15 bp, Homo sapiens
aagaggaggactgag

SEQ ID NO: 398497 - DNA, 15 bp, Homo sapiens
caagaggaggactga

SEQ ID NO: 398498 - DNA, 15 bp, Homo sapiens
acaagaggaggactg

SEQ ID NO: 398499 - DNA, 15 bp, Homo sapiens
gacaagaggaggact

SEQ ID NO: 398500 - DNA, 15 bp, Homo sapiens
agacaagaggaggac

SEQ ID NO: 398501 - DNA, 15 bp, Homo sapiens
gagacaagaggagga

SEQ ID NO: 398502 - DNA, 15 bp, Homo sapiens
ggagacaagaggagg

SEQ ID NO: 398503 - DNA, 15 bp, Homo sapiens
aggagacaagaggag

SEQ ID NO: 398504 - DNA, 15 bp, Homo sapiens
gaggagacaagagga

SEQ ID NO: 398505 - DNA, 15 bp, Homo sapiens
agaggagacaagagg

SEQ ID NO: 398506 - DNA, 15 bp, Homo sapiens
gagaggagacaagag

SEQ ID NO: 398507 - DNA, 15 bp, Homo sapiens
ggagaggagacaaga

SEQ ID NO: 398508 - DNA, 15 bp, Homo sapiens
gggagaggagacaag

SEQ ID NO: 398509 - DNA, 15 bp, Homo sapiens
tgggagaggagacaa

SEQ ID NO: 398510 - DNA, 15 bp, Homo sapiens
atgggagaggagaca

SEQ ID NO: 398511 - DNA, 15 bp, Homo sapiens
catgggagaggagac

SEQ ID NO: 398512 - DNA, 15 bp, Homo sapiens
acatgggagaggaga

SEQ ID NO: 398513 - DNA, 15 bp, Homo sapiens
aacatgggagaggag

SEQ ID NO: 398514 - DNA, 15 bp, Homo sapiens
aaacatgggagagga

SEQ ID NO: 398515 - DNA, 15 bp, Homo sapiens
aaaacatgggagagg

SEQ ID NO: 398516 - DNA, 15 bp, Homo sapiens
caaaacatgggagag

SEQ ID NO: 398517 - DNA, 15 bp, Homo sapiens
gcaaaacatgggaga

SEQ ID NO: 398518 - DNA, 15 bp, Homo sapiens
agcaaaacatgggag

SEQ ID NO: 398519 - DNA, 15 bp, Homo sapiens
aagcaaaacatggga

SEQ ID NO: 398520 - DNA, 15 bp, Homo sapiens
aaagcaaaacatggg

SEQ ID NO: 398521 - DNA, 15 bp, Homo sapiens
aaaagcaaaacatgg

SEQ ID NO: 398522 - DNA, 15 bp, Homo sapiens
aaaaagcaaaacatg

SEQ ID NO: 398523 - DNA, 15 bp, Homo sapiens
gaaaaagcaaaacat

SEQ ID NO: 398524 - DNA, 15 bp, Homo sapiens
tgaaaaagcaaaaca

SEQ ID NO: 398525 - DNA, 15 bp, Homo sapiens
ttgaaaaagcaaaac

SEQ ID NO: 398526 - DNA, 15 bp, Homo sapiens
attgaaaaagcaaaa

SEQ ID NO: 398527 - DNA, 15 bp, Homo sapiens
aattgaaaaagcaaa

SEQ ID NO: 398528 - DNA, 15 bp, Homo sapiens
gaattgaaaaagcaa

SEQ ID NO: 398529 - DNA, 15 bp, Homo sapiens
agaattgaaaaagca

SEQ ID NO: 398530 - DNA, 15 bp, Homo sapiens
gagaattgaaaaagc

SEQ ID NO: 398531 - DNA, 15 bp, Homo sapiens
tgagaattgaaaaag

SEQ ID NO: 398532 - DNA, 15 bp, Homo sapiens
ttgagaattgaaaaa

SEQ ID NO: 398533 - DNA, 15 bp, Homo sapiens
cttgagaattgaaaa

SEQ ID NO: 398534 - DNA, 15 bp, Homo sapiens
ccttgagaattgaaa

SEQ ID NO: 398535 - DNA, 15 bp, Homo sapiens
cccttgagaattgaa

SEQ ID NO: 398536 - DNA, 15 bp, Homo sapiens
acccttgagaattga

SEQ ID NO: 398537 - DNA, 15 bp, Homo sapiens
tacccttgagaattg

SEQ ID NO: 398538 - DNA, 15 bp, Homo sapiens
gtacccttgagaatt

SEQ ID NO: 398539 - DNA, 15 bp, Homo sapiens
ggtacccttgagaat

SEQ ID NO: 398540 - DNA, 15 bp, Homo sapiens
tggtacccttgagaa

SEQ ID NO: 398541 - DNA, 15 bp, Homo sapiens
gtggtacccttgaga

SEQ ID NO: 398542 - DNA, 15 bp, Homo sapiens
agtggtacccttgag

SEQ ID NO: 398543 - DNA, 15 bp, Homo sapiens
aagtggtacccttga

SEQ ID NO: 398544 - DNA, 15 bp, Homo sapiens
taagtggtacccttg

SEQ ID NO: 398545 - DNA, 15 bp, Homo sapiens
ttaagtggtaccctt

SEQ ID NO: 398546 - DNA, 15 bp, Homo sapiens
cttaagtggtaccct

SEQ ID NO: 398547 - DNA, 15 bp, Homo sapiens
tcttaagtggtaccc

SEQ ID NO: 398548 - DNA, 15 bp, Homo sapiens
ttcttaagtggtacc

SEQ ID NO: 398549 - DNA, 15 bp, Homo sapiens
cttcttaagtggtac

SEQ ID NO: 398550 - DNA, 15 bp, Homo sapiens
acttcttaagtggta

SEQ ID NO: 398551 - DNA, 15 bp, Homo sapiens
tacttcttaagtggt

SEQ ID NO: 398552 - DNA, 15 bp, Homo sapiens
gtacttcttaagtgg

SEQ ID NO: 398553 - DNA, 15 bp, Homo sapiens
agtacttcttaagtg

SEQ ID NO: 398554 - DNA, 15 bp, Homo sapiens
cagtacttcttaagt

SEQ ID NO: 398555 - DNA, 15 bp, Homo sapiens
acagtacttcttaag

SEQ ID NO: 398556 - DNA, 15 bp, Homo sapiens
cacagtacttcttaa

SEQ ID NO: 398557 - DNA, 15 bp, Homo sapiens
ccacagtacttctta

SEQ ID NO: 398558 - DNA, 15 bp, Homo sapiens
accacagtacttctt

SEQ ID NO: 398559 - DNA, 15 bp, Homo sapiens
caccacagtacttct

SEQ ID NO: 398560 - DNA, 15 bp, Homo sapiens
ccaccacagtacttc

SEQ ID NO: 398561 - DNA, 15 bp, Homo sapiens
cccaccacagtactt

SEQ ID NO: 398562 - DNA, 15 bp, Homo sapiens
tcccaccacagtact

SEQ ID NO: 398563 - DNA, 15 bp, Homo sapiens
ttcccaccacagtac

SEQ ID NO: 398564 - DNA, 15 bp, Homo sapiens
attcccaccacagta

SEQ ID NO: 398565 - DNA, 15 bp, Homo sapiens
aattcccaccacagt

SEQ ID NO: 398566 - DNA, 15 bp, Homo sapiens
caattcccaccacag

SEQ ID NO: 398567 - DNA, 15 bp, Homo sapiens
acaattcccaccaca

SEQ ID NO: 398568 - DNA, 15 bp, Homo sapiens
cacaattcccaccac

SEQ ID NO: 398569 - DNA, 15 bp, Homo sapiens
gcacaattcccacca

SEQ ID NO: 398570 - DNA, 15 bp, Homo sapiens
ggcacaattcccacc

SEQ ID NO: 398571 - DNA, 15 bp, Homo sapiens
gggcacaattcccac

SEQ ID NO: 398572 - DNA, 15 bp, Homo sapiens
agggcacaattccca

SEQ ID NO: 398573 - DNA, 15 bp, Homo sapiens
cagggcacaattccc

SEQ ID NO: 398574 - DNA, 15 bp, Homo sapiens
ccagggcacaattcc

SEQ ID NO: 398575 - DNA, 15 bp, Homo sapiens
accagggcacaattc

SEQ ID NO: 398576 - DNA, 15 bp, Homo sapiens
gaccagggcacaatt

SEQ ID NO: 398577 - DNA, 15 bp, Homo sapiens
agaccagggcacaat

SEQ ID NO: 398578 - DNA, 15 bp, Homo sapiens
tagaccagggcacaa

SEQ ID NO: 398579 - DNA, 15 bp, Homo sapiens
ttagaccagggcaca

SEQ ID NO: 398580 - DNA, 15 bp, Homo sapiens
gttagaccagggcac

SEQ ID NO: 398581 - DNA, 15 bp, Homo sapiens
tgttagaccagggca

SEQ ID NO: 398582 - DNA, 15 bp, Homo sapiens
gtgttagaccagggc

SEQ ID NO: 398583 - DNA, 15 bp, Homo sapiens
cgtgttagaccaggg

SEQ ID NO: 398584 - DNA, 15 bp, Homo sapiens
acgtgttagaccagg

SEQ ID NO: 398585 - DNA, 15 bp, Homo sapiens
aacgtgttagaccag

SEQ ID NO: 398586 - DNA, 15 bp, Homo sapiens
taacgtgttagacca

SEQ ID NO: 398587 - DNA, 15 bp, Homo sapiens
ttaacgtgttagacc

SEQ ID NO: 398588 - DNA, 15 bp, Homo sapiens
attaacgtgttagac

SEQ ID NO: 398589 - DNA, 15 bp, Homo sapiens
cattaacgtgttaga

SEQ ID NO: 398590 - DNA, 15 bp, Homo sapiens
gcattaacgtgttag

SEQ ID NO: 398591 - DNA, 15 bp, Homo sapiens
tgcattaacgtgtta

SEQ ID NO: 398592 - DNA, 15 bp, Homo sapiens
atgcattaacgtgtt

SEQ ID NO: 398593 - DNA, 15 bp, Homo sapiens
gatgcattaacgtgt

SEQ ID NO: 398594 - DNA, 15 bp, Homo sapiens
agatgcattaacgtg

SEQ ID NO: 398595 - DNA, 15 bp, Homo sapiens
aagatgcattaacgt

SEQ ID NO: 398596 - DNA, 15 bp, Homo sapiens
gaagatgcattaacg

SEQ ID NO: 398597 - DNA, 15 bp, Homo sapiens
ggaagatgcattaac

SEQ ID NO: 398598 - DNA, 15 bp, Homo sapiens
tggaagatgcattaa

SEQ ID NO: 398599 - DNA, 15 bp, Homo sapiens
ttggaagatgcatta

SEQ ID NO: 398600 - DNA, 15 bp, Homo sapiens
tttggaagatgcatt

SEQ ID NO: 398601 - DNA, 15 bp, Homo sapiens
ctttggaagatgcat

SEQ ID NO: 398602 - DNA, 15 bp, Homo sapiens
gctttggaagatgca

SEQ ID NO: 398603 - DNA, 15 bp, Homo sapiens
tgctttggaagatgc

SEQ ID NO: 398604 - DNA, 15 bp, Homo sapiens
gtgctttggaagatg

SEQ ID NO: 398605 - DNA, 15 bp, Homo sapiens
ggtgctttggaagat

SEQ ID NO: 398606 - DNA, 15 bp, Homo sapiens
aggtgctttggaaga

SEQ ID NO: 398607 - DNA, 15 bp, Homo sapiens
taggtgctttggaag

SEQ ID NO: 398608 - DNA, 15 bp, Homo sapiens
gtaggtgctttggaa

SEQ ID NO: 398609 - DNA, 15 bp, Homo sapiens
ggtaggtgctttgga

SEQ ID NO: 398610 - DNA, 15 bp, Homo sapiens
aggtaggtgctttgg

SEQ ID NO: 398611 - DNA, 15 bp, Homo sapiens
aaggtaggtgctttg

SEQ ID NO: 398612 - DNA, 15 bp, Homo sapiens
taaggtaggtgcttt

SEQ ID NO: 398613 - DNA, 15 bp, Homo sapiens
ataaggtaggtgctt

SEQ ID NO: 398614 - DNA, 15 bp, Homo sapiens
aataaggtaggtgct

SEQ ID NO: 398615 - DNA, 15 bp, Homo sapiens
taataaggtaggtgc

SEQ ID NO: 398616 - DNA, 15 bp, Homo sapiens
ctaataaggtaggtg

SEQ ID NO: 398617 - DNA, 15 bp, Homo sapiens
actaataaggtaggt

SEQ ID NO: 398618 - DNA, 15 bp, Homo sapiens
aactaataaggtagg

SEQ ID NO: 398619 - DNA, 15 bp, Homo sapiens
gaactaataaggtag

SEQ ID NO: 398620 - DNA, 15 bp, Homo sapiens
tgaactaataaggta

SEQ ID NO: 398621 - DNA, 15 bp, Homo sapiens
ctgaactaataaggt

SEQ ID NO: 398622 - DNA, 15 bp, Homo sapiens
actgaactaataagg

SEQ ID NO: 398623 - DNA, 15 bp, Homo sapiens
cactgaactaataag

SEQ ID NO: 398624 - DNA, 15 bp, Homo sapiens
tcactgaactaataa

SEQ ID NO: 398625 - DNA, 15 bp, Homo sapiens
ttcactgaactaata

SEQ ID NO: 398626 - DNA, 15 bp, Homo sapiens
cttcactgaactaat

SEQ ID NO: 398627 - DNA, 15 bp, Homo sapiens
tcttcactgaactaa

SEQ ID NO: 398628 - DNA, 15 bp, Homo sapiens
ctcttcactgaacta

SEQ ID NO: 398629 - DNA, 15 bp, Homo sapiens
tctcttcactgaact

SEQ ID NO: 398630 - DNA, 15 bp, Homo sapiens
ctctcttcactgaac

SEQ ID NO: 398631 - DNA, 15 bp, Homo sapiens
gctctcttcactgaa

SEQ ID NO: 398632 - DNA, 15 bp, Homo sapiens
tgctctcttcactga

SEQ ID NO: 398633 - DNA, 15 bp, Homo sapiens
ttgctctcttcactg

SEQ ID NO: 398634 - DNA, 15 bp, Homo sapiens
gttgctctcttcact

SEQ ID NO: 398635 - DNA, 15 bp, Homo sapiens
tgttgctctcttcac

SEQ ID NO: 398636 - DNA, 15 bp, Homo sapiens
gtgttgctctcttca

SEQ ID NO: 398637 - DNA, 15 bp, Homo sapiens
ggtgttgctctcttc

SEQ ID NO: 398638 - DNA, 15 bp, Homo sapiens
aggtgttgctctctt

SEQ ID NO: 398639 - DNA, 15 bp, Homo sapiens
aaggtgttgctctct

SEQ ID NO: 398640 - DNA, 15 bp, Homo sapiens
taaggtgttgctctc

SEQ ID NO: 398641 - DNA, 15 bp, Homo sapiens
gtaaggtgttgctct

SEQ ID NO: 398642 - DNA, 15 bp, Homo sapiens
ggtaaggtgttgctc

SEQ ID NO: 398643 - DNA, 15 bp, Homo sapiens
aggtaaggtgttgct

SEQ ID NO: 398644 - DNA, 15 bp, Homo sapiens
caggtaaggtgttgc

SEQ ID NO: 398645 - DNA, 15 bp, Homo sapiens
gcaggtaaggtgttg

SEQ ID NO: 398646 - DNA, 15 bp, Homo sapiens
agcaggtaaggtgtt

SEQ ID NO: 398647 - DNA, 15 bp, Homo sapiens
cagcaggtaaggtgt

SEQ ID NO: 398648 - DNA, 15 bp, Homo sapiens
tcagcaggtaaggtg

SEQ ID NO: 398649 - DNA, 15 bp, Homo sapiens
ctcagcaggtaaggt

SEQ ID NO: 398650 - DNA, 15 bp, Homo sapiens
tctcagcaggtaagg

SEQ ID NO: 398651 - DNA, 15 bp, Homo sapiens
ttctcagcaggtaag

SEQ ID NO: 398652 - DNA, 15 bp, Homo sapiens
tttctcagcaggtaa

SEQ ID NO: 398653 - DNA, 15 bp, Homo sapiens
gtttctcagcaggta

SEQ ID NO: 398654 - DNA, 15 bp, Homo sapiens
tgtttctcagcaggt

SEQ ID NO: 398655 - DNA, 15 bp, Homo sapiens
ctgtttctcagcagg

SEQ ID NO: 398656 - DNA, 15 bp, Homo sapiens
tctgtttctcagcag

SEQ ID NO: 398657 - DNA, 15 bp, Homo sapiens
ctctgtttctcagca

SEQ ID NO: 398658 - DNA, 15 bp, Homo sapiens
actctgtttctcagc

SEQ ID NO: 398659 - DNA, 15 bp, Homo sapiens
cactctgtttctcag

SEQ ID NO: 398660 - DNA, 15 bp, Homo sapiens
acactctgtttctca

SEQ ID NO: 398661 - DNA, 15 bp, Homo sapiens
gacactctgtttctc

SEQ ID NO: 398662 - DNA, 15 bp, Homo sapiens
ggacactctgtttct

SEQ ID NO: 398663 - DNA, 15 bp, Homo sapiens
gggacactctgtttc

SEQ ID NO: 398664 - DNA, 15 bp, Homo sapiens
agggacactctgttt

SEQ ID NO: 398665 - DNA, 15 bp, Homo sapiens
cagggacactctgtt

SEQ ID NO: 398666 - DNA, 15 bp, Homo sapiens
ccagggacactctgt

SEQ ID NO: 398667 - DNA, 15 bp, Homo sapiens
cccagggacactctg

SEQ ID NO: 398668 - DNA, 15 bp, Homo sapiens
ccccagggacactct

SEQ ID NO: 398669 - DNA, 15 bp, Homo sapiens
gccccagggacactc

SEQ ID NO: 398670 - DNA, 15 bp, Homo sapiens
tgccccagggacact

SEQ ID NO: 398671 - DNA, 15 bp, Homo sapiens
ttgccccagggacac

SEQ ID NO: 398672 - DNA, 15 bp, Homo sapiens
tttgccccagggaca

SEQ ID NO: 398673 - DNA, 15 bp, Homo sapiens
atttgccccagggac

SEQ ID NO: 398674 - DNA, 15 bp, Homo sapiens
tatttgccccaggga

SEQ ID NO: 398675 - DNA, 15 bp, Homo sapiens
ctatttgccccaggg

SEQ ID NO: 398676 - DNA, 15 bp, Homo sapiens
gctatttgccccagg

SEQ ID NO: 398677 - DNA, 15 bp, Homo sapiens
tgctatttgccccag

SEQ ID NO: 398678 - DNA, 15 bp, Homo sapiens
atgctatttgcccca

SEQ ID NO: 398679 - DNA, 15 bp, Homo sapiens
aatgctatttgcccc

SEQ ID NO: 398680 - DNA, 15 bp, Homo sapiens
taatgctatttgccc

SEQ ID NO: 398681 - DNA, 15 bp, Homo sapiens
ataatgctatttgcc

SEQ ID NO: 398682 - DNA, 15 bp, Homo sapiens
aataatgctatttgc

SEQ ID NO: 398683 - DNA, 15 bp, Homo sapiens
aaataatgctatttg

SEQ ID NO: 398684 - DNA, 15 bp, Homo sapiens
aaaataatgctattt

SEQ ID NO: 398685 - DNA, 15 bp, Homo sapiens
taaaataatgctatt

SEQ ID NO: 398686 - DNA, 15 bp, Homo sapiens
ataaaataatgctat

SEQ ID NO: 398687 - DNA, 15 bp, Homo sapiens
gataaaataatgcta

SEQ ID NO: 398688 - DNA, 15 bp, Homo sapiens
ggataaaataatgct

SEQ ID NO: 398689 - DNA, 15 bp, Homo sapiens
aggataaaataatgc

SEQ ID NO: 398690 - DNA, 15 bp, Homo sapiens
aaggataaaataatg

SEQ ID NO: 398691 - DNA, 15 bp, Homo sapiens
gaaggataaaataat

SEQ ID NO: 398692 - DNA, 15 bp, Homo sapiens
agaaggataaaataa

SEQ ID NO: 398693 - DNA, 15 bp, Homo sapiens
aagaaggataaaata

SEQ ID NO: 398694 - DNA, 15 bp, Homo sapiens
gaagaaggataaaat

SEQ ID NO: 398695 - DNA, 15 bp, Homo sapiens
ggaagaaggataaaa

SEQ ID NO: 398696 - DNA, 15 bp, Homo sapiens
tggaagaaggataaa

SEQ ID NO: 398697 - DNA, 15 bp, Homo sapiens
ttggaagaaggataa

SEQ ID NO: 398698 - DNA, 15 bp, Homo sapiens
tttggaagaaggata

SEQ ID NO: 398699 - DNA, 15 bp, Homo sapiens
ttttggaagaaggat

SEQ ID NO: 398700 - DNA, 15 bp, Homo sapiens
attttggaagaagga

SEQ ID NO: 398701 - DNA, 15 bp, Homo sapiens
aattttggaagaagg

SEQ ID NO: 398702 - DNA, 15 bp, Homo sapiens
aaattttggaagaag

SEQ ID NO: 398703 - DNA, 15 bp, Homo sapiens
aaaattttggaagaa

SEQ ID NO: 398704 - DNA, 15 bp, Homo sapiens
aaaaattttggaaga

SEQ ID NO: 398705 - DNA, 15 bp, Homo sapiens
aaaaaattttggaag

SEQ ID NO: 398706 - DNA, 15 bp, Homo sapiens
caaaaaattttggaa

SEQ ID NO: 398707 - DNA, 15 bp, Homo sapiens
acaaaaaattttgga

SEQ ID NO: 398708 - DNA, 15 bp, Homo sapiens
tacaaaaaattttgg

SEQ ID NO: 398709 - DNA, 15 bp, Homo sapiens
atacaaaaaattttg

SEQ ID NO: 398710 - DNA, 15 bp, Homo sapiens
tatacaaaaaatttt

SEQ ID NO: 398711 - DNA, 15 bp, Homo sapiens
ctatacaaaaaattt

SEQ ID NO: 398712 - DNA, 15 bp, Homo sapiens
actatacaaaaaatt

SEQ ID NO: 398713 - DNA, 15 bp, Homo sapiens
aactatacaaaaaat

SEQ ID NO: 398714 - DNA, 15 bp, Homo sapiens
taactatacaaaaaa

SEQ ID NO: 398715 - DNA, 15 bp, Homo sapiens
ataactatacaaaaa

SEQ ID NO: 398716 - DNA, 15 bp, Homo sapiens
tataactatacaaaa

SEQ ID NO: 398717 - DNA, 15 bp, Homo sapiens
ttataactatacaaa

SEQ ID NO: 398718 - DNA, 15 bp, Homo sapiens
attataactatacaa

SEQ ID NO: 398719 - DNA, 15 bp, Homo sapiens
tattataactataca

SEQ ID NO: 398720 - DNA, 15 bp, Homo sapiens
ttattataactatac

SEQ ID NO: 398721 - DNA, 15 bp, Homo sapiens
attattataactata

SEQ ID NO: 398722 - DNA, 15 bp, Homo sapiens
aattattataactat

SEQ ID NO: 398723 - DNA, 15 bp, Homo sapiens
taattattataacta

SEQ ID NO: 398724 - DNA, 15 bp, Homo sapiens
ttaattattataact

SEQ ID NO: 398725 - DNA, 15 bp, Homo sapiens
tttaattattataac

SEQ ID NO: 398726 - DNA, 15 bp, Homo sapiens
ttttaattattataa

SEQ ID NO: 398727 - DNA, 15 bp, Homo sapiens
tttttaattattata

SEQ ID NO: 398728 - DNA, 15 bp, Homo sapiens
ctttttaattattat

SEQ ID NO: 398729 - DNA, 15 bp, Homo sapiens
tctttttaattatta

SEQ ID NO: 398730 - DNA, 15 bp, Homo sapiens
ttctttttaattatt

SEQ ID NO: 398731 - DNA, 15 bp, Homo sapiens
gttctttttaattat

SEQ ID NO: 398732 - DNA, 15 bp, Homo sapiens
tgttctttttaatta

SEQ ID NO: 398733 - DNA, 15 bp, Homo sapiens
atgttctttttaatt

SEQ ID NO: 398734 - DNA, 15 bp, Homo sapiens
gatgttctttttaat

SEQ ID NO: 398735 - DNA, 15 bp, Homo sapiens
agatgttctttttaa

SEQ ID NO: 398736 - DNA, 15 bp, Homo sapiens
tagatgttcttttta

SEQ ID NO: 398737 - DNA, 15 bp, Homo sapiens
ctagatgttcttttt

SEQ ID NO: 398738 - DNA, 15 bp, Homo sapiens
tctagatgttctttt

SEQ ID NO: 398739 - DNA, 15 bp, Homo sapiens
ctctagatgttcttt

SEQ ID NO: 398740 - DNA, 15 bp, Homo sapiens
gctctagatgttctt

SEQ ID NO: 398741 - DNA, 15 bp, Homo sapiens
tgctctagatgttct

SEQ ID NO: 398742 - DNA, 15 bp, Homo sapiens
atgctctagatgttc

SEQ ID NO: 398743 - DNA, 15 bp, Homo sapiens
gatgctctagatgtt

SEQ ID NO: 398744 - DNA, 15 bp, Homo sapiens
agatgctctagatgt

SEQ ID NO: 398745 - DNA, 15 bp, Homo sapiens
cagatgctctagatg

SEQ ID NO: 398746 - DNA, 15 bp, Homo sapiens
acagatgctctagat

SEQ ID NO: 398747 - DNA, 15 bp, Homo sapiens
cacagatgctctaga

SEQ ID NO: 398748 - DNA, 15 bp, Homo sapiens
ccacagatgctctag

SEQ ID NO: 398749 - DNA, 15 bp, Homo sapiens
tccacagatgctcta

SEQ ID NO: 398750 - DNA, 15 bp, Homo sapiens
ctccacagatgctct

SEQ ID NO: 398751 - DNA, 15 bp, Homo sapiens
cctccacagatgctc

SEQ ID NO: 398752 - DNA, 15 bp, Homo sapiens
ccctccacagatgct

SEQ ID NO: 398753 - DNA, 15 bp, Homo sapiens
cccctccacagatgc

SEQ ID NO: 398754 - DNA, 15 bp, Homo sapiens
ccccctccacagatg

SEQ ID NO: 398755 - DNA, 15 bp, Homo sapiens
tccccctccacagat

SEQ ID NO: 398756 - DNA, 15 bp, Homo sapiens
ttccccctccacaga

SEQ ID NO: 398757 - DNA, 15 bp, Homo sapiens
tttccccctccacag

SEQ ID NO: 398758 - DNA, 15 bp, Homo sapiens
ttttccccctccaca

SEQ ID NO: 398759 - DNA, 15 bp, Homo sapiens
attttccccctccac

SEQ ID NO: 398760 - DNA, 15 bp, Homo sapiens
tattttccccctcca

SEQ ID NO: 398761 - DNA, 15 bp, Homo sapiens
ttattttccccctcc

SEQ ID NO: 398762 - DNA, 15 bp, Homo sapiens
tttattttccccctc

SEQ ID NO: 398763 - DNA, 15 bp, Homo sapiens
atttattttccccct

SEQ ID NO: 398764 - DNA, 15 bp, Homo sapiens
gatttattttccccc

SEQ ID NO: 398765 - DNA, 15 bp, Homo sapiens
tgatttattttcccc

SEQ ID NO: 398766 - DNA, 15 bp, Homo sapiens
gtgatttattttccc

SEQ ID NO: 398767 - DNA, 15 bp, Homo sapiens
ggtgatttattttcc

SEQ ID NO: 398768 - DNA, 15 bp, Homo sapiens
tggtgatttattttc

SEQ ID NO: 398769 - DNA, 15 bp, Homo sapiens
ctggtgatttatttt

SEQ ID NO: 398770 - DNA, 15 bp, Homo sapiens
tctggtgatttattt

SEQ ID NO: 398771 - DNA, 15 bp, Homo sapiens
ctctggtgatttatt

SEQ ID NO: 398772 - DNA, 15 bp, Homo sapiens
tctctggtgatttat

SEQ ID NO: 398773 - DNA, 15 bp, Homo sapiens
ttctctggtgattta

SEQ ID NO: 398774 - DNA, 15 bp, Homo sapiens
gttctctggtgattt

SEQ ID NO: 398775 - DNA, 15 bp, Homo sapiens
ggttctctggtgatt

SEQ ID NO: 398776 - DNA, 15 bp, Homo sapiens
tggttctctggtgat

SEQ ID NO: 398777 - DNA, 15 bp, Homo sapiens
ttggttctctggtga

SEQ ID NO: 398778 - DNA, 15 bp, Homo sapiens
gttggttctctggtg

SEQ ID NO: 398779 - DNA, 15 bp, Homo sapiens
tgttggttctctggt

SEQ ID NO: 398780 - DNA, 15 bp, Homo sapiens
ttgttggttctctgg

SEQ ID NO: 398781 - DNA, 15 bp, Homo sapiens
tttgttggttctctg

SEQ ID NO: 398782 - DNA, 15 bp, Homo sapiens
ctttgttggttctct

SEQ ID NO: 398783 - DNA, 15 bp, Homo sapiens
gctttgttggttctc

SEQ ID NO: 398784 - DNA, 15 bp, Homo sapiens
agctttgttggttct

SEQ ID NO: 398785 - DNA, 15 bp, Homo sapiens
aagctttgttggttc

SEQ ID NO: 398786 - DNA, 15 bp, Homo sapiens
aaagctttgttggtt

SEQ ID NO: 398787 - DNA, 15 bp, Homo sapiens
taaagctttgttggt

SEQ ID NO: 398788 - DNA, 15 bp, Homo sapiens
ctaaagctttgttgg

SEQ ID NO: 398789 - DNA, 15 bp, Homo sapiens
actaaagctttgttg

SEQ ID NO: 398790 - DNA, 15 bp, Homo sapiens
tactaaagctttgtt

SEQ ID NO: 398791 - DNA, 15 bp, Homo sapiens
ctactaaagctttgt

SEQ ID NO: 398792 - DNA, 15 bp, Homo sapiens
cctactaaagctttg

SEQ ID NO: 398793 - DNA, 15 bp, Homo sapiens
tcctactaaagcttt

SEQ ID NO: 398794 - DNA, 15 bp, Homo sapiens
atcctactaaagctt

SEQ ID NO: 398795 - DNA, 15 bp, Homo sapiens
gatcctactaaagct

SEQ ID NO: 398796 - DNA, 15 bp, Homo sapiens
ggatcctactaaagc

SEQ ID NO: 398797 - DNA, 15 bp, Homo sapiens
gggatcctactaaag

SEQ ID NO: 398798 - DNA, 15 bp, Homo sapiens
ggggatcctactaaa

SEQ ID NO: 398799 - DNA, 15 bp, Homo sapiens
gggggatcctactaa

SEQ ID NO: 398800 - DNA, 15 bp, Homo sapiens
tgggggatcctacta

SEQ ID NO: 398801 - DNA, 15 bp, Homo sapiens
ttgggggatcctact

SEQ ID NO: 398802 - DNA, 15 bp, Homo sapiens
gttgggggatcctac

SEQ ID NO: 398803 - DNA, 15 bp, Homo sapiens
ggttgggggatccta

SEQ ID NO: 398804 - DNA, 15 bp, Homo sapiens
aggttgggggatcct

SEQ ID NO: 398805 - DNA, 15 bp, Homo sapiens
caggttgggggatcc

SEQ ID NO: 398806 - DNA, 15 bp, Homo sapiens
tcaggttgggggatc

SEQ ID NO: 398807 - DNA, 15 bp, Homo sapiens
ctcaggttgggggat

SEQ ID NO: 398808 - DNA, 15 bp, Homo sapiens
gctcaggttggggga

SEQ ID NO: 398809 - DNA, 15 bp, Homo sapiens
agctcaggttggggg

SEQ ID NO: 398810 - DNA, 15 bp, Homo sapiens
aagctcaggttgggg

SEQ ID NO: 398811 - DNA, 15 bp, Homo sapiens
taagctcaggttggg

SEQ ID NO: 398812 - DNA, 15 bp, Homo sapiens
ctaagctcaggttgg

SEQ ID NO: 398813 - DNA, 15 bp, Homo sapiens
actaagctcaggttg

SEQ ID NO: 398814 - DNA, 15 bp, Homo sapiens
cactaagctcaggtt

SEQ ID NO: 398815 - DNA, 15 bp, Homo sapiens
ccactaagctcaggt

SEQ ID NO: 398816 - DNA, 15 bp, Homo sapiens
tccactaagctcagg

SEQ ID NO: 398817 - DNA, 15 bp, Homo sapiens
ctccactaagctcag

SEQ ID NO: 398818 - DNA, 15 bp, Homo sapiens
tctccactaagctca

SEQ ID NO: 398819 - DNA, 15 bp, Homo sapiens
atctccactaagctc

SEQ ID NO: 398820 - DNA, 15 bp, Homo sapiens
catctccactaagct

SEQ ID NO: 398821 - DNA, 15 bp, Homo sapiens
tcatctccactaagc

SEQ ID NO: 398822 - DNA, 15 bp, Homo sapiens
ctcatctccactaag

SEQ ID NO: 398823 - DNA, 15 bp, Homo sapiens
tctcatctccactaa

SEQ ID NO: 398824 - DNA, 15 bp, Homo sapiens
ttctcatctccacta

SEQ ID NO: 398825 - DNA, 15 bp, Homo sapiens
tttctcatctccact

SEQ ID NO: 398826 - DNA, 15 bp, Homo sapiens
gtttctcatctccac

SEQ ID NO: 398827 - DNA, 15 bp, Homo sapiens
agtttctcatctcca

SEQ ID NO: 398828 - DNA, 15 bp, Homo sapiens
tagtttctcatctcc

SEQ ID NO: 398829 - DNA, 15 bp, Homo sapiens
ctagtttctcatctc

SEQ ID NO: 398830 - DNA, 15 bp, Homo sapiens
actagtttctcatct

SEQ ID NO: 398831 - DNA, 15 bp, Homo sapiens
cactagtttctcatc

SEQ ID NO: 398832 - DNA, 15 bp, Homo sapiens
ccactagtttctcat

SEQ ID NO: 398833 - DNA, 15 bp, Homo sapiens
tccactagtttctca

SEQ ID NO: 398834 - DNA, 15 bp, Homo sapiens
atccactagtttctc

SEQ ID NO: 398835 - DNA, 15 bp, Homo sapiens
catccactagtttct

SEQ ID NO: 398836 - DNA, 15 bp, Homo sapiens
ccatccactagtttc

SEQ ID NO: 398837 - DNA, 15 bp, Homo sapiens
gccatccactagttt

SEQ ID NO: 398838 - DNA, 15 bp, Homo sapiens
agccatccactagtt

SEQ ID NO: 398839 - DNA, 15 bp, Homo sapiens
cagccatccactagt

SEQ ID NO: 398840 - DNA, 15 bp, Homo sapiens
acagccatccactag

SEQ ID NO: 398841 - DNA, 15 bp, Homo sapiens
cacagccatccacta

SEQ ID NO: 398842 - DNA, 15 bp, Homo sapiens
acacagccatccact

SEQ ID NO: 398843 - DNA, 15 bp, Homo sapiens
gacacagccatccac

SEQ ID NO: 398844 - DNA, 15 bp, Homo sapiens
tgacacagccatcca

SEQ ID NO: 398845 - DNA, 15 bp, Homo sapiens
ctgacacagccatcc

SEQ ID NO: 398846 - DNA, 15 bp, Homo sapiens
cctgacacagccatc

SEQ ID NO: 398847 - DNA, 15 bp, Homo sapiens
ccctgacacagccat

SEQ ID NO: 398848 - DNA, 15 bp, Homo sapiens
cccctgacacagcca

SEQ ID NO: 398849 - DNA, 15 bp, Homo sapiens
tcccctgacacagcc

SEQ ID NO: 398850 - DNA, 15 bp, Homo sapiens
atcccctgacacagc

SEQ ID NO: 398851 - DNA, 15 bp, Homo sapiens
gatcccctgacacag

SEQ ID NO: 398852 - DNA, 15 bp, Homo sapiens
tgatcccctgacaca

SEQ ID NO: 398853 - DNA, 15 bp, Homo sapiens
ctgatcccctgacac

SEQ ID NO: 398854 - DNA, 15 bp, Homo sapiens
cctgatcccctgaca

SEQ ID NO: 398855 - DNA, 15 bp, Homo sapiens
tcctgatcccctgac

SEQ ID NO: 398856 - DNA, 15 bp, Homo sapiens
ctcctgatcccctga

SEQ ID NO: 398857 - DNA, 15 bp, Homo sapiens
actcctgatcccctg

SEQ ID NO: 398858 - DNA, 15 bp, Homo sapiens
gactcctgatcccct

SEQ ID NO: 398859 - DNA, 15 bp, Homo sapiens
ggactcctgatcccc

SEQ ID NO: 398860 - DNA, 15 bp, Homo sapiens
aggactcctgatccc

SEQ ID NO: 398861 - DNA, 15 bp, Homo sapiens
gaggactcctgatcc

SEQ ID NO: 398862 - DNA, 15 bp, Homo sapiens
agaggactcctgatc

SEQ ID NO: 398863 - DNA, 15 bp, Homo sapiens
aagaggactcctgat

SEQ ID NO: 398864 - DNA, 15 bp, Homo sapiens
aaagaggactcctga

SEQ ID NO: 398865 - DNA, 15 bp, Homo sapiens
taaagaggactcctg

SEQ ID NO: 398866 - DNA, 15 bp, Homo sapiens
ctaaagaggactcct

SEQ ID NO: 398867 - DNA, 15 bp, Homo sapiens
gctaaagaggactcc

SEQ ID NO: 398868 - DNA, 15 bp, Homo sapiens
agctaaagaggactc

SEQ ID NO: 398869 - DNA, 15 bp, Homo sapiens
gagctaaagaggact

SEQ ID NO: 398870 - DNA, 15 bp, Homo sapiens
agagctaaagaggac

SEQ ID NO: 398871 - DNA, 15 bp, Homo sapiens
cagagctaaagagga

SEQ ID NO: 398872 - DNA, 15 bp, Homo sapiens
ccagagctaaagagg

SEQ ID NO: 398873 - DNA, 15 bp, Homo sapiens
accagagctaaagag

SEQ ID NO: 398874 - DNA, 15 bp, Homo sapiens
caccagagctaaaga

SEQ ID NO: 398875 - DNA, 15 bp, Homo sapiens
acaccagagctaaag

SEQ ID NO: 398876 - DNA, 15 bp, Homo sapiens
cacaccagagctaaa

SEQ ID NO: 398877 - DNA, 15 bp, Homo sapiens
ccacaccagagctaa

SEQ ID NO: 398878 - DNA, 15 bp, Homo sapiens
gccacaccagagcta

SEQ ID NO: 398879 - DNA, 15 bp, Homo sapiens
agccacaccagagct

SEQ ID NO: 398880 - DNA, 15 bp, Homo sapiens
cagccacaccagagc

SEQ ID NO: 398881 - DNA, 15 bp, Homo sapiens
ccagccacaccagag

SEQ ID NO: 398882 - DNA, 15 bp, Homo sapiens
accagccacaccaga

SEQ ID NO: 398883 - DNA, 15 bp, Homo sapiens
gaccagccacaccag

SEQ ID NO: 398884 - DNA, 15 bp, Homo sapiens
ggaccagccacacca

SEQ ID NO: 398885 - DNA, 15 bp, Homo sapiens
tggaccagccacacc

SEQ ID NO: 398886 - DNA, 15 bp, Homo sapiens
gtggaccagccacac

SEQ ID NO: 398887 - DNA, 15 bp, Homo sapiens
tgtggaccagccaca

SEQ ID NO: 398888 - DNA, 15 bp, Homo sapiens
gtgtggaccagccac

SEQ ID NO: 398889 - DNA, 15 bp, Homo sapiens
tgtgtggaccagcca

SEQ ID NO: 398890 - DNA, 15 bp, Homo sapiens
atgtgtggaccagcc

SEQ ID NO: 398891 - DNA, 15 bp, Homo sapiens
tatgtgtggaccagc

SEQ ID NO: 398892 - DNA, 15 bp, Homo sapiens
gtatgtgtggaccag

SEQ ID NO: 398893 - DNA, 15 bp, Homo sapiens
agtatgtgtggacca

SEQ ID NO: 398894 - DNA, 15 bp, Homo sapiens
gagtatgtgtggacc

SEQ ID NO: 398895 - DNA, 15 bp, Homo sapiens
ggagtatgtgtggac

SEQ ID NO: 398896 - DNA, 15 bp, Homo sapiens
gggagtatgtgtgga

SEQ ID NO: 398897 - DNA, 15 bp, Homo sapiens
agggagtatgtgtgg

SEQ ID NO: 398898 - DNA, 15 bp, Homo sapiens
cagggagtatgtgtg

SEQ ID NO: 398899 - DNA, 15 bp, Homo sapiens
gcagggagtatgtgt

SEQ ID NO: 398900 - DNA, 15 bp, Homo sapiens
ggcagggagtatgtg

SEQ ID NO: 398901 - DNA, 15 bp, Homo sapiens
tggcagggagtatgt

SEQ ID NO: 398902 - DNA, 15 bp, Homo sapiens
atggcagggagtatg

SEQ ID NO: 398903 - DNA, 15 bp, Homo sapiens
aatggcagggagtat

SEQ ID NO: 398904 - DNA, 15 bp, Homo sapiens
gaatggcagggagta

SEQ ID NO: 398905 - DNA, 15 bp, Homo sapiens
ggaatggcagggagt

SEQ ID NO: 398906 - DNA, 15 bp, Homo sapiens
gggaatggcagggag

SEQ ID NO: 398907 - DNA, 15 bp, Homo sapiens
agggaatggcaggga

SEQ ID NO: 398908 - DNA, 15 bp, Homo sapiens
cagggaatggcaggg

SEQ ID NO: 398909 - DNA, 15 bp, Homo sapiens
ccagggaatggcagg

SEQ ID NO: 398910 - DNA, 15 bp, Homo sapiens
tccagggaatggcag

SEQ ID NO: 398911 - DNA, 15 bp, Homo sapiens
atccagggaatggca

SEQ ID NO: 398912 - DNA, 15 bp, Homo sapiens
tatccagggaatggc

SEQ ID NO: 398913 - DNA, 15 bp, Homo sapiens
ctatccagggaatgg

SEQ ID NO: 398914 - DNA, 15 bp, Homo sapiens
gctatccagggaatg

SEQ ID NO: 398915 - DNA, 15 bp, Homo sapiens
agctatccagggaat

SEQ ID NO: 398916 - DNA, 15 bp, Homo sapiens
tagctatccagggaa

SEQ ID NO: 398917 - DNA, 15 bp, Homo sapiens
gtagctatccaggga

SEQ ID NO: 398918 - DNA, 15 bp, Homo sapiens
tgtagctatccaggg

SEQ ID NO: 398919 - DNA, 15 bp, Homo sapiens
atgtagctatccagg

SEQ ID NO: 398920 - DNA, 15 bp, Homo sapiens
gatgtagctatccag

SEQ ID NO: 398921 - DNA, 15 bp, Homo sapiens
tgatgtagctatcca

SEQ ID NO: 398922 - DNA, 15 bp, Homo sapiens
gtgatgtagctatcc

SEQ ID NO: 398923 - DNA, 15 bp, Homo sapiens
ggtgatgtagctatc

SEQ ID NO: 398924 - DNA, 15 bp, Homo sapiens
aggtgatgtagctat

SEQ ID NO: 398925 - DNA, 15 bp, Homo sapiens
caggtgatgtagcta

SEQ ID NO: 398926 - DNA, 15 bp, Homo sapiens
ccaggtgatgtagct

SEQ ID NO: 398927 - DNA, 15 bp, Homo sapiens
cccaggtgatgtagc

SEQ ID NO: 398928 - DNA, 15 bp, Homo sapiens
ccccaggtgatgtag

SEQ ID NO: 398929 - DNA, 15 bp, Homo sapiens
accccaggtgatgta

SEQ ID NO: 398930 - DNA, 15 bp, Homo sapiens
taccccaggtgatgt

SEQ ID NO: 398931 - DNA, 15 bp, Homo sapiens
ctaccccaggtgatg

SEQ ID NO: 398932 - DNA, 15 bp, Homo sapiens
cctaccccaggtgat

SEQ ID NO: 398933 - DNA, 15 bp, Homo sapiens
gcctaccccaggtga

SEQ ID NO: 398934 - DNA, 15 bp, Homo sapiens
tgcctaccccaggtg

SEQ ID NO: 398935 - DNA, 15 bp, Homo sapiens
ctgcctaccccaggt

SEQ ID NO: 398936 - DNA, 15 bp, Homo sapiens
gctgcctaccccagg

SEQ ID NO: 398937 - DNA, 15 bp, Homo sapiens
ggctgcctaccccag

SEQ ID NO: 398938 - DNA, 15 bp, Homo sapiens
tggctgcctacccca

SEQ ID NO: 398939 - DNA, 15 bp, Homo sapiens
ctggctgcctacccc

SEQ ID NO: 398940 - DNA, 15 bp, Homo sapiens
tctggctgcctaccc

SEQ ID NO: 398941 - DNA, 15 bp, Homo sapiens
atctggctgcctacc

SEQ ID NO: 398942 - DNA, 15 bp, Homo sapiens
catctggctgcctac

SEQ ID NO: 398943 - DNA, 15 bp, Homo sapiens
gcatctggctgccta

SEQ ID NO: 398944 - DNA, 15 bp, Homo sapiens
agcatctggctgcct

SEQ ID NO: 398945 - DNA, 15 bp, Homo sapiens
cagcatctggctgcc

SEQ ID NO: 398946 - DNA, 15 bp, Homo sapiens
ccagcatctggctgc

SEQ ID NO: 398947 - DNA, 15 bp, Homo sapiens
gccagcatctggctg

SEQ ID NO: 398948 - DNA, 15 bp, Homo sapiens
tgccagcatctggct

SEQ ID NO: 398949 - DNA, 15 bp, Homo sapiens
ttgccagcatctggc

SEQ ID NO: 398950 - DNA, 15 bp, Homo sapiens
attgccagcatctgg

SEQ ID NO: 398951 - DNA, 15 bp, Homo sapiens
tattgccagcatctg

SEQ ID NO: 398952 - DNA, 15 bp, Homo sapiens
ttattgccagcatct

SEQ ID NO: 398953 - DNA, 15 bp, Homo sapiens
attattgccagcatc

SEQ ID NO: 398954 - DNA, 15 bp, Homo sapiens
aattattgccagcat

SEQ ID NO: 398955 - DNA, 15 bp, Homo sapiens
aaattattgccagca

SEQ ID NO: 398956 - DNA, 15 bp, Homo sapiens
caaattattgccagc

SEQ ID NO: 398957 - DNA, 15 bp, Homo sapiens
ccaaattattgccag

SEQ ID NO: 398958 - DNA, 15 bp, Homo sapiens
cccaaattattgcca

SEQ ID NO: 398959 - DNA, 15 bp, Homo sapiens
tcccaaattattgcc

SEQ ID NO: 398960 - DNA, 15 bp, Homo sapiens
atcccaaattattgc

SEQ ID NO: 398961 - DNA, 15 bp, Homo sapiens
tatcccaaattattg

SEQ ID NO: 398962 - DNA, 15 bp, Homo sapiens
gtatcccaaattatt

SEQ ID NO: 398963 - DNA, 15 bp, Homo sapiens
tgtatcccaaattat

SEQ ID NO: 398964 - DNA, 15 bp, Homo sapiens
ctgtatcccaaatta

SEQ ID NO: 398965 - DNA, 15 bp, Homo sapiens
actgtatcccaaatt

SEQ ID NO: 398966 - DNA, 15 bp, Homo sapiens
aactgtatcccaaat

SEQ ID NO: 398967 - DNA, 15 bp, Homo sapiens
aaactgtatcccaaa

SEQ ID NO: 398968 - DNA, 15 bp, Homo sapiens
caaactgtatcccaa

SEQ ID NO: 398969 - DNA, 15 bp, Homo sapiens
tcaaactgtatccca

SEQ ID NO: 398970 - DNA, 15 bp, Homo sapiens
atcaaactgtatccc

SEQ ID NO: 398971 - DNA, 15 bp, Homo sapiens
tatcaaactgtatcc

SEQ ID NO: 398972 - DNA, 15 bp, Homo sapiens
gtatcaaactgtatc

SEQ ID NO: 398973 - DNA, 15 bp, Homo sapiens
ggtatcaaactgtat

SEQ ID NO: 398974 - DNA, 15 bp, Homo sapiens
gggtatcaaactgta

SEQ ID NO: 398975 - DNA, 15 bp, Homo sapiens
ggggtatcaaactgt

SEQ ID NO: 398976 - DNA, 15 bp, Homo sapiens
tggggtatcaaactg

SEQ ID NO: 398977 - DNA, 15 bp, Homo sapiens
atggggtatcaaact

SEQ ID NO: 398978 - DNA, 15 bp, Homo sapiens
catggggtatcaaac

SEQ ID NO: 398979 - DNA, 15 bp, Homo sapiens
acatggggtatcaaa

SEQ ID NO: 398980 - DNA, 15 bp, Homo sapiens
cacatggggtatcaa

SEQ ID NO: 398981 - DNA, 15 bp, Homo sapiens
tcacatggggtatca

SEQ ID NO: 398982 - DNA, 15 bp, Homo sapiens
atcacatggggtatc

SEQ ID NO: 398983 - DNA, 15 bp, Homo sapiens
aatcacatggggtat

SEQ ID NO: 398984 - DNA, 15 bp, Homo sapiens
aaatcacatggggta

SEQ ID NO: 398985 - DNA, 15 bp, Homo sapiens
caaatcacatggggt

SEQ ID NO: 398986 - DNA, 15 bp, Homo sapiens
acaaatcacatgggg

SEQ ID NO: 398987 - DNA, 15 bp, Homo sapiens
gacaaatcacatggg

SEQ ID NO: 398988 - DNA, 15 bp, Homo sapiens
agacaaatcacatgg

SEQ ID NO: 398989 - DNA, 15 bp, Homo sapiens
aagacaaatcacatg

SEQ ID NO: 398990 - DNA, 15 bp, Homo sapiens
aaagacaaatcacat

SEQ ID NO: 398991 - DNA, 15 bp, Homo sapiens
caaagacaaatcaca

SEQ ID NO: 398992 - DNA, 15 bp, Homo sapiens
tcaaagacaaatcac

SEQ ID NO: 398993 - DNA, 15 bp, Homo sapiens
aaatcctaaaagaaa

SEQ ID NO: 398994 - DNA, 15 bp, Homo sapiens
taaatcctaaaagaa

SEQ ID NO: 398995 - DNA, 15 bp, Homo sapiens
ataaatcctaaaaga

SEQ ID NO: 398996 - DNA, 15 bp, Homo sapiens
tataaatcctaaaag

SEQ ID NO: 398997 - DNA, 15 bp, Homo sapiens
gtataaatcctaaaa

SEQ ID NO: 398998 - DNA, 15 bp, Homo sapiens
agtataaatcctaaa

SEQ ID NO: 398999 - DNA, 15 bp, Homo sapiens
tagtataaatcctaa

SEQ ID NO: 399000 - DNA, 15 bp, Homo sapiens
ttagtataaatccta

SEQ ID NO: 399001 - DNA, 15 bp, Homo sapiens
gttagtataaatcct

SEQ ID NO: 399002 - DNA, 15 bp, Homo sapiens
tgttagtataaatcc

SEQ ID NO: 399003 - DNA, 15 bp, Homo sapiens
atgttagtataaatc

SEQ ID NO: 399004 - DNA, 15 bp, Homo sapiens
catgttagtataaat

SEQ ID NO: 399005 - DNA, 15 bp, Homo sapiens
gcatgttagtataaa

SEQ ID NO: 399006 - DNA, 15 bp, Homo sapiens
tgcatgttagtataa

SEQ ID NO: 399007 - DNA, 15 bp, Homo sapiens
atgcatgttagtata

SEQ ID NO: 399008 - DNA, 15 bp, Homo sapiens
gatgcatgttagtat

SEQ ID NO: 399009 - DNA, 15 bp, Homo sapiens
ggatgcatgttagta

SEQ ID NO: 399010 - DNA, 15 bp, Homo sapiens
tggatgcatgttagt

SEQ ID NO: 399011 - DNA, 15 bp, Homo sapiens
ttggatgcatgttag

SEQ ID NO: 399012 - DNA, 15 bp, Homo sapiens
cttggatgcatgtta

SEQ ID NO: 399013 - DNA, 15 bp, Homo sapiens
tcttggatgcatgtt

SEQ ID NO: 399014 - DNA, 15 bp, Homo sapiens
atcttggatgcatgt

SEQ ID NO: 399015 - DNA, 15 bp, Homo sapiens
catcttggatgcatg

SEQ ID NO: 399016 - DNA, 15 bp, Homo sapiens
acatcttggatgcat

SEQ ID NO: 399017 - DNA, 15 bp, Homo sapiens
aacatcttggatgca

SEQ ID NO: 399018 - DNA, 15 bp, Homo sapiens
aaacatcttggatgc

SEQ ID NO: 399019 - DNA, 15 bp, Homo sapiens
aaaacatcttggatg

SEQ ID NO: 399020 - DNA, 15 bp, Homo sapiens
caaaacatcttggat

SEQ ID NO: 399021 - DNA, 15 bp, Homo sapiens
acaaaacatcttgga

SEQ ID NO: 399022 - DNA, 15 bp, Homo sapiens
aacaaaacatcttgg

SEQ ID NO: 399023 - DNA, 15 bp, Homo sapiens
aaacaaaacatcttg

SEQ ID NO: 399024 - DNA, 15 bp, Homo sapiens
taaacaaaacatctt

SEQ ID NO: 399025 - DNA, 15 bp, Homo sapiens
ctaaacaaaacatct

SEQ ID NO: 399026 - DNA, 15 bp, Homo sapiens
actaaacaaaacatc

SEQ ID NO: 399027 - DNA, 15 bp, Homo sapiens
aactaaacaaaacat

SEQ ID NO: 399028 - DNA, 15 bp, Homo sapiens
caactaaacaaaaca

SEQ ID NO: 399029 - DNA, 15 bp, Homo sapiens
acaactaaacaaaac

SEQ ID NO: 399030 - DNA, 15 bp, Homo sapiens
cacaactaaacaaaa

SEQ ID NO: 399031 - DNA, 15 bp, Homo sapiens
acacaactaaacaaa

SEQ ID NO: 399032 - DNA, 15 bp, Homo sapiens
tacacaactaaacaa

SEQ ID NO: 399033 - DNA, 15 bp, Homo sapiens
ttacacaactaaaca

SEQ ID NO: 399034 - DNA, 15 bp, Homo sapiens
cttacacaactaaac

SEQ ID NO: 399035 - DNA, 15 bp, Homo sapiens
ccttacacaactaaa

SEQ ID NO: 399036 - DNA, 15 bp, Homo sapiens
cccttacacaactaa

SEQ ID NO: 399037 - DNA, 15 bp, Homo sapiens
acccttacacaacta

SEQ ID NO: 399038 - DNA, 15 bp, Homo sapiens
cacccttacacaact

SEQ ID NO: 399039 - DNA, 15 bp, Homo sapiens
tcacccttacacaac

SEQ ID NO: 399040 - DNA, 15 bp, Homo sapiens
atcacccttacacaa

SEQ ID NO: 399041 - DNA, 15 bp, Homo sapiens
gatcacccttacaca

SEQ ID NO: 399042 - DNA, 15 bp, Homo sapiens
ggatcacccttacac

SEQ ID NO: 399043 - DNA, 15 bp, Homo sapiens
cggatcacccttaca

SEQ ID NO: 399044 - DNA, 15 bp, Homo sapiens
ccggatcacccttac

SEQ ID NO: 399045 - DNA, 15 bp, Homo sapiens
tccggatcaccctta

SEQ ID NO: 399046 - DNA, 15 bp, Homo sapiens
ttccggatcaccctt

SEQ ID NO: 399047 - DNA, 15 bp, Homo sapiens
tttccggatcaccct

SEQ ID NO: 399048 - DNA, 15 bp, Homo sapiens
gtttccggatcaccc

SEQ ID NO: 399049 - DNA, 15 bp, Homo sapiens
tgtttccggatcacc

SEQ ID NO: 399050 - DNA, 15 bp, Homo sapiens
ctgtttccggatcac

SEQ ID NO: 399051 - DNA, 15 bp, Homo sapiens
gctgtttccggatca

SEQ ID NO: 399052 - DNA, 15 bp, Homo sapiens
tgctgtttccggatc

SEQ ID NO: 399053 - DNA, 15 bp, Homo sapiens
atgctgtttccggat

SEQ ID NO: 399054 - DNA, 15 bp, Homo sapiens
aatgctgtttccgga

SEQ ID NO: 399055 - DNA, 15 bp, Homo sapiens
caatgctgtttccgg

SEQ ID NO: 399056 - DNA, 15 bp, Homo sapiens
gcaatgctgtttccg

SEQ ID NO: 399057 - DNA, 15 bp, Homo sapiens
agcaatgctgtttcc

SEQ ID NO: 399058 - DNA, 15 bp, Homo sapiens
tagcaatgctgtttc

SEQ ID NO: 399059 - DNA, 15 bp, Homo sapiens
gtagcaatgctgttt

SEQ ID NO: 399060 - DNA, 15 bp, Homo sapiens
ggtagcaatgctgtt

SEQ ID NO: 399061 - DNA, 15 bp, Homo sapiens
gggtagcaatgctgt

SEQ ID NO: 399062 - DNA, 15 bp, Homo sapiens
agggtagcaatgctg

SEQ ID NO: 399063 - DNA, 15 bp, Homo sapiens
gagggtagcaatgct

SEQ ID NO: 399064 - DNA, 15 bp, Homo sapiens
ggagggtagcaatgc

SEQ ID NO: 399065 - DNA, 15 bp, Homo sapiens
tggagggtagcaatg

SEQ ID NO: 399066 - DNA, 15 bp, Homo sapiens
ttggagggtagcaat

SEQ ID NO: 399067 - DNA, 15 bp, Homo sapiens
cttggagggtagcaa

SEQ ID NO: 399068 - DNA, 15 bp, Homo sapiens
tcttggagggtagca

SEQ ID NO: 399069 - DNA, 15 bp, Homo sapiens
gtcttggagggtagc

SEQ ID NO: 399070 - DNA, 15 bp, Homo sapiens
agtcttggagggtag

SEQ ID NO: 399071 - DNA, 15 bp, Homo sapiens
aagtcttggagggta

SEQ ID NO: 399072 - DNA, 15 bp, Homo sapiens
taagtcttggagggt

SEQ ID NO: 399073 - DNA, 15 bp, Homo sapiens
ataagtcttggaggg

SEQ ID NO: 399074 - DNA, 15 bp, Homo sapiens
cataagtcttggagg

SEQ ID NO: 399075 - DNA, 15 bp, Homo sapiens
gcataagtcttggag

SEQ ID NO: 399076 - DNA, 15 bp, Homo sapiens
agcataagtcttgga

SEQ ID NO: 399077 - DNA, 15 bp, Homo sapiens
aagcataagtcttgg

SEQ ID NO: 399078 - DNA, 15 bp, Homo sapiens
taagcataagtcttg

SEQ ID NO: 399079 - DNA, 15 bp, Homo sapiens
ctaagcataagtctt

SEQ ID NO: 399080 - DNA, 15 bp, Homo sapiens
tctaagcataagtct

SEQ ID NO: 399081 - DNA, 15 bp, Homo sapiens
ttctaagcataagtc

SEQ ID NO: 399082 - DNA, 15 bp, Homo sapiens
attctaagcataagt

SEQ ID NO: 399083 - DNA, 15 bp, Homo sapiens
cattctaagcataag

SEQ ID NO: 399084 - DNA, 15 bp, Homo sapiens
tcattctaagcataa

SEQ ID NO: 399085 - DNA, 15 bp, Homo sapiens
ttcattctaagcata

SEQ ID NO: 399086 - DNA, 15 bp, Homo sapiens
tttcattctaagcat

SEQ ID NO: 399087 - DNA, 15 bp, Homo sapiens
ttttcattctaagca

SEQ ID NO: 399088 - DNA, 15 bp, Homo sapiens
tttttcattctaagc

SEQ ID NO: 399089 - DNA, 15 bp, Homo sapiens
gtttttcattctaag

SEQ ID NO: 399090 - DNA, 15 bp, Homo sapiens
agtttttcattctaa

SEQ ID NO: 399091 - DNA, 15 bp, Homo sapiens
aagtttttcattcta

SEQ ID NO: 399092 - DNA, 15 bp, Homo sapiens
aaagtttttcattct

SEQ ID NO: 399093 - DNA, 15 bp, Homo sapiens
aaaagtttttcattc

SEQ ID NO: 399094 - DNA, 15 bp, Homo sapiens
taaaagtttttcatt

SEQ ID NO: 399095 - DNA, 15 bp, Homo sapiens
gtaaaagtttttcat

SEQ ID NO: 399096 - DNA, 15 bp, Homo sapiens
agtaaaagtttttca

SEQ ID NO: 399097 - DNA, 15 bp, Homo sapiens
cagtaaaagtttttc

SEQ ID NO: 399098 - DNA, 15 bp, Homo sapiens
acagtaaaagttttt

SEQ ID NO: 399099 - DNA, 15 bp, Homo sapiens
cacagtaaaagtttt

SEQ ID NO: 399100 - DNA, 15 bp, Homo sapiens
ccacagtaaaagttt

SEQ ID NO: 399101 - DNA, 15 bp, Homo sapiens
accacagtaaaagtt

SEQ ID NO: 399102 - DNA, 15 bp, Homo sapiens
caccacagtaaaagt

SEQ ID NO: 399103 - DNA, 15 bp, Homo sapiens
acaccacagtaaaag

SEQ ID NO: 399104 - DNA, 15 bp, Homo sapiens
gacaccacagtaaaa

SEQ ID NO: 399105 - DNA, 15 bp, Homo sapiens
cgacaccacagtaaa

SEQ ID NO: 399106 - DNA, 15 bp, Homo sapiens
gcgacaccacagtaa

SEQ ID NO: 399107 - DNA, 15 bp, Homo sapiens
tgcgacaccacagta

SEQ ID NO: 399108 - DNA, 15 bp, Homo sapiens
ttgcgacaccacagt

SEQ ID NO: 399109 - DNA, 15 bp, Homo sapiens
gttgcgacaccacag

SEQ ID NO: 399110 - DNA, 15 bp, Homo sapiens
tgttgcgacaccaca

SEQ ID NO: 399111 - DNA, 15 bp, Homo sapiens
atgttgcgacaccac

SEQ ID NO: 399112 - DNA, 15 bp, Homo sapiens
catgttgcgacacca

SEQ ID NO: 399113 - DNA, 15 bp, Homo sapiens
tcatgttgcgacacc

SEQ ID NO: 399114 - DNA, 15 bp, Homo sapiens
ttcatgttgcgacac

SEQ ID NO: 399115 - DNA, 15 bp, Homo sapiens
attcatgttgcgaca

SEQ ID NO: 399116 - DNA, 15 bp, Homo sapiens
tattcatgttgcgac

SEQ ID NO: 399117 - DNA, 15 bp, Homo sapiens
ttattcatgttgcga

SEQ ID NO: 399118 - DNA, 15 bp, Homo sapiens
attattcatgttgcg

SEQ ID NO: 399119 - DNA, 15 bp, Homo sapiens
aattattcatgttgc

SEQ ID NO: 399120 - DNA, 15 bp, Homo sapiens
aaattattcatgttg

SEQ ID NO: 399121 - DNA, 15 bp, Homo sapiens
aaaattattcatgtt

SEQ ID NO: 399122 - DNA, 15 bp, Homo sapiens
gaaaattattcatgt

SEQ ID NO: 399123 - DNA, 15 bp, Homo sapiens
ggaaaattattcatg

SEQ ID NO: 399124 - DNA, 15 bp, Homo sapiens
aggaaaattattcat

SEQ ID NO: 399125 - DNA, 15 bp, Homo sapiens
aaggaaaattattca

SEQ ID NO: 399126 - DNA, 15 bp, Homo sapiens
gaaggaaaattattc

SEQ ID NO: 399127 - DNA, 15 bp, Homo sapiens
tgaaggaaaattatt

SEQ ID NO: 399128 - DNA, 15 bp, Homo sapiens
ctgaaggaaaattat

SEQ ID NO: 399129 - DNA, 15 bp, Homo sapiens
tctgaaggaaaatta

SEQ ID NO: 399130 - DNA, 15 bp, Homo sapiens
gtctgaaggaaaatt

SEQ ID NO: 399131 - DNA, 15 bp, Homo sapiens
agtctgaaggaaaat

SEQ ID NO: 399132 - DNA, 15 bp, Homo sapiens
aagtctgaaggaaaa

SEQ ID NO: 399133 - DNA, 15 bp, Homo sapiens
aaagtctgaaggaaa

SEQ ID NO: 399134 - DNA, 15 bp, Homo sapiens
gaaagtctgaaggaa

SEQ ID NO: 399135 - DNA, 15 bp, Homo sapiens
tgaaagtctgaagga

SEQ ID NO: 399136 - DNA, 15 bp, Homo sapiens
atgaaagtctgaagg

SEQ ID NO: 399137 - DNA, 15 bp, Homo sapiens
catgaaagtctgaag

SEQ ID NO: 399138 - DNA, 15 bp, Homo sapiens
tcatgaaagtctgaa

SEQ ID NO: 399139 - DNA, 15 bp, Homo sapiens
ctcatgaaagtctga

SEQ ID NO: 399140 - DNA, 15 bp, Homo sapiens
cctcatgaaagtctg

SEQ ID NO: 399141 - DNA, 15 bp, Homo sapiens
gcctcatgaaagtct

SEQ ID NO: 399142 - DNA, 15 bp, Homo sapiens
ggcctcatgaaagtc

SEQ ID NO: 399143 - DNA, 15 bp, Homo sapiens
tggcctcatgaaagt

SEQ ID NO: 399144 - DNA, 15 bp, Homo sapiens
ttggcctcatgaaag

SEQ ID NO: 399145 - DNA, 15 bp, Homo sapiens
cttggcctcatgaaa

SEQ ID NO: 399146 - DNA, 15 bp, Homo sapiens
tcttggcctcatgaa

SEQ ID NO: 399147 - DNA, 15 bp, Homo sapiens
gtcttggcctcatga

SEQ ID NO: 399148 - DNA, 15 bp, Homo sapiens
ggtcttggcctcatg

SEQ ID NO: 399149 - DNA, 15 bp, Homo sapiens
tggtcttggcctcat

SEQ ID NO: 399150 - DNA, 15 bp, Homo sapiens
atggtcttggcctca

SEQ ID NO: 399151 - DNA, 15 bp, Homo sapiens
catggtcttggcctc

SEQ ID NO: 399152 - DNA, 15 bp, Homo sapiens
acatggtcttggcct

SEQ ID NO: 399153 - DNA, 15 bp, Homo sapiens
aacatggtcttggcc

SEQ ID NO: 399154 - DNA, 15 bp, Homo sapiens
aaacatggtcttggc

SEQ ID NO: 399155 - DNA, 15 bp, Homo sapiens
taaacatggtcttgg

SEQ ID NO: 399156 - DNA, 15 bp, Homo sapiens
gtaaacatggtcttg

SEQ ID NO: 399157 - DNA, 15 bp, Homo sapiens
tgtaaacatggtctt

SEQ ID NO: 399158 - DNA, 15 bp, Homo sapiens
atgtaaacatggtct

SEQ ID NO: 399159 - DNA, 15 bp, Homo sapiens
aatgtaaacatggtc

SEQ ID NO: 399160 - DNA, 15 bp, Homo sapiens
aaatgtaaacatggt

SEQ ID NO: 399161 - DNA, 15 bp, Homo sapiens
taaatgtaaacatgg

SEQ ID NO: 399162 - DNA, 15 bp, Homo sapiens
ttaaatgtaaacatg

SEQ ID NO: 399163 - DNA, 15 bp, Homo sapiens
attaaatgtaaacat

SEQ ID NO: 399164 - DNA, 15 bp, Homo sapiens
aattaaatgtaaaca

SEQ ID NO: 399165 - DNA, 15 bp, Homo sapiens
gaattaaatgtaaac

SEQ ID NO: 399166 - DNA, 15 bp, Homo sapiens
ggaattaaatgtaaa

SEQ ID NO: 399167 - DNA, 15 bp, Homo sapiens
tggaattaaatgtaa

SEQ ID NO: 399168 - DNA, 15 bp, Homo sapiens
atggaattaaatgta

SEQ ID NO: 399169 - DNA, 15 bp, Homo sapiens
catggaattaaatgt

SEQ ID NO: 399170 - DNA, 15 bp, Homo sapiens
gcatggaattaaatg

SEQ ID NO: 399171 - DNA, 15 bp, Homo sapiens
tgcatggaattaaat

SEQ ID NO: 399172 - DNA, 15 bp, Homo sapiens
ctgcatggaattaaa

SEQ ID NO: 399173 - DNA, 15 bp, Homo sapiens
tctgcatggaattaa

SEQ ID NO: 399174 - DNA, 15 bp, Homo sapiens
ctctgcatggaatta

SEQ ID NO: 399175 - DNA, 15 bp, Homo sapiens
cctctgcatggaatt

SEQ ID NO: 399176 - DNA, 15 bp, Homo sapiens
tcctctgcatggaat

SEQ ID NO: 399177 - DNA, 15 bp, Homo sapiens
gtcctctgcatggaa

SEQ ID NO: 399178 - DNA, 15 bp, Homo sapiens
agtcctctgcatgga

SEQ ID NO: 399179 - DNA, 15 bp, Homo sapiens
cagtcctctgcatgg

SEQ ID NO: 399180 - DNA, 15 bp, Homo sapiens
ccagtcctctgcatg

SEQ ID NO: 399181 - DNA, 15 bp, Homo sapiens
gccagtcctctgcat

SEQ ID NO: 399182 - DNA, 15 bp, Homo sapiens
tgccagtcctctgca

SEQ ID NO: 399183 - DNA, 15 bp, Homo sapiens
ttgccagtcctctgc

SEQ ID NO: 399184 - DNA, 15 bp, Homo sapiens
cttgccagtcctctg

SEQ ID NO: 399185 - DNA, 15 bp, Homo sapiens
gcttgccagtcctct

SEQ ID NO: 399186 - DNA, 15 bp, Homo sapiens
agcttgccagtcctc

SEQ ID NO: 399187 - DNA, 15 bp, Homo sapiens
cagcttgccagtcct

SEQ ID NO: 399188 - DNA, 15 bp, Homo sapiens
ccagcttgccagtcc

SEQ ID NO: 399189 - DNA, 15 bp, Homo sapiens
cccagcttgccagtc

SEQ ID NO: 399190 - DNA, 15 bp, Homo sapiens
gcccagcttgccagt

SEQ ID NO: 399191 - DNA, 15 bp, Homo sapiens
tgcccagcttgccag

SEQ ID NO: 399192 - DNA, 15 bp, Homo sapiens
ctgcccagcttgcca

SEQ ID NO: 399193 - DNA, 15 bp, Homo sapiens
actgcccagcttgcc

SEQ ID NO: 399194 - DNA, 15 bp, Homo sapiens
aactgcccagcttgc

SEQ ID NO: 399195 - DNA, 15 bp, Homo sapiens
aaactgcccagcttg

SEQ ID NO: 399196 - DNA, 15 bp, Homo sapiens
aaaactgcccagctt

SEQ ID NO: 399197 - DNA, 15 bp, Homo sapiens
aaaaactgcccagct

SEQ ID NO: 399198 - DNA, 15 bp, Homo sapiens
aaaaaactgcccagc

SEQ ID NO: 399199 - DNA, 15 bp, Homo sapiens
aaaaaaactgcccag

SEQ ID NO: 399200 - DNA, 15 bp, Homo sapiens
aaaaaaaactgccca

SEQ ID NO: 399201 - DNA, 15 bp, Homo sapiens
aaaaaaaaactgccc

SEQ ID NO: 399202 - DNA, 15 bp, Homo sapiens
aaaaaaaaaactgcc

SEQ ID NO: 399203 - DNA, 15 bp, Homo sapiens
aaaaaaaaaaactgc

SEQ ID NO: 399204 - DNA, 15 bp, Homo sapiens
aaaaaaaaaaaactg

SEQ ID NO: 399205 - DNA, 15 bp, Homo sapiens
tttaaaaaaaaaaaa

SEQ ID NO: 399206 - DNA, 15 bp, Homo sapiens
ctttaaaaaaaaaaa

SEQ ID NO: 399207 - DNA, 15 bp, Homo sapiens
tctttaaaaaaaaaa

SEQ ID NO: 399208 - DNA, 15 bp, Homo sapiens
atctttaaaaaaaaa

SEQ ID NO: 399209 - DNA, 15 bp, Homo sapiens
tatctttaaaaaaaa

SEQ ID NO: 399210 - DNA, 15 bp, Homo sapiens
atatctttaaaaaaa

SEQ ID NO: 399211 - DNA, 15 bp, Homo sapiens
tatatctttaaaaaa

SEQ ID NO: 399212 - DNA, 15 bp, Homo sapiens
ttatatctttaaaaa

SEQ ID NO: 399213 - DNA, 15 bp, Homo sapiens
tttatatctttaaaa

SEQ ID NO: 399214 - DNA, 15 bp, Homo sapiens
ttttatatctttaaa

SEQ ID NO: 399215 - DNA, 15 bp, Homo sapiens
attttatatctttaa

SEQ ID NO: 399216 - DNA, 15 bp, Homo sapiens
tattttatatcttta

SEQ ID NO: 399217 - DNA, 15 bp, Homo sapiens
gtattttatatcttt

SEQ ID NO: 399218 - DNA, 15 bp, Homo sapiens
tgtattttatatctt

SEQ ID NO: 399219 - DNA, 15 bp, Homo sapiens
gtgtattttatatct

SEQ ID NO: 399220 - DNA, 15 bp, Homo sapiens
tgtgtattttatatc

SEQ ID NO: 399221 - DNA, 15 bp, Homo sapiens
ctgtgtattttatat

SEQ ID NO: 399222 - DNA, 15 bp, Homo sapiens
cctgtgtattttata

SEQ ID NO: 399223 - DNA, 15 bp, Homo sapiens
acctgtgtattttat

SEQ ID NO: 399224 - DNA, 15 bp, Homo sapiens
gacctgtgtatttta

SEQ ID NO: 399225 - DNA, 15 bp, Homo sapiens
ggacctgtgtatttt

SEQ ID NO: 399226 - DNA, 15 bp, Homo sapiens
gggacctgtgtattt

SEQ ID NO: 399227 - DNA, 15 bp, Homo sapiens
agggacctgtgtatt

SEQ ID NO: 399228 - DNA, 15 bp, Homo sapiens
cagggacctgtgtat

SEQ ID NO: 399229 - DNA, 15 bp, Homo sapiens
tcagggacctgtgta

SEQ ID NO: 399230 - DNA, 15 bp, Homo sapiens
ctcagggacctgtgt

SEQ ID NO: 399231 - DNA, 15 bp, Homo sapiens
actcagggacctgtg

SEQ ID NO: 399232 - DNA, 15 bp, Homo sapiens
cactcagggacctgt

SEQ ID NO: 399233 - DNA, 15 bp, Homo sapiens
gcactcagggacctg

SEQ ID NO: 399234 - DNA, 15 bp, Homo sapiens
agcactcagggacct

SEQ ID NO: 399235 - DNA, 15 bp, Homo sapiens
aagcactcagggacc

SEQ ID NO: 399236 - DNA, 15 bp, Homo sapiens
caagcactcagggac

SEQ ID NO: 399237 - DNA, 15 bp, Homo sapiens
ccaagcactcaggga

SEQ ID NO: 399238 - DNA, 15 bp, Homo sapiens
cccaagcactcaggg

SEQ ID NO: 399239 - DNA, 15 bp, Homo sapiens
acccaagcactcagg

SEQ ID NO: 399240 - DNA, 15 bp, Homo sapiens
gacccaagcactcag

SEQ ID NO: 399241 - DNA, 15 bp, Homo sapiens
agacccaagcactca

SEQ ID NO: 399242 - DNA, 15 bp, Homo sapiens
aagacccaagcactc

SEQ ID NO: 399243 - DNA, 15 bp, Homo sapiens
gaagacccaagcact

SEQ ID NO: 399244 - DNA, 15 bp, Homo sapiens
tgaagacccaagcac

SEQ ID NO: 399245 - DNA, 15 bp, Homo sapiens
atgaagacccaagca

SEQ ID NO: 399246 - DNA, 15 bp, Homo sapiens
tatgaagacccaagc

SEQ ID NO: 399247 - DNA, 15 bp, Homo sapiens
atatgaagacccaag

SEQ ID NO: 399248 - DNA, 15 bp, Homo sapiens
catatgaagacccaa

SEQ ID NO: 399249 - DNA, 15 bp, Homo sapiens
gcatatgaagaccca

SEQ ID NO: 399250 - DNA, 15 bp, Homo sapiens
agcatatgaagaccc

SEQ ID NO: 399251 - DNA, 15 bp, Homo sapiens
gagcatatgaagacc

SEQ ID NO: 399252 - DNA, 15 bp, Homo sapiens
agagcatatgaagac

SEQ ID NO: 399253 - DNA, 15 bp, Homo sapiens
cagagcatatgaaga

SEQ ID NO: 399254 - DNA, 15 bp, Homo sapiens
ccagagcatatgaag

SEQ ID NO: 399255 - DNA, 15 bp, Homo sapiens
tccagagcatatgaa

SEQ ID NO: 399256 - DNA, 15 bp, Homo sapiens
ttccagagcatatga

SEQ ID NO: 399257 - DNA, 15 bp, Homo sapiens
attccagagcatatg

SEQ ID NO: 399258 - DNA, 15 bp, Homo sapiens
aattccagagcatat

SEQ ID NO: 399259 - DNA, 15 bp, Homo sapiens
taattccagagcata

SEQ ID NO: 399260 - DNA, 15 bp, Homo sapiens
gtaattccagagcat

SEQ ID NO: 399261 - DNA, 15 bp, Homo sapiens
ggtaattccagagca

SEQ ID NO: 399262 - DNA, 15 bp, Homo sapiens
tggtaattccagagc

SEQ ID NO: 399263 - DNA, 15 bp, Homo sapiens
ctggtaattccagag

SEQ ID NO: 399264 - DNA, 15 bp, Homo sapiens
gctggtaattccaga

SEQ ID NO: 399265 - DNA, 15 bp, Homo sapiens
agctggtaattccag

SEQ ID NO: 399266 - DNA, 15 bp, Homo sapiens
cagctggtaattcca

SEQ ID NO: 399267 - DNA, 15 bp, Homo sapiens
gcagctggtaattcc

SEQ ID NO: 399268 - DNA, 15 bp, Homo sapiens
tgcagctggtaattc

SEQ ID NO: 399269 - DNA, 15 bp, Homo sapiens
gtgcagctggtaatt

SEQ ID NO: 399270 - DNA, 15 bp, Homo sapiens
tgtgcagctggtaat

SEQ ID NO: 399271 - DNA, 15 bp, Homo sapiens
gtgtgcagctggtaa

SEQ ID NO: 399272 - DNA, 15 bp, Homo sapiens
ggtgtgcagctggta

SEQ ID NO: 399273 - DNA, 15 bp, Homo sapiens
aggtgtgcagctggt

SEQ ID NO: 399274 - DNA, 15 bp, Homo sapiens
caggtgtgcagctgg

SEQ ID NO: 399275 - DNA, 15 bp, Homo sapiens
tcaggtgtgcagctg

SEQ ID NO: 399276 - DNA, 15 bp, Homo sapiens
gtcaggtgtgcagct

SEQ ID NO: 399277 - DNA, 15 bp, Homo sapiens
agtcaggtgtgcagc

SEQ ID NO: 399278 - DNA, 15 bp, Homo sapiens
tagtcaggtgtgcag

SEQ ID NO: 399279 - DNA, 15 bp, Homo sapiens
atagtcaggtgtgca

SEQ ID NO: 399280 - DNA, 15 bp, Homo sapiens
tatagtcaggtgtgc

SEQ ID NO: 399281 - DNA, 15 bp, Homo sapiens
ctatagtcaggtgtg

SEQ ID NO: 399282 - DNA, 15 bp, Homo sapiens
actatagtcaggtgt

SEQ ID NO: 399283 - DNA, 15 bp, Homo sapiens
gactatagtcaggtg

SEQ ID NO: 399284 - DNA, 15 bp, Homo sapiens
agactatagtcaggt

SEQ ID NO: 399285 - DNA, 15 bp, Homo sapiens
cagactatagtcagg

SEQ ID NO: 399286 - DNA, 15 bp, Homo sapiens
acagactatagtcag

SEQ ID NO: 399287 - DNA, 15 bp, Homo sapiens
aacagactatagtca

SEQ ID NO: 399288 - DNA, 15 bp, Homo sapiens
aaacagactatagtc

SEQ ID NO: 399289 - DNA, 15 bp, Homo sapiens
caaacagactatagt

SEQ ID NO: 399290 - DNA, 15 bp, Homo sapiens
acaaacagactatag

SEQ ID NO: 399291 - DNA, 15 bp, Homo sapiens
aacaaacagactata

SEQ ID NO: 399292 - DNA, 15 bp, Homo sapiens
aaacaaacagactat

SEQ ID NO: 399293 - DNA, 15 bp, Homo sapiens
aaaacaaacagacta

SEQ ID NO: 399294 - DNA, 15 bp, Homo sapiens
aaaaacaaacagact

SEQ ID NO: 399295 - DNA, 15 bp, Homo sapiens
taaaaacaaacagac

SEQ ID NO: 399296 - DNA, 15 bp, Homo sapiens
ttaaaaacaaacaga

SEQ ID NO: 399297 - DNA, 15 bp, Homo sapiens
attaaaaacaaacag

SEQ ID NO: 399298 - DNA, 15 bp, Homo sapiens
tattaaaaacaaaca

SEQ ID NO: 399299 - DNA, 15 bp, Homo sapiens
atattaaaaacaaac

SEQ ID NO: 399300 - DNA, 15 bp, Homo sapiens
aatattaaaaacaaa

SEQ ID NO: 399301 - DNA, 15 bp, Homo sapiens
taatattaaaaacaa

SEQ ID NO: 399302 - DNA, 15 bp, Homo sapiens
ttaatattaaaaaca

SEQ ID NO: 399303 - DNA, 15 bp, Homo sapiens
tttaatattaaaaac

SEQ ID NO: 399304 - DNA, 15 bp, Homo sapiens
atttaatattaaaaa

SEQ ID NO: 399305 - DNA, 15 bp, Homo sapiens
aatttaatattaaaa

SEQ ID NO: 399306 - DNA, 15 bp, Homo sapiens
caatttaatattaaa

SEQ ID NO: 399307 - DNA, 15 bp, Homo sapiens
tcaatttaatattaa

SEQ ID NO: 399308 - DNA, 15 bp, Homo sapiens
gtcaatttaatatta

SEQ ID NO: 399309 - DNA, 15 bp, Homo sapiens
ggtcaatttaatatt

SEQ ID NO: 399310 - DNA, 15 bp, Homo sapiens
aggtcaatttaatat

SEQ ID NO: 399311 - DNA, 15 bp, Homo sapiens
aaggtcaatttaata

SEQ ID NO: 399312 - DNA, 15 bp, Homo sapiens
aaaggtcaatttaat

SEQ ID NO: 399313 - DNA, 15 bp, Homo sapiens
aaaaggtcaatttaa

SEQ ID NO: 399314 - DNA, 15 bp, Homo sapiens
gaaaaggtcaattta

SEQ ID NO: 399315 - DNA, 15 bp, Homo sapiens
ggaaaaggtcaattt

SEQ ID NO: 399316 - DNA, 15 bp, Homo sapiens
tggaaaaggtcaatt

SEQ ID NO: 399317 - DNA, 15 bp, Homo sapiens
ctggaaaaggtcaat

SEQ ID NO: 399318 - DNA, 15 bp, Homo sapiens
gctggaaaaggtcaa

SEQ ID NO: 399319 - DNA, 15 bp, Homo sapiens
ggctggaaaaggtca

SEQ ID NO: 399320 - DNA, 15 bp, Homo sapiens
aggctggaaaaggtc

SEQ ID NO: 399321 - DNA, 15 bp, Homo sapiens
gaggctggaaaaggt

SEQ ID NO: 399322 - DNA, 15 bp, Homo sapiens
agaggctggaaaagg

SEQ ID NO: 399323 - DNA, 15 bp, Homo sapiens
gagaggctggaaaag

SEQ ID NO: 399324 - DNA, 15 bp, Homo sapiens
agagaggctggaaaa

SEQ ID NO: 399325 - DNA, 15 bp, Homo sapiens
aagagaggctggaaa

SEQ ID NO: 399326 - DNA, 15 bp, Homo sapiens
caagagaggctggaa

SEQ ID NO: 399327 - DNA, 15 bp, Homo sapiens
acaagagaggctgga

SEQ ID NO: 399328 - DNA, 15 bp, Homo sapiens
aacaagagaggctgg

SEQ ID NO: 399329 - DNA, 15 bp, Homo sapiens
caacaagagaggctg

SEQ ID NO: 399330 - DNA, 15 bp, Homo sapiens
tcaacaagagaggct

SEQ ID NO: 399331 - DNA, 15 bp, Homo sapiens
ctcaacaagagaggc

SEQ ID NO: 399332 - DNA, 15 bp, Homo sapiens
cctcaacaagagagg

SEQ ID NO: 399333 - DNA, 15 bp, Homo sapiens
tcctcaacaagagag

SEQ ID NO: 399334 - DNA, 15 bp, Homo sapiens
ttcctcaacaagaga

SEQ ID NO: 399335 - DNA, 15 bp, Homo sapiens
cttcctcaacaagag

SEQ ID NO: 399336 - DNA, 15 bp, Homo sapiens
acttcctcaacaaga

SEQ ID NO: 399337 - DNA, 15 bp, Homo sapiens
cacttcctcaacaag

SEQ ID NO: 399338 - DNA, 15 bp, Homo sapiens
ccacttcctcaacaa

SEQ ID NO: 399339 - DNA, 15 bp, Homo sapiens
tccacttcctcaaca

SEQ ID NO: 399340 - DNA, 15 bp, Homo sapiens
ctccacttcctcaac

SEQ ID NO: 399341 - DNA, 15 bp, Homo sapiens
actccacttcctcaa

SEQ ID NO: 399342 - DNA, 15 bp, Homo sapiens
gactccacttcctca

SEQ ID NO: 399343 - DNA, 15 bp, Homo sapiens
agactccacttcctc

SEQ ID NO: 399344 - DNA, 15 bp, Homo sapiens
cagactccacttcct

SEQ ID NO: 399345 - DNA, 15 bp, Homo sapiens
tcagactccacttcc

SEQ ID NO: 399346 - DNA, 15 bp, Homo sapiens
ctcagactccacttc

SEQ ID NO: 399347 - DNA, 15 bp, Homo sapiens
actcagactccactt

SEQ ID NO: 399348 - DNA, 15 bp, Homo sapiens
tactcagactccact

SEQ ID NO: 399349 - DNA, 15 bp, Homo sapiens
ttactcagactccac

SEQ ID NO: 399350 - DNA, 15 bp, Homo sapiens
gttactcagactcca

SEQ ID NO: 399351 - DNA, 15 bp, Homo sapiens
tgttactcagactcc

SEQ ID NO: 399352 - DNA, 15 bp, Homo sapiens
gtgttactcagactc

SEQ ID NO: 399353 - DNA, 15 bp, Homo sapiens
ggtgttactcagact

SEQ ID NO: 399354 - DNA, 15 bp, Homo sapiens
tggtgttactcagac

SEQ ID NO: 399355 - DNA, 15 bp, Homo sapiens
ctggtgttactcaga

SEQ ID NO: 399356 - DNA, 15 bp, Homo sapiens
gctggtgttactcag

SEQ ID NO: 399357 - DNA, 15 bp, Homo sapiens
agctggtgttactca

SEQ ID NO: 399358 - DNA, 15 bp, Homo sapiens
cagctggtgttactc

SEQ ID NO: 399359 - DNA, 15 bp, Homo sapiens
acagctggtgttact

SEQ ID NO: 399360 - DNA, 15 bp, Homo sapiens
cacagctggtgttac

SEQ ID NO: 399361 - DNA, 15 bp, Homo sapiens
acacagctggtgtta

SEQ ID NO: 399362 - DNA, 15 bp, Homo sapiens
cacacagctggtgtt

SEQ ID NO: 399363 - DNA, 15 bp, Homo sapiens
acacacagctggtgt

SEQ ID NO: 399364 - DNA, 15 bp, Homo sapiens
cacacacagctggtg

SEQ ID NO: 399365 - DNA, 15 bp, Homo sapiens
ccacacacagctggt

SEQ ID NO: 399366 - DNA, 15 bp, Homo sapiens
accacacacagctgg

SEQ ID NO: 399367 - DNA, 15 bp, Homo sapiens
caccacacacagctg

SEQ ID NO: 399368 - DNA, 15 bp, Homo sapiens
acaccacacacagct

SEQ ID NO: 399369 - DNA, 15 bp, Homo sapiens
gacaccacacacagc

SEQ ID NO: 399370 - DNA, 15 bp, Homo sapiens
tgacaccacacacag

SEQ ID NO: 399371 - DNA, 15 bp, Homo sapiens
ctgacaccacacaca

SEQ ID NO: 399372 - DNA, 15 bp, Homo sapiens
cctgacaccacacac

SEQ ID NO: 399373 - DNA, 15 bp, Homo sapiens
gcctgacaccacaca

SEQ ID NO: 399374 - DNA, 15 bp, Homo sapiens
agcctgacaccacac

SEQ ID NO: 399375 - DNA, 15 bp, Homo sapiens
cagcctgacaccaca

SEQ ID NO: 399376 - DNA, 15 bp, Homo sapiens
ccagcctgacaccac

SEQ ID NO: 399377 - DNA, 15 bp, Homo sapiens
tccagcctgacacca

SEQ ID NO: 399378 - DNA, 15 bp, Homo sapiens
ttccagcctgacacc

SEQ ID NO: 399379 - DNA, 15 bp, Homo sapiens
gttccagcctgacac

SEQ ID NO: 399380 - DNA, 15 bp, Homo sapiens
tgttccagcctgaca

SEQ ID NO: 399381 - DNA, 15 bp, Homo sapiens
ttgttccagcctgac

SEQ ID NO: 399382 - DNA, 15 bp, Homo sapiens
attgttccagcctga

SEQ ID NO: 399383 - DNA, 15 bp, Homo sapiens
tattgttccagcctg

SEQ ID NO: 399384 - DNA, 15 bp, Homo sapiens
ttattgttccagcct

SEQ ID NO: 399385 - DNA, 15 bp, Homo sapiens
attattgttccagcc

SEQ ID NO: 399386 - DNA, 15 bp, Homo sapiens
aattattgttccagc

SEQ ID NO: 399387 - DNA, 15 bp, Homo sapiens
gaattattgttccag

SEQ ID NO: 399388 - DNA, 15 bp, Homo sapiens
tgaattattgttcca

SEQ ID NO: 399389 - DNA, 15 bp, Homo sapiens
ctgaattattgttcc

SEQ ID NO: 399390 - DNA, 15 bp, Homo sapiens
cctgaattattgttc

SEQ ID NO: 399391 - DNA, 15 bp, Homo sapiens
ccctgaattattgtt

SEQ ID NO: 399392 - DNA, 15 bp, Homo sapiens
tccctgaattattgt

SEQ ID NO: 399393 - DNA, 15 bp, Homo sapiens
atccctgaattattg

SEQ ID NO: 399394 - DNA, 15 bp, Homo sapiens
catccctgaattatt

SEQ ID NO: 399395 - DNA, 15 bp, Homo sapiens
gcatccctgaattat

SEQ ID NO: 399396 - DNA, 15 bp, Homo sapiens
tgcatccctgaatta

SEQ ID NO: 399397 - DNA, 15 bp, Homo sapiens
ctgcatccctgaatt

SEQ ID NO: 399398 - DNA, 15 bp, Homo sapiens
tctgcatccctgaat

SEQ ID NO: 399399 - DNA, 15 bp, Homo sapiens
ttctgcatccctgaa

SEQ ID NO: 399400 - DNA, 15 bp, Homo sapiens
attctgcatccctga

SEQ ID NO: 399401 - DNA, 15 bp, Homo sapiens
tattctgcatccctg

SEQ ID NO: 399402 - DNA, 15 bp, Homo sapiens
atattctgcatccct

SEQ ID NO: 399403 - DNA, 15 bp, Homo sapiens
catattctgcatccc

SEQ ID NO: 399404 - DNA, 15 bp, Homo sapiens
ccatattctgcatcc

SEQ ID NO: 399405 - DNA, 15 bp, Homo sapiens
gccatattctgcatc

SEQ ID NO: 399406 - DNA, 15 bp, Homo sapiens
agccatattctgcat

SEQ ID NO: 399407 - DNA, 15 bp, Homo sapiens
gagccatattctgca

SEQ ID NO: 399408 - DNA, 15 bp, Homo sapiens
cgagccatattctgc

SEQ ID NO: 399409 - DNA, 15 bp, Homo sapiens
gcgagccatattctg

SEQ ID NO: 399410 - DNA, 15 bp, Homo sapiens
ggcgagccatattct

SEQ ID NO: 399411 - DNA, 15 bp, Homo sapiens
aggcgagccatattc

SEQ ID NO: 399412 - DNA, 15 bp, Homo sapiens
aaggcgagccatatt

SEQ ID NO: 399413 - DNA, 15 bp, Homo sapiens
aaaggcgagccatat

SEQ ID NO: 399414 - DNA, 15 bp, Homo sapiens
caaaggcgagccata

SEQ ID NO: 399415 - DNA, 15 bp, Homo sapiens
acaaaggcgagccat

SEQ ID NO: 399416 - DNA, 15 bp, Homo sapiens
aacaaaggcgagcca

SEQ ID NO: 399417 - DNA, 15 bp, Homo sapiens
aaacaaaggcgagcc

SEQ ID NO: 399418 - DNA, 15 bp, Homo sapiens
gaaacaaaggcgagc

SEQ ID NO: 399419 - DNA, 15 bp, Homo sapiens
ggaaacaaaggcgag

SEQ ID NO: 399420 - DNA, 15 bp, Homo sapiens
aggaaacaaaggcga

SEQ ID NO: 399421 - DNA, 15 bp, Homo sapiens
caggaaacaaaggcg

SEQ ID NO: 399422 - DNA, 15 bp, Homo sapiens
tcaggaaacaaaggc

SEQ ID NO: 399423 - DNA, 15 bp, Homo sapiens
ttcaggaaacaaagg

SEQ ID NO: 399424 - DNA, 15 bp, Homo sapiens
tttcaggaaacaaag

SEQ ID NO: 399425 - DNA, 15 bp, Homo sapiens
atttcaggaaacaaa

SEQ ID NO: 399426 - DNA, 15 bp, Homo sapiens
aatttcaggaaacaa

SEQ ID NO: 399427 - DNA, 15 bp, Homo sapiens
caatttcaggaaaca

SEQ ID NO: 399428 - DNA, 15 bp, Homo sapiens
acaatttcaggaaac

SEQ ID NO: 399429 - DNA, 15 bp, Homo sapiens
cacaatttcaggaaa

SEQ ID NO: 399430 - DNA, 15 bp, Homo sapiens
gcacaatttcaggaa

SEQ ID NO: 399431 - DNA, 15 bp, Homo sapiens
tgcacaatttcagga

SEQ ID NO: 399432 - DNA, 15 bp, Homo sapiens
atgcacaatttcagg

SEQ ID NO: 399433 - DNA, 15 bp, Homo sapiens
aatgcacaatttcag

SEQ ID NO: 399434 - DNA, 15 bp, Homo sapiens
caatgcacaatttca

SEQ ID NO: 399435 - DNA, 15 bp, Homo sapiens
tcaatgcacaatttc

SEQ ID NO: 399436 - DNA, 15 bp, Homo sapiens
atcaatgcacaattt

SEQ ID NO: 399437 - DNA, 15 bp, Homo sapiens
aatcaatgcacaatt

SEQ ID NO: 399438 - DNA, 15 bp, Homo sapiens
aaatcaatgcacaat

SEQ ID NO: 399439 - DNA, 15 bp, Homo sapiens
gaaatcaatgcacaa

SEQ ID NO: 399440 - DNA, 15 bp, Homo sapiens
agaaatcaatgcaca

SEQ ID NO: 399441 - DNA, 15 bp, Homo sapiens
aagaaatcaatgcac

SEQ ID NO: 399442 - DNA, 15 bp, Homo sapiens
aaagaaatcaatgca

SEQ ID NO: 399443 - DNA, 15 bp, Homo sapiens
aaaagaaatcaatgc

SEQ ID NO: 399444 - DNA, 15 bp, Homo sapiens
caaaagaaatcaatg

SEQ ID NO: 399445 - DNA, 15 bp, Homo sapiens
acaaaagaaatcaat

SEQ ID NO: 399446 - DNA, 15 bp, Homo sapiens
gacaaaagaaatcaa

SEQ ID NO: 399447 - DNA, 15 bp, Homo sapiens
tgacaaaagaaatca

SEQ ID NO: 399448 - DNA, 15 bp, Homo sapiens
ctgacaaaagaaatc

SEQ ID NO: 399449 - DNA, 15 bp, Homo sapiens
actgacaaaagaaat

SEQ ID NO: 399450 - DNA, 15 bp, Homo sapiens
tactgacaaaagaaa

SEQ ID NO: 399451 - DNA, 15 bp, Homo sapiens
ctactgacaaaagaa

SEQ ID NO: 399452 - DNA, 15 bp, Homo sapiens
tctactgacaaaaga

SEQ ID NO: 399453 - DNA, 15 bp, Homo sapiens
gtctactgacaaaag

SEQ ID NO: 399454 - DNA, 15 bp, Homo sapiens
agtctactgacaaaa

SEQ ID NO: 399455 - DNA, 15 bp, Homo sapiens
cagtctactgacaaa

SEQ ID NO: 399456 - DNA, 15 bp, Homo sapiens
acagtctactgacaa

SEQ ID NO: 399457 - DNA, 15 bp, Homo sapiens
aacagtctactgaca

SEQ ID NO: 399458 - DNA, 15 bp, Homo sapiens
aaacagtctactgac

SEQ ID NO: 399459 - DNA, 15 bp, Homo sapiens
gaaacagtctactga

SEQ ID NO: 399460 - DNA, 15 bp, Homo sapiens
tgaaacagtctactg

SEQ ID NO: 399461 - DNA, 15 bp, Homo sapiens
ttgaaacagtctact

SEQ ID NO: 399462 - DNA, 15 bp, Homo sapiens
tttgaaacagtctac

SEQ ID NO: 399463 - DNA, 15 bp, Homo sapiens
atttgaaacagtcta

SEQ ID NO: 399464 - DNA, 15 bp, Homo sapiens
catttgaaacagtct

SEQ ID NO: 399465 - DNA, 15 bp, Homo sapiens
tcatttgaaacagtc

SEQ ID NO: 399466 - DNA, 15 bp, Homo sapiens
ttcatttgaaacagt

SEQ ID NO: 399467 - DNA, 15 bp, Homo sapiens
attcatttgaaacag

SEQ ID NO: 399468 - DNA, 15 bp, Homo sapiens
cattcatttgaaaca

SEQ ID NO: 399469 - DNA, 15 bp, Homo sapiens
ccattcatttgaaac

SEQ ID NO: 399470 - DNA, 15 bp, Homo sapiens
tccattcatttgaaa

SEQ ID NO: 399471 - DNA, 15 bp, Homo sapiens
ttccattcatttgaa

SEQ ID NO: 399472 - DNA, 15 bp, Homo sapiens
cttccattcatttga

SEQ ID NO: 399473 - DNA, 15 bp, Homo sapiens
tcttccattcatttg

SEQ ID NO: 399474 - DNA, 15 bp, Homo sapiens
ttcttccattcattt

SEQ ID NO: 399475 - DNA, 15 bp, Homo sapiens
tttcttccattcatt

SEQ ID NO: 399476 - DNA, 15 bp, Homo sapiens
gtttcttccattcat

SEQ ID NO: 399477 - DNA, 15 bp, Homo sapiens
tgtttcttccattca

SEQ ID NO: 399478 - DNA, 15 bp, Homo sapiens
atgtttcttccattc

SEQ ID NO: 399479 - DNA, 15 bp, Homo sapiens
aatgtttcttccatt

SEQ ID NO: 399480 - DNA, 15 bp, Homo sapiens
aaatgtttcttccat

SEQ ID NO: 399481 - DNA, 15 bp, Homo sapiens
aaaatgtttcttcca

SEQ ID NO: 399482 - DNA, 15 bp, Homo sapiens
gaaaatgtttcttcc

SEQ ID NO: 399483 - DNA, 15 bp, Homo sapiens
agaaaatgtttcttc

SEQ ID NO: 399484 - DNA, 15 bp, Homo sapiens
tagaaaatgtttctt

SEQ ID NO: 399485 - DNA, 15 bp, Homo sapiens
atagaaaatgtttct

SEQ ID NO: 399486 - DNA, 15 bp, Homo sapiens
aatagaaaatgtttc

SEQ ID NO: 399487 - DNA, 15 bp, Homo sapiens
aaatagaaaatgttt

SEQ ID NO: 399488 - DNA, 15 bp, Homo sapiens
aaaatagaaaatgtt

SEQ ID NO: 399489 - DNA, 15 bp, Homo sapiens
aaaaatagaaaatgt

SEQ ID NO: 399490 - DNA, 15 bp, Homo sapiens
taaaaatagaaaatg

SEQ ID NO: 399491 - DNA, 15 bp, Homo sapiens
ttaaaaatagaaaat

SEQ ID NO: 399492 - DNA, 15 bp, Homo sapiens
attaaaaatagaaaa

SEQ ID NO: 399493 - DNA, 15 bp, Homo sapiens
aattaaaaatagaaa

SEQ ID NO: 399494 - DNA, 15 bp, Homo sapiens
aaattaaaaatagaa

SEQ ID NO: 399495 - DNA, 15 bp, Homo sapiens
aaaattaaaaataga

SEQ ID NO: 399496 - DNA, 15 bp, Homo sapiens
aaaaattaaaaatag

SEQ ID NO: 399497 - DNA, 15 bp, Homo sapiens
aaaaaattaaaaata

SEQ ID NO: 399498 - DNA, 15 bp, Homo sapiens
aaaaaaattaaaaat

SEQ ID NO: 399499 - DNA, 15 bp, Homo sapiens
caaaaaaattaaaaa

SEQ ID NO: 399500 - DNA, 15 bp, Homo sapiens
tcaaaaaaattaaaa

SEQ ID NO: 399501 - DNA, 15 bp, Homo sapiens
ctcaaaaaaattaaa

SEQ ID NO: 399502 - DNA, 15 bp, Homo sapiens
cctcaaaaaaattaa

SEQ ID NO: 399503 - DNA, 15 bp, Homo sapiens
ccctcaaaaaaatta

SEQ ID NO: 399504 - DNA, 15 bp, Homo sapiens
cccctcaaaaaaatt

SEQ ID NO: 399505 - DNA, 15 bp, Homo sapiens
acccctcaaaaaaat

SEQ ID NO: 399506 - DNA, 15 bp, Homo sapiens
cacccctcaaaaaaa

SEQ ID NO: 399507 - DNA, 15 bp, Homo sapiens
ccacccctcaaaaaa

SEQ ID NO: 399508 - DNA, 15 bp, Homo sapiens
gccacccctcaaaaa

SEQ ID NO: 399509 - DNA, 15 bp, Homo sapiens
tgccacccctcaaaa

SEQ ID NO: 399510 - DNA, 15 bp, Homo sapiens
ctgccacccctcaaa

SEQ ID NO: 399511 - DNA, 15 bp, Homo sapiens
tctgccacccctcaa

SEQ ID NO: 399512 - DNA, 15 bp, Homo sapiens
gtctgccacccctca

SEQ ID NO: 399513 - DNA, 15 bp, Homo sapiens
agtctgccacccctc

SEQ ID NO: 399514 - DNA, 15 bp, Homo sapiens
aagtctgccacccct

SEQ ID NO: 399515 - DNA, 15 bp, Homo sapiens
gaagtctgccacccc

SEQ ID NO: 399516 - DNA, 15 bp, Homo sapiens
agaagtctgccaccc

SEQ ID NO: 399517 - DNA, 15 bp, Homo sapiens
aagaagtctgccacc

SEQ ID NO: 399518 - DNA, 15 bp, Homo sapiens
aaagaagtctgccac

SEQ ID NO: 399519 - DNA, 15 bp, Homo sapiens
gaaagaagtctgcca

SEQ ID NO: 399520 - DNA, 15 bp, Homo sapiens
tgaaagaagtctgcc

SEQ ID NO: 399521 - DNA, 15 bp, Homo sapiens
ttgaaagaagtctgc

SEQ ID NO: 399522 - DNA, 15 bp, Homo sapiens
tttgaaagaagtctg

SEQ ID NO: 399523 - DNA, 15 bp, Homo sapiens
ttttgaaagaagtct

SEQ ID NO: 399524 - DNA, 15 bp, Homo sapiens
cttttgaaagaagtc

SEQ ID NO: 399525 - DNA, 15 bp, Homo sapiens
gcttttgaaagaagt

SEQ ID NO: 399526 - DNA, 15 bp, Homo sapiens
tgcttttgaaagaag

SEQ ID NO: 399527 - DNA, 15 bp, Homo sapiens
ttgcttttgaaagaa

SEQ ID NO: 399528 - DNA, 15 bp, Homo sapiens
tttgcttttgaaaga

SEQ ID NO: 399529 - DNA, 15 bp, Homo sapiens
atttgcttttgaaag

SEQ ID NO: 399530 - DNA, 15 bp, Homo sapiens
tatttgcttttgaaa

SEQ ID NO: 399531 - DNA, 15 bp, Homo sapiens
ttatttgcttttgaa

SEQ ID NO: 399532 - DNA, 15 bp, Homo sapiens
attatttgcttttga

SEQ ID NO: 399533 - DNA, 15 bp, Homo sapiens
aattatttgcttttg

SEQ ID NO: 399534 - DNA, 15 bp, Homo sapiens
gaattatttgctttt

SEQ ID NO: 399535 - DNA, 15 bp, Homo sapiens
tgaattatttgcttt

SEQ ID NO: 399536 - DNA, 15 bp, Homo sapiens
atgaattatttgctt

SEQ ID NO: 399537 - DNA, 15 bp, Homo sapiens
gatgaattatttgct

SEQ ID NO: 399538 - DNA, 15 bp, Homo sapiens
agatgaattatttgc

SEQ ID NO: 399539 - DNA, 15 bp, Homo sapiens
cagatgaattatttg

SEQ ID NO: 399540 - DNA, 15 bp, Homo sapiens
gcagatgaattattt

SEQ ID NO: 399541 - DNA, 15 bp, Homo sapiens
tgcagatgaattatt

SEQ ID NO: 399542 - DNA, 15 bp, Homo sapiens
ttgcagatgaattat

SEQ ID NO: 399543 - DNA, 15 bp, Homo sapiens
tttgcagatgaatta

SEQ ID NO: 399544 - DNA, 15 bp, Homo sapiens
atttgcagatgaatt

SEQ ID NO: 399545 - DNA, 15 bp, Homo sapiens
aatttgcagatgaat

SEQ ID NO: 399546 - DNA, 15 bp, Homo sapiens
gaatttgcagatgaa

SEQ ID NO: 399547 - DNA, 15 bp, Homo sapiens
tgaatttgcagatga

SEQ ID NO: 399548 - DNA, 15 bp, Homo sapiens
ttgaatttgcagatg

SEQ ID NO: 399549 - DNA, 15 bp, Homo sapiens
tttgaatttgcagat

SEQ ID NO: 399550 - DNA, 15 bp, Homo sapiens
atttgaatttgcaga

SEQ ID NO: 399551 - DNA, 15 bp, Homo sapiens
aatttgaatttgcag

SEQ ID NO: 399552 - DNA, 15 bp, Homo sapiens
gaatttgaatttgca

SEQ ID NO: 399553 - DNA, 15 bp, Homo sapiens
agaatttgaatttgc

SEQ ID NO: 399554 - DNA, 15 bp, Homo sapiens
tagaatttgaatttg

SEQ ID NO: 399555 - DNA, 15 bp, Homo sapiens
atagaatttgaattt

SEQ ID NO: 399556 - DNA, 15 bp, Homo sapiens
aatagaatttgaatt

SEQ ID NO: 399557 - DNA, 15 bp, Homo sapiens
aaatagaatttgaat

SEQ ID NO: 399558 - DNA, 15 bp, Homo sapiens
caaatagaatttgaa

SEQ ID NO: 399559 - DNA, 15 bp, Homo sapiens
ccaaatagaatttga

SEQ ID NO: 399560 - DNA, 15 bp, Homo sapiens
accaaatagaatttg

SEQ ID NO: 399561 - DNA, 15 bp, Homo sapiens
taccaaatagaattt

SEQ ID NO: 399562 - DNA, 15 bp, Homo sapiens
gtaccaaatagaatt

SEQ ID NO: 399563 - DNA, 15 bp, Homo sapiens
tgtaccaaatagaat

SEQ ID NO: 399564 - DNA, 15 bp, Homo sapiens
atgtaccaaatagaa

SEQ ID NO: 399565 - DNA, 15 bp, Homo sapiens
gatgtaccaaataga

SEQ ID NO: 399566 - DNA, 15 bp, Homo sapiens
agatgtaccaaatag

SEQ ID NO: 399567 - DNA, 15 bp, Homo sapiens
tagatgtaccaaata

SEQ ID NO: 399568 - DNA, 15 bp, Homo sapiens
ttagatgtaccaaat

SEQ ID NO: 399569 - DNA, 15 bp, Homo sapiens
attagatgtaccaaa

SEQ ID NO: 399570 - DNA, 15 bp, Homo sapiens
aattagatgtaccaa

SEQ ID NO: 399571 - DNA, 15 bp, Homo sapiens
aaattagatgtacca

SEQ ID NO: 399572 - DNA, 15 bp, Homo sapiens
caaattagatgtacc

SEQ ID NO: 399573 - DNA, 15 bp, Homo sapiens
gcaaattagatgtac

SEQ ID NO: 399574 - DNA, 15 bp, Homo sapiens
agcaaattagatgta

SEQ ID NO: 399575 - DNA, 15 bp, Homo sapiens
aagcaaattagatgt

SEQ ID NO: 399576 - DNA, 15 bp, Homo sapiens
taagcaaattagatg

SEQ ID NO: 399577 - DNA, 15 bp, Homo sapiens
ttaagcaaattagat

SEQ ID NO: 399578 - DNA, 15 bp, Homo sapiens
tttaagcaaattaga

SEQ ID NO: 399579 - DNA, 15 bp, Homo sapiens
ctttaagcaaattag

SEQ ID NO: 399580 - DNA, 15 bp, Homo sapiens
actttaagcaaatta

SEQ ID NO: 399581 - DNA, 15 bp, Homo sapiens
tactttaagcaaatt

SEQ ID NO: 399582 - DNA, 15 bp, Homo sapiens
ttactttaagcaaat

SEQ ID NO: 399583 - DNA, 15 bp, Homo sapiens
tttactttaagcaaa

SEQ ID NO: 399584 - DNA, 15 bp, Homo sapiens
ttttactttaagcaa

SEQ ID NO: 399585 - DNA, 15 bp, Homo sapiens
gttttactttaagca

SEQ ID NO: 399586 - DNA, 15 bp, Homo sapiens
tgttttactttaagc

SEQ ID NO: 399587 - DNA, 15 bp, Homo sapiens
gtgttttactttaag

SEQ ID NO: 399588 - DNA, 15 bp, Homo sapiens
cgtgttttactttaa

SEQ ID NO: 399589 - DNA, 15 bp, Homo sapiens
gcgtgttttacttta

SEQ ID NO: 399590 - DNA, 15 bp, Homo sapiens
tgcgtgttttacttt

SEQ ID NO: 399591 - DNA, 15 bp, Homo sapiens
atgcgtgttttactt

SEQ ID NO: 399592 - DNA, 15 bp, Homo sapiens
tatgcgtgttttact

SEQ ID NO: 399593 - DNA, 15 bp, Homo sapiens
atatgcgtgttttac

SEQ ID NO: 399594 - DNA, 15 bp, Homo sapiens
tatatgcgtgtttta

SEQ ID NO: 399595 - DNA, 15 bp, Homo sapiens
atatatgcgtgtttt

SEQ ID NO: 399596 - DNA, 15 bp, Homo sapiens
tatatatgcgtgttt

SEQ ID NO: 399597 - DNA, 15 bp, Homo sapiens
ctatatatgcgtgtt

SEQ ID NO: 399598 - DNA, 15 bp, Homo sapiens
actatatatgcgtgt

SEQ ID NO: 399599 - DNA, 15 bp, Homo sapiens
tactatatatgcgtg

SEQ ID NO: 399600 - DNA, 15 bp, Homo sapiens
ctactatatatgcgt

SEQ ID NO: 399601 - DNA, 15 bp, Homo sapiens
tctactatatatgcg

SEQ ID NO: 399602 - DNA, 15 bp, Homo sapiens
ttctactatatatgc

SEQ ID NO: 399603 - DNA, 15 bp, Homo sapiens
tttctactatatatg

SEQ ID NO: 399604 - DNA, 15 bp, Homo sapiens
atttctactatatat

SEQ ID NO: 399605 - DNA, 15 bp, Homo sapiens
aatttctactatata

SEQ ID NO: 399606 - DNA, 15 bp, Homo sapiens
aaatttctactatat

SEQ ID NO: 399607 - DNA, 15 bp, Homo sapiens
aaaatttctactata

SEQ ID NO: 399608 - DNA, 15 bp, Homo sapiens
taaaatttctactat

SEQ ID NO: 399609 - DNA, 15 bp, Homo sapiens
ttaaaatttctacta

SEQ ID NO: 399610 - DNA, 15 bp, Homo sapiens
gttaaaatttctact

SEQ ID NO: 399611 - DNA, 15 bp, Homo sapiens
agttaaaatttctac

SEQ ID NO: 399612 - DNA, 15 bp, Homo sapiens
cagttaaaatttcta

SEQ ID NO: 399613 - DNA, 15 bp, Homo sapiens
tcagttaaaatttct

SEQ ID NO: 399614 - DNA, 15 bp, Homo sapiens
ctcagttaaaatttc

SEQ ID NO: 399615 - DNA, 15 bp, Homo sapiens
actcagttaaaattt

SEQ ID NO: 399616 - DNA, 15 bp, Homo sapiens
gactcagttaaaatt

SEQ ID NO: 399617 - DNA, 15 bp, Homo sapiens
tgactcagttaaaat

SEQ ID NO: 399618 - DNA, 15 bp, Homo sapiens
ttgactcagttaaaa

SEQ ID NO: 399619 - DNA, 15 bp, Homo sapiens
attgactcagttaaa

SEQ ID NO: 399620 - DNA, 15 bp, Homo sapiens
aattgactcagttaa

SEQ ID NO: 399621 - DNA, 15 bp, Homo sapiens
aaattgactcagtta

SEQ ID NO: 399622 - DNA, 15 bp, Homo sapiens
gaaattgactcagtt

SEQ ID NO: 399623 - DNA, 15 bp, Homo sapiens
tgaaattgactcagt

SEQ ID NO: 399624 - DNA, 15 bp, Homo sapiens
atgaaattgactcag

SEQ ID NO: 399625 - DNA, 15 bp, Homo sapiens
tatgaaattgactca

SEQ ID NO: 399626 - DNA, 15 bp, Homo sapiens
ctatgaaattgactc

SEQ ID NO: 399627 - DNA, 15 bp, Homo sapiens
gctatgaaattgact

SEQ ID NO: 399628 - DNA, 15 bp, Homo sapiens
agctatgaaattgac

SEQ ID NO: 399629 - DNA, 15 bp, Homo sapiens
cagctatgaaattga

SEQ ID NO: 399630 - DNA, 15 bp, Homo sapiens
acagctatgaaattg

SEQ ID NO: 399631 - DNA, 15 bp, Homo sapiens
gacagctatgaaatt

SEQ ID NO: 399632 - DNA, 15 bp, Homo sapiens
tgacagctatgaaat

SEQ ID NO: 399633 - DNA, 15 bp, Homo sapiens
ctgacagctatgaaa

SEQ ID NO: 399634 - DNA, 15 bp, Homo sapiens
tctgacagctatgaa

SEQ ID NO: 399635 - DNA, 15 bp, Homo sapiens
ttctgacagctatga

SEQ ID NO: 399636 - DNA, 15 bp, Homo sapiens
gttctgacagctatg

SEQ ID NO: 399637 - DNA, 15 bp, Homo sapiens
ggttctgacagctat

SEQ ID NO: 399638 - DNA, 15 bp, Homo sapiens
aggttctgacagcta

SEQ ID NO: 399639 - DNA, 15 bp, Homo sapiens
aaggttctgacagct

SEQ ID NO: 399640 - DNA, 15 bp, Homo sapiens
aaaggttctgacagc

SEQ ID NO: 399641 - DNA, 15 bp, Homo sapiens
gaaaggttctgacag

SEQ ID NO: 399642 - DNA, 15 bp, Homo sapiens
agaaaggttctgaca

SEQ ID NO: 399643 - DNA, 15 bp, Homo sapiens
gagaaaggttctgac

SEQ ID NO: 399644 - DNA, 15 bp, Homo sapiens
tgagaaaggttctga

SEQ ID NO: 399645 - DNA, 15 bp, Homo sapiens
atgagaaaggttctg

SEQ ID NO: 399646 - DNA, 15 bp, Homo sapiens
gatgagaaaggttct

SEQ ID NO: 399647 - DNA, 15 bp, Homo sapiens
tgatgagaaaggttc

SEQ ID NO: 399648 - DNA, 15 bp, Homo sapiens
gtgatgagaaaggtt

SEQ ID NO: 399649 - DNA, 15 bp, Homo sapiens
tgtgatgagaaaggt

SEQ ID NO: 399650 - DNA, 15 bp, Homo sapiens
ctgtgatgagaaagg

SEQ ID NO: 399651 - DNA, 15 bp, Homo sapiens
gctgtgatgagaaag

SEQ ID NO: 399652 - DNA, 15 bp, Homo sapiens
tgctgtgatgagaaa

SEQ ID NO: 399653 - DNA, 15 bp, Homo sapiens
ttgctgtgatgagaa

SEQ ID NO: 399654 - DNA, 15 bp, Homo sapiens
attgctgtgatgaga

SEQ ID NO: 399655 - DNA, 15 bp, Homo sapiens
aattgctgtgatgag

SEQ ID NO: 399656 - DNA, 15 bp, Homo sapiens
aaattgctgtgatga

SEQ ID NO: 399657 - DNA, 15 bp, Homo sapiens
caaattgctgtgatg

SEQ ID NO: 399658 - DNA, 15 bp, Homo sapiens
tcaaattgctgtgat

SEQ ID NO: 399659 - DNA, 15 bp, Homo sapiens
atcaaattgctgtga

SEQ ID NO: 399660 - DNA, 15 bp, Homo sapiens
aatcaaattgctgtg

SEQ ID NO: 399661 - DNA, 15 bp, Homo sapiens
taatcaaattgctgt

SEQ ID NO: 399662 - DNA, 15 bp, Homo sapiens
ttaatcaaattgctg

SEQ ID NO: 399663 - DNA, 15 bp, Homo sapiens
tttaatcaaattgct

SEQ ID NO: 399664 - DNA, 15 bp, Homo sapiens
ctttaatcaaattgc

SEQ ID NO: 399665 - DNA, 15 bp, Homo sapiens
actttaatcaaattg

SEQ ID NO: 399666 - DNA, 15 bp, Homo sapiens
aactttaatcaaatt

SEQ ID NO: 399667 - DNA, 15 bp, Homo sapiens
aaactttaatcaaat

SEQ ID NO: 399668 - DNA, 15 bp, Homo sapiens
aaaactttaatcaaa

SEQ ID NO: 399669 - DNA, 15 bp, Homo sapiens
aaaaactttaatcaa

SEQ ID NO: 399670 - DNA, 15 bp, Homo sapiens
aaaaaactttaatca

SEQ ID NO: 399671 - DNA, 15 bp, Homo sapiens
aaaaaaactttaatc

SEQ ID NO: 399672 - DNA, 15 bp, Homo sapiens
aaaaaaaactttaat

SEQ ID NO: 399673 - DNA, 15 bp, Homo sapiens
taaaaaaaactttaa

SEQ ID NO: 399674 - DNA, 15 bp, Homo sapiens
ttaaaaaaaacttta

SEQ ID NO: 399675 - DNA, 15 bp, Homo sapiens
cttaaaaaaaacttt

SEQ ID NO: 399676 - DNA, 15 bp, Homo sapiens
ccttaaaaaaaactt

SEQ ID NO: 399677 - DNA, 15 bp, Homo sapiens
gccttaaaaaaaact

SEQ ID NO: 399678 - DNA, 15 bp, Homo sapiens
agccttaaaaaaaac

SEQ ID NO: 399679 - DNA, 15 bp, Homo sapiens
aagccttaaaaaaaa

SEQ ID NO: 399680 - DNA, 15 bp, Homo sapiens
aaagccttaaaaaaa

SEQ ID NO: 399681 - DNA, 15 bp, Homo sapiens
aaaagccttaaaaaa

SEQ ID NO: 399682 - DNA, 15 bp, Homo sapiens
aaaaagccttaaaaa

SEQ ID NO: 399683 - DNA, 15 bp, Homo sapiens
gaaaaagccttaaaa

SEQ ID NO: 399684 - DNA, 15 bp, Homo sapiens
tgaaaaagccttaaa

SEQ ID NO: 399685 - DNA, 15 bp, Homo sapiens
atgaaaaagccttaa

SEQ ID NO: 399686 - DNA, 15 bp, Homo sapiens
aatgaaaaagcctta

SEQ ID NO: 399687 - DNA, 15 bp, Homo sapiens
aaatgaaaaagcctt

SEQ ID NO: 399688 - DNA, 15 bp, Homo sapiens
aaaatgaaaaagcct

SEQ ID NO: 399689 - DNA, 15 bp, Homo sapiens
aaaaatgaaaaagcc

SEQ ID NO: 399690 - DNA, 15 bp, Homo sapiens
taaaaatgaaaaagc

SEQ ID NO: 399691 - DNA, 15 bp, Homo sapiens
ttaaaaatgaaaaag

SEQ ID NO: 399692 - DNA, 15 bp, Homo sapiens
attaaaaatgaaaaa

SEQ ID NO: 399693 - DNA, 15 bp, Homo sapiens
tattaaaaatgaaaa

SEQ ID NO: 399694 - DNA, 15 bp, Homo sapiens
ttattaaaaatgaaa

SEQ ID NO: 399695 - DNA, 15 bp, Homo sapiens
cttattaaaaatgaa

SEQ ID NO: 399696 - DNA, 15 bp, Homo sapiens
ccttattaaaaatga

SEQ ID NO: 399697 - DNA, 15 bp, Homo sapiens
cccttattaaaaatg

SEQ ID NO: 399698 - DNA, 15 bp, Homo sapiens
tcccttattaaaaat

SEQ ID NO: 399699 - DNA, 15 bp, Homo sapiens
ttcccttattaaaaa

SEQ ID NO: 399700 - DNA, 15 bp, Homo sapiens
tttcccttattaaaa

SEQ ID NO: 399701 - DNA, 15 bp, Homo sapiens
atttcccttattaaa

SEQ ID NO: 399702 - DNA, 15 bp, Homo sapiens
tatttcccttattaa

SEQ ID NO: 399703 - DNA, 15 bp, Homo sapiens
atatttcccttatta

SEQ ID NO: 399704 - DNA, 15 bp, Homo sapiens
gatatttcccttatt

SEQ ID NO: 399705 - DNA, 15 bp, Homo sapiens
agatatttcccttat

SEQ ID NO: 399706 - DNA, 15 bp, Homo sapiens
gagatatttccctta

SEQ ID NO: 399707 - DNA, 15 bp, Homo sapiens
ggagatatttccctt

SEQ ID NO: 399708 - DNA, 15 bp, Homo sapiens
tggagatatttccct

SEQ ID NO: 399709 - DNA, 15 bp, Homo sapiens
atggagatatttccc

SEQ ID NO: 399710 - DNA, 15 bp, Homo sapiens
aatggagatatttcc

SEQ ID NO: 399711 - DNA, 15 bp, Homo sapiens
taatggagatatttc

SEQ ID NO: 399712 - DNA, 15 bp, Homo sapiens
ataatggagatattt

SEQ ID NO: 399713 - DNA, 15 bp, Homo sapiens
tataatggagatatt

SEQ ID NO: 399714 - DNA, 15 bp, Homo sapiens
ttataatggagatat

SEQ ID NO: 399715 - DNA, 15 bp, Homo sapiens
gttataatggagata

SEQ ID NO: 399716 - DNA, 15 bp, Homo sapiens
ggttataatggagat

SEQ ID NO: 399717 - DNA, 15 bp, Homo sapiens
tggttataatggaga

SEQ ID NO: 399718 - DNA, 15 bp, Homo sapiens
gtggttataatggag

SEQ ID NO: 399719 - DNA, 15 bp, Homo sapiens
agtggttataatgga

SEQ ID NO: 399720 - DNA, 15 bp, Homo sapiens
cagtggttataatgg

SEQ ID NO: 399721 - DNA, 15 bp, Homo sapiens
gcagtggttataatg

SEQ ID NO: 399722 - DNA, 15 bp, Homo sapiens
agcagtggttataat

SEQ ID NO: 399723 - DNA, 15 bp, Homo sapiens
cagcagtggttataa

SEQ ID NO: 399724 - DNA, 15 bp, Homo sapiens
gcagcagtggttata

SEQ ID NO: 399725 - DNA, 15 bp, Homo sapiens
ggcagcagtggttat

SEQ ID NO: 399726 - DNA, 15 bp, Homo sapiens
tggcagcagtggtta

SEQ ID NO: 399727 - DNA, 15 bp, Homo sapiens
ctggcagcagtggtt

SEQ ID NO: 399728 - DNA, 15 bp, Homo sapiens
gctggcagcagtggt

SEQ ID NO: 399729 - DNA, 15 bp, Homo sapiens
tgctggcagcagtgg

SEQ ID NO: 399730 - DNA, 15 bp, Homo sapiens
ctgctggcagcagtg

SEQ ID NO: 399731 - DNA, 15 bp, Homo sapiens
cctgctggcagcagt

SEQ ID NO: 399732 - DNA, 15 bp, Homo sapiens
tcctgctggcagcag

SEQ ID NO: 399733 - DNA, 15 bp, Homo sapiens
ctcctgctggcagca

SEQ ID NO: 399734 - DNA, 15 bp, Homo sapiens
cctcctgctggcagc

SEQ ID NO: 399735 - DNA, 15 bp, Homo sapiens
tcctcctgctggcag

SEQ ID NO: 399736 - DNA, 15 bp, Homo sapiens
gtcctcctgctggca

SEQ ID NO: 399737 - DNA, 15 bp, Homo sapiens
tgtcctcctgctggc

SEQ ID NO: 399738 - DNA, 15 bp, Homo sapiens
atgtcctcctgctgg

SEQ ID NO: 399739 - DNA, 15 bp, Homo sapiens
aatgtcctcctgctg

SEQ ID NO: 399740 - DNA, 15 bp, Homo sapiens
caatgtcctcctgct

SEQ ID NO: 399741 - DNA, 15 bp, Homo sapiens
ccaatgtcctcctgc

SEQ ID NO: 399742 - DNA, 15 bp, Homo sapiens
accaatgtcctcctg

SEQ ID NO: 399743 - DNA, 15 bp, Homo sapiens
aaccaatgtcctcct

SEQ ID NO: 399744 - DNA, 15 bp, Homo sapiens
aaaccaatgtcctcc

SEQ ID NO: 399745 - DNA, 15 bp, Homo sapiens
aaaaccaatgtcctc

SEQ ID NO: 399746 - DNA, 15 bp, Homo sapiens
gaaaaccaatgtcct

SEQ ID NO: 399747 - DNA, 15 bp, Homo sapiens
tgaaaaccaatgtcc

SEQ ID NO: 399748 - DNA, 15 bp, Homo sapiens
atgaaaaccaatgtc

SEQ ID NO: 399749 - DNA, 15 bp, Homo sapiens
catgaaaaccaatgt

SEQ ID NO: 399750 - DNA, 15 bp, Homo sapiens
tcatgaaaaccaatg

SEQ ID NO: 399751 - DNA, 15 bp, Homo sapiens
ttcatgaaaaccaat

SEQ ID NO: 399752 - DNA, 15 bp, Homo sapiens
attcatgaaaaccaa

SEQ ID NO: 399753 - DNA, 15 bp, Homo sapiens
tattcatgaaaacca

SEQ ID NO: 399754 - DNA, 15 bp, Homo sapiens
atattcatgaaaacc

SEQ ID NO: 399755 - DNA, 15 bp, Homo sapiens
aatattcatgaaaac

SEQ ID NO: 399756 - DNA, 15 bp, Homo sapiens
aaatattcatgaaaa

SEQ ID NO: 399757 - DNA, 15 bp, Homo sapiens
aaaatattcatgaaa

SEQ ID NO: 399758 - DNA, 15 bp, Homo sapiens
aaaaatattcatgaa

SEQ ID NO: 399759 - DNA, 15 bp, Homo sapiens
caaaaatattcatga

SEQ ID NO: 399760 - DNA, 15 bp, Homo sapiens
ccaaaaatattcatg

SEQ ID NO: 399761 - DNA, 15 bp, Homo sapiens
tccaaaaatattcat

SEQ ID NO: 399762 - DNA, 15 bp, Homo sapiens
ttccaaaaatattca

SEQ ID NO: 399763 - DNA, 15 bp, Homo sapiens
attccaaaaatattc

SEQ ID NO: 399764 - DNA, 15 bp, Homo sapiens
aattccaaaaatatt

SEQ ID NO: 399765 - DNA, 15 bp, Homo sapiens
aaattccaaaaatat

SEQ ID NO: 399766 - DNA, 15 bp, Homo sapiens
aaaattccaaaaata

SEQ ID NO: 399767 - DNA, 15 bp, Homo sapiens
gaaaattccaaaaat

SEQ ID NO: 399768 - DNA, 15 bp, Homo sapiens
agaaaattccaaaaa

SEQ ID NO: 399769 - DNA, 15 bp, Homo sapiens
gagaaaattccaaaa

SEQ ID NO: 399770 - DNA, 15 bp, Homo sapiens
agagaaaattccaaa

SEQ ID NO: 399771 - DNA, 15 bp, Homo sapiens
tagagaaaattccaa

SEQ ID NO: 399772 - DNA, 15 bp, Homo sapiens
gtagagaaaattcca

SEQ ID NO: 399773 - DNA, 15 bp, Homo sapiens
ggtagagaaaattcc

SEQ ID NO: 399774 - DNA, 15 bp, Homo sapiens
aggtagagaaaattc

SEQ ID NO: 399775 - DNA, 15 bp, Homo sapiens
gaggtagagaaaatt

SEQ ID NO: 399776 - DNA, 15 bp, Homo sapiens
tgaggtagagaaaat

SEQ ID NO: 399777 - DNA, 15 bp, Homo sapiens
gtgaggtagagaaaa

SEQ ID NO: 399778 - DNA, 15 bp, Homo sapiens
tgtgaggtagagaaa

SEQ ID NO: 399779 - DNA, 15 bp, Homo sapiens
atgtgaggtagagaa

SEQ ID NO: 399780 - DNA, 15 bp, Homo sapiens
aatgtgaggtagaga

SEQ ID NO: 399781 - DNA, 15 bp, Homo sapiens
aaatgtgaggtagag

SEQ ID NO: 399782 - DNA, 15 bp, Homo sapiens
aaaatgtgaggtaga

SEQ ID NO: 399783 - DNA, 15 bp, Homo sapiens
aaaaatgtgaggtag

SEQ ID NO: 399784 - DNA, 15 bp, Homo sapiens
taaaaatgtgaggta

SEQ ID NO: 399785 - DNA, 15 bp, Homo sapiens
ttaaaaatgtgaggt

SEQ ID NO: 399786 - DNA, 15 bp, Homo sapiens
cttaaaaatgtgagg

SEQ ID NO: 399787 - DNA, 15 bp, Homo sapiens
acttaaaaatgtgag

SEQ ID NO: 399788 - DNA, 15 bp, Homo sapiens
tacttaaaaatgtga

SEQ ID NO: 399789 - DNA, 15 bp, Homo sapiens
ctacttaaaaatgtg

SEQ ID NO: 399790 - DNA, 15 bp, Homo sapiens
tctacttaaaaatgt

SEQ ID NO: 399791 - DNA, 15 bp, Homo sapiens
atctacttaaaaatg

SEQ ID NO: 399792 - DNA, 15 bp, Homo sapiens
tatctacttaaaaat

SEQ ID NO: 399793 - DNA, 15 bp, Homo sapiens
ttatctacttaaaaa

SEQ ID NO: 399794 - DNA, 15 bp, Homo sapiens
tttatctacttaaaa

SEQ ID NO: 399795 - DNA, 15 bp, Homo sapiens
ttttatctacttaaa

SEQ ID NO: 399796 - DNA, 15 bp, Homo sapiens
gttttatctacttaa

SEQ ID NO: 399797 - DNA, 15 bp, Homo sapiens
agttttatctactta

SEQ ID NO: 399798 - DNA, 15 bp, Homo sapiens
cagttttatctactt

SEQ ID NO: 399799 - DNA, 15 bp, Homo sapiens
tcagttttatctact

SEQ ID NO: 399800 - DNA, 15 bp, Homo sapiens
ctcagttttatctac

SEQ ID NO: 399801 - DNA, 15 bp, Homo sapiens
actcagttttatcta

SEQ ID NO: 399802 - DNA, 15 bp, Homo sapiens
aactcagttttatct

SEQ ID NO: 399803 - DNA, 15 bp, Homo sapiens
taactcagttttatc

SEQ ID NO: 399804 - DNA, 15 bp, Homo sapiens
ctaactcagttttat

SEQ ID NO: 399805 - DNA, 15 bp, Homo sapiens
cctaactcagtttta

SEQ ID NO: 399806 - DNA, 15 bp, Homo sapiens
acctaactcagtttt

SEQ ID NO: 399807 - DNA, 15 bp, Homo sapiens
aacctaactcagttt

SEQ ID NO: 399808 - DNA, 15 bp, Homo sapiens
aaacctaactcagtt

SEQ ID NO: 399809 - DNA, 15 bp, Homo sapiens
taaacctaactcagt

SEQ ID NO: 399810 - DNA, 15 bp, Homo sapiens
ataaacctaactcag

SEQ ID NO: 399811 - DNA, 15 bp, Homo sapiens
tataaacctaactca

SEQ ID NO: 399812 - DNA, 15 bp, Homo sapiens
ctataaacctaactc

SEQ ID NO: 399813 - DNA, 15 bp, Homo sapiens
tctataaacctaact

SEQ ID NO: 399814 - DNA, 15 bp, Homo sapiens
ctctataaacctaac

SEQ ID NO: 399815 - DNA, 15 bp, Homo sapiens
actctataaacctaa

SEQ ID NO: 399816 - DNA, 15 bp, Homo sapiens
aactctataaaccta

SEQ ID NO: 399817 - DNA, 15 bp, Homo sapiens
taactctataaacct

SEQ ID NO: 399818 - DNA, 15 bp, Homo sapiens
ttaactctataaacc

SEQ ID NO: 399819 - DNA, 15 bp, Homo sapiens
attaactctataaac

SEQ ID NO: 399820 - DNA, 15 bp, Homo sapiens
aattaactctataaa

SEQ ID NO: 399821 - DNA, 15 bp, Homo sapiens
aaattaactctataa

SEQ ID NO: 399822 - DNA, 15 bp, Homo sapiens
gaaattaactctata

SEQ ID NO: 399823 - DNA, 15 bp, Homo sapiens
agaaattaactctat

SEQ ID NO: 399824 - DNA, 15 bp, Homo sapiens
gagaaattaactcta

SEQ ID NO: 399825 - DNA, 15 bp, Homo sapiens
ggagaaattaactct

SEQ ID NO: 399826 - DNA, 15 bp, Homo sapiens
aggagaaattaactc

SEQ ID NO: 399827 - DNA, 15 bp, Homo sapiens
gaggagaaattaact

SEQ ID NO: 399828 - DNA, 15 bp, Homo sapiens
agaggagaaattaac

SEQ ID NO: 399829 - DNA, 15 bp, Homo sapiens
aagaggagaaattaa

SEQ ID NO: 399830 - DNA, 15 bp, Homo sapiens
gaagaggagaaatta

SEQ ID NO: 399831 - DNA, 15 bp, Homo sapiens
agaagaggagaaatt

SEQ ID NO: 399832 - DNA, 15 bp, Homo sapiens
aagaagaggagaaat

SEQ ID NO: 399833 - DNA, 15 bp, Homo sapiens
aaagaagaggagaaa

SEQ ID NO: 399834 - DNA, 15 bp, Homo sapiens
caaagaagaggagaa

SEQ ID NO: 399835 - DNA, 15 bp, Homo sapiens
ccaaagaagaggaga

SEQ ID NO: 399836 - DNA, 15 bp, Homo sapiens
gccaaagaagaggag

SEQ ID NO: 399837 - DNA, 15 bp, Homo sapiens
tgccaaagaagagga

SEQ ID NO: 399838 - DNA, 15 bp, Homo sapiens
atgccaaagaagagg

SEQ ID NO: 399839 - DNA, 15 bp, Homo sapiens
aatgccaaagaagag

SEQ ID NO: 399840 - DNA, 15 bp, Homo sapiens
caatgccaaagaaga

SEQ ID NO: 399841 - DNA, 15 bp, Homo sapiens
tcaatgccaaagaag

SEQ ID NO: 399842 - DNA, 15 bp, Homo sapiens
ttcaatgccaaagaa

SEQ ID NO: 399843 - DNA, 15 bp, Homo sapiens
attcaatgccaaaga

SEQ ID NO: 399844 - DNA, 15 bp, Homo sapiens
cattcaatgccaaag

SEQ ID NO: 399845 - DNA, 15 bp, Homo sapiens
acattcaatgccaaa

SEQ ID NO: 399846 - DNA, 15 bp, Homo sapiens
tacattcaatgccaa

SEQ ID NO: 399847 - DNA, 15 bp, Homo sapiens
gtacattcaatgcca

SEQ ID NO: 399848 - DNA, 15 bp, Homo sapiens
agtacattcaatgcc

SEQ ID NO: 399849 - DNA, 15 bp, Homo sapiens
gagtacattcaatgc

SEQ ID NO: 399850 - DNA, 15 bp, Homo sapiens
agagtacattcaatg

SEQ ID NO: 399851 - DNA, 15 bp, Homo sapiens
tagagtacattcaat

SEQ ID NO: 399852 - DNA, 15 bp, Homo sapiens
ttagagtacattcaa

SEQ ID NO: 399853 - DNA, 15 bp, Homo sapiens
attagagtacattca

SEQ ID NO: 399854 - DNA, 15 bp, Homo sapiens
aattagagtacattc

SEQ ID NO: 399855 - DNA, 15 bp, Homo sapiens
aaattagagtacatt

SEQ ID NO: 399856 - DNA, 15 bp, Homo sapiens
caaattagagtacat

SEQ ID NO: 399857 - DNA, 15 bp, Homo sapiens
acaaattagagtaca

SEQ ID NO: 399858 - DNA, 15 bp, Homo sapiens
tacaaattagagtac

SEQ ID NO: 399859 - DNA, 15 bp, Homo sapiens
ctacaaattagagta

SEQ ID NO: 399860 - DNA, 15 bp, Homo sapiens
gctacaaattagagt

SEQ ID NO: 399861 - DNA, 15 bp, Homo sapiens
agctacaaattagag

SEQ ID NO: 399862 - DNA, 15 bp, Homo sapiens
aagctacaaattaga

SEQ ID NO: 399863 - DNA, 15 bp, Homo sapiens
aaagctacaaattag

SEQ ID NO: 399864 - DNA, 15 bp, Homo sapiens
taaagctacaaatta

SEQ ID NO: 399865 - DNA, 15 bp, Homo sapiens
ttaaagctacaaatt

SEQ ID NO: 399866 - DNA, 15 bp, Homo sapiens
tttaaagctacaaat

SEQ ID NO: 399867 - DNA, 15 bp, Homo sapiens
ttttaaagctacaaa

SEQ ID NO: 399868 - DNA, 15 bp, Homo sapiens
tttttaaagctacaa

SEQ ID NO: 399869 - DNA, 15 bp, Homo sapiens
atttttaaagctaca

SEQ ID NO: 399870 - DNA, 15 bp, Homo sapiens
aatttttaaagctac

SEQ ID NO: 399871 - DNA, 15 bp, Homo sapiens
taatttttaaagcta

SEQ ID NO: 399872 - DNA, 15 bp, Homo sapiens
ctaatttttaaagct

SEQ ID NO: 399873 - DNA, 15 bp, Homo sapiens
tctaatttttaaagc

SEQ ID NO: 399874 - DNA, 15 bp, Homo sapiens
ttctaatttttaaag

SEQ ID NO: 399875 - DNA, 15 bp, Homo sapiens
attctaatttttaaa

SEQ ID NO: 399876 - DNA, 15 bp, Homo sapiens
gattctaatttttaa

SEQ ID NO: 399877 - DNA, 15 bp, Homo sapiens
tgattctaattttta

SEQ ID NO: 399878 - DNA, 15 bp, Homo sapiens
ctgattctaattttt

SEQ ID NO: 399879 - DNA, 15 bp, Homo sapiens
actgattctaatttt

SEQ ID NO: 399880 - DNA, 15 bp, Homo sapiens
gactgattctaattt

SEQ ID NO: 399881 - DNA, 15 bp, Homo sapiens
agactgattctaatt

SEQ ID NO: 399882 - DNA, 15 bp, Homo sapiens
aagactgattctaat

SEQ ID NO: 399883 - DNA, 15 bp, Homo sapiens
aaagactgattctaa

SEQ ID NO: 399884 - DNA, 15 bp, Homo sapiens
aaaagactgattcta

SEQ ID NO: 399885 - DNA, 15 bp, Homo sapiens
aaaaagactgattct

SEQ ID NO: 399886 - DNA, 15 bp, Homo sapiens
aaaaaagactgattc

SEQ ID NO: 399887 - DNA, 15 bp, Homo sapiens
aaaaaaagactgatt

SEQ ID NO: 399888 - DNA, 15 bp, Homo sapiens
aaaaaaaagactgat

SEQ ID NO: 399889 - DNA, 15 bp, Homo sapiens
aaaaaaaaagactga

SEQ ID NO: 399890 - DNA, 15 bp, Homo sapiens
aaaaaaaaaagactg

SEQ ID NO: 399891 - DNA, 15 bp, Homo sapiens
aaaaaaaaaaagact

SEQ ID NO: 399892 - DNA, 15 bp, Homo sapiens
gaaaaaaaaaaagac

SEQ ID NO: 399893 - DNA, 15 bp, Homo sapiens
ggaaaaaaaaaaaga

SEQ ID NO: 399894 - DNA, 15 bp, Homo sapiens
aggaaaaaaaaaaag

SEQ ID NO: 399895 - DNA, 15 bp, Homo sapiens
caggaaaaaaaaaaa

SEQ ID NO: 399896 - DNA, 15 bp, Homo sapiens
tcaggaaaaaaaaaa

SEQ ID NO: 399897 - DNA, 15 bp, Homo sapiens
ctcaggaaaaaaaaa

SEQ ID NO: 399898 - DNA, 15 bp, Homo sapiens
actcaggaaaaaaaa

SEQ ID NO: 399899 - DNA, 15 bp, Homo sapiens
cactcaggaaaaaaa

SEQ ID NO: 399900 - DNA, 15 bp, Homo sapiens
tcactcaggaaaaaa

SEQ ID NO: 399901 - DNA, 15 bp, Homo sapiens
ttcactcaggaaaaa

SEQ ID NO: 399902 - DNA, 15 bp, Homo sapiens
attcactcaggaaaa

SEQ ID NO: 399903 - DNA, 15 bp, Homo sapiens
tattcactcaggaaa

SEQ ID NO: 399904 - DNA, 15 bp, Homo sapiens
gtattcactcaggaa

SEQ ID NO: 399905 - DNA, 15 bp, Homo sapiens
tgtattcactcagga

SEQ ID NO: 399906 - DNA, 15 bp, Homo sapiens
atgtattcactcagg

SEQ ID NO: 399907 - DNA, 15 bp, Homo sapiens
aatgtattcactcag

SEQ ID NO: 399908 - DNA, 15 bp, Homo sapiens
aaatgtattcactca

SEQ ID NO: 399909 - DNA, 15 bp, Homo sapiens
aaaatgtattcactc

SEQ ID NO: 399910 - DNA, 15 bp, Homo sapiens
aaaaatgtattcact

SEQ ID NO: 399911 - DNA, 15 bp, Homo sapiens
aaaaaatgtattcac

SEQ ID NO: 399912 - DNA, 15 bp, Homo sapiens
aaaaaaatgtattca

SEQ ID NO: 399913 - DNA, 15 bp, Homo sapiens
caaaaaaatgtattc

SEQ ID NO: 399914 - DNA, 15 bp, Homo sapiens
acaaaaaaatgtatt

SEQ ID NO: 399915 - DNA, 15 bp, Homo sapiens
tacaaaaaaatgtat

SEQ ID NO: 399916 - DNA, 15 bp, Homo sapiens
ctacaaaaaaatgta

SEQ ID NO: 399917 - DNA, 15 bp, Homo sapiens
cctacaaaaaaatgt

SEQ ID NO: 399918 - DNA, 15 bp, Homo sapiens
tcctacaaaaaaatg

SEQ ID NO: 399919 - DNA, 15 bp, Homo sapiens
atcctacaaaaaaat

SEQ ID NO: 399920 - DNA, 15 bp, Homo sapiens
tatcctacaaaaaaa

SEQ ID NO: 399921 - DNA, 15 bp, Homo sapiens
ctatcctacaaaaaa

SEQ ID NO: 399922 - DNA, 15 bp, Homo sapiens
tctatcctacaaaaa

SEQ ID NO: 399923 - DNA, 15 bp, Homo sapiens
atctatcctacaaaa

SEQ ID NO: 399924 - DNA, 15 bp, Homo sapiens
catctatcctacaaa

SEQ ID NO: 399925 - DNA, 15 bp, Homo sapiens
ccatctatcctacaa

SEQ ID NO: 399926 - DNA, 15 bp, Homo sapiens
accatctatcctaca

SEQ ID NO: 399927 - DNA, 15 bp, Homo sapiens
aaccatctatcctac

SEQ ID NO: 399928 - DNA, 15 bp, Homo sapiens
gaaccatctatccta

SEQ ID NO: 399929 - DNA, 15 bp, Homo sapiens
agaaccatctatcct

SEQ ID NO: 399930 - DNA, 15 bp, Homo sapiens
aagaaccatctatcc

SEQ ID NO: 399931 - DNA, 15 bp, Homo sapiens
taagaaccatctatc

SEQ ID NO: 399932 - DNA, 15 bp, Homo sapiens
ttaagaaccatctat

SEQ ID NO: 399933 - DNA, 15 bp, Homo sapiens
tttaagaaccatcta

SEQ ID NO: 399934 - DNA, 15 bp, Homo sapiens
ctttaagaaccatct

SEQ ID NO: 399935 - DNA, 15 bp, Homo sapiens
tctttaagaaccatc

SEQ ID NO: 399936 - DNA, 15 bp, Homo sapiens
ttctttaagaaccat

SEQ ID NO: 399937 - DNA, 15 bp, Homo sapiens
attctttaagaacca

SEQ ID NO: 399938 - DNA, 15 bp, Homo sapiens
tattctttaagaacc

SEQ ID NO: 399939 - DNA, 15 bp, Homo sapiens
gtattctttaagaac

SEQ ID NO: 399940 - DNA, 15 bp, Homo sapiens
cgtattctttaagaa

SEQ ID NO: 399941 - DNA, 15 bp, Homo sapiens
acgtattctttaaga

SEQ ID NO: 399942 - DNA, 15 bp, Homo sapiens
aacgtattctttaag

SEQ ID NO: 399943 - DNA, 15 bp, Homo sapiens
taacgtattctttaa

SEQ ID NO: 399944 - DNA, 15 bp, Homo sapiens
ctaacgtattcttta

SEQ ID NO: 399945 - DNA, 15 bp, Homo sapiens
actaacgtattcttt

SEQ ID NO: 399946 - DNA, 15 bp, Homo sapiens
aactaacgtattctt

SEQ ID NO: 399947 - DNA, 15 bp, Homo sapiens
gaactaacgtattct

SEQ ID NO: 399948 - DNA, 15 bp, Homo sapiens
tgaactaacgtattc

SEQ ID NO: 399949 - DNA, 15 bp, Homo sapiens
ctgaactaacgtatt

SEQ ID NO: 399950 - DNA, 15 bp, Homo sapiens
cctgaactaacgtat

SEQ ID NO: 399951 - DNA, 15 bp, Homo sapiens
tcctgaactaacgta

SEQ ID NO: 399952 - DNA, 15 bp, Homo sapiens
atcctgaactaacgt

SEQ ID NO: 399953 - DNA, 15 bp, Homo sapiens
gatcctgaactaacg

SEQ ID NO: 399954 - DNA, 15 bp, Homo sapiens
agatcctgaactaac

SEQ ID NO: 399955 - DNA, 15 bp, Homo sapiens
tagatcctgaactaa

SEQ ID NO: 399956 - DNA, 15 bp, Homo sapiens
ttagatcctgaacta

SEQ ID NO: 399957 - DNA, 15 bp, Homo sapiens
attagatcctgaact

SEQ ID NO: 399958 - DNA, 15 bp, Homo sapiens
tattagatcctgaac

SEQ ID NO: 399959 - DNA, 15 bp, Homo sapiens
atattagatcctgaa

SEQ ID NO: 399960 - DNA, 15 bp, Homo sapiens
catattagatcctga

SEQ ID NO: 399961 - DNA, 15 bp, Homo sapiens
tcatattagatcctg

SEQ ID NO: 399962 - DNA, 15 bp, Homo sapiens
ttcatattagatcct

SEQ ID NO: 399963 - DNA, 15 bp, Homo sapiens
attcatattagatcc

SEQ ID NO: 399964 - DNA, 15 bp, Homo sapiens
gattcatattagatc

SEQ ID NO: 399965 - DNA, 15 bp, Homo sapiens
tgattcatattagat

SEQ ID NO: 399966 - DNA, 15 bp, Homo sapiens
ttgattcatattaga

SEQ ID NO: 399967 - DNA, 15 bp, Homo sapiens
attgattcatattag

SEQ ID NO: 399968 - DNA, 15 bp, Homo sapiens
tattgattcatatta

SEQ ID NO: 399969 - DNA, 15 bp, Homo sapiens
ttattgattcatatt

SEQ ID NO: 399970 - DNA, 15 bp, Homo sapiens
tttattgattcatat

SEQ ID NO: 399971 - DNA, 15 bp, Homo sapiens
atttattgattcata

SEQ ID NO: 399972 - DNA, 15 bp, Homo sapiens
aatttattgattcat

SEQ ID NO: 399973 - DNA, 15 bp, Homo sapiens
aaatttattgattca

SEQ ID NO: 399974 - DNA, 15 bp, Homo sapiens
aaaatttattgattc

SEQ ID NO: 399975 - DNA, 15 bp, Homo sapiens
aaaaatttattgatt

SEQ ID NO: 399976 - DNA, 15 bp, Homo sapiens
caaaaatttattgat

SEQ ID NO: 399977 - DNA, 15 bp, Homo sapiens
gcaaaaatttattga

SEQ ID NO: 399978 - DNA, 15 bp, Homo sapiens
agcaaaaatttattg

SEQ ID NO: 399979 - DNA, 15 bp, Homo sapiens
cagcaaaaatttatt

SEQ ID NO: 399980 - DNA, 15 bp, Homo sapiens
tcagcaaaaatttat

SEQ ID NO: 399981 - DNA, 15 bp, Homo sapiens
atcagcaaaaattta

SEQ ID NO: 399982 - DNA, 15 bp, Homo sapiens
tatcagcaaaaattt

SEQ ID NO: 399983 - DNA, 15 bp, Homo sapiens
ttatcagcaaaaatt

SEQ ID NO: 399984 - DNA, 15 bp, Homo sapiens
attatcagcaaaaat

SEQ ID NO: 399985 - DNA, 15 bp, Homo sapiens
tattatcagcaaaaa

SEQ ID NO: 399986 - DNA, 15 bp, Homo sapiens
atattatcagcaaaa

SEQ ID NO: 399987 - DNA, 15 bp, Homo sapiens
catattatcagcaaa

SEQ ID NO: 399988 - DNA, 15 bp, Homo sapiens
tcatattatcagcaa

SEQ ID NO: 399989 - DNA, 15 bp, Homo sapiens
ttcatattatcagca

SEQ ID NO: 399990 - DNA, 15 bp, Homo sapiens
gttcatattatcagc

SEQ ID NO: 399991 - DNA, 15 bp, Homo sapiens
cgttcatattatcag

SEQ ID NO: 399992 - DNA, 15 bp, Homo sapiens
tcgttcatattatca

SEQ ID NO: 399993 - DNA, 15 bp, Homo sapiens
gtcgttcatattatc

SEQ ID NO: 399994 - DNA, 15 bp, Homo sapiens
ggtcgttcatattat

SEQ ID NO: 399995 - DNA, 15 bp, Homo sapiens
tggtcgttcatatta

SEQ ID NO: 399996 - DNA, 15 bp, Homo sapiens
ctggtcgttcatatt

SEQ ID NO: 399997 - DNA, 15 bp, Homo sapiens
tctggtcgttcatat

SEQ ID NO: 399998 - DNA, 15 bp, Homo sapiens
atctggtcgttcata

SEQ ID NO: 399999 - DNA, 15 bp, Homo sapiens
catctggtcgttcat

SEQ ID NO: 400000 - DNA, 15 bp, Homo sapiens
tcatctggtcgttca

SEQ ID NO: 400001 - DNA, 15 bp, Homo sapiens
atcatctggtcgttc

SEQ ID NO: 400002 - DNA, 15 bp, Homo sapiens
aatcatctggtcgtt

SEQ ID NO: 400003 - DNA, 15 bp, Homo sapiens
caatcatctggtcgt

SEQ ID NO: 400004 - DNA, 15 bp, Homo sapiens
ccaatcatctggtcg

SEQ ID NO: 400005 - DNA, 15 bp, Homo sapiens
cccaatcatctggtc

SEQ ID NO: 400006 - DNA, 15 bp, Homo sapiens
tcccaatcatctggt

SEQ ID NO: 400007 - DNA, 15 bp, Homo sapiens
ttcccaatcatctgg

SEQ ID NO: 400008 - DNA, 15 bp, Homo sapiens
attcccaatcatctg

SEQ ID NO: 400009 - DNA, 15 bp, Homo sapiens
aattcccaatcatct

SEQ ID NO: 400010 - DNA, 15 bp, Homo sapiens
gaattcccaatcatc

SEQ ID NO: 400011 - DNA, 15 bp, Homo sapiens
agaattcccaatcat

SEQ ID NO: 400012 - DNA, 15 bp, Homo sapiens
aagaattcccaatca

SEQ ID NO: 400013 - DNA, 15 bp, Homo sapiens
caagaattcccaatc

SEQ ID NO: 400014 - DNA, 15 bp, Homo sapiens
tcaagaattcccaat

SEQ ID NO: 400015 - DNA, 15 bp, Homo sapiens
ctcaagaattcccaa

SEQ ID NO: 400016 - DNA, 15 bp, Homo sapiens
tctcaagaattccca

SEQ ID NO: 400017 - DNA, 15 bp, Homo sapiens
ttctcaagaattccc

SEQ ID NO: 400018 - DNA, 15 bp, Homo sapiens
cttctcaagaattcc

SEQ ID NO: 400019 - DNA, 15 bp, Homo sapiens
acttctcaagaattc

SEQ ID NO: 400020 - DNA, 15 bp, Homo sapiens
tacttctcaagaatt

SEQ ID NO: 400021 - DNA, 15 bp, Homo sapiens
atacttctcaagaat

SEQ ID NO: 400022 - DNA, 15 bp, Homo sapiens
tatacttctcaagaa

SEQ ID NO: 400023 - DNA, 15 bp, Homo sapiens
gtatacttctcaaga

SEQ ID NO: 400024 - DNA, 15 bp, Homo sapiens
tgtatacttctcaag

SEQ ID NO: 400025 - DNA, 15 bp, Homo sapiens
ttgtatacttctcaa

SEQ ID NO: 400026 - DNA, 15 bp, Homo sapiens
cttgtatacttctca

SEQ ID NO: 400027 - DNA, 15 bp, Homo sapiens
tcttgtatacttctc

SEQ ID NO: 400028 - DNA, 15 bp, Homo sapiens
ttcttgtatacttct

SEQ ID NO: 400029 - DNA, 15 bp, Homo sapiens
cttcttgtatacttc

SEQ ID NO: 400030 - DNA, 15 bp, Homo sapiens
acttcttgtatactt

SEQ ID NO: 400031 - DNA, 15 bp, Homo sapiens
aacttcttgtatact

SEQ ID NO: 400032 - DNA, 15 bp, Homo sapiens
aaacttcttgtatac

SEQ ID NO: 400033 - DNA, 15 bp, Homo sapiens
taaacttcttgtata

SEQ ID NO: 400034 - DNA, 15 bp, Homo sapiens
ataaacttcttgtat

SEQ ID NO: 400035 - DNA, 15 bp, Homo sapiens
tataaacttcttgta

SEQ ID NO: 400036 - DNA, 15 bp, Homo sapiens
ctataaacttcttgt

SEQ ID NO: 400037 - DNA, 15 bp, Homo sapiens
gctataaacttcttg

SEQ ID NO: 400038 - DNA, 15 bp, Homo sapiens
agctataaacttctt

SEQ ID NO: 400039 - DNA, 15 bp, Homo sapiens
aagctataaacttct

SEQ ID NO: 400040 - DNA, 15 bp, Homo sapiens
aaagctataaacttc

SEQ ID NO: 400041 - DNA, 15 bp, Homo sapiens
taaagctataaactt

SEQ ID NO: 400042 - DNA, 15 bp, Homo sapiens
ataaagctataaact

SEQ ID NO: 400043 - DNA, 15 bp, Homo sapiens
aataaagctataaac

SEQ ID NO: 400044 - DNA, 15 bp, Homo sapiens
taataaagctataaa

SEQ ID NO: 400045 - DNA, 15 bp, Homo sapiens
gtaataaagctataa

SEQ ID NO: 400046 - DNA, 15 bp, Homo sapiens
agtaataaagctata

SEQ ID NO: 400047 - DNA, 15 bp, Homo sapiens
tagtaataaagctat

SEQ ID NO: 400048 - DNA, 15 bp, Homo sapiens
atagtaataaagcta

SEQ ID NO: 400049 - DNA, 15 bp, Homo sapiens
aatagtaataaagct

SEQ ID NO: 400050 - DNA, 15 bp, Homo sapiens
aaatagtaataaagc

SEQ ID NO: 400051 - DNA, 15 bp, Homo sapiens
gaaatagtaataaag

SEQ ID NO: 400052 - DNA, 15 bp, Homo sapiens
tgaaatagtaataaa

SEQ ID NO: 400053 - DNA, 15 bp, Homo sapiens
gtgaaatagtaataa

SEQ ID NO: 400054 - DNA, 15 bp, Homo sapiens
tgtgaaatagtaata

SEQ ID NO: 400055 - DNA, 15 bp, Homo sapiens
ttgtgaaatagtaat

SEQ ID NO: 400056 - DNA, 15 bp, Homo sapiens
gttgtgaaatagtaa

SEQ ID NO: 400057 - DNA, 15 bp, Homo sapiens
agttgtgaaatagta

SEQ ID NO: 400058 - DNA, 15 bp, Homo sapiens
cagttgtgaaatagt

SEQ ID NO: 400059 - DNA, 15 bp, Homo sapiens
tcagttgtgaaatag

SEQ ID NO: 400060 - DNA, 15 bp, Homo sapiens
atcagttgtgaaata

SEQ ID NO: 400061 - DNA, 15 bp, Homo sapiens
aatcagttgtgaaat

SEQ ID NO: 400062 - DNA, 15 bp, Homo sapiens
gaatcagttgtgaaa

SEQ ID NO: 400063 - DNA, 15 bp, Homo sapiens
agaatcagttgtgaa

SEQ ID NO: 400064 - DNA, 15 bp, Homo sapiens
cagaatcagttgtga

SEQ ID NO: 400065 - DNA, 15 bp, Homo sapiens
ccagaatcagttgtg

SEQ ID NO: 400066 - DNA, 15 bp, Homo sapiens
tccagaatcagttgt

SEQ ID NO: 400067 - DNA, 15 bp, Homo sapiens
ctccagaatcagttg

SEQ ID NO: 400068 - DNA, 15 bp, Homo sapiens
cctccagaatcagtt

SEQ ID NO: 400069 - DNA, 15 bp, Homo sapiens
acctccagaatcagt

SEQ ID NO: 400070 - DNA, 15 bp, Homo sapiens
aacctccagaatcag

SEQ ID NO: 400071 - DNA, 15 bp, Homo sapiens
aaacctccagaatca

SEQ ID NO: 400072 - DNA, 15 bp, Homo sapiens
gaaacctccagaatc

SEQ ID NO: 400073 - DNA, 15 bp, Homo sapiens
agaaacctccagaat

SEQ ID NO: 400074 - DNA, 15 bp, Homo sapiens
aagaaacctccagaa

SEQ ID NO: 400075 - DNA, 15 bp, Homo sapiens
taagaaacctccaga

SEQ ID NO: 400076 - DNA, 15 bp, Homo sapiens
ctaagaaacctccag

SEQ ID NO: 400077 - DNA, 15 bp, Homo sapiens
cctaagaaacctcca

SEQ ID NO: 400078 - DNA, 15 bp, Homo sapiens
tcctaagaaacctcc

SEQ ID NO: 400079 - DNA, 15 bp, Homo sapiens
atcctaagaaacctc

SEQ ID NO: 400080 - DNA, 15 bp, Homo sapiens
tatcctaagaaacct

SEQ ID NO: 400081 - DNA, 15 bp, Homo sapiens
atatcctaagaaacc

SEQ ID NO: 400082 - DNA, 15 bp, Homo sapiens
aatatcctaagaaac

SEQ ID NO: 400083 - DNA, 15 bp, Homo sapiens
taatatcctaagaaa

SEQ ID NO: 400084 - DNA, 15 bp, Homo sapiens
ctaatatcctaagaa

SEQ ID NO: 400085 - DNA, 15 bp, Homo sapiens
gctaatatcctaaga

SEQ ID NO: 400086 - DNA, 15 bp, Homo sapiens
cgctaatatcctaag

SEQ ID NO: 400087 - DNA, 15 bp, Homo sapiens
acgctaatatcctaa

SEQ ID NO: 400088 - DNA, 15 bp, Homo sapiens
aacgctaatatccta

SEQ ID NO: 400089 - DNA, 15 bp, Homo sapiens
taacgctaatatcct

SEQ ID NO: 400090 - DNA, 15 bp, Homo sapiens
ataacgctaatatcc

SEQ ID NO: 400091 - DNA, 15 bp, Homo sapiens
tataacgctaatatc

SEQ ID NO: 400092 - DNA, 15 bp, Homo sapiens
ttataacgctaatat

SEQ ID NO: 400093 - DNA, 15 bp, Homo sapiens
cttataacgctaata

SEQ ID NO: 400094 - DNA, 15 bp, Homo sapiens
gcttataacgctaat

SEQ ID NO: 400095 - DNA, 15 bp, Homo sapiens
ggcttataacgctaa

SEQ ID NO: 400096 - DNA, 15 bp, Homo sapiens
aggcttataacgcta

SEQ ID NO: 400097 - DNA, 15 bp, Homo sapiens
caggcttataacgct

SEQ ID NO: 400098 - DNA, 15 bp, Homo sapiens
tcaggcttataacgc

SEQ ID NO: 400099 - DNA, 15 bp, Homo sapiens
ctcaggcttataacg

SEQ ID NO: 400100 - DNA, 15 bp, Homo sapiens
cctcaggcttataac

SEQ ID NO: 400101 - DNA, 15 bp, Homo sapiens
acctcaggcttataa

SEQ ID NO: 400102 - DNA, 15 bp, Homo sapiens
tacctcaggcttata

SEQ ID NO: 400103 - DNA, 15 bp, Homo sapiens
ttacctcaggcttat

SEQ ID NO: 400104 - DNA, 15 bp, Homo sapiens
gttacctcaggctta

SEQ ID NO: 400105 - DNA, 15 bp, Homo sapiens
agttacctcaggctt

SEQ ID NO: 400106 - DNA, 15 bp, Homo sapiens
cagttacctcaggct

SEQ ID NO: 400107 - DNA, 15 bp, Homo sapiens
ccagttacctcaggc

SEQ ID NO: 400108 - DNA, 15 bp, Homo sapiens
accagttacctcagg

SEQ ID NO: 400109 - DNA, 15 bp, Homo sapiens
aaccagttacctcag

SEQ ID NO: 400110 - DNA, 15 bp, Homo sapiens
aaaccagttacctca

SEQ ID NO: 400111 - DNA, 15 bp, Homo sapiens
aaaaccagttacctc

SEQ ID NO: 400112 - DNA, 15 bp, Homo sapiens
aaaaaccagttacct

SEQ ID NO: 400113 - DNA, 15 bp, Homo sapiens
gaaaaaccagttacc

SEQ ID NO: 400114 - DNA, 15 bp, Homo sapiens
agaaaaaccagttac

SEQ ID NO: 400115 - DNA, 15 bp, Homo sapiens
aagaaaaaccagtta

SEQ ID NO: 400116 - DNA, 15 bp, Homo sapiens
aaagaaaaaccagtt

SEQ ID NO: 400117 - DNA, 15 bp, Homo sapiens
aaaagaaaaaccagt

SEQ ID NO: 400118 - DNA, 15 bp, Homo sapiens
aaaaagaaaaaccag

SEQ ID NO: 400119 - DNA, 15 bp, Homo sapiens
gaaaaagaaaaacca

SEQ ID NO: 400120 - DNA, 15 bp, Homo sapiens
agaaaaagaaaaacc

SEQ ID NO: 400121 - DNA, 15 bp, Homo sapiens
cagaaaaagaaaaac

SEQ ID NO: 400122 - DNA, 15 bp, Homo sapiens
tcagaaaaagaaaaa

SEQ ID NO: 400123 - DNA, 15 bp, Homo sapiens
gtcagaaaaagaaaa

SEQ ID NO: 400124 - DNA, 15 bp, Homo sapiens
ggtcagaaaaagaaa

SEQ ID NO: 400125 - DNA, 15 bp, Homo sapiens
aggtcagaaaaagaa

SEQ ID NO: 400126 - DNA, 15 bp, Homo sapiens
caggtcagaaaaaga

SEQ ID NO: 400127 - DNA, 15 bp, Homo sapiens
ccaggtcagaaaaag

SEQ ID NO: 400128 - DNA, 15 bp, Homo sapiens
cccaggtcagaaaaa

SEQ ID NO: 400129 - DNA, 15 bp, Homo sapiens
acccaggtcagaaaa

SEQ ID NO: 400130 - DNA, 15 bp, Homo sapiens
cacccaggtcagaaa

SEQ ID NO: 400131 - DNA, 15 bp, Homo sapiens
gcacccaggtcagaa

SEQ ID NO: 400132 - DNA, 15 bp, Homo sapiens
tgcacccaggtcaga

SEQ ID NO: 400133 - DNA, 15 bp, Homo sapiens
atgcacccaggtcag

SEQ ID NO: 400134 - DNA, 15 bp, Homo sapiens
aatgcacccaggtca

SEQ ID NO: 400135 - DNA, 15 bp, Homo sapiens
aaatgcacccaggtc

SEQ ID NO: 400136 - DNA, 15 bp, Homo sapiens
caaatgcacccaggt

SEQ ID NO: 400137 - DNA, 15 bp, Homo sapiens
acaaatgcacccagg

SEQ ID NO: 400138 - DNA, 15 bp, Homo sapiens
cacaaatgcacccag

SEQ ID NO: 400139 - DNA, 15 bp, Homo sapiens
ccacaaatgcaccca

SEQ ID NO: 400140 - DNA, 15 bp, Homo sapiens
tccacaaatgcaccc

SEQ ID NO: 400141 - DNA, 15 bp, Homo sapiens
ctccacaaatgcacc

SEQ ID NO: 400142 - DNA, 15 bp, Homo sapiens
actccacaaatgcac

SEQ ID NO: 400143 - DNA, 15 bp, Homo sapiens
gactccacaaatgca

SEQ ID NO: 400144 - DNA, 15 bp, Homo sapiens
agactccacaaatgc

SEQ ID NO: 400145 - DNA, 15 bp, Homo sapiens
cagactccacaaatg

SEQ ID NO: 400146 - DNA, 15 bp, Homo sapiens
tcagactccacaaat

SEQ ID NO: 400147 - DNA, 15 bp, Homo sapiens
ctcagactccacaaa

SEQ ID NO: 400148 - DNA, 15 bp, Homo sapiens
cctcagactccacaa

SEQ ID NO: 400149 - DNA, 15 bp, Homo sapiens
gcctcagactccaca

SEQ ID NO: 400150 - DNA, 15 bp, Homo sapiens
agcctcagactccac

SEQ ID NO: 400151 - DNA, 15 bp, Homo sapiens
cagcctcagactcca

SEQ ID NO: 400152 - DNA, 15 bp, Homo sapiens
tcagcctcagactcc

SEQ ID NO: 400153 - DNA, 15 bp, Homo sapiens
gtcagcctcagactc

SEQ ID NO: 400154 - DNA, 15 bp, Homo sapiens
tgtcagcctcagact

SEQ ID NO: 400155 - DNA, 15 bp, Homo sapiens
ttgtcagcctcagac

SEQ ID NO: 400156 - DNA, 15 bp, Homo sapiens
cttgtcagcctcaga

SEQ ID NO: 400157 - DNA, 15 bp, Homo sapiens
acttgtcagcctcag

SEQ ID NO: 400158 - DNA, 15 bp, Homo sapiens
cacttgtcagcctca

SEQ ID NO: 400159 - DNA, 15 bp, Homo sapiens
tcacttgtcagcctc

SEQ ID NO: 400160 - DNA, 15 bp, Homo sapiens
ttcacttgtcagcct

SEQ ID NO: 400161 - DNA, 15 bp, Homo sapiens
tttcacttgtcagcc

SEQ ID NO: 400162 - DNA, 15 bp, Homo sapiens
atttcacttgtcagc

SEQ ID NO: 400163 - DNA, 15 bp, Homo sapiens
tatttcacttgtcag

SEQ ID NO: 400164 - DNA, 15 bp, Homo sapiens
ctatttcacttgtca

SEQ ID NO: 400165 - DNA, 15 bp, Homo sapiens
actatttcacttgtc

SEQ ID NO: 400166 - DNA, 15 bp, Homo sapiens
aactatttcacttgt

SEQ ID NO: 400167 - DNA, 15 bp, Homo sapiens
taactatttcacttg

SEQ ID NO: 400168 - DNA, 15 bp, Homo sapiens
gtaactatttcactt

SEQ ID NO: 400169 - DNA, 15 bp, Homo sapiens
agtaactatttcact

SEQ ID NO: 400170 - DNA, 15 bp, Homo sapiens
tagtaactatttcac

SEQ ID NO: 400171 - DNA, 15 bp, Homo sapiens
ctagtaactatttca

SEQ ID NO: 400172 - DNA, 15 bp, Homo sapiens
gctagtaactatttc

SEQ ID NO: 400173 - DNA, 15 bp, Homo sapiens
agctagtaactattt

SEQ ID NO: 400174 - DNA, 15 bp, Homo sapiens
cagctagtaactatt

SEQ ID NO: 400175 - DNA, 15 bp, Homo sapiens
acagctagtaactat

SEQ ID NO: 400176 - DNA, 15 bp, Homo sapiens
aacagctagtaacta

SEQ ID NO: 400177 - DNA, 15 bp, Homo sapiens
aaacagctagtaact

SEQ ID NO: 400178 - DNA, 15 bp, Homo sapiens
taaacagctagtaac

SEQ ID NO: 400179 - DNA, 15 bp, Homo sapiens
ttaaacagctagtaa

SEQ ID NO: 400180 - DNA, 15 bp, Homo sapiens
attaaacagctagta

SEQ ID NO: 400181 - DNA, 15 bp, Homo sapiens
tattaaacagctagt

SEQ ID NO: 400182 - DNA, 15 bp, Homo sapiens
ttattaaacagctag

SEQ ID NO: 400183 - DNA, 15 bp, Homo sapiens
tttattaaacagcta

SEQ ID NO: 400184 - DNA, 15 bp, Homo sapiens
atttattaaacagct

SEQ ID NO: 400185 - DNA, 15 bp, Homo sapiens
gatttattaaacagc

SEQ ID NO: 400186 - DNA, 15 bp, Homo sapiens
agatttattaaacag

SEQ ID NO: 400187 - DNA, 15 bp, Homo sapiens
gagatttattaaaca

SEQ ID NO: 400188 - DNA, 15 bp, Homo sapiens
ggagatttattaaac

SEQ ID NO: 400189 - DNA, 15 bp, Homo sapiens
gggagatttattaaa

SEQ ID NO: 400190 - DNA, 15 bp, Homo sapiens
cgggagatttattaa

SEQ ID NO: 400191 - DNA, 15 bp, Homo sapiens
tcgggagatttatta

SEQ ID NO: 400192 - DNA, 15 bp, Homo sapiens
ttcgggagatttatt

SEQ ID NO: 400193 - DNA, 15 bp, Homo sapiens
attcgggagatttat

SEQ ID NO: 400194 - DNA, 15 bp, Homo sapiens
aattcgggagattta

SEQ ID NO: 400195 - DNA, 15 bp, Homo sapiens
caattcgggagattt

SEQ ID NO: 400196 - DNA, 15 bp, Homo sapiens
acaattcgggagatt

SEQ ID NO: 400197 - DNA, 15 bp, Homo sapiens
aacaattcgggagat

SEQ ID NO: 400198 - DNA, 15 bp, Homo sapiens
aaacaattcgggaga

SEQ ID NO: 400199 - DNA, 15 bp, Homo sapiens
caaacaattcgggag

SEQ ID NO: 400200 - DNA, 15 bp, Homo sapiens
ccaaacaattcggga

SEQ ID NO: 400201 - DNA, 15 bp, Homo sapiens
accaaacaattcggg

SEQ ID NO: 400202 - DNA, 15 bp, Homo sapiens
taccaaacaattcgg

SEQ ID NO: 400203 - DNA, 15 bp, Homo sapiens
gtaccaaacaattcg

SEQ ID NO: 400204 - DNA, 15 bp, Homo sapiens
agtaccaaacaattc

SEQ ID NO: 400205 - DNA, 15 bp, Homo sapiens
cagtaccaaacaatt

SEQ ID NO: 400206 - DNA, 15 bp, Homo sapiens
acagtaccaaacaat

SEQ ID NO: 400207 - DNA, 15 bp, Homo sapiens
aacagtaccaaacaa

SEQ ID NO: 400208 - DNA, 15 bp, Homo sapiens
aaacagtaccaaaca

SEQ ID NO: 400209 - DNA, 15 bp, Homo sapiens
caaacagtaccaaac

SEQ ID NO: 400210 - DNA, 15 bp, Homo sapiens
ccaaacagtaccaaa

SEQ ID NO: 400211 - DNA, 15 bp, Homo sapiens
gccaaacagtaccaa

SEQ ID NO: 400212 - DNA, 15 bp, Homo sapiens
tgccaaacagtacca

SEQ ID NO: 400213 - DNA, 15 bp, Homo sapiens
ttgccaaacagtacc

SEQ ID NO: 400214 - DNA, 15 bp, Homo sapiens
cttgccaaacagtac

SEQ ID NO: 400215 - DNA, 15 bp, Homo sapiens
gcttgccaaacagta

SEQ ID NO: 400216 - DNA, 15 bp, Homo sapiens
agcttgccaaacagt

SEQ ID NO: 400217 - DNA, 15 bp, Homo sapiens
aagcttgccaaacag

SEQ ID NO: 400218 - DNA, 15 bp, Homo sapiens
taagcttgccaaaca

SEQ ID NO: 400219 - DNA, 15 bp, Homo sapiens
gtaagcttgccaaac

SEQ ID NO: 400220 - DNA, 15 bp, Homo sapiens
agtaagcttgccaaa

SEQ ID NO: 400221 - DNA, 15 bp, Homo sapiens
gagtaagcttgccaa

SEQ ID NO: 400222 - DNA, 15 bp, Homo sapiens
ggagtaagcttgcca

SEQ ID NO: 400223 - DNA, 15 bp, Homo sapiens
cggagtaagcttgcc

SEQ ID NO: 400224 - DNA, 15 bp, Homo sapiens
gcggagtaagcttgc

SEQ ID NO: 400225 - DNA, 15 bp, Homo sapiens
tgcggagtaagcttg

SEQ ID NO: 400226 - DNA, 15 bp, Homo sapiens
atgcggagtaagctt

SEQ ID NO: 400227 - DNA, 15 bp, Homo sapiens
tatgcggagtaagct

SEQ ID NO: 400228 - DNA, 15 bp, Homo sapiens
atatgcggagtaagc

SEQ ID NO: 400229 - DNA, 15 bp, Homo sapiens
aatatgcggagtaag

SEQ ID NO: 400230 - DNA, 15 bp, Homo sapiens
taatatgcggagtaa

SEQ ID NO: 400231 - DNA, 15 bp, Homo sapiens
ttaatatgcggagta

SEQ ID NO: 400232 - DNA, 15 bp, Homo sapiens
cttaatatgcggagt

SEQ ID NO: 400233 - DNA, 15 bp, Homo sapiens
acttaatatgcggag

SEQ ID NO: 400234 - DNA, 15 bp, Homo sapiens
aacttaatatgcgga

SEQ ID NO: 400235 - DNA, 15 bp, Homo sapiens
aaacttaatatgcgg

SEQ ID NO: 400236 - DNA, 15 bp, Homo sapiens
aaaacttaatatgcg

SEQ ID NO: 400237 - DNA, 15 bp, Homo sapiens
caaaacttaatatgc

SEQ ID NO: 400238 - DNA, 15 bp, Homo sapiens
tcaaaacttaatatg

SEQ ID NO: 400239 - DNA, 15 bp, Homo sapiens
gtcaaaacttaatat

SEQ ID NO: 400240 - DNA, 15 bp, Homo sapiens
agtcaaaacttaata

SEQ ID NO: 400241 - DNA, 15 bp, Homo sapiens
aagtcaaaacttaat

SEQ ID NO: 400242 - DNA, 15 bp, Homo sapiens
aaagtcaaaacttaa

SEQ ID NO: 400243 - DNA, 15 bp, Homo sapiens
gaaagtcaaaactta

SEQ ID NO: 400244 - DNA, 15 bp, Homo sapiens
ggaaagtcaaaactt

SEQ ID NO: 400245 - DNA, 15 bp, Homo sapiens
aggaaagtcaaaact

SEQ ID NO: 400246 - DNA, 15 bp, Homo sapiens
caggaaagtcaaaac

SEQ ID NO: 400247 - DNA, 15 bp, Homo sapiens
acaggaaagtcaaaa

SEQ ID NO: 400248 - DNA, 15 bp, Homo sapiens
cacaggaaagtcaaa

SEQ ID NO: 400249 - DNA, 15 bp, Homo sapiens
acacaggaaagtcaa

SEQ ID NO: 400250 - DNA, 15 bp, Homo sapiens
aacacaggaaagtca

SEQ ID NO: 400251 - DNA, 15 bp, Homo sapiens
aaacacaggaaagtc

SEQ ID NO: 400252 - DNA, 15 bp, Homo sapiens
aaaacacaggaaagt

SEQ ID NO: 400253 - DNA, 15 bp, Homo sapiens
taaaacacaggaaag

SEQ ID NO: 400254 - DNA, 15 bp, Homo sapiens
ataaaacacaggaaa

SEQ ID NO: 400255 - DNA, 15 bp, Homo sapiens
aataaaacacaggaa

SEQ ID NO: 400256 - DNA, 15 bp, Homo sapiens
caataaaacacagga

SEQ ID NO: 400257 - DNA, 15 bp, Homo sapiens
ccaataaaacacagg

SEQ ID NO: 400258 - DNA, 15 bp, Homo sapiens
tccaataaaacacag

SEQ ID NO: 400259 - DNA, 15 bp, Homo sapiens
ttccaataaaacaca

SEQ ID NO: 400260 - DNA, 15 bp, Homo sapiens
gttccaataaaacac

SEQ ID NO: 400261 - DNA, 15 bp, Homo sapiens
agttccaataaaaca

SEQ ID NO: 400262 - DNA, 15 bp, Homo sapiens
gagttccaataaaac

SEQ ID NO: 400263 - DNA, 15 bp, Homo sapiens
agagttccaataaaa

SEQ ID NO: 400264 - DNA, 15 bp, Homo sapiens
aagagttccaataaa

SEQ ID NO: 400265 - DNA, 15 bp, Homo sapiens
aaagagttccaataa

SEQ ID NO: 400266 - DNA, 15 bp, Homo sapiens
caaagagttccaata

SEQ ID NO: 400267 - DNA, 15 bp, Homo sapiens
acaaagagttccaat

SEQ ID NO: 400268 - DNA, 15 bp, Homo sapiens
aacaaagagttccaa

SEQ ID NO: 400269 - DNA, 15 bp, Homo sapiens
gaacaaagagttcca

SEQ ID NO: 400270 - DNA, 15 bp, Homo sapiens
ggaacaaagagttcc

SEQ ID NO: 400271 - DNA, 15 bp, Homo sapiens
aggaacaaagagttc

SEQ ID NO: 400272 - DNA, 15 bp, Homo sapiens
caggaacaaagagtt

SEQ ID NO: 400273 - DNA, 15 bp, Homo sapiens
tcaggaacaaagagt

SEQ ID NO: 400274 - DNA, 15 bp, Homo sapiens
ttcaggaacaaagag

SEQ ID NO: 400275 - DNA, 15 bp, Homo sapiens
cttcaggaacaaaga

SEQ ID NO: 400276 - DNA, 15 bp, Homo sapiens
gcttcaggaacaaag

SEQ ID NO: 400277 - DNA, 15 bp, Homo sapiens
tgcttcaggaacaaa

SEQ ID NO: 400278 - DNA, 15 bp, Homo sapiens
gtgcttcaggaacaa

SEQ ID NO: 400279 - DNA, 15 bp, Homo sapiens
agtgcttcaggaaca

SEQ ID NO: 400280 - DNA, 15 bp, Homo sapiens
tagtgcttcaggaac

SEQ ID NO: 400281 - DNA, 15 bp, Homo sapiens
ttagtgcttcaggaa

SEQ ID NO: 400282 - DNA, 15 bp, Homo sapiens
gttagtgcttcagga

SEQ ID NO: 400283 - DNA, 15 bp, Homo sapiens
tgttagtgcttcagg

SEQ ID NO: 400284 - DNA, 15 bp, Homo sapiens
atgttagtgcttcag

SEQ ID NO: 400285 - DNA, 15 bp, Homo sapiens
aatgttagtgcttca

SEQ ID NO: 400286 - DNA, 15 bp, Homo sapiens
aaatgttagtgcttc

SEQ ID NO: 400287 - DNA, 15 bp, Homo sapiens
gaaatgttagtgctt

SEQ ID NO: 400288 - DNA, 15 bp, Homo sapiens
agaaatgttagtgct

SEQ ID NO: 400289 - DNA, 15 bp, Homo sapiens
tagaaatgttagtgc

SEQ ID NO: 400290 - DNA, 15 bp, Homo sapiens
atagaaatgttagtg

SEQ ID NO: 400291 - DNA, 15 bp, Homo sapiens
aatagaaatgttagt

SEQ ID NO: 400292 - DNA, 15 bp, Homo sapiens
aaatagaaatgttag

SEQ ID NO: 400293 - DNA, 15 bp, Homo sapiens
aaaatagaaatgtta

SEQ ID NO: 400294 - DNA, 15 bp, Homo sapiens
caaaatagaaatgtt

SEQ ID NO: 400295 - DNA, 15 bp, Homo sapiens
acaaaatagaaatgt

SEQ ID NO: 400296 - DNA, 15 bp, Homo sapiens
gacaaaatagaaatg

SEQ ID NO: 400297 - DNA, 15 bp, Homo sapiens
agacaaaatagaaat

SEQ ID NO: 400298 - DNA, 15 bp, Homo sapiens
aagacaaaatagaaa

SEQ ID NO: 400299 - DNA, 15 bp, Homo sapiens
aaagacaaaatagaa

SEQ ID NO: 400300 - DNA, 15 bp, Homo sapiens
gaaagacaaaataga

SEQ ID NO: 400301 - DNA, 15 bp, Homo sapiens
tgaaagacaaaatag

SEQ ID NO: 400302 - DNA, 15 bp, Homo sapiens
atgaaagacaaaata

SEQ ID NO: 400303 - DNA, 15 bp, Homo sapiens
catgaaagacaaaat

SEQ ID NO: 400304 - DNA, 15 bp, Homo sapiens
gcatgaaagacaaaa

SEQ ID NO: 400305 - DNA, 15 bp, Homo sapiens
tgcatgaaagacaaa

SEQ ID NO: 400306 - DNA, 15 bp, Homo sapiens
ctgcatgaaagacaa

SEQ ID NO: 400307 - DNA, 15 bp, Homo sapiens
actgcatgaaagaca

SEQ ID NO: 400308 - DNA, 15 bp, Homo sapiens
aactgcatgaaagac

SEQ ID NO: 400309 - DNA, 15 bp, Homo sapiens
taactgcatgaaaga

SEQ ID NO: 400310 - DNA, 15 bp, Homo sapiens
ctaactgcatgaaag

SEQ ID NO: 400311 - DNA, 15 bp, Homo sapiens
gctaactgcatgaaa

SEQ ID NO: 400312 - DNA, 15 bp, Homo sapiens
ggctaactgcatgaa

SEQ ID NO: 400313 - DNA, 15 bp, Homo sapiens
tggctaactgcatga

SEQ ID NO: 400314 - DNA, 15 bp, Homo sapiens
gtggctaactgcatg

SEQ ID NO: 400315 - DNA, 15 bp, Homo sapiens
ggtggctaactgcat

SEQ ID NO: 400316 - DNA, 15 bp, Homo sapiens
aggtggctaactgca

SEQ ID NO: 400317 - DNA, 15 bp, Homo sapiens
gaggtggctaactgc

SEQ ID NO: 400318 - DNA, 15 bp, Homo sapiens
ggaggtggctaactg

SEQ ID NO: 400319 - DNA, 15 bp, Homo sapiens
gggaggtggctaact

SEQ ID NO: 400320 - DNA, 15 bp, Homo sapiens
agggaggtggctaac

SEQ ID NO: 400321 - DNA, 15 bp, Homo sapiens
tagggaggtggctaa

SEQ ID NO: 400322 - DNA, 15 bp, Homo sapiens
ttagggaggtggcta

SEQ ID NO: 400323 - DNA, 15 bp, Homo sapiens
attagggaggtggct

SEQ ID NO: 400324 - DNA, 15 bp, Homo sapiens
cattagggaggtggc

SEQ ID NO: 400325 - DNA, 15 bp, Homo sapiens
ccattagggaggtgg

SEQ ID NO: 400326 - DNA, 15 bp, Homo sapiens
accattagggaggtg

SEQ ID NO: 400327 - DNA, 15 bp, Homo sapiens
caccattagggaggt

SEQ ID NO: 400328 - DNA, 15 bp, Homo sapiens
tcaccattagggagg

SEQ ID NO: 400329 - DNA, 15 bp, Homo sapiens
gtcaccattagggag

SEQ ID NO: 400330 - DNA, 15 bp, Homo sapiens
ggtcaccattaggga

SEQ ID NO: 400331 - DNA, 15 bp, Homo sapiens
tggtcaccattaggg

SEQ ID NO: 400332 - DNA, 15 bp, Homo sapiens
ctggtcaccattagg

SEQ ID NO: 400333 - DNA, 15 bp, Homo sapiens
actggtcaccattag

SEQ ID NO: 400334 - DNA, 15 bp, Homo sapiens
gactggtcaccatta

SEQ ID NO: 400335 - DNA, 15 bp, Homo sapiens
ggactggtcaccatt

SEQ ID NO: 400336 - DNA, 15 bp, Homo sapiens
aggactggtcaccat

SEQ ID NO: 400337 - DNA, 15 bp, Homo sapiens
gaggactggtcacca

SEQ ID NO: 400338 - DNA, 15 bp, Homo sapiens
agaggactggtcacc

SEQ ID NO: 400339 - DNA, 15 bp, Homo sapiens
cagaggactggtcac

SEQ ID NO: 400340 - DNA, 15 bp, Homo sapiens
gcagaggactggtca

SEQ ID NO: 400341 - DNA, 15 bp, Homo sapiens
tgcagaggactggtc

SEQ ID NO: 400342 - DNA, 15 bp, Homo sapiens
ctgcagaggactggt

SEQ ID NO: 400343 - DNA, 15 bp, Homo sapiens
cctgcagaggactgg

SEQ ID NO: 400344 - DNA, 15 bp, Homo sapiens
gcctgcagaggactg

SEQ ID NO: 400345 - DNA, 15 bp, Homo sapiens
tgcctgcagaggact

SEQ ID NO: 400346 - DNA, 15 bp, Homo sapiens
ttgcctgcagaggac

SEQ ID NO: 400347 - DNA, 15 bp, Homo sapiens
attgcctgcagagga

SEQ ID NO: 400348 - DNA, 15 bp, Homo sapiens
gattgcctgcagagg

SEQ ID NO: 400349 - DNA, 15 bp, Homo sapiens
tgattgcctgcagag

SEQ ID NO: 400350 - DNA, 15 bp, Homo sapiens
ctgattgcctgcaga

SEQ ID NO: 400351 - DNA, 15 bp, Homo sapiens
cctgattgcctgcag

SEQ ID NO: 400352 - DNA, 15 bp, Homo sapiens
acctgattgcctgca

SEQ ID NO: 400353 - DNA, 15 bp, Homo sapiens
gacctgattgcctgc

SEQ ID NO: 400354 - DNA, 15 bp, Homo sapiens
tgacctgattgcctg

SEQ ID NO: 400355 - DNA, 15 bp, Homo sapiens
gtgacctgattgcct

SEQ ID NO: 400356 - DNA, 15 bp, Homo sapiens
agtgacctgattgcc

SEQ ID NO: 400357 - DNA, 15 bp, Homo sapiens
cagtgacctgattgc

SEQ ID NO: 400358 - DNA, 15 bp, Homo sapiens
gcagtgacctgattg

SEQ ID NO: 400359 - DNA, 15 bp, Homo sapiens
agcagtgacctgatt

SEQ ID NO: 400360 - DNA, 15 bp, Homo sapiens
tagcagtgacctgat

SEQ ID NO: 400361 - DNA, 15 bp, Homo sapiens
gtagcagtgacctga

SEQ ID NO: 400362 - DNA, 15 bp, Homo sapiens
tgtagcagtgacctg

SEQ ID NO: 400363 - DNA, 15 bp, Homo sapiens
ttgtagcagtgacct

SEQ ID NO: 400364 - DNA, 15 bp, Homo sapiens
cttgtagcagtgacc

SEQ ID NO: 400365 - DNA, 15 bp, Homo sapiens
acttgtagcagtgac

SEQ ID NO: 400366 - DNA, 15 bp, Homo sapiens
cacttgtagcagtga

SEQ ID NO: 400367 - DNA, 15 bp, Homo sapiens
tcacttgtagcagtg

SEQ ID NO: 400368 - DNA, 15 bp, Homo sapiens
gtcacttgtagcagt

SEQ ID NO: 400369 - DNA, 15 bp, Homo sapiens
agtcacttgtagcag

SEQ ID NO: 400370 - DNA, 15 bp, Homo sapiens
cagtcacttgtagca

SEQ ID NO: 400371 - DNA, 15 bp, Homo sapiens
ccagtcacttgtagc

SEQ ID NO: 400372 - DNA, 15 bp, Homo sapiens
gccagtcacttgtag

SEQ ID NO: 400373 - DNA, 15 bp, Homo sapiens
agccagtcacttgta

SEQ ID NO: 400374 - DNA, 15 bp, Homo sapiens
cagccagtcacttgt

SEQ ID NO: 400375 - DNA, 15 bp, Homo sapiens
acagccagtcacttg

SEQ ID NO: 400376 - DNA, 15 bp, Homo sapiens
gacagccagtcactt

SEQ ID NO: 400377 - DNA, 15 bp, Homo sapiens
tgacagccagtcact

SEQ ID NO: 400378 - DNA, 15 bp, Homo sapiens
ctgacagccagtcac

SEQ ID NO: 400379 - DNA, 15 bp, Homo sapiens
gctgacagccagtca

SEQ ID NO: 400380 - DNA, 15 bp, Homo sapiens
ggctgacagccagtc

SEQ ID NO: 400381 - DNA, 15 bp, Homo sapiens
gggctgacagccagt

SEQ ID NO: 400382 - DNA, 15 bp, Homo sapiens
tgggctgacagccag

SEQ ID NO: 400383 - DNA, 15 bp, Homo sapiens
ttgggctgacagcca

SEQ ID NO: 400384 - DNA, 15 bp, Homo sapiens
tttgggctgacagcc

SEQ ID NO: 400385 - DNA, 15 bp, Homo sapiens
atttgggctgacagc

SEQ ID NO: 400386 - DNA, 15 bp, Homo sapiens
catttgggctgacag

SEQ ID NO: 400387 - DNA, 15 bp, Homo sapiens
tcatttgggctgaca

SEQ ID NO: 400388 - DNA, 15 bp, Homo sapiens
atcatttgggctgac

SEQ ID NO: 400389 - DNA, 15 bp, Homo sapiens
catcatttgggctga

SEQ ID NO: 400390 - DNA, 15 bp, Homo sapiens
gcatcatttgggctg

SEQ ID NO: 400391 - DNA, 15 bp, Homo sapiens
tgcatcatttgggct

SEQ ID NO: 400392 - DNA, 15 bp, Homo sapiens
ctgcatcatttgggc

SEQ ID NO: 400393 - DNA, 15 bp, Homo sapiens
tctgcatcatttggg

SEQ ID NO: 400394 - DNA, 15 bp, Homo sapiens
ttctgcatcatttgg

SEQ ID NO: 400395 - DNA, 15 bp, Homo sapiens
attctgcatcatttg

SEQ ID NO: 400396 - DNA, 15 bp, Homo sapiens
tattctgcatcattt

SEQ ID NO: 400397 - DNA, 15 bp, Homo sapiens
atattctgcatcatt

SEQ ID NO: 400398 - DNA, 15 bp, Homo sapiens
aatattctgcatcat

SEQ ID NO: 400399 - DNA, 15 bp, Homo sapiens
aaatattctgcatca

SEQ ID NO: 400400 - DNA, 15 bp, Homo sapiens
aaaatattctgcatc

SEQ ID NO: 400401 - DNA, 15 bp, Homo sapiens
ataaaatattctgca

SEQ ID NO: 400402 - DNA, 15 bp, Homo sapiens
gataaaatattctgc

SEQ ID NO: 400403 - DNA, 15 bp, Homo sapiens
tgataaaatattctg

SEQ ID NO: 400404 - DNA, 15 bp, Homo sapiens
atgataaaatattct

SEQ ID NO: 400405 - DNA, 15 bp, Homo sapiens
aatgataaaatattc

SEQ ID NO: 400406 - DNA, 15 bp, Homo sapiens
aaatgataaaatatt

SEQ ID NO: 400407 - DNA, 15 bp, Homo sapiens
caaatgataaaatat

SEQ ID NO: 400408 - DNA, 15 bp, Homo sapiens
acaaatgataaaata

SEQ ID NO: 400409 - DNA, 15 bp, Homo sapiens
tacaaatgataaaat

SEQ ID NO: 400410 - DNA, 15 bp, Homo sapiens
ttacaaatgataaaa

SEQ ID NO: 400411 - DNA, 15 bp, Homo sapiens
attacaaatgataaa

SEQ ID NO: 400412 - DNA, 15 bp, Homo sapiens
cattacaaatgataa

SEQ ID NO: 400413 - DNA, 15 bp, Homo sapiens
acattacaaatgata

SEQ ID NO: 400414 - DNA, 15 bp, Homo sapiens
cacattacaaatgat

SEQ ID NO: 400415 - DNA, 15 bp, Homo sapiens
acacattacaaatga

SEQ ID NO: 400416 - DNA, 15 bp, Homo sapiens
cacacattacaaatg

SEQ ID NO: 400417 - DNA, 15 bp, Homo sapiens
acacacattacaaat

SEQ ID NO: 400418 - DNA, 15 bp, Homo sapiens
cacacacattacaaa

SEQ ID NO: 400419 - DNA, 15 bp, Homo sapiens
ccacacacattacaa

SEQ ID NO: 400420 - DNA, 15 bp, Homo sapiens
gccacacacattaca

SEQ ID NO: 400421 - DNA, 15 bp, Homo sapiens
ggccacacacattac

SEQ ID NO: 400422 - DNA, 15 bp, Homo sapiens
gggccacacacatta

SEQ ID NO: 400423 - DNA, 15 bp, Homo sapiens
agggccacacacatt

SEQ ID NO: 400424 - DNA, 15 bp, Homo sapiens
gagggccacacacat

SEQ ID NO: 400425 - DNA, 15 bp, Homo sapiens
tgagggccacacaca

SEQ ID NO: 400426 - DNA, 15 bp, Homo sapiens
ttgagggccacacac

SEQ ID NO: 400427 - DNA, 15 bp, Homo sapiens
tttgagggccacaca

SEQ ID NO: 400428 - DNA, 15 bp, Homo sapiens
ttttgagggccacac

SEQ ID NO: 400429 - DNA, 15 bp, Homo sapiens
tttttgagggccaca

SEQ ID NO: 400430 - DNA, 15 bp, Homo sapiens
gtttttgagggccac

SEQ ID NO: 400431 - DNA, 15 bp, Homo sapiens
tgtttttgagggcca

SEQ ID NO: 400432 - DNA, 15 bp, Homo sapiens
atgtttttgagggcc

SEQ ID NO: 400433 - DNA, 15 bp, Homo sapiens
tatgtttttgagggc

SEQ ID NO: 400434 - DNA, 15 bp, Homo sapiens
ttatgtttttgaggg

SEQ ID NO: 400435 - DNA, 15 bp, Homo sapiens
attatgtttttgagg

SEQ ID NO: 400436 - DNA, 15 bp, Homo sapiens
cattatgtttttgag

SEQ ID NO: 400437 - DNA, 15 bp, Homo sapiens
acattatgtttttga

SEQ ID NO: 400438 - DNA, 15 bp, Homo sapiens
gacattatgtttttg

SEQ ID NO: 400439 - DNA, 15 bp, Homo sapiens
agacattatgttttt

SEQ ID NO: 400440 - DNA, 15 bp, Homo sapiens
cagacattatgtttt

SEQ ID NO: 400441 - DNA, 15 bp, Homo sapiens
ccagacattatgttt

SEQ ID NO: 400442 - DNA, 15 bp, Homo sapiens
tccagacattatgtt

SEQ ID NO: 400443 - DNA, 15 bp, Homo sapiens
ttccagacattatgt

SEQ ID NO: 400444 - DNA, 15 bp, Homo sapiens
attccagacattatg

SEQ ID NO: 400445 - DNA, 15 bp, Homo sapiens
tattccagacattat

SEQ ID NO: 400446 - DNA, 15 bp, Homo sapiens
ttattccagacatta

SEQ ID NO: 400447 - DNA, 15 bp, Homo sapiens
cttattccagacatt

SEQ ID NO: 400448 - DNA, 15 bp, Homo sapiens
ccttattccagacat

SEQ ID NO: 400449 - DNA, 15 bp, Homo sapiens
cccttattccagaca

SEQ ID NO: 400450 - DNA, 15 bp, Homo sapiens
tcccttattccagac

SEQ ID NO: 400451 - DNA, 15 bp, Homo sapiens
atcccttattccaga

SEQ ID NO: 400452 - DNA, 15 bp, Homo sapiens
tatcccttattccag

SEQ ID NO: 400453 - DNA, 15 bp, Homo sapiens
ttatcccttattcca

SEQ ID NO: 400454 - DNA, 15 bp, Homo sapiens
gttatcccttattcc

SEQ ID NO: 400455 - DNA, 15 bp, Homo sapiens
tgttatcccttattc

SEQ ID NO: 400456 - DNA, 15 bp, Homo sapiens
atgttatcccttatt

SEQ ID NO: 400457 - DNA, 15 bp, Homo sapiens
catgttatcccttat

SEQ ID NO: 400458 - DNA, 15 bp, Homo sapiens
tcatgttatccctta

SEQ ID NO: 400459 - DNA, 15 bp, Homo sapiens
gtcatgttatccctt

SEQ ID NO: 400460 - DNA, 15 bp, Homo sapiens
tgtcatgttatccct

SEQ ID NO: 400461 - DNA, 15 bp, Homo sapiens
atgtcatgttatccc

SEQ ID NO: 400462 - DNA, 15 bp, Homo sapiens
aatgtcatgttatcc

SEQ ID NO: 400463 - DNA, 15 bp, Homo sapiens
aaatgtcatgttatc

SEQ ID NO: 400464 - DNA, 15 bp, Homo sapiens
taaatgtcatgttat

SEQ ID NO: 400465 - DNA, 15 bp, Homo sapiens
ataaatgtcatgtta

SEQ ID NO: 400466 - DNA, 15 bp, Homo sapiens
gataaatgtcatgtt

SEQ ID NO: 400467 - DNA, 15 bp, Homo sapiens
tgataaatgtcatgt

SEQ ID NO: 400468 - DNA, 15 bp, Homo sapiens
atgataaatgtcatg

SEQ ID NO: 400469 - DNA, 15 bp, Homo sapiens
catgataaatgtcat

SEQ ID NO: 400470 - DNA, 15 bp, Homo sapiens
tcatgataaatgtca

SEQ ID NO: 400471 - DNA, 15 bp, Homo sapiens
atcatgataaatgtc

SEQ ID NO: 400472 - DNA, 15 bp, Homo sapiens
gatcatgataaatgt

SEQ ID NO: 400473 - DNA, 15 bp, Homo sapiens
tgatcatgataaatg

SEQ ID NO: 400474 - DNA, 15 bp, Homo sapiens
ctgatcatgataaat

SEQ ID NO: 400475 - DNA, 15 bp, Homo sapiens
actgatcatgataaa

SEQ ID NO: 400476 - DNA, 15 bp, Homo sapiens
cactgatcatgataa

SEQ ID NO: 400477 - DNA, 15 bp, Homo sapiens
ccactgatcatgata

SEQ ID NO: 400478 - DNA, 15 bp, Homo sapiens
tccactgatcatgat

SEQ ID NO: 400479 - DNA, 15 bp, Homo sapiens
ttccactgatcatga

SEQ ID NO: 400480 - DNA, 15 bp, Homo sapiens
gttccactgatcatg

SEQ ID NO: 400481 - DNA, 15 bp, Homo sapiens
agttccactgatcat

SEQ ID NO: 400482 - DNA, 15 bp, Homo sapiens
cagttccactgatca

SEQ ID NO: 400483 - DNA, 15 bp, Homo sapiens
ccagttccactgatc

SEQ ID NO: 400484 - DNA, 15 bp, Homo sapiens
accagttccactgat

SEQ ID NO: 400485 - DNA, 15 bp, Homo sapiens
aaccagttccactga

SEQ ID NO: 400486 - DNA, 15 bp, Homo sapiens
taaccagttccactg

SEQ ID NO: 400487 - DNA, 15 bp, Homo sapiens
ttaaccagttccact

SEQ ID NO: 400488 - DNA, 15 bp, Homo sapiens
attaaccagttccac

SEQ ID NO: 400489 - DNA, 15 bp, Homo sapiens
gattaaccagttcca

SEQ ID NO: 400490 - DNA, 15 bp, Homo sapiens
agattaaccagttcc

SEQ ID NO: 400491 - DNA, 15 bp, Homo sapiens
cagattaaccagttc

SEQ ID NO: 400492 - DNA, 15 bp, Homo sapiens
ccagattaaccagtt

SEQ ID NO: 400493 - DNA, 15 bp, Homo sapiens
accagattaaccagt

SEQ ID NO: 400494 - DNA, 15 bp, Homo sapiens
gaccagattaaccag

SEQ ID NO: 400495 - DNA, 15 bp, Homo sapiens
tgaccagattaacca

SEQ ID NO: 400496 - DNA, 15 bp, Homo sapiens
ctgaccagattaacc

SEQ ID NO: 400497 - DNA, 15 bp, Homo sapiens
cctgaccagattaac

SEQ ID NO: 400498 - DNA, 15 bp, Homo sapiens
tcctgaccagattaa

SEQ ID NO: 400499 - DNA, 15 bp, Homo sapiens
ttcctgaccagatta

SEQ ID NO: 400500 - DNA, 15 bp, Homo sapiens
tttcctgaccagatt

SEQ ID NO: 400501 - DNA, 15 bp, Homo sapiens
gtttcctgaccagat

SEQ ID NO: 400502 - DNA, 15 bp, Homo sapiens
cgtttcctgaccaga

SEQ ID NO: 400503 - DNA, 15 bp, Homo sapiens
tcgtttcctgaccag

SEQ ID NO: 400504 - DNA, 15 bp, Homo sapiens
gtcgtttcctgacca

SEQ ID NO: 400505 - DNA, 15 bp, Homo sapiens
agtcgtttcctgacc

SEQ ID NO: 400506 - DNA, 15 bp, Homo sapiens
cagtcgtttcctgac

SEQ ID NO: 400507 - DNA, 15 bp, Homo sapiens
tcagtcgtttcctga

SEQ ID NO: 400508 - DNA, 15 bp, Homo sapiens
ttcagtcgtttcctg

SEQ ID NO: 400509 - DNA, 15 bp, Homo sapiens
attcagtcgtttcct

SEQ ID NO: 400510 - DNA, 15 bp, Homo sapiens
tattcagtcgtttcc

SEQ ID NO: 400511 - DNA, 15 bp, Homo sapiens
atattcagtcgtttc

SEQ ID NO: 400512 - DNA, 15 bp, Homo sapiens
aatattcagtcgttt

SEQ ID NO: 400513 - DNA, 15 bp, Homo sapiens
aaatattcagtcgtt

SEQ ID NO: 400514 - DNA, 15 bp, Homo sapiens
aaaatattcagtcgt

SEQ ID NO: 400515 - DNA, 15 bp, Homo sapiens
taaaatattcagtcg

SEQ ID NO: 400516 - DNA, 15 bp, Homo sapiens
gtaaaatattcagtc

SEQ ID NO: 400517 - DNA, 15 bp, Homo sapiens
cgtaaaatattcagt

SEQ ID NO: 400518 - DNA, 15 bp, Homo sapiens
acgtaaaatattcag

SEQ ID NO: 400519 - DNA, 15 bp, Homo sapiens
tacgtaaaatattca

SEQ ID NO: 400520 - DNA, 15 bp, Homo sapiens
atacgtaaaatattc

SEQ ID NO: 400521 - DNA, 15 bp, Homo sapiens
aatacgtaaaatatt

SEQ ID NO: 400522 - DNA, 15 bp, Homo sapiens
aaatacgtaaaatat

SEQ ID NO: 400523 - DNA, 15 bp, Homo sapiens
taaatacgtaaaata

SEQ ID NO: 400524 - DNA, 15 bp, Homo sapiens
ctaaatacgtaaaat

SEQ ID NO: 400525 - DNA, 15 bp, Homo sapiens
gctaaatacgtaaaa

SEQ ID NO: 400526 - DNA, 15 bp, Homo sapiens
agctaaatacgtaaa

SEQ ID NO: 400527 - DNA, 15 bp, Homo sapiens
cagctaaatacgtaa

SEQ ID NO: 400528 - DNA, 15 bp, Homo sapiens
tcagctaaatacgta

SEQ ID NO: 400529 - DNA, 15 bp, Homo sapiens
gtcagctaaatacgt

SEQ ID NO: 400530 - DNA, 15 bp, Homo sapiens
agtcagctaaatacg

SEQ ID NO: 400531 - DNA, 15 bp, Homo sapiens
cagtcagctaaatac

SEQ ID NO: 400532 - DNA, 15 bp, Homo sapiens
ccagtcagctaaata

SEQ ID NO: 400533 - DNA, 15 bp, Homo sapiens
cccagtcagctaaat

SEQ ID NO: 400534 - DNA, 15 bp, Homo sapiens
gcccagtcagctaaa

SEQ ID NO: 400535 - DNA, 15 bp, Homo sapiens
agcccagtcagctaa

SEQ ID NO: 400536 - DNA, 15 bp, Homo sapiens
aagcccagtcagcta

SEQ ID NO: 400537 - DNA, 15 bp, Homo sapiens
aaagcccagtcagct

SEQ ID NO: 400538 - DNA, 15 bp, Homo sapiens
aaaagcccagtcagc

SEQ ID NO: 400539 - DNA, 15 bp, Homo sapiens
taaaagcccagtcag

SEQ ID NO: 400540 - DNA, 15 bp, Homo sapiens
ataaaagcccagtca

SEQ ID NO: 400541 - DNA, 15 bp, Homo sapiens
aataaaagcccagtc

SEQ ID NO: 400542 - DNA, 15 bp, Homo sapiens
aaataaaagcccagt

SEQ ID NO: 400543 - DNA, 15 bp, Homo sapiens
aaaataaaagcccag

SEQ ID NO: 400544 - DNA, 15 bp, Homo sapiens
caaaataaaagccca

SEQ ID NO: 400545 - DNA, 15 bp, Homo sapiens
acaaaataaaagccc

SEQ ID NO: 400546 - DNA, 15 bp, Homo sapiens
aacaaaataaaagcc

SEQ ID NO: 400547 - DNA, 15 bp, Homo sapiens
aaacaaaataaaagc

SEQ ID NO: 400548 - DNA, 15 bp, Homo sapiens
taaacaaaataaaag

SEQ ID NO: 400549 - DNA, 15 bp, Homo sapiens
ataaacaaaataaaa

SEQ ID NO: 400550 - DNA, 15 bp, Homo sapiens
aataaacaaaataaa

SEQ ID NO: 400551 - DNA, 15 bp, Homo sapiens
aaataaacaaaataa

SEQ ID NO: 400552 - DNA, 15 bp, Homo sapiens
caaataaacaaaata

SEQ ID NO: 400553 - DNA, 15 bp, Homo sapiens
tcaaataaacaaaat

SEQ ID NO: 400554 - DNA, 15 bp, Homo sapiens
atcaaataaacaaaa

SEQ ID NO: 400555 - DNA, 15 bp, Homo sapiens
aatcaaataaacaaa

SEQ ID NO: 400556 - DNA, 15 bp, Homo sapiens
aaatcaaataaacaa

SEQ ID NO: 400557 - DNA, 15 bp, Homo sapiens
aaaatcaaataaaca

SEQ ID NO: 400558 - DNA, 15 bp, Homo sapiens
caaaatcaaataaac

SEQ ID NO: 400559 - DNA, 15 bp, Homo sapiens
tcaaaatcaaataaa

SEQ ID NO: 400560 - DNA, 15 bp, Homo sapiens
ctcaaaatcaaataa

SEQ ID NO: 400561 - DNA, 15 bp, Homo sapiens
tctcaaaatcaaata

SEQ ID NO: 400562 - DNA, 15 bp, Homo sapiens
ttctcaaaatcaaat

SEQ ID NO: 400563 - DNA, 15 bp, Homo sapiens
attctcaaaatcaaa

SEQ ID NO: 400564 - DNA, 15 bp, Homo sapiens
aattctcaaaatcaa

SEQ ID NO: 400565 - DNA, 15 bp, Homo sapiens
caattctcaaaatca

SEQ ID NO: 400566 - DNA, 15 bp, Homo sapiens
tcaattctcaaaatc

SEQ ID NO: 400567 - DNA, 15 bp, Homo sapiens
gtcaattctcaaaat

SEQ ID NO: 400568 - DNA, 15 bp, Homo sapiens
tgtcaattctcaaaa

SEQ ID NO: 400569 - DNA, 15 bp, Homo sapiens
ctgtcaattctcaaa

SEQ ID NO: 400570 - DNA, 15 bp, Homo sapiens
actgtcaattctcaa

SEQ ID NO: 400571 - DNA, 15 bp, Homo sapiens
tactgtcaattctca

SEQ ID NO: 400572 - DNA, 15 bp, Homo sapiens
ctactgtcaattctc

SEQ ID NO: 400573 - DNA, 15 bp, Homo sapiens
cctactgtcaattct

SEQ ID NO: 400574 - DNA, 15 bp, Homo sapiens
tcctactgtcaattc

SEQ ID NO: 400575 - DNA, 15 bp, Homo sapiens
ttcctactgtcaatt

SEQ ID NO: 400576 - DNA, 15 bp, Homo sapiens
attcctactgtcaat

SEQ ID NO: 400577 - DNA, 15 bp, Homo sapiens
tattcctactgtcaa

SEQ ID NO: 400578 - DNA, 15 bp, Homo sapiens
ttattcctactgtca

SEQ ID NO: 400579 - DNA, 15 bp, Homo sapiens
cttattcctactgtc

SEQ ID NO: 400580 - DNA, 15 bp, Homo sapiens
gcttattcctactgt

SEQ ID NO: 400581 - DNA, 15 bp, Homo sapiens
ggcttattcctactg

SEQ ID NO: 400582 - DNA, 15 bp, Homo sapiens
aggcttattcctact

SEQ ID NO: 400583 - DNA, 15 bp, Homo sapiens
caggcttattcctac

SEQ ID NO: 400584 - DNA, 15 bp, Homo sapiens
ccaggcttattccta

SEQ ID NO: 400585 - DNA, 15 bp, Homo sapiens
cccaggcttattcct

SEQ ID NO: 400586 - DNA, 15 bp, Homo sapiens
acccaggcttattcc

SEQ ID NO: 400587 - DNA, 15 bp, Homo sapiens
tacccaggcttattc

SEQ ID NO: 400588 - DNA, 15 bp, Homo sapiens
ttacccaggcttatt

SEQ ID NO: 400589 - DNA, 15 bp, Homo sapiens
tttacccaggcttat

SEQ ID NO: 400590 - DNA, 15 bp, Homo sapiens
gtttacccaggctta

SEQ ID NO: 400591 - DNA, 15 bp, Homo sapiens
tgtttacccaggctt

SEQ ID NO: 400592 - DNA, 15 bp, Homo sapiens
ctgtttacccaggct

SEQ ID NO: 400593 - DNA, 15 bp, Homo sapiens
gctgtttacccaggc

SEQ ID NO: 400594 - DNA, 15 bp, Homo sapiens
tgctgtttacccagg

SEQ ID NO: 400595 - DNA, 15 bp, Homo sapiens
ctgctgtttacccag

SEQ ID NO: 400596 - DNA, 15 bp, Homo sapiens
actgctgtttaccca

SEQ ID NO: 400597 - DNA, 15 bp, Homo sapiens
cactgctgtttaccc

SEQ ID NO: 400598 - DNA, 15 bp, Homo sapiens
gcactgctgtttacc

SEQ ID NO: 400599 - DNA, 15 bp, Homo sapiens
agcactgctgtttac

SEQ ID NO: 400600 - DNA, 15 bp, Homo sapiens
tagcactgctgttta

SEQ ID NO: 400601 - DNA, 15 bp, Homo sapiens
ctagcactgctgttt

SEQ ID NO: 400602 - DNA, 15 bp, Homo sapiens
cctagcactgctgtt

SEQ ID NO: 400603 - DNA, 15 bp, Homo sapiens
gcctagcactgctgt

SEQ ID NO: 400604 - DNA, 15 bp, Homo sapiens
agcctagcactgctg

SEQ ID NO: 400605 - DNA, 15 bp, Homo sapiens
gagcctagcactgct

SEQ ID NO: 400606 - DNA, 15 bp, Homo sapiens
agagcctagcactgc

SEQ ID NO: 400607 - DNA, 15 bp, Homo sapiens
cagagcctagcactg

SEQ ID NO: 400608 - DNA, 15 bp, Homo sapiens
gcagagcctagcact

SEQ ID NO: 400609 - DNA, 15 bp, Homo sapiens
tgcagagcctagcac

SEQ ID NO: 400610 - DNA, 15 bp, Homo sapiens
gtgcagagcctagca

SEQ ID NO: 400611 - DNA, 15 bp, Homo sapiens
agtgcagagcctagc

SEQ ID NO: 400612 - DNA, 15 bp, Homo sapiens
aagtgcagagcctag

SEQ ID NO: 400613 - DNA, 15 bp, Homo sapiens
aaagtgcagagccta

SEQ ID NO: 400614 - DNA, 15 bp, Homo sapiens
aaaagtgcagagcct

SEQ ID NO: 400615 - DNA, 15 bp, Homo sapiens
aaaaagtgcagagcc

SEQ ID NO: 400616 - DNA, 15 bp, Homo sapiens
caaaaagtgcagagc

SEQ ID NO: 400617 - DNA, 15 bp, Homo sapiens
acaaaaagtgcagag

SEQ ID NO: 400618 - DNA, 15 bp, Homo sapiens
aacaaaaagtgcaga

SEQ ID NO: 400619 - DNA, 15 bp, Homo sapiens
aaacaaaaagtgcag

SEQ ID NO: 400620 - DNA, 15 bp, Homo sapiens
aaaacaaaaagtgca

SEQ ID NO: 400621 - DNA, 15 bp, Homo sapiens
gaaaacaaaaagtgc

SEQ ID NO: 400622 - DNA, 15 bp, Homo sapiens
agaaaacaaaaagtg

SEQ ID NO: 400623 - DNA, 15 bp, Homo sapiens
tagaaaacaaaaagt

SEQ ID NO: 400624 - DNA, 15 bp, Homo sapiens
atagaaaacaaaaag

SEQ ID NO: 400625 - DNA, 15 bp, Homo sapiens
gatagaaaacaaaaa

SEQ ID NO: 400626 - DNA, 15 bp, Homo sapiens
ggatagaaaacaaaa

SEQ ID NO: 400627 - DNA, 15 bp, Homo sapiens
tggatagaaaacaaa

SEQ ID NO: 400628 - DNA, 15 bp, Homo sapiens
ctggatagaaaacaa

SEQ ID NO: 400629 - DNA, 15 bp, Homo sapiens
gctggatagaaaaca

SEQ ID NO: 400630 - DNA, 15 bp, Homo sapiens
agctggatagaaaac

SEQ ID NO: 400631 - DNA, 15 bp, Homo sapiens
tagctggatagaaaa

SEQ ID NO: 400632 - DNA, 15 bp, Homo sapiens
gtagctggatagaaa

SEQ ID NO: 400633 - DNA, 15 bp, Homo sapiens
agtagctggatagaa

SEQ ID NO: 400634 - DNA, 15 bp, Homo sapiens
cagtagctggataga

SEQ ID NO: 400635 - DNA, 15 bp, Homo sapiens
acagtagctggatag

SEQ ID NO: 400636 - DNA, 15 bp, Homo sapiens
cacagtagctggata

SEQ ID NO: 400637 - DNA, 15 bp, Homo sapiens
gcacagtagctggat

SEQ ID NO: 400638 - DNA, 15 bp, Homo sapiens
tgcacagtagctgga

SEQ ID NO: 400639 - DNA, 15 bp, Homo sapiens
ttgcacagtagctgg

SEQ ID NO: 400640 - DNA, 15 bp, Homo sapiens
tttgcacagtagctg

SEQ ID NO: 400641 - DNA, 15 bp, Homo sapiens
atttgcacagtagct

SEQ ID NO: 400642 - DNA, 15 bp, Homo sapiens
catttgcacagtagc

SEQ ID NO: 400643 - DNA, 15 bp, Homo sapiens
tcatttgcacagtag

SEQ ID NO: 400644 - DNA, 15 bp, Homo sapiens
ctcatttgcacagta

SEQ ID NO: 400645 - DNA, 15 bp, Homo sapiens
tctcatttgcacagt

SEQ ID NO: 400646 - DNA, 15 bp, Homo sapiens
atctcatttgcacag

SEQ ID NO: 400647 - DNA, 15 bp, Homo sapiens
tatctcatttgcaca

SEQ ID NO: 400648 - DNA, 15 bp, Homo sapiens
atatctcatttgcac

SEQ ID NO: 400649 - DNA, 15 bp, Homo sapiens
catatctcatttgca

SEQ ID NO: 400650 - DNA, 15 bp, Homo sapiens
tcatatctcatttgc

SEQ ID NO: 400651 - DNA, 15 bp, Homo sapiens
atcatatctcatttg

SEQ ID NO: 400652 - DNA, 15 bp, Homo sapiens
tatcatatctcattt

SEQ ID NO: 400653 - DNA, 15 bp, Homo sapiens
ttatcatatctcatt

SEQ ID NO: 400654 - DNA, 15 bp, Homo sapiens
attatcatatctcat

SEQ ID NO: 400655 - DNA, 15 bp, Homo sapiens
aattatcatatctca

SEQ ID NO: 400656 - DNA, 15 bp, Homo sapiens
aaattatcatatctc

SEQ ID NO: 400657 - DNA, 15 bp, Homo sapiens
taaattatcatatct

SEQ ID NO: 400658 - DNA, 15 bp, Homo sapiens
ttaaattatcatatc

SEQ ID NO: 400659 - DNA, 15 bp, Homo sapiens
cttaaattatcatat

SEQ ID NO: 400660 - DNA, 15 bp, Homo sapiens
ccttaaattatcata

SEQ ID NO: 400661 - DNA, 15 bp, Homo sapiens
gccttaaattatcat

SEQ ID NO: 400662 - DNA, 15 bp, Homo sapiens
ggccttaaattatca

SEQ ID NO: 400663 - DNA, 15 bp, Homo sapiens
gggccttaaattatc

SEQ ID NO: 400664 - DNA, 15 bp, Homo sapiens
ggggccttaaattat

SEQ ID NO: 400665 - DNA, 15 bp, Homo sapiens
aggggccttaaatta

SEQ ID NO: 400666 - DNA, 15 bp, Homo sapiens
aaggggccttaaatt

SEQ ID NO: 400667 - DNA, 15 bp, Homo sapiens
aaaggggccttaaat

SEQ ID NO: 400668 - DNA, 15 bp, Homo sapiens
aaaaggggccttaaa

SEQ ID NO: 400669 - DNA, 15 bp, Homo sapiens
caaaaggggccttaa

SEQ ID NO: 400670 - DNA, 15 bp, Homo sapiens
ccaaaaggggcctta

SEQ ID NO: 400671 - DNA, 15 bp, Homo sapiens
cccaaaaggggcctt

SEQ ID NO: 400672 - DNA, 15 bp, Homo sapiens
tcccaaaaggggcct

SEQ ID NO: 400673 - DNA, 15 bp, Homo sapiens
ctcccaaaaggggcc

SEQ ID NO: 400674 - DNA, 15 bp, Homo sapiens
tctcccaaaaggggc

SEQ ID NO: 400675 - DNA, 15 bp, Homo sapiens
ttctcccaaaagggg

SEQ ID NO: 400676 - DNA, 15 bp, Homo sapiens
gttctcccaaaaggg

SEQ ID NO: 400677 - DNA, 15 bp, Homo sapiens
ggttctcccaaaagg

SEQ ID NO: 400678 - DNA, 15 bp, Homo sapiens
tggttctcccaaaag

SEQ ID NO: 400679 - DNA, 15 bp, Homo sapiens
atggttctcccaaaa

SEQ ID NO: 400680 - DNA, 15 bp, Homo sapiens
catggttctcccaaa

SEQ ID NO: 400681 - DNA, 15 bp, Homo sapiens
acatggttctcccaa

SEQ ID NO: 400682 - DNA, 15 bp, Homo sapiens
aacatggttctccca

SEQ ID NO: 400683 - DNA, 15 bp, Homo sapiens
taacatggttctccc

SEQ ID NO: 400684 - DNA, 15 bp, Homo sapiens
ttaacatggttctcc

SEQ ID NO: 400685 - DNA, 15 bp, Homo sapiens
tttaacatggttctc

SEQ ID NO: 400686 - DNA, 15 bp, Homo sapiens
ttttaacatggttct

SEQ ID NO: 400687 - DNA, 15 bp, Homo sapiens
tttttaacatggttc

SEQ ID NO: 400688 - DNA, 15 bp, Homo sapiens
ctttttaacatggtt

SEQ ID NO: 400689 - DNA, 15 bp, Homo sapiens
tctttttaacatggt

SEQ ID NO: 400690 - DNA, 15 bp, Homo sapiens
ctctttttaacatgg

SEQ ID NO: 400691 - DNA, 15 bp, Homo sapiens
tctctttttaacatg

SEQ ID NO: 400692 - DNA, 15 bp, Homo sapiens
ttctctttttaacat

SEQ ID NO: 400693 - DNA, 15 bp, Homo sapiens
tttctctttttaaca

SEQ ID NO: 400694 - DNA, 15 bp, Homo sapiens
ctttctctttttaac

SEQ ID NO: 400695 - DNA, 15 bp, Homo sapiens
cctttctctttttaa

SEQ ID NO: 400696 - DNA, 15 bp, Homo sapiens
tcctttctcttttta

SEQ ID NO: 400697 - DNA, 15 bp, Homo sapiens
ttcctttctcttttt

SEQ ID NO: 400698 - DNA, 15 bp, Homo sapiens
cttcctttctctttt

SEQ ID NO: 400699 - DNA, 15 bp, Homo sapiens
gcttcctttctcttt

SEQ ID NO: 400700 - DNA, 15 bp, Homo sapiens
tgcttcctttctctt

SEQ ID NO: 400701 - DNA, 15 bp, Homo sapiens
ctgcttcctttctct

SEQ ID NO: 400702 - DNA, 15 bp, Homo sapiens
cctgcttcctttctc

SEQ ID NO: 400703 - DNA, 15 bp, Homo sapiens
ccctgcttcctttct

SEQ ID NO: 400704 - DNA, 15 bp, Homo sapiens
tccctgcttcctttc

SEQ ID NO: 400705 - DNA, 15 bp, Homo sapiens
gtccctgcttccttt

SEQ ID NO: 400706 - DNA, 15 bp, Homo sapiens
tgtccctgcttcctt

SEQ ID NO: 400707 - DNA, 15 bp, Homo sapiens
ctgtccctgcttcct

SEQ ID NO: 400708 - DNA, 15 bp, Homo sapiens
cctgtccctgcttcc

SEQ ID NO: 400709 - DNA, 15 bp, Homo sapiens
ccctgtccctgcttc

SEQ ID NO: 400710 - DNA, 15 bp, Homo sapiens
cccctgtccctgctt

SEQ ID NO: 400711 - DNA, 15 bp, Homo sapiens
gcccctgtccctgct

SEQ ID NO: 400712 - DNA, 15 bp, Homo sapiens
tgcccctgtccctgc

SEQ ID NO: 400713 - DNA, 15 bp, Homo sapiens
atgcccctgtccctg

SEQ ID NO: 400714 - DNA, 15 bp, Homo sapiens
aatgcccctgtccct

SEQ ID NO: 400715 - DNA, 15 bp, Homo sapiens
aaatgcccctgtccc

SEQ ID NO: 400716 - DNA, 15 bp, Homo sapiens
taaatgcccctgtcc

SEQ ID NO: 400717 - DNA, 15 bp, Homo sapiens
ctaaatgcccctgtc

SEQ ID NO: 400718 - DNA, 15 bp, Homo sapiens
cctaaatgcccctgt

SEQ ID NO: 400719 - DNA, 15 bp, Homo sapiens
acctaaatgcccctg

SEQ ID NO: 400720 - DNA, 15 bp, Homo sapiens
cacctaaatgcccct

SEQ ID NO: 400721 - DNA, 15 bp, Homo sapiens
ccacctaaatgcccc

SEQ ID NO: 400722 - DNA, 15 bp, Homo sapiens
gccacctaaatgccc

SEQ ID NO: 400723 - DNA, 15 bp, Homo sapiens
tgccacctaaatgcc

SEQ ID NO: 400724 - DNA, 15 bp, Homo sapiens
ttgccacctaaatgc

SEQ ID NO: 400725 - DNA, 15 bp, Homo sapiens
attgccacctaaatg

SEQ ID NO: 400726 - DNA, 15 bp, Homo sapiens
aattgccacctaaat

SEQ ID NO: 400727 - DNA, 15 bp, Homo sapiens
caattgccacctaaa

SEQ ID NO: 400728 - DNA, 15 bp, Homo sapiens
acaattgccacctaa

SEQ ID NO: 400729 - DNA, 15 bp, Homo sapiens
gacaattgccaccta

SEQ ID NO: 400730 - DNA, 15 bp, Homo sapiens
agacaattgccacct

SEQ ID NO: 400731 - DNA, 15 bp, Homo sapiens
aagacaattgccacc

SEQ ID NO: 400732 - DNA, 15 bp, Homo sapiens
aaagacaattgccac

SEQ ID NO: 400733 - DNA, 15 bp, Homo sapiens
gaaagacaattgcca

SEQ ID NO: 400734 - DNA, 15 bp, Homo sapiens
tgaaagacaattgcc

SEQ ID NO: 400735 - DNA, 15 bp, Homo sapiens
gtgaaagacaattgc

SEQ ID NO: 400736 - DNA, 15 bp, Homo sapiens
agtgaaagacaattg

SEQ ID NO: 400737 - DNA, 15 bp, Homo sapiens
cagtgaaagacaatt

SEQ ID NO: 400738 - DNA, 15 bp, Homo sapiens
ccagtgaaagacaat

SEQ ID NO: 400739 - DNA, 15 bp, Homo sapiens
cccagtgaaagacaa

SEQ ID NO: 400740 - DNA, 15 bp, Homo sapiens
ccccagtgaaagaca

SEQ ID NO: 400741 - DNA, 15 bp, Homo sapiens
accccagtgaaagac

SEQ ID NO: 400742 - DNA, 15 bp, Homo sapiens
taccccagtgaaaga

SEQ ID NO: 400743 - DNA, 15 bp, Homo sapiens
ctaccccagtgaaag

SEQ ID NO: 400744 - DNA, 15 bp, Homo sapiens
gctaccccagtgaaa

SEQ ID NO: 400745 - DNA, 15 bp, Homo sapiens
ggctaccccagtgaa

SEQ ID NO: 400746 - DNA, 15 bp, Homo sapiens
tggctaccccagtga

SEQ ID NO: 400747 - DNA, 15 bp, Homo sapiens
atggctaccccagtg

SEQ ID NO: 400748 - DNA, 15 bp, Homo sapiens
tatggctaccccagt

SEQ ID NO: 400749 - DNA, 15 bp, Homo sapiens
atatggctaccccag

SEQ ID NO: 400750 - DNA, 15 bp, Homo sapiens
tatatggctacccca

SEQ ID NO: 400751 - DNA, 15 bp, Homo sapiens
atatatggctacccc

SEQ ID NO: 400752 - DNA, 15 bp, Homo sapiens
gatatatggctaccc

SEQ ID NO: 400753 - DNA, 15 bp, Homo sapiens
tgatatatggctacc

SEQ ID NO: 400754 - DNA, 15 bp, Homo sapiens
atgatatatggctac

SEQ ID NO: 400755 - DNA, 15 bp, Homo sapiens
tatgatatatggcta

SEQ ID NO: 400756 - DNA, 15 bp, Homo sapiens
atatgatatatggct

SEQ ID NO: 400757 - DNA, 15 bp, Homo sapiens
aatatgatatatggc

SEQ ID NO: 400758 - DNA, 15 bp, Homo sapiens
gaatatgatatatgg

SEQ ID NO: 400759 - DNA, 15 bp, Homo sapiens
ggaatatgatatatg

SEQ ID NO: 400760 - DNA, 15 bp, Homo sapiens
gggaatatgatatat

SEQ ID NO: 400761 - DNA, 15 bp, Homo sapiens
tgggaatatgatata

SEQ ID NO: 400762 - DNA, 15 bp, Homo sapiens
atgggaatatgatat

SEQ ID NO: 400763 - DNA, 15 bp, Homo sapiens
catgggaatatgata

SEQ ID NO: 400764 - DNA, 15 bp, Homo sapiens
ccatgggaatatgat

SEQ ID NO: 400765 - DNA, 15 bp, Homo sapiens
accatgggaatatga

SEQ ID NO: 400766 - DNA, 15 bp, Homo sapiens
taccatgggaatatg

SEQ ID NO: 400767 - DNA, 15 bp, Homo sapiens
ataccatgggaatat

SEQ ID NO: 400768 - DNA, 15 bp, Homo sapiens
cataccatgggaata

SEQ ID NO: 400769 - DNA, 15 bp, Homo sapiens
tcataccatgggaat

SEQ ID NO: 400770 - DNA, 15 bp, Homo sapiens
atcataccatgggaa

SEQ ID NO: 400771 - DNA, 15 bp, Homo sapiens
tatcataccatggga

SEQ ID NO: 400772 - DNA, 15 bp, Homo sapiens
atatcataccatggg

SEQ ID NO: 400773 - DNA, 15 bp, Homo sapiens
tatatcataccatgg

SEQ ID NO: 400774 - DNA, 15 bp, Homo sapiens
atatatcataccatg

SEQ ID NO: 400775 - DNA, 15 bp, Homo sapiens
gatatatcataccat

SEQ ID NO: 400776 - DNA, 15 bp, Homo sapiens
tgatatatcatacca

SEQ ID NO: 400777 - DNA, 15 bp, Homo sapiens
atgatatatcatacc

SEQ ID NO: 400778 - DNA, 15 bp, Homo sapiens
tatgatatatcatac

SEQ ID NO: 400779 - DNA, 15 bp, Homo sapiens
atatgatatatcata

SEQ ID NO: 400780 - DNA, 15 bp, Homo sapiens
tatatgatatatcat

SEQ ID NO: 400781 - DNA, 15 bp, Homo sapiens
gtatatgatatatca

SEQ ID NO: 400782 - DNA, 15 bp, Homo sapiens
tgtatatgatatatc

SEQ ID NO: 400783 - DNA, 15 bp, Homo sapiens
atgtatatgatatat

SEQ ID NO: 400784 - DNA, 15 bp, Homo sapiens
tatgtatatgatata

SEQ ID NO: 400785 - DNA, 15 bp, Homo sapiens
atatgtatatgatat

SEQ ID NO: 400786 - DNA, 15 bp, Homo sapiens
catatgtatatgata

SEQ ID NO: 400787 - DNA, 15 bp, Homo sapiens
ccatatgtatatgat

SEQ ID NO: 400788 - DNA, 15 bp, Homo sapiens
accatatgtatatga

SEQ ID NO: 400789 - DNA, 15 bp, Homo sapiens
taccatatgtatatg

SEQ ID NO: 400790 - DNA, 15 bp, Homo sapiens
ataccatatgtatat

SEQ ID NO: 400791 - DNA, 15 bp, Homo sapiens
cataccatatgtata

SEQ ID NO: 400792 - DNA, 15 bp, Homo sapiens
tcataccatatgtat

SEQ ID NO: 400793 - DNA, 15 bp, Homo sapiens
atcataccatatgta

SEQ ID NO: 400794 - DNA, 15 bp, Homo sapiens
tatcataccatatgt

SEQ ID NO: 400795 - DNA, 15 bp, Homo sapiens
atatcataccatatg

SEQ ID NO: 400796 - DNA, 15 bp, Homo sapiens
catatcataccatat

SEQ ID NO: 400797 - DNA, 15 bp, Homo sapiens
tcatatcataccata

SEQ ID NO: 400798 - DNA, 15 bp, Homo sapiens
atcatatcataccat

SEQ ID NO: 400799 - DNA, 15 bp, Homo sapiens
tatcatatcatacca

SEQ ID NO: 400800 - DNA, 15 bp, Homo sapiens
atatcatatcatacc

SEQ ID NO: 400801 - DNA, 15 bp, Homo sapiens
gatatcatatcatac

SEQ ID NO: 400802 - DNA, 15 bp, Homo sapiens
tgatatcatatcata

SEQ ID NO: 400803 - DNA, 15 bp, Homo sapiens
atgatatcatatcat

SEQ ID NO: 400804 - DNA, 15 bp, Homo sapiens
tatgatatcatatca

SEQ ID NO: 400805 - DNA, 15 bp, Homo sapiens
atatgatatcatatc

SEQ ID NO: 400806 - DNA, 15 bp, Homo sapiens
tatatgatatcatat

SEQ ID NO: 400807 - DNA, 15 bp, Homo sapiens
gtatatgatatcata

SEQ ID NO: 400808 - DNA, 15 bp, Homo sapiens
agtatatgatatcat

SEQ ID NO: 400809 - DNA, 15 bp, Homo sapiens
aagtatatgatatca

SEQ ID NO: 400810 - DNA, 15 bp, Homo sapiens
aaagtatatgatatc

SEQ ID NO: 400811 - DNA, 15 bp, Homo sapiens
aaaagtatatgatat

SEQ ID NO: 400812 - DNA, 15 bp, Homo sapiens
caaaagtatatgata

SEQ ID NO: 400813 - DNA, 15 bp, Homo sapiens
ccaaaagtatatgat

SEQ ID NO: 400814 - DNA, 15 bp, Homo sapiens
tccaaaagtatatga

SEQ ID NO: 400815 - DNA, 15 bp, Homo sapiens
atccaaaagtatatg

SEQ ID NO: 400816 - DNA, 15 bp, Homo sapiens
aatccaaaagtatat

SEQ ID NO: 400817 - DNA, 15 bp, Homo sapiens
aaatccaaaagtata

SEQ ID NO: 400818 - DNA, 15 bp, Homo sapiens
caaatccaaaagtat

SEQ ID NO: 400819 - DNA, 15 bp, Homo sapiens
ccaaatccaaaagta

SEQ ID NO: 400820 - DNA, 15 bp, Homo sapiens
gccaaatccaaaagt

SEQ ID NO: 400821 - DNA, 15 bp, Homo sapiens
agccaaatccaaaag

SEQ ID NO: 400822 - DNA, 15 bp, Homo sapiens
cagccaaatccaaaa

SEQ ID NO: 400823 - DNA, 15 bp, Homo sapiens
gcagccaaatccaaa

SEQ ID NO: 400824 - DNA, 15 bp, Homo sapiens
ggcagccaaatccaa

SEQ ID NO: 400825 - DNA, 15 bp, Homo sapiens
gggcagccaaatcca

SEQ ID NO: 400826 - DNA, 15 bp, Homo sapiens
tgggcagccaaatcc

SEQ ID NO: 400827 - DNA, 15 bp, Homo sapiens
gtgggcagccaaatc

SEQ ID NO: 400828 - DNA, 15 bp, Homo sapiens
agtgggcagccaaat

SEQ ID NO: 400829 - DNA, 15 bp, Homo sapiens
aagtgggcagccaaa

SEQ ID NO: 400830 - DNA, 15 bp, Homo sapiens
caagtgggcagccaa

SEQ ID NO: 400831 - DNA, 15 bp, Homo sapiens
ccaagtgggcagcca

SEQ ID NO: 400832 - DNA, 15 bp, Homo sapiens
accaagtgggcagcc

SEQ ID NO: 400833 - DNA, 15 bp, Homo sapiens
taccaagtgggcagc

SEQ ID NO: 400834 - DNA, 15 bp, Homo sapiens
ataccaagtgggcag

SEQ ID NO: 400835 - DNA, 15 bp, Homo sapiens
aataccaagtgggca

SEQ ID NO: 400836 - DNA, 15 bp, Homo sapiens
taataccaagtgggc

SEQ ID NO: 400837 - DNA, 15 bp, Homo sapiens
ataataccaagtggg

SEQ ID NO: 400838 - DNA, 15 bp, Homo sapiens
cataataccaagtgg

SEQ ID NO: 400839 - DNA, 15 bp, Homo sapiens
tcataataccaagtg

SEQ ID NO: 400840 - DNA, 15 bp, Homo sapiens
ctcataataccaagt

SEQ ID NO: 400841 - DNA, 15 bp, Homo sapiens
tctcataataccaag

SEQ ID NO: 400842 - DNA, 15 bp, Homo sapiens
atctcataataccaa

SEQ ID NO: 400843 - DNA, 15 bp, Homo sapiens
tatctcataatacca

SEQ ID NO: 400844 - DNA, 15 bp, Homo sapiens
atatctcataatacc

SEQ ID NO: 400845 - DNA, 15 bp, Homo sapiens
aatatctcataatac

SEQ ID NO: 400846 - DNA, 15 bp, Homo sapiens
aaatatctcataata

SEQ ID NO: 400847 - DNA, 15 bp, Homo sapiens
caaatatctcataat

SEQ ID NO: 400848 - DNA, 15 bp, Homo sapiens
gcaaatatctcataa

SEQ ID NO: 400849 - DNA, 15 bp, Homo sapiens
tgcaaatatctcata

SEQ ID NO: 400850 - DNA, 15 bp, Homo sapiens
atgcaaatatctcat

SEQ ID NO: 400851 - DNA, 15 bp, Homo sapiens
gatgcaaatatctca

SEQ ID NO: 400852 - DNA, 15 bp, Homo sapiens
tgatgcaaatatctc

SEQ ID NO: 400853 - DNA, 15 bp, Homo sapiens
atgatgcaaatatct

SEQ ID NO: 400854 - DNA, 15 bp, Homo sapiens
tatgatgcaaatatc

SEQ ID NO: 400855 - DNA, 15 bp, Homo sapiens
ttatgatgcaaatat

SEQ ID NO: 400856 - DNA, 15 bp, Homo sapiens
attatgatgcaaata

SEQ ID NO: 400857 - DNA, 15 bp, Homo sapiens
tattatgatgcaaat

SEQ ID NO: 400858 - DNA, 15 bp, Homo sapiens
ttattatgatgcaaa

SEQ ID NO: 400859 - DNA, 15 bp, Homo sapiens
tttattatgatgcaa

SEQ ID NO: 400860 - DNA, 15 bp, Homo sapiens
ttttattatgatgca

SEQ ID NO: 400861 - DNA, 15 bp, Homo sapiens
attttattatgatgc

SEQ ID NO: 400862 - DNA, 15 bp, Homo sapiens
cattttattatgatg

SEQ ID NO: 400863 - DNA, 15 bp, Homo sapiens
gcattttattatgat

SEQ ID NO: 400864 - DNA, 15 bp, Homo sapiens
agcattttattatga

SEQ ID NO: 400865 - DNA, 15 bp, Homo sapiens
gagcattttattatg

SEQ ID NO: 400866 - DNA, 15 bp, Homo sapiens
agagcattttattat

SEQ ID NO: 400867 - DNA, 15 bp, Homo sapiens
cagagcattttatta

SEQ ID NO: 400868 - DNA, 15 bp, Homo sapiens
gcagagcattttatt

SEQ ID NO: 400869 - DNA, 15 bp, Homo sapiens
tgcagagcattttat

SEQ ID NO: 400870 - DNA, 15 bp, Homo sapiens
atgcagagcatttta

SEQ ID NO: 400871 - DNA, 15 bp, Homo sapiens
aatgcagagcatttt

SEQ ID NO: 400872 - DNA, 15 bp, Homo sapiens
aaatgcagagcattt

SEQ ID NO: 400873 - DNA, 15 bp, Homo sapiens
aaaatgcagagcatt

SEQ ID NO: 400874 - DNA, 15 bp, Homo sapiens
caaaatgcagagcat

SEQ ID NO: 400875 - DNA, 15 bp, Homo sapiens
ccaaaatgcagagca

SEQ ID NO: 400876 - DNA, 15 bp, Homo sapiens
accaaaatgcagagc

SEQ ID NO: 400877 - DNA, 15 bp, Homo sapiens
taccaaaatgcagag

SEQ ID NO: 400878 - DNA, 15 bp, Homo sapiens
ctaccaaaatgcaga

SEQ ID NO: 400879 - DNA, 15 bp, Homo sapiens
tctaccaaaatgcag

SEQ ID NO: 400880 - DNA, 15 bp, Homo sapiens
ttctaccaaaatgca

SEQ ID NO: 400881 - DNA, 15 bp, Homo sapiens
tttctaccaaaatgc

SEQ ID NO: 400882 - DNA, 15 bp, Homo sapiens
ctttctaccaaaatg

SEQ ID NO: 400883 - DNA, 15 bp, Homo sapiens
gctttctaccaaaat

SEQ ID NO: 400884 - DNA, 15 bp, Homo sapiens
ggctttctaccaaaa

SEQ ID NO: 400885 - DNA, 15 bp, Homo sapiens
gggctttctaccaaa

SEQ ID NO: 400886 - DNA, 15 bp, Homo sapiens
agggctttctaccaa

SEQ ID NO: 400887 - DNA, 15 bp, Homo sapiens
tagggctttctacca

SEQ ID NO: 400888 - DNA, 15 bp, Homo sapiens
ctagggctttctacc

SEQ ID NO: 400889 - DNA, 15 bp, Homo sapiens
actagggctttctac

SEQ ID NO: 400890 - DNA, 15 bp, Homo sapiens
aactagggctttcta

SEQ ID NO: 400891 - DNA, 15 bp, Homo sapiens
caactagggctttct

SEQ ID NO: 400892 - DNA, 15 bp, Homo sapiens
gcaactagggctttc

SEQ ID NO: 400893 - DNA, 15 bp, Homo sapiens
agcaactagggcttt

SEQ ID NO: 400894 - DNA, 15 bp, Homo sapiens
aagcaactagggctt

SEQ ID NO: 400895 - DNA, 15 bp, Homo sapiens
caagcaactagggct

SEQ ID NO: 400896 - DNA, 15 bp, Homo sapiens
tcaagcaactagggc

SEQ ID NO: 400897 - DNA, 15 bp, Homo sapiens
ttcaagcaactaggg

SEQ ID NO: 400898 - DNA, 15 bp, Homo sapiens
attcaagcaactagg

SEQ ID NO: 400899 - DNA, 15 bp, Homo sapiens
gattcaagcaactag

SEQ ID NO: 400900 - DNA, 15 bp, Homo sapiens
agattcaagcaacta

SEQ ID NO: 400901 - DNA, 15 bp, Homo sapiens
gagattcaagcaact

SEQ ID NO: 400902 - DNA, 15 bp, Homo sapiens
agagattcaagcaac

SEQ ID NO: 400903 - DNA, 15 bp, Homo sapiens
gagagattcaagcaa

SEQ ID NO: 400904 - DNA, 15 bp, Homo sapiens
tgagagattcaagca

SEQ ID NO: 400905 - DNA, 15 bp, Homo sapiens
ttgagagattcaagc

SEQ ID NO: 400906 - DNA, 15 bp, Homo sapiens
attgagagattcaag

SEQ ID NO: 400907 - DNA, 15 bp, Homo sapiens
gattgagagattcaa

SEQ ID NO: 400908 - DNA, 15 bp, Homo sapiens
agattgagagattca

SEQ ID NO: 400909 - DNA, 15 bp, Homo sapiens
tagattgagagattc

SEQ ID NO: 400910 - DNA, 15 bp, Homo sapiens
ttagattgagagatt

SEQ ID NO: 400911 - DNA, 15 bp, Homo sapiens
tttagattgagagat

SEQ ID NO: 400912 - DNA, 15 bp, Homo sapiens
gtttagattgagaga

SEQ ID NO: 400913 - DNA, 15 bp, Homo sapiens
agtttagattgagag

SEQ ID NO: 400914 - DNA, 15 bp, Homo sapiens
gagtttagattgaga

SEQ ID NO: 400915 - DNA, 15 bp, Homo sapiens
tgagtttagattgag

SEQ ID NO: 400916 - DNA, 15 bp, Homo sapiens
ctgagtttagattga

SEQ ID NO: 400917 - DNA, 15 bp, Homo sapiens
actgagtttagattg

SEQ ID NO: 400918 - DNA, 15 bp, Homo sapiens
aactgagtttagatt

SEQ ID NO: 400919 - DNA, 15 bp, Homo sapiens
aaactgagtttagat

SEQ ID NO: 400920 - DNA, 15 bp, Homo sapiens
gaaactgagtttaga

SEQ ID NO: 400921 - DNA, 15 bp, Homo sapiens
tgaaactgagtttag

SEQ ID NO: 400922 - DNA, 15 bp, Homo sapiens
ttgaaactgagttta

SEQ ID NO: 400923 - DNA, 15 bp, Homo sapiens
tttgaaactgagttt

SEQ ID NO: 400924 - DNA, 15 bp, Homo sapiens
atttgaaactgagtt

SEQ ID NO: 400925 - DNA, 15 bp, Homo sapiens
gatttgaaactgagt

SEQ ID NO: 400926 - DNA, 15 bp, Homo sapiens
ggatttgaaactgag

SEQ ID NO: 400927 - DNA, 15 bp, Homo sapiens
aggatttgaaactga

SEQ ID NO: 400928 - DNA, 15 bp, Homo sapiens
aaggatttgaaactg

SEQ ID NO: 400929 - DNA, 15 bp, Homo sapiens
aaaggatttgaaact

SEQ ID NO: 400930 - DNA, 15 bp, Homo sapiens
gaaaggatttgaaac

SEQ ID NO: 400931 - DNA, 15 bp, Homo sapiens
ggaaaggatttgaaa

SEQ ID NO: 400932 - DNA, 15 bp, Homo sapiens
aggaaaggatttgaa

SEQ ID NO: 400933 - DNA, 15 bp, Homo sapiens
taggaaaggatttga

SEQ ID NO: 400934 - DNA, 15 bp, Homo sapiens
ctaggaaaggatttg

SEQ ID NO: 400935 - DNA, 15 bp, Homo sapiens
cctaggaaaggattt

SEQ ID NO: 400936 - DNA, 15 bp, Homo sapiens
ccctaggaaaggatt

SEQ ID NO: 400937 - DNA, 15 bp, Homo sapiens
cccctaggaaaggat

SEQ ID NO: 400938 - DNA, 15 bp, Homo sapiens
acccctaggaaagga

SEQ ID NO: 400939 - DNA, 15 bp, Homo sapiens
tacccctaggaaagg

SEQ ID NO: 400940 - DNA, 15 bp, Homo sapiens
atacccctaggaaag

SEQ ID NO: 400941 - DNA, 15 bp, Homo sapiens
catacccctaggaaa

SEQ ID NO: 400942 - DNA, 15 bp, Homo sapiens
tcatacccctaggaa

SEQ ID NO: 400943 - DNA, 15 bp, Homo sapiens
ctcatacccctagga

SEQ ID NO: 400944 - DNA, 15 bp, Homo sapiens
actcatacccctagg

SEQ ID NO: 400945 - DNA, 15 bp, Homo sapiens
tactcatacccctag

SEQ ID NO: 400946 - DNA, 15 bp, Homo sapiens
ctactcataccccta

SEQ ID NO: 400947 - DNA, 15 bp, Homo sapiens
cctactcatacccct

SEQ ID NO: 400948 - DNA, 15 bp, Homo sapiens
acctactcatacccc

SEQ ID NO: 400949 - DNA, 15 bp, Homo sapiens
cacctactcataccc

SEQ ID NO: 400950 - DNA, 15 bp, Homo sapiens
acacctactcatacc

SEQ ID NO: 400951 - DNA, 15 bp, Homo sapiens
cacacctactcatac

SEQ ID NO: 400952 - DNA, 15 bp, Homo sapiens
tcacacctactcata

SEQ ID NO: 400953 - DNA, 15 bp, Homo sapiens
atcacacctactcat

SEQ ID NO: 400954 - DNA, 15 bp, Homo sapiens
tatcacacctactca

SEQ ID NO: 400955 - DNA, 15 bp, Homo sapiens
ttatcacacctactc

SEQ ID NO: 400956 - DNA, 15 bp, Homo sapiens
gttatcacacctact

SEQ ID NO: 400957 - DNA, 15 bp, Homo sapiens
tgttatcacacctac

SEQ ID NO: 400958 - DNA, 15 bp, Homo sapiens
ctgttatcacaccta

SEQ ID NO: 400959 - DNA, 15 bp, Homo sapiens
actgttatcacacct

SEQ ID NO: 400960 - DNA, 15 bp, Homo sapiens
aactgttatcacacc

SEQ ID NO: 400961 - DNA, 15 bp, Homo sapiens
aaactgttatcacac

SEQ ID NO: 400962 - DNA, 15 bp, Homo sapiens
gaaactgttatcaca

SEQ ID NO: 400963 - DNA, 15 bp, Homo sapiens
tgaaactgttatcac

SEQ ID NO: 400964 - DNA, 15 bp, Homo sapiens
ctgaaactgttatca

SEQ ID NO: 400965 - DNA, 15 bp, Homo sapiens
tctgaaactgttatc

SEQ ID NO: 400966 - DNA, 15 bp, Homo sapiens
gtctgaaactgttat

SEQ ID NO: 400967 - DNA, 15 bp, Homo sapiens
agtctgaaactgtta

SEQ ID NO: 400968 - DNA, 15 bp, Homo sapiens
aagtctgaaactgtt

SEQ ID NO: 400969 - DNA, 15 bp, Homo sapiens
aaagtctgaaactgt

SEQ ID NO: 400970 - DNA, 15 bp, Homo sapiens
aaaagtctgaaactg

SEQ ID NO: 400971 - DNA, 15 bp, Homo sapiens
aaaaagtctgaaact

SEQ ID NO: 400972 - DNA, 15 bp, Homo sapiens
aaaaaagtctgaaac

SEQ ID NO: 400973 - DNA, 15 bp, Homo sapiens
aaaaaaagtctgaaa

SEQ ID NO: 400974 - DNA, 15 bp, Homo sapiens
gaaaaaaagtctgaa

SEQ ID NO: 400975 - DNA, 15 bp, Homo sapiens
agaaaaaaagtctga

SEQ ID NO: 400976 - DNA, 15 bp, Homo sapiens
aagaaaaaaagtctg

SEQ ID NO: 400977 - DNA, 15 bp, Homo sapiens
aaagaaaaaaagtct

SEQ ID NO: 400978 - DNA, 15 bp, Homo sapiens
gaaagaaaaaaagtc

SEQ ID NO: 400979 - DNA, 15 bp, Homo sapiens
tgaaagaaaaaaagt

SEQ ID NO: 400980 - DNA, 15 bp, Homo sapiens
ctgaaagaaaaaaag

SEQ ID NO: 400981 - DNA, 15 bp, Homo sapiens
gctgaaagaaaaaaa

SEQ ID NO: 400982 - DNA, 15 bp, Homo sapiens
cgctgaaagaaaaaa

SEQ ID NO: 400983 - DNA, 15 bp, Homo sapiens
gcgctgaaagaaaaa

SEQ ID NO: 400984 - DNA, 15 bp, Homo sapiens
agcgctgaaagaaaa

SEQ ID NO: 400985 - DNA, 15 bp, Homo sapiens
aagcgctgaaagaaa

SEQ ID NO: 400986 - DNA, 15 bp, Homo sapiens
gaagcgctgaaagaa

SEQ ID NO: 400987 - DNA, 15 bp, Homo sapiens
tgaagcgctgaaaga

SEQ ID NO: 400988 - DNA, 15 bp, Homo sapiens
ctgaagcgctgaaag

SEQ ID NO: 400989 - DNA, 15 bp, Homo sapiens
gctgaagcgctgaaa

SEQ ID NO: 400990 - DNA, 15 bp, Homo sapiens
ggctgaagcgctgaa

SEQ ID NO: 400991 - DNA, 15 bp, Homo sapiens
aggctgaagcgctga

SEQ ID NO: 400992 - DNA, 15 bp, Homo sapiens
taggctgaagcgctg

SEQ ID NO: 400993 - DNA, 15 bp, Homo sapiens
ttaggctgaagcgct

SEQ ID NO: 400994 - DNA, 15 bp, Homo sapiens
tttaggctgaagcgc

SEQ ID NO: 400995 - DNA, 15 bp, Homo sapiens
ctttaggctgaagcg

SEQ ID NO: 400996 - DNA, 15 bp, Homo sapiens
cctttaggctgaagc

SEQ ID NO: 400997 - DNA, 15 bp, Homo sapiens
gcctttaggctgaag

SEQ ID NO: 400998 - DNA, 15 bp, Homo sapiens
ggcctttaggctgaa

SEQ ID NO: 400999 - DNA, 15 bp, Homo sapiens
cggcctttaggctga

SEQ ID NO: 401000 - DNA, 15 bp, Homo sapiens
gcggcctttaggctg

SEQ ID NO: 401001 - DNA, 15 bp, Homo sapiens
agcggcctttaggct

SEQ ID NO: 401002 - DNA, 15 bp, Homo sapiens
aagcggcctttaggc

SEQ ID NO: 401003 - DNA, 15 bp, Homo sapiens
taagcggcctttagg

SEQ ID NO: 401004 - DNA, 15 bp, Homo sapiens
gtaagcggcctttag

SEQ ID NO: 401005 - DNA, 15 bp, Homo sapiens
tgtaagcggccttta

SEQ ID NO: 401006 - DNA, 15 bp, Homo sapiens
ctgtaagcggccttt

SEQ ID NO: 401007 - DNA, 15 bp, Homo sapiens
tctgtaagcggcctt

SEQ ID NO: 401008 - DNA, 15 bp, Homo sapiens
ttctgtaagcggcct

SEQ ID NO: 401009 - DNA, 15 bp, Homo sapiens
attctgtaagcggcc

SEQ ID NO: 401010 - DNA, 15 bp, Homo sapiens
aattctgtaagcggc

SEQ ID NO: 401011 - DNA, 15 bp, Homo sapiens
gaattctgtaagcgg

SEQ ID NO: 401012 - DNA, 15 bp, Homo sapiens
tgaattctgtaagcg

SEQ ID NO: 401013 - DNA, 15 bp, Homo sapiens
ctgaattctgtaagc

SEQ ID NO: 401014 - DNA, 15 bp, Homo sapiens
gctgaattctgtaag

SEQ ID NO: 401015 - DNA, 15 bp, Homo sapiens
tgctgaattctgtaa

SEQ ID NO: 401016 - DNA, 15 bp, Homo sapiens
ctgctgaattctgta

SEQ ID NO: 401017 - DNA, 15 bp, Homo sapiens
cctgctgaattctgt

SEQ ID NO: 401018 - DNA, 15 bp, Homo sapiens
acctgctgaattctg

SEQ ID NO: 401019 - DNA, 15 bp, Homo sapiens
cacctgctgaattct

SEQ ID NO: 401020 - DNA, 15 bp, Homo sapiens
acacctgctgaattc

SEQ ID NO: 401021 - DNA, 15 bp, Homo sapiens
cacacctgctgaatt

SEQ ID NO: 401022 - DNA, 15 bp, Homo sapiens
gcacacctgctgaat

SEQ ID NO: 401023 - DNA, 15 bp, Homo sapiens
agcacacctgctgaa

SEQ ID NO: 401024 - DNA, 15 bp, Homo sapiens
aagcacacctgctga

SEQ ID NO: 401025 - DNA, 15 bp, Homo sapiens
gaagcacacctgctg

SEQ ID NO: 401026 - DNA, 15 bp, Homo sapiens
ggaagcacacctgct

SEQ ID NO: 401027 - DNA, 15 bp, Homo sapiens
aggaagcacacctgc

SEQ ID NO: 401028 - DNA, 15 bp, Homo sapiens
taggaagcacacctg

SEQ ID NO: 401029 - DNA, 15 bp, Homo sapiens
ttaggaagcacacct

SEQ ID NO: 401030 - DNA, 15 bp, Homo sapiens
attaggaagcacacc

SEQ ID NO: 401031 - DNA, 15 bp, Homo sapiens
tattaggaagcacac

SEQ ID NO: 401032 - DNA, 15 bp, Homo sapiens
ttattaggaagcaca

SEQ ID NO: 401033 - DNA, 15 bp, Homo sapiens
cttattaggaagcac

SEQ ID NO: 401034 - DNA, 15 bp, Homo sapiens
gcttattaggaagca

SEQ ID NO: 401035 - DNA, 15 bp, Homo sapiens
agcttattaggaagc

SEQ ID NO: 401036 - DNA, 15 bp, Homo sapiens
aagcttattaggaag

SEQ ID NO: 401037 - DNA, 15 bp, Homo sapiens
gaagcttattaggaa

SEQ ID NO: 401038 - DNA, 15 bp, Homo sapiens
ggaagcttattagga

SEQ ID NO: 401039 - DNA, 15 bp, Homo sapiens
aggaagcttattagg

SEQ ID NO: 401040 - DNA, 15 bp, Homo sapiens
gaggaagcttattag

SEQ ID NO: 401041 - DNA, 15 bp, Homo sapiens
ggaggaagcttatta

SEQ ID NO: 401042 - DNA, 15 bp, Homo sapiens
aggaggaagcttatt

SEQ ID NO: 401043 - DNA, 15 bp, Homo sapiens
aaggaggaagcttat

SEQ ID NO: 401044 - DNA, 15 bp, Homo sapiens
gaaggaggaagctta

SEQ ID NO: 401045 - DNA, 15 bp, Homo sapiens
agaaggaggaagctt

SEQ ID NO: 401046 - DNA, 15 bp, Homo sapiens
gagaaggaggaagct

SEQ ID NO: 401047 - DNA, 15 bp, Homo sapiens
agagaaggaggaagc

SEQ ID NO: 401048 - DNA, 15 bp, Homo sapiens
tagagaaggaggaag

SEQ ID NO: 401049 - DNA, 15 bp, Homo sapiens
ttagagaaggaggaa

SEQ ID NO: 401050 - DNA, 15 bp, Homo sapiens
gttagagaaggagga

SEQ ID NO: 401051 - DNA, 15 bp, Homo sapiens
tgttagagaaggagg

SEQ ID NO: 401052 - DNA, 15 bp, Homo sapiens
gtgttagagaaggag

SEQ ID NO: 401053 - DNA, 15 bp, Homo sapiens
tgtgttagagaagga

SEQ ID NO: 401054 - DNA, 15 bp, Homo sapiens
ttgtgttagagaagg

SEQ ID NO: 401055 - DNA, 15 bp, Homo sapiens
cttgtgttagagaag

SEQ ID NO: 401056 - DNA, 15 bp, Homo sapiens
acttgtgttagagaa

SEQ ID NO: 401057 - DNA, 15 bp, Homo sapiens
tacttgtgttagaga

SEQ ID NO: 401058 - DNA, 15 bp, Homo sapiens
ttacttgtgttagag

SEQ ID NO: 401059 - DNA, 15 bp, Homo sapiens
tttacttgtgttaga

SEQ ID NO: 401060 - DNA, 15 bp, Homo sapiens
ttttacttgtgttag

SEQ ID NO: 401061 - DNA, 15 bp, Homo sapiens
tttttacttgtgtta

SEQ ID NO: 401062 - DNA, 15 bp, Homo sapiens
ctttttacttgtgtt

SEQ ID NO: 401063 - DNA, 15 bp, Homo sapiens
gctttttacttgtgt

SEQ ID NO: 401064 - DNA, 15 bp, Homo sapiens
ggctttttacttgtg

SEQ ID NO: 401065 - DNA, 15 bp, Homo sapiens
tggctttttacttgt

SEQ ID NO: 401066 - DNA, 15 bp, Homo sapiens
gtggctttttacttg

SEQ ID NO: 401067 - DNA, 15 bp, Homo sapiens
tgtggctttttactt

SEQ ID NO: 401068 - DNA, 15 bp, Homo sapiens
ctgtggctttttact

SEQ ID NO: 401069 - DNA, 15 bp, Homo sapiens
cctgtggctttttac

SEQ ID NO: 401070 - DNA, 15 bp, Homo sapiens
acctgtggcttttta

SEQ ID NO: 401071 - DNA, 15 bp, Homo sapiens
aacctgtggcttttt

SEQ ID NO: 401072 - DNA, 15 bp, Homo sapiens
caacctgtggctttt

SEQ ID NO: 401073 - DNA, 15 bp, Homo sapiens
ccaacctgtggcttt

SEQ ID NO: 401074 - DNA, 15 bp, Homo sapiens
tccaacctgtggctt

SEQ ID NO: 401075 - DNA, 15 bp, Homo sapiens
gtccaacctgtggct

SEQ ID NO: 401076 - DNA, 15 bp, Homo sapiens
ggtccaacctgtggc

SEQ ID NO: 401077 - DNA, 15 bp, Homo sapiens
gggtccaacctgtgg

SEQ ID NO: 401078 - DNA, 15 bp, Homo sapiens
tgggtccaacctgtg

SEQ ID NO: 401079 - DNA, 15 bp, Homo sapiens
ctgggtccaacctgt

SEQ ID NO: 401080 - DNA, 15 bp, Homo sapiens
gctgggtccaacctg

SEQ ID NO: 401081 - DNA, 15 bp, Homo sapiens
tgctgggtccaacct

SEQ ID NO: 401082 - DNA, 15 bp, Homo sapiens
atgctgggtccaacc

SEQ ID NO: 401083 - DNA, 15 bp, Homo sapiens
aatgctgggtccaac

SEQ ID NO: 401084 - DNA, 15 bp, Homo sapiens
caatgctgggtccaa

SEQ ID NO: 401085 - DNA, 15 bp, Homo sapiens
acaatgctgggtcca

SEQ ID NO: 401086 - DNA, 15 bp, Homo sapiens
cacaatgctgggtcc

SEQ ID NO: 401087 - DNA, 15 bp, Homo sapiens
ccacaatgctgggtc

SEQ ID NO: 401088 - DNA, 15 bp, Homo sapiens
gccacaatgctgggt

SEQ ID NO: 401089 - DNA, 15 bp, Homo sapiens
agccacaatgctggg

SEQ ID NO: 401090 - DNA, 15 bp, Homo sapiens
gagccacaatgctgg

SEQ ID NO: 401091 - DNA, 15 bp, Homo sapiens
agagccacaatgctg

SEQ ID NO: 401092 - DNA, 15 bp, Homo sapiens
tagagccacaatgct

SEQ ID NO: 401093 - DNA, 15 bp, Homo sapiens
ctagagccacaatgc

SEQ ID NO: 401094 - DNA, 15 bp, Homo sapiens
cctagagccacaatg

SEQ ID NO: 401095 - DNA, 15 bp, Homo sapiens
tcctagagccacaat

SEQ ID NO: 401096 - DNA, 15 bp, Homo sapiens
ttcctagagccacaa

SEQ ID NO: 401097 - DNA, 15 bp, Homo sapiens
attcctagagccaca

SEQ ID NO: 401098 - DNA, 15 bp, Homo sapiens
cattcctagagccac

SEQ ID NO: 401099 - DNA, 15 bp, Homo sapiens
gcattcctagagcca

SEQ ID NO: 401100 - DNA, 15 bp, Homo sapiens
agcattcctagagcc

SEQ ID NO: 401101 - DNA, 15 bp, Homo sapiens
cagcattcctagagc

SEQ ID NO: 401102 - DNA, 15 bp, Homo sapiens
ccagcattcctagag

SEQ ID NO: 401103 - DNA, 15 bp, Homo sapiens
gccagcattcctaga

SEQ ID NO: 401104 - DNA, 15 bp, Homo sapiens
tgccagcattcctag

SEQ ID NO: 401105 - DNA, 15 bp, Homo sapiens
ttgccagcattccta

SEQ ID NO: 401106 - DNA, 15 bp, Homo sapiens
attgccagcattcct

SEQ ID NO: 401107 - DNA, 15 bp, Homo sapiens
tattgccagcattcc

SEQ ID NO: 401108 - DNA, 15 bp, Homo sapiens
gtattgccagcattc

SEQ ID NO: 401109 - DNA, 15 bp, Homo sapiens
tgtattgccagcatt

SEQ ID NO: 401110 - DNA, 15 bp, Homo sapiens
ttgtattgccagcat

SEQ ID NO: 401111 - DNA, 15 bp, Homo sapiens
cttgtattgccagca

SEQ ID NO: 401112 - DNA, 15 bp, Homo sapiens
acttgtattgccagc

SEQ ID NO: 401113 - DNA, 15 bp, Homo sapiens
cacttgtattgccag

SEQ ID NO: 401114 - DNA, 15 bp, Homo sapiens
ccacttgtattgcca

SEQ ID NO: 401115 - DNA, 15 bp, Homo sapiens
tccacttgtattgcc

SEQ ID NO: 401116 - DNA, 15 bp, Homo sapiens
ctccacttgtattgc

SEQ ID NO: 401117 - DNA, 15 bp, Homo sapiens
tctccacttgtattg

SEQ ID NO: 401118 - DNA, 15 bp, Homo sapiens
ctctccacttgtatt

SEQ ID NO: 401119 - DNA, 15 bp, Homo sapiens
tctctccacttgtat

SEQ ID NO: 401120 - DNA, 15 bp, Homo sapiens
ctctctccacttgta

SEQ ID NO: 401121 - DNA, 15 bp, Homo sapiens
gctctctccacttgt

SEQ ID NO: 401122 - DNA, 15 bp, Homo sapiens
tgctctctccacttg

SEQ ID NO: 401123 - DNA, 15 bp, Homo sapiens
ctgctctctccactt

SEQ ID NO: 401124 - DNA, 15 bp, Homo sapiens
gctgctctctccact

SEQ ID NO: 401125 - DNA, 15 bp, Homo sapiens
agctgctctctccac

SEQ ID NO: 401126 - DNA, 15 bp, Homo sapiens
gagctgctctctcca

SEQ ID NO: 401127 - DNA, 15 bp, Homo sapiens
agagctgctctctcc

SEQ ID NO: 401128 - DNA, 15 bp, Homo sapiens
cagagctgctctctc

SEQ ID NO: 401129 - DNA, 15 bp, Homo sapiens
gcagagctgctctct

SEQ ID NO: 401130 - DNA, 15 bp, Homo sapiens
ggcagagctgctctc

SEQ ID NO: 401131 - DNA, 15 bp, Homo sapiens
gggcagagctgctct

SEQ ID NO: 401132 - DNA, 15 bp, Homo sapiens
agggcagagctgctc

SEQ ID NO: 401133 - DNA, 15 bp, Homo sapiens
cagggcagagctgct

SEQ ID NO: 401134 - DNA, 15 bp, Homo sapiens
tcagggcagagctgc

SEQ ID NO: 401135 - DNA, 15 bp, Homo sapiens
ttcagggcagagctg

SEQ ID NO: 401136 - DNA, 15 bp, Homo sapiens
gttcagggcagagct

SEQ ID NO: 401137 - DNA, 15 bp, Homo sapiens
tgttcagggcagagc

SEQ ID NO: 401138 - DNA, 15 bp, Homo sapiens
ctgttcagggcagag

SEQ ID NO: 401139 - DNA, 15 bp, Homo sapiens
gctgttcagggcaga

SEQ ID NO: 401140 - DNA, 15 bp, Homo sapiens
agctgttcagggcag

SEQ ID NO: 401141 - DNA, 15 bp, Homo sapiens
cagctgttcagggca

SEQ ID NO: 401142 - DNA, 15 bp, Homo sapiens
gcagctgttcagggc

SEQ ID NO: 401143 - DNA, 15 bp, Homo sapiens
ggcagctgttcaggg

SEQ ID NO: 401144 - DNA, 15 bp, Homo sapiens
tggcagctgttcagg

SEQ ID NO: 401145 - DNA, 15 bp, Homo sapiens
atggcagctgttcag

SEQ ID NO: 401146 - DNA, 15 bp, Homo sapiens
catggcagctgttca

SEQ ID NO: 401147 - DNA, 15 bp, Homo sapiens
ccatggcagctgttc

SEQ ID NO: 401148 - DNA, 15 bp, Homo sapiens
tccatggcagctgtt

SEQ ID NO: 401149 - DNA, 15 bp, Homo sapiens
ttccatggcagctgt

SEQ ID NO: 401150 - DNA, 15 bp, Homo sapiens
cttccatggcagctg

SEQ ID NO: 401151 - DNA, 15 bp, Homo sapiens
acttccatggcagct

SEQ ID NO: 401152 - DNA, 15 bp, Homo sapiens
gacttccatggcagc

SEQ ID NO: 401153 - DNA, 15 bp, Homo sapiens
cgacttccatggcag

SEQ ID NO: 401154 - DNA, 15 bp, Homo sapiens
gcgacttccatggca

SEQ ID NO: 401155 - DNA, 15 bp, Homo sapiens
tgcgacttccatggc

SEQ ID NO: 401156 - DNA, 15 bp, Homo sapiens
atgcgacttccatgg

SEQ ID NO: 401157 - DNA, 15 bp, Homo sapiens
catgcgacttccatg

SEQ ID NO: 401158 - DNA, 15 bp, Homo sapiens
ccatgcgacttccat

SEQ ID NO: 401159 - DNA, 15 bp, Homo sapiens
tccatgcgacttcca

SEQ ID NO: 401160 - DNA, 15 bp, Homo sapiens
gtccatgcgacttcc

SEQ ID NO: 401161 - DNA, 15 bp, Homo sapiens
tgtccatgcgacttc

SEQ ID NO: 401162 - DNA, 15 bp, Homo sapiens
ttgtccatgcgactt

SEQ ID NO: 401163 - DNA, 15 bp, Homo sapiens
gttgtccatgcgact

SEQ ID NO: 401164 - DNA, 15 bp, Homo sapiens
ggttgtccatgcgac

SEQ ID NO: 401165 - DNA, 15 bp, Homo sapiens
cggttgtccatgcga

SEQ ID NO: 401166 - DNA, 15 bp, Homo sapiens
ccggttgtccatgcg

SEQ ID NO: 401167 - DNA, 15 bp, Homo sapiens
tccggttgtccatgc

SEQ ID NO: 401168 - DNA, 15 bp, Homo sapiens
ctccggttgtccatg

SEQ ID NO: 401169 - DNA, 15 bp, Homo sapiens
gctccggttgtccat

SEQ ID NO: 401170 - DNA, 15 bp, Homo sapiens
tgctccggttgtcca

SEQ ID NO: 401171 - DNA, 15 bp, Homo sapiens
ctgctccggttgtcc

SEQ ID NO: 401172 - DNA, 15 bp, Homo sapiens
actgctccggttgtc

SEQ ID NO: 401173 - DNA, 15 bp, Homo sapiens
aactgctccggttgt

SEQ ID NO: 401174 - DNA, 15 bp, Homo sapiens
caactgctccggttg

SEQ ID NO: 401175 - DNA, 15 bp, Homo sapiens
gcaactgctccggtt

SEQ ID NO: 401176 - DNA, 15 bp, Homo sapiens
ggcaactgctccggt

SEQ ID NO: 401177 - DNA, 15 bp, Homo sapiens
aggcaactgctccgg

SEQ ID NO: 401178 - DNA, 15 bp, Homo sapiens
caggcaactgctccg

SEQ ID NO: 401179 - DNA, 15 bp, Homo sapiens
tcaggcaactgctcc

SEQ ID NO: 401180 - DNA, 15 bp, Homo sapiens
ctcaggcaactgctc

SEQ ID NO: 401181 - DNA, 15 bp, Homo sapiens
gctcaggcaactgct

SEQ ID NO: 401182 - DNA, 15 bp, Homo sapiens
ggctcaggcaactgc

SEQ ID NO: 401183 - DNA, 15 bp, Homo sapiens
tggctcaggcaactg

SEQ ID NO: 401184 - DNA, 15 bp, Homo sapiens
gtggctcaggcaact

SEQ ID NO: 401185 - DNA, 15 bp, Homo sapiens
cgtggctcaggcaac

SEQ ID NO: 401186 - DNA, 15 bp, Homo sapiens
acgtggctcaggcaa

SEQ ID NO: 401187 - DNA, 15 bp, Homo sapiens
aacgtggctcaggca

SEQ ID NO: 401188 - DNA, 15 bp, Homo sapiens
aaacgtggctcaggc

SEQ ID NO: 401189 - DNA, 15 bp, Homo sapiens
aaaacgtggctcagg

SEQ ID NO: 401190 - DNA, 15 bp, Homo sapiens
caaaacgtggctcag

SEQ ID NO: 401191 - DNA, 15 bp, Homo sapiens
acaaaacgtggctca

SEQ ID NO: 401192 - DNA, 15 bp, Homo sapiens
cacaaaacgtggctc

SEQ ID NO: 401193 - DNA, 15 bp, Homo sapiens
tcacaaaacgtggct

SEQ ID NO: 401194 - DNA, 15 bp, Homo sapiens
ctcacaaaacgtggc

SEQ ID NO: 401195 - DNA, 15 bp, Homo sapiens
cctcacaaaacgtgg

SEQ ID NO: 401196 - DNA, 15 bp, Homo sapiens
gcctcacaaaacgtg

SEQ ID NO: 401197 - DNA, 15 bp, Homo sapiens
tgcctcacaaaacgt

SEQ ID NO: 401198 - DNA, 15 bp, Homo sapiens
ctgcctcacaaaacg

SEQ ID NO: 401199 - DNA, 15 bp, Homo sapiens
actgcctcacaaaac

SEQ ID NO: 401200 - DNA, 15 bp, Homo sapiens
gactgcctcacaaaa

SEQ ID NO: 401201 - DNA, 15 bp, Homo sapiens
agactgcctcacaaa

SEQ ID NO: 401202 - DNA, 15 bp, Homo sapiens
aagactgcctcacaa

SEQ ID NO: 401203 - DNA, 15 bp, Homo sapiens
gaagactgcctcaca

SEQ ID NO: 401204 - DNA, 15 bp, Homo sapiens
ggaagactgcctcac

SEQ ID NO: 401205 - DNA, 15 bp, Homo sapiens
gggaagactgcctca

SEQ ID NO: 401206 - DNA, 15 bp, Homo sapiens
ggggaagactgcctc

SEQ ID NO: 401207 - DNA, 15 bp, Homo sapiens
gggggaagactgcct

SEQ ID NO: 401208 - DNA, 15 bp, Homo sapiens
agggggaagactgcc

SEQ ID NO: 401209 - DNA, 15 bp, Homo sapiens
tagggggaagactgc

SEQ ID NO: 401210 - DNA, 15 bp, Homo sapiens
ttagggggaagactg

SEQ ID NO: 401211 - DNA, 15 bp, Homo sapiens
tttagggggaagact

SEQ ID NO: 401212 - DNA, 15 bp, Homo sapiens
gtttagggggaagac

SEQ ID NO: 401213 - DNA, 15 bp, Homo sapiens
tgtttagggggaaga

SEQ ID NO: 401214 - DNA, 15 bp, Homo sapiens
atgtttagggggaag

SEQ ID NO: 401215 - DNA, 15 bp, Homo sapiens
aatgtttagggggaa

SEQ ID NO: 401216 - DNA, 15 bp, Homo sapiens
caatgtttaggggga

SEQ ID NO: 401217 - DNA, 15 bp, Homo sapiens
ccaatgtttaggggg

SEQ ID NO: 401218 - DNA, 15 bp, Homo sapiens
accaatgtttagggg

SEQ ID NO: 401219 - DNA, 15 bp, Homo sapiens
taccaatgtttaggg

SEQ ID NO: 401220 - DNA, 15 bp, Homo sapiens
ataccaatgtttagg

SEQ ID NO: 401221 - DNA, 15 bp, Homo sapiens
aataccaatgtttag

SEQ ID NO: 401222 - DNA, 15 bp, Homo sapiens
aaataccaatgttta

SEQ ID NO: 401223 - DNA, 15 bp, Homo sapiens
aaaataccaatgttt

SEQ ID NO: 401224 - DNA, 15 bp, Homo sapiens
taaaataccaatgtt

SEQ ID NO: 401225 - DNA, 15 bp, Homo sapiens
ataaaataccaatgt

SEQ ID NO: 401226 - DNA, 15 bp, Homo sapiens
tataaaataccaatg

SEQ ID NO: 401227 - DNA, 15 bp, Homo sapiens
gtataaaataccaat

SEQ ID NO: 401228 - DNA, 15 bp, Homo sapiens
agtataaaataccaa

SEQ ID NO: 401229 - DNA, 15 bp, Homo sapiens
cagtataaaatacca

SEQ ID NO: 401230 - DNA, 15 bp, Homo sapiens
ccagtataaaatacc

SEQ ID NO: 401231 - DNA, 15 bp, Homo sapiens
accagtataaaatac

SEQ ID NO: 401232 - DNA, 15 bp, Homo sapiens
caccagtataaaata

SEQ ID NO: 401233 - DNA, 15 bp, Homo sapiens
tcaccagtataaaat

SEQ ID NO: 401234 - DNA, 15 bp, Homo sapiens
atcaccagtataaaa

SEQ ID NO: 401235 - DNA, 15 bp, Homo sapiens
aatcaccagtataaa

SEQ ID NO: 401236 - DNA, 15 bp, Homo sapiens
taatcaccagtataa

SEQ ID NO: 401237 - DNA, 15 bp, Homo sapiens
ctaatcaccagtata

SEQ ID NO: 401238 - DNA, 15 bp, Homo sapiens
cctaatcaccagtat

SEQ ID NO: 401239 - DNA, 15 bp, Homo sapiens
tcctaatcaccagta

SEQ ID NO: 401240 - DNA, 15 bp, Homo sapiens
atcctaatcaccagt

SEQ ID NO: 401241 - DNA, 15 bp, Homo sapiens
tatcctaatcaccag

SEQ ID NO: 401242 - DNA, 15 bp, Homo sapiens
ttatcctaatcacca

SEQ ID NO: 401243 - DNA, 15 bp, Homo sapiens
attatcctaatcacc

SEQ ID NO: 401244 - DNA, 15 bp, Homo sapiens
aattatcctaatcac

SEQ ID NO: 401245 - DNA, 15 bp, Homo sapiens
aaattatcctaatca

SEQ ID NO: 401246 - DNA, 15 bp, Homo sapiens
taaattatcctaatc

SEQ ID NO: 401247 - DNA, 15 bp, Homo sapiens
ctaaattatcctaat

SEQ ID NO: 401248 - DNA, 15 bp, Homo sapiens
gctaaattatcctaa

SEQ ID NO: 401249 - DNA, 15 bp, Homo sapiens
tgctaaattatccta

SEQ ID NO: 401250 - DNA, 15 bp, Homo sapiens
atgctaaattatcct

SEQ ID NO: 401251 - DNA, 15 bp, Homo sapiens
aatgctaaattatcc

SEQ ID NO: 401252 - DNA, 15 bp, Homo sapiens
aaatgctaaattatc

SEQ ID NO: 401253 - DNA, 15 bp, Homo sapiens
caaatgctaaattat

SEQ ID NO: 401254 - DNA, 15 bp, Homo sapiens
ccaaatgctaaatta

SEQ ID NO: 401255 - DNA, 15 bp, Homo sapiens
cccaaatgctaaatt

SEQ ID NO: 401256 - DNA, 15 bp, Homo sapiens
tcccaaatgctaaat

SEQ ID NO: 401257 - DNA, 15 bp, Homo sapiens
ctcccaaatgctaaa

SEQ ID NO: 401258 - DNA, 15 bp, Homo sapiens
cctcccaaatgctaa

SEQ ID NO: 401259 - DNA, 15 bp, Homo sapiens
tcctcccaaatgcta

SEQ ID NO: 401260 - DNA, 15 bp, Homo sapiens
ttcctcccaaatgct

SEQ ID NO: 401261 - DNA, 15 bp, Homo sapiens
cttcctcccaaatgc

SEQ ID NO: 401262 - DNA, 15 bp, Homo sapiens
ccttcctcccaaatg

SEQ ID NO: 401263 - DNA, 15 bp, Homo sapiens
accttcctcccaaat

SEQ ID NO: 401264 - DNA, 15 bp, Homo sapiens
gaccttcctcccaaa

SEQ ID NO: 401265 - DNA, 15 bp, Homo sapiens
ggaccttcctcccaa

SEQ ID NO: 401266 - DNA, 15 bp, Homo sapiens
aggaccttcctccca

SEQ ID NO: 401267 - DNA, 15 bp, Homo sapiens
caggaccttcctccc

SEQ ID NO: 401268 - DNA, 15 bp, Homo sapiens
acaggaccttcctcc

SEQ ID NO: 401269 - DNA, 15 bp, Homo sapiens
cacaggaccttcctc

SEQ ID NO: 401270 - DNA, 15 bp, Homo sapiens
tcacaggaccttcct

SEQ ID NO: 401271 - DNA, 15 bp, Homo sapiens
gtcacaggaccttcc

SEQ ID NO: 401272 - DNA, 15 bp, Homo sapiens
ggtcacaggaccttc

SEQ ID NO: 401273 - DNA, 15 bp, Homo sapiens
aggtcacaggacctt

SEQ ID NO: 401274 - DNA, 15 bp, Homo sapiens
aaggtcacaggacct

SEQ ID NO: 401275 - DNA, 15 bp, Homo sapiens
caaggtcacaggacc

SEQ ID NO: 401276 - DNA, 15 bp, Homo sapiens
acaaggtcacaggac

SEQ ID NO: 401277 - DNA, 15 bp, Homo sapiens
tacaaggtcacagga

SEQ ID NO: 401278 - DNA, 15 bp, Homo sapiens
atacaaggtcacagg

SEQ ID NO: 401279 - DNA, 15 bp, Homo sapiens
aatacaaggtcacag

SEQ ID NO: 401280 - DNA, 15 bp, Homo sapiens
aaatacaaggtcaca

SEQ ID NO: 401281 - DNA, 15 bp, Homo sapiens
gaaatacaaggtcac

SEQ ID NO: 401282 - DNA, 15 bp, Homo sapiens
tgaaatacaaggtca

SEQ ID NO: 401283 - DNA, 15 bp, Homo sapiens
atgaaatacaaggtc

SEQ ID NO: 401284 - DNA, 15 bp, Homo sapiens
tatgaaatacaaggt

SEQ ID NO: 401285 - DNA, 15 bp, Homo sapiens
atatgaaatacaagg

SEQ ID NO: 401286 - DNA, 15 bp, Homo sapiens
catatgaaatacaag

SEQ ID NO: 401287 - DNA, 15 bp, Homo sapiens
tcatatgaaatacaa

SEQ ID NO: 401288 - DNA, 15 bp, Homo sapiens
ttcatatgaaataca

SEQ ID NO: 401289 - DNA, 15 bp, Homo sapiens
tttcatatgaaatac

SEQ ID NO: 401290 - DNA, 15 bp, Homo sapiens
ttttcatatgaaata

SEQ ID NO: 401291 - DNA, 15 bp, Homo sapiens
attttcatatgaaat

SEQ ID NO: 401292 - DNA, 15 bp, Homo sapiens
tattttcatatgaaa

SEQ ID NO: 401293 - DNA, 15 bp, Homo sapiens
atattttcatatgaa

SEQ ID NO: 401294 - DNA, 15 bp, Homo sapiens
catattttcatatga

SEQ ID NO: 401295 - DNA, 15 bp, Homo sapiens
gcatattttcatatg

SEQ ID NO: 401296 - DNA, 15 bp, Homo sapiens
tgcatattttcatat

SEQ ID NO: 401297 - DNA, 15 bp, Homo sapiens
ctgcatattttcata

SEQ ID NO: 401298 - DNA, 15 bp, Homo sapiens
actgcatattttcat

SEQ ID NO: 401299 - DNA, 15 bp, Homo sapiens
tactgcatattttca

SEQ ID NO: 401300 - DNA, 15 bp, Homo sapiens
atactgcatattttc

SEQ ID NO: 401301 - DNA, 15 bp, Homo sapiens
aatactgcatatttt

SEQ ID NO: 401302 - DNA, 15 bp, Homo sapiens
taatactgcatattt

SEQ ID NO: 401303 - DNA, 15 bp, Homo sapiens
gtaatactgcatatt

SEQ ID NO: 401304 - DNA, 15 bp, Homo sapiens
tgtaatactgcatat

SEQ ID NO: 401305 - DNA, 15 bp, Homo sapiens
atgtaatactgcata

SEQ ID NO: 401306 - DNA, 15 bp, Homo sapiens
aatgtaatactgcat

SEQ ID NO: 401307 - DNA, 15 bp, Homo sapiens
aaatgtaatactgca

SEQ ID NO: 401308 - DNA, 15 bp, Homo sapiens
aaaatgtaatactgc

SEQ ID NO: 401309 - DNA, 15 bp, Homo sapiens
ataaaaatgtaatac

SEQ ID NO: 401310 - DNA, 15 bp, Homo sapiens
cataaaaatgtaata

SEQ ID NO: 401311 - DNA, 15 bp, Homo sapiens
acataaaaatgtaat

SEQ ID NO: 401312 - DNA, 15 bp, Homo sapiens
aacataaaaatgtaa

SEQ ID NO: 401313 - DNA, 15 bp, Homo sapiens
taacataaaaatgta

SEQ ID NO: 401314 - DNA, 15 bp, Homo sapiens
ataacataaaaatgt

SEQ ID NO: 401315 - DNA, 15 bp, Homo sapiens
cataacataaaaatg

SEQ ID NO: 401316 - DNA, 15 bp, Homo sapiens
gcataacataaaaat

SEQ ID NO: 401317 - DNA, 15 bp, Homo sapiens
ggcataacataaaaa

SEQ ID NO: 401318 - DNA, 15 bp, Homo sapiens
gggcataacataaaa

SEQ ID NO: 401319 - DNA, 15 bp, Homo sapiens
agggcataacataaa

SEQ ID NO: 401320 - DNA, 15 bp, Homo sapiens
aagggcataacataa

SEQ ID NO: 401321 - DNA, 15 bp, Homo sapiens
taagggcataacata

SEQ ID NO: 401322 - DNA, 15 bp, Homo sapiens
ttaagggcataacat

SEQ ID NO: 401323 - DNA, 15 bp, Homo sapiens
attaagggcataaca

SEQ ID NO: 401324 - DNA, 15 bp, Homo sapiens
cattaagggcataac

SEQ ID NO: 401325 - DNA, 15 bp, Homo sapiens
gcattaagggcataa

SEQ ID NO: 401326 - DNA, 15 bp, Homo sapiens
tgcattaagggcata

SEQ ID NO: 401327 - DNA, 15 bp, Homo sapiens
gtgcattaagggcat

SEQ ID NO: 401328 - DNA, 15 bp, Homo sapiens
tgtgcattaagggca

SEQ ID NO: 401329 - DNA, 15 bp, Homo sapiens
ctgtgcattaagggc

SEQ ID NO: 401330 - DNA, 15 bp, Homo sapiens
gctgtgcattaaggg

SEQ ID NO: 401331 - DNA, 15 bp, Homo sapiens
ggctgtgcattaagg

SEQ ID NO: 401332 - DNA, 15 bp, Homo sapiens
gggctgtgcattaag

SEQ ID NO: 401333 - DNA, 15 bp, Homo sapiens
agggctgtgcattaa

SEQ ID NO: 401334 - DNA, 15 bp, Homo sapiens
tagggctgtgcatta

SEQ ID NO: 401335 - DNA, 15 bp, Homo sapiens
gtagggctgtgcatt

SEQ ID NO: 401336 - DNA, 15 bp, Homo sapiens
ggtagggctgtgcat

SEQ ID NO: 401337 - DNA, 15 bp, Homo sapiens
tggtagggctgtgca

SEQ ID NO: 401338 - DNA, 15 bp, Homo sapiens
gtggtagggctgtgc

SEQ ID NO: 401339 - DNA, 15 bp, Homo sapiens
tgtggtagggctgtg

SEQ ID NO: 401340 - DNA, 15 bp, Homo sapiens
ttgtggtagggctgt

SEQ ID NO: 401341 - DNA, 15 bp, Homo sapiens
tttgtggtagggctg

SEQ ID NO: 401342 - DNA, 15 bp, Homo sapiens
ttttgtggtagggct

SEQ ID NO: 401343 - DNA, 15 bp, Homo sapiens
cttttgtggtagggc

SEQ ID NO: 401344 - DNA, 15 bp, Homo sapiens
gcttttgtggtaggg

SEQ ID NO: 401345 - DNA, 15 bp, Homo sapiens
agcttttgtggtagg

SEQ ID NO: 401346 - DNA, 15 bp, Homo sapiens
aagcttttgtggtag

SEQ ID NO: 401347 - DNA, 15 bp, Homo sapiens
gaagcttttgtggta

SEQ ID NO: 401348 - DNA, 15 bp, Homo sapiens
ggaagcttttgtggt

SEQ ID NO: 401349 - DNA, 15 bp, Homo sapiens
gggaagcttttgtgg

SEQ ID NO: 401350 - DNA, 15 bp, Homo sapiens
tgggaagcttttgtg

SEQ ID NO: 401351 - DNA, 15 bp, Homo sapiens
ttgggaagcttttgt

SEQ ID NO: 401352 - DNA, 15 bp, Homo sapiens
cttgggaagcttttg

SEQ ID NO: 401353 - DNA, 15 bp, Homo sapiens
ccttgggaagctttt

SEQ ID NO: 401354 - DNA, 15 bp, Homo sapiens
tccttgggaagcttt

SEQ ID NO: 401355 - DNA, 15 bp, Homo sapiens
ctccttgggaagctt

SEQ ID NO: 401356 - DNA, 15 bp, Homo sapiens
tctccttgggaagct

SEQ ID NO: 401357 - DNA, 15 bp, Homo sapiens
ctctccttgggaagc

SEQ ID NO: 401358 - DNA, 15 bp, Homo sapiens
cctctccttgggaag

SEQ ID NO: 401359 - DNA, 15 bp, Homo sapiens
gcctctccttgggaa

SEQ ID NO: 401360 - DNA, 15 bp, Homo sapiens
tgcctctccttggga

SEQ ID NO: 401361 - DNA, 15 bp, Homo sapiens
ttgcctctccttggg

SEQ ID NO: 401362 - DNA, 15 bp, Homo sapiens
attgcctctccttgg

SEQ ID NO: 401363 - DNA, 15 bp, Homo sapiens
aattgcctctccttg

SEQ ID NO: 401364 - DNA, 15 bp, Homo sapiens
aaattgcctctcctt

SEQ ID NO: 401365 - DNA, 15 bp, Homo sapiens
gaaattgcctctcct

SEQ ID NO: 401366 - DNA, 15 bp, Homo sapiens
tgaaattgcctctcc

SEQ ID NO: 401367 - DNA, 15 bp, Homo sapiens
ctgaaattgcctctc

SEQ ID NO: 401368 - DNA, 15 bp, Homo sapiens
cctgaaattgcctct

SEQ ID NO: 401369 - DNA, 15 bp, Homo sapiens
gcctgaaattgcctc

SEQ ID NO: 401370 - DNA, 15 bp, Homo sapiens
agcctgaaattgcct

SEQ ID NO: 401371 - DNA, 15 bp, Homo sapiens
cagcctgaaattgcc

SEQ ID NO: 401372 - DNA, 15 bp, Homo sapiens
tcagcctgaaattgc

SEQ ID NO: 401373 - DNA, 15 bp, Homo sapiens
atcagcctgaaattg

SEQ ID NO: 401374 - DNA, 15 bp, Homo sapiens
catcagcctgaaatt

SEQ ID NO: 401375 - DNA, 15 bp, Homo sapiens
tcatcagcctgaaat

SEQ ID NO: 401376 - DNA, 15 bp, Homo sapiens
ctcatcagcctgaaa

SEQ ID NO: 401377 - DNA, 15 bp, Homo sapiens
cctcatcagcctgaa

SEQ ID NO: 401378 - DNA, 15 bp, Homo sapiens
tcctcatcagcctga

SEQ ID NO: 401379 - DNA, 15 bp, Homo sapiens
ttcctcatcagcctg

SEQ ID NO: 401380 - DNA, 15 bp, Homo sapiens
tttcctcatcagcct

SEQ ID NO: 401381 - DNA, 15 bp, Homo sapiens
ctttcctcatcagcc

SEQ ID NO: 401382 - DNA, 15 bp, Homo sapiens
cctttcctcatcagc

SEQ ID NO: 401383 - DNA, 15 bp, Homo sapiens
tcctttcctcatcag

SEQ ID NO: 401384 - DNA, 15 bp, Homo sapiens
atcctttcctcatca

SEQ ID NO: 401385 - DNA, 15 bp, Homo sapiens
aatcctttcctcatc

SEQ ID NO: 401386 - DNA, 15 bp, Homo sapiens
aaatcctttcctcat

SEQ ID NO: 401387 - DNA, 15 bp, Homo sapiens
aaaatcctttcctca

SEQ ID NO: 401388 - DNA, 15 bp, Homo sapiens
taaaatcctttcctc

SEQ ID NO: 401389 - DNA, 15 bp, Homo sapiens
ataaaatcctttcct

SEQ ID NO: 401390 - DNA, 15 bp, Homo sapiens
cataaaatcctttcc

SEQ ID NO: 401391 - DNA, 15 bp, Homo sapiens
tcataaaatcctttc

SEQ ID NO: 401392 - DNA, 15 bp, Homo sapiens
atcataaaatccttt

SEQ ID NO: 401393 - DNA, 15 bp, Homo sapiens
catcataaaatcctt

SEQ ID NO: 401394 - DNA, 15 bp, Homo sapiens
gcatcataaaatcct

SEQ ID NO: 401395 - DNA, 15 bp, Homo sapiens
ggcatcataaaatcc

SEQ ID NO: 401396 - DNA, 15 bp, Homo sapiens
tggcatcataaaatc

SEQ ID NO: 401397 - DNA, 15 bp, Homo sapiens
atggcatcataaaat

SEQ ID NO: 401398 - DNA, 15 bp, Homo sapiens
aatggcatcataaaa

SEQ ID NO: 401399 - DNA, 15 bp, Homo sapiens
aaatggcatcataaa

SEQ ID NO: 401400 - DNA, 15 bp, Homo sapiens
taaatggcatcataa

SEQ ID NO: 401401 - DNA, 15 bp, Homo sapiens
ttaaatggcatcata

SEQ ID NO: 401402 - DNA, 15 bp, Homo sapiens
tttaaatggcatcat

SEQ ID NO: 401403 - DNA, 15 bp, Homo sapiens
ctttaaatggcatca

SEQ ID NO: 401404 - DNA, 15 bp, Homo sapiens
tctttaaatggcatc

SEQ ID NO: 401405 - DNA, 15 bp, Homo sapiens
ttctttaaatggcat

SEQ ID NO: 401406 - DNA, 15 bp, Homo sapiens
tttctttaaatggca

SEQ ID NO: 401407 - DNA, 15 bp, Homo sapiens
ctttctttaaatggc

SEQ ID NO: 401408 - DNA, 15 bp, Homo sapiens
tctttctttaaatgg

SEQ ID NO: 401409 - DNA, 15 bp, Homo sapiens
ttctttctttaaatg

SEQ ID NO: 401410 - DNA, 15 bp, Homo sapiens
cttctttctttaaat

SEQ ID NO: 401411 - DNA, 15 bp, Homo sapiens
ccttctttctttaaa

SEQ ID NO: 401412 - DNA, 15 bp, Homo sapiens
gccttctttctttaa

SEQ ID NO: 401413 - DNA, 15 bp, Homo sapiens
tgccttctttcttta

SEQ ID NO: 401414 - DNA, 15 bp, Homo sapiens
ctgccttctttcttt

SEQ ID NO: 401415 - DNA, 15 bp, Homo sapiens
actgccttctttctt

SEQ ID NO: 401416 - DNA, 15 bp, Homo sapiens
gactgccttctttct

SEQ ID NO: 401417 - DNA, 15 bp, Homo sapiens
tgactgccttctttc

SEQ ID NO: 401418 - DNA, 15 bp, Homo sapiens
ttgactgccttcttt

SEQ ID NO: 401419 - DNA, 15 bp, Homo sapiens
tttgactgccttctt

SEQ ID NO: 401420 - DNA, 15 bp, Homo sapiens
atttgactgccttct

SEQ ID NO: 401421 - DNA, 15 bp, Homo sapiens
catttgactgccttc

SEQ ID NO: 401422 - DNA, 15 bp, Homo sapiens
gcatttgactgcctt

SEQ ID NO: 401423 - DNA, 15 bp, Homo sapiens
tgcatttgactgcct

SEQ ID NO: 401424 - DNA, 15 bp, Homo sapiens
ttgcatttgactgcc

SEQ ID NO: 401425 - DNA, 15 bp, Homo sapiens
attgcatttgactgc

SEQ ID NO: 401426 - DNA, 15 bp, Homo sapiens
gattgcatttgactg

SEQ ID NO: 401427 - DNA, 15 bp, Homo sapiens
tgattgcatttgact

SEQ ID NO: 401428 - DNA, 15 bp, Homo sapiens
ttgattgcatttgac

SEQ ID NO: 401429 - DNA, 15 bp, Homo sapiens
attgattgcatttga

SEQ ID NO: 401430 - DNA, 15 bp, Homo sapiens
aattgattgcatttg

SEQ ID NO: 401431 - DNA, 15 bp, Homo sapiens
taattgattgcattt

SEQ ID NO: 401432 - DNA, 15 bp, Homo sapiens
ctaattgattgcatt

SEQ ID NO: 401433 - DNA, 15 bp, Homo sapiens
tctaattgattgcat

SEQ ID NO: 401434 - DNA, 15 bp, Homo sapiens
ttctaattgattgca

SEQ ID NO: 401435 - DNA, 15 bp, Homo sapiens
attctaattgattgc

SEQ ID NO: 401436 - DNA, 15 bp, Homo sapiens
cattctaattgattg

SEQ ID NO: 401437 - DNA, 15 bp, Homo sapiens
tcattctaattgatt

SEQ ID NO: 401438 - DNA, 15 bp, Homo sapiens
ctcattctaattgat

SEQ ID NO: 401439 - DNA, 15 bp, Homo sapiens
cctcattctaattga

SEQ ID NO: 401440 - DNA, 15 bp, Homo sapiens
acctcattctaattg

SEQ ID NO: 401441 - DNA, 15 bp, Homo sapiens
tacctcattctaatt

SEQ ID NO: 401442 - DNA, 15 bp, Homo sapiens
gtacctcattctaat

SEQ ID NO: 401443 - DNA, 15 bp, Homo sapiens
tgtacctcattctaa

SEQ ID NO: 401444 - DNA, 15 bp, Homo sapiens
ttgtacctcattcta

SEQ ID NO: 401445 - DNA, 15 bp, Homo sapiens
tttgtacctcattct

SEQ ID NO: 401446 - DNA, 15 bp, Homo sapiens
ttttgtacctcattc

SEQ ID NO: 401447 - DNA, 15 bp, Homo sapiens
gttttgtacctcatt

SEQ ID NO: 401448 - DNA, 15 bp, Homo sapiens
tgttttgtacctcat

SEQ ID NO: 401449 - DNA, 15 bp, Homo sapiens
ctgttttgtacctca

SEQ ID NO: 401450 - DNA, 15 bp, Homo sapiens
tctgttttgtacctc

SEQ ID NO: 401451 - DNA, 15 bp, Homo sapiens
atctgttttgtacct

SEQ ID NO: 401452 - DNA, 15 bp, Homo sapiens
catctgttttgtacc

SEQ ID NO: 401453 - DNA, 15 bp, Homo sapiens
tcatctgttttgtac

SEQ ID NO: 401454 - DNA, 15 bp, Homo sapiens
ctcatctgttttgta

SEQ ID NO: 401455 - DNA, 15 bp, Homo sapiens
gctcatctgttttgt

SEQ ID NO: 401456 - DNA, 15 bp, Homo sapiens
agctcatctgttttg

SEQ ID NO: 401457 - DNA, 15 bp, Homo sapiens
tagctcatctgtttt

SEQ ID NO: 401458 - DNA, 15 bp, Homo sapiens
ttagctcatctgttt

SEQ ID NO: 401459 - DNA, 15 bp, Homo sapiens
attagctcatctgtt

SEQ ID NO: 401460 - DNA, 15 bp, Homo sapiens
cattagctcatctgt

SEQ ID NO: 401461 - DNA, 15 bp, Homo sapiens
ccattagctcatctg

SEQ ID NO: 401462 - DNA, 15 bp, Homo sapiens
gccattagctcatct

SEQ ID NO: 401463 - DNA, 15 bp, Homo sapiens
tgccattagctcatc

SEQ ID NO: 401464 - DNA, 15 bp, Homo sapiens
ttgccattagctcat

SEQ ID NO: 401465 - DNA, 15 bp, Homo sapiens
tttgccattagctca

SEQ ID NO: 401466 - DNA, 15 bp, Homo sapiens
ttttgccattagctc

SEQ ID NO: 401467 - DNA, 15 bp, Homo sapiens
cttttgccattagct

SEQ ID NO: 401468 - DNA, 15 bp, Homo sapiens
tcttttgccattagc

SEQ ID NO: 401469 - DNA, 15 bp, Homo sapiens
gtcttttgccattag

SEQ ID NO: 401470 - DNA, 15 bp, Homo sapiens
agtcttttgccatta

SEQ ID NO: 401471 - DNA, 15 bp, Homo sapiens
cagtcttttgccatt

SEQ ID NO: 401472 - DNA, 15 bp, Homo sapiens
tcagtcttttgccat

SEQ ID NO: 401473 - DNA, 15 bp, Homo sapiens
atcagtcttttgcca

SEQ ID NO: 401474 - DNA, 15 bp, Homo sapiens
gatcagtcttttgcc

SEQ ID NO: 401475 - DNA, 15 bp, Homo sapiens
ggatcagtcttttgc

SEQ ID NO: 401476 - DNA, 15 bp, Homo sapiens
tggatcagtcttttg

SEQ ID NO: 401477 - DNA, 15 bp, Homo sapiens
ttggatcagtctttt

SEQ ID NO: 401478 - DNA, 15 bp, Homo sapiens
tttggatcagtcttt

SEQ ID NO: 401479 - DNA, 15 bp, Homo sapiens
ttttggatcagtctt

SEQ ID NO: 401480 - DNA, 15 bp, Homo sapiens
tttttggatcagtct

SEQ ID NO: 401481 - DNA, 15 bp, Homo sapiens
ctttttggatcagtc

SEQ ID NO: 401482 - DNA, 15 bp, Homo sapiens
cctttttggatcagt

SEQ ID NO: 401483 - DNA, 15 bp, Homo sapiens
acctttttggatcag

SEQ ID NO: 401484 - DNA, 15 bp, Homo sapiens
aacctttttggatca

SEQ ID NO: 401485 - DNA, 15 bp, Homo sapiens
caacctttttggatc

SEQ ID NO: 401486 - DNA, 15 bp, Homo sapiens
ccaacctttttggat

SEQ ID NO: 401487 - DNA, 15 bp, Homo sapiens
gccaacctttttgga

SEQ ID NO: 401488 - DNA, 15 bp, Homo sapiens
ggccaacctttttgg

SEQ ID NO: 401489 - DNA, 15 bp, Homo sapiens
tggccaacctttttg

SEQ ID NO: 401490 - DNA, 15 bp, Homo sapiens
atggccaaccttttt

SEQ ID NO: 401491 - DNA, 15 bp, Homo sapiens
catggccaacctttt

SEQ ID NO: 401492 - DNA, 15 bp, Homo sapiens
ccatggccaaccttt

SEQ ID NO: 401493 - DNA, 15 bp, Homo sapiens
gccatggccaacctt

SEQ ID NO: 401494 - DNA, 15 bp, Homo sapiens
tgccatggccaacct

SEQ ID NO: 401495 - DNA, 15 bp, Homo sapiens
atgccatggccaacc

SEQ ID NO: 401496 - DNA, 15 bp, Homo sapiens
gatgccatggccaac

SEQ ID NO: 401497 - DNA, 15 bp, Homo sapiens
agatgccatggccaa

SEQ ID NO: 401498 - DNA, 15 bp, Homo sapiens
tagatgccatggcca

SEQ ID NO: 401499 - DNA, 15 bp, Homo sapiens
ttagatgccatggcc

SEQ ID NO: 401500 - DNA, 15 bp, Homo sapiens
gttagatgccatggc

SEQ ID NO: 401501 - DNA, 15 bp, Homo sapiens
tgttagatgccatgg

SEQ ID NO: 401502 - DNA, 15 bp, Homo sapiens
atgttagatgccatg

SEQ ID NO: 401503 - DNA, 15 bp, Homo sapiens
gatgttagatgccat

SEQ ID NO: 401504 - DNA, 15 bp, Homo sapiens
tgatgttagatgcca

SEQ ID NO: 401505 - DNA, 15 bp, Homo sapiens
gtgatgttagatgcc

SEQ ID NO: 401506 - DNA, 15 bp, Homo sapiens
ggtgatgttagatgc

SEQ ID NO: 401507 - DNA, 15 bp, Homo sapiens
aggtgatgttagatg

SEQ ID NO: 401508 - DNA, 15 bp, Homo sapiens
aaggtgatgttagat

SEQ ID NO: 401509 - DNA, 15 bp, Homo sapiens
caaggtgatgttaga

SEQ ID NO: 401510 - DNA, 15 bp, Homo sapiens
acaaggtgatgttag

SEQ ID NO: 401511 - DNA, 15 bp, Homo sapiens
tacaaggtgatgtta

SEQ ID NO: 401512 - DNA, 15 bp, Homo sapiens
ttacaaggtgatgtt

SEQ ID NO: 401513 - DNA, 15 bp, Homo sapiens
gttacaaggtgatgt

SEQ ID NO: 401514 - DNA, 15 bp, Homo sapiens
ggttacaaggtgatg

SEQ ID NO: 401515 - DNA, 15 bp, Homo sapiens
aggttacaaggtgat

SEQ ID NO: 401516 - DNA, 15 bp, Homo sapiens
caggttacaaggtga

SEQ ID NO: 401517 - DNA, 15 bp, Homo sapiens
tcaggttacaaggtg

SEQ ID NO: 401518 - DNA, 15 bp, Homo sapiens
ctcaggttacaaggt

SEQ ID NO: 401519 - DNA, 15 bp, Homo sapiens
actcaggttacaagg

SEQ ID NO: 401520 - DNA, 15 bp, Homo sapiens
aactcaggttacaag

SEQ ID NO: 401521 - DNA, 15 bp, Homo sapiens
taactcaggttacaa

SEQ ID NO: 401522 - DNA, 15 bp, Homo sapiens
gtaactcaggttaca

SEQ ID NO: 401523 - DNA, 15 bp, Homo sapiens
tgtaactcaggttac

SEQ ID NO: 401524 - DNA, 15 bp, Homo sapiens
ttgtaactcaggtta

SEQ ID NO: 401525 - DNA, 15 bp, Homo sapiens
tttgtaactcaggtt

SEQ ID NO: 401526 - DNA, 15 bp, Homo sapiens
atttgtaactcaggt

SEQ ID NO: 401527 - DNA, 15 bp, Homo sapiens
tatttgtaactcagg

SEQ ID NO: 401528 - DNA, 15 bp, Homo sapiens
ctatttgtaactcag

SEQ ID NO: 401529 - DNA, 15 bp, Homo sapiens
tctatttgtaactca

SEQ ID NO: 401530 - DNA, 15 bp, Homo sapiens
gtctatttgtaactc

SEQ ID NO: 401531 - DNA, 15 bp, Homo sapiens
ggtctatttgtaact

SEQ ID NO: 401532 - DNA, 15 bp, Homo sapiens
aggtctatttgtaac

SEQ ID NO: 401533 - DNA, 15 bp, Homo sapiens
aaggtctatttgtaa

SEQ ID NO: 401534 - DNA, 15 bp, Homo sapiens
aaaggtctatttgta

SEQ ID NO: 401535 - DNA, 15 bp, Homo sapiens
aaaaggtctatttgt

SEQ ID NO: 401536 - DNA, 15 bp, Homo sapiens
gaaaaggtctatttg

SEQ ID NO: 401537 - DNA, 15 bp, Homo sapiens
agaaaaggtctattt

SEQ ID NO: 401538 - DNA, 15 bp, Homo sapiens
aagaaaaggtctatt

SEQ ID NO: 401539 - DNA, 15 bp, Homo sapiens
aaagaaaaggtctat

SEQ ID NO: 401540 - DNA, 15 bp, Homo sapiens
gaaagaaaaggtcta

SEQ ID NO: 401541 - DNA, 15 bp, Homo sapiens
tgaaagaaaaggtct

SEQ ID NO: 401542 - DNA, 15 bp, Homo sapiens
ctgaaagaaaaggtc

SEQ ID NO: 401543 - DNA, 15 bp, Homo sapiens
tctgaaagaaaaggt

SEQ ID NO: 401544 - DNA, 15 bp, Homo sapiens
ttctgaaagaaaagg

SEQ ID NO: 401545 - DNA, 15 bp, Homo sapiens
attctgaaagaaaag

SEQ ID NO: 401546 - DNA, 15 bp, Homo sapiens
aattctgaaagaaaa

SEQ ID NO: 401547 - DNA, 15 bp, Homo sapiens
caattctgaaagaaa

SEQ ID NO: 401548 - DNA, 15 bp, Homo sapiens
tcaattctgaaagaa

SEQ ID NO: 401549 - DNA, 15 bp, Homo sapiens
ctcaattctgaaaga

SEQ ID NO: 401550 - DNA, 15 bp, Homo sapiens
tctcaattctgaaag

SEQ ID NO: 401551 - DNA, 15 bp, Homo sapiens
atctcaattctgaaa

SEQ ID NO: 401552 - DNA, 15 bp, Homo sapiens
tatctcaattctgaa

SEQ ID NO: 401553 - DNA, 15 bp, Homo sapiens
gtatctcaattctga

SEQ ID NO: 401554 - DNA, 15 bp, Homo sapiens
cgtatctcaattctg

SEQ ID NO: 401555 - DNA, 15 bp, Homo sapiens
ccgtatctcaattct

SEQ ID NO: 401556 - DNA, 15 bp, Homo sapiens
cccgtatctcaattc

SEQ ID NO: 401557 - DNA, 15 bp, Homo sapiens
tcccgtatctcaatt

SEQ ID NO: 401558 - DNA, 15 bp, Homo sapiens
ctcccgtatctcaat

SEQ ID NO: 401559 - DNA, 15 bp, Homo sapiens
actcccgtatctcaa

SEQ ID NO: 401560 - DNA, 15 bp, Homo sapiens
cactcccgtatctca

SEQ ID NO: 401561 - DNA, 15 bp, Homo sapiens
gcactcccgtatctc

SEQ ID NO: 401562 - DNA, 15 bp, Homo sapiens
agcactcccgtatct

SEQ ID NO: 401563 - DNA, 15 bp, Homo sapiens
cagcactcccgtatc

SEQ ID NO: 401564 - DNA, 15 bp, Homo sapiens
acagcactcccgtat

SEQ ID NO: 401565 - DNA, 15 bp, Homo sapiens
cacagcactcccgta

SEQ ID NO: 401566 - DNA, 15 bp, Homo sapiens
tcacagcactcccgt

SEQ ID NO: 401567 - DNA, 15 bp, Homo sapiens
atcacagcactcccg

SEQ ID NO: 401568 - DNA, 15 bp, Homo sapiens
gatcacagcactccc

SEQ ID NO: 401569 - DNA, 15 bp, Homo sapiens
agatcacagcactcc

SEQ ID NO: 401570 - DNA, 15 bp, Homo sapiens
aagatcacagcactc

SEQ ID NO: 401571 - DNA, 15 bp, Homo sapiens
aaagatcacagcact

SEQ ID NO: 401572 - DNA, 15 bp, Homo sapiens
aaaagatcacagcac

SEQ ID NO: 401573 - DNA, 15 bp, Homo sapiens
gaaaagatcacagca

SEQ ID NO: 401574 - DNA, 15 bp, Homo sapiens
tgaaaagatcacagc

SEQ ID NO: 401575 - DNA, 15 bp, Homo sapiens
gtgaaaagatcacag

SEQ ID NO: 401576 - DNA, 15 bp, Homo sapiens
tgtgaaaagatcaca

SEQ ID NO: 401577 - DNA, 15 bp, Homo sapiens
atgtgaaaagatcac

SEQ ID NO: 401578 - DNA, 15 bp, Homo sapiens
aatgtgaaaagatca

SEQ ID NO: 401579 - DNA, 15 bp, Homo sapiens
caatgtgaaaagatc

SEQ ID NO: 401580 - DNA, 15 bp, Homo sapiens
acaatgtgaaaagat

SEQ ID NO: 401581 - DNA, 15 bp, Homo sapiens
gacaatgtgaaaaga

SEQ ID NO: 401582 - DNA, 15 bp, Homo sapiens
ggacaatgtgaaaag

SEQ ID NO: 401583 - DNA, 15 bp, Homo sapiens
aggacaatgtgaaaa

SEQ ID NO: 401584 - DNA, 15 bp, Homo sapiens
taggacaatgtgaaa

SEQ ID NO: 401585 - DNA, 15 bp, Homo sapiens
ataggacaatgtgaa

SEQ ID NO: 401586 - DNA, 15 bp, Homo sapiens
aataggacaatgtga

SEQ ID NO: 401587 - DNA, 15 bp, Homo sapiens
caataggacaatgtg

SEQ ID NO: 401588 - DNA, 15 bp, Homo sapiens
ccaataggacaatgt

SEQ ID NO: 401589 - DNA, 15 bp, Homo sapiens
cccaataggacaatg

SEQ ID NO: 401590 - DNA, 15 bp, Homo sapiens
ccccaataggacaat

SEQ ID NO: 401591 - DNA, 15 bp, Homo sapiens
gccccaataggacaa

SEQ ID NO: 401592 - DNA, 15 bp, Homo sapiens
agccccaataggaca

SEQ ID NO: 401593 - DNA, 15 bp, Homo sapiens
cagccccaataggac

SEQ ID NO: 401594 - DNA, 15 bp, Homo sapiens
ccagccccaatagga

SEQ ID NO: 401595 - DNA, 15 bp, Homo sapiens
accagccccaatagg

SEQ ID NO: 401596 - DNA, 15 bp, Homo sapiens
caccagccccaatag

SEQ ID NO: 401597 - DNA, 15 bp, Homo sapiens
tcaccagccccaata

SEQ ID NO: 401598 - DNA, 15 bp, Homo sapiens
ctcaccagccccaat

SEQ ID NO: 401599 - DNA, 15 bp, Homo sapiens
tctcaccagccccaa

SEQ ID NO: 401600 - DNA, 15 bp, Homo sapiens
ttctcaccagcccca

SEQ ID NO: 401601 - DNA, 15 bp, Homo sapiens
attctcaccagcccc

SEQ ID NO: 401602 - DNA, 15 bp, Homo sapiens
tattctcaccagccc

SEQ ID NO: 401603 - DNA, 15 bp, Homo sapiens
atattctcaccagcc

SEQ ID NO: 401604 - DNA, 15 bp, Homo sapiens
catattctcaccagc

SEQ ID NO: 401605 - DNA, 15 bp, Homo sapiens
acatattctcaccag

SEQ ID NO: 401606 - DNA, 15 bp, Homo sapiens
aacatattctcacca

SEQ ID NO: 401607 - DNA, 15 bp, Homo sapiens
aaacatattctcacc

SEQ ID NO: 401608 - DNA, 15 bp, Homo sapiens
aaaacatattctcac

SEQ ID NO: 401609 - DNA, 15 bp, Homo sapiens
taaaacatattctca

SEQ ID NO: 401610 - DNA, 15 bp, Homo sapiens
ataaaacatattctc

SEQ ID NO: 401611 - DNA, 15 bp, Homo sapiens
aataaaacatattct

SEQ ID NO: 401612 - DNA, 15 bp, Homo sapiens
gaataaaacatattc

SEQ ID NO: 401613 - DNA, 15 bp, Homo sapiens
tgaataaaacatatt

SEQ ID NO: 401614 - DNA, 15 bp, Homo sapiens
ctgaataaaacatat

SEQ ID NO: 401615 - DNA, 15 bp, Homo sapiens
actgaataaaacata

SEQ ID NO: 401616 - DNA, 15 bp, Homo sapiens
aactgaataaaacat

SEQ ID NO: 401617 - DNA, 15 bp, Homo sapiens
aaactgaataaaaca

SEQ ID NO: 401618 - DNA, 15 bp, Homo sapiens
aaaactgaataaaac

SEQ ID NO: 401619 - DNA, 15 bp, Homo sapiens
gaaaactgaataaaa

SEQ ID NO: 401620 - DNA, 15 bp, Homo sapiens
tgaaaactgaataaa

SEQ ID NO: 401621 - DNA, 15 bp, Homo sapiens
atgaaaactgaataa

SEQ ID NO: 401622 - DNA, 15 bp, Homo sapiens
catgaaaactgaata

SEQ ID NO: 401623 - DNA, 15 bp, Homo sapiens
tcatgaaaactgaat

SEQ ID NO: 401624 - DNA, 15 bp, Homo sapiens
ttcatgaaaactgaa

SEQ ID NO: 401625 - DNA, 15 bp, Homo sapiens
tttcatgaaaactga

SEQ ID NO: 401626 - DNA, 15 bp, Homo sapiens
gtttcatgaaaactg

SEQ ID NO: 401627 - DNA, 15 bp, Homo sapiens
agtttcatgaaaact

SEQ ID NO: 401628 - DNA, 15 bp, Homo sapiens
tagtttcatgaaaac

SEQ ID NO: 401629 - DNA, 15 bp, Homo sapiens
atagtttcatgaaaa

SEQ ID NO: 401630 - DNA, 15 bp, Homo sapiens
aatagtttcatgaaa

SEQ ID NO: 401631 - DNA, 15 bp, Homo sapiens
taatagtttcatgaa

SEQ ID NO: 401632 - DNA, 15 bp, Homo sapiens
ttaatagtttcatga

SEQ ID NO: 401633 - DNA, 15 bp, Homo sapiens
tttaatagtttcatg

SEQ ID NO: 401634 - DNA, 15 bp, Homo sapiens
ttttaatagtttcat

SEQ ID NO: 401635 - DNA, 15 bp, Homo sapiens
attttaatagtttca

SEQ ID NO: 401636 - DNA, 15 bp, Homo sapiens
cattttaatagtttc

SEQ ID NO: 401637 - DNA, 15 bp, Homo sapiens
tcattttaatagttt

SEQ ID NO: 401638 - DNA, 15 bp, Homo sapiens
atcattttaatagtt

SEQ ID NO: 401639 - DNA, 15 bp, Homo sapiens
gatcattttaatagt

SEQ ID NO: 401640 - DNA, 15 bp, Homo sapiens
ggatcattttaatag

SEQ ID NO: 401641 - DNA, 15 bp, Homo sapiens
tggatcattttaata

SEQ ID NO: 401642 - DNA, 15 bp, Homo sapiens
atggatcattttaat

SEQ ID NO: 401643 - DNA, 15 bp, Homo sapiens
aatggatcattttaa

SEQ ID NO: 401644 - DNA, 15 bp, Homo sapiens
taatggatcatttta

SEQ ID NO: 401645 - DNA, 15 bp, Homo sapiens
ataatggatcatttt

SEQ ID NO: 401646 - DNA, 15 bp, Homo sapiens
tataatggatcattt

SEQ ID NO: 401647 - DNA, 15 bp, Homo sapiens
atataatggatcatt

SEQ ID NO: 401648 - DNA, 15 bp, Homo sapiens
catataatggatcat

SEQ ID NO: 401649 - DNA, 15 bp, Homo sapiens
acatataatggatca

SEQ ID NO: 401650 - DNA, 15 bp, Homo sapiens
aacatataatggatc

SEQ ID NO: 401651 - DNA, 15 bp, Homo sapiens
gaacatataatggat

SEQ ID NO: 401652 - DNA, 15 bp, Homo sapiens
tgaacatataatgga

SEQ ID NO: 401653 - DNA, 15 bp, Homo sapiens
ctgaacatataatgg

SEQ ID NO: 401654 - DNA, 15 bp, Homo sapiens
gctgaacatataatg

SEQ ID NO: 401655 - DNA, 15 bp, Homo sapiens
tgctgaacatataat

SEQ ID NO: 401656 - DNA, 15 bp, Homo sapiens
gtgctgaacatataa

SEQ ID NO: 401657 - DNA, 15 bp, Homo sapiens
tgtgctgaacatata

SEQ ID NO: 401658 - DNA, 15 bp, Homo sapiens
atgtgctgaacatat

SEQ ID NO: 401659 - DNA, 15 bp, Homo sapiens
aatgtgctgaacata

SEQ ID NO: 401660 - DNA, 15 bp, Homo sapiens
caatgtgctgaacat

SEQ ID NO: 401661 - DNA, 15 bp, Homo sapiens
acaatgtgctgaaca

SEQ ID NO: 401662 - DNA, 15 bp, Homo sapiens
cacaatgtgctgaac

SEQ ID NO: 401663 - DNA, 15 bp, Homo sapiens
acacaatgtgctgaa

SEQ ID NO: 401664 - DNA, 15 bp, Homo sapiens
aacacaatgtgctga

SEQ ID NO: 401665 - DNA, 15 bp, Homo sapiens
caacacaatgtgctg

SEQ ID NO: 401666 - DNA, 15 bp, Homo sapiens
gcaacacaatgtgct

SEQ ID NO: 401667 - DNA, 15 bp, Homo sapiens
tgcaacacaatgtgc

SEQ ID NO: 401668 - DNA, 15 bp, Homo sapiens
gtgcaacacaatgtg

SEQ ID NO: 401669 - DNA, 15 bp, Homo sapiens
tgtgcaacacaatgt

SEQ ID NO: 401670 - DNA, 15 bp, Homo sapiens
atgtgcaacacaatg

SEQ ID NO: 401671 - DNA, 15 bp, Homo sapiens
tatgtgcaacacaat

SEQ ID NO: 401672 - DNA, 15 bp, Homo sapiens
ttatgtgcaacacaa

SEQ ID NO: 401673 - DNA, 15 bp, Homo sapiens
tttatgtgcaacaca

SEQ ID NO: 401674 - DNA, 15 bp, Homo sapiens
ctttatgtgcaacac

SEQ ID NO: 401675 - DNA, 15 bp, Homo sapiens
tctttatgtgcaaca

SEQ ID NO: 401676 - DNA, 15 bp, Homo sapiens
gtctttatgtgcaac

SEQ ID NO: 401677 - DNA, 15 bp, Homo sapiens
agtctttatgtgcaa

SEQ ID NO: 401678 - DNA, 15 bp, Homo sapiens
aagtctttatgtgca

SEQ ID NO: 401679 - DNA, 15 bp, Homo sapiens
aaagtctttatgtgc

SEQ ID NO: 401680 - DNA, 15 bp, Homo sapiens
aaaagtctttatgtg

SEQ ID NO: 401681 - DNA, 15 bp, Homo sapiens
aaaaagtctttatgt

SEQ ID NO: 401682 - DNA, 15 bp, Homo sapiens
aaaaaagtctttatg

SEQ ID NO: 401683 - DNA, 15 bp, Homo sapiens
aaaaaaagtctttat

SEQ ID NO: 401684 - DNA, 15 bp, Homo sapiens
aaaaaaaagtcttta

SEQ ID NO: 401685 - DNA, 15 bp, Homo sapiens
gaaaaaaaagtcttt

SEQ ID NO: 401686 - DNA, 15 bp, Homo sapiens
agaaaaaaaagtctt

SEQ ID NO: 401687 - DNA, 15 bp, Homo sapiens
tagaaaaaaaagtct

SEQ ID NO: 401688 - DNA, 15 bp, Homo sapiens
atagaaaaaaaagtc

SEQ ID NO: 401689 - DNA, 15 bp, Homo sapiens
aatagaaaaaaaagt

SEQ ID NO: 401690 - DNA, 15 bp, Homo sapiens
caatagaaaaaaaag

SEQ ID NO: 401691 - DNA, 15 bp, Homo sapiens
acaatagaaaaaaaa

SEQ ID NO: 401692 - DNA, 15 bp, Homo sapiens
aacaatagaaaaaaa

SEQ ID NO: 401693 - DNA, 15 bp, Homo sapiens
gaacaatagaaaaaa

SEQ ID NO: 401694 - DNA, 15 bp, Homo sapiens
agaacaatagaaaaa

SEQ ID NO: 401695 - DNA, 15 bp, Homo sapiens
gagaacaatagaaaa

SEQ ID NO: 401696 - DNA, 15 bp, Homo sapiens
cgagaacaatagaaa

SEQ ID NO: 401697 - DNA, 15 bp, Homo sapiens
acgagaacaatagaa

SEQ ID NO: 401698 - DNA, 15 bp, Homo sapiens
cacgagaacaataga

SEQ ID NO: 401699 - DNA, 15 bp, Homo sapiens
acacgagaacaatag

SEQ ID NO: 401700 - DNA, 15 bp, Homo sapiens
aacacgagaacaata

SEQ ID NO: 401701 - DNA, 15 bp, Homo sapiens
gaacacgagaacaat

SEQ ID NO: 401702 - DNA, 15 bp, Homo sapiens
ggaacacgagaacaa

SEQ ID NO: 401703 - DNA, 15 bp, Homo sapiens
gggaacacgagaaca

SEQ ID NO: 401704 - DNA, 15 bp, Homo sapiens
ggggaacacgagaac

SEQ ID NO: 401705 - DNA, 15 bp, Homo sapiens
tggggaacacgagaa

SEQ ID NO: 401706 - DNA, 15 bp, Homo sapiens
ttggggaacacgaga

SEQ ID NO: 401707 - DNA, 15 bp, Homo sapiens
cttggggaacacgag

SEQ ID NO: 401708 - DNA, 15 bp, Homo sapiens
ccttggggaacacga

SEQ ID NO: 401709 - DNA, 15 bp, Homo sapiens
accttggggaacacg

SEQ ID NO: 401710 - DNA, 15 bp, Homo sapiens
gaccttggggaacac

SEQ ID NO: 401711 - DNA, 15 bp, Homo sapiens
agaccttggggaaca

SEQ ID NO: 401712 - DNA, 15 bp, Homo sapiens
aagaccttggggaac

SEQ ID NO: 401713 - DNA, 15 bp, Homo sapiens
aaagaccttggggaa

SEQ ID NO: 401714 - DNA, 15 bp, Homo sapiens
aaaagaccttgggga

SEQ ID NO: 401715 - DNA, 15 bp, Homo sapiens
taaaagaccttgggg

SEQ ID NO: 401716 - DNA, 15 bp, Homo sapiens
gtaaaagaccttggg

SEQ ID NO: 401717 - DNA, 15 bp, Homo sapiens
agtaaaagaccttgg

SEQ ID NO: 401718 - DNA, 15 bp, Homo sapiens
cagtaaaagaccttg

SEQ ID NO: 401719 - DNA, 15 bp, Homo sapiens
gcagtaaaagacctt

SEQ ID NO: 401720 - DNA, 15 bp, Homo sapiens
agcagtaaaagacct

SEQ ID NO: 401721 - DNA, 15 bp, Homo sapiens
tagcagtaaaagacc

SEQ ID NO: 401722 - DNA, 15 bp, Homo sapiens
ctagcagtaaaagac

SEQ ID NO: 401723 - DNA, 15 bp, Homo sapiens
gctagcagtaaaaga

SEQ ID NO: 401724 - DNA, 15 bp, Homo sapiens
ggctagcagtaaaag

SEQ ID NO: 401725 - DNA, 15 bp, Homo sapiens
aggctagcagtaaaa

SEQ ID NO: 401726 - DNA, 15 bp, Homo sapiens
taggctagcagtaaa

SEQ ID NO: 401727 - DNA, 15 bp, Homo sapiens
ataggctagcagtaa

SEQ ID NO: 401728 - DNA, 15 bp, Homo sapiens
cataggctagcagta

SEQ ID NO: 401729 - DNA, 15 bp, Homo sapiens
gcataggctagcagt

SEQ ID NO: 401730 - DNA, 15 bp, Homo sapiens
agcataggctagcag

SEQ ID NO: 401731 - DNA, 15 bp, Homo sapiens
aagcataggctagca

SEQ ID NO: 401732 - DNA, 15 bp, Homo sapiens
gaagcataggctagc

SEQ ID NO: 401733 - DNA, 15 bp, Homo sapiens
agaagcataggctag

SEQ ID NO: 401734 - DNA, 15 bp, Homo sapiens
cagaagcataggcta

SEQ ID NO: 401735 - DNA, 15 bp, Homo sapiens
tcagaagcataggct

SEQ ID NO: 401736 - DNA, 15 bp, Homo sapiens
ttcagaagcataggc

SEQ ID NO: 401737 - DNA, 15 bp, Homo sapiens
attcagaagcatagg

SEQ ID NO: 401738 - DNA, 15 bp, Homo sapiens
cattcagaagcatag

SEQ ID NO: 401739 - DNA, 15 bp, Homo sapiens
acattcagaagcata

SEQ ID NO: 401740 - DNA, 15 bp, Homo sapiens
cacattcagaagcat

SEQ ID NO: 401741 - DNA, 15 bp, Homo sapiens
acacattcagaagca

SEQ ID NO: 401742 - DNA, 15 bp, Homo sapiens
cacacattcagaagc

SEQ ID NO: 401743 - DNA, 15 bp, Homo sapiens
tcacacattcagaag

SEQ ID NO: 401744 - DNA, 15 bp, Homo sapiens
ctcacacattcagaa

SEQ ID NO: 401745 - DNA, 15 bp, Homo sapiens
cctcacacattcaga

SEQ ID NO: 401746 - DNA, 15 bp, Homo sapiens
ccctcacacattcag

SEQ ID NO: 401747 - DNA, 15 bp, Homo sapiens
tccctcacacattca

SEQ ID NO: 401748 - DNA, 15 bp, Homo sapiens
atccctcacacattc

SEQ ID NO: 401749 - DNA, 15 bp, Homo sapiens
gatccctcacacatt

SEQ ID NO: 401750 - DNA, 15 bp, Homo sapiens
tgatccctcacacat

SEQ ID NO: 401751 - DNA, 15 bp, Homo sapiens
ttgatccctcacaca

SEQ ID NO: 401752 - DNA, 15 bp, Homo sapiens
tttgatccctcacac

SEQ ID NO: 401753 - DNA, 15 bp, Homo sapiens
atttgatccctcaca

SEQ ID NO: 401754 - DNA, 15 bp, Homo sapiens
catttgatccctcac

SEQ ID NO: 401755 - DNA, 15 bp, Homo sapiens
tcatttgatccctca

SEQ ID NO: 401756 - DNA, 15 bp, Homo sapiens
ctcatttgatccctc

SEQ ID NO: 401757 - DNA, 15 bp, Homo sapiens
tctcatttgatccct

SEQ ID NO: 401758 - DNA, 15 bp, Homo sapiens
gtctcatttgatccc

SEQ ID NO: 401759 - DNA, 15 bp, Homo sapiens
agtctcatttgatcc

SEQ ID NO: 401760 - DNA, 15 bp, Homo sapiens
aagtctcatttgatc

SEQ ID NO: 401761 - DNA, 15 bp, Homo sapiens
gaagtctcatttgat

SEQ ID NO: 401762 - DNA, 15 bp, Homo sapiens
ggaagtctcatttga

SEQ ID NO: 401763 - DNA, 15 bp, Homo sapiens
cggaagtctcatttg

SEQ ID NO: 401764 - DNA, 15 bp, Homo sapiens
tcggaagtctcattt

SEQ ID NO: 401765 - DNA, 15 bp, Homo sapiens
atcggaagtctcatt

SEQ ID NO: 401766 - DNA, 15 bp, Homo sapiens
aatcggaagtctcat

SEQ ID NO: 401767 - DNA, 15 bp, Homo sapiens
taatcggaagtctca

SEQ ID NO: 401768 - DNA, 15 bp, Homo sapiens
ataatcggaagtctc

SEQ ID NO: 401769 - DNA, 15 bp, Homo sapiens
tataatcggaagtct

SEQ ID NO: 401770 - DNA, 15 bp, Homo sapiens
atataatcggaagtc

SEQ ID NO: 401771 - DNA, 15 bp, Homo sapiens
catataatcggaagt

SEQ ID NO: 401772 - DNA, 15 bp, Homo sapiens
ccatataatcggaag

SEQ ID NO: 401773 - DNA, 15 bp, Homo sapiens
gccatataatcggaa

SEQ ID NO: 401774 - DNA, 15 bp, Homo sapiens
tgccatataatcgga

SEQ ID NO: 401775 - DNA, 15 bp, Homo sapiens
ttgccatataatcgg

SEQ ID NO: 401776 - DNA, 15 bp, Homo sapiens
tttgccatataatcg

SEQ ID NO: 401777 - DNA, 15 bp, Homo sapiens
atttgccatataatc

SEQ ID NO: 401778 - DNA, 15 bp, Homo sapiens
tatttgccatataat

SEQ ID NO: 401779 - DNA, 15 bp, Homo sapiens
ctatttgccatataa

SEQ ID NO: 401780 - DNA, 15 bp, Homo sapiens
gctatttgccatata

SEQ ID NO: 401781 - DNA, 15 bp, Homo sapiens
tgctatttgccatat

SEQ ID NO: 401782 - DNA, 15 bp, Homo sapiens
atgctatttgccata

SEQ ID NO: 401783 - DNA, 15 bp, Homo sapiens
gatgctatttgccat

SEQ ID NO: 401784 - DNA, 15 bp, Homo sapiens
tgatgctatttgcca

SEQ ID NO: 401785 - DNA, 15 bp, Homo sapiens
atgatgctatttgcc

SEQ ID NO: 401786 - DNA, 15 bp, Homo sapiens
gatgatgctatttgc

SEQ ID NO: 401787 - DNA, 15 bp, Homo sapiens
agatgatgctatttg

SEQ ID NO: 401788 - DNA, 15 bp, Homo sapiens
aagatgatgctattt

SEQ ID NO: 401789 - DNA, 15 bp, Homo sapiens
caagatgatgctatt

SEQ ID NO: 401790 - DNA, 15 bp, Homo sapiens
tcaagatgatgctat

SEQ ID NO: 401791 - DNA, 15 bp, Homo sapiens
ttcaagatgatgcta

SEQ ID NO: 401792 - DNA, 15 bp, Homo sapiens
attcaagatgatgct

SEQ ID NO: 401793 - DNA, 15 bp, Homo sapiens
aattcaagatgatgc

SEQ ID NO: 401794 - DNA, 15 bp, Homo sapiens
aaattcaagatgatg

SEQ ID NO: 401795 - DNA, 15 bp, Homo sapiens
aaaattcaagatgat

SEQ ID NO: 401796 - DNA, 15 bp, Homo sapiens
caaaattcaagatga

SEQ ID NO: 401797 - DNA, 15 bp, Homo sapiens
acaaaattcaagatg

SEQ ID NO: 401798 - DNA, 15 bp, Homo sapiens
cacaaaattcaagat

SEQ ID NO: 401799 - DNA, 15 bp, Homo sapiens
tcacaaaattcaaga

SEQ ID NO: 401800 - DNA, 15 bp, Homo sapiens
ttcacaaaattcaag

SEQ ID NO: 401801 - DNA, 15 bp, Homo sapiens
tttcacaaaattcaa

SEQ ID NO: 401802 - DNA, 15 bp, Homo sapiens
atttcacaaaattca

SEQ ID NO: 401803 - DNA, 15 bp, Homo sapiens
aatttcacaaaattc

SEQ ID NO: 401804 - DNA, 15 bp, Homo sapiens
taatttcacaaaatt

SEQ ID NO: 401805 - DNA, 15 bp, Homo sapiens
ataatttcacaaaat

SEQ ID NO: 401806 - DNA, 15 bp, Homo sapiens
aataatttcacaaaa

SEQ ID NO: 401807 - DNA, 15 bp, Homo sapiens
aaataatttcacaaa

SEQ ID NO: 401808 - DNA, 15 bp, Homo sapiens
gaaataatttcacaa

SEQ ID NO: 401809 - DNA, 15 bp, Homo sapiens
agaaataatttcaca

SEQ ID NO: 401810 - DNA, 15 bp, Homo sapiens
cagaaataatttcac

SEQ ID NO: 401811 - DNA, 15 bp, Homo sapiens
ccagaaataatttca

SEQ ID NO: 401812 - DNA, 15 bp, Homo sapiens
tccagaaataatttc

SEQ ID NO: 401813 - DNA, 15 bp, Homo sapiens
atccagaaataattt

SEQ ID NO: 401814 - DNA, 15 bp, Homo sapiens
tatccagaaataatt

SEQ ID NO: 401815 - DNA, 15 bp, Homo sapiens
ctatccagaaataat

SEQ ID NO: 401816 - DNA, 15 bp, Homo sapiens
cctatccagaaataa

SEQ ID NO: 401817 - DNA, 15 bp, Homo sapiens
tcctatccagaaata

SEQ ID NO: 401818 - DNA, 15 bp, Homo sapiens
atcctatccagaaat

SEQ ID NO: 401819 - DNA, 15 bp, Homo sapiens
aatcctatccagaaa

SEQ ID NO: 401820 - DNA, 15 bp, Homo sapiens
taatcctatccagaa

SEQ ID NO: 401821 - DNA, 15 bp, Homo sapiens
ttaatcctatccaga

SEQ ID NO: 401822 - DNA, 15 bp, Homo sapiens
tttaatcctatccag

SEQ ID NO: 401823 - DNA, 15 bp, Homo sapiens
atttaatcctatcca

SEQ ID NO: 401824 - DNA, 15 bp, Homo sapiens
gatttaatcctatcc

SEQ ID NO: 401825 - DNA, 15 bp, Homo sapiens
ggatttaatcctatc

SEQ ID NO: 401826 - DNA, 15 bp, Homo sapiens
tggatttaatcctat

SEQ ID NO: 401827 - DNA, 15 bp, Homo sapiens
ctggatttaatccta

SEQ ID NO: 401828 - DNA, 15 bp, Homo sapiens
actggatttaatcct

SEQ ID NO: 401829 - DNA, 15 bp, Homo sapiens
tactggatttaatcc

SEQ ID NO: 401830 - DNA, 15 bp, Homo sapiens
atactggatttaatc

SEQ ID NO: 401831 - DNA, 15 bp, Homo sapiens
gatactggatttaat

SEQ ID NO: 401832 - DNA, 15 bp, Homo sapiens
agatactggatttaa

SEQ ID NO: 401833 - DNA, 15 bp, Homo sapiens
cagatactggattta

SEQ ID NO: 401834 - DNA, 15 bp, Homo sapiens
tcagatactggattt

SEQ ID NO: 401835 - DNA, 15 bp, Homo sapiens
gtcagatactggatt

SEQ ID NO: 401836 - DNA, 15 bp, Homo sapiens
tgtcagatactggat

SEQ ID NO: 401837 - DNA, 15 bp, Homo sapiens
atgtcagatactgga

SEQ ID NO: 401838 - DNA, 15 bp, Homo sapiens
aatgtcagatactgg

SEQ ID NO: 401839 - DNA, 15 bp, Homo sapiens
taatgtcagatactg

SEQ ID NO: 401840 - DNA, 15 bp, Homo sapiens
ataatgtcagatact

SEQ ID NO: 401841 - DNA, 15 bp, Homo sapiens
cataatgtcagatac

SEQ ID NO: 401842 - DNA, 15 bp, Homo sapiens
ccataatgtcagata

SEQ ID NO: 401843 - DNA, 15 bp, Homo sapiens
accataatgtcagat

SEQ ID NO: 401844 - DNA, 15 bp, Homo sapiens
aaccataatgtcaga

SEQ ID NO: 401845 - DNA, 15 bp, Homo sapiens
aaaccataatgtcag

SEQ ID NO: 401846 - DNA, 15 bp, Homo sapiens
taaaccataatgtca

SEQ ID NO: 401847 - DNA, 15 bp, Homo sapiens
ctaaaccataatgtc

SEQ ID NO: 401848 - DNA, 15 bp, Homo sapiens
gctaaaccataatgt

SEQ ID NO: 401849 - DNA, 15 bp, Homo sapiens
agctaaaccataatg

SEQ ID NO: 401850 - DNA, 15 bp, Homo sapiens
gagctaaaccataat

SEQ ID NO: 401851 - DNA, 15 bp, Homo sapiens
tgagctaaaccataa

SEQ ID NO: 401852 - DNA, 15 bp, Homo sapiens
atgagctaaaccata

SEQ ID NO: 401853 - DNA, 15 bp, Homo sapiens
gatgagctaaaccat

SEQ ID NO: 401854 - DNA, 15 bp, Homo sapiens
cgatgagctaaacca

SEQ ID NO: 401855 - DNA, 15 bp, Homo sapiens
gcgatgagctaaacc

SEQ ID NO: 401856 - DNA, 15 bp, Homo sapiens
agcgatgagctaaac

SEQ ID NO: 401857 - DNA, 15 bp, Homo sapiens
aagcgatgagctaaa

SEQ ID NO: 401858 - DNA, 15 bp, Homo sapiens
gaagcgatgagctaa

SEQ ID NO: 401859 - DNA, 15 bp, Homo sapiens
ggaagcgatgagcta

SEQ ID NO: 401860 - DNA, 15 bp, Homo sapiens
gggaagcgatgagct

SEQ ID NO: 401861 - DNA, 15 bp, Homo sapiens
tgggaagcgatgagc

SEQ ID NO: 401862 - DNA, 15 bp, Homo sapiens
ttgggaagcgatgag

SEQ ID NO: 401863 - DNA, 15 bp, Homo sapiens
gttgggaagcgatga

SEQ ID NO: 401864 - DNA, 15 bp, Homo sapiens
ggttgggaagcgatg

SEQ ID NO: 401865 - DNA, 15 bp, Homo sapiens
aggttgggaagcgat

SEQ ID NO: 401866 - DNA, 15 bp, Homo sapiens
caggttgggaagcga

SEQ ID NO: 401867 - DNA, 15 bp, Homo sapiens
acaggttgggaagcg

SEQ ID NO: 401868 - DNA, 15 bp, Homo sapiens
tacaggttgggaagc

SEQ ID NO: 401869 - DNA, 15 bp, Homo sapiens
ttacaggttgggaag

SEQ ID NO: 401870 - DNA, 15 bp, Homo sapiens
cttacaggttgggaa

SEQ ID NO: 401871 - DNA, 15 bp, Homo sapiens
gcttacaggttggga

SEQ ID NO: 401872 - DNA, 15 bp, Homo sapiens
agcttacaggttggg

SEQ ID NO: 401873 - DNA, 15 bp, Homo sapiens
gagcttacaggttgg

SEQ ID NO: 401874 - DNA, 15 bp, Homo sapiens
agagcttacaggttg

SEQ ID NO: 401875 - DNA, 15 bp, Homo sapiens
gagagcttacaggtt

SEQ ID NO: 401876 - DNA, 15 bp, Homo sapiens
agagagcttacaggt

SEQ ID NO: 401877 - DNA, 15 bp, Homo sapiens
aagagagcttacagg

SEQ ID NO: 401878 - DNA, 15 bp, Homo sapiens
gaagagagcttacag

SEQ ID NO: 401879 - DNA, 15 bp, Homo sapiens
agaagagagcttaca

SEQ ID NO: 401880 - DNA, 15 bp, Homo sapiens
gagaagagagcttac

SEQ ID NO: 401881 - DNA, 15 bp, Homo sapiens
tgagaagagagctta

SEQ ID NO: 401882 - DNA, 15 bp, Homo sapiens
ttgagaagagagctt

SEQ ID NO: 401883 - DNA, 15 bp, Homo sapiens
attgagaagagagct

SEQ ID NO: 401884 - DNA, 15 bp, Homo sapiens
cattgagaagagagc

SEQ ID NO: 401885 - DNA, 15 bp, Homo sapiens
ccattgagaagagag

SEQ ID NO: 401886 - DNA, 15 bp, Homo sapiens
gccattgagaagaga

SEQ ID NO: 401887 - DNA, 15 bp, Homo sapiens
ggccattgagaagag

SEQ ID NO: 401888 - DNA, 15 bp, Homo sapiens
tggccattgagaaga

SEQ ID NO: 401889 - DNA, 15 bp, Homo sapiens
ctggccattgagaag

SEQ ID NO: 401890 - DNA, 15 bp, Homo sapiens
actggccattgagaa

SEQ ID NO: 401891 - DNA, 15 bp, Homo sapiens
cactggccattgaga

SEQ ID NO: 401892 - DNA, 15 bp, Homo sapiens
ccactggccattgag

SEQ ID NO: 401893 - DNA, 15 bp, Homo sapiens
tccactggccattga

SEQ ID NO: 401894 - DNA, 15 bp, Homo sapiens
atccactggccattg

SEQ ID NO: 401895 - DNA, 15 bp, Homo sapiens
catccactggccatt

SEQ ID NO: 401896 - DNA, 15 bp, Homo sapiens
gcatccactggccat

SEQ ID NO: 401897 - DNA, 15 bp, Homo sapiens
agcatccactggcca

SEQ ID NO: 401898 - DNA, 15 bp, Homo sapiens
aagcatccactggcc

SEQ ID NO: 401899 - DNA, 15 bp, Homo sapiens
aaagcatccactggc

SEQ ID NO: 401900 - DNA, 15 bp, Homo sapiens
caaagcatccactgg

SEQ ID NO: 401901 - DNA, 15 bp, Homo sapiens
ccaaagcatccactg

SEQ ID NO: 401902 - DNA, 15 bp, Homo sapiens
cccaaagcatccact

SEQ ID NO: 401903 - DNA, 15 bp, Homo sapiens
tcccaaagcatccac

SEQ ID NO: 401904 - DNA, 15 bp, Homo sapiens
ttcccaaagcatcca

SEQ ID NO: 401905 - DNA, 15 bp, Homo sapiens
tttcccaaagcatcc

SEQ ID NO: 401906 - DNA, 15 bp, Homo sapiens
atttcccaaagcatc

SEQ ID NO: 401907 - DNA, 15 bp, Homo sapiens
tatttcccaaagcat

SEQ ID NO: 401908 - DNA, 15 bp, Homo sapiens
ttatttcccaaagca

SEQ ID NO: 401909 - DNA, 15 bp, Homo sapiens
attatttcccaaagc

SEQ ID NO: 401910 - DNA, 15 bp, Homo sapiens
aattatttcccaaag

SEQ ID NO: 401911 - DNA, 15 bp, Homo sapiens
aaattatttcccaaa

SEQ ID NO: 401912 - DNA, 15 bp, Homo sapiens
taaattatttcccaa

SEQ ID NO: 401913 - DNA, 15 bp, Homo sapiens
ttaaattatttccca

SEQ ID NO: 401914 - DNA, 15 bp, Homo sapiens
tttaaattatttccc

SEQ ID NO: 401915 - DNA, 15 bp, Homo sapiens
atttaaattatttcc

SEQ ID NO: 401916 - DNA, 15 bp, Homo sapiens
gatttaaattatttc

SEQ ID NO: 401917 - DNA, 15 bp, Homo sapiens
agatttaaattattt

SEQ ID NO: 401918 - DNA, 15 bp, Homo sapiens
cagatttaaattatt

SEQ ID NO: 401919 - DNA, 15 bp, Homo sapiens
gcagatttaaattat

SEQ ID NO: 401920 - DNA, 15 bp, Homo sapiens
cgcagatttaaatta

SEQ ID NO: 401921 - DNA, 15 bp, Homo sapiens
ccgcagatttaaatt

SEQ ID NO: 401922 - DNA, 15 bp, Homo sapiens
accgcagatttaaat

SEQ ID NO: 401923 - DNA, 15 bp, Homo sapiens
caccgcagatttaaa

SEQ ID NO: 401924 - DNA, 15 bp, Homo sapiens
tcaccgcagatttaa

SEQ ID NO: 401925 - DNA, 15 bp, Homo sapiens
ttcaccgcagattta

SEQ ID NO: 401926 - DNA, 15 bp, Homo sapiens
tttcaccgcagattt

SEQ ID NO: 401927 - DNA, 15 bp, Homo sapiens
atttcaccgcagatt

SEQ ID NO: 401928 - DNA, 15 bp, Homo sapiens
tatttcaccgcagat

SEQ ID NO: 401929 - DNA, 15 bp, Homo sapiens
ttatttcaccgcaga

SEQ ID NO: 401930 - DNA, 15 bp, Homo sapiens
attatttcaccgcag

SEQ ID NO: 401931 - DNA, 15 bp, Homo sapiens
aattatttcaccgca

SEQ ID NO: 401932 - DNA, 15 bp, Homo sapiens
caattatttcaccgc

SEQ ID NO: 401933 - DNA, 15 bp, Homo sapiens
ccaattatttcaccg

SEQ ID NO: 401934 - DNA, 15 bp, Homo sapiens
accaattatttcacc

SEQ ID NO: 401935 - DNA, 15 bp, Homo sapiens
gaccaattatttcac

SEQ ID NO: 401936 - DNA, 15 bp, Homo sapiens
ggaccaattatttca

SEQ ID NO: 401937 - DNA, 15 bp, Homo sapiens
tggaccaattatttc

SEQ ID NO: 401938 - DNA, 15 bp, Homo sapiens
ctggaccaattattt

SEQ ID NO: 401939 - DNA, 15 bp, Homo sapiens
tctggaccaattatt

SEQ ID NO: 401940 - DNA, 15 bp, Homo sapiens
atctggaccaattat

SEQ ID NO: 401941 - DNA, 15 bp, Homo sapiens
tatctggaccaatta

SEQ ID NO: 401942 - DNA, 15 bp, Homo sapiens
ttatctggaccaatt

SEQ ID NO: 401943 - DNA, 15 bp, Homo sapiens
attatctggaccaat

SEQ ID NO: 401944 - DNA, 15 bp, Homo sapiens
aattatctggaccaa

SEQ ID NO: 401945 - DNA, 15 bp, Homo sapiens
caattatctggacca

SEQ ID NO: 401946 - DNA, 15 bp, Homo sapiens
acaattatctggacc

SEQ ID NO: 401947 - DNA, 15 bp, Homo sapiens
cacaattatctggac

SEQ ID NO: 401948 - DNA, 15 bp, Homo sapiens
gcacaattatctgga

SEQ ID NO: 401949 - DNA, 15 bp, Homo sapiens
agcacaattatctgg

SEQ ID NO: 401950 - DNA, 15 bp, Homo sapiens
gagcacaattatctg

SEQ ID NO: 401951 - DNA, 15 bp, Homo sapiens
tgagcacaattatct

SEQ ID NO: 401952 - DNA, 15 bp, Homo sapiens
ctgagcacaattatc

SEQ ID NO: 401953 - DNA, 15 bp, Homo sapiens
actgagcacaattat

SEQ ID NO: 401954 - DNA, 15 bp, Homo sapiens
cactgagcacaatta

SEQ ID NO: 401955 - DNA, 15 bp, Homo sapiens
acactgagcacaatt

SEQ ID NO: 401956 - DNA, 15 bp, Homo sapiens
cacactgagcacaat

SEQ ID NO: 401957 - DNA, 15 bp, Homo sapiens
acacactgagcacaa

SEQ ID NO: 401958 - DNA, 15 bp, Homo sapiens
cacacactgagcaca

SEQ ID NO: 401959 - DNA, 15 bp, Homo sapiens
ccacacactgagcac

SEQ ID NO: 401960 - DNA, 15 bp, Homo sapiens
tccacacactgagca

SEQ ID NO: 401961 - DNA, 15 bp, Homo sapiens
ctccacacactgagc

SEQ ID NO: 401962 - DNA, 15 bp, Homo sapiens
tctccacacactgag

SEQ ID NO: 401963 - DNA, 15 bp, Homo sapiens
atctccacacactga

SEQ ID NO: 401964 - DNA, 15 bp, Homo sapiens
catctccacacactg

SEQ ID NO: 401965 - DNA, 15 bp, Homo sapiens
acatctccacacact

SEQ ID NO: 401966 - DNA, 15 bp, Homo sapiens
aacatctccacacac

SEQ ID NO: 401967 - DNA, 15 bp, Homo sapiens
caacatctccacaca

SEQ ID NO: 401968 - DNA, 15 bp, Homo sapiens
tcaacatctccacac

SEQ ID NO: 401969 - DNA, 15 bp, Homo sapiens
atcaacatctccaca

SEQ ID NO: 401970 - DNA, 15 bp, Homo sapiens
catcaacatctccac

SEQ ID NO: 401971 - DNA, 15 bp, Homo sapiens
tcatcaacatctcca

SEQ ID NO: 401972 - DNA, 15 bp, Homo sapiens
atcatcaacatctcc

SEQ ID NO: 401973 - DNA, 15 bp, Homo sapiens
aatcatcaacatctc

SEQ ID NO: 401974 - DNA, 15 bp, Homo sapiens
caatcatcaacatct

SEQ ID NO: 401975 - DNA, 15 bp, Homo sapiens
tcaatcatcaacatc

SEQ ID NO: 401976 - DNA, 15 bp, Homo sapiens
atcaatcatcaacat

SEQ ID NO: 401977 - DNA, 15 bp, Homo sapiens
tatcaatcatcaaca

SEQ ID NO: 401978 - DNA, 15 bp, Homo sapiens
atatcaatcatcaac

SEQ ID NO: 401979 - DNA, 15 bp, Homo sapiens
gatatcaatcatcaa

SEQ ID NO: 401980 - DNA, 15 bp, Homo sapiens
agatatcaatcatca

SEQ ID NO: 401981 - DNA, 15 bp, Homo sapiens
aagatatcaatcatc

SEQ ID NO: 401982 - DNA, 15 bp, Homo sapiens
caagatatcaatcat

SEQ ID NO: 401983 - DNA, 15 bp, Homo sapiens
tcaagatatcaatca

SEQ ID NO: 401984 - DNA, 15 bp, Homo sapiens
atcaagatatcaatc

SEQ ID NO: 401985 - DNA, 15 bp, Homo sapiens
tatcaagatatcaat
